(19) United States
(12) Patent Application Publication
(10) Pub. No.: US 2024/0271134 A1
(43) Pub. Date: Aug. 15, 2024

(54) OLIGONUCLEOTIDES AND COMPOSITIONS THEREOF FOR NEUROMUSCULAR DISORDERS

(71) Applicant: MIRECULE, INC., Gaithersburg, MD (US)

(72) Inventors: Anthony SALEH, Gaithersburg, MD (US); Grant BELGARD, Sanford, FL (US); Marton MUNZ, Barcelona (ES); Charles MARUSAK, Gaithersburg, MD (US); Robert PLACE, Gaithersburg, MD (US)

(21) Appl. No.: 18/411,650

(22) Filed: Jan. 12, 2024

Related U.S. Application Data
(63) Continuation of application No. PCT/US2022/073754, filed on Jul. 14, 2022.
(60) Provisional application No. 63/221,568, filed on Jul. 14, 2021.

(51) Int. Cl. C12N 15/113

(52) U.S. Cl. CPC C12N 15/113; C12N 2310/11; C12N 2310/321; C12N 2310/322; C12N 2310/3231; C12N 2310/3513

(57) ABSTRACT

Disclosed herein are engineered DUX4-targeting oligonucleotides for selective inhibition of RNA transcripts associated with a neuromuscular disease such as facioscapulohumeral muscular dystrophy. Also disclosed are vectors containing any of these, pharmaceutical formulations containing any of the these, and kits containing any of the these. Also disclosed herein are methods of selectively inhibiting polypeptide expression and activity by contacting a DUX4-targeting oligonucleotide with an RNA transcript associated with a neuromuscular disease such as facioscapulohumeral muscular dystrophy.

### CROSS-REFERENCE TO RELATED APPLICATIONS

[0001] This application is a continuation of International Patent Application No. PCT/US2022/073754, filed Jul. 14, 2022, which claims the benefit of U.S. Provisional Application No. 63/221,568, filed Jul. 14, 2021, the disclosures of which are incorporated herein by reference in their entirety.

### SEQUENCE LISTING

[0002] The instant application contains a Sequence Listing which has been submitted electronically in XML format and is hereby incorporated by reference in its entirety. Said XML file, created on Nov. 6, 2023, is named MRC-0004PCT_FINAL_11-6-2023 Corrected.xml and is 37,113,138 bytes in size.

### INCORPORATION BY REFERENCE

[0003] All publications, patents, and patent applications mentioned in this specification are herein incorporated by reference to the same extent as if each individual publication, patent, or patent application was specifically and individually indicated to be incorporated by reference. To the extent publications and patents or patent applications incorporated by reference contradict the disclosure contained in the specification, the specification is intended to supersede and/or take precedence over any such contradictory material.

### SUMMARY

[0004] Certain aspects of this disclosure pertain to nn engineered DUX4-targeting oligonucleotide that is from about 15 to about 25 nucleotides in length, wherein the engineered DUX4-targeting oligonucleotide comprises at least about: 80%, 85%, 90%, or 95% sequence identity to any one of SEQ. ID. NOs: 20,962-42,138. Further, the engineered DUX4-targeting oligonucleotide may be about from about 15 to about 25 nucleotides in length, may comprise at least about 80%, 85%, 90%, or 95% sequence identity to any one of SEQ. ID. NOs: 42,006-42,138.

[0005] In certain instances, the engineered DUX4-targeting oligonucleotide of wherein the engineered DUX4-targeting oligonucleotide comprises a DNA nucleotide and an RNA nucleotide. In some cases, this oligonucleotide comprises a DNA nucleotide. In some cases, the oligonucleotide comprises an RNA nucleotide. In certain instances, the oligonucleotide is small interfering RNA (siRNA), a MicroRNA (miRNA), a small nuclear RNA (snRNA), a U spliceosomal RNA (U-RNA), a Small nucleolar RNA (snoRNA), a Piwi-interacting RNA (piRNA), a repeat associated small interfering RNA (rasiRNA), a small rDNA-derived RNA (srRNA), a transfer RNA derived small RNA (tsRNA), a ribosomal RNA derived small RNA (rsRNA), a large non-coding RNA derived small RNA (lncsRNA), or a messenger RNA derived small RNA (msRNA). An oligonucleotide as described above may, in certain cases, comprise at least one locked nucleic acid nucleobase.

[0006] The DUX4-targeting oligonucleotide as described above may, bind to the DUX4 coding sequence in an aqueous solution with a predicted melting temperature (Tm) from about 45 to about 65 degrees Celsius wherein the aqueous solution has a pH ranging of from about 7.2 to about 7.6.

[0007] Another aspect of this disclosure is a conjugate of a i) DUX4-targeting oligonucleotide as described above wherein the conjugate comprises the oligonucleotide and an antibody, an antibody fragment, a single monomeric variable antibody domain, a naturally occurring ligand, a small molecule, or a peptide; and optionally iii) a linker that links i) to ii).

[0008] Another aspect of the disclosure pertains to a vector containing or encoding the conjugate as described herein or an oligonucleotide as described herein. In certain cases, the vector may comprise a viral vector, a nanoparticle vector, a liposomal vector, an exosomal vector, an extracellular vesicle vector, or a combination thereof. The vector may be the liposomal vector. The vector may be the nanoparticle vector. The vector may be the exosomal vector. The vector may be the extracellular vector.

[0009] Another aspect of this disclosure pertains to a pharmaceutical composition comprising the engineered DUX4-targeting oligonucleotide of described herein, the conjugate of described herein, a vector as described herein vector of any one of claims 10 to 15, and a pharmaceutically acceptable: excipient, diluent, carrier, or a combination thereof. In certain cases, the pharmaceutically acceptable excipient comprises a buffering agent, a stabilizer, an antioxidant, a diluent, or any combinations thereof. In certain instances, the pharmaceutically acceptable diluent comprises distilled water, deionized water, physiological saline, Ringer's solutions, dextrose solution, a cell growth medium, phosphate buffered saline (PBS), or any combination thereof. The pharmaceutical compositions described herein can be in unit dose form.

[0010] Another aspect of this disclosure pertains to a kit comprising the engineered DUX4-targeting oligonucleotide as described herein, the conjugate as described herein, the vector as described herein, or the pharmaceutical composition as described herein and a container. In certain cases, the container may comprise a jar, an ampule, a syringe, a bag, a box, or a combination thereof.

[0011] Another aspect of this disclosure is a method of treating a disease or condition in a subject comprising administering to the subject a therapeutically effective amount the pharmaceutical composition as described herein. The disease or condition is a DUX4 mediated disease or condition. The DUX4 mediated disease or condition is facioscapulohumeral muscular dystrophy. The subject may be a subject is in need thereof. The subject may be a human subject in need thereof.

[0012] In the method, the administering is in an amount of from about 0.001 mg to about 10,000 mg of the pharmaceutical formulation per kg of body weight of the subject. The administering can be oral, intranasal, rectally, topically, intraocular, intramuscular, intravenous, intraperitoneal, intracardial, subcutaneous, intracranial, intrathecal, or any combination thereof.

[0013] The method can use the pharmaceutical composition wherein the pharmaceutical composition a liquid dosage form that is administered at a volume of: about 1 ml to about 5 ml, about 5 ml to 10 ml, about 15 ml to about 20 ml, about 25 ml to about 30 ml, about 30 ml to about 50 ml, about 50 ml to about 100 ml, about 100 ml to 150 ml, about 150 ml to about 200 ml, about 200 ml to about 250 ml, about 250 ml to about 300 ml, about 300 ml to about 350 ml, about 350 ml to about 400 ml, about 400 ml to about 450 ml, about 450 ml to 500 ml, about 500 ml to 750 ml, or about 750 ml to 1000 ml. In certain cases, the pharmaceutical composition is in a liquid dosage form, a solid dosage form, an inhalable dosage form, an intranasal dosage form, a liposomal formulation, in the form of a pill, in the form of a capsule, or any combinations thereof.

[0014] In certain instances, the administration comprises systemic or local administration. The systemic may be administration, wherein the systemic administration comprises at least one of: a parenteral administration, intravenous administration, subcutaneous administration, intrathecal administration, intraperitoneal administration, intramuscular administration, intravascular administration, infusion, oral administration, inhalation administration, intraduodenal administration, rectal administration, or any combination thereof.

[0015] In certain cases, the method further comprises concurrently or consecutively administering a co-therapy.

[0016] Another aspect of the disclosure concerns a method of administering the engineered DUX-4 targeting oligonucleotide of described herein, wherein after the administering, the engineered DUX-4 targeting oligonucleotide selectively hybridizes to two different endogenous disease related RNAs wherein one of the two different endogenous disease related RNAs is a DUX4 RNA transcribed from a first genetic loci and one of the two different endogenous disease related RNAs is transcribed from a different genetic loci than the first genetic loci. Still further, in certain cases, the engineered DUX4-targeting oligonucleotide hybridizes to the endogenous disease related RNA that is transcribed from a different genetic loci than the first genetic loci, such that at least 10 continuous oligonucleotides of the engineered DUX4-targeted oligonucleotide hybridize at least two different contiguous sections of contiguous bases that are interrupted by at least one nucleobase. This method can be a method of treating a disease or condition which is a DUX4 mediated disease or condition. The disease or condition can be facioscapulohumeral muscular dystrophy. Upon hybridization between the engineered DUX4-targeting oligonucleotide and the second RNA, the predicted thermal melting point can be about 40 degrees Celsius to about 65 degrees Celsius.

[0017] Another aspect of this disclosure is a composition for use in treating a neuromuscular disease comprising an engineered DUX4-targeting oligonucleotide as described herein, a conjugate of as described herein, a vector as described herein, a pharmaceutical composition as described herein and a pharmaceutically acceptable: excipient, diluent, or carrier. The composition can be for use wherein the neuromuscular disease is facioscapulohumeral muscular dystrophy.

### DESCRIPTION OF THE DRAWINGS

[0018] FIG. 1 shows genetic modifications that lead to FSHD.

[0019] FIG. 2 shows alternately spliced DUX4 transcripts originating from D4Z4 regions.

[0020] FIG. 3 shows a schematic of the read coverage from RNA-Seq data of alternately spliced DUX4 transcripts from FSHD and Healthy muscle biopsy tissue.

[0021] FIG. 4 shows a schematic of the read coverage from RNA-Seq data of alternately spliced DUX4 transcripts from the Testis.

[0022] FIG. 5 shows the serum stability of chemically modified anti-DUX4 ASOs relative to unmodified oligos.

[0023] FIGS. 6A-B depict reduction in innate stimulation. FIG. 6A depicts reductions in innate IFNα and TNFα production after exposure of PBMCs to engineered anti-DUX4 ASOs. FIG. 6B depicts reductions in innate immunostimulation for engineered DUX4 ASOs through the Raw-blue cell assay.

[0024] FIG. 7 show a DUX4 ASO HTS Assay Design with stable human or mouse myoblasts expressing eGFP with the coding sequence for DUX4 in the 3′ UTR.

[0025] FIGS. 8A-B shows knockdown of DUX4 mRNA. FIG. 8A shows therapeutic ASOs have strong knockdown of DUX4 in FSHD myotubes. FIG. 8B shows knockdown of DUX4 and DUX4 induced genes ZSCAN4 and SLC34A2 in FSHD myotubes.

[0026] FIG. 9 shows simultaneous knockdown of DUX4 and DBET RNA transcripts in FSHD patient myoblasts by multi-targeted ASOs.

[0027] FIG. 10 shows a schematic overview of data analytics to identify FSHD related genes and pathways.

[0028] FIG. 11 shows expression of genes representing six FSHD relevant biological functions separated by horizontal gaps (top to bottom): DUX4-regulated, extracellular matrix, cell cycle, immune/inflammatory response, immunoglobulin and muscle development-related

[0029] FIGS. 12A-B show exemplary pathways for potential effects by identified co-targets. FIG. 12A shows pathway regulations of Ki-67 in cellular proliferation from Xie et al. (18). FIG. 12B shows induction of IRF5 in inflammatory signaling from Elkon et al. (19).

[0030] FIG. 13 shows IRF5 and MKI67 RNA expression in patient biopsy samples.

[0031] FIGS. 14A-B shows validation of co-targeted transcripts by multi-targeting ASOs. FIG. 14A shows myoblasts after treatment with ASOs. FIG. 14B shows qRT-PCT results from RNA (DUX4, DBET, IRF5, and MKI67) obtained from the myoblasts treated with ASOs.

[0032] FIG. 15 is a diagram showing a method and system as disclosed herein.

[0033] FIG. 16 shows a computer control system that is programmed to analyze genetic material.

### DETAILED DESCRIPTION

### Overview

[0034] Facioscapulohumeral muscular dystrophy (FSHD) is the third most common form of Muscular Dystrophy (MD) with roughly 40,000 patients presenting with symptoms in the US (1, 2). FSHD Type 1 (FSHD1), which accounts for 95% of all FSHD patients, is the result of a reduction in the number of D4Z4 repeats on chromosome 4q35 from around 100 to less than 11 (3). FSHD Type 2 (SHD2) is the result of a loss of function mutation in the epigenetic factor, Structural Maintenance of Chromosomes flexible Hinge Domain containing 1 (SMCHD1) (3) (FIG. 1). Both inherited mutations result in the hypomethylation of the D4Z4 region which allows for inappropriate expression of double homeobox 4 protein (DUX4) gene encoded within D4Z4. The aberrant expression of DUX4 is severely toxic to muscle tissues, resulting in oxidative stress and apoptosis of muscle cells degrading muscle function (4, 5). FSHD results in progressive weakness in the muscles of the face, shoulders, arms, abdomen, and legs. About 20% of patients are eventually wheelchair-bound (6). When only 1-3 D4Z4 repeats remain, a much more severe and rapidly progressing disorder results (7), with often pediatric-onset (8) and hearing and vision loss (9). Broad scientific consensus exists in the field that if DUX4 expression could be eliminated in muscle tissue, progression of FSHD1 and 2 could be halted (10-12). Several studies have shown that RNA oligonucleotide therapeutics have the potential to directly repress DUX4, reversing muscle pathology in vitro and in mouse models (13-16). However, conservation of the complementary binding site of DUX4 targeted oligonucleotide therapeutics is still a problem.

[0035] Oligonucleotide therapeutics (ONT) designed to treat any disorder will be most effective at regulating the targeted transcript if it is perfectly complementary to the target RNA binding site in the disease transcript. In addition, the targeted binding sequence should have low variance between patients with this disorder. Otherwise, patients that have a SNP or mutation in the sequence of the disease gene at the target binding site may not be perfectly complementary with the therapeutic oligonucleotide resulting in less than complete silencing of the disease gene by the ONT. The instant application is the first to solve the problem of determining conserved variant sequences within the DUX4 gene/exons, to identify RNA therapeutics that target clinically significant DUX4 variants, and to generate RNA therapeutics with superior structural modifications for efficacy and stability.

[0036] Normally sequence databases including hundreds to thousands of individuals are used to select highly conserved binding sites for oligonucleotide therapeutics (ONTs) (20). However, these databases cannot be used to accurately predict variance in the DUX4 gene. The challenge is to find conserved therapeutic targets of DUX4. Disclosed herein is the solution and generation and validation of DUX4-targeting oligonucleotides. Most public sequence databases utilize DNA fragment sequencing technologies to efficiently and cheaply collect sequence data from populations. This involves fragmentation of long genomic DNA into pieces a few hundred bases in length that are cloned amplified and sequenced. Individual fragments are then mapped to a larger known reference genomic sequence. This technology is known to not be effective at accurately distinguishing or mapping repetitive sequences (21).

[0037] The coding regions of the DUX4 gene reside in each D4Z4 repeat on chromosome 4. DNA from a normal individual contains 11-200 copies of D4Z4 on each chromosome 4 (12). In addition. DUX4-containing D4Z4 repeats are found on chromosome 10. However, deletion of D4Z4 repeats on chromosome 10 are not associated with development of facioscapulohumeral muscular dystrophy (FSHD) due to lack of downstream exons 3-5 in the DUX4 coding sequence. Thus, sequence variability found in the chromosome 10 DUX4 coding sequences would not be relevant for design of ONTs. Further. D4Z4 pseudogenes are also found throughout the human genome (22) and significant sequence overlap occurs between DUX4 sequences in D4Z4 and other repetitive DNA sequences encoding DUX family members DUX1-DUX5 (23). This genomic complexity leads to poor mapping of sequenced DNA fragments that overlap with D4Z4 repeats, with little confidence in which genomic loci they originate from. In predicting variation in the DUX4 coding sequence in FSHD patients this creates a problem whereby there is little confidence that the sequence data and that the listed variation can accurately predict conserved sequences in DUX4, as much of the data is contaminated with sequence variation from other genomic locations that do not relate to the disease-causing, shortened D4Z4 repeat array located on one copy of an FSHD patient's chromosome 4. One logical solution would be to use RNA sequence data from muscle biopsies of FSHD patients. As shown in Example 1, this approach does not result in sufficient data to allow for prediction of variability in the DUX4 coding sequence.

[0038] This disclosure is the first to solve the problem of determining conserved variant sequences within the DUX4 gene/exons, to identify ONT therapeutics that target clinically significant DUX4 variants, and to generate ONT therapeutics with superior structural modifications for efficacy and stability.

[0039] Disclosed herein are sequences representing all regions of the DUX4 coding sequence that are >85% conserved among 206 subjects (Table 4). To identify these regions, the inventors made the surprising discovery, as shown in Example 3, that sufficient read counts could be identified in RNA-seq data by combining RNA-seq data from muscle biopsies for patients into a combined databased with RNA-seq from testis samples. While it is known in the art that low level DUX4 expression is observed in gamete cells in the testis (24), one of skill in the art would not have expected be able to predict DUX4 disease transcript variance from testis RNA sequence as it has been reported that the DUX4 transcript expressed in the testis are differentially spliced and lack regions of exon1, exon2, and exon3 which are included in the muscle specific transcripts for DUX4 that are predicted to cause disease (25) (FIG. 2). By combining the RNA-seq data from these two tissues into a single dataset we were able to generate sufficient read coverage across the entire DUX4 disease gene to predict regions that are greater than 85% conserved and would be able to effectively treat most patients.

[0040] Antisense Oligonucleotides (ASOs) that are dependent on RNase H for cleavage and subsequent degradation of complementary RNA, can and do silence many RNAs besides the intended RNA target(26, 27). These non-target RNAs are often referred to as off-target effects. For gapmer ASOs this occurs when the DNA portion of the oligonucleotide causes degradation of unintended RNA off-targets by binding to partially complementary target site and inducing RNAse H cleavage. Careful sequence analysis can identify many of these potential interactions. However, simple sequence alignment does not often accurately predict a real off-target interaction. The inventors have developed a data analysis pipeline to predict and track off-target effects for RNA therapeutics that considers structural motif and binding energy as well to improve predictions (WO2021203043).

[0041] The general practice in the field is to avoid off-target effects as much as possible in oligonucleotide design. The novel approach described herein is instead to take a global look at off-targets. The inventors first look for those that would be potentially harmful and cause toxicity by filtering predicted targets through toxicity databases such as Toxnet and Ingenuity Pathway Analysis (IPA). The inventors also consider off-targets that may be related to disease pathways through analysis of transcriptomic profiles of muscle biopsies from FSHD patients, by looking for genes that are significantly overexpressed in subsets, or related to known disease pathways such as inflammation, muscle cell division, or cell death pathways.

[0042] This information allows for prioritization of which ASO sequences to synthesize, test and validate. ASOs that demonstrate high knockdown potential and off-targets with high disease relevance are then used to validate knockdown of the off-target transcript in vitro in differentiated myotubes by qRT-PCR.

### Definitions

[0043] Unless otherwise indicated, open terms for example “contain,” “containing,” “include,” “including,” and the like mean comprising.

[0044] The singular forms “a”, “an”, and “the” are used herein to include plural references unless the context clearly dictates otherwise. Accordingly, unless the contrary is indicated, the numerical parameters set forth in this application are approximations that can vary depending upon the desired properties sought to be obtained.

[0045] As used herein, the term “about” may mean the referenced numeric indication plus or minus: 5%, 10%, 15%, or 20% of that referenced numeric indication. In some instances, “about” may mean the referenced numeric indication plus or minus 15% of that referenced numeric indication. In some instances, “about” may mean the referenced numeric indication plus or minus 20% of that referenced numeric indication. With respect to biological systems or processes, the term can mean within an order of magnitude, within 5-fold, or within 2-fold, of a value. Where particular values are described in the disclosure and claims, unless otherwise stated the term “about” meaning within an acceptable error range for the particular value should be assumed. Also, where ranges and/or subranges of values are provided, the ranges and/or subranges can include the endpoints of the ranges and/or subranges.

[0046] The term “substantially” as used herein can refer to a value approaching 100% of a given value. In some cases, the term can refer to an amount that can be at least about 90%, 91%, 92%, 93%, 94%, 95%, 96%, 97%, 98%, 99%, 99.9%, 99.99% or about 100% of the total amount.

[0047] The term “homology” can refer to a % identity of a sequence to a reference sequence. As a practical matter, whether any particular sequence can be at least 50%, 60%, 70%, 80%, 85%, 90%, 92%, 95%, 96%, 97%, 98% or 99% identical to any sequence described herein (which can correspond with a particular nucleic acid sequence described herein), such particular polypeptide sequence can be determined conventionally using known computer programs such the Bestfit program (Wisconsin Sequence Analysis Package, Version 8 for Unix, Genetics Computer Group, University Research Park, 575 Science Drive, Madison, Wis. 53711). When using Bestfit or any other sequence alignment program to determine whether a particular sequence is, for instance, 95% identical to a reference sequence, the parameters can be set such that the percentage of identity is calculated over the full length of the reference sequence and that gaps in homology of up to 5% of the total reference sequence are allowed. Any sequence disclosed herein also comprises a sequence with about: 75%, 76%, 77%, 78%, 79%, 80%, 81%, 82%, 83%, 84%, 85%, 86%, 87%, 88%, 89%, 90%, 91%, 92%, 93%, 94%, 95%, 96%, 97%, 98%, or 99% sequence identity to the disclosed sequence.

[0048] The term “oligonucleotide” can refer to a DNA, RNA, or hybrid nucleic acid sequence, whether chemically modified or not, wherein a single strand, such as for example, in typically the case of DNA, reverse complementarily binds to a target RNA sequence. In the case of RNA, the oligonucleotide may be single stranded such as is typically the case of miRNA, wherein the single strand reverse complementarily binds to a target RNA sequence. In other instances, concerning an RNA oligonucleotide may be double stranded, for example, as is typically the case with siRNA, wherein one strand reverse complimentarily binds to a target RNA sequence.

[0049] As used herein, in some instances, the term “targeting” and the term “targeted” can be used interchangeably, for example, an oligonucleotide targeting DUX4 can be a DUX4-targeting oligonucleotide or an oligonucleotide that targets DUX4. It may be a DUX4-targeting oligonucleotide. A targeting sequence can have reverse complementarity to a DUX4 transcript. In some cases, a targeting sequence can have at least partial reverse complementarity to a DUX4 transcript and one or more additional genetic loci, or transcripts thereof. In some cases, the genetic loci

[0050] The term “fragment,” as used herein, can be a portion of a sequence, a subset that can be shorter than a full-length sequence. A fragment can be a portion of a gene. A fragment can be a portion of a peptide or protein. A fragment can be a portion of an amino acid sequence. A fragment can be a portion of an oligonucleotide sequence. A fragment can be less than about: 20, 30, 40, 50 amino acids in length. A fragment can be less than about: 2, 5, 10, 20, 30, 40, 50 oligonucleotides in length.

[0051] The term “epigenetic marker” as used herein, can be any covalent modification of a nucleic acid base.

[0052] The terms “administer,” “administering”, “administration,” and the like, as used herein, can refer to methods that can be used to enable delivery of compounds or compositions to the desired site of biological action. The term “delivery” can include direct application to the affected tissue or region of the body.

[0053] The term “subject,” “host.” “individual,” and “patient” are as used interchangeably herein to refer to animals, typically mammalian animals.

[0054] The terms “treat.” “treating” or “treatment.” as used herein, may include at least partially: alleviating, abating or ameliorating a disease or condition symptom: preventing an additional symptom: ameliorating or preventing the underlying causes of a symptom; preventing a recurrence of a symptom: inhibiting the disease or condition, e.g., at least partially arresting a development of the disease or condition: relieving a disease or condition: causing regression of a disease or condition: relieving a condition caused by the disease or condition: or stopping a symptom of the disease or condition either prophylactically, therapeutically or both.

[0055] As used herein, “agent” or “biologically active agent” may refer to a biological, pharmaceutical, or chemical compound or a salt of any of these structures.

[0056] The term “tissue” as used herein, can be any tissue sample. A tissue can be a tissue suspected or confirmed of having a disease or condition.

[0057] The term “mammalian cell” can refer to any mammalian cell, typically a human cell.

### Engineered DUX4-Targeting Oligonucleotides

[0058] The disclosure herein provides for the therapeutic targeting of RNA transcripts comprising a select DUX4 target location. Two major methods are employed in RNA medicine: double stranded RNA-mediated interference (RNAi) and antisense oligonucleotides (ASO). Broadly speaking. RNAi may operate by activating ribonucleases which, along with other enzymes and complexes, coordinately degrade the RNA after the original RNA target has been cut into smaller pieces. Antisense oligonucleotides may bind to their target nucleic acid via Watson-Crick base pairing, and inhibit or alter gene expression via steric hindrance, splicing alterations, initiation of target degradation, or other events.

[0059] In certain aspects of the disclosure, oligonucleotide therapeutics (ONT) may be designed to treat any disorder amenable to regulating a targeted transcript. In certain aspects, the treatment is with one or more substantially or perfectly complementary ASOs with regard to a target RNA binding site of a disease having a transcript in need of downregulation. In certain cases, the oligonucleotide therapeutics are primarily DNA, in other cases, the oligonucleotides are primarily RNA. Generally, ASOs that efficiently target DUX4 can bind to the fusion transcript and induce degradation through RNAse H.

[0060] In other aspects of the disclosure, interfering RNA such as siRNA or miRNA comprising a sequence which is complementary to a DUX4 RNA transcript may be designed to treat any disorder amenable to regulating such a targeted transcript. In certain aspects, a siRNA is double stranded with one strand being complementary. RISC uses the guide strand of miRNA or siRNA to target complementary 3′-untranslated regions (3′UTR) of mRNA transcripts via Watson-Crick base pairing, allowing it to regulate gene expression of the mRNA transcript in a number of ways such as mRNA degradation, thereby preventing or reducing protein expression of the selected mRNA.

[0061] Oligonucleotides as mentioned, may comprise miRNA. Such miRNA may contain one or more sequence modifications, one or more chemical modifications, or a combination thereof that can: enhance stability of the miRNA: substantially reduce or eliminate immune stimulation (such as via the innate immune response): improve pharmacological activity of the miRNA: retain poly-targeting effects of the miRNA: or any combination thereof.

[0062] Nucleic acid sequences provided herein, including, but not limited to those in the sequence listing, are intended to encompass nucleic acids containing any combination of natural or modified RNA and/or DNA, including, but not limited to such nucleic acids having modified nucleobases. By way of further example and without limitation, an oligonucleotide having the nucleobase sequence “ATCGATCG” encompasses any oligomeric compounds having such nucleobase sequence, whether modified or unmodified, including, but not limited to, such compounds comprising RNA bases, such as those having sequence “AUCGAUCG” and those having some DNA bases and some RNA bases such as “AUCGATCG” and oligomeric compounds having other modified or naturally occurring bases. Likewise, an RNA transcript with the sequence “AUCGAUCG” encompasses any corresponding DNA sequence such as “ATCGATCG”. Nucleic acid sequences herein also comprise sequences comprising at least about: 75%, 76%, 77%, 78%, 79%, 80%, 81%, 82%, 83%, 84%, 85%, 86%, 87%, 88%, 89%, 90%, 91%, 92%, 93%, 94%, 95%, 96%, 97%, 98%, or 99% sequence identity to the disclosed sequence.

[0063] In certain cases, an oligonucleotide construct may comprise a first strand comprising the DUX4-targeting oligonucleotide and a second strand comprising a sequence complementary to at least a portion of the DUX4-targeting oligonucleotide. The second strand may be complementary to at least about 10%, 20%, 30%, 40%, 50%, 60%, 70%, 80%, 90% or more of the first strand. The second strand may be complementary to at least about: 5, 10, 15, or 20 contiguous bases of the first strand. An oligonucleotide may comprise an end overhang, such as a 5′ end or a 3′ end. The first strand, the second strand or a combination thereof may comprise one or more chemical modifications. At least about 10%, 20%, 30%, 40%, 50%, 60%, 70%, 80%, 90% of bases of a first strand, a second strand, or a combination thereof may comprise a chemical modification. The first strand, the second strand or a combination thereof may comprise one or more sugar modifications. At least about 10%, 20%, 30%, 40%, 50%, 60%, 70%, 80%, 90% of bases of a first strand, a second strand, or a combination thereof may comprise a sugar modification. A sugar modification may comprise a glycosylated base. In some cases, a base of a nucleotide may be glycosylated with a glycan. The first strand, the second strand or a combination thereof may comprise a combination of bases having a chemical modification and a sugar modification.

[0064] In some cases, an oligonucleotide as described herein such as a DUX4-targeting oligonucleotide or salt thereof may be from about 5 to about 50 nucleotides in length. In some cases, the DUX4-targeting oligonucleotide or salt thereof may be from about 5 to about 40) nucleotides in length. In some cases, the DUX4-targeting oligonucleotide or salt thereof may be from about 5 to about 30 nucleotides in length. In some cases, the DUX4-targeting oligonucleotide or salt thereof may be from about 5 to about 25 nucleotides in length. In some cases, the DUX4-targeting oligonucleotide or salt thereof may be from about 5 to about 60) nucleotides in length. In some cases, the DUX4-targeting oligonucleotide or salt thereof may be from about 5 to about 80 nucleotides in length. In some cases, the DUX4-targeting oligonucleotide or salt thereof may be from about 5 to about 100 nucleotides in length. In some cases, the DUX4-targeting oligonucleotide or salt thereof may be from about 5 to about 200 nucleotides in length.

[0065] In certain other cases, an interfering RNA may be a regulatory non-coding RNA (ncRNA) comprising short non-coding RNA sequences expressed in a genome that regulates expression or function of other biomolecules in mammalian cells. An ncRNA is generally <200 nucleotides in length and may be single stranded or double stranded and may form non-linear secondary or tertiary structures. An ncRNA may comprise exogenously derived small interfering RNA (siRNA), MicroRNA (miRNA), small nuclear RNA (snRNA). U spliceosomal RNA (U-RNA). Small nucleolar RNA (snoRNA). Piwi-interacting RNA (piRNA), repeat associated small interfering RNA (rasiRNA), small rDNA-derived RNA (srRNA), transfer RNA derived small RNA (tsRNA), ribosomal RNA derived small RNA (rsRNA), large non-coding RNA derived small RNA (lncsRNA), or a messenger RNA derived small RNA (msRNA).

[0066] A DUX4-targeting oligonucleotide may comprise DNA. RNA or a mixture thereof. In some cases, a DUX4-targeting oligonucleotide may comprise a plurality of nucleotides. In some cases, a DUX4-targeting oligonucleotide may comprise an artificial nucleic acid analogue. In some cases, a DUX4-targeting oligonucleotide may comprise DNA, may comprise cell-free DNA, cDNA, fetal DNA, viral DNA, or maternal DNA. In some cases, a DUX4-targeting oligonucleotide can comprise an shRNA, or siRNA, an ncRNA mimic, a short-harpin RNA (shRNA), a dicer-dependent siRNA (di-siRNA), an antisense oligonucleotide (ASO), a gapmer, a mixmer, double-stranded RNAs (dsRNA), single stranded RNAi, (ssRNAi), DNA-directed RNA interference (ddRNAi), an RNA activating oligonucleotide (RNAa), or an exon skipping oligonucleotide. In some cases, a DUX4-targeting oligonucleotide may comprise a completely synthetic miRNA. A completely synthetic miRNA is one that is not derived or based upon an ncRNA. Instead, a completely synthetic miRNA may be based upon an analysis of multiple potential target sequences or may be based upon isolated natural non-coding sequences that are not ncRNAs.

### Modified Oligonucleotides

[0067] In some cases, a second strand may comprise a chemically modified base of a nucleotide. In some cases, a subset of bases of the second strand may be chemically modified, such as from about 1% to about 5% of bases, from about 1% to about 10% of bases, from about 1% to about 20% of bases, from about 1% to about 30% of bases, from about 1% to about 40% of bases, from about 1% to about 50% of bases, from about 1% to about 60% of bases, from about 1% to about 70% of bases, from about 1% to about 80% of bases, or from about 1% to about 90% of bases, or more. A second strand as described herein may be chemically modified in the same manner as described herein for the DUX4-targeting oligonucleotide.

[0068] An oligonucleotide may comprise a sugar modification. An oligonucleotide may comprise a plurality of sugar modifications. A sugar modification may comprise a glucose or derivative thereof. A sugar modification may comprise a ribose or deoxyribose. A sugar modification may comprise a monosaccharide, a disaccharide, a trisaccharide or any combination thereof.

[0069] In some cases, a ribonucleotide or a deoxynucleotide, may be modified, such as the base component, the sugar (ribose) component, the phosphate component forming the backbone of the DUX4-targeting oligonucleotide, or any combination thereof, by a chemical modification as described herein.

[0070] An oligonucleotide such as a DUX4-targeting oligonucleotide may comprise a chemical modification. An oligonucleotide may comprise a plurality of chemical modifications. An oligonucleotide may comprise a plurality of chemical modifications within a portion of an oligonucleotide, such as a terminal end. A chemical modification may comprise a methyl group, a fluoro group, a methoxyethyl group, an ethyl group, an amide group, an ester group, more than one of any of these, or any combination thereof. A chemical modification may comprise a chemically modified nucleotide such as guanosine, uridine, adenosine, thymidine or cytosine including, any natively occurring or non-natively occurring guanosine, uridine, adenosine, thymidine or cytidine that has been altered chemically, for example by acetylation, methylation, hydroxylation, etc., including 1-methyl-adenosine, 1-methyl-guanosine, 1-methyl-inosine, 2,2-dimethyl-guanosine, 2,6-diaminopurine, 2′-amino-2′-deoxyadenosine, 2 ‘-amino-2’-deoxycytidine, 2′-amino-2′-deoxyguanosine, 2 ‘-amino-2’-deoxyuridine, 2-amino-6-chloropurineriboside, 2-aminopurineriboside, 2′-araadenosine, 2′-aracytidine, 2′-arauridine, 2′-azido-2′-deoxyadenosine, 2′-azido-2′-deoxycytidine, 2′-azido-2 ‘-deoxyguanosine, 2’-azido-2′-deoxyuridine, 2-chloroadenosine, 2′-fluoro-2′-deoxyadenosine, 2 ‘-fluoro-2’-deoxy cytidine, 2′-fluoro-2′-deoxyguanosine, 2′-fluoro-2′-deoxyuridine, 2′-fluorothymidine, 2-methyl-adenosine, 2-methyl-guanosine, 2-methyl-thio-N6-isopenenyl-adenosine, 2′-O-methyl-2-aminoadenosine, 2′-O-methyl-2′-deoxyadenosine, 2′-O-methyl-2′-deoxycytidine, 2′-O-methyl-2′-deoxyguanosine, 2-O-methyl-2′-deoxyuridine, 2′-O-methyl-5-methyluridine, 2′-O-methylinosine, 2′-O-methylpseudouridine, 2-thiocytidine, 2-thiocytidine, 3-methyl-cytidine, 4-acetyl-cytidine, 4-thiouridine, 5-(carboxyhydroxymethyl)-uridine, 5,6-dihydrouridine, 5-aminoallylcytidine, 5-aminoallyl-deoxyuridine, 5-bromouridine, 5-carboxymethylaminomethyl-2-thiouracil, 5-carboxymethylamonomethyl-uracil, 5-chloro-ara-cytosine, 5-fluorouridine, 5-iodouridine, 5-methoxycarbonylmethyl-uridine, 5-methoxy-uridine, 5-methyl-2-thiouridine, 6-Azacytidine, 6-azauridine, 6-chloro-7-deaza-guanosine, 6-chloropurineriboside, 6-mercapto-guanosine, 6-methyl-mercaptopurine-riboside, 7-deaza-2′-deoxy-guanosine, 7-deazaadenosine, 7-methyl-guanosine, 8-azaadenosine, 8-bromo-adenosine, 8-bromo-guanosine, 8-mercapto-guanosine, 8-oxoguanosine, benzimidazole-riboside, beta-D-mannosyl-queosine, dihydro-uridine, inosine, N1-methyladenosine, N6-([6-aminohexyl] carbamoylmethyl)-adenosine, N6-isopentenyl-adenosine, N6-methyl-adenosine, N7-methyl-xanthosine, N-uracil-5-oxyacetic acid methyl ester, puromycin, queosine, uracil-5-oxyacetic acid, uracil-5-oxyacetic acid methyl ester, wybutoxosine, xanthosine, xylo-adenosine, or any combination thereof. The preparation of such variants is known to the person skilled in the art, for example from U.S. Pat. No. 4,373,071, 4,401,796, 4,415,732, 4,458,066, 4,500,707, 4,668,777, 4,973,679, 5,047,524, 5,132,418, 5,153,319, 5,262,530 or 5,700,642.

[0071] In some cases an oligonucleotide such as a DUX4-targeting oligonucleotide may comprise a chemically modified nucleotide such as 2-amino-6-chloropurineriboside-5′-triphosphate, 2-aminopurine-riboside-5′-triphosphate, 2-aminoadenosine-5′-triphosphate, 2 ‘-amino-2’-deoxycytidine-triphosphate, 2-thiocytidine-5′-triphosphate, 2-thiouridine-5′-triphosphate, 2′-fluorothymidine-5′-triphosphate, 2′-O-methyl-inosine-5′-triphosphate, 4-thiouridine-5′-triphosphate, 5-aminoallylcytidine-5′-triphosphate, 5-aminoallyluridine-5′-triphosphate, 5-bromocytidine-5′-triphosphate, 5-bromouridine-5′-triphosphate, 5-bromo-2′-deoxycytidine-5′-triphosphate, 5-bromo-2′-deoxyuridine-5′-triphosphate, 5-iodocytidine-5′-triphosphate, 5-iodo-2′-deoxycytidine-5′-triphosphate, 5-iodouridine-5′-triphosphate, 5-iodo-2′-deoxyuridine-5′-triphosphate, 5-methylcytidine-5′-triphosphate, 5-methyluridine-5′-triphosphate, 5-propynyl-2′-deoxycytidine-5′-triphosphate, 5-propynyl-2′-deoxyuridine-5′-triphosphate, 6-azacytidine-5′-triphosphate, 6-azauridine-5′-triphosphate, 6-chloropurineriboside-5′-triphosphate, 7-deazaadenosine-5′-triphosphate, 7-deazaguanosine-5′-triphosphate, 8-azaadenosine-5′-triphosphate, 8-azidoadenosine-5′-triphosphate, benzimidazole-riboside-5′-triphosphate, N1-methyladenosine-5′-triphosphate, N1-methylguanosine-5′-triphosphate, N6-methyladenosine-5′-triphosphate, 06-methylguanosine-5′-triphosphate, pseudouridine-5′-triphosphate, puromycin-5′-triphosphate, xanthosine-5′-triphosphate, or any combination thereof.

[0072] In some cases, an oligonucleotide such as a DUX4-targeting oligonucleotide may comprise a chemically modified nucleotide such as pyridin-4-one ribonucleoside, 5-aza-uridine, 2-thio-5-aza-uridine, 2-thiouridine, 4-thio-pseudouridine, 2-thio-pseudouridine, 5-hydroxyuridine, 3-methyluridine, 5-carboxymethyl-uridine, 1-carboxymethyl-pseudouridine, 5-propynyl-uridine, 1-propynyl-pseudouridine, 5-taurinomethyluridine, 1-taurinomethyl-pseudouridine, 5-taurinomethyl-2-thio-uridine, 1-taurinomethyl-4-thio-uridine, 5-methyl-uridine, 1-methyl-pseudouridine, 4-thio-1-methyl-pseudouridine, 2-thio-1-methyl-pseudouridine, 1-methyl-1-deaza-pseudouridine, 2-thio-1-methyl-1-deaza-pseudouridine, dihydrouridine, dihydropseudouridine, 2-thio-dihydrouridine, 2-thio-dihydropseudouridine, 2-methoxyuridine, 2-methoxy-4-thio-uridine, 4-methoxy-pseudouridine, 4-methoxy-2-thio-pseudouridine, or any combination thereof.

[0073] In some cases, an oligonucleotide such as a DUX4-targeting oligonucleotide, DUX4-targeting oligonucleotide may comprise a chemically modified nucleotide such as 5-aza-cytidine, pseudoisocytidine, 3-methyl-cytidine, N4-acetylcytidine, 5-formylcytidine, N4-methylcytidine, 5-hydroxymethylcytidine, 1-methyl-pseudoisocytidine, pyrrolo-cytidine, pyrrolo-pseudoisocytidine, 2-thio-cytidine, 2-thio-5-methyl-cytidine, 4-thio-pseudoisocytidine, 4-thio-1-methyl-pseudoisocytidine, 4-thio-1-methyl-1-deaza-pseudoisocytidine, 1-methyl-1-deaza-pseudoisocytidine, zebularine, 5-aza-zebularine, 5-methyl-zebularine, 5-aza-2-thio-zebularine, 2-thio-zebularine, 2-methoxy-cytidine, 2-methoxy-5-methyl-cytidine, 4-methoxy-pseudoisocytidine, 4-methoxy-1-methyl-pseudoisocytidine, or any combination thereof.

[0074] In some cases, an oligonucleotide such as a DUX4-targeting oligonucleotide may comprise a chemically modified nucleotide such as 2-aminopurine, 2, 6-diaminopurine, 7-deaza-adenine, 7-deaza-8-aza-adenine, 7-deaza-2-aminopurine, 7-deaza-8-aza-2-aminopurine, 7-deaza-2, 6-diaminopurine, 7-deaza-8-aza-2, 6-diaminopurine, 1-methyladenosine, N6-methyladenosine, N6-isopentenyladenosine, N6-(cis-hydroxyisopentenyl)adenosine, 2-methylthio-N6-(cis-hydroxyisopentenyl) adenosine, N6-glycinylcarbamoyladenosine, N6-threonylcarbamoyladenosine, 2-methylthio-N6-threonyl carbamoyladenosine, N6,N6-dimethyladenosine, 7-methyladenine, 2-methylthio-adenine, 2-methoxy-adenine, or any combination thereof.

[0075] In some cases, an oligonucleotide such as a DUX4-targeting oligonucleotide may comprise a chemically modified nucleotide such as inosine, 1-methyl-inosine, wyosine, wybutosine, 7-deaza-guanosine, 7-deaza-8-aza-guanosine, 6-thio-guanosine, 6-thio-7-deaza-guanosine, 6-thio-7-deaza-8-aza-guanosine, 7-methyl-guanosine, 6-thio-7-methyl-guanosine, 7-methylinosine, 6-methoxy-guanosine, 1-methylguanosine, N2-methylguanosine, N2,N2-dimethylguanosine, 8-oxo-guanosine, 7-methyl-8-oxo-guanosine, 1-methyl-6-thio-guanosine, N2-methyl-6-thio-guanosine, N2,N2-dimethyl-6-thio-guanosine, or any combination thereof.

[0076] In some cases, an oligonucleotide such as a DUX4-targeting oligonucleotide may comprise a chemically modified nucleotide such as 6-aza-cytidine, 2-thio-cytidine, alpha-thio-cytidine, pseudo-iso-cytidine, 5-aminoallyl-uridine, 5-iodo-uridine, N1-methyl-pseudouridine, 5,6-dihydrouridine, alpha-thio-uridine, 4-thio-uridine, 6-aza-uridine, 5-hydroxy-uridine, deoxy-thymidine, 5-methyl-uridine, pyrrolo-cytidine, inosine, alpha-thio-guanosine, 6-methyl-guanosine, 5-methyl-cytdine, 8-oxo-guanosine, 7-deaza-guanosine, N1-methyl-adenosine, 2-amino-6-chloro-purine, N6-methyl-2-amino-purine, pseudo-iso-cytidine, 6-chloro-purine, N6-methyl-adenosine, alpha-thio-adenosine, 8-azido-adenosine, 7-deaza-adenosine, or any combination thereof.

[0077] In some cases, an oligonucleotide such as a DUX4-targeting oligonucleotide may comprise a chemically modified nucleotide, which may be chemically modified at the 2′ position. The chemically modified oligonucleotide may comprise a substituent at the 2′ carbon atom, wherein the substituent may comprise a halogen, an alkoxy group, a hydrogen, an aryloxy group, an amino group or an aminoalkoxy group, such as a 2′-hydrogen (2′-deoxy), 2′-O-methyl, 2′-O-methoxyethyl, 2′-fluoro, 2′ Methoxyethyl, 2′-fluoro, a locked nucleic acid (LNA), or any combination thereof.

[0078] Another chemical modification to an oligonucleotide such as a DUX4-targeting oligonucleotide (such as one involving the 2′ position of a nucleotide) may be a locked nucleic acid (LNA) nucleotide, an ethylene bridged nucleic acid (ENA) nucleotide, an (S)-constrained ethyl (cEt) nucleotide, a bridged nucleic acid (BNA) or any combination thereof. A backbone modification may lock the sugar of the modified nucleotide into a preferred northern conformation. In some case, a presence of this type of modification in the target sequence of the DUX4-targeting oligonucleotide may allow for stronger and faster binding of the DUX4-targeting oligonucleotide sequence to the target site.

[0079] In some cases, an oligonucleotide such as DUX4-targeting oligonucleotide may comprise at least one chemically modified nucleotide, wherein the phosphate backbone, which may be incorporated into the DUX4-targeting oligonucleotide, may be modified. One or more phosphate groups of the backbone may be modified, for example, by replacing one or more of the oxygen atoms with a different substituent. Further, the modified nucleotide may include a full replacement of an unmodified phosphate moiety with a modified phosphate as described herein. Examples of modified phosphate groups may include a phosphorothioate, a methylphosphonate, a phosphoroselenate, a borano phosphate, a borano phosphate ester, a hydrogen phosphonate, a phosphoroamidate, an alkyl phosphonate, an aryl phosphonate or a phosphotriester. The phosphate linker may also be modified by the replacement of a linking oxygen with nitrogen (bridged phosphoroamidates), sulfur (bridged phosphorothioates) and carbon (bridged methylene-phosphonates).

[0080] In some cases, an oligonucleotide such as a DUX4-targeting oligonucleotide may comprise a sugar modification. The sugar modification may comprise a conjugate, such as a linker. In some cases, the DUX4-targeting oligonucleotide may comprise one or more linker groups. The DUX4-targeting oligonucleotide may be linked to an antibody, a protein, a lipid, an aptamer, a small molecule, a drug, or any combination thereof. A linker may form a covalent bond. The DUX4-targeting oligonucleotide may be linked to one or more oligonucleotides, such as a second DUX4-targeting oligonucleotide via a linker. In some cases, the linker may be a cleavable linker. In some cases, a linker may comprise an azide linker. The DUX4-targeting oligonucleotide may comprise a base of a nucleotide that is glycosylated with a glycan. In some cases, the DUX4-targeting oligonucleotide may comprise an abasic site, such as a nucleotide lacking an organic base. In some cases, the abasic nucleotide may comprise a chemical modification as described herein, such as at the 2′ position of the ribose. In some cases, the 2′ C atom of the ribose may be substituted with a substituent such as a halogen, an alkoxy group, a hydrogen, an aryloxy group, an amino group or an aminoalkoxy group, in some cases from 2′-hydrogen (2′-deoxy), 2′-O-methyl, 2′-O-methoxyethyl or 2′-fluoro. In some cases, an abasic site nucleotide may comprise structures 1A or 1B:

[chemical structure]

[0081] In some cases, an oligonucleotide such as a DUX4-targeting oligonucleotide may be modified by the addition of a “5′-CAP” structure. A 5′-cap may be an entity, such as a modified nucleotide entity, which may ‘cap’ the 5′-end of a mature miRNA. A 5′-cap may typically be formed by a modified nucleotide, particularly by a derivative of a guanine nucleotide. In some cases, the 5′-cap may be linked to the 5′-terminus of the DUX4-targeting oligonucleotide via a 5′-5′-triphosphate linkage. A 5′-cap may be methylated, e.g. m7GpppN, wherein N may be the terminal 5′ nucleotide of the nucleic acid carrying the 5′-cap, such as the 5′-end of an RNA. A 5′-cap structure may include glyceryl, inverted deoxy abasic residue (moiety), 4′, 5′ methylene nucleotide, 1-(beta-D-erythrofuranosyl) nucleotide, 4′-thio nucleotide, carbocyclic nucleotide, 1,5-anhydrohexitol nucleotide, L-nucleotides, alpha-nucleotide, modified base nucleotide, threo-pentofuranosyl nucleotide, acyclic 3′, 4′-seco nucleotide, acyclic 3,4-dihydroxybutyl nucleotide, acyclic 3,5 di hydroxy pentyl nucleotide, 3′-3′-inverted nucleotide moiety, 3′-3′-inverted abasic moiety, 3′-2′-inverted nucleotide moiety, 3′-2′-inverted abasic moiety, 1,4-butanediol phosphate, 3′-phosphoramidate, hexylphosphate, aminohexyl phosphate, 3′-phosphate, 3′phosphorothioate, phosphorodithioate, or bridging or non-bridging methylphosphonate moiety. In some cases, a modified 5′-CAP structure may comprise a CAP1 (methylation of the ribose of the adjacent nucleotide of m7G), CAP2 (methylation of the ribose of the 2nd nucleotide downstream of the m7G), CAP3 (methylation of the ribose of the 3rd nucleotide downstream of the m7G), CAP4 (methylation of the ribose of the 4th nucleotide downstream of the m7G), ARCA (anti-reverse CAP analogue, modified ARCA (e.g. phosphothioate modified ARCA), inosine, N1-methyl-guanosine, 2′-fluoro-guanosine, 7-deaza-guanosine, 8-oxo-guanosine, 2-amino-guanosine, LNA-guanosine, or 2-azido-guanosine.

[0082] In some cases, an oligonucleotide such as a DUX4-targeting oligonucleotide, may include a covalent modification may comprise adding a methyl group, a hydroxymethyl group, a carbon atom, an oxygen atom, or any combination thereof to one or more bases of a nucleic acid sequence. In some cases, a covalent modification may comprise changing an oxidation state of a molecule associated with a nucleic acid sequence, such as an oxygen atom, or a combination thereof. A covalent modification may occur at any base, such as a cytosine, a thymine, a uracil, an adenine, a guanine, or any combination thereof. In some cases, an epigenetic modification may comprise an oxidation or a reduction. A nucleic acid sequence may comprise one or more epigenetically modified bases. An epigenetically modified base may comprise any base, such as a cytosine, a uracil, a thymine, adenine, or a guanine. An epigenetically modified base may comprise a methylated base, a hydroxymethylated base, a formylated base, or a carboxylic acid containing base or a salt thereof. An epigenetically modified base may comprise a 5-methylated base, such as a 5-methylated cytosine (5-mC). An epigenetically modified base may comprise a 5-hydroxymethylated base, such as a 5-hydroxymethylated cytosine (5-hmC). An epigenetically modified base may comprise a 5-formylated base, such as a 5-formylated cytosine (5-fC). An epigenetically modified base may comprise a 5-carboxylated base or a salt thereof, such as a 5-carboxylated cytosine (5-caC). In some cases, an epigenetically modified base may comprise a methyltransferase-directed transfer of an activated group (mTAG).

[0083] An epigenetically modified base may comprise one or more bases or a purine (such as Structure 1) or one or more bases of a pyrimidine (such as Structure 2). An epigenetic modification may occur at one or more of any positions. For example, an epigenetic modification may occur at one or more positions of a purine, including positions 1, 2, 3, 4, 5, 6, 7, 8, 9, as shown in Structure 1. In some cases, an epigenetic modification may occur at one or more positions of a pyrimidine, including positions 1, 2, 3, 4, 5, 6, as shown in Structure 2.

[chemical structure]

[0084] A nucleic acid sequence may comprise an epigenetically modified base. A nucleic acid sequence may comprise a plurality of epigenetically modified bases. A nucleic acid sequence may comprise an epigenetically modified base positioned within a CG site, a CpG island, or a combination thereof. A nucleic acid sequence may comprise different epigenetically modified bases, such as a methylated base, a hydroxymethylated base, a formylated base, a carboxylic acid containing base or a salt thereof, a plurality of any of these, or any combination thereof.

[0085] In some cases, a DUX4-targeting oligonucleotide or salt thereof, when chemically modified, may be of formula: Guide Pattern 1, Guide Pattern 2, or Guide Pattern 3 as shown in Table 1.

TABLE 1
Chemical Modification Formula

| Pattern | Sequence(5′-3′) |
|---|---|
| 1 | {N}*{N}*(n*)ₐ{N}*{N} |
| 2 | {N}*{N}*(n*)_{b}{N}*n*{N}*{N} |
| 3 | {N}*{N}*{N}*(n*)_{b}{N}*{N}*{N} |
| 4 | {N}*{N}*n*{N}*(n*)_{c}{N}*{N}*n*n*{N}*{N} |
| 5 | <N>*<N>*<N>*<N>*(n*)_{d}<N>*<N>*<N>*<N> |
| 6 | CAP-{N}*{N}*(n*)ₐ{N}*{N} |
| 7 | CAP-{N}{N}(n*)ₑn{N}{N} |
| 8 | CAP-{N}mp{N}(n*)ₑn{N}mp{N} |
| 9 | CAP-{N}{N}{N}*(n*)_{b}{N}*{N}{N} |
| 10 | CAP-<N>*<N>*<N>*<N>*(n*)_{d}<N>*<N>*<N>*<N> |

[0086] As shown in Table 4, N and n may be any natural or non-natural nucleotide; {N} may be an LNA; [N] may be a BNA; <N> may be a 2′-methyloxyethyl-modified uracil, guanine, adenine, or cytosine; * may be a phosphothionate-modified backbone; mp may be a methylphosphonate-modified backbone; CAP may be 5′-terminal methyl group (5′-OMethyl) or alkylamino group such as amino-carbon 6 chain (5′-Amino C6); a may be from 10-26; b may be from 8-24; c may be from 4-20; d may be from 5-22; e may be from 9-25.

[0087] In some cases, an oligonucleotide such as DUX4-targeting oligonucleotide may comprise a chemical modification, to a base or a sugar of the DUX4-targeting oligonucleotide, relative to a natural base or sugar. In some cases, the DUX4-targeting oligonucleotide may comprise more than one chemical modification, such as a plurality of chemical modifications. A portion of bases or a portion of sugars of the DUX4-targeting oligonucleotide may comprise one or more chemical modifications. In some cases, about: 10%, 20%, 30%, 40%, 50%, 60%, 70%, 80%, 90% or more of bases or sugars in a DUX4-targeting oligonucleotide may be chemically modified.

[0088] In some cases, a DUX4-targeting oligonucleotide may be engineered or modified to increase a specificity for an RNA sequence among a plurality of RNA sequences. A DUX4-targeting oligonucleotide may be modified to significantly increase a specificity for an RNA sequence among a plurality of RNA sequences. Increased specificity may be compared to a comparable oligonucleotide that may not be engineered or may be compared to a comparable oligonucleotide that may be engineered or modified in a different way. A specificity may be increased by at least about: 2%, 5%, 10%, 15%, 20%, 25%, 30%, 35%, 40%, 45%, 50%, 55%, 60%, 65%, 70%, 75%, 80%, 85%, 90%, 95% or more as compared to a comparable oligonucleotide. A DUX4-targeting oligonucleotide may be engineered or modified to increase a specificity for a first RNA sequence as compared to a second RNA sequence.

### Research and Discovery of DUX4-Targeting Oligonucleotides

[0089] To identify target DUX4 variants the identity between a reference sequence (query sequence, i.e., a sequence as described herein) and a subject sequence, also referred to as a global sequence alignment, may be determined using the FASTDB computer program based on the algorithm of Brutlag et al. (Comp. App. Biosci. 6:237-245 (1990)). In some cases, parameters for a particular aspect in which identity is narrowly construed, used in a FASTDB amino acid alignment, may include: Scoring Scheme=PAM (Percent Accepted Mutations) 0, k-tuple=2, Mismatch Penalty=1, Joining Penalty=20, Randomization Group Length=0, Cutoff Score=1, Window Size=sequence length, Gap Penalty=5, Gap Size Penalty=0.05, Window Size=500 or the length of the subject sequence, whichever is shorter. If the subject sequence is shorter than the query sequence due to N- or C-terminal deletions, not because of internal deletions, a manual correction may be made to the results to take into consideration that the FASTDB program does not account for N- and C-terminal truncations of the subject sequence when calculating global percent identity. For subject sequences truncated at the N- and C-termini, relative to the query sequence, the percent identity may be corrected by calculating the number of residues of the query sequence that are lateral to the N- and C-terminal of the subject sequence, which are not matched/aligned with a corresponding subject residue, as a percent of the total bases of the query sequence. A determination of whether a residue is matched/aligned may be determined by results of the FASTDB sequence alignment. This percentage may be then subtracted from the percent identity, calculated by the FASTDB program using the specified parameters, to arrive at a final percent identity score. This final percent identity score may be used for the purposes of this aspect. In some cases, only residues to the N- and C-termini of the subject sequence, which are not matched/aligned with the query sequence, are considered for the purposes of manually adjusting the percent identity score. That is, only query residue positions outside the farthest N- and C-terminal residues of the subject sequence are considered for this manual correction. For example, a 90-residue subject sequence may be aligned with a 100-residue query sequence to determine percent identity. The deletion occurs at the N-terminus of the subject sequence and therefore, the FASTDB alignment does not show a matching/alignment of the first 10 residues at the N-terminus. The 10 unpaired residues represent 10% of the sequence (number of residues at the N- and C-termini not matched/total number of residues in the query sequence) so 10% is subtracted from the percent identity score calculated by the FASTDB program. If the remaining 90 residues were perfectly matched the final percent identity would be 90%. In another example, a 90-residue subject sequence is compared with a 100-residue query sequence. This time the deletions are internal deletions so there are no residues at the N- or C-termini of the subject sequence which are not matched/aligned with the query. In this case the percent identity calculated by FASTDB is not manually corrected. Once again, only residue positions outside the N- and C-terminal ends of the subject sequence, as displayed in the FASTDB alignment, which are not matched/aligned with the query sequence are manually corrected for.

[0090] In order to evaluate all different OTN positions, windows of sizes 15 bp, 16 bp, 17 bp, 18 bp, 19, and 20 bp were generated with 1 bp sliding in the reference sequence across the DUX4 gene chr4:190,173,774-190,185,942. For each window the reverse complement (antisense) sequence of the reference was also reported so it could be used directly for OTN design. RNA-Seq BAM files of all the samples were merged into a single BAM file using the Pysamstats v1.1.2 tool https://github.com/alimanfoo/pysamstats and custom Python scripts were used to obtain the reference base frequencies and read depth at each genomic position in the merged BAM files. Mean coverage was defined as the average number of reads covering each base of the window. A minimum conservation score was calculated for each OTN window representing the base with the lowest conservation. Average melting temperature (Tm) was calculated for the resulting OTN/target RNA duplex with the Primer3 v2.4.0 R tool (39), with default parameters, using the nearest neighbor model. Two melting temperature (TM) values were reported based on the different salt correction formula defined by SantaLucia 1998 (40) and Owczarzy et al. 2004 (41). We then filtered this data for OTN and OTN binding sites in DUX4 15-20 bp in length with mean coverage of >50, a minimum conservation >85% among individuals in the study, and an Average TM of 45-65° C. All resulting OTN sequences and paired DUX4 target site sequences, all represented in DNA form, are submitted as an sequence listing file encompassing SEQ. ID. NOs 1-2X,XXX. We included them in the disclosure as they represent a valuable resources for any effort to develop OTNs to treat DUX4 mediated disorders. These DUX4-targeting oligonucleotide or salt thereof, when chemically modified or when not chemically modified, may have at least 90% sequence identity to any one of SEQ. ID. NOs: 41,923-42,115. In certain instances, a DUX4-targeting oligonucleotide or salt thereof may comprise at least about 80% sequence identity to an oligonucleotide of any one of SEQ. ID. NOs: 41,923-42,115. For example, a DUX4-targeting oligonucleotide or salt thereof may comprise at least about 90% sequence identity to an oligonucleotide of any one of SEQ. ID. NOs: 41,923-42,115. In some cases, a DUX4-targeting oligonucleotide or salt thereof may comprise from about 80% to 100% sequence identity to an oligonucleotide of any one of SEQ. ID. NOs: 41,923-42,115. In some cases, a DUX4-targeting oligonucleotide or salt thereof may comprise from about 85% to 100% sequence identity to an oligonucleotide of any one of SEQ. ID. NOs: 41,923-42,115. In some cases, a DUX4-targeting oligonucleotide or salt thereof may comprise at least 80% sequence identity to at least about 10 contiguous bases of any one of SEQ. ID. NOs: 41,923-42,115. In some cases, a DUX4-targeting oligonucleotide or salt thereof may comprise at least 85% sequence identity to at least about 10 contiguous bases of any one of SEQ. ID. NOs: 41,923-42,115. In some cases, the DUX4-targeting oligonucleotide may comprise at least about: 70%, 75%, 80%, 85%, 90%, 95%, 96%, 97%, 98%, or 99% sequence identity to any one of SEQ. ID. NOs: 41,923-42,115, or any combinations thereof.

[0091] Additionally, analysis provided the ability to produce numerous DUX4-targeting oligonucleotides, as shown in Table. 2 without chemical modifications (SEQ. ID. NOs: 41,923-41,982) and with chemical modifications (SEQ. ID. Nos: 41,983-42,115) which are all represented in DNA form. Regarding the chemical modified DUX4-targeting oligonucleotides, as shown in Table 2, {N} may be an LNA; [N] may be a BNA; (N) may be a 2′-methyloxyethyl-modified uracil, guanine, adenine, or cytosine; * may be a phosphothionate-modified backbone; mp may be a methylphosphonate-modified backbone; Amino C6− may be 5′ amino-carbon 6 chain. Additionally, certain DUX4-targeting oligonucleotides as shown in Table 2, were able to interact with multiple subsequences of the target DUX4 mRNA as shown in Table 3 also submitted in xml file. In addition, any of the chemically modified oligonucleotides could be synthesized with a 5′ amino-carbon 6 chain even if not displayed in the table with retention of activity. Additional targeted RNAs are only listed next to the unmodified sequence of the oligonucleotide, they are not repeated for chemically modified versions of the same sequence although they would still be targeted by that sequence.

TABLE 2
DUX4-targeting oligonucleotides which hybridizes with additional disease
related RNAs

| | | SEQ | |
|---|---|---|---|
| | | ID | Additional Targeted |
| Oligo | Sequence (5′-3′) | NO: | RNA SEQ ID Nos: |
| AS- | GCCATCGCGGGTAGCC | 41923 | |
| DX- | | | |
| 001 | | | |
| AS- | TGTCGGGAGGGCCATC | 23534 | 42274; 42482; 42169; |
| DX- | | | 42566 |
| 002 | | | |
| AS- | TCCAAACGAGTCTCCG | 41924 | 42885 |
| DX- | | | |
| 003 | | | |
| AS- | GATTCTGAAACCAGAT | 41925 | 42331; 42600 |
| DX- | | | |
| 004 | | | |
| AS- | GCGGGCGCCCTGCCAC | 41926 | 42178; 42790; 42711; |
| DX- | | | 42539; 42406; 42161; |
| 005 | | | 42507; 42817; 42196; |
| | | | 42390; 42563; 42167; |
| | | | 42504; 42426; 42464 |
| AS- | TCATCCAGCAGCAGGC | 41927 | 42694; 42734; 42493; |
| DX- | | | 42284; 42481; 42636; |
| 006 | | | 42352; 42705; 42147; |
| | | | 42235; 42775; 42219; |
| | | | 42752; 42633; 42758; |
| | | | 42166; 42559; 42733; |
| | | | 42651; 42413; 42581; |
| | | | 42479; 42827; 42595; |
| | | | 42365; 42260; 42230; |
| | | | 42866; 42144; 42725; |
| | | | 42143; 42678; 42362; |
| | | | 42172; 42206; 42173; |
| | | | 42884; 42832; 42141; |
| | | | 42480; 42590; 42151; |
| | | | 42168; 42236; 42321; |
| | | | 42248; 42586; 42767; |
| | | | 42485 |
| AS | TAGCCAGCCAGGTGTT | 23789 | 42287; 42359; 42577; |
| DX- | | | 42157; 42728; 42856; |
| 007 | | | 42848; 42443; 42524; |
| | | | 42202 |
| AS- | CAGCGTCGGAAGGTGG | 23942 | 42154; 42244; 42676 |
| DX- | | | |
| 008 | | | |
| AS- | TAGACAGCGTCGGAAG | 23946 | |
| DX- | | | |
| 009 | | | |
| AS- | ATAGGATCCACAGGGA | 23981 | 42214; 42806; 42215; |
| DX- | | | 42432; 42813; 42412; |
| 010 | | | 42392; 42502 |
| AS- | TCTATAGGATCCACAG | 41928 | 42689 |
| DX- | | | |
| 011 | | | |
| AS- | GCACTAATCATCCAGG | 25364 | 42841; 42774; 42176; |
| DX- | | | 42746 |
| 012 | | | |
| AS- | CAGCGTCGGAAGGTG | 21509 | 42429; 42210; 42619; |
| DX- | | | 42617; 42153; 42242; |
| 014 | | | 42675 |
| AS- | CCTAGACAGCGTCGGAAGGT | 38051 | |
| DX- | | | |
| 015 | | | |
| AS- | ATAGGATCCACAGGGAGG | 30389 | 42760; 42492 |
| DX- | | | |
| 018 | | | |
| AS- | CGGCTCTGGGATCCCCGG | 41929 | 42310; 42826; 42744 |
| DX- | | | |
| 019 | | | |
| AS- | GCAGTTCTCCGCGGAG | 41930 | 42290; 42707; 42250; |
| DX- | | | 42343; 42171; 42148 |
| 020 | | | |
| AS- | GGGGCGGAGACACGCCC | 41931 | 42295; 42648; 42715; |
| DX- | | | 42717 |
| 021 | | | |
| AS- | AGAAGGCAGGAATCCCAG | 30245 | 42688; 42687; 42685; |
| DX- | | | 42686; 42307; 42592; |
| 022 | | | 42275; 42584; 42663; |
| | | | 42188 |
| AS- | GCAGGAATCCCAGGCCGG | 41932 | 42386; 42306; 42421 |
| DX- | | | |
| 023 | | | |
| AS- | CTCCGCGGAGTGGAGT | 41933 | 42289; 42149; 42878; |
| DX- | | | 42783; 42661; 42423 |
| 024 | | | |
| AS- | GGAGTCTCTCACCGGGCC | 41934 | 42308 |
| DX- | | | |
| 025 | | | |
| AS- | AGAGGCCAGCGAGCTCCC | 41935 | 42221; 42329; 42773; |
| DX- | | | 42197; 42621 |
| 026 | | | |
| AS- | GGCTCTGGGATCCCCGGG | 41936 | 42309; 42454; 42824; |
| DX- | | | 42743; 42763 |
| 027 | | | |
| AS- | CAGAGAGGCCAGCGAGCT | 30302 | 42811; 42672; 42330; |
| DX- | | | |
| 028 | | | 42340; 42175; 42371 |
| AS- | GACAGCGTCGGAAGGTGG | 30341 | |
| DX- | | | |
| 029 | | | |
| AS- | GTAACTCTAATCCAGGTT | 30365 | |
| DX- | | | |
| 030 | | | |
| AS- | GACATTCAGCCAGAAT | 23921 | 42401; 42703; 42770; |
| DX- | | | 42568; 42508; 42328; |
| 031 | | | 42450 |
| AS- | ACAAGGGCACAGAGAGGC | 30310 | 42868; 42254; 42194; |
| DX- | | | 42554 |
| 032 | | | |
| AS- | GAGCTCCCTTGCACGTCA | 41937 | |
| DX- | | | |
| 033 | | | |
| AS- | CCGTCCAACCCCGCGTC | 41938 | |
| DX- | | | |
| 034 | | | |
| AS- | CCTAAAGCTCCTCCAGCA | 30205 | 42253; 42302; 42536 |
| DX- | | | |
| 035 | | | |
| AS- | GCGAGGCGGCCTCTTCCG | 41939 | 42297 |
| DX- | | | |
| 036 | | | |
| AS- | GCCTCCAGCTCCCCCGGG | 41940 | 42296; 42793; 42472; |
| DX- | | | 42785; 42348; 42189; |
| 037 | | | 42673; 42227; 42203; |
| | | | 42851; 42198 |
| AS- | GGTGTCGGGAGGGCCAT | 41941 | 42483; 42589; 42394 |
| DX- | | | |
| 038 | | | |
| AS- | GCCTCAGCTGGCGTGA | 23626 | 42797; 42666; 42427; |
| DX- | | | 42357; 42660; 42653; |
| 039 | | | 42858; 42531 |
| AS- | CTGGGCCAGCCGTTCTCT | 41942 | 42370 |
| DX- | | | |
| 040 | | | |
| AS- | GGGCCAGCCGTTCTCTGG | 41943 | 42269 |
| DX- | | | |
| 041 | | | |
| AS- | GCTCCGGAATGCCGAT | 41944 | 42538; 42548 |
| DX- | | | |
| 042 | | | |
| AS- | CAATTTCAGGCTTTTTCT | 30435 | |
| DX- | | | |
| 043 | | | |
| AS- | TGCCTACAGAAGGCTTTG | 31124 | |
| DX- | | | |
| 044 | | | |
| AS- | ATCTCTGCACTCATCACA | 30402 | 42276 |
| DX- | | | |
| 045 | | | |
| AS- | CTGATCACCGAAGTTCTG | 41945 | |
| DX- | | | |
| 046 | | | |
| AS- | CCAGGAGATGTAACTCTA | 30368 | 42761; 42518 |
| DX- | | | |
| 048 | | | |
| AS- | GAAAGAGAGGCCACCGCC | 30221 | 42303 |
| DX- | | | |
| 049 | | | |
| AS- | GTAGCCAGCCAGGTGTTC | 41946 | 42304; 42579; 42778; |
| DX- | | | 42490 |
| 050 | | | |
| AS- | GCCCCTCCGTAGCCAGCC | 41947 | 42305; 42265; 42762; |
| DX- | | | 42231 |
| 051 | | | |
| AS- | TGCTGTCCGAGGGTGTCG | 30092 | |
| DX- | | | |
| 052 | | | |
| AS- | AGGGGTGCTTCCAGCGAG | 30179 | 42298; 42342 |
| DX- | | | |
| 053 | | | |
| AS- | TTCTTCCTCGCTGAGGGG | 30183 | 42299; 42894 |
| DX- | | | |
| 054 | | | |
| AS- | CGGTATTCTTCCTCGCTG | 30188 | 42300; 42789 |
| DX- | | | |
| 055 | | | |
| AS- | TCCTCCAGCAGAGCCCGG | 41948 | 42301; 42588; 42140; |
| DX- | | | 42842; 42810; 42614 |
| 056 | | | |
| AS- | CCTGGGCCGGCTCTGGGA | 41949 | 42311; 42540; 42545; |
| DX- | | | 42513 |
| 057 | | | |
| AS- | TGCTGGTACCTGGGCCGG | 41950 | 42312; 42350 |
| DX- | | | |
| 058 | | | |
| AS- | TCTATAGGATCCACAGGG | 30392 | |
| DX- | | | |
| 059 | | | |
| AS | GGGCATTTTAATATATCTCTGAACT | 41951 | |
| DX- | | | |
| 060 | | | |
| AS- | TATCTTCTGAACTAATCATCCA | 41952 | |
| DX- | | | |
| 061 | | | |
| AS- | CAGGAGATGTAACTCTAATCCAG | 41953 | |
| DX- | | | |
| 062 | | | |
| AS- | CTCTCACCGGGCCTAGACCTAGAAG | 41954 | |
| DX- | | | |
| 063 | | | |
| AS- | TGCGCACTGCGCGCAGGTCTAGCCA | 41955 | |
| DX- | | | |
| 064 | | | |
| AS- | ACTGCGCGCAGGTCTAGCCAGGAAG | 41956 | |
| DX- | | | |
| 065 | | | |
| AS- | CGGGGTGCGCACTGCGCGCAGGTCT | 41957 | |
| DX- | | | |
| 066 | | | |
| AS- | TGCGCACTGCGCGCAGGTCTAGCCAG | 41958 | |
| DX- | GAAG | | |
| 067 | | | |
| AS- | ACTGCGCGCAGGTCTAGCCAGGAAGC | 41959 | |
| DX- | GGGC | | |
| 068 | | | |
| AS- | ACCCGACCCCGTCCCAACCCCGCGT | 41960 | |
| DX- | | | |
| 069 | | | |
| AS- | TGGGCTGGTGGAGAGGCAG | 41961 | 42521; 42185; 42246; |
| DX- | | | 42313; 42765; 42186; |
| 070 | | | 42658; 42434; 42505; |
| | | | 42501; 42551; 42478; |
| | | | 42320; 42821; 42585; |
| | | | 42809; 42187; 42745; |
| | | | 42356; 42456; 42247; |
| | | | 42256; 42615; 42682; |
| | | | 42668; 42451; 42835; |
| | | | 42557; 42662; 42691; |
| | | | 42537; 42820; 42861; |
| | | | 42876; 42611; 42634; |
| | | | 42748; 42530 |
| AS- | TTCCTCTCTCCATCTCTGC | 41962 | |
| DX- | | | |
| 071 | | | |
| AS- | TTGTCCCGGAGGAAACCGC | 41963 | |
| DX- | | | |
| 072 | | | |
| AS- | AATCACGCCTCCGTCGTCC | 41964 | |
| DX- | | | |
| 073 | | | |
| AS- | TTCCCTGCATGTTTCCGGGTGCCCG | 41965 | |
| DX- | | | |
| 074 | | | |
| AS- | CTTCCCTGCATGTTTCCGG | 41966 | |
| DX- | | | |
| 075 | | | |
| AS- | TGTGGCTCTCGTTCATTTC | 41967 | |
| DX- | | | |
| 076 | | | |
| AS- | CTCCGTGGGAGTCTTGAGTGTGCCA | 41968 | |
| DX- | | | |
| 077 | | | |
| AS- | TGGAACTGAACCTCCGTGG | 41969 | |
| DX- | | | |
| 078 | | | |
| AS- | TGGTGGTGGTGGTGGTGGT | 41970 | |
| DX- | | | |
| 079 | | | |
| AS- | CACCCCTTCATGAATGGCGCC | 41971 | |
| DX- | | | |
| 080 | | | |
| AS- | ACAGGCTCCACCCCTTCATG | 41972 | |
| DX- | | | |
| 081 | | | |
| AS- | TTCCGCTCAAAGCAGGCCTC | 41973 | |
| DX- | | | |
| 082 | | | |
| AS- | AAAGCGATCCTTCTCAAAGGCTCGG | 41974 | |
| DX- | | | |
| 083 | | | |
| AS- | CCTGCGCGGGCGCCCTGCCGC | 41975 | |
| DX- | | | |
| 084 | | | |
| AS- | TATCTCTGAACTAATCATC | 41976 | |
| DX- | | | |
| 085 | | | |
| AS- | AGCGCCTGGCGGCGGAACGCAGACC | 41977 | |
| DX- | | | |
| 086 | | | |
| AS- | ATCTCTGCCCGCCTTCCCTCCCGCC | 41978 | |
| DX- | | | |
| 087 | | | |
| AS- | AAACCAGATCTGAATCCTGGAC | 41979 | |
| DX- | | | |
| 088 | | | |
| AS- | TTTCTAGGAGAGGTTGCGCCTG | 41980 | |
| DX- | | | |
| 089 | | | |
| AS- | AGCGTCGGAAGGTGG | 21508 | 42228; 42428; 42495; |
| DX- | | | 42332; 42462; 42420; |
| 090 | | | 42152; 42241; 42860; |
| | | | 42674 |
| AS- | AGATCCCCTCTGCC | 41981 | |
| DX- | | | |
| 091 | | | |
| AS- | ACAGCGTCGGAAGGTG | 23943 | 42620; 42618; 42677 |
| DX- | | | |
| 094 | | | |
| AS- | GACAGCGTCGGAAGGT | 23944 | 42596 |
| DX- | | | |
| 095 | | | |
| AS- | AGACAGCGTCGGAAGG | 23945 | |
| DX- | | | |
| 096 | | | |
| AS- | CCTAGACAGCGTCGGAAGGTAG | 41982 | |
| DX- | | | |
| 097 | | | |
| AS- | CAGGAATCCCAGGCCG | 41983 | 42875; 42288; 42460; |
| DX- | | | 42572; 42608; 42833; |
| 098 | | | 42630; 42437; 42262; |
| | | | 42598; 42338; 42323 |
| AS- | CAGGAATCCCAGGCC | 21371 | 42389; 42874; 42280; |
| DX- | | | 42207; 42459; 42318; |
| 099 | | | 42637; 42327; 42607; |
| | | | 42533; 42560; 42251; |
| | | | 42799; 42881; 42629; |
| | | | 42436; 42532; 42337; |
| | | | 42553; 42739; 42322; |
| | | | 42571; 42155 |
| AS- | CGGCTCTGGGATCCCCGGGA | 41984 | 42316 |
| DX- | | | |
| 100 | | | |
| AS- | GGCTCTGGGATCCCCG | 41985 | 42655; 42291; 42453; |
| DX- | | | 42425; 42837; 42681; |
| 101 | | | 42731; 42679; 42801; |
| | | | 42823; 42335; 42603; |
| | | | 42218; 42825; 42379; |
| | | | 42604; 42610; 42742; |
| | | | 42385; 42486 |
| AS- | GGCTCTGGGATCCCC | 41986 | 42654; 42282; 42520; |
| DX- | | | 42452; 42836; 42680; |
| 102 | | | 42730; 42461; 42510; |
| | | | 42587; 42800; 42822; |
| | | | 42334; 42580; 42602; |
| | | | 42258; 42529; 42474; |
| | | | 42270; 42264; 42351; |
| | | | 42766; 42764; 42399; |
| | | | 42377; 42609; 42622; |
| | | | 42718; 42484 |
| AS- | TAGACAGCGTCGGAAGGTGG | 38049 | 42732; 42333; 42245; |
| DX- | | | 42564; 42339; 42419 |
| 104 | | | |
| AS- | GAGCTCCCTTGCACGTCAGC | 41987 | |
| DX- | | | |
| 105 | | | |
| AS- | AGCTCCCTTGCACGTC | 23896 | 42447; 42830 |
| DX- | | | |
| 106 | | | |
| AS- | GAGCTCCCTTGCACGT | 23897 | 42448; 42494; 42180; |
| DX- | | | 42388; 42150 |
| 107 | | | |
| AS- | GAGCTCCCTTGCACG | 21469 | 42445; 42782; 42852; |
| DX- | | | 42867; 42179; 42387; |
| 108 | | | 42569; 42525; 42380; |
| | | | 42383 |
| AS- | CGTAGCCAGCCAGGTGTTCC | 41988 | 42314 |
| DX- | | | |
| 109 | | | |
| AS- | TAGCCAGCCAGGTGT | 21339 | 42565; 42854; 42279; |
| DX- | | | 42819; 42528; 42358; |
| 111 | | | 42719; 42326; 42818; |
| | | | 42403; 42576; 42794; |
| | | | 42628; 42156; 42407; |
| | | | 42416; 42727; 42366; |
| | | | 42798; 42855; 42871; |
| | | | 42641; 42325; 42415; |
| | | | 42888; 42847; 42164; |
| | | | 42408; 42142; 42205; |
| | | | 42638; 42526; 42442; |
| | | | 42729; 42523; 42201; |
| | | | 42575 |
| AS- | CTTCTATAGGATCCACAGGG | 38106 | 42594 |
| DX- | | | |
| 112 | | | |
| AS- | ATGCCCAGGAAAGAATGGCA | 41989 | |
| DX- | | | |
| 113 | | | |
| AS- | CAAAGACAGACAGAGGTA | 41990 | 42704; 42768; 42240; |
| DX- | | | 42163; 42441 |
| 114 | | | |
| AS- | GTCCTAAAGCTCCTCCA | 26770 | 42294; 42623; 42336; |
| DX | | | 42803; 42431; 42583; |
| 116 | | | 42750 |
| AS- | TCCTAAAGCTCCTCCAG | 26769 | 42293; 42162; 42535; |
| DX- | | | 42780; 42467; 42430; |
| 117 | | | 42582; 42183; 42208 |
| AS- | GGGATGCCTTGCATCTG | 26720 | 42292; 42578; 42324; |
| DX | | | 42349; 42395 |
| 118 | | | |
| AS- | GAAACCAGATCTGAATC | 41991 | 42368; 42547; 42400 |
| DX- | | | |
| 119 | | | |
| AS- | GGGTCCAAACGAGTCTC | 41992 | 42542; 42268; 42747 |
| DX- | | | |
| 120 | | | |
| AS- | GCTGCAGAAACTCCGG | 41993 | 42285; 42519; 42190; |
| DX- | | | 42723; 42319; 42192; |
| 121 | | | 42616 |
| AS- | TGTTCCCCGCGAAAGA | 23783 | 42286; 42220 |
| DX- | | | |
| 122 | | | |
| AS- | GTGACATATCTCTGCA | 23998 | 42807; 42804; 42409 |
| DX- | | | |
| 123 | | | |
| AS- | CATATCTCTGCACTCA | 23994 | 42740; 42229; 42889; |
| DX- | | | 42652 |
| 124 | | | |
| AS- | GACATATCTCTGCACT | 23996 | 42373; 42487; 42139 |
| DX- | | | |
| 125 | | | |
| AS- | GGGGTCCAAACGAGTC | 41994 | 42466; 42541; 42438; |
| DX- | | | 42165; 42266; 42522 |
| 126 | | | |
| AS- | TACAGGGGATATTGTG | 41995 | 42708; 42457; 42828 |
| DX- | | | |
| 127 | | | |
| AS- | AGCAGGGCGGTCTGG | 41996 | 42814; 42211; 42515; |
| DX- | | | 42701; 42381; 42422; |
| 128 | | | 42642; 42497; 42665; |
| | | | 42839; 42639; 42859; |
| | | | 42720; 42831; 42690; |
| | | | 42433; 42702; 42375; |
| | | | 42272; 42781 |
| AS- | AGCTGCCCCGGCTTG | 41997 | 42864; 42517; 42277; |
| DX- | | | 42791; 42367; 42751; |
| 129 | | | 42237; 42612; 42393; |
| | | | 42439; 42382; 42862; |
| | | | 42458; 42887; 42863; |
| | | | 42573; 42417; 42396; |
| | | | 42667; 42543; 42405; |
| | | | 42613; 42391; 42722; |
| | | | 42670; 42372; 42170 |
| AS- | CCCAGGAAAGAAAGG | 41998 | 42659; 42815; 42281; |
| DX- | | | 42212; 42769; 42374; |
| 130 | | | 42599; 42354; 42880; |
| | | | 42632; 42700; 42200; |
| | | | 42886; 42656; 42753; |
| | | | 42857; 42488; 42759; |
| | | | 42625; 42273; 42344; |
| | | | 42816; 42204 |
| AS- | GGTGAGCCCCGGCCGG | 41999 | 42754; 42812; 42402; |
| DX- | | | 42506; 42222; 42404; |
| 131 | | | 42471; 42341; 42145; |
| | | | 42469; 42850; 42556; |
| | | | 42883; 42840; 42756; |
| | | | 42873; 42195; 42893; |
| | | | 42671 |
| AS- | GCAGACCAGGGCGCC | 42000 | 42435; 42278; 42411; |
| DX- | | | 42792; 42749; 42591; |
| 132 | | | 42397; 42737; 42199; |
| | | | 42721; 42193; 42347; |
| | | | 42870; 42346; 42552; |
| | | | 42424; 42500; 42364; |
| | | | 42259; 42146; 42624; |
| | | | 42779; 42473; 42263; |
| | | | 42738; 42360; 42355; |
| | | | 42626; 42503; 42414; |
| | | | 42217; 42475; 42890; |
| | | | 42605; 42845; 42555; |
| | | | 42834; 42440; 42788; |
| | | | 42376; 42879; 42697; |
| | | | 42249; 42786; 42261; |
| | | | 42849 |
| AS- | CCTGGGCCGGCTCTG | 42001 | 42516; 42699; 42891; |
| DX- | | | 42664; 42213; 42283; |
| 133 | | | 42574; 42239; 42398; |
| | | | 42713; 42544; 42838; |
| | | | 42224; 42511; 42514; |
| | | | 42477; 42378; 42877; |
| | | | 42882; 42706; 42496; |
| | | | 42561; 42698; 42449; |
| | | | 42787; 42635; 42512; |
| | | | 42191; 42209; 42363; |
| | | | 42361; 42683; 42869; |
| | | | 42692; 42550; 42892; |
| | | | 42232 |
| AS- | AGAAGGCAGGAATCCCAGGC | 37973 | 42315 |
| DX- | | | |
| 134 | | | |
| AS- | CGGGTGCCTGGCCCTTC | 42002 | 42772; 42795; 42509; |
| DX- | | | 42796; 42468; 42865; |
| 135 | | | 42716; 42606; 42418 |
| AS- | CCAGCTCCTCCCGGGC | 42003 | 42724; 42736; 42696; |
| DX- | | | 42695; 42177; 42498; |
| 136 | | | 42712; 42465; 42225; |
| | | | 42234; 42646; 42643; |
| | | | 42345; 42843; 42741; |
| | | | 42567; 42714; 42238; |
| | | | 42872; 42353; 42784; |
| | | | 42647; 42649; 42601; |
| | | | 42223; 42369; 42755; |
| | | | 42657; 42562; 42257; |
| | | | 42463; 42455; 42627; |
| | | | 42771; 42645; 42777; |
| | | | 42846; 42158; 42226; |
| | | | 42255; 42243; 42159; |
| | | | 42776; 42499; 42593; |
| | | | 42631; 42644; 42470; |
| | | | 42735; 42489; 42233; |
| | | | 42640; 42597; 42384; |
| | | | 42491; 42710; 42669; |
| | | | 42252; 42527; 42549; |
| | | | 42267; 42476; 42684; |
| | | | 42216; 42174; 42184; |
| | | | 42853; 42693; 42271; |
| | | | 42709 |
| AS- | TTGTGACATATCTCTGCA | 30411 | 42808; 42805; 42410; |
| DX- | | | 42844 |
| 137 | | | |
| AS- | CTCCCTTGCACGTCA | 21466 | 42444; 42160; 42317; |
| DX- | | | 42726; 42757 |
| 138 | | | |
| AS- | GCTCCCTTGCACGTCA | 23895 | 42446; 42181; 42829; |
| DX- | | | 42570 |
| 139 | | | |
| AS- | AGCTCCCTTGCACGTCA | 26881 | 42182 |
| DX- | | | |
| 140 | | | |
| AS- | CGAGCTCCCTTGCACGTCAG | 42004 | |
| DX- | | | |
| 141 | | | |
| AS- | AAGCGATCCTTCTCAA | 42005 | 42650; 42546; 42534; |
| DX- | | | 42558; 42802 |
| 142 | | | |
| AS- | {G}*{C}*c*a*t*c*g*c*g*g*g*t*a*g*{C}* | 42006 | |
| DX- | {C} | | |
| 001-1 | | | |
| AS- | Amino C6- | 42007 | |
| DX- | {G}*{C}*c*a*t*c*g*c*g*g*g*t*a*g*{C}* | | |
| 001-2 | {C} | | |
| AS- | {T}*{G}*t*c*g*g*g*a*g*g*g*c*c*a*{T}* | 42008 | |
| DX- | {C} | | |
| 002-1 | | | |
| AS- | Amino C6- | 42009 | |
| DX- | {T}{G}t*5mec*g*g*g*a*g*g*g*5mec*5mec | | |
| 002-2 | *a{T}{C} | | |
| AS- | Amino C6- | 42010 | |
| DX- | {T}mp{G}t*c*g*g*g*a*g*g*g*c*c*a{T} | | |
| 002-3 | mp{C} | | |
| AS- | Amino C6- | 42011 | |
| DX- | [T]*[G]*t*c*g*g*g*a*g*g*g*c*c*a*[T]*[C | | |
| 002-4 | | | |
| AS- | {T}*{C}*c*a*a*a*c*g*a*g*t*c*t*c*{C}* | 42012 | |
| DX- | {G} | | |
| 003-1 | | | |
| AS- | Amino C6- | 42013 | |
| DX- | {T}*{C}*c*a*a*a*c*g*a*g*t*c*t*c*{C}* | | |
| 003-2 | {G} | | |
| AS- | {G}*{A}*t*t*c*t*g*a*a*a*c*c*a*g*{A}* | 42014 | |
| DX- | {T} | | |
| 004-1 | | | |
| AS- | Amino C6- | 42015 | |
| DX- | {G}*{A}*t*t*c*t*g*a*a*a*c*c*a*g*{A}* | | |
| 004-2 | {T} | | |
| AS- | {G}*{C}*g*g*g*c*g*c*c*c*t*g*c*c*{A}* | 42016 | |
| DX- | {C} | | |
| 005-1 | | | |
| AS- | Amino C6- | 42017 | |
| DX- | {G}*{C}*g*g*g*c*g*c*c*c*t*g*c*c*{A}* | | |
| 005-2 | {C} | | |
| AS- | {T}*{C}*a*t*c*c*a*g*c*a*g*c*a*g*{G}* | 42018 | |
| DX- | {C} | | |
| 006-1 | | | |
| AS- | Amino C6- | 42019 | |
| DX- | {T}*{C}*a*t*c*c*a*g*c*a*g*c*a*g*{G}* | | |
| 006-2 | {C} | | |
| AS- | {T}*{A}*g*c*c*a*g*c*c*a*g*g*t*g*{T}* | 42020 | |
| DX. | {T} | | |
| 007-1 | | | |
| AS- | Amino C6- | 42021 | |
| DX- | {T}*{A}*g*c*c*a*g*c*c*a*g*g*t*g*{T}* | | |
| 007-2 | {T} | | |
| AS- | {T}*mA*{G}*c*c*a*g*c*c*a*g*g*t*{G}* | 42022 | |
| DX- | mU*{T} | | |
| 007-3 | | | |
| AS- | {C}*{A}*g*c*g*t*c*g*g*a*a*g*g*t*{G}* | 42023 | |
| DX- | {G} | | |
| 008-1 | | | |
| AS | Amino C6- | 42024 | |
| DX- | {C}*{A}*g*c*g*t*c*g*g*a*a*g*g*t*{G}* | | |
| 008-2 | {G} | | |
| AS- | {T}*{A}*g*a*c*a*g*c*g*t*c*g*g*a*{A}* | 42025 | |
| DX- | {G} | | |
| 009-1 | | | |
| AS- | Amino C6- | 42026 | |
| DX- | {T}*{A}*g*a*c*a*g*c*g*t*c*g*g*a*{A}* | | |
| 009-2 | {G} | | |
| AS- | {A}*{T}*a*g*g*a*t*c*c*a*c*a*g*g*{G}* | 42027 | |
| DX- | {A} | | |
| 010-1 | | | |
| AS- | Amino C6- | 42028 | |
| DX- | {A}*{T}*a*g*g*a*t*c*c*a*c*a*g*g*{G}* | | |
| 010-2 | {A} | | |
| AS- | Amino C6- | 42029 | |
| DX- | [A]*[T]*a*g*g*a*t*c*c*a*c*a*g*g*[G]* | | |
| 010-3 | [A] | | |
| AS- | {T}*{C}*t*a*t*a*g*g*a*t*c*c*a*c*{A}* | 42030 | |
| DX- | {G} | | |
| 011-1 | | | |
| AS- | Amino C6- | 42031 | |
| DX- | {T}*{C}*t*a*t*a*g*g*a*t*c*c*a*c*{A}* | | |
| 011-2 | {G} | | |
| AS- | {G}*{C}*a*c*t*a*a*t*c*a*t*c*c*a*{G}* | 42032 | |
| DX- | {G} | | |
| 012-1 | | | |
| AS- | Amino C6- | 42033 | |
| DX- | {G}*{C}*a*c*t*a*a*t*c*a*t*c*c*a*{G}* | | |
| 012-2 | {G} | | |
| AS- | {C}*{A}*{G}*c*g*t*c*g*g*a*a*g*{G}* | 42034 | |
| DX- | {T}*{G} | | |
| 014-1 | | | |
| AS- | Amino C6- | 42035 | |
| DX- | {C}*{A}*{G}*c*g*t*c*g*g*a*a*g*{G}* | | |
| 014-2 | {T}*{G} | | |
| AS- | (C)*(C)*(T)*(A)*(G)*a*c*a*g*c*g*t*c*g* | 42036 | |
| DX- | g*(A)*(A)*(G)*(G)*(T) | | |
| 015-1 | | | |
| AS- | Amino C6- | 42037 | |
| DX- | (C)*(C)*(T)*(A)*(G)*a*c*a*g*c*g*t*c*g* | | |
| 015-2 | g*(A)*(A)*(G)*(G)*(T) | | |
| AS- | {C}*{C}*t*{A}*g*a*c*a*g*c*g*t*c*g*{G} | 42038 | |
| DX- | *{A}*a*g*{G}*{T} | | |
| 015-3 | | | |
| AS- | {A}*{T}*{A}*g*g*a*t*c*c*a*c*a*g*g*g* | 42039 | |
| DX- | {A}*{G}*{G} | | |
| 018-1 | | | |
| AS- | {A}*{T}*a*g*g*a*t*c*c*a*c*a*g*g*{G}* | 42040 | |
| DX- | a*{G}*{G} | | |
| 018-2 | | | |
| AS- | {C}*{G}*{G}*c*t*c*t*g*g*g*a*t*c*c*c* | 42041 | |
| DX- | {C}*{G}*{G} | | |
| 019-1 | | | |
| AS- | {G}*{G}*{G}*g*c*g*g*a*g*a*c*a*c*g* | 42042 | |
| DX- | {C}*{C}*{C} | | |
| 021-1 | | | |
| AS- | {A}*{G}*{A}*a*g*g*c*a*g*g*a*a*t*c*c* | 42043 | |
| DX- | {C}*{A}*{G} | | |
| 022-1 | | | |
| AS- | {G}*{C}*{A}*g*g*a*a*t*c*c*c*a*g*g*c* | 42044 | |
| DX- | {C}*{G}*{G} | | |
| 023-1 | | | |
| AS- | {G}*{C}*a*{G}*g*a*a*t*c*c*c*a*g*g*c* | 42045 | |
| DX- | c*mG*{G} | | |
| 023-2 | | | |
| AS- | {G}*{C}*mA*g*g*a*a*t*c*c*c*a*g*g*c* | 42046 | |
| DX- | {C}*mG*{G} | | |
| 023-3 | | | |
| AS- | {G}*{G}*{A}*g*t*c*t*c*t*c*a*c*c*g*g* | 42047 | |
| DX- | {G}*{C}*{C} | | |
| 025-1 | | | |
| AS- | {A}*{G}*{A}*g*g*c*c*a*g*c*g*a*g*c*t* | 42048 | |
| DX- | {C}*{C}*{C} | | |
| 026-1 | | | |
| AS- | {G}*{G}*{C}*t*c*t*g*g*g*a*t*c*c*c*c* | 42049 | |
| DX- | {G}*{G}*{G} | | |
| 027-1 | | | |
| AS- | {G}*mG*c*{T}*c*t*g*g*g*a*t*c*c*c*c*g | 42050 | |
| DX- | *{G}*{G} | | |
| 027-2 | | | |
| AS- | {G}*mG*{C}*t*c*t*g*g*g*a*t*c*c*c*c*m | 42051 | |
| DX- | G*mG*{G} | | |
| 027-3 | | | |
| AS- | {G}{G}{C}*t*c*t*g*g*g*a*t*c*c*c*c*{G} | 42052 | |
| DX- | {G}{G} | | |
| 027-4 | | | |
| AS- | {C}*{A}*{G}*a*g*a*g*g*c*c*a*g*c*g*a* | 42053 | |
| DX- | (G}*{C}*{T} | | |
| 028-1 | | | |
| AS- | {G}*{A}*{C}*a*g*c*g*t*c*g*g*a*a*g*g* | 42054 | |
| DX- | {T}*{G}*{G} | | |
| 029-1 | | | |
| AS- | Amino C6- | 42055 | |
| DX- | {G}*{A}*{C}*a*g*5mec*g*t*5mec*g*g*a | | |
| 029-2 | *a*g*g*{T}*{G}*{G} | | |
| AS- | {G}*{T}*{A}*a*c*t*c*t*a*a*t*c*c*a*g* | 42056 | |
| DX- | {G}*{T}*{T} | | |
| 030-1 | | | |
| AS- | {G}*mA*{C}*a*t*t*c*a*g*c*c*a*g*{A}* | 42057 | |
| DX- | mA*{T} | | |
| 031-1 | | | |
| AS- | {A}*{C}*{A}*a*g*g*g*c*a*c*a*g*a*g*a* | 42058 | |
| DX- | {G}*{G}*{C} | | |
| 032-1 | | | |
| AS- | {G}*{A}*{G}*c*t*c*c*c*t*t*g*c*a*c*g* | 42059 | |
| DX- | {T}*{C}*{A} | | |
| 033-1 | | | |
| AS- | Amino C6- | 42060 | |
| DX- | {G}*{A}*{G}*c*t*c*c*c*t*t*g*c*a*5mec | | |
| 033-2 | *g*{T}*{C}*{A} | | |
| AS- | {G}*mA*{G}*c*t*c*c*c*t*t*g*c*a*c*g* | 42061 | |
| DX- | {T}*mC*{A} | | |
| 033-3 | | | |
| AS- | {G}*{A}*g*{C}*{T}*c*c*c*t*t*g*c*a*c* | 42062 | |
| DX- | g*t*mC*{A} | | |
| 033-4 | | | |
| AS- | {C}*{C}*{G}*t*c*c*a*a*c*c*c*c*g*c*{G} | 42063 | |
| DX- | *{T}*{C} | | |
| 034-1 | | | |
| AS- | {C}*{C}*{T}*a*a*a*g*c*t*c*c*t*c*c*a* | 42064 | |
| DX- | {G}*{C}*{A} | | |
| 035-1 | | | |
| AS- | {G}*{C}*{G}*a*g*g*c*g*g*c*c*t*c*t*t* | 42065 | |
| DX- | {C}*{C}*{G} | | |
| 036-1 | | | |
| AS- | {G}*{C}*{C}*t*c*c*a*g*c*t*c*c*c*c*c* | 42066 | |
| DX- | {G}*{G}*{G} | | |
| 037-1 | | | |
| AS- | {G}*{G}*{T}*g*t*c*g*g*g*a*g*g*g*c* | 42067 | |
| DX- | {C}*{A}*{T} | | |
| 038-1 | | | |
| AS- | {C}*{T}*{G}*g*g*c*c*a*g*c*c*g*t*t*c* | 42068 | |
| DX- | {T}*{C}*{T} | | |
| 040-1 | | | |
| AS- | {G}*{G}*{G}*c*c*a*g*c*c*g*t*t*c*t*c* | 42069 | |
| DX- | {T}*{G}*{G} | | |
| 041-1 | | | |
| AS- | {C}*{A}*a*t*t*t*c*a*g*g*c*t*t*t*{T}*t* | 42070 | |
| DX- | {C}*{T} | | |
| 043-1 | | | |
| AS- | {T}*{G}*{C}*c*t*a*c*a*g*a*a*g*g*c*t* | 42071 | |
| DX- | {T}*{T}*{G} | | |
| 044-1 | | | |
| AS- | {A}*{T}*c*t*c*t*g*c*a*c*t*c*a*t*{C}*a* | 42072 | |
| DX- | {C}*{A} | | |
| 045-1 | | | |
| AS- | {A}*mU*{C}*t*c*t*g*c*a*c*t*c*a*t*c* | 42073 | |
| DX- | {A}*mC*{A} | | |
| 045-2 | | | |
| AS- | {C}*{T}*g*a*t*c*a*c*c*g*a*a*g*t*{T}*c | 42074 | |
| DX- | *{T}*{G} | | |
| 046-1 | | | |
| AS- | {C}*{C}*a*g*g*a*g*a*t*g*t*a*a*c*{T}*c | 42075 | |
| DX- | *{T}*{A} | | |
| 048-1 | | | |
| AS- | {G}*{A}*{A}*a*g*a*g*a*g*c*c*a*c*c* | 42076 | |
| DX- | | | |
| 049-1 | | | |
| AS- | {G}*{T}*{A}*g*c*c*a*g*c*c*a*g*g*t*g* | 42077 | |
| DX- | {T}*{T}*{C} | | |
| 050-1 | | | |
| AS- | {G}*mU*{A}*g*c*c*a*g*c*c*a*g*g*t*g* | 42078 | |
| DX- | mU*{T}*{C} | | |
| 050-2 | | | |
| AS- | {G}*mU*a*g*c*c*a*g*c*c*a*g*g*t*mG*t | 42079 | |
| DX- | *{T}*{C} | | |
| 050-3 | | | |
| AS- | {G}{T}{A}*g*c*c*a*g*c*c*a*g*g*t*g*{T} | 42080 | |
| DX- | {T}{C} | | |
| 050-4 | | | |
| AS- | {G}*{C}*{C}*c*c*t*c*c*g*t*a*g*c*c*a* | 42081 | |
| DX- | {G}*{C}*{C} | | |
| 051-1 | | | |
| AS- | {T}*{G}*{C}*t*g*t*c*c*g*a*g*g*g*t*g* | 42082 | |
| DX- | {T}*{C}*{G} | | |
| 052-1 | | | |
| AS- | {A}*{G}*{G}*g*g*t*g*c*t*t*c*c*a*g*c* | 42083 | |
| DX- | {G}*{A}*{G} | | |
| 053-1 | | | |
| AS- | {T}*{T}*{C}*t*t*c*c*t*c*g*c*t*g*a*g* | 42084 | |
| DX- | {G}*{G}*{G} | | |
| 054-1 | | | |
| AS- | {C}*{G}*{G}*t*a*t*t*c*t*t*c*c*t*c*g* | 42085 | |
| DX- | {C}*{T}*{G} | | |
| 055-1 | | | |
| AS- | {T}*{C}*{C}*t*c*c*a*g*c*a*g*a*g*c*c* | 42086 | |
| DX- | {C}*{G}*{G} | | |
| 056-1 | | | |
| AS- | {C}*{C}*{T}*g*g*g*c*c*g*g*c*t*c*t*g* | 42087 | |
| DX- | {G}*{G}*{A} | | |
| 057-1 | | | |
| AS- | {T}*{G}*{C}*t*g*g*t*a*c*c*t*g*g*g*c* | 42088 | |
| DX- | {C}*{G}*{G} | | |
| 058-1 | | | |
| AS- | {T}*{C}*{T}*a*t*a*g*g*a*t*c*c*a*c*a* | 42089 | |
| DX- | {G}*{G}*{G} | | |
| 059-1 | | | |
| AS- | {T}*{C}*t*{A}*t*a*g*g*a*t*c*c*a*c*a*g | 42090 | |
| DX- | *{G}*{G} | | |
| 059-2 | | | |
| AS- | [Amino C6-] | 42091 | |
| DX- | {T}*{C}*{T}*a*t*a*g*g*a*t*c*c*a*c*a* | | |
| 059-3 | {G}*{G}*{G} | | |
| AS- | {A}*mC*{A}*g*c*g*t*c*g*g*a*a*g*{G}* | 42092 | |
| DX- | mU*{G} | | |
| 094-1 | | | |
| AS- | {C}*mA*{G}*g*a*a*t*c*c*c*a*g*g*{C}* | 42093 | |
| DX- | mC*{G} | | |
| 098-1 | | | |
| AS- | {C}*mA*{G}*g*a*a*t*c*c*c*a*g*{G}*m | 42094 | |
| DX- | C*{C} | | |
| 099-1 | | | |
| AS- | {C}*mG*g*{C}*t*c*t*g*g*g*a*t*c*c*{C} | 42095 | |
| DX- | *{C}*g*g*{G}*{A} | | |
| 100-1 | | | |
| AS- | {G}*{G}*c*t*c*t*g*g*g*a*t*c*c*mC*mC | 42096 | |
| DX- | *{G} | | |
| 101-1 | | | |
| AS- | {G}*{G}*c*t*c*t*g*g*g*a*t*c*mC*mC* | 42097 | |
| DX- | {C} | | |
| 102-1 | | | |
| AS- | {T}{A}*g*{A}*c*a*g*c*g*t*c*g*g*a*a* | 42098 | |
| DX- | {G}*{G}*t*{G}*{G} | | |
| 104-1 | | | |
| AS- | {G}*mA*{G}*c*t*c*c*c*t*t*g*c*a*c*g* | 42099 | |
| DX- | {T}*{C}*a*{G}*{C} | | |
| 105-1 | | | |
| AS- | {A}*mG*{C}*t*c*c*c*t*t*g*c*a*c*{G}* | 42100 | |
| DX- | mU*{C} | | |
| 106-1 | | | |
| AS- | {A}*{G}*c*t*c*c*c*t*t*g*c*a*c*g*{T}* | 42101 | |
| DX- | {C} | | |
| 106-2 | | | |
| AS- | {G}*mA*{G}*c*t*c*c*c*t*t*g*c*a*{C}* | 42102 | |
| DX- | mG*{T} | | |
| 107-1 | | | |
| AS- | {G}*mA*{G}*c*t*c*c*c*t*t*g*c*{A}*mC | 42103 | |
| DX- | *{G} | | |
| 108-1 | | | |
| AS- | {C}*{G}*t*{A}*g*c*c*a*g*c*c*a*g*g*{T} | 42104 | |
| DX- | *mG*t*t*{C}*{C} | | |
| 109-1 | | | |
| AS- | {T}*mA*{G}*c*c*a*g*c*c*a*g*g*{T}*m | 42105 | |
| DX- | G*{T} | | |
| 111-1 | | | |
| AS- | {C}*{T}*t*c*{T}*{A}*t*a*g*g*a*t*c*c*a | 42106 | |
| DX- | *c*a*{G}*{G}*{G} | | |
| 112-1 | | | |
| AS- | (T)*(T)*(C)*(T)*a*t*a*g*g*a*t*c*c*a*c*a | 42107 | |
| DX- | *(G)*(G)*(G)*(C) | | |
| 112-2 | | | |
| AS- | {A}*{T}*g*c*c*c*a*g*g*a*a*a*g*a*{A}* | 42108 | |
| DX- | mU*g*g*{C}*{A} | | |
| 113-1 | | | |
| AS- | {C}*mA*{A}*a*g*a*c*a*g*a*c*a*g*a*{G} | 42109 | |
| DX- | *G*{T}*{A} | | |
| 114-1 | | | |
| AS- | {G}*mU*c*{C}*t*a*a*a*g*c*t*c*c*t*mC | 42110 | |
| DX- | *{C}*{A} | | |
| 116-1 | | | |
| AS- | t*{C}*c*t*a*a*a*g*c*t*c*c*t*c*{C}*mA* | 42111 | |
| DX- | {G} | | |
| 117-1 | | | |
| AS- | {G}*{G}*g*{A}*{T}*g*c*c*t*t*g*c*a*t* | 42112 | |
| DX- | c*{T}*{G} | | |
| 118-1 | | | |
| AS- | {G}*{A}*{A}*a*c*c*a*g*a*t*c*t*g*{A}* | 42113 | |
| DX- | a*{T}*{C} | | |
| 119-1 | | | |
| AS- | {G}*{G}*{G}*t*c*c*a*a*a*c*g*a*g*{T}* | 42114 | |
| DX- | c*{T}*{C} | | |
| 120-1 | | | |
| AS- | {G}*mC*{T}*g*c*a*g*a*a*a*c*t*c*{C}* | 42115 | |
| DX- | mG*{G} | | |
| 121-1 | | | |
| AS- | {T}*mG*{T}*t*c*c*c*c*g*c*g*a*a*{A}* | 42116 | |
| DX- | {G}*{A} | | |
| 122-1 | | | |
| AS- | {G}*{T}*{G}*a*c*a*t*a*t*c*t*c*t*{G}* | 42117 | |
| DX- | {C}*{A} | | |
| 123-1 | | | |
| AS- | {C}*{A}*mU*a*t*c*t*c*t*g*c*a*c*mU* | 42118 | |
| DX- | {C}*{A} | | |
| 124-1 | | | |
| AS- | {G}*{A}*c*a*t*a*t*c*t*c*t*g*{C}*a*{C} | 42119 | |
| DX- | *{T} | | |
| 125-1 | | | |
| AS- | {G}*{G}*{G}*g*t*c*c*a*a*a*c*g*a*mG* | 42120 | |
| DX- | {T}*{C} | | |
| 126-1 | | | |
| AS- | {T}*mA*{C}*a*g*g*g*g*a*t*a*t*t*{G}* | 42121 | |
| DX- | mU*{G} | | |
| 127-1 | | | |
| AS- | {A}*mG*mC*a*g*g*c*g*g*t*c*mU*m | 42122 | |
| DX- | G*{G} | | |
| 128-1 | | | |
| AS- | {A}*mG*{C}*t*g*c*c*c*c*g*g*c*t*mU* | 42123 | |
| DX- | {G} | | |
| 129-1 | | | |
| AS- | {C}*mC*{C}*a*g*g*a*a*a*g*a*a*{A}*m | 42124 | |
| DX- | G*{G} | | |
| 130-1 | | | |
| AS- | {G}*{G}*mU*g*a*g*c*c*c*c*g*g*c*c* | 42125 | |
| DX- | {G}*{G} | | |
| 131-1 | | | |
| AS- | {G}*{C}*a*g*a*c*c*a*g*g*g*c*g*{C}* | 42126 | |
| DX- | {C} | | |
| 132-1 | | | |
| AS- | {C}*{C}*mU*g*g*g*c*c*g*g*c*t*{C}*m | 42127 | |
| DX- | U*{G} | | |
| 133-1 | | | |
| AS- | {C}*{C}*t*g*g*g*c*c*g*g*c*t*c*{T}* | 42128 | |
| DX- | {G} | | |
| 133-2 | | | |
| AS- | (A)*(G)*(A)*(A)*g*g*c*a*g*g*a*a*t*c*c* | 42129 | |
| DX- | c*(A)*(G)*(G)*(C) | | |
| 134-1 | | | |
| AS- | {A}*{G}*{A}*a*g*g*c*a*g*g*a*a*t*c*c* | 42130 | |
| DX- | c*mA*{G}*mG*{C} | | |
| 134-2 | | | |
| AS- | {C}*{G}*g*g*t*g*c*c*t*g*g*c*c*mC*t* | 42131 | |
| DX- | {T}*{C} | | |
| 135-1 | | | |
| AS- | {C}*{C}*a*g*c*t*c*c*t*c*c*c*g*g*mG* | 42132 | |
| DX- | {C} | | |
| 136-1 | | | |
| AS- | {T}*{T}*g*t*g*a*c*a*t*a*t*c*t*c*t*{G}* | 42133 | |
| DX- | mC*{A} | | |
| 137-1 | | | |
| AS- | {C}*mU*{C}*c*c*t*t*g*c*a*c*g*{T}*mC | 42134 | |
| DX- | *{A} | | |
| 138-1 | | | |
| AS- | {G}*mC{T}*c*c*c*t*t*g*c*a*c*g*{T}*m | 42135 | |
| DX- | C*{A} | | |
| 139-1 | | | |
| AS- | {A}*{G}*c*{T}*c*c*c*t*t*g*c*a*c*g*{T} | 42136 | |
| DX- | *mC*{A} | | |
| 140-1 | | | |
| AS- | (C)*(G)*(A)*(G)*c*t*c*c*c*t*t*g*c*a*c*g | 42137 | |
| DX- | *(T)*(C)*(A)*(G) | | |
| 141-1 | | | |
| AS- | {A}*mA*{G}*c*g*a*t*c*c*t*t*c*t*{C}*m | 42138 | |
| DX- | A*{A} | | |
| 142-1 | | | |

{N} can be an LNA; [N] can be a BNA; (N) can be a 2′-methyloxyethyl-modified uracil, guanine, adenine, or cytosine; * can be a phosphothionate-modified backbone; mp can be a methylphosphonate-modified backbone; Amino C6- can be 5′ amino-carbon 6 chain; 5mec can be 5-methyldeoxycytosine.

[0092] In the right most column of table 2 are RNAs that are partially complementary to listed DUX4 targeted oligonucleotides, but originating from a different genetic loci. Using a modified script of GGGenome (https://gggenome.dbcls.jp/), which allows rapid alignment of our oligonucleotide sequences to the human transcriptome (Human RNA Refseq release 205, March 2021). This script identified all transcripts that are partially complimentary to each possible oligonucleotide targeting DUX4, containing no more than 4 mismatches, bulges, insertions or deletions, containing two regions of complementarity at least 7 contiguous bases long, or one region at least 10 contiguous bases long. These interactions can also have a predicted TM of about 40° C. to about 65° C.

[0093] To understand what other transcripts may be related to FSHD and be beneficial to target in addition, we assembled a database of 10 studies with rigorous standards for sample handling, transcriptomic profiling by microarray and RNAseq, and significant patient information. We identified the genes that were commonly upregulated in FSHD muscle vs. control muscle among published datasets or using our own RNA-seq analysis. Interestingly, the clusters align well with clinical severity scores (i.e., mild, moderate, or severe diseases). Supporting our analysis, similar results were obtained from a similar analysis from a subset of the samples included in our larger meta-analysis as displayed in FIG. 11. From this analysis we created a database of upregulated genes in FSHD keeping with each gene the supporting evidence for this dysregulation, and any associated clinical correlations. From this database we next performed pathway enrichment analysis utilizing GO pathway analysis (12). The top upregulated pathways include inflammatory response and other immune regulated pathways, cellular proliferation, cell cycle regulation. The additional targeted RNAs represent transcripts that are upregulated or otherwise associated with the disease and may be beneficial to knockdown in addition to DUX4.

[0094] In addition, numerous RNA subsequences of additional genes associated with FSHD. For example, AS-DX-007 (SEQ. ID. NO. 23,789) is predicted to target three co-targets associated with FSHD, for example, DBET, MKI67, and IRF5. DBET is a non-coding RNA associated with opening of the D4Z4 repeats, and expression of DUX4 (38). MKI67 encodes the Ki-67 protein, which is upregulated FSHD muscle tissue, and may be involved in the DUX4 induction of the muscle fiber cell proliferation and damage. (FIG. 12A). IRF5 (Interferon Regulatory Factor 5) encodes a transcription factor that is upregulated by several inflammatory signals, and results in the expression of several cytokines such as TNF, and induction of the intracellular interferon response (FIG. 12B). Target subsequences within the transcripts of the mRNA of these genes (including those of DUX4 itself, are provided herein in Table 3 as shown in RNA form.

| Gene | | | SEQ | | | | SEQ |
|---|---|---|---|---|---|---|---|
| Name | Site | Sequence | ID NO: | Gene Name | Site | Sequence | ID NO: |
| A4GNT | 1 | AGTGCAGGATAT | 42139 | LINC00661 | 1 | CAGCCGGGGCA | 42517 |
| | | GTT | | | | GCA | |
| ABCA7 | 1 | CCTGGCTCTGCT | 42140 | LINC01275 | 1 | TACAGTCACAT | 42518 |
| | | GGAGGA | | | | CTCCTGG | |
| ABCB1 | 1 | TCCTCCTGCTGG | 42141 | LINC01602 | 1 | CCGGAGTTTCT | 42519 |
| | | ATGA | | | | GCC | |
| ABCB9 | 1 | ACCCCTGGCTGG | 42142 | LINC01605 | 1 | GGGGATCCCAT | 42520 |
| | | CA | | | | AACC | |
| ABCB9 | 2 | GCCTGCTGCTGG | 42143 | LINC01615 | 1 | CTGCCTCTCCT | 42521 |
| | | GA | | | | CCATCCAA | |
| ABCD2 | 1 | GCCTTGCTGGAT | 42144 | LINC02391 | 1 | GCCTGTTTGGA | 42522 |
| | | GA | | | | CCCC | |
| ABHD15 | 1 | CCCGCCGGGGCT | 42145 | LINC02725 | 1 | ACACCTGGCTC | 42523 |
| | | CTCC | | | | CTA | |
| ABHD2 | 1 | GGAGCCTGGTCT | 42146 | LINC02725 | 2 | AACACCTGGCT | 42524 |
| | | GC | | | | CCTA | |
| ABTB1 | 1 | GCCCTGCTGGAT | 42147 | LINC02802 | 1 | GGGGCAAGGG | 42525 |
| | | GA | | | | AGCTC | |
| ACE | 1 | CACCGCGGAGA | 42148 | LINC02904 | 1 | AACCTGGCTGG | 42526 |
| | | ATGC | | | | CTT | |
| ACOT6 | 1 | ACTGACTCCGCG | 42149 | LINGO3 | 1 | GCGCTGGAGGA | 42527 |
| | | GAG | | | | GCTGG | |
| ACOXL | 1 | ACATGAAGGGA | 42150 | LMF1 | 1 | CCACCTGGCTG | 42528 |
| | | GCTC | | | | GCAA | |
| ACP3 | 1 | GGCTGCTGCTGG | 42151 | LMX1A | 1 | AGGGATCCCAG | 42529 |
| | | ATGA | | | | AGTC | |
| ACTL10 | 1 | CCACCTTCCGAC | 42152 | LOC | 1 | CTCCCTCTCCA | 42530 |
| | | T | | 100507403 | | CCCCCA | |
| ACTL10 | 2 | CACCTTCCGACT | 42153 | LOC | 1 | TCAGCAGCTGA | 42531 |
| | | G | | 101927533 | | GGC | |
| ACTL10 | 3 | CCACCTTCCGAC | 42154 | LOXL2 | 1 | GGCCTGGGATT | 42532 |
| | | TG | | | | CG | |
| ADAM28 | 1 | AGCCTGGGATTA | 42155 | LPIN2 | 1 | GGCCTGGGATC | 42533 |
| | | CTG | | | | CCTC | |
| ADAM32 | 1 | ACACCTGGCTTC | 42156 | LPIN2 | 2 | TTGAGAAGGAT | 42534 |
| | | TA | | | | GCTT | |
| ADAM32 | 2 | AACACCTGGCTT | 42157 | LRP10 | 1 | CAGGAGGAGCT | 42535 |
| | | CTA | | | | TTAGGG | |
| ADAMTS12 | 1 | GCCCAGAGGAG | 42158 | LRP10 | 2 | TCAGGAGGAGC | 42536 |
| | | CTGG | | | | TTTAGG | |
| ADAMTS8 | 1 | GCGCGGGAGGA | 42159 | LRRC8A | 1 | CTGCCTCTCCA | 42537 |
| | | GCGGG | | | | CGCACA | |
| ADAMTSL3 | 1 | TGACGTGCAAGC | 42160 | LRRN2 | 1 | CTCGGCATTCC | 42538 |
| | | GG | | | | GAAGC | |
| ADCY3 | 1 | GCGGCCGGGCG | 42161 | LRRN2 | 2 | GGGGAGGGCG | 42539 |
| | | CCCGC | | | | CCCGC | |
| ADGRA1 | 1 | CTGGAGGAGCTT | 42162 | LRRN4 | 1 | TCCCAGACCCG | 42540 |
| | | CAGA | | | | CCCAGG | |
| ADGRA2 | 1 | GACCTCTGCTGT | 42163 | LUZP1 | 1 | GACTGTTTGGA | 42541 |
| | | CTTTG | | | | CCCA | |
| ADGRD1 | 1 | ACACCTGGCTGC | 42164 | LUZP1 | 2 | GTGACTGTTTG | 42542 |
| | | TG | | | | GACCC | |
| ADGRD1 | 2 | GCCTCTTTGGAC | 42165 | LYPD1 | 1 | CAGCCGGGGCA | 42543 |
| | | CCC | | | | GCC | |
| ADGRE5 | 1 | GCCTTCTGCTGG | 42166 | LZTS1 | 1 | CAGGCCGGCCC | 42544 |
| | | ATGA | | | | AGA | |
| ADGRL3 | 1 | GCGGCCGGGCG | 42167 | LZTS1 | 2 | TCCCAGGCCGG | 42545 |
| | | CCCGC | | | | CCCAGA | |
| ADGRL3 | 2 | GGCTGCTGCTGG | 42168 | MAB21L4 | 1 | TTGAGAAGGAT | 42546 |
| | | AGA | | | | CCTC | |
| AFAP1L2 | 1 | GAGGCCCTCCCG | 42169 | MAFB | 1 | TATTCAGACTG | 42547 |
| | | GCA | | | | GTTTC | |
| AFF3 | 1 | CAAGCCGGGGA | 42170 | MANIC1 | 1 | AACGCATTCCG | 42548 |
| | | GCG | | | | GAGC | |
| AFF3 | 2 | CCCGCGGAGAA | 42171 | MANSC4 | 1 | GCCCGGGAGGA | 42549 |
| | | CGC | | | | GCGG | |
| AJUBA | 1 | GCCTGCTGCTGG | 42172 | MAP3K12 | 1 | CTGGGCCGGCC | 42550 |
| | | ACGG | | | | CAGG | |
| ALPP | 1 | GCTGCTGCTGGA | 42173 | MAP3K12 | 2 | CTGGCTCCACC | 42551 |
| | | GA | | | | AGCCCA | |
| ANGPTL6 | 1 | GCCCGGGAGGC | 42174 | MAP3K8 | 1 | GGCGCCCTGGT | 42552 |
| | | GCGGG | | | | TCC | |
| ANKRD50 | 1 | CGCTCGTGGCCT | 42175 | MAP3K8 | 2 | TGCCTGGGATT | 42553 |
| | | CTCTG | | | | CTG | |
| ANKS1B | 1 | CCTGATGATTAG | 42176 | MARCHF4 | 1 | TCCTTCTGTGC | 42554 |
| | | TGA | | | | CCTTGT | |
| ANKS3 | 1 | GCGGGGAGGAG | 42177 | MAST3 | 1 | CGCGCCCTGGT | 42555 |
| | | CTGG | | | | CGGC | |
| ANKS3 | 2 | CTGGAGGGCGCC | 42178 | MAST3 | 2 | CCGGCCGGGGC | 42556 |
| | | CGC | | | | CGCC | |
| ANTXR2 | 1 | AGTGCAAGGGA | 42179 | MAST3 | 3 | CAGCCTCTCCC | 42557 |
| | | CTC | | | | CCAGCCCC | |
| ANTXR2 | 1 | AGTGCAAGGGA | 42180 | MAST4 | 1 | TTGAGAAGGAT | 42558 |
| | | CTC | | | | GCTA | |
| ANXA4 | 1 | TGACGTGCAAGA | 42181 | MBD2 | 1 | TCCTGCTGGTG | 42559 |
| | | GC | | | | GATGA | |
| ANXA4 | 2 | TGACGTGCAAGA | 42182 | MCEMP1 | 1 | GGCTGGGATTC | 42560 |
| | | GCT | | | | CG | |
| APLP1 | 1 | CTGGAGGAGCGT | 42183 | MCTP1 | 1 | CAGAGCCGGCG | 42561 |
| | | AGGA | | | | CGG | |
| ARAP1 | 1 | GCCCCGGAGGA | 42184 | MEFV | 1 | ACCCTGGAGGA | 42562 |
| | | GCTGC | | | | GCTGG | |
| ARHGEF34P | 1 | GTGCTCTCACCA | 42185 | MEG3 | 1 | GGGGCAGGGC | 42563 |
| | | GCCCA | | | | GCCCAC | |
| ARHGEF35 | 1 | ATGCTCTCACCA | 42186 | MEG3 | 2 | CCACCTTCCGA | 42564 |
| | | GCCCA | | | | GCCTCCA | |
| ARHGEF5 | 1 | GTGCTCTCACCA | 42187 | MEGF11 | 1 | ACTCCTGGCTG | 42565 |
| | | GCCCA | | | | GCTG | |
| ARID3C | 1 | TTTGGATTCCTG | 42188 | MEGF11 | 2 | GATGGCCCTCC | 42566 |
| | | CCTTCT | | | | CTAA | |
| ARL5C | 1 | CCCGGGGGAGC | 42189 | MFHAS1 | 1 | GCCCTGGAGGA | 42567 |
| | | GGAGC | | | | GCTGG | |
| ARSJ | 1 | CCGGAGTTTCTG | 42190 | MGAM | 1 | TTTCTGCTGAA | 42568 |
| | | CGGA | | | | TGTC | |
| ASAP1 | 1 | CAGAGCCGGCA | 42191 | MGAT1 | 1 | CGGGCAAGGG | 42569 |
| | | AGG | | | | AGCC | |
| ASB7 | 1 | CTGGAGTTTCTG | 42192 | MGAT1 | 2 | TGCGGGCAAGG | 42570 |
| | | CAC | | | | GAGC | |
| ASCL5 | 1 | GGCGCCCTGGCT | 42193 | MICALL2 | 1 | GGCCTGGGATT | 42571 |
| | | GA | | | | CTC | |
| ASF1B | 1 | CCCTCTCTGTGC | 42194 | MICALL2 | 2 | CGGCCTGGGAG | 42572 |
| | | CCTGGT | | | | CCTG | |
| ASIC2 | 1 | CCGGCCGGGGCC | 42195 | MINK1 | 1 | CAAGACGGGGC | 42573 |
| | | GCC | | | | AGCT | |
| ASIC2 | 2 | GGGCGGGCGCC | 42196 | MIR9-3HG | 1 | CAGCGCCGGCC | 42574 |
| | | CGC | | | | CAGC | |
| ASIC2 | 3 | GGGAGCTGCTGG | 42197 | MIS18A | 1 | ACACCTGGCTG | 42575 |
| | | CCCT | | | | GTTC | |
| ATG16L2 | 1 | CTCAGGGGAGCT | 42198 | MKI67 | 1 | AGACCTGGCTG | 42576 |
| | | GGAGGC | | | | GCTT | |
| ATL3 | 1 | GGGGCCTGGTCT | 42199 | MKI67 | 2 | AAGACCTGGCT | 42577 |
| | | GC | | | | GGCTT | |
| ATP2A3 | 1 | GCTTCTTTCCTG | 42200 | MKI67 | 3 | CAGTTGAAGGC | 42578 |
| | | GG | | | | ATCCC | |
| ATP8A2 | 1 | ACACCTGGCTGC | 42201 | MKI67 | 4 | GAAGACCTGGC | 42579 |
| | | TA | | | | TGGCTTC | |
| ATP8A2 | 2 | CACACCTGGCTG | 42202 | MMEL1 | 1 | AGGGATCCCAG | 42580 |
| | | CTA | | | | AGGC | |
| ATP8B2 | 1 | CCCGGGGGAGC | 42203 | MMEL1 | 2 | GCTGCTGCTGG | 42581 |
| | | GGGGC | | | | TGA | |
| ATXN7L1 | 1 | CCTTTCTGTCCT | 42204 | MMRN2 | 1 | CTGGAGGAGCT | 42582 |
| | | GGG | | | | TTAA | |
| B3GNT3 | 1 | ACCCTGGCTGGC | 42205 | MMRN2 | 2 | TGGAGGAGCTT | 42583 |
| | | CA | | | | TAAC | |
| B3GNT3 | 2 | TCCTGCTGCTGG | 42206 | MRTFA | 1 | CTGGGATTCCT | 42584 |
| | | TGA | | | | GCTTGT | |
| BARX1 | 1 | GGCCTGGGATGC | 42207 | MST1R | 1 | CTGCCTCTTCTC | 42585 |
| | | CCG | | | | AGCCCA | |
| BCAS4 | 1 | CTGGAGGAGCAT | 42208 | MTUS2 | 1 | GCCTGCTGCTG | 42586 |
| | | TAGA | | | | ATTA | |
| BCL11A | 1 | CAGGCCGGCCCA | 42209 | MUC16 | 1 | GGGGATCCCAC | 42587 |
| | | GC | | | | AGTC | |
| BOC | 1 | CACCTTCCGAAC | 42210 | MX1 | 1 | CAGGGATCTGC | 42588 |
| | | TG | | | | TGGAGGA | |
| BTG3- | 1 | GCAGCCGCCCTG | 42211 | MYEOV | 1 | ATGGCCCTCCC | 42589 |
| AS1 | | CT | | | | AACC | |
| C1orf52 | 1 | TCTCTCTTTCCTG | 42212 | MYH10 | 1 | GCGCTGCTGGA | 42590 |
| | | GG | | | | TGA | |
| C2CD4D- | 1 | CGGCGCCGGCCC | 42213 | MYO1F | 1 | GGGCCCTGGTC | 42591 |
| AS1 | | AGG | | | | TTC | |
| C2CD4D- | 2 | TCCCTGTGGATT | 42214 | MYO1F | 2 | CTGGGATACTG | 42592 |
| AS1 | | CTCT | | | | CCTTCT | |
| C9orf47 | 1 | TCCCTGTGGATT | 42215 | MYO3A | 1 | GCCCGGGAGGG | 42593 |
| | | CAT | | | | GTGG | |
| CA9 | 1 | GCCCGGGAGGC | 42216 | MYOCD | 1 | CCCTGGGTTCC | 42594 |
| | | CTGG | | | | TATAGAAG | |
| CACNA1I | 1 | GGCGCCCGGGTC | 42217 | NCCRP1 | 1 | GCTGCTGCTGG | 42595 |
| | | TGC | | | | AGGA | |
| CADPS2 | 1 | CGGGGATCCCCG | 42218 | NCOA7 | 1 | ACCTTCCGACA | 42596 |
| | | AGCA | | | | CTTC | |
| CALHM3 | 1 | GCCTGCTGCTGG | 42219 | NDN | 1 | GCCCGAGGAGC | 42597 |
| | | CTGC | | | | TGG | |
| CAMK1D | 1 | TCTTTCGCGGGG | 42220 | NDOR1 | 1 | CGGCCTGGGAG | 42598 |
| | | AAGA | | | | TCTG | |
| CAPN5 | 1 | GGGAGCTGCTGG | 42221 | NEAT1 | 1 | CCCTCCTTTCCT | 42599 |
| | | CCTCA | | | | GGG | |
| CBLB | 1 | CCAGCCGGGGCT | 42222 | NEK11 | 1 | ATCTGGTTTCA | 42600 |
| | | CCCC | | | | GAC | |
| CCDC115 | 1 | GACCTGGAGGA | 42223 | NEUROG2 | 1 | GCCCGGGAGGA | 42601 |
| | | GCTGG | | | | GCCAG | |
| CCDC160 | 1 | CGGAGCCGGCCC | 42224 | NFATC2 | 1 | GGGGTCCCAGA | 42602 |
| | | GG | | | | GCC | |
| CCDC185 | 1 | GCCCCGGAGGA | 42225 | NFATC2 | 2 | AGGGGTCCCAG | 42603 |
| | | GCTGG | | | | AGCC | |
| CCDC88C | 1 | GCTCCGGAGGA | 42226 | NHS | 1 | CGGGGATCCCG | 42604 |
| | | GCTGG | | | | GAGGC | |
| CCDC88C | 2 | TCCGGAGGAGCT | 42227 | NIBAN2 | 1 | GGCACCCTGGT | 42605 |
| | | GGAGGC | | | | CTGT | |
| CCNJL | 1 | CCACCTTCCGAG | 42228 | NINL | 1 | GGAGGGCCAGC | 42606 |
| | | CC | | | | ACCCG | |
| CD101 | 1 | TGAGTGCAGAGT | 42229 | NIPAL4 | 1 | GGCCTGGCATT | 42607 |
| | | ATC | | | | CCTG | |
| CD93 | 1 | TCCGGCTGCTGG | 42230 | NIPAL4 | 2 | GGGCCTGGCAT | 42608 |
| | | ATGA | | | | TCCTG | |
| CDC14B | 1 | GGCTGGCTCAGA | 42231 | NLRC5 | 1 | GGGGATCCCAC | 42609 |
| | | GGGGC | | | | AGCC | |
| CDCA2 | 1 | CAAGCCGGCCCA | 42232 | NLRC5 | 2 | GGGGGATCCCA | 42610 |
| | | GC | | | | CAGCC | |
| CDK5R2 | 1 | GCCCGGGCGAG | 42233 | NOD2 | 1 | CTGCCTCCCAC | 42611 |
| | | CTGG | | | | CAGTCTA | |
| CELSR3 | 1 | GCCAGGAGGAG | 42234 | NOL4L | 1 | CAACGGGGCAG | 42612 |
| | | CTGG | | | | CT | |
| CELSR3 | 2 | GTCTGCTGCTGG | 42235 | NOLC1 | 1 | GAAGCGGGGC | 42613 |
| | | ATGG | | | | AGCT | |
| CENATAC- | 1 | GCCTGCTGCTGA | 42236 | NOS3 | 1 | CAGGGCTCTGC | 42614 |
| DT | | TGC | | | | TGGAGCA | |
| CEP170B | 1 | CAAGCCGGGGA | 42237 | NOS3 | 2 | CTGCCTCTGCT | 42615 |
| | | CT | | | | CCAGCCCC | |
| CEP170B | 2 | GCCCGGGAGGA | 42238 | NOTCH3 | 1 | CCGACTTTCTG | 42616 |
| | | GCAGA | | | | CAGC | |
| CFAP157 | 1 | GAGAGCCGGCC | 42239 | NPIPA7 | 1 | CACCTTCCGAG | 42617 |
| | | CAGC | | | | TG | |
| CFAP300 | 1 | TACCTCTTCTGT | 42240 | NPIPA7 | 2 | CACCTTCCGAG | 42618 |
| | | CTTTA | | | | TGT | |
| CHD5 | 1 | CCACCTTCCGAA | 42241 | NPIPA8 | 1 | CACCTTCCGAG | 42619 |
| | | GCT | | | | TG | |
| CHD5 | 2 | CACCTTCCGAAG | 42242 | NPIPA8 | 2 | CACCTTCCGAG | 42620 |
| | | CTC | | | | TGT | |
| CHD5 | 3 | GCCCGGGAGGG | 42243 | NRP2 | 1 | GGGAGCTGTGG | 42621 |
| | | GTGG | | | | CCTCT | |
| CHD5 | 4 | CCACCTTCCGAA | 42244 | NTRK3 | 1 | GTGAATCCCAG | 42622 |
| | | GCTC | | | | AGCC | |
| CHD5 | 5 | CCACCTTCCGAA | 42245 | NUPR2 | 1 | AGGAGGAGCTT | 42623 |
| | | GCTCCTG | | | | TACGAC | |
| CHP1P2 | 1 | CTCCTGTCCACC | 42246 | NYNRIN | 1 | GGGGCCCTGGT | 42624 |
| | | AGCCCT | | | | CTGG | |
| CHRNB4 | 1 | CTGCCTCTCCAT | 42247 | NYNRIN | 2 | GCTTTCTTTCCT | 42625 |
| | | CACCA | | | | GGT | |
| CHST11 | 1 | GCCTGCTGCTGG | 42248 | OAS3 | 1 | GGCGCCCTGGC | 42626 |
| | | GTA | | | | CGC | |
| CHST15 | 1 | GGCTCCTGGTCT | 42249 | ODAD1 | 1 | GCGGGAGGAG | 42627 |
| | | GC | | | | CTGG | |
| CHST8 | 1 | CGCCGCGGAGA | 42250 | OR13J1 | 1 | ACACCTGGCTG | 42628 |
| | | ACCGC | | | | TA | |
| CIITA | 1 | GGCTGGGATTCC | 42251 | OS9 | 1 | GGCCTGGGATC | 42629 |
| | | TA | | | | CCTG | |
| CLIP2 | 1 | GCCCAGGAGGA | 42252 | OS9 | 2 | GGGCCTGGGAT | 42630 |
| | | GCTGG | | | | CCCTG | |
| CMAHP | 1 | TGCTGGAGGAGC | 42253 | OSBPL5 | 1 | GTCCAGGAGGA | 42631 |
| | | ATCAGG | | | | GCTGG | |
| CNDP2 | 1 | CCCTCTCTGAGC | 42254 | OSBPL8 | 1 | CCGTTCTTTCCT | 42632 |
| | | CCTTGT | | | | GGA | |
| CNKSR3 | 1 | GACCTGGAGGA | 42255 | OTOG | 1 | GCCTGCTGCTG | 42633 |
| | | GCTGG | | | | GGA | |
| CNTNAP1 | 1 | CTGCCTCTCCCC | 42256 | P2RX1 | 1 | CCACCCCTCCA | 42634 |
| | | CATCCTA | | | | CCAGCCCA | |
| CNTROB | 1 | GCCCTGGAGGA | 42257 | P3H1 | 1 | CAGCCCGGCCC | 42635 |
| | | GCTGT | | | | AGG | |
| COL12A1 | 1 | GGGGATCCCAG | 42258 | PABPCIL | 1 | GCATGCTGCTG | 42636 |
| | | AACA | | | | GAGA | |
| COL23A1 | 1 | GGCGCCCTGGAC | 42259 | PAK3 | 1 | GGCCTGGGATT | 42637 |
| | | GC | | | | TG | |
| COL23A1 | 2 | GCCTGCTGCTGG | 42260 | PALS2 | 1 | ACACCTGGCTG | 42638 |
| | | GTGT | | | | CTG | |
| COL4A1 | 1 | GGGCCCTGGTCT | 42261 | PAPPA | 1 | CCAGACCGCCC | 42639 |
| | | TC | | | | GGT | |
| COL4A1 | 2 | CTCCTGGGATTC | 42262 | PAQR5 | 1 | GCCCGGGAGGA | 42640 |
| | | CTG | | | | GTGT | |
| COL5A3 | 1 | GCCTCCCTGGTC | 42263 | PAQR8 | 1 | TCACCTGGCTG | 42641 |
| | | TGC | | | | GCTG | |
| COL5A3 | 2 | TGGGATCCCAGG | 42264 | PATL2 | 1 | CCACCGCCCTG | 42642 |
| | | GCC | | | | CT | |
| COL5A3 | 3 | GGCTGGCGAGG | 42265 | PCDHA2 | 1 | GACCGGGAGG | 42643 |
| | | AGGGGC | | | | AGCTGT | |
| COL6A3 | 1 | AACTCGTTTGGA | 42266 | PCDHA4 | 1 | GACCGGGAGG | 42644 |
| | | CCCT | | | | AGCTGT | |
| COL6A3 | 2 | GACCAGGAGGA | 42267 | PCDHA5 | 1 | GACCGGGAGG | 42645 |
| | | GCTGG | | | | AGCTGT | |
| COL6A3 | 3 | GAACTCGTTTGG | 42268 | PCDHB2 | 1 | GACCGGGAGG | 42646 |
| | | ACCC | | | | AGCTGT | |
| COL6A5 | 1 | CCAGAGAACGG | 42269 | PCDHB6 | 1 | GACCGGGAGG | 42647 |
| | | TGGCAC | | | | AGCTGT | |
| COL8A1 | 1 | TGGGATCCCAGG | 42270 | PCDHB6 | 2 | TGGCGGGTCTC | 42648 |
| | | CC | | | | CGCCCC | |
| CORO1A | 1 | GCCAGGGAGGA | 42271 | PCDHGA5 | 1 | GCCGGAGGAGC | 42649 |
| | | GCTGG | | | | TGG | |
| CPNE4 | 1 | CCAGACCGCCGG | 42272 | PCED1B- | 1 | GTGGAAGGATC | 42650 |
| | | CT | | AS1 | | GCTT | |
| CPNE9 | 1 | CCCTCTTTCCTG | 42273 | PCOLCE2 | 1 | GCCTGCTGCTG | 42651 |
| | | GG | | | | GCTGC | |
| CREB3L1 | 1 | GATGCCCTCCCG | 42274 | PCSK5 | 1 | GGAGTGCAGAG | 42652 |
| | | AA | | | | ATTG | |
| CRX | 1 | CTGGGTCCCTGC | 42275 | PCSK9 | 1 | TCCACCAGCTG | 42653 |
| | | CTTCT | | | | AGGC | |
| CYP4F3 | 1 | TGTGATGAGTCT | 42276 | PDCD4- | 1 | TGGGATCCCAG | 42654 |
| | | GAGAT | | AS1 | | AACC | |
| DBET | 1 | CAAGCCGGGGC | 42277 | PDCD4- | 2 | CTGGGATCCCA | 42655 |
| | | AGCT | | AS1 | | GAACC | |
| DBET | 2 | GGCGCCCTGGTC | 42278 | PDK3 | 1 | TCTTTCTTTCCT | 42656 |
| | | TGC | | | | GAG | |
| DBET | 3 | ACACCTGGCTGG | 42279 | PDZD4 | 1 | GGCCTGGAGGA | 42657 |
| | | CTA | | | | GCTGG | |
| DBET | 4 | GGCCTGGGATTC | 42280 | PEAK3 | 1 | GTCCCTCTCCA | 42658 |
| | | CTG | | | | CCAACCCA | |
| DBET | 5 | CCATTCTTTCCT | 42281 | PEG3 | 1 | GCTTCTTTCCTG | 42659 |
| | | GGG | | | | GG | |
| DBET | 6 | GGGGATCCCAG | 42282 | PFN1 | 1 | TCACGCCAGCT | 42660 |
| | | AGCC | | | | GAGGT | |
| DBET | 7 | CAGAGCCGGCCC | 42283 | PGR | 1 | ACTCCACTCCT | 42661 |
| | | AGG | | | | GGAG | |
| DBET | 8 | GCCTGCTGCTGG | 42284 | PIK3R5 | 1 | CTGCTCTCCAC | 42662 |
| | | ATGA | | | | CAGCTCT | |
| DBET | 9 | CCGGAGTTTCTG | 42285 | PIK3R5- | 1 | ATGGGATGCCT | 42663 |
| | | CAGC | | DT | | GCCTTCT | |
| DBET | 10 | TCTTTCGCGGGG | 42286 | PIK3R6 | 1 | CAGGCCGGCCC | 42664 |
| | | AACA | | | | AGT | |
| DBET | 11 | AACACCTGGCTG | 42287 | PIRT | 1 | CCAGACCGCCA | 42665 |
| | | GCTA | | | | GCT | |
| DBET | 12 | CGGCCTGGGATT | 42288 | PKHD1 | 1 | TAGCCAGCTGA | 42666 |
| | | CCTG | | | | GGC | |
| DBET | 13 | ACTCCACACCGC | 42289 | PLA2G6 | 1 | CAGCGGGGCAG | 42667 |
| | | GGAG | | | | CT | |
| DBET | 14 | CACCGCGGAGA | 42290 | PLA2G6 | 2 | CTGCCTCTGCC | 42668 |
| | | ACTGC | | | | CCAGCCCC | |
| DBET | 15 | CGGGGATCCCAG | 42291 | PLCB3 | 1 | CCCCGGGAGAG | 42669 |
| | | AGCC | | | | CTGG | |
| DBET | 16 | CAGATGCAAGG | 42292 | PLEKHA6 | 1 | CAGGTCGGGGC | 42670 |
| | | CATCCC | | | | AGCT | |
| DBET | 17 | CTGGAGGAGCTT | 42293 | PLEKHB2 | 1 | CCGGCCGGGGC | 42671 |
| | | TAGGA | | | | CCGCC | |
| DBET | 18 | TGGAGGAGCTTT | 42294 | PLEKHD1 | 1 | AGCTCCTGGCC | 42672 |
| | | AGGAC | | | | TCTCTG | |
| DBET | 19 | GGGCGTGTCTCC | 42295 | PLEKHG3 | 1 | CCAGGGGGAGC | 42673 |
| | | GCCCC | | | | TGGTGGC | |
| DBET | 20 | CCCGGGGGAGCT | 42296 | PLPP4 | 1 | ACACCTTCCGA | 42674 |
| | | GGAGGC | | | | CACT | |
| DBET | 21 | CGGAAGAGGCG | 42297 | PLPP4 | 2 | CACCTTCCGAC | 42675 |
| | | CCTCGC | | | | ACTG | |
| DBET | 22 | CTCGCTGGAAGC | 42298 | PLPP4 | 3 | ACACCTTCCGA | 42676 |
| | | ACCCCT | | | | CACTG | |
| DBET | 23 | CCCCTCAGCGAG | 42299 | PLPP4 | 4 | CACCTTCCGAC | 42677 |
| | | GAAGAA | | | | ACTGG | |
| DBET | 24 | CAGCGAGGAAG | 42300 | PLXDC2 | 1 | ACCTGCTGCTG | 42678 |
| | | AATACCG | | | | GATGA | |
| DBET | 25 | CCGGGCTCTGCT | 42301 | PMEL | 1 | CGGGGATCCCG | 42679 |
| | | GGAGGA | | | | GAGCT | |
| DBET | 26 | TGCTGGAGGAGC | 42302 | PMEPA1 | 1 | CGGAATCCCAG | 42680 |
| | | TTTAGG | | | | AGCC | |
| DBET | 27 | GGCGGTGGCCTC | 42303 | PMEPA1 | 1 | CGGAATCCCAG | 42681 |
| | | TCTTTC | | | | AGCC | |
| DBET | 28 | GAACACCTGGCT | 42304 | PML | 1 | CTGCCTCCTCC | 42682 |
| | | GGCTAC | | | | AGCCCA | |
| DBET | 29 | GGCTGGCTACGG | 42305 | POLR2H | 1 | CCGAGCCGGCC | 42683 |
| | | AGGGGC | | | | CAGG | |
| DBET | 30 | CCGGCCTGGGAT | 42306 | POLR2H | 2 | GCCCGGGAGGG | 42684 |
| | | TCCTGC | | | | GCGGG | |
| DBET | 31 | CTGGGATTCCTG | 42307 | POM121L10P | 1 | CTGGGATCCTG | 42685 |
| | | CCTTCT | | | | CCTTCA | |
| DBET | 32 | GGCCGGTGAGA | 42308 | POM121L1P | 1 | CTGGGATCCTG | 42686 |
| | | GACTCC | | | | CCTTCA | |
| DBET | 33 | CCCGGGGATCCC | 42309 | POM121L4P | 1 | CTGGGATCCTG | 42687 |
| | | AGAGCC | | | | CCTTCA | |
| DBET | 34 | CCGGGGATCCCA | 42310 | POM121L8P | 1 | CTGGGATCCTG | 42688 |
| | | GAGCCG | | | | CCTTCA | |
| DBET | 35 | TCCCAGAGCCGG | 42311 | PON1 | 1 | CTGTGGATCCT | 42689 |
| | | CCCAGG | | | | GAGA | |
| DBET | 36 | CCGGCCCAGGTA | 42312 | PPAN- | 1 | CCTGGCCGCCC | 42690 |
| | | CCAGCA | | P2RY11 | | TGCT | |
| DBET | 37 | CTGCCTCTCCAC | 42313 | PPOX | 1 | CTGTTCCACCA | 42691 |
| | | CAGCCCA | | | | GCCCA | |
| DBET | 38 | GGAACACCTGGC | 42314 | PPP1R15A | 1 | CAGGGCCGGCC | 42692 |
| | | TGGCTACG | | | | CAGG | |
| DBET | 39 | GCCTGGGATTCC | 42315 | PPP1R15A | 2 | GCCCAGGAGGA | 42693 |
| | | TGCCTTCT | | | | GCTGA | |
| DBET | 40 | TCCCGGGGATCC | 42316 | PPT2- | 1 | GCTGCTGCTGG | 42694 |
| | | CAGAGCCG | | EGFL8 | | AGGA | |
| DBH- | 1 | GGACTGCAAGG | 42317 | PRAMEF34P | 1 | GCCCTGGAGGA | 42695 |
| AS1 | | GAG | | | | GCTGC | |
| DCAKD | 1 | GGCCTGGGATAC | 42318 | PRAMEF36P | 1 | GCCCTGGAGGA | 42696 |
| | | CTT | | | | GCTGC | |
| DDR2 | 1 | ACTGAGTTTCTG | 42319 | PRDM16 | 1 | GGCGCCCTGGG | 42697 |
| | | CAGC | | | | CTGC | |
| DDR2 | 2 | GTGCCTCTCCAC | 42320 | PRKCB | 1 | CAGAGCCGGCG | 42698 |
| | | CACCGA | | | | CAGG | |
| DDX11 | 1 | TCCTGTGCTGGA | 42321 | PRKY | 1 | CCGGGCCGGCC | 42699 |
| | | TGA | | | | CAGG | |
| DENND2A | 1 | GGCCTGGGATTC | 42322 | PROK1 | 1 | GCTCTCTTTCCT | 42700 |
| | | TG | | | | GGG | |
| DENND2A | 2 | AGGCCTGGGATT | 42323 | PROSER3 | 1 | CCAGGCCGCCC | 42701 |
| | | CTG | | | | TGCT | |
| DGKI | 1 | CAGTCAAGGCAT | 42324 | PRR3 | 1 | CCGACCGCCCT | 42702 |
| | | CCC | | | | GT | |
| DGKQ | 1 | ACCCTGGCTGGC | 42325 | PRR5L | 1 | GTTCTGGCTGA | 42703 |
| | | TC | | | | AGTC | |
| DIPK2B | 1 | ACAACTGGCTGG | 42326 | PRSS23 | 1 | TAACTTGTCTG | 42704 |
| | | CTT | | | | TCTTTG | |
| DLG2 | 1 | GGCCTGGGATTC | 42327 | PRUNE2 | 1 | GTCTGCTGCTG | 42705 |
| | | AG | | | | GTGA | |
| DLGAP2 | 1 | ATTCGGCTGAAT | 42328 | PTPN9 | 1 | CGAGCCGGCCC | 42706 |
| | | GTC | | | | CGG | |
| DLX1 | 1 | CGGAGCTCGCGG | 42329 | PTPRN2 | 1 | CTCGCGGAGAA | 42707 |
| | | CCTCT | | | | CGGC | |
| DLX1 | 2 | AGCTCGCGGCCT | 42330 | PYHIN1 | 1 | CACAATATCCC | 42708 |
| | | CTTTG | | | | CTGTG | |
| DLX4 | 1 | ATCTGGTTTCAG | 42331 | RAB31 | 1 | GCCCGGGAGGA | 42709 |
| | | AAC | | | | GCCGG | |
| DNAAF11 | 1 | CCACCTTCCGTC | 42332 | RAB37 | 1 | ACCAGGGAGG | 42710 |
| | | CT | | | | AGCTGG | |
| DNAH1 | 1 | CCACCTTCAAGC | 42333 | RAB39A | 1 | GGGCGGGCGCC | 42711 |
| | | TGTCTT | | | | CGC | |
| DNAH10 | 1 | GGGGATCCCAG | 42334 | RAPGEF4 | 1 | GTCCGGGAGGA | 42712 |
| | | GGCC | | | | GCGGG | |
| DNAH10 | 2 | TGGGGATCCCAG | 42335 | RASAL3 | 1 | CGGGCCGGCCC | 42713 |
| | | GGCC | | | | AGG | |
| DNAH14 | 1 | TGGAGGAGCTTT | 42336 | RASAL3 | 2 | GCGCTGGAGGA | 42714 |
| | | AAAC | | | | GCTGG | |
| DNAH2 | 1 | CGCCTGGGATTC | 42337 | RASGRP2 | 1 | GGGCGTGCCCG | 42715 |
| | | TG | | | | CCCC | |
| DNAH2 | 1 | CGCCTGGGATTC | 42338 | RASSF1 | 1 | GAAGGGCCGCA | 42716 |
| | | TG | | | | CCCG | |
| DNAH2 | 2 | CCACACCTACGC | 42339 | RASSF1 | 2 | GTGCGTGTCCC | 42717 |
| | | TGTCTA | | | | CGCCCC | |
| DOCK11 | 1 | AGCTCACTGGCC | 42340 | RBP1 | 1 | GGCGGTCCCAG | 42718 |
| | | TCTCAG | | | | AGCC | |
| DPF1 | 1 | CCGGCCGGGGCT | 42341 | RCVRN | 1 | CCACCTGGCTG | 42719 |
| | | CAGC | | | | GCTG | |
| DPP9- | 1 | CTCGCTGGAAGC | 42342 | RELB | 1 | CCAGACCGCCG | 42720 |
| AS1 | | CCCCT | | | | GCT | |
| DSCAM | 1 | CACCGCGGAGA | 42343 | RELL2 | 1 | GGCGCCCTGGC | 42721 |
| L1 | | ACGC | | | | CCGC | |
| DZIP1L | 1 | TCTTCCTTTCCTG | 42344 | RGPD6 | 1 | CAAGCCGGGGA | 42722 |
| | | GG | | | | GCG | |
| ECEL1 | 1 | GCCTGGAGGAG | 42345 | RGS11 | 1 | CCTGAGTTTCT | 42723 |
| | | CTGG | | | | GCGGC | |
| EDNRB | 1 | CGCGCCCTGGTT | 42346 | RHCG | 1 | GCCCAGAGGAG | 42724 |
| | | GC | | | | CTGG | |
| EFCC1 | 1 | GGCGCCCTGGCT | 42347 | RHPN2 | 1 | ACCTGCTGCTG | 42725 |
| | | GC | | | | GAGA | |
| EFCC1 | 2 | CCTGGGGGAGCT | 42348 | RIMS4 | 1 | TGCATGCAAGG | 42726 |
| | | GGAGGC | | | | GAG | |
| EGFL6 | 1 | CAGTGCAAGGC | 42349 | RIPK4 | 1 | AGACCTGGCTG | 42727 |
| | | ATCAC | | | | GCCA | |
| EGR1 | 1 | CCGGCCCAGGTC | 42350 | RIPK4 | 2 | AAGACCTGGCT | 42728 |
| | | AGCA | | | | GGCCA | |
| ELF3 | 1 | GGGGATCCCAA | 42351 | RNASE10 | 1 | AACCTGGCTGG | 42729 |
| | | GCA | | | | CCA | |
| ENC1 | 1 | GCTGCTGCTGGA | 42352 | RNF212 | 1 | GGCGGTCCCAG | 42730 |
| | | GA | | | | AGCC | |
| ENOX1 | 1 | GCCCGGGAGGA | 42353 | RNF212 | 2 | CGGCGGTCCCA | 42731 |
| | | GCGG | | | | GAGCC | |
| EPHA2 | 1 | CCTTGCTTTCCT | 42354 | RPS2P32 | 1 | CCACCTTGGAT | 42732 |
| | | GGG | | | | GCTGTCTC | |
| EPHB4 | 1 | GGCGCCCTGGAC | 42355 | RTEL1 | 1 | GCTGCTGCTGG | 42733 |
| | | TCC | | | | AGA | |
| EPHB4 | 2 | CTCCCTCCACCA | 42356 | RTEL1- | 1 | GCTGCTGCTGG | 42734 |
| | | GCTCA | | TNFRSF6B | | AGA | |
| EPSTI1 | 1 | TCCGCCAGCTGA | 42357 | RTN1 | 1 | GCCCTGAGGAG | 42735 |
| | | AGC | | | | CTGG | |
| ERICH3 | 1 | ACACCTGGCTGG | 42358 | RTN4RL2 | 1 | GCCCTGGAGGA | 42736 |
| | | GTA | | | | GCTGG | |
| ERICH3 | 2 | AACACCTGGCTG | 42359 | RUSC1 | 1 | GGACCCTGGTC | 42737 |
| | | GGTA | | | | TGC | |
| ESPN | 1 | GGCGCCCTGGCA | 42360 | S1PR5 | 1 | TGCGCCTGGTC | 42738 |
| | | GC | | | | TGC | |
| EVC2 | 1 | CCGGGCCGGCCC | 42361 | SAMD3 | 1 | GGCAGGGATTC | 42739 |
| | | AGG | | | | CTG | |
| EXOC3L1 | 1 | GCTGCTGCTGGC | 42362 | SASH1 | 1 | TGGTGCAGAGA | 42740 |
| | | TGA | | | | TACG | |
| EXOC3L2 | 1 | CGAGCCGGCCCG | 42363 | SBNO2 | 1 | GCCCGAGAGGA | 42741 |
| | | GG | | | | GCTGG | |
| EZR | 1 | GGCGCCCTGGTT | 42364 | SCN5A | 1 | CGGGGATCCAG | 42742 |
| | | TGT | | | | AGCC | |
| EZR | 2 | GCTGCTGCTGGA | 42365 | SCN5A | 2 | CCCGGGGATCC | 42743 |
| | | TA | | | | AGAGCC | |
| F11R | 1 | CCACCTGGCTGG | 42366 | SCN5A | 3 | CCGGGGATCCA | 42744 |
| | | CA | | | | GAGCCC | |
| FAM171A2 | 1 | CCAGGCGGGGC | 42367 | SDC3 | 1 | CTGGCCCCACC | 42745 |
| | | AGCT | | | | AGCCCA | |
| FAM205A | 1 | GATTCAGATGGT | 42368 | SDK1-AS1 | 1 | CCTGGATAATT | 42746 |
| | | TTC | | | | AGTGC | |
| FAM83D | 1 | GCTCTGGAGGAG | 42369 | SDK1-AS1 | 2 | GAGACTCTTTT | 42747 |
| | | CTGG | | | | GGACCA | |
| FAM83G | 1 | AGAAACGCTGG | 42370 | SEMA4C | 1 | GTCCCTCTCCC | 42748 |
| | | CCCAG | | | | CAGCCCA | |
| FANCB | 1 | AGCTCGCGGGCT | 42371 | SEMA5B | 1 | GTCGCCCTGGT | 42749 |
| | | CTCTG | | | | CTGA | |
| FAS | 1 | CAGGCGGGGCA | 42372 | SERPINE1 | 1 | TGGAGGACCTT | 42750 |
| | | GCT | | | | TAGGTC | |
| FAT1 | 1 | AGTGCAGAGATT | 42373 | SEZ6 | 1 | CAGCGGGGCAG | 42751 |
| | | GC | | | | CT | |
| FAT2 | 1 | CCTGCTTTCCTG | 42374 | SH3TC1 | 1 | GCCTGCTGCTG | 42752 |
| | | GG | | | | GGA | |
| FAT3 | 1 | CCGCCGCCCTGC | 42375 | SHANK1 | 1 | TCTGTCTTTCCT | 42753 |
| | | T | | | | GGG | |
| FAT3 | 2 | GGCGCCCTGGTG | 42376 | SHE | 1 | CCGGCCGGGGC | 42754 |
| | | C | | | | CCCC | |
| FBLIM1 | 1 | GCGGATCCCAGA | 42377 | SHISA7 | 1 | GCCCAGAGGAG | 42755 |
| | | GCC | | | | CTGG | |
| FBLIM1 | 2 | CAAGCCGGCCCA | 42378 | SHROOM1 | 1 | CCGGCCGGGGT | 42756 |
| | | GC | | | | CCCC | |
| FBLIM1 | 3 | GGCGGATCCCAG | 42379 | SIGLEC5 | 1 | TGCTGCAAGGG | 42757 |
| | | AGCC | | | | AG | |
| FBXO24 | 1 | CGGAAGGGAGC | 42380 | SIRPB1 | 1 | GCCTGCTGCTG | 42758 |
| | | TC | | | | GAAA | |
| FBXO41 | 1 | CCCGCCGCCCTG | 42381 | SKI | 1 | CCTCTTTCCTG | 42759 |
| | | CT | | | | GG | |
| FCGBP | 1 | CAAGCCGGGGC | 42382 | SKI | 2 | CCTCCCTGTGG | 42760 |
| | | AGGT | | | | GTCCGAT | |
| FER1L6 | 1 | CTGCAAGGGAG | 42383 | SLA | 1 | GAGAGTTACAT | 42761 |
| | | CC | | | | CCCTGG | |
| FGD5 | 1 | GCCCGGGAGGA | 42384 | SLC12A3 | 1 | GGCTGGCAGGG | 42762 |
| | | GCTGA | | | | AGGGGC | |
| FGF2 | 1 | CGGGGATCCCGG | 42385 | SLC18B1 | 1 | CCCGGGGACCC | 42763 |
| | | CC | | | | AGAGTC | |
| FKBP9P1 | 1 | CCGGCCTGATTC | 42386 | SLC26A8 | 1 | TGGGATCCCAG | 42764 |
| | | CTGC | | | | CGCC | |
| FKBPL | 1 | CGTGCAAGGGG | 42387 | SLC28A3 | 1 | CTCCCTCCCCA | 42765 |
| | | CAC | | | | CCAGCCCC | |
| FKBPL | 2 | ACGTGCAAGGG | 42388 | SLC36A1 | 1 | GAGGATCCCAG | 42766 |
| | | GCAC | | | | ACCC | |
| FLG- | 1 | GGCCTGGGATTT | 42389 | SLC39A11 | 1 | GCCTGCTGCTG | 42767 |
| AS1 | | G | | | | ATCA | |
| FLI1 | 1 | GGGCAGGGCGC | 42390 | SLC41A2 | 1 | TACGTCTGTCT | 42768 |
| | | TCGC | | | | GTCTTTG | |
| FLNB | 1 | CAAGCCGGGGG | 42391 | SLC46A2 | 1 | GCTTTCTTTCCT | 42769 |
| | | CT | | | | GAG | |
| FLNB | 2 | TCACTGTGGATC | 42392 | SLC7A14 | 1 | ATTCTGGCTGA | 42770 |
| | | CTAA | | | | CTGTG | |
| FLRT1 | 1 | CAACCGGGGCA | 42393 | SLC8A2 | 1 | TCCCGGGAGGA | 42771 |
| | | GCA | | | | GCGG | |
| FOSL2 | 1 | ATGGCCCTCCCA | 42394 | SLC8B1 | 1 | TAAGGGCCAGG | 42772 |
| | | AGACC | | | | CCCCG | |
| FOXF1 | 1 | GAGCTGCAAGG | 42395 | SLC9B2 | 1 | GGGAGCTCGCT | 42773 |
| | | CATCCC | | | | GGTCCT | |
| FRAT2 | 1 | CAAGCCGGGGC | 42396 | SLCO1C1 | 1 | CCTGGATGATT | 42774 |
| | | ACG | | | | TTGC | |
| FRMD8 | 1 | GGCGCCCTGGTG | 42397 | SMAP2 | 1 | ACCTGCTGCTG | 42775 |
| | | TGC | | | | GAGGA | |
| FRMD8 | 2 | CAAGCCGGCCCA | 42398 | SMPD3 | 1 | GCCGGGAGGA | 42776 |
| | | AG | | | | GCGGG | |
| GAL3ST1 | 1 | GAGGGTCCCAG | 42399 | SORCS3 | 1 | GGCCGGAGGA | 42777 |
| | | AGCC | | | | GCTGG | |
| GALNS | 1 | CATTCAGATTGG | 42400 | SORCS3 | 2 | GAAATCTGGCT | 42778 |
| | | TTTC | | | | GGCTAC | |
| GANC | 1 | TTTCTGGCTGAA | 42401 | SOWAHD | 1 | GGCGCCCTGGG | 42779 |
| | | TGCC | | | | TGC | |
| GAS6- | 1 | CCGGCCGGGGCC | 42402 | SOX17 | 1 | CTGGAGGAGCT | 42780 |
| AS1 | | CC | | | | AAGGA | |
| GAS7 | 1 | CCACCTGGCTGG | 42403 | SOX4 | 1 | CCGCCGCCCTG | 42781 |
| | | CA | | | | CT | |
| GASK1A | 1 | CCGGCCGGGGC | 42404 | SPATA6L | 1 | CTCAAGGGAGC | 42782 |
| | | ACC | | | | TC | |
| GASK1B | 1 | CAAGCCGGGGC | 42405 | SPATCI | 1 | AGCCACTCCGC | 42783 |
| | | AGCT | | | | GGAG | |
| GASK1B | 2 | GTGGCAGGGCTC | 42406 | SPOCD1 | 1 | GACCAGGAGG | 42784 |
| | | CGGC | | | | AGCTGG | |
| GCK | 1 | ACACCTGGCTGG | 42407 | SPOCD1 | 2 | CCAGGAGGAGC | 42785 |
| | | A | | | | TGGAGGC | |
| GCKR | 1 | ACACCTGGCTGC | 42408 | SPTBN2 | 1 | GGCCCCTGGTC | 42786 |
| | | A | | | | TGC | |
| GDF11 | 1 | TGCAGAGAATGT | 42409 | SPTBN2 | 2 | GAGAGCCGGCC | 42787 |
| | | CAC | | | | CAGC | |
| GDF11 | 2 | TGCAGAGAATGT | 42410 | SRGAP2 | 1 | GGCGCCCTGGC | 42788 |
| | | CACAG | | | | TTC | |
| GFOD2 | 1 | GGCGCCCTGGAC | 42411 | SRP19 | 1 | CAGCGAGGAA | 42789 |
| | | TCC | | | | GAAACCT | |
| GJA1 | 1 | TCCCTGTGTATC | 42412 | SSBP4 | 1 | GGGCAGGGCGC | 42790 |
| | | CTAT | | | | CGGC | |
| GJA3 | 1 | CCCTGCTGCTGG | 42413 | SSPOP | 1 | CCAGCCGGGGC | 42791 |
| | | ATGG | | | | AGCT | |
| GJD4 | 1 | GCCGACCTGGTC | 42414 | SSPOP | 2 | GGCCCCCTGGT | 42792 |
| | | TGC | | | | CTGT | |
| GLB1 | 1 | ATACTGGCTGGC | 42415 | SSPOP | 3 | CCCGGGGGAGC | 42793 |
| | | TA | | | | TGGGGC | |
| GNAI3 | 1 | GCACCTGGCTGG | 42416 | SSTR2 | 1 | ACACCTGGCTT | 42794 |
| | | CAA | | | | CTA | |
| GNAO1 | 1 | CAAGCCGGGGA | 42417 | ST20-AS1 | 1 | GCAGGGCCAGG | 42795 |
| | | GCC | | | | CCCCG | |
| GNAZ | 1 | CAAGGGCAGGC | 42418 | STAC2 | 1 | GAAGGGCCAG | 42796 |
| | | ACCCG | | | | GACCAG | |
| GNAZ | 2 | CCACCTTGAGCT | 42419 | STARD5 | 1 | TGACGCCAGCT | 42797 |
| | | GTCTC | | | | GATGC | |
| GPC2 | 1 | CCACCTTCCGAG | 42420 | STARD9 | 1 | AGACCTGGCTG | 42798 |
| | | GCC | | | | GCCA | |
| GPC6 | 1 | TCGGCCTAGGAT | 42421 | STARD9 | 2 | GGCCTGGGATG | 42799 |
| | | TCCTGC | | | | CTG | |
| GPR146 | 1 | CCACCGCCCTGC | 42422 | STRC | 1 | TGGGATCCCAG | 42800 |
| | | T | | | | ACC | |
| GPR146 | 2 | ACTCCACTCCGA | 42423 | STRC | 2 | CTGGGATCCCA | 42801 |
| | | GAG | | | | GACC | |
| GPR150 | 1 | AGCGCCCTGGTC | 42424 | STX2 | 1 | GTGGAAGGATC | 42802 |
| | | GGC | | | | GCTT | |
| GPR158 | 1 | CGGAGATCCCAG | 42425 | SV2B | 1 | GGGAGGAGCTT | 42803 |
| | | AGAC | | | | AGGAC | |
| GPR160 | 1 | GTGGAGGGCGC | 42426 | SYNDIGIL | 1 | TGCAGAGAATG | 42804 |
| | | CCGG | | | | TCAC | |
| GPR37 | 1 | TCCGCCAGCTGA | 42427 | SYNDIGIL | 2 | TGCAGAGAATG | 42805 |
| | | GC | | | | TCACCA | |
| GPX2 | 1 | GCCCTTCCGACG | 42428 | SYNE3 | 1 | TCCCATGGATC | 42806 |
| | | CT | | | | CTAT | |
| GPX2 | 2 | CCCTTCCGACGC | 42429 | SYNGAP1 | 1 | TGCAGAGTATG | 42807 |
| | | TA | | | | TCAC | |
| GRHL1 | 1 | CTGGGAAGCTTT | 42430 | SYNGAP1 | 2 | TGCAGAGTATG | 42808 |
| | | AGGA | | | | TCACCA | |
| GRHL1 | 2 | TGGGAAGCTTTA | 42431 | SYNGR3 | 1 | CTGCCTCTCCA | 42809 |
| | | GGAC | | | | CCTGCACC | |
| GRIA1 | 1 | TCACTGTGGATC | 42432 | TAF5 | 1 | CCGGGCTGCTG | 42810 |
| | | CAT | | | | GAGGA | |
| H2BC8 | 1 | CCAGACCGCCGT | 42433 | TAL1 | 1 | AGCCGCTGGCC | 42811 |
| | | GCG | | | | TCTCTC | |
| HAL | 1 | CTCCCTCTCCAC | 42434 | TAPT1- | 1 | CCGGCCGGGGC | 42812 |
| | | CAGCGCA | | AS1 | | ACC | |
| HECW2- | 1 | AGGCCCTGGTCT | 42435 | TBC1D32 | 1 | TCCAGTGGATC | 42813 |
| AS1 | | GC | | | | CTAT | |
| HHAT | 1 | GTCCTGGGATTC | 42436 | TCAM1P | 1 | CCAGACCTCCC | 42814 |
| | | CTG | | | | TGCT | |
| HHAT | 2 | TGTCCTGGGATT | 42437 | TCAMIP | 2 | CCTTCCTTTCCT | 42815 |
| | | CCTG | | | | GGG | |
| HIP1R | 1 | GACGTTTGGACC | 42438 | TCF7 | 1 | CCTTTCTTTCCT | 42816 |
| | | CC | | | | TGG | |
| HMX1 | 1 | CCACCCGGGGCA | 42439 | TEAD2 | 1 | ATGGCAGGGCG | 42817 |
| | | GCT | | | | CCCC | |
| HOMER3 | 1 | GGAGCCCTGGTC | 42440 | TEKT4 | 1 | GCAGCTGGCTG | 42818 |
| | | TCC | | | | GCTA | |
| HOXC11 | 1 | TCCTCTTTCTGTC | 42441 | TEKT4P2 | 1 | GCAGCTGGCTG | 42819 |
| | | TTTG | | | | GCTA | |
| HPGD | 1 | AAACCTGGCTGG | 42442 | TEPSIN | 1 | CTTCCTCTCCA | 42820 |
| | | CA | | | | CCATCCA | |
| HPGD | 2 | AAAACCTGGCTG | 42443 | TESK2 | 1 | CTGCCTCCCAC | 42821 |
| | | GCA | | | | CAGACCC | |
| HRAT92 | 1 | GGACGTGCAAG | 42444 | TESMIN | 1 | CGGGATCCCAG | 42822 |
| | | GGG | | | | AGCT | |
| HRAT92 | 2 | CGTGCAAGGGG | 42445 | TESMIN | 2 | CCGGGATCCCA | 42823 |
| | | CGC | | | | GAGCT | |
| HRAT92 | 3 | GGACGTGCAAG | 42446 | TESMIN | 3 | CCCCGGGATCC | 42824 |
| | | GGGC | | | | CAGAGCT | |
| HRAT92 | 4 | GACGTGCAAGG | 42447 | TFAP2B | 1 | CGGGGATCCAG | 42825 |
| | | GGCG | | | | AGCT | |
| HRAT92 | 5 | ACGTGCAAGGG | 42448 | TFAP2B | 2 | CCGGGGATCCA | 42826 |
| | | GCGC | | | | GAGCTG | |
| HS6ST2 | 1 | CGAGCCGGCCCG | 42449 | TFR2 | 1 | GCCTGCTGCTG | 42827 |
| | | GG | | | | GTGC | |
| HSF2BP | 1 | GTTCTGGCTGAA | 42450 | TGFB2 | 1 | GACAGTATCCC | 42828 |
| | | GTC | | | | CTGTA | |
| HTR3C | 1 | CTCCACTGCACC | 42451 | TGFBR3 | 1 | AGAGGTGCAAG | 42829 |
| | | AGCCCA | | | | GGAGC | |
| ICAM2 | 1 | CGGGATCCCAGA | 42452 | TGFBR3 | 2 | GAGGTGCAAGG | 42830 |
| | | GCT | | | | GAGCG | |
| ICAM2 | 2 | CCGGGATCCCAG | 42453 | TGM5 | 1 | CCAGACCGCCC | 42831 |
| | | AGCT | | | | AGCT | |
| ICAM2 | 3 | CCCGGGATCCCA | 42454 | TIE1 | 1 | CCCTGCTGCTG | 42832 |
| | | GAGCT | | | | GAGA | |
| IFFO1 | 1 | GCCAGGAGGAG | 42455 | TINAGL1 | 1 | CGGCCTGGGAT | 42833 |
| | | CTGG | | | | CCAG | |
| IFFO2 | 1 | CTGCCTCTCCAC | 42456 | TLE3 | 1 | GGCGCCCTGGG | 42834 |
| | | CACA | | | | CAGC | |
| IFI16 | 1 | CACAATATCCCC | 42457 | TLNRD1 | 1 | GTGTCTCTCCA | 42835 |
| | | TGTG | | | | CCAGCCCC | |
| IGFBP7 | 1 | AAAGCCGGGGC | 42458 | TMEM106A | 1 | TGGGATCCCAG | 42836 |
| | | AGCA | | | | ACC | |
| IGFBPL1 | 1 | GGCCTGGGATTC | 42459 | TMEM106A | 2 | CTGGGATCCCA | 42837 |
| | | TG | | | | GACC | |
| IGFBPL1 | 2 | TGGCCTGGGATT | 42460 | TMEM165 | 1 | CCGAGCCGGCC | 42838 |
| | | CTG | | | | CGGG | |
| IGSF10 | 1 | GGGGATCCCAA | 42461 | TMPRSS13 | 1 | CCAGACCCCCT | 42839 |
| | | ACC | | | | GCT | |
| IGSF3 | 1 | CCACCTTCCGCC | 42462 | TNFRSF12A | 1 | CCAGCCGGGGC | 42840 |
| | | T | | | | TCGCC | |
| IGSF8 | 1 | GCCCGGGAGGT | 42463 | TNFRSF21 | 1 | CCTGGATGATT | 42841 |
| | | GCTGG | | | | GTGC | |
| IKZF1 | 1 | GTGGCAGGGCG | 42464 | TNKS1BP1 | 1 | CAGGGCCTGCT | 42842 |
| | | CGCGC | | | | GGAGGA | |
| ILIR1 | 1 | GGCCGGGAGGA | 42465 | TOR4A | 1 | GCCGCGAGGAG | 42843 |
| | | GCCGG | | | | CTGG | |
| ILDR2 | 1 | GTCTGTTTGGAC | 42466 | TPK1 | 1 | TGCAGTGATAT | 42844 |
| | | CCC | | | | GTCACAA | |
| INAVA | 1 | CTGGAGGAGCTG | 42467 | TPSD1 | 1 | GGCCCCTGGTC | 42845 |
| | | AGGA | | | | TGC | |
| INKA2 | 1 | GAAGGGCCAGG | 42468 | TRAF1 | 1 | GCCAGGAGGA | 42846 |
| | | CAGCAG | | | | GCTGG | |
| INSRR | 1 | CCGCGGGGCTCA | 42469 | TRAF5 | 1 | ACACCTGGCTG | 42847 |
| | | CC | | | | TA | |
| INSRR | 2 | GTCCTGGAGGAG | 42470 | TRAF5 | 2 | AACACCTGGCT | 42848 |
| | | CTGG | | | | GTA | |
| INSYN1 | 1 | CCGGCCGGGGCC | 42471 | TRERF1 | 1 | AGCACCCTGGT | 42849 |
| | | CCC | | | | CTGC | |
| IQGAP3 | 1 | CCCGGTGGAGCT | 42472 | TRIM56 | 1 | CCGGCCGGGGC | 42850 |
| | | GGAGGA | | | | TCAGC | |
| IRS2 | 1 | GGCGCCCTGGGC | 42473 | TRIM56 | 2 | CCTGGTGGAGC | 42851 |
| | | GGC | | | | TGGAGGC | |
| ITGA6 | 1 | GGTGCTCCCAGA | 42474 | TRIM62 | 1 | CTGCAAGGGAG | 42852 |
| | | GCC | | | | TC | |
| ITGAL | 1 | GGCGCCCTGGTT | 42475 | TRIM67 | 1 | GCCCGGGAGGC | 42853 |
| | | TTC | | | | GCGGG | |
| ITGAX | 1 | GTCCAGGAGGA | 42476 | TSPAN10 | 1 | AGCCTGGCTGG | 42854 |
| | | GCTGG | | | | CTA | |
| ITIH5 | 1 | CAGAGCCGGCTC | 42477 | TSPAN13 | 1 | ACACCTGTCTG | 42855 |
| | | AGA | | | | GCTA | |
| ITIH5 | 2 | CTGCCTCTCCCC | 42478 | TSPAN13 | 2 | GACACCTGTCT | 42856 |
| | | ACCCT | | | | GGCTA | |
| KANK4 | 1 | GCTGCTGCTGGA | 42479 | TSPAN14 | 1 | CCTTTCTTTCCC | 42857 |
| | | GA | | | | AGG | |
| KCNC3 | 1 | GCCTGCTGCTGG | 42480 | TTC22 | 1 | CCAGCCAGCTG | 42858 |
| | | ATGA | | | | AGGC | |
| KCNC4 | 1 | CCCTGCTGCTGG | 42481 | TTC34 | 1 | CGAGCCGCCCT | 42859 |
| | | ATGA | | | | GCT | |
| KCNF1 | 1 | GAAGGCCCTCCC | 42482 | TTC6 | 1 | CCACCTTCCGA | 42860 |
| | | GGCA | | | | GCG | |
| KCNF1 | 2 | AAGGCCCTCCCG | 42483 | TTLL10- | 1 | CAGCCTCTCCA | 42861 |
| | | GCACC | | AS1 | | CCTGCACA | |
| KCNG2 | 1 | GGGAATCCCAG | 42484 | TUBB2A | 1 | CCAGCCGGGGC | 42862 |
| | | AGCC | | | | AGCC | |
| KCNG2 | 2 | GCCTGCTGTGGA | 42485 | TUBB2B | 1 | CCAGCCGGGGC | 42863 |
| | | TGA | | | | AGCC | |
| KCNG2 | 3 | GGGGAATCCCA | 42486 | TUBBP5 | 1 | CCAGCCGGGGC | 42864 |
| | | GAGCC | | | | AGCC | |
| KCNJ15 | 1 | TGTGCAGAATAT | 42487 | TULP1 | 1 | GAGGGCCAGGC | 42865 |
| | | GTC | | | | ACCCA | |
| KCNK10 | 1 | TCTTTCTTTCCTT | 42488 | UBXN10 | 1 | GCTGCTGCTGG | 42866 |
| | | GG | | | | TGA | |
| KCTD1 | 1 | GCCGGGGAGGA | 42489 | UCK2 | 1 | CTGAAGGGAGC | 42867 |
| | | GCTGG | | | | TC | |
| KCTD1 | 2 | GAACACCCGGCT | 42490 | UCK2 | 2 | ACCTCTCTTGC | 42868 |
| | | GGCCAC | | | | CCTTGT | |
| KCTD15 | 1 | GCCGGGAGGAG | 42491 | UNC13A | 1 | CAGAGCCGGCC | 42869 |
| | | CGG | | | | CGG | |
| KCTD15 | 2 | CCTCCCTTGGAT | 42492 | UNC45A | 1 | GGCGCCCTGGC | 42870 |
| | | CCTT | | | | GGC | |
| KIAA0319 | 1 | GCTGCTGCTGGT | 42493 | VANGL1 | 1 | CCACCTGGCTG | 42871 |
| | | GA | | | | GCA | |
| KIAA0895L | 1 | AGGCAAGGGAG | 42494 | VAV2 | 1 | GCCTGGAGGAG | 42872 |
| | | CTC | | | | CTGG | |
| KIAA1522 | 1 | CCACCTTCCGAC | 42495 | VAV3 | 1 | CCGGCCGGGGC | 42873 |
| | | CCC | | | | GCACG | |
| KIAA1549L | 1 | CAGGAGCCGGC | 42496 | VSTM4 | 1 | GGCCTGGGATT | 42874 |
| | | CCGGG | | | | CCTT | |
| KIF26A | 1 | GCAGCCGCCCTG | 42497 | VSTM4 | 2 | AGGCCTGGGAT | 42875 |
| | | CT | | | | TCCTT | |
| KIF5C | 1 | GCCCTGGAGGA | 42498 | VSTM4 | 3 | CGCCTCTCCAC | 42876 |
| | | GCTGG | | | | CAGCACC | |
| KLC3 | 1 | GCCCTGAGGAGC | 42499 | VWC2 | 1 | CCGGCCGGCCC | 42877 |
| | | TGG | | | | AGG | |
| KLF16 | 1 | GGCGCCCTGGTG | 42500 | VWC2 | 2 | ACCCCTCCGCG | 42878 |
| | | C | | | | GAG | |
| KLF16 | 2 | CTCCTCTCCACC | 42501 | VWF | 1 | GGCGCCCTGGC | 42879 |
| | | ACCCCC | | | | CAGC | |
| KLHL14 | 1 | TCCCTGTGGACC | 42502 | WASF2 | 1 | CCTTCTTTCCTG | 42880 |
| | | GAT | | | | GA | |
| KLK10 | 1 | GGCCCCCTGGTC | 42503 | WDR43 | 1 | TGCCTGGGATT | 42881 |
| | | TGT | | | | CCTG | |
| KRT86 | 1 | GTGGCAGGGCG | 42504 | WNT7A | 1 | CAGAGCCGGCC | 42882 |
| | | CCAC | | | | CGA | |
| KRTAP2-1 | 1 | CTCCTCTCCACA | 42505 | WWC1 | 1 | CCAGCCGGGGC | 42883 |
| | | GCCCA | | | | TCCC | |
| LAMA4 | 1 | CTGGCGGGGCTC | 42506 | WWC1 | 2 | GCCTGCTGCTG | 42884 |
| | | ACC | | | | AGGA | |
| LAMA5 | 1 | GTGGCAGGGCC | 42507 | WWOX | 1 | CGGGTCTCGTT | 42885 |
| | | ACGC | | | | TGGA | |
| LAMC2 | 1 | ATTCTGGCTGAT | 42508 | XCR1 | 1 | CCTTTCTTTCCT | 42886 |
| | | GTG | | | | AGT | |
| LCNL1 | 1 | GGAGGGCCAGG | 42509 | YEATS2 | 1 | CAGCCGGGGCA | 42887 |
| | | CCCCG | | | | GGT | |
| LDLR | 1 | TGGGATCCCAGG | 42510 | YPEL2 | 1 | AACCTGGCTGG | 42888 |
| | | CC | | | | TA | |
| LEFTY2 | 1 | CTGAGCCGGCCC | 42511 | ZC3H12B | 1 | CGAGTGCAGAG | 42889 |
| | | CGG | | | | CTATG | |
| LIMK1 | 1 | CAGAGCCGGCCC | 42512 | ZC3H12D | 1 | AGCGCCTGGTC | 42890 |
| | | AGC | | | | TGC | |
| LIMK1 | 2 | GCCCAGAGCCG | 42513 | ZDHHC8P1 | 1 | CTGGCCGGCCC | 42891 |
| | | GCCCAGC | | | | AGG | |
| LINC00319 | 1 | CACAGCCGGCCC | 42514 | ZFP14 | 1 | CAGAGCCGCCC | 42892 |
| | | AGC | | | | AGG | |
| LINC00528 | 1 | GCAGGCCGCCCT | 42515 | ZFP69 | 1 | GCGGCCGGGGC | 42893 |
| | | GCT | | | | TCACA | |
| LINC00540 | 1 | CGGGCCGGCCCA | 42516 | ZNF831 | 1 | CCCCTCAGAGA | 42894 |
| | | GG | | | | GGAAGAA | |

### Results of DUX4-Targeting Oligonucleotide and RNA Target Interaction

[0095] In some cases, a DUX4-targeting oligonucleotide or salt thereof comprising a modification when contacted with a DUX4 mRNA sequence may produce lower activity of a polypeptide encoded by the DUX4 mRNA sequence as compared to contacting an equivalent amount of an otherwise comparable DUX4-targeting oligonucleotide that lacks the modification with the DUX4 mRNA sequence. In some cases, the lower activity may be at least about 1.2-fold lower. In some cases, the lower activity may be at least about 1.5-fold lower. In some cases, the lower activity may be at least about 1.7-fold lower. In some cases, the lower activity may be at least about 2.0-fold lower. In some cases, the lower activity may be about: 1.2, 1.3, 1.4, 1.5, 1.6, 1.7, 1.8, 1.9, 2.0, 2.1, 2.2, 2.3, 2.4, 2.5-fold lower. In some cases, the lower activity may be from about 1.2-fold to about 2.0-fold lower. In some cases, the lower activity may be from about 1.1-fold to about 1.5-fold lower. In some cases, the lower activity may be from about 1.1-fold to about 2.5-fold lower. In some cases, the lower activity may be from about 1.2-fold to about 3.0-fold lower. In some cases, the lower activity may be at least about 1.2-fold to about at least 10-fold lower expression. In some cases, the lower activity may be at least about 14-fold lower. In some cases, the lower expression may be at least about 18-fold lower expression. In some cases, the lower activity may be about: 1.2, 2, 3, 4, 5, 6, 7, 8, 9, 10, 11, 12, 13, 14, 15, 16, 17, 18, 19, 20-fold lower. In some cases, the lower activity may be from about 1.2-fold to about 14-fold. In some cases, the lower activity may be from about 1.1-fold to about 20-fold lower. In some cases, the lower activity may be from about 1.2-fold to about 30-fold lower.

[0096] In some cases, the DUX4-targeting oligonucleotide or salt thereof, when contacted with the mRNA sequence, may produce at least about: 1.1, 1.2, 1.3, 1.4, 1.5, 1.6, 1.7, 1.8, 1.9, 2, 3, 4, 5, 6, 7, 8, 9, 10-fold lower expression of a polypeptide encoded by the mRNA sequence, as compared to contacting an equivalent amount of the otherwise comparable oligonucleotide with the mRNA sequence. Lower expression may be from about 1.2-fold to about 10-fold lower expression.

[0097] In some cases, the DUX4-targeting oligonucleotide or salt thereof, when contacted with the mRNA sequence, may produce at least about: 1.1, 1.2, 1.3, 1.4, 1.5, 1.6, 1.7, 1.8, 1.9, 2, 3, 4, 5, 6, 7, 8, 9,10-fold lower activity of a polypeptide encoded by the mRNA sequence, as compared to contacting an equivalent amount of the otherwise comparable oligonucleotide with the mRNA sequence. Lower activity may be from about 1.2-fold to about 10-fold lower activity.

[0098] In some cases, a DUX4-targeting oligonucleotide or salt thereof may comprise at least about a predicted thermal melting temperature of 45 to 65 degrees Celsius at physiological salt and pH. In some cases, a DUX4-targeting oligonucleotide or salt thereof may bind the RNA sequence at about 18, 19, 20, 21, 22, 23, 24, 25, 26, 27, 28, 29, 30, 31, 32, 33, 34, 35, 36, 37, 38, 39 or 40 degrees Celsius. In some cases, a DUX4-targeting oligonucleotide or salt thereof may bind the RNA sequence at a pH of about 6.6, 6.7, 6.8, 6.9, 7.0, 7.1, 7.2, 7.3, 7.4, 7.5, 7.6, 7.7, or 7.8.

### Subjects

[0099] In some aspects, a subject may comprise a mammal amenable to receive a composition as described herein comprising an engineered DUX4-targeting nucleic acid (such as in the form of an oligonucleotide) or treated by a method as described herein. Examples of such mammals may include humans, non-human primates (e.g., apes, gibbons, chimpanzees, orangutans, monkeys, macaques, and the like), domestic animals (e.g., dogs and cats), farm animals (e.g., horses, cows, goats, sheep, pigs) and experimental animals (e.g., mouse, rat, rabbit, guinea pig). Mammals may be any age or at any stage of development, for example a mammal may be neonatal, infant, adolescent, adult or in utero. Mammals may be male or female. In some cases, a human may be from about: 1 day to about 7 days old, 1 week to about 5 weeks old, 1 month to about 12 months old, 1 year to about 6 years old, 5 years to about 15 years old, 14 years to about 30 years old, 25 years to about 50 years old, 40 years to about 75 years old, 70 years to about 100 years old, 85 years old to about 110 years old or about 100 years to about 130 years old.

[0100] In some cases, a subject may not have been previously diagnosed with a disease or condition. In some cases, a subject may have been diagnosed with a disease or condition. In some cases, a subject may not have received a definitive diagnosis of a disease or condition. A subject may be at risk of developing a disease or condition (such as based at least in part on a genetic variant). A subject may have received a diagnostic test. A diagnostic test may include an imaging procedure, a blood count analysis, a tissue pathology analysis, a biomarker analysis, or any combination thereof.

[0101] The subject may be a patient, such as a patient being treated for a condition or a disease such as a neuromuscular disease. In certain cases, the subject may be predisposed to a risk of developing a condition or a disease such as neuromuscular disorder. The subject may be in remission from a condition or a disease, such as a neuromuscular disorder. The subject may be healthy.

[0102] In some aspects, a subject may be a subject in need thereof. In some aspects, a subject may have a disease such as treatment of facioscapulohumeral muscular dystrophy (FSHD) may include, for example, relieving the muscle weakness experienced by a mammal suffering from facioscapulohumeral muscular dystrophy (FSHD), and/or causing the regression or disappearance of muscle weakness.

### Administration and Treatment

[0103] In some aspects, DUX4-targeting oligonucleotides disclosed herein may be used to treat subjects such that the treatment results in: reduced malaise, an increase in energy, an increase in weight, a decrease in weight, an increase in muscle mass, an increase in, an increase in body flexibility, an increase in posture, an increase in range of movement, cessation of myotonia, abatement of muscle pain, or any combination thereof.

[0104] A subject in need thereof may be treated for a disease or condition. A treatment may be a pre-treatment, a prophylactic treatment, or a preventive treatment. Treatment may include administration to the subject in need thereof the DUX4-targeting oligonucleotide, a nucleic acid construct, a vector, or a pharmaceutical composition as described herein.

[0105] Treating may include administering an engineered DUX-4-targeted oligonucleotide highly conserved among patients and selected from SEQ. ID. NOs: 20,962-41,922 in the XML Sequence listing file submitted at the time of filing, and/or SEQ. ID. Nos: 41,923-42,115 as shown in Table 2, or any combination thereof.

[0106] Delivery may include direct application to the affected tissue or region of the body. Delivery may include a parenchymal injection, an intrathecal injection, an intraventricular injection, or an intracisternal injection. A composition provided herein may be administered by any method. A method of administration may be by inhalation, intraarterial injection, intracerebroventricular injection, intracisternal injection, intramuscular injection, intraorbital injection, intraparenchymal injection, intraperitoneal injection, intraspinal injection, intrathecal injection, intravenous injection, intraventricular injection, stereotactic injection, subcutaneous injection, or any combination thereof. Delivery may include parenteral administration (including intravenous, subcutaneous, intrathecal, intraperitoneal, intramuscular, intravascular or infusion), oral administration, inhalation administration, intraduodenal administration, rectal administration. Delivery may include topical administration (such as a lotion, a cream, an ointment) to an external surface of a surface, such as a skin. In some instances, a subject may administer the composition in the absence of supervision. In some instances, a subject may administer the composition under the supervision of a medical professional (e.g., a physician, nurse, physician's assistant, orderly, hospice worker, etc.). In some cases, a medical professional may administer the pharmaceutical formulation. In some cases, the treatment of a neuromuscular disease such as facioscapulohumeral muscular dystrophy is by employing a composition which comprises a DUX4-targeting oligonucleotide, a vector comprising the oligonucleotide, or a pharmaceutical formulation as described below. Still further, a medicine may be prepared using a DUX4-targeting oligonucleotide, a vector comprising the oligonucleotide, or a pharmaceutical formulation as described below. The medicine may be used for the treatment or prevention of facioscapulohumeral muscular dystrophy.

[0107] Methods may of administration may include in vivo or in vitro delivery methods. Methods may include contacting a cell, such as a cell in vivo with the DUX4-targeting oligonucleotide, the nucleic acid construct, the vector, or the pharmaceutical composition as described herein. Methods may include contacting a cell, such as an isolated and purified cell (such as a cell in vitro) with the DUX4-targeting oligonucleotide, the nucleic acid construct, the vector, or the pharmaceutical composition as described herein. Methods may include contacting a tissue, such as an in vivo tissue or an isolated in vitro tissue, with the DUX4-targeting oligonucleotide, a nucleic acid construct, a vector, or a pharmaceutical composition as described herein.

[0108] Treatment may include more than one DUX4-targeting oligonucleotide delivered in a single dose. Delivery may be concurrent delivery, such as delivery more than one DUX4-targeting oligonucleotide in a single injection or in two separate injections at the same time. Delivery may be sequential, such as delivery of a first dose and a second dose that may be separated by a period of time, such as minutes, hours, days, weeks, or months.

[0109] Certain aspects of the disclosure pertain to administration of a DUX4-targeting oligonucleotide human cell may be a cell of head or neck tissue, a skin cell, a cervical cell, a prostate cell, a stem cell, a bone cell, a blood cell, a muscle cell, a fat cell, a nerve cell, an endothelial cell, sperm cell, egg cell, cancer cell, barrier cell, hormone-secreting cell, exocrine-secretory cell, epithelial cell, oral cell, sensory transducer cell, autonomic neuron cell, peripheral neuron cell, central nervous neuron cell, secretory cell, cardiac muscle cell, white blood cell, germ cell, nurse cell, kidney cell, or any combination thereof.

[0110] A tissue may be a sample that may be substantially healthy, substantially benign, or otherwise substantially free of a disease or a condition. A tissue may be a tissue removed from a subject, such as a tissue biopsy, a tissue resection, an aspirate (such as a fine needle aspirate), a tissue washing, a cytology specimen, a bodily fluid, or any combination thereof. A tissue may comprise cancerous cells, tumor cells, non-cancerous cells, or a combination thereof. A tissue may comprise a blood sample (such as a cell-free DNA sample). A tissue may be a sample that may be genetically modified.

[0111] Treatment may include treatment of a condition associated with a neuromuscular disease such as facioscapulohumeral muscular dystrophy. Treatment may result in reduced malaise, an increase in energy, an increase in weight, a decrease in weight, an increase in muscle mass, an increase in, an increase in body flexibility, an increase in posture, an increase in range of movement, cessation of myotonia, abatement of muscle pain, or any combination thereof.

[0112] Certain aspects of the disclosure pertain to delivery of an oligonucleotide such as a DUX4-targeting oligonucleotide with a vector. A vector may be employed to deliver the DUX4-targeting oligonucleotide, the nucleic acid construct, or any combination thereof. A vector may comprise DNA, such as double stranded DNA or single stranded DNA. A vector may comprise RNA. In some cases, the RNA may comprise a base modification. The vector may comprise a recombinant vector. The vector may be a vector that is modified from a naturally occurring vector. The vector may comprise at least a portion of a non-naturally occurring vector. In some cases, the vector may comprise a viral vector, a liposome, a nanoparticle, an exosome, an extracellular vesicle, or any combination thereof. In some cases, a viral vector may comprise an adenoviral vector, an adeno-associated viral vector (AAV), a lentiviral vector, a retroviral vector, a portion of any of these, or any combination thereof. In some cases, a nanoparticle vector may comprise a polymeric-based nanoparticle, an aminolipid based nanoparticle, a metallic nanoparticle (such as gold-based nanoparticle), a portion of any of these, or any combination thereof. In some cases, a vector may comprise an AAV vector. A vector may be modified to include a modified VP1 protein (such as an AAV vector modified to include a VP1 protein). An AAV may comprise a serotype—such as an AAV1 serotype, an AAV2 serotype, AAV3 serotype, an AAV4 serotype, AAV5 serotype, an AAV6 serotype, AAV7 serotype, an AAV8 serotype, an AAV9 serotype, a derivative of any of these, or any combination thereof.

[0113] In certain aspects, delivery of an oligonucleotide intended to function as an engineered DUX4-targeting oligonucleotide is through liposomal delivery. In certain instances, the liposome may be a positively charged liposome. In certain instances, the liposome may be a negatively charged liposome. In other instances, the delivery of engineered DUX4-targeting oligonucleotide is a polymer delivery. In other instances, the engineered DUX4-targeting oligonucleotide delivery is a dendrimer mediated delivery. In other instances, the delivery of an engineered DUX4-targeting oligonucleotide is via microinjection, electroporation, ultrasound, gene gun or hydrodynamic applications. In other instances, the delivery of an engineered DUX4-targeting oligonucleotide is via conjugation to or association with a nanoparticle.

### Pharmaceutical Formulations

[0114] In some aspects, a wide variety of pharmaceutical formulations to deliver an engineered DUX4-targeting oligonucleotide target may be employed.

[0115] A pharmaceutical formulation may comprise a pharmaceutically acceptable excipient, diluent, carrier, or a combination thereof.

[0116] A carrier of a pharmaceutical formulation may be, in certain cases, a solid carrier and may comprise lactose, terra alba, sucrose, talc, gelatin, agar, pectin, acacia, magnesium stearate, stearic acid and the like. In other cases, the carrier is a liquid carrier and may comprise phosphate buffered saline solution, syrup, oil, peanut oil, olive oil, water, emulsions, a wetting agent, a sterile solution, or any combination thereof.

[0117] In some aspects regarding pharmaceutical formulations, a pharmaceutical formulation may comprise a pharmaceutically acceptable diluent. A diluent may comprise for example, sterile distilled water, deionized water, physiological saline, Ringer's solutions, dextrose solution, a cell growth medium, phosphate buffered saline (PBS), or any combination thereof.

[0118] In some aspects regarding pharmaceutical formulations, a pharmaceutical formulation may comprise a excipient. In instances concerning the excipient, the excipient may comprise a pH agent, a stabilizing agent, a buffering agent, a solubilizing agent, or any combination thereof. An excipient may comprise a surfactant, a sugar, an amino acid, an antioxidant, a salt, a non-ionic surfactant, a solubilizer, a triglyceride, an alcohol, or any combination thereof. An excipient may comprise sodium carbonate, acetate, citrate, phosphate, polyethylene glycol (PEG), human serum albumin (HSA), sorbitol, sucrose, trehalose, polysorbate 80, sodium phosphate, sucrose, disodium phosphate, mannitol, polysorbate 20, histidine, citrate, albumin, sodium hydroxide, glycine, sodium citrate, trehalose, arginine, sodium acetate, acetate, HCl, disodium edetate, lecithin, glycerin, xanthan rubber, soy isoflavones, polysorbate 80, ethyl alcohol, water, teprenone, or any combination thereof. An excipient may be an excipient described in the Handbook of Pharmaceutical Excipients, American Pharmaceutical Association (1986).

[0119] Included in the present disclosure may be salts, including pharmaceutically acceptable salts, of the compositions described herein. The compounds or compositions of the present disclosure that may possess a sufficiently acidic, a sufficiently basic, or both functional groups, may react with any of a number of in-organic bases, inorganic acids, or organic acids, to form a salt. Alternatively, compositions containing compounds that are inherently charged, such as those with quaternary nitrogen, may form a salt with an appropriate counterion, e.g., a halide such as bromide, chloride, or fluoride, particularly bromide.

[0120] A pharmaceutical composition may comprise a first active ingredient. The first active ingredient may comprise a DUX4-targeting oligonucleotide as described herein. The pharmaceutical composition may be formulated in unit dose form. The pharmaceutical composition may comprise a pharmaceutically acceptable excipient, diluent, or carrier. The pharmaceutical composition may comprise a second, third, or fourth active ingredient, such as a second DUX4-targeting oligonucleotide.

[0121] In some cases, an engineered DUX4-targeting oligonucleotide or salt thereof comprising a modification when stored in a closed container placed in a room for a time period will remain at least about 80% of an initial amount of the engineered DUX4-targeting oligonucleotide or salt thereof. In some cases, the engineered DUX4-targeting oligonucleotide will remain at least about 70% the initial amount. In some cases, the engineered DUX4-targeting oligonucleotide will remain at least about 90% the initial amount. In some cases, the engineered DUX4-targeting oligonucleotide will remain at least about: 60%, 65%, 70%, 75%, 80%, 85%, 90%, 95%, 99%. In some cases, the engineered DUX4-targeting oligonucleotide may be at least about 60% to about at least 80%. In some cases, engineered DUX4-targeting oligonucleotide may be at least about 80% to at least about 99%. In some cases, the time period of storage may be at least 1 month. In some cases, the time period of storage may be at least about 3 months. In some cases, the time period of storage may be at least about 1 year. In some cases, the time period of storage may be at least about 1, 2, 4, 6, 8, 12, 18, 24, 36, 48 or 60 months. In some cases, the time period of storage may be at least about 1 month to about at least 1 year. In some cases, the time period of storage may be at least about 6 months to at least about 2 years. In some cases, the time period of storage may be at least about 1 month to at least about 5 years.

[0122] In some aspects, a pharmaceutical composition may be administered to a subject at a suitable unit dose. The pharmaceutical composition may be in unit dose form. In some cases, unit dose may be meant to refer to pharmaceutical drug products in the form in which they are marketed for use, with a specific mixture of active ingredients and inactive components, diluents, or excipients, in a particular configuration, and apportioned into a particular dose to be delivered. In some instances, unit dose may also sometimes encompass non-reusable packaging, although the FDA distinguishes between unit dose “packaging” or “dispensing”. More than one unit dose may refer to distinct pharmaceutical drug products packaged together, or to a single pharmaceutical drug product containing multiple drugs and/or doses. In some instances, the term unit dose may also sometimes refer to the particles comprising a pharmaceutical composition, and to any mixtures involved. In some cases, types of unit doses may vary with the route of administration for drug delivery, and the substance(s) being delivered. In some aspects, administration may comprise intravenous, intraperitoneal, intra-arterial, intertumoral, subcutaneous, intramuscular, intranasal, topical, oral, or intradermal administration. In some cases, administration may comprise inhalation administration. In some aspects, a dosage regimen may be determined by an attending physician and clinical factors. In some aspects, a dosage for a subject may depend upon many factors, including a subject's size, body surface area, age, sex, general health, a compound to be administered, a time and route of administration, other drugs being administered concurrently, or any combination thereof. In some aspects, a range of a dose may comprise 0.001 to 1000 μg. In some aspects, a dose may be below or above such a range. In some aspects, a regimen as a regular administration of a pharmaceutical composition may be in a range of 1 μg to 10 mg. In some aspects, a regimen as a regular administration of a pharmaceutical composition may be in a range of 10² units to 10¹² units per day, week or month. In some cases, a unit may be a vector or an ASO. In some aspects, if a regimen comprises a continuous infusion, it may also be in a range of 1 μg to 10,000 mg of pharmaceutical composition or engineered polynucleotide or DNA encoding the engineered polynucleotide or vector containing or encoding the engineered polynucleotide per kilogram of body weight per minute, respectively. In certain instances, the range is from 1 mg per kilogram of body weight to 1000 mg per kilogram of body weight. In some aspects, progress may be monitored by periodic assessment.

[0123] In some aspects of the disclosure, when a pharmaceutical composition is a liquid it may be administered in a liquid dose form such as about 1 ml to about 5 ml, about 5 ml to 10 ml, about 15 ml to about 20 ml, about 25 ml to about 30 ml, about 30 ml to about 50 ml, about 50 ml to about 100 ml, about 100 ml to 150 ml, about 150 ml to about 200 ml, about 200 ml to about 250 ml, about 250 ml to about 300 ml, about 300 ml to about 350 ml, about 350 ml to about 400 ml, about 400 ml to about 450 ml, about 450 ml to 500 ml, about 500 ml to 750 ml, or about 750 ml to 1000 ml.

[0124] In some aspects, a composition described herein may be administered one or more days to a subject in need thereof. In some aspects, administration may occur for about: 1, 2, 3, 4,5,6,7,8,9, 10, 11, 12, 13, 14, 15, 16, 17, 18, 19, 20, 21, 22, 23, 24, 25, 26, 27, 28, 29, 30 or about 31 days. In some aspects, administration may occur for about: 1, 2, 3, 4, 5, 6, 7, 8, 9, 10, 11, 12, 13, 14, 15, 16, 17, 18, 19, 20, 21, 22, 23, or about 24 months. In some aspects, administration may occur for about: 1, 2, 3, 4, 5, 6, 7, 8, 9, 10, 11, 12, 13, 14, 15, 16, 17, 18, 19, 20, 21, 22, 23, 24, 25, 26, 27, 28, 29, 30, 31, 32, 33, 34, 35, 36, 37, 38, 39, 40, 41, 42, 43, 44, 45, 46, 47, 48, 49, or about 50 or more years. In some cases, administration may occur for life. In some aspects, a pharmaceutical composition described herein may be administered on 2, 3, 4, 5, 6, 7, 8, 9, 10, 11, 12, 13, 14, 15, 16, 17, 18, 19 or 20 or more days. In some cases, a composition described herein may be administered on consecutive days or on nonconsecutive days. In some cases, a composition described herein may be administered to a subject more than one time per day. In some instances, a composition described herein may be administered to a subject: 1, 2, 3, 4, 5, 6, 7, 8, 9, or 10 or more times per day.

[0125] In some aspects, disclosed herein are methods of use for compositions as disclosed herein. In some aspects, a daily oral dosage regimen may be from about 0.1 milligram per kilogram (mg/kg) to about 80 mg/kg of total body weight, from about 0.2 mg/kg to about 30 mg/kg, or from about 0.5 mg/kg to about 15 mg/kg. In some aspects, a daily parenteral dosage regimen may comprise from about 0.1 mg/kg to about 10,000 mg/kg of total body weight, from about 0.2 mg/kg to about 5,000 mg/kg, or from about 0.5 mg/kg to about 1,000 mg/kg. In some aspects, a daily topical dosage regimen may be from about 0.1 mg to about 500 mg. In some aspects, a daily dosage regimen may be from about 0.01 mg/kg to about 1,000 mg/kg per day. In some aspects, an optimal quantity and spacing of individual dosages of a composition may be determined by a nature and extent of a condition being treated, a form, route and site of administration, and a particular subject being treated, and that such optimums may preferably be determined by a method described herein. In some aspects, a number of doses of compositions given per day for a defined number of days, may be ascertained by those skilled in the art using conventional course of treatment determination tests. In some aspects, a dosage regimen may be determined by an attending physician and other clinical factors. In some aspects, dosages for any one subject may depend upon many factors. In some aspects, factors affecting dosage may comprise a subject's size, body surface area, age, a particular compound to be administered, sex, time and route of administration, general health, other drugs being administered concurrently or any combination thereof. In some aspects, progress may be monitored by periodic assessment.

[0126] A pharmaceutical formulation may be administered a daily oral dosage regimen may be from about 0.1 milligram per kilogram (mg/kg) to about 80 mg/kg of total body weight, from about 0.2 mg/kg to about 30 mg/kg, or from about 0.5 mg/kg to about 15 mg/kg. In some aspects, a daily parenteral dosage regimen may comprise from about 0.1 mg/kg to about 10,000 mg/kg of total body weight, from about 0.2 mg/kg to about 5,000 mg/kg, or from about 0.5 mg/kg to about 1,000 mg/kg. In some aspects, a daily topical dosage regimen may be from about 0.1 mg to about 500 mg. In some aspects, a daily dosage regimen may be from about 0.01 mg/kg to about 1,000 mg/kg per day. In some aspects, an optimal quantity and spacing of individual dosages of a composition may be determined by a nature and extent of a condition being treated, a form, route and site of administration, and a particular subject being treated, and that such optimums may preferably be determined by a method described herein. In some aspects, a number of doses of compositions given per day for a defined number of days, may be ascertained by those skilled in the art using conventional course of treatment determination tests. In some aspects, a dosage regimen may be determined by an attending physician and other clinical factors. In some aspects, dosages for any one subject may depend upon many factors. In some aspects, factors affecting dosage may comprise a subject's size, body surface area, age, a particular compound to be administered, sex, time and route of administration, general health, other drugs being administered concurrently or any combination thereof. In some aspects, progress may be monitored by periodic assessment.

[0127] A composition or formulation may be used herein for treating or preventing a neuromuscular disease comprising an engineered DUX4-targeting oligonucleotide configured to hybridize to an RNA comprising a portion of a RNA transcript, wherein the engineered DUX4-targeting oligonucleotide comprises at least 70% sequence identity to an oligonucleotide of any one of SEQ. ID. NOs: 41,923-42,115, a vector encoding or comprising said oligonucleotide, and a pharmaceutically acceptable: excipient, diluent, or carrier. In certain cases, the neuromuscular disease is facioscapulohumeral muscular dystrophy. In other aspects, may call for the use of an engineered DUX4-targeting oligonucleotide configured to hybridize to an RNA comprising a portion of a RNA transcript, wherein the engineered DUX4-targeting oligonucleotide comprises at least 70% sequence identity to an oligonucleotide of any one of SEQ. ID. NOs: 41,923-42,115, and a pharmaceutically acceptable: excipient, diluent, or carrier in the preparation of a medicament for the treatment and prevention of facioscapulohumeral muscular dystrophy.

### Co Therapies

[0128] In some aspects, disclosed herein are methods of administering a DUX4-targeting oligonucleotide or salt thereof to a subject in combination with a co-therapy. In some aspects, one or more additional co-therapies may be administered concurrently. In some aspects, one or more additional therapeutics may be administered consecutively. In some cases, an co-therapy may comprise immunotherapy, hormone therapy, cryotherapy, surgical procedure or any combination thereof. A co-therapy may include administration of a pharmaceutical composition, such as a small molecule. A co-therapy may include administration of a pharmaceutical composition, such as one or more antibiotics. A co-therapy may comprise administration of a muscle relaxant, an anti-depressant, a steroid, an opioid, a cannabis-based therapeutic, acetaminophen, a non-steroidal anti-inflammatory, a neuropathic agent, a cannabis, a progestin, a progesterone, or any combination thereof. A neuropathic agent may comprise gabapentin. A non-steroidal anti-inflammatory may comprise naproxen, ibuprofen, a COX-2 inhibitor, or any combination thereof. A second therapy may comprise administration of a biologic agent, cellular therapy, regenerative medicine therapy, a tissue engineering approach, a stem cell transplantation or any combination thereof. A co-therapy may comprise a medical procedure. A medical procedure may comprise an epidural injection (such as a steroid injection), acupuncture, exercise, physical therapy, an ultrasound, a surgical therapy, a chiropractic manipulation, an osteopathic manipulation, a chemonucleolysis, or any combination thereof. A co-therapy may comprise use of a breathing assist device or a ventilator. A co-therapy may comprise administration of a regenerative therapy or an immunotherapy such as a protein, a stem cell, a cord blood cell, an umbilical cord tissue, a tissue, or any combination thereof. A second therapy may comprise an anti-inflammatory compound, or an anti-fibrosis compound such as pirfenidone, nintedanib, tocilizumab, mycophenolate mofetil/mycophenolic acid prednisone, azathioprine, or a combination thereof. A second therapy may comprise a biosimilar.

[0129] In some aspects, when a co-therapy is a pharmaceutical agent, the pharmaceutical agent included in a pharmaceutical composition in the form of a fixed dose combination drug.

[0130] In some cases, a co-therapeutic dose regimen may be administered for a duration of about 1 week, about 2 weeks, about 3 weeks, about 4 weeks, about 6 weeks, about 7 weeks, about 8 weeks, about 9 weeks, about 10 weeks, or about 12 weeks. In some cases, a dose regimen may be administered for a duration of about 1 month, about 2 months, about 3 months, about 4 months, about 6 months, about 7 months, about 8 months, about 9 months, about 10 months, or about 12 months. In some cases, a dose regimen may be administered for a duration of about 1 year, about 2 years or more than about 3 years.

[0131] In some aspects, disclosed herein are methods of use for co-therapy compositions as disclosed herein. In some aspects, a daily oral dosage regimen may be from about 0.1 milligram per kilogram (mg/kg) to about 80 mg/kg of total body weight, from about 0.2 mg/kg to about 30 mg/kg, or from about 0.5 mg/kg to about 15 mg/kg. In some aspects, a daily parenteral dosage regimen may comprise from about 0.1 mg/kg to about 10,000 mg/kg of total body weight, from about 0.2 mg/kg to about 5,000 mg/kg, or from about 0.5 mg/kg to about 1,000 mg/kg. In some aspects, a daily topical dosage regimen may be from about 0.1 mg to about 500 mg. In some aspects, a daily dosage regimen may be from about 0.01 mg/kg to about 1,000 mg/kg per day. In some aspects, an optimal quantity and spacing of individual dosages of a composition may be determined by a nature and extent of a condition being treated, a form, route and site of administration, and a particular subject being treated, and that such optimums may preferably be determined by a method described herein. In some aspects, a number of doses of compositions given per day for a defined number of days, may be ascertained by those skilled in the art using conventional course of treatment determination tests. In some aspects, a dosage regimen may be determined by an attending physician and other clinical factors. In some aspects, dosages for any one subject may depend upon many factors. In some aspects, factors affecting dosage may comprise a subject's size, body surface area, age, a particular compound to be administered, sex, time and route of administration, general health, other drugs being administered concurrently or any combination thereof. In some aspects, progress may be monitored by periodic assessment.

[0132] In some aspects, a co-therapy described herein may be administered one or more days to a subject in need thereof. In some aspects, administration may occur for about: 1, 2, 3, 4,5,6,7,8,9, 10, 11, 12, 13, 14, 15, 16, 17, 18, 19, 20, 21, 22, 23, 24, 25, 26, 27, 28, 29, 30 or about 31 days. In some aspects, administration may occur for about: 1, 2, 3, 4, 5, 6, 7, 8, 9, 10, 11, 12, 13, 14, 15, 16, 17, 18, 19, 20, 21, 22, 23, or about 24 months. In some aspects, administration may occur for about: 1, 2, 3, 4, 5, 6, 7, 8, 9, 10, 11, 12, 13, 14, 15, 16, 17, 18, 19, 20, 21, 22, 23, 24, 25, 26, 27, 28, 29, 30, 31, 32, 33, 34, 35, 36, 37, 38, 39, 40, 41, 42, 43, 44, 45, 46, 47, 48, 49, or about 50 or more years. In some cases, administration may occur for life. In some aspects, a pharmaceutical composition described herein may be administered on 2, 3, 4, 5, 6, 7, 8, 9, 10, 11, 12, 13, 14, 15, 16, 17, 18, 19 or 20 or more days. In some cases, a composition described herein may be administered on consecutive days or on nonconsecutive days. In some cases, a composition described herein may be administered to a subject more than one time per day. In some instances, a composition described herein may be administered to a subject: 1, 2, 3, 4, 5, 6, 7, 8, 9, or 10 or more times per day.

[0133] In some aspects, a regimen as a regular administration of a pharmaceutical agent may be in a range of 1 μg to 10 mg. In some aspects, a regimen as a regular administration of a pharmaceutical composition may be in a range of 10² units to 10¹⁰ units per day, week or month. In some aspects, if a regimen comprises a continuous infusion, it may also be in a range of 1 μg to 10,000 mg of pharmaceutical agent. In certain instances, the range is from 1 mg per kilogram of body weight to 1000 mg per kilogram of body weight. In some aspects, progress may be monitored by periodic assessment.

### Kits

[0134] A kit may include the DUX4-targeting oligonucleotide in a container, the nucleic acid construct in a container, the vector in a container, the pharmaceutical composition in a container. A kit may include more than one DUX4-targeting oligonucleotide in a container, more than one vector in a container, more than one nucleic acid construct in a container, or more than one pharmaceutical composition in a container. In some cases, a container may be a plastic, a glass, or a metal container. A container may comprise a syringe, a vial, an ampule, a bag, ajar, and the like.

[0135] A kit may include a plurality of containers, each container comprising one or more DUX4-targeting oligonucleotides, or nucleic acid constructs, or vectors, or pharmaceutical compositions. A kit may include an excipient or a diluent or a buffer or a liquid or gel-like medium for storage of the DUX4-targeting oligonucleotide, the nucleic acid construct, the vector, or the pharmaceutical composition. A kit may include an excipient or a diluent or a buffer or a liquid or gel-like medium for in vivo delivery to a subject of the DUX4-targeting oligonucleotide, the nucleic acid construct, the vector, or the pharmaceutical composition. An excipient or diluent or buffer or liquid or gel-like medium may be included in the container housing the DUX4-targeting oligonucleotide (or nucleic acid construct or vector or pharmaceutical composition) or housed in a separate container. A kit may include a delivery vehicle, such as a syringe or needle. A kit may include one or more reagents for a downstream analysis.

[0136] In some cases, at least about: 70%, 75%, 80%, 85%, 90%, 95% of an initial amount of the DUX4-targeting oligonucleotide or salt thereof remains when the DUX4-targeting oligonucleotide or salt thereof may be stored in a closed container placed in a room for a time period of at least about: 1 month, 2 months, 3 months, 4 months, 5 months, 6 months at about from about 21 to about 25 degrees Celsius (such as about: 21, 22, 23, 24, 25 degrees Celsius) with a relative atmospheric humidity of from about 45% to about 55% (such as about: 45%, 46%, 47%, 48%, 49%, 50%, 51%, 52%, 53%, 54%, 55%). In some cases, the time period may be from about 1 month to about 1 year. In some cases, the time period may be from about 1 month to about 2 year. In some cases, the time period may be from about 1 month to about 6 months. In some cases, the time period may be from about 1 month to about 3 year. In some cases, the time period may be from about 1 month to about 9 months.

### Diagnostics

[0137] In some cases, a method may further comprise diagnosing a subject as having the disease. In some cases, a diagnosing may comprise employing an in vitro diagnostic. In some cases, the in vitro diagnostic may be a companion diagnostic. In other instances, the diagnosing may comprise an in vivo diagnostic.

[0138] A diagnostic test may comprise an imaging procedure, a blood count analysis, a tissue pathology analysis, a biomarker analysis, a biopsy, a magnetic resonance image procedure, a physical examination, a urine test, an ultrasonography procedure, a genetic test, a liver function test, a positron emission tomography procedure, a X-ray, serology, an angiography procedure, an electrocardiography procedure, an endoscopy, a diagnostic polymerase chain reaction test (PCR), a pap smear, a hematocrit test, a skin allergy test, a urine test, a colonoscopy, an enzyme-linked immunosorbent assay (ELISA), microscopy analysis, bone marrow examination, rapid diagnostic test, pregnancy test, organ function test, toxicology test, infectious disease test, bodily fluids test, or any combination thereof.

### Computer Control Systems

[0139] The present disclosure provides computer control systems that are programmed to implement methods of the disclosure. FIG. 15 shows a computer system 101 that is programmed or otherwise configured to predict or confirm efficacy of various constructs for therapeutic effect, such as in the treatment of FSHD. The computer system 101 may regulate various aspects of the present disclosure, such as, for example, modeling or identifying constructs for various therapeutic targets, modeling efficacy or stability of constructs, or any combination thereof. The computer system 101 may be an electronic device of a user or a computer system that is remotely located with respect to the electronic device. The electronic device may be a mobile electronic device.

[0140] The computer system 101 includes a central processing unit (CPU, also “processor” and “computer processor” herein) 105, which may be a single core or multi core processor, or a plurality of processors for parallel processing. The computer system 101 also includes memory or memory location 110 (e.g., random-access memory, read-only memory, flash memory), electronic storage unit 115 (e.g., hard disk), communication interface 120 (e.g., network adapter) for communicating with one or more other systems, and peripheral devices 125, such as cache, other memory, data storage and/or electronic display adapters. The memory 110, storage unit 115, interface 120 and peripheral devices 125 are in communication with the CPU 105 through a communication bus (solid lines), such as a motherboard. The storage unit 115 may be a data storage unit (or data repository) for storing data. The computer system 101 may be operatively coupled to a computer network (“network”) 130 with the aid of the communication interface 120. The network 130 may be the Internet, an internet and/or extranet, or an intranet and/or extranet that is in communication with the Internet. The network 130 in some cases is a telecommunication and/or data network. The network 130 may include one or more computer servers, which may enable distributed computing, such as cloud computing. The network 130, in some cases with the aid of the computer system 101, may implement a peer-to-peer network, which may enable devices coupled to the computer system 101 to behave as a client or a server.

[0141] The CPU 105 may execute a sequence of machine-readable instructions, which may be embodied in a program or software. The instructions may be stored in a memory location, such as the memory 110. The instructions may be directed to the CPU 105, which may subsequently program or otherwise configure the CPU 105 to implement methods of the present disclosure. Examples of operations performed by the CPU 105 may include fetch, decode, execute, and writeback.

[0142] The CPU 105 may be part of a circuit, such as an integrated circuit. One or more other components of the system 101 may be included in the circuit. In some cases, the circuit is an application specific integrated circuit (ASIC).

[0143] The storage unit 115 may store files, such as drivers, libraries and saved programs. The storage unit 115 may store user data, e.g., user preferences and user programs. The computer system 101 in some cases may include one or more additional data storage units that are external to the computer system 101, such as located on a remote server that is in communication with the computer system 101 through an intranet or the Internet.

[0144] The computer system 101 may communicate with one or more remote computer systems through the network 130. For instance, the computer system 101 may communicate with a remote computer system of a user. Examples of remote computer systems include personal computers (e.g., portable PC), slate or tablet PC's (e.g., Apple® iPad, Samsung® Galaxy Tab), telephones, Smart phones (e.g., Apple® iPhone, Android-enabled device, Blackberry®), or personal digital assistants. The user may access the computer system 101 via the network 130.

[0145] Methods as described herein may be implemented by way of machine (e.g., computer processor) executable code stored on an electronic storage location of the computer system 101, such as, for example, on the memory 110 or electronic storage unit 115. The machine executable or machine-readable code may be provided in the form of software. During use, the code may be executed by the processor 105. In some cases, the code may be retrieved from the storage unit 1115 and stored on the memory 110 for ready access by the processor 105. In some situations, the electronic storage unit 115 may be precluded, and machine-executable instructions are stored on memory 110.

[0146] The code may be pre-compiled and configured for use with a machine having a processer adapted to execute the code or may be compiled during runtime. The code may be supplied in a programming language that may be selected to enable the code to execute in a pre-compiled or as-compiled fashion.

[0147] Aspects of the systems and methods provided herein, such as the computer system 101, may be embodied in programming. Various aspects of the technology may be thought of as “products” or “articles of manufacture” typically in the form of machine (or processor) executable code and/or associated data that is carried on or embodied in a type of machine readable medium. Machine-executable code may be stored on an electronic storage unit, such as memory (e.g., read-only memory, random-access memory, flash memory) or a hard disk. “Storage” type media may include any or all of the tangible memory of the computers, processors or the like, or associated modules thereof, such as various semiconductor memories, tape drives, disk drives and the like, which may provide non-transitory storage at any time for the software programming. All or portions of the software may at times be communicated through the Internet or various other telecommunication networks. Such communications, for example, may enable loading of the software from one computer or processor into another, for example, from a management server or host computer into the computer platform of an application server. Thus, another type of media that may bear the software elements includes optical, electrical and electromagnetic waves, such as used across physical interfaces between local devices, through wired and optical landline networks and over various air-links. The physical elements that carry such waves, such as wired or wireless links, optical links or the like, also may be considered as media bearing the software. As used herein, unless restricted to non-transitory, tangible “storage” media, terms such as computer or machine “readable medium” refer to any medium that participates in providing instructions to a processor for execution.

[0148] Hence, a machine readable medium, such as computer-executable code, may take many forms, including but not limited to, a tangible storage medium, a carrier wave medium or physical transmission medium. Non-volatile storage media include, for example, optical or magnetic disks, such as any of the storage devices in any computer(s) or the like, such as may be used to implement the databases, etc. shown in the drawings. Volatile storage media include dynamic memory, such as main memory of such a computer platform. Tangible transmission media include coaxial cables; copper wire and fiber optics, including the wires that comprise a bus within a computer system. Carrier-wave transmission media may take the form of electric or electromagnetic signals, or acoustic or light waves such as those generated during radio frequency (RF) and infrared (IR) data communications. Common forms of computer-readable media therefore include for example: a floppy disk, a flexible disk, hard disk, magnetic tape, any other magnetic medium, a CD-ROM, DVD or DVD-ROM, any other optical medium, punch cards paper tape, any other physical storage medium with patterns of holes, a RAM, a ROM, a PROM and EPROM, a FLASH-EPROM, any other memory chip or cartridge, a carrier wave transporting data or instructions, cables or links transporting such a carrier wave, or any other medium from which a computer may read programming code and/or data. Many of these forms of computer readable media may be involved in carrying one or more sequences of one or more instructions to a processor for execution.

[0149] The computer system 101 may include or be in communication with an electronic display 135 that comprises a user interface (UI) 140 for providing, for example, one or more results (immediate results or archived results from a previous method), one or more user inputs, a reference value or derivative thereof from a library or database, or any combination thereof. Examples of UI's include, without limitation, a graphical user interface (GUI) and web-based user interface.

[0150] In some cases, as shown in FIG. 15, a sample 202 containing a genetic material may be obtained from a subject 201, such as a human subject. A sample 202 may be subjected to one or more methods as described herein, such as performing an assay. In some cases, an assay may comprise sequencing (such as nanopore sequencing), genotyping, hybridization, amplification, labeling, or any combination thereof. One or more results from a method may be input into a processor 204. One or more input parameters such as a sample identification, subject identification, sample type, a reference, or other information may be input into a processor 204. One or more metrics from an assay may be input into a processor 204 such that the processor may produce a result, such as a diagnosis of neuromuscular disease or a recommendation for a treatment. A processor may send a result, an input parameter, a metric, a reference, or any combination thereof to a display 205, such as a visual display or graphical user interface. A processor 204 may (i) send a result, an input parameter, a metric, or any combination thereof to a server 207, (ii) receive a result, an input parameter, a metric, or any combination thereof from a server 207, (iii) or a combination thereof.

[0151] Methods and systems of the present disclosure may be implemented by way of one or more algorithms. An algorithm may be implemented by way of software upon execution by the central processing unit 105. The algorithm can, for example, determine optimized constructs via supervised learning to optimize therapeutic efficacy, stability, or other attribute of one or more constructs.

### EXAMPLES

### Example 1: DUX4 Sequence from Skeletal Muscle Samples

[0152] An analysis was performed from RNA-seq data of a total of 95 skeletal muscle samples of which 70 were derived from FSHD patients and 25 from healthy individuals. The samples used were from the following three publicly available datasets: Yao et al. 2014 (28) Wong et al. 2020 (17) and Wang et al. 2019 (29). The results of this analysis are shown in FIG. 3. However, this approach was not successful in generating enough data to predict RNA sequence variation in patients from most for the DUX4 coding sequence due to the fact that DUX4 is expressed at such a low level that only 1 or 2 reads was identified per sequence sample. To confidently predict sequence variation between individuals 50 to 100× read counts are normally required per samples. Only a small region of DUX4 located in exon 1 met this criteria.

### Example 2: DUX4 Sequence from Testis Samples

[0153] We decided to test this negative hypothesis and analyzed RNA-seq data of testis samples from 206 individuals (30). Unexpectedly, this dataset was sufficient to predict variance across exons 1,2,3 of the muscle specific transcripts with mean coverage of 117× across this sequence (FIG. 4). From this dataset we were able to several regions of the DUX4 coding sequence that are >85% conserved displaying promise in the approach. However, several regions of DUX4 still did not have enough coverage to accurately predict conservation, likely due to the difference in splice isoforms.

### Example 3: DUX4 Sequence from Combined Muscle and Testis Samples Database

[0154] To solve this problem, we took a very unique and unprecedented approach and combined the muscle RNA-seq and the testis RNA-seq into one merged dataset and performed the analysis. For this final analysis we were able to obtain 486 testis samples from GTEX and utilized the 95 skeletal muscle samples from Example 1. This final analysis generated the best data yielding read coverage of >50× for over 97% of the DUX4 gene allowing accurate prediction of DUX4 target site and OTN pairs that are greater than 85% conserved among patients (Table 4). As described above all resulting OTN sequences and pared DUX4 target site sequences, all represented in DNA form, are submitted as an xml file encompassing SEQ. ID. NOs 1-41,922. This data will be useful in identifying suitable stretches of 15-25 bases in the DUX4 sequence that are conserved among the majority for FSHD patient and selection for OTN drug development.

TABLE 4
Conserved DUX4 Regions

190173724-190173916, 190173917-190173950, 190173951-190174011, 190174012-
190174073, 190174074-190174231, 190174232-190174291, 190174292-190174343,
190174344-190174517, 190174518-190174941, 190174942-190175068, 190175069-
190175149, 190175150-190175197, 190175198-190175218, 190175219-190175285,
190175286-190175414, 190175415-190175588, 190175589-190175654, 190175655-
190175713, 190175714-190175816, 190175817-190175918, 190175919-190176359,
190176360-190176589, 190176590-190178325, 190178326-190178341, 190178342-
190178384, 190178385-190178402, 190178403-190178458, 190178459-190178528,
190178529-190178585, 190178586-190178886, 190178887-190179164, 190179165-
190179573, 190179574-190179602, 190179603-190179746, 190179747-190179926,
190179927-190180010, 190180011-190180125, 190180126-190180225, 190180226-
190181024, 190181025-190181092, 190181093-190181112, 190181113-190181219,
190181220-190181254, 190181255-190181291, 190181292-190181441, 190181442-
190181625, 190181626-190181656, 190181657-190181909, 190181910-190181954,
190181955-190182178, 190182179-190182208, 190182209-190182254, 190182255-
190182357, 190182358-190182437, 190182438-190183539, 190183540-190183738,
190183739-190183811, 190183812-190183834, 190183835-190184392, 190184393-
190184588, 190184589-190184611, 190184612-190184807, 190184808-190184858,
190184859-190185155, 190185156-190185731, 190185732-190185762, 190185763-
190185826, 190185827-190185947.

[0155] Regarding Table 4, contiguous sequence encoding DUX4 on chromosome 4q35 that are >85% conserved among individuals and could serve as target sites for ONTs targeting DUX4 for the treatment of FSHD. The DNA sequence for DUX4 and listed coordinates align with Ensemble release 101 (GRCh38.p13).

[0156] Referring to FIG. 1, this figure depicts genetic modifications leading to FSHD. In FSHD type 1 is the result of a deletion of the D4Z4 repeats on chromosome 4q35 from around 100 to less than 11 repeats leading to opening of chromatin and expression of DUX4. FSHD Type 2 is the result of a loss of function mutation in the epigenetic factor SMCHD1 leading to demethylation D4Z4 repeats on 4q35, opening of chromatin and expression of DUX4.

[0157] Referring to FIG. 2, this figure shows alternately spliced DUX4 transcripts originating from D4Z4 regions. ENST00000616166.1, ENST00000569241.5, and ENST00000570263.5 are associated with FSHD when expressed in muscle tissue. Transcripts ENST00000565211.1, ENST00000563716.5,and ENST00000564366.1 are normally expressed in other tissues and are not associated with the disorder. For example, ENST00000563716.5 is expressed in the testes.

[0158] Referring to FIG. 3, this figure shows read coverage from RNA-Seq data of alternately spliced DUX4 transcripts from FSHD and Healthy muscle biopsy tissue.

[0159] Referring to FIG. 4, this figure shows read coverage from RNA-Seq data of alternately spliced DUX4 transcripts from the Testis. Alternately spliced DUX4 transcripts ENST00000616166.1, ENST00000569241.5, and ENST00000570263.5 are associated with FSHD when expressed in muscle tissue.

[0160] Referring to FIG. 5, this figure shows that chemical modifications DUX4 targeted ASOs may improve ASO stability to biological nucleases. DUX4 targeted ASOs were incubated in 10% human serum at 37° C. for the indicated lengths of time. ASO stability at each time point was visualized by denaturing Urea-PAGE. Unmodified Oligo, shows an example of an unmodified DNA nucleic acid that has very low half-life, Neg Con Oligo shows an ASO that does not target DUX4 but has similar chemical modifications while the other panels show chemically engineered ASOs that target DUX4. An exceptional example displays stability to biological nucleases out to 7 days (168 hours).

[0161] Referring to Table 5, this table shows the calculated half-life of chemically modified ASOs targeting DUX4 to biological nucleases. DUX4 ASOs were incubated in 10% human serum at 37° C. at different time points and visualized via Urea-PAGE. Densitometry was performed on each time point and ASO stability at each time point was calculated and averaged based on the formula N_{(T)}=N₀(½)_{t/t(1/2)} where N_{(T)} is signal at time point t. No is the signal at the start before incubation with nucleases and t (½) is the half-life. Unmodified refers to non-chemically modified RNA while Neg Con Oligo refers to an ASO that is chemically modified but does not target DUX4.

TABLE 5
Human Serum Half Life

| | Half Life | | Half Life |
|---|---|---|---|
| ASO ID | (Hours) | ASO ID | (Hours) |
| Unmodified | 0.05 | AS-DX-059-1 | >720 |
| Neg Con Oligo | >720 | AS-DX-098-1 | 427 |
| AS-DX-001 | 119 | AS-DX-099-1 | >720 |
| AS-DX-002-1 | 15 | AS-DX-027-2 | >720 |
| AS-DX-002-2 | 291 | AS-DX-027-3 | >720 |
| AS-DX-005-1 | 63 | AS-DX-027-4 | >720 |
| AS-DX-008-1 | 124 | AS-DX-100-01 | >720 |
| AS-DX-010-1 | 150 | AS-DX-101-01 | >720 |
| AS-DX-010-2 | 505 | AS-DX-102-01 | >720 |
| AS-DX-011-1 | 282 | AS-DX-103-01 | >720 |
| AS-DX-012-1 | 700 | AS-DX-105-01 | 353 |
| AS-DX-015-1 | 336 | AS-DX-033-2 | 601 |
| AS-DX-101-1 | 139 | AS-DX-033-3 | >720 |
| AS-DX-102-1 | 238 | AS-DX-107-1 | 433 |
| AS-DX-103-1 | 77 | AS-DX-108-1 | 334 |
| AS-DX-104-1 | 108 | AS-DX-50-3 | >720 |
| AS-DX-105-1 | 45 | AS-DX-50-4 | >720 |
| AS-DX-106-1 | 256 | AS-DX-110-1 | 668 |
| AS-DX-107-1 | 128 | AS-DX-111-1 | 540 |
| AS-DX-108-1 | 118 | AS-DX-59-2 | 611 |
| AS-DX-120-1 | 111 | AS-DX-112-1 | >720 |
| AS-DX-007-1 | >720 | AS-DX-59-3 | >720 |
| AS-DX-016-1 | >720 | | |
| AS-DX-018-1 | 387 | | |
| AS-DX-023-1 | 339 | | |
| AS-DX-025-1 | 857 | | |
| AS-DX-027-1 | 487 | | |
| AS-DX-028-1 | 221 | | |
| AS-DX-029-1 | 377 | | |
| AS-DX-030-1 | 538 | | |
| AS-DX-033-1 | 198 | | |
| AS-DX-038-1 | 174 | | |
| AS-DX-040-1 | 322 | | |
| AS-DX-041-1 | >720 | | |
| AS-DX-050-1 | 350 | | |
| AS-DX-052-1 | 91 | | |
| AS-DX-057-1 | 401 | | |

[0162] Referring to FIG. 6A, this figure shows reductions in innate immunostimulation for engineered DUX4 ASOs. Human Peripheral Blood Mononuclear Cells (PBMCs)(˜2-6×10⁵ cells) were plated in round bottom 96 well plates and transfected at 133 nM concentrations of the indicated ASOs for 48 hours with RNAiMAX reagent. Levels of IFN-α (Left axis) and TNF-α (right axis) in supernatant media were quantified by ELISA for 6 patients. Poly (dA:dT) (Pos Con #1) and an inmmunostimulatory oligonucleotide (Pos Con #2) served as positive controls for immunostimulation. RNAiMAX without oligonucleotide served as baseline negative control (Baseline) while transfection with a non-immunostimulatory RNA that does not target DUX4 (Neg Con) demonstrated low immunostimulation.

[0163] Referring to FIG. 6B,this figure further shows reductions in innate immunostimulation for engineered DUX4 ASOs through the Raw-Blue cell assay (Invivogen, raw-sp). In brief, cells were plated at 100,000 cells/well in 150 uL in a U bottom 96 well plate (Thermo, 163320) in DMEM (Thbermo, 11965092) with 10% FBS (Thermo, 10082147). After 24 hours, 22.34 uL of OptiMEM (Thermo, 31985088) is mixed with 2.66 uL of 10 uM ASO (per well), and 1 uL of Lipofectamine (per well). Lipofectamine/ASO mixtures are then added to each well of Raw Cells to make a final ASO concentration of 133 nM. Poly(dA:dT) (Invivogen, tlrl-patn) @ 1-10 ng/mL, CpG (Invivogen, tlrl-1585) @ 133 nM are used as positive controls. Cells are incubated for 1 day @ 37 degrees/5% CO2 with the transfection/ASO mixture. After incubation, gently spin the plate at 300×g for 5 min then collect 20 uL from each well and add to a new 96 well plate, flat bottom (VWR, 29442-056). Add 180 uL of QUANTI-Blue (Invivogen, rep-qbs) to each well of supernatant and incubate for 30m-6 hours @ 37 degrees/5% CO2. Read absorbance at 620-655 nm using Cytation 5 (Biotek). Data represents the mean of six replicate wells and error bars represent standard deviation.

[0164] Referring to FIG. 7, DUX4 ASO HTS Assay Design. Stable human or mouse myoblasts expressing eGFP with the coding sequence for DUX4 in the 3′ UTR. Constitutive expression of this construct is driven by CMV for strong, ubiquitous expression. Unmolested mRNA encoding the eGFP-UTR-DUX4 transcript is transcribed and the eGFP sequence is translated. Translation of the toxic DUX4 protein is prevented by a stop codon at the end of the eGFP sequence, and mutation of the start codon for DUX4. ASOs that efficiently target DUX4 may bind to the fusion transcript and induce degradation through RNAse H or RISC, preventing GFP protein expression. Following treatment, a reduction of fluorescence may be observed in untreated cells and negative control transfection compared to experimental ASOs as assayed by plate reader or image analysis to efficiently generate reproducible results comparing the efficacy of DUX4 targeted ASOs. Two reporter assays, one in the immortalized mouse myoblast line C2C12 and another in the immortalized human FSHD myoblast line 15Abic were developed.

[0165] Referring to Table 6, this table display knockdown of a stable DUX4 GFP reporter screening assay. In black wall, clear bottom 96 well plates 10,000 15Abic stables or 1500 C2C12 stable cells are plated in their respective media. The following day after attachment, cells are then transfected using Lipofectamine™ RNAiMAX Transfection Reagent (13778075, Thermo Fisher Scientific). For each well 0.20 μL/well of Lipofectamine® RNAiMAX was mixed with 5 μL of Opti-MEM and incubated for 5 minutes. Then an equal volume of 20× ASO in Opti-MEM is added such that the total volume of the two transfection mixtures was 10 μL/well and such that the final concentration of ASO in a total well volume of 200 μL is 12.5 nM for c2c12 cells or 25 nM for 15Abic cells. The ASO-Opti-MEM mixture was incubated at room temperature for 15 mins. 10 μL of the resultant transfection reagent mixture was then added to each experimental well. After 6 hrs normal cell culture media is added to each well and then plates were incubated for 72-96 h at 37° C. The media was then replaced with 50 μL of FluoroBrite DMEM media (A1896701, Thermo Fisher Scientific) supplemented with L-glutamine and sodium pyruvate to 4 mM and 1 mM respectively for reading. Fluorescence intensity for each well was measured at 390+10 nm Excitation and 510+10 nm Emission on a Cytation 5 Cell Imaging Multi-Mode Reader (Biotek Instruments). Following fluorescence measurement the serum free FluoroBrite DMEM was removed and 100 μL of normal media was added to each well and WST-8 was used to measure cell viability/cell count. Cell viability measurements followed the manufacturers protocol. Briefly, 10 μL of WST-8 (ab228554, Abcam) was subsequently added to each well and the plate was oscillated to distribute the reagent evenly. Plates were then returned to the incubator for 30 mins to 3 hours depending on the cell density and cell type. To measure cell viability absorbance at 460 nm was measured on a Cytation 5. GFP measurements for each well are normalized to the WST-8 cell count. Values in the table represent mean GFP expression from six replicate wells and are displayed as a fraction of treatment with a negative control ASO.

TABLE 6
Knockdown of GFP-DUX4 reporter
with Oligonucleotide Therapies.

| | |
|---|---|
| C2C12 GFP Reporter Assay | 15Abic GFP Reporter Assay |

| ASO Name | Ave. FC | ASO Name | Ave. FC |
|---|---|---|---|
| Neg. Con | 0.99 | Neg. Con | 1.00 |
| AS-DX-001-1 | 0.86 | AS-DX-015-1 | 0.81 |
| AS-DX-002-1 | 0.78 | AS-DX-015-3 | 0.62 |
| AS-DX-003-1 | 0.93 | AS-DX-018-1 | 0.65 |
| AS-DX-004-1 | 0.86 | AS-DX-028-1 | 0.77 |
| AS-DX-005-1 | 0.88 | AS-DX-029-1 | 0.65 |
| AS-DX-006-1 | 0.96 | AS-DX-030-1 | 0.63 |
| AS-DX-008-1 | 0.84 | AS-DX-033-1 | 0.54 |
| AS-DX-009-1 | 0.70 | AS-DX-050-1 | 0.81 |
| AS-DX-010-1 | 0.59 | AS-DX-052-1 | 0.71 |
| AS-DX-011-1 | 0.54 | AS-DX-059-1 | 0.39 |
| AS-DX-012-1 | 0.67 | AS-DX-102-1 | 0.80 |
| AS-DX-015-1 | 0.66 | AS-DX-094-1 | 0.60 |
| AS-DX-015-3 | 0.41 | AS-DX-104-1 | 0.37 |
| AS-DX-018-1 | 0.54 | AS-DX-033-2 | 0.82 |
| AS-DX-019-1 | 0.84 | AS-DX-033-3 | 0.70 |
| AS-DX-021-1 | 0.99 | AS-DX-105-1 | 0.83 |
| AS-DX-022-1 | 0.85 | AS-DX-106-1 | 0.84 |
| AS-DX-023-1 | 0.53 | AS-DX-059-2 | 0.39 |
| AS-DX-025-1 | 0.57 | AS-DX-112-1 | 0.47 |
| AS-DX-026-1 | 0.55 | AS-DX-114-1 | 0.77 |
| AS-DX-027-1 | 0.33 | AS-DX-116-1 | 0.69 |
| AS-DX-028-1 | 0.55 | AS-DX-117-1 | 0.70 |
| AS-DX-029-1 | 0.53 | AS-DX-118-1 | 0.79 |
| AS-DX-030-1 | 0.56 | AS-DX-119-1 | 0.64 |
| AS-DX-032-1 | 0.80 | AS-DX-120-1 | 0.78 |
| AS-DX-033-1 | 0.53 | AS-DX-122-1 | 0.53 |
| AS-DX-034-1 | 0.89 | AS-DX-123-1 | 0.40 |
| AS-DX-035-1 | 0.87 | AS-DX-124-1 | 0.44 |
| AS-DX-036-1 | 1.03 | AS-DX-125-1 | 0.41 |
| AS-DX-037-1 | 0.87 | AS-DX-126-1 | 0.62 |
| AS-DX-038-1 | 0.53 | AS-DX-031-1 | 0.37 |
| AS-DX-040-1 | 0.48 | AS-DX-128-1 | 0.42 |
| AS-DX-041-1 | 0.43 | AS-DX-129-1 | 0.60 |
| AS-DX-043-1 | 0.83 | AS-DX-130-1 | 0.51 |
| AS-DX-044-1 | 0.75 | AS-DX-131-1 | 0.96 |
| AS-DX-045-1 | 0.59 | AS-DX-132-1 | 0.86 |
| AS-DX-046-1 | 0.97 | AS-DX-133-1 | 0.45 |
| AS-DX-018-2 | 0.82 | AS-DX-133-2 | 0.40 |
| AS-DX-048-1 | 0.84 | AS-DX-134-2 | 0.88 |
| AS-DX-049-1 | 0.89 | AS-DX-135-1 | 0.80 |
| AS-DX-050-1 | 0.98 | AS-DX-136-1 | 0.61 |
| AS-DX-051-1 | 0.66 | AS-DX-137-1 | 0.69 |
| AS-DX-052-1 | 0.59 | AS-DX-045-2 | 0.63 |
| AS-DX-054-1 | 0.86 | AS-DX-138-1 | 0.67 |
| AS-DX-055-1 | 0.87 | AS-DX-139-1 | 0.66 |
| AS-DX-057-1 | 0.67 | AS-DX-106-2 | 0.71 |
| AS-DX-058-1 | 0.72 | AS-DX-140-1 | 0.79 |
| AS-DX-059-1 | 0.27 | MRC-2107 | 0.64 |
| AS-DX-023-2 | 0.60 | | |
| AS-DX-023-3 | 0.39 | | |
| AS-DX-098-1 | 0.62 | | |
| AS-DX-099-1 | 0.55 | | |
| AS-DX-027-2 | 0.55 | | |
| AS-DX-027-3 | 0.68 | | |
| AS-DX-027-4 | 0.56 | | |
| AS-DX-100-1 | 0.50 | | |
| AS-DX-094-1 | 0.44 | | |
| AS-DX-104-1 | 0.34 | | |
| AS-DX-033-2 | 0.42 | | |
| AS-DX-033-3 | 0.18 | | |
| AS-DX-105-1 | 0.29 | | |
| AS-DX-106-1 | 0.50 | | |
| AS-DX-107-1 | 0.30 | | |
| AS-DX-108-1 | 0.23 | | |
| AS-DX-059-2 | 0.50 | | |
| AS-DX-112-1 | 0.50 | | |
| AS-DX-113-1 | 0.58 | | |
| AS-DX-059-3 | 0.20 | | |
| AS-DX-116-1 | 0.90 | | |
| AS-DX-117-1 | 0.89 | | |
| AS-DX-118-1 | 0.94 | | |
| AS-DX-119-1 | 0.63 | | |
| AS-DX-120-1 | 0.78 | | |
| AS-DX-128-1 | 0.62 | | |
| AS-DX-129-1 | 0.70 | | |
| AS-DX-130-1 | 0.94 | | |
| AS-DX-131-1 | 0.84 | | |
| AS-DX-132-1 | 0.63 | | |
| AS-DX-133-1 | 0.56 | | |
| AS-DX-133-2 | 0.75 | | |
| AS-DX-134-1 | 0.74 | | |
| AS-DX-134-2 | 0.77 | | |
| AS-DX-135-1 | 0.88 | | |
| AS-DX-137-1 | 0.52 | | |
| AS-DX-045-2 | 0.91 | | |
| AS-DX-139-1 | 0.76 | | |
| AS-DX-106-2 | 0.82 | | |
| AS-DX-140-1 | 0.53 | | |
| AS-DX-033-4 | 0.69 | | |
| AS-DX-141-1 | 0.59 | | |
| AS-DX-112-2 | 0.54 | | |
| AS-DX-142-1 | 0.72 | | |
| MRC-2107 | 0.71 | | |

[0166] Referring to FIG. 8B and Table 7 displaying knockdown of DUX4 and DUX4 induced genes ZSCAN4 and SLC34A2 in FSHD myoblasts. 15Abic or C6 cells were plated in human Myogenic Precursor Cell (hMPC) media at density of 150,000 cells per well in twelve 24 well cell culture plates. hMPC media is composed of 500 mL RoosterBasal™-MSC, 10 mL RoosterBooster™-MSC (KT-001, RoosterBio), 91 mL of fetal bovine serum (10082147, Thermo Fisher), and 50 mL of 100 mM sodium pyruvate (11360070, Thermo Fisher). Three days after plating cells in hMPC media the media was replaced with hMPC Differentiation media which is composed of 500 mL RoosterBasal™-MSC, 10 mL RoosterBooster™-MSC, 11.4 mL of horse serum (16050130, Thermo Fisher), and 50 mL of 100 mM sodium pyruvate. Ten days after plating cells in hMPC media (seven days after plating cells in hMPC Differentiation media) cells were forward transfected using 0.875 μL of Lipofectamine™ RNAiMAX Transfection Reagent (13778075, Thermo Fisher) and 3.125 nM or 6.5 nM ASO in a well volume of 1 mL according to the manufacturer's directions. Five days after transfection cells were lysed into 350 μL of Buffer RLT (79216, Qiagen). RNA was extracted using Direct-zol-96 RNA Kit (R2056, Zymo Research) following manufacturer's directions. Purified RNA concentration was determined using a NanoDrop 1000 (Thermo Fisher) following manufacturer's directions. cDNA was generated by following the manufacturer's directions for the SuperScript™ IV First-Strand Synthesis System with ezDNase™ Enzyme kit (18091150, Thermo Fisher) with the following modifications. 1 μL of 110 μM dithiothreitol was added after digestion of genomic DNA. 1 μL of 50 μM anchored Oligo d(T)20 was used as the primer during reverse transcription. Following cDNA generation qPCR was performed to quantify three target genes: DUX4-fl (DUX4-full length), SLC34A2, and ZSCAN4 as well as one control gene: RPL13A. A multiplexed, probe-based qPCR reaction was done using dual quenched PrimeTime qPCR probes and primers (a forward primer, reverse primer, and probe constitute an assay). Briefly, in each well of a 96 well plate 10 μL of PrimeTime® Gene Expression Master Mix (1055772, Integrated DNA Technologies) was mixed with 100 ng of cDNA and 0.25 μL of each 20× assay (DUX4-fl, SLC34A2, ZSCAN4, RPL 13A) along with a volume of water such that the total volume of each was 20 μL. Thermal cycling and plate reading were done using a LightCycler 96 (Roche Diagnostics). Cycling conditions were as follows: polymerase activation at 95° C. for 180 seconds, denaturation at 95° C. for 15 seconds, and annealing/extension at 60° C. for 60 seconds with the denaturation and annealing/extension steps repeated for 40 cycles. Fluorescence was read at the end of the annealing/extension step after each cycle. Cycle threshold was automatically determined using the LightCycler 96 software. The normalized relative expression of the target genes was calculated following the method described by Taylor et al., 2019 (“The Ultimate qPCR Experiment: Producing Publication Quality, Reproducible Data the First Time”). Expression of the three target genes was then added together and a bar chart was produced describing the normalized, relative, composite knockdown of target genes in relation to a negative control ASO.

TABLE 7
qRT-PCR for Knockdown of DUX4 and DUX4 regulated Genes ZSCAN4 and
SLC34A2 following 3.125 nM treatment with DUX4 targeted ODN.

| | DUX4fl | DUX4fl | | ZSCAN4 | ZSCAN4 | SLC34A2 | SLC34A2 |
|---|---|---|---|---|---|---|---|
| ASO Name | Expression | Error | ASO Name | Expression | Error | Expression | Error |
| Neg. Con. ASO | 1.00 | 0.66 | Neg. Con. ASO | 1.00 | 0.41 | 1.00 | 0.75 |
| AS-DX-001-1 | 0.03 | 0.01 | AS-DX-002-1 | 0.83 | 0.09 | 0.51 | 0.14 |
| AS-DX-002-1 | 0.24 | 0.19 | AS-DX-008-1 | 1.11 | 0.24 | 0.65 | 0.29 |
| AS-DX-003-1 | 0.05 | 0.01 | AS-DX-015-1 | 0.93 | 0.09 | 0.07 | 0.12 |
| AS-DX-004-1 | 0.32 | 0.25 | AS-DX-015-3 | 0.77 | 0.13 | 0.72 | 0.41 |
| AS-DX-005-1 | 0.06 | 0.00 | AS-DX-018-1 | 1.11 | 0.04 | 0.86 | 0.44 |
| AS-DX-006-1 | 0.15 | 0.09 | AS-DX-025-1 | 2.08 | 0.28 | 0.30 | 0.08 |
| AS-DX-007-1 | 0.14 | 0.09 | AS-DX-028-1 | 1.31 | 0.13 | 0.42 | 0.25 |
| AS-DX-008-1 | 0.10 | 0.05 | AS-DX-029-1 | 1.55 | 0.45 | 0.83 | 0.44 |
| AS-DX-010-1 | 0.19 | 0.16 | AS-DX-030-1 | 0.69 | 0.08 | 0.33 | 0.17 |
| AS-DX-011-1 | 0.22 | 0.17 | AS-DX-033-1 | 1.28 | 0.06 | 0.52 | 0.05 |
| AS-DX-012-1 | 0.18 | 0.12 | AS-DX-038-1 | 1.52 | 0.04 | 0.37 | 0.14 |
| AS-DX-015-1 | 0.28 | 0.17 | AS-DX-041-1 | 1.04 | 0.03 | 0.09 | 0.03 |
| AS-DX-015-3 | 0.04 | 0.00 | AS-DX-048-1 | 0.66 | 0.03 | 0.35 | 0.09 |
| AS-DX-018-1 | 0.05 | 0.00 | AS-DX-050-1 | 0.87 | 0.16 | 0.18 | 0.09 |
| AS-DX-019-1 | 0.03 | 0.00 | AS-DX-051-1 | 0.90 | 0.07 | 0.81 | 0.16 |
| AS-DX-021-1 | 0.87 | 0.87 | AS-DX-052-1 | 1.21 | 0.07 | 0.41 | 0.07 |
| AS-DX-022-1 | 0.18 | 0.14 | AS-DX-056-1 | 0.67 | 0.05 | 0.51 | 0.13 |
| AS-DX-023-1 | 0.21 | 0.17 | AS-DX-059-1 | 1.04 | 0.04 | 1.24 | 0.30 |
| AS-DX-025-1 | 0.07 | 0.01 | AS-DX-023-2 | 1.28 | 0.38 | 0.92 | 0.81 |
| AS-DX-026-1 | 0.07 | 0.01 | AS-DX-023-3 | 1.54 | 0.19 | 1.73 | 0.19 |
| AS-DX-027-1 | 0.05 | 0.00 | AS-DX-027-2 | 1.21 | 0.11 | 0.31 | 0.15 |
| AS-DX-028-1 | 0.22 | 0.18 | AS-DX-027-4 | 0.78 | 0.12 | 0.18 | 0.09 |
| AS-DX-029-1 | 0.06 | 0.00 | AS-DX-104-1 | 0.63 | 0.10 | 0.63 | 0.42 |
| AS-DX-030-1 | 0.04 | 0.00 | AS-DX-033-3 | 0.47 | 0.05 | 0.09 | 0.01 |
| AS-DX-032-1 | 0.13 | 0.01 | AS-DX-105-1 | 0.58 | 0.09 | 0.24 | 0.03 |
| AS-DX-033-1 | 0.11 | 0.03 | AS-DX-050-4 | 0.73 | 0.14 | 1.00 | 0.37 |
| AS-DX-034-1 | 0.09 | 0.03 | AS-DX-109-1 | 0.61 | 0.09 | 0.44 | 0.26 |
| AS-DX-035-1 | 0.12 | 0.03 | AS-DX-112-1 | 0.84 | 0.14 | 0.30 | 0.24 |
| AS-DX-036-1 | 0.04 | 0.01 | AS-DX-113-1 | 0.55 | 0.03 | 0.25 | 0.10 |
| AS-DX-037-1 | 0.06 | 0.00 | | | | | |
| AS-DX-038-1 | 0.06 | 0.00 | | | | | |
| AS-DX-040-1 | 0.06 | 0.01 | | | | | |
| AS-DX-041-1 | 0.07 | 0.00 | | | | | |
| AS-DX-043-1 | 0.09 | 0.00 | | | | | |
| AS-DX-044-1 | 0.07 | 0.00 | | | | | |
| AS-DX-045-1 | 0.07 | 0.01 | | | | | |
| AS-DX-046-1 | 0.06 | 0.00 | | | | | |
| AS-DX-018-2 | 0.22 | 0.06 | | | | | |
| AS-DX-048-1 | 0.12 | 0.02 | | | | | |
| AS-DX-049-1 | 0.08 | 0.00 | | | | | |
| AS-DX-050-1 | 0.08 | 0.02 | | | | | |
| AS-DX-051-1 | 0.07 | 0.01 | | | | | |
| AS-DX-052-1 | 0.07 | 0.00 | | | | | |
| AS-DX-053-1 | 0.18 | 0.08 | | | | | |
| AS-DX-054-1 | 0.08 | 0.01 | | | | | |
| AS-DX-055-1 | 0.08 | 0.00 | | | | | |
| AS-DX-056-1 | 0.08 | 0.02 | | | | | |
| AS-DX-057-1 | 0.09 | 0.02 | | | | | |
| AS-DX-058-1 | 0.06 | 0.01 | | | | | |
| AS-DX-059-1 | 0.06 | 0.00 | | | | | |
| AS-DX-023-2 | 0.05 | 0.00 | | | | | |
| AS-DX-023-3 | 0.20 | 0.19 | | | | | |
| AS-DX-098-1 | 0.06 | 0.00 | | | | | |
| AS-DX-027-2 | 0.07 | 0.01 | | | | | |
| AS-DX-027-3 | 0.08 | 0.00 | | | | | |
| AS-DX-027-4 | 0.23 | 0.17 | | | | | |
| AS-DX-100-1 | 0.40 | 0.30 | | | | | |
| AS-DX-101-1 | 0.27 | 0.22 | | | | | |
| AS-DX-094-1 | 0.17 | 0.09 | | | | | |
| AS-DX-104-1 | 0.06 | 0.02 | | | | | |
| AS-DX-033-2 | 0.15 | 0.09 | | | | | |
| AS-DX-033-3 | 0.03 | 0.00 | | | | | |
| AS-DX-105-1 | 0.14 | 0.08 | | | | | |
| AS-DX-106-1 | 0.16 | 0.07 | | | | | |
| AS-DX-107-1 | 0.06 | N/A | | | | | |
| AS-DX-108-1 | 0.09 | 0.01 | | | | | |
| AS-DX-050-2 | 0.06 | 0.02 | | | | | |
| AS-DX-050-3 | 0.25 | 0.28 | | | | | |
| AS-DX-050-4 | 0.05 | 0.00 | | | | | |
| AS-DX-109-1 | 0.05 | 0.00 | | | | | |
| AS-DX-007-3 | 0.12 | 0.04 | | | | | |
| AS-DX-111-1 | 0.08 | 0.02 | | | | | |
| AS-DX-059-2 | 0.06 | 0.02 | | | | | |
| AS-DX-112-1 | 0.08 | 0.02 | | | | | |
| AS-DX-113-1 | 0.33 | 0.22 | | | | | |

[0167] Referring to Table 8, this table displays LD-50 values in HepG2 Liver cells for DUX4 targeted ASOs. HEPG2 cells (HB-8065, ATCC, Manassas, VA) were grown in DMEM (10-013-CV, Corning Inc.) supplemented with 10% FBS (FBS, 16000044, Thermo Fisher Scientific) and 1× penicillin-streptomycin (15140122, Thermo Fisher Scientific) Cells were grown at 37° C. at 5% CO2 in a humidified incubator. In 96 well plates 5,000 cell are plated in 180 μL of media w/o antibiotics. Immediately following plating cells are transfected using Lipofectamine™ RNAiMAX Transfection Reagent (13778075, Thermo Fisher Scientific). For 100 nM transfection of ASO 0.4 IL/well of RNAiMAX is diluted into 10 μL of Opti-MEM and then combined with 10 μL of 1 μM ASO (10× final culture volume) in Opti-MEM and incubated at room temperature for 15 minutes. Lower doses of ASO are created by serial 1:2 dilution of 100 nM complexes. Higher concentrations are prepared by increasing the concentration of the ASO but maintaining 0.4 μL/well of RNAiMAX which is the highest dose that may be used without causing cytotoxicity. Twenty μL of appropriate diluted ASO/RNAiMAX complexes are then added to each well within 30 minutes of complex formation. Plates were gently oscillated to evenly distribute the transfection reagents in the well and were then returned to the incubator. Cells are treated for 72-96 h at 37° C. Following treatment transfection media is removed and 100 μL of fresh media is added to each well and WST-8 assay is performed to measure cell viability/cell count. Cell viability measurements followed the manufacturers protocol. Briefly, 10 μL of WST-8 (ab228554, Abcami) was added to each well and the plate was oscillated to distribute the reagent evenly. Plates were then returned to the incubator for 90 mins. Next absorbance at 460 nm was measured on a Cytation 5. Data was analyzed by subtracting the average background cell viability measurements of cell free wells (wells with only media and WST8 reagent in them) from wells containing cells. Cell viability is calculated by normalization to wells that are mock transfected with only Opti-mem. Lethal dose 50 (LD50) concentration values are extrapolated from dose curves using a custom excel macro designed for this purpose.

TABLE 8
Lethal Dose 50 values in HepG2 Liver
cells for DUX4 targeted ASOs.

| ASO Name | IC50 | ASO Name | IC50 |
|---|---|---|---|
| Neg. Con. ASO | >300 | AS-DX-059-1 | 283.17 |
| AS-DX-007-1 | >300 | AS-DX-027-2 | 38.66 |
| AS-DX-015-1 | >300 | AS-DX-027-4 | 38.91 |
| AS-DX-015-3 | 153.17 | AS-DX-100-1 | 96.77 |
| AS-DX-018-1 | 67.84 | AS-DX-033-2 | 177.65 |
| AS-DX-023-1 | 31.11 | AS-DX-033-3 | 52.43 |
| AS-DX-025-1 | 53.00 | AS-DX-105-1 | 51.96 |
| AS-DX-027-1 | 10.30 | AS-DX-106-1 | 60.38 |
| AS-DX-028-1 | 50.22 | AS-DX-107-1 | 88.52 |
| AS-DX-029-1 | 42.15 | AS-DX-108-1 | 112.89 |
| AS-DX-030-1 | >300 | AS-DX-050-2 | 113.08 |
| AS-DX-033-1 | 53.84 | AS-DX-050-3 | >300 |
| AS-DX-038-1 | >300 | AS-DX-050-4 | >300 |
| AS-DX-040-1 | 68.18 | AS-DX-109-1 | 105.82 |
| AS-DX-041-1 | 40.99 | AS-DX-007-3 | >300 |
| AS-DX-050-1 | 96.11 | AS-DX-111-1 | >300 |
| AS-DX-052-1 | >300 | AS-DX-059-2 | >300 |
| AS-DX-057-1 | 42.42 | AS-DX-112-1 | >300 |
| AS-DX-058-1 | 14.50 | AS-DX-059-3 | >300 |

[0168] Referring to FIG. 9, this figure shows simultaneous knockdown of DUX4 and DBET RNA transcripts in FSHD patient myoblasts by multi-targeted antisense oligonucleotides (ASOs). AS-DX-10 only targets the DUX4 transcript, while AS-DX-25, -37, and -55 target both DUX4 and DBET transcripts. Immortalized 15Abic myoblast cells were plated in 12-well plates and the next day transfected with control or targeted ASOs at 50 nM using the transfection agent RNAiMAX. One day after plating differentiation media was added to induce myoblast formation and DUX4 expression. 72 hrs after transfection cells were lysed and total RNA was collected from the wells and RT-qPCR was performed to determine expression of DUX4 or DBET transcripts. ASOs AS-DX-25, -37, and -55 knockdown both DUX4 and DBET transcripts while AS-DX-10 only knocks down DUX4.

### Example 4: MC-DX4 Off-Target Analysis and Validation for ASO Target Sequences

### Identifying Off Target Transcripts

[0169] All potential reverse complement ASO positions in the DUX4 coding gene (ENSG00000258389.2), from 15 bp to 20 bp were generated with 1 bp sliding in the reference sequence across the DUX4 region chr4:190,173,774-190,185,942. A modified script of GGGenome (https://gggenome.dbcls.jp/) was used for rapid alignment of our oligonucleotide sequences to the human transcriptome (Human RNA Refseq release 205, March 2021). This script identified all transcripts that are partially complimentary to each possible ASOs targeting DUX4. We then analyze these hits with algorithms to identify higher likely off-targets. These may contain up to 3 mismatches, gaps, or bulges (WO2021203043), but they must obey a series of other principles related to structural conformation, affinity, and transcript expression. Even with these filters there are still many predicted off target transcripts that are likely false positives, or context dependent, and need to be validated through experimental testing in vitro and in vivo.

### Filtering Off-Target Interactions for Potential Positive FSHD Related Targets

[0170] Patient segregation and gene expression analysis are critical parts of the disclosed data analysis strategy to understand disease biology. This starts with gathering available datasets from the literature reporting RNA expression patterns from muscle tissues and patient cells. The inventors assembled a database of 10 studies with rigorous standards for sample handling, transcriptomic profiling by microarray and RNAseq, and significant patient information. These 10 studies include: Genes with increased expression in myoblasts overexpressing DUX4 (Tsumagari et. al. 2011(31), Pakula et. al. 2013, (32) Geng et. al. 2012(33), and Mitsuhashi et. al. 2021 (34)); Microarray Studies for human muscle biopsies (Winokur et. al. 2003 (35), and Rahimov et. al. 2012 (36)); and RNA-seq profiles (Yao et al. 2014(28), Wong et al. 2020(17), and Wang et al. 2019 (29)). One drawback of these studies, is they often contain low patient numbers, lacking statistical power. To overcome this problem, the inventors created a new dataset from the three RNA-seq studies with available data to improve the statistical power, and ability to derive correlations with clinical attributes of the patients. FIG. 10 shows an overview our datasets and our analysis.

[0171] First, the inventors identified the genes that were commonly upregulated in FSHD muscle vs. control muscle among published datasets or using inventors' own RNA-seq analysis. The inventors also utilized principal component analysis and hierarchical clustering to segregate patients into groups and compared expression patterns between the control samples and these groups. Interestingly, the clusters align well with clinical severity scores (i.e., mild, moderate, or severe diseases). Supporting this analysis, similar results were obtained from a similar analysis from a subset of the samples included in the larger meta-analysis as displayed in FIG. 11. From this analysis the inventors created a database of upregulated genes in FSHD keeping with each gene the supporting evidence for this dysregulation, and any associated clinical correlations. From this database the inventors next performed pathway enrichment analysis utilizing GO pathway analysis (37). The top upregulated pathways include inflammatory response and other immune regulated pathways, cellular proliferation, cell cycle regulation, and fibrosis.

[0172] Having assembled this database of FSHD related genes and pathways, we then filtered our identified potential off-target interaction against this list. Potential off-target interactions that match an FSHD related gene, or co-targets, are displayed in the right most column in Table 2. For example, AS-DX-007 is predicted to target three co-targets associated with FSHD, DBET, MKI67, and IRF5. DBET is a non-coding RNA associated with opening of the D4Z4 repeats, and expression of DUX4 (38). MKI67 encodes the Ki-67 protein, which we detected in the upregulated FSHD muscle tissue, and may be involved in the DUX4 induction of the muscle fiber cell proliferation and damage (FIG. 12A). IRF5 (Interferon Regulatory Factor 5) encodes a transcription factor that is upregulated by several inflammatory signals, and results in the expression of several cytokines such as TNF, and induction of the intracellular interferon response (FIG. 12B). Our analysis also demonstrated increased expression of these genes in mild and severe FSHD (FIG. 13).

### Filtering Off-Target Interactions for Potential Negative Toxicity Related Interactions

[0173] To identify potential off-target interactions that may be associated with toxicity that may be desirable to avoid, the inventors utilized the Ingenuity knowledge database which accumulates peer reviewed publications, and toxicity related gene expression datasets from Tox net and other databases to associate off-target genes with potential toxicity. The inventors also identified genes related to muscle differentiation, development and function by go-pathway analysis. The inventors filtered oligonucleotide sequences identified off-target interactions for matches for IPAs Toxicity knowledge base or go pathways. For example, NR4A1 is associated with liver and kidney cell death and fibrosis, and muscle cell differentiation.

Validation of Co-Target Interaction by qRT-PCR

[0174] To validate off-target interactions, the FSHD myoblast line 15Abic was used. 2.5e5 15abic myoblasts were plated in 6-well plates. After 24 hours, replication media was removed, and 2 mL of differentiation media added and 250 μL of optimum containing appropriate ASO RNAimax complexes, so that the final concentration of each ASO was 50 nM. ASO treatments included fluorescent negative control ASO, AS-DX-015-1, which only targets DUX4 as a positive control, or AS-DX-007-1 or AS-DX-050-1 which may co-target DBET, IRF5, and MKI67. At the start of transfection, the differentiation media was added to the cells to induce fusion into myotubes and DUX4 expression. Referring to FIG. 14A displays near 100% transfection efficiency of the fluorescent ASO under optimized conditions 48 hours after transfection. After 96 hours of the transfection, myotube fusion was observed by cell morphology, and the total RNA was collected. cDNA was created, and qRT-PCR was performed for DUX4 and the co-target genes. Referring to FIG. 14B the graph displays the mean of three biological replicate wells, and error bars represent standard error of the mean. * denotes a p-value of <0.05 by 2-tailed student's t-test. Robust knockdown of DUX4 was observed for all ASOs, and significant knockdown of co-targets was observed with AS-DX-007-1 and AS-DX-050-1.

[0175] While preferred aspects of the present disclosure have been shown and described herein, such aspects are provided by way of example only. Numerous variations, changes, and substitutions may occur. It should be understood that various alternatives to the aspects of the disclosure described herein may be employed in practicing the disclosure. It is intended that the following claims define the scope of the disclosure and that methods and structures within the scope of these claims and their equivalents be covered thereby.

### REFERENCES

[0176] 1. Hamel J, Tawil R. Facioscapulohumeral Muscular Dystrophy: Update on Pathogenesis and Future Treatments. Neurotherapeutics. 2018; 15(4):863-71. doi: 10.1007/s13311-018-00675-3. PubMed PMID: 30361930; PMCID: PMC6277282.
[0177] 2. Do T N, Street N, Donnelly J, Adams M M, Cunniff C, Fox D J, Weinert R O, Oleszek J, Romitti P A, Westfield C P, Bolen J, Muscular Dystrophy Surveillance T, Research N. Muscular Dystrophy Surveillance, Tracking, and Research Network pilot: Population-based surveillance of major muscular dystrophies at four U.S. sites, 2007-2011. Birth Defects Res. 2018; 110(19):1404-11. doi: 10.1002/bdr2.1371. PubMed PMID: 30070776; PMCID: PMC6265066.
[0178] 3. Richards M, Coppee F, Thomas N, Belayew A, Upadhyaya M. Facioscapulohumeral muscular dystrophy (FSHD): an enigma unravelled? Hum Genet. 2012; 131(3):325-40. doi: 10.1007/s00439-011-1100-z. PubMed PMID: 21984394.
[0179] 4. Kowaljow V, Marcowycz A, Ansseau E, Conde C B, Sauvage S, Matteotti C, Arias C, Corona E D, Nunez N G, Leo O, Wattiez R, Figlewicz D, Laoudj-Chenivesse D, Belayew A, Coppee F, Rosa A L. The DUX4 gene at the FSHD1A locus encodes a pro-apoptotic protein. Neuromuscul Disord. 2007; 17(8):611-23. doi: 10.1016/j.nmd.2007.04.002. PubMed PMID: 17588759.
[0180] 5. Celegato B, Capitanio D, Pescatori M, Romualdi C, Pacchioni B, Cagnin S, Vigano A, Colantoni L, Begum S, Ricci E, Wait R, Lanfranchi G, Gelfi C. Parallel protein and transcript profiles of FSHD patient muscles correlate to the D4Z4 arrangement and reveal a common impairment of slow to fast fibre differentiation and a general deregulation of MyoD-dependent genes. Proteomics. 2006; 6(19):5303-21. doi: 10.1002/pmic.200600056. PubMed PMID: 17013991.
[0181] 6. A prospective, quantitative study of the natural history of facioscapulohumeral muscular dystrophy (FSHD): implications for therapeutic trials. The FSH-DY Group. Neurology. 1997; 48(1):38-46. doi: 10.1212/wnl.48.1.38. PubMed PMID: 9008491.
[0182] 7. Tawil R, Forrester J, Griggs R C, Mendell J, Kissel J, McDermott M, King W, Weiffenbach B, Figlewicz D. Evidence for anticipation and association of deletion size with severity in facioscapulohumeral muscular dystrophy. The FSH-DY Group. Ann Neurol. 1996; 39(6):744-8. doi: 10.1002/ana.410390610. PubMed PMID: 8651646.
[0183] 8. Mah J K, Chen Y W. A Pediatric Review of Facioscapulohumeral Muscular Dystrophy. J Pediatr Neurol. 2018; 16(4):222-31. doi: 10.1055/s-0037-1604197. PubMed PMID: 30923442; PMCID: PMC6435288.
[0184] 9. Padberg G W, Brouwer O F, de Keizer R J, Dijkman G, Wijmenga C, Grote J J, Frants R R. On the significance of retinal vascular disease and hearing loss in facioscapulohumeral muscular dystrophy. Muscle Nerve Suppl. 1995(2):S73-80. PubMed PMID: 23573590.
[0185] 10. Ansseau E, Vanderplanck C, Wauters A, Harper S Q, Coppee F, Belayew A. Antisense Oligonucleotides Used to Target the DUX4 mRNA as Therapeutic Approaches in FaciosScapuloHumeral Muscular Dystrophy (FSHD). Genes (Basel). 2017; 8(3). doi: 10.3390/genes8030093. PubMed PMID: 28273791; PMCID: PMC5368697.
[0186] 11. Bao B, Maruyama R, Yokota T. Targeting mRNA for the treatment of facioscapulohumeral muscular dystrophy. Intractable Rare Dis Res. 2016; 5(3):168-76. doi: 10.5582/irdr.2016.01056. PubMed PMID: 27672539; PMCID: PMC4995414.
[0187] 12. Wallace L M, Garwick S E, Mei W, Belayew A, Coppee F, Ladner K J, Guttridge D, Yang J, Harper S Q. DUX4, a candidate gene for facioscapulohumeral muscular dystrophy, causes p53-dependent myopathy in vivo. Ann Neurol. 2011; 69(3):540-52. doi: 10.1002/ana.22275. PubMed PMID: 21446026; PMCID: PMC4098764.
[0188] 13. Chen J C, King O D, Zhang Y, Clayton N P, Spencer C, Wentworth B M, Emerson C P, Jr., Wagner K R. Morpholino-mediated Knockdown of DUX4 Toward Facioscapulohumeral Muscular Dystrophy Therapeutics. Mol Ther. 2016; 24(8):1405-11. doi: 10.1038/mt.2016.111. PubMed PMID: 27378237; PMCID: PMC5023379.
[0189] 14. Wallace L M, Saad N Y, Pyne N K, Fowler A M, Eidahl J O, Domire J S, Griffin D A, Herman A C, Sahenk Z, Rodino-Klapac L R, Harper S Q. Pre-clinical Safety and Off-Target Studies to Support Translation of AAV-Mediated RNAi Therapy for FSHD. Mol Ther Methods Clin Dev. 2018; 8:121-30. doi: 10.1016/j.omtm.2017.12.005. PubMed PMID: 29387734; PMCID: PMC5787672.
[0190] 15. Wallace L M, Liu J, Domire J S, Garwick-Coppens S E, Guckes S M, Mendell J R, Flanigan K M, Harper S Q. RNA interference inhibits DUX4-induced muscle toxicity in vivo: implications for a targeted FSHD therapy. Mol Ther. 2012; 20(7):1417-23. doi: 10.1038/mt.2012.68. PubMed PMID: 22508491; PMCID: PMC3392971.
[0191] 16. Pandey S N, Lee Y C, Yokota T, Chen Y W. Morpholino treatment improves muscle function and pathology of Pitx1 transgenic mice. Mol Ther. 2014; 22(2):390-6. doi: 10.1038/mt.2013.263. PubMed PMID: 24232919; PMCID: PMC3916049.
[0192] 17. Wong C J, Wang L H, Friedman S D, Shaw D, Campbell A E, Budech C B, Lewis L M, Lemmers R, Statland J M, van der Maarel S M, Tawil R N, Tapscott S J. Longitudinal measures of RNA expression and disease activity in FSHD muscle biopsies. Hum Mol Genet. 2020; 29(6):1030-43. doi: 10.1093/hmg/ddaa031. PubMed PMID: 32083293; PMCID: PMC7158378.
[0193] 18. Xie S, Xiang Y, Wang X, Ren H, Yin T, Ren J, Liu W. Acquired cholesteatoma epithelial hyperproliferation: Roles of cell proliferation signal pathways. Laryngoscope. 2016; 126(8):1923-30. doi: 10.1002/lary.25834. PubMed PMID: 26989841.
[0194] 19. Elkon K B, Briggs T A. The (Orf)ull truth about IRF5 and type I interferons in SLE. Nat Rev Rheumatol. 2020; 16(10):543-4. doi: 10.1038/s41584-020-0472-7. PubMed PMID: 32709997.
[0195] 20. S.T. C. Antisense Drug Technology: Principles, Strategies, and Applications, Second Edition 2008.
[0196] 21. Reinert K, Langmead B, Weese D, Evers D J. Alignment of Next-Generation Sequencing Reads. Annu Rev Genomics Hum Genet. 2015; 16:133-51. doi: 10.1 146/annurev-genom-090413-025358. PubMed PMID: 25939052.
[0197] 22. van der Maarel S M, Frants R R. The D4Z4 repeat-mediated pathogenesis of facioscapulohumeral muscular dystrophy. Am J Hum Genet. 2005; 76(3):375-86. doi: 10.1086/428361. PubMed PMID: 15674778; PMCID: PMC1 196390.
[0198] 23. Ballarati L, Piccini I, Carbone L, Archidiacono N, Rollier A, Marozzi A, Meneveri R, Ginelli E. Human genome dispersal and evolution of 4q35 duplications and interspersed LSau repeats. Gene. 2002; 296(1-2):21-7. doi: 10.1016/s0378-1119(02)00858-2. PubMed PMID: 12383499.
[0199] 24. Das S, Chadwick B P. Influence of Repressive Histone and DNA Methylation upon D4Z4 Transcription in Non-Myogenic Cells. PLoS One. 2016; 11(7):e0160022. doi: 10.1371/journal.pone.0160022. PubMed PMID: 27467759; PMCID: PMC4965136.
[0200] 25. Snider L, Asawachaichan A, Tyler A E, Geng L N, Petek L M, Maves L, Miller D G, Lemmers R J, Winokur S T, Tawil R, van der Maarel S M, Filippova G N, Tapscott S J. RNA transcripts, miRNA-sized fragments and proteins produced from D4Z4 units: new candidates for the pathophysiology of facioscapulohumeral dystrophy. Hum Mol Genet. 2009; 18(13):2414-30. doi: 10.1093/hmg/ddp180. PubMed PMID: 19359275; PMCID: PMC2694690.
[0201] 26. Hagedom P H, Pontoppidan M, Bisgaard T S, Berrera M, Dieckmann A, Ebeling M, Moller M R, Hudlebusch H, Jensen M L, Hansen H F, Koch T, Lindow M. Identifying and avoiding off-target effects of RNase H-dependent antisense oligonucleotides in mice. Nucleic Acids Res. 2018; 46(11):5366-80. doi: 10.1093/nar/gky397. PubMed PMID: 29790953; PMCID: PMC6009603.
[0202] 27. Scharner J, Ma W K, Zhang Q, Lin K T, Rigo F, Bennett C F, Krainer A R. Hybridization-mediated off-target effects of splice-switching antisense oligonucleotides. Nucleic Acids Res. 2020; 48(2):802-16. doi: 10.1093/nar/gkz1132. PubMed PMID: 31802121; PMCID: PMC6954394.
[0203] 28. Yao Z, Snider L, Balog J, Lemmers R J, Van Der Maarel S M, Tawil R, Tapscott S J. DUX4-induced gene expression is the major molecular signature in FSHD skeletal muscle. Hum Mol Genet. 2014; 23(20):5342-52. doi: 10.1093/hmg/ddu251. PubMed PMID: 24861551; PMCID: PMC4168822.
[0204] 29. Wang L H, Friedman S D, Shaw D, Snider L, Wong C J, Budech C B, Poliachik S L, Gove N E, Lewis L M, Campbell A E, Lemmers R, Maarel S M, Tapscott S J, Tawil R N. MRI-informed muscle biopsies correlate MRI with pathology and DUX4 target gene expression in FSHD. Hum Mol Genet. 2019; 28(3):476-86. doi: 10.1093/hmg/ddy364. PubMed PMID: 30312408; PMCID: PMC6337697.
[0205] 30. Consortium G T. The Genotype-Tissue Expression (GTEx) project. Nat Genet. 2013; 45(6):580-5. doi: 10.1038/ng.2653. PubMed PMID: 23715323; PMCID: PMC4010069.
[0206] 31. Tsumagari K, Chang S C, Lacey M, Baribault C, Chittur S V, Sowden J, Tawil R, Crawford G E, Ehrlich M. Gene expression during normal and FSHD myogenesis. BMC Med Genomics. 2011; 4:67. doi: 10.1186/1755-8794-4-67. PubMed PMID: 21951698; PMCID: PMC3204225.
[0207] 32. Pakula A, Schneider J, Janke J, Zacharias U, Schulz H, Hubner N, Mahler A, Spuler A, Spuler S, Carlier P, Boschmann M. Altered expression of cyclin A 1 in muscle of patients with facioscapulohumeral muscle dystrophy (FSHD-1). PLoS One. 2013; 8(9):e73573. doi: 10.1371/journal.pone.0073573. PubMed PMID: 24019929; PMCID: PMC3760810.
[0208] 33. Geng L N, Yao Z, Snider L, Fong A P, Cech J N, Young J M, van der Maarel S M, Ruzzo W L, Gentleman R C, Tawil R, Tapscott S J. DUX4 activates germline genes, retroelements, and immune mediators: implications for facioscapulohumeral dystrophy. Dev Cell. 2012; 22(1):38-51. doi: 10.1016/j.devce1.2011.11.013. PubMed PMID: 22209328; PMCID: PMC3264808.
[0209] 34. Mitsuhashi S, Nakagawa S, Sasaki-Honda M, Sakurai H, Frith M C, Mitsuhashi H. Nanopore direct RNA sequencing detects DUX4-activated repeats and isoforms in human muscle cells. Hum Mol Genet. 2021; 30(7):552-63. doi: 10.1093/hmg/ddab063. PubMed PMID: 33693705; PMCID: PMC8120133.
[0210] 35. Winokur S T, Chen Y W, Masny P S, Martin J H, Ehmsen J T, Tapscott S J, van der Maarel S M, Hayashi Y, Flanigan K M. Expression profiling of FSHD muscle supports a defect in specific stages of myogenic differentiation. Hum Mol Genet. 2003; 12(22):2895-907. doi: 10.1093/hmg/ddg327. PubMed PMID: 14519683.
[0211] 36. Rahimov F, King O D, Leung D G, Bibat G M, Emerson C P, Jr., Kunkel L M, Wagner K R. Transcriptional profiling in facioscapulohumeral muscular dystrophy to identify candidate biomarkers. Proc Natl Acad Sci USA. 2012; 109(40):16234-9. doi: 10.1073/pnas.1209508109. PubMed PMID: 22988124; PMCID: PMC3479603.
[0212] 37. Gene Ontology C. Gene Ontology Consortium: going forward. Nucleic Acids Res. 2015; 43(Database issue):D1049-56. doi: 10.1093/nar/gku1179. PubMed PMID: 25428369; PMCID: PMC4383973.
[0213] 38. Cabianca D S, Casa V, Bodega B, Xynos A, Ginelli E, Tanaka Y, Gabellini D. A long ncRNA links copy number variation to a polycomb/trithorax epigenetic switch in FSHD muscular dystrophy. Cell. 2012; 149(4):819-31. doi: 10.1016/j.cell.2012.03.035. PubMed PMID: 22541069; PMCID: PMC3350859.
[0214] 39. Untergasser A, Cutcutache I, Koressaar T, Ye J, Faircloth B C, Remm M, Rozen S G. Primer3—new capabilities and interfaces. Nucleic Acids Res. 2012 August; 40(15):e115. doi: 10.1093/nar/gks596. Epub 2012 Jun. 22. PMID: 22730293; PMCID: PMC3424584.
[0215] 40. SantaLucia J Jr. A unified view of polymer, dumbbell, and oligonucleotide DNA nearest-neighbor thermodynamics. Proc Natl Acad Sci USA. 1998 Feb. 17; 95(4):1460-5. doi: 10.1073/pnas.95.4.1460. PMID: 9465037; PMCID: PMC19045.
[0216] 41. Owczarzy R, You Y, Moreira B G, Manthey J A, Huang L, Behlke M A, Walder J A. Effects of sodium ions on DNA duplex oligomers: improved predictions of melting temperatures. Biochemistry. 2004 Mar. 30; 43(12):3537-54. doi: 10.1021/bi034621r. PMID: 15035624.

The application's sequence listing, which the Patent Office published only in electronic form, follows.

SEQUENCE LISTING (42894 sequences)

SEQ ID NO: 1 - RNA, 15 nt, Homo sapiens
  source 1..15: mol_type = genomic RNA
cctctctctgcccgc

SEQ ID NO: 2 - RNA, 15 nt, Homo sapiens
  source 1..15: mol_type = genomic RNA
ctctctctgcccgcg

SEQ ID NO: 3 - RNA, 15 nt, Homo sapiens
  source 1..15: mol_type = genomic RNA
tctctctgcccgcgt

SEQ ID NO: 4 - RNA, 15 nt, Homo sapiens
  source 1..15: mol_type = genomic RNA
ctctctgcccgcgtc

SEQ ID NO: 5 - RNA, 15 nt, Homo sapiens
  source 1..15: mol_type = genomic RNA
tctctgcccgcgtcc

SEQ ID NO: 6 - RNA, 15 nt, Homo sapiens
  source 1..15: mol_type = genomic RNA
ctctgcccgcgtccg

SEQ ID NO: 7 - RNA, 15 nt, Homo sapiens
  source 1..15: mol_type = genomic RNA
tctgcccgcgtccgt

SEQ ID NO: 8 - RNA, 15 nt, Homo sapiens
  source 1..15: mol_type = genomic RNA
ctgcccgcgtccgtc

SEQ ID NO: 9 - RNA, 15 nt, Homo sapiens
  source 1..15: mol_type = genomic RNA
tgcccgcgtccgtcc

SEQ ID NO: 10 - RNA, 15 nt, Homo sapiens
  source 1..15: mol_type = genomic RNA
gcccgcgtccgtccg

SEQ ID NO: 11 - RNA, 15 nt, Homo sapiens
  source 1..15: mol_type = genomic RNA
cccgcgtccgtccgt

SEQ ID NO: 12 - RNA, 15 nt, Homo sapiens
  source 1..15: mol_type = genomic RNA
ccgcgtccgtccgtg

SEQ ID NO: 13 - RNA, 15 nt, Homo sapiens
  source 1..15: mol_type = genomic RNA
cgcgtccgtccgtga

SEQ ID NO: 14 - RNA, 15 nt, Homo sapiens
  source 1..15: mol_type = genomic RNA
gcgtccgtccgtgaa

SEQ ID NO: 15 - RNA, 15 nt, Homo sapiens
  source 1..15: mol_type = genomic RNA
cgtccgtccgtgaaa

SEQ ID NO: 16 - RNA, 15 nt, Homo sapiens
  source 1..15: mol_type = genomic RNA
tccgtgaaattccgg

SEQ ID NO: 17 - RNA, 15 nt, Homo sapiens
  source 1..15: mol_type = genomic RNA
ccgtgaaattccggc

SEQ ID NO: 18 - RNA, 15 nt, Homo sapiens
  source 1..15: mol_type = genomic RNA
cgtgaaattccggcc

SEQ ID NO: 19 - RNA, 15 nt, Homo sapiens
  source 1..15: mol_type = genomic RNA
gtgaaattccggccg

SEQ ID NO: 20 - RNA, 15 nt, Homo sapiens
  source 1..15: mol_type = genomic RNA
tgaaattccggccgg

SEQ ID NO: 21 - RNA, 15 nt, Homo sapiens
  source 1..15: mol_type = genomic RNA
gaaattccggccggg

SEQ ID NO: 22 - RNA, 15 nt, Homo sapiens
  source 1..15: mol_type = genomic RNA
aaattccggccgggg

SEQ ID NO: 23 - RNA, 15 nt, Homo sapiens
  source 1..15: mol_type = genomic RNA
aattccggccggggc

SEQ ID NO: 24 - RNA, 15 nt, Homo sapiens
  source 1..15: mol_type = genomic RNA
attccggccggggct

SEQ ID NO: 25 - RNA, 15 nt, Homo sapiens
  source 1..15: mol_type = genomic RNA
ttccggccggggctc

SEQ ID NO: 26 - RNA, 15 nt, Homo sapiens
  source 1..15: mol_type = genomic RNA
ccggggctcaccgcg

SEQ ID NO: 27 - RNA, 15 nt, Homo sapiens
  source 1..15: mol_type = genomic RNA
cggggctcaccgcga

SEQ ID NO: 28 - RNA, 15 nt, Homo sapiens
  source 1..15: mol_type = genomic RNA
ggggctcaccgcgat

SEQ ID NO: 29 - RNA, 15 nt, Homo sapiens
  source 1..15: mol_type = genomic RNA
gggctcaccgcgatg

SEQ ID NO: 30 - RNA, 15 nt, Homo sapiens
  source 1..15: mol_type = genomic RNA
ggctcaccgcgatgg

SEQ ID NO: 31 - RNA, 15 nt, Homo sapiens
  source 1..15: mol_type = genomic RNA
gctcaccgcgatggc

SEQ ID NO: 32 - RNA, 15 nt, Homo sapiens
  source 1..15: mol_type = genomic RNA
ctcaccgcgatggcc

SEQ ID NO: 33 - RNA, 15 nt, Homo sapiens
  source 1..15: mol_type = genomic RNA
tcaccgcgatggccc

SEQ ID NO: 34 - RNA, 15 nt, Homo sapiens
  source 1..15: mol_type = genomic RNA
caccgcgatggccct

SEQ ID NO: 35 - RNA, 15 nt, Homo sapiens
  source 1..15: mol_type = genomic RNA
accgcgatggccctc

SEQ ID NO: 36 - RNA, 15 nt, Homo sapiens
  source 1..15: mol_type = genomic RNA
ccgcgatggccctcc

SEQ ID NO: 37 - RNA, 15 nt, Homo sapiens
  source 1..15: mol_type = genomic RNA
cgcgatggccctccc

SEQ ID NO: 38 - RNA, 15 nt, Homo sapiens
  source 1..15: mol_type = genomic RNA
gcgatggccctcccg

SEQ ID NO: 39 - RNA, 15 nt, Homo sapiens
  source 1..15: mol_type = genomic RNA
cgatggccctcccga

SEQ ID NO: 40 - RNA, 15 nt, Homo sapiens
  source 1..15: mol_type = genomic RNA
gatggccctcccgac

SEQ ID NO: 41 - RNA, 15 nt, Homo sapiens
  source 1..15: mol_type = genomic RNA
atggccctcccgaca

SEQ ID NO: 42 - RNA, 15 nt, Homo sapiens
  source 1..15: mol_type = genomic RNA
tggccctcccgacac

SEQ ID NO: 43 - RNA, 15 nt, Homo sapiens
  source 1..15: mol_type = genomic RNA
gccctcccgacaccc

SEQ ID NO: 44 - RNA, 15 nt, Homo sapiens
  source 1..15: mol_type = genomic RNA
ccctcccgacaccct

SEQ ID NO: 45 - RNA, 15 nt, Homo sapiens
  source 1..15: mol_type = genomic RNA
cctcccgacaccctc

SEQ ID NO: 46 - RNA, 15 nt, Homo sapiens
  source 1..15: mol_type = genomic RNA
ctcccgacaccctcg

SEQ ID NO: 47 - RNA, 15 nt, Homo sapiens
  source 1..15: mol_type = genomic RNA
tcccgacaccctcgg

SEQ ID NO: 48 - RNA, 15 nt, Homo sapiens
  source 1..15: mol_type = genomic RNA
cccgacaccctcgga

SEQ ID NO: 49 - RNA, 15 nt, Homo sapiens
  source 1..15: mol_type = genomic RNA
ccgacaccctcggac

SEQ ID NO: 50 - RNA, 15 nt, Homo sapiens
  source 1..15: mol_type = genomic RNA
cgacaccctcggaca

SEQ ID NO: 51 - RNA, 15 nt, Homo sapiens
  source 1..15: mol_type = genomic RNA
gacaccctcggacag

SEQ ID NO: 52 - RNA, 15 nt, Homo sapiens
  source 1..15: mol_type = genomic RNA
acaccctcggacagc

SEQ ID NO: 53 - RNA, 15 nt, Homo sapiens
  source 1..15: mol_type = genomic RNA
caccctcggacagca

SEQ ID NO: 54 - RNA, 15 nt, Homo sapiens
  source 1..15: mol_type = genomic RNA
accctcggacagcac

SEQ ID NO: 55 - RNA, 15 nt, Homo sapiens
  source 1..15: mol_type = genomic RNA
ccctcggacagcacc

SEQ ID NO: 56 - RNA, 15 nt, Homo sapiens
  source 1..15: mol_type = genomic RNA
cctcggacagcaccc

SEQ ID NO: 57 - RNA, 15 nt, Homo sapiens
  source 1..15: mol_type = genomic RNA
ctcggacagcaccct

SEQ ID NO: 58 - RNA, 15 nt, Homo sapiens
  source 1..15: mol_type = genomic RNA
tcggacagcaccctc

SEQ ID NO: 59 - RNA, 15 nt, Homo sapiens
  source 1..15: mol_type = genomic RNA
cggacagcaccctcc

SEQ ID NO: 60 - RNA, 15 nt, Homo sapiens
  source 1..15: mol_type = genomic RNA
ggacagcaccctccc

SEQ ID NO: 61 - RNA, 15 nt, Homo sapiens
  source 1..15: mol_type = genomic RNA
gacagcaccctcccc

SEQ ID NO: 62 - RNA, 15 nt, Homo sapiens
  source 1..15: mol_type = genomic RNA
acagcaccctccccg

SEQ ID NO: 63 - RNA, 15 nt, Homo sapiens
  source 1..15: mol_type = genomic RNA
cagcaccctccccgc

SEQ ID NO: 64 - RNA, 15 nt, Homo sapiens
  source 1..15: mol_type = genomic RNA
agcaccctccccgcg

SEQ ID NO: 65 - RNA, 15 nt, Homo sapiens
  source 1..15: mol_type = genomic RNA
gcaccctccccgcgg

SEQ ID NO: 66 - RNA, 15 nt, Homo sapiens
  source 1..15: mol_type = genomic RNA
caccctccccgcgga

SEQ ID NO: 67 - RNA, 15 nt, Homo sapiens
  source 1..15: mol_type = genomic RNA
accctccccgcggaa

SEQ ID NO: 68 - RNA, 15 nt, Homo sapiens
  source 1..15: mol_type = genomic RNA
ccctccccgcggaag

SEQ ID NO: 69 - RNA, 15 nt, Homo sapiens
  source 1..15: mol_type = genomic RNA
cctccccgcggaagc

SEQ ID NO: 70 - RNA, 15 nt, Homo sapiens
  source 1..15: mol_type = genomic RNA
ctccccgcggaagcc

SEQ ID NO: 71 - RNA, 15 nt, Homo sapiens
  source 1..15: mol_type = genomic RNA
tccccgcggaagccc

SEQ ID NO: 72 - RNA, 15 nt, Homo sapiens
  source 1..15: mol_type = genomic RNA
ccccgcggaagcccg

SEQ ID NO: 73 - RNA, 15 nt, Homo sapiens
  source 1..15: mol_type = genomic RNA
cccgcggaagcccgg

SEQ ID NO: 74 - RNA, 15 nt, Homo sapiens
  source 1..15: mol_type = genomic RNA
ggacgaggacggcga

SEQ ID NO: 75 - RNA, 15 nt, Homo sapiens
  source 1..15: mol_type = genomic RNA
gacgaggacggcgac

SEQ ID NO: 76 - RNA, 15 nt, Homo sapiens
  source 1..15: mol_type = genomic RNA
acgaggacggcgacg

SEQ ID NO: 77 - RNA, 15 nt, Homo sapiens
  source 1..15: mol_type = genomic RNA
cgaggacggcgacgg

SEQ ID NO: 78 - RNA, 15 nt, Homo sapiens
  source 1..15: mol_type = genomic RNA
gaggacggcgacgga

SEQ ID NO: 79 - RNA, 15 nt, Homo sapiens
  source 1..15: mol_type = genomic RNA
aggacggcgacggag

SEQ ID NO: 80 - RNA, 15 nt, Homo sapiens
  source 1..15: mol_type = genomic RNA
ggacggcgacggaga

SEQ ID NO: 81 - RNA, 15 nt, Homo sapiens
  source 1..15: mol_type = genomic RNA
gacggcgacggagac

SEQ ID NO: 82 - RNA, 15 nt, Homo sapiens
  source 1..15: mol_type = genomic RNA
acggcgacggagact

SEQ ID NO: 83 - RNA, 15 nt, Homo sapiens
  source 1..15: mol_type = genomic RNA
cggcgacggagactc

SEQ ID NO: 84 - RNA, 15 nt, Homo sapiens
  source 1..15: mol_type = genomic RNA
ggcgacggagactcg

SEQ ID NO: 85 - RNA, 15 nt, Homo sapiens
  source 1..15: mol_type = genomic RNA
gcgacggagactcgt

SEQ ID NO: 86 - RNA, 15 nt, Homo sapiens
  source 1..15: mol_type = genomic RNA
cgacggagactcgtt

SEQ ID NO: 87 - RNA, 15 nt, Homo sapiens
  source 1..15: mol_type = genomic RNA
gacggagactcgttt

SEQ ID NO: 88 - RNA, 15 nt, Homo sapiens
  source 1..15: mol_type = genomic RNA
acggagactcgtttg

SEQ ID NO: 89 - RNA, 15 nt, Homo sapiens
  source 1..15: mol_type = genomic RNA
agcgaggccctgcga

SEQ ID NO: 90 - RNA, 15 nt, Homo sapiens
  source 1..15: mol_type = genomic RNA
gcgaggccctgcgag

SEQ ID NO: 91 - RNA, 15 nt, Homo sapiens
  source 1..15: mol_type = genomic RNA
cgaggccctgcgagc

SEQ ID NO: 92 - RNA, 15 nt, Homo sapiens
  source 1..15: mol_type = genomic RNA
ccctgcgagcctgct

SEQ ID NO: 93 - RNA, 15 nt, Homo sapiens
  source 1..15: mol_type = genomic RNA
cctgcgagcctgctt

SEQ ID NO: 94 - RNA, 15 nt, Homo sapiens
  source 1..15: mol_type = genomic RNA
ctgcgagcctgcttt

SEQ ID NO: 95 - RNA, 15 nt, Homo sapiens
  source 1..15: mol_type = genomic RNA
tgcgagcctgctttg

SEQ ID NO: 96 - RNA, 15 nt, Homo sapiens
  source 1..15: mol_type = genomic RNA
gcgagcctgctttga

SEQ ID NO: 97 - RNA, 15 nt, Homo sapiens
  source 1..15: mol_type = genomic RNA
cgagcctgctttgag

SEQ ID NO: 98 - RNA, 15 nt, Homo sapiens
  source 1..15: mol_type = genomic RNA
gagcctgctttgagc

SEQ ID NO: 99 - RNA, 15 nt, Homo sapiens
  source 1..15: mol_type = genomic RNA
agcctgctttgagcg

SEQ ID NO: 100 - RNA, 15 nt, Homo sapiens
  source 1..15: mol_type = genomic RNA
gcctgctttgagcgg

SEQ ID NO: 101 - RNA, 15 nt, Homo sapiens
  source 1..15: mol_type = genomic RNA
cctgctttgagcgga

SEQ ID NO: 102 - RNA, 15 nt, Homo sapiens
  source 1..15: mol_type = genomic RNA
ctgctttgagcggaa

SEQ ID NO: 103 - RNA, 15 nt, Homo sapiens
  source 1..15: mol_type = genomic RNA
tgctttgagcggaac

SEQ ID NO: 104 - RNA, 15 nt, Homo sapiens
  source 1..15: mol_type = genomic RNA
gctttgagcggaacc

SEQ ID NO: 105 - RNA, 15 nt, Homo sapiens
  source 1..15: mol_type = genomic RNA
ctttgagcggaaccc

SEQ ID NO: 106 - RNA, 15 nt, Homo sapiens
  source 1..15: mol_type = genomic RNA
tttgagcggaacccg

SEQ ID NO: 107 - RNA, 15 nt, Homo sapiens
  source 1..15: mol_type = genomic RNA
ttgagcggaacccgt

SEQ ID NO: 108 - RNA, 15 nt, Homo sapiens
  source 1..15: mol_type = genomic RNA
tgagcggaacccgta

SEQ ID NO: 109 - RNA, 15 nt, Homo sapiens
  source 1..15: mol_type = genomic RNA
gagcggaacccgtac

SEQ ID NO: 110 - RNA, 15 nt, Homo sapiens
  source 1..15: mol_type = genomic RNA
agcggaacccgtacc

SEQ ID NO: 111 - RNA, 15 nt, Homo sapiens
  source 1..15: mol_type = genomic RNA
gcggaacccgtaccc

SEQ ID NO: 112 - RNA, 15 nt, Homo sapiens
  source 1..15: mol_type = genomic RNA
cggaacccgtacccg

SEQ ID NO: 113 - RNA, 15 nt, Homo sapiens
  source 1..15: mol_type = genomic RNA
ggaacccgtacccgg

SEQ ID NO: 114 - RNA, 15 nt, Homo sapiens
  source 1..15: mol_type = genomic RNA
gaacccgtacccggg

SEQ ID NO: 115 - RNA, 15 nt, Homo sapiens
  source 1..15: mol_type = genomic RNA
aacccgtacccgggc

SEQ ID NO: 116 - RNA, 15 nt, Homo sapiens
  source 1..15: mol_type = genomic RNA
acccgtacccgggca

SEQ ID NO: 117 - RNA, 15 nt, Homo sapiens
  source 1..15: mol_type = genomic RNA
cccgtacccgggcat

SEQ ID NO: 118 - RNA, 15 nt, Homo sapiens
  source 1..15: mol_type = genomic RNA
ccgtacccgggcatc

SEQ ID NO: 119 - RNA, 15 nt, Homo sapiens
  source 1..15: mol_type = genomic RNA
cgtacccgggcatcg

SEQ ID NO: 120 - RNA, 15 nt, Homo sapiens
  source 1..15: mol_type = genomic RNA
gtacccgggcatcgc

SEQ ID NO: 121 - RNA, 15 nt, Homo sapiens
  source 1..15: mol_type = genomic RNA
tacccgggcatcgcc

SEQ ID NO: 122 - RNA, 15 nt, Homo sapiens
  source 1..15: mol_type = genomic RNA
acccgggcatcgcca

SEQ ID NO: 123 - RNA, 15 nt, Homo sapiens
  source 1..15: mol_type = genomic RNA
cagagaacggctggc

SEQ ID NO: 124 - RNA, 15 nt, Homo sapiens
  source 1..15: mol_type = genomic RNA
agagaacggctggcc

SEQ ID NO: 125 - RNA, 15 nt, Homo sapiens
  source 1..15: mol_type = genomic RNA
agaacggctggccca

SEQ ID NO: 126 - RNA, 15 nt, Homo sapiens
  source 1..15: mol_type = genomic RNA
gaacggctggcccag

SEQ ID NO: 127 - RNA, 15 nt, Homo sapiens
  source 1..15: mol_type = genomic RNA
ctggcccaggccatc

SEQ ID NO: 128 - RNA, 15 nt, Homo sapiens
  source 1..15: mol_type = genomic RNA
tggcccaggccatcg

SEQ ID NO: 129 - RNA, 15 nt, Homo sapiens
  source 1..15: mol_type = genomic RNA
ggcccaggccatcgg

SEQ ID NO: 130 - RNA, 15 nt, Homo sapiens
  source 1..15: mol_type = genomic RNA
cccaggccatcggca

SEQ ID NO: 131 - RNA, 15 nt, Homo sapiens
  source 1..15: mol_type = genomic RNA
ccaggccatcggcat

SEQ ID NO: 132 - RNA, 15 nt, Homo sapiens
  source 1..15: mol_type = genomic RNA
caggccatcggcatt

SEQ ID NO: 133 - RNA, 15 nt, Homo sapiens
  source 1..15: mol_type = genomic RNA
aggccatcggcattc

SEQ ID NO: 134 - RNA, 15 nt, Homo sapiens
  source 1..15: mol_type = genomic RNA
ggccatcggcattcc

SEQ ID NO: 135 - RNA, 15 nt, Homo sapiens
  source 1..15: mol_type = genomic RNA
gagcccagggtccag

SEQ ID NO: 136 - RNA, 15 nt, Homo sapiens
  source 1..15: mol_type = genomic RNA
agcccagggtccaga

SEQ ID NO: 137 - RNA, 15 nt, Homo sapiens
  source 1..15: mol_type = genomic RNA
gcccagggtccagat

SEQ ID NO: 138 - RNA, 15 nt, Homo sapiens
  source 1..15: mol_type = genomic RNA
cccagggtccagatt

SEQ ID NO: 139 - RNA, 15 nt, Homo sapiens
  source 1..15: mol_type = genomic RNA
ccagggtccagattt

SEQ ID NO: 140 - RNA, 15 nt, Homo sapiens
  source 1..15: mol_type = genomic RNA
agggtccagatttgg

SEQ ID NO: 141 - RNA, 15 nt, Homo sapiens
  source 1..15: mol_type = genomic RNA
gggtccagatttggt

SEQ ID NO: 142 - RNA, 15 nt, Homo sapiens
  source 1..15: mol_type = genomic RNA
tcagaatgagaggtc

SEQ ID NO: 143 - RNA, 15 nt, Homo sapiens
  source 1..15: mol_type = genomic RNA
cagaatgagaggtca

SEQ ID NO: 144 - RNA, 15 nt, Homo sapiens
  source 1..15: mol_type = genomic RNA
agaatgagaggtcac

SEQ ID NO: 145 - RNA, 15 nt, Homo sapiens
  source 1..15: mol_type = genomic RNA
gaatgagaggtcacg

SEQ ID NO: 146 - RNA, 15 nt, Homo sapiens
  source 1..15: mol_type = genomic RNA
aatgagaggtcacgc

SEQ ID NO: 147 - RNA, 15 nt, Homo sapiens
  source 1..15: mol_type = genomic RNA
atgagaggtcacgcc

SEQ ID NO: 148 - RNA, 15 nt, Homo sapiens
  source 1..15: mol_type = genomic RNA
tgagaggtcacgcca

SEQ ID NO: 149 - RNA, 15 nt, Homo sapiens
  source 1..15: mol_type = genomic RNA
gagaggtcacgccag

SEQ ID NO: 150 - RNA, 15 nt, Homo sapiens
  source 1..15: mol_type = genomic RNA
agaggtcacgccagc

SEQ ID NO: 151 - RNA, 15 nt, Homo sapiens
  source 1..15: mol_type = genomic RNA
gaggtcacgccagct

SEQ ID NO: 152 - RNA, 15 nt, Homo sapiens
  source 1..15: mol_type = genomic RNA
aggtcacgccagctg

SEQ ID NO: 153 - RNA, 15 nt, Homo sapiens
  source 1..15: mol_type = genomic RNA
ggtcacgccagctga

SEQ ID NO: 154 - RNA, 15 nt, Homo sapiens
  source 1..15: mol_type = genomic RNA
gtcacgccagctgag

SEQ ID NO: 155 - RNA, 15 nt, Homo sapiens
  source 1..15: mol_type = genomic RNA
tcacgccagctgagg

SEQ ID NO: 156 - RNA, 15 nt, Homo sapiens
  source 1..15: mol_type = genomic RNA
cacgccagctgaggc

SEQ ID NO: 157 - RNA, 15 nt, Homo sapiens
  source 1..15: mol_type = genomic RNA
acgccagctgaggca

SEQ ID NO: 158 - RNA, 15 nt, Homo sapiens
  source 1..15: mol_type = genomic RNA
cgccagctgaggcag

SEQ ID NO: 159 - RNA, 15 nt, Homo sapiens
  source 1..15: mol_type = genomic RNA
ccagctgaggcagca

SEQ ID NO: 160 - RNA, 15 nt, Homo sapiens
  source 1..15: mol_type = genomic RNA
cagctgaggcagcac

SEQ ID NO: 161 - RNA, 15 nt, Homo sapiens
  source 1..15: mol_type = genomic RNA
gctgaggcagcaccg

SEQ ID NO: 162 - RNA, 15 nt, Homo sapiens
  source 1..15: mol_type = genomic RNA
ctgaggcagcaccgg

SEQ ID NO: 163 - RNA, 15 nt, Homo sapiens
  source 1..15: mol_type = genomic RNA
gggaatctcggccct

SEQ ID NO: 164 - RNA, 15 nt, Homo sapiens
  source 1..15: mol_type = genomic RNA
ggaatctcggccctg

SEQ ID NO: 165 - RNA, 15 nt, Homo sapiens
  source 1..15: mol_type = genomic RNA
gaatctcggccctgg

SEQ ID NO: 166 - RNA, 15 nt, Homo sapiens
  source 1..15: mol_type = genomic RNA
aatctcggccctggc

SEQ ID NO: 167 - RNA, 15 nt, Homo sapiens
  source 1..15: mol_type = genomic RNA
atctcggccctggcc

SEQ ID NO: 168 - RNA, 15 nt, Homo sapiens
  source 1..15: mol_type = genomic RNA
ctcggccctggcccg

SEQ ID NO: 169 - RNA, 15 nt, Homo sapiens
  source 1..15: mol_type = genomic RNA
ctggccagagagacg

SEQ ID NO: 170 - RNA, 15 nt, Homo sapiens
  source 1..15: mol_type = genomic RNA
tggccagagagacgg

SEQ ID NO: 171 - RNA, 15 nt, Homo sapiens
  source 1..15: mol_type = genomic RNA
ccagagagacgggcc

SEQ ID NO: 172 - RNA, 15 nt, Homo sapiens
  source 1..15: mol_type = genomic RNA
cagagagacgggcct

SEQ ID NO: 173 - RNA, 15 nt, Homo sapiens
  source 1..15: mol_type = genomic RNA
agagagacgggcctc

SEQ ID NO: 174 - RNA, 15 nt, Homo sapiens
  source 1..15: mol_type = genomic RNA
gagagacgggcctcc

SEQ ID NO: 175 - RNA, 15 nt, Homo sapiens
  source 1..15: mol_type = genomic RNA
gagacgggcctcccg

SEQ ID NO: 176 - RNA, 15 nt, Homo sapiens
  source 1..15: mol_type = genomic RNA
cgggcctcccggagt

SEQ ID NO: 177 - RNA, 15 nt, Homo sapiens
  source 1..15: mol_type = genomic RNA
gggcctcccggagtc

SEQ ID NO: 178 - RNA, 15 nt, Homo sapiens
  source 1..15: mol_type = genomic RNA
ggcctcccggagtcc

SEQ ID NO: 179 - RNA, 15 nt, Homo sapiens
  source 1..15: mol_type = genomic RNA
gcctcccggagtcca

SEQ ID NO: 180 - RNA, 15 nt, Homo sapiens
  source 1..15: mol_type = genomic RNA
cctcccggagtccag

SEQ ID NO: 181 - RNA, 15 nt, Homo sapiens
  source 1..15: mol_type = genomic RNA
ctcccggagtccagg

SEQ ID NO: 182 - RNA, 15 nt, Homo sapiens
  source 1..15: mol_type = genomic RNA
tcccggagtccagga

SEQ ID NO: 183 - RNA, 15 nt, Homo sapiens
  source 1..15: mol_type = genomic RNA
cccggagtccaggat

SEQ ID NO: 184 - RNA, 15 nt, Homo sapiens
  source 1..15: mol_type = genomic RNA
ccggagtccaggatt

SEQ ID NO: 185 - RNA, 15 nt, Homo sapiens
  source 1..15: mol_type = genomic RNA
cggagtccaggattc

SEQ ID NO: 186 - RNA, 15 nt, Homo sapiens
  source 1..15: mol_type = genomic RNA
ggagtccaggattca

SEQ ID NO: 187 - RNA, 15 nt, Homo sapiens
  source 1..15: mol_type = genomic RNA
gagtccaggattcag

SEQ ID NO: 188 - RNA, 15 nt, Homo sapiens
  source 1..15: mol_type = genomic RNA
agtccaggattcaga

SEQ ID NO: 189 - RNA, 15 nt, Homo sapiens
  source 1..15: mol_type = genomic RNA
aggattcagatctgg

SEQ ID NO: 190 - RNA, 15 nt, Homo sapiens
  source 1..15: mol_type = genomic RNA
ttcagaatcgaaggg

SEQ ID NO: 191 - RNA, 15 nt, Homo sapiens
  source 1..15: mol_type = genomic RNA
tcagaatcgaagggc

SEQ ID NO: 192 - RNA, 15 nt, Homo sapiens
  source 1..15: mol_type = genomic RNA
cagaatcgaagggcc

SEQ ID NO: 193 - RNA, 15 nt, Homo sapiens
  source 1..15: mol_type = genomic RNA
agaatcgaagggcca

SEQ ID NO: 194 - RNA, 15 nt, Homo sapiens
  source 1..15: mol_type = genomic RNA
gaatcgaagggccag

SEQ ID NO: 195 - RNA, 15 nt, Homo sapiens
  source 1..15: mol_type = genomic RNA
aatcgaagggccagg

SEQ ID NO: 196 - RNA, 15 nt, Homo sapiens
  source 1..15: mol_type = genomic RNA
atcgaagggccaggc

SEQ ID NO: 197 - RNA, 15 nt, Homo sapiens
  source 1..15: mol_type = genomic RNA
tcgaagggccaggca

SEQ ID NO: 198 - RNA, 15 nt, Homo sapiens
  source 1..15: mol_type = genomic RNA
caggcacccgggaca

SEQ ID NO: 199 - RNA, 15 nt, Homo sapiens
  source 1..15: mol_type = genomic RNA
gctccacctccccag

SEQ ID NO: 200 - RNA, 15 nt, Homo sapiens
  source 1..15: mol_type = genomic RNA
ctccacctccccagc

SEQ ID NO: 201 - RNA, 15 nt, Homo sapiens
  source 1..15: mol_type = genomic RNA
tccacctccccagcc

SEQ ID NO: 202 - RNA, 15 nt, Homo sapiens
  source 1..15: mol_type = genomic RNA
ccacctccccagccc

SEQ ID NO: 203 - RNA, 15 nt, Homo sapiens
  source 1..15: mol_type = genomic RNA
cacctccccagcccg

SEQ ID NO: 204 - RNA, 15 nt, Homo sapiens
  source 1..15: mol_type = genomic RNA
cctccccagcccgcg

SEQ ID NO: 205 - RNA, 15 nt, Homo sapiens
  source 1..15: mol_type = genomic RNA
ctccccagcccgcgc

SEQ ID NO: 206 - RNA, 15 nt, Homo sapiens
  source 1..15: mol_type = genomic RNA
cagcccgcgcccccg

SEQ ID NO: 207 - RNA, 15 nt, Homo sapiens
  source 1..15: mol_type = genomic RNA
ccgcgcccccggacg

SEQ ID NO: 208 - RNA, 15 nt, Homo sapiens
  source 1..15: mol_type = genomic RNA
cgcccccggacgcct

SEQ ID NO: 209 - RNA, 15 nt, Homo sapiens
  source 1..15: mol_type = genomic RNA
cccccggacgcctcc

SEQ ID NO: 210 - RNA, 15 nt, Homo sapiens
  source 1..15: mol_type = genomic RNA
ccccggacgcctccg

SEQ ID NO: 211 - RNA, 15 nt, Homo sapiens
  source 1..15: mol_type = genomic RNA
cccggacgcctccgc

SEQ ID NO: 212 - RNA, 15 nt, Homo sapiens
  source 1..15: mol_type = genomic RNA
ccggacgcctccgcc

SEQ ID NO: 213 - RNA, 15 nt, Homo sapiens
  source 1..15: mol_type = genomic RNA
cggacgcctccgcct

SEQ ID NO: 214 - RNA, 15 nt, Homo sapiens
  source 1..15: mol_type = genomic RNA
ggacgcctccgcctc

SEQ ID NO: 215 - RNA, 15 nt, Homo sapiens
  source 1..15: mol_type = genomic RNA
gacgcctccgcctcc

SEQ ID NO: 216 - RNA, 15 nt, Homo sapiens
  source 1..15: mol_type = genomic RNA
acgcctccgcctccg

SEQ ID NO: 217 - RNA, 15 nt, Homo sapiens
  source 1..15: mol_type = genomic RNA
cgcctccgcctccgc

SEQ ID NO: 218 - RNA, 15 nt, Homo sapiens
  source 1..15: mol_type = genomic RNA
gcctccgcctccgcg

SEQ ID NO: 219 - RNA, 15 nt, Homo sapiens
  source 1..15: mol_type = genomic RNA
cctccgcctccgcgc

SEQ ID NO: 220 - RNA, 15 nt, Homo sapiens
  source 1..15: mol_type = genomic RNA
ctccgcctccgcgcg

SEQ ID NO: 221 - RNA, 15 nt, Homo sapiens
  source 1..15: mol_type = genomic RNA
tccgcctccgcgcgg

SEQ ID NO: 222 - RNA, 15 nt, Homo sapiens
  source 1..15: mol_type = genomic RNA
ccgcctccgcgcggc

SEQ ID NO: 223 - RNA, 15 nt, Homo sapiens
  source 1..15: mol_type = genomic RNA
cgcctccgcgcggca

SEQ ID NO: 224 - RNA, 15 nt, Homo sapiens
  source 1..15: mol_type = genomic RNA
gcctccgcgcggcag

SEQ ID NO: 225 - RNA, 15 nt, Homo sapiens
  source 1..15: mol_type = genomic RNA
cctccgcgcggcagg

SEQ ID NO: 226 - RNA, 15 nt, Homo sapiens
  source 1..15: mol_type = genomic RNA
ctccgcgcggcaggg

SEQ ID NO: 227 - RNA, 15 nt, Homo sapiens
  source 1..15: mol_type = genomic RNA
cggcaggggcagatg

SEQ ID NO: 228 - RNA, 15 nt, Homo sapiens
  source 1..15: mol_type = genomic RNA
gcaggggcagatgca

SEQ ID NO: 229 - RNA, 15 nt, Homo sapiens
  source 1..15: mol_type = genomic RNA
caggggcagatgcaa

SEQ ID NO: 230 - RNA, 15 nt, Homo sapiens
  source 1..15: mol_type = genomic RNA
aggggcagatgcaag

SEQ ID NO: 231 - RNA, 15 nt, Homo sapiens
  source 1..15: mol_type = genomic RNA
ggggcagatgcaagg

SEQ ID NO: 232 - RNA, 15 nt, Homo sapiens
  source 1..15: mol_type = genomic RNA
gggcagatgcaaggc

SEQ ID NO: 233 - RNA, 15 nt, Homo sapiens
  source 1..15: mol_type = genomic RNA
ggcagatgcaaggca

SEQ ID NO: 234 - RNA, 15 nt, Homo sapiens
  source 1..15: mol_type = genomic RNA
gcagatgcaaggcat

SEQ ID NO: 235 - RNA, 15 nt, Homo sapiens
  source 1..15: mol_type = genomic RNA
cagatgcaaggcatc

SEQ ID NO: 236 - RNA, 15 nt, Homo sapiens
  source 1..15: mol_type = genomic RNA
agatgcaaggcatcc

SEQ ID NO: 237 - RNA, 15 nt, Homo sapiens
  source 1..15: mol_type = genomic RNA
gatgcaaggcatccc

SEQ ID NO: 238 - RNA, 15 nt, Homo sapiens
  source 1..15: mol_type = genomic RNA
atgcaaggcatcccg

SEQ ID NO: 239 - RNA, 15 nt, Homo sapiens
  source 1..15: mol_type = genomic RNA
tgcaaggcatcccgg

SEQ ID NO: 240 - RNA, 15 nt, Homo sapiens
  source 1..15: mol_type = genomic RNA
gcaaggcatcccggc

SEQ ID NO: 241 - RNA, 15 nt, Homo sapiens
  source 1..15: mol_type = genomic RNA
caaggcatcccggcg

SEQ ID NO: 242 - RNA, 15 nt, Homo sapiens
  source 1..15: mol_type = genomic RNA
aaggcatcccggcgc

SEQ ID NO: 243 - RNA, 15 nt, Homo sapiens
  source 1..15: mol_type = genomic RNA
gcatcccggcgccct

SEQ ID NO: 244 - RNA, 15 nt, Homo sapiens
  source 1..15: mol_type = genomic RNA
catcccggcgccctc

SEQ ID NO: 245 - RNA, 15 nt, Homo sapiens
  source 1..15: mol_type = genomic RNA
atcccggcgccctcc

SEQ ID NO: 246 - RNA, 15 nt, Homo sapiens
  source 1..15: mol_type = genomic RNA
cccggcgccctccca

SEQ ID NO: 247 - RNA, 15 nt, Homo sapiens
  source 1..15: mol_type = genomic RNA
ccggcgccctcccag

SEQ ID NO: 248 - RNA, 15 nt, Homo sapiens
  source 1..15: mol_type = genomic RNA
cggcgccctcccagg

SEQ ID NO: 249 - RNA, 15 nt, Homo sapiens
  source 1..15: mol_type = genomic RNA
gcgccctcccaggcg

SEQ ID NO: 250 - RNA, 15 nt, Homo sapiens
  source 1..15: mol_type = genomic RNA
cgccctcccaggcgc

SEQ ID NO: 251 - RNA, 15 nt, Homo sapiens
  source 1..15: mol_type = genomic RNA
gccctcccaggcgct

SEQ ID NO: 252 - RNA, 15 nt, Homo sapiens
  source 1..15: mol_type = genomic RNA
ccctcccaggcgctc

SEQ ID NO: 253 - RNA, 15 nt, Homo sapiens
  source 1..15: mol_type = genomic RNA
cctcccaggcgctcc

SEQ ID NO: 254 - RNA, 15 nt, Homo sapiens
  source 1..15: mol_type = genomic RNA
ctcccaggcgctcca

SEQ ID NO: 255 - RNA, 15 nt, Homo sapiens
  source 1..15: mol_type = genomic RNA
tcccaggcgctccag

SEQ ID NO: 256 - RNA, 15 nt, Homo sapiens
  source 1..15: mol_type = genomic RNA
cccaggcgctccagg

SEQ ID NO: 257 - RNA, 15 nt, Homo sapiens
  source 1..15: mol_type = genomic RNA
ccaggcgctccagga

SEQ ID NO: 258 - RNA, 15 nt, Homo sapiens
  source 1..15: mol_type = genomic RNA
caggcgctccaggag

SEQ ID NO: 259 - RNA, 15 nt, Homo sapiens
  source 1..15: mol_type = genomic RNA
gcgctccaggagccg

SEQ ID NO: 260 - RNA, 15 nt, Homo sapiens
  source 1..15: mol_type = genomic RNA
cgctccaggagccgg

SEQ ID NO: 261 - RNA, 15 nt, Homo sapiens
  source 1..15: mol_type = genomic RNA
ctccaggagccggcg

SEQ ID NO: 262 - RNA, 15 nt, Homo sapiens
  source 1..15: mol_type = genomic RNA
agaaacggaggcccc

SEQ ID NO: 263 - RNA, 15 nt, Homo sapiens
  source 1..15: mol_type = genomic RNA
gaaacggaggccccg

SEQ ID NO: 264 - RNA, 15 nt, Homo sapiens
  source 1..15: mol_type = genomic RNA
aaacggaggccccgg

SEQ ID NO: 265 - RNA, 15 nt, Homo sapiens
  source 1..15: mol_type = genomic RNA
gagctggaggcctcg

SEQ ID NO: 266 - RNA, 15 nt, Homo sapiens
  source 1..15: mol_type = genomic RNA
agctggaggcctcgg

SEQ ID NO: 267 - RNA, 15 nt, Homo sapiens
  source 1..15: mol_type = genomic RNA
gctggaggcctcgga

SEQ ID NO: 268 - RNA, 15 nt, Homo sapiens
  source 1..15: mol_type = genomic RNA
ctggaggcctcggaa

SEQ ID NO: 269 - RNA, 15 nt, Homo sapiens
  source 1..15: mol_type = genomic RNA
tggaggcctcggaag

SEQ ID NO: 270 - RNA, 15 nt, Homo sapiens
  source 1..15: mol_type = genomic RNA
ggaggcctcggaaga

SEQ ID NO: 271 - RNA, 15 nt, Homo sapiens
  source 1..15: mol_type = genomic RNA
gaggcctcggaagag

SEQ ID NO: 272 - RNA, 15 nt, Homo sapiens
  source 1..15: mol_type = genomic RNA
aggcctcggaagagg

SEQ ID NO: 273 - RNA, 15 nt, Homo sapiens
  source 1..15: mol_type = genomic RNA
gcctcggaagaggcc

SEQ ID NO: 274 - RNA, 15 nt, Homo sapiens
  source 1..15: mol_type = genomic RNA
cctcggaagaggccg

SEQ ID NO: 275 - RNA, 15 nt, Homo sapiens
  source 1..15: mol_type = genomic RNA
ctcggaagaggccgc

SEQ ID NO: 276 - RNA, 15 nt, Homo sapiens
  source 1..15: mol_type = genomic RNA
tcggaagaggccgcc

SEQ ID NO: 277 - RNA, 15 nt, Homo sapiens
  source 1..15: mol_type = genomic RNA
cggaagaggccgcct

SEQ ID NO: 278 - RNA, 15 nt, Homo sapiens
  source 1..15: mol_type = genomic RNA
ggaagaggccgcctc

SEQ ID NO: 279 - RNA, 15 nt, Homo sapiens
  source 1..15: mol_type = genomic RNA
gaagaggccgcctcg

SEQ ID NO: 280 - RNA, 15 nt, Homo sapiens
  source 1..15: mol_type = genomic RNA
aagaggccgcctcgc

SEQ ID NO: 281 - RNA, 15 nt, Homo sapiens
  source 1..15: mol_type = genomic RNA
agaggccgcctcgct

SEQ ID NO: 282 - RNA, 15 nt, Homo sapiens
  source 1..15: mol_type = genomic RNA
gaggccgcctcgctg

SEQ ID NO: 283 - RNA, 15 nt, Homo sapiens
  source 1..15: mol_type = genomic RNA
aggccgcctcgctgg

SEQ ID NO: 284 - RNA, 15 nt, Homo sapiens
  source 1..15: mol_type = genomic RNA
ggccgcctcgctgga

SEQ ID NO: 285 - RNA, 15 nt, Homo sapiens
  source 1..15: mol_type = genomic RNA
gccgcctcgctggaa

SEQ ID NO: 286 - RNA, 15 nt, Homo sapiens
  source 1..15: mol_type = genomic RNA
ccgcctcgctggaag

SEQ ID NO: 287 - RNA, 15 nt, Homo sapiens
  source 1..15: mol_type = genomic RNA
cgcctcgctggaagc

SEQ ID NO: 288 - RNA, 15 nt, Homo sapiens
  source 1..15: mol_type = genomic RNA
gcctcgctggaagca

SEQ ID NO: 289 - RNA, 15 nt, Homo sapiens
  source 1..15: mol_type = genomic RNA
cctcgctggaagcac

SEQ ID NO: 290 - RNA, 15 nt, Homo sapiens
  source 1..15: mol_type = genomic RNA
ctcgctggaagcacc

SEQ ID NO: 291 - RNA, 15 nt, Homo sapiens
  source 1..15: mol_type = genomic RNA
tcgctggaagcaccc

SEQ ID NO: 292 - RNA, 15 nt, Homo sapiens
  source 1..15: mol_type = genomic RNA
cgctggaagcacccc

SEQ ID NO: 293 - RNA, 15 nt, Homo sapiens
  source 1..15: mol_type = genomic RNA
gctggaagcacccct

SEQ ID NO: 294 - RNA, 15 nt, Homo sapiens
  source 1..15: mol_type = genomic RNA
ctggaagcacccctc

SEQ ID NO: 295 - RNA, 15 nt, Homo sapiens
  source 1..15: mol_type = genomic RNA
tggaagcacccctca

SEQ ID NO: 296 - RNA, 15 nt, Homo sapiens
  source 1..15: mol_type = genomic RNA
ggaagcacccctcag

SEQ ID NO: 297 - RNA, 15 nt, Homo sapiens
  source 1..15: mol_type = genomic RNA
gaagcacccctcagc

SEQ ID NO: 298 - RNA, 15 nt, Homo sapiens
  source 1..15: mol_type = genomic RNA
aagcacccctcagcg

SEQ ID NO: 299 - RNA, 15 nt, Homo sapiens
  source 1..15: mol_type = genomic RNA
agcacccctcagcga

SEQ ID NO: 300 - RNA, 15 nt, Homo sapiens
  source 1..15: mol_type = genomic RNA
gcacccctcagcgag

SEQ ID NO: 301 - RNA, 15 nt, Homo sapiens
  source 1..15: mol_type = genomic RNA
cacccctcagcgagg

SEQ ID NO: 302 - RNA, 15 nt, Homo sapiens
  source 1..15: mol_type = genomic RNA
acccctcagcgagga

SEQ ID NO: 303 - RNA, 15 nt, Homo sapiens
  source 1..15: mol_type = genomic RNA
cccctcagcgaggaa

SEQ ID NO: 304 - RNA, 15 nt, Homo sapiens
  source 1..15: mol_type = genomic RNA
ccctcagcgaggaag

SEQ ID NO: 305 - RNA, 15 nt, Homo sapiens
  source 1..15: mol_type = genomic RNA
cctcagcgaggaaga

SEQ ID NO: 306 - RNA, 15 nt, Homo sapiens
  source 1..15: mol_type = genomic RNA
ctcagcgaggaagaa

SEQ ID NO: 307 - RNA, 15 nt, Homo sapiens
  source 1..15: mol_type = genomic RNA
tcagcgaggaagaat

SEQ ID NO: 308 - RNA, 15 nt, Homo sapiens
  source 1..15: mol_type = genomic RNA
cagcgaggaagaata

SEQ ID NO: 309 - RNA, 15 nt, Homo sapiens
  source 1..15: mol_type = genomic RNA
agcgaggaagaatac

SEQ ID NO: 310 - RNA, 15 nt, Homo sapiens
  source 1..15: mol_type = genomic RNA
gcgaggaagaatacc

SEQ ID NO: 311 - RNA, 15 nt, Homo sapiens
  source 1..15: mol_type = genomic RNA
cgaggaagaataccg

SEQ ID NO: 312 - RNA, 15 nt, Homo sapiens
  source 1..15: mol_type = genomic RNA
gaggaagaataccgg

SEQ ID NO: 313 - RNA, 15 nt, Homo sapiens
  source 1..15: mol_type = genomic RNA
aggaagaataccggg

SEQ ID NO: 314 - RNA, 15 nt, Homo sapiens
  source 1..15: mol_type = genomic RNA
ggaagaataccgggc

SEQ ID NO: 315 - RNA, 15 nt, Homo sapiens
  source 1..15: mol_type = genomic RNA
gaagaataccgggct

SEQ ID NO: 316 - RNA, 15 nt, Homo sapiens
  source 1..15: mol_type = genomic RNA
aagaataccgggctc

SEQ ID NO: 317 - RNA, 15 nt, Homo sapiens
  source 1..15: mol_type = genomic RNA
agaataccgggctct

SEQ ID NO: 318 - RNA, 15 nt, Homo sapiens
  source 1..15: mol_type = genomic RNA
gaataccgggctctg

SEQ ID NO: 319 - RNA, 15 nt, Homo sapiens
  source 1..15: mol_type = genomic RNA
aataccgggctctgc

SEQ ID NO: 320 - RNA, 15 nt, Homo sapiens
  source 1..15: mol_type = genomic RNA
ataccgggctctgct

SEQ ID NO: 321 - RNA, 15 nt, Homo sapiens
  source 1..15: mol_type = genomic RNA
taccgggctctgctg

SEQ ID NO: 322 - RNA, 15 nt, Homo sapiens
  source 1..15: mol_type = genomic RNA
accgggctctgctgg

SEQ ID NO: 323 - RNA, 15 nt, Homo sapiens
  source 1..15: mol_type = genomic RNA
ccgggctctgctgga

SEQ ID NO: 324 - RNA, 15 nt, Homo sapiens
  source 1..15: mol_type = genomic RNA
cgggctctgctggag

SEQ ID NO: 325 - RNA, 15 nt, Homo sapiens
  source 1..15: mol_type = genomic RNA
ggctctgctggagga

SEQ ID NO: 326 - RNA, 15 nt, Homo sapiens
  source 1..15: mol_type = genomic RNA
gctctgctggaggag

SEQ ID NO: 327 - RNA, 15 nt, Homo sapiens
  source 1..15: mol_type = genomic RNA
ctctgctggaggagc

SEQ ID NO: 328 - RNA, 15 nt, Homo sapiens
  source 1..15: mol_type = genomic RNA
tctgctggaggagct

SEQ ID NO: 329 - RNA, 15 nt, Homo sapiens
  source 1..15: mol_type = genomic RNA
ctgctggaggagctt

SEQ ID NO: 330 - RNA, 15 nt, Homo sapiens
  source 1..15: mol_type = genomic RNA
tgctggaggagcttt

SEQ ID NO: 331 - RNA, 15 nt, Homo sapiens
  source 1..15: mol_type = genomic RNA
gctggaggagcttta

SEQ ID NO: 332 - RNA, 15 nt, Homo sapiens
  source 1..15: mol_type = genomic RNA
ctggaggagctttag

SEQ ID NO: 333 - RNA, 15 nt, Homo sapiens
  source 1..15: mol_type = genomic RNA
tggaggagctttagg

SEQ ID NO: 334 - RNA, 15 nt, Homo sapiens
  source 1..15: mol_type = genomic RNA
ggaggagctttagga

SEQ ID NO: 335 - RNA, 15 nt, Homo sapiens
  source 1..15: mol_type = genomic RNA
gaggagctttaggac

SEQ ID NO: 336 - RNA, 15 nt, Homo sapiens
  source 1..15: mol_type = genomic RNA
aggagctttaggacg

SEQ ID NO: 337 - RNA, 15 nt, Homo sapiens
  source 1..15: mol_type = genomic RNA
ggagctttaggacgc

SEQ ID NO: 338 - RNA, 15 nt, Homo sapiens
  source 1..15: mol_type = genomic RNA
gagctttaggacgcg

SEQ ID NO: 339 - RNA, 15 nt, Homo sapiens
  source 1..15: mol_type = genomic RNA
agctttaggacgcgg

SEQ ID NO: 340 - RNA, 15 nt, Homo sapiens
  source 1..15: mol_type = genomic RNA
gctttaggacgcggg

SEQ ID NO: 341 - RNA, 15 nt, Homo sapiens
  source 1..15: mol_type = genomic RNA
ctttaggacgcgggg

SEQ ID NO: 342 - RNA, 15 nt, Homo sapiens
  source 1..15: mol_type = genomic RNA
tttaggacgcggggt

SEQ ID NO: 343 - RNA, 15 nt, Homo sapiens
  source 1..15: mol_type = genomic RNA
ttaggacgcggggtt

SEQ ID NO: 344 - RNA, 15 nt, Homo sapiens
  source 1..15: mol_type = genomic RNA
taggacgcggggttg

SEQ ID NO: 345 - RNA, 15 nt, Homo sapiens
  source 1..15: mol_type = genomic RNA
aggacgcggggttgg

SEQ ID NO: 346 - RNA, 15 nt, Homo sapiens
  source 1..15: mol_type = genomic RNA
gacgcggggttggga

SEQ ID NO: 347 - RNA, 15 nt, Homo sapiens
  source 1..15: mol_type = genomic RNA
acgcggggttgggac

SEQ ID NO: 348 - RNA, 15 nt, Homo sapiens
  source 1..15: mol_type = genomic RNA
cgcggggttgggacg

SEQ ID NO: 349 - RNA, 15 nt, Homo sapiens
  source 1..15: mol_type = genomic RNA
cggggttgggacggg

SEQ ID NO: 350 - RNA, 15 nt, Homo sapiens
  source 1..15: mol_type = genomic RNA
tcgggtggttcgggg

SEQ ID NO: 351 - RNA, 15 nt, Homo sapiens
  source 1..15: mol_type = genomic RNA
cgggtggttcggggc

SEQ ID NO: 352 - RNA, 15 nt, Homo sapiens
  source 1..15: mol_type = genomic RNA
gggtggttcggggca

SEQ ID NO: 353 - RNA, 15 nt, Homo sapiens
  source 1..15: mol_type = genomic RNA
ggtggttcggggcag

SEQ ID NO: 354 - RNA, 15 nt, Homo sapiens
  source 1..15: mol_type = genomic RNA
gtggttcggggcagg

SEQ ID NO: 355 - RNA, 15 nt, Homo sapiens
  source 1..15: mol_type = genomic RNA
tggttcggggcaggg

SEQ ID NO: 356 - RNA, 15 nt, Homo sapiens
  source 1..15: mol_type = genomic RNA
gttcggggcagggcg

SEQ ID NO: 357 - RNA, 15 nt, Homo sapiens
  source 1..15: mol_type = genomic RNA
ggcggtggcctctct

SEQ ID NO: 358 - RNA, 15 nt, Homo sapiens
  source 1..15: mol_type = genomic RNA
gcggtggcctctctt

SEQ ID NO: 359 - RNA, 15 nt, Homo sapiens
  source 1..15: mol_type = genomic RNA
cggtggcctctcttt

SEQ ID NO: 360 - RNA, 15 nt, Homo sapiens
  source 1..15: mol_type = genomic RNA
ggtggcctctctttc

SEQ ID NO: 361 - RNA, 15 nt, Homo sapiens
  source 1..15: mol_type = genomic RNA
tggcctctctttcgc

SEQ ID NO: 362 - RNA, 15 nt, Homo sapiens
  source 1..15: mol_type = genomic RNA
ggcctctctttcgcg

SEQ ID NO: 363 - RNA, 15 nt, Homo sapiens
  source 1..15: mol_type = genomic RNA
gcctctctttcgcgg

SEQ ID NO: 364 - RNA, 15 nt, Homo sapiens
  source 1..15: mol_type = genomic RNA
cctctctttcgcggg

SEQ ID NO: 365 - RNA, 15 nt, Homo sapiens
  source 1..15: mol_type = genomic RNA
ctctctttcgcgggg

SEQ ID NO: 366 - RNA, 15 nt, Homo sapiens
  source 1..15: mol_type = genomic RNA
tctctttcgcgggga

SEQ ID NO: 367 - RNA, 15 nt, Homo sapiens
  source 1..15: mol_type = genomic RNA
ctctttcgcggggaa

SEQ ID NO: 368 - RNA, 15 nt, Homo sapiens
  source 1..15: mol_type = genomic RNA
tctttcgcggggaac

SEQ ID NO: 369 - RNA, 15 nt, Homo sapiens
  source 1..15: mol_type = genomic RNA
ctttcgcggggaaca

SEQ ID NO: 370 - RNA, 15 nt, Homo sapiens
  source 1..15: mol_type = genomic RNA
tttcgcggggaacac

SEQ ID NO: 371 - RNA, 15 nt, Homo sapiens
  source 1..15: mol_type = genomic RNA
ttcgcggggaacacc

SEQ ID NO: 372 - RNA, 15 nt, Homo sapiens
  source 1..15: mol_type = genomic RNA
tcgcggggaacacct

SEQ ID NO: 373 - RNA, 15 nt, Homo sapiens
  source 1..15: mol_type = genomic RNA
cgcggggaacacctg

SEQ ID NO: 374 - RNA, 15 nt, Homo sapiens
  source 1..15: mol_type = genomic RNA
gggaacacctggctg

SEQ ID NO: 375 - RNA, 15 nt, Homo sapiens
  source 1..15: mol_type = genomic RNA
ggaacacctggctgg

SEQ ID NO: 376 - RNA, 15 nt, Homo sapiens
  source 1..15: mol_type = genomic RNA
gaacacctggctggc

SEQ ID NO: 377 - RNA, 15 nt, Homo sapiens
  source 1..15: mol_type = genomic RNA
aacacctggctggct

SEQ ID NO: 378 - RNA, 15 nt, Homo sapiens
  source 1..15: mol_type = genomic RNA
acacctggctggcta

SEQ ID NO: 379 - RNA, 15 nt, Homo sapiens
  source 1..15: mol_type = genomic RNA
cacctggctggctac

SEQ ID NO: 380 - RNA, 15 nt, Homo sapiens
  source 1..15: mol_type = genomic RNA
acctggctggctacg

SEQ ID NO: 381 - RNA, 15 nt, Homo sapiens
  source 1..15: mol_type = genomic RNA
cctggctggctacgg

SEQ ID NO: 382 - RNA, 15 nt, Homo sapiens
  source 1..15: mol_type = genomic RNA
ctggctggctacgga

SEQ ID NO: 383 - RNA, 15 nt, Homo sapiens
  source 1..15: mol_type = genomic RNA
tggctggctacggag

SEQ ID NO: 384 - RNA, 15 nt, Homo sapiens
  source 1..15: mol_type = genomic RNA
ctggctacggagggg

SEQ ID NO: 385 - RNA, 15 nt, Homo sapiens
  source 1..15: mol_type = genomic RNA
gctacggaggggcgt

SEQ ID NO: 386 - RNA, 15 nt, Homo sapiens
  source 1..15: mol_type = genomic RNA
ctacggaggggcgtg

SEQ ID NO: 387 - RNA, 15 nt, Homo sapiens
  source 1..15: mol_type = genomic RNA
tacggaggggcgtgt

SEQ ID NO: 388 - RNA, 15 nt, Homo sapiens
  source 1..15: mol_type = genomic RNA
acggaggggcgtgtc

SEQ ID NO: 389 - RNA, 15 nt, Homo sapiens
  source 1..15: mol_type = genomic RNA
cggaggggcgtgtct

SEQ ID NO: 390 - RNA, 15 nt, Homo sapiens
  source 1..15: mol_type = genomic RNA
ggaggggcgtgtctc

SEQ ID NO: 391 - RNA, 15 nt, Homo sapiens
  source 1..15: mol_type = genomic RNA
gaggggcgtgtctcc

SEQ ID NO: 392 - RNA, 15 nt, Homo sapiens
  source 1..15: mol_type = genomic RNA
aggggcgtgtctccg

SEQ ID NO: 393 - RNA, 15 nt, Homo sapiens
  source 1..15: mol_type = genomic RNA
ggggcgtgtctccgc

SEQ ID NO: 394 - RNA, 15 nt, Homo sapiens
  source 1..15: mol_type = genomic RNA
gggcgtgtctccgcc

SEQ ID NO: 395 - RNA, 15 nt, Homo sapiens
  source 1..15: mol_type = genomic RNA
ggcgtgtctccgccc

SEQ ID NO: 396 - RNA, 15 nt, Homo sapiens
  source 1..15: mol_type = genomic RNA
gcgtgtctccgcccc

SEQ ID NO: 397 - RNA, 15 nt, Homo sapiens
  source 1..15: mol_type = genomic RNA
cccctccaccgggct

SEQ ID NO: 398 - RNA, 15 nt, Homo sapiens
  source 1..15: mol_type = genomic RNA
ccctccaccgggctg

SEQ ID NO: 399 - RNA, 15 nt, Homo sapiens
  source 1..15: mol_type = genomic RNA
cctccaccgggctga

SEQ ID NO: 400 - RNA, 15 nt, Homo sapiens
  source 1..15: mol_type = genomic RNA
ctccaccgggctgac

SEQ ID NO: 401 - RNA, 15 nt, Homo sapiens
  source 1..15: mol_type = genomic RNA
tccaccgggctgacc

SEQ ID NO: 402 - RNA, 15 nt, Homo sapiens
  source 1..15: mol_type = genomic RNA
ccaccgggctgaccg

SEQ ID NO: 403 - RNA, 15 nt, Homo sapiens
  source 1..15: mol_type = genomic RNA
caccgggctgaccgg

SEQ ID NO: 404 - RNA, 15 nt, Homo sapiens
  source 1..15: mol_type = genomic RNA
ctgaccggcctggga

SEQ ID NO: 405 - RNA, 15 nt, Homo sapiens
  source 1..15: mol_type = genomic RNA
tgaccggcctgggat

SEQ ID NO: 406 - RNA, 15 nt, Homo sapiens
  source 1..15: mol_type = genomic RNA
gaccggcctgggatt

SEQ ID NO: 407 - RNA, 15 nt, Homo sapiens
  source 1..15: mol_type = genomic RNA
accggcctgggattc

SEQ ID NO: 408 - RNA, 15 nt, Homo sapiens
  source 1..15: mol_type = genomic RNA
ccggcctgggattcc

SEQ ID NO: 409 - RNA, 15 nt, Homo sapiens
  source 1..15: mol_type = genomic RNA
cggcctgggattcct

SEQ ID NO: 410 - RNA, 15 nt, Homo sapiens
  source 1..15: mol_type = genomic RNA
ggcctgggattcctg

SEQ ID NO: 411 - RNA, 15 nt, Homo sapiens
  source 1..15: mol_type = genomic RNA
gcctgggattcctgc

SEQ ID NO: 412 - RNA, 15 nt, Homo sapiens
  source 1..15: mol_type = genomic RNA
cctgggattcctgcc

SEQ ID NO: 413 - RNA, 15 nt, Homo sapiens
  source 1..15: mol_type = genomic RNA
ctgggattcctgcct

SEQ ID NO: 414 - RNA, 15 nt, Homo sapiens
  source 1..15: mol_type = genomic RNA
tgggattcctgcctt

SEQ ID NO: 415 - RNA, 15 nt, Homo sapiens
  source 1..15: mol_type = genomic RNA
gggattcctgccttc

SEQ ID NO: 416 - RNA, 15 nt, Homo sapiens
  source 1..15: mol_type = genomic RNA
tcctgccttctaggt

SEQ ID NO: 417 - RNA, 15 nt, Homo sapiens
  source 1..15: mol_type = genomic RNA
cctgccttctaggtc

SEQ ID NO: 418 - RNA, 15 nt, Homo sapiens
  source 1..15: mol_type = genomic RNA
ggcccggtgagagac

SEQ ID NO: 419 - RNA, 15 nt, Homo sapiens
  source 1..15: mol_type = genomic RNA
gcccggtgagagact

SEQ ID NO: 420 - RNA, 15 nt, Homo sapiens
  source 1..15: mol_type = genomic RNA
cccggtgagagactc

SEQ ID NO: 421 - RNA, 15 nt, Homo sapiens
  source 1..15: mol_type = genomic RNA
ccggtgagagactcc

SEQ ID NO: 422 - RNA, 15 nt, Homo sapiens
  source 1..15: mol_type = genomic RNA
cggtgagagactcca

SEQ ID NO: 423 - RNA, 15 nt, Homo sapiens
  source 1..15: mol_type = genomic RNA
ggtgagagactccac

SEQ ID NO: 424 - RNA, 15 nt, Homo sapiens
  source 1..15: mol_type = genomic RNA
tctttcctgggcatc

SEQ ID NO: 425 - RNA, 15 nt, Homo sapiens
  source 1..15: mol_type = genomic RNA
ctttcctgggcatcc

SEQ ID NO: 426 - RNA, 15 nt, Homo sapiens
  source 1..15: mol_type = genomic RNA
tttcctgggcatccc

SEQ ID NO: 427 - RNA, 15 nt, Homo sapiens
  source 1..15: mol_type = genomic RNA
ttcctgggcatcccg

SEQ ID NO: 428 - RNA, 15 nt, Homo sapiens
  source 1..15: mol_type = genomic RNA
tcctgggcatcccgg

SEQ ID NO: 429 - RNA, 15 nt, Homo sapiens
  source 1..15: mol_type = genomic RNA
cctgggcatcccggg

SEQ ID NO: 430 - RNA, 15 nt, Homo sapiens
  source 1..15: mol_type = genomic RNA
ctgggcatcccgggg

SEQ ID NO: 431 - RNA, 15 nt, Homo sapiens
  source 1..15: mol_type = genomic RNA
gggcatcccggggat

SEQ ID NO: 432 - RNA, 15 nt, Homo sapiens
  source 1..15: mol_type = genomic RNA
ggcatcccggggatc

SEQ ID NO: 433 - RNA, 15 nt, Homo sapiens
  source 1..15: mol_type = genomic RNA
gcatcccggggatcc

SEQ ID NO: 434 - RNA, 15 nt, Homo sapiens
  source 1..15: mol_type = genomic RNA
catcccggggatccc

SEQ ID NO: 435 - RNA, 15 nt, Homo sapiens
  source 1..15: mol_type = genomic RNA
atcccggggatccca

SEQ ID NO: 436 - RNA, 15 nt, Homo sapiens
  source 1..15: mol_type = genomic RNA
tcccggggatcccag

SEQ ID NO: 437 - RNA, 15 nt, Homo sapiens
  source 1..15: mol_type = genomic RNA
cccggggatcccaga

SEQ ID NO: 438 - RNA, 15 nt, Homo sapiens
  source 1..15: mol_type = genomic RNA
ccggggatcccagag

SEQ ID NO: 439 - RNA, 15 nt, Homo sapiens
  source 1..15: mol_type = genomic RNA
cggggatcccagagc

SEQ ID NO: 440 - RNA, 15 nt, Homo sapiens
  source 1..15: mol_type = genomic RNA
gggatcccagagccg

SEQ ID NO: 441 - RNA, 15 nt, Homo sapiens
  source 1..15: mol_type = genomic RNA
ggatcccagagccgg

SEQ ID NO: 442 - RNA, 15 nt, Homo sapiens
  source 1..15: mol_type = genomic RNA
gatcccagagccggc

SEQ ID NO: 443 - RNA, 15 nt, Homo sapiens
  source 1..15: mol_type = genomic RNA
atcccagagccggcc

SEQ ID NO: 444 - RNA, 15 nt, Homo sapiens
  source 1..15: mol_type = genomic RNA
cccagagccggccca

SEQ ID NO: 445 - RNA, 15 nt, Homo sapiens
  source 1..15: mol_type = genomic RNA
ccagagccggcccag

SEQ ID NO: 446 - RNA, 15 nt, Homo sapiens
  source 1..15: mol_type = genomic RNA
gagccggcccaggta

SEQ ID NO: 447 - RNA, 15 nt, Homo sapiens
  source 1..15: mol_type = genomic RNA
agccggcccaggtac

SEQ ID NO: 448 - RNA, 15 nt, Homo sapiens
  source 1..15: mol_type = genomic RNA
ccggcccaggtacca

SEQ ID NO: 449 - RNA, 15 nt, Homo sapiens
  source 1..15: mol_type = genomic RNA
cggcccaggtaccag

SEQ ID NO: 450 - RNA, 15 nt, Homo sapiens
  source 1..15: mol_type = genomic RNA
ggcccaggtaccagc

SEQ ID NO: 451 - RNA, 15 nt, Homo sapiens
  source 1..15: mol_type = genomic RNA
gcccaggtaccagca

SEQ ID NO: 452 - RNA, 15 nt, Homo sapiens
  source 1..15: mol_type = genomic RNA
cccaggtaccagcag

SEQ ID NO: 453 - RNA, 15 nt, Homo sapiens
  source 1..15: mol_type = genomic RNA
cccctgcagcctccc

SEQ ID NO: 454 - RNA, 15 nt, Homo sapiens
  source 1..15: mol_type = genomic RNA
ccctgcagcctccca

SEQ ID NO: 455 - RNA, 15 nt, Homo sapiens
  source 1..15: mol_type = genomic RNA
cctgcagcctcccag

SEQ ID NO: 456 - RNA, 15 nt, Homo sapiens
  source 1..15: mol_type = genomic RNA
ctgcagcctcccagc

SEQ ID NO: 457 - RNA, 15 nt, Homo sapiens
  source 1..15: mol_type = genomic RNA
tgcagcctcccagct

SEQ ID NO: 458 - RNA, 15 nt, Homo sapiens
  source 1..15: mol_type = genomic RNA
gcagcctcccagctg

SEQ ID NO: 459 - RNA, 15 nt, Homo sapiens
  source 1..15: mol_type = genomic RNA
cagcctcccagctgc

SEQ ID NO: 460 - RNA, 15 nt, Homo sapiens
  source 1..15: mol_type = genomic RNA
agcctcccagctgcc

SEQ ID NO: 461 - RNA, 15 nt, Homo sapiens
  source 1..15: mol_type = genomic RNA
gcctcccagctgcca

SEQ ID NO: 462 - RNA, 15 nt, Homo sapiens
  source 1..15: mol_type = genomic RNA
cctcccagctgccag

SEQ ID NO: 463 - RNA, 15 nt, Homo sapiens
  source 1..15: mol_type = genomic RNA
ctcccagctgccagc

SEQ ID NO: 464 - RNA, 15 nt, Homo sapiens
  source 1..15: mol_type = genomic RNA
cctggcggtcaaaag

SEQ ID NO: 465 - RNA, 15 nt, Homo sapiens
  source 1..15: mol_type = genomic RNA
ctggcggtcaaaagc

SEQ ID NO: 466 - RNA, 15 nt, Homo sapiens
  source 1..15: mol_type = genomic RNA
tggcggtcaaaagca

SEQ ID NO: 467 - RNA, 15 nt, Homo sapiens
  source 1..15: mol_type = genomic RNA
ggcggtcaaaagcat

SEQ ID NO: 468 - RNA, 15 nt, Homo sapiens
  source 1..15: mol_type = genomic RNA
gcggtcaaaagcata

SEQ ID NO: 469 - RNA, 15 nt, Homo sapiens
  source 1..15: mol_type = genomic RNA
cggtcaaaagcatac

SEQ ID NO: 470 - RNA, 15 nt, Homo sapiens
  source 1..15: mol_type = genomic RNA
ggtcaaaagcatacc

SEQ ID NO: 471 - RNA, 15 nt, Homo sapiens
  source 1..15: mol_type = genomic RNA
aagcatacctctgtc

SEQ ID NO: 472 - RNA, 15 nt, Homo sapiens
  source 1..15: mol_type = genomic RNA
agcatacctctgtct

SEQ ID NO: 473 - RNA, 15 nt, Homo sapiens
  source 1..15: mol_type = genomic RNA
tctgtctttgcccgc

SEQ ID NO: 474 - RNA, 15 nt, Homo sapiens
  source 1..15: mol_type = genomic RNA
ctgtctttgcccgct

SEQ ID NO: 475 - RNA, 15 nt, Homo sapiens
  source 1..15: mol_type = genomic RNA
tctttgcccgcttcc

SEQ ID NO: 476 - RNA, 15 nt, Homo sapiens
  source 1..15: mol_type = genomic RNA
tttgcccgcttcctg

SEQ ID NO: 477 - RNA, 15 nt, Homo sapiens
  source 1..15: mol_type = genomic RNA
ttgcccgcttcctgg

SEQ ID NO: 478 - RNA, 15 nt, Homo sapiens
  source 1..15: mol_type = genomic RNA
tgcccgcttcctggc

SEQ ID NO: 479 - RNA, 15 nt, Homo sapiens
  source 1..15: mol_type = genomic RNA
gcccgcttcctggct

SEQ ID NO: 480 - RNA, 15 nt, Homo sapiens
  source 1..15: mol_type = genomic RNA
cccgcttcctggcta

SEQ ID NO: 481 - RNA, 15 nt, Homo sapiens
  source 1..15: mol_type = genomic RNA
ccgcttcctggctag

SEQ ID NO: 482 - RNA, 15 nt, Homo sapiens
  source 1..15: mol_type = genomic RNA
cgcttcctggctaga

SEQ ID NO: 483 - RNA, 15 nt, Homo sapiens
  source 1..15: mol_type = genomic RNA
gcttcctggctagac

SEQ ID NO: 484 - RNA, 15 nt, Homo sapiens
  source 1..15: mol_type = genomic RNA
cttcctggctagacc

SEQ ID NO: 485 - RNA, 15 nt, Homo sapiens
  source 1..15: mol_type = genomic RNA
ttcctggctagacct

SEQ ID NO: 486 - RNA, 15 nt, Homo sapiens
  source 1..15: mol_type = genomic RNA
tcctggctagacctg

SEQ ID NO: 487 - RNA, 15 nt, Homo sapiens
  source 1..15: mol_type = genomic RNA
cctggctagacctgc

SEQ ID NO: 488 - RNA, 15 nt, Homo sapiens
  source 1..15: mol_type = genomic RNA
ctggctagacctgcg

SEQ ID NO: 489 - RNA, 15 nt, Homo sapiens
  source 1..15: mol_type = genomic RNA
gcagtgcgcaccccg

SEQ ID NO: 490 - RNA, 15 nt, Homo sapiens
  source 1..15: mol_type = genomic RNA
cagtgcgcaccccgg

SEQ ID NO: 491 - RNA, 15 nt, Homo sapiens
  source 1..15: mol_type = genomic RNA
gtgcgcaccccggct

SEQ ID NO: 492 - RNA, 15 nt, Homo sapiens
  source 1..15: mol_type = genomic RNA
tgcgcaccccggctg

SEQ ID NO: 493 - RNA, 15 nt, Homo sapiens
  source 1..15: mol_type = genomic RNA
gcgcaccccggctga

SEQ ID NO: 494 - RNA, 15 nt, Homo sapiens
  source 1..15: mol_type = genomic RNA
cgcaccccggctgac

SEQ ID NO: 495 - RNA, 15 nt, Homo sapiens
  source 1..15: mol_type = genomic RNA
gcaccccggctgacg

SEQ ID NO: 496 - RNA, 15 nt, Homo sapiens
  source 1..15: mol_type = genomic RNA
caccccggctgacgt

SEQ ID NO: 497 - RNA, 15 nt, Homo sapiens
  source 1..15: mol_type = genomic RNA
accccggctgacgtg

SEQ ID NO: 498 - RNA, 15 nt, Homo sapiens
  source 1..15: mol_type = genomic RNA
ccccggctgacgtgc

SEQ ID NO: 499 - RNA, 15 nt, Homo sapiens
  source 1..15: mol_type = genomic RNA
cccggctgacgtgca

SEQ ID NO: 500 - RNA, 15 nt, Homo sapiens
  source 1..15: mol_type = genomic RNA
ccggctgacgtgcaa

SEQ ID NO: 501 - RNA, 15 nt, Homo sapiens
  source 1..15: mol_type = genomic RNA
cggctgacgtgcaag

SEQ ID NO: 502 - RNA, 15 nt, Homo sapiens
  source 1..15: mol_type = genomic RNA
ggctgacgtgcaagg

SEQ ID NO: 503 - RNA, 15 nt, Homo sapiens
  source 1..15: mol_type = genomic RNA
gctgacgtgcaaggg

SEQ ID NO: 504 - RNA, 15 nt, Homo sapiens
  source 1..15: mol_type = genomic RNA
ctgacgtgcaaggga

SEQ ID NO: 505 - RNA, 15 nt, Homo sapiens
  source 1..15: mol_type = genomic RNA
tgacgtgcaagggag

SEQ ID NO: 506 - RNA, 15 nt, Homo sapiens
  source 1..15: mol_type = genomic RNA
gacgtgcaagggagc

SEQ ID NO: 507 - RNA, 15 nt, Homo sapiens
  source 1..15: mol_type = genomic RNA
acgtgcaagggagct

SEQ ID NO: 508 - RNA, 15 nt, Homo sapiens
  source 1..15: mol_type = genomic RNA
cgtgcaagggagctc

SEQ ID NO: 509 - RNA, 15 nt, Homo sapiens
  source 1..15: mol_type = genomic RNA
gtgcaagggagctcg

SEQ ID NO: 510 - RNA, 15 nt, Homo sapiens
  source 1..15: mol_type = genomic RNA
tgcaagggagctcgc

SEQ ID NO: 511 - RNA, 15 nt, Homo sapiens
  source 1..15: mol_type = genomic RNA
gcaagggagctcgct

SEQ ID NO: 512 - RNA, 15 nt, Homo sapiens
  source 1..15: mol_type = genomic RNA
caagggagctcgctg

SEQ ID NO: 513 - RNA, 15 nt, Homo sapiens
  source 1..15: mol_type = genomic RNA
aagggagctcgctgg

SEQ ID NO: 514 - RNA, 15 nt, Homo sapiens
  source 1..15: mol_type = genomic RNA
ggagctcgctggcct

SEQ ID NO: 515 - RNA, 15 nt, Homo sapiens
  source 1..15: mol_type = genomic RNA
gagctcgctggcctc

SEQ ID NO: 516 - RNA, 15 nt, Homo sapiens
  source 1..15: mol_type = genomic RNA
agctcgctggcctct

SEQ ID NO: 517 - RNA, 15 nt, Homo sapiens
  source 1..15: mol_type = genomic RNA
gctcgctggcctctc

SEQ ID NO: 518 - RNA, 15 nt, Homo sapiens
  source 1..15: mol_type = genomic RNA
ctcgctggcctctct

SEQ ID NO: 519 - RNA, 15 nt, Homo sapiens
  source 1..15: mol_type = genomic RNA
tcgctggcctctctg

SEQ ID NO: 520 - RNA, 15 nt, Homo sapiens
  source 1..15: mol_type = genomic RNA
cgctggcctctctgt

SEQ ID NO: 521 - RNA, 15 nt, Homo sapiens
  source 1..15: mol_type = genomic RNA
gctggcctctctgtg

SEQ ID NO: 522 - RNA, 15 nt, Homo sapiens
  source 1..15: mol_type = genomic RNA
ctggcctctctgtgc

SEQ ID NO: 523 - RNA, 15 nt, Homo sapiens
  source 1..15: mol_type = genomic RNA
tggcctctctgtgcc

SEQ ID NO: 524 - RNA, 15 nt, Homo sapiens
  source 1..15: mol_type = genomic RNA
ggcctctctgtgccc

SEQ ID NO: 525 - RNA, 15 nt, Homo sapiens
  source 1..15: mol_type = genomic RNA
gcctctctgtgccct

SEQ ID NO: 526 - RNA, 15 nt, Homo sapiens
  source 1..15: mol_type = genomic RNA
cctctctgtgccctt

SEQ ID NO: 527 - RNA, 15 nt, Homo sapiens
  source 1..15: mol_type = genomic RNA
ccgtgaaattctggc

SEQ ID NO: 528 - RNA, 15 nt, Homo sapiens
  source 1..15: mol_type = genomic RNA
tctggctgaatgtct

SEQ ID NO: 529 - RNA, 15 nt, Homo sapiens
  source 1..15: mol_type = genomic RNA
ctggctgaatgtctc

SEQ ID NO: 530 - RNA, 15 nt, Homo sapiens
  source 1..15: mol_type = genomic RNA
tggctgaatgtctcc

SEQ ID NO: 531 - RNA, 15 nt, Homo sapiens
  source 1..15: mol_type = genomic RNA
ggctgaatgtctccc

SEQ ID NO: 532 - RNA, 15 nt, Homo sapiens
  source 1..15: mol_type = genomic RNA
gctgaatgtctcccc

SEQ ID NO: 533 - RNA, 15 nt, Homo sapiens
  source 1..15: mol_type = genomic RNA
ctgaatgtctccccc

SEQ ID NO: 534 - RNA, 15 nt, Homo sapiens
  source 1..15: mol_type = genomic RNA
tgaatgtctcccccc

SEQ ID NO: 535 - RNA, 15 nt, Homo sapiens
  source 1..15: mol_type = genomic RNA
gaatgtctcccccca

SEQ ID NO: 536 - RNA, 15 nt, Homo sapiens
  source 1..15: mol_type = genomic RNA
aatgtctccccccac

SEQ ID NO: 537 - RNA, 15 nt, Homo sapiens
  source 1..15: mol_type = genomic RNA
atgtctccccccacc

SEQ ID NO: 538 - RNA, 15 nt, Homo sapiens
  source 1..15: mol_type = genomic RNA
tgtctccccccacct

SEQ ID NO: 539 - RNA, 15 nt, Homo sapiens
  source 1..15: mol_type = genomic RNA
gtctccccccacctt

SEQ ID NO: 540 - RNA, 15 nt, Homo sapiens
  source 1..15: mol_type = genomic RNA
tctccccccaccttc

SEQ ID NO: 541 - RNA, 15 nt, Homo sapiens
  source 1..15: mol_type = genomic RNA
ctccccccaccttcc

SEQ ID NO: 542 - RNA, 15 nt, Homo sapiens
  source 1..15: mol_type = genomic RNA
tccccccaccttccg

SEQ ID NO: 543 - RNA, 15 nt, Homo sapiens
  source 1..15: mol_type = genomic RNA
ccccccaccttccga

SEQ ID NO: 544 - RNA, 15 nt, Homo sapiens
  source 1..15: mol_type = genomic RNA
cccccaccttccgac

SEQ ID NO: 545 - RNA, 15 nt, Homo sapiens
  source 1..15: mol_type = genomic RNA
ccccaccttccgacg

SEQ ID NO: 546 - RNA, 15 nt, Homo sapiens
  source 1..15: mol_type = genomic RNA
cccaccttccgacgc

SEQ ID NO: 547 - RNA, 15 nt, Homo sapiens
  source 1..15: mol_type = genomic RNA
ccaccttccgacgct

SEQ ID NO: 548 - RNA, 15 nt, Homo sapiens
  source 1..15: mol_type = genomic RNA
caccttccgacgctg

SEQ ID NO: 549 - RNA, 15 nt, Homo sapiens
  source 1..15: mol_type = genomic RNA
accttccgacgctgt

SEQ ID NO: 550 - RNA, 15 nt, Homo sapiens
  source 1..15: mol_type = genomic RNA
ccttccgacgctgtc

SEQ ID NO: 551 - RNA, 15 nt, Homo sapiens
  source 1..15: mol_type = genomic RNA
cttccgacgctgtct

SEQ ID NO: 552 - RNA, 15 nt, Homo sapiens
  source 1..15: mol_type = genomic RNA
tccgacgctgtctag

SEQ ID NO: 553 - RNA, 15 nt, Homo sapiens
  source 1..15: mol_type = genomic RNA
ccgacgctgtctagg

SEQ ID NO: 554 - RNA, 15 nt, Homo sapiens
  source 1..15: mol_type = genomic RNA
cgacgctgtctaggc

SEQ ID NO: 555 - RNA, 15 nt, Homo sapiens
  source 1..15: mol_type = genomic RNA
gacgctgtctaggca

SEQ ID NO: 556 - RNA, 15 nt, Homo sapiens
  source 1..15: mol_type = genomic RNA
acgctgtctaggcaa

SEQ ID NO: 557 - RNA, 15 nt, Homo sapiens
  source 1..15: mol_type = genomic RNA
cgctgtctaggcaaa

SEQ ID NO: 558 - RNA, 15 nt, Homo sapiens
  source 1..15: mol_type = genomic RNA
gctgtctaggcaaac

SEQ ID NO: 559 - RNA, 15 nt, Homo sapiens
  source 1..15: mol_type = genomic RNA
ctgtctaggcaaacc

SEQ ID NO: 560 - RNA, 15 nt, Homo sapiens
  source 1..15: mol_type = genomic RNA
tgtctaggcaaacct

SEQ ID NO: 561 - RNA, 15 nt, Homo sapiens
  source 1..15: mol_type = genomic RNA
gtctaggcaaacctg

SEQ ID NO: 562 - RNA, 15 nt, Homo sapiens
  source 1..15: mol_type = genomic RNA
tctaggcaaacctgg

SEQ ID NO: 563 - RNA, 15 nt, Homo sapiens
  source 1..15: mol_type = genomic RNA
ctaggcaaacctgga

SEQ ID NO: 564 - RNA, 15 nt, Homo sapiens
  source 1..15: mol_type = genomic RNA
taggcaaacctggat

SEQ ID NO: 565 - RNA, 15 nt, Homo sapiens
  source 1..15: mol_type = genomic RNA
aggcaaacctggatt

SEQ ID NO: 566 - RNA, 15 nt, Homo sapiens
  source 1..15: mol_type = genomic RNA
ggcaaacctggatta

SEQ ID NO: 567 - RNA, 15 nt, Homo sapiens
  source 1..15: mol_type = genomic RNA
gcaaacctggattag

SEQ ID NO: 568 - RNA, 15 nt, Homo sapiens
  source 1..15: mol_type = genomic RNA
acatctcctggatga

SEQ ID NO: 569 - RNA, 15 nt, Homo sapiens
  source 1..15: mol_type = genomic RNA
aaaatgccccctccc

SEQ ID NO: 570 - RNA, 15 nt, Homo sapiens
  source 1..15: mol_type = genomic RNA
aaatgccccctccct

SEQ ID NO: 571 - RNA, 15 nt, Homo sapiens
  source 1..15: mol_type = genomic RNA
aatgccccctccctg

SEQ ID NO: 572 - RNA, 15 nt, Homo sapiens
  source 1..15: mol_type = genomic RNA
atgccccctccctgt

SEQ ID NO: 573 - RNA, 15 nt, Homo sapiens
  source 1..15: mol_type = genomic RNA
tgccccctccctgtg

SEQ ID NO: 574 - RNA, 15 nt, Homo sapiens
  source 1..15: mol_type = genomic RNA
gccccctccctgtgg

SEQ ID NO: 575 - RNA, 15 nt, Homo sapiens
  source 1..15: mol_type = genomic RNA
ccccctccctgtgga

SEQ ID NO: 576 - RNA, 15 nt, Homo sapiens
  source 1..15: mol_type = genomic RNA
cccctccctgtggat

SEQ ID NO: 577 - RNA, 15 nt, Homo sapiens
  source 1..15: mol_type = genomic RNA
ccctccctgtggatc

SEQ ID NO: 578 - RNA, 15 nt, Homo sapiens
  source 1..15: mol_type = genomic RNA
cctccctgtggatcc

SEQ ID NO: 579 - RNA, 15 nt, Homo sapiens
  source 1..15: mol_type = genomic RNA
ctccctgtggatcct

SEQ ID NO: 580 - RNA, 15 nt, Homo sapiens
  source 1..15: mol_type = genomic RNA
tccctgtggatccta

SEQ ID NO: 581 - RNA, 15 nt, Homo sapiens
  source 1..15: mol_type = genomic RNA
ccctgtggatcctat

SEQ ID NO: 582 - RNA, 15 nt, Homo sapiens
  source 1..15: mol_type = genomic RNA
tgtgtgatgagtgca

SEQ ID NO: 583 - RNA, 15 nt, Homo sapiens
  source 1..15: mol_type = genomic RNA
gtgtgatgagtgcag

SEQ ID NO: 584 - RNA, 15 nt, Homo sapiens
  source 1..15: mol_type = genomic RNA
tgtgatgagtgcaga

SEQ ID NO: 585 - RNA, 15 nt, Homo sapiens
  source 1..15: mol_type = genomic RNA
gtgatgagtgcagag

SEQ ID NO: 586 - RNA, 15 nt, Homo sapiens
  source 1..15: mol_type = genomic RNA
tgatgagtgcagaga

SEQ ID NO: 587 - RNA, 15 nt, Homo sapiens
  source 1..15: mol_type = genomic RNA
gatgagtgcagagat

SEQ ID NO: 588 - RNA, 15 nt, Homo sapiens
  source 1..15: mol_type = genomic RNA
atgagtgcagagata

SEQ ID NO: 589 - RNA, 15 nt, Homo sapiens
  source 1..15: mol_type = genomic RNA
tgagtgcagagatat

SEQ ID NO: 590 - RNA, 15 nt, Homo sapiens
  source 1..15: mol_type = genomic RNA
gagtgcagagatatg

SEQ ID NO: 591 - RNA, 15 nt, Homo sapiens
  source 1..15: mol_type = genomic RNA
gcagagatatgtcac

SEQ ID NO: 592 - RNA, 15 nt, Homo sapiens
  source 1..15: mol_type = genomic RNA
ccctgtagaaaaagc

SEQ ID NO: 593 - RNA, 15 nt, Homo sapiens
  source 1..15: mol_type = genomic RNA
cctgtagaaaaagcc

SEQ ID NO: 594 - RNA, 15 nt, Homo sapiens
  source 1..15: mol_type = genomic RNA
agaaaaagcctgaaa

SEQ ID NO: 595 - RNA, 15 nt, Homo sapiens
  source 1..15: mol_type = genomic RNA
ttcggtgatcagtgc

SEQ ID NO: 596 - RNA, 15 nt, Homo sapiens
  source 1..15: mol_type = genomic RNA
tcggtgatcagtgca

SEQ ID NO: 597 - RNA, 15 nt, Homo sapiens
  source 1..15: mol_type = genomic RNA
cggtgatcagtgcag

SEQ ID NO: 598 - RNA, 15 nt, Homo sapiens
  source 1..15: mol_type = genomic RNA
ggtgatcagtgcaga

SEQ ID NO: 599 - RNA, 15 nt, Homo sapiens
  source 1..15: mol_type = genomic RNA
tgatcagtgcagatg

SEQ ID NO: 600 - RNA, 15 nt, Homo sapiens
  source 1..15: mol_type = genomic RNA
tcagtgcagatgtgt

SEQ ID NO: 601 - RNA, 15 nt, Homo sapiens
  source 1..15: mol_type = genomic RNA
atagtagactgaacc

SEQ ID NO: 602 - RNA, 15 nt, Homo sapiens
  source 1..15: mol_type = genomic RNA
tagtagactgaacct

SEQ ID NO: 603 - RNA, 15 nt, Homo sapiens
  source 1..15: mol_type = genomic RNA
agtagactgaaccta

SEQ ID NO: 604 - RNA, 15 nt, Homo sapiens
  source 1..15: mol_type = genomic RNA
gtagactgaacctag

SEQ ID NO: 605 - RNA, 15 nt, Homo sapiens
  source 1..15: mol_type = genomic RNA
tagactgaacctaga

SEQ ID NO: 606 - RNA, 15 nt, Homo sapiens
  source 1..15: mol_type = genomic RNA
agactgaacctagag

SEQ ID NO: 607 - RNA, 15 nt, Homo sapiens
  source 1..15: mol_type = genomic RNA
gactgaacctagaga

SEQ ID NO: 608 - RNA, 15 nt, Homo sapiens
  source 1..15: mol_type = genomic RNA
actgaacctagagaa

SEQ ID NO: 609 - RNA, 15 nt, Homo sapiens
  source 1..15: mol_type = genomic RNA
tgaacctagagaatg

SEQ ID NO: 610 - RNA, 15 nt, Homo sapiens
  source 1..15: mol_type = genomic RNA
gaacctagagaatgg

SEQ ID NO: 611 - RNA, 15 nt, Homo sapiens
  source 1..15: mol_type = genomic RNA
aacctagagaatggt

SEQ ID NO: 612 - RNA, 15 nt, Homo sapiens
  source 1..15: mol_type = genomic RNA
aggtgatcagtgtag

SEQ ID NO: 613 - RNA, 15 nt, Homo sapiens
  source 1..15: mol_type = genomic RNA
tcgtgtagacagagc

SEQ ID NO: 614 - RNA, 15 nt, Homo sapiens
  source 1..15: mol_type = genomic RNA
cgtgtagacagagcc

SEQ ID NO: 615 - RNA, 15 nt, Homo sapiens
  source 1..15: mol_type = genomic RNA
gtgtagacagagcct

SEQ ID NO: 616 - RNA, 15 nt, Homo sapiens
  source 1..15: mol_type = genomic RNA
tgtagacagagccta

SEQ ID NO: 617 - RNA, 15 nt, Homo sapiens
  source 1..15: mol_type = genomic RNA
gtagacagagcctag

SEQ ID NO: 618 - RNA, 15 nt, Homo sapiens
  source 1..15: mol_type = genomic RNA
tagacagagcctaga

SEQ ID NO: 619 - RNA, 15 nt, Homo sapiens
  source 1..15: mol_type = genomic RNA
agacagagcctagac

SEQ ID NO: 620 - RNA, 15 nt, Homo sapiens
  source 1..15: mol_type = genomic RNA
gacagagcctagaca

SEQ ID NO: 621 - RNA, 15 nt, Homo sapiens
  source 1..15: mol_type = genomic RNA
acagagcctagacaa

SEQ ID NO: 622 - RNA, 15 nt, Homo sapiens
  source 1..15: mol_type = genomic RNA
cagagcctagacaat

SEQ ID NO: 623 - RNA, 15 nt, Homo sapiens
  source 1..15: mol_type = genomic RNA
agagcctagacaatt

SEQ ID NO: 624 - RNA, 15 nt, Homo sapiens
  source 1..15: mol_type = genomic RNA
cctagtgatcagtgc

SEQ ID NO: 625 - RNA, 15 nt, Homo sapiens
  source 1..15: mol_type = genomic RNA
agtgatcagtgcagg

SEQ ID NO: 626 - RNA, 15 nt, Homo sapiens
  source 1..15: mol_type = genomic RNA
gtgatcagtgcaggg

SEQ ID NO: 627 - RNA, 15 nt, Homo sapiens
  source 1..15: mol_type = genomic RNA
tgatcagtgcaggga

SEQ ID NO: 628 - RNA, 15 nt, Homo sapiens
  source 1..15: mol_type = genomic RNA
gatcagtgcagggat

SEQ ID NO: 629 - RNA, 15 nt, Homo sapiens
  source 1..15: mol_type = genomic RNA
atcagtgcagggata

SEQ ID NO: 630 - RNA, 15 nt, Homo sapiens
  source 1..15: mol_type = genomic RNA
tcagtgcagggataa

SEQ ID NO: 631 - RNA, 15 nt, Homo sapiens
  source 1..15: mol_type = genomic RNA
cagtgcagggataag

SEQ ID NO: 632 - RNA, 15 nt, Homo sapiens
  source 1..15: mol_type = genomic RNA
agtgcagggataagt

SEQ ID NO: 633 - RNA, 15 nt, Homo sapiens
  source 1..15: mol_type = genomic RNA
gtgcagggataagtc

SEQ ID NO: 634 - RNA, 15 nt, Homo sapiens
  source 1..15: mol_type = genomic RNA
tgcagggataagtca

SEQ ID NO: 635 - RNA, 15 nt, Homo sapiens
  source 1..15: mol_type = genomic RNA
gcagggataagtcat

SEQ ID NO: 636 - RNA, 15 nt, Homo sapiens
  source 1..15: mol_type = genomic RNA
agtcataaagcctcc

SEQ ID NO: 637 - RNA, 15 nt, Homo sapiens
  source 1..15: mol_type = genomic RNA
taaagcctcctgtag

SEQ ID NO: 638 - RNA, 15 nt, Homo sapiens
  source 1..15: mol_type = genomic RNA
aaagcctcctgtagg

SEQ ID NO: 639 - RNA, 15 nt, Homo sapiens
  source 1..15: mol_type = genomic RNA
aagcctcctgtaggc

SEQ ID NO: 640 - RNA, 15 nt, Homo sapiens
  source 1..15: mol_type = genomic RNA
agcctcctgtaggca

SEQ ID NO: 641 - RNA, 15 nt, Homo sapiens
  source 1..15: mol_type = genomic RNA
gcctcctgtaggcag

SEQ ID NO: 642 - RNA, 15 nt, Homo sapiens
  source 1..15: mol_type = genomic RNA
cctcctgtaggcaga

SEQ ID NO: 643 - RNA, 15 nt, Homo sapiens
  source 1..15: mol_type = genomic RNA
ctcctgtaggcagag

SEQ ID NO: 644 - RNA, 15 nt, Homo sapiens
  source 1..15: mol_type = genomic RNA
tcctgtaggcagagt

SEQ ID NO: 645 - RNA, 15 nt, Homo sapiens
  source 1..15: mol_type = genomic RNA
cctgtaggcagagtg

SEQ ID NO: 646 - RNA, 15 nt, Homo sapiens
  source 1..15: mol_type = genomic RNA
ctgtaggcagagtgt

SEQ ID NO: 647 - RNA, 15 nt, Homo sapiens
  source 1..15: mol_type = genomic RNA
tgtaggcagagtgta

SEQ ID NO: 648 - RNA, 15 nt, Homo sapiens
  source 1..15: mol_type = genomic RNA
gtaggcagagtgtag

SEQ ID NO: 649 - RNA, 15 nt, Homo sapiens
  source 1..15: mol_type = genomic RNA
taggcagagtgtagg

SEQ ID NO: 650 - RNA, 15 nt, Homo sapiens
  source 1..15: mol_type = genomic RNA
aggcagagtgtaggc

SEQ ID NO: 651 - RNA, 15 nt, Homo sapiens
  source 1..15: mol_type = genomic RNA
ggcagagtgtaggca

SEQ ID NO: 652 - RNA, 15 nt, Homo sapiens
  source 1..15: mol_type = genomic RNA
gcagagtgtaggcaa

SEQ ID NO: 653 - RNA, 15 nt, Homo sapiens
  source 1..15: mol_type = genomic RNA
cagagtgtaggcaag

SEQ ID NO: 654 - RNA, 15 nt, Homo sapiens
  source 1..15: mol_type = genomic RNA
agagtgtaggcaagt

SEQ ID NO: 655 - RNA, 15 nt, Homo sapiens
  source 1..15: mol_type = genomic RNA
gagtgtaggcaagtg

SEQ ID NO: 656 - RNA, 15 nt, Homo sapiens
  source 1..15: mol_type = genomic RNA
agtgtaggcaagtgt

SEQ ID NO: 657 - RNA, 15 nt, Homo sapiens
  source 1..15: mol_type = genomic RNA
gtaggcaagtgttcc

SEQ ID NO: 658 - RNA, 15 nt, Homo sapiens
  source 1..15: mol_type = genomic RNA
taggcaagtgttccc

SEQ ID NO: 659 - RNA, 15 nt, Homo sapiens
  source 1..15: mol_type = genomic RNA
aggcaagtgttccct

SEQ ID NO: 660 - RNA, 15 nt, Homo sapiens
  source 1..15: mol_type = genomic RNA
ggcaagtgttccctc

SEQ ID NO: 661 - RNA, 15 nt, Homo sapiens
  source 1..15: mol_type = genomic RNA
gcaagtgttccctcc

SEQ ID NO: 662 - RNA, 15 nt, Homo sapiens
  source 1..15: mol_type = genomic RNA
caagtgttccctccc

SEQ ID NO: 663 - RNA, 15 nt, Homo sapiens
  source 1..15: mol_type = genomic RNA
aagtgttccctccct

SEQ ID NO: 664 - RNA, 15 nt, Homo sapiens
  source 1..15: mol_type = genomic RNA
agtgttccctccctg

SEQ ID NO: 665 - RNA, 15 nt, Homo sapiens
  source 1..15: mol_type = genomic RNA
gtgttccctccctgg

SEQ ID NO: 666 - RNA, 15 nt, Homo sapiens
  source 1..15: mol_type = genomic RNA
tgttccctccctggg

SEQ ID NO: 667 - RNA, 15 nt, Homo sapiens
  source 1..15: mol_type = genomic RNA
gttccctccctgggc

SEQ ID NO: 668 - RNA, 15 nt, Homo sapiens
  source 1..15: mol_type = genomic RNA
ttccctccctgggct

SEQ ID NO: 669 - RNA, 15 nt, Homo sapiens
  source 1..15: mol_type = genomic RNA
tccctccctgggctg

SEQ ID NO: 670 - RNA, 15 nt, Homo sapiens
  source 1..15: mol_type = genomic RNA
ccctccctgggctga

SEQ ID NO: 671 - RNA, 15 nt, Homo sapiens
  source 1..15: mol_type = genomic RNA
cctccctgggctgat

SEQ ID NO: 672 - RNA, 15 nt, Homo sapiens
  source 1..15: mol_type = genomic RNA
ctccctgggctgatc

SEQ ID NO: 673 - RNA, 15 nt, Homo sapiens
  source 1..15: mol_type = genomic RNA
tccctgggctgatca

SEQ ID NO: 674 - RNA, 15 nt, Homo sapiens
  source 1..15: mol_type = genomic RNA
ccctgggctgatcag

SEQ ID NO: 675 - RNA, 15 nt, Homo sapiens
  source 1..15: mol_type = genomic RNA
cctgggctgatcagt

SEQ ID NO: 676 - RNA, 15 nt, Homo sapiens
  source 1..15: mol_type = genomic RNA
ctgggctgatcagtg

SEQ ID NO: 677 - RNA, 15 nt, Homo sapiens
  source 1..15: mol_type = genomic RNA
tgggctgatcagtgc

SEQ ID NO: 678 - RNA, 15 nt, Homo sapiens
  source 1..15: mol_type = genomic RNA
gggctgatcagtgca

SEQ ID NO: 679 - RNA, 15 nt, Homo sapiens
  source 1..15: mol_type = genomic RNA
ggctgatcagtgcag

SEQ ID NO: 680 - RNA, 15 nt, Homo sapiens
  source 1..15: mol_type = genomic RNA
gctgatcagtgcaga

SEQ ID NO: 681 - RNA, 15 nt, Homo sapiens
  source 1..15: mol_type = genomic RNA
ctgatcagtgcagag

SEQ ID NO: 682 - RNA, 15 nt, Homo sapiens
  source 1..15: mol_type = genomic RNA
tgatcagtgcagaga

SEQ ID NO: 683 - RNA, 15 nt, Homo sapiens
  source 1..15: mol_type = genomic RNA
gatcagtgcagagat

SEQ ID NO: 684 - RNA, 15 nt, Homo sapiens
  source 1..15: mol_type = genomic RNA
tatctcacaaagccc

SEQ ID NO: 685 - RNA, 15 nt, Homo sapiens
  source 1..15: mol_type = genomic RNA
atctcacaaagcccc

SEQ ID NO: 686 - RNA, 15 nt, Homo sapiens
  source 1..15: mol_type = genomic RNA
tctcacaaagcccct

SEQ ID NO: 687 - RNA, 15 nt, Homo sapiens
  source 1..15: mol_type = genomic RNA
ctcacaaagccccta

SEQ ID NO: 688 - RNA, 15 nt, Homo sapiens
  source 1..15: mol_type = genomic RNA
tcacaaagcccctat

SEQ ID NO: 689 - RNA, 15 nt, Homo sapiens
  source 1..15: mol_type = genomic RNA
cacaaagcccctata

SEQ ID NO: 690 - RNA, 15 nt, Homo sapiens
  source 1..15: mol_type = genomic RNA
acaaagcccctataa

SEQ ID NO: 691 - RNA, 15 nt, Homo sapiens
  source 1..15: mol_type = genomic RNA
aaagcccctataagc

SEQ ID NO: 692 - RNA, 15 nt, Homo sapiens
  source 1..15: mol_type = genomic RNA
aagcccctataagcc

SEQ ID NO: 693 - RNA, 15 nt, Homo sapiens
  source 1..15: mol_type = genomic RNA
agcccctataagcca

SEQ ID NO: 694 - RNA, 15 nt, Homo sapiens
  source 1..15: mol_type = genomic RNA
gcccctataagccaa

SEQ ID NO: 695 - RNA, 15 nt, Homo sapiens
  source 1..15: mol_type = genomic RNA
cccctataagccaaa

SEQ ID NO: 696 - RNA, 15 nt, Homo sapiens
  source 1..15: mol_type = genomic RNA
ccctataagccaaac

SEQ ID NO: 697 - RNA, 15 nt, Homo sapiens
  source 1..15: mol_type = genomic RNA
cctataagccaaacc

SEQ ID NO: 698 - RNA, 15 nt, Homo sapiens
  source 1..15: mol_type = genomic RNA
aagccaaaccttgac

SEQ ID NO: 699 - RNA, 15 nt, Homo sapiens
  source 1..15: mol_type = genomic RNA
agccaaaccttgaca

SEQ ID NO: 700 - RNA, 15 nt, Homo sapiens
  source 1..15: mol_type = genomic RNA
gccaaaccttgacaa

SEQ ID NO: 701 - RNA, 15 nt, Homo sapiens
  source 1..15: mol_type = genomic RNA
caaaccttgacaagg

SEQ ID NO: 702 - RNA, 15 nt, Homo sapiens
  source 1..15: mol_type = genomic RNA
aaaccttgacaaggg

SEQ ID NO: 703 - RNA, 15 nt, Homo sapiens
  source 1..15: mol_type = genomic RNA
aaccttgacaagggt

SEQ ID NO: 704 - RNA, 15 nt, Homo sapiens
  source 1..15: mol_type = genomic RNA
accttgacaagggtt

SEQ ID NO: 705 - RNA, 15 nt, Homo sapiens
  source 1..15: mol_type = genomic RNA
tgacaagggttacat

SEQ ID NO: 706 - RNA, 15 nt, Homo sapiens
  source 1..15: mol_type = genomic RNA
gacaagggttacatc

SEQ ID NO: 707 - RNA, 15 nt, Homo sapiens
  source 1..15: mol_type = genomic RNA
aagggttacatcacc

SEQ ID NO: 708 - RNA, 15 nt, Homo sapiens
  source 1..15: mol_type = genomic RNA
agggttacatcacct

SEQ ID NO: 709 - RNA, 15 nt, Homo sapiens
  source 1..15: mol_type = genomic RNA
gggttacatcacctg

SEQ ID NO: 710 - RNA, 15 nt, Homo sapiens
  source 1..15: mol_type = genomic RNA
tgtttgagcagtgga

SEQ ID NO: 711 - RNA, 15 nt, Homo sapiens
  source 1..15: mol_type = genomic RNA
ttgagcagtggaaat

SEQ ID NO: 712 - RNA, 15 nt, Homo sapiens
  source 1..15: mol_type = genomic RNA
tgagcagtggaaata

SEQ ID NO: 713 - RNA, 15 nt, Homo sapiens
  source 1..15: mol_type = genomic RNA
gagcagtggaaatat

SEQ ID NO: 714 - RNA, 15 nt, Homo sapiens
  source 1..15: mol_type = genomic RNA
atatcacaaagcccc

SEQ ID NO: 715 - RNA, 15 nt, Homo sapiens
  source 1..15: mol_type = genomic RNA
tatcacaaagccccc

SEQ ID NO: 716 - RNA, 15 nt, Homo sapiens
  source 1..15: mol_type = genomic RNA
atcacaaagccccct

SEQ ID NO: 717 - RNA, 15 nt, Homo sapiens
  source 1..15: mol_type = genomic RNA
tcacaaagccccctg

SEQ ID NO: 718 - RNA, 15 nt, Homo sapiens
  source 1..15: mol_type = genomic RNA
cacaaagccccctgt

SEQ ID NO: 719 - RNA, 15 nt, Homo sapiens
  source 1..15: mol_type = genomic RNA
acaaagccccctgta

SEQ ID NO: 720 - RNA, 15 nt, Homo sapiens
  source 1..15: mol_type = genomic RNA
caaagccccctgtag

SEQ ID NO: 721 - RNA, 15 nt, Homo sapiens
  source 1..15: mol_type = genomic RNA
aaagccccctgtaga

SEQ ID NO: 722 - RNA, 15 nt, Homo sapiens
  source 1..15: mol_type = genomic RNA
aagccccctgtagac

SEQ ID NO: 723 - RNA, 15 nt, Homo sapiens
  source 1..15: mol_type = genomic RNA
agccccctgtagaca

SEQ ID NO: 724 - RNA, 15 nt, Homo sapiens
  source 1..15: mol_type = genomic RNA
gccccctgtagacaa

SEQ ID NO: 725 - RNA, 15 nt, Homo sapiens
  source 1..15: mol_type = genomic RNA
ccccctgtagacaaa

SEQ ID NO: 726 - RNA, 15 nt, Homo sapiens
  source 1..15: mol_type = genomic RNA
cccctgtagacaaag

SEQ ID NO: 727 - RNA, 15 nt, Homo sapiens
  source 1..15: mol_type = genomic RNA
ccctgtagacaaagc

SEQ ID NO: 728 - RNA, 15 nt, Homo sapiens
  source 1..15: mol_type = genomic RNA
cctgtagacaaagcc

SEQ ID NO: 729 - RNA, 15 nt, Homo sapiens
  source 1..15: mol_type = genomic RNA
ctgtagacaaagccc

SEQ ID NO: 730 - RNA, 15 nt, Homo sapiens
  source 1..15: mol_type = genomic RNA
tgtagacaaagccca

SEQ ID NO: 731 - RNA, 15 nt, Homo sapiens
  source 1..15: mol_type = genomic RNA
gtagacaaagcccag

SEQ ID NO: 732 - RNA, 15 nt, Homo sapiens
  source 1..15: mol_type = genomic RNA
tagacaaagcccaga

SEQ ID NO: 733 - RNA, 15 nt, Homo sapiens
  source 1..15: mol_type = genomic RNA
agacaaagcccagac

SEQ ID NO: 734 - RNA, 15 nt, Homo sapiens
  source 1..15: mol_type = genomic RNA
gacaaagcccagaca

SEQ ID NO: 735 - RNA, 15 nt, Homo sapiens
  source 1..15: mol_type = genomic RNA
acaaagcccagacaa

SEQ ID NO: 736 - RNA, 15 nt, Homo sapiens
  source 1..15: mol_type = genomic RNA
caaagcccagacaat

SEQ ID NO: 737 - RNA, 15 nt, Homo sapiens
  source 1..15: mol_type = genomic RNA
aaagcccagacaatt

SEQ ID NO: 738 - RNA, 15 nt, Homo sapiens
  source 1..15: mol_type = genomic RNA
acatctcctgagtga

SEQ ID NO: 739 - RNA, 15 nt, Homo sapiens
  source 1..15: mol_type = genomic RNA
atctcctgagtgagc

SEQ ID NO: 740 - RNA, 15 nt, Homo sapiens
  source 1..15: mol_type = genomic RNA
tctcctgagtgagca

SEQ ID NO: 741 - RNA, 15 nt, Homo sapiens
  source 1..15: mol_type = genomic RNA
ctcctgagtgagcat

SEQ ID NO: 742 - RNA, 15 nt, Homo sapiens
  source 1..15: mol_type = genomic RNA
tcctgagtgagcatt

SEQ ID NO: 743 - RNA, 15 nt, Homo sapiens
  source 1..15: mol_type = genomic RNA
cctgagtgagcattg

SEQ ID NO: 744 - RNA, 15 nt, Homo sapiens
  source 1..15: mol_type = genomic RNA
ctgagtgagcattgg

SEQ ID NO: 745 - RNA, 15 nt, Homo sapiens
  source 1..15: mol_type = genomic RNA
tgagtgagcattgga

SEQ ID NO: 746 - RNA, 15 nt, Homo sapiens
  source 1..15: mol_type = genomic RNA
gagtgagcattggag

SEQ ID NO: 747 - RNA, 15 nt, Homo sapiens
  source 1..15: mol_type = genomic RNA
agtgagcattggaga

SEQ ID NO: 748 - RNA, 15 nt, Homo sapiens
  source 1..15: mol_type = genomic RNA
gtgagcattggagag

SEQ ID NO: 749 - RNA, 15 nt, Homo sapiens
  source 1..15: mol_type = genomic RNA
tgagcattggagaga

SEQ ID NO: 750 - RNA, 15 nt, Homo sapiens
  source 1..15: mol_type = genomic RNA
gagcattggagagat

SEQ ID NO: 751 - RNA, 15 nt, Homo sapiens
  source 1..15: mol_type = genomic RNA
agcattggagagatc

SEQ ID NO: 752 - RNA, 15 nt, Homo sapiens
  source 1..15: mol_type = genomic RNA
gcattggagagatct

SEQ ID NO: 753 - RNA, 15 nt, Homo sapiens
  source 1..15: mol_type = genomic RNA
ttggagagatctgtc

SEQ ID NO: 754 - RNA, 15 nt, Homo sapiens
  source 1..15: mol_type = genomic RNA
tggagagatctgtca

SEQ ID NO: 755 - RNA, 15 nt, Homo sapiens
  source 1..15: mol_type = genomic RNA
ggagagatctgtcac

SEQ ID NO: 756 - RNA, 15 nt, Homo sapiens
  source 1..15: mol_type = genomic RNA
atctgtcacaatgcc

SEQ ID NO: 757 - RNA, 15 nt, Homo sapiens
  source 1..15: mol_type = genomic RNA
tctgtcacaatgccc

SEQ ID NO: 758 - RNA, 15 nt, Homo sapiens
  source 1..15: mol_type = genomic RNA
ctgtcacaatgcccc

SEQ ID NO: 759 - RNA, 15 nt, Homo sapiens
  source 1..15: mol_type = genomic RNA
tgtcacaatgcccct

SEQ ID NO: 760 - RNA, 15 nt, Homo sapiens
  source 1..15: mol_type = genomic RNA
gtcacaatgcccctg

SEQ ID NO: 761 - RNA, 15 nt, Homo sapiens
  source 1..15: mol_type = genomic RNA
tcacaatgcccctgt

SEQ ID NO: 762 - RNA, 15 nt, Homo sapiens
  source 1..15: mol_type = genomic RNA
cacaatgcccctgta

SEQ ID NO: 763 - RNA, 15 nt, Homo sapiens
  source 1..15: mol_type = genomic RNA
acaatgcccctgtag

SEQ ID NO: 764 - RNA, 15 nt, Homo sapiens
  source 1..15: mol_type = genomic RNA
caatgcccctgtagg

SEQ ID NO: 765 - RNA, 15 nt, Homo sapiens
  source 1..15: mol_type = genomic RNA
aatgcccctgtaggc

SEQ ID NO: 766 - RNA, 15 nt, Homo sapiens
  source 1..15: mol_type = genomic RNA
atgcccctgtaggca

SEQ ID NO: 767 - RNA, 15 nt, Homo sapiens
  source 1..15: mol_type = genomic RNA
tgcccctgtaggcag

SEQ ID NO: 768 - RNA, 15 nt, Homo sapiens
  source 1..15: mol_type = genomic RNA
gcccctgtaggcaga

SEQ ID NO: 769 - RNA, 15 nt, Homo sapiens
  source 1..15: mol_type = genomic RNA
cccctgtaggcagag

SEQ ID NO: 770 - RNA, 15 nt, Homo sapiens
  source 1..15: mol_type = genomic RNA
ccctgtaggcagagc

SEQ ID NO: 771 - RNA, 15 nt, Homo sapiens
  source 1..15: mol_type = genomic RNA
cctgtaggcagagct

SEQ ID NO: 772 - RNA, 15 nt, Homo sapiens
  source 1..15: mol_type = genomic RNA
ctgtaggcagagctt

SEQ ID NO: 773 - RNA, 15 nt, Homo sapiens
  source 1..15: mol_type = genomic RNA
tgtaggcagagctta

SEQ ID NO: 774 - RNA, 15 nt, Homo sapiens
  source 1..15: mol_type = genomic RNA
gtaggcagagcttag

SEQ ID NO: 775 - RNA, 15 nt, Homo sapiens
  source 1..15: mol_type = genomic RNA
taggcagagcttaga

SEQ ID NO: 776 - RNA, 15 nt, Homo sapiens
  source 1..15: mol_type = genomic RNA
aggcagagcttagac

SEQ ID NO: 777 - RNA, 15 nt, Homo sapiens
  source 1..15: mol_type = genomic RNA
ggcagagcttagaca

SEQ ID NO: 778 - RNA, 15 nt, Homo sapiens
  source 1..15: mol_type = genomic RNA
gcagagcttagacaa

SEQ ID NO: 779 - RNA, 15 nt, Homo sapiens
  source 1..15: mol_type = genomic RNA
gttacatcacctggg

SEQ ID NO: 780 - RNA, 15 nt, Homo sapiens
  source 1..15: mol_type = genomic RNA
ttacatcacctgggt

SEQ ID NO: 781 - RNA, 15 nt, Homo sapiens
  source 1..15: mol_type = genomic RNA
tacatcacctgggtg

SEQ ID NO: 782 - RNA, 15 nt, Homo sapiens
  source 1..15: mol_type = genomic RNA
acatcacctgggtga

SEQ ID NO: 783 - RNA, 15 nt, Homo sapiens
  source 1..15: mol_type = genomic RNA
catcacctgggtgat

SEQ ID NO: 784 - RNA, 15 nt, Homo sapiens
  source 1..15: mol_type = genomic RNA
atcacctgggtgatc

SEQ ID NO: 785 - RNA, 15 nt, Homo sapiens
  source 1..15: mol_type = genomic RNA
tcacctgggtgatca

SEQ ID NO: 786 - RNA, 15 nt, Homo sapiens
  source 1..15: mol_type = genomic RNA
cacctgggtgatcag

SEQ ID NO: 787 - RNA, 15 nt, Homo sapiens
  source 1..15: mol_type = genomic RNA
acctgggtgatcagt

SEQ ID NO: 788 - RNA, 15 nt, Homo sapiens
  source 1..15: mol_type = genomic RNA
cctgggtgatcagtg

SEQ ID NO: 789 - RNA, 15 nt, Homo sapiens
  source 1..15: mol_type = genomic RNA
ctgggtgatcagtgc

SEQ ID NO: 790 - RNA, 15 nt, Homo sapiens
  source 1..15: mol_type = genomic RNA
tgggtgatcagtgca

SEQ ID NO: 791 - RNA, 15 nt, Homo sapiens
  source 1..15: mol_type = genomic RNA
gggtgatcagtgcag

SEQ ID NO: 792 - RNA, 15 nt, Homo sapiens
  source 1..15: mol_type = genomic RNA
gtgatcagtgcagag

SEQ ID NO: 793 - RNA, 15 nt, Homo sapiens
  source 1..15: mol_type = genomic RNA
atcagtgcagagatg

SEQ ID NO: 794 - RNA, 15 nt, Homo sapiens
  source 1..15: mol_type = genomic RNA
tcagtgcagagatgt

SEQ ID NO: 795 - RNA, 15 nt, Homo sapiens
  source 1..15: mol_type = genomic RNA
cagtgcagagatgtg

SEQ ID NO: 796 - RNA, 15 nt, Homo sapiens
  source 1..15: mol_type = genomic RNA
agtgcagagatgtgt

SEQ ID NO: 797 - RNA, 15 nt, Homo sapiens
  source 1..15: mol_type = genomic RNA
gtgcagagatgtgtc

SEQ ID NO: 798 - RNA, 15 nt, Homo sapiens
  source 1..15: mol_type = genomic RNA
tgcagagatgtgtca

SEQ ID NO: 799 - RNA, 15 nt, Homo sapiens
  source 1..15: mol_type = genomic RNA
tgtcaaaacgctcct

SEQ ID NO: 800 - RNA, 15 nt, Homo sapiens
  source 1..15: mol_type = genomic RNA
gtcaaaacgctcctg

SEQ ID NO: 801 - RNA, 15 nt, Homo sapiens
  source 1..15: mol_type = genomic RNA
tcaaaacgctcctgt

SEQ ID NO: 802 - RNA, 15 nt, Homo sapiens
  source 1..15: mol_type = genomic RNA
aaaacgctcctgtag

SEQ ID NO: 803 - RNA, 15 nt, Homo sapiens
  source 1..15: mol_type = genomic RNA
aaacgctcctgtagt

SEQ ID NO: 804 - RNA, 15 nt, Homo sapiens
  source 1..15: mol_type = genomic RNA
aacgctcctgtagtc

SEQ ID NO: 805 - RNA, 15 nt, Homo sapiens
  source 1..15: mol_type = genomic RNA
acgctcctgtagtct

SEQ ID NO: 806 - RNA, 15 nt, Homo sapiens
  source 1..15: mol_type = genomic RNA
cgctcctgtagtctg

SEQ ID NO: 807 - RNA, 15 nt, Homo sapiens
  source 1..15: mol_type = genomic RNA
gctcctgtagtctga

SEQ ID NO: 808 - RNA, 15 nt, Homo sapiens
  source 1..15: mol_type = genomic RNA
cctgtagtctgaacc

SEQ ID NO: 809 - RNA, 15 nt, Homo sapiens
  source 1..15: mol_type = genomic RNA
agtctgaacctagac

SEQ ID NO: 810 - RNA, 15 nt, Homo sapiens
  source 1..15: mol_type = genomic RNA
gtctgaacctagaca

SEQ ID NO: 811 - RNA, 15 nt, Homo sapiens
  source 1..15: mol_type = genomic RNA
tctgaacctagacag

SEQ ID NO: 812 - RNA, 15 nt, Homo sapiens
  source 1..15: mol_type = genomic RNA
ctgaacctagacagg

SEQ ID NO: 813 - RNA, 15 nt, Homo sapiens
  source 1..15: mol_type = genomic RNA
tgaacctagacagga

SEQ ID NO: 814 - RNA, 15 nt, Homo sapiens
  source 1..15: mol_type = genomic RNA
gaacctagacaggag

SEQ ID NO: 815 - RNA, 15 nt, Homo sapiens
  source 1..15: mol_type = genomic RNA
aacctagacaggagt

SEQ ID NO: 816 - RNA, 15 nt, Homo sapiens
  source 1..15: mol_type = genomic RNA
acctagacaggagtt

SEQ ID NO: 817 - RNA, 15 nt, Homo sapiens
  source 1..15: mol_type = genomic RNA
ctagacaggagttac

SEQ ID NO: 818 - RNA, 15 nt, Homo sapiens
  source 1..15: mol_type = genomic RNA
agacaggagttacat

SEQ ID NO: 819 - RNA, 15 nt, Homo sapiens
  source 1..15: mol_type = genomic RNA
aggagttacatcacc

SEQ ID NO: 820 - RNA, 15 nt, Homo sapiens
  source 1..15: mol_type = genomic RNA
tacatcaccttgggg

SEQ ID NO: 821 - RNA, 15 nt, Homo sapiens
  source 1..15: mol_type = genomic RNA
acatcaccttgggga

SEQ ID NO: 822 - RNA, 15 nt, Homo sapiens
  source 1..15: mol_type = genomic RNA
catcaccttggggat

SEQ ID NO: 823 - RNA, 15 nt, Homo sapiens
  source 1..15: mol_type = genomic RNA
atcaccttggggatc

SEQ ID NO: 824 - RNA, 15 nt, Homo sapiens
  source 1..15: mol_type = genomic RNA
tcaccttggggatca

SEQ ID NO: 825 - RNA, 15 nt, Homo sapiens
  source 1..15: mol_type = genomic RNA
caccttggggatcag

SEQ ID NO: 826 - RNA, 15 nt, Homo sapiens
  source 1..15: mol_type = genomic RNA
accttggggatcagt

SEQ ID NO: 827 - RNA, 15 nt, Homo sapiens
  source 1..15: mol_type = genomic RNA
ccttggggatcagtg

SEQ ID NO: 828 - RNA, 15 nt, Homo sapiens
  source 1..15: mol_type = genomic RNA
cttggggatcagtgc

SEQ ID NO: 829 - RNA, 15 nt, Homo sapiens
  source 1..15: mol_type = genomic RNA
ttggggatcagtgca

SEQ ID NO: 830 - RNA, 15 nt, Homo sapiens
  source 1..15: mol_type = genomic RNA
tggggatcagtgcag

SEQ ID NO: 831 - RNA, 15 nt, Homo sapiens
  source 1..15: mol_type = genomic RNA
ggggatcagtgcaga

SEQ ID NO: 832 - RNA, 15 nt, Homo sapiens
  source 1..15: mol_type = genomic RNA
gggatcagtgcagag

SEQ ID NO: 833 - RNA, 15 nt, Homo sapiens
  source 1..15: mol_type = genomic RNA
ggatcagtgcagaga

SEQ ID NO: 834 - RNA, 15 nt, Homo sapiens
  source 1..15: mol_type = genomic RNA
tcagtgcagagatac

SEQ ID NO: 835 - RNA, 15 nt, Homo sapiens
  source 1..15: mol_type = genomic RNA
cagtgcagagatacg

SEQ ID NO: 836 - RNA, 15 nt, Homo sapiens
  source 1..15: mol_type = genomic RNA
agtgcagagatacgt

SEQ ID NO: 837 - RNA, 15 nt, Homo sapiens
  source 1..15: mol_type = genomic RNA
gtgcagagatacgtg

SEQ ID NO: 838 - RNA, 15 nt, Homo sapiens
  source 1..15: mol_type = genomic RNA
tgcagagatacgtga

SEQ ID NO: 839 - RNA, 15 nt, Homo sapiens
  source 1..15: mol_type = genomic RNA
gcagagatacgtgag

SEQ ID NO: 840 - RNA, 15 nt, Homo sapiens
  source 1..15: mol_type = genomic RNA
cagagatacgtgaga

SEQ ID NO: 841 - RNA, 15 nt, Homo sapiens
  source 1..15: mol_type = genomic RNA
agagatacgtgagaa

SEQ ID NO: 842 - RNA, 15 nt, Homo sapiens
  source 1..15: mol_type = genomic RNA
ttcccttgtaggcag

SEQ ID NO: 843 - RNA, 15 nt, Homo sapiens
  source 1..15: mol_type = genomic RNA
tcccttgtaggcagg

SEQ ID NO: 844 - RNA, 15 nt, Homo sapiens
  source 1..15: mol_type = genomic RNA
cccttgtaggcaggg

SEQ ID NO: 845 - RNA, 15 nt, Homo sapiens
  source 1..15: mol_type = genomic RNA
ccttgtaggcagggc

SEQ ID NO: 846 - RNA, 15 nt, Homo sapiens
  source 1..15: mol_type = genomic RNA
cttgtaggcagggcc

SEQ ID NO: 847 - RNA, 15 nt, Homo sapiens
  source 1..15: mol_type = genomic RNA
ttgtaggcagggcct

SEQ ID NO: 848 - RNA, 15 nt, Homo sapiens
  source 1..15: mol_type = genomic RNA
tgtaggcagggccta

SEQ ID NO: 849 - RNA, 15 nt, Homo sapiens
  source 1..15: mol_type = genomic RNA
gtaggcagggcctag

SEQ ID NO: 850 - RNA, 15 nt, Homo sapiens
  source 1..15: mol_type = genomic RNA
taggcagggcctaga

SEQ ID NO: 851 - RNA, 15 nt, Homo sapiens
  source 1..15: mol_type = genomic RNA
ggcagggcctagaca

SEQ ID NO: 852 - RNA, 15 nt, Homo sapiens
  source 1..15: mol_type = genomic RNA
gcagggcctagacaa

SEQ ID NO: 853 - RNA, 15 nt, Homo sapiens
  source 1..15: mol_type = genomic RNA
cagggcctagacaag

SEQ ID NO: 854 - RNA, 15 nt, Homo sapiens
  source 1..15: mol_type = genomic RNA
agggcctagacaagt

SEQ ID NO: 855 - RNA, 15 nt, Homo sapiens
  source 1..15: mol_type = genomic RNA
gggcctagacaagtg

SEQ ID NO: 856 - RNA, 15 nt, Homo sapiens
  source 1..15: mol_type = genomic RNA
ggcctagacaagtgt

SEQ ID NO: 857 - RNA, 15 nt, Homo sapiens
  source 1..15: mol_type = genomic RNA
gcagagatatgtgag

SEQ ID NO: 858 - RNA, 15 nt, Homo sapiens
  source 1..15: mol_type = genomic RNA
aattcccgtgtaggc

SEQ ID NO: 859 - RNA, 15 nt, Homo sapiens
  source 1..15: mol_type = genomic RNA
attcccgtgtaggca

SEQ ID NO: 860 - RNA, 15 nt, Homo sapiens
  source 1..15: mol_type = genomic RNA
ttcccgtgtaggcag

SEQ ID NO: 861 - RNA, 15 nt, Homo sapiens
  source 1..15: mol_type = genomic RNA
tcccgtgtaggcaga

SEQ ID NO: 862 - RNA, 15 nt, Homo sapiens
  source 1..15: mol_type = genomic RNA
cccgtgtaggcagag

SEQ ID NO: 863 - RNA, 15 nt, Homo sapiens
  source 1..15: mol_type = genomic RNA
ccgtgtaggcagagc

SEQ ID NO: 864 - RNA, 15 nt, Homo sapiens
  source 1..15: mol_type = genomic RNA
cgtgtaggcagagcc

SEQ ID NO: 865 - RNA, 15 nt, Homo sapiens
  source 1..15: mol_type = genomic RNA
gtgtaggcagagcct

SEQ ID NO: 866 - RNA, 15 nt, Homo sapiens
  source 1..15: mol_type = genomic RNA
tgtaggcagagccta

SEQ ID NO: 867 - RNA, 15 nt, Homo sapiens
  source 1..15: mol_type = genomic RNA
gtaggcagagcctag

SEQ ID NO: 868 - RNA, 15 nt, Homo sapiens
  source 1..15: mol_type = genomic RNA
taggcagagcctaga

SEQ ID NO: 869 - RNA, 15 nt, Homo sapiens
  source 1..15: mol_type = genomic RNA
aggcagagcctagac

SEQ ID NO: 870 - RNA, 15 nt, Homo sapiens
  source 1..15: mol_type = genomic RNA
ggcagagcctagaca

SEQ ID NO: 871 - RNA, 15 nt, Homo sapiens
  source 1..15: mol_type = genomic RNA
gcagagcctagacaa

SEQ ID NO: 872 - RNA, 15 nt, Homo sapiens
  source 1..15: mol_type = genomic RNA
cagagcctagacaag

SEQ ID NO: 873 - RNA, 15 nt, Homo sapiens
  source 1..15: mol_type = genomic RNA
agagcctagacaagt

SEQ ID NO: 874 - RNA, 15 nt, Homo sapiens
  source 1..15: mol_type = genomic RNA
gagcctagacaagtg

SEQ ID NO: 875 - RNA, 15 nt, Homo sapiens
  source 1..15: mol_type = genomic RNA
agcctagacaagtgt

SEQ ID NO: 876 - RNA, 15 nt, Homo sapiens
  source 1..15: mol_type = genomic RNA
tagacaagagttccc

SEQ ID NO: 877 - RNA, 15 nt, Homo sapiens
  source 1..15: mol_type = genomic RNA
agacaagagttccct

SEQ ID NO: 878 - RNA, 15 nt, Homo sapiens
  source 1..15: mol_type = genomic RNA
gacaagagttccctc

SEQ ID NO: 879 - RNA, 15 nt, Homo sapiens
  source 1..15: mol_type = genomic RNA
acaagagttccctcc

SEQ ID NO: 880 - RNA, 15 nt, Homo sapiens
  source 1..15: mol_type = genomic RNA
aagagttccctcctc

SEQ ID NO: 881 - RNA, 15 nt, Homo sapiens
  source 1..15: mol_type = genomic RNA
agagttccctcctca

SEQ ID NO: 882 - RNA, 15 nt, Homo sapiens
  source 1..15: mol_type = genomic RNA
gagttccctcctcag

SEQ ID NO: 883 - RNA, 15 nt, Homo sapiens
  source 1..15: mol_type = genomic RNA
agttccctcctcagg

SEQ ID NO: 884 - RNA, 15 nt, Homo sapiens
  source 1..15: mol_type = genomic RNA
gttccctcctcaggg

SEQ ID NO: 885 - RNA, 15 nt, Homo sapiens
  source 1..15: mol_type = genomic RNA
ttccctcctcagggt

SEQ ID NO: 886 - RNA, 15 nt, Homo sapiens
  source 1..15: mol_type = genomic RNA
tccctcctcagggtg

SEQ ID NO: 887 - RNA, 15 nt, Homo sapiens
  source 1..15: mol_type = genomic RNA
ccctcctcagggtga

SEQ ID NO: 888 - RNA, 15 nt, Homo sapiens
  source 1..15: mol_type = genomic RNA
cctcctcagggtgat

SEQ ID NO: 889 - RNA, 15 nt, Homo sapiens
  source 1..15: mol_type = genomic RNA
ctcctcagggtgatc

SEQ ID NO: 890 - RNA, 15 nt, Homo sapiens
  source 1..15: mol_type = genomic RNA
tcctcagggtgatca

SEQ ID NO: 891 - RNA, 15 nt, Homo sapiens
  source 1..15: mol_type = genomic RNA
cctcagggtgatcag

SEQ ID NO: 892 - RNA, 15 nt, Homo sapiens
  source 1..15: mol_type = genomic RNA
ctcagggtgatcagt

SEQ ID NO: 893 - RNA, 15 nt, Homo sapiens
  source 1..15: mol_type = genomic RNA
tcagggtgatcagtg

SEQ ID NO: 894 - RNA, 15 nt, Homo sapiens
  source 1..15: mol_type = genomic RNA
cagggtgatcagtgc

SEQ ID NO: 895 - RNA, 15 nt, Homo sapiens
  source 1..15: mol_type = genomic RNA
agggtgatcagtgca

SEQ ID NO: 896 - RNA, 15 nt, Homo sapiens
  source 1..15: mol_type = genomic RNA
gcagagatgtgtcac

SEQ ID NO: 897 - RNA, 15 nt, Homo sapiens
  source 1..15: mol_type = genomic RNA
atgtgtcacaaagcc

SEQ ID NO: 898 - RNA, 15 nt, Homo sapiens
  source 1..15: mol_type = genomic RNA
tgtgtcacaaagccc

SEQ ID NO: 899 - RNA, 15 nt, Homo sapiens
  source 1..15: mol_type = genomic RNA
gtgtcacaaagcccc

SEQ ID NO: 900 - RNA, 15 nt, Homo sapiens
  source 1..15: mol_type = genomic RNA
tgtcacaaagcccct

SEQ ID NO: 901 - RNA, 15 nt, Homo sapiens
  source 1..15: mol_type = genomic RNA
gtcacaaagcccctg

SEQ ID NO: 902 - RNA, 15 nt, Homo sapiens
  source 1..15: mol_type = genomic RNA
tcacaaagcccctgt

SEQ ID NO: 903 - RNA, 15 nt, Homo sapiens
  source 1..15: mol_type = genomic RNA
cacaaagcccctgta

SEQ ID NO: 904 - RNA, 15 nt, Homo sapiens
  source 1..15: mol_type = genomic RNA
acaaagcccctgtag

SEQ ID NO: 905 - RNA, 15 nt, Homo sapiens
  source 1..15: mol_type = genomic RNA
caaagcccctgtagg

SEQ ID NO: 906 - RNA, 15 nt, Homo sapiens
  source 1..15: mol_type = genomic RNA
aaagcccctgtaggc

SEQ ID NO: 907 - RNA, 15 nt, Homo sapiens
  source 1..15: mol_type = genomic RNA
aagcccctgtaggca

SEQ ID NO: 908 - RNA, 15 nt, Homo sapiens
  source 1..15: mol_type = genomic RNA
agcccctgtaggcag

SEQ ID NO: 909 - RNA, 15 nt, Homo sapiens
  source 1..15: mol_type = genomic RNA
cctgtaggcagagcc

SEQ ID NO: 910 - RNA, 15 nt, Homo sapiens
  source 1..15: mol_type = genomic RNA
ctgtaggcagagcct

SEQ ID NO: 911 - RNA, 15 nt, Homo sapiens
  source 1..15: mol_type = genomic RNA
agagcctagacaaga

SEQ ID NO: 912 - RNA, 15 nt, Homo sapiens
  source 1..15: mol_type = genomic RNA
gagcctagacaagag

SEQ ID NO: 913 - RNA, 15 nt, Homo sapiens
  source 1..15: mol_type = genomic RNA
agcctagacaagagt

SEQ ID NO: 914 - RNA, 15 nt, Homo sapiens
  source 1..15: mol_type = genomic RNA
gcctagacaagagtt

SEQ ID NO: 915 - RNA, 15 nt, Homo sapiens
  source 1..15: mol_type = genomic RNA
atgtgtcagaatgcc

SEQ ID NO: 916 - RNA, 15 nt, Homo sapiens
  source 1..15: mol_type = genomic RNA
tgtgtcagaatgccc

SEQ ID NO: 917 - RNA, 15 nt, Homo sapiens
  source 1..15: mol_type = genomic RNA
gtgtcagaatgccca

SEQ ID NO: 918 - RNA, 15 nt, Homo sapiens
  source 1..15: mol_type = genomic RNA
tgtcagaatgcccat

SEQ ID NO: 919 - RNA, 15 nt, Homo sapiens
  source 1..15: mol_type = genomic RNA
gtcagaatgcccatg

SEQ ID NO: 920 - RNA, 15 nt, Homo sapiens
  source 1..15: mol_type = genomic RNA
tcagaatgcccatgt

SEQ ID NO: 921 - RNA, 15 nt, Homo sapiens
  source 1..15: mol_type = genomic RNA
agaatgcccatgtag

SEQ ID NO: 922 - RNA, 15 nt, Homo sapiens
  source 1..15: mol_type = genomic RNA
gaatgcccatgtagg

SEQ ID NO: 923 - RNA, 15 nt, Homo sapiens
  source 1..15: mol_type = genomic RNA
aatgcccatgtaggc

SEQ ID NO: 924 - RNA, 15 nt, Homo sapiens
  source 1..15: mol_type = genomic RNA
atgcccatgtaggca

SEQ ID NO: 925 - RNA, 15 nt, Homo sapiens
  source 1..15: mol_type = genomic RNA
tgcccatgtaggcag

SEQ ID NO: 926 - RNA, 15 nt, Homo sapiens
  source 1..15: mol_type = genomic RNA
gcccatgtaggcaga

SEQ ID NO: 927 - RNA, 15 nt, Homo sapiens
  source 1..15: mol_type = genomic RNA
cccatgtaggcagat

SEQ ID NO: 928 - RNA, 15 nt, Homo sapiens
  source 1..15: mol_type = genomic RNA
ccatgtaggcagatc

SEQ ID NO: 929 - RNA, 15 nt, Homo sapiens
  source 1..15: mol_type = genomic RNA
catgtaggcagatct

SEQ ID NO: 930 - RNA, 15 nt, Homo sapiens
  source 1..15: mol_type = genomic RNA
gtaggcagatctaag

SEQ ID NO: 931 - RNA, 15 nt, Homo sapiens
  source 1..15: mol_type = genomic RNA
taggcagatctaaga

SEQ ID NO: 932 - RNA, 15 nt, Homo sapiens
  source 1..15: mol_type = genomic RNA
aggcagatctaagac

SEQ ID NO: 933 - RNA, 15 nt, Homo sapiens
  source 1..15: mol_type = genomic RNA
ggcagatctaagaca

SEQ ID NO: 934 - RNA, 15 nt, Homo sapiens
  source 1..15: mol_type = genomic RNA
agatctaagacaagc

SEQ ID NO: 935 - RNA, 15 nt, Homo sapiens
  source 1..15: mol_type = genomic RNA
gatctaagacaagcg

SEQ ID NO: 936 - RNA, 15 nt, Homo sapiens
  source 1..15: mol_type = genomic RNA
tctaagacaagcgtc

SEQ ID NO: 937 - RNA, 15 nt, Homo sapiens
  source 1..15: mol_type = genomic RNA
ctaagacaagcgtcc

SEQ ID NO: 938 - RNA, 15 nt, Homo sapiens
  source 1..15: mol_type = genomic RNA
taagacaagcgtcca

SEQ ID NO: 939 - RNA, 15 nt, Homo sapiens
  source 1..15: mol_type = genomic RNA
aagacaagcgtccat

SEQ ID NO: 940 - RNA, 15 nt, Homo sapiens
  source 1..15: mol_type = genomic RNA
agacaagcgtccatc

SEQ ID NO: 941 - RNA, 15 nt, Homo sapiens
  source 1..15: mol_type = genomic RNA
gacaagcgtccatca

SEQ ID NO: 942 - RNA, 15 nt, Homo sapiens
  source 1..15: mol_type = genomic RNA
acaagcgtccatcac

SEQ ID NO: 943 - RNA, 15 nt, Homo sapiens
  source 1..15: mol_type = genomic RNA
caagcgtccatcacc

SEQ ID NO: 944 - RNA, 15 nt, Homo sapiens
  source 1..15: mol_type = genomic RNA
aagcgtccatcacct

SEQ ID NO: 945 - RNA, 15 nt, Homo sapiens
  source 1..15: mol_type = genomic RNA
agcgtccatcacctg

SEQ ID NO: 946 - RNA, 15 nt, Homo sapiens
  source 1..15: mol_type = genomic RNA
gcgtccatcacctgg

SEQ ID NO: 947 - RNA, 15 nt, Homo sapiens
  source 1..15: mol_type = genomic RNA
cgtccatcacctggg

SEQ ID NO: 948 - RNA, 15 nt, Homo sapiens
  source 1..15: mol_type = genomic RNA
gtccatcacctgggt

SEQ ID NO: 949 - RNA, 15 nt, Homo sapiens
  source 1..15: mol_type = genomic RNA
tccatcacctgggtg

SEQ ID NO: 950 - RNA, 15 nt, Homo sapiens
  source 1..15: mol_type = genomic RNA
ccatcacctgggtga

SEQ ID NO: 951 - RNA, 15 nt, Homo sapiens
  source 1..15: mol_type = genomic RNA
gcagagatatgtacc

SEQ ID NO: 952 - RNA, 15 nt, Homo sapiens
  source 1..15: mol_type = genomic RNA
atgtaccagtgtccc

SEQ ID NO: 953 - RNA, 15 nt, Homo sapiens
  source 1..15: mol_type = genomic RNA
tgtaccagtgtcccc

SEQ ID NO: 954 - RNA, 15 nt, Homo sapiens
  source 1..15: mol_type = genomic RNA
gtaccagtgtcccct

SEQ ID NO: 955 - RNA, 15 nt, Homo sapiens
  source 1..15: mol_type = genomic RNA
taccagtgtcccctg

SEQ ID NO: 956 - RNA, 15 nt, Homo sapiens
  source 1..15: mol_type = genomic RNA
accagtgtcccctgt

SEQ ID NO: 957 - RNA, 15 nt, Homo sapiens
  source 1..15: mol_type = genomic RNA
ccagtgtcccctgta

SEQ ID NO: 958 - RNA, 15 nt, Homo sapiens
  source 1..15: mol_type = genomic RNA
cagtgtcccctgtag

SEQ ID NO: 959 - RNA, 15 nt, Homo sapiens
  source 1..15: mol_type = genomic RNA
agtgtcccctgtagg

SEQ ID NO: 960 - RNA, 15 nt, Homo sapiens
  source 1..15: mol_type = genomic RNA
gtgtcccctgtaggc

SEQ ID NO: 961 - RNA, 15 nt, Homo sapiens
  source 1..15: mol_type = genomic RNA
tgtcccctgtaggca

SEQ ID NO: 962 - RNA, 15 nt, Homo sapiens
  source 1..15: mol_type = genomic RNA
gtcccctgtaggcag

SEQ ID NO: 963 - RNA, 15 nt, Homo sapiens
  source 1..15: mol_type = genomic RNA
tcccctgtaggcagt

SEQ ID NO: 964 - RNA, 15 nt, Homo sapiens
  source 1..15: mol_type = genomic RNA
cccctgtaggcagtg

SEQ ID NO: 965 - RNA, 15 nt, Homo sapiens
  source 1..15: mol_type = genomic RNA
ccctgtaggcagtgc

SEQ ID NO: 966 - RNA, 15 nt, Homo sapiens
  source 1..15: mol_type = genomic RNA
cctgtaggcagtgcc

SEQ ID NO: 967 - RNA, 15 nt, Homo sapiens
  source 1..15: mol_type = genomic RNA
ctgtaggcagtgcct

SEQ ID NO: 968 - RNA, 15 nt, Homo sapiens
  source 1..15: mol_type = genomic RNA
tgtaggcagtgccta

SEQ ID NO: 969 - RNA, 15 nt, Homo sapiens
  source 1..15: mol_type = genomic RNA
gtaggcagtgcctag

SEQ ID NO: 970 - RNA, 15 nt, Homo sapiens
  source 1..15: mol_type = genomic RNA
taggcagtgcctaga

SEQ ID NO: 971 - RNA, 15 nt, Homo sapiens
  source 1..15: mol_type = genomic RNA
aggcagtgcctagac

SEQ ID NO: 972 - RNA, 15 nt, Homo sapiens
  source 1..15: mol_type = genomic RNA
ggcagtgcctagaca

SEQ ID NO: 973 - RNA, 15 nt, Homo sapiens
  source 1..15: mol_type = genomic RNA
gcagtgcctagacaa

SEQ ID NO: 974 - RNA, 15 nt, Homo sapiens
  source 1..15: mol_type = genomic RNA
cagtgcctagacaag

SEQ ID NO: 975 - RNA, 15 nt, Homo sapiens
  source 1..15: mol_type = genomic RNA
agtgcctagacaaga

SEQ ID NO: 976 - RNA, 15 nt, Homo sapiens
  source 1..15: mol_type = genomic RNA
gtgcctagacaagag

SEQ ID NO: 977 - RNA, 15 nt, Homo sapiens
  source 1..15: mol_type = genomic RNA
tgcctagacaagagt

SEQ ID NO: 978 - RNA, 15 nt, Homo sapiens
  source 1..15: mol_type = genomic RNA
tgaatcacctcagag

SEQ ID NO: 979 - RNA, 15 nt, Homo sapiens
  source 1..15: mol_type = genomic RNA
gaatcacctcagaga

SEQ ID NO: 980 - RNA, 15 nt, Homo sapiens
  source 1..15: mol_type = genomic RNA
atcacctcagagatc

SEQ ID NO: 981 - RNA, 15 nt, Homo sapiens
  source 1..15: mol_type = genomic RNA
tcacctcagagatca

SEQ ID NO: 982 - RNA, 15 nt, Homo sapiens
  source 1..15: mol_type = genomic RNA
cacctcagagatcag

SEQ ID NO: 983 - RNA, 15 nt, Homo sapiens
  source 1..15: mol_type = genomic RNA
acctcagagatcagt

SEQ ID NO: 984 - RNA, 15 nt, Homo sapiens
  source 1..15: mol_type = genomic RNA
ctcagagatcagtgc

SEQ ID NO: 985 - RNA, 15 nt, Homo sapiens
  source 1..15: mol_type = genomic RNA
tcagagatcagtgca

SEQ ID NO: 986 - RNA, 15 nt, Homo sapiens
  source 1..15: mol_type = genomic RNA
aaagccttctgtagg

SEQ ID NO: 987 - RNA, 15 nt, Homo sapiens
  source 1..15: mol_type = genomic RNA
aagccttctgtaggc

SEQ ID NO: 988 - RNA, 15 nt, Homo sapiens
  source 1..15: mol_type = genomic RNA
agccttctgtaggca

SEQ ID NO: 989 - RNA, 15 nt, Homo sapiens
  source 1..15: mol_type = genomic RNA
gccttctgtaggcaa

SEQ ID NO: 990 - RNA, 15 nt, Homo sapiens
  source 1..15: mol_type = genomic RNA
ttctgtaggcaaagc

SEQ ID NO: 991 - RNA, 15 nt, Homo sapiens
  source 1..15: mol_type = genomic RNA
tctgtaggcaaagcc

SEQ ID NO: 992 - RNA, 15 nt, Homo sapiens
  source 1..15: mol_type = genomic RNA
ctgtaggcaaagccc

SEQ ID NO: 993 - RNA, 15 nt, Homo sapiens
  source 1..15: mol_type = genomic RNA
tgtaggcaaagccca

SEQ ID NO: 994 - RNA, 15 nt, Homo sapiens
  source 1..15: mol_type = genomic RNA
gtaggcaaagcccat

SEQ ID NO: 995 - RNA, 15 nt, Homo sapiens
  source 1..15: mol_type = genomic RNA
taggcaaagcccata

SEQ ID NO: 996 - RNA, 15 nt, Homo sapiens
  source 1..15: mol_type = genomic RNA
aggcaaagcccatac

SEQ ID NO: 997 - RNA, 15 nt, Homo sapiens
  source 1..15: mol_type = genomic RNA
ggcaaagcccataca

SEQ ID NO: 998 - RNA, 15 nt, Homo sapiens
  source 1..15: mol_type = genomic RNA
gcaaagcccatacaa

SEQ ID NO: 999 - RNA, 15 nt, Homo sapiens
  source 1..15: mol_type = genomic RNA
caaagcccatacaag

SEQ ID NO: 1000 - RNA, 15 nt, Homo sapiens
  source 1..15: mol_type = genomic RNA
aaagcccatacaagg

SEQ ID NO: 1001 - RNA, 15 nt, Homo sapiens
  source 1..15: mol_type = genomic RNA
aagcccatacaaggt

SEQ ID NO: 1002 - RNA, 15 nt, Homo sapiens
  source 1..15: mol_type = genomic RNA
agcccatacaaggtt

SEQ ID NO: 1003 - RNA, 15 nt, Homo sapiens
  source 1..15: mol_type = genomic RNA
tagatcacctaggtg

SEQ ID NO: 1004 - RNA, 15 nt, Homo sapiens
  source 1..15: mol_type = genomic RNA
agatcacctaggtga

SEQ ID NO: 1005 - RNA, 15 nt, Homo sapiens
  source 1..15: mol_type = genomic RNA
gatcacctaggtgat

SEQ ID NO: 1006 - RNA, 15 nt, Homo sapiens
  source 1..15: mol_type = genomic RNA
atcacctaggtgatc

SEQ ID NO: 1007 - RNA, 15 nt, Homo sapiens
  source 1..15: mol_type = genomic RNA
tcacctaggtgatca

SEQ ID NO: 1008 - RNA, 15 nt, Homo sapiens
  source 1..15: mol_type = genomic RNA
cacctaggtgatcag

SEQ ID NO: 1009 - RNA, 15 nt, Homo sapiens
  source 1..15: mol_type = genomic RNA
acctaggtgatcagt

SEQ ID NO: 1010 - RNA, 15 nt, Homo sapiens
  source 1..15: mol_type = genomic RNA
cctaggtgatcagtg

SEQ ID NO: 1011 - RNA, 15 nt, Homo sapiens
  source 1..15: mol_type = genomic RNA
ctaggtgatcagtgc

SEQ ID NO: 1012 - RNA, 15 nt, Homo sapiens
  source 1..15: mol_type = genomic RNA
taggtgatcagtgca

SEQ ID NO: 1013 - RNA, 15 nt, Homo sapiens
  source 1..15: mol_type = genomic RNA
aggtgatcagtgcag

SEQ ID NO: 1014 - RNA, 15 nt, Homo sapiens
  source 1..15: mol_type = genomic RNA
ggtgatcagtgcagt

SEQ ID NO: 1015 - RNA, 15 nt, Homo sapiens
  source 1..15: mol_type = genomic RNA
gtgatcagtgcagtg

SEQ ID NO: 1016 - RNA, 15 nt, Homo sapiens
  source 1..15: mol_type = genomic RNA
tgatcagtgcagtga

SEQ ID NO: 1017 - RNA, 15 nt, Homo sapiens
  source 1..15: mol_type = genomic RNA
aatccctgtagacag

SEQ ID NO: 1018 - RNA, 15 nt, Homo sapiens
  source 1..15: mol_type = genomic RNA
atccctgtagacaga

SEQ ID NO: 1019 - RNA, 15 nt, Homo sapiens
  source 1..15: mol_type = genomic RNA
tccctgtagacagag

SEQ ID NO: 1020 - RNA, 15 nt, Homo sapiens
  source 1..15: mol_type = genomic RNA
ccctgtagacagagc

SEQ ID NO: 1021 - RNA, 15 nt, Homo sapiens
  source 1..15: mol_type = genomic RNA
cctgtagacagagcc

SEQ ID NO: 1022 - RNA, 15 nt, Homo sapiens
  source 1..15: mol_type = genomic RNA
ctgtagacagagcct

SEQ ID NO: 1023 - RNA, 15 nt, Homo sapiens
  source 1..15: mol_type = genomic RNA
gttacttcacctggg

SEQ ID NO: 1024 - RNA, 15 nt, Homo sapiens
  source 1..15: mol_type = genomic RNA
tacttcacctgggtg

SEQ ID NO: 1025 - RNA, 15 nt, Homo sapiens
  source 1..15: mol_type = genomic RNA
acttcacctgggtga

SEQ ID NO: 1026 - RNA, 15 nt, Homo sapiens
  source 1..15: mol_type = genomic RNA
cttcacctgggtgat

SEQ ID NO: 1027 - RNA, 15 nt, Homo sapiens
  source 1..15: mol_type = genomic RNA
ttcacctgggtgatc

SEQ ID NO: 1028 - RNA, 15 nt, Homo sapiens
  source 1..15: mol_type = genomic RNA
ttgacacaatgcccc

SEQ ID NO: 1029 - RNA, 15 nt, Homo sapiens
  source 1..15: mol_type = genomic RNA
tgacacaatgccccc

SEQ ID NO: 1030 - RNA, 15 nt, Homo sapiens
  source 1..15: mol_type = genomic RNA
gacacaatgccccca

SEQ ID NO: 1031 - RNA, 15 nt, Homo sapiens
  source 1..15: mol_type = genomic RNA
acacaatgcccccat

SEQ ID NO: 1032 - RNA, 15 nt, Homo sapiens
  source 1..15: mol_type = genomic RNA
cacaatgcccccata

SEQ ID NO: 1033 - RNA, 15 nt, Homo sapiens
  source 1..15: mol_type = genomic RNA
acaatgcccccatag

SEQ ID NO: 1034 - RNA, 15 nt, Homo sapiens
  source 1..15: mol_type = genomic RNA
caatgcccccataga

SEQ ID NO: 1035 - RNA, 15 nt, Homo sapiens
  source 1..15: mol_type = genomic RNA
aatgcccccatagac

SEQ ID NO: 1036 - RNA, 15 nt, Homo sapiens
  source 1..15: mol_type = genomic RNA
atgcccccatagaca

SEQ ID NO: 1037 - RNA, 15 nt, Homo sapiens
  source 1..15: mol_type = genomic RNA
tgcccccatagacag

SEQ ID NO: 1038 - RNA, 15 nt, Homo sapiens
  source 1..15: mol_type = genomic RNA
gcccccatagacaga

SEQ ID NO: 1039 - RNA, 15 nt, Homo sapiens
  source 1..15: mol_type = genomic RNA
cccccatagacagag

SEQ ID NO: 1040 - RNA, 15 nt, Homo sapiens
  source 1..15: mol_type = genomic RNA
ccccatagacagagc

SEQ ID NO: 1041 - RNA, 15 nt, Homo sapiens
  source 1..15: mol_type = genomic RNA
cccatagacagagcc

SEQ ID NO: 1042 - RNA, 15 nt, Homo sapiens
  source 1..15: mol_type = genomic RNA
ccatagacagagcct

SEQ ID NO: 1043 - RNA, 15 nt, Homo sapiens
  source 1..15: mol_type = genomic RNA
catagacagagccta

SEQ ID NO: 1044 - RNA, 15 nt, Homo sapiens
  source 1..15: mol_type = genomic RNA
atagacagagcctag

SEQ ID NO: 1045 - RNA, 15 nt, Homo sapiens
  source 1..15: mol_type = genomic RNA
tagacagagcctagg

SEQ ID NO: 1046 - RNA, 15 nt, Homo sapiens
  source 1..15: mol_type = genomic RNA
agacagagcctaggc

SEQ ID NO: 1047 - RNA, 15 nt, Homo sapiens
  source 1..15: mol_type = genomic RNA
gacagagcctaggca

SEQ ID NO: 1048 - RNA, 15 nt, Homo sapiens
  source 1..15: mol_type = genomic RNA
acagagcctaggcaa

SEQ ID NO: 1049 - RNA, 15 nt, Homo sapiens
  source 1..15: mol_type = genomic RNA
cagagcctaggcaag

SEQ ID NO: 1050 - RNA, 15 nt, Homo sapiens
  source 1..15: mol_type = genomic RNA
agagcctaggcaaga

SEQ ID NO: 1051 - RNA, 15 nt, Homo sapiens
  source 1..15: mol_type = genomic RNA
gagcctaggcaagac

SEQ ID NO: 1052 - RNA, 15 nt, Homo sapiens
  source 1..15: mol_type = genomic RNA
agcctaggcaagact

SEQ ID NO: 1053 - RNA, 15 nt, Homo sapiens
  source 1..15: mol_type = genomic RNA
gcctaggcaagactt

SEQ ID NO: 1054 - RNA, 15 nt, Homo sapiens
  source 1..15: mol_type = genomic RNA
cctaggcaagacttc

SEQ ID NO: 1055 - RNA, 15 nt, Homo sapiens
  source 1..15: mol_type = genomic RNA
ctaggcaagacttcc

SEQ ID NO: 1056 - RNA, 15 nt, Homo sapiens
  source 1..15: mol_type = genomic RNA
taggcaagacttcca

SEQ ID NO: 1057 - RNA, 15 nt, Homo sapiens
  source 1..15: mol_type = genomic RNA
aggcaagacttccat

SEQ ID NO: 1058 - RNA, 15 nt, Homo sapiens
  source 1..15: mol_type = genomic RNA
ggcaagacttccatc

SEQ ID NO: 1059 - RNA, 15 nt, Homo sapiens
  source 1..15: mol_type = genomic RNA
acttccatcacctgg

SEQ ID NO: 1060 - RNA, 15 nt, Homo sapiens
  source 1..15: mol_type = genomic RNA
cttccatcacctggg

SEQ ID NO: 1061 - RNA, 15 nt, Homo sapiens
  source 1..15: mol_type = genomic RNA
ttccatcacctgggt

SEQ ID NO: 1062 - RNA, 15 nt, Homo sapiens
  source 1..15: mol_type = genomic RNA
atgtcacaaatcccc

SEQ ID NO: 1063 - RNA, 15 nt, Homo sapiens
  source 1..15: mol_type = genomic RNA
tgtcacaaatccccc

SEQ ID NO: 1064 - RNA, 15 nt, Homo sapiens
  source 1..15: mol_type = genomic RNA
gtcacaaatccccct

SEQ ID NO: 1065 - RNA, 15 nt, Homo sapiens
  source 1..15: mol_type = genomic RNA
tcacaaatccccctc

SEQ ID NO: 1066 - RNA, 15 nt, Homo sapiens
  source 1..15: mol_type = genomic RNA
cacaaatccccctct

SEQ ID NO: 1067 - RNA, 15 nt, Homo sapiens
  source 1..15: mol_type = genomic RNA
acaaatccccctcta

SEQ ID NO: 1068 - RNA, 15 nt, Homo sapiens
  source 1..15: mol_type = genomic RNA
aaatccccctctagg

SEQ ID NO: 1069 - RNA, 15 nt, Homo sapiens
  source 1..15: mol_type = genomic RNA
aatccccctctaggc

SEQ ID NO: 1070 - RNA, 15 nt, Homo sapiens
  source 1..15: mol_type = genomic RNA
atccccctctaggca

SEQ ID NO: 1071 - RNA, 15 nt, Homo sapiens
  source 1..15: mol_type = genomic RNA
tccccctctaggcag

SEQ ID NO: 1072 - RNA, 15 nt, Homo sapiens
  source 1..15: mol_type = genomic RNA
ccccctctaggcaga

SEQ ID NO: 1073 - RNA, 15 nt, Homo sapiens
  source 1..15: mol_type = genomic RNA
cccctctaggcagag

SEQ ID NO: 1074 - RNA, 15 nt, Homo sapiens
  source 1..15: mol_type = genomic RNA
ccctctaggcagagt

SEQ ID NO: 1075 - RNA, 15 nt, Homo sapiens
  source 1..15: mol_type = genomic RNA
cctctaggcagagta

SEQ ID NO: 1076 - RNA, 15 nt, Homo sapiens
  source 1..15: mol_type = genomic RNA
ctctaggcagagtat

SEQ ID NO: 1077 - RNA, 15 nt, Homo sapiens
  source 1..15: mol_type = genomic RNA
ctaggcagagtatag

SEQ ID NO: 1078 - RNA, 15 nt, Homo sapiens
  source 1..15: mol_type = genomic RNA
taggcagagtataga

SEQ ID NO: 1079 - RNA, 15 nt, Homo sapiens
  source 1..15: mol_type = genomic RNA
aggcagagtatagag

SEQ ID NO: 1080 - RNA, 15 nt, Homo sapiens
  source 1..15: mol_type = genomic RNA
ggcagagtatagaga

SEQ ID NO: 1081 - RNA, 15 nt, Homo sapiens
  source 1..15: mol_type = genomic RNA
atagagaagagtccc

SEQ ID NO: 1082 - RNA, 15 nt, Homo sapiens
  source 1..15: mol_type = genomic RNA
tagagaagagtccca

SEQ ID NO: 1083 - RNA, 15 nt, Homo sapiens
  source 1..15: mol_type = genomic RNA
agagaagagtcccat

SEQ ID NO: 1084 - RNA, 15 nt, Homo sapiens
  source 1..15: mol_type = genomic RNA
gagaagagtcccatc

SEQ ID NO: 1085 - RNA, 15 nt, Homo sapiens
  source 1..15: mol_type = genomic RNA
agaagagtcccatca

SEQ ID NO: 1086 - RNA, 15 nt, Homo sapiens
  source 1..15: mol_type = genomic RNA
gaagagtcccatcac

SEQ ID NO: 1087 - RNA, 15 nt, Homo sapiens
  source 1..15: mol_type = genomic RNA
aagagtcccatcacc

SEQ ID NO: 1088 - RNA, 15 nt, Homo sapiens
  source 1..15: mol_type = genomic RNA
agagtcccatcacct

SEQ ID NO: 1089 - RNA, 15 nt, Homo sapiens
  source 1..15: mol_type = genomic RNA
gagtcccatcacctg

SEQ ID NO: 1090 - RNA, 15 nt, Homo sapiens
  source 1..15: mol_type = genomic RNA
agtcccatcacctgg

SEQ ID NO: 1091 - RNA, 15 nt, Homo sapiens
  source 1..15: mol_type = genomic RNA
gtcccatcacctggg

SEQ ID NO: 1092 - RNA, 15 nt, Homo sapiens
  source 1..15: mol_type = genomic RNA
tcccatcacctgggt

SEQ ID NO: 1093 - RNA, 15 nt, Homo sapiens
  source 1..15: mol_type = genomic RNA
cccatcacctgggtg

SEQ ID NO: 1094 - RNA, 15 nt, Homo sapiens
  source 1..15: mol_type = genomic RNA
tcacaatgtcccctg

SEQ ID NO: 1095 - RNA, 15 nt, Homo sapiens
  source 1..15: mol_type = genomic RNA
cacaatgtcccctgt

SEQ ID NO: 1096 - RNA, 15 nt, Homo sapiens
  source 1..15: mol_type = genomic RNA
aatgtcccctgtagg

SEQ ID NO: 1097 - RNA, 15 nt, Homo sapiens
  source 1..15: mol_type = genomic RNA
atgtcccctgtaggc

SEQ ID NO: 1098 - RNA, 15 nt, Homo sapiens
  source 1..15: mol_type = genomic RNA
tcccctgtaggcaga

SEQ ID NO: 1099 - RNA, 15 nt, Homo sapiens
  source 1..15: mol_type = genomic RNA
ccctgtaggcagaga

SEQ ID NO: 1100 - RNA, 15 nt, Homo sapiens
  source 1..15: mol_type = genomic RNA
cctgtaggcagagag

SEQ ID NO: 1101 - RNA, 15 nt, Homo sapiens
  source 1..15: mol_type = genomic RNA
ctgtaggcagagagt

SEQ ID NO: 1102 - RNA, 15 nt, Homo sapiens
  source 1..15: mol_type = genomic RNA
tgtaggcagagagtg

SEQ ID NO: 1103 - RNA, 15 nt, Homo sapiens
  source 1..15: mol_type = genomic RNA
gtaggcagagagtgg

SEQ ID NO: 1104 - RNA, 15 nt, Homo sapiens
  source 1..15: mol_type = genomic RNA
taggcagagagtgga

SEQ ID NO: 1105 - RNA, 15 nt, Homo sapiens
  source 1..15: mol_type = genomic RNA
aggcagagagtggac

SEQ ID NO: 1106 - RNA, 15 nt, Homo sapiens
  source 1..15: mol_type = genomic RNA
ggcagagagtggaca

SEQ ID NO: 1107 - RNA, 15 nt, Homo sapiens
  source 1..15: mol_type = genomic RNA
gcagagagtggacaa

SEQ ID NO: 1108 - RNA, 15 nt, Homo sapiens
  source 1..15: mol_type = genomic RNA
cagagagtggacaag

SEQ ID NO: 1109 - RNA, 15 nt, Homo sapiens
  source 1..15: mol_type = genomic RNA
agagagtggacaaga

SEQ ID NO: 1110 - RNA, 15 nt, Homo sapiens
  source 1..15: mol_type = genomic RNA
gagagtggacaagag

SEQ ID NO: 1111 - RNA, 15 nt, Homo sapiens
  source 1..15: mol_type = genomic RNA
agagtggacaagagt

SEQ ID NO: 1112 - RNA, 15 nt, Homo sapiens
  source 1..15: mol_type = genomic RNA
gagtggacaagagtt

SEQ ID NO: 1113 - RNA, 15 nt, Homo sapiens
  source 1..15: mol_type = genomic RNA
gtggacaagagttac

SEQ ID NO: 1114 - RNA, 15 nt, Homo sapiens
  source 1..15: mol_type = genomic RNA
tggacaagagttaca

SEQ ID NO: 1115 - RNA, 15 nt, Homo sapiens
  source 1..15: mol_type = genomic RNA
agatgatctgtgcag

SEQ ID NO: 1116 - RNA, 15 nt, Homo sapiens
  source 1..15: mol_type = genomic RNA
atgatctgtgcagag

SEQ ID NO: 1117 - RNA, 15 nt, Homo sapiens
  source 1..15: mol_type = genomic RNA
tgatctgtgcagagc

SEQ ID NO: 1118 - RNA, 15 nt, Homo sapiens
  source 1..15: mol_type = genomic RNA
gatctgtgcagagct

SEQ ID NO: 1119 - RNA, 15 nt, Homo sapiens
  source 1..15: mol_type = genomic RNA
atctgtgcagagcta

SEQ ID NO: 1120 - RNA, 15 nt, Homo sapiens
  source 1..15: mol_type = genomic RNA
tctgtgcagagctat

SEQ ID NO: 1121 - RNA, 15 nt, Homo sapiens
  source 1..15: mol_type = genomic RNA
ctgtgcagagctatg

SEQ ID NO: 1122 - RNA, 15 nt, Homo sapiens
  source 1..15: mol_type = genomic RNA
tgtgcagagctatgt

SEQ ID NO: 1123 - RNA, 15 nt, Homo sapiens
  source 1..15: mol_type = genomic RNA
gtgcagagctatgtc

SEQ ID NO: 1124 - RNA, 15 nt, Homo sapiens
  source 1..15: mol_type = genomic RNA
tgcagagctatgtca

SEQ ID NO: 1125 - RNA, 15 nt, Homo sapiens
  source 1..15: mol_type = genomic RNA
gcagagctatgtcaa

SEQ ID NO: 1126 - RNA, 15 nt, Homo sapiens
  source 1..15: mol_type = genomic RNA
tatgtcaaaacgccc

SEQ ID NO: 1127 - RNA, 15 nt, Homo sapiens
  source 1..15: mol_type = genomic RNA
atgtcaaaacgcccc

SEQ ID NO: 1128 - RNA, 15 nt, Homo sapiens
  source 1..15: mol_type = genomic RNA
tgtcaaaacgcccct

SEQ ID NO: 1129 - RNA, 15 nt, Homo sapiens
  source 1..15: mol_type = genomic RNA
gtcaaaacgcccctg

SEQ ID NO: 1130 - RNA, 15 nt, Homo sapiens
  source 1..15: mol_type = genomic RNA
tcaaaacgcccctgt

SEQ ID NO: 1131 - RNA, 15 nt, Homo sapiens
  source 1..15: mol_type = genomic RNA
caaaacgcccctgta

SEQ ID NO: 1132 - RNA, 15 nt, Homo sapiens
  source 1..15: mol_type = genomic RNA
aaaacgcccctgtag

SEQ ID NO: 1133 - RNA, 15 nt, Homo sapiens
  source 1..15: mol_type = genomic RNA
aaacgcccctgtagg

SEQ ID NO: 1134 - RNA, 15 nt, Homo sapiens
  source 1..15: mol_type = genomic RNA
aacgcccctgtaggc

SEQ ID NO: 1135 - RNA, 15 nt, Homo sapiens
  source 1..15: mol_type = genomic RNA
acgcccctgtaggca

SEQ ID NO: 1136 - RNA, 15 nt, Homo sapiens
  source 1..15: mol_type = genomic RNA
cgcccctgtaggcag

SEQ ID NO: 1137 - RNA, 15 nt, Homo sapiens
  source 1..15: mol_type = genomic RNA
aggcagagcctagat

SEQ ID NO: 1138 - RNA, 15 nt, Homo sapiens
  source 1..15: mol_type = genomic RNA
ggcagagcctagatg

SEQ ID NO: 1139 - RNA, 15 nt, Homo sapiens
  source 1..15: mol_type = genomic RNA
gcagagcctagatga

SEQ ID NO: 1140 - RNA, 15 nt, Homo sapiens
  source 1..15: mol_type = genomic RNA
cagagcctagatgag

SEQ ID NO: 1141 - RNA, 15 nt, Homo sapiens
  source 1..15: mol_type = genomic RNA
agagcctagatgagt

SEQ ID NO: 1142 - RNA, 15 nt, Homo sapiens
  source 1..15: mol_type = genomic RNA
gagcctagatgagtg

SEQ ID NO: 1143 - RNA, 15 nt, Homo sapiens
  source 1..15: mol_type = genomic RNA
agcctagatgagtgt

SEQ ID NO: 1144 - RNA, 15 nt, Homo sapiens
  source 1..15: mol_type = genomic RNA
cacctgggtgatcat

SEQ ID NO: 1145 - RNA, 15 nt, Homo sapiens
  source 1..15: mol_type = genomic RNA
acctgggtgatcatt

SEQ ID NO: 1146 - RNA, 15 nt, Homo sapiens
  source 1..15: mol_type = genomic RNA
cctgggtgatcattg

SEQ ID NO: 1147 - RNA, 15 nt, Homo sapiens
  source 1..15: mol_type = genomic RNA
ctgggtgatcattgc

SEQ ID NO: 1148 - RNA, 15 nt, Homo sapiens
  source 1..15: mol_type = genomic RNA
tgggtgatcattgca

SEQ ID NO: 1149 - RNA, 15 nt, Homo sapiens
  source 1..15: mol_type = genomic RNA
gggtgatcattgcag

SEQ ID NO: 1150 - RNA, 15 nt, Homo sapiens
  source 1..15: mol_type = genomic RNA
tgcagagatacgtca

SEQ ID NO: 1151 - RNA, 15 nt, Homo sapiens
  source 1..15: mol_type = genomic RNA
gcagagatacgtcac

SEQ ID NO: 1152 - RNA, 15 nt, Homo sapiens
  source 1..15: mol_type = genomic RNA
tacgtcacaataccc

SEQ ID NO: 1153 - RNA, 15 nt, Homo sapiens
  source 1..15: mol_type = genomic RNA
acgtcacaatacccc

SEQ ID NO: 1154 - RNA, 15 nt, Homo sapiens
  source 1..15: mol_type = genomic RNA
cgtcacaataccccc

SEQ ID NO: 1155 - RNA, 15 nt, Homo sapiens
  source 1..15: mol_type = genomic RNA
gtcacaataccccct

SEQ ID NO: 1156 - RNA, 15 nt, Homo sapiens
  source 1..15: mol_type = genomic RNA
tcacaataccccctg

SEQ ID NO: 1157 - RNA, 15 nt, Homo sapiens
  source 1..15: mol_type = genomic RNA
cacaataccccctgt

SEQ ID NO: 1158 - RNA, 15 nt, Homo sapiens
  source 1..15: mol_type = genomic RNA
acaataccccctgta

SEQ ID NO: 1159 - RNA, 15 nt, Homo sapiens
  source 1..15: mol_type = genomic RNA
caataccccctgtag

SEQ ID NO: 1160 - RNA, 15 nt, Homo sapiens
  source 1..15: mol_type = genomic RNA
aataccccctgtagg

SEQ ID NO: 1161 - RNA, 15 nt, Homo sapiens
  source 1..15: mol_type = genomic RNA
ataccccctgtaggt

SEQ ID NO: 1162 - RNA, 15 nt, Homo sapiens
  source 1..15: mol_type = genomic RNA
taccccctgtaggtg

SEQ ID NO: 1163 - RNA, 15 nt, Homo sapiens
  source 1..15: mol_type = genomic RNA
accccctgtaggtgg

SEQ ID NO: 1164 - RNA, 15 nt, Homo sapiens
  source 1..15: mol_type = genomic RNA
ccccctgtaggtggg

SEQ ID NO: 1165 - RNA, 15 nt, Homo sapiens
  source 1..15: mol_type = genomic RNA
cccctgtaggtgggg

SEQ ID NO: 1166 - RNA, 15 nt, Homo sapiens
  source 1..15: mol_type = genomic RNA
ccctgtaggtggggc

SEQ ID NO: 1167 - RNA, 15 nt, Homo sapiens
  source 1..15: mol_type = genomic RNA
cctgtaggtggggcc

SEQ ID NO: 1168 - RNA, 15 nt, Homo sapiens
  source 1..15: mol_type = genomic RNA
ctgtaggtggggcct

SEQ ID NO: 1169 - RNA, 15 nt, Homo sapiens
  source 1..15: mol_type = genomic RNA
tgtaggtggggccta

SEQ ID NO: 1170 - RNA, 15 nt, Homo sapiens
  source 1..15: mol_type = genomic RNA
gtaggtggggcctag

SEQ ID NO: 1171 - RNA, 15 nt, Homo sapiens
  source 1..15: mol_type = genomic RNA
taggtggggcctaga

SEQ ID NO: 1172 - RNA, 15 nt, Homo sapiens
  source 1..15: mol_type = genomic RNA
ggtggggcctagaca

SEQ ID NO: 1173 - RNA, 15 nt, Homo sapiens
  source 1..15: mol_type = genomic RNA
gtggggcctagacaa

SEQ ID NO: 1174 - RNA, 15 nt, Homo sapiens
  source 1..15: mol_type = genomic RNA
tggggcctagacaag

SEQ ID NO: 1175 - RNA, 15 nt, Homo sapiens
  source 1..15: mol_type = genomic RNA
ggggcctagacaaga

SEQ ID NO: 1176 - RNA, 15 nt, Homo sapiens
  source 1..15: mol_type = genomic RNA
gggcctagacaagag

SEQ ID NO: 1177 - RNA, 15 nt, Homo sapiens
  source 1..15: mol_type = genomic RNA
ggcctagacaagagt

SEQ ID NO: 1178 - RNA, 15 nt, Homo sapiens
  source 1..15: mol_type = genomic RNA
cctgggtgatcagta

SEQ ID NO: 1179 - RNA, 15 nt, Homo sapiens
  source 1..15: mol_type = genomic RNA
ctgggtgatcagtac

SEQ ID NO: 1180 - RNA, 15 nt, Homo sapiens
  source 1..15: mol_type = genomic RNA
tgggtgatcagtaca

SEQ ID NO: 1181 - RNA, 15 nt, Homo sapiens
  source 1..15: mol_type = genomic RNA
gggtgatcagtacag

SEQ ID NO: 1182 - RNA, 15 nt, Homo sapiens
  source 1..15: mol_type = genomic RNA
ggtgatcagtacaga

SEQ ID NO: 1183 - RNA, 15 nt, Homo sapiens
  source 1..15: mol_type = genomic RNA
tatgtcacaaagccc

SEQ ID NO: 1184 - RNA, 15 nt, Homo sapiens
  source 1..15: mol_type = genomic RNA
atgtcacaaagcccc

SEQ ID NO: 1185 - RNA, 15 nt, Homo sapiens
  source 1..15: mol_type = genomic RNA
tacatcacctgggtt

SEQ ID NO: 1186 - RNA, 15 nt, Homo sapiens
  source 1..15: mol_type = genomic RNA
acatcacctgggtta

SEQ ID NO: 1187 - RNA, 15 nt, Homo sapiens
  source 1..15: mol_type = genomic RNA
atcacctgggttatc

SEQ ID NO: 1188 - RNA, 15 nt, Homo sapiens
  source 1..15: mol_type = genomic RNA
tcacctgggttatca

SEQ ID NO: 1189 - RNA, 15 nt, Homo sapiens
  source 1..15: mol_type = genomic RNA
cacctgggttatcag

SEQ ID NO: 1190 - RNA, 15 nt, Homo sapiens
  source 1..15: mol_type = genomic RNA
acctgggttatcagt

SEQ ID NO: 1191 - RNA, 15 nt, Homo sapiens
  source 1..15: mol_type = genomic RNA
ctgggttatcagtgc

SEQ ID NO: 1192 - RNA, 15 nt, Homo sapiens
  source 1..15: mol_type = genomic RNA
tgggttatcagtgca

SEQ ID NO: 1193 - RNA, 15 nt, Homo sapiens
  source 1..15: mol_type = genomic RNA
gggttatcagtgcag

SEQ ID NO: 1194 - RNA, 15 nt, Homo sapiens
  source 1..15: mol_type = genomic RNA
aaagcccctgtaggt

SEQ ID NO: 1195 - RNA, 15 nt, Homo sapiens
  source 1..15: mol_type = genomic RNA
aagcccctgtaggtc

SEQ ID NO: 1196 - RNA, 15 nt, Homo sapiens
  source 1..15: mol_type = genomic RNA
agcccctgtaggtcg

SEQ ID NO: 1197 - RNA, 15 nt, Homo sapiens
  source 1..15: mol_type = genomic RNA
gcccctgtaggtcga

SEQ ID NO: 1198 - RNA, 15 nt, Homo sapiens
  source 1..15: mol_type = genomic RNA
cccctgtaggtcgag

SEQ ID NO: 1199 - RNA, 15 nt, Homo sapiens
  source 1..15: mol_type = genomic RNA
ccctgtaggtcgagt

SEQ ID NO: 1200 - RNA, 15 nt, Homo sapiens
  source 1..15: mol_type = genomic RNA
cctgtaggtcgagtc

SEQ ID NO: 1201 - RNA, 15 nt, Homo sapiens
  source 1..15: mol_type = genomic RNA
taggtcgagtctaga

SEQ ID NO: 1202 - RNA, 15 nt, Homo sapiens
  source 1..15: mol_type = genomic RNA
aggtcgagtctagac

SEQ ID NO: 1203 - RNA, 15 nt, Homo sapiens
  source 1..15: mol_type = genomic RNA
ggtcgagtctagaca

SEQ ID NO: 1204 - RNA, 15 nt, Homo sapiens
  source 1..15: mol_type = genomic RNA
gagtctagacaagag

SEQ ID NO: 1205 - RNA, 15 nt, Homo sapiens
  source 1..15: mol_type = genomic RNA
gttacatctcctggg

SEQ ID NO: 1206 - RNA, 15 nt, Homo sapiens
  source 1..15: mol_type = genomic RNA
ttacatctcctgggt

SEQ ID NO: 1207 - RNA, 15 nt, Homo sapiens
  source 1..15: mol_type = genomic RNA
tacatctcctgggtg

SEQ ID NO: 1208 - RNA, 15 nt, Homo sapiens
  source 1..15: mol_type = genomic RNA
acatctcctgggtga

SEQ ID NO: 1209 - RNA, 15 nt, Homo sapiens
  source 1..15: mol_type = genomic RNA
catctcctgggtgat

SEQ ID NO: 1210 - RNA, 15 nt, Homo sapiens
  source 1..15: mol_type = genomic RNA
atctcctgggtgatc

SEQ ID NO: 1211 - RNA, 15 nt, Homo sapiens
  source 1..15: mol_type = genomic RNA
tctcctgggtgatca

SEQ ID NO: 1212 - RNA, 15 nt, Homo sapiens
  source 1..15: mol_type = genomic RNA
ctcctgggtgatcag

SEQ ID NO: 1213 - RNA, 15 nt, Homo sapiens
  source 1..15: mol_type = genomic RNA
tcctgggtgatcagt

SEQ ID NO: 1214 - RNA, 15 nt, Homo sapiens
  source 1..15: mol_type = genomic RNA
gggtgatcagtgcaa

SEQ ID NO: 1215 - RNA, 15 nt, Homo sapiens
  source 1..15: mol_type = genomic RNA
ggtgatcagtgcaaa

SEQ ID NO: 1216 - RNA, 15 nt, Homo sapiens
  source 1..15: mol_type = genomic RNA
tgtcacaaagccccc

SEQ ID NO: 1217 - RNA, 15 nt, Homo sapiens
  source 1..15: mol_type = genomic RNA
gtcacaaagccccct

SEQ ID NO: 1218 - RNA, 15 nt, Homo sapiens
  source 1..15: mol_type = genomic RNA
cccctgtagacaaat

SEQ ID NO: 1219 - RNA, 15 nt, Homo sapiens
  source 1..15: mol_type = genomic RNA
agacaaatcccagaa

SEQ ID NO: 1220 - RNA, 15 nt, Homo sapiens
  source 1..15: mol_type = genomic RNA
ctgggtgatcagtgg

SEQ ID NO: 1221 - RNA, 15 nt, Homo sapiens
  source 1..15: mol_type = genomic RNA
tgggtgatcagtgga

SEQ ID NO: 1222 - RNA, 15 nt, Homo sapiens
  source 1..15: mol_type = genomic RNA
gggtgatcagtggag

SEQ ID NO: 1223 - RNA, 15 nt, Homo sapiens
  source 1..15: mol_type = genomic RNA
ggtgatcagtggaga

SEQ ID NO: 1224 - RNA, 15 nt, Homo sapiens
  source 1..15: mol_type = genomic RNA
gtgatcagtggagat

SEQ ID NO: 1225 - RNA, 15 nt, Homo sapiens
  source 1..15: mol_type = genomic RNA
ggagatatgtgtcac

SEQ ID NO: 1226 - RNA, 15 nt, Homo sapiens
  source 1..15: mol_type = genomic RNA
ttcccctttaggcac

SEQ ID NO: 1227 - RNA, 15 nt, Homo sapiens
  source 1..15: mol_type = genomic RNA
tcccctttaggcaca

SEQ ID NO: 1228 - RNA, 15 nt, Homo sapiens
  source 1..15: mol_type = genomic RNA
cccctttaggcacag

SEQ ID NO: 1229 - RNA, 15 nt, Homo sapiens
  source 1..15: mol_type = genomic RNA
ccctttaggcacagc

SEQ ID NO: 1230 - RNA, 15 nt, Homo sapiens
  source 1..15: mol_type = genomic RNA
cctttaggcacagct

SEQ ID NO: 1231 - RNA, 15 nt, Homo sapiens
  source 1..15: mol_type = genomic RNA
ttaggcacagcttag

SEQ ID NO: 1232 - RNA, 15 nt, Homo sapiens
  source 1..15: mol_type = genomic RNA
taggcacagcttaga

SEQ ID NO: 1233 - RNA, 15 nt, Homo sapiens
  source 1..15: mol_type = genomic RNA
aggcacagcttagac

SEQ ID NO: 1234 - RNA, 15 nt, Homo sapiens
  source 1..15: mol_type = genomic RNA
ggcacagcttagaca

SEQ ID NO: 1235 - RNA, 15 nt, Homo sapiens
  source 1..15: mol_type = genomic RNA
gcacagcttagacaa

SEQ ID NO: 1236 - RNA, 15 nt, Homo sapiens
  source 1..15: mol_type = genomic RNA
acagcttagacaagc

SEQ ID NO: 1237 - RNA, 15 nt, Homo sapiens
  source 1..15: mol_type = genomic RNA
cagcttagacaagcg

SEQ ID NO: 1238 - RNA, 15 nt, Homo sapiens
  source 1..15: mol_type = genomic RNA
agcttagacaagcgt

SEQ ID NO: 1239 - RNA, 15 nt, Homo sapiens
  source 1..15: mol_type = genomic RNA
atgtcactatgcccc

SEQ ID NO: 1240 - RNA, 15 nt, Homo sapiens
  source 1..15: mol_type = genomic RNA
tgtcactatgccccc

SEQ ID NO: 1241 - RNA, 15 nt, Homo sapiens
  source 1..15: mol_type = genomic RNA
gtcactatgccccca

SEQ ID NO: 1242 - RNA, 15 nt, Homo sapiens
  source 1..15: mol_type = genomic RNA
tcactatgcccccat

SEQ ID NO: 1243 - RNA, 15 nt, Homo sapiens
  source 1..15: mol_type = genomic RNA
cactatgcccccata

SEQ ID NO: 1244 - RNA, 15 nt, Homo sapiens
  source 1..15: mol_type = genomic RNA
actatgcccccatag

SEQ ID NO: 1245 - RNA, 15 nt, Homo sapiens
  source 1..15: mol_type = genomic RNA
ctatgcccccatagg

SEQ ID NO: 1246 - RNA, 15 nt, Homo sapiens
  source 1..15: mol_type = genomic RNA
tatgcccccataggc

SEQ ID NO: 1247 - RNA, 15 nt, Homo sapiens
  source 1..15: mol_type = genomic RNA
atgcccccataggca

SEQ ID NO: 1248 - RNA, 15 nt, Homo sapiens
  source 1..15: mol_type = genomic RNA
tgcccccataggcag

SEQ ID NO: 1249 - RNA, 15 nt, Homo sapiens
  source 1..15: mol_type = genomic RNA
gcccccataggcaga

SEQ ID NO: 1250 - RNA, 15 nt, Homo sapiens
  source 1..15: mol_type = genomic RNA
cccccataggcagat

SEQ ID NO: 1251 - RNA, 15 nt, Homo sapiens
  source 1..15: mol_type = genomic RNA
ccccataggcagatc

SEQ ID NO: 1252 - RNA, 15 nt, Homo sapiens
  source 1..15: mol_type = genomic RNA
cccataggcagatcc

SEQ ID NO: 1253 - RNA, 15 nt, Homo sapiens
  source 1..15: mol_type = genomic RNA
ccataggcagatcca

SEQ ID NO: 1254 - RNA, 15 nt, Homo sapiens
  source 1..15: mol_type = genomic RNA
cataggcagatccaa

SEQ ID NO: 1255 - RNA, 15 nt, Homo sapiens
  source 1..15: mol_type = genomic RNA
ataggcagatccaag

SEQ ID NO: 1256 - RNA, 15 nt, Homo sapiens
  source 1..15: mol_type = genomic RNA
taggcagatccaaga

SEQ ID NO: 1257 - RNA, 15 nt, Homo sapiens
  source 1..15: mol_type = genomic RNA
aggcagatccaagac

SEQ ID NO: 1258 - RNA, 15 nt, Homo sapiens
  source 1..15: mol_type = genomic RNA
ggcagatccaagaca

SEQ ID NO: 1259 - RNA, 15 nt, Homo sapiens
  source 1..15: mol_type = genomic RNA
gcagatccaagacaa

SEQ ID NO: 1260 - RNA, 15 nt, Homo sapiens
  source 1..15: mol_type = genomic RNA
agatccaagacaaga

SEQ ID NO: 1261 - RNA, 15 nt, Homo sapiens
  source 1..15: mol_type = genomic RNA
gatccaagacaagag

SEQ ID NO: 1262 - RNA, 15 nt, Homo sapiens
  source 1..15: mol_type = genomic RNA
atccaagacaagagt

SEQ ID NO: 1263 - RNA, 15 nt, Homo sapiens
  source 1..15: mol_type = genomic RNA
tccaagacaagagtc

SEQ ID NO: 1264 - RNA, 15 nt, Homo sapiens
  source 1..15: mol_type = genomic RNA
ccaagacaagagtcc

SEQ ID NO: 1265 - RNA, 15 nt, Homo sapiens
  source 1..15: mol_type = genomic RNA
caagacaagagtcca

SEQ ID NO: 1266 - RNA, 15 nt, Homo sapiens
  source 1..15: mol_type = genomic RNA
aagacaagagtccat

SEQ ID NO: 1267 - RNA, 15 nt, Homo sapiens
  source 1..15: mol_type = genomic RNA
agacaagagtccatc

SEQ ID NO: 1268 - RNA, 15 nt, Homo sapiens
  source 1..15: mol_type = genomic RNA
acaagagtccatcac

SEQ ID NO: 1269 - RNA, 15 nt, Homo sapiens
  source 1..15: mol_type = genomic RNA
caagagtccatcacc

SEQ ID NO: 1270 - RNA, 15 nt, Homo sapiens
  source 1..15: mol_type = genomic RNA
aagagtccatcacct

SEQ ID NO: 1271 - RNA, 15 nt, Homo sapiens
  source 1..15: mol_type = genomic RNA
agagtccatcacctg

SEQ ID NO: 1272 - RNA, 15 nt, Homo sapiens
  source 1..15: mol_type = genomic RNA
gagtccatcacctgg

SEQ ID NO: 1273 - RNA, 15 nt, Homo sapiens
  source 1..15: mol_type = genomic RNA
agtccatcacctggg

SEQ ID NO: 1274 - RNA, 15 nt, Homo sapiens
  source 1..15: mol_type = genomic RNA
agtgcagaaatatgc

SEQ ID NO: 1275 - RNA, 15 nt, Homo sapiens
  source 1..15: mol_type = genomic RNA
gtgcagaaatatgcc

SEQ ID NO: 1276 - RNA, 15 nt, Homo sapiens
  source 1..15: mol_type = genomic RNA
tgcagaaatatgcca

SEQ ID NO: 1277 - RNA, 15 nt, Homo sapiens
  source 1..15: mol_type = genomic RNA
gcagaaatatgccac

SEQ ID NO: 1278 - RNA, 15 nt, Homo sapiens
  source 1..15: mol_type = genomic RNA
aatatgccacaatgc

SEQ ID NO: 1279 - RNA, 15 nt, Homo sapiens
  source 1..15: mol_type = genomic RNA
atatgccacaatgcc

SEQ ID NO: 1280 - RNA, 15 nt, Homo sapiens
  source 1..15: mol_type = genomic RNA
tatgccacaatgccg

SEQ ID NO: 1281 - RNA, 15 nt, Homo sapiens
  source 1..15: mol_type = genomic RNA
atgccacaatgccgc

SEQ ID NO: 1282 - RNA, 15 nt, Homo sapiens
  source 1..15: mol_type = genomic RNA
tgccacaatgccgcc

SEQ ID NO: 1283 - RNA, 15 nt, Homo sapiens
  source 1..15: mol_type = genomic RNA
gccacaatgccgcca

SEQ ID NO: 1284 - RNA, 15 nt, Homo sapiens
  source 1..15: mol_type = genomic RNA
ccacaatgccgccag

SEQ ID NO: 1285 - RNA, 15 nt, Homo sapiens
  source 1..15: mol_type = genomic RNA
cacaatgccgccagt

SEQ ID NO: 1286 - RNA, 15 nt, Homo sapiens
  source 1..15: mol_type = genomic RNA
acaatgccgccagta

SEQ ID NO: 1287 - RNA, 15 nt, Homo sapiens
  source 1..15: mol_type = genomic RNA
caatgccgccagtag

SEQ ID NO: 1288 - RNA, 15 nt, Homo sapiens
  source 1..15: mol_type = genomic RNA
aatgccgccagtagg

SEQ ID NO: 1289 - RNA, 15 nt, Homo sapiens
  source 1..15: mol_type = genomic RNA
atgccgccagtaggc

SEQ ID NO: 1290 - RNA, 15 nt, Homo sapiens
  source 1..15: mol_type = genomic RNA
tgccgccagtaggca

SEQ ID NO: 1291 - RNA, 15 nt, Homo sapiens
  source 1..15: mol_type = genomic RNA
gccgccagtaggcag

SEQ ID NO: 1292 - RNA, 15 nt, Homo sapiens
  source 1..15: mol_type = genomic RNA
ccgccagtaggcaga

SEQ ID NO: 1293 - RNA, 15 nt, Homo sapiens
  source 1..15: mol_type = genomic RNA
cgccagtaggcagat

SEQ ID NO: 1294 - RNA, 15 nt, Homo sapiens
  source 1..15: mol_type = genomic RNA
gccagtaggcagata

SEQ ID NO: 1295 - RNA, 15 nt, Homo sapiens
  source 1..15: mol_type = genomic RNA
ccagtaggcagatat

SEQ ID NO: 1296 - RNA, 15 nt, Homo sapiens
  source 1..15: mol_type = genomic RNA
agtaggcagatatag

SEQ ID NO: 1297 - RNA, 15 nt, Homo sapiens
  source 1..15: mol_type = genomic RNA
taggcagatatagac

SEQ ID NO: 1298 - RNA, 15 nt, Homo sapiens
  source 1..15: mol_type = genomic RNA
aggcagatatagaca

SEQ ID NO: 1299 - RNA, 15 nt, Homo sapiens
  source 1..15: mol_type = genomic RNA
ggcagatatagacaa

SEQ ID NO: 1300 - RNA, 15 nt, Homo sapiens
  source 1..15: mol_type = genomic RNA
tacatcacctgcgtg

SEQ ID NO: 1301 - RNA, 15 nt, Homo sapiens
  source 1..15: mol_type = genomic RNA
acatcacctgcgtga

SEQ ID NO: 1302 - RNA, 15 nt, Homo sapiens
  source 1..15: mol_type = genomic RNA
catcacctgcgtgat

SEQ ID NO: 1303 - RNA, 15 nt, Homo sapiens
  source 1..15: mol_type = genomic RNA
atcacctgcgtgatc

SEQ ID NO: 1304 - RNA, 15 nt, Homo sapiens
  source 1..15: mol_type = genomic RNA
tcacctgcgtgatca

SEQ ID NO: 1305 - RNA, 15 nt, Homo sapiens
  source 1..15: mol_type = genomic RNA
cacctgcgtgatcac

SEQ ID NO: 1306 - RNA, 15 nt, Homo sapiens
  source 1..15: mol_type = genomic RNA
acctgcgtgatcact

SEQ ID NO: 1307 - RNA, 15 nt, Homo sapiens
  source 1..15: mol_type = genomic RNA
cctgcgtgatcactg

SEQ ID NO: 1308 - RNA, 15 nt, Homo sapiens
  source 1..15: mol_type = genomic RNA
ctgcgtgatcactgc

SEQ ID NO: 1309 - RNA, 15 nt, Homo sapiens
  source 1..15: mol_type = genomic RNA
tgcgtgatcactgca

SEQ ID NO: 1310 - RNA, 15 nt, Homo sapiens
  source 1..15: mol_type = genomic RNA
gcgtgatcactgcag

SEQ ID NO: 1311 - RNA, 15 nt, Homo sapiens
  source 1..15: mol_type = genomic RNA
cgtgatcactgcaga

SEQ ID NO: 1312 - RNA, 15 nt, Homo sapiens
  source 1..15: mol_type = genomic RNA
gtgatcactgcagag

SEQ ID NO: 1313 - RNA, 15 nt, Homo sapiens
  source 1..15: mol_type = genomic RNA
tgatcactgcagaga

SEQ ID NO: 1314 - RNA, 15 nt, Homo sapiens
  source 1..15: mol_type = genomic RNA
gatcactgcagagat

SEQ ID NO: 1315 - RNA, 15 nt, Homo sapiens
  source 1..15: mol_type = genomic RNA
atatcacaatgcccc

SEQ ID NO: 1316 - RNA, 15 nt, Homo sapiens
  source 1..15: mol_type = genomic RNA
tatcacaatgcccct

SEQ ID NO: 1317 - RNA, 15 nt, Homo sapiens
  source 1..15: mol_type = genomic RNA
atcacaatgcccctg

SEQ ID NO: 1318 - RNA, 15 nt, Homo sapiens
  source 1..15: mol_type = genomic RNA
gcctagacaagagtc

SEQ ID NO: 1319 - RNA, 15 nt, Homo sapiens
  source 1..15: mol_type = genomic RNA
cctagacaagagtcc

SEQ ID NO: 1320 - RNA, 15 nt, Homo sapiens
  source 1..15: mol_type = genomic RNA
ctagacaagagtccc

SEQ ID NO: 1321 - RNA, 15 nt, Homo sapiens
  source 1..15: mol_type = genomic RNA
tagacaagagtccca

SEQ ID NO: 1322 - RNA, 15 nt, Homo sapiens
  source 1..15: mol_type = genomic RNA
agacaagagtcccat

SEQ ID NO: 1323 - RNA, 15 nt, Homo sapiens
  source 1..15: mol_type = genomic RNA
gacaagagtcccatc

SEQ ID NO: 1324 - RNA, 15 nt, Homo sapiens
  source 1..15: mol_type = genomic RNA
acaagagtcccatca

SEQ ID NO: 1325 - RNA, 15 nt, Homo sapiens
  source 1..15: mol_type = genomic RNA
caagagtcccatcac

SEQ ID NO: 1326 - RNA, 15 nt, Homo sapiens
  source 1..15: mol_type = genomic RNA
tgatcagtgcagagt

SEQ ID NO: 1327 - RNA, 15 nt, Homo sapiens
  source 1..15: mol_type = genomic RNA
tatgtcacaatgccc

SEQ ID NO: 1328 - RNA, 15 nt, Homo sapiens
  source 1..15: mol_type = genomic RNA
atgtcacaatgcccc

SEQ ID NO: 1329 - RNA, 15 nt, Homo sapiens
  source 1..15: mol_type = genomic RNA
tgtcacaatgccccc

SEQ ID NO: 1330 - RNA, 15 nt, Homo sapiens
  source 1..15: mol_type = genomic RNA
gtcacaatgccccct

SEQ ID NO: 1331 - RNA, 15 nt, Homo sapiens
  source 1..15: mol_type = genomic RNA
tcacaatgccccctt

SEQ ID NO: 1332 - RNA, 15 nt, Homo sapiens
  source 1..15: mol_type = genomic RNA
aatgcccccttttgg

SEQ ID NO: 1333 - RNA, 15 nt, Homo sapiens
  source 1..15: mol_type = genomic RNA
atgcccccttttggc

SEQ ID NO: 1334 - RNA, 15 nt, Homo sapiens
  source 1..15: mol_type = genomic RNA
tgcccccttttggca

SEQ ID NO: 1335 - RNA, 15 nt, Homo sapiens
  source 1..15: mol_type = genomic RNA
gcccccttttggcag

SEQ ID NO: 1336 - RNA, 15 nt, Homo sapiens
  source 1..15: mol_type = genomic RNA
cccccttttggcaga

SEQ ID NO: 1337 - RNA, 15 nt, Homo sapiens
  source 1..15: mol_type = genomic RNA
ccccttttggcagag

SEQ ID NO: 1338 - RNA, 15 nt, Homo sapiens
  source 1..15: mol_type = genomic RNA
cccttttggcagagc

SEQ ID NO: 1339 - RNA, 15 nt, Homo sapiens
  source 1..15: mol_type = genomic RNA
ccttttggcagagcc

SEQ ID NO: 1340 - RNA, 15 nt, Homo sapiens
  source 1..15: mol_type = genomic RNA
cttttggcagagcct

SEQ ID NO: 1341 - RNA, 15 nt, Homo sapiens
  source 1..15: mol_type = genomic RNA
tttggcagagcctag

SEQ ID NO: 1342 - RNA, 15 nt, Homo sapiens
  source 1..15: mol_type = genomic RNA
ttggcagagcctaga

SEQ ID NO: 1343 - RNA, 15 nt, Homo sapiens
  source 1..15: mol_type = genomic RNA
tggcagagcctagac

SEQ ID NO: 1344 - RNA, 15 nt, Homo sapiens
  source 1..15: mol_type = genomic RNA
agagcctagacaagg

SEQ ID NO: 1345 - RNA, 15 nt, Homo sapiens
  source 1..15: mol_type = genomic RNA
gagcctagacaaggg

SEQ ID NO: 1346 - RNA, 15 nt, Homo sapiens
  source 1..15: mol_type = genomic RNA
agcctagacaagggt

SEQ ID NO: 1347 - RNA, 15 nt, Homo sapiens
  source 1..15: mol_type = genomic RNA
gcctagacaagggtt

SEQ ID NO: 1348 - RNA, 15 nt, Homo sapiens
  source 1..15: mol_type = genomic RNA
cctagacaagggtta

SEQ ID NO: 1349 - RNA, 15 nt, Homo sapiens
  source 1..15: mol_type = genomic RNA
ctagacaagggttac

SEQ ID NO: 1350 - RNA, 15 nt, Homo sapiens
  source 1..15: mol_type = genomic RNA
tagacaagggttaca

SEQ ID NO: 1351 - RNA, 15 nt, Homo sapiens
  source 1..15: mol_type = genomic RNA
agacaagggttacat

SEQ ID NO: 1352 - RNA, 15 nt, Homo sapiens
  source 1..15: mol_type = genomic RNA
ggttacatcacctgg

SEQ ID NO: 1353 - RNA, 15 nt, Homo sapiens
  source 1..15: mol_type = genomic RNA
caatgtccctgtagc

SEQ ID NO: 1354 - RNA, 15 nt, Homo sapiens
  source 1..15: mol_type = genomic RNA
aatgtccctgtagcc

SEQ ID NO: 1355 - RNA, 15 nt, Homo sapiens
  source 1..15: mol_type = genomic RNA
atgtccctgtagcca

SEQ ID NO: 1356 - RNA, 15 nt, Homo sapiens
  source 1..15: mol_type = genomic RNA
tgtccctgtagccat

SEQ ID NO: 1357 - RNA, 15 nt, Homo sapiens
  source 1..15: mol_type = genomic RNA
gtccctgtagccata

SEQ ID NO: 1358 - RNA, 15 nt, Homo sapiens
  source 1..15: mol_type = genomic RNA
tccctgtagccatat

SEQ ID NO: 1359 - RNA, 15 nt, Homo sapiens
  source 1..15: mol_type = genomic RNA
ccctgtagccatatc

SEQ ID NO: 1360 - RNA, 15 nt, Homo sapiens
  source 1..15: mol_type = genomic RNA
cctgtagccatatcc

SEQ ID NO: 1361 - RNA, 15 nt, Homo sapiens
  source 1..15: mol_type = genomic RNA
aagtgacatcacctg

SEQ ID NO: 1362 - RNA, 15 nt, Homo sapiens
  source 1..15: mol_type = genomic RNA
agtgacatcacctgg

SEQ ID NO: 1363 - RNA, 15 nt, Homo sapiens
  source 1..15: mol_type = genomic RNA
gtgacatcacctggg

SEQ ID NO: 1364 - RNA, 15 nt, Homo sapiens
  source 1..15: mol_type = genomic RNA
tgacatcacctgggt

SEQ ID NO: 1365 - RNA, 15 nt, Homo sapiens
  source 1..15: mol_type = genomic RNA
gacatcacctgggtg

SEQ ID NO: 1366 - RNA, 15 nt, Homo sapiens
  source 1..15: mol_type = genomic RNA
ctgggtgatcagtgt

SEQ ID NO: 1367 - RNA, 15 nt, Homo sapiens
  source 1..15: mol_type = genomic RNA
tgggtgatcagtgtg

SEQ ID NO: 1368 - RNA, 15 nt, Homo sapiens
  source 1..15: mol_type = genomic RNA
gggtgatcagtgtgg

SEQ ID NO: 1369 - RNA, 15 nt, Homo sapiens
  source 1..15: mol_type = genomic RNA
ggtgatcagtgtgga

SEQ ID NO: 1370 - RNA, 15 nt, Homo sapiens
  source 1..15: mol_type = genomic RNA
gtgatcagtgtggag

SEQ ID NO: 1371 - RNA, 15 nt, Homo sapiens
  source 1..15: mol_type = genomic RNA
tgatcagtgtggaga

SEQ ID NO: 1372 - RNA, 15 nt, Homo sapiens
  source 1..15: mol_type = genomic RNA
gatcagtgtggagat

SEQ ID NO: 1373 - RNA, 15 nt, Homo sapiens
  source 1..15: mol_type = genomic RNA
gtggagatatgtcac

SEQ ID NO: 1374 - RNA, 15 nt, Homo sapiens
  source 1..15: mol_type = genomic RNA
atgtctccagtaggc

SEQ ID NO: 1375 - RNA, 15 nt, Homo sapiens
  source 1..15: mol_type = genomic RNA
tgtctccagtaggca

SEQ ID NO: 1376 - RNA, 15 nt, Homo sapiens
  source 1..15: mol_type = genomic RNA
gtctccagtaggcag

SEQ ID NO: 1377 - RNA, 15 nt, Homo sapiens
  source 1..15: mol_type = genomic RNA
tctccagtaggcaga

SEQ ID NO: 1378 - RNA, 15 nt, Homo sapiens
  source 1..15: mol_type = genomic RNA
ctccagtaggcagag

SEQ ID NO: 1379 - RNA, 15 nt, Homo sapiens
  source 1..15: mol_type = genomic RNA
tccagtaggcagagc

SEQ ID NO: 1380 - RNA, 15 nt, Homo sapiens
  source 1..15: mol_type = genomic RNA
ccagtaggcagagcc

SEQ ID NO: 1381 - RNA, 15 nt, Homo sapiens
  source 1..15: mol_type = genomic RNA
cagtaggcagagcct

SEQ ID NO: 1382 - RNA, 15 nt, Homo sapiens
  source 1..15: mol_type = genomic RNA
agtaggcagagccta

SEQ ID NO: 1383 - RNA, 15 nt, Homo sapiens
  source 1..15: mol_type = genomic RNA
acctgggtgatcagg

SEQ ID NO: 1384 - RNA, 15 nt, Homo sapiens
  source 1..15: mol_type = genomic RNA
cctgggtgatcaggg

SEQ ID NO: 1385 - RNA, 15 nt, Homo sapiens
  source 1..15: mol_type = genomic RNA
ctgggtgatcagggc

SEQ ID NO: 1386 - RNA, 15 nt, Homo sapiens
  source 1..15: mol_type = genomic RNA
tgggtgatcagggca

SEQ ID NO: 1387 - RNA, 15 nt, Homo sapiens
  source 1..15: mol_type = genomic RNA
gggtgatcagggcag

SEQ ID NO: 1388 - RNA, 15 nt, Homo sapiens
  source 1..15: mol_type = genomic RNA
ggtgatcagggcaga

SEQ ID NO: 1389 - RNA, 15 nt, Homo sapiens
  source 1..15: mol_type = genomic RNA
gtgatcagggcagag

SEQ ID NO: 1390 - RNA, 15 nt, Homo sapiens
  source 1..15: mol_type = genomic RNA
tgatcagggcagaga

SEQ ID NO: 1391 - RNA, 15 nt, Homo sapiens
  source 1..15: mol_type = genomic RNA
gatcagggcagagat

SEQ ID NO: 1392 - RNA, 15 nt, Homo sapiens
  source 1..15: mol_type = genomic RNA
atcagggcagagata

SEQ ID NO: 1393 - RNA, 15 nt, Homo sapiens
  source 1..15: mol_type = genomic RNA
tcagggcagagatat

SEQ ID NO: 1394 - RNA, 15 nt, Homo sapiens
  source 1..15: mol_type = genomic RNA
cagggcagagatatg

SEQ ID NO: 1395 - RNA, 15 nt, Homo sapiens
  source 1..15: mol_type = genomic RNA
agggcagagatatgt

SEQ ID NO: 1396 - RNA, 15 nt, Homo sapiens
  source 1..15: mol_type = genomic RNA
gggcagagatatgtc

SEQ ID NO: 1397 - RNA, 15 nt, Homo sapiens
  source 1..15: mol_type = genomic RNA
ggcagagatatgtca

SEQ ID NO: 1398 - RNA, 15 nt, Homo sapiens
  source 1..15: mol_type = genomic RNA
tcacaatgccccctg

SEQ ID NO: 1399 - RNA, 15 nt, Homo sapiens
  source 1..15: mol_type = genomic RNA
cacaatgccccctgt

SEQ ID NO: 1400 - RNA, 15 nt, Homo sapiens
  source 1..15: mol_type = genomic RNA
acaatgccccctgta

SEQ ID NO: 1401 - RNA, 15 nt, Homo sapiens
  source 1..15: mol_type = genomic RNA
caatgccccctgtaa

SEQ ID NO: 1402 - RNA, 15 nt, Homo sapiens
  source 1..15: mol_type = genomic RNA
aatgccccctgtaag

SEQ ID NO: 1403 - RNA, 15 nt, Homo sapiens
  source 1..15: mol_type = genomic RNA
atgccccctgtaagc

SEQ ID NO: 1404 - RNA, 15 nt, Homo sapiens
  source 1..15: mol_type = genomic RNA
tgccccctgtaagca

SEQ ID NO: 1405 - RNA, 15 nt, Homo sapiens
  source 1..15: mol_type = genomic RNA
gccccctgtaagcag

SEQ ID NO: 1406 - RNA, 15 nt, Homo sapiens
  source 1..15: mol_type = genomic RNA
ccccctgtaagcaga

SEQ ID NO: 1407 - RNA, 15 nt, Homo sapiens
  source 1..15: mol_type = genomic RNA
cccctgtaagcagat

SEQ ID NO: 1408 - RNA, 15 nt, Homo sapiens
  source 1..15: mol_type = genomic RNA
ccctgtaagcagatc

SEQ ID NO: 1409 - RNA, 15 nt, Homo sapiens
  source 1..15: mol_type = genomic RNA
cctgtaagcagatcc

SEQ ID NO: 1410 - RNA, 15 nt, Homo sapiens
  source 1..15: mol_type = genomic RNA
ctgtaagcagatccc

SEQ ID NO: 1411 - RNA, 15 nt, Homo sapiens
  source 1..15: mol_type = genomic RNA
tgtaagcagatccca

SEQ ID NO: 1412 - RNA, 15 nt, Homo sapiens
  source 1..15: mol_type = genomic RNA
gtaagcagatcccag

SEQ ID NO: 1413 - RNA, 15 nt, Homo sapiens
  source 1..15: mol_type = genomic RNA
taagcagatcccaga

SEQ ID NO: 1414 - RNA, 15 nt, Homo sapiens
  source 1..15: mol_type = genomic RNA
aagcagatcccagac

SEQ ID NO: 1415 - RNA, 15 nt, Homo sapiens
  source 1..15: mol_type = genomic RNA
agcagatcccagaca

SEQ ID NO: 1416 - RNA, 15 nt, Homo sapiens
  source 1..15: mol_type = genomic RNA
gcagatcccagacaa

SEQ ID NO: 1417 - RNA, 15 nt, Homo sapiens
  source 1..15: mol_type = genomic RNA
cagatcccagacaag

SEQ ID NO: 1418 - RNA, 15 nt, Homo sapiens
  source 1..15: mol_type = genomic RNA
agatcccagacaaga

SEQ ID NO: 1419 - RNA, 15 nt, Homo sapiens
  source 1..15: mol_type = genomic RNA
gatcccagacaagag

SEQ ID NO: 1420 - RNA, 15 nt, Homo sapiens
  source 1..15: mol_type = genomic RNA
atcccagacaagagt

SEQ ID NO: 1421 - RNA, 15 nt, Homo sapiens
  source 1..15: mol_type = genomic RNA
tcccagacaagagtt

SEQ ID NO: 1422 - RNA, 15 nt, Homo sapiens
  source 1..15: mol_type = genomic RNA
cccagacaagagttg

SEQ ID NO: 1423 - RNA, 15 nt, Homo sapiens
  source 1..15: mol_type = genomic RNA
ccagacaagagttgc

SEQ ID NO: 1424 - RNA, 15 nt, Homo sapiens
  source 1..15: mol_type = genomic RNA
aagagttgcatcacc

SEQ ID NO: 1425 - RNA, 15 nt, Homo sapiens
  source 1..15: mol_type = genomic RNA
agagttgcatcacct

SEQ ID NO: 1426 - RNA, 15 nt, Homo sapiens
  source 1..15: mol_type = genomic RNA
gttgcatcacctcgg

SEQ ID NO: 1427 - RNA, 15 nt, Homo sapiens
  source 1..15: mol_type = genomic RNA
ttgcatcacctcggt

SEQ ID NO: 1428 - RNA, 15 nt, Homo sapiens
  source 1..15: mol_type = genomic RNA
tgcatcacctcggtg

SEQ ID NO: 1429 - RNA, 15 nt, Homo sapiens
  source 1..15: mol_type = genomic RNA
gcatcacctcggtga

SEQ ID NO: 1430 - RNA, 15 nt, Homo sapiens
  source 1..15: mol_type = genomic RNA
catcacctcggtgat

SEQ ID NO: 1431 - RNA, 15 nt, Homo sapiens
  source 1..15: mol_type = genomic RNA
atcacctcggtgatc

SEQ ID NO: 1432 - RNA, 15 nt, Homo sapiens
  source 1..15: mol_type = genomic RNA
tcacctcggtgatca

SEQ ID NO: 1433 - RNA, 15 nt, Homo sapiens
  source 1..15: mol_type = genomic RNA
cacctcggtgatcag

SEQ ID NO: 1434 - RNA, 15 nt, Homo sapiens
  source 1..15: mol_type = genomic RNA
acctcggtgatcagt

SEQ ID NO: 1435 - RNA, 15 nt, Homo sapiens
  source 1..15: mol_type = genomic RNA
cctcggtgatcagtg

SEQ ID NO: 1436 - RNA, 15 nt, Homo sapiens
  source 1..15: mol_type = genomic RNA
ctcggtgatcagtgc

SEQ ID NO: 1437 - RNA, 15 nt, Homo sapiens
  source 1..15: mol_type = genomic RNA
gtgcagagatacgtc

SEQ ID NO: 1438 - RNA, 15 nt, Homo sapiens
  source 1..15: mol_type = genomic RNA
atacgtcacaatgcc

SEQ ID NO: 1439 - RNA, 15 nt, Homo sapiens
  source 1..15: mol_type = genomic RNA
tacgtcacaatgccc

SEQ ID NO: 1440 - RNA, 15 nt, Homo sapiens
  source 1..15: mol_type = genomic RNA
acgtcacaatgcccc

SEQ ID NO: 1441 - RNA, 15 nt, Homo sapiens
  source 1..15: mol_type = genomic RNA
cgtcacaatgcccct

SEQ ID NO: 1442 - RNA, 15 nt, Homo sapiens
  source 1..15: mol_type = genomic RNA
tacataacccaggtg

SEQ ID NO: 1443 - RNA, 15 nt, Homo sapiens
  source 1..15: mol_type = genomic RNA
acataacccaggtga

SEQ ID NO: 1444 - RNA, 15 nt, Homo sapiens
  source 1..15: mol_type = genomic RNA
cataacccaggtgat

SEQ ID NO: 1445 - RNA, 15 nt, Homo sapiens
  source 1..15: mol_type = genomic RNA
ataacccaggtgatc

SEQ ID NO: 1446 - RNA, 15 nt, Homo sapiens
  source 1..15: mol_type = genomic RNA
taacccaggtgatcc

SEQ ID NO: 1447 - RNA, 15 nt, Homo sapiens
  source 1..15: mol_type = genomic RNA
aacccaggtgatccg

SEQ ID NO: 1448 - RNA, 15 nt, Homo sapiens
  source 1..15: mol_type = genomic RNA
acccaggtgatccgt

SEQ ID NO: 1449 - RNA, 15 nt, Homo sapiens
  source 1..15: mol_type = genomic RNA
cccaggtgatccgta

SEQ ID NO: 1450 - RNA, 15 nt, Homo sapiens
  source 1..15: mol_type = genomic RNA
ccaggtgatccgtac

SEQ ID NO: 1451 - RNA, 15 nt, Homo sapiens
  source 1..15: mol_type = genomic RNA
caggtgatccgtaca

SEQ ID NO: 1452 - RNA, 15 nt, Homo sapiens
  source 1..15: mol_type = genomic RNA
aggtgatccgtacag

SEQ ID NO: 1453 - RNA, 15 nt, Homo sapiens
  source 1..15: mol_type = genomic RNA
ggtgatccgtacaga

SEQ ID NO: 1454 - RNA, 15 nt, Homo sapiens
  source 1..15: mol_type = genomic RNA
gtgatccgtacagag

SEQ ID NO: 1455 - RNA, 15 nt, Homo sapiens
  source 1..15: mol_type = genomic RNA
tgatccgtacagagt

SEQ ID NO: 1456 - RNA, 15 nt, Homo sapiens
  source 1..15: mol_type = genomic RNA
gatccgtacagagtg

SEQ ID NO: 1457 - RNA, 15 nt, Homo sapiens
  source 1..15: mol_type = genomic RNA
atccgtacagagtga

SEQ ID NO: 1458 - RNA, 15 nt, Homo sapiens
  source 1..15: mol_type = genomic RNA
tccgtacagagtgat

SEQ ID NO: 1459 - RNA, 15 nt, Homo sapiens
  source 1..15: mol_type = genomic RNA
ccgtacagagtgatg

SEQ ID NO: 1460 - RNA, 15 nt, Homo sapiens
  source 1..15: mol_type = genomic RNA
acagagtgatgtcac

SEQ ID NO: 1461 - RNA, 15 nt, Homo sapiens
  source 1..15: mol_type = genomic RNA
gtgatgtcacaacgc

SEQ ID NO: 1462 - RNA, 15 nt, Homo sapiens
  source 1..15: mol_type = genomic RNA
tgatgtcacaacgcc

SEQ ID NO: 1463 - RNA, 15 nt, Homo sapiens
  source 1..15: mol_type = genomic RNA
gatgtcacaacgccc

SEQ ID NO: 1464 - RNA, 15 nt, Homo sapiens
  source 1..15: mol_type = genomic RNA
atgtcacaacgccct

SEQ ID NO: 1465 - RNA, 15 nt, Homo sapiens
  source 1..15: mol_type = genomic RNA
tgtcacaacgccctc

SEQ ID NO: 1466 - RNA, 15 nt, Homo sapiens
  source 1..15: mol_type = genomic RNA
gtcacaacgccctct

SEQ ID NO: 1467 - RNA, 15 nt, Homo sapiens
  source 1..15: mol_type = genomic RNA
tcacaacgccctctg

SEQ ID NO: 1468 - RNA, 15 nt, Homo sapiens
  source 1..15: mol_type = genomic RNA
cacaacgccctctgt

SEQ ID NO: 1469 - RNA, 15 nt, Homo sapiens
  source 1..15: mol_type = genomic RNA
acaacgccctctgta

SEQ ID NO: 1470 - RNA, 15 nt, Homo sapiens
  source 1..15: mol_type = genomic RNA
caacgccctctgtag

SEQ ID NO: 1471 - RNA, 15 nt, Homo sapiens
  source 1..15: mol_type = genomic RNA
aacgccctctgtagg

SEQ ID NO: 1472 - RNA, 15 nt, Homo sapiens
  source 1..15: mol_type = genomic RNA
acgccctctgtaggc

SEQ ID NO: 1473 - RNA, 15 nt, Homo sapiens
  source 1..15: mol_type = genomic RNA
cgccctctgtaggca

SEQ ID NO: 1474 - RNA, 15 nt, Homo sapiens
  source 1..15: mol_type = genomic RNA
gccctctgtaggcag

SEQ ID NO: 1475 - RNA, 15 nt, Homo sapiens
  source 1..15: mol_type = genomic RNA
ccctctgtaggcaga

SEQ ID NO: 1476 - RNA, 15 nt, Homo sapiens
  source 1..15: mol_type = genomic RNA
cctctgtaggcagag

SEQ ID NO: 1477 - RNA, 15 nt, Homo sapiens
  source 1..15: mol_type = genomic RNA
ctctgtaggcagaga

SEQ ID NO: 1478 - RNA, 15 nt, Homo sapiens
  source 1..15: mol_type = genomic RNA
tctgtaggcagagac

SEQ ID NO: 1479 - RNA, 15 nt, Homo sapiens
  source 1..15: mol_type = genomic RNA
ctgtaggcagagact

SEQ ID NO: 1480 - RNA, 15 nt, Homo sapiens
  source 1..15: mol_type = genomic RNA
tgtaggcagagacta

SEQ ID NO: 1481 - RNA, 15 nt, Homo sapiens
  source 1..15: mol_type = genomic RNA
gtaggcagagactag

SEQ ID NO: 1482 - RNA, 15 nt, Homo sapiens
  source 1..15: mol_type = genomic RNA
taggcagagactaga

SEQ ID NO: 1483 - RNA, 15 nt, Homo sapiens
  source 1..15: mol_type = genomic RNA
aggcagagactagaa

SEQ ID NO: 1484 - RNA, 15 nt, Homo sapiens
  source 1..15: mol_type = genomic RNA
ggcagagactagaaa

SEQ ID NO: 1485 - RNA, 15 nt, Homo sapiens
  source 1..15: mol_type = genomic RNA
gcagagactagaaaa

SEQ ID NO: 1486 - RNA, 15 nt, Homo sapiens
  source 1..15: mol_type = genomic RNA
agagactagaaaaga

SEQ ID NO: 1487 - RNA, 15 nt, Homo sapiens
  source 1..15: mol_type = genomic RNA
gagactagaaaagag

SEQ ID NO: 1488 - RNA, 15 nt, Homo sapiens
  source 1..15: mol_type = genomic RNA
tacattacctgggtg

SEQ ID NO: 1489 - RNA, 15 nt, Homo sapiens
  source 1..15: mol_type = genomic RNA
acattacctgggtga

SEQ ID NO: 1490 - RNA, 15 nt, Homo sapiens
  source 1..15: mol_type = genomic RNA
attacctgggtgatc

SEQ ID NO: 1491 - RNA, 15 nt, Homo sapiens
  source 1..15: mol_type = genomic RNA
ttacctgggtgatca

SEQ ID NO: 1492 - RNA, 15 nt, Homo sapiens
  source 1..15: mol_type = genomic RNA
tacctgggtgatcag

SEQ ID NO: 1493 - RNA, 15 nt, Homo sapiens
  source 1..15: mol_type = genomic RNA
caatgccccctgtag

SEQ ID NO: 1494 - RNA, 15 nt, Homo sapiens
  source 1..15: mol_type = genomic RNA
aatgccccctgtagg

SEQ ID NO: 1495 - RNA, 15 nt, Homo sapiens
  source 1..15: mol_type = genomic RNA
atgccccctgtaggc

SEQ ID NO: 1496 - RNA, 15 nt, Homo sapiens
  source 1..15: mol_type = genomic RNA
tgccccctgtaggca

SEQ ID NO: 1497 - RNA, 15 nt, Homo sapiens
  source 1..15: mol_type = genomic RNA
gccccctgtaggcag

SEQ ID NO: 1498 - RNA, 15 nt, Homo sapiens
  source 1..15: mol_type = genomic RNA
ccccctgtaggcaga

SEQ ID NO: 1499 - RNA, 15 nt, Homo sapiens
  source 1..15: mol_type = genomic RNA
cctgtaggcagagca

SEQ ID NO: 1500 - RNA, 15 nt, Homo sapiens
  source 1..15: mol_type = genomic RNA
ctgtaggcagagcat

SEQ ID NO: 1501 - RNA, 15 nt, Homo sapiens
  source 1..15: mol_type = genomic RNA
tgtaggcagagcata

SEQ ID NO: 1502 - RNA, 15 nt, Homo sapiens
  source 1..15: mol_type = genomic RNA
gtaggcagagcatag

SEQ ID NO: 1503 - RNA, 15 nt, Homo sapiens
  source 1..15: mol_type = genomic RNA
taggcagagcataga

SEQ ID NO: 1504 - RNA, 15 nt, Homo sapiens
  source 1..15: mol_type = genomic RNA
aggcagagcatagag

SEQ ID NO: 1505 - RNA, 15 nt, Homo sapiens
  source 1..15: mol_type = genomic RNA
ggcagagcatagaga

SEQ ID NO: 1506 - RNA, 15 nt, Homo sapiens
  source 1..15: mol_type = genomic RNA
gcagagcatagagaa

SEQ ID NO: 1507 - RNA, 15 nt, Homo sapiens
  source 1..15: mol_type = genomic RNA
cagagcatagagaag

SEQ ID NO: 1508 - RNA, 15 nt, Homo sapiens
  source 1..15: mol_type = genomic RNA
agagcatagagaaga

SEQ ID NO: 1509 - RNA, 15 nt, Homo sapiens
  source 1..15: mol_type = genomic RNA
gagcatagagaagag

SEQ ID NO: 1510 - RNA, 15 nt, Homo sapiens
  source 1..15: mol_type = genomic RNA
agcatagagaagagt

SEQ ID NO: 1511 - RNA, 15 nt, Homo sapiens
  source 1..15: mol_type = genomic RNA
agagaagagttgcat

SEQ ID NO: 1512 - RNA, 15 nt, Homo sapiens
  source 1..15: mol_type = genomic RNA
agttgcatcacctgg

SEQ ID NO: 1513 - RNA, 15 nt, Homo sapiens
  source 1..15: mol_type = genomic RNA
gttgcatcacctggg

SEQ ID NO: 1514 - RNA, 15 nt, Homo sapiens
  source 1..15: mol_type = genomic RNA
ttgcatcacctgggt

SEQ ID NO: 1515 - RNA, 15 nt, Homo sapiens
  source 1..15: mol_type = genomic RNA
tgcatcacctgggtg

SEQ ID NO: 1516 - RNA, 15 nt, Homo sapiens
  source 1..15: mol_type = genomic RNA
gcatcacctgggtga

SEQ ID NO: 1517 - RNA, 15 nt, Homo sapiens
  source 1..15: mol_type = genomic RNA
tgggtgatcagtgta

SEQ ID NO: 1518 - RNA, 15 nt, Homo sapiens
  source 1..15: mol_type = genomic RNA
gggtgatcagtgtag

SEQ ID NO: 1519 - RNA, 15 nt, Homo sapiens
  source 1..15: mol_type = genomic RNA
tgtcacaatgtcccc

SEQ ID NO: 1520 - RNA, 15 nt, Homo sapiens
  source 1..15: mol_type = genomic RNA
ccctgtaggcagatc

SEQ ID NO: 1521 - RNA, 15 nt, Homo sapiens
  source 1..15: mol_type = genomic RNA
cctgtaggcagatcc

SEQ ID NO: 1522 - RNA, 15 nt, Homo sapiens
  source 1..15: mol_type = genomic RNA
ctgtaggcagatcct

SEQ ID NO: 1523 - RNA, 15 nt, Homo sapiens
  source 1..15: mol_type = genomic RNA
tgtaggcagatccta

SEQ ID NO: 1524 - RNA, 15 nt, Homo sapiens
  source 1..15: mol_type = genomic RNA
gtaggcagatcctag

SEQ ID NO: 1525 - RNA, 15 nt, Homo sapiens
  source 1..15: mol_type = genomic RNA
taggcagatcctaga

SEQ ID NO: 1526 - RNA, 15 nt, Homo sapiens
  source 1..15: mol_type = genomic RNA
aggcagatcctagac

SEQ ID NO: 1527 - RNA, 15 nt, Homo sapiens
  source 1..15: mol_type = genomic RNA
ggcagatcctagaca

SEQ ID NO: 1528 - RNA, 15 nt, Homo sapiens
  source 1..15: mol_type = genomic RNA
gcagatcctagacaa

SEQ ID NO: 1529 - RNA, 15 nt, Homo sapiens
  source 1..15: mol_type = genomic RNA
agatcctagacaaga

SEQ ID NO: 1530 - RNA, 15 nt, Homo sapiens
  source 1..15: mol_type = genomic RNA
gatcctagacaagag

SEQ ID NO: 1531 - RNA, 15 nt, Homo sapiens
  source 1..15: mol_type = genomic RNA
ttaggtgatcagtgc

SEQ ID NO: 1532 - RNA, 15 nt, Homo sapiens
  source 1..15: mol_type = genomic RNA
agtgatcagtgcaga

SEQ ID NO: 1533 - RNA, 15 nt, Homo sapiens
  source 1..15: mol_type = genomic RNA
aagccccctgtaggc

SEQ ID NO: 1534 - RNA, 15 nt, Homo sapiens
  source 1..15: mol_type = genomic RNA
taggccaaagcctag

SEQ ID NO: 1535 - RNA, 15 nt, Homo sapiens
  source 1..15: mol_type = genomic RNA
aggccaaagcctaga

SEQ ID NO: 1536 - RNA, 15 nt, Homo sapiens
  source 1..15: mol_type = genomic RNA
ggccaaagcctagac

SEQ ID NO: 1537 - RNA, 15 nt, Homo sapiens
  source 1..15: mol_type = genomic RNA
gccaaagcctagaca

SEQ ID NO: 1538 - RNA, 15 nt, Homo sapiens
  source 1..15: mol_type = genomic RNA
ccaaagcctagacaa

SEQ ID NO: 1539 - RNA, 15 nt, Homo sapiens
  source 1..15: mol_type = genomic RNA
aagcctagacaatag

SEQ ID NO: 1540 - RNA, 15 nt, Homo sapiens
  source 1..15: mol_type = genomic RNA
agcctagacaatagt

SEQ ID NO: 1541 - RNA, 15 nt, Homo sapiens
  source 1..15: mol_type = genomic RNA
tacatcacttgggtg

SEQ ID NO: 1542 - RNA, 15 nt, Homo sapiens
  source 1..15: mol_type = genomic RNA
acatcacttgggtga

SEQ ID NO: 1543 - RNA, 15 nt, Homo sapiens
  source 1..15: mol_type = genomic RNA
atcacttgggtgatc

SEQ ID NO: 1544 - RNA, 15 nt, Homo sapiens
  source 1..15: mol_type = genomic RNA
tcacttgggtgatca

SEQ ID NO: 1545 - RNA, 15 nt, Homo sapiens
  source 1..15: mol_type = genomic RNA
cacttgggtgatcag

SEQ ID NO: 1546 - RNA, 15 nt, Homo sapiens
  source 1..15: mol_type = genomic RNA
acttgggtgatcagt

SEQ ID NO: 1547 - RNA, 15 nt, Homo sapiens
  source 1..15: mol_type = genomic RNA
cttgggtgatcagtg

SEQ ID NO: 1548 - RNA, 15 nt, Homo sapiens
  source 1..15: mol_type = genomic RNA
ttgggtgatcagtgg

SEQ ID NO: 1549 - RNA, 15 nt, Homo sapiens
  source 1..15: mol_type = genomic RNA
tgggtgatcagtggc

SEQ ID NO: 1550 - RNA, 15 nt, Homo sapiens
  source 1..15: mol_type = genomic RNA
gggtgatcagtggcg

SEQ ID NO: 1551 - RNA, 15 nt, Homo sapiens
  source 1..15: mol_type = genomic RNA
ggtgatcagtggcga

SEQ ID NO: 1552 - RNA, 15 nt, Homo sapiens
  source 1..15: mol_type = genomic RNA
gtgatcagtggcgag

SEQ ID NO: 1553 - RNA, 15 nt, Homo sapiens
  source 1..15: mol_type = genomic RNA
tgatcagtggcgaga

SEQ ID NO: 1554 - RNA, 15 nt, Homo sapiens
  source 1..15: mol_type = genomic RNA
gatcagtggcgagat

SEQ ID NO: 1555 - RNA, 15 nt, Homo sapiens
  source 1..15: mol_type = genomic RNA
atcagtggcgagatc

SEQ ID NO: 1556 - RNA, 15 nt, Homo sapiens
  source 1..15: mol_type = genomic RNA
tcagtggcgagatct

SEQ ID NO: 1557 - RNA, 15 nt, Homo sapiens
  source 1..15: mol_type = genomic RNA
cagtggcgagatctc

SEQ ID NO: 1558 - RNA, 15 nt, Homo sapiens
  source 1..15: mol_type = genomic RNA
agtggcgagatctct

SEQ ID NO: 1559 - RNA, 15 nt, Homo sapiens
  source 1..15: mol_type = genomic RNA
gtggcgagatctctc

SEQ ID NO: 1560 - RNA, 15 nt, Homo sapiens
  source 1..15: mol_type = genomic RNA
tggcgagatctctca

SEQ ID NO: 1561 - RNA, 15 nt, Homo sapiens
  source 1..15: mol_type = genomic RNA
ggcgagatctctcac

SEQ ID NO: 1562 - RNA, 15 nt, Homo sapiens
  source 1..15: mol_type = genomic RNA
gcgagatctctcaca

SEQ ID NO: 1563 - RNA, 15 nt, Homo sapiens
  source 1..15: mol_type = genomic RNA
aattcccctgtaggc

SEQ ID NO: 1564 - RNA, 15 nt, Homo sapiens
  source 1..15: mol_type = genomic RNA
attcccctgtaggca

SEQ ID NO: 1565 - RNA, 15 nt, Homo sapiens
  source 1..15: mol_type = genomic RNA
ttcccctgtaggcag

SEQ ID NO: 1566 - RNA, 15 nt, Homo sapiens
  source 1..15: mol_type = genomic RNA
gtaggcagagcttat

SEQ ID NO: 1567 - RNA, 15 nt, Homo sapiens
  source 1..15: mol_type = genomic RNA
aggcagagcttatac

SEQ ID NO: 1568 - RNA, 15 nt, Homo sapiens
  source 1..15: mol_type = genomic RNA
ggcagagcttataca

SEQ ID NO: 1569 - RNA, 15 nt, Homo sapiens
  source 1..15: mol_type = genomic RNA
gtcacaatgccccca

SEQ ID NO: 1570 - RNA, 15 nt, Homo sapiens
  source 1..15: mol_type = genomic RNA
tcacaatgcccccat

SEQ ID NO: 1571 - RNA, 15 nt, Homo sapiens
  source 1..15: mol_type = genomic RNA
caatgcccccatagg

SEQ ID NO: 1572 - RNA, 15 nt, Homo sapiens
  source 1..15: mol_type = genomic RNA
aatgcccccataggc

SEQ ID NO: 1573 - RNA, 15 nt, Homo sapiens
  source 1..15: mol_type = genomic RNA
gcagaaatacgtcac

SEQ ID NO: 1574 - RNA, 15 nt, Homo sapiens
  source 1..15: mol_type = genomic RNA
cgtcacaatgccccc

SEQ ID NO: 1575 - RNA, 15 nt, Homo sapiens
  source 1..15: mol_type = genomic RNA
cacaatgccccctta

SEQ ID NO: 1576 - RNA, 15 nt, Homo sapiens
  source 1..15: mol_type = genomic RNA
acaatgcccccttag

SEQ ID NO: 1577 - RNA, 15 nt, Homo sapiens
  source 1..15: mol_type = genomic RNA
caatgcccccttagg

SEQ ID NO: 1578 - RNA, 15 nt, Homo sapiens
  source 1..15: mol_type = genomic RNA
aatgcccccttaggc

SEQ ID NO: 1579 - RNA, 15 nt, Homo sapiens
  source 1..15: mol_type = genomic RNA
atgcccccttaggca

SEQ ID NO: 1580 - RNA, 15 nt, Homo sapiens
  source 1..15: mol_type = genomic RNA
tgcccccttaggcag

SEQ ID NO: 1581 - RNA, 15 nt, Homo sapiens
  source 1..15: mol_type = genomic RNA
gcccccttaggcaga

SEQ ID NO: 1582 - RNA, 15 nt, Homo sapiens
  source 1..15: mol_type = genomic RNA
cccccttaggcagag

SEQ ID NO: 1583 - RNA, 15 nt, Homo sapiens
  source 1..15: mol_type = genomic RNA
ccccttaggcagagc

SEQ ID NO: 1584 - RNA, 15 nt, Homo sapiens
  source 1..15: mol_type = genomic RNA
cccttaggcagagcc

SEQ ID NO: 1585 - RNA, 15 nt, Homo sapiens
  source 1..15: mol_type = genomic RNA
ccttaggcagagcct

SEQ ID NO: 1586 - RNA, 15 nt, Homo sapiens
  source 1..15: mol_type = genomic RNA
cttaggcagagccta

SEQ ID NO: 1587 - RNA, 15 nt, Homo sapiens
  source 1..15: mol_type = genomic RNA
ttaggcagagcctag

SEQ ID NO: 1588 - RNA, 15 nt, Homo sapiens
  source 1..15: mol_type = genomic RNA
cagagcctagacaaa

SEQ ID NO: 1589 - RNA, 15 nt, Homo sapiens
  source 1..15: mol_type = genomic RNA
agagcctagacaaaa

SEQ ID NO: 1590 - RNA, 15 nt, Homo sapiens
  source 1..15: mol_type = genomic RNA
gagcctagacaaaag

SEQ ID NO: 1591 - RNA, 15 nt, Homo sapiens
  source 1..15: mol_type = genomic RNA
agcctagacaaaagc

SEQ ID NO: 1592 - RNA, 15 nt, Homo sapiens
  source 1..15: mol_type = genomic RNA
gcctagacaaaagcc

SEQ ID NO: 1593 - RNA, 15 nt, Homo sapiens
  source 1..15: mol_type = genomic RNA
cctagacaaaagccc

SEQ ID NO: 1594 - RNA, 15 nt, Homo sapiens
  source 1..15: mol_type = genomic RNA
ctagacaaaagcccc

SEQ ID NO: 1595 - RNA, 15 nt, Homo sapiens
  source 1..15: mol_type = genomic RNA
tagacaaaagcccca

SEQ ID NO: 1596 - RNA, 15 nt, Homo sapiens
  source 1..15: mol_type = genomic RNA
agacaaaagccccat

SEQ ID NO: 1597 - RNA, 15 nt, Homo sapiens
  source 1..15: mol_type = genomic RNA
gacaaaagccccatc

SEQ ID NO: 1598 - RNA, 15 nt, Homo sapiens
  source 1..15: mol_type = genomic RNA
acaaaagccccatca

SEQ ID NO: 1599 - RNA, 15 nt, Homo sapiens
  source 1..15: mol_type = genomic RNA
caaaagccccatcac

SEQ ID NO: 1600 - RNA, 15 nt, Homo sapiens
  source 1..15: mol_type = genomic RNA
aaaagccccatcacc

SEQ ID NO: 1601 - RNA, 15 nt, Homo sapiens
  source 1..15: mol_type = genomic RNA
aaagccccatcacct

SEQ ID NO: 1602 - RNA, 15 nt, Homo sapiens
  source 1..15: mol_type = genomic RNA
aagccccatcacctg

SEQ ID NO: 1603 - RNA, 15 nt, Homo sapiens
  source 1..15: mol_type = genomic RNA
agccccatcacctgg

SEQ ID NO: 1604 - RNA, 15 nt, Homo sapiens
  source 1..15: mol_type = genomic RNA
gccccatcacctgga

SEQ ID NO: 1605 - RNA, 15 nt, Homo sapiens
  source 1..15: mol_type = genomic RNA
ccccatcacctggat

SEQ ID NO: 1606 - RNA, 15 nt, Homo sapiens
  source 1..15: mol_type = genomic RNA
cccatcacctggatg

SEQ ID NO: 1607 - RNA, 15 nt, Homo sapiens
  source 1..15: mol_type = genomic RNA
ccatcacctggatga

SEQ ID NO: 1608 - RNA, 15 nt, Homo sapiens
  source 1..15: mol_type = genomic RNA
catcacctggatgat

SEQ ID NO: 1609 - RNA, 15 nt, Homo sapiens
  source 1..15: mol_type = genomic RNA
atgtcacaatgccac

SEQ ID NO: 1610 - RNA, 15 nt, Homo sapiens
  source 1..15: mol_type = genomic RNA
tgtcacaatgccact

SEQ ID NO: 1611 - RNA, 15 nt, Homo sapiens
  source 1..15: mol_type = genomic RNA
gtcacaatgccactg

SEQ ID NO: 1612 - RNA, 15 nt, Homo sapiens
  source 1..15: mol_type = genomic RNA
tcacaatgccactgt

SEQ ID NO: 1613 - RNA, 15 nt, Homo sapiens
  source 1..15: mol_type = genomic RNA
acaatgccactgtag

SEQ ID NO: 1614 - RNA, 15 nt, Homo sapiens
  source 1..15: mol_type = genomic RNA
caatgccactgtagg

SEQ ID NO: 1615 - RNA, 15 nt, Homo sapiens
  source 1..15: mol_type = genomic RNA
aatgccactgtaggc

SEQ ID NO: 1616 - RNA, 15 nt, Homo sapiens
  source 1..15: mol_type = genomic RNA
atgccactgtaggca

SEQ ID NO: 1617 - RNA, 15 nt, Homo sapiens
  source 1..15: mol_type = genomic RNA
tgccactgtaggcag

SEQ ID NO: 1618 - RNA, 15 nt, Homo sapiens
  source 1..15: mol_type = genomic RNA
gccactgtaggcaga

SEQ ID NO: 1619 - RNA, 15 nt, Homo sapiens
  source 1..15: mol_type = genomic RNA
ccactgtaggcagag

SEQ ID NO: 1620 - RNA, 15 nt, Homo sapiens
  source 1..15: mol_type = genomic RNA
cactgtaggcagagc

SEQ ID NO: 1621 - RNA, 15 nt, Homo sapiens
  source 1..15: mol_type = genomic RNA
actgtaggcagagcc

SEQ ID NO: 1622 - RNA, 15 nt, Homo sapiens
  source 1..15: mol_type = genomic RNA
atatgacctaggtga

SEQ ID NO: 1623 - RNA, 15 nt, Homo sapiens
  source 1..15: mol_type = genomic RNA
tatgacctaggtgat

SEQ ID NO: 1624 - RNA, 15 nt, Homo sapiens
  source 1..15: mol_type = genomic RNA
atgacctaggtgatc

SEQ ID NO: 1625 - RNA, 15 nt, Homo sapiens
  source 1..15: mol_type = genomic RNA
tgacctaggtgatca

SEQ ID NO: 1626 - RNA, 15 nt, Homo sapiens
  source 1..15: mol_type = genomic RNA
gacctaggtgatcag

SEQ ID NO: 1627 - RNA, 15 nt, Homo sapiens
  source 1..15: mol_type = genomic RNA
cagtgcagagataca

SEQ ID NO: 1628 - RNA, 15 nt, Homo sapiens
  source 1..15: mol_type = genomic RNA
agtgcagagatacat

SEQ ID NO: 1629 - RNA, 15 nt, Homo sapiens
  source 1..15: mol_type = genomic RNA
gcaatgcccctgtag

SEQ ID NO: 1630 - RNA, 15 nt, Homo sapiens
  source 1..15: mol_type = genomic RNA
ctgtaggcagagccc

SEQ ID NO: 1631 - RNA, 15 nt, Homo sapiens
  source 1..15: mol_type = genomic RNA
tgtaggcagagccct

SEQ ID NO: 1632 - RNA, 15 nt, Homo sapiens
  source 1..15: mol_type = genomic RNA
gtaggcagagccctg

SEQ ID NO: 1633 - RNA, 15 nt, Homo sapiens
  source 1..15: mol_type = genomic RNA
taggcagagccctga

SEQ ID NO: 1634 - RNA, 15 nt, Homo sapiens
  source 1..15: mol_type = genomic RNA
ggcagagccctgaca

SEQ ID NO: 1635 - RNA, 15 nt, Homo sapiens
  source 1..15: mol_type = genomic RNA
gcagagccctgacaa

SEQ ID NO: 1636 - RNA, 15 nt, Homo sapiens
  source 1..15: mol_type = genomic RNA
cagagccctgacaag

SEQ ID NO: 1637 - RNA, 15 nt, Homo sapiens
  source 1..15: mol_type = genomic RNA
agagccctgacaagt

SEQ ID NO: 1638 - RNA, 15 nt, Homo sapiens
  source 1..15: mol_type = genomic RNA
gagccctgacaagtg

SEQ ID NO: 1639 - RNA, 15 nt, Homo sapiens
  source 1..15: mol_type = genomic RNA
agccctgacaagtgg

SEQ ID NO: 1640 - RNA, 15 nt, Homo sapiens
  source 1..15: mol_type = genomic RNA
gccctgacaagtggt

SEQ ID NO: 1641 - RNA, 15 nt, Homo sapiens
  source 1..15: mol_type = genomic RNA
ccctgacaagtggta

SEQ ID NO: 1642 - RNA, 15 nt, Homo sapiens
  source 1..15: mol_type = genomic RNA
cctgacaagtggtac

SEQ ID NO: 1643 - RNA, 15 nt, Homo sapiens
  source 1..15: mol_type = genomic RNA
ctgacaagtggtaca

SEQ ID NO: 1644 - RNA, 15 nt, Homo sapiens
  source 1..15: mol_type = genomic RNA
tgacaagtggtacat

SEQ ID NO: 1645 - RNA, 15 nt, Homo sapiens
  source 1..15: mol_type = genomic RNA
gacaagtggtacatc

SEQ ID NO: 1646 - RNA, 15 nt, Homo sapiens
  source 1..15: mol_type = genomic RNA
aagtggtacatcacc

SEQ ID NO: 1647 - RNA, 15 nt, Homo sapiens
  source 1..15: mol_type = genomic RNA
agtggtacatcacct

SEQ ID NO: 1648 - RNA, 15 nt, Homo sapiens
  source 1..15: mol_type = genomic RNA
gtggtacatcacctg

SEQ ID NO: 1649 - RNA, 15 nt, Homo sapiens
  source 1..15: mol_type = genomic RNA
tggtacatcacctgg

SEQ ID NO: 1650 - RNA, 15 nt, Homo sapiens
  source 1..15: mol_type = genomic RNA
ggtacatcacctggg

SEQ ID NO: 1651 - RNA, 15 nt, Homo sapiens
  source 1..15: mol_type = genomic RNA
gtacatcacctgggt

SEQ ID NO: 1652 - RNA, 15 nt, Homo sapiens
  source 1..15: mol_type = genomic RNA
ggtgatcattgcagg

SEQ ID NO: 1653 - RNA, 15 nt, Homo sapiens
  source 1..15: mol_type = genomic RNA
gtgatcattgcaggg

SEQ ID NO: 1654 - RNA, 15 nt, Homo sapiens
  source 1..15: mol_type = genomic RNA
tgatcattgcaggga

SEQ ID NO: 1655 - RNA, 15 nt, Homo sapiens
  source 1..15: mol_type = genomic RNA
gatcattgcagggat

SEQ ID NO: 1656 - RNA, 15 nt, Homo sapiens
  source 1..15: mol_type = genomic RNA
attgcagggatatgt

SEQ ID NO: 1657 - RNA, 15 nt, Homo sapiens
  source 1..15: mol_type = genomic RNA
ttgcagggatatgtc

SEQ ID NO: 1658 - RNA, 15 nt, Homo sapiens
  source 1..15: mol_type = genomic RNA
tgcagggatatgtca

SEQ ID NO: 1659 - RNA, 15 nt, Homo sapiens
  source 1..15: mol_type = genomic RNA
gcagggatatgtcac

SEQ ID NO: 1660 - RNA, 15 nt, Homo sapiens
  source 1..15: mol_type = genomic RNA
cagggatatgtcaca

SEQ ID NO: 1661 - RNA, 15 nt, Homo sapiens
  source 1..15: mol_type = genomic RNA
agggatatgtcacaa

SEQ ID NO: 1662 - RNA, 15 nt, Homo sapiens
  source 1..15: mol_type = genomic RNA
atgtcacaaagcacc

SEQ ID NO: 1663 - RNA, 15 nt, Homo sapiens
  source 1..15: mol_type = genomic RNA
tgtcacaaagcaccc

SEQ ID NO: 1664 - RNA, 15 nt, Homo sapiens
  source 1..15: mol_type = genomic RNA
gtcacaaagcaccct

SEQ ID NO: 1665 - RNA, 15 nt, Homo sapiens
  source 1..15: mol_type = genomic RNA
tcacaaagcaccctg

SEQ ID NO: 1666 - RNA, 15 nt, Homo sapiens
  source 1..15: mol_type = genomic RNA
cacaaagcaccctgt

SEQ ID NO: 1667 - RNA, 15 nt, Homo sapiens
  source 1..15: mol_type = genomic RNA
acaaagcaccctgta

SEQ ID NO: 1668 - RNA, 15 nt, Homo sapiens
  source 1..15: mol_type = genomic RNA
caaagcaccctgtag

SEQ ID NO: 1669 - RNA, 15 nt, Homo sapiens
  source 1..15: mol_type = genomic RNA
aaagcaccctgtagg

SEQ ID NO: 1670 - RNA, 15 nt, Homo sapiens
  source 1..15: mol_type = genomic RNA
aagcaccctgtaggc

SEQ ID NO: 1671 - RNA, 15 nt, Homo sapiens
  source 1..15: mol_type = genomic RNA
agcaccctgtaggca

SEQ ID NO: 1672 - RNA, 15 nt, Homo sapiens
  source 1..15: mol_type = genomic RNA
gcaccctgtaggcag

SEQ ID NO: 1673 - RNA, 15 nt, Homo sapiens
  source 1..15: mol_type = genomic RNA
caccctgtaggcaga

SEQ ID NO: 1674 - RNA, 15 nt, Homo sapiens
  source 1..15: mol_type = genomic RNA
accctgtaggcagat

SEQ ID NO: 1675 - RNA, 15 nt, Homo sapiens
  source 1..15: mol_type = genomic RNA
agttacatgacctgg

SEQ ID NO: 1676 - RNA, 15 nt, Homo sapiens
  source 1..15: mol_type = genomic RNA
gttacatgacctggg

SEQ ID NO: 1677 - RNA, 15 nt, Homo sapiens
  source 1..15: mol_type = genomic RNA
ttacatgacctgggt

SEQ ID NO: 1678 - RNA, 15 nt, Homo sapiens
  source 1..15: mol_type = genomic RNA
tacatgacctgggtg

SEQ ID NO: 1679 - RNA, 15 nt, Homo sapiens
  source 1..15: mol_type = genomic RNA
acatgacctgggtga

SEQ ID NO: 1680 - RNA, 15 nt, Homo sapiens
  source 1..15: mol_type = genomic RNA
catgacctgggtgat

SEQ ID NO: 1681 - RNA, 15 nt, Homo sapiens
  source 1..15: mol_type = genomic RNA
atgacctgggtgatc

SEQ ID NO: 1682 - RNA, 15 nt, Homo sapiens
  source 1..15: mol_type = genomic RNA
tgacctgggtgatca

SEQ ID NO: 1683 - RNA, 15 nt, Homo sapiens
  source 1..15: mol_type = genomic RNA
gacctgggtgatcag

SEQ ID NO: 1684 - RNA, 15 nt, Homo sapiens
  source 1..15: mol_type = genomic RNA
tacatgacctaggtg

SEQ ID NO: 1685 - RNA, 15 nt, Homo sapiens
  source 1..15: mol_type = genomic RNA
acatgacctaggtga

SEQ ID NO: 1686 - RNA, 15 nt, Homo sapiens
  source 1..15: mol_type = genomic RNA
catgacctaggtgat

SEQ ID NO: 1687 - RNA, 15 nt, Homo sapiens
  source 1..15: mol_type = genomic RNA
gtgcagagatacatc

SEQ ID NO: 1688 - RNA, 15 nt, Homo sapiens
  source 1..15: mol_type = genomic RNA
tgcagagatacatcg

SEQ ID NO: 1689 - RNA, 15 nt, Homo sapiens
  source 1..15: mol_type = genomic RNA
gcagagatacatcgc

SEQ ID NO: 1690 - RNA, 15 nt, Homo sapiens
  source 1..15: mol_type = genomic RNA
atacatcgcaatgcc

SEQ ID NO: 1691 - RNA, 15 nt, Homo sapiens
  source 1..15: mol_type = genomic RNA
tacatcgcaatgccc

SEQ ID NO: 1692 - RNA, 15 nt, Homo sapiens
  source 1..15: mol_type = genomic RNA
acatcgcaatgcccc

SEQ ID NO: 1693 - RNA, 15 nt, Homo sapiens
  source 1..15: mol_type = genomic RNA
catcgcaatgcccct

SEQ ID NO: 1694 - RNA, 15 nt, Homo sapiens
  source 1..15: mol_type = genomic RNA
atcgcaatgcccctg

SEQ ID NO: 1695 - RNA, 15 nt, Homo sapiens
  source 1..15: mol_type = genomic RNA
tcgcaatgcccctgt

SEQ ID NO: 1696 - RNA, 15 nt, Homo sapiens
  source 1..15: mol_type = genomic RNA
cgcaatgcccctgta

SEQ ID NO: 1697 - RNA, 15 nt, Homo sapiens
  source 1..15: mol_type = genomic RNA
tgtaggcagagcctt

SEQ ID NO: 1698 - RNA, 15 nt, Homo sapiens
  source 1..15: mol_type = genomic RNA
gtaggcagagccttg

SEQ ID NO: 1699 - RNA, 15 nt, Homo sapiens
  source 1..15: mol_type = genomic RNA
taggcagagccttga

SEQ ID NO: 1700 - RNA, 15 nt, Homo sapiens
  source 1..15: mol_type = genomic RNA
aggcagagccttgac

SEQ ID NO: 1701 - RNA, 15 nt, Homo sapiens
  source 1..15: mol_type = genomic RNA
ggcagagccttgaca

SEQ ID NO: 1702 - RNA, 15 nt, Homo sapiens
  source 1..15: mol_type = genomic RNA
gcagagccttgacaa

SEQ ID NO: 1703 - RNA, 15 nt, Homo sapiens
  source 1..15: mol_type = genomic RNA
cagagccttgacaag

SEQ ID NO: 1704 - RNA, 15 nt, Homo sapiens
  source 1..15: mol_type = genomic RNA
agagccttgacaagt

SEQ ID NO: 1705 - RNA, 15 nt, Homo sapiens
  source 1..15: mol_type = genomic RNA
gagccttgacaagtg

SEQ ID NO: 1706 - RNA, 15 nt, Homo sapiens
  source 1..15: mol_type = genomic RNA
agccttgacaagtgg

SEQ ID NO: 1707 - RNA, 15 nt, Homo sapiens
  source 1..15: mol_type = genomic RNA
gccttgacaagtggt

SEQ ID NO: 1708 - RNA, 15 nt, Homo sapiens
  source 1..15: mol_type = genomic RNA
caaagcaccctgtaa

SEQ ID NO: 1709 - RNA, 15 nt, Homo sapiens
  source 1..15: mol_type = genomic RNA
aaagcaccctgtaag

SEQ ID NO: 1710 - RNA, 15 nt, Homo sapiens
  source 1..15: mol_type = genomic RNA
aagcaccctgtaagc

SEQ ID NO: 1711 - RNA, 15 nt, Homo sapiens
  source 1..15: mol_type = genomic RNA
agcaccctgtaagca

SEQ ID NO: 1712 - RNA, 15 nt, Homo sapiens
  source 1..15: mol_type = genomic RNA
gcaccctgtaagcag

SEQ ID NO: 1713 - RNA, 15 nt, Homo sapiens
  source 1..15: mol_type = genomic RNA
caccctgtaagcaga

SEQ ID NO: 1714 - RNA, 15 nt, Homo sapiens
  source 1..15: mol_type = genomic RNA
accctgtaagcagat

SEQ ID NO: 1715 - RNA, 15 nt, Homo sapiens
  source 1..15: mol_type = genomic RNA
aagcagatcctagag

SEQ ID NO: 1716 - RNA, 15 nt, Homo sapiens
  source 1..15: mol_type = genomic RNA
agcagatcctagaga

SEQ ID NO: 1717 - RNA, 15 nt, Homo sapiens
  source 1..15: mol_type = genomic RNA
gcagatcctagagaa

SEQ ID NO: 1718 - RNA, 15 nt, Homo sapiens
  source 1..15: mol_type = genomic RNA
agatcctagagaaga

SEQ ID NO: 1719 - RNA, 15 nt, Homo sapiens
  source 1..15: mol_type = genomic RNA
gatcctagagaagag

SEQ ID NO: 1720 - RNA, 15 nt, Homo sapiens
  source 1..15: mol_type = genomic RNA
tatatcacctgggtg

SEQ ID NO: 1721 - RNA, 15 nt, Homo sapiens
  source 1..15: mol_type = genomic RNA
atatcacctgggtga

SEQ ID NO: 1722 - RNA, 15 nt, Homo sapiens
  source 1..15: mol_type = genomic RNA
tatcacctgggtgat

SEQ ID NO: 1723 - RNA, 15 nt, Homo sapiens
  source 1..15: mol_type = genomic RNA
atatgtcacaagccc

SEQ ID NO: 1724 - RNA, 15 nt, Homo sapiens
  source 1..15: mol_type = genomic RNA
tatgtcacaagcccc

SEQ ID NO: 1725 - RNA, 15 nt, Homo sapiens
  source 1..15: mol_type = genomic RNA
atgtcacaagccccc

SEQ ID NO: 1726 - RNA, 15 nt, Homo sapiens
  source 1..15: mol_type = genomic RNA
tgtcacaagccccct

SEQ ID NO: 1727 - RNA, 15 nt, Homo sapiens
  source 1..15: mol_type = genomic RNA
gtcacaagccccctg

SEQ ID NO: 1728 - RNA, 15 nt, Homo sapiens
  source 1..15: mol_type = genomic RNA
tcacaagccccctgt

SEQ ID NO: 1729 - RNA, 15 nt, Homo sapiens
  source 1..15: mol_type = genomic RNA
cacaagccccctgta

SEQ ID NO: 1730 - RNA, 15 nt, Homo sapiens
  source 1..15: mol_type = genomic RNA
acaagccccctgtag

SEQ ID NO: 1731 - RNA, 15 nt, Homo sapiens
  source 1..15: mol_type = genomic RNA
caagccccctgtagg

SEQ ID NO: 1732 - RNA, 15 nt, Homo sapiens
  source 1..15: mol_type = genomic RNA
agccccctgtaggca

SEQ ID NO: 1733 - RNA, 15 nt, Homo sapiens
  source 1..15: mol_type = genomic RNA
gtgtagccagagcct

SEQ ID NO: 1734 - RNA, 15 nt, Homo sapiens
  source 1..15: mol_type = genomic RNA
tgtagccagagccta

SEQ ID NO: 1735 - RNA, 15 nt, Homo sapiens
  source 1..15: mol_type = genomic RNA
gtagccagagcctag

SEQ ID NO: 1736 - RNA, 15 nt, Homo sapiens
  source 1..15: mol_type = genomic RNA
tagccagagcctaga

SEQ ID NO: 1737 - RNA, 15 nt, Homo sapiens
  source 1..15: mol_type = genomic RNA
agccagagcctagac

SEQ ID NO: 1738 - RNA, 15 nt, Homo sapiens
  source 1..15: mol_type = genomic RNA
aagttacagcacctg

SEQ ID NO: 1739 - RNA, 15 nt, Homo sapiens
  source 1..15: mol_type = genomic RNA
agttacagcacctgg

SEQ ID NO: 1740 - RNA, 15 nt, Homo sapiens
  source 1..15: mol_type = genomic RNA
gttacagcacctggg

SEQ ID NO: 1741 - RNA, 15 nt, Homo sapiens
  source 1..15: mol_type = genomic RNA
ttacagcacctggga

SEQ ID NO: 1742 - RNA, 15 nt, Homo sapiens
  source 1..15: mol_type = genomic RNA
tacagcacctgggag

SEQ ID NO: 1743 - RNA, 15 nt, Homo sapiens
  source 1..15: mol_type = genomic RNA
acagcacctgggaga

SEQ ID NO: 1744 - RNA, 15 nt, Homo sapiens
  source 1..15: mol_type = genomic RNA
cagcacctgggagat

SEQ ID NO: 1745 - RNA, 15 nt, Homo sapiens
  source 1..15: mol_type = genomic RNA
agcacctgggagatc

SEQ ID NO: 1746 - RNA, 15 nt, Homo sapiens
  source 1..15: mol_type = genomic RNA
gcacctgggagatca

SEQ ID NO: 1747 - RNA, 15 nt, Homo sapiens
  source 1..15: mol_type = genomic RNA
cacctgggagatcag

SEQ ID NO: 1748 - RNA, 15 nt, Homo sapiens
  source 1..15: mol_type = genomic RNA
acctgggagatcagt

SEQ ID NO: 1749 - RNA, 15 nt, Homo sapiens
  source 1..15: mol_type = genomic RNA
cctgggagatcagtg

SEQ ID NO: 1750 - RNA, 15 nt, Homo sapiens
  source 1..15: mol_type = genomic RNA
ctgggagatcagtgc

SEQ ID NO: 1751 - RNA, 15 nt, Homo sapiens
  source 1..15: mol_type = genomic RNA
tgggagatcagtgca

SEQ ID NO: 1752 - RNA, 15 nt, Homo sapiens
  source 1..15: mol_type = genomic RNA
gggagatcagtgcag

SEQ ID NO: 1753 - RNA, 15 nt, Homo sapiens
  source 1..15: mol_type = genomic RNA
ggagatcagtgcaga

SEQ ID NO: 1754 - RNA, 15 nt, Homo sapiens
  source 1..15: mol_type = genomic RNA
gagatcagtgcagag

SEQ ID NO: 1755 - RNA, 15 nt, Homo sapiens
  source 1..15: mol_type = genomic RNA
agatcagtgcagaga

SEQ ID NO: 1756 - RNA, 15 nt, Homo sapiens
  source 1..15: mol_type = genomic RNA
gtcacaatgtcccca

SEQ ID NO: 1757 - RNA, 15 nt, Homo sapiens
  source 1..15: mol_type = genomic RNA
tcacaatgtccccag

SEQ ID NO: 1758 - RNA, 15 nt, Homo sapiens
  source 1..15: mol_type = genomic RNA
cacaatgtccccagt

SEQ ID NO: 1759 - RNA, 15 nt, Homo sapiens
  source 1..15: mol_type = genomic RNA
acaatgtccccagta

SEQ ID NO: 1760 - RNA, 15 nt, Homo sapiens
  source 1..15: mol_type = genomic RNA
aatgtccccagtagg

SEQ ID NO: 1761 - RNA, 15 nt, Homo sapiens
  source 1..15: mol_type = genomic RNA
atgtccccagtaggc

SEQ ID NO: 1762 - RNA, 15 nt, Homo sapiens
  source 1..15: mol_type = genomic RNA
tgtccccagtaggca

SEQ ID NO: 1763 - RNA, 15 nt, Homo sapiens
  source 1..15: mol_type = genomic RNA
gtccccagtaggcag

SEQ ID NO: 1764 - RNA, 15 nt, Homo sapiens
  source 1..15: mol_type = genomic RNA
tccccagtaggcaga

SEQ ID NO: 1765 - RNA, 15 nt, Homo sapiens
  source 1..15: mol_type = genomic RNA
ccccagtaggcagag

SEQ ID NO: 1766 - RNA, 15 nt, Homo sapiens
  source 1..15: mol_type = genomic RNA
cccagtaggcagaga

SEQ ID NO: 1767 - RNA, 15 nt, Homo sapiens
  source 1..15: mol_type = genomic RNA
ccagtaggcagagac

SEQ ID NO: 1768 - RNA, 15 nt, Homo sapiens
  source 1..15: mol_type = genomic RNA
cagtaggcagagacc

SEQ ID NO: 1769 - RNA, 15 nt, Homo sapiens
  source 1..15: mol_type = genomic RNA
agtaggcagagacca

SEQ ID NO: 1770 - RNA, 15 nt, Homo sapiens
  source 1..15: mol_type = genomic RNA
gtaggcagagaccag

SEQ ID NO: 1771 - RNA, 15 nt, Homo sapiens
  source 1..15: mol_type = genomic RNA
taggcagagaccagg

SEQ ID NO: 1772 - RNA, 15 nt, Homo sapiens
  source 1..15: mol_type = genomic RNA
ggcagagaccaggca

SEQ ID NO: 1773 - RNA, 15 nt, Homo sapiens
  source 1..15: mol_type = genomic RNA
gcagagaccaggcaa

SEQ ID NO: 1774 - RNA, 15 nt, Homo sapiens
  source 1..15: mol_type = genomic RNA
cagagaccaggcaag

SEQ ID NO: 1775 - RNA, 15 nt, Homo sapiens
  source 1..15: mol_type = genomic RNA
agagaccaggcaaga

SEQ ID NO: 1776 - RNA, 15 nt, Homo sapiens
  source 1..15: mol_type = genomic RNA
gagaccaggcaagag

SEQ ID NO: 1777 - RNA, 15 nt, Homo sapiens
  source 1..15: mol_type = genomic RNA
agaccaggcaagagt

SEQ ID NO: 1778 - RNA, 15 nt, Homo sapiens
  source 1..15: mol_type = genomic RNA
gaccaggcaagagtt

SEQ ID NO: 1779 - RNA, 15 nt, Homo sapiens
  source 1..15: mol_type = genomic RNA
accaggcaagagttg

SEQ ID NO: 1780 - RNA, 15 nt, Homo sapiens
  source 1..15: mol_type = genomic RNA
ccaggcaagagttgg

SEQ ID NO: 1781 - RNA, 15 nt, Homo sapiens
  source 1..15: mol_type = genomic RNA
caggcaagagttgga

SEQ ID NO: 1782 - RNA, 15 nt, Homo sapiens
  source 1..15: mol_type = genomic RNA
aggcaagagttggat

SEQ ID NO: 1783 - RNA, 15 nt, Homo sapiens
  source 1..15: mol_type = genomic RNA
ggcaagagttggatc

SEQ ID NO: 1784 - RNA, 15 nt, Homo sapiens
  source 1..15: mol_type = genomic RNA
gcaagagttggatca

SEQ ID NO: 1785 - RNA, 15 nt, Homo sapiens
  source 1..15: mol_type = genomic RNA
aagagttggatcacc

SEQ ID NO: 1786 - RNA, 15 nt, Homo sapiens
  source 1..15: mol_type = genomic RNA
agagttggatcacct

SEQ ID NO: 1787 - RNA, 15 nt, Homo sapiens
  source 1..15: mol_type = genomic RNA
gagttggatcacctc

SEQ ID NO: 1788 - RNA, 15 nt, Homo sapiens
  source 1..15: mol_type = genomic RNA
agttggatcacctcg

SEQ ID NO: 1789 - RNA, 15 nt, Homo sapiens
  source 1..15: mol_type = genomic RNA
gttggatcacctcgg

SEQ ID NO: 1790 - RNA, 15 nt, Homo sapiens
  source 1..15: mol_type = genomic RNA
ttggatcacctcggg

SEQ ID NO: 1791 - RNA, 15 nt, Homo sapiens
  source 1..15: mol_type = genomic RNA
tggatcacctcggga

SEQ ID NO: 1792 - RNA, 15 nt, Homo sapiens
  source 1..15: mol_type = genomic RNA
ggatcacctcgggat

SEQ ID NO: 1793 - RNA, 15 nt, Homo sapiens
  source 1..15: mol_type = genomic RNA
gatcacctcgggatc

SEQ ID NO: 1794 - RNA, 15 nt, Homo sapiens
  source 1..15: mol_type = genomic RNA
atcacctcgggatca

SEQ ID NO: 1795 - RNA, 15 nt, Homo sapiens
  source 1..15: mol_type = genomic RNA
tcacctcgggatcag

SEQ ID NO: 1796 - RNA, 15 nt, Homo sapiens
  source 1..15: mol_type = genomic RNA
cacctcgggatcagt

SEQ ID NO: 1797 - RNA, 15 nt, Homo sapiens
  source 1..15: mol_type = genomic RNA
acctcgggatcagtg

SEQ ID NO: 1798 - RNA, 15 nt, Homo sapiens
  source 1..15: mol_type = genomic RNA
cctcgggatcagtgc

SEQ ID NO: 1799 - RNA, 15 nt, Homo sapiens
  source 1..15: mol_type = genomic RNA
ctcgggatcagtgca

SEQ ID NO: 1800 - RNA, 15 nt, Homo sapiens
  source 1..15: mol_type = genomic RNA
tcgggatcagtgcag

SEQ ID NO: 1801 - RNA, 15 nt, Homo sapiens
  source 1..15: mol_type = genomic RNA
cgggatcagtgcaga

SEQ ID NO: 1802 - RNA, 15 nt, Homo sapiens
  source 1..15: mol_type = genomic RNA
atgtctcaatccccc

SEQ ID NO: 1803 - RNA, 15 nt, Homo sapiens
  source 1..15: mol_type = genomic RNA
tgtctcaatccccct

SEQ ID NO: 1804 - RNA, 15 nt, Homo sapiens
  source 1..15: mol_type = genomic RNA
gtctcaatccccctg

SEQ ID NO: 1805 - RNA, 15 nt, Homo sapiens
  source 1..15: mol_type = genomic RNA
tctcaatccccctgt

SEQ ID NO: 1806 - RNA, 15 nt, Homo sapiens
  source 1..15: mol_type = genomic RNA
ctcaatccccctgtg

SEQ ID NO: 1807 - RNA, 15 nt, Homo sapiens
  source 1..15: mol_type = genomic RNA
tcaatccccctgtgg

SEQ ID NO: 1808 - RNA, 15 nt, Homo sapiens
  source 1..15: mol_type = genomic RNA
caatccccctgtggg

SEQ ID NO: 1809 - RNA, 15 nt, Homo sapiens
  source 1..15: mol_type = genomic RNA
aatccccctgtgggc

SEQ ID NO: 1810 - RNA, 15 nt, Homo sapiens
  source 1..15: mol_type = genomic RNA
atccccctgtgggca

SEQ ID NO: 1811 - RNA, 15 nt, Homo sapiens
  source 1..15: mol_type = genomic RNA
tccccctgtgggcac

SEQ ID NO: 1812 - RNA, 15 nt, Homo sapiens
  source 1..15: mol_type = genomic RNA
ccccctgtgggcaca

SEQ ID NO: 1813 - RNA, 15 nt, Homo sapiens
  source 1..15: mol_type = genomic RNA
cccctgtgggcacag

SEQ ID NO: 1814 - RNA, 15 nt, Homo sapiens
  source 1..15: mol_type = genomic RNA
ccctgtgggcacagc

SEQ ID NO: 1815 - RNA, 15 nt, Homo sapiens
  source 1..15: mol_type = genomic RNA
cctgtgggcacagcc

SEQ ID NO: 1816 - RNA, 15 nt, Homo sapiens
  source 1..15: mol_type = genomic RNA
ctgtgggcacagcct

SEQ ID NO: 1817 - RNA, 15 nt, Homo sapiens
  source 1..15: mol_type = genomic RNA
tgtgggcacagccta

SEQ ID NO: 1818 - RNA, 15 nt, Homo sapiens
  source 1..15: mol_type = genomic RNA
gtgggcacagcctag

SEQ ID NO: 1819 - RNA, 15 nt, Homo sapiens
  source 1..15: mol_type = genomic RNA
tgggcacagcctaga

SEQ ID NO: 1820 - RNA, 15 nt, Homo sapiens
  source 1..15: mol_type = genomic RNA
gggcacagcctagac

SEQ ID NO: 1821 - RNA, 15 nt, Homo sapiens
  source 1..15: mol_type = genomic RNA
ggcacagcctagaca

SEQ ID NO: 1822 - RNA, 15 nt, Homo sapiens
  source 1..15: mol_type = genomic RNA
gcacagcctagacaa

SEQ ID NO: 1823 - RNA, 15 nt, Homo sapiens
  source 1..15: mol_type = genomic RNA
cacagcctagacaag

SEQ ID NO: 1824 - RNA, 15 nt, Homo sapiens
  source 1..15: mol_type = genomic RNA
acagcctagacaaga

SEQ ID NO: 1825 - RNA, 15 nt, Homo sapiens
  source 1..15: mol_type = genomic RNA
cagcctagacaagag

SEQ ID NO: 1826 - RNA, 15 nt, Homo sapiens
  source 1..15: mol_type = genomic RNA
acctcggttaacagt

SEQ ID NO: 1827 - RNA, 15 nt, Homo sapiens
  source 1..15: mol_type = genomic RNA
ctcggttaacagtgc

SEQ ID NO: 1828 - RNA, 15 nt, Homo sapiens
  source 1..15: mol_type = genomic RNA
cggttaacagtgcag

SEQ ID NO: 1829 - RNA, 15 nt, Homo sapiens
  source 1..15: mol_type = genomic RNA
ggttaacagtgcaga

SEQ ID NO: 1830 - RNA, 15 nt, Homo sapiens
  source 1..15: mol_type = genomic RNA
taacagtgcagagat

SEQ ID NO: 1831 - RNA, 15 nt, Homo sapiens
  source 1..15: mol_type = genomic RNA
aacagtgcagagata

SEQ ID NO: 1832 - RNA, 15 nt, Homo sapiens
  source 1..15: mol_type = genomic RNA
acagtgcagagatat

SEQ ID NO: 1833 - RNA, 15 nt, Homo sapiens
  source 1..15: mol_type = genomic RNA
atgtcaaaatgcccc

SEQ ID NO: 1834 - RNA, 15 nt, Homo sapiens
  source 1..15: mol_type = genomic RNA
tgtcaaaatgcccct

SEQ ID NO: 1835 - RNA, 15 nt, Homo sapiens
  source 1..15: mol_type = genomic RNA
gtcaaaatgcccctg

SEQ ID NO: 1836 - RNA, 15 nt, Homo sapiens
  source 1..15: mol_type = genomic RNA
tcaaaatgcccctgt

SEQ ID NO: 1837 - RNA, 15 nt, Homo sapiens
  source 1..15: mol_type = genomic RNA
aaaatgcccctgtag

SEQ ID NO: 1838 - RNA, 15 nt, Homo sapiens
  source 1..15: mol_type = genomic RNA
aaatgcccctgtagg

SEQ ID NO: 1839 - RNA, 15 nt, Homo sapiens
  source 1..15: mol_type = genomic RNA
tgcccctgtaggcaa

SEQ ID NO: 1840 - RNA, 15 nt, Homo sapiens
  source 1..15: mol_type = genomic RNA
gcccctgtaggcaag

SEQ ID NO: 1841 - RNA, 15 nt, Homo sapiens
  source 1..15: mol_type = genomic RNA
cccctgtaggcaagc

SEQ ID NO: 1842 - RNA, 15 nt, Homo sapiens
  source 1..15: mol_type = genomic RNA
ccctgtaggcaagcc

SEQ ID NO: 1843 - RNA, 15 nt, Homo sapiens
  source 1..15: mol_type = genomic RNA
cctgtaggcaagcct

SEQ ID NO: 1844 - RNA, 15 nt, Homo sapiens
  source 1..15: mol_type = genomic RNA
ctgtaggcaagccta

SEQ ID NO: 1845 - RNA, 15 nt, Homo sapiens
  source 1..15: mol_type = genomic RNA
tgtaggcaagcctac

SEQ ID NO: 1846 - RNA, 15 nt, Homo sapiens
  source 1..15: mol_type = genomic RNA
gtaggcaagcctaca

SEQ ID NO: 1847 - RNA, 15 nt, Homo sapiens
  source 1..15: mol_type = genomic RNA
taggcaagcctacac

SEQ ID NO: 1848 - RNA, 15 nt, Homo sapiens
  source 1..15: mol_type = genomic RNA
aggcaagcctacaca

SEQ ID NO: 1849 - RNA, 15 nt, Homo sapiens
  source 1..15: mol_type = genomic RNA
ggcaagcctacacaa

SEQ ID NO: 1850 - RNA, 15 nt, Homo sapiens
  source 1..15: mol_type = genomic RNA
gcaagcctacacaag

SEQ ID NO: 1851 - RNA, 15 nt, Homo sapiens
  source 1..15: mol_type = genomic RNA
caagcctacacaagt

SEQ ID NO: 1852 - RNA, 15 nt, Homo sapiens
  source 1..15: mol_type = genomic RNA
aagcctacacaagta

SEQ ID NO: 1853 - RNA, 15 nt, Homo sapiens
  source 1..15: mol_type = genomic RNA
agcctacacaagtat

SEQ ID NO: 1854 - RNA, 15 nt, Homo sapiens
  source 1..15: mol_type = genomic RNA
atgtcacaatacccc

SEQ ID NO: 1855 - RNA, 15 nt, Homo sapiens
  source 1..15: mol_type = genomic RNA
tgtcacaataccccc

SEQ ID NO: 1856 - RNA, 15 nt, Homo sapiens
  source 1..15: mol_type = genomic RNA
aataccccctgtaag

SEQ ID NO: 1857 - RNA, 15 nt, Homo sapiens
  source 1..15: mol_type = genomic RNA
ataccccctgtaagc

SEQ ID NO: 1858 - RNA, 15 nt, Homo sapiens
  source 1..15: mol_type = genomic RNA
taccccctgtaagca

SEQ ID NO: 1859 - RNA, 15 nt, Homo sapiens
  source 1..15: mol_type = genomic RNA
accccctgtaagcag

SEQ ID NO: 1860 - RNA, 15 nt, Homo sapiens
  source 1..15: mol_type = genomic RNA
cccctgtaagcagag

SEQ ID NO: 1861 - RNA, 15 nt, Homo sapiens
  source 1..15: mol_type = genomic RNA
ccctgtaagcagagc

SEQ ID NO: 1862 - RNA, 15 nt, Homo sapiens
  source 1..15: mol_type = genomic RNA
cctgtaagcagagcc

SEQ ID NO: 1863 - RNA, 15 nt, Homo sapiens
  source 1..15: mol_type = genomic RNA
ctgtaagcagagcct

SEQ ID NO: 1864 - RNA, 15 nt, Homo sapiens
  source 1..15: mol_type = genomic RNA
tgtaagcagagccta

SEQ ID NO: 1865 - RNA, 15 nt, Homo sapiens
  source 1..15: mol_type = genomic RNA
gtaagcagagcctag

SEQ ID NO: 1866 - RNA, 15 nt, Homo sapiens
  source 1..15: mol_type = genomic RNA
taagcagagcctaga

SEQ ID NO: 1867 - RNA, 15 nt, Homo sapiens
  source 1..15: mol_type = genomic RNA
aagcagagcctagac

SEQ ID NO: 1868 - RNA, 15 nt, Homo sapiens
  source 1..15: mol_type = genomic RNA
agcagagcctagaca

SEQ ID NO: 1869 - RNA, 15 nt, Homo sapiens
  source 1..15: mol_type = genomic RNA
gcagagatatgtgac

SEQ ID NO: 1870 - RNA, 15 nt, Homo sapiens
  source 1..15: mol_type = genomic RNA
agatatgtgacaagg

SEQ ID NO: 1871 - RNA, 15 nt, Homo sapiens
  source 1..15: mol_type = genomic RNA
gatatgtgacaaggc

SEQ ID NO: 1872 - RNA, 15 nt, Homo sapiens
  source 1..15: mol_type = genomic RNA
atatgtgacaaggcc

SEQ ID NO: 1873 - RNA, 15 nt, Homo sapiens
  source 1..15: mol_type = genomic RNA
tatgtgacaaggccc

SEQ ID NO: 1874 - RNA, 15 nt, Homo sapiens
  source 1..15: mol_type = genomic RNA
atgtgacaaggcccc

SEQ ID NO: 1875 - RNA, 15 nt, Homo sapiens
  source 1..15: mol_type = genomic RNA
tgtgacaaggcccct

SEQ ID NO: 1876 - RNA, 15 nt, Homo sapiens
  source 1..15: mol_type = genomic RNA
gtgacaaggcccctt

SEQ ID NO: 1877 - RNA, 15 nt, Homo sapiens
  source 1..15: mol_type = genomic RNA
agagcctagacaata

SEQ ID NO: 1878 - RNA, 15 nt, Homo sapiens
  source 1..15: mol_type = genomic RNA
gagcctagacaatag

SEQ ID NO: 1879 - RNA, 15 nt, Homo sapiens
  source 1..15: mol_type = genomic RNA
acatcacctgagtga

SEQ ID NO: 1880 - RNA, 15 nt, Homo sapiens
  source 1..15: mol_type = genomic RNA
atcacctgagtgatc

SEQ ID NO: 1881 - RNA, 15 nt, Homo sapiens
  source 1..15: mol_type = genomic RNA
tcacctgagtgatca

SEQ ID NO: 1882 - RNA, 15 nt, Homo sapiens
  source 1..15: mol_type = genomic RNA
cacctgagtgatcag

SEQ ID NO: 1883 - RNA, 15 nt, Homo sapiens
  source 1..15: mol_type = genomic RNA
acctgagtgatcagt

SEQ ID NO: 1884 - RNA, 15 nt, Homo sapiens
  source 1..15: mol_type = genomic RNA
ctgagtgatcagtgc

SEQ ID NO: 1885 - RNA, 15 nt, Homo sapiens
  source 1..15: mol_type = genomic RNA
tgagtgatcagtgca

SEQ ID NO: 1886 - RNA, 15 nt, Homo sapiens
  source 1..15: mol_type = genomic RNA
gagtgatcagtgcag

SEQ ID NO: 1887 - RNA, 15 nt, Homo sapiens
  source 1..15: mol_type = genomic RNA
atcagtgcagagatc

SEQ ID NO: 1888 - RNA, 15 nt, Homo sapiens
  source 1..15: mol_type = genomic RNA
tcagtgcagagatct

SEQ ID NO: 1889 - RNA, 15 nt, Homo sapiens
  source 1..15: mol_type = genomic RNA
cagtgcagagatctg

SEQ ID NO: 1890 - RNA, 15 nt, Homo sapiens
  source 1..15: mol_type = genomic RNA
agtgcagagatctgt

SEQ ID NO: 1891 - RNA, 15 nt, Homo sapiens
  source 1..15: mol_type = genomic RNA
gtgcagagatctgtc

SEQ ID NO: 1892 - RNA, 15 nt, Homo sapiens
  source 1..15: mol_type = genomic RNA
tgcagagatctgtca

SEQ ID NO: 1893 - RNA, 15 nt, Homo sapiens
  source 1..15: mol_type = genomic RNA
gcagagatctgtcac

SEQ ID NO: 1894 - RNA, 15 nt, Homo sapiens
  source 1..15: mol_type = genomic RNA
gtcacaatgcccctt

SEQ ID NO: 1895 - RNA, 15 nt, Homo sapiens
  source 1..15: mol_type = genomic RNA
aatgcccctttaggc

SEQ ID NO: 1896 - RNA, 15 nt, Homo sapiens
  source 1..15: mol_type = genomic RNA
atgcccctttaggca

SEQ ID NO: 1897 - RNA, 15 nt, Homo sapiens
  source 1..15: mol_type = genomic RNA
tgcccctttaggcag

SEQ ID NO: 1898 - RNA, 15 nt, Homo sapiens
  source 1..15: mol_type = genomic RNA
gcccctttaggcaga

SEQ ID NO: 1899 - RNA, 15 nt, Homo sapiens
  source 1..15: mol_type = genomic RNA
cccctttaggcagag

SEQ ID NO: 1900 - RNA, 15 nt, Homo sapiens
  source 1..15: mol_type = genomic RNA
ccctttaggcagagc

SEQ ID NO: 1901 - RNA, 15 nt, Homo sapiens
  source 1..15: mol_type = genomic RNA
cctttaggcagagct

SEQ ID NO: 1902 - RNA, 15 nt, Homo sapiens
  source 1..15: mol_type = genomic RNA
taggcagagcttaaa

SEQ ID NO: 1903 - RNA, 15 nt, Homo sapiens
  source 1..15: mol_type = genomic RNA
aggcagagcttaaac

SEQ ID NO: 1904 - RNA, 15 nt, Homo sapiens
  source 1..15: mol_type = genomic RNA
aatccaagacaagag

SEQ ID NO: 1905 - RNA, 15 nt, Homo sapiens
  source 1..15: mol_type = genomic RNA
ttaggcagagcttag

SEQ ID NO: 1906 - RNA, 15 nt, Homo sapiens
  source 1..15: mol_type = genomic RNA
ggcagagcttagact

SEQ ID NO: 1907 - RNA, 15 nt, Homo sapiens
  source 1..15: mol_type = genomic RNA
gcagagcttagacta

SEQ ID NO: 1908 - RNA, 15 nt, Homo sapiens
  source 1..15: mol_type = genomic RNA
tgcccccataggcaa

SEQ ID NO: 1909 - RNA, 15 nt, Homo sapiens
  source 1..15: mol_type = genomic RNA
gcccccataggcaaa

SEQ ID NO: 1910 - RNA, 15 nt, Homo sapiens
  source 1..15: mol_type = genomic RNA
cccccataggcaaat

SEQ ID NO: 1911 - RNA, 15 nt, Homo sapiens
  source 1..15: mol_type = genomic RNA
ccccataggcaaatc

SEQ ID NO: 1912 - RNA, 15 nt, Homo sapiens
  source 1..15: mol_type = genomic RNA
cccataggcaaatcc

SEQ ID NO: 1913 - RNA, 15 nt, Homo sapiens
  source 1..15: mol_type = genomic RNA
ccataggcaaatcca

SEQ ID NO: 1914 - RNA, 15 nt, Homo sapiens
  source 1..15: mol_type = genomic RNA
ataggcaaatccaag

SEQ ID NO: 1915 - RNA, 15 nt, Homo sapiens
  source 1..15: mol_type = genomic RNA
taggcaaatccaaga

SEQ ID NO: 1916 - RNA, 15 nt, Homo sapiens
  source 1..15: mol_type = genomic RNA
aggcaaatccaagac

SEQ ID NO: 1917 - RNA, 15 nt, Homo sapiens
  source 1..15: mol_type = genomic RNA
ggcaaatccaagaca

SEQ ID NO: 1918 - RNA, 15 nt, Homo sapiens
  source 1..15: mol_type = genomic RNA
ccaagacaagagtct

SEQ ID NO: 1919 - RNA, 15 nt, Homo sapiens
  source 1..15: mol_type = genomic RNA
ataggcagatccaac

SEQ ID NO: 1920 - RNA, 15 nt, Homo sapiens
  source 1..15: mol_type = genomic RNA
taggcagatccaaca

SEQ ID NO: 1921 - RNA, 15 nt, Homo sapiens
  source 1..15: mol_type = genomic RNA
aggcagatccaacac

SEQ ID NO: 1922 - RNA, 15 nt, Homo sapiens
  source 1..15: mol_type = genomic RNA
ggcagatccaacaca

SEQ ID NO: 1923 - RNA, 15 nt, Homo sapiens
  source 1..15: mol_type = genomic RNA
gcagatccaacacaa

SEQ ID NO: 1924 - RNA, 15 nt, Homo sapiens
  source 1..15: mol_type = genomic RNA
agatccaacacaaga

SEQ ID NO: 1925 - RNA, 15 nt, Homo sapiens
  source 1..15: mol_type = genomic RNA
gatccaacacaagag

SEQ ID NO: 1926 - RNA, 15 nt, Homo sapiens
  source 1..15: mol_type = genomic RNA
atccaacacaagagt

SEQ ID NO: 1927 - RNA, 15 nt, Homo sapiens
  source 1..15: mol_type = genomic RNA
ccatcacctgtgtga

SEQ ID NO: 1928 - RNA, 15 nt, Homo sapiens
  source 1..15: mol_type = genomic RNA
atgtcacaatgcctc

SEQ ID NO: 1929 - RNA, 15 nt, Homo sapiens
  source 1..15: mol_type = genomic RNA
tgtcacaatgcctcc

SEQ ID NO: 1930 - RNA, 15 nt, Homo sapiens
  source 1..15: mol_type = genomic RNA
gtcacaatgcctcct

SEQ ID NO: 1931 - RNA, 15 nt, Homo sapiens
  source 1..15: mol_type = genomic RNA
tcacaatgcctcctg

SEQ ID NO: 1932 - RNA, 15 nt, Homo sapiens
  source 1..15: mol_type = genomic RNA
cacaatgcctcctgt

SEQ ID NO: 1933 - RNA, 15 nt, Homo sapiens
  source 1..15: mol_type = genomic RNA
acaatgcctcctgta

SEQ ID NO: 1934 - RNA, 15 nt, Homo sapiens
  source 1..15: mol_type = genomic RNA
caatgcctcctgtag

SEQ ID NO: 1935 - RNA, 15 nt, Homo sapiens
  source 1..15: mol_type = genomic RNA
aatgcctcctgtagg

SEQ ID NO: 1936 - RNA, 15 nt, Homo sapiens
  source 1..15: mol_type = genomic RNA
atgcctcctgtaggc

SEQ ID NO: 1937 - RNA, 15 nt, Homo sapiens
  source 1..15: mol_type = genomic RNA
tgcctcctgtaggca

SEQ ID NO: 1938 - RNA, 15 nt, Homo sapiens
  source 1..15: mol_type = genomic RNA
tcctgtaggcagagg

SEQ ID NO: 1939 - RNA, 15 nt, Homo sapiens
  source 1..15: mol_type = genomic RNA
cctgtaggcagaggc

SEQ ID NO: 1940 - RNA, 15 nt, Homo sapiens
  source 1..15: mol_type = genomic RNA
ctgtaggcagaggct

SEQ ID NO: 1941 - RNA, 15 nt, Homo sapiens
  source 1..15: mol_type = genomic RNA
tgtaggcagaggcta

SEQ ID NO: 1942 - RNA, 15 nt, Homo sapiens
  source 1..15: mol_type = genomic RNA
gtaggcagaggctaa

SEQ ID NO: 1943 - RNA, 15 nt, Homo sapiens
  source 1..15: mol_type = genomic RNA
taggcagaggctaaa

SEQ ID NO: 1944 - RNA, 15 nt, Homo sapiens
  source 1..15: mol_type = genomic RNA
aggcagaggctaaac

SEQ ID NO: 1945 - RNA, 15 nt, Homo sapiens
  source 1..15: mol_type = genomic RNA
ggcagaggctaaaca

SEQ ID NO: 1946 - RNA, 15 nt, Homo sapiens
  source 1..15: mol_type = genomic RNA
gcagaggctaaacaa

SEQ ID NO: 1947 - RNA, 15 nt, Homo sapiens
  source 1..15: mol_type = genomic RNA
cagaggctaaacaag

SEQ ID NO: 1948 - RNA, 15 nt, Homo sapiens
  source 1..15: mol_type = genomic RNA
agaggctaaacaaga

SEQ ID NO: 1949 - RNA, 15 nt, Homo sapiens
  source 1..15: mol_type = genomic RNA
gaggctaaacaagag

SEQ ID NO: 1950 - RNA, 15 nt, Homo sapiens
  source 1..15: mol_type = genomic RNA
aggctaaacaagagt

SEQ ID NO: 1951 - RNA, 15 nt, Homo sapiens
  source 1..15: mol_type = genomic RNA
aggggttaggcttag

SEQ ID NO: 1952 - RNA, 15 nt, Homo sapiens
  source 1..15: mol_type = genomic RNA
ggggttaggcttagg

SEQ ID NO: 1953 - RNA, 15 nt, Homo sapiens
  source 1..15: mol_type = genomic RNA
gggttaggcttaggc

SEQ ID NO: 1954 - RNA, 15 nt, Homo sapiens
  source 1..15: mol_type = genomic RNA
ggttaggcttaggct

SEQ ID NO: 1955 - RNA, 15 nt, Homo sapiens
  source 1..15: mol_type = genomic RNA
taggcttaggcttag

SEQ ID NO: 1956 - RNA, 15 nt, Homo sapiens
  source 1..15: mol_type = genomic RNA
aggcttaggcttagg

SEQ ID NO: 1957 - RNA, 15 nt, Homo sapiens
  source 1..15: mol_type = genomic RNA
ggcttaggcttaggg

SEQ ID NO: 1958 - RNA, 15 nt, Homo sapiens
  source 1..15: mol_type = genomic RNA
gcttaggcttagggt

SEQ ID NO: 1959 - RNA, 15 nt, Homo sapiens
  source 1..15: mol_type = genomic RNA
taggcttagggttag

SEQ ID NO: 1960 - RNA, 15 nt, Homo sapiens
  source 1..15: mol_type = genomic RNA
aggcttagggttagg

SEQ ID NO: 1961 - RNA, 15 nt, Homo sapiens
  source 1..15: mol_type = genomic RNA
ggcttagggttaggc

SEQ ID NO: 1962 - RNA, 15 nt, Homo sapiens
  source 1..15: mol_type = genomic RNA
gcttagggttaggct

SEQ ID NO: 1963 - RNA, 15 nt, Homo sapiens
  source 1..15: mol_type = genomic RNA
tagggttaggcttag

SEQ ID NO: 1964 - RNA, 15 nt, Homo sapiens
  source 1..15: mol_type = genomic RNA
agggttaggcttagg

SEQ ID NO: 1965 - RNA, 15 nt, Homo sapiens
  source 1..15: mol_type = genomic RNA
taggcttagggtaag

SEQ ID NO: 1966 - RNA, 15 nt, Homo sapiens
  source 1..15: mol_type = genomic RNA
aggcttagggtaagg

SEQ ID NO: 1967 - RNA, 15 nt, Homo sapiens
  source 1..15: mol_type = genomic RNA
ggcttagggtaaggc

SEQ ID NO: 1968 - RNA, 15 nt, Homo sapiens
  source 1..15: mol_type = genomic RNA
gcttagggtaaggct

SEQ ID NO: 1969 - RNA, 15 nt, Homo sapiens
  source 1..15: mol_type = genomic RNA
cttagggtaaggctt

SEQ ID NO: 1970 - RNA, 15 nt, Homo sapiens
  source 1..15: mol_type = genomic RNA
tagggtaaggcttag

SEQ ID NO: 1971 - RNA, 15 nt, Homo sapiens
  source 1..15: mol_type = genomic RNA
agggtaaggcttagg

SEQ ID NO: 1972 - RNA, 15 nt, Homo sapiens
  source 1..15: mol_type = genomic RNA
gggtaaggcttaggg

SEQ ID NO: 1973 - RNA, 15 nt, Homo sapiens
  source 1..15: mol_type = genomic RNA
ggtaaggcttagggt

SEQ ID NO: 1974 - RNA, 15 nt, Homo sapiens
  source 1..15: mol_type = genomic RNA
gtaaggcttagggtt

SEQ ID NO: 1975 - RNA, 15 nt, Homo sapiens
  source 1..15: mol_type = genomic RNA
taaggcttagggttc

SEQ ID NO: 1976 - RNA, 15 nt, Homo sapiens
  source 1..15: mol_type = genomic RNA
aaggcttagggttca

SEQ ID NO: 1977 - RNA, 15 nt, Homo sapiens
  source 1..15: mol_type = genomic RNA
cttcaaagaatggcc

SEQ ID NO: 1978 - RNA, 15 nt, Homo sapiens
  source 1..15: mol_type = genomic RNA
caaagaatggccttg

SEQ ID NO: 1979 - RNA, 15 nt, Homo sapiens
  source 1..15: mol_type = genomic RNA
aaagaatggccttgg

SEQ ID NO: 1980 - RNA, 15 nt, Homo sapiens
  source 1..15: mol_type = genomic RNA
aagaatggccttggt

SEQ ID NO: 1981 - RNA, 15 nt, Homo sapiens
  source 1..15: mol_type = genomic RNA
agaatggccttggtt

SEQ ID NO: 1982 - RNA, 15 nt, Homo sapiens
  source 1..15: mol_type = genomic RNA
ggtttctgtggacag

SEQ ID NO: 1983 - RNA, 15 nt, Homo sapiens
  source 1..15: mol_type = genomic RNA
tctcctcatggaaag

SEQ ID NO: 1984 - RNA, 15 nt, Homo sapiens
  source 1..15: mol_type = genomic RNA
ctcctcatggaaagg

SEQ ID NO: 1985 - RNA, 15 nt, Homo sapiens
  source 1..15: mol_type = genomic RNA
tcctcatggaaaggt

SEQ ID NO: 1986 - RNA, 15 nt, Homo sapiens
  source 1..15: mol_type = genomic RNA
cctcatggaaaggta

SEQ ID NO: 1987 - RNA, 15 nt, Homo sapiens
  source 1..15: mol_type = genomic RNA
ctcatggaaaggtag

SEQ ID NO: 1988 - RNA, 15 nt, Homo sapiens
  source 1..15: mol_type = genomic RNA
tcatggaaaggtagt

SEQ ID NO: 1989 - RNA, 15 nt, Homo sapiens
  source 1..15: mol_type = genomic RNA
catggaaaggtagtg

SEQ ID NO: 1990 - RNA, 15 nt, Homo sapiens
  source 1..15: mol_type = genomic RNA
atggaaaggtagtgt

SEQ ID NO: 1991 - RNA, 15 nt, Homo sapiens
  source 1..15: mol_type = genomic RNA
tggaaaggtagtgtg

SEQ ID NO: 1992 - RNA, 15 nt, Homo sapiens
  source 1..15: mol_type = genomic RNA
ggaaaggtagtgtgt

SEQ ID NO: 1993 - RNA, 15 nt, Homo sapiens
  source 1..15: mol_type = genomic RNA
aatttagctgaggga

SEQ ID NO: 1994 - RNA, 15 nt, Homo sapiens
  source 1..15: mol_type = genomic RNA
atttagctgagggag

SEQ ID NO: 1995 - RNA, 15 nt, Homo sapiens
  source 1..15: mol_type = genomic RNA
tttagctgagggaga

SEQ ID NO: 1996 - RNA, 15 nt, Homo sapiens
  source 1..15: mol_type = genomic RNA
ttagctgagggagat

SEQ ID NO: 1997 - RNA, 15 nt, Homo sapiens
  source 1..15: mol_type = genomic RNA
tagctgagggagatt

SEQ ID NO: 1998 - RNA, 15 nt, Homo sapiens
  source 1..15: mol_type = genomic RNA
agctgagggagattg

SEQ ID NO: 1999 - RNA, 15 nt, Homo sapiens
  source 1..15: mol_type = genomic RNA
gctgagggagattga

SEQ ID NO: 2000 - RNA, 15 nt, Homo sapiens
  source 1..15: mol_type = genomic RNA
ctgagggagattgag

SEQ ID NO: 2001 - RNA, 15 nt, Homo sapiens
  source 1..15: mol_type = genomic RNA
tgagggagattgagt

SEQ ID NO: 2002 - RNA, 15 nt, Homo sapiens
  source 1..15: mol_type = genomic RNA
gagggagattgagtg

SEQ ID NO: 2003 - RNA, 15 nt, Homo sapiens
  source 1..15: mol_type = genomic RNA
agggagattgagtga

SEQ ID NO: 2004 - RNA, 15 nt, Homo sapiens
  source 1..15: mol_type = genomic RNA
gggagattgagtgac

SEQ ID NO: 2005 - RNA, 15 nt, Homo sapiens
  source 1..15: mol_type = genomic RNA
ggagattgagtgact

SEQ ID NO: 2006 - RNA, 15 nt, Homo sapiens
  source 1..15: mol_type = genomic RNA
agtgactttcccagg

SEQ ID NO: 2007 - RNA, 15 nt, Homo sapiens
  source 1..15: mol_type = genomic RNA
gtgactttcccaggg

SEQ ID NO: 2008 - RNA, 15 nt, Homo sapiens
  source 1..15: mol_type = genomic RNA
tgactttcccagggt

SEQ ID NO: 2009 - RNA, 15 nt, Homo sapiens
  source 1..15: mol_type = genomic RNA
gactttcccagggtc

SEQ ID NO: 2010 - RNA, 15 nt, Homo sapiens
  source 1..15: mol_type = genomic RNA
actttcccagggtca

SEQ ID NO: 2011 - RNA, 15 nt, Homo sapiens
  source 1..15: mol_type = genomic RNA
ctttcccagggtcac

SEQ ID NO: 2012 - RNA, 15 nt, Homo sapiens
  source 1..15: mol_type = genomic RNA
tttcccagggtcaca

SEQ ID NO: 2013 - RNA, 15 nt, Homo sapiens
  source 1..15: mol_type = genomic RNA
ttcccagggtcacac

SEQ ID NO: 2014 - RNA, 15 nt, Homo sapiens
  source 1..15: mol_type = genomic RNA
tcccagggtcacaca

SEQ ID NO: 2015 - RNA, 15 nt, Homo sapiens
  source 1..15: mol_type = genomic RNA
cccagggtcacacag

SEQ ID NO: 2016 - RNA, 15 nt, Homo sapiens
  source 1..15: mol_type = genomic RNA
ccagggtcacacagc

SEQ ID NO: 2017 - RNA, 15 nt, Homo sapiens
  source 1..15: mol_type = genomic RNA
cagggtcacacagct

SEQ ID NO: 2018 - RNA, 15 nt, Homo sapiens
  source 1..15: mol_type = genomic RNA
agggtcacacagcta

SEQ ID NO: 2019 - RNA, 15 nt, Homo sapiens
  source 1..15: mol_type = genomic RNA
gggtcacacagctac

SEQ ID NO: 2020 - RNA, 15 nt, Homo sapiens
  source 1..15: mol_type = genomic RNA
ggtcacacagctact

SEQ ID NO: 2021 - RNA, 15 nt, Homo sapiens
  source 1..15: mol_type = genomic RNA
acagctactaatagc

SEQ ID NO: 2022 - RNA, 15 nt, Homo sapiens
  source 1..15: mol_type = genomic RNA
atgggaatactgaac

SEQ ID NO: 2023 - RNA, 15 nt, Homo sapiens
  source 1..15: mol_type = genomic RNA
tgggaatactgaaca

SEQ ID NO: 2024 - RNA, 15 nt, Homo sapiens
  source 1..15: mol_type = genomic RNA
gggaatactgaacac

SEQ ID NO: 2025 - RNA, 15 nt, Homo sapiens
  source 1..15: mol_type = genomic RNA
ggaatactgaacaca

SEQ ID NO: 2026 - RNA, 15 nt, Homo sapiens
  source 1..15: mol_type = genomic RNA
acacagaaatgaacc

SEQ ID NO: 2027 - RNA, 15 nt, Homo sapiens
  source 1..15: mol_type = genomic RNA
gaaatgaaccaatgg

SEQ ID NO: 2028 - RNA, 15 nt, Homo sapiens
  source 1..15: mol_type = genomic RNA
tgaaccaatggaaac

SEQ ID NO: 2029 - RNA, 15 nt, Homo sapiens
  source 1..15: mol_type = genomic RNA
gaaccaatggaaaca

SEQ ID NO: 2030 - RNA, 15 nt, Homo sapiens
  source 1..15: mol_type = genomic RNA
aaccaatggaaacat

SEQ ID NO: 2031 - RNA, 15 nt, Homo sapiens
  source 1..15: mol_type = genomic RNA
accaatggaaacatc

SEQ ID NO: 2032 - RNA, 15 nt, Homo sapiens
  source 1..15: mol_type = genomic RNA
ccaatggaaacatcc

SEQ ID NO: 2033 - RNA, 15 nt, Homo sapiens
  source 1..15: mol_type = genomic RNA
atggaaacatcctac

SEQ ID NO: 2034 - RNA, 15 nt, Homo sapiens
  source 1..15: mol_type = genomic RNA
tggaaacatcctacg

SEQ ID NO: 2035 - RNA, 15 nt, Homo sapiens
  source 1..15: mol_type = genomic RNA
ggaaacatcctacgt

SEQ ID NO: 2036 - RNA, 15 nt, Homo sapiens
  source 1..15: mol_type = genomic RNA
acgttccaaaagcct

SEQ ID NO: 2037 - RNA, 15 nt, Homo sapiens
  source 1..15: mol_type = genomic RNA
tccaaaagcctactc

SEQ ID NO: 2038 - RNA, 15 nt, Homo sapiens
  source 1..15: mol_type = genomic RNA
ccaaaagcctactca

SEQ ID NO: 2039 - RNA, 15 nt, Homo sapiens
  source 1..15: mol_type = genomic RNA
aaagcctactcaagc

SEQ ID NO: 2040 - RNA, 15 nt, Homo sapiens
  source 1..15: mol_type = genomic RNA
aagcctactcaagcc

SEQ ID NO: 2041 - RNA, 15 nt, Homo sapiens
  source 1..15: mol_type = genomic RNA
agcctactcaagcca

SEQ ID NO: 2042 - RNA, 15 nt, Homo sapiens
  source 1..15: mol_type = genomic RNA
gcctactcaagccat

SEQ ID NO: 2043 - RNA, 15 nt, Homo sapiens
  source 1..15: mol_type = genomic RNA
tatgaatggcagaga

SEQ ID NO: 2044 - RNA, 15 nt, Homo sapiens
  source 1..15: mol_type = genomic RNA
atgaatggcagagat

SEQ ID NO: 2045 - RNA, 15 nt, Homo sapiens
  source 1..15: mol_type = genomic RNA
tgaatggcagagatc

SEQ ID NO: 2046 - RNA, 15 nt, Homo sapiens
  source 1..15: mol_type = genomic RNA
gaatggcagagatct

SEQ ID NO: 2047 - RNA, 15 nt, Homo sapiens
  source 1..15: mol_type = genomic RNA
aatggcagagatcta

SEQ ID NO: 2048 - RNA, 15 nt, Homo sapiens
  source 1..15: mol_type = genomic RNA
atggcagagatctac

SEQ ID NO: 2049 - RNA, 15 nt, Homo sapiens
  source 1..15: mol_type = genomic RNA
tggcagagatctaca

SEQ ID NO: 2050 - RNA, 15 nt, Homo sapiens
  source 1..15: mol_type = genomic RNA
ggcagagatctacag

SEQ ID NO: 2051 - RNA, 15 nt, Homo sapiens
  source 1..15: mol_type = genomic RNA
gcagagatctacaga

SEQ ID NO: 2052 - RNA, 15 nt, Homo sapiens
  source 1..15: mol_type = genomic RNA
agaaatgatgctcac

SEQ ID NO: 2053 - RNA, 15 nt, Homo sapiens
  source 1..15: mol_type = genomic RNA
gaaatgatgctcacc

SEQ ID NO: 2054 - RNA, 15 nt, Homo sapiens
  source 1..15: mol_type = genomic RNA
aatgatgctcaccag

SEQ ID NO: 2055 - RNA, 15 nt, Homo sapiens
  source 1..15: mol_type = genomic RNA
atgatgctcaccagc

SEQ ID NO: 2056 - RNA, 15 nt, Homo sapiens
  source 1..15: mol_type = genomic RNA
tgatgctcaccagct

SEQ ID NO: 2057 - RNA, 15 nt, Homo sapiens
  source 1..15: mol_type = genomic RNA
gatgctcaccagctg

SEQ ID NO: 2058 - RNA, 15 nt, Homo sapiens
  source 1..15: mol_type = genomic RNA
atgctcaccagctgg

SEQ ID NO: 2059 - RNA, 15 nt, Homo sapiens
  source 1..15: mol_type = genomic RNA
tactgctaccacccc

SEQ ID NO: 2060 - RNA, 15 nt, Homo sapiens
  source 1..15: mol_type = genomic RNA
actgctaccacccca

SEQ ID NO: 2061 - RNA, 15 nt, Homo sapiens
  source 1..15: mol_type = genomic RNA
ctgctaccaccccac

SEQ ID NO: 2062 - RNA, 15 nt, Homo sapiens
  source 1..15: mol_type = genomic RNA
tgctaccaccccaca

SEQ ID NO: 2063 - RNA, 15 nt, Homo sapiens
  source 1..15: mol_type = genomic RNA
gctaccaccccacaa

SEQ ID NO: 2064 - RNA, 15 nt, Homo sapiens
  source 1..15: mol_type = genomic RNA
ctaccaccccacaac

SEQ ID NO: 2065 - RNA, 15 nt, Homo sapiens
  source 1..15: mol_type = genomic RNA
taccaccccacaacc

SEQ ID NO: 2066 - RNA, 15 nt, Homo sapiens
  source 1..15: mol_type = genomic RNA
accaccccacaaccc

SEQ ID NO: 2067 - RNA, 15 nt, Homo sapiens
  source 1..15: mol_type = genomic RNA
agcatactggacaaa

SEQ ID NO: 2068 - RNA, 15 nt, Homo sapiens
  source 1..15: mol_type = genomic RNA
gcatactggacaaat

SEQ ID NO: 2069 - RNA, 15 nt, Homo sapiens
  source 1..15: mol_type = genomic RNA
actggacaaatgtct

SEQ ID NO: 2070 - RNA, 15 nt, Homo sapiens
  source 1..15: mol_type = genomic RNA
tgtctaagcctcgtg

SEQ ID NO: 2071 - RNA, 15 nt, Homo sapiens
  source 1..15: mol_type = genomic RNA
gtctaagcctcgtgg

SEQ ID NO: 2072 - RNA, 15 nt, Homo sapiens
  source 1..15: mol_type = genomic RNA
tctaagcctcgtggt

SEQ ID NO: 2073 - RNA, 15 nt, Homo sapiens
  source 1..15: mol_type = genomic RNA
aagcctcgtggttag

SEQ ID NO: 2074 - RNA, 15 nt, Homo sapiens
  source 1..15: mol_type = genomic RNA
agcctcgtggttagt

SEQ ID NO: 2075 - RNA, 15 nt, Homo sapiens
  source 1..15: mol_type = genomic RNA
gcctcgtggttagtg

SEQ ID NO: 2076 - RNA, 15 nt, Homo sapiens
  source 1..15: mol_type = genomic RNA
cctcgtggttagtgg

SEQ ID NO: 2077 - RNA, 15 nt, Homo sapiens
  source 1..15: mol_type = genomic RNA
ctcgtggttagtggg

SEQ ID NO: 2078 - RNA, 15 nt, Homo sapiens
  source 1..15: mol_type = genomic RNA
tcgtggttagtgggg

SEQ ID NO: 2079 - RNA, 15 nt, Homo sapiens
  source 1..15: mol_type = genomic RNA
cgtggttagtgggga

SEQ ID NO: 2080 - RNA, 15 nt, Homo sapiens
  source 1..15: mol_type = genomic RNA
gtggttagtggggac

SEQ ID NO: 2081 - RNA, 15 nt, Homo sapiens
  source 1..15: mol_type = genomic RNA
tggttagtggggaca

SEQ ID NO: 2082 - RNA, 15 nt, Homo sapiens
  source 1..15: mol_type = genomic RNA
ggttagtggggacat

SEQ ID NO: 2083 - RNA, 15 nt, Homo sapiens
  source 1..15: mol_type = genomic RNA
gttagtggggacatt

SEQ ID NO: 2084 - RNA, 15 nt, Homo sapiens
  source 1..15: mol_type = genomic RNA
ttagtggggacattg

SEQ ID NO: 2085 - RNA, 15 nt, Homo sapiens
  source 1..15: mol_type = genomic RNA
tagtggggacattgc

SEQ ID NO: 2086 - RNA, 15 nt, Homo sapiens
  source 1..15: mol_type = genomic RNA
agtggggacattgct

SEQ ID NO: 2087 - RNA, 15 nt, Homo sapiens
  source 1..15: mol_type = genomic RNA
gtggggacattgctg

SEQ ID NO: 2088 - RNA, 15 nt, Homo sapiens
  source 1..15: mol_type = genomic RNA
tggggacattgctgg

SEQ ID NO: 2089 - RNA, 15 nt, Homo sapiens
  source 1..15: mol_type = genomic RNA
ggggacattgctggt

SEQ ID NO: 2090 - RNA, 15 nt, Homo sapiens
  source 1..15: mol_type = genomic RNA
gggacattgctggtg

SEQ ID NO: 2091 - RNA, 15 nt, Homo sapiens
  source 1..15: mol_type = genomic RNA
ggacattgctggtgg

SEQ ID NO: 2092 - RNA, 15 nt, Homo sapiens
  source 1..15: mol_type = genomic RNA
gacattgctggtgga

SEQ ID NO: 2093 - RNA, 15 nt, Homo sapiens
  source 1..15: mol_type = genomic RNA
acattgctggtggag

SEQ ID NO: 2094 - RNA, 15 nt, Homo sapiens
  source 1..15: mol_type = genomic RNA
cattgctggtggagt

SEQ ID NO: 2095 - RNA, 15 nt, Homo sapiens
  source 1..15: mol_type = genomic RNA
attgctggtggagtc

SEQ ID NO: 2096 - RNA, 15 nt, Homo sapiens
  source 1..15: mol_type = genomic RNA
ttgctggtggagtct

SEQ ID NO: 2097 - RNA, 15 nt, Homo sapiens
  source 1..15: mol_type = genomic RNA
tgctggtggagtctg

SEQ ID NO: 2098 - RNA, 15 nt, Homo sapiens
  source 1..15: mol_type = genomic RNA
gctggtggagtctga

SEQ ID NO: 2099 - RNA, 15 nt, Homo sapiens
  source 1..15: mol_type = genomic RNA
ctggtggagtctgaa

SEQ ID NO: 2100 - RNA, 15 nt, Homo sapiens
  source 1..15: mol_type = genomic RNA
tggtggagtctgaaa

SEQ ID NO: 2101 - RNA, 15 nt, Homo sapiens
  source 1..15: mol_type = genomic RNA
ggtggagtctgaaat

SEQ ID NO: 2102 - RNA, 15 nt, Homo sapiens
  source 1..15: mol_type = genomic RNA
tgtcatgcagtgact

SEQ ID NO: 2103 - RNA, 15 nt, Homo sapiens
  source 1..15: mol_type = genomic RNA
gtcatgcagtgactc

SEQ ID NO: 2104 - RNA, 15 nt, Homo sapiens
  source 1..15: mol_type = genomic RNA
tcatgcagtgactca

SEQ ID NO: 2105 - RNA, 15 nt, Homo sapiens
  source 1..15: mol_type = genomic RNA
catgcagtgactcac

SEQ ID NO: 2106 - RNA, 15 nt, Homo sapiens
  source 1..15: mol_type = genomic RNA
atgcagtgactcact

SEQ ID NO: 2107 - RNA, 15 nt, Homo sapiens
  source 1..15: mol_type = genomic RNA
tgcagtgactcactc

SEQ ID NO: 2108 - RNA, 15 nt, Homo sapiens
  source 1..15: mol_type = genomic RNA
gcagtgactcactca

SEQ ID NO: 2109 - RNA, 15 nt, Homo sapiens
  source 1..15: mol_type = genomic RNA
agtgactcactcaag

SEQ ID NO: 2110 - RNA, 15 nt, Homo sapiens
  source 1..15: mol_type = genomic RNA
gtgactcactcaagc

SEQ ID NO: 2111 - RNA, 15 nt, Homo sapiens
  source 1..15: mol_type = genomic RNA
tgactcactcaagct

SEQ ID NO: 2112 - RNA, 15 nt, Homo sapiens
  source 1..15: mol_type = genomic RNA
cactcaagcttaggc

SEQ ID NO: 2113 - RNA, 15 nt, Homo sapiens
  source 1..15: mol_type = genomic RNA
actcaagcttaggca

SEQ ID NO: 2114 - RNA, 15 nt, Homo sapiens
  source 1..15: mol_type = genomic RNA
ctcaagcttaggcag

SEQ ID NO: 2115 - RNA, 15 nt, Homo sapiens
  source 1..15: mol_type = genomic RNA
tcaagcttaggcaga

SEQ ID NO: 2116 - RNA, 15 nt, Homo sapiens
  source 1..15: mol_type = genomic RNA
caagcttaggcagat

SEQ ID NO: 2117 - RNA, 15 nt, Homo sapiens
  source 1..15: mol_type = genomic RNA
taggcagatttggtg

SEQ ID NO: 2118 - RNA, 15 nt, Homo sapiens
  source 1..15: mol_type = genomic RNA
aggcagatttggtga

SEQ ID NO: 2119 - RNA, 15 nt, Homo sapiens
  source 1..15: mol_type = genomic RNA
ggcagatttggtgat

SEQ ID NO: 2120 - RNA, 15 nt, Homo sapiens
  source 1..15: mol_type = genomic RNA
atgacacagagatgc

SEQ ID NO: 2121 - RNA, 15 nt, Homo sapiens
  source 1..15: mol_type = genomic RNA
tgacacagagatgca

SEQ ID NO: 2122 - RNA, 15 nt, Homo sapiens
  source 1..15: mol_type = genomic RNA
gacacagagatgcaa

SEQ ID NO: 2123 - RNA, 15 nt, Homo sapiens
  source 1..15: mol_type = genomic RNA
acacagagatgcaaa

SEQ ID NO: 2124 - RNA, 15 nt, Homo sapiens
  source 1..15: mol_type = genomic RNA
cacagagatgcaaag

SEQ ID NO: 2125 - RNA, 15 nt, Homo sapiens
  source 1..15: mol_type = genomic RNA
acagagatgcaaaga

SEQ ID NO: 2126 - RNA, 15 nt, Homo sapiens
  source 1..15: mol_type = genomic RNA
agagatgcaaagaaa

SEQ ID NO: 2127 - RNA, 15 nt, Homo sapiens
  source 1..15: mol_type = genomic RNA
tgttgtagctgacac

SEQ ID NO: 2128 - RNA, 15 nt, Homo sapiens
  source 1..15: mol_type = genomic RNA
ttgtagctgacacac

SEQ ID NO: 2129 - RNA, 15 nt, Homo sapiens
  source 1..15: mol_type = genomic RNA
tgtagctgacacaca

SEQ ID NO: 2130 - RNA, 15 nt, Homo sapiens
  source 1..15: mol_type = genomic RNA
gtagctgacacacac

SEQ ID NO: 2131 - RNA, 15 nt, Homo sapiens
  source 1..15: mol_type = genomic RNA
tagctgacacacaca

SEQ ID NO: 2132 - RNA, 15 nt, Homo sapiens
  source 1..15: mol_type = genomic RNA
agctgacacacacag

SEQ ID NO: 2133 - RNA, 15 nt, Homo sapiens
  source 1..15: mol_type = genomic RNA
gctgacacacacagg

SEQ ID NO: 2134 - RNA, 15 nt, Homo sapiens
  source 1..15: mol_type = genomic RNA
ctgacacacacaggc

SEQ ID NO: 2135 - RNA, 15 nt, Homo sapiens
  source 1..15: mol_type = genomic RNA
tgacacacacaggct

SEQ ID NO: 2136 - RNA, 15 nt, Homo sapiens
  source 1..15: mol_type = genomic RNA
gacacacacaggctg

SEQ ID NO: 2137 - RNA, 15 nt, Homo sapiens
  source 1..15: mol_type = genomic RNA
acacacacaggctgg

SEQ ID NO: 2138 - RNA, 15 nt, Homo sapiens
  source 1..15: mol_type = genomic RNA
cacacacaggctggc

SEQ ID NO: 2139 - RNA, 15 nt, Homo sapiens
  source 1..15: mol_type = genomic RNA
acacacaggctggct

SEQ ID NO: 2140 - RNA, 15 nt, Homo sapiens
  source 1..15: mol_type = genomic RNA
cacacaggctggctc

SEQ ID NO: 2141 - RNA, 15 nt, Homo sapiens
  source 1..15: mol_type = genomic RNA
acacaggctggctct

SEQ ID NO: 2142 - RNA, 15 nt, Homo sapiens
  source 1..15: mol_type = genomic RNA
cacaggctggctctg

SEQ ID NO: 2143 - RNA, 15 nt, Homo sapiens
  source 1..15: mol_type = genomic RNA
acaggctggctctgg

SEQ ID NO: 2144 - RNA, 15 nt, Homo sapiens
  source 1..15: mol_type = genomic RNA
caggctggctctggg

SEQ ID NO: 2145 - RNA, 15 nt, Homo sapiens
  source 1..15: mol_type = genomic RNA
gctggctctgggaga

SEQ ID NO: 2146 - RNA, 15 nt, Homo sapiens
  source 1..15: mol_type = genomic RNA
ctggctctgggagat

SEQ ID NO: 2147 - RNA, 15 nt, Homo sapiens
  source 1..15: mol_type = genomic RNA
tggctctgggagatg

SEQ ID NO: 2148 - RNA, 15 nt, Homo sapiens
  source 1..15: mol_type = genomic RNA
ggctctgggagatgc

SEQ ID NO: 2149 - RNA, 15 nt, Homo sapiens
  source 1..15: mol_type = genomic RNA
gctctgggagatgca

SEQ ID NO: 2150 - RNA, 15 nt, Homo sapiens
  source 1..15: mol_type = genomic RNA
ctctgggagatgcag

SEQ ID NO: 2151 - RNA, 15 nt, Homo sapiens
  source 1..15: mol_type = genomic RNA
tctgggagatgcaga

SEQ ID NO: 2152 - RNA, 15 nt, Homo sapiens
  source 1..15: mol_type = genomic RNA
ctgggagatgcagaa

SEQ ID NO: 2153 - RNA, 15 nt, Homo sapiens
  source 1..15: mol_type = genomic RNA
tgggagatgcagaag

SEQ ID NO: 2154 - RNA, 15 nt, Homo sapiens
  source 1..15: mol_type = genomic RNA
gggagatgcagaagg

SEQ ID NO: 2155 - RNA, 15 nt, Homo sapiens
  source 1..15: mol_type = genomic RNA
ggagatgcagaagga

SEQ ID NO: 2156 - RNA, 15 nt, Homo sapiens
  source 1..15: mol_type = genomic RNA
gagatgcagaaggag

SEQ ID NO: 2157 - RNA, 15 nt, Homo sapiens
  source 1..15: mol_type = genomic RNA
agatgcagaaggagc

SEQ ID NO: 2158 - RNA, 15 nt, Homo sapiens
  source 1..15: mol_type = genomic RNA
gatgcagaaggagca

SEQ ID NO: 2159 - RNA, 15 nt, Homo sapiens
  source 1..15: mol_type = genomic RNA
atgcagaaggagcac

SEQ ID NO: 2160 - RNA, 15 nt, Homo sapiens
  source 1..15: mol_type = genomic RNA
tgcagaaggagcacg

SEQ ID NO: 2161 - RNA, 15 nt, Homo sapiens
  source 1..15: mol_type = genomic RNA
gcagaaggagcacgt

SEQ ID NO: 2162 - RNA, 15 nt, Homo sapiens
  source 1..15: mol_type = genomic RNA
cagaaggagcacgtc

SEQ ID NO: 2163 - RNA, 15 nt, Homo sapiens
  source 1..15: mol_type = genomic RNA
agaaggagcacgtcc

SEQ ID NO: 2164 - RNA, 15 nt, Homo sapiens
  source 1..15: mol_type = genomic RNA
gaaggagcacgtccc

SEQ ID NO: 2165 - RNA, 15 nt, Homo sapiens
  source 1..15: mol_type = genomic RNA
aaggagcacgtcccc

SEQ ID NO: 2166 - RNA, 15 nt, Homo sapiens
  source 1..15: mol_type = genomic RNA
aggagcacgtccccc

SEQ ID NO: 2167 - RNA, 15 nt, Homo sapiens
  source 1..15: mol_type = genomic RNA
ggagcacgtccccca

SEQ ID NO: 2168 - RNA, 15 nt, Homo sapiens
  source 1..15: mol_type = genomic RNA
gagcacgtcccccaa

SEQ ID NO: 2169 - RNA, 15 nt, Homo sapiens
  source 1..15: mol_type = genomic RNA
agcacgtcccccaaa

SEQ ID NO: 2170 - RNA, 15 nt, Homo sapiens
  source 1..15: mol_type = genomic RNA
gcacgtcccccaaaa

SEQ ID NO: 2171 - RNA, 15 nt, Homo sapiens
  source 1..15: mol_type = genomic RNA
cacgtcccccaaaat

SEQ ID NO: 2172 - RNA, 15 nt, Homo sapiens
  source 1..15: mol_type = genomic RNA
acgtcccccaaaatg

SEQ ID NO: 2173 - RNA, 15 nt, Homo sapiens
  source 1..15: mol_type = genomic RNA
cgtcccccaaaatga

SEQ ID NO: 2174 - RNA, 15 nt, Homo sapiens
  source 1..15: mol_type = genomic RNA
gtcccccaaaatgaa

SEQ ID NO: 2175 - RNA, 15 nt, Homo sapiens
  source 1..15: mol_type = genomic RNA
tcccccaaaatgaag

SEQ ID NO: 2176 - RNA, 15 nt, Homo sapiens
  source 1..15: mol_type = genomic RNA
cccccaaaatgaagc

SEQ ID NO: 2177 - RNA, 15 nt, Homo sapiens
  source 1..15: mol_type = genomic RNA
ccccaaaatgaagcc

SEQ ID NO: 2178 - RNA, 15 nt, Homo sapiens
  source 1..15: mol_type = genomic RNA
cccaaaatgaagcca

SEQ ID NO: 2179 - RNA, 15 nt, Homo sapiens
  source 1..15: mol_type = genomic RNA
ccaaaatgaagccag

SEQ ID NO: 2180 - RNA, 15 nt, Homo sapiens
  source 1..15: mol_type = genomic RNA
aaaatgaagccagac

SEQ ID NO: 2181 - RNA, 15 nt, Homo sapiens
  source 1..15: mol_type = genomic RNA
aaatgaagccagaca

SEQ ID NO: 2182 - RNA, 15 nt, Homo sapiens
  source 1..15: mol_type = genomic RNA
aatgaagccagacag

SEQ ID NO: 2183 - RNA, 15 nt, Homo sapiens
  source 1..15: mol_type = genomic RNA
atgaagccagacaga

SEQ ID NO: 2184 - RNA, 15 nt, Homo sapiens
  source 1..15: mol_type = genomic RNA
tgaagccagacagac

SEQ ID NO: 2185 - RNA, 15 nt, Homo sapiens
  source 1..15: mol_type = genomic RNA
gaagccagacagaca

SEQ ID NO: 2186 - RNA, 15 nt, Homo sapiens
  source 1..15: mol_type = genomic RNA
aagccagacagacat

SEQ ID NO: 2187 - RNA, 15 nt, Homo sapiens
  source 1..15: mol_type = genomic RNA
agccagacagacatc

SEQ ID NO: 2188 - RNA, 15 nt, Homo sapiens
  source 1..15: mol_type = genomic RNA
gccagacagacatcc

SEQ ID NO: 2189 - RNA, 15 nt, Homo sapiens
  source 1..15: mol_type = genomic RNA
ccagacagacatcct

SEQ ID NO: 2190 - RNA, 15 nt, Homo sapiens
  source 1..15: mol_type = genomic RNA
atccttaaggaagga

SEQ ID NO: 2191 - RNA, 15 nt, Homo sapiens
  source 1..15: mol_type = genomic RNA
tccttaaggaaggag

SEQ ID NO: 2192 - RNA, 15 nt, Homo sapiens
  source 1..15: mol_type = genomic RNA
ccttaaggaaggagc

SEQ ID NO: 2193 - RNA, 15 nt, Homo sapiens
  source 1..15: mol_type = genomic RNA
cttaaggaaggagca

SEQ ID NO: 2194 - RNA, 15 nt, Homo sapiens
  source 1..15: mol_type = genomic RNA
ttaaggaaggagcaa

SEQ ID NO: 2195 - RNA, 15 nt, Homo sapiens
  source 1..15: mol_type = genomic RNA
taaggaaggagcaaa

SEQ ID NO: 2196 - RNA, 15 nt, Homo sapiens
  source 1..15: mol_type = genomic RNA
aaggaaggagcaaag

SEQ ID NO: 2197 - RNA, 15 nt, Homo sapiens
  source 1..15: mol_type = genomic RNA
aggaaggagcaaagg

SEQ ID NO: 2198 - RNA, 15 nt, Homo sapiens
  source 1..15: mol_type = genomic RNA
ggaaggagcaaaggg

SEQ ID NO: 2199 - RNA, 15 nt, Homo sapiens
  source 1..15: mol_type = genomic RNA
gaaggagcaaagggg

SEQ ID NO: 2200 - RNA, 15 nt, Homo sapiens
  source 1..15: mol_type = genomic RNA
ggagcaaaggggctt

SEQ ID NO: 2201 - RNA, 15 nt, Homo sapiens
  source 1..15: mol_type = genomic RNA
gagcaaaggggcttc

SEQ ID NO: 2202 - RNA, 15 nt, Homo sapiens
  source 1..15: mol_type = genomic RNA
agcaaaggggcttca

SEQ ID NO: 2203 - RNA, 15 nt, Homo sapiens
  source 1..15: mol_type = genomic RNA
gcaaaggggcttcat

SEQ ID NO: 2204 - RNA, 15 nt, Homo sapiens
  source 1..15: mol_type = genomic RNA
caaaggggcttcatc

SEQ ID NO: 2205 - RNA, 15 nt, Homo sapiens
  source 1..15: mol_type = genomic RNA
aaaggggcttcatct

SEQ ID NO: 2206 - RNA, 15 nt, Homo sapiens
  source 1..15: mol_type = genomic RNA
aaggggcttcatctt

SEQ ID NO: 2207 - RNA, 15 nt, Homo sapiens
  source 1..15: mol_type = genomic RNA
aggggcttcatctta

SEQ ID NO: 2208 - RNA, 15 nt, Homo sapiens
  source 1..15: mol_type = genomic RNA
aaagaatgaagaagg

SEQ ID NO: 2209 - RNA, 15 nt, Homo sapiens
  source 1..15: mol_type = genomic RNA
aagaatgaagaaggg

SEQ ID NO: 2210 - RNA, 15 nt, Homo sapiens
  source 1..15: mol_type = genomic RNA
agaatgaagaaggga

SEQ ID NO: 2211 - RNA, 15 nt, Homo sapiens
  source 1..15: mol_type = genomic RNA
gaatgaagaagggat

SEQ ID NO: 2212 - RNA, 15 nt, Homo sapiens
  source 1..15: mol_type = genomic RNA
aatgaagaagggatt

SEQ ID NO: 2213 - RNA, 15 nt, Homo sapiens
  source 1..15: mol_type = genomic RNA
tcatgagagatgtgg

SEQ ID NO: 2214 - RNA, 15 nt, Homo sapiens
  source 1..15: mol_type = genomic RNA
catgagagatgtggc

SEQ ID NO: 2215 - RNA, 15 nt, Homo sapiens
  source 1..15: mol_type = genomic RNA
atgagagatgtggca

SEQ ID NO: 2216 - RNA, 15 nt, Homo sapiens
  source 1..15: mol_type = genomic RNA
tgagagatgtggcag

SEQ ID NO: 2217 - RNA, 15 nt, Homo sapiens
  source 1..15: mol_type = genomic RNA
gagagatgtggcagg

SEQ ID NO: 2218 - RNA, 15 nt, Homo sapiens
  source 1..15: mol_type = genomic RNA
agagatgtggcagga

SEQ ID NO: 2219 - RNA, 15 nt, Homo sapiens
  source 1..15: mol_type = genomic RNA
gagatgtggcaggaa

SEQ ID NO: 2220 - RNA, 15 nt, Homo sapiens
  source 1..15: mol_type = genomic RNA
agatgtggcaggaat

SEQ ID NO: 2221 - RNA, 15 nt, Homo sapiens
  source 1..15: mol_type = genomic RNA
gatgtggcaggaatt

SEQ ID NO: 2222 - RNA, 15 nt, Homo sapiens
  source 1..15: mol_type = genomic RNA
tgtggcaggaatttc

SEQ ID NO: 2223 - RNA, 15 nt, Homo sapiens
  source 1..15: mol_type = genomic RNA
ttcttgagaggcaga

SEQ ID NO: 2224 - RNA, 15 nt, Homo sapiens
  source 1..15: mol_type = genomic RNA
tcttgagaggcagag

SEQ ID NO: 2225 - RNA, 15 nt, Homo sapiens
  source 1..15: mol_type = genomic RNA
cttgagaggcagagg

SEQ ID NO: 2226 - RNA, 15 nt, Homo sapiens
  source 1..15: mol_type = genomic RNA
ttgagaggcagaggg

SEQ ID NO: 2227 - RNA, 15 nt, Homo sapiens
  source 1..15: mol_type = genomic RNA
tgagaggcagaggga

SEQ ID NO: 2228 - RNA, 15 nt, Homo sapiens
  source 1..15: mol_type = genomic RNA
gcagagggagagcat

SEQ ID NO: 2229 - RNA, 15 nt, Homo sapiens
  source 1..15: mol_type = genomic RNA
cagagggagagcatg

SEQ ID NO: 2230 - RNA, 15 nt, Homo sapiens
  source 1..15: mol_type = genomic RNA
agagggagagcatga

SEQ ID NO: 2231 - RNA, 15 nt, Homo sapiens
  source 1..15: mol_type = genomic RNA
gagggagagcatgag

SEQ ID NO: 2232 - RNA, 15 nt, Homo sapiens
  source 1..15: mol_type = genomic RNA
agggagagcatgaga

SEQ ID NO: 2233 - RNA, 15 nt, Homo sapiens
  source 1..15: mol_type = genomic RNA
gggagagcatgagaa

SEQ ID NO: 2234 - RNA, 15 nt, Homo sapiens
  source 1..15: mol_type = genomic RNA
ggagagcatgagaat

SEQ ID NO: 2235 - RNA, 15 nt, Homo sapiens
  source 1..15: mol_type = genomic RNA
gagagcatgagaatg

SEQ ID NO: 2236 - RNA, 15 nt, Homo sapiens
  source 1..15: mol_type = genomic RNA
agagcatgagaatgt

SEQ ID NO: 2237 - RNA, 15 nt, Homo sapiens
  source 1..15: mol_type = genomic RNA
agaatgttaggaagg

SEQ ID NO: 2238 - RNA, 15 nt, Homo sapiens
  source 1..15: mol_type = genomic RNA
gaatgttaggaaggc

SEQ ID NO: 2239 - RNA, 15 nt, Homo sapiens
  source 1..15: mol_type = genomic RNA
aatgttaggaaggca

SEQ ID NO: 2240 - RNA, 15 nt, Homo sapiens
  source 1..15: mol_type = genomic RNA
atgttaggaaggcag

SEQ ID NO: 2241 - RNA, 15 nt, Homo sapiens
  source 1..15: mol_type = genomic RNA
tgttaggaaggcagg

SEQ ID NO: 2242 - RNA, 15 nt, Homo sapiens
  source 1..15: mol_type = genomic RNA
gttaggaaggcagga

SEQ ID NO: 2243 - RNA, 15 nt, Homo sapiens
  source 1..15: mol_type = genomic RNA
ttaggaaggcaggag

SEQ ID NO: 2244 - RNA, 15 nt, Homo sapiens
  source 1..15: mol_type = genomic RNA
taggaaggcaggaga

SEQ ID NO: 2245 - RNA, 15 nt, Homo sapiens
  source 1..15: mol_type = genomic RNA
aggaaggcaggagag

SEQ ID NO: 2246 - RNA, 15 nt, Homo sapiens
  source 1..15: mol_type = genomic RNA
ggaaggcaggagaga

SEQ ID NO: 2247 - RNA, 15 nt, Homo sapiens
  source 1..15: mol_type = genomic RNA
gaaggcaggagagac

SEQ ID NO: 2248 - RNA, 15 nt, Homo sapiens
  source 1..15: mol_type = genomic RNA
aaggcaggagagact

SEQ ID NO: 2249 - RNA, 15 nt, Homo sapiens
  source 1..15: mol_type = genomic RNA
aggcaggagagactc

SEQ ID NO: 2250 - RNA, 15 nt, Homo sapiens
  source 1..15: mol_type = genomic RNA
ggcaggagagactct

SEQ ID NO: 2251 - RNA, 15 nt, Homo sapiens
  source 1..15: mol_type = genomic RNA
gcaggagagactctc

SEQ ID NO: 2252 - RNA, 15 nt, Homo sapiens
  source 1..15: mol_type = genomic RNA
caggagagactctca

SEQ ID NO: 2253 - RNA, 15 nt, Homo sapiens
  source 1..15: mol_type = genomic RNA
aggagagactctcac

SEQ ID NO: 2254 - RNA, 15 nt, Homo sapiens
  source 1..15: mol_type = genomic RNA
ggagagactctcaca

SEQ ID NO: 2255 - RNA, 15 nt, Homo sapiens
  source 1..15: mol_type = genomic RNA
gagagactctcacac

SEQ ID NO: 2256 - RNA, 15 nt, Homo sapiens
  source 1..15: mol_type = genomic RNA
agagactctcacaca

SEQ ID NO: 2257 - RNA, 15 nt, Homo sapiens
  source 1..15: mol_type = genomic RNA
gagactctcacacat

SEQ ID NO: 2258 - RNA, 15 nt, Homo sapiens
  source 1..15: mol_type = genomic RNA
agactctcacacatc

SEQ ID NO: 2259 - RNA, 15 nt, Homo sapiens
  source 1..15: mol_type = genomic RNA
tctcacacatctggg

SEQ ID NO: 2260 - RNA, 15 nt, Homo sapiens
  source 1..15: mol_type = genomic RNA
ctcacacatctggga

SEQ ID NO: 2261 - RNA, 15 nt, Homo sapiens
  source 1..15: mol_type = genomic RNA
tcacacatctgggaa

SEQ ID NO: 2262 - RNA, 15 nt, Homo sapiens
  source 1..15: mol_type = genomic RNA
cacacatctgggaag

SEQ ID NO: 2263 - RNA, 15 nt, Homo sapiens
  source 1..15: mol_type = genomic RNA
acacatctgggaagc

SEQ ID NO: 2264 - RNA, 15 nt, Homo sapiens
  source 1..15: mol_type = genomic RNA
cacatctgggaagct

SEQ ID NO: 2265 - RNA, 15 nt, Homo sapiens
  source 1..15: mol_type = genomic RNA
acatctgggaagctg

SEQ ID NO: 2266 - RNA, 15 nt, Homo sapiens
  source 1..15: mol_type = genomic RNA
catctgggaagctga

SEQ ID NO: 2267 - RNA, 15 nt, Homo sapiens
  source 1..15: mol_type = genomic RNA
atctgggaagctgac

SEQ ID NO: 2268 - RNA, 15 nt, Homo sapiens
  source 1..15: mol_type = genomic RNA
tctgggaagctgaca

SEQ ID NO: 2269 - RNA, 15 nt, Homo sapiens
  source 1..15: mol_type = genomic RNA
ctgggaagctgacaa

SEQ ID NO: 2270 - RNA, 15 nt, Homo sapiens
  source 1..15: mol_type = genomic RNA
tgggaagctgacaat

SEQ ID NO: 2271 - RNA, 15 nt, Homo sapiens
  source 1..15: mol_type = genomic RNA
gggaagctgacaatc

SEQ ID NO: 2272 - RNA, 15 nt, Homo sapiens
  source 1..15: mol_type = genomic RNA
ggaagctgacaatcc

SEQ ID NO: 2273 - RNA, 15 nt, Homo sapiens
  source 1..15: mol_type = genomic RNA
gaagctgacaatcca

SEQ ID NO: 2274 - RNA, 15 nt, Homo sapiens
  source 1..15: mol_type = genomic RNA
aagctgacaatccat

SEQ ID NO: 2275 - RNA, 15 nt, Homo sapiens
  source 1..15: mol_type = genomic RNA
agctgacaatccatc

SEQ ID NO: 2276 - RNA, 15 nt, Homo sapiens
  source 1..15: mol_type = genomic RNA
tgacaatccatcagc

SEQ ID NO: 2277 - RNA, 15 nt, Homo sapiens
  source 1..15: mol_type = genomic RNA
tccatcagcatgtcc

SEQ ID NO: 2278 - RNA, 15 nt, Homo sapiens
  source 1..15: mol_type = genomic RNA
atcagcatgtccagg

SEQ ID NO: 2279 - RNA, 15 nt, Homo sapiens
  source 1..15: mol_type = genomic RNA
tcagcatgtccagga

SEQ ID NO: 2280 - RNA, 15 nt, Homo sapiens
  source 1..15: mol_type = genomic RNA
cagcatgtccaggag

SEQ ID NO: 2281 - RNA, 15 nt, Homo sapiens
  source 1..15: mol_type = genomic RNA
agcatgtccaggagg

SEQ ID NO: 2282 - RNA, 15 nt, Homo sapiens
  source 1..15: mol_type = genomic RNA
gcatgtccaggagga

SEQ ID NO: 2283 - RNA, 15 nt, Homo sapiens
  source 1..15: mol_type = genomic RNA
catgtccaggaggaa

SEQ ID NO: 2284 - RNA, 15 nt, Homo sapiens
  source 1..15: mol_type = genomic RNA
atgtccaggaggaaa

SEQ ID NO: 2285 - RNA, 15 nt, Homo sapiens
  source 1..15: mol_type = genomic RNA
tgtccaggaggaaaa

SEQ ID NO: 2286 - RNA, 15 nt, Homo sapiens
  source 1..15: mol_type = genomic RNA
gtccaggaggaaaat

SEQ ID NO: 2287 - RNA, 15 nt, Homo sapiens
  source 1..15: mol_type = genomic RNA
tccaggaggaaaata

SEQ ID NO: 2288 - RNA, 15 nt, Homo sapiens
  source 1..15: mol_type = genomic RNA
ccaggaggaaaataa

SEQ ID NO: 2289 - RNA, 15 nt, Homo sapiens
  source 1..15: mol_type = genomic RNA
caggaggaaaataag

SEQ ID NO: 2290 - RNA, 15 nt, Homo sapiens
  source 1..15: mol_type = genomic RNA
aggaggaaaataagg

SEQ ID NO: 2291 - RNA, 15 nt, Homo sapiens
  source 1..15: mol_type = genomic RNA
ggaggaaaataagga

SEQ ID NO: 2292 - RNA, 15 nt, Homo sapiens
  source 1..15: mol_type = genomic RNA
gaggaaaataaggag

SEQ ID NO: 2293 - RNA, 15 nt, Homo sapiens
  source 1..15: mol_type = genomic RNA
aggaaaataaggagg

SEQ ID NO: 2294 - RNA, 15 nt, Homo sapiens
  source 1..15: mol_type = genomic RNA
ggaaaataaggagga

SEQ ID NO: 2295 - RNA, 15 nt, Homo sapiens
  source 1..15: mol_type = genomic RNA
gaaaataaggaggag

SEQ ID NO: 2296 - RNA, 15 nt, Homo sapiens
  source 1..15: mol_type = genomic RNA
aaaataaggaggagg

SEQ ID NO: 2297 - RNA, 15 nt, Homo sapiens
  source 1..15: mol_type = genomic RNA
aaataaggaggagga

SEQ ID NO: 2298 - RNA, 15 nt, Homo sapiens
  source 1..15: mol_type = genomic RNA
aataaggaggaggag

SEQ ID NO: 2299 - RNA, 15 nt, Homo sapiens
  source 1..15: mol_type = genomic RNA
ataaggaggaggagc

SEQ ID NO: 2300 - RNA, 15 nt, Homo sapiens
  source 1..15: mol_type = genomic RNA
taaggaggaggagca

SEQ ID NO: 2301 - RNA, 15 nt, Homo sapiens
  source 1..15: mol_type = genomic RNA
aaggaggaggagcag

SEQ ID NO: 2302 - RNA, 15 nt, Homo sapiens
  source 1..15: mol_type = genomic RNA
ggaggaggagcagaa

SEQ ID NO: 2303 - RNA, 15 nt, Homo sapiens
  source 1..15: mol_type = genomic RNA
gaggaggagcagaaa

SEQ ID NO: 2304 - RNA, 15 nt, Homo sapiens
  source 1..15: mol_type = genomic RNA
aggaggagcagaaat

SEQ ID NO: 2305 - RNA, 15 nt, Homo sapiens
  source 1..15: mol_type = genomic RNA
ggaggagcagaaata

SEQ ID NO: 2306 - RNA, 15 nt, Homo sapiens
  source 1..15: mol_type = genomic RNA
gaggagcagaaatag

SEQ ID NO: 2307 - RNA, 15 nt, Homo sapiens
  source 1..15: mol_type = genomic RNA
aggagcagaaataga

SEQ ID NO: 2308 - RNA, 15 nt, Homo sapiens
  source 1..15: mol_type = genomic RNA
ggagcagaaatagat

SEQ ID NO: 2309 - RNA, 15 nt, Homo sapiens
  source 1..15: mol_type = genomic RNA
agaaatagatgaggc

SEQ ID NO: 2310 - RNA, 15 nt, Homo sapiens
  source 1..15: mol_type = genomic RNA
gaaatagatgaggct

SEQ ID NO: 2311 - RNA, 15 nt, Homo sapiens
  source 1..15: mol_type = genomic RNA
aaatagatgaggctg

SEQ ID NO: 2312 - RNA, 15 nt, Homo sapiens
  source 1..15: mol_type = genomic RNA
aatagatgaggctgg

SEQ ID NO: 2313 - RNA, 15 nt, Homo sapiens
  source 1..15: mol_type = genomic RNA
atagatgaggctgga

SEQ ID NO: 2314 - RNA, 15 nt, Homo sapiens
  source 1..15: mol_type = genomic RNA
tagatgaggctggat

SEQ ID NO: 2315 - RNA, 15 nt, Homo sapiens
  source 1..15: mol_type = genomic RNA
agatgaggctggata

SEQ ID NO: 2316 - RNA, 15 nt, Homo sapiens
  source 1..15: mol_type = genomic RNA
gatgaggctggatat

SEQ ID NO: 2317 - RNA, 15 nt, Homo sapiens
  source 1..15: mol_type = genomic RNA
atgaggctggatata

SEQ ID NO: 2318 - RNA, 15 nt, Homo sapiens
  source 1..15: mol_type = genomic RNA
tgaggctggatatag

SEQ ID NO: 2319 - RNA, 15 nt, Homo sapiens
  source 1..15: mol_type = genomic RNA
gaggctggatataga

SEQ ID NO: 2320 - RNA, 15 nt, Homo sapiens
  source 1..15: mol_type = genomic RNA
aggctggatatagaa

SEQ ID NO: 2321 - RNA, 15 nt, Homo sapiens
  source 1..15: mol_type = genomic RNA
ggctggatatagaag

SEQ ID NO: 2322 - RNA, 15 nt, Homo sapiens
  source 1..15: mol_type = genomic RNA
gctggatatagaagc

SEQ ID NO: 2323 - RNA, 15 nt, Homo sapiens
  source 1..15: mol_type = genomic RNA
tggatatagaagcag

SEQ ID NO: 2324 - RNA, 15 nt, Homo sapiens
  source 1..15: mol_type = genomic RNA
ggatatagaagcagg

SEQ ID NO: 2325 - RNA, 15 nt, Homo sapiens
  source 1..15: mol_type = genomic RNA
gatatagaagcaggg

SEQ ID NO: 2326 - RNA, 15 nt, Homo sapiens
  source 1..15: mol_type = genomic RNA
atatagaagcagggc

SEQ ID NO: 2327 - RNA, 15 nt, Homo sapiens
  source 1..15: mol_type = genomic RNA
tatagaagcagggct

SEQ ID NO: 2328 - RNA, 15 nt, Homo sapiens
  source 1..15: mol_type = genomic RNA
atagaagcagggctg

SEQ ID NO: 2329 - RNA, 15 nt, Homo sapiens
  source 1..15: mol_type = genomic RNA
tagaagcagggctga

SEQ ID NO: 2330 - RNA, 15 nt, Homo sapiens
  source 1..15: mol_type = genomic RNA
agaagcagggctgaa

SEQ ID NO: 2331 - RNA, 15 nt, Homo sapiens
  source 1..15: mol_type = genomic RNA
gaagcagggctgaag

SEQ ID NO: 2332 - RNA, 15 nt, Homo sapiens
  source 1..15: mol_type = genomic RNA
aagcagggctgaagc

SEQ ID NO: 2333 - RNA, 15 nt, Homo sapiens
  source 1..15: mol_type = genomic RNA
agcagggctgaagct

SEQ ID NO: 2334 - RNA, 15 nt, Homo sapiens
  source 1..15: mol_type = genomic RNA
gcagggctgaagctg

SEQ ID NO: 2335 - RNA, 15 nt, Homo sapiens
  source 1..15: mol_type = genomic RNA
cagggctgaagctgt

SEQ ID NO: 2336 - RNA, 15 nt, Homo sapiens
  source 1..15: mol_type = genomic RNA
agggctgaagctgtg

SEQ ID NO: 2337 - RNA, 15 nt, Homo sapiens
  source 1..15: mol_type = genomic RNA
gggctgaagctgtgt

SEQ ID NO: 2338 - RNA, 15 nt, Homo sapiens
  source 1..15: mol_type = genomic RNA
ggctgaagctgtgtt

SEQ ID NO: 2339 - RNA, 15 nt, Homo sapiens
  source 1..15: mol_type = genomic RNA
gctgaagctgtgttg

SEQ ID NO: 2340 - RNA, 15 nt, Homo sapiens
  source 1..15: mol_type = genomic RNA
ttctatccagaaggc

SEQ ID NO: 2341 - RNA, 15 nt, Homo sapiens
  source 1..15: mol_type = genomic RNA
tctatccagaaggca

SEQ ID NO: 2342 - RNA, 15 nt, Homo sapiens
  source 1..15: mol_type = genomic RNA
ctatccagaaggcaa

SEQ ID NO: 2343 - RNA, 15 nt, Homo sapiens
  source 1..15: mol_type = genomic RNA
tatccagaaggcaat

SEQ ID NO: 2344 - RNA, 15 nt, Homo sapiens
  source 1..15: mol_type = genomic RNA
atccagaaggcaata

SEQ ID NO: 2345 - RNA, 15 nt, Homo sapiens
  source 1..15: mol_type = genomic RNA
tccagaaggcaatag

SEQ ID NO: 2346 - RNA, 15 nt, Homo sapiens
  source 1..15: mol_type = genomic RNA
ccagaaggcaatagg

SEQ ID NO: 2347 - RNA, 15 nt, Homo sapiens
  source 1..15: mol_type = genomic RNA
cagaaggcaataggt

SEQ ID NO: 2348 - RNA, 15 nt, Homo sapiens
  source 1..15: mol_type = genomic RNA
agaaggcaataggta

SEQ ID NO: 2349 - RNA, 15 nt, Homo sapiens
  source 1..15: mol_type = genomic RNA
ttttctgcaaagggc

SEQ ID NO: 2350 - RNA, 15 nt, Homo sapiens
  source 1..15: mol_type = genomic RNA
tttctgcaaagggct

SEQ ID NO: 2351 - RNA, 15 nt, Homo sapiens
  source 1..15: mol_type = genomic RNA
ttctgcaaagggcta

SEQ ID NO: 2352 - RNA, 15 nt, Homo sapiens
  source 1..15: mol_type = genomic RNA
tctgcaaagggctaa

SEQ ID NO: 2353 - RNA, 15 nt, Homo sapiens
  source 1..15: mol_type = genomic RNA
ctgcaaagggctaaa

SEQ ID NO: 2354 - RNA, 15 nt, Homo sapiens
  source 1..15: mol_type = genomic RNA
tgcaaagggctaaat

SEQ ID NO: 2355 - RNA, 15 nt, Homo sapiens
  source 1..15: mol_type = genomic RNA
gcaaagggctaaatg

SEQ ID NO: 2356 - RNA, 15 nt, Homo sapiens
  source 1..15: mol_type = genomic RNA
caaagggctaaatgt

SEQ ID NO: 2357 - RNA, 15 nt, Homo sapiens
  source 1..15: mol_type = genomic RNA
ttccaagccatatgg

SEQ ID NO: 2358 - RNA, 15 nt, Homo sapiens
  source 1..15: mol_type = genomic RNA
tccaagccatatggt

SEQ ID NO: 2359 - RNA, 15 nt, Homo sapiens
  source 1..15: mol_type = genomic RNA
ccaagccatatggtc

SEQ ID NO: 2360 - RNA, 15 nt, Homo sapiens
  source 1..15: mol_type = genomic RNA
aagccatatggtctc

SEQ ID NO: 2361 - RNA, 15 nt, Homo sapiens
  source 1..15: mol_type = genomic RNA
agccatatggtctct

SEQ ID NO: 2362 - RNA, 15 nt, Homo sapiens
  source 1..15: mol_type = genomic RNA
gccatatggtctctc

SEQ ID NO: 2363 - RNA, 15 nt, Homo sapiens
  source 1..15: mol_type = genomic RNA
tctcaatgactcagc

SEQ ID NO: 2364 - RNA, 15 nt, Homo sapiens
  source 1..15: mol_type = genomic RNA
tcaatgactcagctc

SEQ ID NO: 2365 - RNA, 15 nt, Homo sapiens
  source 1..15: mol_type = genomic RNA
tgactcagctcttcc

SEQ ID NO: 2366 - RNA, 15 nt, Homo sapiens
  source 1..15: mol_type = genomic RNA
taccatgaaagtagc

SEQ ID NO: 2367 - RNA, 15 nt, Homo sapiens
  source 1..15: mol_type = genomic RNA
accatgaaagtagcc

SEQ ID NO: 2368 - RNA, 15 nt, Homo sapiens
  source 1..15: mol_type = genomic RNA
ccatgaaagtagcca

SEQ ID NO: 2369 - RNA, 15 nt, Homo sapiens
  source 1..15: mol_type = genomic RNA
atgaaagtagccaga

SEQ ID NO: 2370 - RNA, 15 nt, Homo sapiens
  source 1..15: mol_type = genomic RNA
tgaaagtagccagag

SEQ ID NO: 2371 - RNA, 15 nt, Homo sapiens
  source 1..15: mol_type = genomic RNA
gaaagtagccagaga

SEQ ID NO: 2372 - RNA, 15 nt, Homo sapiens
  source 1..15: mol_type = genomic RNA
aaagtagccagagac

SEQ ID NO: 2373 - RNA, 15 nt, Homo sapiens
  source 1..15: mol_type = genomic RNA
aacgcagactgtgtc

SEQ ID NO: 2374 - RNA, 15 nt, Homo sapiens
  source 1..15: mol_type = genomic RNA
acgcagactgtgtca

SEQ ID NO: 2375 - RNA, 15 nt, Homo sapiens
  source 1..15: mol_type = genomic RNA
cgcagactgtgtcag

SEQ ID NO: 2376 - RNA, 15 nt, Homo sapiens
  source 1..15: mol_type = genomic RNA
gcagactgtgtcaga

SEQ ID NO: 2377 - RNA, 15 nt, Homo sapiens
  source 1..15: mol_type = genomic RNA
cagactgtgtcagac

SEQ ID NO: 2378 - RNA, 15 nt, Homo sapiens
  source 1..15: mol_type = genomic RNA
agactgtgtcagaca

SEQ ID NO: 2379 - RNA, 15 nt, Homo sapiens
  source 1..15: mol_type = genomic RNA
atgatgtgatggaga

SEQ ID NO: 2380 - RNA, 15 nt, Homo sapiens
  source 1..15: mol_type = genomic RNA
tgatgtgatggagaa

SEQ ID NO: 2381 - RNA, 15 nt, Homo sapiens
  source 1..15: mol_type = genomic RNA
aatggtagagtgaac

SEQ ID NO: 2382 - RNA, 15 nt, Homo sapiens
  source 1..15: mol_type = genomic RNA
atggtagagtgaaca

SEQ ID NO: 2383 - RNA, 15 nt, Homo sapiens
  source 1..15: mol_type = genomic RNA
tggtagagtgaacat

SEQ ID NO: 2384 - RNA, 15 nt, Homo sapiens
  source 1..15: mol_type = genomic RNA
agagtgaacatacac

SEQ ID NO: 2385 - RNA, 15 nt, Homo sapiens
  source 1..15: mol_type = genomic RNA
gtgaacatacactgg

SEQ ID NO: 2386 - RNA, 15 nt, Homo sapiens
  source 1..15: mol_type = genomic RNA
tgaacatacactgga

SEQ ID NO: 2387 - RNA, 15 nt, Homo sapiens
  source 1..15: mol_type = genomic RNA
gaacatacactggaa

SEQ ID NO: 2388 - RNA, 15 nt, Homo sapiens
  source 1..15: mol_type = genomic RNA
tatactgcttgaccc

SEQ ID NO: 2389 - RNA, 15 nt, Homo sapiens
  source 1..15: mol_type = genomic RNA
atactgcttgaccca

SEQ ID NO: 2390 - RNA, 15 nt, Homo sapiens
  source 1..15: mol_type = genomic RNA
tactgcttgacccaa

SEQ ID NO: 2391 - RNA, 15 nt, Homo sapiens
  source 1..15: mol_type = genomic RNA
actgcttgacccaag

SEQ ID NO: 2392 - RNA, 15 nt, Homo sapiens
  source 1..15: mol_type = genomic RNA
ctgcttgacccaagc

SEQ ID NO: 2393 - RNA, 15 nt, Homo sapiens
  source 1..15: mol_type = genomic RNA
tgcttgacccaagct

SEQ ID NO: 2394 - RNA, 15 nt, Homo sapiens
  source 1..15: mol_type = genomic RNA
gcttgacccaagctt

SEQ ID NO: 2395 - RNA, 15 nt, Homo sapiens
  source 1..15: mol_type = genomic RNA
agcaaaaggtagaaa

SEQ ID NO: 2396 - RNA, 15 nt, Homo sapiens
  source 1..15: mol_type = genomic RNA
aaaggtagaaaagac

SEQ ID NO: 2397 - RNA, 15 nt, Homo sapiens
  source 1..15: mol_type = genomic RNA
aaggtagaaaagaca

SEQ ID NO: 2398 - RNA, 15 nt, Homo sapiens
  source 1..15: mol_type = genomic RNA
aggtagaaaagacag

SEQ ID NO: 2399 - RNA, 15 nt, Homo sapiens
  source 1..15: mol_type = genomic RNA
ggtagaaaagacaga

SEQ ID NO: 2400 - RNA, 15 nt, Homo sapiens
  source 1..15: mol_type = genomic RNA
gtcatagctcagggt

SEQ ID NO: 2401 - RNA, 15 nt, Homo sapiens
  source 1..15: mol_type = genomic RNA
tcatagctcagggtg

SEQ ID NO: 2402 - RNA, 15 nt, Homo sapiens
  source 1..15: mol_type = genomic RNA
catagctcagggtgt

SEQ ID NO: 2403 - RNA, 15 nt, Homo sapiens
  source 1..15: mol_type = genomic RNA
atagctcagggtgtt

SEQ ID NO: 2404 - RNA, 15 nt, Homo sapiens
  source 1..15: mol_type = genomic RNA
agctcagggtgtttg

SEQ ID NO: 2405 - RNA, 15 nt, Homo sapiens
  source 1..15: mol_type = genomic RNA
gctcagggtgtttga

SEQ ID NO: 2406 - RNA, 15 nt, Homo sapiens
  source 1..15: mol_type = genomic RNA
ctcagggtgtttgac

SEQ ID NO: 2407 - RNA, 15 nt, Homo sapiens
  source 1..15: mol_type = genomic RNA
tgcttttctgtgggg

SEQ ID NO: 2408 - RNA, 15 nt, Homo sapiens
  source 1..15: mol_type = genomic RNA
gcttttctgtggggt

SEQ ID NO: 2409 - RNA, 15 nt, Homo sapiens
  source 1..15: mol_type = genomic RNA
tttgtcacagcagcc

SEQ ID NO: 2410 - RNA, 15 nt, Homo sapiens
  source 1..15: mol_type = genomic RNA
ttgtcacagcagcct

SEQ ID NO: 2411 - RNA, 15 nt, Homo sapiens
  source 1..15: mol_type = genomic RNA
tgtcacagcagcctt

SEQ ID NO: 2412 - RNA, 15 nt, Homo sapiens
  source 1..15: mol_type = genomic RNA
gtcacagcagccttt

SEQ ID NO: 2413 - RNA, 15 nt, Homo sapiens
  source 1..15: mol_type = genomic RNA
tcacagcagcctttg

SEQ ID NO: 2414 - RNA, 15 nt, Homo sapiens
  source 1..15: mol_type = genomic RNA
cacagcagcctttgt

SEQ ID NO: 2415 - RNA, 15 nt, Homo sapiens
  source 1..15: mol_type = genomic RNA
acagcagcctttgtc

SEQ ID NO: 2416 - RNA, 15 nt, Homo sapiens
  source 1..15: mol_type = genomic RNA
agcagcctttgtcgc

SEQ ID NO: 2417 - RNA, 15 nt, Homo sapiens
  source 1..15: mol_type = genomic RNA
gcagcctttgtcgct

SEQ ID NO: 2418 - RNA, 15 nt, Homo sapiens
  source 1..15: mol_type = genomic RNA
tcgcttcaaacaccg

SEQ ID NO: 2419 - RNA, 15 nt, Homo sapiens
  source 1..15: mol_type = genomic RNA
cgcttcaaacaccgc

SEQ ID NO: 2420 - RNA, 15 nt, Homo sapiens
  source 1..15: mol_type = genomic RNA
gcttcaaacaccgca

SEQ ID NO: 2421 - RNA, 15 nt, Homo sapiens
  source 1..15: mol_type = genomic RNA
tcaaacaccgcaagt

SEQ ID NO: 2422 - RNA, 15 nt, Homo sapiens
  source 1..15: mol_type = genomic RNA
caaacaccgcaagtg

SEQ ID NO: 2423 - RNA, 15 nt, Homo sapiens
  source 1..15: mol_type = genomic RNA
aaacaccgcaagtgt

SEQ ID NO: 2424 - RNA, 15 nt, Homo sapiens
  source 1..15: mol_type = genomic RNA
aacaccgcaagtgtt

SEQ ID NO: 2425 - RNA, 15 nt, Homo sapiens
  source 1..15: mol_type = genomic RNA
acaccgcaagtgttc

SEQ ID NO: 2426 - RNA, 15 nt, Homo sapiens
  source 1..15: mol_type = genomic RNA
atgtctgaaacgtgg

SEQ ID NO: 2427 - RNA, 15 nt, Homo sapiens
  source 1..15: mol_type = genomic RNA
tgtctgaaacgtggt

SEQ ID NO: 2428 - RNA, 15 nt, Homo sapiens
  source 1..15: mol_type = genomic RNA
aaacgtggtatctgg

SEQ ID NO: 2429 - RNA, 15 nt, Homo sapiens
  source 1..15: mol_type = genomic RNA
aacgtggtatctgga

SEQ ID NO: 2430 - RNA, 15 nt, Homo sapiens
  source 1..15: mol_type = genomic RNA
acgtggtatctggag

SEQ ID NO: 2431 - RNA, 15 nt, Homo sapiens
  source 1..15: mol_type = genomic RNA
cgtggtatctggaga

SEQ ID NO: 2432 - RNA, 15 nt, Homo sapiens
  source 1..15: mol_type = genomic RNA
gtggtatctggagag

SEQ ID NO: 2433 - RNA, 15 nt, Homo sapiens
  source 1..15: mol_type = genomic RNA
tggtatctggagagg

SEQ ID NO: 2434 - RNA, 15 nt, Homo sapiens
  source 1..15: mol_type = genomic RNA
ggtatctggagaggt

SEQ ID NO: 2435 - RNA, 15 nt, Homo sapiens
  source 1..15: mol_type = genomic RNA
gtatctggagaggtg

SEQ ID NO: 2436 - RNA, 15 nt, Homo sapiens
  source 1..15: mol_type = genomic RNA
tatctggagaggtga

SEQ ID NO: 2437 - RNA, 15 nt, Homo sapiens
  source 1..15: mol_type = genomic RNA
atctggagaggtgag

SEQ ID NO: 2438 - RNA, 15 nt, Homo sapiens
  source 1..15: mol_type = genomic RNA
tctggagaggtgaga

SEQ ID NO: 2439 - RNA, 15 nt, Homo sapiens
  source 1..15: mol_type = genomic RNA
ctggagaggtgagat

SEQ ID NO: 2440 - RNA, 15 nt, Homo sapiens
  source 1..15: mol_type = genomic RNA
tggagaggtgagatg

SEQ ID NO: 2441 - RNA, 15 nt, Homo sapiens
  source 1..15: mol_type = genomic RNA
ggagaggtgagatgg

SEQ ID NO: 2442 - RNA, 15 nt, Homo sapiens
  source 1..15: mol_type = genomic RNA
gagaggtgagatgga

SEQ ID NO: 2443 - RNA, 15 nt, Homo sapiens
  source 1..15: mol_type = genomic RNA
agaggtgagatggac

SEQ ID NO: 2444 - RNA, 15 nt, Homo sapiens
  source 1..15: mol_type = genomic RNA
gaggtgagatggaca

SEQ ID NO: 2445 - RNA, 15 nt, Homo sapiens
  source 1..15: mol_type = genomic RNA
aggtgagatggacaa

SEQ ID NO: 2446 - RNA, 15 nt, Homo sapiens
  source 1..15: mol_type = genomic RNA
ggtgagatggacaaa

SEQ ID NO: 2447 - RNA, 15 nt, Homo sapiens
  source 1..15: mol_type = genomic RNA
gtgagatggacaaag

SEQ ID NO: 2448 - RNA, 15 nt, Homo sapiens
  source 1..15: mol_type = genomic RNA
tgagatggacaaagg

SEQ ID NO: 2449 - RNA, 15 nt, Homo sapiens
  source 1..15: mol_type = genomic RNA
gagatggacaaagga

SEQ ID NO: 2450 - RNA, 15 nt, Homo sapiens
  source 1..15: mol_type = genomic RNA
agatggacaaaggag

SEQ ID NO: 2451 - RNA, 15 nt, Homo sapiens
  source 1..15: mol_type = genomic RNA
gatggacaaaggagc

SEQ ID NO: 2452 - RNA, 15 nt, Homo sapiens
  source 1..15: mol_type = genomic RNA
atggacaaaggagcc

SEQ ID NO: 2453 - RNA, 15 nt, Homo sapiens
  source 1..15: mol_type = genomic RNA
tggacaaaggagccc

SEQ ID NO: 2454 - RNA, 15 nt, Homo sapiens
  source 1..15: mol_type = genomic RNA
ggacaaaggagccct

SEQ ID NO: 2455 - RNA, 15 nt, Homo sapiens
  source 1..15: mol_type = genomic RNA
gacaaaggagccctt

SEQ ID NO: 2456 - RNA, 15 nt, Homo sapiens
  source 1..15: mol_type = genomic RNA
acaaaggagcccttg

SEQ ID NO: 2457 - RNA, 15 nt, Homo sapiens
  source 1..15: mol_type = genomic RNA
caaaggagcccttgt

SEQ ID NO: 2458 - RNA, 15 nt, Homo sapiens
  source 1..15: mol_type = genomic RNA
aaaggagcccttgtt

SEQ ID NO: 2459 - RNA, 15 nt, Homo sapiens
  source 1..15: mol_type = genomic RNA
aaggagcccttgtta

SEQ ID NO: 2460 - RNA, 15 nt, Homo sapiens
  source 1..15: mol_type = genomic RNA
aggagcccttgttac

SEQ ID NO: 2461 - RNA, 15 nt, Homo sapiens
  source 1..15: mol_type = genomic RNA
ggagcccttgttact

SEQ ID NO: 2462 - RNA, 15 nt, Homo sapiens
  source 1..15: mol_type = genomic RNA
agcccttgttactgc

SEQ ID NO: 2463 - RNA, 15 nt, Homo sapiens
  source 1..15: mol_type = genomic RNA
tcaccttgcacacag

SEQ ID NO: 2464 - RNA, 15 nt, Homo sapiens
  source 1..15: mol_type = genomic RNA
aacagacaatgcaca

SEQ ID NO: 2465 - RNA, 15 nt, Homo sapiens
  source 1..15: mol_type = genomic RNA
acagacaatgcacaa

SEQ ID NO: 2466 - RNA, 15 nt, Homo sapiens
  source 1..15: mol_type = genomic RNA
acaatgcacaaatcc

SEQ ID NO: 2467 - RNA, 15 nt, Homo sapiens
  source 1..15: mol_type = genomic RNA
aatgcacaaatccac

SEQ ID NO: 2468 - RNA, 15 nt, Homo sapiens
  source 1..15: mol_type = genomic RNA
tccttatggacggaa

SEQ ID NO: 2469 - RNA, 15 nt, Homo sapiens
  source 1..15: mol_type = genomic RNA
ccttatggacggaaa

SEQ ID NO: 2470 - RNA, 15 nt, Homo sapiens
  source 1..15: mol_type = genomic RNA
atggacggaaattct

SEQ ID NO: 2471 - RNA, 15 nt, Homo sapiens
  source 1..15: mol_type = genomic RNA
tggacggaaattctg

SEQ ID NO: 2472 - RNA, 15 nt, Homo sapiens
  source 1..15: mol_type = genomic RNA
ggacggaaattctga

SEQ ID NO: 2473 - RNA, 15 nt, Homo sapiens
  source 1..15: mol_type = genomic RNA
tatgcctggcctttc

SEQ ID NO: 2474 - RNA, 15 nt, Homo sapiens
  source 1..15: mol_type = genomic RNA
atgcctggcctttcc

SEQ ID NO: 2475 - RNA, 15 nt, Homo sapiens
  source 1..15: mol_type = genomic RNA
tgcctggcctttcca

SEQ ID NO: 2476 - RNA, 15 nt, Homo sapiens
  source 1..15: mol_type = genomic RNA
gcctggcctttccat

SEQ ID NO: 2477 - RNA, 15 nt, Homo sapiens
  source 1..15: mol_type = genomic RNA
cctggcctttccatc

SEQ ID NO: 2478 - RNA, 15 nt, Homo sapiens
  source 1..15: mol_type = genomic RNA
ctggcctttccatcc

SEQ ID NO: 2479 - RNA, 15 nt, Homo sapiens
  source 1..15: mol_type = genomic RNA
tggcctttccatcct

SEQ ID NO: 2480 - RNA, 15 nt, Homo sapiens
  source 1..15: mol_type = genomic RNA
tcccctttcccatgc

SEQ ID NO: 2481 - RNA, 15 nt, Homo sapiens
  source 1..15: mol_type = genomic RNA
cccctttcccatgct

SEQ ID NO: 2482 - RNA, 15 nt, Homo sapiens
  source 1..15: mol_type = genomic RNA
tcccatgctgtgaat

SEQ ID NO: 2483 - RNA, 15 nt, Homo sapiens
  source 1..15: mol_type = genomic RNA
cccatgctgtgaatg

SEQ ID NO: 2484 - RNA, 15 nt, Homo sapiens
  source 1..15: mol_type = genomic RNA
aatctcagtgacagg

SEQ ID NO: 2485 - RNA, 15 nt, Homo sapiens
  source 1..15: mol_type = genomic RNA
atctcagtgacaggg

SEQ ID NO: 2486 - RNA, 15 nt, Homo sapiens
  source 1..15: mol_type = genomic RNA
tctcagtgacagggg

SEQ ID NO: 2487 - RNA, 15 nt, Homo sapiens
  source 1..15: mol_type = genomic RNA
ctcagtgacagggga

SEQ ID NO: 2488 - RNA, 15 nt, Homo sapiens
  source 1..15: mol_type = genomic RNA
tcagtgacaggggaa

SEQ ID NO: 2489 - RNA, 15 nt, Homo sapiens
  source 1..15: mol_type = genomic RNA
cagtgacaggggaac

SEQ ID NO: 2490 - RNA, 15 nt, Homo sapiens
  source 1..15: mol_type = genomic RNA
agtgacaggggaaca

SEQ ID NO: 2491 - RNA, 15 nt, Homo sapiens
  source 1..15: mol_type = genomic RNA
gtgacaggggaacac

SEQ ID NO: 2492 - RNA, 15 nt, Homo sapiens
  source 1..15: mol_type = genomic RNA
tgacaggggaacaca

SEQ ID NO: 2493 - RNA, 15 nt, Homo sapiens
  source 1..15: mol_type = genomic RNA
gacaggggaacacag

SEQ ID NO: 2494 - RNA, 15 nt, Homo sapiens
  source 1..15: mol_type = genomic RNA
acaggggaacacagg

SEQ ID NO: 2495 - RNA, 15 nt, Homo sapiens
  source 1..15: mol_type = genomic RNA
caggggaacacaggt

SEQ ID NO: 2496 - RNA, 15 nt, Homo sapiens
  source 1..15: mol_type = genomic RNA
aggggaacacaggta

SEQ ID NO: 2497 - RNA, 15 nt, Homo sapiens
  source 1..15: mol_type = genomic RNA
ggggaacacaggtag

SEQ ID NO: 2498 - RNA, 15 nt, Homo sapiens
  source 1..15: mol_type = genomic RNA
gggaacacaggtagc

SEQ ID NO: 2499 - RNA, 15 nt, Homo sapiens
  source 1..15: mol_type = genomic RNA
ggaacacaggtagct

SEQ ID NO: 2500 - RNA, 15 nt, Homo sapiens
  source 1..15: mol_type = genomic RNA
gaacacaggtagctc

SEQ ID NO: 2501 - RNA, 15 nt, Homo sapiens
  source 1..15: mol_type = genomic RNA
aacacaggtagctct

SEQ ID NO: 2502 - RNA, 15 nt, Homo sapiens
  source 1..15: mol_type = genomic RNA
acacaggtagctcta

SEQ ID NO: 2503 - RNA, 15 nt, Homo sapiens
  source 1..15: mol_type = genomic RNA
cacaggtagctctaa

SEQ ID NO: 2504 - RNA, 15 nt, Homo sapiens
  source 1..15: mol_type = genomic RNA
acaggtagctctaat

SEQ ID NO: 2505 - RNA, 15 nt, Homo sapiens
  source 1..15: mol_type = genomic RNA
atagctgtgactgag

SEQ ID NO: 2506 - RNA, 15 nt, Homo sapiens
  source 1..15: mol_type = genomic RNA
tagctgtgactgaga

SEQ ID NO: 2507 - RNA, 15 nt, Homo sapiens
  source 1..15: mol_type = genomic RNA
ccactgcattctagg

SEQ ID NO: 2508 - RNA, 15 nt, Homo sapiens
  source 1..15: mol_type = genomic RNA
taggaacagtaagag

SEQ ID NO: 2509 - RNA, 15 nt, Homo sapiens
  source 1..15: mol_type = genomic RNA
aggaacagtaagagg

SEQ ID NO: 2510 - RNA, 15 nt, Homo sapiens
  source 1..15: mol_type = genomic RNA
ggaacagtaagagga

SEQ ID NO: 2511 - RNA, 15 nt, Homo sapiens
  source 1..15: mol_type = genomic RNA
gaacagtaagaggac

SEQ ID NO: 2512 - RNA, 15 nt, Homo sapiens
  source 1..15: mol_type = genomic RNA
aacagtaagaggacc

SEQ ID NO: 2513 - RNA, 15 nt, Homo sapiens
  source 1..15: mol_type = genomic RNA
acagtaagaggacct

SEQ ID NO: 2514 - RNA, 15 nt, Homo sapiens
  source 1..15: mol_type = genomic RNA
cagtaagaggacctt

SEQ ID NO: 2515 - RNA, 15 nt, Homo sapiens
  source 1..15: mol_type = genomic RNA
agtaagaggaccttg

SEQ ID NO: 2516 - RNA, 15 nt, Homo sapiens
  source 1..15: mol_type = genomic RNA
gtaagaggaccttgt

SEQ ID NO: 2517 - RNA, 15 nt, Homo sapiens
  source 1..15: mol_type = genomic RNA
taagaggaccttgtg

SEQ ID NO: 2518 - RNA, 15 nt, Homo sapiens
  source 1..15: mol_type = genomic RNA
aagaggaccttgtga

SEQ ID NO: 2519 - RNA, 15 nt, Homo sapiens
  source 1..15: mol_type = genomic RNA
agaggaccttgtgag

SEQ ID NO: 2520 - RNA, 15 nt, Homo sapiens
  source 1..15: mol_type = genomic RNA
gaggaccttgtgagt

SEQ ID NO: 2521 - RNA, 15 nt, Homo sapiens
  source 1..15: mol_type = genomic RNA
aggaccttgtgagtg

SEQ ID NO: 2522 - RNA, 15 nt, Homo sapiens
  source 1..15: mol_type = genomic RNA
ggaccttgtgagtga

SEQ ID NO: 2523 - RNA, 15 nt, Homo sapiens
  source 1..15: mol_type = genomic RNA
acattacagagtggg

SEQ ID NO: 2524 - RNA, 15 nt, Homo sapiens
  source 1..15: mol_type = genomic RNA
cattacagagtgggt

SEQ ID NO: 2525 - RNA, 15 nt, Homo sapiens
  source 1..15: mol_type = genomic RNA
tacagagtgggtaat

SEQ ID NO: 2526 - RNA, 15 nt, Homo sapiens
  source 1..15: mol_type = genomic RNA
acagagtgggtaata

SEQ ID NO: 2527 - RNA, 15 nt, Homo sapiens
  source 1..15: mol_type = genomic RNA
agagtgggtaataag

SEQ ID NO: 2528 - RNA, 15 nt, Homo sapiens
  source 1..15: mol_type = genomic RNA
gagtgggtaataagc

SEQ ID NO: 2529 - RNA, 15 nt, Homo sapiens
  source 1..15: mol_type = genomic RNA
agtgggtaataagca

SEQ ID NO: 2530 - RNA, 15 nt, Homo sapiens
  source 1..15: mol_type = genomic RNA
gtgggtaataagcag

SEQ ID NO: 2531 - RNA, 15 nt, Homo sapiens
  source 1..15: mol_type = genomic RNA
tgggtaataagcaga

SEQ ID NO: 2532 - RNA, 15 nt, Homo sapiens
  source 1..15: mol_type = genomic RNA
gggtaataagcagat

SEQ ID NO: 2533 - RNA, 16 nt, Homo sapiens
  source 1..16: mol_type = genomic RNA
cctctctctgcccgcg

SEQ ID NO: 2534 - RNA, 16 nt, Homo sapiens
  source 1..16: mol_type = genomic RNA
ctctctctgcccgcgt

SEQ ID NO: 2535 - RNA, 16 nt, Homo sapiens
  source 1..16: mol_type = genomic RNA
tctctctgcccgcgtc

SEQ ID NO: 2536 - RNA, 16 nt, Homo sapiens
  source 1..16: mol_type = genomic RNA
ctctctgcccgcgtcc

SEQ ID NO: 2537 - RNA, 16 nt, Homo sapiens
  source 1..16: mol_type = genomic RNA
tctctgcccgcgtccg

SEQ ID NO: 2538 - RNA, 16 nt, Homo sapiens
  source 1..16: mol_type = genomic RNA
ctctgcccgcgtccgt

SEQ ID NO: 2539 - RNA, 16 nt, Homo sapiens
  source 1..16: mol_type = genomic RNA
tctgcccgcgtccgtc

SEQ ID NO: 2540 - RNA, 16 nt, Homo sapiens
  source 1..16: mol_type = genomic RNA
ctgcccgcgtccgtcc

SEQ ID NO: 2541 - RNA, 16 nt, Homo sapiens
  source 1..16: mol_type = genomic RNA
tgcccgcgtccgtccg

SEQ ID NO: 2542 - RNA, 16 nt, Homo sapiens
  source 1..16: mol_type = genomic RNA
gcccgcgtccgtccgt

SEQ ID NO: 2543 - RNA, 16 nt, Homo sapiens
  source 1..16: mol_type = genomic RNA
cccgcgtccgtccgtg

SEQ ID NO: 2544 - RNA, 16 nt, Homo sapiens
  source 1..16: mol_type = genomic RNA
ccgcgtccgtccgtga

SEQ ID NO: 2545 - RNA, 16 nt, Homo sapiens
  source 1..16: mol_type = genomic RNA
cgcgtccgtccgtgaa

SEQ ID NO: 2546 - RNA, 16 nt, Homo sapiens
  source 1..16: mol_type = genomic RNA
gcgtccgtccgtgaaa

SEQ ID NO: 2547 - RNA, 16 nt, Homo sapiens
  source 1..16: mol_type = genomic RNA
cgtccgtccgtgaaat

SEQ ID NO: 2548 - RNA, 16 nt, Homo sapiens
  source 1..16: mol_type = genomic RNA
ccgtccgtgaaattcc

SEQ ID NO: 2549 - RNA, 16 nt, Homo sapiens
  source 1..16: mol_type = genomic RNA
gtccgtgaaattccgg

SEQ ID NO: 2550 - RNA, 16 nt, Homo sapiens
  source 1..16: mol_type = genomic RNA
tccgtgaaattccggc

SEQ ID NO: 2551 - RNA, 16 nt, Homo sapiens
  source 1..16: mol_type = genomic RNA
ccgtgaaattccggcc

SEQ ID NO: 2552 - RNA, 16 nt, Homo sapiens
  source 1..16: mol_type = genomic RNA
cgtgaaattccggccg

SEQ ID NO: 2553 - RNA, 16 nt, Homo sapiens
  source 1..16: mol_type = genomic RNA
gtgaaattccggccgg

SEQ ID NO: 2554 - RNA, 16 nt, Homo sapiens
  source 1..16: mol_type = genomic RNA
tgaaattccggccggg

SEQ ID NO: 2555 - RNA, 16 nt, Homo sapiens
  source 1..16: mol_type = genomic RNA
gaaattccggccgggg

SEQ ID NO: 2556 - RNA, 16 nt, Homo sapiens
  source 1..16: mol_type = genomic RNA
aaattccggccggggc

SEQ ID NO: 2557 - RNA, 16 nt, Homo sapiens
  source 1..16: mol_type = genomic RNA
aattccggccggggct

SEQ ID NO: 2558 - RNA, 16 nt, Homo sapiens
  source 1..16: mol_type = genomic RNA
attccggccggggctc

SEQ ID NO: 2559 - RNA, 16 nt, Homo sapiens
  source 1..16: mol_type = genomic RNA
ttccggccggggctca

SEQ ID NO: 2560 - RNA, 16 nt, Homo sapiens
  source 1..16: mol_type = genomic RNA
cggggctcaccgcgat

SEQ ID NO: 2561 - RNA, 16 nt, Homo sapiens
  source 1..16: mol_type = genomic RNA
ggggctcaccgcgatg

SEQ ID NO: 2562 - RNA, 16 nt, Homo sapiens
  source 1..16: mol_type = genomic RNA
gggctcaccgcgatgg

SEQ ID NO: 2563 - RNA, 16 nt, Homo sapiens
  source 1..16: mol_type = genomic RNA
ggctcaccgcgatggc

SEQ ID NO: 2564 - RNA, 16 nt, Homo sapiens
  source 1..16: mol_type = genomic RNA
gctcaccgcgatggcc

SEQ ID NO: 2565 - RNA, 16 nt, Homo sapiens
  source 1..16: mol_type = genomic RNA
ctcaccgcgatggccc

SEQ ID NO: 2566 - RNA, 16 nt, Homo sapiens
  source 1..16: mol_type = genomic RNA
tcaccgcgatggccct

SEQ ID NO: 2567 - RNA, 16 nt, Homo sapiens
  source 1..16: mol_type = genomic RNA
caccgcgatggccctc

SEQ ID NO: 2568 - RNA, 16 nt, Homo sapiens
  source 1..16: mol_type = genomic RNA
accgcgatggccctcc

SEQ ID NO: 2569 - RNA, 16 nt, Homo sapiens
  source 1..16: mol_type = genomic RNA
ccgcgatggccctccc

SEQ ID NO: 2570 - RNA, 16 nt, Homo sapiens
  source 1..16: mol_type = genomic RNA
cgcgatggccctcccg

SEQ ID NO: 2571 - RNA, 16 nt, Homo sapiens
  source 1..16: mol_type = genomic RNA
gcgatggccctcccga

SEQ ID NO: 2572 - RNA, 16 nt, Homo sapiens
  source 1..16: mol_type = genomic RNA
cgatggccctcccgac

SEQ ID NO: 2573 - RNA, 16 nt, Homo sapiens
  source 1..16: mol_type = genomic RNA
gatggccctcccgaca

SEQ ID NO: 2574 - RNA, 16 nt, Homo sapiens
  source 1..16: mol_type = genomic RNA
atggccctcccgacac

SEQ ID NO: 2575 - RNA, 16 nt, Homo sapiens
  source 1..16: mol_type = genomic RNA
gccctcccgacaccct

SEQ ID NO: 2576 - RNA, 16 nt, Homo sapiens
  source 1..16: mol_type = genomic RNA
ccctcccgacaccctc

SEQ ID NO: 2577 - RNA, 16 nt, Homo sapiens
  source 1..16: mol_type = genomic RNA
cctcccgacaccctcg

SEQ ID NO: 2578 - RNA, 16 nt, Homo sapiens
  source 1..16: mol_type = genomic RNA
ctcccgacaccctcgg

SEQ ID NO: 2579 - RNA, 16 nt, Homo sapiens
  source 1..16: mol_type = genomic RNA
tcccgacaccctcgga

SEQ ID NO: 2580 - RNA, 16 nt, Homo sapiens
  source 1..16: mol_type = genomic RNA
cccgacaccctcggac

SEQ ID NO: 2581 - RNA, 16 nt, Homo sapiens
  source 1..16: mol_type = genomic RNA
ccgacaccctcggaca

SEQ ID NO: 2582 - RNA, 16 nt, Homo sapiens
  source 1..16: mol_type = genomic RNA
cgacaccctcggacag

SEQ ID NO: 2583 - RNA, 16 nt, Homo sapiens
  source 1..16: mol_type = genomic RNA
gacaccctcggacagc

SEQ ID NO: 2584 - RNA, 16 nt, Homo sapiens
  source 1..16: mol_type = genomic RNA
acaccctcggacagca

SEQ ID NO: 2585 - RNA, 16 nt, Homo sapiens
  source 1..16: mol_type = genomic RNA
caccctcggacagcac

SEQ ID NO: 2586 - RNA, 16 nt, Homo sapiens
  source 1..16: mol_type = genomic RNA
accctcggacagcacc

SEQ ID NO: 2587 - RNA, 16 nt, Homo sapiens
  source 1..16: mol_type = genomic RNA
ccctcggacagcaccc

SEQ ID NO: 2588 - RNA, 16 nt, Homo sapiens
  source 1..16: mol_type = genomic RNA
cctcggacagcaccct

SEQ ID NO: 2589 - RNA, 16 nt, Homo sapiens
  source 1..16: mol_type = genomic RNA
ctcggacagcaccctc

SEQ ID NO: 2590 - RNA, 16 nt, Homo sapiens
  source 1..16: mol_type = genomic RNA
tcggacagcaccctcc

SEQ ID NO: 2591 - RNA, 16 nt, Homo sapiens
  source 1..16: mol_type = genomic RNA
cggacagcaccctccc

SEQ ID NO: 2592 - RNA, 16 nt, Homo sapiens
  source 1..16: mol_type = genomic RNA
gacagcaccctccccg

SEQ ID NO: 2593 - RNA, 16 nt, Homo sapiens
  source 1..16: mol_type = genomic RNA
cagcaccctccccgcg

SEQ ID NO: 2594 - RNA, 16 nt, Homo sapiens
  source 1..16: mol_type = genomic RNA
caccctccccgcggaa

SEQ ID NO: 2595 - RNA, 16 nt, Homo sapiens
  source 1..16: mol_type = genomic RNA
accctccccgcggaag

SEQ ID NO: 2596 - RNA, 16 nt, Homo sapiens
  source 1..16: mol_type = genomic RNA
tccccgcggaagcccg

SEQ ID NO: 2597 - RNA, 16 nt, Homo sapiens
  source 1..16: mol_type = genomic RNA
gacgaggacggcgacg

SEQ ID NO: 2598 - RNA, 16 nt, Homo sapiens
  source 1..16: mol_type = genomic RNA
cgaggacggcgacgga

SEQ ID NO: 2599 - RNA, 16 nt, Homo sapiens
  source 1..16: mol_type = genomic RNA
gacggcgacggagact

SEQ ID NO: 2600 - RNA, 16 nt, Homo sapiens
  source 1..16: mol_type = genomic RNA
acggcgacggagactc

SEQ ID NO: 2601 - RNA, 16 nt, Homo sapiens
  source 1..16: mol_type = genomic RNA
cggcgacggagactcg

SEQ ID NO: 2602 - RNA, 16 nt, Homo sapiens
  source 1..16: mol_type = genomic RNA
ggcgacggagactcgt

SEQ ID NO: 2603 - RNA, 16 nt, Homo sapiens
  source 1..16: mol_type = genomic RNA
gcgacggagactcgtt

SEQ ID NO: 2604 - RNA, 16 nt, Homo sapiens
  source 1..16: mol_type = genomic RNA
cgacggagactcgttt

SEQ ID NO: 2605 - RNA, 16 nt, Homo sapiens
  source 1..16: mol_type = genomic RNA
gacggagactcgtttg

SEQ ID NO: 2606 - RNA, 16 nt, Homo sapiens
  source 1..16: mol_type = genomic RNA
acggagactcgtttgg

SEQ ID NO: 2607 - RNA, 16 nt, Homo sapiens
  source 1..16: mol_type = genomic RNA
ccctgcgagcctgctt

SEQ ID NO: 2608 - RNA, 16 nt, Homo sapiens
  source 1..16: mol_type = genomic RNA
cctgcgagcctgcttt

SEQ ID NO: 2609 - RNA, 16 nt, Homo sapiens
  source 1..16: mol_type = genomic RNA
ctgcgagcctgctttg

SEQ ID NO: 2610 - RNA, 16 nt, Homo sapiens
  source 1..16: mol_type = genomic RNA
tgcgagcctgctttga

SEQ ID NO: 2611 - RNA, 16 nt, Homo sapiens
  source 1..16: mol_type = genomic RNA
gcgagcctgctttgag

SEQ ID NO: 2612 - RNA, 16 nt, Homo sapiens
  source 1..16: mol_type = genomic RNA
cgagcctgctttgagc

SEQ ID NO: 2613 - RNA, 16 nt, Homo sapiens
  source 1..16: mol_type = genomic RNA
gagcctgctttgagcg

SEQ ID NO: 2614 - RNA, 16 nt, Homo sapiens
  source 1..16: mol_type = genomic RNA
agcctgctttgagcgg

SEQ ID NO: 2615 - RNA, 16 nt, Homo sapiens
  source 1..16: mol_type = genomic RNA
gcctgctttgagcgga

SEQ ID NO: 2616 - RNA, 16 nt, Homo sapiens
  source 1..16: mol_type = genomic RNA
cctgctttgagcggaa

SEQ ID NO: 2617 - RNA, 16 nt, Homo sapiens
  source 1..16: mol_type = genomic RNA
ctgctttgagcggaac

SEQ ID NO: 2618 - RNA, 16 nt, Homo sapiens
  source 1..16: mol_type = genomic RNA
tgctttgagcggaacc

SEQ ID NO: 2619 - RNA, 16 nt, Homo sapiens
  source 1..16: mol_type = genomic RNA
gctttgagcggaaccc

SEQ ID NO: 2620 - RNA, 16 nt, Homo sapiens
  source 1..16: mol_type = genomic RNA
ctttgagcggaacccg

SEQ ID NO: 2621 - RNA, 16 nt, Homo sapiens
  source 1..16: mol_type = genomic RNA
tttgagcggaacccgt

SEQ ID NO: 2622 - RNA, 16 nt, Homo sapiens
  source 1..16: mol_type = genomic RNA
ttgagcggaacccgta

SEQ ID NO: 2623 - RNA, 16 nt, Homo sapiens
  source 1..16: mol_type = genomic RNA
tgagcggaacccgtac

SEQ ID NO: 2624 - RNA, 16 nt, Homo sapiens
  source 1..16: mol_type = genomic RNA
gagcggaacccgtacc

SEQ ID NO: 2625 - RNA, 16 nt, Homo sapiens
  source 1..16: mol_type = genomic RNA
agcggaacccgtaccc

SEQ ID NO: 2626 - RNA, 16 nt, Homo sapiens
  source 1..16: mol_type = genomic RNA
gcggaacccgtacccg

SEQ ID NO: 2627 - RNA, 16 nt, Homo sapiens
  source 1..16: mol_type = genomic RNA
cggaacccgtacccgg

SEQ ID NO: 2628 - RNA, 16 nt, Homo sapiens
  source 1..16: mol_type = genomic RNA
ggaacccgtacccggg

SEQ ID NO: 2629 - RNA, 16 nt, Homo sapiens
  source 1..16: mol_type = genomic RNA
gaacccgtacccgggc

SEQ ID NO: 2630 - RNA, 16 nt, Homo sapiens
  source 1..16: mol_type = genomic RNA
aacccgtacccgggca

SEQ ID NO: 2631 - RNA, 16 nt, Homo sapiens
  source 1..16: mol_type = genomic RNA
acccgtacccgggcat

SEQ ID NO: 2632 - RNA, 16 nt, Homo sapiens
  source 1..16: mol_type = genomic RNA
cccgtacccgggcatc

SEQ ID NO: 2633 - RNA, 16 nt, Homo sapiens
  source 1..16: mol_type = genomic RNA
ccgtacccgggcatcg

SEQ ID NO: 2634 - RNA, 16 nt, Homo sapiens
  source 1..16: mol_type = genomic RNA
cgtacccgggcatcgc

SEQ ID NO: 2635 - RNA, 16 nt, Homo sapiens
  source 1..16: mol_type = genomic RNA
gtacccgggcatcgcc

SEQ ID NO: 2636 - RNA, 16 nt, Homo sapiens
  source 1..16: mol_type = genomic RNA
tacccgggcatcgcca

SEQ ID NO: 2637 - RNA, 16 nt, Homo sapiens
  source 1..16: mol_type = genomic RNA
cagagaacggctggcc

SEQ ID NO: 2638 - RNA, 16 nt, Homo sapiens
  source 1..16: mol_type = genomic RNA
ctggcccaggccatcg

SEQ ID NO: 2639 - RNA, 16 nt, Homo sapiens
  source 1..16: mol_type = genomic RNA
cccaggccatcggcat

SEQ ID NO: 2640 - RNA, 16 nt, Homo sapiens
  source 1..16: mol_type = genomic RNA
ccaggccatcggcatt

SEQ ID NO: 2641 - RNA, 16 nt, Homo sapiens
  source 1..16: mol_type = genomic RNA
caggccatcggcattc

SEQ ID NO: 2642 - RNA, 16 nt, Homo sapiens
  source 1..16: mol_type = genomic RNA
aggccatcggcattcc

SEQ ID NO: 2643 - RNA, 16 nt, Homo sapiens
  source 1..16: mol_type = genomic RNA
gagcccagggtccaga

SEQ ID NO: 2644 - RNA, 16 nt, Homo sapiens
  source 1..16: mol_type = genomic RNA
agcccagggtccagat

SEQ ID NO: 2645 - RNA, 16 nt, Homo sapiens
  source 1..16: mol_type = genomic RNA
gcccagggtccagatt

SEQ ID NO: 2646 - RNA, 16 nt, Homo sapiens
  source 1..16: mol_type = genomic RNA
cccagggtccagattt

SEQ ID NO: 2647 - RNA, 16 nt, Homo sapiens
  source 1..16: mol_type = genomic RNA
ccagggtccagatttg

SEQ ID NO: 2648 - RNA, 16 nt, Homo sapiens
  source 1..16: mol_type = genomic RNA
cagggtccagatttgg

SEQ ID NO: 2649 - RNA, 16 nt, Homo sapiens
  source 1..16: mol_type = genomic RNA
agggtccagatttggt

SEQ ID NO: 2650 - RNA, 16 nt, Homo sapiens
  source 1..16: mol_type = genomic RNA
gggtccagatttggtt

SEQ ID NO: 2651 - RNA, 16 nt, Homo sapiens
  source 1..16: mol_type = genomic RNA
ttcagaatgagaggtc

SEQ ID NO: 2652 - RNA, 16 nt, Homo sapiens
  source 1..16: mol_type = genomic RNA
tcagaatgagaggtca

SEQ ID NO: 2653 - RNA, 16 nt, Homo sapiens
  source 1..16: mol_type = genomic RNA
cagaatgagaggtcac

SEQ ID NO: 2654 - RNA, 16 nt, Homo sapiens
  source 1..16: mol_type = genomic RNA
agaatgagaggtcacg

SEQ ID NO: 2655 - RNA, 16 nt, Homo sapiens
  source 1..16: mol_type = genomic RNA
gaatgagaggtcacgc

SEQ ID NO: 2656 - RNA, 16 nt, Homo sapiens
  source 1..16: mol_type = genomic RNA
aatgagaggtcacgcc

SEQ ID NO: 2657 - RNA, 16 nt, Homo sapiens
  source 1..16: mol_type = genomic RNA
atgagaggtcacgcca

SEQ ID NO: 2658 - RNA, 16 nt, Homo sapiens
  source 1..16: mol_type = genomic RNA
tgagaggtcacgccag

SEQ ID NO: 2659 - RNA, 16 nt, Homo sapiens
  source 1..16: mol_type = genomic RNA
gagaggtcacgccagc

SEQ ID NO: 2660 - RNA, 16 nt, Homo sapiens
  source 1..16: mol_type = genomic RNA
agaggtcacgccagct

SEQ ID NO: 2661 - RNA, 16 nt, Homo sapiens
  source 1..16: mol_type = genomic RNA
gaggtcacgccagctg

SEQ ID NO: 2662 - RNA, 16 nt, Homo sapiens
  source 1..16: mol_type = genomic RNA
aggtcacgccagctga

SEQ ID NO: 2663 - RNA, 16 nt, Homo sapiens
  source 1..16: mol_type = genomic RNA
ggtcacgccagctgag

SEQ ID NO: 2664 - RNA, 16 nt, Homo sapiens
  source 1..16: mol_type = genomic RNA
gtcacgccagctgagg

SEQ ID NO: 2665 - RNA, 16 nt, Homo sapiens
  source 1..16: mol_type = genomic RNA
tcacgccagctgaggc

SEQ ID NO: 2666 - RNA, 16 nt, Homo sapiens
  source 1..16: mol_type = genomic RNA
cacgccagctgaggca

SEQ ID NO: 2667 - RNA, 16 nt, Homo sapiens
  source 1..16: mol_type = genomic RNA
gggaatctcggccctg

SEQ ID NO: 2668 - RNA, 16 nt, Homo sapiens
  source 1..16: mol_type = genomic RNA
ggaatctcggccctgg

SEQ ID NO: 2669 - RNA, 16 nt, Homo sapiens
  source 1..16: mol_type = genomic RNA
gaatctcggccctggc

SEQ ID NO: 2670 - RNA, 16 nt, Homo sapiens
  source 1..16: mol_type = genomic RNA
aatctcggccctggcc

SEQ ID NO: 2671 - RNA, 16 nt, Homo sapiens
  source 1..16: mol_type = genomic RNA
atctcggccctggccc

SEQ ID NO: 2672 - RNA, 16 nt, Homo sapiens
  source 1..16: mol_type = genomic RNA
ctggccagagagacgg

SEQ ID NO: 2673 - RNA, 16 nt, Homo sapiens
  source 1..16: mol_type = genomic RNA
cagagagacgggcctc

SEQ ID NO: 2674 - RNA, 16 nt, Homo sapiens
  source 1..16: mol_type = genomic RNA
cgggcctcccggagtc

SEQ ID NO: 2675 - RNA, 16 nt, Homo sapiens
  source 1..16: mol_type = genomic RNA
ggcctcccggagtcca

SEQ ID NO: 2676 - RNA, 16 nt, Homo sapiens
  source 1..16: mol_type = genomic RNA
gcctcccggagtccag

SEQ ID NO: 2677 - RNA, 16 nt, Homo sapiens
  source 1..16: mol_type = genomic RNA
cctcccggagtccagg

SEQ ID NO: 2678 - RNA, 16 nt, Homo sapiens
  source 1..16: mol_type = genomic RNA
ctcccggagtccagga

SEQ ID NO: 2679 - RNA, 16 nt, Homo sapiens
  source 1..16: mol_type = genomic RNA
tcccggagtccaggat

SEQ ID NO: 2680 - RNA, 16 nt, Homo sapiens
  source 1..16: mol_type = genomic RNA
cccggagtccaggatt

SEQ ID NO: 2681 - RNA, 16 nt, Homo sapiens
  source 1..16: mol_type = genomic RNA
ccggagtccaggattc

SEQ ID NO: 2682 - RNA, 16 nt, Homo sapiens
  source 1..16: mol_type = genomic RNA
cggagtccaggattca

SEQ ID NO: 2683 - RNA, 16 nt, Homo sapiens
  source 1..16: mol_type = genomic RNA
ggagtccaggattcag

SEQ ID NO: 2684 - RNA, 16 nt, Homo sapiens
  source 1..16: mol_type = genomic RNA
gagtccaggattcaga

SEQ ID NO: 2685 - RNA, 16 nt, Homo sapiens
  source 1..16: mol_type = genomic RNA
agtccaggattcagat

SEQ ID NO: 2686 - RNA, 16 nt, Homo sapiens
  source 1..16: mol_type = genomic RNA
gtccaggattcagatc

SEQ ID NO: 2687 - RNA, 16 nt, Homo sapiens
  source 1..16: mol_type = genomic RNA
tccaggattcagatct

SEQ ID NO: 2688 - RNA, 16 nt, Homo sapiens
  source 1..16: mol_type = genomic RNA
ccaggattcagatctg

SEQ ID NO: 2689 - RNA, 16 nt, Homo sapiens
  source 1..16: mol_type = genomic RNA
caggattcagatctgg

SEQ ID NO: 2690 - RNA, 16 nt, Homo sapiens
  source 1..16: mol_type = genomic RNA
aggattcagatctggt

SEQ ID NO: 2691 - RNA, 16 nt, Homo sapiens
  source 1..16: mol_type = genomic RNA
tttcagaatcgaaggg

SEQ ID NO: 2692 - RNA, 16 nt, Homo sapiens
  source 1..16: mol_type = genomic RNA
ttcagaatcgaagggc

SEQ ID NO: 2693 - RNA, 16 nt, Homo sapiens
  source 1..16: mol_type = genomic RNA
tcagaatcgaagggcc

SEQ ID NO: 2694 - RNA, 16 nt, Homo sapiens
  source 1..16: mol_type = genomic RNA
cagaatcgaagggcca

SEQ ID NO: 2695 - RNA, 16 nt, Homo sapiens
  source 1..16: mol_type = genomic RNA
agaatcgaagggccag

SEQ ID NO: 2696 - RNA, 16 nt, Homo sapiens
  source 1..16: mol_type = genomic RNA
gaatcgaagggccagg

SEQ ID NO: 2697 - RNA, 16 nt, Homo sapiens
  source 1..16: mol_type = genomic RNA
aatcgaagggccaggc

SEQ ID NO: 2698 - RNA, 16 nt, Homo sapiens
  source 1..16: mol_type = genomic RNA
atcgaagggccaggca

SEQ ID NO: 2699 - RNA, 16 nt, Homo sapiens
  source 1..16: mol_type = genomic RNA
gctccacctccccagc

SEQ ID NO: 2700 - RNA, 16 nt, Homo sapiens
  source 1..16: mol_type = genomic RNA
ctccacctccccagcc

SEQ ID NO: 2701 - RNA, 16 nt, Homo sapiens
  source 1..16: mol_type = genomic RNA
tccacctccccagccc

SEQ ID NO: 2702 - RNA, 16 nt, Homo sapiens
  source 1..16: mol_type = genomic RNA
ccacctccccagcccg

SEQ ID NO: 2703 - RNA, 16 nt, Homo sapiens
  source 1..16: mol_type = genomic RNA
cccccggacgcctccg

SEQ ID NO: 2704 - RNA, 16 nt, Homo sapiens
  source 1..16: mol_type = genomic RNA
ccggacgcctccgcct

SEQ ID NO: 2705 - RNA, 16 nt, Homo sapiens
  source 1..16: mol_type = genomic RNA
cggacgcctccgcctc

SEQ ID NO: 2706 - RNA, 16 nt, Homo sapiens
  source 1..16: mol_type = genomic RNA
gacgcctccgcctccg

SEQ ID NO: 2707 - RNA, 16 nt, Homo sapiens
  source 1..16: mol_type = genomic RNA
acgcctccgcctccgc

SEQ ID NO: 2708 - RNA, 16 nt, Homo sapiens
  source 1..16: mol_type = genomic RNA
cgcctccgcctccgcg

SEQ ID NO: 2709 - RNA, 16 nt, Homo sapiens
  source 1..16: mol_type = genomic RNA
cctccgcctccgcgcg

SEQ ID NO: 2710 - RNA, 16 nt, Homo sapiens
  source 1..16: mol_type = genomic RNA
ctccgcctccgcgcgg

SEQ ID NO: 2711 - RNA, 16 nt, Homo sapiens
  source 1..16: mol_type = genomic RNA
ccgcctccgcgcggca

SEQ ID NO: 2712 - RNA, 16 nt, Homo sapiens
  source 1..16: mol_type = genomic RNA
cgcctccgcgcggcag

SEQ ID NO: 2713 - RNA, 16 nt, Homo sapiens
  source 1..16: mol_type = genomic RNA
gcaggggcagatgcaa

SEQ ID NO: 2714 - RNA, 16 nt, Homo sapiens
  source 1..16: mol_type = genomic RNA
caggggcagatgcaag

SEQ ID NO: 2715 - RNA, 16 nt, Homo sapiens
  source 1..16: mol_type = genomic RNA
gggcagatgcaaggca

SEQ ID NO: 2716 - RNA, 16 nt, Homo sapiens
  source 1..16: mol_type = genomic RNA
ggcagatgcaaggcat

SEQ ID NO: 2717 - RNA, 16 nt, Homo sapiens
  source 1..16: mol_type = genomic RNA
gcagatgcaaggcatc

SEQ ID NO: 2718 - RNA, 16 nt, Homo sapiens
  source 1..16: mol_type = genomic RNA
cagatgcaaggcatcc

SEQ ID NO: 2719 - RNA, 16 nt, Homo sapiens
  source 1..16: mol_type = genomic RNA
agatgcaaggcatccc

SEQ ID NO: 2720 - RNA, 16 nt, Homo sapiens
  source 1..16: mol_type = genomic RNA
gatgcaaggcatcccg

SEQ ID NO: 2721 - RNA, 16 nt, Homo sapiens
  source 1..16: mol_type = genomic RNA
atgcaaggcatcccgg

SEQ ID NO: 2722 - RNA, 16 nt, Homo sapiens
  source 1..16: mol_type = genomic RNA
tgcaaggcatcccggc

SEQ ID NO: 2723 - RNA, 16 nt, Homo sapiens
  source 1..16: mol_type = genomic RNA
gcaaggcatcccggcg

SEQ ID NO: 2724 - RNA, 16 nt, Homo sapiens
  source 1..16: mol_type = genomic RNA
caaggcatcccggcgc

SEQ ID NO: 2725 - RNA, 16 nt, Homo sapiens
  source 1..16: mol_type = genomic RNA
gcatcccggcgccctc

SEQ ID NO: 2726 - RNA, 16 nt, Homo sapiens
  source 1..16: mol_type = genomic RNA
catcccggcgccctcc

SEQ ID NO: 2727 - RNA, 16 nt, Homo sapiens
  source 1..16: mol_type = genomic RNA
ccctcccaggcgctcc

SEQ ID NO: 2728 - RNA, 16 nt, Homo sapiens
  source 1..16: mol_type = genomic RNA
cctcccaggcgctcca

SEQ ID NO: 2729 - RNA, 16 nt, Homo sapiens
  source 1..16: mol_type = genomic RNA
ctcccaggcgctccag

SEQ ID NO: 2730 - RNA, 16 nt, Homo sapiens
  source 1..16: mol_type = genomic RNA
tcccaggcgctccagg

SEQ ID NO: 2731 - RNA, 16 nt, Homo sapiens
  source 1..16: mol_type = genomic RNA
cccaggcgctccagga

SEQ ID NO: 2732 - RNA, 16 nt, Homo sapiens
  source 1..16: mol_type = genomic RNA
ccaggcgctccaggag

SEQ ID NO: 2733 - RNA, 16 nt, Homo sapiens
  source 1..16: mol_type = genomic RNA
agaaacggaggccccg

SEQ ID NO: 2734 - RNA, 16 nt, Homo sapiens
  source 1..16: mol_type = genomic RNA
gctggaggcctcggaa

SEQ ID NO: 2735 - RNA, 16 nt, Homo sapiens
  source 1..16: mol_type = genomic RNA
ctggaggcctcggaag

SEQ ID NO: 2736 - RNA, 16 nt, Homo sapiens
  source 1..16: mol_type = genomic RNA
tggaggcctcggaaga

SEQ ID NO: 2737 - RNA, 16 nt, Homo sapiens
  source 1..16: mol_type = genomic RNA
ggaggcctcggaagag

SEQ ID NO: 2738 - RNA, 16 nt, Homo sapiens
  source 1..16: mol_type = genomic RNA
gaggcctcggaagagg

SEQ ID NO: 2739 - RNA, 16 nt, Homo sapiens
  source 1..16: mol_type = genomic RNA
gcctcggaagaggccg

SEQ ID NO: 2740 - RNA, 16 nt, Homo sapiens
  source 1..16: mol_type = genomic RNA
cctcggaagaggccgc

SEQ ID NO: 2741 - RNA, 16 nt, Homo sapiens
  source 1..16: mol_type = genomic RNA
ctcggaagaggccgcc

SEQ ID NO: 2742 - RNA, 16 nt, Homo sapiens
  source 1..16: mol_type = genomic RNA
tcggaagaggccgcct

SEQ ID NO: 2743 - RNA, 16 nt, Homo sapiens
  source 1..16: mol_type = genomic RNA
cggaagaggccgcctc

SEQ ID NO: 2744 - RNA, 16 nt, Homo sapiens
  source 1..16: mol_type = genomic RNA
ggaagaggccgcctcg

SEQ ID NO: 2745 - RNA, 16 nt, Homo sapiens
  source 1..16: mol_type = genomic RNA
aagaggccgcctcgct

SEQ ID NO: 2746 - RNA, 16 nt, Homo sapiens
  source 1..16: mol_type = genomic RNA
agaggccgcctcgctg

SEQ ID NO: 2747 - RNA, 16 nt, Homo sapiens
  source 1..16: mol_type = genomic RNA
ggccgcctcgctggaa

SEQ ID NO: 2748 - RNA, 16 nt, Homo sapiens
  source 1..16: mol_type = genomic RNA
gccgcctcgctggaag

SEQ ID NO: 2749 - RNA, 16 nt, Homo sapiens
  source 1..16: mol_type = genomic RNA
ccgcctcgctggaagc

SEQ ID NO: 2750 - RNA, 16 nt, Homo sapiens
  source 1..16: mol_type = genomic RNA
cgcctcgctggaagca

SEQ ID NO: 2751 - RNA, 16 nt, Homo sapiens
  source 1..16: mol_type = genomic RNA
gcctcgctggaagcac

SEQ ID NO: 2752 - RNA, 16 nt, Homo sapiens
  source 1..16: mol_type = genomic RNA
cctcgctggaagcacc

SEQ ID NO: 2753 - RNA, 16 nt, Homo sapiens
  source 1..16: mol_type = genomic RNA
ctcgctggaagcaccc

SEQ ID NO: 2754 - RNA, 16 nt, Homo sapiens
  source 1..16: mol_type = genomic RNA
tcgctggaagcacccc

SEQ ID NO: 2755 - RNA, 16 nt, Homo sapiens
  source 1..16: mol_type = genomic RNA
cgctggaagcacccct

SEQ ID NO: 2756 - RNA, 16 nt, Homo sapiens
  source 1..16: mol_type = genomic RNA
gctggaagcacccctc

SEQ ID NO: 2757 - RNA, 16 nt, Homo sapiens
  source 1..16: mol_type = genomic RNA
ctggaagcacccctca

SEQ ID NO: 2758 - RNA, 16 nt, Homo sapiens
  source 1..16: mol_type = genomic RNA
tggaagcacccctcag

SEQ ID NO: 2759 - RNA, 16 nt, Homo sapiens
  source 1..16: mol_type = genomic RNA
ggaagcacccctcagc

SEQ ID NO: 2760 - RNA, 16 nt, Homo sapiens
  source 1..16: mol_type = genomic RNA
gaagcacccctcagcg

SEQ ID NO: 2761 - RNA, 16 nt, Homo sapiens
  source 1..16: mol_type = genomic RNA
aagcacccctcagcga

SEQ ID NO: 2762 - RNA, 16 nt, Homo sapiens
  source 1..16: mol_type = genomic RNA
agcacccctcagcgag

SEQ ID NO: 2763 - RNA, 16 nt, Homo sapiens
  source 1..16: mol_type = genomic RNA
gcacccctcagcgagg

SEQ ID NO: 2764 - RNA, 16 nt, Homo sapiens
  source 1..16: mol_type = genomic RNA
cacccctcagcgagga

SEQ ID NO: 2765 - RNA, 16 nt, Homo sapiens
  source 1..16: mol_type = genomic RNA
acccctcagcgaggaa

SEQ ID NO: 2766 - RNA, 16 nt, Homo sapiens
  source 1..16: mol_type = genomic RNA
cccctcagcgaggaag

SEQ ID NO: 2767 - RNA, 16 nt, Homo sapiens
  source 1..16: mol_type = genomic RNA
ccctcagcgaggaaga

SEQ ID NO: 2768 - RNA, 16 nt, Homo sapiens
  source 1..16: mol_type = genomic RNA
cctcagcgaggaagaa

SEQ ID NO: 2769 - RNA, 16 nt, Homo sapiens
  source 1..16: mol_type = genomic RNA
ctcagcgaggaagaat

SEQ ID NO: 2770 - RNA, 16 nt, Homo sapiens
  source 1..16: mol_type = genomic RNA
tcagcgaggaagaata

SEQ ID NO: 2771 - RNA, 16 nt, Homo sapiens
  source 1..16: mol_type = genomic RNA
cagcgaggaagaatac

SEQ ID NO: 2772 - RNA, 16 nt, Homo sapiens
  source 1..16: mol_type = genomic RNA
agcgaggaagaatacc

SEQ ID NO: 2773 - RNA, 16 nt, Homo sapiens
  source 1..16: mol_type = genomic RNA
gcgaggaagaataccg

SEQ ID NO: 2774 - RNA, 16 nt, Homo sapiens
  source 1..16: mol_type = genomic RNA
cgaggaagaataccgg

SEQ ID NO: 2775 - RNA, 16 nt, Homo sapiens
  source 1..16: mol_type = genomic RNA
gaggaagaataccggg

SEQ ID NO: 2776 - RNA, 16 nt, Homo sapiens
  source 1..16: mol_type = genomic RNA
aggaagaataccgggc

SEQ ID NO: 2777 - RNA, 16 nt, Homo sapiens
  source 1..16: mol_type = genomic RNA
ggaagaataccgggct

SEQ ID NO: 2778 - RNA, 16 nt, Homo sapiens
  source 1..16: mol_type = genomic RNA
gaagaataccgggctc

SEQ ID NO: 2779 - RNA, 16 nt, Homo sapiens
  source 1..16: mol_type = genomic RNA
aagaataccgggctct

SEQ ID NO: 2780 - RNA, 16 nt, Homo sapiens
  source 1..16: mol_type = genomic RNA
agaataccgggctctg

SEQ ID NO: 2781 - RNA, 16 nt, Homo sapiens
  source 1..16: mol_type = genomic RNA
gaataccgggctctgc

SEQ ID NO: 2782 - RNA, 16 nt, Homo sapiens
  source 1..16: mol_type = genomic RNA
aataccgggctctgct

SEQ ID NO: 2783 - RNA, 16 nt, Homo sapiens
  source 1..16: mol_type = genomic RNA
ataccgggctctgctg

SEQ ID NO: 2784 - RNA, 16 nt, Homo sapiens
  source 1..16: mol_type = genomic RNA
taccgggctctgctgg

SEQ ID NO: 2785 - RNA, 16 nt, Homo sapiens
  source 1..16: mol_type = genomic RNA
ccgggctctgctggag

SEQ ID NO: 2786 - RNA, 16 nt, Homo sapiens
  source 1..16: mol_type = genomic RNA
ctctgctggaggagct

SEQ ID NO: 2787 - RNA, 16 nt, Homo sapiens
  source 1..16: mol_type = genomic RNA
tctgctggaggagctt

SEQ ID NO: 2788 - RNA, 16 nt, Homo sapiens
  source 1..16: mol_type = genomic RNA
ctgctggaggagcttt

SEQ ID NO: 2789 - RNA, 16 nt, Homo sapiens
  source 1..16: mol_type = genomic RNA
tgctggaggagcttta

SEQ ID NO: 2790 - RNA, 16 nt, Homo sapiens
  source 1..16: mol_type = genomic RNA
gctggaggagctttag

SEQ ID NO: 2791 - RNA, 16 nt, Homo sapiens
  source 1..16: mol_type = genomic RNA
ctggaggagctttagg

SEQ ID NO: 2792 - RNA, 16 nt, Homo sapiens
  source 1..16: mol_type = genomic RNA
tggaggagctttagga

SEQ ID NO: 2793 - RNA, 16 nt, Homo sapiens
  source 1..16: mol_type = genomic RNA
ggaggagctttaggac

SEQ ID NO: 2794 - RNA, 16 nt, Homo sapiens
  source 1..16: mol_type = genomic RNA
gaggagctttaggacg

SEQ ID NO: 2795 - RNA, 16 nt, Homo sapiens
  source 1..16: mol_type = genomic RNA
aggagctttaggacgc

SEQ ID NO: 2796 - RNA, 16 nt, Homo sapiens
  source 1..16: mol_type = genomic RNA
ggagctttaggacgcg

SEQ ID NO: 2797 - RNA, 16 nt, Homo sapiens
  source 1..16: mol_type = genomic RNA
gagctttaggacgcgg

SEQ ID NO: 2798 - RNA, 16 nt, Homo sapiens
  source 1..16: mol_type = genomic RNA
agctttaggacgcggg

SEQ ID NO: 2799 - RNA, 16 nt, Homo sapiens
  source 1..16: mol_type = genomic RNA
gctttaggacgcgggg

SEQ ID NO: 2800 - RNA, 16 nt, Homo sapiens
  source 1..16: mol_type = genomic RNA
ctttaggacgcggggt

SEQ ID NO: 2801 - RNA, 16 nt, Homo sapiens
  source 1..16: mol_type = genomic RNA
tttaggacgcggggtt

SEQ ID NO: 2802 - RNA, 16 nt, Homo sapiens
  source 1..16: mol_type = genomic RNA
ttaggacgcggggttg

SEQ ID NO: 2803 - RNA, 16 nt, Homo sapiens
  source 1..16: mol_type = genomic RNA
taggacgcggggttgg

SEQ ID NO: 2804 - RNA, 16 nt, Homo sapiens
  source 1..16: mol_type = genomic RNA
acgcggggttgggacg

SEQ ID NO: 2805 - RNA, 16 nt, Homo sapiens
  source 1..16: mol_type = genomic RNA
tcgggtggttcggggc

SEQ ID NO: 2806 - RNA, 16 nt, Homo sapiens
  source 1..16: mol_type = genomic RNA
cgggtggttcggggca

SEQ ID NO: 2807 - RNA, 16 nt, Homo sapiens
  source 1..16: mol_type = genomic RNA
gggtggttcggggcag

SEQ ID NO: 2808 - RNA, 16 nt, Homo sapiens
  source 1..16: mol_type = genomic RNA
ggtggttcggggcagg

SEQ ID NO: 2809 - RNA, 16 nt, Homo sapiens
  source 1..16: mol_type = genomic RNA
gtggttcggggcaggg

SEQ ID NO: 2810 - RNA, 16 nt, Homo sapiens
  source 1..16: mol_type = genomic RNA
ggcggtggcctctctt

SEQ ID NO: 2811 - RNA, 16 nt, Homo sapiens
  source 1..16: mol_type = genomic RNA
gcggtggcctctcttt

SEQ ID NO: 2812 - RNA, 16 nt, Homo sapiens
  source 1..16: mol_type = genomic RNA
cggtggcctctctttc

SEQ ID NO: 2813 - RNA, 16 nt, Homo sapiens
  source 1..16: mol_type = genomic RNA
ggtggcctctctttcg

SEQ ID NO: 2814 - RNA, 16 nt, Homo sapiens
  source 1..16: mol_type = genomic RNA
gtggcctctctttcgc

SEQ ID NO: 2815 - RNA, 16 nt, Homo sapiens
  source 1..16: mol_type = genomic RNA
tggcctctctttcgcg

SEQ ID NO: 2816 - RNA, 16 nt, Homo sapiens
  source 1..16: mol_type = genomic RNA
ggcctctctttcgcgg

SEQ ID NO: 2817 - RNA, 16 nt, Homo sapiens
  source 1..16: mol_type = genomic RNA
gcctctctttcgcggg

SEQ ID NO: 2818 - RNA, 16 nt, Homo sapiens
  source 1..16: mol_type = genomic RNA
cctctctttcgcgggg

SEQ ID NO: 2819 - RNA, 16 nt, Homo sapiens
  source 1..16: mol_type = genomic RNA
ctctctttcgcgggga

SEQ ID NO: 2820 - RNA, 16 nt, Homo sapiens
  source 1..16: mol_type = genomic RNA
tctctttcgcggggaa

SEQ ID NO: 2821 - RNA, 16 nt, Homo sapiens
  source 1..16: mol_type = genomic RNA
ctctttcgcggggaac

SEQ ID NO: 2822 - RNA, 16 nt, Homo sapiens
  source 1..16: mol_type = genomic RNA
tctttcgcggggaaca

SEQ ID NO: 2823 - RNA, 16 nt, Homo sapiens
  source 1..16: mol_type = genomic RNA
ctttcgcggggaacac

SEQ ID NO: 2824 - RNA, 16 nt, Homo sapiens
  source 1..16: mol_type = genomic RNA
tttcgcggggaacacc

SEQ ID NO: 2825 - RNA, 16 nt, Homo sapiens
  source 1..16: mol_type = genomic RNA
ttcgcggggaacacct

SEQ ID NO: 2826 - RNA, 16 nt, Homo sapiens
  source 1..16: mol_type = genomic RNA
tcgcggggaacacctg

SEQ ID NO: 2827 - RNA, 16 nt, Homo sapiens
  source 1..16: mol_type = genomic RNA
gaacacctggctggct

SEQ ID NO: 2828 - RNA, 16 nt, Homo sapiens
  source 1..16: mol_type = genomic RNA
aacacctggctggcta

SEQ ID NO: 2829 - RNA, 16 nt, Homo sapiens
  source 1..16: mol_type = genomic RNA
acacctggctggctac

SEQ ID NO: 2830 - RNA, 16 nt, Homo sapiens
  source 1..16: mol_type = genomic RNA
cacctggctggctacg

SEQ ID NO: 2831 - RNA, 16 nt, Homo sapiens
  source 1..16: mol_type = genomic RNA
cctggctggctacgga

SEQ ID NO: 2832 - RNA, 16 nt, Homo sapiens
  source 1..16: mol_type = genomic RNA
ctggctggctacggag

SEQ ID NO: 2833 - RNA, 16 nt, Homo sapiens
  source 1..16: mol_type = genomic RNA
ctacggaggggcgtgt

SEQ ID NO: 2834 - RNA, 16 nt, Homo sapiens
  source 1..16: mol_type = genomic RNA
tacggaggggcgtgtc

SEQ ID NO: 2835 - RNA, 16 nt, Homo sapiens
  source 1..16: mol_type = genomic RNA
acggaggggcgtgtct

SEQ ID NO: 2836 - RNA, 16 nt, Homo sapiens
  source 1..16: mol_type = genomic RNA
cggaggggcgtgtctc

SEQ ID NO: 2837 - RNA, 16 nt, Homo sapiens
  source 1..16: mol_type = genomic RNA
ggaggggcgtgtctcc

SEQ ID NO: 2838 - RNA, 16 nt, Homo sapiens
  source 1..16: mol_type = genomic RNA
gaggggcgtgtctccg

SEQ ID NO: 2839 - RNA, 16 nt, Homo sapiens
  source 1..16: mol_type = genomic RNA
aggggcgtgtctccgc

SEQ ID NO: 2840 - RNA, 16 nt, Homo sapiens
  source 1..16: mol_type = genomic RNA
ggggcgtgtctccgcc

SEQ ID NO: 2841 - RNA, 16 nt, Homo sapiens
  source 1..16: mol_type = genomic RNA
gggcgtgtctccgccc

SEQ ID NO: 2842 - RNA, 16 nt, Homo sapiens
  source 1..16: mol_type = genomic RNA
ggcgtgtctccgcccc

SEQ ID NO: 2843 - RNA, 16 nt, Homo sapiens
  source 1..16: mol_type = genomic RNA
ccctccaccgggctga

SEQ ID NO: 2844 - RNA, 16 nt, Homo sapiens
  source 1..16: mol_type = genomic RNA
cctccaccgggctgac

SEQ ID NO: 2845 - RNA, 16 nt, Homo sapiens
  source 1..16: mol_type = genomic RNA
ctccaccgggctgacc

SEQ ID NO: 2846 - RNA, 16 nt, Homo sapiens
  source 1..16: mol_type = genomic RNA
tccaccgggctgaccg

SEQ ID NO: 2847 - RNA, 16 nt, Homo sapiens
  source 1..16: mol_type = genomic RNA
ctgaccggcctgggat

SEQ ID NO: 2848 - RNA, 16 nt, Homo sapiens
  source 1..16: mol_type = genomic RNA
tgaccggcctgggatt

SEQ ID NO: 2849 - RNA, 16 nt, Homo sapiens
  source 1..16: mol_type = genomic RNA
gaccggcctgggattc

SEQ ID NO: 2850 - RNA, 16 nt, Homo sapiens
  source 1..16: mol_type = genomic RNA
accggcctgggattcc

SEQ ID NO: 2851 - RNA, 16 nt, Homo sapiens
  source 1..16: mol_type = genomic RNA
ccggcctgggattcct

SEQ ID NO: 2852 - RNA, 16 nt, Homo sapiens
  source 1..16: mol_type = genomic RNA
cggcctgggattcctg

SEQ ID NO: 2853 - RNA, 16 nt, Homo sapiens
  source 1..16: mol_type = genomic RNA
ggcctgggattcctgc

SEQ ID NO: 2854 - RNA, 16 nt, Homo sapiens
  source 1..16: mol_type = genomic RNA
gcctgggattcctgcc

SEQ ID NO: 2855 - RNA, 16 nt, Homo sapiens
  source 1..16: mol_type = genomic RNA
cctgggattcctgcct

SEQ ID NO: 2856 - RNA, 16 nt, Homo sapiens
  source 1..16: mol_type = genomic RNA
ctgggattcctgcctt

SEQ ID NO: 2857 - RNA, 16 nt, Homo sapiens
  source 1..16: mol_type = genomic RNA
tgggattcctgccttc

SEQ ID NO: 2858 - RNA, 16 nt, Homo sapiens
  source 1..16: mol_type = genomic RNA
gggattcctgccttct

SEQ ID NO: 2859 - RNA, 16 nt, Homo sapiens
  source 1..16: mol_type = genomic RNA
ggattcctgccttcta

SEQ ID NO: 2860 - RNA, 16 nt, Homo sapiens
  source 1..16: mol_type = genomic RNA
attcctgccttctagg

SEQ ID NO: 2861 - RNA, 16 nt, Homo sapiens
  source 1..16: mol_type = genomic RNA
ttcctgccttctaggt

SEQ ID NO: 2862 - RNA, 16 nt, Homo sapiens
  source 1..16: mol_type = genomic RNA
tcctgccttctaggtc

SEQ ID NO: 2863 - RNA, 16 nt, Homo sapiens
  source 1..16: mol_type = genomic RNA
cctgccttctaggtct

SEQ ID NO: 2864 - RNA, 16 nt, Homo sapiens
  source 1..16: mol_type = genomic RNA
gcccggtgagagactc

SEQ ID NO: 2865 - RNA, 16 nt, Homo sapiens
  source 1..16: mol_type = genomic RNA
cccggtgagagactcc

SEQ ID NO: 2866 - RNA, 16 nt, Homo sapiens
  source 1..16: mol_type = genomic RNA
ccggtgagagactcca

SEQ ID NO: 2867 - RNA, 16 nt, Homo sapiens
  source 1..16: mol_type = genomic RNA
cggtgagagactccac

SEQ ID NO: 2868 - RNA, 16 nt, Homo sapiens
  source 1..16: mol_type = genomic RNA
ttctttcctgggcatc

SEQ ID NO: 2869 - RNA, 16 nt, Homo sapiens
  source 1..16: mol_type = genomic RNA
tctttcctgggcatcc

SEQ ID NO: 2870 - RNA, 16 nt, Homo sapiens
  source 1..16: mol_type = genomic RNA
ctttcctgggcatccc

SEQ ID NO: 2871 - RNA, 16 nt, Homo sapiens
  source 1..16: mol_type = genomic RNA
tttcctgggcatcccg

SEQ ID NO: 2872 - RNA, 16 nt, Homo sapiens
  source 1..16: mol_type = genomic RNA
ttcctgggcatcccgg

SEQ ID NO: 2873 - RNA, 16 nt, Homo sapiens
  source 1..16: mol_type = genomic RNA
tcctgggcatcccggg

SEQ ID NO: 2874 - RNA, 16 nt, Homo sapiens
  source 1..16: mol_type = genomic RNA
gcatcccggggatccc

SEQ ID NO: 2875 - RNA, 16 nt, Homo sapiens
  source 1..16: mol_type = genomic RNA
catcccggggatccca

SEQ ID NO: 2876 - RNA, 16 nt, Homo sapiens
  source 1..16: mol_type = genomic RNA
atcccggggatcccag

SEQ ID NO: 2877 - RNA, 16 nt, Homo sapiens
  source 1..16: mol_type = genomic RNA
tcccggggatcccaga

SEQ ID NO: 2878 - RNA, 16 nt, Homo sapiens
  source 1..16: mol_type = genomic RNA
cccggggatcccagag

SEQ ID NO: 2879 - RNA, 16 nt, Homo sapiens
  source 1..16: mol_type = genomic RNA
ccggcccaggtaccag

SEQ ID NO: 2880 - RNA, 16 nt, Homo sapiens
  source 1..16: mol_type = genomic RNA
cggcccaggtaccagc

SEQ ID NO: 2881 - RNA, 16 nt, Homo sapiens
  source 1..16: mol_type = genomic RNA
ggcccaggtaccagca

SEQ ID NO: 2882 - RNA, 16 nt, Homo sapiens
  source 1..16: mol_type = genomic RNA
gcccaggtaccagcag

SEQ ID NO: 2883 - RNA, 16 nt, Homo sapiens
  source 1..16: mol_type = genomic RNA
cccctgcagcctccca

SEQ ID NO: 2884 - RNA, 16 nt, Homo sapiens
  source 1..16: mol_type = genomic RNA
ccctgcagcctcccag

SEQ ID NO: 2885 - RNA, 16 nt, Homo sapiens
  source 1..16: mol_type = genomic RNA
cctgcagcctcccagc

SEQ ID NO: 2886 - RNA, 16 nt, Homo sapiens
  source 1..16: mol_type = genomic RNA
ctgcagcctcccagct

SEQ ID NO: 2887 - RNA, 16 nt, Homo sapiens
  source 1..16: mol_type = genomic RNA
tgcagcctcccagctg

SEQ ID NO: 2888 - RNA, 16 nt, Homo sapiens
  source 1..16: mol_type = genomic RNA
cagcctcccagctgcc

SEQ ID NO: 2889 - RNA, 16 nt, Homo sapiens
  source 1..16: mol_type = genomic RNA
agcctcccagctgcca

SEQ ID NO: 2890 - RNA, 16 nt, Homo sapiens
  source 1..16: mol_type = genomic RNA
gcctcccagctgccag

SEQ ID NO: 2891 - RNA, 16 nt, Homo sapiens
  source 1..16: mol_type = genomic RNA
cctcccagctgccagc

SEQ ID NO: 2892 - RNA, 16 nt, Homo sapiens
  source 1..16: mol_type = genomic RNA
cctggcggtcaaaagc

SEQ ID NO: 2893 - RNA, 16 nt, Homo sapiens
  source 1..16: mol_type = genomic RNA
ctggcggtcaaaagca

SEQ ID NO: 2894 - RNA, 16 nt, Homo sapiens
  source 1..16: mol_type = genomic RNA
tggcggtcaaaagcat

SEQ ID NO: 2895 - RNA, 16 nt, Homo sapiens
  source 1..16: mol_type = genomic RNA
ggcggtcaaaagcata

SEQ ID NO: 2896 - RNA, 16 nt, Homo sapiens
  source 1..16: mol_type = genomic RNA
gcggtcaaaagcatac

SEQ ID NO: 2897 - RNA, 16 nt, Homo sapiens
  source 1..16: mol_type = genomic RNA
cggtcaaaagcatacc

SEQ ID NO: 2898 - RNA, 16 nt, Homo sapiens
  source 1..16: mol_type = genomic RNA
ggtcaaaagcatacct

SEQ ID NO: 2899 - RNA, 16 nt, Homo sapiens
  source 1..16: mol_type = genomic RNA
gtcaaaagcatacctc

SEQ ID NO: 2900 - RNA, 16 nt, Homo sapiens
  source 1..16: mol_type = genomic RNA
aaaagcatacctctgt

SEQ ID NO: 2901 - RNA, 16 nt, Homo sapiens
  source 1..16: mol_type = genomic RNA
aaagcatacctctgtc

SEQ ID NO: 2902 - RNA, 16 nt, Homo sapiens
  source 1..16: mol_type = genomic RNA
aagcatacctctgtct

SEQ ID NO: 2903 - RNA, 16 nt, Homo sapiens
  source 1..16: mol_type = genomic RNA
agcatacctctgtctg

SEQ ID NO: 2904 - RNA, 16 nt, Homo sapiens
  source 1..16: mol_type = genomic RNA
gcatacctctgtctgt

SEQ ID NO: 2905 - RNA, 16 nt, Homo sapiens
  source 1..16: mol_type = genomic RNA
tgtctgtctttgcccg

SEQ ID NO: 2906 - RNA, 16 nt, Homo sapiens
  source 1..16: mol_type = genomic RNA
gtctgtctttgcccgc

SEQ ID NO: 2907 - RNA, 16 nt, Homo sapiens
  source 1..16: mol_type = genomic RNA
tctgtctttgcccgct

SEQ ID NO: 2908 - RNA, 16 nt, Homo sapiens
  source 1..16: mol_type = genomic RNA
tgtctttgcccgcttc

SEQ ID NO: 2909 - RNA, 16 nt, Homo sapiens
  source 1..16: mol_type = genomic RNA
gtctttgcccgcttcc

SEQ ID NO: 2910 - RNA, 16 nt, Homo sapiens
  source 1..16: mol_type = genomic RNA
tctttgcccgcttcct

SEQ ID NO: 2911 - RNA, 16 nt, Homo sapiens
  source 1..16: mol_type = genomic RNA
ctttgcccgcttcctg

SEQ ID NO: 2912 - RNA, 16 nt, Homo sapiens
  source 1..16: mol_type = genomic RNA
tttgcccgcttcctgg

SEQ ID NO: 2913 - RNA, 16 nt, Homo sapiens
  source 1..16: mol_type = genomic RNA
ttgcccgcttcctggc

SEQ ID NO: 2914 - RNA, 16 nt, Homo sapiens
  source 1..16: mol_type = genomic RNA
tgcccgcttcctggct

SEQ ID NO: 2915 - RNA, 16 nt, Homo sapiens
  source 1..16: mol_type = genomic RNA
gcccgcttcctggcta

SEQ ID NO: 2916 - RNA, 16 nt, Homo sapiens
  source 1..16: mol_type = genomic RNA
cccgcttcctggctag

SEQ ID NO: 2917 - RNA, 16 nt, Homo sapiens
  source 1..16: mol_type = genomic RNA
ccgcttcctggctaga

SEQ ID NO: 2918 - RNA, 16 nt, Homo sapiens
  source 1..16: mol_type = genomic RNA
cgcttcctggctagac

SEQ ID NO: 2919 - RNA, 16 nt, Homo sapiens
  source 1..16: mol_type = genomic RNA
gcttcctggctagacc

SEQ ID NO: 2920 - RNA, 16 nt, Homo sapiens
  source 1..16: mol_type = genomic RNA
cttcctggctagacct

SEQ ID NO: 2921 - RNA, 16 nt, Homo sapiens
  source 1..16: mol_type = genomic RNA
ttcctggctagacctg

SEQ ID NO: 2922 - RNA, 16 nt, Homo sapiens
  source 1..16: mol_type = genomic RNA
tcctggctagacctgc

SEQ ID NO: 2923 - RNA, 16 nt, Homo sapiens
  source 1..16: mol_type = genomic RNA
cctggctagacctgcg

SEQ ID NO: 2924 - RNA, 16 nt, Homo sapiens
  source 1..16: mol_type = genomic RNA
cgcaccccggctgacg

SEQ ID NO: 2925 - RNA, 16 nt, Homo sapiens
  source 1..16: mol_type = genomic RNA
gcaccccggctgacgt

SEQ ID NO: 2926 - RNA, 16 nt, Homo sapiens
  source 1..16: mol_type = genomic RNA
caccccggctgacgtg

SEQ ID NO: 2927 - RNA, 16 nt, Homo sapiens
  source 1..16: mol_type = genomic RNA
ccccggctgacgtgca

SEQ ID NO: 2928 - RNA, 16 nt, Homo sapiens
  source 1..16: mol_type = genomic RNA
cccggctgacgtgcaa

SEQ ID NO: 2929 - RNA, 16 nt, Homo sapiens
  source 1..16: mol_type = genomic RNA
ccggctgacgtgcaag

SEQ ID NO: 2930 - RNA, 16 nt, Homo sapiens
  source 1..16: mol_type = genomic RNA
cggctgacgtgcaagg

SEQ ID NO: 2931 - RNA, 16 nt, Homo sapiens
  source 1..16: mol_type = genomic RNA
ggctgacgtgcaaggg

SEQ ID NO: 2932 - RNA, 16 nt, Homo sapiens
  source 1..16: mol_type = genomic RNA
gctgacgtgcaaggga

SEQ ID NO: 2933 - RNA, 16 nt, Homo sapiens
  source 1..16: mol_type = genomic RNA
ctgacgtgcaagggag

SEQ ID NO: 2934 - RNA, 16 nt, Homo sapiens
  source 1..16: mol_type = genomic RNA
tgacgtgcaagggagc

SEQ ID NO: 2935 - RNA, 16 nt, Homo sapiens
  source 1..16: mol_type = genomic RNA
gacgtgcaagggagct

SEQ ID NO: 2936 - RNA, 16 nt, Homo sapiens
  source 1..16: mol_type = genomic RNA
acgtgcaagggagctc

SEQ ID NO: 2937 - RNA, 16 nt, Homo sapiens
  source 1..16: mol_type = genomic RNA
cgtgcaagggagctcg

SEQ ID NO: 2938 - RNA, 16 nt, Homo sapiens
  source 1..16: mol_type = genomic RNA
gtgcaagggagctcgc

SEQ ID NO: 2939 - RNA, 16 nt, Homo sapiens
  source 1..16: mol_type = genomic RNA
tgcaagggagctcgct

SEQ ID NO: 2940 - RNA, 16 nt, Homo sapiens
  source 1..16: mol_type = genomic RNA
gcaagggagctcgctg

SEQ ID NO: 2941 - RNA, 16 nt, Homo sapiens
  source 1..16: mol_type = genomic RNA
caagggagctcgctgg

SEQ ID NO: 2942 - RNA, 16 nt, Homo sapiens
  source 1..16: mol_type = genomic RNA
gagctcgctggcctct

SEQ ID NO: 2943 - RNA, 16 nt, Homo sapiens
  source 1..16: mol_type = genomic RNA
agctcgctggcctctc

SEQ ID NO: 2944 - RNA, 16 nt, Homo sapiens
  source 1..16: mol_type = genomic RNA
gctcgctggcctctct

SEQ ID NO: 2945 - RNA, 16 nt, Homo sapiens
  source 1..16: mol_type = genomic RNA
ctcgctggcctctctg

SEQ ID NO: 2946 - RNA, 16 nt, Homo sapiens
  source 1..16: mol_type = genomic RNA
tcgctggcctctctgt

SEQ ID NO: 2947 - RNA, 16 nt, Homo sapiens
  source 1..16: mol_type = genomic RNA
cgctggcctctctgtg

SEQ ID NO: 2948 - RNA, 16 nt, Homo sapiens
  source 1..16: mol_type = genomic RNA
gctggcctctctgtgc

SEQ ID NO: 2949 - RNA, 16 nt, Homo sapiens
  source 1..16: mol_type = genomic RNA
ctggcctctctgtgcc

SEQ ID NO: 2950 - RNA, 16 nt, Homo sapiens
  source 1..16: mol_type = genomic RNA
tggcctctctgtgccc

SEQ ID NO: 2951 - RNA, 16 nt, Homo sapiens
  source 1..16: mol_type = genomic RNA
ggcctctctgtgccct

SEQ ID NO: 2952 - RNA, 16 nt, Homo sapiens
  source 1..16: mol_type = genomic RNA
gcctctctgtgccctt

SEQ ID NO: 2953 - RNA, 16 nt, Homo sapiens
  source 1..16: mol_type = genomic RNA
cctctctgtgcccttg

SEQ ID NO: 2954 - RNA, 16 nt, Homo sapiens
  source 1..16: mol_type = genomic RNA
ctctctgtgcccttgt

SEQ ID NO: 2955 - RNA, 16 nt, Homo sapiens
  source 1..16: mol_type = genomic RNA
tccgtgaaattctggc

SEQ ID NO: 2956 - RNA, 16 nt, Homo sapiens
  source 1..16: mol_type = genomic RNA
ccgtgaaattctggct

SEQ ID NO: 2957 - RNA, 16 nt, Homo sapiens
  source 1..16: mol_type = genomic RNA
cgtgaaattctggctg

SEQ ID NO: 2958 - RNA, 16 nt, Homo sapiens
  source 1..16: mol_type = genomic RNA
gtgaaattctggctga

SEQ ID NO: 2959 - RNA, 16 nt, Homo sapiens
  source 1..16: mol_type = genomic RNA
tgaaattctggctgaa

SEQ ID NO: 2960 - RNA, 16 nt, Homo sapiens
  source 1..16: mol_type = genomic RNA
attctggctgaatgtc

SEQ ID NO: 2961 - RNA, 16 nt, Homo sapiens
  source 1..16: mol_type = genomic RNA
ttctggctgaatgtct

SEQ ID NO: 2962 - RNA, 16 nt, Homo sapiens
  source 1..16: mol_type = genomic RNA
tctggctgaatgtctc

SEQ ID NO: 2963 - RNA, 16 nt, Homo sapiens
  source 1..16: mol_type = genomic RNA
ctggctgaatgtctcc

SEQ ID NO: 2964 - RNA, 16 nt, Homo sapiens
  source 1..16: mol_type = genomic RNA
tggctgaatgtctccc

SEQ ID NO: 2965 - RNA, 16 nt, Homo sapiens
  source 1..16: mol_type = genomic RNA
ggctgaatgtctcccc

SEQ ID NO: 2966 - RNA, 16 nt, Homo sapiens
  source 1..16: mol_type = genomic RNA
gctgaatgtctccccc

SEQ ID NO: 2967 - RNA, 16 nt, Homo sapiens
  source 1..16: mol_type = genomic RNA
ctgaatgtctcccccc

SEQ ID NO: 2968 - RNA, 16 nt, Homo sapiens
  source 1..16: mol_type = genomic RNA
tgaatgtctcccccca

SEQ ID NO: 2969 - RNA, 16 nt, Homo sapiens
  source 1..16: mol_type = genomic RNA
gaatgtctccccccac

SEQ ID NO: 2970 - RNA, 16 nt, Homo sapiens
  source 1..16: mol_type = genomic RNA
aatgtctccccccacc

SEQ ID NO: 2971 - RNA, 16 nt, Homo sapiens
  source 1..16: mol_type = genomic RNA
atgtctccccccacct

SEQ ID NO: 2972 - RNA, 16 nt, Homo sapiens
  source 1..16: mol_type = genomic RNA
tgtctccccccacctt

SEQ ID NO: 2973 - RNA, 16 nt, Homo sapiens
  source 1..16: mol_type = genomic RNA
gtctccccccaccttc

SEQ ID NO: 2974 - RNA, 16 nt, Homo sapiens
  source 1..16: mol_type = genomic RNA
tctccccccaccttcc

SEQ ID NO: 2975 - RNA, 16 nt, Homo sapiens
  source 1..16: mol_type = genomic RNA
ctccccccaccttccg

SEQ ID NO: 2976 - RNA, 16 nt, Homo sapiens
  source 1..16: mol_type = genomic RNA
tccccccaccttccga

SEQ ID NO: 2977 - RNA, 16 nt, Homo sapiens
  source 1..16: mol_type = genomic RNA
ccccccaccttccgac

SEQ ID NO: 2978 - RNA, 16 nt, Homo sapiens
  source 1..16: mol_type = genomic RNA
cccccaccttccgacg

SEQ ID NO: 2979 - RNA, 16 nt, Homo sapiens
  source 1..16: mol_type = genomic RNA
ccccaccttccgacgc

SEQ ID NO: 2980 - RNA, 16 nt, Homo sapiens
  source 1..16: mol_type = genomic RNA
cccaccttccgacgct

SEQ ID NO: 2981 - RNA, 16 nt, Homo sapiens
  source 1..16: mol_type = genomic RNA
ccaccttccgacgctg

SEQ ID NO: 2982 - RNA, 16 nt, Homo sapiens
  source 1..16: mol_type = genomic RNA
caccttccgacgctgt

SEQ ID NO: 2983 - RNA, 16 nt, Homo sapiens
  source 1..16: mol_type = genomic RNA
accttccgacgctgtc

SEQ ID NO: 2984 - RNA, 16 nt, Homo sapiens
  source 1..16: mol_type = genomic RNA
ccttccgacgctgtct

SEQ ID NO: 2985 - RNA, 16 nt, Homo sapiens
  source 1..16: mol_type = genomic RNA
cttccgacgctgtcta

SEQ ID NO: 2986 - RNA, 16 nt, Homo sapiens
  source 1..16: mol_type = genomic RNA
ttccgacgctgtctag

SEQ ID NO: 2987 - RNA, 16 nt, Homo sapiens
  source 1..16: mol_type = genomic RNA
tccgacgctgtctagg

SEQ ID NO: 2988 - RNA, 16 nt, Homo sapiens
  source 1..16: mol_type = genomic RNA
ccgacgctgtctaggc

SEQ ID NO: 2989 - RNA, 16 nt, Homo sapiens
  source 1..16: mol_type = genomic RNA
cgacgctgtctaggca

SEQ ID NO: 2990 - RNA, 16 nt, Homo sapiens
  source 1..16: mol_type = genomic RNA
gacgctgtctaggcaa

SEQ ID NO: 2991 - RNA, 16 nt, Homo sapiens
  source 1..16: mol_type = genomic RNA
acgctgtctaggcaaa

SEQ ID NO: 2992 - RNA, 16 nt, Homo sapiens
  source 1..16: mol_type = genomic RNA
cgctgtctaggcaaac

SEQ ID NO: 2993 - RNA, 16 nt, Homo sapiens
  source 1..16: mol_type = genomic RNA
gctgtctaggcaaacc

SEQ ID NO: 2994 - RNA, 16 nt, Homo sapiens
  source 1..16: mol_type = genomic RNA
ctgtctaggcaaacct

SEQ ID NO: 2995 - RNA, 16 nt, Homo sapiens
  source 1..16: mol_type = genomic RNA
tgtctaggcaaacctg

SEQ ID NO: 2996 - RNA, 16 nt, Homo sapiens
  source 1..16: mol_type = genomic RNA
gtctaggcaaacctgg

SEQ ID NO: 2997 - RNA, 16 nt, Homo sapiens
  source 1..16: mol_type = genomic RNA
tctaggcaaacctgga

SEQ ID NO: 2998 - RNA, 16 nt, Homo sapiens
  source 1..16: mol_type = genomic RNA
ctaggcaaacctggat

SEQ ID NO: 2999 - RNA, 16 nt, Homo sapiens
  source 1..16: mol_type = genomic RNA
taggcaaacctggatt

SEQ ID NO: 3000 - RNA, 16 nt, Homo sapiens
  source 1..16: mol_type = genomic RNA
aggcaaacctggatta

SEQ ID NO: 3001 - RNA, 16 nt, Homo sapiens
  source 1..16: mol_type = genomic RNA
ggcaaacctggattag

SEQ ID NO: 3002 - RNA, 16 nt, Homo sapiens
  source 1..16: mol_type = genomic RNA
gcaaacctggattaga

SEQ ID NO: 3003 - RNA, 16 nt, Homo sapiens
  source 1..16: mol_type = genomic RNA
caaacctggattagag

SEQ ID NO: 3004 - RNA, 16 nt, Homo sapiens
  source 1..16: mol_type = genomic RNA
aaacctggattagagt

SEQ ID NO: 3005 - RNA, 16 nt, Homo sapiens
  source 1..16: mol_type = genomic RNA
gagttacatctcctgg

SEQ ID NO: 3006 - RNA, 16 nt, Homo sapiens
  source 1..16: mol_type = genomic RNA
agttacatctcctgga

SEQ ID NO: 3007 - RNA, 16 nt, Homo sapiens
  source 1..16: mol_type = genomic RNA
tacatctcctggatga

SEQ ID NO: 3008 - RNA, 16 nt, Homo sapiens
  source 1..16: mol_type = genomic RNA
acatctcctggatgat

SEQ ID NO: 3009 - RNA, 16 nt, Homo sapiens
  source 1..16: mol_type = genomic RNA
aaaatgccccctccct

SEQ ID NO: 3010 - RNA, 16 nt, Homo sapiens
  source 1..16: mol_type = genomic RNA
aaatgccccctccctg

SEQ ID NO: 3011 - RNA, 16 nt, Homo sapiens
  source 1..16: mol_type = genomic RNA
aatgccccctccctgt

SEQ ID NO: 3012 - RNA, 16 nt, Homo sapiens
  source 1..16: mol_type = genomic RNA
atgccccctccctgtg

SEQ ID NO: 3013 - RNA, 16 nt, Homo sapiens
  source 1..16: mol_type = genomic RNA
tgccccctccctgtgg

SEQ ID NO: 3014 - RNA, 16 nt, Homo sapiens
  source 1..16: mol_type = genomic RNA
gccccctccctgtgga

SEQ ID NO: 3015 - RNA, 16 nt, Homo sapiens
  source 1..16: mol_type = genomic RNA
ccccctccctgtggat

SEQ ID NO: 3016 - RNA, 16 nt, Homo sapiens
  source 1..16: mol_type = genomic RNA
cccctccctgtggatc

SEQ ID NO: 3017 - RNA, 16 nt, Homo sapiens
  source 1..16: mol_type = genomic RNA
ccctccctgtggatcc

SEQ ID NO: 3018 - RNA, 16 nt, Homo sapiens
  source 1..16: mol_type = genomic RNA
cctccctgtggatcct

SEQ ID NO: 3019 - RNA, 16 nt, Homo sapiens
  source 1..16: mol_type = genomic RNA
ctccctgtggatccta

SEQ ID NO: 3020 - RNA, 16 nt, Homo sapiens
  source 1..16: mol_type = genomic RNA
tccctgtggatcctat

SEQ ID NO: 3021 - RNA, 16 nt, Homo sapiens
  source 1..16: mol_type = genomic RNA
ccctgtggatcctata

SEQ ID NO: 3022 - RNA, 16 nt, Homo sapiens
  source 1..16: mol_type = genomic RNA
cctgtggatcctatag

SEQ ID NO: 3023 - RNA, 16 nt, Homo sapiens
  source 1..16: mol_type = genomic RNA
gtggatcctatagaag

SEQ ID NO: 3024 - RNA, 16 nt, Homo sapiens
  source 1..16: mol_type = genomic RNA
tggatcctatagaaga

SEQ ID NO: 3025 - RNA, 16 nt, Homo sapiens
  source 1..16: mol_type = genomic RNA
ttgtgtgatgagtgca

SEQ ID NO: 3026 - RNA, 16 nt, Homo sapiens
  source 1..16: mol_type = genomic RNA
tgtgtgatgagtgcag

SEQ ID NO: 3027 - RNA, 16 nt, Homo sapiens
  source 1..16: mol_type = genomic RNA
gtgtgatgagtgcaga

SEQ ID NO: 3028 - RNA, 16 nt, Homo sapiens
  source 1..16: mol_type = genomic RNA
tgtgatgagtgcagag

SEQ ID NO: 3029 - RNA, 16 nt, Homo sapiens
  source 1..16: mol_type = genomic RNA
gtgatgagtgcagaga

SEQ ID NO: 3030 - RNA, 16 nt, Homo sapiens
  source 1..16: mol_type = genomic RNA
tgatgagtgcagagat

SEQ ID NO: 3031 - RNA, 16 nt, Homo sapiens
  source 1..16: mol_type = genomic RNA
gatgagtgcagagata

SEQ ID NO: 3032 - RNA, 16 nt, Homo sapiens
  source 1..16: mol_type = genomic RNA
atgagtgcagagatat

SEQ ID NO: 3033 - RNA, 16 nt, Homo sapiens
  source 1..16: mol_type = genomic RNA
tgagtgcagagatatg

SEQ ID NO: 3034 - RNA, 16 nt, Homo sapiens
  source 1..16: mol_type = genomic RNA
gagtgcagagatatgt

SEQ ID NO: 3035 - RNA, 16 nt, Homo sapiens
  source 1..16: mol_type = genomic RNA
agtgcagagatatgtc

SEQ ID NO: 3036 - RNA, 16 nt, Homo sapiens
  source 1..16: mol_type = genomic RNA
gtgcagagatatgtca

SEQ ID NO: 3037 - RNA, 16 nt, Homo sapiens
  source 1..16: mol_type = genomic RNA
tgcagagatatgtcac

SEQ ID NO: 3038 - RNA, 16 nt, Homo sapiens
  source 1..16: mol_type = genomic RNA
gcagagatatgtcaca

SEQ ID NO: 3039 - RNA, 16 nt, Homo sapiens
  source 1..16: mol_type = genomic RNA
atgtcacaatatcccc

SEQ ID NO: 3040 - RNA, 16 nt, Homo sapiens
  source 1..16: mol_type = genomic RNA
tgtcacaatatcccct

SEQ ID NO: 3041 - RNA, 16 nt, Homo sapiens
  source 1..16: mol_type = genomic RNA
gtcacaatatcccctg

SEQ ID NO: 3042 - RNA, 16 nt, Homo sapiens
  source 1..16: mol_type = genomic RNA
tcacaatatcccctgt

SEQ ID NO: 3043 - RNA, 16 nt, Homo sapiens
  source 1..16: mol_type = genomic RNA
acaatatcccctgtag

SEQ ID NO: 3044 - RNA, 16 nt, Homo sapiens
  source 1..16: mol_type = genomic RNA
atcccctgtagaaaaa

SEQ ID NO: 3045 - RNA, 16 nt, Homo sapiens
  source 1..16: mol_type = genomic RNA
tcccctgtagaaaaag

SEQ ID NO: 3046 - RNA, 16 nt, Homo sapiens
  source 1..16: mol_type = genomic RNA
cccctgtagaaaaagc

SEQ ID NO: 3047 - RNA, 16 nt, Homo sapiens
  source 1..16: mol_type = genomic RNA
ccctgtagaaaaagcc

SEQ ID NO: 3048 - RNA, 16 nt, Homo sapiens
  source 1..16: mol_type = genomic RNA
cctgtagaaaaagcct

SEQ ID NO: 3049 - RNA, 16 nt, Homo sapiens
  source 1..16: mol_type = genomic RNA
ctgtagaaaaagcctg

SEQ ID NO: 3050 - RNA, 16 nt, Homo sapiens
  source 1..16: mol_type = genomic RNA
tgtagaaaaagcctga

SEQ ID NO: 3051 - RNA, 16 nt, Homo sapiens
  source 1..16: mol_type = genomic RNA
gtagaaaaagcctgaa

SEQ ID NO: 3052 - RNA, 16 nt, Homo sapiens
  source 1..16: mol_type = genomic RNA
tagaaaaagcctgaaa

SEQ ID NO: 3053 - RNA, 16 nt, Homo sapiens
  source 1..16: mol_type = genomic RNA
agaaaaagcctgaaat

SEQ ID NO: 3054 - RNA, 16 nt, Homo sapiens
  source 1..16: mol_type = genomic RNA
acttcggtgatcagtg

SEQ ID NO: 3055 - RNA, 16 nt, Homo sapiens
  source 1..16: mol_type = genomic RNA
cttcggtgatcagtgc

SEQ ID NO: 3056 - RNA, 16 nt, Homo sapiens
  source 1..16: mol_type = genomic RNA
ttcggtgatcagtgca

SEQ ID NO: 3057 - RNA, 16 nt, Homo sapiens
  source 1..16: mol_type = genomic RNA
tcggtgatcagtgcag

SEQ ID NO: 3058 - RNA, 16 nt, Homo sapiens
  source 1..16: mol_type = genomic RNA
cggtgatcagtgcaga

SEQ ID NO: 3059 - RNA, 16 nt, Homo sapiens
  source 1..16: mol_type = genomic RNA
ggtgatcagtgcagat

SEQ ID NO: 3060 - RNA, 16 nt, Homo sapiens
  source 1..16: mol_type = genomic RNA
gtgatcagtgcagatg

SEQ ID NO: 3061 - RNA, 16 nt, Homo sapiens
  source 1..16: mol_type = genomic RNA
tgatcagtgcagatgt

SEQ ID NO: 3062 - RNA, 16 nt, Homo sapiens
  source 1..16: mol_type = genomic RNA
gatcagtgcagatgtg

SEQ ID NO: 3063 - RNA, 16 nt, Homo sapiens
  source 1..16: mol_type = genomic RNA
atcagtgcagatgtgt

SEQ ID NO: 3064 - RNA, 16 nt, Homo sapiens
  source 1..16: mol_type = genomic RNA
agaactccatagtaga

SEQ ID NO: 3065 - RNA, 16 nt, Homo sapiens
  source 1..16: mol_type = genomic RNA
gaactccatagtagac

SEQ ID NO: 3066 - RNA, 16 nt, Homo sapiens
  source 1..16: mol_type = genomic RNA
actccatagtagactg

SEQ ID NO: 3067 - RNA, 16 nt, Homo sapiens
  source 1..16: mol_type = genomic RNA
ccatagtagactgaac

SEQ ID NO: 3068 - RNA, 16 nt, Homo sapiens
  source 1..16: mol_type = genomic RNA
catagtagactgaacc

SEQ ID NO: 3069 - RNA, 16 nt, Homo sapiens
  source 1..16: mol_type = genomic RNA
atagtagactgaacct

SEQ ID NO: 3070 - RNA, 16 nt, Homo sapiens
  source 1..16: mol_type = genomic RNA
tagtagactgaaccta

SEQ ID NO: 3071 - RNA, 16 nt, Homo sapiens
  source 1..16: mol_type = genomic RNA
agtagactgaacctag

SEQ ID NO: 3072 - RNA, 16 nt, Homo sapiens
  source 1..16: mol_type = genomic RNA
gtagactgaacctaga

SEQ ID NO: 3073 - RNA, 16 nt, Homo sapiens
  source 1..16: mol_type = genomic RNA
tagactgaacctagag

SEQ ID NO: 3074 - RNA, 16 nt, Homo sapiens
  source 1..16: mol_type = genomic RNA
agactgaacctagaga

SEQ ID NO: 3075 - RNA, 16 nt, Homo sapiens
  source 1..16: mol_type = genomic RNA
gactgaacctagagaa

SEQ ID NO: 3076 - RNA, 16 nt, Homo sapiens
  source 1..16: mol_type = genomic RNA
actgaacctagagaat

SEQ ID NO: 3077 - RNA, 16 nt, Homo sapiens
  source 1..16: mol_type = genomic RNA
ctgaacctagagaatg

SEQ ID NO: 3078 - RNA, 16 nt, Homo sapiens
  source 1..16: mol_type = genomic RNA
tgaacctagagaatgg

SEQ ID NO: 3079 - RNA, 16 nt, Homo sapiens
  source 1..16: mol_type = genomic RNA
gaacctagagaatggt

SEQ ID NO: 3080 - RNA, 16 nt, Homo sapiens
  source 1..16: mol_type = genomic RNA
aacctagagaatggtt

SEQ ID NO: 3081 - RNA, 16 nt, Homo sapiens
  source 1..16: mol_type = genomic RNA
acctagagaatggtta

SEQ ID NO: 3082 - RNA, 16 nt, Homo sapiens
  source 1..16: mol_type = genomic RNA
cctagagaatggttac

SEQ ID NO: 3083 - RNA, 16 nt, Homo sapiens
  source 1..16: mol_type = genomic RNA
acttaggtgatcagtg

SEQ ID NO: 3084 - RNA, 16 nt, Homo sapiens
  source 1..16: mol_type = genomic RNA
taggtgatcagtgtag

SEQ ID NO: 3085 - RNA, 16 nt, Homo sapiens
  source 1..16: mol_type = genomic RNA
aggtgatcagtgtaga

SEQ ID NO: 3086 - RNA, 16 nt, Homo sapiens
  source 1..16: mol_type = genomic RNA
ggtgatcagtgtagag

SEQ ID NO: 3087 - RNA, 16 nt, Homo sapiens
  source 1..16: mol_type = genomic RNA
tctcgtgtagacagag

SEQ ID NO: 3088 - RNA, 16 nt, Homo sapiens
  source 1..16: mol_type = genomic RNA
ctcgtgtagacagagc

SEQ ID NO: 3089 - RNA, 16 nt, Homo sapiens
  source 1..16: mol_type = genomic RNA
tcgtgtagacagagcc

SEQ ID NO: 3090 - RNA, 16 nt, Homo sapiens
  source 1..16: mol_type = genomic RNA
cgtgtagacagagcct

SEQ ID NO: 3091 - RNA, 16 nt, Homo sapiens
  source 1..16: mol_type = genomic RNA
gtgtagacagagccta

SEQ ID NO: 3092 - RNA, 16 nt, Homo sapiens
  source 1..16: mol_type = genomic RNA
tgtagacagagcctag

SEQ ID NO: 3093 - RNA, 16 nt, Homo sapiens
  source 1..16: mol_type = genomic RNA
gtagacagagcctaga

SEQ ID NO: 3094 - RNA, 16 nt, Homo sapiens
  source 1..16: mol_type = genomic RNA
tagacagagcctagac

SEQ ID NO: 3095 - RNA, 16 nt, Homo sapiens
  source 1..16: mol_type = genomic RNA
agacagagcctagaca

SEQ ID NO: 3096 - RNA, 16 nt, Homo sapiens
  source 1..16: mol_type = genomic RNA
gacagagcctagacaa

SEQ ID NO: 3097 - RNA, 16 nt, Homo sapiens
  source 1..16: mol_type = genomic RNA
acagagcctagacaat

SEQ ID NO: 3098 - RNA, 16 nt, Homo sapiens
  source 1..16: mol_type = genomic RNA
cagagcctagacaatt

SEQ ID NO: 3099 - RNA, 16 nt, Homo sapiens
  source 1..16: mol_type = genomic RNA
agagcctagacaattg

SEQ ID NO: 3100 - RNA, 16 nt, Homo sapiens
  source 1..16: mol_type = genomic RNA
gagcctagacaattgt

SEQ ID NO: 3101 - RNA, 16 nt, Homo sapiens
  source 1..16: mol_type = genomic RNA
acatcacctagtgatc

SEQ ID NO: 3102 - RNA, 16 nt, Homo sapiens
  source 1..16: mol_type = genomic RNA
tcacctagtgatcagt

SEQ ID NO: 3103 - RNA, 16 nt, Homo sapiens
  source 1..16: mol_type = genomic RNA
cacctagtgatcagtg

SEQ ID NO: 3104 - RNA, 16 nt, Homo sapiens
  source 1..16: mol_type = genomic RNA
acctagtgatcagtgc

SEQ ID NO: 3105 - RNA, 16 nt, Homo sapiens
  source 1..16: mol_type = genomic RNA
cctagtgatcagtgca

SEQ ID NO: 3106 - RNA, 16 nt, Homo sapiens
  source 1..16: mol_type = genomic RNA
ctagtgatcagtgcag

SEQ ID NO: 3107 - RNA, 16 nt, Homo sapiens
  source 1..16: mol_type = genomic RNA
tagtgatcagtgcagg

SEQ ID NO: 3108 - RNA, 16 nt, Homo sapiens
  source 1..16: mol_type = genomic RNA
agtgatcagtgcaggg

SEQ ID NO: 3109 - RNA, 16 nt, Homo sapiens
  source 1..16: mol_type = genomic RNA
gtgatcagtgcaggga

SEQ ID NO: 3110 - RNA, 16 nt, Homo sapiens
  source 1..16: mol_type = genomic RNA
tgatcagtgcagggat

SEQ ID NO: 3111 - RNA, 16 nt, Homo sapiens
  source 1..16: mol_type = genomic RNA
gatcagtgcagggata

SEQ ID NO: 3112 - RNA, 16 nt, Homo sapiens
  source 1..16: mol_type = genomic RNA
atcagtgcagggataa

SEQ ID NO: 3113 - RNA, 16 nt, Homo sapiens
  source 1..16: mol_type = genomic RNA
tcagtgcagggataag

SEQ ID NO: 3114 - RNA, 16 nt, Homo sapiens
  source 1..16: mol_type = genomic RNA
cagtgcagggataagt

SEQ ID NO: 3115 - RNA, 16 nt, Homo sapiens
  source 1..16: mol_type = genomic RNA
agtgcagggataagtc

SEQ ID NO: 3116 - RNA, 16 nt, Homo sapiens
  source 1..16: mol_type = genomic RNA
gtgcagggataagtca

SEQ ID NO: 3117 - RNA, 16 nt, Homo sapiens
  source 1..16: mol_type = genomic RNA
tgcagggataagtcat

SEQ ID NO: 3118 - RNA, 16 nt, Homo sapiens
  source 1..16: mol_type = genomic RNA
gcagggataagtcata

SEQ ID NO: 3119 - RNA, 16 nt, Homo sapiens
  source 1..16: mol_type = genomic RNA
aagtcataaagcctcc

SEQ ID NO: 3120 - RNA, 16 nt, Homo sapiens
  source 1..16: mol_type = genomic RNA
agtcataaagcctcct

SEQ ID NO: 3121 - RNA, 16 nt, Homo sapiens
  source 1..16: mol_type = genomic RNA
gtcataaagcctcctg

SEQ ID NO: 3122 - RNA, 16 nt, Homo sapiens
  source 1..16: mol_type = genomic RNA
tcataaagcctcctgt

SEQ ID NO: 3123 - RNA, 16 nt, Homo sapiens
  source 1..16: mol_type = genomic RNA
ataaagcctcctgtag

SEQ ID NO: 3124 - RNA, 16 nt, Homo sapiens
  source 1..16: mol_type = genomic RNA
taaagcctcctgtagg

SEQ ID NO: 3125 - RNA, 16 nt, Homo sapiens
  source 1..16: mol_type = genomic RNA
aaagcctcctgtaggc

SEQ ID NO: 3126 - RNA, 16 nt, Homo sapiens
  source 1..16: mol_type = genomic RNA
aagcctcctgtaggca

SEQ ID NO: 3127 - RNA, 16 nt, Homo sapiens
  source 1..16: mol_type = genomic RNA
agcctcctgtaggcag

SEQ ID NO: 3128 - RNA, 16 nt, Homo sapiens
  source 1..16: mol_type = genomic RNA
gcctcctgtaggcaga

SEQ ID NO: 3129 - RNA, 16 nt, Homo sapiens
  source 1..16: mol_type = genomic RNA
cctcctgtaggcagag

SEQ ID NO: 3130 - RNA, 16 nt, Homo sapiens
  source 1..16: mol_type = genomic RNA
ctcctgtaggcagagt

SEQ ID NO: 3131 - RNA, 16 nt, Homo sapiens
  source 1..16: mol_type = genomic RNA
tcctgtaggcagagtg

SEQ ID NO: 3132 - RNA, 16 nt, Homo sapiens
  source 1..16: mol_type = genomic RNA
cctgtaggcagagtgt

SEQ ID NO: 3133 - RNA, 16 nt, Homo sapiens
  source 1..16: mol_type = genomic RNA
ctgtaggcagagtgta

SEQ ID NO: 3134 - RNA, 16 nt, Homo sapiens
  source 1..16: mol_type = genomic RNA
tgtaggcagagtgtag

SEQ ID NO: 3135 - RNA, 16 nt, Homo sapiens
  source 1..16: mol_type = genomic RNA
gtaggcagagtgtagg

SEQ ID NO: 3136 - RNA, 16 nt, Homo sapiens
  source 1..16: mol_type = genomic RNA
taggcagagtgtaggc

SEQ ID NO: 3137 - RNA, 16 nt, Homo sapiens
  source 1..16: mol_type = genomic RNA
aggcagagtgtaggca

SEQ ID NO: 3138 - RNA, 16 nt, Homo sapiens
  source 1..16: mol_type = genomic RNA
ggcagagtgtaggcaa

SEQ ID NO: 3139 - RNA, 16 nt, Homo sapiens
  source 1..16: mol_type = genomic RNA
gcagagtgtaggcaag

SEQ ID NO: 3140 - RNA, 16 nt, Homo sapiens
  source 1..16: mol_type = genomic RNA
cagagtgtaggcaagt

SEQ ID NO: 3141 - RNA, 16 nt, Homo sapiens
  source 1..16: mol_type = genomic RNA
agagtgtaggcaagtg

SEQ ID NO: 3142 - RNA, 16 nt, Homo sapiens
  source 1..16: mol_type = genomic RNA
gagtgtaggcaagtgt

SEQ ID NO: 3143 - RNA, 16 nt, Homo sapiens
  source 1..16: mol_type = genomic RNA
agtgtaggcaagtgtt

SEQ ID NO: 3144 - RNA, 16 nt, Homo sapiens
  source 1..16: mol_type = genomic RNA
gtgtaggcaagtgttc

SEQ ID NO: 3145 - RNA, 16 nt, Homo sapiens
  source 1..16: mol_type = genomic RNA
tgtaggcaagtgttcc

SEQ ID NO: 3146 - RNA, 16 nt, Homo sapiens
  source 1..16: mol_type = genomic RNA
gtaggcaagtgttccc

SEQ ID NO: 3147 - RNA, 16 nt, Homo sapiens
  source 1..16: mol_type = genomic RNA
taggcaagtgttccct

SEQ ID NO: 3148 - RNA, 16 nt, Homo sapiens
  source 1..16: mol_type = genomic RNA
aggcaagtgttccctc

SEQ ID NO: 3149 - RNA, 16 nt, Homo sapiens
  source 1..16: mol_type = genomic RNA
ggcaagtgttccctcc

SEQ ID NO: 3150 - RNA, 16 nt, Homo sapiens
  source 1..16: mol_type = genomic RNA
gcaagtgttccctccc

SEQ ID NO: 3151 - RNA, 16 nt, Homo sapiens
  source 1..16: mol_type = genomic RNA
caagtgttccctccct

SEQ ID NO: 3152 - RNA, 16 nt, Homo sapiens
  source 1..16: mol_type = genomic RNA
aagtgttccctccctg

SEQ ID NO: 3153 - RNA, 16 nt, Homo sapiens
  source 1..16: mol_type = genomic RNA
agtgttccctccctgg

SEQ ID NO: 3154 - RNA, 16 nt, Homo sapiens
  source 1..16: mol_type = genomic RNA
gtgttccctccctggg

SEQ ID NO: 3155 - RNA, 16 nt, Homo sapiens
  source 1..16: mol_type = genomic RNA
tgttccctccctgggc

SEQ ID NO: 3156 - RNA, 16 nt, Homo sapiens
  source 1..16: mol_type = genomic RNA
gttccctccctgggct

SEQ ID NO: 3157 - RNA, 16 nt, Homo sapiens
  source 1..16: mol_type = genomic RNA
ttccctccctgggctg

SEQ ID NO: 3158 - RNA, 16 nt, Homo sapiens
  source 1..16: mol_type = genomic RNA
tccctccctgggctga

SEQ ID NO: 3159 - RNA, 16 nt, Homo sapiens
  source 1..16: mol_type = genomic RNA
ccctccctgggctgat

SEQ ID NO: 3160 - RNA, 16 nt, Homo sapiens
  source 1..16: mol_type = genomic RNA
cctccctgggctgatc

SEQ ID NO: 3161 - RNA, 16 nt, Homo sapiens
  source 1..16: mol_type = genomic RNA
ctccctgggctgatca

SEQ ID NO: 3162 - RNA, 16 nt, Homo sapiens
  source 1..16: mol_type = genomic RNA
tccctgggctgatcag

SEQ ID NO: 3163 - RNA, 16 nt, Homo sapiens
  source 1..16: mol_type = genomic RNA
ccctgggctgatcagt

SEQ ID NO: 3164 - RNA, 16 nt, Homo sapiens
  source 1..16: mol_type = genomic RNA
cctgggctgatcagtg

SEQ ID NO: 3165 - RNA, 16 nt, Homo sapiens
  source 1..16: mol_type = genomic RNA
ctgggctgatcagtgc

SEQ ID NO: 3166 - RNA, 16 nt, Homo sapiens
  source 1..16: mol_type = genomic RNA
tgggctgatcagtgca

SEQ ID NO: 3167 - RNA, 16 nt, Homo sapiens
  source 1..16: mol_type = genomic RNA
gggctgatcagtgcag

SEQ ID NO: 3168 - RNA, 16 nt, Homo sapiens
  source 1..16: mol_type = genomic RNA
ggctgatcagtgcaga

SEQ ID NO: 3169 - RNA, 16 nt, Homo sapiens
  source 1..16: mol_type = genomic RNA
gctgatcagtgcagag

SEQ ID NO: 3170 - RNA, 16 nt, Homo sapiens
  source 1..16: mol_type = genomic RNA
ctgatcagtgcagaga

SEQ ID NO: 3171 - RNA, 16 nt, Homo sapiens
  source 1..16: mol_type = genomic RNA
tgatcagtgcagagat

SEQ ID NO: 3172 - RNA, 16 nt, Homo sapiens
  source 1..16: mol_type = genomic RNA
gatcagtgcagagata

SEQ ID NO: 3173 - RNA, 16 nt, Homo sapiens
  source 1..16: mol_type = genomic RNA
atcagtgcagagatat

SEQ ID NO: 3174 - RNA, 16 nt, Homo sapiens
  source 1..16: mol_type = genomic RNA
tcagtgcagagatatc

SEQ ID NO: 3175 - RNA, 16 nt, Homo sapiens
  source 1..16: mol_type = genomic RNA
cagtgcagagatatct

SEQ ID NO: 3176 - RNA, 16 nt, Homo sapiens
  source 1..16: mol_type = genomic RNA
agtgcagagatatctc

SEQ ID NO: 3177 - RNA, 16 nt, Homo sapiens
  source 1..16: mol_type = genomic RNA
tgcagagatatctcac

SEQ ID NO: 3178 - RNA, 16 nt, Homo sapiens
  source 1..16: mol_type = genomic RNA
gcagagatatctcaca

SEQ ID NO: 3179 - RNA, 16 nt, Homo sapiens
  source 1..16: mol_type = genomic RNA
gatatctcacaaagcc

SEQ ID NO: 3180 - RNA, 16 nt, Homo sapiens
  source 1..16: mol_type = genomic RNA
atatctcacaaagccc

SEQ ID NO: 3181 - RNA, 16 nt, Homo sapiens
  source 1..16: mol_type = genomic RNA
tatctcacaaagcccc

SEQ ID NO: 3182 - RNA, 16 nt, Homo sapiens
  source 1..16: mol_type = genomic RNA
atctcacaaagcccct

SEQ ID NO: 3183 - RNA, 16 nt, Homo sapiens
  source 1..16: mol_type = genomic RNA
tctcacaaagccccta

SEQ ID NO: 3184 - RNA, 16 nt, Homo sapiens
  source 1..16: mol_type = genomic RNA
ctcacaaagcccctat

SEQ ID NO: 3185 - RNA, 16 nt, Homo sapiens
  source 1..16: mol_type = genomic RNA
tcacaaagcccctata

SEQ ID NO: 3186 - RNA, 16 nt, Homo sapiens
  source 1..16: mol_type = genomic RNA
cacaaagcccctataa

SEQ ID NO: 3187 - RNA, 16 nt, Homo sapiens
  source 1..16: mol_type = genomic RNA
acaaagcccctataag

SEQ ID NO: 3188 - RNA, 16 nt, Homo sapiens
  source 1..16: mol_type = genomic RNA
caaagcccctataagc

SEQ ID NO: 3189 - RNA, 16 nt, Homo sapiens
  source 1..16: mol_type = genomic RNA
aaagcccctataagcc

SEQ ID NO: 3190 - RNA, 16 nt, Homo sapiens
  source 1..16: mol_type = genomic RNA
aagcccctataagcca

SEQ ID NO: 3191 - RNA, 16 nt, Homo sapiens
  source 1..16: mol_type = genomic RNA
agcccctataagccaa

SEQ ID NO: 3192 - RNA, 16 nt, Homo sapiens
  source 1..16: mol_type = genomic RNA
gcccctataagccaaa

SEQ ID NO: 3193 - RNA, 16 nt, Homo sapiens
  source 1..16: mol_type = genomic RNA
cccctataagccaaac

SEQ ID NO: 3194 - RNA, 16 nt, Homo sapiens
  source 1..16: mol_type = genomic RNA
ccctataagccaaacc

SEQ ID NO: 3195 - RNA, 16 nt, Homo sapiens
  source 1..16: mol_type = genomic RNA
cctataagccaaacct

SEQ ID NO: 3196 - RNA, 16 nt, Homo sapiens
  source 1..16: mol_type = genomic RNA
ataagccaaaccttga

SEQ ID NO: 3197 - RNA, 16 nt, Homo sapiens
  source 1..16: mol_type = genomic RNA
taagccaaaccttgac

SEQ ID NO: 3198 - RNA, 16 nt, Homo sapiens
  source 1..16: mol_type = genomic RNA
aagccaaaccttgaca

SEQ ID NO: 3199 - RNA, 16 nt, Homo sapiens
  source 1..16: mol_type = genomic RNA
agccaaaccttgacaa

SEQ ID NO: 3200 - RNA, 16 nt, Homo sapiens
  source 1..16: mol_type = genomic RNA
gccaaaccttgacaag

SEQ ID NO: 3201 - RNA, 16 nt, Homo sapiens
  source 1..16: mol_type = genomic RNA
ccaaaccttgacaagg

SEQ ID NO: 3202 - RNA, 16 nt, Homo sapiens
  source 1..16: mol_type = genomic RNA
caaaccttgacaaggg

SEQ ID NO: 3203 - RNA, 16 nt, Homo sapiens
  source 1..16: mol_type = genomic RNA
aaaccttgacaagggt

SEQ ID NO: 3204 - RNA, 16 nt, Homo sapiens
  source 1..16: mol_type = genomic RNA
aaccttgacaagggtt

SEQ ID NO: 3205 - RNA, 16 nt, Homo sapiens
  source 1..16: mol_type = genomic RNA
accttgacaagggtta

SEQ ID NO: 3206 - RNA, 16 nt, Homo sapiens
  source 1..16: mol_type = genomic RNA
ccttgacaagggttac

SEQ ID NO: 3207 - RNA, 16 nt, Homo sapiens
  source 1..16: mol_type = genomic RNA
cttgacaagggttaca

SEQ ID NO: 3208 - RNA, 16 nt, Homo sapiens
  source 1..16: mol_type = genomic RNA
ttgacaagggttacat

SEQ ID NO: 3209 - RNA, 16 nt, Homo sapiens
  source 1..16: mol_type = genomic RNA
tgacaagggttacatc

SEQ ID NO: 3210 - RNA, 16 nt, Homo sapiens
  source 1..16: mol_type = genomic RNA
gacaagggttacatca

SEQ ID NO: 3211 - RNA, 16 nt, Homo sapiens
  source 1..16: mol_type = genomic RNA
acaagggttacatcac

SEQ ID NO: 3212 - RNA, 16 nt, Homo sapiens
  source 1..16: mol_type = genomic RNA
caagggttacatcacc

SEQ ID NO: 3213 - RNA, 16 nt, Homo sapiens
  source 1..16: mol_type = genomic RNA
aagggttacatcacct

SEQ ID NO: 3214 - RNA, 16 nt, Homo sapiens
  source 1..16: mol_type = genomic RNA
agggttacatcacctg

SEQ ID NO: 3215 - RNA, 16 nt, Homo sapiens
  source 1..16: mol_type = genomic RNA
gggttacatcacctgt

SEQ ID NO: 3216 - RNA, 16 nt, Homo sapiens
  source 1..16: mol_type = genomic RNA
tcacctgtttgagcag

SEQ ID NO: 3217 - RNA, 16 nt, Homo sapiens
  source 1..16: mol_type = genomic RNA
cacctgtttgagcagt

SEQ ID NO: 3218 - RNA, 16 nt, Homo sapiens
  source 1..16: mol_type = genomic RNA
acctgtttgagcagtg

SEQ ID NO: 3219 - RNA, 16 nt, Homo sapiens
  source 1..16: mol_type = genomic RNA
cctgtttgagcagtgg

SEQ ID NO: 3220 - RNA, 16 nt, Homo sapiens
  source 1..16: mol_type = genomic RNA
ctgtttgagcagtgga

SEQ ID NO: 3221 - RNA, 16 nt, Homo sapiens
  source 1..16: mol_type = genomic RNA
tgtttgagcagtggaa

SEQ ID NO: 3222 - RNA, 16 nt, Homo sapiens
  source 1..16: mol_type = genomic RNA
gtttgagcagtggaaa

SEQ ID NO: 3223 - RNA, 16 nt, Homo sapiens
  source 1..16: mol_type = genomic RNA
ttgagcagtggaaata

SEQ ID NO: 3224 - RNA, 16 nt, Homo sapiens
  source 1..16: mol_type = genomic RNA
tgagcagtggaaatat

SEQ ID NO: 3225 - RNA, 16 nt, Homo sapiens
  source 1..16: mol_type = genomic RNA
gagcagtggaaatata

SEQ ID NO: 3226 - RNA, 16 nt, Homo sapiens
  source 1..16: mol_type = genomic RNA
tatatcacaaagcccc

SEQ ID NO: 3227 - RNA, 16 nt, Homo sapiens
  source 1..16: mol_type = genomic RNA
atatcacaaagccccc

SEQ ID NO: 3228 - RNA, 16 nt, Homo sapiens
  source 1..16: mol_type = genomic RNA
tatcacaaagccccct

SEQ ID NO: 3229 - RNA, 16 nt, Homo sapiens
  source 1..16: mol_type = genomic RNA
atcacaaagccccctg

SEQ ID NO: 3230 - RNA, 16 nt, Homo sapiens
  source 1..16: mol_type = genomic RNA
tcacaaagccccctgt

SEQ ID NO: 3231 - RNA, 16 nt, Homo sapiens
  source 1..16: mol_type = genomic RNA
cacaaagccccctgta

SEQ ID NO: 3232 - RNA, 16 nt, Homo sapiens
  source 1..16: mol_type = genomic RNA
acaaagccccctgtag

SEQ ID NO: 3233 - RNA, 16 nt, Homo sapiens
  source 1..16: mol_type = genomic RNA
caaagccccctgtaga

SEQ ID NO: 3234 - RNA, 16 nt, Homo sapiens
  source 1..16: mol_type = genomic RNA
aaagccccctgtagac

SEQ ID NO: 3235 - RNA, 16 nt, Homo sapiens
  source 1..16: mol_type = genomic RNA
aagccccctgtagaca

SEQ ID NO: 3236 - RNA, 16 nt, Homo sapiens
  source 1..16: mol_type = genomic RNA
agccccctgtagacaa

SEQ ID NO: 3237 - RNA, 16 nt, Homo sapiens
  source 1..16: mol_type = genomic RNA
gccccctgtagacaaa

SEQ ID NO: 3238 - RNA, 16 nt, Homo sapiens
  source 1..16: mol_type = genomic RNA
ccccctgtagacaaag

SEQ ID NO: 3239 - RNA, 16 nt, Homo sapiens
  source 1..16: mol_type = genomic RNA
cccctgtagacaaagc

SEQ ID NO: 3240 - RNA, 16 nt, Homo sapiens
  source 1..16: mol_type = genomic RNA
ccctgtagacaaagcc

SEQ ID NO: 3241 - RNA, 16 nt, Homo sapiens
  source 1..16: mol_type = genomic RNA
cctgtagacaaagccc

SEQ ID NO: 3242 - RNA, 16 nt, Homo sapiens
  source 1..16: mol_type = genomic RNA
ctgtagacaaagccca

SEQ ID NO: 3243 - RNA, 16 nt, Homo sapiens
  source 1..16: mol_type = genomic RNA
tgtagacaaagcccag

SEQ ID NO: 3244 - RNA, 16 nt, Homo sapiens
  source 1..16: mol_type = genomic RNA
gtagacaaagcccaga

SEQ ID NO: 3245 - RNA, 16 nt, Homo sapiens
  source 1..16: mol_type = genomic RNA
tagacaaagcccagac

SEQ ID NO: 3246 - RNA, 16 nt, Homo sapiens
  source 1..16: mol_type = genomic RNA
agacaaagcccagaca

SEQ ID NO: 3247 - RNA, 16 nt, Homo sapiens
  source 1..16: mol_type = genomic RNA
gacaaagcccagacaa

SEQ ID NO: 3248 - RNA, 16 nt, Homo sapiens
  source 1..16: mol_type = genomic RNA
acaaagcccagacaat

SEQ ID NO: 3249 - RNA, 16 nt, Homo sapiens
  source 1..16: mol_type = genomic RNA
caaagcccagacaatt

SEQ ID NO: 3250 - RNA, 16 nt, Homo sapiens
  source 1..16: mol_type = genomic RNA
tacatctcctgagtga

SEQ ID NO: 3251 - RNA, 16 nt, Homo sapiens
  source 1..16: mol_type = genomic RNA
acatctcctgagtgag

SEQ ID NO: 3252 - RNA, 16 nt, Homo sapiens
  source 1..16: mol_type = genomic RNA
catctcctgagtgagc

SEQ ID NO: 3253 - RNA, 16 nt, Homo sapiens
  source 1..16: mol_type = genomic RNA
atctcctgagtgagca

SEQ ID NO: 3254 - RNA, 16 nt, Homo sapiens
  source 1..16: mol_type = genomic RNA
tctcctgagtgagcat

SEQ ID NO: 3255 - RNA, 16 nt, Homo sapiens
  source 1..16: mol_type = genomic RNA
ctcctgagtgagcatt

SEQ ID NO: 3256 - RNA, 16 nt, Homo sapiens
  source 1..16: mol_type = genomic RNA
tcctgagtgagcattg

SEQ ID NO: 3257 - RNA, 16 nt, Homo sapiens
  source 1..16: mol_type = genomic RNA
cctgagtgagcattgg

SEQ ID NO: 3258 - RNA, 16 nt, Homo sapiens
  source 1..16: mol_type = genomic RNA
ctgagtgagcattgga

SEQ ID NO: 3259 - RNA, 16 nt, Homo sapiens
  source 1..16: mol_type = genomic RNA
tgagtgagcattggag

SEQ ID NO: 3260 - RNA, 16 nt, Homo sapiens
  source 1..16: mol_type = genomic RNA
gagtgagcattggaga

SEQ ID NO: 3261 - RNA, 16 nt, Homo sapiens
  source 1..16: mol_type = genomic RNA
agtgagcattggagag

SEQ ID NO: 3262 - RNA, 16 nt, Homo sapiens
  source 1..16: mol_type = genomic RNA
gtgagcattggagaga

SEQ ID NO: 3263 - RNA, 16 nt, Homo sapiens
  source 1..16: mol_type = genomic RNA
tgagcattggagagat

SEQ ID NO: 3264 - RNA, 16 nt, Homo sapiens
  source 1..16: mol_type = genomic RNA
gagcattggagagatc

SEQ ID NO: 3265 - RNA, 16 nt, Homo sapiens
  source 1..16: mol_type = genomic RNA
agcattggagagatct

SEQ ID NO: 3266 - RNA, 16 nt, Homo sapiens
  source 1..16: mol_type = genomic RNA
gcattggagagatctg

SEQ ID NO: 3267 - RNA, 16 nt, Homo sapiens
  source 1..16: mol_type = genomic RNA
attggagagatctgtc

SEQ ID NO: 3268 - RNA, 16 nt, Homo sapiens
  source 1..16: mol_type = genomic RNA
ttggagagatctgtca

SEQ ID NO: 3269 - RNA, 16 nt, Homo sapiens
  source 1..16: mol_type = genomic RNA
tggagagatctgtcac

SEQ ID NO: 3270 - RNA, 16 nt, Homo sapiens
  source 1..16: mol_type = genomic RNA
ggagagatctgtcaca

SEQ ID NO: 3271 - RNA, 16 nt, Homo sapiens
  source 1..16: mol_type = genomic RNA
gagagatctgtcacaa

SEQ ID NO: 3272 - RNA, 16 nt, Homo sapiens
  source 1..16: mol_type = genomic RNA
agatctgtcacaatgc

SEQ ID NO: 3273 - RNA, 16 nt, Homo sapiens
  source 1..16: mol_type = genomic RNA
gatctgtcacaatgcc

SEQ ID NO: 3274 - RNA, 16 nt, Homo sapiens
  source 1..16: mol_type = genomic RNA
atctgtcacaatgccc

SEQ ID NO: 3275 - RNA, 16 nt, Homo sapiens
  source 1..16: mol_type = genomic RNA
tctgtcacaatgcccc

SEQ ID NO: 3276 - RNA, 16 nt, Homo sapiens
  source 1..16: mol_type = genomic RNA
ctgtcacaatgcccct

SEQ ID NO: 3277 - RNA, 16 nt, Homo sapiens
  source 1..16: mol_type = genomic RNA
tgtcacaatgcccctg

SEQ ID NO: 3278 - RNA, 16 nt, Homo sapiens
  source 1..16: mol_type = genomic RNA
gtcacaatgcccctgt

SEQ ID NO: 3279 - RNA, 16 nt, Homo sapiens
  source 1..16: mol_type = genomic RNA
tcacaatgcccctgta

SEQ ID NO: 3280 - RNA, 16 nt, Homo sapiens
  source 1..16: mol_type = genomic RNA
cacaatgcccctgtag

SEQ ID NO: 3281 - RNA, 16 nt, Homo sapiens
  source 1..16: mol_type = genomic RNA
acaatgcccctgtagg

SEQ ID NO: 3282 - RNA, 16 nt, Homo sapiens
  source 1..16: mol_type = genomic RNA
caatgcccctgtaggc

SEQ ID NO: 3283 - RNA, 16 nt, Homo sapiens
  source 1..16: mol_type = genomic RNA
aatgcccctgtaggca

SEQ ID NO: 3284 - RNA, 16 nt, Homo sapiens
  source 1..16: mol_type = genomic RNA
atgcccctgtaggcag

SEQ ID NO: 3285 - RNA, 16 nt, Homo sapiens
  source 1..16: mol_type = genomic RNA
tgcccctgtaggcaga

SEQ ID NO: 3286 - RNA, 16 nt, Homo sapiens
  source 1..16: mol_type = genomic RNA
gcccctgtaggcagag

SEQ ID NO: 3287 - RNA, 16 nt, Homo sapiens
  source 1..16: mol_type = genomic RNA
cccctgtaggcagagc

SEQ ID NO: 3288 - RNA, 16 nt, Homo sapiens
  source 1..16: mol_type = genomic RNA
ccctgtaggcagagct

SEQ ID NO: 3289 - RNA, 16 nt, Homo sapiens
  source 1..16: mol_type = genomic RNA
cctgtaggcagagctt

SEQ ID NO: 3290 - RNA, 16 nt, Homo sapiens
  source 1..16: mol_type = genomic RNA
ctgtaggcagagctta

SEQ ID NO: 3291 - RNA, 16 nt, Homo sapiens
  source 1..16: mol_type = genomic RNA
tgtaggcagagcttag

SEQ ID NO: 3292 - RNA, 16 nt, Homo sapiens
  source 1..16: mol_type = genomic RNA
gtaggcagagcttaga

SEQ ID NO: 3293 - RNA, 16 nt, Homo sapiens
  source 1..16: mol_type = genomic RNA
taggcagagcttagac

SEQ ID NO: 3294 - RNA, 16 nt, Homo sapiens
  source 1..16: mol_type = genomic RNA
aggcagagcttagaca

SEQ ID NO: 3295 - RNA, 16 nt, Homo sapiens
  source 1..16: mol_type = genomic RNA
ggcagagcttagacaa

SEQ ID NO: 3296 - RNA, 16 nt, Homo sapiens
  source 1..16: mol_type = genomic RNA
gcagagcttagacaag

SEQ ID NO: 3297 - RNA, 16 nt, Homo sapiens
  source 1..16: mol_type = genomic RNA
cagagcttagacaagt

SEQ ID NO: 3298 - RNA, 16 nt, Homo sapiens
  source 1..16: mol_type = genomic RNA
agagcttagacaagtg

SEQ ID NO: 3299 - RNA, 16 nt, Homo sapiens
  source 1..16: mol_type = genomic RNA
gagcttagacaagtgt

SEQ ID NO: 3300 - RNA, 16 nt, Homo sapiens
  source 1..16: mol_type = genomic RNA
gtgttacatcacctgg

SEQ ID NO: 3301 - RNA, 16 nt, Homo sapiens
  source 1..16: mol_type = genomic RNA
tgttacatcacctggg

SEQ ID NO: 3302 - RNA, 16 nt, Homo sapiens
  source 1..16: mol_type = genomic RNA
gttacatcacctgggt

SEQ ID NO: 3303 - RNA, 16 nt, Homo sapiens
  source 1..16: mol_type = genomic RNA
ttacatcacctgggtg

SEQ ID NO: 3304 - RNA, 16 nt, Homo sapiens
  source 1..16: mol_type = genomic RNA
tacatcacctgggtga

SEQ ID NO: 3305 - RNA, 16 nt, Homo sapiens
  source 1..16: mol_type = genomic RNA
acatcacctgggtgat

SEQ ID NO: 3306 - RNA, 16 nt, Homo sapiens
  source 1..16: mol_type = genomic RNA
catcacctgggtgatc

SEQ ID NO: 3307 - RNA, 16 nt, Homo sapiens
  source 1..16: mol_type = genomic RNA
atcacctgggtgatca

SEQ ID NO: 3308 - RNA, 16 nt, Homo sapiens
  source 1..16: mol_type = genomic RNA
tcacctgggtgatcag

SEQ ID NO: 3309 - RNA, 16 nt, Homo sapiens
  source 1..16: mol_type = genomic RNA
cacctgggtgatcagt

SEQ ID NO: 3310 - RNA, 16 nt, Homo sapiens
  source 1..16: mol_type = genomic RNA
acctgggtgatcagtg

SEQ ID NO: 3311 - RNA, 16 nt, Homo sapiens
  source 1..16: mol_type = genomic RNA
cctgggtgatcagtgc

SEQ ID NO: 3312 - RNA, 16 nt, Homo sapiens
  source 1..16: mol_type = genomic RNA
ctgggtgatcagtgca

SEQ ID NO: 3313 - RNA, 16 nt, Homo sapiens
  source 1..16: mol_type = genomic RNA
tgggtgatcagtgcag

SEQ ID NO: 3314 - RNA, 16 nt, Homo sapiens
  source 1..16: mol_type = genomic RNA
gggtgatcagtgcaga

SEQ ID NO: 3315 - RNA, 16 nt, Homo sapiens
  source 1..16: mol_type = genomic RNA
ggtgatcagtgcagag

SEQ ID NO: 3316 - RNA, 16 nt, Homo sapiens
  source 1..16: mol_type = genomic RNA
gtgatcagtgcagaga

SEQ ID NO: 3317 - RNA, 16 nt, Homo sapiens
  source 1..16: mol_type = genomic RNA
gatcagtgcagagatg

SEQ ID NO: 3318 - RNA, 16 nt, Homo sapiens
  source 1..16: mol_type = genomic RNA
atcagtgcagagatgt

SEQ ID NO: 3319 - RNA, 16 nt, Homo sapiens
  source 1..16: mol_type = genomic RNA
tcagtgcagagatgtg

SEQ ID NO: 3320 - RNA, 16 nt, Homo sapiens
  source 1..16: mol_type = genomic RNA
cagtgcagagatgtgt

SEQ ID NO: 3321 - RNA, 16 nt, Homo sapiens
  source 1..16: mol_type = genomic RNA
agtgcagagatgtgtc

SEQ ID NO: 3322 - RNA, 16 nt, Homo sapiens
  source 1..16: mol_type = genomic RNA
gtgcagagatgtgtca

SEQ ID NO: 3323 - RNA, 16 nt, Homo sapiens
  source 1..16: mol_type = genomic RNA
tgtcaaaacgctcctg

SEQ ID NO: 3324 - RNA, 16 nt, Homo sapiens
  source 1..16: mol_type = genomic RNA
gtcaaaacgctcctgt

SEQ ID NO: 3325 - RNA, 16 nt, Homo sapiens
  source 1..16: mol_type = genomic RNA
tcaaaacgctcctgta

SEQ ID NO: 3326 - RNA, 16 nt, Homo sapiens
  source 1..16: mol_type = genomic RNA
caaaacgctcctgtag

SEQ ID NO: 3327 - RNA, 16 nt, Homo sapiens
  source 1..16: mol_type = genomic RNA
aaaacgctcctgtagt

SEQ ID NO: 3328 - RNA, 16 nt, Homo sapiens
  source 1..16: mol_type = genomic RNA
aaacgctcctgtagtc

SEQ ID NO: 3329 - RNA, 16 nt, Homo sapiens
  source 1..16: mol_type = genomic RNA
aacgctcctgtagtct

SEQ ID NO: 3330 - RNA, 16 nt, Homo sapiens
  source 1..16: mol_type = genomic RNA
acgctcctgtagtctg

SEQ ID NO: 3331 - RNA, 16 nt, Homo sapiens
  source 1..16: mol_type = genomic RNA
cgctcctgtagtctga

SEQ ID NO: 3332 - RNA, 16 nt, Homo sapiens
  source 1..16: mol_type = genomic RNA
gctcctgtagtctgaa

SEQ ID NO: 3333 - RNA, 16 nt, Homo sapiens
  source 1..16: mol_type = genomic RNA
ctcctgtagtctgaac

SEQ ID NO: 3334 - RNA, 16 nt, Homo sapiens
  source 1..16: mol_type = genomic RNA
tcctgtagtctgaacc

SEQ ID NO: 3335 - RNA, 16 nt, Homo sapiens
  source 1..16: mol_type = genomic RNA
cctgtagtctgaacct

SEQ ID NO: 3336 - RNA, 16 nt, Homo sapiens
  source 1..16: mol_type = genomic RNA
tgtagtctgaacctag

SEQ ID NO: 3337 - RNA, 16 nt, Homo sapiens
  source 1..16: mol_type = genomic RNA
gtagtctgaacctaga

SEQ ID NO: 3338 - RNA, 16 nt, Homo sapiens
  source 1..16: mol_type = genomic RNA
tagtctgaacctagac

SEQ ID NO: 3339 - RNA, 16 nt, Homo sapiens
  source 1..16: mol_type = genomic RNA
agtctgaacctagaca

SEQ ID NO: 3340 - RNA, 16 nt, Homo sapiens
  source 1..16: mol_type = genomic RNA
gtctgaacctagacag

SEQ ID NO: 3341 - RNA, 16 nt, Homo sapiens
  source 1..16: mol_type = genomic RNA
tctgaacctagacagg

SEQ ID NO: 3342 - RNA, 16 nt, Homo sapiens
  source 1..16: mol_type = genomic RNA
ctgaacctagacagga

SEQ ID NO: 3343 - RNA, 16 nt, Homo sapiens
  source 1..16: mol_type = genomic RNA
tgaacctagacaggag

SEQ ID NO: 3344 - RNA, 16 nt, Homo sapiens
  source 1..16: mol_type = genomic RNA
gaacctagacaggagt

SEQ ID NO: 3345 - RNA, 16 nt, Homo sapiens
  source 1..16: mol_type = genomic RNA
aacctagacaggagtt

SEQ ID NO: 3346 - RNA, 16 nt, Homo sapiens
  source 1..16: mol_type = genomic RNA
acctagacaggagtta

SEQ ID NO: 3347 - RNA, 16 nt, Homo sapiens
  source 1..16: mol_type = genomic RNA
cctagacaggagttac

SEQ ID NO: 3348 - RNA, 16 nt, Homo sapiens
  source 1..16: mol_type = genomic RNA
ctagacaggagttaca

SEQ ID NO: 3349 - RNA, 16 nt, Homo sapiens
  source 1..16: mol_type = genomic RNA
tagacaggagttacat

SEQ ID NO: 3350 - RNA, 16 nt, Homo sapiens
  source 1..16: mol_type = genomic RNA
agacaggagttacatc

SEQ ID NO: 3351 - RNA, 16 nt, Homo sapiens
  source 1..16: mol_type = genomic RNA
gacaggagttacatca

SEQ ID NO: 3352 - RNA, 16 nt, Homo sapiens
  source 1..16: mol_type = genomic RNA
acaggagttacatcac

SEQ ID NO: 3353 - RNA, 16 nt, Homo sapiens
  source 1..16: mol_type = genomic RNA
caggagttacatcacc

SEQ ID NO: 3354 - RNA, 16 nt, Homo sapiens
  source 1..16: mol_type = genomic RNA
aggagttacatcacct

SEQ ID NO: 3355 - RNA, 16 nt, Homo sapiens
  source 1..16: mol_type = genomic RNA
gttacatcaccttggg

SEQ ID NO: 3356 - RNA, 16 nt, Homo sapiens
  source 1..16: mol_type = genomic RNA
ttacatcaccttgggg

SEQ ID NO: 3357 - RNA, 16 nt, Homo sapiens
  source 1..16: mol_type = genomic RNA
tacatcaccttgggga

SEQ ID NO: 3358 - RNA, 16 nt, Homo sapiens
  source 1..16: mol_type = genomic RNA
acatcaccttggggat

SEQ ID NO: 3359 - RNA, 16 nt, Homo sapiens
  source 1..16: mol_type = genomic RNA
catcaccttggggatc

SEQ ID NO: 3360 - RNA, 16 nt, Homo sapiens
  source 1..16: mol_type = genomic RNA
atcaccttggggatca

SEQ ID NO: 3361 - RNA, 16 nt, Homo sapiens
  source 1..16: mol_type = genomic RNA
tcaccttggggatcag

SEQ ID NO: 3362 - RNA, 16 nt, Homo sapiens
  source 1..16: mol_type = genomic RNA
caccttggggatcagt

SEQ ID NO: 3363 - RNA, 16 nt, Homo sapiens
  source 1..16: mol_type = genomic RNA
accttggggatcagtg

SEQ ID NO: 3364 - RNA, 16 nt, Homo sapiens
  source 1..16: mol_type = genomic RNA
ccttggggatcagtgc

SEQ ID NO: 3365 - RNA, 16 nt, Homo sapiens
  source 1..16: mol_type = genomic RNA
cttggggatcagtgca

SEQ ID NO: 3366 - RNA, 16 nt, Homo sapiens
  source 1..16: mol_type = genomic RNA
ttggggatcagtgcag

SEQ ID NO: 3367 - RNA, 16 nt, Homo sapiens
  source 1..16: mol_type = genomic RNA
tggggatcagtgcaga

SEQ ID NO: 3368 - RNA, 16 nt, Homo sapiens
  source 1..16: mol_type = genomic RNA
ggggatcagtgcagag

SEQ ID NO: 3369 - RNA, 16 nt, Homo sapiens
  source 1..16: mol_type = genomic RNA
gggatcagtgcagaga

SEQ ID NO: 3370 - RNA, 16 nt, Homo sapiens
  source 1..16: mol_type = genomic RNA
ggatcagtgcagagat

SEQ ID NO: 3371 - RNA, 16 nt, Homo sapiens
  source 1..16: mol_type = genomic RNA
atcagtgcagagatac

SEQ ID NO: 3372 - RNA, 16 nt, Homo sapiens
  source 1..16: mol_type = genomic RNA
tcagtgcagagatacg

SEQ ID NO: 3373 - RNA, 16 nt, Homo sapiens
  source 1..16: mol_type = genomic RNA
cagtgcagagatacgt

SEQ ID NO: 3374 - RNA, 16 nt, Homo sapiens
  source 1..16: mol_type = genomic RNA
agtgcagagatacgtg

SEQ ID NO: 3375 - RNA, 16 nt, Homo sapiens
  source 1..16: mol_type = genomic RNA
gtgcagagatacgtga

SEQ ID NO: 3376 - RNA, 16 nt, Homo sapiens
  source 1..16: mol_type = genomic RNA
tgcagagatacgtgag

SEQ ID NO: 3377 - RNA, 16 nt, Homo sapiens
  source 1..16: mol_type = genomic RNA
gcagagatacgtgaga

SEQ ID NO: 3378 - RNA, 16 nt, Homo sapiens
  source 1..16: mol_type = genomic RNA
cagagatacgtgagaa

SEQ ID NO: 3379 - RNA, 16 nt, Homo sapiens
  source 1..16: mol_type = genomic RNA
agagatacgtgagaat

SEQ ID NO: 3380 - RNA, 16 nt, Homo sapiens
  source 1..16: mol_type = genomic RNA
gaattcccttgtaggc

SEQ ID NO: 3381 - RNA, 16 nt, Homo sapiens
  source 1..16: mol_type = genomic RNA
attcccttgtaggcag

SEQ ID NO: 3382 - RNA, 16 nt, Homo sapiens
  source 1..16: mol_type = genomic RNA
ttcccttgtaggcagg

SEQ ID NO: 3383 - RNA, 16 nt, Homo sapiens
  source 1..16: mol_type = genomic RNA
tcccttgtaggcaggg

SEQ ID NO: 3384 - RNA, 16 nt, Homo sapiens
  source 1..16: mol_type = genomic RNA
cccttgtaggcagggc

SEQ ID NO: 3385 - RNA, 16 nt, Homo sapiens
  source 1..16: mol_type = genomic RNA
ccttgtaggcagggcc

SEQ ID NO: 3386 - RNA, 16 nt, Homo sapiens
  source 1..16: mol_type = genomic RNA
cttgtaggcagggcct

SEQ ID NO: 3387 - RNA, 16 nt, Homo sapiens
  source 1..16: mol_type = genomic RNA
ttgtaggcagggccta

SEQ ID NO: 3388 - RNA, 16 nt, Homo sapiens
  source 1..16: mol_type = genomic RNA
tgtaggcagggcctag

SEQ ID NO: 3389 - RNA, 16 nt, Homo sapiens
  source 1..16: mol_type = genomic RNA
gtaggcagggcctaga

SEQ ID NO: 3390 - RNA, 16 nt, Homo sapiens
  source 1..16: mol_type = genomic RNA
ggcagggcctagacaa

SEQ ID NO: 3391 - RNA, 16 nt, Homo sapiens
  source 1..16: mol_type = genomic RNA
gcagggcctagacaag

SEQ ID NO: 3392 - RNA, 16 nt, Homo sapiens
  source 1..16: mol_type = genomic RNA
cagggcctagacaagt

SEQ ID NO: 3393 - RNA, 16 nt, Homo sapiens
  source 1..16: mol_type = genomic RNA
agggcctagacaagtg

SEQ ID NO: 3394 - RNA, 16 nt, Homo sapiens
  source 1..16: mol_type = genomic RNA
gggcctagacaagtgt

SEQ ID NO: 3395 - RNA, 16 nt, Homo sapiens
  source 1..16: mol_type = genomic RNA
ggcctagacaagtgtt

SEQ ID NO: 3396 - RNA, 16 nt, Homo sapiens
  source 1..16: mol_type = genomic RNA
cctaggttatcagtgc

SEQ ID NO: 3397 - RNA, 16 nt, Homo sapiens
  source 1..16: mol_type = genomic RNA
aggttatcagtgcaga

SEQ ID NO: 3398 - RNA, 16 nt, Homo sapiens
  source 1..16: mol_type = genomic RNA
ggttatcagtgcagag

SEQ ID NO: 3399 - RNA, 16 nt, Homo sapiens
  source 1..16: mol_type = genomic RNA
tcagtgcagagatatg

SEQ ID NO: 3400 - RNA, 16 nt, Homo sapiens
  source 1..16: mol_type = genomic RNA
cagtgcagagatatgt

SEQ ID NO: 3401 - RNA, 16 nt, Homo sapiens
  source 1..16: mol_type = genomic RNA
agtgcagagatatgtg

SEQ ID NO: 3402 - RNA, 16 nt, Homo sapiens
  source 1..16: mol_type = genomic RNA
gtgcagagatatgtga

SEQ ID NO: 3403 - RNA, 16 nt, Homo sapiens
  source 1..16: mol_type = genomic RNA
tgcagagatatgtgag

SEQ ID NO: 3404 - RNA, 16 nt, Homo sapiens
  source 1..16: mol_type = genomic RNA
gcagagatatgtgaga

SEQ ID NO: 3405 - RNA, 16 nt, Homo sapiens
  source 1..16: mol_type = genomic RNA
tgtgagaattcccgtg

SEQ ID NO: 3406 - RNA, 16 nt, Homo sapiens
  source 1..16: mol_type = genomic RNA
gtgagaattcccgtgt

SEQ ID NO: 3407 - RNA, 16 nt, Homo sapiens
  source 1..16: mol_type = genomic RNA
agaattcccgtgtagg

SEQ ID NO: 3408 - RNA, 16 nt, Homo sapiens
  source 1..16: mol_type = genomic RNA
gaattcccgtgtaggc

SEQ ID NO: 3409 - RNA, 16 nt, Homo sapiens
  source 1..16: mol_type = genomic RNA
aattcccgtgtaggca

SEQ ID NO: 3410 - RNA, 16 nt, Homo sapiens
  source 1..16: mol_type = genomic RNA
attcccgtgtaggcag

SEQ ID NO: 3411 - RNA, 16 nt, Homo sapiens
  source 1..16: mol_type = genomic RNA
ttcccgtgtaggcaga

SEQ ID NO: 3412 - RNA, 16 nt, Homo sapiens
  source 1..16: mol_type = genomic RNA
tcccgtgtaggcagag

SEQ ID NO: 3413 - RNA, 16 nt, Homo sapiens
  source 1..16: mol_type = genomic RNA
cccgtgtaggcagagc

SEQ ID NO: 3414 - RNA, 16 nt, Homo sapiens
  source 1..16: mol_type = genomic RNA
ccgtgtaggcagagcc

SEQ ID NO: 3415 - RNA, 16 nt, Homo sapiens
  source 1..16: mol_type = genomic RNA
cgtgtaggcagagcct

SEQ ID NO: 3416 - RNA, 16 nt, Homo sapiens
  source 1..16: mol_type = genomic RNA
gtgtaggcagagccta

SEQ ID NO: 3417 - RNA, 16 nt, Homo sapiens
  source 1..16: mol_type = genomic RNA
tgtaggcagagcctag

SEQ ID NO: 3418 - RNA, 16 nt, Homo sapiens
  source 1..16: mol_type = genomic RNA
gtaggcagagcctaga

SEQ ID NO: 3419 - RNA, 16 nt, Homo sapiens
  source 1..16: mol_type = genomic RNA
taggcagagcctagac

SEQ ID NO: 3420 - RNA, 16 nt, Homo sapiens
  source 1..16: mol_type = genomic RNA
aggcagagcctagaca

SEQ ID NO: 3421 - RNA, 16 nt, Homo sapiens
  source 1..16: mol_type = genomic RNA
ggcagagcctagacaa

SEQ ID NO: 3422 - RNA, 16 nt, Homo sapiens
  source 1..16: mol_type = genomic RNA
gcagagcctagacaag

SEQ ID NO: 3423 - RNA, 16 nt, Homo sapiens
  source 1..16: mol_type = genomic RNA
cagagcctagacaagt

SEQ ID NO: 3424 - RNA, 16 nt, Homo sapiens
  source 1..16: mol_type = genomic RNA
agagcctagacaagtg

SEQ ID NO: 3425 - RNA, 16 nt, Homo sapiens
  source 1..16: mol_type = genomic RNA
gagcctagacaagtgt

SEQ ID NO: 3426 - RNA, 16 nt, Homo sapiens
  source 1..16: mol_type = genomic RNA
agcctagacaagtgtt

SEQ ID NO: 3427 - RNA, 16 nt, Homo sapiens
  source 1..16: mol_type = genomic RNA
tagtcataaagcctcc

SEQ ID NO: 3428 - RNA, 16 nt, Homo sapiens
  source 1..16: mol_type = genomic RNA
cgtagacaagagttcc

SEQ ID NO: 3429 - RNA, 16 nt, Homo sapiens
  source 1..16: mol_type = genomic RNA
gtagacaagagttccc

SEQ ID NO: 3430 - RNA, 16 nt, Homo sapiens
  source 1..16: mol_type = genomic RNA
tagacaagagttccct

SEQ ID NO: 3431 - RNA, 16 nt, Homo sapiens
  source 1..16: mol_type = genomic RNA
agacaagagttccctc

SEQ ID NO: 3432 - RNA, 16 nt, Homo sapiens
  source 1..16: mol_type = genomic RNA
gacaagagttccctcc

SEQ ID NO: 3433 - RNA, 16 nt, Homo sapiens
  source 1..16: mol_type = genomic RNA
acaagagttccctcct

SEQ ID NO: 3434 - RNA, 16 nt, Homo sapiens
  source 1..16: mol_type = genomic RNA
caagagttccctcctc

SEQ ID NO: 3435 - RNA, 16 nt, Homo sapiens
  source 1..16: mol_type = genomic RNA
aagagttccctcctca

SEQ ID NO: 3436 - RNA, 16 nt, Homo sapiens
  source 1..16: mol_type = genomic RNA
agagttccctcctcag

SEQ ID NO: 3437 - RNA, 16 nt, Homo sapiens
  source 1..16: mol_type = genomic RNA
gagttccctcctcagg

SEQ ID NO: 3438 - RNA, 16 nt, Homo sapiens
  source 1..16: mol_type = genomic RNA
agttccctcctcaggg

SEQ ID NO: 3439 - RNA, 16 nt, Homo sapiens
  source 1..16: mol_type = genomic RNA
gttccctcctcagggt

SEQ ID NO: 3440 - RNA, 16 nt, Homo sapiens
  source 1..16: mol_type = genomic RNA
ttccctcctcagggtg

SEQ ID NO: 3441 - RNA, 16 nt, Homo sapiens
  source 1..16: mol_type = genomic RNA
tccctcctcagggtga

SEQ ID NO: 3442 - RNA, 16 nt, Homo sapiens
  source 1..16: mol_type = genomic RNA
ccctcctcagggtgat

SEQ ID NO: 3443 - RNA, 16 nt, Homo sapiens
  source 1..16: mol_type = genomic RNA
cctcctcagggtgatc

SEQ ID NO: 3444 - RNA, 16 nt, Homo sapiens
  source 1..16: mol_type = genomic RNA
ctcctcagggtgatca

SEQ ID NO: 3445 - RNA, 16 nt, Homo sapiens
  source 1..16: mol_type = genomic RNA
tcctcagggtgatcag

SEQ ID NO: 3446 - RNA, 16 nt, Homo sapiens
  source 1..16: mol_type = genomic RNA
cctcagggtgatcagt

SEQ ID NO: 3447 - RNA, 16 nt, Homo sapiens
  source 1..16: mol_type = genomic RNA
ctcagggtgatcagtg

SEQ ID NO: 3448 - RNA, 16 nt, Homo sapiens
  source 1..16: mol_type = genomic RNA
tcagggtgatcagtgc

SEQ ID NO: 3449 - RNA, 16 nt, Homo sapiens
  source 1..16: mol_type = genomic RNA
cagggtgatcagtgca

SEQ ID NO: 3450 - RNA, 16 nt, Homo sapiens
  source 1..16: mol_type = genomic RNA
agggtgatcagtgcag

SEQ ID NO: 3451 - RNA, 16 nt, Homo sapiens
  source 1..16: mol_type = genomic RNA
tgcagagatgtgtcac

SEQ ID NO: 3452 - RNA, 16 nt, Homo sapiens
  source 1..16: mol_type = genomic RNA
gcagagatgtgtcaca

SEQ ID NO: 3453 - RNA, 16 nt, Homo sapiens
  source 1..16: mol_type = genomic RNA
gagatgtgtcacaaag

SEQ ID NO: 3454 - RNA, 16 nt, Homo sapiens
  source 1..16: mol_type = genomic RNA
agatgtgtcacaaagc

SEQ ID NO: 3455 - RNA, 16 nt, Homo sapiens
  source 1..16: mol_type = genomic RNA
gatgtgtcacaaagcc

SEQ ID NO: 3456 - RNA, 16 nt, Homo sapiens
  source 1..16: mol_type = genomic RNA
atgtgtcacaaagccc

SEQ ID NO: 3457 - RNA, 16 nt, Homo sapiens
  source 1..16: mol_type = genomic RNA
tgtgtcacaaagcccc

SEQ ID NO: 3458 - RNA, 16 nt, Homo sapiens
  source 1..16: mol_type = genomic RNA
gtgtcacaaagcccct

SEQ ID NO: 3459 - RNA, 16 nt, Homo sapiens
  source 1..16: mol_type = genomic RNA
tgtcacaaagcccctg

SEQ ID NO: 3460 - RNA, 16 nt, Homo sapiens
  source 1..16: mol_type = genomic RNA
gtcacaaagcccctgt

SEQ ID NO: 3461 - RNA, 16 nt, Homo sapiens
  source 1..16: mol_type = genomic RNA
tcacaaagcccctgta

SEQ ID NO: 3462 - RNA, 16 nt, Homo sapiens
  source 1..16: mol_type = genomic RNA
cacaaagcccctgtag

SEQ ID NO: 3463 - RNA, 16 nt, Homo sapiens
  source 1..16: mol_type = genomic RNA
acaaagcccctgtagg

SEQ ID NO: 3464 - RNA, 16 nt, Homo sapiens
  source 1..16: mol_type = genomic RNA
caaagcccctgtaggc

SEQ ID NO: 3465 - RNA, 16 nt, Homo sapiens
  source 1..16: mol_type = genomic RNA
aaagcccctgtaggca

SEQ ID NO: 3466 - RNA, 16 nt, Homo sapiens
  source 1..16: mol_type = genomic RNA
aagcccctgtaggcag

SEQ ID NO: 3467 - RNA, 16 nt, Homo sapiens
  source 1..16: mol_type = genomic RNA
agcccctgtaggcaga

SEQ ID NO: 3468 - RNA, 16 nt, Homo sapiens
  source 1..16: mol_type = genomic RNA
ccctgtaggcagagcc

SEQ ID NO: 3469 - RNA, 16 nt, Homo sapiens
  source 1..16: mol_type = genomic RNA
cctgtaggcagagcct

SEQ ID NO: 3470 - RNA, 16 nt, Homo sapiens
  source 1..16: mol_type = genomic RNA
ctgtaggcagagccta

SEQ ID NO: 3471 - RNA, 16 nt, Homo sapiens
  source 1..16: mol_type = genomic RNA
cagagcctagacaaga

SEQ ID NO: 3472 - RNA, 16 nt, Homo sapiens
  source 1..16: mol_type = genomic RNA
agagcctagacaagag

SEQ ID NO: 3473 - RNA, 16 nt, Homo sapiens
  source 1..16: mol_type = genomic RNA
gagcctagacaagagt

SEQ ID NO: 3474 - RNA, 16 nt, Homo sapiens
  source 1..16: mol_type = genomic RNA
agcctagacaagagtt

SEQ ID NO: 3475 - RNA, 16 nt, Homo sapiens
  source 1..16: mol_type = genomic RNA
tcagagatgtgtcaga

SEQ ID NO: 3476 - RNA, 16 nt, Homo sapiens
  source 1..16: mol_type = genomic RNA
cagagatgtgtcagaa

SEQ ID NO: 3477 - RNA, 16 nt, Homo sapiens
  source 1..16: mol_type = genomic RNA
agatgtgtcagaatgc

SEQ ID NO: 3478 - RNA, 16 nt, Homo sapiens
  source 1..16: mol_type = genomic RNA
gatgtgtcagaatgcc

SEQ ID NO: 3479 - RNA, 16 nt, Homo sapiens
  source 1..16: mol_type = genomic RNA
atgtgtcagaatgccc

SEQ ID NO: 3480 - RNA, 16 nt, Homo sapiens
  source 1..16: mol_type = genomic RNA
tgtgtcagaatgccca

SEQ ID NO: 3481 - RNA, 16 nt, Homo sapiens
  source 1..16: mol_type = genomic RNA
gtgtcagaatgcccat

SEQ ID NO: 3482 - RNA, 16 nt, Homo sapiens
  source 1..16: mol_type = genomic RNA
tgtcagaatgcccatg

SEQ ID NO: 3483 - RNA, 16 nt, Homo sapiens
  source 1..16: mol_type = genomic RNA
gtcagaatgcccatgt

SEQ ID NO: 3484 - RNA, 16 nt, Homo sapiens
  source 1..16: mol_type = genomic RNA
tcagaatgcccatgta

SEQ ID NO: 3485 - RNA, 16 nt, Homo sapiens
  source 1..16: mol_type = genomic RNA
cagaatgcccatgtag

SEQ ID NO: 3486 - RNA, 16 nt, Homo sapiens
  source 1..16: mol_type = genomic RNA
agaatgcccatgtagg

SEQ ID NO: 3487 - RNA, 16 nt, Homo sapiens
  source 1..16: mol_type = genomic RNA
gaatgcccatgtaggc

SEQ ID NO: 3488 - RNA, 16 nt, Homo sapiens
  source 1..16: mol_type = genomic RNA
aatgcccatgtaggca

SEQ ID NO: 3489 - RNA, 16 nt, Homo sapiens
  source 1..16: mol_type = genomic RNA
atgcccatgtaggcag

SEQ ID NO: 3490 - RNA, 16 nt, Homo sapiens
  source 1..16: mol_type = genomic RNA
tgcccatgtaggcaga

SEQ ID NO: 3491 - RNA, 16 nt, Homo sapiens
  source 1..16: mol_type = genomic RNA
gcccatgtaggcagat

SEQ ID NO: 3492 - RNA, 16 nt, Homo sapiens
  source 1..16: mol_type = genomic RNA
cccatgtaggcagatc

SEQ ID NO: 3493 - RNA, 16 nt, Homo sapiens
  source 1..16: mol_type = genomic RNA
ccatgtaggcagatct

SEQ ID NO: 3494 - RNA, 16 nt, Homo sapiens
  source 1..16: mol_type = genomic RNA
catgtaggcagatcta

SEQ ID NO: 3495 - RNA, 16 nt, Homo sapiens
  source 1..16: mol_type = genomic RNA
atgtaggcagatctaa

SEQ ID NO: 3496 - RNA, 16 nt, Homo sapiens
  source 1..16: mol_type = genomic RNA
tgtaggcagatctaag

SEQ ID NO: 3497 - RNA, 16 nt, Homo sapiens
  source 1..16: mol_type = genomic RNA
gtaggcagatctaaga

SEQ ID NO: 3498 - RNA, 16 nt, Homo sapiens
  source 1..16: mol_type = genomic RNA
taggcagatctaagac

SEQ ID NO: 3499 - RNA, 16 nt, Homo sapiens
  source 1..16: mol_type = genomic RNA
aggcagatctaagaca

SEQ ID NO: 3500 - RNA, 16 nt, Homo sapiens
  source 1..16: mol_type = genomic RNA
ggcagatctaagacaa

SEQ ID NO: 3501 - RNA, 16 nt, Homo sapiens
  source 1..16: mol_type = genomic RNA
gcagatctaagacaag

SEQ ID NO: 3502 - RNA, 16 nt, Homo sapiens
  source 1..16: mol_type = genomic RNA
cagatctaagacaagc

SEQ ID NO: 3503 - RNA, 16 nt, Homo sapiens
  source 1..16: mol_type = genomic RNA
agatctaagacaagcg

SEQ ID NO: 3504 - RNA, 16 nt, Homo sapiens
  source 1..16: mol_type = genomic RNA
gatctaagacaagcgt

SEQ ID NO: 3505 - RNA, 16 nt, Homo sapiens
  source 1..16: mol_type = genomic RNA
atctaagacaagcgtc

SEQ ID NO: 3506 - RNA, 16 nt, Homo sapiens
  source 1..16: mol_type = genomic RNA
tctaagacaagcgtcc

SEQ ID NO: 3507 - RNA, 16 nt, Homo sapiens
  source 1..16: mol_type = genomic RNA
ctaagacaagcgtcca

SEQ ID NO: 3508 - RNA, 16 nt, Homo sapiens
  source 1..16: mol_type = genomic RNA
taagacaagcgtccat

SEQ ID NO: 3509 - RNA, 16 nt, Homo sapiens
  source 1..16: mol_type = genomic RNA
aagacaagcgtccatc

SEQ ID NO: 3510 - RNA, 16 nt, Homo sapiens
  source 1..16: mol_type = genomic RNA
agacaagcgtccatca

SEQ ID NO: 3511 - RNA, 16 nt, Homo sapiens
  source 1..16: mol_type = genomic RNA
gacaagcgtccatcac

SEQ ID NO: 3512 - RNA, 16 nt, Homo sapiens
  source 1..16: mol_type = genomic RNA
acaagcgtccatcacc

SEQ ID NO: 3513 - RNA, 16 nt, Homo sapiens
  source 1..16: mol_type = genomic RNA
caagcgtccatcacct

SEQ ID NO: 3514 - RNA, 16 nt, Homo sapiens
  source 1..16: mol_type = genomic RNA
aagcgtccatcacctg

SEQ ID NO: 3515 - RNA, 16 nt, Homo sapiens
  source 1..16: mol_type = genomic RNA
agcgtccatcacctgg

SEQ ID NO: 3516 - RNA, 16 nt, Homo sapiens
  source 1..16: mol_type = genomic RNA
gcgtccatcacctggg

SEQ ID NO: 3517 - RNA, 16 nt, Homo sapiens
  source 1..16: mol_type = genomic RNA
cgtccatcacctgggt

SEQ ID NO: 3518 - RNA, 16 nt, Homo sapiens
  source 1..16: mol_type = genomic RNA
gtccatcacctgggtg

SEQ ID NO: 3519 - RNA, 16 nt, Homo sapiens
  source 1..16: mol_type = genomic RNA
tccatcacctgggtga

SEQ ID NO: 3520 - RNA, 16 nt, Homo sapiens
  source 1..16: mol_type = genomic RNA
ccatcacctgggtgat

SEQ ID NO: 3521 - RNA, 16 nt, Homo sapiens
  source 1..16: mol_type = genomic RNA
agtgcagagatatgta

SEQ ID NO: 3522 - RNA, 16 nt, Homo sapiens
  source 1..16: mol_type = genomic RNA
gtgcagagatatgtac

SEQ ID NO: 3523 - RNA, 16 nt, Homo sapiens
  source 1..16: mol_type = genomic RNA
tgcagagatatgtacc

SEQ ID NO: 3524 - RNA, 16 nt, Homo sapiens
  source 1..16: mol_type = genomic RNA
gcagagatatgtacca

SEQ ID NO: 3525 - RNA, 16 nt, Homo sapiens
  source 1..16: mol_type = genomic RNA
agagatatgtaccagt

SEQ ID NO: 3526 - RNA, 16 nt, Homo sapiens
  source 1..16: mol_type = genomic RNA
tatgtaccagtgtccc

SEQ ID NO: 3527 - RNA, 16 nt, Homo sapiens
  source 1..16: mol_type = genomic RNA
atgtaccagtgtcccc

SEQ ID NO: 3528 - RNA, 16 nt, Homo sapiens
  source 1..16: mol_type = genomic RNA
tgtaccagtgtcccct

SEQ ID NO: 3529 - RNA, 16 nt, Homo sapiens
  source 1..16: mol_type = genomic RNA
gtaccagtgtcccctg

SEQ ID NO: 3530 - RNA, 16 nt, Homo sapiens
  source 1..16: mol_type = genomic RNA
taccagtgtcccctgt

SEQ ID NO: 3531 - RNA, 16 nt, Homo sapiens
  source 1..16: mol_type = genomic RNA
accagtgtcccctgta

SEQ ID NO: 3532 - RNA, 16 nt, Homo sapiens
  source 1..16: mol_type = genomic RNA
ccagtgtcccctgtag

SEQ ID NO: 3533 - RNA, 16 nt, Homo sapiens
  source 1..16: mol_type = genomic RNA
cagtgtcccctgtagg

SEQ ID NO: 3534 - RNA, 16 nt, Homo sapiens
  source 1..16: mol_type = genomic RNA
agtgtcccctgtaggc

SEQ ID NO: 3535 - RNA, 16 nt, Homo sapiens
  source 1..16: mol_type = genomic RNA
gtgtcccctgtaggca

SEQ ID NO: 3536 - RNA, 16 nt, Homo sapiens
  source 1..16: mol_type = genomic RNA
tgtcccctgtaggcag

SEQ ID NO: 3537 - RNA, 16 nt, Homo sapiens
  source 1..16: mol_type = genomic RNA
gtcccctgtaggcagt

SEQ ID NO: 3538 - RNA, 16 nt, Homo sapiens
  source 1..16: mol_type = genomic RNA
tcccctgtaggcagtg

SEQ ID NO: 3539 - RNA, 16 nt, Homo sapiens
  source 1..16: mol_type = genomic RNA
cccctgtaggcagtgc

SEQ ID NO: 3540 - RNA, 16 nt, Homo sapiens
  source 1..16: mol_type = genomic RNA
ccctgtaggcagtgcc

SEQ ID NO: 3541 - RNA, 16 nt, Homo sapiens
  source 1..16: mol_type = genomic RNA
cctgtaggcagtgcct

SEQ ID NO: 3542 - RNA, 16 nt, Homo sapiens
  source 1..16: mol_type = genomic RNA
ctgtaggcagtgccta

SEQ ID NO: 3543 - RNA, 16 nt, Homo sapiens
  source 1..16: mol_type = genomic RNA
tgtaggcagtgcctag

SEQ ID NO: 3544 - RNA, 16 nt, Homo sapiens
  source 1..16: mol_type = genomic RNA
gtaggcagtgcctaga

SEQ ID NO: 3545 - RNA, 16 nt, Homo sapiens
  source 1..16: mol_type = genomic RNA
taggcagtgcctagac

SEQ ID NO: 3546 - RNA, 16 nt, Homo sapiens
  source 1..16: mol_type = genomic RNA
aggcagtgcctagaca

SEQ ID NO: 3547 - RNA, 16 nt, Homo sapiens
  source 1..16: mol_type = genomic RNA
ggcagtgcctagacaa

SEQ ID NO: 3548 - RNA, 16 nt, Homo sapiens
  source 1..16: mol_type = genomic RNA
gcagtgcctagacaag

SEQ ID NO: 3549 - RNA, 16 nt, Homo sapiens
  source 1..16: mol_type = genomic RNA
cagtgcctagacaaga

SEQ ID NO: 3550 - RNA, 16 nt, Homo sapiens
  source 1..16: mol_type = genomic RNA
agtgcctagacaagag

SEQ ID NO: 3551 - RNA, 16 nt, Homo sapiens
  source 1..16: mol_type = genomic RNA
gtgcctagacaagagt

SEQ ID NO: 3552 - RNA, 16 nt, Homo sapiens
  source 1..16: mol_type = genomic RNA
tgcctagacaagagtt

SEQ ID NO: 3553 - RNA, 16 nt, Homo sapiens
  source 1..16: mol_type = genomic RNA
gcctagacaagagttg

SEQ ID NO: 3554 - RNA, 16 nt, Homo sapiens
  source 1..16: mol_type = genomic RNA
cctagacaagagttga

SEQ ID NO: 3555 - RNA, 16 nt, Homo sapiens
  source 1..16: mol_type = genomic RNA
agagttgaatcacctc

SEQ ID NO: 3556 - RNA, 16 nt, Homo sapiens
  source 1..16: mol_type = genomic RNA
tgaatcacctcagaga

SEQ ID NO: 3557 - RNA, 16 nt, Homo sapiens
  source 1..16: mol_type = genomic RNA
gaatcacctcagagat

SEQ ID NO: 3558 - RNA, 16 nt, Homo sapiens
  source 1..16: mol_type = genomic RNA
aatcacctcagagatc

SEQ ID NO: 3559 - RNA, 16 nt, Homo sapiens
  source 1..16: mol_type = genomic RNA
atcacctcagagatca

SEQ ID NO: 3560 - RNA, 16 nt, Homo sapiens
  source 1..16: mol_type = genomic RNA
tcacctcagagatcag

SEQ ID NO: 3561 - RNA, 16 nt, Homo sapiens
  source 1..16: mol_type = genomic RNA
cacctcagagatcagt

SEQ ID NO: 3562 - RNA, 16 nt, Homo sapiens
  source 1..16: mol_type = genomic RNA
acctcagagatcagtg

SEQ ID NO: 3563 - RNA, 16 nt, Homo sapiens
  source 1..16: mol_type = genomic RNA
cctcagagatcagtgc

SEQ ID NO: 3564 - RNA, 16 nt, Homo sapiens
  source 1..16: mol_type = genomic RNA
ctcagagatcagtgca

SEQ ID NO: 3565 - RNA, 16 nt, Homo sapiens
  source 1..16: mol_type = genomic RNA
tcagagatcagtgcat

SEQ ID NO: 3566 - RNA, 16 nt, Homo sapiens
  source 1..16: mol_type = genomic RNA
cagagatcagtgcata

SEQ ID NO: 3567 - RNA, 16 nt, Homo sapiens
  source 1..16: mol_type = genomic RNA
agagatcagtgcatag

SEQ ID NO: 3568 - RNA, 16 nt, Homo sapiens
  source 1..16: mol_type = genomic RNA
gagatcagtgcataga

SEQ ID NO: 3569 - RNA, 16 nt, Homo sapiens
  source 1..16: mol_type = genomic RNA
agatcagtgcatagat

SEQ ID NO: 3570 - RNA, 16 nt, Homo sapiens
  source 1..16: mol_type = genomic RNA
agatatgtcacaaagc

SEQ ID NO: 3571 - RNA, 16 nt, Homo sapiens
  source 1..16: mol_type = genomic RNA
gatatgtcacaaagcc

SEQ ID NO: 3572 - RNA, 16 nt, Homo sapiens
  source 1..16: mol_type = genomic RNA
atgtcacaaagccttc

SEQ ID NO: 3573 - RNA, 16 nt, Homo sapiens
  source 1..16: mol_type = genomic RNA
tgtcacaaagccttct

SEQ ID NO: 3574 - RNA, 16 nt, Homo sapiens
  source 1..16: mol_type = genomic RNA
gtcacaaagccttctg

SEQ ID NO: 3575 - RNA, 16 nt, Homo sapiens
  source 1..16: mol_type = genomic RNA
tcacaaagccttctgt

SEQ ID NO: 3576 - RNA, 16 nt, Homo sapiens
  source 1..16: mol_type = genomic RNA
acaaagccttctgtag

SEQ ID NO: 3577 - RNA, 16 nt, Homo sapiens
  source 1..16: mol_type = genomic RNA
caaagccttctgtagg

SEQ ID NO: 3578 - RNA, 16 nt, Homo sapiens
  source 1..16: mol_type = genomic RNA
aaagccttctgtaggc

SEQ ID NO: 3579 - RNA, 16 nt, Homo sapiens
  source 1..16: mol_type = genomic RNA
aagccttctgtaggca

SEQ ID NO: 3580 - RNA, 16 nt, Homo sapiens
  source 1..16: mol_type = genomic RNA
agccttctgtaggcaa

SEQ ID NO: 3581 - RNA, 16 nt, Homo sapiens
  source 1..16: mol_type = genomic RNA
gccttctgtaggcaaa

SEQ ID NO: 3582 - RNA, 16 nt, Homo sapiens
  source 1..16: mol_type = genomic RNA
ccttctgtaggcaaag

SEQ ID NO: 3583 - RNA, 16 nt, Homo sapiens
  source 1..16: mol_type = genomic RNA
cttctgtaggcaaagc

SEQ ID NO: 3584 - RNA, 16 nt, Homo sapiens
  source 1..16: mol_type = genomic RNA
ttctgtaggcaaagcc

SEQ ID NO: 3585 - RNA, 16 nt, Homo sapiens
  source 1..16: mol_type = genomic RNA
tctgtaggcaaagccc

SEQ ID NO: 3586 - RNA, 16 nt, Homo sapiens
  source 1..16: mol_type = genomic RNA
ctgtaggcaaagccca

SEQ ID NO: 3587 - RNA, 16 nt, Homo sapiens
  source 1..16: mol_type = genomic RNA
tgtaggcaaagcccat

SEQ ID NO: 3588 - RNA, 16 nt, Homo sapiens
  source 1..16: mol_type = genomic RNA
gtaggcaaagcccata

SEQ ID NO: 3589 - RNA, 16 nt, Homo sapiens
  source 1..16: mol_type = genomic RNA
taggcaaagcccatac

SEQ ID NO: 3590 - RNA, 16 nt, Homo sapiens
  source 1..16: mol_type = genomic RNA
aggcaaagcccataca

SEQ ID NO: 3591 - RNA, 16 nt, Homo sapiens
  source 1..16: mol_type = genomic RNA
ggcaaagcccatacaa

SEQ ID NO: 3592 - RNA, 16 nt, Homo sapiens
  source 1..16: mol_type = genomic RNA
gcaaagcccatacaag

SEQ ID NO: 3593 - RNA, 16 nt, Homo sapiens
  source 1..16: mol_type = genomic RNA
caaagcccatacaagg

SEQ ID NO: 3594 - RNA, 16 nt, Homo sapiens
  source 1..16: mol_type = genomic RNA
aaagcccatacaaggt

SEQ ID NO: 3595 - RNA, 16 nt, Homo sapiens
  source 1..16: mol_type = genomic RNA
aagcccatacaaggtt

SEQ ID NO: 3596 - RNA, 16 nt, Homo sapiens
  source 1..16: mol_type = genomic RNA
agcccatacaaggttt

SEQ ID NO: 3597 - RNA, 16 nt, Homo sapiens
  source 1..16: mol_type = genomic RNA
ttagatcacctaggtg

SEQ ID NO: 3598 - RNA, 16 nt, Homo sapiens
  source 1..16: mol_type = genomic RNA
tagatcacctaggtga

SEQ ID NO: 3599 - RNA, 16 nt, Homo sapiens
  source 1..16: mol_type = genomic RNA
agatcacctaggtgat

SEQ ID NO: 3600 - RNA, 16 nt, Homo sapiens
  source 1..16: mol_type = genomic RNA
gatcacctaggtgatc

SEQ ID NO: 3601 - RNA, 16 nt, Homo sapiens
  source 1..16: mol_type = genomic RNA
atcacctaggtgatca

SEQ ID NO: 3602 - RNA, 16 nt, Homo sapiens
  source 1..16: mol_type = genomic RNA
tcacctaggtgatcag

SEQ ID NO: 3603 - RNA, 16 nt, Homo sapiens
  source 1..16: mol_type = genomic RNA
cacctaggtgatcagt

SEQ ID NO: 3604 - RNA, 16 nt, Homo sapiens
  source 1..16: mol_type = genomic RNA
acctaggtgatcagtg

SEQ ID NO: 3605 - RNA, 16 nt, Homo sapiens
  source 1..16: mol_type = genomic RNA
cctaggtgatcagtgc

SEQ ID NO: 3606 - RNA, 16 nt, Homo sapiens
  source 1..16: mol_type = genomic RNA
ctaggtgatcagtgca

SEQ ID NO: 3607 - RNA, 16 nt, Homo sapiens
  source 1..16: mol_type = genomic RNA
taggtgatcagtgcag

SEQ ID NO: 3608 - RNA, 16 nt, Homo sapiens
  source 1..16: mol_type = genomic RNA
aggtgatcagtgcagt

SEQ ID NO: 3609 - RNA, 16 nt, Homo sapiens
  source 1..16: mol_type = genomic RNA
ggtgatcagtgcagtg

SEQ ID NO: 3610 - RNA, 16 nt, Homo sapiens
  source 1..16: mol_type = genomic RNA
gtgatcagtgcagtga

SEQ ID NO: 3611 - RNA, 16 nt, Homo sapiens
  source 1..16: mol_type = genomic RNA
tgatcagtgcagtgat

SEQ ID NO: 3612 - RNA, 16 nt, Homo sapiens
  source 1..16: mol_type = genomic RNA
gatcagtgcagtgata

SEQ ID NO: 3613 - RNA, 16 nt, Homo sapiens
  source 1..16: mol_type = genomic RNA
tcagtgcagtgatatg

SEQ ID NO: 3614 - RNA, 16 nt, Homo sapiens
  source 1..16: mol_type = genomic RNA
agtgcagtgatatgtc

SEQ ID NO: 3615 - RNA, 16 nt, Homo sapiens
  source 1..16: mol_type = genomic RNA
tgcagtgatatgtcac

SEQ ID NO: 3616 - RNA, 16 nt, Homo sapiens
  source 1..16: mol_type = genomic RNA
aaaaatccctgtagac

SEQ ID NO: 3617 - RNA, 16 nt, Homo sapiens
  source 1..16: mol_type = genomic RNA
aaaatccctgtagaca

SEQ ID NO: 3618 - RNA, 16 nt, Homo sapiens
  source 1..16: mol_type = genomic RNA
aaatccctgtagacag

SEQ ID NO: 3619 - RNA, 16 nt, Homo sapiens
  source 1..16: mol_type = genomic RNA
aatccctgtagacaga

SEQ ID NO: 3620 - RNA, 16 nt, Homo sapiens
  source 1..16: mol_type = genomic RNA
atccctgtagacagag

SEQ ID NO: 3621 - RNA, 16 nt, Homo sapiens
  source 1..16: mol_type = genomic RNA
tccctgtagacagagc

SEQ ID NO: 3622 - RNA, 16 nt, Homo sapiens
  source 1..16: mol_type = genomic RNA
ccctgtagacagagcc

SEQ ID NO: 3623 - RNA, 16 nt, Homo sapiens
  source 1..16: mol_type = genomic RNA
cctgtagacagagcct

SEQ ID NO: 3624 - RNA, 16 nt, Homo sapiens
  source 1..16: mol_type = genomic RNA
ctgtagacagagccta

SEQ ID NO: 3625 - RNA, 16 nt, Homo sapiens
  source 1..16: mol_type = genomic RNA
acagagcctagacaag

SEQ ID NO: 3626 - RNA, 16 nt, Homo sapiens
  source 1..16: mol_type = genomic RNA
gcctagacaagagtta

SEQ ID NO: 3627 - RNA, 16 nt, Homo sapiens
  source 1..16: mol_type = genomic RNA
gagttacttcacctgg

SEQ ID NO: 3628 - RNA, 16 nt, Homo sapiens
  source 1..16: mol_type = genomic RNA
agttacttcacctggg

SEQ ID NO: 3629 - RNA, 16 nt, Homo sapiens
  source 1..16: mol_type = genomic RNA
gttacttcacctgggt

SEQ ID NO: 3630 - RNA, 16 nt, Homo sapiens
  source 1..16: mol_type = genomic RNA
ttacttcacctgggtg

SEQ ID NO: 3631 - RNA, 16 nt, Homo sapiens
  source 1..16: mol_type = genomic RNA
tacttcacctgggtga

SEQ ID NO: 3632 - RNA, 16 nt, Homo sapiens
  source 1..16: mol_type = genomic RNA
acttcacctgggtgat

SEQ ID NO: 3633 - RNA, 16 nt, Homo sapiens
  source 1..16: mol_type = genomic RNA
cttcacctgggtgatc

SEQ ID NO: 3634 - RNA, 16 nt, Homo sapiens
  source 1..16: mol_type = genomic RNA
ttcacctgggtgatca

SEQ ID NO: 3635 - RNA, 16 nt, Homo sapiens
  source 1..16: mol_type = genomic RNA
gtgatcagtgcagata

SEQ ID NO: 3636 - RNA, 16 nt, Homo sapiens
  source 1..16: mol_type = genomic RNA
atttgacacaatgccc

SEQ ID NO: 3637 - RNA, 16 nt, Homo sapiens
  source 1..16: mol_type = genomic RNA
tttgacacaatgcccc

SEQ ID NO: 3638 - RNA, 16 nt, Homo sapiens
  source 1..16: mol_type = genomic RNA
ttgacacaatgccccc

SEQ ID NO: 3639 - RNA, 16 nt, Homo sapiens
  source 1..16: mol_type = genomic RNA
tgacacaatgccccca

SEQ ID NO: 3640 - RNA, 16 nt, Homo sapiens
  source 1..16: mol_type = genomic RNA
gacacaatgcccccat

SEQ ID NO: 3641 - RNA, 16 nt, Homo sapiens
  source 1..16: mol_type = genomic RNA
acacaatgcccccata

SEQ ID NO: 3642 - RNA, 16 nt, Homo sapiens
  source 1..16: mol_type = genomic RNA
cacaatgcccccatag

SEQ ID NO: 3643 - RNA, 16 nt, Homo sapiens
  source 1..16: mol_type = genomic RNA
acaatgcccccataga

SEQ ID NO: 3644 - RNA, 16 nt, Homo sapiens
  source 1..16: mol_type = genomic RNA
caatgcccccatagac

SEQ ID NO: 3645 - RNA, 16 nt, Homo sapiens
  source 1..16: mol_type = genomic RNA
aatgcccccatagaca

SEQ ID NO: 3646 - RNA, 16 nt, Homo sapiens
  source 1..16: mol_type = genomic RNA
atgcccccatagacag

SEQ ID NO: 3647 - RNA, 16 nt, Homo sapiens
  source 1..16: mol_type = genomic RNA
tgcccccatagacaga

SEQ ID NO: 3648 - RNA, 16 nt, Homo sapiens
  source 1..16: mol_type = genomic RNA
gcccccatagacagag

SEQ ID NO: 3649 - RNA, 16 nt, Homo sapiens
  source 1..16: mol_type = genomic RNA
cccccatagacagagc

SEQ ID NO: 3650 - RNA, 16 nt, Homo sapiens
  source 1..16: mol_type = genomic RNA
ccccatagacagagcc

SEQ ID NO: 3651 - RNA, 16 nt, Homo sapiens
  source 1..16: mol_type = genomic RNA
cccatagacagagcct

SEQ ID NO: 3652 - RNA, 16 nt, Homo sapiens
  source 1..16: mol_type = genomic RNA
ccatagacagagccta

SEQ ID NO: 3653 - RNA, 16 nt, Homo sapiens
  source 1..16: mol_type = genomic RNA
catagacagagcctag

SEQ ID NO: 3654 - RNA, 16 nt, Homo sapiens
  source 1..16: mol_type = genomic RNA
atagacagagcctagg

SEQ ID NO: 3655 - RNA, 16 nt, Homo sapiens
  source 1..16: mol_type = genomic RNA
tagacagagcctaggc

SEQ ID NO: 3656 - RNA, 16 nt, Homo sapiens
  source 1..16: mol_type = genomic RNA
agacagagcctaggca

SEQ ID NO: 3657 - RNA, 16 nt, Homo sapiens
  source 1..16: mol_type = genomic RNA
gacagagcctaggcaa

SEQ ID NO: 3658 - RNA, 16 nt, Homo sapiens
  source 1..16: mol_type = genomic RNA
acagagcctaggcaag

SEQ ID NO: 3659 - RNA, 16 nt, Homo sapiens
  source 1..16: mol_type = genomic RNA
cagagcctaggcaaga

SEQ ID NO: 3660 - RNA, 16 nt, Homo sapiens
  source 1..16: mol_type = genomic RNA
agagcctaggcaagac

SEQ ID NO: 3661 - RNA, 16 nt, Homo sapiens
  source 1..16: mol_type = genomic RNA
gagcctaggcaagact

SEQ ID NO: 3662 - RNA, 16 nt, Homo sapiens
  source 1..16: mol_type = genomic RNA
agcctaggcaagactt

SEQ ID NO: 3663 - RNA, 16 nt, Homo sapiens
  source 1..16: mol_type = genomic RNA
gcctaggcaagacttc

SEQ ID NO: 3664 - RNA, 16 nt, Homo sapiens
  source 1..16: mol_type = genomic RNA
cctaggcaagacttcc

SEQ ID NO: 3665 - RNA, 16 nt, Homo sapiens
  source 1..16: mol_type = genomic RNA
ctaggcaagacttcca

SEQ ID NO: 3666 - RNA, 16 nt, Homo sapiens
  source 1..16: mol_type = genomic RNA
taggcaagacttccat

SEQ ID NO: 3667 - RNA, 16 nt, Homo sapiens
  source 1..16: mol_type = genomic RNA
aggcaagacttccatc

SEQ ID NO: 3668 - RNA, 16 nt, Homo sapiens
  source 1..16: mol_type = genomic RNA
ggcaagacttccatca

SEQ ID NO: 3669 - RNA, 16 nt, Homo sapiens
  source 1..16: mol_type = genomic RNA
gcaagacttccatcac

SEQ ID NO: 3670 - RNA, 16 nt, Homo sapiens
  source 1..16: mol_type = genomic RNA
caagacttccatcacc

SEQ ID NO: 3671 - RNA, 16 nt, Homo sapiens
  source 1..16: mol_type = genomic RNA
aagacttccatcacct

SEQ ID NO: 3672 - RNA, 16 nt, Homo sapiens
  source 1..16: mol_type = genomic RNA
agacttccatcacctg

SEQ ID NO: 3673 - RNA, 16 nt, Homo sapiens
  source 1..16: mol_type = genomic RNA
gacttccatcacctgg

SEQ ID NO: 3674 - RNA, 16 nt, Homo sapiens
  source 1..16: mol_type = genomic RNA
acttccatcacctggg

SEQ ID NO: 3675 - RNA, 16 nt, Homo sapiens
  source 1..16: mol_type = genomic RNA
cttccatcacctgggt

SEQ ID NO: 3676 - RNA, 16 nt, Homo sapiens
  source 1..16: mol_type = genomic RNA
ttccatcacctgggtg

SEQ ID NO: 3677 - RNA, 16 nt, Homo sapiens
  source 1..16: mol_type = genomic RNA
tatgtcacaaatcccc

SEQ ID NO: 3678 - RNA, 16 nt, Homo sapiens
  source 1..16: mol_type = genomic RNA
atgtcacaaatccccc

SEQ ID NO: 3679 - RNA, 16 nt, Homo sapiens
  source 1..16: mol_type = genomic RNA
tgtcacaaatccccct

SEQ ID NO: 3680 - RNA, 16 nt, Homo sapiens
  source 1..16: mol_type = genomic RNA
gtcacaaatccccctc

SEQ ID NO: 3681 - RNA, 16 nt, Homo sapiens
  source 1..16: mol_type = genomic RNA
tcacaaatccccctct

SEQ ID NO: 3682 - RNA, 16 nt, Homo sapiens
  source 1..16: mol_type = genomic RNA
cacaaatccccctcta

SEQ ID NO: 3683 - RNA, 16 nt, Homo sapiens
  source 1..16: mol_type = genomic RNA
acaaatccccctctag

SEQ ID NO: 3684 - RNA, 16 nt, Homo sapiens
  source 1..16: mol_type = genomic RNA
caaatccccctctagg

SEQ ID NO: 3685 - RNA, 16 nt, Homo sapiens
  source 1..16: mol_type = genomic RNA
aaatccccctctaggc

SEQ ID NO: 3686 - RNA, 16 nt, Homo sapiens
  source 1..16: mol_type = genomic RNA
aatccccctctaggca

SEQ ID NO: 3687 - RNA, 16 nt, Homo sapiens
  source 1..16: mol_type = genomic RNA
atccccctctaggcag

SEQ ID NO: 3688 - RNA, 16 nt, Homo sapiens
  source 1..16: mol_type = genomic RNA
tccccctctaggcaga

SEQ ID NO: 3689 - RNA, 16 nt, Homo sapiens
  source 1..16: mol_type = genomic RNA
ccccctctaggcagag

SEQ ID NO: 3690 - RNA, 16 nt, Homo sapiens
  source 1..16: mol_type = genomic RNA
cccctctaggcagagt

SEQ ID NO: 3691 - RNA, 16 nt, Homo sapiens
  source 1..16: mol_type = genomic RNA
ccctctaggcagagta

SEQ ID NO: 3692 - RNA, 16 nt, Homo sapiens
  source 1..16: mol_type = genomic RNA
cctctaggcagagtat

SEQ ID NO: 3693 - RNA, 16 nt, Homo sapiens
  source 1..16: mol_type = genomic RNA
ctctaggcagagtata

SEQ ID NO: 3694 - RNA, 16 nt, Homo sapiens
  source 1..16: mol_type = genomic RNA
tctaggcagagtatag

SEQ ID NO: 3695 - RNA, 16 nt, Homo sapiens
  source 1..16: mol_type = genomic RNA
ctaggcagagtataga

SEQ ID NO: 3696 - RNA, 16 nt, Homo sapiens
  source 1..16: mol_type = genomic RNA
taggcagagtatagag

SEQ ID NO: 3697 - RNA, 16 nt, Homo sapiens
  source 1..16: mol_type = genomic RNA
aggcagagtatagaga

SEQ ID NO: 3698 - RNA, 16 nt, Homo sapiens
  source 1..16: mol_type = genomic RNA
ggcagagtatagagaa

SEQ ID NO: 3699 - RNA, 16 nt, Homo sapiens
  source 1..16: mol_type = genomic RNA
gcagagtatagagaag

SEQ ID NO: 3700 - RNA, 16 nt, Homo sapiens
  source 1..16: mol_type = genomic RNA
agagtatagagaagag

SEQ ID NO: 3701 - RNA, 16 nt, Homo sapiens
  source 1..16: mol_type = genomic RNA
agtatagagaagagtc

SEQ ID NO: 3702 - RNA, 16 nt, Homo sapiens
  source 1..16: mol_type = genomic RNA
gtatagagaagagtcc

SEQ ID NO: 3703 - RNA, 16 nt, Homo sapiens
  source 1..16: mol_type = genomic RNA
tatagagaagagtccc

SEQ ID NO: 3704 - RNA, 16 nt, Homo sapiens
  source 1..16: mol_type = genomic RNA
atagagaagagtccca

SEQ ID NO: 3705 - RNA, 16 nt, Homo sapiens
  source 1..16: mol_type = genomic RNA
tagagaagagtcccat

SEQ ID NO: 3706 - RNA, 16 nt, Homo sapiens
  source 1..16: mol_type = genomic RNA
agagaagagtcccatc

SEQ ID NO: 3707 - RNA, 16 nt, Homo sapiens
  source 1..16: mol_type = genomic RNA
gagaagagtcccatca

SEQ ID NO: 3708 - RNA, 16 nt, Homo sapiens
  source 1..16: mol_type = genomic RNA
agaagagtcccatcac

SEQ ID NO: 3709 - RNA, 16 nt, Homo sapiens
  source 1..16: mol_type = genomic RNA
gaagagtcccatcacc

SEQ ID NO: 3710 - RNA, 16 nt, Homo sapiens
  source 1..16: mol_type = genomic RNA
aagagtcccatcacct

SEQ ID NO: 3711 - RNA, 16 nt, Homo sapiens
  source 1..16: mol_type = genomic RNA
agagtcccatcacctg

SEQ ID NO: 3712 - RNA, 16 nt, Homo sapiens
  source 1..16: mol_type = genomic RNA
gagtcccatcacctgg

SEQ ID NO: 3713 - RNA, 16 nt, Homo sapiens
  source 1..16: mol_type = genomic RNA
agtcccatcacctggg

SEQ ID NO: 3714 - RNA, 16 nt, Homo sapiens
  source 1..16: mol_type = genomic RNA
gtcccatcacctgggt

SEQ ID NO: 3715 - RNA, 16 nt, Homo sapiens
  source 1..16: mol_type = genomic RNA
tcccatcacctgggtg

SEQ ID NO: 3716 - RNA, 16 nt, Homo sapiens
  source 1..16: mol_type = genomic RNA
cccatcacctgggtga

SEQ ID NO: 3717 - RNA, 16 nt, Homo sapiens
  source 1..16: mol_type = genomic RNA
ttcacaatgtcccctg

SEQ ID NO: 3718 - RNA, 16 nt, Homo sapiens
  source 1..16: mol_type = genomic RNA
tcacaatgtcccctgt

SEQ ID NO: 3719 - RNA, 16 nt, Homo sapiens
  source 1..16: mol_type = genomic RNA
cacaatgtcccctgta

SEQ ID NO: 3720 - RNA, 16 nt, Homo sapiens
  source 1..16: mol_type = genomic RNA
acaatgtcccctgtag

SEQ ID NO: 3721 - RNA, 16 nt, Homo sapiens
  source 1..16: mol_type = genomic RNA
caatgtcccctgtagg

SEQ ID NO: 3722 - RNA, 16 nt, Homo sapiens
  source 1..16: mol_type = genomic RNA
aatgtcccctgtaggc

SEQ ID NO: 3723 - RNA, 16 nt, Homo sapiens
  source 1..16: mol_type = genomic RNA
atgtcccctgtaggca

SEQ ID NO: 3724 - RNA, 16 nt, Homo sapiens
  source 1..16: mol_type = genomic RNA
gtcccctgtaggcaga

SEQ ID NO: 3725 - RNA, 16 nt, Homo sapiens
  source 1..16: mol_type = genomic RNA
tcccctgtaggcagag

SEQ ID NO: 3726 - RNA, 16 nt, Homo sapiens
  source 1..16: mol_type = genomic RNA
cccctgtaggcagaga

SEQ ID NO: 3727 - RNA, 16 nt, Homo sapiens
  source 1..16: mol_type = genomic RNA
ccctgtaggcagagag

SEQ ID NO: 3728 - RNA, 16 nt, Homo sapiens
  source 1..16: mol_type = genomic RNA
cctgtaggcagagagt

SEQ ID NO: 3729 - RNA, 16 nt, Homo sapiens
  source 1..16: mol_type = genomic RNA
ctgtaggcagagagtg

SEQ ID NO: 3730 - RNA, 16 nt, Homo sapiens
  source 1..16: mol_type = genomic RNA
tgtaggcagagagtgg

SEQ ID NO: 3731 - RNA, 16 nt, Homo sapiens
  source 1..16: mol_type = genomic RNA
gtaggcagagagtgga

SEQ ID NO: 3732 - RNA, 16 nt, Homo sapiens
  source 1..16: mol_type = genomic RNA
taggcagagagtggac

SEQ ID NO: 3733 - RNA, 16 nt, Homo sapiens
  source 1..16: mol_type = genomic RNA
aggcagagagtggaca

SEQ ID NO: 3734 - RNA, 16 nt, Homo sapiens
  source 1..16: mol_type = genomic RNA
ggcagagagtggacaa

SEQ ID NO: 3735 - RNA, 16 nt, Homo sapiens
  source 1..16: mol_type = genomic RNA
gcagagagtggacaag

SEQ ID NO: 3736 - RNA, 16 nt, Homo sapiens
  source 1..16: mol_type = genomic RNA
cagagagtggacaaga

SEQ ID NO: 3737 - RNA, 16 nt, Homo sapiens
  source 1..16: mol_type = genomic RNA
agagagtggacaagag

SEQ ID NO: 3738 - RNA, 16 nt, Homo sapiens
  source 1..16: mol_type = genomic RNA
gagagtggacaagagt

SEQ ID NO: 3739 - RNA, 16 nt, Homo sapiens
  source 1..16: mol_type = genomic RNA
agagtggacaagagtt

SEQ ID NO: 3740 - RNA, 16 nt, Homo sapiens
  source 1..16: mol_type = genomic RNA
gagtggacaagagtta

SEQ ID NO: 3741 - RNA, 16 nt, Homo sapiens
  source 1..16: mol_type = genomic RNA
agtggacaagagttac

SEQ ID NO: 3742 - RNA, 16 nt, Homo sapiens
  source 1..16: mol_type = genomic RNA
gtggacaagagttaca

SEQ ID NO: 3743 - RNA, 16 nt, Homo sapiens
  source 1..16: mol_type = genomic RNA
tggacaagagttacat

SEQ ID NO: 3744 - RNA, 16 nt, Homo sapiens
  source 1..16: mol_type = genomic RNA
ggacaagagttacatc

SEQ ID NO: 3745 - RNA, 16 nt, Homo sapiens
  source 1..16: mol_type = genomic RNA
acatcacctagatgat

SEQ ID NO: 3746 - RNA, 16 nt, Homo sapiens
  source 1..16: mol_type = genomic RNA
tcacctagatgatctg

SEQ ID NO: 3747 - RNA, 16 nt, Homo sapiens
  source 1..16: mol_type = genomic RNA
acctagatgatctgtg

SEQ ID NO: 3748 - RNA, 16 nt, Homo sapiens
  source 1..16: mol_type = genomic RNA
cctagatgatctgtgc

SEQ ID NO: 3749 - RNA, 16 nt, Homo sapiens
  source 1..16: mol_type = genomic RNA
tagatgatctgtgcag

SEQ ID NO: 3750 - RNA, 16 nt, Homo sapiens
  source 1..16: mol_type = genomic RNA
agatgatctgtgcaga

SEQ ID NO: 3751 - RNA, 16 nt, Homo sapiens
  source 1..16: mol_type = genomic RNA
gatgatctgtgcagag

SEQ ID NO: 3752 - RNA, 16 nt, Homo sapiens
  source 1..16: mol_type = genomic RNA
atgatctgtgcagagc

SEQ ID NO: 3753 - RNA, 16 nt, Homo sapiens
  source 1..16: mol_type = genomic RNA
tgatctgtgcagagct

SEQ ID NO: 3754 - RNA, 16 nt, Homo sapiens
  source 1..16: mol_type = genomic RNA
gatctgtgcagagcta

SEQ ID NO: 3755 - RNA, 16 nt, Homo sapiens
  source 1..16: mol_type = genomic RNA
atctgtgcagagctat

SEQ ID NO: 3756 - RNA, 16 nt, Homo sapiens
  source 1..16: mol_type = genomic RNA
tctgtgcagagctatg

SEQ ID NO: 3757 - RNA, 16 nt, Homo sapiens
  source 1..16: mol_type = genomic RNA
ctgtgcagagctatgt

SEQ ID NO: 3758 - RNA, 16 nt, Homo sapiens
  source 1..16: mol_type = genomic RNA
tgtgcagagctatgtc

SEQ ID NO: 3759 - RNA, 16 nt, Homo sapiens
  source 1..16: mol_type = genomic RNA
gtgcagagctatgtca

SEQ ID NO: 3760 - RNA, 16 nt, Homo sapiens
  source 1..16: mol_type = genomic RNA
tgcagagctatgtcaa

SEQ ID NO: 3761 - RNA, 16 nt, Homo sapiens
  source 1..16: mol_type = genomic RNA
gcagagctatgtcaaa

SEQ ID NO: 3762 - RNA, 16 nt, Homo sapiens
  source 1..16: mol_type = genomic RNA
agagctatgtcaaaac

SEQ ID NO: 3763 - RNA, 16 nt, Homo sapiens
  source 1..16: mol_type = genomic RNA
agctatgtcaaaacgc

SEQ ID NO: 3764 - RNA, 16 nt, Homo sapiens
  source 1..16: mol_type = genomic RNA
gctatgtcaaaacgcc

SEQ ID NO: 3765 - RNA, 16 nt, Homo sapiens
  source 1..16: mol_type = genomic RNA
ctatgtcaaaacgccc

SEQ ID NO: 3766 - RNA, 16 nt, Homo sapiens
  source 1..16: mol_type = genomic RNA
tatgtcaaaacgcccc

SEQ ID NO: 3767 - RNA, 16 nt, Homo sapiens
  source 1..16: mol_type = genomic RNA
atgtcaaaacgcccct

SEQ ID NO: 3768 - RNA, 16 nt, Homo sapiens
  source 1..16: mol_type = genomic RNA
tgtcaaaacgcccctg

SEQ ID NO: 3769 - RNA, 16 nt, Homo sapiens
  source 1..16: mol_type = genomic RNA
gtcaaaacgcccctgt

SEQ ID NO: 3770 - RNA, 16 nt, Homo sapiens
  source 1..16: mol_type = genomic RNA
tcaaaacgcccctgta

SEQ ID NO: 3771 - RNA, 16 nt, Homo sapiens
  source 1..16: mol_type = genomic RNA
caaaacgcccctgtag

SEQ ID NO: 3772 - RNA, 16 nt, Homo sapiens
  source 1..16: mol_type = genomic RNA
aaaacgcccctgtagg

SEQ ID NO: 3773 - RNA, 16 nt, Homo sapiens
  source 1..16: mol_type = genomic RNA
aaacgcccctgtaggc

SEQ ID NO: 3774 - RNA, 16 nt, Homo sapiens
  source 1..16: mol_type = genomic RNA
aacgcccctgtaggca

SEQ ID NO: 3775 - RNA, 16 nt, Homo sapiens
  source 1..16: mol_type = genomic RNA
acgcccctgtaggcag

SEQ ID NO: 3776 - RNA, 16 nt, Homo sapiens
  source 1..16: mol_type = genomic RNA
cgcccctgtaggcaga

SEQ ID NO: 3777 - RNA, 16 nt, Homo sapiens
  source 1..16: mol_type = genomic RNA
taggcagagcctagat

SEQ ID NO: 3778 - RNA, 16 nt, Homo sapiens
  source 1..16: mol_type = genomic RNA
aggcagagcctagatg

SEQ ID NO: 3779 - RNA, 16 nt, Homo sapiens
  source 1..16: mol_type = genomic RNA
ggcagagcctagatga

SEQ ID NO: 3780 - RNA, 16 nt, Homo sapiens
  source 1..16: mol_type = genomic RNA
gcagagcctagatgag

SEQ ID NO: 3781 - RNA, 16 nt, Homo sapiens
  source 1..16: mol_type = genomic RNA
cagagcctagatgagt

SEQ ID NO: 3782 - RNA, 16 nt, Homo sapiens
  source 1..16: mol_type = genomic RNA
agagcctagatgagtg

SEQ ID NO: 3783 - RNA, 16 nt, Homo sapiens
  source 1..16: mol_type = genomic RNA
gagcctagatgagtgt

SEQ ID NO: 3784 - RNA, 16 nt, Homo sapiens
  source 1..16: mol_type = genomic RNA
agcctagatgagtgtt

SEQ ID NO: 3785 - RNA, 16 nt, Homo sapiens
  source 1..16: mol_type = genomic RNA
tcacctgggtgatcat

SEQ ID NO: 3786 - RNA, 16 nt, Homo sapiens
  source 1..16: mol_type = genomic RNA
cacctgggtgatcatt

SEQ ID NO: 3787 - RNA, 16 nt, Homo sapiens
  source 1..16: mol_type = genomic RNA
acctgggtgatcattg

SEQ ID NO: 3788 - RNA, 16 nt, Homo sapiens
  source 1..16: mol_type = genomic RNA
cctgggtgatcattgc

SEQ ID NO: 3789 - RNA, 16 nt, Homo sapiens
  source 1..16: mol_type = genomic RNA
ctgggtgatcattgca

SEQ ID NO: 3790 - RNA, 16 nt, Homo sapiens
  source 1..16: mol_type = genomic RNA
tgggtgatcattgcag

SEQ ID NO: 3791 - RNA, 16 nt, Homo sapiens
  source 1..16: mol_type = genomic RNA
gggtgatcattgcaga

SEQ ID NO: 3792 - RNA, 16 nt, Homo sapiens
  source 1..16: mol_type = genomic RNA
ggtgatcattgcagag

SEQ ID NO: 3793 - RNA, 16 nt, Homo sapiens
  source 1..16: mol_type = genomic RNA
attgcagagatacgtc

SEQ ID NO: 3794 - RNA, 16 nt, Homo sapiens
  source 1..16: mol_type = genomic RNA
ttgcagagatacgtca

SEQ ID NO: 3795 - RNA, 16 nt, Homo sapiens
  source 1..16: mol_type = genomic RNA
tgcagagatacgtcac

SEQ ID NO: 3796 - RNA, 16 nt, Homo sapiens
  source 1..16: mol_type = genomic RNA
gcagagatacgtcaca

SEQ ID NO: 3797 - RNA, 16 nt, Homo sapiens
  source 1..16: mol_type = genomic RNA
atacgtcacaataccc

SEQ ID NO: 3798 - RNA, 16 nt, Homo sapiens
  source 1..16: mol_type = genomic RNA
tacgtcacaatacccc

SEQ ID NO: 3799 - RNA, 16 nt, Homo sapiens
  source 1..16: mol_type = genomic RNA
acgtcacaataccccc

SEQ ID NO: 3800 - RNA, 16 nt, Homo sapiens
  source 1..16: mol_type = genomic RNA
cgtcacaataccccct

SEQ ID NO: 3801 - RNA, 16 nt, Homo sapiens
  source 1..16: mol_type = genomic RNA
gtcacaataccccctg

SEQ ID NO: 3802 - RNA, 16 nt, Homo sapiens
  source 1..16: mol_type = genomic RNA
tcacaataccccctgt

SEQ ID NO: 3803 - RNA, 16 nt, Homo sapiens
  source 1..16: mol_type = genomic RNA
cacaataccccctgta

SEQ ID NO: 3804 - RNA, 16 nt, Homo sapiens
  source 1..16: mol_type = genomic RNA
acaataccccctgtag

SEQ ID NO: 3805 - RNA, 16 nt, Homo sapiens
  source 1..16: mol_type = genomic RNA
caataccccctgtagg

SEQ ID NO: 3806 - RNA, 16 nt, Homo sapiens
  source 1..16: mol_type = genomic RNA
aataccccctgtaggt

SEQ ID NO: 3807 - RNA, 16 nt, Homo sapiens
  source 1..16: mol_type = genomic RNA
ataccccctgtaggtg

SEQ ID NO: 3808 - RNA, 16 nt, Homo sapiens
  source 1..16: mol_type = genomic RNA
taccccctgtaggtgg

SEQ ID NO: 3809 - RNA, 16 nt, Homo sapiens
  source 1..16: mol_type = genomic RNA
accccctgtaggtggg

SEQ ID NO: 3810 - RNA, 16 nt, Homo sapiens
  source 1..16: mol_type = genomic RNA
ccccctgtaggtgggg

SEQ ID NO: 3811 - RNA, 16 nt, Homo sapiens
  source 1..16: mol_type = genomic RNA
cctgtaggtggggcct

SEQ ID NO: 3812 - RNA, 16 nt, Homo sapiens
  source 1..16: mol_type = genomic RNA
ctgtaggtggggccta

SEQ ID NO: 3813 - RNA, 16 nt, Homo sapiens
  source 1..16: mol_type = genomic RNA
tgtaggtggggcctag

SEQ ID NO: 3814 - RNA, 16 nt, Homo sapiens
  source 1..16: mol_type = genomic RNA
gtaggtggggcctaga

SEQ ID NO: 3815 - RNA, 16 nt, Homo sapiens
  source 1..16: mol_type = genomic RNA
ggtggggcctagacaa

SEQ ID NO: 3816 - RNA, 16 nt, Homo sapiens
  source 1..16: mol_type = genomic RNA
gtggggcctagacaag

SEQ ID NO: 3817 - RNA, 16 nt, Homo sapiens
  source 1..16: mol_type = genomic RNA
tggggcctagacaaga

SEQ ID NO: 3818 - RNA, 16 nt, Homo sapiens
  source 1..16: mol_type = genomic RNA
ggggcctagacaagag

SEQ ID NO: 3819 - RNA, 16 nt, Homo sapiens
  source 1..16: mol_type = genomic RNA
gggcctagacaagagt

SEQ ID NO: 3820 - RNA, 16 nt, Homo sapiens
  source 1..16: mol_type = genomic RNA
ggcctagacaagagtt

SEQ ID NO: 3821 - RNA, 16 nt, Homo sapiens
  source 1..16: mol_type = genomic RNA
gagttacatcacctgg

SEQ ID NO: 3822 - RNA, 16 nt, Homo sapiens
  source 1..16: mol_type = genomic RNA
agttacatcacctggg

SEQ ID NO: 3823 - RNA, 16 nt, Homo sapiens
  source 1..16: mol_type = genomic RNA
acctgggtgatcagta

SEQ ID NO: 3824 - RNA, 16 nt, Homo sapiens
  source 1..16: mol_type = genomic RNA
cctgggtgatcagtac

SEQ ID NO: 3825 - RNA, 16 nt, Homo sapiens
  source 1..16: mol_type = genomic RNA
ctgggtgatcagtaca

SEQ ID NO: 3826 - RNA, 16 nt, Homo sapiens
  source 1..16: mol_type = genomic RNA
tgggtgatcagtacag

SEQ ID NO: 3827 - RNA, 16 nt, Homo sapiens
  source 1..16: mol_type = genomic RNA
gggtgatcagtacaga

SEQ ID NO: 3828 - RNA, 16 nt, Homo sapiens
  source 1..16: mol_type = genomic RNA
ggtgatcagtacagaa

SEQ ID NO: 3829 - RNA, 16 nt, Homo sapiens
  source 1..16: mol_type = genomic RNA
agtatgtcacaaagcc

SEQ ID NO: 3830 - RNA, 16 nt, Homo sapiens
  source 1..16: mol_type = genomic RNA
gtatgtcacaaagccc

SEQ ID NO: 3831 - RNA, 16 nt, Homo sapiens
  source 1..16: mol_type = genomic RNA
tatgtcacaaagcccc

SEQ ID NO: 3832 - RNA, 16 nt, Homo sapiens
  source 1..16: mol_type = genomic RNA
atgtcacaaagcccct

SEQ ID NO: 3833 - RNA, 16 nt, Homo sapiens
  source 1..16: mol_type = genomic RNA
ttacatcacctgggtt

SEQ ID NO: 3834 - RNA, 16 nt, Homo sapiens
  source 1..16: mol_type = genomic RNA
tacatcacctgggtta

SEQ ID NO: 3835 - RNA, 16 nt, Homo sapiens
  source 1..16: mol_type = genomic RNA
acatcacctgggttat

SEQ ID NO: 3836 - RNA, 16 nt, Homo sapiens
  source 1..16: mol_type = genomic RNA
catcacctgggttatc

SEQ ID NO: 3837 - RNA, 16 nt, Homo sapiens
  source 1..16: mol_type = genomic RNA
atcacctgggttatca

SEQ ID NO: 3838 - RNA, 16 nt, Homo sapiens
  source 1..16: mol_type = genomic RNA
tcacctgggttatcag

SEQ ID NO: 3839 - RNA, 16 nt, Homo sapiens
  source 1..16: mol_type = genomic RNA
cacctgggttatcagt

SEQ ID NO: 3840 - RNA, 16 nt, Homo sapiens
  source 1..16: mol_type = genomic RNA
acctgggttatcagtg

SEQ ID NO: 3841 - RNA, 16 nt, Homo sapiens
  source 1..16: mol_type = genomic RNA
cctgggttatcagtgc

SEQ ID NO: 3842 - RNA, 16 nt, Homo sapiens
  source 1..16: mol_type = genomic RNA
ctgggttatcagtgca

SEQ ID NO: 3843 - RNA, 16 nt, Homo sapiens
  source 1..16: mol_type = genomic RNA
tgggttatcagtgcag

SEQ ID NO: 3844 - RNA, 16 nt, Homo sapiens
  source 1..16: mol_type = genomic RNA
gggttatcagtgcaga

SEQ ID NO: 3845 - RNA, 16 nt, Homo sapiens
  source 1..16: mol_type = genomic RNA
ggttatcagtgcagaa

SEQ ID NO: 3846 - RNA, 16 nt, Homo sapiens
  source 1..16: mol_type = genomic RNA
aatatgtcacaaagcc

SEQ ID NO: 3847 - RNA, 16 nt, Homo sapiens
  source 1..16: mol_type = genomic RNA
atatgtcacaaagccc

SEQ ID NO: 3848 - RNA, 16 nt, Homo sapiens
  source 1..16: mol_type = genomic RNA
caaagcccctgtaggt

SEQ ID NO: 3849 - RNA, 16 nt, Homo sapiens
  source 1..16: mol_type = genomic RNA
aaagcccctgtaggtc

SEQ ID NO: 3850 - RNA, 16 nt, Homo sapiens
  source 1..16: mol_type = genomic RNA
aagcccctgtaggtcg

SEQ ID NO: 3851 - RNA, 16 nt, Homo sapiens
  source 1..16: mol_type = genomic RNA
agcccctgtaggtcga

SEQ ID NO: 3852 - RNA, 16 nt, Homo sapiens
  source 1..16: mol_type = genomic RNA
gcccctgtaggtcgag

SEQ ID NO: 3853 - RNA, 16 nt, Homo sapiens
  source 1..16: mol_type = genomic RNA
cccctgtaggtcgagt

SEQ ID NO: 3854 - RNA, 16 nt, Homo sapiens
  source 1..16: mol_type = genomic RNA
ccctgtaggtcgagtc

SEQ ID NO: 3855 - RNA, 16 nt, Homo sapiens
  source 1..16: mol_type = genomic RNA
cctgtaggtcgagtct

SEQ ID NO: 3856 - RNA, 16 nt, Homo sapiens
  source 1..16: mol_type = genomic RNA
ctgtaggtcgagtcta

SEQ ID NO: 3857 - RNA, 16 nt, Homo sapiens
  source 1..16: mol_type = genomic RNA
tgtaggtcgagtctag

SEQ ID NO: 3858 - RNA, 16 nt, Homo sapiens
  source 1..16: mol_type = genomic RNA
gtaggtcgagtctaga

SEQ ID NO: 3859 - RNA, 16 nt, Homo sapiens
  source 1..16: mol_type = genomic RNA
taggtcgagtctagac

SEQ ID NO: 3860 - RNA, 16 nt, Homo sapiens
  source 1..16: mol_type = genomic RNA
aggtcgagtctagaca

SEQ ID NO: 3861 - RNA, 16 nt, Homo sapiens
  source 1..16: mol_type = genomic RNA
ggtcgagtctagacaa

SEQ ID NO: 3862 - RNA, 16 nt, Homo sapiens
  source 1..16: mol_type = genomic RNA
gtcgagtctagacaag

SEQ ID NO: 3863 - RNA, 16 nt, Homo sapiens
  source 1..16: mol_type = genomic RNA
tcgagtctagacaaga

SEQ ID NO: 3864 - RNA, 16 nt, Homo sapiens
  source 1..16: mol_type = genomic RNA
cgagtctagacaagag

SEQ ID NO: 3865 - RNA, 16 nt, Homo sapiens
  source 1..16: mol_type = genomic RNA
gagtctagacaagagt

SEQ ID NO: 3866 - RNA, 16 nt, Homo sapiens
  source 1..16: mol_type = genomic RNA
agttacatctcctggg

SEQ ID NO: 3867 - RNA, 16 nt, Homo sapiens
  source 1..16: mol_type = genomic RNA
gttacatctcctgggt

SEQ ID NO: 3868 - RNA, 16 nt, Homo sapiens
  source 1..16: mol_type = genomic RNA
ttacatctcctgggtg

SEQ ID NO: 3869 - RNA, 16 nt, Homo sapiens
  source 1..16: mol_type = genomic RNA
tacatctcctgggtga

SEQ ID NO: 3870 - RNA, 16 nt, Homo sapiens
  source 1..16: mol_type = genomic RNA
acatctcctgggtgat

SEQ ID NO: 3871 - RNA, 16 nt, Homo sapiens
  source 1..16: mol_type = genomic RNA
catctcctgggtgatc

SEQ ID NO: 3872 - RNA, 16 nt, Homo sapiens
  source 1..16: mol_type = genomic RNA
atctcctgggtgatca

SEQ ID NO: 3873 - RNA, 16 nt, Homo sapiens
  source 1..16: mol_type = genomic RNA
tctcctgggtgatcag

SEQ ID NO: 3874 - RNA, 16 nt, Homo sapiens
  source 1..16: mol_type = genomic RNA
ctcctgggtgatcagt

SEQ ID NO: 3875 - RNA, 16 nt, Homo sapiens
  source 1..16: mol_type = genomic RNA
tcctgggtgatcagtg

SEQ ID NO: 3876 - RNA, 16 nt, Homo sapiens
  source 1..16: mol_type = genomic RNA
tgggtgatcagtgcaa

SEQ ID NO: 3877 - RNA, 16 nt, Homo sapiens
  source 1..16: mol_type = genomic RNA
gggtgatcagtgcaaa

SEQ ID NO: 3878 - RNA, 16 nt, Homo sapiens
  source 1..16: mol_type = genomic RNA
ggtgatcagtgcaaag

SEQ ID NO: 3879 - RNA, 16 nt, Homo sapiens
  source 1..16: mol_type = genomic RNA
gtgatcagtgcaaaga

SEQ ID NO: 3880 - RNA, 16 nt, Homo sapiens
  source 1..16: mol_type = genomic RNA
tgatcagtgcaaagat

SEQ ID NO: 3881 - RNA, 16 nt, Homo sapiens
  source 1..16: mol_type = genomic RNA
atgtcacaaagccccc

SEQ ID NO: 3882 - RNA, 16 nt, Homo sapiens
  source 1..16: mol_type = genomic RNA
tgtcacaaagccccct

SEQ ID NO: 3883 - RNA, 16 nt, Homo sapiens
  source 1..16: mol_type = genomic RNA
gtcacaaagccccctg

SEQ ID NO: 3884 - RNA, 16 nt, Homo sapiens
  source 1..16: mol_type = genomic RNA
ccccctgtagacaaat

SEQ ID NO: 3885 - RNA, 16 nt, Homo sapiens
  source 1..16: mol_type = genomic RNA
cccctgtagacaaatc

SEQ ID NO: 3886 - RNA, 16 nt, Homo sapiens
  source 1..16: mol_type = genomic RNA
ccctgtagacaaatcc

SEQ ID NO: 3887 - RNA, 16 nt, Homo sapiens
  source 1..16: mol_type = genomic RNA
cctgtagacaaatccc

SEQ ID NO: 3888 - RNA, 16 nt, Homo sapiens
  source 1..16: mol_type = genomic RNA
tgtagacaaatcccag

SEQ ID NO: 3889 - RNA, 16 nt, Homo sapiens
  source 1..16: mol_type = genomic RNA
gtagacaaatcccaga

SEQ ID NO: 3890 - RNA, 16 nt, Homo sapiens
  source 1..16: mol_type = genomic RNA
tagacaaatcccagaa

SEQ ID NO: 3891 - RNA, 16 nt, Homo sapiens
  source 1..16: mol_type = genomic RNA
agacaaatcccagaaa

SEQ ID NO: 3892 - RNA, 16 nt, Homo sapiens
  source 1..16: mol_type = genomic RNA
gacaaatcccagaaaa

SEQ ID NO: 3893 - RNA, 16 nt, Homo sapiens
  source 1..16: mol_type = genomic RNA
cctgggtgatcagtgg

SEQ ID NO: 3894 - RNA, 16 nt, Homo sapiens
  source 1..16: mol_type = genomic RNA
ctgggtgatcagtgga

SEQ ID NO: 3895 - RNA, 16 nt, Homo sapiens
  source 1..16: mol_type = genomic RNA
tgggtgatcagtggag

SEQ ID NO: 3896 - RNA, 16 nt, Homo sapiens
  source 1..16: mol_type = genomic RNA
gggtgatcagtggaga

SEQ ID NO: 3897 - RNA, 16 nt, Homo sapiens
  source 1..16: mol_type = genomic RNA
ggtgatcagtggagat

SEQ ID NO: 3898 - RNA, 16 nt, Homo sapiens
  source 1..16: mol_type = genomic RNA
gtgatcagtggagata

SEQ ID NO: 3899 - RNA, 16 nt, Homo sapiens
  source 1..16: mol_type = genomic RNA
tgatcagtggagatat

SEQ ID NO: 3900 - RNA, 16 nt, Homo sapiens
  source 1..16: mol_type = genomic RNA
gatcagtggagatatg

SEQ ID NO: 3901 - RNA, 16 nt, Homo sapiens
  source 1..16: mol_type = genomic RNA
tcagtggagatatgtg

SEQ ID NO: 3902 - RNA, 16 nt, Homo sapiens
  source 1..16: mol_type = genomic RNA
cagtggagatatgtgt

SEQ ID NO: 3903 - RNA, 16 nt, Homo sapiens
  source 1..16: mol_type = genomic RNA
agtggagatatgtgtc

SEQ ID NO: 3904 - RNA, 16 nt, Homo sapiens
  source 1..16: mol_type = genomic RNA
tggagatatgtgtcac

SEQ ID NO: 3905 - RNA, 16 nt, Homo sapiens
  source 1..16: mol_type = genomic RNA
ggagatatgtgtcaca

SEQ ID NO: 3906 - RNA, 16 nt, Homo sapiens
  source 1..16: mol_type = genomic RNA
tgtgtcacaattcccc

SEQ ID NO: 3907 - RNA, 16 nt, Homo sapiens
  source 1..16: mol_type = genomic RNA
attcccctttaggcac

SEQ ID NO: 3908 - RNA, 16 nt, Homo sapiens
  source 1..16: mol_type = genomic RNA
ttcccctttaggcaca

SEQ ID NO: 3909 - RNA, 16 nt, Homo sapiens
  source 1..16: mol_type = genomic RNA
tcccctttaggcacag

SEQ ID NO: 3910 - RNA, 16 nt, Homo sapiens
  source 1..16: mol_type = genomic RNA
cccctttaggcacagc

SEQ ID NO: 3911 - RNA, 16 nt, Homo sapiens
  source 1..16: mol_type = genomic RNA
ccctttaggcacagct

SEQ ID NO: 3912 - RNA, 16 nt, Homo sapiens
  source 1..16: mol_type = genomic RNA
cctttaggcacagctt

SEQ ID NO: 3913 - RNA, 16 nt, Homo sapiens
  source 1..16: mol_type = genomic RNA
ttaggcacagcttaga

SEQ ID NO: 3914 - RNA, 16 nt, Homo sapiens
  source 1..16: mol_type = genomic RNA
taggcacagcttagac

SEQ ID NO: 3915 - RNA, 16 nt, Homo sapiens
  source 1..16: mol_type = genomic RNA
aggcacagcttagaca

SEQ ID NO: 3916 - RNA, 16 nt, Homo sapiens
  source 1..16: mol_type = genomic RNA
ggcacagcttagacaa

SEQ ID NO: 3917 - RNA, 16 nt, Homo sapiens
  source 1..16: mol_type = genomic RNA
gcacagcttagacaag

SEQ ID NO: 3918 - RNA, 16 nt, Homo sapiens
  source 1..16: mol_type = genomic RNA
cacagcttagacaagc

SEQ ID NO: 3919 - RNA, 16 nt, Homo sapiens
  source 1..16: mol_type = genomic RNA
acagcttagacaagcg

SEQ ID NO: 3920 - RNA, 16 nt, Homo sapiens
  source 1..16: mol_type = genomic RNA
cagcttagacaagcgt

SEQ ID NO: 3921 - RNA, 16 nt, Homo sapiens
  source 1..16: mol_type = genomic RNA
agcttagacaagcgtt

SEQ ID NO: 3922 - RNA, 16 nt, Homo sapiens
  source 1..16: mol_type = genomic RNA
agacaagcgttacatc

SEQ ID NO: 3923 - RNA, 16 nt, Homo sapiens
  source 1..16: mol_type = genomic RNA
acaagcgttacatcac

SEQ ID NO: 3924 - RNA, 16 nt, Homo sapiens
  source 1..16: mol_type = genomic RNA
agtgatcattgcagag

SEQ ID NO: 3925 - RNA, 16 nt, Homo sapiens
  source 1..16: mol_type = genomic RNA
tatgtcactatgcccc

SEQ ID NO: 3926 - RNA, 16 nt, Homo sapiens
  source 1..16: mol_type = genomic RNA
atgtcactatgccccc

SEQ ID NO: 3927 - RNA, 16 nt, Homo sapiens
  source 1..16: mol_type = genomic RNA
tgtcactatgccccca

SEQ ID NO: 3928 - RNA, 16 nt, Homo sapiens
  source 1..16: mol_type = genomic RNA
gtcactatgcccccat

SEQ ID NO: 3929 - RNA, 16 nt, Homo sapiens
  source 1..16: mol_type = genomic RNA
tcactatgcccccata

SEQ ID NO: 3930 - RNA, 16 nt, Homo sapiens
  source 1..16: mol_type = genomic RNA
cactatgcccccatag

SEQ ID NO: 3931 - RNA, 16 nt, Homo sapiens
  source 1..16: mol_type = genomic RNA
actatgcccccatagg

SEQ ID NO: 3932 - RNA, 16 nt, Homo sapiens
  source 1..16: mol_type = genomic RNA
ctatgcccccataggc

SEQ ID NO: 3933 - RNA, 16 nt, Homo sapiens
  source 1..16: mol_type = genomic RNA
tatgcccccataggca

SEQ ID NO: 3934 - RNA, 16 nt, Homo sapiens
  source 1..16: mol_type = genomic RNA
atgcccccataggcag

SEQ ID NO: 3935 - RNA, 16 nt, Homo sapiens
  source 1..16: mol_type = genomic RNA
tgcccccataggcaga

SEQ ID NO: 3936 - RNA, 16 nt, Homo sapiens
  source 1..16: mol_type = genomic RNA
gcccccataggcagat

SEQ ID NO: 3937 - RNA, 16 nt, Homo sapiens
  source 1..16: mol_type = genomic RNA
cccccataggcagatc

SEQ ID NO: 3938 - RNA, 16 nt, Homo sapiens
  source 1..16: mol_type = genomic RNA
ccccataggcagatcc

SEQ ID NO: 3939 - RNA, 16 nt, Homo sapiens
  source 1..16: mol_type = genomic RNA
cccataggcagatcca

SEQ ID NO: 3940 - RNA, 16 nt, Homo sapiens
  source 1..16: mol_type = genomic RNA
ccataggcagatccaa

SEQ ID NO: 3941 - RNA, 16 nt, Homo sapiens
  source 1..16: mol_type = genomic RNA
cataggcagatccaag

SEQ ID NO: 3942 - RNA, 16 nt, Homo sapiens
  source 1..16: mol_type = genomic RNA
ataggcagatccaaga

SEQ ID NO: 3943 - RNA, 16 nt, Homo sapiens
  source 1..16: mol_type = genomic RNA
taggcagatccaagac

SEQ ID NO: 3944 - RNA, 16 nt, Homo sapiens
  source 1..16: mol_type = genomic RNA
aggcagatccaagaca

SEQ ID NO: 3945 - RNA, 16 nt, Homo sapiens
  source 1..16: mol_type = genomic RNA
ggcagatccaagacaa

SEQ ID NO: 3946 - RNA, 16 nt, Homo sapiens
  source 1..16: mol_type = genomic RNA
gcagatccaagacaag

SEQ ID NO: 3947 - RNA, 16 nt, Homo sapiens
  source 1..16: mol_type = genomic RNA
cagatccaagacaaga

SEQ ID NO: 3948 - RNA, 16 nt, Homo sapiens
  source 1..16: mol_type = genomic RNA
agatccaagacaagag

SEQ ID NO: 3949 - RNA, 16 nt, Homo sapiens
  source 1..16: mol_type = genomic RNA
gatccaagacaagagt

SEQ ID NO: 3950 - RNA, 16 nt, Homo sapiens
  source 1..16: mol_type = genomic RNA
atccaagacaagagtc

SEQ ID NO: 3951 - RNA, 16 nt, Homo sapiens
  source 1..16: mol_type = genomic RNA
tccaagacaagagtcc

SEQ ID NO: 3952 - RNA, 16 nt, Homo sapiens
  source 1..16: mol_type = genomic RNA
ccaagacaagagtcca

SEQ ID NO: 3953 - RNA, 16 nt, Homo sapiens
  source 1..16: mol_type = genomic RNA
caagacaagagtccat

SEQ ID NO: 3954 - RNA, 16 nt, Homo sapiens
  source 1..16: mol_type = genomic RNA
aagacaagagtccatc

SEQ ID NO: 3955 - RNA, 16 nt, Homo sapiens
  source 1..16: mol_type = genomic RNA
agacaagagtccatca

SEQ ID NO: 3956 - RNA, 16 nt, Homo sapiens
  source 1..16: mol_type = genomic RNA
gacaagagtccatcac

SEQ ID NO: 3957 - RNA, 16 nt, Homo sapiens
  source 1..16: mol_type = genomic RNA
acaagagtccatcacc

SEQ ID NO: 3958 - RNA, 16 nt, Homo sapiens
  source 1..16: mol_type = genomic RNA
caagagtccatcacct

SEQ ID NO: 3959 - RNA, 16 nt, Homo sapiens
  source 1..16: mol_type = genomic RNA
aagagtccatcacctg

SEQ ID NO: 3960 - RNA, 16 nt, Homo sapiens
  source 1..16: mol_type = genomic RNA
agagtccatcacctgg

SEQ ID NO: 3961 - RNA, 16 nt, Homo sapiens
  source 1..16: mol_type = genomic RNA
gagtccatcacctggg

SEQ ID NO: 3962 - RNA, 16 nt, Homo sapiens
  source 1..16: mol_type = genomic RNA
agtccatcacctgggt

SEQ ID NO: 3963 - RNA, 16 nt, Homo sapiens
  source 1..16: mol_type = genomic RNA
ggtgatcagtgcagaa

SEQ ID NO: 3964 - RNA, 16 nt, Homo sapiens
  source 1..16: mol_type = genomic RNA
gtgatcagtgcagaaa

SEQ ID NO: 3965 - RNA, 16 nt, Homo sapiens
  source 1..16: mol_type = genomic RNA
tgatcagtgcagaaat

SEQ ID NO: 3966 - RNA, 16 nt, Homo sapiens
  source 1..16: mol_type = genomic RNA
cagtgcagaaatatgc

SEQ ID NO: 3967 - RNA, 16 nt, Homo sapiens
  source 1..16: mol_type = genomic RNA
agtgcagaaatatgcc

SEQ ID NO: 3968 - RNA, 16 nt, Homo sapiens
  source 1..16: mol_type = genomic RNA
gtgcagaaatatgcca

SEQ ID NO: 3969 - RNA, 16 nt, Homo sapiens
  source 1..16: mol_type = genomic RNA
tgcagaaatatgccac

SEQ ID NO: 3970 - RNA, 16 nt, Homo sapiens
  source 1..16: mol_type = genomic RNA
gcagaaatatgccaca

SEQ ID NO: 3971 - RNA, 16 nt, Homo sapiens
  source 1..16: mol_type = genomic RNA
aaatatgccacaatgc

SEQ ID NO: 3972 - RNA, 16 nt, Homo sapiens
  source 1..16: mol_type = genomic RNA
aatatgccacaatgcc

SEQ ID NO: 3973 - RNA, 16 nt, Homo sapiens
  source 1..16: mol_type = genomic RNA
atatgccacaatgccg

SEQ ID NO: 3974 - RNA, 16 nt, Homo sapiens
  source 1..16: mol_type = genomic RNA
tatgccacaatgccgc

SEQ ID NO: 3975 - RNA, 16 nt, Homo sapiens
  source 1..16: mol_type = genomic RNA
atgccacaatgccgcc

SEQ ID NO: 3976 - RNA, 16 nt, Homo sapiens
  source 1..16: mol_type = genomic RNA
tgccacaatgccgcca

SEQ ID NO: 3977 - RNA, 16 nt, Homo sapiens
  source 1..16: mol_type = genomic RNA
gccacaatgccgccag

SEQ ID NO: 3978 - RNA, 16 nt, Homo sapiens
  source 1..16: mol_type = genomic RNA
ccacaatgccgccagt

SEQ ID NO: 3979 - RNA, 16 nt, Homo sapiens
  source 1..16: mol_type = genomic RNA
cacaatgccgccagta

SEQ ID NO: 3980 - RNA, 16 nt, Homo sapiens
  source 1..16: mol_type = genomic RNA
acaatgccgccagtag

SEQ ID NO: 3981 - RNA, 16 nt, Homo sapiens
  source 1..16: mol_type = genomic RNA
caatgccgccagtagg

SEQ ID NO: 3982 - RNA, 16 nt, Homo sapiens
  source 1..16: mol_type = genomic RNA
aatgccgccagtaggc

SEQ ID NO: 3983 - RNA, 16 nt, Homo sapiens
  source 1..16: mol_type = genomic RNA
atgccgccagtaggca

SEQ ID NO: 3984 - RNA, 16 nt, Homo sapiens
  source 1..16: mol_type = genomic RNA
tgccgccagtaggcag

SEQ ID NO: 3985 - RNA, 16 nt, Homo sapiens
  source 1..16: mol_type = genomic RNA
gccgccagtaggcaga

SEQ ID NO: 3986 - RNA, 16 nt, Homo sapiens
  source 1..16: mol_type = genomic RNA
ccgccagtaggcagat

SEQ ID NO: 3987 - RNA, 16 nt, Homo sapiens
  source 1..16: mol_type = genomic RNA
cgccagtaggcagata

SEQ ID NO: 3988 - RNA, 16 nt, Homo sapiens
  source 1..16: mol_type = genomic RNA
gccagtaggcagatat

SEQ ID NO: 3989 - RNA, 16 nt, Homo sapiens
  source 1..16: mol_type = genomic RNA
ccagtaggcagatata

SEQ ID NO: 3990 - RNA, 16 nt, Homo sapiens
  source 1..16: mol_type = genomic RNA
cagtaggcagatatag

SEQ ID NO: 3991 - RNA, 16 nt, Homo sapiens
  source 1..16: mol_type = genomic RNA
agtaggcagatataga

SEQ ID NO: 3992 - RNA, 16 nt, Homo sapiens
  source 1..16: mol_type = genomic RNA
gtaggcagatatagac

SEQ ID NO: 3993 - RNA, 16 nt, Homo sapiens
  source 1..16: mol_type = genomic RNA
taggcagatatagaca

SEQ ID NO: 3994 - RNA, 16 nt, Homo sapiens
  source 1..16: mol_type = genomic RNA
aggcagatatagacaa

SEQ ID NO: 3995 - RNA, 16 nt, Homo sapiens
  source 1..16: mol_type = genomic RNA
ggcagatatagacaag

SEQ ID NO: 3996 - RNA, 16 nt, Homo sapiens
  source 1..16: mol_type = genomic RNA
gcagatatagacaaga

SEQ ID NO: 3997 - RNA, 16 nt, Homo sapiens
  source 1..16: mol_type = genomic RNA
gagttacatcacctgc

SEQ ID NO: 3998 - RNA, 16 nt, Homo sapiens
  source 1..16: mol_type = genomic RNA
agttacatcacctgcg

SEQ ID NO: 3999 - RNA, 16 nt, Homo sapiens
  source 1..16: mol_type = genomic RNA
gttacatcacctgcgt

SEQ ID NO: 4000 - RNA, 16 nt, Homo sapiens
  source 1..16: mol_type = genomic RNA
ttacatcacctgcgtg

SEQ ID NO: 4001 - RNA, 16 nt, Homo sapiens
  source 1..16: mol_type = genomic RNA
tacatcacctgcgtga

SEQ ID NO: 4002 - RNA, 16 nt, Homo sapiens
  source 1..16: mol_type = genomic RNA
acatcacctgcgtgat

SEQ ID NO: 4003 - RNA, 16 nt, Homo sapiens
  source 1..16: mol_type = genomic RNA
catcacctgcgtgatc

SEQ ID NO: 4004 - RNA, 16 nt, Homo sapiens
  source 1..16: mol_type = genomic RNA
atcacctgcgtgatca

SEQ ID NO: 4005 - RNA, 16 nt, Homo sapiens
  source 1..16: mol_type = genomic RNA
tcacctgcgtgatcac

SEQ ID NO: 4006 - RNA, 16 nt, Homo sapiens
  source 1..16: mol_type = genomic RNA
cacctgcgtgatcact

SEQ ID NO: 4007 - RNA, 16 nt, Homo sapiens
  source 1..16: mol_type = genomic RNA
acctgcgtgatcactg

SEQ ID NO: 4008 - RNA, 16 nt, Homo sapiens
  source 1..16: mol_type = genomic RNA
cctgcgtgatcactgc

SEQ ID NO: 4009 - RNA, 16 nt, Homo sapiens
  source 1..16: mol_type = genomic RNA
ctgcgtgatcactgca

SEQ ID NO: 4010 - RNA, 16 nt, Homo sapiens
  source 1..16: mol_type = genomic RNA
tgcgtgatcactgcag

SEQ ID NO: 4011 - RNA, 16 nt, Homo sapiens
  source 1..16: mol_type = genomic RNA
gcgtgatcactgcaga

SEQ ID NO: 4012 - RNA, 16 nt, Homo sapiens
  source 1..16: mol_type = genomic RNA
cgtgatcactgcagag

SEQ ID NO: 4013 - RNA, 16 nt, Homo sapiens
  source 1..16: mol_type = genomic RNA
gtgatcactgcagaga

SEQ ID NO: 4014 - RNA, 16 nt, Homo sapiens
  source 1..16: mol_type = genomic RNA
tgatcactgcagagat

SEQ ID NO: 4015 - RNA, 16 nt, Homo sapiens
  source 1..16: mol_type = genomic RNA
gatcactgcagagata

SEQ ID NO: 4016 - RNA, 16 nt, Homo sapiens
  source 1..16: mol_type = genomic RNA
atcactgcagagatat

SEQ ID NO: 4017 - RNA, 16 nt, Homo sapiens
  source 1..16: mol_type = genomic RNA
tatatcacaatgcccc

SEQ ID NO: 4018 - RNA, 16 nt, Homo sapiens
  source 1..16: mol_type = genomic RNA
atatcacaatgcccct

SEQ ID NO: 4019 - RNA, 16 nt, Homo sapiens
  source 1..16: mol_type = genomic RNA
tatcacaatgcccctg

SEQ ID NO: 4020 - RNA, 16 nt, Homo sapiens
  source 1..16: mol_type = genomic RNA
atcacaatgcccctgt

SEQ ID NO: 4021 - RNA, 16 nt, Homo sapiens
  source 1..16: mol_type = genomic RNA
agcctagacaagagtc

SEQ ID NO: 4022 - RNA, 16 nt, Homo sapiens
  source 1..16: mol_type = genomic RNA
gcctagacaagagtcc

SEQ ID NO: 4023 - RNA, 16 nt, Homo sapiens
  source 1..16: mol_type = genomic RNA
cctagacaagagtccc

SEQ ID NO: 4024 - RNA, 16 nt, Homo sapiens
  source 1..16: mol_type = genomic RNA
ctagacaagagtccca

SEQ ID NO: 4025 - RNA, 16 nt, Homo sapiens
  source 1..16: mol_type = genomic RNA
tagacaagagtcccat

SEQ ID NO: 4026 - RNA, 16 nt, Homo sapiens
  source 1..16: mol_type = genomic RNA
agacaagagtcccatc

SEQ ID NO: 4027 - RNA, 16 nt, Homo sapiens
  source 1..16: mol_type = genomic RNA
gacaagagtcccatca

SEQ ID NO: 4028 - RNA, 16 nt, Homo sapiens
  source 1..16: mol_type = genomic RNA
acaagagtcccatcac

SEQ ID NO: 4029 - RNA, 16 nt, Homo sapiens
  source 1..16: mol_type = genomic RNA
caagagtcccatcacc

SEQ ID NO: 4030 - RNA, 16 nt, Homo sapiens
  source 1..16: mol_type = genomic RNA
gtgatcagtgcagagt

SEQ ID NO: 4031 - RNA, 16 nt, Homo sapiens
  source 1..16: mol_type = genomic RNA
tgatcagtgcagagtt

SEQ ID NO: 4032 - RNA, 16 nt, Homo sapiens
  source 1..16: mol_type = genomic RNA
tatgtcacaatgcccc

SEQ ID NO: 4033 - RNA, 16 nt, Homo sapiens
  source 1..16: mol_type = genomic RNA
atgtcacaatgccccc

SEQ ID NO: 4034 - RNA, 16 nt, Homo sapiens
  source 1..16: mol_type = genomic RNA
tgtcacaatgccccct

SEQ ID NO: 4035 - RNA, 16 nt, Homo sapiens
  source 1..16: mol_type = genomic RNA
gtcacaatgccccctt

SEQ ID NO: 4036 - RNA, 16 nt, Homo sapiens
  source 1..16: mol_type = genomic RNA
tcacaatgcccccttt

SEQ ID NO: 4037 - RNA, 16 nt, Homo sapiens
  source 1..16: mol_type = genomic RNA
acaatgcccccttttg

SEQ ID NO: 4038 - RNA, 16 nt, Homo sapiens
  source 1..16: mol_type = genomic RNA
caatgcccccttttgg

SEQ ID NO: 4039 - RNA, 16 nt, Homo sapiens
  source 1..16: mol_type = genomic RNA
aatgcccccttttggc

SEQ ID NO: 4040 - RNA, 16 nt, Homo sapiens
  source 1..16: mol_type = genomic RNA
atgcccccttttggca

SEQ ID NO: 4041 - RNA, 16 nt, Homo sapiens
  source 1..16: mol_type = genomic RNA
tgcccccttttggcag

SEQ ID NO: 4042 - RNA, 16 nt, Homo sapiens
  source 1..16: mol_type = genomic RNA
gcccccttttggcaga

SEQ ID NO: 4043 - RNA, 16 nt, Homo sapiens
  source 1..16: mol_type = genomic RNA
cccccttttggcagag

SEQ ID NO: 4044 - RNA, 16 nt, Homo sapiens
  source 1..16: mol_type = genomic RNA
ccccttttggcagagc

SEQ ID NO: 4045 - RNA, 16 nt, Homo sapiens
  source 1..16: mol_type = genomic RNA
cccttttggcagagcc

SEQ ID NO: 4046 - RNA, 16 nt, Homo sapiens
  source 1..16: mol_type = genomic RNA
ccttttggcagagcct

SEQ ID NO: 4047 - RNA, 16 nt, Homo sapiens
  source 1..16: mol_type = genomic RNA
cttttggcagagccta

SEQ ID NO: 4048 - RNA, 16 nt, Homo sapiens
  source 1..16: mol_type = genomic RNA
ttttggcagagcctag

SEQ ID NO: 4049 - RNA, 16 nt, Homo sapiens
  source 1..16: mol_type = genomic RNA
tttggcagagcctaga

SEQ ID NO: 4050 - RNA, 16 nt, Homo sapiens
  source 1..16: mol_type = genomic RNA
ttggcagagcctagac

SEQ ID NO: 4051 - RNA, 16 nt, Homo sapiens
  source 1..16: mol_type = genomic RNA
tggcagagcctagaca

SEQ ID NO: 4052 - RNA, 16 nt, Homo sapiens
  source 1..16: mol_type = genomic RNA
cagagcctagacaagg

SEQ ID NO: 4053 - RNA, 16 nt, Homo sapiens
  source 1..16: mol_type = genomic RNA
agagcctagacaaggg

SEQ ID NO: 4054 - RNA, 16 nt, Homo sapiens
  source 1..16: mol_type = genomic RNA
gagcctagacaagggt

SEQ ID NO: 4055 - RNA, 16 nt, Homo sapiens
  source 1..16: mol_type = genomic RNA
agcctagacaagggtt

SEQ ID NO: 4056 - RNA, 16 nt, Homo sapiens
  source 1..16: mol_type = genomic RNA
gcctagacaagggtta

SEQ ID NO: 4057 - RNA, 16 nt, Homo sapiens
  source 1..16: mol_type = genomic RNA
cctagacaagggttac

SEQ ID NO: 4058 - RNA, 16 nt, Homo sapiens
  source 1..16: mol_type = genomic RNA
ctagacaagggttaca

SEQ ID NO: 4059 - RNA, 16 nt, Homo sapiens
  source 1..16: mol_type = genomic RNA
tagacaagggttacat

SEQ ID NO: 4060 - RNA, 16 nt, Homo sapiens
  source 1..16: mol_type = genomic RNA
agacaagggttacatc

SEQ ID NO: 4061 - RNA, 16 nt, Homo sapiens
  source 1..16: mol_type = genomic RNA
gggttacatcacctgg

SEQ ID NO: 4062 - RNA, 16 nt, Homo sapiens
  source 1..16: mol_type = genomic RNA
ggttacatcacctggg

SEQ ID NO: 4063 - RNA, 16 nt, Homo sapiens
  source 1..16: mol_type = genomic RNA
atgtcacaatgtccct

SEQ ID NO: 4064 - RNA, 16 nt, Homo sapiens
  source 1..16: mol_type = genomic RNA
tgtcacaatgtccctg

SEQ ID NO: 4065 - RNA, 16 nt, Homo sapiens
  source 1..16: mol_type = genomic RNA
gtcacaatgtccctgt

SEQ ID NO: 4066 - RNA, 16 nt, Homo sapiens
  source 1..16: mol_type = genomic RNA
cacaatgtccctgtag

SEQ ID NO: 4067 - RNA, 16 nt, Homo sapiens
  source 1..16: mol_type = genomic RNA
acaatgtccctgtagc

SEQ ID NO: 4068 - RNA, 16 nt, Homo sapiens
  source 1..16: mol_type = genomic RNA
caatgtccctgtagcc

SEQ ID NO: 4069 - RNA, 16 nt, Homo sapiens
  source 1..16: mol_type = genomic RNA
aatgtccctgtagcca

SEQ ID NO: 4070 - RNA, 16 nt, Homo sapiens
  source 1..16: mol_type = genomic RNA
atgtccctgtagccat

SEQ ID NO: 4071 - RNA, 16 nt, Homo sapiens
  source 1..16: mol_type = genomic RNA
tgtccctgtagccata

SEQ ID NO: 4072 - RNA, 16 nt, Homo sapiens
  source 1..16: mol_type = genomic RNA
gtccctgtagccatat

SEQ ID NO: 4073 - RNA, 16 nt, Homo sapiens
  source 1..16: mol_type = genomic RNA
tccctgtagccatatc

SEQ ID NO: 4074 - RNA, 16 nt, Homo sapiens
  source 1..16: mol_type = genomic RNA
ccctgtagccatatcc

SEQ ID NO: 4075 - RNA, 16 nt, Homo sapiens
  source 1..16: mol_type = genomic RNA
cctgtagccatatcct

SEQ ID NO: 4076 - RNA, 16 nt, Homo sapiens
  source 1..16: mol_type = genomic RNA
tagccatatccttgac

SEQ ID NO: 4077 - RNA, 16 nt, Homo sapiens
  source 1..16: mol_type = genomic RNA
agccatatccttgaca

SEQ ID NO: 4078 - RNA, 16 nt, Homo sapiens
  source 1..16: mol_type = genomic RNA
ccttgacaaaagtgac

SEQ ID NO: 4079 - RNA, 16 nt, Homo sapiens
  source 1..16: mol_type = genomic RNA
tgacaaaagtgacatc

SEQ ID NO: 4080 - RNA, 16 nt, Homo sapiens
  source 1..16: mol_type = genomic RNA
acaaaagtgacatcac

SEQ ID NO: 4081 - RNA, 16 nt, Homo sapiens
  source 1..16: mol_type = genomic RNA
caaaagtgacatcacc

SEQ ID NO: 4082 - RNA, 16 nt, Homo sapiens
  source 1..16: mol_type = genomic RNA
aaaagtgacatcacct

SEQ ID NO: 4083 - RNA, 16 nt, Homo sapiens
  source 1..16: mol_type = genomic RNA
aaagtgacatcacctg

SEQ ID NO: 4084 - RNA, 16 nt, Homo sapiens
  source 1..16: mol_type = genomic RNA
aagtgacatcacctgg

SEQ ID NO: 4085 - RNA, 16 nt, Homo sapiens
  source 1..16: mol_type = genomic RNA
agtgacatcacctggg

SEQ ID NO: 4086 - RNA, 16 nt, Homo sapiens
  source 1..16: mol_type = genomic RNA
gtgacatcacctgggt

SEQ ID NO: 4087 - RNA, 16 nt, Homo sapiens
  source 1..16: mol_type = genomic RNA
tgacatcacctgggtg

SEQ ID NO: 4088 - RNA, 16 nt, Homo sapiens
  source 1..16: mol_type = genomic RNA
gacatcacctgggtga

SEQ ID NO: 4089 - RNA, 16 nt, Homo sapiens
  source 1..16: mol_type = genomic RNA
cctgggtgatcagtgt

SEQ ID NO: 4090 - RNA, 16 nt, Homo sapiens
  source 1..16: mol_type = genomic RNA
ctgggtgatcagtgtg

SEQ ID NO: 4091 - RNA, 16 nt, Homo sapiens
  source 1..16: mol_type = genomic RNA
tgggtgatcagtgtgg

SEQ ID NO: 4092 - RNA, 16 nt, Homo sapiens
  source 1..16: mol_type = genomic RNA
gggtgatcagtgtgga

SEQ ID NO: 4093 - RNA, 16 nt, Homo sapiens
  source 1..16: mol_type = genomic RNA
ggtgatcagtgtggag

SEQ ID NO: 4094 - RNA, 16 nt, Homo sapiens
  source 1..16: mol_type = genomic RNA
gtgatcagtgtggaga

SEQ ID NO: 4095 - RNA, 16 nt, Homo sapiens
  source 1..16: mol_type = genomic RNA
tgatcagtgtggagat

SEQ ID NO: 4096 - RNA, 16 nt, Homo sapiens
  source 1..16: mol_type = genomic RNA
gatcagtgtggagata

SEQ ID NO: 4097 - RNA, 16 nt, Homo sapiens
  source 1..16: mol_type = genomic RNA
tcagtgtggagatatg

SEQ ID NO: 4098 - RNA, 16 nt, Homo sapiens
  source 1..16: mol_type = genomic RNA
cagtgtggagatatgt

SEQ ID NO: 4099 - RNA, 16 nt, Homo sapiens
  source 1..16: mol_type = genomic RNA
agtgtggagatatgtc

SEQ ID NO: 4100 - RNA, 16 nt, Homo sapiens
  source 1..16: mol_type = genomic RNA
tgtggagatatgtcac

SEQ ID NO: 4101 - RNA, 16 nt, Homo sapiens
  source 1..16: mol_type = genomic RNA
gtggagatatgtcaca

SEQ ID NO: 4102 - RNA, 16 nt, Homo sapiens
  source 1..16: mol_type = genomic RNA
tggagatatgtcacaa

SEQ ID NO: 4103 - RNA, 16 nt, Homo sapiens
  source 1..16: mol_type = genomic RNA
caatgtctccagtagg

SEQ ID NO: 4104 - RNA, 16 nt, Homo sapiens
  source 1..16: mol_type = genomic RNA
aatgtctccagtaggc

SEQ ID NO: 4105 - RNA, 16 nt, Homo sapiens
  source 1..16: mol_type = genomic RNA
atgtctccagtaggca

SEQ ID NO: 4106 - RNA, 16 nt, Homo sapiens
  source 1..16: mol_type = genomic RNA
tgtctccagtaggcag

SEQ ID NO: 4107 - RNA, 16 nt, Homo sapiens
  source 1..16: mol_type = genomic RNA
gtctccagtaggcaga

SEQ ID NO: 4108 - RNA, 16 nt, Homo sapiens
  source 1..16: mol_type = genomic RNA
tctccagtaggcagag

SEQ ID NO: 4109 - RNA, 16 nt, Homo sapiens
  source 1..16: mol_type = genomic RNA
ctccagtaggcagagc

SEQ ID NO: 4110 - RNA, 16 nt, Homo sapiens
  source 1..16: mol_type = genomic RNA
tccagtaggcagagcc

SEQ ID NO: 4111 - RNA, 16 nt, Homo sapiens
  source 1..16: mol_type = genomic RNA
ccagtaggcagagcct

SEQ ID NO: 4112 - RNA, 16 nt, Homo sapiens
  source 1..16: mol_type = genomic RNA
cagtaggcagagccta

SEQ ID NO: 4113 - RNA, 16 nt, Homo sapiens
  source 1..16: mol_type = genomic RNA
agtaggcagagcctag

SEQ ID NO: 4114 - RNA, 16 nt, Homo sapiens
  source 1..16: mol_type = genomic RNA
cacctgggtgatcagg

SEQ ID NO: 4115 - RNA, 16 nt, Homo sapiens
  source 1..16: mol_type = genomic RNA
acctgggtgatcaggg

SEQ ID NO: 4116 - RNA, 16 nt, Homo sapiens
  source 1..16: mol_type = genomic RNA
cctgggtgatcagggc

SEQ ID NO: 4117 - RNA, 16 nt, Homo sapiens
  source 1..16: mol_type = genomic RNA
ctgggtgatcagggca

SEQ ID NO: 4118 - RNA, 16 nt, Homo sapiens
  source 1..16: mol_type = genomic RNA
tgggtgatcagggcag

SEQ ID NO: 4119 - RNA, 16 nt, Homo sapiens
  source 1..16: mol_type = genomic RNA
gggtgatcagggcaga

SEQ ID NO: 4120 - RNA, 16 nt, Homo sapiens
  source 1..16: mol_type = genomic RNA
ggtgatcagggcagag

SEQ ID NO: 4121 - RNA, 16 nt, Homo sapiens
  source 1..16: mol_type = genomic RNA
gtgatcagggcagaga

SEQ ID NO: 4122 - RNA, 16 nt, Homo sapiens
  source 1..16: mol_type = genomic RNA
tgatcagggcagagat

SEQ ID NO: 4123 - RNA, 16 nt, Homo sapiens
  source 1..16: mol_type = genomic RNA
gatcagggcagagata

SEQ ID NO: 4124 - RNA, 16 nt, Homo sapiens
  source 1..16: mol_type = genomic RNA
atcagggcagagatat

SEQ ID NO: 4125 - RNA, 16 nt, Homo sapiens
  source 1..16: mol_type = genomic RNA
tcagggcagagatatg

SEQ ID NO: 4126 - RNA, 16 nt, Homo sapiens
  source 1..16: mol_type = genomic RNA
cagggcagagatatgt

SEQ ID NO: 4127 - RNA, 16 nt, Homo sapiens
  source 1..16: mol_type = genomic RNA
agggcagagatatgtc

SEQ ID NO: 4128 - RNA, 16 nt, Homo sapiens
  source 1..16: mol_type = genomic RNA
gggcagagatatgtca

SEQ ID NO: 4129 - RNA, 16 nt, Homo sapiens
  source 1..16: mol_type = genomic RNA
ggcagagatatgtcac

SEQ ID NO: 4130 - RNA, 16 nt, Homo sapiens
  source 1..16: mol_type = genomic RNA
gatatgtcacaatgcc

SEQ ID NO: 4131 - RNA, 16 nt, Homo sapiens
  source 1..16: mol_type = genomic RNA
atatgtcacaatgccc

SEQ ID NO: 4132 - RNA, 16 nt, Homo sapiens
  source 1..16: mol_type = genomic RNA
gtcacaatgccccctg

SEQ ID NO: 4133 - RNA, 16 nt, Homo sapiens
  source 1..16: mol_type = genomic RNA
tcacaatgccccctgt

SEQ ID NO: 4134 - RNA, 16 nt, Homo sapiens
  source 1..16: mol_type = genomic RNA
cacaatgccccctgta

SEQ ID NO: 4135 - RNA, 16 nt, Homo sapiens
  source 1..16: mol_type = genomic RNA
acaatgccccctgtaa

SEQ ID NO: 4136 - RNA, 16 nt, Homo sapiens
  source 1..16: mol_type = genomic RNA
caatgccccctgtaag

SEQ ID NO: 4137 - RNA, 16 nt, Homo sapiens
  source 1..16: mol_type = genomic RNA
aatgccccctgtaagc

SEQ ID NO: 4138 - RNA, 16 nt, Homo sapiens
  source 1..16: mol_type = genomic RNA
atgccccctgtaagca

SEQ ID NO: 4139 - RNA, 16 nt, Homo sapiens
  source 1..16: mol_type = genomic RNA
tgccccctgtaagcag

SEQ ID NO: 4140 - RNA, 16 nt, Homo sapiens
  source 1..16: mol_type = genomic RNA
gccccctgtaagcaga

SEQ ID NO: 4141 - RNA, 16 nt, Homo sapiens
  source 1..16: mol_type = genomic RNA
ccccctgtaagcagat

SEQ ID NO: 4142 - RNA, 16 nt, Homo sapiens
  source 1..16: mol_type = genomic RNA
cccctgtaagcagatc

SEQ ID NO: 4143 - RNA, 16 nt, Homo sapiens
  source 1..16: mol_type = genomic RNA
ccctgtaagcagatcc

SEQ ID NO: 4144 - RNA, 16 nt, Homo sapiens
  source 1..16: mol_type = genomic RNA
cctgtaagcagatccc

SEQ ID NO: 4145 - RNA, 16 nt, Homo sapiens
  source 1..16: mol_type = genomic RNA
ctgtaagcagatccca

SEQ ID NO: 4146 - RNA, 16 nt, Homo sapiens
  source 1..16: mol_type = genomic RNA
tgtaagcagatcccag

SEQ ID NO: 4147 - RNA, 16 nt, Homo sapiens
  source 1..16: mol_type = genomic RNA
gtaagcagatcccaga

SEQ ID NO: 4148 - RNA, 16 nt, Homo sapiens
  source 1..16: mol_type = genomic RNA
taagcagatcccagac

SEQ ID NO: 4149 - RNA, 16 nt, Homo sapiens
  source 1..16: mol_type = genomic RNA
aagcagatcccagaca

SEQ ID NO: 4150 - RNA, 16 nt, Homo sapiens
  source 1..16: mol_type = genomic RNA
agcagatcccagacaa

SEQ ID NO: 4151 - RNA, 16 nt, Homo sapiens
  source 1..16: mol_type = genomic RNA
gcagatcccagacaag

SEQ ID NO: 4152 - RNA, 16 nt, Homo sapiens
  source 1..16: mol_type = genomic RNA
cagatcccagacaaga

SEQ ID NO: 4153 - RNA, 16 nt, Homo sapiens
  source 1..16: mol_type = genomic RNA
agatcccagacaagag

SEQ ID NO: 4154 - RNA, 16 nt, Homo sapiens
  source 1..16: mol_type = genomic RNA
gatcccagacaagagt

SEQ ID NO: 4155 - RNA, 16 nt, Homo sapiens
  source 1..16: mol_type = genomic RNA
atcccagacaagagtt

SEQ ID NO: 4156 - RNA, 16 nt, Homo sapiens
  source 1..16: mol_type = genomic RNA
tcccagacaagagttg

SEQ ID NO: 4157 - RNA, 16 nt, Homo sapiens
  source 1..16: mol_type = genomic RNA
cccagacaagagttgc

SEQ ID NO: 4158 - RNA, 16 nt, Homo sapiens
  source 1..16: mol_type = genomic RNA
ccagacaagagttgca

SEQ ID NO: 4159 - RNA, 16 nt, Homo sapiens
  source 1..16: mol_type = genomic RNA
cagacaagagttgcat

SEQ ID NO: 4160 - RNA, 16 nt, Homo sapiens
  source 1..16: mol_type = genomic RNA
agacaagagttgcatc

SEQ ID NO: 4161 - RNA, 16 nt, Homo sapiens
  source 1..16: mol_type = genomic RNA
gacaagagttgcatca

SEQ ID NO: 4162 - RNA, 16 nt, Homo sapiens
  source 1..16: mol_type = genomic RNA
acaagagttgcatcac

SEQ ID NO: 4163 - RNA, 16 nt, Homo sapiens
  source 1..16: mol_type = genomic RNA
caagagttgcatcacc

SEQ ID NO: 4164 - RNA, 16 nt, Homo sapiens
  source 1..16: mol_type = genomic RNA
aagagttgcatcacct

SEQ ID NO: 4165 - RNA, 16 nt, Homo sapiens
  source 1..16: mol_type = genomic RNA
agagttgcatcacctc

SEQ ID NO: 4166 - RNA, 16 nt, Homo sapiens
  source 1..16: mol_type = genomic RNA
gagttgcatcacctcg

SEQ ID NO: 4167 - RNA, 16 nt, Homo sapiens
  source 1..16: mol_type = genomic RNA
agttgcatcacctcgg

SEQ ID NO: 4168 - RNA, 16 nt, Homo sapiens
  source 1..16: mol_type = genomic RNA
gttgcatcacctcggt

SEQ ID NO: 4169 - RNA, 16 nt, Homo sapiens
  source 1..16: mol_type = genomic RNA
ttgcatcacctcggtg

SEQ ID NO: 4170 - RNA, 16 nt, Homo sapiens
  source 1..16: mol_type = genomic RNA
tgcatcacctcggtga

SEQ ID NO: 4171 - RNA, 16 nt, Homo sapiens
  source 1..16: mol_type = genomic RNA
gcatcacctcggtgat

SEQ ID NO: 4172 - RNA, 16 nt, Homo sapiens
  source 1..16: mol_type = genomic RNA
catcacctcggtgatc

SEQ ID NO: 4173 - RNA, 16 nt, Homo sapiens
  source 1..16: mol_type = genomic RNA
atcacctcggtgatca

SEQ ID NO: 4174 - RNA, 16 nt, Homo sapiens
  source 1..16: mol_type = genomic RNA
tcacctcggtgatcag

SEQ ID NO: 4175 - RNA, 16 nt, Homo sapiens
  source 1..16: mol_type = genomic RNA
cacctcggtgatcagt

SEQ ID NO: 4176 - RNA, 16 nt, Homo sapiens
  source 1..16: mol_type = genomic RNA
acctcggtgatcagtg

SEQ ID NO: 4177 - RNA, 16 nt, Homo sapiens
  source 1..16: mol_type = genomic RNA
cctcggtgatcagtgc

SEQ ID NO: 4178 - RNA, 16 nt, Homo sapiens
  source 1..16: mol_type = genomic RNA
ctcggtgatcagtgca

SEQ ID NO: 4179 - RNA, 16 nt, Homo sapiens
  source 1..16: mol_type = genomic RNA
agtgcagagatacgtc

SEQ ID NO: 4180 - RNA, 16 nt, Homo sapiens
  source 1..16: mol_type = genomic RNA
gtgcagagatacgtca

SEQ ID NO: 4181 - RNA, 16 nt, Homo sapiens
  source 1..16: mol_type = genomic RNA
agatacgtcacaatgc

SEQ ID NO: 4182 - RNA, 16 nt, Homo sapiens
  source 1..16: mol_type = genomic RNA
gatacgtcacaatgcc

SEQ ID NO: 4183 - RNA, 16 nt, Homo sapiens
  source 1..16: mol_type = genomic RNA
atacgtcacaatgccc

SEQ ID NO: 4184 - RNA, 16 nt, Homo sapiens
  source 1..16: mol_type = genomic RNA
tacgtcacaatgcccc

SEQ ID NO: 4185 - RNA, 16 nt, Homo sapiens
  source 1..16: mol_type = genomic RNA
acgtcacaatgcccct

SEQ ID NO: 4186 - RNA, 16 nt, Homo sapiens
  source 1..16: mol_type = genomic RNA
cgtcacaatgcccctg

SEQ ID NO: 4187 - RNA, 16 nt, Homo sapiens
  source 1..16: mol_type = genomic RNA
agttacataacccagg

SEQ ID NO: 4188 - RNA, 16 nt, Homo sapiens
  source 1..16: mol_type = genomic RNA
gttacataacccaggt

SEQ ID NO: 4189 - RNA, 16 nt, Homo sapiens
  source 1..16: mol_type = genomic RNA
ttacataacccaggtg

SEQ ID NO: 4190 - RNA, 16 nt, Homo sapiens
  source 1..16: mol_type = genomic RNA
tacataacccaggtga

SEQ ID NO: 4191 - RNA, 16 nt, Homo sapiens
  source 1..16: mol_type = genomic RNA
acataacccaggtgat

SEQ ID NO: 4192 - RNA, 16 nt, Homo sapiens
  source 1..16: mol_type = genomic RNA
cataacccaggtgatc

SEQ ID NO: 4193 - RNA, 16 nt, Homo sapiens
  source 1..16: mol_type = genomic RNA
ataacccaggtgatcc

SEQ ID NO: 4194 - RNA, 16 nt, Homo sapiens
  source 1..16: mol_type = genomic RNA
taacccaggtgatccg

SEQ ID NO: 4195 - RNA, 16 nt, Homo sapiens
  source 1..16: mol_type = genomic RNA
aacccaggtgatccgt

SEQ ID NO: 4196 - RNA, 16 nt, Homo sapiens
  source 1..16: mol_type = genomic RNA
acccaggtgatccgta

SEQ ID NO: 4197 - RNA, 16 nt, Homo sapiens
  source 1..16: mol_type = genomic RNA
cccaggtgatccgtac

SEQ ID NO: 4198 - RNA, 16 nt, Homo sapiens
  source 1..16: mol_type = genomic RNA
ccaggtgatccgtaca

SEQ ID NO: 4199 - RNA, 16 nt, Homo sapiens
  source 1..16: mol_type = genomic RNA
caggtgatccgtacag

SEQ ID NO: 4200 - RNA, 16 nt, Homo sapiens
  source 1..16: mol_type = genomic RNA
aggtgatccgtacaga

SEQ ID NO: 4201 - RNA, 16 nt, Homo sapiens
  source 1..16: mol_type = genomic RNA
ggtgatccgtacagag

SEQ ID NO: 4202 - RNA, 16 nt, Homo sapiens
  source 1..16: mol_type = genomic RNA
gtgatccgtacagagt

SEQ ID NO: 4203 - RNA, 16 nt, Homo sapiens
  source 1..16: mol_type = genomic RNA
tgatccgtacagagtg

SEQ ID NO: 4204 - RNA, 16 nt, Homo sapiens
  source 1..16: mol_type = genomic RNA
gatccgtacagagtga

SEQ ID NO: 4205 - RNA, 16 nt, Homo sapiens
  source 1..16: mol_type = genomic RNA
atccgtacagagtgat

SEQ ID NO: 4206 - RNA, 16 nt, Homo sapiens
  source 1..16: mol_type = genomic RNA
tccgtacagagtgatg

SEQ ID NO: 4207 - RNA, 16 nt, Homo sapiens
  source 1..16: mol_type = genomic RNA
ccgtacagagtgatgt

SEQ ID NO: 4208 - RNA, 16 nt, Homo sapiens
  source 1..16: mol_type = genomic RNA
cgtacagagtgatgtc

SEQ ID NO: 4209 - RNA, 16 nt, Homo sapiens
  source 1..16: mol_type = genomic RNA
tacagagtgatgtcac

SEQ ID NO: 4210 - RNA, 16 nt, Homo sapiens
  source 1..16: mol_type = genomic RNA
acagagtgatgtcaca

SEQ ID NO: 4211 - RNA, 16 nt, Homo sapiens
  source 1..16: mol_type = genomic RNA
agagtgatgtcacaac

SEQ ID NO: 4212 - RNA, 16 nt, Homo sapiens
  source 1..16: mol_type = genomic RNA
gagtgatgtcacaacg

SEQ ID NO: 4213 - RNA, 16 nt, Homo sapiens
  source 1..16: mol_type = genomic RNA
agtgatgtcacaacgc

SEQ ID NO: 4214 - RNA, 16 nt, Homo sapiens
  source 1..16: mol_type = genomic RNA
gtgatgtcacaacgcc

SEQ ID NO: 4215 - RNA, 16 nt, Homo sapiens
  source 1..16: mol_type = genomic RNA
tgatgtcacaacgccc

SEQ ID NO: 4216 - RNA, 16 nt, Homo sapiens
  source 1..16: mol_type = genomic RNA
gatgtcacaacgccct

SEQ ID NO: 4217 - RNA, 16 nt, Homo sapiens
  source 1..16: mol_type = genomic RNA
atgtcacaacgccctc

SEQ ID NO: 4218 - RNA, 16 nt, Homo sapiens
  source 1..16: mol_type = genomic RNA
tgtcacaacgccctct

SEQ ID NO: 4219 - RNA, 16 nt, Homo sapiens
  source 1..16: mol_type = genomic RNA
gtcacaacgccctctg

SEQ ID NO: 4220 - RNA, 16 nt, Homo sapiens
  source 1..16: mol_type = genomic RNA
tcacaacgccctctgt

SEQ ID NO: 4221 - RNA, 16 nt, Homo sapiens
  source 1..16: mol_type = genomic RNA
cacaacgccctctgta

SEQ ID NO: 4222 - RNA, 16 nt, Homo sapiens
  source 1..16: mol_type = genomic RNA
acaacgccctctgtag

SEQ ID NO: 4223 - RNA, 16 nt, Homo sapiens
  source 1..16: mol_type = genomic RNA
caacgccctctgtagg

SEQ ID NO: 4224 - RNA, 16 nt, Homo sapiens
  source 1..16: mol_type = genomic RNA
aacgccctctgtaggc

SEQ ID NO: 4225 - RNA, 16 nt, Homo sapiens
  source 1..16: mol_type = genomic RNA
acgccctctgtaggca

SEQ ID NO: 4226 - RNA, 16 nt, Homo sapiens
  source 1..16: mol_type = genomic RNA
cgccctctgtaggcag

SEQ ID NO: 4227 - RNA, 16 nt, Homo sapiens
  source 1..16: mol_type = genomic RNA
gccctctgtaggcaga

SEQ ID NO: 4228 - RNA, 16 nt, Homo sapiens
  source 1..16: mol_type = genomic RNA
ccctctgtaggcagag

SEQ ID NO: 4229 - RNA, 16 nt, Homo sapiens
  source 1..16: mol_type = genomic RNA
cctctgtaggcagaga

SEQ ID NO: 4230 - RNA, 16 nt, Homo sapiens
  source 1..16: mol_type = genomic RNA
ctctgtaggcagagac

SEQ ID NO: 4231 - RNA, 16 nt, Homo sapiens
  source 1..16: mol_type = genomic RNA
tctgtaggcagagact

SEQ ID NO: 4232 - RNA, 16 nt, Homo sapiens
  source 1..16: mol_type = genomic RNA
ctgtaggcagagacta

SEQ ID NO: 4233 - RNA, 16 nt, Homo sapiens
  source 1..16: mol_type = genomic RNA
tgtaggcagagactag

SEQ ID NO: 4234 - RNA, 16 nt, Homo sapiens
  source 1..16: mol_type = genomic RNA
gtaggcagagactaga

SEQ ID NO: 4235 - RNA, 16 nt, Homo sapiens
  source 1..16: mol_type = genomic RNA
taggcagagactagaa

SEQ ID NO: 4236 - RNA, 16 nt, Homo sapiens
  source 1..16: mol_type = genomic RNA
aggcagagactagaaa

SEQ ID NO: 4237 - RNA, 16 nt, Homo sapiens
  source 1..16: mol_type = genomic RNA
ggcagagactagaaaa

SEQ ID NO: 4238 - RNA, 16 nt, Homo sapiens
  source 1..16: mol_type = genomic RNA
gcagagactagaaaag

SEQ ID NO: 4239 - RNA, 16 nt, Homo sapiens
  source 1..16: mol_type = genomic RNA
cagagactagaaaaga

SEQ ID NO: 4240 - RNA, 16 nt, Homo sapiens
  source 1..16: mol_type = genomic RNA
agagactagaaaagag

SEQ ID NO: 4241 - RNA, 16 nt, Homo sapiens
  source 1..16: mol_type = genomic RNA
gagactagaaaagagt

SEQ ID NO: 4242 - RNA, 16 nt, Homo sapiens
  source 1..16: mol_type = genomic RNA
agttacattacctggg

SEQ ID NO: 4243 - RNA, 16 nt, Homo sapiens
  source 1..16: mol_type = genomic RNA
ttacattacctgggtg

SEQ ID NO: 4244 - RNA, 16 nt, Homo sapiens
  source 1..16: mol_type = genomic RNA
tacattacctgggtga

SEQ ID NO: 4245 - RNA, 16 nt, Homo sapiens
  source 1..16: mol_type = genomic RNA
acattacctgggtgat

SEQ ID NO: 4246 - RNA, 16 nt, Homo sapiens
  source 1..16: mol_type = genomic RNA
cattacctgggtgatc

SEQ ID NO: 4247 - RNA, 16 nt, Homo sapiens
  source 1..16: mol_type = genomic RNA
attacctgggtgatca

SEQ ID NO: 4248 - RNA, 16 nt, Homo sapiens
  source 1..16: mol_type = genomic RNA
ttacctgggtgatcag

SEQ ID NO: 4249 - RNA, 16 nt, Homo sapiens
  source 1..16: mol_type = genomic RNA
tacctgggtgatcagt

SEQ ID NO: 4250 - RNA, 16 nt, Homo sapiens
  source 1..16: mol_type = genomic RNA
acaatgccccctgtag

SEQ ID NO: 4251 - RNA, 16 nt, Homo sapiens
  source 1..16: mol_type = genomic RNA
caatgccccctgtagg

SEQ ID NO: 4252 - RNA, 16 nt, Homo sapiens
  source 1..16: mol_type = genomic RNA
aatgccccctgtaggc

SEQ ID NO: 4253 - RNA, 16 nt, Homo sapiens
  source 1..16: mol_type = genomic RNA
atgccccctgtaggca

SEQ ID NO: 4254 - RNA, 16 nt, Homo sapiens
  source 1..16: mol_type = genomic RNA
tgccccctgtaggcag

SEQ ID NO: 4255 - RNA, 16 nt, Homo sapiens
  source 1..16: mol_type = genomic RNA
gccccctgtaggcaga

SEQ ID NO: 4256 - RNA, 16 nt, Homo sapiens
  source 1..16: mol_type = genomic RNA
ccccctgtaggcagag

SEQ ID NO: 4257 - RNA, 16 nt, Homo sapiens
  source 1..16: mol_type = genomic RNA
ccctgtaggcagagca

SEQ ID NO: 4258 - RNA, 16 nt, Homo sapiens
  source 1..16: mol_type = genomic RNA
cctgtaggcagagcat

SEQ ID NO: 4259 - RNA, 16 nt, Homo sapiens
  source 1..16: mol_type = genomic RNA
ctgtaggcagagcata

SEQ ID NO: 4260 - RNA, 16 nt, Homo sapiens
  source 1..16: mol_type = genomic RNA
tgtaggcagagcatag

SEQ ID NO: 4261 - RNA, 16 nt, Homo sapiens
  source 1..16: mol_type = genomic RNA
gtaggcagagcataga

SEQ ID NO: 4262 - RNA, 16 nt, Homo sapiens
  source 1..16: mol_type = genomic RNA
taggcagagcatagag

SEQ ID NO: 4263 - RNA, 16 nt, Homo sapiens
  source 1..16: mol_type = genomic RNA
aggcagagcatagaga

SEQ ID NO: 4264 - RNA, 16 nt, Homo sapiens
  source 1..16: mol_type = genomic RNA
ggcagagcatagagaa

SEQ ID NO: 4265 - RNA, 16 nt, Homo sapiens
  source 1..16: mol_type = genomic RNA
gcagagcatagagaag

SEQ ID NO: 4266 - RNA, 16 nt, Homo sapiens
  source 1..16: mol_type = genomic RNA
cagagcatagagaaga

SEQ ID NO: 4267 - RNA, 16 nt, Homo sapiens
  source 1..16: mol_type = genomic RNA
agagcatagagaagag

SEQ ID NO: 4268 - RNA, 16 nt, Homo sapiens
  source 1..16: mol_type = genomic RNA
gagcatagagaagagt

SEQ ID NO: 4269 - RNA, 16 nt, Homo sapiens
  source 1..16: mol_type = genomic RNA
agcatagagaagagtt

SEQ ID NO: 4270 - RNA, 16 nt, Homo sapiens
  source 1..16: mol_type = genomic RNA
gcatagagaagagttg

SEQ ID NO: 4271 - RNA, 16 nt, Homo sapiens
  source 1..16: mol_type = genomic RNA
catagagaagagttgc

SEQ ID NO: 4272 - RNA, 16 nt, Homo sapiens
  source 1..16: mol_type = genomic RNA
atagagaagagttgca

SEQ ID NO: 4273 - RNA, 16 nt, Homo sapiens
  source 1..16: mol_type = genomic RNA
tagagaagagttgcat

SEQ ID NO: 4274 - RNA, 16 nt, Homo sapiens
  source 1..16: mol_type = genomic RNA
agagaagagttgcatc

SEQ ID NO: 4275 - RNA, 16 nt, Homo sapiens
  source 1..16: mol_type = genomic RNA
gagaagagttgcatca

SEQ ID NO: 4276 - RNA, 16 nt, Homo sapiens
  source 1..16: mol_type = genomic RNA
agaagagttgcatcac

SEQ ID NO: 4277 - RNA, 16 nt, Homo sapiens
  source 1..16: mol_type = genomic RNA
gaagagttgcatcacc

SEQ ID NO: 4278 - RNA, 16 nt, Homo sapiens
  source 1..16: mol_type = genomic RNA
agagttgcatcacctg

SEQ ID NO: 4279 - RNA, 16 nt, Homo sapiens
  source 1..16: mol_type = genomic RNA
gagttgcatcacctgg

SEQ ID NO: 4280 - RNA, 16 nt, Homo sapiens
  source 1..16: mol_type = genomic RNA
agttgcatcacctggg

SEQ ID NO: 4281 - RNA, 16 nt, Homo sapiens
  source 1..16: mol_type = genomic RNA
gttgcatcacctgggt

SEQ ID NO: 4282 - RNA, 16 nt, Homo sapiens
  source 1..16: mol_type = genomic RNA
ttgcatcacctgggtg

SEQ ID NO: 4283 - RNA, 16 nt, Homo sapiens
  source 1..16: mol_type = genomic RNA
tgcatcacctgggtga

SEQ ID NO: 4284 - RNA, 16 nt, Homo sapiens
  source 1..16: mol_type = genomic RNA
gcatcacctgggtgat

SEQ ID NO: 4285 - RNA, 16 nt, Homo sapiens
  source 1..16: mol_type = genomic RNA
ctgggtgatcagtgta

SEQ ID NO: 4286 - RNA, 16 nt, Homo sapiens
  source 1..16: mol_type = genomic RNA
tgggtgatcagtgtag

SEQ ID NO: 4287 - RNA, 16 nt, Homo sapiens
  source 1..16: mol_type = genomic RNA
gggtgatcagtgtaga

SEQ ID NO: 4288 - RNA, 16 nt, Homo sapiens
  source 1..16: mol_type = genomic RNA
atgtcacaatgtcccc

SEQ ID NO: 4289 - RNA, 16 nt, Homo sapiens
  source 1..16: mol_type = genomic RNA
ccctgtaggcagatcc

SEQ ID NO: 4290 - RNA, 16 nt, Homo sapiens
  source 1..16: mol_type = genomic RNA
cctgtaggcagatcct

SEQ ID NO: 4291 - RNA, 16 nt, Homo sapiens
  source 1..16: mol_type = genomic RNA
ctgtaggcagatccta

SEQ ID NO: 4292 - RNA, 16 nt, Homo sapiens
  source 1..16: mol_type = genomic RNA
tgtaggcagatcctag

SEQ ID NO: 4293 - RNA, 16 nt, Homo sapiens
  source 1..16: mol_type = genomic RNA
gtaggcagatcctaga

SEQ ID NO: 4294 - RNA, 16 nt, Homo sapiens
  source 1..16: mol_type = genomic RNA
taggcagatcctagac

SEQ ID NO: 4295 - RNA, 16 nt, Homo sapiens
  source 1..16: mol_type = genomic RNA
aggcagatcctagaca

SEQ ID NO: 4296 - RNA, 16 nt, Homo sapiens
  source 1..16: mol_type = genomic RNA
ggcagatcctagacaa

SEQ ID NO: 4297 - RNA, 16 nt, Homo sapiens
  source 1..16: mol_type = genomic RNA
gcagatcctagacaag

SEQ ID NO: 4298 - RNA, 16 nt, Homo sapiens
  source 1..16: mol_type = genomic RNA
cagatcctagacaaga

SEQ ID NO: 4299 - RNA, 16 nt, Homo sapiens
  source 1..16: mol_type = genomic RNA
agatcctagacaagag

SEQ ID NO: 4300 - RNA, 16 nt, Homo sapiens
  source 1..16: mol_type = genomic RNA
gatcctagacaagagt

SEQ ID NO: 4301 - RNA, 16 nt, Homo sapiens
  source 1..16: mol_type = genomic RNA
cttaggtgatcagtgc

SEQ ID NO: 4302 - RNA, 16 nt, Homo sapiens
  source 1..16: mol_type = genomic RNA
ttaggtgatcagtgca

SEQ ID NO: 4303 - RNA, 16 nt, Homo sapiens
  source 1..16: mol_type = genomic RNA
aggtgatcagtgcaga

SEQ ID NO: 4304 - RNA, 16 nt, Homo sapiens
  source 1..16: mol_type = genomic RNA
agtgatcagtgcagag

SEQ ID NO: 4305 - RNA, 16 nt, Homo sapiens
  source 1..16: mol_type = genomic RNA
taggccaaagcctaga

SEQ ID NO: 4306 - RNA, 16 nt, Homo sapiens
  source 1..16: mol_type = genomic RNA
aggccaaagcctagac

SEQ ID NO: 4307 - RNA, 16 nt, Homo sapiens
  source 1..16: mol_type = genomic RNA
ggccaaagcctagaca

SEQ ID NO: 4308 - RNA, 16 nt, Homo sapiens
  source 1..16: mol_type = genomic RNA
gccaaagcctagacaa

SEQ ID NO: 4309 - RNA, 16 nt, Homo sapiens
  source 1..16: mol_type = genomic RNA
ccaaagcctagacaat

SEQ ID NO: 4310 - RNA, 16 nt, Homo sapiens
  source 1..16: mol_type = genomic RNA
aaagcctagacaatag

SEQ ID NO: 4311 - RNA, 16 nt, Homo sapiens
  source 1..16: mol_type = genomic RNA
aagcctagacaatagt

SEQ ID NO: 4312 - RNA, 16 nt, Homo sapiens
  source 1..16: mol_type = genomic RNA
agttacatcacttggg

SEQ ID NO: 4313 - RNA, 16 nt, Homo sapiens
  source 1..16: mol_type = genomic RNA
tacatcacttgggtga

SEQ ID NO: 4314 - RNA, 16 nt, Homo sapiens
  source 1..16: mol_type = genomic RNA
acatcacttgggtgat

SEQ ID NO: 4315 - RNA, 16 nt, Homo sapiens
  source 1..16: mol_type = genomic RNA
catcacttgggtgatc

SEQ ID NO: 4316 - RNA, 16 nt, Homo sapiens
  source 1..16: mol_type = genomic RNA
atcacttgggtgatca

SEQ ID NO: 4317 - RNA, 16 nt, Homo sapiens
  source 1..16: mol_type = genomic RNA
tcacttgggtgatcag

SEQ ID NO: 4318 - RNA, 16 nt, Homo sapiens
  source 1..16: mol_type = genomic RNA
cacttgggtgatcagt

SEQ ID NO: 4319 - RNA, 16 nt, Homo sapiens
  source 1..16: mol_type = genomic RNA
acttgggtgatcagtg

SEQ ID NO: 4320 - RNA, 16 nt, Homo sapiens
  source 1..16: mol_type = genomic RNA
cttgggtgatcagtgg

SEQ ID NO: 4321 - RNA, 16 nt, Homo sapiens
  source 1..16: mol_type = genomic RNA
ttgggtgatcagtggc

SEQ ID NO: 4322 - RNA, 16 nt, Homo sapiens
  source 1..16: mol_type = genomic RNA
tgggtgatcagtggcg

SEQ ID NO: 4323 - RNA, 16 nt, Homo sapiens
  source 1..16: mol_type = genomic RNA
gggtgatcagtggcga

SEQ ID NO: 4324 - RNA, 16 nt, Homo sapiens
  source 1..16: mol_type = genomic RNA
ggtgatcagtggcgag

SEQ ID NO: 4325 - RNA, 16 nt, Homo sapiens
  source 1..16: mol_type = genomic RNA
gtgatcagtggcgaga

SEQ ID NO: 4326 - RNA, 16 nt, Homo sapiens
  source 1..16: mol_type = genomic RNA
tgatcagtggcgagat

SEQ ID NO: 4327 - RNA, 16 nt, Homo sapiens
  source 1..16: mol_type = genomic RNA
gatcagtggcgagatc

SEQ ID NO: 4328 - RNA, 16 nt, Homo sapiens
  source 1..16: mol_type = genomic RNA
atcagtggcgagatct

SEQ ID NO: 4329 - RNA, 16 nt, Homo sapiens
  source 1..16: mol_type = genomic RNA
tcagtggcgagatctc

SEQ ID NO: 4330 - RNA, 16 nt, Homo sapiens
  source 1..16: mol_type = genomic RNA
cagtggcgagatctct

SEQ ID NO: 4331 - RNA, 16 nt, Homo sapiens
  source 1..16: mol_type = genomic RNA
agtggcgagatctctc

SEQ ID NO: 4332 - RNA, 16 nt, Homo sapiens
  source 1..16: mol_type = genomic RNA
gtggcgagatctctca

SEQ ID NO: 4333 - RNA, 16 nt, Homo sapiens
  source 1..16: mol_type = genomic RNA
tggcgagatctctcac

SEQ ID NO: 4334 - RNA, 16 nt, Homo sapiens
  source 1..16: mol_type = genomic RNA
ggcgagatctctcaca

SEQ ID NO: 4335 - RNA, 16 nt, Homo sapiens
  source 1..16: mol_type = genomic RNA
gcgagatctctcacaa

SEQ ID NO: 4336 - RNA, 16 nt, Homo sapiens
  source 1..16: mol_type = genomic RNA
tctctcacaattcccc

SEQ ID NO: 4337 - RNA, 16 nt, Homo sapiens
  source 1..16: mol_type = genomic RNA
tctcacaattcccctg

SEQ ID NO: 4338 - RNA, 16 nt, Homo sapiens
  source 1..16: mol_type = genomic RNA
acaattcccctgtagg

SEQ ID NO: 4339 - RNA, 16 nt, Homo sapiens
  source 1..16: mol_type = genomic RNA
caattcccctgtaggc

SEQ ID NO: 4340 - RNA, 16 nt, Homo sapiens
  source 1..16: mol_type = genomic RNA
aattcccctgtaggca

SEQ ID NO: 4341 - RNA, 16 nt, Homo sapiens
  source 1..16: mol_type = genomic RNA
attcccctgtaggcag

SEQ ID NO: 4342 - RNA, 16 nt, Homo sapiens
  source 1..16: mol_type = genomic RNA
ttcccctgtaggcaga

SEQ ID NO: 4343 - RNA, 16 nt, Homo sapiens
  source 1..16: mol_type = genomic RNA
tgtaggcagagcttat

SEQ ID NO: 4344 - RNA, 16 nt, Homo sapiens
  source 1..16: mol_type = genomic RNA
gtaggcagagcttata

SEQ ID NO: 4345 - RNA, 16 nt, Homo sapiens
  source 1..16: mol_type = genomic RNA
taggcagagcttatac

SEQ ID NO: 4346 - RNA, 16 nt, Homo sapiens
  source 1..16: mol_type = genomic RNA
aggcagagcttataca

SEQ ID NO: 4347 - RNA, 16 nt, Homo sapiens
  source 1..16: mol_type = genomic RNA
ggcagagcttatacaa

SEQ ID NO: 4348 - RNA, 16 nt, Homo sapiens
  source 1..16: mol_type = genomic RNA
gcagagcttatacaac

SEQ ID NO: 4349 - RNA, 16 nt, Homo sapiens
  source 1..16: mol_type = genomic RNA
tgtcacaatgccccca

SEQ ID NO: 4350 - RNA, 16 nt, Homo sapiens
  source 1..16: mol_type = genomic RNA
gtcacaatgcccccat

SEQ ID NO: 4351 - RNA, 16 nt, Homo sapiens
  source 1..16: mol_type = genomic RNA
tcacaatgcccccata

SEQ ID NO: 4352 - RNA, 16 nt, Homo sapiens
  source 1..16: mol_type = genomic RNA
acaatgcccccatagg

SEQ ID NO: 4353 - RNA, 16 nt, Homo sapiens
  source 1..16: mol_type = genomic RNA
caatgcccccataggc

SEQ ID NO: 4354 - RNA, 16 nt, Homo sapiens
  source 1..16: mol_type = genomic RNA
aatgcccccataggca

SEQ ID NO: 4355 - RNA, 16 nt, Homo sapiens
  source 1..16: mol_type = genomic RNA
atcagtgcagaaatac

SEQ ID NO: 4356 - RNA, 16 nt, Homo sapiens
  source 1..16: mol_type = genomic RNA
tcagtgcagaaatacg

SEQ ID NO: 4357 - RNA, 16 nt, Homo sapiens
  source 1..16: mol_type = genomic RNA
cagtgcagaaatacgt

SEQ ID NO: 4358 - RNA, 16 nt, Homo sapiens
  source 1..16: mol_type = genomic RNA
agtgcagaaatacgtc

SEQ ID NO: 4359 - RNA, 16 nt, Homo sapiens
  source 1..16: mol_type = genomic RNA
gtgcagaaatacgtca

SEQ ID NO: 4360 - RNA, 16 nt, Homo sapiens
  source 1..16: mol_type = genomic RNA
tgcagaaatacgtcac

SEQ ID NO: 4361 - RNA, 16 nt, Homo sapiens
  source 1..16: mol_type = genomic RNA
gcagaaatacgtcaca

SEQ ID NO: 4362 - RNA, 16 nt, Homo sapiens
  source 1..16: mol_type = genomic RNA
aatacgtcacaatgcc

SEQ ID NO: 4363 - RNA, 16 nt, Homo sapiens
  source 1..16: mol_type = genomic RNA
acgtcacaatgccccc

SEQ ID NO: 4364 - RNA, 16 nt, Homo sapiens
  source 1..16: mol_type = genomic RNA
cgtcacaatgccccct

SEQ ID NO: 4365 - RNA, 16 nt, Homo sapiens
  source 1..16: mol_type = genomic RNA
tcacaatgccccctta

SEQ ID NO: 4366 - RNA, 16 nt, Homo sapiens
  source 1..16: mol_type = genomic RNA
cacaatgcccccttag

SEQ ID NO: 4367 - RNA, 16 nt, Homo sapiens
  source 1..16: mol_type = genomic RNA
acaatgcccccttagg

SEQ ID NO: 4368 - RNA, 16 nt, Homo sapiens
  source 1..16: mol_type = genomic RNA
caatgcccccttaggc

SEQ ID NO: 4369 - RNA, 16 nt, Homo sapiens
  source 1..16: mol_type = genomic RNA
aatgcccccttaggca

SEQ ID NO: 4370 - RNA, 16 nt, Homo sapiens
  source 1..16: mol_type = genomic RNA
atgcccccttaggcag

SEQ ID NO: 4371 - RNA, 16 nt, Homo sapiens
  source 1..16: mol_type = genomic RNA
tgcccccttaggcaga

SEQ ID NO: 4372 - RNA, 16 nt, Homo sapiens
  source 1..16: mol_type = genomic RNA
gcccccttaggcagag

SEQ ID NO: 4373 - RNA, 16 nt, Homo sapiens
  source 1..16: mol_type = genomic RNA
cccccttaggcagagc

SEQ ID NO: 4374 - RNA, 16 nt, Homo sapiens
  source 1..16: mol_type = genomic RNA
ccccttaggcagagcc

SEQ ID NO: 4375 - RNA, 16 nt, Homo sapiens
  source 1..16: mol_type = genomic RNA
cccttaggcagagcct

SEQ ID NO: 4376 - RNA, 16 nt, Homo sapiens
  source 1..16: mol_type = genomic RNA
ccttaggcagagccta

SEQ ID NO: 4377 - RNA, 16 nt, Homo sapiens
  source 1..16: mol_type = genomic RNA
cttaggcagagcctag

SEQ ID NO: 4378 - RNA, 16 nt, Homo sapiens
  source 1..16: mol_type = genomic RNA
ttaggcagagcctaga

SEQ ID NO: 4379 - RNA, 16 nt, Homo sapiens
  source 1..16: mol_type = genomic RNA
gcagagcctagacaaa

SEQ ID NO: 4380 - RNA, 16 nt, Homo sapiens
  source 1..16: mol_type = genomic RNA
cagagcctagacaaaa

SEQ ID NO: 4381 - RNA, 16 nt, Homo sapiens
  source 1..16: mol_type = genomic RNA
agagcctagacaaaag

SEQ ID NO: 4382 - RNA, 16 nt, Homo sapiens
  source 1..16: mol_type = genomic RNA
gagcctagacaaaagc

SEQ ID NO: 4383 - RNA, 16 nt, Homo sapiens
  source 1..16: mol_type = genomic RNA
agcctagacaaaagcc

SEQ ID NO: 4384 - RNA, 16 nt, Homo sapiens
  source 1..16: mol_type = genomic RNA
gcctagacaaaagccc

SEQ ID NO: 4385 - RNA, 16 nt, Homo sapiens
  source 1..16: mol_type = genomic RNA
cctagacaaaagcccc

SEQ ID NO: 4386 - RNA, 16 nt, Homo sapiens
  source 1..16: mol_type = genomic RNA
ctagacaaaagcccca

SEQ ID NO: 4387 - RNA, 16 nt, Homo sapiens
  source 1..16: mol_type = genomic RNA
tagacaaaagccccat

SEQ ID NO: 4388 - RNA, 16 nt, Homo sapiens
  source 1..16: mol_type = genomic RNA
agacaaaagccccatc

SEQ ID NO: 4389 - RNA, 16 nt, Homo sapiens
  source 1..16: mol_type = genomic RNA
gacaaaagccccatca

SEQ ID NO: 4390 - RNA, 16 nt, Homo sapiens
  source 1..16: mol_type = genomic RNA
acaaaagccccatcac

SEQ ID NO: 4391 - RNA, 16 nt, Homo sapiens
  source 1..16: mol_type = genomic RNA
caaaagccccatcacc

SEQ ID NO: 4392 - RNA, 16 nt, Homo sapiens
  source 1..16: mol_type = genomic RNA
aaaagccccatcacct

SEQ ID NO: 4393 - RNA, 16 nt, Homo sapiens
  source 1..16: mol_type = genomic RNA
aaagccccatcacctg

SEQ ID NO: 4394 - RNA, 16 nt, Homo sapiens
  source 1..16: mol_type = genomic RNA
aagccccatcacctgg

SEQ ID NO: 4395 - RNA, 16 nt, Homo sapiens
  source 1..16: mol_type = genomic RNA
agccccatcacctgga

SEQ ID NO: 4396 - RNA, 16 nt, Homo sapiens
  source 1..16: mol_type = genomic RNA
gccccatcacctggat

SEQ ID NO: 4397 - RNA, 16 nt, Homo sapiens
  source 1..16: mol_type = genomic RNA
ccccatcacctggatg

SEQ ID NO: 4398 - RNA, 16 nt, Homo sapiens
  source 1..16: mol_type = genomic RNA
cccatcacctggatga

SEQ ID NO: 4399 - RNA, 16 nt, Homo sapiens
  source 1..16: mol_type = genomic RNA
ccatcacctggatgat

SEQ ID NO: 4400 - RNA, 16 nt, Homo sapiens
  source 1..16: mol_type = genomic RNA
tcacctggatgattag

SEQ ID NO: 4401 - RNA, 16 nt, Homo sapiens
  source 1..16: mol_type = genomic RNA
cacctggatgattagt

SEQ ID NO: 4402 - RNA, 16 nt, Homo sapiens
  source 1..16: mol_type = genomic RNA
acctggatgattagtg

SEQ ID NO: 4403 - RNA, 16 nt, Homo sapiens
  source 1..16: mol_type = genomic RNA
cctggatgattagtgc

SEQ ID NO: 4404 - RNA, 16 nt, Homo sapiens
  source 1..16: mol_type = genomic RNA
tggatgattagtgcag

SEQ ID NO: 4405 - RNA, 16 nt, Homo sapiens
  source 1..16: mol_type = genomic RNA
ggatgattagtgcaga

SEQ ID NO: 4406 - RNA, 16 nt, Homo sapiens
  source 1..16: mol_type = genomic RNA
tatgtcacaatgccac

SEQ ID NO: 4407 - RNA, 16 nt, Homo sapiens
  source 1..16: mol_type = genomic RNA
atgtcacaatgccact

SEQ ID NO: 4408 - RNA, 16 nt, Homo sapiens
  source 1..16: mol_type = genomic RNA
tgtcacaatgccactg

SEQ ID NO: 4409 - RNA, 16 nt, Homo sapiens
  source 1..16: mol_type = genomic RNA
gtcacaatgccactgt

SEQ ID NO: 4410 - RNA, 16 nt, Homo sapiens
  source 1..16: mol_type = genomic RNA
tcacaatgccactgta

SEQ ID NO: 4411 - RNA, 16 nt, Homo sapiens
  source 1..16: mol_type = genomic RNA
cacaatgccactgtag

SEQ ID NO: 4412 - RNA, 16 nt, Homo sapiens
  source 1..16: mol_type = genomic RNA
acaatgccactgtagg

SEQ ID NO: 4413 - RNA, 16 nt, Homo sapiens
  source 1..16: mol_type = genomic RNA
caatgccactgtaggc

SEQ ID NO: 4414 - RNA, 16 nt, Homo sapiens
  source 1..16: mol_type = genomic RNA
aatgccactgtaggca

SEQ ID NO: 4415 - RNA, 16 nt, Homo sapiens
  source 1..16: mol_type = genomic RNA
atgccactgtaggcag

SEQ ID NO: 4416 - RNA, 16 nt, Homo sapiens
  source 1..16: mol_type = genomic RNA
tgccactgtaggcaga

SEQ ID NO: 4417 - RNA, 16 nt, Homo sapiens
  source 1..16: mol_type = genomic RNA
gccactgtaggcagag

SEQ ID NO: 4418 - RNA, 16 nt, Homo sapiens
  source 1..16: mol_type = genomic RNA
ccactgtaggcagagc

SEQ ID NO: 4419 - RNA, 16 nt, Homo sapiens
  source 1..16: mol_type = genomic RNA
cactgtaggcagagcc

SEQ ID NO: 4420 - RNA, 16 nt, Homo sapiens
  source 1..16: mol_type = genomic RNA
actgtaggcagagcct

SEQ ID NO: 4421 - RNA, 16 nt, Homo sapiens
  source 1..16: mol_type = genomic RNA
tatatgacctaggtga

SEQ ID NO: 4422 - RNA, 16 nt, Homo sapiens
  source 1..16: mol_type = genomic RNA
atatgacctaggtgat

SEQ ID NO: 4423 - RNA, 16 nt, Homo sapiens
  source 1..16: mol_type = genomic RNA
tatgacctaggtgatc

SEQ ID NO: 4424 - RNA, 16 nt, Homo sapiens
  source 1..16: mol_type = genomic RNA
atgacctaggtgatca

SEQ ID NO: 4425 - RNA, 16 nt, Homo sapiens
  source 1..16: mol_type = genomic RNA
tgacctaggtgatcag

SEQ ID NO: 4426 - RNA, 16 nt, Homo sapiens
  source 1..16: mol_type = genomic RNA
gacctaggtgatcagt

SEQ ID NO: 4427 - RNA, 16 nt, Homo sapiens
  source 1..16: mol_type = genomic RNA
tcagtgcagagataca

SEQ ID NO: 4428 - RNA, 16 nt, Homo sapiens
  source 1..16: mol_type = genomic RNA
cagtgcagagatacat

SEQ ID NO: 4429 - RNA, 16 nt, Homo sapiens
  source 1..16: mol_type = genomic RNA
gcaatgcccctgtagg

SEQ ID NO: 4430 - RNA, 16 nt, Homo sapiens
  source 1..16: mol_type = genomic RNA
cctgtaggcagagccc

SEQ ID NO: 4431 - RNA, 16 nt, Homo sapiens
  source 1..16: mol_type = genomic RNA
ctgtaggcagagccct

SEQ ID NO: 4432 - RNA, 16 nt, Homo sapiens
  source 1..16: mol_type = genomic RNA
tgtaggcagagccctg

SEQ ID NO: 4433 - RNA, 16 nt, Homo sapiens
  source 1..16: mol_type = genomic RNA
gtaggcagagccctga

SEQ ID NO: 4434 - RNA, 16 nt, Homo sapiens
  source 1..16: mol_type = genomic RNA
taggcagagccctgac

SEQ ID NO: 4435 - RNA, 16 nt, Homo sapiens
  source 1..16: mol_type = genomic RNA
aggcagagccctgaca

SEQ ID NO: 4436 - RNA, 16 nt, Homo sapiens
  source 1..16: mol_type = genomic RNA
ggcagagccctgacaa

SEQ ID NO: 4437 - RNA, 16 nt, Homo sapiens
  source 1..16: mol_type = genomic RNA
gcagagccctgacaag

SEQ ID NO: 4438 - RNA, 16 nt, Homo sapiens
  source 1..16: mol_type = genomic RNA
cagagccctgacaagt

SEQ ID NO: 4439 - RNA, 16 nt, Homo sapiens
  source 1..16: mol_type = genomic RNA
agagccctgacaagtg

SEQ ID NO: 4440 - RNA, 16 nt, Homo sapiens
  source 1..16: mol_type = genomic RNA
gagccctgacaagtgg

SEQ ID NO: 4441 - RNA, 16 nt, Homo sapiens
  source 1..16: mol_type = genomic RNA
agccctgacaagtggt

SEQ ID NO: 4442 - RNA, 16 nt, Homo sapiens
  source 1..16: mol_type = genomic RNA
gccctgacaagtggta

SEQ ID NO: 4443 - RNA, 16 nt, Homo sapiens
  source 1..16: mol_type = genomic RNA
ccctgacaagtggtac

SEQ ID NO: 4444 - RNA, 16 nt, Homo sapiens
  source 1..16: mol_type = genomic RNA
cctgacaagtggtaca

SEQ ID NO: 4445 - RNA, 16 nt, Homo sapiens
  source 1..16: mol_type = genomic RNA
ctgacaagtggtacat

SEQ ID NO: 4446 - RNA, 16 nt, Homo sapiens
  source 1..16: mol_type = genomic RNA
tgacaagtggtacatc

SEQ ID NO: 4447 - RNA, 16 nt, Homo sapiens
  source 1..16: mol_type = genomic RNA
gacaagtggtacatca

SEQ ID NO: 4448 - RNA, 16 nt, Homo sapiens
  source 1..16: mol_type = genomic RNA
acaagtggtacatcac

SEQ ID NO: 4449 - RNA, 16 nt, Homo sapiens
  source 1..16: mol_type = genomic RNA
caagtggtacatcacc

SEQ ID NO: 4450 - RNA, 16 nt, Homo sapiens
  source 1..16: mol_type = genomic RNA
aagtggtacatcacct

SEQ ID NO: 4451 - RNA, 16 nt, Homo sapiens
  source 1..16: mol_type = genomic RNA
agtggtacatcacctg

SEQ ID NO: 4452 - RNA, 16 nt, Homo sapiens
  source 1..16: mol_type = genomic RNA
gtggtacatcacctgg

SEQ ID NO: 4453 - RNA, 16 nt, Homo sapiens
  source 1..16: mol_type = genomic RNA
tggtacatcacctggg

SEQ ID NO: 4454 - RNA, 16 nt, Homo sapiens
  source 1..16: mol_type = genomic RNA
ggtacatcacctgggt

SEQ ID NO: 4455 - RNA, 16 nt, Homo sapiens
  source 1..16: mol_type = genomic RNA
gtacatcacctgggtg

SEQ ID NO: 4456 - RNA, 16 nt, Homo sapiens
  source 1..16: mol_type = genomic RNA
gggtgatcattgcagg

SEQ ID NO: 4457 - RNA, 16 nt, Homo sapiens
  source 1..16: mol_type = genomic RNA
ggtgatcattgcaggg

SEQ ID NO: 4458 - RNA, 16 nt, Homo sapiens
  source 1..16: mol_type = genomic RNA
gtgatcattgcaggga

SEQ ID NO: 4459 - RNA, 16 nt, Homo sapiens
  source 1..16: mol_type = genomic RNA
tgatcattgcagggat

SEQ ID NO: 4460 - RNA, 16 nt, Homo sapiens
  source 1..16: mol_type = genomic RNA
gatcattgcagggata

SEQ ID NO: 4461 - RNA, 16 nt, Homo sapiens
  source 1..16: mol_type = genomic RNA
atcattgcagggatat

SEQ ID NO: 4462 - RNA, 16 nt, Homo sapiens
  source 1..16: mol_type = genomic RNA
tcattgcagggatatg

SEQ ID NO: 4463 - RNA, 16 nt, Homo sapiens
  source 1..16: mol_type = genomic RNA
cattgcagggatatgt

SEQ ID NO: 4464 - RNA, 16 nt, Homo sapiens
  source 1..16: mol_type = genomic RNA
attgcagggatatgtc

SEQ ID NO: 4465 - RNA, 16 nt, Homo sapiens
  source 1..16: mol_type = genomic RNA
ttgcagggatatgtca

SEQ ID NO: 4466 - RNA, 16 nt, Homo sapiens
  source 1..16: mol_type = genomic RNA
tgcagggatatgtcac

SEQ ID NO: 4467 - RNA, 16 nt, Homo sapiens
  source 1..16: mol_type = genomic RNA
gcagggatatgtcaca

SEQ ID NO: 4468 - RNA, 16 nt, Homo sapiens
  source 1..16: mol_type = genomic RNA
cagggatatgtcacaa

SEQ ID NO: 4469 - RNA, 16 nt, Homo sapiens
  source 1..16: mol_type = genomic RNA
agggatatgtcacaaa

SEQ ID NO: 4470 - RNA, 16 nt, Homo sapiens
  source 1..16: mol_type = genomic RNA
gggatatgtcacaaag

SEQ ID NO: 4471 - RNA, 16 nt, Homo sapiens
  source 1..16: mol_type = genomic RNA
ggatatgtcacaaagc

SEQ ID NO: 4472 - RNA, 16 nt, Homo sapiens
  source 1..16: mol_type = genomic RNA
atatgtcacaaagcac

SEQ ID NO: 4473 - RNA, 16 nt, Homo sapiens
  source 1..16: mol_type = genomic RNA
tatgtcacaaagcacc

SEQ ID NO: 4474 - RNA, 16 nt, Homo sapiens
  source 1..16: mol_type = genomic RNA
atgtcacaaagcaccc

SEQ ID NO: 4475 - RNA, 16 nt, Homo sapiens
  source 1..16: mol_type = genomic RNA
tgtcacaaagcaccct

SEQ ID NO: 4476 - RNA, 16 nt, Homo sapiens
  source 1..16: mol_type = genomic RNA
gtcacaaagcaccctg

SEQ ID NO: 4477 - RNA, 16 nt, Homo sapiens
  source 1..16: mol_type = genomic RNA
tcacaaagcaccctgt

SEQ ID NO: 4478 - RNA, 16 nt, Homo sapiens
  source 1..16: mol_type = genomic RNA
cacaaagcaccctgta

SEQ ID NO: 4479 - RNA, 16 nt, Homo sapiens
  source 1..16: mol_type = genomic RNA
acaaagcaccctgtag

SEQ ID NO: 4480 - RNA, 16 nt, Homo sapiens
  source 1..16: mol_type = genomic RNA
caaagcaccctgtagg

SEQ ID NO: 4481 - RNA, 16 nt, Homo sapiens
  source 1..16: mol_type = genomic RNA
aaagcaccctgtaggc

SEQ ID NO: 4482 - RNA, 16 nt, Homo sapiens
  source 1..16: mol_type = genomic RNA
aagcaccctgtaggca

SEQ ID NO: 4483 - RNA, 16 nt, Homo sapiens
  source 1..16: mol_type = genomic RNA
agcaccctgtaggcag

SEQ ID NO: 4484 - RNA, 16 nt, Homo sapiens
  source 1..16: mol_type = genomic RNA
gcaccctgtaggcaga

SEQ ID NO: 4485 - RNA, 16 nt, Homo sapiens
  source 1..16: mol_type = genomic RNA
caccctgtaggcagat

SEQ ID NO: 4486 - RNA, 16 nt, Homo sapiens
  source 1..16: mol_type = genomic RNA
accctgtaggcagatc

SEQ ID NO: 4487 - RNA, 16 nt, Homo sapiens
  source 1..16: mol_type = genomic RNA
agagttacatgacctg

SEQ ID NO: 4488 - RNA, 16 nt, Homo sapiens
  source 1..16: mol_type = genomic RNA
gagttacatgacctgg

SEQ ID NO: 4489 - RNA, 16 nt, Homo sapiens
  source 1..16: mol_type = genomic RNA
agttacatgacctggg

SEQ ID NO: 4490 - RNA, 16 nt, Homo sapiens
  source 1..16: mol_type = genomic RNA
gttacatgacctgggt

SEQ ID NO: 4491 - RNA, 16 nt, Homo sapiens
  source 1..16: mol_type = genomic RNA
ttacatgacctgggtg

SEQ ID NO: 4492 - RNA, 16 nt, Homo sapiens
  source 1..16: mol_type = genomic RNA
tacatgacctgggtga

SEQ ID NO: 4493 - RNA, 16 nt, Homo sapiens
  source 1..16: mol_type = genomic RNA
acatgacctgggtgat

SEQ ID NO: 4494 - RNA, 16 nt, Homo sapiens
  source 1..16: mol_type = genomic RNA
catgacctgggtgatc

SEQ ID NO: 4495 - RNA, 16 nt, Homo sapiens
  source 1..16: mol_type = genomic RNA
atgacctgggtgatca

SEQ ID NO: 4496 - RNA, 16 nt, Homo sapiens
  source 1..16: mol_type = genomic RNA
tgacctgggtgatcag

SEQ ID NO: 4497 - RNA, 16 nt, Homo sapiens
  source 1..16: mol_type = genomic RNA
gacctgggtgatcagt

SEQ ID NO: 4498 - RNA, 16 nt, Homo sapiens
  source 1..16: mol_type = genomic RNA
agttacatgacctagg

SEQ ID NO: 4499 - RNA, 16 nt, Homo sapiens
  source 1..16: mol_type = genomic RNA
gttacatgacctaggt

SEQ ID NO: 4500 - RNA, 16 nt, Homo sapiens
  source 1..16: mol_type = genomic RNA
ttacatgacctaggtg

SEQ ID NO: 4501 - RNA, 16 nt, Homo sapiens
  source 1..16: mol_type = genomic RNA
tacatgacctaggtga

SEQ ID NO: 4502 - RNA, 16 nt, Homo sapiens
  source 1..16: mol_type = genomic RNA
acatgacctaggtgat

SEQ ID NO: 4503 - RNA, 16 nt, Homo sapiens
  source 1..16: mol_type = genomic RNA
catgacctaggtgatc

SEQ ID NO: 4504 - RNA, 16 nt, Homo sapiens
  source 1..16: mol_type = genomic RNA
agtgcagagatacatc

SEQ ID NO: 4505 - RNA, 16 nt, Homo sapiens
  source 1..16: mol_type = genomic RNA
gtgcagagatacatcg

SEQ ID NO: 4506 - RNA, 16 nt, Homo sapiens
  source 1..16: mol_type = genomic RNA
tgcagagatacatcgc

SEQ ID NO: 4507 - RNA, 16 nt, Homo sapiens
  source 1..16: mol_type = genomic RNA
gcagagatacatcgca

SEQ ID NO: 4508 - RNA, 16 nt, Homo sapiens
  source 1..16: mol_type = genomic RNA
cagagatacatcgcaa

SEQ ID NO: 4509 - RNA, 16 nt, Homo sapiens
  source 1..16: mol_type = genomic RNA
agagatacatcgcaat

SEQ ID NO: 4510 - RNA, 16 nt, Homo sapiens
  source 1..16: mol_type = genomic RNA
agatacatcgcaatgc

SEQ ID NO: 4511 - RNA, 16 nt, Homo sapiens
  source 1..16: mol_type = genomic RNA
gatacatcgcaatgcc

SEQ ID NO: 4512 - RNA, 16 nt, Homo sapiens
  source 1..16: mol_type = genomic RNA
atacatcgcaatgccc

SEQ ID NO: 4513 - RNA, 16 nt, Homo sapiens
  source 1..16: mol_type = genomic RNA
tacatcgcaatgcccc

SEQ ID NO: 4514 - RNA, 16 nt, Homo sapiens
  source 1..16: mol_type = genomic RNA
acatcgcaatgcccct

SEQ ID NO: 4515 - RNA, 16 nt, Homo sapiens
  source 1..16: mol_type = genomic RNA
catcgcaatgcccctg

SEQ ID NO: 4516 - RNA, 16 nt, Homo sapiens
  source 1..16: mol_type = genomic RNA
atcgcaatgcccctgt

SEQ ID NO: 4517 - RNA, 16 nt, Homo sapiens
  source 1..16: mol_type = genomic RNA
tcgcaatgcccctgta

SEQ ID NO: 4518 - RNA, 16 nt, Homo sapiens
  source 1..16: mol_type = genomic RNA
cgcaatgcccctgtag

SEQ ID NO: 4519 - RNA, 16 nt, Homo sapiens
  source 1..16: mol_type = genomic RNA
ctgtaggcagagcctt

SEQ ID NO: 4520 - RNA, 16 nt, Homo sapiens
  source 1..16: mol_type = genomic RNA
tgtaggcagagccttg

SEQ ID NO: 4521 - RNA, 16 nt, Homo sapiens
  source 1..16: mol_type = genomic RNA
gtaggcagagccttga

SEQ ID NO: 4522 - RNA, 16 nt, Homo sapiens
  source 1..16: mol_type = genomic RNA
taggcagagccttgac

SEQ ID NO: 4523 - RNA, 16 nt, Homo sapiens
  source 1..16: mol_type = genomic RNA
aggcagagccttgaca

SEQ ID NO: 4524 - RNA, 16 nt, Homo sapiens
  source 1..16: mol_type = genomic RNA
ggcagagccttgacaa

SEQ ID NO: 4525 - RNA, 16 nt, Homo sapiens
  source 1..16: mol_type = genomic RNA
gcagagccttgacaag

SEQ ID NO: 4526 - RNA, 16 nt, Homo sapiens
  source 1..16: mol_type = genomic RNA
cagagccttgacaagt

SEQ ID NO: 4527 - RNA, 16 nt, Homo sapiens
  source 1..16: mol_type = genomic RNA
agagccttgacaagtg

SEQ ID NO: 4528 - RNA, 16 nt, Homo sapiens
  source 1..16: mol_type = genomic RNA
gagccttgacaagtgg

SEQ ID NO: 4529 - RNA, 16 nt, Homo sapiens
  source 1..16: mol_type = genomic RNA
agccttgacaagtggt

SEQ ID NO: 4530 - RNA, 16 nt, Homo sapiens
  source 1..16: mol_type = genomic RNA
gccttgacaagtggta

SEQ ID NO: 4531 - RNA, 16 nt, Homo sapiens
  source 1..16: mol_type = genomic RNA
ccttgacaagtggtac

SEQ ID NO: 4532 - RNA, 16 nt, Homo sapiens
  source 1..16: mol_type = genomic RNA
acaaagcaccctgtaa

SEQ ID NO: 4533 - RNA, 16 nt, Homo sapiens
  source 1..16: mol_type = genomic RNA
caaagcaccctgtaag

SEQ ID NO: 4534 - RNA, 16 nt, Homo sapiens
  source 1..16: mol_type = genomic RNA
aaagcaccctgtaagc

SEQ ID NO: 4535 - RNA, 16 nt, Homo sapiens
  source 1..16: mol_type = genomic RNA
aagcaccctgtaagca

SEQ ID NO: 4536 - RNA, 16 nt, Homo sapiens
  source 1..16: mol_type = genomic RNA
agcaccctgtaagcag

SEQ ID NO: 4537 - RNA, 16 nt, Homo sapiens
  source 1..16: mol_type = genomic RNA
gcaccctgtaagcaga

SEQ ID NO: 4538 - RNA, 16 nt, Homo sapiens
  source 1..16: mol_type = genomic RNA
caccctgtaagcagat

SEQ ID NO: 4539 - RNA, 16 nt, Homo sapiens
  source 1..16: mol_type = genomic RNA
accctgtaagcagatc

SEQ ID NO: 4540 - RNA, 16 nt, Homo sapiens
  source 1..16: mol_type = genomic RNA
cctgtaagcagatcct

SEQ ID NO: 4541 - RNA, 16 nt, Homo sapiens
  source 1..16: mol_type = genomic RNA
tgtaagcagatcctag

SEQ ID NO: 4542 - RNA, 16 nt, Homo sapiens
  source 1..16: mol_type = genomic RNA
gtaagcagatcctaga

SEQ ID NO: 4543 - RNA, 16 nt, Homo sapiens
  source 1..16: mol_type = genomic RNA
taagcagatcctagag

SEQ ID NO: 4544 - RNA, 16 nt, Homo sapiens
  source 1..16: mol_type = genomic RNA
aagcagatcctagaga

SEQ ID NO: 4545 - RNA, 16 nt, Homo sapiens
  source 1..16: mol_type = genomic RNA
agcagatcctagagaa

SEQ ID NO: 4546 - RNA, 16 nt, Homo sapiens
  source 1..16: mol_type = genomic RNA
gcagatcctagagaag

SEQ ID NO: 4547 - RNA, 16 nt, Homo sapiens
  source 1..16: mol_type = genomic RNA
cagatcctagagaaga

SEQ ID NO: 4548 - RNA, 16 nt, Homo sapiens
  source 1..16: mol_type = genomic RNA
agatcctagagaagag

SEQ ID NO: 4549 - RNA, 16 nt, Homo sapiens
  source 1..16: mol_type = genomic RNA
gatcctagagaagagt

SEQ ID NO: 4550 - RNA, 16 nt, Homo sapiens
  source 1..16: mol_type = genomic RNA
agttatatcacctggg

SEQ ID NO: 4551 - RNA, 16 nt, Homo sapiens
  source 1..16: mol_type = genomic RNA
ttatatcacctgggtg

SEQ ID NO: 4552 - RNA, 16 nt, Homo sapiens
  source 1..16: mol_type = genomic RNA
tatatcacctgggtga

SEQ ID NO: 4553 - RNA, 16 nt, Homo sapiens
  source 1..16: mol_type = genomic RNA
atatcacctgggtgat

SEQ ID NO: 4554 - RNA, 16 nt, Homo sapiens
  source 1..16: mol_type = genomic RNA
tatcacctgggtgatc

SEQ ID NO: 4555 - RNA, 16 nt, Homo sapiens
  source 1..16: mol_type = genomic RNA
gagatatgtcacaagc

SEQ ID NO: 4556 - RNA, 16 nt, Homo sapiens
  source 1..16: mol_type = genomic RNA
agatatgtcacaagcc

SEQ ID NO: 4557 - RNA, 16 nt, Homo sapiens
  source 1..16: mol_type = genomic RNA
gatatgtcacaagccc

SEQ ID NO: 4558 - RNA, 16 nt, Homo sapiens
  source 1..16: mol_type = genomic RNA
atatgtcacaagcccc

SEQ ID NO: 4559 - RNA, 16 nt, Homo sapiens
  source 1..16: mol_type = genomic RNA
tatgtcacaagccccc

SEQ ID NO: 4560 - RNA, 16 nt, Homo sapiens
  source 1..16: mol_type = genomic RNA
atgtcacaagccccct

SEQ ID NO: 4561 - RNA, 16 nt, Homo sapiens
  source 1..16: mol_type = genomic RNA
tgtcacaagccccctg

SEQ ID NO: 4562 - RNA, 16 nt, Homo sapiens
  source 1..16: mol_type = genomic RNA
gtcacaagccccctgt

SEQ ID NO: 4563 - RNA, 16 nt, Homo sapiens
  source 1..16: mol_type = genomic RNA
tcacaagccccctgta

SEQ ID NO: 4564 - RNA, 16 nt, Homo sapiens
  source 1..16: mol_type = genomic RNA
cacaagccccctgtag

SEQ ID NO: 4565 - RNA, 16 nt, Homo sapiens
  source 1..16: mol_type = genomic RNA
acaagccccctgtagg

SEQ ID NO: 4566 - RNA, 16 nt, Homo sapiens
  source 1..16: mol_type = genomic RNA
caagccccctgtaggc

SEQ ID NO: 4567 - RNA, 16 nt, Homo sapiens
  source 1..16: mol_type = genomic RNA
aagccccctgtaggca

SEQ ID NO: 4568 - RNA, 16 nt, Homo sapiens
  source 1..16: mol_type = genomic RNA
agccccctgtaggcag

SEQ ID NO: 4569 - RNA, 16 nt, Homo sapiens
  source 1..16: mol_type = genomic RNA
gggtgatcagtgcagt

SEQ ID NO: 4570 - RNA, 16 nt, Homo sapiens
  source 1..16: mol_type = genomic RNA
gtgtagccagagccta

SEQ ID NO: 4571 - RNA, 16 nt, Homo sapiens
  source 1..16: mol_type = genomic RNA
tgtagccagagcctag

SEQ ID NO: 4572 - RNA, 16 nt, Homo sapiens
  source 1..16: mol_type = genomic RNA
gtagccagagcctaga

SEQ ID NO: 4573 - RNA, 16 nt, Homo sapiens
  source 1..16: mol_type = genomic RNA
tagccagagcctagac

SEQ ID NO: 4574 - RNA, 16 nt, Homo sapiens
  source 1..16: mol_type = genomic RNA
aaagttacagcacctg

SEQ ID NO: 4575 - RNA, 16 nt, Homo sapiens
  source 1..16: mol_type = genomic RNA
aagttacagcacctgg

SEQ ID NO: 4576 - RNA, 16 nt, Homo sapiens
  source 1..16: mol_type = genomic RNA
agttacagcacctggg

SEQ ID NO: 4577 - RNA, 16 nt, Homo sapiens
  source 1..16: mol_type = genomic RNA
gttacagcacctggga

SEQ ID NO: 4578 - RNA, 16 nt, Homo sapiens
  source 1..16: mol_type = genomic RNA
ttacagcacctgggag

SEQ ID NO: 4579 - RNA, 16 nt, Homo sapiens
  source 1..16: mol_type = genomic RNA
tacagcacctgggaga

SEQ ID NO: 4580 - RNA, 16 nt, Homo sapiens
  source 1..16: mol_type = genomic RNA
acagcacctgggagat

SEQ ID NO: 4581 - RNA, 16 nt, Homo sapiens
  source 1..16: mol_type = genomic RNA
cagcacctgggagatc

SEQ ID NO: 4582 - RNA, 16 nt, Homo sapiens
  source 1..16: mol_type = genomic RNA
agcacctgggagatca

SEQ ID NO: 4583 - RNA, 16 nt, Homo sapiens
  source 1..16: mol_type = genomic RNA
gcacctgggagatcag

SEQ ID NO: 4584 - RNA, 16 nt, Homo sapiens
  source 1..16: mol_type = genomic RNA
cacctgggagatcagt

SEQ ID NO: 4585 - RNA, 16 nt, Homo sapiens
  source 1..16: mol_type = genomic RNA
acctgggagatcagtg

SEQ ID NO: 4586 - RNA, 16 nt, Homo sapiens
  source 1..16: mol_type = genomic RNA
cctgggagatcagtgc

SEQ ID NO: 4587 - RNA, 16 nt, Homo sapiens
  source 1..16: mol_type = genomic RNA
ctgggagatcagtgca

SEQ ID NO: 4588 - RNA, 16 nt, Homo sapiens
  source 1..16: mol_type = genomic RNA
tgggagatcagtgcag

SEQ ID NO: 4589 - RNA, 16 nt, Homo sapiens
  source 1..16: mol_type = genomic RNA
gggagatcagtgcaga

SEQ ID NO: 4590 - RNA, 16 nt, Homo sapiens
  source 1..16: mol_type = genomic RNA
ggagatcagtgcagag

SEQ ID NO: 4591 - RNA, 16 nt, Homo sapiens
  source 1..16: mol_type = genomic RNA
gagatcagtgcagaga

SEQ ID NO: 4592 - RNA, 16 nt, Homo sapiens
  source 1..16: mol_type = genomic RNA
agatcagtgcagagat

SEQ ID NO: 4593 - RNA, 16 nt, Homo sapiens
  source 1..16: mol_type = genomic RNA
tgtcacaatgtcccca

SEQ ID NO: 4594 - RNA, 16 nt, Homo sapiens
  source 1..16: mol_type = genomic RNA
gtcacaatgtccccag

SEQ ID NO: 4595 - RNA, 16 nt, Homo sapiens
  source 1..16: mol_type = genomic RNA
tcacaatgtccccagt

SEQ ID NO: 4596 - RNA, 16 nt, Homo sapiens
  source 1..16: mol_type = genomic RNA
cacaatgtccccagta

SEQ ID NO: 4597 - RNA, 16 nt, Homo sapiens
  source 1..16: mol_type = genomic RNA
acaatgtccccagtag

SEQ ID NO: 4598 - RNA, 16 nt, Homo sapiens
  source 1..16: mol_type = genomic RNA
caatgtccccagtagg

SEQ ID NO: 4599 - RNA, 16 nt, Homo sapiens
  source 1..16: mol_type = genomic RNA
aatgtccccagtaggc

SEQ ID NO: 4600 - RNA, 16 nt, Homo sapiens
  source 1..16: mol_type = genomic RNA
atgtccccagtaggca

SEQ ID NO: 4601 - RNA, 16 nt, Homo sapiens
  source 1..16: mol_type = genomic RNA
tgtccccagtaggcag

SEQ ID NO: 4602 - RNA, 16 nt, Homo sapiens
  source 1..16: mol_type = genomic RNA
gtccccagtaggcaga

SEQ ID NO: 4603 - RNA, 16 nt, Homo sapiens
  source 1..16: mol_type = genomic RNA
tccccagtaggcagag

SEQ ID NO: 4604 - RNA, 16 nt, Homo sapiens
  source 1..16: mol_type = genomic RNA
ccccagtaggcagaga

SEQ ID NO: 4605 - RNA, 16 nt, Homo sapiens
  source 1..16: mol_type = genomic RNA
cccagtaggcagagac

SEQ ID NO: 4606 - RNA, 16 nt, Homo sapiens
  source 1..16: mol_type = genomic RNA
ccagtaggcagagacc

SEQ ID NO: 4607 - RNA, 16 nt, Homo sapiens
  source 1..16: mol_type = genomic RNA
cagtaggcagagacca

SEQ ID NO: 4608 - RNA, 16 nt, Homo sapiens
  source 1..16: mol_type = genomic RNA
agtaggcagagaccag

SEQ ID NO: 4609 - RNA, 16 nt, Homo sapiens
  source 1..16: mol_type = genomic RNA
gtaggcagagaccagg

SEQ ID NO: 4610 - RNA, 16 nt, Homo sapiens
  source 1..16: mol_type = genomic RNA
ggcagagaccaggcaa

SEQ ID NO: 4611 - RNA, 16 nt, Homo sapiens
  source 1..16: mol_type = genomic RNA
gcagagaccaggcaag

SEQ ID NO: 4612 - RNA, 16 nt, Homo sapiens
  source 1..16: mol_type = genomic RNA
cagagaccaggcaaga

SEQ ID NO: 4613 - RNA, 16 nt, Homo sapiens
  source 1..16: mol_type = genomic RNA
agagaccaggcaagag

SEQ ID NO: 4614 - RNA, 16 nt, Homo sapiens
  source 1..16: mol_type = genomic RNA
gagaccaggcaagagt

SEQ ID NO: 4615 - RNA, 16 nt, Homo sapiens
  source 1..16: mol_type = genomic RNA
agaccaggcaagagtt

SEQ ID NO: 4616 - RNA, 16 nt, Homo sapiens
  source 1..16: mol_type = genomic RNA
gaccaggcaagagttg

SEQ ID NO: 4617 - RNA, 16 nt, Homo sapiens
  source 1..16: mol_type = genomic RNA
accaggcaagagttgg

SEQ ID NO: 4618 - RNA, 16 nt, Homo sapiens
  source 1..16: mol_type = genomic RNA
ccaggcaagagttgga

SEQ ID NO: 4619 - RNA, 16 nt, Homo sapiens
  source 1..16: mol_type = genomic RNA
caggcaagagttggat

SEQ ID NO: 4620 - RNA, 16 nt, Homo sapiens
  source 1..16: mol_type = genomic RNA
aggcaagagttggatc

SEQ ID NO: 4621 - RNA, 16 nt, Homo sapiens
  source 1..16: mol_type = genomic RNA
ggcaagagttggatca

SEQ ID NO: 4622 - RNA, 16 nt, Homo sapiens
  source 1..16: mol_type = genomic RNA
gcaagagttggatcac

SEQ ID NO: 4623 - RNA, 16 nt, Homo sapiens
  source 1..16: mol_type = genomic RNA
caagagttggatcacc

SEQ ID NO: 4624 - RNA, 16 nt, Homo sapiens
  source 1..16: mol_type = genomic RNA
aagagttggatcacct

SEQ ID NO: 4625 - RNA, 16 nt, Homo sapiens
  source 1..16: mol_type = genomic RNA
agagttggatcacctc

SEQ ID NO: 4626 - RNA, 16 nt, Homo sapiens
  source 1..16: mol_type = genomic RNA
gagttggatcacctcg

SEQ ID NO: 4627 - RNA, 16 nt, Homo sapiens
  source 1..16: mol_type = genomic RNA
agttggatcacctcgg

SEQ ID NO: 4628 - RNA, 16 nt, Homo sapiens
  source 1..16: mol_type = genomic RNA
gttggatcacctcggg

SEQ ID NO: 4629 - RNA, 16 nt, Homo sapiens
  source 1..16: mol_type = genomic RNA
ttggatcacctcggga

SEQ ID NO: 4630 - RNA, 16 nt, Homo sapiens
  source 1..16: mol_type = genomic RNA
tggatcacctcgggat

SEQ ID NO: 4631 - RNA, 16 nt, Homo sapiens
  source 1..16: mol_type = genomic RNA
ggatcacctcgggatc

SEQ ID NO: 4632 - RNA, 16 nt, Homo sapiens
  source 1..16: mol_type = genomic RNA
gatcacctcgggatca

SEQ ID NO: 4633 - RNA, 16 nt, Homo sapiens
  source 1..16: mol_type = genomic RNA
atcacctcgggatcag

SEQ ID NO: 4634 - RNA, 16 nt, Homo sapiens
  source 1..16: mol_type = genomic RNA
tcacctcgggatcagt

SEQ ID NO: 4635 - RNA, 16 nt, Homo sapiens
  source 1..16: mol_type = genomic RNA
cacctcgggatcagtg

SEQ ID NO: 4636 - RNA, 16 nt, Homo sapiens
  source 1..16: mol_type = genomic RNA
acctcgggatcagtgc

SEQ ID NO: 4637 - RNA, 16 nt, Homo sapiens
  source 1..16: mol_type = genomic RNA
cctcgggatcagtgca

SEQ ID NO: 4638 - RNA, 16 nt, Homo sapiens
  source 1..16: mol_type = genomic RNA
ctcgggatcagtgcag

SEQ ID NO: 4639 - RNA, 16 nt, Homo sapiens
  source 1..16: mol_type = genomic RNA
tcgggatcagtgcaga

SEQ ID NO: 4640 - RNA, 16 nt, Homo sapiens
  source 1..16: mol_type = genomic RNA
cgggatcagtgcagag

SEQ ID NO: 4641 - RNA, 16 nt, Homo sapiens
  source 1..16: mol_type = genomic RNA
gtgcagagatatgtct

SEQ ID NO: 4642 - RNA, 16 nt, Homo sapiens
  source 1..16: mol_type = genomic RNA
tgcagagatatgtctc

SEQ ID NO: 4643 - RNA, 16 nt, Homo sapiens
  source 1..16: mol_type = genomic RNA
tatgtctcaatccccc

SEQ ID NO: 4644 - RNA, 16 nt, Homo sapiens
  source 1..16: mol_type = genomic RNA
atgtctcaatccccct

SEQ ID NO: 4645 - RNA, 16 nt, Homo sapiens
  source 1..16: mol_type = genomic RNA
tgtctcaatccccctg

SEQ ID NO: 4646 - RNA, 16 nt, Homo sapiens
  source 1..16: mol_type = genomic RNA
gtctcaatccccctgt

SEQ ID NO: 4647 - RNA, 16 nt, Homo sapiens
  source 1..16: mol_type = genomic RNA
tctcaatccccctgtg

SEQ ID NO: 4648 - RNA, 16 nt, Homo sapiens
  source 1..16: mol_type = genomic RNA
ctcaatccccctgtgg

SEQ ID NO: 4649 - RNA, 16 nt, Homo sapiens
  source 1..16: mol_type = genomic RNA
tcaatccccctgtggg

SEQ ID NO: 4650 - RNA, 16 nt, Homo sapiens
  source 1..16: mol_type = genomic RNA
caatccccctgtgggc

SEQ ID NO: 4651 - RNA, 16 nt, Homo sapiens
  source 1..16: mol_type = genomic RNA
aatccccctgtgggca

SEQ ID NO: 4652 - RNA, 16 nt, Homo sapiens
  source 1..16: mol_type = genomic RNA
atccccctgtgggcac

SEQ ID NO: 4653 - RNA, 16 nt, Homo sapiens
  source 1..16: mol_type = genomic RNA
tccccctgtgggcaca

SEQ ID NO: 4654 - RNA, 16 nt, Homo sapiens
  source 1..16: mol_type = genomic RNA
ccccctgtgggcacag

SEQ ID NO: 4655 - RNA, 16 nt, Homo sapiens
  source 1..16: mol_type = genomic RNA
cctgtgggcacagcct

SEQ ID NO: 4656 - RNA, 16 nt, Homo sapiens
  source 1..16: mol_type = genomic RNA
ctgtgggcacagccta

SEQ ID NO: 4657 - RNA, 16 nt, Homo sapiens
  source 1..16: mol_type = genomic RNA
tgtgggcacagcctag

SEQ ID NO: 4658 - RNA, 16 nt, Homo sapiens
  source 1..16: mol_type = genomic RNA
gtgggcacagcctaga

SEQ ID NO: 4659 - RNA, 16 nt, Homo sapiens
  source 1..16: mol_type = genomic RNA
gggcacagcctagaca

SEQ ID NO: 4660 - RNA, 16 nt, Homo sapiens
  source 1..16: mol_type = genomic RNA
ggcacagcctagacaa

SEQ ID NO: 4661 - RNA, 16 nt, Homo sapiens
  source 1..16: mol_type = genomic RNA
gcacagcctagacaag

SEQ ID NO: 4662 - RNA, 16 nt, Homo sapiens
  source 1..16: mol_type = genomic RNA
cacagcctagacaaga

SEQ ID NO: 4663 - RNA, 16 nt, Homo sapiens
  source 1..16: mol_type = genomic RNA
acagcctagacaagag

SEQ ID NO: 4664 - RNA, 16 nt, Homo sapiens
  source 1..16: mol_type = genomic RNA
cagcctagacaagagt

SEQ ID NO: 4665 - RNA, 16 nt, Homo sapiens
  source 1..16: mol_type = genomic RNA
tcacctcggttaacag

SEQ ID NO: 4666 - RNA, 16 nt, Homo sapiens
  source 1..16: mol_type = genomic RNA
cacctcggttaacagt

SEQ ID NO: 4667 - RNA, 16 nt, Homo sapiens
  source 1..16: mol_type = genomic RNA
acctcggttaacagtg

SEQ ID NO: 4668 - RNA, 16 nt, Homo sapiens
  source 1..16: mol_type = genomic RNA
cctcggttaacagtgc

SEQ ID NO: 4669 - RNA, 16 nt, Homo sapiens
  source 1..16: mol_type = genomic RNA
ctcggttaacagtgca

SEQ ID NO: 4670 - RNA, 16 nt, Homo sapiens
  source 1..16: mol_type = genomic RNA
tcggttaacagtgcag

SEQ ID NO: 4671 - RNA, 16 nt, Homo sapiens
  source 1..16: mol_type = genomic RNA
cggttaacagtgcaga

SEQ ID NO: 4672 - RNA, 16 nt, Homo sapiens
  source 1..16: mol_type = genomic RNA
ggttaacagtgcagag

SEQ ID NO: 4673 - RNA, 16 nt, Homo sapiens
  source 1..16: mol_type = genomic RNA
gttaacagtgcagaga

SEQ ID NO: 4674 - RNA, 16 nt, Homo sapiens
  source 1..16: mol_type = genomic RNA
ttaacagtgcagagat

SEQ ID NO: 4675 - RNA, 16 nt, Homo sapiens
  source 1..16: mol_type = genomic RNA
taacagtgcagagata

SEQ ID NO: 4676 - RNA, 16 nt, Homo sapiens
  source 1..16: mol_type = genomic RNA
aacagtgcagagatat

SEQ ID NO: 4677 - RNA, 16 nt, Homo sapiens
  source 1..16: mol_type = genomic RNA
acagtgcagagatatg

SEQ ID NO: 4678 - RNA, 16 nt, Homo sapiens
  source 1..16: mol_type = genomic RNA
tatgtcaaaatgcccc

SEQ ID NO: 4679 - RNA, 16 nt, Homo sapiens
  source 1..16: mol_type = genomic RNA
atgtcaaaatgcccct

SEQ ID NO: 4680 - RNA, 16 nt, Homo sapiens
  source 1..16: mol_type = genomic RNA
tgtcaaaatgcccctg

SEQ ID NO: 4681 - RNA, 16 nt, Homo sapiens
  source 1..16: mol_type = genomic RNA
gtcaaaatgcccctgt

SEQ ID NO: 4682 - RNA, 16 nt, Homo sapiens
  source 1..16: mol_type = genomic RNA
tcaaaatgcccctgta

SEQ ID NO: 4683 - RNA, 16 nt, Homo sapiens
  source 1..16: mol_type = genomic RNA
caaaatgcccctgtag

SEQ ID NO: 4684 - RNA, 16 nt, Homo sapiens
  source 1..16: mol_type = genomic RNA
aaaatgcccctgtagg

SEQ ID NO: 4685 - RNA, 16 nt, Homo sapiens
  source 1..16: mol_type = genomic RNA
aaatgcccctgtaggc

SEQ ID NO: 4686 - RNA, 16 nt, Homo sapiens
  source 1..16: mol_type = genomic RNA
atgcccctgtaggcaa

SEQ ID NO: 4687 - RNA, 16 nt, Homo sapiens
  source 1..16: mol_type = genomic RNA
tgcccctgtaggcaag

SEQ ID NO: 4688 - RNA, 16 nt, Homo sapiens
  source 1..16: mol_type = genomic RNA
gcccctgtaggcaagc

SEQ ID NO: 4689 - RNA, 16 nt, Homo sapiens
  source 1..16: mol_type = genomic RNA
cccctgtaggcaagcc

SEQ ID NO: 4690 - RNA, 16 nt, Homo sapiens
  source 1..16: mol_type = genomic RNA
ccctgtaggcaagcct

SEQ ID NO: 4691 - RNA, 16 nt, Homo sapiens
  source 1..16: mol_type = genomic RNA
cctgtaggcaagccta

SEQ ID NO: 4692 - RNA, 16 nt, Homo sapiens
  source 1..16: mol_type = genomic RNA
ctgtaggcaagcctac

SEQ ID NO: 4693 - RNA, 16 nt, Homo sapiens
  source 1..16: mol_type = genomic RNA
tgtaggcaagcctaca

SEQ ID NO: 4694 - RNA, 16 nt, Homo sapiens
  source 1..16: mol_type = genomic RNA
gtaggcaagcctacac

SEQ ID NO: 4695 - RNA, 16 nt, Homo sapiens
  source 1..16: mol_type = genomic RNA
taggcaagcctacaca

SEQ ID NO: 4696 - RNA, 16 nt, Homo sapiens
  source 1..16: mol_type = genomic RNA
aggcaagcctacacaa

SEQ ID NO: 4697 - RNA, 16 nt, Homo sapiens
  source 1..16: mol_type = genomic RNA
ggcaagcctacacaag

SEQ ID NO: 4698 - RNA, 16 nt, Homo sapiens
  source 1..16: mol_type = genomic RNA
gcaagcctacacaagt

SEQ ID NO: 4699 - RNA, 16 nt, Homo sapiens
  source 1..16: mol_type = genomic RNA
caagcctacacaagta

SEQ ID NO: 4700 - RNA, 16 nt, Homo sapiens
  source 1..16: mol_type = genomic RNA
aagcctacacaagtat

SEQ ID NO: 4701 - RNA, 16 nt, Homo sapiens
  source 1..16: mol_type = genomic RNA
tatgtcacaatacccc

SEQ ID NO: 4702 - RNA, 16 nt, Homo sapiens
  source 1..16: mol_type = genomic RNA
atgtcacaataccccc

SEQ ID NO: 4703 - RNA, 16 nt, Homo sapiens
  source 1..16: mol_type = genomic RNA
tgtcacaataccccct

SEQ ID NO: 4704 - RNA, 16 nt, Homo sapiens
  source 1..16: mol_type = genomic RNA
acaataccccctgtaa

SEQ ID NO: 4705 - RNA, 16 nt, Homo sapiens
  source 1..16: mol_type = genomic RNA
caataccccctgtaag

SEQ ID NO: 4706 - RNA, 16 nt, Homo sapiens
  source 1..16: mol_type = genomic RNA
aataccccctgtaagc

SEQ ID NO: 4707 - RNA, 16 nt, Homo sapiens
  source 1..16: mol_type = genomic RNA
ataccccctgtaagca

SEQ ID NO: 4708 - RNA, 16 nt, Homo sapiens
  source 1..16: mol_type = genomic RNA
taccccctgtaagcag

SEQ ID NO: 4709 - RNA, 16 nt, Homo sapiens
  source 1..16: mol_type = genomic RNA
accccctgtaagcaga

SEQ ID NO: 4710 - RNA, 16 nt, Homo sapiens
  source 1..16: mol_type = genomic RNA
ccccctgtaagcagag

SEQ ID NO: 4711 - RNA, 16 nt, Homo sapiens
  source 1..16: mol_type = genomic RNA
cccctgtaagcagagc

SEQ ID NO: 4712 - RNA, 16 nt, Homo sapiens
  source 1..16: mol_type = genomic RNA
ccctgtaagcagagcc

SEQ ID NO: 4713 - RNA, 16 nt, Homo sapiens
  source 1..16: mol_type = genomic RNA
cctgtaagcagagcct

SEQ ID NO: 4714 - RNA, 16 nt, Homo sapiens
  source 1..16: mol_type = genomic RNA
ctgtaagcagagccta

SEQ ID NO: 4715 - RNA, 16 nt, Homo sapiens
  source 1..16: mol_type = genomic RNA
tgtaagcagagcctag

SEQ ID NO: 4716 - RNA, 16 nt, Homo sapiens
  source 1..16: mol_type = genomic RNA
gtaagcagagcctaga

SEQ ID NO: 4717 - RNA, 16 nt, Homo sapiens
  source 1..16: mol_type = genomic RNA
taagcagagcctagac

SEQ ID NO: 4718 - RNA, 16 nt, Homo sapiens
  source 1..16: mol_type = genomic RNA
aagcagagcctagaca

SEQ ID NO: 4719 - RNA, 16 nt, Homo sapiens
  source 1..16: mol_type = genomic RNA
agcagagcctagacaa

SEQ ID NO: 4720 - RNA, 16 nt, Homo sapiens
  source 1..16: mol_type = genomic RNA
tgcagagatatgtgac

SEQ ID NO: 4721 - RNA, 16 nt, Homo sapiens
  source 1..16: mol_type = genomic RNA
gcagagatatgtgaca

SEQ ID NO: 4722 - RNA, 16 nt, Homo sapiens
  source 1..16: mol_type = genomic RNA
agagatatgtgacaag

SEQ ID NO: 4723 - RNA, 16 nt, Homo sapiens
  source 1..16: mol_type = genomic RNA
gagatatgtgacaagg

SEQ ID NO: 4724 - RNA, 16 nt, Homo sapiens
  source 1..16: mol_type = genomic RNA
agatatgtgacaaggc

SEQ ID NO: 4725 - RNA, 16 nt, Homo sapiens
  source 1..16: mol_type = genomic RNA
gatatgtgacaaggcc

SEQ ID NO: 4726 - RNA, 16 nt, Homo sapiens
  source 1..16: mol_type = genomic RNA
atatgtgacaaggccc

SEQ ID NO: 4727 - RNA, 16 nt, Homo sapiens
  source 1..16: mol_type = genomic RNA
tatgtgacaaggcccc

SEQ ID NO: 4728 - RNA, 16 nt, Homo sapiens
  source 1..16: mol_type = genomic RNA
atgtgacaaggcccct

SEQ ID NO: 4729 - RNA, 16 nt, Homo sapiens
  source 1..16: mol_type = genomic RNA
tgtgacaaggcccctt

SEQ ID NO: 4730 - RNA, 16 nt, Homo sapiens
  source 1..16: mol_type = genomic RNA
gcagagcctagacaat

SEQ ID NO: 4731 - RNA, 16 nt, Homo sapiens
  source 1..16: mol_type = genomic RNA
cagagcctagacaata

SEQ ID NO: 4732 - RNA, 16 nt, Homo sapiens
  source 1..16: mol_type = genomic RNA
agagcctagacaatag

SEQ ID NO: 4733 - RNA, 16 nt, Homo sapiens
  source 1..16: mol_type = genomic RNA
gagcctagacaatagt

SEQ ID NO: 4734 - RNA, 16 nt, Homo sapiens
  source 1..16: mol_type = genomic RNA
tacatcacctgagtga

SEQ ID NO: 4735 - RNA, 16 nt, Homo sapiens
  source 1..16: mol_type = genomic RNA
acatcacctgagtgat

SEQ ID NO: 4736 - RNA, 16 nt, Homo sapiens
  source 1..16: mol_type = genomic RNA
catcacctgagtgatc

SEQ ID NO: 4737 - RNA, 16 nt, Homo sapiens
  source 1..16: mol_type = genomic RNA
atcacctgagtgatca

SEQ ID NO: 4738 - RNA, 16 nt, Homo sapiens
  source 1..16: mol_type = genomic RNA
tcacctgagtgatcag

SEQ ID NO: 4739 - RNA, 16 nt, Homo sapiens
  source 1..16: mol_type = genomic RNA
cacctgagtgatcagt

SEQ ID NO: 4740 - RNA, 16 nt, Homo sapiens
  source 1..16: mol_type = genomic RNA
acctgagtgatcagtg

SEQ ID NO: 4741 - RNA, 16 nt, Homo sapiens
  source 1..16: mol_type = genomic RNA
cctgagtgatcagtgc

SEQ ID NO: 4742 - RNA, 16 nt, Homo sapiens
  source 1..16: mol_type = genomic RNA
ctgagtgatcagtgca

SEQ ID NO: 4743 - RNA, 16 nt, Homo sapiens
  source 1..16: mol_type = genomic RNA
tgagtgatcagtgcag

SEQ ID NO: 4744 - RNA, 16 nt, Homo sapiens
  source 1..16: mol_type = genomic RNA
gagtgatcagtgcaga

SEQ ID NO: 4745 - RNA, 16 nt, Homo sapiens
  source 1..16: mol_type = genomic RNA
gatcagtgcagagatc

SEQ ID NO: 4746 - RNA, 16 nt, Homo sapiens
  source 1..16: mol_type = genomic RNA
atcagtgcagagatct

SEQ ID NO: 4747 - RNA, 16 nt, Homo sapiens
  source 1..16: mol_type = genomic RNA
tcagtgcagagatctg

SEQ ID NO: 4748 - RNA, 16 nt, Homo sapiens
  source 1..16: mol_type = genomic RNA
cagtgcagagatctgt

SEQ ID NO: 4749 - RNA, 16 nt, Homo sapiens
  source 1..16: mol_type = genomic RNA
agtgcagagatctgtc

SEQ ID NO: 4750 - RNA, 16 nt, Homo sapiens
  source 1..16: mol_type = genomic RNA
gtgcagagatctgtca

SEQ ID NO: 4751 - RNA, 16 nt, Homo sapiens
  source 1..16: mol_type = genomic RNA
tgcagagatctgtcac

SEQ ID NO: 4752 - RNA, 16 nt, Homo sapiens
  source 1..16: mol_type = genomic RNA
gcagagatctgtcaca

SEQ ID NO: 4753 - RNA, 16 nt, Homo sapiens
  source 1..16: mol_type = genomic RNA
tgtcacaatgcccctt

SEQ ID NO: 4754 - RNA, 16 nt, Homo sapiens
  source 1..16: mol_type = genomic RNA
gtcacaatgccccttt

SEQ ID NO: 4755 - RNA, 16 nt, Homo sapiens
  source 1..16: mol_type = genomic RNA
acaatgcccctttagg

SEQ ID NO: 4756 - RNA, 16 nt, Homo sapiens
  source 1..16: mol_type = genomic RNA
caatgcccctttaggc

SEQ ID NO: 4757 - RNA, 16 nt, Homo sapiens
  source 1..16: mol_type = genomic RNA
aatgcccctttaggca

SEQ ID NO: 4758 - RNA, 16 nt, Homo sapiens
  source 1..16: mol_type = genomic RNA
atgcccctttaggcag

SEQ ID NO: 4759 - RNA, 16 nt, Homo sapiens
  source 1..16: mol_type = genomic RNA
tgcccctttaggcaga

SEQ ID NO: 4760 - RNA, 16 nt, Homo sapiens
  source 1..16: mol_type = genomic RNA
gcccctttaggcagag

SEQ ID NO: 4761 - RNA, 16 nt, Homo sapiens
  source 1..16: mol_type = genomic RNA
cccctttaggcagagc

SEQ ID NO: 4762 - RNA, 16 nt, Homo sapiens
  source 1..16: mol_type = genomic RNA
ccctttaggcagagct

SEQ ID NO: 4763 - RNA, 16 nt, Homo sapiens
  source 1..16: mol_type = genomic RNA
cctttaggcagagctt

SEQ ID NO: 4764 - RNA, 16 nt, Homo sapiens
  source 1..16: mol_type = genomic RNA
ttaggcagagcttaaa

SEQ ID NO: 4765 - RNA, 16 nt, Homo sapiens
  source 1..16: mol_type = genomic RNA
taggcagagcttaaac

SEQ ID NO: 4766 - RNA, 16 nt, Homo sapiens
  source 1..16: mol_type = genomic RNA
tcacctgtgtgatcag

SEQ ID NO: 4767 - RNA, 16 nt, Homo sapiens
  source 1..16: mol_type = genomic RNA
cacctgtgtgatcagt

SEQ ID NO: 4768 - RNA, 16 nt, Homo sapiens
  source 1..16: mol_type = genomic RNA
acctgtgtgatcagtg

SEQ ID NO: 4769 - RNA, 16 nt, Homo sapiens
  source 1..16: mol_type = genomic RNA
aatccaagacaagagt

SEQ ID NO: 4770 - RNA, 16 nt, Homo sapiens
  source 1..16: mol_type = genomic RNA
ttaggcagagcttaga

SEQ ID NO: 4771 - RNA, 16 nt, Homo sapiens
  source 1..16: mol_type = genomic RNA
aggcagagcttagact

SEQ ID NO: 4772 - RNA, 16 nt, Homo sapiens
  source 1..16: mol_type = genomic RNA
ggcagagcttagacta

SEQ ID NO: 4773 - RNA, 16 nt, Homo sapiens
  source 1..16: mol_type = genomic RNA
gcagagcttagactag

SEQ ID NO: 4774 - RNA, 16 nt, Homo sapiens
  source 1..16: mol_type = genomic RNA
cagagcttagactaga

SEQ ID NO: 4775 - RNA, 16 nt, Homo sapiens
  source 1..16: mol_type = genomic RNA
agagcttagactagag

SEQ ID NO: 4776 - RNA, 16 nt, Homo sapiens
  source 1..16: mol_type = genomic RNA
gagcttagactagagt

SEQ ID NO: 4777 - RNA, 16 nt, Homo sapiens
  source 1..16: mol_type = genomic RNA
tgcccccataggcaaa

SEQ ID NO: 4778 - RNA, 16 nt, Homo sapiens
  source 1..16: mol_type = genomic RNA
gcccccataggcaaat

SEQ ID NO: 4779 - RNA, 16 nt, Homo sapiens
  source 1..16: mol_type = genomic RNA
cccccataggcaaatc

SEQ ID NO: 4780 - RNA, 16 nt, Homo sapiens
  source 1..16: mol_type = genomic RNA
ccccataggcaaatcc

SEQ ID NO: 4781 - RNA, 16 nt, Homo sapiens
  source 1..16: mol_type = genomic RNA
cccataggcaaatcca

SEQ ID NO: 4782 - RNA, 16 nt, Homo sapiens
  source 1..16: mol_type = genomic RNA
ccataggcaaatccaa

SEQ ID NO: 4783 - RNA, 16 nt, Homo sapiens
  source 1..16: mol_type = genomic RNA
cataggcaaatccaag

SEQ ID NO: 4784 - RNA, 16 nt, Homo sapiens
  source 1..16: mol_type = genomic RNA
ataggcaaatccaaga

SEQ ID NO: 4785 - RNA, 16 nt, Homo sapiens
  source 1..16: mol_type = genomic RNA
taggcaaatccaagac

SEQ ID NO: 4786 - RNA, 16 nt, Homo sapiens
  source 1..16: mol_type = genomic RNA
aggcaaatccaagaca

SEQ ID NO: 4787 - RNA, 16 nt, Homo sapiens
  source 1..16: mol_type = genomic RNA
ggcaaatccaagacaa

SEQ ID NO: 4788 - RNA, 16 nt, Homo sapiens
  source 1..16: mol_type = genomic RNA
gcaaatccaagacaag

SEQ ID NO: 4789 - RNA, 16 nt, Homo sapiens
  source 1..16: mol_type = genomic RNA
aaatccaagacaagag

SEQ ID NO: 4790 - RNA, 16 nt, Homo sapiens
  source 1..16: mol_type = genomic RNA
tccaagacaagagtct

SEQ ID NO: 4791 - RNA, 16 nt, Homo sapiens
  source 1..16: mol_type = genomic RNA
ccaagacaagagtctg

SEQ ID NO: 4792 - RNA, 16 nt, Homo sapiens
  source 1..16: mol_type = genomic RNA
caagacaagagtctgt

SEQ ID NO: 4793 - RNA, 16 nt, Homo sapiens
  source 1..16: mol_type = genomic RNA
cataggcagatccaac

SEQ ID NO: 4794 - RNA, 16 nt, Homo sapiens
  source 1..16: mol_type = genomic RNA
ataggcagatccaaca

SEQ ID NO: 4795 - RNA, 16 nt, Homo sapiens
  source 1..16: mol_type = genomic RNA
taggcagatccaacac

SEQ ID NO: 4796 - RNA, 16 nt, Homo sapiens
  source 1..16: mol_type = genomic RNA
aggcagatccaacaca

SEQ ID NO: 4797 - RNA, 16 nt, Homo sapiens
  source 1..16: mol_type = genomic RNA
ggcagatccaacacaa

SEQ ID NO: 4798 - RNA, 16 nt, Homo sapiens
  source 1..16: mol_type = genomic RNA
gcagatccaacacaag

SEQ ID NO: 4799 - RNA, 16 nt, Homo sapiens
  source 1..16: mol_type = genomic RNA
cagatccaacacaaga

SEQ ID NO: 4800 - RNA, 16 nt, Homo sapiens
  source 1..16: mol_type = genomic RNA
agatccaacacaagag

SEQ ID NO: 4801 - RNA, 16 nt, Homo sapiens
  source 1..16: mol_type = genomic RNA
gatccaacacaagagt

SEQ ID NO: 4802 - RNA, 16 nt, Homo sapiens
  source 1..16: mol_type = genomic RNA
ccaacacaagagttac

SEQ ID NO: 4803 - RNA, 16 nt, Homo sapiens
  source 1..16: mol_type = genomic RNA
ccatcacctgtgtgat

SEQ ID NO: 4804 - RNA, 16 nt, Homo sapiens
  source 1..16: mol_type = genomic RNA
cctgtgtgatcagtgt

SEQ ID NO: 4805 - RNA, 16 nt, Homo sapiens
  source 1..16: mol_type = genomic RNA
tatgtcacaatgcctc

SEQ ID NO: 4806 - RNA, 16 nt, Homo sapiens
  source 1..16: mol_type = genomic RNA
atgtcacaatgcctcc

SEQ ID NO: 4807 - RNA, 16 nt, Homo sapiens
  source 1..16: mol_type = genomic RNA
tgtcacaatgcctcct

SEQ ID NO: 4808 - RNA, 16 nt, Homo sapiens
  source 1..16: mol_type = genomic RNA
gtcacaatgcctcctg

SEQ ID NO: 4809 - RNA, 16 nt, Homo sapiens
  source 1..16: mol_type = genomic RNA
tcacaatgcctcctgt

SEQ ID NO: 4810 - RNA, 16 nt, Homo sapiens
  source 1..16: mol_type = genomic RNA
cacaatgcctcctgta

SEQ ID NO: 4811 - RNA, 16 nt, Homo sapiens
  source 1..16: mol_type = genomic RNA
acaatgcctcctgtag

SEQ ID NO: 4812 - RNA, 16 nt, Homo sapiens
  source 1..16: mol_type = genomic RNA
caatgcctcctgtagg

SEQ ID NO: 4813 - RNA, 16 nt, Homo sapiens
  source 1..16: mol_type = genomic RNA
aatgcctcctgtaggc

SEQ ID NO: 4814 - RNA, 16 nt, Homo sapiens
  source 1..16: mol_type = genomic RNA
atgcctcctgtaggca

SEQ ID NO: 4815 - RNA, 16 nt, Homo sapiens
  source 1..16: mol_type = genomic RNA
tgcctcctgtaggcag

SEQ ID NO: 4816 - RNA, 16 nt, Homo sapiens
  source 1..16: mol_type = genomic RNA
ctcctgtaggcagagg

SEQ ID NO: 4817 - RNA, 16 nt, Homo sapiens
  source 1..16: mol_type = genomic RNA
tcctgtaggcagaggc

SEQ ID NO: 4818 - RNA, 16 nt, Homo sapiens
  source 1..16: mol_type = genomic RNA
cctgtaggcagaggct

SEQ ID NO: 4819 - RNA, 16 nt, Homo sapiens
  source 1..16: mol_type = genomic RNA
ctgtaggcagaggcta

SEQ ID NO: 4820 - RNA, 16 nt, Homo sapiens
  source 1..16: mol_type = genomic RNA
tgtaggcagaggctaa

SEQ ID NO: 4821 - RNA, 16 nt, Homo sapiens
  source 1..16: mol_type = genomic RNA
gtaggcagaggctaaa

SEQ ID NO: 4822 - RNA, 16 nt, Homo sapiens
  source 1..16: mol_type = genomic RNA
taggcagaggctaaac

SEQ ID NO: 4823 - RNA, 16 nt, Homo sapiens
  source 1..16: mol_type = genomic RNA
aggcagaggctaaaca

SEQ ID NO: 4824 - RNA, 16 nt, Homo sapiens
  source 1..16: mol_type = genomic RNA
ggcagaggctaaacaa

SEQ ID NO: 4825 - RNA, 16 nt, Homo sapiens
  source 1..16: mol_type = genomic RNA
gcagaggctaaacaag

SEQ ID NO: 4826 - RNA, 16 nt, Homo sapiens
  source 1..16: mol_type = genomic RNA
cagaggctaaacaaga

SEQ ID NO: 4827 - RNA, 16 nt, Homo sapiens
  source 1..16: mol_type = genomic RNA
agaggctaaacaagag

SEQ ID NO: 4828 - RNA, 16 nt, Homo sapiens
  source 1..16: mol_type = genomic RNA
gaggctaaacaagagt

SEQ ID NO: 4829 - RNA, 16 nt, Homo sapiens
  source 1..16: mol_type = genomic RNA
aggctaaacaagagtt

SEQ ID NO: 4830 - RNA, 16 nt, Homo sapiens
  source 1..16: mol_type = genomic RNA
agttacatcacctgga

SEQ ID NO: 4831 - RNA, 16 nt, Homo sapiens
  source 1..16: mol_type = genomic RNA
tcctgcaatatgtcac

SEQ ID NO: 4832 - RNA, 16 nt, Homo sapiens
  source 1..16: mol_type = genomic RNA
aatatgtcacaatggc

SEQ ID NO: 4833 - RNA, 16 nt, Homo sapiens
  source 1..16: mol_type = genomic RNA
aggggttaggcttagg

SEQ ID NO: 4834 - RNA, 16 nt, Homo sapiens
  source 1..16: mol_type = genomic RNA
ggggttaggcttaggc

SEQ ID NO: 4835 - RNA, 16 nt, Homo sapiens
  source 1..16: mol_type = genomic RNA
gggttaggcttaggct

SEQ ID NO: 4836 - RNA, 16 nt, Homo sapiens
  source 1..16: mol_type = genomic RNA
ggttaggcttaggctt

SEQ ID NO: 4837 - RNA, 16 nt, Homo sapiens
  source 1..16: mol_type = genomic RNA
ttaggcttaggcttag

SEQ ID NO: 4838 - RNA, 16 nt, Homo sapiens
  source 1..16: mol_type = genomic RNA
taggcttaggcttagg

SEQ ID NO: 4839 - RNA, 16 nt, Homo sapiens
  source 1..16: mol_type = genomic RNA
aggcttaggcttaggg

SEQ ID NO: 4840 - RNA, 16 nt, Homo sapiens
  source 1..16: mol_type = genomic RNA
ggcttaggcttagggt

SEQ ID NO: 4841 - RNA, 16 nt, Homo sapiens
  source 1..16: mol_type = genomic RNA
gcttaggcttagggtt

SEQ ID NO: 4842 - RNA, 16 nt, Homo sapiens
  source 1..16: mol_type = genomic RNA
ttaggcttagggttag

SEQ ID NO: 4843 - RNA, 16 nt, Homo sapiens
  source 1..16: mol_type = genomic RNA
taggcttagggttagg

SEQ ID NO: 4844 - RNA, 16 nt, Homo sapiens
  source 1..16: mol_type = genomic RNA
aggcttagggttaggc

SEQ ID NO: 4845 - RNA, 16 nt, Homo sapiens
  source 1..16: mol_type = genomic RNA
ggcttagggttaggct

SEQ ID NO: 4846 - RNA, 16 nt, Homo sapiens
  source 1..16: mol_type = genomic RNA
gcttagggttaggctt

SEQ ID NO: 4847 - RNA, 16 nt, Homo sapiens
  source 1..16: mol_type = genomic RNA
ttagggttaggcttag

SEQ ID NO: 4848 - RNA, 16 nt, Homo sapiens
  source 1..16: mol_type = genomic RNA
tagggttaggcttagg

SEQ ID NO: 4849 - RNA, 16 nt, Homo sapiens
  source 1..16: mol_type = genomic RNA
agggttaggcttaggc

SEQ ID NO: 4850 - RNA, 16 nt, Homo sapiens
  source 1..16: mol_type = genomic RNA
gcttaggcttagggta

SEQ ID NO: 4851 - RNA, 16 nt, Homo sapiens
  source 1..16: mol_type = genomic RNA
cttaggcttagggtaa

SEQ ID NO: 4852 - RNA, 16 nt, Homo sapiens
  source 1..16: mol_type = genomic RNA
ttaggcttagggtaag

SEQ ID NO: 4853 - RNA, 16 nt, Homo sapiens
  source 1..16: mol_type = genomic RNA
taggcttagggtaagg

SEQ ID NO: 4854 - RNA, 16 nt, Homo sapiens
  source 1..16: mol_type = genomic RNA
aggcttagggtaaggc

SEQ ID NO: 4855 - RNA, 16 nt, Homo sapiens
  source 1..16: mol_type = genomic RNA
ggcttagggtaaggct

SEQ ID NO: 4856 - RNA, 16 nt, Homo sapiens
  source 1..16: mol_type = genomic RNA
gcttagggtaaggctt

SEQ ID NO: 4857 - RNA, 16 nt, Homo sapiens
  source 1..16: mol_type = genomic RNA
cttagggtaaggctta

SEQ ID NO: 4858 - RNA, 16 nt, Homo sapiens
  source 1..16: mol_type = genomic RNA
ttagggtaaggcttag

SEQ ID NO: 4859 - RNA, 16 nt, Homo sapiens
  source 1..16: mol_type = genomic RNA
tagggtaaggcttagg

SEQ ID NO: 4860 - RNA, 16 nt, Homo sapiens
  source 1..16: mol_type = genomic RNA
agggtaaggcttaggg

SEQ ID NO: 4861 - RNA, 16 nt, Homo sapiens
  source 1..16: mol_type = genomic RNA
gggtaaggcttagggt

SEQ ID NO: 4862 - RNA, 16 nt, Homo sapiens
  source 1..16: mol_type = genomic RNA
ggtaaggcttagggtt

SEQ ID NO: 4863 - RNA, 16 nt, Homo sapiens
  source 1..16: mol_type = genomic RNA
gtaaggcttagggttc

SEQ ID NO: 4864 - RNA, 16 nt, Homo sapiens
  source 1..16: mol_type = genomic RNA
taaggcttagggttca

SEQ ID NO: 4865 - RNA, 16 nt, Homo sapiens
  source 1..16: mol_type = genomic RNA
aaggcttagggttcag

SEQ ID NO: 4866 - RNA, 16 nt, Homo sapiens
  source 1..16: mol_type = genomic RNA
gtcttcaaagaatggc

SEQ ID NO: 4867 - RNA, 16 nt, Homo sapiens
  source 1..16: mol_type = genomic RNA
tcttcaaagaatggcc

SEQ ID NO: 4868 - RNA, 16 nt, Homo sapiens
  source 1..16: mol_type = genomic RNA
cttcaaagaatggcct

SEQ ID NO: 4869 - RNA, 16 nt, Homo sapiens
  source 1..16: mol_type = genomic RNA
tcaaagaatggccttg

SEQ ID NO: 4870 - RNA, 16 nt, Homo sapiens
  source 1..16: mol_type = genomic RNA
caaagaatggccttgg

SEQ ID NO: 4871 - RNA, 16 nt, Homo sapiens
  source 1..16: mol_type = genomic RNA
aaagaatggccttggt

SEQ ID NO: 4872 - RNA, 16 nt, Homo sapiens
  source 1..16: mol_type = genomic RNA
aagaatggccttggtt

SEQ ID NO: 4873 - RNA, 16 nt, Homo sapiens
  source 1..16: mol_type = genomic RNA
agaatggccttggttt

SEQ ID NO: 4874 - RNA, 16 nt, Homo sapiens
  source 1..16: mol_type = genomic RNA
gaatggccttggtttc

SEQ ID NO: 4875 - RNA, 16 nt, Homo sapiens
  source 1..16: mol_type = genomic RNA
atggccttggtttctg

SEQ ID NO: 4876 - RNA, 16 nt, Homo sapiens
  source 1..16: mol_type = genomic RNA
tggccttggtttctgt

SEQ ID NO: 4877 - RNA, 16 nt, Homo sapiens
  source 1..16: mol_type = genomic RNA
ggccttggtttctgtg

SEQ ID NO: 4878 - RNA, 16 nt, Homo sapiens
  source 1..16: mol_type = genomic RNA
gccttggtttctgtgg

SEQ ID NO: 4879 - RNA, 16 nt, Homo sapiens
  source 1..16: mol_type = genomic RNA
tggtttctgtggacag

SEQ ID NO: 4880 - RNA, 16 nt, Homo sapiens
  source 1..16: mol_type = genomic RNA
ggtttctgtggacagt

SEQ ID NO: 4881 - RNA, 16 nt, Homo sapiens
  source 1..16: mol_type = genomic RNA
tgtggacagtttctcc

SEQ ID NO: 4882 - RNA, 16 nt, Homo sapiens
  source 1..16: mol_type = genomic RNA
tggacagtttctcctc

SEQ ID NO: 4883 - RNA, 16 nt, Homo sapiens
  source 1..16: mol_type = genomic RNA
tctcctcatggaaagg

SEQ ID NO: 4884 - RNA, 16 nt, Homo sapiens
  source 1..16: mol_type = genomic RNA
ctcctcatggaaaggt

SEQ ID NO: 4885 - RNA, 16 nt, Homo sapiens
  source 1..16: mol_type = genomic RNA
tcctcatggaaaggta

SEQ ID NO: 4886 - RNA, 16 nt, Homo sapiens
  source 1..16: mol_type = genomic RNA
cctcatggaaaggtag

SEQ ID NO: 4887 - RNA, 16 nt, Homo sapiens
  source 1..16: mol_type = genomic RNA
ctcatggaaaggtagt

SEQ ID NO: 4888 - RNA, 16 nt, Homo sapiens
  source 1..16: mol_type = genomic RNA
tcatggaaaggtagtg

SEQ ID NO: 4889 - RNA, 16 nt, Homo sapiens
  source 1..16: mol_type = genomic RNA
catggaaaggtagtgt

SEQ ID NO: 4890 - RNA, 16 nt, Homo sapiens
  source 1..16: mol_type = genomic RNA
atggaaaggtagtgtg

SEQ ID NO: 4891 - RNA, 16 nt, Homo sapiens
  source 1..16: mol_type = genomic RNA
tggaaaggtagtgtgt

SEQ ID NO: 4892 - RNA, 16 nt, Homo sapiens
  source 1..16: mol_type = genomic RNA
ggaaaggtagtgtgtt

SEQ ID NO: 4893 - RNA, 16 nt, Homo sapiens
  source 1..16: mol_type = genomic RNA
aaaggtagtgtgttcc

SEQ ID NO: 4894 - RNA, 16 nt, Homo sapiens
  source 1..16: mol_type = genomic RNA
aggtagtgtgttcctg

SEQ ID NO: 4895 - RNA, 16 nt, Homo sapiens
  source 1..16: mol_type = genomic RNA
ggtagtgtgttcctgc

SEQ ID NO: 4896 - RNA, 16 nt, Homo sapiens
  source 1..16: mol_type = genomic RNA
acacacacaacaaaat

SEQ ID NO: 4897 - RNA, 16 nt, Homo sapiens
  source 1..16: mol_type = genomic RNA
aaaatttagctgaggg

SEQ ID NO: 4898 - RNA, 16 nt, Homo sapiens
  source 1..16: mol_type = genomic RNA
aaatttagctgaggga

SEQ ID NO: 4899 - RNA, 16 nt, Homo sapiens
  source 1..16: mol_type = genomic RNA
aatttagctgagggag

SEQ ID NO: 4900 - RNA, 16 nt, Homo sapiens
  source 1..16: mol_type = genomic RNA
atttagctgagggaga

SEQ ID NO: 4901 - RNA, 16 nt, Homo sapiens
  source 1..16: mol_type = genomic RNA
tttagctgagggagat

SEQ ID NO: 4902 - RNA, 16 nt, Homo sapiens
  source 1..16: mol_type = genomic RNA
ttagctgagggagatt

SEQ ID NO: 4903 - RNA, 16 nt, Homo sapiens
  source 1..16: mol_type = genomic RNA
tagctgagggagattg

SEQ ID NO: 4904 - RNA, 16 nt, Homo sapiens
  source 1..16: mol_type = genomic RNA
agctgagggagattga

SEQ ID NO: 4905 - RNA, 16 nt, Homo sapiens
  source 1..16: mol_type = genomic RNA
gctgagggagattgag

SEQ ID NO: 4906 - RNA, 16 nt, Homo sapiens
  source 1..16: mol_type = genomic RNA
ctgagggagattgagt

SEQ ID NO: 4907 - RNA, 16 nt, Homo sapiens
  source 1..16: mol_type = genomic RNA
tgagggagattgagtg

SEQ ID NO: 4908 - RNA, 16 nt, Homo sapiens
  source 1..16: mol_type = genomic RNA
gagggagattgagtga

SEQ ID NO: 4909 - RNA, 16 nt, Homo sapiens
  source 1..16: mol_type = genomic RNA
agggagattgagtgac

SEQ ID NO: 4910 - RNA, 16 nt, Homo sapiens
  source 1..16: mol_type = genomic RNA
gggagattgagtgact

SEQ ID NO: 4911 - RNA, 16 nt, Homo sapiens
  source 1..16: mol_type = genomic RNA
ggagattgagtgactt

SEQ ID NO: 4912 - RNA, 16 nt, Homo sapiens
  source 1..16: mol_type = genomic RNA
tgagtgactttcccag

SEQ ID NO: 4913 - RNA, 16 nt, Homo sapiens
  source 1..16: mol_type = genomic RNA
gagtgactttcccagg

SEQ ID NO: 4914 - RNA, 16 nt, Homo sapiens
  source 1..16: mol_type = genomic RNA
agtgactttcccaggg

SEQ ID NO: 4915 - RNA, 16 nt, Homo sapiens
  source 1..16: mol_type = genomic RNA
gtgactttcccagggt

SEQ ID NO: 4916 - RNA, 16 nt, Homo sapiens
  source 1..16: mol_type = genomic RNA
tgactttcccagggtc

SEQ ID NO: 4917 - RNA, 16 nt, Homo sapiens
  source 1..16: mol_type = genomic RNA
gactttcccagggtca

SEQ ID NO: 4918 - RNA, 16 nt, Homo sapiens
  source 1..16: mol_type = genomic RNA
actttcccagggtcac

SEQ ID NO: 4919 - RNA, 16 nt, Homo sapiens
  source 1..16: mol_type = genomic RNA
ctttcccagggtcaca

SEQ ID NO: 4920 - RNA, 16 nt, Homo sapiens
  source 1..16: mol_type = genomic RNA
tttcccagggtcacac

SEQ ID NO: 4921 - RNA, 16 nt, Homo sapiens
  source 1..16: mol_type = genomic RNA
ttcccagggtcacaca

SEQ ID NO: 4922 - RNA, 16 nt, Homo sapiens
  source 1..16: mol_type = genomic RNA
tcccagggtcacacag

SEQ ID NO: 4923 - RNA, 16 nt, Homo sapiens
  source 1..16: mol_type = genomic RNA
cccagggtcacacagc

SEQ ID NO: 4924 - RNA, 16 nt, Homo sapiens
  source 1..16: mol_type = genomic RNA
ccagggtcacacagct

SEQ ID NO: 4925 - RNA, 16 nt, Homo sapiens
  source 1..16: mol_type = genomic RNA
cagggtcacacagcta

SEQ ID NO: 4926 - RNA, 16 nt, Homo sapiens
  source 1..16: mol_type = genomic RNA
agggtcacacagctac

SEQ ID NO: 4927 - RNA, 16 nt, Homo sapiens
  source 1..16: mol_type = genomic RNA
gggtcacacagctact

SEQ ID NO: 4928 - RNA, 16 nt, Homo sapiens
  source 1..16: mol_type = genomic RNA
ggtcacacagctacta

SEQ ID NO: 4929 - RNA, 16 nt, Homo sapiens
  source 1..16: mol_type = genomic RNA
gtcacacagctactaa

SEQ ID NO: 4930 - RNA, 16 nt, Homo sapiens
  source 1..16: mol_type = genomic RNA
tcacacagctactaat

SEQ ID NO: 4931 - RNA, 16 nt, Homo sapiens
  source 1..16: mol_type = genomic RNA
acacagctactaatag

SEQ ID NO: 4932 - RNA, 16 nt, Homo sapiens
  source 1..16: mol_type = genomic RNA
cacagctactaatagc

SEQ ID NO: 4933 - RNA, 16 nt, Homo sapiens
  source 1..16: mol_type = genomic RNA
acagctactaatagca

SEQ ID NO: 4934 - RNA, 16 nt, Homo sapiens
  source 1..16: mol_type = genomic RNA
cagctactaatagcag

SEQ ID NO: 4935 - RNA, 16 nt, Homo sapiens
  source 1..16: mol_type = genomic RNA
agctactaatagcaga

SEQ ID NO: 4936 - RNA, 16 nt, Homo sapiens
  source 1..16: mol_type = genomic RNA
gctactaatagcagag

SEQ ID NO: 4937 - RNA, 16 nt, Homo sapiens
  source 1..16: mol_type = genomic RNA
actaatagcagagtag

SEQ ID NO: 4938 - RNA, 16 nt, Homo sapiens
  source 1..16: mol_type = genomic RNA
aatagcagagtagtgt

SEQ ID NO: 4939 - RNA, 16 nt, Homo sapiens
  source 1..16: mol_type = genomic RNA
tcatatgggaatactg

SEQ ID NO: 4940 - RNA, 16 nt, Homo sapiens
  source 1..16: mol_type = genomic RNA
catatgggaatactga

SEQ ID NO: 4941 - RNA, 16 nt, Homo sapiens
  source 1..16: mol_type = genomic RNA
atatgggaatactgaa

SEQ ID NO: 4942 - RNA, 16 nt, Homo sapiens
  source 1..16: mol_type = genomic RNA
tatgggaatactgaac

SEQ ID NO: 4943 - RNA, 16 nt, Homo sapiens
  source 1..16: mol_type = genomic RNA
atgggaatactgaaca

SEQ ID NO: 4944 - RNA, 16 nt, Homo sapiens
  source 1..16: mol_type = genomic RNA
tgggaatactgaacac

SEQ ID NO: 4945 - RNA, 16 nt, Homo sapiens
  source 1..16: mol_type = genomic RNA
gggaatactgaacaca

SEQ ID NO: 4946 - RNA, 16 nt, Homo sapiens
  source 1..16: mol_type = genomic RNA
ggaatactgaacacag

SEQ ID NO: 4947 - RNA, 16 nt, Homo sapiens
  source 1..16: mol_type = genomic RNA
gaatactgaacacaga

SEQ ID NO: 4948 - RNA, 16 nt, Homo sapiens
  source 1..16: mol_type = genomic RNA
actgaacacagaaatg

SEQ ID NO: 4949 - RNA, 16 nt, Homo sapiens
  source 1..16: mol_type = genomic RNA
ctgaacacagaaatga

SEQ ID NO: 4950 - RNA, 16 nt, Homo sapiens
  source 1..16: mol_type = genomic RNA
tgaacacagaaatgaa

SEQ ID NO: 4951 - RNA, 16 nt, Homo sapiens
  source 1..16: mol_type = genomic RNA
gaacacagaaatgaac

SEQ ID NO: 4952 - RNA, 16 nt, Homo sapiens
  source 1..16: mol_type = genomic RNA
aacacagaaatgaacc

SEQ ID NO: 4953 - RNA, 16 nt, Homo sapiens
  source 1..16: mol_type = genomic RNA
acacagaaatgaacca

SEQ ID NO: 4954 - RNA, 16 nt, Homo sapiens
  source 1..16: mol_type = genomic RNA
cacagaaatgaaccaa

SEQ ID NO: 4955 - RNA, 16 nt, Homo sapiens
  source 1..16: mol_type = genomic RNA
acagaaatgaaccaat

SEQ ID NO: 4956 - RNA, 16 nt, Homo sapiens
  source 1..16: mol_type = genomic RNA
agaaatgaaccaatgg

SEQ ID NO: 4957 - RNA, 16 nt, Homo sapiens
  source 1..16: mol_type = genomic RNA
gaaatgaaccaatgga

SEQ ID NO: 4958 - RNA, 16 nt, Homo sapiens
  source 1..16: mol_type = genomic RNA
aaatgaaccaatggaa

SEQ ID NO: 4959 - RNA, 16 nt, Homo sapiens
  source 1..16: mol_type = genomic RNA
aatgaaccaatggaaa

SEQ ID NO: 4960 - RNA, 16 nt, Homo sapiens
  source 1..16: mol_type = genomic RNA
atgaaccaatggaaac

SEQ ID NO: 4961 - RNA, 16 nt, Homo sapiens
  source 1..16: mol_type = genomic RNA
tgaaccaatggaaaca

SEQ ID NO: 4962 - RNA, 16 nt, Homo sapiens
  source 1..16: mol_type = genomic RNA
gaaccaatggaaacat

SEQ ID NO: 4963 - RNA, 16 nt, Homo sapiens
  source 1..16: mol_type = genomic RNA
aaccaatggaaacatc

SEQ ID NO: 4964 - RNA, 16 nt, Homo sapiens
  source 1..16: mol_type = genomic RNA
accaatggaaacatcc

SEQ ID NO: 4965 - RNA, 16 nt, Homo sapiens
  source 1..16: mol_type = genomic RNA
ccaatggaaacatcct

SEQ ID NO: 4966 - RNA, 16 nt, Homo sapiens
  source 1..16: mol_type = genomic RNA
aatggaaacatcctac

SEQ ID NO: 4967 - RNA, 16 nt, Homo sapiens
  source 1..16: mol_type = genomic RNA
atggaaacatcctacg

SEQ ID NO: 4968 - RNA, 16 nt, Homo sapiens
  source 1..16: mol_type = genomic RNA
tggaaacatcctacgt

SEQ ID NO: 4969 - RNA, 16 nt, Homo sapiens
  source 1..16: mol_type = genomic RNA
ggaaacatcctacgtt

SEQ ID NO: 4970 - RNA, 16 nt, Homo sapiens
  source 1..16: mol_type = genomic RNA
cctacgttccaaaagc

SEQ ID NO: 4971 - RNA, 16 nt, Homo sapiens
  source 1..16: mol_type = genomic RNA
ctacgttccaaaagcc

SEQ ID NO: 4972 - RNA, 16 nt, Homo sapiens
  source 1..16: mol_type = genomic RNA
tacgttccaaaagcct

SEQ ID NO: 4973 - RNA, 16 nt, Homo sapiens
  source 1..16: mol_type = genomic RNA
acgttccaaaagccta

SEQ ID NO: 4974 - RNA, 16 nt, Homo sapiens
  source 1..16: mol_type = genomic RNA
cgttccaaaagcctac

SEQ ID NO: 4975 - RNA, 16 nt, Homo sapiens
  source 1..16: mol_type = genomic RNA
ttccaaaagcctactc

SEQ ID NO: 4976 - RNA, 16 nt, Homo sapiens
  source 1..16: mol_type = genomic RNA
tccaaaagcctactca

SEQ ID NO: 4977 - RNA, 16 nt, Homo sapiens
  source 1..16: mol_type = genomic RNA
ccaaaagcctactcaa

SEQ ID NO: 4978 - RNA, 16 nt, Homo sapiens
  source 1..16: mol_type = genomic RNA
caaaagcctactcaag

SEQ ID NO: 4979 - RNA, 16 nt, Homo sapiens
  source 1..16: mol_type = genomic RNA
aaaagcctactcaagc

SEQ ID NO: 4980 - RNA, 16 nt, Homo sapiens
  source 1..16: mol_type = genomic RNA
aaagcctactcaagcc

SEQ ID NO: 4981 - RNA, 16 nt, Homo sapiens
  source 1..16: mol_type = genomic RNA
aagcctactcaagcca

SEQ ID NO: 4982 - RNA, 16 nt, Homo sapiens
  source 1..16: mol_type = genomic RNA
agcctactcaagccat

SEQ ID NO: 4983 - RNA, 16 nt, Homo sapiens
  source 1..16: mol_type = genomic RNA
gcctactcaagccatt

SEQ ID NO: 4984 - RNA, 16 nt, Homo sapiens
  source 1..16: mol_type = genomic RNA
acttatgaatggcaga

SEQ ID NO: 4985 - RNA, 16 nt, Homo sapiens
  source 1..16: mol_type = genomic RNA
cttatgaatggcagag

SEQ ID NO: 4986 - RNA, 16 nt, Homo sapiens
  source 1..16: mol_type = genomic RNA
ttatgaatggcagaga

SEQ ID NO: 4987 - RNA, 16 nt, Homo sapiens
  source 1..16: mol_type = genomic RNA
tatgaatggcagagat

SEQ ID NO: 4988 - RNA, 16 nt, Homo sapiens
  source 1..16: mol_type = genomic RNA
atgaatggcagagatc

SEQ ID NO: 4989 - RNA, 16 nt, Homo sapiens
  source 1..16: mol_type = genomic RNA
tgaatggcagagatct

SEQ ID NO: 4990 - RNA, 16 nt, Homo sapiens
  source 1..16: mol_type = genomic RNA
gaatggcagagatcta

SEQ ID NO: 4991 - RNA, 16 nt, Homo sapiens
  source 1..16: mol_type = genomic RNA
aatggcagagatctac

SEQ ID NO: 4992 - RNA, 16 nt, Homo sapiens
  source 1..16: mol_type = genomic RNA
atggcagagatctaca

SEQ ID NO: 4993 - RNA, 16 nt, Homo sapiens
  source 1..16: mol_type = genomic RNA
tggcagagatctacag

SEQ ID NO: 4994 - RNA, 16 nt, Homo sapiens
  source 1..16: mol_type = genomic RNA
ggcagagatctacaga

SEQ ID NO: 4995 - RNA, 16 nt, Homo sapiens
  source 1..16: mol_type = genomic RNA
gcagagatctacagat

SEQ ID NO: 4996 - RNA, 16 nt, Homo sapiens
  source 1..16: mol_type = genomic RNA
aagaaatgatgctcac

SEQ ID NO: 4997 - RNA, 16 nt, Homo sapiens
  source 1..16: mol_type = genomic RNA
agaaatgatgctcacc

SEQ ID NO: 4998 - RNA, 16 nt, Homo sapiens
  source 1..16: mol_type = genomic RNA
gaaatgatgctcacca

SEQ ID NO: 4999 - RNA, 16 nt, Homo sapiens
  source 1..16: mol_type = genomic RNA
aaatgatgctcaccag

SEQ ID NO: 5000 - RNA, 16 nt, Homo sapiens
  source 1..16: mol_type = genomic RNA
aatgatgctcaccagc

SEQ ID NO: 5001 - RNA, 16 nt, Homo sapiens
  source 1..16: mol_type = genomic RNA
atgatgctcaccagct

SEQ ID NO: 5002 - RNA, 16 nt, Homo sapiens
  source 1..16: mol_type = genomic RNA
tgatgctcaccagctg

SEQ ID NO: 5003 - RNA, 16 nt, Homo sapiens
  source 1..16: mol_type = genomic RNA
gatgctcaccagctgg

SEQ ID NO: 5004 - RNA, 16 nt, Homo sapiens
  source 1..16: mol_type = genomic RNA
tactgctaccacccca

SEQ ID NO: 5005 - RNA, 16 nt, Homo sapiens
  source 1..16: mol_type = genomic RNA
actgctaccaccccac

SEQ ID NO: 5006 - RNA, 16 nt, Homo sapiens
  source 1..16: mol_type = genomic RNA
ctgctaccaccccaca

SEQ ID NO: 5007 - RNA, 16 nt, Homo sapiens
  source 1..16: mol_type = genomic RNA
tgctaccaccccacaa

SEQ ID NO: 5008 - RNA, 16 nt, Homo sapiens
  source 1..16: mol_type = genomic RNA
gctaccaccccacaac

SEQ ID NO: 5009 - RNA, 16 nt, Homo sapiens
  source 1..16: mol_type = genomic RNA
ctaccaccccacaacc

SEQ ID NO: 5010 - RNA, 16 nt, Homo sapiens
  source 1..16: mol_type = genomic RNA
taccaccccacaaccc

SEQ ID NO: 5011 - RNA, 16 nt, Homo sapiens
  source 1..16: mol_type = genomic RNA
agcatactggacaaat

SEQ ID NO: 5012 - RNA, 16 nt, Homo sapiens
  source 1..16: mol_type = genomic RNA
gcatactggacaaatg

SEQ ID NO: 5013 - RNA, 16 nt, Homo sapiens
  source 1..16: mol_type = genomic RNA
atactggacaaatgtc

SEQ ID NO: 5014 - RNA, 16 nt, Homo sapiens
  source 1..16: mol_type = genomic RNA
tactggacaaatgtct

SEQ ID NO: 5015 - RNA, 16 nt, Homo sapiens
  source 1..16: mol_type = genomic RNA
actggacaaatgtcta

SEQ ID NO: 5016 - RNA, 16 nt, Homo sapiens
  source 1..16: mol_type = genomic RNA
tggacaaatgtctaag

SEQ ID NO: 5017 - RNA, 16 nt, Homo sapiens
  source 1..16: mol_type = genomic RNA
ggacaaatgtctaagc

SEQ ID NO: 5018 - RNA, 16 nt, Homo sapiens
  source 1..16: mol_type = genomic RNA
gacaaatgtctaagcc

SEQ ID NO: 5019 - RNA, 16 nt, Homo sapiens
  source 1..16: mol_type = genomic RNA
acaaatgtctaagcct

SEQ ID NO: 5020 - RNA, 16 nt, Homo sapiens
  source 1..16: mol_type = genomic RNA
aatgtctaagcctcgt

SEQ ID NO: 5021 - RNA, 16 nt, Homo sapiens
  source 1..16: mol_type = genomic RNA
atgtctaagcctcgtg

SEQ ID NO: 5022 - RNA, 16 nt, Homo sapiens
  source 1..16: mol_type = genomic RNA
tgtctaagcctcgtgg

SEQ ID NO: 5023 - RNA, 16 nt, Homo sapiens
  source 1..16: mol_type = genomic RNA
gtctaagcctcgtggt

SEQ ID NO: 5024 - RNA, 16 nt, Homo sapiens
  source 1..16: mol_type = genomic RNA
tctaagcctcgtggtt

SEQ ID NO: 5025 - RNA, 16 nt, Homo sapiens
  source 1..16: mol_type = genomic RNA
ctaagcctcgtggtta

SEQ ID NO: 5026 - RNA, 16 nt, Homo sapiens
  source 1..16: mol_type = genomic RNA
taagcctcgtggttag

SEQ ID NO: 5027 - RNA, 16 nt, Homo sapiens
  source 1..16: mol_type = genomic RNA
aagcctcgtggttagt

SEQ ID NO: 5028 - RNA, 16 nt, Homo sapiens
  source 1..16: mol_type = genomic RNA
agcctcgtggttagtg

SEQ ID NO: 5029 - RNA, 16 nt, Homo sapiens
  source 1..16: mol_type = genomic RNA
gcctcgtggttagtgg

SEQ ID NO: 5030 - RNA, 16 nt, Homo sapiens
  source 1..16: mol_type = genomic RNA
cctcgtggttagtggg

SEQ ID NO: 5031 - RNA, 16 nt, Homo sapiens
  source 1..16: mol_type = genomic RNA
ctcgtggttagtgggg

SEQ ID NO: 5032 - RNA, 16 nt, Homo sapiens
  source 1..16: mol_type = genomic RNA
tcgtggttagtgggga

SEQ ID NO: 5033 - RNA, 16 nt, Homo sapiens
  source 1..16: mol_type = genomic RNA
cgtggttagtggggac

SEQ ID NO: 5034 - RNA, 16 nt, Homo sapiens
  source 1..16: mol_type = genomic RNA
gtggttagtggggaca

SEQ ID NO: 5035 - RNA, 16 nt, Homo sapiens
  source 1..16: mol_type = genomic RNA
tggttagtggggacat

SEQ ID NO: 5036 - RNA, 16 nt, Homo sapiens
  source 1..16: mol_type = genomic RNA
ggttagtggggacatt

SEQ ID NO: 5037 - RNA, 16 nt, Homo sapiens
  source 1..16: mol_type = genomic RNA
gttagtggggacattg

SEQ ID NO: 5038 - RNA, 16 nt, Homo sapiens
  source 1..16: mol_type = genomic RNA
ttagtggggacattgc

SEQ ID NO: 5039 - RNA, 16 nt, Homo sapiens
  source 1..16: mol_type = genomic RNA
tagtggggacattgct

SEQ ID NO: 5040 - RNA, 16 nt, Homo sapiens
  source 1..16: mol_type = genomic RNA
agtggggacattgctg

SEQ ID NO: 5041 - RNA, 16 nt, Homo sapiens
  source 1..16: mol_type = genomic RNA
gtggggacattgctgg

SEQ ID NO: 5042 - RNA, 16 nt, Homo sapiens
  source 1..16: mol_type = genomic RNA
tggggacattgctggt

SEQ ID NO: 5043 - RNA, 16 nt, Homo sapiens
  source 1..16: mol_type = genomic RNA
ggggacattgctggtg

SEQ ID NO: 5044 - RNA, 16 nt, Homo sapiens
  source 1..16: mol_type = genomic RNA
gggacattgctggtgg

SEQ ID NO: 5045 - RNA, 16 nt, Homo sapiens
  source 1..16: mol_type = genomic RNA
ggacattgctggtgga

SEQ ID NO: 5046 - RNA, 16 nt, Homo sapiens
  source 1..16: mol_type = genomic RNA
gacattgctggtggag

SEQ ID NO: 5047 - RNA, 16 nt, Homo sapiens
  source 1..16: mol_type = genomic RNA
acattgctggtggagt

SEQ ID NO: 5048 - RNA, 16 nt, Homo sapiens
  source 1..16: mol_type = genomic RNA
cattgctggtggagtc

SEQ ID NO: 5049 - RNA, 16 nt, Homo sapiens
  source 1..16: mol_type = genomic RNA
attgctggtggagtct

SEQ ID NO: 5050 - RNA, 16 nt, Homo sapiens
  source 1..16: mol_type = genomic RNA
ttgctggtggagtctg

SEQ ID NO: 5051 - RNA, 16 nt, Homo sapiens
  source 1..16: mol_type = genomic RNA
tgctggtggagtctga

SEQ ID NO: 5052 - RNA, 16 nt, Homo sapiens
  source 1..16: mol_type = genomic RNA
gctggtggagtctgaa

SEQ ID NO: 5053 - RNA, 16 nt, Homo sapiens
  source 1..16: mol_type = genomic RNA
ctggtggagtctgaaa

SEQ ID NO: 5054 - RNA, 16 nt, Homo sapiens
  source 1..16: mol_type = genomic RNA
tggtggagtctgaaat

SEQ ID NO: 5055 - RNA, 16 nt, Homo sapiens
  source 1..16: mol_type = genomic RNA
ggtggagtctgaaatt

SEQ ID NO: 5056 - RNA, 16 nt, Homo sapiens
  source 1..16: mol_type = genomic RNA
ttgtcatgcagtgact

SEQ ID NO: 5057 - RNA, 16 nt, Homo sapiens
  source 1..16: mol_type = genomic RNA
tgtcatgcagtgactc

SEQ ID NO: 5058 - RNA, 16 nt, Homo sapiens
  source 1..16: mol_type = genomic RNA
gtcatgcagtgactca

SEQ ID NO: 5059 - RNA, 16 nt, Homo sapiens
  source 1..16: mol_type = genomic RNA
tcatgcagtgactcac

SEQ ID NO: 5060 - RNA, 16 nt, Homo sapiens
  source 1..16: mol_type = genomic RNA
catgcagtgactcact

SEQ ID NO: 5061 - RNA, 16 nt, Homo sapiens
  source 1..16: mol_type = genomic RNA
atgcagtgactcactc

SEQ ID NO: 5062 - RNA, 16 nt, Homo sapiens
  source 1..16: mol_type = genomic RNA
tgcagtgactcactca

SEQ ID NO: 5063 - RNA, 16 nt, Homo sapiens
  source 1..16: mol_type = genomic RNA
gcagtgactcactcaa

SEQ ID NO: 5064 - RNA, 16 nt, Homo sapiens
  source 1..16: mol_type = genomic RNA
cagtgactcactcaag

SEQ ID NO: 5065 - RNA, 16 nt, Homo sapiens
  source 1..16: mol_type = genomic RNA
agtgactcactcaagc

SEQ ID NO: 5066 - RNA, 16 nt, Homo sapiens
  source 1..16: mol_type = genomic RNA
gtgactcactcaagct

SEQ ID NO: 5067 - RNA, 16 nt, Homo sapiens
  source 1..16: mol_type = genomic RNA
tgactcactcaagctt

SEQ ID NO: 5068 - RNA, 16 nt, Homo sapiens
  source 1..16: mol_type = genomic RNA
ctcactcaagcttagg

SEQ ID NO: 5069 - RNA, 16 nt, Homo sapiens
  source 1..16: mol_type = genomic RNA
tcactcaagcttaggc

SEQ ID NO: 5070 - RNA, 16 nt, Homo sapiens
  source 1..16: mol_type = genomic RNA
cactcaagcttaggca

SEQ ID NO: 5071 - RNA, 16 nt, Homo sapiens
  source 1..16: mol_type = genomic RNA
actcaagcttaggcag

SEQ ID NO: 5072 - RNA, 16 nt, Homo sapiens
  source 1..16: mol_type = genomic RNA
ctcaagcttaggcaga

SEQ ID NO: 5073 - RNA, 16 nt, Homo sapiens
  source 1..16: mol_type = genomic RNA
tcaagcttaggcagat

SEQ ID NO: 5074 - RNA, 16 nt, Homo sapiens
  source 1..16: mol_type = genomic RNA
caagcttaggcagatt

SEQ ID NO: 5075 - RNA, 16 nt, Homo sapiens
  source 1..16: mol_type = genomic RNA
gcttaggcagatttgg

SEQ ID NO: 5076 - RNA, 16 nt, Homo sapiens
  source 1..16: mol_type = genomic RNA
taggcagatttggtga

SEQ ID NO: 5077 - RNA, 16 nt, Homo sapiens
  source 1..16: mol_type = genomic RNA
aggcagatttggtgat

SEQ ID NO: 5078 - RNA, 16 nt, Homo sapiens
  source 1..16: mol_type = genomic RNA
ggcagatttggtgata

SEQ ID NO: 5079 - RNA, 16 nt, Homo sapiens
  source 1..16: mol_type = genomic RNA
tggtgatatatgacac

SEQ ID NO: 5080 - RNA, 16 nt, Homo sapiens
  source 1..16: mol_type = genomic RNA
atatgacacagagatg

SEQ ID NO: 5081 - RNA, 16 nt, Homo sapiens
  source 1..16: mol_type = genomic RNA
tatgacacagagatgc

SEQ ID NO: 5082 - RNA, 16 nt, Homo sapiens
  source 1..16: mol_type = genomic RNA
atgacacagagatgca

SEQ ID NO: 5083 - RNA, 16 nt, Homo sapiens
  source 1..16: mol_type = genomic RNA
tgacacagagatgcaa

SEQ ID NO: 5084 - RNA, 16 nt, Homo sapiens
  source 1..16: mol_type = genomic RNA
gacacagagatgcaaa

SEQ ID NO: 5085 - RNA, 16 nt, Homo sapiens
  source 1..16: mol_type = genomic RNA
acacagagatgcaaag

SEQ ID NO: 5086 - RNA, 16 nt, Homo sapiens
  source 1..16: mol_type = genomic RNA
cacagagatgcaaaga

SEQ ID NO: 5087 - RNA, 16 nt, Homo sapiens
  source 1..16: mol_type = genomic RNA
acagagatgcaaagaa

SEQ ID NO: 5088 - RNA, 16 nt, Homo sapiens
  source 1..16: mol_type = genomic RNA
cagagatgcaaagaaa

SEQ ID NO: 5089 - RNA, 16 nt, Homo sapiens
  source 1..16: mol_type = genomic RNA
agagatgcaaagaaat

SEQ ID NO: 5090 - RNA, 16 nt, Homo sapiens
  source 1..16: mol_type = genomic RNA
gagatgcaaagaaatg

SEQ ID NO: 5091 - RNA, 16 nt, Homo sapiens
  source 1..16: mol_type = genomic RNA
atgttgtagctgacac

SEQ ID NO: 5092 - RNA, 16 nt, Homo sapiens
  source 1..16: mol_type = genomic RNA
tgttgtagctgacaca

SEQ ID NO: 5093 - RNA, 16 nt, Homo sapiens
  source 1..16: mol_type = genomic RNA
gttgtagctgacacac

SEQ ID NO: 5094 - RNA, 16 nt, Homo sapiens
  source 1..16: mol_type = genomic RNA
ttgtagctgacacaca

SEQ ID NO: 5095 - RNA, 16 nt, Homo sapiens
  source 1..16: mol_type = genomic RNA
tgtagctgacacacac

SEQ ID NO: 5096 - RNA, 16 nt, Homo sapiens
  source 1..16: mol_type = genomic RNA
gtagctgacacacaca

SEQ ID NO: 5097 - RNA, 16 nt, Homo sapiens
  source 1..16: mol_type = genomic RNA
tagctgacacacacag

SEQ ID NO: 5098 - RNA, 16 nt, Homo sapiens
  source 1..16: mol_type = genomic RNA
agctgacacacacagg

SEQ ID NO: 5099 - RNA, 16 nt, Homo sapiens
  source 1..16: mol_type = genomic RNA
gctgacacacacaggc

SEQ ID NO: 5100 - RNA, 16 nt, Homo sapiens
  source 1..16: mol_type = genomic RNA
ctgacacacacaggct

SEQ ID NO: 5101 - RNA, 16 nt, Homo sapiens
  source 1..16: mol_type = genomic RNA
tgacacacacaggctg

SEQ ID NO: 5102 - RNA, 16 nt, Homo sapiens
  source 1..16: mol_type = genomic RNA
gacacacacaggctgg

SEQ ID NO: 5103 - RNA, 16 nt, Homo sapiens
  source 1..16: mol_type = genomic RNA
cacacacaggctggct

SEQ ID NO: 5104 - RNA, 16 nt, Homo sapiens
  source 1..16: mol_type = genomic RNA
acacacaggctggctc

SEQ ID NO: 5105 - RNA, 16 nt, Homo sapiens
  source 1..16: mol_type = genomic RNA
cacacaggctggctct

SEQ ID NO: 5106 - RNA, 16 nt, Homo sapiens
  source 1..16: mol_type = genomic RNA
acacaggctggctctg

SEQ ID NO: 5107 - RNA, 16 nt, Homo sapiens
  source 1..16: mol_type = genomic RNA
cacaggctggctctgg

SEQ ID NO: 5108 - RNA, 16 nt, Homo sapiens
  source 1..16: mol_type = genomic RNA
gctggctctgggagat

SEQ ID NO: 5109 - RNA, 16 nt, Homo sapiens
  source 1..16: mol_type = genomic RNA
ctggctctgggagatg

SEQ ID NO: 5110 - RNA, 16 nt, Homo sapiens
  source 1..16: mol_type = genomic RNA
tggctctgggagatgc

SEQ ID NO: 5111 - RNA, 16 nt, Homo sapiens
  source 1..16: mol_type = genomic RNA
ggctctgggagatgca

SEQ ID NO: 5112 - RNA, 16 nt, Homo sapiens
  source 1..16: mol_type = genomic RNA
gctctgggagatgcag

SEQ ID NO: 5113 - RNA, 16 nt, Homo sapiens
  source 1..16: mol_type = genomic RNA
ctctgggagatgcaga

SEQ ID NO: 5114 - RNA, 16 nt, Homo sapiens
  source 1..16: mol_type = genomic RNA
tctgggagatgcagaa

SEQ ID NO: 5115 - RNA, 16 nt, Homo sapiens
  source 1..16: mol_type = genomic RNA
ctgggagatgcagaag

SEQ ID NO: 5116 - RNA, 16 nt, Homo sapiens
  source 1..16: mol_type = genomic RNA
tgggagatgcagaagg

SEQ ID NO: 5117 - RNA, 16 nt, Homo sapiens
  source 1..16: mol_type = genomic RNA
gggagatgcagaagga

SEQ ID NO: 5118 - RNA, 16 nt, Homo sapiens
  source 1..16: mol_type = genomic RNA
ggagatgcagaaggag

SEQ ID NO: 5119 - RNA, 16 nt, Homo sapiens
  source 1..16: mol_type = genomic RNA
gagatgcagaaggagc

SEQ ID NO: 5120 - RNA, 16 nt, Homo sapiens
  source 1..16: mol_type = genomic RNA
agatgcagaaggagca

SEQ ID NO: 5121 - RNA, 16 nt, Homo sapiens
  source 1..16: mol_type = genomic RNA
gatgcagaaggagcac

SEQ ID NO: 5122 - RNA, 16 nt, Homo sapiens
  source 1..16: mol_type = genomic RNA
atgcagaaggagcacg

SEQ ID NO: 5123 - RNA, 16 nt, Homo sapiens
  source 1..16: mol_type = genomic RNA
tgcagaaggagcacgt

SEQ ID NO: 5124 - RNA, 16 nt, Homo sapiens
  source 1..16: mol_type = genomic RNA
gcagaaggagcacgtc

SEQ ID NO: 5125 - RNA, 16 nt, Homo sapiens
  source 1..16: mol_type = genomic RNA
cagaaggagcacgtcc

SEQ ID NO: 5126 - RNA, 16 nt, Homo sapiens
  source 1..16: mol_type = genomic RNA
agaaggagcacgtccc

SEQ ID NO: 5127 - RNA, 16 nt, Homo sapiens
  source 1..16: mol_type = genomic RNA
gaaggagcacgtcccc

SEQ ID NO: 5128 - RNA, 16 nt, Homo sapiens
  source 1..16: mol_type = genomic RNA
aaggagcacgtccccc

SEQ ID NO: 5129 - RNA, 16 nt, Homo sapiens
  source 1..16: mol_type = genomic RNA
aggagcacgtccccca

SEQ ID NO: 5130 - RNA, 16 nt, Homo sapiens
  source 1..16: mol_type = genomic RNA
ggagcacgtcccccaa

SEQ ID NO: 5131 - RNA, 16 nt, Homo sapiens
  source 1..16: mol_type = genomic RNA
gagcacgtcccccaaa

SEQ ID NO: 5132 - RNA, 16 nt, Homo sapiens
  source 1..16: mol_type = genomic RNA
agcacgtcccccaaaa

SEQ ID NO: 5133 - RNA, 16 nt, Homo sapiens
  source 1..16: mol_type = genomic RNA
gcacgtcccccaaaat

SEQ ID NO: 5134 - RNA, 16 nt, Homo sapiens
  source 1..16: mol_type = genomic RNA
cacgtcccccaaaatg

SEQ ID NO: 5135 - RNA, 16 nt, Homo sapiens
  source 1..16: mol_type = genomic RNA
acgtcccccaaaatga

SEQ ID NO: 5136 - RNA, 16 nt, Homo sapiens
  source 1..16: mol_type = genomic RNA
cgtcccccaaaatgaa

SEQ ID NO: 5137 - RNA, 16 nt, Homo sapiens
  source 1..16: mol_type = genomic RNA
gtcccccaaaatgaag

SEQ ID NO: 5138 - RNA, 16 nt, Homo sapiens
  source 1..16: mol_type = genomic RNA
tcccccaaaatgaagc

SEQ ID NO: 5139 - RNA, 16 nt, Homo sapiens
  source 1..16: mol_type = genomic RNA
cccccaaaatgaagcc

SEQ ID NO: 5140 - RNA, 16 nt, Homo sapiens
  source 1..16: mol_type = genomic RNA
ccccaaaatgaagcca

SEQ ID NO: 5141 - RNA, 16 nt, Homo sapiens
  source 1..16: mol_type = genomic RNA
cccaaaatgaagccag

SEQ ID NO: 5142 - RNA, 16 nt, Homo sapiens
  source 1..16: mol_type = genomic RNA
ccaaaatgaagccaga

SEQ ID NO: 5143 - RNA, 16 nt, Homo sapiens
  source 1..16: mol_type = genomic RNA
caaaatgaagccagac

SEQ ID NO: 5144 - RNA, 16 nt, Homo sapiens
  source 1..16: mol_type = genomic RNA
aaaatgaagccagaca

SEQ ID NO: 5145 - RNA, 16 nt, Homo sapiens
  source 1..16: mol_type = genomic RNA
aaatgaagccagacag

SEQ ID NO: 5146 - RNA, 16 nt, Homo sapiens
  source 1..16: mol_type = genomic RNA
aatgaagccagacaga

SEQ ID NO: 5147 - RNA, 16 nt, Homo sapiens
  source 1..16: mol_type = genomic RNA
atgaagccagacagac

SEQ ID NO: 5148 - RNA, 16 nt, Homo sapiens
  source 1..16: mol_type = genomic RNA
tgaagccagacagaca

SEQ ID NO: 5149 - RNA, 16 nt, Homo sapiens
  source 1..16: mol_type = genomic RNA
gaagccagacagacat

SEQ ID NO: 5150 - RNA, 16 nt, Homo sapiens
  source 1..16: mol_type = genomic RNA
aagccagacagacatc

SEQ ID NO: 5151 - RNA, 16 nt, Homo sapiens
  source 1..16: mol_type = genomic RNA
agccagacagacatcc

SEQ ID NO: 5152 - RNA, 16 nt, Homo sapiens
  source 1..16: mol_type = genomic RNA
gccagacagacatcct

SEQ ID NO: 5153 - RNA, 16 nt, Homo sapiens
  source 1..16: mol_type = genomic RNA
ccagacagacatcctt

SEQ ID NO: 5154 - RNA, 16 nt, Homo sapiens
  source 1..16: mol_type = genomic RNA
acagacatccttaagg

SEQ ID NO: 5155 - RNA, 16 nt, Homo sapiens
  source 1..16: mol_type = genomic RNA
cagacatccttaagga

SEQ ID NO: 5156 - RNA, 16 nt, Homo sapiens
  source 1..16: mol_type = genomic RNA
agacatccttaaggaa

SEQ ID NO: 5157 - RNA, 16 nt, Homo sapiens
  source 1..16: mol_type = genomic RNA
gacatccttaaggaag

SEQ ID NO: 5158 - RNA, 16 nt, Homo sapiens
  source 1..16: mol_type = genomic RNA
acatccttaaggaagg

SEQ ID NO: 5159 - RNA, 16 nt, Homo sapiens
  source 1..16: mol_type = genomic RNA
catccttaaggaagga

SEQ ID NO: 5160 - RNA, 16 nt, Homo sapiens
  source 1..16: mol_type = genomic RNA
atccttaaggaaggag

SEQ ID NO: 5161 - RNA, 16 nt, Homo sapiens
  source 1..16: mol_type = genomic RNA
tccttaaggaaggagc

SEQ ID NO: 5162 - RNA, 16 nt, Homo sapiens
  source 1..16: mol_type = genomic RNA
ccttaaggaaggagca

SEQ ID NO: 5163 - RNA, 16 nt, Homo sapiens
  source 1..16: mol_type = genomic RNA
cttaaggaaggagcaa

SEQ ID NO: 5164 - RNA, 16 nt, Homo sapiens
  source 1..16: mol_type = genomic RNA
ttaaggaaggagcaaa

SEQ ID NO: 5165 - RNA, 16 nt, Homo sapiens
  source 1..16: mol_type = genomic RNA
taaggaaggagcaaag

SEQ ID NO: 5166 - RNA, 16 nt, Homo sapiens
  source 1..16: mol_type = genomic RNA
aaggaaggagcaaagg

SEQ ID NO: 5167 - RNA, 16 nt, Homo sapiens
  source 1..16: mol_type = genomic RNA
aggaaggagcaaaggg

SEQ ID NO: 5168 - RNA, 16 nt, Homo sapiens
  source 1..16: mol_type = genomic RNA
aggagcaaaggggctt

SEQ ID NO: 5169 - RNA, 16 nt, Homo sapiens
  source 1..16: mol_type = genomic RNA
ggagcaaaggggcttc

SEQ ID NO: 5170 - RNA, 16 nt, Homo sapiens
  source 1..16: mol_type = genomic RNA
gagcaaaggggcttca

SEQ ID NO: 5171 - RNA, 16 nt, Homo sapiens
  source 1..16: mol_type = genomic RNA
agcaaaggggcttcat

SEQ ID NO: 5172 - RNA, 16 nt, Homo sapiens
  source 1..16: mol_type = genomic RNA
gcaaaggggcttcatc

SEQ ID NO: 5173 - RNA, 16 nt, Homo sapiens
  source 1..16: mol_type = genomic RNA
caaaggggcttcatct

SEQ ID NO: 5174 - RNA, 16 nt, Homo sapiens
  source 1..16: mol_type = genomic RNA
aaaggggcttcatctt

SEQ ID NO: 5175 - RNA, 16 nt, Homo sapiens
  source 1..16: mol_type = genomic RNA
aaggggcttcatctta

SEQ ID NO: 5176 - RNA, 16 nt, Homo sapiens
  source 1..16: mol_type = genomic RNA
aggggcttcatcttaa

SEQ ID NO: 5177 - RNA, 16 nt, Homo sapiens
  source 1..16: mol_type = genomic RNA
ggggcttcatcttaaa

SEQ ID NO: 5178 - RNA, 16 nt, Homo sapiens
  source 1..16: mol_type = genomic RNA
taaagaatgaagaagg

SEQ ID NO: 5179 - RNA, 16 nt, Homo sapiens
  source 1..16: mol_type = genomic RNA
aaagaatgaagaaggg

SEQ ID NO: 5180 - RNA, 16 nt, Homo sapiens
  source 1..16: mol_type = genomic RNA
aagaatgaagaaggga

SEQ ID NO: 5181 - RNA, 16 nt, Homo sapiens
  source 1..16: mol_type = genomic RNA
agaatgaagaagggat

SEQ ID NO: 5182 - RNA, 16 nt, Homo sapiens
  source 1..16: mol_type = genomic RNA
gaatgaagaagggatt

SEQ ID NO: 5183 - RNA, 16 nt, Homo sapiens
  source 1..16: mol_type = genomic RNA
atgaagaagggatttg

SEQ ID NO: 5184 - RNA, 16 nt, Homo sapiens
  source 1..16: mol_type = genomic RNA
tgaagaagggatttgt

SEQ ID NO: 5185 - RNA, 16 nt, Homo sapiens
  source 1..16: mol_type = genomic RNA
gaagaagggatttgtc

SEQ ID NO: 5186 - RNA, 16 nt, Homo sapiens
  source 1..16: mol_type = genomic RNA
agggatttgtcatgag

SEQ ID NO: 5187 - RNA, 16 nt, Homo sapiens
  source 1..16: mol_type = genomic RNA
tgtcatgagagatgtg

SEQ ID NO: 5188 - RNA, 16 nt, Homo sapiens
  source 1..16: mol_type = genomic RNA
gtcatgagagatgtgg

SEQ ID NO: 5189 - RNA, 16 nt, Homo sapiens
  source 1..16: mol_type = genomic RNA
tcatgagagatgtggc

SEQ ID NO: 5190 - RNA, 16 nt, Homo sapiens
  source 1..16: mol_type = genomic RNA
catgagagatgtggca

SEQ ID NO: 5191 - RNA, 16 nt, Homo sapiens
  source 1..16: mol_type = genomic RNA
atgagagatgtggcag

SEQ ID NO: 5192 - RNA, 16 nt, Homo sapiens
  source 1..16: mol_type = genomic RNA
tgagagatgtggcagg

SEQ ID NO: 5193 - RNA, 16 nt, Homo sapiens
  source 1..16: mol_type = genomic RNA
gagagatgtggcagga

SEQ ID NO: 5194 - RNA, 16 nt, Homo sapiens
  source 1..16: mol_type = genomic RNA
agagatgtggcaggaa

SEQ ID NO: 5195 - RNA, 16 nt, Homo sapiens
  source 1..16: mol_type = genomic RNA
gagatgtggcaggaat

SEQ ID NO: 5196 - RNA, 16 nt, Homo sapiens
  source 1..16: mol_type = genomic RNA
agatgtggcaggaatt

SEQ ID NO: 5197 - RNA, 16 nt, Homo sapiens
  source 1..16: mol_type = genomic RNA
gatgtggcaggaattt

SEQ ID NO: 5198 - RNA, 16 nt, Homo sapiens
  source 1..16: mol_type = genomic RNA
atgtggcaggaatttc

SEQ ID NO: 5199 - RNA, 16 nt, Homo sapiens
  source 1..16: mol_type = genomic RNA
tgtggcaggaatttct

SEQ ID NO: 5200 - RNA, 16 nt, Homo sapiens
  source 1..16: mol_type = genomic RNA
tttcttgagaggcaga

SEQ ID NO: 5201 - RNA, 16 nt, Homo sapiens
  source 1..16: mol_type = genomic RNA
ttcttgagaggcagag

SEQ ID NO: 5202 - RNA, 16 nt, Homo sapiens
  source 1..16: mol_type = genomic RNA
tcttgagaggcagagg

SEQ ID NO: 5203 - RNA, 16 nt, Homo sapiens
  source 1..16: mol_type = genomic RNA
cttgagaggcagaggg

SEQ ID NO: 5204 - RNA, 16 nt, Homo sapiens
  source 1..16: mol_type = genomic RNA
ttgagaggcagaggga

SEQ ID NO: 5205 - RNA, 16 nt, Homo sapiens
  source 1..16: mol_type = genomic RNA
gcagagggagagcatg

SEQ ID NO: 5206 - RNA, 16 nt, Homo sapiens
  source 1..16: mol_type = genomic RNA
cagagggagagcatga

SEQ ID NO: 5207 - RNA, 16 nt, Homo sapiens
  source 1..16: mol_type = genomic RNA
agagggagagcatgag

SEQ ID NO: 5208 - RNA, 16 nt, Homo sapiens
  source 1..16: mol_type = genomic RNA
gagggagagcatgaga

SEQ ID NO: 5209 - RNA, 16 nt, Homo sapiens
  source 1..16: mol_type = genomic RNA
agggagagcatgagaa

SEQ ID NO: 5210 - RNA, 16 nt, Homo sapiens
  source 1..16: mol_type = genomic RNA
gggagagcatgagaat

SEQ ID NO: 5211 - RNA, 16 nt, Homo sapiens
  source 1..16: mol_type = genomic RNA
ggagagcatgagaatg

SEQ ID NO: 5212 - RNA, 16 nt, Homo sapiens
  source 1..16: mol_type = genomic RNA
gagagcatgagaatgt

SEQ ID NO: 5213 - RNA, 16 nt, Homo sapiens
  source 1..16: mol_type = genomic RNA
agagcatgagaatgtt

SEQ ID NO: 5214 - RNA, 16 nt, Homo sapiens
  source 1..16: mol_type = genomic RNA
gcatgagaatgttagg

SEQ ID NO: 5215 - RNA, 16 nt, Homo sapiens
  source 1..16: mol_type = genomic RNA
tgagaatgttaggaag

SEQ ID NO: 5216 - RNA, 16 nt, Homo sapiens
  source 1..16: mol_type = genomic RNA
gagaatgttaggaagg

SEQ ID NO: 5217 - RNA, 16 nt, Homo sapiens
  source 1..16: mol_type = genomic RNA
agaatgttaggaaggc

SEQ ID NO: 5218 - RNA, 16 nt, Homo sapiens
  source 1..16: mol_type = genomic RNA
gaatgttaggaaggca

SEQ ID NO: 5219 - RNA, 16 nt, Homo sapiens
  source 1..16: mol_type = genomic RNA
aatgttaggaaggcag

SEQ ID NO: 5220 - RNA, 16 nt, Homo sapiens
  source 1..16: mol_type = genomic RNA
atgttaggaaggcagg

SEQ ID NO: 5221 - RNA, 16 nt, Homo sapiens
  source 1..16: mol_type = genomic RNA
tgttaggaaggcagga

SEQ ID NO: 5222 - RNA, 16 nt, Homo sapiens
  source 1..16: mol_type = genomic RNA
gttaggaaggcaggag

SEQ ID NO: 5223 - RNA, 16 nt, Homo sapiens
  source 1..16: mol_type = genomic RNA
ttaggaaggcaggaga

SEQ ID NO: 5224 - RNA, 16 nt, Homo sapiens
  source 1..16: mol_type = genomic RNA
taggaaggcaggagag

SEQ ID NO: 5225 - RNA, 16 nt, Homo sapiens
  source 1..16: mol_type = genomic RNA
gaaggcaggagagact

SEQ ID NO: 5226 - RNA, 16 nt, Homo sapiens
  source 1..16: mol_type = genomic RNA
aaggcaggagagactc

SEQ ID NO: 5227 - RNA, 16 nt, Homo sapiens
  source 1..16: mol_type = genomic RNA
aggcaggagagactct

SEQ ID NO: 5228 - RNA, 16 nt, Homo sapiens
  source 1..16: mol_type = genomic RNA
ggcaggagagactctc

SEQ ID NO: 5229 - RNA, 16 nt, Homo sapiens
  source 1..16: mol_type = genomic RNA
gcaggagagactctca

SEQ ID NO: 5230 - RNA, 16 nt, Homo sapiens
  source 1..16: mol_type = genomic RNA
caggagagactctcac

SEQ ID NO: 5231 - RNA, 16 nt, Homo sapiens
  source 1..16: mol_type = genomic RNA
aggagagactctcaca

SEQ ID NO: 5232 - RNA, 16 nt, Homo sapiens
  source 1..16: mol_type = genomic RNA
ggagagactctcacac

SEQ ID NO: 5233 - RNA, 16 nt, Homo sapiens
  source 1..16: mol_type = genomic RNA
gagagactctcacaca

SEQ ID NO: 5234 - RNA, 16 nt, Homo sapiens
  source 1..16: mol_type = genomic RNA
agagactctcacacat

SEQ ID NO: 5235 - RNA, 16 nt, Homo sapiens
  source 1..16: mol_type = genomic RNA
gagactctcacacatc

SEQ ID NO: 5236 - RNA, 16 nt, Homo sapiens
  source 1..16: mol_type = genomic RNA
agactctcacacatct

SEQ ID NO: 5237 - RNA, 16 nt, Homo sapiens
  source 1..16: mol_type = genomic RNA
gactctcacacatctg

SEQ ID NO: 5238 - RNA, 16 nt, Homo sapiens
  source 1..16: mol_type = genomic RNA
actctcacacatctgg

SEQ ID NO: 5239 - RNA, 16 nt, Homo sapiens
  source 1..16: mol_type = genomic RNA
ctctcacacatctggg

SEQ ID NO: 5240 - RNA, 16 nt, Homo sapiens
  source 1..16: mol_type = genomic RNA
tctcacacatctggga

SEQ ID NO: 5241 - RNA, 16 nt, Homo sapiens
  source 1..16: mol_type = genomic RNA
ctcacacatctgggaa

SEQ ID NO: 5242 - RNA, 16 nt, Homo sapiens
  source 1..16: mol_type = genomic RNA
tcacacatctgggaag

SEQ ID NO: 5243 - RNA, 16 nt, Homo sapiens
  source 1..16: mol_type = genomic RNA
cacacatctgggaagc

SEQ ID NO: 5244 - RNA, 16 nt, Homo sapiens
  source 1..16: mol_type = genomic RNA
acacatctgggaagct

SEQ ID NO: 5245 - RNA, 16 nt, Homo sapiens
  source 1..16: mol_type = genomic RNA
cacatctgggaagctg

SEQ ID NO: 5246 - RNA, 16 nt, Homo sapiens
  source 1..16: mol_type = genomic RNA
acatctgggaagctga

SEQ ID NO: 5247 - RNA, 16 nt, Homo sapiens
  source 1..16: mol_type = genomic RNA
catctgggaagctgac

SEQ ID NO: 5248 - RNA, 16 nt, Homo sapiens
  source 1..16: mol_type = genomic RNA
atctgggaagctgaca

SEQ ID NO: 5249 - RNA, 16 nt, Homo sapiens
  source 1..16: mol_type = genomic RNA
tctgggaagctgacaa

SEQ ID NO: 5250 - RNA, 16 nt, Homo sapiens
  source 1..16: mol_type = genomic RNA
ctgggaagctgacaat

SEQ ID NO: 5251 - RNA, 16 nt, Homo sapiens
  source 1..16: mol_type = genomic RNA
tgggaagctgacaatc

SEQ ID NO: 5252 - RNA, 16 nt, Homo sapiens
  source 1..16: mol_type = genomic RNA
gggaagctgacaatcc

SEQ ID NO: 5253 - RNA, 16 nt, Homo sapiens
  source 1..16: mol_type = genomic RNA
ggaagctgacaatcca

SEQ ID NO: 5254 - RNA, 16 nt, Homo sapiens
  source 1..16: mol_type = genomic RNA
gaagctgacaatccat

SEQ ID NO: 5255 - RNA, 16 nt, Homo sapiens
  source 1..16: mol_type = genomic RNA
aagctgacaatccatc

SEQ ID NO: 5256 - RNA, 16 nt, Homo sapiens
  source 1..16: mol_type = genomic RNA
agctgacaatccatca

SEQ ID NO: 5257 - RNA, 16 nt, Homo sapiens
  source 1..16: mol_type = genomic RNA
gctgacaatccatcag

SEQ ID NO: 5258 - RNA, 16 nt, Homo sapiens
  source 1..16: mol_type = genomic RNA
ctgacaatccatcagc

SEQ ID NO: 5259 - RNA, 16 nt, Homo sapiens
  source 1..16: mol_type = genomic RNA
tgacaatccatcagca

SEQ ID NO: 5260 - RNA, 16 nt, Homo sapiens
  source 1..16: mol_type = genomic RNA
gacaatccatcagcat

SEQ ID NO: 5261 - RNA, 16 nt, Homo sapiens
  source 1..16: mol_type = genomic RNA
acaatccatcagcatg

SEQ ID NO: 5262 - RNA, 16 nt, Homo sapiens
  source 1..16: mol_type = genomic RNA
atccatcagcatgtcc

SEQ ID NO: 5263 - RNA, 16 nt, Homo sapiens
  source 1..16: mol_type = genomic RNA
tccatcagcatgtcca

SEQ ID NO: 5264 - RNA, 16 nt, Homo sapiens
  source 1..16: mol_type = genomic RNA
ccatcagcatgtccag

SEQ ID NO: 5265 - RNA, 16 nt, Homo sapiens
  source 1..16: mol_type = genomic RNA
catcagcatgtccagg

SEQ ID NO: 5266 - RNA, 16 nt, Homo sapiens
  source 1..16: mol_type = genomic RNA
atcagcatgtccagga

SEQ ID NO: 5267 - RNA, 16 nt, Homo sapiens
  source 1..16: mol_type = genomic RNA
tcagcatgtccaggag

SEQ ID NO: 5268 - RNA, 16 nt, Homo sapiens
  source 1..16: mol_type = genomic RNA
cagcatgtccaggagg

SEQ ID NO: 5269 - RNA, 16 nt, Homo sapiens
  source 1..16: mol_type = genomic RNA
agcatgtccaggagga

SEQ ID NO: 5270 - RNA, 16 nt, Homo sapiens
  source 1..16: mol_type = genomic RNA
gcatgtccaggaggaa

SEQ ID NO: 5271 - RNA, 16 nt, Homo sapiens
  source 1..16: mol_type = genomic RNA
catgtccaggaggaaa

SEQ ID NO: 5272 - RNA, 16 nt, Homo sapiens
  source 1..16: mol_type = genomic RNA
atgtccaggaggaaaa

SEQ ID NO: 5273 - RNA, 16 nt, Homo sapiens
  source 1..16: mol_type = genomic RNA
tgtccaggaggaaaat

SEQ ID NO: 5274 - RNA, 16 nt, Homo sapiens
  source 1..16: mol_type = genomic RNA
gtccaggaggaaaata

SEQ ID NO: 5275 - RNA, 16 nt, Homo sapiens
  source 1..16: mol_type = genomic RNA
tccaggaggaaaataa

SEQ ID NO: 5276 - RNA, 16 nt, Homo sapiens
  source 1..16: mol_type = genomic RNA
ccaggaggaaaataag

SEQ ID NO: 5277 - RNA, 16 nt, Homo sapiens
  source 1..16: mol_type = genomic RNA
caggaggaaaataagg

SEQ ID NO: 5278 - RNA, 16 nt, Homo sapiens
  source 1..16: mol_type = genomic RNA
aggaggaaaataagga

SEQ ID NO: 5279 - RNA, 16 nt, Homo sapiens
  source 1..16: mol_type = genomic RNA
ggaggaaaataaggag

SEQ ID NO: 5280 - RNA, 16 nt, Homo sapiens
  source 1..16: mol_type = genomic RNA
gaggaaaataaggagg

SEQ ID NO: 5281 - RNA, 16 nt, Homo sapiens
  source 1..16: mol_type = genomic RNA
aggaaaataaggagga

SEQ ID NO: 5282 - RNA, 16 nt, Homo sapiens
  source 1..16: mol_type = genomic RNA
ggaaaataaggaggag

SEQ ID NO: 5283 - RNA, 16 nt, Homo sapiens
  source 1..16: mol_type = genomic RNA
gaaaataaggaggagg

SEQ ID NO: 5284 - RNA, 16 nt, Homo sapiens
  source 1..16: mol_type = genomic RNA
aaaataaggaggagga

SEQ ID NO: 5285 - RNA, 16 nt, Homo sapiens
  source 1..16: mol_type = genomic RNA
aaataaggaggaggag

SEQ ID NO: 5286 - RNA, 16 nt, Homo sapiens
  source 1..16: mol_type = genomic RNA
aataaggaggaggagc

SEQ ID NO: 5287 - RNA, 16 nt, Homo sapiens
  source 1..16: mol_type = genomic RNA
ataaggaggaggagca

SEQ ID NO: 5288 - RNA, 16 nt, Homo sapiens
  source 1..16: mol_type = genomic RNA
taaggaggaggagcag

SEQ ID NO: 5289 - RNA, 16 nt, Homo sapiens
  source 1..16: mol_type = genomic RNA
ggaggaggagcagaaa

SEQ ID NO: 5290 - RNA, 16 nt, Homo sapiens
  source 1..16: mol_type = genomic RNA
gaggaggagcagaaat

SEQ ID NO: 5291 - RNA, 16 nt, Homo sapiens
  source 1..16: mol_type = genomic RNA
aggaggagcagaaata

SEQ ID NO: 5292 - RNA, 16 nt, Homo sapiens
  source 1..16: mol_type = genomic RNA
ggaggagcagaaatag

SEQ ID NO: 5293 - RNA, 16 nt, Homo sapiens
  source 1..16: mol_type = genomic RNA
gaggagcagaaataga

SEQ ID NO: 5294 - RNA, 16 nt, Homo sapiens
  source 1..16: mol_type = genomic RNA
aggagcagaaatagat

SEQ ID NO: 5295 - RNA, 16 nt, Homo sapiens
  source 1..16: mol_type = genomic RNA
ggagcagaaatagatg

SEQ ID NO: 5296 - RNA, 16 nt, Homo sapiens
  source 1..16: mol_type = genomic RNA
gagcagaaatagatga

SEQ ID NO: 5297 - RNA, 16 nt, Homo sapiens
  source 1..16: mol_type = genomic RNA
agcagaaatagatgag

SEQ ID NO: 5298 - RNA, 16 nt, Homo sapiens
  source 1..16: mol_type = genomic RNA
gcagaaatagatgagg

SEQ ID NO: 5299 - RNA, 16 nt, Homo sapiens
  source 1..16: mol_type = genomic RNA
cagaaatagatgaggc

SEQ ID NO: 5300 - RNA, 16 nt, Homo sapiens
  source 1..16: mol_type = genomic RNA
agaaatagatgaggct

SEQ ID NO: 5301 - RNA, 16 nt, Homo sapiens
  source 1..16: mol_type = genomic RNA
gaaatagatgaggctg

SEQ ID NO: 5302 - RNA, 16 nt, Homo sapiens
  source 1..16: mol_type = genomic RNA
aaatagatgaggctgg

SEQ ID NO: 5303 - RNA, 16 nt, Homo sapiens
  source 1..16: mol_type = genomic RNA
aatagatgaggctgga

SEQ ID NO: 5304 - RNA, 16 nt, Homo sapiens
  source 1..16: mol_type = genomic RNA
atagatgaggctggat

SEQ ID NO: 5305 - RNA, 16 nt, Homo sapiens
  source 1..16: mol_type = genomic RNA
tagatgaggctggata

SEQ ID NO: 5306 - RNA, 16 nt, Homo sapiens
  source 1..16: mol_type = genomic RNA
agatgaggctggatat

SEQ ID NO: 5307 - RNA, 16 nt, Homo sapiens
  source 1..16: mol_type = genomic RNA
gatgaggctggatata

SEQ ID NO: 5308 - RNA, 16 nt, Homo sapiens
  source 1..16: mol_type = genomic RNA
atgaggctggatatag

SEQ ID NO: 5309 - RNA, 16 nt, Homo sapiens
  source 1..16: mol_type = genomic RNA
tgaggctggatataga

SEQ ID NO: 5310 - RNA, 16 nt, Homo sapiens
  source 1..16: mol_type = genomic RNA
gaggctggatatagaa

SEQ ID NO: 5311 - RNA, 16 nt, Homo sapiens
  source 1..16: mol_type = genomic RNA
aggctggatatagaag

SEQ ID NO: 5312 - RNA, 16 nt, Homo sapiens
  source 1..16: mol_type = genomic RNA
ggctggatatagaagc

SEQ ID NO: 5313 - RNA, 16 nt, Homo sapiens
  source 1..16: mol_type = genomic RNA
gctggatatagaagca

SEQ ID NO: 5314 - RNA, 16 nt, Homo sapiens
  source 1..16: mol_type = genomic RNA
ctggatatagaagcag

SEQ ID NO: 5315 - RNA, 16 nt, Homo sapiens
  source 1..16: mol_type = genomic RNA
tggatatagaagcagg

SEQ ID NO: 5316 - RNA, 16 nt, Homo sapiens
  source 1..16: mol_type = genomic RNA
ggatatagaagcaggg

SEQ ID NO: 5317 - RNA, 16 nt, Homo sapiens
  source 1..16: mol_type = genomic RNA
gatatagaagcagggc

SEQ ID NO: 5318 - RNA, 16 nt, Homo sapiens
  source 1..16: mol_type = genomic RNA
atatagaagcagggct

SEQ ID NO: 5319 - RNA, 16 nt, Homo sapiens
  source 1..16: mol_type = genomic RNA
tatagaagcagggctg

SEQ ID NO: 5320 - RNA, 16 nt, Homo sapiens
  source 1..16: mol_type = genomic RNA
atagaagcagggctga

SEQ ID NO: 5321 - RNA, 16 nt, Homo sapiens
  source 1..16: mol_type = genomic RNA
tagaagcagggctgaa

SEQ ID NO: 5322 - RNA, 16 nt, Homo sapiens
  source 1..16: mol_type = genomic RNA
agaagcagggctgaag

SEQ ID NO: 5323 - RNA, 16 nt, Homo sapiens
  source 1..16: mol_type = genomic RNA
aagcagggctgaagct

SEQ ID NO: 5324 - RNA, 16 nt, Homo sapiens
  source 1..16: mol_type = genomic RNA
agcagggctgaagctg

SEQ ID NO: 5325 - RNA, 16 nt, Homo sapiens
  source 1..16: mol_type = genomic RNA
gcagggctgaagctgt

SEQ ID NO: 5326 - RNA, 16 nt, Homo sapiens
  source 1..16: mol_type = genomic RNA
cagggctgaagctgtg

SEQ ID NO: 5327 - RNA, 16 nt, Homo sapiens
  source 1..16: mol_type = genomic RNA
agggctgaagctgtgt

SEQ ID NO: 5328 - RNA, 16 nt, Homo sapiens
  source 1..16: mol_type = genomic RNA
gggctgaagctgtgtt

SEQ ID NO: 5329 - RNA, 16 nt, Homo sapiens
  source 1..16: mol_type = genomic RNA
ggctgaagctgtgttg

SEQ ID NO: 5330 - RNA, 16 nt, Homo sapiens
  source 1..16: mol_type = genomic RNA
gctgaagctgtgttgt

SEQ ID NO: 5331 - RNA, 16 nt, Homo sapiens
  source 1..16: mol_type = genomic RNA
attctatccagaaggc

SEQ ID NO: 5332 - RNA, 16 nt, Homo sapiens
  source 1..16: mol_type = genomic RNA
ttctatccagaaggca

SEQ ID NO: 5333 - RNA, 16 nt, Homo sapiens
  source 1..16: mol_type = genomic RNA
tctatccagaaggcaa

SEQ ID NO: 5334 - RNA, 16 nt, Homo sapiens
  source 1..16: mol_type = genomic RNA
ctatccagaaggcaat

SEQ ID NO: 5335 - RNA, 16 nt, Homo sapiens
  source 1..16: mol_type = genomic RNA
tatccagaaggcaata

SEQ ID NO: 5336 - RNA, 16 nt, Homo sapiens
  source 1..16: mol_type = genomic RNA
atccagaaggcaatag

SEQ ID NO: 5337 - RNA, 16 nt, Homo sapiens
  source 1..16: mol_type = genomic RNA
tccagaaggcaatagg

SEQ ID NO: 5338 - RNA, 16 nt, Homo sapiens
  source 1..16: mol_type = genomic RNA
ccagaaggcaataggt

SEQ ID NO: 5339 - RNA, 16 nt, Homo sapiens
  source 1..16: mol_type = genomic RNA
cagaaggcaataggta

SEQ ID NO: 5340 - RNA, 16 nt, Homo sapiens
  source 1..16: mol_type = genomic RNA
agaaggcaataggtag

SEQ ID NO: 5341 - RNA, 16 nt, Homo sapiens
  source 1..16: mol_type = genomic RNA
attttctgcaaagggc

SEQ ID NO: 5342 - RNA, 16 nt, Homo sapiens
  source 1..16: mol_type = genomic RNA
ttttctgcaaagggct

SEQ ID NO: 5343 - RNA, 16 nt, Homo sapiens
  source 1..16: mol_type = genomic RNA
tttctgcaaagggcta

SEQ ID NO: 5344 - RNA, 16 nt, Homo sapiens
  source 1..16: mol_type = genomic RNA
ttctgcaaagggctaa

SEQ ID NO: 5345 - RNA, 16 nt, Homo sapiens
  source 1..16: mol_type = genomic RNA
tctgcaaagggctaaa

SEQ ID NO: 5346 - RNA, 16 nt, Homo sapiens
  source 1..16: mol_type = genomic RNA
ctgcaaagggctaaat

SEQ ID NO: 5347 - RNA, 16 nt, Homo sapiens
  source 1..16: mol_type = genomic RNA
tgcaaagggctaaatg

SEQ ID NO: 5348 - RNA, 16 nt, Homo sapiens
  source 1..16: mol_type = genomic RNA
gcaaagggctaaatgt

SEQ ID NO: 5349 - RNA, 16 nt, Homo sapiens
  source 1..16: mol_type = genomic RNA
ttccaagccatatggt

SEQ ID NO: 5350 - RNA, 16 nt, Homo sapiens
  source 1..16: mol_type = genomic RNA
tccaagccatatggtc

SEQ ID NO: 5351 - RNA, 16 nt, Homo sapiens
  source 1..16: mol_type = genomic RNA
ccaagccatatggtct

SEQ ID NO: 5352 - RNA, 16 nt, Homo sapiens
  source 1..16: mol_type = genomic RNA
caagccatatggtctc

SEQ ID NO: 5353 - RNA, 16 nt, Homo sapiens
  source 1..16: mol_type = genomic RNA
aagccatatggtctct

SEQ ID NO: 5354 - RNA, 16 nt, Homo sapiens
  source 1..16: mol_type = genomic RNA
agccatatggtctctc

SEQ ID NO: 5355 - RNA, 16 nt, Homo sapiens
  source 1..16: mol_type = genomic RNA
gccatatggtctctct

SEQ ID NO: 5356 - RNA, 16 nt, Homo sapiens
  source 1..16: mol_type = genomic RNA
ctctcaatgactcagc

SEQ ID NO: 5357 - RNA, 16 nt, Homo sapiens
  source 1..16: mol_type = genomic RNA
tctcaatgactcagct

SEQ ID NO: 5358 - RNA, 16 nt, Homo sapiens
  source 1..16: mol_type = genomic RNA
ctcaatgactcagctc

SEQ ID NO: 5359 - RNA, 16 nt, Homo sapiens
  source 1..16: mol_type = genomic RNA
tcaatgactcagctct

SEQ ID NO: 5360 - RNA, 16 nt, Homo sapiens
  source 1..16: mol_type = genomic RNA
atgactcagctcttcc

SEQ ID NO: 5361 - RNA, 16 nt, Homo sapiens
  source 1..16: mol_type = genomic RNA
tgactcagctcttcca

SEQ ID NO: 5362 - RNA, 16 nt, Homo sapiens
  source 1..16: mol_type = genomic RNA
gactcagctcttccat

SEQ ID NO: 5363 - RNA, 16 nt, Homo sapiens
  source 1..16: mol_type = genomic RNA
ataccatgaaagtagc

SEQ ID NO: 5364 - RNA, 16 nt, Homo sapiens
  source 1..16: mol_type = genomic RNA
taccatgaaagtagcc

SEQ ID NO: 5365 - RNA, 16 nt, Homo sapiens
  source 1..16: mol_type = genomic RNA
accatgaaagtagcca

SEQ ID NO: 5366 - RNA, 16 nt, Homo sapiens
  source 1..16: mol_type = genomic RNA
ccatgaaagtagccag

SEQ ID NO: 5367 - RNA, 16 nt, Homo sapiens
  source 1..16: mol_type = genomic RNA
catgaaagtagccaga

SEQ ID NO: 5368 - RNA, 16 nt, Homo sapiens
  source 1..16: mol_type = genomic RNA
atgaaagtagccagag

SEQ ID NO: 5369 - RNA, 16 nt, Homo sapiens
  source 1..16: mol_type = genomic RNA
tgaaagtagccagaga

SEQ ID NO: 5370 - RNA, 16 nt, Homo sapiens
  source 1..16: mol_type = genomic RNA
gaaagtagccagagac

SEQ ID NO: 5371 - RNA, 16 nt, Homo sapiens
  source 1..16: mol_type = genomic RNA
aaagtagccagagacg

SEQ ID NO: 5372 - RNA, 16 nt, Homo sapiens
  source 1..16: mol_type = genomic RNA
aaacgcagactgtgtc

SEQ ID NO: 5373 - RNA, 16 nt, Homo sapiens
  source 1..16: mol_type = genomic RNA
aacgcagactgtgtca

SEQ ID NO: 5374 - RNA, 16 nt, Homo sapiens
  source 1..16: mol_type = genomic RNA
acgcagactgtgtcag

SEQ ID NO: 5375 - RNA, 16 nt, Homo sapiens
  source 1..16: mol_type = genomic RNA
cgcagactgtgtcaga

SEQ ID NO: 5376 - RNA, 16 nt, Homo sapiens
  source 1..16: mol_type = genomic RNA
gcagactgtgtcagac

SEQ ID NO: 5377 - RNA, 16 nt, Homo sapiens
  source 1..16: mol_type = genomic RNA
cagactgtgtcagaca

SEQ ID NO: 5378 - RNA, 16 nt, Homo sapiens
  source 1..16: mol_type = genomic RNA
agactgtgtcagacat

SEQ ID NO: 5379 - RNA, 16 nt, Homo sapiens
  source 1..16: mol_type = genomic RNA
actgtgtcagacatag

SEQ ID NO: 5380 - RNA, 16 nt, Homo sapiens
  source 1..16: mol_type = genomic RNA
gtgtcagacatagtcc

SEQ ID NO: 5381 - RNA, 16 nt, Homo sapiens
  source 1..16: mol_type = genomic RNA
tgtcagacatagtcca

SEQ ID NO: 5382 - RNA, 16 nt, Homo sapiens
  source 1..16: mol_type = genomic RNA
agtccatgtatggtag

SEQ ID NO: 5383 - RNA, 16 nt, Homo sapiens
  source 1..16: mol_type = genomic RNA
tatgatgtgatggaga

SEQ ID NO: 5384 - RNA, 16 nt, Homo sapiens
  source 1..16: mol_type = genomic RNA
atgatgtgatggagaa

SEQ ID NO: 5385 - RNA, 16 nt, Homo sapiens
  source 1..16: mol_type = genomic RNA
tgatgtgatggagaat

SEQ ID NO: 5386 - RNA, 16 nt, Homo sapiens
  source 1..16: mol_type = genomic RNA
tgtgatggagaattcc

SEQ ID NO: 5387 - RNA, 16 nt, Homo sapiens
  source 1..16: mol_type = genomic RNA
gtgatggagaattcct

SEQ ID NO: 5388 - RNA, 16 nt, Homo sapiens
  source 1..16: mol_type = genomic RNA
gatggagaattcctac

SEQ ID NO: 5389 - RNA, 16 nt, Homo sapiens
  source 1..16: mol_type = genomic RNA
tggagaattcctacaa

SEQ ID NO: 5390 - RNA, 16 nt, Homo sapiens
  source 1..16: mol_type = genomic RNA
ggagaattcctacaag

SEQ ID NO: 5391 - RNA, 16 nt, Homo sapiens
  source 1..16: mol_type = genomic RNA
aaatggtagagtgaac

SEQ ID NO: 5392 - RNA, 16 nt, Homo sapiens
  source 1..16: mol_type = genomic RNA
aatggtagagtgaaca

SEQ ID NO: 5393 - RNA, 16 nt, Homo sapiens
  source 1..16: mol_type = genomic RNA
atggtagagtgaacat

SEQ ID NO: 5394 - RNA, 16 nt, Homo sapiens
  source 1..16: mol_type = genomic RNA
tggtagagtgaacata

SEQ ID NO: 5395 - RNA, 16 nt, Homo sapiens
  source 1..16: mol_type = genomic RNA
ggtagagtgaacatac

SEQ ID NO: 5396 - RNA, 16 nt, Homo sapiens
  source 1..16: mol_type = genomic RNA
tagagtgaacatacac

SEQ ID NO: 5397 - RNA, 16 nt, Homo sapiens
  source 1..16: mol_type = genomic RNA
agagtgaacatacact

SEQ ID NO: 5398 - RNA, 16 nt, Homo sapiens
  source 1..16: mol_type = genomic RNA
gagtgaacatacactg

SEQ ID NO: 5399 - RNA, 16 nt, Homo sapiens
  source 1..16: mol_type = genomic RNA
agtgaacatacactgg

SEQ ID NO: 5400 - RNA, 16 nt, Homo sapiens
  source 1..16: mol_type = genomic RNA
gtgaacatacactgga

SEQ ID NO: 5401 - RNA, 16 nt, Homo sapiens
  source 1..16: mol_type = genomic RNA
tgaacatacactggaa

SEQ ID NO: 5402 - RNA, 16 nt, Homo sapiens
  source 1..16: mol_type = genomic RNA
gaacatacactggaat

SEQ ID NO: 5403 - RNA, 16 nt, Homo sapiens
  source 1..16: mol_type = genomic RNA
tctatactgcttgacc

SEQ ID NO: 5404 - RNA, 16 nt, Homo sapiens
  source 1..16: mol_type = genomic RNA
ctatactgcttgaccc

SEQ ID NO: 5405 - RNA, 16 nt, Homo sapiens
  source 1..16: mol_type = genomic RNA
tatactgcttgaccca

SEQ ID NO: 5406 - RNA, 16 nt, Homo sapiens
  source 1..16: mol_type = genomic RNA
atactgcttgacccaa

SEQ ID NO: 5407 - RNA, 16 nt, Homo sapiens
  source 1..16: mol_type = genomic RNA
tactgcttgacccaag

SEQ ID NO: 5408 - RNA, 16 nt, Homo sapiens
  source 1..16: mol_type = genomic RNA
actgcttgacccaagc

SEQ ID NO: 5409 - RNA, 16 nt, Homo sapiens
  source 1..16: mol_type = genomic RNA
ctgcttgacccaagct

SEQ ID NO: 5410 - RNA, 16 nt, Homo sapiens
  source 1..16: mol_type = genomic RNA
tgcttgacccaagctt

SEQ ID NO: 5411 - RNA, 16 nt, Homo sapiens
  source 1..16: mol_type = genomic RNA
gcttgacccaagcttt

SEQ ID NO: 5412 - RNA, 16 nt, Homo sapiens
  source 1..16: mol_type = genomic RNA
tgatagcaaaaggtag

SEQ ID NO: 5413 - RNA, 16 nt, Homo sapiens
  source 1..16: mol_type = genomic RNA
gatagcaaaaggtaga

SEQ ID NO: 5414 - RNA, 16 nt, Homo sapiens
  source 1..16: mol_type = genomic RNA
atagcaaaaggtagaa

SEQ ID NO: 5415 - RNA, 16 nt, Homo sapiens
  source 1..16: mol_type = genomic RNA
tagcaaaaggtagaaa

SEQ ID NO: 5416 - RNA, 16 nt, Homo sapiens
  source 1..16: mol_type = genomic RNA
agcaaaaggtagaaaa

SEQ ID NO: 5417 - RNA, 16 nt, Homo sapiens
  source 1..16: mol_type = genomic RNA
gcaaaaggtagaaaag

SEQ ID NO: 5418 - RNA, 16 nt, Homo sapiens
  source 1..16: mol_type = genomic RNA
aaaaggtagaaaagac

SEQ ID NO: 5419 - RNA, 16 nt, Homo sapiens
  source 1..16: mol_type = genomic RNA
aaaggtagaaaagaca

SEQ ID NO: 5420 - RNA, 16 nt, Homo sapiens
  source 1..16: mol_type = genomic RNA
aaggtagaaaagacag

SEQ ID NO: 5421 - RNA, 16 nt, Homo sapiens
  source 1..16: mol_type = genomic RNA
aggtagaaaagacaga

SEQ ID NO: 5422 - RNA, 16 nt, Homo sapiens
  source 1..16: mol_type = genomic RNA
agtcatagctcagggt

SEQ ID NO: 5423 - RNA, 16 nt, Homo sapiens
  source 1..16: mol_type = genomic RNA
gtcatagctcagggtg

SEQ ID NO: 5424 - RNA, 16 nt, Homo sapiens
  source 1..16: mol_type = genomic RNA
tcatagctcagggtgt

SEQ ID NO: 5425 - RNA, 16 nt, Homo sapiens
  source 1..16: mol_type = genomic RNA
catagctcagggtgtt

SEQ ID NO: 5426 - RNA, 16 nt, Homo sapiens
  source 1..16: mol_type = genomic RNA
atagctcagggtgttt

SEQ ID NO: 5427 - RNA, 16 nt, Homo sapiens
  source 1..16: mol_type = genomic RNA
tagctcagggtgtttg

SEQ ID NO: 5428 - RNA, 16 nt, Homo sapiens
  source 1..16: mol_type = genomic RNA
agctcagggtgtttga

SEQ ID NO: 5429 - RNA, 16 nt, Homo sapiens
  source 1..16: mol_type = genomic RNA
gctcagggtgtttgac

SEQ ID NO: 5430 - RNA, 16 nt, Homo sapiens
  source 1..16: mol_type = genomic RNA
ctcagggtgtttgact

SEQ ID NO: 5431 - RNA, 16 nt, Homo sapiens
  source 1..16: mol_type = genomic RNA
ttgcttttctgtgggg

SEQ ID NO: 5432 - RNA, 16 nt, Homo sapiens
  source 1..16: mol_type = genomic RNA
tgcttttctgtggggt

SEQ ID NO: 5433 - RNA, 16 nt, Homo sapiens
  source 1..16: mol_type = genomic RNA
ttttgtcacagcagcc

SEQ ID NO: 5434 - RNA, 16 nt, Homo sapiens
  source 1..16: mol_type = genomic RNA
tttgtcacagcagcct

SEQ ID NO: 5435 - RNA, 16 nt, Homo sapiens
  source 1..16: mol_type = genomic RNA
ttgtcacagcagcctt

SEQ ID NO: 5436 - RNA, 16 nt, Homo sapiens
  source 1..16: mol_type = genomic RNA
tgtcacagcagccttt

SEQ ID NO: 5437 - RNA, 16 nt, Homo sapiens
  source 1..16: mol_type = genomic RNA
gtcacagcagcctttg

SEQ ID NO: 5438 - RNA, 16 nt, Homo sapiens
  source 1..16: mol_type = genomic RNA
tcacagcagcctttgt

SEQ ID NO: 5439 - RNA, 16 nt, Homo sapiens
  source 1..16: mol_type = genomic RNA
cacagcagcctttgtc

SEQ ID NO: 5440 - RNA, 16 nt, Homo sapiens
  source 1..16: mol_type = genomic RNA
acagcagcctttgtcg

SEQ ID NO: 5441 - RNA, 16 nt, Homo sapiens
  source 1..16: mol_type = genomic RNA
cagcagcctttgtcgc

SEQ ID NO: 5442 - RNA, 16 nt, Homo sapiens
  source 1..16: mol_type = genomic RNA
agcagcctttgtcgct

SEQ ID NO: 5443 - RNA, 16 nt, Homo sapiens
  source 1..16: mol_type = genomic RNA
gcagcctttgtcgctt

SEQ ID NO: 5444 - RNA, 16 nt, Homo sapiens
  source 1..16: mol_type = genomic RNA
tgtcgcttcaaacacc

SEQ ID NO: 5445 - RNA, 16 nt, Homo sapiens
  source 1..16: mol_type = genomic RNA
gtcgcttcaaacaccg

SEQ ID NO: 5446 - RNA, 16 nt, Homo sapiens
  source 1..16: mol_type = genomic RNA
tcgcttcaaacaccgc

SEQ ID NO: 5447 - RNA, 16 nt, Homo sapiens
  source 1..16: mol_type = genomic RNA
cgcttcaaacaccgca

SEQ ID NO: 5448 - RNA, 16 nt, Homo sapiens
  source 1..16: mol_type = genomic RNA
gcttcaaacaccgcaa

SEQ ID NO: 5449 - RNA, 16 nt, Homo sapiens
  source 1..16: mol_type = genomic RNA
cttcaaacaccgcaag

SEQ ID NO: 5450 - RNA, 16 nt, Homo sapiens
  source 1..16: mol_type = genomic RNA
ttcaaacaccgcaagt

SEQ ID NO: 5451 - RNA, 16 nt, Homo sapiens
  source 1..16: mol_type = genomic RNA
tcaaacaccgcaagtg

SEQ ID NO: 5452 - RNA, 16 nt, Homo sapiens
  source 1..16: mol_type = genomic RNA
caaacaccgcaagtgt

SEQ ID NO: 5453 - RNA, 16 nt, Homo sapiens
  source 1..16: mol_type = genomic RNA
aaacaccgcaagtgtt

SEQ ID NO: 5454 - RNA, 16 nt, Homo sapiens
  source 1..16: mol_type = genomic RNA
aacaccgcaagtgttc

SEQ ID NO: 5455 - RNA, 16 nt, Homo sapiens
  source 1..16: mol_type = genomic RNA
acaccgcaagtgttct

SEQ ID NO: 5456 - RNA, 16 nt, Homo sapiens
  source 1..16: mol_type = genomic RNA
tcaagtgaaatgcaac

SEQ ID NO: 5457 - RNA, 16 nt, Homo sapiens
  source 1..16: mol_type = genomic RNA
agtgaaatgcaacatg

SEQ ID NO: 5458 - RNA, 16 nt, Homo sapiens
  source 1..16: mol_type = genomic RNA
tgaaatgcaacatgtc

SEQ ID NO: 5459 - RNA, 16 nt, Homo sapiens
  source 1..16: mol_type = genomic RNA
tgcaacatgtctgaaa

SEQ ID NO: 5460 - RNA, 16 nt, Homo sapiens
  source 1..16: mol_type = genomic RNA
gcaacatgtctgaaac

SEQ ID NO: 5461 - RNA, 16 nt, Homo sapiens
  source 1..16: mol_type = genomic RNA
acatgtctgaaacgtg

SEQ ID NO: 5462 - RNA, 16 nt, Homo sapiens
  source 1..16: mol_type = genomic RNA
catgtctgaaacgtgg

SEQ ID NO: 5463 - RNA, 16 nt, Homo sapiens
  source 1..16: mol_type = genomic RNA
atgtctgaaacgtggt

SEQ ID NO: 5464 - RNA, 16 nt, Homo sapiens
  source 1..16: mol_type = genomic RNA
tgtctgaaacgtggta

SEQ ID NO: 5465 - RNA, 16 nt, Homo sapiens
  source 1..16: mol_type = genomic RNA
gtctgaaacgtggtat

SEQ ID NO: 5466 - RNA, 16 nt, Homo sapiens
  source 1..16: mol_type = genomic RNA
tctgaaacgtggtatc

SEQ ID NO: 5467 - RNA, 16 nt, Homo sapiens
  source 1..16: mol_type = genomic RNA
tgaaacgtggtatctg

SEQ ID NO: 5468 - RNA, 16 nt, Homo sapiens
  source 1..16: mol_type = genomic RNA
gaaacgtggtatctgg

SEQ ID NO: 5469 - RNA, 16 nt, Homo sapiens
  source 1..16: mol_type = genomic RNA
aaacgtggtatctgga

SEQ ID NO: 5470 - RNA, 16 nt, Homo sapiens
  source 1..16: mol_type = genomic RNA
aacgtggtatctggag

SEQ ID NO: 5471 - RNA, 16 nt, Homo sapiens
  source 1..16: mol_type = genomic RNA
acgtggtatctggaga

SEQ ID NO: 5472 - RNA, 16 nt, Homo sapiens
  source 1..16: mol_type = genomic RNA
cgtggtatctggagag

SEQ ID NO: 5473 - RNA, 16 nt, Homo sapiens
  source 1..16: mol_type = genomic RNA
gtggtatctggagagg

SEQ ID NO: 5474 - RNA, 16 nt, Homo sapiens
  source 1..16: mol_type = genomic RNA
tggtatctggagaggt

SEQ ID NO: 5475 - RNA, 16 nt, Homo sapiens
  source 1..16: mol_type = genomic RNA
ggtatctggagaggtg

SEQ ID NO: 5476 - RNA, 16 nt, Homo sapiens
  source 1..16: mol_type = genomic RNA
gtatctggagaggtga

SEQ ID NO: 5477 - RNA, 16 nt, Homo sapiens
  source 1..16: mol_type = genomic RNA
tatctggagaggtgag

SEQ ID NO: 5478 - RNA, 16 nt, Homo sapiens
  source 1..16: mol_type = genomic RNA
atctggagaggtgaga

SEQ ID NO: 5479 - RNA, 16 nt, Homo sapiens
  source 1..16: mol_type = genomic RNA
tctggagaggtgagat

SEQ ID NO: 5480 - RNA, 16 nt, Homo sapiens
  source 1..16: mol_type = genomic RNA
ctggagaggtgagatg

SEQ ID NO: 5481 - RNA, 16 nt, Homo sapiens
  source 1..16: mol_type = genomic RNA
tggagaggtgagatgg

SEQ ID NO: 5482 - RNA, 16 nt, Homo sapiens
  source 1..16: mol_type = genomic RNA
ggagaggtgagatgga

SEQ ID NO: 5483 - RNA, 16 nt, Homo sapiens
  source 1..16: mol_type = genomic RNA
gagaggtgagatggac

SEQ ID NO: 5484 - RNA, 16 nt, Homo sapiens
  source 1..16: mol_type = genomic RNA
agaggtgagatggaca

SEQ ID NO: 5485 - RNA, 16 nt, Homo sapiens
  source 1..16: mol_type = genomic RNA
gaggtgagatggacaa

SEQ ID NO: 5486 - RNA, 16 nt, Homo sapiens
  source 1..16: mol_type = genomic RNA
aggtgagatggacaaa

SEQ ID NO: 5487 - RNA, 16 nt, Homo sapiens
  source 1..16: mol_type = genomic RNA
ggtgagatggacaaag

SEQ ID NO: 5488 - RNA, 16 nt, Homo sapiens
  source 1..16: mol_type = genomic RNA
gtgagatggacaaagg

SEQ ID NO: 5489 - RNA, 16 nt, Homo sapiens
  source 1..16: mol_type = genomic RNA
tgagatggacaaagga

SEQ ID NO: 5490 - RNA, 16 nt, Homo sapiens
  source 1..16: mol_type = genomic RNA
gagatggacaaaggag

SEQ ID NO: 5491 - RNA, 16 nt, Homo sapiens
  source 1..16: mol_type = genomic RNA
agatggacaaaggagc

SEQ ID NO: 5492 - RNA, 16 nt, Homo sapiens
  source 1..16: mol_type = genomic RNA
gatggacaaaggagcc

SEQ ID NO: 5493 - RNA, 16 nt, Homo sapiens
  source 1..16: mol_type = genomic RNA
atggacaaaggagccc

SEQ ID NO: 5494 - RNA, 16 nt, Homo sapiens
  source 1..16: mol_type = genomic RNA
tggacaaaggagccct

SEQ ID NO: 5495 - RNA, 16 nt, Homo sapiens
  source 1..16: mol_type = genomic RNA
ggacaaaggagccctt

SEQ ID NO: 5496 - RNA, 16 nt, Homo sapiens
  source 1..16: mol_type = genomic RNA
gacaaaggagcccttg

SEQ ID NO: 5497 - RNA, 16 nt, Homo sapiens
  source 1..16: mol_type = genomic RNA
acaaaggagcccttgt

SEQ ID NO: 5498 - RNA, 16 nt, Homo sapiens
  source 1..16: mol_type = genomic RNA
caaaggagcccttgtt

SEQ ID NO: 5499 - RNA, 16 nt, Homo sapiens
  source 1..16: mol_type = genomic RNA
aaaggagcccttgtta

SEQ ID NO: 5500 - RNA, 16 nt, Homo sapiens
  source 1..16: mol_type = genomic RNA
aaggagcccttgttac

SEQ ID NO: 5501 - RNA, 16 nt, Homo sapiens
  source 1..16: mol_type = genomic RNA
aggagcccttgttact

SEQ ID NO: 5502 - RNA, 16 nt, Homo sapiens
  source 1..16: mol_type = genomic RNA
ggagcccttgttactg

SEQ ID NO: 5503 - RNA, 16 nt, Homo sapiens
  source 1..16: mol_type = genomic RNA
gagcccttgttactgc

SEQ ID NO: 5504 - RNA, 16 nt, Homo sapiens
  source 1..16: mol_type = genomic RNA
agcccttgttactgca

SEQ ID NO: 5505 - RNA, 16 nt, Homo sapiens
  source 1..16: mol_type = genomic RNA
gcccttgttactgcac

SEQ ID NO: 5506 - RNA, 16 nt, Homo sapiens
  source 1..16: mol_type = genomic RNA
cccttgttactgcacg

SEQ ID NO: 5507 - RNA, 16 nt, Homo sapiens
  source 1..16: mol_type = genomic RNA
ccaaacttcaccttgc

SEQ ID NO: 5508 - RNA, 16 nt, Homo sapiens
  source 1..16: mol_type = genomic RNA
aaacttcaccttgcac

SEQ ID NO: 5509 - RNA, 16 nt, Homo sapiens
  source 1..16: mol_type = genomic RNA
aacttcaccttgcaca

SEQ ID NO: 5510 - RNA, 16 nt, Homo sapiens
  source 1..16: mol_type = genomic RNA
acttcaccttgcacac

SEQ ID NO: 5511 - RNA, 16 nt, Homo sapiens
  source 1..16: mol_type = genomic RNA
ttcaccttgcacacag

SEQ ID NO: 5512 - RNA, 16 nt, Homo sapiens
  source 1..16: mol_type = genomic RNA
tcaccttgcacacagt

SEQ ID NO: 5513 - RNA, 16 nt, Homo sapiens
  source 1..16: mol_type = genomic RNA
taacagacaatgcaca

SEQ ID NO: 5514 - RNA, 16 nt, Homo sapiens
  source 1..16: mol_type = genomic RNA
aacagacaatgcacaa

SEQ ID NO: 5515 - RNA, 16 nt, Homo sapiens
  source 1..16: mol_type = genomic RNA
acagacaatgcacaaa

SEQ ID NO: 5516 - RNA, 16 nt, Homo sapiens
  source 1..16: mol_type = genomic RNA
cagacaatgcacaaat

SEQ ID NO: 5517 - RNA, 16 nt, Homo sapiens
  source 1..16: mol_type = genomic RNA
agacaatgcacaaatc

SEQ ID NO: 5518 - RNA, 16 nt, Homo sapiens
  source 1..16: mol_type = genomic RNA
gacaatgcacaaatcc

SEQ ID NO: 5519 - RNA, 16 nt, Homo sapiens
  source 1..16: mol_type = genomic RNA
acaatgcacaaatcca

SEQ ID NO: 5520 - RNA, 16 nt, Homo sapiens
  source 1..16: mol_type = genomic RNA
caatgcacaaatccac

SEQ ID NO: 5521 - RNA, 16 nt, Homo sapiens
  source 1..16: mol_type = genomic RNA
aatgcacaaatccact

SEQ ID NO: 5522 - RNA, 16 nt, Homo sapiens
  source 1..16: mol_type = genomic RNA
tgcacaaatccacttc

SEQ ID NO: 5523 - RNA, 16 nt, Homo sapiens
  source 1..16: mol_type = genomic RNA
gcacaaatccacttcc

SEQ ID NO: 5524 - RNA, 16 nt, Homo sapiens
  source 1..16: mol_type = genomic RNA
ccacttccttatggac

SEQ ID NO: 5525 - RNA, 16 nt, Homo sapiens
  source 1..16: mol_type = genomic RNA
acttccttatggacgg

SEQ ID NO: 5526 - RNA, 16 nt, Homo sapiens
  source 1..16: mol_type = genomic RNA
cttccttatggacgga

SEQ ID NO: 5527 - RNA, 16 nt, Homo sapiens
  source 1..16: mol_type = genomic RNA
ttccttatggacggaa

SEQ ID NO: 5528 - RNA, 16 nt, Homo sapiens
  source 1..16: mol_type = genomic RNA
tccttatggacggaaa

SEQ ID NO: 5529 - RNA, 16 nt, Homo sapiens
  source 1..16: mol_type = genomic RNA
ccttatggacggaaat

SEQ ID NO: 5530 - RNA, 16 nt, Homo sapiens
  source 1..16: mol_type = genomic RNA
tatggacggaaattct

SEQ ID NO: 5531 - RNA, 16 nt, Homo sapiens
  source 1..16: mol_type = genomic RNA
atggacggaaattctg

SEQ ID NO: 5532 - RNA, 16 nt, Homo sapiens
  source 1..16: mol_type = genomic RNA
tggacggaaattctga

SEQ ID NO: 5533 - RNA, 16 nt, Homo sapiens
  source 1..16: mol_type = genomic RNA
ggacggaaattctgaa

SEQ ID NO: 5534 - RNA, 16 nt, Homo sapiens
  source 1..16: mol_type = genomic RNA
tccttttatgcctggc

SEQ ID NO: 5535 - RNA, 16 nt, Homo sapiens
  source 1..16: mol_type = genomic RNA
ccttttatgcctggcc

SEQ ID NO: 5536 - RNA, 16 nt, Homo sapiens
  source 1..16: mol_type = genomic RNA
ttatgcctggcctttc

SEQ ID NO: 5537 - RNA, 16 nt, Homo sapiens
  source 1..16: mol_type = genomic RNA
tatgcctggcctttcc

SEQ ID NO: 5538 - RNA, 16 nt, Homo sapiens
  source 1..16: mol_type = genomic RNA
atgcctggcctttcca

SEQ ID NO: 5539 - RNA, 16 nt, Homo sapiens
  source 1..16: mol_type = genomic RNA
tgcctggcctttccat

SEQ ID NO: 5540 - RNA, 16 nt, Homo sapiens
  source 1..16: mol_type = genomic RNA
gcctggcctttccatc

SEQ ID NO: 5541 - RNA, 16 nt, Homo sapiens
  source 1..16: mol_type = genomic RNA
cctggcctttccatcc

SEQ ID NO: 5542 - RNA, 16 nt, Homo sapiens
  source 1..16: mol_type = genomic RNA
ctggcctttccatcct

SEQ ID NO: 5543 - RNA, 16 nt, Homo sapiens
  source 1..16: mol_type = genomic RNA
tggcctttccatcctt

SEQ ID NO: 5544 - RNA, 16 nt, Homo sapiens
  source 1..16: mol_type = genomic RNA
ggcctttccatccttc

SEQ ID NO: 5545 - RNA, 16 nt, Homo sapiens
  source 1..16: mol_type = genomic RNA
ttcccctttcccatgc

SEQ ID NO: 5546 - RNA, 16 nt, Homo sapiens
  source 1..16: mol_type = genomic RNA
tcccctttcccatgct

SEQ ID NO: 5547 - RNA, 16 nt, Homo sapiens
  source 1..16: mol_type = genomic RNA
cccctttcccatgctg

SEQ ID NO: 5548 - RNA, 16 nt, Homo sapiens
  source 1..16: mol_type = genomic RNA
ccctttcccatgctgt

SEQ ID NO: 5549 - RNA, 16 nt, Homo sapiens
  source 1..16: mol_type = genomic RNA
ttcccatgctgtgaat

SEQ ID NO: 5550 - RNA, 16 nt, Homo sapiens
  source 1..16: mol_type = genomic RNA
tcccatgctgtgaatg

SEQ ID NO: 5551 - RNA, 16 nt, Homo sapiens
  source 1..16: mol_type = genomic RNA
cccatgctgtgaatga

SEQ ID NO: 5552 - RNA, 16 nt, Homo sapiens
  source 1..16: mol_type = genomic RNA
ccatgctgtgaatgat

SEQ ID NO: 5553 - RNA, 16 nt, Homo sapiens
  source 1..16: mol_type = genomic RNA
taatctcagtgacagg

SEQ ID NO: 5554 - RNA, 16 nt, Homo sapiens
  source 1..16: mol_type = genomic RNA
aatctcagtgacaggg

SEQ ID NO: 5555 - RNA, 16 nt, Homo sapiens
  source 1..16: mol_type = genomic RNA
atctcagtgacagggg

SEQ ID NO: 5556 - RNA, 16 nt, Homo sapiens
  source 1..16: mol_type = genomic RNA
tctcagtgacagggga

SEQ ID NO: 5557 - RNA, 16 nt, Homo sapiens
  source 1..16: mol_type = genomic RNA
ctcagtgacaggggaa

SEQ ID NO: 5558 - RNA, 16 nt, Homo sapiens
  source 1..16: mol_type = genomic RNA
tcagtgacaggggaac

SEQ ID NO: 5559 - RNA, 16 nt, Homo sapiens
  source 1..16: mol_type = genomic RNA
cagtgacaggggaaca

SEQ ID NO: 5560 - RNA, 16 nt, Homo sapiens
  source 1..16: mol_type = genomic RNA
agtgacaggggaacac

SEQ ID NO: 5561 - RNA, 16 nt, Homo sapiens
  source 1..16: mol_type = genomic RNA
gtgacaggggaacaca

SEQ ID NO: 5562 - RNA, 16 nt, Homo sapiens
  source 1..16: mol_type = genomic RNA
tgacaggggaacacag

SEQ ID NO: 5563 - RNA, 16 nt, Homo sapiens
  source 1..16: mol_type = genomic RNA
acaggggaacacaggt

SEQ ID NO: 5564 - RNA, 16 nt, Homo sapiens
  source 1..16: mol_type = genomic RNA
caggggaacacaggta

SEQ ID NO: 5565 - RNA, 16 nt, Homo sapiens
  source 1..16: mol_type = genomic RNA
aggggaacacaggtag

SEQ ID NO: 5566 - RNA, 16 nt, Homo sapiens
  source 1..16: mol_type = genomic RNA
gggaacacaggtagct

SEQ ID NO: 5567 - RNA, 16 nt, Homo sapiens
  source 1..16: mol_type = genomic RNA
ggaacacaggtagctc

SEQ ID NO: 5568 - RNA, 16 nt, Homo sapiens
  source 1..16: mol_type = genomic RNA
gaacacaggtagctct

SEQ ID NO: 5569 - RNA, 16 nt, Homo sapiens
  source 1..16: mol_type = genomic RNA
aacacaggtagctcta

SEQ ID NO: 5570 - RNA, 16 nt, Homo sapiens
  source 1..16: mol_type = genomic RNA
acacaggtagctctaa

SEQ ID NO: 5571 - RNA, 16 nt, Homo sapiens
  source 1..16: mol_type = genomic RNA
cacaggtagctctaat

SEQ ID NO: 5572 - RNA, 16 nt, Homo sapiens
  source 1..16: mol_type = genomic RNA
acaggtagctctaata

SEQ ID NO: 5573 - RNA, 16 nt, Homo sapiens
  source 1..16: mol_type = genomic RNA
atatagctgtgactga

SEQ ID NO: 5574 - RNA, 16 nt, Homo sapiens
  source 1..16: mol_type = genomic RNA
tatagctgtgactgag

SEQ ID NO: 5575 - RNA, 16 nt, Homo sapiens
  source 1..16: mol_type = genomic RNA
atagctgtgactgaga

SEQ ID NO: 5576 - RNA, 16 nt, Homo sapiens
  source 1..16: mol_type = genomic RNA
tccactgcattctagg

SEQ ID NO: 5577 - RNA, 16 nt, Homo sapiens
  source 1..16: mol_type = genomic RNA
ccactgcattctagga

SEQ ID NO: 5578 - RNA, 16 nt, Homo sapiens
  source 1..16: mol_type = genomic RNA
cactgcattctaggaa

SEQ ID NO: 5579 - RNA, 16 nt, Homo sapiens
  source 1..16: mol_type = genomic RNA
actgcattctaggaac

SEQ ID NO: 5580 - RNA, 16 nt, Homo sapiens
  source 1..16: mol_type = genomic RNA
ctgcattctaggaaca

SEQ ID NO: 5581 - RNA, 16 nt, Homo sapiens
  source 1..16: mol_type = genomic RNA
tgcattctaggaacag

SEQ ID NO: 5582 - RNA, 16 nt, Homo sapiens
  source 1..16: mol_type = genomic RNA
gcattctaggaacagt

SEQ ID NO: 5583 - RNA, 16 nt, Homo sapiens
  source 1..16: mol_type = genomic RNA
tctaggaacagtaaga

SEQ ID NO: 5584 - RNA, 16 nt, Homo sapiens
  source 1..16: mol_type = genomic RNA
ctaggaacagtaagag

SEQ ID NO: 5585 - RNA, 16 nt, Homo sapiens
  source 1..16: mol_type = genomic RNA
taggaacagtaagagg

SEQ ID NO: 5586 - RNA, 16 nt, Homo sapiens
  source 1..16: mol_type = genomic RNA
aggaacagtaagagga

SEQ ID NO: 5587 - RNA, 16 nt, Homo sapiens
  source 1..16: mol_type = genomic RNA
ggaacagtaagaggac

SEQ ID NO: 5588 - RNA, 16 nt, Homo sapiens
  source 1..16: mol_type = genomic RNA
gaacagtaagaggacc

SEQ ID NO: 5589 - RNA, 16 nt, Homo sapiens
  source 1..16: mol_type = genomic RNA
aacagtaagaggacct

SEQ ID NO: 5590 - RNA, 16 nt, Homo sapiens
  source 1..16: mol_type = genomic RNA
acagtaagaggacctt

SEQ ID NO: 5591 - RNA, 16 nt, Homo sapiens
  source 1..16: mol_type = genomic RNA
cagtaagaggaccttg

SEQ ID NO: 5592 - RNA, 16 nt, Homo sapiens
  source 1..16: mol_type = genomic RNA
agtaagaggaccttgt

SEQ ID NO: 5593 - RNA, 16 nt, Homo sapiens
  source 1..16: mol_type = genomic RNA
gtaagaggaccttgtg

SEQ ID NO: 5594 - RNA, 16 nt, Homo sapiens
  source 1..16: mol_type = genomic RNA
taagaggaccttgtga

SEQ ID NO: 5595 - RNA, 16 nt, Homo sapiens
  source 1..16: mol_type = genomic RNA
aagaggaccttgtgag

SEQ ID NO: 5596 - RNA, 16 nt, Homo sapiens
  source 1..16: mol_type = genomic RNA
agaggaccttgtgagt

SEQ ID NO: 5597 - RNA, 16 nt, Homo sapiens
  source 1..16: mol_type = genomic RNA
gaggaccttgtgagtg

SEQ ID NO: 5598 - RNA, 16 nt, Homo sapiens
  source 1..16: mol_type = genomic RNA
aggaccttgtgagtga

SEQ ID NO: 5599 - RNA, 16 nt, Homo sapiens
  source 1..16: mol_type = genomic RNA
ggaccttgtgagtgaa

SEQ ID NO: 5600 - RNA, 16 nt, Homo sapiens
  source 1..16: mol_type = genomic RNA
gaccttgtgagtgaat

SEQ ID NO: 5601 - RNA, 16 nt, Homo sapiens
  source 1..16: mol_type = genomic RNA
ccacattacagagtgg

SEQ ID NO: 5602 - RNA, 16 nt, Homo sapiens
  source 1..16: mol_type = genomic RNA
cacattacagagtggg

SEQ ID NO: 5603 - RNA, 16 nt, Homo sapiens
  source 1..16: mol_type = genomic RNA
acattacagagtgggt

SEQ ID NO: 5604 - RNA, 16 nt, Homo sapiens
  source 1..16: mol_type = genomic RNA
cattacagagtgggta

SEQ ID NO: 5605 - RNA, 16 nt, Homo sapiens
  source 1..16: mol_type = genomic RNA
attacagagtgggtaa

SEQ ID NO: 5606 - RNA, 16 nt, Homo sapiens
  source 1..16: mol_type = genomic RNA
ttacagagtgggtaat

SEQ ID NO: 5607 - RNA, 16 nt, Homo sapiens
  source 1..16: mol_type = genomic RNA
tacagagtgggtaata

SEQ ID NO: 5608 - RNA, 16 nt, Homo sapiens
  source 1..16: mol_type = genomic RNA
acagagtgggtaataa

SEQ ID NO: 5609 - RNA, 16 nt, Homo sapiens
  source 1..16: mol_type = genomic RNA
cagagtgggtaataag

SEQ ID NO: 5610 - RNA, 16 nt, Homo sapiens
  source 1..16: mol_type = genomic RNA
agagtgggtaataagc

SEQ ID NO: 5611 - RNA, 16 nt, Homo sapiens
  source 1..16: mol_type = genomic RNA
gagtgggtaataagca

SEQ ID NO: 5612 - RNA, 16 nt, Homo sapiens
  source 1..16: mol_type = genomic RNA
agtgggtaataagcag

SEQ ID NO: 5613 - RNA, 16 nt, Homo sapiens
  source 1..16: mol_type = genomic RNA
gtgggtaataagcaga

SEQ ID NO: 5614 - RNA, 16 nt, Homo sapiens
  source 1..16: mol_type = genomic RNA
tgggtaataagcagat

SEQ ID NO: 5615 - RNA, 16 nt, Homo sapiens
  source 1..16: mol_type = genomic RNA
gggtaataagcagatt

SEQ ID NO: 5616 - RNA, 17 nt, Homo sapiens
  source 1..17: mol_type = genomic RNA
cctctctctgcccgcgt

SEQ ID NO: 5617 - RNA, 17 nt, Homo sapiens
  source 1..17: mol_type = genomic RNA
ctctctctgcccgcgtc

SEQ ID NO: 5618 - RNA, 17 nt, Homo sapiens
  source 1..17: mol_type = genomic RNA
tctctctgcccgcgtcc

SEQ ID NO: 5619 - RNA, 17 nt, Homo sapiens
  source 1..17: mol_type = genomic RNA
ctctctgcccgcgtccg

SEQ ID NO: 5620 - RNA, 17 nt, Homo sapiens
  source 1..17: mol_type = genomic RNA
tctctgcccgcgtccgt

SEQ ID NO: 5621 - RNA, 17 nt, Homo sapiens
  source 1..17: mol_type = genomic RNA
ctctgcccgcgtccgtc

SEQ ID NO: 5622 - RNA, 17 nt, Homo sapiens
  source 1..17: mol_type = genomic RNA
tctgcccgcgtccgtcc

SEQ ID NO: 5623 - RNA, 17 nt, Homo sapiens
  source 1..17: mol_type = genomic RNA
ctgcccgcgtccgtccg

SEQ ID NO: 5624 - RNA, 17 nt, Homo sapiens
  source 1..17: mol_type = genomic RNA
tgcccgcgtccgtccgt

SEQ ID NO: 5625 - RNA, 17 nt, Homo sapiens
  source 1..17: mol_type = genomic RNA
gcccgcgtccgtccgtg

SEQ ID NO: 5626 - RNA, 17 nt, Homo sapiens
  source 1..17: mol_type = genomic RNA
cccgcgtccgtccgtga

SEQ ID NO: 5627 - RNA, 17 nt, Homo sapiens
  source 1..17: mol_type = genomic RNA
ccgcgtccgtccgtgaa

SEQ ID NO: 5628 - RNA, 17 nt, Homo sapiens
  source 1..17: mol_type = genomic RNA
cgcgtccgtccgtgaaa

SEQ ID NO: 5629 - RNA, 17 nt, Homo sapiens
  source 1..17: mol_type = genomic RNA
gcgtccgtccgtgaaat

SEQ ID NO: 5630 - RNA, 17 nt, Homo sapiens
  source 1..17: mol_type = genomic RNA
cgtccgtccgtgaaatt

SEQ ID NO: 5631 - RNA, 17 nt, Homo sapiens
  source 1..17: mol_type = genomic RNA
gtccgtccgtgaaattc

SEQ ID NO: 5632 - RNA, 17 nt, Homo sapiens
  source 1..17: mol_type = genomic RNA
tccgtccgtgaaattcc

SEQ ID NO: 5633 - RNA, 17 nt, Homo sapiens
  source 1..17: mol_type = genomic RNA
ccgtccgtgaaattccg

SEQ ID NO: 5634 - RNA, 17 nt, Homo sapiens
  source 1..17: mol_type = genomic RNA
cgtccgtgaaattccgg

SEQ ID NO: 5635 - RNA, 17 nt, Homo sapiens
  source 1..17: mol_type = genomic RNA
gtccgtgaaattccggc

SEQ ID NO: 5636 - RNA, 17 nt, Homo sapiens
  source 1..17: mol_type = genomic RNA
tccgtgaaattccggcc

SEQ ID NO: 5637 - RNA, 17 nt, Homo sapiens
  source 1..17: mol_type = genomic RNA
ccgtgaaattccggccg

SEQ ID NO: 5638 - RNA, 17 nt, Homo sapiens
  source 1..17: mol_type = genomic RNA
cgtgaaattccggccgg

SEQ ID NO: 5639 - RNA, 17 nt, Homo sapiens
  source 1..17: mol_type = genomic RNA
gtgaaattccggccggg

SEQ ID NO: 5640 - RNA, 17 nt, Homo sapiens
  source 1..17: mol_type = genomic RNA
tgaaattccggccgggg

SEQ ID NO: 5641 - RNA, 17 nt, Homo sapiens
  source 1..17: mol_type = genomic RNA
gaaattccggccggggc

SEQ ID NO: 5642 - RNA, 17 nt, Homo sapiens
  source 1..17: mol_type = genomic RNA
aaattccggccggggct

SEQ ID NO: 5643 - RNA, 17 nt, Homo sapiens
  source 1..17: mol_type = genomic RNA
aattccggccggggctc

SEQ ID NO: 5644 - RNA, 17 nt, Homo sapiens
  source 1..17: mol_type = genomic RNA
attccggccggggctca

SEQ ID NO: 5645 - RNA, 17 nt, Homo sapiens
  source 1..17: mol_type = genomic RNA
cggggctcaccgcgatg

SEQ ID NO: 5646 - RNA, 17 nt, Homo sapiens
  source 1..17: mol_type = genomic RNA
ctcaccgcgatggccct

SEQ ID NO: 5647 - RNA, 17 nt, Homo sapiens
  source 1..17: mol_type = genomic RNA
tcaccgcgatggccctc

SEQ ID NO: 5648 - RNA, 17 nt, Homo sapiens
  source 1..17: mol_type = genomic RNA
caccgcgatggccctcc

SEQ ID NO: 5649 - RNA, 17 nt, Homo sapiens
  source 1..17: mol_type = genomic RNA
ccgcgatggccctcccg

SEQ ID NO: 5650 - RNA, 17 nt, Homo sapiens
  source 1..17: mol_type = genomic RNA
cgcgatggccctcccga

SEQ ID NO: 5651 - RNA, 17 nt, Homo sapiens
  source 1..17: mol_type = genomic RNA
cgatggccctcccgaca

SEQ ID NO: 5652 - RNA, 17 nt, Homo sapiens
  source 1..17: mol_type = genomic RNA
ccctcccgacaccctcg

SEQ ID NO: 5653 - RNA, 17 nt, Homo sapiens
  source 1..17: mol_type = genomic RNA
cctcccgacaccctcgg

SEQ ID NO: 5654 - RNA, 17 nt, Homo sapiens
  source 1..17: mol_type = genomic RNA
ctcccgacaccctcgga

SEQ ID NO: 5655 - RNA, 17 nt, Homo sapiens
  source 1..17: mol_type = genomic RNA
tcccgacaccctcggac

SEQ ID NO: 5656 - RNA, 17 nt, Homo sapiens
  source 1..17: mol_type = genomic RNA
cccgacaccctcggaca

SEQ ID NO: 5657 - RNA, 17 nt, Homo sapiens
  source 1..17: mol_type = genomic RNA
ccgacaccctcggacag

SEQ ID NO: 5658 - RNA, 17 nt, Homo sapiens
  source 1..17: mol_type = genomic RNA
cgacaccctcggacagc

SEQ ID NO: 5659 - RNA, 17 nt, Homo sapiens
  source 1..17: mol_type = genomic RNA
gacaccctcggacagca

SEQ ID NO: 5660 - RNA, 17 nt, Homo sapiens
  source 1..17: mol_type = genomic RNA
caccctcggacagcacc

SEQ ID NO: 5661 - RNA, 17 nt, Homo sapiens
  source 1..17: mol_type = genomic RNA
ccctcggacagcaccct

SEQ ID NO: 5662 - RNA, 17 nt, Homo sapiens
  source 1..17: mol_type = genomic RNA
cctcggacagcaccctc

SEQ ID NO: 5663 - RNA, 17 nt, Homo sapiens
  source 1..17: mol_type = genomic RNA
ctcggacagcaccctcc

SEQ ID NO: 5664 - RNA, 17 nt, Homo sapiens
  source 1..17: mol_type = genomic RNA
caccctccccgcggaag

SEQ ID NO: 5665 - RNA, 17 nt, Homo sapiens
  source 1..17: mol_type = genomic RNA
acggcgacggagactcg

SEQ ID NO: 5666 - RNA, 17 nt, Homo sapiens
  source 1..17: mol_type = genomic RNA
cggcgacggagactcgt

SEQ ID NO: 5667 - RNA, 17 nt, Homo sapiens
  source 1..17: mol_type = genomic RNA
ggcgacggagactcgtt

SEQ ID NO: 5668 - RNA, 17 nt, Homo sapiens
  source 1..17: mol_type = genomic RNA
gcgacggagactcgttt

SEQ ID NO: 5669 - RNA, 17 nt, Homo sapiens
  source 1..17: mol_type = genomic RNA
cgacggagactcgtttg

SEQ ID NO: 5670 - RNA, 17 nt, Homo sapiens
  source 1..17: mol_type = genomic RNA
gacggagactcgtttgg

SEQ ID NO: 5671 - RNA, 17 nt, Homo sapiens
  source 1..17: mol_type = genomic RNA
gccctgcgagcctgctt

SEQ ID NO: 5672 - RNA, 17 nt, Homo sapiens
  source 1..17: mol_type = genomic RNA
ccctgcgagcctgcttt

SEQ ID NO: 5673 - RNA, 17 nt, Homo sapiens
  source 1..17: mol_type = genomic RNA
cctgcgagcctgctttg

SEQ ID NO: 5674 - RNA, 17 nt, Homo sapiens
  source 1..17: mol_type = genomic RNA
ctgcgagcctgctttga

SEQ ID NO: 5675 - RNA, 17 nt, Homo sapiens
  source 1..17: mol_type = genomic RNA
tgcgagcctgctttgag

SEQ ID NO: 5676 - RNA, 17 nt, Homo sapiens
  source 1..17: mol_type = genomic RNA
gcgagcctgctttgagc

SEQ ID NO: 5677 - RNA, 17 nt, Homo sapiens
  source 1..17: mol_type = genomic RNA
cgagcctgctttgagcg

SEQ ID NO: 5678 - RNA, 17 nt, Homo sapiens
  source 1..17: mol_type = genomic RNA
gagcctgctttgagcgg

SEQ ID NO: 5679 - RNA, 17 nt, Homo sapiens
  source 1..17: mol_type = genomic RNA
agcctgctttgagcgga

SEQ ID NO: 5680 - RNA, 17 nt, Homo sapiens
  source 1..17: mol_type = genomic RNA
gcctgctttgagcggaa

SEQ ID NO: 5681 - RNA, 17 nt, Homo sapiens
  source 1..17: mol_type = genomic RNA
cctgctttgagcggaac

SEQ ID NO: 5682 - RNA, 17 nt, Homo sapiens
  source 1..17: mol_type = genomic RNA
ctgctttgagcggaacc

SEQ ID NO: 5683 - RNA, 17 nt, Homo sapiens
  source 1..17: mol_type = genomic RNA
tgctttgagcggaaccc

SEQ ID NO: 5684 - RNA, 17 nt, Homo sapiens
  source 1..17: mol_type = genomic RNA
gctttgagcggaacccg

SEQ ID NO: 5685 - RNA, 17 nt, Homo sapiens
  source 1..17: mol_type = genomic RNA
ctttgagcggaacccgt

SEQ ID NO: 5686 - RNA, 17 nt, Homo sapiens
  source 1..17: mol_type = genomic RNA
tttgagcggaacccgta

SEQ ID NO: 5687 - RNA, 17 nt, Homo sapiens
  source 1..17: mol_type = genomic RNA
ttgagcggaacccgtac

SEQ ID NO: 5688 - RNA, 17 nt, Homo sapiens
  source 1..17: mol_type = genomic RNA
tgagcggaacccgtacc

SEQ ID NO: 5689 - RNA, 17 nt, Homo sapiens
  source 1..17: mol_type = genomic RNA
gagcggaacccgtaccc

SEQ ID NO: 5690 - RNA, 17 nt, Homo sapiens
  source 1..17: mol_type = genomic RNA
agcggaacccgtacccg

SEQ ID NO: 5691 - RNA, 17 nt, Homo sapiens
  source 1..17: mol_type = genomic RNA
cggaacccgtacccggg

SEQ ID NO: 5692 - RNA, 17 nt, Homo sapiens
  source 1..17: mol_type = genomic RNA
gaacccgtacccgggca

SEQ ID NO: 5693 - RNA, 17 nt, Homo sapiens
  source 1..17: mol_type = genomic RNA
aacccgtacccgggcat

SEQ ID NO: 5694 - RNA, 17 nt, Homo sapiens
  source 1..17: mol_type = genomic RNA
acccgtacccgggcatc

SEQ ID NO: 5695 - RNA, 17 nt, Homo sapiens
  source 1..17: mol_type = genomic RNA
cccgtacccgggcatcg

SEQ ID NO: 5696 - RNA, 17 nt, Homo sapiens
  source 1..17: mol_type = genomic RNA
ccgtacccgggcatcgc

SEQ ID NO: 5697 - RNA, 17 nt, Homo sapiens
  source 1..17: mol_type = genomic RNA
cgtacccgggcatcgcc

SEQ ID NO: 5698 - RNA, 17 nt, Homo sapiens
  source 1..17: mol_type = genomic RNA
gtacccgggcatcgcca

SEQ ID NO: 5699 - RNA, 17 nt, Homo sapiens
  source 1..17: mol_type = genomic RNA
gcccaggccatcggcat

SEQ ID NO: 5700 - RNA, 17 nt, Homo sapiens
  source 1..17: mol_type = genomic RNA
cccaggccatcggcatt

SEQ ID NO: 5701 - RNA, 17 nt, Homo sapiens
  source 1..17: mol_type = genomic RNA
ccaggccatcggcattc

SEQ ID NO: 5702 - RNA, 17 nt, Homo sapiens
  source 1..17: mol_type = genomic RNA
caggccatcggcattcc

SEQ ID NO: 5703 - RNA, 17 nt, Homo sapiens
  source 1..17: mol_type = genomic RNA
gagcccagggtccagat

SEQ ID NO: 5704 - RNA, 17 nt, Homo sapiens
  source 1..17: mol_type = genomic RNA
agcccagggtccagatt

SEQ ID NO: 5705 - RNA, 17 nt, Homo sapiens
  source 1..17: mol_type = genomic RNA
gcccagggtccagattt

SEQ ID NO: 5706 - RNA, 17 nt, Homo sapiens
  source 1..17: mol_type = genomic RNA
cccagggtccagatttg

SEQ ID NO: 5707 - RNA, 17 nt, Homo sapiens
  source 1..17: mol_type = genomic RNA
ccagggtccagatttgg

SEQ ID NO: 5708 - RNA, 17 nt, Homo sapiens
  source 1..17: mol_type = genomic RNA
cagggtccagatttggt

SEQ ID NO: 5709 - RNA, 17 nt, Homo sapiens
  source 1..17: mol_type = genomic RNA
agggtccagatttggtt

SEQ ID NO: 5710 - RNA, 17 nt, Homo sapiens
  source 1..17: mol_type = genomic RNA
gggtccagatttggttt

SEQ ID NO: 5711 - RNA, 17 nt, Homo sapiens
  source 1..17: mol_type = genomic RNA
tggtttcagaatgagag

SEQ ID NO: 5712 - RNA, 17 nt, Homo sapiens
  source 1..17: mol_type = genomic RNA
ggtttcagaatgagagg

SEQ ID NO: 5713 - RNA, 17 nt, Homo sapiens
  source 1..17: mol_type = genomic RNA
gtttcagaatgagaggt

SEQ ID NO: 5714 - RNA, 17 nt, Homo sapiens
  source 1..17: mol_type = genomic RNA
tttcagaatgagaggtc

SEQ ID NO: 5715 - RNA, 17 nt, Homo sapiens
  source 1..17: mol_type = genomic RNA
ttcagaatgagaggtca

SEQ ID NO: 5716 - RNA, 17 nt, Homo sapiens
  source 1..17: mol_type = genomic RNA
tcagaatgagaggtcac

SEQ ID NO: 5717 - RNA, 17 nt, Homo sapiens
  source 1..17: mol_type = genomic RNA
cagaatgagaggtcacg

SEQ ID NO: 5718 - RNA, 17 nt, Homo sapiens
  source 1..17: mol_type = genomic RNA
agaatgagaggtcacgc

SEQ ID NO: 5719 - RNA, 17 nt, Homo sapiens
  source 1..17: mol_type = genomic RNA
gaatgagaggtcacgcc

SEQ ID NO: 5720 - RNA, 17 nt, Homo sapiens
  source 1..17: mol_type = genomic RNA
aatgagaggtcacgcca

SEQ ID NO: 5721 - RNA, 17 nt, Homo sapiens
  source 1..17: mol_type = genomic RNA
atgagaggtcacgccag

SEQ ID NO: 5722 - RNA, 17 nt, Homo sapiens
  source 1..17: mol_type = genomic RNA
tgagaggtcacgccagc

SEQ ID NO: 5723 - RNA, 17 nt, Homo sapiens
  source 1..17: mol_type = genomic RNA
gagaggtcacgccagct

SEQ ID NO: 5724 - RNA, 17 nt, Homo sapiens
  source 1..17: mol_type = genomic RNA
agaggtcacgccagctg

SEQ ID NO: 5725 - RNA, 17 nt, Homo sapiens
  source 1..17: mol_type = genomic RNA
gaggtcacgccagctga

SEQ ID NO: 5726 - RNA, 17 nt, Homo sapiens
  source 1..17: mol_type = genomic RNA
aggtcacgccagctgag

SEQ ID NO: 5727 - RNA, 17 nt, Homo sapiens
  source 1..17: mol_type = genomic RNA
ggtcacgccagctgagg

SEQ ID NO: 5728 - RNA, 17 nt, Homo sapiens
  source 1..17: mol_type = genomic RNA
tcacgccagctgaggca

SEQ ID NO: 5729 - RNA, 17 nt, Homo sapiens
  source 1..17: mol_type = genomic RNA
gggaatctcggccctgg

SEQ ID NO: 5730 - RNA, 17 nt, Homo sapiens
  source 1..17: mol_type = genomic RNA
gaatctcggccctggcc

SEQ ID NO: 5731 - RNA, 17 nt, Homo sapiens
  source 1..17: mol_type = genomic RNA
cctcccggagtccagga

SEQ ID NO: 5732 - RNA, 17 nt, Homo sapiens
  source 1..17: mol_type = genomic RNA
ctcccggagtccaggat

SEQ ID NO: 5733 - RNA, 17 nt, Homo sapiens
  source 1..17: mol_type = genomic RNA
tcccggagtccaggatt

SEQ ID NO: 5734 - RNA, 17 nt, Homo sapiens
  source 1..17: mol_type = genomic RNA
cccggagtccaggattc

SEQ ID NO: 5735 - RNA, 17 nt, Homo sapiens
  source 1..17: mol_type = genomic RNA
ccggagtccaggattca

SEQ ID NO: 5736 - RNA, 17 nt, Homo sapiens
  source 1..17: mol_type = genomic RNA
cggagtccaggattcag

SEQ ID NO: 5737 - RNA, 17 nt, Homo sapiens
  source 1..17: mol_type = genomic RNA
ggagtccaggattcaga

SEQ ID NO: 5738 - RNA, 17 nt, Homo sapiens
  source 1..17: mol_type = genomic RNA
gagtccaggattcagat

SEQ ID NO: 5739 - RNA, 17 nt, Homo sapiens
  source 1..17: mol_type = genomic RNA
agtccaggattcagatc

SEQ ID NO: 5740 - RNA, 17 nt, Homo sapiens
  source 1..17: mol_type = genomic RNA
gtccaggattcagatct

SEQ ID NO: 5741 - RNA, 17 nt, Homo sapiens
  source 1..17: mol_type = genomic RNA
tccaggattcagatctg

SEQ ID NO: 5742 - RNA, 17 nt, Homo sapiens
  source 1..17: mol_type = genomic RNA
ccaggattcagatctgg

SEQ ID NO: 5743 - RNA, 17 nt, Homo sapiens
  source 1..17: mol_type = genomic RNA
caggattcagatctggt

SEQ ID NO: 5744 - RNA, 17 nt, Homo sapiens
  source 1..17: mol_type = genomic RNA
aggattcagatctggtt

SEQ ID NO: 5745 - RNA, 17 nt, Homo sapiens
  source 1..17: mol_type = genomic RNA
ggtttcagaatcgaagg

SEQ ID NO: 5746 - RNA, 17 nt, Homo sapiens
  source 1..17: mol_type = genomic RNA
gtttcagaatcgaaggg

SEQ ID NO: 5747 - RNA, 17 nt, Homo sapiens
  source 1..17: mol_type = genomic RNA
tttcagaatcgaagggc

SEQ ID NO: 5748 - RNA, 17 nt, Homo sapiens
  source 1..17: mol_type = genomic RNA
ttcagaatcgaagggcc

SEQ ID NO: 5749 - RNA, 17 nt, Homo sapiens
  source 1..17: mol_type = genomic RNA
tcagaatcgaagggcca

SEQ ID NO: 5750 - RNA, 17 nt, Homo sapiens
  source 1..17: mol_type = genomic RNA
cagaatcgaagggccag

SEQ ID NO: 5751 - RNA, 17 nt, Homo sapiens
  source 1..17: mol_type = genomic RNA
agaatcgaagggccagg

SEQ ID NO: 5752 - RNA, 17 nt, Homo sapiens
  source 1..17: mol_type = genomic RNA
aatcgaagggccaggca

SEQ ID NO: 5753 - RNA, 17 nt, Homo sapiens
  source 1..17: mol_type = genomic RNA
tccacctccccagcccg

SEQ ID NO: 5754 - RNA, 17 nt, Homo sapiens
  source 1..17: mol_type = genomic RNA
acgcctccgcctccgcg

SEQ ID NO: 5755 - RNA, 17 nt, Homo sapiens
  source 1..17: mol_type = genomic RNA
cctccgcctccgcgcgg

SEQ ID NO: 5756 - RNA, 17 nt, Homo sapiens
  source 1..17: mol_type = genomic RNA
gggcagatgcaaggcat

SEQ ID NO: 5757 - RNA, 17 nt, Homo sapiens
  source 1..17: mol_type = genomic RNA
ggcagatgcaaggcatc

SEQ ID NO: 5758 - RNA, 17 nt, Homo sapiens
  source 1..17: mol_type = genomic RNA
gcagatgcaaggcatcc

SEQ ID NO: 5759 - RNA, 17 nt, Homo sapiens
  source 1..17: mol_type = genomic RNA
cagatgcaaggcatccc

SEQ ID NO: 5760 - RNA, 17 nt, Homo sapiens
  source 1..17: mol_type = genomic RNA
agatgcaaggcatcccg

SEQ ID NO: 5761 - RNA, 17 nt, Homo sapiens
  source 1..17: mol_type = genomic RNA
gatgcaaggcatcccgg

SEQ ID NO: 5762 - RNA, 17 nt, Homo sapiens
  source 1..17: mol_type = genomic RNA
atgcaaggcatcccggc

SEQ ID NO: 5763 - RNA, 17 nt, Homo sapiens
  source 1..17: mol_type = genomic RNA
tgcaaggcatcccggcg

SEQ ID NO: 5764 - RNA, 17 nt, Homo sapiens
  source 1..17: mol_type = genomic RNA
atcccggcgccctccca

SEQ ID NO: 5765 - RNA, 17 nt, Homo sapiens
  source 1..17: mol_type = genomic RNA
ccctcccaggcgctcca

SEQ ID NO: 5766 - RNA, 17 nt, Homo sapiens
  source 1..17: mol_type = genomic RNA
cctcccaggcgctccag

SEQ ID NO: 5767 - RNA, 17 nt, Homo sapiens
  source 1..17: mol_type = genomic RNA
ctcccaggcgctccagg

SEQ ID NO: 5768 - RNA, 17 nt, Homo sapiens
  source 1..17: mol_type = genomic RNA
ctggaggcctcggaaga

SEQ ID NO: 5769 - RNA, 17 nt, Homo sapiens
  source 1..17: mol_type = genomic RNA
ctcggaagaggccgcct

SEQ ID NO: 5770 - RNA, 17 nt, Homo sapiens
  source 1..17: mol_type = genomic RNA
cggaagaggccgcctcg

SEQ ID NO: 5771 - RNA, 17 nt, Homo sapiens
  source 1..17: mol_type = genomic RNA
aagaggccgcctcgctg

SEQ ID NO: 5772 - RNA, 17 nt, Homo sapiens
  source 1..17: mol_type = genomic RNA
ccgcctcgctggaagca

SEQ ID NO: 5773 - RNA, 17 nt, Homo sapiens
  source 1..17: mol_type = genomic RNA
cgcctcgctggaagcac

SEQ ID NO: 5774 - RNA, 17 nt, Homo sapiens
  source 1..17: mol_type = genomic RNA
cctcgctggaagcaccc

SEQ ID NO: 5775 - RNA, 17 nt, Homo sapiens
  source 1..17: mol_type = genomic RNA
ctcgctggaagcacccc

SEQ ID NO: 5776 - RNA, 17 nt, Homo sapiens
  source 1..17: mol_type = genomic RNA
tcgctggaagcacccct

SEQ ID NO: 5777 - RNA, 17 nt, Homo sapiens
  source 1..17: mol_type = genomic RNA
cgctggaagcacccctc

SEQ ID NO: 5778 - RNA, 17 nt, Homo sapiens
  source 1..17: mol_type = genomic RNA
gctggaagcacccctca

SEQ ID NO: 5779 - RNA, 17 nt, Homo sapiens
  source 1..17: mol_type = genomic RNA
ctggaagcacccctcag

SEQ ID NO: 5780 - RNA, 17 nt, Homo sapiens
  source 1..17: mol_type = genomic RNA
ggaagcacccctcagcg

SEQ ID NO: 5781 - RNA, 17 nt, Homo sapiens
  source 1..17: mol_type = genomic RNA
gaagcacccctcagcga

SEQ ID NO: 5782 - RNA, 17 nt, Homo sapiens
  source 1..17: mol_type = genomic RNA
aagcacccctcagcgag

SEQ ID NO: 5783 - RNA, 17 nt, Homo sapiens
  source 1..17: mol_type = genomic RNA
cacccctcagcgaggaa

SEQ ID NO: 5784 - RNA, 17 nt, Homo sapiens
  source 1..17: mol_type = genomic RNA
acccctcagcgaggaag

SEQ ID NO: 5785 - RNA, 17 nt, Homo sapiens
  source 1..17: mol_type = genomic RNA
cccctcagcgaggaaga

SEQ ID NO: 5786 - RNA, 17 nt, Homo sapiens
  source 1..17: mol_type = genomic RNA
ccctcagcgaggaagaa

SEQ ID NO: 5787 - RNA, 17 nt, Homo sapiens
  source 1..17: mol_type = genomic RNA
cctcagcgaggaagaat

SEQ ID NO: 5788 - RNA, 17 nt, Homo sapiens
  source 1..17: mol_type = genomic RNA
ctcagcgaggaagaata

SEQ ID NO: 5789 - RNA, 17 nt, Homo sapiens
  source 1..17: mol_type = genomic RNA
tcagcgaggaagaatac

SEQ ID NO: 5790 - RNA, 17 nt, Homo sapiens
  source 1..17: mol_type = genomic RNA
cagcgaggaagaatacc

SEQ ID NO: 5791 - RNA, 17 nt, Homo sapiens
  source 1..17: mol_type = genomic RNA
agcgaggaagaataccg

SEQ ID NO: 5792 - RNA, 17 nt, Homo sapiens
  source 1..17: mol_type = genomic RNA
gcgaggaagaataccgg

SEQ ID NO: 5793 - RNA, 17 nt, Homo sapiens
  source 1..17: mol_type = genomic RNA
cgaggaagaataccggg

SEQ ID NO: 5794 - RNA, 17 nt, Homo sapiens
  source 1..17: mol_type = genomic RNA
gaggaagaataccgggc

SEQ ID NO: 5795 - RNA, 17 nt, Homo sapiens
  source 1..17: mol_type = genomic RNA
aggaagaataccgggct

SEQ ID NO: 5796 - RNA, 17 nt, Homo sapiens
  source 1..17: mol_type = genomic RNA
ggaagaataccgggctc

SEQ ID NO: 5797 - RNA, 17 nt, Homo sapiens
  source 1..17: mol_type = genomic RNA
gaagaataccgggctct

SEQ ID NO: 5798 - RNA, 17 nt, Homo sapiens
  source 1..17: mol_type = genomic RNA
aagaataccgggctctg

SEQ ID NO: 5799 - RNA, 17 nt, Homo sapiens
  source 1..17: mol_type = genomic RNA
agaataccgggctctgc

SEQ ID NO: 5800 - RNA, 17 nt, Homo sapiens
  source 1..17: mol_type = genomic RNA
gaataccgggctctgct

SEQ ID NO: 5801 - RNA, 17 nt, Homo sapiens
  source 1..17: mol_type = genomic RNA
aataccgggctctgctg

SEQ ID NO: 5802 - RNA, 17 nt, Homo sapiens
  source 1..17: mol_type = genomic RNA
ataccgggctctgctgg

SEQ ID NO: 5803 - RNA, 17 nt, Homo sapiens
  source 1..17: mol_type = genomic RNA
ctctgctggaggagctt

SEQ ID NO: 5804 - RNA, 17 nt, Homo sapiens
  source 1..17: mol_type = genomic RNA
tctgctggaggagcttt

SEQ ID NO: 5805 - RNA, 17 nt, Homo sapiens
  source 1..17: mol_type = genomic RNA
ctgctggaggagcttta

SEQ ID NO: 5806 - RNA, 17 nt, Homo sapiens
  source 1..17: mol_type = genomic RNA
tgctggaggagctttag

SEQ ID NO: 5807 - RNA, 17 nt, Homo sapiens
  source 1..17: mol_type = genomic RNA
gctggaggagctttagg

SEQ ID NO: 5808 - RNA, 17 nt, Homo sapiens
  source 1..17: mol_type = genomic RNA
ctggaggagctttagga

SEQ ID NO: 5809 - RNA, 17 nt, Homo sapiens
  source 1..17: mol_type = genomic RNA
tggaggagctttaggac

SEQ ID NO: 5810 - RNA, 17 nt, Homo sapiens
  source 1..17: mol_type = genomic RNA
ggaggagctttaggacg

SEQ ID NO: 5811 - RNA, 17 nt, Homo sapiens
  source 1..17: mol_type = genomic RNA
gaggagctttaggacgc

SEQ ID NO: 5812 - RNA, 17 nt, Homo sapiens
  source 1..17: mol_type = genomic RNA
aggagctttaggacgcg

SEQ ID NO: 5813 - RNA, 17 nt, Homo sapiens
  source 1..17: mol_type = genomic RNA
ggagctttaggacgcgg

SEQ ID NO: 5814 - RNA, 17 nt, Homo sapiens
  source 1..17: mol_type = genomic RNA
gagctttaggacgcggg

SEQ ID NO: 5815 - RNA, 17 nt, Homo sapiens
  source 1..17: mol_type = genomic RNA
agctttaggacgcgggg

SEQ ID NO: 5816 - RNA, 17 nt, Homo sapiens
  source 1..17: mol_type = genomic RNA
gctttaggacgcggggt

SEQ ID NO: 5817 - RNA, 17 nt, Homo sapiens
  source 1..17: mol_type = genomic RNA
ctttaggacgcggggtt

SEQ ID NO: 5818 - RNA, 17 nt, Homo sapiens
  source 1..17: mol_type = genomic RNA
tttaggacgcggggttg

SEQ ID NO: 5819 - RNA, 17 nt, Homo sapiens
  source 1..17: mol_type = genomic RNA
ttaggacgcggggttgg

SEQ ID NO: 5820 - RNA, 17 nt, Homo sapiens
  source 1..17: mol_type = genomic RNA
tcgggtggttcggggca

SEQ ID NO: 5821 - RNA, 17 nt, Homo sapiens
  source 1..17: mol_type = genomic RNA
cgggtggttcggggcag

SEQ ID NO: 5822 - RNA, 17 nt, Homo sapiens
  source 1..17: mol_type = genomic RNA
gggcggtggcctctctt

SEQ ID NO: 5823 - RNA, 17 nt, Homo sapiens
  source 1..17: mol_type = genomic RNA
ggcggtggcctctcttt

SEQ ID NO: 5824 - RNA, 17 nt, Homo sapiens
  source 1..17: mol_type = genomic RNA
gcggtggcctctctttc

SEQ ID NO: 5825 - RNA, 17 nt, Homo sapiens
  source 1..17: mol_type = genomic RNA
cggtggcctctctttcg

SEQ ID NO: 5826 - RNA, 17 nt, Homo sapiens
  source 1..17: mol_type = genomic RNA
ggtggcctctctttcgc

SEQ ID NO: 5827 - RNA, 17 nt, Homo sapiens
  source 1..17: mol_type = genomic RNA
gtggcctctctttcgcg

SEQ ID NO: 5828 - RNA, 17 nt, Homo sapiens
  source 1..17: mol_type = genomic RNA
tggcctctctttcgcgg

SEQ ID NO: 5829 - RNA, 17 nt, Homo sapiens
  source 1..17: mol_type = genomic RNA
ggcctctctttcgcggg

SEQ ID NO: 5830 - RNA, 17 nt, Homo sapiens
  source 1..17: mol_type = genomic RNA
gcctctctttcgcgggg

SEQ ID NO: 5831 - RNA, 17 nt, Homo sapiens
  source 1..17: mol_type = genomic RNA
cctctctttcgcgggga

SEQ ID NO: 5832 - RNA, 17 nt, Homo sapiens
  source 1..17: mol_type = genomic RNA
ctctctttcgcggggaa

SEQ ID NO: 5833 - RNA, 17 nt, Homo sapiens
  source 1..17: mol_type = genomic RNA
tctctttcgcggggaac

SEQ ID NO: 5834 - RNA, 17 nt, Homo sapiens
  source 1..17: mol_type = genomic RNA
ctctttcgcggggaaca

SEQ ID NO: 5835 - RNA, 17 nt, Homo sapiens
  source 1..17: mol_type = genomic RNA
tctttcgcggggaacac

SEQ ID NO: 5836 - RNA, 17 nt, Homo sapiens
  source 1..17: mol_type = genomic RNA
ctttcgcggggaacacc

SEQ ID NO: 5837 - RNA, 17 nt, Homo sapiens
  source 1..17: mol_type = genomic RNA
tttcgcggggaacacct

SEQ ID NO: 5838 - RNA, 17 nt, Homo sapiens
  source 1..17: mol_type = genomic RNA
ttcgcggggaacacctg

SEQ ID NO: 5839 - RNA, 17 nt, Homo sapiens
  source 1..17: mol_type = genomic RNA
gaacacctggctggcta

SEQ ID NO: 5840 - RNA, 17 nt, Homo sapiens
  source 1..17: mol_type = genomic RNA
acacctggctggctacg

SEQ ID NO: 5841 - RNA, 17 nt, Homo sapiens
  source 1..17: mol_type = genomic RNA
ctacggaggggcgtgtc

SEQ ID NO: 5842 - RNA, 17 nt, Homo sapiens
  source 1..17: mol_type = genomic RNA
tacggaggggcgtgtct

SEQ ID NO: 5843 - RNA, 17 nt, Homo sapiens
  source 1..17: mol_type = genomic RNA
cggaggggcgtgtctcc

SEQ ID NO: 5844 - RNA, 17 nt, Homo sapiens
  source 1..17: mol_type = genomic RNA
ggaggggcgtgtctccg

SEQ ID NO: 5845 - RNA, 17 nt, Homo sapiens
  source 1..17: mol_type = genomic RNA
ctccaccgggctgaccg

SEQ ID NO: 5846 - RNA, 17 nt, Homo sapiens
  source 1..17: mol_type = genomic RNA
ctgaccggcctgggatt

SEQ ID NO: 5847 - RNA, 17 nt, Homo sapiens
  source 1..17: mol_type = genomic RNA
tgaccggcctgggattc

SEQ ID NO: 5848 - RNA, 17 nt, Homo sapiens
  source 1..17: mol_type = genomic RNA
gaccggcctgggattcc

SEQ ID NO: 5849 - RNA, 17 nt, Homo sapiens
  source 1..17: mol_type = genomic RNA
accggcctgggattcct

SEQ ID NO: 5850 - RNA, 17 nt, Homo sapiens
  source 1..17: mol_type = genomic RNA
ccggcctgggattcctg

SEQ ID NO: 5851 - RNA, 17 nt, Homo sapiens
  source 1..17: mol_type = genomic RNA
cggcctgggattcctgc

SEQ ID NO: 5852 - RNA, 17 nt, Homo sapiens
  source 1..17: mol_type = genomic RNA
ggcctgggattcctgcc

SEQ ID NO: 5853 - RNA, 17 nt, Homo sapiens
  source 1..17: mol_type = genomic RNA
gcctgggattcctgcct

SEQ ID NO: 5854 - RNA, 17 nt, Homo sapiens
  source 1..17: mol_type = genomic RNA
cctgggattcctgcctt

SEQ ID NO: 5855 - RNA, 17 nt, Homo sapiens
  source 1..17: mol_type = genomic RNA
ctgggattcctgccttc

SEQ ID NO: 5856 - RNA, 17 nt, Homo sapiens
  source 1..17: mol_type = genomic RNA
tgggattcctgccttct

SEQ ID NO: 5857 - RNA, 17 nt, Homo sapiens
  source 1..17: mol_type = genomic RNA
gggattcctgccttcta

SEQ ID NO: 5858 - RNA, 17 nt, Homo sapiens
  source 1..17: mol_type = genomic RNA
ggattcctgccttctag

SEQ ID NO: 5859 - RNA, 17 nt, Homo sapiens
  source 1..17: mol_type = genomic RNA
gattcctgccttctagg

SEQ ID NO: 5860 - RNA, 17 nt, Homo sapiens
  source 1..17: mol_type = genomic RNA
attcctgccttctaggt

SEQ ID NO: 5861 - RNA, 17 nt, Homo sapiens
  source 1..17: mol_type = genomic RNA
ttcctgccttctaggtc

SEQ ID NO: 5862 - RNA, 17 nt, Homo sapiens
  source 1..17: mol_type = genomic RNA
tcctgccttctaggtct

SEQ ID NO: 5863 - RNA, 17 nt, Homo sapiens
  source 1..17: mol_type = genomic RNA
cccggtgagagactcca

SEQ ID NO: 5864 - RNA, 17 nt, Homo sapiens
  source 1..17: mol_type = genomic RNA
ccggtgagagactccac

SEQ ID NO: 5865 - RNA, 17 nt, Homo sapiens
  source 1..17: mol_type = genomic RNA
ttctttcctgggcatcc

SEQ ID NO: 5866 - RNA, 17 nt, Homo sapiens
  source 1..17: mol_type = genomic RNA
tctttcctgggcatccc

SEQ ID NO: 5867 - RNA, 17 nt, Homo sapiens
  source 1..17: mol_type = genomic RNA
ctttcctgggcatcccg

SEQ ID NO: 5868 - RNA, 17 nt, Homo sapiens
  source 1..17: mol_type = genomic RNA
tttcctgggcatcccgg

SEQ ID NO: 5869 - RNA, 17 nt, Homo sapiens
  source 1..17: mol_type = genomic RNA
ttcctgggcatcccggg

SEQ ID NO: 5870 - RNA, 17 nt, Homo sapiens
  source 1..17: mol_type = genomic RNA
gcatcccggggatccca

SEQ ID NO: 5871 - RNA, 17 nt, Homo sapiens
  source 1..17: mol_type = genomic RNA
catcccggggatcccag

SEQ ID NO: 5872 - RNA, 17 nt, Homo sapiens
  source 1..17: mol_type = genomic RNA
atcccggggatcccaga

SEQ ID NO: 5873 - RNA, 17 nt, Homo sapiens
  source 1..17: mol_type = genomic RNA
cggcccaggtaccagca

SEQ ID NO: 5874 - RNA, 17 nt, Homo sapiens
  source 1..17: mol_type = genomic RNA
cctgcagcctcccagct

SEQ ID NO: 5875 - RNA, 17 nt, Homo sapiens
  source 1..17: mol_type = genomic RNA
ctgcagcctcccagctg

SEQ ID NO: 5876 - RNA, 17 nt, Homo sapiens
  source 1..17: mol_type = genomic RNA
cagcctcccagctgcca

SEQ ID NO: 5877 - RNA, 17 nt, Homo sapiens
  source 1..17: mol_type = genomic RNA
cctggcggtcaaaagca

SEQ ID NO: 5878 - RNA, 17 nt, Homo sapiens
  source 1..17: mol_type = genomic RNA
ctggcggtcaaaagcat

SEQ ID NO: 5879 - RNA, 17 nt, Homo sapiens
  source 1..17: mol_type = genomic RNA
tggcggtcaaaagcata

SEQ ID NO: 5880 - RNA, 17 nt, Homo sapiens
  source 1..17: mol_type = genomic RNA
ggcggtcaaaagcatac

SEQ ID NO: 5881 - RNA, 17 nt, Homo sapiens
  source 1..17: mol_type = genomic RNA
gcggtcaaaagcatacc

SEQ ID NO: 5882 - RNA, 17 nt, Homo sapiens
  source 1..17: mol_type = genomic RNA
cggtcaaaagcatacct

SEQ ID NO: 5883 - RNA, 17 nt, Homo sapiens
  source 1..17: mol_type = genomic RNA
ggtcaaaagcatacctc

SEQ ID NO: 5884 - RNA, 17 nt, Homo sapiens
  source 1..17: mol_type = genomic RNA
gtcaaaagcatacctct

SEQ ID NO: 5885 - RNA, 17 nt, Homo sapiens
  source 1..17: mol_type = genomic RNA
tcaaaagcatacctctg

SEQ ID NO: 5886 - RNA, 17 nt, Homo sapiens
  source 1..17: mol_type = genomic RNA
caaaagcatacctctgt

SEQ ID NO: 5887 - RNA, 17 nt, Homo sapiens
  source 1..17: mol_type = genomic RNA
aaaagcatacctctgtc

SEQ ID NO: 5888 - RNA, 17 nt, Homo sapiens
  source 1..17: mol_type = genomic RNA
aaagcatacctctgtct

SEQ ID NO: 5889 - RNA, 17 nt, Homo sapiens
  source 1..17: mol_type = genomic RNA
aagcatacctctgtctg

SEQ ID NO: 5890 - RNA, 17 nt, Homo sapiens
  source 1..17: mol_type = genomic RNA
agcatacctctgtctgt

SEQ ID NO: 5891 - RNA, 17 nt, Homo sapiens
  source 1..17: mol_type = genomic RNA
gcatacctctgtctgtc

SEQ ID NO: 5892 - RNA, 17 nt, Homo sapiens
  source 1..17: mol_type = genomic RNA
tctgtctgtctttgccc

SEQ ID NO: 5893 - RNA, 17 nt, Homo sapiens
  source 1..17: mol_type = genomic RNA
ctgtctgtctttgcccg

SEQ ID NO: 5894 - RNA, 17 nt, Homo sapiens
  source 1..17: mol_type = genomic RNA
tgtctgtctttgcccgc

SEQ ID NO: 5895 - RNA, 17 nt, Homo sapiens
  source 1..17: mol_type = genomic RNA
gtctgtctttgcccgct

SEQ ID NO: 5896 - RNA, 17 nt, Homo sapiens
  source 1..17: mol_type = genomic RNA
tctgtctttgcccgctt

SEQ ID NO: 5897 - RNA, 17 nt, Homo sapiens
  source 1..17: mol_type = genomic RNA
ctgtctttgcccgcttc

SEQ ID NO: 5898 - RNA, 17 nt, Homo sapiens
  source 1..17: mol_type = genomic RNA
tgtctttgcccgcttcc

SEQ ID NO: 5899 - RNA, 17 nt, Homo sapiens
  source 1..17: mol_type = genomic RNA
gtctttgcccgcttcct

SEQ ID NO: 5900 - RNA, 17 nt, Homo sapiens
  source 1..17: mol_type = genomic RNA
tctttgcccgcttcctg

SEQ ID NO: 5901 - RNA, 17 nt, Homo sapiens
  source 1..17: mol_type = genomic RNA
ctttgcccgcttcctgg

SEQ ID NO: 5902 - RNA, 17 nt, Homo sapiens
  source 1..17: mol_type = genomic RNA
tttgcccgcttcctggc

SEQ ID NO: 5903 - RNA, 17 nt, Homo sapiens
  source 1..17: mol_type = genomic RNA
ttgcccgcttcctggct

SEQ ID NO: 5904 - RNA, 17 nt, Homo sapiens
  source 1..17: mol_type = genomic RNA
tgcccgcttcctggcta

SEQ ID NO: 5905 - RNA, 17 nt, Homo sapiens
  source 1..17: mol_type = genomic RNA
gcccgcttcctggctag

SEQ ID NO: 5906 - RNA, 17 nt, Homo sapiens
  source 1..17: mol_type = genomic RNA
cccgcttcctggctaga

SEQ ID NO: 5907 - RNA, 17 nt, Homo sapiens
  source 1..17: mol_type = genomic RNA
ccgcttcctggctagac

SEQ ID NO: 5908 - RNA, 17 nt, Homo sapiens
  source 1..17: mol_type = genomic RNA
cgcttcctggctagacc

SEQ ID NO: 5909 - RNA, 17 nt, Homo sapiens
  source 1..17: mol_type = genomic RNA
gcttcctggctagacct

SEQ ID NO: 5910 - RNA, 17 nt, Homo sapiens
  source 1..17: mol_type = genomic RNA
cttcctggctagacctg

SEQ ID NO: 5911 - RNA, 17 nt, Homo sapiens
  source 1..17: mol_type = genomic RNA
ttcctggctagacctgc

SEQ ID NO: 5912 - RNA, 17 nt, Homo sapiens
  source 1..17: mol_type = genomic RNA
tcctggctagacctgcg

SEQ ID NO: 5913 - RNA, 17 nt, Homo sapiens
  source 1..17: mol_type = genomic RNA
cgcaccccggctgacgt

SEQ ID NO: 5914 - RNA, 17 nt, Homo sapiens
  source 1..17: mol_type = genomic RNA
ccccggctgacgtgcaa

SEQ ID NO: 5915 - RNA, 17 nt, Homo sapiens
  source 1..17: mol_type = genomic RNA
cccggctgacgtgcaag

SEQ ID NO: 5916 - RNA, 17 nt, Homo sapiens
  source 1..17: mol_type = genomic RNA
ccggctgacgtgcaagg

SEQ ID NO: 5917 - RNA, 17 nt, Homo sapiens
  source 1..17: mol_type = genomic RNA
cggctgacgtgcaaggg

SEQ ID NO: 5918 - RNA, 17 nt, Homo sapiens
  source 1..17: mol_type = genomic RNA
gctgacgtgcaagggag

SEQ ID NO: 5919 - RNA, 17 nt, Homo sapiens
  source 1..17: mol_type = genomic RNA
ctgacgtgcaagggagc

SEQ ID NO: 5920 - RNA, 17 nt, Homo sapiens
  source 1..17: mol_type = genomic RNA
tgacgtgcaagggagct

SEQ ID NO: 5921 - RNA, 17 nt, Homo sapiens
  source 1..17: mol_type = genomic RNA
gacgtgcaagggagctc

SEQ ID NO: 5922 - RNA, 17 nt, Homo sapiens
  source 1..17: mol_type = genomic RNA
acgtgcaagggagctcg

SEQ ID NO: 5923 - RNA, 17 nt, Homo sapiens
  source 1..17: mol_type = genomic RNA
cgtgcaagggagctcgc

SEQ ID NO: 5924 - RNA, 17 nt, Homo sapiens
  source 1..17: mol_type = genomic RNA
gtgcaagggagctcgct

SEQ ID NO: 5925 - RNA, 17 nt, Homo sapiens
  source 1..17: mol_type = genomic RNA
tgcaagggagctcgctg

SEQ ID NO: 5926 - RNA, 17 nt, Homo sapiens
  source 1..17: mol_type = genomic RNA
gagctcgctggcctctc

SEQ ID NO: 5927 - RNA, 17 nt, Homo sapiens
  source 1..17: mol_type = genomic RNA
agctcgctggcctctct

SEQ ID NO: 5928 - RNA, 17 nt, Homo sapiens
  source 1..17: mol_type = genomic RNA
gctcgctggcctctctg

SEQ ID NO: 5929 - RNA, 17 nt, Homo sapiens
  source 1..17: mol_type = genomic RNA
ctcgctggcctctctgt

SEQ ID NO: 5930 - RNA, 17 nt, Homo sapiens
  source 1..17: mol_type = genomic RNA
tcgctggcctctctgtg

SEQ ID NO: 5931 - RNA, 17 nt, Homo sapiens
  source 1..17: mol_type = genomic RNA
cgctggcctctctgtgc

SEQ ID NO: 5932 - RNA, 17 nt, Homo sapiens
  source 1..17: mol_type = genomic RNA
gctggcctctctgtgcc

SEQ ID NO: 5933 - RNA, 17 nt, Homo sapiens
  source 1..17: mol_type = genomic RNA
ctggcctctctgtgccc

SEQ ID NO: 5934 - RNA, 17 nt, Homo sapiens
  source 1..17: mol_type = genomic RNA
tggcctctctgtgccct

SEQ ID NO: 5935 - RNA, 17 nt, Homo sapiens
  source 1..17: mol_type = genomic RNA
ggcctctctgtgccctt

SEQ ID NO: 5936 - RNA, 17 nt, Homo sapiens
  source 1..17: mol_type = genomic RNA
gcctctctgtgcccttg

SEQ ID NO: 5937 - RNA, 17 nt, Homo sapiens
  source 1..17: mol_type = genomic RNA
cctctctgtgcccttgt

SEQ ID NO: 5938 - RNA, 17 nt, Homo sapiens
  source 1..17: mol_type = genomic RNA
ctctctgtgcccttgtt

SEQ ID NO: 5939 - RNA, 17 nt, Homo sapiens
  source 1..17: mol_type = genomic RNA
tccgtgaaattctggct

SEQ ID NO: 5940 - RNA, 17 nt, Homo sapiens
  source 1..17: mol_type = genomic RNA
ccgtgaaattctggctg

SEQ ID NO: 5941 - RNA, 17 nt, Homo sapiens
  source 1..17: mol_type = genomic RNA
cgtgaaattctggctga

SEQ ID NO: 5942 - RNA, 17 nt, Homo sapiens
  source 1..17: mol_type = genomic RNA
gtgaaattctggctgaa

SEQ ID NO: 5943 - RNA, 17 nt, Homo sapiens
  source 1..17: mol_type = genomic RNA
tgaaattctggctgaat

SEQ ID NO: 5944 - RNA, 17 nt, Homo sapiens
  source 1..17: mol_type = genomic RNA
gaaattctggctgaatg

SEQ ID NO: 5945 - RNA, 17 nt, Homo sapiens
  source 1..17: mol_type = genomic RNA
aaattctggctgaatgt

SEQ ID NO: 5946 - RNA, 17 nt, Homo sapiens
  source 1..17: mol_type = genomic RNA
aattctggctgaatgtc

SEQ ID NO: 5947 - RNA, 17 nt, Homo sapiens
  source 1..17: mol_type = genomic RNA
attctggctgaatgtct

SEQ ID NO: 5948 - RNA, 17 nt, Homo sapiens
  source 1..17: mol_type = genomic RNA
ttctggctgaatgtctc

SEQ ID NO: 5949 - RNA, 17 nt, Homo sapiens
  source 1..17: mol_type = genomic RNA
tctggctgaatgtctcc

SEQ ID NO: 5950 - RNA, 17 nt, Homo sapiens
  source 1..17: mol_type = genomic RNA
ctggctgaatgtctccc

SEQ ID NO: 5951 - RNA, 17 nt, Homo sapiens
  source 1..17: mol_type = genomic RNA
tggctgaatgtctcccc

SEQ ID NO: 5952 - RNA, 17 nt, Homo sapiens
  source 1..17: mol_type = genomic RNA
ggctgaatgtctccccc

SEQ ID NO: 5953 - RNA, 17 nt, Homo sapiens
  source 1..17: mol_type = genomic RNA
gctgaatgtctcccccc

SEQ ID NO: 5954 - RNA, 17 nt, Homo sapiens
  source 1..17: mol_type = genomic RNA
ctgaatgtctcccccca

SEQ ID NO: 5955 - RNA, 17 nt, Homo sapiens
  source 1..17: mol_type = genomic RNA
tgaatgtctccccccac

SEQ ID NO: 5956 - RNA, 17 nt, Homo sapiens
  source 1..17: mol_type = genomic RNA
gaatgtctccccccacc

SEQ ID NO: 5957 - RNA, 17 nt, Homo sapiens
  source 1..17: mol_type = genomic RNA
aatgtctccccccacct

SEQ ID NO: 5958 - RNA, 17 nt, Homo sapiens
  source 1..17: mol_type = genomic RNA
atgtctccccccacctt

SEQ ID NO: 5959 - RNA, 17 nt, Homo sapiens
  source 1..17: mol_type = genomic RNA
tgtctccccccaccttc

SEQ ID NO: 5960 - RNA, 17 nt, Homo sapiens
  source 1..17: mol_type = genomic RNA
gtctccccccaccttcc

SEQ ID NO: 5961 - RNA, 17 nt, Homo sapiens
  source 1..17: mol_type = genomic RNA
tctccccccaccttccg

SEQ ID NO: 5962 - RNA, 17 nt, Homo sapiens
  source 1..17: mol_type = genomic RNA
ctccccccaccttccga

SEQ ID NO: 5963 - RNA, 17 nt, Homo sapiens
  source 1..17: mol_type = genomic RNA
tccccccaccttccgac

SEQ ID NO: 5964 - RNA, 17 nt, Homo sapiens
  source 1..17: mol_type = genomic RNA
ccccccaccttccgacg

SEQ ID NO: 5965 - RNA, 17 nt, Homo sapiens
  source 1..17: mol_type = genomic RNA
cccccaccttccgacgc

SEQ ID NO: 5966 - RNA, 17 nt, Homo sapiens
  source 1..17: mol_type = genomic RNA
ccccaccttccgacgct

SEQ ID NO: 5967 - RNA, 17 nt, Homo sapiens
  source 1..17: mol_type = genomic RNA
cccaccttccgacgctg

SEQ ID NO: 5968 - RNA, 17 nt, Homo sapiens
  source 1..17: mol_type = genomic RNA
ccaccttccgacgctgt

SEQ ID NO: 5969 - RNA, 17 nt, Homo sapiens
  source 1..17: mol_type = genomic RNA
caccttccgacgctgtc

SEQ ID NO: 5970 - RNA, 17 nt, Homo sapiens
  source 1..17: mol_type = genomic RNA
accttccgacgctgtct

SEQ ID NO: 5971 - RNA, 17 nt, Homo sapiens
  source 1..17: mol_type = genomic RNA
ccttccgacgctgtcta

SEQ ID NO: 5972 - RNA, 17 nt, Homo sapiens
  source 1..17: mol_type = genomic RNA
cttccgacgctgtctag

SEQ ID NO: 5973 - RNA, 17 nt, Homo sapiens
  source 1..17: mol_type = genomic RNA
ttccgacgctgtctagg

SEQ ID NO: 5974 - RNA, 17 nt, Homo sapiens
  source 1..17: mol_type = genomic RNA
tccgacgctgtctaggc

SEQ ID NO: 5975 - RNA, 17 nt, Homo sapiens
  source 1..17: mol_type = genomic RNA
ccgacgctgtctaggca

SEQ ID NO: 5976 - RNA, 17 nt, Homo sapiens
  source 1..17: mol_type = genomic RNA
cgacgctgtctaggcaa

SEQ ID NO: 5977 - RNA, 17 nt, Homo sapiens
  source 1..17: mol_type = genomic RNA
gacgctgtctaggcaaa

SEQ ID NO: 5978 - RNA, 17 nt, Homo sapiens
  source 1..17: mol_type = genomic RNA
acgctgtctaggcaaac

SEQ ID NO: 5979 - RNA, 17 nt, Homo sapiens
  source 1..17: mol_type = genomic RNA
cgctgtctaggcaaacc

SEQ ID NO: 5980 - RNA, 17 nt, Homo sapiens
  source 1..17: mol_type = genomic RNA
gctgtctaggcaaacct

SEQ ID NO: 5981 - RNA, 17 nt, Homo sapiens
  source 1..17: mol_type = genomic RNA
ctgtctaggcaaacctg

SEQ ID NO: 5982 - RNA, 17 nt, Homo sapiens
  source 1..17: mol_type = genomic RNA
tgtctaggcaaacctgg

SEQ ID NO: 5983 - RNA, 17 nt, Homo sapiens
  source 1..17: mol_type = genomic RNA
gtctaggcaaacctgga

SEQ ID NO: 5984 - RNA, 17 nt, Homo sapiens
  source 1..17: mol_type = genomic RNA
tctaggcaaacctggat

SEQ ID NO: 5985 - RNA, 17 nt, Homo sapiens
  source 1..17: mol_type = genomic RNA
ctaggcaaacctggatt

SEQ ID NO: 5986 - RNA, 17 nt, Homo sapiens
  source 1..17: mol_type = genomic RNA
taggcaaacctggatta

SEQ ID NO: 5987 - RNA, 17 nt, Homo sapiens
  source 1..17: mol_type = genomic RNA
aggcaaacctggattag

SEQ ID NO: 5988 - RNA, 17 nt, Homo sapiens
  source 1..17: mol_type = genomic RNA
ggcaaacctggattaga

SEQ ID NO: 5989 - RNA, 17 nt, Homo sapiens
  source 1..17: mol_type = genomic RNA
gcaaacctggattagag

SEQ ID NO: 5990 - RNA, 17 nt, Homo sapiens
  source 1..17: mol_type = genomic RNA
caaacctggattagagt

SEQ ID NO: 5991 - RNA, 17 nt, Homo sapiens
  source 1..17: mol_type = genomic RNA
aaacctggattagagtt

SEQ ID NO: 5992 - RNA, 17 nt, Homo sapiens
  source 1..17: mol_type = genomic RNA
acctggattagagttac

SEQ ID NO: 5993 - RNA, 17 nt, Homo sapiens
  source 1..17: mol_type = genomic RNA
agagttacatctcctgg

SEQ ID NO: 5994 - RNA, 17 nt, Homo sapiens
  source 1..17: mol_type = genomic RNA
gagttacatctcctgga

SEQ ID NO: 5995 - RNA, 17 nt, Homo sapiens
  source 1..17: mol_type = genomic RNA
agttacatctcctggat

SEQ ID NO: 5996 - RNA, 17 nt, Homo sapiens
  source 1..17: mol_type = genomic RNA
gttacatctcctggatg

SEQ ID NO: 5997 - RNA, 17 nt, Homo sapiens
  source 1..17: mol_type = genomic RNA
ttacatctcctggatga

SEQ ID NO: 5998 - RNA, 17 nt, Homo sapiens
  source 1..17: mol_type = genomic RNA
tacatctcctggatgat

SEQ ID NO: 5999 - RNA, 17 nt, Homo sapiens
  source 1..17: mol_type = genomic RNA
acatctcctggatgatt

SEQ ID NO: 6000 - RNA, 17 nt, Homo sapiens
  source 1..17: mol_type = genomic RNA
atctcctggatgattag

SEQ ID NO: 6001 - RNA, 17 nt, Homo sapiens
  source 1..17: mol_type = genomic RNA
tctcctggatgattagt

SEQ ID NO: 6002 - RNA, 17 nt, Homo sapiens
  source 1..17: mol_type = genomic RNA
aaaatgccccctccctg

SEQ ID NO: 6003 - RNA, 17 nt, Homo sapiens
  source 1..17: mol_type = genomic RNA
aaatgccccctccctgt

SEQ ID NO: 6004 - RNA, 17 nt, Homo sapiens
  source 1..17: mol_type = genomic RNA
aatgccccctccctgtg

SEQ ID NO: 6005 - RNA, 17 nt, Homo sapiens
  source 1..17: mol_type = genomic RNA
atgccccctccctgtgg

SEQ ID NO: 6006 - RNA, 17 nt, Homo sapiens
  source 1..17: mol_type = genomic RNA
gccccctccctgtggat

SEQ ID NO: 6007 - RNA, 17 nt, Homo sapiens
  source 1..17: mol_type = genomic RNA
ccccctccctgtggatc

SEQ ID NO: 6008 - RNA, 17 nt, Homo sapiens
  source 1..17: mol_type = genomic RNA
cccctccctgtggatcc

SEQ ID NO: 6009 - RNA, 17 nt, Homo sapiens
  source 1..17: mol_type = genomic RNA
ccctccctgtggatcct

SEQ ID NO: 6010 - RNA, 17 nt, Homo sapiens
  source 1..17: mol_type = genomic RNA
cctccctgtggatccta

SEQ ID NO: 6011 - RNA, 17 nt, Homo sapiens
  source 1..17: mol_type = genomic RNA
ctccctgtggatcctat

SEQ ID NO: 6012 - RNA, 17 nt, Homo sapiens
  source 1..17: mol_type = genomic RNA
tccctgtggatcctata

SEQ ID NO: 6013 - RNA, 17 nt, Homo sapiens
  source 1..17: mol_type = genomic RNA
ccctgtggatcctatag

SEQ ID NO: 6014 - RNA, 17 nt, Homo sapiens
  source 1..17: mol_type = genomic RNA
cctgtggatcctataga

SEQ ID NO: 6015 - RNA, 17 nt, Homo sapiens
  source 1..17: mol_type = genomic RNA
ctgtggatcctatagaa

SEQ ID NO: 6016 - RNA, 17 nt, Homo sapiens
  source 1..17: mol_type = genomic RNA
tgtggatcctatagaag

SEQ ID NO: 6017 - RNA, 17 nt, Homo sapiens
  source 1..17: mol_type = genomic RNA
gtggatcctatagaaga

SEQ ID NO: 6018 - RNA, 17 nt, Homo sapiens
  source 1..17: mol_type = genomic RNA
tggatcctatagaagat

SEQ ID NO: 6019 - RNA, 17 nt, Homo sapiens
  source 1..17: mol_type = genomic RNA
ttgtgtgatgagtgcag

SEQ ID NO: 6020 - RNA, 17 nt, Homo sapiens
  source 1..17: mol_type = genomic RNA
tgtgtgatgagtgcaga

SEQ ID NO: 6021 - RNA, 17 nt, Homo sapiens
  source 1..17: mol_type = genomic RNA
gtgtgatgagtgcagag

SEQ ID NO: 6022 - RNA, 17 nt, Homo sapiens
  source 1..17: mol_type = genomic RNA
tgtgatgagtgcagaga

SEQ ID NO: 6023 - RNA, 17 nt, Homo sapiens
  source 1..17: mol_type = genomic RNA
gtgatgagtgcagagat

SEQ ID NO: 6024 - RNA, 17 nt, Homo sapiens
  source 1..17: mol_type = genomic RNA
tgatgagtgcagagata

SEQ ID NO: 6025 - RNA, 17 nt, Homo sapiens
  source 1..17: mol_type = genomic RNA
gatgagtgcagagatat

SEQ ID NO: 6026 - RNA, 17 nt, Homo sapiens
  source 1..17: mol_type = genomic RNA
atgagtgcagagatatg

SEQ ID NO: 6027 - RNA, 17 nt, Homo sapiens
  source 1..17: mol_type = genomic RNA
tgagtgcagagatatgt

SEQ ID NO: 6028 - RNA, 17 nt, Homo sapiens
  source 1..17: mol_type = genomic RNA
gagtgcagagatatgtc

SEQ ID NO: 6029 - RNA, 17 nt, Homo sapiens
  source 1..17: mol_type = genomic RNA
agtgcagagatatgtca

SEQ ID NO: 6030 - RNA, 17 nt, Homo sapiens
  source 1..17: mol_type = genomic RNA
gtgcagagatatgtcac

SEQ ID NO: 6031 - RNA, 17 nt, Homo sapiens
  source 1..17: mol_type = genomic RNA
tgcagagatatgtcaca

SEQ ID NO: 6032 - RNA, 17 nt, Homo sapiens
  source 1..17: mol_type = genomic RNA
gcagagatatgtcacaa

SEQ ID NO: 6033 - RNA, 17 nt, Homo sapiens
  source 1..17: mol_type = genomic RNA
tatgtcacaatatcccc

SEQ ID NO: 6034 - RNA, 17 nt, Homo sapiens
  source 1..17: mol_type = genomic RNA
atgtcacaatatcccct

SEQ ID NO: 6035 - RNA, 17 nt, Homo sapiens
  source 1..17: mol_type = genomic RNA
tgtcacaatatcccctg

SEQ ID NO: 6036 - RNA, 17 nt, Homo sapiens
  source 1..17: mol_type = genomic RNA
gtcacaatatcccctgt

SEQ ID NO: 6037 - RNA, 17 nt, Homo sapiens
  source 1..17: mol_type = genomic RNA
tcacaatatcccctgta

SEQ ID NO: 6038 - RNA, 17 nt, Homo sapiens
  source 1..17: mol_type = genomic RNA
cacaatatcccctgtag

SEQ ID NO: 6039 - RNA, 17 nt, Homo sapiens
  source 1..17: mol_type = genomic RNA
acaatatcccctgtaga

SEQ ID NO: 6040 - RNA, 17 nt, Homo sapiens
  source 1..17: mol_type = genomic RNA
aatatcccctgtagaaa

SEQ ID NO: 6041 - RNA, 17 nt, Homo sapiens
  source 1..17: mol_type = genomic RNA
atatcccctgtagaaaa

SEQ ID NO: 6042 - RNA, 17 nt, Homo sapiens
  source 1..17: mol_type = genomic RNA
tatcccctgtagaaaaa

SEQ ID NO: 6043 - RNA, 17 nt, Homo sapiens
  source 1..17: mol_type = genomic RNA
atcccctgtagaaaaag

SEQ ID NO: 6044 - RNA, 17 nt, Homo sapiens
  source 1..17: mol_type = genomic RNA
tcccctgtagaaaaagc

SEQ ID NO: 6045 - RNA, 17 nt, Homo sapiens
  source 1..17: mol_type = genomic RNA
cccctgtagaaaaagcc

SEQ ID NO: 6046 - RNA, 17 nt, Homo sapiens
  source 1..17: mol_type = genomic RNA
ccctgtagaaaaagcct

SEQ ID NO: 6047 - RNA, 17 nt, Homo sapiens
  source 1..17: mol_type = genomic RNA
cctgtagaaaaagcctg

SEQ ID NO: 6048 - RNA, 17 nt, Homo sapiens
  source 1..17: mol_type = genomic RNA
ctgtagaaaaagcctga

SEQ ID NO: 6049 - RNA, 17 nt, Homo sapiens
  source 1..17: mol_type = genomic RNA
tgtagaaaaagcctgaa

SEQ ID NO: 6050 - RNA, 17 nt, Homo sapiens
  source 1..17: mol_type = genomic RNA
gtagaaaaagcctgaaa

SEQ ID NO: 6051 - RNA, 17 nt, Homo sapiens
  source 1..17: mol_type = genomic RNA
tagaaaaagcctgaaat

SEQ ID NO: 6052 - RNA, 17 nt, Homo sapiens
  source 1..17: mol_type = genomic RNA
agaaaaagcctgaaatt

SEQ ID NO: 6053 - RNA, 17 nt, Homo sapiens
  source 1..17: mol_type = genomic RNA
aacttcggtgatcagtg

SEQ ID NO: 6054 - RNA, 17 nt, Homo sapiens
  source 1..17: mol_type = genomic RNA
acttcggtgatcagtgc

SEQ ID NO: 6055 - RNA, 17 nt, Homo sapiens
  source 1..17: mol_type = genomic RNA
cttcggtgatcagtgca

SEQ ID NO: 6056 - RNA, 17 nt, Homo sapiens
  source 1..17: mol_type = genomic RNA
ttcggtgatcagtgcag

SEQ ID NO: 6057 - RNA, 17 nt, Homo sapiens
  source 1..17: mol_type = genomic RNA
tcggtgatcagtgcaga

SEQ ID NO: 6058 - RNA, 17 nt, Homo sapiens
  source 1..17: mol_type = genomic RNA
cggtgatcagtgcagat

SEQ ID NO: 6059 - RNA, 17 nt, Homo sapiens
  source 1..17: mol_type = genomic RNA
ggtgatcagtgcagatg

SEQ ID NO: 6060 - RNA, 17 nt, Homo sapiens
  source 1..17: mol_type = genomic RNA
gtgatcagtgcagatgt

SEQ ID NO: 6061 - RNA, 17 nt, Homo sapiens
  source 1..17: mol_type = genomic RNA
tgatcagtgcagatgtg

SEQ ID NO: 6062 - RNA, 17 nt, Homo sapiens
  source 1..17: mol_type = genomic RNA
gatcagtgcagatgtgt

SEQ ID NO: 6063 - RNA, 17 nt, Homo sapiens
  source 1..17: mol_type = genomic RNA
atcagtgcagatgtgtt

SEQ ID NO: 6064 - RNA, 17 nt, Homo sapiens
  source 1..17: mol_type = genomic RNA
tcagaactccatagtag

SEQ ID NO: 6065 - RNA, 17 nt, Homo sapiens
  source 1..17: mol_type = genomic RNA
cagaactccatagtaga

SEQ ID NO: 6066 - RNA, 17 nt, Homo sapiens
  source 1..17: mol_type = genomic RNA
agaactccatagtagac

SEQ ID NO: 6067 - RNA, 17 nt, Homo sapiens
  source 1..17: mol_type = genomic RNA
gaactccatagtagact

SEQ ID NO: 6068 - RNA, 17 nt, Homo sapiens
  source 1..17: mol_type = genomic RNA
aactccatagtagactg

SEQ ID NO: 6069 - RNA, 17 nt, Homo sapiens
  source 1..17: mol_type = genomic RNA
actccatagtagactga

SEQ ID NO: 6070 - RNA, 17 nt, Homo sapiens
  source 1..17: mol_type = genomic RNA
ctccatagtagactgaa

SEQ ID NO: 6071 - RNA, 17 nt, Homo sapiens
  source 1..17: mol_type = genomic RNA
tccatagtagactgaac

SEQ ID NO: 6072 - RNA, 17 nt, Homo sapiens
  source 1..17: mol_type = genomic RNA
ccatagtagactgaacc

SEQ ID NO: 6073 - RNA, 17 nt, Homo sapiens
  source 1..17: mol_type = genomic RNA
catagtagactgaacct

SEQ ID NO: 6074 - RNA, 17 nt, Homo sapiens
  source 1..17: mol_type = genomic RNA
atagtagactgaaccta

SEQ ID NO: 6075 - RNA, 17 nt, Homo sapiens
  source 1..17: mol_type = genomic RNA
tagtagactgaacctag

SEQ ID NO: 6076 - RNA, 17 nt, Homo sapiens
  source 1..17: mol_type = genomic RNA
agtagactgaacctaga

SEQ ID NO: 6077 - RNA, 17 nt, Homo sapiens
  source 1..17: mol_type = genomic RNA
gtagactgaacctagag

SEQ ID NO: 6078 - RNA, 17 nt, Homo sapiens
  source 1..17: mol_type = genomic RNA
tagactgaacctagaga

SEQ ID NO: 6079 - RNA, 17 nt, Homo sapiens
  source 1..17: mol_type = genomic RNA
agactgaacctagagaa

SEQ ID NO: 6080 - RNA, 17 nt, Homo sapiens
  source 1..17: mol_type = genomic RNA
gactgaacctagagaat

SEQ ID NO: 6081 - RNA, 17 nt, Homo sapiens
  source 1..17: mol_type = genomic RNA
actgaacctagagaatg

SEQ ID NO: 6082 - RNA, 17 nt, Homo sapiens
  source 1..17: mol_type = genomic RNA
ctgaacctagagaatgg

SEQ ID NO: 6083 - RNA, 17 nt, Homo sapiens
  source 1..17: mol_type = genomic RNA
tgaacctagagaatggt

SEQ ID NO: 6084 - RNA, 17 nt, Homo sapiens
  source 1..17: mol_type = genomic RNA
gaacctagagaatggtt

SEQ ID NO: 6085 - RNA, 17 nt, Homo sapiens
  source 1..17: mol_type = genomic RNA
aacctagagaatggtta

SEQ ID NO: 6086 - RNA, 17 nt, Homo sapiens
  source 1..17: mol_type = genomic RNA
acctagagaatggttac

SEQ ID NO: 6087 - RNA, 17 nt, Homo sapiens
  source 1..17: mol_type = genomic RNA
cctagagaatggttaca

SEQ ID NO: 6088 - RNA, 17 nt, Homo sapiens
  source 1..17: mol_type = genomic RNA
agagaatggttacatca

SEQ ID NO: 6089 - RNA, 17 nt, Homo sapiens
  source 1..17: mol_type = genomic RNA
gagaatggttacatcac

SEQ ID NO: 6090 - RNA, 17 nt, Homo sapiens
  source 1..17: mol_type = genomic RNA
agaatggttacatcact

SEQ ID NO: 6091 - RNA, 17 nt, Homo sapiens
  source 1..17: mol_type = genomic RNA
tggttacatcacttagg

SEQ ID NO: 6092 - RNA, 17 nt, Homo sapiens
  source 1..17: mol_type = genomic RNA
acatcacttaggtgatc

SEQ ID NO: 6093 - RNA, 17 nt, Homo sapiens
  source 1..17: mol_type = genomic RNA
atcacttaggtgatcag

SEQ ID NO: 6094 - RNA, 17 nt, Homo sapiens
  source 1..17: mol_type = genomic RNA
tcacttaggtgatcagt

SEQ ID NO: 6095 - RNA, 17 nt, Homo sapiens
  source 1..17: mol_type = genomic RNA
cacttaggtgatcagtg

SEQ ID NO: 6096 - RNA, 17 nt, Homo sapiens
  source 1..17: mol_type = genomic RNA
acttaggtgatcagtgt

SEQ ID NO: 6097 - RNA, 17 nt, Homo sapiens
  source 1..17: mol_type = genomic RNA
taggtgatcagtgtaga

SEQ ID NO: 6098 - RNA, 17 nt, Homo sapiens
  source 1..17: mol_type = genomic RNA
aggtgatcagtgtagag

SEQ ID NO: 6099 - RNA, 17 nt, Homo sapiens
  source 1..17: mol_type = genomic RNA
ggtgatcagtgtagaga

SEQ ID NO: 6100 - RNA, 17 nt, Homo sapiens
  source 1..17: mol_type = genomic RNA
gtgatcagtgtagagat

SEQ ID NO: 6101 - RNA, 17 nt, Homo sapiens
  source 1..17: mol_type = genomic RNA
ttctcgtgtagacagag

SEQ ID NO: 6102 - RNA, 17 nt, Homo sapiens
  source 1..17: mol_type = genomic RNA
tctcgtgtagacagagc

SEQ ID NO: 6103 - RNA, 17 nt, Homo sapiens
  source 1..17: mol_type = genomic RNA
ctcgtgtagacagagcc

SEQ ID NO: 6104 - RNA, 17 nt, Homo sapiens
  source 1..17: mol_type = genomic RNA
tcgtgtagacagagcct

SEQ ID NO: 6105 - RNA, 17 nt, Homo sapiens
  source 1..17: mol_type = genomic RNA
cgtgtagacagagccta

SEQ ID NO: 6106 - RNA, 17 nt, Homo sapiens
  source 1..17: mol_type = genomic RNA
gtgtagacagagcctag

SEQ ID NO: 6107 - RNA, 17 nt, Homo sapiens
  source 1..17: mol_type = genomic RNA
tgtagacagagcctaga

SEQ ID NO: 6108 - RNA, 17 nt, Homo sapiens
  source 1..17: mol_type = genomic RNA
gtagacagagcctagac

SEQ ID NO: 6109 - RNA, 17 nt, Homo sapiens
  source 1..17: mol_type = genomic RNA
tagacagagcctagaca

SEQ ID NO: 6110 - RNA, 17 nt, Homo sapiens
  source 1..17: mol_type = genomic RNA
agacagagcctagacaa

SEQ ID NO: 6111 - RNA, 17 nt, Homo sapiens
  source 1..17: mol_type = genomic RNA
gacagagcctagacaat

SEQ ID NO: 6112 - RNA, 17 nt, Homo sapiens
  source 1..17: mol_type = genomic RNA
acagagcctagacaatt

SEQ ID NO: 6113 - RNA, 17 nt, Homo sapiens
  source 1..17: mol_type = genomic RNA
cagagcctagacaattg

SEQ ID NO: 6114 - RNA, 17 nt, Homo sapiens
  source 1..17: mol_type = genomic RNA
agagcctagacaattgt

SEQ ID NO: 6115 - RNA, 17 nt, Homo sapiens
  source 1..17: mol_type = genomic RNA
gagcctagacaattgtt

SEQ ID NO: 6116 - RNA, 17 nt, Homo sapiens
  source 1..17: mol_type = genomic RNA
tacatcacctagtgatc

SEQ ID NO: 6117 - RNA, 17 nt, Homo sapiens
  source 1..17: mol_type = genomic RNA
acatcacctagtgatca

SEQ ID NO: 6118 - RNA, 17 nt, Homo sapiens
  source 1..17: mol_type = genomic RNA
catcacctagtgatcag

SEQ ID NO: 6119 - RNA, 17 nt, Homo sapiens
  source 1..17: mol_type = genomic RNA
atcacctagtgatcagt

SEQ ID NO: 6120 - RNA, 17 nt, Homo sapiens
  source 1..17: mol_type = genomic RNA
tcacctagtgatcagtg

SEQ ID NO: 6121 - RNA, 17 nt, Homo sapiens
  source 1..17: mol_type = genomic RNA
cacctagtgatcagtgc

SEQ ID NO: 6122 - RNA, 17 nt, Homo sapiens
  source 1..17: mol_type = genomic RNA
acctagtgatcagtgca

SEQ ID NO: 6123 - RNA, 17 nt, Homo sapiens
  source 1..17: mol_type = genomic RNA
cctagtgatcagtgcag

SEQ ID NO: 6124 - RNA, 17 nt, Homo sapiens
  source 1..17: mol_type = genomic RNA
ctagtgatcagtgcagg

SEQ ID NO: 6125 - RNA, 17 nt, Homo sapiens
  source 1..17: mol_type = genomic RNA
tagtgatcagtgcaggg

SEQ ID NO: 6126 - RNA, 17 nt, Homo sapiens
  source 1..17: mol_type = genomic RNA
agtgatcagtgcaggga

SEQ ID NO: 6127 - RNA, 17 nt, Homo sapiens
  source 1..17: mol_type = genomic RNA
gtgatcagtgcagggat

SEQ ID NO: 6128 - RNA, 17 nt, Homo sapiens
  source 1..17: mol_type = genomic RNA
tgatcagtgcagggata

SEQ ID NO: 6129 - RNA, 17 nt, Homo sapiens
  source 1..17: mol_type = genomic RNA
gatcagtgcagggataa

SEQ ID NO: 6130 - RNA, 17 nt, Homo sapiens
  source 1..17: mol_type = genomic RNA
atcagtgcagggataag

SEQ ID NO: 6131 - RNA, 17 nt, Homo sapiens
  source 1..17: mol_type = genomic RNA
tcagtgcagggataagt

SEQ ID NO: 6132 - RNA, 17 nt, Homo sapiens
  source 1..17: mol_type = genomic RNA
cagtgcagggataagtc

SEQ ID NO: 6133 - RNA, 17 nt, Homo sapiens
  source 1..17: mol_type = genomic RNA
agtgcagggataagtca

SEQ ID NO: 6134 - RNA, 17 nt, Homo sapiens
  source 1..17: mol_type = genomic RNA
gtgcagggataagtcat

SEQ ID NO: 6135 - RNA, 17 nt, Homo sapiens
  source 1..17: mol_type = genomic RNA
tgcagggataagtcata

SEQ ID NO: 6136 - RNA, 17 nt, Homo sapiens
  source 1..17: mol_type = genomic RNA
gcagggataagtcataa

SEQ ID NO: 6137 - RNA, 17 nt, Homo sapiens
  source 1..17: mol_type = genomic RNA
cagggataagtcataaa

SEQ ID NO: 6138 - RNA, 17 nt, Homo sapiens
  source 1..17: mol_type = genomic RNA
agggataagtcataaag

SEQ ID NO: 6139 - RNA, 17 nt, Homo sapiens
  source 1..17: mol_type = genomic RNA
gggataagtcataaagc

SEQ ID NO: 6140 - RNA, 17 nt, Homo sapiens
  source 1..17: mol_type = genomic RNA
ggataagtcataaagcc

SEQ ID NO: 6141 - RNA, 17 nt, Homo sapiens
  source 1..17: mol_type = genomic RNA
taagtcataaagcctcc

SEQ ID NO: 6142 - RNA, 17 nt, Homo sapiens
  source 1..17: mol_type = genomic RNA
aagtcataaagcctcct

SEQ ID NO: 6143 - RNA, 17 nt, Homo sapiens
  source 1..17: mol_type = genomic RNA
agtcataaagcctcctg

SEQ ID NO: 6144 - RNA, 17 nt, Homo sapiens
  source 1..17: mol_type = genomic RNA
gtcataaagcctcctgt

SEQ ID NO: 6145 - RNA, 17 nt, Homo sapiens
  source 1..17: mol_type = genomic RNA
tcataaagcctcctgta

SEQ ID NO: 6146 - RNA, 17 nt, Homo sapiens
  source 1..17: mol_type = genomic RNA
cataaagcctcctgtag

SEQ ID NO: 6147 - RNA, 17 nt, Homo sapiens
  source 1..17: mol_type = genomic RNA
ataaagcctcctgtagg

SEQ ID NO: 6148 - RNA, 17 nt, Homo sapiens
  source 1..17: mol_type = genomic RNA
taaagcctcctgtaggc

SEQ ID NO: 6149 - RNA, 17 nt, Homo sapiens
  source 1..17: mol_type = genomic RNA
aaagcctcctgtaggca

SEQ ID NO: 6150 - RNA, 17 nt, Homo sapiens
  source 1..17: mol_type = genomic RNA
aagcctcctgtaggcag

SEQ ID NO: 6151 - RNA, 17 nt, Homo sapiens
  source 1..17: mol_type = genomic RNA
agcctcctgtaggcaga

SEQ ID NO: 6152 - RNA, 17 nt, Homo sapiens
  source 1..17: mol_type = genomic RNA
gcctcctgtaggcagag

SEQ ID NO: 6153 - RNA, 17 nt, Homo sapiens
  source 1..17: mol_type = genomic RNA
cctcctgtaggcagagt

SEQ ID NO: 6154 - RNA, 17 nt, Homo sapiens
  source 1..17: mol_type = genomic RNA
ctcctgtaggcagagtg

SEQ ID NO: 6155 - RNA, 17 nt, Homo sapiens
  source 1..17: mol_type = genomic RNA
tcctgtaggcagagtgt

SEQ ID NO: 6156 - RNA, 17 nt, Homo sapiens
  source 1..17: mol_type = genomic RNA
cctgtaggcagagtgta

SEQ ID NO: 6157 - RNA, 17 nt, Homo sapiens
  source 1..17: mol_type = genomic RNA
ctgtaggcagagtgtag

SEQ ID NO: 6158 - RNA, 17 nt, Homo sapiens
  source 1..17: mol_type = genomic RNA
tgtaggcagagtgtagg

SEQ ID NO: 6159 - RNA, 17 nt, Homo sapiens
  source 1..17: mol_type = genomic RNA
gtaggcagagtgtaggc

SEQ ID NO: 6160 - RNA, 17 nt, Homo sapiens
  source 1..17: mol_type = genomic RNA
taggcagagtgtaggca

SEQ ID NO: 6161 - RNA, 17 nt, Homo sapiens
  source 1..17: mol_type = genomic RNA
aggcagagtgtaggcaa

SEQ ID NO: 6162 - RNA, 17 nt, Homo sapiens
  source 1..17: mol_type = genomic RNA
ggcagagtgtaggcaag

SEQ ID NO: 6163 - RNA, 17 nt, Homo sapiens
  source 1..17: mol_type = genomic RNA
gcagagtgtaggcaagt

SEQ ID NO: 6164 - RNA, 17 nt, Homo sapiens
  source 1..17: mol_type = genomic RNA
cagagtgtaggcaagtg

SEQ ID NO: 6165 - RNA, 17 nt, Homo sapiens
  source 1..17: mol_type = genomic RNA
agagtgtaggcaagtgt

SEQ ID NO: 6166 - RNA, 17 nt, Homo sapiens
  source 1..17: mol_type = genomic RNA
gagtgtaggcaagtgtt

SEQ ID NO: 6167 - RNA, 17 nt, Homo sapiens
  source 1..17: mol_type = genomic RNA
agtgtaggcaagtgttc

SEQ ID NO: 6168 - RNA, 17 nt, Homo sapiens
  source 1..17: mol_type = genomic RNA
gtgtaggcaagtgttcc

SEQ ID NO: 6169 - RNA, 17 nt, Homo sapiens
  source 1..17: mol_type = genomic RNA
tgtaggcaagtgttccc

SEQ ID NO: 6170 - RNA, 17 nt, Homo sapiens
  source 1..17: mol_type = genomic RNA
gtaggcaagtgttccct

SEQ ID NO: 6171 - RNA, 17 nt, Homo sapiens
  source 1..17: mol_type = genomic RNA
taggcaagtgttccctc

SEQ ID NO: 6172 - RNA, 17 nt, Homo sapiens
  source 1..17: mol_type = genomic RNA
aggcaagtgttccctcc

SEQ ID NO: 6173 - RNA, 17 nt, Homo sapiens
  source 1..17: mol_type = genomic RNA
ggcaagtgttccctccc

SEQ ID NO: 6174 - RNA, 17 nt, Homo sapiens
  source 1..17: mol_type = genomic RNA
gcaagtgttccctccct

SEQ ID NO: 6175 - RNA, 17 nt, Homo sapiens
  source 1..17: mol_type = genomic RNA
caagtgttccctccctg

SEQ ID NO: 6176 - RNA, 17 nt, Homo sapiens
  source 1..17: mol_type = genomic RNA
aagtgttccctccctgg

SEQ ID NO: 6177 - RNA, 17 nt, Homo sapiens
  source 1..17: mol_type = genomic RNA
agtgttccctccctggg

SEQ ID NO: 6178 - RNA, 17 nt, Homo sapiens
  source 1..17: mol_type = genomic RNA
gtgttccctccctgggc

SEQ ID NO: 6179 - RNA, 17 nt, Homo sapiens
  source 1..17: mol_type = genomic RNA
tgttccctccctgggct

SEQ ID NO: 6180 - RNA, 17 nt, Homo sapiens
  source 1..17: mol_type = genomic RNA
gttccctccctgggctg

SEQ ID NO: 6181 - RNA, 17 nt, Homo sapiens
  source 1..17: mol_type = genomic RNA
ttccctccctgggctga

SEQ ID NO: 6182 - RNA, 17 nt, Homo sapiens
  source 1..17: mol_type = genomic RNA
tccctccctgggctgat

SEQ ID NO: 6183 - RNA, 17 nt, Homo sapiens
  source 1..17: mol_type = genomic RNA
ccctccctgggctgatc

SEQ ID NO: 6184 - RNA, 17 nt, Homo sapiens
  source 1..17: mol_type = genomic RNA
cctccctgggctgatca

SEQ ID NO: 6185 - RNA, 17 nt, Homo sapiens
  source 1..17: mol_type = genomic RNA
ctccctgggctgatcag

SEQ ID NO: 6186 - RNA, 17 nt, Homo sapiens
  source 1..17: mol_type = genomic RNA
tccctgggctgatcagt

SEQ ID NO: 6187 - RNA, 17 nt, Homo sapiens
  source 1..17: mol_type = genomic RNA
ccctgggctgatcagtg

SEQ ID NO: 6188 - RNA, 17 nt, Homo sapiens
  source 1..17: mol_type = genomic RNA
cctgggctgatcagtgc

SEQ ID NO: 6189 - RNA, 17 nt, Homo sapiens
  source 1..17: mol_type = genomic RNA
ctgggctgatcagtgca

SEQ ID NO: 6190 - RNA, 17 nt, Homo sapiens
  source 1..17: mol_type = genomic RNA
tgggctgatcagtgcag

SEQ ID NO: 6191 - RNA, 17 nt, Homo sapiens
  source 1..17: mol_type = genomic RNA
gggctgatcagtgcaga

SEQ ID NO: 6192 - RNA, 17 nt, Homo sapiens
  source 1..17: mol_type = genomic RNA
ggctgatcagtgcagag

SEQ ID NO: 6193 - RNA, 17 nt, Homo sapiens
  source 1..17: mol_type = genomic RNA
gctgatcagtgcagaga

SEQ ID NO: 6194 - RNA, 17 nt, Homo sapiens
  source 1..17: mol_type = genomic RNA
ctgatcagtgcagagat

SEQ ID NO: 6195 - RNA, 17 nt, Homo sapiens
  source 1..17: mol_type = genomic RNA
tgatcagtgcagagata

SEQ ID NO: 6196 - RNA, 17 nt, Homo sapiens
  source 1..17: mol_type = genomic RNA
gatcagtgcagagatat

SEQ ID NO: 6197 - RNA, 17 nt, Homo sapiens
  source 1..17: mol_type = genomic RNA
atcagtgcagagatatc

SEQ ID NO: 6198 - RNA, 17 nt, Homo sapiens
  source 1..17: mol_type = genomic RNA
tcagtgcagagatatct

SEQ ID NO: 6199 - RNA, 17 nt, Homo sapiens
  source 1..17: mol_type = genomic RNA
cagtgcagagatatctc

SEQ ID NO: 6200 - RNA, 17 nt, Homo sapiens
  source 1..17: mol_type = genomic RNA
agtgcagagatatctca

SEQ ID NO: 6201 - RNA, 17 nt, Homo sapiens
  source 1..17: mol_type = genomic RNA
gtgcagagatatctcac

SEQ ID NO: 6202 - RNA, 17 nt, Homo sapiens
  source 1..17: mol_type = genomic RNA
tgcagagatatctcaca

SEQ ID NO: 6203 - RNA, 17 nt, Homo sapiens
  source 1..17: mol_type = genomic RNA
gcagagatatctcacaa

SEQ ID NO: 6204 - RNA, 17 nt, Homo sapiens
  source 1..17: mol_type = genomic RNA
agagatatctcacaaag

SEQ ID NO: 6205 - RNA, 17 nt, Homo sapiens
  source 1..17: mol_type = genomic RNA
gagatatctcacaaagc

SEQ ID NO: 6206 - RNA, 17 nt, Homo sapiens
  source 1..17: mol_type = genomic RNA
agatatctcacaaagcc

SEQ ID NO: 6207 - RNA, 17 nt, Homo sapiens
  source 1..17: mol_type = genomic RNA
gatatctcacaaagccc

SEQ ID NO: 6208 - RNA, 17 nt, Homo sapiens
  source 1..17: mol_type = genomic RNA
atatctcacaaagcccc

SEQ ID NO: 6209 - RNA, 17 nt, Homo sapiens
  source 1..17: mol_type = genomic RNA
tatctcacaaagcccct

SEQ ID NO: 6210 - RNA, 17 nt, Homo sapiens
  source 1..17: mol_type = genomic RNA
atctcacaaagccccta

SEQ ID NO: 6211 - RNA, 17 nt, Homo sapiens
  source 1..17: mol_type = genomic RNA
tctcacaaagcccctat

SEQ ID NO: 6212 - RNA, 17 nt, Homo sapiens
  source 1..17: mol_type = genomic RNA
ctcacaaagcccctata

SEQ ID NO: 6213 - RNA, 17 nt, Homo sapiens
  source 1..17: mol_type = genomic RNA
tcacaaagcccctataa

SEQ ID NO: 6214 - RNA, 17 nt, Homo sapiens
  source 1..17: mol_type = genomic RNA
cacaaagcccctataag

SEQ ID NO: 6215 - RNA, 17 nt, Homo sapiens
  source 1..17: mol_type = genomic RNA
acaaagcccctataagc

SEQ ID NO: 6216 - RNA, 17 nt, Homo sapiens
  source 1..17: mol_type = genomic RNA
caaagcccctataagcc

SEQ ID NO: 6217 - RNA, 17 nt, Homo sapiens
  source 1..17: mol_type = genomic RNA
aaagcccctataagcca

SEQ ID NO: 6218 - RNA, 17 nt, Homo sapiens
  source 1..17: mol_type = genomic RNA
aagcccctataagccaa

SEQ ID NO: 6219 - RNA, 17 nt, Homo sapiens
  source 1..17: mol_type = genomic RNA
agcccctataagccaaa

SEQ ID NO: 6220 - RNA, 17 nt, Homo sapiens
  source 1..17: mol_type = genomic RNA
gcccctataagccaaac

SEQ ID NO: 6221 - RNA, 17 nt, Homo sapiens
  source 1..17: mol_type = genomic RNA
cccctataagccaaacc

SEQ ID NO: 6222 - RNA, 17 nt, Homo sapiens
  source 1..17: mol_type = genomic RNA
ccctataagccaaacct

SEQ ID NO: 6223 - RNA, 17 nt, Homo sapiens
  source 1..17: mol_type = genomic RNA
cctataagccaaacctt

SEQ ID NO: 6224 - RNA, 17 nt, Homo sapiens
  source 1..17: mol_type = genomic RNA
tataagccaaaccttga

SEQ ID NO: 6225 - RNA, 17 nt, Homo sapiens
  source 1..17: mol_type = genomic RNA
ataagccaaaccttgac

SEQ ID NO: 6226 - RNA, 17 nt, Homo sapiens
  source 1..17: mol_type = genomic RNA
taagccaaaccttgaca

SEQ ID NO: 6227 - RNA, 17 nt, Homo sapiens
  source 1..17: mol_type = genomic RNA
aagccaaaccttgacaa

SEQ ID NO: 6228 - RNA, 17 nt, Homo sapiens
  source 1..17: mol_type = genomic RNA
agccaaaccttgacaag

SEQ ID NO: 6229 - RNA, 17 nt, Homo sapiens
  source 1..17: mol_type = genomic RNA
gccaaaccttgacaagg

SEQ ID NO: 6230 - RNA, 17 nt, Homo sapiens
  source 1..17: mol_type = genomic RNA
ccaaaccttgacaaggg

SEQ ID NO: 6231 - RNA, 17 nt, Homo sapiens
  source 1..17: mol_type = genomic RNA
caaaccttgacaagggt

SEQ ID NO: 6232 - RNA, 17 nt, Homo sapiens
  source 1..17: mol_type = genomic RNA
aaaccttgacaagggtt

SEQ ID NO: 6233 - RNA, 17 nt, Homo sapiens
  source 1..17: mol_type = genomic RNA
aaccttgacaagggtta

SEQ ID NO: 6234 - RNA, 17 nt, Homo sapiens
  source 1..17: mol_type = genomic RNA
accttgacaagggttac

SEQ ID NO: 6235 - RNA, 17 nt, Homo sapiens
  source 1..17: mol_type = genomic RNA
ccttgacaagggttaca

SEQ ID NO: 6236 - RNA, 17 nt, Homo sapiens
  source 1..17: mol_type = genomic RNA
cttgacaagggttacat

SEQ ID NO: 6237 - RNA, 17 nt, Homo sapiens
  source 1..17: mol_type = genomic RNA
ttgacaagggttacatc

SEQ ID NO: 6238 - RNA, 17 nt, Homo sapiens
  source 1..17: mol_type = genomic RNA
tgacaagggttacatca

SEQ ID NO: 6239 - RNA, 17 nt, Homo sapiens
  source 1..17: mol_type = genomic RNA
gacaagggttacatcac

SEQ ID NO: 6240 - RNA, 17 nt, Homo sapiens
  source 1..17: mol_type = genomic RNA
acaagggttacatcacc

SEQ ID NO: 6241 - RNA, 17 nt, Homo sapiens
  source 1..17: mol_type = genomic RNA
caagggttacatcacct

SEQ ID NO: 6242 - RNA, 17 nt, Homo sapiens
  source 1..17: mol_type = genomic RNA
aagggttacatcacctg

SEQ ID NO: 6243 - RNA, 17 nt, Homo sapiens
  source 1..17: mol_type = genomic RNA
agggttacatcacctgt

SEQ ID NO: 6244 - RNA, 17 nt, Homo sapiens
  source 1..17: mol_type = genomic RNA
gggttacatcacctgtt

SEQ ID NO: 6245 - RNA, 17 nt, Homo sapiens
  source 1..17: mol_type = genomic RNA
acatcacctgtttgagc

SEQ ID NO: 6246 - RNA, 17 nt, Homo sapiens
  source 1..17: mol_type = genomic RNA
atcacctgtttgagcag

SEQ ID NO: 6247 - RNA, 17 nt, Homo sapiens
  source 1..17: mol_type = genomic RNA
tcacctgtttgagcagt

SEQ ID NO: 6248 - RNA, 17 nt, Homo sapiens
  source 1..17: mol_type = genomic RNA
cacctgtttgagcagtg

SEQ ID NO: 6249 - RNA, 17 nt, Homo sapiens
  source 1..17: mol_type = genomic RNA
acctgtttgagcagtgg

SEQ ID NO: 6250 - RNA, 17 nt, Homo sapiens
  source 1..17: mol_type = genomic RNA
cctgtttgagcagtgga

SEQ ID NO: 6251 - RNA, 17 nt, Homo sapiens
  source 1..17: mol_type = genomic RNA
ctgtttgagcagtggaa

SEQ ID NO: 6252 - RNA, 17 nt, Homo sapiens
  source 1..17: mol_type = genomic RNA
tgtttgagcagtggaaa

SEQ ID NO: 6253 - RNA, 17 nt, Homo sapiens
  source 1..17: mol_type = genomic RNA
gtttgagcagtggaaat

SEQ ID NO: 6254 - RNA, 17 nt, Homo sapiens
  source 1..17: mol_type = genomic RNA
tttgagcagtggaaata

SEQ ID NO: 6255 - RNA, 17 nt, Homo sapiens
  source 1..17: mol_type = genomic RNA
ttgagcagtggaaatat

SEQ ID NO: 6256 - RNA, 17 nt, Homo sapiens
  source 1..17: mol_type = genomic RNA
tgagcagtggaaatata

SEQ ID NO: 6257 - RNA, 17 nt, Homo sapiens
  source 1..17: mol_type = genomic RNA
gagcagtggaaatatat

SEQ ID NO: 6258 - RNA, 17 nt, Homo sapiens
  source 1..17: mol_type = genomic RNA
tatatatcacaaagccc

SEQ ID NO: 6259 - RNA, 17 nt, Homo sapiens
  source 1..17: mol_type = genomic RNA
atatatcacaaagcccc

SEQ ID NO: 6260 - RNA, 17 nt, Homo sapiens
  source 1..17: mol_type = genomic RNA
tatatcacaaagccccc

SEQ ID NO: 6261 - RNA, 17 nt, Homo sapiens
  source 1..17: mol_type = genomic RNA
atatcacaaagccccct

SEQ ID NO: 6262 - RNA, 17 nt, Homo sapiens
  source 1..17: mol_type = genomic RNA
tatcacaaagccccctg

SEQ ID NO: 6263 - RNA, 17 nt, Homo sapiens
  source 1..17: mol_type = genomic RNA
atcacaaagccccctgt

SEQ ID NO: 6264 - RNA, 17 nt, Homo sapiens
  source 1..17: mol_type = genomic RNA
tcacaaagccccctgta

SEQ ID NO: 6265 - RNA, 17 nt, Homo sapiens
  source 1..17: mol_type = genomic RNA
cacaaagccccctgtag

SEQ ID NO: 6266 - RNA, 17 nt, Homo sapiens
  source 1..17: mol_type = genomic RNA
acaaagccccctgtaga

SEQ ID NO: 6267 - RNA, 17 nt, Homo sapiens
  source 1..17: mol_type = genomic RNA
caaagccccctgtagac

SEQ ID NO: 6268 - RNA, 17 nt, Homo sapiens
  source 1..17: mol_type = genomic RNA
aaagccccctgtagaca

SEQ ID NO: 6269 - RNA, 17 nt, Homo sapiens
  source 1..17: mol_type = genomic RNA
aagccccctgtagacaa

SEQ ID NO: 6270 - RNA, 17 nt, Homo sapiens
  source 1..17: mol_type = genomic RNA
agccccctgtagacaaa

SEQ ID NO: 6271 - RNA, 17 nt, Homo sapiens
  source 1..17: mol_type = genomic RNA
gccccctgtagacaaag

SEQ ID NO: 6272 - RNA, 17 nt, Homo sapiens
  source 1..17: mol_type = genomic RNA
ccccctgtagacaaagc

SEQ ID NO: 6273 - RNA, 17 nt, Homo sapiens
  source 1..17: mol_type = genomic RNA
cccctgtagacaaagcc

SEQ ID NO: 6274 - RNA, 17 nt, Homo sapiens
  source 1..17: mol_type = genomic RNA
ccctgtagacaaagccc

SEQ ID NO: 6275 - RNA, 17 nt, Homo sapiens
  source 1..17: mol_type = genomic RNA
cctgtagacaaagccca

SEQ ID NO: 6276 - RNA, 17 nt, Homo sapiens
  source 1..17: mol_type = genomic RNA
ctgtagacaaagcccag

SEQ ID NO: 6277 - RNA, 17 nt, Homo sapiens
  source 1..17: mol_type = genomic RNA
tgtagacaaagcccaga

SEQ ID NO: 6278 - RNA, 17 nt, Homo sapiens
  source 1..17: mol_type = genomic RNA
gtagacaaagcccagac

SEQ ID NO: 6279 - RNA, 17 nt, Homo sapiens
  source 1..17: mol_type = genomic RNA
tagacaaagcccagaca

SEQ ID NO: 6280 - RNA, 17 nt, Homo sapiens
  source 1..17: mol_type = genomic RNA
agacaaagcccagacaa

SEQ ID NO: 6281 - RNA, 17 nt, Homo sapiens
  source 1..17: mol_type = genomic RNA
gacaaagcccagacaat

SEQ ID NO: 6282 - RNA, 17 nt, Homo sapiens
  source 1..17: mol_type = genomic RNA
acaaagcccagacaatt

SEQ ID NO: 6283 - RNA, 17 nt, Homo sapiens
  source 1..17: mol_type = genomic RNA
caaagcccagacaattt

SEQ ID NO: 6284 - RNA, 17 nt, Homo sapiens
  source 1..17: mol_type = genomic RNA
tacatctcctgagtgag

SEQ ID NO: 6285 - RNA, 17 nt, Homo sapiens
  source 1..17: mol_type = genomic RNA
acatctcctgagtgagc

SEQ ID NO: 6286 - RNA, 17 nt, Homo sapiens
  source 1..17: mol_type = genomic RNA
catctcctgagtgagca

SEQ ID NO: 6287 - RNA, 17 nt, Homo sapiens
  source 1..17: mol_type = genomic RNA
atctcctgagtgagcat

SEQ ID NO: 6288 - RNA, 17 nt, Homo sapiens
  source 1..17: mol_type = genomic RNA
tctcctgagtgagcatt

SEQ ID NO: 6289 - RNA, 17 nt, Homo sapiens
  source 1..17: mol_type = genomic RNA
ctcctgagtgagcattg

SEQ ID NO: 6290 - RNA, 17 nt, Homo sapiens
  source 1..17: mol_type = genomic RNA
tcctgagtgagcattgg

SEQ ID NO: 6291 - RNA, 17 nt, Homo sapiens
  source 1..17: mol_type = genomic RNA
cctgagtgagcattgga

SEQ ID NO: 6292 - RNA, 17 nt, Homo sapiens
  source 1..17: mol_type = genomic RNA
ctgagtgagcattggag

SEQ ID NO: 6293 - RNA, 17 nt, Homo sapiens
  source 1..17: mol_type = genomic RNA
tgagtgagcattggaga

SEQ ID NO: 6294 - RNA, 17 nt, Homo sapiens
  source 1..17: mol_type = genomic RNA
gagtgagcattggagag

SEQ ID NO: 6295 - RNA, 17 nt, Homo sapiens
  source 1..17: mol_type = genomic RNA
agtgagcattggagaga

SEQ ID NO: 6296 - RNA, 17 nt, Homo sapiens
  source 1..17: mol_type = genomic RNA
gtgagcattggagagat

SEQ ID NO: 6297 - RNA, 17 nt, Homo sapiens
  source 1..17: mol_type = genomic RNA
tgagcattggagagatc

SEQ ID NO: 6298 - RNA, 17 nt, Homo sapiens
  source 1..17: mol_type = genomic RNA
gagcattggagagatct

SEQ ID NO: 6299 - RNA, 17 nt, Homo sapiens
  source 1..17: mol_type = genomic RNA
agcattggagagatctg

SEQ ID NO: 6300 - RNA, 17 nt, Homo sapiens
  source 1..17: mol_type = genomic RNA
gcattggagagatctgt

SEQ ID NO: 6301 - RNA, 17 nt, Homo sapiens
  source 1..17: mol_type = genomic RNA
cattggagagatctgtc

SEQ ID NO: 6302 - RNA, 17 nt, Homo sapiens
  source 1..17: mol_type = genomic RNA
attggagagatctgtca

SEQ ID NO: 6303 - RNA, 17 nt, Homo sapiens
  source 1..17: mol_type = genomic RNA
ttggagagatctgtcac

SEQ ID NO: 6304 - RNA, 17 nt, Homo sapiens
  source 1..17: mol_type = genomic RNA
tggagagatctgtcaca

SEQ ID NO: 6305 - RNA, 17 nt, Homo sapiens
  source 1..17: mol_type = genomic RNA
ggagagatctgtcacaa

SEQ ID NO: 6306 - RNA, 17 nt, Homo sapiens
  source 1..17: mol_type = genomic RNA
gagagatctgtcacaat

SEQ ID NO: 6307 - RNA, 17 nt, Homo sapiens
  source 1..17: mol_type = genomic RNA
agagatctgtcacaatg

SEQ ID NO: 6308 - RNA, 17 nt, Homo sapiens
  source 1..17: mol_type = genomic RNA
gagatctgtcacaatgc

SEQ ID NO: 6309 - RNA, 17 nt, Homo sapiens
  source 1..17: mol_type = genomic RNA
agatctgtcacaatgcc

SEQ ID NO: 6310 - RNA, 17 nt, Homo sapiens
  source 1..17: mol_type = genomic RNA
gatctgtcacaatgccc

SEQ ID NO: 6311 - RNA, 17 nt, Homo sapiens
  source 1..17: mol_type = genomic RNA
atctgtcacaatgcccc

SEQ ID NO: 6312 - RNA, 17 nt, Homo sapiens
  source 1..17: mol_type = genomic RNA
tctgtcacaatgcccct

SEQ ID NO: 6313 - RNA, 17 nt, Homo sapiens
  source 1..17: mol_type = genomic RNA
ctgtcacaatgcccctg

SEQ ID NO: 6314 - RNA, 17 nt, Homo sapiens
  source 1..17: mol_type = genomic RNA
tgtcacaatgcccctgt

SEQ ID NO: 6315 - RNA, 17 nt, Homo sapiens
  source 1..17: mol_type = genomic RNA
gtcacaatgcccctgta

SEQ ID NO: 6316 - RNA, 17 nt, Homo sapiens
  source 1..17: mol_type = genomic RNA
tcacaatgcccctgtag

SEQ ID NO: 6317 - RNA, 17 nt, Homo sapiens
  source 1..17: mol_type = genomic RNA
cacaatgcccctgtagg

SEQ ID NO: 6318 - RNA, 17 nt, Homo sapiens
  source 1..17: mol_type = genomic RNA
acaatgcccctgtaggc

SEQ ID NO: 6319 - RNA, 17 nt, Homo sapiens
  source 1..17: mol_type = genomic RNA
caatgcccctgtaggca

SEQ ID NO: 6320 - RNA, 17 nt, Homo sapiens
  source 1..17: mol_type = genomic RNA
aatgcccctgtaggcag

SEQ ID NO: 6321 - RNA, 17 nt, Homo sapiens
  source 1..17: mol_type = genomic RNA
atgcccctgtaggcaga

SEQ ID NO: 6322 - RNA, 17 nt, Homo sapiens
  source 1..17: mol_type = genomic RNA
tgcccctgtaggcagag

SEQ ID NO: 6323 - RNA, 17 nt, Homo sapiens
  source 1..17: mol_type = genomic RNA
cccctgtaggcagagct

SEQ ID NO: 6324 - RNA, 17 nt, Homo sapiens
  source 1..17: mol_type = genomic RNA
ccctgtaggcagagctt

SEQ ID NO: 6325 - RNA, 17 nt, Homo sapiens
  source 1..17: mol_type = genomic RNA
cctgtaggcagagctta

SEQ ID NO: 6326 - RNA, 17 nt, Homo sapiens
  source 1..17: mol_type = genomic RNA
ctgtaggcagagcttag

SEQ ID NO: 6327 - RNA, 17 nt, Homo sapiens
  source 1..17: mol_type = genomic RNA
tgtaggcagagcttaga

SEQ ID NO: 6328 - RNA, 17 nt, Homo sapiens
  source 1..17: mol_type = genomic RNA
gtaggcagagcttagac

SEQ ID NO: 6329 - RNA, 17 nt, Homo sapiens
  source 1..17: mol_type = genomic RNA
taggcagagcttagaca

SEQ ID NO: 6330 - RNA, 17 nt, Homo sapiens
  source 1..17: mol_type = genomic RNA
aggcagagcttagacaa

SEQ ID NO: 6331 - RNA, 17 nt, Homo sapiens
  source 1..17: mol_type = genomic RNA
ggcagagcttagacaag

SEQ ID NO: 6332 - RNA, 17 nt, Homo sapiens
  source 1..17: mol_type = genomic RNA
gcagagcttagacaagt

SEQ ID NO: 6333 - RNA, 17 nt, Homo sapiens
  source 1..17: mol_type = genomic RNA
cagagcttagacaagtg

SEQ ID NO: 6334 - RNA, 17 nt, Homo sapiens
  source 1..17: mol_type = genomic RNA
agagcttagacaagtgt

SEQ ID NO: 6335 - RNA, 17 nt, Homo sapiens
  source 1..17: mol_type = genomic RNA
gagcttagacaagtgtt

SEQ ID NO: 6336 - RNA, 17 nt, Homo sapiens
  source 1..17: mol_type = genomic RNA
acaagtgttacatcacc

SEQ ID NO: 6337 - RNA, 17 nt, Homo sapiens
  source 1..17: mol_type = genomic RNA
agtgttacatcacctgg

SEQ ID NO: 6338 - RNA, 17 nt, Homo sapiens
  source 1..17: mol_type = genomic RNA
gtgttacatcacctggg

SEQ ID NO: 6339 - RNA, 17 nt, Homo sapiens
  source 1..17: mol_type = genomic RNA
tgttacatcacctgggt

SEQ ID NO: 6340 - RNA, 17 nt, Homo sapiens
  source 1..17: mol_type = genomic RNA
gttacatcacctgggtg

SEQ ID NO: 6341 - RNA, 17 nt, Homo sapiens
  source 1..17: mol_type = genomic RNA
ttacatcacctgggtga

SEQ ID NO: 6342 - RNA, 17 nt, Homo sapiens
  source 1..17: mol_type = genomic RNA
tacatcacctgggtgat

SEQ ID NO: 6343 - RNA, 17 nt, Homo sapiens
  source 1..17: mol_type = genomic RNA
acatcacctgggtgatc

SEQ ID NO: 6344 - RNA, 17 nt, Homo sapiens
  source 1..17: mol_type = genomic RNA
catcacctgggtgatca

SEQ ID NO: 6345 - RNA, 17 nt, Homo sapiens
  source 1..17: mol_type = genomic RNA
atcacctgggtgatcag

SEQ ID NO: 6346 - RNA, 17 nt, Homo sapiens
  source 1..17: mol_type = genomic RNA
tcacctgggtgatcagt

SEQ ID NO: 6347 - RNA, 17 nt, Homo sapiens
  source 1..17: mol_type = genomic RNA
cacctgggtgatcagtg

SEQ ID NO: 6348 - RNA, 17 nt, Homo sapiens
  source 1..17: mol_type = genomic RNA
acctgggtgatcagtgc

SEQ ID NO: 6349 - RNA, 17 nt, Homo sapiens
  source 1..17: mol_type = genomic RNA
cctgggtgatcagtgca

SEQ ID NO: 6350 - RNA, 17 nt, Homo sapiens
  source 1..17: mol_type = genomic RNA
ctgggtgatcagtgcag

SEQ ID NO: 6351 - RNA, 17 nt, Homo sapiens
  source 1..17: mol_type = genomic RNA
tgggtgatcagtgcaga

SEQ ID NO: 6352 - RNA, 17 nt, Homo sapiens
  source 1..17: mol_type = genomic RNA
gggtgatcagtgcagag

SEQ ID NO: 6353 - RNA, 17 nt, Homo sapiens
  source 1..17: mol_type = genomic RNA
ggtgatcagtgcagaga

SEQ ID NO: 6354 - RNA, 17 nt, Homo sapiens
  source 1..17: mol_type = genomic RNA
gtgatcagtgcagagat

SEQ ID NO: 6355 - RNA, 17 nt, Homo sapiens
  source 1..17: mol_type = genomic RNA
tgatcagtgcagagatg

SEQ ID NO: 6356 - RNA, 17 nt, Homo sapiens
  source 1..17: mol_type = genomic RNA
gatcagtgcagagatgt

SEQ ID NO: 6357 - RNA, 17 nt, Homo sapiens
  source 1..17: mol_type = genomic RNA
atcagtgcagagatgtg

SEQ ID NO: 6358 - RNA, 17 nt, Homo sapiens
  source 1..17: mol_type = genomic RNA
tcagtgcagagatgtgt

SEQ ID NO: 6359 - RNA, 17 nt, Homo sapiens
  source 1..17: mol_type = genomic RNA
cagtgcagagatgtgtc

SEQ ID NO: 6360 - RNA, 17 nt, Homo sapiens
  source 1..17: mol_type = genomic RNA
agtgcagagatgtgtca

SEQ ID NO: 6361 - RNA, 17 nt, Homo sapiens
  source 1..17: mol_type = genomic RNA
tgtcaaaacgctcctgt

SEQ ID NO: 6362 - RNA, 17 nt, Homo sapiens
  source 1..17: mol_type = genomic RNA
gtcaaaacgctcctgta

SEQ ID NO: 6363 - RNA, 17 nt, Homo sapiens
  source 1..17: mol_type = genomic RNA
tcaaaacgctcctgtag

SEQ ID NO: 6364 - RNA, 17 nt, Homo sapiens
  source 1..17: mol_type = genomic RNA
caaaacgctcctgtagt

SEQ ID NO: 6365 - RNA, 17 nt, Homo sapiens
  source 1..17: mol_type = genomic RNA
aaaacgctcctgtagtc

SEQ ID NO: 6366 - RNA, 17 nt, Homo sapiens
  source 1..17: mol_type = genomic RNA
aaacgctcctgtagtct

SEQ ID NO: 6367 - RNA, 17 nt, Homo sapiens
  source 1..17: mol_type = genomic RNA
aacgctcctgtagtctg

SEQ ID NO: 6368 - RNA, 17 nt, Homo sapiens
  source 1..17: mol_type = genomic RNA
acgctcctgtagtctga

SEQ ID NO: 6369 - RNA, 17 nt, Homo sapiens
  source 1..17: mol_type = genomic RNA
cgctcctgtagtctgaa

SEQ ID NO: 6370 - RNA, 17 nt, Homo sapiens
  source 1..17: mol_type = genomic RNA
gctcctgtagtctgaac

SEQ ID NO: 6371 - RNA, 17 nt, Homo sapiens
  source 1..17: mol_type = genomic RNA
ctcctgtagtctgaacc

SEQ ID NO: 6372 - RNA, 17 nt, Homo sapiens
  source 1..17: mol_type = genomic RNA
tcctgtagtctgaacct

SEQ ID NO: 6373 - RNA, 17 nt, Homo sapiens
  source 1..17: mol_type = genomic RNA
cctgtagtctgaaccta

SEQ ID NO: 6374 - RNA, 17 nt, Homo sapiens
  source 1..17: mol_type = genomic RNA
ctgtagtctgaacctag

SEQ ID NO: 6375 - RNA, 17 nt, Homo sapiens
  source 1..17: mol_type = genomic RNA
tgtagtctgaacctaga

SEQ ID NO: 6376 - RNA, 17 nt, Homo sapiens
  source 1..17: mol_type = genomic RNA
gtagtctgaacctagac

SEQ ID NO: 6377 - RNA, 17 nt, Homo sapiens
  source 1..17: mol_type = genomic RNA
tagtctgaacctagaca

SEQ ID NO: 6378 - RNA, 17 nt, Homo sapiens
  source 1..17: mol_type = genomic RNA
agtctgaacctagacag

SEQ ID NO: 6379 - RNA, 17 nt, Homo sapiens
  source 1..17: mol_type = genomic RNA
gtctgaacctagacagg

SEQ ID NO: 6380 - RNA, 17 nt, Homo sapiens
  source 1..17: mol_type = genomic RNA
tctgaacctagacagga

SEQ ID NO: 6381 - RNA, 17 nt, Homo sapiens
  source 1..17: mol_type = genomic RNA
ctgaacctagacaggag

SEQ ID NO: 6382 - RNA, 17 nt, Homo sapiens
  source 1..17: mol_type = genomic RNA
tgaacctagacaggagt

SEQ ID NO: 6383 - RNA, 17 nt, Homo sapiens
  source 1..17: mol_type = genomic RNA
gaacctagacaggagtt

SEQ ID NO: 6384 - RNA, 17 nt, Homo sapiens
  source 1..17: mol_type = genomic RNA
aacctagacaggagtta

SEQ ID NO: 6385 - RNA, 17 nt, Homo sapiens
  source 1..17: mol_type = genomic RNA
acctagacaggagttac

SEQ ID NO: 6386 - RNA, 17 nt, Homo sapiens
  source 1..17: mol_type = genomic RNA
cctagacaggagttaca

SEQ ID NO: 6387 - RNA, 17 nt, Homo sapiens
  source 1..17: mol_type = genomic RNA
ctagacaggagttacat

SEQ ID NO: 6388 - RNA, 17 nt, Homo sapiens
  source 1..17: mol_type = genomic RNA
tagacaggagttacatc

SEQ ID NO: 6389 - RNA, 17 nt, Homo sapiens
  source 1..17: mol_type = genomic RNA
agacaggagttacatca

SEQ ID NO: 6390 - RNA, 17 nt, Homo sapiens
  source 1..17: mol_type = genomic RNA
gacaggagttacatcac

SEQ ID NO: 6391 - RNA, 17 nt, Homo sapiens
  source 1..17: mol_type = genomic RNA
acaggagttacatcacc

SEQ ID NO: 6392 - RNA, 17 nt, Homo sapiens
  source 1..17: mol_type = genomic RNA
caggagttacatcacct

SEQ ID NO: 6393 - RNA, 17 nt, Homo sapiens
  source 1..17: mol_type = genomic RNA
aggagttacatcacctt

SEQ ID NO: 6394 - RNA, 17 nt, Homo sapiens
  source 1..17: mol_type = genomic RNA
ggagttacatcaccttg

SEQ ID NO: 6395 - RNA, 17 nt, Homo sapiens
  source 1..17: mol_type = genomic RNA
gagttacatcaccttgg

SEQ ID NO: 6396 - RNA, 17 nt, Homo sapiens
  source 1..17: mol_type = genomic RNA
agttacatcaccttggg

SEQ ID NO: 6397 - RNA, 17 nt, Homo sapiens
  source 1..17: mol_type = genomic RNA
gttacatcaccttgggg

SEQ ID NO: 6398 - RNA, 17 nt, Homo sapiens
  source 1..17: mol_type = genomic RNA
ttacatcaccttgggga

SEQ ID NO: 6399 - RNA, 17 nt, Homo sapiens
  source 1..17: mol_type = genomic RNA
tacatcaccttggggat

SEQ ID NO: 6400 - RNA, 17 nt, Homo sapiens
  source 1..17: mol_type = genomic RNA
acatcaccttggggatc

SEQ ID NO: 6401 - RNA, 17 nt, Homo sapiens
  source 1..17: mol_type = genomic RNA
catcaccttggggatca

SEQ ID NO: 6402 - RNA, 17 nt, Homo sapiens
  source 1..17: mol_type = genomic RNA
atcaccttggggatcag

SEQ ID NO: 6403 - RNA, 17 nt, Homo sapiens
  source 1..17: mol_type = genomic RNA
tcaccttggggatcagt

SEQ ID NO: 6404 - RNA, 17 nt, Homo sapiens
  source 1..17: mol_type = genomic RNA
caccttggggatcagtg

SEQ ID NO: 6405 - RNA, 17 nt, Homo sapiens
  source 1..17: mol_type = genomic RNA
accttggggatcagtgc

SEQ ID NO: 6406 - RNA, 17 nt, Homo sapiens
  source 1..17: mol_type = genomic RNA
ccttggggatcagtgca

SEQ ID NO: 6407 - RNA, 17 nt, Homo sapiens
  source 1..17: mol_type = genomic RNA
cttggggatcagtgcag

SEQ ID NO: 6408 - RNA, 17 nt, Homo sapiens
  source 1..17: mol_type = genomic RNA
ttggggatcagtgcaga

SEQ ID NO: 6409 - RNA, 17 nt, Homo sapiens
  source 1..17: mol_type = genomic RNA
tggggatcagtgcagag

SEQ ID NO: 6410 - RNA, 17 nt, Homo sapiens
  source 1..17: mol_type = genomic RNA
ggggatcagtgcagaga

SEQ ID NO: 6411 - RNA, 17 nt, Homo sapiens
  source 1..17: mol_type = genomic RNA
gggatcagtgcagagat

SEQ ID NO: 6412 - RNA, 17 nt, Homo sapiens
  source 1..17: mol_type = genomic RNA
ggatcagtgcagagata

SEQ ID NO: 6413 - RNA, 17 nt, Homo sapiens
  source 1..17: mol_type = genomic RNA
gatcagtgcagagatac

SEQ ID NO: 6414 - RNA, 17 nt, Homo sapiens
  source 1..17: mol_type = genomic RNA
atcagtgcagagatacg

SEQ ID NO: 6415 - RNA, 17 nt, Homo sapiens
  source 1..17: mol_type = genomic RNA
tcagtgcagagatacgt

SEQ ID NO: 6416 - RNA, 17 nt, Homo sapiens
  source 1..17: mol_type = genomic RNA
cagtgcagagatacgtg

SEQ ID NO: 6417 - RNA, 17 nt, Homo sapiens
  source 1..17: mol_type = genomic RNA
agtgcagagatacgtga

SEQ ID NO: 6418 - RNA, 17 nt, Homo sapiens
  source 1..17: mol_type = genomic RNA
gtgcagagatacgtgag

SEQ ID NO: 6419 - RNA, 17 nt, Homo sapiens
  source 1..17: mol_type = genomic RNA
tgcagagatacgtgaga

SEQ ID NO: 6420 - RNA, 17 nt, Homo sapiens
  source 1..17: mol_type = genomic RNA
gcagagatacgtgagaa

SEQ ID NO: 6421 - RNA, 17 nt, Homo sapiens
  source 1..17: mol_type = genomic RNA
cagagatacgtgagaat

SEQ ID NO: 6422 - RNA, 17 nt, Homo sapiens
  source 1..17: mol_type = genomic RNA
agagatacgtgagaatt

SEQ ID NO: 6423 - RNA, 17 nt, Homo sapiens
  source 1..17: mol_type = genomic RNA
agatacgtgagaattcc

SEQ ID NO: 6424 - RNA, 17 nt, Homo sapiens
  source 1..17: mol_type = genomic RNA
gatacgtgagaattccc

SEQ ID NO: 6425 - RNA, 17 nt, Homo sapiens
  source 1..17: mol_type = genomic RNA
atacgtgagaattccct

SEQ ID NO: 6426 - RNA, 17 nt, Homo sapiens
  source 1..17: mol_type = genomic RNA
acgtgagaattcccttg

SEQ ID NO: 6427 - RNA, 17 nt, Homo sapiens
  source 1..17: mol_type = genomic RNA
gagaattcccttgtagg

SEQ ID NO: 6428 - RNA, 17 nt, Homo sapiens
  source 1..17: mol_type = genomic RNA
agaattcccttgtaggc

SEQ ID NO: 6429 - RNA, 17 nt, Homo sapiens
  source 1..17: mol_type = genomic RNA
gaattcccttgtaggca

SEQ ID NO: 6430 - RNA, 17 nt, Homo sapiens
  source 1..17: mol_type = genomic RNA
aattcccttgtaggcag

SEQ ID NO: 6431 - RNA, 17 nt, Homo sapiens
  source 1..17: mol_type = genomic RNA
attcccttgtaggcagg

SEQ ID NO: 6432 - RNA, 17 nt, Homo sapiens
  source 1..17: mol_type = genomic RNA
ttcccttgtaggcaggg

SEQ ID NO: 6433 - RNA, 17 nt, Homo sapiens
  source 1..17: mol_type = genomic RNA
tcccttgtaggcagggc

SEQ ID NO: 6434 - RNA, 17 nt, Homo sapiens
  source 1..17: mol_type = genomic RNA
cccttgtaggcagggcc

SEQ ID NO: 6435 - RNA, 17 nt, Homo sapiens
  source 1..17: mol_type = genomic RNA
ccttgtaggcagggcct

SEQ ID NO: 6436 - RNA, 17 nt, Homo sapiens
  source 1..17: mol_type = genomic RNA
cttgtaggcagggccta

SEQ ID NO: 6437 - RNA, 17 nt, Homo sapiens
  source 1..17: mol_type = genomic RNA
ttgtaggcagggcctag

SEQ ID NO: 6438 - RNA, 17 nt, Homo sapiens
  source 1..17: mol_type = genomic RNA
tgtaggcagggcctaga

SEQ ID NO: 6439 - RNA, 17 nt, Homo sapiens
  source 1..17: mol_type = genomic RNA
gcagggcctagacaagt

SEQ ID NO: 6440 - RNA, 17 nt, Homo sapiens
  source 1..17: mol_type = genomic RNA
cagggcctagacaagtg

SEQ ID NO: 6441 - RNA, 17 nt, Homo sapiens
  source 1..17: mol_type = genomic RNA
agggcctagacaagtgt

SEQ ID NO: 6442 - RNA, 17 nt, Homo sapiens
  source 1..17: mol_type = genomic RNA
gggcctagacaagtgtt

SEQ ID NO: 6443 - RNA, 17 nt, Homo sapiens
  source 1..17: mol_type = genomic RNA
ggcctagacaagtgtta

SEQ ID NO: 6444 - RNA, 17 nt, Homo sapiens
  source 1..17: mol_type = genomic RNA
gcctagacaagtgttac

SEQ ID NO: 6445 - RNA, 17 nt, Homo sapiens
  source 1..17: mol_type = genomic RNA
gtgttacatcacctagg

SEQ ID NO: 6446 - RNA, 17 nt, Homo sapiens
  source 1..17: mol_type = genomic RNA
tgttacatcacctaggt

SEQ ID NO: 6447 - RNA, 17 nt, Homo sapiens
  source 1..17: mol_type = genomic RNA
acatcacctaggttatc

SEQ ID NO: 6448 - RNA, 17 nt, Homo sapiens
  source 1..17: mol_type = genomic RNA
tcacctaggttatcagt

SEQ ID NO: 6449 - RNA, 17 nt, Homo sapiens
  source 1..17: mol_type = genomic RNA
cacctaggttatcagtg

SEQ ID NO: 6450 - RNA, 17 nt, Homo sapiens
  source 1..17: mol_type = genomic RNA
acctaggttatcagtgc

SEQ ID NO: 6451 - RNA, 17 nt, Homo sapiens
  source 1..17: mol_type = genomic RNA
cctaggttatcagtgca

SEQ ID NO: 6452 - RNA, 17 nt, Homo sapiens
  source 1..17: mol_type = genomic RNA
ctaggttatcagtgcag

SEQ ID NO: 6453 - RNA, 17 nt, Homo sapiens
  source 1..17: mol_type = genomic RNA
taggttatcagtgcaga

SEQ ID NO: 6454 - RNA, 17 nt, Homo sapiens
  source 1..17: mol_type = genomic RNA
aggttatcagtgcagag

SEQ ID NO: 6455 - RNA, 17 nt, Homo sapiens
  source 1..17: mol_type = genomic RNA
ggttatcagtgcagaga

SEQ ID NO: 6456 - RNA, 17 nt, Homo sapiens
  source 1..17: mol_type = genomic RNA
tatcagtgcagagatat

SEQ ID NO: 6457 - RNA, 17 nt, Homo sapiens
  source 1..17: mol_type = genomic RNA
atcagtgcagagatatg

SEQ ID NO: 6458 - RNA, 17 nt, Homo sapiens
  source 1..17: mol_type = genomic RNA
tcagtgcagagatatgt

SEQ ID NO: 6459 - RNA, 17 nt, Homo sapiens
  source 1..17: mol_type = genomic RNA
cagtgcagagatatgtg

SEQ ID NO: 6460 - RNA, 17 nt, Homo sapiens
  source 1..17: mol_type = genomic RNA
agtgcagagatatgtga

SEQ ID NO: 6461 - RNA, 17 nt, Homo sapiens
  source 1..17: mol_type = genomic RNA
gtgcagagatatgtgag

SEQ ID NO: 6462 - RNA, 17 nt, Homo sapiens
  source 1..17: mol_type = genomic RNA
tgcagagatatgtgaga

SEQ ID NO: 6463 - RNA, 17 nt, Homo sapiens
  source 1..17: mol_type = genomic RNA
gcagagatatgtgagaa

SEQ ID NO: 6464 - RNA, 17 nt, Homo sapiens
  source 1..17: mol_type = genomic RNA
atgtgagaattcccgtg

SEQ ID NO: 6465 - RNA, 17 nt, Homo sapiens
  source 1..17: mol_type = genomic RNA
tgtgagaattcccgtgt

SEQ ID NO: 6466 - RNA, 17 nt, Homo sapiens
  source 1..17: mol_type = genomic RNA
gtgagaattcccgtgta

SEQ ID NO: 6467 - RNA, 17 nt, Homo sapiens
  source 1..17: mol_type = genomic RNA
tgagaattcccgtgtag

SEQ ID NO: 6468 - RNA, 17 nt, Homo sapiens
  source 1..17: mol_type = genomic RNA
gagaattcccgtgtagg

SEQ ID NO: 6469 - RNA, 17 nt, Homo sapiens
  source 1..17: mol_type = genomic RNA
agaattcccgtgtaggc

SEQ ID NO: 6470 - RNA, 17 nt, Homo sapiens
  source 1..17: mol_type = genomic RNA
gaattcccgtgtaggca

SEQ ID NO: 6471 - RNA, 17 nt, Homo sapiens
  source 1..17: mol_type = genomic RNA
aattcccgtgtaggcag

SEQ ID NO: 6472 - RNA, 17 nt, Homo sapiens
  source 1..17: mol_type = genomic RNA
attcccgtgtaggcaga

SEQ ID NO: 6473 - RNA, 17 nt, Homo sapiens
  source 1..17: mol_type = genomic RNA
ttcccgtgtaggcagag

SEQ ID NO: 6474 - RNA, 17 nt, Homo sapiens
  source 1..17: mol_type = genomic RNA
tcccgtgtaggcagagc

SEQ ID NO: 6475 - RNA, 17 nt, Homo sapiens
  source 1..17: mol_type = genomic RNA
cccgtgtaggcagagcc

SEQ ID NO: 6476 - RNA, 17 nt, Homo sapiens
  source 1..17: mol_type = genomic RNA
ccgtgtaggcagagcct

SEQ ID NO: 6477 - RNA, 17 nt, Homo sapiens
  source 1..17: mol_type = genomic RNA
cgtgtaggcagagccta

SEQ ID NO: 6478 - RNA, 17 nt, Homo sapiens
  source 1..17: mol_type = genomic RNA
gtgtaggcagagcctag

SEQ ID NO: 6479 - RNA, 17 nt, Homo sapiens
  source 1..17: mol_type = genomic RNA
tgtaggcagagcctaga

SEQ ID NO: 6480 - RNA, 17 nt, Homo sapiens
  source 1..17: mol_type = genomic RNA
gtaggcagagcctagac

SEQ ID NO: 6481 - RNA, 17 nt, Homo sapiens
  source 1..17: mol_type = genomic RNA
taggcagagcctagaca

SEQ ID NO: 6482 - RNA, 17 nt, Homo sapiens
  source 1..17: mol_type = genomic RNA
aggcagagcctagacaa

SEQ ID NO: 6483 - RNA, 17 nt, Homo sapiens
  source 1..17: mol_type = genomic RNA
ggcagagcctagacaag

SEQ ID NO: 6484 - RNA, 17 nt, Homo sapiens
  source 1..17: mol_type = genomic RNA
gcagagcctagacaagt

SEQ ID NO: 6485 - RNA, 17 nt, Homo sapiens
  source 1..17: mol_type = genomic RNA
cagagcctagacaagtg

SEQ ID NO: 6486 - RNA, 17 nt, Homo sapiens
  source 1..17: mol_type = genomic RNA
agagcctagacaagtgt

SEQ ID NO: 6487 - RNA, 17 nt, Homo sapiens
  source 1..17: mol_type = genomic RNA
gagcctagacaagtgtt

SEQ ID NO: 6488 - RNA, 17 nt, Homo sapiens
  source 1..17: mol_type = genomic RNA
agcctagacaagtgtta

SEQ ID NO: 6489 - RNA, 17 nt, Homo sapiens
  source 1..17: mol_type = genomic RNA
ttagtcataaagcctcc

SEQ ID NO: 6490 - RNA, 17 nt, Homo sapiens
  source 1..17: mol_type = genomic RNA
tagtcataaagcctcct

SEQ ID NO: 6491 - RNA, 17 nt, Homo sapiens
  source 1..17: mol_type = genomic RNA
cgtagacaagagttccc

SEQ ID NO: 6492 - RNA, 17 nt, Homo sapiens
  source 1..17: mol_type = genomic RNA
gtagacaagagttccct

SEQ ID NO: 6493 - RNA, 17 nt, Homo sapiens
  source 1..17: mol_type = genomic RNA
tagacaagagttccctc

SEQ ID NO: 6494 - RNA, 17 nt, Homo sapiens
  source 1..17: mol_type = genomic RNA
agacaagagttccctcc

SEQ ID NO: 6495 - RNA, 17 nt, Homo sapiens
  source 1..17: mol_type = genomic RNA
gacaagagttccctcct

SEQ ID NO: 6496 - RNA, 17 nt, Homo sapiens
  source 1..17: mol_type = genomic RNA
acaagagttccctcctc

SEQ ID NO: 6497 - RNA, 17 nt, Homo sapiens
  source 1..17: mol_type = genomic RNA
caagagttccctcctca

SEQ ID NO: 6498 - RNA, 17 nt, Homo sapiens
  source 1..17: mol_type = genomic RNA
aagagttccctcctcag

SEQ ID NO: 6499 - RNA, 17 nt, Homo sapiens
  source 1..17: mol_type = genomic RNA
agagttccctcctcagg

SEQ ID NO: 6500 - RNA, 17 nt, Homo sapiens
  source 1..17: mol_type = genomic RNA
gagttccctcctcaggg

SEQ ID NO: 6501 - RNA, 17 nt, Homo sapiens
  source 1..17: mol_type = genomic RNA
agttccctcctcagggt

SEQ ID NO: 6502 - RNA, 17 nt, Homo sapiens
  source 1..17: mol_type = genomic RNA
gttccctcctcagggtg

SEQ ID NO: 6503 - RNA, 17 nt, Homo sapiens
  source 1..17: mol_type = genomic RNA
ttccctcctcagggtga

SEQ ID NO: 6504 - RNA, 17 nt, Homo sapiens
  source 1..17: mol_type = genomic RNA
tccctcctcagggtgat

SEQ ID NO: 6505 - RNA, 17 nt, Homo sapiens
  source 1..17: mol_type = genomic RNA
ccctcctcagggtgatc

SEQ ID NO: 6506 - RNA, 17 nt, Homo sapiens
  source 1..17: mol_type = genomic RNA
cctcctcagggtgatca

SEQ ID NO: 6507 - RNA, 17 nt, Homo sapiens
  source 1..17: mol_type = genomic RNA
ctcctcagggtgatcag

SEQ ID NO: 6508 - RNA, 17 nt, Homo sapiens
  source 1..17: mol_type = genomic RNA
tcctcagggtgatcagt

SEQ ID NO: 6509 - RNA, 17 nt, Homo sapiens
  source 1..17: mol_type = genomic RNA
cctcagggtgatcagtg

SEQ ID NO: 6510 - RNA, 17 nt, Homo sapiens
  source 1..17: mol_type = genomic RNA
ctcagggtgatcagtgc

SEQ ID NO: 6511 - RNA, 17 nt, Homo sapiens
  source 1..17: mol_type = genomic RNA
tcagggtgatcagtgca

SEQ ID NO: 6512 - RNA, 17 nt, Homo sapiens
  source 1..17: mol_type = genomic RNA
cagggtgatcagtgcag

SEQ ID NO: 6513 - RNA, 17 nt, Homo sapiens
  source 1..17: mol_type = genomic RNA
agggtgatcagtgcaga

SEQ ID NO: 6514 - RNA, 17 nt, Homo sapiens
  source 1..17: mol_type = genomic RNA
gtgcagagatgtgtcac

SEQ ID NO: 6515 - RNA, 17 nt, Homo sapiens
  source 1..17: mol_type = genomic RNA
tgcagagatgtgtcaca

SEQ ID NO: 6516 - RNA, 17 nt, Homo sapiens
  source 1..17: mol_type = genomic RNA
gcagagatgtgtcacaa

SEQ ID NO: 6517 - RNA, 17 nt, Homo sapiens
  source 1..17: mol_type = genomic RNA
cagagatgtgtcacaaa

SEQ ID NO: 6518 - RNA, 17 nt, Homo sapiens
  source 1..17: mol_type = genomic RNA
agagatgtgtcacaaag

SEQ ID NO: 6519 - RNA, 17 nt, Homo sapiens
  source 1..17: mol_type = genomic RNA
gagatgtgtcacaaagc

SEQ ID NO: 6520 - RNA, 17 nt, Homo sapiens
  source 1..17: mol_type = genomic RNA
agatgtgtcacaaagcc

SEQ ID NO: 6521 - RNA, 17 nt, Homo sapiens
  source 1..17: mol_type = genomic RNA
gatgtgtcacaaagccc

SEQ ID NO: 6522 - RNA, 17 nt, Homo sapiens
  source 1..17: mol_type = genomic RNA
atgtgtcacaaagcccc

SEQ ID NO: 6523 - RNA, 17 nt, Homo sapiens
  source 1..17: mol_type = genomic RNA
tgtgtcacaaagcccct

SEQ ID NO: 6524 - RNA, 17 nt, Homo sapiens
  source 1..17: mol_type = genomic RNA
gtgtcacaaagcccctg

SEQ ID NO: 6525 - RNA, 17 nt, Homo sapiens
  source 1..17: mol_type = genomic RNA
tgtcacaaagcccctgt

SEQ ID NO: 6526 - RNA, 17 nt, Homo sapiens
  source 1..17: mol_type = genomic RNA
gtcacaaagcccctgta

SEQ ID NO: 6527 - RNA, 17 nt, Homo sapiens
  source 1..17: mol_type = genomic RNA
tcacaaagcccctgtag

SEQ ID NO: 6528 - RNA, 17 nt, Homo sapiens
  source 1..17: mol_type = genomic RNA
cacaaagcccctgtagg

SEQ ID NO: 6529 - RNA, 17 nt, Homo sapiens
  source 1..17: mol_type = genomic RNA
acaaagcccctgtaggc

SEQ ID NO: 6530 - RNA, 17 nt, Homo sapiens
  source 1..17: mol_type = genomic RNA
caaagcccctgtaggca

SEQ ID NO: 6531 - RNA, 17 nt, Homo sapiens
  source 1..17: mol_type = genomic RNA
aaagcccctgtaggcag

SEQ ID NO: 6532 - RNA, 17 nt, Homo sapiens
  source 1..17: mol_type = genomic RNA
aagcccctgtaggcaga

SEQ ID NO: 6533 - RNA, 17 nt, Homo sapiens
  source 1..17: mol_type = genomic RNA
agcccctgtaggcagag

SEQ ID NO: 6534 - RNA, 17 nt, Homo sapiens
  source 1..17: mol_type = genomic RNA
ccctgtaggcagagcct

SEQ ID NO: 6535 - RNA, 17 nt, Homo sapiens
  source 1..17: mol_type = genomic RNA
cctgtaggcagagccta

SEQ ID NO: 6536 - RNA, 17 nt, Homo sapiens
  source 1..17: mol_type = genomic RNA
ctgtaggcagagcctag

SEQ ID NO: 6537 - RNA, 17 nt, Homo sapiens
  source 1..17: mol_type = genomic RNA
gcagagcctagacaaga

SEQ ID NO: 6538 - RNA, 17 nt, Homo sapiens
  source 1..17: mol_type = genomic RNA
cagagcctagacaagag

SEQ ID NO: 6539 - RNA, 17 nt, Homo sapiens
  source 1..17: mol_type = genomic RNA
agagcctagacaagagt

SEQ ID NO: 6540 - RNA, 17 nt, Homo sapiens
  source 1..17: mol_type = genomic RNA
gagcctagacaagagtt

SEQ ID NO: 6541 - RNA, 17 nt, Homo sapiens
  source 1..17: mol_type = genomic RNA
agcctagacaagagttt

SEQ ID NO: 6542 - RNA, 17 nt, Homo sapiens
  source 1..17: mol_type = genomic RNA
gcctagacaagagtttc

SEQ ID NO: 6543 - RNA, 17 nt, Homo sapiens
  source 1..17: mol_type = genomic RNA
ggttgatcagttcagag

SEQ ID NO: 6544 - RNA, 17 nt, Homo sapiens
  source 1..17: mol_type = genomic RNA
ttcagagatgtgtcaga

SEQ ID NO: 6545 - RNA, 17 nt, Homo sapiens
  source 1..17: mol_type = genomic RNA
tcagagatgtgtcagaa

SEQ ID NO: 6546 - RNA, 17 nt, Homo sapiens
  source 1..17: mol_type = genomic RNA
cagagatgtgtcagaat

SEQ ID NO: 6547 - RNA, 17 nt, Homo sapiens
  source 1..17: mol_type = genomic RNA
agagatgtgtcagaatg

SEQ ID NO: 6548 - RNA, 17 nt, Homo sapiens
  source 1..17: mol_type = genomic RNA
gagatgtgtcagaatgc

SEQ ID NO: 6549 - RNA, 17 nt, Homo sapiens
  source 1..17: mol_type = genomic RNA
agatgtgtcagaatgcc

SEQ ID NO: 6550 - RNA, 17 nt, Homo sapiens
  source 1..17: mol_type = genomic RNA
gatgtgtcagaatgccc

SEQ ID NO: 6551 - RNA, 17 nt, Homo sapiens
  source 1..17: mol_type = genomic RNA
atgtgtcagaatgccca

SEQ ID NO: 6552 - RNA, 17 nt, Homo sapiens
  source 1..17: mol_type = genomic RNA
tgtgtcagaatgcccat

SEQ ID NO: 6553 - RNA, 17 nt, Homo sapiens
  source 1..17: mol_type = genomic RNA
gtgtcagaatgcccatg

SEQ ID NO: 6554 - RNA, 17 nt, Homo sapiens
  source 1..17: mol_type = genomic RNA
tgtcagaatgcccatgt

SEQ ID NO: 6555 - RNA, 17 nt, Homo sapiens
  source 1..17: mol_type = genomic RNA
gtcagaatgcccatgta

SEQ ID NO: 6556 - RNA, 17 nt, Homo sapiens
  source 1..17: mol_type = genomic RNA
tcagaatgcccatgtag

SEQ ID NO: 6557 - RNA, 17 nt, Homo sapiens
  source 1..17: mol_type = genomic RNA
cagaatgcccatgtagg

SEQ ID NO: 6558 - RNA, 17 nt, Homo sapiens
  source 1..17: mol_type = genomic RNA
agaatgcccatgtaggc

SEQ ID NO: 6559 - RNA, 17 nt, Homo sapiens
  source 1..17: mol_type = genomic RNA
gaatgcccatgtaggca

SEQ ID NO: 6560 - RNA, 17 nt, Homo sapiens
  source 1..17: mol_type = genomic RNA
aatgcccatgtaggcag

SEQ ID NO: 6561 - RNA, 17 nt, Homo sapiens
  source 1..17: mol_type = genomic RNA
atgcccatgtaggcaga

SEQ ID NO: 6562 - RNA, 17 nt, Homo sapiens
  source 1..17: mol_type = genomic RNA
tgcccatgtaggcagat

SEQ ID NO: 6563 - RNA, 17 nt, Homo sapiens
  source 1..17: mol_type = genomic RNA
gcccatgtaggcagatc

SEQ ID NO: 6564 - RNA, 17 nt, Homo sapiens
  source 1..17: mol_type = genomic RNA
cccatgtaggcagatct

SEQ ID NO: 6565 - RNA, 17 nt, Homo sapiens
  source 1..17: mol_type = genomic RNA
ccatgtaggcagatcta

SEQ ID NO: 6566 - RNA, 17 nt, Homo sapiens
  source 1..17: mol_type = genomic RNA
catgtaggcagatctaa

SEQ ID NO: 6567 - RNA, 17 nt, Homo sapiens
  source 1..17: mol_type = genomic RNA
atgtaggcagatctaag

SEQ ID NO: 6568 - RNA, 17 nt, Homo sapiens
  source 1..17: mol_type = genomic RNA
tgtaggcagatctaaga

SEQ ID NO: 6569 - RNA, 17 nt, Homo sapiens
  source 1..17: mol_type = genomic RNA
gtaggcagatctaagac

SEQ ID NO: 6570 - RNA, 17 nt, Homo sapiens
  source 1..17: mol_type = genomic RNA
taggcagatctaagaca

SEQ ID NO: 6571 - RNA, 17 nt, Homo sapiens
  source 1..17: mol_type = genomic RNA
aggcagatctaagacaa

SEQ ID NO: 6572 - RNA, 17 nt, Homo sapiens
  source 1..17: mol_type = genomic RNA
ggcagatctaagacaag

SEQ ID NO: 6573 - RNA, 17 nt, Homo sapiens
  source 1..17: mol_type = genomic RNA
gcagatctaagacaagc

SEQ ID NO: 6574 - RNA, 17 nt, Homo sapiens
  source 1..17: mol_type = genomic RNA
cagatctaagacaagcg

SEQ ID NO: 6575 - RNA, 17 nt, Homo sapiens
  source 1..17: mol_type = genomic RNA
agatctaagacaagcgt

SEQ ID NO: 6576 - RNA, 17 nt, Homo sapiens
  source 1..17: mol_type = genomic RNA
gatctaagacaagcgtc

SEQ ID NO: 6577 - RNA, 17 nt, Homo sapiens
  source 1..17: mol_type = genomic RNA
atctaagacaagcgtcc

SEQ ID NO: 6578 - RNA, 17 nt, Homo sapiens
  source 1..17: mol_type = genomic RNA
tctaagacaagcgtcca

SEQ ID NO: 6579 - RNA, 17 nt, Homo sapiens
  source 1..17: mol_type = genomic RNA
ctaagacaagcgtccat

SEQ ID NO: 6580 - RNA, 17 nt, Homo sapiens
  source 1..17: mol_type = genomic RNA
taagacaagcgtccatc

SEQ ID NO: 6581 - RNA, 17 nt, Homo sapiens
  source 1..17: mol_type = genomic RNA
aagacaagcgtccatca

SEQ ID NO: 6582 - RNA, 17 nt, Homo sapiens
  source 1..17: mol_type = genomic RNA
agacaagcgtccatcac

SEQ ID NO: 6583 - RNA, 17 nt, Homo sapiens
  source 1..17: mol_type = genomic RNA
gacaagcgtccatcacc

SEQ ID NO: 6584 - RNA, 17 nt, Homo sapiens
  source 1..17: mol_type = genomic RNA
acaagcgtccatcacct

SEQ ID NO: 6585 - RNA, 17 nt, Homo sapiens
  source 1..17: mol_type = genomic RNA
caagcgtccatcacctg

SEQ ID NO: 6586 - RNA, 17 nt, Homo sapiens
  source 1..17: mol_type = genomic RNA
aagcgtccatcacctgg

SEQ ID NO: 6587 - RNA, 17 nt, Homo sapiens
  source 1..17: mol_type = genomic RNA
agcgtccatcacctggg

SEQ ID NO: 6588 - RNA, 17 nt, Homo sapiens
  source 1..17: mol_type = genomic RNA
gcgtccatcacctgggt

SEQ ID NO: 6589 - RNA, 17 nt, Homo sapiens
  source 1..17: mol_type = genomic RNA
cgtccatcacctgggtg

SEQ ID NO: 6590 - RNA, 17 nt, Homo sapiens
  source 1..17: mol_type = genomic RNA
gtccatcacctgggtga

SEQ ID NO: 6591 - RNA, 17 nt, Homo sapiens
  source 1..17: mol_type = genomic RNA
tccatcacctgggtgat

SEQ ID NO: 6592 - RNA, 17 nt, Homo sapiens
  source 1..17: mol_type = genomic RNA
ccatcacctgggtgatc

SEQ ID NO: 6593 - RNA, 17 nt, Homo sapiens
  source 1..17: mol_type = genomic RNA
cagtgcagagatatgta

SEQ ID NO: 6594 - RNA, 17 nt, Homo sapiens
  source 1..17: mol_type = genomic RNA
agtgcagagatatgtac

SEQ ID NO: 6595 - RNA, 17 nt, Homo sapiens
  source 1..17: mol_type = genomic RNA
gtgcagagatatgtacc

SEQ ID NO: 6596 - RNA, 17 nt, Homo sapiens
  source 1..17: mol_type = genomic RNA
tgcagagatatgtacca

SEQ ID NO: 6597 - RNA, 17 nt, Homo sapiens
  source 1..17: mol_type = genomic RNA
gcagagatatgtaccag

SEQ ID NO: 6598 - RNA, 17 nt, Homo sapiens
  source 1..17: mol_type = genomic RNA
cagagatatgtaccagt

SEQ ID NO: 6599 - RNA, 17 nt, Homo sapiens
  source 1..17: mol_type = genomic RNA
agagatatgtaccagtg

SEQ ID NO: 6600 - RNA, 17 nt, Homo sapiens
  source 1..17: mol_type = genomic RNA
gagatatgtaccagtgt

SEQ ID NO: 6601 - RNA, 17 nt, Homo sapiens
  source 1..17: mol_type = genomic RNA
agatatgtaccagtgtc

SEQ ID NO: 6602 - RNA, 17 nt, Homo sapiens
  source 1..17: mol_type = genomic RNA
gatatgtaccagtgtcc

SEQ ID NO: 6603 - RNA, 17 nt, Homo sapiens
  source 1..17: mol_type = genomic RNA
atatgtaccagtgtccc

SEQ ID NO: 6604 - RNA, 17 nt, Homo sapiens
  source 1..17: mol_type = genomic RNA
tatgtaccagtgtcccc

SEQ ID NO: 6605 - RNA, 17 nt, Homo sapiens
  source 1..17: mol_type = genomic RNA
atgtaccagtgtcccct

SEQ ID NO: 6606 - RNA, 17 nt, Homo sapiens
  source 1..17: mol_type = genomic RNA
tgtaccagtgtcccctg

SEQ ID NO: 6607 - RNA, 17 nt, Homo sapiens
  source 1..17: mol_type = genomic RNA
gtaccagtgtcccctgt

SEQ ID NO: 6608 - RNA, 17 nt, Homo sapiens
  source 1..17: mol_type = genomic RNA
taccagtgtcccctgta

SEQ ID NO: 6609 - RNA, 17 nt, Homo sapiens
  source 1..17: mol_type = genomic RNA
accagtgtcccctgtag

SEQ ID NO: 6610 - RNA, 17 nt, Homo sapiens
  source 1..17: mol_type = genomic RNA
ccagtgtcccctgtagg

SEQ ID NO: 6611 - RNA, 17 nt, Homo sapiens
  source 1..17: mol_type = genomic RNA
cagtgtcccctgtaggc

SEQ ID NO: 6612 - RNA, 17 nt, Homo sapiens
  source 1..17: mol_type = genomic RNA
agtgtcccctgtaggca

SEQ ID NO: 6613 - RNA, 17 nt, Homo sapiens
  source 1..17: mol_type = genomic RNA
gtgtcccctgtaggcag

SEQ ID NO: 6614 - RNA, 17 nt, Homo sapiens
  source 1..17: mol_type = genomic RNA
tgtcccctgtaggcagt

SEQ ID NO: 6615 - RNA, 17 nt, Homo sapiens
  source 1..17: mol_type = genomic RNA
gtcccctgtaggcagtg

SEQ ID NO: 6616 - RNA, 17 nt, Homo sapiens
  source 1..17: mol_type = genomic RNA
tcccctgtaggcagtgc

SEQ ID NO: 6617 - RNA, 17 nt, Homo sapiens
  source 1..17: mol_type = genomic RNA
cccctgtaggcagtgcc

SEQ ID NO: 6618 - RNA, 17 nt, Homo sapiens
  source 1..17: mol_type = genomic RNA
ccctgtaggcagtgcct

SEQ ID NO: 6619 - RNA, 17 nt, Homo sapiens
  source 1..17: mol_type = genomic RNA
cctgtaggcagtgccta

SEQ ID NO: 6620 - RNA, 17 nt, Homo sapiens
  source 1..17: mol_type = genomic RNA
ctgtaggcagtgcctag

SEQ ID NO: 6621 - RNA, 17 nt, Homo sapiens
  source 1..17: mol_type = genomic RNA
tgtaggcagtgcctaga

SEQ ID NO: 6622 - RNA, 17 nt, Homo sapiens
  source 1..17: mol_type = genomic RNA
gtaggcagtgcctagac

SEQ ID NO: 6623 - RNA, 17 nt, Homo sapiens
  source 1..17: mol_type = genomic RNA
taggcagtgcctagaca

SEQ ID NO: 6624 - RNA, 17 nt, Homo sapiens
  source 1..17: mol_type = genomic RNA
aggcagtgcctagacaa

SEQ ID NO: 6625 - RNA, 17 nt, Homo sapiens
  source 1..17: mol_type = genomic RNA
ggcagtgcctagacaag

SEQ ID NO: 6626 - RNA, 17 nt, Homo sapiens
  source 1..17: mol_type = genomic RNA
gcagtgcctagacaaga

SEQ ID NO: 6627 - RNA, 17 nt, Homo sapiens
  source 1..17: mol_type = genomic RNA
cagtgcctagacaagag

SEQ ID NO: 6628 - RNA, 17 nt, Homo sapiens
  source 1..17: mol_type = genomic RNA
agtgcctagacaagagt

SEQ ID NO: 6629 - RNA, 17 nt, Homo sapiens
  source 1..17: mol_type = genomic RNA
gtgcctagacaagagtt

SEQ ID NO: 6630 - RNA, 17 nt, Homo sapiens
  source 1..17: mol_type = genomic RNA
tgcctagacaagagttg

SEQ ID NO: 6631 - RNA, 17 nt, Homo sapiens
  source 1..17: mol_type = genomic RNA
gcctagacaagagttga

SEQ ID NO: 6632 - RNA, 17 nt, Homo sapiens
  source 1..17: mol_type = genomic RNA
cctagacaagagttgaa

SEQ ID NO: 6633 - RNA, 17 nt, Homo sapiens
  source 1..17: mol_type = genomic RNA
agacaagagttgaatca

SEQ ID NO: 6634 - RNA, 17 nt, Homo sapiens
  source 1..17: mol_type = genomic RNA
gacaagagttgaatcac

SEQ ID NO: 6635 - RNA, 17 nt, Homo sapiens
  source 1..17: mol_type = genomic RNA
acaagagttgaatcacc

SEQ ID NO: 6636 - RNA, 17 nt, Homo sapiens
  source 1..17: mol_type = genomic RNA
caagagttgaatcacct

SEQ ID NO: 6637 - RNA, 17 nt, Homo sapiens
  source 1..17: mol_type = genomic RNA
aagagttgaatcacctc

SEQ ID NO: 6638 - RNA, 17 nt, Homo sapiens
  source 1..17: mol_type = genomic RNA
agagttgaatcacctca

SEQ ID NO: 6639 - RNA, 17 nt, Homo sapiens
  source 1..17: mol_type = genomic RNA
gagttgaatcacctcag

SEQ ID NO: 6640 - RNA, 17 nt, Homo sapiens
  source 1..17: mol_type = genomic RNA
agttgaatcacctcaga

SEQ ID NO: 6641 - RNA, 17 nt, Homo sapiens
  source 1..17: mol_type = genomic RNA
gttgaatcacctcagag

SEQ ID NO: 6642 - RNA, 17 nt, Homo sapiens
  source 1..17: mol_type = genomic RNA
ttgaatcacctcagaga

SEQ ID NO: 6643 - RNA, 17 nt, Homo sapiens
  source 1..17: mol_type = genomic RNA
tgaatcacctcagagat

SEQ ID NO: 6644 - RNA, 17 nt, Homo sapiens
  source 1..17: mol_type = genomic RNA
gaatcacctcagagatc

SEQ ID NO: 6645 - RNA, 17 nt, Homo sapiens
  source 1..17: mol_type = genomic RNA
aatcacctcagagatca

SEQ ID NO: 6646 - RNA, 17 nt, Homo sapiens
  source 1..17: mol_type = genomic RNA
atcacctcagagatcag

SEQ ID NO: 6647 - RNA, 17 nt, Homo sapiens
  source 1..17: mol_type = genomic RNA
tcacctcagagatcagt

SEQ ID NO: 6648 - RNA, 17 nt, Homo sapiens
  source 1..17: mol_type = genomic RNA
cacctcagagatcagtg

SEQ ID NO: 6649 - RNA, 17 nt, Homo sapiens
  source 1..17: mol_type = genomic RNA
acctcagagatcagtgc

SEQ ID NO: 6650 - RNA, 17 nt, Homo sapiens
  source 1..17: mol_type = genomic RNA
cctcagagatcagtgca

SEQ ID NO: 6651 - RNA, 17 nt, Homo sapiens
  source 1..17: mol_type = genomic RNA
ctcagagatcagtgcat

SEQ ID NO: 6652 - RNA, 17 nt, Homo sapiens
  source 1..17: mol_type = genomic RNA
tcagagatcagtgcata

SEQ ID NO: 6653 - RNA, 17 nt, Homo sapiens
  source 1..17: mol_type = genomic RNA
cagagatcagtgcatag

SEQ ID NO: 6654 - RNA, 17 nt, Homo sapiens
  source 1..17: mol_type = genomic RNA
agagatcagtgcataga

SEQ ID NO: 6655 - RNA, 17 nt, Homo sapiens
  source 1..17: mol_type = genomic RNA
gagatcagtgcatagat

SEQ ID NO: 6656 - RNA, 17 nt, Homo sapiens
  source 1..17: mol_type = genomic RNA
agatcagtgcatagata

SEQ ID NO: 6657 - RNA, 17 nt, Homo sapiens
  source 1..17: mol_type = genomic RNA
gtgcatagatatgtcac

SEQ ID NO: 6658 - RNA, 17 nt, Homo sapiens
  source 1..17: mol_type = genomic RNA
tagatatgtcacaaagc

SEQ ID NO: 6659 - RNA, 17 nt, Homo sapiens
  source 1..17: mol_type = genomic RNA
agatatgtcacaaagcc

SEQ ID NO: 6660 - RNA, 17 nt, Homo sapiens
  source 1..17: mol_type = genomic RNA
gatatgtcacaaagcct

SEQ ID NO: 6661 - RNA, 17 nt, Homo sapiens
  source 1..17: mol_type = genomic RNA
tatgtcacaaagccttc

SEQ ID NO: 6662 - RNA, 17 nt, Homo sapiens
  source 1..17: mol_type = genomic RNA
atgtcacaaagccttct

SEQ ID NO: 6663 - RNA, 17 nt, Homo sapiens
  source 1..17: mol_type = genomic RNA
tgtcacaaagccttctg

SEQ ID NO: 6664 - RNA, 17 nt, Homo sapiens
  source 1..17: mol_type = genomic RNA
gtcacaaagccttctgt

SEQ ID NO: 6665 - RNA, 17 nt, Homo sapiens
  source 1..17: mol_type = genomic RNA
tcacaaagccttctgta

SEQ ID NO: 6666 - RNA, 17 nt, Homo sapiens
  source 1..17: mol_type = genomic RNA
cacaaagccttctgtag

SEQ ID NO: 6667 - RNA, 17 nt, Homo sapiens
  source 1..17: mol_type = genomic RNA
acaaagccttctgtagg

SEQ ID NO: 6668 - RNA, 17 nt, Homo sapiens
  source 1..17: mol_type = genomic RNA
caaagccttctgtaggc

SEQ ID NO: 6669 - RNA, 17 nt, Homo sapiens
  source 1..17: mol_type = genomic RNA
aaagccttctgtaggca

SEQ ID NO: 6670 - RNA, 17 nt, Homo sapiens
  source 1..17: mol_type = genomic RNA
aagccttctgtaggcaa

SEQ ID NO: 6671 - RNA, 17 nt, Homo sapiens
  source 1..17: mol_type = genomic RNA
agccttctgtaggcaaa

SEQ ID NO: 6672 - RNA, 17 nt, Homo sapiens
  source 1..17: mol_type = genomic RNA
gccttctgtaggcaaag

SEQ ID NO: 6673 - RNA, 17 nt, Homo sapiens
  source 1..17: mol_type = genomic RNA
ccttctgtaggcaaagc

SEQ ID NO: 6674 - RNA, 17 nt, Homo sapiens
  source 1..17: mol_type = genomic RNA
cttctgtaggcaaagcc

SEQ ID NO: 6675 - RNA, 17 nt, Homo sapiens
  source 1..17: mol_type = genomic RNA
ttctgtaggcaaagccc

SEQ ID NO: 6676 - RNA, 17 nt, Homo sapiens
  source 1..17: mol_type = genomic RNA
tctgtaggcaaagccca

SEQ ID NO: 6677 - RNA, 17 nt, Homo sapiens
  source 1..17: mol_type = genomic RNA
ctgtaggcaaagcccat

SEQ ID NO: 6678 - RNA, 17 nt, Homo sapiens
  source 1..17: mol_type = genomic RNA
tgtaggcaaagcccata

SEQ ID NO: 6679 - RNA, 17 nt, Homo sapiens
  source 1..17: mol_type = genomic RNA
gtaggcaaagcccatac

SEQ ID NO: 6680 - RNA, 17 nt, Homo sapiens
  source 1..17: mol_type = genomic RNA
taggcaaagcccataca

SEQ ID NO: 6681 - RNA, 17 nt, Homo sapiens
  source 1..17: mol_type = genomic RNA
aggcaaagcccatacaa

SEQ ID NO: 6682 - RNA, 17 nt, Homo sapiens
  source 1..17: mol_type = genomic RNA
ggcaaagcccatacaag

SEQ ID NO: 6683 - RNA, 17 nt, Homo sapiens
  source 1..17: mol_type = genomic RNA
gcaaagcccatacaagg

SEQ ID NO: 6684 - RNA, 17 nt, Homo sapiens
  source 1..17: mol_type = genomic RNA
caaagcccatacaaggt

SEQ ID NO: 6685 - RNA, 17 nt, Homo sapiens
  source 1..17: mol_type = genomic RNA
aaagcccatacaaggtt

SEQ ID NO: 6686 - RNA, 17 nt, Homo sapiens
  source 1..17: mol_type = genomic RNA
aagcccatacaaggttt

SEQ ID NO: 6687 - RNA, 17 nt, Homo sapiens
  source 1..17: mol_type = genomic RNA
agcccatacaaggttta

SEQ ID NO: 6688 - RNA, 17 nt, Homo sapiens
  source 1..17: mol_type = genomic RNA
gcccatacaaggtttag

SEQ ID NO: 6689 - RNA, 17 nt, Homo sapiens
  source 1..17: mol_type = genomic RNA
acaaggtttagatcacc

SEQ ID NO: 6690 - RNA, 17 nt, Homo sapiens
  source 1..17: mol_type = genomic RNA
ggtttagatcacctagg

SEQ ID NO: 6691 - RNA, 17 nt, Homo sapiens
  source 1..17: mol_type = genomic RNA
ttagatcacctaggtga

SEQ ID NO: 6692 - RNA, 17 nt, Homo sapiens
  source 1..17: mol_type = genomic RNA
tagatcacctaggtgat

SEQ ID NO: 6693 - RNA, 17 nt, Homo sapiens
  source 1..17: mol_type = genomic RNA
agatcacctaggtgatc

SEQ ID NO: 6694 - RNA, 17 nt, Homo sapiens
  source 1..17: mol_type = genomic RNA
gatcacctaggtgatca

SEQ ID NO: 6695 - RNA, 17 nt, Homo sapiens
  source 1..17: mol_type = genomic RNA
atcacctaggtgatcag

SEQ ID NO: 6696 - RNA, 17 nt, Homo sapiens
  source 1..17: mol_type = genomic RNA
tcacctaggtgatcagt

SEQ ID NO: 6697 - RNA, 17 nt, Homo sapiens
  source 1..17: mol_type = genomic RNA
cacctaggtgatcagtg

SEQ ID NO: 6698 - RNA, 17 nt, Homo sapiens
  source 1..17: mol_type = genomic RNA
acctaggtgatcagtgc

SEQ ID NO: 6699 - RNA, 17 nt, Homo sapiens
  source 1..17: mol_type = genomic RNA
cctaggtgatcagtgca

SEQ ID NO: 6700 - RNA, 17 nt, Homo sapiens
  source 1..17: mol_type = genomic RNA
ctaggtgatcagtgcag

SEQ ID NO: 6701 - RNA, 17 nt, Homo sapiens
  source 1..17: mol_type = genomic RNA
taggtgatcagtgcagt

SEQ ID NO: 6702 - RNA, 17 nt, Homo sapiens
  source 1..17: mol_type = genomic RNA
aggtgatcagtgcagtg

SEQ ID NO: 6703 - RNA, 17 nt, Homo sapiens
  source 1..17: mol_type = genomic RNA
ggtgatcagtgcagtga

SEQ ID NO: 6704 - RNA, 17 nt, Homo sapiens
  source 1..17: mol_type = genomic RNA
gtgatcagtgcagtgat

SEQ ID NO: 6705 - RNA, 17 nt, Homo sapiens
  source 1..17: mol_type = genomic RNA
tgatcagtgcagtgata

SEQ ID NO: 6706 - RNA, 17 nt, Homo sapiens
  source 1..17: mol_type = genomic RNA
gatcagtgcagtgatat

SEQ ID NO: 6707 - RNA, 17 nt, Homo sapiens
  source 1..17: mol_type = genomic RNA
atcagtgcagtgatatg

SEQ ID NO: 6708 - RNA, 17 nt, Homo sapiens
  source 1..17: mol_type = genomic RNA
tcagtgcagtgatatgt

SEQ ID NO: 6709 - RNA, 17 nt, Homo sapiens
  source 1..17: mol_type = genomic RNA
cagtgcagtgatatgtc

SEQ ID NO: 6710 - RNA, 17 nt, Homo sapiens
  source 1..17: mol_type = genomic RNA
agtgcagtgatatgtca

SEQ ID NO: 6711 - RNA, 17 nt, Homo sapiens
  source 1..17: mol_type = genomic RNA
gtgcagtgatatgtcac

SEQ ID NO: 6712 - RNA, 17 nt, Homo sapiens
  source 1..17: mol_type = genomic RNA
tgcagtgatatgtcaca

SEQ ID NO: 6713 - RNA, 17 nt, Homo sapiens
  source 1..17: mol_type = genomic RNA
gcagtgatatgtcacaa

SEQ ID NO: 6714 - RNA, 17 nt, Homo sapiens
  source 1..17: mol_type = genomic RNA
tgtcacaaaaatccctg

SEQ ID NO: 6715 - RNA, 17 nt, Homo sapiens
  source 1..17: mol_type = genomic RNA
gtcacaaaaatccctgt

SEQ ID NO: 6716 - RNA, 17 nt, Homo sapiens
  source 1..17: mol_type = genomic RNA
cacaaaaatccctgtag

SEQ ID NO: 6717 - RNA, 17 nt, Homo sapiens
  source 1..17: mol_type = genomic RNA
acaaaaatccctgtaga

SEQ ID NO: 6718 - RNA, 17 nt, Homo sapiens
  source 1..17: mol_type = genomic RNA
caaaaatccctgtagac

SEQ ID NO: 6719 - RNA, 17 nt, Homo sapiens
  source 1..17: mol_type = genomic RNA
aaaaatccctgtagaca

SEQ ID NO: 6720 - RNA, 17 nt, Homo sapiens
  source 1..17: mol_type = genomic RNA
aaaatccctgtagacag

SEQ ID NO: 6721 - RNA, 17 nt, Homo sapiens
  source 1..17: mol_type = genomic RNA
aaatccctgtagacaga

SEQ ID NO: 6722 - RNA, 17 nt, Homo sapiens
  source 1..17: mol_type = genomic RNA
aatccctgtagacagag

SEQ ID NO: 6723 - RNA, 17 nt, Homo sapiens
  source 1..17: mol_type = genomic RNA
atccctgtagacagagc

SEQ ID NO: 6724 - RNA, 17 nt, Homo sapiens
  source 1..17: mol_type = genomic RNA
tccctgtagacagagcc

SEQ ID NO: 6725 - RNA, 17 nt, Homo sapiens
  source 1..17: mol_type = genomic RNA
ccctgtagacagagcct

SEQ ID NO: 6726 - RNA, 17 nt, Homo sapiens
  source 1..17: mol_type = genomic RNA
cctgtagacagagccta

SEQ ID NO: 6727 - RNA, 17 nt, Homo sapiens
  source 1..17: mol_type = genomic RNA
ctgtagacagagcctag

SEQ ID NO: 6728 - RNA, 17 nt, Homo sapiens
  source 1..17: mol_type = genomic RNA
gacagagcctagacaag

SEQ ID NO: 6729 - RNA, 17 nt, Homo sapiens
  source 1..17: mol_type = genomic RNA
acagagcctagacaaga

SEQ ID NO: 6730 - RNA, 17 nt, Homo sapiens
  source 1..17: mol_type = genomic RNA
agcctagacaagagtta

SEQ ID NO: 6731 - RNA, 17 nt, Homo sapiens
  source 1..17: mol_type = genomic RNA
gcctagacaagagttac

SEQ ID NO: 6732 - RNA, 17 nt, Homo sapiens
  source 1..17: mol_type = genomic RNA
cctagacaagagttact

SEQ ID NO: 6733 - RNA, 17 nt, Homo sapiens
  source 1..17: mol_type = genomic RNA
acaagagttacttcacc

SEQ ID NO: 6734 - RNA, 17 nt, Homo sapiens
  source 1..17: mol_type = genomic RNA
agagttacttcacctgg

SEQ ID NO: 6735 - RNA, 17 nt, Homo sapiens
  source 1..17: mol_type = genomic RNA
gagttacttcacctggg

SEQ ID NO: 6736 - RNA, 17 nt, Homo sapiens
  source 1..17: mol_type = genomic RNA
agttacttcacctgggt

SEQ ID NO: 6737 - RNA, 17 nt, Homo sapiens
  source 1..17: mol_type = genomic RNA
gttacttcacctgggtg

SEQ ID NO: 6738 - RNA, 17 nt, Homo sapiens
  source 1..17: mol_type = genomic RNA
ttacttcacctgggtga

SEQ ID NO: 6739 - RNA, 17 nt, Homo sapiens
  source 1..17: mol_type = genomic RNA
tacttcacctgggtgat

SEQ ID NO: 6740 - RNA, 17 nt, Homo sapiens
  source 1..17: mol_type = genomic RNA
acttcacctgggtgatc

SEQ ID NO: 6741 - RNA, 17 nt, Homo sapiens
  source 1..17: mol_type = genomic RNA
cttcacctgggtgatca

SEQ ID NO: 6742 - RNA, 17 nt, Homo sapiens
  source 1..17: mol_type = genomic RNA
ttcacctgggtgatcag

SEQ ID NO: 6743 - RNA, 17 nt, Homo sapiens
  source 1..17: mol_type = genomic RNA
gggtgatcagtgcagat

SEQ ID NO: 6744 - RNA, 17 nt, Homo sapiens
  source 1..17: mol_type = genomic RNA
ggtgatcagtgcagata

SEQ ID NO: 6745 - RNA, 17 nt, Homo sapiens
  source 1..17: mol_type = genomic RNA
gtgatcagtgcagatat

SEQ ID NO: 6746 - RNA, 17 nt, Homo sapiens
  source 1..17: mol_type = genomic RNA
tatttgacacaatgccc

SEQ ID NO: 6747 - RNA, 17 nt, Homo sapiens
  source 1..17: mol_type = genomic RNA
atttgacacaatgcccc

SEQ ID NO: 6748 - RNA, 17 nt, Homo sapiens
  source 1..17: mol_type = genomic RNA
tttgacacaatgccccc

SEQ ID NO: 6749 - RNA, 17 nt, Homo sapiens
  source 1..17: mol_type = genomic RNA
ttgacacaatgccccca

SEQ ID NO: 6750 - RNA, 17 nt, Homo sapiens
  source 1..17: mol_type = genomic RNA
tgacacaatgcccccat

SEQ ID NO: 6751 - RNA, 17 nt, Homo sapiens
  source 1..17: mol_type = genomic RNA
gacacaatgcccccata

SEQ ID NO: 6752 - RNA, 17 nt, Homo sapiens
  source 1..17: mol_type = genomic RNA
acacaatgcccccatag

SEQ ID NO: 6753 - RNA, 17 nt, Homo sapiens
  source 1..17: mol_type = genomic RNA
cacaatgcccccataga

SEQ ID NO: 6754 - RNA, 17 nt, Homo sapiens
  source 1..17: mol_type = genomic RNA
acaatgcccccatagac

SEQ ID NO: 6755 - RNA, 17 nt, Homo sapiens
  source 1..17: mol_type = genomic RNA
caatgcccccatagaca

SEQ ID NO: 6756 - RNA, 17 nt, Homo sapiens
  source 1..17: mol_type = genomic RNA
aatgcccccatagacag

SEQ ID NO: 6757 - RNA, 17 nt, Homo sapiens
  source 1..17: mol_type = genomic RNA
atgcccccatagacaga

SEQ ID NO: 6758 - RNA, 17 nt, Homo sapiens
  source 1..17: mol_type = genomic RNA
tgcccccatagacagag

SEQ ID NO: 6759 - RNA, 17 nt, Homo sapiens
  source 1..17: mol_type = genomic RNA
gcccccatagacagagc

SEQ ID NO: 6760 - RNA, 17 nt, Homo sapiens
  source 1..17: mol_type = genomic RNA
cccccatagacagagcc

SEQ ID NO: 6761 - RNA, 17 nt, Homo sapiens
  source 1..17: mol_type = genomic RNA
ccccatagacagagcct

SEQ ID NO: 6762 - RNA, 17 nt, Homo sapiens
  source 1..17: mol_type = genomic RNA
cccatagacagagccta

SEQ ID NO: 6763 - RNA, 17 nt, Homo sapiens
  source 1..17: mol_type = genomic RNA
ccatagacagagcctag

SEQ ID NO: 6764 - RNA, 17 nt, Homo sapiens
  source 1..17: mol_type = genomic RNA
catagacagagcctagg

SEQ ID NO: 6765 - RNA, 17 nt, Homo sapiens
  source 1..17: mol_type = genomic RNA
atagacagagcctaggc

SEQ ID NO: 6766 - RNA, 17 nt, Homo sapiens
  source 1..17: mol_type = genomic RNA
tagacagagcctaggca

SEQ ID NO: 6767 - RNA, 17 nt, Homo sapiens
  source 1..17: mol_type = genomic RNA
agacagagcctaggcaa

SEQ ID NO: 6768 - RNA, 17 nt, Homo sapiens
  source 1..17: mol_type = genomic RNA
gacagagcctaggcaag

SEQ ID NO: 6769 - RNA, 17 nt, Homo sapiens
  source 1..17: mol_type = genomic RNA
acagagcctaggcaaga

SEQ ID NO: 6770 - RNA, 17 nt, Homo sapiens
  source 1..17: mol_type = genomic RNA
cagagcctaggcaagac

SEQ ID NO: 6771 - RNA, 17 nt, Homo sapiens
  source 1..17: mol_type = genomic RNA
agagcctaggcaagact

SEQ ID NO: 6772 - RNA, 17 nt, Homo sapiens
  source 1..17: mol_type = genomic RNA
gagcctaggcaagactt

SEQ ID NO: 6773 - RNA, 17 nt, Homo sapiens
  source 1..17: mol_type = genomic RNA
agcctaggcaagacttc

SEQ ID NO: 6774 - RNA, 17 nt, Homo sapiens
  source 1..17: mol_type = genomic RNA
gcctaggcaagacttcc

SEQ ID NO: 6775 - RNA, 17 nt, Homo sapiens
  source 1..17: mol_type = genomic RNA
cctaggcaagacttcca

SEQ ID NO: 6776 - RNA, 17 nt, Homo sapiens
  source 1..17: mol_type = genomic RNA
ctaggcaagacttccat

SEQ ID NO: 6777 - RNA, 17 nt, Homo sapiens
  source 1..17: mol_type = genomic RNA
taggcaagacttccatc

SEQ ID NO: 6778 - RNA, 17 nt, Homo sapiens
  source 1..17: mol_type = genomic RNA
aggcaagacttccatca

SEQ ID NO: 6779 - RNA, 17 nt, Homo sapiens
  source 1..17: mol_type = genomic RNA
ggcaagacttccatcac

SEQ ID NO: 6780 - RNA, 17 nt, Homo sapiens
  source 1..17: mol_type = genomic RNA
gcaagacttccatcacc

SEQ ID NO: 6781 - RNA, 17 nt, Homo sapiens
  source 1..17: mol_type = genomic RNA
caagacttccatcacct

SEQ ID NO: 6782 - RNA, 17 nt, Homo sapiens
  source 1..17: mol_type = genomic RNA
aagacttccatcacctg

SEQ ID NO: 6783 - RNA, 17 nt, Homo sapiens
  source 1..17: mol_type = genomic RNA
agacttccatcacctgg

SEQ ID NO: 6784 - RNA, 17 nt, Homo sapiens
  source 1..17: mol_type = genomic RNA
gacttccatcacctggg

SEQ ID NO: 6785 - RNA, 17 nt, Homo sapiens
  source 1..17: mol_type = genomic RNA
acttccatcacctgggt

SEQ ID NO: 6786 - RNA, 17 nt, Homo sapiens
  source 1..17: mol_type = genomic RNA
cttccatcacctgggtg

SEQ ID NO: 6787 - RNA, 17 nt, Homo sapiens
  source 1..17: mol_type = genomic RNA
ttccatcacctgggtga

SEQ ID NO: 6788 - RNA, 17 nt, Homo sapiens
  source 1..17: mol_type = genomic RNA
cagtgcagagatatgtc

SEQ ID NO: 6789 - RNA, 17 nt, Homo sapiens
  source 1..17: mol_type = genomic RNA
atatgtcacaaatcccc

SEQ ID NO: 6790 - RNA, 17 nt, Homo sapiens
  source 1..17: mol_type = genomic RNA
tatgtcacaaatccccc

SEQ ID NO: 6791 - RNA, 17 nt, Homo sapiens
  source 1..17: mol_type = genomic RNA
atgtcacaaatccccct

SEQ ID NO: 6792 - RNA, 17 nt, Homo sapiens
  source 1..17: mol_type = genomic RNA
tgtcacaaatccccctc

SEQ ID NO: 6793 - RNA, 17 nt, Homo sapiens
  source 1..17: mol_type = genomic RNA
gtcacaaatccccctct

SEQ ID NO: 6794 - RNA, 17 nt, Homo sapiens
  source 1..17: mol_type = genomic RNA
tcacaaatccccctcta

SEQ ID NO: 6795 - RNA, 17 nt, Homo sapiens
  source 1..17: mol_type = genomic RNA
cacaaatccccctctag

SEQ ID NO: 6796 - RNA, 17 nt, Homo sapiens
  source 1..17: mol_type = genomic RNA
acaaatccccctctagg

SEQ ID NO: 6797 - RNA, 17 nt, Homo sapiens
  source 1..17: mol_type = genomic RNA
caaatccccctctaggc

SEQ ID NO: 6798 - RNA, 17 nt, Homo sapiens
  source 1..17: mol_type = genomic RNA
aaatccccctctaggca

SEQ ID NO: 6799 - RNA, 17 nt, Homo sapiens
  source 1..17: mol_type = genomic RNA
aatccccctctaggcag

SEQ ID NO: 6800 - RNA, 17 nt, Homo sapiens
  source 1..17: mol_type = genomic RNA
atccccctctaggcaga

SEQ ID NO: 6801 - RNA, 17 nt, Homo sapiens
  source 1..17: mol_type = genomic RNA
tccccctctaggcagag

SEQ ID NO: 6802 - RNA, 17 nt, Homo sapiens
  source 1..17: mol_type = genomic RNA
ccccctctaggcagagt

SEQ ID NO: 6803 - RNA, 17 nt, Homo sapiens
  source 1..17: mol_type = genomic RNA
cccctctaggcagagta

SEQ ID NO: 6804 - RNA, 17 nt, Homo sapiens
  source 1..17: mol_type = genomic RNA
ccctctaggcagagtat

SEQ ID NO: 6805 - RNA, 17 nt, Homo sapiens
  source 1..17: mol_type = genomic RNA
cctctaggcagagtata

SEQ ID NO: 6806 - RNA, 17 nt, Homo sapiens
  source 1..17: mol_type = genomic RNA
ctctaggcagagtatag

SEQ ID NO: 6807 - RNA, 17 nt, Homo sapiens
  source 1..17: mol_type = genomic RNA
tctaggcagagtataga

SEQ ID NO: 6808 - RNA, 17 nt, Homo sapiens
  source 1..17: mol_type = genomic RNA
ctaggcagagtatagag

SEQ ID NO: 6809 - RNA, 17 nt, Homo sapiens
  source 1..17: mol_type = genomic RNA
taggcagagtatagaga

SEQ ID NO: 6810 - RNA, 17 nt, Homo sapiens
  source 1..17: mol_type = genomic RNA
aggcagagtatagagaa

SEQ ID NO: 6811 - RNA, 17 nt, Homo sapiens
  source 1..17: mol_type = genomic RNA
ggcagagtatagagaag

SEQ ID NO: 6812 - RNA, 17 nt, Homo sapiens
  source 1..17: mol_type = genomic RNA
gcagagtatagagaaga

SEQ ID NO: 6813 - RNA, 17 nt, Homo sapiens
  source 1..17: mol_type = genomic RNA
cagagtatagagaagag

SEQ ID NO: 6814 - RNA, 17 nt, Homo sapiens
  source 1..17: mol_type = genomic RNA
agagtatagagaagagt

SEQ ID NO: 6815 - RNA, 17 nt, Homo sapiens
  source 1..17: mol_type = genomic RNA
gagtatagagaagagtc

SEQ ID NO: 6816 - RNA, 17 nt, Homo sapiens
  source 1..17: mol_type = genomic RNA
agtatagagaagagtcc

SEQ ID NO: 6817 - RNA, 17 nt, Homo sapiens
  source 1..17: mol_type = genomic RNA
gtatagagaagagtccc

SEQ ID NO: 6818 - RNA, 17 nt, Homo sapiens
  source 1..17: mol_type = genomic RNA
tatagagaagagtccca

SEQ ID NO: 6819 - RNA, 17 nt, Homo sapiens
  source 1..17: mol_type = genomic RNA
atagagaagagtcccat

SEQ ID NO: 6820 - RNA, 17 nt, Homo sapiens
  source 1..17: mol_type = genomic RNA
tagagaagagtcccatc

SEQ ID NO: 6821 - RNA, 17 nt, Homo sapiens
  source 1..17: mol_type = genomic RNA
agagaagagtcccatca

SEQ ID NO: 6822 - RNA, 17 nt, Homo sapiens
  source 1..17: mol_type = genomic RNA
gagaagagtcccatcac

SEQ ID NO: 6823 - RNA, 17 nt, Homo sapiens
  source 1..17: mol_type = genomic RNA
agaagagtcccatcacc

SEQ ID NO: 6824 - RNA, 17 nt, Homo sapiens
  source 1..17: mol_type = genomic RNA
gaagagtcccatcacct

SEQ ID NO: 6825 - RNA, 17 nt, Homo sapiens
  source 1..17: mol_type = genomic RNA
aagagtcccatcacctg

SEQ ID NO: 6826 - RNA, 17 nt, Homo sapiens
  source 1..17: mol_type = genomic RNA
agagtcccatcacctgg

SEQ ID NO: 6827 - RNA, 17 nt, Homo sapiens
  source 1..17: mol_type = genomic RNA
gagtcccatcacctggg

SEQ ID NO: 6828 - RNA, 17 nt, Homo sapiens
  source 1..17: mol_type = genomic RNA
agtcccatcacctgggt

SEQ ID NO: 6829 - RNA, 17 nt, Homo sapiens
  source 1..17: mol_type = genomic RNA
gtcccatcacctgggtg

SEQ ID NO: 6830 - RNA, 17 nt, Homo sapiens
  source 1..17: mol_type = genomic RNA
tcccatcacctgggtga

SEQ ID NO: 6831 - RNA, 17 nt, Homo sapiens
  source 1..17: mol_type = genomic RNA
cccatcacctgggtgat

SEQ ID NO: 6832 - RNA, 17 nt, Homo sapiens
  source 1..17: mol_type = genomic RNA
ttcacaatgtcccctgt

SEQ ID NO: 6833 - RNA, 17 nt, Homo sapiens
  source 1..17: mol_type = genomic RNA
tcacaatgtcccctgta

SEQ ID NO: 6834 - RNA, 17 nt, Homo sapiens
  source 1..17: mol_type = genomic RNA
cacaatgtcccctgtag

SEQ ID NO: 6835 - RNA, 17 nt, Homo sapiens
  source 1..17: mol_type = genomic RNA
acaatgtcccctgtagg

SEQ ID NO: 6836 - RNA, 17 nt, Homo sapiens
  source 1..17: mol_type = genomic RNA
caatgtcccctgtaggc

SEQ ID NO: 6837 - RNA, 17 nt, Homo sapiens
  source 1..17: mol_type = genomic RNA
aatgtcccctgtaggca

SEQ ID NO: 6838 - RNA, 17 nt, Homo sapiens
  source 1..17: mol_type = genomic RNA
atgtcccctgtaggcag

SEQ ID NO: 6839 - RNA, 17 nt, Homo sapiens
  source 1..17: mol_type = genomic RNA
tgtcccctgtaggcaga

SEQ ID NO: 6840 - RNA, 17 nt, Homo sapiens
  source 1..17: mol_type = genomic RNA
gtcccctgtaggcagag

SEQ ID NO: 6841 - RNA, 17 nt, Homo sapiens
  source 1..17: mol_type = genomic RNA
tcccctgtaggcagaga

SEQ ID NO: 6842 - RNA, 17 nt, Homo sapiens
  source 1..17: mol_type = genomic RNA
cccctgtaggcagagag

SEQ ID NO: 6843 - RNA, 17 nt, Homo sapiens
  source 1..17: mol_type = genomic RNA
ccctgtaggcagagagt

SEQ ID NO: 6844 - RNA, 17 nt, Homo sapiens
  source 1..17: mol_type = genomic RNA
cctgtaggcagagagtg

SEQ ID NO: 6845 - RNA, 17 nt, Homo sapiens
  source 1..17: mol_type = genomic RNA
ctgtaggcagagagtgg

SEQ ID NO: 6846 - RNA, 17 nt, Homo sapiens
  source 1..17: mol_type = genomic RNA
tgtaggcagagagtgga

SEQ ID NO: 6847 - RNA, 17 nt, Homo sapiens
  source 1..17: mol_type = genomic RNA
gtaggcagagagtggac

SEQ ID NO: 6848 - RNA, 17 nt, Homo sapiens
  source 1..17: mol_type = genomic RNA
taggcagagagtggaca

SEQ ID NO: 6849 - RNA, 17 nt, Homo sapiens
  source 1..17: mol_type = genomic RNA
aggcagagagtggacaa

SEQ ID NO: 6850 - RNA, 17 nt, Homo sapiens
  source 1..17: mol_type = genomic RNA
ggcagagagtggacaag

SEQ ID NO: 6851 - RNA, 17 nt, Homo sapiens
  source 1..17: mol_type = genomic RNA
gcagagagtggacaaga

SEQ ID NO: 6852 - RNA, 17 nt, Homo sapiens
  source 1..17: mol_type = genomic RNA
cagagagtggacaagag

SEQ ID NO: 6853 - RNA, 17 nt, Homo sapiens
  source 1..17: mol_type = genomic RNA
agagagtggacaagagt

SEQ ID NO: 6854 - RNA, 17 nt, Homo sapiens
  source 1..17: mol_type = genomic RNA
gagagtggacaagagtt

SEQ ID NO: 6855 - RNA, 17 nt, Homo sapiens
  source 1..17: mol_type = genomic RNA
agagtggacaagagtta

SEQ ID NO: 6856 - RNA, 17 nt, Homo sapiens
  source 1..17: mol_type = genomic RNA
gagtggacaagagttac

SEQ ID NO: 6857 - RNA, 17 nt, Homo sapiens
  source 1..17: mol_type = genomic RNA
agtggacaagagttaca

SEQ ID NO: 6858 - RNA, 17 nt, Homo sapiens
  source 1..17: mol_type = genomic RNA
gtggacaagagttacat

SEQ ID NO: 6859 - RNA, 17 nt, Homo sapiens
  source 1..17: mol_type = genomic RNA
tggacaagagttacatc

SEQ ID NO: 6860 - RNA, 17 nt, Homo sapiens
  source 1..17: mol_type = genomic RNA
ggacaagagttacatca

SEQ ID NO: 6861 - RNA, 17 nt, Homo sapiens
  source 1..17: mol_type = genomic RNA
gacaagagttacatcac

SEQ ID NO: 6862 - RNA, 17 nt, Homo sapiens
  source 1..17: mol_type = genomic RNA
acaagagttacatcacc

SEQ ID NO: 6863 - RNA, 17 nt, Homo sapiens
  source 1..17: mol_type = genomic RNA
agagttacatcacctag

SEQ ID NO: 6864 - RNA, 17 nt, Homo sapiens
  source 1..17: mol_type = genomic RNA
tacatcacctagatgat

SEQ ID NO: 6865 - RNA, 17 nt, Homo sapiens
  source 1..17: mol_type = genomic RNA
acatcacctagatgatc

SEQ ID NO: 6866 - RNA, 17 nt, Homo sapiens
  source 1..17: mol_type = genomic RNA
atcacctagatgatctg

SEQ ID NO: 6867 - RNA, 17 nt, Homo sapiens
  source 1..17: mol_type = genomic RNA
tcacctagatgatctgt

SEQ ID NO: 6868 - RNA, 17 nt, Homo sapiens
  source 1..17: mol_type = genomic RNA
cacctagatgatctgtg

SEQ ID NO: 6869 - RNA, 17 nt, Homo sapiens
  source 1..17: mol_type = genomic RNA
acctagatgatctgtgc

SEQ ID NO: 6870 - RNA, 17 nt, Homo sapiens
  source 1..17: mol_type = genomic RNA
cctagatgatctgtgca

SEQ ID NO: 6871 - RNA, 17 nt, Homo sapiens
  source 1..17: mol_type = genomic RNA
ctagatgatctgtgcag

SEQ ID NO: 6872 - RNA, 17 nt, Homo sapiens
  source 1..17: mol_type = genomic RNA
tagatgatctgtgcaga

SEQ ID NO: 6873 - RNA, 17 nt, Homo sapiens
  source 1..17: mol_type = genomic RNA
agatgatctgtgcagag

SEQ ID NO: 6874 - RNA, 17 nt, Homo sapiens
  source 1..17: mol_type = genomic RNA
gatgatctgtgcagagc

SEQ ID NO: 6875 - RNA, 17 nt, Homo sapiens
  source 1..17: mol_type = genomic RNA
atgatctgtgcagagct

SEQ ID NO: 6876 - RNA, 17 nt, Homo sapiens
  source 1..17: mol_type = genomic RNA
tgatctgtgcagagcta

SEQ ID NO: 6877 - RNA, 17 nt, Homo sapiens
  source 1..17: mol_type = genomic RNA
gatctgtgcagagctat

SEQ ID NO: 6878 - RNA, 17 nt, Homo sapiens
  source 1..17: mol_type = genomic RNA
atctgtgcagagctatg

SEQ ID NO: 6879 - RNA, 17 nt, Homo sapiens
  source 1..17: mol_type = genomic RNA
tctgtgcagagctatgt

SEQ ID NO: 6880 - RNA, 17 nt, Homo sapiens
  source 1..17: mol_type = genomic RNA
ctgtgcagagctatgtc

SEQ ID NO: 6881 - RNA, 17 nt, Homo sapiens
  source 1..17: mol_type = genomic RNA
tgtgcagagctatgtca

SEQ ID NO: 6882 - RNA, 17 nt, Homo sapiens
  source 1..17: mol_type = genomic RNA
gtgcagagctatgtcaa

SEQ ID NO: 6883 - RNA, 17 nt, Homo sapiens
  source 1..17: mol_type = genomic RNA
tgcagagctatgtcaaa

SEQ ID NO: 6884 - RNA, 17 nt, Homo sapiens
  source 1..17: mol_type = genomic RNA
gcagagctatgtcaaaa

SEQ ID NO: 6885 - RNA, 17 nt, Homo sapiens
  source 1..17: mol_type = genomic RNA
cagagctatgtcaaaac

SEQ ID NO: 6886 - RNA, 17 nt, Homo sapiens
  source 1..17: mol_type = genomic RNA
agagctatgtcaaaacg

SEQ ID NO: 6887 - RNA, 17 nt, Homo sapiens
  source 1..17: mol_type = genomic RNA
gagctatgtcaaaacgc

SEQ ID NO: 6888 - RNA, 17 nt, Homo sapiens
  source 1..17: mol_type = genomic RNA
agctatgtcaaaacgcc

SEQ ID NO: 6889 - RNA, 17 nt, Homo sapiens
  source 1..17: mol_type = genomic RNA
gctatgtcaaaacgccc

SEQ ID NO: 6890 - RNA, 17 nt, Homo sapiens
  source 1..17: mol_type = genomic RNA
ctatgtcaaaacgcccc

SEQ ID NO: 6891 - RNA, 17 nt, Homo sapiens
  source 1..17: mol_type = genomic RNA
tatgtcaaaacgcccct

SEQ ID NO: 6892 - RNA, 17 nt, Homo sapiens
  source 1..17: mol_type = genomic RNA
atgtcaaaacgcccctg

SEQ ID NO: 6893 - RNA, 17 nt, Homo sapiens
  source 1..17: mol_type = genomic RNA
tgtcaaaacgcccctgt

SEQ ID NO: 6894 - RNA, 17 nt, Homo sapiens
  source 1..17: mol_type = genomic RNA
gtcaaaacgcccctgta

SEQ ID NO: 6895 - RNA, 17 nt, Homo sapiens
  source 1..17: mol_type = genomic RNA
tcaaaacgcccctgtag

SEQ ID NO: 6896 - RNA, 17 nt, Homo sapiens
  source 1..17: mol_type = genomic RNA
caaaacgcccctgtagg

SEQ ID NO: 6897 - RNA, 17 nt, Homo sapiens
  source 1..17: mol_type = genomic RNA
aaaacgcccctgtaggc

SEQ ID NO: 6898 - RNA, 17 nt, Homo sapiens
  source 1..17: mol_type = genomic RNA
aaacgcccctgtaggca

SEQ ID NO: 6899 - RNA, 17 nt, Homo sapiens
  source 1..17: mol_type = genomic RNA
aacgcccctgtaggcag

SEQ ID NO: 6900 - RNA, 17 nt, Homo sapiens
  source 1..17: mol_type = genomic RNA
acgcccctgtaggcaga

SEQ ID NO: 6901 - RNA, 17 nt, Homo sapiens
  source 1..17: mol_type = genomic RNA
cgcccctgtaggcagag

SEQ ID NO: 6902 - RNA, 17 nt, Homo sapiens
  source 1..17: mol_type = genomic RNA
gtaggcagagcctagat

SEQ ID NO: 6903 - RNA, 17 nt, Homo sapiens
  source 1..17: mol_type = genomic RNA
taggcagagcctagatg

SEQ ID NO: 6904 - RNA, 17 nt, Homo sapiens
  source 1..17: mol_type = genomic RNA
aggcagagcctagatga

SEQ ID NO: 6905 - RNA, 17 nt, Homo sapiens
  source 1..17: mol_type = genomic RNA
ggcagagcctagatgag

SEQ ID NO: 6906 - RNA, 17 nt, Homo sapiens
  source 1..17: mol_type = genomic RNA
gcagagcctagatgagt

SEQ ID NO: 6907 - RNA, 17 nt, Homo sapiens
  source 1..17: mol_type = genomic RNA
cagagcctagatgagtg

SEQ ID NO: 6908 - RNA, 17 nt, Homo sapiens
  source 1..17: mol_type = genomic RNA
agagcctagatgagtgt

SEQ ID NO: 6909 - RNA, 17 nt, Homo sapiens
  source 1..17: mol_type = genomic RNA
gagcctagatgagtgtt

SEQ ID NO: 6910 - RNA, 17 nt, Homo sapiens
  source 1..17: mol_type = genomic RNA
agcctagatgagtgtta

SEQ ID NO: 6911 - RNA, 17 nt, Homo sapiens
  source 1..17: mol_type = genomic RNA
gcctagatgagtgttac

SEQ ID NO: 6912 - RNA, 17 nt, Homo sapiens
  source 1..17: mol_type = genomic RNA
atgagtgttacatcacc

SEQ ID NO: 6913 - RNA, 17 nt, Homo sapiens
  source 1..17: mol_type = genomic RNA
tgagtgttacatcacct

SEQ ID NO: 6914 - RNA, 17 nt, Homo sapiens
  source 1..17: mol_type = genomic RNA
gagtgttacatcacctg

SEQ ID NO: 6915 - RNA, 17 nt, Homo sapiens
  source 1..17: mol_type = genomic RNA
atcacctgggtgatcat

SEQ ID NO: 6916 - RNA, 17 nt, Homo sapiens
  source 1..17: mol_type = genomic RNA
tcacctgggtgatcatt

SEQ ID NO: 6917 - RNA, 17 nt, Homo sapiens
  source 1..17: mol_type = genomic RNA
cacctgggtgatcattg

SEQ ID NO: 6918 - RNA, 17 nt, Homo sapiens
  source 1..17: mol_type = genomic RNA
acctgggtgatcattgc

SEQ ID NO: 6919 - RNA, 17 nt, Homo sapiens
  source 1..17: mol_type = genomic RNA
cctgggtgatcattgca

SEQ ID NO: 6920 - RNA, 17 nt, Homo sapiens
  source 1..17: mol_type = genomic RNA
ctgggtgatcattgcag

SEQ ID NO: 6921 - RNA, 17 nt, Homo sapiens
  source 1..17: mol_type = genomic RNA
tgggtgatcattgcaga

SEQ ID NO: 6922 - RNA, 17 nt, Homo sapiens
  source 1..17: mol_type = genomic RNA
gggtgatcattgcagag

SEQ ID NO: 6923 - RNA, 17 nt, Homo sapiens
  source 1..17: mol_type = genomic RNA
ggtgatcattgcagaga

SEQ ID NO: 6924 - RNA, 17 nt, Homo sapiens
  source 1..17: mol_type = genomic RNA
gtgatcattgcagagat

SEQ ID NO: 6925 - RNA, 17 nt, Homo sapiens
  source 1..17: mol_type = genomic RNA
gatcattgcagagatac

SEQ ID NO: 6926 - RNA, 17 nt, Homo sapiens
  source 1..17: mol_type = genomic RNA
atcattgcagagatacg

SEQ ID NO: 6927 - RNA, 17 nt, Homo sapiens
  source 1..17: mol_type = genomic RNA
tcattgcagagatacgt

SEQ ID NO: 6928 - RNA, 17 nt, Homo sapiens
  source 1..17: mol_type = genomic RNA
cattgcagagatacgtc

SEQ ID NO: 6929 - RNA, 17 nt, Homo sapiens
  source 1..17: mol_type = genomic RNA
attgcagagatacgtca

SEQ ID NO: 6930 - RNA, 17 nt, Homo sapiens
  source 1..17: mol_type = genomic RNA
ttgcagagatacgtcac

SEQ ID NO: 6931 - RNA, 17 nt, Homo sapiens
  source 1..17: mol_type = genomic RNA
tgcagagatacgtcaca

SEQ ID NO: 6932 - RNA, 17 nt, Homo sapiens
  source 1..17: mol_type = genomic RNA
gcagagatacgtcacaa

SEQ ID NO: 6933 - RNA, 17 nt, Homo sapiens
  source 1..17: mol_type = genomic RNA
cagagatacgtcacaat

SEQ ID NO: 6934 - RNA, 17 nt, Homo sapiens
  source 1..17: mol_type = genomic RNA
agagatacgtcacaata

SEQ ID NO: 6935 - RNA, 17 nt, Homo sapiens
  source 1..17: mol_type = genomic RNA
gagatacgtcacaatac

SEQ ID NO: 6936 - RNA, 17 nt, Homo sapiens
  source 1..17: mol_type = genomic RNA
agatacgtcacaatacc

SEQ ID NO: 6937 - RNA, 17 nt, Homo sapiens
  source 1..17: mol_type = genomic RNA
gatacgtcacaataccc

SEQ ID NO: 6938 - RNA, 17 nt, Homo sapiens
  source 1..17: mol_type = genomic RNA
atacgtcacaatacccc

SEQ ID NO: 6939 - RNA, 17 nt, Homo sapiens
  source 1..17: mol_type = genomic RNA
tacgtcacaataccccc

SEQ ID NO: 6940 - RNA, 17 nt, Homo sapiens
  source 1..17: mol_type = genomic RNA
acgtcacaataccccct

SEQ ID NO: 6941 - RNA, 17 nt, Homo sapiens
  source 1..17: mol_type = genomic RNA
cgtcacaataccccctg

SEQ ID NO: 6942 - RNA, 17 nt, Homo sapiens
  source 1..17: mol_type = genomic RNA
gtcacaataccccctgt

SEQ ID NO: 6943 - RNA, 17 nt, Homo sapiens
  source 1..17: mol_type = genomic RNA
tcacaataccccctgta

SEQ ID NO: 6944 - RNA, 17 nt, Homo sapiens
  source 1..17: mol_type = genomic RNA
cacaataccccctgtag

SEQ ID NO: 6945 - RNA, 17 nt, Homo sapiens
  source 1..17: mol_type = genomic RNA
acaataccccctgtagg

SEQ ID NO: 6946 - RNA, 17 nt, Homo sapiens
  source 1..17: mol_type = genomic RNA
caataccccctgtaggt

SEQ ID NO: 6947 - RNA, 17 nt, Homo sapiens
  source 1..17: mol_type = genomic RNA
aataccccctgtaggtg

SEQ ID NO: 6948 - RNA, 17 nt, Homo sapiens
  source 1..17: mol_type = genomic RNA
ataccccctgtaggtgg

SEQ ID NO: 6949 - RNA, 17 nt, Homo sapiens
  source 1..17: mol_type = genomic RNA
taccccctgtaggtggg

SEQ ID NO: 6950 - RNA, 17 nt, Homo sapiens
  source 1..17: mol_type = genomic RNA
cctgtaggtggggccta

SEQ ID NO: 6951 - RNA, 17 nt, Homo sapiens
  source 1..17: mol_type = genomic RNA
ctgtaggtggggcctag

SEQ ID NO: 6952 - RNA, 17 nt, Homo sapiens
  source 1..17: mol_type = genomic RNA
tgtaggtggggcctaga

SEQ ID NO: 6953 - RNA, 17 nt, Homo sapiens
  source 1..17: mol_type = genomic RNA
gtggggcctagacaaga

SEQ ID NO: 6954 - RNA, 17 nt, Homo sapiens
  source 1..17: mol_type = genomic RNA
ggggcctagacaagagt

SEQ ID NO: 6955 - RNA, 17 nt, Homo sapiens
  source 1..17: mol_type = genomic RNA
gggcctagacaagagtt

SEQ ID NO: 6956 - RNA, 17 nt, Homo sapiens
  source 1..17: mol_type = genomic RNA
ggcctagacaagagtta

SEQ ID NO: 6957 - RNA, 17 nt, Homo sapiens
  source 1..17: mol_type = genomic RNA
cctagacaagagttaca

SEQ ID NO: 6958 - RNA, 17 nt, Homo sapiens
  source 1..17: mol_type = genomic RNA
aagagttacatcacctg

SEQ ID NO: 6959 - RNA, 17 nt, Homo sapiens
  source 1..17: mol_type = genomic RNA
agagttacatcacctgg

SEQ ID NO: 6960 - RNA, 17 nt, Homo sapiens
  source 1..17: mol_type = genomic RNA
gagttacatcacctggg

SEQ ID NO: 6961 - RNA, 17 nt, Homo sapiens
  source 1..17: mol_type = genomic RNA
agttacatcacctgggt

SEQ ID NO: 6962 - RNA, 17 nt, Homo sapiens
  source 1..17: mol_type = genomic RNA
cacctgggtgatcagta

SEQ ID NO: 6963 - RNA, 17 nt, Homo sapiens
  source 1..17: mol_type = genomic RNA
acctgggtgatcagtac

SEQ ID NO: 6964 - RNA, 17 nt, Homo sapiens
  source 1..17: mol_type = genomic RNA
cctgggtgatcagtaca

SEQ ID NO: 6965 - RNA, 17 nt, Homo sapiens
  source 1..17: mol_type = genomic RNA
ctgggtgatcagtacag

SEQ ID NO: 6966 - RNA, 17 nt, Homo sapiens
  source 1..17: mol_type = genomic RNA
tgggtgatcagtacaga

SEQ ID NO: 6967 - RNA, 17 nt, Homo sapiens
  source 1..17: mol_type = genomic RNA
gggtgatcagtacagaa

SEQ ID NO: 6968 - RNA, 17 nt, Homo sapiens
  source 1..17: mol_type = genomic RNA
ggtgatcagtacagaag

SEQ ID NO: 6969 - RNA, 17 nt, Homo sapiens
  source 1..17: mol_type = genomic RNA
gtgatcagtacagaagt

SEQ ID NO: 6970 - RNA, 17 nt, Homo sapiens
  source 1..17: mol_type = genomic RNA
tgatcagtacagaagta

SEQ ID NO: 6971 - RNA, 17 nt, Homo sapiens
  source 1..17: mol_type = genomic RNA
gtacagaagtatgtcac

SEQ ID NO: 6972 - RNA, 17 nt, Homo sapiens
  source 1..17: mol_type = genomic RNA
acagaagtatgtcacaa

SEQ ID NO: 6973 - RNA, 17 nt, Homo sapiens
  source 1..17: mol_type = genomic RNA
agaagtatgtcacaaag

SEQ ID NO: 6974 - RNA, 17 nt, Homo sapiens
  source 1..17: mol_type = genomic RNA
gaagtatgtcacaaagc

SEQ ID NO: 6975 - RNA, 17 nt, Homo sapiens
  source 1..17: mol_type = genomic RNA
aagtatgtcacaaagcc

SEQ ID NO: 6976 - RNA, 17 nt, Homo sapiens
  source 1..17: mol_type = genomic RNA
agtatgtcacaaagccc

SEQ ID NO: 6977 - RNA, 17 nt, Homo sapiens
  source 1..17: mol_type = genomic RNA
gtatgtcacaaagcccc

SEQ ID NO: 6978 - RNA, 17 nt, Homo sapiens
  source 1..17: mol_type = genomic RNA
tatgtcacaaagcccct

SEQ ID NO: 6979 - RNA, 17 nt, Homo sapiens
  source 1..17: mol_type = genomic RNA
atgtcacaaagcccctg

SEQ ID NO: 6980 - RNA, 17 nt, Homo sapiens
  source 1..17: mol_type = genomic RNA
gttacatcacctgggtt

SEQ ID NO: 6981 - RNA, 17 nt, Homo sapiens
  source 1..17: mol_type = genomic RNA
ttacatcacctgggtta

SEQ ID NO: 6982 - RNA, 17 nt, Homo sapiens
  source 1..17: mol_type = genomic RNA
tacatcacctgggttat

SEQ ID NO: 6983 - RNA, 17 nt, Homo sapiens
  source 1..17: mol_type = genomic RNA
acatcacctgggttatc

SEQ ID NO: 6984 - RNA, 17 nt, Homo sapiens
  source 1..17: mol_type = genomic RNA
catcacctgggttatca

SEQ ID NO: 6985 - RNA, 17 nt, Homo sapiens
  source 1..17: mol_type = genomic RNA
atcacctgggttatcag

SEQ ID NO: 6986 - RNA, 17 nt, Homo sapiens
  source 1..17: mol_type = genomic RNA
tcacctgggttatcagt

SEQ ID NO: 6987 - RNA, 17 nt, Homo sapiens
  source 1..17: mol_type = genomic RNA
cacctgggttatcagtg

SEQ ID NO: 6988 - RNA, 17 nt, Homo sapiens
  source 1..17: mol_type = genomic RNA
acctgggttatcagtgc

SEQ ID NO: 6989 - RNA, 17 nt, Homo sapiens
  source 1..17: mol_type = genomic RNA
cctgggttatcagtgca

SEQ ID NO: 6990 - RNA, 17 nt, Homo sapiens
  source 1..17: mol_type = genomic RNA
ctgggttatcagtgcag

SEQ ID NO: 6991 - RNA, 17 nt, Homo sapiens
  source 1..17: mol_type = genomic RNA
tgggttatcagtgcaga

SEQ ID NO: 6992 - RNA, 17 nt, Homo sapiens
  source 1..17: mol_type = genomic RNA
gggttatcagtgcagaa

SEQ ID NO: 6993 - RNA, 17 nt, Homo sapiens
  source 1..17: mol_type = genomic RNA
ggttatcagtgcagaaa

SEQ ID NO: 6994 - RNA, 17 nt, Homo sapiens
  source 1..17: mol_type = genomic RNA
tcagtgcagaaatatgt

SEQ ID NO: 6995 - RNA, 17 nt, Homo sapiens
  source 1..17: mol_type = genomic RNA
cagtgcagaaatatgtc

SEQ ID NO: 6996 - RNA, 17 nt, Homo sapiens
  source 1..17: mol_type = genomic RNA
agtgcagaaatatgtca

SEQ ID NO: 6997 - RNA, 17 nt, Homo sapiens
  source 1..17: mol_type = genomic RNA
gtgcagaaatatgtcac

SEQ ID NO: 6998 - RNA, 17 nt, Homo sapiens
  source 1..17: mol_type = genomic RNA
tgcagaaatatgtcaca

SEQ ID NO: 6999 - RNA, 17 nt, Homo sapiens
  source 1..17: mol_type = genomic RNA
aaatatgtcacaaagcc

SEQ ID NO: 7000 - RNA, 17 nt, Homo sapiens
  source 1..17: mol_type = genomic RNA
aatatgtcacaaagccc

SEQ ID NO: 7001 - RNA, 17 nt, Homo sapiens
  source 1..17: mol_type = genomic RNA
atatgtcacaaagcccc

SEQ ID NO: 7002 - RNA, 17 nt, Homo sapiens
  source 1..17: mol_type = genomic RNA
acaaagcccctgtaggt

SEQ ID NO: 7003 - RNA, 17 nt, Homo sapiens
  source 1..17: mol_type = genomic RNA
caaagcccctgtaggtc

SEQ ID NO: 7004 - RNA, 17 nt, Homo sapiens
  source 1..17: mol_type = genomic RNA
aaagcccctgtaggtcg

SEQ ID NO: 7005 - RNA, 17 nt, Homo sapiens
  source 1..17: mol_type = genomic RNA
aagcccctgtaggtcga

SEQ ID NO: 7006 - RNA, 17 nt, Homo sapiens
  source 1..17: mol_type = genomic RNA
agcccctgtaggtcgag

SEQ ID NO: 7007 - RNA, 17 nt, Homo sapiens
  source 1..17: mol_type = genomic RNA
gcccctgtaggtcgagt

SEQ ID NO: 7008 - RNA, 17 nt, Homo sapiens
  source 1..17: mol_type = genomic RNA
cccctgtaggtcgagtc

SEQ ID NO: 7009 - RNA, 17 nt, Homo sapiens
  source 1..17: mol_type = genomic RNA
ccctgtaggtcgagtct

SEQ ID NO: 7010 - RNA, 17 nt, Homo sapiens
  source 1..17: mol_type = genomic RNA
cctgtaggtcgagtcta

SEQ ID NO: 7011 - RNA, 17 nt, Homo sapiens
  source 1..17: mol_type = genomic RNA
ctgtaggtcgagtctag

SEQ ID NO: 7012 - RNA, 17 nt, Homo sapiens
  source 1..17: mol_type = genomic RNA
tgtaggtcgagtctaga

SEQ ID NO: 7013 - RNA, 17 nt, Homo sapiens
  source 1..17: mol_type = genomic RNA
gtaggtcgagtctagac

SEQ ID NO: 7014 - RNA, 17 nt, Homo sapiens
  source 1..17: mol_type = genomic RNA
taggtcgagtctagaca

SEQ ID NO: 7015 - RNA, 17 nt, Homo sapiens
  source 1..17: mol_type = genomic RNA
aggtcgagtctagacaa

SEQ ID NO: 7016 - RNA, 17 nt, Homo sapiens
  source 1..17: mol_type = genomic RNA
ggtcgagtctagacaag

SEQ ID NO: 7017 - RNA, 17 nt, Homo sapiens
  source 1..17: mol_type = genomic RNA
gtcgagtctagacaaga

SEQ ID NO: 7018 - RNA, 17 nt, Homo sapiens
  source 1..17: mol_type = genomic RNA
tcgagtctagacaagag

SEQ ID NO: 7019 - RNA, 17 nt, Homo sapiens
  source 1..17: mol_type = genomic RNA
cgagtctagacaagagt

SEQ ID NO: 7020 - RNA, 17 nt, Homo sapiens
  source 1..17: mol_type = genomic RNA
gagtctagacaagagtt

SEQ ID NO: 7021 - RNA, 17 nt, Homo sapiens
  source 1..17: mol_type = genomic RNA
gtctagacaagagttac

SEQ ID NO: 7022 - RNA, 17 nt, Homo sapiens
  source 1..17: mol_type = genomic RNA
acaagagttacatctcc

SEQ ID NO: 7023 - RNA, 17 nt, Homo sapiens
  source 1..17: mol_type = genomic RNA
gagttacatctcctggg

SEQ ID NO: 7024 - RNA, 17 nt, Homo sapiens
  source 1..17: mol_type = genomic RNA
agttacatctcctgggt

SEQ ID NO: 7025 - RNA, 17 nt, Homo sapiens
  source 1..17: mol_type = genomic RNA
gttacatctcctgggtg

SEQ ID NO: 7026 - RNA, 17 nt, Homo sapiens
  source 1..17: mol_type = genomic RNA
ttacatctcctgggtga

SEQ ID NO: 7027 - RNA, 17 nt, Homo sapiens
  source 1..17: mol_type = genomic RNA
tacatctcctgggtgat

SEQ ID NO: 7028 - RNA, 17 nt, Homo sapiens
  source 1..17: mol_type = genomic RNA
acatctcctgggtgatc

SEQ ID NO: 7029 - RNA, 17 nt, Homo sapiens
  source 1..17: mol_type = genomic RNA
catctcctgggtgatca

SEQ ID NO: 7030 - RNA, 17 nt, Homo sapiens
  source 1..17: mol_type = genomic RNA
atctcctgggtgatcag

SEQ ID NO: 7031 - RNA, 17 nt, Homo sapiens
  source 1..17: mol_type = genomic RNA
tctcctgggtgatcagt

SEQ ID NO: 7032 - RNA, 17 nt, Homo sapiens
  source 1..17: mol_type = genomic RNA
ctcctgggtgatcagtg

SEQ ID NO: 7033 - RNA, 17 nt, Homo sapiens
  source 1..17: mol_type = genomic RNA
tcctgggtgatcagtgc

SEQ ID NO: 7034 - RNA, 17 nt, Homo sapiens
  source 1..17: mol_type = genomic RNA
ctgggtgatcagtgcaa

SEQ ID NO: 7035 - RNA, 17 nt, Homo sapiens
  source 1..17: mol_type = genomic RNA
tgggtgatcagtgcaaa

SEQ ID NO: 7036 - RNA, 17 nt, Homo sapiens
  source 1..17: mol_type = genomic RNA
gggtgatcagtgcaaag

SEQ ID NO: 7037 - RNA, 17 nt, Homo sapiens
  source 1..17: mol_type = genomic RNA
ggtgatcagtgcaaaga

SEQ ID NO: 7038 - RNA, 17 nt, Homo sapiens
  source 1..17: mol_type = genomic RNA
gtgatcagtgcaaagat

SEQ ID NO: 7039 - RNA, 17 nt, Homo sapiens
  source 1..17: mol_type = genomic RNA
tgatcagtgcaaagata

SEQ ID NO: 7040 - RNA, 17 nt, Homo sapiens
  source 1..17: mol_type = genomic RNA
tcagtgcaaagatatgt

SEQ ID NO: 7041 - RNA, 17 nt, Homo sapiens
  source 1..17: mol_type = genomic RNA
cagtgcaaagatatgtc

SEQ ID NO: 7042 - RNA, 17 nt, Homo sapiens
  source 1..17: mol_type = genomic RNA
agtgcaaagatatgtca

SEQ ID NO: 7043 - RNA, 17 nt, Homo sapiens
  source 1..17: mol_type = genomic RNA
gtgcaaagatatgtcac

SEQ ID NO: 7044 - RNA, 17 nt, Homo sapiens
  source 1..17: mol_type = genomic RNA
tgcaaagatatgtcaca

SEQ ID NO: 7045 - RNA, 17 nt, Homo sapiens
  source 1..17: mol_type = genomic RNA
aagatatgtcacaaagc

SEQ ID NO: 7046 - RNA, 17 nt, Homo sapiens
  source 1..17: mol_type = genomic RNA
gatatgtcacaaagccc

SEQ ID NO: 7047 - RNA, 17 nt, Homo sapiens
  source 1..17: mol_type = genomic RNA
tatgtcacaaagccccc

SEQ ID NO: 7048 - RNA, 17 nt, Homo sapiens
  source 1..17: mol_type = genomic RNA
atgtcacaaagccccct

SEQ ID NO: 7049 - RNA, 17 nt, Homo sapiens
  source 1..17: mol_type = genomic RNA
tgtcacaaagccccctg

SEQ ID NO: 7050 - RNA, 17 nt, Homo sapiens
  source 1..17: mol_type = genomic RNA
gtcacaaagccccctgt

SEQ ID NO: 7051 - RNA, 17 nt, Homo sapiens
  source 1..17: mol_type = genomic RNA
gccccctgtagacaaat

SEQ ID NO: 7052 - RNA, 17 nt, Homo sapiens
  source 1..17: mol_type = genomic RNA
ccccctgtagacaaatc

SEQ ID NO: 7053 - RNA, 17 nt, Homo sapiens
  source 1..17: mol_type = genomic RNA
cccctgtagacaaatcc

SEQ ID NO: 7054 - RNA, 17 nt, Homo sapiens
  source 1..17: mol_type = genomic RNA
ccctgtagacaaatccc

SEQ ID NO: 7055 - RNA, 17 nt, Homo sapiens
  source 1..17: mol_type = genomic RNA
cctgtagacaaatccca

SEQ ID NO: 7056 - RNA, 17 nt, Homo sapiens
  source 1..17: mol_type = genomic RNA
ctgtagacaaatcccag

SEQ ID NO: 7057 - RNA, 17 nt, Homo sapiens
  source 1..17: mol_type = genomic RNA
tgtagacaaatcccaga

SEQ ID NO: 7058 - RNA, 17 nt, Homo sapiens
  source 1..17: mol_type = genomic RNA
gtagacaaatcccagaa

SEQ ID NO: 7059 - RNA, 17 nt, Homo sapiens
  source 1..17: mol_type = genomic RNA
tagacaaatcccagaaa

SEQ ID NO: 7060 - RNA, 17 nt, Homo sapiens
  source 1..17: mol_type = genomic RNA
agacaaatcccagaaaa

SEQ ID NO: 7061 - RNA, 17 nt, Homo sapiens
  source 1..17: mol_type = genomic RNA
gacaaatcccagaaaat

SEQ ID NO: 7062 - RNA, 17 nt, Homo sapiens
  source 1..17: mol_type = genomic RNA
ttgttacatcacctggg

SEQ ID NO: 7063 - RNA, 17 nt, Homo sapiens
  source 1..17: mol_type = genomic RNA
acctgggtgatcagtgg

SEQ ID NO: 7064 - RNA, 17 nt, Homo sapiens
  source 1..17: mol_type = genomic RNA
cctgggtgatcagtgga

SEQ ID NO: 7065 - RNA, 17 nt, Homo sapiens
  source 1..17: mol_type = genomic RNA
ctgggtgatcagtggag

SEQ ID NO: 7066 - RNA, 17 nt, Homo sapiens
  source 1..17: mol_type = genomic RNA
tgggtgatcagtggaga

SEQ ID NO: 7067 - RNA, 17 nt, Homo sapiens
  source 1..17: mol_type = genomic RNA
gggtgatcagtggagat

SEQ ID NO: 7068 - RNA, 17 nt, Homo sapiens
  source 1..17: mol_type = genomic RNA
ggtgatcagtggagata

SEQ ID NO: 7069 - RNA, 17 nt, Homo sapiens
  source 1..17: mol_type = genomic RNA
gtgatcagtggagatat

SEQ ID NO: 7070 - RNA, 17 nt, Homo sapiens
  source 1..17: mol_type = genomic RNA
tgatcagtggagatatg

SEQ ID NO: 7071 - RNA, 17 nt, Homo sapiens
  source 1..17: mol_type = genomic RNA
gatcagtggagatatgt

SEQ ID NO: 7072 - RNA, 17 nt, Homo sapiens
  source 1..17: mol_type = genomic RNA
atcagtggagatatgtg

SEQ ID NO: 7073 - RNA, 17 nt, Homo sapiens
  source 1..17: mol_type = genomic RNA
tcagtggagatatgtgt

SEQ ID NO: 7074 - RNA, 17 nt, Homo sapiens
  source 1..17: mol_type = genomic RNA
cagtggagatatgtgtc

SEQ ID NO: 7075 - RNA, 17 nt, Homo sapiens
  source 1..17: mol_type = genomic RNA
agtggagatatgtgtca

SEQ ID NO: 7076 - RNA, 17 nt, Homo sapiens
  source 1..17: mol_type = genomic RNA
gtggagatatgtgtcac

SEQ ID NO: 7077 - RNA, 17 nt, Homo sapiens
  source 1..17: mol_type = genomic RNA
tggagatatgtgtcaca

SEQ ID NO: 7078 - RNA, 17 nt, Homo sapiens
  source 1..17: mol_type = genomic RNA
ggagatatgtgtcacaa

SEQ ID NO: 7079 - RNA, 17 nt, Homo sapiens
  source 1..17: mol_type = genomic RNA
atgtgtcacaattcccc

SEQ ID NO: 7080 - RNA, 17 nt, Homo sapiens
  source 1..17: mol_type = genomic RNA
tgtgtcacaattcccct

SEQ ID NO: 7081 - RNA, 17 nt, Homo sapiens
  source 1..17: mol_type = genomic RNA
acaattcccctttaggc

SEQ ID NO: 7082 - RNA, 17 nt, Homo sapiens
  source 1..17: mol_type = genomic RNA
aattcccctttaggcac

SEQ ID NO: 7083 - RNA, 17 nt, Homo sapiens
  source 1..17: mol_type = genomic RNA
attcccctttaggcaca

SEQ ID NO: 7084 - RNA, 17 nt, Homo sapiens
  source 1..17: mol_type = genomic RNA
ttcccctttaggcacag

SEQ ID NO: 7085 - RNA, 17 nt, Homo sapiens
  source 1..17: mol_type = genomic RNA
tcccctttaggcacagc

SEQ ID NO: 7086 - RNA, 17 nt, Homo sapiens
  source 1..17: mol_type = genomic RNA
cccctttaggcacagct

SEQ ID NO: 7087 - RNA, 17 nt, Homo sapiens
  source 1..17: mol_type = genomic RNA
ccctttaggcacagctt

SEQ ID NO: 7088 - RNA, 17 nt, Homo sapiens
  source 1..17: mol_type = genomic RNA
cctttaggcacagctta

SEQ ID NO: 7089 - RNA, 17 nt, Homo sapiens
  source 1..17: mol_type = genomic RNA
ctttaggcacagcttag

SEQ ID NO: 7090 - RNA, 17 nt, Homo sapiens
  source 1..17: mol_type = genomic RNA
tttaggcacagcttaga

SEQ ID NO: 7091 - RNA, 17 nt, Homo sapiens
  source 1..17: mol_type = genomic RNA
ttaggcacagcttagac

SEQ ID NO: 7092 - RNA, 17 nt, Homo sapiens
  source 1..17: mol_type = genomic RNA
taggcacagcttagaca

SEQ ID NO: 7093 - RNA, 17 nt, Homo sapiens
  source 1..17: mol_type = genomic RNA
aggcacagcttagacaa

SEQ ID NO: 7094 - RNA, 17 nt, Homo sapiens
  source 1..17: mol_type = genomic RNA
ggcacagcttagacaag

SEQ ID NO: 7095 - RNA, 17 nt, Homo sapiens
  source 1..17: mol_type = genomic RNA
gcacagcttagacaagc

SEQ ID NO: 7096 - RNA, 17 nt, Homo sapiens
  source 1..17: mol_type = genomic RNA
cacagcttagacaagcg

SEQ ID NO: 7097 - RNA, 17 nt, Homo sapiens
  source 1..17: mol_type = genomic RNA
acagcttagacaagcgt

SEQ ID NO: 7098 - RNA, 17 nt, Homo sapiens
  source 1..17: mol_type = genomic RNA
cagcttagacaagcgtt

SEQ ID NO: 7099 - RNA, 17 nt, Homo sapiens
  source 1..17: mol_type = genomic RNA
agcttagacaagcgtta

SEQ ID NO: 7100 - RNA, 17 nt, Homo sapiens
  source 1..17: mol_type = genomic RNA
gcttagacaagcgttac

SEQ ID NO: 7101 - RNA, 17 nt, Homo sapiens
  source 1..17: mol_type = genomic RNA
tagacaagcgttacatc

SEQ ID NO: 7102 - RNA, 17 nt, Homo sapiens
  source 1..17: mol_type = genomic RNA
agacaagcgttacatca

SEQ ID NO: 7103 - RNA, 17 nt, Homo sapiens
  source 1..17: mol_type = genomic RNA
gacaagcgttacatcac

SEQ ID NO: 7104 - RNA, 17 nt, Homo sapiens
  source 1..17: mol_type = genomic RNA
acaagcgttacatcaca

SEQ ID NO: 7105 - RNA, 17 nt, Homo sapiens
  source 1..17: mol_type = genomic RNA
agcgttacatcacatga

SEQ ID NO: 7106 - RNA, 17 nt, Homo sapiens
  source 1..17: mol_type = genomic RNA
gcgttacatcacatgag

SEQ ID NO: 7107 - RNA, 17 nt, Homo sapiens
  source 1..17: mol_type = genomic RNA
tacatcacatgagtgat

SEQ ID NO: 7108 - RNA, 17 nt, Homo sapiens
  source 1..17: mol_type = genomic RNA
acatcacatgagtgatc

SEQ ID NO: 7109 - RNA, 17 nt, Homo sapiens
  source 1..17: mol_type = genomic RNA
acatgagtgatcattgc

SEQ ID NO: 7110 - RNA, 17 nt, Homo sapiens
  source 1..17: mol_type = genomic RNA
atgagtgatcattgcag

SEQ ID NO: 7111 - RNA, 17 nt, Homo sapiens
  source 1..17: mol_type = genomic RNA
tgagtgatcattgcaga

SEQ ID NO: 7112 - RNA, 17 nt, Homo sapiens
  source 1..17: mol_type = genomic RNA
gagtgatcattgcagag

SEQ ID NO: 7113 - RNA, 17 nt, Homo sapiens
  source 1..17: mol_type = genomic RNA
agtgatcattgcagagt

SEQ ID NO: 7114 - RNA, 17 nt, Homo sapiens
  source 1..17: mol_type = genomic RNA
tgcagagttatgtcact

SEQ ID NO: 7115 - RNA, 17 nt, Homo sapiens
  source 1..17: mol_type = genomic RNA
gttatgtcactatgccc

SEQ ID NO: 7116 - RNA, 17 nt, Homo sapiens
  source 1..17: mol_type = genomic RNA
ttatgtcactatgcccc

SEQ ID NO: 7117 - RNA, 17 nt, Homo sapiens
  source 1..17: mol_type = genomic RNA
tatgtcactatgccccc

SEQ ID NO: 7118 - RNA, 17 nt, Homo sapiens
  source 1..17: mol_type = genomic RNA
atgtcactatgccccca

SEQ ID NO: 7119 - RNA, 17 nt, Homo sapiens
  source 1..17: mol_type = genomic RNA
tgtcactatgcccccat

SEQ ID NO: 7120 - RNA, 17 nt, Homo sapiens
  source 1..17: mol_type = genomic RNA
gtcactatgcccccata

SEQ ID NO: 7121 - RNA, 17 nt, Homo sapiens
  source 1..17: mol_type = genomic RNA
tcactatgcccccatag

SEQ ID NO: 7122 - RNA, 17 nt, Homo sapiens
  source 1..17: mol_type = genomic RNA
cactatgcccccatagg

SEQ ID NO: 7123 - RNA, 17 nt, Homo sapiens
  source 1..17: mol_type = genomic RNA
actatgcccccataggc

SEQ ID NO: 7124 - RNA, 17 nt, Homo sapiens
  source 1..17: mol_type = genomic RNA
ctatgcccccataggca

SEQ ID NO: 7125 - RNA, 17 nt, Homo sapiens
  source 1..17: mol_type = genomic RNA
tatgcccccataggcag

SEQ ID NO: 7126 - RNA, 17 nt, Homo sapiens
  source 1..17: mol_type = genomic RNA
atgcccccataggcaga

SEQ ID NO: 7127 - RNA, 17 nt, Homo sapiens
  source 1..17: mol_type = genomic RNA
tgcccccataggcagat

SEQ ID NO: 7128 - RNA, 17 nt, Homo sapiens
  source 1..17: mol_type = genomic RNA
gcccccataggcagatc

SEQ ID NO: 7129 - RNA, 17 nt, Homo sapiens
  source 1..17: mol_type = genomic RNA
cccccataggcagatcc

SEQ ID NO: 7130 - RNA, 17 nt, Homo sapiens
  source 1..17: mol_type = genomic RNA
ccccataggcagatcca

SEQ ID NO: 7131 - RNA, 17 nt, Homo sapiens
  source 1..17: mol_type = genomic RNA
cccataggcagatccaa

SEQ ID NO: 7132 - RNA, 17 nt, Homo sapiens
  source 1..17: mol_type = genomic RNA
ccataggcagatccaag

SEQ ID NO: 7133 - RNA, 17 nt, Homo sapiens
  source 1..17: mol_type = genomic RNA
cataggcagatccaaga

SEQ ID NO: 7134 - RNA, 17 nt, Homo sapiens
  source 1..17: mol_type = genomic RNA
ataggcagatccaagac

SEQ ID NO: 7135 - RNA, 17 nt, Homo sapiens
  source 1..17: mol_type = genomic RNA
taggcagatccaagaca

SEQ ID NO: 7136 - RNA, 17 nt, Homo sapiens
  source 1..17: mol_type = genomic RNA
aggcagatccaagacaa

SEQ ID NO: 7137 - RNA, 17 nt, Homo sapiens
  source 1..17: mol_type = genomic RNA
ggcagatccaagacaag

SEQ ID NO: 7138 - RNA, 17 nt, Homo sapiens
  source 1..17: mol_type = genomic RNA
gcagatccaagacaaga

SEQ ID NO: 7139 - RNA, 17 nt, Homo sapiens
  source 1..17: mol_type = genomic RNA
cagatccaagacaagag

SEQ ID NO: 7140 - RNA, 17 nt, Homo sapiens
  source 1..17: mol_type = genomic RNA
agatccaagacaagagt

SEQ ID NO: 7141 - RNA, 17 nt, Homo sapiens
  source 1..17: mol_type = genomic RNA
gatccaagacaagagtc

SEQ ID NO: 7142 - RNA, 17 nt, Homo sapiens
  source 1..17: mol_type = genomic RNA
atccaagacaagagtcc

SEQ ID NO: 7143 - RNA, 17 nt, Homo sapiens
  source 1..17: mol_type = genomic RNA
tccaagacaagagtcca

SEQ ID NO: 7144 - RNA, 17 nt, Homo sapiens
  source 1..17: mol_type = genomic RNA
ccaagacaagagtccat

SEQ ID NO: 7145 - RNA, 17 nt, Homo sapiens
  source 1..17: mol_type = genomic RNA
caagacaagagtccatc

SEQ ID NO: 7146 - RNA, 17 nt, Homo sapiens
  source 1..17: mol_type = genomic RNA
aagacaagagtccatca

SEQ ID NO: 7147 - RNA, 17 nt, Homo sapiens
  source 1..17: mol_type = genomic RNA
agacaagagtccatcac

SEQ ID NO: 7148 - RNA, 17 nt, Homo sapiens
  source 1..17: mol_type = genomic RNA
gacaagagtccatcacc

SEQ ID NO: 7149 - RNA, 17 nt, Homo sapiens
  source 1..17: mol_type = genomic RNA
acaagagtccatcacct

SEQ ID NO: 7150 - RNA, 17 nt, Homo sapiens
  source 1..17: mol_type = genomic RNA
caagagtccatcacctg

SEQ ID NO: 7151 - RNA, 17 nt, Homo sapiens
  source 1..17: mol_type = genomic RNA
aagagtccatcacctgg

SEQ ID NO: 7152 - RNA, 17 nt, Homo sapiens
  source 1..17: mol_type = genomic RNA
agagtccatcacctggg

SEQ ID NO: 7153 - RNA, 17 nt, Homo sapiens
  source 1..17: mol_type = genomic RNA
gagtccatcacctgggt

SEQ ID NO: 7154 - RNA, 17 nt, Homo sapiens
  source 1..17: mol_type = genomic RNA
agtccatcacctgggtg

SEQ ID NO: 7155 - RNA, 17 nt, Homo sapiens
  source 1..17: mol_type = genomic RNA
gggtgatcagtgcagaa

SEQ ID NO: 7156 - RNA, 17 nt, Homo sapiens
  source 1..17: mol_type = genomic RNA
ggtgatcagtgcagaaa

SEQ ID NO: 7157 - RNA, 17 nt, Homo sapiens
  source 1..17: mol_type = genomic RNA
gtgatcagtgcagaaat

SEQ ID NO: 7158 - RNA, 17 nt, Homo sapiens
  source 1..17: mol_type = genomic RNA
tgatcagtgcagaaata

SEQ ID NO: 7159 - RNA, 17 nt, Homo sapiens
  source 1..17: mol_type = genomic RNA
tcagtgcagaaatatgc

SEQ ID NO: 7160 - RNA, 17 nt, Homo sapiens
  source 1..17: mol_type = genomic RNA
cagtgcagaaatatgcc

SEQ ID NO: 7161 - RNA, 17 nt, Homo sapiens
  source 1..17: mol_type = genomic RNA
agtgcagaaatatgcca

SEQ ID NO: 7162 - RNA, 17 nt, Homo sapiens
  source 1..17: mol_type = genomic RNA
gtgcagaaatatgccac

SEQ ID NO: 7163 - RNA, 17 nt, Homo sapiens
  source 1..17: mol_type = genomic RNA
tgcagaaatatgccaca

SEQ ID NO: 7164 - RNA, 17 nt, Homo sapiens
  source 1..17: mol_type = genomic RNA
gcagaaatatgccacaa

SEQ ID NO: 7165 - RNA, 17 nt, Homo sapiens
  source 1..17: mol_type = genomic RNA
cagaaatatgccacaat

SEQ ID NO: 7166 - RNA, 17 nt, Homo sapiens
  source 1..17: mol_type = genomic RNA
agaaatatgccacaatg

SEQ ID NO: 7167 - RNA, 17 nt, Homo sapiens
  source 1..17: mol_type = genomic RNA
gaaatatgccacaatgc

SEQ ID NO: 7168 - RNA, 17 nt, Homo sapiens
  source 1..17: mol_type = genomic RNA
aaatatgccacaatgcc

SEQ ID NO: 7169 - RNA, 17 nt, Homo sapiens
  source 1..17: mol_type = genomic RNA
aatatgccacaatgccg

SEQ ID NO: 7170 - RNA, 17 nt, Homo sapiens
  source 1..17: mol_type = genomic RNA
atatgccacaatgccgc

SEQ ID NO: 7171 - RNA, 17 nt, Homo sapiens
  source 1..17: mol_type = genomic RNA
tatgccacaatgccgcc

SEQ ID NO: 7172 - RNA, 17 nt, Homo sapiens
  source 1..17: mol_type = genomic RNA
atgccacaatgccgcca

SEQ ID NO: 7173 - RNA, 17 nt, Homo sapiens
  source 1..17: mol_type = genomic RNA
tgccacaatgccgccag

SEQ ID NO: 7174 - RNA, 17 nt, Homo sapiens
  source 1..17: mol_type = genomic RNA
gccacaatgccgccagt

SEQ ID NO: 7175 - RNA, 17 nt, Homo sapiens
  source 1..17: mol_type = genomic RNA
ccacaatgccgccagta

SEQ ID NO: 7176 - RNA, 17 nt, Homo sapiens
  source 1..17: mol_type = genomic RNA
cacaatgccgccagtag

SEQ ID NO: 7177 - RNA, 17 nt, Homo sapiens
  source 1..17: mol_type = genomic RNA
acaatgccgccagtagg

SEQ ID NO: 7178 - RNA, 17 nt, Homo sapiens
  source 1..17: mol_type = genomic RNA
caatgccgccagtaggc

SEQ ID NO: 7179 - RNA, 17 nt, Homo sapiens
  source 1..17: mol_type = genomic RNA
aatgccgccagtaggca

SEQ ID NO: 7180 - RNA, 17 nt, Homo sapiens
  source 1..17: mol_type = genomic RNA
atgccgccagtaggcag

SEQ ID NO: 7181 - RNA, 17 nt, Homo sapiens
  source 1..17: mol_type = genomic RNA
tgccgccagtaggcaga

SEQ ID NO: 7182 - RNA, 17 nt, Homo sapiens
  source 1..17: mol_type = genomic RNA
gccgccagtaggcagat

SEQ ID NO: 7183 - RNA, 17 nt, Homo sapiens
  source 1..17: mol_type = genomic RNA
ccgccagtaggcagata

SEQ ID NO: 7184 - RNA, 17 nt, Homo sapiens
  source 1..17: mol_type = genomic RNA
cgccagtaggcagatat

SEQ ID NO: 7185 - RNA, 17 nt, Homo sapiens
  source 1..17: mol_type = genomic RNA
gccagtaggcagatata

SEQ ID NO: 7186 - RNA, 17 nt, Homo sapiens
  source 1..17: mol_type = genomic RNA
ccagtaggcagatatag

SEQ ID NO: 7187 - RNA, 17 nt, Homo sapiens
  source 1..17: mol_type = genomic RNA
cagtaggcagatataga

SEQ ID NO: 7188 - RNA, 17 nt, Homo sapiens
  source 1..17: mol_type = genomic RNA
agtaggcagatatagac

SEQ ID NO: 7189 - RNA, 17 nt, Homo sapiens
  source 1..17: mol_type = genomic RNA
gtaggcagatatagaca

SEQ ID NO: 7190 - RNA, 17 nt, Homo sapiens
  source 1..17: mol_type = genomic RNA
taggcagatatagacaa

SEQ ID NO: 7191 - RNA, 17 nt, Homo sapiens
  source 1..17: mol_type = genomic RNA
aggcagatatagacaag

SEQ ID NO: 7192 - RNA, 17 nt, Homo sapiens
  source 1..17: mol_type = genomic RNA
ggcagatatagacaaga

SEQ ID NO: 7193 - RNA, 17 nt, Homo sapiens
  source 1..17: mol_type = genomic RNA
gcagatatagacaagag

SEQ ID NO: 7194 - RNA, 17 nt, Homo sapiens
  source 1..17: mol_type = genomic RNA
cagatatagacaagagt

SEQ ID NO: 7195 - RNA, 17 nt, Homo sapiens
  source 1..17: mol_type = genomic RNA
agagttacatcacctgc

SEQ ID NO: 7196 - RNA, 17 nt, Homo sapiens
  source 1..17: mol_type = genomic RNA
gagttacatcacctgcg

SEQ ID NO: 7197 - RNA, 17 nt, Homo sapiens
  source 1..17: mol_type = genomic RNA
agttacatcacctgcgt

SEQ ID NO: 7198 - RNA, 17 nt, Homo sapiens
  source 1..17: mol_type = genomic RNA
gttacatcacctgcgtg

SEQ ID NO: 7199 - RNA, 17 nt, Homo sapiens
  source 1..17: mol_type = genomic RNA
ttacatcacctgcgtga

SEQ ID NO: 7200 - RNA, 17 nt, Homo sapiens
  source 1..17: mol_type = genomic RNA
tacatcacctgcgtgat

SEQ ID NO: 7201 - RNA, 17 nt, Homo sapiens
  source 1..17: mol_type = genomic RNA
acatcacctgcgtgatc

SEQ ID NO: 7202 - RNA, 17 nt, Homo sapiens
  source 1..17: mol_type = genomic RNA
catcacctgcgtgatca

SEQ ID NO: 7203 - RNA, 17 nt, Homo sapiens
  source 1..17: mol_type = genomic RNA
atcacctgcgtgatcac

SEQ ID NO: 7204 - RNA, 17 nt, Homo sapiens
  source 1..17: mol_type = genomic RNA
tcacctgcgtgatcact

SEQ ID NO: 7205 - RNA, 17 nt, Homo sapiens
  source 1..17: mol_type = genomic RNA
cacctgcgtgatcactg

SEQ ID NO: 7206 - RNA, 17 nt, Homo sapiens
  source 1..17: mol_type = genomic RNA
acctgcgtgatcactgc

SEQ ID NO: 7207 - RNA, 17 nt, Homo sapiens
  source 1..17: mol_type = genomic RNA
cctgcgtgatcactgca

SEQ ID NO: 7208 - RNA, 17 nt, Homo sapiens
  source 1..17: mol_type = genomic RNA
ctgcgtgatcactgcag

SEQ ID NO: 7209 - RNA, 17 nt, Homo sapiens
  source 1..17: mol_type = genomic RNA
tgcgtgatcactgcaga

SEQ ID NO: 7210 - RNA, 17 nt, Homo sapiens
  source 1..17: mol_type = genomic RNA
gcgtgatcactgcagag

SEQ ID NO: 7211 - RNA, 17 nt, Homo sapiens
  source 1..17: mol_type = genomic RNA
cgtgatcactgcagaga

SEQ ID NO: 7212 - RNA, 17 nt, Homo sapiens
  source 1..17: mol_type = genomic RNA
gtgatcactgcagagat

SEQ ID NO: 7213 - RNA, 17 nt, Homo sapiens
  source 1..17: mol_type = genomic RNA
tgatcactgcagagata

SEQ ID NO: 7214 - RNA, 17 nt, Homo sapiens
  source 1..17: mol_type = genomic RNA
gatcactgcagagatat

SEQ ID NO: 7215 - RNA, 17 nt, Homo sapiens
  source 1..17: mol_type = genomic RNA
atcactgcagagatata

SEQ ID NO: 7216 - RNA, 17 nt, Homo sapiens
  source 1..17: mol_type = genomic RNA
tcactgcagagatatat

SEQ ID NO: 7217 - RNA, 17 nt, Homo sapiens
  source 1..17: mol_type = genomic RNA
cactgcagagatatatc

SEQ ID NO: 7218 - RNA, 17 nt, Homo sapiens
  source 1..17: mol_type = genomic RNA
actgcagagatatatca

SEQ ID NO: 7219 - RNA, 17 nt, Homo sapiens
  source 1..17: mol_type = genomic RNA
ctgcagagatatatcac

SEQ ID NO: 7220 - RNA, 17 nt, Homo sapiens
  source 1..17: mol_type = genomic RNA
tgcagagatatatcaca

SEQ ID NO: 7221 - RNA, 17 nt, Homo sapiens
  source 1..17: mol_type = genomic RNA
agatatatcacaatgcc

SEQ ID NO: 7222 - RNA, 17 nt, Homo sapiens
  source 1..17: mol_type = genomic RNA
gatatatcacaatgccc

SEQ ID NO: 7223 - RNA, 17 nt, Homo sapiens
  source 1..17: mol_type = genomic RNA
atatatcacaatgcccc

SEQ ID NO: 7224 - RNA, 17 nt, Homo sapiens
  source 1..17: mol_type = genomic RNA
tatatcacaatgcccct

SEQ ID NO: 7225 - RNA, 17 nt, Homo sapiens
  source 1..17: mol_type = genomic RNA
atatcacaatgcccctg

SEQ ID NO: 7226 - RNA, 17 nt, Homo sapiens
  source 1..17: mol_type = genomic RNA
tatcacaatgcccctgt

SEQ ID NO: 7227 - RNA, 17 nt, Homo sapiens
  source 1..17: mol_type = genomic RNA
atcacaatgcccctgta

SEQ ID NO: 7228 - RNA, 17 nt, Homo sapiens
  source 1..17: mol_type = genomic RNA
gagcctagacaagagtc

SEQ ID NO: 7229 - RNA, 17 nt, Homo sapiens
  source 1..17: mol_type = genomic RNA
agcctagacaagagtcc

SEQ ID NO: 7230 - RNA, 17 nt, Homo sapiens
  source 1..17: mol_type = genomic RNA
gcctagacaagagtccc

SEQ ID NO: 7231 - RNA, 17 nt, Homo sapiens
  source 1..17: mol_type = genomic RNA
cctagacaagagtccca

SEQ ID NO: 7232 - RNA, 17 nt, Homo sapiens
  source 1..17: mol_type = genomic RNA
ctagacaagagtcccat

SEQ ID NO: 7233 - RNA, 17 nt, Homo sapiens
  source 1..17: mol_type = genomic RNA
tagacaagagtcccatc

SEQ ID NO: 7234 - RNA, 17 nt, Homo sapiens
  source 1..17: mol_type = genomic RNA
agacaagagtcccatca

SEQ ID NO: 7235 - RNA, 17 nt, Homo sapiens
  source 1..17: mol_type = genomic RNA
gacaagagtcccatcac

SEQ ID NO: 7236 - RNA, 17 nt, Homo sapiens
  source 1..17: mol_type = genomic RNA
acaagagtcccatcacc

SEQ ID NO: 7237 - RNA, 17 nt, Homo sapiens
  source 1..17: mol_type = genomic RNA
caagagtcccatcacct

SEQ ID NO: 7238 - RNA, 17 nt, Homo sapiens
  source 1..17: mol_type = genomic RNA
ggtgatcagtgcagagt

SEQ ID NO: 7239 - RNA, 17 nt, Homo sapiens
  source 1..17: mol_type = genomic RNA
gtgatcagtgcagagtt

SEQ ID NO: 7240 - RNA, 17 nt, Homo sapiens
  source 1..17: mol_type = genomic RNA
tgatcagtgcagagtta

SEQ ID NO: 7241 - RNA, 17 nt, Homo sapiens
  source 1..17: mol_type = genomic RNA
tcagtgcagagttatgt

SEQ ID NO: 7242 - RNA, 17 nt, Homo sapiens
  source 1..17: mol_type = genomic RNA
cagtgcagagttatgtc

SEQ ID NO: 7243 - RNA, 17 nt, Homo sapiens
  source 1..17: mol_type = genomic RNA
agtgcagagttatgtca

SEQ ID NO: 7244 - RNA, 17 nt, Homo sapiens
  source 1..17: mol_type = genomic RNA
gtgcagagttatgtcac

SEQ ID NO: 7245 - RNA, 17 nt, Homo sapiens
  source 1..17: mol_type = genomic RNA
tgcagagttatgtcaca

SEQ ID NO: 7246 - RNA, 17 nt, Homo sapiens
  source 1..17: mol_type = genomic RNA
agttatgtcacaatgcc

SEQ ID NO: 7247 - RNA, 17 nt, Homo sapiens
  source 1..17: mol_type = genomic RNA
gttatgtcacaatgccc

SEQ ID NO: 7248 - RNA, 17 nt, Homo sapiens
  source 1..17: mol_type = genomic RNA
ttatgtcacaatgcccc

SEQ ID NO: 7249 - RNA, 17 nt, Homo sapiens
  source 1..17: mol_type = genomic RNA
tatgtcacaatgccccc

SEQ ID NO: 7250 - RNA, 17 nt, Homo sapiens
  source 1..17: mol_type = genomic RNA
atgtcacaatgccccct

SEQ ID NO: 7251 - RNA, 17 nt, Homo sapiens
  source 1..17: mol_type = genomic RNA
tgtcacaatgccccctt

SEQ ID NO: 7252 - RNA, 17 nt, Homo sapiens
  source 1..17: mol_type = genomic RNA
gtcacaatgcccccttt

SEQ ID NO: 7253 - RNA, 17 nt, Homo sapiens
  source 1..17: mol_type = genomic RNA
tcacaatgccccctttt

SEQ ID NO: 7254 - RNA, 17 nt, Homo sapiens
  source 1..17: mol_type = genomic RNA
cacaatgcccccttttg

SEQ ID NO: 7255 - RNA, 17 nt, Homo sapiens
  source 1..17: mol_type = genomic RNA
acaatgcccccttttgg

SEQ ID NO: 7256 - RNA, 17 nt, Homo sapiens
  source 1..17: mol_type = genomic RNA
caatgcccccttttggc

SEQ ID NO: 7257 - RNA, 17 nt, Homo sapiens
  source 1..17: mol_type = genomic RNA
aatgcccccttttggca

SEQ ID NO: 7258 - RNA, 17 nt, Homo sapiens
  source 1..17: mol_type = genomic RNA
atgcccccttttggcag

SEQ ID NO: 7259 - RNA, 17 nt, Homo sapiens
  source 1..17: mol_type = genomic RNA
tgcccccttttggcaga

SEQ ID NO: 7260 - RNA, 17 nt, Homo sapiens
  source 1..17: mol_type = genomic RNA
gcccccttttggcagag

SEQ ID NO: 7261 - RNA, 17 nt, Homo sapiens
  source 1..17: mol_type = genomic RNA
cccccttttggcagagc

SEQ ID NO: 7262 - RNA, 17 nt, Homo sapiens
  source 1..17: mol_type = genomic RNA
ccccttttggcagagcc

SEQ ID NO: 7263 - RNA, 17 nt, Homo sapiens
  source 1..17: mol_type = genomic RNA
cccttttggcagagcct

SEQ ID NO: 7264 - RNA, 17 nt, Homo sapiens
  source 1..17: mol_type = genomic RNA
ccttttggcagagccta

SEQ ID NO: 7265 - RNA, 17 nt, Homo sapiens
  source 1..17: mol_type = genomic RNA
cttttggcagagcctag

SEQ ID NO: 7266 - RNA, 17 nt, Homo sapiens
  source 1..17: mol_type = genomic RNA
ttttggcagagcctaga

SEQ ID NO: 7267 - RNA, 17 nt, Homo sapiens
  source 1..17: mol_type = genomic RNA
tttggcagagcctagac

SEQ ID NO: 7268 - RNA, 17 nt, Homo sapiens
  source 1..17: mol_type = genomic RNA
ttggcagagcctagaca

SEQ ID NO: 7269 - RNA, 17 nt, Homo sapiens
  source 1..17: mol_type = genomic RNA
tggcagagcctagacaa

SEQ ID NO: 7270 - RNA, 17 nt, Homo sapiens
  source 1..17: mol_type = genomic RNA
gcagagcctagacaagg

SEQ ID NO: 7271 - RNA, 17 nt, Homo sapiens
  source 1..17: mol_type = genomic RNA
cagagcctagacaaggg

SEQ ID NO: 7272 - RNA, 17 nt, Homo sapiens
  source 1..17: mol_type = genomic RNA
agagcctagacaagggt

SEQ ID NO: 7273 - RNA, 17 nt, Homo sapiens
  source 1..17: mol_type = genomic RNA
gagcctagacaagggtt

SEQ ID NO: 7274 - RNA, 17 nt, Homo sapiens
  source 1..17: mol_type = genomic RNA
agcctagacaagggtta

SEQ ID NO: 7275 - RNA, 17 nt, Homo sapiens
  source 1..17: mol_type = genomic RNA
gcctagacaagggttac

SEQ ID NO: 7276 - RNA, 17 nt, Homo sapiens
  source 1..17: mol_type = genomic RNA
cctagacaagggttaca

SEQ ID NO: 7277 - RNA, 17 nt, Homo sapiens
  source 1..17: mol_type = genomic RNA
ctagacaagggttacat

SEQ ID NO: 7278 - RNA, 17 nt, Homo sapiens
  source 1..17: mol_type = genomic RNA
tagacaagggttacatc

SEQ ID NO: 7279 - RNA, 17 nt, Homo sapiens
  source 1..17: mol_type = genomic RNA
agacaagggttacatca

SEQ ID NO: 7280 - RNA, 17 nt, Homo sapiens
  source 1..17: mol_type = genomic RNA
agggttacatcacctgg

SEQ ID NO: 7281 - RNA, 17 nt, Homo sapiens
  source 1..17: mol_type = genomic RNA
gggttacatcacctggg

SEQ ID NO: 7282 - RNA, 17 nt, Homo sapiens
  source 1..17: mol_type = genomic RNA
ggttacatcacctgggt

SEQ ID NO: 7283 - RNA, 17 nt, Homo sapiens
  source 1..17: mol_type = genomic RNA
atatgtcacaatgtccc

SEQ ID NO: 7284 - RNA, 17 nt, Homo sapiens
  source 1..17: mol_type = genomic RNA
tatgtcacaatgtccct

SEQ ID NO: 7285 - RNA, 17 nt, Homo sapiens
  source 1..17: mol_type = genomic RNA
atgtcacaatgtccctg

SEQ ID NO: 7286 - RNA, 17 nt, Homo sapiens
  source 1..17: mol_type = genomic RNA
tgtcacaatgtccctgt

SEQ ID NO: 7287 - RNA, 17 nt, Homo sapiens
  source 1..17: mol_type = genomic RNA
gtcacaatgtccctgta

SEQ ID NO: 7288 - RNA, 17 nt, Homo sapiens
  source 1..17: mol_type = genomic RNA
tcacaatgtccctgtag

SEQ ID NO: 7289 - RNA, 17 nt, Homo sapiens
  source 1..17: mol_type = genomic RNA
cacaatgtccctgtagc

SEQ ID NO: 7290 - RNA, 17 nt, Homo sapiens
  source 1..17: mol_type = genomic RNA
acaatgtccctgtagcc

SEQ ID NO: 7291 - RNA, 17 nt, Homo sapiens
  source 1..17: mol_type = genomic RNA
caatgtccctgtagcca

SEQ ID NO: 7292 - RNA, 17 nt, Homo sapiens
  source 1..17: mol_type = genomic RNA
aatgtccctgtagccat

SEQ ID NO: 7293 - RNA, 17 nt, Homo sapiens
  source 1..17: mol_type = genomic RNA
atgtccctgtagccata

SEQ ID NO: 7294 - RNA, 17 nt, Homo sapiens
  source 1..17: mol_type = genomic RNA
tgtccctgtagccatat

SEQ ID NO: 7295 - RNA, 17 nt, Homo sapiens
  source 1..17: mol_type = genomic RNA
gtccctgtagccatatc

SEQ ID NO: 7296 - RNA, 17 nt, Homo sapiens
  source 1..17: mol_type = genomic RNA
tccctgtagccatatcc

SEQ ID NO: 7297 - RNA, 17 nt, Homo sapiens
  source 1..17: mol_type = genomic RNA
ccctgtagccatatcct

SEQ ID NO: 7298 - RNA, 17 nt, Homo sapiens
  source 1..17: mol_type = genomic RNA
cctgtagccatatcctt

SEQ ID NO: 7299 - RNA, 17 nt, Homo sapiens
  source 1..17: mol_type = genomic RNA
tgtagccatatccttga

SEQ ID NO: 7300 - RNA, 17 nt, Homo sapiens
  source 1..17: mol_type = genomic RNA
gtagccatatccttgac

SEQ ID NO: 7301 - RNA, 17 nt, Homo sapiens
  source 1..17: mol_type = genomic RNA
tagccatatccttgaca

SEQ ID NO: 7302 - RNA, 17 nt, Homo sapiens
  source 1..17: mol_type = genomic RNA
agccatatccttgacaa

SEQ ID NO: 7303 - RNA, 17 nt, Homo sapiens
  source 1..17: mol_type = genomic RNA
gccatatccttgacaaa

SEQ ID NO: 7304 - RNA, 17 nt, Homo sapiens
  source 1..17: mol_type = genomic RNA
tccttgacaaaagtgac

SEQ ID NO: 7305 - RNA, 17 nt, Homo sapiens
  source 1..17: mol_type = genomic RNA
ccttgacaaaagtgaca

SEQ ID NO: 7306 - RNA, 17 nt, Homo sapiens
  source 1..17: mol_type = genomic RNA
tgacaaaagtgacatca

SEQ ID NO: 7307 - RNA, 17 nt, Homo sapiens
  source 1..17: mol_type = genomic RNA
gacaaaagtgacatcac

SEQ ID NO: 7308 - RNA, 17 nt, Homo sapiens
  source 1..17: mol_type = genomic RNA
acaaaagtgacatcacc

SEQ ID NO: 7309 - RNA, 17 nt, Homo sapiens
  source 1..17: mol_type = genomic RNA
caaaagtgacatcacct

SEQ ID NO: 7310 - RNA, 17 nt, Homo sapiens
  source 1..17: mol_type = genomic RNA
aaaagtgacatcacctg

SEQ ID NO: 7311 - RNA, 17 nt, Homo sapiens
  source 1..17: mol_type = genomic RNA
aaagtgacatcacctgg

SEQ ID NO: 7312 - RNA, 17 nt, Homo sapiens
  source 1..17: mol_type = genomic RNA
aagtgacatcacctggg

SEQ ID NO: 7313 - RNA, 17 nt, Homo sapiens
  source 1..17: mol_type = genomic RNA
agtgacatcacctgggt

SEQ ID NO: 7314 - RNA, 17 nt, Homo sapiens
  source 1..17: mol_type = genomic RNA
gtgacatcacctgggtg

SEQ ID NO: 7315 - RNA, 17 nt, Homo sapiens
  source 1..17: mol_type = genomic RNA
tgacatcacctgggtga

SEQ ID NO: 7316 - RNA, 17 nt, Homo sapiens
  source 1..17: mol_type = genomic RNA
gacatcacctgggtgat

SEQ ID NO: 7317 - RNA, 17 nt, Homo sapiens
  source 1..17: mol_type = genomic RNA
acctgggtgatcagtgt

SEQ ID NO: 7318 - RNA, 17 nt, Homo sapiens
  source 1..17: mol_type = genomic RNA
cctgggtgatcagtgtg

SEQ ID NO: 7319 - RNA, 17 nt, Homo sapiens
  source 1..17: mol_type = genomic RNA
ctgggtgatcagtgtgg

SEQ ID NO: 7320 - RNA, 17 nt, Homo sapiens
  source 1..17: mol_type = genomic RNA
tgggtgatcagtgtgga

SEQ ID NO: 7321 - RNA, 17 nt, Homo sapiens
  source 1..17: mol_type = genomic RNA
gggtgatcagtgtggag

SEQ ID NO: 7322 - RNA, 17 nt, Homo sapiens
  source 1..17: mol_type = genomic RNA
ggtgatcagtgtggaga

SEQ ID NO: 7323 - RNA, 17 nt, Homo sapiens
  source 1..17: mol_type = genomic RNA
gtgatcagtgtggagat

SEQ ID NO: 7324 - RNA, 17 nt, Homo sapiens
  source 1..17: mol_type = genomic RNA
tgatcagtgtggagata

SEQ ID NO: 7325 - RNA, 17 nt, Homo sapiens
  source 1..17: mol_type = genomic RNA
gatcagtgtggagatat

SEQ ID NO: 7326 - RNA, 17 nt, Homo sapiens
  source 1..17: mol_type = genomic RNA
atcagtgtggagatatg

SEQ ID NO: 7327 - RNA, 17 nt, Homo sapiens
  source 1..17: mol_type = genomic RNA
tcagtgtggagatatgt

SEQ ID NO: 7328 - RNA, 17 nt, Homo sapiens
  source 1..17: mol_type = genomic RNA
cagtgtggagatatgtc

SEQ ID NO: 7329 - RNA, 17 nt, Homo sapiens
  source 1..17: mol_type = genomic RNA
agtgtggagatatgtca

SEQ ID NO: 7330 - RNA, 17 nt, Homo sapiens
  source 1..17: mol_type = genomic RNA
gtgtggagatatgtcac

SEQ ID NO: 7331 - RNA, 17 nt, Homo sapiens
  source 1..17: mol_type = genomic RNA
tgtggagatatgtcaca

SEQ ID NO: 7332 - RNA, 17 nt, Homo sapiens
  source 1..17: mol_type = genomic RNA
gtggagatatgtcacaa

SEQ ID NO: 7333 - RNA, 17 nt, Homo sapiens
  source 1..17: mol_type = genomic RNA
tggagatatgtcacaat

SEQ ID NO: 7334 - RNA, 17 nt, Homo sapiens
  source 1..17: mol_type = genomic RNA
ggagatatgtcacaatg

SEQ ID NO: 7335 - RNA, 17 nt, Homo sapiens
  source 1..17: mol_type = genomic RNA
tgtcacaatgtctccag

SEQ ID NO: 7336 - RNA, 17 nt, Homo sapiens
  source 1..17: mol_type = genomic RNA
gtcacaatgtctccagt

SEQ ID NO: 7337 - RNA, 17 nt, Homo sapiens
  source 1..17: mol_type = genomic RNA
cacaatgtctccagtag

SEQ ID NO: 7338 - RNA, 17 nt, Homo sapiens
  source 1..17: mol_type = genomic RNA
acaatgtctccagtagg

SEQ ID NO: 7339 - RNA, 17 nt, Homo sapiens
  source 1..17: mol_type = genomic RNA
caatgtctccagtaggc

SEQ ID NO: 7340 - RNA, 17 nt, Homo sapiens
  source 1..17: mol_type = genomic RNA
aatgtctccagtaggca

SEQ ID NO: 7341 - RNA, 17 nt, Homo sapiens
  source 1..17: mol_type = genomic RNA
atgtctccagtaggcag

SEQ ID NO: 7342 - RNA, 17 nt, Homo sapiens
  source 1..17: mol_type = genomic RNA
tgtctccagtaggcaga

SEQ ID NO: 7343 - RNA, 17 nt, Homo sapiens
  source 1..17: mol_type = genomic RNA
gtctccagtaggcagag

SEQ ID NO: 7344 - RNA, 17 nt, Homo sapiens
  source 1..17: mol_type = genomic RNA
tctccagtaggcagagc

SEQ ID NO: 7345 - RNA, 17 nt, Homo sapiens
  source 1..17: mol_type = genomic RNA
ctccagtaggcagagcc

SEQ ID NO: 7346 - RNA, 17 nt, Homo sapiens
  source 1..17: mol_type = genomic RNA
tccagtaggcagagcct

SEQ ID NO: 7347 - RNA, 17 nt, Homo sapiens
  source 1..17: mol_type = genomic RNA
ccagtaggcagagccta

SEQ ID NO: 7348 - RNA, 17 nt, Homo sapiens
  source 1..17: mol_type = genomic RNA
cagtaggcagagcctag

SEQ ID NO: 7349 - RNA, 17 nt, Homo sapiens
  source 1..17: mol_type = genomic RNA
agtaggcagagcctaga

SEQ ID NO: 7350 - RNA, 17 nt, Homo sapiens
  source 1..17: mol_type = genomic RNA
tcacctgggtgatcagg

SEQ ID NO: 7351 - RNA, 17 nt, Homo sapiens
  source 1..17: mol_type = genomic RNA
cacctgggtgatcaggg

SEQ ID NO: 7352 - RNA, 17 nt, Homo sapiens
  source 1..17: mol_type = genomic RNA
cctgggtgatcagggca

SEQ ID NO: 7353 - RNA, 17 nt, Homo sapiens
  source 1..17: mol_type = genomic RNA
ctgggtgatcagggcag

SEQ ID NO: 7354 - RNA, 17 nt, Homo sapiens
  source 1..17: mol_type = genomic RNA
tgggtgatcagggcaga

SEQ ID NO: 7355 - RNA, 17 nt, Homo sapiens
  source 1..17: mol_type = genomic RNA
gggtgatcagggcagag

SEQ ID NO: 7356 - RNA, 17 nt, Homo sapiens
  source 1..17: mol_type = genomic RNA
ggtgatcagggcagaga

SEQ ID NO: 7357 - RNA, 17 nt, Homo sapiens
  source 1..17: mol_type = genomic RNA
gtgatcagggcagagat

SEQ ID NO: 7358 - RNA, 17 nt, Homo sapiens
  source 1..17: mol_type = genomic RNA
tgatcagggcagagata

SEQ ID NO: 7359 - RNA, 17 nt, Homo sapiens
  source 1..17: mol_type = genomic RNA
gatcagggcagagatat

SEQ ID NO: 7360 - RNA, 17 nt, Homo sapiens
  source 1..17: mol_type = genomic RNA
atcagggcagagatatg

SEQ ID NO: 7361 - RNA, 17 nt, Homo sapiens
  source 1..17: mol_type = genomic RNA
tcagggcagagatatgt

SEQ ID NO: 7362 - RNA, 17 nt, Homo sapiens
  source 1..17: mol_type = genomic RNA
cagggcagagatatgtc

SEQ ID NO: 7363 - RNA, 17 nt, Homo sapiens
  source 1..17: mol_type = genomic RNA
agggcagagatatgtca

SEQ ID NO: 7364 - RNA, 17 nt, Homo sapiens
  source 1..17: mol_type = genomic RNA
gggcagagatatgtcac

SEQ ID NO: 7365 - RNA, 17 nt, Homo sapiens
  source 1..17: mol_type = genomic RNA
ggcagagatatgtcaca

SEQ ID NO: 7366 - RNA, 17 nt, Homo sapiens
  source 1..17: mol_type = genomic RNA
gagatatgtcacaatgc

SEQ ID NO: 7367 - RNA, 17 nt, Homo sapiens
  source 1..17: mol_type = genomic RNA
agatatgtcacaatgcc

SEQ ID NO: 7368 - RNA, 17 nt, Homo sapiens
  source 1..17: mol_type = genomic RNA
gatatgtcacaatgccc

SEQ ID NO: 7369 - RNA, 17 nt, Homo sapiens
  source 1..17: mol_type = genomic RNA
atatgtcacaatgcccc

SEQ ID NO: 7370 - RNA, 17 nt, Homo sapiens
  source 1..17: mol_type = genomic RNA
tgtcacaatgccccctg

SEQ ID NO: 7371 - RNA, 17 nt, Homo sapiens
  source 1..17: mol_type = genomic RNA
gtcacaatgccccctgt

SEQ ID NO: 7372 - RNA, 17 nt, Homo sapiens
  source 1..17: mol_type = genomic RNA
tcacaatgccccctgta

SEQ ID NO: 7373 - RNA, 17 nt, Homo sapiens
  source 1..17: mol_type = genomic RNA
cacaatgccccctgtaa

SEQ ID NO: 7374 - RNA, 17 nt, Homo sapiens
  source 1..17: mol_type = genomic RNA
acaatgccccctgtaag

SEQ ID NO: 7375 - RNA, 17 nt, Homo sapiens
  source 1..17: mol_type = genomic RNA
caatgccccctgtaagc

SEQ ID NO: 7376 - RNA, 17 nt, Homo sapiens
  source 1..17: mol_type = genomic RNA
aatgccccctgtaagca

SEQ ID NO: 7377 - RNA, 17 nt, Homo sapiens
  source 1..17: mol_type = genomic RNA
atgccccctgtaagcag

SEQ ID NO: 7378 - RNA, 17 nt, Homo sapiens
  source 1..17: mol_type = genomic RNA
tgccccctgtaagcaga

SEQ ID NO: 7379 - RNA, 17 nt, Homo sapiens
  source 1..17: mol_type = genomic RNA
gccccctgtaagcagat

SEQ ID NO: 7380 - RNA, 17 nt, Homo sapiens
  source 1..17: mol_type = genomic RNA
ccccctgtaagcagatc

SEQ ID NO: 7381 - RNA, 17 nt, Homo sapiens
  source 1..17: mol_type = genomic RNA
cccctgtaagcagatcc

SEQ ID NO: 7382 - RNA, 17 nt, Homo sapiens
  source 1..17: mol_type = genomic RNA
ccctgtaagcagatccc

SEQ ID NO: 7383 - RNA, 17 nt, Homo sapiens
  source 1..17: mol_type = genomic RNA
cctgtaagcagatccca

SEQ ID NO: 7384 - RNA, 17 nt, Homo sapiens
  source 1..17: mol_type = genomic RNA
ctgtaagcagatcccag

SEQ ID NO: 7385 - RNA, 17 nt, Homo sapiens
  source 1..17: mol_type = genomic RNA
tgtaagcagatcccaga

SEQ ID NO: 7386 - RNA, 17 nt, Homo sapiens
  source 1..17: mol_type = genomic RNA
gtaagcagatcccagac

SEQ ID NO: 7387 - RNA, 17 nt, Homo sapiens
  source 1..17: mol_type = genomic RNA
taagcagatcccagaca

SEQ ID NO: 7388 - RNA, 17 nt, Homo sapiens
  source 1..17: mol_type = genomic RNA
aagcagatcccagacaa

SEQ ID NO: 7389 - RNA, 17 nt, Homo sapiens
  source 1..17: mol_type = genomic RNA
agcagatcccagacaag

SEQ ID NO: 7390 - RNA, 17 nt, Homo sapiens
  source 1..17: mol_type = genomic RNA
gcagatcccagacaaga

SEQ ID NO: 7391 - RNA, 17 nt, Homo sapiens
  source 1..17: mol_type = genomic RNA
cagatcccagacaagag

SEQ ID NO: 7392 - RNA, 17 nt, Homo sapiens
  source 1..17: mol_type = genomic RNA
agatcccagacaagagt

SEQ ID NO: 7393 - RNA, 17 nt, Homo sapiens
  source 1..17: mol_type = genomic RNA
gatcccagacaagagtt

SEQ ID NO: 7394 - RNA, 17 nt, Homo sapiens
  source 1..17: mol_type = genomic RNA
atcccagacaagagttg

SEQ ID NO: 7395 - RNA, 17 nt, Homo sapiens
  source 1..17: mol_type = genomic RNA
tcccagacaagagttgc

SEQ ID NO: 7396 - RNA, 17 nt, Homo sapiens
  source 1..17: mol_type = genomic RNA
cccagacaagagttgca

SEQ ID NO: 7397 - RNA, 17 nt, Homo sapiens
  source 1..17: mol_type = genomic RNA
ccagacaagagttgcat

SEQ ID NO: 7398 - RNA, 17 nt, Homo sapiens
  source 1..17: mol_type = genomic RNA
cagacaagagttgcatc

SEQ ID NO: 7399 - RNA, 17 nt, Homo sapiens
  source 1..17: mol_type = genomic RNA
agacaagagttgcatca

SEQ ID NO: 7400 - RNA, 17 nt, Homo sapiens
  source 1..17: mol_type = genomic RNA
gacaagagttgcatcac

SEQ ID NO: 7401 - RNA, 17 nt, Homo sapiens
  source 1..17: mol_type = genomic RNA
acaagagttgcatcacc

SEQ ID NO: 7402 - RNA, 17 nt, Homo sapiens
  source 1..17: mol_type = genomic RNA
caagagttgcatcacct

SEQ ID NO: 7403 - RNA, 17 nt, Homo sapiens
  source 1..17: mol_type = genomic RNA
aagagttgcatcacctc

SEQ ID NO: 7404 - RNA, 17 nt, Homo sapiens
  source 1..17: mol_type = genomic RNA
agagttgcatcacctcg

SEQ ID NO: 7405 - RNA, 17 nt, Homo sapiens
  source 1..17: mol_type = genomic RNA
gagttgcatcacctcgg

SEQ ID NO: 7406 - RNA, 17 nt, Homo sapiens
  source 1..17: mol_type = genomic RNA
agttgcatcacctcggt

SEQ ID NO: 7407 - RNA, 17 nt, Homo sapiens
  source 1..17: mol_type = genomic RNA
gttgcatcacctcggtg

SEQ ID NO: 7408 - RNA, 17 nt, Homo sapiens
  source 1..17: mol_type = genomic RNA
ttgcatcacctcggtga

SEQ ID NO: 7409 - RNA, 17 nt, Homo sapiens
  source 1..17: mol_type = genomic RNA
tgcatcacctcggtgat

SEQ ID NO: 7410 - RNA, 17 nt, Homo sapiens
  source 1..17: mol_type = genomic RNA
gcatcacctcggtgatc

SEQ ID NO: 7411 - RNA, 17 nt, Homo sapiens
  source 1..17: mol_type = genomic RNA
catcacctcggtgatca

SEQ ID NO: 7412 - RNA, 17 nt, Homo sapiens
  source 1..17: mol_type = genomic RNA
atcacctcggtgatcag

SEQ ID NO: 7413 - RNA, 17 nt, Homo sapiens
  source 1..17: mol_type = genomic RNA
tcacctcggtgatcagt

SEQ ID NO: 7414 - RNA, 17 nt, Homo sapiens
  source 1..17: mol_type = genomic RNA
cacctcggtgatcagtg

SEQ ID NO: 7415 - RNA, 17 nt, Homo sapiens
  source 1..17: mol_type = genomic RNA
acctcggtgatcagtgc

SEQ ID NO: 7416 - RNA, 17 nt, Homo sapiens
  source 1..17: mol_type = genomic RNA
cctcggtgatcagtgca

SEQ ID NO: 7417 - RNA, 17 nt, Homo sapiens
  source 1..17: mol_type = genomic RNA
ctcggtgatcagtgcag

SEQ ID NO: 7418 - RNA, 17 nt, Homo sapiens
  source 1..17: mol_type = genomic RNA
cggtgatcagtgcagag

SEQ ID NO: 7419 - RNA, 17 nt, Homo sapiens
  source 1..17: mol_type = genomic RNA
cagtgcagagatacgtc

SEQ ID NO: 7420 - RNA, 17 nt, Homo sapiens
  source 1..17: mol_type = genomic RNA
agtgcagagatacgtca

SEQ ID NO: 7421 - RNA, 17 nt, Homo sapiens
  source 1..17: mol_type = genomic RNA
gtgcagagatacgtcac

SEQ ID NO: 7422 - RNA, 17 nt, Homo sapiens
  source 1..17: mol_type = genomic RNA
agagatacgtcacaatg

SEQ ID NO: 7423 - RNA, 17 nt, Homo sapiens
  source 1..17: mol_type = genomic RNA
gagatacgtcacaatgc

SEQ ID NO: 7424 - RNA, 17 nt, Homo sapiens
  source 1..17: mol_type = genomic RNA
agatacgtcacaatgcc

SEQ ID NO: 7425 - RNA, 17 nt, Homo sapiens
  source 1..17: mol_type = genomic RNA
gatacgtcacaatgccc

SEQ ID NO: 7426 - RNA, 17 nt, Homo sapiens
  source 1..17: mol_type = genomic RNA
atacgtcacaatgcccc

SEQ ID NO: 7427 - RNA, 17 nt, Homo sapiens
  source 1..17: mol_type = genomic RNA
tacgtcacaatgcccct

SEQ ID NO: 7428 - RNA, 17 nt, Homo sapiens
  source 1..17: mol_type = genomic RNA
acgtcacaatgcccctg

SEQ ID NO: 7429 - RNA, 17 nt, Homo sapiens
  source 1..17: mol_type = genomic RNA
cgtcacaatgcccctgt

SEQ ID NO: 7430 - RNA, 17 nt, Homo sapiens
  source 1..17: mol_type = genomic RNA
acaagagttacataacc

SEQ ID NO: 7431 - RNA, 17 nt, Homo sapiens
  source 1..17: mol_type = genomic RNA
caagagttacataaccc

SEQ ID NO: 7432 - RNA, 17 nt, Homo sapiens
  source 1..17: mol_type = genomic RNA
aagagttacataaccca

SEQ ID NO: 7433 - RNA, 17 nt, Homo sapiens
  source 1..17: mol_type = genomic RNA
agagttacataacccag

SEQ ID NO: 7434 - RNA, 17 nt, Homo sapiens
  source 1..17: mol_type = genomic RNA
gagttacataacccagg

SEQ ID NO: 7435 - RNA, 17 nt, Homo sapiens
  source 1..17: mol_type = genomic RNA
agttacataacccaggt

SEQ ID NO: 7436 - RNA, 17 nt, Homo sapiens
  source 1..17: mol_type = genomic RNA
gttacataacccaggtg

SEQ ID NO: 7437 - RNA, 17 nt, Homo sapiens
  source 1..17: mol_type = genomic RNA
ttacataacccaggtga

SEQ ID NO: 7438 - RNA, 17 nt, Homo sapiens
  source 1..17: mol_type = genomic RNA
tacataacccaggtgat

SEQ ID NO: 7439 - RNA, 17 nt, Homo sapiens
  source 1..17: mol_type = genomic RNA
acataacccaggtgatc

SEQ ID NO: 7440 - RNA, 17 nt, Homo sapiens
  source 1..17: mol_type = genomic RNA
cataacccaggtgatcc

SEQ ID NO: 7441 - RNA, 17 nt, Homo sapiens
  source 1..17: mol_type = genomic RNA
ataacccaggtgatccg

SEQ ID NO: 7442 - RNA, 17 nt, Homo sapiens
  source 1..17: mol_type = genomic RNA
taacccaggtgatccgt

SEQ ID NO: 7443 - RNA, 17 nt, Homo sapiens
  source 1..17: mol_type = genomic RNA
aacccaggtgatccgta

SEQ ID NO: 7444 - RNA, 17 nt, Homo sapiens
  source 1..17: mol_type = genomic RNA
acccaggtgatccgtac

SEQ ID NO: 7445 - RNA, 17 nt, Homo sapiens
  source 1..17: mol_type = genomic RNA
cccaggtgatccgtaca

SEQ ID NO: 7446 - RNA, 17 nt, Homo sapiens
  source 1..17: mol_type = genomic RNA
ccaggtgatccgtacag

SEQ ID NO: 7447 - RNA, 17 nt, Homo sapiens
  source 1..17: mol_type = genomic RNA
caggtgatccgtacaga

SEQ ID NO: 7448 - RNA, 17 nt, Homo sapiens
  source 1..17: mol_type = genomic RNA
aggtgatccgtacagag

SEQ ID NO: 7449 - RNA, 17 nt, Homo sapiens
  source 1..17: mol_type = genomic RNA
ggtgatccgtacagagt

SEQ ID NO: 7450 - RNA, 17 nt, Homo sapiens
  source 1..17: mol_type = genomic RNA
gtgatccgtacagagtg

SEQ ID NO: 7451 - RNA, 17 nt, Homo sapiens
  source 1..17: mol_type = genomic RNA
tgatccgtacagagtga

SEQ ID NO: 7452 - RNA, 17 nt, Homo sapiens
  source 1..17: mol_type = genomic RNA
gatccgtacagagtgat

SEQ ID NO: 7453 - RNA, 17 nt, Homo sapiens
  source 1..17: mol_type = genomic RNA
atccgtacagagtgatg

SEQ ID NO: 7454 - RNA, 17 nt, Homo sapiens
  source 1..17: mol_type = genomic RNA
tccgtacagagtgatgt

SEQ ID NO: 7455 - RNA, 17 nt, Homo sapiens
  source 1..17: mol_type = genomic RNA
ccgtacagagtgatgtc

SEQ ID NO: 7456 - RNA, 17 nt, Homo sapiens
  source 1..17: mol_type = genomic RNA
cgtacagagtgatgtca

SEQ ID NO: 7457 - RNA, 17 nt, Homo sapiens
  source 1..17: mol_type = genomic RNA
gtacagagtgatgtcac

SEQ ID NO: 7458 - RNA, 17 nt, Homo sapiens
  source 1..17: mol_type = genomic RNA
tacagagtgatgtcaca

SEQ ID NO: 7459 - RNA, 17 nt, Homo sapiens
  source 1..17: mol_type = genomic RNA
acagagtgatgtcacaa

SEQ ID NO: 7460 - RNA, 17 nt, Homo sapiens
  source 1..17: mol_type = genomic RNA
cagagtgatgtcacaac

SEQ ID NO: 7461 - RNA, 17 nt, Homo sapiens
  source 1..17: mol_type = genomic RNA
agagtgatgtcacaacg

SEQ ID NO: 7462 - RNA, 17 nt, Homo sapiens
  source 1..17: mol_type = genomic RNA
gagtgatgtcacaacgc

SEQ ID NO: 7463 - RNA, 17 nt, Homo sapiens
  source 1..17: mol_type = genomic RNA
agtgatgtcacaacgcc

SEQ ID NO: 7464 - RNA, 17 nt, Homo sapiens
  source 1..17: mol_type = genomic RNA
gtgatgtcacaacgccc

SEQ ID NO: 7465 - RNA, 17 nt, Homo sapiens
  source 1..17: mol_type = genomic RNA
tgatgtcacaacgccct

SEQ ID NO: 7466 - RNA, 17 nt, Homo sapiens
  source 1..17: mol_type = genomic RNA
gatgtcacaacgccctc

SEQ ID NO: 7467 - RNA, 17 nt, Homo sapiens
  source 1..17: mol_type = genomic RNA
atgtcacaacgccctct

SEQ ID NO: 7468 - RNA, 17 nt, Homo sapiens
  source 1..17: mol_type = genomic RNA
tgtcacaacgccctctg

SEQ ID NO: 7469 - RNA, 17 nt, Homo sapiens
  source 1..17: mol_type = genomic RNA
gtcacaacgccctctgt

SEQ ID NO: 7470 - RNA, 17 nt, Homo sapiens
  source 1..17: mol_type = genomic RNA
tcacaacgccctctgta

SEQ ID NO: 7471 - RNA, 17 nt, Homo sapiens
  source 1..17: mol_type = genomic RNA
cacaacgccctctgtag

SEQ ID NO: 7472 - RNA, 17 nt, Homo sapiens
  source 1..17: mol_type = genomic RNA
acaacgccctctgtagg

SEQ ID NO: 7473 - RNA, 17 nt, Homo sapiens
  source 1..17: mol_type = genomic RNA
caacgccctctgtaggc

SEQ ID NO: 7474 - RNA, 17 nt, Homo sapiens
  source 1..17: mol_type = genomic RNA
aacgccctctgtaggca

SEQ ID NO: 7475 - RNA, 17 nt, Homo sapiens
  source 1..17: mol_type = genomic RNA
acgccctctgtaggcag

SEQ ID NO: 7476 - RNA, 17 nt, Homo sapiens
  source 1..17: mol_type = genomic RNA
cgccctctgtaggcaga

SEQ ID NO: 7477 - RNA, 17 nt, Homo sapiens
  source 1..17: mol_type = genomic RNA
gccctctgtaggcagag

SEQ ID NO: 7478 - RNA, 17 nt, Homo sapiens
  source 1..17: mol_type = genomic RNA
ccctctgtaggcagaga

SEQ ID NO: 7479 - RNA, 17 nt, Homo sapiens
  source 1..17: mol_type = genomic RNA
cctctgtaggcagagac

SEQ ID NO: 7480 - RNA, 17 nt, Homo sapiens
  source 1..17: mol_type = genomic RNA
ctctgtaggcagagact

SEQ ID NO: 7481 - RNA, 17 nt, Homo sapiens
  source 1..17: mol_type = genomic RNA
tctgtaggcagagacta

SEQ ID NO: 7482 - RNA, 17 nt, Homo sapiens
  source 1..17: mol_type = genomic RNA
ctgtaggcagagactag

SEQ ID NO: 7483 - RNA, 17 nt, Homo sapiens
  source 1..17: mol_type = genomic RNA
tgtaggcagagactaga

SEQ ID NO: 7484 - RNA, 17 nt, Homo sapiens
  source 1..17: mol_type = genomic RNA
gtaggcagagactagaa

SEQ ID NO: 7485 - RNA, 17 nt, Homo sapiens
  source 1..17: mol_type = genomic RNA
taggcagagactagaaa

SEQ ID NO: 7486 - RNA, 17 nt, Homo sapiens
  source 1..17: mol_type = genomic RNA
aggcagagactagaaaa

SEQ ID NO: 7487 - RNA, 17 nt, Homo sapiens
  source 1..17: mol_type = genomic RNA
ggcagagactagaaaag

SEQ ID NO: 7488 - RNA, 17 nt, Homo sapiens
  source 1..17: mol_type = genomic RNA
gcagagactagaaaaga

SEQ ID NO: 7489 - RNA, 17 nt, Homo sapiens
  source 1..17: mol_type = genomic RNA
cagagactagaaaagag

SEQ ID NO: 7490 - RNA, 17 nt, Homo sapiens
  source 1..17: mol_type = genomic RNA
agagactagaaaagagt

SEQ ID NO: 7491 - RNA, 17 nt, Homo sapiens
  source 1..17: mol_type = genomic RNA
gagactagaaaagagtt

SEQ ID NO: 7492 - RNA, 17 nt, Homo sapiens
  source 1..17: mol_type = genomic RNA
gactagaaaagagttac

SEQ ID NO: 7493 - RNA, 17 nt, Homo sapiens
  source 1..17: mol_type = genomic RNA
agagttacattacctgg

SEQ ID NO: 7494 - RNA, 17 nt, Homo sapiens
  source 1..17: mol_type = genomic RNA
gagttacattacctggg

SEQ ID NO: 7495 - RNA, 17 nt, Homo sapiens
  source 1..17: mol_type = genomic RNA
agttacattacctgggt

SEQ ID NO: 7496 - RNA, 17 nt, Homo sapiens
  source 1..17: mol_type = genomic RNA
gttacattacctgggtg

SEQ ID NO: 7497 - RNA, 17 nt, Homo sapiens
  source 1..17: mol_type = genomic RNA
ttacattacctgggtga

SEQ ID NO: 7498 - RNA, 17 nt, Homo sapiens
  source 1..17: mol_type = genomic RNA
tacattacctgggtgat

SEQ ID NO: 7499 - RNA, 17 nt, Homo sapiens
  source 1..17: mol_type = genomic RNA
acattacctgggtgatc

SEQ ID NO: 7500 - RNA, 17 nt, Homo sapiens
  source 1..17: mol_type = genomic RNA
cattacctgggtgatca

SEQ ID NO: 7501 - RNA, 17 nt, Homo sapiens
  source 1..17: mol_type = genomic RNA
attacctgggtgatcag

SEQ ID NO: 7502 - RNA, 17 nt, Homo sapiens
  source 1..17: mol_type = genomic RNA
ttacctgggtgatcagt

SEQ ID NO: 7503 - RNA, 17 nt, Homo sapiens
  source 1..17: mol_type = genomic RNA
tacctgggtgatcagtg

SEQ ID NO: 7504 - RNA, 17 nt, Homo sapiens
  source 1..17: mol_type = genomic RNA
cacaatgccccctgtag

SEQ ID NO: 7505 - RNA, 17 nt, Homo sapiens
  source 1..17: mol_type = genomic RNA
acaatgccccctgtagg

SEQ ID NO: 7506 - RNA, 17 nt, Homo sapiens
  source 1..17: mol_type = genomic RNA
caatgccccctgtaggc

SEQ ID NO: 7507 - RNA, 17 nt, Homo sapiens
  source 1..17: mol_type = genomic RNA
aatgccccctgtaggca

SEQ ID NO: 7508 - RNA, 17 nt, Homo sapiens
  source 1..17: mol_type = genomic RNA
atgccccctgtaggcag

SEQ ID NO: 7509 - RNA, 17 nt, Homo sapiens
  source 1..17: mol_type = genomic RNA
tgccccctgtaggcaga

SEQ ID NO: 7510 - RNA, 17 nt, Homo sapiens
  source 1..17: mol_type = genomic RNA
cccctgtaggcagagca

SEQ ID NO: 7511 - RNA, 17 nt, Homo sapiens
  source 1..17: mol_type = genomic RNA
ccctgtaggcagagcat

SEQ ID NO: 7512 - RNA, 17 nt, Homo sapiens
  source 1..17: mol_type = genomic RNA
cctgtaggcagagcata

SEQ ID NO: 7513 - RNA, 17 nt, Homo sapiens
  source 1..17: mol_type = genomic RNA
ctgtaggcagagcatag

SEQ ID NO: 7514 - RNA, 17 nt, Homo sapiens
  source 1..17: mol_type = genomic RNA
tgtaggcagagcataga

SEQ ID NO: 7515 - RNA, 17 nt, Homo sapiens
  source 1..17: mol_type = genomic RNA
gtaggcagagcatagag

SEQ ID NO: 7516 - RNA, 17 nt, Homo sapiens
  source 1..17: mol_type = genomic RNA
taggcagagcatagaga

SEQ ID NO: 7517 - RNA, 17 nt, Homo sapiens
  source 1..17: mol_type = genomic RNA
aggcagagcatagagaa

SEQ ID NO: 7518 - RNA, 17 nt, Homo sapiens
  source 1..17: mol_type = genomic RNA
ggcagagcatagagaag

SEQ ID NO: 7519 - RNA, 17 nt, Homo sapiens
  source 1..17: mol_type = genomic RNA
gcagagcatagagaaga

SEQ ID NO: 7520 - RNA, 17 nt, Homo sapiens
  source 1..17: mol_type = genomic RNA
cagagcatagagaagag

SEQ ID NO: 7521 - RNA, 17 nt, Homo sapiens
  source 1..17: mol_type = genomic RNA
agagcatagagaagagt

SEQ ID NO: 7522 - RNA, 17 nt, Homo sapiens
  source 1..17: mol_type = genomic RNA
gagcatagagaagagtt

SEQ ID NO: 7523 - RNA, 17 nt, Homo sapiens
  source 1..17: mol_type = genomic RNA
agcatagagaagagttg

SEQ ID NO: 7524 - RNA, 17 nt, Homo sapiens
  source 1..17: mol_type = genomic RNA
gcatagagaagagttgc

SEQ ID NO: 7525 - RNA, 17 nt, Homo sapiens
  source 1..17: mol_type = genomic RNA
catagagaagagttgca

SEQ ID NO: 7526 - RNA, 17 nt, Homo sapiens
  source 1..17: mol_type = genomic RNA
atagagaagagttgcat

SEQ ID NO: 7527 - RNA, 17 nt, Homo sapiens
  source 1..17: mol_type = genomic RNA
tagagaagagttgcatc

SEQ ID NO: 7528 - RNA, 17 nt, Homo sapiens
  source 1..17: mol_type = genomic RNA
agagaagagttgcatca

SEQ ID NO: 7529 - RNA, 17 nt, Homo sapiens
  source 1..17: mol_type = genomic RNA
gagaagagttgcatcac

SEQ ID NO: 7530 - RNA, 17 nt, Homo sapiens
  source 1..17: mol_type = genomic RNA
agaagagttgcatcacc

SEQ ID NO: 7531 - RNA, 17 nt, Homo sapiens
  source 1..17: mol_type = genomic RNA
gaagagttgcatcacct

SEQ ID NO: 7532 - RNA, 17 nt, Homo sapiens
  source 1..17: mol_type = genomic RNA
aagagttgcatcacctg

SEQ ID NO: 7533 - RNA, 17 nt, Homo sapiens
  source 1..17: mol_type = genomic RNA
agagttgcatcacctgg

SEQ ID NO: 7534 - RNA, 17 nt, Homo sapiens
  source 1..17: mol_type = genomic RNA
gagttgcatcacctggg

SEQ ID NO: 7535 - RNA, 17 nt, Homo sapiens
  source 1..17: mol_type = genomic RNA
agttgcatcacctgggt

SEQ ID NO: 7536 - RNA, 17 nt, Homo sapiens
  source 1..17: mol_type = genomic RNA
gttgcatcacctgggtg

SEQ ID NO: 7537 - RNA, 17 nt, Homo sapiens
  source 1..17: mol_type = genomic RNA
ttgcatcacctgggtga

SEQ ID NO: 7538 - RNA, 17 nt, Homo sapiens
  source 1..17: mol_type = genomic RNA
tgcatcacctgggtgat

SEQ ID NO: 7539 - RNA, 17 nt, Homo sapiens
  source 1..17: mol_type = genomic RNA
gcatcacctgggtgatc

SEQ ID NO: 7540 - RNA, 17 nt, Homo sapiens
  source 1..17: mol_type = genomic RNA
cctgggtgatcagtgta

SEQ ID NO: 7541 - RNA, 17 nt, Homo sapiens
  source 1..17: mol_type = genomic RNA
ctgggtgatcagtgtag

SEQ ID NO: 7542 - RNA, 17 nt, Homo sapiens
  source 1..17: mol_type = genomic RNA
tgggtgatcagtgtaga

SEQ ID NO: 7543 - RNA, 17 nt, Homo sapiens
  source 1..17: mol_type = genomic RNA
gggtgatcagtgtagag

SEQ ID NO: 7544 - RNA, 17 nt, Homo sapiens
  source 1..17: mol_type = genomic RNA
tatgtcacaatgtcccc

SEQ ID NO: 7545 - RNA, 17 nt, Homo sapiens
  source 1..17: mol_type = genomic RNA
tcccctgtaggcagagc

SEQ ID NO: 7546 - RNA, 17 nt, Homo sapiens
  source 1..17: mol_type = genomic RNA
ccctgtaggcagatcct

SEQ ID NO: 7547 - RNA, 17 nt, Homo sapiens
  source 1..17: mol_type = genomic RNA
cctgtaggcagatccta

SEQ ID NO: 7548 - RNA, 17 nt, Homo sapiens
  source 1..17: mol_type = genomic RNA
ctgtaggcagatcctag

SEQ ID NO: 7549 - RNA, 17 nt, Homo sapiens
  source 1..17: mol_type = genomic RNA
tgtaggcagatcctaga

SEQ ID NO: 7550 - RNA, 17 nt, Homo sapiens
  source 1..17: mol_type = genomic RNA
gtaggcagatcctagac

SEQ ID NO: 7551 - RNA, 17 nt, Homo sapiens
  source 1..17: mol_type = genomic RNA
taggcagatcctagaca

SEQ ID NO: 7552 - RNA, 17 nt, Homo sapiens
  source 1..17: mol_type = genomic RNA
aggcagatcctagacaa

SEQ ID NO: 7553 - RNA, 17 nt, Homo sapiens
  source 1..17: mol_type = genomic RNA
ggcagatcctagacaag

SEQ ID NO: 7554 - RNA, 17 nt, Homo sapiens
  source 1..17: mol_type = genomic RNA
gcagatcctagacaaga

SEQ ID NO: 7555 - RNA, 17 nt, Homo sapiens
  source 1..17: mol_type = genomic RNA
cagatcctagacaagag

SEQ ID NO: 7556 - RNA, 17 nt, Homo sapiens
  source 1..17: mol_type = genomic RNA
agatcctagacaagagt

SEQ ID NO: 7557 - RNA, 17 nt, Homo sapiens
  source 1..17: mol_type = genomic RNA
gatcctagacaagagtt

SEQ ID NO: 7558 - RNA, 17 nt, Homo sapiens
  source 1..17: mol_type = genomic RNA
acttaggtgatcagtgc

SEQ ID NO: 7559 - RNA, 17 nt, Homo sapiens
  source 1..17: mol_type = genomic RNA
cttaggtgatcagtgca

SEQ ID NO: 7560 - RNA, 17 nt, Homo sapiens
  source 1..17: mol_type = genomic RNA
ttaggtgatcagtgcag

SEQ ID NO: 7561 - RNA, 17 nt, Homo sapiens
  source 1..17: mol_type = genomic RNA
taggtgatcagtgcaga

SEQ ID NO: 7562 - RNA, 17 nt, Homo sapiens
  source 1..17: mol_type = genomic RNA
aggtgatcagtgcagag

SEQ ID NO: 7563 - RNA, 17 nt, Homo sapiens
  source 1..17: mol_type = genomic RNA
agtgatcagtgcagaga

SEQ ID NO: 7564 - RNA, 17 nt, Homo sapiens
  source 1..17: mol_type = genomic RNA
gtaggccaaagcctaga

SEQ ID NO: 7565 - RNA, 17 nt, Homo sapiens
  source 1..17: mol_type = genomic RNA
taggccaaagcctagac

SEQ ID NO: 7566 - RNA, 17 nt, Homo sapiens
  source 1..17: mol_type = genomic RNA
aggccaaagcctagaca

SEQ ID NO: 7567 - RNA, 17 nt, Homo sapiens
  source 1..17: mol_type = genomic RNA
ggccaaagcctagacaa

SEQ ID NO: 7568 - RNA, 17 nt, Homo sapiens
  source 1..17: mol_type = genomic RNA
gccaaagcctagacaat

SEQ ID NO: 7569 - RNA, 17 nt, Homo sapiens
  source 1..17: mol_type = genomic RNA
ccaaagcctagacaata

SEQ ID NO: 7570 - RNA, 17 nt, Homo sapiens
  source 1..17: mol_type = genomic RNA
caaagcctagacaatag

SEQ ID NO: 7571 - RNA, 17 nt, Homo sapiens
  source 1..17: mol_type = genomic RNA
aaagcctagacaatagt

SEQ ID NO: 7572 - RNA, 17 nt, Homo sapiens
  source 1..17: mol_type = genomic RNA
aagcctagacaatagtt

SEQ ID NO: 7573 - RNA, 17 nt, Homo sapiens
  source 1..17: mol_type = genomic RNA
agcctagacaatagtta

SEQ ID NO: 7574 - RNA, 17 nt, Homo sapiens
  source 1..17: mol_type = genomic RNA
gcctagacaatagttac

SEQ ID NO: 7575 - RNA, 17 nt, Homo sapiens
  source 1..17: mol_type = genomic RNA
tagttacatcacttggg

SEQ ID NO: 7576 - RNA, 17 nt, Homo sapiens
  source 1..17: mol_type = genomic RNA
agttacatcacttgggt

SEQ ID NO: 7577 - RNA, 17 nt, Homo sapiens
  source 1..17: mol_type = genomic RNA
gttacatcacttgggtg

SEQ ID NO: 7578 - RNA, 17 nt, Homo sapiens
  source 1..17: mol_type = genomic RNA
ttacatcacttgggtga

SEQ ID NO: 7579 - RNA, 17 nt, Homo sapiens
  source 1..17: mol_type = genomic RNA
tacatcacttgggtgat

SEQ ID NO: 7580 - RNA, 17 nt, Homo sapiens
  source 1..17: mol_type = genomic RNA
acatcacttgggtgatc

SEQ ID NO: 7581 - RNA, 17 nt, Homo sapiens
  source 1..17: mol_type = genomic RNA
catcacttgggtgatca

SEQ ID NO: 7582 - RNA, 17 nt, Homo sapiens
  source 1..17: mol_type = genomic RNA
atcacttgggtgatcag

SEQ ID NO: 7583 - RNA, 17 nt, Homo sapiens
  source 1..17: mol_type = genomic RNA
tcacttgggtgatcagt

SEQ ID NO: 7584 - RNA, 17 nt, Homo sapiens
  source 1..17: mol_type = genomic RNA
cacttgggtgatcagtg

SEQ ID NO: 7585 - RNA, 17 nt, Homo sapiens
  source 1..17: mol_type = genomic RNA
acttgggtgatcagtgg

SEQ ID NO: 7586 - RNA, 17 nt, Homo sapiens
  source 1..17: mol_type = genomic RNA
cttgggtgatcagtggc

SEQ ID NO: 7587 - RNA, 17 nt, Homo sapiens
  source 1..17: mol_type = genomic RNA
ttgggtgatcagtggcg

SEQ ID NO: 7588 - RNA, 17 nt, Homo sapiens
  source 1..17: mol_type = genomic RNA
tgggtgatcagtggcga

SEQ ID NO: 7589 - RNA, 17 nt, Homo sapiens
  source 1..17: mol_type = genomic RNA
gggtgatcagtggcgag

SEQ ID NO: 7590 - RNA, 17 nt, Homo sapiens
  source 1..17: mol_type = genomic RNA
ggtgatcagtggcgaga

SEQ ID NO: 7591 - RNA, 17 nt, Homo sapiens
  source 1..17: mol_type = genomic RNA
gtgatcagtggcgagat

SEQ ID NO: 7592 - RNA, 17 nt, Homo sapiens
  source 1..17: mol_type = genomic RNA
tgatcagtggcgagatc

SEQ ID NO: 7593 - RNA, 17 nt, Homo sapiens
  source 1..17: mol_type = genomic RNA
gatcagtggcgagatct

SEQ ID NO: 7594 - RNA, 17 nt, Homo sapiens
  source 1..17: mol_type = genomic RNA
atcagtggcgagatctc

SEQ ID NO: 7595 - RNA, 17 nt, Homo sapiens
  source 1..17: mol_type = genomic RNA
tcagtggcgagatctct

SEQ ID NO: 7596 - RNA, 17 nt, Homo sapiens
  source 1..17: mol_type = genomic RNA
cagtggcgagatctctc

SEQ ID NO: 7597 - RNA, 17 nt, Homo sapiens
  source 1..17: mol_type = genomic RNA
agtggcgagatctctca

SEQ ID NO: 7598 - RNA, 17 nt, Homo sapiens
  source 1..17: mol_type = genomic RNA
gtggcgagatctctcac

SEQ ID NO: 7599 - RNA, 17 nt, Homo sapiens
  source 1..17: mol_type = genomic RNA
tggcgagatctctcaca

SEQ ID NO: 7600 - RNA, 17 nt, Homo sapiens
  source 1..17: mol_type = genomic RNA
ggcgagatctctcacaa

SEQ ID NO: 7601 - RNA, 17 nt, Homo sapiens
  source 1..17: mol_type = genomic RNA
gcgagatctctcacaat

SEQ ID NO: 7602 - RNA, 17 nt, Homo sapiens
  source 1..17: mol_type = genomic RNA
atctctcacaattcccc

SEQ ID NO: 7603 - RNA, 17 nt, Homo sapiens
  source 1..17: mol_type = genomic RNA
tctctcacaattcccct

SEQ ID NO: 7604 - RNA, 17 nt, Homo sapiens
  source 1..17: mol_type = genomic RNA
ctctcacaattcccctg

SEQ ID NO: 7605 - RNA, 17 nt, Homo sapiens
  source 1..17: mol_type = genomic RNA
tctcacaattcccctgt

SEQ ID NO: 7606 - RNA, 17 nt, Homo sapiens
  source 1..17: mol_type = genomic RNA
tcacaattcccctgtag

SEQ ID NO: 7607 - RNA, 17 nt, Homo sapiens
  source 1..17: mol_type = genomic RNA
cacaattcccctgtagg

SEQ ID NO: 7608 - RNA, 17 nt, Homo sapiens
  source 1..17: mol_type = genomic RNA
acaattcccctgtaggc

SEQ ID NO: 7609 - RNA, 17 nt, Homo sapiens
  source 1..17: mol_type = genomic RNA
caattcccctgtaggca

SEQ ID NO: 7610 - RNA, 17 nt, Homo sapiens
  source 1..17: mol_type = genomic RNA
aattcccctgtaggcag

SEQ ID NO: 7611 - RNA, 17 nt, Homo sapiens
  source 1..17: mol_type = genomic RNA
attcccctgtaggcaga

SEQ ID NO: 7612 - RNA, 17 nt, Homo sapiens
  source 1..17: mol_type = genomic RNA
ttcccctgtaggcagag

SEQ ID NO: 7613 - RNA, 17 nt, Homo sapiens
  source 1..17: mol_type = genomic RNA
ctgtaggcagagcttat

SEQ ID NO: 7614 - RNA, 17 nt, Homo sapiens
  source 1..17: mol_type = genomic RNA
tgtaggcagagcttata

SEQ ID NO: 7615 - RNA, 17 nt, Homo sapiens
  source 1..17: mol_type = genomic RNA
gtaggcagagcttatac

SEQ ID NO: 7616 - RNA, 17 nt, Homo sapiens
  source 1..17: mol_type = genomic RNA
taggcagagcttataca

SEQ ID NO: 7617 - RNA, 17 nt, Homo sapiens
  source 1..17: mol_type = genomic RNA
aggcagagcttatacaa

SEQ ID NO: 7618 - RNA, 17 nt, Homo sapiens
  source 1..17: mol_type = genomic RNA
ggcagagcttatacaac

SEQ ID NO: 7619 - RNA, 17 nt, Homo sapiens
  source 1..17: mol_type = genomic RNA
gcagagcttatacaaca

SEQ ID NO: 7620 - RNA, 17 nt, Homo sapiens
  source 1..17: mol_type = genomic RNA
cagagcttatacaacag

SEQ ID NO: 7621 - RNA, 17 nt, Homo sapiens
  source 1..17: mol_type = genomic RNA
agagcttatacaacagt

SEQ ID NO: 7622 - RNA, 17 nt, Homo sapiens
  source 1..17: mol_type = genomic RNA
atgtcacaatgccccca

SEQ ID NO: 7623 - RNA, 17 nt, Homo sapiens
  source 1..17: mol_type = genomic RNA
tgtcacaatgcccccat

SEQ ID NO: 7624 - RNA, 17 nt, Homo sapiens
  source 1..17: mol_type = genomic RNA
gtcacaatgcccccata

SEQ ID NO: 7625 - RNA, 17 nt, Homo sapiens
  source 1..17: mol_type = genomic RNA
tcacaatgcccccatag

SEQ ID NO: 7626 - RNA, 17 nt, Homo sapiens
  source 1..17: mol_type = genomic RNA
cacaatgcccccatagg

SEQ ID NO: 7627 - RNA, 17 nt, Homo sapiens
  source 1..17: mol_type = genomic RNA
acaatgcccccataggc

SEQ ID NO: 7628 - RNA, 17 nt, Homo sapiens
  source 1..17: mol_type = genomic RNA
caatgcccccataggca

SEQ ID NO: 7629 - RNA, 17 nt, Homo sapiens
  source 1..17: mol_type = genomic RNA
aatgcccccataggcag

SEQ ID NO: 7630 - RNA, 17 nt, Homo sapiens
  source 1..17: mol_type = genomic RNA
gatcagtgcagaaatac

SEQ ID NO: 7631 - RNA, 17 nt, Homo sapiens
  source 1..17: mol_type = genomic RNA
atcagtgcagaaatacg

SEQ ID NO: 7632 - RNA, 17 nt, Homo sapiens
  source 1..17: mol_type = genomic RNA
tcagtgcagaaatacgt

SEQ ID NO: 7633 - RNA, 17 nt, Homo sapiens
  source 1..17: mol_type = genomic RNA
cagtgcagaaatacgtc

SEQ ID NO: 7634 - RNA, 17 nt, Homo sapiens
  source 1..17: mol_type = genomic RNA
agtgcagaaatacgtca

SEQ ID NO: 7635 - RNA, 17 nt, Homo sapiens
  source 1..17: mol_type = genomic RNA
gtgcagaaatacgtcac

SEQ ID NO: 7636 - RNA, 17 nt, Homo sapiens
  source 1..17: mol_type = genomic RNA
tgcagaaatacgtcaca

SEQ ID NO: 7637 - RNA, 17 nt, Homo sapiens
  source 1..17: mol_type = genomic RNA
gcagaaatacgtcacaa

SEQ ID NO: 7638 - RNA, 17 nt, Homo sapiens
  source 1..17: mol_type = genomic RNA
gaaatacgtcacaatgc

SEQ ID NO: 7639 - RNA, 17 nt, Homo sapiens
  source 1..17: mol_type = genomic RNA
aaatacgtcacaatgcc

SEQ ID NO: 7640 - RNA, 17 nt, Homo sapiens
  source 1..17: mol_type = genomic RNA
aatacgtcacaatgccc

SEQ ID NO: 7641 - RNA, 17 nt, Homo sapiens
  source 1..17: mol_type = genomic RNA
tacgtcacaatgccccc

SEQ ID NO: 7642 - RNA, 17 nt, Homo sapiens
  source 1..17: mol_type = genomic RNA
acgtcacaatgccccct

SEQ ID NO: 7643 - RNA, 17 nt, Homo sapiens
  source 1..17: mol_type = genomic RNA
cgtcacaatgccccctt

SEQ ID NO: 7644 - RNA, 17 nt, Homo sapiens
  source 1..17: mol_type = genomic RNA
gtcacaatgccccctta

SEQ ID NO: 7645 - RNA, 17 nt, Homo sapiens
  source 1..17: mol_type = genomic RNA
tcacaatgcccccttag

SEQ ID NO: 7646 - RNA, 17 nt, Homo sapiens
  source 1..17: mol_type = genomic RNA
cacaatgcccccttagg

SEQ ID NO: 7647 - RNA, 17 nt, Homo sapiens
  source 1..17: mol_type = genomic RNA
acaatgcccccttaggc

SEQ ID NO: 7648 - RNA, 17 nt, Homo sapiens
  source 1..17: mol_type = genomic RNA
caatgcccccttaggca

SEQ ID NO: 7649 - RNA, 17 nt, Homo sapiens
  source 1..17: mol_type = genomic RNA
aatgcccccttaggcag

SEQ ID NO: 7650 - RNA, 17 nt, Homo sapiens
  source 1..17: mol_type = genomic RNA
atgcccccttaggcaga

SEQ ID NO: 7651 - RNA, 17 nt, Homo sapiens
  source 1..17: mol_type = genomic RNA
tgcccccttaggcagag

SEQ ID NO: 7652 - RNA, 17 nt, Homo sapiens
  source 1..17: mol_type = genomic RNA
cccccttaggcagagcc

SEQ ID NO: 7653 - RNA, 17 nt, Homo sapiens
  source 1..17: mol_type = genomic RNA
ccccttaggcagagcct

SEQ ID NO: 7654 - RNA, 17 nt, Homo sapiens
  source 1..17: mol_type = genomic RNA
cccttaggcagagccta

SEQ ID NO: 7655 - RNA, 17 nt, Homo sapiens
  source 1..17: mol_type = genomic RNA
ccttaggcagagcctag

SEQ ID NO: 7656 - RNA, 17 nt, Homo sapiens
  source 1..17: mol_type = genomic RNA
cttaggcagagcctaga

SEQ ID NO: 7657 - RNA, 17 nt, Homo sapiens
  source 1..17: mol_type = genomic RNA
ttaggcagagcctagac

SEQ ID NO: 7658 - RNA, 17 nt, Homo sapiens
  source 1..17: mol_type = genomic RNA
ggcagagcctagacaaa

SEQ ID NO: 7659 - RNA, 17 nt, Homo sapiens
  source 1..17: mol_type = genomic RNA
gcagagcctagacaaaa

SEQ ID NO: 7660 - RNA, 17 nt, Homo sapiens
  source 1..17: mol_type = genomic RNA
cagagcctagacaaaag

SEQ ID NO: 7661 - RNA, 17 nt, Homo sapiens
  source 1..17: mol_type = genomic RNA
agagcctagacaaaagc

SEQ ID NO: 7662 - RNA, 17 nt, Homo sapiens
  source 1..17: mol_type = genomic RNA
gagcctagacaaaagcc

SEQ ID NO: 7663 - RNA, 17 nt, Homo sapiens
  source 1..17: mol_type = genomic RNA
agcctagacaaaagccc

SEQ ID NO: 7664 - RNA, 17 nt, Homo sapiens
  source 1..17: mol_type = genomic RNA
gcctagacaaaagcccc

SEQ ID NO: 7665 - RNA, 17 nt, Homo sapiens
  source 1..17: mol_type = genomic RNA
cctagacaaaagcccca

SEQ ID NO: 7666 - RNA, 17 nt, Homo sapiens
  source 1..17: mol_type = genomic RNA
ctagacaaaagccccat

SEQ ID NO: 7667 - RNA, 17 nt, Homo sapiens
  source 1..17: mol_type = genomic RNA
tagacaaaagccccatc

SEQ ID NO: 7668 - RNA, 17 nt, Homo sapiens
  source 1..17: mol_type = genomic RNA
agacaaaagccccatca

SEQ ID NO: 7669 - RNA, 17 nt, Homo sapiens
  source 1..17: mol_type = genomic RNA
gacaaaagccccatcac

SEQ ID NO: 7670 - RNA, 17 nt, Homo sapiens
  source 1..17: mol_type = genomic RNA
acaaaagccccatcacc

SEQ ID NO: 7671 - RNA, 17 nt, Homo sapiens
  source 1..17: mol_type = genomic RNA
caaaagccccatcacct

SEQ ID NO: 7672 - RNA, 17 nt, Homo sapiens
  source 1..17: mol_type = genomic RNA
aaaagccccatcacctg

SEQ ID NO: 7673 - RNA, 17 nt, Homo sapiens
  source 1..17: mol_type = genomic RNA
aaagccccatcacctgg

SEQ ID NO: 7674 - RNA, 17 nt, Homo sapiens
  source 1..17: mol_type = genomic RNA
aagccccatcacctgga

SEQ ID NO: 7675 - RNA, 17 nt, Homo sapiens
  source 1..17: mol_type = genomic RNA
agccccatcacctggat

SEQ ID NO: 7676 - RNA, 17 nt, Homo sapiens
  source 1..17: mol_type = genomic RNA
gccccatcacctggatg

SEQ ID NO: 7677 - RNA, 17 nt, Homo sapiens
  source 1..17: mol_type = genomic RNA
ccccatcacctggatga

SEQ ID NO: 7678 - RNA, 17 nt, Homo sapiens
  source 1..17: mol_type = genomic RNA
cccatcacctggatgat

SEQ ID NO: 7679 - RNA, 17 nt, Homo sapiens
  source 1..17: mol_type = genomic RNA
ccatcacctggatgatt

SEQ ID NO: 7680 - RNA, 17 nt, Homo sapiens
  source 1..17: mol_type = genomic RNA
atcacctggatgattag

SEQ ID NO: 7681 - RNA, 17 nt, Homo sapiens
  source 1..17: mol_type = genomic RNA
tcacctggatgattagt

SEQ ID NO: 7682 - RNA, 17 nt, Homo sapiens
  source 1..17: mol_type = genomic RNA
cacctggatgattagtg

SEQ ID NO: 7683 - RNA, 17 nt, Homo sapiens
  source 1..17: mol_type = genomic RNA
acctggatgattagtgc

SEQ ID NO: 7684 - RNA, 17 nt, Homo sapiens
  source 1..17: mol_type = genomic RNA
cctggatgattagtgca

SEQ ID NO: 7685 - RNA, 17 nt, Homo sapiens
  source 1..17: mol_type = genomic RNA
ctggatgattagtgcag

SEQ ID NO: 7686 - RNA, 17 nt, Homo sapiens
  source 1..17: mol_type = genomic RNA
tggatgattagtgcaga

SEQ ID NO: 7687 - RNA, 17 nt, Homo sapiens
  source 1..17: mol_type = genomic RNA
ggatgattagtgcagag

SEQ ID NO: 7688 - RNA, 17 nt, Homo sapiens
  source 1..17: mol_type = genomic RNA
gatgattagtgcagagt

SEQ ID NO: 7689 - RNA, 17 nt, Homo sapiens
  source 1..17: mol_type = genomic RNA
gatatgtcacaatgcca

SEQ ID NO: 7690 - RNA, 17 nt, Homo sapiens
  source 1..17: mol_type = genomic RNA
atatgtcacaatgccac

SEQ ID NO: 7691 - RNA, 17 nt, Homo sapiens
  source 1..17: mol_type = genomic RNA
tatgtcacaatgccact

SEQ ID NO: 7692 - RNA, 17 nt, Homo sapiens
  source 1..17: mol_type = genomic RNA
atgtcacaatgccactg

SEQ ID NO: 7693 - RNA, 17 nt, Homo sapiens
  source 1..17: mol_type = genomic RNA
tgtcacaatgccactgt

SEQ ID NO: 7694 - RNA, 17 nt, Homo sapiens
  source 1..17: mol_type = genomic RNA
gtcacaatgccactgta

SEQ ID NO: 7695 - RNA, 17 nt, Homo sapiens
  source 1..17: mol_type = genomic RNA
tcacaatgccactgtag

SEQ ID NO: 7696 - RNA, 17 nt, Homo sapiens
  source 1..17: mol_type = genomic RNA
cacaatgccactgtagg

SEQ ID NO: 7697 - RNA, 17 nt, Homo sapiens
  source 1..17: mol_type = genomic RNA
acaatgccactgtaggc

SEQ ID NO: 7698 - RNA, 17 nt, Homo sapiens
  source 1..17: mol_type = genomic RNA
caatgccactgtaggca

SEQ ID NO: 7699 - RNA, 17 nt, Homo sapiens
  source 1..17: mol_type = genomic RNA
aatgccactgtaggcag

SEQ ID NO: 7700 - RNA, 17 nt, Homo sapiens
  source 1..17: mol_type = genomic RNA
atgccactgtaggcaga

SEQ ID NO: 7701 - RNA, 17 nt, Homo sapiens
  source 1..17: mol_type = genomic RNA
tgccactgtaggcagag

SEQ ID NO: 7702 - RNA, 17 nt, Homo sapiens
  source 1..17: mol_type = genomic RNA
ccactgtaggcagagcc

SEQ ID NO: 7703 - RNA, 17 nt, Homo sapiens
  source 1..17: mol_type = genomic RNA
cactgtaggcagagcct

SEQ ID NO: 7704 - RNA, 17 nt, Homo sapiens
  source 1..17: mol_type = genomic RNA
actgtaggcagagccta

SEQ ID NO: 7705 - RNA, 17 nt, Homo sapiens
  source 1..17: mol_type = genomic RNA
gcctagacaagagttat

SEQ ID NO: 7706 - RNA, 17 nt, Homo sapiens
  source 1..17: mol_type = genomic RNA
gagttatatgacctagg

SEQ ID NO: 7707 - RNA, 17 nt, Homo sapiens
  source 1..17: mol_type = genomic RNA
tatatgacctaggtgat

SEQ ID NO: 7708 - RNA, 17 nt, Homo sapiens
  source 1..17: mol_type = genomic RNA
atatgacctaggtgatc

SEQ ID NO: 7709 - RNA, 17 nt, Homo sapiens
  source 1..17: mol_type = genomic RNA
tatgacctaggtgatca

SEQ ID NO: 7710 - RNA, 17 nt, Homo sapiens
  source 1..17: mol_type = genomic RNA
atgacctaggtgatcag

SEQ ID NO: 7711 - RNA, 17 nt, Homo sapiens
  source 1..17: mol_type = genomic RNA
tgacctaggtgatcagt

SEQ ID NO: 7712 - RNA, 17 nt, Homo sapiens
  source 1..17: mol_type = genomic RNA
gacctaggtgatcagtg

SEQ ID NO: 7713 - RNA, 17 nt, Homo sapiens
  source 1..17: mol_type = genomic RNA
atcagtgcagagataca

SEQ ID NO: 7714 - RNA, 17 nt, Homo sapiens
  source 1..17: mol_type = genomic RNA
tcagtgcagagatacat

SEQ ID NO: 7715 - RNA, 17 nt, Homo sapiens
  source 1..17: mol_type = genomic RNA
gcaatgcccctgtaggc

SEQ ID NO: 7716 - RNA, 17 nt, Homo sapiens
  source 1..17: mol_type = genomic RNA
cctgtaggcagagccct

SEQ ID NO: 7717 - RNA, 17 nt, Homo sapiens
  source 1..17: mol_type = genomic RNA
ctgtaggcagagccctg

SEQ ID NO: 7718 - RNA, 17 nt, Homo sapiens
  source 1..17: mol_type = genomic RNA
tgtaggcagagccctga

SEQ ID NO: 7719 - RNA, 17 nt, Homo sapiens
  source 1..17: mol_type = genomic RNA
taggcagagccctgaca

SEQ ID NO: 7720 - RNA, 17 nt, Homo sapiens
  source 1..17: mol_type = genomic RNA
gcagagccctgacaagt

SEQ ID NO: 7721 - RNA, 17 nt, Homo sapiens
  source 1..17: mol_type = genomic RNA
cagagccctgacaagtg

SEQ ID NO: 7722 - RNA, 17 nt, Homo sapiens
  source 1..17: mol_type = genomic RNA
agagccctgacaagtgg

SEQ ID NO: 7723 - RNA, 17 nt, Homo sapiens
  source 1..17: mol_type = genomic RNA
gagccctgacaagtggt

SEQ ID NO: 7724 - RNA, 17 nt, Homo sapiens
  source 1..17: mol_type = genomic RNA
agccctgacaagtggta

SEQ ID NO: 7725 - RNA, 17 nt, Homo sapiens
  source 1..17: mol_type = genomic RNA
gccctgacaagtggtac

SEQ ID NO: 7726 - RNA, 17 nt, Homo sapiens
  source 1..17: mol_type = genomic RNA
ccctgacaagtggtaca

SEQ ID NO: 7727 - RNA, 17 nt, Homo sapiens
  source 1..17: mol_type = genomic RNA
cctgacaagtggtacat

SEQ ID NO: 7728 - RNA, 17 nt, Homo sapiens
  source 1..17: mol_type = genomic RNA
ctgacaagtggtacatc

SEQ ID NO: 7729 - RNA, 17 nt, Homo sapiens
  source 1..17: mol_type = genomic RNA
tgacaagtggtacatca

SEQ ID NO: 7730 - RNA, 17 nt, Homo sapiens
  source 1..17: mol_type = genomic RNA
gacaagtggtacatcac

SEQ ID NO: 7731 - RNA, 17 nt, Homo sapiens
  source 1..17: mol_type = genomic RNA
acaagtggtacatcacc

SEQ ID NO: 7732 - RNA, 17 nt, Homo sapiens
  source 1..17: mol_type = genomic RNA
caagtggtacatcacct

SEQ ID NO: 7733 - RNA, 17 nt, Homo sapiens
  source 1..17: mol_type = genomic RNA
aagtggtacatcacctg

SEQ ID NO: 7734 - RNA, 17 nt, Homo sapiens
  source 1..17: mol_type = genomic RNA
agtggtacatcacctgg

SEQ ID NO: 7735 - RNA, 17 nt, Homo sapiens
  source 1..17: mol_type = genomic RNA
gtggtacatcacctggg

SEQ ID NO: 7736 - RNA, 17 nt, Homo sapiens
  source 1..17: mol_type = genomic RNA
tggtacatcacctgggt

SEQ ID NO: 7737 - RNA, 17 nt, Homo sapiens
  source 1..17: mol_type = genomic RNA
ggtacatcacctgggtg

SEQ ID NO: 7738 - RNA, 17 nt, Homo sapiens
  source 1..17: mol_type = genomic RNA
gtacatcacctgggtga

SEQ ID NO: 7739 - RNA, 17 nt, Homo sapiens
  source 1..17: mol_type = genomic RNA
tgggtgatcattgcagg

SEQ ID NO: 7740 - RNA, 17 nt, Homo sapiens
  source 1..17: mol_type = genomic RNA
gggtgatcattgcaggg

SEQ ID NO: 7741 - RNA, 17 nt, Homo sapiens
  source 1..17: mol_type = genomic RNA
ggtgatcattgcaggga

SEQ ID NO: 7742 - RNA, 17 nt, Homo sapiens
  source 1..17: mol_type = genomic RNA
gtgatcattgcagggat

SEQ ID NO: 7743 - RNA, 17 nt, Homo sapiens
  source 1..17: mol_type = genomic RNA
tgatcattgcagggata

SEQ ID NO: 7744 - RNA, 17 nt, Homo sapiens
  source 1..17: mol_type = genomic RNA
gatcattgcagggatat

SEQ ID NO: 7745 - RNA, 17 nt, Homo sapiens
  source 1..17: mol_type = genomic RNA
atcattgcagggatatg

SEQ ID NO: 7746 - RNA, 17 nt, Homo sapiens
  source 1..17: mol_type = genomic RNA
tcattgcagggatatgt

SEQ ID NO: 7747 - RNA, 17 nt, Homo sapiens
  source 1..17: mol_type = genomic RNA
cattgcagggatatgtc

SEQ ID NO: 7748 - RNA, 17 nt, Homo sapiens
  source 1..17: mol_type = genomic RNA
attgcagggatatgtca

SEQ ID NO: 7749 - RNA, 17 nt, Homo sapiens
  source 1..17: mol_type = genomic RNA
ttgcagggatatgtcac

SEQ ID NO: 7750 - RNA, 17 nt, Homo sapiens
  source 1..17: mol_type = genomic RNA
tgcagggatatgtcaca

SEQ ID NO: 7751 - RNA, 17 nt, Homo sapiens
  source 1..17: mol_type = genomic RNA
gcagggatatgtcacaa

SEQ ID NO: 7752 - RNA, 17 nt, Homo sapiens
  source 1..17: mol_type = genomic RNA
cagggatatgtcacaaa

SEQ ID NO: 7753 - RNA, 17 nt, Homo sapiens
  source 1..17: mol_type = genomic RNA
agggatatgtcacaaag

SEQ ID NO: 7754 - RNA, 17 nt, Homo sapiens
  source 1..17: mol_type = genomic RNA
gggatatgtcacaaagc

SEQ ID NO: 7755 - RNA, 17 nt, Homo sapiens
  source 1..17: mol_type = genomic RNA
ggatatgtcacaaagca

SEQ ID NO: 7756 - RNA, 17 nt, Homo sapiens
  source 1..17: mol_type = genomic RNA
gatatgtcacaaagcac

SEQ ID NO: 7757 - RNA, 17 nt, Homo sapiens
  source 1..17: mol_type = genomic RNA
atatgtcacaaagcacc

SEQ ID NO: 7758 - RNA, 17 nt, Homo sapiens
  source 1..17: mol_type = genomic RNA
tatgtcacaaagcaccc

SEQ ID NO: 7759 - RNA, 17 nt, Homo sapiens
  source 1..17: mol_type = genomic RNA
atgtcacaaagcaccct

SEQ ID NO: 7760 - RNA, 17 nt, Homo sapiens
  source 1..17: mol_type = genomic RNA
tgtcacaaagcaccctg

SEQ ID NO: 7761 - RNA, 17 nt, Homo sapiens
  source 1..17: mol_type = genomic RNA
gtcacaaagcaccctgt

SEQ ID NO: 7762 - RNA, 17 nt, Homo sapiens
  source 1..17: mol_type = genomic RNA
tcacaaagcaccctgta

SEQ ID NO: 7763 - RNA, 17 nt, Homo sapiens
  source 1..17: mol_type = genomic RNA
cacaaagcaccctgtag

SEQ ID NO: 7764 - RNA, 17 nt, Homo sapiens
  source 1..17: mol_type = genomic RNA
acaaagcaccctgtagg

SEQ ID NO: 7765 - RNA, 17 nt, Homo sapiens
  source 1..17: mol_type = genomic RNA
caaagcaccctgtaggc

SEQ ID NO: 7766 - RNA, 17 nt, Homo sapiens
  source 1..17: mol_type = genomic RNA
aaagcaccctgtaggca

SEQ ID NO: 7767 - RNA, 17 nt, Homo sapiens
  source 1..17: mol_type = genomic RNA
aagcaccctgtaggcag

SEQ ID NO: 7768 - RNA, 17 nt, Homo sapiens
  source 1..17: mol_type = genomic RNA
agcaccctgtaggcaga

SEQ ID NO: 7769 - RNA, 17 nt, Homo sapiens
  source 1..17: mol_type = genomic RNA
gcaccctgtaggcagat

SEQ ID NO: 7770 - RNA, 17 nt, Homo sapiens
  source 1..17: mol_type = genomic RNA
caccctgtaggcagatc

SEQ ID NO: 7771 - RNA, 17 nt, Homo sapiens
  source 1..17: mol_type = genomic RNA
accctgtaggcagatcc

SEQ ID NO: 7772 - RNA, 17 nt, Homo sapiens
  source 1..17: mol_type = genomic RNA
tcctagacaagagttac

SEQ ID NO: 7773 - RNA, 17 nt, Homo sapiens
  source 1..17: mol_type = genomic RNA
agacaagagttacatga

SEQ ID NO: 7774 - RNA, 17 nt, Homo sapiens
  source 1..17: mol_type = genomic RNA
gacaagagttacatgac

SEQ ID NO: 7775 - RNA, 17 nt, Homo sapiens
  source 1..17: mol_type = genomic RNA
acaagagttacatgacc

SEQ ID NO: 7776 - RNA, 17 nt, Homo sapiens
  source 1..17: mol_type = genomic RNA
caagagttacatgacct

SEQ ID NO: 7777 - RNA, 17 nt, Homo sapiens
  source 1..17: mol_type = genomic RNA
aagagttacatgacctg

SEQ ID NO: 7778 - RNA, 17 nt, Homo sapiens
  source 1..17: mol_type = genomic RNA
agagttacatgacctgg

SEQ ID NO: 7779 - RNA, 17 nt, Homo sapiens
  source 1..17: mol_type = genomic RNA
gagttacatgacctggg

SEQ ID NO: 7780 - RNA, 17 nt, Homo sapiens
  source 1..17: mol_type = genomic RNA
agttacatgacctgggt

SEQ ID NO: 7781 - RNA, 17 nt, Homo sapiens
  source 1..17: mol_type = genomic RNA
gttacatgacctgggtg

SEQ ID NO: 7782 - RNA, 17 nt, Homo sapiens
  source 1..17: mol_type = genomic RNA
ttacatgacctgggtga

SEQ ID NO: 7783 - RNA, 17 nt, Homo sapiens
  source 1..17: mol_type = genomic RNA
tacatgacctgggtgat

SEQ ID NO: 7784 - RNA, 17 nt, Homo sapiens
  source 1..17: mol_type = genomic RNA
acatgacctgggtgatc

SEQ ID NO: 7785 - RNA, 17 nt, Homo sapiens
  source 1..17: mol_type = genomic RNA
catgacctgggtgatca

SEQ ID NO: 7786 - RNA, 17 nt, Homo sapiens
  source 1..17: mol_type = genomic RNA
atgacctgggtgatcag

SEQ ID NO: 7787 - RNA, 17 nt, Homo sapiens
  source 1..17: mol_type = genomic RNA
tgacctgggtgatcagt

SEQ ID NO: 7788 - RNA, 17 nt, Homo sapiens
  source 1..17: mol_type = genomic RNA
gacctgggtgatcagtg

SEQ ID NO: 7789 - RNA, 17 nt, Homo sapiens
  source 1..17: mol_type = genomic RNA
aagagttacatgaccta

SEQ ID NO: 7790 - RNA, 17 nt, Homo sapiens
  source 1..17: mol_type = genomic RNA
agagttacatgacctag

SEQ ID NO: 7791 - RNA, 17 nt, Homo sapiens
  source 1..17: mol_type = genomic RNA
gagttacatgacctagg

SEQ ID NO: 7792 - RNA, 17 nt, Homo sapiens
  source 1..17: mol_type = genomic RNA
agttacatgacctaggt

SEQ ID NO: 7793 - RNA, 17 nt, Homo sapiens
  source 1..17: mol_type = genomic RNA
gttacatgacctaggtg

SEQ ID NO: 7794 - RNA, 17 nt, Homo sapiens
  source 1..17: mol_type = genomic RNA
ttacatgacctaggtga

SEQ ID NO: 7795 - RNA, 17 nt, Homo sapiens
  source 1..17: mol_type = genomic RNA
tacatgacctaggtgat

SEQ ID NO: 7796 - RNA, 17 nt, Homo sapiens
  source 1..17: mol_type = genomic RNA
acatgacctaggtgatc

SEQ ID NO: 7797 - RNA, 17 nt, Homo sapiens
  source 1..17: mol_type = genomic RNA
catgacctaggtgatca

SEQ ID NO: 7798 - RNA, 17 nt, Homo sapiens
  source 1..17: mol_type = genomic RNA
cagtgcagagatacatc

SEQ ID NO: 7799 - RNA, 17 nt, Homo sapiens
  source 1..17: mol_type = genomic RNA
agtgcagagatacatcg

SEQ ID NO: 7800 - RNA, 17 nt, Homo sapiens
  source 1..17: mol_type = genomic RNA
gtgcagagatacatcgc

SEQ ID NO: 7801 - RNA, 17 nt, Homo sapiens
  source 1..17: mol_type = genomic RNA
tgcagagatacatcgca

SEQ ID NO: 7802 - RNA, 17 nt, Homo sapiens
  source 1..17: mol_type = genomic RNA
gcagagatacatcgcaa

SEQ ID NO: 7803 - RNA, 17 nt, Homo sapiens
  source 1..17: mol_type = genomic RNA
cagagatacatcgcaat

SEQ ID NO: 7804 - RNA, 17 nt, Homo sapiens
  source 1..17: mol_type = genomic RNA
agagatacatcgcaatg

SEQ ID NO: 7805 - RNA, 17 nt, Homo sapiens
  source 1..17: mol_type = genomic RNA
gagatacatcgcaatgc

SEQ ID NO: 7806 - RNA, 17 nt, Homo sapiens
  source 1..17: mol_type = genomic RNA
agatacatcgcaatgcc

SEQ ID NO: 7807 - RNA, 17 nt, Homo sapiens
  source 1..17: mol_type = genomic RNA
gatacatcgcaatgccc

SEQ ID NO: 7808 - RNA, 17 nt, Homo sapiens
  source 1..17: mol_type = genomic RNA
atacatcgcaatgcccc

SEQ ID NO: 7809 - RNA, 17 nt, Homo sapiens
  source 1..17: mol_type = genomic RNA
tacatcgcaatgcccct

SEQ ID NO: 7810 - RNA, 17 nt, Homo sapiens
  source 1..17: mol_type = genomic RNA
acatcgcaatgcccctg

SEQ ID NO: 7811 - RNA, 17 nt, Homo sapiens
  source 1..17: mol_type = genomic RNA
catcgcaatgcccctgt

SEQ ID NO: 7812 - RNA, 17 nt, Homo sapiens
  source 1..17: mol_type = genomic RNA
atcgcaatgcccctgta

SEQ ID NO: 7813 - RNA, 17 nt, Homo sapiens
  source 1..17: mol_type = genomic RNA
tcgcaatgcccctgtag

SEQ ID NO: 7814 - RNA, 17 nt, Homo sapiens
  source 1..17: mol_type = genomic RNA
cgcaatgcccctgtagg

SEQ ID NO: 7815 - RNA, 17 nt, Homo sapiens
  source 1..17: mol_type = genomic RNA
cctgtaggcagagcctt

SEQ ID NO: 7816 - RNA, 17 nt, Homo sapiens
  source 1..17: mol_type = genomic RNA
ctgtaggcagagccttg

SEQ ID NO: 7817 - RNA, 17 nt, Homo sapiens
  source 1..17: mol_type = genomic RNA
tgtaggcagagccttga

SEQ ID NO: 7818 - RNA, 17 nt, Homo sapiens
  source 1..17: mol_type = genomic RNA
gtaggcagagccttgac

SEQ ID NO: 7819 - RNA, 17 nt, Homo sapiens
  source 1..17: mol_type = genomic RNA
taggcagagccttgaca

SEQ ID NO: 7820 - RNA, 17 nt, Homo sapiens
  source 1..17: mol_type = genomic RNA
aggcagagccttgacaa

SEQ ID NO: 7821 - RNA, 17 nt, Homo sapiens
  source 1..17: mol_type = genomic RNA
ggcagagccttgacaag

SEQ ID NO: 7822 - RNA, 17 nt, Homo sapiens
  source 1..17: mol_type = genomic RNA
gcagagccttgacaagt

SEQ ID NO: 7823 - RNA, 17 nt, Homo sapiens
  source 1..17: mol_type = genomic RNA
cagagccttgacaagtg

SEQ ID NO: 7824 - RNA, 17 nt, Homo sapiens
  source 1..17: mol_type = genomic RNA
agagccttgacaagtgg

SEQ ID NO: 7825 - RNA, 17 nt, Homo sapiens
  source 1..17: mol_type = genomic RNA
gagccttgacaagtggt

SEQ ID NO: 7826 - RNA, 17 nt, Homo sapiens
  source 1..17: mol_type = genomic RNA
agccttgacaagtggta

SEQ ID NO: 7827 - RNA, 17 nt, Homo sapiens
  source 1..17: mol_type = genomic RNA
gccttgacaagtggtac

SEQ ID NO: 7828 - RNA, 17 nt, Homo sapiens
  source 1..17: mol_type = genomic RNA
ccttgacaagtggtaca

SEQ ID NO: 7829 - RNA, 17 nt, Homo sapiens
  source 1..17: mol_type = genomic RNA
cttgacaagtggtacat

SEQ ID NO: 7830 - RNA, 17 nt, Homo sapiens
  source 1..17: mol_type = genomic RNA
ttgacaagtggtacatc

SEQ ID NO: 7831 - RNA, 17 nt, Homo sapiens
  source 1..17: mol_type = genomic RNA
cacaaagcaccctgtaa

SEQ ID NO: 7832 - RNA, 17 nt, Homo sapiens
  source 1..17: mol_type = genomic RNA
acaaagcaccctgtaag

SEQ ID NO: 7833 - RNA, 17 nt, Homo sapiens
  source 1..17: mol_type = genomic RNA
caaagcaccctgtaagc

SEQ ID NO: 7834 - RNA, 17 nt, Homo sapiens
  source 1..17: mol_type = genomic RNA
aaagcaccctgtaagca

SEQ ID NO: 7835 - RNA, 17 nt, Homo sapiens
  source 1..17: mol_type = genomic RNA
aagcaccctgtaagcag

SEQ ID NO: 7836 - RNA, 17 nt, Homo sapiens
  source 1..17: mol_type = genomic RNA
agcaccctgtaagcaga

SEQ ID NO: 7837 - RNA, 17 nt, Homo sapiens
  source 1..17: mol_type = genomic RNA
gcaccctgtaagcagat

SEQ ID NO: 7838 - RNA, 17 nt, Homo sapiens
  source 1..17: mol_type = genomic RNA
caccctgtaagcagatc

SEQ ID NO: 7839 - RNA, 17 nt, Homo sapiens
  source 1..17: mol_type = genomic RNA
accctgtaagcagatcc

SEQ ID NO: 7840 - RNA, 17 nt, Homo sapiens
  source 1..17: mol_type = genomic RNA
ccctgtaagcagatcct

SEQ ID NO: 7841 - RNA, 17 nt, Homo sapiens
  source 1..17: mol_type = genomic RNA
cctgtaagcagatccta

SEQ ID NO: 7842 - RNA, 17 nt, Homo sapiens
  source 1..17: mol_type = genomic RNA
ctgtaagcagatcctag

SEQ ID NO: 7843 - RNA, 17 nt, Homo sapiens
  source 1..17: mol_type = genomic RNA
tgtaagcagatcctaga

SEQ ID NO: 7844 - RNA, 17 nt, Homo sapiens
  source 1..17: mol_type = genomic RNA
gtaagcagatcctagag

SEQ ID NO: 7845 - RNA, 17 nt, Homo sapiens
  source 1..17: mol_type = genomic RNA
taagcagatcctagaga

SEQ ID NO: 7846 - RNA, 17 nt, Homo sapiens
  source 1..17: mol_type = genomic RNA
aagcagatcctagagaa

SEQ ID NO: 7847 - RNA, 17 nt, Homo sapiens
  source 1..17: mol_type = genomic RNA
agcagatcctagagaag

SEQ ID NO: 7848 - RNA, 17 nt, Homo sapiens
  source 1..17: mol_type = genomic RNA
gcagatcctagagaaga

SEQ ID NO: 7849 - RNA, 17 nt, Homo sapiens
  source 1..17: mol_type = genomic RNA
cagatcctagagaagag

SEQ ID NO: 7850 - RNA, 17 nt, Homo sapiens
  source 1..17: mol_type = genomic RNA
agatcctagagaagagt

SEQ ID NO: 7851 - RNA, 17 nt, Homo sapiens
  source 1..17: mol_type = genomic RNA
gatcctagagaagagtt

SEQ ID NO: 7852 - RNA, 17 nt, Homo sapiens
  source 1..17: mol_type = genomic RNA
agagttatatcacctgg

SEQ ID NO: 7853 - RNA, 17 nt, Homo sapiens
  source 1..17: mol_type = genomic RNA
gagttatatcacctggg

SEQ ID NO: 7854 - RNA, 17 nt, Homo sapiens
  source 1..17: mol_type = genomic RNA
agttatatcacctgggt

SEQ ID NO: 7855 - RNA, 17 nt, Homo sapiens
  source 1..17: mol_type = genomic RNA
gttatatcacctgggtg

SEQ ID NO: 7856 - RNA, 17 nt, Homo sapiens
  source 1..17: mol_type = genomic RNA
ttatatcacctgggtga

SEQ ID NO: 7857 - RNA, 17 nt, Homo sapiens
  source 1..17: mol_type = genomic RNA
tatatcacctgggtgat

SEQ ID NO: 7858 - RNA, 17 nt, Homo sapiens
  source 1..17: mol_type = genomic RNA
atatcacctgggtgatc

SEQ ID NO: 7859 - RNA, 17 nt, Homo sapiens
  source 1..17: mol_type = genomic RNA
tatcacctgggtgatca

SEQ ID NO: 7860 - RNA, 17 nt, Homo sapiens
  source 1..17: mol_type = genomic RNA
cagagatatgtcacaag

SEQ ID NO: 7861 - RNA, 17 nt, Homo sapiens
  source 1..17: mol_type = genomic RNA
agagatatgtcacaagc

SEQ ID NO: 7862 - RNA, 17 nt, Homo sapiens
  source 1..17: mol_type = genomic RNA
gagatatgtcacaagcc

SEQ ID NO: 7863 - RNA, 17 nt, Homo sapiens
  source 1..17: mol_type = genomic RNA
agatatgtcacaagccc

SEQ ID NO: 7864 - RNA, 17 nt, Homo sapiens
  source 1..17: mol_type = genomic RNA
gatatgtcacaagcccc

SEQ ID NO: 7865 - RNA, 17 nt, Homo sapiens
  source 1..17: mol_type = genomic RNA
atatgtcacaagccccc

SEQ ID NO: 7866 - RNA, 17 nt, Homo sapiens
  source 1..17: mol_type = genomic RNA
tatgtcacaagccccct

SEQ ID NO: 7867 - RNA, 17 nt, Homo sapiens
  source 1..17: mol_type = genomic RNA
atgtcacaagccccctg

SEQ ID NO: 7868 - RNA, 17 nt, Homo sapiens
  source 1..17: mol_type = genomic RNA
tgtcacaagccccctgt

SEQ ID NO: 7869 - RNA, 17 nt, Homo sapiens
  source 1..17: mol_type = genomic RNA
gtcacaagccccctgta

SEQ ID NO: 7870 - RNA, 17 nt, Homo sapiens
  source 1..17: mol_type = genomic RNA
tcacaagccccctgtag

SEQ ID NO: 7871 - RNA, 17 nt, Homo sapiens
  source 1..17: mol_type = genomic RNA
cacaagccccctgtagg

SEQ ID NO: 7872 - RNA, 17 nt, Homo sapiens
  source 1..17: mol_type = genomic RNA
caagccccctgtaggca

SEQ ID NO: 7873 - RNA, 17 nt, Homo sapiens
  source 1..17: mol_type = genomic RNA
aagccccctgtaggcag

SEQ ID NO: 7874 - RNA, 17 nt, Homo sapiens
  source 1..17: mol_type = genomic RNA
tgggtgatcagtgcagt

SEQ ID NO: 7875 - RNA, 17 nt, Homo sapiens
  source 1..17: mol_type = genomic RNA
gggtgatcagtgcagtg

SEQ ID NO: 7876 - RNA, 17 nt, Homo sapiens
  source 1..17: mol_type = genomic RNA
gtgtagccagagcctag

SEQ ID NO: 7877 - RNA, 17 nt, Homo sapiens
  source 1..17: mol_type = genomic RNA
tgtagccagagcctaga

SEQ ID NO: 7878 - RNA, 17 nt, Homo sapiens
  source 1..17: mol_type = genomic RNA
gtagccagagcctagac

SEQ ID NO: 7879 - RNA, 17 nt, Homo sapiens
  source 1..17: mol_type = genomic RNA
aaagttacagcacctgg

SEQ ID NO: 7880 - RNA, 17 nt, Homo sapiens
  source 1..17: mol_type = genomic RNA
aagttacagcacctggg

SEQ ID NO: 7881 - RNA, 17 nt, Homo sapiens
  source 1..17: mol_type = genomic RNA
agttacagcacctggga

SEQ ID NO: 7882 - RNA, 17 nt, Homo sapiens
  source 1..17: mol_type = genomic RNA
gttacagcacctgggag

SEQ ID NO: 7883 - RNA, 17 nt, Homo sapiens
  source 1..17: mol_type = genomic RNA
ttacagcacctgggaga

SEQ ID NO: 7884 - RNA, 17 nt, Homo sapiens
  source 1..17: mol_type = genomic RNA
tacagcacctgggagat

SEQ ID NO: 7885 - RNA, 17 nt, Homo sapiens
  source 1..17: mol_type = genomic RNA
acagcacctgggagatc

SEQ ID NO: 7886 - RNA, 17 nt, Homo sapiens
  source 1..17: mol_type = genomic RNA
cagcacctgggagatca

SEQ ID NO: 7887 - RNA, 17 nt, Homo sapiens
  source 1..17: mol_type = genomic RNA
agcacctgggagatcag

SEQ ID NO: 7888 - RNA, 17 nt, Homo sapiens
  source 1..17: mol_type = genomic RNA
gcacctgggagatcagt

SEQ ID NO: 7889 - RNA, 17 nt, Homo sapiens
  source 1..17: mol_type = genomic RNA
cacctgggagatcagtg

SEQ ID NO: 7890 - RNA, 17 nt, Homo sapiens
  source 1..17: mol_type = genomic RNA
acctgggagatcagtgc

SEQ ID NO: 7891 - RNA, 17 nt, Homo sapiens
  source 1..17: mol_type = genomic RNA
cctgggagatcagtgca

SEQ ID NO: 7892 - RNA, 17 nt, Homo sapiens
  source 1..17: mol_type = genomic RNA
ctgggagatcagtgcag

SEQ ID NO: 7893 - RNA, 17 nt, Homo sapiens
  source 1..17: mol_type = genomic RNA
tgggagatcagtgcaga

SEQ ID NO: 7894 - RNA, 17 nt, Homo sapiens
  source 1..17: mol_type = genomic RNA
gggagatcagtgcagag

SEQ ID NO: 7895 - RNA, 17 nt, Homo sapiens
  source 1..17: mol_type = genomic RNA
ggagatcagtgcagaga

SEQ ID NO: 7896 - RNA, 17 nt, Homo sapiens
  source 1..17: mol_type = genomic RNA
gagatcagtgcagagat

SEQ ID NO: 7897 - RNA, 17 nt, Homo sapiens
  source 1..17: mol_type = genomic RNA
agatcagtgcagagata

SEQ ID NO: 7898 - RNA, 17 nt, Homo sapiens
  source 1..17: mol_type = genomic RNA
atgtcacaatgtcccca

SEQ ID NO: 7899 - RNA, 17 nt, Homo sapiens
  source 1..17: mol_type = genomic RNA
tgtcacaatgtccccag

SEQ ID NO: 7900 - RNA, 17 nt, Homo sapiens
  source 1..17: mol_type = genomic RNA
gtcacaatgtccccagt

SEQ ID NO: 7901 - RNA, 17 nt, Homo sapiens
  source 1..17: mol_type = genomic RNA
tcacaatgtccccagta

SEQ ID NO: 7902 - RNA, 17 nt, Homo sapiens
  source 1..17: mol_type = genomic RNA
cacaatgtccccagtag

SEQ ID NO: 7903 - RNA, 17 nt, Homo sapiens
  source 1..17: mol_type = genomic RNA
acaatgtccccagtagg

SEQ ID NO: 7904 - RNA, 17 nt, Homo sapiens
  source 1..17: mol_type = genomic RNA
caatgtccccagtaggc

SEQ ID NO: 7905 - RNA, 17 nt, Homo sapiens
  source 1..17: mol_type = genomic RNA
aatgtccccagtaggca

SEQ ID NO: 7906 - RNA, 17 nt, Homo sapiens
  source 1..17: mol_type = genomic RNA
atgtccccagtaggcag

SEQ ID NO: 7907 - RNA, 17 nt, Homo sapiens
  source 1..17: mol_type = genomic RNA
tgtccccagtaggcaga

SEQ ID NO: 7908 - RNA, 17 nt, Homo sapiens
  source 1..17: mol_type = genomic RNA
gtccccagtaggcagag

SEQ ID NO: 7909 - RNA, 17 nt, Homo sapiens
  source 1..17: mol_type = genomic RNA
tccccagtaggcagaga

SEQ ID NO: 7910 - RNA, 17 nt, Homo sapiens
  source 1..17: mol_type = genomic RNA
ccccagtaggcagagac

SEQ ID NO: 7911 - RNA, 17 nt, Homo sapiens
  source 1..17: mol_type = genomic RNA
cccagtaggcagagacc

SEQ ID NO: 7912 - RNA, 17 nt, Homo sapiens
  source 1..17: mol_type = genomic RNA
ccagtaggcagagacca

SEQ ID NO: 7913 - RNA, 17 nt, Homo sapiens
  source 1..17: mol_type = genomic RNA
cagtaggcagagaccag

SEQ ID NO: 7914 - RNA, 17 nt, Homo sapiens
  source 1..17: mol_type = genomic RNA
agtaggcagagaccagg

SEQ ID NO: 7915 - RNA, 17 nt, Homo sapiens
  source 1..17: mol_type = genomic RNA
gcagagaccaggcaaga

SEQ ID NO: 7916 - RNA, 17 nt, Homo sapiens
  source 1..17: mol_type = genomic RNA
cagagaccaggcaagag

SEQ ID NO: 7917 - RNA, 17 nt, Homo sapiens
  source 1..17: mol_type = genomic RNA
agagaccaggcaagagt

SEQ ID NO: 7918 - RNA, 17 nt, Homo sapiens
  source 1..17: mol_type = genomic RNA
gagaccaggcaagagtt

SEQ ID NO: 7919 - RNA, 17 nt, Homo sapiens
  source 1..17: mol_type = genomic RNA
agaccaggcaagagttg

SEQ ID NO: 7920 - RNA, 17 nt, Homo sapiens
  source 1..17: mol_type = genomic RNA
gaccaggcaagagttgg

SEQ ID NO: 7921 - RNA, 17 nt, Homo sapiens
  source 1..17: mol_type = genomic RNA
accaggcaagagttgga

SEQ ID NO: 7922 - RNA, 17 nt, Homo sapiens
  source 1..17: mol_type = genomic RNA
ccaggcaagagttggat

SEQ ID NO: 7923 - RNA, 17 nt, Homo sapiens
  source 1..17: mol_type = genomic RNA
caggcaagagttggatc

SEQ ID NO: 7924 - RNA, 17 nt, Homo sapiens
  source 1..17: mol_type = genomic RNA
aggcaagagttggatca

SEQ ID NO: 7925 - RNA, 17 nt, Homo sapiens
  source 1..17: mol_type = genomic RNA
ggcaagagttggatcac

SEQ ID NO: 7926 - RNA, 17 nt, Homo sapiens
  source 1..17: mol_type = genomic RNA
gcaagagttggatcacc

SEQ ID NO: 7927 - RNA, 17 nt, Homo sapiens
  source 1..17: mol_type = genomic RNA
caagagttggatcacct

SEQ ID NO: 7928 - RNA, 17 nt, Homo sapiens
  source 1..17: mol_type = genomic RNA
aagagttggatcacctc

SEQ ID NO: 7929 - RNA, 17 nt, Homo sapiens
  source 1..17: mol_type = genomic RNA
agagttggatcacctcg

SEQ ID NO: 7930 - RNA, 17 nt, Homo sapiens
  source 1..17: mol_type = genomic RNA
gagttggatcacctcgg

SEQ ID NO: 7931 - RNA, 17 nt, Homo sapiens
  source 1..17: mol_type = genomic RNA
agttggatcacctcggg

SEQ ID NO: 7932 - RNA, 17 nt, Homo sapiens
  source 1..17: mol_type = genomic RNA
gttggatcacctcggga

SEQ ID NO: 7933 - RNA, 17 nt, Homo sapiens
  source 1..17: mol_type = genomic RNA
ttggatcacctcgggat

SEQ ID NO: 7934 - RNA, 17 nt, Homo sapiens
  source 1..17: mol_type = genomic RNA
tggatcacctcgggatc

SEQ ID NO: 7935 - RNA, 17 nt, Homo sapiens
  source 1..17: mol_type = genomic RNA
ggatcacctcgggatca

SEQ ID NO: 7936 - RNA, 17 nt, Homo sapiens
  source 1..17: mol_type = genomic RNA
gatcacctcgggatcag

SEQ ID NO: 7937 - RNA, 17 nt, Homo sapiens
  source 1..17: mol_type = genomic RNA
atcacctcgggatcagt

SEQ ID NO: 7938 - RNA, 17 nt, Homo sapiens
  source 1..17: mol_type = genomic RNA
tcacctcgggatcagtg

SEQ ID NO: 7939 - RNA, 17 nt, Homo sapiens
  source 1..17: mol_type = genomic RNA
cacctcgggatcagtgc

SEQ ID NO: 7940 - RNA, 17 nt, Homo sapiens
  source 1..17: mol_type = genomic RNA
acctcgggatcagtgca

SEQ ID NO: 7941 - RNA, 17 nt, Homo sapiens
  source 1..17: mol_type = genomic RNA
cctcgggatcagtgcag

SEQ ID NO: 7942 - RNA, 17 nt, Homo sapiens
  source 1..17: mol_type = genomic RNA
ctcgggatcagtgcaga

SEQ ID NO: 7943 - RNA, 17 nt, Homo sapiens
  source 1..17: mol_type = genomic RNA
tcgggatcagtgcagag

SEQ ID NO: 7944 - RNA, 17 nt, Homo sapiens
  source 1..17: mol_type = genomic RNA
cgggatcagtgcagaga

SEQ ID NO: 7945 - RNA, 17 nt, Homo sapiens
  source 1..17: mol_type = genomic RNA
agtgcagagatatgtct

SEQ ID NO: 7946 - RNA, 17 nt, Homo sapiens
  source 1..17: mol_type = genomic RNA
gtgcagagatatgtctc

SEQ ID NO: 7947 - RNA, 17 nt, Homo sapiens
  source 1..17: mol_type = genomic RNA
tgcagagatatgtctca

SEQ ID NO: 7948 - RNA, 17 nt, Homo sapiens
  source 1..17: mol_type = genomic RNA
gcagagatatgtctcaa

SEQ ID NO: 7949 - RNA, 17 nt, Homo sapiens
  source 1..17: mol_type = genomic RNA
agatatgtctcaatccc

SEQ ID NO: 7950 - RNA, 17 nt, Homo sapiens
  source 1..17: mol_type = genomic RNA
gatatgtctcaatcccc

SEQ ID NO: 7951 - RNA, 17 nt, Homo sapiens
  source 1..17: mol_type = genomic RNA
atatgtctcaatccccc

SEQ ID NO: 7952 - RNA, 17 nt, Homo sapiens
  source 1..17: mol_type = genomic RNA
tatgtctcaatccccct

SEQ ID NO: 7953 - RNA, 17 nt, Homo sapiens
  source 1..17: mol_type = genomic RNA
atgtctcaatccccctg

SEQ ID NO: 7954 - RNA, 17 nt, Homo sapiens
  source 1..17: mol_type = genomic RNA
tgtctcaatccccctgt

SEQ ID NO: 7955 - RNA, 17 nt, Homo sapiens
  source 1..17: mol_type = genomic RNA
gtctcaatccccctgtg

SEQ ID NO: 7956 - RNA, 17 nt, Homo sapiens
  source 1..17: mol_type = genomic RNA
tctcaatccccctgtgg

SEQ ID NO: 7957 - RNA, 17 nt, Homo sapiens
  source 1..17: mol_type = genomic RNA
ctcaatccccctgtggg

SEQ ID NO: 7958 - RNA, 17 nt, Homo sapiens
  source 1..17: mol_type = genomic RNA
tcaatccccctgtgggc

SEQ ID NO: 7959 - RNA, 17 nt, Homo sapiens
  source 1..17: mol_type = genomic RNA
caatccccctgtgggca

SEQ ID NO: 7960 - RNA, 17 nt, Homo sapiens
  source 1..17: mol_type = genomic RNA
aatccccctgtgggcac

SEQ ID NO: 7961 - RNA, 17 nt, Homo sapiens
  source 1..17: mol_type = genomic RNA
atccccctgtgggcaca

SEQ ID NO: 7962 - RNA, 17 nt, Homo sapiens
  source 1..17: mol_type = genomic RNA
cctgtgggcacagccta

SEQ ID NO: 7963 - RNA, 17 nt, Homo sapiens
  source 1..17: mol_type = genomic RNA
ctgtgggcacagcctag

SEQ ID NO: 7964 - RNA, 17 nt, Homo sapiens
  source 1..17: mol_type = genomic RNA
tgtgggcacagcctaga

SEQ ID NO: 7965 - RNA, 17 nt, Homo sapiens
  source 1..17: mol_type = genomic RNA
gggcacagcctagacaa

SEQ ID NO: 7966 - RNA, 17 nt, Homo sapiens
  source 1..17: mol_type = genomic RNA
ggcacagcctagacaag

SEQ ID NO: 7967 - RNA, 17 nt, Homo sapiens
  source 1..17: mol_type = genomic RNA
gcacagcctagacaaga

SEQ ID NO: 7968 - RNA, 17 nt, Homo sapiens
  source 1..17: mol_type = genomic RNA
cacagcctagacaagag

SEQ ID NO: 7969 - RNA, 17 nt, Homo sapiens
  source 1..17: mol_type = genomic RNA
acagcctagacaagagt

SEQ ID NO: 7970 - RNA, 17 nt, Homo sapiens
  source 1..17: mol_type = genomic RNA
cagcctagacaagagtt

SEQ ID NO: 7971 - RNA, 17 nt, Homo sapiens
  source 1..17: mol_type = genomic RNA
atcacctcggttaacag

SEQ ID NO: 7972 - RNA, 17 nt, Homo sapiens
  source 1..17: mol_type = genomic RNA
tcacctcggttaacagt

SEQ ID NO: 7973 - RNA, 17 nt, Homo sapiens
  source 1..17: mol_type = genomic RNA
cacctcggttaacagtg

SEQ ID NO: 7974 - RNA, 17 nt, Homo sapiens
  source 1..17: mol_type = genomic RNA
acctcggttaacagtgc

SEQ ID NO: 7975 - RNA, 17 nt, Homo sapiens
  source 1..17: mol_type = genomic RNA
cctcggttaacagtgca

SEQ ID NO: 7976 - RNA, 17 nt, Homo sapiens
  source 1..17: mol_type = genomic RNA
ctcggttaacagtgcag

SEQ ID NO: 7977 - RNA, 17 nt, Homo sapiens
  source 1..17: mol_type = genomic RNA
tcggttaacagtgcaga

SEQ ID NO: 7978 - RNA, 17 nt, Homo sapiens
  source 1..17: mol_type = genomic RNA
cggttaacagtgcagag

SEQ ID NO: 7979 - RNA, 17 nt, Homo sapiens
  source 1..17: mol_type = genomic RNA
ggttaacagtgcagaga

SEQ ID NO: 7980 - RNA, 17 nt, Homo sapiens
  source 1..17: mol_type = genomic RNA
gttaacagtgcagagat

SEQ ID NO: 7981 - RNA, 17 nt, Homo sapiens
  source 1..17: mol_type = genomic RNA
ttaacagtgcagagata

SEQ ID NO: 7982 - RNA, 17 nt, Homo sapiens
  source 1..17: mol_type = genomic RNA
taacagtgcagagatat

SEQ ID NO: 7983 - RNA, 17 nt, Homo sapiens
  source 1..17: mol_type = genomic RNA
aacagtgcagagatatg

SEQ ID NO: 7984 - RNA, 17 nt, Homo sapiens
  source 1..17: mol_type = genomic RNA
acagtgcagagatatgt

SEQ ID NO: 7985 - RNA, 17 nt, Homo sapiens
  source 1..17: mol_type = genomic RNA
gtgcagagatatgtcaa

SEQ ID NO: 7986 - RNA, 17 nt, Homo sapiens
  source 1..17: mol_type = genomic RNA
tgcagagatatgtcaaa

SEQ ID NO: 7987 - RNA, 17 nt, Homo sapiens
  source 1..17: mol_type = genomic RNA
agatatgtcaaaatgcc

SEQ ID NO: 7988 - RNA, 17 nt, Homo sapiens
  source 1..17: mol_type = genomic RNA
gatatgtcaaaatgccc

SEQ ID NO: 7989 - RNA, 17 nt, Homo sapiens
  source 1..17: mol_type = genomic RNA
atatgtcaaaatgcccc

SEQ ID NO: 7990 - RNA, 17 nt, Homo sapiens
  source 1..17: mol_type = genomic RNA
tatgtcaaaatgcccct

SEQ ID NO: 7991 - RNA, 17 nt, Homo sapiens
  source 1..17: mol_type = genomic RNA
atgtcaaaatgcccctg

SEQ ID NO: 7992 - RNA, 17 nt, Homo sapiens
  source 1..17: mol_type = genomic RNA
tgtcaaaatgcccctgt

SEQ ID NO: 7993 - RNA, 17 nt, Homo sapiens
  source 1..17: mol_type = genomic RNA
gtcaaaatgcccctgta

SEQ ID NO: 7994 - RNA, 17 nt, Homo sapiens
  source 1..17: mol_type = genomic RNA
tcaaaatgcccctgtag

SEQ ID NO: 7995 - RNA, 17 nt, Homo sapiens
  source 1..17: mol_type = genomic RNA
caaaatgcccctgtagg

SEQ ID NO: 7996 - RNA, 17 nt, Homo sapiens
  source 1..17: mol_type = genomic RNA
aaaatgcccctgtaggc

SEQ ID NO: 7997 - RNA, 17 nt, Homo sapiens
  source 1..17: mol_type = genomic RNA
aaatgcccctgtaggca

SEQ ID NO: 7998 - RNA, 17 nt, Homo sapiens
  source 1..17: mol_type = genomic RNA
aatgcccctgtaggcaa

SEQ ID NO: 7999 - RNA, 17 nt, Homo sapiens
  source 1..17: mol_type = genomic RNA
atgcccctgtaggcaag

SEQ ID NO: 8000 - RNA, 17 nt, Homo sapiens
  source 1..17: mol_type = genomic RNA
cccctgtaggcaagcct

SEQ ID NO: 8001 - RNA, 17 nt, Homo sapiens
  source 1..17: mol_type = genomic RNA
ccctgtaggcaagccta

SEQ ID NO: 8002 - RNA, 17 nt, Homo sapiens
  source 1..17: mol_type = genomic RNA
cctgtaggcaagcctac

SEQ ID NO: 8003 - RNA, 17 nt, Homo sapiens
  source 1..17: mol_type = genomic RNA
ctgtaggcaagcctaca

SEQ ID NO: 8004 - RNA, 17 nt, Homo sapiens
  source 1..17: mol_type = genomic RNA
tgtaggcaagcctacac

SEQ ID NO: 8005 - RNA, 17 nt, Homo sapiens
  source 1..17: mol_type = genomic RNA
gtaggcaagcctacaca

SEQ ID NO: 8006 - RNA, 17 nt, Homo sapiens
  source 1..17: mol_type = genomic RNA
taggcaagcctacacaa

SEQ ID NO: 8007 - RNA, 17 nt, Homo sapiens
  source 1..17: mol_type = genomic RNA
aggcaagcctacacaag

SEQ ID NO: 8008 - RNA, 17 nt, Homo sapiens
  source 1..17: mol_type = genomic RNA
ggcaagcctacacaagt

SEQ ID NO: 8009 - RNA, 17 nt, Homo sapiens
  source 1..17: mol_type = genomic RNA
gcaagcctacacaagta

SEQ ID NO: 8010 - RNA, 17 nt, Homo sapiens
  source 1..17: mol_type = genomic RNA
caagcctacacaagtat

SEQ ID NO: 8011 - RNA, 17 nt, Homo sapiens
  source 1..17: mol_type = genomic RNA
aagcctacacaagtatt

SEQ ID NO: 8012 - RNA, 17 nt, Homo sapiens
  source 1..17: mol_type = genomic RNA
gcctacacaagtattac

SEQ ID NO: 8013 - RNA, 17 nt, Homo sapiens
  source 1..17: mol_type = genomic RNA
gatatgtcacaataccc

SEQ ID NO: 8014 - RNA, 17 nt, Homo sapiens
  source 1..17: mol_type = genomic RNA
atatgtcacaatacccc

SEQ ID NO: 8015 - RNA, 17 nt, Homo sapiens
  source 1..17: mol_type = genomic RNA
tatgtcacaataccccc

SEQ ID NO: 8016 - RNA, 17 nt, Homo sapiens
  source 1..17: mol_type = genomic RNA
atgtcacaataccccct

SEQ ID NO: 8017 - RNA, 17 nt, Homo sapiens
  source 1..17: mol_type = genomic RNA
tgtcacaataccccctg

SEQ ID NO: 8018 - RNA, 17 nt, Homo sapiens
  source 1..17: mol_type = genomic RNA
cacaataccccctgtaa

SEQ ID NO: 8019 - RNA, 17 nt, Homo sapiens
  source 1..17: mol_type = genomic RNA
acaataccccctgtaag

SEQ ID NO: 8020 - RNA, 17 nt, Homo sapiens
  source 1..17: mol_type = genomic RNA
caataccccctgtaagc

SEQ ID NO: 8021 - RNA, 17 nt, Homo sapiens
  source 1..17: mol_type = genomic RNA
aataccccctgtaagca

SEQ ID NO: 8022 - RNA, 17 nt, Homo sapiens
  source 1..17: mol_type = genomic RNA
ataccccctgtaagcag

SEQ ID NO: 8023 - RNA, 17 nt, Homo sapiens
  source 1..17: mol_type = genomic RNA
taccccctgtaagcaga

SEQ ID NO: 8024 - RNA, 17 nt, Homo sapiens
  source 1..17: mol_type = genomic RNA
accccctgtaagcagag

SEQ ID NO: 8025 - RNA, 17 nt, Homo sapiens
  source 1..17: mol_type = genomic RNA
ccccctgtaagcagagc

SEQ ID NO: 8026 - RNA, 17 nt, Homo sapiens
  source 1..17: mol_type = genomic RNA
cccctgtaagcagagcc

SEQ ID NO: 8027 - RNA, 17 nt, Homo sapiens
  source 1..17: mol_type = genomic RNA
ccctgtaagcagagcct

SEQ ID NO: 8028 - RNA, 17 nt, Homo sapiens
  source 1..17: mol_type = genomic RNA
cctgtaagcagagccta

SEQ ID NO: 8029 - RNA, 17 nt, Homo sapiens
  source 1..17: mol_type = genomic RNA
ctgtaagcagagcctag

SEQ ID NO: 8030 - RNA, 17 nt, Homo sapiens
  source 1..17: mol_type = genomic RNA
tgtaagcagagcctaga

SEQ ID NO: 8031 - RNA, 17 nt, Homo sapiens
  source 1..17: mol_type = genomic RNA
gtaagcagagcctagac

SEQ ID NO: 8032 - RNA, 17 nt, Homo sapiens
  source 1..17: mol_type = genomic RNA
taagcagagcctagaca

SEQ ID NO: 8033 - RNA, 17 nt, Homo sapiens
  source 1..17: mol_type = genomic RNA
aagcagagcctagacaa

SEQ ID NO: 8034 - RNA, 17 nt, Homo sapiens
  source 1..17: mol_type = genomic RNA
agcagagcctagacaag

SEQ ID NO: 8035 - RNA, 17 nt, Homo sapiens
  source 1..17: mol_type = genomic RNA
gtgcagagatatgtgac

SEQ ID NO: 8036 - RNA, 17 nt, Homo sapiens
  source 1..17: mol_type = genomic RNA
tgcagagatatgtgaca

SEQ ID NO: 8037 - RNA, 17 nt, Homo sapiens
  source 1..17: mol_type = genomic RNA
gcagagatatgtgacaa

SEQ ID NO: 8038 - RNA, 17 nt, Homo sapiens
  source 1..17: mol_type = genomic RNA
cagagatatgtgacaag

SEQ ID NO: 8039 - RNA, 17 nt, Homo sapiens
  source 1..17: mol_type = genomic RNA
agagatatgtgacaagg

SEQ ID NO: 8040 - RNA, 17 nt, Homo sapiens
  source 1..17: mol_type = genomic RNA
gagatatgtgacaaggc

SEQ ID NO: 8041 - RNA, 17 nt, Homo sapiens
  source 1..17: mol_type = genomic RNA
agatatgtgacaaggcc

SEQ ID NO: 8042 - RNA, 17 nt, Homo sapiens
  source 1..17: mol_type = genomic RNA
gatatgtgacaaggccc

SEQ ID NO: 8043 - RNA, 17 nt, Homo sapiens
  source 1..17: mol_type = genomic RNA
atatgtgacaaggcccc

SEQ ID NO: 8044 - RNA, 17 nt, Homo sapiens
  source 1..17: mol_type = genomic RNA
tatgtgacaaggcccct

SEQ ID NO: 8045 - RNA, 17 nt, Homo sapiens
  source 1..17: mol_type = genomic RNA
atgtgacaaggcccctt

SEQ ID NO: 8046 - RNA, 17 nt, Homo sapiens
  source 1..17: mol_type = genomic RNA
agcagagcctagacaat

SEQ ID NO: 8047 - RNA, 17 nt, Homo sapiens
  source 1..17: mol_type = genomic RNA
gcagagcctagacaata

SEQ ID NO: 8048 - RNA, 17 nt, Homo sapiens
  source 1..17: mol_type = genomic RNA
cagagcctagacaatag

SEQ ID NO: 8049 - RNA, 17 nt, Homo sapiens
  source 1..17: mol_type = genomic RNA
agagcctagacaatagt

SEQ ID NO: 8050 - RNA, 17 nt, Homo sapiens
  source 1..17: mol_type = genomic RNA
gagcctagacaatagtt

SEQ ID NO: 8051 - RNA, 17 nt, Homo sapiens
  source 1..17: mol_type = genomic RNA
agttacatcacctgagt

SEQ ID NO: 8052 - RNA, 17 nt, Homo sapiens
  source 1..17: mol_type = genomic RNA
gttacatcacctgagtg

SEQ ID NO: 8053 - RNA, 17 nt, Homo sapiens
  source 1..17: mol_type = genomic RNA
ttacatcacctgagtga

SEQ ID NO: 8054 - RNA, 17 nt, Homo sapiens
  source 1..17: mol_type = genomic RNA
tacatcacctgagtgat

SEQ ID NO: 8055 - RNA, 17 nt, Homo sapiens
  source 1..17: mol_type = genomic RNA
acatcacctgagtgatc

SEQ ID NO: 8056 - RNA, 17 nt, Homo sapiens
  source 1..17: mol_type = genomic RNA
catcacctgagtgatca

SEQ ID NO: 8057 - RNA, 17 nt, Homo sapiens
  source 1..17: mol_type = genomic RNA
atcacctgagtgatcag

SEQ ID NO: 8058 - RNA, 17 nt, Homo sapiens
  source 1..17: mol_type = genomic RNA
tcacctgagtgatcagt

SEQ ID NO: 8059 - RNA, 17 nt, Homo sapiens
  source 1..17: mol_type = genomic RNA
cacctgagtgatcagtg

SEQ ID NO: 8060 - RNA, 17 nt, Homo sapiens
  source 1..17: mol_type = genomic RNA
acctgagtgatcagtgc

SEQ ID NO: 8061 - RNA, 17 nt, Homo sapiens
  source 1..17: mol_type = genomic RNA
cctgagtgatcagtgca

SEQ ID NO: 8062 - RNA, 17 nt, Homo sapiens
  source 1..17: mol_type = genomic RNA
ctgagtgatcagtgcag

SEQ ID NO: 8063 - RNA, 17 nt, Homo sapiens
  source 1..17: mol_type = genomic RNA
tgagtgatcagtgcaga

SEQ ID NO: 8064 - RNA, 17 nt, Homo sapiens
  source 1..17: mol_type = genomic RNA
gagtgatcagtgcagag

SEQ ID NO: 8065 - RNA, 17 nt, Homo sapiens
  source 1..17: mol_type = genomic RNA
tgatcagtgcagagatc

SEQ ID NO: 8066 - RNA, 17 nt, Homo sapiens
  source 1..17: mol_type = genomic RNA
gatcagtgcagagatct

SEQ ID NO: 8067 - RNA, 17 nt, Homo sapiens
  source 1..17: mol_type = genomic RNA
atcagtgcagagatctg

SEQ ID NO: 8068 - RNA, 17 nt, Homo sapiens
  source 1..17: mol_type = genomic RNA
tcagtgcagagatctgt

SEQ ID NO: 8069 - RNA, 17 nt, Homo sapiens
  source 1..17: mol_type = genomic RNA
cagtgcagagatctgtc

SEQ ID NO: 8070 - RNA, 17 nt, Homo sapiens
  source 1..17: mol_type = genomic RNA
agtgcagagatctgtca

SEQ ID NO: 8071 - RNA, 17 nt, Homo sapiens
  source 1..17: mol_type = genomic RNA
gtgcagagatctgtcac

SEQ ID NO: 8072 - RNA, 17 nt, Homo sapiens
  source 1..17: mol_type = genomic RNA
tgcagagatctgtcaca

SEQ ID NO: 8073 - RNA, 17 nt, Homo sapiens
  source 1..17: mol_type = genomic RNA
gcagagatctgtcacaa

SEQ ID NO: 8074 - RNA, 17 nt, Homo sapiens
  source 1..17: mol_type = genomic RNA
cagagatctgtcacaat

SEQ ID NO: 8075 - RNA, 17 nt, Homo sapiens
  source 1..17: mol_type = genomic RNA
ctgtcacaatgcccctt

SEQ ID NO: 8076 - RNA, 17 nt, Homo sapiens
  source 1..17: mol_type = genomic RNA
tgtcacaatgccccttt

SEQ ID NO: 8077 - RNA, 17 nt, Homo sapiens
  source 1..17: mol_type = genomic RNA
gtcacaatgccccttta

SEQ ID NO: 8078 - RNA, 17 nt, Homo sapiens
  source 1..17: mol_type = genomic RNA
tcacaatgcccctttag

SEQ ID NO: 8079 - RNA, 17 nt, Homo sapiens
  source 1..17: mol_type = genomic RNA
cacaatgcccctttagg

SEQ ID NO: 8080 - RNA, 17 nt, Homo sapiens
  source 1..17: mol_type = genomic RNA
acaatgcccctttaggc

SEQ ID NO: 8081 - RNA, 17 nt, Homo sapiens
  source 1..17: mol_type = genomic RNA
caatgcccctttaggca

SEQ ID NO: 8082 - RNA, 17 nt, Homo sapiens
  source 1..17: mol_type = genomic RNA
aatgcccctttaggcag

SEQ ID NO: 8083 - RNA, 17 nt, Homo sapiens
  source 1..17: mol_type = genomic RNA
atgcccctttaggcaga

SEQ ID NO: 8084 - RNA, 17 nt, Homo sapiens
  source 1..17: mol_type = genomic RNA
tgcccctttaggcagag

SEQ ID NO: 8085 - RNA, 17 nt, Homo sapiens
  source 1..17: mol_type = genomic RNA
gcccctttaggcagagc

SEQ ID NO: 8086 - RNA, 17 nt, Homo sapiens
  source 1..17: mol_type = genomic RNA
cccctttaggcagagct

SEQ ID NO: 8087 - RNA, 17 nt, Homo sapiens
  source 1..17: mol_type = genomic RNA
ccctttaggcagagctt

SEQ ID NO: 8088 - RNA, 17 nt, Homo sapiens
  source 1..17: mol_type = genomic RNA
cctttaggcagagctta

SEQ ID NO: 8089 - RNA, 17 nt, Homo sapiens
  source 1..17: mol_type = genomic RNA
ttaggcagagcttaaac

SEQ ID NO: 8090 - RNA, 17 nt, Homo sapiens
  source 1..17: mol_type = genomic RNA
catcacctgtgtgatca

SEQ ID NO: 8091 - RNA, 17 nt, Homo sapiens
  source 1..17: mol_type = genomic RNA
atcacctgtgtgatcag

SEQ ID NO: 8092 - RNA, 17 nt, Homo sapiens
  source 1..17: mol_type = genomic RNA
tcacctgtgtgatcagt

SEQ ID NO: 8093 - RNA, 17 nt, Homo sapiens
  source 1..17: mol_type = genomic RNA
cacctgtgtgatcagtg

SEQ ID NO: 8094 - RNA, 17 nt, Homo sapiens
  source 1..17: mol_type = genomic RNA
aatccaagacaagagtc

SEQ ID NO: 8095 - RNA, 17 nt, Homo sapiens
  source 1..17: mol_type = genomic RNA
ctttaggcagagcttag

SEQ ID NO: 8096 - RNA, 17 nt, Homo sapiens
  source 1..17: mol_type = genomic RNA
tttaggcagagcttaga

SEQ ID NO: 8097 - RNA, 17 nt, Homo sapiens
  source 1..17: mol_type = genomic RNA
ttaggcagagcttagac

SEQ ID NO: 8098 - RNA, 17 nt, Homo sapiens
  source 1..17: mol_type = genomic RNA
taggcagagcttagact

SEQ ID NO: 8099 - RNA, 17 nt, Homo sapiens
  source 1..17: mol_type = genomic RNA
aggcagagcttagacta

SEQ ID NO: 8100 - RNA, 17 nt, Homo sapiens
  source 1..17: mol_type = genomic RNA
ggcagagcttagactag

SEQ ID NO: 8101 - RNA, 17 nt, Homo sapiens
  source 1..17: mol_type = genomic RNA
gcagagcttagactaga

SEQ ID NO: 8102 - RNA, 17 nt, Homo sapiens
  source 1..17: mol_type = genomic RNA
cagagcttagactagag

SEQ ID NO: 8103 - RNA, 17 nt, Homo sapiens
  source 1..17: mol_type = genomic RNA
agagcttagactagagt

SEQ ID NO: 8104 - RNA, 17 nt, Homo sapiens
  source 1..17: mol_type = genomic RNA
gagcttagactagagtt

SEQ ID NO: 8105 - RNA, 17 nt, Homo sapiens
  source 1..17: mol_type = genomic RNA
gactagagttacatcac

SEQ ID NO: 8106 - RNA, 17 nt, Homo sapiens
  source 1..17: mol_type = genomic RNA
tgcccccataggcaaat

SEQ ID NO: 8107 - RNA, 17 nt, Homo sapiens
  source 1..17: mol_type = genomic RNA
gcccccataggcaaatc

SEQ ID NO: 8108 - RNA, 17 nt, Homo sapiens
  source 1..17: mol_type = genomic RNA
cccccataggcaaatcc

SEQ ID NO: 8109 - RNA, 17 nt, Homo sapiens
  source 1..17: mol_type = genomic RNA
ccccataggcaaatcca

SEQ ID NO: 8110 - RNA, 17 nt, Homo sapiens
  source 1..17: mol_type = genomic RNA
cccataggcaaatccaa

SEQ ID NO: 8111 - RNA, 17 nt, Homo sapiens
  source 1..17: mol_type = genomic RNA
ccataggcaaatccaag

SEQ ID NO: 8112 - RNA, 17 nt, Homo sapiens
  source 1..17: mol_type = genomic RNA
cataggcaaatccaaga

SEQ ID NO: 8113 - RNA, 17 nt, Homo sapiens
  source 1..17: mol_type = genomic RNA
ataggcaaatccaagac

SEQ ID NO: 8114 - RNA, 17 nt, Homo sapiens
  source 1..17: mol_type = genomic RNA
taggcaaatccaagaca

SEQ ID NO: 8115 - RNA, 17 nt, Homo sapiens
  source 1..17: mol_type = genomic RNA
aggcaaatccaagacaa

SEQ ID NO: 8116 - RNA, 17 nt, Homo sapiens
  source 1..17: mol_type = genomic RNA
ggcaaatccaagacaag

SEQ ID NO: 8117 - RNA, 17 nt, Homo sapiens
  source 1..17: mol_type = genomic RNA
gcaaatccaagacaaga

SEQ ID NO: 8118 - RNA, 17 nt, Homo sapiens
  source 1..17: mol_type = genomic RNA
caaatccaagacaagag

SEQ ID NO: 8119 - RNA, 17 nt, Homo sapiens
  source 1..17: mol_type = genomic RNA
aaatccaagacaagagt

SEQ ID NO: 8120 - RNA, 17 nt, Homo sapiens
  source 1..17: mol_type = genomic RNA
atccaagacaagagtct

SEQ ID NO: 8121 - RNA, 17 nt, Homo sapiens
  source 1..17: mol_type = genomic RNA
tccaagacaagagtctg

SEQ ID NO: 8122 - RNA, 17 nt, Homo sapiens
  source 1..17: mol_type = genomic RNA
ccaagacaagagtctgt

SEQ ID NO: 8123 - RNA, 17 nt, Homo sapiens
  source 1..17: mol_type = genomic RNA
aaatatgtcacaatgcc

SEQ ID NO: 8124 - RNA, 17 nt, Homo sapiens
  source 1..17: mol_type = genomic RNA
aatatgtcacaatgccc

SEQ ID NO: 8125 - RNA, 17 nt, Homo sapiens
  source 1..17: mol_type = genomic RNA
ccataggcagatccaac

SEQ ID NO: 8126 - RNA, 17 nt, Homo sapiens
  source 1..17: mol_type = genomic RNA
cataggcagatccaaca

SEQ ID NO: 8127 - RNA, 17 nt, Homo sapiens
  source 1..17: mol_type = genomic RNA
ataggcagatccaacac

SEQ ID NO: 8128 - RNA, 17 nt, Homo sapiens
  source 1..17: mol_type = genomic RNA
taggcagatccaacaca

SEQ ID NO: 8129 - RNA, 17 nt, Homo sapiens
  source 1..17: mol_type = genomic RNA
aggcagatccaacacaa

SEQ ID NO: 8130 - RNA, 17 nt, Homo sapiens
  source 1..17: mol_type = genomic RNA
ggcagatccaacacaag

SEQ ID NO: 8131 - RNA, 17 nt, Homo sapiens
  source 1..17: mol_type = genomic RNA
gcagatccaacacaaga

SEQ ID NO: 8132 - RNA, 17 nt, Homo sapiens
  source 1..17: mol_type = genomic RNA
cagatccaacacaagag

SEQ ID NO: 8133 - RNA, 17 nt, Homo sapiens
  source 1..17: mol_type = genomic RNA
agatccaacacaagagt

SEQ ID NO: 8134 - RNA, 17 nt, Homo sapiens
  source 1..17: mol_type = genomic RNA
gatccaacacaagagtt

SEQ ID NO: 8135 - RNA, 17 nt, Homo sapiens
  source 1..17: mol_type = genomic RNA
tccaacacaagagttac

SEQ ID NO: 8136 - RNA, 17 nt, Homo sapiens
  source 1..17: mol_type = genomic RNA
ccaacacaagagttaca

SEQ ID NO: 8137 - RNA, 17 nt, Homo sapiens
  source 1..17: mol_type = genomic RNA
agtgcagagatatgtaa

SEQ ID NO: 8138 - RNA, 17 nt, Homo sapiens
  source 1..17: mol_type = genomic RNA
ccatcacctgtgtgatc

SEQ ID NO: 8139 - RNA, 17 nt, Homo sapiens
  source 1..17: mol_type = genomic RNA
acctgtgtgatcagtgt

SEQ ID NO: 8140 - RNA, 17 nt, Homo sapiens
  source 1..17: mol_type = genomic RNA
cctgtgtgatcagtgta

SEQ ID NO: 8141 - RNA, 17 nt, Homo sapiens
  source 1..17: mol_type = genomic RNA
tgtgtgatcagtgtaga

SEQ ID NO: 8142 - RNA, 17 nt, Homo sapiens
  source 1..17: mol_type = genomic RNA
gtgtgatcagtgtagag

SEQ ID NO: 8143 - RNA, 17 nt, Homo sapiens
  source 1..17: mol_type = genomic RNA
tgtgatcagtgtagaga

SEQ ID NO: 8144 - RNA, 17 nt, Homo sapiens
  source 1..17: mol_type = genomic RNA
gatatgtcacaatgcct

SEQ ID NO: 8145 - RNA, 17 nt, Homo sapiens
  source 1..17: mol_type = genomic RNA
atatgtcacaatgcctc

SEQ ID NO: 8146 - RNA, 17 nt, Homo sapiens
  source 1..17: mol_type = genomic RNA
tatgtcacaatgcctcc

SEQ ID NO: 8147 - RNA, 17 nt, Homo sapiens
  source 1..17: mol_type = genomic RNA
atgtcacaatgcctcct

SEQ ID NO: 8148 - RNA, 17 nt, Homo sapiens
  source 1..17: mol_type = genomic RNA
tgtcacaatgcctcctg

SEQ ID NO: 8149 - RNA, 17 nt, Homo sapiens
  source 1..17: mol_type = genomic RNA
gtcacaatgcctcctgt

SEQ ID NO: 8150 - RNA, 17 nt, Homo sapiens
  source 1..17: mol_type = genomic RNA
tcacaatgcctcctgta

SEQ ID NO: 8151 - RNA, 17 nt, Homo sapiens
  source 1..17: mol_type = genomic RNA
cacaatgcctcctgtag

SEQ ID NO: 8152 - RNA, 17 nt, Homo sapiens
  source 1..17: mol_type = genomic RNA
acaatgcctcctgtagg

SEQ ID NO: 8153 - RNA, 17 nt, Homo sapiens
  source 1..17: mol_type = genomic RNA
caatgcctcctgtaggc

SEQ ID NO: 8154 - RNA, 17 nt, Homo sapiens
  source 1..17: mol_type = genomic RNA
aatgcctcctgtaggca

SEQ ID NO: 8155 - RNA, 17 nt, Homo sapiens
  source 1..17: mol_type = genomic RNA
atgcctcctgtaggcag

SEQ ID NO: 8156 - RNA, 17 nt, Homo sapiens
  source 1..17: mol_type = genomic RNA
tgcctcctgtaggcaga

SEQ ID NO: 8157 - RNA, 17 nt, Homo sapiens
  source 1..17: mol_type = genomic RNA
cctcctgtaggcagagg

SEQ ID NO: 8158 - RNA, 17 nt, Homo sapiens
  source 1..17: mol_type = genomic RNA
ctcctgtaggcagaggc

SEQ ID NO: 8159 - RNA, 17 nt, Homo sapiens
  source 1..17: mol_type = genomic RNA
tcctgtaggcagaggct

SEQ ID NO: 8160 - RNA, 17 nt, Homo sapiens
  source 1..17: mol_type = genomic RNA
cctgtaggcagaggcta

SEQ ID NO: 8161 - RNA, 17 nt, Homo sapiens
  source 1..17: mol_type = genomic RNA
ctgtaggcagaggctaa

SEQ ID NO: 8162 - RNA, 17 nt, Homo sapiens
  source 1..17: mol_type = genomic RNA
tgtaggcagaggctaaa

SEQ ID NO: 8163 - RNA, 17 nt, Homo sapiens
  source 1..17: mol_type = genomic RNA
gtaggcagaggctaaac

SEQ ID NO: 8164 - RNA, 17 nt, Homo sapiens
  source 1..17: mol_type = genomic RNA
taggcagaggctaaaca

SEQ ID NO: 8165 - RNA, 17 nt, Homo sapiens
  source 1..17: mol_type = genomic RNA
aggcagaggctaaacaa

SEQ ID NO: 8166 - RNA, 17 nt, Homo sapiens
  source 1..17: mol_type = genomic RNA
ggcagaggctaaacaag

SEQ ID NO: 8167 - RNA, 17 nt, Homo sapiens
  source 1..17: mol_type = genomic RNA
gcagaggctaaacaaga

SEQ ID NO: 8168 - RNA, 17 nt, Homo sapiens
  source 1..17: mol_type = genomic RNA
cagaggctaaacaagag

SEQ ID NO: 8169 - RNA, 17 nt, Homo sapiens
  source 1..17: mol_type = genomic RNA
agaggctaaacaagagt

SEQ ID NO: 8170 - RNA, 17 nt, Homo sapiens
  source 1..17: mol_type = genomic RNA
gaggctaaacaagagtt

SEQ ID NO: 8171 - RNA, 17 nt, Homo sapiens
  source 1..17: mol_type = genomic RNA
aggctaaacaagagtta

SEQ ID NO: 8172 - RNA, 17 nt, Homo sapiens
  source 1..17: mol_type = genomic RNA
ggctaaacaagagttac

SEQ ID NO: 8173 - RNA, 17 nt, Homo sapiens
  source 1..17: mol_type = genomic RNA
gagttacatcacctgga

SEQ ID NO: 8174 - RNA, 17 nt, Homo sapiens
  source 1..17: mol_type = genomic RNA
agttacatcacctggat

SEQ ID NO: 8175 - RNA, 17 nt, Homo sapiens
  source 1..17: mol_type = genomic RNA
tcctgcaatatgtcaca

SEQ ID NO: 8176 - RNA, 17 nt, Homo sapiens
  source 1..17: mol_type = genomic RNA
cctgcaatatgtcacaa

SEQ ID NO: 8177 - RNA, 17 nt, Homo sapiens
  source 1..17: mol_type = genomic RNA
gcaatatgtcacaatgg

SEQ ID NO: 8178 - RNA, 17 nt, Homo sapiens
  source 1..17: mol_type = genomic RNA
caatatgtcacaatggc

SEQ ID NO: 8179 - RNA, 17 nt, Homo sapiens
  source 1..17: mol_type = genomic RNA
taggggttaggcttagg

SEQ ID NO: 8180 - RNA, 17 nt, Homo sapiens
  source 1..17: mol_type = genomic RNA
aggggttaggcttaggc

SEQ ID NO: 8181 - RNA, 17 nt, Homo sapiens
  source 1..17: mol_type = genomic RNA
ggggttaggcttaggct

SEQ ID NO: 8182 - RNA, 17 nt, Homo sapiens
  source 1..17: mol_type = genomic RNA
gggttaggcttaggctt

SEQ ID NO: 8183 - RNA, 17 nt, Homo sapiens
  source 1..17: mol_type = genomic RNA
ggttaggcttaggctta

SEQ ID NO: 8184 - RNA, 17 nt, Homo sapiens
  source 1..17: mol_type = genomic RNA
gttaggcttaggcttag

SEQ ID NO: 8185 - RNA, 17 nt, Homo sapiens
  source 1..17: mol_type = genomic RNA
ttaggcttaggcttagg

SEQ ID NO: 8186 - RNA, 17 nt, Homo sapiens
  source 1..17: mol_type = genomic RNA
taggcttaggcttaggg

SEQ ID NO: 8187 - RNA, 17 nt, Homo sapiens
  source 1..17: mol_type = genomic RNA
aggcttaggcttagggt

SEQ ID NO: 8188 - RNA, 17 nt, Homo sapiens
  source 1..17: mol_type = genomic RNA
ggcttaggcttagggtt

SEQ ID NO: 8189 - RNA, 17 nt, Homo sapiens
  source 1..17: mol_type = genomic RNA
gcttaggcttagggtta

SEQ ID NO: 8190 - RNA, 17 nt, Homo sapiens
  source 1..17: mol_type = genomic RNA
cttaggcttagggttag

SEQ ID NO: 8191 - RNA, 17 nt, Homo sapiens
  source 1..17: mol_type = genomic RNA
ttaggcttagggttagg

SEQ ID NO: 8192 - RNA, 17 nt, Homo sapiens
  source 1..17: mol_type = genomic RNA
taggcttagggttaggc

SEQ ID NO: 8193 - RNA, 17 nt, Homo sapiens
  source 1..17: mol_type = genomic RNA
aggcttagggttaggct

SEQ ID NO: 8194 - RNA, 17 nt, Homo sapiens
  source 1..17: mol_type = genomic RNA
ggcttagggttaggctt

SEQ ID NO: 8195 - RNA, 17 nt, Homo sapiens
  source 1..17: mol_type = genomic RNA
gcttagggttaggctta

SEQ ID NO: 8196 - RNA, 17 nt, Homo sapiens
  source 1..17: mol_type = genomic RNA
cttagggttaggcttag

SEQ ID NO: 8197 - RNA, 17 nt, Homo sapiens
  source 1..17: mol_type = genomic RNA
ttagggttaggcttagg

SEQ ID NO: 8198 - RNA, 17 nt, Homo sapiens
  source 1..17: mol_type = genomic RNA
tagggttaggcttaggc

SEQ ID NO: 8199 - RNA, 17 nt, Homo sapiens
  source 1..17: mol_type = genomic RNA
agggttaggcttaggct

SEQ ID NO: 8200 - RNA, 17 nt, Homo sapiens
  source 1..17: mol_type = genomic RNA
ggcttaggcttagggta

SEQ ID NO: 8201 - RNA, 17 nt, Homo sapiens
  source 1..17: mol_type = genomic RNA
gcttaggcttagggtaa

SEQ ID NO: 8202 - RNA, 17 nt, Homo sapiens
  source 1..17: mol_type = genomic RNA
cttaggcttagggtaag

SEQ ID NO: 8203 - RNA, 17 nt, Homo sapiens
  source 1..17: mol_type = genomic RNA
ttaggcttagggtaagg

SEQ ID NO: 8204 - RNA, 17 nt, Homo sapiens
  source 1..17: mol_type = genomic RNA
taggcttagggtaaggc

SEQ ID NO: 8205 - RNA, 17 nt, Homo sapiens
  source 1..17: mol_type = genomic RNA
aggcttagggtaaggct

SEQ ID NO: 8206 - RNA, 17 nt, Homo sapiens
  source 1..17: mol_type = genomic RNA
ggcttagggtaaggctt

SEQ ID NO: 8207 - RNA, 17 nt, Homo sapiens
  source 1..17: mol_type = genomic RNA
gcttagggtaaggctta

SEQ ID NO: 8208 - RNA, 17 nt, Homo sapiens
  source 1..17: mol_type = genomic RNA
cttagggtaaggcttag

SEQ ID NO: 8209 - RNA, 17 nt, Homo sapiens
  source 1..17: mol_type = genomic RNA
ttagggtaaggcttagg

SEQ ID NO: 8210 - RNA, 17 nt, Homo sapiens
  source 1..17: mol_type = genomic RNA
tagggtaaggcttaggg

SEQ ID NO: 8211 - RNA, 17 nt, Homo sapiens
  source 1..17: mol_type = genomic RNA
agggtaaggcttagggt

SEQ ID NO: 8212 - RNA, 17 nt, Homo sapiens
  source 1..17: mol_type = genomic RNA
gggtaaggcttagggtt

SEQ ID NO: 8213 - RNA, 17 nt, Homo sapiens
  source 1..17: mol_type = genomic RNA
ggtaaggcttagggttc

SEQ ID NO: 8214 - RNA, 17 nt, Homo sapiens
  source 1..17: mol_type = genomic RNA
gtaaggcttagggttca

SEQ ID NO: 8215 - RNA, 17 nt, Homo sapiens
  source 1..17: mol_type = genomic RNA
taaggcttagggttcag

SEQ ID NO: 8216 - RNA, 17 nt, Homo sapiens
  source 1..17: mol_type = genomic RNA
taggctattaagacatg

SEQ ID NO: 8217 - RNA, 17 nt, Homo sapiens
  source 1..17: mol_type = genomic RNA
aggctattaagacatgt

SEQ ID NO: 8218 - RNA, 17 nt, Homo sapiens
  source 1..17: mol_type = genomic RNA
tgtcttcaaagaatggc

SEQ ID NO: 8219 - RNA, 17 nt, Homo sapiens
  source 1..17: mol_type = genomic RNA
gtcttcaaagaatggcc

SEQ ID NO: 8220 - RNA, 17 nt, Homo sapiens
  source 1..17: mol_type = genomic RNA
tcttcaaagaatggcct

SEQ ID NO: 8221 - RNA, 17 nt, Homo sapiens
  source 1..17: mol_type = genomic RNA
cttcaaagaatggcctt

SEQ ID NO: 8222 - RNA, 17 nt, Homo sapiens
  source 1..17: mol_type = genomic RNA
ttcaaagaatggccttg

SEQ ID NO: 8223 - RNA, 17 nt, Homo sapiens
  source 1..17: mol_type = genomic RNA
tcaaagaatggccttgg

SEQ ID NO: 8224 - RNA, 17 nt, Homo sapiens
  source 1..17: mol_type = genomic RNA
caaagaatggccttggt

SEQ ID NO: 8225 - RNA, 17 nt, Homo sapiens
  source 1..17: mol_type = genomic RNA
aaagaatggccttggtt

SEQ ID NO: 8226 - RNA, 17 nt, Homo sapiens
  source 1..17: mol_type = genomic RNA
aagaatggccttggttt

SEQ ID NO: 8227 - RNA, 17 nt, Homo sapiens
  source 1..17: mol_type = genomic RNA
agaatggccttggtttc

SEQ ID NO: 8228 - RNA, 17 nt, Homo sapiens
  source 1..17: mol_type = genomic RNA
gaatggccttggtttct

SEQ ID NO: 8229 - RNA, 17 nt, Homo sapiens
  source 1..17: mol_type = genomic RNA
aatggccttggtttctg

SEQ ID NO: 8230 - RNA, 17 nt, Homo sapiens
  source 1..17: mol_type = genomic RNA
atggccttggtttctgt

SEQ ID NO: 8231 - RNA, 17 nt, Homo sapiens
  source 1..17: mol_type = genomic RNA
tggccttggtttctgtg

SEQ ID NO: 8232 - RNA, 17 nt, Homo sapiens
  source 1..17: mol_type = genomic RNA
ggccttggtttctgtgg

SEQ ID NO: 8233 - RNA, 17 nt, Homo sapiens
  source 1..17: mol_type = genomic RNA
gccttggtttctgtgga

SEQ ID NO: 8234 - RNA, 17 nt, Homo sapiens
  source 1..17: mol_type = genomic RNA
ccttggtttctgtggac

SEQ ID NO: 8235 - RNA, 17 nt, Homo sapiens
  source 1..17: mol_type = genomic RNA
ttggtttctgtggacag

SEQ ID NO: 8236 - RNA, 17 nt, Homo sapiens
  source 1..17: mol_type = genomic RNA
tggtttctgtggacagt

SEQ ID NO: 8237 - RNA, 17 nt, Homo sapiens
  source 1..17: mol_type = genomic RNA
ggtttctgtggacagtt

SEQ ID NO: 8238 - RNA, 17 nt, Homo sapiens
  source 1..17: mol_type = genomic RNA
tctgtggacagtttctc

SEQ ID NO: 8239 - RNA, 17 nt, Homo sapiens
  source 1..17: mol_type = genomic RNA
ctgtggacagtttctcc

SEQ ID NO: 8240 - RNA, 17 nt, Homo sapiens
  source 1..17: mol_type = genomic RNA
tgtggacagtttctcct

SEQ ID NO: 8241 - RNA, 17 nt, Homo sapiens
  source 1..17: mol_type = genomic RNA
gtggacagtttctcctc

SEQ ID NO: 8242 - RNA, 17 nt, Homo sapiens
  source 1..17: mol_type = genomic RNA
tggacagtttctcctca

SEQ ID NO: 8243 - RNA, 17 nt, Homo sapiens
  source 1..17: mol_type = genomic RNA
ggacagtttctcctcat

SEQ ID NO: 8244 - RNA, 17 nt, Homo sapiens
  source 1..17: mol_type = genomic RNA
acagtttctcctcatgg

SEQ ID NO: 8245 - RNA, 17 nt, Homo sapiens
  source 1..17: mol_type = genomic RNA
ttctcctcatggaaagg

SEQ ID NO: 8246 - RNA, 17 nt, Homo sapiens
  source 1..17: mol_type = genomic RNA
tctcctcatggaaaggt

SEQ ID NO: 8247 - RNA, 17 nt, Homo sapiens
  source 1..17: mol_type = genomic RNA
ctcctcatggaaaggta

SEQ ID NO: 8248 - RNA, 17 nt, Homo sapiens
  source 1..17: mol_type = genomic RNA
tcctcatggaaaggtag

SEQ ID NO: 8249 - RNA, 17 nt, Homo sapiens
  source 1..17: mol_type = genomic RNA
cctcatggaaaggtagt

SEQ ID NO: 8250 - RNA, 17 nt, Homo sapiens
  source 1..17: mol_type = genomic RNA
ctcatggaaaggtagtg

SEQ ID NO: 8251 - RNA, 17 nt, Homo sapiens
  source 1..17: mol_type = genomic RNA
tcatggaaaggtagtgt

SEQ ID NO: 8252 - RNA, 17 nt, Homo sapiens
  source 1..17: mol_type = genomic RNA
catggaaaggtagtgtg

SEQ ID NO: 8253 - RNA, 17 nt, Homo sapiens
  source 1..17: mol_type = genomic RNA
atggaaaggtagtgtgt

SEQ ID NO: 8254 - RNA, 17 nt, Homo sapiens
  source 1..17: mol_type = genomic RNA
tggaaaggtagtgtgtt

SEQ ID NO: 8255 - RNA, 17 nt, Homo sapiens
  source 1..17: mol_type = genomic RNA
ggaaaggtagtgtgttc

SEQ ID NO: 8256 - RNA, 17 nt, Homo sapiens
  source 1..17: mol_type = genomic RNA
gaaaggtagtgtgttcc

SEQ ID NO: 8257 - RNA, 17 nt, Homo sapiens
  source 1..17: mol_type = genomic RNA
aaaggtagtgtgttcct

SEQ ID NO: 8258 - RNA, 17 nt, Homo sapiens
  source 1..17: mol_type = genomic RNA
aaggtagtgtgttcctg

SEQ ID NO: 8259 - RNA, 17 nt, Homo sapiens
  source 1..17: mol_type = genomic RNA
aggtagtgtgttcctgc

SEQ ID NO: 8260 - RNA, 17 nt, Homo sapiens
  source 1..17: mol_type = genomic RNA
ggtagtgtgttcctgct

SEQ ID NO: 8261 - RNA, 17 nt, Homo sapiens
  source 1..17: mol_type = genomic RNA
tacacacacaacaaaat

SEQ ID NO: 8262 - RNA, 17 nt, Homo sapiens
  source 1..17: mol_type = genomic RNA
acaaaatttagctgagg

SEQ ID NO: 8263 - RNA, 17 nt, Homo sapiens
  source 1..17: mol_type = genomic RNA
caaaatttagctgaggg

SEQ ID NO: 8264 - RNA, 17 nt, Homo sapiens
  source 1..17: mol_type = genomic RNA
aaaatttagctgaggga

SEQ ID NO: 8265 - RNA, 17 nt, Homo sapiens
  source 1..17: mol_type = genomic RNA
aaatttagctgagggag

SEQ ID NO: 8266 - RNA, 17 nt, Homo sapiens
  source 1..17: mol_type = genomic RNA
aatttagctgagggaga

SEQ ID NO: 8267 - RNA, 17 nt, Homo sapiens
  source 1..17: mol_type = genomic RNA
atttagctgagggagat

SEQ ID NO: 8268 - RNA, 17 nt, Homo sapiens
  source 1..17: mol_type = genomic RNA
tttagctgagggagatt

SEQ ID NO: 8269 - RNA, 17 nt, Homo sapiens
  source 1..17: mol_type = genomic RNA
ttagctgagggagattg

SEQ ID NO: 8270 - RNA, 17 nt, Homo sapiens
  source 1..17: mol_type = genomic RNA
tagctgagggagattga

SEQ ID NO: 8271 - RNA, 17 nt, Homo sapiens
  source 1..17: mol_type = genomic RNA
agctgagggagattgag

SEQ ID NO: 8272 - RNA, 17 nt, Homo sapiens
  source 1..17: mol_type = genomic RNA
gctgagggagattgagt

SEQ ID NO: 8273 - RNA, 17 nt, Homo sapiens
  source 1..17: mol_type = genomic RNA
ctgagggagattgagtg

SEQ ID NO: 8274 - RNA, 17 nt, Homo sapiens
  source 1..17: mol_type = genomic RNA
tgagggagattgagtga

SEQ ID NO: 8275 - RNA, 17 nt, Homo sapiens
  source 1..17: mol_type = genomic RNA
gagggagattgagtgac

SEQ ID NO: 8276 - RNA, 17 nt, Homo sapiens
  source 1..17: mol_type = genomic RNA
agggagattgagtgact

SEQ ID NO: 8277 - RNA, 17 nt, Homo sapiens
  source 1..17: mol_type = genomic RNA
gggagattgagtgactt

SEQ ID NO: 8278 - RNA, 17 nt, Homo sapiens
  source 1..17: mol_type = genomic RNA
tgagtgactttcccagg

SEQ ID NO: 8279 - RNA, 17 nt, Homo sapiens
  source 1..17: mol_type = genomic RNA
gagtgactttcccaggg

SEQ ID NO: 8280 - RNA, 17 nt, Homo sapiens
  source 1..17: mol_type = genomic RNA
agtgactttcccagggt

SEQ ID NO: 8281 - RNA, 17 nt, Homo sapiens
  source 1..17: mol_type = genomic RNA
gtgactttcccagggtc

SEQ ID NO: 8282 - RNA, 17 nt, Homo sapiens
  source 1..17: mol_type = genomic RNA
tgactttcccagggtca

SEQ ID NO: 8283 - RNA, 17 nt, Homo sapiens
  source 1..17: mol_type = genomic RNA
gactttcccagggtcac

SEQ ID NO: 8284 - RNA, 17 nt, Homo sapiens
  source 1..17: mol_type = genomic RNA
actttcccagggtcaca

SEQ ID NO: 8285 - RNA, 17 nt, Homo sapiens
  source 1..17: mol_type = genomic RNA
ctttcccagggtcacac

SEQ ID NO: 8286 - RNA, 17 nt, Homo sapiens
  source 1..17: mol_type = genomic RNA
tttcccagggtcacaca

SEQ ID NO: 8287 - RNA, 17 nt, Homo sapiens
  source 1..17: mol_type = genomic RNA
ttcccagggtcacacag

SEQ ID NO: 8288 - RNA, 17 nt, Homo sapiens
  source 1..17: mol_type = genomic RNA
tcccagggtcacacagc

SEQ ID NO: 8289 - RNA, 17 nt, Homo sapiens
  source 1..17: mol_type = genomic RNA
cccagggtcacacagct

SEQ ID NO: 8290 - RNA, 17 nt, Homo sapiens
  source 1..17: mol_type = genomic RNA
ccagggtcacacagcta

SEQ ID NO: 8291 - RNA, 17 nt, Homo sapiens
  source 1..17: mol_type = genomic RNA
cagggtcacacagctac

SEQ ID NO: 8292 - RNA, 17 nt, Homo sapiens
  source 1..17: mol_type = genomic RNA
agggtcacacagctact

SEQ ID NO: 8293 - RNA, 17 nt, Homo sapiens
  source 1..17: mol_type = genomic RNA
gggtcacacagctacta

SEQ ID NO: 8294 - RNA, 17 nt, Homo sapiens
  source 1..17: mol_type = genomic RNA
ggtcacacagctactaa

SEQ ID NO: 8295 - RNA, 17 nt, Homo sapiens
  source 1..17: mol_type = genomic RNA
gtcacacagctactaat

SEQ ID NO: 8296 - RNA, 17 nt, Homo sapiens
  source 1..17: mol_type = genomic RNA
tcacacagctactaata

SEQ ID NO: 8297 - RNA, 17 nt, Homo sapiens
  source 1..17: mol_type = genomic RNA
cacacagctactaatag

SEQ ID NO: 8298 - RNA, 17 nt, Homo sapiens
  source 1..17: mol_type = genomic RNA
acacagctactaatagc

SEQ ID NO: 8299 - RNA, 17 nt, Homo sapiens
  source 1..17: mol_type = genomic RNA
cacagctactaatagca

SEQ ID NO: 8300 - RNA, 17 nt, Homo sapiens
  source 1..17: mol_type = genomic RNA
acagctactaatagcag

SEQ ID NO: 8301 - RNA, 17 nt, Homo sapiens
  source 1..17: mol_type = genomic RNA
cagctactaatagcaga

SEQ ID NO: 8302 - RNA, 17 nt, Homo sapiens
  source 1..17: mol_type = genomic RNA
agctactaatagcagag

SEQ ID NO: 8303 - RNA, 17 nt, Homo sapiens
  source 1..17: mol_type = genomic RNA
gctactaatagcagagt

SEQ ID NO: 8304 - RNA, 17 nt, Homo sapiens
  source 1..17: mol_type = genomic RNA
tactaatagcagagtag

SEQ ID NO: 8305 - RNA, 17 nt, Homo sapiens
  source 1..17: mol_type = genomic RNA
actaatagcagagtagt

SEQ ID NO: 8306 - RNA, 17 nt, Homo sapiens
  source 1..17: mol_type = genomic RNA
ctaatagcagagtagtg

SEQ ID NO: 8307 - RNA, 17 nt, Homo sapiens
  source 1..17: mol_type = genomic RNA
taatagcagagtagtgt

SEQ ID NO: 8308 - RNA, 17 nt, Homo sapiens
  source 1..17: mol_type = genomic RNA
tcatatgggaatactga

SEQ ID NO: 8309 - RNA, 17 nt, Homo sapiens
  source 1..17: mol_type = genomic RNA
catatgggaatactgaa

SEQ ID NO: 8310 - RNA, 17 nt, Homo sapiens
  source 1..17: mol_type = genomic RNA
atatgggaatactgaac

SEQ ID NO: 8311 - RNA, 17 nt, Homo sapiens
  source 1..17: mol_type = genomic RNA
tatgggaatactgaaca

SEQ ID NO: 8312 - RNA, 17 nt, Homo sapiens
  source 1..17: mol_type = genomic RNA
atgggaatactgaacac

SEQ ID NO: 8313 - RNA, 17 nt, Homo sapiens
  source 1..17: mol_type = genomic RNA
tgggaatactgaacaca

SEQ ID NO: 8314 - RNA, 17 nt, Homo sapiens
  source 1..17: mol_type = genomic RNA
gggaatactgaacacag

SEQ ID NO: 8315 - RNA, 17 nt, Homo sapiens
  source 1..17: mol_type = genomic RNA
ggaatactgaacacaga

SEQ ID NO: 8316 - RNA, 17 nt, Homo sapiens
  source 1..17: mol_type = genomic RNA
gaatactgaacacagaa

SEQ ID NO: 8317 - RNA, 17 nt, Homo sapiens
  source 1..17: mol_type = genomic RNA
aatactgaacacagaaa

SEQ ID NO: 8318 - RNA, 17 nt, Homo sapiens
  source 1..17: mol_type = genomic RNA
atactgaacacagaaat

SEQ ID NO: 8319 - RNA, 17 nt, Homo sapiens
  source 1..17: mol_type = genomic RNA
tactgaacacagaaatg

SEQ ID NO: 8320 - RNA, 17 nt, Homo sapiens
  source 1..17: mol_type = genomic RNA
actgaacacagaaatga

SEQ ID NO: 8321 - RNA, 17 nt, Homo sapiens
  source 1..17: mol_type = genomic RNA
ctgaacacagaaatgaa

SEQ ID NO: 8322 - RNA, 17 nt, Homo sapiens
  source 1..17: mol_type = genomic RNA
tgaacacagaaatgaac

SEQ ID NO: 8323 - RNA, 17 nt, Homo sapiens
  source 1..17: mol_type = genomic RNA
gaacacagaaatgaacc

SEQ ID NO: 8324 - RNA, 17 nt, Homo sapiens
  source 1..17: mol_type = genomic RNA
aacacagaaatgaacca

SEQ ID NO: 8325 - RNA, 17 nt, Homo sapiens
  source 1..17: mol_type = genomic RNA
acacagaaatgaaccaa

SEQ ID NO: 8326 - RNA, 17 nt, Homo sapiens
  source 1..17: mol_type = genomic RNA
cacagaaatgaaccaat

SEQ ID NO: 8327 - RNA, 17 nt, Homo sapiens
  source 1..17: mol_type = genomic RNA
acagaaatgaaccaatg

SEQ ID NO: 8328 - RNA, 17 nt, Homo sapiens
  source 1..17: mol_type = genomic RNA
cagaaatgaaccaatgg

SEQ ID NO: 8329 - RNA, 17 nt, Homo sapiens
  source 1..17: mol_type = genomic RNA
agaaatgaaccaatgga

SEQ ID NO: 8330 - RNA, 17 nt, Homo sapiens
  source 1..17: mol_type = genomic RNA
gaaatgaaccaatggaa

SEQ ID NO: 8331 - RNA, 17 nt, Homo sapiens
  source 1..17: mol_type = genomic RNA
aaatgaaccaatggaaa

SEQ ID NO: 8332 - RNA, 17 nt, Homo sapiens
  source 1..17: mol_type = genomic RNA
aatgaaccaatggaaac

SEQ ID NO: 8333 - RNA, 17 nt, Homo sapiens
  source 1..17: mol_type = genomic RNA
atgaaccaatggaaaca

SEQ ID NO: 8334 - RNA, 17 nt, Homo sapiens
  source 1..17: mol_type = genomic RNA
tgaaccaatggaaacat

SEQ ID NO: 8335 - RNA, 17 nt, Homo sapiens
  source 1..17: mol_type = genomic RNA
gaaccaatggaaacatc

SEQ ID NO: 8336 - RNA, 17 nt, Homo sapiens
  source 1..17: mol_type = genomic RNA
aaccaatggaaacatcc

SEQ ID NO: 8337 - RNA, 17 nt, Homo sapiens
  source 1..17: mol_type = genomic RNA
accaatggaaacatcct

SEQ ID NO: 8338 - RNA, 17 nt, Homo sapiens
  source 1..17: mol_type = genomic RNA
ccaatggaaacatccta

SEQ ID NO: 8339 - RNA, 17 nt, Homo sapiens
  source 1..17: mol_type = genomic RNA
caatggaaacatcctac

SEQ ID NO: 8340 - RNA, 17 nt, Homo sapiens
  source 1..17: mol_type = genomic RNA
aatggaaacatcctacg

SEQ ID NO: 8341 - RNA, 17 nt, Homo sapiens
  source 1..17: mol_type = genomic RNA
atggaaacatcctacgt

SEQ ID NO: 8342 - RNA, 17 nt, Homo sapiens
  source 1..17: mol_type = genomic RNA
tggaaacatcctacgtt

SEQ ID NO: 8343 - RNA, 17 nt, Homo sapiens
  source 1..17: mol_type = genomic RNA
ggaaacatcctacgttc

SEQ ID NO: 8344 - RNA, 17 nt, Homo sapiens
  source 1..17: mol_type = genomic RNA
gaaacatcctacgttcc

SEQ ID NO: 8345 - RNA, 17 nt, Homo sapiens
  source 1..17: mol_type = genomic RNA
tcctacgttccaaaagc

SEQ ID NO: 8346 - RNA, 17 nt, Homo sapiens
  source 1..17: mol_type = genomic RNA
cctacgttccaaaagcc

SEQ ID NO: 8347 - RNA, 17 nt, Homo sapiens
  source 1..17: mol_type = genomic RNA
ctacgttccaaaagcct

SEQ ID NO: 8348 - RNA, 17 nt, Homo sapiens
  source 1..17: mol_type = genomic RNA
tacgttccaaaagccta

SEQ ID NO: 8349 - RNA, 17 nt, Homo sapiens
  source 1..17: mol_type = genomic RNA
acgttccaaaagcctac

SEQ ID NO: 8350 - RNA, 17 nt, Homo sapiens
  source 1..17: mol_type = genomic RNA
cgttccaaaagcctact

SEQ ID NO: 8351 - RNA, 17 nt, Homo sapiens
  source 1..17: mol_type = genomic RNA
gttccaaaagcctactc

SEQ ID NO: 8352 - RNA, 17 nt, Homo sapiens
  source 1..17: mol_type = genomic RNA
ttccaaaagcctactca

SEQ ID NO: 8353 - RNA, 17 nt, Homo sapiens
  source 1..17: mol_type = genomic RNA
tccaaaagcctactcaa

SEQ ID NO: 8354 - RNA, 17 nt, Homo sapiens
  source 1..17: mol_type = genomic RNA
ccaaaagcctactcaag

SEQ ID NO: 8355 - RNA, 17 nt, Homo sapiens
  source 1..17: mol_type = genomic RNA
caaaagcctactcaagc

SEQ ID NO: 8356 - RNA, 17 nt, Homo sapiens
  source 1..17: mol_type = genomic RNA
aaaagcctactcaagcc

SEQ ID NO: 8357 - RNA, 17 nt, Homo sapiens
  source 1..17: mol_type = genomic RNA
aaagcctactcaagcca

SEQ ID NO: 8358 - RNA, 17 nt, Homo sapiens
  source 1..17: mol_type = genomic RNA
aagcctactcaagccat

SEQ ID NO: 8359 - RNA, 17 nt, Homo sapiens
  source 1..17: mol_type = genomic RNA
agcctactcaagccatt

SEQ ID NO: 8360 - RNA, 17 nt, Homo sapiens
  source 1..17: mol_type = genomic RNA
gcctactcaagccattt

SEQ ID NO: 8361 - RNA, 17 nt, Homo sapiens
  source 1..17: mol_type = genomic RNA
atacttatgaatggcag

SEQ ID NO: 8362 - RNA, 17 nt, Homo sapiens
  source 1..17: mol_type = genomic RNA
tacttatgaatggcaga

SEQ ID NO: 8363 - RNA, 17 nt, Homo sapiens
  source 1..17: mol_type = genomic RNA
acttatgaatggcagag

SEQ ID NO: 8364 - RNA, 17 nt, Homo sapiens
  source 1..17: mol_type = genomic RNA
cttatgaatggcagaga

SEQ ID NO: 8365 - RNA, 17 nt, Homo sapiens
  source 1..17: mol_type = genomic RNA
ttatgaatggcagagat

SEQ ID NO: 8366 - RNA, 17 nt, Homo sapiens
  source 1..17: mol_type = genomic RNA
tatgaatggcagagatc

SEQ ID NO: 8367 - RNA, 17 nt, Homo sapiens
  source 1..17: mol_type = genomic RNA
atgaatggcagagatct

SEQ ID NO: 8368 - RNA, 17 nt, Homo sapiens
  source 1..17: mol_type = genomic RNA
tgaatggcagagatcta

SEQ ID NO: 8369 - RNA, 17 nt, Homo sapiens
  source 1..17: mol_type = genomic RNA
gaatggcagagatctac

SEQ ID NO: 8370 - RNA, 17 nt, Homo sapiens
  source 1..17: mol_type = genomic RNA
aatggcagagatctaca

SEQ ID NO: 8371 - RNA, 17 nt, Homo sapiens
  source 1..17: mol_type = genomic RNA
atggcagagatctacag

SEQ ID NO: 8372 - RNA, 17 nt, Homo sapiens
  source 1..17: mol_type = genomic RNA
tggcagagatctacaga

SEQ ID NO: 8373 - RNA, 17 nt, Homo sapiens
  source 1..17: mol_type = genomic RNA
ggcagagatctacagat

SEQ ID NO: 8374 - RNA, 17 nt, Homo sapiens
  source 1..17: mol_type = genomic RNA
gcagagatctacagatt

SEQ ID NO: 8375 - RNA, 17 nt, Homo sapiens
  source 1..17: mol_type = genomic RNA
gatgtaagaaatgatgc

SEQ ID NO: 8376 - RNA, 17 nt, Homo sapiens
  source 1..17: mol_type = genomic RNA
tgtaagaaatgatgctc

SEQ ID NO: 8377 - RNA, 17 nt, Homo sapiens
  source 1..17: mol_type = genomic RNA
taagaaatgatgctcac

SEQ ID NO: 8378 - RNA, 17 nt, Homo sapiens
  source 1..17: mol_type = genomic RNA
aagaaatgatgctcacc

SEQ ID NO: 8379 - RNA, 17 nt, Homo sapiens
  source 1..17: mol_type = genomic RNA
agaaatgatgctcacca

SEQ ID NO: 8380 - RNA, 17 nt, Homo sapiens
  source 1..17: mol_type = genomic RNA
gaaatgatgctcaccag

SEQ ID NO: 8381 - RNA, 17 nt, Homo sapiens
  source 1..17: mol_type = genomic RNA
aaatgatgctcaccagc

SEQ ID NO: 8382 - RNA, 17 nt, Homo sapiens
  source 1..17: mol_type = genomic RNA
aatgatgctcaccagct

SEQ ID NO: 8383 - RNA, 17 nt, Homo sapiens
  source 1..17: mol_type = genomic RNA
atgatgctcaccagctg

SEQ ID NO: 8384 - RNA, 17 nt, Homo sapiens
  source 1..17: mol_type = genomic RNA
tgatgctcaccagctgg

SEQ ID NO: 8385 - RNA, 17 nt, Homo sapiens
  source 1..17: mol_type = genomic RNA
tactgctaccaccccac

SEQ ID NO: 8386 - RNA, 17 nt, Homo sapiens
  source 1..17: mol_type = genomic RNA
actgctaccaccccaca

SEQ ID NO: 8387 - RNA, 17 nt, Homo sapiens
  source 1..17: mol_type = genomic RNA
ctgctaccaccccacaa

SEQ ID NO: 8388 - RNA, 17 nt, Homo sapiens
  source 1..17: mol_type = genomic RNA
tgctaccaccccacaac

SEQ ID NO: 8389 - RNA, 17 nt, Homo sapiens
  source 1..17: mol_type = genomic RNA
gctaccaccccacaacc

SEQ ID NO: 8390 - RNA, 17 nt, Homo sapiens
  source 1..17: mol_type = genomic RNA
ctaccaccccacaaccc

SEQ ID NO: 8391 - RNA, 17 nt, Homo sapiens
  source 1..17: mol_type = genomic RNA
agcatactggacaaatg

SEQ ID NO: 8392 - RNA, 17 nt, Homo sapiens
  source 1..17: mol_type = genomic RNA
gcatactggacaaatgt

SEQ ID NO: 8393 - RNA, 17 nt, Homo sapiens
  source 1..17: mol_type = genomic RNA
catactggacaaatgtc

SEQ ID NO: 8394 - RNA, 17 nt, Homo sapiens
  source 1..17: mol_type = genomic RNA
atactggacaaatgtct

SEQ ID NO: 8395 - RNA, 17 nt, Homo sapiens
  source 1..17: mol_type = genomic RNA
tactggacaaatgtcta

SEQ ID NO: 8396 - RNA, 17 nt, Homo sapiens
  source 1..17: mol_type = genomic RNA
actggacaaatgtctaa

SEQ ID NO: 8397 - RNA, 17 nt, Homo sapiens
  source 1..17: mol_type = genomic RNA
ctggacaaatgtctaag

SEQ ID NO: 8398 - RNA, 17 nt, Homo sapiens
  source 1..17: mol_type = genomic RNA
tggacaaatgtctaagc

SEQ ID NO: 8399 - RNA, 17 nt, Homo sapiens
  source 1..17: mol_type = genomic RNA
ggacaaatgtctaagcc

SEQ ID NO: 8400 - RNA, 17 nt, Homo sapiens
  source 1..17: mol_type = genomic RNA
gacaaatgtctaagcct

SEQ ID NO: 8401 - RNA, 17 nt, Homo sapiens
  source 1..17: mol_type = genomic RNA
acaaatgtctaagcctc

SEQ ID NO: 8402 - RNA, 17 nt, Homo sapiens
  source 1..17: mol_type = genomic RNA
caaatgtctaagcctcg

SEQ ID NO: 8403 - RNA, 17 nt, Homo sapiens
  source 1..17: mol_type = genomic RNA
aaatgtctaagcctcgt

SEQ ID NO: 8404 - RNA, 17 nt, Homo sapiens
  source 1..17: mol_type = genomic RNA
aatgtctaagcctcgtg

SEQ ID NO: 8405 - RNA, 17 nt, Homo sapiens
  source 1..17: mol_type = genomic RNA
atgtctaagcctcgtgg

SEQ ID NO: 8406 - RNA, 17 nt, Homo sapiens
  source 1..17: mol_type = genomic RNA
tgtctaagcctcgtggt

SEQ ID NO: 8407 - RNA, 17 nt, Homo sapiens
  source 1..17: mol_type = genomic RNA
gtctaagcctcgtggtt

SEQ ID NO: 8408 - RNA, 17 nt, Homo sapiens
  source 1..17: mol_type = genomic RNA
tctaagcctcgtggtta

SEQ ID NO: 8409 - RNA, 17 nt, Homo sapiens
  source 1..17: mol_type = genomic RNA
ctaagcctcgtggttag

SEQ ID NO: 8410 - RNA, 17 nt, Homo sapiens
  source 1..17: mol_type = genomic RNA
taagcctcgtggttagt

SEQ ID NO: 8411 - RNA, 17 nt, Homo sapiens
  source 1..17: mol_type = genomic RNA
aagcctcgtggttagtg

SEQ ID NO: 8412 - RNA, 17 nt, Homo sapiens
  source 1..17: mol_type = genomic RNA
agcctcgtggttagtgg

SEQ ID NO: 8413 - RNA, 17 nt, Homo sapiens
  source 1..17: mol_type = genomic RNA
gcctcgtggttagtggg

SEQ ID NO: 8414 - RNA, 17 nt, Homo sapiens
  source 1..17: mol_type = genomic RNA
cctcgtggttagtgggg

SEQ ID NO: 8415 - RNA, 17 nt, Homo sapiens
  source 1..17: mol_type = genomic RNA
ctcgtggttagtgggga

SEQ ID NO: 8416 - RNA, 17 nt, Homo sapiens
  source 1..17: mol_type = genomic RNA
tcgtggttagtggggac

SEQ ID NO: 8417 - RNA, 17 nt, Homo sapiens
  source 1..17: mol_type = genomic RNA
cgtggttagtggggaca

SEQ ID NO: 8418 - RNA, 17 nt, Homo sapiens
  source 1..17: mol_type = genomic RNA
gtggttagtggggacat

SEQ ID NO: 8419 - RNA, 17 nt, Homo sapiens
  source 1..17: mol_type = genomic RNA
tggttagtggggacatt

SEQ ID NO: 8420 - RNA, 17 nt, Homo sapiens
  source 1..17: mol_type = genomic RNA
ggttagtggggacattg

SEQ ID NO: 8421 - RNA, 17 nt, Homo sapiens
  source 1..17: mol_type = genomic RNA
gttagtggggacattgc

SEQ ID NO: 8422 - RNA, 17 nt, Homo sapiens
  source 1..17: mol_type = genomic RNA
ttagtggggacattgct

SEQ ID NO: 8423 - RNA, 17 nt, Homo sapiens
  source 1..17: mol_type = genomic RNA
tagtggggacattgctg

SEQ ID NO: 8424 - RNA, 17 nt, Homo sapiens
  source 1..17: mol_type = genomic RNA
agtggggacattgctgg

SEQ ID NO: 8425 - RNA, 17 nt, Homo sapiens
  source 1..17: mol_type = genomic RNA
gtggggacattgctggt

SEQ ID NO: 8426 - RNA, 17 nt, Homo sapiens
  source 1..17: mol_type = genomic RNA
tggggacattgctggtg

SEQ ID NO: 8427 - RNA, 17 nt, Homo sapiens
  source 1..17: mol_type = genomic RNA
ggggacattgctggtgg

SEQ ID NO: 8428 - RNA, 17 nt, Homo sapiens
  source 1..17: mol_type = genomic RNA
gggacattgctggtgga

SEQ ID NO: 8429 - RNA, 17 nt, Homo sapiens
  source 1..17: mol_type = genomic RNA
ggacattgctggtggag

SEQ ID NO: 8430 - RNA, 17 nt, Homo sapiens
  source 1..17: mol_type = genomic RNA
gacattgctggtggagt

SEQ ID NO: 8431 - RNA, 17 nt, Homo sapiens
  source 1..17: mol_type = genomic RNA
acattgctggtggagtc

SEQ ID NO: 8432 - RNA, 17 nt, Homo sapiens
  source 1..17: mol_type = genomic RNA
cattgctggtggagtct

SEQ ID NO: 8433 - RNA, 17 nt, Homo sapiens
  source 1..17: mol_type = genomic RNA
attgctggtggagtctg

SEQ ID NO: 8434 - RNA, 17 nt, Homo sapiens
  source 1..17: mol_type = genomic RNA
ttgctggtggagtctga

SEQ ID NO: 8435 - RNA, 17 nt, Homo sapiens
  source 1..17: mol_type = genomic RNA
tgctggtggagtctgaa

SEQ ID NO: 8436 - RNA, 17 nt, Homo sapiens
  source 1..17: mol_type = genomic RNA
gctggtggagtctgaaa

SEQ ID NO: 8437 - RNA, 17 nt, Homo sapiens
  source 1..17: mol_type = genomic RNA
ctggtggagtctgaaat

SEQ ID NO: 8438 - RNA, 17 nt, Homo sapiens
  source 1..17: mol_type = genomic RNA
tggtggagtctgaaatt

SEQ ID NO: 8439 - RNA, 17 nt, Homo sapiens
  source 1..17: mol_type = genomic RNA
ggtggagtctgaaattg

SEQ ID NO: 8440 - RNA, 17 nt, Homo sapiens
  source 1..17: mol_type = genomic RNA
gtggagtctgaaattgt

SEQ ID NO: 8441 - RNA, 17 nt, Homo sapiens
  source 1..17: mol_type = genomic RNA
tggagtctgaaattgtc

SEQ ID NO: 8442 - RNA, 17 nt, Homo sapiens
  source 1..17: mol_type = genomic RNA
aattgtcatgcagtgac

SEQ ID NO: 8443 - RNA, 17 nt, Homo sapiens
  source 1..17: mol_type = genomic RNA
attgtcatgcagtgact

SEQ ID NO: 8444 - RNA, 17 nt, Homo sapiens
  source 1..17: mol_type = genomic RNA
ttgtcatgcagtgactc

SEQ ID NO: 8445 - RNA, 17 nt, Homo sapiens
  source 1..17: mol_type = genomic RNA
tgtcatgcagtgactca

SEQ ID NO: 8446 - RNA, 17 nt, Homo sapiens
  source 1..17: mol_type = genomic RNA
gtcatgcagtgactcac

SEQ ID NO: 8447 - RNA, 17 nt, Homo sapiens
  source 1..17: mol_type = genomic RNA
tcatgcagtgactcact

SEQ ID NO: 8448 - RNA, 17 nt, Homo sapiens
  source 1..17: mol_type = genomic RNA
catgcagtgactcactc

SEQ ID NO: 8449 - RNA, 17 nt, Homo sapiens
  source 1..17: mol_type = genomic RNA
atgcagtgactcactca

SEQ ID NO: 8450 - RNA, 17 nt, Homo sapiens
  source 1..17: mol_type = genomic RNA
tgcagtgactcactcaa

SEQ ID NO: 8451 - RNA, 17 nt, Homo sapiens
  source 1..17: mol_type = genomic RNA
gcagtgactcactcaag

SEQ ID NO: 8452 - RNA, 17 nt, Homo sapiens
  source 1..17: mol_type = genomic RNA
cagtgactcactcaagc

SEQ ID NO: 8453 - RNA, 17 nt, Homo sapiens
  source 1..17: mol_type = genomic RNA
agtgactcactcaagct

SEQ ID NO: 8454 - RNA, 17 nt, Homo sapiens
  source 1..17: mol_type = genomic RNA
gtgactcactcaagctt

SEQ ID NO: 8455 - RNA, 17 nt, Homo sapiens
  source 1..17: mol_type = genomic RNA
tgactcactcaagctta

SEQ ID NO: 8456 - RNA, 17 nt, Homo sapiens
  source 1..17: mol_type = genomic RNA
gactcactcaagcttag

SEQ ID NO: 8457 - RNA, 17 nt, Homo sapiens
  source 1..17: mol_type = genomic RNA
actcactcaagcttagg

SEQ ID NO: 8458 - RNA, 17 nt, Homo sapiens
  source 1..17: mol_type = genomic RNA
ctcactcaagcttaggc

SEQ ID NO: 8459 - RNA, 17 nt, Homo sapiens
  source 1..17: mol_type = genomic RNA
tcactcaagcttaggca

SEQ ID NO: 8460 - RNA, 17 nt, Homo sapiens
  source 1..17: mol_type = genomic RNA
cactcaagcttaggcag

SEQ ID NO: 8461 - RNA, 17 nt, Homo sapiens
  source 1..17: mol_type = genomic RNA
actcaagcttaggcaga

SEQ ID NO: 8462 - RNA, 17 nt, Homo sapiens
  source 1..17: mol_type = genomic RNA
ctcaagcttaggcagat

SEQ ID NO: 8463 - RNA, 17 nt, Homo sapiens
  source 1..17: mol_type = genomic RNA
tcaagcttaggcagatt

SEQ ID NO: 8464 - RNA, 17 nt, Homo sapiens
  source 1..17: mol_type = genomic RNA
aagcttaggcagatttg

SEQ ID NO: 8465 - RNA, 17 nt, Homo sapiens
  source 1..17: mol_type = genomic RNA
agcttaggcagatttgg

SEQ ID NO: 8466 - RNA, 17 nt, Homo sapiens
  source 1..17: mol_type = genomic RNA
gcttaggcagatttggt

SEQ ID NO: 8467 - RNA, 17 nt, Homo sapiens
  source 1..17: mol_type = genomic RNA
cttaggcagatttggtg

SEQ ID NO: 8468 - RNA, 17 nt, Homo sapiens
  source 1..17: mol_type = genomic RNA
ttaggcagatttggtga

SEQ ID NO: 8469 - RNA, 17 nt, Homo sapiens
  source 1..17: mol_type = genomic RNA
taggcagatttggtgat

SEQ ID NO: 8470 - RNA, 17 nt, Homo sapiens
  source 1..17: mol_type = genomic RNA
aggcagatttggtgata

SEQ ID NO: 8471 - RNA, 17 nt, Homo sapiens
  source 1..17: mol_type = genomic RNA
ggcagatttggtgatat

SEQ ID NO: 8472 - RNA, 17 nt, Homo sapiens
  source 1..17: mol_type = genomic RNA
tggtgatatatgacaca

SEQ ID NO: 8473 - RNA, 17 nt, Homo sapiens
  source 1..17: mol_type = genomic RNA
ggtgatatatgacacag

SEQ ID NO: 8474 - RNA, 17 nt, Homo sapiens
  source 1..17: mol_type = genomic RNA
tgatatatgacacagag

SEQ ID NO: 8475 - RNA, 17 nt, Homo sapiens
  source 1..17: mol_type = genomic RNA
gatatatgacacagaga

SEQ ID NO: 8476 - RNA, 17 nt, Homo sapiens
  source 1..17: mol_type = genomic RNA
tatatgacacagagatg

SEQ ID NO: 8477 - RNA, 17 nt, Homo sapiens
  source 1..17: mol_type = genomic RNA
atatgacacagagatgc

SEQ ID NO: 8478 - RNA, 17 nt, Homo sapiens
  source 1..17: mol_type = genomic RNA
tatgacacagagatgca

SEQ ID NO: 8479 - RNA, 17 nt, Homo sapiens
  source 1..17: mol_type = genomic RNA
atgacacagagatgcaa

SEQ ID NO: 8480 - RNA, 17 nt, Homo sapiens
  source 1..17: mol_type = genomic RNA
tgacacagagatgcaaa

SEQ ID NO: 8481 - RNA, 17 nt, Homo sapiens
  source 1..17: mol_type = genomic RNA
gacacagagatgcaaag

SEQ ID NO: 8482 - RNA, 17 nt, Homo sapiens
  source 1..17: mol_type = genomic RNA
acacagagatgcaaaga

SEQ ID NO: 8483 - RNA, 17 nt, Homo sapiens
  source 1..17: mol_type = genomic RNA
cacagagatgcaaagaa

SEQ ID NO: 8484 - RNA, 17 nt, Homo sapiens
  source 1..17: mol_type = genomic RNA
acagagatgcaaagaaa

SEQ ID NO: 8485 - RNA, 17 nt, Homo sapiens
  source 1..17: mol_type = genomic RNA
cagagatgcaaagaaat

SEQ ID NO: 8486 - RNA, 17 nt, Homo sapiens
  source 1..17: mol_type = genomic RNA
agagatgcaaagaaatg

SEQ ID NO: 8487 - RNA, 17 nt, Homo sapiens
  source 1..17: mol_type = genomic RNA
gagatgcaaagaaatgt

SEQ ID NO: 8488 - RNA, 17 nt, Homo sapiens
  source 1..17: mol_type = genomic RNA
gaaatgttgtagctgac

SEQ ID NO: 8489 - RNA, 17 nt, Homo sapiens
  source 1..17: mol_type = genomic RNA
aatgttgtagctgacac

SEQ ID NO: 8490 - RNA, 17 nt, Homo sapiens
  source 1..17: mol_type = genomic RNA
atgttgtagctgacaca

SEQ ID NO: 8491 - RNA, 17 nt, Homo sapiens
  source 1..17: mol_type = genomic RNA
tgttgtagctgacacac

SEQ ID NO: 8492 - RNA, 17 nt, Homo sapiens
  source 1..17: mol_type = genomic RNA
gttgtagctgacacaca

SEQ ID NO: 8493 - RNA, 17 nt, Homo sapiens
  source 1..17: mol_type = genomic RNA
ttgtagctgacacacac

SEQ ID NO: 8494 - RNA, 17 nt, Homo sapiens
  source 1..17: mol_type = genomic RNA
tgtagctgacacacaca

SEQ ID NO: 8495 - RNA, 17 nt, Homo sapiens
  source 1..17: mol_type = genomic RNA
gtagctgacacacacag

SEQ ID NO: 8496 - RNA, 17 nt, Homo sapiens
  source 1..17: mol_type = genomic RNA
tagctgacacacacagg

SEQ ID NO: 8497 - RNA, 17 nt, Homo sapiens
  source 1..17: mol_type = genomic RNA
gctgacacacacaggct

SEQ ID NO: 8498 - RNA, 17 nt, Homo sapiens
  source 1..17: mol_type = genomic RNA
ctgacacacacaggctg

SEQ ID NO: 8499 - RNA, 17 nt, Homo sapiens
  source 1..17: mol_type = genomic RNA
tgacacacacaggctgg

SEQ ID NO: 8500 - RNA, 17 nt, Homo sapiens
  source 1..17: mol_type = genomic RNA
cacacacaggctggctc

SEQ ID NO: 8501 - RNA, 17 nt, Homo sapiens
  source 1..17: mol_type = genomic RNA
acacacaggctggctct

SEQ ID NO: 8502 - RNA, 17 nt, Homo sapiens
  source 1..17: mol_type = genomic RNA
cacacaggctggctctg

SEQ ID NO: 8503 - RNA, 17 nt, Homo sapiens
  source 1..17: mol_type = genomic RNA
gctggctctgggagatg

SEQ ID NO: 8504 - RNA, 17 nt, Homo sapiens
  source 1..17: mol_type = genomic RNA
ctggctctgggagatgc

SEQ ID NO: 8505 - RNA, 17 nt, Homo sapiens
  source 1..17: mol_type = genomic RNA
tggctctgggagatgca

SEQ ID NO: 8506 - RNA, 17 nt, Homo sapiens
  source 1..17: mol_type = genomic RNA
ggctctgggagatgcag

SEQ ID NO: 8507 - RNA, 17 nt, Homo sapiens
  source 1..17: mol_type = genomic RNA
gctctgggagatgcaga

SEQ ID NO: 8508 - RNA, 17 nt, Homo sapiens
  source 1..17: mol_type = genomic RNA
ctctgggagatgcagaa

SEQ ID NO: 8509 - RNA, 17 nt, Homo sapiens
  source 1..17: mol_type = genomic RNA
tctgggagatgcagaag

SEQ ID NO: 8510 - RNA, 17 nt, Homo sapiens
  source 1..17: mol_type = genomic RNA
ctgggagatgcagaagg

SEQ ID NO: 8511 - RNA, 17 nt, Homo sapiens
  source 1..17: mol_type = genomic RNA
tgggagatgcagaagga

SEQ ID NO: 8512 - RNA, 17 nt, Homo sapiens
  source 1..17: mol_type = genomic RNA
gggagatgcagaaggag

SEQ ID NO: 8513 - RNA, 17 nt, Homo sapiens
  source 1..17: mol_type = genomic RNA
gagatgcagaaggagca

SEQ ID NO: 8514 - RNA, 17 nt, Homo sapiens
  source 1..17: mol_type = genomic RNA
agatgcagaaggagcac

SEQ ID NO: 8515 - RNA, 17 nt, Homo sapiens
  source 1..17: mol_type = genomic RNA
gatgcagaaggagcacg

SEQ ID NO: 8516 - RNA, 17 nt, Homo sapiens
  source 1..17: mol_type = genomic RNA
atgcagaaggagcacgt

SEQ ID NO: 8517 - RNA, 17 nt, Homo sapiens
  source 1..17: mol_type = genomic RNA
tgcagaaggagcacgtc

SEQ ID NO: 8518 - RNA, 17 nt, Homo sapiens
  source 1..17: mol_type = genomic RNA
gcagaaggagcacgtcc

SEQ ID NO: 8519 - RNA, 17 nt, Homo sapiens
  source 1..17: mol_type = genomic RNA
cagaaggagcacgtccc

SEQ ID NO: 8520 - RNA, 17 nt, Homo sapiens
  source 1..17: mol_type = genomic RNA
agaaggagcacgtcccc

SEQ ID NO: 8521 - RNA, 17 nt, Homo sapiens
  source 1..17: mol_type = genomic RNA
aaggagcacgtccccca

SEQ ID NO: 8522 - RNA, 17 nt, Homo sapiens
  source 1..17: mol_type = genomic RNA
aggagcacgtcccccaa

SEQ ID NO: 8523 - RNA, 17 nt, Homo sapiens
  source 1..17: mol_type = genomic RNA
ggagcacgtcccccaaa

SEQ ID NO: 8524 - RNA, 17 nt, Homo sapiens
  source 1..17: mol_type = genomic RNA
gagcacgtcccccaaaa

SEQ ID NO: 8525 - RNA, 17 nt, Homo sapiens
  source 1..17: mol_type = genomic RNA
agcacgtcccccaaaat

SEQ ID NO: 8526 - RNA, 17 nt, Homo sapiens
  source 1..17: mol_type = genomic RNA
gcacgtcccccaaaatg

SEQ ID NO: 8527 - RNA, 17 nt, Homo sapiens
  source 1..17: mol_type = genomic RNA
cacgtcccccaaaatga

SEQ ID NO: 8528 - RNA, 17 nt, Homo sapiens
  source 1..17: mol_type = genomic RNA
acgtcccccaaaatgaa

SEQ ID NO: 8529 - RNA, 17 nt, Homo sapiens
  source 1..17: mol_type = genomic RNA
cgtcccccaaaatgaag

SEQ ID NO: 8530 - RNA, 17 nt, Homo sapiens
  source 1..17: mol_type = genomic RNA
gtcccccaaaatgaagc

SEQ ID NO: 8531 - RNA, 17 nt, Homo sapiens
  source 1..17: mol_type = genomic RNA
tcccccaaaatgaagcc

SEQ ID NO: 8532 - RNA, 17 nt, Homo sapiens
  source 1..17: mol_type = genomic RNA
cccccaaaatgaagcca

SEQ ID NO: 8533 - RNA, 17 nt, Homo sapiens
  source 1..17: mol_type = genomic RNA
ccccaaaatgaagccag

SEQ ID NO: 8534 - RNA, 17 nt, Homo sapiens
  source 1..17: mol_type = genomic RNA
cccaaaatgaagccaga

SEQ ID NO: 8535 - RNA, 17 nt, Homo sapiens
  source 1..17: mol_type = genomic RNA
ccaaaatgaagccagac

SEQ ID NO: 8536 - RNA, 17 nt, Homo sapiens
  source 1..17: mol_type = genomic RNA
caaaatgaagccagaca

SEQ ID NO: 8537 - RNA, 17 nt, Homo sapiens
  source 1..17: mol_type = genomic RNA
aaaatgaagccagacag

SEQ ID NO: 8538 - RNA, 17 nt, Homo sapiens
  source 1..17: mol_type = genomic RNA
aaatgaagccagacaga

SEQ ID NO: 8539 - RNA, 17 nt, Homo sapiens
  source 1..17: mol_type = genomic RNA
aatgaagccagacagac

SEQ ID NO: 8540 - RNA, 17 nt, Homo sapiens
  source 1..17: mol_type = genomic RNA
atgaagccagacagaca

SEQ ID NO: 8541 - RNA, 17 nt, Homo sapiens
  source 1..17: mol_type = genomic RNA
tgaagccagacagacat

SEQ ID NO: 8542 - RNA, 17 nt, Homo sapiens
  source 1..17: mol_type = genomic RNA
gaagccagacagacatc

SEQ ID NO: 8543 - RNA, 17 nt, Homo sapiens
  source 1..17: mol_type = genomic RNA
aagccagacagacatcc

SEQ ID NO: 8544 - RNA, 17 nt, Homo sapiens
  source 1..17: mol_type = genomic RNA
agccagacagacatcct

SEQ ID NO: 8545 - RNA, 17 nt, Homo sapiens
  source 1..17: mol_type = genomic RNA
gccagacagacatcctt

SEQ ID NO: 8546 - RNA, 17 nt, Homo sapiens
  source 1..17: mol_type = genomic RNA
ccagacagacatcctta

SEQ ID NO: 8547 - RNA, 17 nt, Homo sapiens
  source 1..17: mol_type = genomic RNA
cagacagacatccttaa

SEQ ID NO: 8548 - RNA, 17 nt, Homo sapiens
  source 1..17: mol_type = genomic RNA
agacagacatccttaag

SEQ ID NO: 8549 - RNA, 17 nt, Homo sapiens
  source 1..17: mol_type = genomic RNA
gacagacatccttaagg

SEQ ID NO: 8550 - RNA, 17 nt, Homo sapiens
  source 1..17: mol_type = genomic RNA
acagacatccttaagga

SEQ ID NO: 8551 - RNA, 17 nt, Homo sapiens
  source 1..17: mol_type = genomic RNA
cagacatccttaaggaa

SEQ ID NO: 8552 - RNA, 17 nt, Homo sapiens
  source 1..17: mol_type = genomic RNA
agacatccttaaggaag

SEQ ID NO: 8553 - RNA, 17 nt, Homo sapiens
  source 1..17: mol_type = genomic RNA
gacatccttaaggaagg

SEQ ID NO: 8554 - RNA, 17 nt, Homo sapiens
  source 1..17: mol_type = genomic RNA
acatccttaaggaagga

SEQ ID NO: 8555 - RNA, 17 nt, Homo sapiens
  source 1..17: mol_type = genomic RNA
catccttaaggaaggag

SEQ ID NO: 8556 - RNA, 17 nt, Homo sapiens
  source 1..17: mol_type = genomic RNA
atccttaaggaaggagc

SEQ ID NO: 8557 - RNA, 17 nt, Homo sapiens
  source 1..17: mol_type = genomic RNA
tccttaaggaaggagca

SEQ ID NO: 8558 - RNA, 17 nt, Homo sapiens
  source 1..17: mol_type = genomic RNA
ccttaaggaaggagcaa

SEQ ID NO: 8559 - RNA, 17 nt, Homo sapiens
  source 1..17: mol_type = genomic RNA
cttaaggaaggagcaaa

SEQ ID NO: 8560 - RNA, 17 nt, Homo sapiens
  source 1..17: mol_type = genomic RNA
ttaaggaaggagcaaag

SEQ ID NO: 8561 - RNA, 17 nt, Homo sapiens
  source 1..17: mol_type = genomic RNA
taaggaaggagcaaagg

SEQ ID NO: 8562 - RNA, 17 nt, Homo sapiens
  source 1..17: mol_type = genomic RNA
aaggagcaaaggggctt

SEQ ID NO: 8563 - RNA, 17 nt, Homo sapiens
  source 1..17: mol_type = genomic RNA
aggagcaaaggggcttc

SEQ ID NO: 8564 - RNA, 17 nt, Homo sapiens
  source 1..17: mol_type = genomic RNA
ggagcaaaggggcttca

SEQ ID NO: 8565 - RNA, 17 nt, Homo sapiens
  source 1..17: mol_type = genomic RNA
gagcaaaggggcttcat

SEQ ID NO: 8566 - RNA, 17 nt, Homo sapiens
  source 1..17: mol_type = genomic RNA
agcaaaggggcttcatc

SEQ ID NO: 8567 - RNA, 17 nt, Homo sapiens
  source 1..17: mol_type = genomic RNA
gcaaaggggcttcatct

SEQ ID NO: 8568 - RNA, 17 nt, Homo sapiens
  source 1..17: mol_type = genomic RNA
caaaggggcttcatctt

SEQ ID NO: 8569 - RNA, 17 nt, Homo sapiens
  source 1..17: mol_type = genomic RNA
aaaggggcttcatctta

SEQ ID NO: 8570 - RNA, 17 nt, Homo sapiens
  source 1..17: mol_type = genomic RNA
aaggggcttcatcttaa

SEQ ID NO: 8571 - RNA, 17 nt, Homo sapiens
  source 1..17: mol_type = genomic RNA
aggggcttcatcttaaa

SEQ ID NO: 8572 - RNA, 17 nt, Homo sapiens
  source 1..17: mol_type = genomic RNA
ggggcttcatcttaaag

SEQ ID NO: 8573 - RNA, 17 nt, Homo sapiens
  source 1..17: mol_type = genomic RNA
gggcttcatcttaaaga

SEQ ID NO: 8574 - RNA, 17 nt, Homo sapiens
  source 1..17: mol_type = genomic RNA
ttaaagaatgaagaagg

SEQ ID NO: 8575 - RNA, 17 nt, Homo sapiens
  source 1..17: mol_type = genomic RNA
taaagaatgaagaaggg

SEQ ID NO: 8576 - RNA, 17 nt, Homo sapiens
  source 1..17: mol_type = genomic RNA
aaagaatgaagaaggga

SEQ ID NO: 8577 - RNA, 17 nt, Homo sapiens
  source 1..17: mol_type = genomic RNA
aagaatgaagaagggat

SEQ ID NO: 8578 - RNA, 17 nt, Homo sapiens
  source 1..17: mol_type = genomic RNA
agaatgaagaagggatt

SEQ ID NO: 8579 - RNA, 17 nt, Homo sapiens
  source 1..17: mol_type = genomic RNA
gaatgaagaagggattt

SEQ ID NO: 8580 - RNA, 17 nt, Homo sapiens
  source 1..17: mol_type = genomic RNA
aatgaagaagggatttg

SEQ ID NO: 8581 - RNA, 17 nt, Homo sapiens
  source 1..17: mol_type = genomic RNA
atgaagaagggatttgt

SEQ ID NO: 8582 - RNA, 17 nt, Homo sapiens
  source 1..17: mol_type = genomic RNA
tgaagaagggatttgtc

SEQ ID NO: 8583 - RNA, 17 nt, Homo sapiens
  source 1..17: mol_type = genomic RNA
gaagaagggatttgtca

SEQ ID NO: 8584 - RNA, 17 nt, Homo sapiens
  source 1..17: mol_type = genomic RNA
aagaagggatttgtcat

SEQ ID NO: 8585 - RNA, 17 nt, Homo sapiens
  source 1..17: mol_type = genomic RNA
agaagggatttgtcatg

SEQ ID NO: 8586 - RNA, 17 nt, Homo sapiens
  source 1..17: mol_type = genomic RNA
gaagggatttgtcatga

SEQ ID NO: 8587 - RNA, 17 nt, Homo sapiens
  source 1..17: mol_type = genomic RNA
aagggatttgtcatgag

SEQ ID NO: 8588 - RNA, 17 nt, Homo sapiens
  source 1..17: mol_type = genomic RNA
agggatttgtcatgaga

SEQ ID NO: 8589 - RNA, 17 nt, Homo sapiens
  source 1..17: mol_type = genomic RNA
gggatttgtcatgagag

SEQ ID NO: 8590 - RNA, 17 nt, Homo sapiens
  source 1..17: mol_type = genomic RNA
tgtcatgagagatgtgg

SEQ ID NO: 8591 - RNA, 17 nt, Homo sapiens
  source 1..17: mol_type = genomic RNA
gtcatgagagatgtggc

SEQ ID NO: 8592 - RNA, 17 nt, Homo sapiens
  source 1..17: mol_type = genomic RNA
tcatgagagatgtggca

SEQ ID NO: 8593 - RNA, 17 nt, Homo sapiens
  source 1..17: mol_type = genomic RNA
catgagagatgtggcag

SEQ ID NO: 8594 - RNA, 17 nt, Homo sapiens
  source 1..17: mol_type = genomic RNA
atgagagatgtggcagg

SEQ ID NO: 8595 - RNA, 17 nt, Homo sapiens
  source 1..17: mol_type = genomic RNA
tgagagatgtggcagga

SEQ ID NO: 8596 - RNA, 17 nt, Homo sapiens
  source 1..17: mol_type = genomic RNA
gagagatgtggcaggaa

SEQ ID NO: 8597 - RNA, 17 nt, Homo sapiens
  source 1..17: mol_type = genomic RNA
agagatgtggcaggaat

SEQ ID NO: 8598 - RNA, 17 nt, Homo sapiens
  source 1..17: mol_type = genomic RNA
gagatgtggcaggaatt

SEQ ID NO: 8599 - RNA, 17 nt, Homo sapiens
  source 1..17: mol_type = genomic RNA
agatgtggcaggaattt

SEQ ID NO: 8600 - RNA, 17 nt, Homo sapiens
  source 1..17: mol_type = genomic RNA
gatgtggcaggaatttc

SEQ ID NO: 8601 - RNA, 17 nt, Homo sapiens
  source 1..17: mol_type = genomic RNA
atgtggcaggaatttct

SEQ ID NO: 8602 - RNA, 17 nt, Homo sapiens
  source 1..17: mol_type = genomic RNA
tgtggcaggaatttctt

SEQ ID NO: 8603 - RNA, 17 nt, Homo sapiens
  source 1..17: mol_type = genomic RNA
gtggcaggaatttcttg

SEQ ID NO: 8604 - RNA, 17 nt, Homo sapiens
  source 1..17: mol_type = genomic RNA
tggcaggaatttcttga

SEQ ID NO: 8605 - RNA, 17 nt, Homo sapiens
  source 1..17: mol_type = genomic RNA
ggcaggaatttcttgag

SEQ ID NO: 8606 - RNA, 17 nt, Homo sapiens
  source 1..17: mol_type = genomic RNA
aggaatttcttgagagg

SEQ ID NO: 8607 - RNA, 17 nt, Homo sapiens
  source 1..17: mol_type = genomic RNA
ggaatttcttgagaggc

SEQ ID NO: 8608 - RNA, 17 nt, Homo sapiens
  source 1..17: mol_type = genomic RNA
aatttcttgagaggcag

SEQ ID NO: 8609 - RNA, 17 nt, Homo sapiens
  source 1..17: mol_type = genomic RNA
atttcttgagaggcaga

SEQ ID NO: 8610 - RNA, 17 nt, Homo sapiens
  source 1..17: mol_type = genomic RNA
tttcttgagaggcagag

SEQ ID NO: 8611 - RNA, 17 nt, Homo sapiens
  source 1..17: mol_type = genomic RNA
ttcttgagaggcagagg

SEQ ID NO: 8612 - RNA, 17 nt, Homo sapiens
  source 1..17: mol_type = genomic RNA
tcttgagaggcagaggg

SEQ ID NO: 8613 - RNA, 17 nt, Homo sapiens
  source 1..17: mol_type = genomic RNA
cttgagaggcagaggga

SEQ ID NO: 8614 - RNA, 17 nt, Homo sapiens
  source 1..17: mol_type = genomic RNA
ttgagaggcagagggag

SEQ ID NO: 8615 - RNA, 17 nt, Homo sapiens
  source 1..17: mol_type = genomic RNA
gcagagggagagcatga

SEQ ID NO: 8616 - RNA, 17 nt, Homo sapiens
  source 1..17: mol_type = genomic RNA
cagagggagagcatgag

SEQ ID NO: 8617 - RNA, 17 nt, Homo sapiens
  source 1..17: mol_type = genomic RNA
agagggagagcatgaga

SEQ ID NO: 8618 - RNA, 17 nt, Homo sapiens
  source 1..17: mol_type = genomic RNA
gagggagagcatgagaa

SEQ ID NO: 8619 - RNA, 17 nt, Homo sapiens
  source 1..17: mol_type = genomic RNA
agggagagcatgagaat

SEQ ID NO: 8620 - RNA, 17 nt, Homo sapiens
  source 1..17: mol_type = genomic RNA
gggagagcatgagaatg

SEQ ID NO: 8621 - RNA, 17 nt, Homo sapiens
  source 1..17: mol_type = genomic RNA
ggagagcatgagaatgt

SEQ ID NO: 8622 - RNA, 17 nt, Homo sapiens
  source 1..17: mol_type = genomic RNA
gagagcatgagaatgtt

SEQ ID NO: 8623 - RNA, 17 nt, Homo sapiens
  source 1..17: mol_type = genomic RNA
agagcatgagaatgtta

SEQ ID NO: 8624 - RNA, 17 nt, Homo sapiens
  source 1..17: mol_type = genomic RNA
gagcatgagaatgttag

SEQ ID NO: 8625 - RNA, 17 nt, Homo sapiens
  source 1..17: mol_type = genomic RNA
agcatgagaatgttagg

SEQ ID NO: 8626 - RNA, 17 nt, Homo sapiens
  source 1..17: mol_type = genomic RNA
gcatgagaatgttagga

SEQ ID NO: 8627 - RNA, 17 nt, Homo sapiens
  source 1..17: mol_type = genomic RNA
atgagaatgttaggaag

SEQ ID NO: 8628 - RNA, 17 nt, Homo sapiens
  source 1..17: mol_type = genomic RNA
tgagaatgttaggaagg

SEQ ID NO: 8629 - RNA, 17 nt, Homo sapiens
  source 1..17: mol_type = genomic RNA
gagaatgttaggaaggc

SEQ ID NO: 8630 - RNA, 17 nt, Homo sapiens
  source 1..17: mol_type = genomic RNA
agaatgttaggaaggca

SEQ ID NO: 8631 - RNA, 17 nt, Homo sapiens
  source 1..17: mol_type = genomic RNA
gaatgttaggaaggcag

SEQ ID NO: 8632 - RNA, 17 nt, Homo sapiens
  source 1..17: mol_type = genomic RNA
aatgttaggaaggcagg

SEQ ID NO: 8633 - RNA, 17 nt, Homo sapiens
  source 1..17: mol_type = genomic RNA
atgttaggaaggcagga

SEQ ID NO: 8634 - RNA, 17 nt, Homo sapiens
  source 1..17: mol_type = genomic RNA
tgttaggaaggcaggag

SEQ ID NO: 8635 - RNA, 17 nt, Homo sapiens
  source 1..17: mol_type = genomic RNA
gttaggaaggcaggaga

SEQ ID NO: 8636 - RNA, 17 nt, Homo sapiens
  source 1..17: mol_type = genomic RNA
ttaggaaggcaggagag

SEQ ID NO: 8637 - RNA, 17 nt, Homo sapiens
  source 1..17: mol_type = genomic RNA
taggaaggcaggagaga

SEQ ID NO: 8638 - RNA, 17 nt, Homo sapiens
  source 1..17: mol_type = genomic RNA
aaggcaggagagactct

SEQ ID NO: 8639 - RNA, 17 nt, Homo sapiens
  source 1..17: mol_type = genomic RNA
aggcaggagagactctc

SEQ ID NO: 8640 - RNA, 17 nt, Homo sapiens
  source 1..17: mol_type = genomic RNA
ggcaggagagactctca

SEQ ID NO: 8641 - RNA, 17 nt, Homo sapiens
  source 1..17: mol_type = genomic RNA
gcaggagagactctcac

SEQ ID NO: 8642 - RNA, 17 nt, Homo sapiens
  source 1..17: mol_type = genomic RNA
caggagagactctcaca

SEQ ID NO: 8643 - RNA, 17 nt, Homo sapiens
  source 1..17: mol_type = genomic RNA
aggagagactctcacac

SEQ ID NO: 8644 - RNA, 17 nt, Homo sapiens
  source 1..17: mol_type = genomic RNA
ggagagactctcacaca

SEQ ID NO: 8645 - RNA, 17 nt, Homo sapiens
  source 1..17: mol_type = genomic RNA
gagagactctcacacat

SEQ ID NO: 8646 - RNA, 17 nt, Homo sapiens
  source 1..17: mol_type = genomic RNA
agagactctcacacatc

SEQ ID NO: 8647 - RNA, 17 nt, Homo sapiens
  source 1..17: mol_type = genomic RNA
gagactctcacacatct

SEQ ID NO: 8648 - RNA, 17 nt, Homo sapiens
  source 1..17: mol_type = genomic RNA
agactctcacacatctg

SEQ ID NO: 8649 - RNA, 17 nt, Homo sapiens
  source 1..17: mol_type = genomic RNA
gactctcacacatctgg

SEQ ID NO: 8650 - RNA, 17 nt, Homo sapiens
  source 1..17: mol_type = genomic RNA
actctcacacatctggg

SEQ ID NO: 8651 - RNA, 17 nt, Homo sapiens
  source 1..17: mol_type = genomic RNA
ctctcacacatctggga

SEQ ID NO: 8652 - RNA, 17 nt, Homo sapiens
  source 1..17: mol_type = genomic RNA
tctcacacatctgggaa

SEQ ID NO: 8653 - RNA, 17 nt, Homo sapiens
  source 1..17: mol_type = genomic RNA
ctcacacatctgggaag

SEQ ID NO: 8654 - RNA, 17 nt, Homo sapiens
  source 1..17: mol_type = genomic RNA
tcacacatctgggaagc

SEQ ID NO: 8655 - RNA, 17 nt, Homo sapiens
  source 1..17: mol_type = genomic RNA
cacacatctgggaagct

SEQ ID NO: 8656 - RNA, 17 nt, Homo sapiens
  source 1..17: mol_type = genomic RNA
acacatctgggaagctg

SEQ ID NO: 8657 - RNA, 17 nt, Homo sapiens
  source 1..17: mol_type = genomic RNA
cacatctgggaagctga

SEQ ID NO: 8658 - RNA, 17 nt, Homo sapiens
  source 1..17: mol_type = genomic RNA
acatctgggaagctgac

SEQ ID NO: 8659 - RNA, 17 nt, Homo sapiens
  source 1..17: mol_type = genomic RNA
catctgggaagctgaca

SEQ ID NO: 8660 - RNA, 17 nt, Homo sapiens
  source 1..17: mol_type = genomic RNA
atctgggaagctgacaa

SEQ ID NO: 8661 - RNA, 17 nt, Homo sapiens
  source 1..17: mol_type = genomic RNA
tctgggaagctgacaat

SEQ ID NO: 8662 - RNA, 17 nt, Homo sapiens
  source 1..17: mol_type = genomic RNA
ctgggaagctgacaatc

SEQ ID NO: 8663 - RNA, 17 nt, Homo sapiens
  source 1..17: mol_type = genomic RNA
tgggaagctgacaatcc

SEQ ID NO: 8664 - RNA, 17 nt, Homo sapiens
  source 1..17: mol_type = genomic RNA
gggaagctgacaatcca

SEQ ID NO: 8665 - RNA, 17 nt, Homo sapiens
  source 1..17: mol_type = genomic RNA
ggaagctgacaatccat

SEQ ID NO: 8666 - RNA, 17 nt, Homo sapiens
  source 1..17: mol_type = genomic RNA
gaagctgacaatccatc

SEQ ID NO: 8667 - RNA, 17 nt, Homo sapiens
  source 1..17: mol_type = genomic RNA
aagctgacaatccatca

SEQ ID NO: 8668 - RNA, 17 nt, Homo sapiens
  source 1..17: mol_type = genomic RNA
agctgacaatccatcag

SEQ ID NO: 8669 - RNA, 17 nt, Homo sapiens
  source 1..17: mol_type = genomic RNA
gctgacaatccatcagc

SEQ ID NO: 8670 - RNA, 17 nt, Homo sapiens
  source 1..17: mol_type = genomic RNA
ctgacaatccatcagca

SEQ ID NO: 8671 - RNA, 17 nt, Homo sapiens
  source 1..17: mol_type = genomic RNA
tgacaatccatcagcat

SEQ ID NO: 8672 - RNA, 17 nt, Homo sapiens
  source 1..17: mol_type = genomic RNA
gacaatccatcagcatg

SEQ ID NO: 8673 - RNA, 17 nt, Homo sapiens
  source 1..17: mol_type = genomic RNA
acaatccatcagcatgt

SEQ ID NO: 8674 - RNA, 17 nt, Homo sapiens
  source 1..17: mol_type = genomic RNA
caatccatcagcatgtc

SEQ ID NO: 8675 - RNA, 17 nt, Homo sapiens
  source 1..17: mol_type = genomic RNA
aatccatcagcatgtcc

SEQ ID NO: 8676 - RNA, 17 nt, Homo sapiens
  source 1..17: mol_type = genomic RNA
atccatcagcatgtcca

SEQ ID NO: 8677 - RNA, 17 nt, Homo sapiens
  source 1..17: mol_type = genomic RNA
tccatcagcatgtccag

SEQ ID NO: 8678 - RNA, 17 nt, Homo sapiens
  source 1..17: mol_type = genomic RNA
ccatcagcatgtccagg

SEQ ID NO: 8679 - RNA, 17 nt, Homo sapiens
  source 1..17: mol_type = genomic RNA
catcagcatgtccagga

SEQ ID NO: 8680 - RNA, 17 nt, Homo sapiens
  source 1..17: mol_type = genomic RNA
atcagcatgtccaggag

SEQ ID NO: 8681 - RNA, 17 nt, Homo sapiens
  source 1..17: mol_type = genomic RNA
tcagcatgtccaggagg

SEQ ID NO: 8682 - RNA, 17 nt, Homo sapiens
  source 1..17: mol_type = genomic RNA
cagcatgtccaggagga

SEQ ID NO: 8683 - RNA, 17 nt, Homo sapiens
  source 1..17: mol_type = genomic RNA
agcatgtccaggaggaa

SEQ ID NO: 8684 - RNA, 17 nt, Homo sapiens
  source 1..17: mol_type = genomic RNA
gcatgtccaggaggaaa

SEQ ID NO: 8685 - RNA, 17 nt, Homo sapiens
  source 1..17: mol_type = genomic RNA
catgtccaggaggaaaa

SEQ ID NO: 8686 - RNA, 17 nt, Homo sapiens
  source 1..17: mol_type = genomic RNA
atgtccaggaggaaaat

SEQ ID NO: 8687 - RNA, 17 nt, Homo sapiens
  source 1..17: mol_type = genomic RNA
tgtccaggaggaaaata

SEQ ID NO: 8688 - RNA, 17 nt, Homo sapiens
  source 1..17: mol_type = genomic RNA
gtccaggaggaaaataa

SEQ ID NO: 8689 - RNA, 17 nt, Homo sapiens
  source 1..17: mol_type = genomic RNA
tccaggaggaaaataag

SEQ ID NO: 8690 - RNA, 17 nt, Homo sapiens
  source 1..17: mol_type = genomic RNA
ccaggaggaaaataagg

SEQ ID NO: 8691 - RNA, 17 nt, Homo sapiens
  source 1..17: mol_type = genomic RNA
caggaggaaaataagga

SEQ ID NO: 8692 - RNA, 17 nt, Homo sapiens
  source 1..17: mol_type = genomic RNA
aggaggaaaataaggag

SEQ ID NO: 8693 - RNA, 17 nt, Homo sapiens
  source 1..17: mol_type = genomic RNA
ggaggaaaataaggagg

SEQ ID NO: 8694 - RNA, 17 nt, Homo sapiens
  source 1..17: mol_type = genomic RNA
gaggaaaataaggagga

SEQ ID NO: 8695 - RNA, 17 nt, Homo sapiens
  source 1..17: mol_type = genomic RNA
aggaaaataaggaggag

SEQ ID NO: 8696 - RNA, 17 nt, Homo sapiens
  source 1..17: mol_type = genomic RNA
ggaaaataaggaggagg

SEQ ID NO: 8697 - RNA, 17 nt, Homo sapiens
  source 1..17: mol_type = genomic RNA
gaaaataaggaggagga

SEQ ID NO: 8698 - RNA, 17 nt, Homo sapiens
  source 1..17: mol_type = genomic RNA
aaaataaggaggaggag

SEQ ID NO: 8699 - RNA, 17 nt, Homo sapiens
  source 1..17: mol_type = genomic RNA
aaataaggaggaggagc

SEQ ID NO: 8700 - RNA, 17 nt, Homo sapiens
  source 1..17: mol_type = genomic RNA
aataaggaggaggagca

SEQ ID NO: 8701 - RNA, 17 nt, Homo sapiens
  source 1..17: mol_type = genomic RNA
ataaggaggaggagcag

SEQ ID NO: 8702 - RNA, 17 nt, Homo sapiens
  source 1..17: mol_type = genomic RNA
taaggaggaggagcaga

SEQ ID NO: 8703 - RNA, 17 nt, Homo sapiens
  source 1..17: mol_type = genomic RNA
ggaggaggagcagaaat

SEQ ID NO: 8704 - RNA, 17 nt, Homo sapiens
  source 1..17: mol_type = genomic RNA
gaggaggagcagaaata

SEQ ID NO: 8705 - RNA, 17 nt, Homo sapiens
  source 1..17: mol_type = genomic RNA
aggaggagcagaaatag

SEQ ID NO: 8706 - RNA, 17 nt, Homo sapiens
  source 1..17: mol_type = genomic RNA
ggaggagcagaaataga

SEQ ID NO: 8707 - RNA, 17 nt, Homo sapiens
  source 1..17: mol_type = genomic RNA
gaggagcagaaatagat

SEQ ID NO: 8708 - RNA, 17 nt, Homo sapiens
  source 1..17: mol_type = genomic RNA
aggagcagaaatagatg

SEQ ID NO: 8709 - RNA, 17 nt, Homo sapiens
  source 1..17: mol_type = genomic RNA
ggagcagaaatagatga

SEQ ID NO: 8710 - RNA, 17 nt, Homo sapiens
  source 1..17: mol_type = genomic RNA
gagcagaaatagatgag

SEQ ID NO: 8711 - RNA, 17 nt, Homo sapiens
  source 1..17: mol_type = genomic RNA
agcagaaatagatgagg

SEQ ID NO: 8712 - RNA, 17 nt, Homo sapiens
  source 1..17: mol_type = genomic RNA
gcagaaatagatgaggc

SEQ ID NO: 8713 - RNA, 17 nt, Homo sapiens
  source 1..17: mol_type = genomic RNA
cagaaatagatgaggct

SEQ ID NO: 8714 - RNA, 17 nt, Homo sapiens
  source 1..17: mol_type = genomic RNA
agaaatagatgaggctg

SEQ ID NO: 8715 - RNA, 17 nt, Homo sapiens
  source 1..17: mol_type = genomic RNA
gaaatagatgaggctgg

SEQ ID NO: 8716 - RNA, 17 nt, Homo sapiens
  source 1..17: mol_type = genomic RNA
aaatagatgaggctgga

SEQ ID NO: 8717 - RNA, 17 nt, Homo sapiens
  source 1..17: mol_type = genomic RNA
aatagatgaggctggat

SEQ ID NO: 8718 - RNA, 17 nt, Homo sapiens
  source 1..17: mol_type = genomic RNA
atagatgaggctggata

SEQ ID NO: 8719 - RNA, 17 nt, Homo sapiens
  source 1..17: mol_type = genomic RNA
tagatgaggctggatat

SEQ ID NO: 8720 - RNA, 17 nt, Homo sapiens
  source 1..17: mol_type = genomic RNA
agatgaggctggatata

SEQ ID NO: 8721 - RNA, 17 nt, Homo sapiens
  source 1..17: mol_type = genomic RNA
gatgaggctggatatag

SEQ ID NO: 8722 - RNA, 17 nt, Homo sapiens
  source 1..17: mol_type = genomic RNA
atgaggctggatataga

SEQ ID NO: 8723 - RNA, 17 nt, Homo sapiens
  source 1..17: mol_type = genomic RNA
tgaggctggatatagaa

SEQ ID NO: 8724 - RNA, 17 nt, Homo sapiens
  source 1..17: mol_type = genomic RNA
gaggctggatatagaag

SEQ ID NO: 8725 - RNA, 17 nt, Homo sapiens
  source 1..17: mol_type = genomic RNA
aggctggatatagaagc

SEQ ID NO: 8726 - RNA, 17 nt, Homo sapiens
  source 1..17: mol_type = genomic RNA
ggctggatatagaagca

SEQ ID NO: 8727 - RNA, 17 nt, Homo sapiens
  source 1..17: mol_type = genomic RNA
gctggatatagaagcag

SEQ ID NO: 8728 - RNA, 17 nt, Homo sapiens
  source 1..17: mol_type = genomic RNA
ctggatatagaagcagg

SEQ ID NO: 8729 - RNA, 17 nt, Homo sapiens
  source 1..17: mol_type = genomic RNA
tggatatagaagcaggg

SEQ ID NO: 8730 - RNA, 17 nt, Homo sapiens
  source 1..17: mol_type = genomic RNA
ggatatagaagcagggc

SEQ ID NO: 8731 - RNA, 17 nt, Homo sapiens
  source 1..17: mol_type = genomic RNA
gatatagaagcagggct

SEQ ID NO: 8732 - RNA, 17 nt, Homo sapiens
  source 1..17: mol_type = genomic RNA
atatagaagcagggctg

SEQ ID NO: 8733 - RNA, 17 nt, Homo sapiens
  source 1..17: mol_type = genomic RNA
tatagaagcagggctga

SEQ ID NO: 8734 - RNA, 17 nt, Homo sapiens
  source 1..17: mol_type = genomic RNA
atagaagcagggctgaa

SEQ ID NO: 8735 - RNA, 17 nt, Homo sapiens
  source 1..17: mol_type = genomic RNA
tagaagcagggctgaag

SEQ ID NO: 8736 - RNA, 17 nt, Homo sapiens
  source 1..17: mol_type = genomic RNA
gcagggctgaagctgtg

SEQ ID NO: 8737 - RNA, 17 nt, Homo sapiens
  source 1..17: mol_type = genomic RNA
cagggctgaagctgtgt

SEQ ID NO: 8738 - RNA, 17 nt, Homo sapiens
  source 1..17: mol_type = genomic RNA
agggctgaagctgtgtt

SEQ ID NO: 8739 - RNA, 17 nt, Homo sapiens
  source 1..17: mol_type = genomic RNA
gggctgaagctgtgttg

SEQ ID NO: 8740 - RNA, 17 nt, Homo sapiens
  source 1..17: mol_type = genomic RNA
ggctgaagctgtgttgt

SEQ ID NO: 8741 - RNA, 17 nt, Homo sapiens
  source 1..17: mol_type = genomic RNA
gctgaagctgtgttgtt

SEQ ID NO: 8742 - RNA, 17 nt, Homo sapiens
  source 1..17: mol_type = genomic RNA
tgtggtaaagagttgtg

SEQ ID NO: 8743 - RNA, 17 nt, Homo sapiens
  source 1..17: mol_type = genomic RNA
gtggtaaagagttgtga

SEQ ID NO: 8744 - RNA, 17 nt, Homo sapiens
  source 1..17: mol_type = genomic RNA
tggtaaagagttgtgat

SEQ ID NO: 8745 - RNA, 17 nt, Homo sapiens
  source 1..17: mol_type = genomic RNA
tgattctatccagaagg

SEQ ID NO: 8746 - RNA, 17 nt, Homo sapiens
  source 1..17: mol_type = genomic RNA
gattctatccagaaggc

SEQ ID NO: 8747 - RNA, 17 nt, Homo sapiens
  source 1..17: mol_type = genomic RNA
attctatccagaaggca

SEQ ID NO: 8748 - RNA, 17 nt, Homo sapiens
  source 1..17: mol_type = genomic RNA
ttctatccagaaggcaa

SEQ ID NO: 8749 - RNA, 17 nt, Homo sapiens
  source 1..17: mol_type = genomic RNA
tctatccagaaggcaat

SEQ ID NO: 8750 - RNA, 17 nt, Homo sapiens
  source 1..17: mol_type = genomic RNA
ctatccagaaggcaata

SEQ ID NO: 8751 - RNA, 17 nt, Homo sapiens
  source 1..17: mol_type = genomic RNA
tatccagaaggcaatag

SEQ ID NO: 8752 - RNA, 17 nt, Homo sapiens
  source 1..17: mol_type = genomic RNA
atccagaaggcaatagg

SEQ ID NO: 8753 - RNA, 17 nt, Homo sapiens
  source 1..17: mol_type = genomic RNA
tccagaaggcaataggt

SEQ ID NO: 8754 - RNA, 17 nt, Homo sapiens
  source 1..17: mol_type = genomic RNA
ccagaaggcaataggta

SEQ ID NO: 8755 - RNA, 17 nt, Homo sapiens
  source 1..17: mol_type = genomic RNA
cagaaggcaataggtag

SEQ ID NO: 8756 - RNA, 17 nt, Homo sapiens
  source 1..17: mol_type = genomic RNA
tattttctgcaaagggc

SEQ ID NO: 8757 - RNA, 17 nt, Homo sapiens
  source 1..17: mol_type = genomic RNA
attttctgcaaagggct

SEQ ID NO: 8758 - RNA, 17 nt, Homo sapiens
  source 1..17: mol_type = genomic RNA
ttttctgcaaagggcta

SEQ ID NO: 8759 - RNA, 17 nt, Homo sapiens
  source 1..17: mol_type = genomic RNA
tttctgcaaagggctaa

SEQ ID NO: 8760 - RNA, 17 nt, Homo sapiens
  source 1..17: mol_type = genomic RNA
ttctgcaaagggctaaa

SEQ ID NO: 8761 - RNA, 17 nt, Homo sapiens
  source 1..17: mol_type = genomic RNA
tctgcaaagggctaaat

SEQ ID NO: 8762 - RNA, 17 nt, Homo sapiens
  source 1..17: mol_type = genomic RNA
ctgcaaagggctaaatg

SEQ ID NO: 8763 - RNA, 17 nt, Homo sapiens
  source 1..17: mol_type = genomic RNA
tgcaaagggctaaatgt

SEQ ID NO: 8764 - RNA, 17 nt, Homo sapiens
  source 1..17: mol_type = genomic RNA
gcaaagggctaaatgtt

SEQ ID NO: 8765 - RNA, 17 nt, Homo sapiens
  source 1..17: mol_type = genomic RNA
caaagggctaaatgtta

SEQ ID NO: 8766 - RNA, 17 nt, Homo sapiens
  source 1..17: mol_type = genomic RNA
aaagggctaaatgttaa

SEQ ID NO: 8767 - RNA, 17 nt, Homo sapiens
  source 1..17: mol_type = genomic RNA
aagggctaaatgttaaa

SEQ ID NO: 8768 - RNA, 17 nt, Homo sapiens
  source 1..17: mol_type = genomic RNA
agggctaaatgttaaat

SEQ ID NO: 8769 - RNA, 17 nt, Homo sapiens
  source 1..17: mol_type = genomic RNA
tttccaagccatatggt

SEQ ID NO: 8770 - RNA, 17 nt, Homo sapiens
  source 1..17: mol_type = genomic RNA
ttccaagccatatggtc

SEQ ID NO: 8771 - RNA, 17 nt, Homo sapiens
  source 1..17: mol_type = genomic RNA
tccaagccatatggtct

SEQ ID NO: 8772 - RNA, 17 nt, Homo sapiens
  source 1..17: mol_type = genomic RNA
ccaagccatatggtctc

SEQ ID NO: 8773 - RNA, 17 nt, Homo sapiens
  source 1..17: mol_type = genomic RNA
caagccatatggtctct

SEQ ID NO: 8774 - RNA, 17 nt, Homo sapiens
  source 1..17: mol_type = genomic RNA
aagccatatggtctctc

SEQ ID NO: 8775 - RNA, 17 nt, Homo sapiens
  source 1..17: mol_type = genomic RNA
agccatatggtctctct

SEQ ID NO: 8776 - RNA, 17 nt, Homo sapiens
  source 1..17: mol_type = genomic RNA
gccatatggtctctctc

SEQ ID NO: 8777 - RNA, 17 nt, Homo sapiens
  source 1..17: mol_type = genomic RNA
ccatatggtctctctct

SEQ ID NO: 8778 - RNA, 17 nt, Homo sapiens
  source 1..17: mol_type = genomic RNA
tggtctctctctcaatg

SEQ ID NO: 8779 - RNA, 17 nt, Homo sapiens
  source 1..17: mol_type = genomic RNA
ggtctctctctcaatga

SEQ ID NO: 8780 - RNA, 17 nt, Homo sapiens
  source 1..17: mol_type = genomic RNA
tctctcaatgactcagc

SEQ ID NO: 8781 - RNA, 17 nt, Homo sapiens
  source 1..17: mol_type = genomic RNA
ctctcaatgactcagct

SEQ ID NO: 8782 - RNA, 17 nt, Homo sapiens
  source 1..17: mol_type = genomic RNA
tctcaatgactcagctc

SEQ ID NO: 8783 - RNA, 17 nt, Homo sapiens
  source 1..17: mol_type = genomic RNA
ctcaatgactcagctct

SEQ ID NO: 8784 - RNA, 17 nt, Homo sapiens
  source 1..17: mol_type = genomic RNA
tcaatgactcagctctt

SEQ ID NO: 8785 - RNA, 17 nt, Homo sapiens
  source 1..17: mol_type = genomic RNA
caatgactcagctcttc

SEQ ID NO: 8786 - RNA, 17 nt, Homo sapiens
  source 1..17: mol_type = genomic RNA
aatgactcagctcttcc

SEQ ID NO: 8787 - RNA, 17 nt, Homo sapiens
  source 1..17: mol_type = genomic RNA
atgactcagctcttcca

SEQ ID NO: 8788 - RNA, 17 nt, Homo sapiens
  source 1..17: mol_type = genomic RNA
tgactcagctcttccat

SEQ ID NO: 8789 - RNA, 17 nt, Homo sapiens
  source 1..17: mol_type = genomic RNA
tataccatgaaagtagc

SEQ ID NO: 8790 - RNA, 17 nt, Homo sapiens
  source 1..17: mol_type = genomic RNA
ataccatgaaagtagcc

SEQ ID NO: 8791 - RNA, 17 nt, Homo sapiens
  source 1..17: mol_type = genomic RNA
taccatgaaagtagcca

SEQ ID NO: 8792 - RNA, 17 nt, Homo sapiens
  source 1..17: mol_type = genomic RNA
accatgaaagtagccag

SEQ ID NO: 8793 - RNA, 17 nt, Homo sapiens
  source 1..17: mol_type = genomic RNA
ccatgaaagtagccaga

SEQ ID NO: 8794 - RNA, 17 nt, Homo sapiens
  source 1..17: mol_type = genomic RNA
catgaaagtagccagag

SEQ ID NO: 8795 - RNA, 17 nt, Homo sapiens
  source 1..17: mol_type = genomic RNA
atgaaagtagccagaga

SEQ ID NO: 8796 - RNA, 17 nt, Homo sapiens
  source 1..17: mol_type = genomic RNA
tgaaagtagccagagac

SEQ ID NO: 8797 - RNA, 17 nt, Homo sapiens
  source 1..17: mol_type = genomic RNA
gaaagtagccagagacg

SEQ ID NO: 8798 - RNA, 17 nt, Homo sapiens
  source 1..17: mol_type = genomic RNA
aaacgcagactgtgtca

SEQ ID NO: 8799 - RNA, 17 nt, Homo sapiens
  source 1..17: mol_type = genomic RNA
aacgcagactgtgtcag

SEQ ID NO: 8800 - RNA, 17 nt, Homo sapiens
  source 1..17: mol_type = genomic RNA
acgcagactgtgtcaga

SEQ ID NO: 8801 - RNA, 17 nt, Homo sapiens
  source 1..17: mol_type = genomic RNA
cgcagactgtgtcagac

SEQ ID NO: 8802 - RNA, 17 nt, Homo sapiens
  source 1..17: mol_type = genomic RNA
gcagactgtgtcagaca

SEQ ID NO: 8803 - RNA, 17 nt, Homo sapiens
  source 1..17: mol_type = genomic RNA
cagactgtgtcagacat

SEQ ID NO: 8804 - RNA, 17 nt, Homo sapiens
  source 1..17: mol_type = genomic RNA
agactgtgtcagacata

SEQ ID NO: 8805 - RNA, 17 nt, Homo sapiens
  source 1..17: mol_type = genomic RNA
gactgtgtcagacatag

SEQ ID NO: 8806 - RNA, 17 nt, Homo sapiens
  source 1..17: mol_type = genomic RNA
actgtgtcagacatagt

SEQ ID NO: 8807 - RNA, 17 nt, Homo sapiens
  source 1..17: mol_type = genomic RNA
ctgtgtcagacatagtc

SEQ ID NO: 8808 - RNA, 17 nt, Homo sapiens
  source 1..17: mol_type = genomic RNA
tgtgtcagacatagtcc

SEQ ID NO: 8809 - RNA, 17 nt, Homo sapiens
  source 1..17: mol_type = genomic RNA
gtgtcagacatagtcca

SEQ ID NO: 8810 - RNA, 17 nt, Homo sapiens
  source 1..17: mol_type = genomic RNA
tgtcagacatagtccat

SEQ ID NO: 8811 - RNA, 17 nt, Homo sapiens
  source 1..17: mol_type = genomic RNA
gtcagacatagtccatg

SEQ ID NO: 8812 - RNA, 17 nt, Homo sapiens
  source 1..17: mol_type = genomic RNA
tcagacatagtccatgt

SEQ ID NO: 8813 - RNA, 17 nt, Homo sapiens
  source 1..17: mol_type = genomic RNA
acatagtccatgtatgg

SEQ ID NO: 8814 - RNA, 17 nt, Homo sapiens
  source 1..17: mol_type = genomic RNA
tagtccatgtatggtag

SEQ ID NO: 8815 - RNA, 17 nt, Homo sapiens
  source 1..17: mol_type = genomic RNA
agtccatgtatggtagt

SEQ ID NO: 8816 - RNA, 17 nt, Homo sapiens
  source 1..17: mol_type = genomic RNA
ttatgatgtgatggaga

SEQ ID NO: 8817 - RNA, 17 nt, Homo sapiens
  source 1..17: mol_type = genomic RNA
tatgatgtgatggagaa

SEQ ID NO: 8818 - RNA, 17 nt, Homo sapiens
  source 1..17: mol_type = genomic RNA
atgatgtgatggagaat

SEQ ID NO: 8819 - RNA, 17 nt, Homo sapiens
  source 1..17: mol_type = genomic RNA
tgatgtgatggagaatt

SEQ ID NO: 8820 - RNA, 17 nt, Homo sapiens
  source 1..17: mol_type = genomic RNA
gatgtgatggagaattc

SEQ ID NO: 8821 - RNA, 17 nt, Homo sapiens
  source 1..17: mol_type = genomic RNA
atgtgatggagaattcc

SEQ ID NO: 8822 - RNA, 17 nt, Homo sapiens
  source 1..17: mol_type = genomic RNA
tgtgatggagaattcct

SEQ ID NO: 8823 - RNA, 17 nt, Homo sapiens
  source 1..17: mol_type = genomic RNA
gtgatggagaattccta

SEQ ID NO: 8824 - RNA, 17 nt, Homo sapiens
  source 1..17: mol_type = genomic RNA
tgatggagaattcctac

SEQ ID NO: 8825 - RNA, 17 nt, Homo sapiens
  source 1..17: mol_type = genomic RNA
gatggagaattcctaca

SEQ ID NO: 8826 - RNA, 17 nt, Homo sapiens
  source 1..17: mol_type = genomic RNA
atggagaattcctacaa

SEQ ID NO: 8827 - RNA, 17 nt, Homo sapiens
  source 1..17: mol_type = genomic RNA
tggagaattcctacaag

SEQ ID NO: 8828 - RNA, 17 nt, Homo sapiens
  source 1..17: mol_type = genomic RNA
ggagaattcctacaaga

SEQ ID NO: 8829 - RNA, 17 nt, Homo sapiens
  source 1..17: mol_type = genomic RNA
gagaattcctacaagag

SEQ ID NO: 8830 - RNA, 17 nt, Homo sapiens
  source 1..17: mol_type = genomic RNA
agaattcctacaagagt

SEQ ID NO: 8831 - RNA, 17 nt, Homo sapiens
  source 1..17: mol_type = genomic RNA
taaatggtagagtgaac

SEQ ID NO: 8832 - RNA, 17 nt, Homo sapiens
  source 1..17: mol_type = genomic RNA
aaatggtagagtgaaca

SEQ ID NO: 8833 - RNA, 17 nt, Homo sapiens
  source 1..17: mol_type = genomic RNA
aatggtagagtgaacat

SEQ ID NO: 8834 - RNA, 17 nt, Homo sapiens
  source 1..17: mol_type = genomic RNA
atggtagagtgaacata

SEQ ID NO: 8835 - RNA, 17 nt, Homo sapiens
  source 1..17: mol_type = genomic RNA
tggtagagtgaacatac

SEQ ID NO: 8836 - RNA, 17 nt, Homo sapiens
  source 1..17: mol_type = genomic RNA
ggtagagtgaacataca

SEQ ID NO: 8837 - RNA, 17 nt, Homo sapiens
  source 1..17: mol_type = genomic RNA
gtagagtgaacatacac

SEQ ID NO: 8838 - RNA, 17 nt, Homo sapiens
  source 1..17: mol_type = genomic RNA
tagagtgaacatacact

SEQ ID NO: 8839 - RNA, 17 nt, Homo sapiens
  source 1..17: mol_type = genomic RNA
agagtgaacatacactg

SEQ ID NO: 8840 - RNA, 17 nt, Homo sapiens
  source 1..17: mol_type = genomic RNA
gagtgaacatacactgg

SEQ ID NO: 8841 - RNA, 17 nt, Homo sapiens
  source 1..17: mol_type = genomic RNA
agtgaacatacactgga

SEQ ID NO: 8842 - RNA, 17 nt, Homo sapiens
  source 1..17: mol_type = genomic RNA
gtgaacatacactggaa

SEQ ID NO: 8843 - RNA, 17 nt, Homo sapiens
  source 1..17: mol_type = genomic RNA
tgaacatacactggaat

SEQ ID NO: 8844 - RNA, 17 nt, Homo sapiens
  source 1..17: mol_type = genomic RNA
gaacatacactggaatt

SEQ ID NO: 8845 - RNA, 17 nt, Homo sapiens
  source 1..17: mol_type = genomic RNA
aacatacactggaattc

SEQ ID NO: 8846 - RNA, 17 nt, Homo sapiens
  source 1..17: mol_type = genomic RNA
acatacactggaattct

SEQ ID NO: 8847 - RNA, 17 nt, Homo sapiens
  source 1..17: mol_type = genomic RNA
acactggaattctatac

SEQ ID NO: 8848 - RNA, 17 nt, Homo sapiens
  source 1..17: mol_type = genomic RNA
ctggaattctatactgc

SEQ ID NO: 8849 - RNA, 17 nt, Homo sapiens
  source 1..17: mol_type = genomic RNA
tctatactgcttgaccc

SEQ ID NO: 8850 - RNA, 17 nt, Homo sapiens
  source 1..17: mol_type = genomic RNA
ctatactgcttgaccca

SEQ ID NO: 8851 - RNA, 17 nt, Homo sapiens
  source 1..17: mol_type = genomic RNA
tatactgcttgacccaa

SEQ ID NO: 8852 - RNA, 17 nt, Homo sapiens
  source 1..17: mol_type = genomic RNA
atactgcttgacccaag

SEQ ID NO: 8853 - RNA, 17 nt, Homo sapiens
  source 1..17: mol_type = genomic RNA
tactgcttgacccaagc

SEQ ID NO: 8854 - RNA, 17 nt, Homo sapiens
  source 1..17: mol_type = genomic RNA
actgcttgacccaagct

SEQ ID NO: 8855 - RNA, 17 nt, Homo sapiens
  source 1..17: mol_type = genomic RNA
ctgcttgacccaagctt

SEQ ID NO: 8856 - RNA, 17 nt, Homo sapiens
  source 1..17: mol_type = genomic RNA
tgcttgacccaagcttt

SEQ ID NO: 8857 - RNA, 17 nt, Homo sapiens
  source 1..17: mol_type = genomic RNA
gcttgacccaagctttt

SEQ ID NO: 8858 - RNA, 17 nt, Homo sapiens
  source 1..17: mol_type = genomic RNA
tgacccaagcttttgat

SEQ ID NO: 8859 - RNA, 17 nt, Homo sapiens
  source 1..17: mol_type = genomic RNA
cccaagcttttgatagc

SEQ ID NO: 8860 - RNA, 17 nt, Homo sapiens
  source 1..17: mol_type = genomic RNA
ttgatagcaaaaggtag

SEQ ID NO: 8861 - RNA, 17 nt, Homo sapiens
  source 1..17: mol_type = genomic RNA
tgatagcaaaaggtaga

SEQ ID NO: 8862 - RNA, 17 nt, Homo sapiens
  source 1..17: mol_type = genomic RNA
gatagcaaaaggtagaa

SEQ ID NO: 8863 - RNA, 17 nt, Homo sapiens
  source 1..17: mol_type = genomic RNA
atagcaaaaggtagaaa

SEQ ID NO: 8864 - RNA, 17 nt, Homo sapiens
  source 1..17: mol_type = genomic RNA
tagcaaaaggtagaaaa

SEQ ID NO: 8865 - RNA, 17 nt, Homo sapiens
  source 1..17: mol_type = genomic RNA
agcaaaaggtagaaaag

SEQ ID NO: 8866 - RNA, 17 nt, Homo sapiens
  source 1..17: mol_type = genomic RNA
gcaaaaggtagaaaaga

SEQ ID NO: 8867 - RNA, 17 nt, Homo sapiens
  source 1..17: mol_type = genomic RNA
caaaaggtagaaaagac

SEQ ID NO: 8868 - RNA, 17 nt, Homo sapiens
  source 1..17: mol_type = genomic RNA
aaaaggtagaaaagaca

SEQ ID NO: 8869 - RNA, 17 nt, Homo sapiens
  source 1..17: mol_type = genomic RNA
aaaggtagaaaagacag

SEQ ID NO: 8870 - RNA, 17 nt, Homo sapiens
  source 1..17: mol_type = genomic RNA
aaggtagaaaagacaga

SEQ ID NO: 8871 - RNA, 17 nt, Homo sapiens
  source 1..17: mol_type = genomic RNA
aggtagaaaagacagat

SEQ ID NO: 8872 - RNA, 17 nt, Homo sapiens
  source 1..17: mol_type = genomic RNA
agtcatagctcagggtg

SEQ ID NO: 8873 - RNA, 17 nt, Homo sapiens
  source 1..17: mol_type = genomic RNA
gtcatagctcagggtgt

SEQ ID NO: 8874 - RNA, 17 nt, Homo sapiens
  source 1..17: mol_type = genomic RNA
tcatagctcagggtgtt

SEQ ID NO: 8875 - RNA, 17 nt, Homo sapiens
  source 1..17: mol_type = genomic RNA
catagctcagggtgttt

SEQ ID NO: 8876 - RNA, 17 nt, Homo sapiens
  source 1..17: mol_type = genomic RNA
atagctcagggtgtttg

SEQ ID NO: 8877 - RNA, 17 nt, Homo sapiens
  source 1..17: mol_type = genomic RNA
tagctcagggtgtttga

SEQ ID NO: 8878 - RNA, 17 nt, Homo sapiens
  source 1..17: mol_type = genomic RNA
agctcagggtgtttgac

SEQ ID NO: 8879 - RNA, 17 nt, Homo sapiens
  source 1..17: mol_type = genomic RNA
gctcagggtgtttgact

SEQ ID NO: 8880 - RNA, 17 nt, Homo sapiens
  source 1..17: mol_type = genomic RNA
ctcagggtgtttgactt

SEQ ID NO: 8881 - RNA, 17 nt, Homo sapiens
  source 1..17: mol_type = genomic RNA
tcagggtgtttgacttc

SEQ ID NO: 8882 - RNA, 17 nt, Homo sapiens
  source 1..17: mol_type = genomic RNA
cagggtgtttgacttct

SEQ ID NO: 8883 - RNA, 17 nt, Homo sapiens
  source 1..17: mol_type = genomic RNA
ttgcttttctgtggggt

SEQ ID NO: 8884 - RNA, 17 nt, Homo sapiens
  source 1..17: mol_type = genomic RNA
tgcttttctgtggggtt

SEQ ID NO: 8885 - RNA, 17 nt, Homo sapiens
  source 1..17: mol_type = genomic RNA
ttttgtcacagcagcct

SEQ ID NO: 8886 - RNA, 17 nt, Homo sapiens
  source 1..17: mol_type = genomic RNA
tttgtcacagcagcctt

SEQ ID NO: 8887 - RNA, 17 nt, Homo sapiens
  source 1..17: mol_type = genomic RNA
ttgtcacagcagccttt

SEQ ID NO: 8888 - RNA, 17 nt, Homo sapiens
  source 1..17: mol_type = genomic RNA
tgtcacagcagcctttg

SEQ ID NO: 8889 - RNA, 17 nt, Homo sapiens
  source 1..17: mol_type = genomic RNA
gtcacagcagcctttgt

SEQ ID NO: 8890 - RNA, 17 nt, Homo sapiens
  source 1..17: mol_type = genomic RNA
tcacagcagcctttgtc

SEQ ID NO: 8891 - RNA, 17 nt, Homo sapiens
  source 1..17: mol_type = genomic RNA
cacagcagcctttgtcg

SEQ ID NO: 8892 - RNA, 17 nt, Homo sapiens
  source 1..17: mol_type = genomic RNA
acagcagcctttgtcgc

SEQ ID NO: 8893 - RNA, 17 nt, Homo sapiens
  source 1..17: mol_type = genomic RNA
cagcagcctttgtcgct

SEQ ID NO: 8894 - RNA, 17 nt, Homo sapiens
  source 1..17: mol_type = genomic RNA
agcagcctttgtcgctt

SEQ ID NO: 8895 - RNA, 17 nt, Homo sapiens
  source 1..17: mol_type = genomic RNA
gcagcctttgtcgcttc

SEQ ID NO: 8896 - RNA, 17 nt, Homo sapiens
  source 1..17: mol_type = genomic RNA
ttgtcgcttcaaacacc

SEQ ID NO: 8897 - RNA, 17 nt, Homo sapiens
  source 1..17: mol_type = genomic RNA
tgtcgcttcaaacaccg

SEQ ID NO: 8898 - RNA, 17 nt, Homo sapiens
  source 1..17: mol_type = genomic RNA
gtcgcttcaaacaccgc

SEQ ID NO: 8899 - RNA, 17 nt, Homo sapiens
  source 1..17: mol_type = genomic RNA
tcgcttcaaacaccgca

SEQ ID NO: 8900 - RNA, 17 nt, Homo sapiens
  source 1..17: mol_type = genomic RNA
cgcttcaaacaccgcaa

SEQ ID NO: 8901 - RNA, 17 nt, Homo sapiens
  source 1..17: mol_type = genomic RNA
gcttcaaacaccgcaag

SEQ ID NO: 8902 - RNA, 17 nt, Homo sapiens
  source 1..17: mol_type = genomic RNA
cttcaaacaccgcaagt

SEQ ID NO: 8903 - RNA, 17 nt, Homo sapiens
  source 1..17: mol_type = genomic RNA
ttcaaacaccgcaagtg

SEQ ID NO: 8904 - RNA, 17 nt, Homo sapiens
  source 1..17: mol_type = genomic RNA
tcaaacaccgcaagtgt

SEQ ID NO: 8905 - RNA, 17 nt, Homo sapiens
  source 1..17: mol_type = genomic RNA
caaacaccgcaagtgtt

SEQ ID NO: 8906 - RNA, 17 nt, Homo sapiens
  source 1..17: mol_type = genomic RNA
aaacaccgcaagtgttc

SEQ ID NO: 8907 - RNA, 17 nt, Homo sapiens
  source 1..17: mol_type = genomic RNA
aacaccgcaagtgttct

SEQ ID NO: 8908 - RNA, 17 nt, Homo sapiens
  source 1..17: mol_type = genomic RNA
acaccgcaagtgttctt

SEQ ID NO: 8909 - RNA, 17 nt, Homo sapiens
  source 1..17: mol_type = genomic RNA
ttcaagtgaaatgcaac

SEQ ID NO: 8910 - RNA, 17 nt, Homo sapiens
  source 1..17: mol_type = genomic RNA
tcaagtgaaatgcaaca

SEQ ID NO: 8911 - RNA, 17 nt, Homo sapiens
  source 1..17: mol_type = genomic RNA
caagtgaaatgcaacat

SEQ ID NO: 8912 - RNA, 17 nt, Homo sapiens
  source 1..17: mol_type = genomic RNA
aagtgaaatgcaacatg

SEQ ID NO: 8913 - RNA, 17 nt, Homo sapiens
  source 1..17: mol_type = genomic RNA
agtgaaatgcaacatgt

SEQ ID NO: 8914 - RNA, 17 nt, Homo sapiens
  source 1..17: mol_type = genomic RNA
gtgaaatgcaacatgtc

SEQ ID NO: 8915 - RNA, 17 nt, Homo sapiens
  source 1..17: mol_type = genomic RNA
tgaaatgcaacatgtct

SEQ ID NO: 8916 - RNA, 17 nt, Homo sapiens
  source 1..17: mol_type = genomic RNA
gaaatgcaacatgtctg

SEQ ID NO: 8917 - RNA, 17 nt, Homo sapiens
  source 1..17: mol_type = genomic RNA
aaatgcaacatgtctga

SEQ ID NO: 8918 - RNA, 17 nt, Homo sapiens
  source 1..17: mol_type = genomic RNA
aatgcaacatgtctgaa

SEQ ID NO: 8919 - RNA, 17 nt, Homo sapiens
  source 1..17: mol_type = genomic RNA
atgcaacatgtctgaaa

SEQ ID NO: 8920 - RNA, 17 nt, Homo sapiens
  source 1..17: mol_type = genomic RNA
tgcaacatgtctgaaac

SEQ ID NO: 8921 - RNA, 17 nt, Homo sapiens
  source 1..17: mol_type = genomic RNA
gcaacatgtctgaaacg

SEQ ID NO: 8922 - RNA, 17 nt, Homo sapiens
  source 1..17: mol_type = genomic RNA
caacatgtctgaaacgt

SEQ ID NO: 8923 - RNA, 17 nt, Homo sapiens
  source 1..17: mol_type = genomic RNA
aacatgtctgaaacgtg

SEQ ID NO: 8924 - RNA, 17 nt, Homo sapiens
  source 1..17: mol_type = genomic RNA
acatgtctgaaacgtgg

SEQ ID NO: 8925 - RNA, 17 nt, Homo sapiens
  source 1..17: mol_type = genomic RNA
catgtctgaaacgtggt

SEQ ID NO: 8926 - RNA, 17 nt, Homo sapiens
  source 1..17: mol_type = genomic RNA
atgtctgaaacgtggta

SEQ ID NO: 8927 - RNA, 17 nt, Homo sapiens
  source 1..17: mol_type = genomic RNA
tgtctgaaacgtggtat

SEQ ID NO: 8928 - RNA, 17 nt, Homo sapiens
  source 1..17: mol_type = genomic RNA
gtctgaaacgtggtatc

SEQ ID NO: 8929 - RNA, 17 nt, Homo sapiens
  source 1..17: mol_type = genomic RNA
tctgaaacgtggtatct

SEQ ID NO: 8930 - RNA, 17 nt, Homo sapiens
  source 1..17: mol_type = genomic RNA
ctgaaacgtggtatctg

SEQ ID NO: 8931 - RNA, 17 nt, Homo sapiens
  source 1..17: mol_type = genomic RNA
tgaaacgtggtatctgg

SEQ ID NO: 8932 - RNA, 17 nt, Homo sapiens
  source 1..17: mol_type = genomic RNA
gaaacgtggtatctgga

SEQ ID NO: 8933 - RNA, 17 nt, Homo sapiens
  source 1..17: mol_type = genomic RNA
aaacgtggtatctggag

SEQ ID NO: 8934 - RNA, 17 nt, Homo sapiens
  source 1..17: mol_type = genomic RNA
aacgtggtatctggaga

SEQ ID NO: 8935 - RNA, 17 nt, Homo sapiens
  source 1..17: mol_type = genomic RNA
acgtggtatctggagag

SEQ ID NO: 8936 - RNA, 17 nt, Homo sapiens
  source 1..17: mol_type = genomic RNA
cgtggtatctggagagg

SEQ ID NO: 8937 - RNA, 17 nt, Homo sapiens
  source 1..17: mol_type = genomic RNA
gtggtatctggagaggt

SEQ ID NO: 8938 - RNA, 17 nt, Homo sapiens
  source 1..17: mol_type = genomic RNA
tggtatctggagaggtg

SEQ ID NO: 8939 - RNA, 17 nt, Homo sapiens
  source 1..17: mol_type = genomic RNA
ggtatctggagaggtga

SEQ ID NO: 8940 - RNA, 17 nt, Homo sapiens
  source 1..17: mol_type = genomic RNA
gtatctggagaggtgag

SEQ ID NO: 8941 - RNA, 17 nt, Homo sapiens
  source 1..17: mol_type = genomic RNA
tatctggagaggtgaga

SEQ ID NO: 8942 - RNA, 17 nt, Homo sapiens
  source 1..17: mol_type = genomic RNA
atctggagaggtgagat

SEQ ID NO: 8943 - RNA, 17 nt, Homo sapiens
  source 1..17: mol_type = genomic RNA
tctggagaggtgagatg

SEQ ID NO: 8944 - RNA, 17 nt, Homo sapiens
  source 1..17: mol_type = genomic RNA
ctggagaggtgagatgg

SEQ ID NO: 8945 - RNA, 17 nt, Homo sapiens
  source 1..17: mol_type = genomic RNA
tggagaggtgagatgga

SEQ ID NO: 8946 - RNA, 17 nt, Homo sapiens
  source 1..17: mol_type = genomic RNA
gagaggtgagatggaca

SEQ ID NO: 8947 - RNA, 17 nt, Homo sapiens
  source 1..17: mol_type = genomic RNA
agaggtgagatggacaa

SEQ ID NO: 8948 - RNA, 17 nt, Homo sapiens
  source 1..17: mol_type = genomic RNA
gaggtgagatggacaaa

SEQ ID NO: 8949 - RNA, 17 nt, Homo sapiens
  source 1..17: mol_type = genomic RNA
aggtgagatggacaaag

SEQ ID NO: 8950 - RNA, 17 nt, Homo sapiens
  source 1..17: mol_type = genomic RNA
ggtgagatggacaaagg

SEQ ID NO: 8951 - RNA, 17 nt, Homo sapiens
  source 1..17: mol_type = genomic RNA
gtgagatggacaaagga

SEQ ID NO: 8952 - RNA, 17 nt, Homo sapiens
  source 1..17: mol_type = genomic RNA
tgagatggacaaaggag

SEQ ID NO: 8953 - RNA, 17 nt, Homo sapiens
  source 1..17: mol_type = genomic RNA
gagatggacaaaggagc

SEQ ID NO: 8954 - RNA, 17 nt, Homo sapiens
  source 1..17: mol_type = genomic RNA
agatggacaaaggagcc

SEQ ID NO: 8955 - RNA, 17 nt, Homo sapiens
  source 1..17: mol_type = genomic RNA
gatggacaaaggagccc

SEQ ID NO: 8956 - RNA, 17 nt, Homo sapiens
  source 1..17: mol_type = genomic RNA
atggacaaaggagccct

SEQ ID NO: 8957 - RNA, 17 nt, Homo sapiens
  source 1..17: mol_type = genomic RNA
tggacaaaggagccctt

SEQ ID NO: 8958 - RNA, 17 nt, Homo sapiens
  source 1..17: mol_type = genomic RNA
ggacaaaggagcccttg

SEQ ID NO: 8959 - RNA, 17 nt, Homo sapiens
  source 1..17: mol_type = genomic RNA
gacaaaggagcccttgt

SEQ ID NO: 8960 - RNA, 17 nt, Homo sapiens
  source 1..17: mol_type = genomic RNA
acaaaggagcccttgtt

SEQ ID NO: 8961 - RNA, 17 nt, Homo sapiens
  source 1..17: mol_type = genomic RNA
caaaggagcccttgtta

SEQ ID NO: 8962 - RNA, 17 nt, Homo sapiens
  source 1..17: mol_type = genomic RNA
aaaggagcccttgttac

SEQ ID NO: 8963 - RNA, 17 nt, Homo sapiens
  source 1..17: mol_type = genomic RNA
aaggagcccttgttact

SEQ ID NO: 8964 - RNA, 17 nt, Homo sapiens
  source 1..17: mol_type = genomic RNA
aggagcccttgttactg

SEQ ID NO: 8965 - RNA, 17 nt, Homo sapiens
  source 1..17: mol_type = genomic RNA
ggagcccttgttactgc

SEQ ID NO: 8966 - RNA, 17 nt, Homo sapiens
  source 1..17: mol_type = genomic RNA
gagcccttgttactgca

SEQ ID NO: 8967 - RNA, 17 nt, Homo sapiens
  source 1..17: mol_type = genomic RNA
agcccttgttactgcac

SEQ ID NO: 8968 - RNA, 17 nt, Homo sapiens
  source 1..17: mol_type = genomic RNA
gcccttgttactgcacg

SEQ ID NO: 8969 - RNA, 17 nt, Homo sapiens
  source 1..17: mol_type = genomic RNA
cccttgttactgcacgt

SEQ ID NO: 8970 - RNA, 17 nt, Homo sapiens
  source 1..17: mol_type = genomic RNA
tccaaacttcaccttgc

SEQ ID NO: 8971 - RNA, 17 nt, Homo sapiens
  source 1..17: mol_type = genomic RNA
ccaaacttcaccttgca

SEQ ID NO: 8972 - RNA, 17 nt, Homo sapiens
  source 1..17: mol_type = genomic RNA
caaacttcaccttgcac

SEQ ID NO: 8973 - RNA, 17 nt, Homo sapiens
  source 1..17: mol_type = genomic RNA
aaacttcaccttgcaca

SEQ ID NO: 8974 - RNA, 17 nt, Homo sapiens
  source 1..17: mol_type = genomic RNA
aacttcaccttgcacac

SEQ ID NO: 8975 - RNA, 17 nt, Homo sapiens
  source 1..17: mol_type = genomic RNA
acttcaccttgcacaca

SEQ ID NO: 8976 - RNA, 17 nt, Homo sapiens
  source 1..17: mol_type = genomic RNA
cttcaccttgcacacag

SEQ ID NO: 8977 - RNA, 17 nt, Homo sapiens
  source 1..17: mol_type = genomic RNA
ttcaccttgcacacagt

SEQ ID NO: 8978 - RNA, 17 nt, Homo sapiens
  source 1..17: mol_type = genomic RNA
tcaccttgcacacagta

SEQ ID NO: 8979 - RNA, 17 nt, Homo sapiens
  source 1..17: mol_type = genomic RNA
taacagacaatgcacaa

SEQ ID NO: 8980 - RNA, 17 nt, Homo sapiens
  source 1..17: mol_type = genomic RNA
aacagacaatgcacaaa

SEQ ID NO: 8981 - RNA, 17 nt, Homo sapiens
  source 1..17: mol_type = genomic RNA
acagacaatgcacaaat

SEQ ID NO: 8982 - RNA, 17 nt, Homo sapiens
  source 1..17: mol_type = genomic RNA
cagacaatgcacaaatc

SEQ ID NO: 8983 - RNA, 17 nt, Homo sapiens
  source 1..17: mol_type = genomic RNA
agacaatgcacaaatcc

SEQ ID NO: 8984 - RNA, 17 nt, Homo sapiens
  source 1..17: mol_type = genomic RNA
gacaatgcacaaatcca

SEQ ID NO: 8985 - RNA, 17 nt, Homo sapiens
  source 1..17: mol_type = genomic RNA
acaatgcacaaatccac

SEQ ID NO: 8986 - RNA, 17 nt, Homo sapiens
  source 1..17: mol_type = genomic RNA
caatgcacaaatccact

SEQ ID NO: 8987 - RNA, 17 nt, Homo sapiens
  source 1..17: mol_type = genomic RNA
aatgcacaaatccactt

SEQ ID NO: 8988 - RNA, 17 nt, Homo sapiens
  source 1..17: mol_type = genomic RNA
atgcacaaatccacttc

SEQ ID NO: 8989 - RNA, 17 nt, Homo sapiens
  source 1..17: mol_type = genomic RNA
tgcacaaatccacttcc

SEQ ID NO: 8990 - RNA, 17 nt, Homo sapiens
  source 1..17: mol_type = genomic RNA
gcacaaatccacttcct

SEQ ID NO: 8991 - RNA, 17 nt, Homo sapiens
  source 1..17: mol_type = genomic RNA
tccacttccttatggac

SEQ ID NO: 8992 - RNA, 17 nt, Homo sapiens
  source 1..17: mol_type = genomic RNA
ccacttccttatggacg

SEQ ID NO: 8993 - RNA, 17 nt, Homo sapiens
  source 1..17: mol_type = genomic RNA
cacttccttatggacgg

SEQ ID NO: 8994 - RNA, 17 nt, Homo sapiens
  source 1..17: mol_type = genomic RNA
acttccttatggacgga

SEQ ID NO: 8995 - RNA, 17 nt, Homo sapiens
  source 1..17: mol_type = genomic RNA
cttccttatggacggaa

SEQ ID NO: 8996 - RNA, 17 nt, Homo sapiens
  source 1..17: mol_type = genomic RNA
ttccttatggacggaaa

SEQ ID NO: 8997 - RNA, 17 nt, Homo sapiens
  source 1..17: mol_type = genomic RNA
tccttatggacggaaat

SEQ ID NO: 8998 - RNA, 17 nt, Homo sapiens
  source 1..17: mol_type = genomic RNA
ccttatggacggaaatt

SEQ ID NO: 8999 - RNA, 17 nt, Homo sapiens
  source 1..17: mol_type = genomic RNA
tatggacggaaattctg

SEQ ID NO: 9000 - RNA, 17 nt, Homo sapiens
  source 1..17: mol_type = genomic RNA
atggacggaaattctga

SEQ ID NO: 9001 - RNA, 17 nt, Homo sapiens
  source 1..17: mol_type = genomic RNA
tggacggaaattctgaa

SEQ ID NO: 9002 - RNA, 17 nt, Homo sapiens
  source 1..17: mol_type = genomic RNA
ggacggaaattctgaaa

SEQ ID NO: 9003 - RNA, 17 nt, Homo sapiens
  source 1..17: mol_type = genomic RNA
atccttttatgcctggc

SEQ ID NO: 9004 - RNA, 17 nt, Homo sapiens
  source 1..17: mol_type = genomic RNA
tccttttatgcctggcc

SEQ ID NO: 9005 - RNA, 17 nt, Homo sapiens
  source 1..17: mol_type = genomic RNA
ccttttatgcctggcct

SEQ ID NO: 9006 - RNA, 17 nt, Homo sapiens
  source 1..17: mol_type = genomic RNA
tttatgcctggcctttc

SEQ ID NO: 9007 - RNA, 17 nt, Homo sapiens
  source 1..17: mol_type = genomic RNA
ttatgcctggcctttcc

SEQ ID NO: 9008 - RNA, 17 nt, Homo sapiens
  source 1..17: mol_type = genomic RNA
tatgcctggcctttcca

SEQ ID NO: 9009 - RNA, 17 nt, Homo sapiens
  source 1..17: mol_type = genomic RNA
atgcctggcctttccat

SEQ ID NO: 9010 - RNA, 17 nt, Homo sapiens
  source 1..17: mol_type = genomic RNA
tgcctggcctttccatc

SEQ ID NO: 9011 - RNA, 17 nt, Homo sapiens
  source 1..17: mol_type = genomic RNA
gcctggcctttccatcc

SEQ ID NO: 9012 - RNA, 17 nt, Homo sapiens
  source 1..17: mol_type = genomic RNA
cctggcctttccatcct

SEQ ID NO: 9013 - RNA, 17 nt, Homo sapiens
  source 1..17: mol_type = genomic RNA
ctggcctttccatcctt

SEQ ID NO: 9014 - RNA, 17 nt, Homo sapiens
  source 1..17: mol_type = genomic RNA
tggcctttccatccttc

SEQ ID NO: 9015 - RNA, 17 nt, Homo sapiens
  source 1..17: mol_type = genomic RNA
ggcctttccatccttca

SEQ ID NO: 9016 - RNA, 17 nt, Homo sapiens
  source 1..17: mol_type = genomic RNA
ccatccttcaacttccc

SEQ ID NO: 9017 - RNA, 17 nt, Homo sapiens
  source 1..17: mol_type = genomic RNA
catccttcaacttcccc

SEQ ID NO: 9018 - RNA, 17 nt, Homo sapiens
  source 1..17: mol_type = genomic RNA
atccttcaacttcccct

SEQ ID NO: 9019 - RNA, 17 nt, Homo sapiens
  source 1..17: mol_type = genomic RNA
tcaacttcccctttccc

SEQ ID NO: 9020 - RNA, 17 nt, Homo sapiens
  source 1..17: mol_type = genomic RNA
caacttcccctttccca

SEQ ID NO: 9021 - RNA, 17 nt, Homo sapiens
  source 1..17: mol_type = genomic RNA
acttcccctttcccatg

SEQ ID NO: 9022 - RNA, 17 nt, Homo sapiens
  source 1..17: mol_type = genomic RNA
cttcccctttcccatgc

SEQ ID NO: 9023 - RNA, 17 nt, Homo sapiens
  source 1..17: mol_type = genomic RNA
ttcccctttcccatgct

SEQ ID NO: 9024 - RNA, 17 nt, Homo sapiens
  source 1..17: mol_type = genomic RNA
tcccctttcccatgctg

SEQ ID NO: 9025 - RNA, 17 nt, Homo sapiens
  source 1..17: mol_type = genomic RNA
cccctttcccatgctgt

SEQ ID NO: 9026 - RNA, 17 nt, Homo sapiens
  source 1..17: mol_type = genomic RNA
ccctttcccatgctgtg

SEQ ID NO: 9027 - RNA, 17 nt, Homo sapiens
  source 1..17: mol_type = genomic RNA
cctttcccatgctgtga

SEQ ID NO: 9028 - RNA, 17 nt, Homo sapiens
  source 1..17: mol_type = genomic RNA
ttcccatgctgtgaatg

SEQ ID NO: 9029 - RNA, 17 nt, Homo sapiens
  source 1..17: mol_type = genomic RNA
tcccatgctgtgaatga

SEQ ID NO: 9030 - RNA, 17 nt, Homo sapiens
  source 1..17: mol_type = genomic RNA
cccatgctgtgaatgat

SEQ ID NO: 9031 - RNA, 17 nt, Homo sapiens
  source 1..17: mol_type = genomic RNA
ttaatctcagtgacagg

SEQ ID NO: 9032 - RNA, 17 nt, Homo sapiens
  source 1..17: mol_type = genomic RNA
taatctcagtgacaggg

SEQ ID NO: 9033 - RNA, 17 nt, Homo sapiens
  source 1..17: mol_type = genomic RNA
aatctcagtgacagggg

SEQ ID NO: 9034 - RNA, 17 nt, Homo sapiens
  source 1..17: mol_type = genomic RNA
atctcagtgacagggga

SEQ ID NO: 9035 - RNA, 17 nt, Homo sapiens
  source 1..17: mol_type = genomic RNA
tctcagtgacaggggaa

SEQ ID NO: 9036 - RNA, 17 nt, Homo sapiens
  source 1..17: mol_type = genomic RNA
ctcagtgacaggggaac

SEQ ID NO: 9037 - RNA, 17 nt, Homo sapiens
  source 1..17: mol_type = genomic RNA
tcagtgacaggggaaca

SEQ ID NO: 9038 - RNA, 17 nt, Homo sapiens
  source 1..17: mol_type = genomic RNA
cagtgacaggggaacac

SEQ ID NO: 9039 - RNA, 17 nt, Homo sapiens
  source 1..17: mol_type = genomic RNA
agtgacaggggaacaca

SEQ ID NO: 9040 - RNA, 17 nt, Homo sapiens
  source 1..17: mol_type = genomic RNA
gtgacaggggaacacag

SEQ ID NO: 9041 - RNA, 17 nt, Homo sapiens
  source 1..17: mol_type = genomic RNA
acaggggaacacaggta

SEQ ID NO: 9042 - RNA, 17 nt, Homo sapiens
  source 1..17: mol_type = genomic RNA
caggggaacacaggtag

SEQ ID NO: 9043 - RNA, 17 nt, Homo sapiens
  source 1..17: mol_type = genomic RNA
gggaacacaggtagctc

SEQ ID NO: 9044 - RNA, 17 nt, Homo sapiens
  source 1..17: mol_type = genomic RNA
ggaacacaggtagctct

SEQ ID NO: 9045 - RNA, 17 nt, Homo sapiens
  source 1..17: mol_type = genomic RNA
gaacacaggtagctcta

SEQ ID NO: 9046 - RNA, 17 nt, Homo sapiens
  source 1..17: mol_type = genomic RNA
aacacaggtagctctaa

SEQ ID NO: 9047 - RNA, 17 nt, Homo sapiens
  source 1..17: mol_type = genomic RNA
acacaggtagctctaat

SEQ ID NO: 9048 - RNA, 17 nt, Homo sapiens
  source 1..17: mol_type = genomic RNA
cacaggtagctctaata

SEQ ID NO: 9049 - RNA, 17 nt, Homo sapiens
  source 1..17: mol_type = genomic RNA
acaggtagctctaatat

SEQ ID NO: 9050 - RNA, 17 nt, Homo sapiens
  source 1..17: mol_type = genomic RNA
aggtagctctaatatag

SEQ ID NO: 9051 - RNA, 17 nt, Homo sapiens
  source 1..17: mol_type = genomic RNA
ggtagctctaatatagc

SEQ ID NO: 9052 - RNA, 17 nt, Homo sapiens
  source 1..17: mol_type = genomic RNA
agctctaatatagctgt

SEQ ID NO: 9053 - RNA, 17 nt, Homo sapiens
  source 1..17: mol_type = genomic RNA
aatatagctgtgactga

SEQ ID NO: 9054 - RNA, 17 nt, Homo sapiens
  source 1..17: mol_type = genomic RNA
atatagctgtgactgag

SEQ ID NO: 9055 - RNA, 17 nt, Homo sapiens
  source 1..17: mol_type = genomic RNA
tatagctgtgactgaga

SEQ ID NO: 9056 - RNA, 17 nt, Homo sapiens
  source 1..17: mol_type = genomic RNA
ttccactgcattctagg

SEQ ID NO: 9057 - RNA, 17 nt, Homo sapiens
  source 1..17: mol_type = genomic RNA
tccactgcattctagga

SEQ ID NO: 9058 - RNA, 17 nt, Homo sapiens
  source 1..17: mol_type = genomic RNA
ccactgcattctaggaa

SEQ ID NO: 9059 - RNA, 17 nt, Homo sapiens
  source 1..17: mol_type = genomic RNA
cactgcattctaggaac

SEQ ID NO: 9060 - RNA, 17 nt, Homo sapiens
  source 1..17: mol_type = genomic RNA
actgcattctaggaaca

SEQ ID NO: 9061 - RNA, 17 nt, Homo sapiens
  source 1..17: mol_type = genomic RNA
ctgcattctaggaacag

SEQ ID NO: 9062 - RNA, 17 nt, Homo sapiens
  source 1..17: mol_type = genomic RNA
tgcattctaggaacagt

SEQ ID NO: 9063 - RNA, 17 nt, Homo sapiens
  source 1..17: mol_type = genomic RNA
gcattctaggaacagta

SEQ ID NO: 9064 - RNA, 17 nt, Homo sapiens
  source 1..17: mol_type = genomic RNA
ttctaggaacagtaaga

SEQ ID NO: 9065 - RNA, 17 nt, Homo sapiens
  source 1..17: mol_type = genomic RNA
tctaggaacagtaagag

SEQ ID NO: 9066 - RNA, 17 nt, Homo sapiens
  source 1..17: mol_type = genomic RNA
ctaggaacagtaagagg

SEQ ID NO: 9067 - RNA, 17 nt, Homo sapiens
  source 1..17: mol_type = genomic RNA
taggaacagtaagagga

SEQ ID NO: 9068 - RNA, 17 nt, Homo sapiens
  source 1..17: mol_type = genomic RNA
aggaacagtaagaggac

SEQ ID NO: 9069 - RNA, 17 nt, Homo sapiens
  source 1..17: mol_type = genomic RNA
ggaacagtaagaggacc

SEQ ID NO: 9070 - RNA, 17 nt, Homo sapiens
  source 1..17: mol_type = genomic RNA
gaacagtaagaggacct

SEQ ID NO: 9071 - RNA, 17 nt, Homo sapiens
  source 1..17: mol_type = genomic RNA
aacagtaagaggacctt

SEQ ID NO: 9072 - RNA, 17 nt, Homo sapiens
  source 1..17: mol_type = genomic RNA
acagtaagaggaccttg

SEQ ID NO: 9073 - RNA, 17 nt, Homo sapiens
  source 1..17: mol_type = genomic RNA
cagtaagaggaccttgt

SEQ ID NO: 9074 - RNA, 17 nt, Homo sapiens
  source 1..17: mol_type = genomic RNA
agtaagaggaccttgtg

SEQ ID NO: 9075 - RNA, 17 nt, Homo sapiens
  source 1..17: mol_type = genomic RNA
gtaagaggaccttgtga

SEQ ID NO: 9076 - RNA, 17 nt, Homo sapiens
  source 1..17: mol_type = genomic RNA
taagaggaccttgtgag

SEQ ID NO: 9077 - RNA, 17 nt, Homo sapiens
  source 1..17: mol_type = genomic RNA
aagaggaccttgtgagt

SEQ ID NO: 9078 - RNA, 17 nt, Homo sapiens
  source 1..17: mol_type = genomic RNA
agaggaccttgtgagtg

SEQ ID NO: 9079 - RNA, 17 nt, Homo sapiens
  source 1..17: mol_type = genomic RNA
gaggaccttgtgagtga

SEQ ID NO: 9080 - RNA, 17 nt, Homo sapiens
  source 1..17: mol_type = genomic RNA
aggaccttgtgagtgaa

SEQ ID NO: 9081 - RNA, 17 nt, Homo sapiens
  source 1..17: mol_type = genomic RNA
ggaccttgtgagtgaat

SEQ ID NO: 9082 - RNA, 17 nt, Homo sapiens
  source 1..17: mol_type = genomic RNA
gaccttgtgagtgaata

SEQ ID NO: 9083 - RNA, 17 nt, Homo sapiens
  source 1..17: mol_type = genomic RNA
tccacattacagagtgg

SEQ ID NO: 9084 - RNA, 17 nt, Homo sapiens
  source 1..17: mol_type = genomic RNA
ccacattacagagtggg

SEQ ID NO: 9085 - RNA, 17 nt, Homo sapiens
  source 1..17: mol_type = genomic RNA
cacattacagagtgggt

SEQ ID NO: 9086 - RNA, 17 nt, Homo sapiens
  source 1..17: mol_type = genomic RNA
acattacagagtgggta

SEQ ID NO: 9087 - RNA, 17 nt, Homo sapiens
  source 1..17: mol_type = genomic RNA
cattacagagtgggtaa

SEQ ID NO: 9088 - RNA, 17 nt, Homo sapiens
  source 1..17: mol_type = genomic RNA
attacagagtgggtaat

SEQ ID NO: 9089 - RNA, 17 nt, Homo sapiens
  source 1..17: mol_type = genomic RNA
ttacagagtgggtaata

SEQ ID NO: 9090 - RNA, 17 nt, Homo sapiens
  source 1..17: mol_type = genomic RNA
tacagagtgggtaataa

SEQ ID NO: 9091 - RNA, 17 nt, Homo sapiens
  source 1..17: mol_type = genomic RNA
acagagtgggtaataag

SEQ ID NO: 9092 - RNA, 17 nt, Homo sapiens
  source 1..17: mol_type = genomic RNA
cagagtgggtaataagc

SEQ ID NO: 9093 - RNA, 17 nt, Homo sapiens
  source 1..17: mol_type = genomic RNA
agagtgggtaataagca

SEQ ID NO: 9094 - RNA, 17 nt, Homo sapiens
  source 1..17: mol_type = genomic RNA
gagtgggtaataagcag

SEQ ID NO: 9095 - RNA, 17 nt, Homo sapiens
  source 1..17: mol_type = genomic RNA
agtgggtaataagcaga

SEQ ID NO: 9096 - RNA, 17 nt, Homo sapiens
  source 1..17: mol_type = genomic RNA
gtgggtaataagcagat

SEQ ID NO: 9097 - RNA, 17 nt, Homo sapiens
  source 1..17: mol_type = genomic RNA
tgggtaataagcagatt

SEQ ID NO: 9098 - RNA, 17 nt, Homo sapiens
  source 1..17: mol_type = genomic RNA
gggtaataagcagatta

SEQ ID NO: 9099 - RNA, 18 nt, Homo sapiens
  source 1..18: mol_type = genomic RNA
cctctctctgcccgcgtc

SEQ ID NO: 9100 - RNA, 18 nt, Homo sapiens
  source 1..18: mol_type = genomic RNA
ctctctctgcccgcgtcc

SEQ ID NO: 9101 - RNA, 18 nt, Homo sapiens
  source 1..18: mol_type = genomic RNA
tctctctgcccgcgtccg

SEQ ID NO: 9102 - RNA, 18 nt, Homo sapiens
  source 1..18: mol_type = genomic RNA
ctctctgcccgcgtccgt

SEQ ID NO: 9103 - RNA, 18 nt, Homo sapiens
  source 1..18: mol_type = genomic RNA
tctctgcccgcgtccgtc

SEQ ID NO: 9104 - RNA, 18 nt, Homo sapiens
  source 1..18: mol_type = genomic RNA
ctctgcccgcgtccgtcc

SEQ ID NO: 9105 - RNA, 18 nt, Homo sapiens
  source 1..18: mol_type = genomic RNA
tctgcccgcgtccgtccg

SEQ ID NO: 9106 - RNA, 18 nt, Homo sapiens
  source 1..18: mol_type = genomic RNA
ctgcccgcgtccgtccgt

SEQ ID NO: 9107 - RNA, 18 nt, Homo sapiens
  source 1..18: mol_type = genomic RNA
tgcccgcgtccgtccgtg

SEQ ID NO: 9108 - RNA, 18 nt, Homo sapiens
  source 1..18: mol_type = genomic RNA
gcccgcgtccgtccgtga

SEQ ID NO: 9109 - RNA, 18 nt, Homo sapiens
  source 1..18: mol_type = genomic RNA
cccgcgtccgtccgtgaa

SEQ ID NO: 9110 - RNA, 18 nt, Homo sapiens
  source 1..18: mol_type = genomic RNA
ccgcgtccgtccgtgaaa

SEQ ID NO: 9111 - RNA, 18 nt, Homo sapiens
  source 1..18: mol_type = genomic RNA
cgcgtccgtccgtgaaat

SEQ ID NO: 9112 - RNA, 18 nt, Homo sapiens
  source 1..18: mol_type = genomic RNA
gcgtccgtccgtgaaatt

SEQ ID NO: 9113 - RNA, 18 nt, Homo sapiens
  source 1..18: mol_type = genomic RNA
cgtccgtccgtgaaattc

SEQ ID NO: 9114 - RNA, 18 nt, Homo sapiens
  source 1..18: mol_type = genomic RNA
gtccgtccgtgaaattcc

SEQ ID NO: 9115 - RNA, 18 nt, Homo sapiens
  source 1..18: mol_type = genomic RNA
tccgtccgtgaaattccg

SEQ ID NO: 9116 - RNA, 18 nt, Homo sapiens
  source 1..18: mol_type = genomic RNA
ccgtccgtgaaattccgg

SEQ ID NO: 9117 - RNA, 18 nt, Homo sapiens
  source 1..18: mol_type = genomic RNA
cgtccgtgaaattccggc

SEQ ID NO: 9118 - RNA, 18 nt, Homo sapiens
  source 1..18: mol_type = genomic RNA
gtccgtgaaattccggcc

SEQ ID NO: 9119 - RNA, 18 nt, Homo sapiens
  source 1..18: mol_type = genomic RNA
tccgtgaaattccggccg

SEQ ID NO: 9120 - RNA, 18 nt, Homo sapiens
  source 1..18: mol_type = genomic RNA
ccgtgaaattccggccgg

SEQ ID NO: 9121 - RNA, 18 nt, Homo sapiens
  source 1..18: mol_type = genomic RNA
cgtgaaattccggccggg

SEQ ID NO: 9122 - RNA, 18 nt, Homo sapiens
  source 1..18: mol_type = genomic RNA
gtgaaattccggccgggg

SEQ ID NO: 9123 - RNA, 18 nt, Homo sapiens
  source 1..18: mol_type = genomic RNA
gaaattccggccggggct

SEQ ID NO: 9124 - RNA, 18 nt, Homo sapiens
  source 1..18: mol_type = genomic RNA
aaattccggccggggctc

SEQ ID NO: 9125 - RNA, 18 nt, Homo sapiens
  source 1..18: mol_type = genomic RNA
aattccggccggggctca

SEQ ID NO: 9126 - RNA, 18 nt, Homo sapiens
  source 1..18: mol_type = genomic RNA
ctcaccgcgatggccctc

SEQ ID NO: 9127 - RNA, 18 nt, Homo sapiens
  source 1..18: mol_type = genomic RNA
cctcccgacaccctcgga

SEQ ID NO: 9128 - RNA, 18 nt, Homo sapiens
  source 1..18: mol_type = genomic RNA
ctcccgacaccctcggac

SEQ ID NO: 9129 - RNA, 18 nt, Homo sapiens
  source 1..18: mol_type = genomic RNA
tcccgacaccctcggaca

SEQ ID NO: 9130 - RNA, 18 nt, Homo sapiens
  source 1..18: mol_type = genomic RNA
cccgacaccctcggacag

SEQ ID NO: 9131 - RNA, 18 nt, Homo sapiens
  source 1..18: mol_type = genomic RNA
cgacaccctcggacagca

SEQ ID NO: 9132 - RNA, 18 nt, Homo sapiens
  source 1..18: mol_type = genomic RNA
acggcgacggagactcgt

SEQ ID NO: 9133 - RNA, 18 nt, Homo sapiens
  source 1..18: mol_type = genomic RNA
cggcgacggagactcgtt

SEQ ID NO: 9134 - RNA, 18 nt, Homo sapiens
  source 1..18: mol_type = genomic RNA
ggcgacggagactcgttt

SEQ ID NO: 9135 - RNA, 18 nt, Homo sapiens
  source 1..18: mol_type = genomic RNA
gcgacggagactcgtttg

SEQ ID NO: 9136 - RNA, 18 nt, Homo sapiens
  source 1..18: mol_type = genomic RNA
cgacggagactcgtttgg

SEQ ID NO: 9137 - RNA, 18 nt, Homo sapiens
  source 1..18: mol_type = genomic RNA
gacggagactcgtttgga

SEQ ID NO: 9138 - RNA, 18 nt, Homo sapiens
  source 1..18: mol_type = genomic RNA
gccctgcgagcctgcttt

SEQ ID NO: 9139 - RNA, 18 nt, Homo sapiens
  source 1..18: mol_type = genomic RNA
ccctgcgagcctgctttg

SEQ ID NO: 9140 - RNA, 18 nt, Homo sapiens
  source 1..18: mol_type = genomic RNA
cctgcgagcctgctttga

SEQ ID NO: 9141 - RNA, 18 nt, Homo sapiens
  source 1..18: mol_type = genomic RNA
ctgcgagcctgctttgag

SEQ ID NO: 9142 - RNA, 18 nt, Homo sapiens
  source 1..18: mol_type = genomic RNA
tgcgagcctgctttgagc

SEQ ID NO: 9143 - RNA, 18 nt, Homo sapiens
  source 1..18: mol_type = genomic RNA
gcgagcctgctttgagcg

SEQ ID NO: 9144 - RNA, 18 nt, Homo sapiens
  source 1..18: mol_type = genomic RNA
cgagcctgctttgagcgg

SEQ ID NO: 9145 - RNA, 18 nt, Homo sapiens
  source 1..18: mol_type = genomic RNA
gagcctgctttgagcgga

SEQ ID NO: 9146 - RNA, 18 nt, Homo sapiens
  source 1..18: mol_type = genomic RNA
agcctgctttgagcggaa

SEQ ID NO: 9147 - RNA, 18 nt, Homo sapiens
  source 1..18: mol_type = genomic RNA
gcctgctttgagcggaac

SEQ ID NO: 9148 - RNA, 18 nt, Homo sapiens
  source 1..18: mol_type = genomic RNA
cctgctttgagcggaacc

SEQ ID NO: 9149 - RNA, 18 nt, Homo sapiens
  source 1..18: mol_type = genomic RNA
ctgctttgagcggaaccc

SEQ ID NO: 9150 - RNA, 18 nt, Homo sapiens
  source 1..18: mol_type = genomic RNA
tgctttgagcggaacccg

SEQ ID NO: 9151 - RNA, 18 nt, Homo sapiens
  source 1..18: mol_type = genomic RNA
gctttgagcggaacccgt

SEQ ID NO: 9152 - RNA, 18 nt, Homo sapiens
  source 1..18: mol_type = genomic RNA
ctttgagcggaacccgta

SEQ ID NO: 9153 - RNA, 18 nt, Homo sapiens
  source 1..18: mol_type = genomic RNA
tttgagcggaacccgtac

SEQ ID NO: 9154 - RNA, 18 nt, Homo sapiens
  source 1..18: mol_type = genomic RNA
ttgagcggaacccgtacc

SEQ ID NO: 9155 - RNA, 18 nt, Homo sapiens
  source 1..18: mol_type = genomic RNA
gagcggaacccgtacccg

SEQ ID NO: 9156 - RNA, 18 nt, Homo sapiens
  source 1..18: mol_type = genomic RNA
gaacccgtacccgggcat

SEQ ID NO: 9157 - RNA, 18 nt, Homo sapiens
  source 1..18: mol_type = genomic RNA
aacccgtacccgggcatc

SEQ ID NO: 9158 - RNA, 18 nt, Homo sapiens
  source 1..18: mol_type = genomic RNA
acccgtacccgggcatcg

SEQ ID NO: 9159 - RNA, 18 nt, Homo sapiens
  source 1..18: mol_type = genomic RNA
cgtacccgggcatcgcca

SEQ ID NO: 9160 - RNA, 18 nt, Homo sapiens
  source 1..18: mol_type = genomic RNA
gcccaggccatcggcatt

SEQ ID NO: 9161 - RNA, 18 nt, Homo sapiens
  source 1..18: mol_type = genomic RNA
cccaggccatcggcattc

SEQ ID NO: 9162 - RNA, 18 nt, Homo sapiens
  source 1..18: mol_type = genomic RNA
ccaggccatcggcattcc

SEQ ID NO: 9163 - RNA, 18 nt, Homo sapiens
  source 1..18: mol_type = genomic RNA
gagcccagggtccagatt

SEQ ID NO: 9164 - RNA, 18 nt, Homo sapiens
  source 1..18: mol_type = genomic RNA
agcccagggtccagattt

SEQ ID NO: 9165 - RNA, 18 nt, Homo sapiens
  source 1..18: mol_type = genomic RNA
gcccagggtccagatttg

SEQ ID NO: 9166 - RNA, 18 nt, Homo sapiens
  source 1..18: mol_type = genomic RNA
cccagggtccagatttgg

SEQ ID NO: 9167 - RNA, 18 nt, Homo sapiens
  source 1..18: mol_type = genomic RNA
ccagggtccagatttggt

SEQ ID NO: 9168 - RNA, 18 nt, Homo sapiens
  source 1..18: mol_type = genomic RNA
cagggtccagatttggtt

SEQ ID NO: 9169 - RNA, 18 nt, Homo sapiens
  source 1..18: mol_type = genomic RNA
agggtccagatttggttt

SEQ ID NO: 9170 - RNA, 18 nt, Homo sapiens
  source 1..18: mol_type = genomic RNA
gggtccagatttggtttc

SEQ ID NO: 9171 - RNA, 18 nt, Homo sapiens
  source 1..18: mol_type = genomic RNA
ttggtttcagaatgagag

SEQ ID NO: 9172 - RNA, 18 nt, Homo sapiens
  source 1..18: mol_type = genomic RNA
tggtttcagaatgagagg

SEQ ID NO: 9173 - RNA, 18 nt, Homo sapiens
  source 1..18: mol_type = genomic RNA
ggtttcagaatgagaggt

SEQ ID NO: 9174 - RNA, 18 nt, Homo sapiens
  source 1..18: mol_type = genomic RNA
gtttcagaatgagaggtc

SEQ ID NO: 9175 - RNA, 18 nt, Homo sapiens
  source 1..18: mol_type = genomic RNA
tttcagaatgagaggtca

SEQ ID NO: 9176 - RNA, 18 nt, Homo sapiens
  source 1..18: mol_type = genomic RNA
ttcagaatgagaggtcac

SEQ ID NO: 9177 - RNA, 18 nt, Homo sapiens
  source 1..18: mol_type = genomic RNA
tcagaatgagaggtcacg

SEQ ID NO: 9178 - RNA, 18 nt, Homo sapiens
  source 1..18: mol_type = genomic RNA
cagaatgagaggtcacgc

SEQ ID NO: 9179 - RNA, 18 nt, Homo sapiens
  source 1..18: mol_type = genomic RNA
agaatgagaggtcacgcc

SEQ ID NO: 9180 - RNA, 18 nt, Homo sapiens
  source 1..18: mol_type = genomic RNA
gaatgagaggtcacgcca

SEQ ID NO: 9181 - RNA, 18 nt, Homo sapiens
  source 1..18: mol_type = genomic RNA
aatgagaggtcacgccag

SEQ ID NO: 9182 - RNA, 18 nt, Homo sapiens
  source 1..18: mol_type = genomic RNA
atgagaggtcacgccagc

SEQ ID NO: 9183 - RNA, 18 nt, Homo sapiens
  source 1..18: mol_type = genomic RNA
tgagaggtcacgccagct

SEQ ID NO: 9184 - RNA, 18 nt, Homo sapiens
  source 1..18: mol_type = genomic RNA
gagaggtcacgccagctg

SEQ ID NO: 9185 - RNA, 18 nt, Homo sapiens
  source 1..18: mol_type = genomic RNA
agaggtcacgccagctga

SEQ ID NO: 9186 - RNA, 18 nt, Homo sapiens
  source 1..18: mol_type = genomic RNA
gaggtcacgccagctgag

SEQ ID NO: 9187 - RNA, 18 nt, Homo sapiens
  source 1..18: mol_type = genomic RNA
cctcccggagtccaggat

SEQ ID NO: 9188 - RNA, 18 nt, Homo sapiens
  source 1..18: mol_type = genomic RNA
ctcccggagtccaggatt

SEQ ID NO: 9189 - RNA, 18 nt, Homo sapiens
  source 1..18: mol_type = genomic RNA
tcccggagtccaggattc

SEQ ID NO: 9190 - RNA, 18 nt, Homo sapiens
  source 1..18: mol_type = genomic RNA
cccggagtccaggattca

SEQ ID NO: 9191 - RNA, 18 nt, Homo sapiens
  source 1..18: mol_type = genomic RNA
ccggagtccaggattcag

SEQ ID NO: 9192 - RNA, 18 nt, Homo sapiens
  source 1..18: mol_type = genomic RNA
cggagtccaggattcaga

SEQ ID NO: 9193 - RNA, 18 nt, Homo sapiens
  source 1..18: mol_type = genomic RNA
ggagtccaggattcagat

SEQ ID NO: 9194 - RNA, 18 nt, Homo sapiens
  source 1..18: mol_type = genomic RNA
gagtccaggattcagatc

SEQ ID NO: 9195 - RNA, 18 nt, Homo sapiens
  source 1..18: mol_type = genomic RNA
agtccaggattcagatct

SEQ ID NO: 9196 - RNA, 18 nt, Homo sapiens
  source 1..18: mol_type = genomic RNA
gtccaggattcagatctg

SEQ ID NO: 9197 - RNA, 18 nt, Homo sapiens
  source 1..18: mol_type = genomic RNA
tccaggattcagatctgg

SEQ ID NO: 9198 - RNA, 18 nt, Homo sapiens
  source 1..18: mol_type = genomic RNA
ccaggattcagatctggt

SEQ ID NO: 9199 - RNA, 18 nt, Homo sapiens
  source 1..18: mol_type = genomic RNA
caggattcagatctggtt

SEQ ID NO: 9200 - RNA, 18 nt, Homo sapiens
  source 1..18: mol_type = genomic RNA
aggattcagatctggttt

SEQ ID NO: 9201 - RNA, 18 nt, Homo sapiens
  source 1..18: mol_type = genomic RNA
ggattcagatctggtttc

SEQ ID NO: 9202 - RNA, 18 nt, Homo sapiens
  source 1..18: mol_type = genomic RNA
tcagatctggtttcagaa

SEQ ID NO: 9203 - RNA, 18 nt, Homo sapiens
  source 1..18: mol_type = genomic RNA
agatctggtttcagaatc

SEQ ID NO: 9204 - RNA, 18 nt, Homo sapiens
  source 1..18: mol_type = genomic RNA
ctggtttcagaatcgaag

SEQ ID NO: 9205 - RNA, 18 nt, Homo sapiens
  source 1..18: mol_type = genomic RNA
tggtttcagaatcgaagg

SEQ ID NO: 9206 - RNA, 18 nt, Homo sapiens
  source 1..18: mol_type = genomic RNA
ggtttcagaatcgaaggg

SEQ ID NO: 9207 - RNA, 18 nt, Homo sapiens
  source 1..18: mol_type = genomic RNA
gtttcagaatcgaagggc

SEQ ID NO: 9208 - RNA, 18 nt, Homo sapiens
  source 1..18: mol_type = genomic RNA
tttcagaatcgaagggcc

SEQ ID NO: 9209 - RNA, 18 nt, Homo sapiens
  source 1..18: mol_type = genomic RNA
ttcagaatcgaagggcca

SEQ ID NO: 9210 - RNA, 18 nt, Homo sapiens
  source 1..18: mol_type = genomic RNA
tcagaatcgaagggccag

SEQ ID NO: 9211 - RNA, 18 nt, Homo sapiens
  source 1..18: mol_type = genomic RNA
cagaatcgaagggccagg

SEQ ID NO: 9212 - RNA, 18 nt, Homo sapiens
  source 1..18: mol_type = genomic RNA
ggcagatgcaaggcatcc

SEQ ID NO: 9213 - RNA, 18 nt, Homo sapiens
  source 1..18: mol_type = genomic RNA
gcagatgcaaggcatccc

SEQ ID NO: 9214 - RNA, 18 nt, Homo sapiens
  source 1..18: mol_type = genomic RNA
cagatgcaaggcatcccg

SEQ ID NO: 9215 - RNA, 18 nt, Homo sapiens
  source 1..18: mol_type = genomic RNA
agatgcaaggcatcccgg

SEQ ID NO: 9216 - RNA, 18 nt, Homo sapiens
  source 1..18: mol_type = genomic RNA
atgcaaggcatcccggcg

SEQ ID NO: 9217 - RNA, 18 nt, Homo sapiens
  source 1..18: mol_type = genomic RNA
catcccggcgccctccca

SEQ ID NO: 9218 - RNA, 18 nt, Homo sapiens
  source 1..18: mol_type = genomic RNA
ctcgctggaagcacccct

SEQ ID NO: 9219 - RNA, 18 nt, Homo sapiens
  source 1..18: mol_type = genomic RNA
cgctggaagcacccctca

SEQ ID NO: 9220 - RNA, 18 nt, Homo sapiens
  source 1..18: mol_type = genomic RNA
gaagcacccctcagcgag

SEQ ID NO: 9221 - RNA, 18 nt, Homo sapiens
  source 1..18: mol_type = genomic RNA
cacccctcagcgaggaag

SEQ ID NO: 9222 - RNA, 18 nt, Homo sapiens
  source 1..18: mol_type = genomic RNA
cccctcagcgaggaagaa

SEQ ID NO: 9223 - RNA, 18 nt, Homo sapiens
  source 1..18: mol_type = genomic RNA
ccctcagcgaggaagaat

SEQ ID NO: 9224 - RNA, 18 nt, Homo sapiens
  source 1..18: mol_type = genomic RNA
cctcagcgaggaagaata

SEQ ID NO: 9225 - RNA, 18 nt, Homo sapiens
  source 1..18: mol_type = genomic RNA
ctcagcgaggaagaatac

SEQ ID NO: 9226 - RNA, 18 nt, Homo sapiens
  source 1..18: mol_type = genomic RNA
tcagcgaggaagaatacc

SEQ ID NO: 9227 - RNA, 18 nt, Homo sapiens
  source 1..18: mol_type = genomic RNA
cagcgaggaagaataccg

SEQ ID NO: 9228 - RNA, 18 nt, Homo sapiens
  source 1..18: mol_type = genomic RNA
agcgaggaagaataccgg

SEQ ID NO: 9229 - RNA, 18 nt, Homo sapiens
  source 1..18: mol_type = genomic RNA
gcgaggaagaataccggg

SEQ ID NO: 9230 - RNA, 18 nt, Homo sapiens
  source 1..18: mol_type = genomic RNA
cgaggaagaataccgggc

SEQ ID NO: 9231 - RNA, 18 nt, Homo sapiens
  source 1..18: mol_type = genomic RNA
gaggaagaataccgggct

SEQ ID NO: 9232 - RNA, 18 nt, Homo sapiens
  source 1..18: mol_type = genomic RNA
aggaagaataccgggctc

SEQ ID NO: 9233 - RNA, 18 nt, Homo sapiens
  source 1..18: mol_type = genomic RNA
ggaagaataccgggctct

SEQ ID NO: 9234 - RNA, 18 nt, Homo sapiens
  source 1..18: mol_type = genomic RNA
gaagaataccgggctctg

SEQ ID NO: 9235 - RNA, 18 nt, Homo sapiens
  source 1..18: mol_type = genomic RNA
aagaataccgggctctgc

SEQ ID NO: 9236 - RNA, 18 nt, Homo sapiens
  source 1..18: mol_type = genomic RNA
agaataccgggctctgct

SEQ ID NO: 9237 - RNA, 18 nt, Homo sapiens
  source 1..18: mol_type = genomic RNA
gaataccgggctctgctg

SEQ ID NO: 9238 - RNA, 18 nt, Homo sapiens
  source 1..18: mol_type = genomic RNA
aataccgggctctgctgg

SEQ ID NO: 9239 - RNA, 18 nt, Homo sapiens
  source 1..18: mol_type = genomic RNA
ataccgggctctgctgga

SEQ ID NO: 9240 - RNA, 18 nt, Homo sapiens
  source 1..18: mol_type = genomic RNA
gctctgctggaggagctt

SEQ ID NO: 9241 - RNA, 18 nt, Homo sapiens
  source 1..18: mol_type = genomic RNA
ctctgctggaggagcttt

SEQ ID NO: 9242 - RNA, 18 nt, Homo sapiens
  source 1..18: mol_type = genomic RNA
tctgctggaggagcttta

SEQ ID NO: 9243 - RNA, 18 nt, Homo sapiens
  source 1..18: mol_type = genomic RNA
ctgctggaggagctttag

SEQ ID NO: 9244 - RNA, 18 nt, Homo sapiens
  source 1..18: mol_type = genomic RNA
tgctggaggagctttagg

SEQ ID NO: 9245 - RNA, 18 nt, Homo sapiens
  source 1..18: mol_type = genomic RNA
gctggaggagctttagga

SEQ ID NO: 9246 - RNA, 18 nt, Homo sapiens
  source 1..18: mol_type = genomic RNA
ctggaggagctttaggac

SEQ ID NO: 9247 - RNA, 18 nt, Homo sapiens
  source 1..18: mol_type = genomic RNA
tggaggagctttaggacg

SEQ ID NO: 9248 - RNA, 18 nt, Homo sapiens
  source 1..18: mol_type = genomic RNA
ggaggagctttaggacgc

SEQ ID NO: 9249 - RNA, 18 nt, Homo sapiens
  source 1..18: mol_type = genomic RNA
gaggagctttaggacgcg

SEQ ID NO: 9250 - RNA, 18 nt, Homo sapiens
  source 1..18: mol_type = genomic RNA
aggagctttaggacgcgg

SEQ ID NO: 9251 - RNA, 18 nt, Homo sapiens
  source 1..18: mol_type = genomic RNA
ggagctttaggacgcggg

SEQ ID NO: 9252 - RNA, 18 nt, Homo sapiens
  source 1..18: mol_type = genomic RNA
gagctttaggacgcgggg

SEQ ID NO: 9253 - RNA, 18 nt, Homo sapiens
  source 1..18: mol_type = genomic RNA
agctttaggacgcggggt

SEQ ID NO: 9254 - RNA, 18 nt, Homo sapiens
  source 1..18: mol_type = genomic RNA
gctttaggacgcggggtt

SEQ ID NO: 9255 - RNA, 18 nt, Homo sapiens
  source 1..18: mol_type = genomic RNA
ctttaggacgcggggttg

SEQ ID NO: 9256 - RNA, 18 nt, Homo sapiens
  source 1..18: mol_type = genomic RNA
tttaggacgcggggttgg

SEQ ID NO: 9257 - RNA, 18 nt, Homo sapiens
  source 1..18: mol_type = genomic RNA
ttaggacgcggggttggg

SEQ ID NO: 9258 - RNA, 18 nt, Homo sapiens
  source 1..18: mol_type = genomic RNA
agggcggtggcctctctt

SEQ ID NO: 9259 - RNA, 18 nt, Homo sapiens
  source 1..18: mol_type = genomic RNA
gggcggtggcctctcttt

SEQ ID NO: 9260 - RNA, 18 nt, Homo sapiens
  source 1..18: mol_type = genomic RNA
ggcggtggcctctctttc

SEQ ID NO: 9261 - RNA, 18 nt, Homo sapiens
  source 1..18: mol_type = genomic RNA
gcggtggcctctctttcg

SEQ ID NO: 9262 - RNA, 18 nt, Homo sapiens
  source 1..18: mol_type = genomic RNA
cggtggcctctctttcgc

SEQ ID NO: 9263 - RNA, 18 nt, Homo sapiens
  source 1..18: mol_type = genomic RNA
ggtggcctctctttcgcg

SEQ ID NO: 9264 - RNA, 18 nt, Homo sapiens
  source 1..18: mol_type = genomic RNA
gtggcctctctttcgcgg

SEQ ID NO: 9265 - RNA, 18 nt, Homo sapiens
  source 1..18: mol_type = genomic RNA
tggcctctctttcgcggg

SEQ ID NO: 9266 - RNA, 18 nt, Homo sapiens
  source 1..18: mol_type = genomic RNA
ggcctctctttcgcgggg

SEQ ID NO: 9267 - RNA, 18 nt, Homo sapiens
  source 1..18: mol_type = genomic RNA
gcctctctttcgcgggga

SEQ ID NO: 9268 - RNA, 18 nt, Homo sapiens
  source 1..18: mol_type = genomic RNA
cctctctttcgcggggaa

SEQ ID NO: 9269 - RNA, 18 nt, Homo sapiens
  source 1..18: mol_type = genomic RNA
ctctctttcgcggggaac

SEQ ID NO: 9270 - RNA, 18 nt, Homo sapiens
  source 1..18: mol_type = genomic RNA
tctctttcgcggggaaca

SEQ ID NO: 9271 - RNA, 18 nt, Homo sapiens
  source 1..18: mol_type = genomic RNA
ctctttcgcggggaacac

SEQ ID NO: 9272 - RNA, 18 nt, Homo sapiens
  source 1..18: mol_type = genomic RNA
tctttcgcggggaacacc

SEQ ID NO: 9273 - RNA, 18 nt, Homo sapiens
  source 1..18: mol_type = genomic RNA
ctttcgcggggaacacct

SEQ ID NO: 9274 - RNA, 18 nt, Homo sapiens
  source 1..18: mol_type = genomic RNA
tttcgcggggaacacctg

SEQ ID NO: 9275 - RNA, 18 nt, Homo sapiens
  source 1..18: mol_type = genomic RNA
ttcgcggggaacacctgg

SEQ ID NO: 9276 - RNA, 18 nt, Homo sapiens
  source 1..18: mol_type = genomic RNA
ctacggaggggcgtgtct

SEQ ID NO: 9277 - RNA, 18 nt, Homo sapiens
  source 1..18: mol_type = genomic RNA
tacggaggggcgtgtctc

SEQ ID NO: 9278 - RNA, 18 nt, Homo sapiens
  source 1..18: mol_type = genomic RNA
cggaggggcgtgtctccg

SEQ ID NO: 9279 - RNA, 18 nt, Homo sapiens
  source 1..18: mol_type = genomic RNA
ctgaccggcctgggattc

SEQ ID NO: 9280 - RNA, 18 nt, Homo sapiens
  source 1..18: mol_type = genomic RNA
gaccggcctgggattcct

SEQ ID NO: 9281 - RNA, 18 nt, Homo sapiens
  source 1..18: mol_type = genomic RNA
accggcctgggattcctg

SEQ ID NO: 9282 - RNA, 18 nt, Homo sapiens
  source 1..18: mol_type = genomic RNA
gcctgggattcctgcctt

SEQ ID NO: 9283 - RNA, 18 nt, Homo sapiens
  source 1..18: mol_type = genomic RNA
cctgggattcctgccttc

SEQ ID NO: 9284 - RNA, 18 nt, Homo sapiens
  source 1..18: mol_type = genomic RNA
ctgggattcctgccttct

SEQ ID NO: 9285 - RNA, 18 nt, Homo sapiens
  source 1..18: mol_type = genomic RNA
tgggattcctgccttcta

SEQ ID NO: 9286 - RNA, 18 nt, Homo sapiens
  source 1..18: mol_type = genomic RNA
gggattcctgccttctag

SEQ ID NO: 9287 - RNA, 18 nt, Homo sapiens
  source 1..18: mol_type = genomic RNA
ggattcctgccttctagg

SEQ ID NO: 9288 - RNA, 18 nt, Homo sapiens
  source 1..18: mol_type = genomic RNA
gattcctgccttctaggt

SEQ ID NO: 9289 - RNA, 18 nt, Homo sapiens
  source 1..18: mol_type = genomic RNA
attcctgccttctaggtc

SEQ ID NO: 9290 - RNA, 18 nt, Homo sapiens
  source 1..18: mol_type = genomic RNA
ttcctgccttctaggtct

SEQ ID NO: 9291 - RNA, 18 nt, Homo sapiens
  source 1..18: mol_type = genomic RNA
cccggtgagagactccac

SEQ ID NO: 9292 - RNA, 18 nt, Homo sapiens
  source 1..18: mol_type = genomic RNA
ttctttcctgggcatccc

SEQ ID NO: 9293 - RNA, 18 nt, Homo sapiens
  source 1..18: mol_type = genomic RNA
tctttcctgggcatcccg

SEQ ID NO: 9294 - RNA, 18 nt, Homo sapiens
  source 1..18: mol_type = genomic RNA
ctttcctgggcatcccgg

SEQ ID NO: 9295 - RNA, 18 nt, Homo sapiens
  source 1..18: mol_type = genomic RNA
tttcctgggcatcccggg

SEQ ID NO: 9296 - RNA, 18 nt, Homo sapiens
  source 1..18: mol_type = genomic RNA
catcccggggatcccaga

SEQ ID NO: 9297 - RNA, 18 nt, Homo sapiens
  source 1..18: mol_type = genomic RNA
cctggcggtcaaaagcat

SEQ ID NO: 9298 - RNA, 18 nt, Homo sapiens
  source 1..18: mol_type = genomic RNA
ctggcggtcaaaagcata

SEQ ID NO: 9299 - RNA, 18 nt, Homo sapiens
  source 1..18: mol_type = genomic RNA
tggcggtcaaaagcatac

SEQ ID NO: 9300 - RNA, 18 nt, Homo sapiens
  source 1..18: mol_type = genomic RNA
ggcggtcaaaagcatacc

SEQ ID NO: 9301 - RNA, 18 nt, Homo sapiens
  source 1..18: mol_type = genomic RNA
gcggtcaaaagcatacct

SEQ ID NO: 9302 - RNA, 18 nt, Homo sapiens
  source 1..18: mol_type = genomic RNA
cggtcaaaagcatacctc

SEQ ID NO: 9303 - RNA, 18 nt, Homo sapiens
  source 1..18: mol_type = genomic RNA
ggtcaaaagcatacctct

SEQ ID NO: 9304 - RNA, 18 nt, Homo sapiens
  source 1..18: mol_type = genomic RNA
gtcaaaagcatacctctg

SEQ ID NO: 9305 - RNA, 18 nt, Homo sapiens
  source 1..18: mol_type = genomic RNA
tcaaaagcatacctctgt

SEQ ID NO: 9306 - RNA, 18 nt, Homo sapiens
  source 1..18: mol_type = genomic RNA
caaaagcatacctctgtc

SEQ ID NO: 9307 - RNA, 18 nt, Homo sapiens
  source 1..18: mol_type = genomic RNA
aaaagcatacctctgtct

SEQ ID NO: 9308 - RNA, 18 nt, Homo sapiens
  source 1..18: mol_type = genomic RNA
aaagcatacctctgtctg

SEQ ID NO: 9309 - RNA, 18 nt, Homo sapiens
  source 1..18: mol_type = genomic RNA
aagcatacctctgtctgt

SEQ ID NO: 9310 - RNA, 18 nt, Homo sapiens
  source 1..18: mol_type = genomic RNA
agcatacctctgtctgtc

SEQ ID NO: 9311 - RNA, 18 nt, Homo sapiens
  source 1..18: mol_type = genomic RNA
gcatacctctgtctgtct

SEQ ID NO: 9312 - RNA, 18 nt, Homo sapiens
  source 1..18: mol_type = genomic RNA
acctctgtctgtctttgc

SEQ ID NO: 9313 - RNA, 18 nt, Homo sapiens
  source 1..18: mol_type = genomic RNA
cctctgtctgtctttgcc

SEQ ID NO: 9314 - RNA, 18 nt, Homo sapiens
  source 1..18: mol_type = genomic RNA
ctctgtctgtctttgccc

SEQ ID NO: 9315 - RNA, 18 nt, Homo sapiens
  source 1..18: mol_type = genomic RNA
tctgtctgtctttgcccg

SEQ ID NO: 9316 - RNA, 18 nt, Homo sapiens
  source 1..18: mol_type = genomic RNA
ctgtctgtctttgcccgc

SEQ ID NO: 9317 - RNA, 18 nt, Homo sapiens
  source 1..18: mol_type = genomic RNA
tgtctgtctttgcccgct

SEQ ID NO: 9318 - RNA, 18 nt, Homo sapiens
  source 1..18: mol_type = genomic RNA
gtctgtctttgcccgctt

SEQ ID NO: 9319 - RNA, 18 nt, Homo sapiens
  source 1..18: mol_type = genomic RNA
tctgtctttgcccgcttc

SEQ ID NO: 9320 - RNA, 18 nt, Homo sapiens
  source 1..18: mol_type = genomic RNA
ctgtctttgcccgcttcc

SEQ ID NO: 9321 - RNA, 18 nt, Homo sapiens
  source 1..18: mol_type = genomic RNA
tgtctttgcccgcttcct

SEQ ID NO: 9322 - RNA, 18 nt, Homo sapiens
  source 1..18: mol_type = genomic RNA
gtctttgcccgcttcctg

SEQ ID NO: 9323 - RNA, 18 nt, Homo sapiens
  source 1..18: mol_type = genomic RNA
tctttgcccgcttcctgg

SEQ ID NO: 9324 - RNA, 18 nt, Homo sapiens
  source 1..18: mol_type = genomic RNA
ctttgcccgcttcctggc

SEQ ID NO: 9325 - RNA, 18 nt, Homo sapiens
  source 1..18: mol_type = genomic RNA
tttgcccgcttcctggct

SEQ ID NO: 9326 - RNA, 18 nt, Homo sapiens
  source 1..18: mol_type = genomic RNA
ttgcccgcttcctggcta

SEQ ID NO: 9327 - RNA, 18 nt, Homo sapiens
  source 1..18: mol_type = genomic RNA
tgcccgcttcctggctag

SEQ ID NO: 9328 - RNA, 18 nt, Homo sapiens
  source 1..18: mol_type = genomic RNA
gcccgcttcctggctaga

SEQ ID NO: 9329 - RNA, 18 nt, Homo sapiens
  source 1..18: mol_type = genomic RNA
cccgcttcctggctagac

SEQ ID NO: 9330 - RNA, 18 nt, Homo sapiens
  source 1..18: mol_type = genomic RNA
ccgcttcctggctagacc

SEQ ID NO: 9331 - RNA, 18 nt, Homo sapiens
  source 1..18: mol_type = genomic RNA
cgcttcctggctagacct

SEQ ID NO: 9332 - RNA, 18 nt, Homo sapiens
  source 1..18: mol_type = genomic RNA
gcttcctggctagacctg

SEQ ID NO: 9333 - RNA, 18 nt, Homo sapiens
  source 1..18: mol_type = genomic RNA
cttcctggctagacctgc

SEQ ID NO: 9334 - RNA, 18 nt, Homo sapiens
  source 1..18: mol_type = genomic RNA
ttcctggctagacctgcg

SEQ ID NO: 9335 - RNA, 18 nt, Homo sapiens
  source 1..18: mol_type = genomic RNA
ccccggctgacgtgcaag

SEQ ID NO: 9336 - RNA, 18 nt, Homo sapiens
  source 1..18: mol_type = genomic RNA
ctgacgtgcaagggagct

SEQ ID NO: 9337 - RNA, 18 nt, Homo sapiens
  source 1..18: mol_type = genomic RNA
gacgtgcaagggagctcg

SEQ ID NO: 9338 - RNA, 18 nt, Homo sapiens
  source 1..18: mol_type = genomic RNA
cgtgcaagggagctcgct

SEQ ID NO: 9339 - RNA, 18 nt, Homo sapiens
  source 1..18: mol_type = genomic RNA
gtgcaagggagctcgctg

SEQ ID NO: 9340 - RNA, 18 nt, Homo sapiens
  source 1..18: mol_type = genomic RNA
gagctcgctggcctctct

SEQ ID NO: 9341 - RNA, 18 nt, Homo sapiens
  source 1..18: mol_type = genomic RNA
agctcgctggcctctctg

SEQ ID NO: 9342 - RNA, 18 nt, Homo sapiens
  source 1..18: mol_type = genomic RNA
gctcgctggcctctctgt

SEQ ID NO: 9343 - RNA, 18 nt, Homo sapiens
  source 1..18: mol_type = genomic RNA
ctcgctggcctctctgtg

SEQ ID NO: 9344 - RNA, 18 nt, Homo sapiens
  source 1..18: mol_type = genomic RNA
tcgctggcctctctgtgc

SEQ ID NO: 9345 - RNA, 18 nt, Homo sapiens
  source 1..18: mol_type = genomic RNA
cgctggcctctctgtgcc

SEQ ID NO: 9346 - RNA, 18 nt, Homo sapiens
  source 1..18: mol_type = genomic RNA
ctggcctctctgtgccct

SEQ ID NO: 9347 - RNA, 18 nt, Homo sapiens
  source 1..18: mol_type = genomic RNA
tggcctctctgtgccctt

SEQ ID NO: 9348 - RNA, 18 nt, Homo sapiens
  source 1..18: mol_type = genomic RNA
ggcctctctgtgcccttg

SEQ ID NO: 9349 - RNA, 18 nt, Homo sapiens
  source 1..18: mol_type = genomic RNA
gcctctctgtgcccttgt

SEQ ID NO: 9350 - RNA, 18 nt, Homo sapiens
  source 1..18: mol_type = genomic RNA
cctctctgtgcccttgtt

SEQ ID NO: 9351 - RNA, 18 nt, Homo sapiens
  source 1..18: mol_type = genomic RNA
tccgtgaaattctggctg

SEQ ID NO: 9352 - RNA, 18 nt, Homo sapiens
  source 1..18: mol_type = genomic RNA
ccgtgaaattctggctga

SEQ ID NO: 9353 - RNA, 18 nt, Homo sapiens
  source 1..18: mol_type = genomic RNA
cgtgaaattctggctgaa

SEQ ID NO: 9354 - RNA, 18 nt, Homo sapiens
  source 1..18: mol_type = genomic RNA
gtgaaattctggctgaat

SEQ ID NO: 9355 - RNA, 18 nt, Homo sapiens
  source 1..18: mol_type = genomic RNA
tgaaattctggctgaatg

SEQ ID NO: 9356 - RNA, 18 nt, Homo sapiens
  source 1..18: mol_type = genomic RNA
gaaattctggctgaatgt

SEQ ID NO: 9357 - RNA, 18 nt, Homo sapiens
  source 1..18: mol_type = genomic RNA
aaattctggctgaatgtc

SEQ ID NO: 9358 - RNA, 18 nt, Homo sapiens
  source 1..18: mol_type = genomic RNA
aattctggctgaatgtct

SEQ ID NO: 9359 - RNA, 18 nt, Homo sapiens
  source 1..18: mol_type = genomic RNA
attctggctgaatgtctc

SEQ ID NO: 9360 - RNA, 18 nt, Homo sapiens
  source 1..18: mol_type = genomic RNA
ttctggctgaatgtctcc

SEQ ID NO: 9361 - RNA, 18 nt, Homo sapiens
  source 1..18: mol_type = genomic RNA
tctggctgaatgtctccc

SEQ ID NO: 9362 - RNA, 18 nt, Homo sapiens
  source 1..18: mol_type = genomic RNA
ctggctgaatgtctcccc

SEQ ID NO: 9363 - RNA, 18 nt, Homo sapiens
  source 1..18: mol_type = genomic RNA
tggctgaatgtctccccc

SEQ ID NO: 9364 - RNA, 18 nt, Homo sapiens
  source 1..18: mol_type = genomic RNA
ggctgaatgtctcccccc

SEQ ID NO: 9365 - RNA, 18 nt, Homo sapiens
  source 1..18: mol_type = genomic RNA
gctgaatgtctcccccca

SEQ ID NO: 9366 - RNA, 18 nt, Homo sapiens
  source 1..18: mol_type = genomic RNA
ctgaatgtctccccccac

SEQ ID NO: 9367 - RNA, 18 nt, Homo sapiens
  source 1..18: mol_type = genomic RNA
tgaatgtctccccccacc

SEQ ID NO: 9368 - RNA, 18 nt, Homo sapiens
  source 1..18: mol_type = genomic RNA
gaatgtctccccccacct

SEQ ID NO: 9369 - RNA, 18 nt, Homo sapiens
  source 1..18: mol_type = genomic RNA
aatgtctccccccacctt

SEQ ID NO: 9370 - RNA, 18 nt, Homo sapiens
  source 1..18: mol_type = genomic RNA
atgtctccccccaccttc

SEQ ID NO: 9371 - RNA, 18 nt, Homo sapiens
  source 1..18: mol_type = genomic RNA
tgtctccccccaccttcc

SEQ ID NO: 9372 - RNA, 18 nt, Homo sapiens
  source 1..18: mol_type = genomic RNA
gtctccccccaccttccg

SEQ ID NO: 9373 - RNA, 18 nt, Homo sapiens
  source 1..18: mol_type = genomic RNA
tctccccccaccttccga

SEQ ID NO: 9374 - RNA, 18 nt, Homo sapiens
  source 1..18: mol_type = genomic RNA
ctccccccaccttccgac

SEQ ID NO: 9375 - RNA, 18 nt, Homo sapiens
  source 1..18: mol_type = genomic RNA
tccccccaccttccgacg

SEQ ID NO: 9376 - RNA, 18 nt, Homo sapiens
  source 1..18: mol_type = genomic RNA
ccccccaccttccgacgc

SEQ ID NO: 9377 - RNA, 18 nt, Homo sapiens
  source 1..18: mol_type = genomic RNA
cccccaccttccgacgct

SEQ ID NO: 9378 - RNA, 18 nt, Homo sapiens
  source 1..18: mol_type = genomic RNA
ccccaccttccgacgctg

SEQ ID NO: 9379 - RNA, 18 nt, Homo sapiens
  source 1..18: mol_type = genomic RNA
cccaccttccgacgctgt

SEQ ID NO: 9380 - RNA, 18 nt, Homo sapiens
  source 1..18: mol_type = genomic RNA
ccaccttccgacgctgtc

SEQ ID NO: 9381 - RNA, 18 nt, Homo sapiens
  source 1..18: mol_type = genomic RNA
caccttccgacgctgtct

SEQ ID NO: 9382 - RNA, 18 nt, Homo sapiens
  source 1..18: mol_type = genomic RNA
accttccgacgctgtcta

SEQ ID NO: 9383 - RNA, 18 nt, Homo sapiens
  source 1..18: mol_type = genomic RNA
ccttccgacgctgtctag

SEQ ID NO: 9384 - RNA, 18 nt, Homo sapiens
  source 1..18: mol_type = genomic RNA
cttccgacgctgtctagg

SEQ ID NO: 9385 - RNA, 18 nt, Homo sapiens
  source 1..18: mol_type = genomic RNA
ttccgacgctgtctaggc

SEQ ID NO: 9386 - RNA, 18 nt, Homo sapiens
  source 1..18: mol_type = genomic RNA
tccgacgctgtctaggca

SEQ ID NO: 9387 - RNA, 18 nt, Homo sapiens
  source 1..18: mol_type = genomic RNA
ccgacgctgtctaggcaa

SEQ ID NO: 9388 - RNA, 18 nt, Homo sapiens
  source 1..18: mol_type = genomic RNA
cgacgctgtctaggcaaa

SEQ ID NO: 9389 - RNA, 18 nt, Homo sapiens
  source 1..18: mol_type = genomic RNA
gacgctgtctaggcaaac

SEQ ID NO: 9390 - RNA, 18 nt, Homo sapiens
  source 1..18: mol_type = genomic RNA
acgctgtctaggcaaacc

SEQ ID NO: 9391 - RNA, 18 nt, Homo sapiens
  source 1..18: mol_type = genomic RNA
cgctgtctaggcaaacct

SEQ ID NO: 9392 - RNA, 18 nt, Homo sapiens
  source 1..18: mol_type = genomic RNA
gctgtctaggcaaacctg

SEQ ID NO: 9393 - RNA, 18 nt, Homo sapiens
  source 1..18: mol_type = genomic RNA
ctgtctaggcaaacctgg

SEQ ID NO: 9394 - RNA, 18 nt, Homo sapiens
  source 1..18: mol_type = genomic RNA
tgtctaggcaaacctgga

SEQ ID NO: 9395 - RNA, 18 nt, Homo sapiens
  source 1..18: mol_type = genomic RNA
gtctaggcaaacctggat

SEQ ID NO: 9396 - RNA, 18 nt, Homo sapiens
  source 1..18: mol_type = genomic RNA
tctaggcaaacctggatt

SEQ ID NO: 9397 - RNA, 18 nt, Homo sapiens
  source 1..18: mol_type = genomic RNA
ctaggcaaacctggatta

SEQ ID NO: 9398 - RNA, 18 nt, Homo sapiens
  source 1..18: mol_type = genomic RNA
taggcaaacctggattag

SEQ ID NO: 9399 - RNA, 18 nt, Homo sapiens
  source 1..18: mol_type = genomic RNA
aggcaaacctggattaga

SEQ ID NO: 9400 - RNA, 18 nt, Homo sapiens
  source 1..18: mol_type = genomic RNA
ggcaaacctggattagag

SEQ ID NO: 9401 - RNA, 18 nt, Homo sapiens
  source 1..18: mol_type = genomic RNA
gcaaacctggattagagt

SEQ ID NO: 9402 - RNA, 18 nt, Homo sapiens
  source 1..18: mol_type = genomic RNA
caaacctggattagagtt

SEQ ID NO: 9403 - RNA, 18 nt, Homo sapiens
  source 1..18: mol_type = genomic RNA
aaacctggattagagtta

SEQ ID NO: 9404 - RNA, 18 nt, Homo sapiens
  source 1..18: mol_type = genomic RNA
aacctggattagagttac

SEQ ID NO: 9405 - RNA, 18 nt, Homo sapiens
  source 1..18: mol_type = genomic RNA
acctggattagagttaca

SEQ ID NO: 9406 - RNA, 18 nt, Homo sapiens
  source 1..18: mol_type = genomic RNA
cctggattagagttacat

SEQ ID NO: 9407 - RNA, 18 nt, Homo sapiens
  source 1..18: mol_type = genomic RNA
tagagttacatctcctgg

SEQ ID NO: 9408 - RNA, 18 nt, Homo sapiens
  source 1..18: mol_type = genomic RNA
agagttacatctcctgga

SEQ ID NO: 9409 - RNA, 18 nt, Homo sapiens
  source 1..18: mol_type = genomic RNA
gagttacatctcctggat

SEQ ID NO: 9410 - RNA, 18 nt, Homo sapiens
  source 1..18: mol_type = genomic RNA
agttacatctcctggatg

SEQ ID NO: 9411 - RNA, 18 nt, Homo sapiens
  source 1..18: mol_type = genomic RNA
gttacatctcctggatga

SEQ ID NO: 9412 - RNA, 18 nt, Homo sapiens
  source 1..18: mol_type = genomic RNA
ttacatctcctggatgat

SEQ ID NO: 9413 - RNA, 18 nt, Homo sapiens
  source 1..18: mol_type = genomic RNA
tacatctcctggatgatt

SEQ ID NO: 9414 - RNA, 18 nt, Homo sapiens
  source 1..18: mol_type = genomic RNA
acatctcctggatgatta

SEQ ID NO: 9415 - RNA, 18 nt, Homo sapiens
  source 1..18: mol_type = genomic RNA
catctcctggatgattag

SEQ ID NO: 9416 - RNA, 18 nt, Homo sapiens
  source 1..18: mol_type = genomic RNA
atctcctggatgattagt

SEQ ID NO: 9417 - RNA, 18 nt, Homo sapiens
  source 1..18: mol_type = genomic RNA
tctcctggatgattagtt

SEQ ID NO: 9418 - RNA, 18 nt, Homo sapiens
  source 1..18: mol_type = genomic RNA
ctcctggatgattagttc

SEQ ID NO: 9419 - RNA, 18 nt, Homo sapiens
  source 1..18: mol_type = genomic RNA
cctggatgattagttcag

SEQ ID NO: 9420 - RNA, 18 nt, Homo sapiens
  source 1..18: mol_type = genomic RNA
tggatgattagttcagag

SEQ ID NO: 9421 - RNA, 18 nt, Homo sapiens
  source 1..18: mol_type = genomic RNA
ggatgattagttcagaga

SEQ ID NO: 9422 - RNA, 18 nt, Homo sapiens
  source 1..18: mol_type = genomic RNA
aaaatgccccctccctgt

SEQ ID NO: 9423 - RNA, 18 nt, Homo sapiens
  source 1..18: mol_type = genomic RNA
aaatgccccctccctgtg

SEQ ID NO: 9424 - RNA, 18 nt, Homo sapiens
  source 1..18: mol_type = genomic RNA
aatgccccctccctgtgg

SEQ ID NO: 9425 - RNA, 18 nt, Homo sapiens
  source 1..18: mol_type = genomic RNA
ccccctccctgtggatcc

SEQ ID NO: 9426 - RNA, 18 nt, Homo sapiens
  source 1..18: mol_type = genomic RNA
cccctccctgtggatcct

SEQ ID NO: 9427 - RNA, 18 nt, Homo sapiens
  source 1..18: mol_type = genomic RNA
ccctccctgtggatccta

SEQ ID NO: 9428 - RNA, 18 nt, Homo sapiens
  source 1..18: mol_type = genomic RNA
cctccctgtggatcctat

SEQ ID NO: 9429 - RNA, 18 nt, Homo sapiens
  source 1..18: mol_type = genomic RNA
ctccctgtggatcctata

SEQ ID NO: 9430 - RNA, 18 nt, Homo sapiens
  source 1..18: mol_type = genomic RNA
tccctgtggatcctatag

SEQ ID NO: 9431 - RNA, 18 nt, Homo sapiens
  source 1..18: mol_type = genomic RNA
ccctgtggatcctataga

SEQ ID NO: 9432 - RNA, 18 nt, Homo sapiens
  source 1..18: mol_type = genomic RNA
cctgtggatcctatagaa

SEQ ID NO: 9433 - RNA, 18 nt, Homo sapiens
  source 1..18: mol_type = genomic RNA
ctgtggatcctatagaag

SEQ ID NO: 9434 - RNA, 18 nt, Homo sapiens
  source 1..18: mol_type = genomic RNA
tgtggatcctatagaaga

SEQ ID NO: 9435 - RNA, 18 nt, Homo sapiens
  source 1..18: mol_type = genomic RNA
gtggatcctatagaagat

SEQ ID NO: 9436 - RNA, 18 nt, Homo sapiens
  source 1..18: mol_type = genomic RNA
tggatcctatagaagatt

SEQ ID NO: 9437 - RNA, 18 nt, Homo sapiens
  source 1..18: mol_type = genomic RNA
tttgtgtgatgagtgcag

SEQ ID NO: 9438 - RNA, 18 nt, Homo sapiens
  source 1..18: mol_type = genomic RNA
ttgtgtgatgagtgcaga

SEQ ID NO: 9439 - RNA, 18 nt, Homo sapiens
  source 1..18: mol_type = genomic RNA
tgtgtgatgagtgcagag

SEQ ID NO: 9440 - RNA, 18 nt, Homo sapiens
  source 1..18: mol_type = genomic RNA
gtgtgatgagtgcagaga

SEQ ID NO: 9441 - RNA, 18 nt, Homo sapiens
  source 1..18: mol_type = genomic RNA
tgtgatgagtgcagagat

SEQ ID NO: 9442 - RNA, 18 nt, Homo sapiens
  source 1..18: mol_type = genomic RNA
gtgatgagtgcagagata

SEQ ID NO: 9443 - RNA, 18 nt, Homo sapiens
  source 1..18: mol_type = genomic RNA
tgatgagtgcagagatat

SEQ ID NO: 9444 - RNA, 18 nt, Homo sapiens
  source 1..18: mol_type = genomic RNA
gatgagtgcagagatatg

SEQ ID NO: 9445 - RNA, 18 nt, Homo sapiens
  source 1..18: mol_type = genomic RNA
atgagtgcagagatatgt

SEQ ID NO: 9446 - RNA, 18 nt, Homo sapiens
  source 1..18: mol_type = genomic RNA
tgagtgcagagatatgtc

SEQ ID NO: 9447 - RNA, 18 nt, Homo sapiens
  source 1..18: mol_type = genomic RNA
gagtgcagagatatgtca

SEQ ID NO: 9448 - RNA, 18 nt, Homo sapiens
  source 1..18: mol_type = genomic RNA
agtgcagagatatgtcac

SEQ ID NO: 9449 - RNA, 18 nt, Homo sapiens
  source 1..18: mol_type = genomic RNA
gtgcagagatatgtcaca

SEQ ID NO: 9450 - RNA, 18 nt, Homo sapiens
  source 1..18: mol_type = genomic RNA
tgcagagatatgtcacaa

SEQ ID NO: 9451 - RNA, 18 nt, Homo sapiens
  source 1..18: mol_type = genomic RNA
gcagagatatgtcacaat

SEQ ID NO: 9452 - RNA, 18 nt, Homo sapiens
  source 1..18: mol_type = genomic RNA
gatatgtcacaatatccc

SEQ ID NO: 9453 - RNA, 18 nt, Homo sapiens
  source 1..18: mol_type = genomic RNA
atatgtcacaatatcccc

SEQ ID NO: 9454 - RNA, 18 nt, Homo sapiens
  source 1..18: mol_type = genomic RNA
tatgtcacaatatcccct

SEQ ID NO: 9455 - RNA, 18 nt, Homo sapiens
  source 1..18: mol_type = genomic RNA
atgtcacaatatcccctg

SEQ ID NO: 9456 - RNA, 18 nt, Homo sapiens
  source 1..18: mol_type = genomic RNA
tgtcacaatatcccctgt

SEQ ID NO: 9457 - RNA, 18 nt, Homo sapiens
  source 1..18: mol_type = genomic RNA
gtcacaatatcccctgta

SEQ ID NO: 9458 - RNA, 18 nt, Homo sapiens
  source 1..18: mol_type = genomic RNA
tcacaatatcccctgtag

SEQ ID NO: 9459 - RNA, 18 nt, Homo sapiens
  source 1..18: mol_type = genomic RNA
cacaatatcccctgtaga

SEQ ID NO: 9460 - RNA, 18 nt, Homo sapiens
  source 1..18: mol_type = genomic RNA
acaatatcccctgtagaa

SEQ ID NO: 9461 - RNA, 18 nt, Homo sapiens
  source 1..18: mol_type = genomic RNA
caatatcccctgtagaaa

SEQ ID NO: 9462 - RNA, 18 nt, Homo sapiens
  source 1..18: mol_type = genomic RNA
aatatcccctgtagaaaa

SEQ ID NO: 9463 - RNA, 18 nt, Homo sapiens
  source 1..18: mol_type = genomic RNA
atatcccctgtagaaaaa

SEQ ID NO: 9464 - RNA, 18 nt, Homo sapiens
  source 1..18: mol_type = genomic RNA
tatcccctgtagaaaaag

SEQ ID NO: 9465 - RNA, 18 nt, Homo sapiens
  source 1..18: mol_type = genomic RNA
atcccctgtagaaaaagc

SEQ ID NO: 9466 - RNA, 18 nt, Homo sapiens
  source 1..18: mol_type = genomic RNA
tcccctgtagaaaaagcc

SEQ ID NO: 9467 - RNA, 18 nt, Homo sapiens
  source 1..18: mol_type = genomic RNA
cccctgtagaaaaagcct

SEQ ID NO: 9468 - RNA, 18 nt, Homo sapiens
  source 1..18: mol_type = genomic RNA
ccctgtagaaaaagcctg

SEQ ID NO: 9469 - RNA, 18 nt, Homo sapiens
  source 1..18: mol_type = genomic RNA
cctgtagaaaaagcctga

SEQ ID NO: 9470 - RNA, 18 nt, Homo sapiens
  source 1..18: mol_type = genomic RNA
ctgtagaaaaagcctgaa

SEQ ID NO: 9471 - RNA, 18 nt, Homo sapiens
  source 1..18: mol_type = genomic RNA
tgtagaaaaagcctgaaa

SEQ ID NO: 9472 - RNA, 18 nt, Homo sapiens
  source 1..18: mol_type = genomic RNA
gtagaaaaagcctgaaat

SEQ ID NO: 9473 - RNA, 18 nt, Homo sapiens
  source 1..18: mol_type = genomic RNA
tagaaaaagcctgaaatt

SEQ ID NO: 9474 - RNA, 18 nt, Homo sapiens
  source 1..18: mol_type = genomic RNA
agaaaaagcctgaaattg

SEQ ID NO: 9475 - RNA, 18 nt, Homo sapiens
  source 1..18: mol_type = genomic RNA
aacttcggtgatcagtgc

SEQ ID NO: 9476 - RNA, 18 nt, Homo sapiens
  source 1..18: mol_type = genomic RNA
acttcggtgatcagtgca

SEQ ID NO: 9477 - RNA, 18 nt, Homo sapiens
  source 1..18: mol_type = genomic RNA
cttcggtgatcagtgcag

SEQ ID NO: 9478 - RNA, 18 nt, Homo sapiens
  source 1..18: mol_type = genomic RNA
ttcggtgatcagtgcaga

SEQ ID NO: 9479 - RNA, 18 nt, Homo sapiens
  source 1..18: mol_type = genomic RNA
tcggtgatcagtgcagat

SEQ ID NO: 9480 - RNA, 18 nt, Homo sapiens
  source 1..18: mol_type = genomic RNA
cggtgatcagtgcagatg

SEQ ID NO: 9481 - RNA, 18 nt, Homo sapiens
  source 1..18: mol_type = genomic RNA
ggtgatcagtgcagatgt

SEQ ID NO: 9482 - RNA, 18 nt, Homo sapiens
  source 1..18: mol_type = genomic RNA
gtgatcagtgcagatgtg

SEQ ID NO: 9483 - RNA, 18 nt, Homo sapiens
  source 1..18: mol_type = genomic RNA
tgatcagtgcagatgtgt

SEQ ID NO: 9484 - RNA, 18 nt, Homo sapiens
  source 1..18: mol_type = genomic RNA
gatcagtgcagatgtgtt

SEQ ID NO: 9485 - RNA, 18 nt, Homo sapiens
  source 1..18: mol_type = genomic RNA
tcagtgcagatgtgtttc

SEQ ID NO: 9486 - RNA, 18 nt, Homo sapiens
  source 1..18: mol_type = genomic RNA
agtgcagatgtgtttcag

SEQ ID NO: 9487 - RNA, 18 nt, Homo sapiens
  source 1..18: mol_type = genomic RNA
gtgcagatgtgtttcaga

SEQ ID NO: 9488 - RNA, 18 nt, Homo sapiens
  source 1..18: mol_type = genomic RNA
tgcagatgtgtttcagaa

SEQ ID NO: 9489 - RNA, 18 nt, Homo sapiens
  source 1..18: mol_type = genomic RNA
gcagatgtgtttcagaac

SEQ ID NO: 9490 - RNA, 18 nt, Homo sapiens
  source 1..18: mol_type = genomic RNA
gatgtgtttcagaactcc

SEQ ID NO: 9491 - RNA, 18 nt, Homo sapiens
  source 1..18: mol_type = genomic RNA
ttcagaactccatagtag

SEQ ID NO: 9492 - RNA, 18 nt, Homo sapiens
  source 1..18: mol_type = genomic RNA
tcagaactccatagtaga

SEQ ID NO: 9493 - RNA, 18 nt, Homo sapiens
  source 1..18: mol_type = genomic RNA
cagaactccatagtagac

SEQ ID NO: 9494 - RNA, 18 nt, Homo sapiens
  source 1..18: mol_type = genomic RNA
agaactccatagtagact

SEQ ID NO: 9495 - RNA, 18 nt, Homo sapiens
  source 1..18: mol_type = genomic RNA
gaactccatagtagactg

SEQ ID NO: 9496 - RNA, 18 nt, Homo sapiens
  source 1..18: mol_type = genomic RNA
aactccatagtagactga

SEQ ID NO: 9497 - RNA, 18 nt, Homo sapiens
  source 1..18: mol_type = genomic RNA
actccatagtagactgaa

SEQ ID NO: 9498 - RNA, 18 nt, Homo sapiens
  source 1..18: mol_type = genomic RNA
ctccatagtagactgaac

SEQ ID NO: 9499 - RNA, 18 nt, Homo sapiens
  source 1..18: mol_type = genomic RNA
tccatagtagactgaacc

SEQ ID NO: 9500 - RNA, 18 nt, Homo sapiens
  source 1..18: mol_type = genomic RNA
ccatagtagactgaacct

SEQ ID NO: 9501 - RNA, 18 nt, Homo sapiens
  source 1..18: mol_type = genomic RNA
catagtagactgaaccta

SEQ ID NO: 9502 - RNA, 18 nt, Homo sapiens
  source 1..18: mol_type = genomic RNA
atagtagactgaacctag

SEQ ID NO: 9503 - RNA, 18 nt, Homo sapiens
  source 1..18: mol_type = genomic RNA
tagtagactgaacctaga

SEQ ID NO: 9504 - RNA, 18 nt, Homo sapiens
  source 1..18: mol_type = genomic RNA
agtagactgaacctagag

SEQ ID NO: 9505 - RNA, 18 nt, Homo sapiens
  source 1..18: mol_type = genomic RNA
gtagactgaacctagaga

SEQ ID NO: 9506 - RNA, 18 nt, Homo sapiens
  source 1..18: mol_type = genomic RNA
tagactgaacctagagaa

SEQ ID NO: 9507 - RNA, 18 nt, Homo sapiens
  source 1..18: mol_type = genomic RNA
agactgaacctagagaat

SEQ ID NO: 9508 - RNA, 18 nt, Homo sapiens
  source 1..18: mol_type = genomic RNA
gactgaacctagagaatg

SEQ ID NO: 9509 - RNA, 18 nt, Homo sapiens
  source 1..18: mol_type = genomic RNA
actgaacctagagaatgg

SEQ ID NO: 9510 - RNA, 18 nt, Homo sapiens
  source 1..18: mol_type = genomic RNA
ctgaacctagagaatggt

SEQ ID NO: 9511 - RNA, 18 nt, Homo sapiens
  source 1..18: mol_type = genomic RNA
tgaacctagagaatggtt

SEQ ID NO: 9512 - RNA, 18 nt, Homo sapiens
  source 1..18: mol_type = genomic RNA
gaacctagagaatggtta

SEQ ID NO: 9513 - RNA, 18 nt, Homo sapiens
  source 1..18: mol_type = genomic RNA
aacctagagaatggttac

SEQ ID NO: 9514 - RNA, 18 nt, Homo sapiens
  source 1..18: mol_type = genomic RNA
acctagagaatggttaca

SEQ ID NO: 9515 - RNA, 18 nt, Homo sapiens
  source 1..18: mol_type = genomic RNA
cctagagaatggttacat

SEQ ID NO: 9516 - RNA, 18 nt, Homo sapiens
  source 1..18: mol_type = genomic RNA
ctagagaatggttacatc

SEQ ID NO: 9517 - RNA, 18 nt, Homo sapiens
  source 1..18: mol_type = genomic RNA
tagagaatggttacatca

SEQ ID NO: 9518 - RNA, 18 nt, Homo sapiens
  source 1..18: mol_type = genomic RNA
agagaatggttacatcac

SEQ ID NO: 9519 - RNA, 18 nt, Homo sapiens
  source 1..18: mol_type = genomic RNA
gagaatggttacatcact

SEQ ID NO: 9520 - RNA, 18 nt, Homo sapiens
  source 1..18: mol_type = genomic RNA
atggttacatcacttagg

SEQ ID NO: 9521 - RNA, 18 nt, Homo sapiens
  source 1..18: mol_type = genomic RNA
tggttacatcacttaggt

SEQ ID NO: 9522 - RNA, 18 nt, Homo sapiens
  source 1..18: mol_type = genomic RNA
ggttacatcacttaggtg

SEQ ID NO: 9523 - RNA, 18 nt, Homo sapiens
  source 1..18: mol_type = genomic RNA
tacatcacttaggtgatc

SEQ ID NO: 9524 - RNA, 18 nt, Homo sapiens
  source 1..18: mol_type = genomic RNA
acatcacttaggtgatca

SEQ ID NO: 9525 - RNA, 18 nt, Homo sapiens
  source 1..18: mol_type = genomic RNA
catcacttaggtgatcag

SEQ ID NO: 9526 - RNA, 18 nt, Homo sapiens
  source 1..18: mol_type = genomic RNA
atcacttaggtgatcagt

SEQ ID NO: 9527 - RNA, 18 nt, Homo sapiens
  source 1..18: mol_type = genomic RNA
tcacttaggtgatcagtg

SEQ ID NO: 9528 - RNA, 18 nt, Homo sapiens
  source 1..18: mol_type = genomic RNA
cacttaggtgatcagtgt

SEQ ID NO: 9529 - RNA, 18 nt, Homo sapiens
  source 1..18: mol_type = genomic RNA
acttaggtgatcagtgta

SEQ ID NO: 9530 - RNA, 18 nt, Homo sapiens
  source 1..18: mol_type = genomic RNA
cttaggtgatcagtgtag

SEQ ID NO: 9531 - RNA, 18 nt, Homo sapiens
  source 1..18: mol_type = genomic RNA
ttaggtgatcagtgtaga

SEQ ID NO: 9532 - RNA, 18 nt, Homo sapiens
  source 1..18: mol_type = genomic RNA
taggtgatcagtgtagag

SEQ ID NO: 9533 - RNA, 18 nt, Homo sapiens
  source 1..18: mol_type = genomic RNA
aggtgatcagtgtagaga

SEQ ID NO: 9534 - RNA, 18 nt, Homo sapiens
  source 1..18: mol_type = genomic RNA
ggtgatcagtgtagagat

SEQ ID NO: 9535 - RNA, 18 nt, Homo sapiens
  source 1..18: mol_type = genomic RNA
gtgatcagtgtagagata

SEQ ID NO: 9536 - RNA, 18 nt, Homo sapiens
  source 1..18: mol_type = genomic RNA
tgatcagtgtagagatat

SEQ ID NO: 9537 - RNA, 18 nt, Homo sapiens
  source 1..18: mol_type = genomic RNA
gatcagtgtagagatatg

SEQ ID NO: 9538 - RNA, 18 nt, Homo sapiens
  source 1..18: mol_type = genomic RNA
aattctcgtgtagacaga

SEQ ID NO: 9539 - RNA, 18 nt, Homo sapiens
  source 1..18: mol_type = genomic RNA
attctcgtgtagacagag

SEQ ID NO: 9540 - RNA, 18 nt, Homo sapiens
  source 1..18: mol_type = genomic RNA
ttctcgtgtagacagagc

SEQ ID NO: 9541 - RNA, 18 nt, Homo sapiens
  source 1..18: mol_type = genomic RNA
tctcgtgtagacagagcc

SEQ ID NO: 9542 - RNA, 18 nt, Homo sapiens
  source 1..18: mol_type = genomic RNA
ctcgtgtagacagagcct

SEQ ID NO: 9543 - RNA, 18 nt, Homo sapiens
  source 1..18: mol_type = genomic RNA
tcgtgtagacagagccta

SEQ ID NO: 9544 - RNA, 18 nt, Homo sapiens
  source 1..18: mol_type = genomic RNA
cgtgtagacagagcctag

SEQ ID NO: 9545 - RNA, 18 nt, Homo sapiens
  source 1..18: mol_type = genomic RNA
gtgtagacagagcctaga

SEQ ID NO: 9546 - RNA, 18 nt, Homo sapiens
  source 1..18: mol_type = genomic RNA
tgtagacagagcctagac

SEQ ID NO: 9547 - RNA, 18 nt, Homo sapiens
  source 1..18: mol_type = genomic RNA
gtagacagagcctagaca

SEQ ID NO: 9548 - RNA, 18 nt, Homo sapiens
  source 1..18: mol_type = genomic RNA
tagacagagcctagacaa

SEQ ID NO: 9549 - RNA, 18 nt, Homo sapiens
  source 1..18: mol_type = genomic RNA
agacagagcctagacaat

SEQ ID NO: 9550 - RNA, 18 nt, Homo sapiens
  source 1..18: mol_type = genomic RNA
gacagagcctagacaatt

SEQ ID NO: 9551 - RNA, 18 nt, Homo sapiens
  source 1..18: mol_type = genomic RNA
acagagcctagacaattg

SEQ ID NO: 9552 - RNA, 18 nt, Homo sapiens
  source 1..18: mol_type = genomic RNA
cagagcctagacaattgt

SEQ ID NO: 9553 - RNA, 18 nt, Homo sapiens
  source 1..18: mol_type = genomic RNA
agagcctagacaattgtt

SEQ ID NO: 9554 - RNA, 18 nt, Homo sapiens
  source 1..18: mol_type = genomic RNA
gagcctagacaattgtta

SEQ ID NO: 9555 - RNA, 18 nt, Homo sapiens
  source 1..18: mol_type = genomic RNA
agcctagacaattgttac

SEQ ID NO: 9556 - RNA, 18 nt, Homo sapiens
  source 1..18: mol_type = genomic RNA
gcctagacaattgttaca

SEQ ID NO: 9557 - RNA, 18 nt, Homo sapiens
  source 1..18: mol_type = genomic RNA
tgttacatcacctagtga

SEQ ID NO: 9558 - RNA, 18 nt, Homo sapiens
  source 1..18: mol_type = genomic RNA
ttacatcacctagtgatc

SEQ ID NO: 9559 - RNA, 18 nt, Homo sapiens
  source 1..18: mol_type = genomic RNA
tacatcacctagtgatca

SEQ ID NO: 9560 - RNA, 18 nt, Homo sapiens
  source 1..18: mol_type = genomic RNA
acatcacctagtgatcag

SEQ ID NO: 9561 - RNA, 18 nt, Homo sapiens
  source 1..18: mol_type = genomic RNA
catcacctagtgatcagt

SEQ ID NO: 9562 - RNA, 18 nt, Homo sapiens
  source 1..18: mol_type = genomic RNA
atcacctagtgatcagtg

SEQ ID NO: 9563 - RNA, 18 nt, Homo sapiens
  source 1..18: mol_type = genomic RNA
tcacctagtgatcagtgc

SEQ ID NO: 9564 - RNA, 18 nt, Homo sapiens
  source 1..18: mol_type = genomic RNA
cacctagtgatcagtgca

SEQ ID NO: 9565 - RNA, 18 nt, Homo sapiens
  source 1..18: mol_type = genomic RNA
acctagtgatcagtgcag

SEQ ID NO: 9566 - RNA, 18 nt, Homo sapiens
  source 1..18: mol_type = genomic RNA
cctagtgatcagtgcagg

SEQ ID NO: 9567 - RNA, 18 nt, Homo sapiens
  source 1..18: mol_type = genomic RNA
ctagtgatcagtgcaggg

SEQ ID NO: 9568 - RNA, 18 nt, Homo sapiens
  source 1..18: mol_type = genomic RNA
tagtgatcagtgcaggga

SEQ ID NO: 9569 - RNA, 18 nt, Homo sapiens
  source 1..18: mol_type = genomic RNA
agtgatcagtgcagggat

SEQ ID NO: 9570 - RNA, 18 nt, Homo sapiens
  source 1..18: mol_type = genomic RNA
gtgatcagtgcagggata

SEQ ID NO: 9571 - RNA, 18 nt, Homo sapiens
  source 1..18: mol_type = genomic RNA
tgatcagtgcagggataa

SEQ ID NO: 9572 - RNA, 18 nt, Homo sapiens
  source 1..18: mol_type = genomic RNA
gatcagtgcagggataag

SEQ ID NO: 9573 - RNA, 18 nt, Homo sapiens
  source 1..18: mol_type = genomic RNA
atcagtgcagggataagt

SEQ ID NO: 9574 - RNA, 18 nt, Homo sapiens
  source 1..18: mol_type = genomic RNA
tcagtgcagggataagtc

SEQ ID NO: 9575 - RNA, 18 nt, Homo sapiens
  source 1..18: mol_type = genomic RNA
cagtgcagggataagtca

SEQ ID NO: 9576 - RNA, 18 nt, Homo sapiens
  source 1..18: mol_type = genomic RNA
agtgcagggataagtcat

SEQ ID NO: 9577 - RNA, 18 nt, Homo sapiens
  source 1..18: mol_type = genomic RNA
gtgcagggataagtcata

SEQ ID NO: 9578 - RNA, 18 nt, Homo sapiens
  source 1..18: mol_type = genomic RNA
tgcagggataagtcataa

SEQ ID NO: 9579 - RNA, 18 nt, Homo sapiens
  source 1..18: mol_type = genomic RNA
gcagggataagtcataaa

SEQ ID NO: 9580 - RNA, 18 nt, Homo sapiens
  source 1..18: mol_type = genomic RNA
cagggataagtcataaag

SEQ ID NO: 9581 - RNA, 18 nt, Homo sapiens
  source 1..18: mol_type = genomic RNA
agggataagtcataaagc

SEQ ID NO: 9582 - RNA, 18 nt, Homo sapiens
  source 1..18: mol_type = genomic RNA
gggataagtcataaagcc

SEQ ID NO: 9583 - RNA, 18 nt, Homo sapiens
  source 1..18: mol_type = genomic RNA
ggataagtcataaagcct

SEQ ID NO: 9584 - RNA, 18 nt, Homo sapiens
  source 1..18: mol_type = genomic RNA
gataagtcataaagcctc

SEQ ID NO: 9585 - RNA, 18 nt, Homo sapiens
  source 1..18: mol_type = genomic RNA
ataagtcataaagcctcc

SEQ ID NO: 9586 - RNA, 18 nt, Homo sapiens
  source 1..18: mol_type = genomic RNA
taagtcataaagcctcct

SEQ ID NO: 9587 - RNA, 18 nt, Homo sapiens
  source 1..18: mol_type = genomic RNA
aagtcataaagcctcctg

SEQ ID NO: 9588 - RNA, 18 nt, Homo sapiens
  source 1..18: mol_type = genomic RNA
agtcataaagcctcctgt

SEQ ID NO: 9589 - RNA, 18 nt, Homo sapiens
  source 1..18: mol_type = genomic RNA
gtcataaagcctcctgta

SEQ ID NO: 9590 - RNA, 18 nt, Homo sapiens
  source 1..18: mol_type = genomic RNA
tcataaagcctcctgtag

SEQ ID NO: 9591 - RNA, 18 nt, Homo sapiens
  source 1..18: mol_type = genomic RNA
cataaagcctcctgtagg

SEQ ID NO: 9592 - RNA, 18 nt, Homo sapiens
  source 1..18: mol_type = genomic RNA
ataaagcctcctgtaggc

SEQ ID NO: 9593 - RNA, 18 nt, Homo sapiens
  source 1..18: mol_type = genomic RNA
taaagcctcctgtaggca

SEQ ID NO: 9594 - RNA, 18 nt, Homo sapiens
  source 1..18: mol_type = genomic RNA
aaagcctcctgtaggcag

SEQ ID NO: 9595 - RNA, 18 nt, Homo sapiens
  source 1..18: mol_type = genomic RNA
aagcctcctgtaggcaga

SEQ ID NO: 9596 - RNA, 18 nt, Homo sapiens
  source 1..18: mol_type = genomic RNA
agcctcctgtaggcagag

SEQ ID NO: 9597 - RNA, 18 nt, Homo sapiens
  source 1..18: mol_type = genomic RNA
gcctcctgtaggcagagt

SEQ ID NO: 9598 - RNA, 18 nt, Homo sapiens
  source 1..18: mol_type = genomic RNA
cctcctgtaggcagagtg

SEQ ID NO: 9599 - RNA, 18 nt, Homo sapiens
  source 1..18: mol_type = genomic RNA
ctcctgtaggcagagtgt

SEQ ID NO: 9600 - RNA, 18 nt, Homo sapiens
  source 1..18: mol_type = genomic RNA
tcctgtaggcagagtgta

SEQ ID NO: 9601 - RNA, 18 nt, Homo sapiens
  source 1..18: mol_type = genomic RNA
cctgtaggcagagtgtag

SEQ ID NO: 9602 - RNA, 18 nt, Homo sapiens
  source 1..18: mol_type = genomic RNA
ctgtaggcagagtgtagg

SEQ ID NO: 9603 - RNA, 18 nt, Homo sapiens
  source 1..18: mol_type = genomic RNA
tgtaggcagagtgtaggc

SEQ ID NO: 9604 - RNA, 18 nt, Homo sapiens
  source 1..18: mol_type = genomic RNA
gtaggcagagtgtaggca

SEQ ID NO: 9605 - RNA, 18 nt, Homo sapiens
  source 1..18: mol_type = genomic RNA
taggcagagtgtaggcaa

SEQ ID NO: 9606 - RNA, 18 nt, Homo sapiens
  source 1..18: mol_type = genomic RNA
aggcagagtgtaggcaag

SEQ ID NO: 9607 - RNA, 18 nt, Homo sapiens
  source 1..18: mol_type = genomic RNA
ggcagagtgtaggcaagt

SEQ ID NO: 9608 - RNA, 18 nt, Homo sapiens
  source 1..18: mol_type = genomic RNA
gcagagtgtaggcaagtg

SEQ ID NO: 9609 - RNA, 18 nt, Homo sapiens
  source 1..18: mol_type = genomic RNA
cagagtgtaggcaagtgt

SEQ ID NO: 9610 - RNA, 18 nt, Homo sapiens
  source 1..18: mol_type = genomic RNA
agagtgtaggcaagtgtt

SEQ ID NO: 9611 - RNA, 18 nt, Homo sapiens
  source 1..18: mol_type = genomic RNA
gagtgtaggcaagtgttc

SEQ ID NO: 9612 - RNA, 18 nt, Homo sapiens
  source 1..18: mol_type = genomic RNA
agtgtaggcaagtgttcc

SEQ ID NO: 9613 - RNA, 18 nt, Homo sapiens
  source 1..18: mol_type = genomic RNA
gtgtaggcaagtgttccc

SEQ ID NO: 9614 - RNA, 18 nt, Homo sapiens
  source 1..18: mol_type = genomic RNA
tgtaggcaagtgttccct

SEQ ID NO: 9615 - RNA, 18 nt, Homo sapiens
  source 1..18: mol_type = genomic RNA
gtaggcaagtgttccctc

SEQ ID NO: 9616 - RNA, 18 nt, Homo sapiens
  source 1..18: mol_type = genomic RNA
taggcaagtgttccctcc

SEQ ID NO: 9617 - RNA, 18 nt, Homo sapiens
  source 1..18: mol_type = genomic RNA
aggcaagtgttccctccc

SEQ ID NO: 9618 - RNA, 18 nt, Homo sapiens
  source 1..18: mol_type = genomic RNA
ggcaagtgttccctccct

SEQ ID NO: 9619 - RNA, 18 nt, Homo sapiens
  source 1..18: mol_type = genomic RNA
gcaagtgttccctccctg

SEQ ID NO: 9620 - RNA, 18 nt, Homo sapiens
  source 1..18: mol_type = genomic RNA
caagtgttccctccctgg

SEQ ID NO: 9621 - RNA, 18 nt, Homo sapiens
  source 1..18: mol_type = genomic RNA
aagtgttccctccctggg

SEQ ID NO: 9622 - RNA, 18 nt, Homo sapiens
  source 1..18: mol_type = genomic RNA
agtgttccctccctgggc

SEQ ID NO: 9623 - RNA, 18 nt, Homo sapiens
  source 1..18: mol_type = genomic RNA
gtgttccctccctgggct

SEQ ID NO: 9624 - RNA, 18 nt, Homo sapiens
  source 1..18: mol_type = genomic RNA
tgttccctccctgggctg

SEQ ID NO: 9625 - RNA, 18 nt, Homo sapiens
  source 1..18: mol_type = genomic RNA
gttccctccctgggctga

SEQ ID NO: 9626 - RNA, 18 nt, Homo sapiens
  source 1..18: mol_type = genomic RNA
ttccctccctgggctgat

SEQ ID NO: 9627 - RNA, 18 nt, Homo sapiens
  source 1..18: mol_type = genomic RNA
tccctccctgggctgatc

SEQ ID NO: 9628 - RNA, 18 nt, Homo sapiens
  source 1..18: mol_type = genomic RNA
ccctccctgggctgatca

SEQ ID NO: 9629 - RNA, 18 nt, Homo sapiens
  source 1..18: mol_type = genomic RNA
cctccctgggctgatcag

SEQ ID NO: 9630 - RNA, 18 nt, Homo sapiens
  source 1..18: mol_type = genomic RNA
ctccctgggctgatcagt

SEQ ID NO: 9631 - RNA, 18 nt, Homo sapiens
  source 1..18: mol_type = genomic RNA
tccctgggctgatcagtg

SEQ ID NO: 9632 - RNA, 18 nt, Homo sapiens
  source 1..18: mol_type = genomic RNA
ccctgggctgatcagtgc

SEQ ID NO: 9633 - RNA, 18 nt, Homo sapiens
  source 1..18: mol_type = genomic RNA
cctgggctgatcagtgca

SEQ ID NO: 9634 - RNA, 18 nt, Homo sapiens
  source 1..18: mol_type = genomic RNA
ctgggctgatcagtgcag

SEQ ID NO: 9635 - RNA, 18 nt, Homo sapiens
  source 1..18: mol_type = genomic RNA
tgggctgatcagtgcaga

SEQ ID NO: 9636 - RNA, 18 nt, Homo sapiens
  source 1..18: mol_type = genomic RNA
gggctgatcagtgcagag

SEQ ID NO: 9637 - RNA, 18 nt, Homo sapiens
  source 1..18: mol_type = genomic RNA
ggctgatcagtgcagaga

SEQ ID NO: 9638 - RNA, 18 nt, Homo sapiens
  source 1..18: mol_type = genomic RNA
gctgatcagtgcagagat

SEQ ID NO: 9639 - RNA, 18 nt, Homo sapiens
  source 1..18: mol_type = genomic RNA
ctgatcagtgcagagata

SEQ ID NO: 9640 - RNA, 18 nt, Homo sapiens
  source 1..18: mol_type = genomic RNA
tgatcagtgcagagatat

SEQ ID NO: 9641 - RNA, 18 nt, Homo sapiens
  source 1..18: mol_type = genomic RNA
gatcagtgcagagatatc

SEQ ID NO: 9642 - RNA, 18 nt, Homo sapiens
  source 1..18: mol_type = genomic RNA
atcagtgcagagatatct

SEQ ID NO: 9643 - RNA, 18 nt, Homo sapiens
  source 1..18: mol_type = genomic RNA
tcagtgcagagatatctc

SEQ ID NO: 9644 - RNA, 18 nt, Homo sapiens
  source 1..18: mol_type = genomic RNA
cagtgcagagatatctca

SEQ ID NO: 9645 - RNA, 18 nt, Homo sapiens
  source 1..18: mol_type = genomic RNA
agtgcagagatatctcac

SEQ ID NO: 9646 - RNA, 18 nt, Homo sapiens
  source 1..18: mol_type = genomic RNA
gtgcagagatatctcaca

SEQ ID NO: 9647 - RNA, 18 nt, Homo sapiens
  source 1..18: mol_type = genomic RNA
tgcagagatatctcacaa

SEQ ID NO: 9648 - RNA, 18 nt, Homo sapiens
  source 1..18: mol_type = genomic RNA
gcagagatatctcacaaa

SEQ ID NO: 9649 - RNA, 18 nt, Homo sapiens
  source 1..18: mol_type = genomic RNA
cagagatatctcacaaag

SEQ ID NO: 9650 - RNA, 18 nt, Homo sapiens
  source 1..18: mol_type = genomic RNA
agagatatctcacaaagc

SEQ ID NO: 9651 - RNA, 18 nt, Homo sapiens
  source 1..18: mol_type = genomic RNA
gagatatctcacaaagcc

SEQ ID NO: 9652 - RNA, 18 nt, Homo sapiens
  source 1..18: mol_type = genomic RNA
agatatctcacaaagccc

SEQ ID NO: 9653 - RNA, 18 nt, Homo sapiens
  source 1..18: mol_type = genomic RNA
gatatctcacaaagcccc

SEQ ID NO: 9654 - RNA, 18 nt, Homo sapiens
  source 1..18: mol_type = genomic RNA
atatctcacaaagcccct

SEQ ID NO: 9655 - RNA, 18 nt, Homo sapiens
  source 1..18: mol_type = genomic RNA
tatctcacaaagccccta

SEQ ID NO: 9656 - RNA, 18 nt, Homo sapiens
  source 1..18: mol_type = genomic RNA
atctcacaaagcccctat

SEQ ID NO: 9657 - RNA, 18 nt, Homo sapiens
  source 1..18: mol_type = genomic RNA
tctcacaaagcccctata

SEQ ID NO: 9658 - RNA, 18 nt, Homo sapiens
  source 1..18: mol_type = genomic RNA
ctcacaaagcccctataa

SEQ ID NO: 9659 - RNA, 18 nt, Homo sapiens
  source 1..18: mol_type = genomic RNA
tcacaaagcccctataag

SEQ ID NO: 9660 - RNA, 18 nt, Homo sapiens
  source 1..18: mol_type = genomic RNA
cacaaagcccctataagc

SEQ ID NO: 9661 - RNA, 18 nt, Homo sapiens
  source 1..18: mol_type = genomic RNA
acaaagcccctataagcc

SEQ ID NO: 9662 - RNA, 18 nt, Homo sapiens
  source 1..18: mol_type = genomic RNA
caaagcccctataagcca

SEQ ID NO: 9663 - RNA, 18 nt, Homo sapiens
  source 1..18: mol_type = genomic RNA
aaagcccctataagccaa

SEQ ID NO: 9664 - RNA, 18 nt, Homo sapiens
  source 1..18: mol_type = genomic RNA
aagcccctataagccaaa

SEQ ID NO: 9665 - RNA, 18 nt, Homo sapiens
  source 1..18: mol_type = genomic RNA
agcccctataagccaaac

SEQ ID NO: 9666 - RNA, 18 nt, Homo sapiens
  source 1..18: mol_type = genomic RNA
gcccctataagccaaacc

SEQ ID NO: 9667 - RNA, 18 nt, Homo sapiens
  source 1..18: mol_type = genomic RNA
cccctataagccaaacct

SEQ ID NO: 9668 - RNA, 18 nt, Homo sapiens
  source 1..18: mol_type = genomic RNA
ccctataagccaaacctt

SEQ ID NO: 9669 - RNA, 18 nt, Homo sapiens
  source 1..18: mol_type = genomic RNA
cctataagccaaaccttg

SEQ ID NO: 9670 - RNA, 18 nt, Homo sapiens
  source 1..18: mol_type = genomic RNA
ctataagccaaaccttga

SEQ ID NO: 9671 - RNA, 18 nt, Homo sapiens
  source 1..18: mol_type = genomic RNA
tataagccaaaccttgac

SEQ ID NO: 9672 - RNA, 18 nt, Homo sapiens
  source 1..18: mol_type = genomic RNA
ataagccaaaccttgaca

SEQ ID NO: 9673 - RNA, 18 nt, Homo sapiens
  source 1..18: mol_type = genomic RNA
taagccaaaccttgacaa

SEQ ID NO: 9674 - RNA, 18 nt, Homo sapiens
  source 1..18: mol_type = genomic RNA
aagccaaaccttgacaag

SEQ ID NO: 9675 - RNA, 18 nt, Homo sapiens
  source 1..18: mol_type = genomic RNA
agccaaaccttgacaagg

SEQ ID NO: 9676 - RNA, 18 nt, Homo sapiens
  source 1..18: mol_type = genomic RNA
gccaaaccttgacaaggg

SEQ ID NO: 9677 - RNA, 18 nt, Homo sapiens
  source 1..18: mol_type = genomic RNA
ccaaaccttgacaagggt

SEQ ID NO: 9678 - RNA, 18 nt, Homo sapiens
  source 1..18: mol_type = genomic RNA
caaaccttgacaagggtt

SEQ ID NO: 9679 - RNA, 18 nt, Homo sapiens
  source 1..18: mol_type = genomic RNA
aaaccttgacaagggtta

SEQ ID NO: 9680 - RNA, 18 nt, Homo sapiens
  source 1..18: mol_type = genomic RNA
aaccttgacaagggttac

SEQ ID NO: 9681 - RNA, 18 nt, Homo sapiens
  source 1..18: mol_type = genomic RNA
accttgacaagggttaca

SEQ ID NO: 9682 - RNA, 18 nt, Homo sapiens
  source 1..18: mol_type = genomic RNA
ccttgacaagggttacat

SEQ ID NO: 9683 - RNA, 18 nt, Homo sapiens
  source 1..18: mol_type = genomic RNA
cttgacaagggttacatc

SEQ ID NO: 9684 - RNA, 18 nt, Homo sapiens
  source 1..18: mol_type = genomic RNA
ttgacaagggttacatca

SEQ ID NO: 9685 - RNA, 18 nt, Homo sapiens
  source 1..18: mol_type = genomic RNA
tgacaagggttacatcac

SEQ ID NO: 9686 - RNA, 18 nt, Homo sapiens
  source 1..18: mol_type = genomic RNA
gacaagggttacatcacc

SEQ ID NO: 9687 - RNA, 18 nt, Homo sapiens
  source 1..18: mol_type = genomic RNA
acaagggttacatcacct

SEQ ID NO: 9688 - RNA, 18 nt, Homo sapiens
  source 1..18: mol_type = genomic RNA
caagggttacatcacctg

SEQ ID NO: 9689 - RNA, 18 nt, Homo sapiens
  source 1..18: mol_type = genomic RNA
aagggttacatcacctgt

SEQ ID NO: 9690 - RNA, 18 nt, Homo sapiens
  source 1..18: mol_type = genomic RNA
agggttacatcacctgtt

SEQ ID NO: 9691 - RNA, 18 nt, Homo sapiens
  source 1..18: mol_type = genomic RNA
gggttacatcacctgttt

SEQ ID NO: 9692 - RNA, 18 nt, Homo sapiens
  source 1..18: mol_type = genomic RNA
tacatcacctgtttgagc

SEQ ID NO: 9693 - RNA, 18 nt, Homo sapiens
  source 1..18: mol_type = genomic RNA
acatcacctgtttgagca

SEQ ID NO: 9694 - RNA, 18 nt, Homo sapiens
  source 1..18: mol_type = genomic RNA
catcacctgtttgagcag

SEQ ID NO: 9695 - RNA, 18 nt, Homo sapiens
  source 1..18: mol_type = genomic RNA
atcacctgtttgagcagt

SEQ ID NO: 9696 - RNA, 18 nt, Homo sapiens
  source 1..18: mol_type = genomic RNA
tcacctgtttgagcagtg

SEQ ID NO: 9697 - RNA, 18 nt, Homo sapiens
  source 1..18: mol_type = genomic RNA
cacctgtttgagcagtgg

SEQ ID NO: 9698 - RNA, 18 nt, Homo sapiens
  source 1..18: mol_type = genomic RNA
acctgtttgagcagtgga

SEQ ID NO: 9699 - RNA, 18 nt, Homo sapiens
  source 1..18: mol_type = genomic RNA
cctgtttgagcagtggaa

SEQ ID NO: 9700 - RNA, 18 nt, Homo sapiens
  source 1..18: mol_type = genomic RNA
ctgtttgagcagtggaaa

SEQ ID NO: 9701 - RNA, 18 nt, Homo sapiens
  source 1..18: mol_type = genomic RNA
tgtttgagcagtggaaat

SEQ ID NO: 9702 - RNA, 18 nt, Homo sapiens
  source 1..18: mol_type = genomic RNA
gtttgagcagtggaaata

SEQ ID NO: 9703 - RNA, 18 nt, Homo sapiens
  source 1..18: mol_type = genomic RNA
tttgagcagtggaaatat

SEQ ID NO: 9704 - RNA, 18 nt, Homo sapiens
  source 1..18: mol_type = genomic RNA
ttgagcagtggaaatata

SEQ ID NO: 9705 - RNA, 18 nt, Homo sapiens
  source 1..18: mol_type = genomic RNA
tgagcagtggaaatatat

SEQ ID NO: 9706 - RNA, 18 nt, Homo sapiens
  source 1..18: mol_type = genomic RNA
gagcagtggaaatatata

SEQ ID NO: 9707 - RNA, 18 nt, Homo sapiens
  source 1..18: mol_type = genomic RNA
agcagtggaaatatatat

SEQ ID NO: 9708 - RNA, 18 nt, Homo sapiens
  source 1..18: mol_type = genomic RNA
gcagtggaaatatatatc

SEQ ID NO: 9709 - RNA, 18 nt, Homo sapiens
  source 1..18: mol_type = genomic RNA
atatatatcacaaagccc

SEQ ID NO: 9710 - RNA, 18 nt, Homo sapiens
  source 1..18: mol_type = genomic RNA
tatatatcacaaagcccc

SEQ ID NO: 9711 - RNA, 18 nt, Homo sapiens
  source 1..18: mol_type = genomic RNA
atatatcacaaagccccc

SEQ ID NO: 9712 - RNA, 18 nt, Homo sapiens
  source 1..18: mol_type = genomic RNA
tatatcacaaagccccct

SEQ ID NO: 9713 - RNA, 18 nt, Homo sapiens
  source 1..18: mol_type = genomic RNA
atatcacaaagccccctg

SEQ ID NO: 9714 - RNA, 18 nt, Homo sapiens
  source 1..18: mol_type = genomic RNA
tatcacaaagccccctgt

SEQ ID NO: 9715 - RNA, 18 nt, Homo sapiens
  source 1..18: mol_type = genomic RNA
atcacaaagccccctgta

SEQ ID NO: 9716 - RNA, 18 nt, Homo sapiens
  source 1..18: mol_type = genomic RNA
tcacaaagccccctgtag

SEQ ID NO: 9717 - RNA, 18 nt, Homo sapiens
  source 1..18: mol_type = genomic RNA
cacaaagccccctgtaga

SEQ ID NO: 9718 - RNA, 18 nt, Homo sapiens
  source 1..18: mol_type = genomic RNA
acaaagccccctgtagac

SEQ ID NO: 9719 - RNA, 18 nt, Homo sapiens
  source 1..18: mol_type = genomic RNA
caaagccccctgtagaca

SEQ ID NO: 9720 - RNA, 18 nt, Homo sapiens
  source 1..18: mol_type = genomic RNA
aaagccccctgtagacaa

SEQ ID NO: 9721 - RNA, 18 nt, Homo sapiens
  source 1..18: mol_type = genomic RNA
aagccccctgtagacaaa

SEQ ID NO: 9722 - RNA, 18 nt, Homo sapiens
  source 1..18: mol_type = genomic RNA
agccccctgtagacaaag

SEQ ID NO: 9723 - RNA, 18 nt, Homo sapiens
  source 1..18: mol_type = genomic RNA
gccccctgtagacaaagc

SEQ ID NO: 9724 - RNA, 18 nt, Homo sapiens
  source 1..18: mol_type = genomic RNA
ccccctgtagacaaagcc

SEQ ID NO: 9725 - RNA, 18 nt, Homo sapiens
  source 1..18: mol_type = genomic RNA
cccctgtagacaaagccc

SEQ ID NO: 9726 - RNA, 18 nt, Homo sapiens
  source 1..18: mol_type = genomic RNA
ccctgtagacaaagccca

SEQ ID NO: 9727 - RNA, 18 nt, Homo sapiens
  source 1..18: mol_type = genomic RNA
cctgtagacaaagcccag

SEQ ID NO: 9728 - RNA, 18 nt, Homo sapiens
  source 1..18: mol_type = genomic RNA
ctgtagacaaagcccaga

SEQ ID NO: 9729 - RNA, 18 nt, Homo sapiens
  source 1..18: mol_type = genomic RNA
tgtagacaaagcccagac

SEQ ID NO: 9730 - RNA, 18 nt, Homo sapiens
  source 1..18: mol_type = genomic RNA
gtagacaaagcccagaca

SEQ ID NO: 9731 - RNA, 18 nt, Homo sapiens
  source 1..18: mol_type = genomic RNA
tagacaaagcccagacaa

SEQ ID NO: 9732 - RNA, 18 nt, Homo sapiens
  source 1..18: mol_type = genomic RNA
agacaaagcccagacaat

SEQ ID NO: 9733 - RNA, 18 nt, Homo sapiens
  source 1..18: mol_type = genomic RNA
gacaaagcccagacaatt

SEQ ID NO: 9734 - RNA, 18 nt, Homo sapiens
  source 1..18: mol_type = genomic RNA
acaaagcccagacaattt

SEQ ID NO: 9735 - RNA, 18 nt, Homo sapiens
  source 1..18: mol_type = genomic RNA
ttacatctcctgagtgag

SEQ ID NO: 9736 - RNA, 18 nt, Homo sapiens
  source 1..18: mol_type = genomic RNA
tacatctcctgagtgagc

SEQ ID NO: 9737 - RNA, 18 nt, Homo sapiens
  source 1..18: mol_type = genomic RNA
acatctcctgagtgagca

SEQ ID NO: 9738 - RNA, 18 nt, Homo sapiens
  source 1..18: mol_type = genomic RNA
catctcctgagtgagcat

SEQ ID NO: 9739 - RNA, 18 nt, Homo sapiens
  source 1..18: mol_type = genomic RNA
atctcctgagtgagcatt

SEQ ID NO: 9740 - RNA, 18 nt, Homo sapiens
  source 1..18: mol_type = genomic RNA
tctcctgagtgagcattg

SEQ ID NO: 9741 - RNA, 18 nt, Homo sapiens
  source 1..18: mol_type = genomic RNA
ctcctgagtgagcattgg

SEQ ID NO: 9742 - RNA, 18 nt, Homo sapiens
  source 1..18: mol_type = genomic RNA
tcctgagtgagcattgga

SEQ ID NO: 9743 - RNA, 18 nt, Homo sapiens
  source 1..18: mol_type = genomic RNA
cctgagtgagcattggag

SEQ ID NO: 9744 - RNA, 18 nt, Homo sapiens
  source 1..18: mol_type = genomic RNA
ctgagtgagcattggaga

SEQ ID NO: 9745 - RNA, 18 nt, Homo sapiens
  source 1..18: mol_type = genomic RNA
tgagtgagcattggagag

SEQ ID NO: 9746 - RNA, 18 nt, Homo sapiens
  source 1..18: mol_type = genomic RNA
gagtgagcattggagaga

SEQ ID NO: 9747 - RNA, 18 nt, Homo sapiens
  source 1..18: mol_type = genomic RNA
agtgagcattggagagat

SEQ ID NO: 9748 - RNA, 18 nt, Homo sapiens
  source 1..18: mol_type = genomic RNA
gtgagcattggagagatc

SEQ ID NO: 9749 - RNA, 18 nt, Homo sapiens
  source 1..18: mol_type = genomic RNA
tgagcattggagagatct

SEQ ID NO: 9750 - RNA, 18 nt, Homo sapiens
  source 1..18: mol_type = genomic RNA
gagcattggagagatctg

SEQ ID NO: 9751 - RNA, 18 nt, Homo sapiens
  source 1..18: mol_type = genomic RNA
agcattggagagatctgt

SEQ ID NO: 9752 - RNA, 18 nt, Homo sapiens
  source 1..18: mol_type = genomic RNA
gcattggagagatctgtc

SEQ ID NO: 9753 - RNA, 18 nt, Homo sapiens
  source 1..18: mol_type = genomic RNA
cattggagagatctgtca

SEQ ID NO: 9754 - RNA, 18 nt, Homo sapiens
  source 1..18: mol_type = genomic RNA
attggagagatctgtcac

SEQ ID NO: 9755 - RNA, 18 nt, Homo sapiens
  source 1..18: mol_type = genomic RNA
ttggagagatctgtcaca

SEQ ID NO: 9756 - RNA, 18 nt, Homo sapiens
  source 1..18: mol_type = genomic RNA
tggagagatctgtcacaa

SEQ ID NO: 9757 - RNA, 18 nt, Homo sapiens
  source 1..18: mol_type = genomic RNA
ggagagatctgtcacaat

SEQ ID NO: 9758 - RNA, 18 nt, Homo sapiens
  source 1..18: mol_type = genomic RNA
gagagatctgtcacaatg

SEQ ID NO: 9759 - RNA, 18 nt, Homo sapiens
  source 1..18: mol_type = genomic RNA
agagatctgtcacaatgc

SEQ ID NO: 9760 - RNA, 18 nt, Homo sapiens
  source 1..18: mol_type = genomic RNA
gagatctgtcacaatgcc

SEQ ID NO: 9761 - RNA, 18 nt, Homo sapiens
  source 1..18: mol_type = genomic RNA
agatctgtcacaatgccc

SEQ ID NO: 9762 - RNA, 18 nt, Homo sapiens
  source 1..18: mol_type = genomic RNA
gatctgtcacaatgcccc

SEQ ID NO: 9763 - RNA, 18 nt, Homo sapiens
  source 1..18: mol_type = genomic RNA
atctgtcacaatgcccct

SEQ ID NO: 9764 - RNA, 18 nt, Homo sapiens
  source 1..18: mol_type = genomic RNA
tctgtcacaatgcccctg

SEQ ID NO: 9765 - RNA, 18 nt, Homo sapiens
  source 1..18: mol_type = genomic RNA
ctgtcacaatgcccctgt

SEQ ID NO: 9766 - RNA, 18 nt, Homo sapiens
  source 1..18: mol_type = genomic RNA
tgtcacaatgcccctgta

SEQ ID NO: 9767 - RNA, 18 nt, Homo sapiens
  source 1..18: mol_type = genomic RNA
gtcacaatgcccctgtag

SEQ ID NO: 9768 - RNA, 18 nt, Homo sapiens
  source 1..18: mol_type = genomic RNA
tcacaatgcccctgtagg

SEQ ID NO: 9769 - RNA, 18 nt, Homo sapiens
  source 1..18: mol_type = genomic RNA
cacaatgcccctgtaggc

SEQ ID NO: 9770 - RNA, 18 nt, Homo sapiens
  source 1..18: mol_type = genomic RNA
acaatgcccctgtaggca

SEQ ID NO: 9771 - RNA, 18 nt, Homo sapiens
  source 1..18: mol_type = genomic RNA
caatgcccctgtaggcag

SEQ ID NO: 9772 - RNA, 18 nt, Homo sapiens
  source 1..18: mol_type = genomic RNA
aatgcccctgtaggcaga

SEQ ID NO: 9773 - RNA, 18 nt, Homo sapiens
  source 1..18: mol_type = genomic RNA
atgcccctgtaggcagag

SEQ ID NO: 9774 - RNA, 18 nt, Homo sapiens
  source 1..18: mol_type = genomic RNA
cccctgtaggcagagctt

SEQ ID NO: 9775 - RNA, 18 nt, Homo sapiens
  source 1..18: mol_type = genomic RNA
ccctgtaggcagagctta

SEQ ID NO: 9776 - RNA, 18 nt, Homo sapiens
  source 1..18: mol_type = genomic RNA
cctgtaggcagagcttag

SEQ ID NO: 9777 - RNA, 18 nt, Homo sapiens
  source 1..18: mol_type = genomic RNA
ctgtaggcagagcttaga

SEQ ID NO: 9778 - RNA, 18 nt, Homo sapiens
  source 1..18: mol_type = genomic RNA
tgtaggcagagcttagac

SEQ ID NO: 9779 - RNA, 18 nt, Homo sapiens
  source 1..18: mol_type = genomic RNA
gtaggcagagcttagaca

SEQ ID NO: 9780 - RNA, 18 nt, Homo sapiens
  source 1..18: mol_type = genomic RNA
taggcagagcttagacaa

SEQ ID NO: 9781 - RNA, 18 nt, Homo sapiens
  source 1..18: mol_type = genomic RNA
aggcagagcttagacaag

SEQ ID NO: 9782 - RNA, 18 nt, Homo sapiens
  source 1..18: mol_type = genomic RNA
ggcagagcttagacaagt

SEQ ID NO: 9783 - RNA, 18 nt, Homo sapiens
  source 1..18: mol_type = genomic RNA
gcagagcttagacaagtg

SEQ ID NO: 9784 - RNA, 18 nt, Homo sapiens
  source 1..18: mol_type = genomic RNA
cagagcttagacaagtgt

SEQ ID NO: 9785 - RNA, 18 nt, Homo sapiens
  source 1..18: mol_type = genomic RNA
agagcttagacaagtgtt

SEQ ID NO: 9786 - RNA, 18 nt, Homo sapiens
  source 1..18: mol_type = genomic RNA
gagcttagacaagtgtta

SEQ ID NO: 9787 - RNA, 18 nt, Homo sapiens
  source 1..18: mol_type = genomic RNA
agcttagacaagtgttac

SEQ ID NO: 9788 - RNA, 18 nt, Homo sapiens
  source 1..18: mol_type = genomic RNA
gcttagacaagtgttaca

SEQ ID NO: 9789 - RNA, 18 nt, Homo sapiens
  source 1..18: mol_type = genomic RNA
agacaagtgttacatcac

SEQ ID NO: 9790 - RNA, 18 nt, Homo sapiens
  source 1..18: mol_type = genomic RNA
gacaagtgttacatcacc

SEQ ID NO: 9791 - RNA, 18 nt, Homo sapiens
  source 1..18: mol_type = genomic RNA
acaagtgttacatcacct

SEQ ID NO: 9792 - RNA, 18 nt, Homo sapiens
  source 1..18: mol_type = genomic RNA
caagtgttacatcacctg

SEQ ID NO: 9793 - RNA, 18 nt, Homo sapiens
  source 1..18: mol_type = genomic RNA
aagtgttacatcacctgg

SEQ ID NO: 9794 - RNA, 18 nt, Homo sapiens
  source 1..18: mol_type = genomic RNA
agtgttacatcacctggg

SEQ ID NO: 9795 - RNA, 18 nt, Homo sapiens
  source 1..18: mol_type = genomic RNA
gtgttacatcacctgggt

SEQ ID NO: 9796 - RNA, 18 nt, Homo sapiens
  source 1..18: mol_type = genomic RNA
tgttacatcacctgggtg

SEQ ID NO: 9797 - RNA, 18 nt, Homo sapiens
  source 1..18: mol_type = genomic RNA
gttacatcacctgggtga

SEQ ID NO: 9798 - RNA, 18 nt, Homo sapiens
  source 1..18: mol_type = genomic RNA
ttacatcacctgggtgat

SEQ ID NO: 9799 - RNA, 18 nt, Homo sapiens
  source 1..18: mol_type = genomic RNA
tacatcacctgggtgatc

SEQ ID NO: 9800 - RNA, 18 nt, Homo sapiens
  source 1..18: mol_type = genomic RNA
acatcacctgggtgatca

SEQ ID NO: 9801 - RNA, 18 nt, Homo sapiens
  source 1..18: mol_type = genomic RNA
catcacctgggtgatcag

SEQ ID NO: 9802 - RNA, 18 nt, Homo sapiens
  source 1..18: mol_type = genomic RNA
atcacctgggtgatcagt

SEQ ID NO: 9803 - RNA, 18 nt, Homo sapiens
  source 1..18: mol_type = genomic RNA
tcacctgggtgatcagtg

SEQ ID NO: 9804 - RNA, 18 nt, Homo sapiens
  source 1..18: mol_type = genomic RNA
cacctgggtgatcagtgc

SEQ ID NO: 9805 - RNA, 18 nt, Homo sapiens
  source 1..18: mol_type = genomic RNA
acctgggtgatcagtgca

SEQ ID NO: 9806 - RNA, 18 nt, Homo sapiens
  source 1..18: mol_type = genomic RNA
cctgggtgatcagtgcag

SEQ ID NO: 9807 - RNA, 18 nt, Homo sapiens
  source 1..18: mol_type = genomic RNA
ctgggtgatcagtgcaga

SEQ ID NO: 9808 - RNA, 18 nt, Homo sapiens
  source 1..18: mol_type = genomic RNA
tgggtgatcagtgcagag

SEQ ID NO: 9809 - RNA, 18 nt, Homo sapiens
  source 1..18: mol_type = genomic RNA
gggtgatcagtgcagaga

SEQ ID NO: 9810 - RNA, 18 nt, Homo sapiens
  source 1..18: mol_type = genomic RNA
ggtgatcagtgcagagat

SEQ ID NO: 9811 - RNA, 18 nt, Homo sapiens
  source 1..18: mol_type = genomic RNA
gtgatcagtgcagagatg

SEQ ID NO: 9812 - RNA, 18 nt, Homo sapiens
  source 1..18: mol_type = genomic RNA
tgatcagtgcagagatgt

SEQ ID NO: 9813 - RNA, 18 nt, Homo sapiens
  source 1..18: mol_type = genomic RNA
gatcagtgcagagatgtg

SEQ ID NO: 9814 - RNA, 18 nt, Homo sapiens
  source 1..18: mol_type = genomic RNA
atcagtgcagagatgtgt

SEQ ID NO: 9815 - RNA, 18 nt, Homo sapiens
  source 1..18: mol_type = genomic RNA
tcagtgcagagatgtgtc

SEQ ID NO: 9816 - RNA, 18 nt, Homo sapiens
  source 1..18: mol_type = genomic RNA
cagtgcagagatgtgtca

SEQ ID NO: 9817 - RNA, 18 nt, Homo sapiens
  source 1..18: mol_type = genomic RNA
tgtcaaaacgctcctgta

SEQ ID NO: 9818 - RNA, 18 nt, Homo sapiens
  source 1..18: mol_type = genomic RNA
gtcaaaacgctcctgtag

SEQ ID NO: 9819 - RNA, 18 nt, Homo sapiens
  source 1..18: mol_type = genomic RNA
tcaaaacgctcctgtagt

SEQ ID NO: 9820 - RNA, 18 nt, Homo sapiens
  source 1..18: mol_type = genomic RNA
caaaacgctcctgtagtc

SEQ ID NO: 9821 - RNA, 18 nt, Homo sapiens
  source 1..18: mol_type = genomic RNA
aaaacgctcctgtagtct

SEQ ID NO: 9822 - RNA, 18 nt, Homo sapiens
  source 1..18: mol_type = genomic RNA
aaacgctcctgtagtctg

SEQ ID NO: 9823 - RNA, 18 nt, Homo sapiens
  source 1..18: mol_type = genomic RNA
aacgctcctgtagtctga

SEQ ID NO: 9824 - RNA, 18 nt, Homo sapiens
  source 1..18: mol_type = genomic RNA
acgctcctgtagtctgaa

SEQ ID NO: 9825 - RNA, 18 nt, Homo sapiens
  source 1..18: mol_type = genomic RNA
cgctcctgtagtctgaac

SEQ ID NO: 9826 - RNA, 18 nt, Homo sapiens
  source 1..18: mol_type = genomic RNA
gctcctgtagtctgaacc

SEQ ID NO: 9827 - RNA, 18 nt, Homo sapiens
  source 1..18: mol_type = genomic RNA
ctcctgtagtctgaacct

SEQ ID NO: 9828 - RNA, 18 nt, Homo sapiens
  source 1..18: mol_type = genomic RNA
tcctgtagtctgaaccta

SEQ ID NO: 9829 - RNA, 18 nt, Homo sapiens
  source 1..18: mol_type = genomic RNA
cctgtagtctgaacctag

SEQ ID NO: 9830 - RNA, 18 nt, Homo sapiens
  source 1..18: mol_type = genomic RNA
ctgtagtctgaacctaga

SEQ ID NO: 9831 - RNA, 18 nt, Homo sapiens
  source 1..18: mol_type = genomic RNA
tgtagtctgaacctagac

SEQ ID NO: 9832 - RNA, 18 nt, Homo sapiens
  source 1..18: mol_type = genomic RNA
gtagtctgaacctagaca

SEQ ID NO: 9833 - RNA, 18 nt, Homo sapiens
  source 1..18: mol_type = genomic RNA
tagtctgaacctagacag

SEQ ID NO: 9834 - RNA, 18 nt, Homo sapiens
  source 1..18: mol_type = genomic RNA
agtctgaacctagacagg

SEQ ID NO: 9835 - RNA, 18 nt, Homo sapiens
  source 1..18: mol_type = genomic RNA
gtctgaacctagacagga

SEQ ID NO: 9836 - RNA, 18 nt, Homo sapiens
  source 1..18: mol_type = genomic RNA
tctgaacctagacaggag

SEQ ID NO: 9837 - RNA, 18 nt, Homo sapiens
  source 1..18: mol_type = genomic RNA
ctgaacctagacaggagt

SEQ ID NO: 9838 - RNA, 18 nt, Homo sapiens
  source 1..18: mol_type = genomic RNA
tgaacctagacaggagtt

SEQ ID NO: 9839 - RNA, 18 nt, Homo sapiens
  source 1..18: mol_type = genomic RNA
gaacctagacaggagtta

SEQ ID NO: 9840 - RNA, 18 nt, Homo sapiens
  source 1..18: mol_type = genomic RNA
aacctagacaggagttac

SEQ ID NO: 9841 - RNA, 18 nt, Homo sapiens
  source 1..18: mol_type = genomic RNA
acctagacaggagttaca

SEQ ID NO: 9842 - RNA, 18 nt, Homo sapiens
  source 1..18: mol_type = genomic RNA
cctagacaggagttacat

SEQ ID NO: 9843 - RNA, 18 nt, Homo sapiens
  source 1..18: mol_type = genomic RNA
ctagacaggagttacatc

SEQ ID NO: 9844 - RNA, 18 nt, Homo sapiens
  source 1..18: mol_type = genomic RNA
tagacaggagttacatca

SEQ ID NO: 9845 - RNA, 18 nt, Homo sapiens
  source 1..18: mol_type = genomic RNA
agacaggagttacatcac

SEQ ID NO: 9846 - RNA, 18 nt, Homo sapiens
  source 1..18: mol_type = genomic RNA
gacaggagttacatcacc

SEQ ID NO: 9847 - RNA, 18 nt, Homo sapiens
  source 1..18: mol_type = genomic RNA
acaggagttacatcacct

SEQ ID NO: 9848 - RNA, 18 nt, Homo sapiens
  source 1..18: mol_type = genomic RNA
caggagttacatcacctt

SEQ ID NO: 9849 - RNA, 18 nt, Homo sapiens
  source 1..18: mol_type = genomic RNA
aggagttacatcaccttg

SEQ ID NO: 9850 - RNA, 18 nt, Homo sapiens
  source 1..18: mol_type = genomic RNA
ggagttacatcaccttgg

SEQ ID NO: 9851 - RNA, 18 nt, Homo sapiens
  source 1..18: mol_type = genomic RNA
gagttacatcaccttggg

SEQ ID NO: 9852 - RNA, 18 nt, Homo sapiens
  source 1..18: mol_type = genomic RNA
agttacatcaccttgggg

SEQ ID NO: 9853 - RNA, 18 nt, Homo sapiens
  source 1..18: mol_type = genomic RNA
gttacatcaccttgggga

SEQ ID NO: 9854 - RNA, 18 nt, Homo sapiens
  source 1..18: mol_type = genomic RNA
ttacatcaccttggggat

SEQ ID NO: 9855 - RNA, 18 nt, Homo sapiens
  source 1..18: mol_type = genomic RNA
tacatcaccttggggatc

SEQ ID NO: 9856 - RNA, 18 nt, Homo sapiens
  source 1..18: mol_type = genomic RNA
acatcaccttggggatca

SEQ ID NO: 9857 - RNA, 18 nt, Homo sapiens
  source 1..18: mol_type = genomic RNA
catcaccttggggatcag

SEQ ID NO: 9858 - RNA, 18 nt, Homo sapiens
  source 1..18: mol_type = genomic RNA
atcaccttggggatcagt

SEQ ID NO: 9859 - RNA, 18 nt, Homo sapiens
  source 1..18: mol_type = genomic RNA
tcaccttggggatcagtg

SEQ ID NO: 9860 - RNA, 18 nt, Homo sapiens
  source 1..18: mol_type = genomic RNA
caccttggggatcagtgc

SEQ ID NO: 9861 - RNA, 18 nt, Homo sapiens
  source 1..18: mol_type = genomic RNA
accttggggatcagtgca

SEQ ID NO: 9862 - RNA, 18 nt, Homo sapiens
  source 1..18: mol_type = genomic RNA
ccttggggatcagtgcag

SEQ ID NO: 9863 - RNA, 18 nt, Homo sapiens
  source 1..18: mol_type = genomic RNA
cttggggatcagtgcaga

SEQ ID NO: 9864 - RNA, 18 nt, Homo sapiens
  source 1..18: mol_type = genomic RNA
ttggggatcagtgcagag

SEQ ID NO: 9865 - RNA, 18 nt, Homo sapiens
  source 1..18: mol_type = genomic RNA
tggggatcagtgcagaga

SEQ ID NO: 9866 - RNA, 18 nt, Homo sapiens
  source 1..18: mol_type = genomic RNA
ggggatcagtgcagagat

SEQ ID NO: 9867 - RNA, 18 nt, Homo sapiens
  source 1..18: mol_type = genomic RNA
gggatcagtgcagagata

SEQ ID NO: 9868 - RNA, 18 nt, Homo sapiens
  source 1..18: mol_type = genomic RNA
ggatcagtgcagagatac

SEQ ID NO: 9869 - RNA, 18 nt, Homo sapiens
  source 1..18: mol_type = genomic RNA
gatcagtgcagagatacg

SEQ ID NO: 9870 - RNA, 18 nt, Homo sapiens
  source 1..18: mol_type = genomic RNA
atcagtgcagagatacgt

SEQ ID NO: 9871 - RNA, 18 nt, Homo sapiens
  source 1..18: mol_type = genomic RNA
tcagtgcagagatacgtg

SEQ ID NO: 9872 - RNA, 18 nt, Homo sapiens
  source 1..18: mol_type = genomic RNA
cagtgcagagatacgtga

SEQ ID NO: 9873 - RNA, 18 nt, Homo sapiens
  source 1..18: mol_type = genomic RNA
agtgcagagatacgtgag

SEQ ID NO: 9874 - RNA, 18 nt, Homo sapiens
  source 1..18: mol_type = genomic RNA
gtgcagagatacgtgaga

SEQ ID NO: 9875 - RNA, 18 nt, Homo sapiens
  source 1..18: mol_type = genomic RNA
tgcagagatacgtgagaa

SEQ ID NO: 9876 - RNA, 18 nt, Homo sapiens
  source 1..18: mol_type = genomic RNA
gcagagatacgtgagaat

SEQ ID NO: 9877 - RNA, 18 nt, Homo sapiens
  source 1..18: mol_type = genomic RNA
cagagatacgtgagaatt

SEQ ID NO: 9878 - RNA, 18 nt, Homo sapiens
  source 1..18: mol_type = genomic RNA
agagatacgtgagaattc

SEQ ID NO: 9879 - RNA, 18 nt, Homo sapiens
  source 1..18: mol_type = genomic RNA
gagatacgtgagaattcc

SEQ ID NO: 9880 - RNA, 18 nt, Homo sapiens
  source 1..18: mol_type = genomic RNA
agatacgtgagaattccc

SEQ ID NO: 9881 - RNA, 18 nt, Homo sapiens
  source 1..18: mol_type = genomic RNA
gatacgtgagaattccct

SEQ ID NO: 9882 - RNA, 18 nt, Homo sapiens
  source 1..18: mol_type = genomic RNA
atacgtgagaattccctt

SEQ ID NO: 9883 - RNA, 18 nt, Homo sapiens
  source 1..18: mol_type = genomic RNA
tacgtgagaattcccttg

SEQ ID NO: 9884 - RNA, 18 nt, Homo sapiens
  source 1..18: mol_type = genomic RNA
acgtgagaattcccttgt

SEQ ID NO: 9885 - RNA, 18 nt, Homo sapiens
  source 1..18: mol_type = genomic RNA
gtgagaattcccttgtag

SEQ ID NO: 9886 - RNA, 18 nt, Homo sapiens
  source 1..18: mol_type = genomic RNA
tgagaattcccttgtagg

SEQ ID NO: 9887 - RNA, 18 nt, Homo sapiens
  source 1..18: mol_type = genomic RNA
gagaattcccttgtaggc

SEQ ID NO: 9888 - RNA, 18 nt, Homo sapiens
  source 1..18: mol_type = genomic RNA
agaattcccttgtaggca

SEQ ID NO: 9889 - RNA, 18 nt, Homo sapiens
  source 1..18: mol_type = genomic RNA
gaattcccttgtaggcag

SEQ ID NO: 9890 - RNA, 18 nt, Homo sapiens
  source 1..18: mol_type = genomic RNA
aattcccttgtaggcagg

SEQ ID NO: 9891 - RNA, 18 nt, Homo sapiens
  source 1..18: mol_type = genomic RNA
attcccttgtaggcaggg

SEQ ID NO: 9892 - RNA, 18 nt, Homo sapiens
  source 1..18: mol_type = genomic RNA
ttcccttgtaggcagggc

SEQ ID NO: 9893 - RNA, 18 nt, Homo sapiens
  source 1..18: mol_type = genomic RNA
cccttgtaggcagggcct

SEQ ID NO: 9894 - RNA, 18 nt, Homo sapiens
  source 1..18: mol_type = genomic RNA
ccttgtaggcagggccta

SEQ ID NO: 9895 - RNA, 18 nt, Homo sapiens
  source 1..18: mol_type = genomic RNA
cttgtaggcagggcctag

SEQ ID NO: 9896 - RNA, 18 nt, Homo sapiens
  source 1..18: mol_type = genomic RNA
ttgtaggcagggcctaga

SEQ ID NO: 9897 - RNA, 18 nt, Homo sapiens
  source 1..18: mol_type = genomic RNA
gcagggcctagacaagtg

SEQ ID NO: 9898 - RNA, 18 nt, Homo sapiens
  source 1..18: mol_type = genomic RNA
cagggcctagacaagtgt

SEQ ID NO: 9899 - RNA, 18 nt, Homo sapiens
  source 1..18: mol_type = genomic RNA
agggcctagacaagtgtt

SEQ ID NO: 9900 - RNA, 18 nt, Homo sapiens
  source 1..18: mol_type = genomic RNA
gggcctagacaagtgtta

SEQ ID NO: 9901 - RNA, 18 nt, Homo sapiens
  source 1..18: mol_type = genomic RNA
ggcctagacaagtgttac

SEQ ID NO: 9902 - RNA, 18 nt, Homo sapiens
  source 1..18: mol_type = genomic RNA
gcctagacaagtgttaca

SEQ ID NO: 9903 - RNA, 18 nt, Homo sapiens
  source 1..18: mol_type = genomic RNA
cctagacaagtgttacat

SEQ ID NO: 9904 - RNA, 18 nt, Homo sapiens
  source 1..18: mol_type = genomic RNA
aagtgttacatcacctag

SEQ ID NO: 9905 - RNA, 18 nt, Homo sapiens
  source 1..18: mol_type = genomic RNA
agtgttacatcacctagg

SEQ ID NO: 9906 - RNA, 18 nt, Homo sapiens
  source 1..18: mol_type = genomic RNA
gtgttacatcacctaggt

SEQ ID NO: 9907 - RNA, 18 nt, Homo sapiens
  source 1..18: mol_type = genomic RNA
tgttacatcacctaggtt

SEQ ID NO: 9908 - RNA, 18 nt, Homo sapiens
  source 1..18: mol_type = genomic RNA
tacatcacctaggttatc

SEQ ID NO: 9909 - RNA, 18 nt, Homo sapiens
  source 1..18: mol_type = genomic RNA
acatcacctaggttatca

SEQ ID NO: 9910 - RNA, 18 nt, Homo sapiens
  source 1..18: mol_type = genomic RNA
catcacctaggttatcag

SEQ ID NO: 9911 - RNA, 18 nt, Homo sapiens
  source 1..18: mol_type = genomic RNA
atcacctaggttatcagt

SEQ ID NO: 9912 - RNA, 18 nt, Homo sapiens
  source 1..18: mol_type = genomic RNA
tcacctaggttatcagtg

SEQ ID NO: 9913 - RNA, 18 nt, Homo sapiens
  source 1..18: mol_type = genomic RNA
cacctaggttatcagtgc

SEQ ID NO: 9914 - RNA, 18 nt, Homo sapiens
  source 1..18: mol_type = genomic RNA
acctaggttatcagtgca

SEQ ID NO: 9915 - RNA, 18 nt, Homo sapiens
  source 1..18: mol_type = genomic RNA
cctaggttatcagtgcag

SEQ ID NO: 9916 - RNA, 18 nt, Homo sapiens
  source 1..18: mol_type = genomic RNA
ctaggttatcagtgcaga

SEQ ID NO: 9917 - RNA, 18 nt, Homo sapiens
  source 1..18: mol_type = genomic RNA
taggttatcagtgcagag

SEQ ID NO: 9918 - RNA, 18 nt, Homo sapiens
  source 1..18: mol_type = genomic RNA
aggttatcagtgcagaga

SEQ ID NO: 9919 - RNA, 18 nt, Homo sapiens
  source 1..18: mol_type = genomic RNA
ggttatcagtgcagagat

SEQ ID NO: 9920 - RNA, 18 nt, Homo sapiens
  source 1..18: mol_type = genomic RNA
gttatcagtgcagagata

SEQ ID NO: 9921 - RNA, 18 nt, Homo sapiens
  source 1..18: mol_type = genomic RNA
tatcagtgcagagatatg

SEQ ID NO: 9922 - RNA, 18 nt, Homo sapiens
  source 1..18: mol_type = genomic RNA
atcagtgcagagatatgt

SEQ ID NO: 9923 - RNA, 18 nt, Homo sapiens
  source 1..18: mol_type = genomic RNA
tcagtgcagagatatgtg

SEQ ID NO: 9924 - RNA, 18 nt, Homo sapiens
  source 1..18: mol_type = genomic RNA
cagtgcagagatatgtga

SEQ ID NO: 9925 - RNA, 18 nt, Homo sapiens
  source 1..18: mol_type = genomic RNA
agtgcagagatatgtgag

SEQ ID NO: 9926 - RNA, 18 nt, Homo sapiens
  source 1..18: mol_type = genomic RNA
gtgcagagatatgtgaga

SEQ ID NO: 9927 - RNA, 18 nt, Homo sapiens
  source 1..18: mol_type = genomic RNA
tgcagagatatgtgagaa

SEQ ID NO: 9928 - RNA, 18 nt, Homo sapiens
  source 1..18: mol_type = genomic RNA
gcagagatatgtgagaat

SEQ ID NO: 9929 - RNA, 18 nt, Homo sapiens
  source 1..18: mol_type = genomic RNA
agagatatgtgagaattc

SEQ ID NO: 9930 - RNA, 18 nt, Homo sapiens
  source 1..18: mol_type = genomic RNA
gagatatgtgagaattcc

SEQ ID NO: 9931 - RNA, 18 nt, Homo sapiens
  source 1..18: mol_type = genomic RNA
agatatgtgagaattccc

SEQ ID NO: 9932 - RNA, 18 nt, Homo sapiens
  source 1..18: mol_type = genomic RNA
gatatgtgagaattcccg

SEQ ID NO: 9933 - RNA, 18 nt, Homo sapiens
  source 1..18: mol_type = genomic RNA
atatgtgagaattcccgt

SEQ ID NO: 9934 - RNA, 18 nt, Homo sapiens
  source 1..18: mol_type = genomic RNA
tatgtgagaattcccgtg

SEQ ID NO: 9935 - RNA, 18 nt, Homo sapiens
  source 1..18: mol_type = genomic RNA
atgtgagaattcccgtgt

SEQ ID NO: 9936 - RNA, 18 nt, Homo sapiens
  source 1..18: mol_type = genomic RNA
tgtgagaattcccgtgta

SEQ ID NO: 9937 - RNA, 18 nt, Homo sapiens
  source 1..18: mol_type = genomic RNA
gtgagaattcccgtgtag

SEQ ID NO: 9938 - RNA, 18 nt, Homo sapiens
  source 1..18: mol_type = genomic RNA
tgagaattcccgtgtagg

SEQ ID NO: 9939 - RNA, 18 nt, Homo sapiens
  source 1..18: mol_type = genomic RNA
gagaattcccgtgtaggc

SEQ ID NO: 9940 - RNA, 18 nt, Homo sapiens
  source 1..18: mol_type = genomic RNA
agaattcccgtgtaggca

SEQ ID NO: 9941 - RNA, 18 nt, Homo sapiens
  source 1..18: mol_type = genomic RNA
gaattcccgtgtaggcag

SEQ ID NO: 9942 - RNA, 18 nt, Homo sapiens
  source 1..18: mol_type = genomic RNA
aattcccgtgtaggcaga

SEQ ID NO: 9943 - RNA, 18 nt, Homo sapiens
  source 1..18: mol_type = genomic RNA
attcccgtgtaggcagag

SEQ ID NO: 9944 - RNA, 18 nt, Homo sapiens
  source 1..18: mol_type = genomic RNA
ttcccgtgtaggcagagc

SEQ ID NO: 9945 - RNA, 18 nt, Homo sapiens
  source 1..18: mol_type = genomic RNA
tcccgtgtaggcagagcc

SEQ ID NO: 9946 - RNA, 18 nt, Homo sapiens
  source 1..18: mol_type = genomic RNA
cccgtgtaggcagagcct

SEQ ID NO: 9947 - RNA, 18 nt, Homo sapiens
  source 1..18: mol_type = genomic RNA
ccgtgtaggcagagccta

SEQ ID NO: 9948 - RNA, 18 nt, Homo sapiens
  source 1..18: mol_type = genomic RNA
cgtgtaggcagagcctag

SEQ ID NO: 9949 - RNA, 18 nt, Homo sapiens
  source 1..18: mol_type = genomic RNA
gtgtaggcagagcctaga

SEQ ID NO: 9950 - RNA, 18 nt, Homo sapiens
  source 1..18: mol_type = genomic RNA
tgtaggcagagcctagac

SEQ ID NO: 9951 - RNA, 18 nt, Homo sapiens
  source 1..18: mol_type = genomic RNA
gtaggcagagcctagaca

SEQ ID NO: 9952 - RNA, 18 nt, Homo sapiens
  source 1..18: mol_type = genomic RNA
taggcagagcctagacaa

SEQ ID NO: 9953 - RNA, 18 nt, Homo sapiens
  source 1..18: mol_type = genomic RNA
aggcagagcctagacaag

SEQ ID NO: 9954 - RNA, 18 nt, Homo sapiens
  source 1..18: mol_type = genomic RNA
ggcagagcctagacaagt

SEQ ID NO: 9955 - RNA, 18 nt, Homo sapiens
  source 1..18: mol_type = genomic RNA
gcagagcctagacaagtg

SEQ ID NO: 9956 - RNA, 18 nt, Homo sapiens
  source 1..18: mol_type = genomic RNA
cagagcctagacaagtgt

SEQ ID NO: 9957 - RNA, 18 nt, Homo sapiens
  source 1..18: mol_type = genomic RNA
agagcctagacaagtgtt

SEQ ID NO: 9958 - RNA, 18 nt, Homo sapiens
  source 1..18: mol_type = genomic RNA
gagcctagacaagtgtta

SEQ ID NO: 9959 - RNA, 18 nt, Homo sapiens
  source 1..18: mol_type = genomic RNA
agcctagacaagtgttac

SEQ ID NO: 9960 - RNA, 18 nt, Homo sapiens
  source 1..18: mol_type = genomic RNA
agtgttacatcacctagt

SEQ ID NO: 9961 - RNA, 18 nt, Homo sapiens
  source 1..18: mol_type = genomic RNA
attagtcataaagcctcc

SEQ ID NO: 9962 - RNA, 18 nt, Homo sapiens
  source 1..18: mol_type = genomic RNA
ttagtcataaagcctcct

SEQ ID NO: 9963 - RNA, 18 nt, Homo sapiens
  source 1..18: mol_type = genomic RNA
tagtcataaagcctcctg

SEQ ID NO: 9964 - RNA, 18 nt, Homo sapiens
  source 1..18: mol_type = genomic RNA
cgtagacaagagttccct

SEQ ID NO: 9965 - RNA, 18 nt, Homo sapiens
  source 1..18: mol_type = genomic RNA
gtagacaagagttccctc

SEQ ID NO: 9966 - RNA, 18 nt, Homo sapiens
  source 1..18: mol_type = genomic RNA
tagacaagagttccctcc

SEQ ID NO: 9967 - RNA, 18 nt, Homo sapiens
  source 1..18: mol_type = genomic RNA
agacaagagttccctcct

SEQ ID NO: 9968 - RNA, 18 nt, Homo sapiens
  source 1..18: mol_type = genomic RNA
gacaagagttccctcctc

SEQ ID NO: 9969 - RNA, 18 nt, Homo sapiens
  source 1..18: mol_type = genomic RNA
acaagagttccctcctca

SEQ ID NO: 9970 - RNA, 18 nt, Homo sapiens
  source 1..18: mol_type = genomic RNA
caagagttccctcctcag

SEQ ID NO: 9971 - RNA, 18 nt, Homo sapiens
  source 1..18: mol_type = genomic RNA
aagagttccctcctcagg

SEQ ID NO: 9972 - RNA, 18 nt, Homo sapiens
  source 1..18: mol_type = genomic RNA
agagttccctcctcaggg

SEQ ID NO: 9973 - RNA, 18 nt, Homo sapiens
  source 1..18: mol_type = genomic RNA
gagttccctcctcagggt

SEQ ID NO: 9974 - RNA, 18 nt, Homo sapiens
  source 1..18: mol_type = genomic RNA
agttccctcctcagggtg

SEQ ID NO: 9975 - RNA, 18 nt, Homo sapiens
  source 1..18: mol_type = genomic RNA
gttccctcctcagggtga

SEQ ID NO: 9976 - RNA, 18 nt, Homo sapiens
  source 1..18: mol_type = genomic RNA
ttccctcctcagggtgat

SEQ ID NO: 9977 - RNA, 18 nt, Homo sapiens
  source 1..18: mol_type = genomic RNA
tccctcctcagggtgatc

SEQ ID NO: 9978 - RNA, 18 nt, Homo sapiens
  source 1..18: mol_type = genomic RNA
ccctcctcagggtgatca

SEQ ID NO: 9979 - RNA, 18 nt, Homo sapiens
  source 1..18: mol_type = genomic RNA
cctcctcagggtgatcag

SEQ ID NO: 9980 - RNA, 18 nt, Homo sapiens
  source 1..18: mol_type = genomic RNA
ctcctcagggtgatcagt

SEQ ID NO: 9981 - RNA, 18 nt, Homo sapiens
  source 1..18: mol_type = genomic RNA
tcctcagggtgatcagtg

SEQ ID NO: 9982 - RNA, 18 nt, Homo sapiens
  source 1..18: mol_type = genomic RNA
cctcagggtgatcagtgc

SEQ ID NO: 9983 - RNA, 18 nt, Homo sapiens
  source 1..18: mol_type = genomic RNA
ctcagggtgatcagtgca

SEQ ID NO: 9984 - RNA, 18 nt, Homo sapiens
  source 1..18: mol_type = genomic RNA
tcagggtgatcagtgcag

SEQ ID NO: 9985 - RNA, 18 nt, Homo sapiens
  source 1..18: mol_type = genomic RNA
cagggtgatcagtgcaga

SEQ ID NO: 9986 - RNA, 18 nt, Homo sapiens
  source 1..18: mol_type = genomic RNA
agggtgatcagtgcagag

SEQ ID NO: 9987 - RNA, 18 nt, Homo sapiens
  source 1..18: mol_type = genomic RNA
agtgcagagatgtgtcac

SEQ ID NO: 9988 - RNA, 18 nt, Homo sapiens
  source 1..18: mol_type = genomic RNA
gtgcagagatgtgtcaca

SEQ ID NO: 9989 - RNA, 18 nt, Homo sapiens
  source 1..18: mol_type = genomic RNA
tgcagagatgtgtcacaa

SEQ ID NO: 9990 - RNA, 18 nt, Homo sapiens
  source 1..18: mol_type = genomic RNA
gcagagatgtgtcacaaa

SEQ ID NO: 9991 - RNA, 18 nt, Homo sapiens
  source 1..18: mol_type = genomic RNA
cagagatgtgtcacaaag

SEQ ID NO: 9992 - RNA, 18 nt, Homo sapiens
  source 1..18: mol_type = genomic RNA
agagatgtgtcacaaagc

SEQ ID NO: 9993 - RNA, 18 nt, Homo sapiens
  source 1..18: mol_type = genomic RNA
gagatgtgtcacaaagcc

SEQ ID NO: 9994 - RNA, 18 nt, Homo sapiens
  source 1..18: mol_type = genomic RNA
agatgtgtcacaaagccc

SEQ ID NO: 9995 - RNA, 18 nt, Homo sapiens
  source 1..18: mol_type = genomic RNA
gatgtgtcacaaagcccc

SEQ ID NO: 9996 - RNA, 18 nt, Homo sapiens
  source 1..18: mol_type = genomic RNA
atgtgtcacaaagcccct

SEQ ID NO: 9997 - RNA, 18 nt, Homo sapiens
  source 1..18: mol_type = genomic RNA
tgtgtcacaaagcccctg

SEQ ID NO: 9998 - RNA, 18 nt, Homo sapiens
  source 1..18: mol_type = genomic RNA
gtgtcacaaagcccctgt

SEQ ID NO: 9999 - RNA, 18 nt, Homo sapiens
  source 1..18: mol_type = genomic RNA
tgtcacaaagcccctgta

SEQ ID NO: 10000 - RNA, 18 nt, Homo sapiens
  source 1..18: mol_type = genomic RNA
gtcacaaagcccctgtag

SEQ ID NO: 10001 - RNA, 18 nt, Homo sapiens
  source 1..18: mol_type = genomic RNA
tcacaaagcccctgtagg

SEQ ID NO: 10002 - RNA, 18 nt, Homo sapiens
  source 1..18: mol_type = genomic RNA
cacaaagcccctgtaggc

SEQ ID NO: 10003 - RNA, 18 nt, Homo sapiens
  source 1..18: mol_type = genomic RNA
acaaagcccctgtaggca

SEQ ID NO: 10004 - RNA, 18 nt, Homo sapiens
  source 1..18: mol_type = genomic RNA
caaagcccctgtaggcag

SEQ ID NO: 10005 - RNA, 18 nt, Homo sapiens
  source 1..18: mol_type = genomic RNA
aaagcccctgtaggcaga

SEQ ID NO: 10006 - RNA, 18 nt, Homo sapiens
  source 1..18: mol_type = genomic RNA
ccctgtaggcagagccta

SEQ ID NO: 10007 - RNA, 18 nt, Homo sapiens
  source 1..18: mol_type = genomic RNA
cctgtaggcagagcctag

SEQ ID NO: 10008 - RNA, 18 nt, Homo sapiens
  source 1..18: mol_type = genomic RNA
ctgtaggcagagcctaga

SEQ ID NO: 10009 - RNA, 18 nt, Homo sapiens
  source 1..18: mol_type = genomic RNA
ggcagagcctagacaaga

SEQ ID NO: 10010 - RNA, 18 nt, Homo sapiens
  source 1..18: mol_type = genomic RNA
gcagagcctagacaagag

SEQ ID NO: 10011 - RNA, 18 nt, Homo sapiens
  source 1..18: mol_type = genomic RNA
cagagcctagacaagagt

SEQ ID NO: 10012 - RNA, 18 nt, Homo sapiens
  source 1..18: mol_type = genomic RNA
agagcctagacaagagtt

SEQ ID NO: 10013 - RNA, 18 nt, Homo sapiens
  source 1..18: mol_type = genomic RNA
gagcctagacaagagttt

SEQ ID NO: 10014 - RNA, 18 nt, Homo sapiens
  source 1..18: mol_type = genomic RNA
agcctagacaagagtttc

SEQ ID NO: 10015 - RNA, 18 nt, Homo sapiens
  source 1..18: mol_type = genomic RNA
gcctagacaagagtttca

SEQ ID NO: 10016 - RNA, 18 nt, Homo sapiens
  source 1..18: mol_type = genomic RNA
agacaagagtttcatcac

SEQ ID NO: 10017 - RNA, 18 nt, Homo sapiens
  source 1..18: mol_type = genomic RNA
atcacttggttgatcagt

SEQ ID NO: 10018 - RNA, 18 nt, Homo sapiens
  source 1..18: mol_type = genomic RNA
tggttgatcagttcagag

SEQ ID NO: 10019 - RNA, 18 nt, Homo sapiens
  source 1..18: mol_type = genomic RNA
ggttgatcagttcagaga

SEQ ID NO: 10020 - RNA, 18 nt, Homo sapiens
  source 1..18: mol_type = genomic RNA
tgatcagttcagagatgt

SEQ ID NO: 10021 - RNA, 18 nt, Homo sapiens
  source 1..18: mol_type = genomic RNA
gatcagttcagagatgtg

SEQ ID NO: 10022 - RNA, 18 nt, Homo sapiens
  source 1..18: mol_type = genomic RNA
atcagttcagagatgtgt

SEQ ID NO: 10023 - RNA, 18 nt, Homo sapiens
  source 1..18: mol_type = genomic RNA
tcagttcagagatgtgtc

SEQ ID NO: 10024 - RNA, 18 nt, Homo sapiens
  source 1..18: mol_type = genomic RNA
cagttcagagatgtgtca

SEQ ID NO: 10025 - RNA, 18 nt, Homo sapiens
  source 1..18: mol_type = genomic RNA
agttcagagatgtgtcag

SEQ ID NO: 10026 - RNA, 18 nt, Homo sapiens
  source 1..18: mol_type = genomic RNA
gttcagagatgtgtcaga

SEQ ID NO: 10027 - RNA, 18 nt, Homo sapiens
  source 1..18: mol_type = genomic RNA
ttcagagatgtgtcagaa

SEQ ID NO: 10028 - RNA, 18 nt, Homo sapiens
  source 1..18: mol_type = genomic RNA
tcagagatgtgtcagaat

SEQ ID NO: 10029 - RNA, 18 nt, Homo sapiens
  source 1..18: mol_type = genomic RNA
cagagatgtgtcagaatg

SEQ ID NO: 10030 - RNA, 18 nt, Homo sapiens
  source 1..18: mol_type = genomic RNA
agagatgtgtcagaatgc

SEQ ID NO: 10031 - RNA, 18 nt, Homo sapiens
  source 1..18: mol_type = genomic RNA
gagatgtgtcagaatgcc

SEQ ID NO: 10032 - RNA, 18 nt, Homo sapiens
  source 1..18: mol_type = genomic RNA
agatgtgtcagaatgccc

SEQ ID NO: 10033 - RNA, 18 nt, Homo sapiens
  source 1..18: mol_type = genomic RNA
gatgtgtcagaatgccca

SEQ ID NO: 10034 - RNA, 18 nt, Homo sapiens
  source 1..18: mol_type = genomic RNA
atgtgtcagaatgcccat

SEQ ID NO: 10035 - RNA, 18 nt, Homo sapiens
  source 1..18: mol_type = genomic RNA
tgtgtcagaatgcccatg

SEQ ID NO: 10036 - RNA, 18 nt, Homo sapiens
  source 1..18: mol_type = genomic RNA
gtgtcagaatgcccatgt

SEQ ID NO: 10037 - RNA, 18 nt, Homo sapiens
  source 1..18: mol_type = genomic RNA
tgtcagaatgcccatgta

SEQ ID NO: 10038 - RNA, 18 nt, Homo sapiens
  source 1..18: mol_type = genomic RNA
gtcagaatgcccatgtag

SEQ ID NO: 10039 - RNA, 18 nt, Homo sapiens
  source 1..18: mol_type = genomic RNA
tcagaatgcccatgtagg

SEQ ID NO: 10040 - RNA, 18 nt, Homo sapiens
  source 1..18: mol_type = genomic RNA
cagaatgcccatgtaggc

SEQ ID NO: 10041 - RNA, 18 nt, Homo sapiens
  source 1..18: mol_type = genomic RNA
agaatgcccatgtaggca

SEQ ID NO: 10042 - RNA, 18 nt, Homo sapiens
  source 1..18: mol_type = genomic RNA
gaatgcccatgtaggcag

SEQ ID NO: 10043 - RNA, 18 nt, Homo sapiens
  source 1..18: mol_type = genomic RNA
aatgcccatgtaggcaga

SEQ ID NO: 10044 - RNA, 18 nt, Homo sapiens
  source 1..18: mol_type = genomic RNA
atgcccatgtaggcagat

SEQ ID NO: 10045 - RNA, 18 nt, Homo sapiens
  source 1..18: mol_type = genomic RNA
tgcccatgtaggcagatc

SEQ ID NO: 10046 - RNA, 18 nt, Homo sapiens
  source 1..18: mol_type = genomic RNA
gcccatgtaggcagatct

SEQ ID NO: 10047 - RNA, 18 nt, Homo sapiens
  source 1..18: mol_type = genomic RNA
cccatgtaggcagatcta

SEQ ID NO: 10048 - RNA, 18 nt, Homo sapiens
  source 1..18: mol_type = genomic RNA
ccatgtaggcagatctaa

SEQ ID NO: 10049 - RNA, 18 nt, Homo sapiens
  source 1..18: mol_type = genomic RNA
catgtaggcagatctaag

SEQ ID NO: 10050 - RNA, 18 nt, Homo sapiens
  source 1..18: mol_type = genomic RNA
atgtaggcagatctaaga

SEQ ID NO: 10051 - RNA, 18 nt, Homo sapiens
  source 1..18: mol_type = genomic RNA
tgtaggcagatctaagac

SEQ ID NO: 10052 - RNA, 18 nt, Homo sapiens
  source 1..18: mol_type = genomic RNA
gtaggcagatctaagaca

SEQ ID NO: 10053 - RNA, 18 nt, Homo sapiens
  source 1..18: mol_type = genomic RNA
taggcagatctaagacaa

SEQ ID NO: 10054 - RNA, 18 nt, Homo sapiens
  source 1..18: mol_type = genomic RNA
aggcagatctaagacaag

SEQ ID NO: 10055 - RNA, 18 nt, Homo sapiens
  source 1..18: mol_type = genomic RNA
ggcagatctaagacaagc

SEQ ID NO: 10056 - RNA, 18 nt, Homo sapiens
  source 1..18: mol_type = genomic RNA
gcagatctaagacaagcg

SEQ ID NO: 10057 - RNA, 18 nt, Homo sapiens
  source 1..18: mol_type = genomic RNA
cagatctaagacaagcgt

SEQ ID NO: 10058 - RNA, 18 nt, Homo sapiens
  source 1..18: mol_type = genomic RNA
agatctaagacaagcgtc

SEQ ID NO: 10059 - RNA, 18 nt, Homo sapiens
  source 1..18: mol_type = genomic RNA
gatctaagacaagcgtcc

SEQ ID NO: 10060 - RNA, 18 nt, Homo sapiens
  source 1..18: mol_type = genomic RNA
atctaagacaagcgtcca

SEQ ID NO: 10061 - RNA, 18 nt, Homo sapiens
  source 1..18: mol_type = genomic RNA
tctaagacaagcgtccat

SEQ ID NO: 10062 - RNA, 18 nt, Homo sapiens
  source 1..18: mol_type = genomic RNA
ctaagacaagcgtccatc

SEQ ID NO: 10063 - RNA, 18 nt, Homo sapiens
  source 1..18: mol_type = genomic RNA
taagacaagcgtccatca

SEQ ID NO: 10064 - RNA, 18 nt, Homo sapiens
  source 1..18: mol_type = genomic RNA
aagacaagcgtccatcac

SEQ ID NO: 10065 - RNA, 18 nt, Homo sapiens
  source 1..18: mol_type = genomic RNA
agacaagcgtccatcacc

SEQ ID NO: 10066 - RNA, 18 nt, Homo sapiens
  source 1..18: mol_type = genomic RNA
gacaagcgtccatcacct

SEQ ID NO: 10067 - RNA, 18 nt, Homo sapiens
  source 1..18: mol_type = genomic RNA
acaagcgtccatcacctg

SEQ ID NO: 10068 - RNA, 18 nt, Homo sapiens
  source 1..18: mol_type = genomic RNA
caagcgtccatcacctgg

SEQ ID NO: 10069 - RNA, 18 nt, Homo sapiens
  source 1..18: mol_type = genomic RNA
aagcgtccatcacctggg

SEQ ID NO: 10070 - RNA, 18 nt, Homo sapiens
  source 1..18: mol_type = genomic RNA
agcgtccatcacctgggt

SEQ ID NO: 10071 - RNA, 18 nt, Homo sapiens
  source 1..18: mol_type = genomic RNA
gcgtccatcacctgggtg

SEQ ID NO: 10072 - RNA, 18 nt, Homo sapiens
  source 1..18: mol_type = genomic RNA
cgtccatcacctgggtga

SEQ ID NO: 10073 - RNA, 18 nt, Homo sapiens
  source 1..18: mol_type = genomic RNA
gtccatcacctgggtgat

SEQ ID NO: 10074 - RNA, 18 nt, Homo sapiens
  source 1..18: mol_type = genomic RNA
tccatcacctgggtgatc

SEQ ID NO: 10075 - RNA, 18 nt, Homo sapiens
  source 1..18: mol_type = genomic RNA
ccatcacctgggtgatca

SEQ ID NO: 10076 - RNA, 18 nt, Homo sapiens
  source 1..18: mol_type = genomic RNA
gtgatcagtgcagagata

SEQ ID NO: 10077 - RNA, 18 nt, Homo sapiens
  source 1..18: mol_type = genomic RNA
gatcagtgcagagatatg

SEQ ID NO: 10078 - RNA, 18 nt, Homo sapiens
  source 1..18: mol_type = genomic RNA
tcagtgcagagatatgta

SEQ ID NO: 10079 - RNA, 18 nt, Homo sapiens
  source 1..18: mol_type = genomic RNA
cagtgcagagatatgtac

SEQ ID NO: 10080 - RNA, 18 nt, Homo sapiens
  source 1..18: mol_type = genomic RNA
agtgcagagatatgtacc

SEQ ID NO: 10081 - RNA, 18 nt, Homo sapiens
  source 1..18: mol_type = genomic RNA
gtgcagagatatgtacca

SEQ ID NO: 10082 - RNA, 18 nt, Homo sapiens
  source 1..18: mol_type = genomic RNA
tgcagagatatgtaccag

SEQ ID NO: 10083 - RNA, 18 nt, Homo sapiens
  source 1..18: mol_type = genomic RNA
gcagagatatgtaccagt

SEQ ID NO: 10084 - RNA, 18 nt, Homo sapiens
  source 1..18: mol_type = genomic RNA
cagagatatgtaccagtg

SEQ ID NO: 10085 - RNA, 18 nt, Homo sapiens
  source 1..18: mol_type = genomic RNA
agagatatgtaccagtgt

SEQ ID NO: 10086 - RNA, 18 nt, Homo sapiens
  source 1..18: mol_type = genomic RNA
gagatatgtaccagtgtc

SEQ ID NO: 10087 - RNA, 18 nt, Homo sapiens
  source 1..18: mol_type = genomic RNA
agatatgtaccagtgtcc

SEQ ID NO: 10088 - RNA, 18 nt, Homo sapiens
  source 1..18: mol_type = genomic RNA
gatatgtaccagtgtccc

SEQ ID NO: 10089 - RNA, 18 nt, Homo sapiens
  source 1..18: mol_type = genomic RNA
atatgtaccagtgtcccc

SEQ ID NO: 10090 - RNA, 18 nt, Homo sapiens
  source 1..18: mol_type = genomic RNA
tatgtaccagtgtcccct

SEQ ID NO: 10091 - RNA, 18 nt, Homo sapiens
  source 1..18: mol_type = genomic RNA
atgtaccagtgtcccctg

SEQ ID NO: 10092 - RNA, 18 nt, Homo sapiens
  source 1..18: mol_type = genomic RNA
tgtaccagtgtcccctgt

SEQ ID NO: 10093 - RNA, 18 nt, Homo sapiens
  source 1..18: mol_type = genomic RNA
gtaccagtgtcccctgta

SEQ ID NO: 10094 - RNA, 18 nt, Homo sapiens
  source 1..18: mol_type = genomic RNA
taccagtgtcccctgtag

SEQ ID NO: 10095 - RNA, 18 nt, Homo sapiens
  source 1..18: mol_type = genomic RNA
accagtgtcccctgtagg

SEQ ID NO: 10096 - RNA, 18 nt, Homo sapiens
  source 1..18: mol_type = genomic RNA
ccagtgtcccctgtaggc

SEQ ID NO: 10097 - RNA, 18 nt, Homo sapiens
  source 1..18: mol_type = genomic RNA
cagtgtcccctgtaggca

SEQ ID NO: 10098 - RNA, 18 nt, Homo sapiens
  source 1..18: mol_type = genomic RNA
agtgtcccctgtaggcag

SEQ ID NO: 10099 - RNA, 18 nt, Homo sapiens
  source 1..18: mol_type = genomic RNA
gtgtcccctgtaggcagt

SEQ ID NO: 10100 - RNA, 18 nt, Homo sapiens
  source 1..18: mol_type = genomic RNA
tgtcccctgtaggcagtg

SEQ ID NO: 10101 - RNA, 18 nt, Homo sapiens
  source 1..18: mol_type = genomic RNA
gtcccctgtaggcagtgc

SEQ ID NO: 10102 - RNA, 18 nt, Homo sapiens
  source 1..18: mol_type = genomic RNA
cccctgtaggcagtgcct

SEQ ID NO: 10103 - RNA, 18 nt, Homo sapiens
  source 1..18: mol_type = genomic RNA
ccctgtaggcagtgccta

SEQ ID NO: 10104 - RNA, 18 nt, Homo sapiens
  source 1..18: mol_type = genomic RNA
cctgtaggcagtgcctag

SEQ ID NO: 10105 - RNA, 18 nt, Homo sapiens
  source 1..18: mol_type = genomic RNA
ctgtaggcagtgcctaga

SEQ ID NO: 10106 - RNA, 18 nt, Homo sapiens
  source 1..18: mol_type = genomic RNA
tgtaggcagtgcctagac

SEQ ID NO: 10107 - RNA, 18 nt, Homo sapiens
  source 1..18: mol_type = genomic RNA
gtaggcagtgcctagaca

SEQ ID NO: 10108 - RNA, 18 nt, Homo sapiens
  source 1..18: mol_type = genomic RNA
taggcagtgcctagacaa

SEQ ID NO: 10109 - RNA, 18 nt, Homo sapiens
  source 1..18: mol_type = genomic RNA
aggcagtgcctagacaag

SEQ ID NO: 10110 - RNA, 18 nt, Homo sapiens
  source 1..18: mol_type = genomic RNA
ggcagtgcctagacaaga

SEQ ID NO: 10111 - RNA, 18 nt, Homo sapiens
  source 1..18: mol_type = genomic RNA
gcagtgcctagacaagag

SEQ ID NO: 10112 - RNA, 18 nt, Homo sapiens
  source 1..18: mol_type = genomic RNA
cagtgcctagacaagagt

SEQ ID NO: 10113 - RNA, 18 nt, Homo sapiens
  source 1..18: mol_type = genomic RNA
agtgcctagacaagagtt

SEQ ID NO: 10114 - RNA, 18 nt, Homo sapiens
  source 1..18: mol_type = genomic RNA
gtgcctagacaagagttg

SEQ ID NO: 10115 - RNA, 18 nt, Homo sapiens
  source 1..18: mol_type = genomic RNA
tgcctagacaagagttga

SEQ ID NO: 10116 - RNA, 18 nt, Homo sapiens
  source 1..18: mol_type = genomic RNA
gcctagacaagagttgaa

SEQ ID NO: 10117 - RNA, 18 nt, Homo sapiens
  source 1..18: mol_type = genomic RNA
cctagacaagagttgaat

SEQ ID NO: 10118 - RNA, 18 nt, Homo sapiens
  source 1..18: mol_type = genomic RNA
ctagacaagagttgaatc

SEQ ID NO: 10119 - RNA, 18 nt, Homo sapiens
  source 1..18: mol_type = genomic RNA
tagacaagagttgaatca

SEQ ID NO: 10120 - RNA, 18 nt, Homo sapiens
  source 1..18: mol_type = genomic RNA
agacaagagttgaatcac

SEQ ID NO: 10121 - RNA, 18 nt, Homo sapiens
  source 1..18: mol_type = genomic RNA
gacaagagttgaatcacc

SEQ ID NO: 10122 - RNA, 18 nt, Homo sapiens
  source 1..18: mol_type = genomic RNA
acaagagttgaatcacct

SEQ ID NO: 10123 - RNA, 18 nt, Homo sapiens
  source 1..18: mol_type = genomic RNA
caagagttgaatcacctc

SEQ ID NO: 10124 - RNA, 18 nt, Homo sapiens
  source 1..18: mol_type = genomic RNA
aagagttgaatcacctca

SEQ ID NO: 10125 - RNA, 18 nt, Homo sapiens
  source 1..18: mol_type = genomic RNA
agagttgaatcacctcag

SEQ ID NO: 10126 - RNA, 18 nt, Homo sapiens
  source 1..18: mol_type = genomic RNA
gagttgaatcacctcaga

SEQ ID NO: 10127 - RNA, 18 nt, Homo sapiens
  source 1..18: mol_type = genomic RNA
agttgaatcacctcagag

SEQ ID NO: 10128 - RNA, 18 nt, Homo sapiens
  source 1..18: mol_type = genomic RNA
gttgaatcacctcagaga

SEQ ID NO: 10129 - RNA, 18 nt, Homo sapiens
  source 1..18: mol_type = genomic RNA
ttgaatcacctcagagat

SEQ ID NO: 10130 - RNA, 18 nt, Homo sapiens
  source 1..18: mol_type = genomic RNA
tgaatcacctcagagatc

SEQ ID NO: 10131 - RNA, 18 nt, Homo sapiens
  source 1..18: mol_type = genomic RNA
gaatcacctcagagatca

SEQ ID NO: 10132 - RNA, 18 nt, Homo sapiens
  source 1..18: mol_type = genomic RNA
aatcacctcagagatcag

SEQ ID NO: 10133 - RNA, 18 nt, Homo sapiens
  source 1..18: mol_type = genomic RNA
atcacctcagagatcagt

SEQ ID NO: 10134 - RNA, 18 nt, Homo sapiens
  source 1..18: mol_type = genomic RNA
tcacctcagagatcagtg

SEQ ID NO: 10135 - RNA, 18 nt, Homo sapiens
  source 1..18: mol_type = genomic RNA
cacctcagagatcagtgc

SEQ ID NO: 10136 - RNA, 18 nt, Homo sapiens
  source 1..18: mol_type = genomic RNA
acctcagagatcagtgca

SEQ ID NO: 10137 - RNA, 18 nt, Homo sapiens
  source 1..18: mol_type = genomic RNA
cctcagagatcagtgcat

SEQ ID NO: 10138 - RNA, 18 nt, Homo sapiens
  source 1..18: mol_type = genomic RNA
ctcagagatcagtgcata

SEQ ID NO: 10139 - RNA, 18 nt, Homo sapiens
  source 1..18: mol_type = genomic RNA
tcagagatcagtgcatag

SEQ ID NO: 10140 - RNA, 18 nt, Homo sapiens
  source 1..18: mol_type = genomic RNA
cagagatcagtgcataga

SEQ ID NO: 10141 - RNA, 18 nt, Homo sapiens
  source 1..18: mol_type = genomic RNA
agagatcagtgcatagat

SEQ ID NO: 10142 - RNA, 18 nt, Homo sapiens
  source 1..18: mol_type = genomic RNA
gagatcagtgcatagata

SEQ ID NO: 10143 - RNA, 18 nt, Homo sapiens
  source 1..18: mol_type = genomic RNA
agatcagtgcatagatat

SEQ ID NO: 10144 - RNA, 18 nt, Homo sapiens
  source 1..18: mol_type = genomic RNA
gatcagtgcatagatatg

SEQ ID NO: 10145 - RNA, 18 nt, Homo sapiens
  source 1..18: mol_type = genomic RNA
atcagtgcatagatatgt

SEQ ID NO: 10146 - RNA, 18 nt, Homo sapiens
  source 1..18: mol_type = genomic RNA
tcagtgcatagatatgtc

SEQ ID NO: 10147 - RNA, 18 nt, Homo sapiens
  source 1..18: mol_type = genomic RNA
cagtgcatagatatgtca

SEQ ID NO: 10148 - RNA, 18 nt, Homo sapiens
  source 1..18: mol_type = genomic RNA
agtgcatagatatgtcac

SEQ ID NO: 10149 - RNA, 18 nt, Homo sapiens
  source 1..18: mol_type = genomic RNA
gtgcatagatatgtcaca

SEQ ID NO: 10150 - RNA, 18 nt, Homo sapiens
  source 1..18: mol_type = genomic RNA
tgcatagatatgtcacaa

SEQ ID NO: 10151 - RNA, 18 nt, Homo sapiens
  source 1..18: mol_type = genomic RNA
atagatatgtcacaaagc

SEQ ID NO: 10152 - RNA, 18 nt, Homo sapiens
  source 1..18: mol_type = genomic RNA
tagatatgtcacaaagcc

SEQ ID NO: 10153 - RNA, 18 nt, Homo sapiens
  source 1..18: mol_type = genomic RNA
agatatgtcacaaagcct

SEQ ID NO: 10154 - RNA, 18 nt, Homo sapiens
  source 1..18: mol_type = genomic RNA
gatatgtcacaaagcctt

SEQ ID NO: 10155 - RNA, 18 nt, Homo sapiens
  source 1..18: mol_type = genomic RNA
atatgtcacaaagccttc

SEQ ID NO: 10156 - RNA, 18 nt, Homo sapiens
  source 1..18: mol_type = genomic RNA
tatgtcacaaagccttct

SEQ ID NO: 10157 - RNA, 18 nt, Homo sapiens
  source 1..18: mol_type = genomic RNA
atgtcacaaagccttctg

SEQ ID NO: 10158 - RNA, 18 nt, Homo sapiens
  source 1..18: mol_type = genomic RNA
tgtcacaaagccttctgt

SEQ ID NO: 10159 - RNA, 18 nt, Homo sapiens
  source 1..18: mol_type = genomic RNA
gtcacaaagccttctgta

SEQ ID NO: 10160 - RNA, 18 nt, Homo sapiens
  source 1..18: mol_type = genomic RNA
tcacaaagccttctgtag

SEQ ID NO: 10161 - RNA, 18 nt, Homo sapiens
  source 1..18: mol_type = genomic RNA
cacaaagccttctgtagg

SEQ ID NO: 10162 - RNA, 18 nt, Homo sapiens
  source 1..18: mol_type = genomic RNA
acaaagccttctgtaggc

SEQ ID NO: 10163 - RNA, 18 nt, Homo sapiens
  source 1..18: mol_type = genomic RNA
caaagccttctgtaggca

SEQ ID NO: 10164 - RNA, 18 nt, Homo sapiens
  source 1..18: mol_type = genomic RNA
aaagccttctgtaggcaa

SEQ ID NO: 10165 - RNA, 18 nt, Homo sapiens
  source 1..18: mol_type = genomic RNA
aagccttctgtaggcaaa

SEQ ID NO: 10166 - RNA, 18 nt, Homo sapiens
  source 1..18: mol_type = genomic RNA
agccttctgtaggcaaag

SEQ ID NO: 10167 - RNA, 18 nt, Homo sapiens
  source 1..18: mol_type = genomic RNA
gccttctgtaggcaaagc

SEQ ID NO: 10168 - RNA, 18 nt, Homo sapiens
  source 1..18: mol_type = genomic RNA
ccttctgtaggcaaagcc

SEQ ID NO: 10169 - RNA, 18 nt, Homo sapiens
  source 1..18: mol_type = genomic RNA
cttctgtaggcaaagccc

SEQ ID NO: 10170 - RNA, 18 nt, Homo sapiens
  source 1..18: mol_type = genomic RNA
ttctgtaggcaaagccca

SEQ ID NO: 10171 - RNA, 18 nt, Homo sapiens
  source 1..18: mol_type = genomic RNA
tctgtaggcaaagcccat

SEQ ID NO: 10172 - RNA, 18 nt, Homo sapiens
  source 1..18: mol_type = genomic RNA
ctgtaggcaaagcccata

SEQ ID NO: 10173 - RNA, 18 nt, Homo sapiens
  source 1..18: mol_type = genomic RNA
tgtaggcaaagcccatac

SEQ ID NO: 10174 - RNA, 18 nt, Homo sapiens
  source 1..18: mol_type = genomic RNA
gtaggcaaagcccataca

SEQ ID NO: 10175 - RNA, 18 nt, Homo sapiens
  source 1..18: mol_type = genomic RNA
taggcaaagcccatacaa

SEQ ID NO: 10176 - RNA, 18 nt, Homo sapiens
  source 1..18: mol_type = genomic RNA
aggcaaagcccatacaag

SEQ ID NO: 10177 - RNA, 18 nt, Homo sapiens
  source 1..18: mol_type = genomic RNA
ggcaaagcccatacaagg

SEQ ID NO: 10178 - RNA, 18 nt, Homo sapiens
  source 1..18: mol_type = genomic RNA
gcaaagcccatacaaggt

SEQ ID NO: 10179 - RNA, 18 nt, Homo sapiens
  source 1..18: mol_type = genomic RNA
caaagcccatacaaggtt

SEQ ID NO: 10180 - RNA, 18 nt, Homo sapiens
  source 1..18: mol_type = genomic RNA
aaagcccatacaaggttt

SEQ ID NO: 10181 - RNA, 18 nt, Homo sapiens
  source 1..18: mol_type = genomic RNA
aagcccatacaaggttta

SEQ ID NO: 10182 - RNA, 18 nt, Homo sapiens
  source 1..18: mol_type = genomic RNA
agcccatacaaggtttag

SEQ ID NO: 10183 - RNA, 18 nt, Homo sapiens
  source 1..18: mol_type = genomic RNA
gcccatacaaggtttaga

SEQ ID NO: 10184 - RNA, 18 nt, Homo sapiens
  source 1..18: mol_type = genomic RNA
cccatacaaggtttagat

SEQ ID NO: 10185 - RNA, 18 nt, Homo sapiens
  source 1..18: mol_type = genomic RNA
tacaaggtttagatcacc

SEQ ID NO: 10186 - RNA, 18 nt, Homo sapiens
  source 1..18: mol_type = genomic RNA
acaaggtttagatcacct

SEQ ID NO: 10187 - RNA, 18 nt, Homo sapiens
  source 1..18: mol_type = genomic RNA
aaggtttagatcacctag

SEQ ID NO: 10188 - RNA, 18 nt, Homo sapiens
  source 1..18: mol_type = genomic RNA
aggtttagatcacctagg

SEQ ID NO: 10189 - RNA, 18 nt, Homo sapiens
  source 1..18: mol_type = genomic RNA
ggtttagatcacctaggt

SEQ ID NO: 10190 - RNA, 18 nt, Homo sapiens
  source 1..18: mol_type = genomic RNA
gtttagatcacctaggtg

SEQ ID NO: 10191 - RNA, 18 nt, Homo sapiens
  source 1..18: mol_type = genomic RNA
tttagatcacctaggtga

SEQ ID NO: 10192 - RNA, 18 nt, Homo sapiens
  source 1..18: mol_type = genomic RNA
ttagatcacctaggtgat

SEQ ID NO: 10193 - RNA, 18 nt, Homo sapiens
  source 1..18: mol_type = genomic RNA
tagatcacctaggtgatc

SEQ ID NO: 10194 - RNA, 18 nt, Homo sapiens
  source 1..18: mol_type = genomic RNA
agatcacctaggtgatca

SEQ ID NO: 10195 - RNA, 18 nt, Homo sapiens
  source 1..18: mol_type = genomic RNA
gatcacctaggtgatcag

SEQ ID NO: 10196 - RNA, 18 nt, Homo sapiens
  source 1..18: mol_type = genomic RNA
atcacctaggtgatcagt

SEQ ID NO: 10197 - RNA, 18 nt, Homo sapiens
  source 1..18: mol_type = genomic RNA
tcacctaggtgatcagtg

SEQ ID NO: 10198 - RNA, 18 nt, Homo sapiens
  source 1..18: mol_type = genomic RNA
cacctaggtgatcagtgc

SEQ ID NO: 10199 - RNA, 18 nt, Homo sapiens
  source 1..18: mol_type = genomic RNA
acctaggtgatcagtgca

SEQ ID NO: 10200 - RNA, 18 nt, Homo sapiens
  source 1..18: mol_type = genomic RNA
cctaggtgatcagtgcag

SEQ ID NO: 10201 - RNA, 18 nt, Homo sapiens
  source 1..18: mol_type = genomic RNA
ctaggtgatcagtgcagt

SEQ ID NO: 10202 - RNA, 18 nt, Homo sapiens
  source 1..18: mol_type = genomic RNA
taggtgatcagtgcagtg

SEQ ID NO: 10203 - RNA, 18 nt, Homo sapiens
  source 1..18: mol_type = genomic RNA
aggtgatcagtgcagtga

SEQ ID NO: 10204 - RNA, 18 nt, Homo sapiens
  source 1..18: mol_type = genomic RNA
ggtgatcagtgcagtgat

SEQ ID NO: 10205 - RNA, 18 nt, Homo sapiens
  source 1..18: mol_type = genomic RNA
gtgatcagtgcagtgata

SEQ ID NO: 10206 - RNA, 18 nt, Homo sapiens
  source 1..18: mol_type = genomic RNA
tgatcagtgcagtgatat

SEQ ID NO: 10207 - RNA, 18 nt, Homo sapiens
  source 1..18: mol_type = genomic RNA
gatcagtgcagtgatatg

SEQ ID NO: 10208 - RNA, 18 nt, Homo sapiens
  source 1..18: mol_type = genomic RNA
atcagtgcagtgatatgt

SEQ ID NO: 10209 - RNA, 18 nt, Homo sapiens
  source 1..18: mol_type = genomic RNA
tcagtgcagtgatatgtc

SEQ ID NO: 10210 - RNA, 18 nt, Homo sapiens
  source 1..18: mol_type = genomic RNA
cagtgcagtgatatgtca

SEQ ID NO: 10211 - RNA, 18 nt, Homo sapiens
  source 1..18: mol_type = genomic RNA
agtgcagtgatatgtcac

SEQ ID NO: 10212 - RNA, 18 nt, Homo sapiens
  source 1..18: mol_type = genomic RNA
gtgcagtgatatgtcaca

SEQ ID NO: 10213 - RNA, 18 nt, Homo sapiens
  source 1..18: mol_type = genomic RNA
tgcagtgatatgtcacaa

SEQ ID NO: 10214 - RNA, 18 nt, Homo sapiens
  source 1..18: mol_type = genomic RNA
gcagtgatatgtcacaaa

SEQ ID NO: 10215 - RNA, 18 nt, Homo sapiens
  source 1..18: mol_type = genomic RNA
atatgtcacaaaaatccc

SEQ ID NO: 10216 - RNA, 18 nt, Homo sapiens
  source 1..18: mol_type = genomic RNA
tatgtcacaaaaatccct

SEQ ID NO: 10217 - RNA, 18 nt, Homo sapiens
  source 1..18: mol_type = genomic RNA
atgtcacaaaaatccctg

SEQ ID NO: 10218 - RNA, 18 nt, Homo sapiens
  source 1..18: mol_type = genomic RNA
tgtcacaaaaatccctgt

SEQ ID NO: 10219 - RNA, 18 nt, Homo sapiens
  source 1..18: mol_type = genomic RNA
gtcacaaaaatccctgta

SEQ ID NO: 10220 - RNA, 18 nt, Homo sapiens
  source 1..18: mol_type = genomic RNA
tcacaaaaatccctgtag

SEQ ID NO: 10221 - RNA, 18 nt, Homo sapiens
  source 1..18: mol_type = genomic RNA
cacaaaaatccctgtaga

SEQ ID NO: 10222 - RNA, 18 nt, Homo sapiens
  source 1..18: mol_type = genomic RNA
acaaaaatccctgtagac

SEQ ID NO: 10223 - RNA, 18 nt, Homo sapiens
  source 1..18: mol_type = genomic RNA
caaaaatccctgtagaca

SEQ ID NO: 10224 - RNA, 18 nt, Homo sapiens
  source 1..18: mol_type = genomic RNA
aaaaatccctgtagacag

SEQ ID NO: 10225 - RNA, 18 nt, Homo sapiens
  source 1..18: mol_type = genomic RNA
aaaatccctgtagacaga

SEQ ID NO: 10226 - RNA, 18 nt, Homo sapiens
  source 1..18: mol_type = genomic RNA
aaatccctgtagacagag

SEQ ID NO: 10227 - RNA, 18 nt, Homo sapiens
  source 1..18: mol_type = genomic RNA
aatccctgtagacagagc

SEQ ID NO: 10228 - RNA, 18 nt, Homo sapiens
  source 1..18: mol_type = genomic RNA
atccctgtagacagagcc

SEQ ID NO: 10229 - RNA, 18 nt, Homo sapiens
  source 1..18: mol_type = genomic RNA
tccctgtagacagagcct

SEQ ID NO: 10230 - RNA, 18 nt, Homo sapiens
  source 1..18: mol_type = genomic RNA
ccctgtagacagagccta

SEQ ID NO: 10231 - RNA, 18 nt, Homo sapiens
  source 1..18: mol_type = genomic RNA
cctgtagacagagcctag

SEQ ID NO: 10232 - RNA, 18 nt, Homo sapiens
  source 1..18: mol_type = genomic RNA
ctgtagacagagcctaga

SEQ ID NO: 10233 - RNA, 18 nt, Homo sapiens
  source 1..18: mol_type = genomic RNA
agacagagcctagacaag

SEQ ID NO: 10234 - RNA, 18 nt, Homo sapiens
  source 1..18: mol_type = genomic RNA
gacagagcctagacaaga

SEQ ID NO: 10235 - RNA, 18 nt, Homo sapiens
  source 1..18: mol_type = genomic RNA
acagagcctagacaagag

SEQ ID NO: 10236 - RNA, 18 nt, Homo sapiens
  source 1..18: mol_type = genomic RNA
gagcctagacaagagtta

SEQ ID NO: 10237 - RNA, 18 nt, Homo sapiens
  source 1..18: mol_type = genomic RNA
agcctagacaagagttac

SEQ ID NO: 10238 - RNA, 18 nt, Homo sapiens
  source 1..18: mol_type = genomic RNA
gcctagacaagagttact

SEQ ID NO: 10239 - RNA, 18 nt, Homo sapiens
  source 1..18: mol_type = genomic RNA
cctagacaagagttactt

SEQ ID NO: 10240 - RNA, 18 nt, Homo sapiens
  source 1..18: mol_type = genomic RNA
agacaagagttacttcac

SEQ ID NO: 10241 - RNA, 18 nt, Homo sapiens
  source 1..18: mol_type = genomic RNA
gacaagagttacttcacc

SEQ ID NO: 10242 - RNA, 18 nt, Homo sapiens
  source 1..18: mol_type = genomic RNA
acaagagttacttcacct

SEQ ID NO: 10243 - RNA, 18 nt, Homo sapiens
  source 1..18: mol_type = genomic RNA
caagagttacttcacctg

SEQ ID NO: 10244 - RNA, 18 nt, Homo sapiens
  source 1..18: mol_type = genomic RNA
aagagttacttcacctgg

SEQ ID NO: 10245 - RNA, 18 nt, Homo sapiens
  source 1..18: mol_type = genomic RNA
agagttacttcacctggg

SEQ ID NO: 10246 - RNA, 18 nt, Homo sapiens
  source 1..18: mol_type = genomic RNA
gagttacttcacctgggt

SEQ ID NO: 10247 - RNA, 18 nt, Homo sapiens
  source 1..18: mol_type = genomic RNA
agttacttcacctgggtg

SEQ ID NO: 10248 - RNA, 18 nt, Homo sapiens
  source 1..18: mol_type = genomic RNA
gttacttcacctgggtga

SEQ ID NO: 10249 - RNA, 18 nt, Homo sapiens
  source 1..18: mol_type = genomic RNA
ttacttcacctgggtgat

SEQ ID NO: 10250 - RNA, 18 nt, Homo sapiens
  source 1..18: mol_type = genomic RNA
tacttcacctgggtgatc

SEQ ID NO: 10251 - RNA, 18 nt, Homo sapiens
  source 1..18: mol_type = genomic RNA
acttcacctgggtgatca

SEQ ID NO: 10252 - RNA, 18 nt, Homo sapiens
  source 1..18: mol_type = genomic RNA
cttcacctgggtgatcag

SEQ ID NO: 10253 - RNA, 18 nt, Homo sapiens
  source 1..18: mol_type = genomic RNA
ttcacctgggtgatcagt

SEQ ID NO: 10254 - RNA, 18 nt, Homo sapiens
  source 1..18: mol_type = genomic RNA
tgggtgatcagtgcagat

SEQ ID NO: 10255 - RNA, 18 nt, Homo sapiens
  source 1..18: mol_type = genomic RNA
gggtgatcagtgcagata

SEQ ID NO: 10256 - RNA, 18 nt, Homo sapiens
  source 1..18: mol_type = genomic RNA
ggtgatcagtgcagatat

SEQ ID NO: 10257 - RNA, 18 nt, Homo sapiens
  source 1..18: mol_type = genomic RNA
gtgatcagtgcagatatt

SEQ ID NO: 10258 - RNA, 18 nt, Homo sapiens
  source 1..18: mol_type = genomic RNA
tcagtgcagatatttgac

SEQ ID NO: 10259 - RNA, 18 nt, Homo sapiens
  source 1..18: mol_type = genomic RNA
agtgcagatatttgacac

SEQ ID NO: 10260 - RNA, 18 nt, Homo sapiens
  source 1..18: mol_type = genomic RNA
gtgcagatatttgacaca

SEQ ID NO: 10261 - RNA, 18 nt, Homo sapiens
  source 1..18: mol_type = genomic RNA
gatatttgacacaatgcc

SEQ ID NO: 10262 - RNA, 18 nt, Homo sapiens
  source 1..18: mol_type = genomic RNA
atatttgacacaatgccc

SEQ ID NO: 10263 - RNA, 18 nt, Homo sapiens
  source 1..18: mol_type = genomic RNA
tatttgacacaatgcccc

SEQ ID NO: 10264 - RNA, 18 nt, Homo sapiens
  source 1..18: mol_type = genomic RNA
atttgacacaatgccccc

SEQ ID NO: 10265 - RNA, 18 nt, Homo sapiens
  source 1..18: mol_type = genomic RNA
tttgacacaatgccccca

SEQ ID NO: 10266 - RNA, 18 nt, Homo sapiens
  source 1..18: mol_type = genomic RNA
ttgacacaatgcccccat

SEQ ID NO: 10267 - RNA, 18 nt, Homo sapiens
  source 1..18: mol_type = genomic RNA
tgacacaatgcccccata

SEQ ID NO: 10268 - RNA, 18 nt, Homo sapiens
  source 1..18: mol_type = genomic RNA
gacacaatgcccccatag

SEQ ID NO: 10269 - RNA, 18 nt, Homo sapiens
  source 1..18: mol_type = genomic RNA
acacaatgcccccataga

SEQ ID NO: 10270 - RNA, 18 nt, Homo sapiens
  source 1..18: mol_type = genomic RNA
cacaatgcccccatagac

SEQ ID NO: 10271 - RNA, 18 nt, Homo sapiens
  source 1..18: mol_type = genomic RNA
acaatgcccccatagaca

SEQ ID NO: 10272 - RNA, 18 nt, Homo sapiens
  source 1..18: mol_type = genomic RNA
caatgcccccatagacag

SEQ ID NO: 10273 - RNA, 18 nt, Homo sapiens
  source 1..18: mol_type = genomic RNA
aatgcccccatagacaga

SEQ ID NO: 10274 - RNA, 18 nt, Homo sapiens
  source 1..18: mol_type = genomic RNA
atgcccccatagacagag

SEQ ID NO: 10275 - RNA, 18 nt, Homo sapiens
  source 1..18: mol_type = genomic RNA
cccccatagacagagcct

SEQ ID NO: 10276 - RNA, 18 nt, Homo sapiens
  source 1..18: mol_type = genomic RNA
ccccatagacagagccta

SEQ ID NO: 10277 - RNA, 18 nt, Homo sapiens
  source 1..18: mol_type = genomic RNA
cccatagacagagcctag

SEQ ID NO: 10278 - RNA, 18 nt, Homo sapiens
  source 1..18: mol_type = genomic RNA
ccatagacagagcctagg

SEQ ID NO: 10279 - RNA, 18 nt, Homo sapiens
  source 1..18: mol_type = genomic RNA
catagacagagcctaggc

SEQ ID NO: 10280 - RNA, 18 nt, Homo sapiens
  source 1..18: mol_type = genomic RNA
atagacagagcctaggca

SEQ ID NO: 10281 - RNA, 18 nt, Homo sapiens
  source 1..18: mol_type = genomic RNA
tagacagagcctaggcaa

SEQ ID NO: 10282 - RNA, 18 nt, Homo sapiens
  source 1..18: mol_type = genomic RNA
agacagagcctaggcaag

SEQ ID NO: 10283 - RNA, 18 nt, Homo sapiens
  source 1..18: mol_type = genomic RNA
gacagagcctaggcaaga

SEQ ID NO: 10284 - RNA, 18 nt, Homo sapiens
  source 1..18: mol_type = genomic RNA
cagagcctaggcaagact

SEQ ID NO: 10285 - RNA, 18 nt, Homo sapiens
  source 1..18: mol_type = genomic RNA
agagcctaggcaagactt

SEQ ID NO: 10286 - RNA, 18 nt, Homo sapiens
  source 1..18: mol_type = genomic RNA
gagcctaggcaagacttc

SEQ ID NO: 10287 - RNA, 18 nt, Homo sapiens
  source 1..18: mol_type = genomic RNA
agcctaggcaagacttcc

SEQ ID NO: 10288 - RNA, 18 nt, Homo sapiens
  source 1..18: mol_type = genomic RNA
gcctaggcaagacttcca

SEQ ID NO: 10289 - RNA, 18 nt, Homo sapiens
  source 1..18: mol_type = genomic RNA
cctaggcaagacttccat

SEQ ID NO: 10290 - RNA, 18 nt, Homo sapiens
  source 1..18: mol_type = genomic RNA
ctaggcaagacttccatc

SEQ ID NO: 10291 - RNA, 18 nt, Homo sapiens
  source 1..18: mol_type = genomic RNA
taggcaagacttccatca

SEQ ID NO: 10292 - RNA, 18 nt, Homo sapiens
  source 1..18: mol_type = genomic RNA
aggcaagacttccatcac

SEQ ID NO: 10293 - RNA, 18 nt, Homo sapiens
  source 1..18: mol_type = genomic RNA
ggcaagacttccatcacc

SEQ ID NO: 10294 - RNA, 18 nt, Homo sapiens
  source 1..18: mol_type = genomic RNA
gcaagacttccatcacct

SEQ ID NO: 10295 - RNA, 18 nt, Homo sapiens
  source 1..18: mol_type = genomic RNA
caagacttccatcacctg

SEQ ID NO: 10296 - RNA, 18 nt, Homo sapiens
  source 1..18: mol_type = genomic RNA
aagacttccatcacctgg

SEQ ID NO: 10297 - RNA, 18 nt, Homo sapiens
  source 1..18: mol_type = genomic RNA
agacttccatcacctggg

SEQ ID NO: 10298 - RNA, 18 nt, Homo sapiens
  source 1..18: mol_type = genomic RNA
gacttccatcacctgggt

SEQ ID NO: 10299 - RNA, 18 nt, Homo sapiens
  source 1..18: mol_type = genomic RNA
acttccatcacctgggtg

SEQ ID NO: 10300 - RNA, 18 nt, Homo sapiens
  source 1..18: mol_type = genomic RNA
cttccatcacctgggtga

SEQ ID NO: 10301 - RNA, 18 nt, Homo sapiens
  source 1..18: mol_type = genomic RNA
ttccatcacctgggtgat

SEQ ID NO: 10302 - RNA, 18 nt, Homo sapiens
  source 1..18: mol_type = genomic RNA
tcagtgcagagatatgtc

SEQ ID NO: 10303 - RNA, 18 nt, Homo sapiens
  source 1..18: mol_type = genomic RNA
cagtgcagagatatgtca

SEQ ID NO: 10304 - RNA, 18 nt, Homo sapiens
  source 1..18: mol_type = genomic RNA
gcagagatatgtcacaaa

SEQ ID NO: 10305 - RNA, 18 nt, Homo sapiens
  source 1..18: mol_type = genomic RNA
agagatatgtcacaaatc

SEQ ID NO: 10306 - RNA, 18 nt, Homo sapiens
  source 1..18: mol_type = genomic RNA
gagatatgtcacaaatcc

SEQ ID NO: 10307 - RNA, 18 nt, Homo sapiens
  source 1..18: mol_type = genomic RNA
agatatgtcacaaatccc

SEQ ID NO: 10308 - RNA, 18 nt, Homo sapiens
  source 1..18: mol_type = genomic RNA
gatatgtcacaaatcccc

SEQ ID NO: 10309 - RNA, 18 nt, Homo sapiens
  source 1..18: mol_type = genomic RNA
atatgtcacaaatccccc

SEQ ID NO: 10310 - RNA, 18 nt, Homo sapiens
  source 1..18: mol_type = genomic RNA
tatgtcacaaatccccct

SEQ ID NO: 10311 - RNA, 18 nt, Homo sapiens
  source 1..18: mol_type = genomic RNA
atgtcacaaatccccctc

SEQ ID NO: 10312 - RNA, 18 nt, Homo sapiens
  source 1..18: mol_type = genomic RNA
tgtcacaaatccccctct

SEQ ID NO: 10313 - RNA, 18 nt, Homo sapiens
  source 1..18: mol_type = genomic RNA
gtcacaaatccccctcta

SEQ ID NO: 10314 - RNA, 18 nt, Homo sapiens
  source 1..18: mol_type = genomic RNA
tcacaaatccccctctag

SEQ ID NO: 10315 - RNA, 18 nt, Homo sapiens
  source 1..18: mol_type = genomic RNA
cacaaatccccctctagg

SEQ ID NO: 10316 - RNA, 18 nt, Homo sapiens
  source 1..18: mol_type = genomic RNA
acaaatccccctctaggc

SEQ ID NO: 10317 - RNA, 18 nt, Homo sapiens
  source 1..18: mol_type = genomic RNA
caaatccccctctaggca

SEQ ID NO: 10318 - RNA, 18 nt, Homo sapiens
  source 1..18: mol_type = genomic RNA
aaatccccctctaggcag

SEQ ID NO: 10319 - RNA, 18 nt, Homo sapiens
  source 1..18: mol_type = genomic RNA
aatccccctctaggcaga

SEQ ID NO: 10320 - RNA, 18 nt, Homo sapiens
  source 1..18: mol_type = genomic RNA
atccccctctaggcagag

SEQ ID NO: 10321 - RNA, 18 nt, Homo sapiens
  source 1..18: mol_type = genomic RNA
tccccctctaggcagagt

SEQ ID NO: 10322 - RNA, 18 nt, Homo sapiens
  source 1..18: mol_type = genomic RNA
ccccctctaggcagagta

SEQ ID NO: 10323 - RNA, 18 nt, Homo sapiens
  source 1..18: mol_type = genomic RNA
cccctctaggcagagtat

SEQ ID NO: 10324 - RNA, 18 nt, Homo sapiens
  source 1..18: mol_type = genomic RNA
ccctctaggcagagtata

SEQ ID NO: 10325 - RNA, 18 nt, Homo sapiens
  source 1..18: mol_type = genomic RNA
cctctaggcagagtatag

SEQ ID NO: 10326 - RNA, 18 nt, Homo sapiens
  source 1..18: mol_type = genomic RNA
ctctaggcagagtataga

SEQ ID NO: 10327 - RNA, 18 nt, Homo sapiens
  source 1..18: mol_type = genomic RNA
tctaggcagagtatagag

SEQ ID NO: 10328 - RNA, 18 nt, Homo sapiens
  source 1..18: mol_type = genomic RNA
ctaggcagagtatagaga

SEQ ID NO: 10329 - RNA, 18 nt, Homo sapiens
  source 1..18: mol_type = genomic RNA
taggcagagtatagagaa

SEQ ID NO: 10330 - RNA, 18 nt, Homo sapiens
  source 1..18: mol_type = genomic RNA
aggcagagtatagagaag

SEQ ID NO: 10331 - RNA, 18 nt, Homo sapiens
  source 1..18: mol_type = genomic RNA
ggcagagtatagagaaga

SEQ ID NO: 10332 - RNA, 18 nt, Homo sapiens
  source 1..18: mol_type = genomic RNA
gcagagtatagagaagag

SEQ ID NO: 10333 - RNA, 18 nt, Homo sapiens
  source 1..18: mol_type = genomic RNA
cagagtatagagaagagt

SEQ ID NO: 10334 - RNA, 18 nt, Homo sapiens
  source 1..18: mol_type = genomic RNA
agagtatagagaagagtc

SEQ ID NO: 10335 - RNA, 18 nt, Homo sapiens
  source 1..18: mol_type = genomic RNA
gagtatagagaagagtcc

SEQ ID NO: 10336 - RNA, 18 nt, Homo sapiens
  source 1..18: mol_type = genomic RNA
agtatagagaagagtccc

SEQ ID NO: 10337 - RNA, 18 nt, Homo sapiens
  source 1..18: mol_type = genomic RNA
gtatagagaagagtccca

SEQ ID NO: 10338 - RNA, 18 nt, Homo sapiens
  source 1..18: mol_type = genomic RNA
tatagagaagagtcccat

SEQ ID NO: 10339 - RNA, 18 nt, Homo sapiens
  source 1..18: mol_type = genomic RNA
atagagaagagtcccatc

SEQ ID NO: 10340 - RNA, 18 nt, Homo sapiens
  source 1..18: mol_type = genomic RNA
tagagaagagtcccatca

SEQ ID NO: 10341 - RNA, 18 nt, Homo sapiens
  source 1..18: mol_type = genomic RNA
agagaagagtcccatcac

SEQ ID NO: 10342 - RNA, 18 nt, Homo sapiens
  source 1..18: mol_type = genomic RNA
gagaagagtcccatcacc

SEQ ID NO: 10343 - RNA, 18 nt, Homo sapiens
  source 1..18: mol_type = genomic RNA
agaagagtcccatcacct

SEQ ID NO: 10344 - RNA, 18 nt, Homo sapiens
  source 1..18: mol_type = genomic RNA
gaagagtcccatcacctg

SEQ ID NO: 10345 - RNA, 18 nt, Homo sapiens
  source 1..18: mol_type = genomic RNA
aagagtcccatcacctgg

SEQ ID NO: 10346 - RNA, 18 nt, Homo sapiens
  source 1..18: mol_type = genomic RNA
agagtcccatcacctggg

SEQ ID NO: 10347 - RNA, 18 nt, Homo sapiens
  source 1..18: mol_type = genomic RNA
gagtcccatcacctgggt

SEQ ID NO: 10348 - RNA, 18 nt, Homo sapiens
  source 1..18: mol_type = genomic RNA
agtcccatcacctgggtg

SEQ ID NO: 10349 - RNA, 18 nt, Homo sapiens
  source 1..18: mol_type = genomic RNA
gtcccatcacctgggtga

SEQ ID NO: 10350 - RNA, 18 nt, Homo sapiens
  source 1..18: mol_type = genomic RNA
tcccatcacctgggtgat

SEQ ID NO: 10351 - RNA, 18 nt, Homo sapiens
  source 1..18: mol_type = genomic RNA
cccatcacctgggtgatc

SEQ ID NO: 10352 - RNA, 18 nt, Homo sapiens
  source 1..18: mol_type = genomic RNA
gatcagtgcagagatatt

SEQ ID NO: 10353 - RNA, 18 nt, Homo sapiens
  source 1..18: mol_type = genomic RNA
agtgcagagatatttcac

SEQ ID NO: 10354 - RNA, 18 nt, Homo sapiens
  source 1..18: mol_type = genomic RNA
atttcacaatgtcccctg

SEQ ID NO: 10355 - RNA, 18 nt, Homo sapiens
  source 1..18: mol_type = genomic RNA
tttcacaatgtcccctgt

SEQ ID NO: 10356 - RNA, 18 nt, Homo sapiens
  source 1..18: mol_type = genomic RNA
ttcacaatgtcccctgta

SEQ ID NO: 10357 - RNA, 18 nt, Homo sapiens
  source 1..18: mol_type = genomic RNA
tcacaatgtcccctgtag

SEQ ID NO: 10358 - RNA, 18 nt, Homo sapiens
  source 1..18: mol_type = genomic RNA
cacaatgtcccctgtagg

SEQ ID NO: 10359 - RNA, 18 nt, Homo sapiens
  source 1..18: mol_type = genomic RNA
acaatgtcccctgtaggc

SEQ ID NO: 10360 - RNA, 18 nt, Homo sapiens
  source 1..18: mol_type = genomic RNA
caatgtcccctgtaggca

SEQ ID NO: 10361 - RNA, 18 nt, Homo sapiens
  source 1..18: mol_type = genomic RNA
aatgtcccctgtaggcag

SEQ ID NO: 10362 - RNA, 18 nt, Homo sapiens
  source 1..18: mol_type = genomic RNA
atgtcccctgtaggcaga

SEQ ID NO: 10363 - RNA, 18 nt, Homo sapiens
  source 1..18: mol_type = genomic RNA
tgtcccctgtaggcagag

SEQ ID NO: 10364 - RNA, 18 nt, Homo sapiens
  source 1..18: mol_type = genomic RNA
gtcccctgtaggcagaga

SEQ ID NO: 10365 - RNA, 18 nt, Homo sapiens
  source 1..18: mol_type = genomic RNA
tcccctgtaggcagagag

SEQ ID NO: 10366 - RNA, 18 nt, Homo sapiens
  source 1..18: mol_type = genomic RNA
cccctgtaggcagagagt

SEQ ID NO: 10367 - RNA, 18 nt, Homo sapiens
  source 1..18: mol_type = genomic RNA
ccctgtaggcagagagtg

SEQ ID NO: 10368 - RNA, 18 nt, Homo sapiens
  source 1..18: mol_type = genomic RNA
cctgtaggcagagagtgg

SEQ ID NO: 10369 - RNA, 18 nt, Homo sapiens
  source 1..18: mol_type = genomic RNA
ctgtaggcagagagtgga

SEQ ID NO: 10370 - RNA, 18 nt, Homo sapiens
  source 1..18: mol_type = genomic RNA
tgtaggcagagagtggac

SEQ ID NO: 10371 - RNA, 18 nt, Homo sapiens
  source 1..18: mol_type = genomic RNA
gtaggcagagagtggaca

SEQ ID NO: 10372 - RNA, 18 nt, Homo sapiens
  source 1..18: mol_type = genomic RNA
taggcagagagtggacaa

SEQ ID NO: 10373 - RNA, 18 nt, Homo sapiens
  source 1..18: mol_type = genomic RNA
ggcagagagtggacaaga

SEQ ID NO: 10374 - RNA, 18 nt, Homo sapiens
  source 1..18: mol_type = genomic RNA
gcagagagtggacaagag

SEQ ID NO: 10375 - RNA, 18 nt, Homo sapiens
  source 1..18: mol_type = genomic RNA
cagagagtggacaagagt

SEQ ID NO: 10376 - RNA, 18 nt, Homo sapiens
  source 1..18: mol_type = genomic RNA
agagagtggacaagagtt

SEQ ID NO: 10377 - RNA, 18 nt, Homo sapiens
  source 1..18: mol_type = genomic RNA
gagagtggacaagagtta

SEQ ID NO: 10378 - RNA, 18 nt, Homo sapiens
  source 1..18: mol_type = genomic RNA
agagtggacaagagttac

SEQ ID NO: 10379 - RNA, 18 nt, Homo sapiens
  source 1..18: mol_type = genomic RNA
gagtggacaagagttaca

SEQ ID NO: 10380 - RNA, 18 nt, Homo sapiens
  source 1..18: mol_type = genomic RNA
agtggacaagagttacat

SEQ ID NO: 10381 - RNA, 18 nt, Homo sapiens
  source 1..18: mol_type = genomic RNA
gtggacaagagttacatc

SEQ ID NO: 10382 - RNA, 18 nt, Homo sapiens
  source 1..18: mol_type = genomic RNA
tggacaagagttacatca

SEQ ID NO: 10383 - RNA, 18 nt, Homo sapiens
  source 1..18: mol_type = genomic RNA
ggacaagagttacatcac

SEQ ID NO: 10384 - RNA, 18 nt, Homo sapiens
  source 1..18: mol_type = genomic RNA
gacaagagttacatcacc

SEQ ID NO: 10385 - RNA, 18 nt, Homo sapiens
  source 1..18: mol_type = genomic RNA
acaagagttacatcacct

SEQ ID NO: 10386 - RNA, 18 nt, Homo sapiens
  source 1..18: mol_type = genomic RNA
aagagttacatcacctag

SEQ ID NO: 10387 - RNA, 18 nt, Homo sapiens
  source 1..18: mol_type = genomic RNA
agagttacatcacctaga

SEQ ID NO: 10388 - RNA, 18 nt, Homo sapiens
  source 1..18: mol_type = genomic RNA
gagttacatcacctagat

SEQ ID NO: 10389 - RNA, 18 nt, Homo sapiens
  source 1..18: mol_type = genomic RNA
agttacatcacctagatg

SEQ ID NO: 10390 - RNA, 18 nt, Homo sapiens
  source 1..18: mol_type = genomic RNA
gttacatcacctagatga

SEQ ID NO: 10391 - RNA, 18 nt, Homo sapiens
  source 1..18: mol_type = genomic RNA
tacatcacctagatgatc

SEQ ID NO: 10392 - RNA, 18 nt, Homo sapiens
  source 1..18: mol_type = genomic RNA
acatcacctagatgatct

SEQ ID NO: 10393 - RNA, 18 nt, Homo sapiens
  source 1..18: mol_type = genomic RNA
catcacctagatgatctg

SEQ ID NO: 10394 - RNA, 18 nt, Homo sapiens
  source 1..18: mol_type = genomic RNA
atcacctagatgatctgt

SEQ ID NO: 10395 - RNA, 18 nt, Homo sapiens
  source 1..18: mol_type = genomic RNA
tcacctagatgatctgtg

SEQ ID NO: 10396 - RNA, 18 nt, Homo sapiens
  source 1..18: mol_type = genomic RNA
cacctagatgatctgtgc

SEQ ID NO: 10397 - RNA, 18 nt, Homo sapiens
  source 1..18: mol_type = genomic RNA
acctagatgatctgtgca

SEQ ID NO: 10398 - RNA, 18 nt, Homo sapiens
  source 1..18: mol_type = genomic RNA
cctagatgatctgtgcag

SEQ ID NO: 10399 - RNA, 18 nt, Homo sapiens
  source 1..18: mol_type = genomic RNA
ctagatgatctgtgcaga

SEQ ID NO: 10400 - RNA, 18 nt, Homo sapiens
  source 1..18: mol_type = genomic RNA
tagatgatctgtgcagag

SEQ ID NO: 10401 - RNA, 18 nt, Homo sapiens
  source 1..18: mol_type = genomic RNA
agatgatctgtgcagagc

SEQ ID NO: 10402 - RNA, 18 nt, Homo sapiens
  source 1..18: mol_type = genomic RNA
gatgatctgtgcagagct

SEQ ID NO: 10403 - RNA, 18 nt, Homo sapiens
  source 1..18: mol_type = genomic RNA
atgatctgtgcagagcta

SEQ ID NO: 10404 - RNA, 18 nt, Homo sapiens
  source 1..18: mol_type = genomic RNA
tgatctgtgcagagctat

SEQ ID NO: 10405 - RNA, 18 nt, Homo sapiens
  source 1..18: mol_type = genomic RNA
gatctgtgcagagctatg

SEQ ID NO: 10406 - RNA, 18 nt, Homo sapiens
  source 1..18: mol_type = genomic RNA
atctgtgcagagctatgt

SEQ ID NO: 10407 - RNA, 18 nt, Homo sapiens
  source 1..18: mol_type = genomic RNA
tctgtgcagagctatgtc

SEQ ID NO: 10408 - RNA, 18 nt, Homo sapiens
  source 1..18: mol_type = genomic RNA
ctgtgcagagctatgtca

SEQ ID NO: 10409 - RNA, 18 nt, Homo sapiens
  source 1..18: mol_type = genomic RNA
tgtgcagagctatgtcaa

SEQ ID NO: 10410 - RNA, 18 nt, Homo sapiens
  source 1..18: mol_type = genomic RNA
gtgcagagctatgtcaaa

SEQ ID NO: 10411 - RNA, 18 nt, Homo sapiens
  source 1..18: mol_type = genomic RNA
tgcagagctatgtcaaaa

SEQ ID NO: 10412 - RNA, 18 nt, Homo sapiens
  source 1..18: mol_type = genomic RNA
gcagagctatgtcaaaac

SEQ ID NO: 10413 - RNA, 18 nt, Homo sapiens
  source 1..18: mol_type = genomic RNA
cagagctatgtcaaaacg

SEQ ID NO: 10414 - RNA, 18 nt, Homo sapiens
  source 1..18: mol_type = genomic RNA
agagctatgtcaaaacgc

SEQ ID NO: 10415 - RNA, 18 nt, Homo sapiens
  source 1..18: mol_type = genomic RNA
gagctatgtcaaaacgcc

SEQ ID NO: 10416 - RNA, 18 nt, Homo sapiens
  source 1..18: mol_type = genomic RNA
agctatgtcaaaacgccc

SEQ ID NO: 10417 - RNA, 18 nt, Homo sapiens
  source 1..18: mol_type = genomic RNA
gctatgtcaaaacgcccc

SEQ ID NO: 10418 - RNA, 18 nt, Homo sapiens
  source 1..18: mol_type = genomic RNA
ctatgtcaaaacgcccct

SEQ ID NO: 10419 - RNA, 18 nt, Homo sapiens
  source 1..18: mol_type = genomic RNA
tatgtcaaaacgcccctg

SEQ ID NO: 10420 - RNA, 18 nt, Homo sapiens
  source 1..18: mol_type = genomic RNA
atgtcaaaacgcccctgt

SEQ ID NO: 10421 - RNA, 18 nt, Homo sapiens
  source 1..18: mol_type = genomic RNA
tgtcaaaacgcccctgta

SEQ ID NO: 10422 - RNA, 18 nt, Homo sapiens
  source 1..18: mol_type = genomic RNA
gtcaaaacgcccctgtag

SEQ ID NO: 10423 - RNA, 18 nt, Homo sapiens
  source 1..18: mol_type = genomic RNA
tcaaaacgcccctgtagg

SEQ ID NO: 10424 - RNA, 18 nt, Homo sapiens
  source 1..18: mol_type = genomic RNA
caaaacgcccctgtaggc

SEQ ID NO: 10425 - RNA, 18 nt, Homo sapiens
  source 1..18: mol_type = genomic RNA
aaaacgcccctgtaggca

SEQ ID NO: 10426 - RNA, 18 nt, Homo sapiens
  source 1..18: mol_type = genomic RNA
aaacgcccctgtaggcag

SEQ ID NO: 10427 - RNA, 18 nt, Homo sapiens
  source 1..18: mol_type = genomic RNA
aacgcccctgtaggcaga

SEQ ID NO: 10428 - RNA, 18 nt, Homo sapiens
  source 1..18: mol_type = genomic RNA
tgtaggcagagcctagat

SEQ ID NO: 10429 - RNA, 18 nt, Homo sapiens
  source 1..18: mol_type = genomic RNA
gtaggcagagcctagatg

SEQ ID NO: 10430 - RNA, 18 nt, Homo sapiens
  source 1..18: mol_type = genomic RNA
taggcagagcctagatga

SEQ ID NO: 10431 - RNA, 18 nt, Homo sapiens
  source 1..18: mol_type = genomic RNA
aggcagagcctagatgag

SEQ ID NO: 10432 - RNA, 18 nt, Homo sapiens
  source 1..18: mol_type = genomic RNA
ggcagagcctagatgagt

SEQ ID NO: 10433 - RNA, 18 nt, Homo sapiens
  source 1..18: mol_type = genomic RNA
gcagagcctagatgagtg

SEQ ID NO: 10434 - RNA, 18 nt, Homo sapiens
  source 1..18: mol_type = genomic RNA
cagagcctagatgagtgt

SEQ ID NO: 10435 - RNA, 18 nt, Homo sapiens
  source 1..18: mol_type = genomic RNA
agagcctagatgagtgtt

SEQ ID NO: 10436 - RNA, 18 nt, Homo sapiens
  source 1..18: mol_type = genomic RNA
gagcctagatgagtgtta

SEQ ID NO: 10437 - RNA, 18 nt, Homo sapiens
  source 1..18: mol_type = genomic RNA
agcctagatgagtgttac

SEQ ID NO: 10438 - RNA, 18 nt, Homo sapiens
  source 1..18: mol_type = genomic RNA
gcctagatgagtgttaca

SEQ ID NO: 10439 - RNA, 18 nt, Homo sapiens
  source 1..18: mol_type = genomic RNA
agatgagtgttacatcac

SEQ ID NO: 10440 - RNA, 18 nt, Homo sapiens
  source 1..18: mol_type = genomic RNA
gatgagtgttacatcacc

SEQ ID NO: 10441 - RNA, 18 nt, Homo sapiens
  source 1..18: mol_type = genomic RNA
atgagtgttacatcacct

SEQ ID NO: 10442 - RNA, 18 nt, Homo sapiens
  source 1..18: mol_type = genomic RNA
tgagtgttacatcacctg

SEQ ID NO: 10443 - RNA, 18 nt, Homo sapiens
  source 1..18: mol_type = genomic RNA
gagtgttacatcacctgg

SEQ ID NO: 10444 - RNA, 18 nt, Homo sapiens
  source 1..18: mol_type = genomic RNA
catcacctgggtgatcat

SEQ ID NO: 10445 - RNA, 18 nt, Homo sapiens
  source 1..18: mol_type = genomic RNA
atcacctgggtgatcatt

SEQ ID NO: 10446 - RNA, 18 nt, Homo sapiens
  source 1..18: mol_type = genomic RNA
tcacctgggtgatcattg

SEQ ID NO: 10447 - RNA, 18 nt, Homo sapiens
  source 1..18: mol_type = genomic RNA
cacctgggtgatcattgc

SEQ ID NO: 10448 - RNA, 18 nt, Homo sapiens
  source 1..18: mol_type = genomic RNA
acctgggtgatcattgca

SEQ ID NO: 10449 - RNA, 18 nt, Homo sapiens
  source 1..18: mol_type = genomic RNA
cctgggtgatcattgcag

SEQ ID NO: 10450 - RNA, 18 nt, Homo sapiens
  source 1..18: mol_type = genomic RNA
ctgggtgatcattgcaga

SEQ ID NO: 10451 - RNA, 18 nt, Homo sapiens
  source 1..18: mol_type = genomic RNA
tgggtgatcattgcagag

SEQ ID NO: 10452 - RNA, 18 nt, Homo sapiens
  source 1..18: mol_type = genomic RNA
gggtgatcattgcagaga

SEQ ID NO: 10453 - RNA, 18 nt, Homo sapiens
  source 1..18: mol_type = genomic RNA
ggtgatcattgcagagat

SEQ ID NO: 10454 - RNA, 18 nt, Homo sapiens
  source 1..18: mol_type = genomic RNA
gtgatcattgcagagata

SEQ ID NO: 10455 - RNA, 18 nt, Homo sapiens
  source 1..18: mol_type = genomic RNA
tgatcattgcagagatac

SEQ ID NO: 10456 - RNA, 18 nt, Homo sapiens
  source 1..18: mol_type = genomic RNA
gatcattgcagagatacg

SEQ ID NO: 10457 - RNA, 18 nt, Homo sapiens
  source 1..18: mol_type = genomic RNA
atcattgcagagatacgt

SEQ ID NO: 10458 - RNA, 18 nt, Homo sapiens
  source 1..18: mol_type = genomic RNA
tcattgcagagatacgtc

SEQ ID NO: 10459 - RNA, 18 nt, Homo sapiens
  source 1..18: mol_type = genomic RNA
cattgcagagatacgtca

SEQ ID NO: 10460 - RNA, 18 nt, Homo sapiens
  source 1..18: mol_type = genomic RNA
attgcagagatacgtcac

SEQ ID NO: 10461 - RNA, 18 nt, Homo sapiens
  source 1..18: mol_type = genomic RNA
ttgcagagatacgtcaca

SEQ ID NO: 10462 - RNA, 18 nt, Homo sapiens
  source 1..18: mol_type = genomic RNA
tgcagagatacgtcacaa

SEQ ID NO: 10463 - RNA, 18 nt, Homo sapiens
  source 1..18: mol_type = genomic RNA
gcagagatacgtcacaat

SEQ ID NO: 10464 - RNA, 18 nt, Homo sapiens
  source 1..18: mol_type = genomic RNA
cagagatacgtcacaata

SEQ ID NO: 10465 - RNA, 18 nt, Homo sapiens
  source 1..18: mol_type = genomic RNA
agagatacgtcacaatac

SEQ ID NO: 10466 - RNA, 18 nt, Homo sapiens
  source 1..18: mol_type = genomic RNA
gagatacgtcacaatacc

SEQ ID NO: 10467 - RNA, 18 nt, Homo sapiens
  source 1..18: mol_type = genomic RNA
agatacgtcacaataccc

SEQ ID NO: 10468 - RNA, 18 nt, Homo sapiens
  source 1..18: mol_type = genomic RNA
gatacgtcacaatacccc

SEQ ID NO: 10469 - RNA, 18 nt, Homo sapiens
  source 1..18: mol_type = genomic RNA
atacgtcacaataccccc

SEQ ID NO: 10470 - RNA, 18 nt, Homo sapiens
  source 1..18: mol_type = genomic RNA
tacgtcacaataccccct

SEQ ID NO: 10471 - RNA, 18 nt, Homo sapiens
  source 1..18: mol_type = genomic RNA
acgtcacaataccccctg

SEQ ID NO: 10472 - RNA, 18 nt, Homo sapiens
  source 1..18: mol_type = genomic RNA
cgtcacaataccccctgt

SEQ ID NO: 10473 - RNA, 18 nt, Homo sapiens
  source 1..18: mol_type = genomic RNA
gtcacaataccccctgta

SEQ ID NO: 10474 - RNA, 18 nt, Homo sapiens
  source 1..18: mol_type = genomic RNA
tcacaataccccctgtag

SEQ ID NO: 10475 - RNA, 18 nt, Homo sapiens
  source 1..18: mol_type = genomic RNA
cacaataccccctgtagg

SEQ ID NO: 10476 - RNA, 18 nt, Homo sapiens
  source 1..18: mol_type = genomic RNA
acaataccccctgtaggt

SEQ ID NO: 10477 - RNA, 18 nt, Homo sapiens
  source 1..18: mol_type = genomic RNA
caataccccctgtaggtg

SEQ ID NO: 10478 - RNA, 18 nt, Homo sapiens
  source 1..18: mol_type = genomic RNA
aataccccctgtaggtgg

SEQ ID NO: 10479 - RNA, 18 nt, Homo sapiens
  source 1..18: mol_type = genomic RNA
ataccccctgtaggtggg

SEQ ID NO: 10480 - RNA, 18 nt, Homo sapiens
  source 1..18: mol_type = genomic RNA
ctgtaggtggggcctaga

SEQ ID NO: 10481 - RNA, 18 nt, Homo sapiens
  source 1..18: mol_type = genomic RNA
ggggcctagacaagagtt

SEQ ID NO: 10482 - RNA, 18 nt, Homo sapiens
  source 1..18: mol_type = genomic RNA
gggcctagacaagagtta

SEQ ID NO: 10483 - RNA, 18 nt, Homo sapiens
  source 1..18: mol_type = genomic RNA
ggcctagacaagagttac

SEQ ID NO: 10484 - RNA, 18 nt, Homo sapiens
  source 1..18: mol_type = genomic RNA
gcctagacaagagttaca

SEQ ID NO: 10485 - RNA, 18 nt, Homo sapiens
  source 1..18: mol_type = genomic RNA
cctagacaagagttacat

SEQ ID NO: 10486 - RNA, 18 nt, Homo sapiens
  source 1..18: mol_type = genomic RNA
ctagacaagagttacatc

SEQ ID NO: 10487 - RNA, 18 nt, Homo sapiens
  source 1..18: mol_type = genomic RNA
tagacaagagttacatca

SEQ ID NO: 10488 - RNA, 18 nt, Homo sapiens
  source 1..18: mol_type = genomic RNA
agacaagagttacatcac

SEQ ID NO: 10489 - RNA, 18 nt, Homo sapiens
  source 1..18: mol_type = genomic RNA
caagagttacatcacctg

SEQ ID NO: 10490 - RNA, 18 nt, Homo sapiens
  source 1..18: mol_type = genomic RNA
aagagttacatcacctgg

SEQ ID NO: 10491 - RNA, 18 nt, Homo sapiens
  source 1..18: mol_type = genomic RNA
agagttacatcacctggg

SEQ ID NO: 10492 - RNA, 18 nt, Homo sapiens
  source 1..18: mol_type = genomic RNA
gagttacatcacctgggt

SEQ ID NO: 10493 - RNA, 18 nt, Homo sapiens
  source 1..18: mol_type = genomic RNA
agttacatcacctgggtg

SEQ ID NO: 10494 - RNA, 18 nt, Homo sapiens
  source 1..18: mol_type = genomic RNA
tcacctgggtgatcagta

SEQ ID NO: 10495 - RNA, 18 nt, Homo sapiens
  source 1..18: mol_type = genomic RNA
cacctgggtgatcagtac

SEQ ID NO: 10496 - RNA, 18 nt, Homo sapiens
  source 1..18: mol_type = genomic RNA
acctgggtgatcagtaca

SEQ ID NO: 10497 - RNA, 18 nt, Homo sapiens
  source 1..18: mol_type = genomic RNA
cctgggtgatcagtacag

SEQ ID NO: 10498 - RNA, 18 nt, Homo sapiens
  source 1..18: mol_type = genomic RNA
ctgggtgatcagtacaga

SEQ ID NO: 10499 - RNA, 18 nt, Homo sapiens
  source 1..18: mol_type = genomic RNA
tgggtgatcagtacagaa

SEQ ID NO: 10500 - RNA, 18 nt, Homo sapiens
  source 1..18: mol_type = genomic RNA
gggtgatcagtacagaag

SEQ ID NO: 10501 - RNA, 18 nt, Homo sapiens
  source 1..18: mol_type = genomic RNA
ggtgatcagtacagaagt

SEQ ID NO: 10502 - RNA, 18 nt, Homo sapiens
  source 1..18: mol_type = genomic RNA
gtgatcagtacagaagta

SEQ ID NO: 10503 - RNA, 18 nt, Homo sapiens
  source 1..18: mol_type = genomic RNA
tgatcagtacagaagtat

SEQ ID NO: 10504 - RNA, 18 nt, Homo sapiens
  source 1..18: mol_type = genomic RNA
gatcagtacagaagtatg

SEQ ID NO: 10505 - RNA, 18 nt, Homo sapiens
  source 1..18: mol_type = genomic RNA
atcagtacagaagtatgt

SEQ ID NO: 10506 - RNA, 18 nt, Homo sapiens
  source 1..18: mol_type = genomic RNA
tcagtacagaagtatgtc

SEQ ID NO: 10507 - RNA, 18 nt, Homo sapiens
  source 1..18: mol_type = genomic RNA
cagtacagaagtatgtca

SEQ ID NO: 10508 - RNA, 18 nt, Homo sapiens
  source 1..18: mol_type = genomic RNA
agtacagaagtatgtcac

SEQ ID NO: 10509 - RNA, 18 nt, Homo sapiens
  source 1..18: mol_type = genomic RNA
gtacagaagtatgtcaca

SEQ ID NO: 10510 - RNA, 18 nt, Homo sapiens
  source 1..18: mol_type = genomic RNA
tacagaagtatgtcacaa

SEQ ID NO: 10511 - RNA, 18 nt, Homo sapiens
  source 1..18: mol_type = genomic RNA
acagaagtatgtcacaaa

SEQ ID NO: 10512 - RNA, 18 nt, Homo sapiens
  source 1..18: mol_type = genomic RNA
cagaagtatgtcacaaag

SEQ ID NO: 10513 - RNA, 18 nt, Homo sapiens
  source 1..18: mol_type = genomic RNA
agaagtatgtcacaaagc

SEQ ID NO: 10514 - RNA, 18 nt, Homo sapiens
  source 1..18: mol_type = genomic RNA
gaagtatgtcacaaagcc

SEQ ID NO: 10515 - RNA, 18 nt, Homo sapiens
  source 1..18: mol_type = genomic RNA
aagtatgtcacaaagccc

SEQ ID NO: 10516 - RNA, 18 nt, Homo sapiens
  source 1..18: mol_type = genomic RNA
agtatgtcacaaagcccc

SEQ ID NO: 10517 - RNA, 18 nt, Homo sapiens
  source 1..18: mol_type = genomic RNA
gtatgtcacaaagcccct

SEQ ID NO: 10518 - RNA, 18 nt, Homo sapiens
  source 1..18: mol_type = genomic RNA
tatgtcacaaagcccctg

SEQ ID NO: 10519 - RNA, 18 nt, Homo sapiens
  source 1..18: mol_type = genomic RNA
atgtcacaaagcccctgt

SEQ ID NO: 10520 - RNA, 18 nt, Homo sapiens
  source 1..18: mol_type = genomic RNA
agttacatcacctgggtt

SEQ ID NO: 10521 - RNA, 18 nt, Homo sapiens
  source 1..18: mol_type = genomic RNA
gttacatcacctgggtta

SEQ ID NO: 10522 - RNA, 18 nt, Homo sapiens
  source 1..18: mol_type = genomic RNA
ttacatcacctgggttat

SEQ ID NO: 10523 - RNA, 18 nt, Homo sapiens
  source 1..18: mol_type = genomic RNA
tacatcacctgggttatc

SEQ ID NO: 10524 - RNA, 18 nt, Homo sapiens
  source 1..18: mol_type = genomic RNA
acatcacctgggttatca

SEQ ID NO: 10525 - RNA, 18 nt, Homo sapiens
  source 1..18: mol_type = genomic RNA
catcacctgggttatcag

SEQ ID NO: 10526 - RNA, 18 nt, Homo sapiens
  source 1..18: mol_type = genomic RNA
atcacctgggttatcagt

SEQ ID NO: 10527 - RNA, 18 nt, Homo sapiens
  source 1..18: mol_type = genomic RNA
tcacctgggttatcagtg

SEQ ID NO: 10528 - RNA, 18 nt, Homo sapiens
  source 1..18: mol_type = genomic RNA
cacctgggttatcagtgc

SEQ ID NO: 10529 - RNA, 18 nt, Homo sapiens
  source 1..18: mol_type = genomic RNA
acctgggttatcagtgca

SEQ ID NO: 10530 - RNA, 18 nt, Homo sapiens
  source 1..18: mol_type = genomic RNA
cctgggttatcagtgcag

SEQ ID NO: 10531 - RNA, 18 nt, Homo sapiens
  source 1..18: mol_type = genomic RNA
ctgggttatcagtgcaga

SEQ ID NO: 10532 - RNA, 18 nt, Homo sapiens
  source 1..18: mol_type = genomic RNA
tgggttatcagtgcagaa

SEQ ID NO: 10533 - RNA, 18 nt, Homo sapiens
  source 1..18: mol_type = genomic RNA
gggttatcagtgcagaaa

SEQ ID NO: 10534 - RNA, 18 nt, Homo sapiens
  source 1..18: mol_type = genomic RNA
ggttatcagtgcagaaat

SEQ ID NO: 10535 - RNA, 18 nt, Homo sapiens
  source 1..18: mol_type = genomic RNA
tatcagtgcagaaatatg

SEQ ID NO: 10536 - RNA, 18 nt, Homo sapiens
  source 1..18: mol_type = genomic RNA
atcagtgcagaaatatgt

SEQ ID NO: 10537 - RNA, 18 nt, Homo sapiens
  source 1..18: mol_type = genomic RNA
tcagtgcagaaatatgtc

SEQ ID NO: 10538 - RNA, 18 nt, Homo sapiens
  source 1..18: mol_type = genomic RNA
cagtgcagaaatatgtca

SEQ ID NO: 10539 - RNA, 18 nt, Homo sapiens
  source 1..18: mol_type = genomic RNA
agtgcagaaatatgtcac

SEQ ID NO: 10540 - RNA, 18 nt, Homo sapiens
  source 1..18: mol_type = genomic RNA
gtgcagaaatatgtcaca

SEQ ID NO: 10541 - RNA, 18 nt, Homo sapiens
  source 1..18: mol_type = genomic RNA
tgcagaaatatgtcacaa

SEQ ID NO: 10542 - RNA, 18 nt, Homo sapiens
  source 1..18: mol_type = genomic RNA
gcagaaatatgtcacaaa

SEQ ID NO: 10543 - RNA, 18 nt, Homo sapiens
  source 1..18: mol_type = genomic RNA
agaaatatgtcacaaagc

SEQ ID NO: 10544 - RNA, 18 nt, Homo sapiens
  source 1..18: mol_type = genomic RNA
gaaatatgtcacaaagcc

SEQ ID NO: 10545 - RNA, 18 nt, Homo sapiens
  source 1..18: mol_type = genomic RNA
aaatatgtcacaaagccc

SEQ ID NO: 10546 - RNA, 18 nt, Homo sapiens
  source 1..18: mol_type = genomic RNA
aatatgtcacaaagcccc

SEQ ID NO: 10547 - RNA, 18 nt, Homo sapiens
  source 1..18: mol_type = genomic RNA
atatgtcacaaagcccct

SEQ ID NO: 10548 - RNA, 18 nt, Homo sapiens
  source 1..18: mol_type = genomic RNA
cacaaagcccctgtaggt

SEQ ID NO: 10549 - RNA, 18 nt, Homo sapiens
  source 1..18: mol_type = genomic RNA
acaaagcccctgtaggtc

SEQ ID NO: 10550 - RNA, 18 nt, Homo sapiens
  source 1..18: mol_type = genomic RNA
caaagcccctgtaggtcg

SEQ ID NO: 10551 - RNA, 18 nt, Homo sapiens
  source 1..18: mol_type = genomic RNA
aaagcccctgtaggtcga

SEQ ID NO: 10552 - RNA, 18 nt, Homo sapiens
  source 1..18: mol_type = genomic RNA
aagcccctgtaggtcgag

SEQ ID NO: 10553 - RNA, 18 nt, Homo sapiens
  source 1..18: mol_type = genomic RNA
agcccctgtaggtcgagt

SEQ ID NO: 10554 - RNA, 18 nt, Homo sapiens
  source 1..18: mol_type = genomic RNA
gcccctgtaggtcgagtc

SEQ ID NO: 10555 - RNA, 18 nt, Homo sapiens
  source 1..18: mol_type = genomic RNA
cccctgtaggtcgagtct

SEQ ID NO: 10556 - RNA, 18 nt, Homo sapiens
  source 1..18: mol_type = genomic RNA
ccctgtaggtcgagtcta

SEQ ID NO: 10557 - RNA, 18 nt, Homo sapiens
  source 1..18: mol_type = genomic RNA
cctgtaggtcgagtctag

SEQ ID NO: 10558 - RNA, 18 nt, Homo sapiens
  source 1..18: mol_type = genomic RNA
ctgtaggtcgagtctaga

SEQ ID NO: 10559 - RNA, 18 nt, Homo sapiens
  source 1..18: mol_type = genomic RNA
tgtaggtcgagtctagac

SEQ ID NO: 10560 - RNA, 18 nt, Homo sapiens
  source 1..18: mol_type = genomic RNA
gtaggtcgagtctagaca

SEQ ID NO: 10561 - RNA, 18 nt, Homo sapiens
  source 1..18: mol_type = genomic RNA
taggtcgagtctagacaa

SEQ ID NO: 10562 - RNA, 18 nt, Homo sapiens
  source 1..18: mol_type = genomic RNA
aggtcgagtctagacaag

SEQ ID NO: 10563 - RNA, 18 nt, Homo sapiens
  source 1..18: mol_type = genomic RNA
ggtcgagtctagacaaga

SEQ ID NO: 10564 - RNA, 18 nt, Homo sapiens
  source 1..18: mol_type = genomic RNA
gtcgagtctagacaagag

SEQ ID NO: 10565 - RNA, 18 nt, Homo sapiens
  source 1..18: mol_type = genomic RNA
tcgagtctagacaagagt

SEQ ID NO: 10566 - RNA, 18 nt, Homo sapiens
  source 1..18: mol_type = genomic RNA
cgagtctagacaagagtt

SEQ ID NO: 10567 - RNA, 18 nt, Homo sapiens
  source 1..18: mol_type = genomic RNA
gagtctagacaagagtta

SEQ ID NO: 10568 - RNA, 18 nt, Homo sapiens
  source 1..18: mol_type = genomic RNA
agtctagacaagagttac

SEQ ID NO: 10569 - RNA, 18 nt, Homo sapiens
  source 1..18: mol_type = genomic RNA
gtctagacaagagttaca

SEQ ID NO: 10570 - RNA, 18 nt, Homo sapiens
  source 1..18: mol_type = genomic RNA
tctagacaagagttacat

SEQ ID NO: 10571 - RNA, 18 nt, Homo sapiens
  source 1..18: mol_type = genomic RNA
tagacaagagttacatct

SEQ ID NO: 10572 - RNA, 18 nt, Homo sapiens
  source 1..18: mol_type = genomic RNA
agacaagagttacatctc

SEQ ID NO: 10573 - RNA, 18 nt, Homo sapiens
  source 1..18: mol_type = genomic RNA
gacaagagttacatctcc

SEQ ID NO: 10574 - RNA, 18 nt, Homo sapiens
  source 1..18: mol_type = genomic RNA
acaagagttacatctcct

SEQ ID NO: 10575 - RNA, 18 nt, Homo sapiens
  source 1..18: mol_type = genomic RNA
caagagttacatctcctg

SEQ ID NO: 10576 - RNA, 18 nt, Homo sapiens
  source 1..18: mol_type = genomic RNA
aagagttacatctcctgg

SEQ ID NO: 10577 - RNA, 18 nt, Homo sapiens
  source 1..18: mol_type = genomic RNA
agagttacatctcctggg

SEQ ID NO: 10578 - RNA, 18 nt, Homo sapiens
  source 1..18: mol_type = genomic RNA
gagttacatctcctgggt

SEQ ID NO: 10579 - RNA, 18 nt, Homo sapiens
  source 1..18: mol_type = genomic RNA
agttacatctcctgggtg

SEQ ID NO: 10580 - RNA, 18 nt, Homo sapiens
  source 1..18: mol_type = genomic RNA
gttacatctcctgggtga

SEQ ID NO: 10581 - RNA, 18 nt, Homo sapiens
  source 1..18: mol_type = genomic RNA
ttacatctcctgggtgat

SEQ ID NO: 10582 - RNA, 18 nt, Homo sapiens
  source 1..18: mol_type = genomic RNA
tacatctcctgggtgatc

SEQ ID NO: 10583 - RNA, 18 nt, Homo sapiens
  source 1..18: mol_type = genomic RNA
acatctcctgggtgatca

SEQ ID NO: 10584 - RNA, 18 nt, Homo sapiens
  source 1..18: mol_type = genomic RNA
catctcctgggtgatcag

SEQ ID NO: 10585 - RNA, 18 nt, Homo sapiens
  source 1..18: mol_type = genomic RNA
atctcctgggtgatcagt

SEQ ID NO: 10586 - RNA, 18 nt, Homo sapiens
  source 1..18: mol_type = genomic RNA
tctcctgggtgatcagtg

SEQ ID NO: 10587 - RNA, 18 nt, Homo sapiens
  source 1..18: mol_type = genomic RNA
ctcctgggtgatcagtgc

SEQ ID NO: 10588 - RNA, 18 nt, Homo sapiens
  source 1..18: mol_type = genomic RNA
tcctgggtgatcagtgca

SEQ ID NO: 10589 - RNA, 18 nt, Homo sapiens
  source 1..18: mol_type = genomic RNA
cctgggtgatcagtgcaa

SEQ ID NO: 10590 - RNA, 18 nt, Homo sapiens
  source 1..18: mol_type = genomic RNA
ctgggtgatcagtgcaaa

SEQ ID NO: 10591 - RNA, 18 nt, Homo sapiens
  source 1..18: mol_type = genomic RNA
tgggtgatcagtgcaaag

SEQ ID NO: 10592 - RNA, 18 nt, Homo sapiens
  source 1..18: mol_type = genomic RNA
gggtgatcagtgcaaaga

SEQ ID NO: 10593 - RNA, 18 nt, Homo sapiens
  source 1..18: mol_type = genomic RNA
ggtgatcagtgcaaagat

SEQ ID NO: 10594 - RNA, 18 nt, Homo sapiens
  source 1..18: mol_type = genomic RNA
gtgatcagtgcaaagata

SEQ ID NO: 10595 - RNA, 18 nt, Homo sapiens
  source 1..18: mol_type = genomic RNA
tgatcagtgcaaagatat

SEQ ID NO: 10596 - RNA, 18 nt, Homo sapiens
  source 1..18: mol_type = genomic RNA
gatcagtgcaaagatatg

SEQ ID NO: 10597 - RNA, 18 nt, Homo sapiens
  source 1..18: mol_type = genomic RNA
atcagtgcaaagatatgt

SEQ ID NO: 10598 - RNA, 18 nt, Homo sapiens
  source 1..18: mol_type = genomic RNA
tcagtgcaaagatatgtc

SEQ ID NO: 10599 - RNA, 18 nt, Homo sapiens
  source 1..18: mol_type = genomic RNA
cagtgcaaagatatgtca

SEQ ID NO: 10600 - RNA, 18 nt, Homo sapiens
  source 1..18: mol_type = genomic RNA
agtgcaaagatatgtcac

SEQ ID NO: 10601 - RNA, 18 nt, Homo sapiens
  source 1..18: mol_type = genomic RNA
gtgcaaagatatgtcaca

SEQ ID NO: 10602 - RNA, 18 nt, Homo sapiens
  source 1..18: mol_type = genomic RNA
tgcaaagatatgtcacaa

SEQ ID NO: 10603 - RNA, 18 nt, Homo sapiens
  source 1..18: mol_type = genomic RNA
gcaaagatatgtcacaaa

SEQ ID NO: 10604 - RNA, 18 nt, Homo sapiens
  source 1..18: mol_type = genomic RNA
aaagatatgtcacaaagc

SEQ ID NO: 10605 - RNA, 18 nt, Homo sapiens
  source 1..18: mol_type = genomic RNA
aagatatgtcacaaagcc

SEQ ID NO: 10606 - RNA, 18 nt, Homo sapiens
  source 1..18: mol_type = genomic RNA
agatatgtcacaaagccc

SEQ ID NO: 10607 - RNA, 18 nt, Homo sapiens
  source 1..18: mol_type = genomic RNA
gatatgtcacaaagcccc

SEQ ID NO: 10608 - RNA, 18 nt, Homo sapiens
  source 1..18: mol_type = genomic RNA
atatgtcacaaagccccc

SEQ ID NO: 10609 - RNA, 18 nt, Homo sapiens
  source 1..18: mol_type = genomic RNA
tatgtcacaaagccccct

SEQ ID NO: 10610 - RNA, 18 nt, Homo sapiens
  source 1..18: mol_type = genomic RNA
atgtcacaaagccccctg

SEQ ID NO: 10611 - RNA, 18 nt, Homo sapiens
  source 1..18: mol_type = genomic RNA
tgtcacaaagccccctgt

SEQ ID NO: 10612 - RNA, 18 nt, Homo sapiens
  source 1..18: mol_type = genomic RNA
gtcacaaagccccctgta

SEQ ID NO: 10613 - RNA, 18 nt, Homo sapiens
  source 1..18: mol_type = genomic RNA
agccccctgtagacaaat

SEQ ID NO: 10614 - RNA, 18 nt, Homo sapiens
  source 1..18: mol_type = genomic RNA
gccccctgtagacaaatc

SEQ ID NO: 10615 - RNA, 18 nt, Homo sapiens
  source 1..18: mol_type = genomic RNA
ccccctgtagacaaatcc

SEQ ID NO: 10616 - RNA, 18 nt, Homo sapiens
  source 1..18: mol_type = genomic RNA
cccctgtagacaaatccc

SEQ ID NO: 10617 - RNA, 18 nt, Homo sapiens
  source 1..18: mol_type = genomic RNA
ccctgtagacaaatccca

SEQ ID NO: 10618 - RNA, 18 nt, Homo sapiens
  source 1..18: mol_type = genomic RNA
cctgtagacaaatcccag

SEQ ID NO: 10619 - RNA, 18 nt, Homo sapiens
  source 1..18: mol_type = genomic RNA
ctgtagacaaatcccaga

SEQ ID NO: 10620 - RNA, 18 nt, Homo sapiens
  source 1..18: mol_type = genomic RNA
tgtagacaaatcccagaa

SEQ ID NO: 10621 - RNA, 18 nt, Homo sapiens
  source 1..18: mol_type = genomic RNA
gtagacaaatcccagaaa

SEQ ID NO: 10622 - RNA, 18 nt, Homo sapiens
  source 1..18: mol_type = genomic RNA
tagacaaatcccagaaaa

SEQ ID NO: 10623 - RNA, 18 nt, Homo sapiens
  source 1..18: mol_type = genomic RNA
agacaaatcccagaaaat

SEQ ID NO: 10624 - RNA, 18 nt, Homo sapiens
  source 1..18: mol_type = genomic RNA
gacaaatcccagaaaatt

SEQ ID NO: 10625 - RNA, 18 nt, Homo sapiens
  source 1..18: mol_type = genomic RNA
acaaatcccagaaaattg

SEQ ID NO: 10626 - RNA, 18 nt, Homo sapiens
  source 1..18: mol_type = genomic RNA
aattgttacatcacctgg

SEQ ID NO: 10627 - RNA, 18 nt, Homo sapiens
  source 1..18: mol_type = genomic RNA
attgttacatcacctggg

SEQ ID NO: 10628 - RNA, 18 nt, Homo sapiens
  source 1..18: mol_type = genomic RNA
ttgttacatcacctgggt

SEQ ID NO: 10629 - RNA, 18 nt, Homo sapiens
  source 1..18: mol_type = genomic RNA
cacctgggtgatcagtgg

SEQ ID NO: 10630 - RNA, 18 nt, Homo sapiens
  source 1..18: mol_type = genomic RNA
acctgggtgatcagtgga

SEQ ID NO: 10631 - RNA, 18 nt, Homo sapiens
  source 1..18: mol_type = genomic RNA
cctgggtgatcagtggag

SEQ ID NO: 10632 - RNA, 18 nt, Homo sapiens
  source 1..18: mol_type = genomic RNA
ctgggtgatcagtggaga

SEQ ID NO: 10633 - RNA, 18 nt, Homo sapiens
  source 1..18: mol_type = genomic RNA
tgggtgatcagtggagat

SEQ ID NO: 10634 - RNA, 18 nt, Homo sapiens
  source 1..18: mol_type = genomic RNA
gggtgatcagtggagata

SEQ ID NO: 10635 - RNA, 18 nt, Homo sapiens
  source 1..18: mol_type = genomic RNA
ggtgatcagtggagatat

SEQ ID NO: 10636 - RNA, 18 nt, Homo sapiens
  source 1..18: mol_type = genomic RNA
gtgatcagtggagatatg

SEQ ID NO: 10637 - RNA, 18 nt, Homo sapiens
  source 1..18: mol_type = genomic RNA
tgatcagtggagatatgt

SEQ ID NO: 10638 - RNA, 18 nt, Homo sapiens
  source 1..18: mol_type = genomic RNA
gatcagtggagatatgtg

SEQ ID NO: 10639 - RNA, 18 nt, Homo sapiens
  source 1..18: mol_type = genomic RNA
atcagtggagatatgtgt

SEQ ID NO: 10640 - RNA, 18 nt, Homo sapiens
  source 1..18: mol_type = genomic RNA
tcagtggagatatgtgtc

SEQ ID NO: 10641 - RNA, 18 nt, Homo sapiens
  source 1..18: mol_type = genomic RNA
cagtggagatatgtgtca

SEQ ID NO: 10642 - RNA, 18 nt, Homo sapiens
  source 1..18: mol_type = genomic RNA
agtggagatatgtgtcac

SEQ ID NO: 10643 - RNA, 18 nt, Homo sapiens
  source 1..18: mol_type = genomic RNA
gtggagatatgtgtcaca

SEQ ID NO: 10644 - RNA, 18 nt, Homo sapiens
  source 1..18: mol_type = genomic RNA
tggagatatgtgtcacaa

SEQ ID NO: 10645 - RNA, 18 nt, Homo sapiens
  source 1..18: mol_type = genomic RNA
ggagatatgtgtcacaat

SEQ ID NO: 10646 - RNA, 18 nt, Homo sapiens
  source 1..18: mol_type = genomic RNA
tatgtgtcacaattcccc

SEQ ID NO: 10647 - RNA, 18 nt, Homo sapiens
  source 1..18: mol_type = genomic RNA
atgtgtcacaattcccct

SEQ ID NO: 10648 - RNA, 18 nt, Homo sapiens
  source 1..18: mol_type = genomic RNA
tgtgtcacaattcccctt

SEQ ID NO: 10649 - RNA, 18 nt, Homo sapiens
  source 1..18: mol_type = genomic RNA
tcacaattcccctttagg

SEQ ID NO: 10650 - RNA, 18 nt, Homo sapiens
  source 1..18: mol_type = genomic RNA
cacaattcccctttaggc

SEQ ID NO: 10651 - RNA, 18 nt, Homo sapiens
  source 1..18: mol_type = genomic RNA
acaattcccctttaggca

SEQ ID NO: 10652 - RNA, 18 nt, Homo sapiens
  source 1..18: mol_type = genomic RNA
caattcccctttaggcac

SEQ ID NO: 10653 - RNA, 18 nt, Homo sapiens
  source 1..18: mol_type = genomic RNA
aattcccctttaggcaca

SEQ ID NO: 10654 - RNA, 18 nt, Homo sapiens
  source 1..18: mol_type = genomic RNA
attcccctttaggcacag

SEQ ID NO: 10655 - RNA, 18 nt, Homo sapiens
  source 1..18: mol_type = genomic RNA
ttcccctttaggcacagc

SEQ ID NO: 10656 - RNA, 18 nt, Homo sapiens
  source 1..18: mol_type = genomic RNA
tcccctttaggcacagct

SEQ ID NO: 10657 - RNA, 18 nt, Homo sapiens
  source 1..18: mol_type = genomic RNA
cccctttaggcacagctt

SEQ ID NO: 10658 - RNA, 18 nt, Homo sapiens
  source 1..18: mol_type = genomic RNA
ccctttaggcacagctta

SEQ ID NO: 10659 - RNA, 18 nt, Homo sapiens
  source 1..18: mol_type = genomic RNA
cctttaggcacagcttag

SEQ ID NO: 10660 - RNA, 18 nt, Homo sapiens
  source 1..18: mol_type = genomic RNA
ctttaggcacagcttaga

SEQ ID NO: 10661 - RNA, 18 nt, Homo sapiens
  source 1..18: mol_type = genomic RNA
tttaggcacagcttagac

SEQ ID NO: 10662 - RNA, 18 nt, Homo sapiens
  source 1..18: mol_type = genomic RNA
ttaggcacagcttagaca

SEQ ID NO: 10663 - RNA, 18 nt, Homo sapiens
  source 1..18: mol_type = genomic RNA
taggcacagcttagacaa

SEQ ID NO: 10664 - RNA, 18 nt, Homo sapiens
  source 1..18: mol_type = genomic RNA
aggcacagcttagacaag

SEQ ID NO: 10665 - RNA, 18 nt, Homo sapiens
  source 1..18: mol_type = genomic RNA
ggcacagcttagacaagc

SEQ ID NO: 10666 - RNA, 18 nt, Homo sapiens
  source 1..18: mol_type = genomic RNA
gcacagcttagacaagcg

SEQ ID NO: 10667 - RNA, 18 nt, Homo sapiens
  source 1..18: mol_type = genomic RNA
cacagcttagacaagcgt

SEQ ID NO: 10668 - RNA, 18 nt, Homo sapiens
  source 1..18: mol_type = genomic RNA
acagcttagacaagcgtt

SEQ ID NO: 10669 - RNA, 18 nt, Homo sapiens
  source 1..18: mol_type = genomic RNA
cagcttagacaagcgtta

SEQ ID NO: 10670 - RNA, 18 nt, Homo sapiens
  source 1..18: mol_type = genomic RNA
agcttagacaagcgttac

SEQ ID NO: 10671 - RNA, 18 nt, Homo sapiens
  source 1..18: mol_type = genomic RNA
gcttagacaagcgttaca

SEQ ID NO: 10672 - RNA, 18 nt, Homo sapiens
  source 1..18: mol_type = genomic RNA
ttagacaagcgttacatc

SEQ ID NO: 10673 - RNA, 18 nt, Homo sapiens
  source 1..18: mol_type = genomic RNA
tagacaagcgttacatca

SEQ ID NO: 10674 - RNA, 18 nt, Homo sapiens
  source 1..18: mol_type = genomic RNA
agacaagcgttacatcac

SEQ ID NO: 10675 - RNA, 18 nt, Homo sapiens
  source 1..18: mol_type = genomic RNA
gacaagcgttacatcaca

SEQ ID NO: 10676 - RNA, 18 nt, Homo sapiens
  source 1..18: mol_type = genomic RNA
acaagcgttacatcacat

SEQ ID NO: 10677 - RNA, 18 nt, Homo sapiens
  source 1..18: mol_type = genomic RNA
caagcgttacatcacatg

SEQ ID NO: 10678 - RNA, 18 nt, Homo sapiens
  source 1..18: mol_type = genomic RNA
aagcgttacatcacatga

SEQ ID NO: 10679 - RNA, 18 nt, Homo sapiens
  source 1..18: mol_type = genomic RNA
agcgttacatcacatgag

SEQ ID NO: 10680 - RNA, 18 nt, Homo sapiens
  source 1..18: mol_type = genomic RNA
gcgttacatcacatgagt

SEQ ID NO: 10681 - RNA, 18 nt, Homo sapiens
  source 1..18: mol_type = genomic RNA
tacatcacatgagtgatc

SEQ ID NO: 10682 - RNA, 18 nt, Homo sapiens
  source 1..18: mol_type = genomic RNA
acatcacatgagtgatca

SEQ ID NO: 10683 - RNA, 18 nt, Homo sapiens
  source 1..18: mol_type = genomic RNA
catcacatgagtgatcat

SEQ ID NO: 10684 - RNA, 18 nt, Homo sapiens
  source 1..18: mol_type = genomic RNA
cacatgagtgatcattgc

SEQ ID NO: 10685 - RNA, 18 nt, Homo sapiens
  source 1..18: mol_type = genomic RNA
acatgagtgatcattgca

SEQ ID NO: 10686 - RNA, 18 nt, Homo sapiens
  source 1..18: mol_type = genomic RNA
catgagtgatcattgcag

SEQ ID NO: 10687 - RNA, 18 nt, Homo sapiens
  source 1..18: mol_type = genomic RNA
atgagtgatcattgcaga

SEQ ID NO: 10688 - RNA, 18 nt, Homo sapiens
  source 1..18: mol_type = genomic RNA
tgagtgatcattgcagag

SEQ ID NO: 10689 - RNA, 18 nt, Homo sapiens
  source 1..18: mol_type = genomic RNA
gagtgatcattgcagagt

SEQ ID NO: 10690 - RNA, 18 nt, Homo sapiens
  source 1..18: mol_type = genomic RNA
agtgatcattgcagagtt

SEQ ID NO: 10691 - RNA, 18 nt, Homo sapiens
  source 1..18: mol_type = genomic RNA
attgcagagttatgtcac

SEQ ID NO: 10692 - RNA, 18 nt, Homo sapiens
  source 1..18: mol_type = genomic RNA
ttgcagagttatgtcact

SEQ ID NO: 10693 - RNA, 18 nt, Homo sapiens
  source 1..18: mol_type = genomic RNA
tgcagagttatgtcacta

SEQ ID NO: 10694 - RNA, 18 nt, Homo sapiens
  source 1..18: mol_type = genomic RNA
gcagagttatgtcactat

SEQ ID NO: 10695 - RNA, 18 nt, Homo sapiens
  source 1..18: mol_type = genomic RNA
agagttatgtcactatgc

SEQ ID NO: 10696 - RNA, 18 nt, Homo sapiens
  source 1..18: mol_type = genomic RNA
gagttatgtcactatgcc

SEQ ID NO: 10697 - RNA, 18 nt, Homo sapiens
  source 1..18: mol_type = genomic RNA
agttatgtcactatgccc

SEQ ID NO: 10698 - RNA, 18 nt, Homo sapiens
  source 1..18: mol_type = genomic RNA
gttatgtcactatgcccc

SEQ ID NO: 10699 - RNA, 18 nt, Homo sapiens
  source 1..18: mol_type = genomic RNA
ttatgtcactatgccccc

SEQ ID NO: 10700 - RNA, 18 nt, Homo sapiens
  source 1..18: mol_type = genomic RNA
tatgtcactatgccccca

SEQ ID NO: 10701 - RNA, 18 nt, Homo sapiens
  source 1..18: mol_type = genomic RNA
atgtcactatgcccccat

SEQ ID NO: 10702 - RNA, 18 nt, Homo sapiens
  source 1..18: mol_type = genomic RNA
tgtcactatgcccccata

SEQ ID NO: 10703 - RNA, 18 nt, Homo sapiens
  source 1..18: mol_type = genomic RNA
gtcactatgcccccatag

SEQ ID NO: 10704 - RNA, 18 nt, Homo sapiens
  source 1..18: mol_type = genomic RNA
tcactatgcccccatagg

SEQ ID NO: 10705 - RNA, 18 nt, Homo sapiens
  source 1..18: mol_type = genomic RNA
cactatgcccccataggc

SEQ ID NO: 10706 - RNA, 18 nt, Homo sapiens
  source 1..18: mol_type = genomic RNA
actatgcccccataggca

SEQ ID NO: 10707 - RNA, 18 nt, Homo sapiens
  source 1..18: mol_type = genomic RNA
ctatgcccccataggcag

SEQ ID NO: 10708 - RNA, 18 nt, Homo sapiens
  source 1..18: mol_type = genomic RNA
tatgcccccataggcaga

SEQ ID NO: 10709 - RNA, 18 nt, Homo sapiens
  source 1..18: mol_type = genomic RNA
atgcccccataggcagat

SEQ ID NO: 10710 - RNA, 18 nt, Homo sapiens
  source 1..18: mol_type = genomic RNA
tgcccccataggcagatc

SEQ ID NO: 10711 - RNA, 18 nt, Homo sapiens
  source 1..18: mol_type = genomic RNA
cccccataggcagatcca

SEQ ID NO: 10712 - RNA, 18 nt, Homo sapiens
  source 1..18: mol_type = genomic RNA
ccccataggcagatccaa

SEQ ID NO: 10713 - RNA, 18 nt, Homo sapiens
  source 1..18: mol_type = genomic RNA
cccataggcagatccaag

SEQ ID NO: 10714 - RNA, 18 nt, Homo sapiens
  source 1..18: mol_type = genomic RNA
ccataggcagatccaaga

SEQ ID NO: 10715 - RNA, 18 nt, Homo sapiens
  source 1..18: mol_type = genomic RNA
cataggcagatccaagac

SEQ ID NO: 10716 - RNA, 18 nt, Homo sapiens
  source 1..18: mol_type = genomic RNA
ataggcagatccaagaca

SEQ ID NO: 10717 - RNA, 18 nt, Homo sapiens
  source 1..18: mol_type = genomic RNA
taggcagatccaagacaa

SEQ ID NO: 10718 - RNA, 18 nt, Homo sapiens
  source 1..18: mol_type = genomic RNA
aggcagatccaagacaag

SEQ ID NO: 10719 - RNA, 18 nt, Homo sapiens
  source 1..18: mol_type = genomic RNA
ggcagatccaagacaaga

SEQ ID NO: 10720 - RNA, 18 nt, Homo sapiens
  source 1..18: mol_type = genomic RNA
gcagatccaagacaagag

SEQ ID NO: 10721 - RNA, 18 nt, Homo sapiens
  source 1..18: mol_type = genomic RNA
cagatccaagacaagagt

SEQ ID NO: 10722 - RNA, 18 nt, Homo sapiens
  source 1..18: mol_type = genomic RNA
agatccaagacaagagtc

SEQ ID NO: 10723 - RNA, 18 nt, Homo sapiens
  source 1..18: mol_type = genomic RNA
gatccaagacaagagtcc

SEQ ID NO: 10724 - RNA, 18 nt, Homo sapiens
  source 1..18: mol_type = genomic RNA
atccaagacaagagtcca

SEQ ID NO: 10725 - RNA, 18 nt, Homo sapiens
  source 1..18: mol_type = genomic RNA
tccaagacaagagtccat

SEQ ID NO: 10726 - RNA, 18 nt, Homo sapiens
  source 1..18: mol_type = genomic RNA
ccaagacaagagtccatc

SEQ ID NO: 10727 - RNA, 18 nt, Homo sapiens
  source 1..18: mol_type = genomic RNA
caagacaagagtccatca

SEQ ID NO: 10728 - RNA, 18 nt, Homo sapiens
  source 1..18: mol_type = genomic RNA
aagacaagagtccatcac

SEQ ID NO: 10729 - RNA, 18 nt, Homo sapiens
  source 1..18: mol_type = genomic RNA
agacaagagtccatcacc

SEQ ID NO: 10730 - RNA, 18 nt, Homo sapiens
  source 1..18: mol_type = genomic RNA
gacaagagtccatcacct

SEQ ID NO: 10731 - RNA, 18 nt, Homo sapiens
  source 1..18: mol_type = genomic RNA
acaagagtccatcacctg

SEQ ID NO: 10732 - RNA, 18 nt, Homo sapiens
  source 1..18: mol_type = genomic RNA
caagagtccatcacctgg

SEQ ID NO: 10733 - RNA, 18 nt, Homo sapiens
  source 1..18: mol_type = genomic RNA
aagagtccatcacctggg

SEQ ID NO: 10734 - RNA, 18 nt, Homo sapiens
  source 1..18: mol_type = genomic RNA
agagtccatcacctgggt

SEQ ID NO: 10735 - RNA, 18 nt, Homo sapiens
  source 1..18: mol_type = genomic RNA
gagtccatcacctgggtg

SEQ ID NO: 10736 - RNA, 18 nt, Homo sapiens
  source 1..18: mol_type = genomic RNA
agtccatcacctgggtga

SEQ ID NO: 10737 - RNA, 18 nt, Homo sapiens
  source 1..18: mol_type = genomic RNA
tgggtgatcagtgcagaa

SEQ ID NO: 10738 - RNA, 18 nt, Homo sapiens
  source 1..18: mol_type = genomic RNA
gggtgatcagtgcagaaa

SEQ ID NO: 10739 - RNA, 18 nt, Homo sapiens
  source 1..18: mol_type = genomic RNA
ggtgatcagtgcagaaat

SEQ ID NO: 10740 - RNA, 18 nt, Homo sapiens
  source 1..18: mol_type = genomic RNA
gtgatcagtgcagaaata

SEQ ID NO: 10741 - RNA, 18 nt, Homo sapiens
  source 1..18: mol_type = genomic RNA
tgatcagtgcagaaatat

SEQ ID NO: 10742 - RNA, 18 nt, Homo sapiens
  source 1..18: mol_type = genomic RNA
gatcagtgcagaaatatg

SEQ ID NO: 10743 - RNA, 18 nt, Homo sapiens
  source 1..18: mol_type = genomic RNA
atcagtgcagaaatatgc

SEQ ID NO: 10744 - RNA, 18 nt, Homo sapiens
  source 1..18: mol_type = genomic RNA
tcagtgcagaaatatgcc

SEQ ID NO: 10745 - RNA, 18 nt, Homo sapiens
  source 1..18: mol_type = genomic RNA
cagtgcagaaatatgcca

SEQ ID NO: 10746 - RNA, 18 nt, Homo sapiens
  source 1..18: mol_type = genomic RNA
agtgcagaaatatgccac

SEQ ID NO: 10747 - RNA, 18 nt, Homo sapiens
  source 1..18: mol_type = genomic RNA
gtgcagaaatatgccaca

SEQ ID NO: 10748 - RNA, 18 nt, Homo sapiens
  source 1..18: mol_type = genomic RNA
tgcagaaatatgccacaa

SEQ ID NO: 10749 - RNA, 18 nt, Homo sapiens
  source 1..18: mol_type = genomic RNA
gcagaaatatgccacaat

SEQ ID NO: 10750 - RNA, 18 nt, Homo sapiens
  source 1..18: mol_type = genomic RNA
cagaaatatgccacaatg

SEQ ID NO: 10751 - RNA, 18 nt, Homo sapiens
  source 1..18: mol_type = genomic RNA
agaaatatgccacaatgc

SEQ ID NO: 10752 - RNA, 18 nt, Homo sapiens
  source 1..18: mol_type = genomic RNA
gaaatatgccacaatgcc

SEQ ID NO: 10753 - RNA, 18 nt, Homo sapiens
  source 1..18: mol_type = genomic RNA
aaatatgccacaatgccg

SEQ ID NO: 10754 - RNA, 18 nt, Homo sapiens
  source 1..18: mol_type = genomic RNA
aatatgccacaatgccgc

SEQ ID NO: 10755 - RNA, 18 nt, Homo sapiens
  source 1..18: mol_type = genomic RNA
atatgccacaatgccgcc

SEQ ID NO: 10756 - RNA, 18 nt, Homo sapiens
  source 1..18: mol_type = genomic RNA
tatgccacaatgccgcca

SEQ ID NO: 10757 - RNA, 18 nt, Homo sapiens
  source 1..18: mol_type = genomic RNA
atgccacaatgccgccag

SEQ ID NO: 10758 - RNA, 18 nt, Homo sapiens
  source 1..18: mol_type = genomic RNA
tgccacaatgccgccagt

SEQ ID NO: 10759 - RNA, 18 nt, Homo sapiens
  source 1..18: mol_type = genomic RNA
gccacaatgccgccagta

SEQ ID NO: 10760 - RNA, 18 nt, Homo sapiens
  source 1..18: mol_type = genomic RNA
ccacaatgccgccagtag

SEQ ID NO: 10761 - RNA, 18 nt, Homo sapiens
  source 1..18: mol_type = genomic RNA
cacaatgccgccagtagg

SEQ ID NO: 10762 - RNA, 18 nt, Homo sapiens
  source 1..18: mol_type = genomic RNA
acaatgccgccagtaggc

SEQ ID NO: 10763 - RNA, 18 nt, Homo sapiens
  source 1..18: mol_type = genomic RNA
caatgccgccagtaggca

SEQ ID NO: 10764 - RNA, 18 nt, Homo sapiens
  source 1..18: mol_type = genomic RNA
aatgccgccagtaggcag

SEQ ID NO: 10765 - RNA, 18 nt, Homo sapiens
  source 1..18: mol_type = genomic RNA
atgccgccagtaggcaga

SEQ ID NO: 10766 - RNA, 18 nt, Homo sapiens
  source 1..18: mol_type = genomic RNA
tgccgccagtaggcagat

SEQ ID NO: 10767 - RNA, 18 nt, Homo sapiens
  source 1..18: mol_type = genomic RNA
gccgccagtaggcagata

SEQ ID NO: 10768 - RNA, 18 nt, Homo sapiens
  source 1..18: mol_type = genomic RNA
ccgccagtaggcagatat

SEQ ID NO: 10769 - RNA, 18 nt, Homo sapiens
  source 1..18: mol_type = genomic RNA
cgccagtaggcagatata

SEQ ID NO: 10770 - RNA, 18 nt, Homo sapiens
  source 1..18: mol_type = genomic RNA
gccagtaggcagatatag

SEQ ID NO: 10771 - RNA, 18 nt, Homo sapiens
  source 1..18: mol_type = genomic RNA
ccagtaggcagatataga

SEQ ID NO: 10772 - RNA, 18 nt, Homo sapiens
  source 1..18: mol_type = genomic RNA
cagtaggcagatatagac

SEQ ID NO: 10773 - RNA, 18 nt, Homo sapiens
  source 1..18: mol_type = genomic RNA
agtaggcagatatagaca

SEQ ID NO: 10774 - RNA, 18 nt, Homo sapiens
  source 1..18: mol_type = genomic RNA
gtaggcagatatagacaa

SEQ ID NO: 10775 - RNA, 18 nt, Homo sapiens
  source 1..18: mol_type = genomic RNA
taggcagatatagacaag

SEQ ID NO: 10776 - RNA, 18 nt, Homo sapiens
  source 1..18: mol_type = genomic RNA
aggcagatatagacaaga

SEQ ID NO: 10777 - RNA, 18 nt, Homo sapiens
  source 1..18: mol_type = genomic RNA
ggcagatatagacaagag

SEQ ID NO: 10778 - RNA, 18 nt, Homo sapiens
  source 1..18: mol_type = genomic RNA
gcagatatagacaagagt

SEQ ID NO: 10779 - RNA, 18 nt, Homo sapiens
  source 1..18: mol_type = genomic RNA
atagacaagagttacatc

SEQ ID NO: 10780 - RNA, 18 nt, Homo sapiens
  source 1..18: mol_type = genomic RNA
aagagttacatcacctgc

SEQ ID NO: 10781 - RNA, 18 nt, Homo sapiens
  source 1..18: mol_type = genomic RNA
agagttacatcacctgcg

SEQ ID NO: 10782 - RNA, 18 nt, Homo sapiens
  source 1..18: mol_type = genomic RNA
gagttacatcacctgcgt

SEQ ID NO: 10783 - RNA, 18 nt, Homo sapiens
  source 1..18: mol_type = genomic RNA
agttacatcacctgcgtg

SEQ ID NO: 10784 - RNA, 18 nt, Homo sapiens
  source 1..18: mol_type = genomic RNA
gttacatcacctgcgtga

SEQ ID NO: 10785 - RNA, 18 nt, Homo sapiens
  source 1..18: mol_type = genomic RNA
ttacatcacctgcgtgat

SEQ ID NO: 10786 - RNA, 18 nt, Homo sapiens
  source 1..18: mol_type = genomic RNA
tacatcacctgcgtgatc

SEQ ID NO: 10787 - RNA, 18 nt, Homo sapiens
  source 1..18: mol_type = genomic RNA
acatcacctgcgtgatca

SEQ ID NO: 10788 - RNA, 18 nt, Homo sapiens
  source 1..18: mol_type = genomic RNA
catcacctgcgtgatcac

SEQ ID NO: 10789 - RNA, 18 nt, Homo sapiens
  source 1..18: mol_type = genomic RNA
atcacctgcgtgatcact

SEQ ID NO: 10790 - RNA, 18 nt, Homo sapiens
  source 1..18: mol_type = genomic RNA
tcacctgcgtgatcactg

SEQ ID NO: 10791 - RNA, 18 nt, Homo sapiens
  source 1..18: mol_type = genomic RNA
cacctgcgtgatcactgc

SEQ ID NO: 10792 - RNA, 18 nt, Homo sapiens
  source 1..18: mol_type = genomic RNA
acctgcgtgatcactgca

SEQ ID NO: 10793 - RNA, 18 nt, Homo sapiens
  source 1..18: mol_type = genomic RNA
cctgcgtgatcactgcag

SEQ ID NO: 10794 - RNA, 18 nt, Homo sapiens
  source 1..18: mol_type = genomic RNA
ctgcgtgatcactgcaga

SEQ ID NO: 10795 - RNA, 18 nt, Homo sapiens
  source 1..18: mol_type = genomic RNA
tgcgtgatcactgcagag

SEQ ID NO: 10796 - RNA, 18 nt, Homo sapiens
  source 1..18: mol_type = genomic RNA
gcgtgatcactgcagaga

SEQ ID NO: 10797 - RNA, 18 nt, Homo sapiens
  source 1..18: mol_type = genomic RNA
cgtgatcactgcagagat

SEQ ID NO: 10798 - RNA, 18 nt, Homo sapiens
  source 1..18: mol_type = genomic RNA
gtgatcactgcagagata

SEQ ID NO: 10799 - RNA, 18 nt, Homo sapiens
  source 1..18: mol_type = genomic RNA
tgatcactgcagagatat

SEQ ID NO: 10800 - RNA, 18 nt, Homo sapiens
  source 1..18: mol_type = genomic RNA
gatcactgcagagatata

SEQ ID NO: 10801 - RNA, 18 nt, Homo sapiens
  source 1..18: mol_type = genomic RNA
atcactgcagagatatat

SEQ ID NO: 10802 - RNA, 18 nt, Homo sapiens
  source 1..18: mol_type = genomic RNA
tcactgcagagatatatc

SEQ ID NO: 10803 - RNA, 18 nt, Homo sapiens
  source 1..18: mol_type = genomic RNA
cactgcagagatatatca

SEQ ID NO: 10804 - RNA, 18 nt, Homo sapiens
  source 1..18: mol_type = genomic RNA
actgcagagatatatcac

SEQ ID NO: 10805 - RNA, 18 nt, Homo sapiens
  source 1..18: mol_type = genomic RNA
ctgcagagatatatcaca

SEQ ID NO: 10806 - RNA, 18 nt, Homo sapiens
  source 1..18: mol_type = genomic RNA
tgcagagatatatcacaa

SEQ ID NO: 10807 - RNA, 18 nt, Homo sapiens
  source 1..18: mol_type = genomic RNA
gcagagatatatcacaat

SEQ ID NO: 10808 - RNA, 18 nt, Homo sapiens
  source 1..18: mol_type = genomic RNA
agagatatatcacaatgc

SEQ ID NO: 10809 - RNA, 18 nt, Homo sapiens
  source 1..18: mol_type = genomic RNA
gagatatatcacaatgcc

SEQ ID NO: 10810 - RNA, 18 nt, Homo sapiens
  source 1..18: mol_type = genomic RNA
agatatatcacaatgccc

SEQ ID NO: 10811 - RNA, 18 nt, Homo sapiens
  source 1..18: mol_type = genomic RNA
gatatatcacaatgcccc

SEQ ID NO: 10812 - RNA, 18 nt, Homo sapiens
  source 1..18: mol_type = genomic RNA
atatatcacaatgcccct

SEQ ID NO: 10813 - RNA, 18 nt, Homo sapiens
  source 1..18: mol_type = genomic RNA
tatatcacaatgcccctg

SEQ ID NO: 10814 - RNA, 18 nt, Homo sapiens
  source 1..18: mol_type = genomic RNA
atatcacaatgcccctgt

SEQ ID NO: 10815 - RNA, 18 nt, Homo sapiens
  source 1..18: mol_type = genomic RNA
tatcacaatgcccctgta

SEQ ID NO: 10816 - RNA, 18 nt, Homo sapiens
  source 1..18: mol_type = genomic RNA
atcacaatgcccctgtag

SEQ ID NO: 10817 - RNA, 18 nt, Homo sapiens
  source 1..18: mol_type = genomic RNA
agagcctagacaagagtc

SEQ ID NO: 10818 - RNA, 18 nt, Homo sapiens
  source 1..18: mol_type = genomic RNA
gagcctagacaagagtcc

SEQ ID NO: 10819 - RNA, 18 nt, Homo sapiens
  source 1..18: mol_type = genomic RNA
agcctagacaagagtccc

SEQ ID NO: 10820 - RNA, 18 nt, Homo sapiens
  source 1..18: mol_type = genomic RNA
gcctagacaagagtccca

SEQ ID NO: 10821 - RNA, 18 nt, Homo sapiens
  source 1..18: mol_type = genomic RNA
cctagacaagagtcccat

SEQ ID NO: 10822 - RNA, 18 nt, Homo sapiens
  source 1..18: mol_type = genomic RNA
ctagacaagagtcccatc

SEQ ID NO: 10823 - RNA, 18 nt, Homo sapiens
  source 1..18: mol_type = genomic RNA
tagacaagagtcccatca

SEQ ID NO: 10824 - RNA, 18 nt, Homo sapiens
  source 1..18: mol_type = genomic RNA
agacaagagtcccatcac

SEQ ID NO: 10825 - RNA, 18 nt, Homo sapiens
  source 1..18: mol_type = genomic RNA
gacaagagtcccatcacc

SEQ ID NO: 10826 - RNA, 18 nt, Homo sapiens
  source 1..18: mol_type = genomic RNA
acaagagtcccatcacct

SEQ ID NO: 10827 - RNA, 18 nt, Homo sapiens
  source 1..18: mol_type = genomic RNA
caagagtcccatcacctg

SEQ ID NO: 10828 - RNA, 18 nt, Homo sapiens
  source 1..18: mol_type = genomic RNA
gggtgatcagtgcagagt

SEQ ID NO: 10829 - RNA, 18 nt, Homo sapiens
  source 1..18: mol_type = genomic RNA
ggtgatcagtgcagagtt

SEQ ID NO: 10830 - RNA, 18 nt, Homo sapiens
  source 1..18: mol_type = genomic RNA
gtgatcagtgcagagtta

SEQ ID NO: 10831 - RNA, 18 nt, Homo sapiens
  source 1..18: mol_type = genomic RNA
tgatcagtgcagagttat

SEQ ID NO: 10832 - RNA, 18 nt, Homo sapiens
  source 1..18: mol_type = genomic RNA
gatcagtgcagagttatg

SEQ ID NO: 10833 - RNA, 18 nt, Homo sapiens
  source 1..18: mol_type = genomic RNA
atcagtgcagagttatgt

SEQ ID NO: 10834 - RNA, 18 nt, Homo sapiens
  source 1..18: mol_type = genomic RNA
tcagtgcagagttatgtc

SEQ ID NO: 10835 - RNA, 18 nt, Homo sapiens
  source 1..18: mol_type = genomic RNA
cagtgcagagttatgtca

SEQ ID NO: 10836 - RNA, 18 nt, Homo sapiens
  source 1..18: mol_type = genomic RNA
agtgcagagttatgtcac

SEQ ID NO: 10837 - RNA, 18 nt, Homo sapiens
  source 1..18: mol_type = genomic RNA
gtgcagagttatgtcaca

SEQ ID NO: 10838 - RNA, 18 nt, Homo sapiens
  source 1..18: mol_type = genomic RNA
tgcagagttatgtcacaa

SEQ ID NO: 10839 - RNA, 18 nt, Homo sapiens
  source 1..18: mol_type = genomic RNA
gcagagttatgtcacaat

SEQ ID NO: 10840 - RNA, 18 nt, Homo sapiens
  source 1..18: mol_type = genomic RNA
agagttatgtcacaatgc

SEQ ID NO: 10841 - RNA, 18 nt, Homo sapiens
  source 1..18: mol_type = genomic RNA
gagttatgtcacaatgcc

SEQ ID NO: 10842 - RNA, 18 nt, Homo sapiens
  source 1..18: mol_type = genomic RNA
agttatgtcacaatgccc

SEQ ID NO: 10843 - RNA, 18 nt, Homo sapiens
  source 1..18: mol_type = genomic RNA
gttatgtcacaatgcccc

SEQ ID NO: 10844 - RNA, 18 nt, Homo sapiens
  source 1..18: mol_type = genomic RNA
ttatgtcacaatgccccc

SEQ ID NO: 10845 - RNA, 18 nt, Homo sapiens
  source 1..18: mol_type = genomic RNA
tatgtcacaatgccccct

SEQ ID NO: 10846 - RNA, 18 nt, Homo sapiens
  source 1..18: mol_type = genomic RNA
atgtcacaatgccccctt

SEQ ID NO: 10847 - RNA, 18 nt, Homo sapiens
  source 1..18: mol_type = genomic RNA
tgtcacaatgcccccttt

SEQ ID NO: 10848 - RNA, 18 nt, Homo sapiens
  source 1..18: mol_type = genomic RNA
gtcacaatgccccctttt

SEQ ID NO: 10849 - RNA, 18 nt, Homo sapiens
  source 1..18: mol_type = genomic RNA
tcacaatgcccccttttg

SEQ ID NO: 10850 - RNA, 18 nt, Homo sapiens
  source 1..18: mol_type = genomic RNA
cacaatgcccccttttgg

SEQ ID NO: 10851 - RNA, 18 nt, Homo sapiens
  source 1..18: mol_type = genomic RNA
acaatgcccccttttggc

SEQ ID NO: 10852 - RNA, 18 nt, Homo sapiens
  source 1..18: mol_type = genomic RNA
caatgcccccttttggca

SEQ ID NO: 10853 - RNA, 18 nt, Homo sapiens
  source 1..18: mol_type = genomic RNA
aatgcccccttttggcag

SEQ ID NO: 10854 - RNA, 18 nt, Homo sapiens
  source 1..18: mol_type = genomic RNA
atgcccccttttggcaga

SEQ ID NO: 10855 - RNA, 18 nt, Homo sapiens
  source 1..18: mol_type = genomic RNA
tgcccccttttggcagag

SEQ ID NO: 10856 - RNA, 18 nt, Homo sapiens
  source 1..18: mol_type = genomic RNA
gcccccttttggcagagc

SEQ ID NO: 10857 - RNA, 18 nt, Homo sapiens
  source 1..18: mol_type = genomic RNA
cccccttttggcagagcc

SEQ ID NO: 10858 - RNA, 18 nt, Homo sapiens
  source 1..18: mol_type = genomic RNA
ccccttttggcagagcct

SEQ ID NO: 10859 - RNA, 18 nt, Homo sapiens
  source 1..18: mol_type = genomic RNA
cccttttggcagagccta

SEQ ID NO: 10860 - RNA, 18 nt, Homo sapiens
  source 1..18: mol_type = genomic RNA
ccttttggcagagcctag

SEQ ID NO: 10861 - RNA, 18 nt, Homo sapiens
  source 1..18: mol_type = genomic RNA
cttttggcagagcctaga

SEQ ID NO: 10862 - RNA, 18 nt, Homo sapiens
  source 1..18: mol_type = genomic RNA
ttttggcagagcctagac

SEQ ID NO: 10863 - RNA, 18 nt, Homo sapiens
  source 1..18: mol_type = genomic RNA
tttggcagagcctagaca

SEQ ID NO: 10864 - RNA, 18 nt, Homo sapiens
  source 1..18: mol_type = genomic RNA
ttggcagagcctagacaa

SEQ ID NO: 10865 - RNA, 18 nt, Homo sapiens
  source 1..18: mol_type = genomic RNA
tggcagagcctagacaag

SEQ ID NO: 10866 - RNA, 18 nt, Homo sapiens
  source 1..18: mol_type = genomic RNA
cagagcctagacaagggt

SEQ ID NO: 10867 - RNA, 18 nt, Homo sapiens
  source 1..18: mol_type = genomic RNA
agagcctagacaagggtt

SEQ ID NO: 10868 - RNA, 18 nt, Homo sapiens
  source 1..18: mol_type = genomic RNA
gagcctagacaagggtta

SEQ ID NO: 10869 - RNA, 18 nt, Homo sapiens
  source 1..18: mol_type = genomic RNA
agcctagacaagggttac

SEQ ID NO: 10870 - RNA, 18 nt, Homo sapiens
  source 1..18: mol_type = genomic RNA
gcctagacaagggttaca

SEQ ID NO: 10871 - RNA, 18 nt, Homo sapiens
  source 1..18: mol_type = genomic RNA
cctagacaagggttacat

SEQ ID NO: 10872 - RNA, 18 nt, Homo sapiens
  source 1..18: mol_type = genomic RNA
ctagacaagggttacatc

SEQ ID NO: 10873 - RNA, 18 nt, Homo sapiens
  source 1..18: mol_type = genomic RNA
tagacaagggttacatca

SEQ ID NO: 10874 - RNA, 18 nt, Homo sapiens
  source 1..18: mol_type = genomic RNA
agacaagggttacatcac

SEQ ID NO: 10875 - RNA, 18 nt, Homo sapiens
  source 1..18: mol_type = genomic RNA
aagggttacatcacctgg

SEQ ID NO: 10876 - RNA, 18 nt, Homo sapiens
  source 1..18: mol_type = genomic RNA
agggttacatcacctggg

SEQ ID NO: 10877 - RNA, 18 nt, Homo sapiens
  source 1..18: mol_type = genomic RNA
gggttacatcacctgggt

SEQ ID NO: 10878 - RNA, 18 nt, Homo sapiens
  source 1..18: mol_type = genomic RNA
ggttacatcacctgggtg

SEQ ID NO: 10879 - RNA, 18 nt, Homo sapiens
  source 1..18: mol_type = genomic RNA
cagagatatgtcacaatg

SEQ ID NO: 10880 - RNA, 18 nt, Homo sapiens
  source 1..18: mol_type = genomic RNA
agagatatgtcacaatgt

SEQ ID NO: 10881 - RNA, 18 nt, Homo sapiens
  source 1..18: mol_type = genomic RNA
gagatatgtcacaatgtc

SEQ ID NO: 10882 - RNA, 18 nt, Homo sapiens
  source 1..18: mol_type = genomic RNA
agatatgtcacaatgtcc

SEQ ID NO: 10883 - RNA, 18 nt, Homo sapiens
  source 1..18: mol_type = genomic RNA
gatatgtcacaatgtccc

SEQ ID NO: 10884 - RNA, 18 nt, Homo sapiens
  source 1..18: mol_type = genomic RNA
atatgtcacaatgtccct

SEQ ID NO: 10885 - RNA, 18 nt, Homo sapiens
  source 1..18: mol_type = genomic RNA
tatgtcacaatgtccctg

SEQ ID NO: 10886 - RNA, 18 nt, Homo sapiens
  source 1..18: mol_type = genomic RNA
atgtcacaatgtccctgt

SEQ ID NO: 10887 - RNA, 18 nt, Homo sapiens
  source 1..18: mol_type = genomic RNA
tgtcacaatgtccctgta

SEQ ID NO: 10888 - RNA, 18 nt, Homo sapiens
  source 1..18: mol_type = genomic RNA
gtcacaatgtccctgtag

SEQ ID NO: 10889 - RNA, 18 nt, Homo sapiens
  source 1..18: mol_type = genomic RNA
tcacaatgtccctgtagc

SEQ ID NO: 10890 - RNA, 18 nt, Homo sapiens
  source 1..18: mol_type = genomic RNA
cacaatgtccctgtagcc

SEQ ID NO: 10891 - RNA, 18 nt, Homo sapiens
  source 1..18: mol_type = genomic RNA
acaatgtccctgtagcca

SEQ ID NO: 10892 - RNA, 18 nt, Homo sapiens
  source 1..18: mol_type = genomic RNA
caatgtccctgtagccat

SEQ ID NO: 10893 - RNA, 18 nt, Homo sapiens
  source 1..18: mol_type = genomic RNA
aatgtccctgtagccata

SEQ ID NO: 10894 - RNA, 18 nt, Homo sapiens
  source 1..18: mol_type = genomic RNA
atgtccctgtagccatat

SEQ ID NO: 10895 - RNA, 18 nt, Homo sapiens
  source 1..18: mol_type = genomic RNA
tgtccctgtagccatatc

SEQ ID NO: 10896 - RNA, 18 nt, Homo sapiens
  source 1..18: mol_type = genomic RNA
gtccctgtagccatatcc

SEQ ID NO: 10897 - RNA, 18 nt, Homo sapiens
  source 1..18: mol_type = genomic RNA
tccctgtagccatatcct

SEQ ID NO: 10898 - RNA, 18 nt, Homo sapiens
  source 1..18: mol_type = genomic RNA
ccctgtagccatatcctt

SEQ ID NO: 10899 - RNA, 18 nt, Homo sapiens
  source 1..18: mol_type = genomic RNA
cctgtagccatatccttg

SEQ ID NO: 10900 - RNA, 18 nt, Homo sapiens
  source 1..18: mol_type = genomic RNA
ctgtagccatatccttga

SEQ ID NO: 10901 - RNA, 18 nt, Homo sapiens
  source 1..18: mol_type = genomic RNA
tgtagccatatccttgac

SEQ ID NO: 10902 - RNA, 18 nt, Homo sapiens
  source 1..18: mol_type = genomic RNA
gtagccatatccttgaca

SEQ ID NO: 10903 - RNA, 18 nt, Homo sapiens
  source 1..18: mol_type = genomic RNA
tagccatatccttgacaa

SEQ ID NO: 10904 - RNA, 18 nt, Homo sapiens
  source 1..18: mol_type = genomic RNA
agccatatccttgacaaa

SEQ ID NO: 10905 - RNA, 18 nt, Homo sapiens
  source 1..18: mol_type = genomic RNA
gccatatccttgacaaaa

SEQ ID NO: 10906 - RNA, 18 nt, Homo sapiens
  source 1..18: mol_type = genomic RNA
tatccttgacaaaagtga

SEQ ID NO: 10907 - RNA, 18 nt, Homo sapiens
  source 1..18: mol_type = genomic RNA
atccttgacaaaagtgac

SEQ ID NO: 10908 - RNA, 18 nt, Homo sapiens
  source 1..18: mol_type = genomic RNA
tccttgacaaaagtgaca

SEQ ID NO: 10909 - RNA, 18 nt, Homo sapiens
  source 1..18: mol_type = genomic RNA
ccttgacaaaagtgacat

SEQ ID NO: 10910 - RNA, 18 nt, Homo sapiens
  source 1..18: mol_type = genomic RNA
cttgacaaaagtgacatc

SEQ ID NO: 10911 - RNA, 18 nt, Homo sapiens
  source 1..18: mol_type = genomic RNA
ttgacaaaagtgacatca

SEQ ID NO: 10912 - RNA, 18 nt, Homo sapiens
  source 1..18: mol_type = genomic RNA
tgacaaaagtgacatcac

SEQ ID NO: 10913 - RNA, 18 nt, Homo sapiens
  source 1..18: mol_type = genomic RNA
gacaaaagtgacatcacc

SEQ ID NO: 10914 - RNA, 18 nt, Homo sapiens
  source 1..18: mol_type = genomic RNA
acaaaagtgacatcacct

SEQ ID NO: 10915 - RNA, 18 nt, Homo sapiens
  source 1..18: mol_type = genomic RNA
caaaagtgacatcacctg

SEQ ID NO: 10916 - RNA, 18 nt, Homo sapiens
  source 1..18: mol_type = genomic RNA
aaaagtgacatcacctgg

SEQ ID NO: 10917 - RNA, 18 nt, Homo sapiens
  source 1..18: mol_type = genomic RNA
aaagtgacatcacctggg

SEQ ID NO: 10918 - RNA, 18 nt, Homo sapiens
  source 1..18: mol_type = genomic RNA
aagtgacatcacctgggt

SEQ ID NO: 10919 - RNA, 18 nt, Homo sapiens
  source 1..18: mol_type = genomic RNA
agtgacatcacctgggtg

SEQ ID NO: 10920 - RNA, 18 nt, Homo sapiens
  source 1..18: mol_type = genomic RNA
gtgacatcacctgggtga

SEQ ID NO: 10921 - RNA, 18 nt, Homo sapiens
  source 1..18: mol_type = genomic RNA
tgacatcacctgggtgat

SEQ ID NO: 10922 - RNA, 18 nt, Homo sapiens
  source 1..18: mol_type = genomic RNA
gacatcacctgggtgatc

SEQ ID NO: 10923 - RNA, 18 nt, Homo sapiens
  source 1..18: mol_type = genomic RNA
cacctgggtgatcagtgt

SEQ ID NO: 10924 - RNA, 18 nt, Homo sapiens
  source 1..18: mol_type = genomic RNA
acctgggtgatcagtgtg

SEQ ID NO: 10925 - RNA, 18 nt, Homo sapiens
  source 1..18: mol_type = genomic RNA
cctgggtgatcagtgtgg

SEQ ID NO: 10926 - RNA, 18 nt, Homo sapiens
  source 1..18: mol_type = genomic RNA
ctgggtgatcagtgtgga

SEQ ID NO: 10927 - RNA, 18 nt, Homo sapiens
  source 1..18: mol_type = genomic RNA
tgggtgatcagtgtggag

SEQ ID NO: 10928 - RNA, 18 nt, Homo sapiens
  source 1..18: mol_type = genomic RNA
gggtgatcagtgtggaga

SEQ ID NO: 10929 - RNA, 18 nt, Homo sapiens
  source 1..18: mol_type = genomic RNA
ggtgatcagtgtggagat

SEQ ID NO: 10930 - RNA, 18 nt, Homo sapiens
  source 1..18: mol_type = genomic RNA
gtgatcagtgtggagata

SEQ ID NO: 10931 - RNA, 18 nt, Homo sapiens
  source 1..18: mol_type = genomic RNA
tgatcagtgtggagatat

SEQ ID NO: 10932 - RNA, 18 nt, Homo sapiens
  source 1..18: mol_type = genomic RNA
gatcagtgtggagatatg

SEQ ID NO: 10933 - RNA, 18 nt, Homo sapiens
  source 1..18: mol_type = genomic RNA
atcagtgtggagatatgt

SEQ ID NO: 10934 - RNA, 18 nt, Homo sapiens
  source 1..18: mol_type = genomic RNA
tcagtgtggagatatgtc

SEQ ID NO: 10935 - RNA, 18 nt, Homo sapiens
  source 1..18: mol_type = genomic RNA
cagtgtggagatatgtca

SEQ ID NO: 10936 - RNA, 18 nt, Homo sapiens
  source 1..18: mol_type = genomic RNA
agtgtggagatatgtcac

SEQ ID NO: 10937 - RNA, 18 nt, Homo sapiens
  source 1..18: mol_type = genomic RNA
gtgtggagatatgtcaca

SEQ ID NO: 10938 - RNA, 18 nt, Homo sapiens
  source 1..18: mol_type = genomic RNA
tgtggagatatgtcacaa

SEQ ID NO: 10939 - RNA, 18 nt, Homo sapiens
  source 1..18: mol_type = genomic RNA
gtggagatatgtcacaat

SEQ ID NO: 10940 - RNA, 18 nt, Homo sapiens
  source 1..18: mol_type = genomic RNA
tggagatatgtcacaatg

SEQ ID NO: 10941 - RNA, 18 nt, Homo sapiens
  source 1..18: mol_type = genomic RNA
ggagatatgtcacaatgt

SEQ ID NO: 10942 - RNA, 18 nt, Homo sapiens
  source 1..18: mol_type = genomic RNA
atatgtcacaatgtctcc

SEQ ID NO: 10943 - RNA, 18 nt, Homo sapiens
  source 1..18: mol_type = genomic RNA
tatgtcacaatgtctcca

SEQ ID NO: 10944 - RNA, 18 nt, Homo sapiens
  source 1..18: mol_type = genomic RNA
atgtcacaatgtctccag

SEQ ID NO: 10945 - RNA, 18 nt, Homo sapiens
  source 1..18: mol_type = genomic RNA
tgtcacaatgtctccagt

SEQ ID NO: 10946 - RNA, 18 nt, Homo sapiens
  source 1..18: mol_type = genomic RNA
gtcacaatgtctccagta

SEQ ID NO: 10947 - RNA, 18 nt, Homo sapiens
  source 1..18: mol_type = genomic RNA
tcacaatgtctccagtag

SEQ ID NO: 10948 - RNA, 18 nt, Homo sapiens
  source 1..18: mol_type = genomic RNA
cacaatgtctccagtagg

SEQ ID NO: 10949 - RNA, 18 nt, Homo sapiens
  source 1..18: mol_type = genomic RNA
acaatgtctccagtaggc

SEQ ID NO: 10950 - RNA, 18 nt, Homo sapiens
  source 1..18: mol_type = genomic RNA
caatgtctccagtaggca

SEQ ID NO: 10951 - RNA, 18 nt, Homo sapiens
  source 1..18: mol_type = genomic RNA
aatgtctccagtaggcag

SEQ ID NO: 10952 - RNA, 18 nt, Homo sapiens
  source 1..18: mol_type = genomic RNA
atgtctccagtaggcaga

SEQ ID NO: 10953 - RNA, 18 nt, Homo sapiens
  source 1..18: mol_type = genomic RNA
tgtctccagtaggcagag

SEQ ID NO: 10954 - RNA, 18 nt, Homo sapiens
  source 1..18: mol_type = genomic RNA
gtctccagtaggcagagc

SEQ ID NO: 10955 - RNA, 18 nt, Homo sapiens
  source 1..18: mol_type = genomic RNA
tctccagtaggcagagcc

SEQ ID NO: 10956 - RNA, 18 nt, Homo sapiens
  source 1..18: mol_type = genomic RNA
ctccagtaggcagagcct

SEQ ID NO: 10957 - RNA, 18 nt, Homo sapiens
  source 1..18: mol_type = genomic RNA
tccagtaggcagagccta

SEQ ID NO: 10958 - RNA, 18 nt, Homo sapiens
  source 1..18: mol_type = genomic RNA
ccagtaggcagagcctag

SEQ ID NO: 10959 - RNA, 18 nt, Homo sapiens
  source 1..18: mol_type = genomic RNA
cagtaggcagagcctaga

SEQ ID NO: 10960 - RNA, 18 nt, Homo sapiens
  source 1..18: mol_type = genomic RNA
agtaggcagagcctagac

SEQ ID NO: 10961 - RNA, 18 nt, Homo sapiens
  source 1..18: mol_type = genomic RNA
atcacctgggtgatcagg

SEQ ID NO: 10962 - RNA, 18 nt, Homo sapiens
  source 1..18: mol_type = genomic RNA
tcacctgggtgatcaggg

SEQ ID NO: 10963 - RNA, 18 nt, Homo sapiens
  source 1..18: mol_type = genomic RNA
ctgggtgatcagggcaga

SEQ ID NO: 10964 - RNA, 18 nt, Homo sapiens
  source 1..18: mol_type = genomic RNA
ggtgatcagggcagagat

SEQ ID NO: 10965 - RNA, 18 nt, Homo sapiens
  source 1..18: mol_type = genomic RNA
gtgatcagggcagagata

SEQ ID NO: 10966 - RNA, 18 nt, Homo sapiens
  source 1..18: mol_type = genomic RNA
tgatcagggcagagatat

SEQ ID NO: 10967 - RNA, 18 nt, Homo sapiens
  source 1..18: mol_type = genomic RNA
gatcagggcagagatatg

SEQ ID NO: 10968 - RNA, 18 nt, Homo sapiens
  source 1..18: mol_type = genomic RNA
atcagggcagagatatgt

SEQ ID NO: 10969 - RNA, 18 nt, Homo sapiens
  source 1..18: mol_type = genomic RNA
tcagggcagagatatgtc

SEQ ID NO: 10970 - RNA, 18 nt, Homo sapiens
  source 1..18: mol_type = genomic RNA
cagggcagagatatgtca

SEQ ID NO: 10971 - RNA, 18 nt, Homo sapiens
  source 1..18: mol_type = genomic RNA
agggcagagatatgtcac

SEQ ID NO: 10972 - RNA, 18 nt, Homo sapiens
  source 1..18: mol_type = genomic RNA
gggcagagatatgtcaca

SEQ ID NO: 10973 - RNA, 18 nt, Homo sapiens
  source 1..18: mol_type = genomic RNA
ggcagagatatgtcacaa

SEQ ID NO: 10974 - RNA, 18 nt, Homo sapiens
  source 1..18: mol_type = genomic RNA
agagatatgtcacaatgc

SEQ ID NO: 10975 - RNA, 18 nt, Homo sapiens
  source 1..18: mol_type = genomic RNA
gagatatgtcacaatgcc

SEQ ID NO: 10976 - RNA, 18 nt, Homo sapiens
  source 1..18: mol_type = genomic RNA
agatatgtcacaatgccc

SEQ ID NO: 10977 - RNA, 18 nt, Homo sapiens
  source 1..18: mol_type = genomic RNA
gatatgtcacaatgcccc

SEQ ID NO: 10978 - RNA, 18 nt, Homo sapiens
  source 1..18: mol_type = genomic RNA
atatgtcacaatgccccc

SEQ ID NO: 10979 - RNA, 18 nt, Homo sapiens
  source 1..18: mol_type = genomic RNA
atgtcacaatgccccctg

SEQ ID NO: 10980 - RNA, 18 nt, Homo sapiens
  source 1..18: mol_type = genomic RNA
tgtcacaatgccccctgt

SEQ ID NO: 10981 - RNA, 18 nt, Homo sapiens
  source 1..18: mol_type = genomic RNA
gtcacaatgccccctgta

SEQ ID NO: 10982 - RNA, 18 nt, Homo sapiens
  source 1..18: mol_type = genomic RNA
tcacaatgccccctgtaa

SEQ ID NO: 10983 - RNA, 18 nt, Homo sapiens
  source 1..18: mol_type = genomic RNA
cacaatgccccctgtaag

SEQ ID NO: 10984 - RNA, 18 nt, Homo sapiens
  source 1..18: mol_type = genomic RNA
acaatgccccctgtaagc

SEQ ID NO: 10985 - RNA, 18 nt, Homo sapiens
  source 1..18: mol_type = genomic RNA
caatgccccctgtaagca

SEQ ID NO: 10986 - RNA, 18 nt, Homo sapiens
  source 1..18: mol_type = genomic RNA
aatgccccctgtaagcag

SEQ ID NO: 10987 - RNA, 18 nt, Homo sapiens
  source 1..18: mol_type = genomic RNA
atgccccctgtaagcaga

SEQ ID NO: 10988 - RNA, 18 nt, Homo sapiens
  source 1..18: mol_type = genomic RNA
tgccccctgtaagcagat

SEQ ID NO: 10989 - RNA, 18 nt, Homo sapiens
  source 1..18: mol_type = genomic RNA
gccccctgtaagcagatc

SEQ ID NO: 10990 - RNA, 18 nt, Homo sapiens
  source 1..18: mol_type = genomic RNA
ccccctgtaagcagatcc

SEQ ID NO: 10991 - RNA, 18 nt, Homo sapiens
  source 1..18: mol_type = genomic RNA
cccctgtaagcagatccc

SEQ ID NO: 10992 - RNA, 18 nt, Homo sapiens
  source 1..18: mol_type = genomic RNA
ccctgtaagcagatccca

SEQ ID NO: 10993 - RNA, 18 nt, Homo sapiens
  source 1..18: mol_type = genomic RNA
cctgtaagcagatcccag

SEQ ID NO: 10994 - RNA, 18 nt, Homo sapiens
  source 1..18: mol_type = genomic RNA
ctgtaagcagatcccaga

SEQ ID NO: 10995 - RNA, 18 nt, Homo sapiens
  source 1..18: mol_type = genomic RNA
tgtaagcagatcccagac

SEQ ID NO: 10996 - RNA, 18 nt, Homo sapiens
  source 1..18: mol_type = genomic RNA
gtaagcagatcccagaca

SEQ ID NO: 10997 - RNA, 18 nt, Homo sapiens
  source 1..18: mol_type = genomic RNA
taagcagatcccagacaa

SEQ ID NO: 10998 - RNA, 18 nt, Homo sapiens
  source 1..18: mol_type = genomic RNA
aagcagatcccagacaag

SEQ ID NO: 10999 - RNA, 18 nt, Homo sapiens
  source 1..18: mol_type = genomic RNA
agcagatcccagacaaga

SEQ ID NO: 11000 - RNA, 18 nt, Homo sapiens
  source 1..18: mol_type = genomic RNA
gcagatcccagacaagag

SEQ ID NO: 11001 - RNA, 18 nt, Homo sapiens
  source 1..18: mol_type = genomic RNA
cagatcccagacaagagt

SEQ ID NO: 11002 - RNA, 18 nt, Homo sapiens
  source 1..18: mol_type = genomic RNA
agatcccagacaagagtt

SEQ ID NO: 11003 - RNA, 18 nt, Homo sapiens
  source 1..18: mol_type = genomic RNA
gatcccagacaagagttg

SEQ ID NO: 11004 - RNA, 18 nt, Homo sapiens
  source 1..18: mol_type = genomic RNA
atcccagacaagagttgc

SEQ ID NO: 11005 - RNA, 18 nt, Homo sapiens
  source 1..18: mol_type = genomic RNA
tcccagacaagagttgca

SEQ ID NO: 11006 - RNA, 18 nt, Homo sapiens
  source 1..18: mol_type = genomic RNA
cccagacaagagttgcat

SEQ ID NO: 11007 - RNA, 18 nt, Homo sapiens
  source 1..18: mol_type = genomic RNA
ccagacaagagttgcatc

SEQ ID NO: 11008 - RNA, 18 nt, Homo sapiens
  source 1..18: mol_type = genomic RNA
cagacaagagttgcatca

SEQ ID NO: 11009 - RNA, 18 nt, Homo sapiens
  source 1..18: mol_type = genomic RNA
agacaagagttgcatcac

SEQ ID NO: 11010 - RNA, 18 nt, Homo sapiens
  source 1..18: mol_type = genomic RNA
gacaagagttgcatcacc

SEQ ID NO: 11011 - RNA, 18 nt, Homo sapiens
  source 1..18: mol_type = genomic RNA
acaagagttgcatcacct

SEQ ID NO: 11012 - RNA, 18 nt, Homo sapiens
  source 1..18: mol_type = genomic RNA
caagagttgcatcacctc

SEQ ID NO: 11013 - RNA, 18 nt, Homo sapiens
  source 1..18: mol_type = genomic RNA
aagagttgcatcacctcg

SEQ ID NO: 11014 - RNA, 18 nt, Homo sapiens
  source 1..18: mol_type = genomic RNA
agagttgcatcacctcgg

SEQ ID NO: 11015 - RNA, 18 nt, Homo sapiens
  source 1..18: mol_type = genomic RNA
gagttgcatcacctcggt

SEQ ID NO: 11016 - RNA, 18 nt, Homo sapiens
  source 1..18: mol_type = genomic RNA
agttgcatcacctcggtg

SEQ ID NO: 11017 - RNA, 18 nt, Homo sapiens
  source 1..18: mol_type = genomic RNA
gttgcatcacctcggtga

SEQ ID NO: 11018 - RNA, 18 nt, Homo sapiens
  source 1..18: mol_type = genomic RNA
ttgcatcacctcggtgat

SEQ ID NO: 11019 - RNA, 18 nt, Homo sapiens
  source 1..18: mol_type = genomic RNA
tgcatcacctcggtgatc

SEQ ID NO: 11020 - RNA, 18 nt, Homo sapiens
  source 1..18: mol_type = genomic RNA
gcatcacctcggtgatca

SEQ ID NO: 11021 - RNA, 18 nt, Homo sapiens
  source 1..18: mol_type = genomic RNA
catcacctcggtgatcag

SEQ ID NO: 11022 - RNA, 18 nt, Homo sapiens
  source 1..18: mol_type = genomic RNA
atcacctcggtgatcagt

SEQ ID NO: 11023 - RNA, 18 nt, Homo sapiens
  source 1..18: mol_type = genomic RNA
tcacctcggtgatcagtg

SEQ ID NO: 11024 - RNA, 18 nt, Homo sapiens
  source 1..18: mol_type = genomic RNA
cacctcggtgatcagtgc

SEQ ID NO: 11025 - RNA, 18 nt, Homo sapiens
  source 1..18: mol_type = genomic RNA
acctcggtgatcagtgca

SEQ ID NO: 11026 - RNA, 18 nt, Homo sapiens
  source 1..18: mol_type = genomic RNA
cctcggtgatcagtgcag

SEQ ID NO: 11027 - RNA, 18 nt, Homo sapiens
  source 1..18: mol_type = genomic RNA
ctcggtgatcagtgcaga

SEQ ID NO: 11028 - RNA, 18 nt, Homo sapiens
  source 1..18: mol_type = genomic RNA
tcggtgatcagtgcagag

SEQ ID NO: 11029 - RNA, 18 nt, Homo sapiens
  source 1..18: mol_type = genomic RNA
cggtgatcagtgcagaga

SEQ ID NO: 11030 - RNA, 18 nt, Homo sapiens
  source 1..18: mol_type = genomic RNA
tgatcagtgcagagatac

SEQ ID NO: 11031 - RNA, 18 nt, Homo sapiens
  source 1..18: mol_type = genomic RNA
tcagtgcagagatacgtc

SEQ ID NO: 11032 - RNA, 18 nt, Homo sapiens
  source 1..18: mol_type = genomic RNA
cagtgcagagatacgtca

SEQ ID NO: 11033 - RNA, 18 nt, Homo sapiens
  source 1..18: mol_type = genomic RNA
agtgcagagatacgtcac

SEQ ID NO: 11034 - RNA, 18 nt, Homo sapiens
  source 1..18: mol_type = genomic RNA
gtgcagagatacgtcaca

SEQ ID NO: 11035 - RNA, 18 nt, Homo sapiens
  source 1..18: mol_type = genomic RNA
cagagatacgtcacaatg

SEQ ID NO: 11036 - RNA, 18 nt, Homo sapiens
  source 1..18: mol_type = genomic RNA
agagatacgtcacaatgc

SEQ ID NO: 11037 - RNA, 18 nt, Homo sapiens
  source 1..18: mol_type = genomic RNA
gagatacgtcacaatgcc

SEQ ID NO: 11038 - RNA, 18 nt, Homo sapiens
  source 1..18: mol_type = genomic RNA
agatacgtcacaatgccc

SEQ ID NO: 11039 - RNA, 18 nt, Homo sapiens
  source 1..18: mol_type = genomic RNA
gatacgtcacaatgcccc

SEQ ID NO: 11040 - RNA, 18 nt, Homo sapiens
  source 1..18: mol_type = genomic RNA
atacgtcacaatgcccct

SEQ ID NO: 11041 - RNA, 18 nt, Homo sapiens
  source 1..18: mol_type = genomic RNA
tacgtcacaatgcccctg

SEQ ID NO: 11042 - RNA, 18 nt, Homo sapiens
  source 1..18: mol_type = genomic RNA
acgtcacaatgcccctgt

SEQ ID NO: 11043 - RNA, 18 nt, Homo sapiens
  source 1..18: mol_type = genomic RNA
cgtcacaatgcccctgta

SEQ ID NO: 11044 - RNA, 18 nt, Homo sapiens
  source 1..18: mol_type = genomic RNA
agacaagagttacataac

SEQ ID NO: 11045 - RNA, 18 nt, Homo sapiens
  source 1..18: mol_type = genomic RNA
gacaagagttacataacc

SEQ ID NO: 11046 - RNA, 18 nt, Homo sapiens
  source 1..18: mol_type = genomic RNA
acaagagttacataaccc

SEQ ID NO: 11047 - RNA, 18 nt, Homo sapiens
  source 1..18: mol_type = genomic RNA
caagagttacataaccca

SEQ ID NO: 11048 - RNA, 18 nt, Homo sapiens
  source 1..18: mol_type = genomic RNA
aagagttacataacccag

SEQ ID NO: 11049 - RNA, 18 nt, Homo sapiens
  source 1..18: mol_type = genomic RNA
agagttacataacccagg

SEQ ID NO: 11050 - RNA, 18 nt, Homo sapiens
  source 1..18: mol_type = genomic RNA
gagttacataacccaggt

SEQ ID NO: 11051 - RNA, 18 nt, Homo sapiens
  source 1..18: mol_type = genomic RNA
agttacataacccaggtg

SEQ ID NO: 11052 - RNA, 18 nt, Homo sapiens
  source 1..18: mol_type = genomic RNA
gttacataacccaggtga

SEQ ID NO: 11053 - RNA, 18 nt, Homo sapiens
  source 1..18: mol_type = genomic RNA
ttacataacccaggtgat

SEQ ID NO: 11054 - RNA, 18 nt, Homo sapiens
  source 1..18: mol_type = genomic RNA
tacataacccaggtgatc

SEQ ID NO: 11055 - RNA, 18 nt, Homo sapiens
  source 1..18: mol_type = genomic RNA
acataacccaggtgatcc

SEQ ID NO: 11056 - RNA, 18 nt, Homo sapiens
  source 1..18: mol_type = genomic RNA
cataacccaggtgatccg

SEQ ID NO: 11057 - RNA, 18 nt, Homo sapiens
  source 1..18: mol_type = genomic RNA
ataacccaggtgatccgt

SEQ ID NO: 11058 - RNA, 18 nt, Homo sapiens
  source 1..18: mol_type = genomic RNA
taacccaggtgatccgta

SEQ ID NO: 11059 - RNA, 18 nt, Homo sapiens
  source 1..18: mol_type = genomic RNA
aacccaggtgatccgtac

SEQ ID NO: 11060 - RNA, 18 nt, Homo sapiens
  source 1..18: mol_type = genomic RNA
acccaggtgatccgtaca

SEQ ID NO: 11061 - RNA, 18 nt, Homo sapiens
  source 1..18: mol_type = genomic RNA
cccaggtgatccgtacag

SEQ ID NO: 11062 - RNA, 18 nt, Homo sapiens
  source 1..18: mol_type = genomic RNA
ccaggtgatccgtacaga

SEQ ID NO: 11063 - RNA, 18 nt, Homo sapiens
  source 1..18: mol_type = genomic RNA
caggtgatccgtacagag

SEQ ID NO: 11064 - RNA, 18 nt, Homo sapiens
  source 1..18: mol_type = genomic RNA
aggtgatccgtacagagt

SEQ ID NO: 11065 - RNA, 18 nt, Homo sapiens
  source 1..18: mol_type = genomic RNA
ggtgatccgtacagagtg

SEQ ID NO: 11066 - RNA, 18 nt, Homo sapiens
  source 1..18: mol_type = genomic RNA
gtgatccgtacagagtga

SEQ ID NO: 11067 - RNA, 18 nt, Homo sapiens
  source 1..18: mol_type = genomic RNA
tgatccgtacagagtgat

SEQ ID NO: 11068 - RNA, 18 nt, Homo sapiens
  source 1..18: mol_type = genomic RNA
gatccgtacagagtgatg

SEQ ID NO: 11069 - RNA, 18 nt, Homo sapiens
  source 1..18: mol_type = genomic RNA
atccgtacagagtgatgt

SEQ ID NO: 11070 - RNA, 18 nt, Homo sapiens
  source 1..18: mol_type = genomic RNA
tccgtacagagtgatgtc

SEQ ID NO: 11071 - RNA, 18 nt, Homo sapiens
  source 1..18: mol_type = genomic RNA
ccgtacagagtgatgtca

SEQ ID NO: 11072 - RNA, 18 nt, Homo sapiens
  source 1..18: mol_type = genomic RNA
cgtacagagtgatgtcac

SEQ ID NO: 11073 - RNA, 18 nt, Homo sapiens
  source 1..18: mol_type = genomic RNA
gtacagagtgatgtcaca

SEQ ID NO: 11074 - RNA, 18 nt, Homo sapiens
  source 1..18: mol_type = genomic RNA
tacagagtgatgtcacaa

SEQ ID NO: 11075 - RNA, 18 nt, Homo sapiens
  source 1..18: mol_type = genomic RNA
acagagtgatgtcacaac

SEQ ID NO: 11076 - RNA, 18 nt, Homo sapiens
  source 1..18: mol_type = genomic RNA
cagagtgatgtcacaacg

SEQ ID NO: 11077 - RNA, 18 nt, Homo sapiens
  source 1..18: mol_type = genomic RNA
agagtgatgtcacaacgc

SEQ ID NO: 11078 - RNA, 18 nt, Homo sapiens
  source 1..18: mol_type = genomic RNA
gagtgatgtcacaacgcc

SEQ ID NO: 11079 - RNA, 18 nt, Homo sapiens
  source 1..18: mol_type = genomic RNA
agtgatgtcacaacgccc

SEQ ID NO: 11080 - RNA, 18 nt, Homo sapiens
  source 1..18: mol_type = genomic RNA
gtgatgtcacaacgccct

SEQ ID NO: 11081 - RNA, 18 nt, Homo sapiens
  source 1..18: mol_type = genomic RNA
tgatgtcacaacgccctc

SEQ ID NO: 11082 - RNA, 18 nt, Homo sapiens
  source 1..18: mol_type = genomic RNA
gatgtcacaacgccctct

SEQ ID NO: 11083 - RNA, 18 nt, Homo sapiens
  source 1..18: mol_type = genomic RNA
atgtcacaacgccctctg

SEQ ID NO: 11084 - RNA, 18 nt, Homo sapiens
  source 1..18: mol_type = genomic RNA
tgtcacaacgccctctgt

SEQ ID NO: 11085 - RNA, 18 nt, Homo sapiens
  source 1..18: mol_type = genomic RNA
gtcacaacgccctctgta

SEQ ID NO: 11086 - RNA, 18 nt, Homo sapiens
  source 1..18: mol_type = genomic RNA
tcacaacgccctctgtag

SEQ ID NO: 11087 - RNA, 18 nt, Homo sapiens
  source 1..18: mol_type = genomic RNA
cacaacgccctctgtagg

SEQ ID NO: 11088 - RNA, 18 nt, Homo sapiens
  source 1..18: mol_type = genomic RNA
acaacgccctctgtaggc

SEQ ID NO: 11089 - RNA, 18 nt, Homo sapiens
  source 1..18: mol_type = genomic RNA
caacgccctctgtaggca

SEQ ID NO: 11090 - RNA, 18 nt, Homo sapiens
  source 1..18: mol_type = genomic RNA
aacgccctctgtaggcag

SEQ ID NO: 11091 - RNA, 18 nt, Homo sapiens
  source 1..18: mol_type = genomic RNA
acgccctctgtaggcaga

SEQ ID NO: 11092 - RNA, 18 nt, Homo sapiens
  source 1..18: mol_type = genomic RNA
cgccctctgtaggcagag

SEQ ID NO: 11093 - RNA, 18 nt, Homo sapiens
  source 1..18: mol_type = genomic RNA
gccctctgtaggcagaga

SEQ ID NO: 11094 - RNA, 18 nt, Homo sapiens
  source 1..18: mol_type = genomic RNA
ccctctgtaggcagagac

SEQ ID NO: 11095 - RNA, 18 nt, Homo sapiens
  source 1..18: mol_type = genomic RNA
cctctgtaggcagagact

SEQ ID NO: 11096 - RNA, 18 nt, Homo sapiens
  source 1..18: mol_type = genomic RNA
ctctgtaggcagagacta

SEQ ID NO: 11097 - RNA, 18 nt, Homo sapiens
  source 1..18: mol_type = genomic RNA
tctgtaggcagagactag

SEQ ID NO: 11098 - RNA, 18 nt, Homo sapiens
  source 1..18: mol_type = genomic RNA
ctgtaggcagagactaga

SEQ ID NO: 11099 - RNA, 18 nt, Homo sapiens
  source 1..18: mol_type = genomic RNA
tgtaggcagagactagaa

SEQ ID NO: 11100 - RNA, 18 nt, Homo sapiens
  source 1..18: mol_type = genomic RNA
gtaggcagagactagaaa

SEQ ID NO: 11101 - RNA, 18 nt, Homo sapiens
  source 1..18: mol_type = genomic RNA
taggcagagactagaaaa

SEQ ID NO: 11102 - RNA, 18 nt, Homo sapiens
  source 1..18: mol_type = genomic RNA
aggcagagactagaaaag

SEQ ID NO: 11103 - RNA, 18 nt, Homo sapiens
  source 1..18: mol_type = genomic RNA
ggcagagactagaaaaga

SEQ ID NO: 11104 - RNA, 18 nt, Homo sapiens
  source 1..18: mol_type = genomic RNA
gcagagactagaaaagag

SEQ ID NO: 11105 - RNA, 18 nt, Homo sapiens
  source 1..18: mol_type = genomic RNA
cagagactagaaaagagt

SEQ ID NO: 11106 - RNA, 18 nt, Homo sapiens
  source 1..18: mol_type = genomic RNA
agagactagaaaagagtt

SEQ ID NO: 11107 - RNA, 18 nt, Homo sapiens
  source 1..18: mol_type = genomic RNA
gagactagaaaagagtta

SEQ ID NO: 11108 - RNA, 18 nt, Homo sapiens
  source 1..18: mol_type = genomic RNA
agactagaaaagagttac

SEQ ID NO: 11109 - RNA, 18 nt, Homo sapiens
  source 1..18: mol_type = genomic RNA
gactagaaaagagttaca

SEQ ID NO: 11110 - RNA, 18 nt, Homo sapiens
  source 1..18: mol_type = genomic RNA
aagagttacattacctgg

SEQ ID NO: 11111 - RNA, 18 nt, Homo sapiens
  source 1..18: mol_type = genomic RNA
agagttacattacctggg

SEQ ID NO: 11112 - RNA, 18 nt, Homo sapiens
  source 1..18: mol_type = genomic RNA
gagttacattacctgggt

SEQ ID NO: 11113 - RNA, 18 nt, Homo sapiens
  source 1..18: mol_type = genomic RNA
agttacattacctgggtg

SEQ ID NO: 11114 - RNA, 18 nt, Homo sapiens
  source 1..18: mol_type = genomic RNA
gttacattacctgggtga

SEQ ID NO: 11115 - RNA, 18 nt, Homo sapiens
  source 1..18: mol_type = genomic RNA
ttacattacctgggtgat

SEQ ID NO: 11116 - RNA, 18 nt, Homo sapiens
  source 1..18: mol_type = genomic RNA
tacattacctgggtgatc

SEQ ID NO: 11117 - RNA, 18 nt, Homo sapiens
  source 1..18: mol_type = genomic RNA
acattacctgggtgatca

SEQ ID NO: 11118 - RNA, 18 nt, Homo sapiens
  source 1..18: mol_type = genomic RNA
cattacctgggtgatcag

SEQ ID NO: 11119 - RNA, 18 nt, Homo sapiens
  source 1..18: mol_type = genomic RNA
attacctgggtgatcagt

SEQ ID NO: 11120 - RNA, 18 nt, Homo sapiens
  source 1..18: mol_type = genomic RNA
ttacctgggtgatcagtg

SEQ ID NO: 11121 - RNA, 18 nt, Homo sapiens
  source 1..18: mol_type = genomic RNA
tacctgggtgatcagtgc

SEQ ID NO: 11122 - RNA, 18 nt, Homo sapiens
  source 1..18: mol_type = genomic RNA
tcacaatgccccctgtag

SEQ ID NO: 11123 - RNA, 18 nt, Homo sapiens
  source 1..18: mol_type = genomic RNA
cacaatgccccctgtagg

SEQ ID NO: 11124 - RNA, 18 nt, Homo sapiens
  source 1..18: mol_type = genomic RNA
acaatgccccctgtaggc

SEQ ID NO: 11125 - RNA, 18 nt, Homo sapiens
  source 1..18: mol_type = genomic RNA
caatgccccctgtaggca

SEQ ID NO: 11126 - RNA, 18 nt, Homo sapiens
  source 1..18: mol_type = genomic RNA
aatgccccctgtaggcag

SEQ ID NO: 11127 - RNA, 18 nt, Homo sapiens
  source 1..18: mol_type = genomic RNA
atgccccctgtaggcaga

SEQ ID NO: 11128 - RNA, 18 nt, Homo sapiens
  source 1..18: mol_type = genomic RNA
cccctgtaggcagagcat

SEQ ID NO: 11129 - RNA, 18 nt, Homo sapiens
  source 1..18: mol_type = genomic RNA
ccctgtaggcagagcata

SEQ ID NO: 11130 - RNA, 18 nt, Homo sapiens
  source 1..18: mol_type = genomic RNA
cctgtaggcagagcatag

SEQ ID NO: 11131 - RNA, 18 nt, Homo sapiens
  source 1..18: mol_type = genomic RNA
ctgtaggcagagcataga

SEQ ID NO: 11132 - RNA, 18 nt, Homo sapiens
  source 1..18: mol_type = genomic RNA
tgtaggcagagcatagag

SEQ ID NO: 11133 - RNA, 18 nt, Homo sapiens
  source 1..18: mol_type = genomic RNA
gtaggcagagcatagaga

SEQ ID NO: 11134 - RNA, 18 nt, Homo sapiens
  source 1..18: mol_type = genomic RNA
taggcagagcatagagaa

SEQ ID NO: 11135 - RNA, 18 nt, Homo sapiens
  source 1..18: mol_type = genomic RNA
aggcagagcatagagaag

SEQ ID NO: 11136 - RNA, 18 nt, Homo sapiens
  source 1..18: mol_type = genomic RNA
ggcagagcatagagaaga

SEQ ID NO: 11137 - RNA, 18 nt, Homo sapiens
  source 1..18: mol_type = genomic RNA
gcagagcatagagaagag

SEQ ID NO: 11138 - RNA, 18 nt, Homo sapiens
  source 1..18: mol_type = genomic RNA
cagagcatagagaagagt

SEQ ID NO: 11139 - RNA, 18 nt, Homo sapiens
  source 1..18: mol_type = genomic RNA
agagcatagagaagagtt

SEQ ID NO: 11140 - RNA, 18 nt, Homo sapiens
  source 1..18: mol_type = genomic RNA
gagcatagagaagagttg

SEQ ID NO: 11141 - RNA, 18 nt, Homo sapiens
  source 1..18: mol_type = genomic RNA
agcatagagaagagttgc

SEQ ID NO: 11142 - RNA, 18 nt, Homo sapiens
  source 1..18: mol_type = genomic RNA
gcatagagaagagttgca

SEQ ID NO: 11143 - RNA, 18 nt, Homo sapiens
  source 1..18: mol_type = genomic RNA
catagagaagagttgcat

SEQ ID NO: 11144 - RNA, 18 nt, Homo sapiens
  source 1..18: mol_type = genomic RNA
atagagaagagttgcatc

SEQ ID NO: 11145 - RNA, 18 nt, Homo sapiens
  source 1..18: mol_type = genomic RNA
tagagaagagttgcatca

SEQ ID NO: 11146 - RNA, 18 nt, Homo sapiens
  source 1..18: mol_type = genomic RNA
agagaagagttgcatcac

SEQ ID NO: 11147 - RNA, 18 nt, Homo sapiens
  source 1..18: mol_type = genomic RNA
gagaagagttgcatcacc

SEQ ID NO: 11148 - RNA, 18 nt, Homo sapiens
  source 1..18: mol_type = genomic RNA
agaagagttgcatcacct

SEQ ID NO: 11149 - RNA, 18 nt, Homo sapiens
  source 1..18: mol_type = genomic RNA
gaagagttgcatcacctg

SEQ ID NO: 11150 - RNA, 18 nt, Homo sapiens
  source 1..18: mol_type = genomic RNA
aagagttgcatcacctgg

SEQ ID NO: 11151 - RNA, 18 nt, Homo sapiens
  source 1..18: mol_type = genomic RNA
agagttgcatcacctggg

SEQ ID NO: 11152 - RNA, 18 nt, Homo sapiens
  source 1..18: mol_type = genomic RNA
gagttgcatcacctgggt

SEQ ID NO: 11153 - RNA, 18 nt, Homo sapiens
  source 1..18: mol_type = genomic RNA
agttgcatcacctgggtg

SEQ ID NO: 11154 - RNA, 18 nt, Homo sapiens
  source 1..18: mol_type = genomic RNA
gttgcatcacctgggtga

SEQ ID NO: 11155 - RNA, 18 nt, Homo sapiens
  source 1..18: mol_type = genomic RNA
ttgcatcacctgggtgat

SEQ ID NO: 11156 - RNA, 18 nt, Homo sapiens
  source 1..18: mol_type = genomic RNA
tgcatcacctgggtgatc

SEQ ID NO: 11157 - RNA, 18 nt, Homo sapiens
  source 1..18: mol_type = genomic RNA
gcatcacctgggtgatca

SEQ ID NO: 11158 - RNA, 18 nt, Homo sapiens
  source 1..18: mol_type = genomic RNA
acctgggtgatcagtgta

SEQ ID NO: 11159 - RNA, 18 nt, Homo sapiens
  source 1..18: mol_type = genomic RNA
cctgggtgatcagtgtag

SEQ ID NO: 11160 - RNA, 18 nt, Homo sapiens
  source 1..18: mol_type = genomic RNA
ctgggtgatcagtgtaga

SEQ ID NO: 11161 - RNA, 18 nt, Homo sapiens
  source 1..18: mol_type = genomic RNA
tgggtgatcagtgtagag

SEQ ID NO: 11162 - RNA, 18 nt, Homo sapiens
  source 1..18: mol_type = genomic RNA
gggtgatcagtgtagaga

SEQ ID NO: 11163 - RNA, 18 nt, Homo sapiens
  source 1..18: mol_type = genomic RNA
tcagtgtagagatatgtc

SEQ ID NO: 11164 - RNA, 18 nt, Homo sapiens
  source 1..18: mol_type = genomic RNA
agtgtagagatatgtcac

SEQ ID NO: 11165 - RNA, 18 nt, Homo sapiens
  source 1..18: mol_type = genomic RNA
gtgtagagatatgtcaca

SEQ ID NO: 11166 - RNA, 18 nt, Homo sapiens
  source 1..18: mol_type = genomic RNA
tgtagagatatgtcacaa

SEQ ID NO: 11167 - RNA, 18 nt, Homo sapiens
  source 1..18: mol_type = genomic RNA
atatgtcacaatgtcccc

SEQ ID NO: 11168 - RNA, 18 nt, Homo sapiens
  source 1..18: mol_type = genomic RNA
tatgtcacaatgtcccct

SEQ ID NO: 11169 - RNA, 18 nt, Homo sapiens
  source 1..18: mol_type = genomic RNA
ccctgtaggcagatccta

SEQ ID NO: 11170 - RNA, 18 nt, Homo sapiens
  source 1..18: mol_type = genomic RNA
cctgtaggcagatcctag

SEQ ID NO: 11171 - RNA, 18 nt, Homo sapiens
  source 1..18: mol_type = genomic RNA
ctgtaggcagatcctaga

SEQ ID NO: 11172 - RNA, 18 nt, Homo sapiens
  source 1..18: mol_type = genomic RNA
tgtaggcagatcctagac

SEQ ID NO: 11173 - RNA, 18 nt, Homo sapiens
  source 1..18: mol_type = genomic RNA
gtaggcagatcctagaca

SEQ ID NO: 11174 - RNA, 18 nt, Homo sapiens
  source 1..18: mol_type = genomic RNA
taggcagatcctagacaa

SEQ ID NO: 11175 - RNA, 18 nt, Homo sapiens
  source 1..18: mol_type = genomic RNA
aggcagatcctagacaag

SEQ ID NO: 11176 - RNA, 18 nt, Homo sapiens
  source 1..18: mol_type = genomic RNA
ggcagatcctagacaaga

SEQ ID NO: 11177 - RNA, 18 nt, Homo sapiens
  source 1..18: mol_type = genomic RNA
gcagatcctagacaagag

SEQ ID NO: 11178 - RNA, 18 nt, Homo sapiens
  source 1..18: mol_type = genomic RNA
cagatcctagacaagagt

SEQ ID NO: 11179 - RNA, 18 nt, Homo sapiens
  source 1..18: mol_type = genomic RNA
agatcctagacaagagtt

SEQ ID NO: 11180 - RNA, 18 nt, Homo sapiens
  source 1..18: mol_type = genomic RNA
cacttaggtgatcagtgc

SEQ ID NO: 11181 - RNA, 18 nt, Homo sapiens
  source 1..18: mol_type = genomic RNA
acttaggtgatcagtgca

SEQ ID NO: 11182 - RNA, 18 nt, Homo sapiens
  source 1..18: mol_type = genomic RNA
cttaggtgatcagtgcag

SEQ ID NO: 11183 - RNA, 18 nt, Homo sapiens
  source 1..18: mol_type = genomic RNA
ttaggtgatcagtgcaga

SEQ ID NO: 11184 - RNA, 18 nt, Homo sapiens
  source 1..18: mol_type = genomic RNA
taggtgatcagtgcagag

SEQ ID NO: 11185 - RNA, 18 nt, Homo sapiens
  source 1..18: mol_type = genomic RNA
aggtgatcagtgcagaga

SEQ ID NO: 11186 - RNA, 18 nt, Homo sapiens
  source 1..18: mol_type = genomic RNA
agtgatcagtgcagagat

SEQ ID NO: 11187 - RNA, 18 nt, Homo sapiens
  source 1..18: mol_type = genomic RNA
tgtaggccaaagcctaga

SEQ ID NO: 11188 - RNA, 18 nt, Homo sapiens
  source 1..18: mol_type = genomic RNA
gtaggccaaagcctagac

SEQ ID NO: 11189 - RNA, 18 nt, Homo sapiens
  source 1..18: mol_type = genomic RNA
taggccaaagcctagaca

SEQ ID NO: 11190 - RNA, 18 nt, Homo sapiens
  source 1..18: mol_type = genomic RNA
aggccaaagcctagacaa

SEQ ID NO: 11191 - RNA, 18 nt, Homo sapiens
  source 1..18: mol_type = genomic RNA
ggccaaagcctagacaat

SEQ ID NO: 11192 - RNA, 18 nt, Homo sapiens
  source 1..18: mol_type = genomic RNA
gccaaagcctagacaata

SEQ ID NO: 11193 - RNA, 18 nt, Homo sapiens
  source 1..18: mol_type = genomic RNA
ccaaagcctagacaatag

SEQ ID NO: 11194 - RNA, 18 nt, Homo sapiens
  source 1..18: mol_type = genomic RNA
caaagcctagacaatagt

SEQ ID NO: 11195 - RNA, 18 nt, Homo sapiens
  source 1..18: mol_type = genomic RNA
aaagcctagacaatagtt

SEQ ID NO: 11196 - RNA, 18 nt, Homo sapiens
  source 1..18: mol_type = genomic RNA
aagcctagacaatagtta

SEQ ID NO: 11197 - RNA, 18 nt, Homo sapiens
  source 1..18: mol_type = genomic RNA
agcctagacaatagttac

SEQ ID NO: 11198 - RNA, 18 nt, Homo sapiens
  source 1..18: mol_type = genomic RNA
gcctagacaatagttaca

SEQ ID NO: 11199 - RNA, 18 nt, Homo sapiens
  source 1..18: mol_type = genomic RNA
atagttacatcacttggg

SEQ ID NO: 11200 - RNA, 18 nt, Homo sapiens
  source 1..18: mol_type = genomic RNA
tagttacatcacttgggt

SEQ ID NO: 11201 - RNA, 18 nt, Homo sapiens
  source 1..18: mol_type = genomic RNA
agttacatcacttgggtg

SEQ ID NO: 11202 - RNA, 18 nt, Homo sapiens
  source 1..18: mol_type = genomic RNA
gttacatcacttgggtga

SEQ ID NO: 11203 - RNA, 18 nt, Homo sapiens
  source 1..18: mol_type = genomic RNA
ttacatcacttgggtgat

SEQ ID NO: 11204 - RNA, 18 nt, Homo sapiens
  source 1..18: mol_type = genomic RNA
tacatcacttgggtgatc

SEQ ID NO: 11205 - RNA, 18 nt, Homo sapiens
  source 1..18: mol_type = genomic RNA
acatcacttgggtgatca

SEQ ID NO: 11206 - RNA, 18 nt, Homo sapiens
  source 1..18: mol_type = genomic RNA
catcacttgggtgatcag

SEQ ID NO: 11207 - RNA, 18 nt, Homo sapiens
  source 1..18: mol_type = genomic RNA
atcacttgggtgatcagt

SEQ ID NO: 11208 - RNA, 18 nt, Homo sapiens
  source 1..18: mol_type = genomic RNA
tcacttgggtgatcagtg

SEQ ID NO: 11209 - RNA, 18 nt, Homo sapiens
  source 1..18: mol_type = genomic RNA
cacttgggtgatcagtgg

SEQ ID NO: 11210 - RNA, 18 nt, Homo sapiens
  source 1..18: mol_type = genomic RNA
acttgggtgatcagtggc

SEQ ID NO: 11211 - RNA, 18 nt, Homo sapiens
  source 1..18: mol_type = genomic RNA
cttgggtgatcagtggcg

SEQ ID NO: 11212 - RNA, 18 nt, Homo sapiens
  source 1..18: mol_type = genomic RNA
ttgggtgatcagtggcga

SEQ ID NO: 11213 - RNA, 18 nt, Homo sapiens
  source 1..18: mol_type = genomic RNA
tgggtgatcagtggcgag

SEQ ID NO: 11214 - RNA, 18 nt, Homo sapiens
  source 1..18: mol_type = genomic RNA
gggtgatcagtggcgaga

SEQ ID NO: 11215 - RNA, 18 nt, Homo sapiens
  source 1..18: mol_type = genomic RNA
ggtgatcagtggcgagat

SEQ ID NO: 11216 - RNA, 18 nt, Homo sapiens
  source 1..18: mol_type = genomic RNA
gtgatcagtggcgagatc

SEQ ID NO: 11217 - RNA, 18 nt, Homo sapiens
  source 1..18: mol_type = genomic RNA
tgatcagtggcgagatct

SEQ ID NO: 11218 - RNA, 18 nt, Homo sapiens
  source 1..18: mol_type = genomic RNA
gatcagtggcgagatctc

SEQ ID NO: 11219 - RNA, 18 nt, Homo sapiens
  source 1..18: mol_type = genomic RNA
atcagtggcgagatctct

SEQ ID NO: 11220 - RNA, 18 nt, Homo sapiens
  source 1..18: mol_type = genomic RNA
tcagtggcgagatctctc

SEQ ID NO: 11221 - RNA, 18 nt, Homo sapiens
  source 1..18: mol_type = genomic RNA
cagtggcgagatctctca

SEQ ID NO: 11222 - RNA, 18 nt, Homo sapiens
  source 1..18: mol_type = genomic RNA
agtggcgagatctctcac

SEQ ID NO: 11223 - RNA, 18 nt, Homo sapiens
  source 1..18: mol_type = genomic RNA
gtggcgagatctctcaca

SEQ ID NO: 11224 - RNA, 18 nt, Homo sapiens
  source 1..18: mol_type = genomic RNA
tggcgagatctctcacaa

SEQ ID NO: 11225 - RNA, 18 nt, Homo sapiens
  source 1..18: mol_type = genomic RNA
ggcgagatctctcacaat

SEQ ID NO: 11226 - RNA, 18 nt, Homo sapiens
  source 1..18: mol_type = genomic RNA
gcgagatctctcacaatt

SEQ ID NO: 11227 - RNA, 18 nt, Homo sapiens
  source 1..18: mol_type = genomic RNA
gagatctctcacaattcc

SEQ ID NO: 11228 - RNA, 18 nt, Homo sapiens
  source 1..18: mol_type = genomic RNA
agatctctcacaattccc

SEQ ID NO: 11229 - RNA, 18 nt, Homo sapiens
  source 1..18: mol_type = genomic RNA
gatctctcacaattcccc

SEQ ID NO: 11230 - RNA, 18 nt, Homo sapiens
  source 1..18: mol_type = genomic RNA
atctctcacaattcccct

SEQ ID NO: 11231 - RNA, 18 nt, Homo sapiens
  source 1..18: mol_type = genomic RNA
tctctcacaattcccctg

SEQ ID NO: 11232 - RNA, 18 nt, Homo sapiens
  source 1..18: mol_type = genomic RNA
ctctcacaattcccctgt

SEQ ID NO: 11233 - RNA, 18 nt, Homo sapiens
  source 1..18: mol_type = genomic RNA
tctcacaattcccctgta

SEQ ID NO: 11234 - RNA, 18 nt, Homo sapiens
  source 1..18: mol_type = genomic RNA
ctcacaattcccctgtag

SEQ ID NO: 11235 - RNA, 18 nt, Homo sapiens
  source 1..18: mol_type = genomic RNA
tcacaattcccctgtagg

SEQ ID NO: 11236 - RNA, 18 nt, Homo sapiens
  source 1..18: mol_type = genomic RNA
cacaattcccctgtaggc

SEQ ID NO: 11237 - RNA, 18 nt, Homo sapiens
  source 1..18: mol_type = genomic RNA
acaattcccctgtaggca

SEQ ID NO: 11238 - RNA, 18 nt, Homo sapiens
  source 1..18: mol_type = genomic RNA
caattcccctgtaggcag

SEQ ID NO: 11239 - RNA, 18 nt, Homo sapiens
  source 1..18: mol_type = genomic RNA
aattcccctgtaggcaga

SEQ ID NO: 11240 - RNA, 18 nt, Homo sapiens
  source 1..18: mol_type = genomic RNA
attcccctgtaggcagag

SEQ ID NO: 11241 - RNA, 18 nt, Homo sapiens
  source 1..18: mol_type = genomic RNA
ttcccctgtaggcagagc

SEQ ID NO: 11242 - RNA, 18 nt, Homo sapiens
  source 1..18: mol_type = genomic RNA
tcccctgtaggcagagct

SEQ ID NO: 11243 - RNA, 18 nt, Homo sapiens
  source 1..18: mol_type = genomic RNA
cctgtaggcagagcttat

SEQ ID NO: 11244 - RNA, 18 nt, Homo sapiens
  source 1..18: mol_type = genomic RNA
ctgtaggcagagcttata

SEQ ID NO: 11245 - RNA, 18 nt, Homo sapiens
  source 1..18: mol_type = genomic RNA
tgtaggcagagcttatac

SEQ ID NO: 11246 - RNA, 18 nt, Homo sapiens
  source 1..18: mol_type = genomic RNA
gtaggcagagcttataca

SEQ ID NO: 11247 - RNA, 18 nt, Homo sapiens
  source 1..18: mol_type = genomic RNA
taggcagagcttatacaa

SEQ ID NO: 11248 - RNA, 18 nt, Homo sapiens
  source 1..18: mol_type = genomic RNA
aggcagagcttatacaac

SEQ ID NO: 11249 - RNA, 18 nt, Homo sapiens
  source 1..18: mol_type = genomic RNA
ggcagagcttatacaaca

SEQ ID NO: 11250 - RNA, 18 nt, Homo sapiens
  source 1..18: mol_type = genomic RNA
gcagagcttatacaacag

SEQ ID NO: 11251 - RNA, 18 nt, Homo sapiens
  source 1..18: mol_type = genomic RNA
cagagcttatacaacagt

SEQ ID NO: 11252 - RNA, 18 nt, Homo sapiens
  source 1..18: mol_type = genomic RNA
agagcttatacaacagtt

SEQ ID NO: 11253 - RNA, 18 nt, Homo sapiens
  source 1..18: mol_type = genomic RNA
tatgtcacaatgccccca

SEQ ID NO: 11254 - RNA, 18 nt, Homo sapiens
  source 1..18: mol_type = genomic RNA
atgtcacaatgcccccat

SEQ ID NO: 11255 - RNA, 18 nt, Homo sapiens
  source 1..18: mol_type = genomic RNA
tgtcacaatgcccccata

SEQ ID NO: 11256 - RNA, 18 nt, Homo sapiens
  source 1..18: mol_type = genomic RNA
gtcacaatgcccccatag

SEQ ID NO: 11257 - RNA, 18 nt, Homo sapiens
  source 1..18: mol_type = genomic RNA
tcacaatgcccccatagg

SEQ ID NO: 11258 - RNA, 18 nt, Homo sapiens
  source 1..18: mol_type = genomic RNA
cacaatgcccccataggc

SEQ ID NO: 11259 - RNA, 18 nt, Homo sapiens
  source 1..18: mol_type = genomic RNA
acaatgcccccataggca

SEQ ID NO: 11260 - RNA, 18 nt, Homo sapiens
  source 1..18: mol_type = genomic RNA
caatgcccccataggcag

SEQ ID NO: 11261 - RNA, 18 nt, Homo sapiens
  source 1..18: mol_type = genomic RNA
aatgcccccataggcaga

SEQ ID NO: 11262 - RNA, 18 nt, Homo sapiens
  source 1..18: mol_type = genomic RNA
tgatcagtgcagaaatac

SEQ ID NO: 11263 - RNA, 18 nt, Homo sapiens
  source 1..18: mol_type = genomic RNA
gatcagtgcagaaatacg

SEQ ID NO: 11264 - RNA, 18 nt, Homo sapiens
  source 1..18: mol_type = genomic RNA
atcagtgcagaaatacgt

SEQ ID NO: 11265 - RNA, 18 nt, Homo sapiens
  source 1..18: mol_type = genomic RNA
tcagtgcagaaatacgtc

SEQ ID NO: 11266 - RNA, 18 nt, Homo sapiens
  source 1..18: mol_type = genomic RNA
cagtgcagaaatacgtca

SEQ ID NO: 11267 - RNA, 18 nt, Homo sapiens
  source 1..18: mol_type = genomic RNA
agtgcagaaatacgtcac

SEQ ID NO: 11268 - RNA, 18 nt, Homo sapiens
  source 1..18: mol_type = genomic RNA
gtgcagaaatacgtcaca

SEQ ID NO: 11269 - RNA, 18 nt, Homo sapiens
  source 1..18: mol_type = genomic RNA
tgcagaaatacgtcacaa

SEQ ID NO: 11270 - RNA, 18 nt, Homo sapiens
  source 1..18: mol_type = genomic RNA
gcagaaatacgtcacaat

SEQ ID NO: 11271 - RNA, 18 nt, Homo sapiens
  source 1..18: mol_type = genomic RNA
cagaaatacgtcacaatg

SEQ ID NO: 11272 - RNA, 18 nt, Homo sapiens
  source 1..18: mol_type = genomic RNA
agaaatacgtcacaatgc

SEQ ID NO: 11273 - RNA, 18 nt, Homo sapiens
  source 1..18: mol_type = genomic RNA
gaaatacgtcacaatgcc

SEQ ID NO: 11274 - RNA, 18 nt, Homo sapiens
  source 1..18: mol_type = genomic RNA
aaatacgtcacaatgccc

SEQ ID NO: 11275 - RNA, 18 nt, Homo sapiens
  source 1..18: mol_type = genomic RNA
aatacgtcacaatgcccc

SEQ ID NO: 11276 - RNA, 18 nt, Homo sapiens
  source 1..18: mol_type = genomic RNA
atacgtcacaatgccccc

SEQ ID NO: 11277 - RNA, 18 nt, Homo sapiens
  source 1..18: mol_type = genomic RNA
tacgtcacaatgccccct

SEQ ID NO: 11278 - RNA, 18 nt, Homo sapiens
  source 1..18: mol_type = genomic RNA
acgtcacaatgccccctt

SEQ ID NO: 11279 - RNA, 18 nt, Homo sapiens
  source 1..18: mol_type = genomic RNA
cgtcacaatgccccctta

SEQ ID NO: 11280 - RNA, 18 nt, Homo sapiens
  source 1..18: mol_type = genomic RNA
gtcacaatgcccccttag

SEQ ID NO: 11281 - RNA, 18 nt, Homo sapiens
  source 1..18: mol_type = genomic RNA
tcacaatgcccccttagg

SEQ ID NO: 11282 - RNA, 18 nt, Homo sapiens
  source 1..18: mol_type = genomic RNA
cacaatgcccccttaggc

SEQ ID NO: 11283 - RNA, 18 nt, Homo sapiens
  source 1..18: mol_type = genomic RNA
acaatgcccccttaggca

SEQ ID NO: 11284 - RNA, 18 nt, Homo sapiens
  source 1..18: mol_type = genomic RNA
caatgcccccttaggcag

SEQ ID NO: 11285 - RNA, 18 nt, Homo sapiens
  source 1..18: mol_type = genomic RNA
aatgcccccttaggcaga

SEQ ID NO: 11286 - RNA, 18 nt, Homo sapiens
  source 1..18: mol_type = genomic RNA
atgcccccttaggcagag

SEQ ID NO: 11287 - RNA, 18 nt, Homo sapiens
  source 1..18: mol_type = genomic RNA
cccccttaggcagagcct

SEQ ID NO: 11288 - RNA, 18 nt, Homo sapiens
  source 1..18: mol_type = genomic RNA
ccccttaggcagagccta

SEQ ID NO: 11289 - RNA, 18 nt, Homo sapiens
  source 1..18: mol_type = genomic RNA
cccttaggcagagcctag

SEQ ID NO: 11290 - RNA, 18 nt, Homo sapiens
  source 1..18: mol_type = genomic RNA
ccttaggcagagcctaga

SEQ ID NO: 11291 - RNA, 18 nt, Homo sapiens
  source 1..18: mol_type = genomic RNA
cttaggcagagcctagac

SEQ ID NO: 11292 - RNA, 18 nt, Homo sapiens
  source 1..18: mol_type = genomic RNA
ttaggcagagcctagaca

SEQ ID NO: 11293 - RNA, 18 nt, Homo sapiens
  source 1..18: mol_type = genomic RNA
aggcagagcctagacaaa

SEQ ID NO: 11294 - RNA, 18 nt, Homo sapiens
  source 1..18: mol_type = genomic RNA
ggcagagcctagacaaaa

SEQ ID NO: 11295 - RNA, 18 nt, Homo sapiens
  source 1..18: mol_type = genomic RNA
gcagagcctagacaaaag

SEQ ID NO: 11296 - RNA, 18 nt, Homo sapiens
  source 1..18: mol_type = genomic RNA
cagagcctagacaaaagc

SEQ ID NO: 11297 - RNA, 18 nt, Homo sapiens
  source 1..18: mol_type = genomic RNA
agagcctagacaaaagcc

SEQ ID NO: 11298 - RNA, 18 nt, Homo sapiens
  source 1..18: mol_type = genomic RNA
gagcctagacaaaagccc

SEQ ID NO: 11299 - RNA, 18 nt, Homo sapiens
  source 1..18: mol_type = genomic RNA
agcctagacaaaagcccc

SEQ ID NO: 11300 - RNA, 18 nt, Homo sapiens
  source 1..18: mol_type = genomic RNA
gcctagacaaaagcccca

SEQ ID NO: 11301 - RNA, 18 nt, Homo sapiens
  source 1..18: mol_type = genomic RNA
cctagacaaaagccccat

SEQ ID NO: 11302 - RNA, 18 nt, Homo sapiens
  source 1..18: mol_type = genomic RNA
ctagacaaaagccccatc

SEQ ID NO: 11303 - RNA, 18 nt, Homo sapiens
  source 1..18: mol_type = genomic RNA
tagacaaaagccccatca

SEQ ID NO: 11304 - RNA, 18 nt, Homo sapiens
  source 1..18: mol_type = genomic RNA
agacaaaagccccatcac

SEQ ID NO: 11305 - RNA, 18 nt, Homo sapiens
  source 1..18: mol_type = genomic RNA
gacaaaagccccatcacc

SEQ ID NO: 11306 - RNA, 18 nt, Homo sapiens
  source 1..18: mol_type = genomic RNA
acaaaagccccatcacct

SEQ ID NO: 11307 - RNA, 18 nt, Homo sapiens
  source 1..18: mol_type = genomic RNA
caaaagccccatcacctg

SEQ ID NO: 11308 - RNA, 18 nt, Homo sapiens
  source 1..18: mol_type = genomic RNA
aaaagccccatcacctgg

SEQ ID NO: 11309 - RNA, 18 nt, Homo sapiens
  source 1..18: mol_type = genomic RNA
aaagccccatcacctgga

SEQ ID NO: 11310 - RNA, 18 nt, Homo sapiens
  source 1..18: mol_type = genomic RNA
aagccccatcacctggat

SEQ ID NO: 11311 - RNA, 18 nt, Homo sapiens
  source 1..18: mol_type = genomic RNA
agccccatcacctggatg

SEQ ID NO: 11312 - RNA, 18 nt, Homo sapiens
  source 1..18: mol_type = genomic RNA
gccccatcacctggatga

SEQ ID NO: 11313 - RNA, 18 nt, Homo sapiens
  source 1..18: mol_type = genomic RNA
ccccatcacctggatgat

SEQ ID NO: 11314 - RNA, 18 nt, Homo sapiens
  source 1..18: mol_type = genomic RNA
cccatcacctggatgatt

SEQ ID NO: 11315 - RNA, 18 nt, Homo sapiens
  source 1..18: mol_type = genomic RNA
ccatcacctggatgatta

SEQ ID NO: 11316 - RNA, 18 nt, Homo sapiens
  source 1..18: mol_type = genomic RNA
catcacctggatgattag

SEQ ID NO: 11317 - RNA, 18 nt, Homo sapiens
  source 1..18: mol_type = genomic RNA
atcacctggatgattagt

SEQ ID NO: 11318 - RNA, 18 nt, Homo sapiens
  source 1..18: mol_type = genomic RNA
tcacctggatgattagtg

SEQ ID NO: 11319 - RNA, 18 nt, Homo sapiens
  source 1..18: mol_type = genomic RNA
cacctggatgattagtgc

SEQ ID NO: 11320 - RNA, 18 nt, Homo sapiens
  source 1..18: mol_type = genomic RNA
acctggatgattagtgca

SEQ ID NO: 11321 - RNA, 18 nt, Homo sapiens
  source 1..18: mol_type = genomic RNA
cctggatgattagtgcag

SEQ ID NO: 11322 - RNA, 18 nt, Homo sapiens
  source 1..18: mol_type = genomic RNA
ctggatgattagtgcaga

SEQ ID NO: 11323 - RNA, 18 nt, Homo sapiens
  source 1..18: mol_type = genomic RNA
tggatgattagtgcagag

SEQ ID NO: 11324 - RNA, 18 nt, Homo sapiens
  source 1..18: mol_type = genomic RNA
ggatgattagtgcagagt

SEQ ID NO: 11325 - RNA, 18 nt, Homo sapiens
  source 1..18: mol_type = genomic RNA
gatgattagtgcagagtt

SEQ ID NO: 11326 - RNA, 18 nt, Homo sapiens
  source 1..18: mol_type = genomic RNA
tagtgcagagttatgtca

SEQ ID NO: 11327 - RNA, 18 nt, Homo sapiens
  source 1..18: mol_type = genomic RNA
gcagagttatgtcacaaa

SEQ ID NO: 11328 - RNA, 18 nt, Homo sapiens
  source 1..18: mol_type = genomic RNA
agatatgtcacaatgcca

SEQ ID NO: 11329 - RNA, 18 nt, Homo sapiens
  source 1..18: mol_type = genomic RNA
gatatgtcacaatgccac

SEQ ID NO: 11330 - RNA, 18 nt, Homo sapiens
  source 1..18: mol_type = genomic RNA
atatgtcacaatgccact

SEQ ID NO: 11331 - RNA, 18 nt, Homo sapiens
  source 1..18: mol_type = genomic RNA
tatgtcacaatgccactg

SEQ ID NO: 11332 - RNA, 18 nt, Homo sapiens
  source 1..18: mol_type = genomic RNA
atgtcacaatgccactgt

SEQ ID NO: 11333 - RNA, 18 nt, Homo sapiens
  source 1..18: mol_type = genomic RNA
tgtcacaatgccactgta

SEQ ID NO: 11334 - RNA, 18 nt, Homo sapiens
  source 1..18: mol_type = genomic RNA
gtcacaatgccactgtag

SEQ ID NO: 11335 - RNA, 18 nt, Homo sapiens
  source 1..18: mol_type = genomic RNA
tcacaatgccactgtagg

SEQ ID NO: 11336 - RNA, 18 nt, Homo sapiens
  source 1..18: mol_type = genomic RNA
cacaatgccactgtaggc

SEQ ID NO: 11337 - RNA, 18 nt, Homo sapiens
  source 1..18: mol_type = genomic RNA
acaatgccactgtaggca

SEQ ID NO: 11338 - RNA, 18 nt, Homo sapiens
  source 1..18: mol_type = genomic RNA
caatgccactgtaggcag

SEQ ID NO: 11339 - RNA, 18 nt, Homo sapiens
  source 1..18: mol_type = genomic RNA
aatgccactgtaggcaga

SEQ ID NO: 11340 - RNA, 18 nt, Homo sapiens
  source 1..18: mol_type = genomic RNA
atgccactgtaggcagag

SEQ ID NO: 11341 - RNA, 18 nt, Homo sapiens
  source 1..18: mol_type = genomic RNA
ccactgtaggcagagcct

SEQ ID NO: 11342 - RNA, 18 nt, Homo sapiens
  source 1..18: mol_type = genomic RNA
cactgtaggcagagccta

SEQ ID NO: 11343 - RNA, 18 nt, Homo sapiens
  source 1..18: mol_type = genomic RNA
actgtaggcagagcctag

SEQ ID NO: 11344 - RNA, 18 nt, Homo sapiens
  source 1..18: mol_type = genomic RNA
agcctagacaagagttat

SEQ ID NO: 11345 - RNA, 18 nt, Homo sapiens
  source 1..18: mol_type = genomic RNA
gcctagacaagagttata

SEQ ID NO: 11346 - RNA, 18 nt, Homo sapiens
  source 1..18: mol_type = genomic RNA
agacaagagttatatgac

SEQ ID NO: 11347 - RNA, 18 nt, Homo sapiens
  source 1..18: mol_type = genomic RNA
gacaagagttatatgacc

SEQ ID NO: 11348 - RNA, 18 nt, Homo sapiens
  source 1..18: mol_type = genomic RNA
acaagagttatatgacct

SEQ ID NO: 11349 - RNA, 18 nt, Homo sapiens
  source 1..18: mol_type = genomic RNA
agagttatatgacctagg

SEQ ID NO: 11350 - RNA, 18 nt, Homo sapiens
  source 1..18: mol_type = genomic RNA
gagttatatgacctaggt

SEQ ID NO: 11351 - RNA, 18 nt, Homo sapiens
  source 1..18: mol_type = genomic RNA
agttatatgacctaggtg

SEQ ID NO: 11352 - RNA, 18 nt, Homo sapiens
  source 1..18: mol_type = genomic RNA
gttatatgacctaggtga

SEQ ID NO: 11353 - RNA, 18 nt, Homo sapiens
  source 1..18: mol_type = genomic RNA
ttatatgacctaggtgat

SEQ ID NO: 11354 - RNA, 18 nt, Homo sapiens
  source 1..18: mol_type = genomic RNA
tatatgacctaggtgatc

SEQ ID NO: 11355 - RNA, 18 nt, Homo sapiens
  source 1..18: mol_type = genomic RNA
atatgacctaggtgatca

SEQ ID NO: 11356 - RNA, 18 nt, Homo sapiens
  source 1..18: mol_type = genomic RNA
tatgacctaggtgatcag

SEQ ID NO: 11357 - RNA, 18 nt, Homo sapiens
  source 1..18: mol_type = genomic RNA
atgacctaggtgatcagt

SEQ ID NO: 11358 - RNA, 18 nt, Homo sapiens
  source 1..18: mol_type = genomic RNA
tgacctaggtgatcagtg

SEQ ID NO: 11359 - RNA, 18 nt, Homo sapiens
  source 1..18: mol_type = genomic RNA
gacctaggtgatcagtgc

SEQ ID NO: 11360 - RNA, 18 nt, Homo sapiens
  source 1..18: mol_type = genomic RNA
ctaggtgatcagtgcaga

SEQ ID NO: 11361 - RNA, 18 nt, Homo sapiens
  source 1..18: mol_type = genomic RNA
gatcagtgcagagataca

SEQ ID NO: 11362 - RNA, 18 nt, Homo sapiens
  source 1..18: mol_type = genomic RNA
atcagtgcagagatacat

SEQ ID NO: 11363 - RNA, 18 nt, Homo sapiens
  source 1..18: mol_type = genomic RNA
gcaatgcccctgtaggca

SEQ ID NO: 11364 - RNA, 18 nt, Homo sapiens
  source 1..18: mol_type = genomic RNA
cctgtaggcagagccctg

SEQ ID NO: 11365 - RNA, 18 nt, Homo sapiens
  source 1..18: mol_type = genomic RNA
ctgtaggcagagccctga

SEQ ID NO: 11366 - RNA, 18 nt, Homo sapiens
  source 1..18: mol_type = genomic RNA
taggcagagccctgacaa

SEQ ID NO: 11367 - RNA, 18 nt, Homo sapiens
  source 1..18: mol_type = genomic RNA
gcagagccctgacaagtg

SEQ ID NO: 11368 - RNA, 18 nt, Homo sapiens
  source 1..18: mol_type = genomic RNA
cagagccctgacaagtgg

SEQ ID NO: 11369 - RNA, 18 nt, Homo sapiens
  source 1..18: mol_type = genomic RNA
agagccctgacaagtggt

SEQ ID NO: 11370 - RNA, 18 nt, Homo sapiens
  source 1..18: mol_type = genomic RNA
gagccctgacaagtggta

SEQ ID NO: 11371 - RNA, 18 nt, Homo sapiens
  source 1..18: mol_type = genomic RNA
agccctgacaagtggtac

SEQ ID NO: 11372 - RNA, 18 nt, Homo sapiens
  source 1..18: mol_type = genomic RNA
gccctgacaagtggtaca

SEQ ID NO: 11373 - RNA, 18 nt, Homo sapiens
  source 1..18: mol_type = genomic RNA
ccctgacaagtggtacat

SEQ ID NO: 11374 - RNA, 18 nt, Homo sapiens
  source 1..18: mol_type = genomic RNA
cctgacaagtggtacatc

SEQ ID NO: 11375 - RNA, 18 nt, Homo sapiens
  source 1..18: mol_type = genomic RNA
ctgacaagtggtacatca

SEQ ID NO: 11376 - RNA, 18 nt, Homo sapiens
  source 1..18: mol_type = genomic RNA
tgacaagtggtacatcac

SEQ ID NO: 11377 - RNA, 18 nt, Homo sapiens
  source 1..18: mol_type = genomic RNA
gacaagtggtacatcacc

SEQ ID NO: 11378 - RNA, 18 nt, Homo sapiens
  source 1..18: mol_type = genomic RNA
acaagtggtacatcacct

SEQ ID NO: 11379 - RNA, 18 nt, Homo sapiens
  source 1..18: mol_type = genomic RNA
caagtggtacatcacctg

SEQ ID NO: 11380 - RNA, 18 nt, Homo sapiens
  source 1..18: mol_type = genomic RNA
aagtggtacatcacctgg

SEQ ID NO: 11381 - RNA, 18 nt, Homo sapiens
  source 1..18: mol_type = genomic RNA
agtggtacatcacctggg

SEQ ID NO: 11382 - RNA, 18 nt, Homo sapiens
  source 1..18: mol_type = genomic RNA
gtggtacatcacctgggt

SEQ ID NO: 11383 - RNA, 18 nt, Homo sapiens
  source 1..18: mol_type = genomic RNA
tggtacatcacctgggtg

SEQ ID NO: 11384 - RNA, 18 nt, Homo sapiens
  source 1..18: mol_type = genomic RNA
ggtacatcacctgggtga

SEQ ID NO: 11385 - RNA, 18 nt, Homo sapiens
  source 1..18: mol_type = genomic RNA
gtacatcacctgggtgat

SEQ ID NO: 11386 - RNA, 18 nt, Homo sapiens
  source 1..18: mol_type = genomic RNA
ctgggtgatcattgcagg

SEQ ID NO: 11387 - RNA, 18 nt, Homo sapiens
  source 1..18: mol_type = genomic RNA
tgggtgatcattgcaggg

SEQ ID NO: 11388 - RNA, 18 nt, Homo sapiens
  source 1..18: mol_type = genomic RNA
gggtgatcattgcaggga

SEQ ID NO: 11389 - RNA, 18 nt, Homo sapiens
  source 1..18: mol_type = genomic RNA
ggtgatcattgcagggat

SEQ ID NO: 11390 - RNA, 18 nt, Homo sapiens
  source 1..18: mol_type = genomic RNA
gtgatcattgcagggata

SEQ ID NO: 11391 - RNA, 18 nt, Homo sapiens
  source 1..18: mol_type = genomic RNA
tgatcattgcagggatat

SEQ ID NO: 11392 - RNA, 18 nt, Homo sapiens
  source 1..18: mol_type = genomic RNA
gatcattgcagggatatg

SEQ ID NO: 11393 - RNA, 18 nt, Homo sapiens
  source 1..18: mol_type = genomic RNA
atcattgcagggatatgt

SEQ ID NO: 11394 - RNA, 18 nt, Homo sapiens
  source 1..18: mol_type = genomic RNA
tcattgcagggatatgtc

SEQ ID NO: 11395 - RNA, 18 nt, Homo sapiens
  source 1..18: mol_type = genomic RNA
cattgcagggatatgtca

SEQ ID NO: 11396 - RNA, 18 nt, Homo sapiens
  source 1..18: mol_type = genomic RNA
attgcagggatatgtcac

SEQ ID NO: 11397 - RNA, 18 nt, Homo sapiens
  source 1..18: mol_type = genomic RNA
ttgcagggatatgtcaca

SEQ ID NO: 11398 - RNA, 18 nt, Homo sapiens
  source 1..18: mol_type = genomic RNA
tgcagggatatgtcacaa

SEQ ID NO: 11399 - RNA, 18 nt, Homo sapiens
  source 1..18: mol_type = genomic RNA
gcagggatatgtcacaaa

SEQ ID NO: 11400 - RNA, 18 nt, Homo sapiens
  source 1..18: mol_type = genomic RNA
cagggatatgtcacaaag

SEQ ID NO: 11401 - RNA, 18 nt, Homo sapiens
  source 1..18: mol_type = genomic RNA
agggatatgtcacaaagc

SEQ ID NO: 11402 - RNA, 18 nt, Homo sapiens
  source 1..18: mol_type = genomic RNA
gggatatgtcacaaagca

SEQ ID NO: 11403 - RNA, 18 nt, Homo sapiens
  source 1..18: mol_type = genomic RNA
ggatatgtcacaaagcac

SEQ ID NO: 11404 - RNA, 18 nt, Homo sapiens
  source 1..18: mol_type = genomic RNA
gatatgtcacaaagcacc

SEQ ID NO: 11405 - RNA, 18 nt, Homo sapiens
  source 1..18: mol_type = genomic RNA
atatgtcacaaagcaccc

SEQ ID NO: 11406 - RNA, 18 nt, Homo sapiens
  source 1..18: mol_type = genomic RNA
tatgtcacaaagcaccct

SEQ ID NO: 11407 - RNA, 18 nt, Homo sapiens
  source 1..18: mol_type = genomic RNA
atgtcacaaagcaccctg

SEQ ID NO: 11408 - RNA, 18 nt, Homo sapiens
  source 1..18: mol_type = genomic RNA
tgtcacaaagcaccctgt

SEQ ID NO: 11409 - RNA, 18 nt, Homo sapiens
  source 1..18: mol_type = genomic RNA
gtcacaaagcaccctgta

SEQ ID NO: 11410 - RNA, 18 nt, Homo sapiens
  source 1..18: mol_type = genomic RNA
tcacaaagcaccctgtag

SEQ ID NO: 11411 - RNA, 18 nt, Homo sapiens
  source 1..18: mol_type = genomic RNA
cacaaagcaccctgtagg

SEQ ID NO: 11412 - RNA, 18 nt, Homo sapiens
  source 1..18: mol_type = genomic RNA
acaaagcaccctgtaggc

SEQ ID NO: 11413 - RNA, 18 nt, Homo sapiens
  source 1..18: mol_type = genomic RNA
caaagcaccctgtaggca

SEQ ID NO: 11414 - RNA, 18 nt, Homo sapiens
  source 1..18: mol_type = genomic RNA
aaagcaccctgtaggcag

SEQ ID NO: 11415 - RNA, 18 nt, Homo sapiens
  source 1..18: mol_type = genomic RNA
aagcaccctgtaggcaga

SEQ ID NO: 11416 - RNA, 18 nt, Homo sapiens
  source 1..18: mol_type = genomic RNA
agcaccctgtaggcagat

SEQ ID NO: 11417 - RNA, 18 nt, Homo sapiens
  source 1..18: mol_type = genomic RNA
gcaccctgtaggcagatc

SEQ ID NO: 11418 - RNA, 18 nt, Homo sapiens
  source 1..18: mol_type = genomic RNA
caccctgtaggcagatcc

SEQ ID NO: 11419 - RNA, 18 nt, Homo sapiens
  source 1..18: mol_type = genomic RNA
accctgtaggcagatcct

SEQ ID NO: 11420 - RNA, 18 nt, Homo sapiens
  source 1..18: mol_type = genomic RNA
gatcctagacaagagtta

SEQ ID NO: 11421 - RNA, 18 nt, Homo sapiens
  source 1..18: mol_type = genomic RNA
atcctagacaagagttac

SEQ ID NO: 11422 - RNA, 18 nt, Homo sapiens
  source 1..18: mol_type = genomic RNA
tcctagacaagagttaca

SEQ ID NO: 11423 - RNA, 18 nt, Homo sapiens
  source 1..18: mol_type = genomic RNA
ctagacaagagttacatg

SEQ ID NO: 11424 - RNA, 18 nt, Homo sapiens
  source 1..18: mol_type = genomic RNA
tagacaagagttacatga

SEQ ID NO: 11425 - RNA, 18 nt, Homo sapiens
  source 1..18: mol_type = genomic RNA
agacaagagttacatgac

SEQ ID NO: 11426 - RNA, 18 nt, Homo sapiens
  source 1..18: mol_type = genomic RNA
gacaagagttacatgacc

SEQ ID NO: 11427 - RNA, 18 nt, Homo sapiens
  source 1..18: mol_type = genomic RNA
acaagagttacatgacct

SEQ ID NO: 11428 - RNA, 18 nt, Homo sapiens
  source 1..18: mol_type = genomic RNA
caagagttacatgacctg

SEQ ID NO: 11429 - RNA, 18 nt, Homo sapiens
  source 1..18: mol_type = genomic RNA
aagagttacatgacctgg

SEQ ID NO: 11430 - RNA, 18 nt, Homo sapiens
  source 1..18: mol_type = genomic RNA
agagttacatgacctggg

SEQ ID NO: 11431 - RNA, 18 nt, Homo sapiens
  source 1..18: mol_type = genomic RNA
gagttacatgacctgggt

SEQ ID NO: 11432 - RNA, 18 nt, Homo sapiens
  source 1..18: mol_type = genomic RNA
agttacatgacctgggtg

SEQ ID NO: 11433 - RNA, 18 nt, Homo sapiens
  source 1..18: mol_type = genomic RNA
gttacatgacctgggtga

SEQ ID NO: 11434 - RNA, 18 nt, Homo sapiens
  source 1..18: mol_type = genomic RNA
ttacatgacctgggtgat

SEQ ID NO: 11435 - RNA, 18 nt, Homo sapiens
  source 1..18: mol_type = genomic RNA
tacatgacctgggtgatc

SEQ ID NO: 11436 - RNA, 18 nt, Homo sapiens
  source 1..18: mol_type = genomic RNA
acatgacctgggtgatca

SEQ ID NO: 11437 - RNA, 18 nt, Homo sapiens
  source 1..18: mol_type = genomic RNA
catgacctgggtgatcag

SEQ ID NO: 11438 - RNA, 18 nt, Homo sapiens
  source 1..18: mol_type = genomic RNA
atgacctgggtgatcagt

SEQ ID NO: 11439 - RNA, 18 nt, Homo sapiens
  source 1..18: mol_type = genomic RNA
tgacctgggtgatcagtg

SEQ ID NO: 11440 - RNA, 18 nt, Homo sapiens
  source 1..18: mol_type = genomic RNA
gacctgggtgatcagtgc

SEQ ID NO: 11441 - RNA, 18 nt, Homo sapiens
  source 1..18: mol_type = genomic RNA
caagagttacatgaccta

SEQ ID NO: 11442 - RNA, 18 nt, Homo sapiens
  source 1..18: mol_type = genomic RNA
aagagttacatgacctag

SEQ ID NO: 11443 - RNA, 18 nt, Homo sapiens
  source 1..18: mol_type = genomic RNA
agagttacatgacctagg

SEQ ID NO: 11444 - RNA, 18 nt, Homo sapiens
  source 1..18: mol_type = genomic RNA
gagttacatgacctaggt

SEQ ID NO: 11445 - RNA, 18 nt, Homo sapiens
  source 1..18: mol_type = genomic RNA
agttacatgacctaggtg

SEQ ID NO: 11446 - RNA, 18 nt, Homo sapiens
  source 1..18: mol_type = genomic RNA
gttacatgacctaggtga

SEQ ID NO: 11447 - RNA, 18 nt, Homo sapiens
  source 1..18: mol_type = genomic RNA
ttacatgacctaggtgat

SEQ ID NO: 11448 - RNA, 18 nt, Homo sapiens
  source 1..18: mol_type = genomic RNA
tacatgacctaggtgatc

SEQ ID NO: 11449 - RNA, 18 nt, Homo sapiens
  source 1..18: mol_type = genomic RNA
acatgacctaggtgatca

SEQ ID NO: 11450 - RNA, 18 nt, Homo sapiens
  source 1..18: mol_type = genomic RNA
catgacctaggtgatcag

SEQ ID NO: 11451 - RNA, 18 nt, Homo sapiens
  source 1..18: mol_type = genomic RNA
tcagtgcagagatacatc

SEQ ID NO: 11452 - RNA, 18 nt, Homo sapiens
  source 1..18: mol_type = genomic RNA
cagtgcagagatacatcg

SEQ ID NO: 11453 - RNA, 18 nt, Homo sapiens
  source 1..18: mol_type = genomic RNA
agtgcagagatacatcgc

SEQ ID NO: 11454 - RNA, 18 nt, Homo sapiens
  source 1..18: mol_type = genomic RNA
gtgcagagatacatcgca

SEQ ID NO: 11455 - RNA, 18 nt, Homo sapiens
  source 1..18: mol_type = genomic RNA
tgcagagatacatcgcaa

SEQ ID NO: 11456 - RNA, 18 nt, Homo sapiens
  source 1..18: mol_type = genomic RNA
gcagagatacatcgcaat

SEQ ID NO: 11457 - RNA, 18 nt, Homo sapiens
  source 1..18: mol_type = genomic RNA
cagagatacatcgcaatg

SEQ ID NO: 11458 - RNA, 18 nt, Homo sapiens
  source 1..18: mol_type = genomic RNA
agagatacatcgcaatgc

SEQ ID NO: 11459 - RNA, 18 nt, Homo sapiens
  source 1..18: mol_type = genomic RNA
gagatacatcgcaatgcc

SEQ ID NO: 11460 - RNA, 18 nt, Homo sapiens
  source 1..18: mol_type = genomic RNA
agatacatcgcaatgccc

SEQ ID NO: 11461 - RNA, 18 nt, Homo sapiens
  source 1..18: mol_type = genomic RNA
gatacatcgcaatgcccc

SEQ ID NO: 11462 - RNA, 18 nt, Homo sapiens
  source 1..18: mol_type = genomic RNA
atacatcgcaatgcccct

SEQ ID NO: 11463 - RNA, 18 nt, Homo sapiens
  source 1..18: mol_type = genomic RNA
tacatcgcaatgcccctg

SEQ ID NO: 11464 - RNA, 18 nt, Homo sapiens
  source 1..18: mol_type = genomic RNA
acatcgcaatgcccctgt

SEQ ID NO: 11465 - RNA, 18 nt, Homo sapiens
  source 1..18: mol_type = genomic RNA
catcgcaatgcccctgta

SEQ ID NO: 11466 - RNA, 18 nt, Homo sapiens
  source 1..18: mol_type = genomic RNA
atcgcaatgcccctgtag

SEQ ID NO: 11467 - RNA, 18 nt, Homo sapiens
  source 1..18: mol_type = genomic RNA
tcgcaatgcccctgtagg

SEQ ID NO: 11468 - RNA, 18 nt, Homo sapiens
  source 1..18: mol_type = genomic RNA
cgcaatgcccctgtaggc

SEQ ID NO: 11469 - RNA, 18 nt, Homo sapiens
  source 1..18: mol_type = genomic RNA
ccctgtaggcagagcctt

SEQ ID NO: 11470 - RNA, 18 nt, Homo sapiens
  source 1..18: mol_type = genomic RNA
cctgtaggcagagccttg

SEQ ID NO: 11471 - RNA, 18 nt, Homo sapiens
  source 1..18: mol_type = genomic RNA
ctgtaggcagagccttga

SEQ ID NO: 11472 - RNA, 18 nt, Homo sapiens
  source 1..18: mol_type = genomic RNA
tgtaggcagagccttgac

SEQ ID NO: 11473 - RNA, 18 nt, Homo sapiens
  source 1..18: mol_type = genomic RNA
gtaggcagagccttgaca

SEQ ID NO: 11474 - RNA, 18 nt, Homo sapiens
  source 1..18: mol_type = genomic RNA
taggcagagccttgacaa

SEQ ID NO: 11475 - RNA, 18 nt, Homo sapiens
  source 1..18: mol_type = genomic RNA
aggcagagccttgacaag

SEQ ID NO: 11476 - RNA, 18 nt, Homo sapiens
  source 1..18: mol_type = genomic RNA
ggcagagccttgacaagt

SEQ ID NO: 11477 - RNA, 18 nt, Homo sapiens
  source 1..18: mol_type = genomic RNA
gcagagccttgacaagtg

SEQ ID NO: 11478 - RNA, 18 nt, Homo sapiens
  source 1..18: mol_type = genomic RNA
cagagccttgacaagtgg

SEQ ID NO: 11479 - RNA, 18 nt, Homo sapiens
  source 1..18: mol_type = genomic RNA
agagccttgacaagtggt

SEQ ID NO: 11480 - RNA, 18 nt, Homo sapiens
  source 1..18: mol_type = genomic RNA
gagccttgacaagtggta

SEQ ID NO: 11481 - RNA, 18 nt, Homo sapiens
  source 1..18: mol_type = genomic RNA
agccttgacaagtggtac

SEQ ID NO: 11482 - RNA, 18 nt, Homo sapiens
  source 1..18: mol_type = genomic RNA
gccttgacaagtggtaca

SEQ ID NO: 11483 - RNA, 18 nt, Homo sapiens
  source 1..18: mol_type = genomic RNA
ccttgacaagtggtacat

SEQ ID NO: 11484 - RNA, 18 nt, Homo sapiens
  source 1..18: mol_type = genomic RNA
cttgacaagtggtacatc

SEQ ID NO: 11485 - RNA, 18 nt, Homo sapiens
  source 1..18: mol_type = genomic RNA
ttgacaagtggtacatca

SEQ ID NO: 11486 - RNA, 18 nt, Homo sapiens
  source 1..18: mol_type = genomic RNA
tcacaaagcaccctgtaa

SEQ ID NO: 11487 - RNA, 18 nt, Homo sapiens
  source 1..18: mol_type = genomic RNA
cacaaagcaccctgtaag

SEQ ID NO: 11488 - RNA, 18 nt, Homo sapiens
  source 1..18: mol_type = genomic RNA
acaaagcaccctgtaagc

SEQ ID NO: 11489 - RNA, 18 nt, Homo sapiens
  source 1..18: mol_type = genomic RNA
caaagcaccctgtaagca

SEQ ID NO: 11490 - RNA, 18 nt, Homo sapiens
  source 1..18: mol_type = genomic RNA
aaagcaccctgtaagcag

SEQ ID NO: 11491 - RNA, 18 nt, Homo sapiens
  source 1..18: mol_type = genomic RNA
aagcaccctgtaagcaga

SEQ ID NO: 11492 - RNA, 18 nt, Homo sapiens
  source 1..18: mol_type = genomic RNA
agcaccctgtaagcagat

SEQ ID NO: 11493 - RNA, 18 nt, Homo sapiens
  source 1..18: mol_type = genomic RNA
gcaccctgtaagcagatc

SEQ ID NO: 11494 - RNA, 18 nt, Homo sapiens
  source 1..18: mol_type = genomic RNA
caccctgtaagcagatcc

SEQ ID NO: 11495 - RNA, 18 nt, Homo sapiens
  source 1..18: mol_type = genomic RNA
accctgtaagcagatcct

SEQ ID NO: 11496 - RNA, 18 nt, Homo sapiens
  source 1..18: mol_type = genomic RNA
ccctgtaagcagatccta

SEQ ID NO: 11497 - RNA, 18 nt, Homo sapiens
  source 1..18: mol_type = genomic RNA
cctgtaagcagatcctag

SEQ ID NO: 11498 - RNA, 18 nt, Homo sapiens
  source 1..18: mol_type = genomic RNA
ctgtaagcagatcctaga

SEQ ID NO: 11499 - RNA, 18 nt, Homo sapiens
  source 1..18: mol_type = genomic RNA
tgtaagcagatcctagag

SEQ ID NO: 11500 - RNA, 18 nt, Homo sapiens
  source 1..18: mol_type = genomic RNA
gtaagcagatcctagaga

SEQ ID NO: 11501 - RNA, 18 nt, Homo sapiens
  source 1..18: mol_type = genomic RNA
taagcagatcctagagaa

SEQ ID NO: 11502 - RNA, 18 nt, Homo sapiens
  source 1..18: mol_type = genomic RNA
aagcagatcctagagaag

SEQ ID NO: 11503 - RNA, 18 nt, Homo sapiens
  source 1..18: mol_type = genomic RNA
agcagatcctagagaaga

SEQ ID NO: 11504 - RNA, 18 nt, Homo sapiens
  source 1..18: mol_type = genomic RNA
gcagatcctagagaagag

SEQ ID NO: 11505 - RNA, 18 nt, Homo sapiens
  source 1..18: mol_type = genomic RNA
cagatcctagagaagagt

SEQ ID NO: 11506 - RNA, 18 nt, Homo sapiens
  source 1..18: mol_type = genomic RNA
agatcctagagaagagtt

SEQ ID NO: 11507 - RNA, 18 nt, Homo sapiens
  source 1..18: mol_type = genomic RNA
gatcctagagaagagtta

SEQ ID NO: 11508 - RNA, 18 nt, Homo sapiens
  source 1..18: mol_type = genomic RNA
atcctagagaagagttat

SEQ ID NO: 11509 - RNA, 18 nt, Homo sapiens
  source 1..18: mol_type = genomic RNA
agagaagagttatatcac

SEQ ID NO: 11510 - RNA, 18 nt, Homo sapiens
  source 1..18: mol_type = genomic RNA
gagaagagttatatcacc

SEQ ID NO: 11511 - RNA, 18 nt, Homo sapiens
  source 1..18: mol_type = genomic RNA
agaagagttatatcacct

SEQ ID NO: 11512 - RNA, 18 nt, Homo sapiens
  source 1..18: mol_type = genomic RNA
aagagttatatcacctgg

SEQ ID NO: 11513 - RNA, 18 nt, Homo sapiens
  source 1..18: mol_type = genomic RNA
agagttatatcacctggg

SEQ ID NO: 11514 - RNA, 18 nt, Homo sapiens
  source 1..18: mol_type = genomic RNA
gagttatatcacctgggt

SEQ ID NO: 11515 - RNA, 18 nt, Homo sapiens
  source 1..18: mol_type = genomic RNA
agttatatcacctgggtg

SEQ ID NO: 11516 - RNA, 18 nt, Homo sapiens
  source 1..18: mol_type = genomic RNA
gttatatcacctgggtga

SEQ ID NO: 11517 - RNA, 18 nt, Homo sapiens
  source 1..18: mol_type = genomic RNA
ttatatcacctgggtgat

SEQ ID NO: 11518 - RNA, 18 nt, Homo sapiens
  source 1..18: mol_type = genomic RNA
tatatcacctgggtgatc

SEQ ID NO: 11519 - RNA, 18 nt, Homo sapiens
  source 1..18: mol_type = genomic RNA
atatcacctgggtgatca

SEQ ID NO: 11520 - RNA, 18 nt, Homo sapiens
  source 1..18: mol_type = genomic RNA
tatcacctgggtgatcag

SEQ ID NO: 11521 - RNA, 18 nt, Homo sapiens
  source 1..18: mol_type = genomic RNA
gcagagatatgtcacaag

SEQ ID NO: 11522 - RNA, 18 nt, Homo sapiens
  source 1..18: mol_type = genomic RNA
cagagatatgtcacaagc

SEQ ID NO: 11523 - RNA, 18 nt, Homo sapiens
  source 1..18: mol_type = genomic RNA
agagatatgtcacaagcc

SEQ ID NO: 11524 - RNA, 18 nt, Homo sapiens
  source 1..18: mol_type = genomic RNA
gagatatgtcacaagccc

SEQ ID NO: 11525 - RNA, 18 nt, Homo sapiens
  source 1..18: mol_type = genomic RNA
agatatgtcacaagcccc

SEQ ID NO: 11526 - RNA, 18 nt, Homo sapiens
  source 1..18: mol_type = genomic RNA
gatatgtcacaagccccc

SEQ ID NO: 11527 - RNA, 18 nt, Homo sapiens
  source 1..18: mol_type = genomic RNA
atatgtcacaagccccct

SEQ ID NO: 11528 - RNA, 18 nt, Homo sapiens
  source 1..18: mol_type = genomic RNA
tatgtcacaagccccctg

SEQ ID NO: 11529 - RNA, 18 nt, Homo sapiens
  source 1..18: mol_type = genomic RNA
atgtcacaagccccctgt

SEQ ID NO: 11530 - RNA, 18 nt, Homo sapiens
  source 1..18: mol_type = genomic RNA
tgtcacaagccccctgta

SEQ ID NO: 11531 - RNA, 18 nt, Homo sapiens
  source 1..18: mol_type = genomic RNA
gtcacaagccccctgtag

SEQ ID NO: 11532 - RNA, 18 nt, Homo sapiens
  source 1..18: mol_type = genomic RNA
tcacaagccccctgtagg

SEQ ID NO: 11533 - RNA, 18 nt, Homo sapiens
  source 1..18: mol_type = genomic RNA
caagccccctgtaggcag

SEQ ID NO: 11534 - RNA, 18 nt, Homo sapiens
  source 1..18: mol_type = genomic RNA
agacaagagttatatcac

SEQ ID NO: 11535 - RNA, 18 nt, Homo sapiens
  source 1..18: mol_type = genomic RNA
gacaagagttatatcacc

SEQ ID NO: 11536 - RNA, 18 nt, Homo sapiens
  source 1..18: mol_type = genomic RNA
ctgggtgatcagtgcagt

SEQ ID NO: 11537 - RNA, 18 nt, Homo sapiens
  source 1..18: mol_type = genomic RNA
tgggtgatcagtgcagtg

SEQ ID NO: 11538 - RNA, 18 nt, Homo sapiens
  source 1..18: mol_type = genomic RNA
gggtgatcagtgcagtga

SEQ ID NO: 11539 - RNA, 18 nt, Homo sapiens
  source 1..18: mol_type = genomic RNA
gtgtagccagagcctaga

SEQ ID NO: 11540 - RNA, 18 nt, Homo sapiens
  source 1..18: mol_type = genomic RNA
tgtagccagagcctagac

SEQ ID NO: 11541 - RNA, 18 nt, Homo sapiens
  source 1..18: mol_type = genomic RNA
aaagttacagcacctggg

SEQ ID NO: 11542 - RNA, 18 nt, Homo sapiens
  source 1..18: mol_type = genomic RNA
aagttacagcacctggga

SEQ ID NO: 11543 - RNA, 18 nt, Homo sapiens
  source 1..18: mol_type = genomic RNA
agttacagcacctgggag

SEQ ID NO: 11544 - RNA, 18 nt, Homo sapiens
  source 1..18: mol_type = genomic RNA
gttacagcacctgggaga

SEQ ID NO: 11545 - RNA, 18 nt, Homo sapiens
  source 1..18: mol_type = genomic RNA
ttacagcacctgggagat

SEQ ID NO: 11546 - RNA, 18 nt, Homo sapiens
  source 1..18: mol_type = genomic RNA
tacagcacctgggagatc

SEQ ID NO: 11547 - RNA, 18 nt, Homo sapiens
  source 1..18: mol_type = genomic RNA
acagcacctgggagatca

SEQ ID NO: 11548 - RNA, 18 nt, Homo sapiens
  source 1..18: mol_type = genomic RNA
cagcacctgggagatcag

SEQ ID NO: 11549 - RNA, 18 nt, Homo sapiens
  source 1..18: mol_type = genomic RNA
agcacctgggagatcagt

SEQ ID NO: 11550 - RNA, 18 nt, Homo sapiens
  source 1..18: mol_type = genomic RNA
gcacctgggagatcagtg

SEQ ID NO: 11551 - RNA, 18 nt, Homo sapiens
  source 1..18: mol_type = genomic RNA
cacctgggagatcagtgc

SEQ ID NO: 11552 - RNA, 18 nt, Homo sapiens
  source 1..18: mol_type = genomic RNA
acctgggagatcagtgca

SEQ ID NO: 11553 - RNA, 18 nt, Homo sapiens
  source 1..18: mol_type = genomic RNA
cctgggagatcagtgcag

SEQ ID NO: 11554 - RNA, 18 nt, Homo sapiens
  source 1..18: mol_type = genomic RNA
ctgggagatcagtgcaga

SEQ ID NO: 11555 - RNA, 18 nt, Homo sapiens
  source 1..18: mol_type = genomic RNA
tgggagatcagtgcagag

SEQ ID NO: 11556 - RNA, 18 nt, Homo sapiens
  source 1..18: mol_type = genomic RNA
gggagatcagtgcagaga

SEQ ID NO: 11557 - RNA, 18 nt, Homo sapiens
  source 1..18: mol_type = genomic RNA
ggagatcagtgcagagat

SEQ ID NO: 11558 - RNA, 18 nt, Homo sapiens
  source 1..18: mol_type = genomic RNA
gagatcagtgcagagata

SEQ ID NO: 11559 - RNA, 18 nt, Homo sapiens
  source 1..18: mol_type = genomic RNA
agatcagtgcagagatat

SEQ ID NO: 11560 - RNA, 18 nt, Homo sapiens
  source 1..18: mol_type = genomic RNA
tatgtcacaatgtcccca

SEQ ID NO: 11561 - RNA, 18 nt, Homo sapiens
  source 1..18: mol_type = genomic RNA
atgtcacaatgtccccag

SEQ ID NO: 11562 - RNA, 18 nt, Homo sapiens
  source 1..18: mol_type = genomic RNA
tgtcacaatgtccccagt

SEQ ID NO: 11563 - RNA, 18 nt, Homo sapiens
  source 1..18: mol_type = genomic RNA
gtcacaatgtccccagta

SEQ ID NO: 11564 - RNA, 18 nt, Homo sapiens
  source 1..18: mol_type = genomic RNA
tcacaatgtccccagtag

SEQ ID NO: 11565 - RNA, 18 nt, Homo sapiens
  source 1..18: mol_type = genomic RNA
cacaatgtccccagtagg

SEQ ID NO: 11566 - RNA, 18 nt, Homo sapiens
  source 1..18: mol_type = genomic RNA
acaatgtccccagtaggc

SEQ ID NO: 11567 - RNA, 18 nt, Homo sapiens
  source 1..18: mol_type = genomic RNA
caatgtccccagtaggca

SEQ ID NO: 11568 - RNA, 18 nt, Homo sapiens
  source 1..18: mol_type = genomic RNA
aatgtccccagtaggcag

SEQ ID NO: 11569 - RNA, 18 nt, Homo sapiens
  source 1..18: mol_type = genomic RNA
atgtccccagtaggcaga

SEQ ID NO: 11570 - RNA, 18 nt, Homo sapiens
  source 1..18: mol_type = genomic RNA
tgtccccagtaggcagag

SEQ ID NO: 11571 - RNA, 18 nt, Homo sapiens
  source 1..18: mol_type = genomic RNA
gtccccagtaggcagaga

SEQ ID NO: 11572 - RNA, 18 nt, Homo sapiens
  source 1..18: mol_type = genomic RNA
cccagtaggcagagacca

SEQ ID NO: 11573 - RNA, 18 nt, Homo sapiens
  source 1..18: mol_type = genomic RNA
ccagtaggcagagaccag

SEQ ID NO: 11574 - RNA, 18 nt, Homo sapiens
  source 1..18: mol_type = genomic RNA
cagtaggcagagaccagg

SEQ ID NO: 11575 - RNA, 18 nt, Homo sapiens
  source 1..18: mol_type = genomic RNA
cagagaccaggcaagagt

SEQ ID NO: 11576 - RNA, 18 nt, Homo sapiens
  source 1..18: mol_type = genomic RNA
agagaccaggcaagagtt

SEQ ID NO: 11577 - RNA, 18 nt, Homo sapiens
  source 1..18: mol_type = genomic RNA
gagaccaggcaagagttg

SEQ ID NO: 11578 - RNA, 18 nt, Homo sapiens
  source 1..18: mol_type = genomic RNA
agaccaggcaagagttgg

SEQ ID NO: 11579 - RNA, 18 nt, Homo sapiens
  source 1..18: mol_type = genomic RNA
gaccaggcaagagttgga

SEQ ID NO: 11580 - RNA, 18 nt, Homo sapiens
  source 1..18: mol_type = genomic RNA
accaggcaagagttggat

SEQ ID NO: 11581 - RNA, 18 nt, Homo sapiens
  source 1..18: mol_type = genomic RNA
ccaggcaagagttggatc

SEQ ID NO: 11582 - RNA, 18 nt, Homo sapiens
  source 1..18: mol_type = genomic RNA
caggcaagagttggatca

SEQ ID NO: 11583 - RNA, 18 nt, Homo sapiens
  source 1..18: mol_type = genomic RNA
aggcaagagttggatcac

SEQ ID NO: 11584 - RNA, 18 nt, Homo sapiens
  source 1..18: mol_type = genomic RNA
ggcaagagttggatcacc

SEQ ID NO: 11585 - RNA, 18 nt, Homo sapiens
  source 1..18: mol_type = genomic RNA
gcaagagttggatcacct

SEQ ID NO: 11586 - RNA, 18 nt, Homo sapiens
  source 1..18: mol_type = genomic RNA
caagagttggatcacctc

SEQ ID NO: 11587 - RNA, 18 nt, Homo sapiens
  source 1..18: mol_type = genomic RNA
aagagttggatcacctcg

SEQ ID NO: 11588 - RNA, 18 nt, Homo sapiens
  source 1..18: mol_type = genomic RNA
agagttggatcacctcgg

SEQ ID NO: 11589 - RNA, 18 nt, Homo sapiens
  source 1..18: mol_type = genomic RNA
gagttggatcacctcggg

SEQ ID NO: 11590 - RNA, 18 nt, Homo sapiens
  source 1..18: mol_type = genomic RNA
agttggatcacctcggga

SEQ ID NO: 11591 - RNA, 18 nt, Homo sapiens
  source 1..18: mol_type = genomic RNA
gttggatcacctcgggat

SEQ ID NO: 11592 - RNA, 18 nt, Homo sapiens
  source 1..18: mol_type = genomic RNA
ttggatcacctcgggatc

SEQ ID NO: 11593 - RNA, 18 nt, Homo sapiens
  source 1..18: mol_type = genomic RNA
tggatcacctcgggatca

SEQ ID NO: 11594 - RNA, 18 nt, Homo sapiens
  source 1..18: mol_type = genomic RNA
ggatcacctcgggatcag

SEQ ID NO: 11595 - RNA, 18 nt, Homo sapiens
  source 1..18: mol_type = genomic RNA
gatcacctcgggatcagt

SEQ ID NO: 11596 - RNA, 18 nt, Homo sapiens
  source 1..18: mol_type = genomic RNA
atcacctcgggatcagtg

SEQ ID NO: 11597 - RNA, 18 nt, Homo sapiens
  source 1..18: mol_type = genomic RNA
tcacctcgggatcagtgc

SEQ ID NO: 11598 - RNA, 18 nt, Homo sapiens
  source 1..18: mol_type = genomic RNA
cacctcgggatcagtgca

SEQ ID NO: 11599 - RNA, 18 nt, Homo sapiens
  source 1..18: mol_type = genomic RNA
acctcgggatcagtgcag

SEQ ID NO: 11600 - RNA, 18 nt, Homo sapiens
  source 1..18: mol_type = genomic RNA
cctcgggatcagtgcaga

SEQ ID NO: 11601 - RNA, 18 nt, Homo sapiens
  source 1..18: mol_type = genomic RNA
ctcgggatcagtgcagag

SEQ ID NO: 11602 - RNA, 18 nt, Homo sapiens
  source 1..18: mol_type = genomic RNA
tcgggatcagtgcagaga

SEQ ID NO: 11603 - RNA, 18 nt, Homo sapiens
  source 1..18: mol_type = genomic RNA
cgggatcagtgcagagat

SEQ ID NO: 11604 - RNA, 18 nt, Homo sapiens
  source 1..18: mol_type = genomic RNA
ggatcagtgcagagatat

SEQ ID NO: 11605 - RNA, 18 nt, Homo sapiens
  source 1..18: mol_type = genomic RNA
cagtgcagagatatgtct

SEQ ID NO: 11606 - RNA, 18 nt, Homo sapiens
  source 1..18: mol_type = genomic RNA
agtgcagagatatgtctc

SEQ ID NO: 11607 - RNA, 18 nt, Homo sapiens
  source 1..18: mol_type = genomic RNA
gtgcagagatatgtctca

SEQ ID NO: 11608 - RNA, 18 nt, Homo sapiens
  source 1..18: mol_type = genomic RNA
tgcagagatatgtctcaa

SEQ ID NO: 11609 - RNA, 18 nt, Homo sapiens
  source 1..18: mol_type = genomic RNA
gcagagatatgtctcaat

SEQ ID NO: 11610 - RNA, 18 nt, Homo sapiens
  source 1..18: mol_type = genomic RNA
agagatatgtctcaatcc

SEQ ID NO: 11611 - RNA, 18 nt, Homo sapiens
  source 1..18: mol_type = genomic RNA
gagatatgtctcaatccc

SEQ ID NO: 11612 - RNA, 18 nt, Homo sapiens
  source 1..18: mol_type = genomic RNA
agatatgtctcaatcccc

SEQ ID NO: 11613 - RNA, 18 nt, Homo sapiens
  source 1..18: mol_type = genomic RNA
gatatgtctcaatccccc

SEQ ID NO: 11614 - RNA, 18 nt, Homo sapiens
  source 1..18: mol_type = genomic RNA
atatgtctcaatccccct

SEQ ID NO: 11615 - RNA, 18 nt, Homo sapiens
  source 1..18: mol_type = genomic RNA
tatgtctcaatccccctg

SEQ ID NO: 11616 - RNA, 18 nt, Homo sapiens
  source 1..18: mol_type = genomic RNA
atgtctcaatccccctgt

SEQ ID NO: 11617 - RNA, 18 nt, Homo sapiens
  source 1..18: mol_type = genomic RNA
tgtctcaatccccctgtg

SEQ ID NO: 11618 - RNA, 18 nt, Homo sapiens
  source 1..18: mol_type = genomic RNA
gtctcaatccccctgtgg

SEQ ID NO: 11619 - RNA, 18 nt, Homo sapiens
  source 1..18: mol_type = genomic RNA
tctcaatccccctgtggg

SEQ ID NO: 11620 - RNA, 18 nt, Homo sapiens
  source 1..18: mol_type = genomic RNA
ctcaatccccctgtgggc

SEQ ID NO: 11621 - RNA, 18 nt, Homo sapiens
  source 1..18: mol_type = genomic RNA
tcaatccccctgtgggca

SEQ ID NO: 11622 - RNA, 18 nt, Homo sapiens
  source 1..18: mol_type = genomic RNA
caatccccctgtgggcac

SEQ ID NO: 11623 - RNA, 18 nt, Homo sapiens
  source 1..18: mol_type = genomic RNA
aatccccctgtgggcaca

SEQ ID NO: 11624 - RNA, 18 nt, Homo sapiens
  source 1..18: mol_type = genomic RNA
ctgtgggcacagcctaga

SEQ ID NO: 11625 - RNA, 18 nt, Homo sapiens
  source 1..18: mol_type = genomic RNA
ggcacagcctagacaaga

SEQ ID NO: 11626 - RNA, 18 nt, Homo sapiens
  source 1..18: mol_type = genomic RNA
gcacagcctagacaagag

SEQ ID NO: 11627 - RNA, 18 nt, Homo sapiens
  source 1..18: mol_type = genomic RNA
cacagcctagacaagagt

SEQ ID NO: 11628 - RNA, 18 nt, Homo sapiens
  source 1..18: mol_type = genomic RNA
acagcctagacaagagtt

SEQ ID NO: 11629 - RNA, 18 nt, Homo sapiens
  source 1..18: mol_type = genomic RNA
cagcctagacaagagtta

SEQ ID NO: 11630 - RNA, 18 nt, Homo sapiens
  source 1..18: mol_type = genomic RNA
atcacctcggttaacagt

SEQ ID NO: 11631 - RNA, 18 nt, Homo sapiens
  source 1..18: mol_type = genomic RNA
tcacctcggttaacagtg

SEQ ID NO: 11632 - RNA, 18 nt, Homo sapiens
  source 1..18: mol_type = genomic RNA
cacctcggttaacagtgc

SEQ ID NO: 11633 - RNA, 18 nt, Homo sapiens
  source 1..18: mol_type = genomic RNA
acctcggttaacagtgca

SEQ ID NO: 11634 - RNA, 18 nt, Homo sapiens
  source 1..18: mol_type = genomic RNA
cctcggttaacagtgcag

SEQ ID NO: 11635 - RNA, 18 nt, Homo sapiens
  source 1..18: mol_type = genomic RNA
ctcggttaacagtgcaga

SEQ ID NO: 11636 - RNA, 18 nt, Homo sapiens
  source 1..18: mol_type = genomic RNA
tcggttaacagtgcagag

SEQ ID NO: 11637 - RNA, 18 nt, Homo sapiens
  source 1..18: mol_type = genomic RNA
cggttaacagtgcagaga

SEQ ID NO: 11638 - RNA, 18 nt, Homo sapiens
  source 1..18: mol_type = genomic RNA
ggttaacagtgcagagat

SEQ ID NO: 11639 - RNA, 18 nt, Homo sapiens
  source 1..18: mol_type = genomic RNA
gttaacagtgcagagata

SEQ ID NO: 11640 - RNA, 18 nt, Homo sapiens
  source 1..18: mol_type = genomic RNA
ttaacagtgcagagatat

SEQ ID NO: 11641 - RNA, 18 nt, Homo sapiens
  source 1..18: mol_type = genomic RNA
taacagtgcagagatatg

SEQ ID NO: 11642 - RNA, 18 nt, Homo sapiens
  source 1..18: mol_type = genomic RNA
aacagtgcagagatatgt

SEQ ID NO: 11643 - RNA, 18 nt, Homo sapiens
  source 1..18: mol_type = genomic RNA
acagtgcagagatatgtc

SEQ ID NO: 11644 - RNA, 18 nt, Homo sapiens
  source 1..18: mol_type = genomic RNA
agtgcagagatatgtcaa

SEQ ID NO: 11645 - RNA, 18 nt, Homo sapiens
  source 1..18: mol_type = genomic RNA
gtgcagagatatgtcaaa

SEQ ID NO: 11646 - RNA, 18 nt, Homo sapiens
  source 1..18: mol_type = genomic RNA
tgcagagatatgtcaaaa

SEQ ID NO: 11647 - RNA, 18 nt, Homo sapiens
  source 1..18: mol_type = genomic RNA
gcagagatatgtcaaaat

SEQ ID NO: 11648 - RNA, 18 nt, Homo sapiens
  source 1..18: mol_type = genomic RNA
agagatatgtcaaaatgc

SEQ ID NO: 11649 - RNA, 18 nt, Homo sapiens
  source 1..18: mol_type = genomic RNA
gagatatgtcaaaatgcc

SEQ ID NO: 11650 - RNA, 18 nt, Homo sapiens
  source 1..18: mol_type = genomic RNA
agatatgtcaaaatgccc

SEQ ID NO: 11651 - RNA, 18 nt, Homo sapiens
  source 1..18: mol_type = genomic RNA
gatatgtcaaaatgcccc

SEQ ID NO: 11652 - RNA, 18 nt, Homo sapiens
  source 1..18: mol_type = genomic RNA
atatgtcaaaatgcccct

SEQ ID NO: 11653 - RNA, 18 nt, Homo sapiens
  source 1..18: mol_type = genomic RNA
tatgtcaaaatgcccctg

SEQ ID NO: 11654 - RNA, 18 nt, Homo sapiens
  source 1..18: mol_type = genomic RNA
atgtcaaaatgcccctgt

SEQ ID NO: 11655 - RNA, 18 nt, Homo sapiens
  source 1..18: mol_type = genomic RNA
tgtcaaaatgcccctgta

SEQ ID NO: 11656 - RNA, 18 nt, Homo sapiens
  source 1..18: mol_type = genomic RNA
gtcaaaatgcccctgtag

SEQ ID NO: 11657 - RNA, 18 nt, Homo sapiens
  source 1..18: mol_type = genomic RNA
tcaaaatgcccctgtagg

SEQ ID NO: 11658 - RNA, 18 nt, Homo sapiens
  source 1..18: mol_type = genomic RNA
caaaatgcccctgtaggc

SEQ ID NO: 11659 - RNA, 18 nt, Homo sapiens
  source 1..18: mol_type = genomic RNA
aaaatgcccctgtaggca

SEQ ID NO: 11660 - RNA, 18 nt, Homo sapiens
  source 1..18: mol_type = genomic RNA
aaatgcccctgtaggcaa

SEQ ID NO: 11661 - RNA, 18 nt, Homo sapiens
  source 1..18: mol_type = genomic RNA
aatgcccctgtaggcaag

SEQ ID NO: 11662 - RNA, 18 nt, Homo sapiens
  source 1..18: mol_type = genomic RNA
atgcccctgtaggcaagc

SEQ ID NO: 11663 - RNA, 18 nt, Homo sapiens
  source 1..18: mol_type = genomic RNA
cccctgtaggcaagccta

SEQ ID NO: 11664 - RNA, 18 nt, Homo sapiens
  source 1..18: mol_type = genomic RNA
ccctgtaggcaagcctac

SEQ ID NO: 11665 - RNA, 18 nt, Homo sapiens
  source 1..18: mol_type = genomic RNA
cctgtaggcaagcctaca

SEQ ID NO: 11666 - RNA, 18 nt, Homo sapiens
  source 1..18: mol_type = genomic RNA
ctgtaggcaagcctacac

SEQ ID NO: 11667 - RNA, 18 nt, Homo sapiens
  source 1..18: mol_type = genomic RNA
tgtaggcaagcctacaca

SEQ ID NO: 11668 - RNA, 18 nt, Homo sapiens
  source 1..18: mol_type = genomic RNA
gtaggcaagcctacacaa

SEQ ID NO: 11669 - RNA, 18 nt, Homo sapiens
  source 1..18: mol_type = genomic RNA
taggcaagcctacacaag

SEQ ID NO: 11670 - RNA, 18 nt, Homo sapiens
  source 1..18: mol_type = genomic RNA
aggcaagcctacacaagt

SEQ ID NO: 11671 - RNA, 18 nt, Homo sapiens
  source 1..18: mol_type = genomic RNA
ggcaagcctacacaagta

SEQ ID NO: 11672 - RNA, 18 nt, Homo sapiens
  source 1..18: mol_type = genomic RNA
gcaagcctacacaagtat

SEQ ID NO: 11673 - RNA, 18 nt, Homo sapiens
  source 1..18: mol_type = genomic RNA
caagcctacacaagtatt

SEQ ID NO: 11674 - RNA, 18 nt, Homo sapiens
  source 1..18: mol_type = genomic RNA
aagcctacacaagtatta

SEQ ID NO: 11675 - RNA, 18 nt, Homo sapiens
  source 1..18: mol_type = genomic RNA
agcctacacaagtattac

SEQ ID NO: 11676 - RNA, 18 nt, Homo sapiens
  source 1..18: mol_type = genomic RNA
gcctacacaagtattaca

SEQ ID NO: 11677 - RNA, 18 nt, Homo sapiens
  source 1..18: mol_type = genomic RNA
agagatatgtcacaatac

SEQ ID NO: 11678 - RNA, 18 nt, Homo sapiens
  source 1..18: mol_type = genomic RNA
gagatatgtcacaatacc

SEQ ID NO: 11679 - RNA, 18 nt, Homo sapiens
  source 1..18: mol_type = genomic RNA
agatatgtcacaataccc

SEQ ID NO: 11680 - RNA, 18 nt, Homo sapiens
  source 1..18: mol_type = genomic RNA
gatatgtcacaatacccc

SEQ ID NO: 11681 - RNA, 18 nt, Homo sapiens
  source 1..18: mol_type = genomic RNA
atatgtcacaataccccc

SEQ ID NO: 11682 - RNA, 18 nt, Homo sapiens
  source 1..18: mol_type = genomic RNA
tatgtcacaataccccct

SEQ ID NO: 11683 - RNA, 18 nt, Homo sapiens
  source 1..18: mol_type = genomic RNA
atgtcacaataccccctg

SEQ ID NO: 11684 - RNA, 18 nt, Homo sapiens
  source 1..18: mol_type = genomic RNA
tgtcacaataccccctgt

SEQ ID NO: 11685 - RNA, 18 nt, Homo sapiens
  source 1..18: mol_type = genomic RNA
tcacaataccccctgtaa

SEQ ID NO: 11686 - RNA, 18 nt, Homo sapiens
  source 1..18: mol_type = genomic RNA
cacaataccccctgtaag

SEQ ID NO: 11687 - RNA, 18 nt, Homo sapiens
  source 1..18: mol_type = genomic RNA
acaataccccctgtaagc

SEQ ID NO: 11688 - RNA, 18 nt, Homo sapiens
  source 1..18: mol_type = genomic RNA
caataccccctgtaagca

SEQ ID NO: 11689 - RNA, 18 nt, Homo sapiens
  source 1..18: mol_type = genomic RNA
aataccccctgtaagcag

SEQ ID NO: 11690 - RNA, 18 nt, Homo sapiens
  source 1..18: mol_type = genomic RNA
ataccccctgtaagcaga

SEQ ID NO: 11691 - RNA, 18 nt, Homo sapiens
  source 1..18: mol_type = genomic RNA
taccccctgtaagcagag

SEQ ID NO: 11692 - RNA, 18 nt, Homo sapiens
  source 1..18: mol_type = genomic RNA
ccccctgtaagcagagcc

SEQ ID NO: 11693 - RNA, 18 nt, Homo sapiens
  source 1..18: mol_type = genomic RNA
cccctgtaagcagagcct

SEQ ID NO: 11694 - RNA, 18 nt, Homo sapiens
  source 1..18: mol_type = genomic RNA
ccctgtaagcagagccta

SEQ ID NO: 11695 - RNA, 18 nt, Homo sapiens
  source 1..18: mol_type = genomic RNA
cctgtaagcagagcctag

SEQ ID NO: 11696 - RNA, 18 nt, Homo sapiens
  source 1..18: mol_type = genomic RNA
ctgtaagcagagcctaga

SEQ ID NO: 11697 - RNA, 18 nt, Homo sapiens
  source 1..18: mol_type = genomic RNA
tgtaagcagagcctagac

SEQ ID NO: 11698 - RNA, 18 nt, Homo sapiens
  source 1..18: mol_type = genomic RNA
gtaagcagagcctagaca

SEQ ID NO: 11699 - RNA, 18 nt, Homo sapiens
  source 1..18: mol_type = genomic RNA
taagcagagcctagacaa

SEQ ID NO: 11700 - RNA, 18 nt, Homo sapiens
  source 1..18: mol_type = genomic RNA
aagcagagcctagacaag

SEQ ID NO: 11701 - RNA, 18 nt, Homo sapiens
  source 1..18: mol_type = genomic RNA
agcagagcctagacaaga

SEQ ID NO: 11702 - RNA, 18 nt, Homo sapiens
  source 1..18: mol_type = genomic RNA
agtgcagagatatgtgac

SEQ ID NO: 11703 - RNA, 18 nt, Homo sapiens
  source 1..18: mol_type = genomic RNA
gtgcagagatatgtgaca

SEQ ID NO: 11704 - RNA, 18 nt, Homo sapiens
  source 1..18: mol_type = genomic RNA
tgcagagatatgtgacaa

SEQ ID NO: 11705 - RNA, 18 nt, Homo sapiens
  source 1..18: mol_type = genomic RNA
gcagagatatgtgacaag

SEQ ID NO: 11706 - RNA, 18 nt, Homo sapiens
  source 1..18: mol_type = genomic RNA
cagagatatgtgacaagg

SEQ ID NO: 11707 - RNA, 18 nt, Homo sapiens
  source 1..18: mol_type = genomic RNA
agagatatgtgacaaggc

SEQ ID NO: 11708 - RNA, 18 nt, Homo sapiens
  source 1..18: mol_type = genomic RNA
gagatatgtgacaaggcc

SEQ ID NO: 11709 - RNA, 18 nt, Homo sapiens
  source 1..18: mol_type = genomic RNA
agatatgtgacaaggccc

SEQ ID NO: 11710 - RNA, 18 nt, Homo sapiens
  source 1..18: mol_type = genomic RNA
gatatgtgacaaggcccc

SEQ ID NO: 11711 - RNA, 18 nt, Homo sapiens
  source 1..18: mol_type = genomic RNA
atatgtgacaaggcccct

SEQ ID NO: 11712 - RNA, 18 nt, Homo sapiens
  source 1..18: mol_type = genomic RNA
tatgtgacaaggcccctt

SEQ ID NO: 11713 - RNA, 18 nt, Homo sapiens
  source 1..18: mol_type = genomic RNA
aagcagagcctagacaat

SEQ ID NO: 11714 - RNA, 18 nt, Homo sapiens
  source 1..18: mol_type = genomic RNA
agcagagcctagacaata

SEQ ID NO: 11715 - RNA, 18 nt, Homo sapiens
  source 1..18: mol_type = genomic RNA
gcagagcctagacaatag

SEQ ID NO: 11716 - RNA, 18 nt, Homo sapiens
  source 1..18: mol_type = genomic RNA
cagagcctagacaatagt

SEQ ID NO: 11717 - RNA, 18 nt, Homo sapiens
  source 1..18: mol_type = genomic RNA
agagcctagacaatagtt

SEQ ID NO: 11718 - RNA, 18 nt, Homo sapiens
  source 1..18: mol_type = genomic RNA
gagcctagacaatagtta

SEQ ID NO: 11719 - RNA, 18 nt, Homo sapiens
  source 1..18: mol_type = genomic RNA
gacaatagttacatcacc

SEQ ID NO: 11720 - RNA, 18 nt, Homo sapiens
  source 1..18: mol_type = genomic RNA
atagttacatcacctgag

SEQ ID NO: 11721 - RNA, 18 nt, Homo sapiens
  source 1..18: mol_type = genomic RNA
tagttacatcacctgagt

SEQ ID NO: 11722 - RNA, 18 nt, Homo sapiens
  source 1..18: mol_type = genomic RNA
agttacatcacctgagtg

SEQ ID NO: 11723 - RNA, 18 nt, Homo sapiens
  source 1..18: mol_type = genomic RNA
gttacatcacctgagtga

SEQ ID NO: 11724 - RNA, 18 nt, Homo sapiens
  source 1..18: mol_type = genomic RNA
ttacatcacctgagtgat

SEQ ID NO: 11725 - RNA, 18 nt, Homo sapiens
  source 1..18: mol_type = genomic RNA
tacatcacctgagtgatc

SEQ ID NO: 11726 - RNA, 18 nt, Homo sapiens
  source 1..18: mol_type = genomic RNA
acatcacctgagtgatca

SEQ ID NO: 11727 - RNA, 18 nt, Homo sapiens
  source 1..18: mol_type = genomic RNA
catcacctgagtgatcag

SEQ ID NO: 11728 - RNA, 18 nt, Homo sapiens
  source 1..18: mol_type = genomic RNA
atcacctgagtgatcagt

SEQ ID NO: 11729 - RNA, 18 nt, Homo sapiens
  source 1..18: mol_type = genomic RNA
tcacctgagtgatcagtg

SEQ ID NO: 11730 - RNA, 18 nt, Homo sapiens
  source 1..18: mol_type = genomic RNA
cacctgagtgatcagtgc

SEQ ID NO: 11731 - RNA, 18 nt, Homo sapiens
  source 1..18: mol_type = genomic RNA
acctgagtgatcagtgca

SEQ ID NO: 11732 - RNA, 18 nt, Homo sapiens
  source 1..18: mol_type = genomic RNA
cctgagtgatcagtgcag

SEQ ID NO: 11733 - RNA, 18 nt, Homo sapiens
  source 1..18: mol_type = genomic RNA
ctgagtgatcagtgcaga

SEQ ID NO: 11734 - RNA, 18 nt, Homo sapiens
  source 1..18: mol_type = genomic RNA
tgagtgatcagtgcagag

SEQ ID NO: 11735 - RNA, 18 nt, Homo sapiens
  source 1..18: mol_type = genomic RNA
gagtgatcagtgcagaga

SEQ ID NO: 11736 - RNA, 18 nt, Homo sapiens
  source 1..18: mol_type = genomic RNA
gtgatcagtgcagagatc

SEQ ID NO: 11737 - RNA, 18 nt, Homo sapiens
  source 1..18: mol_type = genomic RNA
tgatcagtgcagagatct

SEQ ID NO: 11738 - RNA, 18 nt, Homo sapiens
  source 1..18: mol_type = genomic RNA
gatcagtgcagagatctg

SEQ ID NO: 11739 - RNA, 18 nt, Homo sapiens
  source 1..18: mol_type = genomic RNA
atcagtgcagagatctgt

SEQ ID NO: 11740 - RNA, 18 nt, Homo sapiens
  source 1..18: mol_type = genomic RNA
tcagtgcagagatctgtc

SEQ ID NO: 11741 - RNA, 18 nt, Homo sapiens
  source 1..18: mol_type = genomic RNA
cagtgcagagatctgtca

SEQ ID NO: 11742 - RNA, 18 nt, Homo sapiens
  source 1..18: mol_type = genomic RNA
agtgcagagatctgtcac

SEQ ID NO: 11743 - RNA, 18 nt, Homo sapiens
  source 1..18: mol_type = genomic RNA
gtgcagagatctgtcaca

SEQ ID NO: 11744 - RNA, 18 nt, Homo sapiens
  source 1..18: mol_type = genomic RNA
tgcagagatctgtcacaa

SEQ ID NO: 11745 - RNA, 18 nt, Homo sapiens
  source 1..18: mol_type = genomic RNA
gcagagatctgtcacaat

SEQ ID NO: 11746 - RNA, 18 nt, Homo sapiens
  source 1..18: mol_type = genomic RNA
cagagatctgtcacaatg

SEQ ID NO: 11747 - RNA, 18 nt, Homo sapiens
  source 1..18: mol_type = genomic RNA
tctgtcacaatgcccctt

SEQ ID NO: 11748 - RNA, 18 nt, Homo sapiens
  source 1..18: mol_type = genomic RNA
ctgtcacaatgccccttt

SEQ ID NO: 11749 - RNA, 18 nt, Homo sapiens
  source 1..18: mol_type = genomic RNA
tgtcacaatgccccttta

SEQ ID NO: 11750 - RNA, 18 nt, Homo sapiens
  source 1..18: mol_type = genomic RNA
gtcacaatgcccctttag

SEQ ID NO: 11751 - RNA, 18 nt, Homo sapiens
  source 1..18: mol_type = genomic RNA
tcacaatgcccctttagg

SEQ ID NO: 11752 - RNA, 18 nt, Homo sapiens
  source 1..18: mol_type = genomic RNA
cacaatgcccctttaggc

SEQ ID NO: 11753 - RNA, 18 nt, Homo sapiens
  source 1..18: mol_type = genomic RNA
acaatgcccctttaggca

SEQ ID NO: 11754 - RNA, 18 nt, Homo sapiens
  source 1..18: mol_type = genomic RNA
caatgcccctttaggcag

SEQ ID NO: 11755 - RNA, 18 nt, Homo sapiens
  source 1..18: mol_type = genomic RNA
aatgcccctttaggcaga

SEQ ID NO: 11756 - RNA, 18 nt, Homo sapiens
  source 1..18: mol_type = genomic RNA
atgcccctttaggcagag

SEQ ID NO: 11757 - RNA, 18 nt, Homo sapiens
  source 1..18: mol_type = genomic RNA
tgcccctttaggcagagc

SEQ ID NO: 11758 - RNA, 18 nt, Homo sapiens
  source 1..18: mol_type = genomic RNA
gcccctttaggcagagct

SEQ ID NO: 11759 - RNA, 18 nt, Homo sapiens
  source 1..18: mol_type = genomic RNA
cccctttaggcagagctt

SEQ ID NO: 11760 - RNA, 18 nt, Homo sapiens
  source 1..18: mol_type = genomic RNA
ccctttaggcagagctta

SEQ ID NO: 11761 - RNA, 18 nt, Homo sapiens
  source 1..18: mol_type = genomic RNA
cctttaggcagagcttaa

SEQ ID NO: 11762 - RNA, 18 nt, Homo sapiens
  source 1..18: mol_type = genomic RNA
ctttaggcagagcttaaa

SEQ ID NO: 11763 - RNA, 18 nt, Homo sapiens
  source 1..18: mol_type = genomic RNA
tttaggcagagcttaaac

SEQ ID NO: 11764 - RNA, 18 nt, Homo sapiens
  source 1..18: mol_type = genomic RNA
actagagttacatcacct

SEQ ID NO: 11765 - RNA, 18 nt, Homo sapiens
  source 1..18: mol_type = genomic RNA
ctagagttacatcacctg

SEQ ID NO: 11766 - RNA, 18 nt, Homo sapiens
  source 1..18: mol_type = genomic RNA
catcacctgtgtgatcag

SEQ ID NO: 11767 - RNA, 18 nt, Homo sapiens
  source 1..18: mol_type = genomic RNA
atcacctgtgtgatcagt

SEQ ID NO: 11768 - RNA, 18 nt, Homo sapiens
  source 1..18: mol_type = genomic RNA
tcacctgtgtgatcagtg

SEQ ID NO: 11769 - RNA, 18 nt, Homo sapiens
  source 1..18: mol_type = genomic RNA
cctttaggcagagcttag

SEQ ID NO: 11770 - RNA, 18 nt, Homo sapiens
  source 1..18: mol_type = genomic RNA
ctttaggcagagcttaga

SEQ ID NO: 11771 - RNA, 18 nt, Homo sapiens
  source 1..18: mol_type = genomic RNA
tttaggcagagcttagac

SEQ ID NO: 11772 - RNA, 18 nt, Homo sapiens
  source 1..18: mol_type = genomic RNA
ttaggcagagcttagact

SEQ ID NO: 11773 - RNA, 18 nt, Homo sapiens
  source 1..18: mol_type = genomic RNA
taggcagagcttagacta

SEQ ID NO: 11774 - RNA, 18 nt, Homo sapiens
  source 1..18: mol_type = genomic RNA
aggcagagcttagactag

SEQ ID NO: 11775 - RNA, 18 nt, Homo sapiens
  source 1..18: mol_type = genomic RNA
ggcagagcttagactaga

SEQ ID NO: 11776 - RNA, 18 nt, Homo sapiens
  source 1..18: mol_type = genomic RNA
gcagagcttagactagag

SEQ ID NO: 11777 - RNA, 18 nt, Homo sapiens
  source 1..18: mol_type = genomic RNA
cagagcttagactagagt

SEQ ID NO: 11778 - RNA, 18 nt, Homo sapiens
  source 1..18: mol_type = genomic RNA
agagcttagactagagtt

SEQ ID NO: 11779 - RNA, 18 nt, Homo sapiens
  source 1..18: mol_type = genomic RNA
gagcttagactagagtta

SEQ ID NO: 11780 - RNA, 18 nt, Homo sapiens
  source 1..18: mol_type = genomic RNA
agcttagactagagttac

SEQ ID NO: 11781 - RNA, 18 nt, Homo sapiens
  source 1..18: mol_type = genomic RNA
gcttagactagagttaca

SEQ ID NO: 11782 - RNA, 18 nt, Homo sapiens
  source 1..18: mol_type = genomic RNA
agactagagttacatcac

SEQ ID NO: 11783 - RNA, 18 nt, Homo sapiens
  source 1..18: mol_type = genomic RNA
gactagagttacatcacc

SEQ ID NO: 11784 - RNA, 18 nt, Homo sapiens
  source 1..18: mol_type = genomic RNA
tagagttacatcacctgg

SEQ ID NO: 11785 - RNA, 18 nt, Homo sapiens
  source 1..18: mol_type = genomic RNA
tgcccccataggcaaatc

SEQ ID NO: 11786 - RNA, 18 nt, Homo sapiens
  source 1..18: mol_type = genomic RNA
gcccccataggcaaatcc

SEQ ID NO: 11787 - RNA, 18 nt, Homo sapiens
  source 1..18: mol_type = genomic RNA
cccccataggcaaatcca

SEQ ID NO: 11788 - RNA, 18 nt, Homo sapiens
  source 1..18: mol_type = genomic RNA
ccccataggcaaatccaa

SEQ ID NO: 11789 - RNA, 18 nt, Homo sapiens
  source 1..18: mol_type = genomic RNA
cccataggcaaatccaag

SEQ ID NO: 11790 - RNA, 18 nt, Homo sapiens
  source 1..18: mol_type = genomic RNA
ccataggcaaatccaaga

SEQ ID NO: 11791 - RNA, 18 nt, Homo sapiens
  source 1..18: mol_type = genomic RNA
cataggcaaatccaagac

SEQ ID NO: 11792 - RNA, 18 nt, Homo sapiens
  source 1..18: mol_type = genomic RNA
ataggcaaatccaagaca

SEQ ID NO: 11793 - RNA, 18 nt, Homo sapiens
  source 1..18: mol_type = genomic RNA
taggcaaatccaagacaa

SEQ ID NO: 11794 - RNA, 18 nt, Homo sapiens
  source 1..18: mol_type = genomic RNA
aggcaaatccaagacaag

SEQ ID NO: 11795 - RNA, 18 nt, Homo sapiens
  source 1..18: mol_type = genomic RNA
ggcaaatccaagacaaga

SEQ ID NO: 11796 - RNA, 18 nt, Homo sapiens
  source 1..18: mol_type = genomic RNA
gcaaatccaagacaagag

SEQ ID NO: 11797 - RNA, 18 nt, Homo sapiens
  source 1..18: mol_type = genomic RNA
caaatccaagacaagagt

SEQ ID NO: 11798 - RNA, 18 nt, Homo sapiens
  source 1..18: mol_type = genomic RNA
aaatccaagacaagagtc

SEQ ID NO: 11799 - RNA, 18 nt, Homo sapiens
  source 1..18: mol_type = genomic RNA
aatccaagacaagagtct

SEQ ID NO: 11800 - RNA, 18 nt, Homo sapiens
  source 1..18: mol_type = genomic RNA
atccaagacaagagtctg

SEQ ID NO: 11801 - RNA, 18 nt, Homo sapiens
  source 1..18: mol_type = genomic RNA
tccaagacaagagtctgt

SEQ ID NO: 11802 - RNA, 18 nt, Homo sapiens
  source 1..18: mol_type = genomic RNA
gcagaaatatgtcacaat

SEQ ID NO: 11803 - RNA, 18 nt, Homo sapiens
  source 1..18: mol_type = genomic RNA
agaaatatgtcacaatgc

SEQ ID NO: 11804 - RNA, 18 nt, Homo sapiens
  source 1..18: mol_type = genomic RNA
gaaatatgtcacaatgcc

SEQ ID NO: 11805 - RNA, 18 nt, Homo sapiens
  source 1..18: mol_type = genomic RNA
aaatatgtcacaatgccc

SEQ ID NO: 11806 - RNA, 18 nt, Homo sapiens
  source 1..18: mol_type = genomic RNA
aatatgtcacaatgcccc

SEQ ID NO: 11807 - RNA, 18 nt, Homo sapiens
  source 1..18: mol_type = genomic RNA
cccataggcagatccaac

SEQ ID NO: 11808 - RNA, 18 nt, Homo sapiens
  source 1..18: mol_type = genomic RNA
ccataggcagatccaaca

SEQ ID NO: 11809 - RNA, 18 nt, Homo sapiens
  source 1..18: mol_type = genomic RNA
cataggcagatccaacac

SEQ ID NO: 11810 - RNA, 18 nt, Homo sapiens
  source 1..18: mol_type = genomic RNA
ataggcagatccaacaca

SEQ ID NO: 11811 - RNA, 18 nt, Homo sapiens
  source 1..18: mol_type = genomic RNA
taggcagatccaacacaa

SEQ ID NO: 11812 - RNA, 18 nt, Homo sapiens
  source 1..18: mol_type = genomic RNA
aggcagatccaacacaag

SEQ ID NO: 11813 - RNA, 18 nt, Homo sapiens
  source 1..18: mol_type = genomic RNA
ggcagatccaacacaaga

SEQ ID NO: 11814 - RNA, 18 nt, Homo sapiens
  source 1..18: mol_type = genomic RNA
gcagatccaacacaagag

SEQ ID NO: 11815 - RNA, 18 nt, Homo sapiens
  source 1..18: mol_type = genomic RNA
cagatccaacacaagagt

SEQ ID NO: 11816 - RNA, 18 nt, Homo sapiens
  source 1..18: mol_type = genomic RNA
agatccaacacaagagtt

SEQ ID NO: 11817 - RNA, 18 nt, Homo sapiens
  source 1..18: mol_type = genomic RNA
gatccaacacaagagtta

SEQ ID NO: 11818 - RNA, 18 nt, Homo sapiens
  source 1..18: mol_type = genomic RNA
atccaacacaagagttac

SEQ ID NO: 11819 - RNA, 18 nt, Homo sapiens
  source 1..18: mol_type = genomic RNA
tccaacacaagagttaca

SEQ ID NO: 11820 - RNA, 18 nt, Homo sapiens
  source 1..18: mol_type = genomic RNA
ccaacacaagagttacat

SEQ ID NO: 11821 - RNA, 18 nt, Homo sapiens
  source 1..18: mol_type = genomic RNA
caacacaagagttacatc

SEQ ID NO: 11822 - RNA, 18 nt, Homo sapiens
  source 1..18: mol_type = genomic RNA
aacacaagagttacatca

SEQ ID NO: 11823 - RNA, 18 nt, Homo sapiens
  source 1..18: mol_type = genomic RNA
acacaagagttacatcac

SEQ ID NO: 11824 - RNA, 18 nt, Homo sapiens
  source 1..18: mol_type = genomic RNA
cacaagagttacatcacc

SEQ ID NO: 11825 - RNA, 18 nt, Homo sapiens
  source 1..18: mol_type = genomic RNA
cagtgcagagatatgtaa

SEQ ID NO: 11826 - RNA, 18 nt, Homo sapiens
  source 1..18: mol_type = genomic RNA
tccatcacctgtgtgatc

SEQ ID NO: 11827 - RNA, 18 nt, Homo sapiens
  source 1..18: mol_type = genomic RNA
ccatcacctgtgtgatca

SEQ ID NO: 11828 - RNA, 18 nt, Homo sapiens
  source 1..18: mol_type = genomic RNA
cacctgtgtgatcagtgt

SEQ ID NO: 11829 - RNA, 18 nt, Homo sapiens
  source 1..18: mol_type = genomic RNA
acctgtgtgatcagtgta

SEQ ID NO: 11830 - RNA, 18 nt, Homo sapiens
  source 1..18: mol_type = genomic RNA
cctgtgtgatcagtgtag

SEQ ID NO: 11831 - RNA, 18 nt, Homo sapiens
  source 1..18: mol_type = genomic RNA
ctgtgtgatcagtgtaga

SEQ ID NO: 11832 - RNA, 18 nt, Homo sapiens
  source 1..18: mol_type = genomic RNA
tgtgtgatcagtgtagag

SEQ ID NO: 11833 - RNA, 18 nt, Homo sapiens
  source 1..18: mol_type = genomic RNA
gtgtgatcagtgtagaga

SEQ ID NO: 11834 - RNA, 18 nt, Homo sapiens
  source 1..18: mol_type = genomic RNA
tgtgatcagtgtagagat

SEQ ID NO: 11835 - RNA, 18 nt, Homo sapiens
  source 1..18: mol_type = genomic RNA
agatatgtcacaatgcct

SEQ ID NO: 11836 - RNA, 18 nt, Homo sapiens
  source 1..18: mol_type = genomic RNA
gatatgtcacaatgcctc

SEQ ID NO: 11837 - RNA, 18 nt, Homo sapiens
  source 1..18: mol_type = genomic RNA
atatgtcacaatgcctcc

SEQ ID NO: 11838 - RNA, 18 nt, Homo sapiens
  source 1..18: mol_type = genomic RNA
tatgtcacaatgcctcct

SEQ ID NO: 11839 - RNA, 18 nt, Homo sapiens
  source 1..18: mol_type = genomic RNA
atgtcacaatgcctcctg

SEQ ID NO: 11840 - RNA, 18 nt, Homo sapiens
  source 1..18: mol_type = genomic RNA
tgtcacaatgcctcctgt

SEQ ID NO: 11841 - RNA, 18 nt, Homo sapiens
  source 1..18: mol_type = genomic RNA
gtcacaatgcctcctgta

SEQ ID NO: 11842 - RNA, 18 nt, Homo sapiens
  source 1..18: mol_type = genomic RNA
tcacaatgcctcctgtag

SEQ ID NO: 11843 - RNA, 18 nt, Homo sapiens
  source 1..18: mol_type = genomic RNA
cacaatgcctcctgtagg

SEQ ID NO: 11844 - RNA, 18 nt, Homo sapiens
  source 1..18: mol_type = genomic RNA
acaatgcctcctgtaggc

SEQ ID NO: 11845 - RNA, 18 nt, Homo sapiens
  source 1..18: mol_type = genomic RNA
caatgcctcctgtaggca

SEQ ID NO: 11846 - RNA, 18 nt, Homo sapiens
  source 1..18: mol_type = genomic RNA
aatgcctcctgtaggcag

SEQ ID NO: 11847 - RNA, 18 nt, Homo sapiens
  source 1..18: mol_type = genomic RNA
atgcctcctgtaggcaga

SEQ ID NO: 11848 - RNA, 18 nt, Homo sapiens
  source 1..18: mol_type = genomic RNA
tgcctcctgtaggcagag

SEQ ID NO: 11849 - RNA, 18 nt, Homo sapiens
  source 1..18: mol_type = genomic RNA
ctcctgtaggcagaggct

SEQ ID NO: 11850 - RNA, 18 nt, Homo sapiens
  source 1..18: mol_type = genomic RNA
tcctgtaggcagaggcta

SEQ ID NO: 11851 - RNA, 18 nt, Homo sapiens
  source 1..18: mol_type = genomic RNA
cctgtaggcagaggctaa

SEQ ID NO: 11852 - RNA, 18 nt, Homo sapiens
  source 1..18: mol_type = genomic RNA
ctgtaggcagaggctaaa

SEQ ID NO: 11853 - RNA, 18 nt, Homo sapiens
  source 1..18: mol_type = genomic RNA
tgtaggcagaggctaaac

SEQ ID NO: 11854 - RNA, 18 nt, Homo sapiens
  source 1..18: mol_type = genomic RNA
gtaggcagaggctaaaca

SEQ ID NO: 11855 - RNA, 18 nt, Homo sapiens
  source 1..18: mol_type = genomic RNA
taggcagaggctaaacaa

SEQ ID NO: 11856 - RNA, 18 nt, Homo sapiens
  source 1..18: mol_type = genomic RNA
aggcagaggctaaacaag

SEQ ID NO: 11857 - RNA, 18 nt, Homo sapiens
  source 1..18: mol_type = genomic RNA
ggcagaggctaaacaaga

SEQ ID NO: 11858 - RNA, 18 nt, Homo sapiens
  source 1..18: mol_type = genomic RNA
gcagaggctaaacaagag

SEQ ID NO: 11859 - RNA, 18 nt, Homo sapiens
  source 1..18: mol_type = genomic RNA
cagaggctaaacaagagt

SEQ ID NO: 11860 - RNA, 18 nt, Homo sapiens
  source 1..18: mol_type = genomic RNA
agaggctaaacaagagtt

SEQ ID NO: 11861 - RNA, 18 nt, Homo sapiens
  source 1..18: mol_type = genomic RNA
gaggctaaacaagagtta

SEQ ID NO: 11862 - RNA, 18 nt, Homo sapiens
  source 1..18: mol_type = genomic RNA
aggctaaacaagagttac

SEQ ID NO: 11863 - RNA, 18 nt, Homo sapiens
  source 1..18: mol_type = genomic RNA
ggctaaacaagagttaca

SEQ ID NO: 11864 - RNA, 18 nt, Homo sapiens
  source 1..18: mol_type = genomic RNA
gctaaacaagagttacat

SEQ ID NO: 11865 - RNA, 18 nt, Homo sapiens
  source 1..18: mol_type = genomic RNA
aaacaagagttacatcac

SEQ ID NO: 11866 - RNA, 18 nt, Homo sapiens
  source 1..18: mol_type = genomic RNA
aacaagagttacatcacc

SEQ ID NO: 11867 - RNA, 18 nt, Homo sapiens
  source 1..18: mol_type = genomic RNA
agagttacatcacctgga

SEQ ID NO: 11868 - RNA, 18 nt, Homo sapiens
  source 1..18: mol_type = genomic RNA
gagttacatcacctggat

SEQ ID NO: 11869 - RNA, 18 nt, Homo sapiens
  source 1..18: mol_type = genomic RNA
agttacatcacctggatt

SEQ ID NO: 11870 - RNA, 18 nt, Homo sapiens
  source 1..18: mol_type = genomic RNA
ttcctgcaatatgtcaca

SEQ ID NO: 11871 - RNA, 18 nt, Homo sapiens
  source 1..18: mol_type = genomic RNA
tcctgcaatatgtcacaa

SEQ ID NO: 11872 - RNA, 18 nt, Homo sapiens
  source 1..18: mol_type = genomic RNA
cctgcaatatgtcacaat

SEQ ID NO: 11873 - RNA, 18 nt, Homo sapiens
  source 1..18: mol_type = genomic RNA
ctgcaatatgtcacaatg

SEQ ID NO: 11874 - RNA, 18 nt, Homo sapiens
  source 1..18: mol_type = genomic RNA
tgcaatatgtcacaatgg

SEQ ID NO: 11875 - RNA, 18 nt, Homo sapiens
  source 1..18: mol_type = genomic RNA
gcaatatgtcacaatggc

SEQ ID NO: 11876 - RNA, 18 nt, Homo sapiens
  source 1..18: mol_type = genomic RNA
taggggttaggcttaggc

SEQ ID NO: 11877 - RNA, 18 nt, Homo sapiens
  source 1..18: mol_type = genomic RNA
aggggttaggcttaggct

SEQ ID NO: 11878 - RNA, 18 nt, Homo sapiens
  source 1..18: mol_type = genomic RNA
ggggttaggcttaggctt

SEQ ID NO: 11879 - RNA, 18 nt, Homo sapiens
  source 1..18: mol_type = genomic RNA
gggttaggcttaggctta

SEQ ID NO: 11880 - RNA, 18 nt, Homo sapiens
  source 1..18: mol_type = genomic RNA
ggttaggcttaggcttag

SEQ ID NO: 11881 - RNA, 18 nt, Homo sapiens
  source 1..18: mol_type = genomic RNA
gttaggcttaggcttagg

SEQ ID NO: 11882 - RNA, 18 nt, Homo sapiens
  source 1..18: mol_type = genomic RNA
ttaggcttaggcttaggg

SEQ ID NO: 11883 - RNA, 18 nt, Homo sapiens
  source 1..18: mol_type = genomic RNA
taggcttaggcttagggt

SEQ ID NO: 11884 - RNA, 18 nt, Homo sapiens
  source 1..18: mol_type = genomic RNA
aggcttaggcttagggtt

SEQ ID NO: 11885 - RNA, 18 nt, Homo sapiens
  source 1..18: mol_type = genomic RNA
ggcttaggcttagggtta

SEQ ID NO: 11886 - RNA, 18 nt, Homo sapiens
  source 1..18: mol_type = genomic RNA
gcttaggcttagggttag

SEQ ID NO: 11887 - RNA, 18 nt, Homo sapiens
  source 1..18: mol_type = genomic RNA
cttaggcttagggttagg

SEQ ID NO: 11888 - RNA, 18 nt, Homo sapiens
  source 1..18: mol_type = genomic RNA
ttaggcttagggttaggc

SEQ ID NO: 11889 - RNA, 18 nt, Homo sapiens
  source 1..18: mol_type = genomic RNA
taggcttagggttaggct

SEQ ID NO: 11890 - RNA, 18 nt, Homo sapiens
  source 1..18: mol_type = genomic RNA
aggcttagggttaggctt

SEQ ID NO: 11891 - RNA, 18 nt, Homo sapiens
  source 1..18: mol_type = genomic RNA
ggcttagggttaggctta

SEQ ID NO: 11892 - RNA, 18 nt, Homo sapiens
  source 1..18: mol_type = genomic RNA
gcttagggttaggcttag

SEQ ID NO: 11893 - RNA, 18 nt, Homo sapiens
  source 1..18: mol_type = genomic RNA
cttagggttaggcttagg

SEQ ID NO: 11894 - RNA, 18 nt, Homo sapiens
  source 1..18: mol_type = genomic RNA
ttagggttaggcttaggc

SEQ ID NO: 11895 - RNA, 18 nt, Homo sapiens
  source 1..18: mol_type = genomic RNA
tagggttaggcttaggct

SEQ ID NO: 11896 - RNA, 18 nt, Homo sapiens
  source 1..18: mol_type = genomic RNA
agggttaggcttaggctt

SEQ ID NO: 11897 - RNA, 18 nt, Homo sapiens
  source 1..18: mol_type = genomic RNA
aggcttaggcttagggta

SEQ ID NO: 11898 - RNA, 18 nt, Homo sapiens
  source 1..18: mol_type = genomic RNA
ggcttaggcttagggtaa

SEQ ID NO: 11899 - RNA, 18 nt, Homo sapiens
  source 1..18: mol_type = genomic RNA
gcttaggcttagggtaag

SEQ ID NO: 11900 - RNA, 18 nt, Homo sapiens
  source 1..18: mol_type = genomic RNA
cttaggcttagggtaagg

SEQ ID NO: 11901 - RNA, 18 nt, Homo sapiens
  source 1..18: mol_type = genomic RNA
ttaggcttagggtaaggc

SEQ ID NO: 11902 - RNA, 18 nt, Homo sapiens
  source 1..18: mol_type = genomic RNA
taggcttagggtaaggct

SEQ ID NO: 11903 - RNA, 18 nt, Homo sapiens
  source 1..18: mol_type = genomic RNA
aggcttagggtaaggctt

SEQ ID NO: 11904 - RNA, 18 nt, Homo sapiens
  source 1..18: mol_type = genomic RNA
ggcttagggtaaggctta

SEQ ID NO: 11905 - RNA, 18 nt, Homo sapiens
  source 1..18: mol_type = genomic RNA
gcttagggtaaggcttag

SEQ ID NO: 11906 - RNA, 18 nt, Homo sapiens
  source 1..18: mol_type = genomic RNA
cttagggtaaggcttagg

SEQ ID NO: 11907 - RNA, 18 nt, Homo sapiens
  source 1..18: mol_type = genomic RNA
ttagggtaaggcttaggg

SEQ ID NO: 11908 - RNA, 18 nt, Homo sapiens
  source 1..18: mol_type = genomic RNA
tagggtaaggcttagggt

SEQ ID NO: 11909 - RNA, 18 nt, Homo sapiens
  source 1..18: mol_type = genomic RNA
agggtaaggcttagggtt

SEQ ID NO: 11910 - RNA, 18 nt, Homo sapiens
  source 1..18: mol_type = genomic RNA
gggtaaggcttagggttc

SEQ ID NO: 11911 - RNA, 18 nt, Homo sapiens
  source 1..18: mol_type = genomic RNA
ggtaaggcttagggttca

SEQ ID NO: 11912 - RNA, 18 nt, Homo sapiens
  source 1..18: mol_type = genomic RNA
gtaaggcttagggttcag

SEQ ID NO: 11913 - RNA, 18 nt, Homo sapiens
  source 1..18: mol_type = genomic RNA
taaggcttagggttcagg

SEQ ID NO: 11914 - RNA, 18 nt, Homo sapiens
  source 1..18: mol_type = genomic RNA
ataggctattaagacatg

SEQ ID NO: 11915 - RNA, 18 nt, Homo sapiens
  source 1..18: mol_type = genomic RNA
taggctattaagacatgt

SEQ ID NO: 11916 - RNA, 18 nt, Homo sapiens
  source 1..18: mol_type = genomic RNA
aggctattaagacatgtt

SEQ ID NO: 11917 - RNA, 18 nt, Homo sapiens
  source 1..18: mol_type = genomic RNA
ttgtcttcaaagaatggc

SEQ ID NO: 11918 - RNA, 18 nt, Homo sapiens
  source 1..18: mol_type = genomic RNA
tgtcttcaaagaatggcc

SEQ ID NO: 11919 - RNA, 18 nt, Homo sapiens
  source 1..18: mol_type = genomic RNA
gtcttcaaagaatggcct

SEQ ID NO: 11920 - RNA, 18 nt, Homo sapiens
  source 1..18: mol_type = genomic RNA
tcttcaaagaatggcctt

SEQ ID NO: 11921 - RNA, 18 nt, Homo sapiens
  source 1..18: mol_type = genomic RNA
cttcaaagaatggccttg

SEQ ID NO: 11922 - RNA, 18 nt, Homo sapiens
  source 1..18: mol_type = genomic RNA
ttcaaagaatggccttgg

SEQ ID NO: 11923 - RNA, 18 nt, Homo sapiens
  source 1..18: mol_type = genomic RNA
tcaaagaatggccttggt

SEQ ID NO: 11924 - RNA, 18 nt, Homo sapiens
  source 1..18: mol_type = genomic RNA
caaagaatggccttggtt

SEQ ID NO: 11925 - RNA, 18 nt, Homo sapiens
  source 1..18: mol_type = genomic RNA
aaagaatggccttggttt

SEQ ID NO: 11926 - RNA, 18 nt, Homo sapiens
  source 1..18: mol_type = genomic RNA
aagaatggccttggtttc

SEQ ID NO: 11927 - RNA, 18 nt, Homo sapiens
  source 1..18: mol_type = genomic RNA
agaatggccttggtttct

SEQ ID NO: 11928 - RNA, 18 nt, Homo sapiens
  source 1..18: mol_type = genomic RNA
gaatggccttggtttctg

SEQ ID NO: 11929 - RNA, 18 nt, Homo sapiens
  source 1..18: mol_type = genomic RNA
aatggccttggtttctgt

SEQ ID NO: 11930 - RNA, 18 nt, Homo sapiens
  source 1..18: mol_type = genomic RNA
atggccttggtttctgtg

SEQ ID NO: 11931 - RNA, 18 nt, Homo sapiens
  source 1..18: mol_type = genomic RNA
tggccttggtttctgtgg

SEQ ID NO: 11932 - RNA, 18 nt, Homo sapiens
  source 1..18: mol_type = genomic RNA
ggccttggtttctgtgga

SEQ ID NO: 11933 - RNA, 18 nt, Homo sapiens
  source 1..18: mol_type = genomic RNA
gccttggtttctgtggac

SEQ ID NO: 11934 - RNA, 18 nt, Homo sapiens
  source 1..18: mol_type = genomic RNA
ccttggtttctgtggaca

SEQ ID NO: 11935 - RNA, 18 nt, Homo sapiens
  source 1..18: mol_type = genomic RNA
cttggtttctgtggacag

SEQ ID NO: 11936 - RNA, 18 nt, Homo sapiens
  source 1..18: mol_type = genomic RNA
ttggtttctgtggacagt

SEQ ID NO: 11937 - RNA, 18 nt, Homo sapiens
  source 1..18: mol_type = genomic RNA
tggtttctgtggacagtt

SEQ ID NO: 11938 - RNA, 18 nt, Homo sapiens
  source 1..18: mol_type = genomic RNA
tctgtggacagtttctcc

SEQ ID NO: 11939 - RNA, 18 nt, Homo sapiens
  source 1..18: mol_type = genomic RNA
ctgtggacagtttctcct

SEQ ID NO: 11940 - RNA, 18 nt, Homo sapiens
  source 1..18: mol_type = genomic RNA
tgtggacagtttctcctc

SEQ ID NO: 11941 - RNA, 18 nt, Homo sapiens
  source 1..18: mol_type = genomic RNA
gtggacagtttctcctca

SEQ ID NO: 11942 - RNA, 18 nt, Homo sapiens
  source 1..18: mol_type = genomic RNA
tggacagtttctcctcat

SEQ ID NO: 11943 - RNA, 18 nt, Homo sapiens
  source 1..18: mol_type = genomic RNA
ggacagtttctcctcatg

SEQ ID NO: 11944 - RNA, 18 nt, Homo sapiens
  source 1..18: mol_type = genomic RNA
gacagtttctcctcatgg

SEQ ID NO: 11945 - RNA, 18 nt, Homo sapiens
  source 1..18: mol_type = genomic RNA
acagtttctcctcatgga

SEQ ID NO: 11946 - RNA, 18 nt, Homo sapiens
  source 1..18: mol_type = genomic RNA
agtttctcctcatggaaa

SEQ ID NO: 11947 - RNA, 18 nt, Homo sapiens
  source 1..18: mol_type = genomic RNA
gtttctcctcatggaaag

SEQ ID NO: 11948 - RNA, 18 nt, Homo sapiens
  source 1..18: mol_type = genomic RNA
tttctcctcatggaaagg

SEQ ID NO: 11949 - RNA, 18 nt, Homo sapiens
  source 1..18: mol_type = genomic RNA
ttctcctcatggaaaggt

SEQ ID NO: 11950 - RNA, 18 nt, Homo sapiens
  source 1..18: mol_type = genomic RNA
tctcctcatggaaaggta

SEQ ID NO: 11951 - RNA, 18 nt, Homo sapiens
  source 1..18: mol_type = genomic RNA
ctcctcatggaaaggtag

SEQ ID NO: 11952 - RNA, 18 nt, Homo sapiens
  source 1..18: mol_type = genomic RNA
tcctcatggaaaggtagt

SEQ ID NO: 11953 - RNA, 18 nt, Homo sapiens
  source 1..18: mol_type = genomic RNA
cctcatggaaaggtagtg

SEQ ID NO: 11954 - RNA, 18 nt, Homo sapiens
  source 1..18: mol_type = genomic RNA
ctcatggaaaggtagtgt

SEQ ID NO: 11955 - RNA, 18 nt, Homo sapiens
  source 1..18: mol_type = genomic RNA
tcatggaaaggtagtgtg

SEQ ID NO: 11956 - RNA, 18 nt, Homo sapiens
  source 1..18: mol_type = genomic RNA
catggaaaggtagtgtgt

SEQ ID NO: 11957 - RNA, 18 nt, Homo sapiens
  source 1..18: mol_type = genomic RNA
atggaaaggtagtgtgtt

SEQ ID NO: 11958 - RNA, 18 nt, Homo sapiens
  source 1..18: mol_type = genomic RNA
tggaaaggtagtgtgttc

SEQ ID NO: 11959 - RNA, 18 nt, Homo sapiens
  source 1..18: mol_type = genomic RNA
ggaaaggtagtgtgttcc

SEQ ID NO: 11960 - RNA, 18 nt, Homo sapiens
  source 1..18: mol_type = genomic RNA
gaaaggtagtgtgttcct

SEQ ID NO: 11961 - RNA, 18 nt, Homo sapiens
  source 1..18: mol_type = genomic RNA
aaaggtagtgtgttcctg

SEQ ID NO: 11962 - RNA, 18 nt, Homo sapiens
  source 1..18: mol_type = genomic RNA
aaggtagtgtgttcctgc

SEQ ID NO: 11963 - RNA, 18 nt, Homo sapiens
  source 1..18: mol_type = genomic RNA
aggtagtgtgttcctgct

SEQ ID NO: 11964 - RNA, 18 nt, Homo sapiens
  source 1..18: mol_type = genomic RNA
ggtagtgtgttcctgcta

SEQ ID NO: 11965 - RNA, 18 nt, Homo sapiens
  source 1..18: mol_type = genomic RNA
tctcattacacacacaac

SEQ ID NO: 11966 - RNA, 18 nt, Homo sapiens
  source 1..18: mol_type = genomic RNA
ctcattacacacacaaca

SEQ ID NO: 11967 - RNA, 18 nt, Homo sapiens
  source 1..18: mol_type = genomic RNA
tcattacacacacaacaa

SEQ ID NO: 11968 - RNA, 18 nt, Homo sapiens
  source 1..18: mol_type = genomic RNA
attacacacacaacaaaa

SEQ ID NO: 11969 - RNA, 18 nt, Homo sapiens
  source 1..18: mol_type = genomic RNA
ttacacacacaacaaaat

SEQ ID NO: 11970 - RNA, 18 nt, Homo sapiens
  source 1..18: mol_type = genomic RNA
tacacacacaacaaaatt

SEQ ID NO: 11971 - RNA, 18 nt, Homo sapiens
  source 1..18: mol_type = genomic RNA
aacaaaatttagctgagg

SEQ ID NO: 11972 - RNA, 18 nt, Homo sapiens
  source 1..18: mol_type = genomic RNA
acaaaatttagctgaggg

SEQ ID NO: 11973 - RNA, 18 nt, Homo sapiens
  source 1..18: mol_type = genomic RNA
caaaatttagctgaggga

SEQ ID NO: 11974 - RNA, 18 nt, Homo sapiens
  source 1..18: mol_type = genomic RNA
aaaatttagctgagggag

SEQ ID NO: 11975 - RNA, 18 nt, Homo sapiens
  source 1..18: mol_type = genomic RNA
aaatttagctgagggaga

SEQ ID NO: 11976 - RNA, 18 nt, Homo sapiens
  source 1..18: mol_type = genomic RNA
aatttagctgagggagat

SEQ ID NO: 11977 - RNA, 18 nt, Homo sapiens
  source 1..18: mol_type = genomic RNA
atttagctgagggagatt

SEQ ID NO: 11978 - RNA, 18 nt, Homo sapiens
  source 1..18: mol_type = genomic RNA
tttagctgagggagattg

SEQ ID NO: 11979 - RNA, 18 nt, Homo sapiens
  source 1..18: mol_type = genomic RNA
ttagctgagggagattga

SEQ ID NO: 11980 - RNA, 18 nt, Homo sapiens
  source 1..18: mol_type = genomic RNA
tagctgagggagattgag

SEQ ID NO: 11981 - RNA, 18 nt, Homo sapiens
  source 1..18: mol_type = genomic RNA
agctgagggagattgagt

SEQ ID NO: 11982 - RNA, 18 nt, Homo sapiens
  source 1..18: mol_type = genomic RNA
gctgagggagattgagtg

SEQ ID NO: 11983 - RNA, 18 nt, Homo sapiens
  source 1..18: mol_type = genomic RNA
ctgagggagattgagtga

SEQ ID NO: 11984 - RNA, 18 nt, Homo sapiens
  source 1..18: mol_type = genomic RNA
tgagggagattgagtgac

SEQ ID NO: 11985 - RNA, 18 nt, Homo sapiens
  source 1..18: mol_type = genomic RNA
gagggagattgagtgact

SEQ ID NO: 11986 - RNA, 18 nt, Homo sapiens
  source 1..18: mol_type = genomic RNA
agggagattgagtgactt

SEQ ID NO: 11987 - RNA, 18 nt, Homo sapiens
  source 1..18: mol_type = genomic RNA
gggagattgagtgacttt

SEQ ID NO: 11988 - RNA, 18 nt, Homo sapiens
  source 1..18: mol_type = genomic RNA
ggagattgagtgactttc

SEQ ID NO: 11989 - RNA, 18 nt, Homo sapiens
  source 1..18: mol_type = genomic RNA
gagattgagtgactttcc

SEQ ID NO: 11990 - RNA, 18 nt, Homo sapiens
  source 1..18: mol_type = genomic RNA
agattgagtgactttccc

SEQ ID NO: 11991 - RNA, 18 nt, Homo sapiens
  source 1..18: mol_type = genomic RNA
gattgagtgactttccca

SEQ ID NO: 11992 - RNA, 18 nt, Homo sapiens
  source 1..18: mol_type = genomic RNA
attgagtgactttcccag

SEQ ID NO: 11993 - RNA, 18 nt, Homo sapiens
  source 1..18: mol_type = genomic RNA
ttgagtgactttcccagg

SEQ ID NO: 11994 - RNA, 18 nt, Homo sapiens
  source 1..18: mol_type = genomic RNA
tgagtgactttcccaggg

SEQ ID NO: 11995 - RNA, 18 nt, Homo sapiens
  source 1..18: mol_type = genomic RNA
gagtgactttcccagggt

SEQ ID NO: 11996 - RNA, 18 nt, Homo sapiens
  source 1..18: mol_type = genomic RNA
agtgactttcccagggtc

SEQ ID NO: 11997 - RNA, 18 nt, Homo sapiens
  source 1..18: mol_type = genomic RNA
gtgactttcccagggtca

SEQ ID NO: 11998 - RNA, 18 nt, Homo sapiens
  source 1..18: mol_type = genomic RNA
tgactttcccagggtcac

SEQ ID NO: 11999 - RNA, 18 nt, Homo sapiens
  source 1..18: mol_type = genomic RNA
gactttcccagggtcaca

SEQ ID NO: 12000 - RNA, 18 nt, Homo sapiens
  source 1..18: mol_type = genomic RNA
actttcccagggtcacac

SEQ ID NO: 12001 - RNA, 18 nt, Homo sapiens
  source 1..18: mol_type = genomic RNA
ctttcccagggtcacaca

SEQ ID NO: 12002 - RNA, 18 nt, Homo sapiens
  source 1..18: mol_type = genomic RNA
tttcccagggtcacacag

SEQ ID NO: 12003 - RNA, 18 nt, Homo sapiens
  source 1..18: mol_type = genomic RNA
ttcccagggtcacacagc

SEQ ID NO: 12004 - RNA, 18 nt, Homo sapiens
  source 1..18: mol_type = genomic RNA
tcccagggtcacacagct

SEQ ID NO: 12005 - RNA, 18 nt, Homo sapiens
  source 1..18: mol_type = genomic RNA
cccagggtcacacagcta

SEQ ID NO: 12006 - RNA, 18 nt, Homo sapiens
  source 1..18: mol_type = genomic RNA
ccagggtcacacagctac

SEQ ID NO: 12007 - RNA, 18 nt, Homo sapiens
  source 1..18: mol_type = genomic RNA
cagggtcacacagctact

SEQ ID NO: 12008 - RNA, 18 nt, Homo sapiens
  source 1..18: mol_type = genomic RNA
agggtcacacagctacta

SEQ ID NO: 12009 - RNA, 18 nt, Homo sapiens
  source 1..18: mol_type = genomic RNA
gggtcacacagctactaa

SEQ ID NO: 12010 - RNA, 18 nt, Homo sapiens
  source 1..18: mol_type = genomic RNA
ggtcacacagctactaat

SEQ ID NO: 12011 - RNA, 18 nt, Homo sapiens
  source 1..18: mol_type = genomic RNA
gtcacacagctactaata

SEQ ID NO: 12012 - RNA, 18 nt, Homo sapiens
  source 1..18: mol_type = genomic RNA
tcacacagctactaatag

SEQ ID NO: 12013 - RNA, 18 nt, Homo sapiens
  source 1..18: mol_type = genomic RNA
cacacagctactaatagc

SEQ ID NO: 12014 - RNA, 18 nt, Homo sapiens
  source 1..18: mol_type = genomic RNA
acacagctactaatagca

SEQ ID NO: 12015 - RNA, 18 nt, Homo sapiens
  source 1..18: mol_type = genomic RNA
cacagctactaatagcag

SEQ ID NO: 12016 - RNA, 18 nt, Homo sapiens
  source 1..18: mol_type = genomic RNA
acagctactaatagcaga

SEQ ID NO: 12017 - RNA, 18 nt, Homo sapiens
  source 1..18: mol_type = genomic RNA
cagctactaatagcagag

SEQ ID NO: 12018 - RNA, 18 nt, Homo sapiens
  source 1..18: mol_type = genomic RNA
agctactaatagcagagt

SEQ ID NO: 12019 - RNA, 18 nt, Homo sapiens
  source 1..18: mol_type = genomic RNA
gctactaatagcagagta

SEQ ID NO: 12020 - RNA, 18 nt, Homo sapiens
  source 1..18: mol_type = genomic RNA
ctactaatagcagagtag

SEQ ID NO: 12021 - RNA, 18 nt, Homo sapiens
  source 1..18: mol_type = genomic RNA
tactaatagcagagtagt

SEQ ID NO: 12022 - RNA, 18 nt, Homo sapiens
  source 1..18: mol_type = genomic RNA
actaatagcagagtagtg

SEQ ID NO: 12023 - RNA, 18 nt, Homo sapiens
  source 1..18: mol_type = genomic RNA
ctaatagcagagtagtgt

SEQ ID NO: 12024 - RNA, 18 nt, Homo sapiens
  source 1..18: mol_type = genomic RNA
agcagagtagtgtttaga

SEQ ID NO: 12025 - RNA, 18 nt, Homo sapiens
  source 1..18: mol_type = genomic RNA
agattcatatgggaatac

SEQ ID NO: 12026 - RNA, 18 nt, Homo sapiens
  source 1..18: mol_type = genomic RNA
gattcatatgggaatact

SEQ ID NO: 12027 - RNA, 18 nt, Homo sapiens
  source 1..18: mol_type = genomic RNA
attcatatgggaatactg

SEQ ID NO: 12028 - RNA, 18 nt, Homo sapiens
  source 1..18: mol_type = genomic RNA
ttcatatgggaatactga

SEQ ID NO: 12029 - RNA, 18 nt, Homo sapiens
  source 1..18: mol_type = genomic RNA
tcatatgggaatactgaa

SEQ ID NO: 12030 - RNA, 18 nt, Homo sapiens
  source 1..18: mol_type = genomic RNA
catatgggaatactgaac

SEQ ID NO: 12031 - RNA, 18 nt, Homo sapiens
  source 1..18: mol_type = genomic RNA
atatgggaatactgaaca

SEQ ID NO: 12032 - RNA, 18 nt, Homo sapiens
  source 1..18: mol_type = genomic RNA
tatgggaatactgaacac

SEQ ID NO: 12033 - RNA, 18 nt, Homo sapiens
  source 1..18: mol_type = genomic RNA
atgggaatactgaacaca

SEQ ID NO: 12034 - RNA, 18 nt, Homo sapiens
  source 1..18: mol_type = genomic RNA
tgggaatactgaacacag

SEQ ID NO: 12035 - RNA, 18 nt, Homo sapiens
  source 1..18: mol_type = genomic RNA
gggaatactgaacacaga

SEQ ID NO: 12036 - RNA, 18 nt, Homo sapiens
  source 1..18: mol_type = genomic RNA
ggaatactgaacacagaa

SEQ ID NO: 12037 - RNA, 18 nt, Homo sapiens
  source 1..18: mol_type = genomic RNA
gaatactgaacacagaaa

SEQ ID NO: 12038 - RNA, 18 nt, Homo sapiens
  source 1..18: mol_type = genomic RNA
aatactgaacacagaaat

SEQ ID NO: 12039 - RNA, 18 nt, Homo sapiens
  source 1..18: mol_type = genomic RNA
atactgaacacagaaatg

SEQ ID NO: 12040 - RNA, 18 nt, Homo sapiens
  source 1..18: mol_type = genomic RNA
tactgaacacagaaatga

SEQ ID NO: 12041 - RNA, 18 nt, Homo sapiens
  source 1..18: mol_type = genomic RNA
actgaacacagaaatgaa

SEQ ID NO: 12042 - RNA, 18 nt, Homo sapiens
  source 1..18: mol_type = genomic RNA
ctgaacacagaaatgaac

SEQ ID NO: 12043 - RNA, 18 nt, Homo sapiens
  source 1..18: mol_type = genomic RNA
tgaacacagaaatgaacc

SEQ ID NO: 12044 - RNA, 18 nt, Homo sapiens
  source 1..18: mol_type = genomic RNA
gaacacagaaatgaacca

SEQ ID NO: 12045 - RNA, 18 nt, Homo sapiens
  source 1..18: mol_type = genomic RNA
aacacagaaatgaaccaa

SEQ ID NO: 12046 - RNA, 18 nt, Homo sapiens
  source 1..18: mol_type = genomic RNA
acacagaaatgaaccaat

SEQ ID NO: 12047 - RNA, 18 nt, Homo sapiens
  source 1..18: mol_type = genomic RNA
cacagaaatgaaccaatg

SEQ ID NO: 12048 - RNA, 18 nt, Homo sapiens
  source 1..18: mol_type = genomic RNA
acagaaatgaaccaatgg

SEQ ID NO: 12049 - RNA, 18 nt, Homo sapiens
  source 1..18: mol_type = genomic RNA
cagaaatgaaccaatgga

SEQ ID NO: 12050 - RNA, 18 nt, Homo sapiens
  source 1..18: mol_type = genomic RNA
agaaatgaaccaatggaa

SEQ ID NO: 12051 - RNA, 18 nt, Homo sapiens
  source 1..18: mol_type = genomic RNA
gaaatgaaccaatggaaa

SEQ ID NO: 12052 - RNA, 18 nt, Homo sapiens
  source 1..18: mol_type = genomic RNA
aaatgaaccaatggaaac

SEQ ID NO: 12053 - RNA, 18 nt, Homo sapiens
  source 1..18: mol_type = genomic RNA
aatgaaccaatggaaaca

SEQ ID NO: 12054 - RNA, 18 nt, Homo sapiens
  source 1..18: mol_type = genomic RNA
atgaaccaatggaaacat

SEQ ID NO: 12055 - RNA, 18 nt, Homo sapiens
  source 1..18: mol_type = genomic RNA
tgaaccaatggaaacatc

SEQ ID NO: 12056 - RNA, 18 nt, Homo sapiens
  source 1..18: mol_type = genomic RNA
gaaccaatggaaacatcc

SEQ ID NO: 12057 - RNA, 18 nt, Homo sapiens
  source 1..18: mol_type = genomic RNA
aaccaatggaaacatcct

SEQ ID NO: 12058 - RNA, 18 nt, Homo sapiens
  source 1..18: mol_type = genomic RNA
accaatggaaacatccta

SEQ ID NO: 12059 - RNA, 18 nt, Homo sapiens
  source 1..18: mol_type = genomic RNA
ccaatggaaacatcctac

SEQ ID NO: 12060 - RNA, 18 nt, Homo sapiens
  source 1..18: mol_type = genomic RNA
caatggaaacatcctacg

SEQ ID NO: 12061 - RNA, 18 nt, Homo sapiens
  source 1..18: mol_type = genomic RNA
aatggaaacatcctacgt

SEQ ID NO: 12062 - RNA, 18 nt, Homo sapiens
  source 1..18: mol_type = genomic RNA
atggaaacatcctacgtt

SEQ ID NO: 12063 - RNA, 18 nt, Homo sapiens
  source 1..18: mol_type = genomic RNA
tggaaacatcctacgttc

SEQ ID NO: 12064 - RNA, 18 nt, Homo sapiens
  source 1..18: mol_type = genomic RNA
ggaaacatcctacgttcc

SEQ ID NO: 12065 - RNA, 18 nt, Homo sapiens
  source 1..18: mol_type = genomic RNA
gaaacatcctacgttcca

SEQ ID NO: 12066 - RNA, 18 nt, Homo sapiens
  source 1..18: mol_type = genomic RNA
aaacatcctacgttccaa

SEQ ID NO: 12067 - RNA, 18 nt, Homo sapiens
  source 1..18: mol_type = genomic RNA
aacatcctacgttccaaa

SEQ ID NO: 12068 - RNA, 18 nt, Homo sapiens
  source 1..18: mol_type = genomic RNA
acatcctacgttccaaaa

SEQ ID NO: 12069 - RNA, 18 nt, Homo sapiens
  source 1..18: mol_type = genomic RNA
catcctacgttccaaaag

SEQ ID NO: 12070 - RNA, 18 nt, Homo sapiens
  source 1..18: mol_type = genomic RNA
atcctacgttccaaaagc

SEQ ID NO: 12071 - RNA, 18 nt, Homo sapiens
  source 1..18: mol_type = genomic RNA
tcctacgttccaaaagcc

SEQ ID NO: 12072 - RNA, 18 nt, Homo sapiens
  source 1..18: mol_type = genomic RNA
cctacgttccaaaagcct

SEQ ID NO: 12073 - RNA, 18 nt, Homo sapiens
  source 1..18: mol_type = genomic RNA
ctacgttccaaaagccta

SEQ ID NO: 12074 - RNA, 18 nt, Homo sapiens
  source 1..18: mol_type = genomic RNA
tacgttccaaaagcctac

SEQ ID NO: 12075 - RNA, 18 nt, Homo sapiens
  source 1..18: mol_type = genomic RNA
acgttccaaaagcctact

SEQ ID NO: 12076 - RNA, 18 nt, Homo sapiens
  source 1..18: mol_type = genomic RNA
cgttccaaaagcctactc

SEQ ID NO: 12077 - RNA, 18 nt, Homo sapiens
  source 1..18: mol_type = genomic RNA
gttccaaaagcctactca

SEQ ID NO: 12078 - RNA, 18 nt, Homo sapiens
  source 1..18: mol_type = genomic RNA
ttccaaaagcctactcaa

SEQ ID NO: 12079 - RNA, 18 nt, Homo sapiens
  source 1..18: mol_type = genomic RNA
tccaaaagcctactcaag

SEQ ID NO: 12080 - RNA, 18 nt, Homo sapiens
  source 1..18: mol_type = genomic RNA
ccaaaagcctactcaagc

SEQ ID NO: 12081 - RNA, 18 nt, Homo sapiens
  source 1..18: mol_type = genomic RNA
caaaagcctactcaagcc

SEQ ID NO: 12082 - RNA, 18 nt, Homo sapiens
  source 1..18: mol_type = genomic RNA
aaaagcctactcaagcca

SEQ ID NO: 12083 - RNA, 18 nt, Homo sapiens
  source 1..18: mol_type = genomic RNA
aaagcctactcaagccat

SEQ ID NO: 12084 - RNA, 18 nt, Homo sapiens
  source 1..18: mol_type = genomic RNA
aagcctactcaagccatt

SEQ ID NO: 12085 - RNA, 18 nt, Homo sapiens
  source 1..18: mol_type = genomic RNA
agcctactcaagccattt

SEQ ID NO: 12086 - RNA, 18 nt, Homo sapiens
  source 1..18: mol_type = genomic RNA
gcctactcaagccatttg

SEQ ID NO: 12087 - RNA, 18 nt, Homo sapiens
  source 1..18: mol_type = genomic RNA
cctactcaagccatttgt

SEQ ID NO: 12088 - RNA, 18 nt, Homo sapiens
  source 1..18: mol_type = genomic RNA
aatacttatgaatggcag

SEQ ID NO: 12089 - RNA, 18 nt, Homo sapiens
  source 1..18: mol_type = genomic RNA
atacttatgaatggcaga

SEQ ID NO: 12090 - RNA, 18 nt, Homo sapiens
  source 1..18: mol_type = genomic RNA
tacttatgaatggcagag

SEQ ID NO: 12091 - RNA, 18 nt, Homo sapiens
  source 1..18: mol_type = genomic RNA
acttatgaatggcagaga

SEQ ID NO: 12092 - RNA, 18 nt, Homo sapiens
  source 1..18: mol_type = genomic RNA
cttatgaatggcagagat

SEQ ID NO: 12093 - RNA, 18 nt, Homo sapiens
  source 1..18: mol_type = genomic RNA
ttatgaatggcagagatc

SEQ ID NO: 12094 - RNA, 18 nt, Homo sapiens
  source 1..18: mol_type = genomic RNA
tatgaatggcagagatct

SEQ ID NO: 12095 - RNA, 18 nt, Homo sapiens
  source 1..18: mol_type = genomic RNA
atgaatggcagagatcta

SEQ ID NO: 12096 - RNA, 18 nt, Homo sapiens
  source 1..18: mol_type = genomic RNA
tgaatggcagagatctac

SEQ ID NO: 12097 - RNA, 18 nt, Homo sapiens
  source 1..18: mol_type = genomic RNA
gaatggcagagatctaca

SEQ ID NO: 12098 - RNA, 18 nt, Homo sapiens
  source 1..18: mol_type = genomic RNA
aatggcagagatctacag

SEQ ID NO: 12099 - RNA, 18 nt, Homo sapiens
  source 1..18: mol_type = genomic RNA
atggcagagatctacaga

SEQ ID NO: 12100 - RNA, 18 nt, Homo sapiens
  source 1..18: mol_type = genomic RNA
tggcagagatctacagat

SEQ ID NO: 12101 - RNA, 18 nt, Homo sapiens
  source 1..18: mol_type = genomic RNA
ggcagagatctacagatt

SEQ ID NO: 12102 - RNA, 18 nt, Homo sapiens
  source 1..18: mol_type = genomic RNA
gcagagatctacagattt

SEQ ID NO: 12103 - RNA, 18 nt, Homo sapiens
  source 1..18: mol_type = genomic RNA
tgatgtaagaaatgatgc

SEQ ID NO: 12104 - RNA, 18 nt, Homo sapiens
  source 1..18: mol_type = genomic RNA
gatgtaagaaatgatgct

SEQ ID NO: 12105 - RNA, 18 nt, Homo sapiens
  source 1..18: mol_type = genomic RNA
atgtaagaaatgatgctc

SEQ ID NO: 12106 - RNA, 18 nt, Homo sapiens
  source 1..18: mol_type = genomic RNA
tgtaagaaatgatgctca

SEQ ID NO: 12107 - RNA, 18 nt, Homo sapiens
  source 1..18: mol_type = genomic RNA
gtaagaaatgatgctcac

SEQ ID NO: 12108 - RNA, 18 nt, Homo sapiens
  source 1..18: mol_type = genomic RNA
taagaaatgatgctcacc

SEQ ID NO: 12109 - RNA, 18 nt, Homo sapiens
  source 1..18: mol_type = genomic RNA
aagaaatgatgctcacca

SEQ ID NO: 12110 - RNA, 18 nt, Homo sapiens
  source 1..18: mol_type = genomic RNA
agaaatgatgctcaccag

SEQ ID NO: 12111 - RNA, 18 nt, Homo sapiens
  source 1..18: mol_type = genomic RNA
gaaatgatgctcaccagc

SEQ ID NO: 12112 - RNA, 18 nt, Homo sapiens
  source 1..18: mol_type = genomic RNA
aaatgatgctcaccagct

SEQ ID NO: 12113 - RNA, 18 nt, Homo sapiens
  source 1..18: mol_type = genomic RNA
aatgatgctcaccagctg

SEQ ID NO: 12114 - RNA, 18 nt, Homo sapiens
  source 1..18: mol_type = genomic RNA
atgatgctcaccagctgg

SEQ ID NO: 12115 - RNA, 18 nt, Homo sapiens
  source 1..18: mol_type = genomic RNA
tactgctaccaccccaca

SEQ ID NO: 12116 - RNA, 18 nt, Homo sapiens
  source 1..18: mol_type = genomic RNA
actgctaccaccccacaa

SEQ ID NO: 12117 - RNA, 18 nt, Homo sapiens
  source 1..18: mol_type = genomic RNA
ctgctaccaccccacaac

SEQ ID NO: 12118 - RNA, 18 nt, Homo sapiens
  source 1..18: mol_type = genomic RNA
agcatactggacaaatgt

SEQ ID NO: 12119 - RNA, 18 nt, Homo sapiens
  source 1..18: mol_type = genomic RNA
gcatactggacaaatgtc

SEQ ID NO: 12120 - RNA, 18 nt, Homo sapiens
  source 1..18: mol_type = genomic RNA
catactggacaaatgtct

SEQ ID NO: 12121 - RNA, 18 nt, Homo sapiens
  source 1..18: mol_type = genomic RNA
atactggacaaatgtcta

SEQ ID NO: 12122 - RNA, 18 nt, Homo sapiens
  source 1..18: mol_type = genomic RNA
tactggacaaatgtctaa

SEQ ID NO: 12123 - RNA, 18 nt, Homo sapiens
  source 1..18: mol_type = genomic RNA
actggacaaatgtctaag

SEQ ID NO: 12124 - RNA, 18 nt, Homo sapiens
  source 1..18: mol_type = genomic RNA
ctggacaaatgtctaagc

SEQ ID NO: 12125 - RNA, 18 nt, Homo sapiens
  source 1..18: mol_type = genomic RNA
tggacaaatgtctaagcc

SEQ ID NO: 12126 - RNA, 18 nt, Homo sapiens
  source 1..18: mol_type = genomic RNA
ggacaaatgtctaagcct

SEQ ID NO: 12127 - RNA, 18 nt, Homo sapiens
  source 1..18: mol_type = genomic RNA
gacaaatgtctaagcctc

SEQ ID NO: 12128 - RNA, 18 nt, Homo sapiens
  source 1..18: mol_type = genomic RNA
acaaatgtctaagcctcg

SEQ ID NO: 12129 - RNA, 18 nt, Homo sapiens
  source 1..18: mol_type = genomic RNA
caaatgtctaagcctcgt

SEQ ID NO: 12130 - RNA, 18 nt, Homo sapiens
  source 1..18: mol_type = genomic RNA
aaatgtctaagcctcgtg

SEQ ID NO: 12131 - RNA, 18 nt, Homo sapiens
  source 1..18: mol_type = genomic RNA
aatgtctaagcctcgtgg

SEQ ID NO: 12132 - RNA, 18 nt, Homo sapiens
  source 1..18: mol_type = genomic RNA
atgtctaagcctcgtggt

SEQ ID NO: 12133 - RNA, 18 nt, Homo sapiens
  source 1..18: mol_type = genomic RNA
tgtctaagcctcgtggtt

SEQ ID NO: 12134 - RNA, 18 nt, Homo sapiens
  source 1..18: mol_type = genomic RNA
gtctaagcctcgtggtta

SEQ ID NO: 12135 - RNA, 18 nt, Homo sapiens
  source 1..18: mol_type = genomic RNA
tctaagcctcgtggttag

SEQ ID NO: 12136 - RNA, 18 nt, Homo sapiens
  source 1..18: mol_type = genomic RNA
ctaagcctcgtggttagt

SEQ ID NO: 12137 - RNA, 18 nt, Homo sapiens
  source 1..18: mol_type = genomic RNA
taagcctcgtggttagtg

SEQ ID NO: 12138 - RNA, 18 nt, Homo sapiens
  source 1..18: mol_type = genomic RNA
aagcctcgtggttagtgg

SEQ ID NO: 12139 - RNA, 18 nt, Homo sapiens
  source 1..18: mol_type = genomic RNA
agcctcgtggttagtggg

SEQ ID NO: 12140 - RNA, 18 nt, Homo sapiens
  source 1..18: mol_type = genomic RNA
gcctcgtggttagtgggg

SEQ ID NO: 12141 - RNA, 18 nt, Homo sapiens
  source 1..18: mol_type = genomic RNA
cctcgtggttagtgggga

SEQ ID NO: 12142 - RNA, 18 nt, Homo sapiens
  source 1..18: mol_type = genomic RNA
ctcgtggttagtggggac

SEQ ID NO: 12143 - RNA, 18 nt, Homo sapiens
  source 1..18: mol_type = genomic RNA
tcgtggttagtggggaca

SEQ ID NO: 12144 - RNA, 18 nt, Homo sapiens
  source 1..18: mol_type = genomic RNA
cgtggttagtggggacat

SEQ ID NO: 12145 - RNA, 18 nt, Homo sapiens
  source 1..18: mol_type = genomic RNA
gtggttagtggggacatt

SEQ ID NO: 12146 - RNA, 18 nt, Homo sapiens
  source 1..18: mol_type = genomic RNA
tggttagtggggacattg

SEQ ID NO: 12147 - RNA, 18 nt, Homo sapiens
  source 1..18: mol_type = genomic RNA
ggttagtggggacattgc

SEQ ID NO: 12148 - RNA, 18 nt, Homo sapiens
  source 1..18: mol_type = genomic RNA
gttagtggggacattgct

SEQ ID NO: 12149 - RNA, 18 nt, Homo sapiens
  source 1..18: mol_type = genomic RNA
ttagtggggacattgctg

SEQ ID NO: 12150 - RNA, 18 nt, Homo sapiens
  source 1..18: mol_type = genomic RNA
tagtggggacattgctgg

SEQ ID NO: 12151 - RNA, 18 nt, Homo sapiens
  source 1..18: mol_type = genomic RNA
agtggggacattgctggt

SEQ ID NO: 12152 - RNA, 18 nt, Homo sapiens
  source 1..18: mol_type = genomic RNA
gtggggacattgctggtg

SEQ ID NO: 12153 - RNA, 18 nt, Homo sapiens
  source 1..18: mol_type = genomic RNA
tggggacattgctggtgg

SEQ ID NO: 12154 - RNA, 18 nt, Homo sapiens
  source 1..18: mol_type = genomic RNA
ggggacattgctggtgga

SEQ ID NO: 12155 - RNA, 18 nt, Homo sapiens
  source 1..18: mol_type = genomic RNA
gggacattgctggtggag

SEQ ID NO: 12156 - RNA, 18 nt, Homo sapiens
  source 1..18: mol_type = genomic RNA
ggacattgctggtggagt

SEQ ID NO: 12157 - RNA, 18 nt, Homo sapiens
  source 1..18: mol_type = genomic RNA
gacattgctggtggagtc

SEQ ID NO: 12158 - RNA, 18 nt, Homo sapiens
  source 1..18: mol_type = genomic RNA
acattgctggtggagtct

SEQ ID NO: 12159 - RNA, 18 nt, Homo sapiens
  source 1..18: mol_type = genomic RNA
cattgctggtggagtctg

SEQ ID NO: 12160 - RNA, 18 nt, Homo sapiens
  source 1..18: mol_type = genomic RNA
attgctggtggagtctga

SEQ ID NO: 12161 - RNA, 18 nt, Homo sapiens
  source 1..18: mol_type = genomic RNA
ttgctggtggagtctgaa

SEQ ID NO: 12162 - RNA, 18 nt, Homo sapiens
  source 1..18: mol_type = genomic RNA
tgctggtggagtctgaaa

SEQ ID NO: 12163 - RNA, 18 nt, Homo sapiens
  source 1..18: mol_type = genomic RNA
gctggtggagtctgaaat

SEQ ID NO: 12164 - RNA, 18 nt, Homo sapiens
  source 1..18: mol_type = genomic RNA
ctggtggagtctgaaatt

SEQ ID NO: 12165 - RNA, 18 nt, Homo sapiens
  source 1..18: mol_type = genomic RNA
tggtggagtctgaaattg

SEQ ID NO: 12166 - RNA, 18 nt, Homo sapiens
  source 1..18: mol_type = genomic RNA
ggtggagtctgaaattgt

SEQ ID NO: 12167 - RNA, 18 nt, Homo sapiens
  source 1..18: mol_type = genomic RNA
gtggagtctgaaattgtc

SEQ ID NO: 12168 - RNA, 18 nt, Homo sapiens
  source 1..18: mol_type = genomic RNA
tggagtctgaaattgtca

SEQ ID NO: 12169 - RNA, 18 nt, Homo sapiens
  source 1..18: mol_type = genomic RNA
ggagtctgaaattgtcat

SEQ ID NO: 12170 - RNA, 18 nt, Homo sapiens
  source 1..18: mol_type = genomic RNA
agtctgaaattgtcatgc

SEQ ID NO: 12171 - RNA, 18 nt, Homo sapiens
  source 1..18: mol_type = genomic RNA
tctgaaattgtcatgcag

SEQ ID NO: 12172 - RNA, 18 nt, Homo sapiens
  source 1..18: mol_type = genomic RNA
tgaaattgtcatgcagtg

SEQ ID NO: 12173 - RNA, 18 nt, Homo sapiens
  source 1..18: mol_type = genomic RNA
gaaattgtcatgcagtga

SEQ ID NO: 12174 - RNA, 18 nt, Homo sapiens
  source 1..18: mol_type = genomic RNA
aaattgtcatgcagtgac

SEQ ID NO: 12175 - RNA, 18 nt, Homo sapiens
  source 1..18: mol_type = genomic RNA
aattgtcatgcagtgact

SEQ ID NO: 12176 - RNA, 18 nt, Homo sapiens
  source 1..18: mol_type = genomic RNA
attgtcatgcagtgactc

SEQ ID NO: 12177 - RNA, 18 nt, Homo sapiens
  source 1..18: mol_type = genomic RNA
ttgtcatgcagtgactca

SEQ ID NO: 12178 - RNA, 18 nt, Homo sapiens
  source 1..18: mol_type = genomic RNA
tgtcatgcagtgactcac

SEQ ID NO: 12179 - RNA, 18 nt, Homo sapiens
  source 1..18: mol_type = genomic RNA
gtcatgcagtgactcact

SEQ ID NO: 12180 - RNA, 18 nt, Homo sapiens
  source 1..18: mol_type = genomic RNA
tcatgcagtgactcactc

SEQ ID NO: 12181 - RNA, 18 nt, Homo sapiens
  source 1..18: mol_type = genomic RNA
catgcagtgactcactca

SEQ ID NO: 12182 - RNA, 18 nt, Homo sapiens
  source 1..18: mol_type = genomic RNA
atgcagtgactcactcaa

SEQ ID NO: 12183 - RNA, 18 nt, Homo sapiens
  source 1..18: mol_type = genomic RNA
tgcagtgactcactcaag

SEQ ID NO: 12184 - RNA, 18 nt, Homo sapiens
  source 1..18: mol_type = genomic RNA
gcagtgactcactcaagc

SEQ ID NO: 12185 - RNA, 18 nt, Homo sapiens
  source 1..18: mol_type = genomic RNA
cagtgactcactcaagct

SEQ ID NO: 12186 - RNA, 18 nt, Homo sapiens
  source 1..18: mol_type = genomic RNA
agtgactcactcaagctt

SEQ ID NO: 12187 - RNA, 18 nt, Homo sapiens
  source 1..18: mol_type = genomic RNA
gtgactcactcaagctta

SEQ ID NO: 12188 - RNA, 18 nt, Homo sapiens
  source 1..18: mol_type = genomic RNA
tgactcactcaagcttag

SEQ ID NO: 12189 - RNA, 18 nt, Homo sapiens
  source 1..18: mol_type = genomic RNA
gactcactcaagcttagg

SEQ ID NO: 12190 - RNA, 18 nt, Homo sapiens
  source 1..18: mol_type = genomic RNA
actcactcaagcttaggc

SEQ ID NO: 12191 - RNA, 18 nt, Homo sapiens
  source 1..18: mol_type = genomic RNA
ctcactcaagcttaggca

SEQ ID NO: 12192 - RNA, 18 nt, Homo sapiens
  source 1..18: mol_type = genomic RNA
tcactcaagcttaggcag

SEQ ID NO: 12193 - RNA, 18 nt, Homo sapiens
  source 1..18: mol_type = genomic RNA
cactcaagcttaggcaga

SEQ ID NO: 12194 - RNA, 18 nt, Homo sapiens
  source 1..18: mol_type = genomic RNA
actcaagcttaggcagat

SEQ ID NO: 12195 - RNA, 18 nt, Homo sapiens
  source 1..18: mol_type = genomic RNA
ctcaagcttaggcagatt

SEQ ID NO: 12196 - RNA, 18 nt, Homo sapiens
  source 1..18: mol_type = genomic RNA
tcaagcttaggcagattt

SEQ ID NO: 12197 - RNA, 18 nt, Homo sapiens
  source 1..18: mol_type = genomic RNA
caagcttaggcagatttg

SEQ ID NO: 12198 - RNA, 18 nt, Homo sapiens
  source 1..18: mol_type = genomic RNA
aagcttaggcagatttgg

SEQ ID NO: 12199 - RNA, 18 nt, Homo sapiens
  source 1..18: mol_type = genomic RNA
agcttaggcagatttggt

SEQ ID NO: 12200 - RNA, 18 nt, Homo sapiens
  source 1..18: mol_type = genomic RNA
gcttaggcagatttggtg

SEQ ID NO: 12201 - RNA, 18 nt, Homo sapiens
  source 1..18: mol_type = genomic RNA
cttaggcagatttggtga

SEQ ID NO: 12202 - RNA, 18 nt, Homo sapiens
  source 1..18: mol_type = genomic RNA
ttaggcagatttggtgat

SEQ ID NO: 12203 - RNA, 18 nt, Homo sapiens
  source 1..18: mol_type = genomic RNA
taggcagatttggtgata

SEQ ID NO: 12204 - RNA, 18 nt, Homo sapiens
  source 1..18: mol_type = genomic RNA
aggcagatttggtgatat

SEQ ID NO: 12205 - RNA, 18 nt, Homo sapiens
  source 1..18: mol_type = genomic RNA
ggcagatttggtgatata

SEQ ID NO: 12206 - RNA, 18 nt, Homo sapiens
  source 1..18: mol_type = genomic RNA
ttggtgatatatgacaca

SEQ ID NO: 12207 - RNA, 18 nt, Homo sapiens
  source 1..18: mol_type = genomic RNA
tggtgatatatgacacag

SEQ ID NO: 12208 - RNA, 18 nt, Homo sapiens
  source 1..18: mol_type = genomic RNA
ggtgatatatgacacaga

SEQ ID NO: 12209 - RNA, 18 nt, Homo sapiens
  source 1..18: mol_type = genomic RNA
gtgatatatgacacagag

SEQ ID NO: 12210 - RNA, 18 nt, Homo sapiens
  source 1..18: mol_type = genomic RNA
tgatatatgacacagaga

SEQ ID NO: 12211 - RNA, 18 nt, Homo sapiens
  source 1..18: mol_type = genomic RNA
gatatatgacacagagat

SEQ ID NO: 12212 - RNA, 18 nt, Homo sapiens
  source 1..18: mol_type = genomic RNA
atatatgacacagagatg

SEQ ID NO: 12213 - RNA, 18 nt, Homo sapiens
  source 1..18: mol_type = genomic RNA
tatatgacacagagatgc

SEQ ID NO: 12214 - RNA, 18 nt, Homo sapiens
  source 1..18: mol_type = genomic RNA
atatgacacagagatgca

SEQ ID NO: 12215 - RNA, 18 nt, Homo sapiens
  source 1..18: mol_type = genomic RNA
tatgacacagagatgcaa

SEQ ID NO: 12216 - RNA, 18 nt, Homo sapiens
  source 1..18: mol_type = genomic RNA
atgacacagagatgcaaa

SEQ ID NO: 12217 - RNA, 18 nt, Homo sapiens
  source 1..18: mol_type = genomic RNA
tgacacagagatgcaaag

SEQ ID NO: 12218 - RNA, 18 nt, Homo sapiens
  source 1..18: mol_type = genomic RNA
gacacagagatgcaaaga

SEQ ID NO: 12219 - RNA, 18 nt, Homo sapiens
  source 1..18: mol_type = genomic RNA
acacagagatgcaaagaa

SEQ ID NO: 12220 - RNA, 18 nt, Homo sapiens
  source 1..18: mol_type = genomic RNA
cacagagatgcaaagaaa

SEQ ID NO: 12221 - RNA, 18 nt, Homo sapiens
  source 1..18: mol_type = genomic RNA
acagagatgcaaagaaat

SEQ ID NO: 12222 - RNA, 18 nt, Homo sapiens
  source 1..18: mol_type = genomic RNA
cagagatgcaaagaaatg

SEQ ID NO: 12223 - RNA, 18 nt, Homo sapiens
  source 1..18: mol_type = genomic RNA
agagatgcaaagaaatgt

SEQ ID NO: 12224 - RNA, 18 nt, Homo sapiens
  source 1..18: mol_type = genomic RNA
gagatgcaaagaaatgtt

SEQ ID NO: 12225 - RNA, 18 nt, Homo sapiens
  source 1..18: mol_type = genomic RNA
agatgcaaagaaatgttg

SEQ ID NO: 12226 - RNA, 18 nt, Homo sapiens
  source 1..18: mol_type = genomic RNA
tgcaaagaaatgttgtag

SEQ ID NO: 12227 - RNA, 18 nt, Homo sapiens
  source 1..18: mol_type = genomic RNA
gcaaagaaatgttgtagc

SEQ ID NO: 12228 - RNA, 18 nt, Homo sapiens
  source 1..18: mol_type = genomic RNA
aaagaaatgttgtagctg

SEQ ID NO: 12229 - RNA, 18 nt, Homo sapiens
  source 1..18: mol_type = genomic RNA
aagaaatgttgtagctga

SEQ ID NO: 12230 - RNA, 18 nt, Homo sapiens
  source 1..18: mol_type = genomic RNA
agaaatgttgtagctgac

SEQ ID NO: 12231 - RNA, 18 nt, Homo sapiens
  source 1..18: mol_type = genomic RNA
gaaatgttgtagctgaca

SEQ ID NO: 12232 - RNA, 18 nt, Homo sapiens
  source 1..18: mol_type = genomic RNA
aaatgttgtagctgacac

SEQ ID NO: 12233 - RNA, 18 nt, Homo sapiens
  source 1..18: mol_type = genomic RNA
aatgttgtagctgacaca

SEQ ID NO: 12234 - RNA, 18 nt, Homo sapiens
  source 1..18: mol_type = genomic RNA
atgttgtagctgacacac

SEQ ID NO: 12235 - RNA, 18 nt, Homo sapiens
  source 1..18: mol_type = genomic RNA
tgttgtagctgacacaca

SEQ ID NO: 12236 - RNA, 18 nt, Homo sapiens
  source 1..18: mol_type = genomic RNA
gttgtagctgacacacac

SEQ ID NO: 12237 - RNA, 18 nt, Homo sapiens
  source 1..18: mol_type = genomic RNA
ttgtagctgacacacaca

SEQ ID NO: 12238 - RNA, 18 nt, Homo sapiens
  source 1..18: mol_type = genomic RNA
tgtagctgacacacacag

SEQ ID NO: 12239 - RNA, 18 nt, Homo sapiens
  source 1..18: mol_type = genomic RNA
gtagctgacacacacagg

SEQ ID NO: 12240 - RNA, 18 nt, Homo sapiens
  source 1..18: mol_type = genomic RNA
ctgacacacacaggctgg

SEQ ID NO: 12241 - RNA, 18 nt, Homo sapiens
  source 1..18: mol_type = genomic RNA
cacacacaggctggctct

SEQ ID NO: 12242 - RNA, 18 nt, Homo sapiens
  source 1..18: mol_type = genomic RNA
ctggctctgggagatgca

SEQ ID NO: 12243 - RNA, 18 nt, Homo sapiens
  source 1..18: mol_type = genomic RNA
gctctgggagatgcagaa

SEQ ID NO: 12244 - RNA, 18 nt, Homo sapiens
  source 1..18: mol_type = genomic RNA
ctctgggagatgcagaag

SEQ ID NO: 12245 - RNA, 18 nt, Homo sapiens
  source 1..18: mol_type = genomic RNA
tctgggagatgcagaagg

SEQ ID NO: 12246 - RNA, 18 nt, Homo sapiens
  source 1..18: mol_type = genomic RNA
ctgggagatgcagaagga

SEQ ID NO: 12247 - RNA, 18 nt, Homo sapiens
  source 1..18: mol_type = genomic RNA
gagatgcagaaggagcac

SEQ ID NO: 12248 - RNA, 18 nt, Homo sapiens
  source 1..18: mol_type = genomic RNA
agatgcagaaggagcacg

SEQ ID NO: 12249 - RNA, 18 nt, Homo sapiens
  source 1..18: mol_type = genomic RNA
gatgcagaaggagcacgt

SEQ ID NO: 12250 - RNA, 18 nt, Homo sapiens
  source 1..18: mol_type = genomic RNA
atgcagaaggagcacgtc

SEQ ID NO: 12251 - RNA, 18 nt, Homo sapiens
  source 1..18: mol_type = genomic RNA
tgcagaaggagcacgtcc

SEQ ID NO: 12252 - RNA, 18 nt, Homo sapiens
  source 1..18: mol_type = genomic RNA
cagaaggagcacgtcccc

SEQ ID NO: 12253 - RNA, 18 nt, Homo sapiens
  source 1..18: mol_type = genomic RNA
gaaggagcacgtccccca

SEQ ID NO: 12254 - RNA, 18 nt, Homo sapiens
  source 1..18: mol_type = genomic RNA
aaggagcacgtcccccaa

SEQ ID NO: 12255 - RNA, 18 nt, Homo sapiens
  source 1..18: mol_type = genomic RNA
aggagcacgtcccccaaa

SEQ ID NO: 12256 - RNA, 18 nt, Homo sapiens
  source 1..18: mol_type = genomic RNA
ggagcacgtcccccaaaa

SEQ ID NO: 12257 - RNA, 18 nt, Homo sapiens
  source 1..18: mol_type = genomic RNA
gagcacgtcccccaaaat

SEQ ID NO: 12258 - RNA, 18 nt, Homo sapiens
  source 1..18: mol_type = genomic RNA
agcacgtcccccaaaatg

SEQ ID NO: 12259 - RNA, 18 nt, Homo sapiens
  source 1..18: mol_type = genomic RNA
gcacgtcccccaaaatga

SEQ ID NO: 12260 - RNA, 18 nt, Homo sapiens
  source 1..18: mol_type = genomic RNA
cacgtcccccaaaatgaa

SEQ ID NO: 12261 - RNA, 18 nt, Homo sapiens
  source 1..18: mol_type = genomic RNA
acgtcccccaaaatgaag

SEQ ID NO: 12262 - RNA, 18 nt, Homo sapiens
  source 1..18: mol_type = genomic RNA
cgtcccccaaaatgaagc

SEQ ID NO: 12263 - RNA, 18 nt, Homo sapiens
  source 1..18: mol_type = genomic RNA
gtcccccaaaatgaagcc

SEQ ID NO: 12264 - RNA, 18 nt, Homo sapiens
  source 1..18: mol_type = genomic RNA
tcccccaaaatgaagcca

SEQ ID NO: 12265 - RNA, 18 nt, Homo sapiens
  source 1..18: mol_type = genomic RNA
cccccaaaatgaagccag

SEQ ID NO: 12266 - RNA, 18 nt, Homo sapiens
  source 1..18: mol_type = genomic RNA
ccccaaaatgaagccaga

SEQ ID NO: 12267 - RNA, 18 nt, Homo sapiens
  source 1..18: mol_type = genomic RNA
cccaaaatgaagccagac

SEQ ID NO: 12268 - RNA, 18 nt, Homo sapiens
  source 1..18: mol_type = genomic RNA
ccaaaatgaagccagaca

SEQ ID NO: 12269 - RNA, 18 nt, Homo sapiens
  source 1..18: mol_type = genomic RNA
caaaatgaagccagacag

SEQ ID NO: 12270 - RNA, 18 nt, Homo sapiens
  source 1..18: mol_type = genomic RNA
aaaatgaagccagacaga

SEQ ID NO: 12271 - RNA, 18 nt, Homo sapiens
  source 1..18: mol_type = genomic RNA
aaatgaagccagacagac

SEQ ID NO: 12272 - RNA, 18 nt, Homo sapiens
  source 1..18: mol_type = genomic RNA
aatgaagccagacagaca

SEQ ID NO: 12273 - RNA, 18 nt, Homo sapiens
  source 1..18: mol_type = genomic RNA
atgaagccagacagacat

SEQ ID NO: 12274 - RNA, 18 nt, Homo sapiens
  source 1..18: mol_type = genomic RNA
tgaagccagacagacatc

SEQ ID NO: 12275 - RNA, 18 nt, Homo sapiens
  source 1..18: mol_type = genomic RNA
gaagccagacagacatcc

SEQ ID NO: 12276 - RNA, 18 nt, Homo sapiens
  source 1..18: mol_type = genomic RNA
aagccagacagacatcct

SEQ ID NO: 12277 - RNA, 18 nt, Homo sapiens
  source 1..18: mol_type = genomic RNA
agccagacagacatcctt

SEQ ID NO: 12278 - RNA, 18 nt, Homo sapiens
  source 1..18: mol_type = genomic RNA
gccagacagacatcctta

SEQ ID NO: 12279 - RNA, 18 nt, Homo sapiens
  source 1..18: mol_type = genomic RNA
ccagacagacatccttaa

SEQ ID NO: 12280 - RNA, 18 nt, Homo sapiens
  source 1..18: mol_type = genomic RNA
cagacagacatccttaag

SEQ ID NO: 12281 - RNA, 18 nt, Homo sapiens
  source 1..18: mol_type = genomic RNA
agacagacatccttaagg

SEQ ID NO: 12282 - RNA, 18 nt, Homo sapiens
  source 1..18: mol_type = genomic RNA
gacagacatccttaagga

SEQ ID NO: 12283 - RNA, 18 nt, Homo sapiens
  source 1..18: mol_type = genomic RNA
acagacatccttaaggaa

SEQ ID NO: 12284 - RNA, 18 nt, Homo sapiens
  source 1..18: mol_type = genomic RNA
cagacatccttaaggaag

SEQ ID NO: 12285 - RNA, 18 nt, Homo sapiens
  source 1..18: mol_type = genomic RNA
agacatccttaaggaagg

SEQ ID NO: 12286 - RNA, 18 nt, Homo sapiens
  source 1..18: mol_type = genomic RNA
gacatccttaaggaagga

SEQ ID NO: 12287 - RNA, 18 nt, Homo sapiens
  source 1..18: mol_type = genomic RNA
acatccttaaggaaggag

SEQ ID NO: 12288 - RNA, 18 nt, Homo sapiens
  source 1..18: mol_type = genomic RNA
catccttaaggaaggagc

SEQ ID NO: 12289 - RNA, 18 nt, Homo sapiens
  source 1..18: mol_type = genomic RNA
atccttaaggaaggagca

SEQ ID NO: 12290 - RNA, 18 nt, Homo sapiens
  source 1..18: mol_type = genomic RNA
tccttaaggaaggagcaa

SEQ ID NO: 12291 - RNA, 18 nt, Homo sapiens
  source 1..18: mol_type = genomic RNA
ccttaaggaaggagcaaa

SEQ ID NO: 12292 - RNA, 18 nt, Homo sapiens
  source 1..18: mol_type = genomic RNA
cttaaggaaggagcaaag

SEQ ID NO: 12293 - RNA, 18 nt, Homo sapiens
  source 1..18: mol_type = genomic RNA
ttaaggaaggagcaaagg

SEQ ID NO: 12294 - RNA, 18 nt, Homo sapiens
  source 1..18: mol_type = genomic RNA
taaggaaggagcaaaggg

SEQ ID NO: 12295 - RNA, 18 nt, Homo sapiens
  source 1..18: mol_type = genomic RNA
aaggagcaaaggggcttc

SEQ ID NO: 12296 - RNA, 18 nt, Homo sapiens
  source 1..18: mol_type = genomic RNA
aggagcaaaggggcttca

SEQ ID NO: 12297 - RNA, 18 nt, Homo sapiens
  source 1..18: mol_type = genomic RNA
ggagcaaaggggcttcat

SEQ ID NO: 12298 - RNA, 18 nt, Homo sapiens
  source 1..18: mol_type = genomic RNA
gagcaaaggggcttcatc

SEQ ID NO: 12299 - RNA, 18 nt, Homo sapiens
  source 1..18: mol_type = genomic RNA
agcaaaggggcttcatct

SEQ ID NO: 12300 - RNA, 18 nt, Homo sapiens
  source 1..18: mol_type = genomic RNA
gcaaaggggcttcatctt

SEQ ID NO: 12301 - RNA, 18 nt, Homo sapiens
  source 1..18: mol_type = genomic RNA
caaaggggcttcatctta

SEQ ID NO: 12302 - RNA, 18 nt, Homo sapiens
  source 1..18: mol_type = genomic RNA
aaaggggcttcatcttaa

SEQ ID NO: 12303 - RNA, 18 nt, Homo sapiens
  source 1..18: mol_type = genomic RNA
aaggggcttcatcttaaa

SEQ ID NO: 12304 - RNA, 18 nt, Homo sapiens
  source 1..18: mol_type = genomic RNA
aggggcttcatcttaaag

SEQ ID NO: 12305 - RNA, 18 nt, Homo sapiens
  source 1..18: mol_type = genomic RNA
ggggcttcatcttaaaga

SEQ ID NO: 12306 - RNA, 18 nt, Homo sapiens
  source 1..18: mol_type = genomic RNA
gggcttcatcttaaagaa

SEQ ID NO: 12307 - RNA, 18 nt, Homo sapiens
  source 1..18: mol_type = genomic RNA
cttaaagaatgaagaagg

SEQ ID NO: 12308 - RNA, 18 nt, Homo sapiens
  source 1..18: mol_type = genomic RNA
ttaaagaatgaagaaggg

SEQ ID NO: 12309 - RNA, 18 nt, Homo sapiens
  source 1..18: mol_type = genomic RNA
taaagaatgaagaaggga

SEQ ID NO: 12310 - RNA, 18 nt, Homo sapiens
  source 1..18: mol_type = genomic RNA
aaagaatgaagaagggat

SEQ ID NO: 12311 - RNA, 18 nt, Homo sapiens
  source 1..18: mol_type = genomic RNA
aagaatgaagaagggatt

SEQ ID NO: 12312 - RNA, 18 nt, Homo sapiens
  source 1..18: mol_type = genomic RNA
agaatgaagaagggattt

SEQ ID NO: 12313 - RNA, 18 nt, Homo sapiens
  source 1..18: mol_type = genomic RNA
gaatgaagaagggatttg

SEQ ID NO: 12314 - RNA, 18 nt, Homo sapiens
  source 1..18: mol_type = genomic RNA
aatgaagaagggatttgt

SEQ ID NO: 12315 - RNA, 18 nt, Homo sapiens
  source 1..18: mol_type = genomic RNA
atgaagaagggatttgtc

SEQ ID NO: 12316 - RNA, 18 nt, Homo sapiens
  source 1..18: mol_type = genomic RNA
tgaagaagggatttgtca

SEQ ID NO: 12317 - RNA, 18 nt, Homo sapiens
  source 1..18: mol_type = genomic RNA
gaagaagggatttgtcat

SEQ ID NO: 12318 - RNA, 18 nt, Homo sapiens
  source 1..18: mol_type = genomic RNA
aagaagggatttgtcatg

SEQ ID NO: 12319 - RNA, 18 nt, Homo sapiens
  source 1..18: mol_type = genomic RNA
agaagggatttgtcatga

SEQ ID NO: 12320 - RNA, 18 nt, Homo sapiens
  source 1..18: mol_type = genomic RNA
gaagggatttgtcatgag

SEQ ID NO: 12321 - RNA, 18 nt, Homo sapiens
  source 1..18: mol_type = genomic RNA
aagggatttgtcatgaga

SEQ ID NO: 12322 - RNA, 18 nt, Homo sapiens
  source 1..18: mol_type = genomic RNA
agggatttgtcatgagag

SEQ ID NO: 12323 - RNA, 18 nt, Homo sapiens
  source 1..18: mol_type = genomic RNA
gggatttgtcatgagaga

SEQ ID NO: 12324 - RNA, 18 nt, Homo sapiens
  source 1..18: mol_type = genomic RNA
ggatttgtcatgagagat

SEQ ID NO: 12325 - RNA, 18 nt, Homo sapiens
  source 1..18: mol_type = genomic RNA
ttgtcatgagagatgtgg

SEQ ID NO: 12326 - RNA, 18 nt, Homo sapiens
  source 1..18: mol_type = genomic RNA
tgtcatgagagatgtggc

SEQ ID NO: 12327 - RNA, 18 nt, Homo sapiens
  source 1..18: mol_type = genomic RNA
gtcatgagagatgtggca

SEQ ID NO: 12328 - RNA, 18 nt, Homo sapiens
  source 1..18: mol_type = genomic RNA
tcatgagagatgtggcag

SEQ ID NO: 12329 - RNA, 18 nt, Homo sapiens
  source 1..18: mol_type = genomic RNA
catgagagatgtggcagg

SEQ ID NO: 12330 - RNA, 18 nt, Homo sapiens
  source 1..18: mol_type = genomic RNA
atgagagatgtggcagga

SEQ ID NO: 12331 - RNA, 18 nt, Homo sapiens
  source 1..18: mol_type = genomic RNA
tgagagatgtggcaggaa

SEQ ID NO: 12332 - RNA, 18 nt, Homo sapiens
  source 1..18: mol_type = genomic RNA
gagagatgtggcaggaat

SEQ ID NO: 12333 - RNA, 18 nt, Homo sapiens
  source 1..18: mol_type = genomic RNA
agagatgtggcaggaatt

SEQ ID NO: 12334 - RNA, 18 nt, Homo sapiens
  source 1..18: mol_type = genomic RNA
gagatgtggcaggaattt

SEQ ID NO: 12335 - RNA, 18 nt, Homo sapiens
  source 1..18: mol_type = genomic RNA
agatgtggcaggaatttc

SEQ ID NO: 12336 - RNA, 18 nt, Homo sapiens
  source 1..18: mol_type = genomic RNA
gatgtggcaggaatttct

SEQ ID NO: 12337 - RNA, 18 nt, Homo sapiens
  source 1..18: mol_type = genomic RNA
atgtggcaggaatttctt

SEQ ID NO: 12338 - RNA, 18 nt, Homo sapiens
  source 1..18: mol_type = genomic RNA
tgtggcaggaatttcttg

SEQ ID NO: 12339 - RNA, 18 nt, Homo sapiens
  source 1..18: mol_type = genomic RNA
gtggcaggaatttcttga

SEQ ID NO: 12340 - RNA, 18 nt, Homo sapiens
  source 1..18: mol_type = genomic RNA
tggcaggaatttcttgag

SEQ ID NO: 12341 - RNA, 18 nt, Homo sapiens
  source 1..18: mol_type = genomic RNA
ggcaggaatttcttgaga

SEQ ID NO: 12342 - RNA, 18 nt, Homo sapiens
  source 1..18: mol_type = genomic RNA
gcaggaatttcttgagag

SEQ ID NO: 12343 - RNA, 18 nt, Homo sapiens
  source 1..18: mol_type = genomic RNA
caggaatttcttgagagg

SEQ ID NO: 12344 - RNA, 18 nt, Homo sapiens
  source 1..18: mol_type = genomic RNA
aggaatttcttgagaggc

SEQ ID NO: 12345 - RNA, 18 nt, Homo sapiens
  source 1..18: mol_type = genomic RNA
ggaatttcttgagaggca

SEQ ID NO: 12346 - RNA, 18 nt, Homo sapiens
  source 1..18: mol_type = genomic RNA
gaatttcttgagaggcag

SEQ ID NO: 12347 - RNA, 18 nt, Homo sapiens
  source 1..18: mol_type = genomic RNA
aatttcttgagaggcaga

SEQ ID NO: 12348 - RNA, 18 nt, Homo sapiens
  source 1..18: mol_type = genomic RNA
atttcttgagaggcagag

SEQ ID NO: 12349 - RNA, 18 nt, Homo sapiens
  source 1..18: mol_type = genomic RNA
tttcttgagaggcagagg

SEQ ID NO: 12350 - RNA, 18 nt, Homo sapiens
  source 1..18: mol_type = genomic RNA
ttcttgagaggcagaggg

SEQ ID NO: 12351 - RNA, 18 nt, Homo sapiens
  source 1..18: mol_type = genomic RNA
tcttgagaggcagaggga

SEQ ID NO: 12352 - RNA, 18 nt, Homo sapiens
  source 1..18: mol_type = genomic RNA
cttgagaggcagagggag

SEQ ID NO: 12353 - RNA, 18 nt, Homo sapiens
  source 1..18: mol_type = genomic RNA
cagagggagagcatgaga

SEQ ID NO: 12354 - RNA, 18 nt, Homo sapiens
  source 1..18: mol_type = genomic RNA
agagggagagcatgagaa

SEQ ID NO: 12355 - RNA, 18 nt, Homo sapiens
  source 1..18: mol_type = genomic RNA
gagggagagcatgagaat

SEQ ID NO: 12356 - RNA, 18 nt, Homo sapiens
  source 1..18: mol_type = genomic RNA
agggagagcatgagaatg

SEQ ID NO: 12357 - RNA, 18 nt, Homo sapiens
  source 1..18: mol_type = genomic RNA
gggagagcatgagaatgt

SEQ ID NO: 12358 - RNA, 18 nt, Homo sapiens
  source 1..18: mol_type = genomic RNA
ggagagcatgagaatgtt

SEQ ID NO: 12359 - RNA, 18 nt, Homo sapiens
  source 1..18: mol_type = genomic RNA
gagagcatgagaatgtta

SEQ ID NO: 12360 - RNA, 18 nt, Homo sapiens
  source 1..18: mol_type = genomic RNA
agagcatgagaatgttag

SEQ ID NO: 12361 - RNA, 18 nt, Homo sapiens
  source 1..18: mol_type = genomic RNA
gagcatgagaatgttagg

SEQ ID NO: 12362 - RNA, 18 nt, Homo sapiens
  source 1..18: mol_type = genomic RNA
agcatgagaatgttagga

SEQ ID NO: 12363 - RNA, 18 nt, Homo sapiens
  source 1..18: mol_type = genomic RNA
gcatgagaatgttaggaa

SEQ ID NO: 12364 - RNA, 18 nt, Homo sapiens
  source 1..18: mol_type = genomic RNA
catgagaatgttaggaag

SEQ ID NO: 12365 - RNA, 18 nt, Homo sapiens
  source 1..18: mol_type = genomic RNA
atgagaatgttaggaagg

SEQ ID NO: 12366 - RNA, 18 nt, Homo sapiens
  source 1..18: mol_type = genomic RNA
tgagaatgttaggaaggc

SEQ ID NO: 12367 - RNA, 18 nt, Homo sapiens
  source 1..18: mol_type = genomic RNA
gagaatgttaggaaggca

SEQ ID NO: 12368 - RNA, 18 nt, Homo sapiens
  source 1..18: mol_type = genomic RNA
agaatgttaggaaggcag

SEQ ID NO: 12369 - RNA, 18 nt, Homo sapiens
  source 1..18: mol_type = genomic RNA
gaatgttaggaaggcagg

SEQ ID NO: 12370 - RNA, 18 nt, Homo sapiens
  source 1..18: mol_type = genomic RNA
aatgttaggaaggcagga

SEQ ID NO: 12371 - RNA, 18 nt, Homo sapiens
  source 1..18: mol_type = genomic RNA
atgttaggaaggcaggag

SEQ ID NO: 12372 - RNA, 18 nt, Homo sapiens
  source 1..18: mol_type = genomic RNA
tgttaggaaggcaggaga

SEQ ID NO: 12373 - RNA, 18 nt, Homo sapiens
  source 1..18: mol_type = genomic RNA
gttaggaaggcaggagag

SEQ ID NO: 12374 - RNA, 18 nt, Homo sapiens
  source 1..18: mol_type = genomic RNA
ttaggaaggcaggagaga

SEQ ID NO: 12375 - RNA, 18 nt, Homo sapiens
  source 1..18: mol_type = genomic RNA
aaggcaggagagactctc

SEQ ID NO: 12376 - RNA, 18 nt, Homo sapiens
  source 1..18: mol_type = genomic RNA
aggcaggagagactctca

SEQ ID NO: 12377 - RNA, 18 nt, Homo sapiens
  source 1..18: mol_type = genomic RNA
gcaggagagactctcaca

SEQ ID NO: 12378 - RNA, 18 nt, Homo sapiens
  source 1..18: mol_type = genomic RNA
caggagagactctcacac

SEQ ID NO: 12379 - RNA, 18 nt, Homo sapiens
  source 1..18: mol_type = genomic RNA
aggagagactctcacaca

SEQ ID NO: 12380 - RNA, 18 nt, Homo sapiens
  source 1..18: mol_type = genomic RNA
ggagagactctcacacat

SEQ ID NO: 12381 - RNA, 18 nt, Homo sapiens
  source 1..18: mol_type = genomic RNA
gagagactctcacacatc

SEQ ID NO: 12382 - RNA, 18 nt, Homo sapiens
  source 1..18: mol_type = genomic RNA
agagactctcacacatct

SEQ ID NO: 12383 - RNA, 18 nt, Homo sapiens
  source 1..18: mol_type = genomic RNA
gagactctcacacatctg

SEQ ID NO: 12384 - RNA, 18 nt, Homo sapiens
  source 1..18: mol_type = genomic RNA
agactctcacacatctgg

SEQ ID NO: 12385 - RNA, 18 nt, Homo sapiens
  source 1..18: mol_type = genomic RNA
gactctcacacatctggg

SEQ ID NO: 12386 - RNA, 18 nt, Homo sapiens
  source 1..18: mol_type = genomic RNA
actctcacacatctggga

SEQ ID NO: 12387 - RNA, 18 nt, Homo sapiens
  source 1..18: mol_type = genomic RNA
ctctcacacatctgggaa

SEQ ID NO: 12388 - RNA, 18 nt, Homo sapiens
  source 1..18: mol_type = genomic RNA
tctcacacatctgggaag

SEQ ID NO: 12389 - RNA, 18 nt, Homo sapiens
  source 1..18: mol_type = genomic RNA
ctcacacatctgggaagc

SEQ ID NO: 12390 - RNA, 18 nt, Homo sapiens
  source 1..18: mol_type = genomic RNA
tcacacatctgggaagct

SEQ ID NO: 12391 - RNA, 18 nt, Homo sapiens
  source 1..18: mol_type = genomic RNA
cacacatctgggaagctg

SEQ ID NO: 12392 - RNA, 18 nt, Homo sapiens
  source 1..18: mol_type = genomic RNA
acacatctgggaagctga

SEQ ID NO: 12393 - RNA, 18 nt, Homo sapiens
  source 1..18: mol_type = genomic RNA
cacatctgggaagctgac

SEQ ID NO: 12394 - RNA, 18 nt, Homo sapiens
  source 1..18: mol_type = genomic RNA
acatctgggaagctgaca

SEQ ID NO: 12395 - RNA, 18 nt, Homo sapiens
  source 1..18: mol_type = genomic RNA
catctgggaagctgacaa

SEQ ID NO: 12396 - RNA, 18 nt, Homo sapiens
  source 1..18: mol_type = genomic RNA
atctgggaagctgacaat

SEQ ID NO: 12397 - RNA, 18 nt, Homo sapiens
  source 1..18: mol_type = genomic RNA
tctgggaagctgacaatc

SEQ ID NO: 12398 - RNA, 18 nt, Homo sapiens
  source 1..18: mol_type = genomic RNA
ctgggaagctgacaatcc

SEQ ID NO: 12399 - RNA, 18 nt, Homo sapiens
  source 1..18: mol_type = genomic RNA
tgggaagctgacaatcca

SEQ ID NO: 12400 - RNA, 18 nt, Homo sapiens
  source 1..18: mol_type = genomic RNA
gggaagctgacaatccat

SEQ ID NO: 12401 - RNA, 18 nt, Homo sapiens
  source 1..18: mol_type = genomic RNA
ggaagctgacaatccatc

SEQ ID NO: 12402 - RNA, 18 nt, Homo sapiens
  source 1..18: mol_type = genomic RNA
gaagctgacaatccatca

SEQ ID NO: 12403 - RNA, 18 nt, Homo sapiens
  source 1..18: mol_type = genomic RNA
aagctgacaatccatcag

SEQ ID NO: 12404 - RNA, 18 nt, Homo sapiens
  source 1..18: mol_type = genomic RNA
agctgacaatccatcagc

SEQ ID NO: 12405 - RNA, 18 nt, Homo sapiens
  source 1..18: mol_type = genomic RNA
gctgacaatccatcagca

SEQ ID NO: 12406 - RNA, 18 nt, Homo sapiens
  source 1..18: mol_type = genomic RNA
ctgacaatccatcagcat

SEQ ID NO: 12407 - RNA, 18 nt, Homo sapiens
  source 1..18: mol_type = genomic RNA
tgacaatccatcagcatg

SEQ ID NO: 12408 - RNA, 18 nt, Homo sapiens
  source 1..18: mol_type = genomic RNA
gacaatccatcagcatgt

SEQ ID NO: 12409 - RNA, 18 nt, Homo sapiens
  source 1..18: mol_type = genomic RNA
acaatccatcagcatgtc

SEQ ID NO: 12410 - RNA, 18 nt, Homo sapiens
  source 1..18: mol_type = genomic RNA
caatccatcagcatgtcc

SEQ ID NO: 12411 - RNA, 18 nt, Homo sapiens
  source 1..18: mol_type = genomic RNA
aatccatcagcatgtcca

SEQ ID NO: 12412 - RNA, 18 nt, Homo sapiens
  source 1..18: mol_type = genomic RNA
atccatcagcatgtccag

SEQ ID NO: 12413 - RNA, 18 nt, Homo sapiens
  source 1..18: mol_type = genomic RNA
tccatcagcatgtccagg

SEQ ID NO: 12414 - RNA, 18 nt, Homo sapiens
  source 1..18: mol_type = genomic RNA
ccatcagcatgtccagga

SEQ ID NO: 12415 - RNA, 18 nt, Homo sapiens
  source 1..18: mol_type = genomic RNA
catcagcatgtccaggag

SEQ ID NO: 12416 - RNA, 18 nt, Homo sapiens
  source 1..18: mol_type = genomic RNA
atcagcatgtccaggagg

SEQ ID NO: 12417 - RNA, 18 nt, Homo sapiens
  source 1..18: mol_type = genomic RNA
tcagcatgtccaggagga

SEQ ID NO: 12418 - RNA, 18 nt, Homo sapiens
  source 1..18: mol_type = genomic RNA
cagcatgtccaggaggaa

SEQ ID NO: 12419 - RNA, 18 nt, Homo sapiens
  source 1..18: mol_type = genomic RNA
agcatgtccaggaggaaa

SEQ ID NO: 12420 - RNA, 18 nt, Homo sapiens
  source 1..18: mol_type = genomic RNA
gcatgtccaggaggaaaa

SEQ ID NO: 12421 - RNA, 18 nt, Homo sapiens
  source 1..18: mol_type = genomic RNA
catgtccaggaggaaaat

SEQ ID NO: 12422 - RNA, 18 nt, Homo sapiens
  source 1..18: mol_type = genomic RNA
atgtccaggaggaaaata

SEQ ID NO: 12423 - RNA, 18 nt, Homo sapiens
  source 1..18: mol_type = genomic RNA
tgtccaggaggaaaataa

SEQ ID NO: 12424 - RNA, 18 nt, Homo sapiens
  source 1..18: mol_type = genomic RNA
gtccaggaggaaaataag

SEQ ID NO: 12425 - RNA, 18 nt, Homo sapiens
  source 1..18: mol_type = genomic RNA
tccaggaggaaaataagg

SEQ ID NO: 12426 - RNA, 18 nt, Homo sapiens
  source 1..18: mol_type = genomic RNA
ccaggaggaaaataagga

SEQ ID NO: 12427 - RNA, 18 nt, Homo sapiens
  source 1..18: mol_type = genomic RNA
caggaggaaaataaggag

SEQ ID NO: 12428 - RNA, 18 nt, Homo sapiens
  source 1..18: mol_type = genomic RNA
aggaggaaaataaggagg

SEQ ID NO: 12429 - RNA, 18 nt, Homo sapiens
  source 1..18: mol_type = genomic RNA
ggaggaaaataaggagga

SEQ ID NO: 12430 - RNA, 18 nt, Homo sapiens
  source 1..18: mol_type = genomic RNA
gaggaaaataaggaggag

SEQ ID NO: 12431 - RNA, 18 nt, Homo sapiens
  source 1..18: mol_type = genomic RNA
aggaaaataaggaggagg

SEQ ID NO: 12432 - RNA, 18 nt, Homo sapiens
  source 1..18: mol_type = genomic RNA
ggaaaataaggaggagga

SEQ ID NO: 12433 - RNA, 18 nt, Homo sapiens
  source 1..18: mol_type = genomic RNA
gaaaataaggaggaggag

SEQ ID NO: 12434 - RNA, 18 nt, Homo sapiens
  source 1..18: mol_type = genomic RNA
aaaataaggaggaggagc

SEQ ID NO: 12435 - RNA, 18 nt, Homo sapiens
  source 1..18: mol_type = genomic RNA
aaataaggaggaggagca

SEQ ID NO: 12436 - RNA, 18 nt, Homo sapiens
  source 1..18: mol_type = genomic RNA
aataaggaggaggagcag

SEQ ID NO: 12437 - RNA, 18 nt, Homo sapiens
  source 1..18: mol_type = genomic RNA
ataaggaggaggagcaga

SEQ ID NO: 12438 - RNA, 18 nt, Homo sapiens
  source 1..18: mol_type = genomic RNA
ggaggaggagcagaaata

SEQ ID NO: 12439 - RNA, 18 nt, Homo sapiens
  source 1..18: mol_type = genomic RNA
gaggaggagcagaaatag

SEQ ID NO: 12440 - RNA, 18 nt, Homo sapiens
  source 1..18: mol_type = genomic RNA
aggaggagcagaaataga

SEQ ID NO: 12441 - RNA, 18 nt, Homo sapiens
  source 1..18: mol_type = genomic RNA
ggaggagcagaaatagat

SEQ ID NO: 12442 - RNA, 18 nt, Homo sapiens
  source 1..18: mol_type = genomic RNA
gaggagcagaaatagatg

SEQ ID NO: 12443 - RNA, 18 nt, Homo sapiens
  source 1..18: mol_type = genomic RNA
aggagcagaaatagatga

SEQ ID NO: 12444 - RNA, 18 nt, Homo sapiens
  source 1..18: mol_type = genomic RNA
ggagcagaaatagatgag

SEQ ID NO: 12445 - RNA, 18 nt, Homo sapiens
  source 1..18: mol_type = genomic RNA
gagcagaaatagatgagg

SEQ ID NO: 12446 - RNA, 18 nt, Homo sapiens
  source 1..18: mol_type = genomic RNA
agcagaaatagatgaggc

SEQ ID NO: 12447 - RNA, 18 nt, Homo sapiens
  source 1..18: mol_type = genomic RNA
gcagaaatagatgaggct

SEQ ID NO: 12448 - RNA, 18 nt, Homo sapiens
  source 1..18: mol_type = genomic RNA
cagaaatagatgaggctg

SEQ ID NO: 12449 - RNA, 18 nt, Homo sapiens
  source 1..18: mol_type = genomic RNA
agaaatagatgaggctgg

SEQ ID NO: 12450 - RNA, 18 nt, Homo sapiens
  source 1..18: mol_type = genomic RNA
gaaatagatgaggctgga

SEQ ID NO: 12451 - RNA, 18 nt, Homo sapiens
  source 1..18: mol_type = genomic RNA
aaatagatgaggctggat

SEQ ID NO: 12452 - RNA, 18 nt, Homo sapiens
  source 1..18: mol_type = genomic RNA
aatagatgaggctggata

SEQ ID NO: 12453 - RNA, 18 nt, Homo sapiens
  source 1..18: mol_type = genomic RNA
atagatgaggctggatat

SEQ ID NO: 12454 - RNA, 18 nt, Homo sapiens
  source 1..18: mol_type = genomic RNA
tagatgaggctggatata

SEQ ID NO: 12455 - RNA, 18 nt, Homo sapiens
  source 1..18: mol_type = genomic RNA
agatgaggctggatatag

SEQ ID NO: 12456 - RNA, 18 nt, Homo sapiens
  source 1..18: mol_type = genomic RNA
gatgaggctggatataga

SEQ ID NO: 12457 - RNA, 18 nt, Homo sapiens
  source 1..18: mol_type = genomic RNA
atgaggctggatatagaa

SEQ ID NO: 12458 - RNA, 18 nt, Homo sapiens
  source 1..18: mol_type = genomic RNA
tgaggctggatatagaag

SEQ ID NO: 12459 - RNA, 18 nt, Homo sapiens
  source 1..18: mol_type = genomic RNA
gaggctggatatagaagc

SEQ ID NO: 12460 - RNA, 18 nt, Homo sapiens
  source 1..18: mol_type = genomic RNA
aggctggatatagaagca

SEQ ID NO: 12461 - RNA, 18 nt, Homo sapiens
  source 1..18: mol_type = genomic RNA
ggctggatatagaagcag

SEQ ID NO: 12462 - RNA, 18 nt, Homo sapiens
  source 1..18: mol_type = genomic RNA
gctggatatagaagcagg

SEQ ID NO: 12463 - RNA, 18 nt, Homo sapiens
  source 1..18: mol_type = genomic RNA
ctggatatagaagcaggg

SEQ ID NO: 12464 - RNA, 18 nt, Homo sapiens
  source 1..18: mol_type = genomic RNA
tggatatagaagcagggc

SEQ ID NO: 12465 - RNA, 18 nt, Homo sapiens
  source 1..18: mol_type = genomic RNA
ggatatagaagcagggct

SEQ ID NO: 12466 - RNA, 18 nt, Homo sapiens
  source 1..18: mol_type = genomic RNA
gatatagaagcagggctg

SEQ ID NO: 12467 - RNA, 18 nt, Homo sapiens
  source 1..18: mol_type = genomic RNA
atatagaagcagggctga

SEQ ID NO: 12468 - RNA, 18 nt, Homo sapiens
  source 1..18: mol_type = genomic RNA
tatagaagcagggctgaa

SEQ ID NO: 12469 - RNA, 18 nt, Homo sapiens
  source 1..18: mol_type = genomic RNA
atagaagcagggctgaag

SEQ ID NO: 12470 - RNA, 18 nt, Homo sapiens
  source 1..18: mol_type = genomic RNA
cagggctgaagctgtgtt

SEQ ID NO: 12471 - RNA, 18 nt, Homo sapiens
  source 1..18: mol_type = genomic RNA
agggctgaagctgtgttg

SEQ ID NO: 12472 - RNA, 18 nt, Homo sapiens
  source 1..18: mol_type = genomic RNA
gggctgaagctgtgttgt

SEQ ID NO: 12473 - RNA, 18 nt, Homo sapiens
  source 1..18: mol_type = genomic RNA
ggctgaagctgtgttgtt

SEQ ID NO: 12474 - RNA, 18 nt, Homo sapiens
  source 1..18: mol_type = genomic RNA
gctgaagctgtgttgttt

SEQ ID NO: 12475 - RNA, 18 nt, Homo sapiens
  source 1..18: mol_type = genomic RNA
aagctgtgttgtttgtgg

SEQ ID NO: 12476 - RNA, 18 nt, Homo sapiens
  source 1..18: mol_type = genomic RNA
agctgtgttgtttgtggt

SEQ ID NO: 12477 - RNA, 18 nt, Homo sapiens
  source 1..18: mol_type = genomic RNA
ttgtggtaaagagttgtg

SEQ ID NO: 12478 - RNA, 18 nt, Homo sapiens
  source 1..18: mol_type = genomic RNA
tgtggtaaagagttgtga

SEQ ID NO: 12479 - RNA, 18 nt, Homo sapiens
  source 1..18: mol_type = genomic RNA
gtggtaaagagttgtgat

SEQ ID NO: 12480 - RNA, 18 nt, Homo sapiens
  source 1..18: mol_type = genomic RNA
gtgattctatccagaagg

SEQ ID NO: 12481 - RNA, 18 nt, Homo sapiens
  source 1..18: mol_type = genomic RNA
tgattctatccagaaggc

SEQ ID NO: 12482 - RNA, 18 nt, Homo sapiens
  source 1..18: mol_type = genomic RNA
gattctatccagaaggca

SEQ ID NO: 12483 - RNA, 18 nt, Homo sapiens
  source 1..18: mol_type = genomic RNA
attctatccagaaggcaa

SEQ ID NO: 12484 - RNA, 18 nt, Homo sapiens
  source 1..18: mol_type = genomic RNA
ttctatccagaaggcaat

SEQ ID NO: 12485 - RNA, 18 nt, Homo sapiens
  source 1..18: mol_type = genomic RNA
tctatccagaaggcaata

SEQ ID NO: 12486 - RNA, 18 nt, Homo sapiens
  source 1..18: mol_type = genomic RNA
ctatccagaaggcaatag

SEQ ID NO: 12487 - RNA, 18 nt, Homo sapiens
  source 1..18: mol_type = genomic RNA
tatccagaaggcaatagg

SEQ ID NO: 12488 - RNA, 18 nt, Homo sapiens
  source 1..18: mol_type = genomic RNA
atccagaaggcaataggt

SEQ ID NO: 12489 - RNA, 18 nt, Homo sapiens
  source 1..18: mol_type = genomic RNA
tccagaaggcaataggta

SEQ ID NO: 12490 - RNA, 18 nt, Homo sapiens
  source 1..18: mol_type = genomic RNA
ccagaaggcaataggtag

SEQ ID NO: 12491 - RNA, 18 nt, Homo sapiens
  source 1..18: mol_type = genomic RNA
cagaaggcaataggtagc

SEQ ID NO: 12492 - RNA, 18 nt, Homo sapiens
  source 1..18: mol_type = genomic RNA
atattttctgcaaagggc

SEQ ID NO: 12493 - RNA, 18 nt, Homo sapiens
  source 1..18: mol_type = genomic RNA
tattttctgcaaagggct

SEQ ID NO: 12494 - RNA, 18 nt, Homo sapiens
  source 1..18: mol_type = genomic RNA
attttctgcaaagggcta

SEQ ID NO: 12495 - RNA, 18 nt, Homo sapiens
  source 1..18: mol_type = genomic RNA
ttttctgcaaagggctaa

SEQ ID NO: 12496 - RNA, 18 nt, Homo sapiens
  source 1..18: mol_type = genomic RNA
tttctgcaaagggctaaa

SEQ ID NO: 12497 - RNA, 18 nt, Homo sapiens
  source 1..18: mol_type = genomic RNA
ttctgcaaagggctaaat

SEQ ID NO: 12498 - RNA, 18 nt, Homo sapiens
  source 1..18: mol_type = genomic RNA
tctgcaaagggctaaatg

SEQ ID NO: 12499 - RNA, 18 nt, Homo sapiens
  source 1..18: mol_type = genomic RNA
ctgcaaagggctaaatgt

SEQ ID NO: 12500 - RNA, 18 nt, Homo sapiens
  source 1..18: mol_type = genomic RNA
tgcaaagggctaaatgtt

SEQ ID NO: 12501 - RNA, 18 nt, Homo sapiens
  source 1..18: mol_type = genomic RNA
gcaaagggctaaatgtta

SEQ ID NO: 12502 - RNA, 18 nt, Homo sapiens
  source 1..18: mol_type = genomic RNA
caaagggctaaatgttaa

SEQ ID NO: 12503 - RNA, 18 nt, Homo sapiens
  source 1..18: mol_type = genomic RNA
aaagggctaaatgttaaa

SEQ ID NO: 12504 - RNA, 18 nt, Homo sapiens
  source 1..18: mol_type = genomic RNA
aagggctaaatgttaaat

SEQ ID NO: 12505 - RNA, 18 nt, Homo sapiens
  source 1..18: mol_type = genomic RNA
agggctaaatgttaaata

SEQ ID NO: 12506 - RNA, 18 nt, Homo sapiens
  source 1..18: mol_type = genomic RNA
tttccaagccatatggtc

SEQ ID NO: 12507 - RNA, 18 nt, Homo sapiens
  source 1..18: mol_type = genomic RNA
ttccaagccatatggtct

SEQ ID NO: 12508 - RNA, 18 nt, Homo sapiens
  source 1..18: mol_type = genomic RNA
tccaagccatatggtctc

SEQ ID NO: 12509 - RNA, 18 nt, Homo sapiens
  source 1..18: mol_type = genomic RNA
ccaagccatatggtctct

SEQ ID NO: 12510 - RNA, 18 nt, Homo sapiens
  source 1..18: mol_type = genomic RNA
caagccatatggtctctc

SEQ ID NO: 12511 - RNA, 18 nt, Homo sapiens
  source 1..18: mol_type = genomic RNA
aagccatatggtctctct

SEQ ID NO: 12512 - RNA, 18 nt, Homo sapiens
  source 1..18: mol_type = genomic RNA
agccatatggtctctctc

SEQ ID NO: 12513 - RNA, 18 nt, Homo sapiens
  source 1..18: mol_type = genomic RNA
gccatatggtctctctct

SEQ ID NO: 12514 - RNA, 18 nt, Homo sapiens
  source 1..18: mol_type = genomic RNA
ccatatggtctctctctc

SEQ ID NO: 12515 - RNA, 18 nt, Homo sapiens
  source 1..18: mol_type = genomic RNA
atggtctctctctcaatg

SEQ ID NO: 12516 - RNA, 18 nt, Homo sapiens
  source 1..18: mol_type = genomic RNA
tggtctctctctcaatga

SEQ ID NO: 12517 - RNA, 18 nt, Homo sapiens
  source 1..18: mol_type = genomic RNA
ggtctctctctcaatgac

SEQ ID NO: 12518 - RNA, 18 nt, Homo sapiens
  source 1..18: mol_type = genomic RNA
gtctctctctcaatgact

SEQ ID NO: 12519 - RNA, 18 nt, Homo sapiens
  source 1..18: mol_type = genomic RNA
tctctctctcaatgactc

SEQ ID NO: 12520 - RNA, 18 nt, Homo sapiens
  source 1..18: mol_type = genomic RNA
ctctctctcaatgactca

SEQ ID NO: 12521 - RNA, 18 nt, Homo sapiens
  source 1..18: mol_type = genomic RNA
tctctctcaatgactcag

SEQ ID NO: 12522 - RNA, 18 nt, Homo sapiens
  source 1..18: mol_type = genomic RNA
ctctctcaatgactcagc

SEQ ID NO: 12523 - RNA, 18 nt, Homo sapiens
  source 1..18: mol_type = genomic RNA
tctctcaatgactcagct

SEQ ID NO: 12524 - RNA, 18 nt, Homo sapiens
  source 1..18: mol_type = genomic RNA
ctctcaatgactcagctc

SEQ ID NO: 12525 - RNA, 18 nt, Homo sapiens
  source 1..18: mol_type = genomic RNA
tctcaatgactcagctct

SEQ ID NO: 12526 - RNA, 18 nt, Homo sapiens
  source 1..18: mol_type = genomic RNA
ctcaatgactcagctctt

SEQ ID NO: 12527 - RNA, 18 nt, Homo sapiens
  source 1..18: mol_type = genomic RNA
tcaatgactcagctcttc

SEQ ID NO: 12528 - RNA, 18 nt, Homo sapiens
  source 1..18: mol_type = genomic RNA
caatgactcagctcttcc

SEQ ID NO: 12529 - RNA, 18 nt, Homo sapiens
  source 1..18: mol_type = genomic RNA
aatgactcagctcttcca

SEQ ID NO: 12530 - RNA, 18 nt, Homo sapiens
  source 1..18: mol_type = genomic RNA
atgactcagctcttccat

SEQ ID NO: 12531 - RNA, 18 nt, Homo sapiens
  source 1..18: mol_type = genomic RNA
tgactcagctcttccatt

SEQ ID NO: 12532 - RNA, 18 nt, Homo sapiens
  source 1..18: mol_type = genomic RNA
gactcagctcttccatta

SEQ ID NO: 12533 - RNA, 18 nt, Homo sapiens
  source 1..18: mol_type = genomic RNA
ttataccatgaaagtagc

SEQ ID NO: 12534 - RNA, 18 nt, Homo sapiens
  source 1..18: mol_type = genomic RNA
tataccatgaaagtagcc

SEQ ID NO: 12535 - RNA, 18 nt, Homo sapiens
  source 1..18: mol_type = genomic RNA
ataccatgaaagtagcca

SEQ ID NO: 12536 - RNA, 18 nt, Homo sapiens
  source 1..18: mol_type = genomic RNA
taccatgaaagtagccag

SEQ ID NO: 12537 - RNA, 18 nt, Homo sapiens
  source 1..18: mol_type = genomic RNA
accatgaaagtagccaga

SEQ ID NO: 12538 - RNA, 18 nt, Homo sapiens
  source 1..18: mol_type = genomic RNA
ccatgaaagtagccagag

SEQ ID NO: 12539 - RNA, 18 nt, Homo sapiens
  source 1..18: mol_type = genomic RNA
catgaaagtagccagaga

SEQ ID NO: 12540 - RNA, 18 nt, Homo sapiens
  source 1..18: mol_type = genomic RNA
atgaaagtagccagagac

SEQ ID NO: 12541 - RNA, 18 nt, Homo sapiens
  source 1..18: mol_type = genomic RNA
tgaaagtagccagagacg

SEQ ID NO: 12542 - RNA, 18 nt, Homo sapiens
  source 1..18: mol_type = genomic RNA
caaacgcagactgtgtca

SEQ ID NO: 12543 - RNA, 18 nt, Homo sapiens
  source 1..18: mol_type = genomic RNA
aaacgcagactgtgtcag

SEQ ID NO: 12544 - RNA, 18 nt, Homo sapiens
  source 1..18: mol_type = genomic RNA
aacgcagactgtgtcaga

SEQ ID NO: 12545 - RNA, 18 nt, Homo sapiens
  source 1..18: mol_type = genomic RNA
acgcagactgtgtcagac

SEQ ID NO: 12546 - RNA, 18 nt, Homo sapiens
  source 1..18: mol_type = genomic RNA
cgcagactgtgtcagaca

SEQ ID NO: 12547 - RNA, 18 nt, Homo sapiens
  source 1..18: mol_type = genomic RNA
gcagactgtgtcagacat

SEQ ID NO: 12548 - RNA, 18 nt, Homo sapiens
  source 1..18: mol_type = genomic RNA
cagactgtgtcagacata

SEQ ID NO: 12549 - RNA, 18 nt, Homo sapiens
  source 1..18: mol_type = genomic RNA
agactgtgtcagacatag

SEQ ID NO: 12550 - RNA, 18 nt, Homo sapiens
  source 1..18: mol_type = genomic RNA
gactgtgtcagacatagt

SEQ ID NO: 12551 - RNA, 18 nt, Homo sapiens
  source 1..18: mol_type = genomic RNA
actgtgtcagacatagtc

SEQ ID NO: 12552 - RNA, 18 nt, Homo sapiens
  source 1..18: mol_type = genomic RNA
ctgtgtcagacatagtcc

SEQ ID NO: 12553 - RNA, 18 nt, Homo sapiens
  source 1..18: mol_type = genomic RNA
tgtgtcagacatagtcca

SEQ ID NO: 12554 - RNA, 18 nt, Homo sapiens
  source 1..18: mol_type = genomic RNA
gtgtcagacatagtccat

SEQ ID NO: 12555 - RNA, 18 nt, Homo sapiens
  source 1..18: mol_type = genomic RNA
tgtcagacatagtccatg

SEQ ID NO: 12556 - RNA, 18 nt, Homo sapiens
  source 1..18: mol_type = genomic RNA
gtcagacatagtccatgt

SEQ ID NO: 12557 - RNA, 18 nt, Homo sapiens
  source 1..18: mol_type = genomic RNA
tcagacatagtccatgta

SEQ ID NO: 12558 - RNA, 18 nt, Homo sapiens
  source 1..18: mol_type = genomic RNA
cagacatagtccatgtat

SEQ ID NO: 12559 - RNA, 18 nt, Homo sapiens
  source 1..18: mol_type = genomic RNA
agacatagtccatgtatg

SEQ ID NO: 12560 - RNA, 18 nt, Homo sapiens
  source 1..18: mol_type = genomic RNA
gacatagtccatgtatgg

SEQ ID NO: 12561 - RNA, 18 nt, Homo sapiens
  source 1..18: mol_type = genomic RNA
acatagtccatgtatggt

SEQ ID NO: 12562 - RNA, 18 nt, Homo sapiens
  source 1..18: mol_type = genomic RNA
atagtccatgtatggtag

SEQ ID NO: 12563 - RNA, 18 nt, Homo sapiens
  source 1..18: mol_type = genomic RNA
tagtccatgtatggtagt

SEQ ID NO: 12564 - RNA, 18 nt, Homo sapiens
  source 1..18: mol_type = genomic RNA
tgttttagaaagctcagg

SEQ ID NO: 12565 - RNA, 18 nt, Homo sapiens
  source 1..18: mol_type = genomic RNA
agaaagctcaggtttatg

SEQ ID NO: 12566 - RNA, 18 nt, Homo sapiens
  source 1..18: mol_type = genomic RNA
gaaagctcaggtttatga

SEQ ID NO: 12567 - RNA, 18 nt, Homo sapiens
  source 1..18: mol_type = genomic RNA
aagctcaggtttatgatg

SEQ ID NO: 12568 - RNA, 18 nt, Homo sapiens
  source 1..18: mol_type = genomic RNA
agctcaggtttatgatgt

SEQ ID NO: 12569 - RNA, 18 nt, Homo sapiens
  source 1..18: mol_type = genomic RNA
gctcaggtttatgatgtg

SEQ ID NO: 12570 - RNA, 18 nt, Homo sapiens
  source 1..18: mol_type = genomic RNA
aggtttatgatgtgatgg

SEQ ID NO: 12571 - RNA, 18 nt, Homo sapiens
  source 1..18: mol_type = genomic RNA
ggtttatgatgtgatgga

SEQ ID NO: 12572 - RNA, 18 nt, Homo sapiens
  source 1..18: mol_type = genomic RNA
ttatgatgtgatggagaa

SEQ ID NO: 12573 - RNA, 18 nt, Homo sapiens
  source 1..18: mol_type = genomic RNA
tatgatgtgatggagaat

SEQ ID NO: 12574 - RNA, 18 nt, Homo sapiens
  source 1..18: mol_type = genomic RNA
atgatgtgatggagaatt

SEQ ID NO: 12575 - RNA, 18 nt, Homo sapiens
  source 1..18: mol_type = genomic RNA
tgatgtgatggagaattc

SEQ ID NO: 12576 - RNA, 18 nt, Homo sapiens
  source 1..18: mol_type = genomic RNA
gatgtgatggagaattcc

SEQ ID NO: 12577 - RNA, 18 nt, Homo sapiens
  source 1..18: mol_type = genomic RNA
atgtgatggagaattcct

SEQ ID NO: 12578 - RNA, 18 nt, Homo sapiens
  source 1..18: mol_type = genomic RNA
tgtgatggagaattccta

SEQ ID NO: 12579 - RNA, 18 nt, Homo sapiens
  source 1..18: mol_type = genomic RNA
gtgatggagaattcctac

SEQ ID NO: 12580 - RNA, 18 nt, Homo sapiens
  source 1..18: mol_type = genomic RNA
tgatggagaattcctaca

SEQ ID NO: 12581 - RNA, 18 nt, Homo sapiens
  source 1..18: mol_type = genomic RNA
gatggagaattcctacaa

SEQ ID NO: 12582 - RNA, 18 nt, Homo sapiens
  source 1..18: mol_type = genomic RNA
atggagaattcctacaag

SEQ ID NO: 12583 - RNA, 18 nt, Homo sapiens
  source 1..18: mol_type = genomic RNA
tggagaattcctacaaga

SEQ ID NO: 12584 - RNA, 18 nt, Homo sapiens
  source 1..18: mol_type = genomic RNA
ggagaattcctacaagag

SEQ ID NO: 12585 - RNA, 18 nt, Homo sapiens
  source 1..18: mol_type = genomic RNA
gagaattcctacaagagt

SEQ ID NO: 12586 - RNA, 18 nt, Homo sapiens
  source 1..18: mol_type = genomic RNA
ttaaatggtagagtgaac

SEQ ID NO: 12587 - RNA, 18 nt, Homo sapiens
  source 1..18: mol_type = genomic RNA
taaatggtagagtgaaca

SEQ ID NO: 12588 - RNA, 18 nt, Homo sapiens
  source 1..18: mol_type = genomic RNA
aaatggtagagtgaacat

SEQ ID NO: 12589 - RNA, 18 nt, Homo sapiens
  source 1..18: mol_type = genomic RNA
aatggtagagtgaacata

SEQ ID NO: 12590 - RNA, 18 nt, Homo sapiens
  source 1..18: mol_type = genomic RNA
atggtagagtgaacatac

SEQ ID NO: 12591 - RNA, 18 nt, Homo sapiens
  source 1..18: mol_type = genomic RNA
tggtagagtgaacataca

SEQ ID NO: 12592 - RNA, 18 nt, Homo sapiens
  source 1..18: mol_type = genomic RNA
ggtagagtgaacatacac

SEQ ID NO: 12593 - RNA, 18 nt, Homo sapiens
  source 1..18: mol_type = genomic RNA
gtagagtgaacatacact

SEQ ID NO: 12594 - RNA, 18 nt, Homo sapiens
  source 1..18: mol_type = genomic RNA
tagagtgaacatacactg

SEQ ID NO: 12595 - RNA, 18 nt, Homo sapiens
  source 1..18: mol_type = genomic RNA
agagtgaacatacactgg

SEQ ID NO: 12596 - RNA, 18 nt, Homo sapiens
  source 1..18: mol_type = genomic RNA
gagtgaacatacactgga

SEQ ID NO: 12597 - RNA, 18 nt, Homo sapiens
  source 1..18: mol_type = genomic RNA
agtgaacatacactggaa

SEQ ID NO: 12598 - RNA, 18 nt, Homo sapiens
  source 1..18: mol_type = genomic RNA
gtgaacatacactggaat

SEQ ID NO: 12599 - RNA, 18 nt, Homo sapiens
  source 1..18: mol_type = genomic RNA
tgaacatacactggaatt

SEQ ID NO: 12600 - RNA, 18 nt, Homo sapiens
  source 1..18: mol_type = genomic RNA
gaacatacactggaattc

SEQ ID NO: 12601 - RNA, 18 nt, Homo sapiens
  source 1..18: mol_type = genomic RNA
aacatacactggaattct

SEQ ID NO: 12602 - RNA, 18 nt, Homo sapiens
  source 1..18: mol_type = genomic RNA
acatacactggaattcta

SEQ ID NO: 12603 - RNA, 18 nt, Homo sapiens
  source 1..18: mol_type = genomic RNA
tacactggaattctatac

SEQ ID NO: 12604 - RNA, 18 nt, Homo sapiens
  source 1..18: mol_type = genomic RNA
acactggaattctatact

SEQ ID NO: 12605 - RNA, 18 nt, Homo sapiens
  source 1..18: mol_type = genomic RNA
actggaattctatactgc

SEQ ID NO: 12606 - RNA, 18 nt, Homo sapiens
  source 1..18: mol_type = genomic RNA
ctggaattctatactgct

SEQ ID NO: 12607 - RNA, 18 nt, Homo sapiens
  source 1..18: mol_type = genomic RNA
attctatactgcttgacc

SEQ ID NO: 12608 - RNA, 18 nt, Homo sapiens
  source 1..18: mol_type = genomic RNA
ttctatactgcttgaccc

SEQ ID NO: 12609 - RNA, 18 nt, Homo sapiens
  source 1..18: mol_type = genomic RNA
tctatactgcttgaccca

SEQ ID NO: 12610 - RNA, 18 nt, Homo sapiens
  source 1..18: mol_type = genomic RNA
ctatactgcttgacccaa

SEQ ID NO: 12611 - RNA, 18 nt, Homo sapiens
  source 1..18: mol_type = genomic RNA
tatactgcttgacccaag

SEQ ID NO: 12612 - RNA, 18 nt, Homo sapiens
  source 1..18: mol_type = genomic RNA
atactgcttgacccaagc

SEQ ID NO: 12613 - RNA, 18 nt, Homo sapiens
  source 1..18: mol_type = genomic RNA
tactgcttgacccaagct

SEQ ID NO: 12614 - RNA, 18 nt, Homo sapiens
  source 1..18: mol_type = genomic RNA
actgcttgacccaagctt

SEQ ID NO: 12615 - RNA, 18 nt, Homo sapiens
  source 1..18: mol_type = genomic RNA
ctgcttgacccaagcttt

SEQ ID NO: 12616 - RNA, 18 nt, Homo sapiens
  source 1..18: mol_type = genomic RNA
tgcttgacccaagctttt

SEQ ID NO: 12617 - RNA, 18 nt, Homo sapiens
  source 1..18: mol_type = genomic RNA
gcttgacccaagcttttg

SEQ ID NO: 12618 - RNA, 18 nt, Homo sapiens
  source 1..18: mol_type = genomic RNA
tgacccaagcttttgata

SEQ ID NO: 12619 - RNA, 18 nt, Homo sapiens
  source 1..18: mol_type = genomic RNA
gacccaagcttttgatag

SEQ ID NO: 12620 - RNA, 18 nt, Homo sapiens
  source 1..18: mol_type = genomic RNA
acccaagcttttgatagc

SEQ ID NO: 12621 - RNA, 18 nt, Homo sapiens
  source 1..18: mol_type = genomic RNA
cccaagcttttgatagca

SEQ ID NO: 12622 - RNA, 18 nt, Homo sapiens
  source 1..18: mol_type = genomic RNA
gcttttgatagcaaaagg

SEQ ID NO: 12623 - RNA, 18 nt, Homo sapiens
  source 1..18: mol_type = genomic RNA
tttgatagcaaaaggtag

SEQ ID NO: 12624 - RNA, 18 nt, Homo sapiens
  source 1..18: mol_type = genomic RNA
ttgatagcaaaaggtaga

SEQ ID NO: 12625 - RNA, 18 nt, Homo sapiens
  source 1..18: mol_type = genomic RNA
tgatagcaaaaggtagaa

SEQ ID NO: 12626 - RNA, 18 nt, Homo sapiens
  source 1..18: mol_type = genomic RNA
gatagcaaaaggtagaaa

SEQ ID NO: 12627 - RNA, 18 nt, Homo sapiens
  source 1..18: mol_type = genomic RNA
atagcaaaaggtagaaaa

SEQ ID NO: 12628 - RNA, 18 nt, Homo sapiens
  source 1..18: mol_type = genomic RNA
tagcaaaaggtagaaaag

SEQ ID NO: 12629 - RNA, 18 nt, Homo sapiens
  source 1..18: mol_type = genomic RNA
agcaaaaggtagaaaaga

SEQ ID NO: 12630 - RNA, 18 nt, Homo sapiens
  source 1..18: mol_type = genomic RNA
gcaaaaggtagaaaagac

SEQ ID NO: 12631 - RNA, 18 nt, Homo sapiens
  source 1..18: mol_type = genomic RNA
caaaaggtagaaaagaca

SEQ ID NO: 12632 - RNA, 18 nt, Homo sapiens
  source 1..18: mol_type = genomic RNA
aaaaggtagaaaagacag

SEQ ID NO: 12633 - RNA, 18 nt, Homo sapiens
  source 1..18: mol_type = genomic RNA
aaaggtagaaaagacaga

SEQ ID NO: 12634 - RNA, 18 nt, Homo sapiens
  source 1..18: mol_type = genomic RNA
aaggtagaaaagacagat

SEQ ID NO: 12635 - RNA, 18 nt, Homo sapiens
  source 1..18: mol_type = genomic RNA
agtcatagctcagggtgt

SEQ ID NO: 12636 - RNA, 18 nt, Homo sapiens
  source 1..18: mol_type = genomic RNA
gtcatagctcagggtgtt

SEQ ID NO: 12637 - RNA, 18 nt, Homo sapiens
  source 1..18: mol_type = genomic RNA
tcatagctcagggtgttt

SEQ ID NO: 12638 - RNA, 18 nt, Homo sapiens
  source 1..18: mol_type = genomic RNA
catagctcagggtgtttg

SEQ ID NO: 12639 - RNA, 18 nt, Homo sapiens
  source 1..18: mol_type = genomic RNA
atagctcagggtgtttga

SEQ ID NO: 12640 - RNA, 18 nt, Homo sapiens
  source 1..18: mol_type = genomic RNA
tagctcagggtgtttgac

SEQ ID NO: 12641 - RNA, 18 nt, Homo sapiens
  source 1..18: mol_type = genomic RNA
agctcagggtgtttgact

SEQ ID NO: 12642 - RNA, 18 nt, Homo sapiens
  source 1..18: mol_type = genomic RNA
gctcagggtgtttgactt

SEQ ID NO: 12643 - RNA, 18 nt, Homo sapiens
  source 1..18: mol_type = genomic RNA
ctcagggtgtttgacttc

SEQ ID NO: 12644 - RNA, 18 nt, Homo sapiens
  source 1..18: mol_type = genomic RNA
tcagggtgtttgacttct

SEQ ID NO: 12645 - RNA, 18 nt, Homo sapiens
  source 1..18: mol_type = genomic RNA
agggtgtttgacttcttc

SEQ ID NO: 12646 - RNA, 18 nt, Homo sapiens
  source 1..18: mol_type = genomic RNA
gggtgtttgacttcttcc

SEQ ID NO: 12647 - RNA, 18 nt, Homo sapiens
  source 1..18: mol_type = genomic RNA
gtttgcttttctgtgggg

SEQ ID NO: 12648 - RNA, 18 nt, Homo sapiens
  source 1..18: mol_type = genomic RNA
tttgcttttctgtggggt

SEQ ID NO: 12649 - RNA, 18 nt, Homo sapiens
  source 1..18: mol_type = genomic RNA
ttgcttttctgtggggtt

SEQ ID NO: 12650 - RNA, 18 nt, Homo sapiens
  source 1..18: mol_type = genomic RNA
tgcttttctgtggggttt

SEQ ID NO: 12651 - RNA, 18 nt, Homo sapiens
  source 1..18: mol_type = genomic RNA
tttttgtcacagcagcct

SEQ ID NO: 12652 - RNA, 18 nt, Homo sapiens
  source 1..18: mol_type = genomic RNA
ttttgtcacagcagcctt

SEQ ID NO: 12653 - RNA, 18 nt, Homo sapiens
  source 1..18: mol_type = genomic RNA
tttgtcacagcagccttt

SEQ ID NO: 12654 - RNA, 18 nt, Homo sapiens
  source 1..18: mol_type = genomic RNA
ttgtcacagcagcctttg

SEQ ID NO: 12655 - RNA, 18 nt, Homo sapiens
  source 1..18: mol_type = genomic RNA
tgtcacagcagcctttgt

SEQ ID NO: 12656 - RNA, 18 nt, Homo sapiens
  source 1..18: mol_type = genomic RNA
gtcacagcagcctttgtc

SEQ ID NO: 12657 - RNA, 18 nt, Homo sapiens
  source 1..18: mol_type = genomic RNA
tcacagcagcctttgtcg

SEQ ID NO: 12658 - RNA, 18 nt, Homo sapiens
  source 1..18: mol_type = genomic RNA
cacagcagcctttgtcgc

SEQ ID NO: 12659 - RNA, 18 nt, Homo sapiens
  source 1..18: mol_type = genomic RNA
acagcagcctttgtcgct

SEQ ID NO: 12660 - RNA, 18 nt, Homo sapiens
  source 1..18: mol_type = genomic RNA
cagcagcctttgtcgctt

SEQ ID NO: 12661 - RNA, 18 nt, Homo sapiens
  source 1..18: mol_type = genomic RNA
agcagcctttgtcgcttc

SEQ ID NO: 12662 - RNA, 18 nt, Homo sapiens
  source 1..18: mol_type = genomic RNA
gcagcctttgtcgcttca

SEQ ID NO: 12663 - RNA, 18 nt, Homo sapiens
  source 1..18: mol_type = genomic RNA
cagcctttgtcgcttcaa

SEQ ID NO: 12664 - RNA, 18 nt, Homo sapiens
  source 1..18: mol_type = genomic RNA
agcctttgtcgcttcaaa

SEQ ID NO: 12665 - RNA, 18 nt, Homo sapiens
  source 1..18: mol_type = genomic RNA
gcctttgtcgcttcaaac

SEQ ID NO: 12666 - RNA, 18 nt, Homo sapiens
  source 1..18: mol_type = genomic RNA
tttgtcgcttcaaacacc

SEQ ID NO: 12667 - RNA, 18 nt, Homo sapiens
  source 1..18: mol_type = genomic RNA
ttgtcgcttcaaacaccg

SEQ ID NO: 12668 - RNA, 18 nt, Homo sapiens
  source 1..18: mol_type = genomic RNA
tgtcgcttcaaacaccgc

SEQ ID NO: 12669 - RNA, 18 nt, Homo sapiens
  source 1..18: mol_type = genomic RNA
gtcgcttcaaacaccgca

SEQ ID NO: 12670 - RNA, 18 nt, Homo sapiens
  source 1..18: mol_type = genomic RNA
tcgcttcaaacaccgcaa

SEQ ID NO: 12671 - RNA, 18 nt, Homo sapiens
  source 1..18: mol_type = genomic RNA
cgcttcaaacaccgcaag

SEQ ID NO: 12672 - RNA, 18 nt, Homo sapiens
  source 1..18: mol_type = genomic RNA
gcttcaaacaccgcaagt

SEQ ID NO: 12673 - RNA, 18 nt, Homo sapiens
  source 1..18: mol_type = genomic RNA
cttcaaacaccgcaagtg

SEQ ID NO: 12674 - RNA, 18 nt, Homo sapiens
  source 1..18: mol_type = genomic RNA
ttcaaacaccgcaagtgt

SEQ ID NO: 12675 - RNA, 18 nt, Homo sapiens
  source 1..18: mol_type = genomic RNA
tcaaacaccgcaagtgtt

SEQ ID NO: 12676 - RNA, 18 nt, Homo sapiens
  source 1..18: mol_type = genomic RNA
caaacaccgcaagtgttc

SEQ ID NO: 12677 - RNA, 18 nt, Homo sapiens
  source 1..18: mol_type = genomic RNA
aaacaccgcaagtgttct

SEQ ID NO: 12678 - RNA, 18 nt, Homo sapiens
  source 1..18: mol_type = genomic RNA
aacaccgcaagtgttctt

SEQ ID NO: 12679 - RNA, 18 nt, Homo sapiens
  source 1..18: mol_type = genomic RNA
acaccgcaagtgttcttt

SEQ ID NO: 12680 - RNA, 18 nt, Homo sapiens
  source 1..18: mol_type = genomic RNA
acctttcaagtgaaatgc

SEQ ID NO: 12681 - RNA, 18 nt, Homo sapiens
  source 1..18: mol_type = genomic RNA
ttcaagtgaaatgcaaca

SEQ ID NO: 12682 - RNA, 18 nt, Homo sapiens
  source 1..18: mol_type = genomic RNA
tcaagtgaaatgcaacat

SEQ ID NO: 12683 - RNA, 18 nt, Homo sapiens
  source 1..18: mol_type = genomic RNA
caagtgaaatgcaacatg

SEQ ID NO: 12684 - RNA, 18 nt, Homo sapiens
  source 1..18: mol_type = genomic RNA
aagtgaaatgcaacatgt

SEQ ID NO: 12685 - RNA, 18 nt, Homo sapiens
  source 1..18: mol_type = genomic RNA
agtgaaatgcaacatgtc

SEQ ID NO: 12686 - RNA, 18 nt, Homo sapiens
  source 1..18: mol_type = genomic RNA
gtgaaatgcaacatgtct

SEQ ID NO: 12687 - RNA, 18 nt, Homo sapiens
  source 1..18: mol_type = genomic RNA
tgaaatgcaacatgtctg

SEQ ID NO: 12688 - RNA, 18 nt, Homo sapiens
  source 1..18: mol_type = genomic RNA
gaaatgcaacatgtctga

SEQ ID NO: 12689 - RNA, 18 nt, Homo sapiens
  source 1..18: mol_type = genomic RNA
aaatgcaacatgtctgaa

SEQ ID NO: 12690 - RNA, 18 nt, Homo sapiens
  source 1..18: mol_type = genomic RNA
aatgcaacatgtctgaaa

SEQ ID NO: 12691 - RNA, 18 nt, Homo sapiens
  source 1..18: mol_type = genomic RNA
atgcaacatgtctgaaac

SEQ ID NO: 12692 - RNA, 18 nt, Homo sapiens
  source 1..18: mol_type = genomic RNA
tgcaacatgtctgaaacg

SEQ ID NO: 12693 - RNA, 18 nt, Homo sapiens
  source 1..18: mol_type = genomic RNA
gcaacatgtctgaaacgt

SEQ ID NO: 12694 - RNA, 18 nt, Homo sapiens
  source 1..18: mol_type = genomic RNA
caacatgtctgaaacgtg

SEQ ID NO: 12695 - RNA, 18 nt, Homo sapiens
  source 1..18: mol_type = genomic RNA
aacatgtctgaaacgtgg

SEQ ID NO: 12696 - RNA, 18 nt, Homo sapiens
  source 1..18: mol_type = genomic RNA
acatgtctgaaacgtggt

SEQ ID NO: 12697 - RNA, 18 nt, Homo sapiens
  source 1..18: mol_type = genomic RNA
catgtctgaaacgtggta

SEQ ID NO: 12698 - RNA, 18 nt, Homo sapiens
  source 1..18: mol_type = genomic RNA
atgtctgaaacgtggtat

SEQ ID NO: 12699 - RNA, 18 nt, Homo sapiens
  source 1..18: mol_type = genomic RNA
tgtctgaaacgtggtatc

SEQ ID NO: 12700 - RNA, 18 nt, Homo sapiens
  source 1..18: mol_type = genomic RNA
gtctgaaacgtggtatct

SEQ ID NO: 12701 - RNA, 18 nt, Homo sapiens
  source 1..18: mol_type = genomic RNA
tctgaaacgtggtatctg

SEQ ID NO: 12702 - RNA, 18 nt, Homo sapiens
  source 1..18: mol_type = genomic RNA
ctgaaacgtggtatctgg

SEQ ID NO: 12703 - RNA, 18 nt, Homo sapiens
  source 1..18: mol_type = genomic RNA
tgaaacgtggtatctgga

SEQ ID NO: 12704 - RNA, 18 nt, Homo sapiens
  source 1..18: mol_type = genomic RNA
gaaacgtggtatctggag

SEQ ID NO: 12705 - RNA, 18 nt, Homo sapiens
  source 1..18: mol_type = genomic RNA
aaacgtggtatctggaga

SEQ ID NO: 12706 - RNA, 18 nt, Homo sapiens
  source 1..18: mol_type = genomic RNA
aacgtggtatctggagag

SEQ ID NO: 12707 - RNA, 18 nt, Homo sapiens
  source 1..18: mol_type = genomic RNA
acgtggtatctggagagg

SEQ ID NO: 12708 - RNA, 18 nt, Homo sapiens
  source 1..18: mol_type = genomic RNA
cgtggtatctggagaggt

SEQ ID NO: 12709 - RNA, 18 nt, Homo sapiens
  source 1..18: mol_type = genomic RNA
gtggtatctggagaggtg

SEQ ID NO: 12710 - RNA, 18 nt, Homo sapiens
  source 1..18: mol_type = genomic RNA
tggtatctggagaggtga

SEQ ID NO: 12711 - RNA, 18 nt, Homo sapiens
  source 1..18: mol_type = genomic RNA
ggtatctggagaggtgag

SEQ ID NO: 12712 - RNA, 18 nt, Homo sapiens
  source 1..18: mol_type = genomic RNA
gtatctggagaggtgaga

SEQ ID NO: 12713 - RNA, 18 nt, Homo sapiens
  source 1..18: mol_type = genomic RNA
tatctggagaggtgagat

SEQ ID NO: 12714 - RNA, 18 nt, Homo sapiens
  source 1..18: mol_type = genomic RNA
atctggagaggtgagatg

SEQ ID NO: 12715 - RNA, 18 nt, Homo sapiens
  source 1..18: mol_type = genomic RNA
tctggagaggtgagatgg

SEQ ID NO: 12716 - RNA, 18 nt, Homo sapiens
  source 1..18: mol_type = genomic RNA
ctggagaggtgagatgga

SEQ ID NO: 12717 - RNA, 18 nt, Homo sapiens
  source 1..18: mol_type = genomic RNA
ggagaggtgagatggaca

SEQ ID NO: 12718 - RNA, 18 nt, Homo sapiens
  source 1..18: mol_type = genomic RNA
gagaggtgagatggacaa

SEQ ID NO: 12719 - RNA, 18 nt, Homo sapiens
  source 1..18: mol_type = genomic RNA
agaggtgagatggacaaa

SEQ ID NO: 12720 - RNA, 18 nt, Homo sapiens
  source 1..18: mol_type = genomic RNA
gaggtgagatggacaaag

SEQ ID NO: 12721 - RNA, 18 nt, Homo sapiens
  source 1..18: mol_type = genomic RNA
aggtgagatggacaaagg

SEQ ID NO: 12722 - RNA, 18 nt, Homo sapiens
  source 1..18: mol_type = genomic RNA
ggtgagatggacaaagga

SEQ ID NO: 12723 - RNA, 18 nt, Homo sapiens
  source 1..18: mol_type = genomic RNA
gtgagatggacaaaggag

SEQ ID NO: 12724 - RNA, 18 nt, Homo sapiens
  source 1..18: mol_type = genomic RNA
tgagatggacaaaggagc

SEQ ID NO: 12725 - RNA, 18 nt, Homo sapiens
  source 1..18: mol_type = genomic RNA
gatggacaaaggagccct

SEQ ID NO: 12726 - RNA, 18 nt, Homo sapiens
  source 1..18: mol_type = genomic RNA
atggacaaaggagccctt

SEQ ID NO: 12727 - RNA, 18 nt, Homo sapiens
  source 1..18: mol_type = genomic RNA
tggacaaaggagcccttg

SEQ ID NO: 12728 - RNA, 18 nt, Homo sapiens
  source 1..18: mol_type = genomic RNA
ggacaaaggagcccttgt

SEQ ID NO: 12729 - RNA, 18 nt, Homo sapiens
  source 1..18: mol_type = genomic RNA
gacaaaggagcccttgtt

SEQ ID NO: 12730 - RNA, 18 nt, Homo sapiens
  source 1..18: mol_type = genomic RNA
acaaaggagcccttgtta

SEQ ID NO: 12731 - RNA, 18 nt, Homo sapiens
  source 1..18: mol_type = genomic RNA
caaaggagcccttgttac

SEQ ID NO: 12732 - RNA, 18 nt, Homo sapiens
  source 1..18: mol_type = genomic RNA
aaaggagcccttgttact

SEQ ID NO: 12733 - RNA, 18 nt, Homo sapiens
  source 1..18: mol_type = genomic RNA
aaggagcccttgttactg

SEQ ID NO: 12734 - RNA, 18 nt, Homo sapiens
  source 1..18: mol_type = genomic RNA
aggagcccttgttactgc

SEQ ID NO: 12735 - RNA, 18 nt, Homo sapiens
  source 1..18: mol_type = genomic RNA
ggagcccttgttactgca

SEQ ID NO: 12736 - RNA, 18 nt, Homo sapiens
  source 1..18: mol_type = genomic RNA
gagcccttgttactgcac

SEQ ID NO: 12737 - RNA, 18 nt, Homo sapiens
  source 1..18: mol_type = genomic RNA
agcccttgttactgcacg

SEQ ID NO: 12738 - RNA, 18 nt, Homo sapiens
  source 1..18: mol_type = genomic RNA
gcccttgttactgcacgt

SEQ ID NO: 12739 - RNA, 18 nt, Homo sapiens
  source 1..18: mol_type = genomic RNA
cccttgttactgcacgtt

SEQ ID NO: 12740 - RNA, 18 nt, Homo sapiens
  source 1..18: mol_type = genomic RNA
tctccaaacttcaccttg

SEQ ID NO: 12741 - RNA, 18 nt, Homo sapiens
  source 1..18: mol_type = genomic RNA
ctccaaacttcaccttgc

SEQ ID NO: 12742 - RNA, 18 nt, Homo sapiens
  source 1..18: mol_type = genomic RNA
tccaaacttcaccttgca

SEQ ID NO: 12743 - RNA, 18 nt, Homo sapiens
  source 1..18: mol_type = genomic RNA
ccaaacttcaccttgcac

SEQ ID NO: 12744 - RNA, 18 nt, Homo sapiens
  source 1..18: mol_type = genomic RNA
caaacttcaccttgcaca

SEQ ID NO: 12745 - RNA, 18 nt, Homo sapiens
  source 1..18: mol_type = genomic RNA
aaacttcaccttgcacac

SEQ ID NO: 12746 - RNA, 18 nt, Homo sapiens
  source 1..18: mol_type = genomic RNA
aacttcaccttgcacaca

SEQ ID NO: 12747 - RNA, 18 nt, Homo sapiens
  source 1..18: mol_type = genomic RNA
acttcaccttgcacacag

SEQ ID NO: 12748 - RNA, 18 nt, Homo sapiens
  source 1..18: mol_type = genomic RNA
cttcaccttgcacacagt

SEQ ID NO: 12749 - RNA, 18 nt, Homo sapiens
  source 1..18: mol_type = genomic RNA
ttcaccttgcacacagta

SEQ ID NO: 12750 - RNA, 18 nt, Homo sapiens
  source 1..18: mol_type = genomic RNA
tcaccttgcacacagtaa

SEQ ID NO: 12751 - RNA, 18 nt, Homo sapiens
  source 1..18: mol_type = genomic RNA
gtaacagacaatgcacaa

SEQ ID NO: 12752 - RNA, 18 nt, Homo sapiens
  source 1..18: mol_type = genomic RNA
taacagacaatgcacaaa

SEQ ID NO: 12753 - RNA, 18 nt, Homo sapiens
  source 1..18: mol_type = genomic RNA
aacagacaatgcacaaat

SEQ ID NO: 12754 - RNA, 18 nt, Homo sapiens
  source 1..18: mol_type = genomic RNA
acagacaatgcacaaatc

SEQ ID NO: 12755 - RNA, 18 nt, Homo sapiens
  source 1..18: mol_type = genomic RNA
cagacaatgcacaaatcc

SEQ ID NO: 12756 - RNA, 18 nt, Homo sapiens
  source 1..18: mol_type = genomic RNA
agacaatgcacaaatcca

SEQ ID NO: 12757 - RNA, 18 nt, Homo sapiens
  source 1..18: mol_type = genomic RNA
gacaatgcacaaatccac

SEQ ID NO: 12758 - RNA, 18 nt, Homo sapiens
  source 1..18: mol_type = genomic RNA
acaatgcacaaatccact

SEQ ID NO: 12759 - RNA, 18 nt, Homo sapiens
  source 1..18: mol_type = genomic RNA
caatgcacaaatccactt

SEQ ID NO: 12760 - RNA, 18 nt, Homo sapiens
  source 1..18: mol_type = genomic RNA
aatgcacaaatccacttc

SEQ ID NO: 12761 - RNA, 18 nt, Homo sapiens
  source 1..18: mol_type = genomic RNA
atgcacaaatccacttcc

SEQ ID NO: 12762 - RNA, 18 nt, Homo sapiens
  source 1..18: mol_type = genomic RNA
tgcacaaatccacttcct

SEQ ID NO: 12763 - RNA, 18 nt, Homo sapiens
  source 1..18: mol_type = genomic RNA
gcacaaatccacttcctt

SEQ ID NO: 12764 - RNA, 18 nt, Homo sapiens
  source 1..18: mol_type = genomic RNA
aatccacttccttatgga

SEQ ID NO: 12765 - RNA, 18 nt, Homo sapiens
  source 1..18: mol_type = genomic RNA
atccacttccttatggac

SEQ ID NO: 12766 - RNA, 18 nt, Homo sapiens
  source 1..18: mol_type = genomic RNA
tccacttccttatggacg

SEQ ID NO: 12767 - RNA, 18 nt, Homo sapiens
  source 1..18: mol_type = genomic RNA
ccacttccttatggacgg

SEQ ID NO: 12768 - RNA, 18 nt, Homo sapiens
  source 1..18: mol_type = genomic RNA
cacttccttatggacgga

SEQ ID NO: 12769 - RNA, 18 nt, Homo sapiens
  source 1..18: mol_type = genomic RNA
acttccttatggacggaa

SEQ ID NO: 12770 - RNA, 18 nt, Homo sapiens
  source 1..18: mol_type = genomic RNA
cttccttatggacggaaa

SEQ ID NO: 12771 - RNA, 18 nt, Homo sapiens
  source 1..18: mol_type = genomic RNA
ttccttatggacggaaat

SEQ ID NO: 12772 - RNA, 18 nt, Homo sapiens
  source 1..18: mol_type = genomic RNA
tccttatggacggaaatt

SEQ ID NO: 12773 - RNA, 18 nt, Homo sapiens
  source 1..18: mol_type = genomic RNA
ccttatggacggaaattc

SEQ ID NO: 12774 - RNA, 18 nt, Homo sapiens
  source 1..18: mol_type = genomic RNA
cttatggacggaaattct

SEQ ID NO: 12775 - RNA, 18 nt, Homo sapiens
  source 1..18: mol_type = genomic RNA
ttatggacggaaattctg

SEQ ID NO: 12776 - RNA, 18 nt, Homo sapiens
  source 1..18: mol_type = genomic RNA
tatggacggaaattctga

SEQ ID NO: 12777 - RNA, 18 nt, Homo sapiens
  source 1..18: mol_type = genomic RNA
atggacggaaattctgaa

SEQ ID NO: 12778 - RNA, 18 nt, Homo sapiens
  source 1..18: mol_type = genomic RNA
tggacggaaattctgaaa

SEQ ID NO: 12779 - RNA, 18 nt, Homo sapiens
  source 1..18: mol_type = genomic RNA
ggacggaaattctgaaat

SEQ ID NO: 12780 - RNA, 18 nt, Homo sapiens
  source 1..18: mol_type = genomic RNA
gacggaaattctgaaatc

SEQ ID NO: 12781 - RNA, 18 nt, Homo sapiens
  source 1..18: mol_type = genomic RNA
acggaaattctgaaatcc

SEQ ID NO: 12782 - RNA, 18 nt, Homo sapiens
  source 1..18: mol_type = genomic RNA
cggaaattctgaaatcct

SEQ ID NO: 12783 - RNA, 18 nt, Homo sapiens
  source 1..18: mol_type = genomic RNA
aatccttttatgcctggc

SEQ ID NO: 12784 - RNA, 18 nt, Homo sapiens
  source 1..18: mol_type = genomic RNA
atccttttatgcctggcc

SEQ ID NO: 12785 - RNA, 18 nt, Homo sapiens
  source 1..18: mol_type = genomic RNA
tccttttatgcctggcct

SEQ ID NO: 12786 - RNA, 18 nt, Homo sapiens
  source 1..18: mol_type = genomic RNA
ccttttatgcctggcctt

SEQ ID NO: 12787 - RNA, 18 nt, Homo sapiens
  source 1..18: mol_type = genomic RNA
tttatgcctggcctttcc

SEQ ID NO: 12788 - RNA, 18 nt, Homo sapiens
  source 1..18: mol_type = genomic RNA
ttatgcctggcctttcca

SEQ ID NO: 12789 - RNA, 18 nt, Homo sapiens
  source 1..18: mol_type = genomic RNA
tatgcctggcctttccat

SEQ ID NO: 12790 - RNA, 18 nt, Homo sapiens
  source 1..18: mol_type = genomic RNA
atgcctggcctttccatc

SEQ ID NO: 12791 - RNA, 18 nt, Homo sapiens
  source 1..18: mol_type = genomic RNA
tgcctggcctttccatcc

SEQ ID NO: 12792 - RNA, 18 nt, Homo sapiens
  source 1..18: mol_type = genomic RNA
gcctggcctttccatcct

SEQ ID NO: 12793 - RNA, 18 nt, Homo sapiens
  source 1..18: mol_type = genomic RNA
cctggcctttccatcctt

SEQ ID NO: 12794 - RNA, 18 nt, Homo sapiens
  source 1..18: mol_type = genomic RNA
ctggcctttccatccttc

SEQ ID NO: 12795 - RNA, 18 nt, Homo sapiens
  source 1..18: mol_type = genomic RNA
tggcctttccatccttca

SEQ ID NO: 12796 - RNA, 18 nt, Homo sapiens
  source 1..18: mol_type = genomic RNA
ggcctttccatccttcaa

SEQ ID NO: 12797 - RNA, 18 nt, Homo sapiens
  source 1..18: mol_type = genomic RNA
gcctttccatccttcaac

SEQ ID NO: 12798 - RNA, 18 nt, Homo sapiens
  source 1..18: mol_type = genomic RNA
tccatccttcaacttccc

SEQ ID NO: 12799 - RNA, 18 nt, Homo sapiens
  source 1..18: mol_type = genomic RNA
ccatccttcaacttcccc

SEQ ID NO: 12800 - RNA, 18 nt, Homo sapiens
  source 1..18: mol_type = genomic RNA
catccttcaacttcccct

SEQ ID NO: 12801 - RNA, 18 nt, Homo sapiens
  source 1..18: mol_type = genomic RNA
ttcaacttcccctttccc

SEQ ID NO: 12802 - RNA, 18 nt, Homo sapiens
  source 1..18: mol_type = genomic RNA
tcaacttcccctttccca

SEQ ID NO: 12803 - RNA, 18 nt, Homo sapiens
  source 1..18: mol_type = genomic RNA
caacttcccctttcccat

SEQ ID NO: 12804 - RNA, 18 nt, Homo sapiens
  source 1..18: mol_type = genomic RNA
aacttcccctttcccatg

SEQ ID NO: 12805 - RNA, 18 nt, Homo sapiens
  source 1..18: mol_type = genomic RNA
acttcccctttcccatgc

SEQ ID NO: 12806 - RNA, 18 nt, Homo sapiens
  source 1..18: mol_type = genomic RNA
cttcccctttcccatgct

SEQ ID NO: 12807 - RNA, 18 nt, Homo sapiens
  source 1..18: mol_type = genomic RNA
ttcccctttcccatgctg

SEQ ID NO: 12808 - RNA, 18 nt, Homo sapiens
  source 1..18: mol_type = genomic RNA
tcccctttcccatgctgt

SEQ ID NO: 12809 - RNA, 18 nt, Homo sapiens
  source 1..18: mol_type = genomic RNA
cccctttcccatgctgtg

SEQ ID NO: 12810 - RNA, 18 nt, Homo sapiens
  source 1..18: mol_type = genomic RNA
ccctttcccatgctgtga

SEQ ID NO: 12811 - RNA, 18 nt, Homo sapiens
  source 1..18: mol_type = genomic RNA
cctttcccatgctgtgaa

SEQ ID NO: 12812 - RNA, 18 nt, Homo sapiens
  source 1..18: mol_type = genomic RNA
ctttcccatgctgtgaat

SEQ ID NO: 12813 - RNA, 18 nt, Homo sapiens
  source 1..18: mol_type = genomic RNA
tttcccatgctgtgaatg

SEQ ID NO: 12814 - RNA, 18 nt, Homo sapiens
  source 1..18: mol_type = genomic RNA
ttcccatgctgtgaatga

SEQ ID NO: 12815 - RNA, 18 nt, Homo sapiens
  source 1..18: mol_type = genomic RNA
tcccatgctgtgaatgat

SEQ ID NO: 12816 - RNA, 18 nt, Homo sapiens
  source 1..18: mol_type = genomic RNA
cccatgctgtgaatgatt

SEQ ID NO: 12817 - RNA, 18 nt, Homo sapiens
  source 1..18: mol_type = genomic RNA
ccatgctgtgaatgattg

SEQ ID NO: 12818 - RNA, 18 nt, Homo sapiens
  source 1..18: mol_type = genomic RNA
catgctgtgaatgattgt

SEQ ID NO: 12819 - RNA, 18 nt, Homo sapiens
  source 1..18: mol_type = genomic RNA
ttaatctcagtgacaggg

SEQ ID NO: 12820 - RNA, 18 nt, Homo sapiens
  source 1..18: mol_type = genomic RNA
taatctcagtgacagggg

SEQ ID NO: 12821 - RNA, 18 nt, Homo sapiens
  source 1..18: mol_type = genomic RNA
aatctcagtgacagggga

SEQ ID NO: 12822 - RNA, 18 nt, Homo sapiens
  source 1..18: mol_type = genomic RNA
atctcagtgacaggggaa

SEQ ID NO: 12823 - RNA, 18 nt, Homo sapiens
  source 1..18: mol_type = genomic RNA
tctcagtgacaggggaac

SEQ ID NO: 12824 - RNA, 18 nt, Homo sapiens
  source 1..18: mol_type = genomic RNA
ctcagtgacaggggaaca

SEQ ID NO: 12825 - RNA, 18 nt, Homo sapiens
  source 1..18: mol_type = genomic RNA
cagtgacaggggaacaca

SEQ ID NO: 12826 - RNA, 18 nt, Homo sapiens
  source 1..18: mol_type = genomic RNA
gggaacacaggtagctct

SEQ ID NO: 12827 - RNA, 18 nt, Homo sapiens
  source 1..18: mol_type = genomic RNA
ggaacacaggtagctcta

SEQ ID NO: 12828 - RNA, 18 nt, Homo sapiens
  source 1..18: mol_type = genomic RNA
gaacacaggtagctctaa

SEQ ID NO: 12829 - RNA, 18 nt, Homo sapiens
  source 1..18: mol_type = genomic RNA
aacacaggtagctctaat

SEQ ID NO: 12830 - RNA, 18 nt, Homo sapiens
  source 1..18: mol_type = genomic RNA
acacaggtagctctaata

SEQ ID NO: 12831 - RNA, 18 nt, Homo sapiens
  source 1..18: mol_type = genomic RNA
cacaggtagctctaatat

SEQ ID NO: 12832 - RNA, 18 nt, Homo sapiens
  source 1..18: mol_type = genomic RNA
acaggtagctctaatata

SEQ ID NO: 12833 - RNA, 18 nt, Homo sapiens
  source 1..18: mol_type = genomic RNA
caggtagctctaatatag

SEQ ID NO: 12834 - RNA, 18 nt, Homo sapiens
  source 1..18: mol_type = genomic RNA
aggtagctctaatatagc

SEQ ID NO: 12835 - RNA, 18 nt, Homo sapiens
  source 1..18: mol_type = genomic RNA
ggtagctctaatatagct

SEQ ID NO: 12836 - RNA, 18 nt, Homo sapiens
  source 1..18: mol_type = genomic RNA
gtagctctaatatagctg

SEQ ID NO: 12837 - RNA, 18 nt, Homo sapiens
  source 1..18: mol_type = genomic RNA
tagctctaatatagctgt

SEQ ID NO: 12838 - RNA, 18 nt, Homo sapiens
  source 1..18: mol_type = genomic RNA
agctctaatatagctgtg

SEQ ID NO: 12839 - RNA, 18 nt, Homo sapiens
  source 1..18: mol_type = genomic RNA
gctctaatatagctgtga

SEQ ID NO: 12840 - RNA, 18 nt, Homo sapiens
  source 1..18: mol_type = genomic RNA
ctctaatatagctgtgac

SEQ ID NO: 12841 - RNA, 18 nt, Homo sapiens
  source 1..18: mol_type = genomic RNA
tctaatatagctgtgact

SEQ ID NO: 12842 - RNA, 18 nt, Homo sapiens
  source 1..18: mol_type = genomic RNA
ctaatatagctgtgactg

SEQ ID NO: 12843 - RNA, 18 nt, Homo sapiens
  source 1..18: mol_type = genomic RNA
taatatagctgtgactga

SEQ ID NO: 12844 - RNA, 18 nt, Homo sapiens
  source 1..18: mol_type = genomic RNA
aatatagctgtgactgag

SEQ ID NO: 12845 - RNA, 18 nt, Homo sapiens
  source 1..18: mol_type = genomic RNA
atatagctgtgactgaga

SEQ ID NO: 12846 - RNA, 18 nt, Homo sapiens
  source 1..18: mol_type = genomic RNA
tatagctgtgactgagat

SEQ ID NO: 12847 - RNA, 18 nt, Homo sapiens
  source 1..18: mol_type = genomic RNA
tttccactgcattctagg

SEQ ID NO: 12848 - RNA, 18 nt, Homo sapiens
  source 1..18: mol_type = genomic RNA
ttccactgcattctagga

SEQ ID NO: 12849 - RNA, 18 nt, Homo sapiens
  source 1..18: mol_type = genomic RNA
tccactgcattctaggaa

SEQ ID NO: 12850 - RNA, 18 nt, Homo sapiens
  source 1..18: mol_type = genomic RNA
ccactgcattctaggaac

SEQ ID NO: 12851 - RNA, 18 nt, Homo sapiens
  source 1..18: mol_type = genomic RNA
cactgcattctaggaaca

SEQ ID NO: 12852 - RNA, 18 nt, Homo sapiens
  source 1..18: mol_type = genomic RNA
actgcattctaggaacag

SEQ ID NO: 12853 - RNA, 18 nt, Homo sapiens
  source 1..18: mol_type = genomic RNA
ctgcattctaggaacagt

SEQ ID NO: 12854 - RNA, 18 nt, Homo sapiens
  source 1..18: mol_type = genomic RNA
tgcattctaggaacagta

SEQ ID NO: 12855 - RNA, 18 nt, Homo sapiens
  source 1..18: mol_type = genomic RNA
gcattctaggaacagtaa

SEQ ID NO: 12856 - RNA, 18 nt, Homo sapiens
  source 1..18: mol_type = genomic RNA
cattctaggaacagtaag

SEQ ID NO: 12857 - RNA, 18 nt, Homo sapiens
  source 1..18: mol_type = genomic RNA
attctaggaacagtaaga

SEQ ID NO: 12858 - RNA, 18 nt, Homo sapiens
  source 1..18: mol_type = genomic RNA
ttctaggaacagtaagag

SEQ ID NO: 12859 - RNA, 18 nt, Homo sapiens
  source 1..18: mol_type = genomic RNA
tctaggaacagtaagagg

SEQ ID NO: 12860 - RNA, 18 nt, Homo sapiens
  source 1..18: mol_type = genomic RNA
ctaggaacagtaagagga

SEQ ID NO: 12861 - RNA, 18 nt, Homo sapiens
  source 1..18: mol_type = genomic RNA
taggaacagtaagaggac

SEQ ID NO: 12862 - RNA, 18 nt, Homo sapiens
  source 1..18: mol_type = genomic RNA
aggaacagtaagaggacc

SEQ ID NO: 12863 - RNA, 18 nt, Homo sapiens
  source 1..18: mol_type = genomic RNA
ggaacagtaagaggacct

SEQ ID NO: 12864 - RNA, 18 nt, Homo sapiens
  source 1..18: mol_type = genomic RNA
gaacagtaagaggacctt

SEQ ID NO: 12865 - RNA, 18 nt, Homo sapiens
  source 1..18: mol_type = genomic RNA
aacagtaagaggaccttg

SEQ ID NO: 12866 - RNA, 18 nt, Homo sapiens
  source 1..18: mol_type = genomic RNA
acagtaagaggaccttgt

SEQ ID NO: 12867 - RNA, 18 nt, Homo sapiens
  source 1..18: mol_type = genomic RNA
cagtaagaggaccttgtg

SEQ ID NO: 12868 - RNA, 18 nt, Homo sapiens
  source 1..18: mol_type = genomic RNA
agtaagaggaccttgtga

SEQ ID NO: 12869 - RNA, 18 nt, Homo sapiens
  source 1..18: mol_type = genomic RNA
gtaagaggaccttgtgag

SEQ ID NO: 12870 - RNA, 18 nt, Homo sapiens
  source 1..18: mol_type = genomic RNA
taagaggaccttgtgagt

SEQ ID NO: 12871 - RNA, 18 nt, Homo sapiens
  source 1..18: mol_type = genomic RNA
aagaggaccttgtgagtg

SEQ ID NO: 12872 - RNA, 18 nt, Homo sapiens
  source 1..18: mol_type = genomic RNA
agaggaccttgtgagtga

SEQ ID NO: 12873 - RNA, 18 nt, Homo sapiens
  source 1..18: mol_type = genomic RNA
gaggaccttgtgagtgaa

SEQ ID NO: 12874 - RNA, 18 nt, Homo sapiens
  source 1..18: mol_type = genomic RNA
aggaccttgtgagtgaat

SEQ ID NO: 12875 - RNA, 18 nt, Homo sapiens
  source 1..18: mol_type = genomic RNA
ggaccttgtgagtgaata

SEQ ID NO: 12876 - RNA, 18 nt, Homo sapiens
  source 1..18: mol_type = genomic RNA
gaccttgtgagtgaataa

SEQ ID NO: 12877 - RNA, 18 nt, Homo sapiens
  source 1..18: mol_type = genomic RNA
accttgtgagtgaataat

SEQ ID NO: 12878 - RNA, 18 nt, Homo sapiens
  source 1..18: mol_type = genomic RNA
ttccacattacagagtgg

SEQ ID NO: 12879 - RNA, 18 nt, Homo sapiens
  source 1..18: mol_type = genomic RNA
tccacattacagagtggg

SEQ ID NO: 12880 - RNA, 18 nt, Homo sapiens
  source 1..18: mol_type = genomic RNA
ccacattacagagtgggt

SEQ ID NO: 12881 - RNA, 18 nt, Homo sapiens
  source 1..18: mol_type = genomic RNA
cacattacagagtgggta

SEQ ID NO: 12882 - RNA, 18 nt, Homo sapiens
  source 1..18: mol_type = genomic RNA
acattacagagtgggtaa

SEQ ID NO: 12883 - RNA, 18 nt, Homo sapiens
  source 1..18: mol_type = genomic RNA
cattacagagtgggtaat

SEQ ID NO: 12884 - RNA, 18 nt, Homo sapiens
  source 1..18: mol_type = genomic RNA
attacagagtgggtaata

SEQ ID NO: 12885 - RNA, 18 nt, Homo sapiens
  source 1..18: mol_type = genomic RNA
ttacagagtgggtaataa

SEQ ID NO: 12886 - RNA, 18 nt, Homo sapiens
  source 1..18: mol_type = genomic RNA
tacagagtgggtaataag

SEQ ID NO: 12887 - RNA, 18 nt, Homo sapiens
  source 1..18: mol_type = genomic RNA
acagagtgggtaataagc

SEQ ID NO: 12888 - RNA, 18 nt, Homo sapiens
  source 1..18: mol_type = genomic RNA
cagagtgggtaataagca

SEQ ID NO: 12889 - RNA, 18 nt, Homo sapiens
  source 1..18: mol_type = genomic RNA
agagtgggtaataagcag

SEQ ID NO: 12890 - RNA, 18 nt, Homo sapiens
  source 1..18: mol_type = genomic RNA
gagtgggtaataagcaga

SEQ ID NO: 12891 - RNA, 18 nt, Homo sapiens
  source 1..18: mol_type = genomic RNA
agtgggtaataagcagat

SEQ ID NO: 12892 - RNA, 18 nt, Homo sapiens
  source 1..18: mol_type = genomic RNA
gtgggtaataagcagatt

SEQ ID NO: 12893 - RNA, 18 nt, Homo sapiens
  source 1..18: mol_type = genomic RNA
tgggtaataagcagatta

SEQ ID NO: 12894 - RNA, 18 nt, Homo sapiens
  source 1..18: mol_type = genomic RNA
gggtaataagcagattag

SEQ ID NO: 12895 - RNA, 18 nt, Homo sapiens
  source 1..18: mol_type = genomic RNA
ggtaataagcagattagt

SEQ ID NO: 12896 - RNA, 18 nt, Homo sapiens
  source 1..18: mol_type = genomic RNA
aagcagattagtaaaaac

SEQ ID NO: 12897 - RNA, 19 nt, Homo sapiens
  source 1..19: mol_type = genomic RNA
cctctctctgcccgcgtcc

SEQ ID NO: 12898 - RNA, 19 nt, Homo sapiens
  source 1..19: mol_type = genomic RNA
ctctctctgcccgcgtccg

SEQ ID NO: 12899 - RNA, 19 nt, Homo sapiens
  source 1..19: mol_type = genomic RNA
tctctctgcccgcgtccgt

SEQ ID NO: 12900 - RNA, 19 nt, Homo sapiens
  source 1..19: mol_type = genomic RNA
ctctctgcccgcgtccgtc

SEQ ID NO: 12901 - RNA, 19 nt, Homo sapiens
  source 1..19: mol_type = genomic RNA
tctctgcccgcgtccgtcc

SEQ ID NO: 12902 - RNA, 19 nt, Homo sapiens
  source 1..19: mol_type = genomic RNA
ctctgcccgcgtccgtccg

SEQ ID NO: 12903 - RNA, 19 nt, Homo sapiens
  source 1..19: mol_type = genomic RNA
tctgcccgcgtccgtccgt

SEQ ID NO: 12904 - RNA, 19 nt, Homo sapiens
  source 1..19: mol_type = genomic RNA
ctgcccgcgtccgtccgtg

SEQ ID NO: 12905 - RNA, 19 nt, Homo sapiens
  source 1..19: mol_type = genomic RNA
tgcccgcgtccgtccgtga

SEQ ID NO: 12906 - RNA, 19 nt, Homo sapiens
  source 1..19: mol_type = genomic RNA
gcccgcgtccgtccgtgaa

SEQ ID NO: 12907 - RNA, 19 nt, Homo sapiens
  source 1..19: mol_type = genomic RNA
cccgcgtccgtccgtgaaa

SEQ ID NO: 12908 - RNA, 19 nt, Homo sapiens
  source 1..19: mol_type = genomic RNA
ccgcgtccgtccgtgaaat

SEQ ID NO: 12909 - RNA, 19 nt, Homo sapiens
  source 1..19: mol_type = genomic RNA
cgcgtccgtccgtgaaatt

SEQ ID NO: 12910 - RNA, 19 nt, Homo sapiens
  source 1..19: mol_type = genomic RNA
gcgtccgtccgtgaaattc

SEQ ID NO: 12911 - RNA, 19 nt, Homo sapiens
  source 1..19: mol_type = genomic RNA
cgtccgtccgtgaaattcc

SEQ ID NO: 12912 - RNA, 19 nt, Homo sapiens
  source 1..19: mol_type = genomic RNA
gtccgtccgtgaaattccg

SEQ ID NO: 12913 - RNA, 19 nt, Homo sapiens
  source 1..19: mol_type = genomic RNA
tccgtccgtgaaattccgg

SEQ ID NO: 12914 - RNA, 19 nt, Homo sapiens
  source 1..19: mol_type = genomic RNA
ccgtccgtgaaattccggc

SEQ ID NO: 12915 - RNA, 19 nt, Homo sapiens
  source 1..19: mol_type = genomic RNA
cgtccgtgaaattccggcc

SEQ ID NO: 12916 - RNA, 19 nt, Homo sapiens
  source 1..19: mol_type = genomic RNA
gtccgtgaaattccggccg

SEQ ID NO: 12917 - RNA, 19 nt, Homo sapiens
  source 1..19: mol_type = genomic RNA
tccgtgaaattccggccgg

SEQ ID NO: 12918 - RNA, 19 nt, Homo sapiens
  source 1..19: mol_type = genomic RNA
ccgtgaaattccggccggg

SEQ ID NO: 12919 - RNA, 19 nt, Homo sapiens
  source 1..19: mol_type = genomic RNA
cgtgaaattccggccgggg

SEQ ID NO: 12920 - RNA, 19 nt, Homo sapiens
  source 1..19: mol_type = genomic RNA
aaattccggccggggctca

SEQ ID NO: 12921 - RNA, 19 nt, Homo sapiens
  source 1..19: mol_type = genomic RNA
ctcccgacaccctcggaca

SEQ ID NO: 12922 - RNA, 19 nt, Homo sapiens
  source 1..19: mol_type = genomic RNA
acggcgacggagactcgtt

SEQ ID NO: 12923 - RNA, 19 nt, Homo sapiens
  source 1..19: mol_type = genomic RNA
cggcgacggagactcgttt

SEQ ID NO: 12924 - RNA, 19 nt, Homo sapiens
  source 1..19: mol_type = genomic RNA
ggcgacggagactcgtttg

SEQ ID NO: 12925 - RNA, 19 nt, Homo sapiens
  source 1..19: mol_type = genomic RNA
gcgacggagactcgtttgg

SEQ ID NO: 12926 - RNA, 19 nt, Homo sapiens
  source 1..19: mol_type = genomic RNA
cgacggagactcgtttgga

SEQ ID NO: 12927 - RNA, 19 nt, Homo sapiens
  source 1..19: mol_type = genomic RNA
gacggagactcgtttggac

SEQ ID NO: 12928 - RNA, 19 nt, Homo sapiens
  source 1..19: mol_type = genomic RNA
ggccctgcgagcctgcttt

SEQ ID NO: 12929 - RNA, 19 nt, Homo sapiens
  source 1..19: mol_type = genomic RNA
gccctgcgagcctgctttg

SEQ ID NO: 12930 - RNA, 19 nt, Homo sapiens
  source 1..19: mol_type = genomic RNA
ccctgcgagcctgctttga

SEQ ID NO: 12931 - RNA, 19 nt, Homo sapiens
  source 1..19: mol_type = genomic RNA
cctgcgagcctgctttgag

SEQ ID NO: 12932 - RNA, 19 nt, Homo sapiens
  source 1..19: mol_type = genomic RNA
ctgcgagcctgctttgagc

SEQ ID NO: 12933 - RNA, 19 nt, Homo sapiens
  source 1..19: mol_type = genomic RNA
tgcgagcctgctttgagcg

SEQ ID NO: 12934 - RNA, 19 nt, Homo sapiens
  source 1..19: mol_type = genomic RNA
gcgagcctgctttgagcgg

SEQ ID NO: 12935 - RNA, 19 nt, Homo sapiens
  source 1..19: mol_type = genomic RNA
cgagcctgctttgagcgga

SEQ ID NO: 12936 - RNA, 19 nt, Homo sapiens
  source 1..19: mol_type = genomic RNA
gagcctgctttgagcggaa

SEQ ID NO: 12937 - RNA, 19 nt, Homo sapiens
  source 1..19: mol_type = genomic RNA
agcctgctttgagcggaac

SEQ ID NO: 12938 - RNA, 19 nt, Homo sapiens
  source 1..19: mol_type = genomic RNA
gcctgctttgagcggaacc

SEQ ID NO: 12939 - RNA, 19 nt, Homo sapiens
  source 1..19: mol_type = genomic RNA
cctgctttgagcggaaccc

SEQ ID NO: 12940 - RNA, 19 nt, Homo sapiens
  source 1..19: mol_type = genomic RNA
ctgctttgagcggaacccg

SEQ ID NO: 12941 - RNA, 19 nt, Homo sapiens
  source 1..19: mol_type = genomic RNA
tgctttgagcggaacccgt

SEQ ID NO: 12942 - RNA, 19 nt, Homo sapiens
  source 1..19: mol_type = genomic RNA
gctttgagcggaacccgta

SEQ ID NO: 12943 - RNA, 19 nt, Homo sapiens
  source 1..19: mol_type = genomic RNA
ctttgagcggaacccgtac

SEQ ID NO: 12944 - RNA, 19 nt, Homo sapiens
  source 1..19: mol_type = genomic RNA
tttgagcggaacccgtacc

SEQ ID NO: 12945 - RNA, 19 nt, Homo sapiens
  source 1..19: mol_type = genomic RNA
ttgagcggaacccgtaccc

SEQ ID NO: 12946 - RNA, 19 nt, Homo sapiens
  source 1..19: mol_type = genomic RNA
aacccgtacccgggcatcg

SEQ ID NO: 12947 - RNA, 19 nt, Homo sapiens
  source 1..19: mol_type = genomic RNA
gcccaggccatcggcattc

SEQ ID NO: 12948 - RNA, 19 nt, Homo sapiens
  source 1..19: mol_type = genomic RNA
cccaggccatcggcattcc

SEQ ID NO: 12949 - RNA, 19 nt, Homo sapiens
  source 1..19: mol_type = genomic RNA
gagcccagggtccagattt

SEQ ID NO: 12950 - RNA, 19 nt, Homo sapiens
  source 1..19: mol_type = genomic RNA
agcccagggtccagatttg

SEQ ID NO: 12951 - RNA, 19 nt, Homo sapiens
  source 1..19: mol_type = genomic RNA
gcccagggtccagatttgg

SEQ ID NO: 12952 - RNA, 19 nt, Homo sapiens
  source 1..19: mol_type = genomic RNA
cccagggtccagatttggt

SEQ ID NO: 12953 - RNA, 19 nt, Homo sapiens
  source 1..19: mol_type = genomic RNA
ccagggtccagatttggtt

SEQ ID NO: 12954 - RNA, 19 nt, Homo sapiens
  source 1..19: mol_type = genomic RNA
cagggtccagatttggttt

SEQ ID NO: 12955 - RNA, 19 nt, Homo sapiens
  source 1..19: mol_type = genomic RNA
agggtccagatttggtttc

SEQ ID NO: 12956 - RNA, 19 nt, Homo sapiens
  source 1..19: mol_type = genomic RNA
gggtccagatttggtttca

SEQ ID NO: 12957 - RNA, 19 nt, Homo sapiens
  source 1..19: mol_type = genomic RNA
ggtccagatttggtttcag

SEQ ID NO: 12958 - RNA, 19 nt, Homo sapiens
  source 1..19: mol_type = genomic RNA
ttggtttcagaatgagagg

SEQ ID NO: 12959 - RNA, 19 nt, Homo sapiens
  source 1..19: mol_type = genomic RNA
tggtttcagaatgagaggt

SEQ ID NO: 12960 - RNA, 19 nt, Homo sapiens
  source 1..19: mol_type = genomic RNA
ggtttcagaatgagaggtc

SEQ ID NO: 12961 - RNA, 19 nt, Homo sapiens
  source 1..19: mol_type = genomic RNA
gtttcagaatgagaggtca

SEQ ID NO: 12962 - RNA, 19 nt, Homo sapiens
  source 1..19: mol_type = genomic RNA
tttcagaatgagaggtcac

SEQ ID NO: 12963 - RNA, 19 nt, Homo sapiens
  source 1..19: mol_type = genomic RNA
ttcagaatgagaggtcacg

SEQ ID NO: 12964 - RNA, 19 nt, Homo sapiens
  source 1..19: mol_type = genomic RNA
tcagaatgagaggtcacgc

SEQ ID NO: 12965 - RNA, 19 nt, Homo sapiens
  source 1..19: mol_type = genomic RNA
cagaatgagaggtcacgcc

SEQ ID NO: 12966 - RNA, 19 nt, Homo sapiens
  source 1..19: mol_type = genomic RNA
agaatgagaggtcacgcca

SEQ ID NO: 12967 - RNA, 19 nt, Homo sapiens
  source 1..19: mol_type = genomic RNA
gaatgagaggtcacgccag

SEQ ID NO: 12968 - RNA, 19 nt, Homo sapiens
  source 1..19: mol_type = genomic RNA
aatgagaggtcacgccagc

SEQ ID NO: 12969 - RNA, 19 nt, Homo sapiens
  source 1..19: mol_type = genomic RNA
atgagaggtcacgccagct

SEQ ID NO: 12970 - RNA, 19 nt, Homo sapiens
  source 1..19: mol_type = genomic RNA
cctcccggagtccaggatt

SEQ ID NO: 12971 - RNA, 19 nt, Homo sapiens
  source 1..19: mol_type = genomic RNA
ctcccggagtccaggattc

SEQ ID NO: 12972 - RNA, 19 nt, Homo sapiens
  source 1..19: mol_type = genomic RNA
tcccggagtccaggattca

SEQ ID NO: 12973 - RNA, 19 nt, Homo sapiens
  source 1..19: mol_type = genomic RNA
cccggagtccaggattcag

SEQ ID NO: 12974 - RNA, 19 nt, Homo sapiens
  source 1..19: mol_type = genomic RNA
ccggagtccaggattcaga

SEQ ID NO: 12975 - RNA, 19 nt, Homo sapiens
  source 1..19: mol_type = genomic RNA
cggagtccaggattcagat

SEQ ID NO: 12976 - RNA, 19 nt, Homo sapiens
  source 1..19: mol_type = genomic RNA
ggagtccaggattcagatc

SEQ ID NO: 12977 - RNA, 19 nt, Homo sapiens
  source 1..19: mol_type = genomic RNA
gagtccaggattcagatct

SEQ ID NO: 12978 - RNA, 19 nt, Homo sapiens
  source 1..19: mol_type = genomic RNA
agtccaggattcagatctg

SEQ ID NO: 12979 - RNA, 19 nt, Homo sapiens
  source 1..19: mol_type = genomic RNA
gtccaggattcagatctgg

SEQ ID NO: 12980 - RNA, 19 nt, Homo sapiens
  source 1..19: mol_type = genomic RNA
tccaggattcagatctggt

SEQ ID NO: 12981 - RNA, 19 nt, Homo sapiens
  source 1..19: mol_type = genomic RNA
ccaggattcagatctggtt

SEQ ID NO: 12982 - RNA, 19 nt, Homo sapiens
  source 1..19: mol_type = genomic RNA
caggattcagatctggttt

SEQ ID NO: 12983 - RNA, 19 nt, Homo sapiens
  source 1..19: mol_type = genomic RNA
aggattcagatctggtttc

SEQ ID NO: 12984 - RNA, 19 nt, Homo sapiens
  source 1..19: mol_type = genomic RNA
ggattcagatctggtttca

SEQ ID NO: 12985 - RNA, 19 nt, Homo sapiens
  source 1..19: mol_type = genomic RNA
tcagatctggtttcagaat

SEQ ID NO: 12986 - RNA, 19 nt, Homo sapiens
  source 1..19: mol_type = genomic RNA
cagatctggtttcagaatc

SEQ ID NO: 12987 - RNA, 19 nt, Homo sapiens
  source 1..19: mol_type = genomic RNA
agatctggtttcagaatcg

SEQ ID NO: 12988 - RNA, 19 nt, Homo sapiens
  source 1..19: mol_type = genomic RNA
gatctggtttcagaatcga

SEQ ID NO: 12989 - RNA, 19 nt, Homo sapiens
  source 1..19: mol_type = genomic RNA
atctggtttcagaatcgaa

SEQ ID NO: 12990 - RNA, 19 nt, Homo sapiens
  source 1..19: mol_type = genomic RNA
tctggtttcagaatcgaag

SEQ ID NO: 12991 - RNA, 19 nt, Homo sapiens
  source 1..19: mol_type = genomic RNA
ctggtttcagaatcgaagg

SEQ ID NO: 12992 - RNA, 19 nt, Homo sapiens
  source 1..19: mol_type = genomic RNA
tggtttcagaatcgaaggg

SEQ ID NO: 12993 - RNA, 19 nt, Homo sapiens
  source 1..19: mol_type = genomic RNA
ggtttcagaatcgaagggc

SEQ ID NO: 12994 - RNA, 19 nt, Homo sapiens
  source 1..19: mol_type = genomic RNA
gtttcagaatcgaagggcc

SEQ ID NO: 12995 - RNA, 19 nt, Homo sapiens
  source 1..19: mol_type = genomic RNA
tttcagaatcgaagggcca

SEQ ID NO: 12996 - RNA, 19 nt, Homo sapiens
  source 1..19: mol_type = genomic RNA
ttcagaatcgaagggccag

SEQ ID NO: 12997 - RNA, 19 nt, Homo sapiens
  source 1..19: mol_type = genomic RNA
tcagaatcgaagggccagg

SEQ ID NO: 12998 - RNA, 19 nt, Homo sapiens
  source 1..19: mol_type = genomic RNA
gcagatgcaaggcatcccg

SEQ ID NO: 12999 - RNA, 19 nt, Homo sapiens
  source 1..19: mol_type = genomic RNA
cagatgcaaggcatcccgg

SEQ ID NO: 13000 - RNA, 19 nt, Homo sapiens
  source 1..19: mol_type = genomic RNA
cccctcagcgaggaagaat

SEQ ID NO: 13001 - RNA, 19 nt, Homo sapiens
  source 1..19: mol_type = genomic RNA
ccctcagcgaggaagaata

SEQ ID NO: 13002 - RNA, 19 nt, Homo sapiens
  source 1..19: mol_type = genomic RNA
cctcagcgaggaagaatac

SEQ ID NO: 13003 - RNA, 19 nt, Homo sapiens
  source 1..19: mol_type = genomic RNA
ctcagcgaggaagaatacc

SEQ ID NO: 13004 - RNA, 19 nt, Homo sapiens
  source 1..19: mol_type = genomic RNA
tcagcgaggaagaataccg

SEQ ID NO: 13005 - RNA, 19 nt, Homo sapiens
  source 1..19: mol_type = genomic RNA
cagcgaggaagaataccgg

SEQ ID NO: 13006 - RNA, 19 nt, Homo sapiens
  source 1..19: mol_type = genomic RNA
cgaggaagaataccgggct

SEQ ID NO: 13007 - RNA, 19 nt, Homo sapiens
  source 1..19: mol_type = genomic RNA
aggaagaataccgggctct

SEQ ID NO: 13008 - RNA, 19 nt, Homo sapiens
  source 1..19: mol_type = genomic RNA
ggaagaataccgggctctg

SEQ ID NO: 13009 - RNA, 19 nt, Homo sapiens
  source 1..19: mol_type = genomic RNA
gaagaataccgggctctgc

SEQ ID NO: 13010 - RNA, 19 nt, Homo sapiens
  source 1..19: mol_type = genomic RNA
aagaataccgggctctgct

SEQ ID NO: 13011 - RNA, 19 nt, Homo sapiens
  source 1..19: mol_type = genomic RNA
agaataccgggctctgctg

SEQ ID NO: 13012 - RNA, 19 nt, Homo sapiens
  source 1..19: mol_type = genomic RNA
gctctgctggaggagcttt

SEQ ID NO: 13013 - RNA, 19 nt, Homo sapiens
  source 1..19: mol_type = genomic RNA
ctctgctggaggagcttta

SEQ ID NO: 13014 - RNA, 19 nt, Homo sapiens
  source 1..19: mol_type = genomic RNA
tctgctggaggagctttag

SEQ ID NO: 13015 - RNA, 19 nt, Homo sapiens
  source 1..19: mol_type = genomic RNA
ctgctggaggagctttagg

SEQ ID NO: 13016 - RNA, 19 nt, Homo sapiens
  source 1..19: mol_type = genomic RNA
tgctggaggagctttagga

SEQ ID NO: 13017 - RNA, 19 nt, Homo sapiens
  source 1..19: mol_type = genomic RNA
gctggaggagctttaggac

SEQ ID NO: 13018 - RNA, 19 nt, Homo sapiens
  source 1..19: mol_type = genomic RNA
ctggaggagctttaggacg

SEQ ID NO: 13019 - RNA, 19 nt, Homo sapiens
  source 1..19: mol_type = genomic RNA
tggaggagctttaggacgc

SEQ ID NO: 13020 - RNA, 19 nt, Homo sapiens
  source 1..19: mol_type = genomic RNA
ggaggagctttaggacgcg

SEQ ID NO: 13021 - RNA, 19 nt, Homo sapiens
  source 1..19: mol_type = genomic RNA
gaggagctttaggacgcgg

SEQ ID NO: 13022 - RNA, 19 nt, Homo sapiens
  source 1..19: mol_type = genomic RNA
aggagctttaggacgcggg

SEQ ID NO: 13023 - RNA, 19 nt, Homo sapiens
  source 1..19: mol_type = genomic RNA
gagctttaggacgcggggt

SEQ ID NO: 13024 - RNA, 19 nt, Homo sapiens
  source 1..19: mol_type = genomic RNA
agctttaggacgcggggtt

SEQ ID NO: 13025 - RNA, 19 nt, Homo sapiens
  source 1..19: mol_type = genomic RNA
gctttaggacgcggggttg

SEQ ID NO: 13026 - RNA, 19 nt, Homo sapiens
  source 1..19: mol_type = genomic RNA
ctttaggacgcggggttgg

SEQ ID NO: 13027 - RNA, 19 nt, Homo sapiens
  source 1..19: mol_type = genomic RNA
tttaggacgcggggttggg

SEQ ID NO: 13028 - RNA, 19 nt, Homo sapiens
  source 1..19: mol_type = genomic RNA
cagggcggtggcctctctt

SEQ ID NO: 13029 - RNA, 19 nt, Homo sapiens
  source 1..19: mol_type = genomic RNA
agggcggtggcctctcttt

SEQ ID NO: 13030 - RNA, 19 nt, Homo sapiens
  source 1..19: mol_type = genomic RNA
gggcggtggcctctctttc

SEQ ID NO: 13031 - RNA, 19 nt, Homo sapiens
  source 1..19: mol_type = genomic RNA
ggcggtggcctctctttcg

SEQ ID NO: 13032 - RNA, 19 nt, Homo sapiens
  source 1..19: mol_type = genomic RNA
gcggtggcctctctttcgc

SEQ ID NO: 13033 - RNA, 19 nt, Homo sapiens
  source 1..19: mol_type = genomic RNA
cggtggcctctctttcgcg

SEQ ID NO: 13034 - RNA, 19 nt, Homo sapiens
  source 1..19: mol_type = genomic RNA
ggtggcctctctttcgcgg

SEQ ID NO: 13035 - RNA, 19 nt, Homo sapiens
  source 1..19: mol_type = genomic RNA
gtggcctctctttcgcggg

SEQ ID NO: 13036 - RNA, 19 nt, Homo sapiens
  source 1..19: mol_type = genomic RNA
tggcctctctttcgcgggg

SEQ ID NO: 13037 - RNA, 19 nt, Homo sapiens
  source 1..19: mol_type = genomic RNA
ggcctctctttcgcgggga

SEQ ID NO: 13038 - RNA, 19 nt, Homo sapiens
  source 1..19: mol_type = genomic RNA
gcctctctttcgcggggaa

SEQ ID NO: 13039 - RNA, 19 nt, Homo sapiens
  source 1..19: mol_type = genomic RNA
cctctctttcgcggggaac

SEQ ID NO: 13040 - RNA, 19 nt, Homo sapiens
  source 1..19: mol_type = genomic RNA
ctctctttcgcggggaaca

SEQ ID NO: 13041 - RNA, 19 nt, Homo sapiens
  source 1..19: mol_type = genomic RNA
tctctttcgcggggaacac

SEQ ID NO: 13042 - RNA, 19 nt, Homo sapiens
  source 1..19: mol_type = genomic RNA
ctctttcgcggggaacacc

SEQ ID NO: 13043 - RNA, 19 nt, Homo sapiens
  source 1..19: mol_type = genomic RNA
tctttcgcggggaacacct

SEQ ID NO: 13044 - RNA, 19 nt, Homo sapiens
  source 1..19: mol_type = genomic RNA
ctttcgcggggaacacctg

SEQ ID NO: 13045 - RNA, 19 nt, Homo sapiens
  source 1..19: mol_type = genomic RNA
tttcgcggggaacacctgg

SEQ ID NO: 13046 - RNA, 19 nt, Homo sapiens
  source 1..19: mol_type = genomic RNA
ggcctgggattcctgcctt

SEQ ID NO: 13047 - RNA, 19 nt, Homo sapiens
  source 1..19: mol_type = genomic RNA
gcctgggattcctgccttc

SEQ ID NO: 13048 - RNA, 19 nt, Homo sapiens
  source 1..19: mol_type = genomic RNA
cctgggattcctgccttct

SEQ ID NO: 13049 - RNA, 19 nt, Homo sapiens
  source 1..19: mol_type = genomic RNA
ctgggattcctgccttcta

SEQ ID NO: 13050 - RNA, 19 nt, Homo sapiens
  source 1..19: mol_type = genomic RNA
tgggattcctgccttctag

SEQ ID NO: 13051 - RNA, 19 nt, Homo sapiens
  source 1..19: mol_type = genomic RNA
gggattcctgccttctagg

SEQ ID NO: 13052 - RNA, 19 nt, Homo sapiens
  source 1..19: mol_type = genomic RNA
ggattcctgccttctaggt

SEQ ID NO: 13053 - RNA, 19 nt, Homo sapiens
  source 1..19: mol_type = genomic RNA
gattcctgccttctaggtc

SEQ ID NO: 13054 - RNA, 19 nt, Homo sapiens
  source 1..19: mol_type = genomic RNA
attcctgccttctaggtct

SEQ ID NO: 13055 - RNA, 19 nt, Homo sapiens
  source 1..19: mol_type = genomic RNA
ttctttcctgggcatcccg

SEQ ID NO: 13056 - RNA, 19 nt, Homo sapiens
  source 1..19: mol_type = genomic RNA
tctttcctgggcatcccgg

SEQ ID NO: 13057 - RNA, 19 nt, Homo sapiens
  source 1..19: mol_type = genomic RNA
ctttcctgggcatcccggg

SEQ ID NO: 13058 - RNA, 19 nt, Homo sapiens
  source 1..19: mol_type = genomic RNA
tttcctgggcatcccgggg

SEQ ID NO: 13059 - RNA, 19 nt, Homo sapiens
  source 1..19: mol_type = genomic RNA
cctggcggtcaaaagcata

SEQ ID NO: 13060 - RNA, 19 nt, Homo sapiens
  source 1..19: mol_type = genomic RNA
ctggcggtcaaaagcatac

SEQ ID NO: 13061 - RNA, 19 nt, Homo sapiens
  source 1..19: mol_type = genomic RNA
tggcggtcaaaagcatacc

SEQ ID NO: 13062 - RNA, 19 nt, Homo sapiens
  source 1..19: mol_type = genomic RNA
ggcggtcaaaagcatacct

SEQ ID NO: 13063 - RNA, 19 nt, Homo sapiens
  source 1..19: mol_type = genomic RNA
gcggtcaaaagcatacctc

SEQ ID NO: 13064 - RNA, 19 nt, Homo sapiens
  source 1..19: mol_type = genomic RNA
cggtcaaaagcatacctct

SEQ ID NO: 13065 - RNA, 19 nt, Homo sapiens
  source 1..19: mol_type = genomic RNA
ggtcaaaagcatacctctg

SEQ ID NO: 13066 - RNA, 19 nt, Homo sapiens
  source 1..19: mol_type = genomic RNA
gtcaaaagcatacctctgt

SEQ ID NO: 13067 - RNA, 19 nt, Homo sapiens
  source 1..19: mol_type = genomic RNA
tcaaaagcatacctctgtc

SEQ ID NO: 13068 - RNA, 19 nt, Homo sapiens
  source 1..19: mol_type = genomic RNA
caaaagcatacctctgtct

SEQ ID NO: 13069 - RNA, 19 nt, Homo sapiens
  source 1..19: mol_type = genomic RNA
aaaagcatacctctgtctg

SEQ ID NO: 13070 - RNA, 19 nt, Homo sapiens
  source 1..19: mol_type = genomic RNA
aaagcatacctctgtctgt

SEQ ID NO: 13071 - RNA, 19 nt, Homo sapiens
  source 1..19: mol_type = genomic RNA
aagcatacctctgtctgtc

SEQ ID NO: 13072 - RNA, 19 nt, Homo sapiens
  source 1..19: mol_type = genomic RNA
agcatacctctgtctgtct

SEQ ID NO: 13073 - RNA, 19 nt, Homo sapiens
  source 1..19: mol_type = genomic RNA
gcatacctctgtctgtctt

SEQ ID NO: 13074 - RNA, 19 nt, Homo sapiens
  source 1..19: mol_type = genomic RNA
tacctctgtctgtctttgc

SEQ ID NO: 13075 - RNA, 19 nt, Homo sapiens
  source 1..19: mol_type = genomic RNA
acctctgtctgtctttgcc

SEQ ID NO: 13076 - RNA, 19 nt, Homo sapiens
  source 1..19: mol_type = genomic RNA
cctctgtctgtctttgccc

SEQ ID NO: 13077 - RNA, 19 nt, Homo sapiens
  source 1..19: mol_type = genomic RNA
ctctgtctgtctttgcccg

SEQ ID NO: 13078 - RNA, 19 nt, Homo sapiens
  source 1..19: mol_type = genomic RNA
tctgtctgtctttgcccgc

SEQ ID NO: 13079 - RNA, 19 nt, Homo sapiens
  source 1..19: mol_type = genomic RNA
ctgtctgtctttgcccgct

SEQ ID NO: 13080 - RNA, 19 nt, Homo sapiens
  source 1..19: mol_type = genomic RNA
tgtctgtctttgcccgctt

SEQ ID NO: 13081 - RNA, 19 nt, Homo sapiens
  source 1..19: mol_type = genomic RNA
gtctgtctttgcccgcttc

SEQ ID NO: 13082 - RNA, 19 nt, Homo sapiens
  source 1..19: mol_type = genomic RNA
tctgtctttgcccgcttcc

SEQ ID NO: 13083 - RNA, 19 nt, Homo sapiens
  source 1..19: mol_type = genomic RNA
ctgtctttgcccgcttcct

SEQ ID NO: 13084 - RNA, 19 nt, Homo sapiens
  source 1..19: mol_type = genomic RNA
tgtctttgcccgcttcctg

SEQ ID NO: 13085 - RNA, 19 nt, Homo sapiens
  source 1..19: mol_type = genomic RNA
gtctttgcccgcttcctgg

SEQ ID NO: 13086 - RNA, 19 nt, Homo sapiens
  source 1..19: mol_type = genomic RNA
tctttgcccgcttcctggc

SEQ ID NO: 13087 - RNA, 19 nt, Homo sapiens
  source 1..19: mol_type = genomic RNA
ctttgcccgcttcctggct

SEQ ID NO: 13088 - RNA, 19 nt, Homo sapiens
  source 1..19: mol_type = genomic RNA
tttgcccgcttcctggcta

SEQ ID NO: 13089 - RNA, 19 nt, Homo sapiens
  source 1..19: mol_type = genomic RNA
ttgcccgcttcctggctag

SEQ ID NO: 13090 - RNA, 19 nt, Homo sapiens
  source 1..19: mol_type = genomic RNA
tgcccgcttcctggctaga

SEQ ID NO: 13091 - RNA, 19 nt, Homo sapiens
  source 1..19: mol_type = genomic RNA
cccgcttcctggctagacc

SEQ ID NO: 13092 - RNA, 19 nt, Homo sapiens
  source 1..19: mol_type = genomic RNA
ccgcttcctggctagacct

SEQ ID NO: 13093 - RNA, 19 nt, Homo sapiens
  source 1..19: mol_type = genomic RNA
cgcttcctggctagacctg

SEQ ID NO: 13094 - RNA, 19 nt, Homo sapiens
  source 1..19: mol_type = genomic RNA
gcttcctggctagacctgc

SEQ ID NO: 13095 - RNA, 19 nt, Homo sapiens
  source 1..19: mol_type = genomic RNA
cttcctggctagacctgcg

SEQ ID NO: 13096 - RNA, 19 nt, Homo sapiens
  source 1..19: mol_type = genomic RNA
cgtgcaagggagctcgctg

SEQ ID NO: 13097 - RNA, 19 nt, Homo sapiens
  source 1..19: mol_type = genomic RNA
gagctcgctggcctctctg

SEQ ID NO: 13098 - RNA, 19 nt, Homo sapiens
  source 1..19: mol_type = genomic RNA
agctcgctggcctctctgt

SEQ ID NO: 13099 - RNA, 19 nt, Homo sapiens
  source 1..19: mol_type = genomic RNA
gctcgctggcctctctgtg

SEQ ID NO: 13100 - RNA, 19 nt, Homo sapiens
  source 1..19: mol_type = genomic RNA
ctcgctggcctctctgtgc

SEQ ID NO: 13101 - RNA, 19 nt, Homo sapiens
  source 1..19: mol_type = genomic RNA
ctggcctctctgtgccctt

SEQ ID NO: 13102 - RNA, 19 nt, Homo sapiens
  source 1..19: mol_type = genomic RNA
tggcctctctgtgcccttg

SEQ ID NO: 13103 - RNA, 19 nt, Homo sapiens
  source 1..19: mol_type = genomic RNA
ggcctctctgtgcccttgt

SEQ ID NO: 13104 - RNA, 19 nt, Homo sapiens
  source 1..19: mol_type = genomic RNA
gcctctctgtgcccttgtt

SEQ ID NO: 13105 - RNA, 19 nt, Homo sapiens
  source 1..19: mol_type = genomic RNA
tccgtgaaattctggctga

SEQ ID NO: 13106 - RNA, 19 nt, Homo sapiens
  source 1..19: mol_type = genomic RNA
ccgtgaaattctggctgaa

SEQ ID NO: 13107 - RNA, 19 nt, Homo sapiens
  source 1..19: mol_type = genomic RNA
cgtgaaattctggctgaat

SEQ ID NO: 13108 - RNA, 19 nt, Homo sapiens
  source 1..19: mol_type = genomic RNA
gtgaaattctggctgaatg

SEQ ID NO: 13109 - RNA, 19 nt, Homo sapiens
  source 1..19: mol_type = genomic RNA
tgaaattctggctgaatgt

SEQ ID NO: 13110 - RNA, 19 nt, Homo sapiens
  source 1..19: mol_type = genomic RNA
gaaattctggctgaatgtc

SEQ ID NO: 13111 - RNA, 19 nt, Homo sapiens
  source 1..19: mol_type = genomic RNA
aaattctggctgaatgtct

SEQ ID NO: 13112 - RNA, 19 nt, Homo sapiens
  source 1..19: mol_type = genomic RNA
aattctggctgaatgtctc

SEQ ID NO: 13113 - RNA, 19 nt, Homo sapiens
  source 1..19: mol_type = genomic RNA
attctggctgaatgtctcc

SEQ ID NO: 13114 - RNA, 19 nt, Homo sapiens
  source 1..19: mol_type = genomic RNA
ttctggctgaatgtctccc

SEQ ID NO: 13115 - RNA, 19 nt, Homo sapiens
  source 1..19: mol_type = genomic RNA
tctggctgaatgtctcccc

SEQ ID NO: 13116 - RNA, 19 nt, Homo sapiens
  source 1..19: mol_type = genomic RNA
ctggctgaatgtctccccc

SEQ ID NO: 13117 - RNA, 19 nt, Homo sapiens
  source 1..19: mol_type = genomic RNA
tggctgaatgtctcccccc

SEQ ID NO: 13118 - RNA, 19 nt, Homo sapiens
  source 1..19: mol_type = genomic RNA
ggctgaatgtctcccccca

SEQ ID NO: 13119 - RNA, 19 nt, Homo sapiens
  source 1..19: mol_type = genomic RNA
gctgaatgtctccccccac

SEQ ID NO: 13120 - RNA, 19 nt, Homo sapiens
  source 1..19: mol_type = genomic RNA
ctgaatgtctccccccacc

SEQ ID NO: 13121 - RNA, 19 nt, Homo sapiens
  source 1..19: mol_type = genomic RNA
tgaatgtctccccccacct

SEQ ID NO: 13122 - RNA, 19 nt, Homo sapiens
  source 1..19: mol_type = genomic RNA
gaatgtctccccccacctt

SEQ ID NO: 13123 - RNA, 19 nt, Homo sapiens
  source 1..19: mol_type = genomic RNA
aatgtctccccccaccttc

SEQ ID NO: 13124 - RNA, 19 nt, Homo sapiens
  source 1..19: mol_type = genomic RNA
atgtctccccccaccttcc

SEQ ID NO: 13125 - RNA, 19 nt, Homo sapiens
  source 1..19: mol_type = genomic RNA
tgtctccccccaccttccg

SEQ ID NO: 13126 - RNA, 19 nt, Homo sapiens
  source 1..19: mol_type = genomic RNA
gtctccccccaccttccga

SEQ ID NO: 13127 - RNA, 19 nt, Homo sapiens
  source 1..19: mol_type = genomic RNA
tctccccccaccttccgac

SEQ ID NO: 13128 - RNA, 19 nt, Homo sapiens
  source 1..19: mol_type = genomic RNA
ctccccccaccttccgacg

SEQ ID NO: 13129 - RNA, 19 nt, Homo sapiens
  source 1..19: mol_type = genomic RNA
ccccccaccttccgacgct

SEQ ID NO: 13130 - RNA, 19 nt, Homo sapiens
  source 1..19: mol_type = genomic RNA
cccccaccttccgacgctg

SEQ ID NO: 13131 - RNA, 19 nt, Homo sapiens
  source 1..19: mol_type = genomic RNA
ccccaccttccgacgctgt

SEQ ID NO: 13132 - RNA, 19 nt, Homo sapiens
  source 1..19: mol_type = genomic RNA
cccaccttccgacgctgtc

SEQ ID NO: 13133 - RNA, 19 nt, Homo sapiens
  source 1..19: mol_type = genomic RNA
ccaccttccgacgctgtct

SEQ ID NO: 13134 - RNA, 19 nt, Homo sapiens
  source 1..19: mol_type = genomic RNA
caccttccgacgctgtcta

SEQ ID NO: 13135 - RNA, 19 nt, Homo sapiens
  source 1..19: mol_type = genomic RNA
accttccgacgctgtctag

SEQ ID NO: 13136 - RNA, 19 nt, Homo sapiens
  source 1..19: mol_type = genomic RNA
ccttccgacgctgtctagg

SEQ ID NO: 13137 - RNA, 19 nt, Homo sapiens
  source 1..19: mol_type = genomic RNA
cttccgacgctgtctaggc

SEQ ID NO: 13138 - RNA, 19 nt, Homo sapiens
  source 1..19: mol_type = genomic RNA
ttccgacgctgtctaggca

SEQ ID NO: 13139 - RNA, 19 nt, Homo sapiens
  source 1..19: mol_type = genomic RNA
tccgacgctgtctaggcaa

SEQ ID NO: 13140 - RNA, 19 nt, Homo sapiens
  source 1..19: mol_type = genomic RNA
ccgacgctgtctaggcaaa

SEQ ID NO: 13141 - RNA, 19 nt, Homo sapiens
  source 1..19: mol_type = genomic RNA
cgacgctgtctaggcaaac

SEQ ID NO: 13142 - RNA, 19 nt, Homo sapiens
  source 1..19: mol_type = genomic RNA
gacgctgtctaggcaaacc

SEQ ID NO: 13143 - RNA, 19 nt, Homo sapiens
  source 1..19: mol_type = genomic RNA
acgctgtctaggcaaacct

SEQ ID NO: 13144 - RNA, 19 nt, Homo sapiens
  source 1..19: mol_type = genomic RNA
cgctgtctaggcaaacctg

SEQ ID NO: 13145 - RNA, 19 nt, Homo sapiens
  source 1..19: mol_type = genomic RNA
gctgtctaggcaaacctgg

SEQ ID NO: 13146 - RNA, 19 nt, Homo sapiens
  source 1..19: mol_type = genomic RNA
ctgtctaggcaaacctgga

SEQ ID NO: 13147 - RNA, 19 nt, Homo sapiens
  source 1..19: mol_type = genomic RNA
tgtctaggcaaacctggat

SEQ ID NO: 13148 - RNA, 19 nt, Homo sapiens
  source 1..19: mol_type = genomic RNA
gtctaggcaaacctggatt

SEQ ID NO: 13149 - RNA, 19 nt, Homo sapiens
  source 1..19: mol_type = genomic RNA
tctaggcaaacctggatta

SEQ ID NO: 13150 - RNA, 19 nt, Homo sapiens
  source 1..19: mol_type = genomic RNA
ctaggcaaacctggattag

SEQ ID NO: 13151 - RNA, 19 nt, Homo sapiens
  source 1..19: mol_type = genomic RNA
taggcaaacctggattaga

SEQ ID NO: 13152 - RNA, 19 nt, Homo sapiens
  source 1..19: mol_type = genomic RNA
aggcaaacctggattagag

SEQ ID NO: 13153 - RNA, 19 nt, Homo sapiens
  source 1..19: mol_type = genomic RNA
ggcaaacctggattagagt

SEQ ID NO: 13154 - RNA, 19 nt, Homo sapiens
  source 1..19: mol_type = genomic RNA
gcaaacctggattagagtt

SEQ ID NO: 13155 - RNA, 19 nt, Homo sapiens
  source 1..19: mol_type = genomic RNA
caaacctggattagagtta

SEQ ID NO: 13156 - RNA, 19 nt, Homo sapiens
  source 1..19: mol_type = genomic RNA
aaacctggattagagttac

SEQ ID NO: 13157 - RNA, 19 nt, Homo sapiens
  source 1..19: mol_type = genomic RNA
aacctggattagagttaca

SEQ ID NO: 13158 - RNA, 19 nt, Homo sapiens
  source 1..19: mol_type = genomic RNA
acctggattagagttacat

SEQ ID NO: 13159 - RNA, 19 nt, Homo sapiens
  source 1..19: mol_type = genomic RNA
cctggattagagttacatc

SEQ ID NO: 13160 - RNA, 19 nt, Homo sapiens
  source 1..19: mol_type = genomic RNA
ctggattagagttacatct

SEQ ID NO: 13161 - RNA, 19 nt, Homo sapiens
  source 1..19: mol_type = genomic RNA
tggattagagttacatctc

SEQ ID NO: 13162 - RNA, 19 nt, Homo sapiens
  source 1..19: mol_type = genomic RNA
ggattagagttacatctcc

SEQ ID NO: 13163 - RNA, 19 nt, Homo sapiens
  source 1..19: mol_type = genomic RNA
ttagagttacatctcctgg

SEQ ID NO: 13164 - RNA, 19 nt, Homo sapiens
  source 1..19: mol_type = genomic RNA
tagagttacatctcctgga

SEQ ID NO: 13165 - RNA, 19 nt, Homo sapiens
  source 1..19: mol_type = genomic RNA
agagttacatctcctggat

SEQ ID NO: 13166 - RNA, 19 nt, Homo sapiens
  source 1..19: mol_type = genomic RNA
gagttacatctcctggatg

SEQ ID NO: 13167 - RNA, 19 nt, Homo sapiens
  source 1..19: mol_type = genomic RNA
agttacatctcctggatga

SEQ ID NO: 13168 - RNA, 19 nt, Homo sapiens
  source 1..19: mol_type = genomic RNA
gttacatctcctggatgat

SEQ ID NO: 13169 - RNA, 19 nt, Homo sapiens
  source 1..19: mol_type = genomic RNA
ttacatctcctggatgatt

SEQ ID NO: 13170 - RNA, 19 nt, Homo sapiens
  source 1..19: mol_type = genomic RNA
tacatctcctggatgatta

SEQ ID NO: 13171 - RNA, 19 nt, Homo sapiens
  source 1..19: mol_type = genomic RNA
acatctcctggatgattag

SEQ ID NO: 13172 - RNA, 19 nt, Homo sapiens
  source 1..19: mol_type = genomic RNA
catctcctggatgattagt

SEQ ID NO: 13173 - RNA, 19 nt, Homo sapiens
  source 1..19: mol_type = genomic RNA
atctcctggatgattagtt

SEQ ID NO: 13174 - RNA, 19 nt, Homo sapiens
  source 1..19: mol_type = genomic RNA
tctcctggatgattagttc

SEQ ID NO: 13175 - RNA, 19 nt, Homo sapiens
  source 1..19: mol_type = genomic RNA
ctcctggatgattagttca

SEQ ID NO: 13176 - RNA, 19 nt, Homo sapiens
  source 1..19: mol_type = genomic RNA
tcctggatgattagttcag

SEQ ID NO: 13177 - RNA, 19 nt, Homo sapiens
  source 1..19: mol_type = genomic RNA
cctggatgattagttcaga

SEQ ID NO: 13178 - RNA, 19 nt, Homo sapiens
  source 1..19: mol_type = genomic RNA
ctggatgattagttcagag

SEQ ID NO: 13179 - RNA, 19 nt, Homo sapiens
  source 1..19: mol_type = genomic RNA
tggatgattagttcagaga

SEQ ID NO: 13180 - RNA, 19 nt, Homo sapiens
  source 1..19: mol_type = genomic RNA
ggatgattagttcagagat

SEQ ID NO: 13181 - RNA, 19 nt, Homo sapiens
  source 1..19: mol_type = genomic RNA
aaaatgccccctccctgtg

SEQ ID NO: 13182 - RNA, 19 nt, Homo sapiens
  source 1..19: mol_type = genomic RNA
aaatgccccctccctgtgg

SEQ ID NO: 13183 - RNA, 19 nt, Homo sapiens
  source 1..19: mol_type = genomic RNA
ccccctccctgtggatcct

SEQ ID NO: 13184 - RNA, 19 nt, Homo sapiens
  source 1..19: mol_type = genomic RNA
cccctccctgtggatccta

SEQ ID NO: 13185 - RNA, 19 nt, Homo sapiens
  source 1..19: mol_type = genomic RNA
ccctccctgtggatcctat

SEQ ID NO: 13186 - RNA, 19 nt, Homo sapiens
  source 1..19: mol_type = genomic RNA
cctccctgtggatcctata

SEQ ID NO: 13187 - RNA, 19 nt, Homo sapiens
  source 1..19: mol_type = genomic RNA
ctccctgtggatcctatag

SEQ ID NO: 13188 - RNA, 19 nt, Homo sapiens
  source 1..19: mol_type = genomic RNA
tccctgtggatcctataga

SEQ ID NO: 13189 - RNA, 19 nt, Homo sapiens
  source 1..19: mol_type = genomic RNA
ccctgtggatcctatagaa

SEQ ID NO: 13190 - RNA, 19 nt, Homo sapiens
  source 1..19: mol_type = genomic RNA
cctgtggatcctatagaag

SEQ ID NO: 13191 - RNA, 19 nt, Homo sapiens
  source 1..19: mol_type = genomic RNA
ctgtggatcctatagaaga

SEQ ID NO: 13192 - RNA, 19 nt, Homo sapiens
  source 1..19: mol_type = genomic RNA
tgtggatcctatagaagat

SEQ ID NO: 13193 - RNA, 19 nt, Homo sapiens
  source 1..19: mol_type = genomic RNA
gtggatcctatagaagatt

SEQ ID NO: 13194 - RNA, 19 nt, Homo sapiens
  source 1..19: mol_type = genomic RNA
tggatcctatagaagattt

SEQ ID NO: 13195 - RNA, 19 nt, Homo sapiens
  source 1..19: mol_type = genomic RNA
ggatcctatagaagatttg

SEQ ID NO: 13196 - RNA, 19 nt, Homo sapiens
  source 1..19: mol_type = genomic RNA
gatcctatagaagatttgc

SEQ ID NO: 13197 - RNA, 19 nt, Homo sapiens
  source 1..19: mol_type = genomic RNA
tcttttgtgtgatgagtgc

SEQ ID NO: 13198 - RNA, 19 nt, Homo sapiens
  source 1..19: mol_type = genomic RNA
ttttgtgtgatgagtgcag

SEQ ID NO: 13199 - RNA, 19 nt, Homo sapiens
  source 1..19: mol_type = genomic RNA
tttgtgtgatgagtgcaga

SEQ ID NO: 13200 - RNA, 19 nt, Homo sapiens
  source 1..19: mol_type = genomic RNA
ttgtgtgatgagtgcagag

SEQ ID NO: 13201 - RNA, 19 nt, Homo sapiens
  source 1..19: mol_type = genomic RNA
tgtgtgatgagtgcagaga

SEQ ID NO: 13202 - RNA, 19 nt, Homo sapiens
  source 1..19: mol_type = genomic RNA
gtgtgatgagtgcagagat

SEQ ID NO: 13203 - RNA, 19 nt, Homo sapiens
  source 1..19: mol_type = genomic RNA
tgtgatgagtgcagagata

SEQ ID NO: 13204 - RNA, 19 nt, Homo sapiens
  source 1..19: mol_type = genomic RNA
gtgatgagtgcagagatat

SEQ ID NO: 13205 - RNA, 19 nt, Homo sapiens
  source 1..19: mol_type = genomic RNA
tgatgagtgcagagatatg

SEQ ID NO: 13206 - RNA, 19 nt, Homo sapiens
  source 1..19: mol_type = genomic RNA
gatgagtgcagagatatgt

SEQ ID NO: 13207 - RNA, 19 nt, Homo sapiens
  source 1..19: mol_type = genomic RNA
atgagtgcagagatatgtc

SEQ ID NO: 13208 - RNA, 19 nt, Homo sapiens
  source 1..19: mol_type = genomic RNA
tgagtgcagagatatgtca

SEQ ID NO: 13209 - RNA, 19 nt, Homo sapiens
  source 1..19: mol_type = genomic RNA
gagtgcagagatatgtcac

SEQ ID NO: 13210 - RNA, 19 nt, Homo sapiens
  source 1..19: mol_type = genomic RNA
agtgcagagatatgtcaca

SEQ ID NO: 13211 - RNA, 19 nt, Homo sapiens
  source 1..19: mol_type = genomic RNA
gtgcagagatatgtcacaa

SEQ ID NO: 13212 - RNA, 19 nt, Homo sapiens
  source 1..19: mol_type = genomic RNA
tgcagagatatgtcacaat

SEQ ID NO: 13213 - RNA, 19 nt, Homo sapiens
  source 1..19: mol_type = genomic RNA
gcagagatatgtcacaata

SEQ ID NO: 13214 - RNA, 19 nt, Homo sapiens
  source 1..19: mol_type = genomic RNA
agagatatgtcacaatatc

SEQ ID NO: 13215 - RNA, 19 nt, Homo sapiens
  source 1..19: mol_type = genomic RNA
gagatatgtcacaatatcc

SEQ ID NO: 13216 - RNA, 19 nt, Homo sapiens
  source 1..19: mol_type = genomic RNA
agatatgtcacaatatccc

SEQ ID NO: 13217 - RNA, 19 nt, Homo sapiens
  source 1..19: mol_type = genomic RNA
gatatgtcacaatatcccc

SEQ ID NO: 13218 - RNA, 19 nt, Homo sapiens
  source 1..19: mol_type = genomic RNA
atatgtcacaatatcccct

SEQ ID NO: 13219 - RNA, 19 nt, Homo sapiens
  source 1..19: mol_type = genomic RNA
tatgtcacaatatcccctg

SEQ ID NO: 13220 - RNA, 19 nt, Homo sapiens
  source 1..19: mol_type = genomic RNA
atgtcacaatatcccctgt

SEQ ID NO: 13221 - RNA, 19 nt, Homo sapiens
  source 1..19: mol_type = genomic RNA
tgtcacaatatcccctgta

SEQ ID NO: 13222 - RNA, 19 nt, Homo sapiens
  source 1..19: mol_type = genomic RNA
gtcacaatatcccctgtag

SEQ ID NO: 13223 - RNA, 19 nt, Homo sapiens
  source 1..19: mol_type = genomic RNA
tcacaatatcccctgtaga

SEQ ID NO: 13224 - RNA, 19 nt, Homo sapiens
  source 1..19: mol_type = genomic RNA
cacaatatcccctgtagaa

SEQ ID NO: 13225 - RNA, 19 nt, Homo sapiens
  source 1..19: mol_type = genomic RNA
acaatatcccctgtagaaa

SEQ ID NO: 13226 - RNA, 19 nt, Homo sapiens
  source 1..19: mol_type = genomic RNA
caatatcccctgtagaaaa

SEQ ID NO: 13227 - RNA, 19 nt, Homo sapiens
  source 1..19: mol_type = genomic RNA
aatatcccctgtagaaaaa

SEQ ID NO: 13228 - RNA, 19 nt, Homo sapiens
  source 1..19: mol_type = genomic RNA
atatcccctgtagaaaaag

SEQ ID NO: 13229 - RNA, 19 nt, Homo sapiens
  source 1..19: mol_type = genomic RNA
tatcccctgtagaaaaagc

SEQ ID NO: 13230 - RNA, 19 nt, Homo sapiens
  source 1..19: mol_type = genomic RNA
atcccctgtagaaaaagcc

SEQ ID NO: 13231 - RNA, 19 nt, Homo sapiens
  source 1..19: mol_type = genomic RNA
tcccctgtagaaaaagcct

SEQ ID NO: 13232 - RNA, 19 nt, Homo sapiens
  source 1..19: mol_type = genomic RNA
cccctgtagaaaaagcctg

SEQ ID NO: 13233 - RNA, 19 nt, Homo sapiens
  source 1..19: mol_type = genomic RNA
ccctgtagaaaaagcctga

SEQ ID NO: 13234 - RNA, 19 nt, Homo sapiens
  source 1..19: mol_type = genomic RNA
cctgtagaaaaagcctgaa

SEQ ID NO: 13235 - RNA, 19 nt, Homo sapiens
  source 1..19: mol_type = genomic RNA
ctgtagaaaaagcctgaaa

SEQ ID NO: 13236 - RNA, 19 nt, Homo sapiens
  source 1..19: mol_type = genomic RNA
tgtagaaaaagcctgaaat

SEQ ID NO: 13237 - RNA, 19 nt, Homo sapiens
  source 1..19: mol_type = genomic RNA
gtagaaaaagcctgaaatt

SEQ ID NO: 13238 - RNA, 19 nt, Homo sapiens
  source 1..19: mol_type = genomic RNA
tagaaaaagcctgaaattg

SEQ ID NO: 13239 - RNA, 19 nt, Homo sapiens
  source 1..19: mol_type = genomic RNA
aacttcggtgatcagtgca

SEQ ID NO: 13240 - RNA, 19 nt, Homo sapiens
  source 1..19: mol_type = genomic RNA
acttcggtgatcagtgcag

SEQ ID NO: 13241 - RNA, 19 nt, Homo sapiens
  source 1..19: mol_type = genomic RNA
cttcggtgatcagtgcaga

SEQ ID NO: 13242 - RNA, 19 nt, Homo sapiens
  source 1..19: mol_type = genomic RNA
ttcggtgatcagtgcagat

SEQ ID NO: 13243 - RNA, 19 nt, Homo sapiens
  source 1..19: mol_type = genomic RNA
tcggtgatcagtgcagatg

SEQ ID NO: 13244 - RNA, 19 nt, Homo sapiens
  source 1..19: mol_type = genomic RNA
cggtgatcagtgcagatgt

SEQ ID NO: 13245 - RNA, 19 nt, Homo sapiens
  source 1..19: mol_type = genomic RNA
ggtgatcagtgcagatgtg

SEQ ID NO: 13246 - RNA, 19 nt, Homo sapiens
  source 1..19: mol_type = genomic RNA
gtgatcagtgcagatgtgt

SEQ ID NO: 13247 - RNA, 19 nt, Homo sapiens
  source 1..19: mol_type = genomic RNA
tgatcagtgcagatgtgtt

SEQ ID NO: 13248 - RNA, 19 nt, Homo sapiens
  source 1..19: mol_type = genomic RNA
gatcagtgcagatgtgttt

SEQ ID NO: 13249 - RNA, 19 nt, Homo sapiens
  source 1..19: mol_type = genomic RNA
atcagtgcagatgtgtttc

SEQ ID NO: 13250 - RNA, 19 nt, Homo sapiens
  source 1..19: mol_type = genomic RNA
tcagtgcagatgtgtttca

SEQ ID NO: 13251 - RNA, 19 nt, Homo sapiens
  source 1..19: mol_type = genomic RNA
cagtgcagatgtgtttcag

SEQ ID NO: 13252 - RNA, 19 nt, Homo sapiens
  source 1..19: mol_type = genomic RNA
agtgcagatgtgtttcaga

SEQ ID NO: 13253 - RNA, 19 nt, Homo sapiens
  source 1..19: mol_type = genomic RNA
gtgcagatgtgtttcagaa

SEQ ID NO: 13254 - RNA, 19 nt, Homo sapiens
  source 1..19: mol_type = genomic RNA
tgcagatgtgtttcagaac

SEQ ID NO: 13255 - RNA, 19 nt, Homo sapiens
  source 1..19: mol_type = genomic RNA
gcagatgtgtttcagaact

SEQ ID NO: 13256 - RNA, 19 nt, Homo sapiens
  source 1..19: mol_type = genomic RNA
cagatgtgtttcagaactc

SEQ ID NO: 13257 - RNA, 19 nt, Homo sapiens
  source 1..19: mol_type = genomic RNA
agatgtgtttcagaactcc

SEQ ID NO: 13258 - RNA, 19 nt, Homo sapiens
  source 1..19: mol_type = genomic RNA
gatgtgtttcagaactcca

SEQ ID NO: 13259 - RNA, 19 nt, Homo sapiens
  source 1..19: mol_type = genomic RNA
gtgtttcagaactccatag

SEQ ID NO: 13260 - RNA, 19 nt, Homo sapiens
  source 1..19: mol_type = genomic RNA
ttcagaactccatagtaga

SEQ ID NO: 13261 - RNA, 19 nt, Homo sapiens
  source 1..19: mol_type = genomic RNA
tcagaactccatagtagac

SEQ ID NO: 13262 - RNA, 19 nt, Homo sapiens
  source 1..19: mol_type = genomic RNA
cagaactccatagtagact

SEQ ID NO: 13263 - RNA, 19 nt, Homo sapiens
  source 1..19: mol_type = genomic RNA
agaactccatagtagactg

SEQ ID NO: 13264 - RNA, 19 nt, Homo sapiens
  source 1..19: mol_type = genomic RNA
gaactccatagtagactga

SEQ ID NO: 13265 - RNA, 19 nt, Homo sapiens
  source 1..19: mol_type = genomic RNA
aactccatagtagactgaa

SEQ ID NO: 13266 - RNA, 19 nt, Homo sapiens
  source 1..19: mol_type = genomic RNA
actccatagtagactgaac

SEQ ID NO: 13267 - RNA, 19 nt, Homo sapiens
  source 1..19: mol_type = genomic RNA
ctccatagtagactgaacc

SEQ ID NO: 13268 - RNA, 19 nt, Homo sapiens
  source 1..19: mol_type = genomic RNA
tccatagtagactgaacct

SEQ ID NO: 13269 - RNA, 19 nt, Homo sapiens
  source 1..19: mol_type = genomic RNA
ccatagtagactgaaccta

SEQ ID NO: 13270 - RNA, 19 nt, Homo sapiens
  source 1..19: mol_type = genomic RNA
catagtagactgaacctag

SEQ ID NO: 13271 - RNA, 19 nt, Homo sapiens
  source 1..19: mol_type = genomic RNA
atagtagactgaacctaga

SEQ ID NO: 13272 - RNA, 19 nt, Homo sapiens
  source 1..19: mol_type = genomic RNA
tagtagactgaacctagag

SEQ ID NO: 13273 - RNA, 19 nt, Homo sapiens
  source 1..19: mol_type = genomic RNA
agtagactgaacctagaga

SEQ ID NO: 13274 - RNA, 19 nt, Homo sapiens
  source 1..19: mol_type = genomic RNA
gtagactgaacctagagaa

SEQ ID NO: 13275 - RNA, 19 nt, Homo sapiens
  source 1..19: mol_type = genomic RNA
tagactgaacctagagaat

SEQ ID NO: 13276 - RNA, 19 nt, Homo sapiens
  source 1..19: mol_type = genomic RNA
agactgaacctagagaatg

SEQ ID NO: 13277 - RNA, 19 nt, Homo sapiens
  source 1..19: mol_type = genomic RNA
gactgaacctagagaatgg

SEQ ID NO: 13278 - RNA, 19 nt, Homo sapiens
  source 1..19: mol_type = genomic RNA
actgaacctagagaatggt

SEQ ID NO: 13279 - RNA, 19 nt, Homo sapiens
  source 1..19: mol_type = genomic RNA
ctgaacctagagaatggtt

SEQ ID NO: 13280 - RNA, 19 nt, Homo sapiens
  source 1..19: mol_type = genomic RNA
tgaacctagagaatggtta

SEQ ID NO: 13281 - RNA, 19 nt, Homo sapiens
  source 1..19: mol_type = genomic RNA
gaacctagagaatggttac

SEQ ID NO: 13282 - RNA, 19 nt, Homo sapiens
  source 1..19: mol_type = genomic RNA
aacctagagaatggttaca

SEQ ID NO: 13283 - RNA, 19 nt, Homo sapiens
  source 1..19: mol_type = genomic RNA
acctagagaatggttacat

SEQ ID NO: 13284 - RNA, 19 nt, Homo sapiens
  source 1..19: mol_type = genomic RNA
cctagagaatggttacatc

SEQ ID NO: 13285 - RNA, 19 nt, Homo sapiens
  source 1..19: mol_type = genomic RNA
ctagagaatggttacatca

SEQ ID NO: 13286 - RNA, 19 nt, Homo sapiens
  source 1..19: mol_type = genomic RNA
tagagaatggttacatcac

SEQ ID NO: 13287 - RNA, 19 nt, Homo sapiens
  source 1..19: mol_type = genomic RNA
agagaatggttacatcact

SEQ ID NO: 13288 - RNA, 19 nt, Homo sapiens
  source 1..19: mol_type = genomic RNA
gagaatggttacatcactt

SEQ ID NO: 13289 - RNA, 19 nt, Homo sapiens
  source 1..19: mol_type = genomic RNA
aatggttacatcacttagg

SEQ ID NO: 13290 - RNA, 19 nt, Homo sapiens
  source 1..19: mol_type = genomic RNA
atggttacatcacttaggt

SEQ ID NO: 13291 - RNA, 19 nt, Homo sapiens
  source 1..19: mol_type = genomic RNA
tggttacatcacttaggtg

SEQ ID NO: 13292 - RNA, 19 nt, Homo sapiens
  source 1..19: mol_type = genomic RNA
ggttacatcacttaggtga

SEQ ID NO: 13293 - RNA, 19 nt, Homo sapiens
  source 1..19: mol_type = genomic RNA
gttacatcacttaggtgat

SEQ ID NO: 13294 - RNA, 19 nt, Homo sapiens
  source 1..19: mol_type = genomic RNA
ttacatcacttaggtgatc

SEQ ID NO: 13295 - RNA, 19 nt, Homo sapiens
  source 1..19: mol_type = genomic RNA
tacatcacttaggtgatca

SEQ ID NO: 13296 - RNA, 19 nt, Homo sapiens
  source 1..19: mol_type = genomic RNA
acatcacttaggtgatcag

SEQ ID NO: 13297 - RNA, 19 nt, Homo sapiens
  source 1..19: mol_type = genomic RNA
catcacttaggtgatcagt

SEQ ID NO: 13298 - RNA, 19 nt, Homo sapiens
  source 1..19: mol_type = genomic RNA
atcacttaggtgatcagtg

SEQ ID NO: 13299 - RNA, 19 nt, Homo sapiens
  source 1..19: mol_type = genomic RNA
tcacttaggtgatcagtgt

SEQ ID NO: 13300 - RNA, 19 nt, Homo sapiens
  source 1..19: mol_type = genomic RNA
cacttaggtgatcagtgta

SEQ ID NO: 13301 - RNA, 19 nt, Homo sapiens
  source 1..19: mol_type = genomic RNA
acttaggtgatcagtgtag

SEQ ID NO: 13302 - RNA, 19 nt, Homo sapiens
  source 1..19: mol_type = genomic RNA
cttaggtgatcagtgtaga

SEQ ID NO: 13303 - RNA, 19 nt, Homo sapiens
  source 1..19: mol_type = genomic RNA
ttaggtgatcagtgtagag

SEQ ID NO: 13304 - RNA, 19 nt, Homo sapiens
  source 1..19: mol_type = genomic RNA
taggtgatcagtgtagaga

SEQ ID NO: 13305 - RNA, 19 nt, Homo sapiens
  source 1..19: mol_type = genomic RNA
aggtgatcagtgtagagat

SEQ ID NO: 13306 - RNA, 19 nt, Homo sapiens
  source 1..19: mol_type = genomic RNA
ggtgatcagtgtagagata

SEQ ID NO: 13307 - RNA, 19 nt, Homo sapiens
  source 1..19: mol_type = genomic RNA
gtgatcagtgtagagatat

SEQ ID NO: 13308 - RNA, 19 nt, Homo sapiens
  source 1..19: mol_type = genomic RNA
tgatcagtgtagagatatg

SEQ ID NO: 13309 - RNA, 19 nt, Homo sapiens
  source 1..19: mol_type = genomic RNA
gatcagtgtagagatatgt

SEQ ID NO: 13310 - RNA, 19 nt, Homo sapiens
  source 1..19: mol_type = genomic RNA
aaaattctcgtgtagacag

SEQ ID NO: 13311 - RNA, 19 nt, Homo sapiens
  source 1..19: mol_type = genomic RNA
aaattctcgtgtagacaga

SEQ ID NO: 13312 - RNA, 19 nt, Homo sapiens
  source 1..19: mol_type = genomic RNA
aattctcgtgtagacagag

SEQ ID NO: 13313 - RNA, 19 nt, Homo sapiens
  source 1..19: mol_type = genomic RNA
attctcgtgtagacagagc

SEQ ID NO: 13314 - RNA, 19 nt, Homo sapiens
  source 1..19: mol_type = genomic RNA
ttctcgtgtagacagagcc

SEQ ID NO: 13315 - RNA, 19 nt, Homo sapiens
  source 1..19: mol_type = genomic RNA
tctcgtgtagacagagcct

SEQ ID NO: 13316 - RNA, 19 nt, Homo sapiens
  source 1..19: mol_type = genomic RNA
ctcgtgtagacagagccta

SEQ ID NO: 13317 - RNA, 19 nt, Homo sapiens
  source 1..19: mol_type = genomic RNA
tcgtgtagacagagcctag

SEQ ID NO: 13318 - RNA, 19 nt, Homo sapiens
  source 1..19: mol_type = genomic RNA
cgtgtagacagagcctaga

SEQ ID NO: 13319 - RNA, 19 nt, Homo sapiens
  source 1..19: mol_type = genomic RNA
gtgtagacagagcctagac

SEQ ID NO: 13320 - RNA, 19 nt, Homo sapiens
  source 1..19: mol_type = genomic RNA
tgtagacagagcctagaca

SEQ ID NO: 13321 - RNA, 19 nt, Homo sapiens
  source 1..19: mol_type = genomic RNA
gtagacagagcctagacaa

SEQ ID NO: 13322 - RNA, 19 nt, Homo sapiens
  source 1..19: mol_type = genomic RNA
tagacagagcctagacaat

SEQ ID NO: 13323 - RNA, 19 nt, Homo sapiens
  source 1..19: mol_type = genomic RNA
agacagagcctagacaatt

SEQ ID NO: 13324 - RNA, 19 nt, Homo sapiens
  source 1..19: mol_type = genomic RNA
gacagagcctagacaattg

SEQ ID NO: 13325 - RNA, 19 nt, Homo sapiens
  source 1..19: mol_type = genomic RNA
acagagcctagacaattgt

SEQ ID NO: 13326 - RNA, 19 nt, Homo sapiens
  source 1..19: mol_type = genomic RNA
cagagcctagacaattgtt

SEQ ID NO: 13327 - RNA, 19 nt, Homo sapiens
  source 1..19: mol_type = genomic RNA
agagcctagacaattgtta

SEQ ID NO: 13328 - RNA, 19 nt, Homo sapiens
  source 1..19: mol_type = genomic RNA
gagcctagacaattgttac

SEQ ID NO: 13329 - RNA, 19 nt, Homo sapiens
  source 1..19: mol_type = genomic RNA
agcctagacaattgttaca

SEQ ID NO: 13330 - RNA, 19 nt, Homo sapiens
  source 1..19: mol_type = genomic RNA
gcctagacaattgttacat

SEQ ID NO: 13331 - RNA, 19 nt, Homo sapiens
  source 1..19: mol_type = genomic RNA
agacaattgttacatcacc

SEQ ID NO: 13332 - RNA, 19 nt, Homo sapiens
  source 1..19: mol_type = genomic RNA
ttgttacatcacctagtga

SEQ ID NO: 13333 - RNA, 19 nt, Homo sapiens
  source 1..19: mol_type = genomic RNA
tgttacatcacctagtgat

SEQ ID NO: 13334 - RNA, 19 nt, Homo sapiens
  source 1..19: mol_type = genomic RNA
gttacatcacctagtgatc

SEQ ID NO: 13335 - RNA, 19 nt, Homo sapiens
  source 1..19: mol_type = genomic RNA
ttacatcacctagtgatca

SEQ ID NO: 13336 - RNA, 19 nt, Homo sapiens
  source 1..19: mol_type = genomic RNA
tacatcacctagtgatcag

SEQ ID NO: 13337 - RNA, 19 nt, Homo sapiens
  source 1..19: mol_type = genomic RNA
acatcacctagtgatcagt

SEQ ID NO: 13338 - RNA, 19 nt, Homo sapiens
  source 1..19: mol_type = genomic RNA
catcacctagtgatcagtg

SEQ ID NO: 13339 - RNA, 19 nt, Homo sapiens
  source 1..19: mol_type = genomic RNA
atcacctagtgatcagtgc

SEQ ID NO: 13340 - RNA, 19 nt, Homo sapiens
  source 1..19: mol_type = genomic RNA
tcacctagtgatcagtgca

SEQ ID NO: 13341 - RNA, 19 nt, Homo sapiens
  source 1..19: mol_type = genomic RNA
cacctagtgatcagtgcag

SEQ ID NO: 13342 - RNA, 19 nt, Homo sapiens
  source 1..19: mol_type = genomic RNA
acctagtgatcagtgcagg

SEQ ID NO: 13343 - RNA, 19 nt, Homo sapiens
  source 1..19: mol_type = genomic RNA
cctagtgatcagtgcaggg

SEQ ID NO: 13344 - RNA, 19 nt, Homo sapiens
  source 1..19: mol_type = genomic RNA
ctagtgatcagtgcaggga

SEQ ID NO: 13345 - RNA, 19 nt, Homo sapiens
  source 1..19: mol_type = genomic RNA
tagtgatcagtgcagggat

SEQ ID NO: 13346 - RNA, 19 nt, Homo sapiens
  source 1..19: mol_type = genomic RNA
agtgatcagtgcagggata

SEQ ID NO: 13347 - RNA, 19 nt, Homo sapiens
  source 1..19: mol_type = genomic RNA
gtgatcagtgcagggataa

SEQ ID NO: 13348 - RNA, 19 nt, Homo sapiens
  source 1..19: mol_type = genomic RNA
tgatcagtgcagggataag

SEQ ID NO: 13349 - RNA, 19 nt, Homo sapiens
  source 1..19: mol_type = genomic RNA
gatcagtgcagggataagt

SEQ ID NO: 13350 - RNA, 19 nt, Homo sapiens
  source 1..19: mol_type = genomic RNA
atcagtgcagggataagtc

SEQ ID NO: 13351 - RNA, 19 nt, Homo sapiens
  source 1..19: mol_type = genomic RNA
tcagtgcagggataagtca

SEQ ID NO: 13352 - RNA, 19 nt, Homo sapiens
  source 1..19: mol_type = genomic RNA
cagtgcagggataagtcat

SEQ ID NO: 13353 - RNA, 19 nt, Homo sapiens
  source 1..19: mol_type = genomic RNA
agtgcagggataagtcata

SEQ ID NO: 13354 - RNA, 19 nt, Homo sapiens
  source 1..19: mol_type = genomic RNA
gtgcagggataagtcataa

SEQ ID NO: 13355 - RNA, 19 nt, Homo sapiens
  source 1..19: mol_type = genomic RNA
tgcagggataagtcataaa

SEQ ID NO: 13356 - RNA, 19 nt, Homo sapiens
  source 1..19: mol_type = genomic RNA
gcagggataagtcataaag

SEQ ID NO: 13357 - RNA, 19 nt, Homo sapiens
  source 1..19: mol_type = genomic RNA
cagggataagtcataaagc

SEQ ID NO: 13358 - RNA, 19 nt, Homo sapiens
  source 1..19: mol_type = genomic RNA
agggataagtcataaagcc

SEQ ID NO: 13359 - RNA, 19 nt, Homo sapiens
  source 1..19: mol_type = genomic RNA
gggataagtcataaagcct

SEQ ID NO: 13360 - RNA, 19 nt, Homo sapiens
  source 1..19: mol_type = genomic RNA
ggataagtcataaagcctc

SEQ ID NO: 13361 - RNA, 19 nt, Homo sapiens
  source 1..19: mol_type = genomic RNA
gataagtcataaagcctcc

SEQ ID NO: 13362 - RNA, 19 nt, Homo sapiens
  source 1..19: mol_type = genomic RNA
ataagtcataaagcctcct

SEQ ID NO: 13363 - RNA, 19 nt, Homo sapiens
  source 1..19: mol_type = genomic RNA
taagtcataaagcctcctg

SEQ ID NO: 13364 - RNA, 19 nt, Homo sapiens
  source 1..19: mol_type = genomic RNA
aagtcataaagcctcctgt

SEQ ID NO: 13365 - RNA, 19 nt, Homo sapiens
  source 1..19: mol_type = genomic RNA
agtcataaagcctcctgta

SEQ ID NO: 13366 - RNA, 19 nt, Homo sapiens
  source 1..19: mol_type = genomic RNA
gtcataaagcctcctgtag

SEQ ID NO: 13367 - RNA, 19 nt, Homo sapiens
  source 1..19: mol_type = genomic RNA
tcataaagcctcctgtagg

SEQ ID NO: 13368 - RNA, 19 nt, Homo sapiens
  source 1..19: mol_type = genomic RNA
cataaagcctcctgtaggc

SEQ ID NO: 13369 - RNA, 19 nt, Homo sapiens
  source 1..19: mol_type = genomic RNA
ataaagcctcctgtaggca

SEQ ID NO: 13370 - RNA, 19 nt, Homo sapiens
  source 1..19: mol_type = genomic RNA
taaagcctcctgtaggcag

SEQ ID NO: 13371 - RNA, 19 nt, Homo sapiens
  source 1..19: mol_type = genomic RNA
aaagcctcctgtaggcaga

SEQ ID NO: 13372 - RNA, 19 nt, Homo sapiens
  source 1..19: mol_type = genomic RNA
aagcctcctgtaggcagag

SEQ ID NO: 13373 - RNA, 19 nt, Homo sapiens
  source 1..19: mol_type = genomic RNA
agcctcctgtaggcagagt

SEQ ID NO: 13374 - RNA, 19 nt, Homo sapiens
  source 1..19: mol_type = genomic RNA
gcctcctgtaggcagagtg

SEQ ID NO: 13375 - RNA, 19 nt, Homo sapiens
  source 1..19: mol_type = genomic RNA
cctcctgtaggcagagtgt

SEQ ID NO: 13376 - RNA, 19 nt, Homo sapiens
  source 1..19: mol_type = genomic RNA
ctcctgtaggcagagtgta

SEQ ID NO: 13377 - RNA, 19 nt, Homo sapiens
  source 1..19: mol_type = genomic RNA
tcctgtaggcagagtgtag

SEQ ID NO: 13378 - RNA, 19 nt, Homo sapiens
  source 1..19: mol_type = genomic RNA
cctgtaggcagagtgtagg

SEQ ID NO: 13379 - RNA, 19 nt, Homo sapiens
  source 1..19: mol_type = genomic RNA
ctgtaggcagagtgtaggc

SEQ ID NO: 13380 - RNA, 19 nt, Homo sapiens
  source 1..19: mol_type = genomic RNA
tgtaggcagagtgtaggca

SEQ ID NO: 13381 - RNA, 19 nt, Homo sapiens
  source 1..19: mol_type = genomic RNA
gtaggcagagtgtaggcaa

SEQ ID NO: 13382 - RNA, 19 nt, Homo sapiens
  source 1..19: mol_type = genomic RNA
taggcagagtgtaggcaag

SEQ ID NO: 13383 - RNA, 19 nt, Homo sapiens
  source 1..19: mol_type = genomic RNA
aggcagagtgtaggcaagt

SEQ ID NO: 13384 - RNA, 19 nt, Homo sapiens
  source 1..19: mol_type = genomic RNA
ggcagagtgtaggcaagtg

SEQ ID NO: 13385 - RNA, 19 nt, Homo sapiens
  source 1..19: mol_type = genomic RNA
gcagagtgtaggcaagtgt

SEQ ID NO: 13386 - RNA, 19 nt, Homo sapiens
  source 1..19: mol_type = genomic RNA
cagagtgtaggcaagtgtt

SEQ ID NO: 13387 - RNA, 19 nt, Homo sapiens
  source 1..19: mol_type = genomic RNA
agagtgtaggcaagtgttc

SEQ ID NO: 13388 - RNA, 19 nt, Homo sapiens
  source 1..19: mol_type = genomic RNA
gagtgtaggcaagtgttcc

SEQ ID NO: 13389 - RNA, 19 nt, Homo sapiens
  source 1..19: mol_type = genomic RNA
agtgtaggcaagtgttccc

SEQ ID NO: 13390 - RNA, 19 nt, Homo sapiens
  source 1..19: mol_type = genomic RNA
gtgtaggcaagtgttccct

SEQ ID NO: 13391 - RNA, 19 nt, Homo sapiens
  source 1..19: mol_type = genomic RNA
tgtaggcaagtgttccctc

SEQ ID NO: 13392 - RNA, 19 nt, Homo sapiens
  source 1..19: mol_type = genomic RNA
gtaggcaagtgttccctcc

SEQ ID NO: 13393 - RNA, 19 nt, Homo sapiens
  source 1..19: mol_type = genomic RNA
taggcaagtgttccctccc

SEQ ID NO: 13394 - RNA, 19 nt, Homo sapiens
  source 1..19: mol_type = genomic RNA
aggcaagtgttccctccct

SEQ ID NO: 13395 - RNA, 19 nt, Homo sapiens
  source 1..19: mol_type = genomic RNA
ggcaagtgttccctccctg

SEQ ID NO: 13396 - RNA, 19 nt, Homo sapiens
  source 1..19: mol_type = genomic RNA
gcaagtgttccctccctgg

SEQ ID NO: 13397 - RNA, 19 nt, Homo sapiens
  source 1..19: mol_type = genomic RNA
caagtgttccctccctggg

SEQ ID NO: 13398 - RNA, 19 nt, Homo sapiens
  source 1..19: mol_type = genomic RNA
aagtgttccctccctgggc

SEQ ID NO: 13399 - RNA, 19 nt, Homo sapiens
  source 1..19: mol_type = genomic RNA
agtgttccctccctgggct

SEQ ID NO: 13400 - RNA, 19 nt, Homo sapiens
  source 1..19: mol_type = genomic RNA
gtgttccctccctgggctg

SEQ ID NO: 13401 - RNA, 19 nt, Homo sapiens
  source 1..19: mol_type = genomic RNA
tgttccctccctgggctga

SEQ ID NO: 13402 - RNA, 19 nt, Homo sapiens
  source 1..19: mol_type = genomic RNA
gttccctccctgggctgat

SEQ ID NO: 13403 - RNA, 19 nt, Homo sapiens
  source 1..19: mol_type = genomic RNA
ttccctccctgggctgatc

SEQ ID NO: 13404 - RNA, 19 nt, Homo sapiens
  source 1..19: mol_type = genomic RNA
tccctccctgggctgatca

SEQ ID NO: 13405 - RNA, 19 nt, Homo sapiens
  source 1..19: mol_type = genomic RNA
cctccctgggctgatcagt

SEQ ID NO: 13406 - RNA, 19 nt, Homo sapiens
  source 1..19: mol_type = genomic RNA
ctccctgggctgatcagtg

SEQ ID NO: 13407 - RNA, 19 nt, Homo sapiens
  source 1..19: mol_type = genomic RNA
ccctgggctgatcagtgca

SEQ ID NO: 13408 - RNA, 19 nt, Homo sapiens
  source 1..19: mol_type = genomic RNA
cctgggctgatcagtgcag

SEQ ID NO: 13409 - RNA, 19 nt, Homo sapiens
  source 1..19: mol_type = genomic RNA
ctgggctgatcagtgcaga

SEQ ID NO: 13410 - RNA, 19 nt, Homo sapiens
  source 1..19: mol_type = genomic RNA
tgggctgatcagtgcagag

SEQ ID NO: 13411 - RNA, 19 nt, Homo sapiens
  source 1..19: mol_type = genomic RNA
gggctgatcagtgcagaga

SEQ ID NO: 13412 - RNA, 19 nt, Homo sapiens
  source 1..19: mol_type = genomic RNA
ggctgatcagtgcagagat

SEQ ID NO: 13413 - RNA, 19 nt, Homo sapiens
  source 1..19: mol_type = genomic RNA
gctgatcagtgcagagata

SEQ ID NO: 13414 - RNA, 19 nt, Homo sapiens
  source 1..19: mol_type = genomic RNA
ctgatcagtgcagagatat

SEQ ID NO: 13415 - RNA, 19 nt, Homo sapiens
  source 1..19: mol_type = genomic RNA
tgatcagtgcagagatatc

SEQ ID NO: 13416 - RNA, 19 nt, Homo sapiens
  source 1..19: mol_type = genomic RNA
gatcagtgcagagatatct

SEQ ID NO: 13417 - RNA, 19 nt, Homo sapiens
  source 1..19: mol_type = genomic RNA
atcagtgcagagatatctc

SEQ ID NO: 13418 - RNA, 19 nt, Homo sapiens
  source 1..19: mol_type = genomic RNA
tcagtgcagagatatctca

SEQ ID NO: 13419 - RNA, 19 nt, Homo sapiens
  source 1..19: mol_type = genomic RNA
cagtgcagagatatctcac

SEQ ID NO: 13420 - RNA, 19 nt, Homo sapiens
  source 1..19: mol_type = genomic RNA
agtgcagagatatctcaca

SEQ ID NO: 13421 - RNA, 19 nt, Homo sapiens
  source 1..19: mol_type = genomic RNA
gtgcagagatatctcacaa

SEQ ID NO: 13422 - RNA, 19 nt, Homo sapiens
  source 1..19: mol_type = genomic RNA
tgcagagatatctcacaaa

SEQ ID NO: 13423 - RNA, 19 nt, Homo sapiens
  source 1..19: mol_type = genomic RNA
gcagagatatctcacaaag

SEQ ID NO: 13424 - RNA, 19 nt, Homo sapiens
  source 1..19: mol_type = genomic RNA
cagagatatctcacaaagc

SEQ ID NO: 13425 - RNA, 19 nt, Homo sapiens
  source 1..19: mol_type = genomic RNA
agagatatctcacaaagcc

SEQ ID NO: 13426 - RNA, 19 nt, Homo sapiens
  source 1..19: mol_type = genomic RNA
gagatatctcacaaagccc

SEQ ID NO: 13427 - RNA, 19 nt, Homo sapiens
  source 1..19: mol_type = genomic RNA
agatatctcacaaagcccc

SEQ ID NO: 13428 - RNA, 19 nt, Homo sapiens
  source 1..19: mol_type = genomic RNA
gatatctcacaaagcccct

SEQ ID NO: 13429 - RNA, 19 nt, Homo sapiens
  source 1..19: mol_type = genomic RNA
atatctcacaaagccccta

SEQ ID NO: 13430 - RNA, 19 nt, Homo sapiens
  source 1..19: mol_type = genomic RNA
tatctcacaaagcccctat

SEQ ID NO: 13431 - RNA, 19 nt, Homo sapiens
  source 1..19: mol_type = genomic RNA
atctcacaaagcccctata

SEQ ID NO: 13432 - RNA, 19 nt, Homo sapiens
  source 1..19: mol_type = genomic RNA
tctcacaaagcccctataa

SEQ ID NO: 13433 - RNA, 19 nt, Homo sapiens
  source 1..19: mol_type = genomic RNA
ctcacaaagcccctataag

SEQ ID NO: 13434 - RNA, 19 nt, Homo sapiens
  source 1..19: mol_type = genomic RNA
tcacaaagcccctataagc

SEQ ID NO: 13435 - RNA, 19 nt, Homo sapiens
  source 1..19: mol_type = genomic RNA
cacaaagcccctataagcc

SEQ ID NO: 13436 - RNA, 19 nt, Homo sapiens
  source 1..19: mol_type = genomic RNA
acaaagcccctataagcca

SEQ ID NO: 13437 - RNA, 19 nt, Homo sapiens
  source 1..19: mol_type = genomic RNA
caaagcccctataagccaa

SEQ ID NO: 13438 - RNA, 19 nt, Homo sapiens
  source 1..19: mol_type = genomic RNA
aaagcccctataagccaaa

SEQ ID NO: 13439 - RNA, 19 nt, Homo sapiens
  source 1..19: mol_type = genomic RNA
aagcccctataagccaaac

SEQ ID NO: 13440 - RNA, 19 nt, Homo sapiens
  source 1..19: mol_type = genomic RNA
agcccctataagccaaacc

SEQ ID NO: 13441 - RNA, 19 nt, Homo sapiens
  source 1..19: mol_type = genomic RNA
gcccctataagccaaacct

SEQ ID NO: 13442 - RNA, 19 nt, Homo sapiens
  source 1..19: mol_type = genomic RNA
cccctataagccaaacctt

SEQ ID NO: 13443 - RNA, 19 nt, Homo sapiens
  source 1..19: mol_type = genomic RNA
ccctataagccaaaccttg

SEQ ID NO: 13444 - RNA, 19 nt, Homo sapiens
  source 1..19: mol_type = genomic RNA
cctataagccaaaccttga

SEQ ID NO: 13445 - RNA, 19 nt, Homo sapiens
  source 1..19: mol_type = genomic RNA
ctataagccaaaccttgac

SEQ ID NO: 13446 - RNA, 19 nt, Homo sapiens
  source 1..19: mol_type = genomic RNA
tataagccaaaccttgaca

SEQ ID NO: 13447 - RNA, 19 nt, Homo sapiens
  source 1..19: mol_type = genomic RNA
ataagccaaaccttgacaa

SEQ ID NO: 13448 - RNA, 19 nt, Homo sapiens
  source 1..19: mol_type = genomic RNA
taagccaaaccttgacaag

SEQ ID NO: 13449 - RNA, 19 nt, Homo sapiens
  source 1..19: mol_type = genomic RNA
aagccaaaccttgacaagg

SEQ ID NO: 13450 - RNA, 19 nt, Homo sapiens
  source 1..19: mol_type = genomic RNA
agccaaaccttgacaaggg

SEQ ID NO: 13451 - RNA, 19 nt, Homo sapiens
  source 1..19: mol_type = genomic RNA
gccaaaccttgacaagggt

SEQ ID NO: 13452 - RNA, 19 nt, Homo sapiens
  source 1..19: mol_type = genomic RNA
ccaaaccttgacaagggtt

SEQ ID NO: 13453 - RNA, 19 nt, Homo sapiens
  source 1..19: mol_type = genomic RNA
caaaccttgacaagggtta

SEQ ID NO: 13454 - RNA, 19 nt, Homo sapiens
  source 1..19: mol_type = genomic RNA
aaaccttgacaagggttac

SEQ ID NO: 13455 - RNA, 19 nt, Homo sapiens
  source 1..19: mol_type = genomic RNA
aaccttgacaagggttaca

SEQ ID NO: 13456 - RNA, 19 nt, Homo sapiens
  source 1..19: mol_type = genomic RNA
accttgacaagggttacat

SEQ ID NO: 13457 - RNA, 19 nt, Homo sapiens
  source 1..19: mol_type = genomic RNA
ccttgacaagggttacatc

SEQ ID NO: 13458 - RNA, 19 nt, Homo sapiens
  source 1..19: mol_type = genomic RNA
cttgacaagggttacatca

SEQ ID NO: 13459 - RNA, 19 nt, Homo sapiens
  source 1..19: mol_type = genomic RNA
ttgacaagggttacatcac

SEQ ID NO: 13460 - RNA, 19 nt, Homo sapiens
  source 1..19: mol_type = genomic RNA
tgacaagggttacatcacc

SEQ ID NO: 13461 - RNA, 19 nt, Homo sapiens
  source 1..19: mol_type = genomic RNA
gacaagggttacatcacct

SEQ ID NO: 13462 - RNA, 19 nt, Homo sapiens
  source 1..19: mol_type = genomic RNA
acaagggttacatcacctg

SEQ ID NO: 13463 - RNA, 19 nt, Homo sapiens
  source 1..19: mol_type = genomic RNA
caagggttacatcacctgt

SEQ ID NO: 13464 - RNA, 19 nt, Homo sapiens
  source 1..19: mol_type = genomic RNA
aagggttacatcacctgtt

SEQ ID NO: 13465 - RNA, 19 nt, Homo sapiens
  source 1..19: mol_type = genomic RNA
agggttacatcacctgttt

SEQ ID NO: 13466 - RNA, 19 nt, Homo sapiens
  source 1..19: mol_type = genomic RNA
gggttacatcacctgtttg

SEQ ID NO: 13467 - RNA, 19 nt, Homo sapiens
  source 1..19: mol_type = genomic RNA
ggttacatcacctgtttga

SEQ ID NO: 13468 - RNA, 19 nt, Homo sapiens
  source 1..19: mol_type = genomic RNA
ttacatcacctgtttgagc

SEQ ID NO: 13469 - RNA, 19 nt, Homo sapiens
  source 1..19: mol_type = genomic RNA
tacatcacctgtttgagca

SEQ ID NO: 13470 - RNA, 19 nt, Homo sapiens
  source 1..19: mol_type = genomic RNA
acatcacctgtttgagcag

SEQ ID NO: 13471 - RNA, 19 nt, Homo sapiens
  source 1..19: mol_type = genomic RNA
catcacctgtttgagcagt

SEQ ID NO: 13472 - RNA, 19 nt, Homo sapiens
  source 1..19: mol_type = genomic RNA
atcacctgtttgagcagtg

SEQ ID NO: 13473 - RNA, 19 nt, Homo sapiens
  source 1..19: mol_type = genomic RNA
tcacctgtttgagcagtgg

SEQ ID NO: 13474 - RNA, 19 nt, Homo sapiens
  source 1..19: mol_type = genomic RNA
cacctgtttgagcagtgga

SEQ ID NO: 13475 - RNA, 19 nt, Homo sapiens
  source 1..19: mol_type = genomic RNA
acctgtttgagcagtggaa

SEQ ID NO: 13476 - RNA, 19 nt, Homo sapiens
  source 1..19: mol_type = genomic RNA
cctgtttgagcagtggaaa

SEQ ID NO: 13477 - RNA, 19 nt, Homo sapiens
  source 1..19: mol_type = genomic RNA
ctgtttgagcagtggaaat

SEQ ID NO: 13478 - RNA, 19 nt, Homo sapiens
  source 1..19: mol_type = genomic RNA
tgtttgagcagtggaaata

SEQ ID NO: 13479 - RNA, 19 nt, Homo sapiens
  source 1..19: mol_type = genomic RNA
gtttgagcagtggaaatat

SEQ ID NO: 13480 - RNA, 19 nt, Homo sapiens
  source 1..19: mol_type = genomic RNA
tttgagcagtggaaatata

SEQ ID NO: 13481 - RNA, 19 nt, Homo sapiens
  source 1..19: mol_type = genomic RNA
ttgagcagtggaaatatat

SEQ ID NO: 13482 - RNA, 19 nt, Homo sapiens
  source 1..19: mol_type = genomic RNA
tgagcagtggaaatatata

SEQ ID NO: 13483 - RNA, 19 nt, Homo sapiens
  source 1..19: mol_type = genomic RNA
gagcagtggaaatatatat

SEQ ID NO: 13484 - RNA, 19 nt, Homo sapiens
  source 1..19: mol_type = genomic RNA
agcagtggaaatatatatc

SEQ ID NO: 13485 - RNA, 19 nt, Homo sapiens
  source 1..19: mol_type = genomic RNA
gcagtggaaatatatatca

SEQ ID NO: 13486 - RNA, 19 nt, Homo sapiens
  source 1..19: mol_type = genomic RNA
cagtggaaatatatatcac

SEQ ID NO: 13487 - RNA, 19 nt, Homo sapiens
  source 1..19: mol_type = genomic RNA
aaatatatatcacaaagcc

SEQ ID NO: 13488 - RNA, 19 nt, Homo sapiens
  source 1..19: mol_type = genomic RNA
aatatatatcacaaagccc

SEQ ID NO: 13489 - RNA, 19 nt, Homo sapiens
  source 1..19: mol_type = genomic RNA
atatatatcacaaagcccc

SEQ ID NO: 13490 - RNA, 19 nt, Homo sapiens
  source 1..19: mol_type = genomic RNA
tatatatcacaaagccccc

SEQ ID NO: 13491 - RNA, 19 nt, Homo sapiens
  source 1..19: mol_type = genomic RNA
atatatcacaaagccccct

SEQ ID NO: 13492 - RNA, 19 nt, Homo sapiens
  source 1..19: mol_type = genomic RNA
tatatcacaaagccccctg

SEQ ID NO: 13493 - RNA, 19 nt, Homo sapiens
  source 1..19: mol_type = genomic RNA
atatcacaaagccccctgt

SEQ ID NO: 13494 - RNA, 19 nt, Homo sapiens
  source 1..19: mol_type = genomic RNA
tatcacaaagccccctgta

SEQ ID NO: 13495 - RNA, 19 nt, Homo sapiens
  source 1..19: mol_type = genomic RNA
atcacaaagccccctgtag

SEQ ID NO: 13496 - RNA, 19 nt, Homo sapiens
  source 1..19: mol_type = genomic RNA
tcacaaagccccctgtaga

SEQ ID NO: 13497 - RNA, 19 nt, Homo sapiens
  source 1..19: mol_type = genomic RNA
cacaaagccccctgtagac

SEQ ID NO: 13498 - RNA, 19 nt, Homo sapiens
  source 1..19: mol_type = genomic RNA
acaaagccccctgtagaca

SEQ ID NO: 13499 - RNA, 19 nt, Homo sapiens
  source 1..19: mol_type = genomic RNA
caaagccccctgtagacaa

SEQ ID NO: 13500 - RNA, 19 nt, Homo sapiens
  source 1..19: mol_type = genomic RNA
aaagccccctgtagacaaa

SEQ ID NO: 13501 - RNA, 19 nt, Homo sapiens
  source 1..19: mol_type = genomic RNA
aagccccctgtagacaaag

SEQ ID NO: 13502 - RNA, 19 nt, Homo sapiens
  source 1..19: mol_type = genomic RNA
ccccctgtagacaaagccc

SEQ ID NO: 13503 - RNA, 19 nt, Homo sapiens
  source 1..19: mol_type = genomic RNA
cccctgtagacaaagccca

SEQ ID NO: 13504 - RNA, 19 nt, Homo sapiens
  source 1..19: mol_type = genomic RNA
ccctgtagacaaagcccag

SEQ ID NO: 13505 - RNA, 19 nt, Homo sapiens
  source 1..19: mol_type = genomic RNA
cctgtagacaaagcccaga

SEQ ID NO: 13506 - RNA, 19 nt, Homo sapiens
  source 1..19: mol_type = genomic RNA
ctgtagacaaagcccagac

SEQ ID NO: 13507 - RNA, 19 nt, Homo sapiens
  source 1..19: mol_type = genomic RNA
tgtagacaaagcccagaca

SEQ ID NO: 13508 - RNA, 19 nt, Homo sapiens
  source 1..19: mol_type = genomic RNA
gtagacaaagcccagacaa

SEQ ID NO: 13509 - RNA, 19 nt, Homo sapiens
  source 1..19: mol_type = genomic RNA
tagacaaagcccagacaat

SEQ ID NO: 13510 - RNA, 19 nt, Homo sapiens
  source 1..19: mol_type = genomic RNA
agacaaagcccagacaatt

SEQ ID NO: 13511 - RNA, 19 nt, Homo sapiens
  source 1..19: mol_type = genomic RNA
gacaaagcccagacaattt

SEQ ID NO: 13512 - RNA, 19 nt, Homo sapiens
  source 1..19: mol_type = genomic RNA
acaaagcccagacaatttt

SEQ ID NO: 13513 - RNA, 19 nt, Homo sapiens
  source 1..19: mol_type = genomic RNA
aagcccagacaatttttac

SEQ ID NO: 13514 - RNA, 19 nt, Homo sapiens
  source 1..19: mol_type = genomic RNA
agcccagacaatttttaca

SEQ ID NO: 13515 - RNA, 19 nt, Homo sapiens
  source 1..19: mol_type = genomic RNA
tttacatctcctgagtgag

SEQ ID NO: 13516 - RNA, 19 nt, Homo sapiens
  source 1..19: mol_type = genomic RNA
ttacatctcctgagtgagc

SEQ ID NO: 13517 - RNA, 19 nt, Homo sapiens
  source 1..19: mol_type = genomic RNA
tacatctcctgagtgagca

SEQ ID NO: 13518 - RNA, 19 nt, Homo sapiens
  source 1..19: mol_type = genomic RNA
acatctcctgagtgagcat

SEQ ID NO: 13519 - RNA, 19 nt, Homo sapiens
  source 1..19: mol_type = genomic RNA
catctcctgagtgagcatt

SEQ ID NO: 13520 - RNA, 19 nt, Homo sapiens
  source 1..19: mol_type = genomic RNA
atctcctgagtgagcattg

SEQ ID NO: 13521 - RNA, 19 nt, Homo sapiens
  source 1..19: mol_type = genomic RNA
tctcctgagtgagcattgg

SEQ ID NO: 13522 - RNA, 19 nt, Homo sapiens
  source 1..19: mol_type = genomic RNA
ctcctgagtgagcattgga

SEQ ID NO: 13523 - RNA, 19 nt, Homo sapiens
  source 1..19: mol_type = genomic RNA
tcctgagtgagcattggag

SEQ ID NO: 13524 - RNA, 19 nt, Homo sapiens
  source 1..19: mol_type = genomic RNA
cctgagtgagcattggaga

SEQ ID NO: 13525 - RNA, 19 nt, Homo sapiens
  source 1..19: mol_type = genomic RNA
ctgagtgagcattggagag

SEQ ID NO: 13526 - RNA, 19 nt, Homo sapiens
  source 1..19: mol_type = genomic RNA
tgagtgagcattggagaga

SEQ ID NO: 13527 - RNA, 19 nt, Homo sapiens
  source 1..19: mol_type = genomic RNA
gagtgagcattggagagat

SEQ ID NO: 13528 - RNA, 19 nt, Homo sapiens
  source 1..19: mol_type = genomic RNA
agtgagcattggagagatc

SEQ ID NO: 13529 - RNA, 19 nt, Homo sapiens
  source 1..19: mol_type = genomic RNA
gtgagcattggagagatct

SEQ ID NO: 13530 - RNA, 19 nt, Homo sapiens
  source 1..19: mol_type = genomic RNA
tgagcattggagagatctg

SEQ ID NO: 13531 - RNA, 19 nt, Homo sapiens
  source 1..19: mol_type = genomic RNA
gagcattggagagatctgt

SEQ ID NO: 13532 - RNA, 19 nt, Homo sapiens
  source 1..19: mol_type = genomic RNA
agcattggagagatctgtc

SEQ ID NO: 13533 - RNA, 19 nt, Homo sapiens
  source 1..19: mol_type = genomic RNA
gcattggagagatctgtca

SEQ ID NO: 13534 - RNA, 19 nt, Homo sapiens
  source 1..19: mol_type = genomic RNA
cattggagagatctgtcac

SEQ ID NO: 13535 - RNA, 19 nt, Homo sapiens
  source 1..19: mol_type = genomic RNA
attggagagatctgtcaca

SEQ ID NO: 13536 - RNA, 19 nt, Homo sapiens
  source 1..19: mol_type = genomic RNA
ttggagagatctgtcacaa

SEQ ID NO: 13537 - RNA, 19 nt, Homo sapiens
  source 1..19: mol_type = genomic RNA
tggagagatctgtcacaat

SEQ ID NO: 13538 - RNA, 19 nt, Homo sapiens
  source 1..19: mol_type = genomic RNA
ggagagatctgtcacaatg

SEQ ID NO: 13539 - RNA, 19 nt, Homo sapiens
  source 1..19: mol_type = genomic RNA
gagagatctgtcacaatgc

SEQ ID NO: 13540 - RNA, 19 nt, Homo sapiens
  source 1..19: mol_type = genomic RNA
agagatctgtcacaatgcc

SEQ ID NO: 13541 - RNA, 19 nt, Homo sapiens
  source 1..19: mol_type = genomic RNA
gagatctgtcacaatgccc

SEQ ID NO: 13542 - RNA, 19 nt, Homo sapiens
  source 1..19: mol_type = genomic RNA
agatctgtcacaatgcccc

SEQ ID NO: 13543 - RNA, 19 nt, Homo sapiens
  source 1..19: mol_type = genomic RNA
gatctgtcacaatgcccct

SEQ ID NO: 13544 - RNA, 19 nt, Homo sapiens
  source 1..19: mol_type = genomic RNA
atctgtcacaatgcccctg

SEQ ID NO: 13545 - RNA, 19 nt, Homo sapiens
  source 1..19: mol_type = genomic RNA
tctgtcacaatgcccctgt

SEQ ID NO: 13546 - RNA, 19 nt, Homo sapiens
  source 1..19: mol_type = genomic RNA
ctgtcacaatgcccctgta

SEQ ID NO: 13547 - RNA, 19 nt, Homo sapiens
  source 1..19: mol_type = genomic RNA
tgtcacaatgcccctgtag

SEQ ID NO: 13548 - RNA, 19 nt, Homo sapiens
  source 1..19: mol_type = genomic RNA
gtcacaatgcccctgtagg

SEQ ID NO: 13549 - RNA, 19 nt, Homo sapiens
  source 1..19: mol_type = genomic RNA
tcacaatgcccctgtaggc

SEQ ID NO: 13550 - RNA, 19 nt, Homo sapiens
  source 1..19: mol_type = genomic RNA
cacaatgcccctgtaggca

SEQ ID NO: 13551 - RNA, 19 nt, Homo sapiens
  source 1..19: mol_type = genomic RNA
acaatgcccctgtaggcag

SEQ ID NO: 13552 - RNA, 19 nt, Homo sapiens
  source 1..19: mol_type = genomic RNA
caatgcccctgtaggcaga

SEQ ID NO: 13553 - RNA, 19 nt, Homo sapiens
  source 1..19: mol_type = genomic RNA
aatgcccctgtaggcagag

SEQ ID NO: 13554 - RNA, 19 nt, Homo sapiens
  source 1..19: mol_type = genomic RNA
cccctgtaggcagagctta

SEQ ID NO: 13555 - RNA, 19 nt, Homo sapiens
  source 1..19: mol_type = genomic RNA
ccctgtaggcagagcttag

SEQ ID NO: 13556 - RNA, 19 nt, Homo sapiens
  source 1..19: mol_type = genomic RNA
cctgtaggcagagcttaga

SEQ ID NO: 13557 - RNA, 19 nt, Homo sapiens
  source 1..19: mol_type = genomic RNA
ctgtaggcagagcttagac

SEQ ID NO: 13558 - RNA, 19 nt, Homo sapiens
  source 1..19: mol_type = genomic RNA
tgtaggcagagcttagaca

SEQ ID NO: 13559 - RNA, 19 nt, Homo sapiens
  source 1..19: mol_type = genomic RNA
gtaggcagagcttagacaa

SEQ ID NO: 13560 - RNA, 19 nt, Homo sapiens
  source 1..19: mol_type = genomic RNA
taggcagagcttagacaag

SEQ ID NO: 13561 - RNA, 19 nt, Homo sapiens
  source 1..19: mol_type = genomic RNA
aggcagagcttagacaagt

SEQ ID NO: 13562 - RNA, 19 nt, Homo sapiens
  source 1..19: mol_type = genomic RNA
ggcagagcttagacaagtg

SEQ ID NO: 13563 - RNA, 19 nt, Homo sapiens
  source 1..19: mol_type = genomic RNA
gcagagcttagacaagtgt

SEQ ID NO: 13564 - RNA, 19 nt, Homo sapiens
  source 1..19: mol_type = genomic RNA
cagagcttagacaagtgtt

SEQ ID NO: 13565 - RNA, 19 nt, Homo sapiens
  source 1..19: mol_type = genomic RNA
agagcttagacaagtgtta

SEQ ID NO: 13566 - RNA, 19 nt, Homo sapiens
  source 1..19: mol_type = genomic RNA
gagcttagacaagtgttac

SEQ ID NO: 13567 - RNA, 19 nt, Homo sapiens
  source 1..19: mol_type = genomic RNA
agcttagacaagtgttaca

SEQ ID NO: 13568 - RNA, 19 nt, Homo sapiens
  source 1..19: mol_type = genomic RNA
gcttagacaagtgttacat

SEQ ID NO: 13569 - RNA, 19 nt, Homo sapiens
  source 1..19: mol_type = genomic RNA
tagacaagtgttacatcac

SEQ ID NO: 13570 - RNA, 19 nt, Homo sapiens
  source 1..19: mol_type = genomic RNA
agacaagtgttacatcacc

SEQ ID NO: 13571 - RNA, 19 nt, Homo sapiens
  source 1..19: mol_type = genomic RNA
gacaagtgttacatcacct

SEQ ID NO: 13572 - RNA, 19 nt, Homo sapiens
  source 1..19: mol_type = genomic RNA
acaagtgttacatcacctg

SEQ ID NO: 13573 - RNA, 19 nt, Homo sapiens
  source 1..19: mol_type = genomic RNA
caagtgttacatcacctgg

SEQ ID NO: 13574 - RNA, 19 nt, Homo sapiens
  source 1..19: mol_type = genomic RNA
aagtgttacatcacctggg

SEQ ID NO: 13575 - RNA, 19 nt, Homo sapiens
  source 1..19: mol_type = genomic RNA
agtgttacatcacctgggt

SEQ ID NO: 13576 - RNA, 19 nt, Homo sapiens
  source 1..19: mol_type = genomic RNA
gtgttacatcacctgggtg

SEQ ID NO: 13577 - RNA, 19 nt, Homo sapiens
  source 1..19: mol_type = genomic RNA
tgttacatcacctgggtga

SEQ ID NO: 13578 - RNA, 19 nt, Homo sapiens
  source 1..19: mol_type = genomic RNA
gttacatcacctgggtgat

SEQ ID NO: 13579 - RNA, 19 nt, Homo sapiens
  source 1..19: mol_type = genomic RNA
ttacatcacctgggtgatc

SEQ ID NO: 13580 - RNA, 19 nt, Homo sapiens
  source 1..19: mol_type = genomic RNA
tacatcacctgggtgatca

SEQ ID NO: 13581 - RNA, 19 nt, Homo sapiens
  source 1..19: mol_type = genomic RNA
acatcacctgggtgatcag

SEQ ID NO: 13582 - RNA, 19 nt, Homo sapiens
  source 1..19: mol_type = genomic RNA
catcacctgggtgatcagt

SEQ ID NO: 13583 - RNA, 19 nt, Homo sapiens
  source 1..19: mol_type = genomic RNA
atcacctgggtgatcagtg

SEQ ID NO: 13584 - RNA, 19 nt, Homo sapiens
  source 1..19: mol_type = genomic RNA
tcacctgggtgatcagtgc

SEQ ID NO: 13585 - RNA, 19 nt, Homo sapiens
  source 1..19: mol_type = genomic RNA
cacctgggtgatcagtgca

SEQ ID NO: 13586 - RNA, 19 nt, Homo sapiens
  source 1..19: mol_type = genomic RNA
acctgggtgatcagtgcag

SEQ ID NO: 13587 - RNA, 19 nt, Homo sapiens
  source 1..19: mol_type = genomic RNA
cctgggtgatcagtgcaga

SEQ ID NO: 13588 - RNA, 19 nt, Homo sapiens
  source 1..19: mol_type = genomic RNA
ctgggtgatcagtgcagag

SEQ ID NO: 13589 - RNA, 19 nt, Homo sapiens
  source 1..19: mol_type = genomic RNA
tgggtgatcagtgcagaga

SEQ ID NO: 13590 - RNA, 19 nt, Homo sapiens
  source 1..19: mol_type = genomic RNA
gggtgatcagtgcagagat

SEQ ID NO: 13591 - RNA, 19 nt, Homo sapiens
  source 1..19: mol_type = genomic RNA
ggtgatcagtgcagagatg

SEQ ID NO: 13592 - RNA, 19 nt, Homo sapiens
  source 1..19: mol_type = genomic RNA
gtgatcagtgcagagatgt

SEQ ID NO: 13593 - RNA, 19 nt, Homo sapiens
  source 1..19: mol_type = genomic RNA
tgatcagtgcagagatgtg

SEQ ID NO: 13594 - RNA, 19 nt, Homo sapiens
  source 1..19: mol_type = genomic RNA
gatcagtgcagagatgtgt

SEQ ID NO: 13595 - RNA, 19 nt, Homo sapiens
  source 1..19: mol_type = genomic RNA
atcagtgcagagatgtgtc

SEQ ID NO: 13596 - RNA, 19 nt, Homo sapiens
  source 1..19: mol_type = genomic RNA
tcagtgcagagatgtgtca

SEQ ID NO: 13597 - RNA, 19 nt, Homo sapiens
  source 1..19: mol_type = genomic RNA
tgtcaaaacgctcctgtag

SEQ ID NO: 13598 - RNA, 19 nt, Homo sapiens
  source 1..19: mol_type = genomic RNA
gtcaaaacgctcctgtagt

SEQ ID NO: 13599 - RNA, 19 nt, Homo sapiens
  source 1..19: mol_type = genomic RNA
tcaaaacgctcctgtagtc

SEQ ID NO: 13600 - RNA, 19 nt, Homo sapiens
  source 1..19: mol_type = genomic RNA
caaaacgctcctgtagtct

SEQ ID NO: 13601 - RNA, 19 nt, Homo sapiens
  source 1..19: mol_type = genomic RNA
aaaacgctcctgtagtctg

SEQ ID NO: 13602 - RNA, 19 nt, Homo sapiens
  source 1..19: mol_type = genomic RNA
aaacgctcctgtagtctga

SEQ ID NO: 13603 - RNA, 19 nt, Homo sapiens
  source 1..19: mol_type = genomic RNA
aacgctcctgtagtctgaa

SEQ ID NO: 13604 - RNA, 19 nt, Homo sapiens
  source 1..19: mol_type = genomic RNA
acgctcctgtagtctgaac

SEQ ID NO: 13605 - RNA, 19 nt, Homo sapiens
  source 1..19: mol_type = genomic RNA
cgctcctgtagtctgaacc

SEQ ID NO: 13606 - RNA, 19 nt, Homo sapiens
  source 1..19: mol_type = genomic RNA
gctcctgtagtctgaacct

SEQ ID NO: 13607 - RNA, 19 nt, Homo sapiens
  source 1..19: mol_type = genomic RNA
ctcctgtagtctgaaccta

SEQ ID NO: 13608 - RNA, 19 nt, Homo sapiens
  source 1..19: mol_type = genomic RNA
tcctgtagtctgaacctag

SEQ ID NO: 13609 - RNA, 19 nt, Homo sapiens
  source 1..19: mol_type = genomic RNA
cctgtagtctgaacctaga

SEQ ID NO: 13610 - RNA, 19 nt, Homo sapiens
  source 1..19: mol_type = genomic RNA
ctgtagtctgaacctagac

SEQ ID NO: 13611 - RNA, 19 nt, Homo sapiens
  source 1..19: mol_type = genomic RNA
tgtagtctgaacctagaca

SEQ ID NO: 13612 - RNA, 19 nt, Homo sapiens
  source 1..19: mol_type = genomic RNA
gtagtctgaacctagacag

SEQ ID NO: 13613 - RNA, 19 nt, Homo sapiens
  source 1..19: mol_type = genomic RNA
tagtctgaacctagacagg

SEQ ID NO: 13614 - RNA, 19 nt, Homo sapiens
  source 1..19: mol_type = genomic RNA
agtctgaacctagacagga

SEQ ID NO: 13615 - RNA, 19 nt, Homo sapiens
  source 1..19: mol_type = genomic RNA
gtctgaacctagacaggag

SEQ ID NO: 13616 - RNA, 19 nt, Homo sapiens
  source 1..19: mol_type = genomic RNA
tctgaacctagacaggagt

SEQ ID NO: 13617 - RNA, 19 nt, Homo sapiens
  source 1..19: mol_type = genomic RNA
ctgaacctagacaggagtt

SEQ ID NO: 13618 - RNA, 19 nt, Homo sapiens
  source 1..19: mol_type = genomic RNA
tgaacctagacaggagtta

SEQ ID NO: 13619 - RNA, 19 nt, Homo sapiens
  source 1..19: mol_type = genomic RNA
gaacctagacaggagttac

SEQ ID NO: 13620 - RNA, 19 nt, Homo sapiens
  source 1..19: mol_type = genomic RNA
aacctagacaggagttaca

SEQ ID NO: 13621 - RNA, 19 nt, Homo sapiens
  source 1..19: mol_type = genomic RNA
acctagacaggagttacat

SEQ ID NO: 13622 - RNA, 19 nt, Homo sapiens
  source 1..19: mol_type = genomic RNA
cctagacaggagttacatc

SEQ ID NO: 13623 - RNA, 19 nt, Homo sapiens
  source 1..19: mol_type = genomic RNA
ctagacaggagttacatca

SEQ ID NO: 13624 - RNA, 19 nt, Homo sapiens
  source 1..19: mol_type = genomic RNA
tagacaggagttacatcac

SEQ ID NO: 13625 - RNA, 19 nt, Homo sapiens
  source 1..19: mol_type = genomic RNA
agacaggagttacatcacc

SEQ ID NO: 13626 - RNA, 19 nt, Homo sapiens
  source 1..19: mol_type = genomic RNA
gacaggagttacatcacct

SEQ ID NO: 13627 - RNA, 19 nt, Homo sapiens
  source 1..19: mol_type = genomic RNA
acaggagttacatcacctt

SEQ ID NO: 13628 - RNA, 19 nt, Homo sapiens
  source 1..19: mol_type = genomic RNA
caggagttacatcaccttg

SEQ ID NO: 13629 - RNA, 19 nt, Homo sapiens
  source 1..19: mol_type = genomic RNA
aggagttacatcaccttgg

SEQ ID NO: 13630 - RNA, 19 nt, Homo sapiens
  source 1..19: mol_type = genomic RNA
ggagttacatcaccttggg

SEQ ID NO: 13631 - RNA, 19 nt, Homo sapiens
  source 1..19: mol_type = genomic RNA
gagttacatcaccttgggg

SEQ ID NO: 13632 - RNA, 19 nt, Homo sapiens
  source 1..19: mol_type = genomic RNA
agttacatcaccttgggga

SEQ ID NO: 13633 - RNA, 19 nt, Homo sapiens
  source 1..19: mol_type = genomic RNA
gttacatcaccttggggat

SEQ ID NO: 13634 - RNA, 19 nt, Homo sapiens
  source 1..19: mol_type = genomic RNA
ttacatcaccttggggatc

SEQ ID NO: 13635 - RNA, 19 nt, Homo sapiens
  source 1..19: mol_type = genomic RNA
tacatcaccttggggatca

SEQ ID NO: 13636 - RNA, 19 nt, Homo sapiens
  source 1..19: mol_type = genomic RNA
acatcaccttggggatcag

SEQ ID NO: 13637 - RNA, 19 nt, Homo sapiens
  source 1..19: mol_type = genomic RNA
catcaccttggggatcagt

SEQ ID NO: 13638 - RNA, 19 nt, Homo sapiens
  source 1..19: mol_type = genomic RNA
atcaccttggggatcagtg

SEQ ID NO: 13639 - RNA, 19 nt, Homo sapiens
  source 1..19: mol_type = genomic RNA
tcaccttggggatcagtgc

SEQ ID NO: 13640 - RNA, 19 nt, Homo sapiens
  source 1..19: mol_type = genomic RNA
caccttggggatcagtgca

SEQ ID NO: 13641 - RNA, 19 nt, Homo sapiens
  source 1..19: mol_type = genomic RNA
accttggggatcagtgcag

SEQ ID NO: 13642 - RNA, 19 nt, Homo sapiens
  source 1..19: mol_type = genomic RNA
ccttggggatcagtgcaga

SEQ ID NO: 13643 - RNA, 19 nt, Homo sapiens
  source 1..19: mol_type = genomic RNA
cttggggatcagtgcagag

SEQ ID NO: 13644 - RNA, 19 nt, Homo sapiens
  source 1..19: mol_type = genomic RNA
ttggggatcagtgcagaga

SEQ ID NO: 13645 - RNA, 19 nt, Homo sapiens
  source 1..19: mol_type = genomic RNA
tggggatcagtgcagagat

SEQ ID NO: 13646 - RNA, 19 nt, Homo sapiens
  source 1..19: mol_type = genomic RNA
ggggatcagtgcagagata

SEQ ID NO: 13647 - RNA, 19 nt, Homo sapiens
  source 1..19: mol_type = genomic RNA
gggatcagtgcagagatac

SEQ ID NO: 13648 - RNA, 19 nt, Homo sapiens
  source 1..19: mol_type = genomic RNA
ggatcagtgcagagatacg

SEQ ID NO: 13649 - RNA, 19 nt, Homo sapiens
  source 1..19: mol_type = genomic RNA
gatcagtgcagagatacgt

SEQ ID NO: 13650 - RNA, 19 nt, Homo sapiens
  source 1..19: mol_type = genomic RNA
atcagtgcagagatacgtg

SEQ ID NO: 13651 - RNA, 19 nt, Homo sapiens
  source 1..19: mol_type = genomic RNA
tcagtgcagagatacgtga

SEQ ID NO: 13652 - RNA, 19 nt, Homo sapiens
  source 1..19: mol_type = genomic RNA
cagtgcagagatacgtgag

SEQ ID NO: 13653 - RNA, 19 nt, Homo sapiens
  source 1..19: mol_type = genomic RNA
agtgcagagatacgtgaga

SEQ ID NO: 13654 - RNA, 19 nt, Homo sapiens
  source 1..19: mol_type = genomic RNA
gtgcagagatacgtgagaa

SEQ ID NO: 13655 - RNA, 19 nt, Homo sapiens
  source 1..19: mol_type = genomic RNA
tgcagagatacgtgagaat

SEQ ID NO: 13656 - RNA, 19 nt, Homo sapiens
  source 1..19: mol_type = genomic RNA
gcagagatacgtgagaatt

SEQ ID NO: 13657 - RNA, 19 nt, Homo sapiens
  source 1..19: mol_type = genomic RNA
cagagatacgtgagaattc

SEQ ID NO: 13658 - RNA, 19 nt, Homo sapiens
  source 1..19: mol_type = genomic RNA
agagatacgtgagaattcc

SEQ ID NO: 13659 - RNA, 19 nt, Homo sapiens
  source 1..19: mol_type = genomic RNA
gagatacgtgagaattccc

SEQ ID NO: 13660 - RNA, 19 nt, Homo sapiens
  source 1..19: mol_type = genomic RNA
agatacgtgagaattccct

SEQ ID NO: 13661 - RNA, 19 nt, Homo sapiens
  source 1..19: mol_type = genomic RNA
gatacgtgagaattccctt

SEQ ID NO: 13662 - RNA, 19 nt, Homo sapiens
  source 1..19: mol_type = genomic RNA
atacgtgagaattcccttg

SEQ ID NO: 13663 - RNA, 19 nt, Homo sapiens
  source 1..19: mol_type = genomic RNA
tacgtgagaattcccttgt

SEQ ID NO: 13664 - RNA, 19 nt, Homo sapiens
  source 1..19: mol_type = genomic RNA
acgtgagaattcccttgta

SEQ ID NO: 13665 - RNA, 19 nt, Homo sapiens
  source 1..19: mol_type = genomic RNA
cgtgagaattcccttgtag

SEQ ID NO: 13666 - RNA, 19 nt, Homo sapiens
  source 1..19: mol_type = genomic RNA
gtgagaattcccttgtagg

SEQ ID NO: 13667 - RNA, 19 nt, Homo sapiens
  source 1..19: mol_type = genomic RNA
tgagaattcccttgtaggc

SEQ ID NO: 13668 - RNA, 19 nt, Homo sapiens
  source 1..19: mol_type = genomic RNA
gagaattcccttgtaggca

SEQ ID NO: 13669 - RNA, 19 nt, Homo sapiens
  source 1..19: mol_type = genomic RNA
agaattcccttgtaggcag

SEQ ID NO: 13670 - RNA, 19 nt, Homo sapiens
  source 1..19: mol_type = genomic RNA
gaattcccttgtaggcagg

SEQ ID NO: 13671 - RNA, 19 nt, Homo sapiens
  source 1..19: mol_type = genomic RNA
aattcccttgtaggcaggg

SEQ ID NO: 13672 - RNA, 19 nt, Homo sapiens
  source 1..19: mol_type = genomic RNA
attcccttgtaggcagggc

SEQ ID NO: 13673 - RNA, 19 nt, Homo sapiens
  source 1..19: mol_type = genomic RNA
ttcccttgtaggcagggcc

SEQ ID NO: 13674 - RNA, 19 nt, Homo sapiens
  source 1..19: mol_type = genomic RNA
cccttgtaggcagggccta

SEQ ID NO: 13675 - RNA, 19 nt, Homo sapiens
  source 1..19: mol_type = genomic RNA
ccttgtaggcagggcctag

SEQ ID NO: 13676 - RNA, 19 nt, Homo sapiens
  source 1..19: mol_type = genomic RNA
cttgtaggcagggcctaga

SEQ ID NO: 13677 - RNA, 19 nt, Homo sapiens
  source 1..19: mol_type = genomic RNA
cagggcctagacaagtgtt

SEQ ID NO: 13678 - RNA, 19 nt, Homo sapiens
  source 1..19: mol_type = genomic RNA
agggcctagacaagtgtta

SEQ ID NO: 13679 - RNA, 19 nt, Homo sapiens
  source 1..19: mol_type = genomic RNA
gggcctagacaagtgttac

SEQ ID NO: 13680 - RNA, 19 nt, Homo sapiens
  source 1..19: mol_type = genomic RNA
ggcctagacaagtgttaca

SEQ ID NO: 13681 - RNA, 19 nt, Homo sapiens
  source 1..19: mol_type = genomic RNA
gcctagacaagtgttacat

SEQ ID NO: 13682 - RNA, 19 nt, Homo sapiens
  source 1..19: mol_type = genomic RNA
cctagacaagtgttacatc

SEQ ID NO: 13683 - RNA, 19 nt, Homo sapiens
  source 1..19: mol_type = genomic RNA
ctagacaagtgttacatca

SEQ ID NO: 13684 - RNA, 19 nt, Homo sapiens
  source 1..19: mol_type = genomic RNA
acaagtgttacatcaccta

SEQ ID NO: 13685 - RNA, 19 nt, Homo sapiens
  source 1..19: mol_type = genomic RNA
caagtgttacatcacctag

SEQ ID NO: 13686 - RNA, 19 nt, Homo sapiens
  source 1..19: mol_type = genomic RNA
aagtgttacatcacctagg

SEQ ID NO: 13687 - RNA, 19 nt, Homo sapiens
  source 1..19: mol_type = genomic RNA
agtgttacatcacctaggt

SEQ ID NO: 13688 - RNA, 19 nt, Homo sapiens
  source 1..19: mol_type = genomic RNA
gtgttacatcacctaggtt

SEQ ID NO: 13689 - RNA, 19 nt, Homo sapiens
  source 1..19: mol_type = genomic RNA
tgttacatcacctaggtta

SEQ ID NO: 13690 - RNA, 19 nt, Homo sapiens
  source 1..19: mol_type = genomic RNA
ttacatcacctaggttatc

SEQ ID NO: 13691 - RNA, 19 nt, Homo sapiens
  source 1..19: mol_type = genomic RNA
tacatcacctaggttatca

SEQ ID NO: 13692 - RNA, 19 nt, Homo sapiens
  source 1..19: mol_type = genomic RNA
acatcacctaggttatcag

SEQ ID NO: 13693 - RNA, 19 nt, Homo sapiens
  source 1..19: mol_type = genomic RNA
catcacctaggttatcagt

SEQ ID NO: 13694 - RNA, 19 nt, Homo sapiens
  source 1..19: mol_type = genomic RNA
atcacctaggttatcagtg

SEQ ID NO: 13695 - RNA, 19 nt, Homo sapiens
  source 1..19: mol_type = genomic RNA
tcacctaggttatcagtgc

SEQ ID NO: 13696 - RNA, 19 nt, Homo sapiens
  source 1..19: mol_type = genomic RNA
cacctaggttatcagtgca

SEQ ID NO: 13697 - RNA, 19 nt, Homo sapiens
  source 1..19: mol_type = genomic RNA
acctaggttatcagtgcag

SEQ ID NO: 13698 - RNA, 19 nt, Homo sapiens
  source 1..19: mol_type = genomic RNA
cctaggttatcagtgcaga

SEQ ID NO: 13699 - RNA, 19 nt, Homo sapiens
  source 1..19: mol_type = genomic RNA
ctaggttatcagtgcagag

SEQ ID NO: 13700 - RNA, 19 nt, Homo sapiens
  source 1..19: mol_type = genomic RNA
taggttatcagtgcagaga

SEQ ID NO: 13701 - RNA, 19 nt, Homo sapiens
  source 1..19: mol_type = genomic RNA
aggttatcagtgcagagat

SEQ ID NO: 13702 - RNA, 19 nt, Homo sapiens
  source 1..19: mol_type = genomic RNA
ggttatcagtgcagagata

SEQ ID NO: 13703 - RNA, 19 nt, Homo sapiens
  source 1..19: mol_type = genomic RNA
gttatcagtgcagagatat

SEQ ID NO: 13704 - RNA, 19 nt, Homo sapiens
  source 1..19: mol_type = genomic RNA
ttatcagtgcagagatatg

SEQ ID NO: 13705 - RNA, 19 nt, Homo sapiens
  source 1..19: mol_type = genomic RNA
tatcagtgcagagatatgt

SEQ ID NO: 13706 - RNA, 19 nt, Homo sapiens
  source 1..19: mol_type = genomic RNA
atcagtgcagagatatgtg

SEQ ID NO: 13707 - RNA, 19 nt, Homo sapiens
  source 1..19: mol_type = genomic RNA
tcagtgcagagatatgtga

SEQ ID NO: 13708 - RNA, 19 nt, Homo sapiens
  source 1..19: mol_type = genomic RNA
cagtgcagagatatgtgag

SEQ ID NO: 13709 - RNA, 19 nt, Homo sapiens
  source 1..19: mol_type = genomic RNA
agtgcagagatatgtgaga

SEQ ID NO: 13710 - RNA, 19 nt, Homo sapiens
  source 1..19: mol_type = genomic RNA
gtgcagagatatgtgagaa

SEQ ID NO: 13711 - RNA, 19 nt, Homo sapiens
  source 1..19: mol_type = genomic RNA
tgcagagatatgtgagaat

SEQ ID NO: 13712 - RNA, 19 nt, Homo sapiens
  source 1..19: mol_type = genomic RNA
gcagagatatgtgagaatt

SEQ ID NO: 13713 - RNA, 19 nt, Homo sapiens
  source 1..19: mol_type = genomic RNA
cagagatatgtgagaattc

SEQ ID NO: 13714 - RNA, 19 nt, Homo sapiens
  source 1..19: mol_type = genomic RNA
agagatatgtgagaattcc

SEQ ID NO: 13715 - RNA, 19 nt, Homo sapiens
  source 1..19: mol_type = genomic RNA
gagatatgtgagaattccc

SEQ ID NO: 13716 - RNA, 19 nt, Homo sapiens
  source 1..19: mol_type = genomic RNA
agatatgtgagaattcccg

SEQ ID NO: 13717 - RNA, 19 nt, Homo sapiens
  source 1..19: mol_type = genomic RNA
gatatgtgagaattcccgt

SEQ ID NO: 13718 - RNA, 19 nt, Homo sapiens
  source 1..19: mol_type = genomic RNA
atatgtgagaattcccgtg

SEQ ID NO: 13719 - RNA, 19 nt, Homo sapiens
  source 1..19: mol_type = genomic RNA
tatgtgagaattcccgtgt

SEQ ID NO: 13720 - RNA, 19 nt, Homo sapiens
  source 1..19: mol_type = genomic RNA
atgtgagaattcccgtgta

SEQ ID NO: 13721 - RNA, 19 nt, Homo sapiens
  source 1..19: mol_type = genomic RNA
tgtgagaattcccgtgtag

SEQ ID NO: 13722 - RNA, 19 nt, Homo sapiens
  source 1..19: mol_type = genomic RNA
gtgagaattcccgtgtagg

SEQ ID NO: 13723 - RNA, 19 nt, Homo sapiens
  source 1..19: mol_type = genomic RNA
tgagaattcccgtgtaggc

SEQ ID NO: 13724 - RNA, 19 nt, Homo sapiens
  source 1..19: mol_type = genomic RNA
gagaattcccgtgtaggca

SEQ ID NO: 13725 - RNA, 19 nt, Homo sapiens
  source 1..19: mol_type = genomic RNA
agaattcccgtgtaggcag

SEQ ID NO: 13726 - RNA, 19 nt, Homo sapiens
  source 1..19: mol_type = genomic RNA
gaattcccgtgtaggcaga

SEQ ID NO: 13727 - RNA, 19 nt, Homo sapiens
  source 1..19: mol_type = genomic RNA
aattcccgtgtaggcagag

SEQ ID NO: 13728 - RNA, 19 nt, Homo sapiens
  source 1..19: mol_type = genomic RNA
attcccgtgtaggcagagc

SEQ ID NO: 13729 - RNA, 19 nt, Homo sapiens
  source 1..19: mol_type = genomic RNA
ttcccgtgtaggcagagcc

SEQ ID NO: 13730 - RNA, 19 nt, Homo sapiens
  source 1..19: mol_type = genomic RNA
tcccgtgtaggcagagcct

SEQ ID NO: 13731 - RNA, 19 nt, Homo sapiens
  source 1..19: mol_type = genomic RNA
cccgtgtaggcagagccta

SEQ ID NO: 13732 - RNA, 19 nt, Homo sapiens
  source 1..19: mol_type = genomic RNA
ccgtgtaggcagagcctag

SEQ ID NO: 13733 - RNA, 19 nt, Homo sapiens
  source 1..19: mol_type = genomic RNA
cgtgtaggcagagcctaga

SEQ ID NO: 13734 - RNA, 19 nt, Homo sapiens
  source 1..19: mol_type = genomic RNA
gtgtaggcagagcctagac

SEQ ID NO: 13735 - RNA, 19 nt, Homo sapiens
  source 1..19: mol_type = genomic RNA
tgtaggcagagcctagaca

SEQ ID NO: 13736 - RNA, 19 nt, Homo sapiens
  source 1..19: mol_type = genomic RNA
gtaggcagagcctagacaa

SEQ ID NO: 13737 - RNA, 19 nt, Homo sapiens
  source 1..19: mol_type = genomic RNA
taggcagagcctagacaag

SEQ ID NO: 13738 - RNA, 19 nt, Homo sapiens
  source 1..19: mol_type = genomic RNA
ggcagagcctagacaagtg

SEQ ID NO: 13739 - RNA, 19 nt, Homo sapiens
  source 1..19: mol_type = genomic RNA
gcagagcctagacaagtgt

SEQ ID NO: 13740 - RNA, 19 nt, Homo sapiens
  source 1..19: mol_type = genomic RNA
cagagcctagacaagtgtt

SEQ ID NO: 13741 - RNA, 19 nt, Homo sapiens
  source 1..19: mol_type = genomic RNA
agagcctagacaagtgtta

SEQ ID NO: 13742 - RNA, 19 nt, Homo sapiens
  source 1..19: mol_type = genomic RNA
gagcctagacaagtgttac

SEQ ID NO: 13743 - RNA, 19 nt, Homo sapiens
  source 1..19: mol_type = genomic RNA
agcctagacaagtgttaca

SEQ ID NO: 13744 - RNA, 19 nt, Homo sapiens
  source 1..19: mol_type = genomic RNA
aagtgttacatcacctagt

SEQ ID NO: 13745 - RNA, 19 nt, Homo sapiens
  source 1..19: mol_type = genomic RNA
tattagtcataaagcctcc

SEQ ID NO: 13746 - RNA, 19 nt, Homo sapiens
  source 1..19: mol_type = genomic RNA
attagtcataaagcctcct

SEQ ID NO: 13747 - RNA, 19 nt, Homo sapiens
  source 1..19: mol_type = genomic RNA
ttagtcataaagcctcctg

SEQ ID NO: 13748 - RNA, 19 nt, Homo sapiens
  source 1..19: mol_type = genomic RNA
tagtcataaagcctcctgt

SEQ ID NO: 13749 - RNA, 19 nt, Homo sapiens
  source 1..19: mol_type = genomic RNA
cgtagacaagagttccctc

SEQ ID NO: 13750 - RNA, 19 nt, Homo sapiens
  source 1..19: mol_type = genomic RNA
gtagacaagagttccctcc

SEQ ID NO: 13751 - RNA, 19 nt, Homo sapiens
  source 1..19: mol_type = genomic RNA
tagacaagagttccctcct

SEQ ID NO: 13752 - RNA, 19 nt, Homo sapiens
  source 1..19: mol_type = genomic RNA
agacaagagttccctcctc

SEQ ID NO: 13753 - RNA, 19 nt, Homo sapiens
  source 1..19: mol_type = genomic RNA
gacaagagttccctcctca

SEQ ID NO: 13754 - RNA, 19 nt, Homo sapiens
  source 1..19: mol_type = genomic RNA
acaagagttccctcctcag

SEQ ID NO: 13755 - RNA, 19 nt, Homo sapiens
  source 1..19: mol_type = genomic RNA
caagagttccctcctcagg

SEQ ID NO: 13756 - RNA, 19 nt, Homo sapiens
  source 1..19: mol_type = genomic RNA
aagagttccctcctcaggg

SEQ ID NO: 13757 - RNA, 19 nt, Homo sapiens
  source 1..19: mol_type = genomic RNA
agagttccctcctcagggt

SEQ ID NO: 13758 - RNA, 19 nt, Homo sapiens
  source 1..19: mol_type = genomic RNA
gagttccctcctcagggtg

SEQ ID NO: 13759 - RNA, 19 nt, Homo sapiens
  source 1..19: mol_type = genomic RNA
agttccctcctcagggtga

SEQ ID NO: 13760 - RNA, 19 nt, Homo sapiens
  source 1..19: mol_type = genomic RNA
gttccctcctcagggtgat

SEQ ID NO: 13761 - RNA, 19 nt, Homo sapiens
  source 1..19: mol_type = genomic RNA
ttccctcctcagggtgatc

SEQ ID NO: 13762 - RNA, 19 nt, Homo sapiens
  source 1..19: mol_type = genomic RNA
tccctcctcagggtgatca

SEQ ID NO: 13763 - RNA, 19 nt, Homo sapiens
  source 1..19: mol_type = genomic RNA
ccctcctcagggtgatcag

SEQ ID NO: 13764 - RNA, 19 nt, Homo sapiens
  source 1..19: mol_type = genomic RNA
cctcctcagggtgatcagt

SEQ ID NO: 13765 - RNA, 19 nt, Homo sapiens
  source 1..19: mol_type = genomic RNA
ctcctcagggtgatcagtg

SEQ ID NO: 13766 - RNA, 19 nt, Homo sapiens
  source 1..19: mol_type = genomic RNA
tcctcagggtgatcagtgc

SEQ ID NO: 13767 - RNA, 19 nt, Homo sapiens
  source 1..19: mol_type = genomic RNA
cctcagggtgatcagtgca

SEQ ID NO: 13768 - RNA, 19 nt, Homo sapiens
  source 1..19: mol_type = genomic RNA
ctcagggtgatcagtgcag

SEQ ID NO: 13769 - RNA, 19 nt, Homo sapiens
  source 1..19: mol_type = genomic RNA
tcagggtgatcagtgcaga

SEQ ID NO: 13770 - RNA, 19 nt, Homo sapiens
  source 1..19: mol_type = genomic RNA
cagggtgatcagtgcagag

SEQ ID NO: 13771 - RNA, 19 nt, Homo sapiens
  source 1..19: mol_type = genomic RNA
agggtgatcagtgcagaga

SEQ ID NO: 13772 - RNA, 19 nt, Homo sapiens
  source 1..19: mol_type = genomic RNA
cagtgcagagatgtgtcac

SEQ ID NO: 13773 - RNA, 19 nt, Homo sapiens
  source 1..19: mol_type = genomic RNA
agtgcagagatgtgtcaca

SEQ ID NO: 13774 - RNA, 19 nt, Homo sapiens
  source 1..19: mol_type = genomic RNA
gtgcagagatgtgtcacaa

SEQ ID NO: 13775 - RNA, 19 nt, Homo sapiens
  source 1..19: mol_type = genomic RNA
tgcagagatgtgtcacaaa

SEQ ID NO: 13776 - RNA, 19 nt, Homo sapiens
  source 1..19: mol_type = genomic RNA
gcagagatgtgtcacaaag

SEQ ID NO: 13777 - RNA, 19 nt, Homo sapiens
  source 1..19: mol_type = genomic RNA
cagagatgtgtcacaaagc

SEQ ID NO: 13778 - RNA, 19 nt, Homo sapiens
  source 1..19: mol_type = genomic RNA
agagatgtgtcacaaagcc

SEQ ID NO: 13779 - RNA, 19 nt, Homo sapiens
  source 1..19: mol_type = genomic RNA
gagatgtgtcacaaagccc

SEQ ID NO: 13780 - RNA, 19 nt, Homo sapiens
  source 1..19: mol_type = genomic RNA
agatgtgtcacaaagcccc

SEQ ID NO: 13781 - RNA, 19 nt, Homo sapiens
  source 1..19: mol_type = genomic RNA
gatgtgtcacaaagcccct

SEQ ID NO: 13782 - RNA, 19 nt, Homo sapiens
  source 1..19: mol_type = genomic RNA
atgtgtcacaaagcccctg

SEQ ID NO: 13783 - RNA, 19 nt, Homo sapiens
  source 1..19: mol_type = genomic RNA
tgtgtcacaaagcccctgt

SEQ ID NO: 13784 - RNA, 19 nt, Homo sapiens
  source 1..19: mol_type = genomic RNA
gtgtcacaaagcccctgta

SEQ ID NO: 13785 - RNA, 19 nt, Homo sapiens
  source 1..19: mol_type = genomic RNA
tgtcacaaagcccctgtag

SEQ ID NO: 13786 - RNA, 19 nt, Homo sapiens
  source 1..19: mol_type = genomic RNA
gtcacaaagcccctgtagg

SEQ ID NO: 13787 - RNA, 19 nt, Homo sapiens
  source 1..19: mol_type = genomic RNA
tcacaaagcccctgtaggc

SEQ ID NO: 13788 - RNA, 19 nt, Homo sapiens
  source 1..19: mol_type = genomic RNA
cacaaagcccctgtaggca

SEQ ID NO: 13789 - RNA, 19 nt, Homo sapiens
  source 1..19: mol_type = genomic RNA
caaagcccctgtaggcaga

SEQ ID NO: 13790 - RNA, 19 nt, Homo sapiens
  source 1..19: mol_type = genomic RNA
ccctgtaggcagagcctag

SEQ ID NO: 13791 - RNA, 19 nt, Homo sapiens
  source 1..19: mol_type = genomic RNA
cctgtaggcagagcctaga

SEQ ID NO: 13792 - RNA, 19 nt, Homo sapiens
  source 1..19: mol_type = genomic RNA
ctgtaggcagagcctagac

SEQ ID NO: 13793 - RNA, 19 nt, Homo sapiens
  source 1..19: mol_type = genomic RNA
gcagagcctagacaagagt

SEQ ID NO: 13794 - RNA, 19 nt, Homo sapiens
  source 1..19: mol_type = genomic RNA
cagagcctagacaagagtt

SEQ ID NO: 13795 - RNA, 19 nt, Homo sapiens
  source 1..19: mol_type = genomic RNA
agagcctagacaagagttt

SEQ ID NO: 13796 - RNA, 19 nt, Homo sapiens
  source 1..19: mol_type = genomic RNA
gagcctagacaagagtttc

SEQ ID NO: 13797 - RNA, 19 nt, Homo sapiens
  source 1..19: mol_type = genomic RNA
agcctagacaagagtttca

SEQ ID NO: 13798 - RNA, 19 nt, Homo sapiens
  source 1..19: mol_type = genomic RNA
gcctagacaagagtttcat

SEQ ID NO: 13799 - RNA, 19 nt, Homo sapiens
  source 1..19: mol_type = genomic RNA
cctagacaagagtttcatc

SEQ ID NO: 13800 - RNA, 19 nt, Homo sapiens
  source 1..19: mol_type = genomic RNA
tagacaagagtttcatcac

SEQ ID NO: 13801 - RNA, 19 nt, Homo sapiens
  source 1..19: mol_type = genomic RNA
agacaagagtttcatcact

SEQ ID NO: 13802 - RNA, 19 nt, Homo sapiens
  source 1..19: mol_type = genomic RNA
aagagtttcatcacttggt

SEQ ID NO: 13803 - RNA, 19 nt, Homo sapiens
  source 1..19: mol_type = genomic RNA
tcatcacttggttgatcag

SEQ ID NO: 13804 - RNA, 19 nt, Homo sapiens
  source 1..19: mol_type = genomic RNA
catcacttggttgatcagt

SEQ ID NO: 13805 - RNA, 19 nt, Homo sapiens
  source 1..19: mol_type = genomic RNA
tcacttggttgatcagttc

SEQ ID NO: 13806 - RNA, 19 nt, Homo sapiens
  source 1..19: mol_type = genomic RNA
acttggttgatcagttcag

SEQ ID NO: 13807 - RNA, 19 nt, Homo sapiens
  source 1..19: mol_type = genomic RNA
ttggttgatcagttcagag

SEQ ID NO: 13808 - RNA, 19 nt, Homo sapiens
  source 1..19: mol_type = genomic RNA
tggttgatcagttcagaga

SEQ ID NO: 13809 - RNA, 19 nt, Homo sapiens
  source 1..19: mol_type = genomic RNA
ggttgatcagttcagagat

SEQ ID NO: 13810 - RNA, 19 nt, Homo sapiens
  source 1..19: mol_type = genomic RNA
gttgatcagttcagagatg

SEQ ID NO: 13811 - RNA, 19 nt, Homo sapiens
  source 1..19: mol_type = genomic RNA
ttgatcagttcagagatgt

SEQ ID NO: 13812 - RNA, 19 nt, Homo sapiens
  source 1..19: mol_type = genomic RNA
tgatcagttcagagatgtg

SEQ ID NO: 13813 - RNA, 19 nt, Homo sapiens
  source 1..19: mol_type = genomic RNA
gatcagttcagagatgtgt

SEQ ID NO: 13814 - RNA, 19 nt, Homo sapiens
  source 1..19: mol_type = genomic RNA
atcagttcagagatgtgtc

SEQ ID NO: 13815 - RNA, 19 nt, Homo sapiens
  source 1..19: mol_type = genomic RNA
tcagttcagagatgtgtca

SEQ ID NO: 13816 - RNA, 19 nt, Homo sapiens
  source 1..19: mol_type = genomic RNA
cagttcagagatgtgtcag

SEQ ID NO: 13817 - RNA, 19 nt, Homo sapiens
  source 1..19: mol_type = genomic RNA
agttcagagatgtgtcaga

SEQ ID NO: 13818 - RNA, 19 nt, Homo sapiens
  source 1..19: mol_type = genomic RNA
gttcagagatgtgtcagaa

SEQ ID NO: 13819 - RNA, 19 nt, Homo sapiens
  source 1..19: mol_type = genomic RNA
ttcagagatgtgtcagaat

SEQ ID NO: 13820 - RNA, 19 nt, Homo sapiens
  source 1..19: mol_type = genomic RNA
tcagagatgtgtcagaatg

SEQ ID NO: 13821 - RNA, 19 nt, Homo sapiens
  source 1..19: mol_type = genomic RNA
cagagatgtgtcagaatgc

SEQ ID NO: 13822 - RNA, 19 nt, Homo sapiens
  source 1..19: mol_type = genomic RNA
agagatgtgtcagaatgcc

SEQ ID NO: 13823 - RNA, 19 nt, Homo sapiens
  source 1..19: mol_type = genomic RNA
gagatgtgtcagaatgccc

SEQ ID NO: 13824 - RNA, 19 nt, Homo sapiens
  source 1..19: mol_type = genomic RNA
agatgtgtcagaatgccca

SEQ ID NO: 13825 - RNA, 19 nt, Homo sapiens
  source 1..19: mol_type = genomic RNA
gatgtgtcagaatgcccat

SEQ ID NO: 13826 - RNA, 19 nt, Homo sapiens
  source 1..19: mol_type = genomic RNA
atgtgtcagaatgcccatg

SEQ ID NO: 13827 - RNA, 19 nt, Homo sapiens
  source 1..19: mol_type = genomic RNA
tgtgtcagaatgcccatgt

SEQ ID NO: 13828 - RNA, 19 nt, Homo sapiens
  source 1..19: mol_type = genomic RNA
gtgtcagaatgcccatgta

SEQ ID NO: 13829 - RNA, 19 nt, Homo sapiens
  source 1..19: mol_type = genomic RNA
tgtcagaatgcccatgtag

SEQ ID NO: 13830 - RNA, 19 nt, Homo sapiens
  source 1..19: mol_type = genomic RNA
gtcagaatgcccatgtagg

SEQ ID NO: 13831 - RNA, 19 nt, Homo sapiens
  source 1..19: mol_type = genomic RNA
tcagaatgcccatgtaggc

SEQ ID NO: 13832 - RNA, 19 nt, Homo sapiens
  source 1..19: mol_type = genomic RNA
cagaatgcccatgtaggca

SEQ ID NO: 13833 - RNA, 19 nt, Homo sapiens
  source 1..19: mol_type = genomic RNA
agaatgcccatgtaggcag

SEQ ID NO: 13834 - RNA, 19 nt, Homo sapiens
  source 1..19: mol_type = genomic RNA
gaatgcccatgtaggcaga

SEQ ID NO: 13835 - RNA, 19 nt, Homo sapiens
  source 1..19: mol_type = genomic RNA
aatgcccatgtaggcagat

SEQ ID NO: 13836 - RNA, 19 nt, Homo sapiens
  source 1..19: mol_type = genomic RNA
atgcccatgtaggcagatc

SEQ ID NO: 13837 - RNA, 19 nt, Homo sapiens
  source 1..19: mol_type = genomic RNA
tgcccatgtaggcagatct

SEQ ID NO: 13838 - RNA, 19 nt, Homo sapiens
  source 1..19: mol_type = genomic RNA
gcccatgtaggcagatcta

SEQ ID NO: 13839 - RNA, 19 nt, Homo sapiens
  source 1..19: mol_type = genomic RNA
cccatgtaggcagatctaa

SEQ ID NO: 13840 - RNA, 19 nt, Homo sapiens
  source 1..19: mol_type = genomic RNA
ccatgtaggcagatctaag

SEQ ID NO: 13841 - RNA, 19 nt, Homo sapiens
  source 1..19: mol_type = genomic RNA
catgtaggcagatctaaga

SEQ ID NO: 13842 - RNA, 19 nt, Homo sapiens
  source 1..19: mol_type = genomic RNA
atgtaggcagatctaagac

SEQ ID NO: 13843 - RNA, 19 nt, Homo sapiens
  source 1..19: mol_type = genomic RNA
tgtaggcagatctaagaca

SEQ ID NO: 13844 - RNA, 19 nt, Homo sapiens
  source 1..19: mol_type = genomic RNA
gtaggcagatctaagacaa

SEQ ID NO: 13845 - RNA, 19 nt, Homo sapiens
  source 1..19: mol_type = genomic RNA
taggcagatctaagacaag

SEQ ID NO: 13846 - RNA, 19 nt, Homo sapiens
  source 1..19: mol_type = genomic RNA
aggcagatctaagacaagc

SEQ ID NO: 13847 - RNA, 19 nt, Homo sapiens
  source 1..19: mol_type = genomic RNA
ggcagatctaagacaagcg

SEQ ID NO: 13848 - RNA, 19 nt, Homo sapiens
  source 1..19: mol_type = genomic RNA
gcagatctaagacaagcgt

SEQ ID NO: 13849 - RNA, 19 nt, Homo sapiens
  source 1..19: mol_type = genomic RNA
cagatctaagacaagcgtc

SEQ ID NO: 13850 - RNA, 19 nt, Homo sapiens
  source 1..19: mol_type = genomic RNA
agatctaagacaagcgtcc

SEQ ID NO: 13851 - RNA, 19 nt, Homo sapiens
  source 1..19: mol_type = genomic RNA
gatctaagacaagcgtcca

SEQ ID NO: 13852 - RNA, 19 nt, Homo sapiens
  source 1..19: mol_type = genomic RNA
atctaagacaagcgtccat

SEQ ID NO: 13853 - RNA, 19 nt, Homo sapiens
  source 1..19: mol_type = genomic RNA
tctaagacaagcgtccatc

SEQ ID NO: 13854 - RNA, 19 nt, Homo sapiens
  source 1..19: mol_type = genomic RNA
ctaagacaagcgtccatca

SEQ ID NO: 13855 - RNA, 19 nt, Homo sapiens
  source 1..19: mol_type = genomic RNA
taagacaagcgtccatcac

SEQ ID NO: 13856 - RNA, 19 nt, Homo sapiens
  source 1..19: mol_type = genomic RNA
aagacaagcgtccatcacc

SEQ ID NO: 13857 - RNA, 19 nt, Homo sapiens
  source 1..19: mol_type = genomic RNA
agacaagcgtccatcacct

SEQ ID NO: 13858 - RNA, 19 nt, Homo sapiens
  source 1..19: mol_type = genomic RNA
gacaagcgtccatcacctg

SEQ ID NO: 13859 - RNA, 19 nt, Homo sapiens
  source 1..19: mol_type = genomic RNA
acaagcgtccatcacctgg

SEQ ID NO: 13860 - RNA, 19 nt, Homo sapiens
  source 1..19: mol_type = genomic RNA
caagcgtccatcacctggg

SEQ ID NO: 13861 - RNA, 19 nt, Homo sapiens
  source 1..19: mol_type = genomic RNA
aagcgtccatcacctgggt

SEQ ID NO: 13862 - RNA, 19 nt, Homo sapiens
  source 1..19: mol_type = genomic RNA
agcgtccatcacctgggtg

SEQ ID NO: 13863 - RNA, 19 nt, Homo sapiens
  source 1..19: mol_type = genomic RNA
gcgtccatcacctgggtga

SEQ ID NO: 13864 - RNA, 19 nt, Homo sapiens
  source 1..19: mol_type = genomic RNA
cgtccatcacctgggtgat

SEQ ID NO: 13865 - RNA, 19 nt, Homo sapiens
  source 1..19: mol_type = genomic RNA
gtccatcacctgggtgatc

SEQ ID NO: 13866 - RNA, 19 nt, Homo sapiens
  source 1..19: mol_type = genomic RNA
tccatcacctgggtgatca

SEQ ID NO: 13867 - RNA, 19 nt, Homo sapiens
  source 1..19: mol_type = genomic RNA
ccatcacctgggtgatcag

SEQ ID NO: 13868 - RNA, 19 nt, Homo sapiens
  source 1..19: mol_type = genomic RNA
ggtgatcagtgcagagata

SEQ ID NO: 13869 - RNA, 19 nt, Homo sapiens
  source 1..19: mol_type = genomic RNA
gtgatcagtgcagagatat

SEQ ID NO: 13870 - RNA, 19 nt, Homo sapiens
  source 1..19: mol_type = genomic RNA
tgatcagtgcagagatatg

SEQ ID NO: 13871 - RNA, 19 nt, Homo sapiens
  source 1..19: mol_type = genomic RNA
gatcagtgcagagatatgt

SEQ ID NO: 13872 - RNA, 19 nt, Homo sapiens
  source 1..19: mol_type = genomic RNA
atcagtgcagagatatgta

SEQ ID NO: 13873 - RNA, 19 nt, Homo sapiens
  source 1..19: mol_type = genomic RNA
tcagtgcagagatatgtac

SEQ ID NO: 13874 - RNA, 19 nt, Homo sapiens
  source 1..19: mol_type = genomic RNA
cagtgcagagatatgtacc

SEQ ID NO: 13875 - RNA, 19 nt, Homo sapiens
  source 1..19: mol_type = genomic RNA
agtgcagagatatgtacca

SEQ ID NO: 13876 - RNA, 19 nt, Homo sapiens
  source 1..19: mol_type = genomic RNA
gtgcagagatatgtaccag

SEQ ID NO: 13877 - RNA, 19 nt, Homo sapiens
  source 1..19: mol_type = genomic RNA
tgcagagatatgtaccagt

SEQ ID NO: 13878 - RNA, 19 nt, Homo sapiens
  source 1..19: mol_type = genomic RNA
gcagagatatgtaccagtg

SEQ ID NO: 13879 - RNA, 19 nt, Homo sapiens
  source 1..19: mol_type = genomic RNA
cagagatatgtaccagtgt

SEQ ID NO: 13880 - RNA, 19 nt, Homo sapiens
  source 1..19: mol_type = genomic RNA
agagatatgtaccagtgtc

SEQ ID NO: 13881 - RNA, 19 nt, Homo sapiens
  source 1..19: mol_type = genomic RNA
gagatatgtaccagtgtcc

SEQ ID NO: 13882 - RNA, 19 nt, Homo sapiens
  source 1..19: mol_type = genomic RNA
agatatgtaccagtgtccc

SEQ ID NO: 13883 - RNA, 19 nt, Homo sapiens
  source 1..19: mol_type = genomic RNA
gatatgtaccagtgtcccc

SEQ ID NO: 13884 - RNA, 19 nt, Homo sapiens
  source 1..19: mol_type = genomic RNA
atatgtaccagtgtcccct

SEQ ID NO: 13885 - RNA, 19 nt, Homo sapiens
  source 1..19: mol_type = genomic RNA
tatgtaccagtgtcccctg

SEQ ID NO: 13886 - RNA, 19 nt, Homo sapiens
  source 1..19: mol_type = genomic RNA
atgtaccagtgtcccctgt

SEQ ID NO: 13887 - RNA, 19 nt, Homo sapiens
  source 1..19: mol_type = genomic RNA
tgtaccagtgtcccctgta

SEQ ID NO: 13888 - RNA, 19 nt, Homo sapiens
  source 1..19: mol_type = genomic RNA
gtaccagtgtcccctgtag

SEQ ID NO: 13889 - RNA, 19 nt, Homo sapiens
  source 1..19: mol_type = genomic RNA
taccagtgtcccctgtagg

SEQ ID NO: 13890 - RNA, 19 nt, Homo sapiens
  source 1..19: mol_type = genomic RNA
accagtgtcccctgtaggc

SEQ ID NO: 13891 - RNA, 19 nt, Homo sapiens
  source 1..19: mol_type = genomic RNA
ccagtgtcccctgtaggca

SEQ ID NO: 13892 - RNA, 19 nt, Homo sapiens
  source 1..19: mol_type = genomic RNA
cagtgtcccctgtaggcag

SEQ ID NO: 13893 - RNA, 19 nt, Homo sapiens
  source 1..19: mol_type = genomic RNA
agtgtcccctgtaggcagt

SEQ ID NO: 13894 - RNA, 19 nt, Homo sapiens
  source 1..19: mol_type = genomic RNA
gtgtcccctgtaggcagtg

SEQ ID NO: 13895 - RNA, 19 nt, Homo sapiens
  source 1..19: mol_type = genomic RNA
tgtcccctgtaggcagtgc

SEQ ID NO: 13896 - RNA, 19 nt, Homo sapiens
  source 1..19: mol_type = genomic RNA
cccctgtaggcagtgccta

SEQ ID NO: 13897 - RNA, 19 nt, Homo sapiens
  source 1..19: mol_type = genomic RNA
ccctgtaggcagtgcctag

SEQ ID NO: 13898 - RNA, 19 nt, Homo sapiens
  source 1..19: mol_type = genomic RNA
cctgtaggcagtgcctaga

SEQ ID NO: 13899 - RNA, 19 nt, Homo sapiens
  source 1..19: mol_type = genomic RNA
ctgtaggcagtgcctagac

SEQ ID NO: 13900 - RNA, 19 nt, Homo sapiens
  source 1..19: mol_type = genomic RNA
tgtaggcagtgcctagaca

SEQ ID NO: 13901 - RNA, 19 nt, Homo sapiens
  source 1..19: mol_type = genomic RNA
gtaggcagtgcctagacaa

SEQ ID NO: 13902 - RNA, 19 nt, Homo sapiens
  source 1..19: mol_type = genomic RNA
taggcagtgcctagacaag

SEQ ID NO: 13903 - RNA, 19 nt, Homo sapiens
  source 1..19: mol_type = genomic RNA
aggcagtgcctagacaaga

SEQ ID NO: 13904 - RNA, 19 nt, Homo sapiens
  source 1..19: mol_type = genomic RNA
ggcagtgcctagacaagag

SEQ ID NO: 13905 - RNA, 19 nt, Homo sapiens
  source 1..19: mol_type = genomic RNA
gcagtgcctagacaagagt

SEQ ID NO: 13906 - RNA, 19 nt, Homo sapiens
  source 1..19: mol_type = genomic RNA
cagtgcctagacaagagtt

SEQ ID NO: 13907 - RNA, 19 nt, Homo sapiens
  source 1..19: mol_type = genomic RNA
agtgcctagacaagagttg

SEQ ID NO: 13908 - RNA, 19 nt, Homo sapiens
  source 1..19: mol_type = genomic RNA
gtgcctagacaagagttga

SEQ ID NO: 13909 - RNA, 19 nt, Homo sapiens
  source 1..19: mol_type = genomic RNA
tgcctagacaagagttgaa

SEQ ID NO: 13910 - RNA, 19 nt, Homo sapiens
  source 1..19: mol_type = genomic RNA
gcctagacaagagttgaat

SEQ ID NO: 13911 - RNA, 19 nt, Homo sapiens
  source 1..19: mol_type = genomic RNA
cctagacaagagttgaatc

SEQ ID NO: 13912 - RNA, 19 nt, Homo sapiens
  source 1..19: mol_type = genomic RNA
ctagacaagagttgaatca

SEQ ID NO: 13913 - RNA, 19 nt, Homo sapiens
  source 1..19: mol_type = genomic RNA
tagacaagagttgaatcac

SEQ ID NO: 13914 - RNA, 19 nt, Homo sapiens
  source 1..19: mol_type = genomic RNA
agacaagagttgaatcacc

SEQ ID NO: 13915 - RNA, 19 nt, Homo sapiens
  source 1..19: mol_type = genomic RNA
gacaagagttgaatcacct

SEQ ID NO: 13916 - RNA, 19 nt, Homo sapiens
  source 1..19: mol_type = genomic RNA
acaagagttgaatcacctc

SEQ ID NO: 13917 - RNA, 19 nt, Homo sapiens
  source 1..19: mol_type = genomic RNA
caagagttgaatcacctca

SEQ ID NO: 13918 - RNA, 19 nt, Homo sapiens
  source 1..19: mol_type = genomic RNA
aagagttgaatcacctcag

SEQ ID NO: 13919 - RNA, 19 nt, Homo sapiens
  source 1..19: mol_type = genomic RNA
agagttgaatcacctcaga

SEQ ID NO: 13920 - RNA, 19 nt, Homo sapiens
  source 1..19: mol_type = genomic RNA
gagttgaatcacctcagag

SEQ ID NO: 13921 - RNA, 19 nt, Homo sapiens
  source 1..19: mol_type = genomic RNA
agttgaatcacctcagaga

SEQ ID NO: 13922 - RNA, 19 nt, Homo sapiens
  source 1..19: mol_type = genomic RNA
gttgaatcacctcagagat

SEQ ID NO: 13923 - RNA, 19 nt, Homo sapiens
  source 1..19: mol_type = genomic RNA
ttgaatcacctcagagatc

SEQ ID NO: 13924 - RNA, 19 nt, Homo sapiens
  source 1..19: mol_type = genomic RNA
tgaatcacctcagagatca

SEQ ID NO: 13925 - RNA, 19 nt, Homo sapiens
  source 1..19: mol_type = genomic RNA
gaatcacctcagagatcag

SEQ ID NO: 13926 - RNA, 19 nt, Homo sapiens
  source 1..19: mol_type = genomic RNA
aatcacctcagagatcagt

SEQ ID NO: 13927 - RNA, 19 nt, Homo sapiens
  source 1..19: mol_type = genomic RNA
atcacctcagagatcagtg

SEQ ID NO: 13928 - RNA, 19 nt, Homo sapiens
  source 1..19: mol_type = genomic RNA
tcacctcagagatcagtgc

SEQ ID NO: 13929 - RNA, 19 nt, Homo sapiens
  source 1..19: mol_type = genomic RNA
cacctcagagatcagtgca

SEQ ID NO: 13930 - RNA, 19 nt, Homo sapiens
  source 1..19: mol_type = genomic RNA
acctcagagatcagtgcat

SEQ ID NO: 13931 - RNA, 19 nt, Homo sapiens
  source 1..19: mol_type = genomic RNA
cctcagagatcagtgcata

SEQ ID NO: 13932 - RNA, 19 nt, Homo sapiens
  source 1..19: mol_type = genomic RNA
ctcagagatcagtgcatag

SEQ ID NO: 13933 - RNA, 19 nt, Homo sapiens
  source 1..19: mol_type = genomic RNA
tcagagatcagtgcataga

SEQ ID NO: 13934 - RNA, 19 nt, Homo sapiens
  source 1..19: mol_type = genomic RNA
cagagatcagtgcatagat

SEQ ID NO: 13935 - RNA, 19 nt, Homo sapiens
  source 1..19: mol_type = genomic RNA
agagatcagtgcatagata

SEQ ID NO: 13936 - RNA, 19 nt, Homo sapiens
  source 1..19: mol_type = genomic RNA
gagatcagtgcatagatat

SEQ ID NO: 13937 - RNA, 19 nt, Homo sapiens
  source 1..19: mol_type = genomic RNA
agatcagtgcatagatatg

SEQ ID NO: 13938 - RNA, 19 nt, Homo sapiens
  source 1..19: mol_type = genomic RNA
gatcagtgcatagatatgt

SEQ ID NO: 13939 - RNA, 19 nt, Homo sapiens
  source 1..19: mol_type = genomic RNA
atcagtgcatagatatgtc

SEQ ID NO: 13940 - RNA, 19 nt, Homo sapiens
  source 1..19: mol_type = genomic RNA
tcagtgcatagatatgtca

SEQ ID NO: 13941 - RNA, 19 nt, Homo sapiens
  source 1..19: mol_type = genomic RNA
cagtgcatagatatgtcac

SEQ ID NO: 13942 - RNA, 19 nt, Homo sapiens
  source 1..19: mol_type = genomic RNA
agtgcatagatatgtcaca

SEQ ID NO: 13943 - RNA, 19 nt, Homo sapiens
  source 1..19: mol_type = genomic RNA
gtgcatagatatgtcacaa

SEQ ID NO: 13944 - RNA, 19 nt, Homo sapiens
  source 1..19: mol_type = genomic RNA
tgcatagatatgtcacaaa

SEQ ID NO: 13945 - RNA, 19 nt, Homo sapiens
  source 1..19: mol_type = genomic RNA
gcatagatatgtcacaaag

SEQ ID NO: 13946 - RNA, 19 nt, Homo sapiens
  source 1..19: mol_type = genomic RNA
catagatatgtcacaaagc

SEQ ID NO: 13947 - RNA, 19 nt, Homo sapiens
  source 1..19: mol_type = genomic RNA
atagatatgtcacaaagcc

SEQ ID NO: 13948 - RNA, 19 nt, Homo sapiens
  source 1..19: mol_type = genomic RNA
tagatatgtcacaaagcct

SEQ ID NO: 13949 - RNA, 19 nt, Homo sapiens
  source 1..19: mol_type = genomic RNA
agatatgtcacaaagcctt

SEQ ID NO: 13950 - RNA, 19 nt, Homo sapiens
  source 1..19: mol_type = genomic RNA
gatatgtcacaaagccttc

SEQ ID NO: 13951 - RNA, 19 nt, Homo sapiens
  source 1..19: mol_type = genomic RNA
atatgtcacaaagccttct

SEQ ID NO: 13952 - RNA, 19 nt, Homo sapiens
  source 1..19: mol_type = genomic RNA
tatgtcacaaagccttctg

SEQ ID NO: 13953 - RNA, 19 nt, Homo sapiens
  source 1..19: mol_type = genomic RNA
atgtcacaaagccttctgt

SEQ ID NO: 13954 - RNA, 19 nt, Homo sapiens
  source 1..19: mol_type = genomic RNA
tgtcacaaagccttctgta

SEQ ID NO: 13955 - RNA, 19 nt, Homo sapiens
  source 1..19: mol_type = genomic RNA
gtcacaaagccttctgtag

SEQ ID NO: 13956 - RNA, 19 nt, Homo sapiens
  source 1..19: mol_type = genomic RNA
tcacaaagccttctgtagg

SEQ ID NO: 13957 - RNA, 19 nt, Homo sapiens
  source 1..19: mol_type = genomic RNA
cacaaagccttctgtaggc

SEQ ID NO: 13958 - RNA, 19 nt, Homo sapiens
  source 1..19: mol_type = genomic RNA
acaaagccttctgtaggca

SEQ ID NO: 13959 - RNA, 19 nt, Homo sapiens
  source 1..19: mol_type = genomic RNA
caaagccttctgtaggcaa

SEQ ID NO: 13960 - RNA, 19 nt, Homo sapiens
  source 1..19: mol_type = genomic RNA
aaagccttctgtaggcaaa

SEQ ID NO: 13961 - RNA, 19 nt, Homo sapiens
  source 1..19: mol_type = genomic RNA
aagccttctgtaggcaaag

SEQ ID NO: 13962 - RNA, 19 nt, Homo sapiens
  source 1..19: mol_type = genomic RNA
agccttctgtaggcaaagc

SEQ ID NO: 13963 - RNA, 19 nt, Homo sapiens
  source 1..19: mol_type = genomic RNA
gccttctgtaggcaaagcc

SEQ ID NO: 13964 - RNA, 19 nt, Homo sapiens
  source 1..19: mol_type = genomic RNA
ccttctgtaggcaaagccc

SEQ ID NO: 13965 - RNA, 19 nt, Homo sapiens
  source 1..19: mol_type = genomic RNA
cttctgtaggcaaagccca

SEQ ID NO: 13966 - RNA, 19 nt, Homo sapiens
  source 1..19: mol_type = genomic RNA
ttctgtaggcaaagcccat

SEQ ID NO: 13967 - RNA, 19 nt, Homo sapiens
  source 1..19: mol_type = genomic RNA
tctgtaggcaaagcccata

SEQ ID NO: 13968 - RNA, 19 nt, Homo sapiens
  source 1..19: mol_type = genomic RNA
ctgtaggcaaagcccatac

SEQ ID NO: 13969 - RNA, 19 nt, Homo sapiens
  source 1..19: mol_type = genomic RNA
tgtaggcaaagcccataca

SEQ ID NO: 13970 - RNA, 19 nt, Homo sapiens
  source 1..19: mol_type = genomic RNA
gtaggcaaagcccatacaa

SEQ ID NO: 13971 - RNA, 19 nt, Homo sapiens
  source 1..19: mol_type = genomic RNA
taggcaaagcccatacaag

SEQ ID NO: 13972 - RNA, 19 nt, Homo sapiens
  source 1..19: mol_type = genomic RNA
aggcaaagcccatacaagg

SEQ ID NO: 13973 - RNA, 19 nt, Homo sapiens
  source 1..19: mol_type = genomic RNA
ggcaaagcccatacaaggt

SEQ ID NO: 13974 - RNA, 19 nt, Homo sapiens
  source 1..19: mol_type = genomic RNA
gcaaagcccatacaaggtt

SEQ ID NO: 13975 - RNA, 19 nt, Homo sapiens
  source 1..19: mol_type = genomic RNA
caaagcccatacaaggttt

SEQ ID NO: 13976 - RNA, 19 nt, Homo sapiens
  source 1..19: mol_type = genomic RNA
aaagcccatacaaggttta

SEQ ID NO: 13977 - RNA, 19 nt, Homo sapiens
  source 1..19: mol_type = genomic RNA
aagcccatacaaggtttag

SEQ ID NO: 13978 - RNA, 19 nt, Homo sapiens
  source 1..19: mol_type = genomic RNA
agcccatacaaggtttaga

SEQ ID NO: 13979 - RNA, 19 nt, Homo sapiens
  source 1..19: mol_type = genomic RNA
gcccatacaaggtttagat

SEQ ID NO: 13980 - RNA, 19 nt, Homo sapiens
  source 1..19: mol_type = genomic RNA
cccatacaaggtttagatc

SEQ ID NO: 13981 - RNA, 19 nt, Homo sapiens
  source 1..19: mol_type = genomic RNA
ccatacaaggtttagatca

SEQ ID NO: 13982 - RNA, 19 nt, Homo sapiens
  source 1..19: mol_type = genomic RNA
catacaaggtttagatcac

SEQ ID NO: 13983 - RNA, 19 nt, Homo sapiens
  source 1..19: mol_type = genomic RNA
atacaaggtttagatcacc

SEQ ID NO: 13984 - RNA, 19 nt, Homo sapiens
  source 1..19: mol_type = genomic RNA
tacaaggtttagatcacct

SEQ ID NO: 13985 - RNA, 19 nt, Homo sapiens
  source 1..19: mol_type = genomic RNA
acaaggtttagatcaccta

SEQ ID NO: 13986 - RNA, 19 nt, Homo sapiens
  source 1..19: mol_type = genomic RNA
caaggtttagatcacctag

SEQ ID NO: 13987 - RNA, 19 nt, Homo sapiens
  source 1..19: mol_type = genomic RNA
aaggtttagatcacctagg

SEQ ID NO: 13988 - RNA, 19 nt, Homo sapiens
  source 1..19: mol_type = genomic RNA
aggtttagatcacctaggt

SEQ ID NO: 13989 - RNA, 19 nt, Homo sapiens
  source 1..19: mol_type = genomic RNA
ggtttagatcacctaggtg

SEQ ID NO: 13990 - RNA, 19 nt, Homo sapiens
  source 1..19: mol_type = genomic RNA
gtttagatcacctaggtga

SEQ ID NO: 13991 - RNA, 19 nt, Homo sapiens
  source 1..19: mol_type = genomic RNA
tttagatcacctaggtgat

SEQ ID NO: 13992 - RNA, 19 nt, Homo sapiens
  source 1..19: mol_type = genomic RNA
ttagatcacctaggtgatc

SEQ ID NO: 13993 - RNA, 19 nt, Homo sapiens
  source 1..19: mol_type = genomic RNA
tagatcacctaggtgatca

SEQ ID NO: 13994 - RNA, 19 nt, Homo sapiens
  source 1..19: mol_type = genomic RNA
agatcacctaggtgatcag

SEQ ID NO: 13995 - RNA, 19 nt, Homo sapiens
  source 1..19: mol_type = genomic RNA
gatcacctaggtgatcagt

SEQ ID NO: 13996 - RNA, 19 nt, Homo sapiens
  source 1..19: mol_type = genomic RNA
atcacctaggtgatcagtg

SEQ ID NO: 13997 - RNA, 19 nt, Homo sapiens
  source 1..19: mol_type = genomic RNA
tcacctaggtgatcagtgc

SEQ ID NO: 13998 - RNA, 19 nt, Homo sapiens
  source 1..19: mol_type = genomic RNA
cacctaggtgatcagtgca

SEQ ID NO: 13999 - RNA, 19 nt, Homo sapiens
  source 1..19: mol_type = genomic RNA
acctaggtgatcagtgcag

SEQ ID NO: 14000 - RNA, 19 nt, Homo sapiens
  source 1..19: mol_type = genomic RNA
cctaggtgatcagtgcagt

SEQ ID NO: 14001 - RNA, 19 nt, Homo sapiens
  source 1..19: mol_type = genomic RNA
ctaggtgatcagtgcagtg

SEQ ID NO: 14002 - RNA, 19 nt, Homo sapiens
  source 1..19: mol_type = genomic RNA
taggtgatcagtgcagtga

SEQ ID NO: 14003 - RNA, 19 nt, Homo sapiens
  source 1..19: mol_type = genomic RNA
aggtgatcagtgcagtgat

SEQ ID NO: 14004 - RNA, 19 nt, Homo sapiens
  source 1..19: mol_type = genomic RNA
ggtgatcagtgcagtgata

SEQ ID NO: 14005 - RNA, 19 nt, Homo sapiens
  source 1..19: mol_type = genomic RNA
gtgatcagtgcagtgatat

SEQ ID NO: 14006 - RNA, 19 nt, Homo sapiens
  source 1..19: mol_type = genomic RNA
tgatcagtgcagtgatatg

SEQ ID NO: 14007 - RNA, 19 nt, Homo sapiens
  source 1..19: mol_type = genomic RNA
gatcagtgcagtgatatgt

SEQ ID NO: 14008 - RNA, 19 nt, Homo sapiens
  source 1..19: mol_type = genomic RNA
atcagtgcagtgatatgtc

SEQ ID NO: 14009 - RNA, 19 nt, Homo sapiens
  source 1..19: mol_type = genomic RNA
tcagtgcagtgatatgtca

SEQ ID NO: 14010 - RNA, 19 nt, Homo sapiens
  source 1..19: mol_type = genomic RNA
cagtgcagtgatatgtcac

SEQ ID NO: 14011 - RNA, 19 nt, Homo sapiens
  source 1..19: mol_type = genomic RNA
agtgcagtgatatgtcaca

SEQ ID NO: 14012 - RNA, 19 nt, Homo sapiens
  source 1..19: mol_type = genomic RNA
gtgcagtgatatgtcacaa

SEQ ID NO: 14013 - RNA, 19 nt, Homo sapiens
  source 1..19: mol_type = genomic RNA
tgcagtgatatgtcacaaa

SEQ ID NO: 14014 - RNA, 19 nt, Homo sapiens
  source 1..19: mol_type = genomic RNA
gcagtgatatgtcacaaaa

SEQ ID NO: 14015 - RNA, 19 nt, Homo sapiens
  source 1..19: mol_type = genomic RNA
tgatatgtcacaaaaatcc

SEQ ID NO: 14016 - RNA, 19 nt, Homo sapiens
  source 1..19: mol_type = genomic RNA
gatatgtcacaaaaatccc

SEQ ID NO: 14017 - RNA, 19 nt, Homo sapiens
  source 1..19: mol_type = genomic RNA
atatgtcacaaaaatccct

SEQ ID NO: 14018 - RNA, 19 nt, Homo sapiens
  source 1..19: mol_type = genomic RNA
tatgtcacaaaaatccctg

SEQ ID NO: 14019 - RNA, 19 nt, Homo sapiens
  source 1..19: mol_type = genomic RNA
atgtcacaaaaatccctgt

SEQ ID NO: 14020 - RNA, 19 nt, Homo sapiens
  source 1..19: mol_type = genomic RNA
tgtcacaaaaatccctgta

SEQ ID NO: 14021 - RNA, 19 nt, Homo sapiens
  source 1..19: mol_type = genomic RNA
gtcacaaaaatccctgtag

SEQ ID NO: 14022 - RNA, 19 nt, Homo sapiens
  source 1..19: mol_type = genomic RNA
tcacaaaaatccctgtaga

SEQ ID NO: 14023 - RNA, 19 nt, Homo sapiens
  source 1..19: mol_type = genomic RNA
cacaaaaatccctgtagac

SEQ ID NO: 14024 - RNA, 19 nt, Homo sapiens
  source 1..19: mol_type = genomic RNA
acaaaaatccctgtagaca

SEQ ID NO: 14025 - RNA, 19 nt, Homo sapiens
  source 1..19: mol_type = genomic RNA
caaaaatccctgtagacag

SEQ ID NO: 14026 - RNA, 19 nt, Homo sapiens
  source 1..19: mol_type = genomic RNA
aaaaatccctgtagacaga

SEQ ID NO: 14027 - RNA, 19 nt, Homo sapiens
  source 1..19: mol_type = genomic RNA
aaaatccctgtagacagag

SEQ ID NO: 14028 - RNA, 19 nt, Homo sapiens
  source 1..19: mol_type = genomic RNA
aaatccctgtagacagagc

SEQ ID NO: 14029 - RNA, 19 nt, Homo sapiens
  source 1..19: mol_type = genomic RNA
aatccctgtagacagagcc

SEQ ID NO: 14030 - RNA, 19 nt, Homo sapiens
  source 1..19: mol_type = genomic RNA
atccctgtagacagagcct

SEQ ID NO: 14031 - RNA, 19 nt, Homo sapiens
  source 1..19: mol_type = genomic RNA
tccctgtagacagagccta

SEQ ID NO: 14032 - RNA, 19 nt, Homo sapiens
  source 1..19: mol_type = genomic RNA
ccctgtagacagagcctag

SEQ ID NO: 14033 - RNA, 19 nt, Homo sapiens
  source 1..19: mol_type = genomic RNA
cctgtagacagagcctaga

SEQ ID NO: 14034 - RNA, 19 nt, Homo sapiens
  source 1..19: mol_type = genomic RNA
ctgtagacagagcctagac

SEQ ID NO: 14035 - RNA, 19 nt, Homo sapiens
  source 1..19: mol_type = genomic RNA
tagacagagcctagacaag

SEQ ID NO: 14036 - RNA, 19 nt, Homo sapiens
  source 1..19: mol_type = genomic RNA
agacagagcctagacaaga

SEQ ID NO: 14037 - RNA, 19 nt, Homo sapiens
  source 1..19: mol_type = genomic RNA
gacagagcctagacaagag

SEQ ID NO: 14038 - RNA, 19 nt, Homo sapiens
  source 1..19: mol_type = genomic RNA
acagagcctagacaagagt

SEQ ID NO: 14039 - RNA, 19 nt, Homo sapiens
  source 1..19: mol_type = genomic RNA
agagcctagacaagagtta

SEQ ID NO: 14040 - RNA, 19 nt, Homo sapiens
  source 1..19: mol_type = genomic RNA
gagcctagacaagagttac

SEQ ID NO: 14041 - RNA, 19 nt, Homo sapiens
  source 1..19: mol_type = genomic RNA
agcctagacaagagttact

SEQ ID NO: 14042 - RNA, 19 nt, Homo sapiens
  source 1..19: mol_type = genomic RNA
gcctagacaagagttactt

SEQ ID NO: 14043 - RNA, 19 nt, Homo sapiens
  source 1..19: mol_type = genomic RNA
cctagacaagagttacttc

SEQ ID NO: 14044 - RNA, 19 nt, Homo sapiens
  source 1..19: mol_type = genomic RNA
tagacaagagttacttcac

SEQ ID NO: 14045 - RNA, 19 nt, Homo sapiens
  source 1..19: mol_type = genomic RNA
agacaagagttacttcacc

SEQ ID NO: 14046 - RNA, 19 nt, Homo sapiens
  source 1..19: mol_type = genomic RNA
gacaagagttacttcacct

SEQ ID NO: 14047 - RNA, 19 nt, Homo sapiens
  source 1..19: mol_type = genomic RNA
acaagagttacttcacctg

SEQ ID NO: 14048 - RNA, 19 nt, Homo sapiens
  source 1..19: mol_type = genomic RNA
caagagttacttcacctgg

SEQ ID NO: 14049 - RNA, 19 nt, Homo sapiens
  source 1..19: mol_type = genomic RNA
aagagttacttcacctggg

SEQ ID NO: 14050 - RNA, 19 nt, Homo sapiens
  source 1..19: mol_type = genomic RNA
agagttacttcacctgggt

SEQ ID NO: 14051 - RNA, 19 nt, Homo sapiens
  source 1..19: mol_type = genomic RNA
gagttacttcacctgggtg

SEQ ID NO: 14052 - RNA, 19 nt, Homo sapiens
  source 1..19: mol_type = genomic RNA
agttacttcacctgggtga

SEQ ID NO: 14053 - RNA, 19 nt, Homo sapiens
  source 1..19: mol_type = genomic RNA
gttacttcacctgggtgat

SEQ ID NO: 14054 - RNA, 19 nt, Homo sapiens
  source 1..19: mol_type = genomic RNA
ttacttcacctgggtgatc

SEQ ID NO: 14055 - RNA, 19 nt, Homo sapiens
  source 1..19: mol_type = genomic RNA
tacttcacctgggtgatca

SEQ ID NO: 14056 - RNA, 19 nt, Homo sapiens
  source 1..19: mol_type = genomic RNA
acttcacctgggtgatcag

SEQ ID NO: 14057 - RNA, 19 nt, Homo sapiens
  source 1..19: mol_type = genomic RNA
cttcacctgggtgatcagt

SEQ ID NO: 14058 - RNA, 19 nt, Homo sapiens
  source 1..19: mol_type = genomic RNA
ttcacctgggtgatcagtg

SEQ ID NO: 14059 - RNA, 19 nt, Homo sapiens
  source 1..19: mol_type = genomic RNA
ctgggtgatcagtgcagat

SEQ ID NO: 14060 - RNA, 19 nt, Homo sapiens
  source 1..19: mol_type = genomic RNA
tgggtgatcagtgcagata

SEQ ID NO: 14061 - RNA, 19 nt, Homo sapiens
  source 1..19: mol_type = genomic RNA
gggtgatcagtgcagatat

SEQ ID NO: 14062 - RNA, 19 nt, Homo sapiens
  source 1..19: mol_type = genomic RNA
ggtgatcagtgcagatatt

SEQ ID NO: 14063 - RNA, 19 nt, Homo sapiens
  source 1..19: mol_type = genomic RNA
tgatcagtgcagatatttg

SEQ ID NO: 14064 - RNA, 19 nt, Homo sapiens
  source 1..19: mol_type = genomic RNA
atcagtgcagatatttgac

SEQ ID NO: 14065 - RNA, 19 nt, Homo sapiens
  source 1..19: mol_type = genomic RNA
tcagtgcagatatttgaca

SEQ ID NO: 14066 - RNA, 19 nt, Homo sapiens
  source 1..19: mol_type = genomic RNA
cagtgcagatatttgacac

SEQ ID NO: 14067 - RNA, 19 nt, Homo sapiens
  source 1..19: mol_type = genomic RNA
agtgcagatatttgacaca

SEQ ID NO: 14068 - RNA, 19 nt, Homo sapiens
  source 1..19: mol_type = genomic RNA
gtgcagatatttgacacaa

SEQ ID NO: 14069 - RNA, 19 nt, Homo sapiens
  source 1..19: mol_type = genomic RNA
tgcagatatttgacacaat

SEQ ID NO: 14070 - RNA, 19 nt, Homo sapiens
  source 1..19: mol_type = genomic RNA
gcagatatttgacacaatg

SEQ ID NO: 14071 - RNA, 19 nt, Homo sapiens
  source 1..19: mol_type = genomic RNA
cagatatttgacacaatgc

SEQ ID NO: 14072 - RNA, 19 nt, Homo sapiens
  source 1..19: mol_type = genomic RNA
agatatttgacacaatgcc

SEQ ID NO: 14073 - RNA, 19 nt, Homo sapiens
  source 1..19: mol_type = genomic RNA
gatatttgacacaatgccc

SEQ ID NO: 14074 - RNA, 19 nt, Homo sapiens
  source 1..19: mol_type = genomic RNA
atatttgacacaatgcccc

SEQ ID NO: 14075 - RNA, 19 nt, Homo sapiens
  source 1..19: mol_type = genomic RNA
tatttgacacaatgccccc

SEQ ID NO: 14076 - RNA, 19 nt, Homo sapiens
  source 1..19: mol_type = genomic RNA
atttgacacaatgccccca

SEQ ID NO: 14077 - RNA, 19 nt, Homo sapiens
  source 1..19: mol_type = genomic RNA
tttgacacaatgcccccat

SEQ ID NO: 14078 - RNA, 19 nt, Homo sapiens
  source 1..19: mol_type = genomic RNA
ttgacacaatgcccccata

SEQ ID NO: 14079 - RNA, 19 nt, Homo sapiens
  source 1..19: mol_type = genomic RNA
tgacacaatgcccccatag

SEQ ID NO: 14080 - RNA, 19 nt, Homo sapiens
  source 1..19: mol_type = genomic RNA
gacacaatgcccccataga

SEQ ID NO: 14081 - RNA, 19 nt, Homo sapiens
  source 1..19: mol_type = genomic RNA
acacaatgcccccatagac

SEQ ID NO: 14082 - RNA, 19 nt, Homo sapiens
  source 1..19: mol_type = genomic RNA
cacaatgcccccatagaca

SEQ ID NO: 14083 - RNA, 19 nt, Homo sapiens
  source 1..19: mol_type = genomic RNA
acaatgcccccatagacag

SEQ ID NO: 14084 - RNA, 19 nt, Homo sapiens
  source 1..19: mol_type = genomic RNA
caatgcccccatagacaga

SEQ ID NO: 14085 - RNA, 19 nt, Homo sapiens
  source 1..19: mol_type = genomic RNA
aatgcccccatagacagag

SEQ ID NO: 14086 - RNA, 19 nt, Homo sapiens
  source 1..19: mol_type = genomic RNA
cccccatagacagagccta

SEQ ID NO: 14087 - RNA, 19 nt, Homo sapiens
  source 1..19: mol_type = genomic RNA
ccccatagacagagcctag

SEQ ID NO: 14088 - RNA, 19 nt, Homo sapiens
  source 1..19: mol_type = genomic RNA
cccatagacagagcctagg

SEQ ID NO: 14089 - RNA, 19 nt, Homo sapiens
  source 1..19: mol_type = genomic RNA
ccatagacagagcctaggc

SEQ ID NO: 14090 - RNA, 19 nt, Homo sapiens
  source 1..19: mol_type = genomic RNA
catagacagagcctaggca

SEQ ID NO: 14091 - RNA, 19 nt, Homo sapiens
  source 1..19: mol_type = genomic RNA
atagacagagcctaggcaa

SEQ ID NO: 14092 - RNA, 19 nt, Homo sapiens
  source 1..19: mol_type = genomic RNA
tagacagagcctaggcaag

SEQ ID NO: 14093 - RNA, 19 nt, Homo sapiens
  source 1..19: mol_type = genomic RNA
cagagcctaggcaagactt

SEQ ID NO: 14094 - RNA, 19 nt, Homo sapiens
  source 1..19: mol_type = genomic RNA
agagcctaggcaagacttc

SEQ ID NO: 14095 - RNA, 19 nt, Homo sapiens
  source 1..19: mol_type = genomic RNA
gagcctaggcaagacttcc

SEQ ID NO: 14096 - RNA, 19 nt, Homo sapiens
  source 1..19: mol_type = genomic RNA
agcctaggcaagacttcca

SEQ ID NO: 14097 - RNA, 19 nt, Homo sapiens
  source 1..19: mol_type = genomic RNA
gcctaggcaagacttccat

SEQ ID NO: 14098 - RNA, 19 nt, Homo sapiens
  source 1..19: mol_type = genomic RNA
cctaggcaagacttccatc

SEQ ID NO: 14099 - RNA, 19 nt, Homo sapiens
  source 1..19: mol_type = genomic RNA
ctaggcaagacttccatca

SEQ ID NO: 14100 - RNA, 19 nt, Homo sapiens
  source 1..19: mol_type = genomic RNA
taggcaagacttccatcac

SEQ ID NO: 14101 - RNA, 19 nt, Homo sapiens
  source 1..19: mol_type = genomic RNA
aggcaagacttccatcacc

SEQ ID NO: 14102 - RNA, 19 nt, Homo sapiens
  source 1..19: mol_type = genomic RNA
ggcaagacttccatcacct

SEQ ID NO: 14103 - RNA, 19 nt, Homo sapiens
  source 1..19: mol_type = genomic RNA
gcaagacttccatcacctg

SEQ ID NO: 14104 - RNA, 19 nt, Homo sapiens
  source 1..19: mol_type = genomic RNA
caagacttccatcacctgg

SEQ ID NO: 14105 - RNA, 19 nt, Homo sapiens
  source 1..19: mol_type = genomic RNA
aagacttccatcacctggg

SEQ ID NO: 14106 - RNA, 19 nt, Homo sapiens
  source 1..19: mol_type = genomic RNA
agacttccatcacctgggt

SEQ ID NO: 14107 - RNA, 19 nt, Homo sapiens
  source 1..19: mol_type = genomic RNA
gacttccatcacctgggtg

SEQ ID NO: 14108 - RNA, 19 nt, Homo sapiens
  source 1..19: mol_type = genomic RNA
acttccatcacctgggtga

SEQ ID NO: 14109 - RNA, 19 nt, Homo sapiens
  source 1..19: mol_type = genomic RNA
cttccatcacctgggtgat

SEQ ID NO: 14110 - RNA, 19 nt, Homo sapiens
  source 1..19: mol_type = genomic RNA
ttccatcacctgggtgatc

SEQ ID NO: 14111 - RNA, 19 nt, Homo sapiens
  source 1..19: mol_type = genomic RNA
atcagtgcagagatatgtc

SEQ ID NO: 14112 - RNA, 19 nt, Homo sapiens
  source 1..19: mol_type = genomic RNA
tcagtgcagagatatgtca

SEQ ID NO: 14113 - RNA, 19 nt, Homo sapiens
  source 1..19: mol_type = genomic RNA
cagtgcagagatatgtcac

SEQ ID NO: 14114 - RNA, 19 nt, Homo sapiens
  source 1..19: mol_type = genomic RNA
tgcagagatatgtcacaaa

SEQ ID NO: 14115 - RNA, 19 nt, Homo sapiens
  source 1..19: mol_type = genomic RNA
gcagagatatgtcacaaat

SEQ ID NO: 14116 - RNA, 19 nt, Homo sapiens
  source 1..19: mol_type = genomic RNA
cagagatatgtcacaaatc

SEQ ID NO: 14117 - RNA, 19 nt, Homo sapiens
  source 1..19: mol_type = genomic RNA
agagatatgtcacaaatcc

SEQ ID NO: 14118 - RNA, 19 nt, Homo sapiens
  source 1..19: mol_type = genomic RNA
gagatatgtcacaaatccc

SEQ ID NO: 14119 - RNA, 19 nt, Homo sapiens
  source 1..19: mol_type = genomic RNA
agatatgtcacaaatcccc

SEQ ID NO: 14120 - RNA, 19 nt, Homo sapiens
  source 1..19: mol_type = genomic RNA
gatatgtcacaaatccccc

SEQ ID NO: 14121 - RNA, 19 nt, Homo sapiens
  source 1..19: mol_type = genomic RNA
atatgtcacaaatccccct

SEQ ID NO: 14122 - RNA, 19 nt, Homo sapiens
  source 1..19: mol_type = genomic RNA
tatgtcacaaatccccctc

SEQ ID NO: 14123 - RNA, 19 nt, Homo sapiens
  source 1..19: mol_type = genomic RNA
atgtcacaaatccccctct

SEQ ID NO: 14124 - RNA, 19 nt, Homo sapiens
  source 1..19: mol_type = genomic RNA
tgtcacaaatccccctcta

SEQ ID NO: 14125 - RNA, 19 nt, Homo sapiens
  source 1..19: mol_type = genomic RNA
gtcacaaatccccctctag

SEQ ID NO: 14126 - RNA, 19 nt, Homo sapiens
  source 1..19: mol_type = genomic RNA
tcacaaatccccctctagg

SEQ ID NO: 14127 - RNA, 19 nt, Homo sapiens
  source 1..19: mol_type = genomic RNA
cacaaatccccctctaggc

SEQ ID NO: 14128 - RNA, 19 nt, Homo sapiens
  source 1..19: mol_type = genomic RNA
acaaatccccctctaggca

SEQ ID NO: 14129 - RNA, 19 nt, Homo sapiens
  source 1..19: mol_type = genomic RNA
caaatccccctctaggcag

SEQ ID NO: 14130 - RNA, 19 nt, Homo sapiens
  source 1..19: mol_type = genomic RNA
aaatccccctctaggcaga

SEQ ID NO: 14131 - RNA, 19 nt, Homo sapiens
  source 1..19: mol_type = genomic RNA
aatccccctctaggcagag

SEQ ID NO: 14132 - RNA, 19 nt, Homo sapiens
  source 1..19: mol_type = genomic RNA
atccccctctaggcagagt

SEQ ID NO: 14133 - RNA, 19 nt, Homo sapiens
  source 1..19: mol_type = genomic RNA
tccccctctaggcagagta

SEQ ID NO: 14134 - RNA, 19 nt, Homo sapiens
  source 1..19: mol_type = genomic RNA
ccccctctaggcagagtat

SEQ ID NO: 14135 - RNA, 19 nt, Homo sapiens
  source 1..19: mol_type = genomic RNA
cccctctaggcagagtata

SEQ ID NO: 14136 - RNA, 19 nt, Homo sapiens
  source 1..19: mol_type = genomic RNA
ccctctaggcagagtatag

SEQ ID NO: 14137 - RNA, 19 nt, Homo sapiens
  source 1..19: mol_type = genomic RNA
cctctaggcagagtataga

SEQ ID NO: 14138 - RNA, 19 nt, Homo sapiens
  source 1..19: mol_type = genomic RNA
ctctaggcagagtatagag

SEQ ID NO: 14139 - RNA, 19 nt, Homo sapiens
  source 1..19: mol_type = genomic RNA
tctaggcagagtatagaga

SEQ ID NO: 14140 - RNA, 19 nt, Homo sapiens
  source 1..19: mol_type = genomic RNA
ctaggcagagtatagagaa

SEQ ID NO: 14141 - RNA, 19 nt, Homo sapiens
  source 1..19: mol_type = genomic RNA
taggcagagtatagagaag

SEQ ID NO: 14142 - RNA, 19 nt, Homo sapiens
  source 1..19: mol_type = genomic RNA
aggcagagtatagagaaga

SEQ ID NO: 14143 - RNA, 19 nt, Homo sapiens
  source 1..19: mol_type = genomic RNA
ggcagagtatagagaagag

SEQ ID NO: 14144 - RNA, 19 nt, Homo sapiens
  source 1..19: mol_type = genomic RNA
gcagagtatagagaagagt

SEQ ID NO: 14145 - RNA, 19 nt, Homo sapiens
  source 1..19: mol_type = genomic RNA
cagagtatagagaagagtc

SEQ ID NO: 14146 - RNA, 19 nt, Homo sapiens
  source 1..19: mol_type = genomic RNA
agagtatagagaagagtcc

SEQ ID NO: 14147 - RNA, 19 nt, Homo sapiens
  source 1..19: mol_type = genomic RNA
gagtatagagaagagtccc

SEQ ID NO: 14148 - RNA, 19 nt, Homo sapiens
  source 1..19: mol_type = genomic RNA
agtatagagaagagtccca

SEQ ID NO: 14149 - RNA, 19 nt, Homo sapiens
  source 1..19: mol_type = genomic RNA
gtatagagaagagtcccat

SEQ ID NO: 14150 - RNA, 19 nt, Homo sapiens
  source 1..19: mol_type = genomic RNA
tatagagaagagtcccatc

SEQ ID NO: 14151 - RNA, 19 nt, Homo sapiens
  source 1..19: mol_type = genomic RNA
atagagaagagtcccatca

SEQ ID NO: 14152 - RNA, 19 nt, Homo sapiens
  source 1..19: mol_type = genomic RNA
tagagaagagtcccatcac

SEQ ID NO: 14153 - RNA, 19 nt, Homo sapiens
  source 1..19: mol_type = genomic RNA
agagaagagtcccatcacc

SEQ ID NO: 14154 - RNA, 19 nt, Homo sapiens
  source 1..19: mol_type = genomic RNA
gagaagagtcccatcacct

SEQ ID NO: 14155 - RNA, 19 nt, Homo sapiens
  source 1..19: mol_type = genomic RNA
agaagagtcccatcacctg

SEQ ID NO: 14156 - RNA, 19 nt, Homo sapiens
  source 1..19: mol_type = genomic RNA
gaagagtcccatcacctgg

SEQ ID NO: 14157 - RNA, 19 nt, Homo sapiens
  source 1..19: mol_type = genomic RNA
aagagtcccatcacctggg

SEQ ID NO: 14158 - RNA, 19 nt, Homo sapiens
  source 1..19: mol_type = genomic RNA
agagtcccatcacctgggt

SEQ ID NO: 14159 - RNA, 19 nt, Homo sapiens
  source 1..19: mol_type = genomic RNA
gagtcccatcacctgggtg

SEQ ID NO: 14160 - RNA, 19 nt, Homo sapiens
  source 1..19: mol_type = genomic RNA
agtcccatcacctgggtga

SEQ ID NO: 14161 - RNA, 19 nt, Homo sapiens
  source 1..19: mol_type = genomic RNA
gtcccatcacctgggtgat

SEQ ID NO: 14162 - RNA, 19 nt, Homo sapiens
  source 1..19: mol_type = genomic RNA
tcccatcacctgggtgatc

SEQ ID NO: 14163 - RNA, 19 nt, Homo sapiens
  source 1..19: mol_type = genomic RNA
cccatcacctgggtgatca

SEQ ID NO: 14164 - RNA, 19 nt, Homo sapiens
  source 1..19: mol_type = genomic RNA
tgatcagtgcagagatatt

SEQ ID NO: 14165 - RNA, 19 nt, Homo sapiens
  source 1..19: mol_type = genomic RNA
gatcagtgcagagatattt

SEQ ID NO: 14166 - RNA, 19 nt, Homo sapiens
  source 1..19: mol_type = genomic RNA
atcagtgcagagatatttc

SEQ ID NO: 14167 - RNA, 19 nt, Homo sapiens
  source 1..19: mol_type = genomic RNA
tcagtgcagagatatttca

SEQ ID NO: 14168 - RNA, 19 nt, Homo sapiens
  source 1..19: mol_type = genomic RNA
cagtgcagagatatttcac

SEQ ID NO: 14169 - RNA, 19 nt, Homo sapiens
  source 1..19: mol_type = genomic RNA
agtgcagagatatttcaca

SEQ ID NO: 14170 - RNA, 19 nt, Homo sapiens
  source 1..19: mol_type = genomic RNA
gtgcagagatatttcacaa

SEQ ID NO: 14171 - RNA, 19 nt, Homo sapiens
  source 1..19: mol_type = genomic RNA
gcagagatatttcacaatg

SEQ ID NO: 14172 - RNA, 19 nt, Homo sapiens
  source 1..19: mol_type = genomic RNA
gatatttcacaatgtcccc

SEQ ID NO: 14173 - RNA, 19 nt, Homo sapiens
  source 1..19: mol_type = genomic RNA
tatttcacaatgtcccctg

SEQ ID NO: 14174 - RNA, 19 nt, Homo sapiens
  source 1..19: mol_type = genomic RNA
atttcacaatgtcccctgt

SEQ ID NO: 14175 - RNA, 19 nt, Homo sapiens
  source 1..19: mol_type = genomic RNA
tttcacaatgtcccctgta

SEQ ID NO: 14176 - RNA, 19 nt, Homo sapiens
  source 1..19: mol_type = genomic RNA
ttcacaatgtcccctgtag

SEQ ID NO: 14177 - RNA, 19 nt, Homo sapiens
  source 1..19: mol_type = genomic RNA
tcacaatgtcccctgtagg

SEQ ID NO: 14178 - RNA, 19 nt, Homo sapiens
  source 1..19: mol_type = genomic RNA
cacaatgtcccctgtaggc

SEQ ID NO: 14179 - RNA, 19 nt, Homo sapiens
  source 1..19: mol_type = genomic RNA
acaatgtcccctgtaggca

SEQ ID NO: 14180 - RNA, 19 nt, Homo sapiens
  source 1..19: mol_type = genomic RNA
caatgtcccctgtaggcag

SEQ ID NO: 14181 - RNA, 19 nt, Homo sapiens
  source 1..19: mol_type = genomic RNA
aatgtcccctgtaggcaga

SEQ ID NO: 14182 - RNA, 19 nt, Homo sapiens
  source 1..19: mol_type = genomic RNA
atgtcccctgtaggcagag

SEQ ID NO: 14183 - RNA, 19 nt, Homo sapiens
  source 1..19: mol_type = genomic RNA
tgtcccctgtaggcagaga

SEQ ID NO: 14184 - RNA, 19 nt, Homo sapiens
  source 1..19: mol_type = genomic RNA
gtcccctgtaggcagagag

SEQ ID NO: 14185 - RNA, 19 nt, Homo sapiens
  source 1..19: mol_type = genomic RNA
tcccctgtaggcagagagt

SEQ ID NO: 14186 - RNA, 19 nt, Homo sapiens
  source 1..19: mol_type = genomic RNA
cccctgtaggcagagagtg

SEQ ID NO: 14187 - RNA, 19 nt, Homo sapiens
  source 1..19: mol_type = genomic RNA
ccctgtaggcagagagtgg

SEQ ID NO: 14188 - RNA, 19 nt, Homo sapiens
  source 1..19: mol_type = genomic RNA
cctgtaggcagagagtgga

SEQ ID NO: 14189 - RNA, 19 nt, Homo sapiens
  source 1..19: mol_type = genomic RNA
ctgtaggcagagagtggac

SEQ ID NO: 14190 - RNA, 19 nt, Homo sapiens
  source 1..19: mol_type = genomic RNA
tgtaggcagagagtggaca

SEQ ID NO: 14191 - RNA, 19 nt, Homo sapiens
  source 1..19: mol_type = genomic RNA
gtaggcagagagtggacaa

SEQ ID NO: 14192 - RNA, 19 nt, Homo sapiens
  source 1..19: mol_type = genomic RNA
taggcagagagtggacaag

SEQ ID NO: 14193 - RNA, 19 nt, Homo sapiens
  source 1..19: mol_type = genomic RNA
gcagagagtggacaagagt

SEQ ID NO: 14194 - RNA, 19 nt, Homo sapiens
  source 1..19: mol_type = genomic RNA
cagagagtggacaagagtt

SEQ ID NO: 14195 - RNA, 19 nt, Homo sapiens
  source 1..19: mol_type = genomic RNA
agagagtggacaagagtta

SEQ ID NO: 14196 - RNA, 19 nt, Homo sapiens
  source 1..19: mol_type = genomic RNA
gagagtggacaagagttac

SEQ ID NO: 14197 - RNA, 19 nt, Homo sapiens
  source 1..19: mol_type = genomic RNA
agagtggacaagagttaca

SEQ ID NO: 14198 - RNA, 19 nt, Homo sapiens
  source 1..19: mol_type = genomic RNA
gagtggacaagagttacat

SEQ ID NO: 14199 - RNA, 19 nt, Homo sapiens
  source 1..19: mol_type = genomic RNA
agtggacaagagttacatc

SEQ ID NO: 14200 - RNA, 19 nt, Homo sapiens
  source 1..19: mol_type = genomic RNA
gtggacaagagttacatca

SEQ ID NO: 14201 - RNA, 19 nt, Homo sapiens
  source 1..19: mol_type = genomic RNA
tggacaagagttacatcac

SEQ ID NO: 14202 - RNA, 19 nt, Homo sapiens
  source 1..19: mol_type = genomic RNA
ggacaagagttacatcacc

SEQ ID NO: 14203 - RNA, 19 nt, Homo sapiens
  source 1..19: mol_type = genomic RNA
gacaagagttacatcacct

SEQ ID NO: 14204 - RNA, 19 nt, Homo sapiens
  source 1..19: mol_type = genomic RNA
acaagagttacatcaccta

SEQ ID NO: 14205 - RNA, 19 nt, Homo sapiens
  source 1..19: mol_type = genomic RNA
caagagttacatcacctag

SEQ ID NO: 14206 - RNA, 19 nt, Homo sapiens
  source 1..19: mol_type = genomic RNA
aagagttacatcacctaga

SEQ ID NO: 14207 - RNA, 19 nt, Homo sapiens
  source 1..19: mol_type = genomic RNA
agagttacatcacctagat

SEQ ID NO: 14208 - RNA, 19 nt, Homo sapiens
  source 1..19: mol_type = genomic RNA
gagttacatcacctagatg

SEQ ID NO: 14209 - RNA, 19 nt, Homo sapiens
  source 1..19: mol_type = genomic RNA
agttacatcacctagatga

SEQ ID NO: 14210 - RNA, 19 nt, Homo sapiens
  source 1..19: mol_type = genomic RNA
gttacatcacctagatgat

SEQ ID NO: 14211 - RNA, 19 nt, Homo sapiens
  source 1..19: mol_type = genomic RNA
ttacatcacctagatgatc

SEQ ID NO: 14212 - RNA, 19 nt, Homo sapiens
  source 1..19: mol_type = genomic RNA
tacatcacctagatgatct

SEQ ID NO: 14213 - RNA, 19 nt, Homo sapiens
  source 1..19: mol_type = genomic RNA
acatcacctagatgatctg

SEQ ID NO: 14214 - RNA, 19 nt, Homo sapiens
  source 1..19: mol_type = genomic RNA
catcacctagatgatctgt

SEQ ID NO: 14215 - RNA, 19 nt, Homo sapiens
  source 1..19: mol_type = genomic RNA
atcacctagatgatctgtg

SEQ ID NO: 14216 - RNA, 19 nt, Homo sapiens
  source 1..19: mol_type = genomic RNA
tcacctagatgatctgtgc

SEQ ID NO: 14217 - RNA, 19 nt, Homo sapiens
  source 1..19: mol_type = genomic RNA
cacctagatgatctgtgca

SEQ ID NO: 14218 - RNA, 19 nt, Homo sapiens
  source 1..19: mol_type = genomic RNA
acctagatgatctgtgcag

SEQ ID NO: 14219 - RNA, 19 nt, Homo sapiens
  source 1..19: mol_type = genomic RNA
cctagatgatctgtgcaga

SEQ ID NO: 14220 - RNA, 19 nt, Homo sapiens
  source 1..19: mol_type = genomic RNA
ctagatgatctgtgcagag

SEQ ID NO: 14221 - RNA, 19 nt, Homo sapiens
  source 1..19: mol_type = genomic RNA
tagatgatctgtgcagagc

SEQ ID NO: 14222 - RNA, 19 nt, Homo sapiens
  source 1..19: mol_type = genomic RNA
agatgatctgtgcagagct

SEQ ID NO: 14223 - RNA, 19 nt, Homo sapiens
  source 1..19: mol_type = genomic RNA
gatgatctgtgcagagcta

SEQ ID NO: 14224 - RNA, 19 nt, Homo sapiens
  source 1..19: mol_type = genomic RNA
atgatctgtgcagagctat

SEQ ID NO: 14225 - RNA, 19 nt, Homo sapiens
  source 1..19: mol_type = genomic RNA
tgatctgtgcagagctatg

SEQ ID NO: 14226 - RNA, 19 nt, Homo sapiens
  source 1..19: mol_type = genomic RNA
gatctgtgcagagctatgt

SEQ ID NO: 14227 - RNA, 19 nt, Homo sapiens
  source 1..19: mol_type = genomic RNA
atctgtgcagagctatgtc

SEQ ID NO: 14228 - RNA, 19 nt, Homo sapiens
  source 1..19: mol_type = genomic RNA
tctgtgcagagctatgtca

SEQ ID NO: 14229 - RNA, 19 nt, Homo sapiens
  source 1..19: mol_type = genomic RNA
ctgtgcagagctatgtcaa

SEQ ID NO: 14230 - RNA, 19 nt, Homo sapiens
  source 1..19: mol_type = genomic RNA
tgtgcagagctatgtcaaa

SEQ ID NO: 14231 - RNA, 19 nt, Homo sapiens
  source 1..19: mol_type = genomic RNA
gtgcagagctatgtcaaaa

SEQ ID NO: 14232 - RNA, 19 nt, Homo sapiens
  source 1..19: mol_type = genomic RNA
tgcagagctatgtcaaaac

SEQ ID NO: 14233 - RNA, 19 nt, Homo sapiens
  source 1..19: mol_type = genomic RNA
gcagagctatgtcaaaacg

SEQ ID NO: 14234 - RNA, 19 nt, Homo sapiens
  source 1..19: mol_type = genomic RNA
cagagctatgtcaaaacgc

SEQ ID NO: 14235 - RNA, 19 nt, Homo sapiens
  source 1..19: mol_type = genomic RNA
agagctatgtcaaaacgcc

SEQ ID NO: 14236 - RNA, 19 nt, Homo sapiens
  source 1..19: mol_type = genomic RNA
gagctatgtcaaaacgccc

SEQ ID NO: 14237 - RNA, 19 nt, Homo sapiens
  source 1..19: mol_type = genomic RNA
agctatgtcaaaacgcccc

SEQ ID NO: 14238 - RNA, 19 nt, Homo sapiens
  source 1..19: mol_type = genomic RNA
gctatgtcaaaacgcccct

SEQ ID NO: 14239 - RNA, 19 nt, Homo sapiens
  source 1..19: mol_type = genomic RNA
ctatgtcaaaacgcccctg

SEQ ID NO: 14240 - RNA, 19 nt, Homo sapiens
  source 1..19: mol_type = genomic RNA
tatgtcaaaacgcccctgt

SEQ ID NO: 14241 - RNA, 19 nt, Homo sapiens
  source 1..19: mol_type = genomic RNA
atgtcaaaacgcccctgta

SEQ ID NO: 14242 - RNA, 19 nt, Homo sapiens
  source 1..19: mol_type = genomic RNA
tgtcaaaacgcccctgtag

SEQ ID NO: 14243 - RNA, 19 nt, Homo sapiens
  source 1..19: mol_type = genomic RNA
gtcaaaacgcccctgtagg

SEQ ID NO: 14244 - RNA, 19 nt, Homo sapiens
  source 1..19: mol_type = genomic RNA
tcaaaacgcccctgtaggc

SEQ ID NO: 14245 - RNA, 19 nt, Homo sapiens
  source 1..19: mol_type = genomic RNA
caaaacgcccctgtaggca

SEQ ID NO: 14246 - RNA, 19 nt, Homo sapiens
  source 1..19: mol_type = genomic RNA
aaaacgcccctgtaggcag

SEQ ID NO: 14247 - RNA, 19 nt, Homo sapiens
  source 1..19: mol_type = genomic RNA
aaacgcccctgtaggcaga

SEQ ID NO: 14248 - RNA, 19 nt, Homo sapiens
  source 1..19: mol_type = genomic RNA
ctgtaggcagagcctagat

SEQ ID NO: 14249 - RNA, 19 nt, Homo sapiens
  source 1..19: mol_type = genomic RNA
tgtaggcagagcctagatg

SEQ ID NO: 14250 - RNA, 19 nt, Homo sapiens
  source 1..19: mol_type = genomic RNA
gtaggcagagcctagatga

SEQ ID NO: 14251 - RNA, 19 nt, Homo sapiens
  source 1..19: mol_type = genomic RNA
taggcagagcctagatgag

SEQ ID NO: 14252 - RNA, 19 nt, Homo sapiens
  source 1..19: mol_type = genomic RNA
aggcagagcctagatgagt

SEQ ID NO: 14253 - RNA, 19 nt, Homo sapiens
  source 1..19: mol_type = genomic RNA
ggcagagcctagatgagtg

SEQ ID NO: 14254 - RNA, 19 nt, Homo sapiens
  source 1..19: mol_type = genomic RNA
gcagagcctagatgagtgt

SEQ ID NO: 14255 - RNA, 19 nt, Homo sapiens
  source 1..19: mol_type = genomic RNA
cagagcctagatgagtgtt

SEQ ID NO: 14256 - RNA, 19 nt, Homo sapiens
  source 1..19: mol_type = genomic RNA
agagcctagatgagtgtta

SEQ ID NO: 14257 - RNA, 19 nt, Homo sapiens
  source 1..19: mol_type = genomic RNA
gagcctagatgagtgttac

SEQ ID NO: 14258 - RNA, 19 nt, Homo sapiens
  source 1..19: mol_type = genomic RNA
agcctagatgagtgttaca

SEQ ID NO: 14259 - RNA, 19 nt, Homo sapiens
  source 1..19: mol_type = genomic RNA
gcctagatgagtgttacat

SEQ ID NO: 14260 - RNA, 19 nt, Homo sapiens
  source 1..19: mol_type = genomic RNA
cctagatgagtgttacatc

SEQ ID NO: 14261 - RNA, 19 nt, Homo sapiens
  source 1..19: mol_type = genomic RNA
tagatgagtgttacatcac

SEQ ID NO: 14262 - RNA, 19 nt, Homo sapiens
  source 1..19: mol_type = genomic RNA
agatgagtgttacatcacc

SEQ ID NO: 14263 - RNA, 19 nt, Homo sapiens
  source 1..19: mol_type = genomic RNA
gatgagtgttacatcacct

SEQ ID NO: 14264 - RNA, 19 nt, Homo sapiens
  source 1..19: mol_type = genomic RNA
atgagtgttacatcacctg

SEQ ID NO: 14265 - RNA, 19 nt, Homo sapiens
  source 1..19: mol_type = genomic RNA
tgagtgttacatcacctgg

SEQ ID NO: 14266 - RNA, 19 nt, Homo sapiens
  source 1..19: mol_type = genomic RNA
gagtgttacatcacctggg

SEQ ID NO: 14267 - RNA, 19 nt, Homo sapiens
  source 1..19: mol_type = genomic RNA
acatcacctgggtgatcat

SEQ ID NO: 14268 - RNA, 19 nt, Homo sapiens
  source 1..19: mol_type = genomic RNA
catcacctgggtgatcatt

SEQ ID NO: 14269 - RNA, 19 nt, Homo sapiens
  source 1..19: mol_type = genomic RNA
atcacctgggtgatcattg

SEQ ID NO: 14270 - RNA, 19 nt, Homo sapiens
  source 1..19: mol_type = genomic RNA
tcacctgggtgatcattgc

SEQ ID NO: 14271 - RNA, 19 nt, Homo sapiens
  source 1..19: mol_type = genomic RNA
cacctgggtgatcattgca

SEQ ID NO: 14272 - RNA, 19 nt, Homo sapiens
  source 1..19: mol_type = genomic RNA
acctgggtgatcattgcag

SEQ ID NO: 14273 - RNA, 19 nt, Homo sapiens
  source 1..19: mol_type = genomic RNA
cctgggtgatcattgcaga

SEQ ID NO: 14274 - RNA, 19 nt, Homo sapiens
  source 1..19: mol_type = genomic RNA
ctgggtgatcattgcagag

SEQ ID NO: 14275 - RNA, 19 nt, Homo sapiens
  source 1..19: mol_type = genomic RNA
tgggtgatcattgcagaga

SEQ ID NO: 14276 - RNA, 19 nt, Homo sapiens
  source 1..19: mol_type = genomic RNA
gggtgatcattgcagagat

SEQ ID NO: 14277 - RNA, 19 nt, Homo sapiens
  source 1..19: mol_type = genomic RNA
ggtgatcattgcagagata

SEQ ID NO: 14278 - RNA, 19 nt, Homo sapiens
  source 1..19: mol_type = genomic RNA
gtgatcattgcagagatac

SEQ ID NO: 14279 - RNA, 19 nt, Homo sapiens
  source 1..19: mol_type = genomic RNA
tgatcattgcagagatacg

SEQ ID NO: 14280 - RNA, 19 nt, Homo sapiens
  source 1..19: mol_type = genomic RNA
gatcattgcagagatacgt

SEQ ID NO: 14281 - RNA, 19 nt, Homo sapiens
  source 1..19: mol_type = genomic RNA
atcattgcagagatacgtc

SEQ ID NO: 14282 - RNA, 19 nt, Homo sapiens
  source 1..19: mol_type = genomic RNA
tcattgcagagatacgtca

SEQ ID NO: 14283 - RNA, 19 nt, Homo sapiens
  source 1..19: mol_type = genomic RNA
cattgcagagatacgtcac

SEQ ID NO: 14284 - RNA, 19 nt, Homo sapiens
  source 1..19: mol_type = genomic RNA
attgcagagatacgtcaca

SEQ ID NO: 14285 - RNA, 19 nt, Homo sapiens
  source 1..19: mol_type = genomic RNA
ttgcagagatacgtcacaa

SEQ ID NO: 14286 - RNA, 19 nt, Homo sapiens
  source 1..19: mol_type = genomic RNA
tgcagagatacgtcacaat

SEQ ID NO: 14287 - RNA, 19 nt, Homo sapiens
  source 1..19: mol_type = genomic RNA
gcagagatacgtcacaata

SEQ ID NO: 14288 - RNA, 19 nt, Homo sapiens
  source 1..19: mol_type = genomic RNA
cagagatacgtcacaatac

SEQ ID NO: 14289 - RNA, 19 nt, Homo sapiens
  source 1..19: mol_type = genomic RNA
agagatacgtcacaatacc

SEQ ID NO: 14290 - RNA, 19 nt, Homo sapiens
  source 1..19: mol_type = genomic RNA
gagatacgtcacaataccc

SEQ ID NO: 14291 - RNA, 19 nt, Homo sapiens
  source 1..19: mol_type = genomic RNA
agatacgtcacaatacccc

SEQ ID NO: 14292 - RNA, 19 nt, Homo sapiens
  source 1..19: mol_type = genomic RNA
gatacgtcacaataccccc

SEQ ID NO: 14293 - RNA, 19 nt, Homo sapiens
  source 1..19: mol_type = genomic RNA
atacgtcacaataccccct

SEQ ID NO: 14294 - RNA, 19 nt, Homo sapiens
  source 1..19: mol_type = genomic RNA
tacgtcacaataccccctg

SEQ ID NO: 14295 - RNA, 19 nt, Homo sapiens
  source 1..19: mol_type = genomic RNA
acgtcacaataccccctgt

SEQ ID NO: 14296 - RNA, 19 nt, Homo sapiens
  source 1..19: mol_type = genomic RNA
cgtcacaataccccctgta

SEQ ID NO: 14297 - RNA, 19 nt, Homo sapiens
  source 1..19: mol_type = genomic RNA
gtcacaataccccctgtag

SEQ ID NO: 14298 - RNA, 19 nt, Homo sapiens
  source 1..19: mol_type = genomic RNA
tcacaataccccctgtagg

SEQ ID NO: 14299 - RNA, 19 nt, Homo sapiens
  source 1..19: mol_type = genomic RNA
cacaataccccctgtaggt

SEQ ID NO: 14300 - RNA, 19 nt, Homo sapiens
  source 1..19: mol_type = genomic RNA
acaataccccctgtaggtg

SEQ ID NO: 14301 - RNA, 19 nt, Homo sapiens
  source 1..19: mol_type = genomic RNA
caataccccctgtaggtgg

SEQ ID NO: 14302 - RNA, 19 nt, Homo sapiens
  source 1..19: mol_type = genomic RNA
aataccccctgtaggtggg

SEQ ID NO: 14303 - RNA, 19 nt, Homo sapiens
  source 1..19: mol_type = genomic RNA
tggggcctagacaagagtt

SEQ ID NO: 14304 - RNA, 19 nt, Homo sapiens
  source 1..19: mol_type = genomic RNA
ggggcctagacaagagtta

SEQ ID NO: 14305 - RNA, 19 nt, Homo sapiens
  source 1..19: mol_type = genomic RNA
gggcctagacaagagttac

SEQ ID NO: 14306 - RNA, 19 nt, Homo sapiens
  source 1..19: mol_type = genomic RNA
ggcctagacaagagttaca

SEQ ID NO: 14307 - RNA, 19 nt, Homo sapiens
  source 1..19: mol_type = genomic RNA
gcctagacaagagttacat

SEQ ID NO: 14308 - RNA, 19 nt, Homo sapiens
  source 1..19: mol_type = genomic RNA
cctagacaagagttacatc

SEQ ID NO: 14309 - RNA, 19 nt, Homo sapiens
  source 1..19: mol_type = genomic RNA
ctagacaagagttacatca

SEQ ID NO: 14310 - RNA, 19 nt, Homo sapiens
  source 1..19: mol_type = genomic RNA
tagacaagagttacatcac

SEQ ID NO: 14311 - RNA, 19 nt, Homo sapiens
  source 1..19: mol_type = genomic RNA
agacaagagttacatcacc

SEQ ID NO: 14312 - RNA, 19 nt, Homo sapiens
  source 1..19: mol_type = genomic RNA
acaagagttacatcacctg

SEQ ID NO: 14313 - RNA, 19 nt, Homo sapiens
  source 1..19: mol_type = genomic RNA
caagagttacatcacctgg

SEQ ID NO: 14314 - RNA, 19 nt, Homo sapiens
  source 1..19: mol_type = genomic RNA
aagagttacatcacctggg

SEQ ID NO: 14315 - RNA, 19 nt, Homo sapiens
  source 1..19: mol_type = genomic RNA
agagttacatcacctgggt

SEQ ID NO: 14316 - RNA, 19 nt, Homo sapiens
  source 1..19: mol_type = genomic RNA
gagttacatcacctgggtg

SEQ ID NO: 14317 - RNA, 19 nt, Homo sapiens
  source 1..19: mol_type = genomic RNA
agttacatcacctgggtga

SEQ ID NO: 14318 - RNA, 19 nt, Homo sapiens
  source 1..19: mol_type = genomic RNA
atcacctgggtgatcagta

SEQ ID NO: 14319 - RNA, 19 nt, Homo sapiens
  source 1..19: mol_type = genomic RNA
tcacctgggtgatcagtac

SEQ ID NO: 14320 - RNA, 19 nt, Homo sapiens
  source 1..19: mol_type = genomic RNA
cacctgggtgatcagtaca

SEQ ID NO: 14321 - RNA, 19 nt, Homo sapiens
  source 1..19: mol_type = genomic RNA
acctgggtgatcagtacag

SEQ ID NO: 14322 - RNA, 19 nt, Homo sapiens
  source 1..19: mol_type = genomic RNA
cctgggtgatcagtacaga

SEQ ID NO: 14323 - RNA, 19 nt, Homo sapiens
  source 1..19: mol_type = genomic RNA
ctgggtgatcagtacagaa

SEQ ID NO: 14324 - RNA, 19 nt, Homo sapiens
  source 1..19: mol_type = genomic RNA
tgggtgatcagtacagaag

SEQ ID NO: 14325 - RNA, 19 nt, Homo sapiens
  source 1..19: mol_type = genomic RNA
gggtgatcagtacagaagt

SEQ ID NO: 14326 - RNA, 19 nt, Homo sapiens
  source 1..19: mol_type = genomic RNA
ggtgatcagtacagaagta

SEQ ID NO: 14327 - RNA, 19 nt, Homo sapiens
  source 1..19: mol_type = genomic RNA
gtgatcagtacagaagtat

SEQ ID NO: 14328 - RNA, 19 nt, Homo sapiens
  source 1..19: mol_type = genomic RNA
tgatcagtacagaagtatg

SEQ ID NO: 14329 - RNA, 19 nt, Homo sapiens
  source 1..19: mol_type = genomic RNA
gatcagtacagaagtatgt

SEQ ID NO: 14330 - RNA, 19 nt, Homo sapiens
  source 1..19: mol_type = genomic RNA
atcagtacagaagtatgtc

SEQ ID NO: 14331 - RNA, 19 nt, Homo sapiens
  source 1..19: mol_type = genomic RNA
tcagtacagaagtatgtca

SEQ ID NO: 14332 - RNA, 19 nt, Homo sapiens
  source 1..19: mol_type = genomic RNA
cagtacagaagtatgtcac

SEQ ID NO: 14333 - RNA, 19 nt, Homo sapiens
  source 1..19: mol_type = genomic RNA
agtacagaagtatgtcaca

SEQ ID NO: 14334 - RNA, 19 nt, Homo sapiens
  source 1..19: mol_type = genomic RNA
gtacagaagtatgtcacaa

SEQ ID NO: 14335 - RNA, 19 nt, Homo sapiens
  source 1..19: mol_type = genomic RNA
tacagaagtatgtcacaaa

SEQ ID NO: 14336 - RNA, 19 nt, Homo sapiens
  source 1..19: mol_type = genomic RNA
acagaagtatgtcacaaag

SEQ ID NO: 14337 - RNA, 19 nt, Homo sapiens
  source 1..19: mol_type = genomic RNA
cagaagtatgtcacaaagc

SEQ ID NO: 14338 - RNA, 19 nt, Homo sapiens
  source 1..19: mol_type = genomic RNA
agaagtatgtcacaaagcc

SEQ ID NO: 14339 - RNA, 19 nt, Homo sapiens
  source 1..19: mol_type = genomic RNA
gaagtatgtcacaaagccc

SEQ ID NO: 14340 - RNA, 19 nt, Homo sapiens
  source 1..19: mol_type = genomic RNA
aagtatgtcacaaagcccc

SEQ ID NO: 14341 - RNA, 19 nt, Homo sapiens
  source 1..19: mol_type = genomic RNA
agtatgtcacaaagcccct

SEQ ID NO: 14342 - RNA, 19 nt, Homo sapiens
  source 1..19: mol_type = genomic RNA
gtatgtcacaaagcccctg

SEQ ID NO: 14343 - RNA, 19 nt, Homo sapiens
  source 1..19: mol_type = genomic RNA
tatgtcacaaagcccctgt

SEQ ID NO: 14344 - RNA, 19 nt, Homo sapiens
  source 1..19: mol_type = genomic RNA
atgtcacaaagcccctgta

SEQ ID NO: 14345 - RNA, 19 nt, Homo sapiens
  source 1..19: mol_type = genomic RNA
agcctagacaagagttaca

SEQ ID NO: 14346 - RNA, 19 nt, Homo sapiens
  source 1..19: mol_type = genomic RNA
gagttacatcacctgggtt

SEQ ID NO: 14347 - RNA, 19 nt, Homo sapiens
  source 1..19: mol_type = genomic RNA
agttacatcacctgggtta

SEQ ID NO: 14348 - RNA, 19 nt, Homo sapiens
  source 1..19: mol_type = genomic RNA
gttacatcacctgggttat

SEQ ID NO: 14349 - RNA, 19 nt, Homo sapiens
  source 1..19: mol_type = genomic RNA
ttacatcacctgggttatc

SEQ ID NO: 14350 - RNA, 19 nt, Homo sapiens
  source 1..19: mol_type = genomic RNA
tacatcacctgggttatca

SEQ ID NO: 14351 - RNA, 19 nt, Homo sapiens
  source 1..19: mol_type = genomic RNA
acatcacctgggttatcag

SEQ ID NO: 14352 - RNA, 19 nt, Homo sapiens
  source 1..19: mol_type = genomic RNA
catcacctgggttatcagt

SEQ ID NO: 14353 - RNA, 19 nt, Homo sapiens
  source 1..19: mol_type = genomic RNA
atcacctgggttatcagtg

SEQ ID NO: 14354 - RNA, 19 nt, Homo sapiens
  source 1..19: mol_type = genomic RNA
tcacctgggttatcagtgc

SEQ ID NO: 14355 - RNA, 19 nt, Homo sapiens
  source 1..19: mol_type = genomic RNA
cacctgggttatcagtgca

SEQ ID NO: 14356 - RNA, 19 nt, Homo sapiens
  source 1..19: mol_type = genomic RNA
acctgggttatcagtgcag

SEQ ID NO: 14357 - RNA, 19 nt, Homo sapiens
  source 1..19: mol_type = genomic RNA
cctgggttatcagtgcaga

SEQ ID NO: 14358 - RNA, 19 nt, Homo sapiens
  source 1..19: mol_type = genomic RNA
ctgggttatcagtgcagaa

SEQ ID NO: 14359 - RNA, 19 nt, Homo sapiens
  source 1..19: mol_type = genomic RNA
tgggttatcagtgcagaaa

SEQ ID NO: 14360 - RNA, 19 nt, Homo sapiens
  source 1..19: mol_type = genomic RNA
gggttatcagtgcagaaat

SEQ ID NO: 14361 - RNA, 19 nt, Homo sapiens
  source 1..19: mol_type = genomic RNA
ggttatcagtgcagaaata

SEQ ID NO: 14362 - RNA, 19 nt, Homo sapiens
  source 1..19: mol_type = genomic RNA
tatcagtgcagaaatatgt

SEQ ID NO: 14363 - RNA, 19 nt, Homo sapiens
  source 1..19: mol_type = genomic RNA
atcagtgcagaaatatgtc

SEQ ID NO: 14364 - RNA, 19 nt, Homo sapiens
  source 1..19: mol_type = genomic RNA
tcagtgcagaaatatgtca

SEQ ID NO: 14365 - RNA, 19 nt, Homo sapiens
  source 1..19: mol_type = genomic RNA
cagtgcagaaatatgtcac

SEQ ID NO: 14366 - RNA, 19 nt, Homo sapiens
  source 1..19: mol_type = genomic RNA
agtgcagaaatatgtcaca

SEQ ID NO: 14367 - RNA, 19 nt, Homo sapiens
  source 1..19: mol_type = genomic RNA
gtgcagaaatatgtcacaa

SEQ ID NO: 14368 - RNA, 19 nt, Homo sapiens
  source 1..19: mol_type = genomic RNA
tgcagaaatatgtcacaaa

SEQ ID NO: 14369 - RNA, 19 nt, Homo sapiens
  source 1..19: mol_type = genomic RNA
gcagaaatatgtcacaaag

SEQ ID NO: 14370 - RNA, 19 nt, Homo sapiens
  source 1..19: mol_type = genomic RNA
cagaaatatgtcacaaagc

SEQ ID NO: 14371 - RNA, 19 nt, Homo sapiens
  source 1..19: mol_type = genomic RNA
agaaatatgtcacaaagcc

SEQ ID NO: 14372 - RNA, 19 nt, Homo sapiens
  source 1..19: mol_type = genomic RNA
gaaatatgtcacaaagccc

SEQ ID NO: 14373 - RNA, 19 nt, Homo sapiens
  source 1..19: mol_type = genomic RNA
aaatatgtcacaaagcccc

SEQ ID NO: 14374 - RNA, 19 nt, Homo sapiens
  source 1..19: mol_type = genomic RNA
aatatgtcacaaagcccct

SEQ ID NO: 14375 - RNA, 19 nt, Homo sapiens
  source 1..19: mol_type = genomic RNA
atatgtcacaaagcccctg

SEQ ID NO: 14376 - RNA, 19 nt, Homo sapiens
  source 1..19: mol_type = genomic RNA
tcacaaagcccctgtaggt

SEQ ID NO: 14377 - RNA, 19 nt, Homo sapiens
  source 1..19: mol_type = genomic RNA
cacaaagcccctgtaggtc

SEQ ID NO: 14378 - RNA, 19 nt, Homo sapiens
  source 1..19: mol_type = genomic RNA
acaaagcccctgtaggtcg

SEQ ID NO: 14379 - RNA, 19 nt, Homo sapiens
  source 1..19: mol_type = genomic RNA
caaagcccctgtaggtcga

SEQ ID NO: 14380 - RNA, 19 nt, Homo sapiens
  source 1..19: mol_type = genomic RNA
aaagcccctgtaggtcgag

SEQ ID NO: 14381 - RNA, 19 nt, Homo sapiens
  source 1..19: mol_type = genomic RNA
aagcccctgtaggtcgagt

SEQ ID NO: 14382 - RNA, 19 nt, Homo sapiens
  source 1..19: mol_type = genomic RNA
agcccctgtaggtcgagtc

SEQ ID NO: 14383 - RNA, 19 nt, Homo sapiens
  source 1..19: mol_type = genomic RNA
gcccctgtaggtcgagtct

SEQ ID NO: 14384 - RNA, 19 nt, Homo sapiens
  source 1..19: mol_type = genomic RNA
cccctgtaggtcgagtcta

SEQ ID NO: 14385 - RNA, 19 nt, Homo sapiens
  source 1..19: mol_type = genomic RNA
ccctgtaggtcgagtctag

SEQ ID NO: 14386 - RNA, 19 nt, Homo sapiens
  source 1..19: mol_type = genomic RNA
cctgtaggtcgagtctaga

SEQ ID NO: 14387 - RNA, 19 nt, Homo sapiens
  source 1..19: mol_type = genomic RNA
ctgtaggtcgagtctagac

SEQ ID NO: 14388 - RNA, 19 nt, Homo sapiens
  source 1..19: mol_type = genomic RNA
tgtaggtcgagtctagaca

SEQ ID NO: 14389 - RNA, 19 nt, Homo sapiens
  source 1..19: mol_type = genomic RNA
gtaggtcgagtctagacaa

SEQ ID NO: 14390 - RNA, 19 nt, Homo sapiens
  source 1..19: mol_type = genomic RNA
taggtcgagtctagacaag

SEQ ID NO: 14391 - RNA, 19 nt, Homo sapiens
  source 1..19: mol_type = genomic RNA
aggtcgagtctagacaaga

SEQ ID NO: 14392 - RNA, 19 nt, Homo sapiens
  source 1..19: mol_type = genomic RNA
ggtcgagtctagacaagag

SEQ ID NO: 14393 - RNA, 19 nt, Homo sapiens
  source 1..19: mol_type = genomic RNA
gtcgagtctagacaagagt

SEQ ID NO: 14394 - RNA, 19 nt, Homo sapiens
  source 1..19: mol_type = genomic RNA
tcgagtctagacaagagtt

SEQ ID NO: 14395 - RNA, 19 nt, Homo sapiens
  source 1..19: mol_type = genomic RNA
cgagtctagacaagagtta

SEQ ID NO: 14396 - RNA, 19 nt, Homo sapiens
  source 1..19: mol_type = genomic RNA
gagtctagacaagagttac

SEQ ID NO: 14397 - RNA, 19 nt, Homo sapiens
  source 1..19: mol_type = genomic RNA
agtctagacaagagttaca

SEQ ID NO: 14398 - RNA, 19 nt, Homo sapiens
  source 1..19: mol_type = genomic RNA
gtctagacaagagttacat

SEQ ID NO: 14399 - RNA, 19 nt, Homo sapiens
  source 1..19: mol_type = genomic RNA
tctagacaagagttacatc

SEQ ID NO: 14400 - RNA, 19 nt, Homo sapiens
  source 1..19: mol_type = genomic RNA
ctagacaagagttacatct

SEQ ID NO: 14401 - RNA, 19 nt, Homo sapiens
  source 1..19: mol_type = genomic RNA
tagacaagagttacatctc

SEQ ID NO: 14402 - RNA, 19 nt, Homo sapiens
  source 1..19: mol_type = genomic RNA
agacaagagttacatctcc

SEQ ID NO: 14403 - RNA, 19 nt, Homo sapiens
  source 1..19: mol_type = genomic RNA
gacaagagttacatctcct

SEQ ID NO: 14404 - RNA, 19 nt, Homo sapiens
  source 1..19: mol_type = genomic RNA
acaagagttacatctcctg

SEQ ID NO: 14405 - RNA, 19 nt, Homo sapiens
  source 1..19: mol_type = genomic RNA
caagagttacatctcctgg

SEQ ID NO: 14406 - RNA, 19 nt, Homo sapiens
  source 1..19: mol_type = genomic RNA
aagagttacatctcctggg

SEQ ID NO: 14407 - RNA, 19 nt, Homo sapiens
  source 1..19: mol_type = genomic RNA
agagttacatctcctgggt

SEQ ID NO: 14408 - RNA, 19 nt, Homo sapiens
  source 1..19: mol_type = genomic RNA
gagttacatctcctgggtg

SEQ ID NO: 14409 - RNA, 19 nt, Homo sapiens
  source 1..19: mol_type = genomic RNA
agttacatctcctgggtga

SEQ ID NO: 14410 - RNA, 19 nt, Homo sapiens
  source 1..19: mol_type = genomic RNA
gttacatctcctgggtgat

SEQ ID NO: 14411 - RNA, 19 nt, Homo sapiens
  source 1..19: mol_type = genomic RNA
ttacatctcctgggtgatc

SEQ ID NO: 14412 - RNA, 19 nt, Homo sapiens
  source 1..19: mol_type = genomic RNA
tacatctcctgggtgatca

SEQ ID NO: 14413 - RNA, 19 nt, Homo sapiens
  source 1..19: mol_type = genomic RNA
acatctcctgggtgatcag

SEQ ID NO: 14414 - RNA, 19 nt, Homo sapiens
  source 1..19: mol_type = genomic RNA
catctcctgggtgatcagt

SEQ ID NO: 14415 - RNA, 19 nt, Homo sapiens
  source 1..19: mol_type = genomic RNA
atctcctgggtgatcagtg

SEQ ID NO: 14416 - RNA, 19 nt, Homo sapiens
  source 1..19: mol_type = genomic RNA
tctcctgggtgatcagtgc

SEQ ID NO: 14417 - RNA, 19 nt, Homo sapiens
  source 1..19: mol_type = genomic RNA
ctcctgggtgatcagtgca

SEQ ID NO: 14418 - RNA, 19 nt, Homo sapiens
  source 1..19: mol_type = genomic RNA
tcctgggtgatcagtgcaa

SEQ ID NO: 14419 - RNA, 19 nt, Homo sapiens
  source 1..19: mol_type = genomic RNA
cctgggtgatcagtgcaaa

SEQ ID NO: 14420 - RNA, 19 nt, Homo sapiens
  source 1..19: mol_type = genomic RNA
ctgggtgatcagtgcaaag

SEQ ID NO: 14421 - RNA, 19 nt, Homo sapiens
  source 1..19: mol_type = genomic RNA
tgggtgatcagtgcaaaga

SEQ ID NO: 14422 - RNA, 19 nt, Homo sapiens
  source 1..19: mol_type = genomic RNA
gggtgatcagtgcaaagat

SEQ ID NO: 14423 - RNA, 19 nt, Homo sapiens
  source 1..19: mol_type = genomic RNA
ggtgatcagtgcaaagata

SEQ ID NO: 14424 - RNA, 19 nt, Homo sapiens
  source 1..19: mol_type = genomic RNA
gtgatcagtgcaaagatat

SEQ ID NO: 14425 - RNA, 19 nt, Homo sapiens
  source 1..19: mol_type = genomic RNA
tgatcagtgcaaagatatg

SEQ ID NO: 14426 - RNA, 19 nt, Homo sapiens
  source 1..19: mol_type = genomic RNA
gatcagtgcaaagatatgt

SEQ ID NO: 14427 - RNA, 19 nt, Homo sapiens
  source 1..19: mol_type = genomic RNA
atcagtgcaaagatatgtc

SEQ ID NO: 14428 - RNA, 19 nt, Homo sapiens
  source 1..19: mol_type = genomic RNA
tcagtgcaaagatatgtca

SEQ ID NO: 14429 - RNA, 19 nt, Homo sapiens
  source 1..19: mol_type = genomic RNA
cagtgcaaagatatgtcac

SEQ ID NO: 14430 - RNA, 19 nt, Homo sapiens
  source 1..19: mol_type = genomic RNA
agtgcaaagatatgtcaca

SEQ ID NO: 14431 - RNA, 19 nt, Homo sapiens
  source 1..19: mol_type = genomic RNA
gtgcaaagatatgtcacaa

SEQ ID NO: 14432 - RNA, 19 nt, Homo sapiens
  source 1..19: mol_type = genomic RNA
tgcaaagatatgtcacaaa

SEQ ID NO: 14433 - RNA, 19 nt, Homo sapiens
  source 1..19: mol_type = genomic RNA
gcaaagatatgtcacaaag

SEQ ID NO: 14434 - RNA, 19 nt, Homo sapiens
  source 1..19: mol_type = genomic RNA
caaagatatgtcacaaagc

SEQ ID NO: 14435 - RNA, 19 nt, Homo sapiens
  source 1..19: mol_type = genomic RNA
aaagatatgtcacaaagcc

SEQ ID NO: 14436 - RNA, 19 nt, Homo sapiens
  source 1..19: mol_type = genomic RNA
aagatatgtcacaaagccc

SEQ ID NO: 14437 - RNA, 19 nt, Homo sapiens
  source 1..19: mol_type = genomic RNA
agatatgtcacaaagcccc

SEQ ID NO: 14438 - RNA, 19 nt, Homo sapiens
  source 1..19: mol_type = genomic RNA
gatatgtcacaaagccccc

SEQ ID NO: 14439 - RNA, 19 nt, Homo sapiens
  source 1..19: mol_type = genomic RNA
atatgtcacaaagccccct

SEQ ID NO: 14440 - RNA, 19 nt, Homo sapiens
  source 1..19: mol_type = genomic RNA
tatgtcacaaagccccctg

SEQ ID NO: 14441 - RNA, 19 nt, Homo sapiens
  source 1..19: mol_type = genomic RNA
atgtcacaaagccccctgt

SEQ ID NO: 14442 - RNA, 19 nt, Homo sapiens
  source 1..19: mol_type = genomic RNA
tgtcacaaagccccctgta

SEQ ID NO: 14443 - RNA, 19 nt, Homo sapiens
  source 1..19: mol_type = genomic RNA
gtcacaaagccccctgtag

SEQ ID NO: 14444 - RNA, 19 nt, Homo sapiens
  source 1..19: mol_type = genomic RNA
aagccccctgtagacaaat

SEQ ID NO: 14445 - RNA, 19 nt, Homo sapiens
  source 1..19: mol_type = genomic RNA
agccccctgtagacaaatc

SEQ ID NO: 14446 - RNA, 19 nt, Homo sapiens
  source 1..19: mol_type = genomic RNA
gccccctgtagacaaatcc

SEQ ID NO: 14447 - RNA, 19 nt, Homo sapiens
  source 1..19: mol_type = genomic RNA
ccccctgtagacaaatccc

SEQ ID NO: 14448 - RNA, 19 nt, Homo sapiens
  source 1..19: mol_type = genomic RNA
cccctgtagacaaatccca

SEQ ID NO: 14449 - RNA, 19 nt, Homo sapiens
  source 1..19: mol_type = genomic RNA
ccctgtagacaaatcccag

SEQ ID NO: 14450 - RNA, 19 nt, Homo sapiens
  source 1..19: mol_type = genomic RNA
cctgtagacaaatcccaga

SEQ ID NO: 14451 - RNA, 19 nt, Homo sapiens
  source 1..19: mol_type = genomic RNA
ctgtagacaaatcccagaa

SEQ ID NO: 14452 - RNA, 19 nt, Homo sapiens
  source 1..19: mol_type = genomic RNA
tgtagacaaatcccagaaa

SEQ ID NO: 14453 - RNA, 19 nt, Homo sapiens
  source 1..19: mol_type = genomic RNA
gtagacaaatcccagaaaa

SEQ ID NO: 14454 - RNA, 19 nt, Homo sapiens
  source 1..19: mol_type = genomic RNA
tagacaaatcccagaaaat

SEQ ID NO: 14455 - RNA, 19 nt, Homo sapiens
  source 1..19: mol_type = genomic RNA
agacaaatcccagaaaatt

SEQ ID NO: 14456 - RNA, 19 nt, Homo sapiens
  source 1..19: mol_type = genomic RNA
gacaaatcccagaaaattg

SEQ ID NO: 14457 - RNA, 19 nt, Homo sapiens
  source 1..19: mol_type = genomic RNA
acaaatcccagaaaattgt

SEQ ID NO: 14458 - RNA, 19 nt, Homo sapiens
  source 1..19: mol_type = genomic RNA
aaattgttacatcacctgg

SEQ ID NO: 14459 - RNA, 19 nt, Homo sapiens
  source 1..19: mol_type = genomic RNA
aattgttacatcacctggg

SEQ ID NO: 14460 - RNA, 19 nt, Homo sapiens
  source 1..19: mol_type = genomic RNA
attgttacatcacctgggt

SEQ ID NO: 14461 - RNA, 19 nt, Homo sapiens
  source 1..19: mol_type = genomic RNA
ttgttacatcacctgggtg

SEQ ID NO: 14462 - RNA, 19 nt, Homo sapiens
  source 1..19: mol_type = genomic RNA
tcacctgggtgatcagtgg

SEQ ID NO: 14463 - RNA, 19 nt, Homo sapiens
  source 1..19: mol_type = genomic RNA
cacctgggtgatcagtgga

SEQ ID NO: 14464 - RNA, 19 nt, Homo sapiens
  source 1..19: mol_type = genomic RNA
acctgggtgatcagtggag

SEQ ID NO: 14465 - RNA, 19 nt, Homo sapiens
  source 1..19: mol_type = genomic RNA
cctgggtgatcagtggaga

SEQ ID NO: 14466 - RNA, 19 nt, Homo sapiens
  source 1..19: mol_type = genomic RNA
ctgggtgatcagtggagat

SEQ ID NO: 14467 - RNA, 19 nt, Homo sapiens
  source 1..19: mol_type = genomic RNA
tgggtgatcagtggagata

SEQ ID NO: 14468 - RNA, 19 nt, Homo sapiens
  source 1..19: mol_type = genomic RNA
gggtgatcagtggagatat

SEQ ID NO: 14469 - RNA, 19 nt, Homo sapiens
  source 1..19: mol_type = genomic RNA
ggtgatcagtggagatatg

SEQ ID NO: 14470 - RNA, 19 nt, Homo sapiens
  source 1..19: mol_type = genomic RNA
gtgatcagtggagatatgt

SEQ ID NO: 14471 - RNA, 19 nt, Homo sapiens
  source 1..19: mol_type = genomic RNA
tgatcagtggagatatgtg

SEQ ID NO: 14472 - RNA, 19 nt, Homo sapiens
  source 1..19: mol_type = genomic RNA
gatcagtggagatatgtgt

SEQ ID NO: 14473 - RNA, 19 nt, Homo sapiens
  source 1..19: mol_type = genomic RNA
atcagtggagatatgtgtc

SEQ ID NO: 14474 - RNA, 19 nt, Homo sapiens
  source 1..19: mol_type = genomic RNA
tcagtggagatatgtgtca

SEQ ID NO: 14475 - RNA, 19 nt, Homo sapiens
  source 1..19: mol_type = genomic RNA
cagtggagatatgtgtcac

SEQ ID NO: 14476 - RNA, 19 nt, Homo sapiens
  source 1..19: mol_type = genomic RNA
agtggagatatgtgtcaca

SEQ ID NO: 14477 - RNA, 19 nt, Homo sapiens
  source 1..19: mol_type = genomic RNA
gtggagatatgtgtcacaa

SEQ ID NO: 14478 - RNA, 19 nt, Homo sapiens
  source 1..19: mol_type = genomic RNA
tggagatatgtgtcacaat

SEQ ID NO: 14479 - RNA, 19 nt, Homo sapiens
  source 1..19: mol_type = genomic RNA
ggagatatgtgtcacaatt

SEQ ID NO: 14480 - RNA, 19 nt, Homo sapiens
  source 1..19: mol_type = genomic RNA
agatatgtgtcacaattcc

SEQ ID NO: 14481 - RNA, 19 nt, Homo sapiens
  source 1..19: mol_type = genomic RNA
gatatgtgtcacaattccc

SEQ ID NO: 14482 - RNA, 19 nt, Homo sapiens
  source 1..19: mol_type = genomic RNA
atatgtgtcacaattcccc

SEQ ID NO: 14483 - RNA, 19 nt, Homo sapiens
  source 1..19: mol_type = genomic RNA
tatgtgtcacaattcccct

SEQ ID NO: 14484 - RNA, 19 nt, Homo sapiens
  source 1..19: mol_type = genomic RNA
atgtgtcacaattcccctt

SEQ ID NO: 14485 - RNA, 19 nt, Homo sapiens
  source 1..19: mol_type = genomic RNA
tgtgtcacaattccccttt

SEQ ID NO: 14486 - RNA, 19 nt, Homo sapiens
  source 1..19: mol_type = genomic RNA
gtcacaattcccctttagg

SEQ ID NO: 14487 - RNA, 19 nt, Homo sapiens
  source 1..19: mol_type = genomic RNA
tcacaattcccctttaggc

SEQ ID NO: 14488 - RNA, 19 nt, Homo sapiens
  source 1..19: mol_type = genomic RNA
cacaattcccctttaggca

SEQ ID NO: 14489 - RNA, 19 nt, Homo sapiens
  source 1..19: mol_type = genomic RNA
acaattcccctttaggcac

SEQ ID NO: 14490 - RNA, 19 nt, Homo sapiens
  source 1..19: mol_type = genomic RNA
caattcccctttaggcaca

SEQ ID NO: 14491 - RNA, 19 nt, Homo sapiens
  source 1..19: mol_type = genomic RNA
aattcccctttaggcacag

SEQ ID NO: 14492 - RNA, 19 nt, Homo sapiens
  source 1..19: mol_type = genomic RNA
attcccctttaggcacagc

SEQ ID NO: 14493 - RNA, 19 nt, Homo sapiens
  source 1..19: mol_type = genomic RNA
ttcccctttaggcacagct

SEQ ID NO: 14494 - RNA, 19 nt, Homo sapiens
  source 1..19: mol_type = genomic RNA
tcccctttaggcacagctt

SEQ ID NO: 14495 - RNA, 19 nt, Homo sapiens
  source 1..19: mol_type = genomic RNA
cccctttaggcacagctta

SEQ ID NO: 14496 - RNA, 19 nt, Homo sapiens
  source 1..19: mol_type = genomic RNA
ccctttaggcacagcttag

SEQ ID NO: 14497 - RNA, 19 nt, Homo sapiens
  source 1..19: mol_type = genomic RNA
cctttaggcacagcttaga

SEQ ID NO: 14498 - RNA, 19 nt, Homo sapiens
  source 1..19: mol_type = genomic RNA
ctttaggcacagcttagac

SEQ ID NO: 14499 - RNA, 19 nt, Homo sapiens
  source 1..19: mol_type = genomic RNA
tttaggcacagcttagaca

SEQ ID NO: 14500 - RNA, 19 nt, Homo sapiens
  source 1..19: mol_type = genomic RNA
ttaggcacagcttagacaa

SEQ ID NO: 14501 - RNA, 19 nt, Homo sapiens
  source 1..19: mol_type = genomic RNA
taggcacagcttagacaag

SEQ ID NO: 14502 - RNA, 19 nt, Homo sapiens
  source 1..19: mol_type = genomic RNA
aggcacagcttagacaagc

SEQ ID NO: 14503 - RNA, 19 nt, Homo sapiens
  source 1..19: mol_type = genomic RNA
ggcacagcttagacaagcg

SEQ ID NO: 14504 - RNA, 19 nt, Homo sapiens
  source 1..19: mol_type = genomic RNA
gcacagcttagacaagcgt

SEQ ID NO: 14505 - RNA, 19 nt, Homo sapiens
  source 1..19: mol_type = genomic RNA
cacagcttagacaagcgtt

SEQ ID NO: 14506 - RNA, 19 nt, Homo sapiens
  source 1..19: mol_type = genomic RNA
acagcttagacaagcgtta

SEQ ID NO: 14507 - RNA, 19 nt, Homo sapiens
  source 1..19: mol_type = genomic RNA
cagcttagacaagcgttac

SEQ ID NO: 14508 - RNA, 19 nt, Homo sapiens
  source 1..19: mol_type = genomic RNA
agcttagacaagcgttaca

SEQ ID NO: 14509 - RNA, 19 nt, Homo sapiens
  source 1..19: mol_type = genomic RNA
gcttagacaagcgttacat

SEQ ID NO: 14510 - RNA, 19 nt, Homo sapiens
  source 1..19: mol_type = genomic RNA
cttagacaagcgttacatc

SEQ ID NO: 14511 - RNA, 19 nt, Homo sapiens
  source 1..19: mol_type = genomic RNA
ttagacaagcgttacatca

SEQ ID NO: 14512 - RNA, 19 nt, Homo sapiens
  source 1..19: mol_type = genomic RNA
tagacaagcgttacatcac

SEQ ID NO: 14513 - RNA, 19 nt, Homo sapiens
  source 1..19: mol_type = genomic RNA
agacaagcgttacatcaca

SEQ ID NO: 14514 - RNA, 19 nt, Homo sapiens
  source 1..19: mol_type = genomic RNA
gacaagcgttacatcacat

SEQ ID NO: 14515 - RNA, 19 nt, Homo sapiens
  source 1..19: mol_type = genomic RNA
acaagcgttacatcacatg

SEQ ID NO: 14516 - RNA, 19 nt, Homo sapiens
  source 1..19: mol_type = genomic RNA
caagcgttacatcacatga

SEQ ID NO: 14517 - RNA, 19 nt, Homo sapiens
  source 1..19: mol_type = genomic RNA
aagcgttacatcacatgag

SEQ ID NO: 14518 - RNA, 19 nt, Homo sapiens
  source 1..19: mol_type = genomic RNA
agcgttacatcacatgagt

SEQ ID NO: 14519 - RNA, 19 nt, Homo sapiens
  source 1..19: mol_type = genomic RNA
gcgttacatcacatgagtg

SEQ ID NO: 14520 - RNA, 19 nt, Homo sapiens
  source 1..19: mol_type = genomic RNA
cgttacatcacatgagtga

SEQ ID NO: 14521 - RNA, 19 nt, Homo sapiens
  source 1..19: mol_type = genomic RNA
gttacatcacatgagtgat

SEQ ID NO: 14522 - RNA, 19 nt, Homo sapiens
  source 1..19: mol_type = genomic RNA
ttacatcacatgagtgatc

SEQ ID NO: 14523 - RNA, 19 nt, Homo sapiens
  source 1..19: mol_type = genomic RNA
tacatcacatgagtgatca

SEQ ID NO: 14524 - RNA, 19 nt, Homo sapiens
  source 1..19: mol_type = genomic RNA
acatcacatgagtgatcat

SEQ ID NO: 14525 - RNA, 19 nt, Homo sapiens
  source 1..19: mol_type = genomic RNA
atcacatgagtgatcattg

SEQ ID NO: 14526 - RNA, 19 nt, Homo sapiens
  source 1..19: mol_type = genomic RNA
tcacatgagtgatcattgc

SEQ ID NO: 14527 - RNA, 19 nt, Homo sapiens
  source 1..19: mol_type = genomic RNA
cacatgagtgatcattgca

SEQ ID NO: 14528 - RNA, 19 nt, Homo sapiens
  source 1..19: mol_type = genomic RNA
acatgagtgatcattgcag

SEQ ID NO: 14529 - RNA, 19 nt, Homo sapiens
  source 1..19: mol_type = genomic RNA
catgagtgatcattgcaga

SEQ ID NO: 14530 - RNA, 19 nt, Homo sapiens
  source 1..19: mol_type = genomic RNA
atgagtgatcattgcagag

SEQ ID NO: 14531 - RNA, 19 nt, Homo sapiens
  source 1..19: mol_type = genomic RNA
tgagtgatcattgcagagt

SEQ ID NO: 14532 - RNA, 19 nt, Homo sapiens
  source 1..19: mol_type = genomic RNA
gagtgatcattgcagagtt

SEQ ID NO: 14533 - RNA, 19 nt, Homo sapiens
  source 1..19: mol_type = genomic RNA
agtgatcattgcagagtta

SEQ ID NO: 14534 - RNA, 19 nt, Homo sapiens
  source 1..19: mol_type = genomic RNA
tgatcattgcagagttatg

SEQ ID NO: 14535 - RNA, 19 nt, Homo sapiens
  source 1..19: mol_type = genomic RNA
cattgcagagttatgtcac

SEQ ID NO: 14536 - RNA, 19 nt, Homo sapiens
  source 1..19: mol_type = genomic RNA
attgcagagttatgtcact

SEQ ID NO: 14537 - RNA, 19 nt, Homo sapiens
  source 1..19: mol_type = genomic RNA
ttgcagagttatgtcacta

SEQ ID NO: 14538 - RNA, 19 nt, Homo sapiens
  source 1..19: mol_type = genomic RNA
tgcagagttatgtcactat

SEQ ID NO: 14539 - RNA, 19 nt, Homo sapiens
  source 1..19: mol_type = genomic RNA
gcagagttatgtcactatg

SEQ ID NO: 14540 - RNA, 19 nt, Homo sapiens
  source 1..19: mol_type = genomic RNA
cagagttatgtcactatgc

SEQ ID NO: 14541 - RNA, 19 nt, Homo sapiens
  source 1..19: mol_type = genomic RNA
agagttatgtcactatgcc

SEQ ID NO: 14542 - RNA, 19 nt, Homo sapiens
  source 1..19: mol_type = genomic RNA
gagttatgtcactatgccc

SEQ ID NO: 14543 - RNA, 19 nt, Homo sapiens
  source 1..19: mol_type = genomic RNA
agttatgtcactatgcccc

SEQ ID NO: 14544 - RNA, 19 nt, Homo sapiens
  source 1..19: mol_type = genomic RNA
gttatgtcactatgccccc

SEQ ID NO: 14545 - RNA, 19 nt, Homo sapiens
  source 1..19: mol_type = genomic RNA
ttatgtcactatgccccca

SEQ ID NO: 14546 - RNA, 19 nt, Homo sapiens
  source 1..19: mol_type = genomic RNA
tatgtcactatgcccccat

SEQ ID NO: 14547 - RNA, 19 nt, Homo sapiens
  source 1..19: mol_type = genomic RNA
atgtcactatgcccccata

SEQ ID NO: 14548 - RNA, 19 nt, Homo sapiens
  source 1..19: mol_type = genomic RNA
tgtcactatgcccccatag

SEQ ID NO: 14549 - RNA, 19 nt, Homo sapiens
  source 1..19: mol_type = genomic RNA
gtcactatgcccccatagg

SEQ ID NO: 14550 - RNA, 19 nt, Homo sapiens
  source 1..19: mol_type = genomic RNA
tcactatgcccccataggc

SEQ ID NO: 14551 - RNA, 19 nt, Homo sapiens
  source 1..19: mol_type = genomic RNA
cactatgcccccataggca

SEQ ID NO: 14552 - RNA, 19 nt, Homo sapiens
  source 1..19: mol_type = genomic RNA
actatgcccccataggcag

SEQ ID NO: 14553 - RNA, 19 nt, Homo sapiens
  source 1..19: mol_type = genomic RNA
ctatgcccccataggcaga

SEQ ID NO: 14554 - RNA, 19 nt, Homo sapiens
  source 1..19: mol_type = genomic RNA
tatgcccccataggcagat

SEQ ID NO: 14555 - RNA, 19 nt, Homo sapiens
  source 1..19: mol_type = genomic RNA
atgcccccataggcagatc

SEQ ID NO: 14556 - RNA, 19 nt, Homo sapiens
  source 1..19: mol_type = genomic RNA
cccccataggcagatccaa

SEQ ID NO: 14557 - RNA, 19 nt, Homo sapiens
  source 1..19: mol_type = genomic RNA
ccccataggcagatccaag

SEQ ID NO: 14558 - RNA, 19 nt, Homo sapiens
  source 1..19: mol_type = genomic RNA
cccataggcagatccaaga

SEQ ID NO: 14559 - RNA, 19 nt, Homo sapiens
  source 1..19: mol_type = genomic RNA
ccataggcagatccaagac

SEQ ID NO: 14560 - RNA, 19 nt, Homo sapiens
  source 1..19: mol_type = genomic RNA
cataggcagatccaagaca

SEQ ID NO: 14561 - RNA, 19 nt, Homo sapiens
  source 1..19: mol_type = genomic RNA
ataggcagatccaagacaa

SEQ ID NO: 14562 - RNA, 19 nt, Homo sapiens
  source 1..19: mol_type = genomic RNA
taggcagatccaagacaag

SEQ ID NO: 14563 - RNA, 19 nt, Homo sapiens
  source 1..19: mol_type = genomic RNA
aggcagatccaagacaaga

SEQ ID NO: 14564 - RNA, 19 nt, Homo sapiens
  source 1..19: mol_type = genomic RNA
ggcagatccaagacaagag

SEQ ID NO: 14565 - RNA, 19 nt, Homo sapiens
  source 1..19: mol_type = genomic RNA
gcagatccaagacaagagt

SEQ ID NO: 14566 - RNA, 19 nt, Homo sapiens
  source 1..19: mol_type = genomic RNA
cagatccaagacaagagtc

SEQ ID NO: 14567 - RNA, 19 nt, Homo sapiens
  source 1..19: mol_type = genomic RNA
agatccaagacaagagtcc

SEQ ID NO: 14568 - RNA, 19 nt, Homo sapiens
  source 1..19: mol_type = genomic RNA
gatccaagacaagagtcca

SEQ ID NO: 14569 - RNA, 19 nt, Homo sapiens
  source 1..19: mol_type = genomic RNA
atccaagacaagagtccat

SEQ ID NO: 14570 - RNA, 19 nt, Homo sapiens
  source 1..19: mol_type = genomic RNA
tccaagacaagagtccatc

SEQ ID NO: 14571 - RNA, 19 nt, Homo sapiens
  source 1..19: mol_type = genomic RNA
ccaagacaagagtccatca

SEQ ID NO: 14572 - RNA, 19 nt, Homo sapiens
  source 1..19: mol_type = genomic RNA
caagacaagagtccatcac

SEQ ID NO: 14573 - RNA, 19 nt, Homo sapiens
  source 1..19: mol_type = genomic RNA
aagacaagagtccatcacc

SEQ ID NO: 14574 - RNA, 19 nt, Homo sapiens
  source 1..19: mol_type = genomic RNA
agacaagagtccatcacct

SEQ ID NO: 14575 - RNA, 19 nt, Homo sapiens
  source 1..19: mol_type = genomic RNA
gacaagagtccatcacctg

SEQ ID NO: 14576 - RNA, 19 nt, Homo sapiens
  source 1..19: mol_type = genomic RNA
acaagagtccatcacctgg

SEQ ID NO: 14577 - RNA, 19 nt, Homo sapiens
  source 1..19: mol_type = genomic RNA
caagagtccatcacctggg

SEQ ID NO: 14578 - RNA, 19 nt, Homo sapiens
  source 1..19: mol_type = genomic RNA
aagagtccatcacctgggt

SEQ ID NO: 14579 - RNA, 19 nt, Homo sapiens
  source 1..19: mol_type = genomic RNA
agagtccatcacctgggtg

SEQ ID NO: 14580 - RNA, 19 nt, Homo sapiens
  source 1..19: mol_type = genomic RNA
gagtccatcacctgggtga

SEQ ID NO: 14581 - RNA, 19 nt, Homo sapiens
  source 1..19: mol_type = genomic RNA
agtccatcacctgggtgat

SEQ ID NO: 14582 - RNA, 19 nt, Homo sapiens
  source 1..19: mol_type = genomic RNA
ctgggtgatcagtgcagaa

SEQ ID NO: 14583 - RNA, 19 nt, Homo sapiens
  source 1..19: mol_type = genomic RNA
tgggtgatcagtgcagaaa

SEQ ID NO: 14584 - RNA, 19 nt, Homo sapiens
  source 1..19: mol_type = genomic RNA
gggtgatcagtgcagaaat

SEQ ID NO: 14585 - RNA, 19 nt, Homo sapiens
  source 1..19: mol_type = genomic RNA
ggtgatcagtgcagaaata

SEQ ID NO: 14586 - RNA, 19 nt, Homo sapiens
  source 1..19: mol_type = genomic RNA
gtgatcagtgcagaaatat

SEQ ID NO: 14587 - RNA, 19 nt, Homo sapiens
  source 1..19: mol_type = genomic RNA
tgatcagtgcagaaatatg

SEQ ID NO: 14588 - RNA, 19 nt, Homo sapiens
  source 1..19: mol_type = genomic RNA
gatcagtgcagaaatatgc

SEQ ID NO: 14589 - RNA, 19 nt, Homo sapiens
  source 1..19: mol_type = genomic RNA
atcagtgcagaaatatgcc

SEQ ID NO: 14590 - RNA, 19 nt, Homo sapiens
  source 1..19: mol_type = genomic RNA
tcagtgcagaaatatgcca

SEQ ID NO: 14591 - RNA, 19 nt, Homo sapiens
  source 1..19: mol_type = genomic RNA
cagtgcagaaatatgccac

SEQ ID NO: 14592 - RNA, 19 nt, Homo sapiens
  source 1..19: mol_type = genomic RNA
agtgcagaaatatgccaca

SEQ ID NO: 14593 - RNA, 19 nt, Homo sapiens
  source 1..19: mol_type = genomic RNA
gtgcagaaatatgccacaa

SEQ ID NO: 14594 - RNA, 19 nt, Homo sapiens
  source 1..19: mol_type = genomic RNA
tgcagaaatatgccacaat

SEQ ID NO: 14595 - RNA, 19 nt, Homo sapiens
  source 1..19: mol_type = genomic RNA
gcagaaatatgccacaatg

SEQ ID NO: 14596 - RNA, 19 nt, Homo sapiens
  source 1..19: mol_type = genomic RNA
cagaaatatgccacaatgc

SEQ ID NO: 14597 - RNA, 19 nt, Homo sapiens
  source 1..19: mol_type = genomic RNA
agaaatatgccacaatgcc

SEQ ID NO: 14598 - RNA, 19 nt, Homo sapiens
  source 1..19: mol_type = genomic RNA
gaaatatgccacaatgccg

SEQ ID NO: 14599 - RNA, 19 nt, Homo sapiens
  source 1..19: mol_type = genomic RNA
aaatatgccacaatgccgc

SEQ ID NO: 14600 - RNA, 19 nt, Homo sapiens
  source 1..19: mol_type = genomic RNA
aatatgccacaatgccgcc

SEQ ID NO: 14601 - RNA, 19 nt, Homo sapiens
  source 1..19: mol_type = genomic RNA
atatgccacaatgccgcca

SEQ ID NO: 14602 - RNA, 19 nt, Homo sapiens
  source 1..19: mol_type = genomic RNA
tatgccacaatgccgccag

SEQ ID NO: 14603 - RNA, 19 nt, Homo sapiens
  source 1..19: mol_type = genomic RNA
atgccacaatgccgccagt

SEQ ID NO: 14604 - RNA, 19 nt, Homo sapiens
  source 1..19: mol_type = genomic RNA
tgccacaatgccgccagta

SEQ ID NO: 14605 - RNA, 19 nt, Homo sapiens
  source 1..19: mol_type = genomic RNA
gccacaatgccgccagtag

SEQ ID NO: 14606 - RNA, 19 nt, Homo sapiens
  source 1..19: mol_type = genomic RNA
ccacaatgccgccagtagg

SEQ ID NO: 14607 - RNA, 19 nt, Homo sapiens
  source 1..19: mol_type = genomic RNA
cacaatgccgccagtaggc

SEQ ID NO: 14608 - RNA, 19 nt, Homo sapiens
  source 1..19: mol_type = genomic RNA
acaatgccgccagtaggca

SEQ ID NO: 14609 - RNA, 19 nt, Homo sapiens
  source 1..19: mol_type = genomic RNA
caatgccgccagtaggcag

SEQ ID NO: 14610 - RNA, 19 nt, Homo sapiens
  source 1..19: mol_type = genomic RNA
aatgccgccagtaggcaga

SEQ ID NO: 14611 - RNA, 19 nt, Homo sapiens
  source 1..19: mol_type = genomic RNA
atgccgccagtaggcagat

SEQ ID NO: 14612 - RNA, 19 nt, Homo sapiens
  source 1..19: mol_type = genomic RNA
tgccgccagtaggcagata

SEQ ID NO: 14613 - RNA, 19 nt, Homo sapiens
  source 1..19: mol_type = genomic RNA
gccgccagtaggcagatat

SEQ ID NO: 14614 - RNA, 19 nt, Homo sapiens
  source 1..19: mol_type = genomic RNA
ccgccagtaggcagatata

SEQ ID NO: 14615 - RNA, 19 nt, Homo sapiens
  source 1..19: mol_type = genomic RNA
cgccagtaggcagatatag

SEQ ID NO: 14616 - RNA, 19 nt, Homo sapiens
  source 1..19: mol_type = genomic RNA
gccagtaggcagatataga

SEQ ID NO: 14617 - RNA, 19 nt, Homo sapiens
  source 1..19: mol_type = genomic RNA
ccagtaggcagatatagac

SEQ ID NO: 14618 - RNA, 19 nt, Homo sapiens
  source 1..19: mol_type = genomic RNA
cagtaggcagatatagaca

SEQ ID NO: 14619 - RNA, 19 nt, Homo sapiens
  source 1..19: mol_type = genomic RNA
agtaggcagatatagacaa

SEQ ID NO: 14620 - RNA, 19 nt, Homo sapiens
  source 1..19: mol_type = genomic RNA
gtaggcagatatagacaag

SEQ ID NO: 14621 - RNA, 19 nt, Homo sapiens
  source 1..19: mol_type = genomic RNA
taggcagatatagacaaga

SEQ ID NO: 14622 - RNA, 19 nt, Homo sapiens
  source 1..19: mol_type = genomic RNA
aggcagatatagacaagag

SEQ ID NO: 14623 - RNA, 19 nt, Homo sapiens
  source 1..19: mol_type = genomic RNA
ggcagatatagacaagagt

SEQ ID NO: 14624 - RNA, 19 nt, Homo sapiens
  source 1..19: mol_type = genomic RNA
gcagatatagacaagagtt

SEQ ID NO: 14625 - RNA, 19 nt, Homo sapiens
  source 1..19: mol_type = genomic RNA
agatatagacaagagttac

SEQ ID NO: 14626 - RNA, 19 nt, Homo sapiens
  source 1..19: mol_type = genomic RNA
gatatagacaagagttaca

SEQ ID NO: 14627 - RNA, 19 nt, Homo sapiens
  source 1..19: mol_type = genomic RNA
tatagacaagagttacatc

SEQ ID NO: 14628 - RNA, 19 nt, Homo sapiens
  source 1..19: mol_type = genomic RNA
atagacaagagttacatca

SEQ ID NO: 14629 - RNA, 19 nt, Homo sapiens
  source 1..19: mol_type = genomic RNA
caagagttacatcacctgc

SEQ ID NO: 14630 - RNA, 19 nt, Homo sapiens
  source 1..19: mol_type = genomic RNA
aagagttacatcacctgcg

SEQ ID NO: 14631 - RNA, 19 nt, Homo sapiens
  source 1..19: mol_type = genomic RNA
agagttacatcacctgcgt

SEQ ID NO: 14632 - RNA, 19 nt, Homo sapiens
  source 1..19: mol_type = genomic RNA
gagttacatcacctgcgtg

SEQ ID NO: 14633 - RNA, 19 nt, Homo sapiens
  source 1..19: mol_type = genomic RNA
agttacatcacctgcgtga

SEQ ID NO: 14634 - RNA, 19 nt, Homo sapiens
  source 1..19: mol_type = genomic RNA
gttacatcacctgcgtgat

SEQ ID NO: 14635 - RNA, 19 nt, Homo sapiens
  source 1..19: mol_type = genomic RNA
ttacatcacctgcgtgatc

SEQ ID NO: 14636 - RNA, 19 nt, Homo sapiens
  source 1..19: mol_type = genomic RNA
tacatcacctgcgtgatca

SEQ ID NO: 14637 - RNA, 19 nt, Homo sapiens
  source 1..19: mol_type = genomic RNA
acatcacctgcgtgatcac

SEQ ID NO: 14638 - RNA, 19 nt, Homo sapiens
  source 1..19: mol_type = genomic RNA
catcacctgcgtgatcact

SEQ ID NO: 14639 - RNA, 19 nt, Homo sapiens
  source 1..19: mol_type = genomic RNA
atcacctgcgtgatcactg

SEQ ID NO: 14640 - RNA, 19 nt, Homo sapiens
  source 1..19: mol_type = genomic RNA
tcacctgcgtgatcactgc

SEQ ID NO: 14641 - RNA, 19 nt, Homo sapiens
  source 1..19: mol_type = genomic RNA
cacctgcgtgatcactgca

SEQ ID NO: 14642 - RNA, 19 nt, Homo sapiens
  source 1..19: mol_type = genomic RNA
acctgcgtgatcactgcag

SEQ ID NO: 14643 - RNA, 19 nt, Homo sapiens
  source 1..19: mol_type = genomic RNA
cctgcgtgatcactgcaga

SEQ ID NO: 14644 - RNA, 19 nt, Homo sapiens
  source 1..19: mol_type = genomic RNA
ctgcgtgatcactgcagag

SEQ ID NO: 14645 - RNA, 19 nt, Homo sapiens
  source 1..19: mol_type = genomic RNA
tgcgtgatcactgcagaga

SEQ ID NO: 14646 - RNA, 19 nt, Homo sapiens
  source 1..19: mol_type = genomic RNA
gcgtgatcactgcagagat

SEQ ID NO: 14647 - RNA, 19 nt, Homo sapiens
  source 1..19: mol_type = genomic RNA
cgtgatcactgcagagata

SEQ ID NO: 14648 - RNA, 19 nt, Homo sapiens
  source 1..19: mol_type = genomic RNA
gtgatcactgcagagatat

SEQ ID NO: 14649 - RNA, 19 nt, Homo sapiens
  source 1..19: mol_type = genomic RNA
tgatcactgcagagatata

SEQ ID NO: 14650 - RNA, 19 nt, Homo sapiens
  source 1..19: mol_type = genomic RNA
gatcactgcagagatatat

SEQ ID NO: 14651 - RNA, 19 nt, Homo sapiens
  source 1..19: mol_type = genomic RNA
atcactgcagagatatatc

SEQ ID NO: 14652 - RNA, 19 nt, Homo sapiens
  source 1..19: mol_type = genomic RNA
tcactgcagagatatatca

SEQ ID NO: 14653 - RNA, 19 nt, Homo sapiens
  source 1..19: mol_type = genomic RNA
cactgcagagatatatcac

SEQ ID NO: 14654 - RNA, 19 nt, Homo sapiens
  source 1..19: mol_type = genomic RNA
actgcagagatatatcaca

SEQ ID NO: 14655 - RNA, 19 nt, Homo sapiens
  source 1..19: mol_type = genomic RNA
ctgcagagatatatcacaa

SEQ ID NO: 14656 - RNA, 19 nt, Homo sapiens
  source 1..19: mol_type = genomic RNA
tgcagagatatatcacaat

SEQ ID NO: 14657 - RNA, 19 nt, Homo sapiens
  source 1..19: mol_type = genomic RNA
gcagagatatatcacaatg

SEQ ID NO: 14658 - RNA, 19 nt, Homo sapiens
  source 1..19: mol_type = genomic RNA
cagagatatatcacaatgc

SEQ ID NO: 14659 - RNA, 19 nt, Homo sapiens
  source 1..19: mol_type = genomic RNA
agagatatatcacaatgcc

SEQ ID NO: 14660 - RNA, 19 nt, Homo sapiens
  source 1..19: mol_type = genomic RNA
gagatatatcacaatgccc

SEQ ID NO: 14661 - RNA, 19 nt, Homo sapiens
  source 1..19: mol_type = genomic RNA
agatatatcacaatgcccc

SEQ ID NO: 14662 - RNA, 19 nt, Homo sapiens
  source 1..19: mol_type = genomic RNA
gatatatcacaatgcccct

SEQ ID NO: 14663 - RNA, 19 nt, Homo sapiens
  source 1..19: mol_type = genomic RNA
atatatcacaatgcccctg

SEQ ID NO: 14664 - RNA, 19 nt, Homo sapiens
  source 1..19: mol_type = genomic RNA
tatatcacaatgcccctgt

SEQ ID NO: 14665 - RNA, 19 nt, Homo sapiens
  source 1..19: mol_type = genomic RNA
atatcacaatgcccctgta

SEQ ID NO: 14666 - RNA, 19 nt, Homo sapiens
  source 1..19: mol_type = genomic RNA
tatcacaatgcccctgtag

SEQ ID NO: 14667 - RNA, 19 nt, Homo sapiens
  source 1..19: mol_type = genomic RNA
atcacaatgcccctgtagg

SEQ ID NO: 14668 - RNA, 19 nt, Homo sapiens
  source 1..19: mol_type = genomic RNA
cagagcctagacaagagtc

SEQ ID NO: 14669 - RNA, 19 nt, Homo sapiens
  source 1..19: mol_type = genomic RNA
agagcctagacaagagtcc

SEQ ID NO: 14670 - RNA, 19 nt, Homo sapiens
  source 1..19: mol_type = genomic RNA
gagcctagacaagagtccc

SEQ ID NO: 14671 - RNA, 19 nt, Homo sapiens
  source 1..19: mol_type = genomic RNA
agcctagacaagagtccca

SEQ ID NO: 14672 - RNA, 19 nt, Homo sapiens
  source 1..19: mol_type = genomic RNA
gcctagacaagagtcccat

SEQ ID NO: 14673 - RNA, 19 nt, Homo sapiens
  source 1..19: mol_type = genomic RNA
cctagacaagagtcccatc

SEQ ID NO: 14674 - RNA, 19 nt, Homo sapiens
  source 1..19: mol_type = genomic RNA
ctagacaagagtcccatca

SEQ ID NO: 14675 - RNA, 19 nt, Homo sapiens
  source 1..19: mol_type = genomic RNA
tagacaagagtcccatcac

SEQ ID NO: 14676 - RNA, 19 nt, Homo sapiens
  source 1..19: mol_type = genomic RNA
agacaagagtcccatcacc

SEQ ID NO: 14677 - RNA, 19 nt, Homo sapiens
  source 1..19: mol_type = genomic RNA
gacaagagtcccatcacct

SEQ ID NO: 14678 - RNA, 19 nt, Homo sapiens
  source 1..19: mol_type = genomic RNA
acaagagtcccatcacctg

SEQ ID NO: 14679 - RNA, 19 nt, Homo sapiens
  source 1..19: mol_type = genomic RNA
caagagtcccatcacctgg

SEQ ID NO: 14680 - RNA, 19 nt, Homo sapiens
  source 1..19: mol_type = genomic RNA
tgggtgatcagtgcagagt

SEQ ID NO: 14681 - RNA, 19 nt, Homo sapiens
  source 1..19: mol_type = genomic RNA
gggtgatcagtgcagagtt

SEQ ID NO: 14682 - RNA, 19 nt, Homo sapiens
  source 1..19: mol_type = genomic RNA
ggtgatcagtgcagagtta

SEQ ID NO: 14683 - RNA, 19 nt, Homo sapiens
  source 1..19: mol_type = genomic RNA
gtgatcagtgcagagttat

SEQ ID NO: 14684 - RNA, 19 nt, Homo sapiens
  source 1..19: mol_type = genomic RNA
tgatcagtgcagagttatg

SEQ ID NO: 14685 - RNA, 19 nt, Homo sapiens
  source 1..19: mol_type = genomic RNA
gatcagtgcagagttatgt

SEQ ID NO: 14686 - RNA, 19 nt, Homo sapiens
  source 1..19: mol_type = genomic RNA
atcagtgcagagttatgtc

SEQ ID NO: 14687 - RNA, 19 nt, Homo sapiens
  source 1..19: mol_type = genomic RNA
tcagtgcagagttatgtca

SEQ ID NO: 14688 - RNA, 19 nt, Homo sapiens
  source 1..19: mol_type = genomic RNA
cagtgcagagttatgtcac

SEQ ID NO: 14689 - RNA, 19 nt, Homo sapiens
  source 1..19: mol_type = genomic RNA
agtgcagagttatgtcaca

SEQ ID NO: 14690 - RNA, 19 nt, Homo sapiens
  source 1..19: mol_type = genomic RNA
gtgcagagttatgtcacaa

SEQ ID NO: 14691 - RNA, 19 nt, Homo sapiens
  source 1..19: mol_type = genomic RNA
tgcagagttatgtcacaat

SEQ ID NO: 14692 - RNA, 19 nt, Homo sapiens
  source 1..19: mol_type = genomic RNA
gcagagttatgtcacaatg

SEQ ID NO: 14693 - RNA, 19 nt, Homo sapiens
  source 1..19: mol_type = genomic RNA
cagagttatgtcacaatgc

SEQ ID NO: 14694 - RNA, 19 nt, Homo sapiens
  source 1..19: mol_type = genomic RNA
agagttatgtcacaatgcc

SEQ ID NO: 14695 - RNA, 19 nt, Homo sapiens
  source 1..19: mol_type = genomic RNA
gagttatgtcacaatgccc

SEQ ID NO: 14696 - RNA, 19 nt, Homo sapiens
  source 1..19: mol_type = genomic RNA
agttatgtcacaatgcccc

SEQ ID NO: 14697 - RNA, 19 nt, Homo sapiens
  source 1..19: mol_type = genomic RNA
gttatgtcacaatgccccc

SEQ ID NO: 14698 - RNA, 19 nt, Homo sapiens
  source 1..19: mol_type = genomic RNA
ttatgtcacaatgccccct

SEQ ID NO: 14699 - RNA, 19 nt, Homo sapiens
  source 1..19: mol_type = genomic RNA
tatgtcacaatgccccctt

SEQ ID NO: 14700 - RNA, 19 nt, Homo sapiens
  source 1..19: mol_type = genomic RNA
atgtcacaatgcccccttt

SEQ ID NO: 14701 - RNA, 19 nt, Homo sapiens
  source 1..19: mol_type = genomic RNA
tgtcacaatgccccctttt

SEQ ID NO: 14702 - RNA, 19 nt, Homo sapiens
  source 1..19: mol_type = genomic RNA
gtcacaatgcccccttttg

SEQ ID NO: 14703 - RNA, 19 nt, Homo sapiens
  source 1..19: mol_type = genomic RNA
tcacaatgcccccttttgg

SEQ ID NO: 14704 - RNA, 19 nt, Homo sapiens
  source 1..19: mol_type = genomic RNA
cacaatgcccccttttggc

SEQ ID NO: 14705 - RNA, 19 nt, Homo sapiens
  source 1..19: mol_type = genomic RNA
acaatgcccccttttggca

SEQ ID NO: 14706 - RNA, 19 nt, Homo sapiens
  source 1..19: mol_type = genomic RNA
caatgcccccttttggcag

SEQ ID NO: 14707 - RNA, 19 nt, Homo sapiens
  source 1..19: mol_type = genomic RNA
aatgcccccttttggcaga

SEQ ID NO: 14708 - RNA, 19 nt, Homo sapiens
  source 1..19: mol_type = genomic RNA
atgcccccttttggcagag

SEQ ID NO: 14709 - RNA, 19 nt, Homo sapiens
  source 1..19: mol_type = genomic RNA
tgcccccttttggcagagc

SEQ ID NO: 14710 - RNA, 19 nt, Homo sapiens
  source 1..19: mol_type = genomic RNA
gcccccttttggcagagcc

SEQ ID NO: 14711 - RNA, 19 nt, Homo sapiens
  source 1..19: mol_type = genomic RNA
cccccttttggcagagcct

SEQ ID NO: 14712 - RNA, 19 nt, Homo sapiens
  source 1..19: mol_type = genomic RNA
ccccttttggcagagccta

SEQ ID NO: 14713 - RNA, 19 nt, Homo sapiens
  source 1..19: mol_type = genomic RNA
cccttttggcagagcctag

SEQ ID NO: 14714 - RNA, 19 nt, Homo sapiens
  source 1..19: mol_type = genomic RNA
ccttttggcagagcctaga

SEQ ID NO: 14715 - RNA, 19 nt, Homo sapiens
  source 1..19: mol_type = genomic RNA
cttttggcagagcctagac

SEQ ID NO: 14716 - RNA, 19 nt, Homo sapiens
  source 1..19: mol_type = genomic RNA
ttttggcagagcctagaca

SEQ ID NO: 14717 - RNA, 19 nt, Homo sapiens
  source 1..19: mol_type = genomic RNA
tttggcagagcctagacaa

SEQ ID NO: 14718 - RNA, 19 nt, Homo sapiens
  source 1..19: mol_type = genomic RNA
ttggcagagcctagacaag

SEQ ID NO: 14719 - RNA, 19 nt, Homo sapiens
  source 1..19: mol_type = genomic RNA
cagagcctagacaagggtt

SEQ ID NO: 14720 - RNA, 19 nt, Homo sapiens
  source 1..19: mol_type = genomic RNA
agagcctagacaagggtta

SEQ ID NO: 14721 - RNA, 19 nt, Homo sapiens
  source 1..19: mol_type = genomic RNA
gagcctagacaagggttac

SEQ ID NO: 14722 - RNA, 19 nt, Homo sapiens
  source 1..19: mol_type = genomic RNA
agcctagacaagggttaca

SEQ ID NO: 14723 - RNA, 19 nt, Homo sapiens
  source 1..19: mol_type = genomic RNA
gcctagacaagggttacat

SEQ ID NO: 14724 - RNA, 19 nt, Homo sapiens
  source 1..19: mol_type = genomic RNA
cctagacaagggttacatc

SEQ ID NO: 14725 - RNA, 19 nt, Homo sapiens
  source 1..19: mol_type = genomic RNA
ctagacaagggttacatca

SEQ ID NO: 14726 - RNA, 19 nt, Homo sapiens
  source 1..19: mol_type = genomic RNA
tagacaagggttacatcac

SEQ ID NO: 14727 - RNA, 19 nt, Homo sapiens
  source 1..19: mol_type = genomic RNA
agacaagggttacatcacc

SEQ ID NO: 14728 - RNA, 19 nt, Homo sapiens
  source 1..19: mol_type = genomic RNA
caagggttacatcacctgg

SEQ ID NO: 14729 - RNA, 19 nt, Homo sapiens
  source 1..19: mol_type = genomic RNA
aagggttacatcacctggg

SEQ ID NO: 14730 - RNA, 19 nt, Homo sapiens
  source 1..19: mol_type = genomic RNA
agggttacatcacctgggt

SEQ ID NO: 14731 - RNA, 19 nt, Homo sapiens
  source 1..19: mol_type = genomic RNA
gggttacatcacctgggtg

SEQ ID NO: 14732 - RNA, 19 nt, Homo sapiens
  source 1..19: mol_type = genomic RNA
ggttacatcacctgggtga

SEQ ID NO: 14733 - RNA, 19 nt, Homo sapiens
  source 1..19: mol_type = genomic RNA
gcagagatatgtcacaatg

SEQ ID NO: 14734 - RNA, 19 nt, Homo sapiens
  source 1..19: mol_type = genomic RNA
cagagatatgtcacaatgt

SEQ ID NO: 14735 - RNA, 19 nt, Homo sapiens
  source 1..19: mol_type = genomic RNA
agagatatgtcacaatgtc

SEQ ID NO: 14736 - RNA, 19 nt, Homo sapiens
  source 1..19: mol_type = genomic RNA
gagatatgtcacaatgtcc

SEQ ID NO: 14737 - RNA, 19 nt, Homo sapiens
  source 1..19: mol_type = genomic RNA
agatatgtcacaatgtccc

SEQ ID NO: 14738 - RNA, 19 nt, Homo sapiens
  source 1..19: mol_type = genomic RNA
gatatgtcacaatgtccct

SEQ ID NO: 14739 - RNA, 19 nt, Homo sapiens
  source 1..19: mol_type = genomic RNA
atatgtcacaatgtccctg

SEQ ID NO: 14740 - RNA, 19 nt, Homo sapiens
  source 1..19: mol_type = genomic RNA
tatgtcacaatgtccctgt

SEQ ID NO: 14741 - RNA, 19 nt, Homo sapiens
  source 1..19: mol_type = genomic RNA
atgtcacaatgtccctgta

SEQ ID NO: 14742 - RNA, 19 nt, Homo sapiens
  source 1..19: mol_type = genomic RNA
tgtcacaatgtccctgtag

SEQ ID NO: 14743 - RNA, 19 nt, Homo sapiens
  source 1..19: mol_type = genomic RNA
gtcacaatgtccctgtagc

SEQ ID NO: 14744 - RNA, 19 nt, Homo sapiens
  source 1..19: mol_type = genomic RNA
tcacaatgtccctgtagcc

SEQ ID NO: 14745 - RNA, 19 nt, Homo sapiens
  source 1..19: mol_type = genomic RNA
cacaatgtccctgtagcca

SEQ ID NO: 14746 - RNA, 19 nt, Homo sapiens
  source 1..19: mol_type = genomic RNA
acaatgtccctgtagccat

SEQ ID NO: 14747 - RNA, 19 nt, Homo sapiens
  source 1..19: mol_type = genomic RNA
caatgtccctgtagccata

SEQ ID NO: 14748 - RNA, 19 nt, Homo sapiens
  source 1..19: mol_type = genomic RNA
aatgtccctgtagccatat

SEQ ID NO: 14749 - RNA, 19 nt, Homo sapiens
  source 1..19: mol_type = genomic RNA
atgtccctgtagccatatc

SEQ ID NO: 14750 - RNA, 19 nt, Homo sapiens
  source 1..19: mol_type = genomic RNA
tgtccctgtagccatatcc

SEQ ID NO: 14751 - RNA, 19 nt, Homo sapiens
  source 1..19: mol_type = genomic RNA
gtccctgtagccatatcct

SEQ ID NO: 14752 - RNA, 19 nt, Homo sapiens
  source 1..19: mol_type = genomic RNA
tccctgtagccatatcctt

SEQ ID NO: 14753 - RNA, 19 nt, Homo sapiens
  source 1..19: mol_type = genomic RNA
ccctgtagccatatccttg

SEQ ID NO: 14754 - RNA, 19 nt, Homo sapiens
  source 1..19: mol_type = genomic RNA
cctgtagccatatccttga

SEQ ID NO: 14755 - RNA, 19 nt, Homo sapiens
  source 1..19: mol_type = genomic RNA
ctgtagccatatccttgac

SEQ ID NO: 14756 - RNA, 19 nt, Homo sapiens
  source 1..19: mol_type = genomic RNA
tgtagccatatccttgaca

SEQ ID NO: 14757 - RNA, 19 nt, Homo sapiens
  source 1..19: mol_type = genomic RNA
gtagccatatccttgacaa

SEQ ID NO: 14758 - RNA, 19 nt, Homo sapiens
  source 1..19: mol_type = genomic RNA
tagccatatccttgacaaa

SEQ ID NO: 14759 - RNA, 19 nt, Homo sapiens
  source 1..19: mol_type = genomic RNA
agccatatccttgacaaaa

SEQ ID NO: 14760 - RNA, 19 nt, Homo sapiens
  source 1..19: mol_type = genomic RNA
gccatatccttgacaaaag

SEQ ID NO: 14761 - RNA, 19 nt, Homo sapiens
  source 1..19: mol_type = genomic RNA
ccatatccttgacaaaagt

SEQ ID NO: 14762 - RNA, 19 nt, Homo sapiens
  source 1..19: mol_type = genomic RNA
atatccttgacaaaagtga

SEQ ID NO: 14763 - RNA, 19 nt, Homo sapiens
  source 1..19: mol_type = genomic RNA
tatccttgacaaaagtgac

SEQ ID NO: 14764 - RNA, 19 nt, Homo sapiens
  source 1..19: mol_type = genomic RNA
atccttgacaaaagtgaca

SEQ ID NO: 14765 - RNA, 19 nt, Homo sapiens
  source 1..19: mol_type = genomic RNA
tccttgacaaaagtgacat

SEQ ID NO: 14766 - RNA, 19 nt, Homo sapiens
  source 1..19: mol_type = genomic RNA
ccttgacaaaagtgacatc

SEQ ID NO: 14767 - RNA, 19 nt, Homo sapiens
  source 1..19: mol_type = genomic RNA
cttgacaaaagtgacatca

SEQ ID NO: 14768 - RNA, 19 nt, Homo sapiens
  source 1..19: mol_type = genomic RNA
ttgacaaaagtgacatcac

SEQ ID NO: 14769 - RNA, 19 nt, Homo sapiens
  source 1..19: mol_type = genomic RNA
tgacaaaagtgacatcacc

SEQ ID NO: 14770 - RNA, 19 nt, Homo sapiens
  source 1..19: mol_type = genomic RNA
gacaaaagtgacatcacct

SEQ ID NO: 14771 - RNA, 19 nt, Homo sapiens
  source 1..19: mol_type = genomic RNA
acaaaagtgacatcacctg

SEQ ID NO: 14772 - RNA, 19 nt, Homo sapiens
  source 1..19: mol_type = genomic RNA
caaaagtgacatcacctgg

SEQ ID NO: 14773 - RNA, 19 nt, Homo sapiens
  source 1..19: mol_type = genomic RNA
aaaagtgacatcacctggg

SEQ ID NO: 14774 - RNA, 19 nt, Homo sapiens
  source 1..19: mol_type = genomic RNA
aaagtgacatcacctgggt

SEQ ID NO: 14775 - RNA, 19 nt, Homo sapiens
  source 1..19: mol_type = genomic RNA
aagtgacatcacctgggtg

SEQ ID NO: 14776 - RNA, 19 nt, Homo sapiens
  source 1..19: mol_type = genomic RNA
agtgacatcacctgggtga

SEQ ID NO: 14777 - RNA, 19 nt, Homo sapiens
  source 1..19: mol_type = genomic RNA
gtgacatcacctgggtgat

SEQ ID NO: 14778 - RNA, 19 nt, Homo sapiens
  source 1..19: mol_type = genomic RNA
tgacatcacctgggtgatc

SEQ ID NO: 14779 - RNA, 19 nt, Homo sapiens
  source 1..19: mol_type = genomic RNA
gacatcacctgggtgatca

SEQ ID NO: 14780 - RNA, 19 nt, Homo sapiens
  source 1..19: mol_type = genomic RNA
tcacctgggtgatcagtgt

SEQ ID NO: 14781 - RNA, 19 nt, Homo sapiens
  source 1..19: mol_type = genomic RNA
cacctgggtgatcagtgtg

SEQ ID NO: 14782 - RNA, 19 nt, Homo sapiens
  source 1..19: mol_type = genomic RNA
acctgggtgatcagtgtgg

SEQ ID NO: 14783 - RNA, 19 nt, Homo sapiens
  source 1..19: mol_type = genomic RNA
cctgggtgatcagtgtgga

SEQ ID NO: 14784 - RNA, 19 nt, Homo sapiens
  source 1..19: mol_type = genomic RNA
ctgggtgatcagtgtggag

SEQ ID NO: 14785 - RNA, 19 nt, Homo sapiens
  source 1..19: mol_type = genomic RNA
tgggtgatcagtgtggaga

SEQ ID NO: 14786 - RNA, 19 nt, Homo sapiens
  source 1..19: mol_type = genomic RNA
gggtgatcagtgtggagat

SEQ ID NO: 14787 - RNA, 19 nt, Homo sapiens
  source 1..19: mol_type = genomic RNA
ggtgatcagtgtggagata

SEQ ID NO: 14788 - RNA, 19 nt, Homo sapiens
  source 1..19: mol_type = genomic RNA
gtgatcagtgtggagatat

SEQ ID NO: 14789 - RNA, 19 nt, Homo sapiens
  source 1..19: mol_type = genomic RNA
tgatcagtgtggagatatg

SEQ ID NO: 14790 - RNA, 19 nt, Homo sapiens
  source 1..19: mol_type = genomic RNA
gatcagtgtggagatatgt

SEQ ID NO: 14791 - RNA, 19 nt, Homo sapiens
  source 1..19: mol_type = genomic RNA
atcagtgtggagatatgtc

SEQ ID NO: 14792 - RNA, 19 nt, Homo sapiens
  source 1..19: mol_type = genomic RNA
tcagtgtggagatatgtca

SEQ ID NO: 14793 - RNA, 19 nt, Homo sapiens
  source 1..19: mol_type = genomic RNA
cagtgtggagatatgtcac

SEQ ID NO: 14794 - RNA, 19 nt, Homo sapiens
  source 1..19: mol_type = genomic RNA
agtgtggagatatgtcaca

SEQ ID NO: 14795 - RNA, 19 nt, Homo sapiens
  source 1..19: mol_type = genomic RNA
gtgtggagatatgtcacaa

SEQ ID NO: 14796 - RNA, 19 nt, Homo sapiens
  source 1..19: mol_type = genomic RNA
tgtggagatatgtcacaat

SEQ ID NO: 14797 - RNA, 19 nt, Homo sapiens
  source 1..19: mol_type = genomic RNA
gtggagatatgtcacaatg

SEQ ID NO: 14798 - RNA, 19 nt, Homo sapiens
  source 1..19: mol_type = genomic RNA
tggagatatgtcacaatgt

SEQ ID NO: 14799 - RNA, 19 nt, Homo sapiens
  source 1..19: mol_type = genomic RNA
ggagatatgtcacaatgtc

SEQ ID NO: 14800 - RNA, 19 nt, Homo sapiens
  source 1..19: mol_type = genomic RNA
gagatatgtcacaatgtct

SEQ ID NO: 14801 - RNA, 19 nt, Homo sapiens
  source 1..19: mol_type = genomic RNA
agatatgtcacaatgtctc

SEQ ID NO: 14802 - RNA, 19 nt, Homo sapiens
  source 1..19: mol_type = genomic RNA
gatatgtcacaatgtctcc

SEQ ID NO: 14803 - RNA, 19 nt, Homo sapiens
  source 1..19: mol_type = genomic RNA
atatgtcacaatgtctcca

SEQ ID NO: 14804 - RNA, 19 nt, Homo sapiens
  source 1..19: mol_type = genomic RNA
tatgtcacaatgtctccag

SEQ ID NO: 14805 - RNA, 19 nt, Homo sapiens
  source 1..19: mol_type = genomic RNA
atgtcacaatgtctccagt

SEQ ID NO: 14806 - RNA, 19 nt, Homo sapiens
  source 1..19: mol_type = genomic RNA
tgtcacaatgtctccagta

SEQ ID NO: 14807 - RNA, 19 nt, Homo sapiens
  source 1..19: mol_type = genomic RNA
gtcacaatgtctccagtag

SEQ ID NO: 14808 - RNA, 19 nt, Homo sapiens
  source 1..19: mol_type = genomic RNA
tcacaatgtctccagtagg

SEQ ID NO: 14809 - RNA, 19 nt, Homo sapiens
  source 1..19: mol_type = genomic RNA
cacaatgtctccagtaggc

SEQ ID NO: 14810 - RNA, 19 nt, Homo sapiens
  source 1..19: mol_type = genomic RNA
acaatgtctccagtaggca

SEQ ID NO: 14811 - RNA, 19 nt, Homo sapiens
  source 1..19: mol_type = genomic RNA
caatgtctccagtaggcag

SEQ ID NO: 14812 - RNA, 19 nt, Homo sapiens
  source 1..19: mol_type = genomic RNA
aatgtctccagtaggcaga

SEQ ID NO: 14813 - RNA, 19 nt, Homo sapiens
  source 1..19: mol_type = genomic RNA
atgtctccagtaggcagag

SEQ ID NO: 14814 - RNA, 19 nt, Homo sapiens
  source 1..19: mol_type = genomic RNA
tgtctccagtaggcagagc

SEQ ID NO: 14815 - RNA, 19 nt, Homo sapiens
  source 1..19: mol_type = genomic RNA
gtctccagtaggcagagcc

SEQ ID NO: 14816 - RNA, 19 nt, Homo sapiens
  source 1..19: mol_type = genomic RNA
tctccagtaggcagagcct

SEQ ID NO: 14817 - RNA, 19 nt, Homo sapiens
  source 1..19: mol_type = genomic RNA
ctccagtaggcagagccta

SEQ ID NO: 14818 - RNA, 19 nt, Homo sapiens
  source 1..19: mol_type = genomic RNA
tccagtaggcagagcctag

SEQ ID NO: 14819 - RNA, 19 nt, Homo sapiens
  source 1..19: mol_type = genomic RNA
ccagtaggcagagcctaga

SEQ ID NO: 14820 - RNA, 19 nt, Homo sapiens
  source 1..19: mol_type = genomic RNA
cagtaggcagagcctagac

SEQ ID NO: 14821 - RNA, 19 nt, Homo sapiens
  source 1..19: mol_type = genomic RNA
agtaggcagagcctagaca

SEQ ID NO: 14822 - RNA, 19 nt, Homo sapiens
  source 1..19: mol_type = genomic RNA
catcacctgggtgatcagg

SEQ ID NO: 14823 - RNA, 19 nt, Homo sapiens
  source 1..19: mol_type = genomic RNA
atcacctgggtgatcaggg

SEQ ID NO: 14824 - RNA, 19 nt, Homo sapiens
  source 1..19: mol_type = genomic RNA
ggtgatcagggcagagata

SEQ ID NO: 14825 - RNA, 19 nt, Homo sapiens
  source 1..19: mol_type = genomic RNA
gtgatcagggcagagatat

SEQ ID NO: 14826 - RNA, 19 nt, Homo sapiens
  source 1..19: mol_type = genomic RNA
tgatcagggcagagatatg

SEQ ID NO: 14827 - RNA, 19 nt, Homo sapiens
  source 1..19: mol_type = genomic RNA
gatcagggcagagatatgt

SEQ ID NO: 14828 - RNA, 19 nt, Homo sapiens
  source 1..19: mol_type = genomic RNA
atcagggcagagatatgtc

SEQ ID NO: 14829 - RNA, 19 nt, Homo sapiens
  source 1..19: mol_type = genomic RNA
tcagggcagagatatgtca

SEQ ID NO: 14830 - RNA, 19 nt, Homo sapiens
  source 1..19: mol_type = genomic RNA
cagggcagagatatgtcac

SEQ ID NO: 14831 - RNA, 19 nt, Homo sapiens
  source 1..19: mol_type = genomic RNA
agggcagagatatgtcaca

SEQ ID NO: 14832 - RNA, 19 nt, Homo sapiens
  source 1..19: mol_type = genomic RNA
gggcagagatatgtcacaa

SEQ ID NO: 14833 - RNA, 19 nt, Homo sapiens
  source 1..19: mol_type = genomic RNA
ggcagagatatgtcacaat

SEQ ID NO: 14834 - RNA, 19 nt, Homo sapiens
  source 1..19: mol_type = genomic RNA
cagagatatgtcacaatgc

SEQ ID NO: 14835 - RNA, 19 nt, Homo sapiens
  source 1..19: mol_type = genomic RNA
agagatatgtcacaatgcc

SEQ ID NO: 14836 - RNA, 19 nt, Homo sapiens
  source 1..19: mol_type = genomic RNA
gagatatgtcacaatgccc

SEQ ID NO: 14837 - RNA, 19 nt, Homo sapiens
  source 1..19: mol_type = genomic RNA
agatatgtcacaatgcccc

SEQ ID NO: 14838 - RNA, 19 nt, Homo sapiens
  source 1..19: mol_type = genomic RNA
gatatgtcacaatgccccc

SEQ ID NO: 14839 - RNA, 19 nt, Homo sapiens
  source 1..19: mol_type = genomic RNA
atatgtcacaatgccccct

SEQ ID NO: 14840 - RNA, 19 nt, Homo sapiens
  source 1..19: mol_type = genomic RNA
tatgtcacaatgccccctg

SEQ ID NO: 14841 - RNA, 19 nt, Homo sapiens
  source 1..19: mol_type = genomic RNA
atgtcacaatgccccctgt

SEQ ID NO: 14842 - RNA, 19 nt, Homo sapiens
  source 1..19: mol_type = genomic RNA
tgtcacaatgccccctgta

SEQ ID NO: 14843 - RNA, 19 nt, Homo sapiens
  source 1..19: mol_type = genomic RNA
gtcacaatgccccctgtaa

SEQ ID NO: 14844 - RNA, 19 nt, Homo sapiens
  source 1..19: mol_type = genomic RNA
tcacaatgccccctgtaag

SEQ ID NO: 14845 - RNA, 19 nt, Homo sapiens
  source 1..19: mol_type = genomic RNA
cacaatgccccctgtaagc

SEQ ID NO: 14846 - RNA, 19 nt, Homo sapiens
  source 1..19: mol_type = genomic RNA
acaatgccccctgtaagca

SEQ ID NO: 14847 - RNA, 19 nt, Homo sapiens
  source 1..19: mol_type = genomic RNA
caatgccccctgtaagcag

SEQ ID NO: 14848 - RNA, 19 nt, Homo sapiens
  source 1..19: mol_type = genomic RNA
aatgccccctgtaagcaga

SEQ ID NO: 14849 - RNA, 19 nt, Homo sapiens
  source 1..19: mol_type = genomic RNA
atgccccctgtaagcagat

SEQ ID NO: 14850 - RNA, 19 nt, Homo sapiens
  source 1..19: mol_type = genomic RNA
tgccccctgtaagcagatc

SEQ ID NO: 14851 - RNA, 19 nt, Homo sapiens
  source 1..19: mol_type = genomic RNA
gccccctgtaagcagatcc

SEQ ID NO: 14852 - RNA, 19 nt, Homo sapiens
  source 1..19: mol_type = genomic RNA
ccccctgtaagcagatccc

SEQ ID NO: 14853 - RNA, 19 nt, Homo sapiens
  source 1..19: mol_type = genomic RNA
cccctgtaagcagatccca

SEQ ID NO: 14854 - RNA, 19 nt, Homo sapiens
  source 1..19: mol_type = genomic RNA
ccctgtaagcagatcccag

SEQ ID NO: 14855 - RNA, 19 nt, Homo sapiens
  source 1..19: mol_type = genomic RNA
cctgtaagcagatcccaga

SEQ ID NO: 14856 - RNA, 19 nt, Homo sapiens
  source 1..19: mol_type = genomic RNA
ctgtaagcagatcccagac

SEQ ID NO: 14857 - RNA, 19 nt, Homo sapiens
  source 1..19: mol_type = genomic RNA
tgtaagcagatcccagaca

SEQ ID NO: 14858 - RNA, 19 nt, Homo sapiens
  source 1..19: mol_type = genomic RNA
gtaagcagatcccagacaa

SEQ ID NO: 14859 - RNA, 19 nt, Homo sapiens
  source 1..19: mol_type = genomic RNA
taagcagatcccagacaag

SEQ ID NO: 14860 - RNA, 19 nt, Homo sapiens
  source 1..19: mol_type = genomic RNA
aagcagatcccagacaaga

SEQ ID NO: 14861 - RNA, 19 nt, Homo sapiens
  source 1..19: mol_type = genomic RNA
agcagatcccagacaagag

SEQ ID NO: 14862 - RNA, 19 nt, Homo sapiens
  source 1..19: mol_type = genomic RNA
gcagatcccagacaagagt

SEQ ID NO: 14863 - RNA, 19 nt, Homo sapiens
  source 1..19: mol_type = genomic RNA
cagatcccagacaagagtt

SEQ ID NO: 14864 - RNA, 19 nt, Homo sapiens
  source 1..19: mol_type = genomic RNA
agatcccagacaagagttg

SEQ ID NO: 14865 - RNA, 19 nt, Homo sapiens
  source 1..19: mol_type = genomic RNA
gatcccagacaagagttgc

SEQ ID NO: 14866 - RNA, 19 nt, Homo sapiens
  source 1..19: mol_type = genomic RNA
atcccagacaagagttgca

SEQ ID NO: 14867 - RNA, 19 nt, Homo sapiens
  source 1..19: mol_type = genomic RNA
tcccagacaagagttgcat

SEQ ID NO: 14868 - RNA, 19 nt, Homo sapiens
  source 1..19: mol_type = genomic RNA
cccagacaagagttgcatc

SEQ ID NO: 14869 - RNA, 19 nt, Homo sapiens
  source 1..19: mol_type = genomic RNA
ccagacaagagttgcatca

SEQ ID NO: 14870 - RNA, 19 nt, Homo sapiens
  source 1..19: mol_type = genomic RNA
cagacaagagttgcatcac

SEQ ID NO: 14871 - RNA, 19 nt, Homo sapiens
  source 1..19: mol_type = genomic RNA
agacaagagttgcatcacc

SEQ ID NO: 14872 - RNA, 19 nt, Homo sapiens
  source 1..19: mol_type = genomic RNA
gacaagagttgcatcacct

SEQ ID NO: 14873 - RNA, 19 nt, Homo sapiens
  source 1..19: mol_type = genomic RNA
acaagagttgcatcacctc

SEQ ID NO: 14874 - RNA, 19 nt, Homo sapiens
  source 1..19: mol_type = genomic RNA
caagagttgcatcacctcg

SEQ ID NO: 14875 - RNA, 19 nt, Homo sapiens
  source 1..19: mol_type = genomic RNA
aagagttgcatcacctcgg

SEQ ID NO: 14876 - RNA, 19 nt, Homo sapiens
  source 1..19: mol_type = genomic RNA
agagttgcatcacctcggt

SEQ ID NO: 14877 - RNA, 19 nt, Homo sapiens
  source 1..19: mol_type = genomic RNA
gagttgcatcacctcggtg

SEQ ID NO: 14878 - RNA, 19 nt, Homo sapiens
  source 1..19: mol_type = genomic RNA
agttgcatcacctcggtga

SEQ ID NO: 14879 - RNA, 19 nt, Homo sapiens
  source 1..19: mol_type = genomic RNA
gttgcatcacctcggtgat

SEQ ID NO: 14880 - RNA, 19 nt, Homo sapiens
  source 1..19: mol_type = genomic RNA
ttgcatcacctcggtgatc

SEQ ID NO: 14881 - RNA, 19 nt, Homo sapiens
  source 1..19: mol_type = genomic RNA
tgcatcacctcggtgatca

SEQ ID NO: 14882 - RNA, 19 nt, Homo sapiens
  source 1..19: mol_type = genomic RNA
gcatcacctcggtgatcag

SEQ ID NO: 14883 - RNA, 19 nt, Homo sapiens
  source 1..19: mol_type = genomic RNA
catcacctcggtgatcagt

SEQ ID NO: 14884 - RNA, 19 nt, Homo sapiens
  source 1..19: mol_type = genomic RNA
atcacctcggtgatcagtg

SEQ ID NO: 14885 - RNA, 19 nt, Homo sapiens
  source 1..19: mol_type = genomic RNA
tcacctcggtgatcagtgc

SEQ ID NO: 14886 - RNA, 19 nt, Homo sapiens
  source 1..19: mol_type = genomic RNA
cacctcggtgatcagtgca

SEQ ID NO: 14887 - RNA, 19 nt, Homo sapiens
  source 1..19: mol_type = genomic RNA
acctcggtgatcagtgcag

SEQ ID NO: 14888 - RNA, 19 nt, Homo sapiens
  source 1..19: mol_type = genomic RNA
cctcggtgatcagtgcaga

SEQ ID NO: 14889 - RNA, 19 nt, Homo sapiens
  source 1..19: mol_type = genomic RNA
ctcggtgatcagtgcagag

SEQ ID NO: 14890 - RNA, 19 nt, Homo sapiens
  source 1..19: mol_type = genomic RNA
tcggtgatcagtgcagaga

SEQ ID NO: 14891 - RNA, 19 nt, Homo sapiens
  source 1..19: mol_type = genomic RNA
cggtgatcagtgcagagat

SEQ ID NO: 14892 - RNA, 19 nt, Homo sapiens
  source 1..19: mol_type = genomic RNA
gtgatcagtgcagagatac

SEQ ID NO: 14893 - RNA, 19 nt, Homo sapiens
  source 1..19: mol_type = genomic RNA
tgatcagtgcagagatacg

SEQ ID NO: 14894 - RNA, 19 nt, Homo sapiens
  source 1..19: mol_type = genomic RNA
atcagtgcagagatacgtc

SEQ ID NO: 14895 - RNA, 19 nt, Homo sapiens
  source 1..19: mol_type = genomic RNA
tcagtgcagagatacgtca

SEQ ID NO: 14896 - RNA, 19 nt, Homo sapiens
  source 1..19: mol_type = genomic RNA
cagtgcagagatacgtcac

SEQ ID NO: 14897 - RNA, 19 nt, Homo sapiens
  source 1..19: mol_type = genomic RNA
agtgcagagatacgtcaca

SEQ ID NO: 14898 - RNA, 19 nt, Homo sapiens
  source 1..19: mol_type = genomic RNA
gtgcagagatacgtcacaa

SEQ ID NO: 14899 - RNA, 19 nt, Homo sapiens
  source 1..19: mol_type = genomic RNA
gcagagatacgtcacaatg

SEQ ID NO: 14900 - RNA, 19 nt, Homo sapiens
  source 1..19: mol_type = genomic RNA
cagagatacgtcacaatgc

SEQ ID NO: 14901 - RNA, 19 nt, Homo sapiens
  source 1..19: mol_type = genomic RNA
agagatacgtcacaatgcc

SEQ ID NO: 14902 - RNA, 19 nt, Homo sapiens
  source 1..19: mol_type = genomic RNA
gagatacgtcacaatgccc

SEQ ID NO: 14903 - RNA, 19 nt, Homo sapiens
  source 1..19: mol_type = genomic RNA
agatacgtcacaatgcccc

SEQ ID NO: 14904 - RNA, 19 nt, Homo sapiens
  source 1..19: mol_type = genomic RNA
gatacgtcacaatgcccct

SEQ ID NO: 14905 - RNA, 19 nt, Homo sapiens
  source 1..19: mol_type = genomic RNA
atacgtcacaatgcccctg

SEQ ID NO: 14906 - RNA, 19 nt, Homo sapiens
  source 1..19: mol_type = genomic RNA
tacgtcacaatgcccctgt

SEQ ID NO: 14907 - RNA, 19 nt, Homo sapiens
  source 1..19: mol_type = genomic RNA
acgtcacaatgcccctgta

SEQ ID NO: 14908 - RNA, 19 nt, Homo sapiens
  source 1..19: mol_type = genomic RNA
cgtcacaatgcccctgtag

SEQ ID NO: 14909 - RNA, 19 nt, Homo sapiens
  source 1..19: mol_type = genomic RNA
cctagacaagagttacata

SEQ ID NO: 14910 - RNA, 19 nt, Homo sapiens
  source 1..19: mol_type = genomic RNA
tagacaagagttacataac

SEQ ID NO: 14911 - RNA, 19 nt, Homo sapiens
  source 1..19: mol_type = genomic RNA
agacaagagttacataacc

SEQ ID NO: 14912 - RNA, 19 nt, Homo sapiens
  source 1..19: mol_type = genomic RNA
gacaagagttacataaccc

SEQ ID NO: 14913 - RNA, 19 nt, Homo sapiens
  source 1..19: mol_type = genomic RNA
acaagagttacataaccca

SEQ ID NO: 14914 - RNA, 19 nt, Homo sapiens
  source 1..19: mol_type = genomic RNA
caagagttacataacccag

SEQ ID NO: 14915 - RNA, 19 nt, Homo sapiens
  source 1..19: mol_type = genomic RNA
aagagttacataacccagg

SEQ ID NO: 14916 - RNA, 19 nt, Homo sapiens
  source 1..19: mol_type = genomic RNA
agagttacataacccaggt

SEQ ID NO: 14917 - RNA, 19 nt, Homo sapiens
  source 1..19: mol_type = genomic RNA
gagttacataacccaggtg

SEQ ID NO: 14918 - RNA, 19 nt, Homo sapiens
  source 1..19: mol_type = genomic RNA
agttacataacccaggtga

SEQ ID NO: 14919 - RNA, 19 nt, Homo sapiens
  source 1..19: mol_type = genomic RNA
gttacataacccaggtgat

SEQ ID NO: 14920 - RNA, 19 nt, Homo sapiens
  source 1..19: mol_type = genomic RNA
ttacataacccaggtgatc

SEQ ID NO: 14921 - RNA, 19 nt, Homo sapiens
  source 1..19: mol_type = genomic RNA
tacataacccaggtgatcc

SEQ ID NO: 14922 - RNA, 19 nt, Homo sapiens
  source 1..19: mol_type = genomic RNA
acataacccaggtgatccg

SEQ ID NO: 14923 - RNA, 19 nt, Homo sapiens
  source 1..19: mol_type = genomic RNA
cataacccaggtgatccgt

SEQ ID NO: 14924 - RNA, 19 nt, Homo sapiens
  source 1..19: mol_type = genomic RNA
ataacccaggtgatccgta

SEQ ID NO: 14925 - RNA, 19 nt, Homo sapiens
  source 1..19: mol_type = genomic RNA
taacccaggtgatccgtac

SEQ ID NO: 14926 - RNA, 19 nt, Homo sapiens
  source 1..19: mol_type = genomic RNA
aacccaggtgatccgtaca

SEQ ID NO: 14927 - RNA, 19 nt, Homo sapiens
  source 1..19: mol_type = genomic RNA
acccaggtgatccgtacag

SEQ ID NO: 14928 - RNA, 19 nt, Homo sapiens
  source 1..19: mol_type = genomic RNA
cccaggtgatccgtacaga

SEQ ID NO: 14929 - RNA, 19 nt, Homo sapiens
  source 1..19: mol_type = genomic RNA
ccaggtgatccgtacagag

SEQ ID NO: 14930 - RNA, 19 nt, Homo sapiens
  source 1..19: mol_type = genomic RNA
caggtgatccgtacagagt

SEQ ID NO: 14931 - RNA, 19 nt, Homo sapiens
  source 1..19: mol_type = genomic RNA
aggtgatccgtacagagtg

SEQ ID NO: 14932 - RNA, 19 nt, Homo sapiens
  source 1..19: mol_type = genomic RNA
ggtgatccgtacagagtga

SEQ ID NO: 14933 - RNA, 19 nt, Homo sapiens
  source 1..19: mol_type = genomic RNA
gtgatccgtacagagtgat

SEQ ID NO: 14934 - RNA, 19 nt, Homo sapiens
  source 1..19: mol_type = genomic RNA
tgatccgtacagagtgatg

SEQ ID NO: 14935 - RNA, 19 nt, Homo sapiens
  source 1..19: mol_type = genomic RNA
gatccgtacagagtgatgt

SEQ ID NO: 14936 - RNA, 19 nt, Homo sapiens
  source 1..19: mol_type = genomic RNA
atccgtacagagtgatgtc

SEQ ID NO: 14937 - RNA, 19 nt, Homo sapiens
  source 1..19: mol_type = genomic RNA
tccgtacagagtgatgtca

SEQ ID NO: 14938 - RNA, 19 nt, Homo sapiens
  source 1..19: mol_type = genomic RNA
ccgtacagagtgatgtcac

SEQ ID NO: 14939 - RNA, 19 nt, Homo sapiens
  source 1..19: mol_type = genomic RNA
cgtacagagtgatgtcaca

SEQ ID NO: 14940 - RNA, 19 nt, Homo sapiens
  source 1..19: mol_type = genomic RNA
gtacagagtgatgtcacaa

SEQ ID NO: 14941 - RNA, 19 nt, Homo sapiens
  source 1..19: mol_type = genomic RNA
tacagagtgatgtcacaac

SEQ ID NO: 14942 - RNA, 19 nt, Homo sapiens
  source 1..19: mol_type = genomic RNA
acagagtgatgtcacaacg

SEQ ID NO: 14943 - RNA, 19 nt, Homo sapiens
  source 1..19: mol_type = genomic RNA
cagagtgatgtcacaacgc

SEQ ID NO: 14944 - RNA, 19 nt, Homo sapiens
  source 1..19: mol_type = genomic RNA
agagtgatgtcacaacgcc

SEQ ID NO: 14945 - RNA, 19 nt, Homo sapiens
  source 1..19: mol_type = genomic RNA
gagtgatgtcacaacgccc

SEQ ID NO: 14946 - RNA, 19 nt, Homo sapiens
  source 1..19: mol_type = genomic RNA
agtgatgtcacaacgccct

SEQ ID NO: 14947 - RNA, 19 nt, Homo sapiens
  source 1..19: mol_type = genomic RNA
gtgatgtcacaacgccctc

SEQ ID NO: 14948 - RNA, 19 nt, Homo sapiens
  source 1..19: mol_type = genomic RNA
tgatgtcacaacgccctct

SEQ ID NO: 14949 - RNA, 19 nt, Homo sapiens
  source 1..19: mol_type = genomic RNA
gatgtcacaacgccctctg

SEQ ID NO: 14950 - RNA, 19 nt, Homo sapiens
  source 1..19: mol_type = genomic RNA
atgtcacaacgccctctgt

SEQ ID NO: 14951 - RNA, 19 nt, Homo sapiens
  source 1..19: mol_type = genomic RNA
tgtcacaacgccctctgta

SEQ ID NO: 14952 - RNA, 19 nt, Homo sapiens
  source 1..19: mol_type = genomic RNA
gtcacaacgccctctgtag

SEQ ID NO: 14953 - RNA, 19 nt, Homo sapiens
  source 1..19: mol_type = genomic RNA
tcacaacgccctctgtagg

SEQ ID NO: 14954 - RNA, 19 nt, Homo sapiens
  source 1..19: mol_type = genomic RNA
cacaacgccctctgtaggc

SEQ ID NO: 14955 - RNA, 19 nt, Homo sapiens
  source 1..19: mol_type = genomic RNA
acaacgccctctgtaggca

SEQ ID NO: 14956 - RNA, 19 nt, Homo sapiens
  source 1..19: mol_type = genomic RNA
caacgccctctgtaggcag

SEQ ID NO: 14957 - RNA, 19 nt, Homo sapiens
  source 1..19: mol_type = genomic RNA
aacgccctctgtaggcaga

SEQ ID NO: 14958 - RNA, 19 nt, Homo sapiens
  source 1..19: mol_type = genomic RNA
cgccctctgtaggcagaga

SEQ ID NO: 14959 - RNA, 19 nt, Homo sapiens
  source 1..19: mol_type = genomic RNA
ccctctgtaggcagagact

SEQ ID NO: 14960 - RNA, 19 nt, Homo sapiens
  source 1..19: mol_type = genomic RNA
cctctgtaggcagagacta

SEQ ID NO: 14961 - RNA, 19 nt, Homo sapiens
  source 1..19: mol_type = genomic RNA
ctctgtaggcagagactag

SEQ ID NO: 14962 - RNA, 19 nt, Homo sapiens
  source 1..19: mol_type = genomic RNA
tctgtaggcagagactaga

SEQ ID NO: 14963 - RNA, 19 nt, Homo sapiens
  source 1..19: mol_type = genomic RNA
ctgtaggcagagactagaa

SEQ ID NO: 14964 - RNA, 19 nt, Homo sapiens
  source 1..19: mol_type = genomic RNA
tgtaggcagagactagaaa

SEQ ID NO: 14965 - RNA, 19 nt, Homo sapiens
  source 1..19: mol_type = genomic RNA
gtaggcagagactagaaaa

SEQ ID NO: 14966 - RNA, 19 nt, Homo sapiens
  source 1..19: mol_type = genomic RNA
taggcagagactagaaaag

SEQ ID NO: 14967 - RNA, 19 nt, Homo sapiens
  source 1..19: mol_type = genomic RNA
aggcagagactagaaaaga

SEQ ID NO: 14968 - RNA, 19 nt, Homo sapiens
  source 1..19: mol_type = genomic RNA
ggcagagactagaaaagag

SEQ ID NO: 14969 - RNA, 19 nt, Homo sapiens
  source 1..19: mol_type = genomic RNA
gcagagactagaaaagagt

SEQ ID NO: 14970 - RNA, 19 nt, Homo sapiens
  source 1..19: mol_type = genomic RNA
cagagactagaaaagagtt

SEQ ID NO: 14971 - RNA, 19 nt, Homo sapiens
  source 1..19: mol_type = genomic RNA
agagactagaaaagagtta

SEQ ID NO: 14972 - RNA, 19 nt, Homo sapiens
  source 1..19: mol_type = genomic RNA
gagactagaaaagagttac

SEQ ID NO: 14973 - RNA, 19 nt, Homo sapiens
  source 1..19: mol_type = genomic RNA
agactagaaaagagttaca

SEQ ID NO: 14974 - RNA, 19 nt, Homo sapiens
  source 1..19: mol_type = genomic RNA
gactagaaaagagttacat

SEQ ID NO: 14975 - RNA, 19 nt, Homo sapiens
  source 1..19: mol_type = genomic RNA
agaaaagagttacattacc

SEQ ID NO: 14976 - RNA, 19 nt, Homo sapiens
  source 1..19: mol_type = genomic RNA
aaagagttacattacctgg

SEQ ID NO: 14977 - RNA, 19 nt, Homo sapiens
  source 1..19: mol_type = genomic RNA
aagagttacattacctggg

SEQ ID NO: 14978 - RNA, 19 nt, Homo sapiens
  source 1..19: mol_type = genomic RNA
agagttacattacctgggt

SEQ ID NO: 14979 - RNA, 19 nt, Homo sapiens
  source 1..19: mol_type = genomic RNA
gagttacattacctgggtg

SEQ ID NO: 14980 - RNA, 19 nt, Homo sapiens
  source 1..19: mol_type = genomic RNA
agttacattacctgggtga

SEQ ID NO: 14981 - RNA, 19 nt, Homo sapiens
  source 1..19: mol_type = genomic RNA
gttacattacctgggtgat

SEQ ID NO: 14982 - RNA, 19 nt, Homo sapiens
  source 1..19: mol_type = genomic RNA
ttacattacctgggtgatc

SEQ ID NO: 14983 - RNA, 19 nt, Homo sapiens
  source 1..19: mol_type = genomic RNA
tacattacctgggtgatca

SEQ ID NO: 14984 - RNA, 19 nt, Homo sapiens
  source 1..19: mol_type = genomic RNA
acattacctgggtgatcag

SEQ ID NO: 14985 - RNA, 19 nt, Homo sapiens
  source 1..19: mol_type = genomic RNA
cattacctgggtgatcagt

SEQ ID NO: 14986 - RNA, 19 nt, Homo sapiens
  source 1..19: mol_type = genomic RNA
attacctgggtgatcagtg

SEQ ID NO: 14987 - RNA, 19 nt, Homo sapiens
  source 1..19: mol_type = genomic RNA
ttacctgggtgatcagtgc

SEQ ID NO: 14988 - RNA, 19 nt, Homo sapiens
  source 1..19: mol_type = genomic RNA
tacctgggtgatcagtgca

SEQ ID NO: 14989 - RNA, 19 nt, Homo sapiens
  source 1..19: mol_type = genomic RNA
gtcacaatgccccctgtag

SEQ ID NO: 14990 - RNA, 19 nt, Homo sapiens
  source 1..19: mol_type = genomic RNA
tcacaatgccccctgtagg

SEQ ID NO: 14991 - RNA, 19 nt, Homo sapiens
  source 1..19: mol_type = genomic RNA
cacaatgccccctgtaggc

SEQ ID NO: 14992 - RNA, 19 nt, Homo sapiens
  source 1..19: mol_type = genomic RNA
acaatgccccctgtaggca

SEQ ID NO: 14993 - RNA, 19 nt, Homo sapiens
  source 1..19: mol_type = genomic RNA
caatgccccctgtaggcag

SEQ ID NO: 14994 - RNA, 19 nt, Homo sapiens
  source 1..19: mol_type = genomic RNA
aatgccccctgtaggcaga

SEQ ID NO: 14995 - RNA, 19 nt, Homo sapiens
  source 1..19: mol_type = genomic RNA
cccctgtaggcagagcata

SEQ ID NO: 14996 - RNA, 19 nt, Homo sapiens
  source 1..19: mol_type = genomic RNA
ccctgtaggcagagcatag

SEQ ID NO: 14997 - RNA, 19 nt, Homo sapiens
  source 1..19: mol_type = genomic RNA
cctgtaggcagagcataga

SEQ ID NO: 14998 - RNA, 19 nt, Homo sapiens
  source 1..19: mol_type = genomic RNA
ctgtaggcagagcatagag

SEQ ID NO: 14999 - RNA, 19 nt, Homo sapiens
  source 1..19: mol_type = genomic RNA
tgtaggcagagcatagaga

SEQ ID NO: 15000 - RNA, 19 nt, Homo sapiens
  source 1..19: mol_type = genomic RNA
gtaggcagagcatagagaa

SEQ ID NO: 15001 - RNA, 19 nt, Homo sapiens
  source 1..19: mol_type = genomic RNA
taggcagagcatagagaag

SEQ ID NO: 15002 - RNA, 19 nt, Homo sapiens
  source 1..19: mol_type = genomic RNA
aggcagagcatagagaaga

SEQ ID NO: 15003 - RNA, 19 nt, Homo sapiens
  source 1..19: mol_type = genomic RNA
ggcagagcatagagaagag

SEQ ID NO: 15004 - RNA, 19 nt, Homo sapiens
  source 1..19: mol_type = genomic RNA
gcagagcatagagaagagt

SEQ ID NO: 15005 - RNA, 19 nt, Homo sapiens
  source 1..19: mol_type = genomic RNA
cagagcatagagaagagtt

SEQ ID NO: 15006 - RNA, 19 nt, Homo sapiens
  source 1..19: mol_type = genomic RNA
agagcatagagaagagttg

SEQ ID NO: 15007 - RNA, 19 nt, Homo sapiens
  source 1..19: mol_type = genomic RNA
gagcatagagaagagttgc

SEQ ID NO: 15008 - RNA, 19 nt, Homo sapiens
  source 1..19: mol_type = genomic RNA
agcatagagaagagttgca

SEQ ID NO: 15009 - RNA, 19 nt, Homo sapiens
  source 1..19: mol_type = genomic RNA
gcatagagaagagttgcat

SEQ ID NO: 15010 - RNA, 19 nt, Homo sapiens
  source 1..19: mol_type = genomic RNA
catagagaagagttgcatc

SEQ ID NO: 15011 - RNA, 19 nt, Homo sapiens
  source 1..19: mol_type = genomic RNA
atagagaagagttgcatca

SEQ ID NO: 15012 - RNA, 19 nt, Homo sapiens
  source 1..19: mol_type = genomic RNA
tagagaagagttgcatcac

SEQ ID NO: 15013 - RNA, 19 nt, Homo sapiens
  source 1..19: mol_type = genomic RNA
agagaagagttgcatcacc

SEQ ID NO: 15014 - RNA, 19 nt, Homo sapiens
  source 1..19: mol_type = genomic RNA
gagaagagttgcatcacct

SEQ ID NO: 15015 - RNA, 19 nt, Homo sapiens
  source 1..19: mol_type = genomic RNA
agaagagttgcatcacctg

SEQ ID NO: 15016 - RNA, 19 nt, Homo sapiens
  source 1..19: mol_type = genomic RNA
gaagagttgcatcacctgg

SEQ ID NO: 15017 - RNA, 19 nt, Homo sapiens
  source 1..19: mol_type = genomic RNA
aagagttgcatcacctggg

SEQ ID NO: 15018 - RNA, 19 nt, Homo sapiens
  source 1..19: mol_type = genomic RNA
agagttgcatcacctgggt

SEQ ID NO: 15019 - RNA, 19 nt, Homo sapiens
  source 1..19: mol_type = genomic RNA
gagttgcatcacctgggtg

SEQ ID NO: 15020 - RNA, 19 nt, Homo sapiens
  source 1..19: mol_type = genomic RNA
agttgcatcacctgggtga

SEQ ID NO: 15021 - RNA, 19 nt, Homo sapiens
  source 1..19: mol_type = genomic RNA
gttgcatcacctgggtgat

SEQ ID NO: 15022 - RNA, 19 nt, Homo sapiens
  source 1..19: mol_type = genomic RNA
ttgcatcacctgggtgatc

SEQ ID NO: 15023 - RNA, 19 nt, Homo sapiens
  source 1..19: mol_type = genomic RNA
tgcatcacctgggtgatca

SEQ ID NO: 15024 - RNA, 19 nt, Homo sapiens
  source 1..19: mol_type = genomic RNA
gcatcacctgggtgatcag

SEQ ID NO: 15025 - RNA, 19 nt, Homo sapiens
  source 1..19: mol_type = genomic RNA
cacctgggtgatcagtgta

SEQ ID NO: 15026 - RNA, 19 nt, Homo sapiens
  source 1..19: mol_type = genomic RNA
acctgggtgatcagtgtag

SEQ ID NO: 15027 - RNA, 19 nt, Homo sapiens
  source 1..19: mol_type = genomic RNA
cctgggtgatcagtgtaga

SEQ ID NO: 15028 - RNA, 19 nt, Homo sapiens
  source 1..19: mol_type = genomic RNA
ctgggtgatcagtgtagag

SEQ ID NO: 15029 - RNA, 19 nt, Homo sapiens
  source 1..19: mol_type = genomic RNA
tgggtgatcagtgtagaga

SEQ ID NO: 15030 - RNA, 19 nt, Homo sapiens
  source 1..19: mol_type = genomic RNA
gggtgatcagtgtagagat

SEQ ID NO: 15031 - RNA, 19 nt, Homo sapiens
  source 1..19: mol_type = genomic RNA
atcagtgtagagatatgtc

SEQ ID NO: 15032 - RNA, 19 nt, Homo sapiens
  source 1..19: mol_type = genomic RNA
tcagtgtagagatatgtca

SEQ ID NO: 15033 - RNA, 19 nt, Homo sapiens
  source 1..19: mol_type = genomic RNA
cagtgtagagatatgtcac

SEQ ID NO: 15034 - RNA, 19 nt, Homo sapiens
  source 1..19: mol_type = genomic RNA
agtgtagagatatgtcaca

SEQ ID NO: 15035 - RNA, 19 nt, Homo sapiens
  source 1..19: mol_type = genomic RNA
gtgtagagatatgtcacaa

SEQ ID NO: 15036 - RNA, 19 nt, Homo sapiens
  source 1..19: mol_type = genomic RNA
tgtagagatatgtcacaat

SEQ ID NO: 15037 - RNA, 19 nt, Homo sapiens
  source 1..19: mol_type = genomic RNA
gtagagatatgtcacaatg

SEQ ID NO: 15038 - RNA, 19 nt, Homo sapiens
  source 1..19: mol_type = genomic RNA
tagagatatgtcacaatgt

SEQ ID NO: 15039 - RNA, 19 nt, Homo sapiens
  source 1..19: mol_type = genomic RNA
gatatgtcacaatgtcccc

SEQ ID NO: 15040 - RNA, 19 nt, Homo sapiens
  source 1..19: mol_type = genomic RNA
atatgtcacaatgtcccct

SEQ ID NO: 15041 - RNA, 19 nt, Homo sapiens
  source 1..19: mol_type = genomic RNA
ccctgtaggcagatcctag

SEQ ID NO: 15042 - RNA, 19 nt, Homo sapiens
  source 1..19: mol_type = genomic RNA
cctgtaggcagatcctaga

SEQ ID NO: 15043 - RNA, 19 nt, Homo sapiens
  source 1..19: mol_type = genomic RNA
ctgtaggcagatcctagac

SEQ ID NO: 15044 - RNA, 19 nt, Homo sapiens
  source 1..19: mol_type = genomic RNA
tgtaggcagatcctagaca

SEQ ID NO: 15045 - RNA, 19 nt, Homo sapiens
  source 1..19: mol_type = genomic RNA
gtaggcagatcctagacaa

SEQ ID NO: 15046 - RNA, 19 nt, Homo sapiens
  source 1..19: mol_type = genomic RNA
taggcagatcctagacaag

SEQ ID NO: 15047 - RNA, 19 nt, Homo sapiens
  source 1..19: mol_type = genomic RNA
aggcagatcctagacaaga

SEQ ID NO: 15048 - RNA, 19 nt, Homo sapiens
  source 1..19: mol_type = genomic RNA
ggcagatcctagacaagag

SEQ ID NO: 15049 - RNA, 19 nt, Homo sapiens
  source 1..19: mol_type = genomic RNA
gcagatcctagacaagagt

SEQ ID NO: 15050 - RNA, 19 nt, Homo sapiens
  source 1..19: mol_type = genomic RNA
cagatcctagacaagagtt

SEQ ID NO: 15051 - RNA, 19 nt, Homo sapiens
  source 1..19: mol_type = genomic RNA
tcacttaggtgatcagtgc

SEQ ID NO: 15052 - RNA, 19 nt, Homo sapiens
  source 1..19: mol_type = genomic RNA
cacttaggtgatcagtgca

SEQ ID NO: 15053 - RNA, 19 nt, Homo sapiens
  source 1..19: mol_type = genomic RNA
acttaggtgatcagtgcag

SEQ ID NO: 15054 - RNA, 19 nt, Homo sapiens
  source 1..19: mol_type = genomic RNA
cttaggtgatcagtgcaga

SEQ ID NO: 15055 - RNA, 19 nt, Homo sapiens
  source 1..19: mol_type = genomic RNA
ttaggtgatcagtgcagag

SEQ ID NO: 15056 - RNA, 19 nt, Homo sapiens
  source 1..19: mol_type = genomic RNA
taggtgatcagtgcagaga

SEQ ID NO: 15057 - RNA, 19 nt, Homo sapiens
  source 1..19: mol_type = genomic RNA
aggtgatcagtgcagagat

SEQ ID NO: 15058 - RNA, 19 nt, Homo sapiens
  source 1..19: mol_type = genomic RNA
tgtaggccaaagcctagac

SEQ ID NO: 15059 - RNA, 19 nt, Homo sapiens
  source 1..19: mol_type = genomic RNA
gtaggccaaagcctagaca

SEQ ID NO: 15060 - RNA, 19 nt, Homo sapiens
  source 1..19: mol_type = genomic RNA
taggccaaagcctagacaa

SEQ ID NO: 15061 - RNA, 19 nt, Homo sapiens
  source 1..19: mol_type = genomic RNA
aggccaaagcctagacaat

SEQ ID NO: 15062 - RNA, 19 nt, Homo sapiens
  source 1..19: mol_type = genomic RNA
ggccaaagcctagacaata

SEQ ID NO: 15063 - RNA, 19 nt, Homo sapiens
  source 1..19: mol_type = genomic RNA
gccaaagcctagacaatag

SEQ ID NO: 15064 - RNA, 19 nt, Homo sapiens
  source 1..19: mol_type = genomic RNA
ccaaagcctagacaatagt

SEQ ID NO: 15065 - RNA, 19 nt, Homo sapiens
  source 1..19: mol_type = genomic RNA
caaagcctagacaatagtt

SEQ ID NO: 15066 - RNA, 19 nt, Homo sapiens
  source 1..19: mol_type = genomic RNA
aaagcctagacaatagtta

SEQ ID NO: 15067 - RNA, 19 nt, Homo sapiens
  source 1..19: mol_type = genomic RNA
aagcctagacaatagttac

SEQ ID NO: 15068 - RNA, 19 nt, Homo sapiens
  source 1..19: mol_type = genomic RNA
agcctagacaatagttaca

SEQ ID NO: 15069 - RNA, 19 nt, Homo sapiens
  source 1..19: mol_type = genomic RNA
gcctagacaatagttacat

SEQ ID NO: 15070 - RNA, 19 nt, Homo sapiens
  source 1..19: mol_type = genomic RNA
cctagacaatagttacatc

SEQ ID NO: 15071 - RNA, 19 nt, Homo sapiens
  source 1..19: mol_type = genomic RNA
tagacaatagttacatcac

SEQ ID NO: 15072 - RNA, 19 nt, Homo sapiens
  source 1..19: mol_type = genomic RNA
agacaatagttacatcact

SEQ ID NO: 15073 - RNA, 19 nt, Homo sapiens
  source 1..19: mol_type = genomic RNA
aatagttacatcacttggg

SEQ ID NO: 15074 - RNA, 19 nt, Homo sapiens
  source 1..19: mol_type = genomic RNA
atagttacatcacttgggt

SEQ ID NO: 15075 - RNA, 19 nt, Homo sapiens
  source 1..19: mol_type = genomic RNA
tagttacatcacttgggtg

SEQ ID NO: 15076 - RNA, 19 nt, Homo sapiens
  source 1..19: mol_type = genomic RNA
agttacatcacttgggtga

SEQ ID NO: 15077 - RNA, 19 nt, Homo sapiens
  source 1..19: mol_type = genomic RNA
gttacatcacttgggtgat

SEQ ID NO: 15078 - RNA, 19 nt, Homo sapiens
  source 1..19: mol_type = genomic RNA
ttacatcacttgggtgatc

SEQ ID NO: 15079 - RNA, 19 nt, Homo sapiens
  source 1..19: mol_type = genomic RNA
tacatcacttgggtgatca

SEQ ID NO: 15080 - RNA, 19 nt, Homo sapiens
  source 1..19: mol_type = genomic RNA
acatcacttgggtgatcag

SEQ ID NO: 15081 - RNA, 19 nt, Homo sapiens
  source 1..19: mol_type = genomic RNA
catcacttgggtgatcagt

SEQ ID NO: 15082 - RNA, 19 nt, Homo sapiens
  source 1..19: mol_type = genomic RNA
atcacttgggtgatcagtg

SEQ ID NO: 15083 - RNA, 19 nt, Homo sapiens
  source 1..19: mol_type = genomic RNA
tcacttgggtgatcagtgg

SEQ ID NO: 15084 - RNA, 19 nt, Homo sapiens
  source 1..19: mol_type = genomic RNA
cacttgggtgatcagtggc

SEQ ID NO: 15085 - RNA, 19 nt, Homo sapiens
  source 1..19: mol_type = genomic RNA
acttgggtgatcagtggcg

SEQ ID NO: 15086 - RNA, 19 nt, Homo sapiens
  source 1..19: mol_type = genomic RNA
cttgggtgatcagtggcga

SEQ ID NO: 15087 - RNA, 19 nt, Homo sapiens
  source 1..19: mol_type = genomic RNA
ttgggtgatcagtggcgag

SEQ ID NO: 15088 - RNA, 19 nt, Homo sapiens
  source 1..19: mol_type = genomic RNA
tgggtgatcagtggcgaga

SEQ ID NO: 15089 - RNA, 19 nt, Homo sapiens
  source 1..19: mol_type = genomic RNA
gggtgatcagtggcgagat

SEQ ID NO: 15090 - RNA, 19 nt, Homo sapiens
  source 1..19: mol_type = genomic RNA
ggtgatcagtggcgagatc

SEQ ID NO: 15091 - RNA, 19 nt, Homo sapiens
  source 1..19: mol_type = genomic RNA
gtgatcagtggcgagatct

SEQ ID NO: 15092 - RNA, 19 nt, Homo sapiens
  source 1..19: mol_type = genomic RNA
tgatcagtggcgagatctc

SEQ ID NO: 15093 - RNA, 19 nt, Homo sapiens
  source 1..19: mol_type = genomic RNA
gatcagtggcgagatctct

SEQ ID NO: 15094 - RNA, 19 nt, Homo sapiens
  source 1..19: mol_type = genomic RNA
atcagtggcgagatctctc

SEQ ID NO: 15095 - RNA, 19 nt, Homo sapiens
  source 1..19: mol_type = genomic RNA
tcagtggcgagatctctca

SEQ ID NO: 15096 - RNA, 19 nt, Homo sapiens
  source 1..19: mol_type = genomic RNA
cagtggcgagatctctcac

SEQ ID NO: 15097 - RNA, 19 nt, Homo sapiens
  source 1..19: mol_type = genomic RNA
agtggcgagatctctcaca

SEQ ID NO: 15098 - RNA, 19 nt, Homo sapiens
  source 1..19: mol_type = genomic RNA
gtggcgagatctctcacaa

SEQ ID NO: 15099 - RNA, 19 nt, Homo sapiens
  source 1..19: mol_type = genomic RNA
tggcgagatctctcacaat

SEQ ID NO: 15100 - RNA, 19 nt, Homo sapiens
  source 1..19: mol_type = genomic RNA
ggcgagatctctcacaatt

SEQ ID NO: 15101 - RNA, 19 nt, Homo sapiens
  source 1..19: mol_type = genomic RNA
gcgagatctctcacaattc

SEQ ID NO: 15102 - RNA, 19 nt, Homo sapiens
  source 1..19: mol_type = genomic RNA
cgagatctctcacaattcc

SEQ ID NO: 15103 - RNA, 19 nt, Homo sapiens
  source 1..19: mol_type = genomic RNA
gagatctctcacaattccc

SEQ ID NO: 15104 - RNA, 19 nt, Homo sapiens
  source 1..19: mol_type = genomic RNA
agatctctcacaattcccc

SEQ ID NO: 15105 - RNA, 19 nt, Homo sapiens
  source 1..19: mol_type = genomic RNA
gatctctcacaattcccct

SEQ ID NO: 15106 - RNA, 19 nt, Homo sapiens
  source 1..19: mol_type = genomic RNA
atctctcacaattcccctg

SEQ ID NO: 15107 - RNA, 19 nt, Homo sapiens
  source 1..19: mol_type = genomic RNA
tctctcacaattcccctgt

SEQ ID NO: 15108 - RNA, 19 nt, Homo sapiens
  source 1..19: mol_type = genomic RNA
ctctcacaattcccctgta

SEQ ID NO: 15109 - RNA, 19 nt, Homo sapiens
  source 1..19: mol_type = genomic RNA
tctcacaattcccctgtag

SEQ ID NO: 15110 - RNA, 19 nt, Homo sapiens
  source 1..19: mol_type = genomic RNA
ctcacaattcccctgtagg

SEQ ID NO: 15111 - RNA, 19 nt, Homo sapiens
  source 1..19: mol_type = genomic RNA
tcacaattcccctgtaggc

SEQ ID NO: 15112 - RNA, 19 nt, Homo sapiens
  source 1..19: mol_type = genomic RNA
cacaattcccctgtaggca

SEQ ID NO: 15113 - RNA, 19 nt, Homo sapiens
  source 1..19: mol_type = genomic RNA
acaattcccctgtaggcag

SEQ ID NO: 15114 - RNA, 19 nt, Homo sapiens
  source 1..19: mol_type = genomic RNA
caattcccctgtaggcaga

SEQ ID NO: 15115 - RNA, 19 nt, Homo sapiens
  source 1..19: mol_type = genomic RNA
aattcccctgtaggcagag

SEQ ID NO: 15116 - RNA, 19 nt, Homo sapiens
  source 1..19: mol_type = genomic RNA
attcccctgtaggcagagc

SEQ ID NO: 15117 - RNA, 19 nt, Homo sapiens
  source 1..19: mol_type = genomic RNA
ttcccctgtaggcagagct

SEQ ID NO: 15118 - RNA, 19 nt, Homo sapiens
  source 1..19: mol_type = genomic RNA
tcccctgtaggcagagctt

SEQ ID NO: 15119 - RNA, 19 nt, Homo sapiens
  source 1..19: mol_type = genomic RNA
ccctgtaggcagagcttat

SEQ ID NO: 15120 - RNA, 19 nt, Homo sapiens
  source 1..19: mol_type = genomic RNA
cctgtaggcagagcttata

SEQ ID NO: 15121 - RNA, 19 nt, Homo sapiens
  source 1..19: mol_type = genomic RNA
ctgtaggcagagcttatac

SEQ ID NO: 15122 - RNA, 19 nt, Homo sapiens
  source 1..19: mol_type = genomic RNA
tgtaggcagagcttataca

SEQ ID NO: 15123 - RNA, 19 nt, Homo sapiens
  source 1..19: mol_type = genomic RNA
gtaggcagagcttatacaa

SEQ ID NO: 15124 - RNA, 19 nt, Homo sapiens
  source 1..19: mol_type = genomic RNA
taggcagagcttatacaac

SEQ ID NO: 15125 - RNA, 19 nt, Homo sapiens
  source 1..19: mol_type = genomic RNA
aggcagagcttatacaaca

SEQ ID NO: 15126 - RNA, 19 nt, Homo sapiens
  source 1..19: mol_type = genomic RNA
ggcagagcttatacaacag

SEQ ID NO: 15127 - RNA, 19 nt, Homo sapiens
  source 1..19: mol_type = genomic RNA
gcagagcttatacaacagt

SEQ ID NO: 15128 - RNA, 19 nt, Homo sapiens
  source 1..19: mol_type = genomic RNA
cagagcttatacaacagtt

SEQ ID NO: 15129 - RNA, 19 nt, Homo sapiens
  source 1..19: mol_type = genomic RNA
agagcttatacaacagtta

SEQ ID NO: 15130 - RNA, 19 nt, Homo sapiens
  source 1..19: mol_type = genomic RNA
gagcttatacaacagttac

SEQ ID NO: 15131 - RNA, 19 nt, Homo sapiens
  source 1..19: mol_type = genomic RNA
agcttatacaacagttaca

SEQ ID NO: 15132 - RNA, 19 nt, Homo sapiens
  source 1..19: mol_type = genomic RNA
tatgtcacaatgcccccat

SEQ ID NO: 15133 - RNA, 19 nt, Homo sapiens
  source 1..19: mol_type = genomic RNA
atgtcacaatgcccccata

SEQ ID NO: 15134 - RNA, 19 nt, Homo sapiens
  source 1..19: mol_type = genomic RNA
tgtcacaatgcccccatag

SEQ ID NO: 15135 - RNA, 19 nt, Homo sapiens
  source 1..19: mol_type = genomic RNA
gtcacaatgcccccatagg

SEQ ID NO: 15136 - RNA, 19 nt, Homo sapiens
  source 1..19: mol_type = genomic RNA
tcacaatgcccccataggc

SEQ ID NO: 15137 - RNA, 19 nt, Homo sapiens
  source 1..19: mol_type = genomic RNA
cacaatgcccccataggca

SEQ ID NO: 15138 - RNA, 19 nt, Homo sapiens
  source 1..19: mol_type = genomic RNA
acaatgcccccataggcag

SEQ ID NO: 15139 - RNA, 19 nt, Homo sapiens
  source 1..19: mol_type = genomic RNA
caatgcccccataggcaga

SEQ ID NO: 15140 - RNA, 19 nt, Homo sapiens
  source 1..19: mol_type = genomic RNA
aatgcccccataggcagat

SEQ ID NO: 15141 - RNA, 19 nt, Homo sapiens
  source 1..19: mol_type = genomic RNA
tgatcagtgcagaaatacg

SEQ ID NO: 15142 - RNA, 19 nt, Homo sapiens
  source 1..19: mol_type = genomic RNA
gatcagtgcagaaatacgt

SEQ ID NO: 15143 - RNA, 19 nt, Homo sapiens
  source 1..19: mol_type = genomic RNA
atcagtgcagaaatacgtc

SEQ ID NO: 15144 - RNA, 19 nt, Homo sapiens
  source 1..19: mol_type = genomic RNA
tcagtgcagaaatacgtca

SEQ ID NO: 15145 - RNA, 19 nt, Homo sapiens
  source 1..19: mol_type = genomic RNA
cagtgcagaaatacgtcac

SEQ ID NO: 15146 - RNA, 19 nt, Homo sapiens
  source 1..19: mol_type = genomic RNA
agtgcagaaatacgtcaca

SEQ ID NO: 15147 - RNA, 19 nt, Homo sapiens
  source 1..19: mol_type = genomic RNA
gtgcagaaatacgtcacaa

SEQ ID NO: 15148 - RNA, 19 nt, Homo sapiens
  source 1..19: mol_type = genomic RNA
tgcagaaatacgtcacaat

SEQ ID NO: 15149 - RNA, 19 nt, Homo sapiens
  source 1..19: mol_type = genomic RNA
gcagaaatacgtcacaatg

SEQ ID NO: 15150 - RNA, 19 nt, Homo sapiens
  source 1..19: mol_type = genomic RNA
cagaaatacgtcacaatgc

SEQ ID NO: 15151 - RNA, 19 nt, Homo sapiens
  source 1..19: mol_type = genomic RNA
agaaatacgtcacaatgcc

SEQ ID NO: 15152 - RNA, 19 nt, Homo sapiens
  source 1..19: mol_type = genomic RNA
gaaatacgtcacaatgccc

SEQ ID NO: 15153 - RNA, 19 nt, Homo sapiens
  source 1..19: mol_type = genomic RNA
aaatacgtcacaatgcccc

SEQ ID NO: 15154 - RNA, 19 nt, Homo sapiens
  source 1..19: mol_type = genomic RNA
aatacgtcacaatgccccc

SEQ ID NO: 15155 - RNA, 19 nt, Homo sapiens
  source 1..19: mol_type = genomic RNA
atacgtcacaatgccccct

SEQ ID NO: 15156 - RNA, 19 nt, Homo sapiens
  source 1..19: mol_type = genomic RNA
tacgtcacaatgccccctt

SEQ ID NO: 15157 - RNA, 19 nt, Homo sapiens
  source 1..19: mol_type = genomic RNA
acgtcacaatgccccctta

SEQ ID NO: 15158 - RNA, 19 nt, Homo sapiens
  source 1..19: mol_type = genomic RNA
cgtcacaatgcccccttag

SEQ ID NO: 15159 - RNA, 19 nt, Homo sapiens
  source 1..19: mol_type = genomic RNA
gtcacaatgcccccttagg

SEQ ID NO: 15160 - RNA, 19 nt, Homo sapiens
  source 1..19: mol_type = genomic RNA
tcacaatgcccccttaggc

SEQ ID NO: 15161 - RNA, 19 nt, Homo sapiens
  source 1..19: mol_type = genomic RNA
cacaatgcccccttaggca

SEQ ID NO: 15162 - RNA, 19 nt, Homo sapiens
  source 1..19: mol_type = genomic RNA
acaatgcccccttaggcag

SEQ ID NO: 15163 - RNA, 19 nt, Homo sapiens
  source 1..19: mol_type = genomic RNA
caatgcccccttaggcaga

SEQ ID NO: 15164 - RNA, 19 nt, Homo sapiens
  source 1..19: mol_type = genomic RNA
aatgcccccttaggcagag

SEQ ID NO: 15165 - RNA, 19 nt, Homo sapiens
  source 1..19: mol_type = genomic RNA
cccccttaggcagagccta

SEQ ID NO: 15166 - RNA, 19 nt, Homo sapiens
  source 1..19: mol_type = genomic RNA
ccccttaggcagagcctag

SEQ ID NO: 15167 - RNA, 19 nt, Homo sapiens
  source 1..19: mol_type = genomic RNA
cccttaggcagagcctaga

SEQ ID NO: 15168 - RNA, 19 nt, Homo sapiens
  source 1..19: mol_type = genomic RNA
ccttaggcagagcctagac

SEQ ID NO: 15169 - RNA, 19 nt, Homo sapiens
  source 1..19: mol_type = genomic RNA
cttaggcagagcctagaca

SEQ ID NO: 15170 - RNA, 19 nt, Homo sapiens
  source 1..19: mol_type = genomic RNA
ttaggcagagcctagacaa

SEQ ID NO: 15171 - RNA, 19 nt, Homo sapiens
  source 1..19: mol_type = genomic RNA
taggcagagcctagacaaa

SEQ ID NO: 15172 - RNA, 19 nt, Homo sapiens
  source 1..19: mol_type = genomic RNA
aggcagagcctagacaaaa

SEQ ID NO: 15173 - RNA, 19 nt, Homo sapiens
  source 1..19: mol_type = genomic RNA
ggcagagcctagacaaaag

SEQ ID NO: 15174 - RNA, 19 nt, Homo sapiens
  source 1..19: mol_type = genomic RNA
gcagagcctagacaaaagc

SEQ ID NO: 15175 - RNA, 19 nt, Homo sapiens
  source 1..19: mol_type = genomic RNA
cagagcctagacaaaagcc

SEQ ID NO: 15176 - RNA, 19 nt, Homo sapiens
  source 1..19: mol_type = genomic RNA
agcctagacaaaagcccca

SEQ ID NO: 15177 - RNA, 19 nt, Homo sapiens
  source 1..19: mol_type = genomic RNA
gcctagacaaaagccccat

SEQ ID NO: 15178 - RNA, 19 nt, Homo sapiens
  source 1..19: mol_type = genomic RNA
cctagacaaaagccccatc

SEQ ID NO: 15179 - RNA, 19 nt, Homo sapiens
  source 1..19: mol_type = genomic RNA
ctagacaaaagccccatca

SEQ ID NO: 15180 - RNA, 19 nt, Homo sapiens
  source 1..19: mol_type = genomic RNA
tagacaaaagccccatcac

SEQ ID NO: 15181 - RNA, 19 nt, Homo sapiens
  source 1..19: mol_type = genomic RNA
agacaaaagccccatcacc

SEQ ID NO: 15182 - RNA, 19 nt, Homo sapiens
  source 1..19: mol_type = genomic RNA
gacaaaagccccatcacct

SEQ ID NO: 15183 - RNA, 19 nt, Homo sapiens
  source 1..19: mol_type = genomic RNA
acaaaagccccatcacctg

SEQ ID NO: 15184 - RNA, 19 nt, Homo sapiens
  source 1..19: mol_type = genomic RNA
caaaagccccatcacctgg

SEQ ID NO: 15185 - RNA, 19 nt, Homo sapiens
  source 1..19: mol_type = genomic RNA
aaaagccccatcacctgga

SEQ ID NO: 15186 - RNA, 19 nt, Homo sapiens
  source 1..19: mol_type = genomic RNA
aaagccccatcacctggat

SEQ ID NO: 15187 - RNA, 19 nt, Homo sapiens
  source 1..19: mol_type = genomic RNA
aagccccatcacctggatg

SEQ ID NO: 15188 - RNA, 19 nt, Homo sapiens
  source 1..19: mol_type = genomic RNA
agccccatcacctggatga

SEQ ID NO: 15189 - RNA, 19 nt, Homo sapiens
  source 1..19: mol_type = genomic RNA
gccccatcacctggatgat

SEQ ID NO: 15190 - RNA, 19 nt, Homo sapiens
  source 1..19: mol_type = genomic RNA
ccccatcacctggatgatt

SEQ ID NO: 15191 - RNA, 19 nt, Homo sapiens
  source 1..19: mol_type = genomic RNA
cccatcacctggatgatta

SEQ ID NO: 15192 - RNA, 19 nt, Homo sapiens
  source 1..19: mol_type = genomic RNA
ccatcacctggatgattag

SEQ ID NO: 15193 - RNA, 19 nt, Homo sapiens
  source 1..19: mol_type = genomic RNA
catcacctggatgattagt

SEQ ID NO: 15194 - RNA, 19 nt, Homo sapiens
  source 1..19: mol_type = genomic RNA
atcacctggatgattagtg

SEQ ID NO: 15195 - RNA, 19 nt, Homo sapiens
  source 1..19: mol_type = genomic RNA
tcacctggatgattagtgc

SEQ ID NO: 15196 - RNA, 19 nt, Homo sapiens
  source 1..19: mol_type = genomic RNA
cacctggatgattagtgca

SEQ ID NO: 15197 - RNA, 19 nt, Homo sapiens
  source 1..19: mol_type = genomic RNA
acctggatgattagtgcag

SEQ ID NO: 15198 - RNA, 19 nt, Homo sapiens
  source 1..19: mol_type = genomic RNA
cctggatgattagtgcaga

SEQ ID NO: 15199 - RNA, 19 nt, Homo sapiens
  source 1..19: mol_type = genomic RNA
ctggatgattagtgcagag

SEQ ID NO: 15200 - RNA, 19 nt, Homo sapiens
  source 1..19: mol_type = genomic RNA
tggatgattagtgcagagt

SEQ ID NO: 15201 - RNA, 19 nt, Homo sapiens
  source 1..19: mol_type = genomic RNA
ggatgattagtgcagagtt

SEQ ID NO: 15202 - RNA, 19 nt, Homo sapiens
  source 1..19: mol_type = genomic RNA
gatgattagtgcagagtta

SEQ ID NO: 15203 - RNA, 19 nt, Homo sapiens
  source 1..19: mol_type = genomic RNA
tgattagtgcagagttatg

SEQ ID NO: 15204 - RNA, 19 nt, Homo sapiens
  source 1..19: mol_type = genomic RNA
attagtgcagagttatgtc

SEQ ID NO: 15205 - RNA, 19 nt, Homo sapiens
  source 1..19: mol_type = genomic RNA
tagtgcagagttatgtcac

SEQ ID NO: 15206 - RNA, 19 nt, Homo sapiens
  source 1..19: mol_type = genomic RNA
tgcagagttatgtcacaaa

SEQ ID NO: 15207 - RNA, 19 nt, Homo sapiens
  source 1..19: mol_type = genomic RNA
gcagagttatgtcacaaag

SEQ ID NO: 15208 - RNA, 19 nt, Homo sapiens
  source 1..19: mol_type = genomic RNA
cagagttatgtcacaaagt

SEQ ID NO: 15209 - RNA, 19 nt, Homo sapiens
  source 1..19: mol_type = genomic RNA
agagttatgtcacaaagtc

SEQ ID NO: 15210 - RNA, 19 nt, Homo sapiens
  source 1..19: mol_type = genomic RNA
gagatatgtcacaatgcca

SEQ ID NO: 15211 - RNA, 19 nt, Homo sapiens
  source 1..19: mol_type = genomic RNA
agatatgtcacaatgccac

SEQ ID NO: 15212 - RNA, 19 nt, Homo sapiens
  source 1..19: mol_type = genomic RNA
gatatgtcacaatgccact

SEQ ID NO: 15213 - RNA, 19 nt, Homo sapiens
  source 1..19: mol_type = genomic RNA
atatgtcacaatgccactg

SEQ ID NO: 15214 - RNA, 19 nt, Homo sapiens
  source 1..19: mol_type = genomic RNA
tatgtcacaatgccactgt

SEQ ID NO: 15215 - RNA, 19 nt, Homo sapiens
  source 1..19: mol_type = genomic RNA
atgtcacaatgccactgta

SEQ ID NO: 15216 - RNA, 19 nt, Homo sapiens
  source 1..19: mol_type = genomic RNA
tgtcacaatgccactgtag

SEQ ID NO: 15217 - RNA, 19 nt, Homo sapiens
  source 1..19: mol_type = genomic RNA
gtcacaatgccactgtagg

SEQ ID NO: 15218 - RNA, 19 nt, Homo sapiens
  source 1..19: mol_type = genomic RNA
tcacaatgccactgtaggc

SEQ ID NO: 15219 - RNA, 19 nt, Homo sapiens
  source 1..19: mol_type = genomic RNA
cacaatgccactgtaggca

SEQ ID NO: 15220 - RNA, 19 nt, Homo sapiens
  source 1..19: mol_type = genomic RNA
acaatgccactgtaggcag

SEQ ID NO: 15221 - RNA, 19 nt, Homo sapiens
  source 1..19: mol_type = genomic RNA
caatgccactgtaggcaga

SEQ ID NO: 15222 - RNA, 19 nt, Homo sapiens
  source 1..19: mol_type = genomic RNA
aatgccactgtaggcagag

SEQ ID NO: 15223 - RNA, 19 nt, Homo sapiens
  source 1..19: mol_type = genomic RNA
ccactgtaggcagagccta

SEQ ID NO: 15224 - RNA, 19 nt, Homo sapiens
  source 1..19: mol_type = genomic RNA
cactgtaggcagagcctag

SEQ ID NO: 15225 - RNA, 19 nt, Homo sapiens
  source 1..19: mol_type = genomic RNA
actgtaggcagagcctaga

SEQ ID NO: 15226 - RNA, 19 nt, Homo sapiens
  source 1..19: mol_type = genomic RNA
gagcctagacaagagttat

SEQ ID NO: 15227 - RNA, 19 nt, Homo sapiens
  source 1..19: mol_type = genomic RNA
agcctagacaagagttata

SEQ ID NO: 15228 - RNA, 19 nt, Homo sapiens
  source 1..19: mol_type = genomic RNA
gcctagacaagagttatat

SEQ ID NO: 15229 - RNA, 19 nt, Homo sapiens
  source 1..19: mol_type = genomic RNA
cctagacaagagttatatg

SEQ ID NO: 15230 - RNA, 19 nt, Homo sapiens
  source 1..19: mol_type = genomic RNA
tagacaagagttatatgac

SEQ ID NO: 15231 - RNA, 19 nt, Homo sapiens
  source 1..19: mol_type = genomic RNA
agacaagagttatatgacc

SEQ ID NO: 15232 - RNA, 19 nt, Homo sapiens
  source 1..19: mol_type = genomic RNA
gacaagagttatatgacct

SEQ ID NO: 15233 - RNA, 19 nt, Homo sapiens
  source 1..19: mol_type = genomic RNA
acaagagttatatgaccta

SEQ ID NO: 15234 - RNA, 19 nt, Homo sapiens
  source 1..19: mol_type = genomic RNA
caagagttatatgacctag

SEQ ID NO: 15235 - RNA, 19 nt, Homo sapiens
  source 1..19: mol_type = genomic RNA
aagagttatatgacctagg

SEQ ID NO: 15236 - RNA, 19 nt, Homo sapiens
  source 1..19: mol_type = genomic RNA
agagttatatgacctaggt

SEQ ID NO: 15237 - RNA, 19 nt, Homo sapiens
  source 1..19: mol_type = genomic RNA
gagttatatgacctaggtg

SEQ ID NO: 15238 - RNA, 19 nt, Homo sapiens
  source 1..19: mol_type = genomic RNA
agttatatgacctaggtga

SEQ ID NO: 15239 - RNA, 19 nt, Homo sapiens
  source 1..19: mol_type = genomic RNA
gttatatgacctaggtgat

SEQ ID NO: 15240 - RNA, 19 nt, Homo sapiens
  source 1..19: mol_type = genomic RNA
ttatatgacctaggtgatc

SEQ ID NO: 15241 - RNA, 19 nt, Homo sapiens
  source 1..19: mol_type = genomic RNA
tatatgacctaggtgatca

SEQ ID NO: 15242 - RNA, 19 nt, Homo sapiens
  source 1..19: mol_type = genomic RNA
atatgacctaggtgatcag

SEQ ID NO: 15243 - RNA, 19 nt, Homo sapiens
  source 1..19: mol_type = genomic RNA
tatgacctaggtgatcagt

SEQ ID NO: 15244 - RNA, 19 nt, Homo sapiens
  source 1..19: mol_type = genomic RNA
atgacctaggtgatcagtg

SEQ ID NO: 15245 - RNA, 19 nt, Homo sapiens
  source 1..19: mol_type = genomic RNA
tgacctaggtgatcagtgc

SEQ ID NO: 15246 - RNA, 19 nt, Homo sapiens
  source 1..19: mol_type = genomic RNA
gacctaggtgatcagtgca

SEQ ID NO: 15247 - RNA, 19 nt, Homo sapiens
  source 1..19: mol_type = genomic RNA
cctaggtgatcagtgcaga

SEQ ID NO: 15248 - RNA, 19 nt, Homo sapiens
  source 1..19: mol_type = genomic RNA
ctaggtgatcagtgcagag

SEQ ID NO: 15249 - RNA, 19 nt, Homo sapiens
  source 1..19: mol_type = genomic RNA
tgatcagtgcagagataca

SEQ ID NO: 15250 - RNA, 19 nt, Homo sapiens
  source 1..19: mol_type = genomic RNA
gatcagtgcagagatacat

SEQ ID NO: 15251 - RNA, 19 nt, Homo sapiens
  source 1..19: mol_type = genomic RNA
gcaatgcccctgtaggcag

SEQ ID NO: 15252 - RNA, 19 nt, Homo sapiens
  source 1..19: mol_type = genomic RNA
cagagccctgacaagtggt

SEQ ID NO: 15253 - RNA, 19 nt, Homo sapiens
  source 1..19: mol_type = genomic RNA
agagccctgacaagtggta

SEQ ID NO: 15254 - RNA, 19 nt, Homo sapiens
  source 1..19: mol_type = genomic RNA
gagccctgacaagtggtac

SEQ ID NO: 15255 - RNA, 19 nt, Homo sapiens
  source 1..19: mol_type = genomic RNA
agccctgacaagtggtaca

SEQ ID NO: 15256 - RNA, 19 nt, Homo sapiens
  source 1..19: mol_type = genomic RNA
gccctgacaagtggtacat

SEQ ID NO: 15257 - RNA, 19 nt, Homo sapiens
  source 1..19: mol_type = genomic RNA
ccctgacaagtggtacatc

SEQ ID NO: 15258 - RNA, 19 nt, Homo sapiens
  source 1..19: mol_type = genomic RNA
cctgacaagtggtacatca

SEQ ID NO: 15259 - RNA, 19 nt, Homo sapiens
  source 1..19: mol_type = genomic RNA
ctgacaagtggtacatcac

SEQ ID NO: 15260 - RNA, 19 nt, Homo sapiens
  source 1..19: mol_type = genomic RNA
tgacaagtggtacatcacc

SEQ ID NO: 15261 - RNA, 19 nt, Homo sapiens
  source 1..19: mol_type = genomic RNA
gacaagtggtacatcacct

SEQ ID NO: 15262 - RNA, 19 nt, Homo sapiens
  source 1..19: mol_type = genomic RNA
acaagtggtacatcacctg

SEQ ID NO: 15263 - RNA, 19 nt, Homo sapiens
  source 1..19: mol_type = genomic RNA
caagtggtacatcacctgg

SEQ ID NO: 15264 - RNA, 19 nt, Homo sapiens
  source 1..19: mol_type = genomic RNA
aagtggtacatcacctggg

SEQ ID NO: 15265 - RNA, 19 nt, Homo sapiens
  source 1..19: mol_type = genomic RNA
agtggtacatcacctgggt

SEQ ID NO: 15266 - RNA, 19 nt, Homo sapiens
  source 1..19: mol_type = genomic RNA
gtggtacatcacctgggtg

SEQ ID NO: 15267 - RNA, 19 nt, Homo sapiens
  source 1..19: mol_type = genomic RNA
tggtacatcacctgggtga

SEQ ID NO: 15268 - RNA, 19 nt, Homo sapiens
  source 1..19: mol_type = genomic RNA
ggtacatcacctgggtgat

SEQ ID NO: 15269 - RNA, 19 nt, Homo sapiens
  source 1..19: mol_type = genomic RNA
gtacatcacctgggtgatc

SEQ ID NO: 15270 - RNA, 19 nt, Homo sapiens
  source 1..19: mol_type = genomic RNA
cctgggtgatcattgcagg

SEQ ID NO: 15271 - RNA, 19 nt, Homo sapiens
  source 1..19: mol_type = genomic RNA
ctgggtgatcattgcaggg

SEQ ID NO: 15272 - RNA, 19 nt, Homo sapiens
  source 1..19: mol_type = genomic RNA
tgggtgatcattgcaggga

SEQ ID NO: 15273 - RNA, 19 nt, Homo sapiens
  source 1..19: mol_type = genomic RNA
gggtgatcattgcagggat

SEQ ID NO: 15274 - RNA, 19 nt, Homo sapiens
  source 1..19: mol_type = genomic RNA
ggtgatcattgcagggata

SEQ ID NO: 15275 - RNA, 19 nt, Homo sapiens
  source 1..19: mol_type = genomic RNA
gtgatcattgcagggatat

SEQ ID NO: 15276 - RNA, 19 nt, Homo sapiens
  source 1..19: mol_type = genomic RNA
tgatcattgcagggatatg

SEQ ID NO: 15277 - RNA, 19 nt, Homo sapiens
  source 1..19: mol_type = genomic RNA
gatcattgcagggatatgt

SEQ ID NO: 15278 - RNA, 19 nt, Homo sapiens
  source 1..19: mol_type = genomic RNA
atcattgcagggatatgtc

SEQ ID NO: 15279 - RNA, 19 nt, Homo sapiens
  source 1..19: mol_type = genomic RNA
tcattgcagggatatgtca

SEQ ID NO: 15280 - RNA, 19 nt, Homo sapiens
  source 1..19: mol_type = genomic RNA
cattgcagggatatgtcac

SEQ ID NO: 15281 - RNA, 19 nt, Homo sapiens
  source 1..19: mol_type = genomic RNA
attgcagggatatgtcaca

SEQ ID NO: 15282 - RNA, 19 nt, Homo sapiens
  source 1..19: mol_type = genomic RNA
ttgcagggatatgtcacaa

SEQ ID NO: 15283 - RNA, 19 nt, Homo sapiens
  source 1..19: mol_type = genomic RNA
tgcagggatatgtcacaaa

SEQ ID NO: 15284 - RNA, 19 nt, Homo sapiens
  source 1..19: mol_type = genomic RNA
gcagggatatgtcacaaag

SEQ ID NO: 15285 - RNA, 19 nt, Homo sapiens
  source 1..19: mol_type = genomic RNA
cagggatatgtcacaaagc

SEQ ID NO: 15286 - RNA, 19 nt, Homo sapiens
  source 1..19: mol_type = genomic RNA
agggatatgtcacaaagca

SEQ ID NO: 15287 - RNA, 19 nt, Homo sapiens
  source 1..19: mol_type = genomic RNA
gggatatgtcacaaagcac

SEQ ID NO: 15288 - RNA, 19 nt, Homo sapiens
  source 1..19: mol_type = genomic RNA
ggatatgtcacaaagcacc

SEQ ID NO: 15289 - RNA, 19 nt, Homo sapiens
  source 1..19: mol_type = genomic RNA
gatatgtcacaaagcaccc

SEQ ID NO: 15290 - RNA, 19 nt, Homo sapiens
  source 1..19: mol_type = genomic RNA
atatgtcacaaagcaccct

SEQ ID NO: 15291 - RNA, 19 nt, Homo sapiens
  source 1..19: mol_type = genomic RNA
tatgtcacaaagcaccctg

SEQ ID NO: 15292 - RNA, 19 nt, Homo sapiens
  source 1..19: mol_type = genomic RNA
atgtcacaaagcaccctgt

SEQ ID NO: 15293 - RNA, 19 nt, Homo sapiens
  source 1..19: mol_type = genomic RNA
tgtcacaaagcaccctgta

SEQ ID NO: 15294 - RNA, 19 nt, Homo sapiens
  source 1..19: mol_type = genomic RNA
gtcacaaagcaccctgtag

SEQ ID NO: 15295 - RNA, 19 nt, Homo sapiens
  source 1..19: mol_type = genomic RNA
tcacaaagcaccctgtagg

SEQ ID NO: 15296 - RNA, 19 nt, Homo sapiens
  source 1..19: mol_type = genomic RNA
cacaaagcaccctgtaggc

SEQ ID NO: 15297 - RNA, 19 nt, Homo sapiens
  source 1..19: mol_type = genomic RNA
acaaagcaccctgtaggca

SEQ ID NO: 15298 - RNA, 19 nt, Homo sapiens
  source 1..19: mol_type = genomic RNA
caaagcaccctgtaggcag

SEQ ID NO: 15299 - RNA, 19 nt, Homo sapiens
  source 1..19: mol_type = genomic RNA
aaagcaccctgtaggcaga

SEQ ID NO: 15300 - RNA, 19 nt, Homo sapiens
  source 1..19: mol_type = genomic RNA
aagcaccctgtaggcagat

SEQ ID NO: 15301 - RNA, 19 nt, Homo sapiens
  source 1..19: mol_type = genomic RNA
agcaccctgtaggcagatc

SEQ ID NO: 15302 - RNA, 19 nt, Homo sapiens
  source 1..19: mol_type = genomic RNA
caccctgtaggcagatcct

SEQ ID NO: 15303 - RNA, 19 nt, Homo sapiens
  source 1..19: mol_type = genomic RNA
accctgtaggcagatccta

SEQ ID NO: 15304 - RNA, 19 nt, Homo sapiens
  source 1..19: mol_type = genomic RNA
agatcctagacaagagtta

SEQ ID NO: 15305 - RNA, 19 nt, Homo sapiens
  source 1..19: mol_type = genomic RNA
gatcctagacaagagttac

SEQ ID NO: 15306 - RNA, 19 nt, Homo sapiens
  source 1..19: mol_type = genomic RNA
atcctagacaagagttaca

SEQ ID NO: 15307 - RNA, 19 nt, Homo sapiens
  source 1..19: mol_type = genomic RNA
tcctagacaagagttacat

SEQ ID NO: 15308 - RNA, 19 nt, Homo sapiens
  source 1..19: mol_type = genomic RNA
cctagacaagagttacatg

SEQ ID NO: 15309 - RNA, 19 nt, Homo sapiens
  source 1..19: mol_type = genomic RNA
ctagacaagagttacatga

SEQ ID NO: 15310 - RNA, 19 nt, Homo sapiens
  source 1..19: mol_type = genomic RNA
tagacaagagttacatgac

SEQ ID NO: 15311 - RNA, 19 nt, Homo sapiens
  source 1..19: mol_type = genomic RNA
agacaagagttacatgacc

SEQ ID NO: 15312 - RNA, 19 nt, Homo sapiens
  source 1..19: mol_type = genomic RNA
gacaagagttacatgacct

SEQ ID NO: 15313 - RNA, 19 nt, Homo sapiens
  source 1..19: mol_type = genomic RNA
acaagagttacatgacctg

SEQ ID NO: 15314 - RNA, 19 nt, Homo sapiens
  source 1..19: mol_type = genomic RNA
caagagttacatgacctgg

SEQ ID NO: 15315 - RNA, 19 nt, Homo sapiens
  source 1..19: mol_type = genomic RNA
aagagttacatgacctggg

SEQ ID NO: 15316 - RNA, 19 nt, Homo sapiens
  source 1..19: mol_type = genomic RNA
agagttacatgacctgggt

SEQ ID NO: 15317 - RNA, 19 nt, Homo sapiens
  source 1..19: mol_type = genomic RNA
gagttacatgacctgggtg

SEQ ID NO: 15318 - RNA, 19 nt, Homo sapiens
  source 1..19: mol_type = genomic RNA
agttacatgacctgggtga

SEQ ID NO: 15319 - RNA, 19 nt, Homo sapiens
  source 1..19: mol_type = genomic RNA
gttacatgacctgggtgat

SEQ ID NO: 15320 - RNA, 19 nt, Homo sapiens
  source 1..19: mol_type = genomic RNA
ttacatgacctgggtgatc

SEQ ID NO: 15321 - RNA, 19 nt, Homo sapiens
  source 1..19: mol_type = genomic RNA
tacatgacctgggtgatca

SEQ ID NO: 15322 - RNA, 19 nt, Homo sapiens
  source 1..19: mol_type = genomic RNA
acatgacctgggtgatcag

SEQ ID NO: 15323 - RNA, 19 nt, Homo sapiens
  source 1..19: mol_type = genomic RNA
catgacctgggtgatcagt

SEQ ID NO: 15324 - RNA, 19 nt, Homo sapiens
  source 1..19: mol_type = genomic RNA
atgacctgggtgatcagtg

SEQ ID NO: 15325 - RNA, 19 nt, Homo sapiens
  source 1..19: mol_type = genomic RNA
tgacctgggtgatcagtgc

SEQ ID NO: 15326 - RNA, 19 nt, Homo sapiens
  source 1..19: mol_type = genomic RNA
gacctgggtgatcagtgca

SEQ ID NO: 15327 - RNA, 19 nt, Homo sapiens
  source 1..19: mol_type = genomic RNA
acaagagttacatgaccta

SEQ ID NO: 15328 - RNA, 19 nt, Homo sapiens
  source 1..19: mol_type = genomic RNA
caagagttacatgacctag

SEQ ID NO: 15329 - RNA, 19 nt, Homo sapiens
  source 1..19: mol_type = genomic RNA
aagagttacatgacctagg

SEQ ID NO: 15330 - RNA, 19 nt, Homo sapiens
  source 1..19: mol_type = genomic RNA
agagttacatgacctaggt

SEQ ID NO: 15331 - RNA, 19 nt, Homo sapiens
  source 1..19: mol_type = genomic RNA
gagttacatgacctaggtg

SEQ ID NO: 15332 - RNA, 19 nt, Homo sapiens
  source 1..19: mol_type = genomic RNA
agttacatgacctaggtga

SEQ ID NO: 15333 - RNA, 19 nt, Homo sapiens
  source 1..19: mol_type = genomic RNA
gttacatgacctaggtgat

SEQ ID NO: 15334 - RNA, 19 nt, Homo sapiens
  source 1..19: mol_type = genomic RNA
ttacatgacctaggtgatc

SEQ ID NO: 15335 - RNA, 19 nt, Homo sapiens
  source 1..19: mol_type = genomic RNA
tacatgacctaggtgatca

SEQ ID NO: 15336 - RNA, 19 nt, Homo sapiens
  source 1..19: mol_type = genomic RNA
acatgacctaggtgatcag

SEQ ID NO: 15337 - RNA, 19 nt, Homo sapiens
  source 1..19: mol_type = genomic RNA
catgacctaggtgatcagt

SEQ ID NO: 15338 - RNA, 19 nt, Homo sapiens
  source 1..19: mol_type = genomic RNA
atcagtgcagagatacatc

SEQ ID NO: 15339 - RNA, 19 nt, Homo sapiens
  source 1..19: mol_type = genomic RNA
tcagtgcagagatacatcg

SEQ ID NO: 15340 - RNA, 19 nt, Homo sapiens
  source 1..19: mol_type = genomic RNA
cagtgcagagatacatcgc

SEQ ID NO: 15341 - RNA, 19 nt, Homo sapiens
  source 1..19: mol_type = genomic RNA
agtgcagagatacatcgca

SEQ ID NO: 15342 - RNA, 19 nt, Homo sapiens
  source 1..19: mol_type = genomic RNA
gtgcagagatacatcgcaa

SEQ ID NO: 15343 - RNA, 19 nt, Homo sapiens
  source 1..19: mol_type = genomic RNA
tgcagagatacatcgcaat

SEQ ID NO: 15344 - RNA, 19 nt, Homo sapiens
  source 1..19: mol_type = genomic RNA
gcagagatacatcgcaatg

SEQ ID NO: 15345 - RNA, 19 nt, Homo sapiens
  source 1..19: mol_type = genomic RNA
cagagatacatcgcaatgc

SEQ ID NO: 15346 - RNA, 19 nt, Homo sapiens
  source 1..19: mol_type = genomic RNA
agagatacatcgcaatgcc

SEQ ID NO: 15347 - RNA, 19 nt, Homo sapiens
  source 1..19: mol_type = genomic RNA
gagatacatcgcaatgccc

SEQ ID NO: 15348 - RNA, 19 nt, Homo sapiens
  source 1..19: mol_type = genomic RNA
agatacatcgcaatgcccc

SEQ ID NO: 15349 - RNA, 19 nt, Homo sapiens
  source 1..19: mol_type = genomic RNA
gatacatcgcaatgcccct

SEQ ID NO: 15350 - RNA, 19 nt, Homo sapiens
  source 1..19: mol_type = genomic RNA
atacatcgcaatgcccctg

SEQ ID NO: 15351 - RNA, 19 nt, Homo sapiens
  source 1..19: mol_type = genomic RNA
tacatcgcaatgcccctgt

SEQ ID NO: 15352 - RNA, 19 nt, Homo sapiens
  source 1..19: mol_type = genomic RNA
acatcgcaatgcccctgta

SEQ ID NO: 15353 - RNA, 19 nt, Homo sapiens
  source 1..19: mol_type = genomic RNA
catcgcaatgcccctgtag

SEQ ID NO: 15354 - RNA, 19 nt, Homo sapiens
  source 1..19: mol_type = genomic RNA
atcgcaatgcccctgtagg

SEQ ID NO: 15355 - RNA, 19 nt, Homo sapiens
  source 1..19: mol_type = genomic RNA
tcgcaatgcccctgtaggc

SEQ ID NO: 15356 - RNA, 19 nt, Homo sapiens
  source 1..19: mol_type = genomic RNA
cgcaatgcccctgtaggca

SEQ ID NO: 15357 - RNA, 19 nt, Homo sapiens
  source 1..19: mol_type = genomic RNA
cccctgtaggcagagcctt

SEQ ID NO: 15358 - RNA, 19 nt, Homo sapiens
  source 1..19: mol_type = genomic RNA
ccctgtaggcagagccttg

SEQ ID NO: 15359 - RNA, 19 nt, Homo sapiens
  source 1..19: mol_type = genomic RNA
cctgtaggcagagccttga

SEQ ID NO: 15360 - RNA, 19 nt, Homo sapiens
  source 1..19: mol_type = genomic RNA
ctgtaggcagagccttgac

SEQ ID NO: 15361 - RNA, 19 nt, Homo sapiens
  source 1..19: mol_type = genomic RNA
tgtaggcagagccttgaca

SEQ ID NO: 15362 - RNA, 19 nt, Homo sapiens
  source 1..19: mol_type = genomic RNA
gtaggcagagccttgacaa

SEQ ID NO: 15363 - RNA, 19 nt, Homo sapiens
  source 1..19: mol_type = genomic RNA
taggcagagccttgacaag

SEQ ID NO: 15364 - RNA, 19 nt, Homo sapiens
  source 1..19: mol_type = genomic RNA
aggcagagccttgacaagt

SEQ ID NO: 15365 - RNA, 19 nt, Homo sapiens
  source 1..19: mol_type = genomic RNA
ggcagagccttgacaagtg

SEQ ID NO: 15366 - RNA, 19 nt, Homo sapiens
  source 1..19: mol_type = genomic RNA
gcagagccttgacaagtgg

SEQ ID NO: 15367 - RNA, 19 nt, Homo sapiens
  source 1..19: mol_type = genomic RNA
cagagccttgacaagtggt

SEQ ID NO: 15368 - RNA, 19 nt, Homo sapiens
  source 1..19: mol_type = genomic RNA
agagccttgacaagtggta

SEQ ID NO: 15369 - RNA, 19 nt, Homo sapiens
  source 1..19: mol_type = genomic RNA
gagccttgacaagtggtac

SEQ ID NO: 15370 - RNA, 19 nt, Homo sapiens
  source 1..19: mol_type = genomic RNA
agccttgacaagtggtaca

SEQ ID NO: 15371 - RNA, 19 nt, Homo sapiens
  source 1..19: mol_type = genomic RNA
gccttgacaagtggtacat

SEQ ID NO: 15372 - RNA, 19 nt, Homo sapiens
  source 1..19: mol_type = genomic RNA
ccttgacaagtggtacatc

SEQ ID NO: 15373 - RNA, 19 nt, Homo sapiens
  source 1..19: mol_type = genomic RNA
cttgacaagtggtacatca

SEQ ID NO: 15374 - RNA, 19 nt, Homo sapiens
  source 1..19: mol_type = genomic RNA
ttgacaagtggtacatcac

SEQ ID NO: 15375 - RNA, 19 nt, Homo sapiens
  source 1..19: mol_type = genomic RNA
gtcacaaagcaccctgtaa

SEQ ID NO: 15376 - RNA, 19 nt, Homo sapiens
  source 1..19: mol_type = genomic RNA
tcacaaagcaccctgtaag

SEQ ID NO: 15377 - RNA, 19 nt, Homo sapiens
  source 1..19: mol_type = genomic RNA
cacaaagcaccctgtaagc

SEQ ID NO: 15378 - RNA, 19 nt, Homo sapiens
  source 1..19: mol_type = genomic RNA
acaaagcaccctgtaagca

SEQ ID NO: 15379 - RNA, 19 nt, Homo sapiens
  source 1..19: mol_type = genomic RNA
caaagcaccctgtaagcag

SEQ ID NO: 15380 - RNA, 19 nt, Homo sapiens
  source 1..19: mol_type = genomic RNA
aaagcaccctgtaagcaga

SEQ ID NO: 15381 - RNA, 19 nt, Homo sapiens
  source 1..19: mol_type = genomic RNA
aagcaccctgtaagcagat

SEQ ID NO: 15382 - RNA, 19 nt, Homo sapiens
  source 1..19: mol_type = genomic RNA
agcaccctgtaagcagatc

SEQ ID NO: 15383 - RNA, 19 nt, Homo sapiens
  source 1..19: mol_type = genomic RNA
gcaccctgtaagcagatcc

SEQ ID NO: 15384 - RNA, 19 nt, Homo sapiens
  source 1..19: mol_type = genomic RNA
caccctgtaagcagatcct

SEQ ID NO: 15385 - RNA, 19 nt, Homo sapiens
  source 1..19: mol_type = genomic RNA
accctgtaagcagatccta

SEQ ID NO: 15386 - RNA, 19 nt, Homo sapiens
  source 1..19: mol_type = genomic RNA
ccctgtaagcagatcctag

SEQ ID NO: 15387 - RNA, 19 nt, Homo sapiens
  source 1..19: mol_type = genomic RNA
cctgtaagcagatcctaga

SEQ ID NO: 15388 - RNA, 19 nt, Homo sapiens
  source 1..19: mol_type = genomic RNA
ctgtaagcagatcctagag

SEQ ID NO: 15389 - RNA, 19 nt, Homo sapiens
  source 1..19: mol_type = genomic RNA
tgtaagcagatcctagaga

SEQ ID NO: 15390 - RNA, 19 nt, Homo sapiens
  source 1..19: mol_type = genomic RNA
gtaagcagatcctagagaa

SEQ ID NO: 15391 - RNA, 19 nt, Homo sapiens
  source 1..19: mol_type = genomic RNA
taagcagatcctagagaag

SEQ ID NO: 15392 - RNA, 19 nt, Homo sapiens
  source 1..19: mol_type = genomic RNA
aagcagatcctagagaaga

SEQ ID NO: 15393 - RNA, 19 nt, Homo sapiens
  source 1..19: mol_type = genomic RNA
agcagatcctagagaagag

SEQ ID NO: 15394 - RNA, 19 nt, Homo sapiens
  source 1..19: mol_type = genomic RNA
gcagatcctagagaagagt

SEQ ID NO: 15395 - RNA, 19 nt, Homo sapiens
  source 1..19: mol_type = genomic RNA
cagatcctagagaagagtt

SEQ ID NO: 15396 - RNA, 19 nt, Homo sapiens
  source 1..19: mol_type = genomic RNA
agatcctagagaagagtta

SEQ ID NO: 15397 - RNA, 19 nt, Homo sapiens
  source 1..19: mol_type = genomic RNA
gatcctagagaagagttat

SEQ ID NO: 15398 - RNA, 19 nt, Homo sapiens
  source 1..19: mol_type = genomic RNA
atcctagagaagagttata

SEQ ID NO: 15399 - RNA, 19 nt, Homo sapiens
  source 1..19: mol_type = genomic RNA
tcctagagaagagttatat

SEQ ID NO: 15400 - RNA, 19 nt, Homo sapiens
  source 1..19: mol_type = genomic RNA
cctagagaagagttatatc

SEQ ID NO: 15401 - RNA, 19 nt, Homo sapiens
  source 1..19: mol_type = genomic RNA
tagagaagagttatatcac

SEQ ID NO: 15402 - RNA, 19 nt, Homo sapiens
  source 1..19: mol_type = genomic RNA
agagaagagttatatcacc

SEQ ID NO: 15403 - RNA, 19 nt, Homo sapiens
  source 1..19: mol_type = genomic RNA
gagaagagttatatcacct

SEQ ID NO: 15404 - RNA, 19 nt, Homo sapiens
  source 1..19: mol_type = genomic RNA
agaagagttatatcacctg

SEQ ID NO: 15405 - RNA, 19 nt, Homo sapiens
  source 1..19: mol_type = genomic RNA
gaagagttatatcacctgg

SEQ ID NO: 15406 - RNA, 19 nt, Homo sapiens
  source 1..19: mol_type = genomic RNA
aagagttatatcacctggg

SEQ ID NO: 15407 - RNA, 19 nt, Homo sapiens
  source 1..19: mol_type = genomic RNA
agagttatatcacctgggt

SEQ ID NO: 15408 - RNA, 19 nt, Homo sapiens
  source 1..19: mol_type = genomic RNA
gagttatatcacctgggtg

SEQ ID NO: 15409 - RNA, 19 nt, Homo sapiens
  source 1..19: mol_type = genomic RNA
agttatatcacctgggtga

SEQ ID NO: 15410 - RNA, 19 nt, Homo sapiens
  source 1..19: mol_type = genomic RNA
gttatatcacctgggtgat

SEQ ID NO: 15411 - RNA, 19 nt, Homo sapiens
  source 1..19: mol_type = genomic RNA
ttatatcacctgggtgatc

SEQ ID NO: 15412 - RNA, 19 nt, Homo sapiens
  source 1..19: mol_type = genomic RNA
tatatcacctgggtgatca

SEQ ID NO: 15413 - RNA, 19 nt, Homo sapiens
  source 1..19: mol_type = genomic RNA
atatcacctgggtgatcag

SEQ ID NO: 15414 - RNA, 19 nt, Homo sapiens
  source 1..19: mol_type = genomic RNA
tatcacctgggtgatcagt

SEQ ID NO: 15415 - RNA, 19 nt, Homo sapiens
  source 1..19: mol_type = genomic RNA
tgcagagatatgtcacaag

SEQ ID NO: 15416 - RNA, 19 nt, Homo sapiens
  source 1..19: mol_type = genomic RNA
gcagagatatgtcacaagc

SEQ ID NO: 15417 - RNA, 19 nt, Homo sapiens
  source 1..19: mol_type = genomic RNA
cagagatatgtcacaagcc

SEQ ID NO: 15418 - RNA, 19 nt, Homo sapiens
  source 1..19: mol_type = genomic RNA
agagatatgtcacaagccc

SEQ ID NO: 15419 - RNA, 19 nt, Homo sapiens
  source 1..19: mol_type = genomic RNA
gagatatgtcacaagcccc

SEQ ID NO: 15420 - RNA, 19 nt, Homo sapiens
  source 1..19: mol_type = genomic RNA
agatatgtcacaagccccc

SEQ ID NO: 15421 - RNA, 19 nt, Homo sapiens
  source 1..19: mol_type = genomic RNA
gatatgtcacaagccccct

SEQ ID NO: 15422 - RNA, 19 nt, Homo sapiens
  source 1..19: mol_type = genomic RNA
atatgtcacaagccccctg

SEQ ID NO: 15423 - RNA, 19 nt, Homo sapiens
  source 1..19: mol_type = genomic RNA
tatgtcacaagccccctgt

SEQ ID NO: 15424 - RNA, 19 nt, Homo sapiens
  source 1..19: mol_type = genomic RNA
atgtcacaagccccctgta

SEQ ID NO: 15425 - RNA, 19 nt, Homo sapiens
  source 1..19: mol_type = genomic RNA
tgtcacaagccccctgtag

SEQ ID NO: 15426 - RNA, 19 nt, Homo sapiens
  source 1..19: mol_type = genomic RNA
gtcacaagccccctgtagg

SEQ ID NO: 15427 - RNA, 19 nt, Homo sapiens
  source 1..19: mol_type = genomic RNA
cctagacaagagttatatc

SEQ ID NO: 15428 - RNA, 19 nt, Homo sapiens
  source 1..19: mol_type = genomic RNA
tagacaagagttatatcac

SEQ ID NO: 15429 - RNA, 19 nt, Homo sapiens
  source 1..19: mol_type = genomic RNA
agacaagagttatatcacc

SEQ ID NO: 15430 - RNA, 19 nt, Homo sapiens
  source 1..19: mol_type = genomic RNA
gacaagagttatatcacct

SEQ ID NO: 15431 - RNA, 19 nt, Homo sapiens
  source 1..19: mol_type = genomic RNA
acaagagttatatcacctg

SEQ ID NO: 15432 - RNA, 19 nt, Homo sapiens
  source 1..19: mol_type = genomic RNA
caagagttatatcacctgg

SEQ ID NO: 15433 - RNA, 19 nt, Homo sapiens
  source 1..19: mol_type = genomic RNA
cctgggtgatcagtgcagt

SEQ ID NO: 15434 - RNA, 19 nt, Homo sapiens
  source 1..19: mol_type = genomic RNA
ctgggtgatcagtgcagtg

SEQ ID NO: 15435 - RNA, 19 nt, Homo sapiens
  source 1..19: mol_type = genomic RNA
tgggtgatcagtgcagtga

SEQ ID NO: 15436 - RNA, 19 nt, Homo sapiens
  source 1..19: mol_type = genomic RNA
gggtgatcagtgcagtgat

SEQ ID NO: 15437 - RNA, 19 nt, Homo sapiens
  source 1..19: mol_type = genomic RNA
gtgtagccagagcctagac

SEQ ID NO: 15438 - RNA, 19 nt, Homo sapiens
  source 1..19: mol_type = genomic RNA
aaagttacagcacctggga

SEQ ID NO: 15439 - RNA, 19 nt, Homo sapiens
  source 1..19: mol_type = genomic RNA
aagttacagcacctgggag

SEQ ID NO: 15440 - RNA, 19 nt, Homo sapiens
  source 1..19: mol_type = genomic RNA
agttacagcacctgggaga

SEQ ID NO: 15441 - RNA, 19 nt, Homo sapiens
  source 1..19: mol_type = genomic RNA
gttacagcacctgggagat

SEQ ID NO: 15442 - RNA, 19 nt, Homo sapiens
  source 1..19: mol_type = genomic RNA
ttacagcacctgggagatc

SEQ ID NO: 15443 - RNA, 19 nt, Homo sapiens
  source 1..19: mol_type = genomic RNA
tacagcacctgggagatca

SEQ ID NO: 15444 - RNA, 19 nt, Homo sapiens
  source 1..19: mol_type = genomic RNA
cagcacctgggagatcagt

SEQ ID NO: 15445 - RNA, 19 nt, Homo sapiens
  source 1..19: mol_type = genomic RNA
agcacctgggagatcagtg

SEQ ID NO: 15446 - RNA, 19 nt, Homo sapiens
  source 1..19: mol_type = genomic RNA
cacctgggagatcagtgca

SEQ ID NO: 15447 - RNA, 19 nt, Homo sapiens
  source 1..19: mol_type = genomic RNA
acctgggagatcagtgcag

SEQ ID NO: 15448 - RNA, 19 nt, Homo sapiens
  source 1..19: mol_type = genomic RNA
cctgggagatcagtgcaga

SEQ ID NO: 15449 - RNA, 19 nt, Homo sapiens
  source 1..19: mol_type = genomic RNA
ctgggagatcagtgcagag

SEQ ID NO: 15450 - RNA, 19 nt, Homo sapiens
  source 1..19: mol_type = genomic RNA
tgggagatcagtgcagaga

SEQ ID NO: 15451 - RNA, 19 nt, Homo sapiens
  source 1..19: mol_type = genomic RNA
gggagatcagtgcagagat

SEQ ID NO: 15452 - RNA, 19 nt, Homo sapiens
  source 1..19: mol_type = genomic RNA
ggagatcagtgcagagata

SEQ ID NO: 15453 - RNA, 19 nt, Homo sapiens
  source 1..19: mol_type = genomic RNA
gagatcagtgcagagatat

SEQ ID NO: 15454 - RNA, 19 nt, Homo sapiens
  source 1..19: mol_type = genomic RNA
agatcagtgcagagatatg

SEQ ID NO: 15455 - RNA, 19 nt, Homo sapiens
  source 1..19: mol_type = genomic RNA
atatgtcacaatgtcccca

SEQ ID NO: 15456 - RNA, 19 nt, Homo sapiens
  source 1..19: mol_type = genomic RNA
tatgtcacaatgtccccag

SEQ ID NO: 15457 - RNA, 19 nt, Homo sapiens
  source 1..19: mol_type = genomic RNA
atgtcacaatgtccccagt

SEQ ID NO: 15458 - RNA, 19 nt, Homo sapiens
  source 1..19: mol_type = genomic RNA
tgtcacaatgtccccagta

SEQ ID NO: 15459 - RNA, 19 nt, Homo sapiens
  source 1..19: mol_type = genomic RNA
gtcacaatgtccccagtag

SEQ ID NO: 15460 - RNA, 19 nt, Homo sapiens
  source 1..19: mol_type = genomic RNA
tcacaatgtccccagtagg

SEQ ID NO: 15461 - RNA, 19 nt, Homo sapiens
  source 1..19: mol_type = genomic RNA
cacaatgtccccagtaggc

SEQ ID NO: 15462 - RNA, 19 nt, Homo sapiens
  source 1..19: mol_type = genomic RNA
acaatgtccccagtaggca

SEQ ID NO: 15463 - RNA, 19 nt, Homo sapiens
  source 1..19: mol_type = genomic RNA
caatgtccccagtaggcag

SEQ ID NO: 15464 - RNA, 19 nt, Homo sapiens
  source 1..19: mol_type = genomic RNA
aatgtccccagtaggcaga

SEQ ID NO: 15465 - RNA, 19 nt, Homo sapiens
  source 1..19: mol_type = genomic RNA
atgtccccagtaggcagag

SEQ ID NO: 15466 - RNA, 19 nt, Homo sapiens
  source 1..19: mol_type = genomic RNA
tgtccccagtaggcagaga

SEQ ID NO: 15467 - RNA, 19 nt, Homo sapiens
  source 1..19: mol_type = genomic RNA
cagagaccaggcaagagtt

SEQ ID NO: 15468 - RNA, 19 nt, Homo sapiens
  source 1..19: mol_type = genomic RNA
agagaccaggcaagagttg

SEQ ID NO: 15469 - RNA, 19 nt, Homo sapiens
  source 1..19: mol_type = genomic RNA
gagaccaggcaagagttgg

SEQ ID NO: 15470 - RNA, 19 nt, Homo sapiens
  source 1..19: mol_type = genomic RNA
agaccaggcaagagttgga

SEQ ID NO: 15471 - RNA, 19 nt, Homo sapiens
  source 1..19: mol_type = genomic RNA
gaccaggcaagagttggat

SEQ ID NO: 15472 - RNA, 19 nt, Homo sapiens
  source 1..19: mol_type = genomic RNA
accaggcaagagttggatc

SEQ ID NO: 15473 - RNA, 19 nt, Homo sapiens
  source 1..19: mol_type = genomic RNA
ccaggcaagagttggatca

SEQ ID NO: 15474 - RNA, 19 nt, Homo sapiens
  source 1..19: mol_type = genomic RNA
caggcaagagttggatcac

SEQ ID NO: 15475 - RNA, 19 nt, Homo sapiens
  source 1..19: mol_type = genomic RNA
aggcaagagttggatcacc

SEQ ID NO: 15476 - RNA, 19 nt, Homo sapiens
  source 1..19: mol_type = genomic RNA
ggcaagagttggatcacct

SEQ ID NO: 15477 - RNA, 19 nt, Homo sapiens
  source 1..19: mol_type = genomic RNA
gcaagagttggatcacctc

SEQ ID NO: 15478 - RNA, 19 nt, Homo sapiens
  source 1..19: mol_type = genomic RNA
caagagttggatcacctcg

SEQ ID NO: 15479 - RNA, 19 nt, Homo sapiens
  source 1..19: mol_type = genomic RNA
aagagttggatcacctcgg

SEQ ID NO: 15480 - RNA, 19 nt, Homo sapiens
  source 1..19: mol_type = genomic RNA
agagttggatcacctcggg

SEQ ID NO: 15481 - RNA, 19 nt, Homo sapiens
  source 1..19: mol_type = genomic RNA
gagttggatcacctcggga

SEQ ID NO: 15482 - RNA, 19 nt, Homo sapiens
  source 1..19: mol_type = genomic RNA
agttggatcacctcgggat

SEQ ID NO: 15483 - RNA, 19 nt, Homo sapiens
  source 1..19: mol_type = genomic RNA
gttggatcacctcgggatc

SEQ ID NO: 15484 - RNA, 19 nt, Homo sapiens
  source 1..19: mol_type = genomic RNA
ttggatcacctcgggatca

SEQ ID NO: 15485 - RNA, 19 nt, Homo sapiens
  source 1..19: mol_type = genomic RNA
tggatcacctcgggatcag

SEQ ID NO: 15486 - RNA, 19 nt, Homo sapiens
  source 1..19: mol_type = genomic RNA
ggatcacctcgggatcagt

SEQ ID NO: 15487 - RNA, 19 nt, Homo sapiens
  source 1..19: mol_type = genomic RNA
gatcacctcgggatcagtg

SEQ ID NO: 15488 - RNA, 19 nt, Homo sapiens
  source 1..19: mol_type = genomic RNA
atcacctcgggatcagtgc

SEQ ID NO: 15489 - RNA, 19 nt, Homo sapiens
  source 1..19: mol_type = genomic RNA
tcacctcgggatcagtgca

SEQ ID NO: 15490 - RNA, 19 nt, Homo sapiens
  source 1..19: mol_type = genomic RNA
cacctcgggatcagtgcag

SEQ ID NO: 15491 - RNA, 19 nt, Homo sapiens
  source 1..19: mol_type = genomic RNA
acctcgggatcagtgcaga

SEQ ID NO: 15492 - RNA, 19 nt, Homo sapiens
  source 1..19: mol_type = genomic RNA
cctcgggatcagtgcagag

SEQ ID NO: 15493 - RNA, 19 nt, Homo sapiens
  source 1..19: mol_type = genomic RNA
ctcgggatcagtgcagaga

SEQ ID NO: 15494 - RNA, 19 nt, Homo sapiens
  source 1..19: mol_type = genomic RNA
tcgggatcagtgcagagat

SEQ ID NO: 15495 - RNA, 19 nt, Homo sapiens
  source 1..19: mol_type = genomic RNA
cgggatcagtgcagagata

SEQ ID NO: 15496 - RNA, 19 nt, Homo sapiens
  source 1..19: mol_type = genomic RNA
gggatcagtgcagagatat

SEQ ID NO: 15497 - RNA, 19 nt, Homo sapiens
  source 1..19: mol_type = genomic RNA
ggatcagtgcagagatatg

SEQ ID NO: 15498 - RNA, 19 nt, Homo sapiens
  source 1..19: mol_type = genomic RNA
tcagtgcagagatatgtct

SEQ ID NO: 15499 - RNA, 19 nt, Homo sapiens
  source 1..19: mol_type = genomic RNA
cagtgcagagatatgtctc

SEQ ID NO: 15500 - RNA, 19 nt, Homo sapiens
  source 1..19: mol_type = genomic RNA
agtgcagagatatgtctca

SEQ ID NO: 15501 - RNA, 19 nt, Homo sapiens
  source 1..19: mol_type = genomic RNA
gtgcagagatatgtctcaa

SEQ ID NO: 15502 - RNA, 19 nt, Homo sapiens
  source 1..19: mol_type = genomic RNA
tgcagagatatgtctcaat

SEQ ID NO: 15503 - RNA, 19 nt, Homo sapiens
  source 1..19: mol_type = genomic RNA
gcagagatatgtctcaatc

SEQ ID NO: 15504 - RNA, 19 nt, Homo sapiens
  source 1..19: mol_type = genomic RNA
cagagatatgtctcaatcc

SEQ ID NO: 15505 - RNA, 19 nt, Homo sapiens
  source 1..19: mol_type = genomic RNA
agagatatgtctcaatccc

SEQ ID NO: 15506 - RNA, 19 nt, Homo sapiens
  source 1..19: mol_type = genomic RNA
gagatatgtctcaatcccc

SEQ ID NO: 15507 - RNA, 19 nt, Homo sapiens
  source 1..19: mol_type = genomic RNA
agatatgtctcaatccccc

SEQ ID NO: 15508 - RNA, 19 nt, Homo sapiens
  source 1..19: mol_type = genomic RNA
gatatgtctcaatccccct

SEQ ID NO: 15509 - RNA, 19 nt, Homo sapiens
  source 1..19: mol_type = genomic RNA
atatgtctcaatccccctg

SEQ ID NO: 15510 - RNA, 19 nt, Homo sapiens
  source 1..19: mol_type = genomic RNA
tatgtctcaatccccctgt

SEQ ID NO: 15511 - RNA, 19 nt, Homo sapiens
  source 1..19: mol_type = genomic RNA
atgtctcaatccccctgtg

SEQ ID NO: 15512 - RNA, 19 nt, Homo sapiens
  source 1..19: mol_type = genomic RNA
tgtctcaatccccctgtgg

SEQ ID NO: 15513 - RNA, 19 nt, Homo sapiens
  source 1..19: mol_type = genomic RNA
gtctcaatccccctgtggg

SEQ ID NO: 15514 - RNA, 19 nt, Homo sapiens
  source 1..19: mol_type = genomic RNA
tctcaatccccctgtgggc

SEQ ID NO: 15515 - RNA, 19 nt, Homo sapiens
  source 1..19: mol_type = genomic RNA
ctcaatccccctgtgggca

SEQ ID NO: 15516 - RNA, 19 nt, Homo sapiens
  source 1..19: mol_type = genomic RNA
caatccccctgtgggcaca

SEQ ID NO: 15517 - RNA, 19 nt, Homo sapiens
  source 1..19: mol_type = genomic RNA
gcacagcctagacaagagt

SEQ ID NO: 15518 - RNA, 19 nt, Homo sapiens
  source 1..19: mol_type = genomic RNA
cacagcctagacaagagtt

SEQ ID NO: 15519 - RNA, 19 nt, Homo sapiens
  source 1..19: mol_type = genomic RNA
acagcctagacaagagtta

SEQ ID NO: 15520 - RNA, 19 nt, Homo sapiens
  source 1..19: mol_type = genomic RNA
atcacctcggttaacagtg

SEQ ID NO: 15521 - RNA, 19 nt, Homo sapiens
  source 1..19: mol_type = genomic RNA
tcacctcggttaacagtgc

SEQ ID NO: 15522 - RNA, 19 nt, Homo sapiens
  source 1..19: mol_type = genomic RNA
cacctcggttaacagtgca

SEQ ID NO: 15523 - RNA, 19 nt, Homo sapiens
  source 1..19: mol_type = genomic RNA
acctcggttaacagtgcag

SEQ ID NO: 15524 - RNA, 19 nt, Homo sapiens
  source 1..19: mol_type = genomic RNA
cctcggttaacagtgcaga

SEQ ID NO: 15525 - RNA, 19 nt, Homo sapiens
  source 1..19: mol_type = genomic RNA
ctcggttaacagtgcagag

SEQ ID NO: 15526 - RNA, 19 nt, Homo sapiens
  source 1..19: mol_type = genomic RNA
tcggttaacagtgcagaga

SEQ ID NO: 15527 - RNA, 19 nt, Homo sapiens
  source 1..19: mol_type = genomic RNA
cggttaacagtgcagagat

SEQ ID NO: 15528 - RNA, 19 nt, Homo sapiens
  source 1..19: mol_type = genomic RNA
ggttaacagtgcagagata

SEQ ID NO: 15529 - RNA, 19 nt, Homo sapiens
  source 1..19: mol_type = genomic RNA
gttaacagtgcagagatat

SEQ ID NO: 15530 - RNA, 19 nt, Homo sapiens
  source 1..19: mol_type = genomic RNA
ttaacagtgcagagatatg

SEQ ID NO: 15531 - RNA, 19 nt, Homo sapiens
  source 1..19: mol_type = genomic RNA
taacagtgcagagatatgt

SEQ ID NO: 15532 - RNA, 19 nt, Homo sapiens
  source 1..19: mol_type = genomic RNA
aacagtgcagagatatgtc

SEQ ID NO: 15533 - RNA, 19 nt, Homo sapiens
  source 1..19: mol_type = genomic RNA
acagtgcagagatatgtca

SEQ ID NO: 15534 - RNA, 19 nt, Homo sapiens
  source 1..19: mol_type = genomic RNA
cagtgcagagatatgtcaa

SEQ ID NO: 15535 - RNA, 19 nt, Homo sapiens
  source 1..19: mol_type = genomic RNA
agtgcagagatatgtcaaa

SEQ ID NO: 15536 - RNA, 19 nt, Homo sapiens
  source 1..19: mol_type = genomic RNA
gtgcagagatatgtcaaaa

SEQ ID NO: 15537 - RNA, 19 nt, Homo sapiens
  source 1..19: mol_type = genomic RNA
tgcagagatatgtcaaaat

SEQ ID NO: 15538 - RNA, 19 nt, Homo sapiens
  source 1..19: mol_type = genomic RNA
gcagagatatgtcaaaatg

SEQ ID NO: 15539 - RNA, 19 nt, Homo sapiens
  source 1..19: mol_type = genomic RNA
cagagatatgtcaaaatgc

SEQ ID NO: 15540 - RNA, 19 nt, Homo sapiens
  source 1..19: mol_type = genomic RNA
agagatatgtcaaaatgcc

SEQ ID NO: 15541 - RNA, 19 nt, Homo sapiens
  source 1..19: mol_type = genomic RNA
gagatatgtcaaaatgccc

SEQ ID NO: 15542 - RNA, 19 nt, Homo sapiens
  source 1..19: mol_type = genomic RNA
agatatgtcaaaatgcccc

SEQ ID NO: 15543 - RNA, 19 nt, Homo sapiens
  source 1..19: mol_type = genomic RNA
gatatgtcaaaatgcccct

SEQ ID NO: 15544 - RNA, 19 nt, Homo sapiens
  source 1..19: mol_type = genomic RNA
atatgtcaaaatgcccctg

SEQ ID NO: 15545 - RNA, 19 nt, Homo sapiens
  source 1..19: mol_type = genomic RNA
tatgtcaaaatgcccctgt

SEQ ID NO: 15546 - RNA, 19 nt, Homo sapiens
  source 1..19: mol_type = genomic RNA
atgtcaaaatgcccctgta

SEQ ID NO: 15547 - RNA, 19 nt, Homo sapiens
  source 1..19: mol_type = genomic RNA
tgtcaaaatgcccctgtag

SEQ ID NO: 15548 - RNA, 19 nt, Homo sapiens
  source 1..19: mol_type = genomic RNA
gtcaaaatgcccctgtagg

SEQ ID NO: 15549 - RNA, 19 nt, Homo sapiens
  source 1..19: mol_type = genomic RNA
tcaaaatgcccctgtaggc

SEQ ID NO: 15550 - RNA, 19 nt, Homo sapiens
  source 1..19: mol_type = genomic RNA
caaaatgcccctgtaggca

SEQ ID NO: 15551 - RNA, 19 nt, Homo sapiens
  source 1..19: mol_type = genomic RNA
aaaatgcccctgtaggcaa

SEQ ID NO: 15552 - RNA, 19 nt, Homo sapiens
  source 1..19: mol_type = genomic RNA
aaatgcccctgtaggcaag

SEQ ID NO: 15553 - RNA, 19 nt, Homo sapiens
  source 1..19: mol_type = genomic RNA
ccctgtaggcaagcctaca

SEQ ID NO: 15554 - RNA, 19 nt, Homo sapiens
  source 1..19: mol_type = genomic RNA
cctgtaggcaagcctacac

SEQ ID NO: 15555 - RNA, 19 nt, Homo sapiens
  source 1..19: mol_type = genomic RNA
ctgtaggcaagcctacaca

SEQ ID NO: 15556 - RNA, 19 nt, Homo sapiens
  source 1..19: mol_type = genomic RNA
tgtaggcaagcctacacaa

SEQ ID NO: 15557 - RNA, 19 nt, Homo sapiens
  source 1..19: mol_type = genomic RNA
gtaggcaagcctacacaag

SEQ ID NO: 15558 - RNA, 19 nt, Homo sapiens
  source 1..19: mol_type = genomic RNA
taggcaagcctacacaagt

SEQ ID NO: 15559 - RNA, 19 nt, Homo sapiens
  source 1..19: mol_type = genomic RNA
aggcaagcctacacaagta

SEQ ID NO: 15560 - RNA, 19 nt, Homo sapiens
  source 1..19: mol_type = genomic RNA
ggcaagcctacacaagtat

SEQ ID NO: 15561 - RNA, 19 nt, Homo sapiens
  source 1..19: mol_type = genomic RNA
gcaagcctacacaagtatt

SEQ ID NO: 15562 - RNA, 19 nt, Homo sapiens
  source 1..19: mol_type = genomic RNA
caagcctacacaagtatta

SEQ ID NO: 15563 - RNA, 19 nt, Homo sapiens
  source 1..19: mol_type = genomic RNA
aagcctacacaagtattac

SEQ ID NO: 15564 - RNA, 19 nt, Homo sapiens
  source 1..19: mol_type = genomic RNA
agcctacacaagtattaca

SEQ ID NO: 15565 - RNA, 19 nt, Homo sapiens
  source 1..19: mol_type = genomic RNA
gcctacacaagtattacat

SEQ ID NO: 15566 - RNA, 19 nt, Homo sapiens
  source 1..19: mol_type = genomic RNA
acacaagtattacatcact

SEQ ID NO: 15567 - RNA, 19 nt, Homo sapiens
  source 1..19: mol_type = genomic RNA
cagagatatgtcacaatac

SEQ ID NO: 15568 - RNA, 19 nt, Homo sapiens
  source 1..19: mol_type = genomic RNA
agagatatgtcacaatacc

SEQ ID NO: 15569 - RNA, 19 nt, Homo sapiens
  source 1..19: mol_type = genomic RNA
gagatatgtcacaataccc

SEQ ID NO: 15570 - RNA, 19 nt, Homo sapiens
  source 1..19: mol_type = genomic RNA
agatatgtcacaatacccc

SEQ ID NO: 15571 - RNA, 19 nt, Homo sapiens
  source 1..19: mol_type = genomic RNA
gatatgtcacaataccccc

SEQ ID NO: 15572 - RNA, 19 nt, Homo sapiens
  source 1..19: mol_type = genomic RNA
atatgtcacaataccccct

SEQ ID NO: 15573 - RNA, 19 nt, Homo sapiens
  source 1..19: mol_type = genomic RNA
tatgtcacaataccccctg

SEQ ID NO: 15574 - RNA, 19 nt, Homo sapiens
  source 1..19: mol_type = genomic RNA
atgtcacaataccccctgt

SEQ ID NO: 15575 - RNA, 19 nt, Homo sapiens
  source 1..19: mol_type = genomic RNA
tgtcacaataccccctgta

SEQ ID NO: 15576 - RNA, 19 nt, Homo sapiens
  source 1..19: mol_type = genomic RNA
gtcacaataccccctgtaa

SEQ ID NO: 15577 - RNA, 19 nt, Homo sapiens
  source 1..19: mol_type = genomic RNA
tcacaataccccctgtaag

SEQ ID NO: 15578 - RNA, 19 nt, Homo sapiens
  source 1..19: mol_type = genomic RNA
cacaataccccctgtaagc

SEQ ID NO: 15579 - RNA, 19 nt, Homo sapiens
  source 1..19: mol_type = genomic RNA
acaataccccctgtaagca

SEQ ID NO: 15580 - RNA, 19 nt, Homo sapiens
  source 1..19: mol_type = genomic RNA
caataccccctgtaagcag

SEQ ID NO: 15581 - RNA, 19 nt, Homo sapiens
  source 1..19: mol_type = genomic RNA
aataccccctgtaagcaga

SEQ ID NO: 15582 - RNA, 19 nt, Homo sapiens
  source 1..19: mol_type = genomic RNA
ataccccctgtaagcagag

SEQ ID NO: 15583 - RNA, 19 nt, Homo sapiens
  source 1..19: mol_type = genomic RNA
taccccctgtaagcagagc

SEQ ID NO: 15584 - RNA, 19 nt, Homo sapiens
  source 1..19: mol_type = genomic RNA
cccctgtaagcagagccta

SEQ ID NO: 15585 - RNA, 19 nt, Homo sapiens
  source 1..19: mol_type = genomic RNA
ccctgtaagcagagcctag

SEQ ID NO: 15586 - RNA, 19 nt, Homo sapiens
  source 1..19: mol_type = genomic RNA
cctgtaagcagagcctaga

SEQ ID NO: 15587 - RNA, 19 nt, Homo sapiens
  source 1..19: mol_type = genomic RNA
ctgtaagcagagcctagac

SEQ ID NO: 15588 - RNA, 19 nt, Homo sapiens
  source 1..19: mol_type = genomic RNA
tgtaagcagagcctagaca

SEQ ID NO: 15589 - RNA, 19 nt, Homo sapiens
  source 1..19: mol_type = genomic RNA
gtaagcagagcctagacaa

SEQ ID NO: 15590 - RNA, 19 nt, Homo sapiens
  source 1..19: mol_type = genomic RNA
taagcagagcctagacaag

SEQ ID NO: 15591 - RNA, 19 nt, Homo sapiens
  source 1..19: mol_type = genomic RNA
aagcagagcctagacaaga

SEQ ID NO: 15592 - RNA, 19 nt, Homo sapiens
  source 1..19: mol_type = genomic RNA
agcagagcctagacaagag

SEQ ID NO: 15593 - RNA, 19 nt, Homo sapiens
  source 1..19: mol_type = genomic RNA
cagtgcagagatatgtgac

SEQ ID NO: 15594 - RNA, 19 nt, Homo sapiens
  source 1..19: mol_type = genomic RNA
agtgcagagatatgtgaca

SEQ ID NO: 15595 - RNA, 19 nt, Homo sapiens
  source 1..19: mol_type = genomic RNA
gtgcagagatatgtgacaa

SEQ ID NO: 15596 - RNA, 19 nt, Homo sapiens
  source 1..19: mol_type = genomic RNA
tgcagagatatgtgacaag

SEQ ID NO: 15597 - RNA, 19 nt, Homo sapiens
  source 1..19: mol_type = genomic RNA
gcagagatatgtgacaagg

SEQ ID NO: 15598 - RNA, 19 nt, Homo sapiens
  source 1..19: mol_type = genomic RNA
cagagatatgtgacaaggc

SEQ ID NO: 15599 - RNA, 19 nt, Homo sapiens
  source 1..19: mol_type = genomic RNA
agagatatgtgacaaggcc

SEQ ID NO: 15600 - RNA, 19 nt, Homo sapiens
  source 1..19: mol_type = genomic RNA
gagatatgtgacaaggccc

SEQ ID NO: 15601 - RNA, 19 nt, Homo sapiens
  source 1..19: mol_type = genomic RNA
agatatgtgacaaggcccc

SEQ ID NO: 15602 - RNA, 19 nt, Homo sapiens
  source 1..19: mol_type = genomic RNA
gatatgtgacaaggcccct

SEQ ID NO: 15603 - RNA, 19 nt, Homo sapiens
  source 1..19: mol_type = genomic RNA
atatgtgacaaggcccctt

SEQ ID NO: 15604 - RNA, 19 nt, Homo sapiens
  source 1..19: mol_type = genomic RNA
aagcagagcctagacaata

SEQ ID NO: 15605 - RNA, 19 nt, Homo sapiens
  source 1..19: mol_type = genomic RNA
agcagagcctagacaatag

SEQ ID NO: 15606 - RNA, 19 nt, Homo sapiens
  source 1..19: mol_type = genomic RNA
gcagagcctagacaatagt

SEQ ID NO: 15607 - RNA, 19 nt, Homo sapiens
  source 1..19: mol_type = genomic RNA
cagagcctagacaatagtt

SEQ ID NO: 15608 - RNA, 19 nt, Homo sapiens
  source 1..19: mol_type = genomic RNA
agagcctagacaatagtta

SEQ ID NO: 15609 - RNA, 19 nt, Homo sapiens
  source 1..19: mol_type = genomic RNA
gagcctagacaatagttac

SEQ ID NO: 15610 - RNA, 19 nt, Homo sapiens
  source 1..19: mol_type = genomic RNA
agacaatagttacatcacc

SEQ ID NO: 15611 - RNA, 19 nt, Homo sapiens
  source 1..19: mol_type = genomic RNA
gacaatagttacatcacct

SEQ ID NO: 15612 - RNA, 19 nt, Homo sapiens
  source 1..19: mol_type = genomic RNA
acaatagttacatcacctg

SEQ ID NO: 15613 - RNA, 19 nt, Homo sapiens
  source 1..19: mol_type = genomic RNA
caatagttacatcacctga

SEQ ID NO: 15614 - RNA, 19 nt, Homo sapiens
  source 1..19: mol_type = genomic RNA
aatagttacatcacctgag

SEQ ID NO: 15615 - RNA, 19 nt, Homo sapiens
  source 1..19: mol_type = genomic RNA
atagttacatcacctgagt

SEQ ID NO: 15616 - RNA, 19 nt, Homo sapiens
  source 1..19: mol_type = genomic RNA
tagttacatcacctgagtg

SEQ ID NO: 15617 - RNA, 19 nt, Homo sapiens
  source 1..19: mol_type = genomic RNA
agttacatcacctgagtga

SEQ ID NO: 15618 - RNA, 19 nt, Homo sapiens
  source 1..19: mol_type = genomic RNA
gttacatcacctgagtgat

SEQ ID NO: 15619 - RNA, 19 nt, Homo sapiens
  source 1..19: mol_type = genomic RNA
ttacatcacctgagtgatc

SEQ ID NO: 15620 - RNA, 19 nt, Homo sapiens
  source 1..19: mol_type = genomic RNA
tacatcacctgagtgatca

SEQ ID NO: 15621 - RNA, 19 nt, Homo sapiens
  source 1..19: mol_type = genomic RNA
acatcacctgagtgatcag

SEQ ID NO: 15622 - RNA, 19 nt, Homo sapiens
  source 1..19: mol_type = genomic RNA
catcacctgagtgatcagt

SEQ ID NO: 15623 - RNA, 19 nt, Homo sapiens
  source 1..19: mol_type = genomic RNA
atcacctgagtgatcagtg

SEQ ID NO: 15624 - RNA, 19 nt, Homo sapiens
  source 1..19: mol_type = genomic RNA
tcacctgagtgatcagtgc

SEQ ID NO: 15625 - RNA, 19 nt, Homo sapiens
  source 1..19: mol_type = genomic RNA
cacctgagtgatcagtgca

SEQ ID NO: 15626 - RNA, 19 nt, Homo sapiens
  source 1..19: mol_type = genomic RNA
acctgagtgatcagtgcag

SEQ ID NO: 15627 - RNA, 19 nt, Homo sapiens
  source 1..19: mol_type = genomic RNA
cctgagtgatcagtgcaga

SEQ ID NO: 15628 - RNA, 19 nt, Homo sapiens
  source 1..19: mol_type = genomic RNA
ctgagtgatcagtgcagag

SEQ ID NO: 15629 - RNA, 19 nt, Homo sapiens
  source 1..19: mol_type = genomic RNA
tgagtgatcagtgcagaga

SEQ ID NO: 15630 - RNA, 19 nt, Homo sapiens
  source 1..19: mol_type = genomic RNA
gagtgatcagtgcagagat

SEQ ID NO: 15631 - RNA, 19 nt, Homo sapiens
  source 1..19: mol_type = genomic RNA
agtgatcagtgcagagatc

SEQ ID NO: 15632 - RNA, 19 nt, Homo sapiens
  source 1..19: mol_type = genomic RNA
gtgatcagtgcagagatct

SEQ ID NO: 15633 - RNA, 19 nt, Homo sapiens
  source 1..19: mol_type = genomic RNA
tgatcagtgcagagatctg

SEQ ID NO: 15634 - RNA, 19 nt, Homo sapiens
  source 1..19: mol_type = genomic RNA
gatcagtgcagagatctgt

SEQ ID NO: 15635 - RNA, 19 nt, Homo sapiens
  source 1..19: mol_type = genomic RNA
atcagtgcagagatctgtc

SEQ ID NO: 15636 - RNA, 19 nt, Homo sapiens
  source 1..19: mol_type = genomic RNA
tcagtgcagagatctgtca

SEQ ID NO: 15637 - RNA, 19 nt, Homo sapiens
  source 1..19: mol_type = genomic RNA
cagtgcagagatctgtcac

SEQ ID NO: 15638 - RNA, 19 nt, Homo sapiens
  source 1..19: mol_type = genomic RNA
agtgcagagatctgtcaca

SEQ ID NO: 15639 - RNA, 19 nt, Homo sapiens
  source 1..19: mol_type = genomic RNA
gtgcagagatctgtcacaa

SEQ ID NO: 15640 - RNA, 19 nt, Homo sapiens
  source 1..19: mol_type = genomic RNA
tgcagagatctgtcacaat

SEQ ID NO: 15641 - RNA, 19 nt, Homo sapiens
  source 1..19: mol_type = genomic RNA
gcagagatctgtcacaatg

SEQ ID NO: 15642 - RNA, 19 nt, Homo sapiens
  source 1..19: mol_type = genomic RNA
cagagatctgtcacaatgc

SEQ ID NO: 15643 - RNA, 19 nt, Homo sapiens
  source 1..19: mol_type = genomic RNA
atctgtcacaatgcccctt

SEQ ID NO: 15644 - RNA, 19 nt, Homo sapiens
  source 1..19: mol_type = genomic RNA
tctgtcacaatgccccttt

SEQ ID NO: 15645 - RNA, 19 nt, Homo sapiens
  source 1..19: mol_type = genomic RNA
ctgtcacaatgccccttta

SEQ ID NO: 15646 - RNA, 19 nt, Homo sapiens
  source 1..19: mol_type = genomic RNA
tgtcacaatgcccctttag

SEQ ID NO: 15647 - RNA, 19 nt, Homo sapiens
  source 1..19: mol_type = genomic RNA
gtcacaatgcccctttagg

SEQ ID NO: 15648 - RNA, 19 nt, Homo sapiens
  source 1..19: mol_type = genomic RNA
tcacaatgcccctttaggc

SEQ ID NO: 15649 - RNA, 19 nt, Homo sapiens
  source 1..19: mol_type = genomic RNA
cacaatgcccctttaggca

SEQ ID NO: 15650 - RNA, 19 nt, Homo sapiens
  source 1..19: mol_type = genomic RNA
acaatgcccctttaggcag

SEQ ID NO: 15651 - RNA, 19 nt, Homo sapiens
  source 1..19: mol_type = genomic RNA
caatgcccctttaggcaga

SEQ ID NO: 15652 - RNA, 19 nt, Homo sapiens
  source 1..19: mol_type = genomic RNA
aatgcccctttaggcagag

SEQ ID NO: 15653 - RNA, 19 nt, Homo sapiens
  source 1..19: mol_type = genomic RNA
atgcccctttaggcagagc

SEQ ID NO: 15654 - RNA, 19 nt, Homo sapiens
  source 1..19: mol_type = genomic RNA
tgcccctttaggcagagct

SEQ ID NO: 15655 - RNA, 19 nt, Homo sapiens
  source 1..19: mol_type = genomic RNA
gcccctttaggcagagctt

SEQ ID NO: 15656 - RNA, 19 nt, Homo sapiens
  source 1..19: mol_type = genomic RNA
cccctttaggcagagctta

SEQ ID NO: 15657 - RNA, 19 nt, Homo sapiens
  source 1..19: mol_type = genomic RNA
ccctttaggcagagcttaa

SEQ ID NO: 15658 - RNA, 19 nt, Homo sapiens
  source 1..19: mol_type = genomic RNA
cctttaggcagagcttaaa

SEQ ID NO: 15659 - RNA, 19 nt, Homo sapiens
  source 1..19: mol_type = genomic RNA
ctttaggcagagcttaaac

SEQ ID NO: 15660 - RNA, 19 nt, Homo sapiens
  source 1..19: mol_type = genomic RNA
actagagttacatcacctg

SEQ ID NO: 15661 - RNA, 19 nt, Homo sapiens
  source 1..19: mol_type = genomic RNA
catcacctgtgtgatcagt

SEQ ID NO: 15662 - RNA, 19 nt, Homo sapiens
  source 1..19: mol_type = genomic RNA
atcacctgtgtgatcagtg

SEQ ID NO: 15663 - RNA, 19 nt, Homo sapiens
  source 1..19: mol_type = genomic RNA
gatcagtgcagaaatatgt

SEQ ID NO: 15664 - RNA, 19 nt, Homo sapiens
  source 1..19: mol_type = genomic RNA
ccctttaggcagagcttag

SEQ ID NO: 15665 - RNA, 19 nt, Homo sapiens
  source 1..19: mol_type = genomic RNA
cctttaggcagagcttaga

SEQ ID NO: 15666 - RNA, 19 nt, Homo sapiens
  source 1..19: mol_type = genomic RNA
ctttaggcagagcttagac

SEQ ID NO: 15667 - RNA, 19 nt, Homo sapiens
  source 1..19: mol_type = genomic RNA
tttaggcagagcttagact

SEQ ID NO: 15668 - RNA, 19 nt, Homo sapiens
  source 1..19: mol_type = genomic RNA
ttaggcagagcttagacta

SEQ ID NO: 15669 - RNA, 19 nt, Homo sapiens
  source 1..19: mol_type = genomic RNA
taggcagagcttagactag

SEQ ID NO: 15670 - RNA, 19 nt, Homo sapiens
  source 1..19: mol_type = genomic RNA
aggcagagcttagactaga

SEQ ID NO: 15671 - RNA, 19 nt, Homo sapiens
  source 1..19: mol_type = genomic RNA
ggcagagcttagactagag

SEQ ID NO: 15672 - RNA, 19 nt, Homo sapiens
  source 1..19: mol_type = genomic RNA
gcagagcttagactagagt

SEQ ID NO: 15673 - RNA, 19 nt, Homo sapiens
  source 1..19: mol_type = genomic RNA
cagagcttagactagagtt

SEQ ID NO: 15674 - RNA, 19 nt, Homo sapiens
  source 1..19: mol_type = genomic RNA
agagcttagactagagtta

SEQ ID NO: 15675 - RNA, 19 nt, Homo sapiens
  source 1..19: mol_type = genomic RNA
gagcttagactagagttac

SEQ ID NO: 15676 - RNA, 19 nt, Homo sapiens
  source 1..19: mol_type = genomic RNA
agcttagactagagttaca

SEQ ID NO: 15677 - RNA, 19 nt, Homo sapiens
  source 1..19: mol_type = genomic RNA
gcttagactagagttacat

SEQ ID NO: 15678 - RNA, 19 nt, Homo sapiens
  source 1..19: mol_type = genomic RNA
tagactagagttacatcac

SEQ ID NO: 15679 - RNA, 19 nt, Homo sapiens
  source 1..19: mol_type = genomic RNA
agactagagttacatcacc

SEQ ID NO: 15680 - RNA, 19 nt, Homo sapiens
  source 1..19: mol_type = genomic RNA
gactagagttacatcacct

SEQ ID NO: 15681 - RNA, 19 nt, Homo sapiens
  source 1..19: mol_type = genomic RNA
ctagagttacatcacctgg

SEQ ID NO: 15682 - RNA, 19 nt, Homo sapiens
  source 1..19: mol_type = genomic RNA
tagagttacatcacctggg

SEQ ID NO: 15683 - RNA, 19 nt, Homo sapiens
  source 1..19: mol_type = genomic RNA
tgcccccataggcaaatcc

SEQ ID NO: 15684 - RNA, 19 nt, Homo sapiens
  source 1..19: mol_type = genomic RNA
gcccccataggcaaatcca

SEQ ID NO: 15685 - RNA, 19 nt, Homo sapiens
  source 1..19: mol_type = genomic RNA
cccccataggcaaatccaa

SEQ ID NO: 15686 - RNA, 19 nt, Homo sapiens
  source 1..19: mol_type = genomic RNA
ccccataggcaaatccaag

SEQ ID NO: 15687 - RNA, 19 nt, Homo sapiens
  source 1..19: mol_type = genomic RNA
cccataggcaaatccaaga

SEQ ID NO: 15688 - RNA, 19 nt, Homo sapiens
  source 1..19: mol_type = genomic RNA
ccataggcaaatccaagac

SEQ ID NO: 15689 - RNA, 19 nt, Homo sapiens
  source 1..19: mol_type = genomic RNA
cataggcaaatccaagaca

SEQ ID NO: 15690 - RNA, 19 nt, Homo sapiens
  source 1..19: mol_type = genomic RNA
ataggcaaatccaagacaa

SEQ ID NO: 15691 - RNA, 19 nt, Homo sapiens
  source 1..19: mol_type = genomic RNA
taggcaaatccaagacaag

SEQ ID NO: 15692 - RNA, 19 nt, Homo sapiens
  source 1..19: mol_type = genomic RNA
aggcaaatccaagacaaga

SEQ ID NO: 15693 - RNA, 19 nt, Homo sapiens
  source 1..19: mol_type = genomic RNA
ggcaaatccaagacaagag

SEQ ID NO: 15694 - RNA, 19 nt, Homo sapiens
  source 1..19: mol_type = genomic RNA
gcaaatccaagacaagagt

SEQ ID NO: 15695 - RNA, 19 nt, Homo sapiens
  source 1..19: mol_type = genomic RNA
caaatccaagacaagagtc

SEQ ID NO: 15696 - RNA, 19 nt, Homo sapiens
  source 1..19: mol_type = genomic RNA
aaatccaagacaagagtct

SEQ ID NO: 15697 - RNA, 19 nt, Homo sapiens
  source 1..19: mol_type = genomic RNA
aatccaagacaagagtctg

SEQ ID NO: 15698 - RNA, 19 nt, Homo sapiens
  source 1..19: mol_type = genomic RNA
atccaagacaagagtctgt

SEQ ID NO: 15699 - RNA, 19 nt, Homo sapiens
  source 1..19: mol_type = genomic RNA
tgcagaaatatgtcacaat

SEQ ID NO: 15700 - RNA, 19 nt, Homo sapiens
  source 1..19: mol_type = genomic RNA
gcagaaatatgtcacaatg

SEQ ID NO: 15701 - RNA, 19 nt, Homo sapiens
  source 1..19: mol_type = genomic RNA
cagaaatatgtcacaatgc

SEQ ID NO: 15702 - RNA, 19 nt, Homo sapiens
  source 1..19: mol_type = genomic RNA
agaaatatgtcacaatgcc

SEQ ID NO: 15703 - RNA, 19 nt, Homo sapiens
  source 1..19: mol_type = genomic RNA
gaaatatgtcacaatgccc

SEQ ID NO: 15704 - RNA, 19 nt, Homo sapiens
  source 1..19: mol_type = genomic RNA
aaatatgtcacaatgcccc

SEQ ID NO: 15705 - RNA, 19 nt, Homo sapiens
  source 1..19: mol_type = genomic RNA
aatatgtcacaatgccccc

SEQ ID NO: 15706 - RNA, 19 nt, Homo sapiens
  source 1..19: mol_type = genomic RNA
atatgtcacaatgccccca

SEQ ID NO: 15707 - RNA, 19 nt, Homo sapiens
  source 1..19: mol_type = genomic RNA
ccccataggcagatccaac

SEQ ID NO: 15708 - RNA, 19 nt, Homo sapiens
  source 1..19: mol_type = genomic RNA
cccataggcagatccaaca

SEQ ID NO: 15709 - RNA, 19 nt, Homo sapiens
  source 1..19: mol_type = genomic RNA
ccataggcagatccaacac

SEQ ID NO: 15710 - RNA, 19 nt, Homo sapiens
  source 1..19: mol_type = genomic RNA
cataggcagatccaacaca

SEQ ID NO: 15711 - RNA, 19 nt, Homo sapiens
  source 1..19: mol_type = genomic RNA
ataggcagatccaacacaa

SEQ ID NO: 15712 - RNA, 19 nt, Homo sapiens
  source 1..19: mol_type = genomic RNA
taggcagatccaacacaag

SEQ ID NO: 15713 - RNA, 19 nt, Homo sapiens
  source 1..19: mol_type = genomic RNA
aggcagatccaacacaaga

SEQ ID NO: 15714 - RNA, 19 nt, Homo sapiens
  source 1..19: mol_type = genomic RNA
ggcagatccaacacaagag

SEQ ID NO: 15715 - RNA, 19 nt, Homo sapiens
  source 1..19: mol_type = genomic RNA
gcagatccaacacaagagt

SEQ ID NO: 15716 - RNA, 19 nt, Homo sapiens
  source 1..19: mol_type = genomic RNA
cagatccaacacaagagtt

SEQ ID NO: 15717 - RNA, 19 nt, Homo sapiens
  source 1..19: mol_type = genomic RNA
agatccaacacaagagtta

SEQ ID NO: 15718 - RNA, 19 nt, Homo sapiens
  source 1..19: mol_type = genomic RNA
gatccaacacaagagttac

SEQ ID NO: 15719 - RNA, 19 nt, Homo sapiens
  source 1..19: mol_type = genomic RNA
atccaacacaagagttaca

SEQ ID NO: 15720 - RNA, 19 nt, Homo sapiens
  source 1..19: mol_type = genomic RNA
tccaacacaagagttacat

SEQ ID NO: 15721 - RNA, 19 nt, Homo sapiens
  source 1..19: mol_type = genomic RNA
ccaacacaagagttacatc

SEQ ID NO: 15722 - RNA, 19 nt, Homo sapiens
  source 1..19: mol_type = genomic RNA
caacacaagagttacatca

SEQ ID NO: 15723 - RNA, 19 nt, Homo sapiens
  source 1..19: mol_type = genomic RNA
aacacaagagttacatcac

SEQ ID NO: 15724 - RNA, 19 nt, Homo sapiens
  source 1..19: mol_type = genomic RNA
acacaagagttacatcacc

SEQ ID NO: 15725 - RNA, 19 nt, Homo sapiens
  source 1..19: mol_type = genomic RNA
cacaagagttacatcacct

SEQ ID NO: 15726 - RNA, 19 nt, Homo sapiens
  source 1..19: mol_type = genomic RNA
tcagtgcagagatatgtaa

SEQ ID NO: 15727 - RNA, 19 nt, Homo sapiens
  source 1..19: mol_type = genomic RNA
cagtgcagagatatgtaac

SEQ ID NO: 15728 - RNA, 19 nt, Homo sapiens
  source 1..19: mol_type = genomic RNA
tccatcacctgtgtgatca

SEQ ID NO: 15729 - RNA, 19 nt, Homo sapiens
  source 1..19: mol_type = genomic RNA
ccatcacctgtgtgatcag

SEQ ID NO: 15730 - RNA, 19 nt, Homo sapiens
  source 1..19: mol_type = genomic RNA
tcacctgtgtgatcagtgt

SEQ ID NO: 15731 - RNA, 19 nt, Homo sapiens
  source 1..19: mol_type = genomic RNA
cacctgtgtgatcagtgta

SEQ ID NO: 15732 - RNA, 19 nt, Homo sapiens
  source 1..19: mol_type = genomic RNA
acctgtgtgatcagtgtag

SEQ ID NO: 15733 - RNA, 19 nt, Homo sapiens
  source 1..19: mol_type = genomic RNA
cctgtgtgatcagtgtaga

SEQ ID NO: 15734 - RNA, 19 nt, Homo sapiens
  source 1..19: mol_type = genomic RNA
ctgtgtgatcagtgtagag

SEQ ID NO: 15735 - RNA, 19 nt, Homo sapiens
  source 1..19: mol_type = genomic RNA
tgtgtgatcagtgtagaga

SEQ ID NO: 15736 - RNA, 19 nt, Homo sapiens
  source 1..19: mol_type = genomic RNA
gtgtgatcagtgtagagat

SEQ ID NO: 15737 - RNA, 19 nt, Homo sapiens
  source 1..19: mol_type = genomic RNA
tgtgatcagtgtagagata

SEQ ID NO: 15738 - RNA, 19 nt, Homo sapiens
  source 1..19: mol_type = genomic RNA
tagagatatgtcacaatgc

SEQ ID NO: 15739 - RNA, 19 nt, Homo sapiens
  source 1..19: mol_type = genomic RNA
gagatatgtcacaatgcct

SEQ ID NO: 15740 - RNA, 19 nt, Homo sapiens
  source 1..19: mol_type = genomic RNA
agatatgtcacaatgcctc

SEQ ID NO: 15741 - RNA, 19 nt, Homo sapiens
  source 1..19: mol_type = genomic RNA
gatatgtcacaatgcctcc

SEQ ID NO: 15742 - RNA, 19 nt, Homo sapiens
  source 1..19: mol_type = genomic RNA
atatgtcacaatgcctcct

SEQ ID NO: 15743 - RNA, 19 nt, Homo sapiens
  source 1..19: mol_type = genomic RNA
tatgtcacaatgcctcctg

SEQ ID NO: 15744 - RNA, 19 nt, Homo sapiens
  source 1..19: mol_type = genomic RNA
atgtcacaatgcctcctgt

SEQ ID NO: 15745 - RNA, 19 nt, Homo sapiens
  source 1..19: mol_type = genomic RNA
tgtcacaatgcctcctgta

SEQ ID NO: 15746 - RNA, 19 nt, Homo sapiens
  source 1..19: mol_type = genomic RNA
gtcacaatgcctcctgtag

SEQ ID NO: 15747 - RNA, 19 nt, Homo sapiens
  source 1..19: mol_type = genomic RNA
tcacaatgcctcctgtagg

SEQ ID NO: 15748 - RNA, 19 nt, Homo sapiens
  source 1..19: mol_type = genomic RNA
cacaatgcctcctgtaggc

SEQ ID NO: 15749 - RNA, 19 nt, Homo sapiens
  source 1..19: mol_type = genomic RNA
acaatgcctcctgtaggca

SEQ ID NO: 15750 - RNA, 19 nt, Homo sapiens
  source 1..19: mol_type = genomic RNA
caatgcctcctgtaggcag

SEQ ID NO: 15751 - RNA, 19 nt, Homo sapiens
  source 1..19: mol_type = genomic RNA
aatgcctcctgtaggcaga

SEQ ID NO: 15752 - RNA, 19 nt, Homo sapiens
  source 1..19: mol_type = genomic RNA
atgcctcctgtaggcagag

SEQ ID NO: 15753 - RNA, 19 nt, Homo sapiens
  source 1..19: mol_type = genomic RNA
ctcctgtaggcagaggcta

SEQ ID NO: 15754 - RNA, 19 nt, Homo sapiens
  source 1..19: mol_type = genomic RNA
tcctgtaggcagaggctaa

SEQ ID NO: 15755 - RNA, 19 nt, Homo sapiens
  source 1..19: mol_type = genomic RNA
cctgtaggcagaggctaaa

SEQ ID NO: 15756 - RNA, 19 nt, Homo sapiens
  source 1..19: mol_type = genomic RNA
ctgtaggcagaggctaaac

SEQ ID NO: 15757 - RNA, 19 nt, Homo sapiens
  source 1..19: mol_type = genomic RNA
tgtaggcagaggctaaaca

SEQ ID NO: 15758 - RNA, 19 nt, Homo sapiens
  source 1..19: mol_type = genomic RNA
gtaggcagaggctaaacaa

SEQ ID NO: 15759 - RNA, 19 nt, Homo sapiens
  source 1..19: mol_type = genomic RNA
taggcagaggctaaacaag

SEQ ID NO: 15760 - RNA, 19 nt, Homo sapiens
  source 1..19: mol_type = genomic RNA
aggcagaggctaaacaaga

SEQ ID NO: 15761 - RNA, 19 nt, Homo sapiens
  source 1..19: mol_type = genomic RNA
ggcagaggctaaacaagag

SEQ ID NO: 15762 - RNA, 19 nt, Homo sapiens
  source 1..19: mol_type = genomic RNA
gcagaggctaaacaagagt

SEQ ID NO: 15763 - RNA, 19 nt, Homo sapiens
  source 1..19: mol_type = genomic RNA
cagaggctaaacaagagtt

SEQ ID NO: 15764 - RNA, 19 nt, Homo sapiens
  source 1..19: mol_type = genomic RNA
agaggctaaacaagagtta

SEQ ID NO: 15765 - RNA, 19 nt, Homo sapiens
  source 1..19: mol_type = genomic RNA
gaggctaaacaagagttac

SEQ ID NO: 15766 - RNA, 19 nt, Homo sapiens
  source 1..19: mol_type = genomic RNA
aggctaaacaagagttaca

SEQ ID NO: 15767 - RNA, 19 nt, Homo sapiens
  source 1..19: mol_type = genomic RNA
ggctaaacaagagttacat

SEQ ID NO: 15768 - RNA, 19 nt, Homo sapiens
  source 1..19: mol_type = genomic RNA
gctaaacaagagttacatc

SEQ ID NO: 15769 - RNA, 19 nt, Homo sapiens
  source 1..19: mol_type = genomic RNA
taaacaagagttacatcac

SEQ ID NO: 15770 - RNA, 19 nt, Homo sapiens
  source 1..19: mol_type = genomic RNA
aaacaagagttacatcacc

SEQ ID NO: 15771 - RNA, 19 nt, Homo sapiens
  source 1..19: mol_type = genomic RNA
aacaagagttacatcacct

SEQ ID NO: 15772 - RNA, 19 nt, Homo sapiens
  source 1..19: mol_type = genomic RNA
aagagttacatcacctgga

SEQ ID NO: 15773 - RNA, 19 nt, Homo sapiens
  source 1..19: mol_type = genomic RNA
agagttacatcacctggat

SEQ ID NO: 15774 - RNA, 19 nt, Homo sapiens
  source 1..19: mol_type = genomic RNA
gagttacatcacctggatt

SEQ ID NO: 15775 - RNA, 19 nt, Homo sapiens
  source 1..19: mol_type = genomic RNA
agttacatcacctggattt

SEQ ID NO: 15776 - RNA, 19 nt, Homo sapiens
  source 1..19: mol_type = genomic RNA
tacatcacctggattttgt

SEQ ID NO: 15777 - RNA, 19 nt, Homo sapiens
  source 1..19: mol_type = genomic RNA
gtttcctgcaatatgtcac

SEQ ID NO: 15778 - RNA, 19 nt, Homo sapiens
  source 1..19: mol_type = genomic RNA
ttcctgcaatatgtcacaa

SEQ ID NO: 15779 - RNA, 19 nt, Homo sapiens
  source 1..19: mol_type = genomic RNA
tcctgcaatatgtcacaat

SEQ ID NO: 15780 - RNA, 19 nt, Homo sapiens
  source 1..19: mol_type = genomic RNA
cctgcaatatgtcacaatg

SEQ ID NO: 15781 - RNA, 19 nt, Homo sapiens
  source 1..19: mol_type = genomic RNA
ctgcaatatgtcacaatgg

SEQ ID NO: 15782 - RNA, 19 nt, Homo sapiens
  source 1..19: mol_type = genomic RNA
tgcaatatgtcacaatggc

SEQ ID NO: 15783 - RNA, 19 nt, Homo sapiens
  source 1..19: mol_type = genomic RNA
taggggttaggcttaggct

SEQ ID NO: 15784 - RNA, 19 nt, Homo sapiens
  source 1..19: mol_type = genomic RNA
aggggttaggcttaggctt

SEQ ID NO: 15785 - RNA, 19 nt, Homo sapiens
  source 1..19: mol_type = genomic RNA
ggggttaggcttaggctta

SEQ ID NO: 15786 - RNA, 19 nt, Homo sapiens
  source 1..19: mol_type = genomic RNA
gggttaggcttaggcttag

SEQ ID NO: 15787 - RNA, 19 nt, Homo sapiens
  source 1..19: mol_type = genomic RNA
ggttaggcttaggcttagg

SEQ ID NO: 15788 - RNA, 19 nt, Homo sapiens
  source 1..19: mol_type = genomic RNA
gttaggcttaggcttaggg

SEQ ID NO: 15789 - RNA, 19 nt, Homo sapiens
  source 1..19: mol_type = genomic RNA
ttaggcttaggcttagggt

SEQ ID NO: 15790 - RNA, 19 nt, Homo sapiens
  source 1..19: mol_type = genomic RNA
taggcttaggcttagggtt

SEQ ID NO: 15791 - RNA, 19 nt, Homo sapiens
  source 1..19: mol_type = genomic RNA
aggcttaggcttagggtta

SEQ ID NO: 15792 - RNA, 19 nt, Homo sapiens
  source 1..19: mol_type = genomic RNA
ggcttaggcttagggttag

SEQ ID NO: 15793 - RNA, 19 nt, Homo sapiens
  source 1..19: mol_type = genomic RNA
gcttaggcttagggttagg

SEQ ID NO: 15794 - RNA, 19 nt, Homo sapiens
  source 1..19: mol_type = genomic RNA
cttaggcttagggttaggc

SEQ ID NO: 15795 - RNA, 19 nt, Homo sapiens
  source 1..19: mol_type = genomic RNA
ttaggcttagggttaggct

SEQ ID NO: 15796 - RNA, 19 nt, Homo sapiens
  source 1..19: mol_type = genomic RNA
taggcttagggttaggctt

SEQ ID NO: 15797 - RNA, 19 nt, Homo sapiens
  source 1..19: mol_type = genomic RNA
aggcttagggttaggctta

SEQ ID NO: 15798 - RNA, 19 nt, Homo sapiens
  source 1..19: mol_type = genomic RNA
ggcttagggttaggcttag

SEQ ID NO: 15799 - RNA, 19 nt, Homo sapiens
  source 1..19: mol_type = genomic RNA
gcttagggttaggcttagg

SEQ ID NO: 15800 - RNA, 19 nt, Homo sapiens
  source 1..19: mol_type = genomic RNA
cttagggttaggcttaggc

SEQ ID NO: 15801 - RNA, 19 nt, Homo sapiens
  source 1..19: mol_type = genomic RNA
ttagggttaggcttaggct

SEQ ID NO: 15802 - RNA, 19 nt, Homo sapiens
  source 1..19: mol_type = genomic RNA
tagggttaggcttaggctt

SEQ ID NO: 15803 - RNA, 19 nt, Homo sapiens
  source 1..19: mol_type = genomic RNA
agggttaggcttaggctta

SEQ ID NO: 15804 - RNA, 19 nt, Homo sapiens
  source 1..19: mol_type = genomic RNA
taggcttaggcttagggta

SEQ ID NO: 15805 - RNA, 19 nt, Homo sapiens
  source 1..19: mol_type = genomic RNA
aggcttaggcttagggtaa

SEQ ID NO: 15806 - RNA, 19 nt, Homo sapiens
  source 1..19: mol_type = genomic RNA
ggcttaggcttagggtaag

SEQ ID NO: 15807 - RNA, 19 nt, Homo sapiens
  source 1..19: mol_type = genomic RNA
gcttaggcttagggtaagg

SEQ ID NO: 15808 - RNA, 19 nt, Homo sapiens
  source 1..19: mol_type = genomic RNA
cttaggcttagggtaaggc

SEQ ID NO: 15809 - RNA, 19 nt, Homo sapiens
  source 1..19: mol_type = genomic RNA
ttaggcttagggtaaggct

SEQ ID NO: 15810 - RNA, 19 nt, Homo sapiens
  source 1..19: mol_type = genomic RNA
taggcttagggtaaggctt

SEQ ID NO: 15811 - RNA, 19 nt, Homo sapiens
  source 1..19: mol_type = genomic RNA
aggcttagggtaaggctta

SEQ ID NO: 15812 - RNA, 19 nt, Homo sapiens
  source 1..19: mol_type = genomic RNA
ggcttagggtaaggcttag

SEQ ID NO: 15813 - RNA, 19 nt, Homo sapiens
  source 1..19: mol_type = genomic RNA
gcttagggtaaggcttagg

SEQ ID NO: 15814 - RNA, 19 nt, Homo sapiens
  source 1..19: mol_type = genomic RNA
cttagggtaaggcttaggg

SEQ ID NO: 15815 - RNA, 19 nt, Homo sapiens
  source 1..19: mol_type = genomic RNA
ttagggtaaggcttagggt

SEQ ID NO: 15816 - RNA, 19 nt, Homo sapiens
  source 1..19: mol_type = genomic RNA
tagggtaaggcttagggtt

SEQ ID NO: 15817 - RNA, 19 nt, Homo sapiens
  source 1..19: mol_type = genomic RNA
agggtaaggcttagggttc

SEQ ID NO: 15818 - RNA, 19 nt, Homo sapiens
  source 1..19: mol_type = genomic RNA
gggtaaggcttagggttca

SEQ ID NO: 15819 - RNA, 19 nt, Homo sapiens
  source 1..19: mol_type = genomic RNA
ggtaaggcttagggttcag

SEQ ID NO: 15820 - RNA, 19 nt, Homo sapiens
  source 1..19: mol_type = genomic RNA
gtaaggcttagggttcagg

SEQ ID NO: 15821 - RNA, 19 nt, Homo sapiens
  source 1..19: mol_type = genomic RNA
atataggctattaagacat

SEQ ID NO: 15822 - RNA, 19 nt, Homo sapiens
  source 1..19: mol_type = genomic RNA
tataggctattaagacatg

SEQ ID NO: 15823 - RNA, 19 nt, Homo sapiens
  source 1..19: mol_type = genomic RNA
ataggctattaagacatgt

SEQ ID NO: 15824 - RNA, 19 nt, Homo sapiens
  source 1..19: mol_type = genomic RNA
taggctattaagacatgtt

SEQ ID NO: 15825 - RNA, 19 nt, Homo sapiens
  source 1..19: mol_type = genomic RNA
tttgtcttcaaagaatggc

SEQ ID NO: 15826 - RNA, 19 nt, Homo sapiens
  source 1..19: mol_type = genomic RNA
ttgtcttcaaagaatggcc

SEQ ID NO: 15827 - RNA, 19 nt, Homo sapiens
  source 1..19: mol_type = genomic RNA
tgtcttcaaagaatggcct

SEQ ID NO: 15828 - RNA, 19 nt, Homo sapiens
  source 1..19: mol_type = genomic RNA
gtcttcaaagaatggcctt

SEQ ID NO: 15829 - RNA, 19 nt, Homo sapiens
  source 1..19: mol_type = genomic RNA
tcttcaaagaatggccttg

SEQ ID NO: 15830 - RNA, 19 nt, Homo sapiens
  source 1..19: mol_type = genomic RNA
cttcaaagaatggccttgg

SEQ ID NO: 15831 - RNA, 19 nt, Homo sapiens
  source 1..19: mol_type = genomic RNA
ttcaaagaatggccttggt

SEQ ID NO: 15832 - RNA, 19 nt, Homo sapiens
  source 1..19: mol_type = genomic RNA
tcaaagaatggccttggtt

SEQ ID NO: 15833 - RNA, 19 nt, Homo sapiens
  source 1..19: mol_type = genomic RNA
caaagaatggccttggttt

SEQ ID NO: 15834 - RNA, 19 nt, Homo sapiens
  source 1..19: mol_type = genomic RNA
aaagaatggccttggtttc

SEQ ID NO: 15835 - RNA, 19 nt, Homo sapiens
  source 1..19: mol_type = genomic RNA
aagaatggccttggtttct

SEQ ID NO: 15836 - RNA, 19 nt, Homo sapiens
  source 1..19: mol_type = genomic RNA
agaatggccttggtttctg

SEQ ID NO: 15837 - RNA, 19 nt, Homo sapiens
  source 1..19: mol_type = genomic RNA
gaatggccttggtttctgt

SEQ ID NO: 15838 - RNA, 19 nt, Homo sapiens
  source 1..19: mol_type = genomic RNA
aatggccttggtttctgtg

SEQ ID NO: 15839 - RNA, 19 nt, Homo sapiens
  source 1..19: mol_type = genomic RNA
atggccttggtttctgtgg

SEQ ID NO: 15840 - RNA, 19 nt, Homo sapiens
  source 1..19: mol_type = genomic RNA
tggccttggtttctgtgga

SEQ ID NO: 15841 - RNA, 19 nt, Homo sapiens
  source 1..19: mol_type = genomic RNA
ggccttggtttctgtggac

SEQ ID NO: 15842 - RNA, 19 nt, Homo sapiens
  source 1..19: mol_type = genomic RNA
gccttggtttctgtggaca

SEQ ID NO: 15843 - RNA, 19 nt, Homo sapiens
  source 1..19: mol_type = genomic RNA
ccttggtttctgtggacag

SEQ ID NO: 15844 - RNA, 19 nt, Homo sapiens
  source 1..19: mol_type = genomic RNA
cttggtttctgtggacagt

SEQ ID NO: 15845 - RNA, 19 nt, Homo sapiens
  source 1..19: mol_type = genomic RNA
ttggtttctgtggacagtt

SEQ ID NO: 15846 - RNA, 19 nt, Homo sapiens
  source 1..19: mol_type = genomic RNA
tggtttctgtggacagttt

SEQ ID NO: 15847 - RNA, 19 nt, Homo sapiens
  source 1..19: mol_type = genomic RNA
ggtttctgtggacagtttc

SEQ ID NO: 15848 - RNA, 19 nt, Homo sapiens
  source 1..19: mol_type = genomic RNA
ttctgtggacagtttctcc

SEQ ID NO: 15849 - RNA, 19 nt, Homo sapiens
  source 1..19: mol_type = genomic RNA
tctgtggacagtttctcct

SEQ ID NO: 15850 - RNA, 19 nt, Homo sapiens
  source 1..19: mol_type = genomic RNA
ctgtggacagtttctcctc

SEQ ID NO: 15851 - RNA, 19 nt, Homo sapiens
  source 1..19: mol_type = genomic RNA
tgtggacagtttctcctca

SEQ ID NO: 15852 - RNA, 19 nt, Homo sapiens
  source 1..19: mol_type = genomic RNA
gtggacagtttctcctcat

SEQ ID NO: 15853 - RNA, 19 nt, Homo sapiens
  source 1..19: mol_type = genomic RNA
tggacagtttctcctcatg

SEQ ID NO: 15854 - RNA, 19 nt, Homo sapiens
  source 1..19: mol_type = genomic RNA
ggacagtttctcctcatgg

SEQ ID NO: 15855 - RNA, 19 nt, Homo sapiens
  source 1..19: mol_type = genomic RNA
gacagtttctcctcatgga

SEQ ID NO: 15856 - RNA, 19 nt, Homo sapiens
  source 1..19: mol_type = genomic RNA
acagtttctcctcatggaa

SEQ ID NO: 15857 - RNA, 19 nt, Homo sapiens
  source 1..19: mol_type = genomic RNA
cagtttctcctcatggaaa

SEQ ID NO: 15858 - RNA, 19 nt, Homo sapiens
  source 1..19: mol_type = genomic RNA
agtttctcctcatggaaag

SEQ ID NO: 15859 - RNA, 19 nt, Homo sapiens
  source 1..19: mol_type = genomic RNA
gtttctcctcatggaaagg

SEQ ID NO: 15860 - RNA, 19 nt, Homo sapiens
  source 1..19: mol_type = genomic RNA
tttctcctcatggaaaggt

SEQ ID NO: 15861 - RNA, 19 nt, Homo sapiens
  source 1..19: mol_type = genomic RNA
ttctcctcatggaaaggta

SEQ ID NO: 15862 - RNA, 19 nt, Homo sapiens
  source 1..19: mol_type = genomic RNA
tctcctcatggaaaggtag

SEQ ID NO: 15863 - RNA, 19 nt, Homo sapiens
  source 1..19: mol_type = genomic RNA
ctcctcatggaaaggtagt

SEQ ID NO: 15864 - RNA, 19 nt, Homo sapiens
  source 1..19: mol_type = genomic RNA
tcctcatggaaaggtagtg

SEQ ID NO: 15865 - RNA, 19 nt, Homo sapiens
  source 1..19: mol_type = genomic RNA
cctcatggaaaggtagtgt

SEQ ID NO: 15866 - RNA, 19 nt, Homo sapiens
  source 1..19: mol_type = genomic RNA
ctcatggaaaggtagtgtg

SEQ ID NO: 15867 - RNA, 19 nt, Homo sapiens
  source 1..19: mol_type = genomic RNA
tcatggaaaggtagtgtgt

SEQ ID NO: 15868 - RNA, 19 nt, Homo sapiens
  source 1..19: mol_type = genomic RNA
catggaaaggtagtgtgtt

SEQ ID NO: 15869 - RNA, 19 nt, Homo sapiens
  source 1..19: mol_type = genomic RNA
atggaaaggtagtgtgttc

SEQ ID NO: 15870 - RNA, 19 nt, Homo sapiens
  source 1..19: mol_type = genomic RNA
tggaaaggtagtgtgttcc

SEQ ID NO: 15871 - RNA, 19 nt, Homo sapiens
  source 1..19: mol_type = genomic RNA
ggaaaggtagtgtgttcct

SEQ ID NO: 15872 - RNA, 19 nt, Homo sapiens
  source 1..19: mol_type = genomic RNA
gaaaggtagtgtgttcctg

SEQ ID NO: 15873 - RNA, 19 nt, Homo sapiens
  source 1..19: mol_type = genomic RNA
aaaggtagtgtgttcctgc

SEQ ID NO: 15874 - RNA, 19 nt, Homo sapiens
  source 1..19: mol_type = genomic RNA
aaggtagtgtgttcctgct

SEQ ID NO: 15875 - RNA, 19 nt, Homo sapiens
  source 1..19: mol_type = genomic RNA
aggtagtgtgttcctgcta

SEQ ID NO: 15876 - RNA, 19 nt, Homo sapiens
  source 1..19: mol_type = genomic RNA
ggtagtgtgttcctgctaa

SEQ ID NO: 15877 - RNA, 19 nt, Homo sapiens
  source 1..19: mol_type = genomic RNA
actaaatacaaatcacaac

SEQ ID NO: 15878 - RNA, 19 nt, Homo sapiens
  source 1..19: mol_type = genomic RNA
aaatacaaatcacaactct

SEQ ID NO: 15879 - RNA, 19 nt, Homo sapiens
  source 1..19: mol_type = genomic RNA
ttctcattacacacacaac

SEQ ID NO: 15880 - RNA, 19 nt, Homo sapiens
  source 1..19: mol_type = genomic RNA
tctcattacacacacaaca

SEQ ID NO: 15881 - RNA, 19 nt, Homo sapiens
  source 1..19: mol_type = genomic RNA
ctcattacacacacaacaa

SEQ ID NO: 15882 - RNA, 19 nt, Homo sapiens
  source 1..19: mol_type = genomic RNA
tcattacacacacaacaaa

SEQ ID NO: 15883 - RNA, 19 nt, Homo sapiens
  source 1..19: mol_type = genomic RNA
cattacacacacaacaaaa

SEQ ID NO: 15884 - RNA, 19 nt, Homo sapiens
  source 1..19: mol_type = genomic RNA
attacacacacaacaaaat

SEQ ID NO: 15885 - RNA, 19 nt, Homo sapiens
  source 1..19: mol_type = genomic RNA
acacacaacaaaatttagc

SEQ ID NO: 15886 - RNA, 19 nt, Homo sapiens
  source 1..19: mol_type = genomic RNA
acacaacaaaatttagctg

SEQ ID NO: 15887 - RNA, 19 nt, Homo sapiens
  source 1..19: mol_type = genomic RNA
acaacaaaatttagctgag

SEQ ID NO: 15888 - RNA, 19 nt, Homo sapiens
  source 1..19: mol_type = genomic RNA
caacaaaatttagctgagg

SEQ ID NO: 15889 - RNA, 19 nt, Homo sapiens
  source 1..19: mol_type = genomic RNA
aacaaaatttagctgaggg

SEQ ID NO: 15890 - RNA, 19 nt, Homo sapiens
  source 1..19: mol_type = genomic RNA
acaaaatttagctgaggga

SEQ ID NO: 15891 - RNA, 19 nt, Homo sapiens
  source 1..19: mol_type = genomic RNA
caaaatttagctgagggag

SEQ ID NO: 15892 - RNA, 19 nt, Homo sapiens
  source 1..19: mol_type = genomic RNA
aaaatttagctgagggaga

SEQ ID NO: 15893 - RNA, 19 nt, Homo sapiens
  source 1..19: mol_type = genomic RNA
aaatttagctgagggagat

SEQ ID NO: 15894 - RNA, 19 nt, Homo sapiens
  source 1..19: mol_type = genomic RNA
aatttagctgagggagatt

SEQ ID NO: 15895 - RNA, 19 nt, Homo sapiens
  source 1..19: mol_type = genomic RNA
atttagctgagggagattg

SEQ ID NO: 15896 - RNA, 19 nt, Homo sapiens
  source 1..19: mol_type = genomic RNA
tttagctgagggagattga

SEQ ID NO: 15897 - RNA, 19 nt, Homo sapiens
  source 1..19: mol_type = genomic RNA
ttagctgagggagattgag

SEQ ID NO: 15898 - RNA, 19 nt, Homo sapiens
  source 1..19: mol_type = genomic RNA
tagctgagggagattgagt

SEQ ID NO: 15899 - RNA, 19 nt, Homo sapiens
  source 1..19: mol_type = genomic RNA
agctgagggagattgagtg

SEQ ID NO: 15900 - RNA, 19 nt, Homo sapiens
  source 1..19: mol_type = genomic RNA
gctgagggagattgagtga

SEQ ID NO: 15901 - RNA, 19 nt, Homo sapiens
  source 1..19: mol_type = genomic RNA
ctgagggagattgagtgac

SEQ ID NO: 15902 - RNA, 19 nt, Homo sapiens
  source 1..19: mol_type = genomic RNA
tgagggagattgagtgact

SEQ ID NO: 15903 - RNA, 19 nt, Homo sapiens
  source 1..19: mol_type = genomic RNA
gagggagattgagtgactt

SEQ ID NO: 15904 - RNA, 19 nt, Homo sapiens
  source 1..19: mol_type = genomic RNA
agggagattgagtgacttt

SEQ ID NO: 15905 - RNA, 19 nt, Homo sapiens
  source 1..19: mol_type = genomic RNA
gggagattgagtgactttc

SEQ ID NO: 15906 - RNA, 19 nt, Homo sapiens
  source 1..19: mol_type = genomic RNA
ggagattgagtgactttcc

SEQ ID NO: 15907 - RNA, 19 nt, Homo sapiens
  source 1..19: mol_type = genomic RNA
gagattgagtgactttccc

SEQ ID NO: 15908 - RNA, 19 nt, Homo sapiens
  source 1..19: mol_type = genomic RNA
agattgagtgactttccca

SEQ ID NO: 15909 - RNA, 19 nt, Homo sapiens
  source 1..19: mol_type = genomic RNA
gattgagtgactttcccag

SEQ ID NO: 15910 - RNA, 19 nt, Homo sapiens
  source 1..19: mol_type = genomic RNA
attgagtgactttcccagg

SEQ ID NO: 15911 - RNA, 19 nt, Homo sapiens
  source 1..19: mol_type = genomic RNA
ttgagtgactttcccaggg

SEQ ID NO: 15912 - RNA, 19 nt, Homo sapiens
  source 1..19: mol_type = genomic RNA
tgagtgactttcccagggt

SEQ ID NO: 15913 - RNA, 19 nt, Homo sapiens
  source 1..19: mol_type = genomic RNA
gagtgactttcccagggtc

SEQ ID NO: 15914 - RNA, 19 nt, Homo sapiens
  source 1..19: mol_type = genomic RNA
agtgactttcccagggtca

SEQ ID NO: 15915 - RNA, 19 nt, Homo sapiens
  source 1..19: mol_type = genomic RNA
gtgactttcccagggtcac

SEQ ID NO: 15916 - RNA, 19 nt, Homo sapiens
  source 1..19: mol_type = genomic RNA
tgactttcccagggtcaca

SEQ ID NO: 15917 - RNA, 19 nt, Homo sapiens
  source 1..19: mol_type = genomic RNA
gactttcccagggtcacac

SEQ ID NO: 15918 - RNA, 19 nt, Homo sapiens
  source 1..19: mol_type = genomic RNA
actttcccagggtcacaca

SEQ ID NO: 15919 - RNA, 19 nt, Homo sapiens
  source 1..19: mol_type = genomic RNA
ctttcccagggtcacacag

SEQ ID NO: 15920 - RNA, 19 nt, Homo sapiens
  source 1..19: mol_type = genomic RNA
tttcccagggtcacacagc

SEQ ID NO: 15921 - RNA, 19 nt, Homo sapiens
  source 1..19: mol_type = genomic RNA
ttcccagggtcacacagct

SEQ ID NO: 15922 - RNA, 19 nt, Homo sapiens
  source 1..19: mol_type = genomic RNA
tcccagggtcacacagcta

SEQ ID NO: 15923 - RNA, 19 nt, Homo sapiens
  source 1..19: mol_type = genomic RNA
ccagggtcacacagctact

SEQ ID NO: 15924 - RNA, 19 nt, Homo sapiens
  source 1..19: mol_type = genomic RNA
cagggtcacacagctacta

SEQ ID NO: 15925 - RNA, 19 nt, Homo sapiens
  source 1..19: mol_type = genomic RNA
agggtcacacagctactaa

SEQ ID NO: 15926 - RNA, 19 nt, Homo sapiens
  source 1..19: mol_type = genomic RNA
gggtcacacagctactaat

SEQ ID NO: 15927 - RNA, 19 nt, Homo sapiens
  source 1..19: mol_type = genomic RNA
ggtcacacagctactaata

SEQ ID NO: 15928 - RNA, 19 nt, Homo sapiens
  source 1..19: mol_type = genomic RNA
gtcacacagctactaatag

SEQ ID NO: 15929 - RNA, 19 nt, Homo sapiens
  source 1..19: mol_type = genomic RNA
tcacacagctactaatagc

SEQ ID NO: 15930 - RNA, 19 nt, Homo sapiens
  source 1..19: mol_type = genomic RNA
cacacagctactaatagca

SEQ ID NO: 15931 - RNA, 19 nt, Homo sapiens
  source 1..19: mol_type = genomic RNA
acacagctactaatagcag

SEQ ID NO: 15932 - RNA, 19 nt, Homo sapiens
  source 1..19: mol_type = genomic RNA
cacagctactaatagcaga

SEQ ID NO: 15933 - RNA, 19 nt, Homo sapiens
  source 1..19: mol_type = genomic RNA
acagctactaatagcagag

SEQ ID NO: 15934 - RNA, 19 nt, Homo sapiens
  source 1..19: mol_type = genomic RNA
cagctactaatagcagagt

SEQ ID NO: 15935 - RNA, 19 nt, Homo sapiens
  source 1..19: mol_type = genomic RNA
agctactaatagcagagta

SEQ ID NO: 15936 - RNA, 19 nt, Homo sapiens
  source 1..19: mol_type = genomic RNA
gctactaatagcagagtag

SEQ ID NO: 15937 - RNA, 19 nt, Homo sapiens
  source 1..19: mol_type = genomic RNA
ctactaatagcagagtagt

SEQ ID NO: 15938 - RNA, 19 nt, Homo sapiens
  source 1..19: mol_type = genomic RNA
tactaatagcagagtagtg

SEQ ID NO: 15939 - RNA, 19 nt, Homo sapiens
  source 1..19: mol_type = genomic RNA
actaatagcagagtagtgt

SEQ ID NO: 15940 - RNA, 19 nt, Homo sapiens
  source 1..19: mol_type = genomic RNA
ctaatagcagagtagtgtt

SEQ ID NO: 15941 - RNA, 19 nt, Homo sapiens
  source 1..19: mol_type = genomic RNA
atagcagagtagtgtttag

SEQ ID NO: 15942 - RNA, 19 nt, Homo sapiens
  source 1..19: mol_type = genomic RNA
tagcagagtagtgtttaga

SEQ ID NO: 15943 - RNA, 19 nt, Homo sapiens
  source 1..19: mol_type = genomic RNA
agcagagtagtgtttagat

SEQ ID NO: 15944 - RNA, 19 nt, Homo sapiens
  source 1..19: mol_type = genomic RNA
tagattcatatgggaatac

SEQ ID NO: 15945 - RNA, 19 nt, Homo sapiens
  source 1..19: mol_type = genomic RNA
agattcatatgggaatact

SEQ ID NO: 15946 - RNA, 19 nt, Homo sapiens
  source 1..19: mol_type = genomic RNA
gattcatatgggaatactg

SEQ ID NO: 15947 - RNA, 19 nt, Homo sapiens
  source 1..19: mol_type = genomic RNA
attcatatgggaatactga

SEQ ID NO: 15948 - RNA, 19 nt, Homo sapiens
  source 1..19: mol_type = genomic RNA
ttcatatgggaatactgaa

SEQ ID NO: 15949 - RNA, 19 nt, Homo sapiens
  source 1..19: mol_type = genomic RNA
tcatatgggaatactgaac

SEQ ID NO: 15950 - RNA, 19 nt, Homo sapiens
  source 1..19: mol_type = genomic RNA
catatgggaatactgaaca

SEQ ID NO: 15951 - RNA, 19 nt, Homo sapiens
  source 1..19: mol_type = genomic RNA
atatgggaatactgaacac

SEQ ID NO: 15952 - RNA, 19 nt, Homo sapiens
  source 1..19: mol_type = genomic RNA
tatgggaatactgaacaca

SEQ ID NO: 15953 - RNA, 19 nt, Homo sapiens
  source 1..19: mol_type = genomic RNA
atgggaatactgaacacag

SEQ ID NO: 15954 - RNA, 19 nt, Homo sapiens
  source 1..19: mol_type = genomic RNA
tgggaatactgaacacaga

SEQ ID NO: 15955 - RNA, 19 nt, Homo sapiens
  source 1..19: mol_type = genomic RNA
gggaatactgaacacagaa

SEQ ID NO: 15956 - RNA, 19 nt, Homo sapiens
  source 1..19: mol_type = genomic RNA
ggaatactgaacacagaaa

SEQ ID NO: 15957 - RNA, 19 nt, Homo sapiens
  source 1..19: mol_type = genomic RNA
gaatactgaacacagaaat

SEQ ID NO: 15958 - RNA, 19 nt, Homo sapiens
  source 1..19: mol_type = genomic RNA
aatactgaacacagaaatg

SEQ ID NO: 15959 - RNA, 19 nt, Homo sapiens
  source 1..19: mol_type = genomic RNA
atactgaacacagaaatga

SEQ ID NO: 15960 - RNA, 19 nt, Homo sapiens
  source 1..19: mol_type = genomic RNA
tactgaacacagaaatgaa

SEQ ID NO: 15961 - RNA, 19 nt, Homo sapiens
  source 1..19: mol_type = genomic RNA
actgaacacagaaatgaac

SEQ ID NO: 15962 - RNA, 19 nt, Homo sapiens
  source 1..19: mol_type = genomic RNA
ctgaacacagaaatgaacc

SEQ ID NO: 15963 - RNA, 19 nt, Homo sapiens
  source 1..19: mol_type = genomic RNA
tgaacacagaaatgaacca

SEQ ID NO: 15964 - RNA, 19 nt, Homo sapiens
  source 1..19: mol_type = genomic RNA
gaacacagaaatgaaccaa

SEQ ID NO: 15965 - RNA, 19 nt, Homo sapiens
  source 1..19: mol_type = genomic RNA
aacacagaaatgaaccaat

SEQ ID NO: 15966 - RNA, 19 nt, Homo sapiens
  source 1..19: mol_type = genomic RNA
acacagaaatgaaccaatg

SEQ ID NO: 15967 - RNA, 19 nt, Homo sapiens
  source 1..19: mol_type = genomic RNA
cacagaaatgaaccaatgg

SEQ ID NO: 15968 - RNA, 19 nt, Homo sapiens
  source 1..19: mol_type = genomic RNA
acagaaatgaaccaatgga

SEQ ID NO: 15969 - RNA, 19 nt, Homo sapiens
  source 1..19: mol_type = genomic RNA
cagaaatgaaccaatggaa

SEQ ID NO: 15970 - RNA, 19 nt, Homo sapiens
  source 1..19: mol_type = genomic RNA
agaaatgaaccaatggaaa

SEQ ID NO: 15971 - RNA, 19 nt, Homo sapiens
  source 1..19: mol_type = genomic RNA
gaaatgaaccaatggaaac

SEQ ID NO: 15972 - RNA, 19 nt, Homo sapiens
  source 1..19: mol_type = genomic RNA
aaatgaaccaatggaaaca

SEQ ID NO: 15973 - RNA, 19 nt, Homo sapiens
  source 1..19: mol_type = genomic RNA
aatgaaccaatggaaacat

SEQ ID NO: 15974 - RNA, 19 nt, Homo sapiens
  source 1..19: mol_type = genomic RNA
atgaaccaatggaaacatc

SEQ ID NO: 15975 - RNA, 19 nt, Homo sapiens
  source 1..19: mol_type = genomic RNA
tgaaccaatggaaacatcc

SEQ ID NO: 15976 - RNA, 19 nt, Homo sapiens
  source 1..19: mol_type = genomic RNA
gaaccaatggaaacatcct

SEQ ID NO: 15977 - RNA, 19 nt, Homo sapiens
  source 1..19: mol_type = genomic RNA
aaccaatggaaacatccta

SEQ ID NO: 15978 - RNA, 19 nt, Homo sapiens
  source 1..19: mol_type = genomic RNA
accaatggaaacatcctac

SEQ ID NO: 15979 - RNA, 19 nt, Homo sapiens
  source 1..19: mol_type = genomic RNA
ccaatggaaacatcctacg

SEQ ID NO: 15980 - RNA, 19 nt, Homo sapiens
  source 1..19: mol_type = genomic RNA
caatggaaacatcctacgt

SEQ ID NO: 15981 - RNA, 19 nt, Homo sapiens
  source 1..19: mol_type = genomic RNA
aatggaaacatcctacgtt

SEQ ID NO: 15982 - RNA, 19 nt, Homo sapiens
  source 1..19: mol_type = genomic RNA
atggaaacatcctacgttc

SEQ ID NO: 15983 - RNA, 19 nt, Homo sapiens
  source 1..19: mol_type = genomic RNA
tggaaacatcctacgttcc

SEQ ID NO: 15984 - RNA, 19 nt, Homo sapiens
  source 1..19: mol_type = genomic RNA
ggaaacatcctacgttcca

SEQ ID NO: 15985 - RNA, 19 nt, Homo sapiens
  source 1..19: mol_type = genomic RNA
gaaacatcctacgttccaa

SEQ ID NO: 15986 - RNA, 19 nt, Homo sapiens
  source 1..19: mol_type = genomic RNA
aaacatcctacgttccaaa

SEQ ID NO: 15987 - RNA, 19 nt, Homo sapiens
  source 1..19: mol_type = genomic RNA
aacatcctacgttccaaaa

SEQ ID NO: 15988 - RNA, 19 nt, Homo sapiens
  source 1..19: mol_type = genomic RNA
acatcctacgttccaaaag

SEQ ID NO: 15989 - RNA, 19 nt, Homo sapiens
  source 1..19: mol_type = genomic RNA
catcctacgttccaaaagc

SEQ ID NO: 15990 - RNA, 19 nt, Homo sapiens
  source 1..19: mol_type = genomic RNA
atcctacgttccaaaagcc

SEQ ID NO: 15991 - RNA, 19 nt, Homo sapiens
  source 1..19: mol_type = genomic RNA
tcctacgttccaaaagcct

SEQ ID NO: 15992 - RNA, 19 nt, Homo sapiens
  source 1..19: mol_type = genomic RNA
cctacgttccaaaagccta

SEQ ID NO: 15993 - RNA, 19 nt, Homo sapiens
  source 1..19: mol_type = genomic RNA
ctacgttccaaaagcctac

SEQ ID NO: 15994 - RNA, 19 nt, Homo sapiens
  source 1..19: mol_type = genomic RNA
tacgttccaaaagcctact

SEQ ID NO: 15995 - RNA, 19 nt, Homo sapiens
  source 1..19: mol_type = genomic RNA
acgttccaaaagcctactc

SEQ ID NO: 15996 - RNA, 19 nt, Homo sapiens
  source 1..19: mol_type = genomic RNA
cgttccaaaagcctactca

SEQ ID NO: 15997 - RNA, 19 nt, Homo sapiens
  source 1..19: mol_type = genomic RNA
gttccaaaagcctactcaa

SEQ ID NO: 15998 - RNA, 19 nt, Homo sapiens
  source 1..19: mol_type = genomic RNA
ttccaaaagcctactcaag

SEQ ID NO: 15999 - RNA, 19 nt, Homo sapiens
  source 1..19: mol_type = genomic RNA
tccaaaagcctactcaagc

SEQ ID NO: 16000 - RNA, 19 nt, Homo sapiens
  source 1..19: mol_type = genomic RNA
ccaaaagcctactcaagcc

SEQ ID NO: 16001 - RNA, 19 nt, Homo sapiens
  source 1..19: mol_type = genomic RNA
caaaagcctactcaagcca

SEQ ID NO: 16002 - RNA, 19 nt, Homo sapiens
  source 1..19: mol_type = genomic RNA
aaaagcctactcaagccat

SEQ ID NO: 16003 - RNA, 19 nt, Homo sapiens
  source 1..19: mol_type = genomic RNA
aaagcctactcaagccatt

SEQ ID NO: 16004 - RNA, 19 nt, Homo sapiens
  source 1..19: mol_type = genomic RNA
aagcctactcaagccattt

SEQ ID NO: 16005 - RNA, 19 nt, Homo sapiens
  source 1..19: mol_type = genomic RNA
agcctactcaagccatttg

SEQ ID NO: 16006 - RNA, 19 nt, Homo sapiens
  source 1..19: mol_type = genomic RNA
gcctactcaagccatttgt

SEQ ID NO: 16007 - RNA, 19 nt, Homo sapiens
  source 1..19: mol_type = genomic RNA
cctactcaagccatttgtt

SEQ ID NO: 16008 - RNA, 19 nt, Homo sapiens
  source 1..19: mol_type = genomic RNA
tccaaatacttatgaatgg

SEQ ID NO: 16009 - RNA, 19 nt, Homo sapiens
  source 1..19: mol_type = genomic RNA
ccaaatacttatgaatggc

SEQ ID NO: 16010 - RNA, 19 nt, Homo sapiens
  source 1..19: mol_type = genomic RNA
caaatacttatgaatggca

SEQ ID NO: 16011 - RNA, 19 nt, Homo sapiens
  source 1..19: mol_type = genomic RNA
aaatacttatgaatggcag

SEQ ID NO: 16012 - RNA, 19 nt, Homo sapiens
  source 1..19: mol_type = genomic RNA
aatacttatgaatggcaga

SEQ ID NO: 16013 - RNA, 19 nt, Homo sapiens
  source 1..19: mol_type = genomic RNA
atacttatgaatggcagag

SEQ ID NO: 16014 - RNA, 19 nt, Homo sapiens
  source 1..19: mol_type = genomic RNA
tacttatgaatggcagaga

SEQ ID NO: 16015 - RNA, 19 nt, Homo sapiens
  source 1..19: mol_type = genomic RNA
acttatgaatggcagagat

SEQ ID NO: 16016 - RNA, 19 nt, Homo sapiens
  source 1..19: mol_type = genomic RNA
cttatgaatggcagagatc

SEQ ID NO: 16017 - RNA, 19 nt, Homo sapiens
  source 1..19: mol_type = genomic RNA
ttatgaatggcagagatct

SEQ ID NO: 16018 - RNA, 19 nt, Homo sapiens
  source 1..19: mol_type = genomic RNA
tatgaatggcagagatcta

SEQ ID NO: 16019 - RNA, 19 nt, Homo sapiens
  source 1..19: mol_type = genomic RNA
atgaatggcagagatctac

SEQ ID NO: 16020 - RNA, 19 nt, Homo sapiens
  source 1..19: mol_type = genomic RNA
tgaatggcagagatctaca

SEQ ID NO: 16021 - RNA, 19 nt, Homo sapiens
  source 1..19: mol_type = genomic RNA
gaatggcagagatctacag

SEQ ID NO: 16022 - RNA, 19 nt, Homo sapiens
  source 1..19: mol_type = genomic RNA
aatggcagagatctacaga

SEQ ID NO: 16023 - RNA, 19 nt, Homo sapiens
  source 1..19: mol_type = genomic RNA
atggcagagatctacagat

SEQ ID NO: 16024 - RNA, 19 nt, Homo sapiens
  source 1..19: mol_type = genomic RNA
tggcagagatctacagatt

SEQ ID NO: 16025 - RNA, 19 nt, Homo sapiens
  source 1..19: mol_type = genomic RNA
ggcagagatctacagattt

SEQ ID NO: 16026 - RNA, 19 nt, Homo sapiens
  source 1..19: mol_type = genomic RNA
gcagagatctacagatttg

SEQ ID NO: 16027 - RNA, 19 nt, Homo sapiens
  source 1..19: mol_type = genomic RNA
cagagatctacagatttga

SEQ ID NO: 16028 - RNA, 19 nt, Homo sapiens
  source 1..19: mol_type = genomic RNA
agagatctacagatttgat

SEQ ID NO: 16029 - RNA, 19 nt, Homo sapiens
  source 1..19: mol_type = genomic RNA
tctgatgtaagaaatgatg

SEQ ID NO: 16030 - RNA, 19 nt, Homo sapiens
  source 1..19: mol_type = genomic RNA
ctgatgtaagaaatgatgc

SEQ ID NO: 16031 - RNA, 19 nt, Homo sapiens
  source 1..19: mol_type = genomic RNA
tgatgtaagaaatgatgct

SEQ ID NO: 16032 - RNA, 19 nt, Homo sapiens
  source 1..19: mol_type = genomic RNA
gatgtaagaaatgatgctc

SEQ ID NO: 16033 - RNA, 19 nt, Homo sapiens
  source 1..19: mol_type = genomic RNA
atgtaagaaatgatgctca

SEQ ID NO: 16034 - RNA, 19 nt, Homo sapiens
  source 1..19: mol_type = genomic RNA
tgtaagaaatgatgctcac

SEQ ID NO: 16035 - RNA, 19 nt, Homo sapiens
  source 1..19: mol_type = genomic RNA
gtaagaaatgatgctcacc

SEQ ID NO: 16036 - RNA, 19 nt, Homo sapiens
  source 1..19: mol_type = genomic RNA
taagaaatgatgctcacca

SEQ ID NO: 16037 - RNA, 19 nt, Homo sapiens
  source 1..19: mol_type = genomic RNA
aagaaatgatgctcaccag

SEQ ID NO: 16038 - RNA, 19 nt, Homo sapiens
  source 1..19: mol_type = genomic RNA
agaaatgatgctcaccagc

SEQ ID NO: 16039 - RNA, 19 nt, Homo sapiens
  source 1..19: mol_type = genomic RNA
gaaatgatgctcaccagct

SEQ ID NO: 16040 - RNA, 19 nt, Homo sapiens
  source 1..19: mol_type = genomic RNA
aaatgatgctcaccagctg

SEQ ID NO: 16041 - RNA, 19 nt, Homo sapiens
  source 1..19: mol_type = genomic RNA
aatgatgctcaccagctgg

SEQ ID NO: 16042 - RNA, 19 nt, Homo sapiens
  source 1..19: mol_type = genomic RNA
tactgctaccaccccacaa

SEQ ID NO: 16043 - RNA, 19 nt, Homo sapiens
  source 1..19: mol_type = genomic RNA
agcatactggacaaatgtc

SEQ ID NO: 16044 - RNA, 19 nt, Homo sapiens
  source 1..19: mol_type = genomic RNA
gcatactggacaaatgtct

SEQ ID NO: 16045 - RNA, 19 nt, Homo sapiens
  source 1..19: mol_type = genomic RNA
catactggacaaatgtcta

SEQ ID NO: 16046 - RNA, 19 nt, Homo sapiens
  source 1..19: mol_type = genomic RNA
atactggacaaatgtctaa

SEQ ID NO: 16047 - RNA, 19 nt, Homo sapiens
  source 1..19: mol_type = genomic RNA
tactggacaaatgtctaag

SEQ ID NO: 16048 - RNA, 19 nt, Homo sapiens
  source 1..19: mol_type = genomic RNA
actggacaaatgtctaagc

SEQ ID NO: 16049 - RNA, 19 nt, Homo sapiens
  source 1..19: mol_type = genomic RNA
ctggacaaatgtctaagcc

SEQ ID NO: 16050 - RNA, 19 nt, Homo sapiens
  source 1..19: mol_type = genomic RNA
tggacaaatgtctaagcct

SEQ ID NO: 16051 - RNA, 19 nt, Homo sapiens
  source 1..19: mol_type = genomic RNA
ggacaaatgtctaagcctc

SEQ ID NO: 16052 - RNA, 19 nt, Homo sapiens
  source 1..19: mol_type = genomic RNA
gacaaatgtctaagcctcg

SEQ ID NO: 16053 - RNA, 19 nt, Homo sapiens
  source 1..19: mol_type = genomic RNA
acaaatgtctaagcctcgt

SEQ ID NO: 16054 - RNA, 19 nt, Homo sapiens
  source 1..19: mol_type = genomic RNA
caaatgtctaagcctcgtg

SEQ ID NO: 16055 - RNA, 19 nt, Homo sapiens
  source 1..19: mol_type = genomic RNA
aaatgtctaagcctcgtgg

SEQ ID NO: 16056 - RNA, 19 nt, Homo sapiens
  source 1..19: mol_type = genomic RNA
aatgtctaagcctcgtggt

SEQ ID NO: 16057 - RNA, 19 nt, Homo sapiens
  source 1..19: mol_type = genomic RNA
atgtctaagcctcgtggtt

SEQ ID NO: 16058 - RNA, 19 nt, Homo sapiens
  source 1..19: mol_type = genomic RNA
tgtctaagcctcgtggtta

SEQ ID NO: 16059 - RNA, 19 nt, Homo sapiens
  source 1..19: mol_type = genomic RNA
gtctaagcctcgtggttag

SEQ ID NO: 16060 - RNA, 19 nt, Homo sapiens
  source 1..19: mol_type = genomic RNA
tctaagcctcgtggttagt

SEQ ID NO: 16061 - RNA, 19 nt, Homo sapiens
  source 1..19: mol_type = genomic RNA
ctaagcctcgtggttagtg

SEQ ID NO: 16062 - RNA, 19 nt, Homo sapiens
  source 1..19: mol_type = genomic RNA
taagcctcgtggttagtgg

SEQ ID NO: 16063 - RNA, 19 nt, Homo sapiens
  source 1..19: mol_type = genomic RNA
aagcctcgtggttagtggg

SEQ ID NO: 16064 - RNA, 19 nt, Homo sapiens
  source 1..19: mol_type = genomic RNA
agcctcgtggttagtgggg

SEQ ID NO: 16065 - RNA, 19 nt, Homo sapiens
  source 1..19: mol_type = genomic RNA
gcctcgtggttagtgggga

SEQ ID NO: 16066 - RNA, 19 nt, Homo sapiens
  source 1..19: mol_type = genomic RNA
cctcgtggttagtggggac

SEQ ID NO: 16067 - RNA, 19 nt, Homo sapiens
  source 1..19: mol_type = genomic RNA
ctcgtggttagtggggaca

SEQ ID NO: 16068 - RNA, 19 nt, Homo sapiens
  source 1..19: mol_type = genomic RNA
tcgtggttagtggggacat

SEQ ID NO: 16069 - RNA, 19 nt, Homo sapiens
  source 1..19: mol_type = genomic RNA
cgtggttagtggggacatt

SEQ ID NO: 16070 - RNA, 19 nt, Homo sapiens
  source 1..19: mol_type = genomic RNA
gtggttagtggggacattg

SEQ ID NO: 16071 - RNA, 19 nt, Homo sapiens
  source 1..19: mol_type = genomic RNA
tggttagtggggacattgc

SEQ ID NO: 16072 - RNA, 19 nt, Homo sapiens
  source 1..19: mol_type = genomic RNA
ggttagtggggacattgct

SEQ ID NO: 16073 - RNA, 19 nt, Homo sapiens
  source 1..19: mol_type = genomic RNA
gttagtggggacattgctg

SEQ ID NO: 16074 - RNA, 19 nt, Homo sapiens
  source 1..19: mol_type = genomic RNA
ttagtggggacattgctgg

SEQ ID NO: 16075 - RNA, 19 nt, Homo sapiens
  source 1..19: mol_type = genomic RNA
tagtggggacattgctggt

SEQ ID NO: 16076 - RNA, 19 nt, Homo sapiens
  source 1..19: mol_type = genomic RNA
agtggggacattgctggtg

SEQ ID NO: 16077 - RNA, 19 nt, Homo sapiens
  source 1..19: mol_type = genomic RNA
gggacattgctggtggagt

SEQ ID NO: 16078 - RNA, 19 nt, Homo sapiens
  source 1..19: mol_type = genomic RNA
ggacattgctggtggagtc

SEQ ID NO: 16079 - RNA, 19 nt, Homo sapiens
  source 1..19: mol_type = genomic RNA
gacattgctggtggagtct

SEQ ID NO: 16080 - RNA, 19 nt, Homo sapiens
  source 1..19: mol_type = genomic RNA
acattgctggtggagtctg

SEQ ID NO: 16081 - RNA, 19 nt, Homo sapiens
  source 1..19: mol_type = genomic RNA
cattgctggtggagtctga

SEQ ID NO: 16082 - RNA, 19 nt, Homo sapiens
  source 1..19: mol_type = genomic RNA
attgctggtggagtctgaa

SEQ ID NO: 16083 - RNA, 19 nt, Homo sapiens
  source 1..19: mol_type = genomic RNA
ttgctggtggagtctgaaa

SEQ ID NO: 16084 - RNA, 19 nt, Homo sapiens
  source 1..19: mol_type = genomic RNA
tgctggtggagtctgaaat

SEQ ID NO: 16085 - RNA, 19 nt, Homo sapiens
  source 1..19: mol_type = genomic RNA
gctggtggagtctgaaatt

SEQ ID NO: 16086 - RNA, 19 nt, Homo sapiens
  source 1..19: mol_type = genomic RNA
ctggtggagtctgaaattg

SEQ ID NO: 16087 - RNA, 19 nt, Homo sapiens
  source 1..19: mol_type = genomic RNA
tggtggagtctgaaattgt

SEQ ID NO: 16088 - RNA, 19 nt, Homo sapiens
  source 1..19: mol_type = genomic RNA
ggtggagtctgaaattgtc

SEQ ID NO: 16089 - RNA, 19 nt, Homo sapiens
  source 1..19: mol_type = genomic RNA
gtggagtctgaaattgtca

SEQ ID NO: 16090 - RNA, 19 nt, Homo sapiens
  source 1..19: mol_type = genomic RNA
tggagtctgaaattgtcat

SEQ ID NO: 16091 - RNA, 19 nt, Homo sapiens
  source 1..19: mol_type = genomic RNA
ggagtctgaaattgtcatg

SEQ ID NO: 16092 - RNA, 19 nt, Homo sapiens
  source 1..19: mol_type = genomic RNA
gagtctgaaattgtcatgc

SEQ ID NO: 16093 - RNA, 19 nt, Homo sapiens
  source 1..19: mol_type = genomic RNA
agtctgaaattgtcatgca

SEQ ID NO: 16094 - RNA, 19 nt, Homo sapiens
  source 1..19: mol_type = genomic RNA
gtctgaaattgtcatgcag

SEQ ID NO: 16095 - RNA, 19 nt, Homo sapiens
  source 1..19: mol_type = genomic RNA
tctgaaattgtcatgcagt

SEQ ID NO: 16096 - RNA, 19 nt, Homo sapiens
  source 1..19: mol_type = genomic RNA
ctgaaattgtcatgcagtg

SEQ ID NO: 16097 - RNA, 19 nt, Homo sapiens
  source 1..19: mol_type = genomic RNA
tgaaattgtcatgcagtga

SEQ ID NO: 16098 - RNA, 19 nt, Homo sapiens
  source 1..19: mol_type = genomic RNA
gaaattgtcatgcagtgac

SEQ ID NO: 16099 - RNA, 19 nt, Homo sapiens
  source 1..19: mol_type = genomic RNA
aaattgtcatgcagtgact

SEQ ID NO: 16100 - RNA, 19 nt, Homo sapiens
  source 1..19: mol_type = genomic RNA
aattgtcatgcagtgactc

SEQ ID NO: 16101 - RNA, 19 nt, Homo sapiens
  source 1..19: mol_type = genomic RNA
attgtcatgcagtgactca

SEQ ID NO: 16102 - RNA, 19 nt, Homo sapiens
  source 1..19: mol_type = genomic RNA
ttgtcatgcagtgactcac

SEQ ID NO: 16103 - RNA, 19 nt, Homo sapiens
  source 1..19: mol_type = genomic RNA
tgtcatgcagtgactcact

SEQ ID NO: 16104 - RNA, 19 nt, Homo sapiens
  source 1..19: mol_type = genomic RNA
gtcatgcagtgactcactc

SEQ ID NO: 16105 - RNA, 19 nt, Homo sapiens
  source 1..19: mol_type = genomic RNA
tcatgcagtgactcactca

SEQ ID NO: 16106 - RNA, 19 nt, Homo sapiens
  source 1..19: mol_type = genomic RNA
catgcagtgactcactcaa

SEQ ID NO: 16107 - RNA, 19 nt, Homo sapiens
  source 1..19: mol_type = genomic RNA
atgcagtgactcactcaag

SEQ ID NO: 16108 - RNA, 19 nt, Homo sapiens
  source 1..19: mol_type = genomic RNA
tgcagtgactcactcaagc

SEQ ID NO: 16109 - RNA, 19 nt, Homo sapiens
  source 1..19: mol_type = genomic RNA
gcagtgactcactcaagct

SEQ ID NO: 16110 - RNA, 19 nt, Homo sapiens
  source 1..19: mol_type = genomic RNA
cagtgactcactcaagctt

SEQ ID NO: 16111 - RNA, 19 nt, Homo sapiens
  source 1..19: mol_type = genomic RNA
agtgactcactcaagctta

SEQ ID NO: 16112 - RNA, 19 nt, Homo sapiens
  source 1..19: mol_type = genomic RNA
gtgactcactcaagcttag

SEQ ID NO: 16113 - RNA, 19 nt, Homo sapiens
  source 1..19: mol_type = genomic RNA
tgactcactcaagcttagg

SEQ ID NO: 16114 - RNA, 19 nt, Homo sapiens
  source 1..19: mol_type = genomic RNA
gactcactcaagcttaggc

SEQ ID NO: 16115 - RNA, 19 nt, Homo sapiens
  source 1..19: mol_type = genomic RNA
actcactcaagcttaggca

SEQ ID NO: 16116 - RNA, 19 nt, Homo sapiens
  source 1..19: mol_type = genomic RNA
ctcactcaagcttaggcag

SEQ ID NO: 16117 - RNA, 19 nt, Homo sapiens
  source 1..19: mol_type = genomic RNA
tcactcaagcttaggcaga

SEQ ID NO: 16118 - RNA, 19 nt, Homo sapiens
  source 1..19: mol_type = genomic RNA
cactcaagcttaggcagat

SEQ ID NO: 16119 - RNA, 19 nt, Homo sapiens
  source 1..19: mol_type = genomic RNA
actcaagcttaggcagatt

SEQ ID NO: 16120 - RNA, 19 nt, Homo sapiens
  source 1..19: mol_type = genomic RNA
ctcaagcttaggcagattt

SEQ ID NO: 16121 - RNA, 19 nt, Homo sapiens
  source 1..19: mol_type = genomic RNA
tcaagcttaggcagatttg

SEQ ID NO: 16122 - RNA, 19 nt, Homo sapiens
  source 1..19: mol_type = genomic RNA
caagcttaggcagatttgg

SEQ ID NO: 16123 - RNA, 19 nt, Homo sapiens
  source 1..19: mol_type = genomic RNA
aagcttaggcagatttggt

SEQ ID NO: 16124 - RNA, 19 nt, Homo sapiens
  source 1..19: mol_type = genomic RNA
agcttaggcagatttggtg

SEQ ID NO: 16125 - RNA, 19 nt, Homo sapiens
  source 1..19: mol_type = genomic RNA
gcttaggcagatttggtga

SEQ ID NO: 16126 - RNA, 19 nt, Homo sapiens
  source 1..19: mol_type = genomic RNA
cttaggcagatttggtgat

SEQ ID NO: 16127 - RNA, 19 nt, Homo sapiens
  source 1..19: mol_type = genomic RNA
ttaggcagatttggtgata

SEQ ID NO: 16128 - RNA, 19 nt, Homo sapiens
  source 1..19: mol_type = genomic RNA
taggcagatttggtgatat

SEQ ID NO: 16129 - RNA, 19 nt, Homo sapiens
  source 1..19: mol_type = genomic RNA
aggcagatttggtgatata

SEQ ID NO: 16130 - RNA, 19 nt, Homo sapiens
  source 1..19: mol_type = genomic RNA
ggcagatttggtgatatat

SEQ ID NO: 16131 - RNA, 19 nt, Homo sapiens
  source 1..19: mol_type = genomic RNA
gcagatttggtgatatatg

SEQ ID NO: 16132 - RNA, 19 nt, Homo sapiens
  source 1..19: mol_type = genomic RNA
agatttggtgatatatgac

SEQ ID NO: 16133 - RNA, 19 nt, Homo sapiens
  source 1..19: mol_type = genomic RNA
ttggtgatatatgacacag

SEQ ID NO: 16134 - RNA, 19 nt, Homo sapiens
  source 1..19: mol_type = genomic RNA
tggtgatatatgacacaga

SEQ ID NO: 16135 - RNA, 19 nt, Homo sapiens
  source 1..19: mol_type = genomic RNA
ggtgatatatgacacagag

SEQ ID NO: 16136 - RNA, 19 nt, Homo sapiens
  source 1..19: mol_type = genomic RNA
gtgatatatgacacagaga

SEQ ID NO: 16137 - RNA, 19 nt, Homo sapiens
  source 1..19: mol_type = genomic RNA
tgatatatgacacagagat

SEQ ID NO: 16138 - RNA, 19 nt, Homo sapiens
  source 1..19: mol_type = genomic RNA
gatatatgacacagagatg

SEQ ID NO: 16139 - RNA, 19 nt, Homo sapiens
  source 1..19: mol_type = genomic RNA
atatatgacacagagatgc

SEQ ID NO: 16140 - RNA, 19 nt, Homo sapiens
  source 1..19: mol_type = genomic RNA
tatatgacacagagatgca

SEQ ID NO: 16141 - RNA, 19 nt, Homo sapiens
  source 1..19: mol_type = genomic RNA
atatgacacagagatgcaa

SEQ ID NO: 16142 - RNA, 19 nt, Homo sapiens
  source 1..19: mol_type = genomic RNA
tatgacacagagatgcaaa

SEQ ID NO: 16143 - RNA, 19 nt, Homo sapiens
  source 1..19: mol_type = genomic RNA
atgacacagagatgcaaag

SEQ ID NO: 16144 - RNA, 19 nt, Homo sapiens
  source 1..19: mol_type = genomic RNA
tgacacagagatgcaaaga

SEQ ID NO: 16145 - RNA, 19 nt, Homo sapiens
  source 1..19: mol_type = genomic RNA
gacacagagatgcaaagaa

SEQ ID NO: 16146 - RNA, 19 nt, Homo sapiens
  source 1..19: mol_type = genomic RNA
acacagagatgcaaagaaa

SEQ ID NO: 16147 - RNA, 19 nt, Homo sapiens
  source 1..19: mol_type = genomic RNA
cacagagatgcaaagaaat

SEQ ID NO: 16148 - RNA, 19 nt, Homo sapiens
  source 1..19: mol_type = genomic RNA
acagagatgcaaagaaatg

SEQ ID NO: 16149 - RNA, 19 nt, Homo sapiens
  source 1..19: mol_type = genomic RNA
cagagatgcaaagaaatgt

SEQ ID NO: 16150 - RNA, 19 nt, Homo sapiens
  source 1..19: mol_type = genomic RNA
agagatgcaaagaaatgtt

SEQ ID NO: 16151 - RNA, 19 nt, Homo sapiens
  source 1..19: mol_type = genomic RNA
gagatgcaaagaaatgttg

SEQ ID NO: 16152 - RNA, 19 nt, Homo sapiens
  source 1..19: mol_type = genomic RNA
agatgcaaagaaatgttgt

SEQ ID NO: 16153 - RNA, 19 nt, Homo sapiens
  source 1..19: mol_type = genomic RNA
gatgcaaagaaatgttgta

SEQ ID NO: 16154 - RNA, 19 nt, Homo sapiens
  source 1..19: mol_type = genomic RNA
atgcaaagaaatgttgtag

SEQ ID NO: 16155 - RNA, 19 nt, Homo sapiens
  source 1..19: mol_type = genomic RNA
tgcaaagaaatgttgtagc

SEQ ID NO: 16156 - RNA, 19 nt, Homo sapiens
  source 1..19: mol_type = genomic RNA
gcaaagaaatgttgtagct

SEQ ID NO: 16157 - RNA, 19 nt, Homo sapiens
  source 1..19: mol_type = genomic RNA
caaagaaatgttgtagctg

SEQ ID NO: 16158 - RNA, 19 nt, Homo sapiens
  source 1..19: mol_type = genomic RNA
aaagaaatgttgtagctga

SEQ ID NO: 16159 - RNA, 19 nt, Homo sapiens
  source 1..19: mol_type = genomic RNA
aagaaatgttgtagctgac

SEQ ID NO: 16160 - RNA, 19 nt, Homo sapiens
  source 1..19: mol_type = genomic RNA
agaaatgttgtagctgaca

SEQ ID NO: 16161 - RNA, 19 nt, Homo sapiens
  source 1..19: mol_type = genomic RNA
gaaatgttgtagctgacac

SEQ ID NO: 16162 - RNA, 19 nt, Homo sapiens
  source 1..19: mol_type = genomic RNA
aaatgttgtagctgacaca

SEQ ID NO: 16163 - RNA, 19 nt, Homo sapiens
  source 1..19: mol_type = genomic RNA
aatgttgtagctgacacac

SEQ ID NO: 16164 - RNA, 19 nt, Homo sapiens
  source 1..19: mol_type = genomic RNA
atgttgtagctgacacaca

SEQ ID NO: 16165 - RNA, 19 nt, Homo sapiens
  source 1..19: mol_type = genomic RNA
tgttgtagctgacacacac

SEQ ID NO: 16166 - RNA, 19 nt, Homo sapiens
  source 1..19: mol_type = genomic RNA
gttgtagctgacacacaca

SEQ ID NO: 16167 - RNA, 19 nt, Homo sapiens
  source 1..19: mol_type = genomic RNA
ttgtagctgacacacacag

SEQ ID NO: 16168 - RNA, 19 nt, Homo sapiens
  source 1..19: mol_type = genomic RNA
tgtagctgacacacacagg

SEQ ID NO: 16169 - RNA, 19 nt, Homo sapiens
  source 1..19: mol_type = genomic RNA
gctctgggagatgcagaag

SEQ ID NO: 16170 - RNA, 19 nt, Homo sapiens
  source 1..19: mol_type = genomic RNA
ctctgggagatgcagaagg

SEQ ID NO: 16171 - RNA, 19 nt, Homo sapiens
  source 1..19: mol_type = genomic RNA
agatgcagaaggagcacgt

SEQ ID NO: 16172 - RNA, 19 nt, Homo sapiens
  source 1..19: mol_type = genomic RNA
gatgcagaaggagcacgtc

SEQ ID NO: 16173 - RNA, 19 nt, Homo sapiens
  source 1..19: mol_type = genomic RNA
atgcagaaggagcacgtcc

SEQ ID NO: 16174 - RNA, 19 nt, Homo sapiens
  source 1..19: mol_type = genomic RNA
aaggagcacgtcccccaaa

SEQ ID NO: 16175 - RNA, 19 nt, Homo sapiens
  source 1..19: mol_type = genomic RNA
aggagcacgtcccccaaaa

SEQ ID NO: 16176 - RNA, 19 nt, Homo sapiens
  source 1..19: mol_type = genomic RNA
ggagcacgtcccccaaaat

SEQ ID NO: 16177 - RNA, 19 nt, Homo sapiens
  source 1..19: mol_type = genomic RNA
gagcacgtcccccaaaatg

SEQ ID NO: 16178 - RNA, 19 nt, Homo sapiens
  source 1..19: mol_type = genomic RNA
agcacgtcccccaaaatga

SEQ ID NO: 16179 - RNA, 19 nt, Homo sapiens
  source 1..19: mol_type = genomic RNA
gcacgtcccccaaaatgaa

SEQ ID NO: 16180 - RNA, 19 nt, Homo sapiens
  source 1..19: mol_type = genomic RNA
cacgtcccccaaaatgaag

SEQ ID NO: 16181 - RNA, 19 nt, Homo sapiens
  source 1..19: mol_type = genomic RNA
acgtcccccaaaatgaagc

SEQ ID NO: 16182 - RNA, 19 nt, Homo sapiens
  source 1..19: mol_type = genomic RNA
cgtcccccaaaatgaagcc

SEQ ID NO: 16183 - RNA, 19 nt, Homo sapiens
  source 1..19: mol_type = genomic RNA
gtcccccaaaatgaagcca

SEQ ID NO: 16184 - RNA, 19 nt, Homo sapiens
  source 1..19: mol_type = genomic RNA
tcccccaaaatgaagccag

SEQ ID NO: 16185 - RNA, 19 nt, Homo sapiens
  source 1..19: mol_type = genomic RNA
cccccaaaatgaagccaga

SEQ ID NO: 16186 - RNA, 19 nt, Homo sapiens
  source 1..19: mol_type = genomic RNA
ccccaaaatgaagccagac

SEQ ID NO: 16187 - RNA, 19 nt, Homo sapiens
  source 1..19: mol_type = genomic RNA
cccaaaatgaagccagaca

SEQ ID NO: 16188 - RNA, 19 nt, Homo sapiens
  source 1..19: mol_type = genomic RNA
ccaaaatgaagccagacag

SEQ ID NO: 16189 - RNA, 19 nt, Homo sapiens
  source 1..19: mol_type = genomic RNA
caaaatgaagccagacaga

SEQ ID NO: 16190 - RNA, 19 nt, Homo sapiens
  source 1..19: mol_type = genomic RNA
aaaatgaagccagacagac

SEQ ID NO: 16191 - RNA, 19 nt, Homo sapiens
  source 1..19: mol_type = genomic RNA
aaatgaagccagacagaca

SEQ ID NO: 16192 - RNA, 19 nt, Homo sapiens
  source 1..19: mol_type = genomic RNA
aatgaagccagacagacat

SEQ ID NO: 16193 - RNA, 19 nt, Homo sapiens
  source 1..19: mol_type = genomic RNA
atgaagccagacagacatc

SEQ ID NO: 16194 - RNA, 19 nt, Homo sapiens
  source 1..19: mol_type = genomic RNA
tgaagccagacagacatcc

SEQ ID NO: 16195 - RNA, 19 nt, Homo sapiens
  source 1..19: mol_type = genomic RNA
gaagccagacagacatcct

SEQ ID NO: 16196 - RNA, 19 nt, Homo sapiens
  source 1..19: mol_type = genomic RNA
aagccagacagacatcctt

SEQ ID NO: 16197 - RNA, 19 nt, Homo sapiens
  source 1..19: mol_type = genomic RNA
agccagacagacatcctta

SEQ ID NO: 16198 - RNA, 19 nt, Homo sapiens
  source 1..19: mol_type = genomic RNA
gccagacagacatccttaa

SEQ ID NO: 16199 - RNA, 19 nt, Homo sapiens
  source 1..19: mol_type = genomic RNA
ccagacagacatccttaag

SEQ ID NO: 16200 - RNA, 19 nt, Homo sapiens
  source 1..19: mol_type = genomic RNA
cagacagacatccttaagg

SEQ ID NO: 16201 - RNA, 19 nt, Homo sapiens
  source 1..19: mol_type = genomic RNA
agacagacatccttaagga

SEQ ID NO: 16202 - RNA, 19 nt, Homo sapiens
  source 1..19: mol_type = genomic RNA
gacagacatccttaaggaa

SEQ ID NO: 16203 - RNA, 19 nt, Homo sapiens
  source 1..19: mol_type = genomic RNA
acagacatccttaaggaag

SEQ ID NO: 16204 - RNA, 19 nt, Homo sapiens
  source 1..19: mol_type = genomic RNA
cagacatccttaaggaagg

SEQ ID NO: 16205 - RNA, 19 nt, Homo sapiens
  source 1..19: mol_type = genomic RNA
agacatccttaaggaagga

SEQ ID NO: 16206 - RNA, 19 nt, Homo sapiens
  source 1..19: mol_type = genomic RNA
gacatccttaaggaaggag

SEQ ID NO: 16207 - RNA, 19 nt, Homo sapiens
  source 1..19: mol_type = genomic RNA
acatccttaaggaaggagc

SEQ ID NO: 16208 - RNA, 19 nt, Homo sapiens
  source 1..19: mol_type = genomic RNA
catccttaaggaaggagca

SEQ ID NO: 16209 - RNA, 19 nt, Homo sapiens
  source 1..19: mol_type = genomic RNA
atccttaaggaaggagcaa

SEQ ID NO: 16210 - RNA, 19 nt, Homo sapiens
  source 1..19: mol_type = genomic RNA
tccttaaggaaggagcaaa

SEQ ID NO: 16211 - RNA, 19 nt, Homo sapiens
  source 1..19: mol_type = genomic RNA
ccttaaggaaggagcaaag

SEQ ID NO: 16212 - RNA, 19 nt, Homo sapiens
  source 1..19: mol_type = genomic RNA
cttaaggaaggagcaaagg

SEQ ID NO: 16213 - RNA, 19 nt, Homo sapiens
  source 1..19: mol_type = genomic RNA
ttaaggaaggagcaaaggg

SEQ ID NO: 16214 - RNA, 19 nt, Homo sapiens
  source 1..19: mol_type = genomic RNA
aaggagcaaaggggcttca

SEQ ID NO: 16215 - RNA, 19 nt, Homo sapiens
  source 1..19: mol_type = genomic RNA
aggagcaaaggggcttcat

SEQ ID NO: 16216 - RNA, 19 nt, Homo sapiens
  source 1..19: mol_type = genomic RNA
ggagcaaaggggcttcatc

SEQ ID NO: 16217 - RNA, 19 nt, Homo sapiens
  source 1..19: mol_type = genomic RNA
gagcaaaggggcttcatct

SEQ ID NO: 16218 - RNA, 19 nt, Homo sapiens
  source 1..19: mol_type = genomic RNA
agcaaaggggcttcatctt

SEQ ID NO: 16219 - RNA, 19 nt, Homo sapiens
  source 1..19: mol_type = genomic RNA
gcaaaggggcttcatctta

SEQ ID NO: 16220 - RNA, 19 nt, Homo sapiens
  source 1..19: mol_type = genomic RNA
caaaggggcttcatcttaa

SEQ ID NO: 16221 - RNA, 19 nt, Homo sapiens
  source 1..19: mol_type = genomic RNA
aaaggggcttcatcttaaa

SEQ ID NO: 16222 - RNA, 19 nt, Homo sapiens
  source 1..19: mol_type = genomic RNA
aaggggcttcatcttaaag

SEQ ID NO: 16223 - RNA, 19 nt, Homo sapiens
  source 1..19: mol_type = genomic RNA
aggggcttcatcttaaaga

SEQ ID NO: 16224 - RNA, 19 nt, Homo sapiens
  source 1..19: mol_type = genomic RNA
ggggcttcatcttaaagaa

SEQ ID NO: 16225 - RNA, 19 nt, Homo sapiens
  source 1..19: mol_type = genomic RNA
gggcttcatcttaaagaat

SEQ ID NO: 16226 - RNA, 19 nt, Homo sapiens
  source 1..19: mol_type = genomic RNA
ggcttcatcttaaagaatg

SEQ ID NO: 16227 - RNA, 19 nt, Homo sapiens
  source 1..19: mol_type = genomic RNA
tcttaaagaatgaagaagg

SEQ ID NO: 16228 - RNA, 19 nt, Homo sapiens
  source 1..19: mol_type = genomic RNA
cttaaagaatgaagaaggg

SEQ ID NO: 16229 - RNA, 19 nt, Homo sapiens
  source 1..19: mol_type = genomic RNA
ttaaagaatgaagaaggga

SEQ ID NO: 16230 - RNA, 19 nt, Homo sapiens
  source 1..19: mol_type = genomic RNA
taaagaatgaagaagggat

SEQ ID NO: 16231 - RNA, 19 nt, Homo sapiens
  source 1..19: mol_type = genomic RNA
aaagaatgaagaagggatt

SEQ ID NO: 16232 - RNA, 19 nt, Homo sapiens
  source 1..19: mol_type = genomic RNA
aagaatgaagaagggattt

SEQ ID NO: 16233 - RNA, 19 nt, Homo sapiens
  source 1..19: mol_type = genomic RNA
agaatgaagaagggatttg

SEQ ID NO: 16234 - RNA, 19 nt, Homo sapiens
  source 1..19: mol_type = genomic RNA
gaatgaagaagggatttgt

SEQ ID NO: 16235 - RNA, 19 nt, Homo sapiens
  source 1..19: mol_type = genomic RNA
aatgaagaagggatttgtc

SEQ ID NO: 16236 - RNA, 19 nt, Homo sapiens
  source 1..19: mol_type = genomic RNA
atgaagaagggatttgtca

SEQ ID NO: 16237 - RNA, 19 nt, Homo sapiens
  source 1..19: mol_type = genomic RNA
tgaagaagggatttgtcat

SEQ ID NO: 16238 - RNA, 19 nt, Homo sapiens
  source 1..19: mol_type = genomic RNA
gaagaagggatttgtcatg

SEQ ID NO: 16239 - RNA, 19 nt, Homo sapiens
  source 1..19: mol_type = genomic RNA
aagaagggatttgtcatga

SEQ ID NO: 16240 - RNA, 19 nt, Homo sapiens
  source 1..19: mol_type = genomic RNA
agaagggatttgtcatgag

SEQ ID NO: 16241 - RNA, 19 nt, Homo sapiens
  source 1..19: mol_type = genomic RNA
gaagggatttgtcatgaga

SEQ ID NO: 16242 - RNA, 19 nt, Homo sapiens
  source 1..19: mol_type = genomic RNA
aagggatttgtcatgagag

SEQ ID NO: 16243 - RNA, 19 nt, Homo sapiens
  source 1..19: mol_type = genomic RNA
agggatttgtcatgagaga

SEQ ID NO: 16244 - RNA, 19 nt, Homo sapiens
  source 1..19: mol_type = genomic RNA
gggatttgtcatgagagat

SEQ ID NO: 16245 - RNA, 19 nt, Homo sapiens
  source 1..19: mol_type = genomic RNA
ggatttgtcatgagagatg

SEQ ID NO: 16246 - RNA, 19 nt, Homo sapiens
  source 1..19: mol_type = genomic RNA
tttgtcatgagagatgtgg

SEQ ID NO: 16247 - RNA, 19 nt, Homo sapiens
  source 1..19: mol_type = genomic RNA
ttgtcatgagagatgtggc

SEQ ID NO: 16248 - RNA, 19 nt, Homo sapiens
  source 1..19: mol_type = genomic RNA
tgtcatgagagatgtggca

SEQ ID NO: 16249 - RNA, 19 nt, Homo sapiens
  source 1..19: mol_type = genomic RNA
gtcatgagagatgtggcag

SEQ ID NO: 16250 - RNA, 19 nt, Homo sapiens
  source 1..19: mol_type = genomic RNA
tcatgagagatgtggcagg

SEQ ID NO: 16251 - RNA, 19 nt, Homo sapiens
  source 1..19: mol_type = genomic RNA
catgagagatgtggcagga

SEQ ID NO: 16252 - RNA, 19 nt, Homo sapiens
  source 1..19: mol_type = genomic RNA
atgagagatgtggcaggaa

SEQ ID NO: 16253 - RNA, 19 nt, Homo sapiens
  source 1..19: mol_type = genomic RNA
tgagagatgtggcaggaat

SEQ ID NO: 16254 - RNA, 19 nt, Homo sapiens
  source 1..19: mol_type = genomic RNA
gagagatgtggcaggaatt

SEQ ID NO: 16255 - RNA, 19 nt, Homo sapiens
  source 1..19: mol_type = genomic RNA
agagatgtggcaggaattt

SEQ ID NO: 16256 - RNA, 19 nt, Homo sapiens
  source 1..19: mol_type = genomic RNA
gagatgtggcaggaatttc

SEQ ID NO: 16257 - RNA, 19 nt, Homo sapiens
  source 1..19: mol_type = genomic RNA
agatgtggcaggaatttct

SEQ ID NO: 16258 - RNA, 19 nt, Homo sapiens
  source 1..19: mol_type = genomic RNA
gatgtggcaggaatttctt

SEQ ID NO: 16259 - RNA, 19 nt, Homo sapiens
  source 1..19: mol_type = genomic RNA
atgtggcaggaatttcttg

SEQ ID NO: 16260 - RNA, 19 nt, Homo sapiens
  source 1..19: mol_type = genomic RNA
tgtggcaggaatttcttga

SEQ ID NO: 16261 - RNA, 19 nt, Homo sapiens
  source 1..19: mol_type = genomic RNA
gtggcaggaatttcttgag

SEQ ID NO: 16262 - RNA, 19 nt, Homo sapiens
  source 1..19: mol_type = genomic RNA
tggcaggaatttcttgaga

SEQ ID NO: 16263 - RNA, 19 nt, Homo sapiens
  source 1..19: mol_type = genomic RNA
ggcaggaatttcttgagag

SEQ ID NO: 16264 - RNA, 19 nt, Homo sapiens
  source 1..19: mol_type = genomic RNA
gcaggaatttcttgagagg

SEQ ID NO: 16265 - RNA, 19 nt, Homo sapiens
  source 1..19: mol_type = genomic RNA
caggaatttcttgagaggc

SEQ ID NO: 16266 - RNA, 19 nt, Homo sapiens
  source 1..19: mol_type = genomic RNA
aggaatttcttgagaggca

SEQ ID NO: 16267 - RNA, 19 nt, Homo sapiens
  source 1..19: mol_type = genomic RNA
ggaatttcttgagaggcag

SEQ ID NO: 16268 - RNA, 19 nt, Homo sapiens
  source 1..19: mol_type = genomic RNA
gaatttcttgagaggcaga

SEQ ID NO: 16269 - RNA, 19 nt, Homo sapiens
  source 1..19: mol_type = genomic RNA
aatttcttgagaggcagag

SEQ ID NO: 16270 - RNA, 19 nt, Homo sapiens
  source 1..19: mol_type = genomic RNA
atttcttgagaggcagagg

SEQ ID NO: 16271 - RNA, 19 nt, Homo sapiens
  source 1..19: mol_type = genomic RNA
tttcttgagaggcagaggg

SEQ ID NO: 16272 - RNA, 19 nt, Homo sapiens
  source 1..19: mol_type = genomic RNA
ttcttgagaggcagaggga

SEQ ID NO: 16273 - RNA, 19 nt, Homo sapiens
  source 1..19: mol_type = genomic RNA
cagagggagagcatgagaa

SEQ ID NO: 16274 - RNA, 19 nt, Homo sapiens
  source 1..19: mol_type = genomic RNA
agagggagagcatgagaat

SEQ ID NO: 16275 - RNA, 19 nt, Homo sapiens
  source 1..19: mol_type = genomic RNA
gagggagagcatgagaatg

SEQ ID NO: 16276 - RNA, 19 nt, Homo sapiens
  source 1..19: mol_type = genomic RNA
agggagagcatgagaatgt

SEQ ID NO: 16277 - RNA, 19 nt, Homo sapiens
  source 1..19: mol_type = genomic RNA
gggagagcatgagaatgtt

SEQ ID NO: 16278 - RNA, 19 nt, Homo sapiens
  source 1..19: mol_type = genomic RNA
ggagagcatgagaatgtta

SEQ ID NO: 16279 - RNA, 19 nt, Homo sapiens
  source 1..19: mol_type = genomic RNA
gagagcatgagaatgttag

SEQ ID NO: 16280 - RNA, 19 nt, Homo sapiens
  source 1..19: mol_type = genomic RNA
agagcatgagaatgttagg

SEQ ID NO: 16281 - RNA, 19 nt, Homo sapiens
  source 1..19: mol_type = genomic RNA
gagcatgagaatgttagga

SEQ ID NO: 16282 - RNA, 19 nt, Homo sapiens
  source 1..19: mol_type = genomic RNA
agcatgagaatgttaggaa

SEQ ID NO: 16283 - RNA, 19 nt, Homo sapiens
  source 1..19: mol_type = genomic RNA
gcatgagaatgttaggaag

SEQ ID NO: 16284 - RNA, 19 nt, Homo sapiens
  source 1..19: mol_type = genomic RNA
catgagaatgttaggaagg

SEQ ID NO: 16285 - RNA, 19 nt, Homo sapiens
  source 1..19: mol_type = genomic RNA
atgagaatgttaggaaggc

SEQ ID NO: 16286 - RNA, 19 nt, Homo sapiens
  source 1..19: mol_type = genomic RNA
tgagaatgttaggaaggca

SEQ ID NO: 16287 - RNA, 19 nt, Homo sapiens
  source 1..19: mol_type = genomic RNA
gagaatgttaggaaggcag

SEQ ID NO: 16288 - RNA, 19 nt, Homo sapiens
  source 1..19: mol_type = genomic RNA
agaatgttaggaaggcagg

SEQ ID NO: 16289 - RNA, 19 nt, Homo sapiens
  source 1..19: mol_type = genomic RNA
gaatgttaggaaggcagga

SEQ ID NO: 16290 - RNA, 19 nt, Homo sapiens
  source 1..19: mol_type = genomic RNA
aatgttaggaaggcaggag

SEQ ID NO: 16291 - RNA, 19 nt, Homo sapiens
  source 1..19: mol_type = genomic RNA
atgttaggaaggcaggaga

SEQ ID NO: 16292 - RNA, 19 nt, Homo sapiens
  source 1..19: mol_type = genomic RNA
tgttaggaaggcaggagag

SEQ ID NO: 16293 - RNA, 19 nt, Homo sapiens
  source 1..19: mol_type = genomic RNA
gttaggaaggcaggagaga

SEQ ID NO: 16294 - RNA, 19 nt, Homo sapiens
  source 1..19: mol_type = genomic RNA
aaggcaggagagactctca

SEQ ID NO: 16295 - RNA, 19 nt, Homo sapiens
  source 1..19: mol_type = genomic RNA
caggagagactctcacaca

SEQ ID NO: 16296 - RNA, 19 nt, Homo sapiens
  source 1..19: mol_type = genomic RNA
aggagagactctcacacat

SEQ ID NO: 16297 - RNA, 19 nt, Homo sapiens
  source 1..19: mol_type = genomic RNA
ggagagactctcacacatc

SEQ ID NO: 16298 - RNA, 19 nt, Homo sapiens
  source 1..19: mol_type = genomic RNA
gagagactctcacacatct

SEQ ID NO: 16299 - RNA, 19 nt, Homo sapiens
  source 1..19: mol_type = genomic RNA
agagactctcacacatctg

SEQ ID NO: 16300 - RNA, 19 nt, Homo sapiens
  source 1..19: mol_type = genomic RNA
gagactctcacacatctgg

SEQ ID NO: 16301 - RNA, 19 nt, Homo sapiens
  source 1..19: mol_type = genomic RNA
agactctcacacatctggg

SEQ ID NO: 16302 - RNA, 19 nt, Homo sapiens
  source 1..19: mol_type = genomic RNA
gactctcacacatctggga

SEQ ID NO: 16303 - RNA, 19 nt, Homo sapiens
  source 1..19: mol_type = genomic RNA
actctcacacatctgggaa

SEQ ID NO: 16304 - RNA, 19 nt, Homo sapiens
  source 1..19: mol_type = genomic RNA
ctctcacacatctgggaag

SEQ ID NO: 16305 - RNA, 19 nt, Homo sapiens
  source 1..19: mol_type = genomic RNA
tctcacacatctgggaagc

SEQ ID NO: 16306 - RNA, 19 nt, Homo sapiens
  source 1..19: mol_type = genomic RNA
ctcacacatctgggaagct

SEQ ID NO: 16307 - RNA, 19 nt, Homo sapiens
  source 1..19: mol_type = genomic RNA
tcacacatctgggaagctg

SEQ ID NO: 16308 - RNA, 19 nt, Homo sapiens
  source 1..19: mol_type = genomic RNA
cacacatctgggaagctga

SEQ ID NO: 16309 - RNA, 19 nt, Homo sapiens
  source 1..19: mol_type = genomic RNA
acacatctgggaagctgac

SEQ ID NO: 16310 - RNA, 19 nt, Homo sapiens
  source 1..19: mol_type = genomic RNA
cacatctgggaagctgaca

SEQ ID NO: 16311 - RNA, 19 nt, Homo sapiens
  source 1..19: mol_type = genomic RNA
acatctgggaagctgacaa

SEQ ID NO: 16312 - RNA, 19 nt, Homo sapiens
  source 1..19: mol_type = genomic RNA
catctgggaagctgacaat

SEQ ID NO: 16313 - RNA, 19 nt, Homo sapiens
  source 1..19: mol_type = genomic RNA
atctgggaagctgacaatc

SEQ ID NO: 16314 - RNA, 19 nt, Homo sapiens
  source 1..19: mol_type = genomic RNA
tctgggaagctgacaatcc

SEQ ID NO: 16315 - RNA, 19 nt, Homo sapiens
  source 1..19: mol_type = genomic RNA
ctgggaagctgacaatcca

SEQ ID NO: 16316 - RNA, 19 nt, Homo sapiens
  source 1..19: mol_type = genomic RNA
tgggaagctgacaatccat

SEQ ID NO: 16317 - RNA, 19 nt, Homo sapiens
  source 1..19: mol_type = genomic RNA
gggaagctgacaatccatc

SEQ ID NO: 16318 - RNA, 19 nt, Homo sapiens
  source 1..19: mol_type = genomic RNA
ggaagctgacaatccatca

SEQ ID NO: 16319 - RNA, 19 nt, Homo sapiens
  source 1..19: mol_type = genomic RNA
gaagctgacaatccatcag

SEQ ID NO: 16320 - RNA, 19 nt, Homo sapiens
  source 1..19: mol_type = genomic RNA
aagctgacaatccatcagc

SEQ ID NO: 16321 - RNA, 19 nt, Homo sapiens
  source 1..19: mol_type = genomic RNA
agctgacaatccatcagca

SEQ ID NO: 16322 - RNA, 19 nt, Homo sapiens
  source 1..19: mol_type = genomic RNA
gctgacaatccatcagcat

SEQ ID NO: 16323 - RNA, 19 nt, Homo sapiens
  source 1..19: mol_type = genomic RNA
ctgacaatccatcagcatg

SEQ ID NO: 16324 - RNA, 19 nt, Homo sapiens
  source 1..19: mol_type = genomic RNA
tgacaatccatcagcatgt

SEQ ID NO: 16325 - RNA, 19 nt, Homo sapiens
  source 1..19: mol_type = genomic RNA
gacaatccatcagcatgtc

SEQ ID NO: 16326 - RNA, 19 nt, Homo sapiens
  source 1..19: mol_type = genomic RNA
acaatccatcagcatgtcc

SEQ ID NO: 16327 - RNA, 19 nt, Homo sapiens
  source 1..19: mol_type = genomic RNA
caatccatcagcatgtcca

SEQ ID NO: 16328 - RNA, 19 nt, Homo sapiens
  source 1..19: mol_type = genomic RNA
aatccatcagcatgtccag

SEQ ID NO: 16329 - RNA, 19 nt, Homo sapiens
  source 1..19: mol_type = genomic RNA
atccatcagcatgtccagg

SEQ ID NO: 16330 - RNA, 19 nt, Homo sapiens
  source 1..19: mol_type = genomic RNA
tccatcagcatgtccagga

SEQ ID NO: 16331 - RNA, 19 nt, Homo sapiens
  source 1..19: mol_type = genomic RNA
ccatcagcatgtccaggag

SEQ ID NO: 16332 - RNA, 19 nt, Homo sapiens
  source 1..19: mol_type = genomic RNA
catcagcatgtccaggagg

SEQ ID NO: 16333 - RNA, 19 nt, Homo sapiens
  source 1..19: mol_type = genomic RNA
atcagcatgtccaggagga

SEQ ID NO: 16334 - RNA, 19 nt, Homo sapiens
  source 1..19: mol_type = genomic RNA
tcagcatgtccaggaggaa

SEQ ID NO: 16335 - RNA, 19 nt, Homo sapiens
  source 1..19: mol_type = genomic RNA
cagcatgtccaggaggaaa

SEQ ID NO: 16336 - RNA, 19 nt, Homo sapiens
  source 1..19: mol_type = genomic RNA
agcatgtccaggaggaaaa

SEQ ID NO: 16337 - RNA, 19 nt, Homo sapiens
  source 1..19: mol_type = genomic RNA
gcatgtccaggaggaaaat

SEQ ID NO: 16338 - RNA, 19 nt, Homo sapiens
  source 1..19: mol_type = genomic RNA
catgtccaggaggaaaata

SEQ ID NO: 16339 - RNA, 19 nt, Homo sapiens
  source 1..19: mol_type = genomic RNA
atgtccaggaggaaaataa

SEQ ID NO: 16340 - RNA, 19 nt, Homo sapiens
  source 1..19: mol_type = genomic RNA
tgtccaggaggaaaataag

SEQ ID NO: 16341 - RNA, 19 nt, Homo sapiens
  source 1..19: mol_type = genomic RNA
gtccaggaggaaaataagg

SEQ ID NO: 16342 - RNA, 19 nt, Homo sapiens
  source 1..19: mol_type = genomic RNA
tccaggaggaaaataagga

SEQ ID NO: 16343 - RNA, 19 nt, Homo sapiens
  source 1..19: mol_type = genomic RNA
ccaggaggaaaataaggag

SEQ ID NO: 16344 - RNA, 19 nt, Homo sapiens
  source 1..19: mol_type = genomic RNA
caggaggaaaataaggagg

SEQ ID NO: 16345 - RNA, 19 nt, Homo sapiens
  source 1..19: mol_type = genomic RNA
aggaggaaaataaggagga

SEQ ID NO: 16346 - RNA, 19 nt, Homo sapiens
  source 1..19: mol_type = genomic RNA
ggaggaaaataaggaggag

SEQ ID NO: 16347 - RNA, 19 nt, Homo sapiens
  source 1..19: mol_type = genomic RNA
gaggaaaataaggaggagg

SEQ ID NO: 16348 - RNA, 19 nt, Homo sapiens
  source 1..19: mol_type = genomic RNA
aggaaaataaggaggagga

SEQ ID NO: 16349 - RNA, 19 nt, Homo sapiens
  source 1..19: mol_type = genomic RNA
ggaaaataaggaggaggag

SEQ ID NO: 16350 - RNA, 19 nt, Homo sapiens
  source 1..19: mol_type = genomic RNA
gaaaataaggaggaggagc

SEQ ID NO: 16351 - RNA, 19 nt, Homo sapiens
  source 1..19: mol_type = genomic RNA
aaaataaggaggaggagca

SEQ ID NO: 16352 - RNA, 19 nt, Homo sapiens
  source 1..19: mol_type = genomic RNA
aaataaggaggaggagcag

SEQ ID NO: 16353 - RNA, 19 nt, Homo sapiens
  source 1..19: mol_type = genomic RNA
gaggaggagcagaaataga

SEQ ID NO: 16354 - RNA, 19 nt, Homo sapiens
  source 1..19: mol_type = genomic RNA
aggaggagcagaaatagat

SEQ ID NO: 16355 - RNA, 19 nt, Homo sapiens
  source 1..19: mol_type = genomic RNA
ggaggagcagaaatagatg

SEQ ID NO: 16356 - RNA, 19 nt, Homo sapiens
  source 1..19: mol_type = genomic RNA
gaggagcagaaatagatga

SEQ ID NO: 16357 - RNA, 19 nt, Homo sapiens
  source 1..19: mol_type = genomic RNA
aggagcagaaatagatgag

SEQ ID NO: 16358 - RNA, 19 nt, Homo sapiens
  source 1..19: mol_type = genomic RNA
ggagcagaaatagatgagg

SEQ ID NO: 16359 - RNA, 19 nt, Homo sapiens
  source 1..19: mol_type = genomic RNA
gagcagaaatagatgaggc

SEQ ID NO: 16360 - RNA, 19 nt, Homo sapiens
  source 1..19: mol_type = genomic RNA
agcagaaatagatgaggct

SEQ ID NO: 16361 - RNA, 19 nt, Homo sapiens
  source 1..19: mol_type = genomic RNA
gcagaaatagatgaggctg

SEQ ID NO: 16362 - RNA, 19 nt, Homo sapiens
  source 1..19: mol_type = genomic RNA
cagaaatagatgaggctgg

SEQ ID NO: 16363 - RNA, 19 nt, Homo sapiens
  source 1..19: mol_type = genomic RNA
agaaatagatgaggctgga

SEQ ID NO: 16364 - RNA, 19 nt, Homo sapiens
  source 1..19: mol_type = genomic RNA
gaaatagatgaggctggat

SEQ ID NO: 16365 - RNA, 19 nt, Homo sapiens
  source 1..19: mol_type = genomic RNA
aaatagatgaggctggata

SEQ ID NO: 16366 - RNA, 19 nt, Homo sapiens
  source 1..19: mol_type = genomic RNA
aatagatgaggctggatat

SEQ ID NO: 16367 - RNA, 19 nt, Homo sapiens
  source 1..19: mol_type = genomic RNA
atagatgaggctggatata

SEQ ID NO: 16368 - RNA, 19 nt, Homo sapiens
  source 1..19: mol_type = genomic RNA
tagatgaggctggatatag

SEQ ID NO: 16369 - RNA, 19 nt, Homo sapiens
  source 1..19: mol_type = genomic RNA
agatgaggctggatataga

SEQ ID NO: 16370 - RNA, 19 nt, Homo sapiens
  source 1..19: mol_type = genomic RNA
gatgaggctggatatagaa

SEQ ID NO: 16371 - RNA, 19 nt, Homo sapiens
  source 1..19: mol_type = genomic RNA
atgaggctggatatagaag

SEQ ID NO: 16372 - RNA, 19 nt, Homo sapiens
  source 1..19: mol_type = genomic RNA
tgaggctggatatagaagc

SEQ ID NO: 16373 - RNA, 19 nt, Homo sapiens
  source 1..19: mol_type = genomic RNA
gaggctggatatagaagca

SEQ ID NO: 16374 - RNA, 19 nt, Homo sapiens
  source 1..19: mol_type = genomic RNA
aggctggatatagaagcag

SEQ ID NO: 16375 - RNA, 19 nt, Homo sapiens
  source 1..19: mol_type = genomic RNA
ggctggatatagaagcagg

SEQ ID NO: 16376 - RNA, 19 nt, Homo sapiens
  source 1..19: mol_type = genomic RNA
gctggatatagaagcaggg

SEQ ID NO: 16377 - RNA, 19 nt, Homo sapiens
  source 1..19: mol_type = genomic RNA
ctggatatagaagcagggc

SEQ ID NO: 16378 - RNA, 19 nt, Homo sapiens
  source 1..19: mol_type = genomic RNA
tggatatagaagcagggct

SEQ ID NO: 16379 - RNA, 19 nt, Homo sapiens
  source 1..19: mol_type = genomic RNA
ggatatagaagcagggctg

SEQ ID NO: 16380 - RNA, 19 nt, Homo sapiens
  source 1..19: mol_type = genomic RNA
gatatagaagcagggctga

SEQ ID NO: 16381 - RNA, 19 nt, Homo sapiens
  source 1..19: mol_type = genomic RNA
atatagaagcagggctgaa

SEQ ID NO: 16382 - RNA, 19 nt, Homo sapiens
  source 1..19: mol_type = genomic RNA
tatagaagcagggctgaag

SEQ ID NO: 16383 - RNA, 19 nt, Homo sapiens
  source 1..19: mol_type = genomic RNA
gcagggctgaagctgtgtt

SEQ ID NO: 16384 - RNA, 19 nt, Homo sapiens
  source 1..19: mol_type = genomic RNA
cagggctgaagctgtgttg

SEQ ID NO: 16385 - RNA, 19 nt, Homo sapiens
  source 1..19: mol_type = genomic RNA
agggctgaagctgtgttgt

SEQ ID NO: 16386 - RNA, 19 nt, Homo sapiens
  source 1..19: mol_type = genomic RNA
gggctgaagctgtgttgtt

SEQ ID NO: 16387 - RNA, 19 nt, Homo sapiens
  source 1..19: mol_type = genomic RNA
ggctgaagctgtgttgttt

SEQ ID NO: 16388 - RNA, 19 nt, Homo sapiens
  source 1..19: mol_type = genomic RNA
gctgaagctgtgttgtttg

SEQ ID NO: 16389 - RNA, 19 nt, Homo sapiens
  source 1..19: mol_type = genomic RNA
tgaagctgtgttgtttgtg

SEQ ID NO: 16390 - RNA, 19 nt, Homo sapiens
  source 1..19: mol_type = genomic RNA
gaagctgtgttgtttgtgg

SEQ ID NO: 16391 - RNA, 19 nt, Homo sapiens
  source 1..19: mol_type = genomic RNA
aagctgtgttgtttgtggt

SEQ ID NO: 16392 - RNA, 19 nt, Homo sapiens
  source 1..19: mol_type = genomic RNA
agctgtgttgtttgtggta

SEQ ID NO: 16393 - RNA, 19 nt, Homo sapiens
  source 1..19: mol_type = genomic RNA
gctgtgttgtttgtggtaa

SEQ ID NO: 16394 - RNA, 19 nt, Homo sapiens
  source 1..19: mol_type = genomic RNA
ttgtggtaaagagttgtga

SEQ ID NO: 16395 - RNA, 19 nt, Homo sapiens
  source 1..19: mol_type = genomic RNA
tgtggtaaagagttgtgat

SEQ ID NO: 16396 - RNA, 19 nt, Homo sapiens
  source 1..19: mol_type = genomic RNA
gtggtaaagagttgtgatt

SEQ ID NO: 16397 - RNA, 19 nt, Homo sapiens
  source 1..19: mol_type = genomic RNA
tggtaaagagttgtgattc

SEQ ID NO: 16398 - RNA, 19 nt, Homo sapiens
  source 1..19: mol_type = genomic RNA
ggtaaagagttgtgattct

SEQ ID NO: 16399 - RNA, 19 nt, Homo sapiens
  source 1..19: mol_type = genomic RNA
tgtgattctatccagaagg

SEQ ID NO: 16400 - RNA, 19 nt, Homo sapiens
  source 1..19: mol_type = genomic RNA
gtgattctatccagaaggc

SEQ ID NO: 16401 - RNA, 19 nt, Homo sapiens
  source 1..19: mol_type = genomic RNA
tgattctatccagaaggca

SEQ ID NO: 16402 - RNA, 19 nt, Homo sapiens
  source 1..19: mol_type = genomic RNA
gattctatccagaaggcaa

SEQ ID NO: 16403 - RNA, 19 nt, Homo sapiens
  source 1..19: mol_type = genomic RNA
attctatccagaaggcaat

SEQ ID NO: 16404 - RNA, 19 nt, Homo sapiens
  source 1..19: mol_type = genomic RNA
ttctatccagaaggcaata

SEQ ID NO: 16405 - RNA, 19 nt, Homo sapiens
  source 1..19: mol_type = genomic RNA
tctatccagaaggcaatag

SEQ ID NO: 16406 - RNA, 19 nt, Homo sapiens
  source 1..19: mol_type = genomic RNA
ctatccagaaggcaatagg

SEQ ID NO: 16407 - RNA, 19 nt, Homo sapiens
  source 1..19: mol_type = genomic RNA
tatccagaaggcaataggt

SEQ ID NO: 16408 - RNA, 19 nt, Homo sapiens
  source 1..19: mol_type = genomic RNA
atccagaaggcaataggta

SEQ ID NO: 16409 - RNA, 19 nt, Homo sapiens
  source 1..19: mol_type = genomic RNA
tccagaaggcaataggtag

SEQ ID NO: 16410 - RNA, 19 nt, Homo sapiens
  source 1..19: mol_type = genomic RNA
ccagaaggcaataggtagc

SEQ ID NO: 16411 - RNA, 19 nt, Homo sapiens
  source 1..19: mol_type = genomic RNA
aaatattttctgcaaaggg

SEQ ID NO: 16412 - RNA, 19 nt, Homo sapiens
  source 1..19: mol_type = genomic RNA
aatattttctgcaaagggc

SEQ ID NO: 16413 - RNA, 19 nt, Homo sapiens
  source 1..19: mol_type = genomic RNA
atattttctgcaaagggct

SEQ ID NO: 16414 - RNA, 19 nt, Homo sapiens
  source 1..19: mol_type = genomic RNA
tattttctgcaaagggcta

SEQ ID NO: 16415 - RNA, 19 nt, Homo sapiens
  source 1..19: mol_type = genomic RNA
attttctgcaaagggctaa

SEQ ID NO: 16416 - RNA, 19 nt, Homo sapiens
  source 1..19: mol_type = genomic RNA
ttttctgcaaagggctaaa

SEQ ID NO: 16417 - RNA, 19 nt, Homo sapiens
  source 1..19: mol_type = genomic RNA
tttctgcaaagggctaaat

SEQ ID NO: 16418 - RNA, 19 nt, Homo sapiens
  source 1..19: mol_type = genomic RNA
ttctgcaaagggctaaatg

SEQ ID NO: 16419 - RNA, 19 nt, Homo sapiens
  source 1..19: mol_type = genomic RNA
tctgcaaagggctaaatgt

SEQ ID NO: 16420 - RNA, 19 nt, Homo sapiens
  source 1..19: mol_type = genomic RNA
ctgcaaagggctaaatgtt

SEQ ID NO: 16421 - RNA, 19 nt, Homo sapiens
  source 1..19: mol_type = genomic RNA
tgcaaagggctaaatgtta

SEQ ID NO: 16422 - RNA, 19 nt, Homo sapiens
  source 1..19: mol_type = genomic RNA
gcaaagggctaaatgttaa

SEQ ID NO: 16423 - RNA, 19 nt, Homo sapiens
  source 1..19: mol_type = genomic RNA
caaagggctaaatgttaaa

SEQ ID NO: 16424 - RNA, 19 nt, Homo sapiens
  source 1..19: mol_type = genomic RNA
aaagggctaaatgttaaat

SEQ ID NO: 16425 - RNA, 19 nt, Homo sapiens
  source 1..19: mol_type = genomic RNA
aagggctaaatgttaaata

SEQ ID NO: 16426 - RNA, 19 nt, Homo sapiens
  source 1..19: mol_type = genomic RNA
agggctaaatgttaaatat

SEQ ID NO: 16427 - RNA, 19 nt, Homo sapiens
  source 1..19: mol_type = genomic RNA
aattttccaagccatatgg

SEQ ID NO: 16428 - RNA, 19 nt, Homo sapiens
  source 1..19: mol_type = genomic RNA
attttccaagccatatggt

SEQ ID NO: 16429 - RNA, 19 nt, Homo sapiens
  source 1..19: mol_type = genomic RNA
ttttccaagccatatggtc

SEQ ID NO: 16430 - RNA, 19 nt, Homo sapiens
  source 1..19: mol_type = genomic RNA
tttccaagccatatggtct

SEQ ID NO: 16431 - RNA, 19 nt, Homo sapiens
  source 1..19: mol_type = genomic RNA
ttccaagccatatggtctc

SEQ ID NO: 16432 - RNA, 19 nt, Homo sapiens
  source 1..19: mol_type = genomic RNA
tccaagccatatggtctct

SEQ ID NO: 16433 - RNA, 19 nt, Homo sapiens
  source 1..19: mol_type = genomic RNA
ccaagccatatggtctctc

SEQ ID NO: 16434 - RNA, 19 nt, Homo sapiens
  source 1..19: mol_type = genomic RNA
caagccatatggtctctct

SEQ ID NO: 16435 - RNA, 19 nt, Homo sapiens
  source 1..19: mol_type = genomic RNA
aagccatatggtctctctc

SEQ ID NO: 16436 - RNA, 19 nt, Homo sapiens
  source 1..19: mol_type = genomic RNA
agccatatggtctctctct

SEQ ID NO: 16437 - RNA, 19 nt, Homo sapiens
  source 1..19: mol_type = genomic RNA
gccatatggtctctctctc

SEQ ID NO: 16438 - RNA, 19 nt, Homo sapiens
  source 1..19: mol_type = genomic RNA
ccatatggtctctctctca

SEQ ID NO: 16439 - RNA, 19 nt, Homo sapiens
  source 1..19: mol_type = genomic RNA
catatggtctctctctcaa

SEQ ID NO: 16440 - RNA, 19 nt, Homo sapiens
  source 1..19: mol_type = genomic RNA
atatggtctctctctcaat

SEQ ID NO: 16441 - RNA, 19 nt, Homo sapiens
  source 1..19: mol_type = genomic RNA
tatggtctctctctcaatg

SEQ ID NO: 16442 - RNA, 19 nt, Homo sapiens
  source 1..19: mol_type = genomic RNA
atggtctctctctcaatga

SEQ ID NO: 16443 - RNA, 19 nt, Homo sapiens
  source 1..19: mol_type = genomic RNA
tggtctctctctcaatgac

SEQ ID NO: 16444 - RNA, 19 nt, Homo sapiens
  source 1..19: mol_type = genomic RNA
ggtctctctctcaatgact

SEQ ID NO: 16445 - RNA, 19 nt, Homo sapiens
  source 1..19: mol_type = genomic RNA
gtctctctctcaatgactc

SEQ ID NO: 16446 - RNA, 19 nt, Homo sapiens
  source 1..19: mol_type = genomic RNA
tctctctctcaatgactca

SEQ ID NO: 16447 - RNA, 19 nt, Homo sapiens
  source 1..19: mol_type = genomic RNA
ctctctctcaatgactcag

SEQ ID NO: 16448 - RNA, 19 nt, Homo sapiens
  source 1..19: mol_type = genomic RNA
tctctctcaatgactcagc

SEQ ID NO: 16449 - RNA, 19 nt, Homo sapiens
  source 1..19: mol_type = genomic RNA
ctctctcaatgactcagct

SEQ ID NO: 16450 - RNA, 19 nt, Homo sapiens
  source 1..19: mol_type = genomic RNA
tctctcaatgactcagctc

SEQ ID NO: 16451 - RNA, 19 nt, Homo sapiens
  source 1..19: mol_type = genomic RNA
ctctcaatgactcagctct

SEQ ID NO: 16452 - RNA, 19 nt, Homo sapiens
  source 1..19: mol_type = genomic RNA
tctcaatgactcagctctt

SEQ ID NO: 16453 - RNA, 19 nt, Homo sapiens
  source 1..19: mol_type = genomic RNA
ctcaatgactcagctcttc

SEQ ID NO: 16454 - RNA, 19 nt, Homo sapiens
  source 1..19: mol_type = genomic RNA
tcaatgactcagctcttcc

SEQ ID NO: 16455 - RNA, 19 nt, Homo sapiens
  source 1..19: mol_type = genomic RNA
caatgactcagctcttcca

SEQ ID NO: 16456 - RNA, 19 nt, Homo sapiens
  source 1..19: mol_type = genomic RNA
aatgactcagctcttccat

SEQ ID NO: 16457 - RNA, 19 nt, Homo sapiens
  source 1..19: mol_type = genomic RNA
atgactcagctcttccatt

SEQ ID NO: 16458 - RNA, 19 nt, Homo sapiens
  source 1..19: mol_type = genomic RNA
tgactcagctcttccatta

SEQ ID NO: 16459 - RNA, 19 nt, Homo sapiens
  source 1..19: mol_type = genomic RNA
gactcagctcttccattat

SEQ ID NO: 16460 - RNA, 19 nt, Homo sapiens
  source 1..19: mol_type = genomic RNA
tcagctcttccattatacc

SEQ ID NO: 16461 - RNA, 19 nt, Homo sapiens
  source 1..19: mol_type = genomic RNA
cagctcttccattatacca

SEQ ID NO: 16462 - RNA, 19 nt, Homo sapiens
  source 1..19: mol_type = genomic RNA
agctcttccattataccat

SEQ ID NO: 16463 - RNA, 19 nt, Homo sapiens
  source 1..19: mol_type = genomic RNA
tccattataccatgaaagt

SEQ ID NO: 16464 - RNA, 19 nt, Homo sapiens
  source 1..19: mol_type = genomic RNA
attataccatgaaagtagc

SEQ ID NO: 16465 - RNA, 19 nt, Homo sapiens
  source 1..19: mol_type = genomic RNA
ttataccatgaaagtagcc

SEQ ID NO: 16466 - RNA, 19 nt, Homo sapiens
  source 1..19: mol_type = genomic RNA
tataccatgaaagtagcca

SEQ ID NO: 16467 - RNA, 19 nt, Homo sapiens
  source 1..19: mol_type = genomic RNA
ataccatgaaagtagccag

SEQ ID NO: 16468 - RNA, 19 nt, Homo sapiens
  source 1..19: mol_type = genomic RNA
taccatgaaagtagccaga

SEQ ID NO: 16469 - RNA, 19 nt, Homo sapiens
  source 1..19: mol_type = genomic RNA
accatgaaagtagccagag

SEQ ID NO: 16470 - RNA, 19 nt, Homo sapiens
  source 1..19: mol_type = genomic RNA
ccatgaaagtagccagaga

SEQ ID NO: 16471 - RNA, 19 nt, Homo sapiens
  source 1..19: mol_type = genomic RNA
catgaaagtagccagagac

SEQ ID NO: 16472 - RNA, 19 nt, Homo sapiens
  source 1..19: mol_type = genomic RNA
atgaaagtagccagagacg

SEQ ID NO: 16473 - RNA, 19 nt, Homo sapiens
  source 1..19: mol_type = genomic RNA
tgaaagtagccagagacgt

SEQ ID NO: 16474 - RNA, 19 nt, Homo sapiens
  source 1..19: mol_type = genomic RNA
caaacgcagactgtgtcag

SEQ ID NO: 16475 - RNA, 19 nt, Homo sapiens
  source 1..19: mol_type = genomic RNA
aaacgcagactgtgtcaga

SEQ ID NO: 16476 - RNA, 19 nt, Homo sapiens
  source 1..19: mol_type = genomic RNA
aacgcagactgtgtcagac

SEQ ID NO: 16477 - RNA, 19 nt, Homo sapiens
  source 1..19: mol_type = genomic RNA
acgcagactgtgtcagaca

SEQ ID NO: 16478 - RNA, 19 nt, Homo sapiens
  source 1..19: mol_type = genomic RNA
cgcagactgtgtcagacat

SEQ ID NO: 16479 - RNA, 19 nt, Homo sapiens
  source 1..19: mol_type = genomic RNA
gcagactgtgtcagacata

SEQ ID NO: 16480 - RNA, 19 nt, Homo sapiens
  source 1..19: mol_type = genomic RNA
cagactgtgtcagacatag

SEQ ID NO: 16481 - RNA, 19 nt, Homo sapiens
  source 1..19: mol_type = genomic RNA
agactgtgtcagacatagt

SEQ ID NO: 16482 - RNA, 19 nt, Homo sapiens
  source 1..19: mol_type = genomic RNA
gactgtgtcagacatagtc

SEQ ID NO: 16483 - RNA, 19 nt, Homo sapiens
  source 1..19: mol_type = genomic RNA
actgtgtcagacatagtcc

SEQ ID NO: 16484 - RNA, 19 nt, Homo sapiens
  source 1..19: mol_type = genomic RNA
ctgtgtcagacatagtcca

SEQ ID NO: 16485 - RNA, 19 nt, Homo sapiens
  source 1..19: mol_type = genomic RNA
tgtgtcagacatagtccat

SEQ ID NO: 16486 - RNA, 19 nt, Homo sapiens
  source 1..19: mol_type = genomic RNA
gtgtcagacatagtccatg

SEQ ID NO: 16487 - RNA, 19 nt, Homo sapiens
  source 1..19: mol_type = genomic RNA
tgtcagacatagtccatgt

SEQ ID NO: 16488 - RNA, 19 nt, Homo sapiens
  source 1..19: mol_type = genomic RNA
gtcagacatagtccatgta

SEQ ID NO: 16489 - RNA, 19 nt, Homo sapiens
  source 1..19: mol_type = genomic RNA
tcagacatagtccatgtat

SEQ ID NO: 16490 - RNA, 19 nt, Homo sapiens
  source 1..19: mol_type = genomic RNA
cagacatagtccatgtatg

SEQ ID NO: 16491 - RNA, 19 nt, Homo sapiens
  source 1..19: mol_type = genomic RNA
agacatagtccatgtatgg

SEQ ID NO: 16492 - RNA, 19 nt, Homo sapiens
  source 1..19: mol_type = genomic RNA
gacatagtccatgtatggt

SEQ ID NO: 16493 - RNA, 19 nt, Homo sapiens
  source 1..19: mol_type = genomic RNA
acatagtccatgtatggta

SEQ ID NO: 16494 - RNA, 19 nt, Homo sapiens
  source 1..19: mol_type = genomic RNA
catagtccatgtatggtag

SEQ ID NO: 16495 - RNA, 19 nt, Homo sapiens
  source 1..19: mol_type = genomic RNA
atagtccatgtatggtagt

SEQ ID NO: 16496 - RNA, 19 nt, Homo sapiens
  source 1..19: mol_type = genomic RNA
tgccacaccttgttttaga

SEQ ID NO: 16497 - RNA, 19 nt, Homo sapiens
  source 1..19: mol_type = genomic RNA
gccacaccttgttttagaa

SEQ ID NO: 16498 - RNA, 19 nt, Homo sapiens
  source 1..19: mol_type = genomic RNA
acaccttgttttagaaagc

SEQ ID NO: 16499 - RNA, 19 nt, Homo sapiens
  source 1..19: mol_type = genomic RNA
tgttttagaaagctcaggt

SEQ ID NO: 16500 - RNA, 19 nt, Homo sapiens
  source 1..19: mol_type = genomic RNA
tagaaagctcaggtttatg

SEQ ID NO: 16501 - RNA, 19 nt, Homo sapiens
  source 1..19: mol_type = genomic RNA
agaaagctcaggtttatga

SEQ ID NO: 16502 - RNA, 19 nt, Homo sapiens
  source 1..19: mol_type = genomic RNA
gaaagctcaggtttatgat

SEQ ID NO: 16503 - RNA, 19 nt, Homo sapiens
  source 1..19: mol_type = genomic RNA
aaagctcaggtttatgatg

SEQ ID NO: 16504 - RNA, 19 nt, Homo sapiens
  source 1..19: mol_type = genomic RNA
aagctcaggtttatgatgt

SEQ ID NO: 16505 - RNA, 19 nt, Homo sapiens
  source 1..19: mol_type = genomic RNA
agctcaggtttatgatgtg

SEQ ID NO: 16506 - RNA, 19 nt, Homo sapiens
  source 1..19: mol_type = genomic RNA
gctcaggtttatgatgtga

SEQ ID NO: 16507 - RNA, 19 nt, Homo sapiens
  source 1..19: mol_type = genomic RNA
tcaggtttatgatgtgatg

SEQ ID NO: 16508 - RNA, 19 nt, Homo sapiens
  source 1..19: mol_type = genomic RNA
caggtttatgatgtgatgg

SEQ ID NO: 16509 - RNA, 19 nt, Homo sapiens
  source 1..19: mol_type = genomic RNA
aggtttatgatgtgatgga

SEQ ID NO: 16510 - RNA, 19 nt, Homo sapiens
  source 1..19: mol_type = genomic RNA
ggtttatgatgtgatggag

SEQ ID NO: 16511 - RNA, 19 nt, Homo sapiens
  source 1..19: mol_type = genomic RNA
gtttatgatgtgatggaga

SEQ ID NO: 16512 - RNA, 19 nt, Homo sapiens
  source 1..19: mol_type = genomic RNA
tttatgatgtgatggagaa

SEQ ID NO: 16513 - RNA, 19 nt, Homo sapiens
  source 1..19: mol_type = genomic RNA
ttatgatgtgatggagaat

SEQ ID NO: 16514 - RNA, 19 nt, Homo sapiens
  source 1..19: mol_type = genomic RNA
tatgatgtgatggagaatt

SEQ ID NO: 16515 - RNA, 19 nt, Homo sapiens
  source 1..19: mol_type = genomic RNA
atgatgtgatggagaattc

SEQ ID NO: 16516 - RNA, 19 nt, Homo sapiens
  source 1..19: mol_type = genomic RNA
tgatgtgatggagaattcc

SEQ ID NO: 16517 - RNA, 19 nt, Homo sapiens
  source 1..19: mol_type = genomic RNA
gatgtgatggagaattcct

SEQ ID NO: 16518 - RNA, 19 nt, Homo sapiens
  source 1..19: mol_type = genomic RNA
atgtgatggagaattccta

SEQ ID NO: 16519 - RNA, 19 nt, Homo sapiens
  source 1..19: mol_type = genomic RNA
tgtgatggagaattcctac

SEQ ID NO: 16520 - RNA, 19 nt, Homo sapiens
  source 1..19: mol_type = genomic RNA
gtgatggagaattcctaca

SEQ ID NO: 16521 - RNA, 19 nt, Homo sapiens
  source 1..19: mol_type = genomic RNA
tgatggagaattcctacaa

SEQ ID NO: 16522 - RNA, 19 nt, Homo sapiens
  source 1..19: mol_type = genomic RNA
gatggagaattcctacaag

SEQ ID NO: 16523 - RNA, 19 nt, Homo sapiens
  source 1..19: mol_type = genomic RNA
atggagaattcctacaaga

SEQ ID NO: 16524 - RNA, 19 nt, Homo sapiens
  source 1..19: mol_type = genomic RNA
tggagaattcctacaagag

SEQ ID NO: 16525 - RNA, 19 nt, Homo sapiens
  source 1..19: mol_type = genomic RNA
ggagaattcctacaagagt

SEQ ID NO: 16526 - RNA, 19 nt, Homo sapiens
  source 1..19: mol_type = genomic RNA
gagaattcctacaagagtt

SEQ ID NO: 16527 - RNA, 19 nt, Homo sapiens
  source 1..19: mol_type = genomic RNA
agaattcctacaagagttc

SEQ ID NO: 16528 - RNA, 19 nt, Homo sapiens
  source 1..19: mol_type = genomic RNA
tttaaatggtagagtgaac

SEQ ID NO: 16529 - RNA, 19 nt, Homo sapiens
  source 1..19: mol_type = genomic RNA
ttaaatggtagagtgaaca

SEQ ID NO: 16530 - RNA, 19 nt, Homo sapiens
  source 1..19: mol_type = genomic RNA
taaatggtagagtgaacat

SEQ ID NO: 16531 - RNA, 19 nt, Homo sapiens
  source 1..19: mol_type = genomic RNA
aaatggtagagtgaacata

SEQ ID NO: 16532 - RNA, 19 nt, Homo sapiens
  source 1..19: mol_type = genomic RNA
aatggtagagtgaacatac

SEQ ID NO: 16533 - RNA, 19 nt, Homo sapiens
  source 1..19: mol_type = genomic RNA
atggtagagtgaacataca

SEQ ID NO: 16534 - RNA, 19 nt, Homo sapiens
  source 1..19: mol_type = genomic RNA
tggtagagtgaacatacac

SEQ ID NO: 16535 - RNA, 19 nt, Homo sapiens
  source 1..19: mol_type = genomic RNA
ggtagagtgaacatacact

SEQ ID NO: 16536 - RNA, 19 nt, Homo sapiens
  source 1..19: mol_type = genomic RNA
gtagagtgaacatacactg

SEQ ID NO: 16537 - RNA, 19 nt, Homo sapiens
  source 1..19: mol_type = genomic RNA
tagagtgaacatacactgg

SEQ ID NO: 16538 - RNA, 19 nt, Homo sapiens
  source 1..19: mol_type = genomic RNA
agagtgaacatacactgga

SEQ ID NO: 16539 - RNA, 19 nt, Homo sapiens
  source 1..19: mol_type = genomic RNA
gagtgaacatacactggaa

SEQ ID NO: 16540 - RNA, 19 nt, Homo sapiens
  source 1..19: mol_type = genomic RNA
agtgaacatacactggaat

SEQ ID NO: 16541 - RNA, 19 nt, Homo sapiens
  source 1..19: mol_type = genomic RNA
gtgaacatacactggaatt

SEQ ID NO: 16542 - RNA, 19 nt, Homo sapiens
  source 1..19: mol_type = genomic RNA
tgaacatacactggaattc

SEQ ID NO: 16543 - RNA, 19 nt, Homo sapiens
  source 1..19: mol_type = genomic RNA
gaacatacactggaattct

SEQ ID NO: 16544 - RNA, 19 nt, Homo sapiens
  source 1..19: mol_type = genomic RNA
aacatacactggaattcta

SEQ ID NO: 16545 - RNA, 19 nt, Homo sapiens
  source 1..19: mol_type = genomic RNA
acatacactggaattctat

SEQ ID NO: 16546 - RNA, 19 nt, Homo sapiens
  source 1..19: mol_type = genomic RNA
atacactggaattctatac

SEQ ID NO: 16547 - RNA, 19 nt, Homo sapiens
  source 1..19: mol_type = genomic RNA
tacactggaattctatact

SEQ ID NO: 16548 - RNA, 19 nt, Homo sapiens
  source 1..19: mol_type = genomic RNA
acactggaattctatactg

SEQ ID NO: 16549 - RNA, 19 nt, Homo sapiens
  source 1..19: mol_type = genomic RNA
cactggaattctatactgc

SEQ ID NO: 16550 - RNA, 19 nt, Homo sapiens
  source 1..19: mol_type = genomic RNA
actggaattctatactgct

SEQ ID NO: 16551 - RNA, 19 nt, Homo sapiens
  source 1..19: mol_type = genomic RNA
ctggaattctatactgctt

SEQ ID NO: 16552 - RNA, 19 nt, Homo sapiens
  source 1..19: mol_type = genomic RNA
tggaattctatactgcttg

SEQ ID NO: 16553 - RNA, 19 nt, Homo sapiens
  source 1..19: mol_type = genomic RNA
ggaattctatactgcttga

SEQ ID NO: 16554 - RNA, 19 nt, Homo sapiens
  source 1..19: mol_type = genomic RNA
gaattctatactgcttgac

SEQ ID NO: 16555 - RNA, 19 nt, Homo sapiens
  source 1..19: mol_type = genomic RNA
aattctatactgcttgacc

SEQ ID NO: 16556 - RNA, 19 nt, Homo sapiens
  source 1..19: mol_type = genomic RNA
attctatactgcttgaccc

SEQ ID NO: 16557 - RNA, 19 nt, Homo sapiens
  source 1..19: mol_type = genomic RNA
ttctatactgcttgaccca

SEQ ID NO: 16558 - RNA, 19 nt, Homo sapiens
  source 1..19: mol_type = genomic RNA
tctatactgcttgacccaa

SEQ ID NO: 16559 - RNA, 19 nt, Homo sapiens
  source 1..19: mol_type = genomic RNA
ctatactgcttgacccaag

SEQ ID NO: 16560 - RNA, 19 nt, Homo sapiens
  source 1..19: mol_type = genomic RNA
tatactgcttgacccaagc

SEQ ID NO: 16561 - RNA, 19 nt, Homo sapiens
  source 1..19: mol_type = genomic RNA
atactgcttgacccaagct

SEQ ID NO: 16562 - RNA, 19 nt, Homo sapiens
  source 1..19: mol_type = genomic RNA
tactgcttgacccaagctt

SEQ ID NO: 16563 - RNA, 19 nt, Homo sapiens
  source 1..19: mol_type = genomic RNA
actgcttgacccaagcttt

SEQ ID NO: 16564 - RNA, 19 nt, Homo sapiens
  source 1..19: mol_type = genomic RNA
ctgcttgacccaagctttt

SEQ ID NO: 16565 - RNA, 19 nt, Homo sapiens
  source 1..19: mol_type = genomic RNA
tgcttgacccaagcttttg

SEQ ID NO: 16566 - RNA, 19 nt, Homo sapiens
  source 1..19: mol_type = genomic RNA
gcttgacccaagcttttga

SEQ ID NO: 16567 - RNA, 19 nt, Homo sapiens
  source 1..19: mol_type = genomic RNA
cttgacccaagcttttgat

SEQ ID NO: 16568 - RNA, 19 nt, Homo sapiens
  source 1..19: mol_type = genomic RNA
tgacccaagcttttgatag

SEQ ID NO: 16569 - RNA, 19 nt, Homo sapiens
  source 1..19: mol_type = genomic RNA
gacccaagcttttgatagc

SEQ ID NO: 16570 - RNA, 19 nt, Homo sapiens
  source 1..19: mol_type = genomic RNA
acccaagcttttgatagca

SEQ ID NO: 16571 - RNA, 19 nt, Homo sapiens
  source 1..19: mol_type = genomic RNA
cccaagcttttgatagcaa

SEQ ID NO: 16572 - RNA, 19 nt, Homo sapiens
  source 1..19: mol_type = genomic RNA
ccaagcttttgatagcaaa

SEQ ID NO: 16573 - RNA, 19 nt, Homo sapiens
  source 1..19: mol_type = genomic RNA
agcttttgatagcaaaagg

SEQ ID NO: 16574 - RNA, 19 nt, Homo sapiens
  source 1..19: mol_type = genomic RNA
gcttttgatagcaaaaggt

SEQ ID NO: 16575 - RNA, 19 nt, Homo sapiens
  source 1..19: mol_type = genomic RNA
tttgatagcaaaaggtaga

SEQ ID NO: 16576 - RNA, 19 nt, Homo sapiens
  source 1..19: mol_type = genomic RNA
ttgatagcaaaaggtagaa

SEQ ID NO: 16577 - RNA, 19 nt, Homo sapiens
  source 1..19: mol_type = genomic RNA
tgatagcaaaaggtagaaa

SEQ ID NO: 16578 - RNA, 19 nt, Homo sapiens
  source 1..19: mol_type = genomic RNA
gatagcaaaaggtagaaaa

SEQ ID NO: 16579 - RNA, 19 nt, Homo sapiens
  source 1..19: mol_type = genomic RNA
atagcaaaaggtagaaaag

SEQ ID NO: 16580 - RNA, 19 nt, Homo sapiens
  source 1..19: mol_type = genomic RNA
tagcaaaaggtagaaaaga

SEQ ID NO: 16581 - RNA, 19 nt, Homo sapiens
  source 1..19: mol_type = genomic RNA
agcaaaaggtagaaaagac

SEQ ID NO: 16582 - RNA, 19 nt, Homo sapiens
  source 1..19: mol_type = genomic RNA
gcaaaaggtagaaaagaca

SEQ ID NO: 16583 - RNA, 19 nt, Homo sapiens
  source 1..19: mol_type = genomic RNA
caaaaggtagaaaagacag

SEQ ID NO: 16584 - RNA, 19 nt, Homo sapiens
  source 1..19: mol_type = genomic RNA
aaaaggtagaaaagacaga

SEQ ID NO: 16585 - RNA, 19 nt, Homo sapiens
  source 1..19: mol_type = genomic RNA
aaaggtagaaaagacagat

SEQ ID NO: 16586 - RNA, 19 nt, Homo sapiens
  source 1..19: mol_type = genomic RNA
tagtcatagctcagggtgt

SEQ ID NO: 16587 - RNA, 19 nt, Homo sapiens
  source 1..19: mol_type = genomic RNA
agtcatagctcagggtgtt

SEQ ID NO: 16588 - RNA, 19 nt, Homo sapiens
  source 1..19: mol_type = genomic RNA
gtcatagctcagggtgttt

SEQ ID NO: 16589 - RNA, 19 nt, Homo sapiens
  source 1..19: mol_type = genomic RNA
tcatagctcagggtgtttg

SEQ ID NO: 16590 - RNA, 19 nt, Homo sapiens
  source 1..19: mol_type = genomic RNA
catagctcagggtgtttga

SEQ ID NO: 16591 - RNA, 19 nt, Homo sapiens
  source 1..19: mol_type = genomic RNA
atagctcagggtgtttgac

SEQ ID NO: 16592 - RNA, 19 nt, Homo sapiens
  source 1..19: mol_type = genomic RNA
tagctcagggtgtttgact

SEQ ID NO: 16593 - RNA, 19 nt, Homo sapiens
  source 1..19: mol_type = genomic RNA
agctcagggtgtttgactt

SEQ ID NO: 16594 - RNA, 19 nt, Homo sapiens
  source 1..19: mol_type = genomic RNA
gctcagggtgtttgacttc

SEQ ID NO: 16595 - RNA, 19 nt, Homo sapiens
  source 1..19: mol_type = genomic RNA
ctcagggtgtttgacttct

SEQ ID NO: 16596 - RNA, 19 nt, Homo sapiens
  source 1..19: mol_type = genomic RNA
tcagggtgtttgacttctt

SEQ ID NO: 16597 - RNA, 19 nt, Homo sapiens
  source 1..19: mol_type = genomic RNA
cagggtgtttgacttcttc

SEQ ID NO: 16598 - RNA, 19 nt, Homo sapiens
  source 1..19: mol_type = genomic RNA
agggtgtttgacttcttcc

SEQ ID NO: 16599 - RNA, 19 nt, Homo sapiens
  source 1..19: mol_type = genomic RNA
gggtgtttgacttcttcct

SEQ ID NO: 16600 - RNA, 19 nt, Homo sapiens
  source 1..19: mol_type = genomic RNA
tgtttgcttttctgtgggg

SEQ ID NO: 16601 - RNA, 19 nt, Homo sapiens
  source 1..19: mol_type = genomic RNA
gtttgcttttctgtggggt

SEQ ID NO: 16602 - RNA, 19 nt, Homo sapiens
  source 1..19: mol_type = genomic RNA
tttgcttttctgtggggtt

SEQ ID NO: 16603 - RNA, 19 nt, Homo sapiens
  source 1..19: mol_type = genomic RNA
ttgcttttctgtggggttt

SEQ ID NO: 16604 - RNA, 19 nt, Homo sapiens
  source 1..19: mol_type = genomic RNA
tgcttttctgtggggtttt

SEQ ID NO: 16605 - RNA, 19 nt, Homo sapiens
  source 1..19: mol_type = genomic RNA
tctgtggggtttttgttgt

SEQ ID NO: 16606 - RNA, 19 nt, Homo sapiens
  source 1..19: mol_type = genomic RNA
aaaaattccctttcactgc

SEQ ID NO: 16607 - RNA, 19 nt, Homo sapiens
  source 1..19: mol_type = genomic RNA
aaaattccctttcactgct

SEQ ID NO: 16608 - RNA, 19 nt, Homo sapiens
  source 1..19: mol_type = genomic RNA
gcttttttgtcacagcagc

SEQ ID NO: 16609 - RNA, 19 nt, Homo sapiens
  source 1..19: mol_type = genomic RNA
cttttttgtcacagcagcc

SEQ ID NO: 16610 - RNA, 19 nt, Homo sapiens
  source 1..19: mol_type = genomic RNA
tttgtcacagcagcctttg

SEQ ID NO: 16611 - RNA, 19 nt, Homo sapiens
  source 1..19: mol_type = genomic RNA
ttgtcacagcagcctttgt

SEQ ID NO: 16612 - RNA, 19 nt, Homo sapiens
  source 1..19: mol_type = genomic RNA
tgtcacagcagcctttgtc

SEQ ID NO: 16613 - RNA, 19 nt, Homo sapiens
  source 1..19: mol_type = genomic RNA
gtcacagcagcctttgtcg

SEQ ID NO: 16614 - RNA, 19 nt, Homo sapiens
  source 1..19: mol_type = genomic RNA
tcacagcagcctttgtcgc

SEQ ID NO: 16615 - RNA, 19 nt, Homo sapiens
  source 1..19: mol_type = genomic RNA
cacagcagcctttgtcgct

SEQ ID NO: 16616 - RNA, 19 nt, Homo sapiens
  source 1..19: mol_type = genomic RNA
acagcagcctttgtcgctt

SEQ ID NO: 16617 - RNA, 19 nt, Homo sapiens
  source 1..19: mol_type = genomic RNA
cagcagcctttgtcgcttc

SEQ ID NO: 16618 - RNA, 19 nt, Homo sapiens
  source 1..19: mol_type = genomic RNA
agcagcctttgtcgcttca

SEQ ID NO: 16619 - RNA, 19 nt, Homo sapiens
  source 1..19: mol_type = genomic RNA
gcagcctttgtcgcttcaa

SEQ ID NO: 16620 - RNA, 19 nt, Homo sapiens
  source 1..19: mol_type = genomic RNA
cagcctttgtcgcttcaaa

SEQ ID NO: 16621 - RNA, 19 nt, Homo sapiens
  source 1..19: mol_type = genomic RNA
agcctttgtcgcttcaaac

SEQ ID NO: 16622 - RNA, 19 nt, Homo sapiens
  source 1..19: mol_type = genomic RNA
gcctttgtcgcttcaaaca

SEQ ID NO: 16623 - RNA, 19 nt, Homo sapiens
  source 1..19: mol_type = genomic RNA
cctttgtcgcttcaaacac

SEQ ID NO: 16624 - RNA, 19 nt, Homo sapiens
  source 1..19: mol_type = genomic RNA
ctttgtcgcttcaaacacc

SEQ ID NO: 16625 - RNA, 19 nt, Homo sapiens
  source 1..19: mol_type = genomic RNA
tttgtcgcttcaaacaccg

SEQ ID NO: 16626 - RNA, 19 nt, Homo sapiens
  source 1..19: mol_type = genomic RNA
ttgtcgcttcaaacaccgc

SEQ ID NO: 16627 - RNA, 19 nt, Homo sapiens
  source 1..19: mol_type = genomic RNA
tgtcgcttcaaacaccgca

SEQ ID NO: 16628 - RNA, 19 nt, Homo sapiens
  source 1..19: mol_type = genomic RNA
gtcgcttcaaacaccgcaa

SEQ ID NO: 16629 - RNA, 19 nt, Homo sapiens
  source 1..19: mol_type = genomic RNA
tcgcttcaaacaccgcaag

SEQ ID NO: 16630 - RNA, 19 nt, Homo sapiens
  source 1..19: mol_type = genomic RNA
cgcttcaaacaccgcaagt

SEQ ID NO: 16631 - RNA, 19 nt, Homo sapiens
  source 1..19: mol_type = genomic RNA
gcttcaaacaccgcaagtg

SEQ ID NO: 16632 - RNA, 19 nt, Homo sapiens
  source 1..19: mol_type = genomic RNA
cttcaaacaccgcaagtgt

SEQ ID NO: 16633 - RNA, 19 nt, Homo sapiens
  source 1..19: mol_type = genomic RNA
ttcaaacaccgcaagtgtt

SEQ ID NO: 16634 - RNA, 19 nt, Homo sapiens
  source 1..19: mol_type = genomic RNA
tcaaacaccgcaagtgttc

SEQ ID NO: 16635 - RNA, 19 nt, Homo sapiens
  source 1..19: mol_type = genomic RNA
caaacaccgcaagtgttct

SEQ ID NO: 16636 - RNA, 19 nt, Homo sapiens
  source 1..19: mol_type = genomic RNA
aaacaccgcaagtgttctt

SEQ ID NO: 16637 - RNA, 19 nt, Homo sapiens
  source 1..19: mol_type = genomic RNA
aacaccgcaagtgttcttt

SEQ ID NO: 16638 - RNA, 19 nt, Homo sapiens
  source 1..19: mol_type = genomic RNA
acaccgcaagtgttctttt

SEQ ID NO: 16639 - RNA, 19 nt, Homo sapiens
  source 1..19: mol_type = genomic RNA
aacctttcaagtgaaatgc

SEQ ID NO: 16640 - RNA, 19 nt, Homo sapiens
  source 1..19: mol_type = genomic RNA
acctttcaagtgaaatgca

SEQ ID NO: 16641 - RNA, 19 nt, Homo sapiens
  source 1..19: mol_type = genomic RNA
cctttcaagtgaaatgcaa

SEQ ID NO: 16642 - RNA, 19 nt, Homo sapiens
  source 1..19: mol_type = genomic RNA
ctttcaagtgaaatgcaac

SEQ ID NO: 16643 - RNA, 19 nt, Homo sapiens
  source 1..19: mol_type = genomic RNA
tttcaagtgaaatgcaaca

SEQ ID NO: 16644 - RNA, 19 nt, Homo sapiens
  source 1..19: mol_type = genomic RNA
ttcaagtgaaatgcaacat

SEQ ID NO: 16645 - RNA, 19 nt, Homo sapiens
  source 1..19: mol_type = genomic RNA
tcaagtgaaatgcaacatg

SEQ ID NO: 16646 - RNA, 19 nt, Homo sapiens
  source 1..19: mol_type = genomic RNA
caagtgaaatgcaacatgt

SEQ ID NO: 16647 - RNA, 19 nt, Homo sapiens
  source 1..19: mol_type = genomic RNA
aagtgaaatgcaacatgtc

SEQ ID NO: 16648 - RNA, 19 nt, Homo sapiens
  source 1..19: mol_type = genomic RNA
agtgaaatgcaacatgtct

SEQ ID NO: 16649 - RNA, 19 nt, Homo sapiens
  source 1..19: mol_type = genomic RNA
gtgaaatgcaacatgtctg

SEQ ID NO: 16650 - RNA, 19 nt, Homo sapiens
  source 1..19: mol_type = genomic RNA
tgaaatgcaacatgtctga

SEQ ID NO: 16651 - RNA, 19 nt, Homo sapiens
  source 1..19: mol_type = genomic RNA
gaaatgcaacatgtctgaa

SEQ ID NO: 16652 - RNA, 19 nt, Homo sapiens
  source 1..19: mol_type = genomic RNA
aaatgcaacatgtctgaaa

SEQ ID NO: 16653 - RNA, 19 nt, Homo sapiens
  source 1..19: mol_type = genomic RNA
aatgcaacatgtctgaaac

SEQ ID NO: 16654 - RNA, 19 nt, Homo sapiens
  source 1..19: mol_type = genomic RNA
atgcaacatgtctgaaacg

SEQ ID NO: 16655 - RNA, 19 nt, Homo sapiens
  source 1..19: mol_type = genomic RNA
tgcaacatgtctgaaacgt

SEQ ID NO: 16656 - RNA, 19 nt, Homo sapiens
  source 1..19: mol_type = genomic RNA
gcaacatgtctgaaacgtg

SEQ ID NO: 16657 - RNA, 19 nt, Homo sapiens
  source 1..19: mol_type = genomic RNA
caacatgtctgaaacgtgg

SEQ ID NO: 16658 - RNA, 19 nt, Homo sapiens
  source 1..19: mol_type = genomic RNA
aacatgtctgaaacgtggt

SEQ ID NO: 16659 - RNA, 19 nt, Homo sapiens
  source 1..19: mol_type = genomic RNA
acatgtctgaaacgtggta

SEQ ID NO: 16660 - RNA, 19 nt, Homo sapiens
  source 1..19: mol_type = genomic RNA
catgtctgaaacgtggtat

SEQ ID NO: 16661 - RNA, 19 nt, Homo sapiens
  source 1..19: mol_type = genomic RNA
atgtctgaaacgtggtatc

SEQ ID NO: 16662 - RNA, 19 nt, Homo sapiens
  source 1..19: mol_type = genomic RNA
tgtctgaaacgtggtatct

SEQ ID NO: 16663 - RNA, 19 nt, Homo sapiens
  source 1..19: mol_type = genomic RNA
gtctgaaacgtggtatctg

SEQ ID NO: 16664 - RNA, 19 nt, Homo sapiens
  source 1..19: mol_type = genomic RNA
tctgaaacgtggtatctgg

SEQ ID NO: 16665 - RNA, 19 nt, Homo sapiens
  source 1..19: mol_type = genomic RNA
ctgaaacgtggtatctgga

SEQ ID NO: 16666 - RNA, 19 nt, Homo sapiens
  source 1..19: mol_type = genomic RNA
tgaaacgtggtatctggag

SEQ ID NO: 16667 - RNA, 19 nt, Homo sapiens
  source 1..19: mol_type = genomic RNA
gaaacgtggtatctggaga

SEQ ID NO: 16668 - RNA, 19 nt, Homo sapiens
  source 1..19: mol_type = genomic RNA
aaacgtggtatctggagag

SEQ ID NO: 16669 - RNA, 19 nt, Homo sapiens
  source 1..19: mol_type = genomic RNA
aacgtggtatctggagagg

SEQ ID NO: 16670 - RNA, 19 nt, Homo sapiens
  source 1..19: mol_type = genomic RNA
acgtggtatctggagaggt

SEQ ID NO: 16671 - RNA, 19 nt, Homo sapiens
  source 1..19: mol_type = genomic RNA
cgtggtatctggagaggtg

SEQ ID NO: 16672 - RNA, 19 nt, Homo sapiens
  source 1..19: mol_type = genomic RNA
gtggtatctggagaggtga

SEQ ID NO: 16673 - RNA, 19 nt, Homo sapiens
  source 1..19: mol_type = genomic RNA
tggtatctggagaggtgag

SEQ ID NO: 16674 - RNA, 19 nt, Homo sapiens
  source 1..19: mol_type = genomic RNA
ggtatctggagaggtgaga

SEQ ID NO: 16675 - RNA, 19 nt, Homo sapiens
  source 1..19: mol_type = genomic RNA
gtatctggagaggtgagat

SEQ ID NO: 16676 - RNA, 19 nt, Homo sapiens
  source 1..19: mol_type = genomic RNA
tatctggagaggtgagatg

SEQ ID NO: 16677 - RNA, 19 nt, Homo sapiens
  source 1..19: mol_type = genomic RNA
atctggagaggtgagatgg

SEQ ID NO: 16678 - RNA, 19 nt, Homo sapiens
  source 1..19: mol_type = genomic RNA
tctggagaggtgagatgga

SEQ ID NO: 16679 - RNA, 19 nt, Homo sapiens
  source 1..19: mol_type = genomic RNA
gagaggtgagatggacaaa

SEQ ID NO: 16680 - RNA, 19 nt, Homo sapiens
  source 1..19: mol_type = genomic RNA
agaggtgagatggacaaag

SEQ ID NO: 16681 - RNA, 19 nt, Homo sapiens
  source 1..19: mol_type = genomic RNA
gaggtgagatggacaaagg

SEQ ID NO: 16682 - RNA, 19 nt, Homo sapiens
  source 1..19: mol_type = genomic RNA
aggtgagatggacaaagga

SEQ ID NO: 16683 - RNA, 19 nt, Homo sapiens
  source 1..19: mol_type = genomic RNA
ggtgagatggacaaaggag

SEQ ID NO: 16684 - RNA, 19 nt, Homo sapiens
  source 1..19: mol_type = genomic RNA
gtgagatggacaaaggagc

SEQ ID NO: 16685 - RNA, 19 nt, Homo sapiens
  source 1..19: mol_type = genomic RNA
gatggacaaaggagccctt

SEQ ID NO: 16686 - RNA, 19 nt, Homo sapiens
  source 1..19: mol_type = genomic RNA
atggacaaaggagcccttg

SEQ ID NO: 16687 - RNA, 19 nt, Homo sapiens
  source 1..19: mol_type = genomic RNA
tggacaaaggagcccttgt

SEQ ID NO: 16688 - RNA, 19 nt, Homo sapiens
  source 1..19: mol_type = genomic RNA
ggacaaaggagcccttgtt

SEQ ID NO: 16689 - RNA, 19 nt, Homo sapiens
  source 1..19: mol_type = genomic RNA
gacaaaggagcccttgtta

SEQ ID NO: 16690 - RNA, 19 nt, Homo sapiens
  source 1..19: mol_type = genomic RNA
acaaaggagcccttgttac

SEQ ID NO: 16691 - RNA, 19 nt, Homo sapiens
  source 1..19: mol_type = genomic RNA
caaaggagcccttgttact

SEQ ID NO: 16692 - RNA, 19 nt, Homo sapiens
  source 1..19: mol_type = genomic RNA
aaaggagcccttgttactg

SEQ ID NO: 16693 - RNA, 19 nt, Homo sapiens
  source 1..19: mol_type = genomic RNA
aaggagcccttgttactgc

SEQ ID NO: 16694 - RNA, 19 nt, Homo sapiens
  source 1..19: mol_type = genomic RNA
aggagcccttgttactgca

SEQ ID NO: 16695 - RNA, 19 nt, Homo sapiens
  source 1..19: mol_type = genomic RNA
ggagcccttgttactgcac

SEQ ID NO: 16696 - RNA, 19 nt, Homo sapiens
  source 1..19: mol_type = genomic RNA
gagcccttgttactgcacg

SEQ ID NO: 16697 - RNA, 19 nt, Homo sapiens
  source 1..19: mol_type = genomic RNA
agcccttgttactgcacgt

SEQ ID NO: 16698 - RNA, 19 nt, Homo sapiens
  source 1..19: mol_type = genomic RNA
gcccttgttactgcacgtt

SEQ ID NO: 16699 - RNA, 19 nt, Homo sapiens
  source 1..19: mol_type = genomic RNA
cccttgttactgcacgttt

SEQ ID NO: 16700 - RNA, 19 nt, Homo sapiens
  source 1..19: mol_type = genomic RNA
tcattctccaaacttcacc

SEQ ID NO: 16701 - RNA, 19 nt, Homo sapiens
  source 1..19: mol_type = genomic RNA
cattctccaaacttcacct

SEQ ID NO: 16702 - RNA, 19 nt, Homo sapiens
  source 1..19: mol_type = genomic RNA
ttctccaaacttcaccttg

SEQ ID NO: 16703 - RNA, 19 nt, Homo sapiens
  source 1..19: mol_type = genomic RNA
tctccaaacttcaccttgc

SEQ ID NO: 16704 - RNA, 19 nt, Homo sapiens
  source 1..19: mol_type = genomic RNA
ctccaaacttcaccttgca

SEQ ID NO: 16705 - RNA, 19 nt, Homo sapiens
  source 1..19: mol_type = genomic RNA
tccaaacttcaccttgcac

SEQ ID NO: 16706 - RNA, 19 nt, Homo sapiens
  source 1..19: mol_type = genomic RNA
ccaaacttcaccttgcaca

SEQ ID NO: 16707 - RNA, 19 nt, Homo sapiens
  source 1..19: mol_type = genomic RNA
caaacttcaccttgcacac

SEQ ID NO: 16708 - RNA, 19 nt, Homo sapiens
  source 1..19: mol_type = genomic RNA
aaacttcaccttgcacaca

SEQ ID NO: 16709 - RNA, 19 nt, Homo sapiens
  source 1..19: mol_type = genomic RNA
aacttcaccttgcacacag

SEQ ID NO: 16710 - RNA, 19 nt, Homo sapiens
  source 1..19: mol_type = genomic RNA
acttcaccttgcacacagt

SEQ ID NO: 16711 - RNA, 19 nt, Homo sapiens
  source 1..19: mol_type = genomic RNA
cttcaccttgcacacagta

SEQ ID NO: 16712 - RNA, 19 nt, Homo sapiens
  source 1..19: mol_type = genomic RNA
ttcaccttgcacacagtaa

SEQ ID NO: 16713 - RNA, 19 nt, Homo sapiens
  source 1..19: mol_type = genomic RNA
agtaacagacaatgcacaa

SEQ ID NO: 16714 - RNA, 19 nt, Homo sapiens
  source 1..19: mol_type = genomic RNA
gtaacagacaatgcacaaa

SEQ ID NO: 16715 - RNA, 19 nt, Homo sapiens
  source 1..19: mol_type = genomic RNA
taacagacaatgcacaaat

SEQ ID NO: 16716 - RNA, 19 nt, Homo sapiens
  source 1..19: mol_type = genomic RNA
aacagacaatgcacaaatc

SEQ ID NO: 16717 - RNA, 19 nt, Homo sapiens
  source 1..19: mol_type = genomic RNA
acagacaatgcacaaatcc

SEQ ID NO: 16718 - RNA, 19 nt, Homo sapiens
  source 1..19: mol_type = genomic RNA
cagacaatgcacaaatcca

SEQ ID NO: 16719 - RNA, 19 nt, Homo sapiens
  source 1..19: mol_type = genomic RNA
agacaatgcacaaatccac

SEQ ID NO: 16720 - RNA, 19 nt, Homo sapiens
  source 1..19: mol_type = genomic RNA
gacaatgcacaaatccact

SEQ ID NO: 16721 - RNA, 19 nt, Homo sapiens
  source 1..19: mol_type = genomic RNA
acaatgcacaaatccactt

SEQ ID NO: 16722 - RNA, 19 nt, Homo sapiens
  source 1..19: mol_type = genomic RNA
caatgcacaaatccacttc

SEQ ID NO: 16723 - RNA, 19 nt, Homo sapiens
  source 1..19: mol_type = genomic RNA
aatgcacaaatccacttcc

SEQ ID NO: 16724 - RNA, 19 nt, Homo sapiens
  source 1..19: mol_type = genomic RNA
atgcacaaatccacttcct

SEQ ID NO: 16725 - RNA, 19 nt, Homo sapiens
  source 1..19: mol_type = genomic RNA
tgcacaaatccacttcctt

SEQ ID NO: 16726 - RNA, 19 nt, Homo sapiens
  source 1..19: mol_type = genomic RNA
gcacaaatccacttcctta

SEQ ID NO: 16727 - RNA, 19 nt, Homo sapiens
  source 1..19: mol_type = genomic RNA
caaatccacttccttatgg

SEQ ID NO: 16728 - RNA, 19 nt, Homo sapiens
  source 1..19: mol_type = genomic RNA
aaatccacttccttatgga

SEQ ID NO: 16729 - RNA, 19 nt, Homo sapiens
  source 1..19: mol_type = genomic RNA
aatccacttccttatggac

SEQ ID NO: 16730 - RNA, 19 nt, Homo sapiens
  source 1..19: mol_type = genomic RNA
atccacttccttatggacg

SEQ ID NO: 16731 - RNA, 19 nt, Homo sapiens
  source 1..19: mol_type = genomic RNA
tccacttccttatggacgg

SEQ ID NO: 16732 - RNA, 19 nt, Homo sapiens
  source 1..19: mol_type = genomic RNA
ccacttccttatggacgga

SEQ ID NO: 16733 - RNA, 19 nt, Homo sapiens
  source 1..19: mol_type = genomic RNA
cacttccttatggacggaa

SEQ ID NO: 16734 - RNA, 19 nt, Homo sapiens
  source 1..19: mol_type = genomic RNA
acttccttatggacggaaa

SEQ ID NO: 16735 - RNA, 19 nt, Homo sapiens
  source 1..19: mol_type = genomic RNA
cttccttatggacggaaat

SEQ ID NO: 16736 - RNA, 19 nt, Homo sapiens
  source 1..19: mol_type = genomic RNA
ttccttatggacggaaatt

SEQ ID NO: 16737 - RNA, 19 nt, Homo sapiens
  source 1..19: mol_type = genomic RNA
tccttatggacggaaattc

SEQ ID NO: 16738 - RNA, 19 nt, Homo sapiens
  source 1..19: mol_type = genomic RNA
ccttatggacggaaattct

SEQ ID NO: 16739 - RNA, 19 nt, Homo sapiens
  source 1..19: mol_type = genomic RNA
cttatggacggaaattctg

SEQ ID NO: 16740 - RNA, 19 nt, Homo sapiens
  source 1..19: mol_type = genomic RNA
ttatggacggaaattctga

SEQ ID NO: 16741 - RNA, 19 nt, Homo sapiens
  source 1..19: mol_type = genomic RNA
tatggacggaaattctgaa

SEQ ID NO: 16742 - RNA, 19 nt, Homo sapiens
  source 1..19: mol_type = genomic RNA
atggacggaaattctgaaa

SEQ ID NO: 16743 - RNA, 19 nt, Homo sapiens
  source 1..19: mol_type = genomic RNA
tggacggaaattctgaaat

SEQ ID NO: 16744 - RNA, 19 nt, Homo sapiens
  source 1..19: mol_type = genomic RNA
ggacggaaattctgaaatc

SEQ ID NO: 16745 - RNA, 19 nt, Homo sapiens
  source 1..19: mol_type = genomic RNA
gacggaaattctgaaatcc

SEQ ID NO: 16746 - RNA, 19 nt, Homo sapiens
  source 1..19: mol_type = genomic RNA
acggaaattctgaaatcct

SEQ ID NO: 16747 - RNA, 19 nt, Homo sapiens
  source 1..19: mol_type = genomic RNA
cggaaattctgaaatcctt

SEQ ID NO: 16748 - RNA, 19 nt, Homo sapiens
  source 1..19: mol_type = genomic RNA
gaaatccttttatgcctgg

SEQ ID NO: 16749 - RNA, 19 nt, Homo sapiens
  source 1..19: mol_type = genomic RNA
aaatccttttatgcctggc

SEQ ID NO: 16750 - RNA, 19 nt, Homo sapiens
  source 1..19: mol_type = genomic RNA
aatccttttatgcctggcc

SEQ ID NO: 16751 - RNA, 19 nt, Homo sapiens
  source 1..19: mol_type = genomic RNA
atccttttatgcctggcct

SEQ ID NO: 16752 - RNA, 19 nt, Homo sapiens
  source 1..19: mol_type = genomic RNA
tccttttatgcctggcctt

SEQ ID NO: 16753 - RNA, 19 nt, Homo sapiens
  source 1..19: mol_type = genomic RNA
ccttttatgcctggccttt

SEQ ID NO: 16754 - RNA, 19 nt, Homo sapiens
  source 1..19: mol_type = genomic RNA
cttttatgcctggcctttc

SEQ ID NO: 16755 - RNA, 19 nt, Homo sapiens
  source 1..19: mol_type = genomic RNA
ttttatgcctggcctttcc

SEQ ID NO: 16756 - RNA, 19 nt, Homo sapiens
  source 1..19: mol_type = genomic RNA
tttatgcctggcctttcca

SEQ ID NO: 16757 - RNA, 19 nt, Homo sapiens
  source 1..19: mol_type = genomic RNA
ttatgcctggcctttccat

SEQ ID NO: 16758 - RNA, 19 nt, Homo sapiens
  source 1..19: mol_type = genomic RNA
tatgcctggcctttccatc

SEQ ID NO: 16759 - RNA, 19 nt, Homo sapiens
  source 1..19: mol_type = genomic RNA
atgcctggcctttccatcc

SEQ ID NO: 16760 - RNA, 19 nt, Homo sapiens
  source 1..19: mol_type = genomic RNA
tgcctggcctttccatcct

SEQ ID NO: 16761 - RNA, 19 nt, Homo sapiens
  source 1..19: mol_type = genomic RNA
gcctggcctttccatcctt

SEQ ID NO: 16762 - RNA, 19 nt, Homo sapiens
  source 1..19: mol_type = genomic RNA
cctggcctttccatccttc

SEQ ID NO: 16763 - RNA, 19 nt, Homo sapiens
  source 1..19: mol_type = genomic RNA
ctggcctttccatccttca

SEQ ID NO: 16764 - RNA, 19 nt, Homo sapiens
  source 1..19: mol_type = genomic RNA
tggcctttccatccttcaa

SEQ ID NO: 16765 - RNA, 19 nt, Homo sapiens
  source 1..19: mol_type = genomic RNA
ggcctttccatccttcaac

SEQ ID NO: 16766 - RNA, 19 nt, Homo sapiens
  source 1..19: mol_type = genomic RNA
gcctttccatccttcaact

SEQ ID NO: 16767 - RNA, 19 nt, Homo sapiens
  source 1..19: mol_type = genomic RNA
ttccatccttcaacttccc

SEQ ID NO: 16768 - RNA, 19 nt, Homo sapiens
  source 1..19: mol_type = genomic RNA
tccatccttcaacttcccc

SEQ ID NO: 16769 - RNA, 19 nt, Homo sapiens
  source 1..19: mol_type = genomic RNA
ccatccttcaacttcccct

SEQ ID NO: 16770 - RNA, 19 nt, Homo sapiens
  source 1..19: mol_type = genomic RNA
catccttcaacttcccctt

SEQ ID NO: 16771 - RNA, 19 nt, Homo sapiens
  source 1..19: mol_type = genomic RNA
tccttcaacttcccctttc

SEQ ID NO: 16772 - RNA, 19 nt, Homo sapiens
  source 1..19: mol_type = genomic RNA
ccttcaacttcccctttcc

SEQ ID NO: 16773 - RNA, 19 nt, Homo sapiens
  source 1..19: mol_type = genomic RNA
cttcaacttcccctttccc

SEQ ID NO: 16774 - RNA, 19 nt, Homo sapiens
  source 1..19: mol_type = genomic RNA
ttcaacttcccctttccca

SEQ ID NO: 16775 - RNA, 19 nt, Homo sapiens
  source 1..19: mol_type = genomic RNA
tcaacttcccctttcccat

SEQ ID NO: 16776 - RNA, 19 nt, Homo sapiens
  source 1..19: mol_type = genomic RNA
caacttcccctttcccatg

SEQ ID NO: 16777 - RNA, 19 nt, Homo sapiens
  source 1..19: mol_type = genomic RNA
aacttcccctttcccatgc

SEQ ID NO: 16778 - RNA, 19 nt, Homo sapiens
  source 1..19: mol_type = genomic RNA
acttcccctttcccatgct

SEQ ID NO: 16779 - RNA, 19 nt, Homo sapiens
  source 1..19: mol_type = genomic RNA
cttcccctttcccatgctg

SEQ ID NO: 16780 - RNA, 19 nt, Homo sapiens
  source 1..19: mol_type = genomic RNA
ttcccctttcccatgctgt

SEQ ID NO: 16781 - RNA, 19 nt, Homo sapiens
  source 1..19: mol_type = genomic RNA
tcccctttcccatgctgtg

SEQ ID NO: 16782 - RNA, 19 nt, Homo sapiens
  source 1..19: mol_type = genomic RNA
cccctttcccatgctgtga

SEQ ID NO: 16783 - RNA, 19 nt, Homo sapiens
  source 1..19: mol_type = genomic RNA
ccctttcccatgctgtgaa

SEQ ID NO: 16784 - RNA, 19 nt, Homo sapiens
  source 1..19: mol_type = genomic RNA
cctttcccatgctgtgaat

SEQ ID NO: 16785 - RNA, 19 nt, Homo sapiens
  source 1..19: mol_type = genomic RNA
ctttcccatgctgtgaatg

SEQ ID NO: 16786 - RNA, 19 nt, Homo sapiens
  source 1..19: mol_type = genomic RNA
tttcccatgctgtgaatga

SEQ ID NO: 16787 - RNA, 19 nt, Homo sapiens
  source 1..19: mol_type = genomic RNA
ttcccatgctgtgaatgat

SEQ ID NO: 16788 - RNA, 19 nt, Homo sapiens
  source 1..19: mol_type = genomic RNA
tcccatgctgtgaatgatt

SEQ ID NO: 16789 - RNA, 19 nt, Homo sapiens
  source 1..19: mol_type = genomic RNA
cccatgctgtgaatgattg

SEQ ID NO: 16790 - RNA, 19 nt, Homo sapiens
  source 1..19: mol_type = genomic RNA
ccatgctgtgaatgattgt

SEQ ID NO: 16791 - RNA, 19 nt, Homo sapiens
  source 1..19: mol_type = genomic RNA
catgctgtgaatgattgta

SEQ ID NO: 16792 - RNA, 19 nt, Homo sapiens
  source 1..19: mol_type = genomic RNA
atgctgtgaatgattgtat

SEQ ID NO: 16793 - RNA, 19 nt, Homo sapiens
  source 1..19: mol_type = genomic RNA
gtgaatgattgtattggac

SEQ ID NO: 16794 - RNA, 19 nt, Homo sapiens
  source 1..19: mol_type = genomic RNA
tgaatgattgtattggaca

SEQ ID NO: 16795 - RNA, 19 nt, Homo sapiens
  source 1..19: mol_type = genomic RNA
tttaatctcagtgacaggg

SEQ ID NO: 16796 - RNA, 19 nt, Homo sapiens
  source 1..19: mol_type = genomic RNA
ttaatctcagtgacagggg

SEQ ID NO: 16797 - RNA, 19 nt, Homo sapiens
  source 1..19: mol_type = genomic RNA
taatctcagtgacagggga

SEQ ID NO: 16798 - RNA, 19 nt, Homo sapiens
  source 1..19: mol_type = genomic RNA
aatctcagtgacaggggaa

SEQ ID NO: 16799 - RNA, 19 nt, Homo sapiens
  source 1..19: mol_type = genomic RNA
atctcagtgacaggggaac

SEQ ID NO: 16800 - RNA, 19 nt, Homo sapiens
  source 1..19: mol_type = genomic RNA
tctcagtgacaggggaaca

SEQ ID NO: 16801 - RNA, 19 nt, Homo sapiens
  source 1..19: mol_type = genomic RNA
tcagtgacaggggaacaca

SEQ ID NO: 16802 - RNA, 19 nt, Homo sapiens
  source 1..19: mol_type = genomic RNA
gggaacacaggtagctcta

SEQ ID NO: 16803 - RNA, 19 nt, Homo sapiens
  source 1..19: mol_type = genomic RNA
ggaacacaggtagctctaa

SEQ ID NO: 16804 - RNA, 19 nt, Homo sapiens
  source 1..19: mol_type = genomic RNA
gaacacaggtagctctaat

SEQ ID NO: 16805 - RNA, 19 nt, Homo sapiens
  source 1..19: mol_type = genomic RNA
aacacaggtagctctaata

SEQ ID NO: 16806 - RNA, 19 nt, Homo sapiens
  source 1..19: mol_type = genomic RNA
acacaggtagctctaatat

SEQ ID NO: 16807 - RNA, 19 nt, Homo sapiens
  source 1..19: mol_type = genomic RNA
cacaggtagctctaatata

SEQ ID NO: 16808 - RNA, 19 nt, Homo sapiens
  source 1..19: mol_type = genomic RNA
acaggtagctctaatatag

SEQ ID NO: 16809 - RNA, 19 nt, Homo sapiens
  source 1..19: mol_type = genomic RNA
caggtagctctaatatagc

SEQ ID NO: 16810 - RNA, 19 nt, Homo sapiens
  source 1..19: mol_type = genomic RNA
aggtagctctaatatagct

SEQ ID NO: 16811 - RNA, 19 nt, Homo sapiens
  source 1..19: mol_type = genomic RNA
ggtagctctaatatagctg

SEQ ID NO: 16812 - RNA, 19 nt, Homo sapiens
  source 1..19: mol_type = genomic RNA
gtagctctaatatagctgt

SEQ ID NO: 16813 - RNA, 19 nt, Homo sapiens
  source 1..19: mol_type = genomic RNA
tagctctaatatagctgtg

SEQ ID NO: 16814 - RNA, 19 nt, Homo sapiens
  source 1..19: mol_type = genomic RNA
agctctaatatagctgtga

SEQ ID NO: 16815 - RNA, 19 nt, Homo sapiens
  source 1..19: mol_type = genomic RNA
gctctaatatagctgtgac

SEQ ID NO: 16816 - RNA, 19 nt, Homo sapiens
  source 1..19: mol_type = genomic RNA
ctctaatatagctgtgact

SEQ ID NO: 16817 - RNA, 19 nt, Homo sapiens
  source 1..19: mol_type = genomic RNA
tctaatatagctgtgactg

SEQ ID NO: 16818 - RNA, 19 nt, Homo sapiens
  source 1..19: mol_type = genomic RNA
ctaatatagctgtgactga

SEQ ID NO: 16819 - RNA, 19 nt, Homo sapiens
  source 1..19: mol_type = genomic RNA
taatatagctgtgactgag

SEQ ID NO: 16820 - RNA, 19 nt, Homo sapiens
  source 1..19: mol_type = genomic RNA
aatatagctgtgactgaga

SEQ ID NO: 16821 - RNA, 19 nt, Homo sapiens
  source 1..19: mol_type = genomic RNA
atatagctgtgactgagat

SEQ ID NO: 16822 - RNA, 19 nt, Homo sapiens
  source 1..19: mol_type = genomic RNA
ctttccactgcattctagg

SEQ ID NO: 16823 - RNA, 19 nt, Homo sapiens
  source 1..19: mol_type = genomic RNA
tttccactgcattctagga

SEQ ID NO: 16824 - RNA, 19 nt, Homo sapiens
  source 1..19: mol_type = genomic RNA
ttccactgcattctaggaa

SEQ ID NO: 16825 - RNA, 19 nt, Homo sapiens
  source 1..19: mol_type = genomic RNA
tccactgcattctaggaac

SEQ ID NO: 16826 - RNA, 19 nt, Homo sapiens
  source 1..19: mol_type = genomic RNA
ccactgcattctaggaaca

SEQ ID NO: 16827 - RNA, 19 nt, Homo sapiens
  source 1..19: mol_type = genomic RNA
cactgcattctaggaacag

SEQ ID NO: 16828 - RNA, 19 nt, Homo sapiens
  source 1..19: mol_type = genomic RNA
actgcattctaggaacagt

SEQ ID NO: 16829 - RNA, 19 nt, Homo sapiens
  source 1..19: mol_type = genomic RNA
ctgcattctaggaacagta

SEQ ID NO: 16830 - RNA, 19 nt, Homo sapiens
  source 1..19: mol_type = genomic RNA
tgcattctaggaacagtaa

SEQ ID NO: 16831 - RNA, 19 nt, Homo sapiens
  source 1..19: mol_type = genomic RNA
gcattctaggaacagtaag

SEQ ID NO: 16832 - RNA, 19 nt, Homo sapiens
  source 1..19: mol_type = genomic RNA
cattctaggaacagtaaga

SEQ ID NO: 16833 - RNA, 19 nt, Homo sapiens
  source 1..19: mol_type = genomic RNA
attctaggaacagtaagag

SEQ ID NO: 16834 - RNA, 19 nt, Homo sapiens
  source 1..19: mol_type = genomic RNA
ttctaggaacagtaagagg

SEQ ID NO: 16835 - RNA, 19 nt, Homo sapiens
  source 1..19: mol_type = genomic RNA
tctaggaacagtaagagga

SEQ ID NO: 16836 - RNA, 19 nt, Homo sapiens
  source 1..19: mol_type = genomic RNA
ctaggaacagtaagaggac

SEQ ID NO: 16837 - RNA, 19 nt, Homo sapiens
  source 1..19: mol_type = genomic RNA
taggaacagtaagaggacc

SEQ ID NO: 16838 - RNA, 19 nt, Homo sapiens
  source 1..19: mol_type = genomic RNA
aggaacagtaagaggacct

SEQ ID NO: 16839 - RNA, 19 nt, Homo sapiens
  source 1..19: mol_type = genomic RNA
ggaacagtaagaggacctt

SEQ ID NO: 16840 - RNA, 19 nt, Homo sapiens
  source 1..19: mol_type = genomic RNA
gaacagtaagaggaccttg

SEQ ID NO: 16841 - RNA, 19 nt, Homo sapiens
  source 1..19: mol_type = genomic RNA
aacagtaagaggaccttgt

SEQ ID NO: 16842 - RNA, 19 nt, Homo sapiens
  source 1..19: mol_type = genomic RNA
acagtaagaggaccttgtg

SEQ ID NO: 16843 - RNA, 19 nt, Homo sapiens
  source 1..19: mol_type = genomic RNA
cagtaagaggaccttgtga

SEQ ID NO: 16844 - RNA, 19 nt, Homo sapiens
  source 1..19: mol_type = genomic RNA
agtaagaggaccttgtgag

SEQ ID NO: 16845 - RNA, 19 nt, Homo sapiens
  source 1..19: mol_type = genomic RNA
gtaagaggaccttgtgagt

SEQ ID NO: 16846 - RNA, 19 nt, Homo sapiens
  source 1..19: mol_type = genomic RNA
taagaggaccttgtgagtg

SEQ ID NO: 16847 - RNA, 19 nt, Homo sapiens
  source 1..19: mol_type = genomic RNA
aagaggaccttgtgagtga

SEQ ID NO: 16848 - RNA, 19 nt, Homo sapiens
  source 1..19: mol_type = genomic RNA
agaggaccttgtgagtgaa

SEQ ID NO: 16849 - RNA, 19 nt, Homo sapiens
  source 1..19: mol_type = genomic RNA
gaggaccttgtgagtgaat

SEQ ID NO: 16850 - RNA, 19 nt, Homo sapiens
  source 1..19: mol_type = genomic RNA
aggaccttgtgagtgaata

SEQ ID NO: 16851 - RNA, 19 nt, Homo sapiens
  source 1..19: mol_type = genomic RNA
ggaccttgtgagtgaataa

SEQ ID NO: 16852 - RNA, 19 nt, Homo sapiens
  source 1..19: mol_type = genomic RNA
gaccttgtgagtgaataat

SEQ ID NO: 16853 - RNA, 19 nt, Homo sapiens
  source 1..19: mol_type = genomic RNA
tttccacattacagagtgg

SEQ ID NO: 16854 - RNA, 19 nt, Homo sapiens
  source 1..19: mol_type = genomic RNA
ttccacattacagagtggg

SEQ ID NO: 16855 - RNA, 19 nt, Homo sapiens
  source 1..19: mol_type = genomic RNA
tccacattacagagtgggt

SEQ ID NO: 16856 - RNA, 19 nt, Homo sapiens
  source 1..19: mol_type = genomic RNA
ccacattacagagtgggta

SEQ ID NO: 16857 - RNA, 19 nt, Homo sapiens
  source 1..19: mol_type = genomic RNA
cacattacagagtgggtaa

SEQ ID NO: 16858 - RNA, 19 nt, Homo sapiens
  source 1..19: mol_type = genomic RNA
acattacagagtgggtaat

SEQ ID NO: 16859 - RNA, 19 nt, Homo sapiens
  source 1..19: mol_type = genomic RNA
cattacagagtgggtaata

SEQ ID NO: 16860 - RNA, 19 nt, Homo sapiens
  source 1..19: mol_type = genomic RNA
attacagagtgggtaataa

SEQ ID NO: 16861 - RNA, 19 nt, Homo sapiens
  source 1..19: mol_type = genomic RNA
ttacagagtgggtaataag

SEQ ID NO: 16862 - RNA, 19 nt, Homo sapiens
  source 1..19: mol_type = genomic RNA
tacagagtgggtaataagc

SEQ ID NO: 16863 - RNA, 19 nt, Homo sapiens
  source 1..19: mol_type = genomic RNA
acagagtgggtaataagca

SEQ ID NO: 16864 - RNA, 19 nt, Homo sapiens
  source 1..19: mol_type = genomic RNA
cagagtgggtaataagcag

SEQ ID NO: 16865 - RNA, 19 nt, Homo sapiens
  source 1..19: mol_type = genomic RNA
agagtgggtaataagcaga

SEQ ID NO: 16866 - RNA, 19 nt, Homo sapiens
  source 1..19: mol_type = genomic RNA
gagtgggtaataagcagat

SEQ ID NO: 16867 - RNA, 19 nt, Homo sapiens
  source 1..19: mol_type = genomic RNA
agtgggtaataagcagatt

SEQ ID NO: 16868 - RNA, 19 nt, Homo sapiens
  source 1..19: mol_type = genomic RNA
gtgggtaataagcagatta

SEQ ID NO: 16869 - RNA, 19 nt, Homo sapiens
  source 1..19: mol_type = genomic RNA
tgggtaataagcagattag

SEQ ID NO: 16870 - RNA, 19 nt, Homo sapiens
  source 1..19: mol_type = genomic RNA
gggtaataagcagattagt

SEQ ID NO: 16871 - RNA, 19 nt, Homo sapiens
  source 1..19: mol_type = genomic RNA
ggtaataagcagattagta

SEQ ID NO: 16872 - RNA, 19 nt, Homo sapiens
  source 1..19: mol_type = genomic RNA
taagcagattagtaaaaac

SEQ ID NO: 16873 - RNA, 19 nt, Homo sapiens
  source 1..19: mol_type = genomic RNA
aagcagattagtaaaaaca

SEQ ID NO: 16874 - RNA, 19 nt, Homo sapiens
  source 1..19: mol_type = genomic RNA
agcagattagtaaaaacaa

SEQ ID NO: 16875 - RNA, 20 nt, Homo sapiens
  source 1..20: mol_type = genomic RNA
cctctctctgcccgcgtccg

SEQ ID NO: 16876 - RNA, 20 nt, Homo sapiens
  source 1..20: mol_type = genomic RNA
ctctctctgcccgcgtccgt

SEQ ID NO: 16877 - RNA, 20 nt, Homo sapiens
  source 1..20: mol_type = genomic RNA
tctctctgcccgcgtccgtc

SEQ ID NO: 16878 - RNA, 20 nt, Homo sapiens
  source 1..20: mol_type = genomic RNA
ctctctgcccgcgtccgtcc

SEQ ID NO: 16879 - RNA, 20 nt, Homo sapiens
  source 1..20: mol_type = genomic RNA
tctctgcccgcgtccgtccg

SEQ ID NO: 16880 - RNA, 20 nt, Homo sapiens
  source 1..20: mol_type = genomic RNA
ctctgcccgcgtccgtccgt

SEQ ID NO: 16881 - RNA, 20 nt, Homo sapiens
  source 1..20: mol_type = genomic RNA
tctgcccgcgtccgtccgtg

SEQ ID NO: 16882 - RNA, 20 nt, Homo sapiens
  source 1..20: mol_type = genomic RNA
ctgcccgcgtccgtccgtga

SEQ ID NO: 16883 - RNA, 20 nt, Homo sapiens
  source 1..20: mol_type = genomic RNA
tgcccgcgtccgtccgtgaa

SEQ ID NO: 16884 - RNA, 20 nt, Homo sapiens
  source 1..20: mol_type = genomic RNA
gcccgcgtccgtccgtgaaa

SEQ ID NO: 16885 - RNA, 20 nt, Homo sapiens
  source 1..20: mol_type = genomic RNA
cccgcgtccgtccgtgaaat

SEQ ID NO: 16886 - RNA, 20 nt, Homo sapiens
  source 1..20: mol_type = genomic RNA
ccgcgtccgtccgtgaaatt

SEQ ID NO: 16887 - RNA, 20 nt, Homo sapiens
  source 1..20: mol_type = genomic RNA
cgcgtccgtccgtgaaattc

SEQ ID NO: 16888 - RNA, 20 nt, Homo sapiens
  source 1..20: mol_type = genomic RNA
gcgtccgtccgtgaaattcc

SEQ ID NO: 16889 - RNA, 20 nt, Homo sapiens
  source 1..20: mol_type = genomic RNA
cgtccgtccgtgaaattccg

SEQ ID NO: 16890 - RNA, 20 nt, Homo sapiens
  source 1..20: mol_type = genomic RNA
gtccgtccgtgaaattccgg

SEQ ID NO: 16891 - RNA, 20 nt, Homo sapiens
  source 1..20: mol_type = genomic RNA
tccgtccgtgaaattccggc

SEQ ID NO: 16892 - RNA, 20 nt, Homo sapiens
  source 1..20: mol_type = genomic RNA
ccgtccgtgaaattccggcc

SEQ ID NO: 16893 - RNA, 20 nt, Homo sapiens
  source 1..20: mol_type = genomic RNA
cgtccgtgaaattccggccg

SEQ ID NO: 16894 - RNA, 20 nt, Homo sapiens
  source 1..20: mol_type = genomic RNA
gtccgtgaaattccggccgg

SEQ ID NO: 16895 - RNA, 20 nt, Homo sapiens
  source 1..20: mol_type = genomic RNA
tccgtgaaattccggccggg

SEQ ID NO: 16896 - RNA, 20 nt, Homo sapiens
  source 1..20: mol_type = genomic RNA
ccgtgaaattccggccgggg

SEQ ID NO: 16897 - RNA, 20 nt, Homo sapiens
  source 1..20: mol_type = genomic RNA
gacggcgacggagactcgtt

SEQ ID NO: 16898 - RNA, 20 nt, Homo sapiens
  source 1..20: mol_type = genomic RNA
acggcgacggagactcgttt

SEQ ID NO: 16899 - RNA, 20 nt, Homo sapiens
  source 1..20: mol_type = genomic RNA
cggcgacggagactcgtttg

SEQ ID NO: 16900 - RNA, 20 nt, Homo sapiens
  source 1..20: mol_type = genomic RNA
ggcgacggagactcgtttgg

SEQ ID NO: 16901 - RNA, 20 nt, Homo sapiens
  source 1..20: mol_type = genomic RNA
gcgacggagactcgtttgga

SEQ ID NO: 16902 - RNA, 20 nt, Homo sapiens
  source 1..20: mol_type = genomic RNA
cgacggagactcgtttggac

SEQ ID NO: 16903 - RNA, 20 nt, Homo sapiens
  source 1..20: mol_type = genomic RNA
gacggagactcgtttggacc

SEQ ID NO: 16904 - RNA, 20 nt, Homo sapiens
  source 1..20: mol_type = genomic RNA
gccctgcgagcctgctttga

SEQ ID NO: 16905 - RNA, 20 nt, Homo sapiens
  source 1..20: mol_type = genomic RNA
ccctgcgagcctgctttgag

SEQ ID NO: 16906 - RNA, 20 nt, Homo sapiens
  source 1..20: mol_type = genomic RNA
cctgcgagcctgctttgagc

SEQ ID NO: 16907 - RNA, 20 nt, Homo sapiens
  source 1..20: mol_type = genomic RNA
ctgcgagcctgctttgagcg

SEQ ID NO: 16908 - RNA, 20 nt, Homo sapiens
  source 1..20: mol_type = genomic RNA
tgcgagcctgctttgagcgg

SEQ ID NO: 16909 - RNA, 20 nt, Homo sapiens
  source 1..20: mol_type = genomic RNA
gcgagcctgctttgagcgga

SEQ ID NO: 16910 - RNA, 20 nt, Homo sapiens
  source 1..20: mol_type = genomic RNA
cgagcctgctttgagcggaa

SEQ ID NO: 16911 - RNA, 20 nt, Homo sapiens
  source 1..20: mol_type = genomic RNA
gagcctgctttgagcggaac

SEQ ID NO: 16912 - RNA, 20 nt, Homo sapiens
  source 1..20: mol_type = genomic RNA
agcctgctttgagcggaacc

SEQ ID NO: 16913 - RNA, 20 nt, Homo sapiens
  source 1..20: mol_type = genomic RNA
cctgctttgagcggaacccg

SEQ ID NO: 16914 - RNA, 20 nt, Homo sapiens
  source 1..20: mol_type = genomic RNA
ctgctttgagcggaacccgt

SEQ ID NO: 16915 - RNA, 20 nt, Homo sapiens
  source 1..20: mol_type = genomic RNA
tgctttgagcggaacccgta

SEQ ID NO: 16916 - RNA, 20 nt, Homo sapiens
  source 1..20: mol_type = genomic RNA
gctttgagcggaacccgtac

SEQ ID NO: 16917 - RNA, 20 nt, Homo sapiens
  source 1..20: mol_type = genomic RNA
ctttgagcggaacccgtacc

SEQ ID NO: 16918 - RNA, 20 nt, Homo sapiens
  source 1..20: mol_type = genomic RNA
tttgagcggaacccgtaccc

SEQ ID NO: 16919 - RNA, 20 nt, Homo sapiens
  source 1..20: mol_type = genomic RNA
ttgagcggaacccgtacccg

SEQ ID NO: 16920 - RNA, 20 nt, Homo sapiens
  source 1..20: mol_type = genomic RNA
gagcccagggtccagatttg

SEQ ID NO: 16921 - RNA, 20 nt, Homo sapiens
  source 1..20: mol_type = genomic RNA
agcccagggtccagatttgg

SEQ ID NO: 16922 - RNA, 20 nt, Homo sapiens
  source 1..20: mol_type = genomic RNA
gcccagggtccagatttggt

SEQ ID NO: 16923 - RNA, 20 nt, Homo sapiens
  source 1..20: mol_type = genomic RNA
cccagggtccagatttggtt

SEQ ID NO: 16924 - RNA, 20 nt, Homo sapiens
  source 1..20: mol_type = genomic RNA
ccagggtccagatttggttt

SEQ ID NO: 16925 - RNA, 20 nt, Homo sapiens
  source 1..20: mol_type = genomic RNA
cagggtccagatttggtttc

SEQ ID NO: 16926 - RNA, 20 nt, Homo sapiens
  source 1..20: mol_type = genomic RNA
agggtccagatttggtttca

SEQ ID NO: 16927 - RNA, 20 nt, Homo sapiens
  source 1..20: mol_type = genomic RNA
gggtccagatttggtttcag

SEQ ID NO: 16928 - RNA, 20 nt, Homo sapiens
  source 1..20: mol_type = genomic RNA
ggtccagatttggtttcaga

SEQ ID NO: 16929 - RNA, 20 nt, Homo sapiens
  source 1..20: mol_type = genomic RNA
gtccagatttggtttcagaa

SEQ ID NO: 16930 - RNA, 20 nt, Homo sapiens
  source 1..20: mol_type = genomic RNA
agatttggtttcagaatgag

SEQ ID NO: 16931 - RNA, 20 nt, Homo sapiens
  source 1..20: mol_type = genomic RNA
atttggtttcagaatgagag

SEQ ID NO: 16932 - RNA, 20 nt, Homo sapiens
  source 1..20: mol_type = genomic RNA
tttggtttcagaatgagagg

SEQ ID NO: 16933 - RNA, 20 nt, Homo sapiens
  source 1..20: mol_type = genomic RNA
ttggtttcagaatgagaggt

SEQ ID NO: 16934 - RNA, 20 nt, Homo sapiens
  source 1..20: mol_type = genomic RNA
tggtttcagaatgagaggtc

SEQ ID NO: 16935 - RNA, 20 nt, Homo sapiens
  source 1..20: mol_type = genomic RNA
ggtttcagaatgagaggtca

SEQ ID NO: 16936 - RNA, 20 nt, Homo sapiens
  source 1..20: mol_type = genomic RNA
gtttcagaatgagaggtcac

SEQ ID NO: 16937 - RNA, 20 nt, Homo sapiens
  source 1..20: mol_type = genomic RNA
tttcagaatgagaggtcacg

SEQ ID NO: 16938 - RNA, 20 nt, Homo sapiens
  source 1..20: mol_type = genomic RNA
ttcagaatgagaggtcacgc

SEQ ID NO: 16939 - RNA, 20 nt, Homo sapiens
  source 1..20: mol_type = genomic RNA
tcagaatgagaggtcacgcc

SEQ ID NO: 16940 - RNA, 20 nt, Homo sapiens
  source 1..20: mol_type = genomic RNA
cagaatgagaggtcacgcca

SEQ ID NO: 16941 - RNA, 20 nt, Homo sapiens
  source 1..20: mol_type = genomic RNA
agaatgagaggtcacgccag

SEQ ID NO: 16942 - RNA, 20 nt, Homo sapiens
  source 1..20: mol_type = genomic RNA
aatgagaggtcacgccagct

SEQ ID NO: 16943 - RNA, 20 nt, Homo sapiens
  source 1..20: mol_type = genomic RNA
gcctcccggagtccaggatt

SEQ ID NO: 16944 - RNA, 20 nt, Homo sapiens
  source 1..20: mol_type = genomic RNA
cctcccggagtccaggattc

SEQ ID NO: 16945 - RNA, 20 nt, Homo sapiens
  source 1..20: mol_type = genomic RNA
ctcccggagtccaggattca

SEQ ID NO: 16946 - RNA, 20 nt, Homo sapiens
  source 1..20: mol_type = genomic RNA
tcccggagtccaggattcag

SEQ ID NO: 16947 - RNA, 20 nt, Homo sapiens
  source 1..20: mol_type = genomic RNA
cccggagtccaggattcaga

SEQ ID NO: 16948 - RNA, 20 nt, Homo sapiens
  source 1..20: mol_type = genomic RNA
ccggagtccaggattcagat

SEQ ID NO: 16949 - RNA, 20 nt, Homo sapiens
  source 1..20: mol_type = genomic RNA
cggagtccaggattcagatc

SEQ ID NO: 16950 - RNA, 20 nt, Homo sapiens
  source 1..20: mol_type = genomic RNA
ggagtccaggattcagatct

SEQ ID NO: 16951 - RNA, 20 nt, Homo sapiens
  source 1..20: mol_type = genomic RNA
gagtccaggattcagatctg

SEQ ID NO: 16952 - RNA, 20 nt, Homo sapiens
  source 1..20: mol_type = genomic RNA
agtccaggattcagatctgg

SEQ ID NO: 16953 - RNA, 20 nt, Homo sapiens
  source 1..20: mol_type = genomic RNA
gtccaggattcagatctggt

SEQ ID NO: 16954 - RNA, 20 nt, Homo sapiens
  source 1..20: mol_type = genomic RNA
tccaggattcagatctggtt

SEQ ID NO: 16955 - RNA, 20 nt, Homo sapiens
  source 1..20: mol_type = genomic RNA
ccaggattcagatctggttt

SEQ ID NO: 16956 - RNA, 20 nt, Homo sapiens
  source 1..20: mol_type = genomic RNA
caggattcagatctggtttc

SEQ ID NO: 16957 - RNA, 20 nt, Homo sapiens
  source 1..20: mol_type = genomic RNA
aggattcagatctggtttca

SEQ ID NO: 16958 - RNA, 20 nt, Homo sapiens
  source 1..20: mol_type = genomic RNA
ggattcagatctggtttcag

SEQ ID NO: 16959 - RNA, 20 nt, Homo sapiens
  source 1..20: mol_type = genomic RNA
gattcagatctggtttcaga

SEQ ID NO: 16960 - RNA, 20 nt, Homo sapiens
  source 1..20: mol_type = genomic RNA
attcagatctggtttcagaa

SEQ ID NO: 16961 - RNA, 20 nt, Homo sapiens
  source 1..20: mol_type = genomic RNA
ttcagatctggtttcagaat

SEQ ID NO: 16962 - RNA, 20 nt, Homo sapiens
  source 1..20: mol_type = genomic RNA
tcagatctggtttcagaatc

SEQ ID NO: 16963 - RNA, 20 nt, Homo sapiens
  source 1..20: mol_type = genomic RNA
cagatctggtttcagaatcg

SEQ ID NO: 16964 - RNA, 20 nt, Homo sapiens
  source 1..20: mol_type = genomic RNA
agatctggtttcagaatcga

SEQ ID NO: 16965 - RNA, 20 nt, Homo sapiens
  source 1..20: mol_type = genomic RNA
gatctggtttcagaatcgaa

SEQ ID NO: 16966 - RNA, 20 nt, Homo sapiens
  source 1..20: mol_type = genomic RNA
atctggtttcagaatcgaag

SEQ ID NO: 16967 - RNA, 20 nt, Homo sapiens
  source 1..20: mol_type = genomic RNA
tctggtttcagaatcgaagg

SEQ ID NO: 16968 - RNA, 20 nt, Homo sapiens
  source 1..20: mol_type = genomic RNA
ctggtttcagaatcgaaggg

SEQ ID NO: 16969 - RNA, 20 nt, Homo sapiens
  source 1..20: mol_type = genomic RNA
tggtttcagaatcgaagggc

SEQ ID NO: 16970 - RNA, 20 nt, Homo sapiens
  source 1..20: mol_type = genomic RNA
ggtttcagaatcgaagggcc

SEQ ID NO: 16971 - RNA, 20 nt, Homo sapiens
  source 1..20: mol_type = genomic RNA
gtttcagaatcgaagggcca

SEQ ID NO: 16972 - RNA, 20 nt, Homo sapiens
  source 1..20: mol_type = genomic RNA
tttcagaatcgaagggccag

SEQ ID NO: 16973 - RNA, 20 nt, Homo sapiens
  source 1..20: mol_type = genomic RNA
ttcagaatcgaagggccagg

SEQ ID NO: 16974 - RNA, 20 nt, Homo sapiens
  source 1..20: mol_type = genomic RNA
cccctcagcgaggaagaata

SEQ ID NO: 16975 - RNA, 20 nt, Homo sapiens
  source 1..20: mol_type = genomic RNA
ccctcagcgaggaagaatac

SEQ ID NO: 16976 - RNA, 20 nt, Homo sapiens
  source 1..20: mol_type = genomic RNA
cctcagcgaggaagaatacc

SEQ ID NO: 16977 - RNA, 20 nt, Homo sapiens
  source 1..20: mol_type = genomic RNA
ctcagcgaggaagaataccg

SEQ ID NO: 16978 - RNA, 20 nt, Homo sapiens
  source 1..20: mol_type = genomic RNA
tcagcgaggaagaataccgg

SEQ ID NO: 16979 - RNA, 20 nt, Homo sapiens
  source 1..20: mol_type = genomic RNA
gaagaataccgggctctgct

SEQ ID NO: 16980 - RNA, 20 nt, Homo sapiens
  source 1..20: mol_type = genomic RNA
aagaataccgggctctgctg

SEQ ID NO: 16981 - RNA, 20 nt, Homo sapiens
  source 1..20: mol_type = genomic RNA
gctctgctggaggagcttta

SEQ ID NO: 16982 - RNA, 20 nt, Homo sapiens
  source 1..20: mol_type = genomic RNA
ctctgctggaggagctttag

SEQ ID NO: 16983 - RNA, 20 nt, Homo sapiens
  source 1..20: mol_type = genomic RNA
tctgctggaggagctttagg

SEQ ID NO: 16984 - RNA, 20 nt, Homo sapiens
  source 1..20: mol_type = genomic RNA
ctgctggaggagctttagga

SEQ ID NO: 16985 - RNA, 20 nt, Homo sapiens
  source 1..20: mol_type = genomic RNA
gctggaggagctttaggacg

SEQ ID NO: 16986 - RNA, 20 nt, Homo sapiens
  source 1..20: mol_type = genomic RNA
ctggaggagctttaggacgc

SEQ ID NO: 16987 - RNA, 20 nt, Homo sapiens
  source 1..20: mol_type = genomic RNA
tggaggagctttaggacgcg

SEQ ID NO: 16988 - RNA, 20 nt, Homo sapiens
  source 1..20: mol_type = genomic RNA
gagctttaggacgcggggtt

SEQ ID NO: 16989 - RNA, 20 nt, Homo sapiens
  source 1..20: mol_type = genomic RNA
agctttaggacgcggggttg

SEQ ID NO: 16990 - RNA, 20 nt, Homo sapiens
  source 1..20: mol_type = genomic RNA
gctttaggacgcggggttgg

SEQ ID NO: 16991 - RNA, 20 nt, Homo sapiens
  source 1..20: mol_type = genomic RNA
ctttaggacgcggggttggg

SEQ ID NO: 16992 - RNA, 20 nt, Homo sapiens
  source 1..20: mol_type = genomic RNA
tttaggacgcggggttggga

SEQ ID NO: 16993 - RNA, 20 nt, Homo sapiens
  source 1..20: mol_type = genomic RNA
cagggcggtggcctctcttt

SEQ ID NO: 16994 - RNA, 20 nt, Homo sapiens
  source 1..20: mol_type = genomic RNA
agggcggtggcctctctttc

SEQ ID NO: 16995 - RNA, 20 nt, Homo sapiens
  source 1..20: mol_type = genomic RNA
gggcggtggcctctctttcg

SEQ ID NO: 16996 - RNA, 20 nt, Homo sapiens
  source 1..20: mol_type = genomic RNA
ggcggtggcctctctttcgc

SEQ ID NO: 16997 - RNA, 20 nt, Homo sapiens
  source 1..20: mol_type = genomic RNA
gcggtggcctctctttcgcg

SEQ ID NO: 16998 - RNA, 20 nt, Homo sapiens
  source 1..20: mol_type = genomic RNA
cggtggcctctctttcgcgg

SEQ ID NO: 16999 - RNA, 20 nt, Homo sapiens
  source 1..20: mol_type = genomic RNA
ggtggcctctctttcgcggg

SEQ ID NO: 17000 - RNA, 20 nt, Homo sapiens
  source 1..20: mol_type = genomic RNA
gtggcctctctttcgcgggg

SEQ ID NO: 17001 - RNA, 20 nt, Homo sapiens
  source 1..20: mol_type = genomic RNA
tggcctctctttcgcgggga

SEQ ID NO: 17002 - RNA, 20 nt, Homo sapiens
  source 1..20: mol_type = genomic RNA
ggcctctctttcgcggggaa

SEQ ID NO: 17003 - RNA, 20 nt, Homo sapiens
  source 1..20: mol_type = genomic RNA
gcctctctttcgcggggaac

SEQ ID NO: 17004 - RNA, 20 nt, Homo sapiens
  source 1..20: mol_type = genomic RNA
cctctctttcgcggggaaca

SEQ ID NO: 17005 - RNA, 20 nt, Homo sapiens
  source 1..20: mol_type = genomic RNA
ctctctttcgcggggaacac

SEQ ID NO: 17006 - RNA, 20 nt, Homo sapiens
  source 1..20: mol_type = genomic RNA
tctctttcgcggggaacacc

SEQ ID NO: 17007 - RNA, 20 nt, Homo sapiens
  source 1..20: mol_type = genomic RNA
ctctttcgcggggaacacct

SEQ ID NO: 17008 - RNA, 20 nt, Homo sapiens
  source 1..20: mol_type = genomic RNA
tctttcgcggggaacacctg

SEQ ID NO: 17009 - RNA, 20 nt, Homo sapiens
  source 1..20: mol_type = genomic RNA
ctttcgcggggaacacctgg

SEQ ID NO: 17010 - RNA, 20 nt, Homo sapiens
  source 1..20: mol_type = genomic RNA
cggcctgggattcctgcctt

SEQ ID NO: 17011 - RNA, 20 nt, Homo sapiens
  source 1..20: mol_type = genomic RNA
ggcctgggattcctgccttc

SEQ ID NO: 17012 - RNA, 20 nt, Homo sapiens
  source 1..20: mol_type = genomic RNA
gcctgggattcctgccttct

SEQ ID NO: 17013 - RNA, 20 nt, Homo sapiens
  source 1..20: mol_type = genomic RNA
cctgggattcctgccttcta

SEQ ID NO: 17014 - RNA, 20 nt, Homo sapiens
  source 1..20: mol_type = genomic RNA
ctgggattcctgccttctag

SEQ ID NO: 17015 - RNA, 20 nt, Homo sapiens
  source 1..20: mol_type = genomic RNA
tgggattcctgccttctagg

SEQ ID NO: 17016 - RNA, 20 nt, Homo sapiens
  source 1..20: mol_type = genomic RNA
gggattcctgccttctaggt

SEQ ID NO: 17017 - RNA, 20 nt, Homo sapiens
  source 1..20: mol_type = genomic RNA
ggattcctgccttctaggtc

SEQ ID NO: 17018 - RNA, 20 nt, Homo sapiens
  source 1..20: mol_type = genomic RNA
gattcctgccttctaggtct

SEQ ID NO: 17019 - RNA, 20 nt, Homo sapiens
  source 1..20: mol_type = genomic RNA
ttctttcctgggcatcccgg

SEQ ID NO: 17020 - RNA, 20 nt, Homo sapiens
  source 1..20: mol_type = genomic RNA
tctttcctgggcatcccggg

SEQ ID NO: 17021 - RNA, 20 nt, Homo sapiens
  source 1..20: mol_type = genomic RNA
ctttcctgggcatcccgggg

SEQ ID NO: 17022 - RNA, 20 nt, Homo sapiens
  source 1..20: mol_type = genomic RNA
cctggcggtcaaaagcatac

SEQ ID NO: 17023 - RNA, 20 nt, Homo sapiens
  source 1..20: mol_type = genomic RNA
ctggcggtcaaaagcatacc

SEQ ID NO: 17024 - RNA, 20 nt, Homo sapiens
  source 1..20: mol_type = genomic RNA
tggcggtcaaaagcatacct

SEQ ID NO: 17025 - RNA, 20 nt, Homo sapiens
  source 1..20: mol_type = genomic RNA
ggcggtcaaaagcatacctc

SEQ ID NO: 17026 - RNA, 20 nt, Homo sapiens
  source 1..20: mol_type = genomic RNA
gcggtcaaaagcatacctct

SEQ ID NO: 17027 - RNA, 20 nt, Homo sapiens
  source 1..20: mol_type = genomic RNA
cggtcaaaagcatacctctg

SEQ ID NO: 17028 - RNA, 20 nt, Homo sapiens
  source 1..20: mol_type = genomic RNA
ggtcaaaagcatacctctgt

SEQ ID NO: 17029 - RNA, 20 nt, Homo sapiens
  source 1..20: mol_type = genomic RNA
gtcaaaagcatacctctgtc

SEQ ID NO: 17030 - RNA, 20 nt, Homo sapiens
  source 1..20: mol_type = genomic RNA
tcaaaagcatacctctgtct

SEQ ID NO: 17031 - RNA, 20 nt, Homo sapiens
  source 1..20: mol_type = genomic RNA
caaaagcatacctctgtctg

SEQ ID NO: 17032 - RNA, 20 nt, Homo sapiens
  source 1..20: mol_type = genomic RNA
aaaagcatacctctgtctgt

SEQ ID NO: 17033 - RNA, 20 nt, Homo sapiens
  source 1..20: mol_type = genomic RNA
aaagcatacctctgtctgtc

SEQ ID NO: 17034 - RNA, 20 nt, Homo sapiens
  source 1..20: mol_type = genomic RNA
aagcatacctctgtctgtct

SEQ ID NO: 17035 - RNA, 20 nt, Homo sapiens
  source 1..20: mol_type = genomic RNA
agcatacctctgtctgtctt

SEQ ID NO: 17036 - RNA, 20 nt, Homo sapiens
  source 1..20: mol_type = genomic RNA
gcatacctctgtctgtcttt

SEQ ID NO: 17037 - RNA, 20 nt, Homo sapiens
  source 1..20: mol_type = genomic RNA
catacctctgtctgtctttg

SEQ ID NO: 17038 - RNA, 20 nt, Homo sapiens
  source 1..20: mol_type = genomic RNA
atacctctgtctgtctttgc

SEQ ID NO: 17039 - RNA, 20 nt, Homo sapiens
  source 1..20: mol_type = genomic RNA
tacctctgtctgtctttgcc

SEQ ID NO: 17040 - RNA, 20 nt, Homo sapiens
  source 1..20: mol_type = genomic RNA
acctctgtctgtctttgccc

SEQ ID NO: 17041 - RNA, 20 nt, Homo sapiens
  source 1..20: mol_type = genomic RNA
cctctgtctgtctttgcccg

SEQ ID NO: 17042 - RNA, 20 nt, Homo sapiens
  source 1..20: mol_type = genomic RNA
ctctgtctgtctttgcccgc

SEQ ID NO: 17043 - RNA, 20 nt, Homo sapiens
  source 1..20: mol_type = genomic RNA
tctgtctgtctttgcccgct

SEQ ID NO: 17044 - RNA, 20 nt, Homo sapiens
  source 1..20: mol_type = genomic RNA
ctgtctgtctttgcccgctt

SEQ ID NO: 17045 - RNA, 20 nt, Homo sapiens
  source 1..20: mol_type = genomic RNA
tgtctgtctttgcccgcttc

SEQ ID NO: 17046 - RNA, 20 nt, Homo sapiens
  source 1..20: mol_type = genomic RNA
gtctgtctttgcccgcttcc

SEQ ID NO: 17047 - RNA, 20 nt, Homo sapiens
  source 1..20: mol_type = genomic RNA
tctgtctttgcccgcttcct

SEQ ID NO: 17048 - RNA, 20 nt, Homo sapiens
  source 1..20: mol_type = genomic RNA
ctgtctttgcccgcttcctg

SEQ ID NO: 17049 - RNA, 20 nt, Homo sapiens
  source 1..20: mol_type = genomic RNA
tgtctttgcccgcttcctgg

SEQ ID NO: 17050 - RNA, 20 nt, Homo sapiens
  source 1..20: mol_type = genomic RNA
gtctttgcccgcttcctggc

SEQ ID NO: 17051 - RNA, 20 nt, Homo sapiens
  source 1..20: mol_type = genomic RNA
tctttgcccgcttcctggct

SEQ ID NO: 17052 - RNA, 20 nt, Homo sapiens
  source 1..20: mol_type = genomic RNA
ctttgcccgcttcctggcta

SEQ ID NO: 17053 - RNA, 20 nt, Homo sapiens
  source 1..20: mol_type = genomic RNA
tttgcccgcttcctggctag

SEQ ID NO: 17054 - RNA, 20 nt, Homo sapiens
  source 1..20: mol_type = genomic RNA
ttgcccgcttcctggctaga

SEQ ID NO: 17055 - RNA, 20 nt, Homo sapiens
  source 1..20: mol_type = genomic RNA
cccgcttcctggctagacct

SEQ ID NO: 17056 - RNA, 20 nt, Homo sapiens
  source 1..20: mol_type = genomic RNA
ccgcttcctggctagacctg

SEQ ID NO: 17057 - RNA, 20 nt, Homo sapiens
  source 1..20: mol_type = genomic RNA
cgcttcctggctagacctgc

SEQ ID NO: 17058 - RNA, 20 nt, Homo sapiens
  source 1..20: mol_type = genomic RNA
gcttcctggctagacctgcg

SEQ ID NO: 17059 - RNA, 20 nt, Homo sapiens
  source 1..20: mol_type = genomic RNA
agctcgctggcctctctgtg

SEQ ID NO: 17060 - RNA, 20 nt, Homo sapiens
  source 1..20: mol_type = genomic RNA
gctggcctctctgtgccctt

SEQ ID NO: 17061 - RNA, 20 nt, Homo sapiens
  source 1..20: mol_type = genomic RNA
ctggcctctctgtgcccttg

SEQ ID NO: 17062 - RNA, 20 nt, Homo sapiens
  source 1..20: mol_type = genomic RNA
tggcctctctgtgcccttgt

SEQ ID NO: 17063 - RNA, 20 nt, Homo sapiens
  source 1..20: mol_type = genomic RNA
ggcctctctgtgcccttgtt

SEQ ID NO: 17064 - RNA, 20 nt, Homo sapiens
  source 1..20: mol_type = genomic RNA
tccgtgaaattctggctgaa

SEQ ID NO: 17065 - RNA, 20 nt, Homo sapiens
  source 1..20: mol_type = genomic RNA
ccgtgaaattctggctgaat

SEQ ID NO: 17066 - RNA, 20 nt, Homo sapiens
  source 1..20: mol_type = genomic RNA
cgtgaaattctggctgaatg

SEQ ID NO: 17067 - RNA, 20 nt, Homo sapiens
  source 1..20: mol_type = genomic RNA
gtgaaattctggctgaatgt

SEQ ID NO: 17068 - RNA, 20 nt, Homo sapiens
  source 1..20: mol_type = genomic RNA
tgaaattctggctgaatgtc

SEQ ID NO: 17069 - RNA, 20 nt, Homo sapiens
  source 1..20: mol_type = genomic RNA
gaaattctggctgaatgtct

SEQ ID NO: 17070 - RNA, 20 nt, Homo sapiens
  source 1..20: mol_type = genomic RNA
aaattctggctgaatgtctc

SEQ ID NO: 17071 - RNA, 20 nt, Homo sapiens
  source 1..20: mol_type = genomic RNA
aattctggctgaatgtctcc

SEQ ID NO: 17072 - RNA, 20 nt, Homo sapiens
  source 1..20: mol_type = genomic RNA
attctggctgaatgtctccc

SEQ ID NO: 17073 - RNA, 20 nt, Homo sapiens
  source 1..20: mol_type = genomic RNA
ttctggctgaatgtctcccc

SEQ ID NO: 17074 - RNA, 20 nt, Homo sapiens
  source 1..20: mol_type = genomic RNA
tctggctgaatgtctccccc

SEQ ID NO: 17075 - RNA, 20 nt, Homo sapiens
  source 1..20: mol_type = genomic RNA
ctggctgaatgtctcccccc

SEQ ID NO: 17076 - RNA, 20 nt, Homo sapiens
  source 1..20: mol_type = genomic RNA
tggctgaatgtctcccccca

SEQ ID NO: 17077 - RNA, 20 nt, Homo sapiens
  source 1..20: mol_type = genomic RNA
ctgaatgtctccccccacct

SEQ ID NO: 17078 - RNA, 20 nt, Homo sapiens
  source 1..20: mol_type = genomic RNA
tgaatgtctccccccacctt

SEQ ID NO: 17079 - RNA, 20 nt, Homo sapiens
  source 1..20: mol_type = genomic RNA
gaatgtctccccccaccttc

SEQ ID NO: 17080 - RNA, 20 nt, Homo sapiens
  source 1..20: mol_type = genomic RNA
aatgtctccccccaccttcc

SEQ ID NO: 17081 - RNA, 20 nt, Homo sapiens
  source 1..20: mol_type = genomic RNA
atgtctccccccaccttccg

SEQ ID NO: 17082 - RNA, 20 nt, Homo sapiens
  source 1..20: mol_type = genomic RNA
tgtctccccccaccttccga

SEQ ID NO: 17083 - RNA, 20 nt, Homo sapiens
  source 1..20: mol_type = genomic RNA
gtctccccccaccttccgac

SEQ ID NO: 17084 - RNA, 20 nt, Homo sapiens
  source 1..20: mol_type = genomic RNA
tctccccccaccttccgacg

SEQ ID NO: 17085 - RNA, 20 nt, Homo sapiens
  source 1..20: mol_type = genomic RNA
cccccaccttccgacgctgt

SEQ ID NO: 17086 - RNA, 20 nt, Homo sapiens
  source 1..20: mol_type = genomic RNA
ccccaccttccgacgctgtc

SEQ ID NO: 17087 - RNA, 20 nt, Homo sapiens
  source 1..20: mol_type = genomic RNA
cccaccttccgacgctgtct

SEQ ID NO: 17088 - RNA, 20 nt, Homo sapiens
  source 1..20: mol_type = genomic RNA
ccaccttccgacgctgtcta

SEQ ID NO: 17089 - RNA, 20 nt, Homo sapiens
  source 1..20: mol_type = genomic RNA
caccttccgacgctgtctag

SEQ ID NO: 17090 - RNA, 20 nt, Homo sapiens
  source 1..20: mol_type = genomic RNA
accttccgacgctgtctagg

SEQ ID NO: 17091 - RNA, 20 nt, Homo sapiens
  source 1..20: mol_type = genomic RNA
ccttccgacgctgtctaggc

SEQ ID NO: 17092 - RNA, 20 nt, Homo sapiens
  source 1..20: mol_type = genomic RNA
cttccgacgctgtctaggca

SEQ ID NO: 17093 - RNA, 20 nt, Homo sapiens
  source 1..20: mol_type = genomic RNA
ttccgacgctgtctaggcaa

SEQ ID NO: 17094 - RNA, 20 nt, Homo sapiens
  source 1..20: mol_type = genomic RNA
tccgacgctgtctaggcaaa

SEQ ID NO: 17095 - RNA, 20 nt, Homo sapiens
  source 1..20: mol_type = genomic RNA
ccgacgctgtctaggcaaac

SEQ ID NO: 17096 - RNA, 20 nt, Homo sapiens
  source 1..20: mol_type = genomic RNA
cgacgctgtctaggcaaacc

SEQ ID NO: 17097 - RNA, 20 nt, Homo sapiens
  source 1..20: mol_type = genomic RNA
gacgctgtctaggcaaacct

SEQ ID NO: 17098 - RNA, 20 nt, Homo sapiens
  source 1..20: mol_type = genomic RNA
acgctgtctaggcaaacctg

SEQ ID NO: 17099 - RNA, 20 nt, Homo sapiens
  source 1..20: mol_type = genomic RNA
cgctgtctaggcaaacctgg

SEQ ID NO: 17100 - RNA, 20 nt, Homo sapiens
  source 1..20: mol_type = genomic RNA
gctgtctaggcaaacctgga

SEQ ID NO: 17101 - RNA, 20 nt, Homo sapiens
  source 1..20: mol_type = genomic RNA
ctgtctaggcaaacctggat

SEQ ID NO: 17102 - RNA, 20 nt, Homo sapiens
  source 1..20: mol_type = genomic RNA
tgtctaggcaaacctggatt

SEQ ID NO: 17103 - RNA, 20 nt, Homo sapiens
  source 1..20: mol_type = genomic RNA
gtctaggcaaacctggatta

SEQ ID NO: 17104 - RNA, 20 nt, Homo sapiens
  source 1..20: mol_type = genomic RNA
tctaggcaaacctggattag

SEQ ID NO: 17105 - RNA, 20 nt, Homo sapiens
  source 1..20: mol_type = genomic RNA
ctaggcaaacctggattaga

SEQ ID NO: 17106 - RNA, 20 nt, Homo sapiens
  source 1..20: mol_type = genomic RNA
taggcaaacctggattagag

SEQ ID NO: 17107 - RNA, 20 nt, Homo sapiens
  source 1..20: mol_type = genomic RNA
aggcaaacctggattagagt

SEQ ID NO: 17108 - RNA, 20 nt, Homo sapiens
  source 1..20: mol_type = genomic RNA
ggcaaacctggattagagtt

SEQ ID NO: 17109 - RNA, 20 nt, Homo sapiens
  source 1..20: mol_type = genomic RNA
gcaaacctggattagagtta

SEQ ID NO: 17110 - RNA, 20 nt, Homo sapiens
  source 1..20: mol_type = genomic RNA
caaacctggattagagttac

SEQ ID NO: 17111 - RNA, 20 nt, Homo sapiens
  source 1..20: mol_type = genomic RNA
aaacctggattagagttaca

SEQ ID NO: 17112 - RNA, 20 nt, Homo sapiens
  source 1..20: mol_type = genomic RNA
aacctggattagagttacat

SEQ ID NO: 17113 - RNA, 20 nt, Homo sapiens
  source 1..20: mol_type = genomic RNA
acctggattagagttacatc

SEQ ID NO: 17114 - RNA, 20 nt, Homo sapiens
  source 1..20: mol_type = genomic RNA
cctggattagagttacatct

SEQ ID NO: 17115 - RNA, 20 nt, Homo sapiens
  source 1..20: mol_type = genomic RNA
ctggattagagttacatctc

SEQ ID NO: 17116 - RNA, 20 nt, Homo sapiens
  source 1..20: mol_type = genomic RNA
tggattagagttacatctcc

SEQ ID NO: 17117 - RNA, 20 nt, Homo sapiens
  source 1..20: mol_type = genomic RNA
ggattagagttacatctcct

SEQ ID NO: 17118 - RNA, 20 nt, Homo sapiens
  source 1..20: mol_type = genomic RNA
gattagagttacatctcctg

SEQ ID NO: 17119 - RNA, 20 nt, Homo sapiens
  source 1..20: mol_type = genomic RNA
attagagttacatctcctgg

SEQ ID NO: 17120 - RNA, 20 nt, Homo sapiens
  source 1..20: mol_type = genomic RNA
ttagagttacatctcctgga

SEQ ID NO: 17121 - RNA, 20 nt, Homo sapiens
  source 1..20: mol_type = genomic RNA
tagagttacatctcctggat

SEQ ID NO: 17122 - RNA, 20 nt, Homo sapiens
  source 1..20: mol_type = genomic RNA
agagttacatctcctggatg

SEQ ID NO: 17123 - RNA, 20 nt, Homo sapiens
  source 1..20: mol_type = genomic RNA
gagttacatctcctggatga

SEQ ID NO: 17124 - RNA, 20 nt, Homo sapiens
  source 1..20: mol_type = genomic RNA
agttacatctcctggatgat

SEQ ID NO: 17125 - RNA, 20 nt, Homo sapiens
  source 1..20: mol_type = genomic RNA
gttacatctcctggatgatt

SEQ ID NO: 17126 - RNA, 20 nt, Homo sapiens
  source 1..20: mol_type = genomic RNA
ttacatctcctggatgatta

SEQ ID NO: 17127 - RNA, 20 nt, Homo sapiens
  source 1..20: mol_type = genomic RNA
tacatctcctggatgattag

SEQ ID NO: 17128 - RNA, 20 nt, Homo sapiens
  source 1..20: mol_type = genomic RNA
acatctcctggatgattagt

SEQ ID NO: 17129 - RNA, 20 nt, Homo sapiens
  source 1..20: mol_type = genomic RNA
catctcctggatgattagtt

SEQ ID NO: 17130 - RNA, 20 nt, Homo sapiens
  source 1..20: mol_type = genomic RNA
atctcctggatgattagttc

SEQ ID NO: 17131 - RNA, 20 nt, Homo sapiens
  source 1..20: mol_type = genomic RNA
tctcctggatgattagttca

SEQ ID NO: 17132 - RNA, 20 nt, Homo sapiens
  source 1..20: mol_type = genomic RNA
ctcctggatgattagttcag

SEQ ID NO: 17133 - RNA, 20 nt, Homo sapiens
  source 1..20: mol_type = genomic RNA
tcctggatgattagttcaga

SEQ ID NO: 17134 - RNA, 20 nt, Homo sapiens
  source 1..20: mol_type = genomic RNA
cctggatgattagttcagag

SEQ ID NO: 17135 - RNA, 20 nt, Homo sapiens
  source 1..20: mol_type = genomic RNA
ctggatgattagttcagaga

SEQ ID NO: 17136 - RNA, 20 nt, Homo sapiens
  source 1..20: mol_type = genomic RNA
tggatgattagttcagagat

SEQ ID NO: 17137 - RNA, 20 nt, Homo sapiens
  source 1..20: mol_type = genomic RNA
ggatgattagttcagagata

SEQ ID NO: 17138 - RNA, 20 nt, Homo sapiens
  source 1..20: mol_type = genomic RNA
aaaatgccccctccctgtgg

SEQ ID NO: 17139 - RNA, 20 nt, Homo sapiens
  source 1..20: mol_type = genomic RNA
ccccctccctgtggatccta

SEQ ID NO: 17140 - RNA, 20 nt, Homo sapiens
  source 1..20: mol_type = genomic RNA
cccctccctgtggatcctat

SEQ ID NO: 17141 - RNA, 20 nt, Homo sapiens
  source 1..20: mol_type = genomic RNA
ccctccctgtggatcctata

SEQ ID NO: 17142 - RNA, 20 nt, Homo sapiens
  source 1..20: mol_type = genomic RNA
cctccctgtggatcctatag

SEQ ID NO: 17143 - RNA, 20 nt, Homo sapiens
  source 1..20: mol_type = genomic RNA
ctccctgtggatcctataga

SEQ ID NO: 17144 - RNA, 20 nt, Homo sapiens
  source 1..20: mol_type = genomic RNA
tccctgtggatcctatagaa

SEQ ID NO: 17145 - RNA, 20 nt, Homo sapiens
  source 1..20: mol_type = genomic RNA
ccctgtggatcctatagaag

SEQ ID NO: 17146 - RNA, 20 nt, Homo sapiens
  source 1..20: mol_type = genomic RNA
cctgtggatcctatagaaga

SEQ ID NO: 17147 - RNA, 20 nt, Homo sapiens
  source 1..20: mol_type = genomic RNA
ctgtggatcctatagaagat

SEQ ID NO: 17148 - RNA, 20 nt, Homo sapiens
  source 1..20: mol_type = genomic RNA
tgtggatcctatagaagatt

SEQ ID NO: 17149 - RNA, 20 nt, Homo sapiens
  source 1..20: mol_type = genomic RNA
gtggatcctatagaagattt

SEQ ID NO: 17150 - RNA, 20 nt, Homo sapiens
  source 1..20: mol_type = genomic RNA
tggatcctatagaagatttg

SEQ ID NO: 17151 - RNA, 20 nt, Homo sapiens
  source 1..20: mol_type = genomic RNA
ggatcctatagaagatttgc

SEQ ID NO: 17152 - RNA, 20 nt, Homo sapiens
  source 1..20: mol_type = genomic RNA
gatcctatagaagatttgca

SEQ ID NO: 17153 - RNA, 20 nt, Homo sapiens
  source 1..20: mol_type = genomic RNA
atcctatagaagatttgcat

SEQ ID NO: 17154 - RNA, 20 nt, Homo sapiens
  source 1..20: mol_type = genomic RNA
tcctatagaagatttgcatc

SEQ ID NO: 17155 - RNA, 20 nt, Homo sapiens
  source 1..20: mol_type = genomic RNA
cctatagaagatttgcatct

SEQ ID NO: 17156 - RNA, 20 nt, Homo sapiens
  source 1..20: mol_type = genomic RNA
tgcatcttttgtgtgatgag

SEQ ID NO: 17157 - RNA, 20 nt, Homo sapiens
  source 1..20: mol_type = genomic RNA
gcatcttttgtgtgatgagt

SEQ ID NO: 17158 - RNA, 20 nt, Homo sapiens
  source 1..20: mol_type = genomic RNA
atcttttgtgtgatgagtgc

SEQ ID NO: 17159 - RNA, 20 nt, Homo sapiens
  source 1..20: mol_type = genomic RNA
tcttttgtgtgatgagtgca

SEQ ID NO: 17160 - RNA, 20 nt, Homo sapiens
  source 1..20: mol_type = genomic RNA
cttttgtgtgatgagtgcag

SEQ ID NO: 17161 - RNA, 20 nt, Homo sapiens
  source 1..20: mol_type = genomic RNA
ttttgtgtgatgagtgcaga

SEQ ID NO: 17162 - RNA, 20 nt, Homo sapiens
  source 1..20: mol_type = genomic RNA
tttgtgtgatgagtgcagag

SEQ ID NO: 17163 - RNA, 20 nt, Homo sapiens
  source 1..20: mol_type = genomic RNA
ttgtgtgatgagtgcagaga

SEQ ID NO: 17164 - RNA, 20 nt, Homo sapiens
  source 1..20: mol_type = genomic RNA
tgtgtgatgagtgcagagat

SEQ ID NO: 17165 - RNA, 20 nt, Homo sapiens
  source 1..20: mol_type = genomic RNA
gtgtgatgagtgcagagata

SEQ ID NO: 17166 - RNA, 20 nt, Homo sapiens
  source 1..20: mol_type = genomic RNA
tgtgatgagtgcagagatat

SEQ ID NO: 17167 - RNA, 20 nt, Homo sapiens
  source 1..20: mol_type = genomic RNA
gtgatgagtgcagagatatg

SEQ ID NO: 17168 - RNA, 20 nt, Homo sapiens
  source 1..20: mol_type = genomic RNA
tgatgagtgcagagatatgt

SEQ ID NO: 17169 - RNA, 20 nt, Homo sapiens
  source 1..20: mol_type = genomic RNA
gatgagtgcagagatatgtc

SEQ ID NO: 17170 - RNA, 20 nt, Homo sapiens
  source 1..20: mol_type = genomic RNA
atgagtgcagagatatgtca

SEQ ID NO: 17171 - RNA, 20 nt, Homo sapiens
  source 1..20: mol_type = genomic RNA
tgagtgcagagatatgtcac

SEQ ID NO: 17172 - RNA, 20 nt, Homo sapiens
  source 1..20: mol_type = genomic RNA
gagtgcagagatatgtcaca

SEQ ID NO: 17173 - RNA, 20 nt, Homo sapiens
  source 1..20: mol_type = genomic RNA
agtgcagagatatgtcacaa

SEQ ID NO: 17174 - RNA, 20 nt, Homo sapiens
  source 1..20: mol_type = genomic RNA
gtgcagagatatgtcacaat

SEQ ID NO: 17175 - RNA, 20 nt, Homo sapiens
  source 1..20: mol_type = genomic RNA
tgcagagatatgtcacaata

SEQ ID NO: 17176 - RNA, 20 nt, Homo sapiens
  source 1..20: mol_type = genomic RNA
gcagagatatgtcacaatat

SEQ ID NO: 17177 - RNA, 20 nt, Homo sapiens
  source 1..20: mol_type = genomic RNA
cagagatatgtcacaatatc

SEQ ID NO: 17178 - RNA, 20 nt, Homo sapiens
  source 1..20: mol_type = genomic RNA
agagatatgtcacaatatcc

SEQ ID NO: 17179 - RNA, 20 nt, Homo sapiens
  source 1..20: mol_type = genomic RNA
gagatatgtcacaatatccc

SEQ ID NO: 17180 - RNA, 20 nt, Homo sapiens
  source 1..20: mol_type = genomic RNA
agatatgtcacaatatcccc

SEQ ID NO: 17181 - RNA, 20 nt, Homo sapiens
  source 1..20: mol_type = genomic RNA
gatatgtcacaatatcccct

SEQ ID NO: 17182 - RNA, 20 nt, Homo sapiens
  source 1..20: mol_type = genomic RNA
atatgtcacaatatcccctg

SEQ ID NO: 17183 - RNA, 20 nt, Homo sapiens
  source 1..20: mol_type = genomic RNA
tatgtcacaatatcccctgt

SEQ ID NO: 17184 - RNA, 20 nt, Homo sapiens
  source 1..20: mol_type = genomic RNA
atgtcacaatatcccctgta

SEQ ID NO: 17185 - RNA, 20 nt, Homo sapiens
  source 1..20: mol_type = genomic RNA
tgtcacaatatcccctgtag

SEQ ID NO: 17186 - RNA, 20 nt, Homo sapiens
  source 1..20: mol_type = genomic RNA
gtcacaatatcccctgtaga

SEQ ID NO: 17187 - RNA, 20 nt, Homo sapiens
  source 1..20: mol_type = genomic RNA
tcacaatatcccctgtagaa

SEQ ID NO: 17188 - RNA, 20 nt, Homo sapiens
  source 1..20: mol_type = genomic RNA
cacaatatcccctgtagaaa

SEQ ID NO: 17189 - RNA, 20 nt, Homo sapiens
  source 1..20: mol_type = genomic RNA
acaatatcccctgtagaaaa

SEQ ID NO: 17190 - RNA, 20 nt, Homo sapiens
  source 1..20: mol_type = genomic RNA
caatatcccctgtagaaaaa

SEQ ID NO: 17191 - RNA, 20 nt, Homo sapiens
  source 1..20: mol_type = genomic RNA
aatatcccctgtagaaaaag

SEQ ID NO: 17192 - RNA, 20 nt, Homo sapiens
  source 1..20: mol_type = genomic RNA
atatcccctgtagaaaaagc

SEQ ID NO: 17193 - RNA, 20 nt, Homo sapiens
  source 1..20: mol_type = genomic RNA
tatcccctgtagaaaaagcc

SEQ ID NO: 17194 - RNA, 20 nt, Homo sapiens
  source 1..20: mol_type = genomic RNA
atcccctgtagaaaaagcct

SEQ ID NO: 17195 - RNA, 20 nt, Homo sapiens
  source 1..20: mol_type = genomic RNA
tcccctgtagaaaaagcctg

SEQ ID NO: 17196 - RNA, 20 nt, Homo sapiens
  source 1..20: mol_type = genomic RNA
cccctgtagaaaaagcctga

SEQ ID NO: 17197 - RNA, 20 nt, Homo sapiens
  source 1..20: mol_type = genomic RNA
ccctgtagaaaaagcctgaa

SEQ ID NO: 17198 - RNA, 20 nt, Homo sapiens
  source 1..20: mol_type = genomic RNA
cctgtagaaaaagcctgaaa

SEQ ID NO: 17199 - RNA, 20 nt, Homo sapiens
  source 1..20: mol_type = genomic RNA
ctgtagaaaaagcctgaaat

SEQ ID NO: 17200 - RNA, 20 nt, Homo sapiens
  source 1..20: mol_type = genomic RNA
tgtagaaaaagcctgaaatt

SEQ ID NO: 17201 - RNA, 20 nt, Homo sapiens
  source 1..20: mol_type = genomic RNA
gtagaaaaagcctgaaattg

SEQ ID NO: 17202 - RNA, 20 nt, Homo sapiens
  source 1..20: mol_type = genomic RNA
aacttcggtgatcagtgcag

SEQ ID NO: 17203 - RNA, 20 nt, Homo sapiens
  source 1..20: mol_type = genomic RNA
acttcggtgatcagtgcaga

SEQ ID NO: 17204 - RNA, 20 nt, Homo sapiens
  source 1..20: mol_type = genomic RNA
cttcggtgatcagtgcagat

SEQ ID NO: 17205 - RNA, 20 nt, Homo sapiens
  source 1..20: mol_type = genomic RNA
ttcggtgatcagtgcagatg

SEQ ID NO: 17206 - RNA, 20 nt, Homo sapiens
  source 1..20: mol_type = genomic RNA
tcggtgatcagtgcagatgt

SEQ ID NO: 17207 - RNA, 20 nt, Homo sapiens
  source 1..20: mol_type = genomic RNA
cggtgatcagtgcagatgtg

SEQ ID NO: 17208 - RNA, 20 nt, Homo sapiens
  source 1..20: mol_type = genomic RNA
ggtgatcagtgcagatgtgt

SEQ ID NO: 17209 - RNA, 20 nt, Homo sapiens
  source 1..20: mol_type = genomic RNA
gtgatcagtgcagatgtgtt

SEQ ID NO: 17210 - RNA, 20 nt, Homo sapiens
  source 1..20: mol_type = genomic RNA
tgatcagtgcagatgtgttt

SEQ ID NO: 17211 - RNA, 20 nt, Homo sapiens
  source 1..20: mol_type = genomic RNA
gatcagtgcagatgtgtttc

SEQ ID NO: 17212 - RNA, 20 nt, Homo sapiens
  source 1..20: mol_type = genomic RNA
atcagtgcagatgtgtttca

SEQ ID NO: 17213 - RNA, 20 nt, Homo sapiens
  source 1..20: mol_type = genomic RNA
tcagtgcagatgtgtttcag

SEQ ID NO: 17214 - RNA, 20 nt, Homo sapiens
  source 1..20: mol_type = genomic RNA
cagtgcagatgtgtttcaga

SEQ ID NO: 17215 - RNA, 20 nt, Homo sapiens
  source 1..20: mol_type = genomic RNA
agtgcagatgtgtttcagaa

SEQ ID NO: 17216 - RNA, 20 nt, Homo sapiens
  source 1..20: mol_type = genomic RNA
gtgcagatgtgtttcagaac

SEQ ID NO: 17217 - RNA, 20 nt, Homo sapiens
  source 1..20: mol_type = genomic RNA
tgcagatgtgtttcagaact

SEQ ID NO: 17218 - RNA, 20 nt, Homo sapiens
  source 1..20: mol_type = genomic RNA
gcagatgtgtttcagaactc

SEQ ID NO: 17219 - RNA, 20 nt, Homo sapiens
  source 1..20: mol_type = genomic RNA
cagatgtgtttcagaactcc

SEQ ID NO: 17220 - RNA, 20 nt, Homo sapiens
  source 1..20: mol_type = genomic RNA
agatgtgtttcagaactcca

SEQ ID NO: 17221 - RNA, 20 nt, Homo sapiens
  source 1..20: mol_type = genomic RNA
gatgtgtttcagaactccat

SEQ ID NO: 17222 - RNA, 20 nt, Homo sapiens
  source 1..20: mol_type = genomic RNA
atgtgtttcagaactccata

SEQ ID NO: 17223 - RNA, 20 nt, Homo sapiens
  source 1..20: mol_type = genomic RNA
tgtgtttcagaactccatag

SEQ ID NO: 17224 - RNA, 20 nt, Homo sapiens
  source 1..20: mol_type = genomic RNA
gtgtttcagaactccatagt

SEQ ID NO: 17225 - RNA, 20 nt, Homo sapiens
  source 1..20: mol_type = genomic RNA
tgtttcagaactccatagta

SEQ ID NO: 17226 - RNA, 20 nt, Homo sapiens
  source 1..20: mol_type = genomic RNA
gtttcagaactccatagtag

SEQ ID NO: 17227 - RNA, 20 nt, Homo sapiens
  source 1..20: mol_type = genomic RNA
tttcagaactccatagtaga

SEQ ID NO: 17228 - RNA, 20 nt, Homo sapiens
  source 1..20: mol_type = genomic RNA
ttcagaactccatagtagac

SEQ ID NO: 17229 - RNA, 20 nt, Homo sapiens
  source 1..20: mol_type = genomic RNA
tcagaactccatagtagact

SEQ ID NO: 17230 - RNA, 20 nt, Homo sapiens
  source 1..20: mol_type = genomic RNA
cagaactccatagtagactg

SEQ ID NO: 17231 - RNA, 20 nt, Homo sapiens
  source 1..20: mol_type = genomic RNA
agaactccatagtagactga

SEQ ID NO: 17232 - RNA, 20 nt, Homo sapiens
  source 1..20: mol_type = genomic RNA
gaactccatagtagactgaa

SEQ ID NO: 17233 - RNA, 20 nt, Homo sapiens
  source 1..20: mol_type = genomic RNA
aactccatagtagactgaac

SEQ ID NO: 17234 - RNA, 20 nt, Homo sapiens
  source 1..20: mol_type = genomic RNA
actccatagtagactgaacc

SEQ ID NO: 17235 - RNA, 20 nt, Homo sapiens
  source 1..20: mol_type = genomic RNA
ctccatagtagactgaacct

SEQ ID NO: 17236 - RNA, 20 nt, Homo sapiens
  source 1..20: mol_type = genomic RNA
tccatagtagactgaaccta

SEQ ID NO: 17237 - RNA, 20 nt, Homo sapiens
  source 1..20: mol_type = genomic RNA
ccatagtagactgaacctag

SEQ ID NO: 17238 - RNA, 20 nt, Homo sapiens
  source 1..20: mol_type = genomic RNA
catagtagactgaacctaga

SEQ ID NO: 17239 - RNA, 20 nt, Homo sapiens
  source 1..20: mol_type = genomic RNA
atagtagactgaacctagag

SEQ ID NO: 17240 - RNA, 20 nt, Homo sapiens
  source 1..20: mol_type = genomic RNA
tagtagactgaacctagaga

SEQ ID NO: 17241 - RNA, 20 nt, Homo sapiens
  source 1..20: mol_type = genomic RNA
agtagactgaacctagagaa

SEQ ID NO: 17242 - RNA, 20 nt, Homo sapiens
  source 1..20: mol_type = genomic RNA
gtagactgaacctagagaat

SEQ ID NO: 17243 - RNA, 20 nt, Homo sapiens
  source 1..20: mol_type = genomic RNA
tagactgaacctagagaatg

SEQ ID NO: 17244 - RNA, 20 nt, Homo sapiens
  source 1..20: mol_type = genomic RNA
agactgaacctagagaatgg

SEQ ID NO: 17245 - RNA, 20 nt, Homo sapiens
  source 1..20: mol_type = genomic RNA
gactgaacctagagaatggt

SEQ ID NO: 17246 - RNA, 20 nt, Homo sapiens
  source 1..20: mol_type = genomic RNA
actgaacctagagaatggtt

SEQ ID NO: 17247 - RNA, 20 nt, Homo sapiens
  source 1..20: mol_type = genomic RNA
ctgaacctagagaatggtta

SEQ ID NO: 17248 - RNA, 20 nt, Homo sapiens
  source 1..20: mol_type = genomic RNA
tgaacctagagaatggttac

SEQ ID NO: 17249 - RNA, 20 nt, Homo sapiens
  source 1..20: mol_type = genomic RNA
gaacctagagaatggttaca

SEQ ID NO: 17250 - RNA, 20 nt, Homo sapiens
  source 1..20: mol_type = genomic RNA
aacctagagaatggttacat

SEQ ID NO: 17251 - RNA, 20 nt, Homo sapiens
  source 1..20: mol_type = genomic RNA
acctagagaatggttacatc

SEQ ID NO: 17252 - RNA, 20 nt, Homo sapiens
  source 1..20: mol_type = genomic RNA
cctagagaatggttacatca

SEQ ID NO: 17253 - RNA, 20 nt, Homo sapiens
  source 1..20: mol_type = genomic RNA
ctagagaatggttacatcac

SEQ ID NO: 17254 - RNA, 20 nt, Homo sapiens
  source 1..20: mol_type = genomic RNA
tagagaatggttacatcact

SEQ ID NO: 17255 - RNA, 20 nt, Homo sapiens
  source 1..20: mol_type = genomic RNA
agagaatggttacatcactt

SEQ ID NO: 17256 - RNA, 20 nt, Homo sapiens
  source 1..20: mol_type = genomic RNA
gagaatggttacatcactta

SEQ ID NO: 17257 - RNA, 20 nt, Homo sapiens
  source 1..20: mol_type = genomic RNA
agaatggttacatcacttag

SEQ ID NO: 17258 - RNA, 20 nt, Homo sapiens
  source 1..20: mol_type = genomic RNA
gaatggttacatcacttagg

SEQ ID NO: 17259 - RNA, 20 nt, Homo sapiens
  source 1..20: mol_type = genomic RNA
aatggttacatcacttaggt

SEQ ID NO: 17260 - RNA, 20 nt, Homo sapiens
  source 1..20: mol_type = genomic RNA
atggttacatcacttaggtg

SEQ ID NO: 17261 - RNA, 20 nt, Homo sapiens
  source 1..20: mol_type = genomic RNA
tggttacatcacttaggtga

SEQ ID NO: 17262 - RNA, 20 nt, Homo sapiens
  source 1..20: mol_type = genomic RNA
ggttacatcacttaggtgat

SEQ ID NO: 17263 - RNA, 20 nt, Homo sapiens
  source 1..20: mol_type = genomic RNA
gttacatcacttaggtgatc

SEQ ID NO: 17264 - RNA, 20 nt, Homo sapiens
  source 1..20: mol_type = genomic RNA
ttacatcacttaggtgatca

SEQ ID NO: 17265 - RNA, 20 nt, Homo sapiens
  source 1..20: mol_type = genomic RNA
tacatcacttaggtgatcag

SEQ ID NO: 17266 - RNA, 20 nt, Homo sapiens
  source 1..20: mol_type = genomic RNA
acatcacttaggtgatcagt

SEQ ID NO: 17267 - RNA, 20 nt, Homo sapiens
  source 1..20: mol_type = genomic RNA
catcacttaggtgatcagtg

SEQ ID NO: 17268 - RNA, 20 nt, Homo sapiens
  source 1..20: mol_type = genomic RNA
atcacttaggtgatcagtgt

SEQ ID NO: 17269 - RNA, 20 nt, Homo sapiens
  source 1..20: mol_type = genomic RNA
tcacttaggtgatcagtgta

SEQ ID NO: 17270 - RNA, 20 nt, Homo sapiens
  source 1..20: mol_type = genomic RNA
cacttaggtgatcagtgtag

SEQ ID NO: 17271 - RNA, 20 nt, Homo sapiens
  source 1..20: mol_type = genomic RNA
acttaggtgatcagtgtaga

SEQ ID NO: 17272 - RNA, 20 nt, Homo sapiens
  source 1..20: mol_type = genomic RNA
cttaggtgatcagtgtagag

SEQ ID NO: 17273 - RNA, 20 nt, Homo sapiens
  source 1..20: mol_type = genomic RNA
ttaggtgatcagtgtagaga

SEQ ID NO: 17274 - RNA, 20 nt, Homo sapiens
  source 1..20: mol_type = genomic RNA
taggtgatcagtgtagagat

SEQ ID NO: 17275 - RNA, 20 nt, Homo sapiens
  source 1..20: mol_type = genomic RNA
aggtgatcagtgtagagata

SEQ ID NO: 17276 - RNA, 20 nt, Homo sapiens
  source 1..20: mol_type = genomic RNA
ggtgatcagtgtagagatat

SEQ ID NO: 17277 - RNA, 20 nt, Homo sapiens
  source 1..20: mol_type = genomic RNA
gtgatcagtgtagagatatg

SEQ ID NO: 17278 - RNA, 20 nt, Homo sapiens
  source 1..20: mol_type = genomic RNA
tgatcagtgtagagatatgt

SEQ ID NO: 17279 - RNA, 20 nt, Homo sapiens
  source 1..20: mol_type = genomic RNA
gatcagtgtagagatatgtt

SEQ ID NO: 17280 - RNA, 20 nt, Homo sapiens
  source 1..20: mol_type = genomic RNA
taaaattctcgtgtagacag

SEQ ID NO: 17281 - RNA, 20 nt, Homo sapiens
  source 1..20: mol_type = genomic RNA
aaaattctcgtgtagacaga

SEQ ID NO: 17282 - RNA, 20 nt, Homo sapiens
  source 1..20: mol_type = genomic RNA
aaattctcgtgtagacagag

SEQ ID NO: 17283 - RNA, 20 nt, Homo sapiens
  source 1..20: mol_type = genomic RNA
aattctcgtgtagacagagc

SEQ ID NO: 17284 - RNA, 20 nt, Homo sapiens
  source 1..20: mol_type = genomic RNA
attctcgtgtagacagagcc

SEQ ID NO: 17285 - RNA, 20 nt, Homo sapiens
  source 1..20: mol_type = genomic RNA
ttctcgtgtagacagagcct

SEQ ID NO: 17286 - RNA, 20 nt, Homo sapiens
  source 1..20: mol_type = genomic RNA
tctcgtgtagacagagccta

SEQ ID NO: 17287 - RNA, 20 nt, Homo sapiens
  source 1..20: mol_type = genomic RNA
ctcgtgtagacagagcctag

SEQ ID NO: 17288 - RNA, 20 nt, Homo sapiens
  source 1..20: mol_type = genomic RNA
tcgtgtagacagagcctaga

SEQ ID NO: 17289 - RNA, 20 nt, Homo sapiens
  source 1..20: mol_type = genomic RNA
cgtgtagacagagcctagac

SEQ ID NO: 17290 - RNA, 20 nt, Homo sapiens
  source 1..20: mol_type = genomic RNA
gtgtagacagagcctagaca

SEQ ID NO: 17291 - RNA, 20 nt, Homo sapiens
  source 1..20: mol_type = genomic RNA
tgtagacagagcctagacaa

SEQ ID NO: 17292 - RNA, 20 nt, Homo sapiens
  source 1..20: mol_type = genomic RNA
gtagacagagcctagacaat

SEQ ID NO: 17293 - RNA, 20 nt, Homo sapiens
  source 1..20: mol_type = genomic RNA
tagacagagcctagacaatt

SEQ ID NO: 17294 - RNA, 20 nt, Homo sapiens
  source 1..20: mol_type = genomic RNA
agacagagcctagacaattg

SEQ ID NO: 17295 - RNA, 20 nt, Homo sapiens
  source 1..20: mol_type = genomic RNA
gacagagcctagacaattgt

SEQ ID NO: 17296 - RNA, 20 nt, Homo sapiens
  source 1..20: mol_type = genomic RNA
acagagcctagacaattgtt

SEQ ID NO: 17297 - RNA, 20 nt, Homo sapiens
  source 1..20: mol_type = genomic RNA
cagagcctagacaattgtta

SEQ ID NO: 17298 - RNA, 20 nt, Homo sapiens
  source 1..20: mol_type = genomic RNA
agagcctagacaattgttac

SEQ ID NO: 17299 - RNA, 20 nt, Homo sapiens
  source 1..20: mol_type = genomic RNA
gagcctagacaattgttaca

SEQ ID NO: 17300 - RNA, 20 nt, Homo sapiens
  source 1..20: mol_type = genomic RNA
agcctagacaattgttacat

SEQ ID NO: 17301 - RNA, 20 nt, Homo sapiens
  source 1..20: mol_type = genomic RNA
gcctagacaattgttacatc

SEQ ID NO: 17302 - RNA, 20 nt, Homo sapiens
  source 1..20: mol_type = genomic RNA
tagacaattgttacatcacc

SEQ ID NO: 17303 - RNA, 20 nt, Homo sapiens
  source 1..20: mol_type = genomic RNA
agacaattgttacatcacct

SEQ ID NO: 17304 - RNA, 20 nt, Homo sapiens
  source 1..20: mol_type = genomic RNA
gacaattgttacatcaccta

SEQ ID NO: 17305 - RNA, 20 nt, Homo sapiens
  source 1..20: mol_type = genomic RNA
acaattgttacatcacctag

SEQ ID NO: 17306 - RNA, 20 nt, Homo sapiens
  source 1..20: mol_type = genomic RNA
aattgttacatcacctagtg

SEQ ID NO: 17307 - RNA, 20 nt, Homo sapiens
  source 1..20: mol_type = genomic RNA
attgttacatcacctagtga

SEQ ID NO: 17308 - RNA, 20 nt, Homo sapiens
  source 1..20: mol_type = genomic RNA
ttgttacatcacctagtgat

SEQ ID NO: 17309 - RNA, 20 nt, Homo sapiens
  source 1..20: mol_type = genomic RNA
tgttacatcacctagtgatc

SEQ ID NO: 17310 - RNA, 20 nt, Homo sapiens
  source 1..20: mol_type = genomic RNA
gttacatcacctagtgatca

SEQ ID NO: 17311 - RNA, 20 nt, Homo sapiens
  source 1..20: mol_type = genomic RNA
ttacatcacctagtgatcag

SEQ ID NO: 17312 - RNA, 20 nt, Homo sapiens
  source 1..20: mol_type = genomic RNA
tacatcacctagtgatcagt

SEQ ID NO: 17313 - RNA, 20 nt, Homo sapiens
  source 1..20: mol_type = genomic RNA
acatcacctagtgatcagtg

SEQ ID NO: 17314 - RNA, 20 nt, Homo sapiens
  source 1..20: mol_type = genomic RNA
catcacctagtgatcagtgc

SEQ ID NO: 17315 - RNA, 20 nt, Homo sapiens
  source 1..20: mol_type = genomic RNA
atcacctagtgatcagtgca

SEQ ID NO: 17316 - RNA, 20 nt, Homo sapiens
  source 1..20: mol_type = genomic RNA
tcacctagtgatcagtgcag

SEQ ID NO: 17317 - RNA, 20 nt, Homo sapiens
  source 1..20: mol_type = genomic RNA
cacctagtgatcagtgcagg

SEQ ID NO: 17318 - RNA, 20 nt, Homo sapiens
  source 1..20: mol_type = genomic RNA
acctagtgatcagtgcaggg

SEQ ID NO: 17319 - RNA, 20 nt, Homo sapiens
  source 1..20: mol_type = genomic RNA
cctagtgatcagtgcaggga

SEQ ID NO: 17320 - RNA, 20 nt, Homo sapiens
  source 1..20: mol_type = genomic RNA
ctagtgatcagtgcagggat

SEQ ID NO: 17321 - RNA, 20 nt, Homo sapiens
  source 1..20: mol_type = genomic RNA
tagtgatcagtgcagggata

SEQ ID NO: 17322 - RNA, 20 nt, Homo sapiens
  source 1..20: mol_type = genomic RNA
agtgatcagtgcagggataa

SEQ ID NO: 17323 - RNA, 20 nt, Homo sapiens
  source 1..20: mol_type = genomic RNA
gtgatcagtgcagggataag

SEQ ID NO: 17324 - RNA, 20 nt, Homo sapiens
  source 1..20: mol_type = genomic RNA
tgatcagtgcagggataagt

SEQ ID NO: 17325 - RNA, 20 nt, Homo sapiens
  source 1..20: mol_type = genomic RNA
gatcagtgcagggataagtc

SEQ ID NO: 17326 - RNA, 20 nt, Homo sapiens
  source 1..20: mol_type = genomic RNA
atcagtgcagggataagtca

SEQ ID NO: 17327 - RNA, 20 nt, Homo sapiens
  source 1..20: mol_type = genomic RNA
tcagtgcagggataagtcat

SEQ ID NO: 17328 - RNA, 20 nt, Homo sapiens
  source 1..20: mol_type = genomic RNA
cagtgcagggataagtcata

SEQ ID NO: 17329 - RNA, 20 nt, Homo sapiens
  source 1..20: mol_type = genomic RNA
agtgcagggataagtcataa

SEQ ID NO: 17330 - RNA, 20 nt, Homo sapiens
  source 1..20: mol_type = genomic RNA
gtgcagggataagtcataaa

SEQ ID NO: 17331 - RNA, 20 nt, Homo sapiens
  source 1..20: mol_type = genomic RNA
tgcagggataagtcataaag

SEQ ID NO: 17332 - RNA, 20 nt, Homo sapiens
  source 1..20: mol_type = genomic RNA
gcagggataagtcataaagc

SEQ ID NO: 17333 - RNA, 20 nt, Homo sapiens
  source 1..20: mol_type = genomic RNA
cagggataagtcataaagcc

SEQ ID NO: 17334 - RNA, 20 nt, Homo sapiens
  source 1..20: mol_type = genomic RNA
agggataagtcataaagcct

SEQ ID NO: 17335 - RNA, 20 nt, Homo sapiens
  source 1..20: mol_type = genomic RNA
gggataagtcataaagcctc

SEQ ID NO: 17336 - RNA, 20 nt, Homo sapiens
  source 1..20: mol_type = genomic RNA
ggataagtcataaagcctcc

SEQ ID NO: 17337 - RNA, 20 nt, Homo sapiens
  source 1..20: mol_type = genomic RNA
gataagtcataaagcctcct

SEQ ID NO: 17338 - RNA, 20 nt, Homo sapiens
  source 1..20: mol_type = genomic RNA
ataagtcataaagcctcctg

SEQ ID NO: 17339 - RNA, 20 nt, Homo sapiens
  source 1..20: mol_type = genomic RNA
taagtcataaagcctcctgt

SEQ ID NO: 17340 - RNA, 20 nt, Homo sapiens
  source 1..20: mol_type = genomic RNA
aagtcataaagcctcctgta

SEQ ID NO: 17341 - RNA, 20 nt, Homo sapiens
  source 1..20: mol_type = genomic RNA
agtcataaagcctcctgtag

SEQ ID NO: 17342 - RNA, 20 nt, Homo sapiens
  source 1..20: mol_type = genomic RNA
gtcataaagcctcctgtagg

SEQ ID NO: 17343 - RNA, 20 nt, Homo sapiens
  source 1..20: mol_type = genomic RNA
tcataaagcctcctgtaggc

SEQ ID NO: 17344 - RNA, 20 nt, Homo sapiens
  source 1..20: mol_type = genomic RNA
cataaagcctcctgtaggca

SEQ ID NO: 17345 - RNA, 20 nt, Homo sapiens
  source 1..20: mol_type = genomic RNA
ataaagcctcctgtaggcag

SEQ ID NO: 17346 - RNA, 20 nt, Homo sapiens
  source 1..20: mol_type = genomic RNA
taaagcctcctgtaggcaga

SEQ ID NO: 17347 - RNA, 20 nt, Homo sapiens
  source 1..20: mol_type = genomic RNA
aaagcctcctgtaggcagag

SEQ ID NO: 17348 - RNA, 20 nt, Homo sapiens
  source 1..20: mol_type = genomic RNA
aagcctcctgtaggcagagt

SEQ ID NO: 17349 - RNA, 20 nt, Homo sapiens
  source 1..20: mol_type = genomic RNA
gcctcctgtaggcagagtgt

SEQ ID NO: 17350 - RNA, 20 nt, Homo sapiens
  source 1..20: mol_type = genomic RNA
cctcctgtaggcagagtgta

SEQ ID NO: 17351 - RNA, 20 nt, Homo sapiens
  source 1..20: mol_type = genomic RNA
ctcctgtaggcagagtgtag

SEQ ID NO: 17352 - RNA, 20 nt, Homo sapiens
  source 1..20: mol_type = genomic RNA
tcctgtaggcagagtgtagg

SEQ ID NO: 17353 - RNA, 20 nt, Homo sapiens
  source 1..20: mol_type = genomic RNA
cctgtaggcagagtgtaggc

SEQ ID NO: 17354 - RNA, 20 nt, Homo sapiens
  source 1..20: mol_type = genomic RNA
ctgtaggcagagtgtaggca

SEQ ID NO: 17355 - RNA, 20 nt, Homo sapiens
  source 1..20: mol_type = genomic RNA
tgtaggcagagtgtaggcaa

SEQ ID NO: 17356 - RNA, 20 nt, Homo sapiens
  source 1..20: mol_type = genomic RNA
gtaggcagagtgtaggcaag

SEQ ID NO: 17357 - RNA, 20 nt, Homo sapiens
  source 1..20: mol_type = genomic RNA
taggcagagtgtaggcaagt

SEQ ID NO: 17358 - RNA, 20 nt, Homo sapiens
  source 1..20: mol_type = genomic RNA
aggcagagtgtaggcaagtg

SEQ ID NO: 17359 - RNA, 20 nt, Homo sapiens
  source 1..20: mol_type = genomic RNA
ggcagagtgtaggcaagtgt

SEQ ID NO: 17360 - RNA, 20 nt, Homo sapiens
  source 1..20: mol_type = genomic RNA
gcagagtgtaggcaagtgtt

SEQ ID NO: 17361 - RNA, 20 nt, Homo sapiens
  source 1..20: mol_type = genomic RNA
cagagtgtaggcaagtgttc

SEQ ID NO: 17362 - RNA, 20 nt, Homo sapiens
  source 1..20: mol_type = genomic RNA
agagtgtaggcaagtgttcc

SEQ ID NO: 17363 - RNA, 20 nt, Homo sapiens
  source 1..20: mol_type = genomic RNA
gagtgtaggcaagtgttccc

SEQ ID NO: 17364 - RNA, 20 nt, Homo sapiens
  source 1..20: mol_type = genomic RNA
agtgtaggcaagtgttccct

SEQ ID NO: 17365 - RNA, 20 nt, Homo sapiens
  source 1..20: mol_type = genomic RNA
gtgtaggcaagtgttccctc

SEQ ID NO: 17366 - RNA, 20 nt, Homo sapiens
  source 1..20: mol_type = genomic RNA
tgtaggcaagtgttccctcc

SEQ ID NO: 17367 - RNA, 20 nt, Homo sapiens
  source 1..20: mol_type = genomic RNA
gtaggcaagtgttccctccc

SEQ ID NO: 17368 - RNA, 20 nt, Homo sapiens
  source 1..20: mol_type = genomic RNA
taggcaagtgttccctccct

SEQ ID NO: 17369 - RNA, 20 nt, Homo sapiens
  source 1..20: mol_type = genomic RNA
aggcaagtgttccctccctg

SEQ ID NO: 17370 - RNA, 20 nt, Homo sapiens
  source 1..20: mol_type = genomic RNA
ggcaagtgttccctccctgg

SEQ ID NO: 17371 - RNA, 20 nt, Homo sapiens
  source 1..20: mol_type = genomic RNA
gcaagtgttccctccctggg

SEQ ID NO: 17372 - RNA, 20 nt, Homo sapiens
  source 1..20: mol_type = genomic RNA
caagtgttccctccctgggc

SEQ ID NO: 17373 - RNA, 20 nt, Homo sapiens
  source 1..20: mol_type = genomic RNA
aagtgttccctccctgggct

SEQ ID NO: 17374 - RNA, 20 nt, Homo sapiens
  source 1..20: mol_type = genomic RNA
agtgttccctccctgggctg

SEQ ID NO: 17375 - RNA, 20 nt, Homo sapiens
  source 1..20: mol_type = genomic RNA
gtgttccctccctgggctga

SEQ ID NO: 17376 - RNA, 20 nt, Homo sapiens
  source 1..20: mol_type = genomic RNA
tgttccctccctgggctgat

SEQ ID NO: 17377 - RNA, 20 nt, Homo sapiens
  source 1..20: mol_type = genomic RNA
gttccctccctgggctgatc

SEQ ID NO: 17378 - RNA, 20 nt, Homo sapiens
  source 1..20: mol_type = genomic RNA
ttccctccctgggctgatca

SEQ ID NO: 17379 - RNA, 20 nt, Homo sapiens
  source 1..20: mol_type = genomic RNA
cctccctgggctgatcagtg

SEQ ID NO: 17380 - RNA, 20 nt, Homo sapiens
  source 1..20: mol_type = genomic RNA
ctgggctgatcagtgcagag

SEQ ID NO: 17381 - RNA, 20 nt, Homo sapiens
  source 1..20: mol_type = genomic RNA
gggctgatcagtgcagagat

SEQ ID NO: 17382 - RNA, 20 nt, Homo sapiens
  source 1..20: mol_type = genomic RNA
ggctgatcagtgcagagata

SEQ ID NO: 17383 - RNA, 20 nt, Homo sapiens
  source 1..20: mol_type = genomic RNA
gctgatcagtgcagagatat

SEQ ID NO: 17384 - RNA, 20 nt, Homo sapiens
  source 1..20: mol_type = genomic RNA
ctgatcagtgcagagatatc

SEQ ID NO: 17385 - RNA, 20 nt, Homo sapiens
  source 1..20: mol_type = genomic RNA
tgatcagtgcagagatatct

SEQ ID NO: 17386 - RNA, 20 nt, Homo sapiens
  source 1..20: mol_type = genomic RNA
gatcagtgcagagatatctc

SEQ ID NO: 17387 - RNA, 20 nt, Homo sapiens
  source 1..20: mol_type = genomic RNA
atcagtgcagagatatctca

SEQ ID NO: 17388 - RNA, 20 nt, Homo sapiens
  source 1..20: mol_type = genomic RNA
tcagtgcagagatatctcac

SEQ ID NO: 17389 - RNA, 20 nt, Homo sapiens
  source 1..20: mol_type = genomic RNA
cagtgcagagatatctcaca

SEQ ID NO: 17390 - RNA, 20 nt, Homo sapiens
  source 1..20: mol_type = genomic RNA
agtgcagagatatctcacaa

SEQ ID NO: 17391 - RNA, 20 nt, Homo sapiens
  source 1..20: mol_type = genomic RNA
gtgcagagatatctcacaaa

SEQ ID NO: 17392 - RNA, 20 nt, Homo sapiens
  source 1..20: mol_type = genomic RNA
tgcagagatatctcacaaag

SEQ ID NO: 17393 - RNA, 20 nt, Homo sapiens
  source 1..20: mol_type = genomic RNA
gcagagatatctcacaaagc

SEQ ID NO: 17394 - RNA, 20 nt, Homo sapiens
  source 1..20: mol_type = genomic RNA
cagagatatctcacaaagcc

SEQ ID NO: 17395 - RNA, 20 nt, Homo sapiens
  source 1..20: mol_type = genomic RNA
agagatatctcacaaagccc

SEQ ID NO: 17396 - RNA, 20 nt, Homo sapiens
  source 1..20: mol_type = genomic RNA
gagatatctcacaaagcccc

SEQ ID NO: 17397 - RNA, 20 nt, Homo sapiens
  source 1..20: mol_type = genomic RNA
agatatctcacaaagcccct

SEQ ID NO: 17398 - RNA, 20 nt, Homo sapiens
  source 1..20: mol_type = genomic RNA
gatatctcacaaagccccta

SEQ ID NO: 17399 - RNA, 20 nt, Homo sapiens
  source 1..20: mol_type = genomic RNA
atatctcacaaagcccctat

SEQ ID NO: 17400 - RNA, 20 nt, Homo sapiens
  source 1..20: mol_type = genomic RNA
tatctcacaaagcccctata

SEQ ID NO: 17401 - RNA, 20 nt, Homo sapiens
  source 1..20: mol_type = genomic RNA
atctcacaaagcccctataa

SEQ ID NO: 17402 - RNA, 20 nt, Homo sapiens
  source 1..20: mol_type = genomic RNA
tctcacaaagcccctataag

SEQ ID NO: 17403 - RNA, 20 nt, Homo sapiens
  source 1..20: mol_type = genomic RNA
ctcacaaagcccctataagc

SEQ ID NO: 17404 - RNA, 20 nt, Homo sapiens
  source 1..20: mol_type = genomic RNA
tcacaaagcccctataagcc

SEQ ID NO: 17405 - RNA, 20 nt, Homo sapiens
  source 1..20: mol_type = genomic RNA
cacaaagcccctataagcca

SEQ ID NO: 17406 - RNA, 20 nt, Homo sapiens
  source 1..20: mol_type = genomic RNA
acaaagcccctataagccaa

SEQ ID NO: 17407 - RNA, 20 nt, Homo sapiens
  source 1..20: mol_type = genomic RNA
caaagcccctataagccaaa

SEQ ID NO: 17408 - RNA, 20 nt, Homo sapiens
  source 1..20: mol_type = genomic RNA
aaagcccctataagccaaac

SEQ ID NO: 17409 - RNA, 20 nt, Homo sapiens
  source 1..20: mol_type = genomic RNA
aagcccctataagccaaacc

SEQ ID NO: 17410 - RNA, 20 nt, Homo sapiens
  source 1..20: mol_type = genomic RNA
agcccctataagccaaacct

SEQ ID NO: 17411 - RNA, 20 nt, Homo sapiens
  source 1..20: mol_type = genomic RNA
gcccctataagccaaacctt

SEQ ID NO: 17412 - RNA, 20 nt, Homo sapiens
  source 1..20: mol_type = genomic RNA
cccctataagccaaaccttg

SEQ ID NO: 17413 - RNA, 20 nt, Homo sapiens
  source 1..20: mol_type = genomic RNA
ccctataagccaaaccttga

SEQ ID NO: 17414 - RNA, 20 nt, Homo sapiens
  source 1..20: mol_type = genomic RNA
cctataagccaaaccttgac

SEQ ID NO: 17415 - RNA, 20 nt, Homo sapiens
  source 1..20: mol_type = genomic RNA
ctataagccaaaccttgaca

SEQ ID NO: 17416 - RNA, 20 nt, Homo sapiens
  source 1..20: mol_type = genomic RNA
tataagccaaaccttgacaa

SEQ ID NO: 17417 - RNA, 20 nt, Homo sapiens
  source 1..20: mol_type = genomic RNA
ataagccaaaccttgacaag

SEQ ID NO: 17418 - RNA, 20 nt, Homo sapiens
  source 1..20: mol_type = genomic RNA
taagccaaaccttgacaagg

SEQ ID NO: 17419 - RNA, 20 nt, Homo sapiens
  source 1..20: mol_type = genomic RNA
aagccaaaccttgacaaggg

SEQ ID NO: 17420 - RNA, 20 nt, Homo sapiens
  source 1..20: mol_type = genomic RNA
agccaaaccttgacaagggt

SEQ ID NO: 17421 - RNA, 20 nt, Homo sapiens
  source 1..20: mol_type = genomic RNA
gccaaaccttgacaagggtt

SEQ ID NO: 17422 - RNA, 20 nt, Homo sapiens
  source 1..20: mol_type = genomic RNA
ccaaaccttgacaagggtta

SEQ ID NO: 17423 - RNA, 20 nt, Homo sapiens
  source 1..20: mol_type = genomic RNA
caaaccttgacaagggttac

SEQ ID NO: 17424 - RNA, 20 nt, Homo sapiens
  source 1..20: mol_type = genomic RNA
aaaccttgacaagggttaca

SEQ ID NO: 17425 - RNA, 20 nt, Homo sapiens
  source 1..20: mol_type = genomic RNA
aaccttgacaagggttacat

SEQ ID NO: 17426 - RNA, 20 nt, Homo sapiens
  source 1..20: mol_type = genomic RNA
accttgacaagggttacatc

SEQ ID NO: 17427 - RNA, 20 nt, Homo sapiens
  source 1..20: mol_type = genomic RNA
ccttgacaagggttacatca

SEQ ID NO: 17428 - RNA, 20 nt, Homo sapiens
  source 1..20: mol_type = genomic RNA
cttgacaagggttacatcac

SEQ ID NO: 17429 - RNA, 20 nt, Homo sapiens
  source 1..20: mol_type = genomic RNA
ttgacaagggttacatcacc

SEQ ID NO: 17430 - RNA, 20 nt, Homo sapiens
  source 1..20: mol_type = genomic RNA
tgacaagggttacatcacct

SEQ ID NO: 17431 - RNA, 20 nt, Homo sapiens
  source 1..20: mol_type = genomic RNA
gacaagggttacatcacctg

SEQ ID NO: 17432 - RNA, 20 nt, Homo sapiens
  source 1..20: mol_type = genomic RNA
acaagggttacatcacctgt

SEQ ID NO: 17433 - RNA, 20 nt, Homo sapiens
  source 1..20: mol_type = genomic RNA
caagggttacatcacctgtt

SEQ ID NO: 17434 - RNA, 20 nt, Homo sapiens
  source 1..20: mol_type = genomic RNA
aagggttacatcacctgttt

SEQ ID NO: 17435 - RNA, 20 nt, Homo sapiens
  source 1..20: mol_type = genomic RNA
agggttacatcacctgtttg

SEQ ID NO: 17436 - RNA, 20 nt, Homo sapiens
  source 1..20: mol_type = genomic RNA
gggttacatcacctgtttga

SEQ ID NO: 17437 - RNA, 20 nt, Homo sapiens
  source 1..20: mol_type = genomic RNA
ggttacatcacctgtttgag

SEQ ID NO: 17438 - RNA, 20 nt, Homo sapiens
  source 1..20: mol_type = genomic RNA
gttacatcacctgtttgagc

SEQ ID NO: 17439 - RNA, 20 nt, Homo sapiens
  source 1..20: mol_type = genomic RNA
ttacatcacctgtttgagca

SEQ ID NO: 17440 - RNA, 20 nt, Homo sapiens
  source 1..20: mol_type = genomic RNA
tacatcacctgtttgagcag

SEQ ID NO: 17441 - RNA, 20 nt, Homo sapiens
  source 1..20: mol_type = genomic RNA
acatcacctgtttgagcagt

SEQ ID NO: 17442 - RNA, 20 nt, Homo sapiens
  source 1..20: mol_type = genomic RNA
catcacctgtttgagcagtg

SEQ ID NO: 17443 - RNA, 20 nt, Homo sapiens
  source 1..20: mol_type = genomic RNA
atcacctgtttgagcagtgg

SEQ ID NO: 17444 - RNA, 20 nt, Homo sapiens
  source 1..20: mol_type = genomic RNA
tcacctgtttgagcagtgga

SEQ ID NO: 17445 - RNA, 20 nt, Homo sapiens
  source 1..20: mol_type = genomic RNA
cacctgtttgagcagtggaa

SEQ ID NO: 17446 - RNA, 20 nt, Homo sapiens
  source 1..20: mol_type = genomic RNA
acctgtttgagcagtggaaa

SEQ ID NO: 17447 - RNA, 20 nt, Homo sapiens
  source 1..20: mol_type = genomic RNA
cctgtttgagcagtggaaat

SEQ ID NO: 17448 - RNA, 20 nt, Homo sapiens
  source 1..20: mol_type = genomic RNA
ctgtttgagcagtggaaata

SEQ ID NO: 17449 - RNA, 20 nt, Homo sapiens
  source 1..20: mol_type = genomic RNA
tgtttgagcagtggaaatat

SEQ ID NO: 17450 - RNA, 20 nt, Homo sapiens
  source 1..20: mol_type = genomic RNA
gtttgagcagtggaaatata

SEQ ID NO: 17451 - RNA, 20 nt, Homo sapiens
  source 1..20: mol_type = genomic RNA
tttgagcagtggaaatatat

SEQ ID NO: 17452 - RNA, 20 nt, Homo sapiens
  source 1..20: mol_type = genomic RNA
ttgagcagtggaaatatata

SEQ ID NO: 17453 - RNA, 20 nt, Homo sapiens
  source 1..20: mol_type = genomic RNA
tgagcagtggaaatatatat

SEQ ID NO: 17454 - RNA, 20 nt, Homo sapiens
  source 1..20: mol_type = genomic RNA
gagcagtggaaatatatatc

SEQ ID NO: 17455 - RNA, 20 nt, Homo sapiens
  source 1..20: mol_type = genomic RNA
agcagtggaaatatatatca

SEQ ID NO: 17456 - RNA, 20 nt, Homo sapiens
  source 1..20: mol_type = genomic RNA
gcagtggaaatatatatcac

SEQ ID NO: 17457 - RNA, 20 nt, Homo sapiens
  source 1..20: mol_type = genomic RNA
cagtggaaatatatatcaca

SEQ ID NO: 17458 - RNA, 20 nt, Homo sapiens
  source 1..20: mol_type = genomic RNA
agtggaaatatatatcacaa

SEQ ID NO: 17459 - RNA, 20 nt, Homo sapiens
  source 1..20: mol_type = genomic RNA
tggaaatatatatcacaaag

SEQ ID NO: 17460 - RNA, 20 nt, Homo sapiens
  source 1..20: mol_type = genomic RNA
ggaaatatatatcacaaagc

SEQ ID NO: 17461 - RNA, 20 nt, Homo sapiens
  source 1..20: mol_type = genomic RNA
gaaatatatatcacaaagcc

SEQ ID NO: 17462 - RNA, 20 nt, Homo sapiens
  source 1..20: mol_type = genomic RNA
aaatatatatcacaaagccc

SEQ ID NO: 17463 - RNA, 20 nt, Homo sapiens
  source 1..20: mol_type = genomic RNA
aatatatatcacaaagcccc

SEQ ID NO: 17464 - RNA, 20 nt, Homo sapiens
  source 1..20: mol_type = genomic RNA
atatatatcacaaagccccc

SEQ ID NO: 17465 - RNA, 20 nt, Homo sapiens
  source 1..20: mol_type = genomic RNA
tatatatcacaaagccccct

SEQ ID NO: 17466 - RNA, 20 nt, Homo sapiens
  source 1..20: mol_type = genomic RNA
atatatcacaaagccccctg

SEQ ID NO: 17467 - RNA, 20 nt, Homo sapiens
  source 1..20: mol_type = genomic RNA
tatatcacaaagccccctgt

SEQ ID NO: 17468 - RNA, 20 nt, Homo sapiens
  source 1..20: mol_type = genomic RNA
atatcacaaagccccctgta

SEQ ID NO: 17469 - RNA, 20 nt, Homo sapiens
  source 1..20: mol_type = genomic RNA
tatcacaaagccccctgtag

SEQ ID NO: 17470 - RNA, 20 nt, Homo sapiens
  source 1..20: mol_type = genomic RNA
atcacaaagccccctgtaga

SEQ ID NO: 17471 - RNA, 20 nt, Homo sapiens
  source 1..20: mol_type = genomic RNA
tcacaaagccccctgtagac

SEQ ID NO: 17472 - RNA, 20 nt, Homo sapiens
  source 1..20: mol_type = genomic RNA
cacaaagccccctgtagaca

SEQ ID NO: 17473 - RNA, 20 nt, Homo sapiens
  source 1..20: mol_type = genomic RNA
acaaagccccctgtagacaa

SEQ ID NO: 17474 - RNA, 20 nt, Homo sapiens
  source 1..20: mol_type = genomic RNA
caaagccccctgtagacaaa

SEQ ID NO: 17475 - RNA, 20 nt, Homo sapiens
  source 1..20: mol_type = genomic RNA
aaagccccctgtagacaaag

SEQ ID NO: 17476 - RNA, 20 nt, Homo sapiens
  source 1..20: mol_type = genomic RNA
ccccctgtagacaaagccca

SEQ ID NO: 17477 - RNA, 20 nt, Homo sapiens
  source 1..20: mol_type = genomic RNA
cccctgtagacaaagcccag

SEQ ID NO: 17478 - RNA, 20 nt, Homo sapiens
  source 1..20: mol_type = genomic RNA
ccctgtagacaaagcccaga

SEQ ID NO: 17479 - RNA, 20 nt, Homo sapiens
  source 1..20: mol_type = genomic RNA
cctgtagacaaagcccagac

SEQ ID NO: 17480 - RNA, 20 nt, Homo sapiens
  source 1..20: mol_type = genomic RNA
ctgtagacaaagcccagaca

SEQ ID NO: 17481 - RNA, 20 nt, Homo sapiens
  source 1..20: mol_type = genomic RNA
tgtagacaaagcccagacaa

SEQ ID NO: 17482 - RNA, 20 nt, Homo sapiens
  source 1..20: mol_type = genomic RNA
gtagacaaagcccagacaat

SEQ ID NO: 17483 - RNA, 20 nt, Homo sapiens
  source 1..20: mol_type = genomic RNA
tagacaaagcccagacaatt

SEQ ID NO: 17484 - RNA, 20 nt, Homo sapiens
  source 1..20: mol_type = genomic RNA
agacaaagcccagacaattt

SEQ ID NO: 17485 - RNA, 20 nt, Homo sapiens
  source 1..20: mol_type = genomic RNA
gacaaagcccagacaatttt

SEQ ID NO: 17486 - RNA, 20 nt, Homo sapiens
  source 1..20: mol_type = genomic RNA
acaaagcccagacaattttt

SEQ ID NO: 17487 - RNA, 20 nt, Homo sapiens
  source 1..20: mol_type = genomic RNA
aaagcccagacaatttttac

SEQ ID NO: 17488 - RNA, 20 nt, Homo sapiens
  source 1..20: mol_type = genomic RNA
aagcccagacaatttttaca

SEQ ID NO: 17489 - RNA, 20 nt, Homo sapiens
  source 1..20: mol_type = genomic RNA
agcccagacaatttttacat

SEQ ID NO: 17490 - RNA, 20 nt, Homo sapiens
  source 1..20: mol_type = genomic RNA
gcccagacaatttttacatc

SEQ ID NO: 17491 - RNA, 20 nt, Homo sapiens
  source 1..20: mol_type = genomic RNA
ttttacatctcctgagtgag

SEQ ID NO: 17492 - RNA, 20 nt, Homo sapiens
  source 1..20: mol_type = genomic RNA
tttacatctcctgagtgagc

SEQ ID NO: 17493 - RNA, 20 nt, Homo sapiens
  source 1..20: mol_type = genomic RNA
ttacatctcctgagtgagca

SEQ ID NO: 17494 - RNA, 20 nt, Homo sapiens
  source 1..20: mol_type = genomic RNA
tacatctcctgagtgagcat

SEQ ID NO: 17495 - RNA, 20 nt, Homo sapiens
  source 1..20: mol_type = genomic RNA
acatctcctgagtgagcatt

SEQ ID NO: 17496 - RNA, 20 nt, Homo sapiens
  source 1..20: mol_type = genomic RNA
catctcctgagtgagcattg

SEQ ID NO: 17497 - RNA, 20 nt, Homo sapiens
  source 1..20: mol_type = genomic RNA
atctcctgagtgagcattgg

SEQ ID NO: 17498 - RNA, 20 nt, Homo sapiens
  source 1..20: mol_type = genomic RNA
tctcctgagtgagcattgga

SEQ ID NO: 17499 - RNA, 20 nt, Homo sapiens
  source 1..20: mol_type = genomic RNA
ctcctgagtgagcattggag

SEQ ID NO: 17500 - RNA, 20 nt, Homo sapiens
  source 1..20: mol_type = genomic RNA
tcctgagtgagcattggaga

SEQ ID NO: 17501 - RNA, 20 nt, Homo sapiens
  source 1..20: mol_type = genomic RNA
cctgagtgagcattggagag

SEQ ID NO: 17502 - RNA, 20 nt, Homo sapiens
  source 1..20: mol_type = genomic RNA
ctgagtgagcattggagaga

SEQ ID NO: 17503 - RNA, 20 nt, Homo sapiens
  source 1..20: mol_type = genomic RNA
tgagtgagcattggagagat

SEQ ID NO: 17504 - RNA, 20 nt, Homo sapiens
  source 1..20: mol_type = genomic RNA
gagtgagcattggagagatc

SEQ ID NO: 17505 - RNA, 20 nt, Homo sapiens
  source 1..20: mol_type = genomic RNA
agtgagcattggagagatct

SEQ ID NO: 17506 - RNA, 20 nt, Homo sapiens
  source 1..20: mol_type = genomic RNA
gtgagcattggagagatctg

SEQ ID NO: 17507 - RNA, 20 nt, Homo sapiens
  source 1..20: mol_type = genomic RNA
tgagcattggagagatctgt

SEQ ID NO: 17508 - RNA, 20 nt, Homo sapiens
  source 1..20: mol_type = genomic RNA
gagcattggagagatctgtc

SEQ ID NO: 17509 - RNA, 20 nt, Homo sapiens
  source 1..20: mol_type = genomic RNA
agcattggagagatctgtca

SEQ ID NO: 17510 - RNA, 20 nt, Homo sapiens
  source 1..20: mol_type = genomic RNA
gcattggagagatctgtcac

SEQ ID NO: 17511 - RNA, 20 nt, Homo sapiens
  source 1..20: mol_type = genomic RNA
cattggagagatctgtcaca

SEQ ID NO: 17512 - RNA, 20 nt, Homo sapiens
  source 1..20: mol_type = genomic RNA
attggagagatctgtcacaa

SEQ ID NO: 17513 - RNA, 20 nt, Homo sapiens
  source 1..20: mol_type = genomic RNA
ttggagagatctgtcacaat

SEQ ID NO: 17514 - RNA, 20 nt, Homo sapiens
  source 1..20: mol_type = genomic RNA
tggagagatctgtcacaatg

SEQ ID NO: 17515 - RNA, 20 nt, Homo sapiens
  source 1..20: mol_type = genomic RNA
ggagagatctgtcacaatgc

SEQ ID NO: 17516 - RNA, 20 nt, Homo sapiens
  source 1..20: mol_type = genomic RNA
gagagatctgtcacaatgcc

SEQ ID NO: 17517 - RNA, 20 nt, Homo sapiens
  source 1..20: mol_type = genomic RNA
agagatctgtcacaatgccc

SEQ ID NO: 17518 - RNA, 20 nt, Homo sapiens
  source 1..20: mol_type = genomic RNA
gagatctgtcacaatgcccc

SEQ ID NO: 17519 - RNA, 20 nt, Homo sapiens
  source 1..20: mol_type = genomic RNA
agatctgtcacaatgcccct

SEQ ID NO: 17520 - RNA, 20 nt, Homo sapiens
  source 1..20: mol_type = genomic RNA
gatctgtcacaatgcccctg

SEQ ID NO: 17521 - RNA, 20 nt, Homo sapiens
  source 1..20: mol_type = genomic RNA
atctgtcacaatgcccctgt

SEQ ID NO: 17522 - RNA, 20 nt, Homo sapiens
  source 1..20: mol_type = genomic RNA
tctgtcacaatgcccctgta

SEQ ID NO: 17523 - RNA, 20 nt, Homo sapiens
  source 1..20: mol_type = genomic RNA
ctgtcacaatgcccctgtag

SEQ ID NO: 17524 - RNA, 20 nt, Homo sapiens
  source 1..20: mol_type = genomic RNA
tgtcacaatgcccctgtagg

SEQ ID NO: 17525 - RNA, 20 nt, Homo sapiens
  source 1..20: mol_type = genomic RNA
gtcacaatgcccctgtaggc

SEQ ID NO: 17526 - RNA, 20 nt, Homo sapiens
  source 1..20: mol_type = genomic RNA
tcacaatgcccctgtaggca

SEQ ID NO: 17527 - RNA, 20 nt, Homo sapiens
  source 1..20: mol_type = genomic RNA
cacaatgcccctgtaggcag

SEQ ID NO: 17528 - RNA, 20 nt, Homo sapiens
  source 1..20: mol_type = genomic RNA
caatgcccctgtaggcagag

SEQ ID NO: 17529 - RNA, 20 nt, Homo sapiens
  source 1..20: mol_type = genomic RNA
gcccctgtaggcagagctta

SEQ ID NO: 17530 - RNA, 20 nt, Homo sapiens
  source 1..20: mol_type = genomic RNA
cccctgtaggcagagcttag

SEQ ID NO: 17531 - RNA, 20 nt, Homo sapiens
  source 1..20: mol_type = genomic RNA
ccctgtaggcagagcttaga

SEQ ID NO: 17532 - RNA, 20 nt, Homo sapiens
  source 1..20: mol_type = genomic RNA
cctgtaggcagagcttagac

SEQ ID NO: 17533 - RNA, 20 nt, Homo sapiens
  source 1..20: mol_type = genomic RNA
ctgtaggcagagcttagaca

SEQ ID NO: 17534 - RNA, 20 nt, Homo sapiens
  source 1..20: mol_type = genomic RNA
tgtaggcagagcttagacaa

SEQ ID NO: 17535 - RNA, 20 nt, Homo sapiens
  source 1..20: mol_type = genomic RNA
gtaggcagagcttagacaag

SEQ ID NO: 17536 - RNA, 20 nt, Homo sapiens
  source 1..20: mol_type = genomic RNA
taggcagagcttagacaagt

SEQ ID NO: 17537 - RNA, 20 nt, Homo sapiens
  source 1..20: mol_type = genomic RNA
aggcagagcttagacaagtg

SEQ ID NO: 17538 - RNA, 20 nt, Homo sapiens
  source 1..20: mol_type = genomic RNA
ggcagagcttagacaagtgt

SEQ ID NO: 17539 - RNA, 20 nt, Homo sapiens
  source 1..20: mol_type = genomic RNA
gcagagcttagacaagtgtt

SEQ ID NO: 17540 - RNA, 20 nt, Homo sapiens
  source 1..20: mol_type = genomic RNA
cagagcttagacaagtgtta

SEQ ID NO: 17541 - RNA, 20 nt, Homo sapiens
  source 1..20: mol_type = genomic RNA
agagcttagacaagtgttac

SEQ ID NO: 17542 - RNA, 20 nt, Homo sapiens
  source 1..20: mol_type = genomic RNA
gagcttagacaagtgttaca

SEQ ID NO: 17543 - RNA, 20 nt, Homo sapiens
  source 1..20: mol_type = genomic RNA
agcttagacaagtgttacat

SEQ ID NO: 17544 - RNA, 20 nt, Homo sapiens
  source 1..20: mol_type = genomic RNA
gcttagacaagtgttacatc

SEQ ID NO: 17545 - RNA, 20 nt, Homo sapiens
  source 1..20: mol_type = genomic RNA
ttagacaagtgttacatcac

SEQ ID NO: 17546 - RNA, 20 nt, Homo sapiens
  source 1..20: mol_type = genomic RNA
tagacaagtgttacatcacc

SEQ ID NO: 17547 - RNA, 20 nt, Homo sapiens
  source 1..20: mol_type = genomic RNA
agacaagtgttacatcacct

SEQ ID NO: 17548 - RNA, 20 nt, Homo sapiens
  source 1..20: mol_type = genomic RNA
gacaagtgttacatcacctg

SEQ ID NO: 17549 - RNA, 20 nt, Homo sapiens
  source 1..20: mol_type = genomic RNA
acaagtgttacatcacctgg

SEQ ID NO: 17550 - RNA, 20 nt, Homo sapiens
  source 1..20: mol_type = genomic RNA
caagtgttacatcacctggg

SEQ ID NO: 17551 - RNA, 20 nt, Homo sapiens
  source 1..20: mol_type = genomic RNA
aagtgttacatcacctgggt

SEQ ID NO: 17552 - RNA, 20 nt, Homo sapiens
  source 1..20: mol_type = genomic RNA
agtgttacatcacctgggtg

SEQ ID NO: 17553 - RNA, 20 nt, Homo sapiens
  source 1..20: mol_type = genomic RNA
gtgttacatcacctgggtga

SEQ ID NO: 17554 - RNA, 20 nt, Homo sapiens
  source 1..20: mol_type = genomic RNA
tgttacatcacctgggtgat

SEQ ID NO: 17555 - RNA, 20 nt, Homo sapiens
  source 1..20: mol_type = genomic RNA
gttacatcacctgggtgatc

SEQ ID NO: 17556 - RNA, 20 nt, Homo sapiens
  source 1..20: mol_type = genomic RNA
ttacatcacctgggtgatca

SEQ ID NO: 17557 - RNA, 20 nt, Homo sapiens
  source 1..20: mol_type = genomic RNA
tacatcacctgggtgatcag

SEQ ID NO: 17558 - RNA, 20 nt, Homo sapiens
  source 1..20: mol_type = genomic RNA
acatcacctgggtgatcagt

SEQ ID NO: 17559 - RNA, 20 nt, Homo sapiens
  source 1..20: mol_type = genomic RNA
catcacctgggtgatcagtg

SEQ ID NO: 17560 - RNA, 20 nt, Homo sapiens
  source 1..20: mol_type = genomic RNA
atcacctgggtgatcagtgc

SEQ ID NO: 17561 - RNA, 20 nt, Homo sapiens
  source 1..20: mol_type = genomic RNA
tcacctgggtgatcagtgca

SEQ ID NO: 17562 - RNA, 20 nt, Homo sapiens
  source 1..20: mol_type = genomic RNA
cacctgggtgatcagtgcag

SEQ ID NO: 17563 - RNA, 20 nt, Homo sapiens
  source 1..20: mol_type = genomic RNA
acctgggtgatcagtgcaga

SEQ ID NO: 17564 - RNA, 20 nt, Homo sapiens
  source 1..20: mol_type = genomic RNA
cctgggtgatcagtgcagag

SEQ ID NO: 17565 - RNA, 20 nt, Homo sapiens
  source 1..20: mol_type = genomic RNA
ctgggtgatcagtgcagaga

SEQ ID NO: 17566 - RNA, 20 nt, Homo sapiens
  source 1..20: mol_type = genomic RNA
tgggtgatcagtgcagagat

SEQ ID NO: 17567 - RNA, 20 nt, Homo sapiens
  source 1..20: mol_type = genomic RNA
gggtgatcagtgcagagatg

SEQ ID NO: 17568 - RNA, 20 nt, Homo sapiens
  source 1..20: mol_type = genomic RNA
ggtgatcagtgcagagatgt

SEQ ID NO: 17569 - RNA, 20 nt, Homo sapiens
  source 1..20: mol_type = genomic RNA
gtgatcagtgcagagatgtg

SEQ ID NO: 17570 - RNA, 20 nt, Homo sapiens
  source 1..20: mol_type = genomic RNA
tgatcagtgcagagatgtgt

SEQ ID NO: 17571 - RNA, 20 nt, Homo sapiens
  source 1..20: mol_type = genomic RNA
gatcagtgcagagatgtgtc

SEQ ID NO: 17572 - RNA, 20 nt, Homo sapiens
  source 1..20: mol_type = genomic RNA
atcagtgcagagatgtgtca

SEQ ID NO: 17573 - RNA, 20 nt, Homo sapiens
  source 1..20: mol_type = genomic RNA
tgtcaaaacgctcctgtagt

SEQ ID NO: 17574 - RNA, 20 nt, Homo sapiens
  source 1..20: mol_type = genomic RNA
gtcaaaacgctcctgtagtc

SEQ ID NO: 17575 - RNA, 20 nt, Homo sapiens
  source 1..20: mol_type = genomic RNA
tcaaaacgctcctgtagtct

SEQ ID NO: 17576 - RNA, 20 nt, Homo sapiens
  source 1..20: mol_type = genomic RNA
caaaacgctcctgtagtctg

SEQ ID NO: 17577 - RNA, 20 nt, Homo sapiens
  source 1..20: mol_type = genomic RNA
aaaacgctcctgtagtctga

SEQ ID NO: 17578 - RNA, 20 nt, Homo sapiens
  source 1..20: mol_type = genomic RNA
aaacgctcctgtagtctgaa

SEQ ID NO: 17579 - RNA, 20 nt, Homo sapiens
  source 1..20: mol_type = genomic RNA
aacgctcctgtagtctgaac

SEQ ID NO: 17580 - RNA, 20 nt, Homo sapiens
  source 1..20: mol_type = genomic RNA
acgctcctgtagtctgaacc

SEQ ID NO: 17581 - RNA, 20 nt, Homo sapiens
  source 1..20: mol_type = genomic RNA
cgctcctgtagtctgaacct

SEQ ID NO: 17582 - RNA, 20 nt, Homo sapiens
  source 1..20: mol_type = genomic RNA
gctcctgtagtctgaaccta

SEQ ID NO: 17583 - RNA, 20 nt, Homo sapiens
  source 1..20: mol_type = genomic RNA
ctcctgtagtctgaacctag

SEQ ID NO: 17584 - RNA, 20 nt, Homo sapiens
  source 1..20: mol_type = genomic RNA
tcctgtagtctgaacctaga

SEQ ID NO: 17585 - RNA, 20 nt, Homo sapiens
  source 1..20: mol_type = genomic RNA
cctgtagtctgaacctagac

SEQ ID NO: 17586 - RNA, 20 nt, Homo sapiens
  source 1..20: mol_type = genomic RNA
ctgtagtctgaacctagaca

SEQ ID NO: 17587 - RNA, 20 nt, Homo sapiens
  source 1..20: mol_type = genomic RNA
tgtagtctgaacctagacag

SEQ ID NO: 17588 - RNA, 20 nt, Homo sapiens
  source 1..20: mol_type = genomic RNA
gtagtctgaacctagacagg

SEQ ID NO: 17589 - RNA, 20 nt, Homo sapiens
  source 1..20: mol_type = genomic RNA
tagtctgaacctagacagga

SEQ ID NO: 17590 - RNA, 20 nt, Homo sapiens
  source 1..20: mol_type = genomic RNA
agtctgaacctagacaggag

SEQ ID NO: 17591 - RNA, 20 nt, Homo sapiens
  source 1..20: mol_type = genomic RNA
gtctgaacctagacaggagt

SEQ ID NO: 17592 - RNA, 20 nt, Homo sapiens
  source 1..20: mol_type = genomic RNA
tctgaacctagacaggagtt

SEQ ID NO: 17593 - RNA, 20 nt, Homo sapiens
  source 1..20: mol_type = genomic RNA
ctgaacctagacaggagtta

SEQ ID NO: 17594 - RNA, 20 nt, Homo sapiens
  source 1..20: mol_type = genomic RNA
tgaacctagacaggagttac

SEQ ID NO: 17595 - RNA, 20 nt, Homo sapiens
  source 1..20: mol_type = genomic RNA
gaacctagacaggagttaca

SEQ ID NO: 17596 - RNA, 20 nt, Homo sapiens
  source 1..20: mol_type = genomic RNA
aacctagacaggagttacat

SEQ ID NO: 17597 - RNA, 20 nt, Homo sapiens
  source 1..20: mol_type = genomic RNA
acctagacaggagttacatc

SEQ ID NO: 17598 - RNA, 20 nt, Homo sapiens
  source 1..20: mol_type = genomic RNA
cctagacaggagttacatca

SEQ ID NO: 17599 - RNA, 20 nt, Homo sapiens
  source 1..20: mol_type = genomic RNA
ctagacaggagttacatcac

SEQ ID NO: 17600 - RNA, 20 nt, Homo sapiens
  source 1..20: mol_type = genomic RNA
tagacaggagttacatcacc

SEQ ID NO: 17601 - RNA, 20 nt, Homo sapiens
  source 1..20: mol_type = genomic RNA
agacaggagttacatcacct

SEQ ID NO: 17602 - RNA, 20 nt, Homo sapiens
  source 1..20: mol_type = genomic RNA
gacaggagttacatcacctt

SEQ ID NO: 17603 - RNA, 20 nt, Homo sapiens
  source 1..20: mol_type = genomic RNA
acaggagttacatcaccttg

SEQ ID NO: 17604 - RNA, 20 nt, Homo sapiens
  source 1..20: mol_type = genomic RNA
caggagttacatcaccttgg

SEQ ID NO: 17605 - RNA, 20 nt, Homo sapiens
  source 1..20: mol_type = genomic RNA
aggagttacatcaccttggg

SEQ ID NO: 17606 - RNA, 20 nt, Homo sapiens
  source 1..20: mol_type = genomic RNA
ggagttacatcaccttgggg

SEQ ID NO: 17607 - RNA, 20 nt, Homo sapiens
  source 1..20: mol_type = genomic RNA
gagttacatcaccttgggga

SEQ ID NO: 17608 - RNA, 20 nt, Homo sapiens
  source 1..20: mol_type = genomic RNA
agttacatcaccttggggat

SEQ ID NO: 17609 - RNA, 20 nt, Homo sapiens
  source 1..20: mol_type = genomic RNA
gttacatcaccttggggatc

SEQ ID NO: 17610 - RNA, 20 nt, Homo sapiens
  source 1..20: mol_type = genomic RNA
ttacatcaccttggggatca

SEQ ID NO: 17611 - RNA, 20 nt, Homo sapiens
  source 1..20: mol_type = genomic RNA
tacatcaccttggggatcag

SEQ ID NO: 17612 - RNA, 20 nt, Homo sapiens
  source 1..20: mol_type = genomic RNA
acatcaccttggggatcagt

SEQ ID NO: 17613 - RNA, 20 nt, Homo sapiens
  source 1..20: mol_type = genomic RNA
catcaccttggggatcagtg

SEQ ID NO: 17614 - RNA, 20 nt, Homo sapiens
  source 1..20: mol_type = genomic RNA
atcaccttggggatcagtgc

SEQ ID NO: 17615 - RNA, 20 nt, Homo sapiens
  source 1..20: mol_type = genomic RNA
tcaccttggggatcagtgca

SEQ ID NO: 17616 - RNA, 20 nt, Homo sapiens
  source 1..20: mol_type = genomic RNA
caccttggggatcagtgcag

SEQ ID NO: 17617 - RNA, 20 nt, Homo sapiens
  source 1..20: mol_type = genomic RNA
accttggggatcagtgcaga

SEQ ID NO: 17618 - RNA, 20 nt, Homo sapiens
  source 1..20: mol_type = genomic RNA
ccttggggatcagtgcagag

SEQ ID NO: 17619 - RNA, 20 nt, Homo sapiens
  source 1..20: mol_type = genomic RNA
cttggggatcagtgcagaga

SEQ ID NO: 17620 - RNA, 20 nt, Homo sapiens
  source 1..20: mol_type = genomic RNA
ttggggatcagtgcagagat

SEQ ID NO: 17621 - RNA, 20 nt, Homo sapiens
  source 1..20: mol_type = genomic RNA
tggggatcagtgcagagata

SEQ ID NO: 17622 - RNA, 20 nt, Homo sapiens
  source 1..20: mol_type = genomic RNA
gggatcagtgcagagatacg

SEQ ID NO: 17623 - RNA, 20 nt, Homo sapiens
  source 1..20: mol_type = genomic RNA
ggatcagtgcagagatacgt

SEQ ID NO: 17624 - RNA, 20 nt, Homo sapiens
  source 1..20: mol_type = genomic RNA
gatcagtgcagagatacgtg

SEQ ID NO: 17625 - RNA, 20 nt, Homo sapiens
  source 1..20: mol_type = genomic RNA
atcagtgcagagatacgtga

SEQ ID NO: 17626 - RNA, 20 nt, Homo sapiens
  source 1..20: mol_type = genomic RNA
tcagtgcagagatacgtgag

SEQ ID NO: 17627 - RNA, 20 nt, Homo sapiens
  source 1..20: mol_type = genomic RNA
cagtgcagagatacgtgaga

SEQ ID NO: 17628 - RNA, 20 nt, Homo sapiens
  source 1..20: mol_type = genomic RNA
agtgcagagatacgtgagaa

SEQ ID NO: 17629 - RNA, 20 nt, Homo sapiens
  source 1..20: mol_type = genomic RNA
gtgcagagatacgtgagaat

SEQ ID NO: 17630 - RNA, 20 nt, Homo sapiens
  source 1..20: mol_type = genomic RNA
tgcagagatacgtgagaatt

SEQ ID NO: 17631 - RNA, 20 nt, Homo sapiens
  source 1..20: mol_type = genomic RNA
gcagagatacgtgagaattc

SEQ ID NO: 17632 - RNA, 20 nt, Homo sapiens
  source 1..20: mol_type = genomic RNA
cagagatacgtgagaattcc

SEQ ID NO: 17633 - RNA, 20 nt, Homo sapiens
  source 1..20: mol_type = genomic RNA
agagatacgtgagaattccc

SEQ ID NO: 17634 - RNA, 20 nt, Homo sapiens
  source 1..20: mol_type = genomic RNA
gagatacgtgagaattccct

SEQ ID NO: 17635 - RNA, 20 nt, Homo sapiens
  source 1..20: mol_type = genomic RNA
agatacgtgagaattccctt

SEQ ID NO: 17636 - RNA, 20 nt, Homo sapiens
  source 1..20: mol_type = genomic RNA
gatacgtgagaattcccttg

SEQ ID NO: 17637 - RNA, 20 nt, Homo sapiens
  source 1..20: mol_type = genomic RNA
atacgtgagaattcccttgt

SEQ ID NO: 17638 - RNA, 20 nt, Homo sapiens
  source 1..20: mol_type = genomic RNA
tacgtgagaattcccttgta

SEQ ID NO: 17639 - RNA, 20 nt, Homo sapiens
  source 1..20: mol_type = genomic RNA
acgtgagaattcccttgtag

SEQ ID NO: 17640 - RNA, 20 nt, Homo sapiens
  source 1..20: mol_type = genomic RNA
cgtgagaattcccttgtagg

SEQ ID NO: 17641 - RNA, 20 nt, Homo sapiens
  source 1..20: mol_type = genomic RNA
gtgagaattcccttgtaggc

SEQ ID NO: 17642 - RNA, 20 nt, Homo sapiens
  source 1..20: mol_type = genomic RNA
tgagaattcccttgtaggca

SEQ ID NO: 17643 - RNA, 20 nt, Homo sapiens
  source 1..20: mol_type = genomic RNA
gagaattcccttgtaggcag

SEQ ID NO: 17644 - RNA, 20 nt, Homo sapiens
  source 1..20: mol_type = genomic RNA
agaattcccttgtaggcagg

SEQ ID NO: 17645 - RNA, 20 nt, Homo sapiens
  source 1..20: mol_type = genomic RNA
gaattcccttgtaggcaggg

SEQ ID NO: 17646 - RNA, 20 nt, Homo sapiens
  source 1..20: mol_type = genomic RNA
aattcccttgtaggcagggc

SEQ ID NO: 17647 - RNA, 20 nt, Homo sapiens
  source 1..20: mol_type = genomic RNA
attcccttgtaggcagggcc

SEQ ID NO: 17648 - RNA, 20 nt, Homo sapiens
  source 1..20: mol_type = genomic RNA
ttcccttgtaggcagggcct

SEQ ID NO: 17649 - RNA, 20 nt, Homo sapiens
  source 1..20: mol_type = genomic RNA
ccttgtaggcagggcctaga

SEQ ID NO: 17650 - RNA, 20 nt, Homo sapiens
  source 1..20: mol_type = genomic RNA
gcagggcctagacaagtgtt

SEQ ID NO: 17651 - RNA, 20 nt, Homo sapiens
  source 1..20: mol_type = genomic RNA
cagggcctagacaagtgtta

SEQ ID NO: 17652 - RNA, 20 nt, Homo sapiens
  source 1..20: mol_type = genomic RNA
agggcctagacaagtgttac

SEQ ID NO: 17653 - RNA, 20 nt, Homo sapiens
  source 1..20: mol_type = genomic RNA
gggcctagacaagtgttaca

SEQ ID NO: 17654 - RNA, 20 nt, Homo sapiens
  source 1..20: mol_type = genomic RNA
ggcctagacaagtgttacat

SEQ ID NO: 17655 - RNA, 20 nt, Homo sapiens
  source 1..20: mol_type = genomic RNA
gcctagacaagtgttacatc

SEQ ID NO: 17656 - RNA, 20 nt, Homo sapiens
  source 1..20: mol_type = genomic RNA
cctagacaagtgttacatca

SEQ ID NO: 17657 - RNA, 20 nt, Homo sapiens
  source 1..20: mol_type = genomic RNA
ctagacaagtgttacatcac

SEQ ID NO: 17658 - RNA, 20 nt, Homo sapiens
  source 1..20: mol_type = genomic RNA
gacaagtgttacatcaccta

SEQ ID NO: 17659 - RNA, 20 nt, Homo sapiens
  source 1..20: mol_type = genomic RNA
acaagtgttacatcacctag

SEQ ID NO: 17660 - RNA, 20 nt, Homo sapiens
  source 1..20: mol_type = genomic RNA
caagtgttacatcacctagg

SEQ ID NO: 17661 - RNA, 20 nt, Homo sapiens
  source 1..20: mol_type = genomic RNA
aagtgttacatcacctaggt

SEQ ID NO: 17662 - RNA, 20 nt, Homo sapiens
  source 1..20: mol_type = genomic RNA
agtgttacatcacctaggtt

SEQ ID NO: 17663 - RNA, 20 nt, Homo sapiens
  source 1..20: mol_type = genomic RNA
gtgttacatcacctaggtta

SEQ ID NO: 17664 - RNA, 20 nt, Homo sapiens
  source 1..20: mol_type = genomic RNA
tgttacatcacctaggttat

SEQ ID NO: 17665 - RNA, 20 nt, Homo sapiens
  source 1..20: mol_type = genomic RNA
gttacatcacctaggttatc

SEQ ID NO: 17666 - RNA, 20 nt, Homo sapiens
  source 1..20: mol_type = genomic RNA
ttacatcacctaggttatca

SEQ ID NO: 17667 - RNA, 20 nt, Homo sapiens
  source 1..20: mol_type = genomic RNA
tacatcacctaggttatcag

SEQ ID NO: 17668 - RNA, 20 nt, Homo sapiens
  source 1..20: mol_type = genomic RNA
acatcacctaggttatcagt

SEQ ID NO: 17669 - RNA, 20 nt, Homo sapiens
  source 1..20: mol_type = genomic RNA
catcacctaggttatcagtg

SEQ ID NO: 17670 - RNA, 20 nt, Homo sapiens
  source 1..20: mol_type = genomic RNA
atcacctaggttatcagtgc

SEQ ID NO: 17671 - RNA, 20 nt, Homo sapiens
  source 1..20: mol_type = genomic RNA
tcacctaggttatcagtgca

SEQ ID NO: 17672 - RNA, 20 nt, Homo sapiens
  source 1..20: mol_type = genomic RNA
cacctaggttatcagtgcag

SEQ ID NO: 17673 - RNA, 20 nt, Homo sapiens
  source 1..20: mol_type = genomic RNA
acctaggttatcagtgcaga

SEQ ID NO: 17674 - RNA, 20 nt, Homo sapiens
  source 1..20: mol_type = genomic RNA
cctaggttatcagtgcagag

SEQ ID NO: 17675 - RNA, 20 nt, Homo sapiens
  source 1..20: mol_type = genomic RNA
ctaggttatcagtgcagaga

SEQ ID NO: 17676 - RNA, 20 nt, Homo sapiens
  source 1..20: mol_type = genomic RNA
taggttatcagtgcagagat

SEQ ID NO: 17677 - RNA, 20 nt, Homo sapiens
  source 1..20: mol_type = genomic RNA
aggttatcagtgcagagata

SEQ ID NO: 17678 - RNA, 20 nt, Homo sapiens
  source 1..20: mol_type = genomic RNA
ggttatcagtgcagagatat

SEQ ID NO: 17679 - RNA, 20 nt, Homo sapiens
  source 1..20: mol_type = genomic RNA
gttatcagtgcagagatatg

SEQ ID NO: 17680 - RNA, 20 nt, Homo sapiens
  source 1..20: mol_type = genomic RNA
ttatcagtgcagagatatgt

SEQ ID NO: 17681 - RNA, 20 nt, Homo sapiens
  source 1..20: mol_type = genomic RNA
tatcagtgcagagatatgtg

SEQ ID NO: 17682 - RNA, 20 nt, Homo sapiens
  source 1..20: mol_type = genomic RNA
atcagtgcagagatatgtga

SEQ ID NO: 17683 - RNA, 20 nt, Homo sapiens
  source 1..20: mol_type = genomic RNA
tcagtgcagagatatgtgag

SEQ ID NO: 17684 - RNA, 20 nt, Homo sapiens
  source 1..20: mol_type = genomic RNA
cagtgcagagatatgtgaga

SEQ ID NO: 17685 - RNA, 20 nt, Homo sapiens
  source 1..20: mol_type = genomic RNA
agtgcagagatatgtgagaa

SEQ ID NO: 17686 - RNA, 20 nt, Homo sapiens
  source 1..20: mol_type = genomic RNA
gtgcagagatatgtgagaat

SEQ ID NO: 17687 - RNA, 20 nt, Homo sapiens
  source 1..20: mol_type = genomic RNA
tgcagagatatgtgagaatt

SEQ ID NO: 17688 - RNA, 20 nt, Homo sapiens
  source 1..20: mol_type = genomic RNA
gcagagatatgtgagaattc

SEQ ID NO: 17689 - RNA, 20 nt, Homo sapiens
  source 1..20: mol_type = genomic RNA
cagagatatgtgagaattcc

SEQ ID NO: 17690 - RNA, 20 nt, Homo sapiens
  source 1..20: mol_type = genomic RNA
agagatatgtgagaattccc

SEQ ID NO: 17691 - RNA, 20 nt, Homo sapiens
  source 1..20: mol_type = genomic RNA
gagatatgtgagaattcccg

SEQ ID NO: 17692 - RNA, 20 nt, Homo sapiens
  source 1..20: mol_type = genomic RNA
agatatgtgagaattcccgt

SEQ ID NO: 17693 - RNA, 20 nt, Homo sapiens
  source 1..20: mol_type = genomic RNA
gatatgtgagaattcccgtg

SEQ ID NO: 17694 - RNA, 20 nt, Homo sapiens
  source 1..20: mol_type = genomic RNA
atatgtgagaattcccgtgt

SEQ ID NO: 17695 - RNA, 20 nt, Homo sapiens
  source 1..20: mol_type = genomic RNA
tatgtgagaattcccgtgta

SEQ ID NO: 17696 - RNA, 20 nt, Homo sapiens
  source 1..20: mol_type = genomic RNA
atgtgagaattcccgtgtag

SEQ ID NO: 17697 - RNA, 20 nt, Homo sapiens
  source 1..20: mol_type = genomic RNA
tgtgagaattcccgtgtagg

SEQ ID NO: 17698 - RNA, 20 nt, Homo sapiens
  source 1..20: mol_type = genomic RNA
gtgagaattcccgtgtaggc

SEQ ID NO: 17699 - RNA, 20 nt, Homo sapiens
  source 1..20: mol_type = genomic RNA
tgagaattcccgtgtaggca

SEQ ID NO: 17700 - RNA, 20 nt, Homo sapiens
  source 1..20: mol_type = genomic RNA
gagaattcccgtgtaggcag

SEQ ID NO: 17701 - RNA, 20 nt, Homo sapiens
  source 1..20: mol_type = genomic RNA
agaattcccgtgtaggcaga

SEQ ID NO: 17702 - RNA, 20 nt, Homo sapiens
  source 1..20: mol_type = genomic RNA
gaattcccgtgtaggcagag

SEQ ID NO: 17703 - RNA, 20 nt, Homo sapiens
  source 1..20: mol_type = genomic RNA
aattcccgtgtaggcagagc

SEQ ID NO: 17704 - RNA, 20 nt, Homo sapiens
  source 1..20: mol_type = genomic RNA
attcccgtgtaggcagagcc

SEQ ID NO: 17705 - RNA, 20 nt, Homo sapiens
  source 1..20: mol_type = genomic RNA
ttcccgtgtaggcagagcct

SEQ ID NO: 17706 - RNA, 20 nt, Homo sapiens
  source 1..20: mol_type = genomic RNA
tcccgtgtaggcagagccta

SEQ ID NO: 17707 - RNA, 20 nt, Homo sapiens
  source 1..20: mol_type = genomic RNA
cccgtgtaggcagagcctag

SEQ ID NO: 17708 - RNA, 20 nt, Homo sapiens
  source 1..20: mol_type = genomic RNA
ccgtgtaggcagagcctaga

SEQ ID NO: 17709 - RNA, 20 nt, Homo sapiens
  source 1..20: mol_type = genomic RNA
cgtgtaggcagagcctagac

SEQ ID NO: 17710 - RNA, 20 nt, Homo sapiens
  source 1..20: mol_type = genomic RNA
gtgtaggcagagcctagaca

SEQ ID NO: 17711 - RNA, 20 nt, Homo sapiens
  source 1..20: mol_type = genomic RNA
tgtaggcagagcctagacaa

SEQ ID NO: 17712 - RNA, 20 nt, Homo sapiens
  source 1..20: mol_type = genomic RNA
gtaggcagagcctagacaag

SEQ ID NO: 17713 - RNA, 20 nt, Homo sapiens
  source 1..20: mol_type = genomic RNA
taggcagagcctagacaagt

SEQ ID NO: 17714 - RNA, 20 nt, Homo sapiens
  source 1..20: mol_type = genomic RNA
gcagagcctagacaagtgtt

SEQ ID NO: 17715 - RNA, 20 nt, Homo sapiens
  source 1..20: mol_type = genomic RNA
cagagcctagacaagtgtta

SEQ ID NO: 17716 - RNA, 20 nt, Homo sapiens
  source 1..20: mol_type = genomic RNA
agagcctagacaagtgttac

SEQ ID NO: 17717 - RNA, 20 nt, Homo sapiens
  source 1..20: mol_type = genomic RNA
gagcctagacaagtgttaca

SEQ ID NO: 17718 - RNA, 20 nt, Homo sapiens
  source 1..20: mol_type = genomic RNA
agcctagacaagtgttacat

SEQ ID NO: 17719 - RNA, 20 nt, Homo sapiens
  source 1..20: mol_type = genomic RNA
caagtgttacatcacctagt

SEQ ID NO: 17720 - RNA, 20 nt, Homo sapiens
  source 1..20: mol_type = genomic RNA
aagtgttacatcacctagtt

SEQ ID NO: 17721 - RNA, 20 nt, Homo sapiens
  source 1..20: mol_type = genomic RNA
acatcacctagtttatcagt

SEQ ID NO: 17722 - RNA, 20 nt, Homo sapiens
  source 1..20: mol_type = genomic RNA
ttattagtcataaagcctcc

SEQ ID NO: 17723 - RNA, 20 nt, Homo sapiens
  source 1..20: mol_type = genomic RNA
tattagtcataaagcctcct

SEQ ID NO: 17724 - RNA, 20 nt, Homo sapiens
  source 1..20: mol_type = genomic RNA
attagtcataaagcctcctg

SEQ ID NO: 17725 - RNA, 20 nt, Homo sapiens
  source 1..20: mol_type = genomic RNA
ttagtcataaagcctcctgt

SEQ ID NO: 17726 - RNA, 20 nt, Homo sapiens
  source 1..20: mol_type = genomic RNA
tagtcataaagcctcctgta

SEQ ID NO: 17727 - RNA, 20 nt, Homo sapiens
  source 1..20: mol_type = genomic RNA
cgtagacaagagttccctcc

SEQ ID NO: 17728 - RNA, 20 nt, Homo sapiens
  source 1..20: mol_type = genomic RNA
gtagacaagagttccctcct

SEQ ID NO: 17729 - RNA, 20 nt, Homo sapiens
  source 1..20: mol_type = genomic RNA
tagacaagagttccctcctc

SEQ ID NO: 17730 - RNA, 20 nt, Homo sapiens
  source 1..20: mol_type = genomic RNA
agacaagagttccctcctca

SEQ ID NO: 17731 - RNA, 20 nt, Homo sapiens
  source 1..20: mol_type = genomic RNA
gacaagagttccctcctcag

SEQ ID NO: 17732 - RNA, 20 nt, Homo sapiens
  source 1..20: mol_type = genomic RNA
acaagagttccctcctcagg

SEQ ID NO: 17733 - RNA, 20 nt, Homo sapiens
  source 1..20: mol_type = genomic RNA
caagagttccctcctcaggg

SEQ ID NO: 17734 - RNA, 20 nt, Homo sapiens
  source 1..20: mol_type = genomic RNA
aagagttccctcctcagggt

SEQ ID NO: 17735 - RNA, 20 nt, Homo sapiens
  source 1..20: mol_type = genomic RNA
agagttccctcctcagggtg

SEQ ID NO: 17736 - RNA, 20 nt, Homo sapiens
  source 1..20: mol_type = genomic RNA
gagttccctcctcagggtga

SEQ ID NO: 17737 - RNA, 20 nt, Homo sapiens
  source 1..20: mol_type = genomic RNA
agttccctcctcagggtgat

SEQ ID NO: 17738 - RNA, 20 nt, Homo sapiens
  source 1..20: mol_type = genomic RNA
gttccctcctcagggtgatc

SEQ ID NO: 17739 - RNA, 20 nt, Homo sapiens
  source 1..20: mol_type = genomic RNA
ttccctcctcagggtgatca

SEQ ID NO: 17740 - RNA, 20 nt, Homo sapiens
  source 1..20: mol_type = genomic RNA
tccctcctcagggtgatcag

SEQ ID NO: 17741 - RNA, 20 nt, Homo sapiens
  source 1..20: mol_type = genomic RNA
ccctcctcagggtgatcagt

SEQ ID NO: 17742 - RNA, 20 nt, Homo sapiens
  source 1..20: mol_type = genomic RNA
cctcctcagggtgatcagtg

SEQ ID NO: 17743 - RNA, 20 nt, Homo sapiens
  source 1..20: mol_type = genomic RNA
ctcctcagggtgatcagtgc

SEQ ID NO: 17744 - RNA, 20 nt, Homo sapiens
  source 1..20: mol_type = genomic RNA
tcctcagggtgatcagtgca

SEQ ID NO: 17745 - RNA, 20 nt, Homo sapiens
  source 1..20: mol_type = genomic RNA
cctcagggtgatcagtgcag

SEQ ID NO: 17746 - RNA, 20 nt, Homo sapiens
  source 1..20: mol_type = genomic RNA
ctcagggtgatcagtgcaga

SEQ ID NO: 17747 - RNA, 20 nt, Homo sapiens
  source 1..20: mol_type = genomic RNA
tcagggtgatcagtgcagag

SEQ ID NO: 17748 - RNA, 20 nt, Homo sapiens
  source 1..20: mol_type = genomic RNA
cagggtgatcagtgcagaga

SEQ ID NO: 17749 - RNA, 20 nt, Homo sapiens
  source 1..20: mol_type = genomic RNA
agggtgatcagtgcagagat

SEQ ID NO: 17750 - RNA, 20 nt, Homo sapiens
  source 1..20: mol_type = genomic RNA
tcagtgcagagatgtgtcac

SEQ ID NO: 17751 - RNA, 20 nt, Homo sapiens
  source 1..20: mol_type = genomic RNA
cagtgcagagatgtgtcaca

SEQ ID NO: 17752 - RNA, 20 nt, Homo sapiens
  source 1..20: mol_type = genomic RNA
agtgcagagatgtgtcacaa

SEQ ID NO: 17753 - RNA, 20 nt, Homo sapiens
  source 1..20: mol_type = genomic RNA
gtgcagagatgtgtcacaaa

SEQ ID NO: 17754 - RNA, 20 nt, Homo sapiens
  source 1..20: mol_type = genomic RNA
tgcagagatgtgtcacaaag

SEQ ID NO: 17755 - RNA, 20 nt, Homo sapiens
  source 1..20: mol_type = genomic RNA
gcagagatgtgtcacaaagc

SEQ ID NO: 17756 - RNA, 20 nt, Homo sapiens
  source 1..20: mol_type = genomic RNA
cagagatgtgtcacaaagcc

SEQ ID NO: 17757 - RNA, 20 nt, Homo sapiens
  source 1..20: mol_type = genomic RNA
agagatgtgtcacaaagccc

SEQ ID NO: 17758 - RNA, 20 nt, Homo sapiens
  source 1..20: mol_type = genomic RNA
gagatgtgtcacaaagcccc

SEQ ID NO: 17759 - RNA, 20 nt, Homo sapiens
  source 1..20: mol_type = genomic RNA
agatgtgtcacaaagcccct

SEQ ID NO: 17760 - RNA, 20 nt, Homo sapiens
  source 1..20: mol_type = genomic RNA
gatgtgtcacaaagcccctg

SEQ ID NO: 17761 - RNA, 20 nt, Homo sapiens
  source 1..20: mol_type = genomic RNA
atgtgtcacaaagcccctgt

SEQ ID NO: 17762 - RNA, 20 nt, Homo sapiens
  source 1..20: mol_type = genomic RNA
tgtgtcacaaagcccctgta

SEQ ID NO: 17763 - RNA, 20 nt, Homo sapiens
  source 1..20: mol_type = genomic RNA
gtgtcacaaagcccctgtag

SEQ ID NO: 17764 - RNA, 20 nt, Homo sapiens
  source 1..20: mol_type = genomic RNA
tgtcacaaagcccctgtagg

SEQ ID NO: 17765 - RNA, 20 nt, Homo sapiens
  source 1..20: mol_type = genomic RNA
tcacaaagcccctgtaggca

SEQ ID NO: 17766 - RNA, 20 nt, Homo sapiens
  source 1..20: mol_type = genomic RNA
cacaaagcccctgtaggcag

SEQ ID NO: 17767 - RNA, 20 nt, Homo sapiens
  source 1..20: mol_type = genomic RNA
ctgtaggcagagcctagaca

SEQ ID NO: 17768 - RNA, 20 nt, Homo sapiens
  source 1..20: mol_type = genomic RNA
gcagagcctagacaagagtt

SEQ ID NO: 17769 - RNA, 20 nt, Homo sapiens
  source 1..20: mol_type = genomic RNA
cagagcctagacaagagttt

SEQ ID NO: 17770 - RNA, 20 nt, Homo sapiens
  source 1..20: mol_type = genomic RNA
agagcctagacaagagtttc

SEQ ID NO: 17771 - RNA, 20 nt, Homo sapiens
  source 1..20: mol_type = genomic RNA
gagcctagacaagagtttca

SEQ ID NO: 17772 - RNA, 20 nt, Homo sapiens
  source 1..20: mol_type = genomic RNA
agcctagacaagagtttcat

SEQ ID NO: 17773 - RNA, 20 nt, Homo sapiens
  source 1..20: mol_type = genomic RNA
gcctagacaagagtttcatc

SEQ ID NO: 17774 - RNA, 20 nt, Homo sapiens
  source 1..20: mol_type = genomic RNA
cctagacaagagtttcatca

SEQ ID NO: 17775 - RNA, 20 nt, Homo sapiens
  source 1..20: mol_type = genomic RNA
ctagacaagagtttcatcac

SEQ ID NO: 17776 - RNA, 20 nt, Homo sapiens
  source 1..20: mol_type = genomic RNA
tagacaagagtttcatcact

SEQ ID NO: 17777 - RNA, 20 nt, Homo sapiens
  source 1..20: mol_type = genomic RNA
agacaagagtttcatcactt

SEQ ID NO: 17778 - RNA, 20 nt, Homo sapiens
  source 1..20: mol_type = genomic RNA
gacaagagtttcatcacttg

SEQ ID NO: 17779 - RNA, 20 nt, Homo sapiens
  source 1..20: mol_type = genomic RNA
acaagagtttcatcacttgg

SEQ ID NO: 17780 - RNA, 20 nt, Homo sapiens
  source 1..20: mol_type = genomic RNA
caagagtttcatcacttggt

SEQ ID NO: 17781 - RNA, 20 nt, Homo sapiens
  source 1..20: mol_type = genomic RNA
agagtttcatcacttggttg

SEQ ID NO: 17782 - RNA, 20 nt, Homo sapiens
  source 1..20: mol_type = genomic RNA
ttcatcacttggttgatcag

SEQ ID NO: 17783 - RNA, 20 nt, Homo sapiens
  source 1..20: mol_type = genomic RNA
tcatcacttggttgatcagt

SEQ ID NO: 17784 - RNA, 20 nt, Homo sapiens
  source 1..20: mol_type = genomic RNA
catcacttggttgatcagtt

SEQ ID NO: 17785 - RNA, 20 nt, Homo sapiens
  source 1..20: mol_type = genomic RNA
atcacttggttgatcagttc

SEQ ID NO: 17786 - RNA, 20 nt, Homo sapiens
  source 1..20: mol_type = genomic RNA
tcacttggttgatcagttca

SEQ ID NO: 17787 - RNA, 20 nt, Homo sapiens
  source 1..20: mol_type = genomic RNA
cacttggttgatcagttcag

SEQ ID NO: 17788 - RNA, 20 nt, Homo sapiens
  source 1..20: mol_type = genomic RNA
acttggttgatcagttcaga

SEQ ID NO: 17789 - RNA, 20 nt, Homo sapiens
  source 1..20: mol_type = genomic RNA
cttggttgatcagttcagag

SEQ ID NO: 17790 - RNA, 20 nt, Homo sapiens
  source 1..20: mol_type = genomic RNA
ttggttgatcagttcagaga

SEQ ID NO: 17791 - RNA, 20 nt, Homo sapiens
  source 1..20: mol_type = genomic RNA
tggttgatcagttcagagat

SEQ ID NO: 17792 - RNA, 20 nt, Homo sapiens
  source 1..20: mol_type = genomic RNA
ggttgatcagttcagagatg

SEQ ID NO: 17793 - RNA, 20 nt, Homo sapiens
  source 1..20: mol_type = genomic RNA
gttgatcagttcagagatgt

SEQ ID NO: 17794 - RNA, 20 nt, Homo sapiens
  source 1..20: mol_type = genomic RNA
ttgatcagttcagagatgtg

SEQ ID NO: 17795 - RNA, 20 nt, Homo sapiens
  source 1..20: mol_type = genomic RNA
tgatcagttcagagatgtgt

SEQ ID NO: 17796 - RNA, 20 nt, Homo sapiens
  source 1..20: mol_type = genomic RNA
gatcagttcagagatgtgtc

SEQ ID NO: 17797 - RNA, 20 nt, Homo sapiens
  source 1..20: mol_type = genomic RNA
atcagttcagagatgtgtca

SEQ ID NO: 17798 - RNA, 20 nt, Homo sapiens
  source 1..20: mol_type = genomic RNA
tcagttcagagatgtgtcag

SEQ ID NO: 17799 - RNA, 20 nt, Homo sapiens
  source 1..20: mol_type = genomic RNA
cagttcagagatgtgtcaga

SEQ ID NO: 17800 - RNA, 20 nt, Homo sapiens
  source 1..20: mol_type = genomic RNA
agttcagagatgtgtcagaa

SEQ ID NO: 17801 - RNA, 20 nt, Homo sapiens
  source 1..20: mol_type = genomic RNA
gttcagagatgtgtcagaat

SEQ ID NO: 17802 - RNA, 20 nt, Homo sapiens
  source 1..20: mol_type = genomic RNA
ttcagagatgtgtcagaatg

SEQ ID NO: 17803 - RNA, 20 nt, Homo sapiens
  source 1..20: mol_type = genomic RNA
tcagagatgtgtcagaatgc

SEQ ID NO: 17804 - RNA, 20 nt, Homo sapiens
  source 1..20: mol_type = genomic RNA
cagagatgtgtcagaatgcc

SEQ ID NO: 17805 - RNA, 20 nt, Homo sapiens
  source 1..20: mol_type = genomic RNA
agagatgtgtcagaatgccc

SEQ ID NO: 17806 - RNA, 20 nt, Homo sapiens
  source 1..20: mol_type = genomic RNA
gagatgtgtcagaatgccca

SEQ ID NO: 17807 - RNA, 20 nt, Homo sapiens
  source 1..20: mol_type = genomic RNA
agatgtgtcagaatgcccat

SEQ ID NO: 17808 - RNA, 20 nt, Homo sapiens
  source 1..20: mol_type = genomic RNA
gatgtgtcagaatgcccatg

SEQ ID NO: 17809 - RNA, 20 nt, Homo sapiens
  source 1..20: mol_type = genomic RNA
atgtgtcagaatgcccatgt

SEQ ID NO: 17810 - RNA, 20 nt, Homo sapiens
  source 1..20: mol_type = genomic RNA
tgtgtcagaatgcccatgta

SEQ ID NO: 17811 - RNA, 20 nt, Homo sapiens
  source 1..20: mol_type = genomic RNA
gtgtcagaatgcccatgtag

SEQ ID NO: 17812 - RNA, 20 nt, Homo sapiens
  source 1..20: mol_type = genomic RNA
tgtcagaatgcccatgtagg

SEQ ID NO: 17813 - RNA, 20 nt, Homo sapiens
  source 1..20: mol_type = genomic RNA
gtcagaatgcccatgtaggc

SEQ ID NO: 17814 - RNA, 20 nt, Homo sapiens
  source 1..20: mol_type = genomic RNA
tcagaatgcccatgtaggca

SEQ ID NO: 17815 - RNA, 20 nt, Homo sapiens
  source 1..20: mol_type = genomic RNA
cagaatgcccatgtaggcag

SEQ ID NO: 17816 - RNA, 20 nt, Homo sapiens
  source 1..20: mol_type = genomic RNA
agaatgcccatgtaggcaga

SEQ ID NO: 17817 - RNA, 20 nt, Homo sapiens
  source 1..20: mol_type = genomic RNA
gaatgcccatgtaggcagat

SEQ ID NO: 17818 - RNA, 20 nt, Homo sapiens
  source 1..20: mol_type = genomic RNA
aatgcccatgtaggcagatc

SEQ ID NO: 17819 - RNA, 20 nt, Homo sapiens
  source 1..20: mol_type = genomic RNA
atgcccatgtaggcagatct

SEQ ID NO: 17820 - RNA, 20 nt, Homo sapiens
  source 1..20: mol_type = genomic RNA
tgcccatgtaggcagatcta

SEQ ID NO: 17821 - RNA, 20 nt, Homo sapiens
  source 1..20: mol_type = genomic RNA
gcccatgtaggcagatctaa

SEQ ID NO: 17822 - RNA, 20 nt, Homo sapiens
  source 1..20: mol_type = genomic RNA
cccatgtaggcagatctaag

SEQ ID NO: 17823 - RNA, 20 nt, Homo sapiens
  source 1..20: mol_type = genomic RNA
ccatgtaggcagatctaaga

SEQ ID NO: 17824 - RNA, 20 nt, Homo sapiens
  source 1..20: mol_type = genomic RNA
catgtaggcagatctaagac

SEQ ID NO: 17825 - RNA, 20 nt, Homo sapiens
  source 1..20: mol_type = genomic RNA
atgtaggcagatctaagaca

SEQ ID NO: 17826 - RNA, 20 nt, Homo sapiens
  source 1..20: mol_type = genomic RNA
tgtaggcagatctaagacaa

SEQ ID NO: 17827 - RNA, 20 nt, Homo sapiens
  source 1..20: mol_type = genomic RNA
gtaggcagatctaagacaag

SEQ ID NO: 17828 - RNA, 20 nt, Homo sapiens
  source 1..20: mol_type = genomic RNA
taggcagatctaagacaagc

SEQ ID NO: 17829 - RNA, 20 nt, Homo sapiens
  source 1..20: mol_type = genomic RNA
aggcagatctaagacaagcg

SEQ ID NO: 17830 - RNA, 20 nt, Homo sapiens
  source 1..20: mol_type = genomic RNA
ggcagatctaagacaagcgt

SEQ ID NO: 17831 - RNA, 20 nt, Homo sapiens
  source 1..20: mol_type = genomic RNA
gcagatctaagacaagcgtc

SEQ ID NO: 17832 - RNA, 20 nt, Homo sapiens
  source 1..20: mol_type = genomic RNA
cagatctaagacaagcgtcc

SEQ ID NO: 17833 - RNA, 20 nt, Homo sapiens
  source 1..20: mol_type = genomic RNA
agatctaagacaagcgtcca

SEQ ID NO: 17834 - RNA, 20 nt, Homo sapiens
  source 1..20: mol_type = genomic RNA
gatctaagacaagcgtccat

SEQ ID NO: 17835 - RNA, 20 nt, Homo sapiens
  source 1..20: mol_type = genomic RNA
atctaagacaagcgtccatc

SEQ ID NO: 17836 - RNA, 20 nt, Homo sapiens
  source 1..20: mol_type = genomic RNA
tctaagacaagcgtccatca

SEQ ID NO: 17837 - RNA, 20 nt, Homo sapiens
  source 1..20: mol_type = genomic RNA
ctaagacaagcgtccatcac

SEQ ID NO: 17838 - RNA, 20 nt, Homo sapiens
  source 1..20: mol_type = genomic RNA
taagacaagcgtccatcacc

SEQ ID NO: 17839 - RNA, 20 nt, Homo sapiens
  source 1..20: mol_type = genomic RNA
aagacaagcgtccatcacct

SEQ ID NO: 17840 - RNA, 20 nt, Homo sapiens
  source 1..20: mol_type = genomic RNA
agacaagcgtccatcacctg

SEQ ID NO: 17841 - RNA, 20 nt, Homo sapiens
  source 1..20: mol_type = genomic RNA
gacaagcgtccatcacctgg

SEQ ID NO: 17842 - RNA, 20 nt, Homo sapiens
  source 1..20: mol_type = genomic RNA
acaagcgtccatcacctggg

SEQ ID NO: 17843 - RNA, 20 nt, Homo sapiens
  source 1..20: mol_type = genomic RNA
caagcgtccatcacctgggt

SEQ ID NO: 17844 - RNA, 20 nt, Homo sapiens
  source 1..20: mol_type = genomic RNA
aagcgtccatcacctgggtg

SEQ ID NO: 17845 - RNA, 20 nt, Homo sapiens
  source 1..20: mol_type = genomic RNA
agcgtccatcacctgggtga

SEQ ID NO: 17846 - RNA, 20 nt, Homo sapiens
  source 1..20: mol_type = genomic RNA
gcgtccatcacctgggtgat

SEQ ID NO: 17847 - RNA, 20 nt, Homo sapiens
  source 1..20: mol_type = genomic RNA
cgtccatcacctgggtgatc

SEQ ID NO: 17848 - RNA, 20 nt, Homo sapiens
  source 1..20: mol_type = genomic RNA
gtccatcacctgggtgatca

SEQ ID NO: 17849 - RNA, 20 nt, Homo sapiens
  source 1..20: mol_type = genomic RNA
tccatcacctgggtgatcag

SEQ ID NO: 17850 - RNA, 20 nt, Homo sapiens
  source 1..20: mol_type = genomic RNA
ccatcacctgggtgatcagt

SEQ ID NO: 17851 - RNA, 20 nt, Homo sapiens
  source 1..20: mol_type = genomic RNA
gggtgatcagtgcagagata

SEQ ID NO: 17852 - RNA, 20 nt, Homo sapiens
  source 1..20: mol_type = genomic RNA
ggtgatcagtgcagagatat

SEQ ID NO: 17853 - RNA, 20 nt, Homo sapiens
  source 1..20: mol_type = genomic RNA
gtgatcagtgcagagatatg

SEQ ID NO: 17854 - RNA, 20 nt, Homo sapiens
  source 1..20: mol_type = genomic RNA
tgatcagtgcagagatatgt

SEQ ID NO: 17855 - RNA, 20 nt, Homo sapiens
  source 1..20: mol_type = genomic RNA
gatcagtgcagagatatgta

SEQ ID NO: 17856 - RNA, 20 nt, Homo sapiens
  source 1..20: mol_type = genomic RNA
atcagtgcagagatatgtac

SEQ ID NO: 17857 - RNA, 20 nt, Homo sapiens
  source 1..20: mol_type = genomic RNA
tcagtgcagagatatgtacc

SEQ ID NO: 17858 - RNA, 20 nt, Homo sapiens
  source 1..20: mol_type = genomic RNA
cagtgcagagatatgtacca

SEQ ID NO: 17859 - RNA, 20 nt, Homo sapiens
  source 1..20: mol_type = genomic RNA
agtgcagagatatgtaccag

SEQ ID NO: 17860 - RNA, 20 nt, Homo sapiens
  source 1..20: mol_type = genomic RNA
gtgcagagatatgtaccagt

SEQ ID NO: 17861 - RNA, 20 nt, Homo sapiens
  source 1..20: mol_type = genomic RNA
tgcagagatatgtaccagtg

SEQ ID NO: 17862 - RNA, 20 nt, Homo sapiens
  source 1..20: mol_type = genomic RNA
gcagagatatgtaccagtgt

SEQ ID NO: 17863 - RNA, 20 nt, Homo sapiens
  source 1..20: mol_type = genomic RNA
cagagatatgtaccagtgtc

SEQ ID NO: 17864 - RNA, 20 nt, Homo sapiens
  source 1..20: mol_type = genomic RNA
agagatatgtaccagtgtcc

SEQ ID NO: 17865 - RNA, 20 nt, Homo sapiens
  source 1..20: mol_type = genomic RNA
gagatatgtaccagtgtccc

SEQ ID NO: 17866 - RNA, 20 nt, Homo sapiens
  source 1..20: mol_type = genomic RNA
agatatgtaccagtgtcccc

SEQ ID NO: 17867 - RNA, 20 nt, Homo sapiens
  source 1..20: mol_type = genomic RNA
gatatgtaccagtgtcccct

SEQ ID NO: 17868 - RNA, 20 nt, Homo sapiens
  source 1..20: mol_type = genomic RNA
atatgtaccagtgtcccctg

SEQ ID NO: 17869 - RNA, 20 nt, Homo sapiens
  source 1..20: mol_type = genomic RNA
tatgtaccagtgtcccctgt

SEQ ID NO: 17870 - RNA, 20 nt, Homo sapiens
  source 1..20: mol_type = genomic RNA
atgtaccagtgtcccctgta

SEQ ID NO: 17871 - RNA, 20 nt, Homo sapiens
  source 1..20: mol_type = genomic RNA
tgtaccagtgtcccctgtag

SEQ ID NO: 17872 - RNA, 20 nt, Homo sapiens
  source 1..20: mol_type = genomic RNA
gtaccagtgtcccctgtagg

SEQ ID NO: 17873 - RNA, 20 nt, Homo sapiens
  source 1..20: mol_type = genomic RNA
taccagtgtcccctgtaggc

SEQ ID NO: 17874 - RNA, 20 nt, Homo sapiens
  source 1..20: mol_type = genomic RNA
accagtgtcccctgtaggca

SEQ ID NO: 17875 - RNA, 20 nt, Homo sapiens
  source 1..20: mol_type = genomic RNA
ccagtgtcccctgtaggcag

SEQ ID NO: 17876 - RNA, 20 nt, Homo sapiens
  source 1..20: mol_type = genomic RNA
cagtgtcccctgtaggcagt

SEQ ID NO: 17877 - RNA, 20 nt, Homo sapiens
  source 1..20: mol_type = genomic RNA
agtgtcccctgtaggcagtg

SEQ ID NO: 17878 - RNA, 20 nt, Homo sapiens
  source 1..20: mol_type = genomic RNA
gtgtcccctgtaggcagtgc

SEQ ID NO: 17879 - RNA, 20 nt, Homo sapiens
  source 1..20: mol_type = genomic RNA
tcccctgtaggcagtgccta

SEQ ID NO: 17880 - RNA, 20 nt, Homo sapiens
  source 1..20: mol_type = genomic RNA
ccctgtaggcagtgcctaga

SEQ ID NO: 17881 - RNA, 20 nt, Homo sapiens
  source 1..20: mol_type = genomic RNA
ctgtaggcagtgcctagaca

SEQ ID NO: 17882 - RNA, 20 nt, Homo sapiens
  source 1..20: mol_type = genomic RNA
tgtaggcagtgcctagacaa

SEQ ID NO: 17883 - RNA, 20 nt, Homo sapiens
  source 1..20: mol_type = genomic RNA
gtaggcagtgcctagacaag

SEQ ID NO: 17884 - RNA, 20 nt, Homo sapiens
  source 1..20: mol_type = genomic RNA
taggcagtgcctagacaaga

SEQ ID NO: 17885 - RNA, 20 nt, Homo sapiens
  source 1..20: mol_type = genomic RNA
gcagtgcctagacaagagtt

SEQ ID NO: 17886 - RNA, 20 nt, Homo sapiens
  source 1..20: mol_type = genomic RNA
cagtgcctagacaagagttg

SEQ ID NO: 17887 - RNA, 20 nt, Homo sapiens
  source 1..20: mol_type = genomic RNA
agtgcctagacaagagttga

SEQ ID NO: 17888 - RNA, 20 nt, Homo sapiens
  source 1..20: mol_type = genomic RNA
gtgcctagacaagagttgaa

SEQ ID NO: 17889 - RNA, 20 nt, Homo sapiens
  source 1..20: mol_type = genomic RNA
tgcctagacaagagttgaat

SEQ ID NO: 17890 - RNA, 20 nt, Homo sapiens
  source 1..20: mol_type = genomic RNA
gcctagacaagagttgaatc

SEQ ID NO: 17891 - RNA, 20 nt, Homo sapiens
  source 1..20: mol_type = genomic RNA
cctagacaagagttgaatca

SEQ ID NO: 17892 - RNA, 20 nt, Homo sapiens
  source 1..20: mol_type = genomic RNA
ctagacaagagttgaatcac

SEQ ID NO: 17893 - RNA, 20 nt, Homo sapiens
  source 1..20: mol_type = genomic RNA
tagacaagagttgaatcacc

SEQ ID NO: 17894 - RNA, 20 nt, Homo sapiens
  source 1..20: mol_type = genomic RNA
agacaagagttgaatcacct

SEQ ID NO: 17895 - RNA, 20 nt, Homo sapiens
  source 1..20: mol_type = genomic RNA
gacaagagttgaatcacctc

SEQ ID NO: 17896 - RNA, 20 nt, Homo sapiens
  source 1..20: mol_type = genomic RNA
acaagagttgaatcacctca

SEQ ID NO: 17897 - RNA, 20 nt, Homo sapiens
  source 1..20: mol_type = genomic RNA
caagagttgaatcacctcag

SEQ ID NO: 17898 - RNA, 20 nt, Homo sapiens
  source 1..20: mol_type = genomic RNA
aagagttgaatcacctcaga

SEQ ID NO: 17899 - RNA, 20 nt, Homo sapiens
  source 1..20: mol_type = genomic RNA
agagttgaatcacctcagag

SEQ ID NO: 17900 - RNA, 20 nt, Homo sapiens
  source 1..20: mol_type = genomic RNA
gagttgaatcacctcagaga

SEQ ID NO: 17901 - RNA, 20 nt, Homo sapiens
  source 1..20: mol_type = genomic RNA
agttgaatcacctcagagat

SEQ ID NO: 17902 - RNA, 20 nt, Homo sapiens
  source 1..20: mol_type = genomic RNA
gttgaatcacctcagagatc

SEQ ID NO: 17903 - RNA, 20 nt, Homo sapiens
  source 1..20: mol_type = genomic RNA
ttgaatcacctcagagatca

SEQ ID NO: 17904 - RNA, 20 nt, Homo sapiens
  source 1..20: mol_type = genomic RNA
tgaatcacctcagagatcag

SEQ ID NO: 17905 - RNA, 20 nt, Homo sapiens
  source 1..20: mol_type = genomic RNA
gaatcacctcagagatcagt

SEQ ID NO: 17906 - RNA, 20 nt, Homo sapiens
  source 1..20: mol_type = genomic RNA
aatcacctcagagatcagtg

SEQ ID NO: 17907 - RNA, 20 nt, Homo sapiens
  source 1..20: mol_type = genomic RNA
atcacctcagagatcagtgc

SEQ ID NO: 17908 - RNA, 20 nt, Homo sapiens
  source 1..20: mol_type = genomic RNA
tcacctcagagatcagtgca

SEQ ID NO: 17909 - RNA, 20 nt, Homo sapiens
  source 1..20: mol_type = genomic RNA
cacctcagagatcagtgcat

SEQ ID NO: 17910 - RNA, 20 nt, Homo sapiens
  source 1..20: mol_type = genomic RNA
acctcagagatcagtgcata

SEQ ID NO: 17911 - RNA, 20 nt, Homo sapiens
  source 1..20: mol_type = genomic RNA
cctcagagatcagtgcatag

SEQ ID NO: 17912 - RNA, 20 nt, Homo sapiens
  source 1..20: mol_type = genomic RNA
ctcagagatcagtgcataga

SEQ ID NO: 17913 - RNA, 20 nt, Homo sapiens
  source 1..20: mol_type = genomic RNA
tcagagatcagtgcatagat

SEQ ID NO: 17914 - RNA, 20 nt, Homo sapiens
  source 1..20: mol_type = genomic RNA
cagagatcagtgcatagata

SEQ ID NO: 17915 - RNA, 20 nt, Homo sapiens
  source 1..20: mol_type = genomic RNA
agagatcagtgcatagatat

SEQ ID NO: 17916 - RNA, 20 nt, Homo sapiens
  source 1..20: mol_type = genomic RNA
gagatcagtgcatagatatg

SEQ ID NO: 17917 - RNA, 20 nt, Homo sapiens
  source 1..20: mol_type = genomic RNA
agatcagtgcatagatatgt

SEQ ID NO: 17918 - RNA, 20 nt, Homo sapiens
  source 1..20: mol_type = genomic RNA
gatcagtgcatagatatgtc

SEQ ID NO: 17919 - RNA, 20 nt, Homo sapiens
  source 1..20: mol_type = genomic RNA
atcagtgcatagatatgtca

SEQ ID NO: 17920 - RNA, 20 nt, Homo sapiens
  source 1..20: mol_type = genomic RNA
tcagtgcatagatatgtcac

SEQ ID NO: 17921 - RNA, 20 nt, Homo sapiens
  source 1..20: mol_type = genomic RNA
cagtgcatagatatgtcaca

SEQ ID NO: 17922 - RNA, 20 nt, Homo sapiens
  source 1..20: mol_type = genomic RNA
agtgcatagatatgtcacaa

SEQ ID NO: 17923 - RNA, 20 nt, Homo sapiens
  source 1..20: mol_type = genomic RNA
gtgcatagatatgtcacaaa

SEQ ID NO: 17924 - RNA, 20 nt, Homo sapiens
  source 1..20: mol_type = genomic RNA
tgcatagatatgtcacaaag

SEQ ID NO: 17925 - RNA, 20 nt, Homo sapiens
  source 1..20: mol_type = genomic RNA
gcatagatatgtcacaaagc

SEQ ID NO: 17926 - RNA, 20 nt, Homo sapiens
  source 1..20: mol_type = genomic RNA
catagatatgtcacaaagcc

SEQ ID NO: 17927 - RNA, 20 nt, Homo sapiens
  source 1..20: mol_type = genomic RNA
atagatatgtcacaaagcct

SEQ ID NO: 17928 - RNA, 20 nt, Homo sapiens
  source 1..20: mol_type = genomic RNA
tagatatgtcacaaagcctt

SEQ ID NO: 17929 - RNA, 20 nt, Homo sapiens
  source 1..20: mol_type = genomic RNA
agatatgtcacaaagccttc

SEQ ID NO: 17930 - RNA, 20 nt, Homo sapiens
  source 1..20: mol_type = genomic RNA
gatatgtcacaaagccttct

SEQ ID NO: 17931 - RNA, 20 nt, Homo sapiens
  source 1..20: mol_type = genomic RNA
atatgtcacaaagccttctg

SEQ ID NO: 17932 - RNA, 20 nt, Homo sapiens
  source 1..20: mol_type = genomic RNA
tatgtcacaaagccttctgt

SEQ ID NO: 17933 - RNA, 20 nt, Homo sapiens
  source 1..20: mol_type = genomic RNA
atgtcacaaagccttctgta

SEQ ID NO: 17934 - RNA, 20 nt, Homo sapiens
  source 1..20: mol_type = genomic RNA
tgtcacaaagccttctgtag

SEQ ID NO: 17935 - RNA, 20 nt, Homo sapiens
  source 1..20: mol_type = genomic RNA
gtcacaaagccttctgtagg

SEQ ID NO: 17936 - RNA, 20 nt, Homo sapiens
  source 1..20: mol_type = genomic RNA
tcacaaagccttctgtaggc

SEQ ID NO: 17937 - RNA, 20 nt, Homo sapiens
  source 1..20: mol_type = genomic RNA
cacaaagccttctgtaggca

SEQ ID NO: 17938 - RNA, 20 nt, Homo sapiens
  source 1..20: mol_type = genomic RNA
acaaagccttctgtaggcaa

SEQ ID NO: 17939 - RNA, 20 nt, Homo sapiens
  source 1..20: mol_type = genomic RNA
caaagccttctgtaggcaaa

SEQ ID NO: 17940 - RNA, 20 nt, Homo sapiens
  source 1..20: mol_type = genomic RNA
aaagccttctgtaggcaaag

SEQ ID NO: 17941 - RNA, 20 nt, Homo sapiens
  source 1..20: mol_type = genomic RNA
aagccttctgtaggcaaagc

SEQ ID NO: 17942 - RNA, 20 nt, Homo sapiens
  source 1..20: mol_type = genomic RNA
agccttctgtaggcaaagcc

SEQ ID NO: 17943 - RNA, 20 nt, Homo sapiens
  source 1..20: mol_type = genomic RNA
gccttctgtaggcaaagccc

SEQ ID NO: 17944 - RNA, 20 nt, Homo sapiens
  source 1..20: mol_type = genomic RNA
ccttctgtaggcaaagccca

SEQ ID NO: 17945 - RNA, 20 nt, Homo sapiens
  source 1..20: mol_type = genomic RNA
cttctgtaggcaaagcccat

SEQ ID NO: 17946 - RNA, 20 nt, Homo sapiens
  source 1..20: mol_type = genomic RNA
ttctgtaggcaaagcccata

SEQ ID NO: 17947 - RNA, 20 nt, Homo sapiens
  source 1..20: mol_type = genomic RNA
tctgtaggcaaagcccatac

SEQ ID NO: 17948 - RNA, 20 nt, Homo sapiens
  source 1..20: mol_type = genomic RNA
ctgtaggcaaagcccataca

SEQ ID NO: 17949 - RNA, 20 nt, Homo sapiens
  source 1..20: mol_type = genomic RNA
tgtaggcaaagcccatacaa

SEQ ID NO: 17950 - RNA, 20 nt, Homo sapiens
  source 1..20: mol_type = genomic RNA
gtaggcaaagcccatacaag

SEQ ID NO: 17951 - RNA, 20 nt, Homo sapiens
  source 1..20: mol_type = genomic RNA
taggcaaagcccatacaagg

SEQ ID NO: 17952 - RNA, 20 nt, Homo sapiens
  source 1..20: mol_type = genomic RNA
aggcaaagcccatacaaggt

SEQ ID NO: 17953 - RNA, 20 nt, Homo sapiens
  source 1..20: mol_type = genomic RNA
ggcaaagcccatacaaggtt

SEQ ID NO: 17954 - RNA, 20 nt, Homo sapiens
  source 1..20: mol_type = genomic RNA
gcaaagcccatacaaggttt

SEQ ID NO: 17955 - RNA, 20 nt, Homo sapiens
  source 1..20: mol_type = genomic RNA
caaagcccatacaaggttta

SEQ ID NO: 17956 - RNA, 20 nt, Homo sapiens
  source 1..20: mol_type = genomic RNA
aaagcccatacaaggtttag

SEQ ID NO: 17957 - RNA, 20 nt, Homo sapiens
  source 1..20: mol_type = genomic RNA
aagcccatacaaggtttaga

SEQ ID NO: 17958 - RNA, 20 nt, Homo sapiens
  source 1..20: mol_type = genomic RNA
agcccatacaaggtttagat

SEQ ID NO: 17959 - RNA, 20 nt, Homo sapiens
  source 1..20: mol_type = genomic RNA
gcccatacaaggtttagatc

SEQ ID NO: 17960 - RNA, 20 nt, Homo sapiens
  source 1..20: mol_type = genomic RNA
cccatacaaggtttagatca

SEQ ID NO: 17961 - RNA, 20 nt, Homo sapiens
  source 1..20: mol_type = genomic RNA
ccatacaaggtttagatcac

SEQ ID NO: 17962 - RNA, 20 nt, Homo sapiens
  source 1..20: mol_type = genomic RNA
catacaaggtttagatcacc

SEQ ID NO: 17963 - RNA, 20 nt, Homo sapiens
  source 1..20: mol_type = genomic RNA
atacaaggtttagatcacct

SEQ ID NO: 17964 - RNA, 20 nt, Homo sapiens
  source 1..20: mol_type = genomic RNA
tacaaggtttagatcaccta

SEQ ID NO: 17965 - RNA, 20 nt, Homo sapiens
  source 1..20: mol_type = genomic RNA
acaaggtttagatcacctag

SEQ ID NO: 17966 - RNA, 20 nt, Homo sapiens
  source 1..20: mol_type = genomic RNA
caaggtttagatcacctagg

SEQ ID NO: 17967 - RNA, 20 nt, Homo sapiens
  source 1..20: mol_type = genomic RNA
aaggtttagatcacctaggt

SEQ ID NO: 17968 - RNA, 20 nt, Homo sapiens
  source 1..20: mol_type = genomic RNA
aggtttagatcacctaggtg

SEQ ID NO: 17969 - RNA, 20 nt, Homo sapiens
  source 1..20: mol_type = genomic RNA
ggtttagatcacctaggtga

SEQ ID NO: 17970 - RNA, 20 nt, Homo sapiens
  source 1..20: mol_type = genomic RNA
gtttagatcacctaggtgat

SEQ ID NO: 17971 - RNA, 20 nt, Homo sapiens
  source 1..20: mol_type = genomic RNA
tttagatcacctaggtgatc

SEQ ID NO: 17972 - RNA, 20 nt, Homo sapiens
  source 1..20: mol_type = genomic RNA
ttagatcacctaggtgatca

SEQ ID NO: 17973 - RNA, 20 nt, Homo sapiens
  source 1..20: mol_type = genomic RNA
tagatcacctaggtgatcag

SEQ ID NO: 17974 - RNA, 20 nt, Homo sapiens
  source 1..20: mol_type = genomic RNA
agatcacctaggtgatcagt

SEQ ID NO: 17975 - RNA, 20 nt, Homo sapiens
  source 1..20: mol_type = genomic RNA
gatcacctaggtgatcagtg

SEQ ID NO: 17976 - RNA, 20 nt, Homo sapiens
  source 1..20: mol_type = genomic RNA
atcacctaggtgatcagtgc

SEQ ID NO: 17977 - RNA, 20 nt, Homo sapiens
  source 1..20: mol_type = genomic RNA
tcacctaggtgatcagtgca

SEQ ID NO: 17978 - RNA, 20 nt, Homo sapiens
  source 1..20: mol_type = genomic RNA
cacctaggtgatcagtgcag

SEQ ID NO: 17979 - RNA, 20 nt, Homo sapiens
  source 1..20: mol_type = genomic RNA
acctaggtgatcagtgcagt

SEQ ID NO: 17980 - RNA, 20 nt, Homo sapiens
  source 1..20: mol_type = genomic RNA
cctaggtgatcagtgcagtg

SEQ ID NO: 17981 - RNA, 20 nt, Homo sapiens
  source 1..20: mol_type = genomic RNA
ctaggtgatcagtgcagtga

SEQ ID NO: 17982 - RNA, 20 nt, Homo sapiens
  source 1..20: mol_type = genomic RNA
taggtgatcagtgcagtgat

SEQ ID NO: 17983 - RNA, 20 nt, Homo sapiens
  source 1..20: mol_type = genomic RNA
aggtgatcagtgcagtgata

SEQ ID NO: 17984 - RNA, 20 nt, Homo sapiens
  source 1..20: mol_type = genomic RNA
ggtgatcagtgcagtgatat

SEQ ID NO: 17985 - RNA, 20 nt, Homo sapiens
  source 1..20: mol_type = genomic RNA
gtgatcagtgcagtgatatg

SEQ ID NO: 17986 - RNA, 20 nt, Homo sapiens
  source 1..20: mol_type = genomic RNA
tgatcagtgcagtgatatgt

SEQ ID NO: 17987 - RNA, 20 nt, Homo sapiens
  source 1..20: mol_type = genomic RNA
gatcagtgcagtgatatgtc

SEQ ID NO: 17988 - RNA, 20 nt, Homo sapiens
  source 1..20: mol_type = genomic RNA
atcagtgcagtgatatgtca

SEQ ID NO: 17989 - RNA, 20 nt, Homo sapiens
  source 1..20: mol_type = genomic RNA
tcagtgcagtgatatgtcac

SEQ ID NO: 17990 - RNA, 20 nt, Homo sapiens
  source 1..20: mol_type = genomic RNA
cagtgcagtgatatgtcaca

SEQ ID NO: 17991 - RNA, 20 nt, Homo sapiens
  source 1..20: mol_type = genomic RNA
agtgcagtgatatgtcacaa

SEQ ID NO: 17992 - RNA, 20 nt, Homo sapiens
  source 1..20: mol_type = genomic RNA
gtgcagtgatatgtcacaaa

SEQ ID NO: 17993 - RNA, 20 nt, Homo sapiens
  source 1..20: mol_type = genomic RNA
tgcagtgatatgtcacaaaa

SEQ ID NO: 17994 - RNA, 20 nt, Homo sapiens
  source 1..20: mol_type = genomic RNA
gcagtgatatgtcacaaaaa

SEQ ID NO: 17995 - RNA, 20 nt, Homo sapiens
  source 1..20: mol_type = genomic RNA
cagtgatatgtcacaaaaat

SEQ ID NO: 17996 - RNA, 20 nt, Homo sapiens
  source 1..20: mol_type = genomic RNA
agtgatatgtcacaaaaatc

SEQ ID NO: 17997 - RNA, 20 nt, Homo sapiens
  source 1..20: mol_type = genomic RNA
gtgatatgtcacaaaaatcc

SEQ ID NO: 17998 - RNA, 20 nt, Homo sapiens
  source 1..20: mol_type = genomic RNA
tgatatgtcacaaaaatccc

SEQ ID NO: 17999 - RNA, 20 nt, Homo sapiens
  source 1..20: mol_type = genomic RNA
gatatgtcacaaaaatccct

SEQ ID NO: 18000 - RNA, 20 nt, Homo sapiens
  source 1..20: mol_type = genomic RNA
atatgtcacaaaaatccctg

SEQ ID NO: 18001 - RNA, 20 nt, Homo sapiens
  source 1..20: mol_type = genomic RNA
tatgtcacaaaaatccctgt

SEQ ID NO: 18002 - RNA, 20 nt, Homo sapiens
  source 1..20: mol_type = genomic RNA
atgtcacaaaaatccctgta

SEQ ID NO: 18003 - RNA, 20 nt, Homo sapiens
  source 1..20: mol_type = genomic RNA
tgtcacaaaaatccctgtag

SEQ ID NO: 18004 - RNA, 20 nt, Homo sapiens
  source 1..20: mol_type = genomic RNA
gtcacaaaaatccctgtaga

SEQ ID NO: 18005 - RNA, 20 nt, Homo sapiens
  source 1..20: mol_type = genomic RNA
tcacaaaaatccctgtagac

SEQ ID NO: 18006 - RNA, 20 nt, Homo sapiens
  source 1..20: mol_type = genomic RNA
cacaaaaatccctgtagaca

SEQ ID NO: 18007 - RNA, 20 nt, Homo sapiens
  source 1..20: mol_type = genomic RNA
acaaaaatccctgtagacag

SEQ ID NO: 18008 - RNA, 20 nt, Homo sapiens
  source 1..20: mol_type = genomic RNA
caaaaatccctgtagacaga

SEQ ID NO: 18009 - RNA, 20 nt, Homo sapiens
  source 1..20: mol_type = genomic RNA
aaaaatccctgtagacagag

SEQ ID NO: 18010 - RNA, 20 nt, Homo sapiens
  source 1..20: mol_type = genomic RNA
aaaatccctgtagacagagc

SEQ ID NO: 18011 - RNA, 20 nt, Homo sapiens
  source 1..20: mol_type = genomic RNA
aaatccctgtagacagagcc

SEQ ID NO: 18012 - RNA, 20 nt, Homo sapiens
  source 1..20: mol_type = genomic RNA
aatccctgtagacagagcct

SEQ ID NO: 18013 - RNA, 20 nt, Homo sapiens
  source 1..20: mol_type = genomic RNA
atccctgtagacagagccta

SEQ ID NO: 18014 - RNA, 20 nt, Homo sapiens
  source 1..20: mol_type = genomic RNA
tccctgtagacagagcctag

SEQ ID NO: 18015 - RNA, 20 nt, Homo sapiens
  source 1..20: mol_type = genomic RNA
ccctgtagacagagcctaga

SEQ ID NO: 18016 - RNA, 20 nt, Homo sapiens
  source 1..20: mol_type = genomic RNA
cctgtagacagagcctagac

SEQ ID NO: 18017 - RNA, 20 nt, Homo sapiens
  source 1..20: mol_type = genomic RNA
ctgtagacagagcctagaca

SEQ ID NO: 18018 - RNA, 20 nt, Homo sapiens
  source 1..20: mol_type = genomic RNA
gtagacagagcctagacaag

SEQ ID NO: 18019 - RNA, 20 nt, Homo sapiens
  source 1..20: mol_type = genomic RNA
tagacagagcctagacaaga

SEQ ID NO: 18020 - RNA, 20 nt, Homo sapiens
  source 1..20: mol_type = genomic RNA
gacagagcctagacaagagt

SEQ ID NO: 18021 - RNA, 20 nt, Homo sapiens
  source 1..20: mol_type = genomic RNA
acagagcctagacaagagtt

SEQ ID NO: 18022 - RNA, 20 nt, Homo sapiens
  source 1..20: mol_type = genomic RNA
cagagcctagacaagagtta

SEQ ID NO: 18023 - RNA, 20 nt, Homo sapiens
  source 1..20: mol_type = genomic RNA
agagcctagacaagagttac

SEQ ID NO: 18024 - RNA, 20 nt, Homo sapiens
  source 1..20: mol_type = genomic RNA
gagcctagacaagagttact

SEQ ID NO: 18025 - RNA, 20 nt, Homo sapiens
  source 1..20: mol_type = genomic RNA
agcctagacaagagttactt

SEQ ID NO: 18026 - RNA, 20 nt, Homo sapiens
  source 1..20: mol_type = genomic RNA
gcctagacaagagttacttc

SEQ ID NO: 18027 - RNA, 20 nt, Homo sapiens
  source 1..20: mol_type = genomic RNA
cctagacaagagttacttca

SEQ ID NO: 18028 - RNA, 20 nt, Homo sapiens
  source 1..20: mol_type = genomic RNA
ctagacaagagttacttcac

SEQ ID NO: 18029 - RNA, 20 nt, Homo sapiens
  source 1..20: mol_type = genomic RNA
tagacaagagttacttcacc

SEQ ID NO: 18030 - RNA, 20 nt, Homo sapiens
  source 1..20: mol_type = genomic RNA
agacaagagttacttcacct

SEQ ID NO: 18031 - RNA, 20 nt, Homo sapiens
  source 1..20: mol_type = genomic RNA
gacaagagttacttcacctg

SEQ ID NO: 18032 - RNA, 20 nt, Homo sapiens
  source 1..20: mol_type = genomic RNA
acaagagttacttcacctgg

SEQ ID NO: 18033 - RNA, 20 nt, Homo sapiens
  source 1..20: mol_type = genomic RNA
caagagttacttcacctggg

SEQ ID NO: 18034 - RNA, 20 nt, Homo sapiens
  source 1..20: mol_type = genomic RNA
aagagttacttcacctgggt

SEQ ID NO: 18035 - RNA, 20 nt, Homo sapiens
  source 1..20: mol_type = genomic RNA
agagttacttcacctgggtg

SEQ ID NO: 18036 - RNA, 20 nt, Homo sapiens
  source 1..20: mol_type = genomic RNA
gagttacttcacctgggtga

SEQ ID NO: 18037 - RNA, 20 nt, Homo sapiens
  source 1..20: mol_type = genomic RNA
agttacttcacctgggtgat

SEQ ID NO: 18038 - RNA, 20 nt, Homo sapiens
  source 1..20: mol_type = genomic RNA
gttacttcacctgggtgatc

SEQ ID NO: 18039 - RNA, 20 nt, Homo sapiens
  source 1..20: mol_type = genomic RNA
ttacttcacctgggtgatca

SEQ ID NO: 18040 - RNA, 20 nt, Homo sapiens
  source 1..20: mol_type = genomic RNA
tacttcacctgggtgatcag

SEQ ID NO: 18041 - RNA, 20 nt, Homo sapiens
  source 1..20: mol_type = genomic RNA
acttcacctgggtgatcagt

SEQ ID NO: 18042 - RNA, 20 nt, Homo sapiens
  source 1..20: mol_type = genomic RNA
cttcacctgggtgatcagtg

SEQ ID NO: 18043 - RNA, 20 nt, Homo sapiens
  source 1..20: mol_type = genomic RNA
ttcacctgggtgatcagtgc

SEQ ID NO: 18044 - RNA, 20 nt, Homo sapiens
  source 1..20: mol_type = genomic RNA
cctgggtgatcagtgcagat

SEQ ID NO: 18045 - RNA, 20 nt, Homo sapiens
  source 1..20: mol_type = genomic RNA
ctgggtgatcagtgcagata

SEQ ID NO: 18046 - RNA, 20 nt, Homo sapiens
  source 1..20: mol_type = genomic RNA
tgggtgatcagtgcagatat

SEQ ID NO: 18047 - RNA, 20 nt, Homo sapiens
  source 1..20: mol_type = genomic RNA
gggtgatcagtgcagatatt

SEQ ID NO: 18048 - RNA, 20 nt, Homo sapiens
  source 1..20: mol_type = genomic RNA
ggtgatcagtgcagatattt

SEQ ID NO: 18049 - RNA, 20 nt, Homo sapiens
  source 1..20: mol_type = genomic RNA
gtgatcagtgcagatatttg

SEQ ID NO: 18050 - RNA, 20 nt, Homo sapiens
  source 1..20: mol_type = genomic RNA
tgatcagtgcagatatttga

SEQ ID NO: 18051 - RNA, 20 nt, Homo sapiens
  source 1..20: mol_type = genomic RNA
gatcagtgcagatatttgac

SEQ ID NO: 18052 - RNA, 20 nt, Homo sapiens
  source 1..20: mol_type = genomic RNA
atcagtgcagatatttgaca

SEQ ID NO: 18053 - RNA, 20 nt, Homo sapiens
  source 1..20: mol_type = genomic RNA
tcagtgcagatatttgacac

SEQ ID NO: 18054 - RNA, 20 nt, Homo sapiens
  source 1..20: mol_type = genomic RNA
cagtgcagatatttgacaca

SEQ ID NO: 18055 - RNA, 20 nt, Homo sapiens
  source 1..20: mol_type = genomic RNA
agtgcagatatttgacacaa

SEQ ID NO: 18056 - RNA, 20 nt, Homo sapiens
  source 1..20: mol_type = genomic RNA
gtgcagatatttgacacaat

SEQ ID NO: 18057 - RNA, 20 nt, Homo sapiens
  source 1..20: mol_type = genomic RNA
tgcagatatttgacacaatg

SEQ ID NO: 18058 - RNA, 20 nt, Homo sapiens
  source 1..20: mol_type = genomic RNA
gcagatatttgacacaatgc

SEQ ID NO: 18059 - RNA, 20 nt, Homo sapiens
  source 1..20: mol_type = genomic RNA
cagatatttgacacaatgcc

SEQ ID NO: 18060 - RNA, 20 nt, Homo sapiens
  source 1..20: mol_type = genomic RNA
agatatttgacacaatgccc

SEQ ID NO: 18061 - RNA, 20 nt, Homo sapiens
  source 1..20: mol_type = genomic RNA
gatatttgacacaatgcccc

SEQ ID NO: 18062 - RNA, 20 nt, Homo sapiens
  source 1..20: mol_type = genomic RNA
atatttgacacaatgccccc

SEQ ID NO: 18063 - RNA, 20 nt, Homo sapiens
  source 1..20: mol_type = genomic RNA
tatttgacacaatgccccca

SEQ ID NO: 18064 - RNA, 20 nt, Homo sapiens
  source 1..20: mol_type = genomic RNA
atttgacacaatgcccccat

SEQ ID NO: 18065 - RNA, 20 nt, Homo sapiens
  source 1..20: mol_type = genomic RNA
tttgacacaatgcccccata

SEQ ID NO: 18066 - RNA, 20 nt, Homo sapiens
  source 1..20: mol_type = genomic RNA
ttgacacaatgcccccatag

SEQ ID NO: 18067 - RNA, 20 nt, Homo sapiens
  source 1..20: mol_type = genomic RNA
tgacacaatgcccccataga

SEQ ID NO: 18068 - RNA, 20 nt, Homo sapiens
  source 1..20: mol_type = genomic RNA
gacacaatgcccccatagac

SEQ ID NO: 18069 - RNA, 20 nt, Homo sapiens
  source 1..20: mol_type = genomic RNA
acacaatgcccccatagaca

SEQ ID NO: 18070 - RNA, 20 nt, Homo sapiens
  source 1..20: mol_type = genomic RNA
cacaatgcccccatagacag

SEQ ID NO: 18071 - RNA, 20 nt, Homo sapiens
  source 1..20: mol_type = genomic RNA
acaatgcccccatagacaga

SEQ ID NO: 18072 - RNA, 20 nt, Homo sapiens
  source 1..20: mol_type = genomic RNA
caatgcccccatagacagag

SEQ ID NO: 18073 - RNA, 20 nt, Homo sapiens
  source 1..20: mol_type = genomic RNA
cccccatagacagagcctag

SEQ ID NO: 18074 - RNA, 20 nt, Homo sapiens
  source 1..20: mol_type = genomic RNA
ccatagacagagcctaggca

SEQ ID NO: 18075 - RNA, 20 nt, Homo sapiens
  source 1..20: mol_type = genomic RNA
catagacagagcctaggcaa

SEQ ID NO: 18076 - RNA, 20 nt, Homo sapiens
  source 1..20: mol_type = genomic RNA
atagacagagcctaggcaag

SEQ ID NO: 18077 - RNA, 20 nt, Homo sapiens
  source 1..20: mol_type = genomic RNA
acagagcctaggcaagactt

SEQ ID NO: 18078 - RNA, 20 nt, Homo sapiens
  source 1..20: mol_type = genomic RNA
cagagcctaggcaagacttc

SEQ ID NO: 18079 - RNA, 20 nt, Homo sapiens
  source 1..20: mol_type = genomic RNA
agagcctaggcaagacttcc

SEQ ID NO: 18080 - RNA, 20 nt, Homo sapiens
  source 1..20: mol_type = genomic RNA
gagcctaggcaagacttcca

SEQ ID NO: 18081 - RNA, 20 nt, Homo sapiens
  source 1..20: mol_type = genomic RNA
agcctaggcaagacttccat

SEQ ID NO: 18082 - RNA, 20 nt, Homo sapiens
  source 1..20: mol_type = genomic RNA
gcctaggcaagacttccatc

SEQ ID NO: 18083 - RNA, 20 nt, Homo sapiens
  source 1..20: mol_type = genomic RNA
cctaggcaagacttccatca

SEQ ID NO: 18084 - RNA, 20 nt, Homo sapiens
  source 1..20: mol_type = genomic RNA
ctaggcaagacttccatcac

SEQ ID NO: 18085 - RNA, 20 nt, Homo sapiens
  source 1..20: mol_type = genomic RNA
taggcaagacttccatcacc

SEQ ID NO: 18086 - RNA, 20 nt, Homo sapiens
  source 1..20: mol_type = genomic RNA
aggcaagacttccatcacct

SEQ ID NO: 18087 - RNA, 20 nt, Homo sapiens
  source 1..20: mol_type = genomic RNA
ggcaagacttccatcacctg

SEQ ID NO: 18088 - RNA, 20 nt, Homo sapiens
  source 1..20: mol_type = genomic RNA
gcaagacttccatcacctgg

SEQ ID NO: 18089 - RNA, 20 nt, Homo sapiens
  source 1..20: mol_type = genomic RNA
caagacttccatcacctggg

SEQ ID NO: 18090 - RNA, 20 nt, Homo sapiens
  source 1..20: mol_type = genomic RNA
aagacttccatcacctgggt

SEQ ID NO: 18091 - RNA, 20 nt, Homo sapiens
  source 1..20: mol_type = genomic RNA
agacttccatcacctgggtg

SEQ ID NO: 18092 - RNA, 20 nt, Homo sapiens
  source 1..20: mol_type = genomic RNA
gacttccatcacctgggtga

SEQ ID NO: 18093 - RNA, 20 nt, Homo sapiens
  source 1..20: mol_type = genomic RNA
acttccatcacctgggtgat

SEQ ID NO: 18094 - RNA, 20 nt, Homo sapiens
  source 1..20: mol_type = genomic RNA
cttccatcacctgggtgatc

SEQ ID NO: 18095 - RNA, 20 nt, Homo sapiens
  source 1..20: mol_type = genomic RNA
ttccatcacctgggtgatca

SEQ ID NO: 18096 - RNA, 20 nt, Homo sapiens
  source 1..20: mol_type = genomic RNA
gatcagtgcagagatatgtc

SEQ ID NO: 18097 - RNA, 20 nt, Homo sapiens
  source 1..20: mol_type = genomic RNA
atcagtgcagagatatgtca

SEQ ID NO: 18098 - RNA, 20 nt, Homo sapiens
  source 1..20: mol_type = genomic RNA
tcagtgcagagatatgtcac

SEQ ID NO: 18099 - RNA, 20 nt, Homo sapiens
  source 1..20: mol_type = genomic RNA
cagtgcagagatatgtcaca

SEQ ID NO: 18100 - RNA, 20 nt, Homo sapiens
  source 1..20: mol_type = genomic RNA
gtgcagagatatgtcacaaa

SEQ ID NO: 18101 - RNA, 20 nt, Homo sapiens
  source 1..20: mol_type = genomic RNA
tgcagagatatgtcacaaat

SEQ ID NO: 18102 - RNA, 20 nt, Homo sapiens
  source 1..20: mol_type = genomic RNA
gcagagatatgtcacaaatc

SEQ ID NO: 18103 - RNA, 20 nt, Homo sapiens
  source 1..20: mol_type = genomic RNA
cagagatatgtcacaaatcc

SEQ ID NO: 18104 - RNA, 20 nt, Homo sapiens
  source 1..20: mol_type = genomic RNA
agagatatgtcacaaatccc

SEQ ID NO: 18105 - RNA, 20 nt, Homo sapiens
  source 1..20: mol_type = genomic RNA
gagatatgtcacaaatcccc

SEQ ID NO: 18106 - RNA, 20 nt, Homo sapiens
  source 1..20: mol_type = genomic RNA
agatatgtcacaaatccccc

SEQ ID NO: 18107 - RNA, 20 nt, Homo sapiens
  source 1..20: mol_type = genomic RNA
gatatgtcacaaatccccct

SEQ ID NO: 18108 - RNA, 20 nt, Homo sapiens
  source 1..20: mol_type = genomic RNA
atatgtcacaaatccccctc

SEQ ID NO: 18109 - RNA, 20 nt, Homo sapiens
  source 1..20: mol_type = genomic RNA
tatgtcacaaatccccctct

SEQ ID NO: 18110 - RNA, 20 nt, Homo sapiens
  source 1..20: mol_type = genomic RNA
atgtcacaaatccccctcta

SEQ ID NO: 18111 - RNA, 20 nt, Homo sapiens
  source 1..20: mol_type = genomic RNA
tgtcacaaatccccctctag

SEQ ID NO: 18112 - RNA, 20 nt, Homo sapiens
  source 1..20: mol_type = genomic RNA
gtcacaaatccccctctagg

SEQ ID NO: 18113 - RNA, 20 nt, Homo sapiens
  source 1..20: mol_type = genomic RNA
tcacaaatccccctctaggc

SEQ ID NO: 18114 - RNA, 20 nt, Homo sapiens
  source 1..20: mol_type = genomic RNA
cacaaatccccctctaggca

SEQ ID NO: 18115 - RNA, 20 nt, Homo sapiens
  source 1..20: mol_type = genomic RNA
acaaatccccctctaggcag

SEQ ID NO: 18116 - RNA, 20 nt, Homo sapiens
  source 1..20: mol_type = genomic RNA
caaatccccctctaggcaga

SEQ ID NO: 18117 - RNA, 20 nt, Homo sapiens
  source 1..20: mol_type = genomic RNA
aaatccccctctaggcagag

SEQ ID NO: 18118 - RNA, 20 nt, Homo sapiens
  source 1..20: mol_type = genomic RNA
aatccccctctaggcagagt

SEQ ID NO: 18119 - RNA, 20 nt, Homo sapiens
  source 1..20: mol_type = genomic RNA
atccccctctaggcagagta

SEQ ID NO: 18120 - RNA, 20 nt, Homo sapiens
  source 1..20: mol_type = genomic RNA
tccccctctaggcagagtat

SEQ ID NO: 18121 - RNA, 20 nt, Homo sapiens
  source 1..20: mol_type = genomic RNA
ccccctctaggcagagtata

SEQ ID NO: 18122 - RNA, 20 nt, Homo sapiens
  source 1..20: mol_type = genomic RNA
cccctctaggcagagtatag

SEQ ID NO: 18123 - RNA, 20 nt, Homo sapiens
  source 1..20: mol_type = genomic RNA
ccctctaggcagagtataga

SEQ ID NO: 18124 - RNA, 20 nt, Homo sapiens
  source 1..20: mol_type = genomic RNA
cctctaggcagagtatagag

SEQ ID NO: 18125 - RNA, 20 nt, Homo sapiens
  source 1..20: mol_type = genomic RNA
ctctaggcagagtatagaga

SEQ ID NO: 18126 - RNA, 20 nt, Homo sapiens
  source 1..20: mol_type = genomic RNA
tctaggcagagtatagagaa

SEQ ID NO: 18127 - RNA, 20 nt, Homo sapiens
  source 1..20: mol_type = genomic RNA
ctaggcagagtatagagaag

SEQ ID NO: 18128 - RNA, 20 nt, Homo sapiens
  source 1..20: mol_type = genomic RNA
taggcagagtatagagaaga

SEQ ID NO: 18129 - RNA, 20 nt, Homo sapiens
  source 1..20: mol_type = genomic RNA
aggcagagtatagagaagag

SEQ ID NO: 18130 - RNA, 20 nt, Homo sapiens
  source 1..20: mol_type = genomic RNA
ggcagagtatagagaagagt

SEQ ID NO: 18131 - RNA, 20 nt, Homo sapiens
  source 1..20: mol_type = genomic RNA
gcagagtatagagaagagtc

SEQ ID NO: 18132 - RNA, 20 nt, Homo sapiens
  source 1..20: mol_type = genomic RNA
cagagtatagagaagagtcc

SEQ ID NO: 18133 - RNA, 20 nt, Homo sapiens
  source 1..20: mol_type = genomic RNA
agagtatagagaagagtccc

SEQ ID NO: 18134 - RNA, 20 nt, Homo sapiens
  source 1..20: mol_type = genomic RNA
gagtatagagaagagtccca

SEQ ID NO: 18135 - RNA, 20 nt, Homo sapiens
  source 1..20: mol_type = genomic RNA
agtatagagaagagtcccat

SEQ ID NO: 18136 - RNA, 20 nt, Homo sapiens
  source 1..20: mol_type = genomic RNA
gtatagagaagagtcccatc

SEQ ID NO: 18137 - RNA, 20 nt, Homo sapiens
  source 1..20: mol_type = genomic RNA
tatagagaagagtcccatca

SEQ ID NO: 18138 - RNA, 20 nt, Homo sapiens
  source 1..20: mol_type = genomic RNA
atagagaagagtcccatcac

SEQ ID NO: 18139 - RNA, 20 nt, Homo sapiens
  source 1..20: mol_type = genomic RNA
tagagaagagtcccatcacc

SEQ ID NO: 18140 - RNA, 20 nt, Homo sapiens
  source 1..20: mol_type = genomic RNA
agagaagagtcccatcacct

SEQ ID NO: 18141 - RNA, 20 nt, Homo sapiens
  source 1..20: mol_type = genomic RNA
gagaagagtcccatcacctg

SEQ ID NO: 18142 - RNA, 20 nt, Homo sapiens
  source 1..20: mol_type = genomic RNA
agaagagtcccatcacctgg

SEQ ID NO: 18143 - RNA, 20 nt, Homo sapiens
  source 1..20: mol_type = genomic RNA
gaagagtcccatcacctggg

SEQ ID NO: 18144 - RNA, 20 nt, Homo sapiens
  source 1..20: mol_type = genomic RNA
aagagtcccatcacctgggt

SEQ ID NO: 18145 - RNA, 20 nt, Homo sapiens
  source 1..20: mol_type = genomic RNA
agagtcccatcacctgggtg

SEQ ID NO: 18146 - RNA, 20 nt, Homo sapiens
  source 1..20: mol_type = genomic RNA
gagtcccatcacctgggtga

SEQ ID NO: 18147 - RNA, 20 nt, Homo sapiens
  source 1..20: mol_type = genomic RNA
agtcccatcacctgggtgat

SEQ ID NO: 18148 - RNA, 20 nt, Homo sapiens
  source 1..20: mol_type = genomic RNA
gtcccatcacctgggtgatc

SEQ ID NO: 18149 - RNA, 20 nt, Homo sapiens
  source 1..20: mol_type = genomic RNA
tcccatcacctgggtgatca

SEQ ID NO: 18150 - RNA, 20 nt, Homo sapiens
  source 1..20: mol_type = genomic RNA
cccatcacctgggtgatcag

SEQ ID NO: 18151 - RNA, 20 nt, Homo sapiens
  source 1..20: mol_type = genomic RNA
gtgatcagtgcagagatatt

SEQ ID NO: 18152 - RNA, 20 nt, Homo sapiens
  source 1..20: mol_type = genomic RNA
tgatcagtgcagagatattt

SEQ ID NO: 18153 - RNA, 20 nt, Homo sapiens
  source 1..20: mol_type = genomic RNA
gatcagtgcagagatatttc

SEQ ID NO: 18154 - RNA, 20 nt, Homo sapiens
  source 1..20: mol_type = genomic RNA
atcagtgcagagatatttca

SEQ ID NO: 18155 - RNA, 20 nt, Homo sapiens
  source 1..20: mol_type = genomic RNA
tcagtgcagagatatttcac

SEQ ID NO: 18156 - RNA, 20 nt, Homo sapiens
  source 1..20: mol_type = genomic RNA
cagtgcagagatatttcaca

SEQ ID NO: 18157 - RNA, 20 nt, Homo sapiens
  source 1..20: mol_type = genomic RNA
agtgcagagatatttcacaa

SEQ ID NO: 18158 - RNA, 20 nt, Homo sapiens
  source 1..20: mol_type = genomic RNA
gtgcagagatatttcacaat

SEQ ID NO: 18159 - RNA, 20 nt, Homo sapiens
  source 1..20: mol_type = genomic RNA
tgcagagatatttcacaatg

SEQ ID NO: 18160 - RNA, 20 nt, Homo sapiens
  source 1..20: mol_type = genomic RNA
gcagagatatttcacaatgt

SEQ ID NO: 18161 - RNA, 20 nt, Homo sapiens
  source 1..20: mol_type = genomic RNA
agagatatttcacaatgtcc

SEQ ID NO: 18162 - RNA, 20 nt, Homo sapiens
  source 1..20: mol_type = genomic RNA
gagatatttcacaatgtccc

SEQ ID NO: 18163 - RNA, 20 nt, Homo sapiens
  source 1..20: mol_type = genomic RNA
agatatttcacaatgtcccc

SEQ ID NO: 18164 - RNA, 20 nt, Homo sapiens
  source 1..20: mol_type = genomic RNA
gatatttcacaatgtcccct

SEQ ID NO: 18165 - RNA, 20 nt, Homo sapiens
  source 1..20: mol_type = genomic RNA
atatttcacaatgtcccctg

SEQ ID NO: 18166 - RNA, 20 nt, Homo sapiens
  source 1..20: mol_type = genomic RNA
tatttcacaatgtcccctgt

SEQ ID NO: 18167 - RNA, 20 nt, Homo sapiens
  source 1..20: mol_type = genomic RNA
atttcacaatgtcccctgta

SEQ ID NO: 18168 - RNA, 20 nt, Homo sapiens
  source 1..20: mol_type = genomic RNA
tttcacaatgtcccctgtag

SEQ ID NO: 18169 - RNA, 20 nt, Homo sapiens
  source 1..20: mol_type = genomic RNA
ttcacaatgtcccctgtagg

SEQ ID NO: 18170 - RNA, 20 nt, Homo sapiens
  source 1..20: mol_type = genomic RNA
tcacaatgtcccctgtaggc

SEQ ID NO: 18171 - RNA, 20 nt, Homo sapiens
  source 1..20: mol_type = genomic RNA
cacaatgtcccctgtaggca

SEQ ID NO: 18172 - RNA, 20 nt, Homo sapiens
  source 1..20: mol_type = genomic RNA
acaatgtcccctgtaggcag

SEQ ID NO: 18173 - RNA, 20 nt, Homo sapiens
  source 1..20: mol_type = genomic RNA
caatgtcccctgtaggcaga

SEQ ID NO: 18174 - RNA, 20 nt, Homo sapiens
  source 1..20: mol_type = genomic RNA
aatgtcccctgtaggcagag

SEQ ID NO: 18175 - RNA, 20 nt, Homo sapiens
  source 1..20: mol_type = genomic RNA
atgtcccctgtaggcagaga

SEQ ID NO: 18176 - RNA, 20 nt, Homo sapiens
  source 1..20: mol_type = genomic RNA
gtcccctgtaggcagagagt

SEQ ID NO: 18177 - RNA, 20 nt, Homo sapiens
  source 1..20: mol_type = genomic RNA
ctgtaggcagagagtggaca

SEQ ID NO: 18178 - RNA, 20 nt, Homo sapiens
  source 1..20: mol_type = genomic RNA
tgtaggcagagagtggacaa

SEQ ID NO: 18179 - RNA, 20 nt, Homo sapiens
  source 1..20: mol_type = genomic RNA
gcagagagtggacaagagtt

SEQ ID NO: 18180 - RNA, 20 nt, Homo sapiens
  source 1..20: mol_type = genomic RNA
cagagagtggacaagagtta

SEQ ID NO: 18181 - RNA, 20 nt, Homo sapiens
  source 1..20: mol_type = genomic RNA
agagagtggacaagagttac

SEQ ID NO: 18182 - RNA, 20 nt, Homo sapiens
  source 1..20: mol_type = genomic RNA
gagagtggacaagagttaca

SEQ ID NO: 18183 - RNA, 20 nt, Homo sapiens
  source 1..20: mol_type = genomic RNA
agagtggacaagagttacat

SEQ ID NO: 18184 - RNA, 20 nt, Homo sapiens
  source 1..20: mol_type = genomic RNA
gagtggacaagagttacatc

SEQ ID NO: 18185 - RNA, 20 nt, Homo sapiens
  source 1..20: mol_type = genomic RNA
agtggacaagagttacatca

SEQ ID NO: 18186 - RNA, 20 nt, Homo sapiens
  source 1..20: mol_type = genomic RNA
gtggacaagagttacatcac

SEQ ID NO: 18187 - RNA, 20 nt, Homo sapiens
  source 1..20: mol_type = genomic RNA
tggacaagagttacatcacc

SEQ ID NO: 18188 - RNA, 20 nt, Homo sapiens
  source 1..20: mol_type = genomic RNA
ggacaagagttacatcacct

SEQ ID NO: 18189 - RNA, 20 nt, Homo sapiens
  source 1..20: mol_type = genomic RNA
gacaagagttacatcaccta

SEQ ID NO: 18190 - RNA, 20 nt, Homo sapiens
  source 1..20: mol_type = genomic RNA
acaagagttacatcacctag

SEQ ID NO: 18191 - RNA, 20 nt, Homo sapiens
  source 1..20: mol_type = genomic RNA
caagagttacatcacctaga

SEQ ID NO: 18192 - RNA, 20 nt, Homo sapiens
  source 1..20: mol_type = genomic RNA
aagagttacatcacctagat

SEQ ID NO: 18193 - RNA, 20 nt, Homo sapiens
  source 1..20: mol_type = genomic RNA
agagttacatcacctagatg

SEQ ID NO: 18194 - RNA, 20 nt, Homo sapiens
  source 1..20: mol_type = genomic RNA
gagttacatcacctagatga

SEQ ID NO: 18195 - RNA, 20 nt, Homo sapiens
  source 1..20: mol_type = genomic RNA
agttacatcacctagatgat

SEQ ID NO: 18196 - RNA, 20 nt, Homo sapiens
  source 1..20: mol_type = genomic RNA
gttacatcacctagatgatc

SEQ ID NO: 18197 - RNA, 20 nt, Homo sapiens
  source 1..20: mol_type = genomic RNA
ttacatcacctagatgatct

SEQ ID NO: 18198 - RNA, 20 nt, Homo sapiens
  source 1..20: mol_type = genomic RNA
tacatcacctagatgatctg

SEQ ID NO: 18199 - RNA, 20 nt, Homo sapiens
  source 1..20: mol_type = genomic RNA
acatcacctagatgatctgt

SEQ ID NO: 18200 - RNA, 20 nt, Homo sapiens
  source 1..20: mol_type = genomic RNA
catcacctagatgatctgtg

SEQ ID NO: 18201 - RNA, 20 nt, Homo sapiens
  source 1..20: mol_type = genomic RNA
atcacctagatgatctgtgc

SEQ ID NO: 18202 - RNA, 20 nt, Homo sapiens
  source 1..20: mol_type = genomic RNA
tcacctagatgatctgtgca

SEQ ID NO: 18203 - RNA, 20 nt, Homo sapiens
  source 1..20: mol_type = genomic RNA
cacctagatgatctgtgcag

SEQ ID NO: 18204 - RNA, 20 nt, Homo sapiens
  source 1..20: mol_type = genomic RNA
acctagatgatctgtgcaga

SEQ ID NO: 18205 - RNA, 20 nt, Homo sapiens
  source 1..20: mol_type = genomic RNA
cctagatgatctgtgcagag

SEQ ID NO: 18206 - RNA, 20 nt, Homo sapiens
  source 1..20: mol_type = genomic RNA
ctagatgatctgtgcagagc

SEQ ID NO: 18207 - RNA, 20 nt, Homo sapiens
  source 1..20: mol_type = genomic RNA
tagatgatctgtgcagagct

SEQ ID NO: 18208 - RNA, 20 nt, Homo sapiens
  source 1..20: mol_type = genomic RNA
agatgatctgtgcagagcta

SEQ ID NO: 18209 - RNA, 20 nt, Homo sapiens
  source 1..20: mol_type = genomic RNA
gatgatctgtgcagagctat

SEQ ID NO: 18210 - RNA, 20 nt, Homo sapiens
  source 1..20: mol_type = genomic RNA
atgatctgtgcagagctatg

SEQ ID NO: 18211 - RNA, 20 nt, Homo sapiens
  source 1..20: mol_type = genomic RNA
tgatctgtgcagagctatgt

SEQ ID NO: 18212 - RNA, 20 nt, Homo sapiens
  source 1..20: mol_type = genomic RNA
gatctgtgcagagctatgtc

SEQ ID NO: 18213 - RNA, 20 nt, Homo sapiens
  source 1..20: mol_type = genomic RNA
atctgtgcagagctatgtca

SEQ ID NO: 18214 - RNA, 20 nt, Homo sapiens
  source 1..20: mol_type = genomic RNA
tctgtgcagagctatgtcaa

SEQ ID NO: 18215 - RNA, 20 nt, Homo sapiens
  source 1..20: mol_type = genomic RNA
ctgtgcagagctatgtcaaa

SEQ ID NO: 18216 - RNA, 20 nt, Homo sapiens
  source 1..20: mol_type = genomic RNA
tgtgcagagctatgtcaaaa

SEQ ID NO: 18217 - RNA, 20 nt, Homo sapiens
  source 1..20: mol_type = genomic RNA
gtgcagagctatgtcaaaac

SEQ ID NO: 18218 - RNA, 20 nt, Homo sapiens
  source 1..20: mol_type = genomic RNA
tgcagagctatgtcaaaacg

SEQ ID NO: 18219 - RNA, 20 nt, Homo sapiens
  source 1..20: mol_type = genomic RNA
gcagagctatgtcaaaacgc

SEQ ID NO: 18220 - RNA, 20 nt, Homo sapiens
  source 1..20: mol_type = genomic RNA
cagagctatgtcaaaacgcc

SEQ ID NO: 18221 - RNA, 20 nt, Homo sapiens
  source 1..20: mol_type = genomic RNA
agagctatgtcaaaacgccc

SEQ ID NO: 18222 - RNA, 20 nt, Homo sapiens
  source 1..20: mol_type = genomic RNA
gagctatgtcaaaacgcccc

SEQ ID NO: 18223 - RNA, 20 nt, Homo sapiens
  source 1..20: mol_type = genomic RNA
agctatgtcaaaacgcccct

SEQ ID NO: 18224 - RNA, 20 nt, Homo sapiens
  source 1..20: mol_type = genomic RNA
gctatgtcaaaacgcccctg

SEQ ID NO: 18225 - RNA, 20 nt, Homo sapiens
  source 1..20: mol_type = genomic RNA
ctatgtcaaaacgcccctgt

SEQ ID NO: 18226 - RNA, 20 nt, Homo sapiens
  source 1..20: mol_type = genomic RNA
tatgtcaaaacgcccctgta

SEQ ID NO: 18227 - RNA, 20 nt, Homo sapiens
  source 1..20: mol_type = genomic RNA
atgtcaaaacgcccctgtag

SEQ ID NO: 18228 - RNA, 20 nt, Homo sapiens
  source 1..20: mol_type = genomic RNA
tgtcaaaacgcccctgtagg

SEQ ID NO: 18229 - RNA, 20 nt, Homo sapiens
  source 1..20: mol_type = genomic RNA
gtcaaaacgcccctgtaggc

SEQ ID NO: 18230 - RNA, 20 nt, Homo sapiens
  source 1..20: mol_type = genomic RNA
tcaaaacgcccctgtaggca

SEQ ID NO: 18231 - RNA, 20 nt, Homo sapiens
  source 1..20: mol_type = genomic RNA
caaaacgcccctgtaggcag

SEQ ID NO: 18232 - RNA, 20 nt, Homo sapiens
  source 1..20: mol_type = genomic RNA
cctgtaggcagagcctagat

SEQ ID NO: 18233 - RNA, 20 nt, Homo sapiens
  source 1..20: mol_type = genomic RNA
ctgtaggcagagcctagatg

SEQ ID NO: 18234 - RNA, 20 nt, Homo sapiens
  source 1..20: mol_type = genomic RNA
tgtaggcagagcctagatga

SEQ ID NO: 18235 - RNA, 20 nt, Homo sapiens
  source 1..20: mol_type = genomic RNA
gtaggcagagcctagatgag

SEQ ID NO: 18236 - RNA, 20 nt, Homo sapiens
  source 1..20: mol_type = genomic RNA
taggcagagcctagatgagt

SEQ ID NO: 18237 - RNA, 20 nt, Homo sapiens
  source 1..20: mol_type = genomic RNA
ggcagagcctagatgagtgt

SEQ ID NO: 18238 - RNA, 20 nt, Homo sapiens
  source 1..20: mol_type = genomic RNA
gcagagcctagatgagtgtt

SEQ ID NO: 18239 - RNA, 20 nt, Homo sapiens
  source 1..20: mol_type = genomic RNA
cagagcctagatgagtgtta

SEQ ID NO: 18240 - RNA, 20 nt, Homo sapiens
  source 1..20: mol_type = genomic RNA
agagcctagatgagtgttac

SEQ ID NO: 18241 - RNA, 20 nt, Homo sapiens
  source 1..20: mol_type = genomic RNA
gagcctagatgagtgttaca

SEQ ID NO: 18242 - RNA, 20 nt, Homo sapiens
  source 1..20: mol_type = genomic RNA
agcctagatgagtgttacat

SEQ ID NO: 18243 - RNA, 20 nt, Homo sapiens
  source 1..20: mol_type = genomic RNA
gcctagatgagtgttacatc

SEQ ID NO: 18244 - RNA, 20 nt, Homo sapiens
  source 1..20: mol_type = genomic RNA
cctagatgagtgttacatca

SEQ ID NO: 18245 - RNA, 20 nt, Homo sapiens
  source 1..20: mol_type = genomic RNA
ctagatgagtgttacatcac

SEQ ID NO: 18246 - RNA, 20 nt, Homo sapiens
  source 1..20: mol_type = genomic RNA
tagatgagtgttacatcacc

SEQ ID NO: 18247 - RNA, 20 nt, Homo sapiens
  source 1..20: mol_type = genomic RNA
agatgagtgttacatcacct

SEQ ID NO: 18248 - RNA, 20 nt, Homo sapiens
  source 1..20: mol_type = genomic RNA
gatgagtgttacatcacctg

SEQ ID NO: 18249 - RNA, 20 nt, Homo sapiens
  source 1..20: mol_type = genomic RNA
atgagtgttacatcacctgg

SEQ ID NO: 18250 - RNA, 20 nt, Homo sapiens
  source 1..20: mol_type = genomic RNA
tgagtgttacatcacctggg

SEQ ID NO: 18251 - RNA, 20 nt, Homo sapiens
  source 1..20: mol_type = genomic RNA
gagtgttacatcacctgggt

SEQ ID NO: 18252 - RNA, 20 nt, Homo sapiens
  source 1..20: mol_type = genomic RNA
tacatcacctgggtgatcat

SEQ ID NO: 18253 - RNA, 20 nt, Homo sapiens
  source 1..20: mol_type = genomic RNA
acatcacctgggtgatcatt

SEQ ID NO: 18254 - RNA, 20 nt, Homo sapiens
  source 1..20: mol_type = genomic RNA
catcacctgggtgatcattg

SEQ ID NO: 18255 - RNA, 20 nt, Homo sapiens
  source 1..20: mol_type = genomic RNA
atcacctgggtgatcattgc

SEQ ID NO: 18256 - RNA, 20 nt, Homo sapiens
  source 1..20: mol_type = genomic RNA
tcacctgggtgatcattgca

SEQ ID NO: 18257 - RNA, 20 nt, Homo sapiens
  source 1..20: mol_type = genomic RNA
cacctgggtgatcattgcag

SEQ ID NO: 18258 - RNA, 20 nt, Homo sapiens
  source 1..20: mol_type = genomic RNA
acctgggtgatcattgcaga

SEQ ID NO: 18259 - RNA, 20 nt, Homo sapiens
  source 1..20: mol_type = genomic RNA
cctgggtgatcattgcagag

SEQ ID NO: 18260 - RNA, 20 nt, Homo sapiens
  source 1..20: mol_type = genomic RNA
ctgggtgatcattgcagaga

SEQ ID NO: 18261 - RNA, 20 nt, Homo sapiens
  source 1..20: mol_type = genomic RNA
tgggtgatcattgcagagat

SEQ ID NO: 18262 - RNA, 20 nt, Homo sapiens
  source 1..20: mol_type = genomic RNA
gggtgatcattgcagagata

SEQ ID NO: 18263 - RNA, 20 nt, Homo sapiens
  source 1..20: mol_type = genomic RNA
ggtgatcattgcagagatac

SEQ ID NO: 18264 - RNA, 20 nt, Homo sapiens
  source 1..20: mol_type = genomic RNA
gtgatcattgcagagatacg

SEQ ID NO: 18265 - RNA, 20 nt, Homo sapiens
  source 1..20: mol_type = genomic RNA
tgatcattgcagagatacgt

SEQ ID NO: 18266 - RNA, 20 nt, Homo sapiens
  source 1..20: mol_type = genomic RNA
gatcattgcagagatacgtc

SEQ ID NO: 18267 - RNA, 20 nt, Homo sapiens
  source 1..20: mol_type = genomic RNA
atcattgcagagatacgtca

SEQ ID NO: 18268 - RNA, 20 nt, Homo sapiens
  source 1..20: mol_type = genomic RNA
tcattgcagagatacgtcac

SEQ ID NO: 18269 - RNA, 20 nt, Homo sapiens
  source 1..20: mol_type = genomic RNA
cattgcagagatacgtcaca

SEQ ID NO: 18270 - RNA, 20 nt, Homo sapiens
  source 1..20: mol_type = genomic RNA
attgcagagatacgtcacaa

SEQ ID NO: 18271 - RNA, 20 nt, Homo sapiens
  source 1..20: mol_type = genomic RNA
ttgcagagatacgtcacaat

SEQ ID NO: 18272 - RNA, 20 nt, Homo sapiens
  source 1..20: mol_type = genomic RNA
tgcagagatacgtcacaata

SEQ ID NO: 18273 - RNA, 20 nt, Homo sapiens
  source 1..20: mol_type = genomic RNA
gcagagatacgtcacaatac

SEQ ID NO: 18274 - RNA, 20 nt, Homo sapiens
  source 1..20: mol_type = genomic RNA
cagagatacgtcacaatacc

SEQ ID NO: 18275 - RNA, 20 nt, Homo sapiens
  source 1..20: mol_type = genomic RNA
agagatacgtcacaataccc

SEQ ID NO: 18276 - RNA, 20 nt, Homo sapiens
  source 1..20: mol_type = genomic RNA
gagatacgtcacaatacccc

SEQ ID NO: 18277 - RNA, 20 nt, Homo sapiens
  source 1..20: mol_type = genomic RNA
agatacgtcacaataccccc

SEQ ID NO: 18278 - RNA, 20 nt, Homo sapiens
  source 1..20: mol_type = genomic RNA
gatacgtcacaataccccct

SEQ ID NO: 18279 - RNA, 20 nt, Homo sapiens
  source 1..20: mol_type = genomic RNA
atacgtcacaataccccctg

SEQ ID NO: 18280 - RNA, 20 nt, Homo sapiens
  source 1..20: mol_type = genomic RNA
tacgtcacaataccccctgt

SEQ ID NO: 18281 - RNA, 20 nt, Homo sapiens
  source 1..20: mol_type = genomic RNA
acgtcacaataccccctgta

SEQ ID NO: 18282 - RNA, 20 nt, Homo sapiens
  source 1..20: mol_type = genomic RNA
cgtcacaataccccctgtag

SEQ ID NO: 18283 - RNA, 20 nt, Homo sapiens
  source 1..20: mol_type = genomic RNA
gtcacaataccccctgtagg

SEQ ID NO: 18284 - RNA, 20 nt, Homo sapiens
  source 1..20: mol_type = genomic RNA
tcacaataccccctgtaggt

SEQ ID NO: 18285 - RNA, 20 nt, Homo sapiens
  source 1..20: mol_type = genomic RNA
cacaataccccctgtaggtg

SEQ ID NO: 18286 - RNA, 20 nt, Homo sapiens
  source 1..20: mol_type = genomic RNA
acaataccccctgtaggtgg

SEQ ID NO: 18287 - RNA, 20 nt, Homo sapiens
  source 1..20: mol_type = genomic RNA
caataccccctgtaggtggg

SEQ ID NO: 18288 - RNA, 20 nt, Homo sapiens
  source 1..20: mol_type = genomic RNA
gtggggcctagacaagagtt

SEQ ID NO: 18289 - RNA, 20 nt, Homo sapiens
  source 1..20: mol_type = genomic RNA
tggggcctagacaagagtta

SEQ ID NO: 18290 - RNA, 20 nt, Homo sapiens
  source 1..20: mol_type = genomic RNA
gggcctagacaagagttaca

SEQ ID NO: 18291 - RNA, 20 nt, Homo sapiens
  source 1..20: mol_type = genomic RNA
ggcctagacaagagttacat

SEQ ID NO: 18292 - RNA, 20 nt, Homo sapiens
  source 1..20: mol_type = genomic RNA
gcctagacaagagttacatc

SEQ ID NO: 18293 - RNA, 20 nt, Homo sapiens
  source 1..20: mol_type = genomic RNA
cctagacaagagttacatca

SEQ ID NO: 18294 - RNA, 20 nt, Homo sapiens
  source 1..20: mol_type = genomic RNA
ctagacaagagttacatcac

SEQ ID NO: 18295 - RNA, 20 nt, Homo sapiens
  source 1..20: mol_type = genomic RNA
tagacaagagttacatcacc

SEQ ID NO: 18296 - RNA, 20 nt, Homo sapiens
  source 1..20: mol_type = genomic RNA
agacaagagttacatcacct

SEQ ID NO: 18297 - RNA, 20 nt, Homo sapiens
  source 1..20: mol_type = genomic RNA
gacaagagttacatcacctg

SEQ ID NO: 18298 - RNA, 20 nt, Homo sapiens
  source 1..20: mol_type = genomic RNA
acaagagttacatcacctgg

SEQ ID NO: 18299 - RNA, 20 nt, Homo sapiens
  source 1..20: mol_type = genomic RNA
caagagttacatcacctggg

SEQ ID NO: 18300 - RNA, 20 nt, Homo sapiens
  source 1..20: mol_type = genomic RNA
aagagttacatcacctgggt

SEQ ID NO: 18301 - RNA, 20 nt, Homo sapiens
  source 1..20: mol_type = genomic RNA
agagttacatcacctgggtg

SEQ ID NO: 18302 - RNA, 20 nt, Homo sapiens
  source 1..20: mol_type = genomic RNA
gagttacatcacctgggtga

SEQ ID NO: 18303 - RNA, 20 nt, Homo sapiens
  source 1..20: mol_type = genomic RNA
agttacatcacctgggtgat

SEQ ID NO: 18304 - RNA, 20 nt, Homo sapiens
  source 1..20: mol_type = genomic RNA
catcacctgggtgatcagta

SEQ ID NO: 18305 - RNA, 20 nt, Homo sapiens
  source 1..20: mol_type = genomic RNA
atcacctgggtgatcagtac

SEQ ID NO: 18306 - RNA, 20 nt, Homo sapiens
  source 1..20: mol_type = genomic RNA
tcacctgggtgatcagtaca

SEQ ID NO: 18307 - RNA, 20 nt, Homo sapiens
  source 1..20: mol_type = genomic RNA
cacctgggtgatcagtacag

SEQ ID NO: 18308 - RNA, 20 nt, Homo sapiens
  source 1..20: mol_type = genomic RNA
acctgggtgatcagtacaga

SEQ ID NO: 18309 - RNA, 20 nt, Homo sapiens
  source 1..20: mol_type = genomic RNA
cctgggtgatcagtacagaa

SEQ ID NO: 18310 - RNA, 20 nt, Homo sapiens
  source 1..20: mol_type = genomic RNA
ctgggtgatcagtacagaag

SEQ ID NO: 18311 - RNA, 20 nt, Homo sapiens
  source 1..20: mol_type = genomic RNA
tgggtgatcagtacagaagt

SEQ ID NO: 18312 - RNA, 20 nt, Homo sapiens
  source 1..20: mol_type = genomic RNA
gggtgatcagtacagaagta

SEQ ID NO: 18313 - RNA, 20 nt, Homo sapiens
  source 1..20: mol_type = genomic RNA
ggtgatcagtacagaagtat

SEQ ID NO: 18314 - RNA, 20 nt, Homo sapiens
  source 1..20: mol_type = genomic RNA
gtgatcagtacagaagtatg

SEQ ID NO: 18315 - RNA, 20 nt, Homo sapiens
  source 1..20: mol_type = genomic RNA
tgatcagtacagaagtatgt

SEQ ID NO: 18316 - RNA, 20 nt, Homo sapiens
  source 1..20: mol_type = genomic RNA
gatcagtacagaagtatgtc

SEQ ID NO: 18317 - RNA, 20 nt, Homo sapiens
  source 1..20: mol_type = genomic RNA
atcagtacagaagtatgtca

SEQ ID NO: 18318 - RNA, 20 nt, Homo sapiens
  source 1..20: mol_type = genomic RNA
tcagtacagaagtatgtcac

SEQ ID NO: 18319 - RNA, 20 nt, Homo sapiens
  source 1..20: mol_type = genomic RNA
cagtacagaagtatgtcaca

SEQ ID NO: 18320 - RNA, 20 nt, Homo sapiens
  source 1..20: mol_type = genomic RNA
agtacagaagtatgtcacaa

SEQ ID NO: 18321 - RNA, 20 nt, Homo sapiens
  source 1..20: mol_type = genomic RNA
gtacagaagtatgtcacaaa

SEQ ID NO: 18322 - RNA, 20 nt, Homo sapiens
  source 1..20: mol_type = genomic RNA
tacagaagtatgtcacaaag

SEQ ID NO: 18323 - RNA, 20 nt, Homo sapiens
  source 1..20: mol_type = genomic RNA
acagaagtatgtcacaaagc

SEQ ID NO: 18324 - RNA, 20 nt, Homo sapiens
  source 1..20: mol_type = genomic RNA
cagaagtatgtcacaaagcc

SEQ ID NO: 18325 - RNA, 20 nt, Homo sapiens
  source 1..20: mol_type = genomic RNA
agaagtatgtcacaaagccc

SEQ ID NO: 18326 - RNA, 20 nt, Homo sapiens
  source 1..20: mol_type = genomic RNA
gaagtatgtcacaaagcccc

SEQ ID NO: 18327 - RNA, 20 nt, Homo sapiens
  source 1..20: mol_type = genomic RNA
aagtatgtcacaaagcccct

SEQ ID NO: 18328 - RNA, 20 nt, Homo sapiens
  source 1..20: mol_type = genomic RNA
agtatgtcacaaagcccctg

SEQ ID NO: 18329 - RNA, 20 nt, Homo sapiens
  source 1..20: mol_type = genomic RNA
gtatgtcacaaagcccctgt

SEQ ID NO: 18330 - RNA, 20 nt, Homo sapiens
  source 1..20: mol_type = genomic RNA
tatgtcacaaagcccctgta

SEQ ID NO: 18331 - RNA, 20 nt, Homo sapiens
  source 1..20: mol_type = genomic RNA
atgtcacaaagcccctgtag

SEQ ID NO: 18332 - RNA, 20 nt, Homo sapiens
  source 1..20: mol_type = genomic RNA
gagcctagacaagagttaca

SEQ ID NO: 18333 - RNA, 20 nt, Homo sapiens
  source 1..20: mol_type = genomic RNA
agcctagacaagagttacat

SEQ ID NO: 18334 - RNA, 20 nt, Homo sapiens
  source 1..20: mol_type = genomic RNA
agagttacatcacctgggtt

SEQ ID NO: 18335 - RNA, 20 nt, Homo sapiens
  source 1..20: mol_type = genomic RNA
gagttacatcacctgggtta

SEQ ID NO: 18336 - RNA, 20 nt, Homo sapiens
  source 1..20: mol_type = genomic RNA
agttacatcacctgggttat

SEQ ID NO: 18337 - RNA, 20 nt, Homo sapiens
  source 1..20: mol_type = genomic RNA
gttacatcacctgggttatc

SEQ ID NO: 18338 - RNA, 20 nt, Homo sapiens
  source 1..20: mol_type = genomic RNA
ttacatcacctgggttatca

SEQ ID NO: 18339 - RNA, 20 nt, Homo sapiens
  source 1..20: mol_type = genomic RNA
tacatcacctgggttatcag

SEQ ID NO: 18340 - RNA, 20 nt, Homo sapiens
  source 1..20: mol_type = genomic RNA
acatcacctgggttatcagt

SEQ ID NO: 18341 - RNA, 20 nt, Homo sapiens
  source 1..20: mol_type = genomic RNA
catcacctgggttatcagtg

SEQ ID NO: 18342 - RNA, 20 nt, Homo sapiens
  source 1..20: mol_type = genomic RNA
atcacctgggttatcagtgc

SEQ ID NO: 18343 - RNA, 20 nt, Homo sapiens
  source 1..20: mol_type = genomic RNA
tcacctgggttatcagtgca

SEQ ID NO: 18344 - RNA, 20 nt, Homo sapiens
  source 1..20: mol_type = genomic RNA
cacctgggttatcagtgcag

SEQ ID NO: 18345 - RNA, 20 nt, Homo sapiens
  source 1..20: mol_type = genomic RNA
acctgggttatcagtgcaga

SEQ ID NO: 18346 - RNA, 20 nt, Homo sapiens
  source 1..20: mol_type = genomic RNA
cctgggttatcagtgcagaa

SEQ ID NO: 18347 - RNA, 20 nt, Homo sapiens
  source 1..20: mol_type = genomic RNA
ctgggttatcagtgcagaaa

SEQ ID NO: 18348 - RNA, 20 nt, Homo sapiens
  source 1..20: mol_type = genomic RNA
tgggttatcagtgcagaaat

SEQ ID NO: 18349 - RNA, 20 nt, Homo sapiens
  source 1..20: mol_type = genomic RNA
gggttatcagtgcagaaata

SEQ ID NO: 18350 - RNA, 20 nt, Homo sapiens
  source 1..20: mol_type = genomic RNA
ggttatcagtgcagaaatat

SEQ ID NO: 18351 - RNA, 20 nt, Homo sapiens
  source 1..20: mol_type = genomic RNA
gttatcagtgcagaaatatg

SEQ ID NO: 18352 - RNA, 20 nt, Homo sapiens
  source 1..20: mol_type = genomic RNA
ttatcagtgcagaaatatgt

SEQ ID NO: 18353 - RNA, 20 nt, Homo sapiens
  source 1..20: mol_type = genomic RNA
tatcagtgcagaaatatgtc

SEQ ID NO: 18354 - RNA, 20 nt, Homo sapiens
  source 1..20: mol_type = genomic RNA
atcagtgcagaaatatgtca

SEQ ID NO: 18355 - RNA, 20 nt, Homo sapiens
  source 1..20: mol_type = genomic RNA
tcagtgcagaaatatgtcac

SEQ ID NO: 18356 - RNA, 20 nt, Homo sapiens
  source 1..20: mol_type = genomic RNA
cagtgcagaaatatgtcaca

SEQ ID NO: 18357 - RNA, 20 nt, Homo sapiens
  source 1..20: mol_type = genomic RNA
agtgcagaaatatgtcacaa

SEQ ID NO: 18358 - RNA, 20 nt, Homo sapiens
  source 1..20: mol_type = genomic RNA
gtgcagaaatatgtcacaaa

SEQ ID NO: 18359 - RNA, 20 nt, Homo sapiens
  source 1..20: mol_type = genomic RNA
tgcagaaatatgtcacaaag

SEQ ID NO: 18360 - RNA, 20 nt, Homo sapiens
  source 1..20: mol_type = genomic RNA
gcagaaatatgtcacaaagc

SEQ ID NO: 18361 - RNA, 20 nt, Homo sapiens
  source 1..20: mol_type = genomic RNA
cagaaatatgtcacaaagcc

SEQ ID NO: 18362 - RNA, 20 nt, Homo sapiens
  source 1..20: mol_type = genomic RNA
agaaatatgtcacaaagccc

SEQ ID NO: 18363 - RNA, 20 nt, Homo sapiens
  source 1..20: mol_type = genomic RNA
gaaatatgtcacaaagcccc

SEQ ID NO: 18364 - RNA, 20 nt, Homo sapiens
  source 1..20: mol_type = genomic RNA
aaatatgtcacaaagcccct

SEQ ID NO: 18365 - RNA, 20 nt, Homo sapiens
  source 1..20: mol_type = genomic RNA
aatatgtcacaaagcccctg

SEQ ID NO: 18366 - RNA, 20 nt, Homo sapiens
  source 1..20: mol_type = genomic RNA
atatgtcacaaagcccctgt

SEQ ID NO: 18367 - RNA, 20 nt, Homo sapiens
  source 1..20: mol_type = genomic RNA
gtcacaaagcccctgtaggt

SEQ ID NO: 18368 - RNA, 20 nt, Homo sapiens
  source 1..20: mol_type = genomic RNA
tcacaaagcccctgtaggtc

SEQ ID NO: 18369 - RNA, 20 nt, Homo sapiens
  source 1..20: mol_type = genomic RNA
cacaaagcccctgtaggtcg

SEQ ID NO: 18370 - RNA, 20 nt, Homo sapiens
  source 1..20: mol_type = genomic RNA
acaaagcccctgtaggtcga

SEQ ID NO: 18371 - RNA, 20 nt, Homo sapiens
  source 1..20: mol_type = genomic RNA
caaagcccctgtaggtcgag

SEQ ID NO: 18372 - RNA, 20 nt, Homo sapiens
  source 1..20: mol_type = genomic RNA
aaagcccctgtaggtcgagt

SEQ ID NO: 18373 - RNA, 20 nt, Homo sapiens
  source 1..20: mol_type = genomic RNA
aagcccctgtaggtcgagtc

SEQ ID NO: 18374 - RNA, 20 nt, Homo sapiens
  source 1..20: mol_type = genomic RNA
agcccctgtaggtcgagtct

SEQ ID NO: 18375 - RNA, 20 nt, Homo sapiens
  source 1..20: mol_type = genomic RNA
gcccctgtaggtcgagtcta

SEQ ID NO: 18376 - RNA, 20 nt, Homo sapiens
  source 1..20: mol_type = genomic RNA
cccctgtaggtcgagtctag

SEQ ID NO: 18377 - RNA, 20 nt, Homo sapiens
  source 1..20: mol_type = genomic RNA
ccctgtaggtcgagtctaga

SEQ ID NO: 18378 - RNA, 20 nt, Homo sapiens
  source 1..20: mol_type = genomic RNA
cctgtaggtcgagtctagac

SEQ ID NO: 18379 - RNA, 20 nt, Homo sapiens
  source 1..20: mol_type = genomic RNA
ctgtaggtcgagtctagaca

SEQ ID NO: 18380 - RNA, 20 nt, Homo sapiens
  source 1..20: mol_type = genomic RNA
tgtaggtcgagtctagacaa

SEQ ID NO: 18381 - RNA, 20 nt, Homo sapiens
  source 1..20: mol_type = genomic RNA
gtaggtcgagtctagacaag

SEQ ID NO: 18382 - RNA, 20 nt, Homo sapiens
  source 1..20: mol_type = genomic RNA
taggtcgagtctagacaaga

SEQ ID NO: 18383 - RNA, 20 nt, Homo sapiens
  source 1..20: mol_type = genomic RNA
aggtcgagtctagacaagag

SEQ ID NO: 18384 - RNA, 20 nt, Homo sapiens
  source 1..20: mol_type = genomic RNA
ggtcgagtctagacaagagt

SEQ ID NO: 18385 - RNA, 20 nt, Homo sapiens
  source 1..20: mol_type = genomic RNA
gtcgagtctagacaagagtt

SEQ ID NO: 18386 - RNA, 20 nt, Homo sapiens
  source 1..20: mol_type = genomic RNA
tcgagtctagacaagagtta

SEQ ID NO: 18387 - RNA, 20 nt, Homo sapiens
  source 1..20: mol_type = genomic RNA
cgagtctagacaagagttac

SEQ ID NO: 18388 - RNA, 20 nt, Homo sapiens
  source 1..20: mol_type = genomic RNA
gagtctagacaagagttaca

SEQ ID NO: 18389 - RNA, 20 nt, Homo sapiens
  source 1..20: mol_type = genomic RNA
agtctagacaagagttacat

SEQ ID NO: 18390 - RNA, 20 nt, Homo sapiens
  source 1..20: mol_type = genomic RNA
gtctagacaagagttacatc

SEQ ID NO: 18391 - RNA, 20 nt, Homo sapiens
  source 1..20: mol_type = genomic RNA
tctagacaagagttacatct

SEQ ID NO: 18392 - RNA, 20 nt, Homo sapiens
  source 1..20: mol_type = genomic RNA
ctagacaagagttacatctc

SEQ ID NO: 18393 - RNA, 20 nt, Homo sapiens
  source 1..20: mol_type = genomic RNA
tagacaagagttacatctcc

SEQ ID NO: 18394 - RNA, 20 nt, Homo sapiens
  source 1..20: mol_type = genomic RNA
agacaagagttacatctcct

SEQ ID NO: 18395 - RNA, 20 nt, Homo sapiens
  source 1..20: mol_type = genomic RNA
gacaagagttacatctcctg

SEQ ID NO: 18396 - RNA, 20 nt, Homo sapiens
  source 1..20: mol_type = genomic RNA
acaagagttacatctcctgg

SEQ ID NO: 18397 - RNA, 20 nt, Homo sapiens
  source 1..20: mol_type = genomic RNA
caagagttacatctcctggg

SEQ ID NO: 18398 - RNA, 20 nt, Homo sapiens
  source 1..20: mol_type = genomic RNA
aagagttacatctcctgggt

SEQ ID NO: 18399 - RNA, 20 nt, Homo sapiens
  source 1..20: mol_type = genomic RNA
agagttacatctcctgggtg

SEQ ID NO: 18400 - RNA, 20 nt, Homo sapiens
  source 1..20: mol_type = genomic RNA
gagttacatctcctgggtga

SEQ ID NO: 18401 - RNA, 20 nt, Homo sapiens
  source 1..20: mol_type = genomic RNA
agttacatctcctgggtgat

SEQ ID NO: 18402 - RNA, 20 nt, Homo sapiens
  source 1..20: mol_type = genomic RNA
gttacatctcctgggtgatc

SEQ ID NO: 18403 - RNA, 20 nt, Homo sapiens
  source 1..20: mol_type = genomic RNA
ttacatctcctgggtgatca

SEQ ID NO: 18404 - RNA, 20 nt, Homo sapiens
  source 1..20: mol_type = genomic RNA
tacatctcctgggtgatcag

SEQ ID NO: 18405 - RNA, 20 nt, Homo sapiens
  source 1..20: mol_type = genomic RNA
acatctcctgggtgatcagt

SEQ ID NO: 18406 - RNA, 20 nt, Homo sapiens
  source 1..20: mol_type = genomic RNA
catctcctgggtgatcagtg

SEQ ID NO: 18407 - RNA, 20 nt, Homo sapiens
  source 1..20: mol_type = genomic RNA
atctcctgggtgatcagtgc

SEQ ID NO: 18408 - RNA, 20 nt, Homo sapiens
  source 1..20: mol_type = genomic RNA
tctcctgggtgatcagtgca

SEQ ID NO: 18409 - RNA, 20 nt, Homo sapiens
  source 1..20: mol_type = genomic RNA
ctcctgggtgatcagtgcaa

SEQ ID NO: 18410 - RNA, 20 nt, Homo sapiens
  source 1..20: mol_type = genomic RNA
tcctgggtgatcagtgcaaa

SEQ ID NO: 18411 - RNA, 20 nt, Homo sapiens
  source 1..20: mol_type = genomic RNA
cctgggtgatcagtgcaaag

SEQ ID NO: 18412 - RNA, 20 nt, Homo sapiens
  source 1..20: mol_type = genomic RNA
ctgggtgatcagtgcaaaga

SEQ ID NO: 18413 - RNA, 20 nt, Homo sapiens
  source 1..20: mol_type = genomic RNA
tgggtgatcagtgcaaagat

SEQ ID NO: 18414 - RNA, 20 nt, Homo sapiens
  source 1..20: mol_type = genomic RNA
gggtgatcagtgcaaagata

SEQ ID NO: 18415 - RNA, 20 nt, Homo sapiens
  source 1..20: mol_type = genomic RNA
ggtgatcagtgcaaagatat

SEQ ID NO: 18416 - RNA, 20 nt, Homo sapiens
  source 1..20: mol_type = genomic RNA
gtgatcagtgcaaagatatg

SEQ ID NO: 18417 - RNA, 20 nt, Homo sapiens
  source 1..20: mol_type = genomic RNA
tgatcagtgcaaagatatgt

SEQ ID NO: 18418 - RNA, 20 nt, Homo sapiens
  source 1..20: mol_type = genomic RNA
gatcagtgcaaagatatgtc

SEQ ID NO: 18419 - RNA, 20 nt, Homo sapiens
  source 1..20: mol_type = genomic RNA
atcagtgcaaagatatgtca

SEQ ID NO: 18420 - RNA, 20 nt, Homo sapiens
  source 1..20: mol_type = genomic RNA
tcagtgcaaagatatgtcac

SEQ ID NO: 18421 - RNA, 20 nt, Homo sapiens
  source 1..20: mol_type = genomic RNA
cagtgcaaagatatgtcaca

SEQ ID NO: 18422 - RNA, 20 nt, Homo sapiens
  source 1..20: mol_type = genomic RNA
agtgcaaagatatgtcacaa

SEQ ID NO: 18423 - RNA, 20 nt, Homo sapiens
  source 1..20: mol_type = genomic RNA
gtgcaaagatatgtcacaaa

SEQ ID NO: 18424 - RNA, 20 nt, Homo sapiens
  source 1..20: mol_type = genomic RNA
tgcaaagatatgtcacaaag

SEQ ID NO: 18425 - RNA, 20 nt, Homo sapiens
  source 1..20: mol_type = genomic RNA
gcaaagatatgtcacaaagc

SEQ ID NO: 18426 - RNA, 20 nt, Homo sapiens
  source 1..20: mol_type = genomic RNA
caaagatatgtcacaaagcc

SEQ ID NO: 18427 - RNA, 20 nt, Homo sapiens
  source 1..20: mol_type = genomic RNA
aaagatatgtcacaaagccc

SEQ ID NO: 18428 - RNA, 20 nt, Homo sapiens
  source 1..20: mol_type = genomic RNA
aagatatgtcacaaagcccc

SEQ ID NO: 18429 - RNA, 20 nt, Homo sapiens
  source 1..20: mol_type = genomic RNA
agatatgtcacaaagccccc

SEQ ID NO: 18430 - RNA, 20 nt, Homo sapiens
  source 1..20: mol_type = genomic RNA
gatatgtcacaaagccccct

SEQ ID NO: 18431 - RNA, 20 nt, Homo sapiens
  source 1..20: mol_type = genomic RNA
atatgtcacaaagccccctg

SEQ ID NO: 18432 - RNA, 20 nt, Homo sapiens
  source 1..20: mol_type = genomic RNA
tatgtcacaaagccccctgt

SEQ ID NO: 18433 - RNA, 20 nt, Homo sapiens
  source 1..20: mol_type = genomic RNA
atgtcacaaagccccctgta

SEQ ID NO: 18434 - RNA, 20 nt, Homo sapiens
  source 1..20: mol_type = genomic RNA
tgtcacaaagccccctgtag

SEQ ID NO: 18435 - RNA, 20 nt, Homo sapiens
  source 1..20: mol_type = genomic RNA
gtcacaaagccccctgtaga

SEQ ID NO: 18436 - RNA, 20 nt, Homo sapiens
  source 1..20: mol_type = genomic RNA
aaagccccctgtagacaaat

SEQ ID NO: 18437 - RNA, 20 nt, Homo sapiens
  source 1..20: mol_type = genomic RNA
aagccccctgtagacaaatc

SEQ ID NO: 18438 - RNA, 20 nt, Homo sapiens
  source 1..20: mol_type = genomic RNA
agccccctgtagacaaatcc

SEQ ID NO: 18439 - RNA, 20 nt, Homo sapiens
  source 1..20: mol_type = genomic RNA
gccccctgtagacaaatccc

SEQ ID NO: 18440 - RNA, 20 nt, Homo sapiens
  source 1..20: mol_type = genomic RNA
ccccctgtagacaaatccca

SEQ ID NO: 18441 - RNA, 20 nt, Homo sapiens
  source 1..20: mol_type = genomic RNA
cccctgtagacaaatcccag

SEQ ID NO: 18442 - RNA, 20 nt, Homo sapiens
  source 1..20: mol_type = genomic RNA
ccctgtagacaaatcccaga

SEQ ID NO: 18443 - RNA, 20 nt, Homo sapiens
  source 1..20: mol_type = genomic RNA
cctgtagacaaatcccagaa

SEQ ID NO: 18444 - RNA, 20 nt, Homo sapiens
  source 1..20: mol_type = genomic RNA
ctgtagacaaatcccagaaa

SEQ ID NO: 18445 - RNA, 20 nt, Homo sapiens
  source 1..20: mol_type = genomic RNA
tgtagacaaatcccagaaaa

SEQ ID NO: 18446 - RNA, 20 nt, Homo sapiens
  source 1..20: mol_type = genomic RNA
gtagacaaatcccagaaaat

SEQ ID NO: 18447 - RNA, 20 nt, Homo sapiens
  source 1..20: mol_type = genomic RNA
tagacaaatcccagaaaatt

SEQ ID NO: 18448 - RNA, 20 nt, Homo sapiens
  source 1..20: mol_type = genomic RNA
agacaaatcccagaaaattg

SEQ ID NO: 18449 - RNA, 20 nt, Homo sapiens
  source 1..20: mol_type = genomic RNA
gacaaatcccagaaaattgt

SEQ ID NO: 18450 - RNA, 20 nt, Homo sapiens
  source 1..20: mol_type = genomic RNA
acaaatcccagaaaattgtt

SEQ ID NO: 18451 - RNA, 20 nt, Homo sapiens
  source 1..20: mol_type = genomic RNA
aaatcccagaaaattgttac

SEQ ID NO: 18452 - RNA, 20 nt, Homo sapiens
  source 1..20: mol_type = genomic RNA
aatcccagaaaattgttaca

SEQ ID NO: 18453 - RNA, 20 nt, Homo sapiens
  source 1..20: mol_type = genomic RNA
atcccagaaaattgttacat

SEQ ID NO: 18454 - RNA, 20 nt, Homo sapiens
  source 1..20: mol_type = genomic RNA
tcccagaaaattgttacatc

SEQ ID NO: 18455 - RNA, 20 nt, Homo sapiens
  source 1..20: mol_type = genomic RNA
cccagaaaattgttacatca

SEQ ID NO: 18456 - RNA, 20 nt, Homo sapiens
  source 1..20: mol_type = genomic RNA
ccagaaaattgttacatcac

SEQ ID NO: 18457 - RNA, 20 nt, Homo sapiens
  source 1..20: mol_type = genomic RNA
cagaaaattgttacatcacc

SEQ ID NO: 18458 - RNA, 20 nt, Homo sapiens
  source 1..20: mol_type = genomic RNA
agaaaattgttacatcacct

SEQ ID NO: 18459 - RNA, 20 nt, Homo sapiens
  source 1..20: mol_type = genomic RNA
aaaattgttacatcacctgg

SEQ ID NO: 18460 - RNA, 20 nt, Homo sapiens
  source 1..20: mol_type = genomic RNA
aaattgttacatcacctggg

SEQ ID NO: 18461 - RNA, 20 nt, Homo sapiens
  source 1..20: mol_type = genomic RNA
aattgttacatcacctgggt

SEQ ID NO: 18462 - RNA, 20 nt, Homo sapiens
  source 1..20: mol_type = genomic RNA
attgttacatcacctgggtg

SEQ ID NO: 18463 - RNA, 20 nt, Homo sapiens
  source 1..20: mol_type = genomic RNA
ttgttacatcacctgggtga

SEQ ID NO: 18464 - RNA, 20 nt, Homo sapiens
  source 1..20: mol_type = genomic RNA
atcacctgggtgatcagtgg

SEQ ID NO: 18465 - RNA, 20 nt, Homo sapiens
  source 1..20: mol_type = genomic RNA
tcacctgggtgatcagtgga

SEQ ID NO: 18466 - RNA, 20 nt, Homo sapiens
  source 1..20: mol_type = genomic RNA
cacctgggtgatcagtggag

SEQ ID NO: 18467 - RNA, 20 nt, Homo sapiens
  source 1..20: mol_type = genomic RNA
cctgggtgatcagtggagat

SEQ ID NO: 18468 - RNA, 20 nt, Homo sapiens
  source 1..20: mol_type = genomic RNA
ctgggtgatcagtggagata

SEQ ID NO: 18469 - RNA, 20 nt, Homo sapiens
  source 1..20: mol_type = genomic RNA
tgggtgatcagtggagatat

SEQ ID NO: 18470 - RNA, 20 nt, Homo sapiens
  source 1..20: mol_type = genomic RNA
gggtgatcagtggagatatg

SEQ ID NO: 18471 - RNA, 20 nt, Homo sapiens
  source 1..20: mol_type = genomic RNA
ggtgatcagtggagatatgt

SEQ ID NO: 18472 - RNA, 20 nt, Homo sapiens
  source 1..20: mol_type = genomic RNA
gtgatcagtggagatatgtg

SEQ ID NO: 18473 - RNA, 20 nt, Homo sapiens
  source 1..20: mol_type = genomic RNA
tgatcagtggagatatgtgt

SEQ ID NO: 18474 - RNA, 20 nt, Homo sapiens
  source 1..20: mol_type = genomic RNA
gatcagtggagatatgtgtc

SEQ ID NO: 18475 - RNA, 20 nt, Homo sapiens
  source 1..20: mol_type = genomic RNA
atcagtggagatatgtgtca

SEQ ID NO: 18476 - RNA, 20 nt, Homo sapiens
  source 1..20: mol_type = genomic RNA
tcagtggagatatgtgtcac

SEQ ID NO: 18477 - RNA, 20 nt, Homo sapiens
  source 1..20: mol_type = genomic RNA
cagtggagatatgtgtcaca

SEQ ID NO: 18478 - RNA, 20 nt, Homo sapiens
  source 1..20: mol_type = genomic RNA
agtggagatatgtgtcacaa

SEQ ID NO: 18479 - RNA, 20 nt, Homo sapiens
  source 1..20: mol_type = genomic RNA
gtggagatatgtgtcacaat

SEQ ID NO: 18480 - RNA, 20 nt, Homo sapiens
  source 1..20: mol_type = genomic RNA
tggagatatgtgtcacaatt

SEQ ID NO: 18481 - RNA, 20 nt, Homo sapiens
  source 1..20: mol_type = genomic RNA
ggagatatgtgtcacaattc

SEQ ID NO: 18482 - RNA, 20 nt, Homo sapiens
  source 1..20: mol_type = genomic RNA
gagatatgtgtcacaattcc

SEQ ID NO: 18483 - RNA, 20 nt, Homo sapiens
  source 1..20: mol_type = genomic RNA
agatatgtgtcacaattccc

SEQ ID NO: 18484 - RNA, 20 nt, Homo sapiens
  source 1..20: mol_type = genomic RNA
gatatgtgtcacaattcccc

SEQ ID NO: 18485 - RNA, 20 nt, Homo sapiens
  source 1..20: mol_type = genomic RNA
atatgtgtcacaattcccct

SEQ ID NO: 18486 - RNA, 20 nt, Homo sapiens
  source 1..20: mol_type = genomic RNA
tatgtgtcacaattcccctt

SEQ ID NO: 18487 - RNA, 20 nt, Homo sapiens
  source 1..20: mol_type = genomic RNA
atgtgtcacaattccccttt

SEQ ID NO: 18488 - RNA, 20 nt, Homo sapiens
  source 1..20: mol_type = genomic RNA
tgtgtcacaattccccttta

SEQ ID NO: 18489 - RNA, 20 nt, Homo sapiens
  source 1..20: mol_type = genomic RNA
gtgtcacaattcccctttag

SEQ ID NO: 18490 - RNA, 20 nt, Homo sapiens
  source 1..20: mol_type = genomic RNA
tgtcacaattcccctttagg

SEQ ID NO: 18491 - RNA, 20 nt, Homo sapiens
  source 1..20: mol_type = genomic RNA
gtcacaattcccctttaggc

SEQ ID NO: 18492 - RNA, 20 nt, Homo sapiens
  source 1..20: mol_type = genomic RNA
tcacaattcccctttaggca

SEQ ID NO: 18493 - RNA, 20 nt, Homo sapiens
  source 1..20: mol_type = genomic RNA
cacaattcccctttaggcac

SEQ ID NO: 18494 - RNA, 20 nt, Homo sapiens
  source 1..20: mol_type = genomic RNA
acaattcccctttaggcaca

SEQ ID NO: 18495 - RNA, 20 nt, Homo sapiens
  source 1..20: mol_type = genomic RNA
caattcccctttaggcacag

SEQ ID NO: 18496 - RNA, 20 nt, Homo sapiens
  source 1..20: mol_type = genomic RNA
aattcccctttaggcacagc

SEQ ID NO: 18497 - RNA, 20 nt, Homo sapiens
  source 1..20: mol_type = genomic RNA
attcccctttaggcacagct

SEQ ID NO: 18498 - RNA, 20 nt, Homo sapiens
  source 1..20: mol_type = genomic RNA
ttcccctttaggcacagctt

SEQ ID NO: 18499 - RNA, 20 nt, Homo sapiens
  source 1..20: mol_type = genomic RNA
tcccctttaggcacagctta

SEQ ID NO: 18500 - RNA, 20 nt, Homo sapiens
  source 1..20: mol_type = genomic RNA
cccctttaggcacagcttag

SEQ ID NO: 18501 - RNA, 20 nt, Homo sapiens
  source 1..20: mol_type = genomic RNA
ccctttaggcacagcttaga

SEQ ID NO: 18502 - RNA, 20 nt, Homo sapiens
  source 1..20: mol_type = genomic RNA
cctttaggcacagcttagac

SEQ ID NO: 18503 - RNA, 20 nt, Homo sapiens
  source 1..20: mol_type = genomic RNA
ctttaggcacagcttagaca

SEQ ID NO: 18504 - RNA, 20 nt, Homo sapiens
  source 1..20: mol_type = genomic RNA
tttaggcacagcttagacaa

SEQ ID NO: 18505 - RNA, 20 nt, Homo sapiens
  source 1..20: mol_type = genomic RNA
ttaggcacagcttagacaag

SEQ ID NO: 18506 - RNA, 20 nt, Homo sapiens
  source 1..20: mol_type = genomic RNA
taggcacagcttagacaagc

SEQ ID NO: 18507 - RNA, 20 nt, Homo sapiens
  source 1..20: mol_type = genomic RNA
aggcacagcttagacaagcg

SEQ ID NO: 18508 - RNA, 20 nt, Homo sapiens
  source 1..20: mol_type = genomic RNA
ggcacagcttagacaagcgt

SEQ ID NO: 18509 - RNA, 20 nt, Homo sapiens
  source 1..20: mol_type = genomic RNA
gcacagcttagacaagcgtt

SEQ ID NO: 18510 - RNA, 20 nt, Homo sapiens
  source 1..20: mol_type = genomic RNA
cacagcttagacaagcgtta

SEQ ID NO: 18511 - RNA, 20 nt, Homo sapiens
  source 1..20: mol_type = genomic RNA
acagcttagacaagcgttac

SEQ ID NO: 18512 - RNA, 20 nt, Homo sapiens
  source 1..20: mol_type = genomic RNA
cagcttagacaagcgttaca

SEQ ID NO: 18513 - RNA, 20 nt, Homo sapiens
  source 1..20: mol_type = genomic RNA
agcttagacaagcgttacat

SEQ ID NO: 18514 - RNA, 20 nt, Homo sapiens
  source 1..20: mol_type = genomic RNA
gcttagacaagcgttacatc

SEQ ID NO: 18515 - RNA, 20 nt, Homo sapiens
  source 1..20: mol_type = genomic RNA
cttagacaagcgttacatca

SEQ ID NO: 18516 - RNA, 20 nt, Homo sapiens
  source 1..20: mol_type = genomic RNA
ttagacaagcgttacatcac

SEQ ID NO: 18517 - RNA, 20 nt, Homo sapiens
  source 1..20: mol_type = genomic RNA
tagacaagcgttacatcaca

SEQ ID NO: 18518 - RNA, 20 nt, Homo sapiens
  source 1..20: mol_type = genomic RNA
agacaagcgttacatcacat

SEQ ID NO: 18519 - RNA, 20 nt, Homo sapiens
  source 1..20: mol_type = genomic RNA
gacaagcgttacatcacatg

SEQ ID NO: 18520 - RNA, 20 nt, Homo sapiens
  source 1..20: mol_type = genomic RNA
acaagcgttacatcacatga

SEQ ID NO: 18521 - RNA, 20 nt, Homo sapiens
  source 1..20: mol_type = genomic RNA
caagcgttacatcacatgag

SEQ ID NO: 18522 - RNA, 20 nt, Homo sapiens
  source 1..20: mol_type = genomic RNA
aagcgttacatcacatgagt

SEQ ID NO: 18523 - RNA, 20 nt, Homo sapiens
  source 1..20: mol_type = genomic RNA
agcgttacatcacatgagtg

SEQ ID NO: 18524 - RNA, 20 nt, Homo sapiens
  source 1..20: mol_type = genomic RNA
gcgttacatcacatgagtga

SEQ ID NO: 18525 - RNA, 20 nt, Homo sapiens
  source 1..20: mol_type = genomic RNA
cgttacatcacatgagtgat

SEQ ID NO: 18526 - RNA, 20 nt, Homo sapiens
  source 1..20: mol_type = genomic RNA
gttacatcacatgagtgatc

SEQ ID NO: 18527 - RNA, 20 nt, Homo sapiens
  source 1..20: mol_type = genomic RNA
ttacatcacatgagtgatca

SEQ ID NO: 18528 - RNA, 20 nt, Homo sapiens
  source 1..20: mol_type = genomic RNA
tacatcacatgagtgatcat

SEQ ID NO: 18529 - RNA, 20 nt, Homo sapiens
  source 1..20: mol_type = genomic RNA
acatcacatgagtgatcatt

SEQ ID NO: 18530 - RNA, 20 nt, Homo sapiens
  source 1..20: mol_type = genomic RNA
catcacatgagtgatcattg

SEQ ID NO: 18531 - RNA, 20 nt, Homo sapiens
  source 1..20: mol_type = genomic RNA
atcacatgagtgatcattgc

SEQ ID NO: 18532 - RNA, 20 nt, Homo sapiens
  source 1..20: mol_type = genomic RNA
tcacatgagtgatcattgca

SEQ ID NO: 18533 - RNA, 20 nt, Homo sapiens
  source 1..20: mol_type = genomic RNA
cacatgagtgatcattgcag

SEQ ID NO: 18534 - RNA, 20 nt, Homo sapiens
  source 1..20: mol_type = genomic RNA
acatgagtgatcattgcaga

SEQ ID NO: 18535 - RNA, 20 nt, Homo sapiens
  source 1..20: mol_type = genomic RNA
catgagtgatcattgcagag

SEQ ID NO: 18536 - RNA, 20 nt, Homo sapiens
  source 1..20: mol_type = genomic RNA
atgagtgatcattgcagagt

SEQ ID NO: 18537 - RNA, 20 nt, Homo sapiens
  source 1..20: mol_type = genomic RNA
tgagtgatcattgcagagtt

SEQ ID NO: 18538 - RNA, 20 nt, Homo sapiens
  source 1..20: mol_type = genomic RNA
gagtgatcattgcagagtta

SEQ ID NO: 18539 - RNA, 20 nt, Homo sapiens
  source 1..20: mol_type = genomic RNA
agtgatcattgcagagttat

SEQ ID NO: 18540 - RNA, 20 nt, Homo sapiens
  source 1..20: mol_type = genomic RNA
gtgatcattgcagagttatg

SEQ ID NO: 18541 - RNA, 20 nt, Homo sapiens
  source 1..20: mol_type = genomic RNA
tgatcattgcagagttatgt

SEQ ID NO: 18542 - RNA, 20 nt, Homo sapiens
  source 1..20: mol_type = genomic RNA
gatcattgcagagttatgtc

SEQ ID NO: 18543 - RNA, 20 nt, Homo sapiens
  source 1..20: mol_type = genomic RNA
atcattgcagagttatgtca

SEQ ID NO: 18544 - RNA, 20 nt, Homo sapiens
  source 1..20: mol_type = genomic RNA
tcattgcagagttatgtcac

SEQ ID NO: 18545 - RNA, 20 nt, Homo sapiens
  source 1..20: mol_type = genomic RNA
cattgcagagttatgtcact

SEQ ID NO: 18546 - RNA, 20 nt, Homo sapiens
  source 1..20: mol_type = genomic RNA
attgcagagttatgtcacta

SEQ ID NO: 18547 - RNA, 20 nt, Homo sapiens
  source 1..20: mol_type = genomic RNA
ttgcagagttatgtcactat

SEQ ID NO: 18548 - RNA, 20 nt, Homo sapiens
  source 1..20: mol_type = genomic RNA
tgcagagttatgtcactatg

SEQ ID NO: 18549 - RNA, 20 nt, Homo sapiens
  source 1..20: mol_type = genomic RNA
gcagagttatgtcactatgc

SEQ ID NO: 18550 - RNA, 20 nt, Homo sapiens
  source 1..20: mol_type = genomic RNA
cagagttatgtcactatgcc

SEQ ID NO: 18551 - RNA, 20 nt, Homo sapiens
  source 1..20: mol_type = genomic RNA
agagttatgtcactatgccc

SEQ ID NO: 18552 - RNA, 20 nt, Homo sapiens
  source 1..20: mol_type = genomic RNA
gagttatgtcactatgcccc

SEQ ID NO: 18553 - RNA, 20 nt, Homo sapiens
  source 1..20: mol_type = genomic RNA
agttatgtcactatgccccc

SEQ ID NO: 18554 - RNA, 20 nt, Homo sapiens
  source 1..20: mol_type = genomic RNA
gttatgtcactatgccccca

SEQ ID NO: 18555 - RNA, 20 nt, Homo sapiens
  source 1..20: mol_type = genomic RNA
ttatgtcactatgcccccat

SEQ ID NO: 18556 - RNA, 20 nt, Homo sapiens
  source 1..20: mol_type = genomic RNA
tatgtcactatgcccccata

SEQ ID NO: 18557 - RNA, 20 nt, Homo sapiens
  source 1..20: mol_type = genomic RNA
atgtcactatgcccccatag

SEQ ID NO: 18558 - RNA, 20 nt, Homo sapiens
  source 1..20: mol_type = genomic RNA
tgtcactatgcccccatagg

SEQ ID NO: 18559 - RNA, 20 nt, Homo sapiens
  source 1..20: mol_type = genomic RNA
gtcactatgcccccataggc

SEQ ID NO: 18560 - RNA, 20 nt, Homo sapiens
  source 1..20: mol_type = genomic RNA
tcactatgcccccataggca

SEQ ID NO: 18561 - RNA, 20 nt, Homo sapiens
  source 1..20: mol_type = genomic RNA
cactatgcccccataggcag

SEQ ID NO: 18562 - RNA, 20 nt, Homo sapiens
  source 1..20: mol_type = genomic RNA
ctatgcccccataggcagat

SEQ ID NO: 18563 - RNA, 20 nt, Homo sapiens
  source 1..20: mol_type = genomic RNA
tatgcccccataggcagatc

SEQ ID NO: 18564 - RNA, 20 nt, Homo sapiens
  source 1..20: mol_type = genomic RNA
cccccataggcagatccaag

SEQ ID NO: 18565 - RNA, 20 nt, Homo sapiens
  source 1..20: mol_type = genomic RNA
ccccataggcagatccaaga

SEQ ID NO: 18566 - RNA, 20 nt, Homo sapiens
  source 1..20: mol_type = genomic RNA
cccataggcagatccaagac

SEQ ID NO: 18567 - RNA, 20 nt, Homo sapiens
  source 1..20: mol_type = genomic RNA
ccataggcagatccaagaca

SEQ ID NO: 18568 - RNA, 20 nt, Homo sapiens
  source 1..20: mol_type = genomic RNA
cataggcagatccaagacaa

SEQ ID NO: 18569 - RNA, 20 nt, Homo sapiens
  source 1..20: mol_type = genomic RNA
ataggcagatccaagacaag

SEQ ID NO: 18570 - RNA, 20 nt, Homo sapiens
  source 1..20: mol_type = genomic RNA
taggcagatccaagacaaga

SEQ ID NO: 18571 - RNA, 20 nt, Homo sapiens
  source 1..20: mol_type = genomic RNA
aggcagatccaagacaagag

SEQ ID NO: 18572 - RNA, 20 nt, Homo sapiens
  source 1..20: mol_type = genomic RNA
ggcagatccaagacaagagt

SEQ ID NO: 18573 - RNA, 20 nt, Homo sapiens
  source 1..20: mol_type = genomic RNA
gcagatccaagacaagagtc

SEQ ID NO: 18574 - RNA, 20 nt, Homo sapiens
  source 1..20: mol_type = genomic RNA
cagatccaagacaagagtcc

SEQ ID NO: 18575 - RNA, 20 nt, Homo sapiens
  source 1..20: mol_type = genomic RNA
agatccaagacaagagtcca

SEQ ID NO: 18576 - RNA, 20 nt, Homo sapiens
  source 1..20: mol_type = genomic RNA
gatccaagacaagagtccat

SEQ ID NO: 18577 - RNA, 20 nt, Homo sapiens
  source 1..20: mol_type = genomic RNA
atccaagacaagagtccatc

SEQ ID NO: 18578 - RNA, 20 nt, Homo sapiens
  source 1..20: mol_type = genomic RNA
tccaagacaagagtccatca

SEQ ID NO: 18579 - RNA, 20 nt, Homo sapiens
  source 1..20: mol_type = genomic RNA
ccaagacaagagtccatcac

SEQ ID NO: 18580 - RNA, 20 nt, Homo sapiens
  source 1..20: mol_type = genomic RNA
caagacaagagtccatcacc

SEQ ID NO: 18581 - RNA, 20 nt, Homo sapiens
  source 1..20: mol_type = genomic RNA
aagacaagagtccatcacct

SEQ ID NO: 18582 - RNA, 20 nt, Homo sapiens
  source 1..20: mol_type = genomic RNA
agacaagagtccatcacctg

SEQ ID NO: 18583 - RNA, 20 nt, Homo sapiens
  source 1..20: mol_type = genomic RNA
gacaagagtccatcacctgg

SEQ ID NO: 18584 - RNA, 20 nt, Homo sapiens
  source 1..20: mol_type = genomic RNA
acaagagtccatcacctggg

SEQ ID NO: 18585 - RNA, 20 nt, Homo sapiens
  source 1..20: mol_type = genomic RNA
caagagtccatcacctgggt

SEQ ID NO: 18586 - RNA, 20 nt, Homo sapiens
  source 1..20: mol_type = genomic RNA
aagagtccatcacctgggtg

SEQ ID NO: 18587 - RNA, 20 nt, Homo sapiens
  source 1..20: mol_type = genomic RNA
agagtccatcacctgggtga

SEQ ID NO: 18588 - RNA, 20 nt, Homo sapiens
  source 1..20: mol_type = genomic RNA
gagtccatcacctgggtgat

SEQ ID NO: 18589 - RNA, 20 nt, Homo sapiens
  source 1..20: mol_type = genomic RNA
agtccatcacctgggtgatc

SEQ ID NO: 18590 - RNA, 20 nt, Homo sapiens
  source 1..20: mol_type = genomic RNA
cctgggtgatcagtgcagaa

SEQ ID NO: 18591 - RNA, 20 nt, Homo sapiens
  source 1..20: mol_type = genomic RNA
ctgggtgatcagtgcagaaa

SEQ ID NO: 18592 - RNA, 20 nt, Homo sapiens
  source 1..20: mol_type = genomic RNA
tgggtgatcagtgcagaaat

SEQ ID NO: 18593 - RNA, 20 nt, Homo sapiens
  source 1..20: mol_type = genomic RNA
gggtgatcagtgcagaaata

SEQ ID NO: 18594 - RNA, 20 nt, Homo sapiens
  source 1..20: mol_type = genomic RNA
ggtgatcagtgcagaaatat

SEQ ID NO: 18595 - RNA, 20 nt, Homo sapiens
  source 1..20: mol_type = genomic RNA
gtgatcagtgcagaaatatg

SEQ ID NO: 18596 - RNA, 20 nt, Homo sapiens
  source 1..20: mol_type = genomic RNA
tgatcagtgcagaaatatgc

SEQ ID NO: 18597 - RNA, 20 nt, Homo sapiens
  source 1..20: mol_type = genomic RNA
gatcagtgcagaaatatgcc

SEQ ID NO: 18598 - RNA, 20 nt, Homo sapiens
  source 1..20: mol_type = genomic RNA
atcagtgcagaaatatgcca

SEQ ID NO: 18599 - RNA, 20 nt, Homo sapiens
  source 1..20: mol_type = genomic RNA
tcagtgcagaaatatgccac

SEQ ID NO: 18600 - RNA, 20 nt, Homo sapiens
  source 1..20: mol_type = genomic RNA
cagtgcagaaatatgccaca

SEQ ID NO: 18601 - RNA, 20 nt, Homo sapiens
  source 1..20: mol_type = genomic RNA
agtgcagaaatatgccacaa

SEQ ID NO: 18602 - RNA, 20 nt, Homo sapiens
  source 1..20: mol_type = genomic RNA
gtgcagaaatatgccacaat

SEQ ID NO: 18603 - RNA, 20 nt, Homo sapiens
  source 1..20: mol_type = genomic RNA
tgcagaaatatgccacaatg

SEQ ID NO: 18604 - RNA, 20 nt, Homo sapiens
  source 1..20: mol_type = genomic RNA
gcagaaatatgccacaatgc

SEQ ID NO: 18605 - RNA, 20 nt, Homo sapiens
  source 1..20: mol_type = genomic RNA
cagaaatatgccacaatgcc

SEQ ID NO: 18606 - RNA, 20 nt, Homo sapiens
  source 1..20: mol_type = genomic RNA
agaaatatgccacaatgccg

SEQ ID NO: 18607 - RNA, 20 nt, Homo sapiens
  source 1..20: mol_type = genomic RNA
gaaatatgccacaatgccgc

SEQ ID NO: 18608 - RNA, 20 nt, Homo sapiens
  source 1..20: mol_type = genomic RNA
aaatatgccacaatgccgcc

SEQ ID NO: 18609 - RNA, 20 nt, Homo sapiens
  source 1..20: mol_type = genomic RNA
aatatgccacaatgccgcca

SEQ ID NO: 18610 - RNA, 20 nt, Homo sapiens
  source 1..20: mol_type = genomic RNA
atatgccacaatgccgccag

SEQ ID NO: 18611 - RNA, 20 nt, Homo sapiens
  source 1..20: mol_type = genomic RNA
tatgccacaatgccgccagt

SEQ ID NO: 18612 - RNA, 20 nt, Homo sapiens
  source 1..20: mol_type = genomic RNA
atgccacaatgccgccagta

SEQ ID NO: 18613 - RNA, 20 nt, Homo sapiens
  source 1..20: mol_type = genomic RNA
tgccacaatgccgccagtag

SEQ ID NO: 18614 - RNA, 20 nt, Homo sapiens
  source 1..20: mol_type = genomic RNA
cacaatgccgccagtaggca

SEQ ID NO: 18615 - RNA, 20 nt, Homo sapiens
  source 1..20: mol_type = genomic RNA
caatgccgccagtaggcaga

SEQ ID NO: 18616 - RNA, 20 nt, Homo sapiens
  source 1..20: mol_type = genomic RNA
aatgccgccagtaggcagat

SEQ ID NO: 18617 - RNA, 20 nt, Homo sapiens
  source 1..20: mol_type = genomic RNA
atgccgccagtaggcagata

SEQ ID NO: 18618 - RNA, 20 nt, Homo sapiens
  source 1..20: mol_type = genomic RNA
tgccgccagtaggcagatat

SEQ ID NO: 18619 - RNA, 20 nt, Homo sapiens
  source 1..20: mol_type = genomic RNA
gccgccagtaggcagatata

SEQ ID NO: 18620 - RNA, 20 nt, Homo sapiens
  source 1..20: mol_type = genomic RNA
ccgccagtaggcagatatag

SEQ ID NO: 18621 - RNA, 20 nt, Homo sapiens
  source 1..20: mol_type = genomic RNA
cgccagtaggcagatataga

SEQ ID NO: 18622 - RNA, 20 nt, Homo sapiens
  source 1..20: mol_type = genomic RNA
gccagtaggcagatatagac

SEQ ID NO: 18623 - RNA, 20 nt, Homo sapiens
  source 1..20: mol_type = genomic RNA
ccagtaggcagatatagaca

SEQ ID NO: 18624 - RNA, 20 nt, Homo sapiens
  source 1..20: mol_type = genomic RNA
cagtaggcagatatagacaa

SEQ ID NO: 18625 - RNA, 20 nt, Homo sapiens
  source 1..20: mol_type = genomic RNA
agtaggcagatatagacaag

SEQ ID NO: 18626 - RNA, 20 nt, Homo sapiens
  source 1..20: mol_type = genomic RNA
gtaggcagatatagacaaga

SEQ ID NO: 18627 - RNA, 20 nt, Homo sapiens
  source 1..20: mol_type = genomic RNA
taggcagatatagacaagag

SEQ ID NO: 18628 - RNA, 20 nt, Homo sapiens
  source 1..20: mol_type = genomic RNA
aggcagatatagacaagagt

SEQ ID NO: 18629 - RNA, 20 nt, Homo sapiens
  source 1..20: mol_type = genomic RNA
ggcagatatagacaagagtt

SEQ ID NO: 18630 - RNA, 20 nt, Homo sapiens
  source 1..20: mol_type = genomic RNA
gcagatatagacaagagtta

SEQ ID NO: 18631 - RNA, 20 nt, Homo sapiens
  source 1..20: mol_type = genomic RNA
cagatatagacaagagttac

SEQ ID NO: 18632 - RNA, 20 nt, Homo sapiens
  source 1..20: mol_type = genomic RNA
agatatagacaagagttaca

SEQ ID NO: 18633 - RNA, 20 nt, Homo sapiens
  source 1..20: mol_type = genomic RNA
gatatagacaagagttacat

SEQ ID NO: 18634 - RNA, 20 nt, Homo sapiens
  source 1..20: mol_type = genomic RNA
atatagacaagagttacatc

SEQ ID NO: 18635 - RNA, 20 nt, Homo sapiens
  source 1..20: mol_type = genomic RNA
tatagacaagagttacatca

SEQ ID NO: 18636 - RNA, 20 nt, Homo sapiens
  source 1..20: mol_type = genomic RNA
atagacaagagttacatcac

SEQ ID NO: 18637 - RNA, 20 nt, Homo sapiens
  source 1..20: mol_type = genomic RNA
acaagagttacatcacctgc

SEQ ID NO: 18638 - RNA, 20 nt, Homo sapiens
  source 1..20: mol_type = genomic RNA
caagagttacatcacctgcg

SEQ ID NO: 18639 - RNA, 20 nt, Homo sapiens
  source 1..20: mol_type = genomic RNA
aagagttacatcacctgcgt

SEQ ID NO: 18640 - RNA, 20 nt, Homo sapiens
  source 1..20: mol_type = genomic RNA
agagttacatcacctgcgtg

SEQ ID NO: 18641 - RNA, 20 nt, Homo sapiens
  source 1..20: mol_type = genomic RNA
gagttacatcacctgcgtga

SEQ ID NO: 18642 - RNA, 20 nt, Homo sapiens
  source 1..20: mol_type = genomic RNA
agttacatcacctgcgtgat

SEQ ID NO: 18643 - RNA, 20 nt, Homo sapiens
  source 1..20: mol_type = genomic RNA
gttacatcacctgcgtgatc

SEQ ID NO: 18644 - RNA, 20 nt, Homo sapiens
  source 1..20: mol_type = genomic RNA
ttacatcacctgcgtgatca

SEQ ID NO: 18645 - RNA, 20 nt, Homo sapiens
  source 1..20: mol_type = genomic RNA
tacatcacctgcgtgatcac

SEQ ID NO: 18646 - RNA, 20 nt, Homo sapiens
  source 1..20: mol_type = genomic RNA
acatcacctgcgtgatcact

SEQ ID NO: 18647 - RNA, 20 nt, Homo sapiens
  source 1..20: mol_type = genomic RNA
catcacctgcgtgatcactg

SEQ ID NO: 18648 - RNA, 20 nt, Homo sapiens
  source 1..20: mol_type = genomic RNA
atcacctgcgtgatcactgc

SEQ ID NO: 18649 - RNA, 20 nt, Homo sapiens
  source 1..20: mol_type = genomic RNA
tcacctgcgtgatcactgca

SEQ ID NO: 18650 - RNA, 20 nt, Homo sapiens
  source 1..20: mol_type = genomic RNA
cacctgcgtgatcactgcag

SEQ ID NO: 18651 - RNA, 20 nt, Homo sapiens
  source 1..20: mol_type = genomic RNA
acctgcgtgatcactgcaga

SEQ ID NO: 18652 - RNA, 20 nt, Homo sapiens
  source 1..20: mol_type = genomic RNA
cctgcgtgatcactgcagag

SEQ ID NO: 18653 - RNA, 20 nt, Homo sapiens
  source 1..20: mol_type = genomic RNA
ctgcgtgatcactgcagaga

SEQ ID NO: 18654 - RNA, 20 nt, Homo sapiens
  source 1..20: mol_type = genomic RNA
tgcgtgatcactgcagagat

SEQ ID NO: 18655 - RNA, 20 nt, Homo sapiens
  source 1..20: mol_type = genomic RNA
gcgtgatcactgcagagata

SEQ ID NO: 18656 - RNA, 20 nt, Homo sapiens
  source 1..20: mol_type = genomic RNA
cgtgatcactgcagagatat

SEQ ID NO: 18657 - RNA, 20 nt, Homo sapiens
  source 1..20: mol_type = genomic RNA
gtgatcactgcagagatata

SEQ ID NO: 18658 - RNA, 20 nt, Homo sapiens
  source 1..20: mol_type = genomic RNA
tgatcactgcagagatatat

SEQ ID NO: 18659 - RNA, 20 nt, Homo sapiens
  source 1..20: mol_type = genomic RNA
gatcactgcagagatatatc

SEQ ID NO: 18660 - RNA, 20 nt, Homo sapiens
  source 1..20: mol_type = genomic RNA
atcactgcagagatatatca

SEQ ID NO: 18661 - RNA, 20 nt, Homo sapiens
  source 1..20: mol_type = genomic RNA
tcactgcagagatatatcac

SEQ ID NO: 18662 - RNA, 20 nt, Homo sapiens
  source 1..20: mol_type = genomic RNA
cactgcagagatatatcaca

SEQ ID NO: 18663 - RNA, 20 nt, Homo sapiens
  source 1..20: mol_type = genomic RNA
actgcagagatatatcacaa

SEQ ID NO: 18664 - RNA, 20 nt, Homo sapiens
  source 1..20: mol_type = genomic RNA
ctgcagagatatatcacaat

SEQ ID NO: 18665 - RNA, 20 nt, Homo sapiens
  source 1..20: mol_type = genomic RNA
tgcagagatatatcacaatg

SEQ ID NO: 18666 - RNA, 20 nt, Homo sapiens
  source 1..20: mol_type = genomic RNA
gcagagatatatcacaatgc

SEQ ID NO: 18667 - RNA, 20 nt, Homo sapiens
  source 1..20: mol_type = genomic RNA
cagagatatatcacaatgcc

SEQ ID NO: 18668 - RNA, 20 nt, Homo sapiens
  source 1..20: mol_type = genomic RNA
agagatatatcacaatgccc

SEQ ID NO: 18669 - RNA, 20 nt, Homo sapiens
  source 1..20: mol_type = genomic RNA
gagatatatcacaatgcccc

SEQ ID NO: 18670 - RNA, 20 nt, Homo sapiens
  source 1..20: mol_type = genomic RNA
agatatatcacaatgcccct

SEQ ID NO: 18671 - RNA, 20 nt, Homo sapiens
  source 1..20: mol_type = genomic RNA
gatatatcacaatgcccctg

SEQ ID NO: 18672 - RNA, 20 nt, Homo sapiens
  source 1..20: mol_type = genomic RNA
atatatcacaatgcccctgt

SEQ ID NO: 18673 - RNA, 20 nt, Homo sapiens
  source 1..20: mol_type = genomic RNA
tatatcacaatgcccctgta

SEQ ID NO: 18674 - RNA, 20 nt, Homo sapiens
  source 1..20: mol_type = genomic RNA
atatcacaatgcccctgtag

SEQ ID NO: 18675 - RNA, 20 nt, Homo sapiens
  source 1..20: mol_type = genomic RNA
tatcacaatgcccctgtagg

SEQ ID NO: 18676 - RNA, 20 nt, Homo sapiens
  source 1..20: mol_type = genomic RNA
atcacaatgcccctgtaggc

SEQ ID NO: 18677 - RNA, 20 nt, Homo sapiens
  source 1..20: mol_type = genomic RNA
gcagagcctagacaagagtc

SEQ ID NO: 18678 - RNA, 20 nt, Homo sapiens
  source 1..20: mol_type = genomic RNA
cagagcctagacaagagtcc

SEQ ID NO: 18679 - RNA, 20 nt, Homo sapiens
  source 1..20: mol_type = genomic RNA
gagcctagacaagagtccca

SEQ ID NO: 18680 - RNA, 20 nt, Homo sapiens
  source 1..20: mol_type = genomic RNA
agcctagacaagagtcccat

SEQ ID NO: 18681 - RNA, 20 nt, Homo sapiens
  source 1..20: mol_type = genomic RNA
gcctagacaagagtcccatc

SEQ ID NO: 18682 - RNA, 20 nt, Homo sapiens
  source 1..20: mol_type = genomic RNA
cctagacaagagtcccatca

SEQ ID NO: 18683 - RNA, 20 nt, Homo sapiens
  source 1..20: mol_type = genomic RNA
ctagacaagagtcccatcac

SEQ ID NO: 18684 - RNA, 20 nt, Homo sapiens
  source 1..20: mol_type = genomic RNA
tagacaagagtcccatcacc

SEQ ID NO: 18685 - RNA, 20 nt, Homo sapiens
  source 1..20: mol_type = genomic RNA
agacaagagtcccatcacct

SEQ ID NO: 18686 - RNA, 20 nt, Homo sapiens
  source 1..20: mol_type = genomic RNA
gacaagagtcccatcacctg

SEQ ID NO: 18687 - RNA, 20 nt, Homo sapiens
  source 1..20: mol_type = genomic RNA
acaagagtcccatcacctgg

SEQ ID NO: 18688 - RNA, 20 nt, Homo sapiens
  source 1..20: mol_type = genomic RNA
caagagtcccatcacctggg

SEQ ID NO: 18689 - RNA, 20 nt, Homo sapiens
  source 1..20: mol_type = genomic RNA
ctgggtgatcagtgcagagt

SEQ ID NO: 18690 - RNA, 20 nt, Homo sapiens
  source 1..20: mol_type = genomic RNA
tgggtgatcagtgcagagtt

SEQ ID NO: 18691 - RNA, 20 nt, Homo sapiens
  source 1..20: mol_type = genomic RNA
gggtgatcagtgcagagtta

SEQ ID NO: 18692 - RNA, 20 nt, Homo sapiens
  source 1..20: mol_type = genomic RNA
ggtgatcagtgcagagttat

SEQ ID NO: 18693 - RNA, 20 nt, Homo sapiens
  source 1..20: mol_type = genomic RNA
gtgatcagtgcagagttatg

SEQ ID NO: 18694 - RNA, 20 nt, Homo sapiens
  source 1..20: mol_type = genomic RNA
tgatcagtgcagagttatgt

SEQ ID NO: 18695 - RNA, 20 nt, Homo sapiens
  source 1..20: mol_type = genomic RNA
gatcagtgcagagttatgtc

SEQ ID NO: 18696 - RNA, 20 nt, Homo sapiens
  source 1..20: mol_type = genomic RNA
atcagtgcagagttatgtca

SEQ ID NO: 18697 - RNA, 20 nt, Homo sapiens
  source 1..20: mol_type = genomic RNA
tcagtgcagagttatgtcac

SEQ ID NO: 18698 - RNA, 20 nt, Homo sapiens
  source 1..20: mol_type = genomic RNA
cagtgcagagttatgtcaca

SEQ ID NO: 18699 - RNA, 20 nt, Homo sapiens
  source 1..20: mol_type = genomic RNA
agtgcagagttatgtcacaa

SEQ ID NO: 18700 - RNA, 20 nt, Homo sapiens
  source 1..20: mol_type = genomic RNA
gtgcagagttatgtcacaat

SEQ ID NO: 18701 - RNA, 20 nt, Homo sapiens
  source 1..20: mol_type = genomic RNA
tgcagagttatgtcacaatg

SEQ ID NO: 18702 - RNA, 20 nt, Homo sapiens
  source 1..20: mol_type = genomic RNA
gcagagttatgtcacaatgc

SEQ ID NO: 18703 - RNA, 20 nt, Homo sapiens
  source 1..20: mol_type = genomic RNA
cagagttatgtcacaatgcc

SEQ ID NO: 18704 - RNA, 20 nt, Homo sapiens
  source 1..20: mol_type = genomic RNA
agagttatgtcacaatgccc

SEQ ID NO: 18705 - RNA, 20 nt, Homo sapiens
  source 1..20: mol_type = genomic RNA
gagttatgtcacaatgcccc

SEQ ID NO: 18706 - RNA, 20 nt, Homo sapiens
  source 1..20: mol_type = genomic RNA
agttatgtcacaatgccccc

SEQ ID NO: 18707 - RNA, 20 nt, Homo sapiens
  source 1..20: mol_type = genomic RNA
gttatgtcacaatgccccct

SEQ ID NO: 18708 - RNA, 20 nt, Homo sapiens
  source 1..20: mol_type = genomic RNA
ttatgtcacaatgccccctt

SEQ ID NO: 18709 - RNA, 20 nt, Homo sapiens
  source 1..20: mol_type = genomic RNA
tatgtcacaatgcccccttt

SEQ ID NO: 18710 - RNA, 20 nt, Homo sapiens
  source 1..20: mol_type = genomic RNA
atgtcacaatgccccctttt

SEQ ID NO: 18711 - RNA, 20 nt, Homo sapiens
  source 1..20: mol_type = genomic RNA
tgtcacaatgcccccttttg

SEQ ID NO: 18712 - RNA, 20 nt, Homo sapiens
  source 1..20: mol_type = genomic RNA
gtcacaatgcccccttttgg

SEQ ID NO: 18713 - RNA, 20 nt, Homo sapiens
  source 1..20: mol_type = genomic RNA
tcacaatgcccccttttggc

SEQ ID NO: 18714 - RNA, 20 nt, Homo sapiens
  source 1..20: mol_type = genomic RNA
cacaatgcccccttttggca

SEQ ID NO: 18715 - RNA, 20 nt, Homo sapiens
  source 1..20: mol_type = genomic RNA
acaatgcccccttttggcag

SEQ ID NO: 18716 - RNA, 20 nt, Homo sapiens
  source 1..20: mol_type = genomic RNA
caatgcccccttttggcaga

SEQ ID NO: 18717 - RNA, 20 nt, Homo sapiens
  source 1..20: mol_type = genomic RNA
aatgcccccttttggcagag

SEQ ID NO: 18718 - RNA, 20 nt, Homo sapiens
  source 1..20: mol_type = genomic RNA
atgcccccttttggcagagc

SEQ ID NO: 18719 - RNA, 20 nt, Homo sapiens
  source 1..20: mol_type = genomic RNA
tgcccccttttggcagagcc

SEQ ID NO: 18720 - RNA, 20 nt, Homo sapiens
  source 1..20: mol_type = genomic RNA
gcccccttttggcagagcct

SEQ ID NO: 18721 - RNA, 20 nt, Homo sapiens
  source 1..20: mol_type = genomic RNA
cccccttttggcagagccta

SEQ ID NO: 18722 - RNA, 20 nt, Homo sapiens
  source 1..20: mol_type = genomic RNA
ccccttttggcagagcctag

SEQ ID NO: 18723 - RNA, 20 nt, Homo sapiens
  source 1..20: mol_type = genomic RNA
cccttttggcagagcctaga

SEQ ID NO: 18724 - RNA, 20 nt, Homo sapiens
  source 1..20: mol_type = genomic RNA
ccttttggcagagcctagac

SEQ ID NO: 18725 - RNA, 20 nt, Homo sapiens
  source 1..20: mol_type = genomic RNA
cttttggcagagcctagaca

SEQ ID NO: 18726 - RNA, 20 nt, Homo sapiens
  source 1..20: mol_type = genomic RNA
ttttggcagagcctagacaa

SEQ ID NO: 18727 - RNA, 20 nt, Homo sapiens
  source 1..20: mol_type = genomic RNA
tttggcagagcctagacaag

SEQ ID NO: 18728 - RNA, 20 nt, Homo sapiens
  source 1..20: mol_type = genomic RNA
gcagagcctagacaagggtt

SEQ ID NO: 18729 - RNA, 20 nt, Homo sapiens
  source 1..20: mol_type = genomic RNA
cagagcctagacaagggtta

SEQ ID NO: 18730 - RNA, 20 nt, Homo sapiens
  source 1..20: mol_type = genomic RNA
agagcctagacaagggttac

SEQ ID NO: 18731 - RNA, 20 nt, Homo sapiens
  source 1..20: mol_type = genomic RNA
gagcctagacaagggttaca

SEQ ID NO: 18732 - RNA, 20 nt, Homo sapiens
  source 1..20: mol_type = genomic RNA
agcctagacaagggttacat

SEQ ID NO: 18733 - RNA, 20 nt, Homo sapiens
  source 1..20: mol_type = genomic RNA
gcctagacaagggttacatc

SEQ ID NO: 18734 - RNA, 20 nt, Homo sapiens
  source 1..20: mol_type = genomic RNA
cctagacaagggttacatca

SEQ ID NO: 18735 - RNA, 20 nt, Homo sapiens
  source 1..20: mol_type = genomic RNA
ctagacaagggttacatcac

SEQ ID NO: 18736 - RNA, 20 nt, Homo sapiens
  source 1..20: mol_type = genomic RNA
tagacaagggttacatcacc

SEQ ID NO: 18737 - RNA, 20 nt, Homo sapiens
  source 1..20: mol_type = genomic RNA
agacaagggttacatcacct

SEQ ID NO: 18738 - RNA, 20 nt, Homo sapiens
  source 1..20: mol_type = genomic RNA
acaagggttacatcacctgg

SEQ ID NO: 18739 - RNA, 20 nt, Homo sapiens
  source 1..20: mol_type = genomic RNA
caagggttacatcacctggg

SEQ ID NO: 18740 - RNA, 20 nt, Homo sapiens
  source 1..20: mol_type = genomic RNA
aagggttacatcacctgggt

SEQ ID NO: 18741 - RNA, 20 nt, Homo sapiens
  source 1..20: mol_type = genomic RNA
agggttacatcacctgggtg

SEQ ID NO: 18742 - RNA, 20 nt, Homo sapiens
  source 1..20: mol_type = genomic RNA
gggttacatcacctgggtga

SEQ ID NO: 18743 - RNA, 20 nt, Homo sapiens
  source 1..20: mol_type = genomic RNA
ggttacatcacctgggtgat

SEQ ID NO: 18744 - RNA, 20 nt, Homo sapiens
  source 1..20: mol_type = genomic RNA
tgcagagatatgtcacaatg

SEQ ID NO: 18745 - RNA, 20 nt, Homo sapiens
  source 1..20: mol_type = genomic RNA
gcagagatatgtcacaatgt

SEQ ID NO: 18746 - RNA, 20 nt, Homo sapiens
  source 1..20: mol_type = genomic RNA
cagagatatgtcacaatgtc

SEQ ID NO: 18747 - RNA, 20 nt, Homo sapiens
  source 1..20: mol_type = genomic RNA
agagatatgtcacaatgtcc

SEQ ID NO: 18748 - RNA, 20 nt, Homo sapiens
  source 1..20: mol_type = genomic RNA
gagatatgtcacaatgtccc

SEQ ID NO: 18749 - RNA, 20 nt, Homo sapiens
  source 1..20: mol_type = genomic RNA
agatatgtcacaatgtccct

SEQ ID NO: 18750 - RNA, 20 nt, Homo sapiens
  source 1..20: mol_type = genomic RNA
gatatgtcacaatgtccctg

SEQ ID NO: 18751 - RNA, 20 nt, Homo sapiens
  source 1..20: mol_type = genomic RNA
atatgtcacaatgtccctgt

SEQ ID NO: 18752 - RNA, 20 nt, Homo sapiens
  source 1..20: mol_type = genomic RNA
tatgtcacaatgtccctgta

SEQ ID NO: 18753 - RNA, 20 nt, Homo sapiens
  source 1..20: mol_type = genomic RNA
atgtcacaatgtccctgtag

SEQ ID NO: 18754 - RNA, 20 nt, Homo sapiens
  source 1..20: mol_type = genomic RNA
tgtcacaatgtccctgtagc

SEQ ID NO: 18755 - RNA, 20 nt, Homo sapiens
  source 1..20: mol_type = genomic RNA
gtcacaatgtccctgtagcc

SEQ ID NO: 18756 - RNA, 20 nt, Homo sapiens
  source 1..20: mol_type = genomic RNA
tcacaatgtccctgtagcca

SEQ ID NO: 18757 - RNA, 20 nt, Homo sapiens
  source 1..20: mol_type = genomic RNA
cacaatgtccctgtagccat

SEQ ID NO: 18758 - RNA, 20 nt, Homo sapiens
  source 1..20: mol_type = genomic RNA
acaatgtccctgtagccata

SEQ ID NO: 18759 - RNA, 20 nt, Homo sapiens
  source 1..20: mol_type = genomic RNA
caatgtccctgtagccatat

SEQ ID NO: 18760 - RNA, 20 nt, Homo sapiens
  source 1..20: mol_type = genomic RNA
aatgtccctgtagccatatc

SEQ ID NO: 18761 - RNA, 20 nt, Homo sapiens
  source 1..20: mol_type = genomic RNA
atgtccctgtagccatatcc

SEQ ID NO: 18762 - RNA, 20 nt, Homo sapiens
  source 1..20: mol_type = genomic RNA
tgtccctgtagccatatcct

SEQ ID NO: 18763 - RNA, 20 nt, Homo sapiens
  source 1..20: mol_type = genomic RNA
gtccctgtagccatatcctt

SEQ ID NO: 18764 - RNA, 20 nt, Homo sapiens
  source 1..20: mol_type = genomic RNA
tccctgtagccatatccttg

SEQ ID NO: 18765 - RNA, 20 nt, Homo sapiens
  source 1..20: mol_type = genomic RNA
ccctgtagccatatccttga

SEQ ID NO: 18766 - RNA, 20 nt, Homo sapiens
  source 1..20: mol_type = genomic RNA
cctgtagccatatccttgac

SEQ ID NO: 18767 - RNA, 20 nt, Homo sapiens
  source 1..20: mol_type = genomic RNA
ctgtagccatatccttgaca

SEQ ID NO: 18768 - RNA, 20 nt, Homo sapiens
  source 1..20: mol_type = genomic RNA
tgtagccatatccttgacaa

SEQ ID NO: 18769 - RNA, 20 nt, Homo sapiens
  source 1..20: mol_type = genomic RNA
gtagccatatccttgacaaa

SEQ ID NO: 18770 - RNA, 20 nt, Homo sapiens
  source 1..20: mol_type = genomic RNA
tagccatatccttgacaaaa

SEQ ID NO: 18771 - RNA, 20 nt, Homo sapiens
  source 1..20: mol_type = genomic RNA
agccatatccttgacaaaag

SEQ ID NO: 18772 - RNA, 20 nt, Homo sapiens
  source 1..20: mol_type = genomic RNA
gccatatccttgacaaaagt

SEQ ID NO: 18773 - RNA, 20 nt, Homo sapiens
  source 1..20: mol_type = genomic RNA
ccatatccttgacaaaagtg

SEQ ID NO: 18774 - RNA, 20 nt, Homo sapiens
  source 1..20: mol_type = genomic RNA
catatccttgacaaaagtga

SEQ ID NO: 18775 - RNA, 20 nt, Homo sapiens
  source 1..20: mol_type = genomic RNA
atatccttgacaaaagtgac

SEQ ID NO: 18776 - RNA, 20 nt, Homo sapiens
  source 1..20: mol_type = genomic RNA
tatccttgacaaaagtgaca

SEQ ID NO: 18777 - RNA, 20 nt, Homo sapiens
  source 1..20: mol_type = genomic RNA
atccttgacaaaagtgacat

SEQ ID NO: 18778 - RNA, 20 nt, Homo sapiens
  source 1..20: mol_type = genomic RNA
tccttgacaaaagtgacatc

SEQ ID NO: 18779 - RNA, 20 nt, Homo sapiens
  source 1..20: mol_type = genomic RNA
ccttgacaaaagtgacatca

SEQ ID NO: 18780 - RNA, 20 nt, Homo sapiens
  source 1..20: mol_type = genomic RNA
cttgacaaaagtgacatcac

SEQ ID NO: 18781 - RNA, 20 nt, Homo sapiens
  source 1..20: mol_type = genomic RNA
ttgacaaaagtgacatcacc

SEQ ID NO: 18782 - RNA, 20 nt, Homo sapiens
  source 1..20: mol_type = genomic RNA
tgacaaaagtgacatcacct

SEQ ID NO: 18783 - RNA, 20 nt, Homo sapiens
  source 1..20: mol_type = genomic RNA
gacaaaagtgacatcacctg

SEQ ID NO: 18784 - RNA, 20 nt, Homo sapiens
  source 1..20: mol_type = genomic RNA
acaaaagtgacatcacctgg

SEQ ID NO: 18785 - RNA, 20 nt, Homo sapiens
  source 1..20: mol_type = genomic RNA
caaaagtgacatcacctggg

SEQ ID NO: 18786 - RNA, 20 nt, Homo sapiens
  source 1..20: mol_type = genomic RNA
aaaagtgacatcacctgggt

SEQ ID NO: 18787 - RNA, 20 nt, Homo sapiens
  source 1..20: mol_type = genomic RNA
aaagtgacatcacctgggtg

SEQ ID NO: 18788 - RNA, 20 nt, Homo sapiens
  source 1..20: mol_type = genomic RNA
aagtgacatcacctgggtga

SEQ ID NO: 18789 - RNA, 20 nt, Homo sapiens
  source 1..20: mol_type = genomic RNA
agtgacatcacctgggtgat

SEQ ID NO: 18790 - RNA, 20 nt, Homo sapiens
  source 1..20: mol_type = genomic RNA
gtgacatcacctgggtgatc

SEQ ID NO: 18791 - RNA, 20 nt, Homo sapiens
  source 1..20: mol_type = genomic RNA
tgacatcacctgggtgatca

SEQ ID NO: 18792 - RNA, 20 nt, Homo sapiens
  source 1..20: mol_type = genomic RNA
gacatcacctgggtgatcag

SEQ ID NO: 18793 - RNA, 20 nt, Homo sapiens
  source 1..20: mol_type = genomic RNA
atcacctgggtgatcagtgt

SEQ ID NO: 18794 - RNA, 20 nt, Homo sapiens
  source 1..20: mol_type = genomic RNA
tcacctgggtgatcagtgtg

SEQ ID NO: 18795 - RNA, 20 nt, Homo sapiens
  source 1..20: mol_type = genomic RNA
cacctgggtgatcagtgtgg

SEQ ID NO: 18796 - RNA, 20 nt, Homo sapiens
  source 1..20: mol_type = genomic RNA
acctgggtgatcagtgtgga

SEQ ID NO: 18797 - RNA, 20 nt, Homo sapiens
  source 1..20: mol_type = genomic RNA
cctgggtgatcagtgtggag

SEQ ID NO: 18798 - RNA, 20 nt, Homo sapiens
  source 1..20: mol_type = genomic RNA
ctgggtgatcagtgtggaga

SEQ ID NO: 18799 - RNA, 20 nt, Homo sapiens
  source 1..20: mol_type = genomic RNA
tgggtgatcagtgtggagat

SEQ ID NO: 18800 - RNA, 20 nt, Homo sapiens
  source 1..20: mol_type = genomic RNA
gggtgatcagtgtggagata

SEQ ID NO: 18801 - RNA, 20 nt, Homo sapiens
  source 1..20: mol_type = genomic RNA
ggtgatcagtgtggagatat

SEQ ID NO: 18802 - RNA, 20 nt, Homo sapiens
  source 1..20: mol_type = genomic RNA
gtgatcagtgtggagatatg

SEQ ID NO: 18803 - RNA, 20 nt, Homo sapiens
  source 1..20: mol_type = genomic RNA
tgatcagtgtggagatatgt

SEQ ID NO: 18804 - RNA, 20 nt, Homo sapiens
  source 1..20: mol_type = genomic RNA
gatcagtgtggagatatgtc

SEQ ID NO: 18805 - RNA, 20 nt, Homo sapiens
  source 1..20: mol_type = genomic RNA
atcagtgtggagatatgtca

SEQ ID NO: 18806 - RNA, 20 nt, Homo sapiens
  source 1..20: mol_type = genomic RNA
tcagtgtggagatatgtcac

SEQ ID NO: 18807 - RNA, 20 nt, Homo sapiens
  source 1..20: mol_type = genomic RNA
cagtgtggagatatgtcaca

SEQ ID NO: 18808 - RNA, 20 nt, Homo sapiens
  source 1..20: mol_type = genomic RNA
agtgtggagatatgtcacaa

SEQ ID NO: 18809 - RNA, 20 nt, Homo sapiens
  source 1..20: mol_type = genomic RNA
gtgtggagatatgtcacaat

SEQ ID NO: 18810 - RNA, 20 nt, Homo sapiens
  source 1..20: mol_type = genomic RNA
tgtggagatatgtcacaatg

SEQ ID NO: 18811 - RNA, 20 nt, Homo sapiens
  source 1..20: mol_type = genomic RNA
gtggagatatgtcacaatgt

SEQ ID NO: 18812 - RNA, 20 nt, Homo sapiens
  source 1..20: mol_type = genomic RNA
tggagatatgtcacaatgtc

SEQ ID NO: 18813 - RNA, 20 nt, Homo sapiens
  source 1..20: mol_type = genomic RNA
ggagatatgtcacaatgtct

SEQ ID NO: 18814 - RNA, 20 nt, Homo sapiens
  source 1..20: mol_type = genomic RNA
gagatatgtcacaatgtctc

SEQ ID NO: 18815 - RNA, 20 nt, Homo sapiens
  source 1..20: mol_type = genomic RNA
agatatgtcacaatgtctcc

SEQ ID NO: 18816 - RNA, 20 nt, Homo sapiens
  source 1..20: mol_type = genomic RNA
gatatgtcacaatgtctcca

SEQ ID NO: 18817 - RNA, 20 nt, Homo sapiens
  source 1..20: mol_type = genomic RNA
atatgtcacaatgtctccag

SEQ ID NO: 18818 - RNA, 20 nt, Homo sapiens
  source 1..20: mol_type = genomic RNA
tatgtcacaatgtctccagt

SEQ ID NO: 18819 - RNA, 20 nt, Homo sapiens
  source 1..20: mol_type = genomic RNA
atgtcacaatgtctccagta

SEQ ID NO: 18820 - RNA, 20 nt, Homo sapiens
  source 1..20: mol_type = genomic RNA
tgtcacaatgtctccagtag

SEQ ID NO: 18821 - RNA, 20 nt, Homo sapiens
  source 1..20: mol_type = genomic RNA
gtcacaatgtctccagtagg

SEQ ID NO: 18822 - RNA, 20 nt, Homo sapiens
  source 1..20: mol_type = genomic RNA
tcacaatgtctccagtaggc

SEQ ID NO: 18823 - RNA, 20 nt, Homo sapiens
  source 1..20: mol_type = genomic RNA
cacaatgtctccagtaggca

SEQ ID NO: 18824 - RNA, 20 nt, Homo sapiens
  source 1..20: mol_type = genomic RNA
acaatgtctccagtaggcag

SEQ ID NO: 18825 - RNA, 20 nt, Homo sapiens
  source 1..20: mol_type = genomic RNA
caatgtctccagtaggcaga

SEQ ID NO: 18826 - RNA, 20 nt, Homo sapiens
  source 1..20: mol_type = genomic RNA
aatgtctccagtaggcagag

SEQ ID NO: 18827 - RNA, 20 nt, Homo sapiens
  source 1..20: mol_type = genomic RNA
atgtctccagtaggcagagc

SEQ ID NO: 18828 - RNA, 20 nt, Homo sapiens
  source 1..20: mol_type = genomic RNA
gtctccagtaggcagagcct

SEQ ID NO: 18829 - RNA, 20 nt, Homo sapiens
  source 1..20: mol_type = genomic RNA
tctccagtaggcagagccta

SEQ ID NO: 18830 - RNA, 20 nt, Homo sapiens
  source 1..20: mol_type = genomic RNA
ctccagtaggcagagcctag

SEQ ID NO: 18831 - RNA, 20 nt, Homo sapiens
  source 1..20: mol_type = genomic RNA
cagtaggcagagcctagaca

SEQ ID NO: 18832 - RNA, 20 nt, Homo sapiens
  source 1..20: mol_type = genomic RNA
agtaggcagagcctagacaa

SEQ ID NO: 18833 - RNA, 20 nt, Homo sapiens
  source 1..20: mol_type = genomic RNA
acatcacctgggtgatcagg

SEQ ID NO: 18834 - RNA, 20 nt, Homo sapiens
  source 1..20: mol_type = genomic RNA
catcacctgggtgatcaggg

SEQ ID NO: 18835 - RNA, 20 nt, Homo sapiens
  source 1..20: mol_type = genomic RNA
ggtgatcagggcagagatat

SEQ ID NO: 18836 - RNA, 20 nt, Homo sapiens
  source 1..20: mol_type = genomic RNA
gtgatcagggcagagatatg

SEQ ID NO: 18837 - RNA, 20 nt, Homo sapiens
  source 1..20: mol_type = genomic RNA
tgatcagggcagagatatgt

SEQ ID NO: 18838 - RNA, 20 nt, Homo sapiens
  source 1..20: mol_type = genomic RNA
gatcagggcagagatatgtc

SEQ ID NO: 18839 - RNA, 20 nt, Homo sapiens
  source 1..20: mol_type = genomic RNA
atcagggcagagatatgtca

SEQ ID NO: 18840 - RNA, 20 nt, Homo sapiens
  source 1..20: mol_type = genomic RNA
tcagggcagagatatgtcac

SEQ ID NO: 18841 - RNA, 20 nt, Homo sapiens
  source 1..20: mol_type = genomic RNA
cagggcagagatatgtcaca

SEQ ID NO: 18842 - RNA, 20 nt, Homo sapiens
  source 1..20: mol_type = genomic RNA
agggcagagatatgtcacaa

SEQ ID NO: 18843 - RNA, 20 nt, Homo sapiens
  source 1..20: mol_type = genomic RNA
gggcagagatatgtcacaat

SEQ ID NO: 18844 - RNA, 20 nt, Homo sapiens
  source 1..20: mol_type = genomic RNA
ggcagagatatgtcacaatg

SEQ ID NO: 18845 - RNA, 20 nt, Homo sapiens
  source 1..20: mol_type = genomic RNA
gcagagatatgtcacaatgc

SEQ ID NO: 18846 - RNA, 20 nt, Homo sapiens
  source 1..20: mol_type = genomic RNA
cagagatatgtcacaatgcc

SEQ ID NO: 18847 - RNA, 20 nt, Homo sapiens
  source 1..20: mol_type = genomic RNA
agagatatgtcacaatgccc

SEQ ID NO: 18848 - RNA, 20 nt, Homo sapiens
  source 1..20: mol_type = genomic RNA
gagatatgtcacaatgcccc

SEQ ID NO: 18849 - RNA, 20 nt, Homo sapiens
  source 1..20: mol_type = genomic RNA
agatatgtcacaatgccccc

SEQ ID NO: 18850 - RNA, 20 nt, Homo sapiens
  source 1..20: mol_type = genomic RNA
gatatgtcacaatgccccct

SEQ ID NO: 18851 - RNA, 20 nt, Homo sapiens
  source 1..20: mol_type = genomic RNA
atatgtcacaatgccccctg

SEQ ID NO: 18852 - RNA, 20 nt, Homo sapiens
  source 1..20: mol_type = genomic RNA
tatgtcacaatgccccctgt

SEQ ID NO: 18853 - RNA, 20 nt, Homo sapiens
  source 1..20: mol_type = genomic RNA
atgtcacaatgccccctgta

SEQ ID NO: 18854 - RNA, 20 nt, Homo sapiens
  source 1..20: mol_type = genomic RNA
tgtcacaatgccccctgtaa

SEQ ID NO: 18855 - RNA, 20 nt, Homo sapiens
  source 1..20: mol_type = genomic RNA
gtcacaatgccccctgtaag

SEQ ID NO: 18856 - RNA, 20 nt, Homo sapiens
  source 1..20: mol_type = genomic RNA
tcacaatgccccctgtaagc

SEQ ID NO: 18857 - RNA, 20 nt, Homo sapiens
  source 1..20: mol_type = genomic RNA
cacaatgccccctgtaagca

SEQ ID NO: 18858 - RNA, 20 nt, Homo sapiens
  source 1..20: mol_type = genomic RNA
acaatgccccctgtaagcag

SEQ ID NO: 18859 - RNA, 20 nt, Homo sapiens
  source 1..20: mol_type = genomic RNA
caatgccccctgtaagcaga

SEQ ID NO: 18860 - RNA, 20 nt, Homo sapiens
  source 1..20: mol_type = genomic RNA
aatgccccctgtaagcagat

SEQ ID NO: 18861 - RNA, 20 nt, Homo sapiens
  source 1..20: mol_type = genomic RNA
atgccccctgtaagcagatc

SEQ ID NO: 18862 - RNA, 20 nt, Homo sapiens
  source 1..20: mol_type = genomic RNA
ccccctgtaagcagatccca

SEQ ID NO: 18863 - RNA, 20 nt, Homo sapiens
  source 1..20: mol_type = genomic RNA
cccctgtaagcagatcccag

SEQ ID NO: 18864 - RNA, 20 nt, Homo sapiens
  source 1..20: mol_type = genomic RNA
ccctgtaagcagatcccaga

SEQ ID NO: 18865 - RNA, 20 nt, Homo sapiens
  source 1..20: mol_type = genomic RNA
cctgtaagcagatcccagac

SEQ ID NO: 18866 - RNA, 20 nt, Homo sapiens
  source 1..20: mol_type = genomic RNA
ctgtaagcagatcccagaca

SEQ ID NO: 18867 - RNA, 20 nt, Homo sapiens
  source 1..20: mol_type = genomic RNA
tgtaagcagatcccagacaa

SEQ ID NO: 18868 - RNA, 20 nt, Homo sapiens
  source 1..20: mol_type = genomic RNA
gtaagcagatcccagacaag

SEQ ID NO: 18869 - RNA, 20 nt, Homo sapiens
  source 1..20: mol_type = genomic RNA
taagcagatcccagacaaga

SEQ ID NO: 18870 - RNA, 20 nt, Homo sapiens
  source 1..20: mol_type = genomic RNA
aagcagatcccagacaagag

SEQ ID NO: 18871 - RNA, 20 nt, Homo sapiens
  source 1..20: mol_type = genomic RNA
agcagatcccagacaagagt

SEQ ID NO: 18872 - RNA, 20 nt, Homo sapiens
  source 1..20: mol_type = genomic RNA
gcagatcccagacaagagtt

SEQ ID NO: 18873 - RNA, 20 nt, Homo sapiens
  source 1..20: mol_type = genomic RNA
cagatcccagacaagagttg

SEQ ID NO: 18874 - RNA, 20 nt, Homo sapiens
  source 1..20: mol_type = genomic RNA
agatcccagacaagagttgc

SEQ ID NO: 18875 - RNA, 20 nt, Homo sapiens
  source 1..20: mol_type = genomic RNA
gatcccagacaagagttgca

SEQ ID NO: 18876 - RNA, 20 nt, Homo sapiens
  source 1..20: mol_type = genomic RNA
atcccagacaagagttgcat

SEQ ID NO: 18877 - RNA, 20 nt, Homo sapiens
  source 1..20: mol_type = genomic RNA
tcccagacaagagttgcatc

SEQ ID NO: 18878 - RNA, 20 nt, Homo sapiens
  source 1..20: mol_type = genomic RNA
cccagacaagagttgcatca

SEQ ID NO: 18879 - RNA, 20 nt, Homo sapiens
  source 1..20: mol_type = genomic RNA
ccagacaagagttgcatcac

SEQ ID NO: 18880 - RNA, 20 nt, Homo sapiens
  source 1..20: mol_type = genomic RNA
cagacaagagttgcatcacc

SEQ ID NO: 18881 - RNA, 20 nt, Homo sapiens
  source 1..20: mol_type = genomic RNA
agacaagagttgcatcacct

SEQ ID NO: 18882 - RNA, 20 nt, Homo sapiens
  source 1..20: mol_type = genomic RNA
gacaagagttgcatcacctc

SEQ ID NO: 18883 - RNA, 20 nt, Homo sapiens
  source 1..20: mol_type = genomic RNA
acaagagttgcatcacctcg

SEQ ID NO: 18884 - RNA, 20 nt, Homo sapiens
  source 1..20: mol_type = genomic RNA
caagagttgcatcacctcgg

SEQ ID NO: 18885 - RNA, 20 nt, Homo sapiens
  source 1..20: mol_type = genomic RNA
aagagttgcatcacctcggt

SEQ ID NO: 18886 - RNA, 20 nt, Homo sapiens
  source 1..20: mol_type = genomic RNA
agagttgcatcacctcggtg

SEQ ID NO: 18887 - RNA, 20 nt, Homo sapiens
  source 1..20: mol_type = genomic RNA
gagttgcatcacctcggtga

SEQ ID NO: 18888 - RNA, 20 nt, Homo sapiens
  source 1..20: mol_type = genomic RNA
agttgcatcacctcggtgat

SEQ ID NO: 18889 - RNA, 20 nt, Homo sapiens
  source 1..20: mol_type = genomic RNA
gttgcatcacctcggtgatc

SEQ ID NO: 18890 - RNA, 20 nt, Homo sapiens
  source 1..20: mol_type = genomic RNA
ttgcatcacctcggtgatca

SEQ ID NO: 18891 - RNA, 20 nt, Homo sapiens
  source 1..20: mol_type = genomic RNA
tgcatcacctcggtgatcag

SEQ ID NO: 18892 - RNA, 20 nt, Homo sapiens
  source 1..20: mol_type = genomic RNA
gcatcacctcggtgatcagt

SEQ ID NO: 18893 - RNA, 20 nt, Homo sapiens
  source 1..20: mol_type = genomic RNA
catcacctcggtgatcagtg

SEQ ID NO: 18894 - RNA, 20 nt, Homo sapiens
  source 1..20: mol_type = genomic RNA
atcacctcggtgatcagtgc

SEQ ID NO: 18895 - RNA, 20 nt, Homo sapiens
  source 1..20: mol_type = genomic RNA
tcacctcggtgatcagtgca

SEQ ID NO: 18896 - RNA, 20 nt, Homo sapiens
  source 1..20: mol_type = genomic RNA
cacctcggtgatcagtgcag

SEQ ID NO: 18897 - RNA, 20 nt, Homo sapiens
  source 1..20: mol_type = genomic RNA
acctcggtgatcagtgcaga

SEQ ID NO: 18898 - RNA, 20 nt, Homo sapiens
  source 1..20: mol_type = genomic RNA
cctcggtgatcagtgcagag

SEQ ID NO: 18899 - RNA, 20 nt, Homo sapiens
  source 1..20: mol_type = genomic RNA
ctcggtgatcagtgcagaga

SEQ ID NO: 18900 - RNA, 20 nt, Homo sapiens
  source 1..20: mol_type = genomic RNA
tcggtgatcagtgcagagat

SEQ ID NO: 18901 - RNA, 20 nt, Homo sapiens
  source 1..20: mol_type = genomic RNA
cggtgatcagtgcagagata

SEQ ID NO: 18902 - RNA, 20 nt, Homo sapiens
  source 1..20: mol_type = genomic RNA
ggtgatcagtgcagagatac

SEQ ID NO: 18903 - RNA, 20 nt, Homo sapiens
  source 1..20: mol_type = genomic RNA
gtgatcagtgcagagatacg

SEQ ID NO: 18904 - RNA, 20 nt, Homo sapiens
  source 1..20: mol_type = genomic RNA
tgatcagtgcagagatacgt

SEQ ID NO: 18905 - RNA, 20 nt, Homo sapiens
  source 1..20: mol_type = genomic RNA
gatcagtgcagagatacgtc

SEQ ID NO: 18906 - RNA, 20 nt, Homo sapiens
  source 1..20: mol_type = genomic RNA
atcagtgcagagatacgtca

SEQ ID NO: 18907 - RNA, 20 nt, Homo sapiens
  source 1..20: mol_type = genomic RNA
tcagtgcagagatacgtcac

SEQ ID NO: 18908 - RNA, 20 nt, Homo sapiens
  source 1..20: mol_type = genomic RNA
cagtgcagagatacgtcaca

SEQ ID NO: 18909 - RNA, 20 nt, Homo sapiens
  source 1..20: mol_type = genomic RNA
agtgcagagatacgtcacaa

SEQ ID NO: 18910 - RNA, 20 nt, Homo sapiens
  source 1..20: mol_type = genomic RNA
gtgcagagatacgtcacaat

SEQ ID NO: 18911 - RNA, 20 nt, Homo sapiens
  source 1..20: mol_type = genomic RNA
tgcagagatacgtcacaatg

SEQ ID NO: 18912 - RNA, 20 nt, Homo sapiens
  source 1..20: mol_type = genomic RNA
gcagagatacgtcacaatgc

SEQ ID NO: 18913 - RNA, 20 nt, Homo sapiens
  source 1..20: mol_type = genomic RNA
cagagatacgtcacaatgcc

SEQ ID NO: 18914 - RNA, 20 nt, Homo sapiens
  source 1..20: mol_type = genomic RNA
agagatacgtcacaatgccc

SEQ ID NO: 18915 - RNA, 20 nt, Homo sapiens
  source 1..20: mol_type = genomic RNA
gagatacgtcacaatgcccc

SEQ ID NO: 18916 - RNA, 20 nt, Homo sapiens
  source 1..20: mol_type = genomic RNA
agatacgtcacaatgcccct

SEQ ID NO: 18917 - RNA, 20 nt, Homo sapiens
  source 1..20: mol_type = genomic RNA
gatacgtcacaatgcccctg

SEQ ID NO: 18918 - RNA, 20 nt, Homo sapiens
  source 1..20: mol_type = genomic RNA
atacgtcacaatgcccctgt

SEQ ID NO: 18919 - RNA, 20 nt, Homo sapiens
  source 1..20: mol_type = genomic RNA
tacgtcacaatgcccctgta

SEQ ID NO: 18920 - RNA, 20 nt, Homo sapiens
  source 1..20: mol_type = genomic RNA
acgtcacaatgcccctgtag

SEQ ID NO: 18921 - RNA, 20 nt, Homo sapiens
  source 1..20: mol_type = genomic RNA
cgtcacaatgcccctgtagg

SEQ ID NO: 18922 - RNA, 20 nt, Homo sapiens
  source 1..20: mol_type = genomic RNA
gcctagacaagagttacata

SEQ ID NO: 18923 - RNA, 20 nt, Homo sapiens
  source 1..20: mol_type = genomic RNA
cctagacaagagttacataa

SEQ ID NO: 18924 - RNA, 20 nt, Homo sapiens
  source 1..20: mol_type = genomic RNA
ctagacaagagttacataac

SEQ ID NO: 18925 - RNA, 20 nt, Homo sapiens
  source 1..20: mol_type = genomic RNA
tagacaagagttacataacc

SEQ ID NO: 18926 - RNA, 20 nt, Homo sapiens
  source 1..20: mol_type = genomic RNA
agacaagagttacataaccc

SEQ ID NO: 18927 - RNA, 20 nt, Homo sapiens
  source 1..20: mol_type = genomic RNA
gacaagagttacataaccca

SEQ ID NO: 18928 - RNA, 20 nt, Homo sapiens
  source 1..20: mol_type = genomic RNA
acaagagttacataacccag

SEQ ID NO: 18929 - RNA, 20 nt, Homo sapiens
  source 1..20: mol_type = genomic RNA
caagagttacataacccagg

SEQ ID NO: 18930 - RNA, 20 nt, Homo sapiens
  source 1..20: mol_type = genomic RNA
aagagttacataacccaggt

SEQ ID NO: 18931 - RNA, 20 nt, Homo sapiens
  source 1..20: mol_type = genomic RNA
agagttacataacccaggtg

SEQ ID NO: 18932 - RNA, 20 nt, Homo sapiens
  source 1..20: mol_type = genomic RNA
gagttacataacccaggtga

SEQ ID NO: 18933 - RNA, 20 nt, Homo sapiens
  source 1..20: mol_type = genomic RNA
agttacataacccaggtgat

SEQ ID NO: 18934 - RNA, 20 nt, Homo sapiens
  source 1..20: mol_type = genomic RNA
gttacataacccaggtgatc

SEQ ID NO: 18935 - RNA, 20 nt, Homo sapiens
  source 1..20: mol_type = genomic RNA
ttacataacccaggtgatcc

SEQ ID NO: 18936 - RNA, 20 nt, Homo sapiens
  source 1..20: mol_type = genomic RNA
tacataacccaggtgatccg

SEQ ID NO: 18937 - RNA, 20 nt, Homo sapiens
  source 1..20: mol_type = genomic RNA
acataacccaggtgatccgt

SEQ ID NO: 18938 - RNA, 20 nt, Homo sapiens
  source 1..20: mol_type = genomic RNA
cataacccaggtgatccgta

SEQ ID NO: 18939 - RNA, 20 nt, Homo sapiens
  source 1..20: mol_type = genomic RNA
ataacccaggtgatccgtac

SEQ ID NO: 18940 - RNA, 20 nt, Homo sapiens
  source 1..20: mol_type = genomic RNA
taacccaggtgatccgtaca

SEQ ID NO: 18941 - RNA, 20 nt, Homo sapiens
  source 1..20: mol_type = genomic RNA
aacccaggtgatccgtacag

SEQ ID NO: 18942 - RNA, 20 nt, Homo sapiens
  source 1..20: mol_type = genomic RNA
acccaggtgatccgtacaga

SEQ ID NO: 18943 - RNA, 20 nt, Homo sapiens
  source 1..20: mol_type = genomic RNA
cccaggtgatccgtacagag

SEQ ID NO: 18944 - RNA, 20 nt, Homo sapiens
  source 1..20: mol_type = genomic RNA
ccaggtgatccgtacagagt

SEQ ID NO: 18945 - RNA, 20 nt, Homo sapiens
  source 1..20: mol_type = genomic RNA
caggtgatccgtacagagtg

SEQ ID NO: 18946 - RNA, 20 nt, Homo sapiens
  source 1..20: mol_type = genomic RNA
aggtgatccgtacagagtga

SEQ ID NO: 18947 - RNA, 20 nt, Homo sapiens
  source 1..20: mol_type = genomic RNA
ggtgatccgtacagagtgat

SEQ ID NO: 18948 - RNA, 20 nt, Homo sapiens
  source 1..20: mol_type = genomic RNA
gtgatccgtacagagtgatg

SEQ ID NO: 18949 - RNA, 20 nt, Homo sapiens
  source 1..20: mol_type = genomic RNA
tgatccgtacagagtgatgt

SEQ ID NO: 18950 - RNA, 20 nt, Homo sapiens
  source 1..20: mol_type = genomic RNA
gatccgtacagagtgatgtc

SEQ ID NO: 18951 - RNA, 20 nt, Homo sapiens
  source 1..20: mol_type = genomic RNA
atccgtacagagtgatgtca

SEQ ID NO: 18952 - RNA, 20 nt, Homo sapiens
  source 1..20: mol_type = genomic RNA
tccgtacagagtgatgtcac

SEQ ID NO: 18953 - RNA, 20 nt, Homo sapiens
  source 1..20: mol_type = genomic RNA
ccgtacagagtgatgtcaca

SEQ ID NO: 18954 - RNA, 20 nt, Homo sapiens
  source 1..20: mol_type = genomic RNA
cgtacagagtgatgtcacaa

SEQ ID NO: 18955 - RNA, 20 nt, Homo sapiens
  source 1..20: mol_type = genomic RNA
gtacagagtgatgtcacaac

SEQ ID NO: 18956 - RNA, 20 nt, Homo sapiens
  source 1..20: mol_type = genomic RNA
tacagagtgatgtcacaacg

SEQ ID NO: 18957 - RNA, 20 nt, Homo sapiens
  source 1..20: mol_type = genomic RNA
acagagtgatgtcacaacgc

SEQ ID NO: 18958 - RNA, 20 nt, Homo sapiens
  source 1..20: mol_type = genomic RNA
cagagtgatgtcacaacgcc

SEQ ID NO: 18959 - RNA, 20 nt, Homo sapiens
  source 1..20: mol_type = genomic RNA
agagtgatgtcacaacgccc

SEQ ID NO: 18960 - RNA, 20 nt, Homo sapiens
  source 1..20: mol_type = genomic RNA
gagtgatgtcacaacgccct

SEQ ID NO: 18961 - RNA, 20 nt, Homo sapiens
  source 1..20: mol_type = genomic RNA
agtgatgtcacaacgccctc

SEQ ID NO: 18962 - RNA, 20 nt, Homo sapiens
  source 1..20: mol_type = genomic RNA
gtgatgtcacaacgccctct

SEQ ID NO: 18963 - RNA, 20 nt, Homo sapiens
  source 1..20: mol_type = genomic RNA
tgatgtcacaacgccctctg

SEQ ID NO: 18964 - RNA, 20 nt, Homo sapiens
  source 1..20: mol_type = genomic RNA
gatgtcacaacgccctctgt

SEQ ID NO: 18965 - RNA, 20 nt, Homo sapiens
  source 1..20: mol_type = genomic RNA
atgtcacaacgccctctgta

SEQ ID NO: 18966 - RNA, 20 nt, Homo sapiens
  source 1..20: mol_type = genomic RNA
tgtcacaacgccctctgtag

SEQ ID NO: 18967 - RNA, 20 nt, Homo sapiens
  source 1..20: mol_type = genomic RNA
gtcacaacgccctctgtagg

SEQ ID NO: 18968 - RNA, 20 nt, Homo sapiens
  source 1..20: mol_type = genomic RNA
tcacaacgccctctgtaggc

SEQ ID NO: 18969 - RNA, 20 nt, Homo sapiens
  source 1..20: mol_type = genomic RNA
cacaacgccctctgtaggca

SEQ ID NO: 18970 - RNA, 20 nt, Homo sapiens
  source 1..20: mol_type = genomic RNA
caacgccctctgtaggcaga

SEQ ID NO: 18971 - RNA, 20 nt, Homo sapiens
  source 1..20: mol_type = genomic RNA
ccctctgtaggcagagacta

SEQ ID NO: 18972 - RNA, 20 nt, Homo sapiens
  source 1..20: mol_type = genomic RNA
cctctgtaggcagagactag

SEQ ID NO: 18973 - RNA, 20 nt, Homo sapiens
  source 1..20: mol_type = genomic RNA
ctctgtaggcagagactaga

SEQ ID NO: 18974 - RNA, 20 nt, Homo sapiens
  source 1..20: mol_type = genomic RNA
tctgtaggcagagactagaa

SEQ ID NO: 18975 - RNA, 20 nt, Homo sapiens
  source 1..20: mol_type = genomic RNA
ctgtaggcagagactagaaa

SEQ ID NO: 18976 - RNA, 20 nt, Homo sapiens
  source 1..20: mol_type = genomic RNA
tgtaggcagagactagaaaa

SEQ ID NO: 18977 - RNA, 20 nt, Homo sapiens
  source 1..20: mol_type = genomic RNA
gtaggcagagactagaaaag

SEQ ID NO: 18978 - RNA, 20 nt, Homo sapiens
  source 1..20: mol_type = genomic RNA
taggcagagactagaaaaga

SEQ ID NO: 18979 - RNA, 20 nt, Homo sapiens
  source 1..20: mol_type = genomic RNA
aggcagagactagaaaagag

SEQ ID NO: 18980 - RNA, 20 nt, Homo sapiens
  source 1..20: mol_type = genomic RNA
ggcagagactagaaaagagt

SEQ ID NO: 18981 - RNA, 20 nt, Homo sapiens
  source 1..20: mol_type = genomic RNA
gcagagactagaaaagagtt

SEQ ID NO: 18982 - RNA, 20 nt, Homo sapiens
  source 1..20: mol_type = genomic RNA
cagagactagaaaagagtta

SEQ ID NO: 18983 - RNA, 20 nt, Homo sapiens
  source 1..20: mol_type = genomic RNA
agagactagaaaagagttac

SEQ ID NO: 18984 - RNA, 20 nt, Homo sapiens
  source 1..20: mol_type = genomic RNA
gagactagaaaagagttaca

SEQ ID NO: 18985 - RNA, 20 nt, Homo sapiens
  source 1..20: mol_type = genomic RNA
agactagaaaagagttacat

SEQ ID NO: 18986 - RNA, 20 nt, Homo sapiens
  source 1..20: mol_type = genomic RNA
gactagaaaagagttacatt

SEQ ID NO: 18987 - RNA, 20 nt, Homo sapiens
  source 1..20: mol_type = genomic RNA
tagaaaagagttacattacc

SEQ ID NO: 18988 - RNA, 20 nt, Homo sapiens
  source 1..20: mol_type = genomic RNA
agaaaagagttacattacct

SEQ ID NO: 18989 - RNA, 20 nt, Homo sapiens
  source 1..20: mol_type = genomic RNA
gaaaagagttacattacctg

SEQ ID NO: 18990 - RNA, 20 nt, Homo sapiens
  source 1..20: mol_type = genomic RNA
aaaagagttacattacctgg

SEQ ID NO: 18991 - RNA, 20 nt, Homo sapiens
  source 1..20: mol_type = genomic RNA
aaagagttacattacctggg

SEQ ID NO: 18992 - RNA, 20 nt, Homo sapiens
  source 1..20: mol_type = genomic RNA
aagagttacattacctgggt

SEQ ID NO: 18993 - RNA, 20 nt, Homo sapiens
  source 1..20: mol_type = genomic RNA
agagttacattacctgggtg

SEQ ID NO: 18994 - RNA, 20 nt, Homo sapiens
  source 1..20: mol_type = genomic RNA
gagttacattacctgggtga

SEQ ID NO: 18995 - RNA, 20 nt, Homo sapiens
  source 1..20: mol_type = genomic RNA
agttacattacctgggtgat

SEQ ID NO: 18996 - RNA, 20 nt, Homo sapiens
  source 1..20: mol_type = genomic RNA
gttacattacctgggtgatc

SEQ ID NO: 18997 - RNA, 20 nt, Homo sapiens
  source 1..20: mol_type = genomic RNA
ttacattacctgggtgatca

SEQ ID NO: 18998 - RNA, 20 nt, Homo sapiens
  source 1..20: mol_type = genomic RNA
tacattacctgggtgatcag

SEQ ID NO: 18999 - RNA, 20 nt, Homo sapiens
  source 1..20: mol_type = genomic RNA
acattacctgggtgatcagt

SEQ ID NO: 19000 - RNA, 20 nt, Homo sapiens
  source 1..20: mol_type = genomic RNA
cattacctgggtgatcagtg

SEQ ID NO: 19001 - RNA, 20 nt, Homo sapiens
  source 1..20: mol_type = genomic RNA
attacctgggtgatcagtgc

SEQ ID NO: 19002 - RNA, 20 nt, Homo sapiens
  source 1..20: mol_type = genomic RNA
ttacctgggtgatcagtgca

SEQ ID NO: 19003 - RNA, 20 nt, Homo sapiens
  source 1..20: mol_type = genomic RNA
tacctgggtgatcagtgcag

SEQ ID NO: 19004 - RNA, 20 nt, Homo sapiens
  source 1..20: mol_type = genomic RNA
tgtcacaatgccccctgtag

SEQ ID NO: 19005 - RNA, 20 nt, Homo sapiens
  source 1..20: mol_type = genomic RNA
gtcacaatgccccctgtagg

SEQ ID NO: 19006 - RNA, 20 nt, Homo sapiens
  source 1..20: mol_type = genomic RNA
cacaatgccccctgtaggca

SEQ ID NO: 19007 - RNA, 20 nt, Homo sapiens
  source 1..20: mol_type = genomic RNA
caatgccccctgtaggcaga

SEQ ID NO: 19008 - RNA, 20 nt, Homo sapiens
  source 1..20: mol_type = genomic RNA
ccccctgtaggcagagcata

SEQ ID NO: 19009 - RNA, 20 nt, Homo sapiens
  source 1..20: mol_type = genomic RNA
cccctgtaggcagagcatag

SEQ ID NO: 19010 - RNA, 20 nt, Homo sapiens
  source 1..20: mol_type = genomic RNA
ccctgtaggcagagcataga

SEQ ID NO: 19011 - RNA, 20 nt, Homo sapiens
  source 1..20: mol_type = genomic RNA
cctgtaggcagagcatagag

SEQ ID NO: 19012 - RNA, 20 nt, Homo sapiens
  source 1..20: mol_type = genomic RNA
ctgtaggcagagcatagaga

SEQ ID NO: 19013 - RNA, 20 nt, Homo sapiens
  source 1..20: mol_type = genomic RNA
tgtaggcagagcatagagaa

SEQ ID NO: 19014 - RNA, 20 nt, Homo sapiens
  source 1..20: mol_type = genomic RNA
gtaggcagagcatagagaag

SEQ ID NO: 19015 - RNA, 20 nt, Homo sapiens
  source 1..20: mol_type = genomic RNA
taggcagagcatagagaaga

SEQ ID NO: 19016 - RNA, 20 nt, Homo sapiens
  source 1..20: mol_type = genomic RNA
ggcagagcatagagaagagt

SEQ ID NO: 19017 - RNA, 20 nt, Homo sapiens
  source 1..20: mol_type = genomic RNA
gcagagcatagagaagagtt

SEQ ID NO: 19018 - RNA, 20 nt, Homo sapiens
  source 1..20: mol_type = genomic RNA
cagagcatagagaagagttg

SEQ ID NO: 19019 - RNA, 20 nt, Homo sapiens
  source 1..20: mol_type = genomic RNA
agagcatagagaagagttgc

SEQ ID NO: 19020 - RNA, 20 nt, Homo sapiens
  source 1..20: mol_type = genomic RNA
gagcatagagaagagttgca

SEQ ID NO: 19021 - RNA, 20 nt, Homo sapiens
  source 1..20: mol_type = genomic RNA
agcatagagaagagttgcat

SEQ ID NO: 19022 - RNA, 20 nt, Homo sapiens
  source 1..20: mol_type = genomic RNA
gcatagagaagagttgcatc

SEQ ID NO: 19023 - RNA, 20 nt, Homo sapiens
  source 1..20: mol_type = genomic RNA
catagagaagagttgcatca

SEQ ID NO: 19024 - RNA, 20 nt, Homo sapiens
  source 1..20: mol_type = genomic RNA
atagagaagagttgcatcac

SEQ ID NO: 19025 - RNA, 20 nt, Homo sapiens
  source 1..20: mol_type = genomic RNA
tagagaagagttgcatcacc

SEQ ID NO: 19026 - RNA, 20 nt, Homo sapiens
  source 1..20: mol_type = genomic RNA
agagaagagttgcatcacct

SEQ ID NO: 19027 - RNA, 20 nt, Homo sapiens
  source 1..20: mol_type = genomic RNA
gagaagagttgcatcacctg

SEQ ID NO: 19028 - RNA, 20 nt, Homo sapiens
  source 1..20: mol_type = genomic RNA
agaagagttgcatcacctgg

SEQ ID NO: 19029 - RNA, 20 nt, Homo sapiens
  source 1..20: mol_type = genomic RNA
gaagagttgcatcacctggg

SEQ ID NO: 19030 - RNA, 20 nt, Homo sapiens
  source 1..20: mol_type = genomic RNA
aagagttgcatcacctgggt

SEQ ID NO: 19031 - RNA, 20 nt, Homo sapiens
  source 1..20: mol_type = genomic RNA
agagttgcatcacctgggtg

SEQ ID NO: 19032 - RNA, 20 nt, Homo sapiens
  source 1..20: mol_type = genomic RNA
gagttgcatcacctgggtga

SEQ ID NO: 19033 - RNA, 20 nt, Homo sapiens
  source 1..20: mol_type = genomic RNA
agttgcatcacctgggtgat

SEQ ID NO: 19034 - RNA, 20 nt, Homo sapiens
  source 1..20: mol_type = genomic RNA
gttgcatcacctgggtgatc

SEQ ID NO: 19035 - RNA, 20 nt, Homo sapiens
  source 1..20: mol_type = genomic RNA
ttgcatcacctgggtgatca

SEQ ID NO: 19036 - RNA, 20 nt, Homo sapiens
  source 1..20: mol_type = genomic RNA
tgcatcacctgggtgatcag

SEQ ID NO: 19037 - RNA, 20 nt, Homo sapiens
  source 1..20: mol_type = genomic RNA
gcatcacctgggtgatcagt

SEQ ID NO: 19038 - RNA, 20 nt, Homo sapiens
  source 1..20: mol_type = genomic RNA
tcacctgggtgatcagtgta

SEQ ID NO: 19039 - RNA, 20 nt, Homo sapiens
  source 1..20: mol_type = genomic RNA
cacctgggtgatcagtgtag

SEQ ID NO: 19040 - RNA, 20 nt, Homo sapiens
  source 1..20: mol_type = genomic RNA
acctgggtgatcagtgtaga

SEQ ID NO: 19041 - RNA, 20 nt, Homo sapiens
  source 1..20: mol_type = genomic RNA
cctgggtgatcagtgtagag

SEQ ID NO: 19042 - RNA, 20 nt, Homo sapiens
  source 1..20: mol_type = genomic RNA
ctgggtgatcagtgtagaga

SEQ ID NO: 19043 - RNA, 20 nt, Homo sapiens
  source 1..20: mol_type = genomic RNA
tgggtgatcagtgtagagat

SEQ ID NO: 19044 - RNA, 20 nt, Homo sapiens
  source 1..20: mol_type = genomic RNA
gggtgatcagtgtagagata

SEQ ID NO: 19045 - RNA, 20 nt, Homo sapiens
  source 1..20: mol_type = genomic RNA
gatcagtgtagagatatgtc

SEQ ID NO: 19046 - RNA, 20 nt, Homo sapiens
  source 1..20: mol_type = genomic RNA
atcagtgtagagatatgtca

SEQ ID NO: 19047 - RNA, 20 nt, Homo sapiens
  source 1..20: mol_type = genomic RNA
tcagtgtagagatatgtcac

SEQ ID NO: 19048 - RNA, 20 nt, Homo sapiens
  source 1..20: mol_type = genomic RNA
cagtgtagagatatgtcaca

SEQ ID NO: 19049 - RNA, 20 nt, Homo sapiens
  source 1..20: mol_type = genomic RNA
agtgtagagatatgtcacaa

SEQ ID NO: 19050 - RNA, 20 nt, Homo sapiens
  source 1..20: mol_type = genomic RNA
gtgtagagatatgtcacaat

SEQ ID NO: 19051 - RNA, 20 nt, Homo sapiens
  source 1..20: mol_type = genomic RNA
tgtagagatatgtcacaatg

SEQ ID NO: 19052 - RNA, 20 nt, Homo sapiens
  source 1..20: mol_type = genomic RNA
gtagagatatgtcacaatgt

SEQ ID NO: 19053 - RNA, 20 nt, Homo sapiens
  source 1..20: mol_type = genomic RNA
tagagatatgtcacaatgtc

SEQ ID NO: 19054 - RNA, 20 nt, Homo sapiens
  source 1..20: mol_type = genomic RNA
agatatgtcacaatgtcccc

SEQ ID NO: 19055 - RNA, 20 nt, Homo sapiens
  source 1..20: mol_type = genomic RNA
gatatgtcacaatgtcccct

SEQ ID NO: 19056 - RNA, 20 nt, Homo sapiens
  source 1..20: mol_type = genomic RNA
atatgtcacaatgtcccctg

SEQ ID NO: 19057 - RNA, 20 nt, Homo sapiens
  source 1..20: mol_type = genomic RNA
ccctgtaggcagatcctaga

SEQ ID NO: 19058 - RNA, 20 nt, Homo sapiens
  source 1..20: mol_type = genomic RNA
cctgtaggcagatcctagac

SEQ ID NO: 19059 - RNA, 20 nt, Homo sapiens
  source 1..20: mol_type = genomic RNA
ctgtaggcagatcctagaca

SEQ ID NO: 19060 - RNA, 20 nt, Homo sapiens
  source 1..20: mol_type = genomic RNA
tgtaggcagatcctagacaa

SEQ ID NO: 19061 - RNA, 20 nt, Homo sapiens
  source 1..20: mol_type = genomic RNA
gtaggcagatcctagacaag

SEQ ID NO: 19062 - RNA, 20 nt, Homo sapiens
  source 1..20: mol_type = genomic RNA
taggcagatcctagacaaga

SEQ ID NO: 19063 - RNA, 20 nt, Homo sapiens
  source 1..20: mol_type = genomic RNA
aggcagatcctagacaagag

SEQ ID NO: 19064 - RNA, 20 nt, Homo sapiens
  source 1..20: mol_type = genomic RNA
ggcagatcctagacaagagt

SEQ ID NO: 19065 - RNA, 20 nt, Homo sapiens
  source 1..20: mol_type = genomic RNA
gcagatcctagacaagagtt

SEQ ID NO: 19066 - RNA, 20 nt, Homo sapiens
  source 1..20: mol_type = genomic RNA
atcacttaggtgatcagtgc

SEQ ID NO: 19067 - RNA, 20 nt, Homo sapiens
  source 1..20: mol_type = genomic RNA
tcacttaggtgatcagtgca

SEQ ID NO: 19068 - RNA, 20 nt, Homo sapiens
  source 1..20: mol_type = genomic RNA
cacttaggtgatcagtgcag

SEQ ID NO: 19069 - RNA, 20 nt, Homo sapiens
  source 1..20: mol_type = genomic RNA
acttaggtgatcagtgcaga

SEQ ID NO: 19070 - RNA, 20 nt, Homo sapiens
  source 1..20: mol_type = genomic RNA
cttaggtgatcagtgcagag

SEQ ID NO: 19071 - RNA, 20 nt, Homo sapiens
  source 1..20: mol_type = genomic RNA
ttaggtgatcagtgcagaga

SEQ ID NO: 19072 - RNA, 20 nt, Homo sapiens
  source 1..20: mol_type = genomic RNA
taggtgatcagtgcagagat

SEQ ID NO: 19073 - RNA, 20 nt, Homo sapiens
  source 1..20: mol_type = genomic RNA
ctgtaggccaaagcctagac

SEQ ID NO: 19074 - RNA, 20 nt, Homo sapiens
  source 1..20: mol_type = genomic RNA
tgtaggccaaagcctagaca

SEQ ID NO: 19075 - RNA, 20 nt, Homo sapiens
  source 1..20: mol_type = genomic RNA
gtaggccaaagcctagacaa

SEQ ID NO: 19076 - RNA, 20 nt, Homo sapiens
  source 1..20: mol_type = genomic RNA
taggccaaagcctagacaat

SEQ ID NO: 19077 - RNA, 20 nt, Homo sapiens
  source 1..20: mol_type = genomic RNA
aggccaaagcctagacaata

SEQ ID NO: 19078 - RNA, 20 nt, Homo sapiens
  source 1..20: mol_type = genomic RNA
ggccaaagcctagacaatag

SEQ ID NO: 19079 - RNA, 20 nt, Homo sapiens
  source 1..20: mol_type = genomic RNA
gccaaagcctagacaatagt

SEQ ID NO: 19080 - RNA, 20 nt, Homo sapiens
  source 1..20: mol_type = genomic RNA
ccaaagcctagacaatagtt

SEQ ID NO: 19081 - RNA, 20 nt, Homo sapiens
  source 1..20: mol_type = genomic RNA
caaagcctagacaatagtta

SEQ ID NO: 19082 - RNA, 20 nt, Homo sapiens
  source 1..20: mol_type = genomic RNA
aaagcctagacaatagttac

SEQ ID NO: 19083 - RNA, 20 nt, Homo sapiens
  source 1..20: mol_type = genomic RNA
aagcctagacaatagttaca

SEQ ID NO: 19084 - RNA, 20 nt, Homo sapiens
  source 1..20: mol_type = genomic RNA
agcctagacaatagttacat

SEQ ID NO: 19085 - RNA, 20 nt, Homo sapiens
  source 1..20: mol_type = genomic RNA
gcctagacaatagttacatc

SEQ ID NO: 19086 - RNA, 20 nt, Homo sapiens
  source 1..20: mol_type = genomic RNA
cctagacaatagttacatca

SEQ ID NO: 19087 - RNA, 20 nt, Homo sapiens
  source 1..20: mol_type = genomic RNA
ctagacaatagttacatcac

SEQ ID NO: 19088 - RNA, 20 nt, Homo sapiens
  source 1..20: mol_type = genomic RNA
tagacaatagttacatcact

SEQ ID NO: 19089 - RNA, 20 nt, Homo sapiens
  source 1..20: mol_type = genomic RNA
agacaatagttacatcactt

SEQ ID NO: 19090 - RNA, 20 nt, Homo sapiens
  source 1..20: mol_type = genomic RNA
acaatagttacatcacttgg

SEQ ID NO: 19091 - RNA, 20 nt, Homo sapiens
  source 1..20: mol_type = genomic RNA
caatagttacatcacttggg

SEQ ID NO: 19092 - RNA, 20 nt, Homo sapiens
  source 1..20: mol_type = genomic RNA
aatagttacatcacttgggt

SEQ ID NO: 19093 - RNA, 20 nt, Homo sapiens
  source 1..20: mol_type = genomic RNA
atagttacatcacttgggtg

SEQ ID NO: 19094 - RNA, 20 nt, Homo sapiens
  source 1..20: mol_type = genomic RNA
tagttacatcacttgggtga

SEQ ID NO: 19095 - RNA, 20 nt, Homo sapiens
  source 1..20: mol_type = genomic RNA
agttacatcacttgggtgat

SEQ ID NO: 19096 - RNA, 20 nt, Homo sapiens
  source 1..20: mol_type = genomic RNA
gttacatcacttgggtgatc

SEQ ID NO: 19097 - RNA, 20 nt, Homo sapiens
  source 1..20: mol_type = genomic RNA
ttacatcacttgggtgatca

SEQ ID NO: 19098 - RNA, 20 nt, Homo sapiens
  source 1..20: mol_type = genomic RNA
tacatcacttgggtgatcag

SEQ ID NO: 19099 - RNA, 20 nt, Homo sapiens
  source 1..20: mol_type = genomic RNA
acatcacttgggtgatcagt

SEQ ID NO: 19100 - RNA, 20 nt, Homo sapiens
  source 1..20: mol_type = genomic RNA
catcacttgggtgatcagtg

SEQ ID NO: 19101 - RNA, 20 nt, Homo sapiens
  source 1..20: mol_type = genomic RNA
atcacttgggtgatcagtgg

SEQ ID NO: 19102 - RNA, 20 nt, Homo sapiens
  source 1..20: mol_type = genomic RNA
tcacttgggtgatcagtggc

SEQ ID NO: 19103 - RNA, 20 nt, Homo sapiens
  source 1..20: mol_type = genomic RNA
cacttgggtgatcagtggcg

SEQ ID NO: 19104 - RNA, 20 nt, Homo sapiens
  source 1..20: mol_type = genomic RNA
acttgggtgatcagtggcga

SEQ ID NO: 19105 - RNA, 20 nt, Homo sapiens
  source 1..20: mol_type = genomic RNA
cttgggtgatcagtggcgag

SEQ ID NO: 19106 - RNA, 20 nt, Homo sapiens
  source 1..20: mol_type = genomic RNA
ttgggtgatcagtggcgaga

SEQ ID NO: 19107 - RNA, 20 nt, Homo sapiens
  source 1..20: mol_type = genomic RNA
tgggtgatcagtggcgagat

SEQ ID NO: 19108 - RNA, 20 nt, Homo sapiens
  source 1..20: mol_type = genomic RNA
gggtgatcagtggcgagatc

SEQ ID NO: 19109 - RNA, 20 nt, Homo sapiens
  source 1..20: mol_type = genomic RNA
ggtgatcagtggcgagatct

SEQ ID NO: 19110 - RNA, 20 nt, Homo sapiens
  source 1..20: mol_type = genomic RNA
gtgatcagtggcgagatctc

SEQ ID NO: 19111 - RNA, 20 nt, Homo sapiens
  source 1..20: mol_type = genomic RNA
tgatcagtggcgagatctct

SEQ ID NO: 19112 - RNA, 20 nt, Homo sapiens
  source 1..20: mol_type = genomic RNA
gatcagtggcgagatctctc

SEQ ID NO: 19113 - RNA, 20 nt, Homo sapiens
  source 1..20: mol_type = genomic RNA
atcagtggcgagatctctca

SEQ ID NO: 19114 - RNA, 20 nt, Homo sapiens
  source 1..20: mol_type = genomic RNA
tcagtggcgagatctctcac

SEQ ID NO: 19115 - RNA, 20 nt, Homo sapiens
  source 1..20: mol_type = genomic RNA
cagtggcgagatctctcaca

SEQ ID NO: 19116 - RNA, 20 nt, Homo sapiens
  source 1..20: mol_type = genomic RNA
agtggcgagatctctcacaa

SEQ ID NO: 19117 - RNA, 20 nt, Homo sapiens
  source 1..20: mol_type = genomic RNA
gtggcgagatctctcacaat

SEQ ID NO: 19118 - RNA, 20 nt, Homo sapiens
  source 1..20: mol_type = genomic RNA
tggcgagatctctcacaatt

SEQ ID NO: 19119 - RNA, 20 nt, Homo sapiens
  source 1..20: mol_type = genomic RNA
ggcgagatctctcacaattc

SEQ ID NO: 19120 - RNA, 20 nt, Homo sapiens
  source 1..20: mol_type = genomic RNA
gcgagatctctcacaattcc

SEQ ID NO: 19121 - RNA, 20 nt, Homo sapiens
  source 1..20: mol_type = genomic RNA
cgagatctctcacaattccc

SEQ ID NO: 19122 - RNA, 20 nt, Homo sapiens
  source 1..20: mol_type = genomic RNA
gagatctctcacaattcccc

SEQ ID NO: 19123 - RNA, 20 nt, Homo sapiens
  source 1..20: mol_type = genomic RNA
agatctctcacaattcccct

SEQ ID NO: 19124 - RNA, 20 nt, Homo sapiens
  source 1..20: mol_type = genomic RNA
gatctctcacaattcccctg

SEQ ID NO: 19125 - RNA, 20 nt, Homo sapiens
  source 1..20: mol_type = genomic RNA
atctctcacaattcccctgt

SEQ ID NO: 19126 - RNA, 20 nt, Homo sapiens
  source 1..20: mol_type = genomic RNA
tctctcacaattcccctgta

SEQ ID NO: 19127 - RNA, 20 nt, Homo sapiens
  source 1..20: mol_type = genomic RNA
ctctcacaattcccctgtag

SEQ ID NO: 19128 - RNA, 20 nt, Homo sapiens
  source 1..20: mol_type = genomic RNA
tctcacaattcccctgtagg

SEQ ID NO: 19129 - RNA, 20 nt, Homo sapiens
  source 1..20: mol_type = genomic RNA
ctcacaattcccctgtaggc

SEQ ID NO: 19130 - RNA, 20 nt, Homo sapiens
  source 1..20: mol_type = genomic RNA
tcacaattcccctgtaggca

SEQ ID NO: 19131 - RNA, 20 nt, Homo sapiens
  source 1..20: mol_type = genomic RNA
cacaattcccctgtaggcag

SEQ ID NO: 19132 - RNA, 20 nt, Homo sapiens
  source 1..20: mol_type = genomic RNA
acaattcccctgtaggcaga

SEQ ID NO: 19133 - RNA, 20 nt, Homo sapiens
  source 1..20: mol_type = genomic RNA
caattcccctgtaggcagag

SEQ ID NO: 19134 - RNA, 20 nt, Homo sapiens
  source 1..20: mol_type = genomic RNA
aattcccctgtaggcagagc

SEQ ID NO: 19135 - RNA, 20 nt, Homo sapiens
  source 1..20: mol_type = genomic RNA
attcccctgtaggcagagct

SEQ ID NO: 19136 - RNA, 20 nt, Homo sapiens
  source 1..20: mol_type = genomic RNA
ttcccctgtaggcagagctt

SEQ ID NO: 19137 - RNA, 20 nt, Homo sapiens
  source 1..20: mol_type = genomic RNA
tcccctgtaggcagagctta

SEQ ID NO: 19138 - RNA, 20 nt, Homo sapiens
  source 1..20: mol_type = genomic RNA
cccctgtaggcagagcttat

SEQ ID NO: 19139 - RNA, 20 nt, Homo sapiens
  source 1..20: mol_type = genomic RNA
ccctgtaggcagagcttata

SEQ ID NO: 19140 - RNA, 20 nt, Homo sapiens
  source 1..20: mol_type = genomic RNA
cctgtaggcagagcttatac

SEQ ID NO: 19141 - RNA, 20 nt, Homo sapiens
  source 1..20: mol_type = genomic RNA
ctgtaggcagagcttataca

SEQ ID NO: 19142 - RNA, 20 nt, Homo sapiens
  source 1..20: mol_type = genomic RNA
tgtaggcagagcttatacaa

SEQ ID NO: 19143 - RNA, 20 nt, Homo sapiens
  source 1..20: mol_type = genomic RNA
gtaggcagagcttatacaac

SEQ ID NO: 19144 - RNA, 20 nt, Homo sapiens
  source 1..20: mol_type = genomic RNA
taggcagagcttatacaaca

SEQ ID NO: 19145 - RNA, 20 nt, Homo sapiens
  source 1..20: mol_type = genomic RNA
aggcagagcttatacaacag

SEQ ID NO: 19146 - RNA, 20 nt, Homo sapiens
  source 1..20: mol_type = genomic RNA
ggcagagcttatacaacagt

SEQ ID NO: 19147 - RNA, 20 nt, Homo sapiens
  source 1..20: mol_type = genomic RNA
gcagagcttatacaacagtt

SEQ ID NO: 19148 - RNA, 20 nt, Homo sapiens
  source 1..20: mol_type = genomic RNA
cagagcttatacaacagtta

SEQ ID NO: 19149 - RNA, 20 nt, Homo sapiens
  source 1..20: mol_type = genomic RNA
agagcttatacaacagttac

SEQ ID NO: 19150 - RNA, 20 nt, Homo sapiens
  source 1..20: mol_type = genomic RNA
gagcttatacaacagttaca

SEQ ID NO: 19151 - RNA, 20 nt, Homo sapiens
  source 1..20: mol_type = genomic RNA
agcttatacaacagttacat

SEQ ID NO: 19152 - RNA, 20 nt, Homo sapiens
  source 1..20: mol_type = genomic RNA
gcttatacaacagttacatc

SEQ ID NO: 19153 - RNA, 20 nt, Homo sapiens
  source 1..20: mol_type = genomic RNA
tatgtcacaatgcccccata

SEQ ID NO: 19154 - RNA, 20 nt, Homo sapiens
  source 1..20: mol_type = genomic RNA
atgtcacaatgcccccatag

SEQ ID NO: 19155 - RNA, 20 nt, Homo sapiens
  source 1..20: mol_type = genomic RNA
tgtcacaatgcccccatagg

SEQ ID NO: 19156 - RNA, 20 nt, Homo sapiens
  source 1..20: mol_type = genomic RNA
gtcacaatgcccccataggc

SEQ ID NO: 19157 - RNA, 20 nt, Homo sapiens
  source 1..20: mol_type = genomic RNA
tcacaatgcccccataggca

SEQ ID NO: 19158 - RNA, 20 nt, Homo sapiens
  source 1..20: mol_type = genomic RNA
cacaatgcccccataggcag

SEQ ID NO: 19159 - RNA, 20 nt, Homo sapiens
  source 1..20: mol_type = genomic RNA
caatgcccccataggcagat

SEQ ID NO: 19160 - RNA, 20 nt, Homo sapiens
  source 1..20: mol_type = genomic RNA
aatgcccccataggcagatc

SEQ ID NO: 19161 - RNA, 20 nt, Homo sapiens
  source 1..20: mol_type = genomic RNA
gtgatcagtgcagaaatacg

SEQ ID NO: 19162 - RNA, 20 nt, Homo sapiens
  source 1..20: mol_type = genomic RNA
tgatcagtgcagaaatacgt

SEQ ID NO: 19163 - RNA, 20 nt, Homo sapiens
  source 1..20: mol_type = genomic RNA
gatcagtgcagaaatacgtc

SEQ ID NO: 19164 - RNA, 20 nt, Homo sapiens
  source 1..20: mol_type = genomic RNA
atcagtgcagaaatacgtca

SEQ ID NO: 19165 - RNA, 20 nt, Homo sapiens
  source 1..20: mol_type = genomic RNA
tcagtgcagaaatacgtcac

SEQ ID NO: 19166 - RNA, 20 nt, Homo sapiens
  source 1..20: mol_type = genomic RNA
cagtgcagaaatacgtcaca

SEQ ID NO: 19167 - RNA, 20 nt, Homo sapiens
  source 1..20: mol_type = genomic RNA
agtgcagaaatacgtcacaa

SEQ ID NO: 19168 - RNA, 20 nt, Homo sapiens
  source 1..20: mol_type = genomic RNA
gtgcagaaatacgtcacaat

SEQ ID NO: 19169 - RNA, 20 nt, Homo sapiens
  source 1..20: mol_type = genomic RNA
tgcagaaatacgtcacaatg

SEQ ID NO: 19170 - RNA, 20 nt, Homo sapiens
  source 1..20: mol_type = genomic RNA
gcagaaatacgtcacaatgc

SEQ ID NO: 19171 - RNA, 20 nt, Homo sapiens
  source 1..20: mol_type = genomic RNA
cagaaatacgtcacaatgcc

SEQ ID NO: 19172 - RNA, 20 nt, Homo sapiens
  source 1..20: mol_type = genomic RNA
agaaatacgtcacaatgccc

SEQ ID NO: 19173 - RNA, 20 nt, Homo sapiens
  source 1..20: mol_type = genomic RNA
gaaatacgtcacaatgcccc

SEQ ID NO: 19174 - RNA, 20 nt, Homo sapiens
  source 1..20: mol_type = genomic RNA
aaatacgtcacaatgccccc

SEQ ID NO: 19175 - RNA, 20 nt, Homo sapiens
  source 1..20: mol_type = genomic RNA
aatacgtcacaatgccccct

SEQ ID NO: 19176 - RNA, 20 nt, Homo sapiens
  source 1..20: mol_type = genomic RNA
atacgtcacaatgccccctt

SEQ ID NO: 19177 - RNA, 20 nt, Homo sapiens
  source 1..20: mol_type = genomic RNA
tacgtcacaatgccccctta

SEQ ID NO: 19178 - RNA, 20 nt, Homo sapiens
  source 1..20: mol_type = genomic RNA
acgtcacaatgcccccttag

SEQ ID NO: 19179 - RNA, 20 nt, Homo sapiens
  source 1..20: mol_type = genomic RNA
cgtcacaatgcccccttagg

SEQ ID NO: 19180 - RNA, 20 nt, Homo sapiens
  source 1..20: mol_type = genomic RNA
gtcacaatgcccccttaggc

SEQ ID NO: 19181 - RNA, 20 nt, Homo sapiens
  source 1..20: mol_type = genomic RNA
tcacaatgcccccttaggca

SEQ ID NO: 19182 - RNA, 20 nt, Homo sapiens
  source 1..20: mol_type = genomic RNA
cacaatgcccccttaggcag

SEQ ID NO: 19183 - RNA, 20 nt, Homo sapiens
  source 1..20: mol_type = genomic RNA
acaatgcccccttaggcaga

SEQ ID NO: 19184 - RNA, 20 nt, Homo sapiens
  source 1..20: mol_type = genomic RNA
caatgcccccttaggcagag

SEQ ID NO: 19185 - RNA, 20 nt, Homo sapiens
  source 1..20: mol_type = genomic RNA
ccccttaggcagagcctaga

SEQ ID NO: 19186 - RNA, 20 nt, Homo sapiens
  source 1..20: mol_type = genomic RNA
ccttaggcagagcctagaca

SEQ ID NO: 19187 - RNA, 20 nt, Homo sapiens
  source 1..20: mol_type = genomic RNA
cttaggcagagcctagacaa

SEQ ID NO: 19188 - RNA, 20 nt, Homo sapiens
  source 1..20: mol_type = genomic RNA
ttaggcagagcctagacaaa

SEQ ID NO: 19189 - RNA, 20 nt, Homo sapiens
  source 1..20: mol_type = genomic RNA
taggcagagcctagacaaaa

SEQ ID NO: 19190 - RNA, 20 nt, Homo sapiens
  source 1..20: mol_type = genomic RNA
agcctagacaaaagccccat

SEQ ID NO: 19191 - RNA, 20 nt, Homo sapiens
  source 1..20: mol_type = genomic RNA
gcctagacaaaagccccatc

SEQ ID NO: 19192 - RNA, 20 nt, Homo sapiens
  source 1..20: mol_type = genomic RNA
cctagacaaaagccccatca

SEQ ID NO: 19193 - RNA, 20 nt, Homo sapiens
  source 1..20: mol_type = genomic RNA
ctagacaaaagccccatcac

SEQ ID NO: 19194 - RNA, 20 nt, Homo sapiens
  source 1..20: mol_type = genomic RNA
tagacaaaagccccatcacc

SEQ ID NO: 19195 - RNA, 20 nt, Homo sapiens
  source 1..20: mol_type = genomic RNA
agacaaaagccccatcacct

SEQ ID NO: 19196 - RNA, 20 nt, Homo sapiens
  source 1..20: mol_type = genomic RNA
gacaaaagccccatcacctg

SEQ ID NO: 19197 - RNA, 20 nt, Homo sapiens
  source 1..20: mol_type = genomic RNA
acaaaagccccatcacctgg

SEQ ID NO: 19198 - RNA, 20 nt, Homo sapiens
  source 1..20: mol_type = genomic RNA
caaaagccccatcacctgga

SEQ ID NO: 19199 - RNA, 20 nt, Homo sapiens
  source 1..20: mol_type = genomic RNA
aaaagccccatcacctggat

SEQ ID NO: 19200 - RNA, 20 nt, Homo sapiens
  source 1..20: mol_type = genomic RNA
aaagccccatcacctggatg

SEQ ID NO: 19201 - RNA, 20 nt, Homo sapiens
  source 1..20: mol_type = genomic RNA
aagccccatcacctggatga

SEQ ID NO: 19202 - RNA, 20 nt, Homo sapiens
  source 1..20: mol_type = genomic RNA
agccccatcacctggatgat

SEQ ID NO: 19203 - RNA, 20 nt, Homo sapiens
  source 1..20: mol_type = genomic RNA
gccccatcacctggatgatt

SEQ ID NO: 19204 - RNA, 20 nt, Homo sapiens
  source 1..20: mol_type = genomic RNA
ccccatcacctggatgatta

SEQ ID NO: 19205 - RNA, 20 nt, Homo sapiens
  source 1..20: mol_type = genomic RNA
cccatcacctggatgattag

SEQ ID NO: 19206 - RNA, 20 nt, Homo sapiens
  source 1..20: mol_type = genomic RNA
ccatcacctggatgattagt

SEQ ID NO: 19207 - RNA, 20 nt, Homo sapiens
  source 1..20: mol_type = genomic RNA
catcacctggatgattagtg

SEQ ID NO: 19208 - RNA, 20 nt, Homo sapiens
  source 1..20: mol_type = genomic RNA
atcacctggatgattagtgc

SEQ ID NO: 19209 - RNA, 20 nt, Homo sapiens
  source 1..20: mol_type = genomic RNA
tcacctggatgattagtgca

SEQ ID NO: 19210 - RNA, 20 nt, Homo sapiens
  source 1..20: mol_type = genomic RNA
cacctggatgattagtgcag

SEQ ID NO: 19211 - RNA, 20 nt, Homo sapiens
  source 1..20: mol_type = genomic RNA
acctggatgattagtgcaga

SEQ ID NO: 19212 - RNA, 20 nt, Homo sapiens
  source 1..20: mol_type = genomic RNA
cctggatgattagtgcagag

SEQ ID NO: 19213 - RNA, 20 nt, Homo sapiens
  source 1..20: mol_type = genomic RNA
ctggatgattagtgcagagt

SEQ ID NO: 19214 - RNA, 20 nt, Homo sapiens
  source 1..20: mol_type = genomic RNA
tggatgattagtgcagagtt

SEQ ID NO: 19215 - RNA, 20 nt, Homo sapiens
  source 1..20: mol_type = genomic RNA
ggatgattagtgcagagtta

SEQ ID NO: 19216 - RNA, 20 nt, Homo sapiens
  source 1..20: mol_type = genomic RNA
gatgattagtgcagagttat

SEQ ID NO: 19217 - RNA, 20 nt, Homo sapiens
  source 1..20: mol_type = genomic RNA
atgattagtgcagagttatg

SEQ ID NO: 19218 - RNA, 20 nt, Homo sapiens
  source 1..20: mol_type = genomic RNA
tgattagtgcagagttatgt

SEQ ID NO: 19219 - RNA, 20 nt, Homo sapiens
  source 1..20: mol_type = genomic RNA
gattagtgcagagttatgtc

SEQ ID NO: 19220 - RNA, 20 nt, Homo sapiens
  source 1..20: mol_type = genomic RNA
attagtgcagagttatgtca

SEQ ID NO: 19221 - RNA, 20 nt, Homo sapiens
  source 1..20: mol_type = genomic RNA
ttagtgcagagttatgtcac

SEQ ID NO: 19222 - RNA, 20 nt, Homo sapiens
  source 1..20: mol_type = genomic RNA
tagtgcagagttatgtcaca

SEQ ID NO: 19223 - RNA, 20 nt, Homo sapiens
  source 1..20: mol_type = genomic RNA
gtgcagagttatgtcacaaa

SEQ ID NO: 19224 - RNA, 20 nt, Homo sapiens
  source 1..20: mol_type = genomic RNA
tgcagagttatgtcacaaag

SEQ ID NO: 19225 - RNA, 20 nt, Homo sapiens
  source 1..20: mol_type = genomic RNA
gcagagttatgtcacaaagt

SEQ ID NO: 19226 - RNA, 20 nt, Homo sapiens
  source 1..20: mol_type = genomic RNA
cagagttatgtcacaaagtc

SEQ ID NO: 19227 - RNA, 20 nt, Homo sapiens
  source 1..20: mol_type = genomic RNA
agagttatgtcacaaagtcc

SEQ ID NO: 19228 - RNA, 20 nt, Homo sapiens
  source 1..20: mol_type = genomic RNA
ttgggtgatcagtgcagaga

SEQ ID NO: 19229 - RNA, 20 nt, Homo sapiens
  source 1..20: mol_type = genomic RNA
agagatatgtcacaatgcca

SEQ ID NO: 19230 - RNA, 20 nt, Homo sapiens
  source 1..20: mol_type = genomic RNA
gagatatgtcacaatgccac

SEQ ID NO: 19231 - RNA, 20 nt, Homo sapiens
  source 1..20: mol_type = genomic RNA
agatatgtcacaatgccact

SEQ ID NO: 19232 - RNA, 20 nt, Homo sapiens
  source 1..20: mol_type = genomic RNA
gatatgtcacaatgccactg

SEQ ID NO: 19233 - RNA, 20 nt, Homo sapiens
  source 1..20: mol_type = genomic RNA
atatgtcacaatgccactgt

SEQ ID NO: 19234 - RNA, 20 nt, Homo sapiens
  source 1..20: mol_type = genomic RNA
tatgtcacaatgccactgta

SEQ ID NO: 19235 - RNA, 20 nt, Homo sapiens
  source 1..20: mol_type = genomic RNA
atgtcacaatgccactgtag

SEQ ID NO: 19236 - RNA, 20 nt, Homo sapiens
  source 1..20: mol_type = genomic RNA
tgtcacaatgccactgtagg

SEQ ID NO: 19237 - RNA, 20 nt, Homo sapiens
  source 1..20: mol_type = genomic RNA
gtcacaatgccactgtaggc

SEQ ID NO: 19238 - RNA, 20 nt, Homo sapiens
  source 1..20: mol_type = genomic RNA
tcacaatgccactgtaggca

SEQ ID NO: 19239 - RNA, 20 nt, Homo sapiens
  source 1..20: mol_type = genomic RNA
cacaatgccactgtaggcag

SEQ ID NO: 19240 - RNA, 20 nt, Homo sapiens
  source 1..20: mol_type = genomic RNA
acaatgccactgtaggcaga

SEQ ID NO: 19241 - RNA, 20 nt, Homo sapiens
  source 1..20: mol_type = genomic RNA
caatgccactgtaggcagag

SEQ ID NO: 19242 - RNA, 20 nt, Homo sapiens
  source 1..20: mol_type = genomic RNA
cactgtaggcagagcctaga

SEQ ID NO: 19243 - RNA, 20 nt, Homo sapiens
  source 1..20: mol_type = genomic RNA
agagcctagacaagagttat

SEQ ID NO: 19244 - RNA, 20 nt, Homo sapiens
  source 1..20: mol_type = genomic RNA
gagcctagacaagagttata

SEQ ID NO: 19245 - RNA, 20 nt, Homo sapiens
  source 1..20: mol_type = genomic RNA
agcctagacaagagttatat

SEQ ID NO: 19246 - RNA, 20 nt, Homo sapiens
  source 1..20: mol_type = genomic RNA
gcctagacaagagttatatg

SEQ ID NO: 19247 - RNA, 20 nt, Homo sapiens
  source 1..20: mol_type = genomic RNA
cctagacaagagttatatga

SEQ ID NO: 19248 - RNA, 20 nt, Homo sapiens
  source 1..20: mol_type = genomic RNA
ctagacaagagttatatgac

SEQ ID NO: 19249 - RNA, 20 nt, Homo sapiens
  source 1..20: mol_type = genomic RNA
tagacaagagttatatgacc

SEQ ID NO: 19250 - RNA, 20 nt, Homo sapiens
  source 1..20: mol_type = genomic RNA
agacaagagttatatgacct

SEQ ID NO: 19251 - RNA, 20 nt, Homo sapiens
  source 1..20: mol_type = genomic RNA
gacaagagttatatgaccta

SEQ ID NO: 19252 - RNA, 20 nt, Homo sapiens
  source 1..20: mol_type = genomic RNA
acaagagttatatgacctag

SEQ ID NO: 19253 - RNA, 20 nt, Homo sapiens
  source 1..20: mol_type = genomic RNA
caagagttatatgacctagg

SEQ ID NO: 19254 - RNA, 20 nt, Homo sapiens
  source 1..20: mol_type = genomic RNA
aagagttatatgacctaggt

SEQ ID NO: 19255 - RNA, 20 nt, Homo sapiens
  source 1..20: mol_type = genomic RNA
agagttatatgacctaggtg

SEQ ID NO: 19256 - RNA, 20 nt, Homo sapiens
  source 1..20: mol_type = genomic RNA
gagttatatgacctaggtga

SEQ ID NO: 19257 - RNA, 20 nt, Homo sapiens
  source 1..20: mol_type = genomic RNA
agttatatgacctaggtgat

SEQ ID NO: 19258 - RNA, 20 nt, Homo sapiens
  source 1..20: mol_type = genomic RNA
gttatatgacctaggtgatc

SEQ ID NO: 19259 - RNA, 20 nt, Homo sapiens
  source 1..20: mol_type = genomic RNA
ttatatgacctaggtgatca

SEQ ID NO: 19260 - RNA, 20 nt, Homo sapiens
  source 1..20: mol_type = genomic RNA
tatatgacctaggtgatcag

SEQ ID NO: 19261 - RNA, 20 nt, Homo sapiens
  source 1..20: mol_type = genomic RNA
atatgacctaggtgatcagt

SEQ ID NO: 19262 - RNA, 20 nt, Homo sapiens
  source 1..20: mol_type = genomic RNA
tatgacctaggtgatcagtg

SEQ ID NO: 19263 - RNA, 20 nt, Homo sapiens
  source 1..20: mol_type = genomic RNA
atgacctaggtgatcagtgc

SEQ ID NO: 19264 - RNA, 20 nt, Homo sapiens
  source 1..20: mol_type = genomic RNA
tgacctaggtgatcagtgca

SEQ ID NO: 19265 - RNA, 20 nt, Homo sapiens
  source 1..20: mol_type = genomic RNA
gacctaggtgatcagtgcag

SEQ ID NO: 19266 - RNA, 20 nt, Homo sapiens
  source 1..20: mol_type = genomic RNA
acctaggtgatcagtgcaga

SEQ ID NO: 19267 - RNA, 20 nt, Homo sapiens
  source 1..20: mol_type = genomic RNA
cctaggtgatcagtgcagag

SEQ ID NO: 19268 - RNA, 20 nt, Homo sapiens
  source 1..20: mol_type = genomic RNA
ctaggtgatcagtgcagaga

SEQ ID NO: 19269 - RNA, 20 nt, Homo sapiens
  source 1..20: mol_type = genomic RNA
aggtgatcagtgcagagata

SEQ ID NO: 19270 - RNA, 20 nt, Homo sapiens
  source 1..20: mol_type = genomic RNA
gtgatcagtgcagagataca

SEQ ID NO: 19271 - RNA, 20 nt, Homo sapiens
  source 1..20: mol_type = genomic RNA
tgatcagtgcagagatacat

SEQ ID NO: 19272 - RNA, 20 nt, Homo sapiens
  source 1..20: mol_type = genomic RNA
cagagccctgacaagtggta

SEQ ID NO: 19273 - RNA, 20 nt, Homo sapiens
  source 1..20: mol_type = genomic RNA
gagccctgacaagtggtaca

SEQ ID NO: 19274 - RNA, 20 nt, Homo sapiens
  source 1..20: mol_type = genomic RNA
agccctgacaagtggtacat

SEQ ID NO: 19275 - RNA, 20 nt, Homo sapiens
  source 1..20: mol_type = genomic RNA
gccctgacaagtggtacatc

SEQ ID NO: 19276 - RNA, 20 nt, Homo sapiens
  source 1..20: mol_type = genomic RNA
ccctgacaagtggtacatca

SEQ ID NO: 19277 - RNA, 20 nt, Homo sapiens
  source 1..20: mol_type = genomic RNA
cctgacaagtggtacatcac

SEQ ID NO: 19278 - RNA, 20 nt, Homo sapiens
  source 1..20: mol_type = genomic RNA
ctgacaagtggtacatcacc

SEQ ID NO: 19279 - RNA, 20 nt, Homo sapiens
  source 1..20: mol_type = genomic RNA
tgacaagtggtacatcacct

SEQ ID NO: 19280 - RNA, 20 nt, Homo sapiens
  source 1..20: mol_type = genomic RNA
gacaagtggtacatcacctg

SEQ ID NO: 19281 - RNA, 20 nt, Homo sapiens
  source 1..20: mol_type = genomic RNA
acaagtggtacatcacctgg

SEQ ID NO: 19282 - RNA, 20 nt, Homo sapiens
  source 1..20: mol_type = genomic RNA
caagtggtacatcacctggg

SEQ ID NO: 19283 - RNA, 20 nt, Homo sapiens
  source 1..20: mol_type = genomic RNA
aagtggtacatcacctgggt

SEQ ID NO: 19284 - RNA, 20 nt, Homo sapiens
  source 1..20: mol_type = genomic RNA
agtggtacatcacctgggtg

SEQ ID NO: 19285 - RNA, 20 nt, Homo sapiens
  source 1..20: mol_type = genomic RNA
gtggtacatcacctgggtga

SEQ ID NO: 19286 - RNA, 20 nt, Homo sapiens
  source 1..20: mol_type = genomic RNA
tggtacatcacctgggtgat

SEQ ID NO: 19287 - RNA, 20 nt, Homo sapiens
  source 1..20: mol_type = genomic RNA
ggtacatcacctgggtgatc

SEQ ID NO: 19288 - RNA, 20 nt, Homo sapiens
  source 1..20: mol_type = genomic RNA
gtacatcacctgggtgatca

SEQ ID NO: 19289 - RNA, 20 nt, Homo sapiens
  source 1..20: mol_type = genomic RNA
acctgggtgatcattgcagg

SEQ ID NO: 19290 - RNA, 20 nt, Homo sapiens
  source 1..20: mol_type = genomic RNA
cctgggtgatcattgcaggg

SEQ ID NO: 19291 - RNA, 20 nt, Homo sapiens
  source 1..20: mol_type = genomic RNA
ctgggtgatcattgcaggga

SEQ ID NO: 19292 - RNA, 20 nt, Homo sapiens
  source 1..20: mol_type = genomic RNA
tgggtgatcattgcagggat

SEQ ID NO: 19293 - RNA, 20 nt, Homo sapiens
  source 1..20: mol_type = genomic RNA
gggtgatcattgcagggata

SEQ ID NO: 19294 - RNA, 20 nt, Homo sapiens
  source 1..20: mol_type = genomic RNA
ggtgatcattgcagggatat

SEQ ID NO: 19295 - RNA, 20 nt, Homo sapiens
  source 1..20: mol_type = genomic RNA
gtgatcattgcagggatatg

SEQ ID NO: 19296 - RNA, 20 nt, Homo sapiens
  source 1..20: mol_type = genomic RNA
tgatcattgcagggatatgt

SEQ ID NO: 19297 - RNA, 20 nt, Homo sapiens
  source 1..20: mol_type = genomic RNA
gatcattgcagggatatgtc

SEQ ID NO: 19298 - RNA, 20 nt, Homo sapiens
  source 1..20: mol_type = genomic RNA
atcattgcagggatatgtca

SEQ ID NO: 19299 - RNA, 20 nt, Homo sapiens
  source 1..20: mol_type = genomic RNA
tcattgcagggatatgtcac

SEQ ID NO: 19300 - RNA, 20 nt, Homo sapiens
  source 1..20: mol_type = genomic RNA
cattgcagggatatgtcaca

SEQ ID NO: 19301 - RNA, 20 nt, Homo sapiens
  source 1..20: mol_type = genomic RNA
attgcagggatatgtcacaa

SEQ ID NO: 19302 - RNA, 20 nt, Homo sapiens
  source 1..20: mol_type = genomic RNA
ttgcagggatatgtcacaaa

SEQ ID NO: 19303 - RNA, 20 nt, Homo sapiens
  source 1..20: mol_type = genomic RNA
tgcagggatatgtcacaaag

SEQ ID NO: 19304 - RNA, 20 nt, Homo sapiens
  source 1..20: mol_type = genomic RNA
gcagggatatgtcacaaagc

SEQ ID NO: 19305 - RNA, 20 nt, Homo sapiens
  source 1..20: mol_type = genomic RNA
cagggatatgtcacaaagca

SEQ ID NO: 19306 - RNA, 20 nt, Homo sapiens
  source 1..20: mol_type = genomic RNA
agggatatgtcacaaagcac

SEQ ID NO: 19307 - RNA, 20 nt, Homo sapiens
  source 1..20: mol_type = genomic RNA
gggatatgtcacaaagcacc

SEQ ID NO: 19308 - RNA, 20 nt, Homo sapiens
  source 1..20: mol_type = genomic RNA
ggatatgtcacaaagcaccc

SEQ ID NO: 19309 - RNA, 20 nt, Homo sapiens
  source 1..20: mol_type = genomic RNA
gatatgtcacaaagcaccct

SEQ ID NO: 19310 - RNA, 20 nt, Homo sapiens
  source 1..20: mol_type = genomic RNA
atatgtcacaaagcaccctg

SEQ ID NO: 19311 - RNA, 20 nt, Homo sapiens
  source 1..20: mol_type = genomic RNA
tatgtcacaaagcaccctgt

SEQ ID NO: 19312 - RNA, 20 nt, Homo sapiens
  source 1..20: mol_type = genomic RNA
atgtcacaaagcaccctgta

SEQ ID NO: 19313 - RNA, 20 nt, Homo sapiens
  source 1..20: mol_type = genomic RNA
tgtcacaaagcaccctgtag

SEQ ID NO: 19314 - RNA, 20 nt, Homo sapiens
  source 1..20: mol_type = genomic RNA
gtcacaaagcaccctgtagg

SEQ ID NO: 19315 - RNA, 20 nt, Homo sapiens
  source 1..20: mol_type = genomic RNA
tcacaaagcaccctgtaggc

SEQ ID NO: 19316 - RNA, 20 nt, Homo sapiens
  source 1..20: mol_type = genomic RNA
cacaaagcaccctgtaggca

SEQ ID NO: 19317 - RNA, 20 nt, Homo sapiens
  source 1..20: mol_type = genomic RNA
caaagcaccctgtaggcaga

SEQ ID NO: 19318 - RNA, 20 nt, Homo sapiens
  source 1..20: mol_type = genomic RNA
aaagcaccctgtaggcagat

SEQ ID NO: 19319 - RNA, 20 nt, Homo sapiens
  source 1..20: mol_type = genomic RNA
aagcaccctgtaggcagatc

SEQ ID NO: 19320 - RNA, 20 nt, Homo sapiens
  source 1..20: mol_type = genomic RNA
caccctgtaggcagatccta

SEQ ID NO: 19321 - RNA, 20 nt, Homo sapiens
  source 1..20: mol_type = genomic RNA
accctgtaggcagatcctag

SEQ ID NO: 19322 - RNA, 20 nt, Homo sapiens
  source 1..20: mol_type = genomic RNA
cagatcctagacaagagtta

SEQ ID NO: 19323 - RNA, 20 nt, Homo sapiens
  source 1..20: mol_type = genomic RNA
agatcctagacaagagttac

SEQ ID NO: 19324 - RNA, 20 nt, Homo sapiens
  source 1..20: mol_type = genomic RNA
gatcctagacaagagttaca

SEQ ID NO: 19325 - RNA, 20 nt, Homo sapiens
  source 1..20: mol_type = genomic RNA
atcctagacaagagttacat

SEQ ID NO: 19326 - RNA, 20 nt, Homo sapiens
  source 1..20: mol_type = genomic RNA
tcctagacaagagttacatg

SEQ ID NO: 19327 - RNA, 20 nt, Homo sapiens
  source 1..20: mol_type = genomic RNA
cctagacaagagttacatga

SEQ ID NO: 19328 - RNA, 20 nt, Homo sapiens
  source 1..20: mol_type = genomic RNA
ctagacaagagttacatgac

SEQ ID NO: 19329 - RNA, 20 nt, Homo sapiens
  source 1..20: mol_type = genomic RNA
tagacaagagttacatgacc

SEQ ID NO: 19330 - RNA, 20 nt, Homo sapiens
  source 1..20: mol_type = genomic RNA
agacaagagttacatgacct

SEQ ID NO: 19331 - RNA, 20 nt, Homo sapiens
  source 1..20: mol_type = genomic RNA
gacaagagttacatgacctg

SEQ ID NO: 19332 - RNA, 20 nt, Homo sapiens
  source 1..20: mol_type = genomic RNA
acaagagttacatgacctgg

SEQ ID NO: 19333 - RNA, 20 nt, Homo sapiens
  source 1..20: mol_type = genomic RNA
caagagttacatgacctggg

SEQ ID NO: 19334 - RNA, 20 nt, Homo sapiens
  source 1..20: mol_type = genomic RNA
aagagttacatgacctgggt

SEQ ID NO: 19335 - RNA, 20 nt, Homo sapiens
  source 1..20: mol_type = genomic RNA
agagttacatgacctgggtg

SEQ ID NO: 19336 - RNA, 20 nt, Homo sapiens
  source 1..20: mol_type = genomic RNA
gagttacatgacctgggtga

SEQ ID NO: 19337 - RNA, 20 nt, Homo sapiens
  source 1..20: mol_type = genomic RNA
agttacatgacctgggtgat

SEQ ID NO: 19338 - RNA, 20 nt, Homo sapiens
  source 1..20: mol_type = genomic RNA
gttacatgacctgggtgatc

SEQ ID NO: 19339 - RNA, 20 nt, Homo sapiens
  source 1..20: mol_type = genomic RNA
ttacatgacctgggtgatca

SEQ ID NO: 19340 - RNA, 20 nt, Homo sapiens
  source 1..20: mol_type = genomic RNA
tacatgacctgggtgatcag

SEQ ID NO: 19341 - RNA, 20 nt, Homo sapiens
  source 1..20: mol_type = genomic RNA
acatgacctgggtgatcagt

SEQ ID NO: 19342 - RNA, 20 nt, Homo sapiens
  source 1..20: mol_type = genomic RNA
catgacctgggtgatcagtg

SEQ ID NO: 19343 - RNA, 20 nt, Homo sapiens
  source 1..20: mol_type = genomic RNA
atgacctgggtgatcagtgc

SEQ ID NO: 19344 - RNA, 20 nt, Homo sapiens
  source 1..20: mol_type = genomic RNA
tgacctgggtgatcagtgca

SEQ ID NO: 19345 - RNA, 20 nt, Homo sapiens
  source 1..20: mol_type = genomic RNA
gacctgggtgatcagtgcag

SEQ ID NO: 19346 - RNA, 20 nt, Homo sapiens
  source 1..20: mol_type = genomic RNA
gcctagacaagagttacatg

SEQ ID NO: 19347 - RNA, 20 nt, Homo sapiens
  source 1..20: mol_type = genomic RNA
gacaagagttacatgaccta

SEQ ID NO: 19348 - RNA, 20 nt, Homo sapiens
  source 1..20: mol_type = genomic RNA
acaagagttacatgacctag

SEQ ID NO: 19349 - RNA, 20 nt, Homo sapiens
  source 1..20: mol_type = genomic RNA
caagagttacatgacctagg

SEQ ID NO: 19350 - RNA, 20 nt, Homo sapiens
  source 1..20: mol_type = genomic RNA
aagagttacatgacctaggt

SEQ ID NO: 19351 - RNA, 20 nt, Homo sapiens
  source 1..20: mol_type = genomic RNA
agagttacatgacctaggtg

SEQ ID NO: 19352 - RNA, 20 nt, Homo sapiens
  source 1..20: mol_type = genomic RNA
gagttacatgacctaggtga

SEQ ID NO: 19353 - RNA, 20 nt, Homo sapiens
  source 1..20: mol_type = genomic RNA
agttacatgacctaggtgat

SEQ ID NO: 19354 - RNA, 20 nt, Homo sapiens
  source 1..20: mol_type = genomic RNA
gttacatgacctaggtgatc

SEQ ID NO: 19355 - RNA, 20 nt, Homo sapiens
  source 1..20: mol_type = genomic RNA
ttacatgacctaggtgatca

SEQ ID NO: 19356 - RNA, 20 nt, Homo sapiens
  source 1..20: mol_type = genomic RNA
tacatgacctaggtgatcag

SEQ ID NO: 19357 - RNA, 20 nt, Homo sapiens
  source 1..20: mol_type = genomic RNA
acatgacctaggtgatcagt

SEQ ID NO: 19358 - RNA, 20 nt, Homo sapiens
  source 1..20: mol_type = genomic RNA
catgacctaggtgatcagtg

SEQ ID NO: 19359 - RNA, 20 nt, Homo sapiens
  source 1..20: mol_type = genomic RNA
gatcagtgcagagatacatc

SEQ ID NO: 19360 - RNA, 20 nt, Homo sapiens
  source 1..20: mol_type = genomic RNA
atcagtgcagagatacatcg

SEQ ID NO: 19361 - RNA, 20 nt, Homo sapiens
  source 1..20: mol_type = genomic RNA
tcagtgcagagatacatcgc

SEQ ID NO: 19362 - RNA, 20 nt, Homo sapiens
  source 1..20: mol_type = genomic RNA
cagtgcagagatacatcgca

SEQ ID NO: 19363 - RNA, 20 nt, Homo sapiens
  source 1..20: mol_type = genomic RNA
agtgcagagatacatcgcaa

SEQ ID NO: 19364 - RNA, 20 nt, Homo sapiens
  source 1..20: mol_type = genomic RNA
gtgcagagatacatcgcaat

SEQ ID NO: 19365 - RNA, 20 nt, Homo sapiens
  source 1..20: mol_type = genomic RNA
tgcagagatacatcgcaatg

SEQ ID NO: 19366 - RNA, 20 nt, Homo sapiens
  source 1..20: mol_type = genomic RNA
gcagagatacatcgcaatgc

SEQ ID NO: 19367 - RNA, 20 nt, Homo sapiens
  source 1..20: mol_type = genomic RNA
cagagatacatcgcaatgcc

SEQ ID NO: 19368 - RNA, 20 nt, Homo sapiens
  source 1..20: mol_type = genomic RNA
agagatacatcgcaatgccc

SEQ ID NO: 19369 - RNA, 20 nt, Homo sapiens
  source 1..20: mol_type = genomic RNA
gagatacatcgcaatgcccc

SEQ ID NO: 19370 - RNA, 20 nt, Homo sapiens
  source 1..20: mol_type = genomic RNA
agatacatcgcaatgcccct

SEQ ID NO: 19371 - RNA, 20 nt, Homo sapiens
  source 1..20: mol_type = genomic RNA
gatacatcgcaatgcccctg

SEQ ID NO: 19372 - RNA, 20 nt, Homo sapiens
  source 1..20: mol_type = genomic RNA
atacatcgcaatgcccctgt

SEQ ID NO: 19373 - RNA, 20 nt, Homo sapiens
  source 1..20: mol_type = genomic RNA
tacatcgcaatgcccctgta

SEQ ID NO: 19374 - RNA, 20 nt, Homo sapiens
  source 1..20: mol_type = genomic RNA
acatcgcaatgcccctgtag

SEQ ID NO: 19375 - RNA, 20 nt, Homo sapiens
  source 1..20: mol_type = genomic RNA
catcgcaatgcccctgtagg

SEQ ID NO: 19376 - RNA, 20 nt, Homo sapiens
  source 1..20: mol_type = genomic RNA
atcgcaatgcccctgtaggc

SEQ ID NO: 19377 - RNA, 20 nt, Homo sapiens
  source 1..20: mol_type = genomic RNA
tcgcaatgcccctgtaggca

SEQ ID NO: 19378 - RNA, 20 nt, Homo sapiens
  source 1..20: mol_type = genomic RNA
cccctgtaggcagagccttg

SEQ ID NO: 19379 - RNA, 20 nt, Homo sapiens
  source 1..20: mol_type = genomic RNA
ccctgtaggcagagccttga

SEQ ID NO: 19380 - RNA, 20 nt, Homo sapiens
  source 1..20: mol_type = genomic RNA
cctgtaggcagagccttgac

SEQ ID NO: 19381 - RNA, 20 nt, Homo sapiens
  source 1..20: mol_type = genomic RNA
ctgtaggcagagccttgaca

SEQ ID NO: 19382 - RNA, 20 nt, Homo sapiens
  source 1..20: mol_type = genomic RNA
tgtaggcagagccttgacaa

SEQ ID NO: 19383 - RNA, 20 nt, Homo sapiens
  source 1..20: mol_type = genomic RNA
gtaggcagagccttgacaag

SEQ ID NO: 19384 - RNA, 20 nt, Homo sapiens
  source 1..20: mol_type = genomic RNA
taggcagagccttgacaagt

SEQ ID NO: 19385 - RNA, 20 nt, Homo sapiens
  source 1..20: mol_type = genomic RNA
aggcagagccttgacaagtg

SEQ ID NO: 19386 - RNA, 20 nt, Homo sapiens
  source 1..20: mol_type = genomic RNA
gcagagccttgacaagtggt

SEQ ID NO: 19387 - RNA, 20 nt, Homo sapiens
  source 1..20: mol_type = genomic RNA
cagagccttgacaagtggta

SEQ ID NO: 19388 - RNA, 20 nt, Homo sapiens
  source 1..20: mol_type = genomic RNA
agagccttgacaagtggtac

SEQ ID NO: 19389 - RNA, 20 nt, Homo sapiens
  source 1..20: mol_type = genomic RNA
gagccttgacaagtggtaca

SEQ ID NO: 19390 - RNA, 20 nt, Homo sapiens
  source 1..20: mol_type = genomic RNA
agccttgacaagtggtacat

SEQ ID NO: 19391 - RNA, 20 nt, Homo sapiens
  source 1..20: mol_type = genomic RNA
gccttgacaagtggtacatc

SEQ ID NO: 19392 - RNA, 20 nt, Homo sapiens
  source 1..20: mol_type = genomic RNA
ccttgacaagtggtacatca

SEQ ID NO: 19393 - RNA, 20 nt, Homo sapiens
  source 1..20: mol_type = genomic RNA
cttgacaagtggtacatcac

SEQ ID NO: 19394 - RNA, 20 nt, Homo sapiens
  source 1..20: mol_type = genomic RNA
ttgacaagtggtacatcacc

SEQ ID NO: 19395 - RNA, 20 nt, Homo sapiens
  source 1..20: mol_type = genomic RNA
tgtcacaaagcaccctgtaa

SEQ ID NO: 19396 - RNA, 20 nt, Homo sapiens
  source 1..20: mol_type = genomic RNA
gtcacaaagcaccctgtaag

SEQ ID NO: 19397 - RNA, 20 nt, Homo sapiens
  source 1..20: mol_type = genomic RNA
tcacaaagcaccctgtaagc

SEQ ID NO: 19398 - RNA, 20 nt, Homo sapiens
  source 1..20: mol_type = genomic RNA
cacaaagcaccctgtaagca

SEQ ID NO: 19399 - RNA, 20 nt, Homo sapiens
  source 1..20: mol_type = genomic RNA
acaaagcaccctgtaagcag

SEQ ID NO: 19400 - RNA, 20 nt, Homo sapiens
  source 1..20: mol_type = genomic RNA
caaagcaccctgtaagcaga

SEQ ID NO: 19401 - RNA, 20 nt, Homo sapiens
  source 1..20: mol_type = genomic RNA
aaagcaccctgtaagcagat

SEQ ID NO: 19402 - RNA, 20 nt, Homo sapiens
  source 1..20: mol_type = genomic RNA
aagcaccctgtaagcagatc

SEQ ID NO: 19403 - RNA, 20 nt, Homo sapiens
  source 1..20: mol_type = genomic RNA
agcaccctgtaagcagatcc

SEQ ID NO: 19404 - RNA, 20 nt, Homo sapiens
  source 1..20: mol_type = genomic RNA
gcaccctgtaagcagatcct

SEQ ID NO: 19405 - RNA, 20 nt, Homo sapiens
  source 1..20: mol_type = genomic RNA
caccctgtaagcagatccta

SEQ ID NO: 19406 - RNA, 20 nt, Homo sapiens
  source 1..20: mol_type = genomic RNA
accctgtaagcagatcctag

SEQ ID NO: 19407 - RNA, 20 nt, Homo sapiens
  source 1..20: mol_type = genomic RNA
ccctgtaagcagatcctaga

SEQ ID NO: 19408 - RNA, 20 nt, Homo sapiens
  source 1..20: mol_type = genomic RNA
cctgtaagcagatcctagag

SEQ ID NO: 19409 - RNA, 20 nt, Homo sapiens
  source 1..20: mol_type = genomic RNA
ctgtaagcagatcctagaga

SEQ ID NO: 19410 - RNA, 20 nt, Homo sapiens
  source 1..20: mol_type = genomic RNA
tgtaagcagatcctagagaa

SEQ ID NO: 19411 - RNA, 20 nt, Homo sapiens
  source 1..20: mol_type = genomic RNA
gtaagcagatcctagagaag

SEQ ID NO: 19412 - RNA, 20 nt, Homo sapiens
  source 1..20: mol_type = genomic RNA
taagcagatcctagagaaga

SEQ ID NO: 19413 - RNA, 20 nt, Homo sapiens
  source 1..20: mol_type = genomic RNA
aagcagatcctagagaagag

SEQ ID NO: 19414 - RNA, 20 nt, Homo sapiens
  source 1..20: mol_type = genomic RNA
agcagatcctagagaagagt

SEQ ID NO: 19415 - RNA, 20 nt, Homo sapiens
  source 1..20: mol_type = genomic RNA
gcagatcctagagaagagtt

SEQ ID NO: 19416 - RNA, 20 nt, Homo sapiens
  source 1..20: mol_type = genomic RNA
cagatcctagagaagagtta

SEQ ID NO: 19417 - RNA, 20 nt, Homo sapiens
  source 1..20: mol_type = genomic RNA
agatcctagagaagagttat

SEQ ID NO: 19418 - RNA, 20 nt, Homo sapiens
  source 1..20: mol_type = genomic RNA
gatcctagagaagagttata

SEQ ID NO: 19419 - RNA, 20 nt, Homo sapiens
  source 1..20: mol_type = genomic RNA
atcctagagaagagttatat

SEQ ID NO: 19420 - RNA, 20 nt, Homo sapiens
  source 1..20: mol_type = genomic RNA
tcctagagaagagttatatc

SEQ ID NO: 19421 - RNA, 20 nt, Homo sapiens
  source 1..20: mol_type = genomic RNA
cctagagaagagttatatca

SEQ ID NO: 19422 - RNA, 20 nt, Homo sapiens
  source 1..20: mol_type = genomic RNA
ctagagaagagttatatcac

SEQ ID NO: 19423 - RNA, 20 nt, Homo sapiens
  source 1..20: mol_type = genomic RNA
tagagaagagttatatcacc

SEQ ID NO: 19424 - RNA, 20 nt, Homo sapiens
  source 1..20: mol_type = genomic RNA
agagaagagttatatcacct

SEQ ID NO: 19425 - RNA, 20 nt, Homo sapiens
  source 1..20: mol_type = genomic RNA
gagaagagttatatcacctg

SEQ ID NO: 19426 - RNA, 20 nt, Homo sapiens
  source 1..20: mol_type = genomic RNA
agaagagttatatcacctgg

SEQ ID NO: 19427 - RNA, 20 nt, Homo sapiens
  source 1..20: mol_type = genomic RNA
gaagagttatatcacctggg

SEQ ID NO: 19428 - RNA, 20 nt, Homo sapiens
  source 1..20: mol_type = genomic RNA
aagagttatatcacctgggt

SEQ ID NO: 19429 - RNA, 20 nt, Homo sapiens
  source 1..20: mol_type = genomic RNA
agagttatatcacctgggtg

SEQ ID NO: 19430 - RNA, 20 nt, Homo sapiens
  source 1..20: mol_type = genomic RNA
gagttatatcacctgggtga

SEQ ID NO: 19431 - RNA, 20 nt, Homo sapiens
  source 1..20: mol_type = genomic RNA
agttatatcacctgggtgat

SEQ ID NO: 19432 - RNA, 20 nt, Homo sapiens
  source 1..20: mol_type = genomic RNA
gttatatcacctgggtgatc

SEQ ID NO: 19433 - RNA, 20 nt, Homo sapiens
  source 1..20: mol_type = genomic RNA
ttatatcacctgggtgatca

SEQ ID NO: 19434 - RNA, 20 nt, Homo sapiens
  source 1..20: mol_type = genomic RNA
tatatcacctgggtgatcag

SEQ ID NO: 19435 - RNA, 20 nt, Homo sapiens
  source 1..20: mol_type = genomic RNA
atatcacctgggtgatcagt

SEQ ID NO: 19436 - RNA, 20 nt, Homo sapiens
  source 1..20: mol_type = genomic RNA
tatcacctgggtgatcagtg

SEQ ID NO: 19437 - RNA, 20 nt, Homo sapiens
  source 1..20: mol_type = genomic RNA
gtgcagagatatgtcacaag

SEQ ID NO: 19438 - RNA, 20 nt, Homo sapiens
  source 1..20: mol_type = genomic RNA
tgcagagatatgtcacaagc

SEQ ID NO: 19439 - RNA, 20 nt, Homo sapiens
  source 1..20: mol_type = genomic RNA
gcagagatatgtcacaagcc

SEQ ID NO: 19440 - RNA, 20 nt, Homo sapiens
  source 1..20: mol_type = genomic RNA
cagagatatgtcacaagccc

SEQ ID NO: 19441 - RNA, 20 nt, Homo sapiens
  source 1..20: mol_type = genomic RNA
agagatatgtcacaagcccc

SEQ ID NO: 19442 - RNA, 20 nt, Homo sapiens
  source 1..20: mol_type = genomic RNA
gagatatgtcacaagccccc

SEQ ID NO: 19443 - RNA, 20 nt, Homo sapiens
  source 1..20: mol_type = genomic RNA
agatatgtcacaagccccct

SEQ ID NO: 19444 - RNA, 20 nt, Homo sapiens
  source 1..20: mol_type = genomic RNA
gatatgtcacaagccccctg

SEQ ID NO: 19445 - RNA, 20 nt, Homo sapiens
  source 1..20: mol_type = genomic RNA
atatgtcacaagccccctgt

SEQ ID NO: 19446 - RNA, 20 nt, Homo sapiens
  source 1..20: mol_type = genomic RNA
tatgtcacaagccccctgta

SEQ ID NO: 19447 - RNA, 20 nt, Homo sapiens
  source 1..20: mol_type = genomic RNA
atgtcacaagccccctgtag

SEQ ID NO: 19448 - RNA, 20 nt, Homo sapiens
  source 1..20: mol_type = genomic RNA
tgtcacaagccccctgtagg

SEQ ID NO: 19449 - RNA, 20 nt, Homo sapiens
  source 1..20: mol_type = genomic RNA
gcctagacaagagttatatc

SEQ ID NO: 19450 - RNA, 20 nt, Homo sapiens
  source 1..20: mol_type = genomic RNA
cctagacaagagttatatca

SEQ ID NO: 19451 - RNA, 20 nt, Homo sapiens
  source 1..20: mol_type = genomic RNA
ctagacaagagttatatcac

SEQ ID NO: 19452 - RNA, 20 nt, Homo sapiens
  source 1..20: mol_type = genomic RNA
tagacaagagttatatcacc

SEQ ID NO: 19453 - RNA, 20 nt, Homo sapiens
  source 1..20: mol_type = genomic RNA
agacaagagttatatcacct

SEQ ID NO: 19454 - RNA, 20 nt, Homo sapiens
  source 1..20: mol_type = genomic RNA
gacaagagttatatcacctg

SEQ ID NO: 19455 - RNA, 20 nt, Homo sapiens
  source 1..20: mol_type = genomic RNA
acaagagttatatcacctgg

SEQ ID NO: 19456 - RNA, 20 nt, Homo sapiens
  source 1..20: mol_type = genomic RNA
caagagttatatcacctggg

SEQ ID NO: 19457 - RNA, 20 nt, Homo sapiens
  source 1..20: mol_type = genomic RNA
acctgggtgatcagtgcagt

SEQ ID NO: 19458 - RNA, 20 nt, Homo sapiens
  source 1..20: mol_type = genomic RNA
cctgggtgatcagtgcagtg

SEQ ID NO: 19459 - RNA, 20 nt, Homo sapiens
  source 1..20: mol_type = genomic RNA
ctgggtgatcagtgcagtga

SEQ ID NO: 19460 - RNA, 20 nt, Homo sapiens
  source 1..20: mol_type = genomic RNA
tgggtgatcagtgcagtgat

SEQ ID NO: 19461 - RNA, 20 nt, Homo sapiens
  source 1..20: mol_type = genomic RNA
gggtgatcagtgcagtgata

SEQ ID NO: 19462 - RNA, 20 nt, Homo sapiens
  source 1..20: mol_type = genomic RNA
aaagttacagcacctgggag

SEQ ID NO: 19463 - RNA, 20 nt, Homo sapiens
  source 1..20: mol_type = genomic RNA
aagttacagcacctgggaga

SEQ ID NO: 19464 - RNA, 20 nt, Homo sapiens
  source 1..20: mol_type = genomic RNA
agttacagcacctgggagat

SEQ ID NO: 19465 - RNA, 20 nt, Homo sapiens
  source 1..20: mol_type = genomic RNA
gttacagcacctgggagatc

SEQ ID NO: 19466 - RNA, 20 nt, Homo sapiens
  source 1..20: mol_type = genomic RNA
ttacagcacctgggagatca

SEQ ID NO: 19467 - RNA, 20 nt, Homo sapiens
  source 1..20: mol_type = genomic RNA
cagcacctgggagatcagtg

SEQ ID NO: 19468 - RNA, 20 nt, Homo sapiens
  source 1..20: mol_type = genomic RNA
cacctgggagatcagtgcag

SEQ ID NO: 19469 - RNA, 20 nt, Homo sapiens
  source 1..20: mol_type = genomic RNA
ctgggagatcagtgcagaga

SEQ ID NO: 19470 - RNA, 20 nt, Homo sapiens
  source 1..20: mol_type = genomic RNA
tgggagatcagtgcagagat

SEQ ID NO: 19471 - RNA, 20 nt, Homo sapiens
  source 1..20: mol_type = genomic RNA
gggagatcagtgcagagata

SEQ ID NO: 19472 - RNA, 20 nt, Homo sapiens
  source 1..20: mol_type = genomic RNA
ggagatcagtgcagagatat

SEQ ID NO: 19473 - RNA, 20 nt, Homo sapiens
  source 1..20: mol_type = genomic RNA
gagatcagtgcagagatatg

SEQ ID NO: 19474 - RNA, 20 nt, Homo sapiens
  source 1..20: mol_type = genomic RNA
agatcagtgcagagatatgt

SEQ ID NO: 19475 - RNA, 20 nt, Homo sapiens
  source 1..20: mol_type = genomic RNA
gatatgtcacaatgtcccca

SEQ ID NO: 19476 - RNA, 20 nt, Homo sapiens
  source 1..20: mol_type = genomic RNA
atatgtcacaatgtccccag

SEQ ID NO: 19477 - RNA, 20 nt, Homo sapiens
  source 1..20: mol_type = genomic RNA
tatgtcacaatgtccccagt

SEQ ID NO: 19478 - RNA, 20 nt, Homo sapiens
  source 1..20: mol_type = genomic RNA
atgtcacaatgtccccagta

SEQ ID NO: 19479 - RNA, 20 nt, Homo sapiens
  source 1..20: mol_type = genomic RNA
tgtcacaatgtccccagtag

SEQ ID NO: 19480 - RNA, 20 nt, Homo sapiens
  source 1..20: mol_type = genomic RNA
gtcacaatgtccccagtagg

SEQ ID NO: 19481 - RNA, 20 nt, Homo sapiens
  source 1..20: mol_type = genomic RNA
tcacaatgtccccagtaggc

SEQ ID NO: 19482 - RNA, 20 nt, Homo sapiens
  source 1..20: mol_type = genomic RNA
cacaatgtccccagtaggca

SEQ ID NO: 19483 - RNA, 20 nt, Homo sapiens
  source 1..20: mol_type = genomic RNA
acaatgtccccagtaggcag

SEQ ID NO: 19484 - RNA, 20 nt, Homo sapiens
  source 1..20: mol_type = genomic RNA
caatgtccccagtaggcaga

SEQ ID NO: 19485 - RNA, 20 nt, Homo sapiens
  source 1..20: mol_type = genomic RNA
aatgtccccagtaggcagag

SEQ ID NO: 19486 - RNA, 20 nt, Homo sapiens
  source 1..20: mol_type = genomic RNA
atgtccccagtaggcagaga

SEQ ID NO: 19487 - RNA, 20 nt, Homo sapiens
  source 1..20: mol_type = genomic RNA
gcagagaccaggcaagagtt

SEQ ID NO: 19488 - RNA, 20 nt, Homo sapiens
  source 1..20: mol_type = genomic RNA
cagagaccaggcaagagttg

SEQ ID NO: 19489 - RNA, 20 nt, Homo sapiens
  source 1..20: mol_type = genomic RNA
agaccaggcaagagttggat

SEQ ID NO: 19490 - RNA, 20 nt, Homo sapiens
  source 1..20: mol_type = genomic RNA
gaccaggcaagagttggatc

SEQ ID NO: 19491 - RNA, 20 nt, Homo sapiens
  source 1..20: mol_type = genomic RNA
accaggcaagagttggatca

SEQ ID NO: 19492 - RNA, 20 nt, Homo sapiens
  source 1..20: mol_type = genomic RNA
ccaggcaagagttggatcac

SEQ ID NO: 19493 - RNA, 20 nt, Homo sapiens
  source 1..20: mol_type = genomic RNA
caggcaagagttggatcacc

SEQ ID NO: 19494 - RNA, 20 nt, Homo sapiens
  source 1..20: mol_type = genomic RNA
aggcaagagttggatcacct

SEQ ID NO: 19495 - RNA, 20 nt, Homo sapiens
  source 1..20: mol_type = genomic RNA
ggcaagagttggatcacctc

SEQ ID NO: 19496 - RNA, 20 nt, Homo sapiens
  source 1..20: mol_type = genomic RNA
gcaagagttggatcacctcg

SEQ ID NO: 19497 - RNA, 20 nt, Homo sapiens
  source 1..20: mol_type = genomic RNA
caagagttggatcacctcgg

SEQ ID NO: 19498 - RNA, 20 nt, Homo sapiens
  source 1..20: mol_type = genomic RNA
aagagttggatcacctcggg

SEQ ID NO: 19499 - RNA, 20 nt, Homo sapiens
  source 1..20: mol_type = genomic RNA
agagttggatcacctcggga

SEQ ID NO: 19500 - RNA, 20 nt, Homo sapiens
  source 1..20: mol_type = genomic RNA
gagttggatcacctcgggat

SEQ ID NO: 19501 - RNA, 20 nt, Homo sapiens
  source 1..20: mol_type = genomic RNA
agttggatcacctcgggatc

SEQ ID NO: 19502 - RNA, 20 nt, Homo sapiens
  source 1..20: mol_type = genomic RNA
gttggatcacctcgggatca

SEQ ID NO: 19503 - RNA, 20 nt, Homo sapiens
  source 1..20: mol_type = genomic RNA
ttggatcacctcgggatcag

SEQ ID NO: 19504 - RNA, 20 nt, Homo sapiens
  source 1..20: mol_type = genomic RNA
tggatcacctcgggatcagt

SEQ ID NO: 19505 - RNA, 20 nt, Homo sapiens
  source 1..20: mol_type = genomic RNA
ggatcacctcgggatcagtg

SEQ ID NO: 19506 - RNA, 20 nt, Homo sapiens
  source 1..20: mol_type = genomic RNA
gatcacctcgggatcagtgc

SEQ ID NO: 19507 - RNA, 20 nt, Homo sapiens
  source 1..20: mol_type = genomic RNA
atcacctcgggatcagtgca

SEQ ID NO: 19508 - RNA, 20 nt, Homo sapiens
  source 1..20: mol_type = genomic RNA
tcacctcgggatcagtgcag

SEQ ID NO: 19509 - RNA, 20 nt, Homo sapiens
  source 1..20: mol_type = genomic RNA
cacctcgggatcagtgcaga

SEQ ID NO: 19510 - RNA, 20 nt, Homo sapiens
  source 1..20: mol_type = genomic RNA
cctcgggatcagtgcagaga

SEQ ID NO: 19511 - RNA, 20 nt, Homo sapiens
  source 1..20: mol_type = genomic RNA
ctcgggatcagtgcagagat

SEQ ID NO: 19512 - RNA, 20 nt, Homo sapiens
  source 1..20: mol_type = genomic RNA
tcgggatcagtgcagagata

SEQ ID NO: 19513 - RNA, 20 nt, Homo sapiens
  source 1..20: mol_type = genomic RNA
cgggatcagtgcagagatat

SEQ ID NO: 19514 - RNA, 20 nt, Homo sapiens
  source 1..20: mol_type = genomic RNA
gggatcagtgcagagatatg

SEQ ID NO: 19515 - RNA, 20 nt, Homo sapiens
  source 1..20: mol_type = genomic RNA
ggatcagtgcagagatatgt

SEQ ID NO: 19516 - RNA, 20 nt, Homo sapiens
  source 1..20: mol_type = genomic RNA
atcagtgcagagatatgtct

SEQ ID NO: 19517 - RNA, 20 nt, Homo sapiens
  source 1..20: mol_type = genomic RNA
tcagtgcagagatatgtctc

SEQ ID NO: 19518 - RNA, 20 nt, Homo sapiens
  source 1..20: mol_type = genomic RNA
cagtgcagagatatgtctca

SEQ ID NO: 19519 - RNA, 20 nt, Homo sapiens
  source 1..20: mol_type = genomic RNA
agtgcagagatatgtctcaa

SEQ ID NO: 19520 - RNA, 20 nt, Homo sapiens
  source 1..20: mol_type = genomic RNA
gtgcagagatatgtctcaat

SEQ ID NO: 19521 - RNA, 20 nt, Homo sapiens
  source 1..20: mol_type = genomic RNA
tgcagagatatgtctcaatc

SEQ ID NO: 19522 - RNA, 20 nt, Homo sapiens
  source 1..20: mol_type = genomic RNA
gcagagatatgtctcaatcc

SEQ ID NO: 19523 - RNA, 20 nt, Homo sapiens
  source 1..20: mol_type = genomic RNA
cagagatatgtctcaatccc

SEQ ID NO: 19524 - RNA, 20 nt, Homo sapiens
  source 1..20: mol_type = genomic RNA
agagatatgtctcaatcccc

SEQ ID NO: 19525 - RNA, 20 nt, Homo sapiens
  source 1..20: mol_type = genomic RNA
gagatatgtctcaatccccc

SEQ ID NO: 19526 - RNA, 20 nt, Homo sapiens
  source 1..20: mol_type = genomic RNA
agatatgtctcaatccccct

SEQ ID NO: 19527 - RNA, 20 nt, Homo sapiens
  source 1..20: mol_type = genomic RNA
gatatgtctcaatccccctg

SEQ ID NO: 19528 - RNA, 20 nt, Homo sapiens
  source 1..20: mol_type = genomic RNA
atatgtctcaatccccctgt

SEQ ID NO: 19529 - RNA, 20 nt, Homo sapiens
  source 1..20: mol_type = genomic RNA
tatgtctcaatccccctgtg

SEQ ID NO: 19530 - RNA, 20 nt, Homo sapiens
  source 1..20: mol_type = genomic RNA
atgtctcaatccccctgtgg

SEQ ID NO: 19531 - RNA, 20 nt, Homo sapiens
  source 1..20: mol_type = genomic RNA
tgtctcaatccccctgtggg

SEQ ID NO: 19532 - RNA, 20 nt, Homo sapiens
  source 1..20: mol_type = genomic RNA
gtctcaatccccctgtgggc

SEQ ID NO: 19533 - RNA, 20 nt, Homo sapiens
  source 1..20: mol_type = genomic RNA
tctcaatccccctgtgggca

SEQ ID NO: 19534 - RNA, 20 nt, Homo sapiens
  source 1..20: mol_type = genomic RNA
gcacagcctagacaagagtt

SEQ ID NO: 19535 - RNA, 20 nt, Homo sapiens
  source 1..20: mol_type = genomic RNA
cacagcctagacaagagtta

SEQ ID NO: 19536 - RNA, 20 nt, Homo sapiens
  source 1..20: mol_type = genomic RNA
atcacctcggttaacagtgc

SEQ ID NO: 19537 - RNA, 20 nt, Homo sapiens
  source 1..20: mol_type = genomic RNA
tcacctcggttaacagtgca

SEQ ID NO: 19538 - RNA, 20 nt, Homo sapiens
  source 1..20: mol_type = genomic RNA
cacctcggttaacagtgcag

SEQ ID NO: 19539 - RNA, 20 nt, Homo sapiens
  source 1..20: mol_type = genomic RNA
acctcggttaacagtgcaga

SEQ ID NO: 19540 - RNA, 20 nt, Homo sapiens
  source 1..20: mol_type = genomic RNA
cctcggttaacagtgcagag

SEQ ID NO: 19541 - RNA, 20 nt, Homo sapiens
  source 1..20: mol_type = genomic RNA
ctcggttaacagtgcagaga

SEQ ID NO: 19542 - RNA, 20 nt, Homo sapiens
  source 1..20: mol_type = genomic RNA
tcggttaacagtgcagagat

SEQ ID NO: 19543 - RNA, 20 nt, Homo sapiens
  source 1..20: mol_type = genomic RNA
cggttaacagtgcagagata

SEQ ID NO: 19544 - RNA, 20 nt, Homo sapiens
  source 1..20: mol_type = genomic RNA
ggttaacagtgcagagatat

SEQ ID NO: 19545 - RNA, 20 nt, Homo sapiens
  source 1..20: mol_type = genomic RNA
gttaacagtgcagagatatg

SEQ ID NO: 19546 - RNA, 20 nt, Homo sapiens
  source 1..20: mol_type = genomic RNA
ttaacagtgcagagatatgt

SEQ ID NO: 19547 - RNA, 20 nt, Homo sapiens
  source 1..20: mol_type = genomic RNA
taacagtgcagagatatgtc

SEQ ID NO: 19548 - RNA, 20 nt, Homo sapiens
  source 1..20: mol_type = genomic RNA
aacagtgcagagatatgtca

SEQ ID NO: 19549 - RNA, 20 nt, Homo sapiens
  source 1..20: mol_type = genomic RNA
acagtgcagagatatgtcaa

SEQ ID NO: 19550 - RNA, 20 nt, Homo sapiens
  source 1..20: mol_type = genomic RNA
cagtgcagagatatgtcaaa

SEQ ID NO: 19551 - RNA, 20 nt, Homo sapiens
  source 1..20: mol_type = genomic RNA
agtgcagagatatgtcaaaa

SEQ ID NO: 19552 - RNA, 20 nt, Homo sapiens
  source 1..20: mol_type = genomic RNA
gtgcagagatatgtcaaaat

SEQ ID NO: 19553 - RNA, 20 nt, Homo sapiens
  source 1..20: mol_type = genomic RNA
tgcagagatatgtcaaaatg

SEQ ID NO: 19554 - RNA, 20 nt, Homo sapiens
  source 1..20: mol_type = genomic RNA
gcagagatatgtcaaaatgc

SEQ ID NO: 19555 - RNA, 20 nt, Homo sapiens
  source 1..20: mol_type = genomic RNA
cagagatatgtcaaaatgcc

SEQ ID NO: 19556 - RNA, 20 nt, Homo sapiens
  source 1..20: mol_type = genomic RNA
agagatatgtcaaaatgccc

SEQ ID NO: 19557 - RNA, 20 nt, Homo sapiens
  source 1..20: mol_type = genomic RNA
gagatatgtcaaaatgcccc

SEQ ID NO: 19558 - RNA, 20 nt, Homo sapiens
  source 1..20: mol_type = genomic RNA
agatatgtcaaaatgcccct

SEQ ID NO: 19559 - RNA, 20 nt, Homo sapiens
  source 1..20: mol_type = genomic RNA
gatatgtcaaaatgcccctg

SEQ ID NO: 19560 - RNA, 20 nt, Homo sapiens
  source 1..20: mol_type = genomic RNA
atatgtcaaaatgcccctgt

SEQ ID NO: 19561 - RNA, 20 nt, Homo sapiens
  source 1..20: mol_type = genomic RNA
tatgtcaaaatgcccctgta

SEQ ID NO: 19562 - RNA, 20 nt, Homo sapiens
  source 1..20: mol_type = genomic RNA
atgtcaaaatgcccctgtag

SEQ ID NO: 19563 - RNA, 20 nt, Homo sapiens
  source 1..20: mol_type = genomic RNA
tgtcaaaatgcccctgtagg

SEQ ID NO: 19564 - RNA, 20 nt, Homo sapiens
  source 1..20: mol_type = genomic RNA
gtcaaaatgcccctgtaggc

SEQ ID NO: 19565 - RNA, 20 nt, Homo sapiens
  source 1..20: mol_type = genomic RNA
tcaaaatgcccctgtaggca

SEQ ID NO: 19566 - RNA, 20 nt, Homo sapiens
  source 1..20: mol_type = genomic RNA
caaaatgcccctgtaggcaa

SEQ ID NO: 19567 - RNA, 20 nt, Homo sapiens
  source 1..20: mol_type = genomic RNA
aaaatgcccctgtaggcaag

SEQ ID NO: 19568 - RNA, 20 nt, Homo sapiens
  source 1..20: mol_type = genomic RNA
cctgtaggcaagcctacaca

SEQ ID NO: 19569 - RNA, 20 nt, Homo sapiens
  source 1..20: mol_type = genomic RNA
ctgtaggcaagcctacacaa

SEQ ID NO: 19570 - RNA, 20 nt, Homo sapiens
  source 1..20: mol_type = genomic RNA
tgtaggcaagcctacacaag

SEQ ID NO: 19571 - RNA, 20 nt, Homo sapiens
  source 1..20: mol_type = genomic RNA
gtaggcaagcctacacaagt

SEQ ID NO: 19572 - RNA, 20 nt, Homo sapiens
  source 1..20: mol_type = genomic RNA
taggcaagcctacacaagta

SEQ ID NO: 19573 - RNA, 20 nt, Homo sapiens
  source 1..20: mol_type = genomic RNA
aggcaagcctacacaagtat

SEQ ID NO: 19574 - RNA, 20 nt, Homo sapiens
  source 1..20: mol_type = genomic RNA
ggcaagcctacacaagtatt

SEQ ID NO: 19575 - RNA, 20 nt, Homo sapiens
  source 1..20: mol_type = genomic RNA
gcaagcctacacaagtatta

SEQ ID NO: 19576 - RNA, 20 nt, Homo sapiens
  source 1..20: mol_type = genomic RNA
caagcctacacaagtattac

SEQ ID NO: 19577 - RNA, 20 nt, Homo sapiens
  source 1..20: mol_type = genomic RNA
aagcctacacaagtattaca

SEQ ID NO: 19578 - RNA, 20 nt, Homo sapiens
  source 1..20: mol_type = genomic RNA
agcctacacaagtattacat

SEQ ID NO: 19579 - RNA, 20 nt, Homo sapiens
  source 1..20: mol_type = genomic RNA
gcctacacaagtattacatc

SEQ ID NO: 19580 - RNA, 20 nt, Homo sapiens
  source 1..20: mol_type = genomic RNA
cctacacaagtattacatca

SEQ ID NO: 19581 - RNA, 20 nt, Homo sapiens
  source 1..20: mol_type = genomic RNA
ctacacaagtattacatcac

SEQ ID NO: 19582 - RNA, 20 nt, Homo sapiens
  source 1..20: mol_type = genomic RNA
tacacaagtattacatcact

SEQ ID NO: 19583 - RNA, 20 nt, Homo sapiens
  source 1..20: mol_type = genomic RNA
aagtattacatcacttaggt

SEQ ID NO: 19584 - RNA, 20 nt, Homo sapiens
  source 1..20: mol_type = genomic RNA
agtattacatcacttaggtg

SEQ ID NO: 19585 - RNA, 20 nt, Homo sapiens
  source 1..20: mol_type = genomic RNA
gtattacatcacttaggtga

SEQ ID NO: 19586 - RNA, 20 nt, Homo sapiens
  source 1..20: mol_type = genomic RNA
attacatcacttaggtgatc

SEQ ID NO: 19587 - RNA, 20 nt, Homo sapiens
  source 1..20: mol_type = genomic RNA
gcagagatatgtcacaatac

SEQ ID NO: 19588 - RNA, 20 nt, Homo sapiens
  source 1..20: mol_type = genomic RNA
cagagatatgtcacaatacc

SEQ ID NO: 19589 - RNA, 20 nt, Homo sapiens
  source 1..20: mol_type = genomic RNA
agagatatgtcacaataccc

SEQ ID NO: 19590 - RNA, 20 nt, Homo sapiens
  source 1..20: mol_type = genomic RNA
gagatatgtcacaatacccc

SEQ ID NO: 19591 - RNA, 20 nt, Homo sapiens
  source 1..20: mol_type = genomic RNA
agatatgtcacaataccccc

SEQ ID NO: 19592 - RNA, 20 nt, Homo sapiens
  source 1..20: mol_type = genomic RNA
gatatgtcacaataccccct

SEQ ID NO: 19593 - RNA, 20 nt, Homo sapiens
  source 1..20: mol_type = genomic RNA
atatgtcacaataccccctg

SEQ ID NO: 19594 - RNA, 20 nt, Homo sapiens
  source 1..20: mol_type = genomic RNA
tatgtcacaataccccctgt

SEQ ID NO: 19595 - RNA, 20 nt, Homo sapiens
  source 1..20: mol_type = genomic RNA
atgtcacaataccccctgta

SEQ ID NO: 19596 - RNA, 20 nt, Homo sapiens
  source 1..20: mol_type = genomic RNA
tgtcacaataccccctgtaa

SEQ ID NO: 19597 - RNA, 20 nt, Homo sapiens
  source 1..20: mol_type = genomic RNA
gtcacaataccccctgtaag

SEQ ID NO: 19598 - RNA, 20 nt, Homo sapiens
  source 1..20: mol_type = genomic RNA
tcacaataccccctgtaagc

SEQ ID NO: 19599 - RNA, 20 nt, Homo sapiens
  source 1..20: mol_type = genomic RNA
cacaataccccctgtaagca

SEQ ID NO: 19600 - RNA, 20 nt, Homo sapiens
  source 1..20: mol_type = genomic RNA
acaataccccctgtaagcag

SEQ ID NO: 19601 - RNA, 20 nt, Homo sapiens
  source 1..20: mol_type = genomic RNA
caataccccctgtaagcaga

SEQ ID NO: 19602 - RNA, 20 nt, Homo sapiens
  source 1..20: mol_type = genomic RNA
aataccccctgtaagcagag

SEQ ID NO: 19603 - RNA, 20 nt, Homo sapiens
  source 1..20: mol_type = genomic RNA
ataccccctgtaagcagagc

SEQ ID NO: 19604 - RNA, 20 nt, Homo sapiens
  source 1..20: mol_type = genomic RNA
ccccctgtaagcagagccta

SEQ ID NO: 19605 - RNA, 20 nt, Homo sapiens
  source 1..20: mol_type = genomic RNA
cccctgtaagcagagcctag

SEQ ID NO: 19606 - RNA, 20 nt, Homo sapiens
  source 1..20: mol_type = genomic RNA
ccctgtaagcagagcctaga

SEQ ID NO: 19607 - RNA, 20 nt, Homo sapiens
  source 1..20: mol_type = genomic RNA
cctgtaagcagagcctagac

SEQ ID NO: 19608 - RNA, 20 nt, Homo sapiens
  source 1..20: mol_type = genomic RNA
ctgtaagcagagcctagaca

SEQ ID NO: 19609 - RNA, 20 nt, Homo sapiens
  source 1..20: mol_type = genomic RNA
tgtaagcagagcctagacaa

SEQ ID NO: 19610 - RNA, 20 nt, Homo sapiens
  source 1..20: mol_type = genomic RNA
gtaagcagagcctagacaag

SEQ ID NO: 19611 - RNA, 20 nt, Homo sapiens
  source 1..20: mol_type = genomic RNA
taagcagagcctagacaaga

SEQ ID NO: 19612 - RNA, 20 nt, Homo sapiens
  source 1..20: mol_type = genomic RNA
gatcagtgcagagatatgtg

SEQ ID NO: 19613 - RNA, 20 nt, Homo sapiens
  source 1..20: mol_type = genomic RNA
tcagtgcagagatatgtgac

SEQ ID NO: 19614 - RNA, 20 nt, Homo sapiens
  source 1..20: mol_type = genomic RNA
cagtgcagagatatgtgaca

SEQ ID NO: 19615 - RNA, 20 nt, Homo sapiens
  source 1..20: mol_type = genomic RNA
agtgcagagatatgtgacaa

SEQ ID NO: 19616 - RNA, 20 nt, Homo sapiens
  source 1..20: mol_type = genomic RNA
gtgcagagatatgtgacaag

SEQ ID NO: 19617 - RNA, 20 nt, Homo sapiens
  source 1..20: mol_type = genomic RNA
tgcagagatatgtgacaagg

SEQ ID NO: 19618 - RNA, 20 nt, Homo sapiens
  source 1..20: mol_type = genomic RNA
gcagagatatgtgacaaggc

SEQ ID NO: 19619 - RNA, 20 nt, Homo sapiens
  source 1..20: mol_type = genomic RNA
cagagatatgtgacaaggcc

SEQ ID NO: 19620 - RNA, 20 nt, Homo sapiens
  source 1..20: mol_type = genomic RNA
agagatatgtgacaaggccc

SEQ ID NO: 19621 - RNA, 20 nt, Homo sapiens
  source 1..20: mol_type = genomic RNA
gagatatgtgacaaggcccc

SEQ ID NO: 19622 - RNA, 20 nt, Homo sapiens
  source 1..20: mol_type = genomic RNA
agatatgtgacaaggcccct

SEQ ID NO: 19623 - RNA, 20 nt, Homo sapiens
  source 1..20: mol_type = genomic RNA
gatatgtgacaaggcccctt

SEQ ID NO: 19624 - RNA, 20 nt, Homo sapiens
  source 1..20: mol_type = genomic RNA
aagcagagcctagacaatag

SEQ ID NO: 19625 - RNA, 20 nt, Homo sapiens
  source 1..20: mol_type = genomic RNA
agcagagcctagacaatagt

SEQ ID NO: 19626 - RNA, 20 nt, Homo sapiens
  source 1..20: mol_type = genomic RNA
gcagagcctagacaatagtt

SEQ ID NO: 19627 - RNA, 20 nt, Homo sapiens
  source 1..20: mol_type = genomic RNA
cagagcctagacaatagtta

SEQ ID NO: 19628 - RNA, 20 nt, Homo sapiens
  source 1..20: mol_type = genomic RNA
agagcctagacaatagttac

SEQ ID NO: 19629 - RNA, 20 nt, Homo sapiens
  source 1..20: mol_type = genomic RNA
gagcctagacaatagttaca

SEQ ID NO: 19630 - RNA, 20 nt, Homo sapiens
  source 1..20: mol_type = genomic RNA
tagacaatagttacatcacc

SEQ ID NO: 19631 - RNA, 20 nt, Homo sapiens
  source 1..20: mol_type = genomic RNA
agacaatagttacatcacct

SEQ ID NO: 19632 - RNA, 20 nt, Homo sapiens
  source 1..20: mol_type = genomic RNA
gacaatagttacatcacctg

SEQ ID NO: 19633 - RNA, 20 nt, Homo sapiens
  source 1..20: mol_type = genomic RNA
acaatagttacatcacctga

SEQ ID NO: 19634 - RNA, 20 nt, Homo sapiens
  source 1..20: mol_type = genomic RNA
caatagttacatcacctgag

SEQ ID NO: 19635 - RNA, 20 nt, Homo sapiens
  source 1..20: mol_type = genomic RNA
aatagttacatcacctgagt

SEQ ID NO: 19636 - RNA, 20 nt, Homo sapiens
  source 1..20: mol_type = genomic RNA
atagttacatcacctgagtg

SEQ ID NO: 19637 - RNA, 20 nt, Homo sapiens
  source 1..20: mol_type = genomic RNA
tagttacatcacctgagtga

SEQ ID NO: 19638 - RNA, 20 nt, Homo sapiens
  source 1..20: mol_type = genomic RNA
agttacatcacctgagtgat

SEQ ID NO: 19639 - RNA, 20 nt, Homo sapiens
  source 1..20: mol_type = genomic RNA
gttacatcacctgagtgatc

SEQ ID NO: 19640 - RNA, 20 nt, Homo sapiens
  source 1..20: mol_type = genomic RNA
ttacatcacctgagtgatca

SEQ ID NO: 19641 - RNA, 20 nt, Homo sapiens
  source 1..20: mol_type = genomic RNA
tacatcacctgagtgatcag

SEQ ID NO: 19642 - RNA, 20 nt, Homo sapiens
  source 1..20: mol_type = genomic RNA
acatcacctgagtgatcagt

SEQ ID NO: 19643 - RNA, 20 nt, Homo sapiens
  source 1..20: mol_type = genomic RNA
catcacctgagtgatcagtg

SEQ ID NO: 19644 - RNA, 20 nt, Homo sapiens
  source 1..20: mol_type = genomic RNA
atcacctgagtgatcagtgc

SEQ ID NO: 19645 - RNA, 20 nt, Homo sapiens
  source 1..20: mol_type = genomic RNA
tcacctgagtgatcagtgca

SEQ ID NO: 19646 - RNA, 20 nt, Homo sapiens
  source 1..20: mol_type = genomic RNA
cacctgagtgatcagtgcag

SEQ ID NO: 19647 - RNA, 20 nt, Homo sapiens
  source 1..20: mol_type = genomic RNA
acctgagtgatcagtgcaga

SEQ ID NO: 19648 - RNA, 20 nt, Homo sapiens
  source 1..20: mol_type = genomic RNA
cctgagtgatcagtgcagag

SEQ ID NO: 19649 - RNA, 20 nt, Homo sapiens
  source 1..20: mol_type = genomic RNA
ctgagtgatcagtgcagaga

SEQ ID NO: 19650 - RNA, 20 nt, Homo sapiens
  source 1..20: mol_type = genomic RNA
tgagtgatcagtgcagagat

SEQ ID NO: 19651 - RNA, 20 nt, Homo sapiens
  source 1..20: mol_type = genomic RNA
gagtgatcagtgcagagatc

SEQ ID NO: 19652 - RNA, 20 nt, Homo sapiens
  source 1..20: mol_type = genomic RNA
agtgatcagtgcagagatct

SEQ ID NO: 19653 - RNA, 20 nt, Homo sapiens
  source 1..20: mol_type = genomic RNA
gtgatcagtgcagagatctg

SEQ ID NO: 19654 - RNA, 20 nt, Homo sapiens
  source 1..20: mol_type = genomic RNA
tgatcagtgcagagatctgt

SEQ ID NO: 19655 - RNA, 20 nt, Homo sapiens
  source 1..20: mol_type = genomic RNA
gatcagtgcagagatctgtc

SEQ ID NO: 19656 - RNA, 20 nt, Homo sapiens
  source 1..20: mol_type = genomic RNA
atcagtgcagagatctgtca

SEQ ID NO: 19657 - RNA, 20 nt, Homo sapiens
  source 1..20: mol_type = genomic RNA
tcagtgcagagatctgtcac

SEQ ID NO: 19658 - RNA, 20 nt, Homo sapiens
  source 1..20: mol_type = genomic RNA
cagtgcagagatctgtcaca

SEQ ID NO: 19659 - RNA, 20 nt, Homo sapiens
  source 1..20: mol_type = genomic RNA
agtgcagagatctgtcacaa

SEQ ID NO: 19660 - RNA, 20 nt, Homo sapiens
  source 1..20: mol_type = genomic RNA
gtgcagagatctgtcacaat

SEQ ID NO: 19661 - RNA, 20 nt, Homo sapiens
  source 1..20: mol_type = genomic RNA
tgcagagatctgtcacaatg

SEQ ID NO: 19662 - RNA, 20 nt, Homo sapiens
  source 1..20: mol_type = genomic RNA
gcagagatctgtcacaatgc

SEQ ID NO: 19663 - RNA, 20 nt, Homo sapiens
  source 1..20: mol_type = genomic RNA
cagagatctgtcacaatgcc

SEQ ID NO: 19664 - RNA, 20 nt, Homo sapiens
  source 1..20: mol_type = genomic RNA
gatctgtcacaatgcccctt

SEQ ID NO: 19665 - RNA, 20 nt, Homo sapiens
  source 1..20: mol_type = genomic RNA
atctgtcacaatgccccttt

SEQ ID NO: 19666 - RNA, 20 nt, Homo sapiens
  source 1..20: mol_type = genomic RNA
tctgtcacaatgccccttta

SEQ ID NO: 19667 - RNA, 20 nt, Homo sapiens
  source 1..20: mol_type = genomic RNA
ctgtcacaatgcccctttag

SEQ ID NO: 19668 - RNA, 20 nt, Homo sapiens
  source 1..20: mol_type = genomic RNA
tgtcacaatgcccctttagg

SEQ ID NO: 19669 - RNA, 20 nt, Homo sapiens
  source 1..20: mol_type = genomic RNA
gtcacaatgcccctttaggc

SEQ ID NO: 19670 - RNA, 20 nt, Homo sapiens
  source 1..20: mol_type = genomic RNA
tcacaatgcccctttaggca

SEQ ID NO: 19671 - RNA, 20 nt, Homo sapiens
  source 1..20: mol_type = genomic RNA
cacaatgcccctttaggcag

SEQ ID NO: 19672 - RNA, 20 nt, Homo sapiens
  source 1..20: mol_type = genomic RNA
acaatgcccctttaggcaga

SEQ ID NO: 19673 - RNA, 20 nt, Homo sapiens
  source 1..20: mol_type = genomic RNA
caatgcccctttaggcagag

SEQ ID NO: 19674 - RNA, 20 nt, Homo sapiens
  source 1..20: mol_type = genomic RNA
aatgcccctttaggcagagc

SEQ ID NO: 19675 - RNA, 20 nt, Homo sapiens
  source 1..20: mol_type = genomic RNA
atgcccctttaggcagagct

SEQ ID NO: 19676 - RNA, 20 nt, Homo sapiens
  source 1..20: mol_type = genomic RNA
tgcccctttaggcagagctt

SEQ ID NO: 19677 - RNA, 20 nt, Homo sapiens
  source 1..20: mol_type = genomic RNA
gcccctttaggcagagctta

SEQ ID NO: 19678 - RNA, 20 nt, Homo sapiens
  source 1..20: mol_type = genomic RNA
cccctttaggcagagcttaa

SEQ ID NO: 19679 - RNA, 20 nt, Homo sapiens
  source 1..20: mol_type = genomic RNA
ccctttaggcagagcttaaa

SEQ ID NO: 19680 - RNA, 20 nt, Homo sapiens
  source 1..20: mol_type = genomic RNA
cctttaggcagagcttaaac

SEQ ID NO: 19681 - RNA, 20 nt, Homo sapiens
  source 1..20: mol_type = genomic RNA
catcacctgtgtgatcagtg

SEQ ID NO: 19682 - RNA, 20 nt, Homo sapiens
  source 1..20: mol_type = genomic RNA
tgatcagtgcagaaatatgt

SEQ ID NO: 19683 - RNA, 20 nt, Homo sapiens
  source 1..20: mol_type = genomic RNA
cccctttaggcagagcttag

SEQ ID NO: 19684 - RNA, 20 nt, Homo sapiens
  source 1..20: mol_type = genomic RNA
ccctttaggcagagcttaga

SEQ ID NO: 19685 - RNA, 20 nt, Homo sapiens
  source 1..20: mol_type = genomic RNA
cctttaggcagagcttagac

SEQ ID NO: 19686 - RNA, 20 nt, Homo sapiens
  source 1..20: mol_type = genomic RNA
ctttaggcagagcttagact

SEQ ID NO: 19687 - RNA, 20 nt, Homo sapiens
  source 1..20: mol_type = genomic RNA
tttaggcagagcttagacta

SEQ ID NO: 19688 - RNA, 20 nt, Homo sapiens
  source 1..20: mol_type = genomic RNA
ttaggcagagcttagactag

SEQ ID NO: 19689 - RNA, 20 nt, Homo sapiens
  source 1..20: mol_type = genomic RNA
taggcagagcttagactaga

SEQ ID NO: 19690 - RNA, 20 nt, Homo sapiens
  source 1..20: mol_type = genomic RNA
aggcagagcttagactagag

SEQ ID NO: 19691 - RNA, 20 nt, Homo sapiens
  source 1..20: mol_type = genomic RNA
ggcagagcttagactagagt

SEQ ID NO: 19692 - RNA, 20 nt, Homo sapiens
  source 1..20: mol_type = genomic RNA
gcagagcttagactagagtt

SEQ ID NO: 19693 - RNA, 20 nt, Homo sapiens
  source 1..20: mol_type = genomic RNA
cagagcttagactagagtta

SEQ ID NO: 19694 - RNA, 20 nt, Homo sapiens
  source 1..20: mol_type = genomic RNA
agagcttagactagagttac

SEQ ID NO: 19695 - RNA, 20 nt, Homo sapiens
  source 1..20: mol_type = genomic RNA
gagcttagactagagttaca

SEQ ID NO: 19696 - RNA, 20 nt, Homo sapiens
  source 1..20: mol_type = genomic RNA
agcttagactagagttacat

SEQ ID NO: 19697 - RNA, 20 nt, Homo sapiens
  source 1..20: mol_type = genomic RNA
gcttagactagagttacatc

SEQ ID NO: 19698 - RNA, 20 nt, Homo sapiens
  source 1..20: mol_type = genomic RNA
ttagactagagttacatcac

SEQ ID NO: 19699 - RNA, 20 nt, Homo sapiens
  source 1..20: mol_type = genomic RNA
tagactagagttacatcacc

SEQ ID NO: 19700 - RNA, 20 nt, Homo sapiens
  source 1..20: mol_type = genomic RNA
agactagagttacatcacct

SEQ ID NO: 19701 - RNA, 20 nt, Homo sapiens
  source 1..20: mol_type = genomic RNA
gactagagttacatcacctg

SEQ ID NO: 19702 - RNA, 20 nt, Homo sapiens
  source 1..20: mol_type = genomic RNA
actagagttacatcacctgg

SEQ ID NO: 19703 - RNA, 20 nt, Homo sapiens
  source 1..20: mol_type = genomic RNA
ctagagttacatcacctggg

SEQ ID NO: 19704 - RNA, 20 nt, Homo sapiens
  source 1..20: mol_type = genomic RNA
tagagttacatcacctgggt

SEQ ID NO: 19705 - RNA, 20 nt, Homo sapiens
  source 1..20: mol_type = genomic RNA
tgcccccataggcaaatcca

SEQ ID NO: 19706 - RNA, 20 nt, Homo sapiens
  source 1..20: mol_type = genomic RNA
gcccccataggcaaatccaa

SEQ ID NO: 19707 - RNA, 20 nt, Homo sapiens
  source 1..20: mol_type = genomic RNA
cccccataggcaaatccaag

SEQ ID NO: 19708 - RNA, 20 nt, Homo sapiens
  source 1..20: mol_type = genomic RNA
ccccataggcaaatccaaga

SEQ ID NO: 19709 - RNA, 20 nt, Homo sapiens
  source 1..20: mol_type = genomic RNA
cccataggcaaatccaagac

SEQ ID NO: 19710 - RNA, 20 nt, Homo sapiens
  source 1..20: mol_type = genomic RNA
ccataggcaaatccaagaca

SEQ ID NO: 19711 - RNA, 20 nt, Homo sapiens
  source 1..20: mol_type = genomic RNA
cataggcaaatccaagacaa

SEQ ID NO: 19712 - RNA, 20 nt, Homo sapiens
  source 1..20: mol_type = genomic RNA
ataggcaaatccaagacaag

SEQ ID NO: 19713 - RNA, 20 nt, Homo sapiens
  source 1..20: mol_type = genomic RNA
taggcaaatccaagacaaga

SEQ ID NO: 19714 - RNA, 20 nt, Homo sapiens
  source 1..20: mol_type = genomic RNA
aggcaaatccaagacaagag

SEQ ID NO: 19715 - RNA, 20 nt, Homo sapiens
  source 1..20: mol_type = genomic RNA
ggcaaatccaagacaagagt

SEQ ID NO: 19716 - RNA, 20 nt, Homo sapiens
  source 1..20: mol_type = genomic RNA
gcaaatccaagacaagagtc

SEQ ID NO: 19717 - RNA, 20 nt, Homo sapiens
  source 1..20: mol_type = genomic RNA
caaatccaagacaagagtct

SEQ ID NO: 19718 - RNA, 20 nt, Homo sapiens
  source 1..20: mol_type = genomic RNA
aaatccaagacaagagtctg

SEQ ID NO: 19719 - RNA, 20 nt, Homo sapiens
  source 1..20: mol_type = genomic RNA
aatccaagacaagagtctgt

SEQ ID NO: 19720 - RNA, 20 nt, Homo sapiens
  source 1..20: mol_type = genomic RNA
gatcagtgcagaaatatgtc

SEQ ID NO: 19721 - RNA, 20 nt, Homo sapiens
  source 1..20: mol_type = genomic RNA
gtgcagaaatatgtcacaat

SEQ ID NO: 19722 - RNA, 20 nt, Homo sapiens
  source 1..20: mol_type = genomic RNA
tgcagaaatatgtcacaatg

SEQ ID NO: 19723 - RNA, 20 nt, Homo sapiens
  source 1..20: mol_type = genomic RNA
gcagaaatatgtcacaatgc

SEQ ID NO: 19724 - RNA, 20 nt, Homo sapiens
  source 1..20: mol_type = genomic RNA
cagaaatatgtcacaatgcc

SEQ ID NO: 19725 - RNA, 20 nt, Homo sapiens
  source 1..20: mol_type = genomic RNA
agaaatatgtcacaatgccc

SEQ ID NO: 19726 - RNA, 20 nt, Homo sapiens
  source 1..20: mol_type = genomic RNA
gaaatatgtcacaatgcccc

SEQ ID NO: 19727 - RNA, 20 nt, Homo sapiens
  source 1..20: mol_type = genomic RNA
aaatatgtcacaatgccccc

SEQ ID NO: 19728 - RNA, 20 nt, Homo sapiens
  source 1..20: mol_type = genomic RNA
aatatgtcacaatgccccca

SEQ ID NO: 19729 - RNA, 20 nt, Homo sapiens
  source 1..20: mol_type = genomic RNA
atatgtcacaatgcccccat

SEQ ID NO: 19730 - RNA, 20 nt, Homo sapiens
  source 1..20: mol_type = genomic RNA
cccccataggcagatccaac

SEQ ID NO: 19731 - RNA, 20 nt, Homo sapiens
  source 1..20: mol_type = genomic RNA
ccccataggcagatccaaca

SEQ ID NO: 19732 - RNA, 20 nt, Homo sapiens
  source 1..20: mol_type = genomic RNA
cccataggcagatccaacac

SEQ ID NO: 19733 - RNA, 20 nt, Homo sapiens
  source 1..20: mol_type = genomic RNA
ccataggcagatccaacaca

SEQ ID NO: 19734 - RNA, 20 nt, Homo sapiens
  source 1..20: mol_type = genomic RNA
cataggcagatccaacacaa

SEQ ID NO: 19735 - RNA, 20 nt, Homo sapiens
  source 1..20: mol_type = genomic RNA
ataggcagatccaacacaag

SEQ ID NO: 19736 - RNA, 20 nt, Homo sapiens
  source 1..20: mol_type = genomic RNA
taggcagatccaacacaaga

SEQ ID NO: 19737 - RNA, 20 nt, Homo sapiens
  source 1..20: mol_type = genomic RNA
aggcagatccaacacaagag

SEQ ID NO: 19738 - RNA, 20 nt, Homo sapiens
  source 1..20: mol_type = genomic RNA
ggcagatccaacacaagagt

SEQ ID NO: 19739 - RNA, 20 nt, Homo sapiens
  source 1..20: mol_type = genomic RNA
gcagatccaacacaagagtt

SEQ ID NO: 19740 - RNA, 20 nt, Homo sapiens
  source 1..20: mol_type = genomic RNA
cagatccaacacaagagtta

SEQ ID NO: 19741 - RNA, 20 nt, Homo sapiens
  source 1..20: mol_type = genomic RNA
agatccaacacaagagttac

SEQ ID NO: 19742 - RNA, 20 nt, Homo sapiens
  source 1..20: mol_type = genomic RNA
gatccaacacaagagttaca

SEQ ID NO: 19743 - RNA, 20 nt, Homo sapiens
  source 1..20: mol_type = genomic RNA
atccaacacaagagttacat

SEQ ID NO: 19744 - RNA, 20 nt, Homo sapiens
  source 1..20: mol_type = genomic RNA
tccaacacaagagttacatc

SEQ ID NO: 19745 - RNA, 20 nt, Homo sapiens
  source 1..20: mol_type = genomic RNA
ccaacacaagagttacatca

SEQ ID NO: 19746 - RNA, 20 nt, Homo sapiens
  source 1..20: mol_type = genomic RNA
caacacaagagttacatcac

SEQ ID NO: 19747 - RNA, 20 nt, Homo sapiens
  source 1..20: mol_type = genomic RNA
aacacaagagttacatcacc

SEQ ID NO: 19748 - RNA, 20 nt, Homo sapiens
  source 1..20: mol_type = genomic RNA
acacaagagttacatcacct

SEQ ID NO: 19749 - RNA, 20 nt, Homo sapiens
  source 1..20: mol_type = genomic RNA
cacaagagttacatcacctg

SEQ ID NO: 19750 - RNA, 20 nt, Homo sapiens
  source 1..20: mol_type = genomic RNA
atcagtgcagagatatgtaa

SEQ ID NO: 19751 - RNA, 20 nt, Homo sapiens
  source 1..20: mol_type = genomic RNA
tcagtgcagagatatgtaac

SEQ ID NO: 19752 - RNA, 20 nt, Homo sapiens
  source 1..20: mol_type = genomic RNA
ttccatcacctgtgtgatca

SEQ ID NO: 19753 - RNA, 20 nt, Homo sapiens
  source 1..20: mol_type = genomic RNA
tccatcacctgtgtgatcag

SEQ ID NO: 19754 - RNA, 20 nt, Homo sapiens
  source 1..20: mol_type = genomic RNA
ccatcacctgtgtgatcagt

SEQ ID NO: 19755 - RNA, 20 nt, Homo sapiens
  source 1..20: mol_type = genomic RNA
atcacctgtgtgatcagtgt

SEQ ID NO: 19756 - RNA, 20 nt, Homo sapiens
  source 1..20: mol_type = genomic RNA
tcacctgtgtgatcagtgta

SEQ ID NO: 19757 - RNA, 20 nt, Homo sapiens
  source 1..20: mol_type = genomic RNA
cacctgtgtgatcagtgtag

SEQ ID NO: 19758 - RNA, 20 nt, Homo sapiens
  source 1..20: mol_type = genomic RNA
acctgtgtgatcagtgtaga

SEQ ID NO: 19759 - RNA, 20 nt, Homo sapiens
  source 1..20: mol_type = genomic RNA
cctgtgtgatcagtgtagag

SEQ ID NO: 19760 - RNA, 20 nt, Homo sapiens
  source 1..20: mol_type = genomic RNA
ctgtgtgatcagtgtagaga

SEQ ID NO: 19761 - RNA, 20 nt, Homo sapiens
  source 1..20: mol_type = genomic RNA
tgtgtgatcagtgtagagat

SEQ ID NO: 19762 - RNA, 20 nt, Homo sapiens
  source 1..20: mol_type = genomic RNA
gtgtgatcagtgtagagata

SEQ ID NO: 19763 - RNA, 20 nt, Homo sapiens
  source 1..20: mol_type = genomic RNA
tgtgatcagtgtagagatat

SEQ ID NO: 19764 - RNA, 20 nt, Homo sapiens
  source 1..20: mol_type = genomic RNA
gtagagatatgtcacaatgc

SEQ ID NO: 19765 - RNA, 20 nt, Homo sapiens
  source 1..20: mol_type = genomic RNA
tagagatatgtcacaatgcc

SEQ ID NO: 19766 - RNA, 20 nt, Homo sapiens
  source 1..20: mol_type = genomic RNA
agagatatgtcacaatgcct

SEQ ID NO: 19767 - RNA, 20 nt, Homo sapiens
  source 1..20: mol_type = genomic RNA
gagatatgtcacaatgcctc

SEQ ID NO: 19768 - RNA, 20 nt, Homo sapiens
  source 1..20: mol_type = genomic RNA
agatatgtcacaatgcctcc

SEQ ID NO: 19769 - RNA, 20 nt, Homo sapiens
  source 1..20: mol_type = genomic RNA
gatatgtcacaatgcctcct

SEQ ID NO: 19770 - RNA, 20 nt, Homo sapiens
  source 1..20: mol_type = genomic RNA
atatgtcacaatgcctcctg

SEQ ID NO: 19771 - RNA, 20 nt, Homo sapiens
  source 1..20: mol_type = genomic RNA
tatgtcacaatgcctcctgt

SEQ ID NO: 19772 - RNA, 20 nt, Homo sapiens
  source 1..20: mol_type = genomic RNA
atgtcacaatgcctcctgta

SEQ ID NO: 19773 - RNA, 20 nt, Homo sapiens
  source 1..20: mol_type = genomic RNA
tgtcacaatgcctcctgtag

SEQ ID NO: 19774 - RNA, 20 nt, Homo sapiens
  source 1..20: mol_type = genomic RNA
gtcacaatgcctcctgtagg

SEQ ID NO: 19775 - RNA, 20 nt, Homo sapiens
  source 1..20: mol_type = genomic RNA
tcacaatgcctcctgtaggc

SEQ ID NO: 19776 - RNA, 20 nt, Homo sapiens
  source 1..20: mol_type = genomic RNA
cacaatgcctcctgtaggca

SEQ ID NO: 19777 - RNA, 20 nt, Homo sapiens
  source 1..20: mol_type = genomic RNA
acaatgcctcctgtaggcag

SEQ ID NO: 19778 - RNA, 20 nt, Homo sapiens
  source 1..20: mol_type = genomic RNA
caatgcctcctgtaggcaga

SEQ ID NO: 19779 - RNA, 20 nt, Homo sapiens
  source 1..20: mol_type = genomic RNA
aatgcctcctgtaggcagag

SEQ ID NO: 19780 - RNA, 20 nt, Homo sapiens
  source 1..20: mol_type = genomic RNA
ctcctgtaggcagaggctaa

SEQ ID NO: 19781 - RNA, 20 nt, Homo sapiens
  source 1..20: mol_type = genomic RNA
tcctgtaggcagaggctaaa

SEQ ID NO: 19782 - RNA, 20 nt, Homo sapiens
  source 1..20: mol_type = genomic RNA
cctgtaggcagaggctaaac

SEQ ID NO: 19783 - RNA, 20 nt, Homo sapiens
  source 1..20: mol_type = genomic RNA
ctgtaggcagaggctaaaca

SEQ ID NO: 19784 - RNA, 20 nt, Homo sapiens
  source 1..20: mol_type = genomic RNA
tgtaggcagaggctaaacaa

SEQ ID NO: 19785 - RNA, 20 nt, Homo sapiens
  source 1..20: mol_type = genomic RNA
gtaggcagaggctaaacaag

SEQ ID NO: 19786 - RNA, 20 nt, Homo sapiens
  source 1..20: mol_type = genomic RNA
taggcagaggctaaacaaga

SEQ ID NO: 19787 - RNA, 20 nt, Homo sapiens
  source 1..20: mol_type = genomic RNA
gcagaggctaaacaagagtt

SEQ ID NO: 19788 - RNA, 20 nt, Homo sapiens
  source 1..20: mol_type = genomic RNA
cagaggctaaacaagagtta

SEQ ID NO: 19789 - RNA, 20 nt, Homo sapiens
  source 1..20: mol_type = genomic RNA
agaggctaaacaagagttac

SEQ ID NO: 19790 - RNA, 20 nt, Homo sapiens
  source 1..20: mol_type = genomic RNA
gaggctaaacaagagttaca

SEQ ID NO: 19791 - RNA, 20 nt, Homo sapiens
  source 1..20: mol_type = genomic RNA
aggctaaacaagagttacat

SEQ ID NO: 19792 - RNA, 20 nt, Homo sapiens
  source 1..20: mol_type = genomic RNA
ggctaaacaagagttacatc

SEQ ID NO: 19793 - RNA, 20 nt, Homo sapiens
  source 1..20: mol_type = genomic RNA
gctaaacaagagttacatca

SEQ ID NO: 19794 - RNA, 20 nt, Homo sapiens
  source 1..20: mol_type = genomic RNA
ctaaacaagagttacatcac

SEQ ID NO: 19795 - RNA, 20 nt, Homo sapiens
  source 1..20: mol_type = genomic RNA
taaacaagagttacatcacc

SEQ ID NO: 19796 - RNA, 20 nt, Homo sapiens
  source 1..20: mol_type = genomic RNA
aaacaagagttacatcacct

SEQ ID NO: 19797 - RNA, 20 nt, Homo sapiens
  source 1..20: mol_type = genomic RNA
aacaagagttacatcacctg

SEQ ID NO: 19798 - RNA, 20 nt, Homo sapiens
  source 1..20: mol_type = genomic RNA
caagagttacatcacctgga

SEQ ID NO: 19799 - RNA, 20 nt, Homo sapiens
  source 1..20: mol_type = genomic RNA
aagagttacatcacctggat

SEQ ID NO: 19800 - RNA, 20 nt, Homo sapiens
  source 1..20: mol_type = genomic RNA
agagttacatcacctggatt

SEQ ID NO: 19801 - RNA, 20 nt, Homo sapiens
  source 1..20: mol_type = genomic RNA
gagttacatcacctggattt

SEQ ID NO: 19802 - RNA, 20 nt, Homo sapiens
  source 1..20: mol_type = genomic RNA
agttacatcacctggatttt

SEQ ID NO: 19803 - RNA, 20 nt, Homo sapiens
  source 1..20: mol_type = genomic RNA
acctggattttgtttcctgc

SEQ ID NO: 19804 - RNA, 20 nt, Homo sapiens
  source 1..20: mol_type = genomic RNA
cctggattttgtttcctgca

SEQ ID NO: 19805 - RNA, 20 nt, Homo sapiens
  source 1..20: mol_type = genomic RNA
tgtttcctgcaatatgtcac

SEQ ID NO: 19806 - RNA, 20 nt, Homo sapiens
  source 1..20: mol_type = genomic RNA
gtttcctgcaatatgtcaca

SEQ ID NO: 19807 - RNA, 20 nt, Homo sapiens
  source 1..20: mol_type = genomic RNA
tttcctgcaatatgtcacaa

SEQ ID NO: 19808 - RNA, 20 nt, Homo sapiens
  source 1..20: mol_type = genomic RNA
ttcctgcaatatgtcacaat

SEQ ID NO: 19809 - RNA, 20 nt, Homo sapiens
  source 1..20: mol_type = genomic RNA
tcctgcaatatgtcacaatg

SEQ ID NO: 19810 - RNA, 20 nt, Homo sapiens
  source 1..20: mol_type = genomic RNA
cctgcaatatgtcacaatgg

SEQ ID NO: 19811 - RNA, 20 nt, Homo sapiens
  source 1..20: mol_type = genomic RNA
ctgcaatatgtcacaatggc

SEQ ID NO: 19812 - RNA, 20 nt, Homo sapiens
  source 1..20: mol_type = genomic RNA
ttaggggttaggcttaggct

SEQ ID NO: 19813 - RNA, 20 nt, Homo sapiens
  source 1..20: mol_type = genomic RNA
taggggttaggcttaggctt

SEQ ID NO: 19814 - RNA, 20 nt, Homo sapiens
  source 1..20: mol_type = genomic RNA
aggggttaggcttaggctta

SEQ ID NO: 19815 - RNA, 20 nt, Homo sapiens
  source 1..20: mol_type = genomic RNA
ggggttaggcttaggcttag

SEQ ID NO: 19816 - RNA, 20 nt, Homo sapiens
  source 1..20: mol_type = genomic RNA
gggttaggcttaggcttagg

SEQ ID NO: 19817 - RNA, 20 nt, Homo sapiens
  source 1..20: mol_type = genomic RNA
ggttaggcttaggcttaggg

SEQ ID NO: 19818 - RNA, 20 nt, Homo sapiens
  source 1..20: mol_type = genomic RNA
gttaggcttaggcttagggt

SEQ ID NO: 19819 - RNA, 20 nt, Homo sapiens
  source 1..20: mol_type = genomic RNA
ttaggcttaggcttagggtt

SEQ ID NO: 19820 - RNA, 20 nt, Homo sapiens
  source 1..20: mol_type = genomic RNA
taggcttaggcttagggtta

SEQ ID NO: 19821 - RNA, 20 nt, Homo sapiens
  source 1..20: mol_type = genomic RNA
aggcttaggcttagggttag

SEQ ID NO: 19822 - RNA, 20 nt, Homo sapiens
  source 1..20: mol_type = genomic RNA
ggcttaggcttagggttagg

SEQ ID NO: 19823 - RNA, 20 nt, Homo sapiens
  source 1..20: mol_type = genomic RNA
gcttaggcttagggttaggc

SEQ ID NO: 19824 - RNA, 20 nt, Homo sapiens
  source 1..20: mol_type = genomic RNA
cttaggcttagggttaggct

SEQ ID NO: 19825 - RNA, 20 nt, Homo sapiens
  source 1..20: mol_type = genomic RNA
ttaggcttagggttaggctt

SEQ ID NO: 19826 - RNA, 20 nt, Homo sapiens
  source 1..20: mol_type = genomic RNA
taggcttagggttaggctta

SEQ ID NO: 19827 - RNA, 20 nt, Homo sapiens
  source 1..20: mol_type = genomic RNA
aggcttagggttaggcttag

SEQ ID NO: 19828 - RNA, 20 nt, Homo sapiens
  source 1..20: mol_type = genomic RNA
ggcttagggttaggcttagg

SEQ ID NO: 19829 - RNA, 20 nt, Homo sapiens
  source 1..20: mol_type = genomic RNA
gcttagggttaggcttaggc

SEQ ID NO: 19830 - RNA, 20 nt, Homo sapiens
  source 1..20: mol_type = genomic RNA
cttagggttaggcttaggct

SEQ ID NO: 19831 - RNA, 20 nt, Homo sapiens
  source 1..20: mol_type = genomic RNA
ttagggttaggcttaggctt

SEQ ID NO: 19832 - RNA, 20 nt, Homo sapiens
  source 1..20: mol_type = genomic RNA
tagggttaggcttaggctta

SEQ ID NO: 19833 - RNA, 20 nt, Homo sapiens
  source 1..20: mol_type = genomic RNA
agggttaggcttaggcttag

SEQ ID NO: 19834 - RNA, 20 nt, Homo sapiens
  source 1..20: mol_type = genomic RNA
ttaggcttaggcttagggta

SEQ ID NO: 19835 - RNA, 20 nt, Homo sapiens
  source 1..20: mol_type = genomic RNA
taggcttaggcttagggtaa

SEQ ID NO: 19836 - RNA, 20 nt, Homo sapiens
  source 1..20: mol_type = genomic RNA
aggcttaggcttagggtaag

SEQ ID NO: 19837 - RNA, 20 nt, Homo sapiens
  source 1..20: mol_type = genomic RNA
ggcttaggcttagggtaagg

SEQ ID NO: 19838 - RNA, 20 nt, Homo sapiens
  source 1..20: mol_type = genomic RNA
gcttaggcttagggtaaggc

SEQ ID NO: 19839 - RNA, 20 nt, Homo sapiens
  source 1..20: mol_type = genomic RNA
cttaggcttagggtaaggct

SEQ ID NO: 19840 - RNA, 20 nt, Homo sapiens
  source 1..20: mol_type = genomic RNA
ttaggcttagggtaaggctt

SEQ ID NO: 19841 - RNA, 20 nt, Homo sapiens
  source 1..20: mol_type = genomic RNA
taggcttagggtaaggctta

SEQ ID NO: 19842 - RNA, 20 nt, Homo sapiens
  source 1..20: mol_type = genomic RNA
aggcttagggtaaggcttag

SEQ ID NO: 19843 - RNA, 20 nt, Homo sapiens
  source 1..20: mol_type = genomic RNA
ggcttagggtaaggcttagg

SEQ ID NO: 19844 - RNA, 20 nt, Homo sapiens
  source 1..20: mol_type = genomic RNA
gcttagggtaaggcttaggg

SEQ ID NO: 19845 - RNA, 20 nt, Homo sapiens
  source 1..20: mol_type = genomic RNA
cttagggtaaggcttagggt

SEQ ID NO: 19846 - RNA, 20 nt, Homo sapiens
  source 1..20: mol_type = genomic RNA
ttagggtaaggcttagggtt

SEQ ID NO: 19847 - RNA, 20 nt, Homo sapiens
  source 1..20: mol_type = genomic RNA
tagggtaaggcttagggttc

SEQ ID NO: 19848 - RNA, 20 nt, Homo sapiens
  source 1..20: mol_type = genomic RNA
agggtaaggcttagggttca

SEQ ID NO: 19849 - RNA, 20 nt, Homo sapiens
  source 1..20: mol_type = genomic RNA
gggtaaggcttagggttcag

SEQ ID NO: 19850 - RNA, 20 nt, Homo sapiens
  source 1..20: mol_type = genomic RNA
ggtaaggcttagggttcagg

SEQ ID NO: 19851 - RNA, 20 nt, Homo sapiens
  source 1..20: mol_type = genomic RNA
gtaaggcttagggttcaggt

SEQ ID NO: 19852 - RNA, 20 nt, Homo sapiens
  source 1..20: mol_type = genomic RNA
aatatataggctattaagac

SEQ ID NO: 19853 - RNA, 20 nt, Homo sapiens
  source 1..20: mol_type = genomic RNA
atatataggctattaagaca

SEQ ID NO: 19854 - RNA, 20 nt, Homo sapiens
  source 1..20: mol_type = genomic RNA
tatataggctattaagacat

SEQ ID NO: 19855 - RNA, 20 nt, Homo sapiens
  source 1..20: mol_type = genomic RNA
atataggctattaagacatg

SEQ ID NO: 19856 - RNA, 20 nt, Homo sapiens
  source 1..20: mol_type = genomic RNA
tataggctattaagacatgt

SEQ ID NO: 19857 - RNA, 20 nt, Homo sapiens
  source 1..20: mol_type = genomic RNA
ataggctattaagacatgtt

SEQ ID NO: 19858 - RNA, 20 nt, Homo sapiens
  source 1..20: mol_type = genomic RNA
taggctattaagacatgttt

SEQ ID NO: 19859 - RNA, 20 nt, Homo sapiens
  source 1..20: mol_type = genomic RNA
aggctattaagacatgtttg

SEQ ID NO: 19860 - RNA, 20 nt, Homo sapiens
  source 1..20: mol_type = genomic RNA
ggctattaagacatgtttgt

SEQ ID NO: 19861 - RNA, 20 nt, Homo sapiens
  source 1..20: mol_type = genomic RNA
gtttgtcttcaaagaatggc

SEQ ID NO: 19862 - RNA, 20 nt, Homo sapiens
  source 1..20: mol_type = genomic RNA
tttgtcttcaaagaatggcc

SEQ ID NO: 19863 - RNA, 20 nt, Homo sapiens
  source 1..20: mol_type = genomic RNA
ttgtcttcaaagaatggcct

SEQ ID NO: 19864 - RNA, 20 nt, Homo sapiens
  source 1..20: mol_type = genomic RNA
tgtcttcaaagaatggcctt

SEQ ID NO: 19865 - RNA, 20 nt, Homo sapiens
  source 1..20: mol_type = genomic RNA
gtcttcaaagaatggccttg

SEQ ID NO: 19866 - RNA, 20 nt, Homo sapiens
  source 1..20: mol_type = genomic RNA
tcttcaaagaatggccttgg

SEQ ID NO: 19867 - RNA, 20 nt, Homo sapiens
  source 1..20: mol_type = genomic RNA
cttcaaagaatggccttggt

SEQ ID NO: 19868 - RNA, 20 nt, Homo sapiens
  source 1..20: mol_type = genomic RNA
ttcaaagaatggccttggtt

SEQ ID NO: 19869 - RNA, 20 nt, Homo sapiens
  source 1..20: mol_type = genomic RNA
tcaaagaatggccttggttt

SEQ ID NO: 19870 - RNA, 20 nt, Homo sapiens
  source 1..20: mol_type = genomic RNA
caaagaatggccttggtttc

SEQ ID NO: 19871 - RNA, 20 nt, Homo sapiens
  source 1..20: mol_type = genomic RNA
aaagaatggccttggtttct

SEQ ID NO: 19872 - RNA, 20 nt, Homo sapiens
  source 1..20: mol_type = genomic RNA
aagaatggccttggtttctg

SEQ ID NO: 19873 - RNA, 20 nt, Homo sapiens
  source 1..20: mol_type = genomic RNA
agaatggccttggtttctgt

SEQ ID NO: 19874 - RNA, 20 nt, Homo sapiens
  source 1..20: mol_type = genomic RNA
gaatggccttggtttctgtg

SEQ ID NO: 19875 - RNA, 20 nt, Homo sapiens
  source 1..20: mol_type = genomic RNA
aatggccttggtttctgtgg

SEQ ID NO: 19876 - RNA, 20 nt, Homo sapiens
  source 1..20: mol_type = genomic RNA
atggccttggtttctgtgga

SEQ ID NO: 19877 - RNA, 20 nt, Homo sapiens
  source 1..20: mol_type = genomic RNA
tggccttggtttctgtggac

SEQ ID NO: 19878 - RNA, 20 nt, Homo sapiens
  source 1..20: mol_type = genomic RNA
ggccttggtttctgtggaca

SEQ ID NO: 19879 - RNA, 20 nt, Homo sapiens
  source 1..20: mol_type = genomic RNA
gccttggtttctgtggacag

SEQ ID NO: 19880 - RNA, 20 nt, Homo sapiens
  source 1..20: mol_type = genomic RNA
ccttggtttctgtggacagt

SEQ ID NO: 19881 - RNA, 20 nt, Homo sapiens
  source 1..20: mol_type = genomic RNA
cttggtttctgtggacagtt

SEQ ID NO: 19882 - RNA, 20 nt, Homo sapiens
  source 1..20: mol_type = genomic RNA
ttggtttctgtggacagttt

SEQ ID NO: 19883 - RNA, 20 nt, Homo sapiens
  source 1..20: mol_type = genomic RNA
tggtttctgtggacagtttc

SEQ ID NO: 19884 - RNA, 20 nt, Homo sapiens
  source 1..20: mol_type = genomic RNA
ggtttctgtggacagtttct

SEQ ID NO: 19885 - RNA, 20 nt, Homo sapiens
  source 1..20: mol_type = genomic RNA
gtttctgtggacagtttctc

SEQ ID NO: 19886 - RNA, 20 nt, Homo sapiens
  source 1..20: mol_type = genomic RNA
tttctgtggacagtttctcc

SEQ ID NO: 19887 - RNA, 20 nt, Homo sapiens
  source 1..20: mol_type = genomic RNA
ttctgtggacagtttctcct

SEQ ID NO: 19888 - RNA, 20 nt, Homo sapiens
  source 1..20: mol_type = genomic RNA
tctgtggacagtttctcctc

SEQ ID NO: 19889 - RNA, 20 nt, Homo sapiens
  source 1..20: mol_type = genomic RNA
ctgtggacagtttctcctca

SEQ ID NO: 19890 - RNA, 20 nt, Homo sapiens
  source 1..20: mol_type = genomic RNA
tgtggacagtttctcctcat

SEQ ID NO: 19891 - RNA, 20 nt, Homo sapiens
  source 1..20: mol_type = genomic RNA
gtggacagtttctcctcatg

SEQ ID NO: 19892 - RNA, 20 nt, Homo sapiens
  source 1..20: mol_type = genomic RNA
tggacagtttctcctcatgg

SEQ ID NO: 19893 - RNA, 20 nt, Homo sapiens
  source 1..20: mol_type = genomic RNA
ggacagtttctcctcatgga

SEQ ID NO: 19894 - RNA, 20 nt, Homo sapiens
  source 1..20: mol_type = genomic RNA
gacagtttctcctcatggaa

SEQ ID NO: 19895 - RNA, 20 nt, Homo sapiens
  source 1..20: mol_type = genomic RNA
acagtttctcctcatggaaa

SEQ ID NO: 19896 - RNA, 20 nt, Homo sapiens
  source 1..20: mol_type = genomic RNA
cagtttctcctcatggaaag

SEQ ID NO: 19897 - RNA, 20 nt, Homo sapiens
  source 1..20: mol_type = genomic RNA
agtttctcctcatggaaagg

SEQ ID NO: 19898 - RNA, 20 nt, Homo sapiens
  source 1..20: mol_type = genomic RNA
gtttctcctcatggaaaggt

SEQ ID NO: 19899 - RNA, 20 nt, Homo sapiens
  source 1..20: mol_type = genomic RNA
tttctcctcatggaaaggta

SEQ ID NO: 19900 - RNA, 20 nt, Homo sapiens
  source 1..20: mol_type = genomic RNA
ttctcctcatggaaaggtag

SEQ ID NO: 19901 - RNA, 20 nt, Homo sapiens
  source 1..20: mol_type = genomic RNA
tctcctcatggaaaggtagt

SEQ ID NO: 19902 - RNA, 20 nt, Homo sapiens
  source 1..20: mol_type = genomic RNA
ctcctcatggaaaggtagtg

SEQ ID NO: 19903 - RNA, 20 nt, Homo sapiens
  source 1..20: mol_type = genomic RNA
tcctcatggaaaggtagtgt

SEQ ID NO: 19904 - RNA, 20 nt, Homo sapiens
  source 1..20: mol_type = genomic RNA
cctcatggaaaggtagtgtg

SEQ ID NO: 19905 - RNA, 20 nt, Homo sapiens
  source 1..20: mol_type = genomic RNA
ctcatggaaaggtagtgtgt

SEQ ID NO: 19906 - RNA, 20 nt, Homo sapiens
  source 1..20: mol_type = genomic RNA
tcatggaaaggtagtgtgtt

SEQ ID NO: 19907 - RNA, 20 nt, Homo sapiens
  source 1..20: mol_type = genomic RNA
catggaaaggtagtgtgttc

SEQ ID NO: 19908 - RNA, 20 nt, Homo sapiens
  source 1..20: mol_type = genomic RNA
atggaaaggtagtgtgttcc

SEQ ID NO: 19909 - RNA, 20 nt, Homo sapiens
  source 1..20: mol_type = genomic RNA
tggaaaggtagtgtgttcct

SEQ ID NO: 19910 - RNA, 20 nt, Homo sapiens
  source 1..20: mol_type = genomic RNA
ggaaaggtagtgtgttcctg

SEQ ID NO: 19911 - RNA, 20 nt, Homo sapiens
  source 1..20: mol_type = genomic RNA
gaaaggtagtgtgttcctgc

SEQ ID NO: 19912 - RNA, 20 nt, Homo sapiens
  source 1..20: mol_type = genomic RNA
aaaggtagtgtgttcctgct

SEQ ID NO: 19913 - RNA, 20 nt, Homo sapiens
  source 1..20: mol_type = genomic RNA
aaggtagtgtgttcctgcta

SEQ ID NO: 19914 - RNA, 20 nt, Homo sapiens
  source 1..20: mol_type = genomic RNA
aggtagtgtgttcctgctaa

SEQ ID NO: 19915 - RNA, 20 nt, Homo sapiens
  source 1..20: mol_type = genomic RNA
ggtagtgtgttcctgctaaa

SEQ ID NO: 19916 - RNA, 20 nt, Homo sapiens
  source 1..20: mol_type = genomic RNA
ccagaaagctaaatgctttt

SEQ ID NO: 19917 - RNA, 20 nt, Homo sapiens
  source 1..20: mol_type = genomic RNA
tcactaaatacaaatcacaa

SEQ ID NO: 19918 - RNA, 20 nt, Homo sapiens
  source 1..20: mol_type = genomic RNA
cactaaatacaaatcacaac

SEQ ID NO: 19919 - RNA, 20 nt, Homo sapiens
  source 1..20: mol_type = genomic RNA
actaaatacaaatcacaact

SEQ ID NO: 19920 - RNA, 20 nt, Homo sapiens
  source 1..20: mol_type = genomic RNA
ctaaatacaaatcacaactc

SEQ ID NO: 19921 - RNA, 20 nt, Homo sapiens
  source 1..20: mol_type = genomic RNA
taaatacaaatcacaactct

SEQ ID NO: 19922 - RNA, 20 nt, Homo sapiens
  source 1..20: mol_type = genomic RNA
ttctcattacacacacaaca

SEQ ID NO: 19923 - RNA, 20 nt, Homo sapiens
  source 1..20: mol_type = genomic RNA
tctcattacacacacaacaa

SEQ ID NO: 19924 - RNA, 20 nt, Homo sapiens
  source 1..20: mol_type = genomic RNA
ctcattacacacacaacaaa

SEQ ID NO: 19925 - RNA, 20 nt, Homo sapiens
  source 1..20: mol_type = genomic RNA
tcattacacacacaacaaaa

SEQ ID NO: 19926 - RNA, 20 nt, Homo sapiens
  source 1..20: mol_type = genomic RNA
cattacacacacaacaaaat

SEQ ID NO: 19927 - RNA, 20 nt, Homo sapiens
  source 1..20: mol_type = genomic RNA
attacacacacaacaaaatt

SEQ ID NO: 19928 - RNA, 20 nt, Homo sapiens
  source 1..20: mol_type = genomic RNA
acacacacaacaaaatttag

SEQ ID NO: 19929 - RNA, 20 nt, Homo sapiens
  source 1..20: mol_type = genomic RNA
cacacacaacaaaatttagc

SEQ ID NO: 19930 - RNA, 20 nt, Homo sapiens
  source 1..20: mol_type = genomic RNA
acacacaacaaaatttagct

SEQ ID NO: 19931 - RNA, 20 nt, Homo sapiens
  source 1..20: mol_type = genomic RNA
cacacaacaaaatttagctg

SEQ ID NO: 19932 - RNA, 20 nt, Homo sapiens
  source 1..20: mol_type = genomic RNA
acacaacaaaatttagctga

SEQ ID NO: 19933 - RNA, 20 nt, Homo sapiens
  source 1..20: mol_type = genomic RNA
cacaacaaaatttagctgag

SEQ ID NO: 19934 - RNA, 20 nt, Homo sapiens
  source 1..20: mol_type = genomic RNA
acaacaaaatttagctgagg

SEQ ID NO: 19935 - RNA, 20 nt, Homo sapiens
  source 1..20: mol_type = genomic RNA
caacaaaatttagctgaggg

SEQ ID NO: 19936 - RNA, 20 nt, Homo sapiens
  source 1..20: mol_type = genomic RNA
aacaaaatttagctgaggga

SEQ ID NO: 19937 - RNA, 20 nt, Homo sapiens
  source 1..20: mol_type = genomic RNA
acaaaatttagctgagggag

SEQ ID NO: 19938 - RNA, 20 nt, Homo sapiens
  source 1..20: mol_type = genomic RNA
caaaatttagctgagggaga

SEQ ID NO: 19939 - RNA, 20 nt, Homo sapiens
  source 1..20: mol_type = genomic RNA
aaaatttagctgagggagat

SEQ ID NO: 19940 - RNA, 20 nt, Homo sapiens
  source 1..20: mol_type = genomic RNA
aaatttagctgagggagatt

SEQ ID NO: 19941 - RNA, 20 nt, Homo sapiens
  source 1..20: mol_type = genomic RNA
aatttagctgagggagattg

SEQ ID NO: 19942 - RNA, 20 nt, Homo sapiens
  source 1..20: mol_type = genomic RNA
atttagctgagggagattga

SEQ ID NO: 19943 - RNA, 20 nt, Homo sapiens
  source 1..20: mol_type = genomic RNA
tttagctgagggagattgag

SEQ ID NO: 19944 - RNA, 20 nt, Homo sapiens
  source 1..20: mol_type = genomic RNA
ttagctgagggagattgagt

SEQ ID NO: 19945 - RNA, 20 nt, Homo sapiens
  source 1..20: mol_type = genomic RNA
tagctgagggagattgagtg

SEQ ID NO: 19946 - RNA, 20 nt, Homo sapiens
  source 1..20: mol_type = genomic RNA
agctgagggagattgagtga

SEQ ID NO: 19947 - RNA, 20 nt, Homo sapiens
  source 1..20: mol_type = genomic RNA
gctgagggagattgagtgac

SEQ ID NO: 19948 - RNA, 20 nt, Homo sapiens
  source 1..20: mol_type = genomic RNA
ctgagggagattgagtgact

SEQ ID NO: 19949 - RNA, 20 nt, Homo sapiens
  source 1..20: mol_type = genomic RNA
tgagggagattgagtgactt

SEQ ID NO: 19950 - RNA, 20 nt, Homo sapiens
  source 1..20: mol_type = genomic RNA
gagggagattgagtgacttt

SEQ ID NO: 19951 - RNA, 20 nt, Homo sapiens
  source 1..20: mol_type = genomic RNA
agggagattgagtgactttc

SEQ ID NO: 19952 - RNA, 20 nt, Homo sapiens
  source 1..20: mol_type = genomic RNA
gggagattgagtgactttcc

SEQ ID NO: 19953 - RNA, 20 nt, Homo sapiens
  source 1..20: mol_type = genomic RNA
ggagattgagtgactttccc

SEQ ID NO: 19954 - RNA, 20 nt, Homo sapiens
  source 1..20: mol_type = genomic RNA
gagattgagtgactttccca

SEQ ID NO: 19955 - RNA, 20 nt, Homo sapiens
  source 1..20: mol_type = genomic RNA
agattgagtgactttcccag

SEQ ID NO: 19956 - RNA, 20 nt, Homo sapiens
  source 1..20: mol_type = genomic RNA
gattgagtgactttcccagg

SEQ ID NO: 19957 - RNA, 20 nt, Homo sapiens
  source 1..20: mol_type = genomic RNA
attgagtgactttcccaggg

SEQ ID NO: 19958 - RNA, 20 nt, Homo sapiens
  source 1..20: mol_type = genomic RNA
ttgagtgactttcccagggt

SEQ ID NO: 19959 - RNA, 20 nt, Homo sapiens
  source 1..20: mol_type = genomic RNA
tgagtgactttcccagggtc

SEQ ID NO: 19960 - RNA, 20 nt, Homo sapiens
  source 1..20: mol_type = genomic RNA
gagtgactttcccagggtca

SEQ ID NO: 19961 - RNA, 20 nt, Homo sapiens
  source 1..20: mol_type = genomic RNA
agtgactttcccagggtcac

SEQ ID NO: 19962 - RNA, 20 nt, Homo sapiens
  source 1..20: mol_type = genomic RNA
gtgactttcccagggtcaca

SEQ ID NO: 19963 - RNA, 20 nt, Homo sapiens
  source 1..20: mol_type = genomic RNA
tgactttcccagggtcacac

SEQ ID NO: 19964 - RNA, 20 nt, Homo sapiens
  source 1..20: mol_type = genomic RNA
gactttcccagggtcacaca

SEQ ID NO: 19965 - RNA, 20 nt, Homo sapiens
  source 1..20: mol_type = genomic RNA
actttcccagggtcacacag

SEQ ID NO: 19966 - RNA, 20 nt, Homo sapiens
  source 1..20: mol_type = genomic RNA
ctttcccagggtcacacagc

SEQ ID NO: 19967 - RNA, 20 nt, Homo sapiens
  source 1..20: mol_type = genomic RNA
tttcccagggtcacacagct

SEQ ID NO: 19968 - RNA, 20 nt, Homo sapiens
  source 1..20: mol_type = genomic RNA
ttcccagggtcacacagcta

SEQ ID NO: 19969 - RNA, 20 nt, Homo sapiens
  source 1..20: mol_type = genomic RNA
ccagggtcacacagctacta

SEQ ID NO: 19970 - RNA, 20 nt, Homo sapiens
  source 1..20: mol_type = genomic RNA
cagggtcacacagctactaa

SEQ ID NO: 19971 - RNA, 20 nt, Homo sapiens
  source 1..20: mol_type = genomic RNA
agggtcacacagctactaat

SEQ ID NO: 19972 - RNA, 20 nt, Homo sapiens
  source 1..20: mol_type = genomic RNA
gggtcacacagctactaata

SEQ ID NO: 19973 - RNA, 20 nt, Homo sapiens
  source 1..20: mol_type = genomic RNA
ggtcacacagctactaatag

SEQ ID NO: 19974 - RNA, 20 nt, Homo sapiens
  source 1..20: mol_type = genomic RNA
gtcacacagctactaatagc

SEQ ID NO: 19975 - RNA, 20 nt, Homo sapiens
  source 1..20: mol_type = genomic RNA
tcacacagctactaatagca

SEQ ID NO: 19976 - RNA, 20 nt, Homo sapiens
  source 1..20: mol_type = genomic RNA
cacacagctactaatagcag

SEQ ID NO: 19977 - RNA, 20 nt, Homo sapiens
  source 1..20: mol_type = genomic RNA
acacagctactaatagcaga

SEQ ID NO: 19978 - RNA, 20 nt, Homo sapiens
  source 1..20: mol_type = genomic RNA
cacagctactaatagcagag

SEQ ID NO: 19979 - RNA, 20 nt, Homo sapiens
  source 1..20: mol_type = genomic RNA
acagctactaatagcagagt

SEQ ID NO: 19980 - RNA, 20 nt, Homo sapiens
  source 1..20: mol_type = genomic RNA
cagctactaatagcagagta

SEQ ID NO: 19981 - RNA, 20 nt, Homo sapiens
  source 1..20: mol_type = genomic RNA
agctactaatagcagagtag

SEQ ID NO: 19982 - RNA, 20 nt, Homo sapiens
  source 1..20: mol_type = genomic RNA
gctactaatagcagagtagt

SEQ ID NO: 19983 - RNA, 20 nt, Homo sapiens
  source 1..20: mol_type = genomic RNA
ctactaatagcagagtagtg

SEQ ID NO: 19984 - RNA, 20 nt, Homo sapiens
  source 1..20: mol_type = genomic RNA
tactaatagcagagtagtgt

SEQ ID NO: 19985 - RNA, 20 nt, Homo sapiens
  source 1..20: mol_type = genomic RNA
actaatagcagagtagtgtt

SEQ ID NO: 19986 - RNA, 20 nt, Homo sapiens
  source 1..20: mol_type = genomic RNA
ctaatagcagagtagtgttt

SEQ ID NO: 19987 - RNA, 20 nt, Homo sapiens
  source 1..20: mol_type = genomic RNA
aatagcagagtagtgtttag

SEQ ID NO: 19988 - RNA, 20 nt, Homo sapiens
  source 1..20: mol_type = genomic RNA
atagcagagtagtgtttaga

SEQ ID NO: 19989 - RNA, 20 nt, Homo sapiens
  source 1..20: mol_type = genomic RNA
tagcagagtagtgtttagat

SEQ ID NO: 19990 - RNA, 20 nt, Homo sapiens
  source 1..20: mol_type = genomic RNA
agcagagtagtgtttagatt

SEQ ID NO: 19991 - RNA, 20 nt, Homo sapiens
  source 1..20: mol_type = genomic RNA
gcagagtagtgtttagattc

SEQ ID NO: 19992 - RNA, 20 nt, Homo sapiens
  source 1..20: mol_type = genomic RNA
agtgtttagattcatatggg

SEQ ID NO: 19993 - RNA, 20 nt, Homo sapiens
  source 1..20: mol_type = genomic RNA
ttagattcatatgggaatac

SEQ ID NO: 19994 - RNA, 20 nt, Homo sapiens
  source 1..20: mol_type = genomic RNA
tagattcatatgggaatact

SEQ ID NO: 19995 - RNA, 20 nt, Homo sapiens
  source 1..20: mol_type = genomic RNA
agattcatatgggaatactg

SEQ ID NO: 19996 - RNA, 20 nt, Homo sapiens
  source 1..20: mol_type = genomic RNA
gattcatatgggaatactga

SEQ ID NO: 19997 - RNA, 20 nt, Homo sapiens
  source 1..20: mol_type = genomic RNA
attcatatgggaatactgaa

SEQ ID NO: 19998 - RNA, 20 nt, Homo sapiens
  source 1..20: mol_type = genomic RNA
ttcatatgggaatactgaac

SEQ ID NO: 19999 - RNA, 20 nt, Homo sapiens
  source 1..20: mol_type = genomic RNA
tcatatgggaatactgaaca

SEQ ID NO: 20000 - RNA, 20 nt, Homo sapiens
  source 1..20: mol_type = genomic RNA
catatgggaatactgaacac

SEQ ID NO: 20001 - RNA, 20 nt, Homo sapiens
  source 1..20: mol_type = genomic RNA
atatgggaatactgaacaca

SEQ ID NO: 20002 - RNA, 20 nt, Homo sapiens
  source 1..20: mol_type = genomic RNA
tatgggaatactgaacacag

SEQ ID NO: 20003 - RNA, 20 nt, Homo sapiens
  source 1..20: mol_type = genomic RNA
atgggaatactgaacacaga

SEQ ID NO: 20004 - RNA, 20 nt, Homo sapiens
  source 1..20: mol_type = genomic RNA
tgggaatactgaacacagaa

SEQ ID NO: 20005 - RNA, 20 nt, Homo sapiens
  source 1..20: mol_type = genomic RNA
gggaatactgaacacagaaa

SEQ ID NO: 20006 - RNA, 20 nt, Homo sapiens
  source 1..20: mol_type = genomic RNA
ggaatactgaacacagaaat

SEQ ID NO: 20007 - RNA, 20 nt, Homo sapiens
  source 1..20: mol_type = genomic RNA
gaatactgaacacagaaatg

SEQ ID NO: 20008 - RNA, 20 nt, Homo sapiens
  source 1..20: mol_type = genomic RNA
aatactgaacacagaaatga

SEQ ID NO: 20009 - RNA, 20 nt, Homo sapiens
  source 1..20: mol_type = genomic RNA
atactgaacacagaaatgaa

SEQ ID NO: 20010 - RNA, 20 nt, Homo sapiens
  source 1..20: mol_type = genomic RNA
tactgaacacagaaatgaac

SEQ ID NO: 20011 - RNA, 20 nt, Homo sapiens
  source 1..20: mol_type = genomic RNA
actgaacacagaaatgaacc

SEQ ID NO: 20012 - RNA, 20 nt, Homo sapiens
  source 1..20: mol_type = genomic RNA
ctgaacacagaaatgaacca

SEQ ID NO: 20013 - RNA, 20 nt, Homo sapiens
  source 1..20: mol_type = genomic RNA
tgaacacagaaatgaaccaa

SEQ ID NO: 20014 - RNA, 20 nt, Homo sapiens
  source 1..20: mol_type = genomic RNA
gaacacagaaatgaaccaat

SEQ ID NO: 20015 - RNA, 20 nt, Homo sapiens
  source 1..20: mol_type = genomic RNA
aacacagaaatgaaccaatg

SEQ ID NO: 20016 - RNA, 20 nt, Homo sapiens
  source 1..20: mol_type = genomic RNA
acacagaaatgaaccaatgg

SEQ ID NO: 20017 - RNA, 20 nt, Homo sapiens
  source 1..20: mol_type = genomic RNA
cacagaaatgaaccaatgga

SEQ ID NO: 20018 - RNA, 20 nt, Homo sapiens
  source 1..20: mol_type = genomic RNA
acagaaatgaaccaatggaa

SEQ ID NO: 20019 - RNA, 20 nt, Homo sapiens
  source 1..20: mol_type = genomic RNA
cagaaatgaaccaatggaaa

SEQ ID NO: 20020 - RNA, 20 nt, Homo sapiens
  source 1..20: mol_type = genomic RNA
agaaatgaaccaatggaaac

SEQ ID NO: 20021 - RNA, 20 nt, Homo sapiens
  source 1..20: mol_type = genomic RNA
gaaatgaaccaatggaaaca

SEQ ID NO: 20022 - RNA, 20 nt, Homo sapiens
  source 1..20: mol_type = genomic RNA
aaatgaaccaatggaaacat

SEQ ID NO: 20023 - RNA, 20 nt, Homo sapiens
  source 1..20: mol_type = genomic RNA
aatgaaccaatggaaacatc

SEQ ID NO: 20024 - RNA, 20 nt, Homo sapiens
  source 1..20: mol_type = genomic RNA
atgaaccaatggaaacatcc

SEQ ID NO: 20025 - RNA, 20 nt, Homo sapiens
  source 1..20: mol_type = genomic RNA
tgaaccaatggaaacatcct

SEQ ID NO: 20026 - RNA, 20 nt, Homo sapiens
  source 1..20: mol_type = genomic RNA
gaaccaatggaaacatccta

SEQ ID NO: 20027 - RNA, 20 nt, Homo sapiens
  source 1..20: mol_type = genomic RNA
aaccaatggaaacatcctac

SEQ ID NO: 20028 - RNA, 20 nt, Homo sapiens
  source 1..20: mol_type = genomic RNA
accaatggaaacatcctacg

SEQ ID NO: 20029 - RNA, 20 nt, Homo sapiens
  source 1..20: mol_type = genomic RNA
ccaatggaaacatcctacgt

SEQ ID NO: 20030 - RNA, 20 nt, Homo sapiens
  source 1..20: mol_type = genomic RNA
caatggaaacatcctacgtt

SEQ ID NO: 20031 - RNA, 20 nt, Homo sapiens
  source 1..20: mol_type = genomic RNA
aatggaaacatcctacgttc

SEQ ID NO: 20032 - RNA, 20 nt, Homo sapiens
  source 1..20: mol_type = genomic RNA
atggaaacatcctacgttcc

SEQ ID NO: 20033 - RNA, 20 nt, Homo sapiens
  source 1..20: mol_type = genomic RNA
tggaaacatcctacgttcca

SEQ ID NO: 20034 - RNA, 20 nt, Homo sapiens
  source 1..20: mol_type = genomic RNA
ggaaacatcctacgttccaa

SEQ ID NO: 20035 - RNA, 20 nt, Homo sapiens
  source 1..20: mol_type = genomic RNA
gaaacatcctacgttccaaa

SEQ ID NO: 20036 - RNA, 20 nt, Homo sapiens
  source 1..20: mol_type = genomic RNA
aaacatcctacgttccaaaa

SEQ ID NO: 20037 - RNA, 20 nt, Homo sapiens
  source 1..20: mol_type = genomic RNA
aacatcctacgttccaaaag

SEQ ID NO: 20038 - RNA, 20 nt, Homo sapiens
  source 1..20: mol_type = genomic RNA
acatcctacgttccaaaagc

SEQ ID NO: 20039 - RNA, 20 nt, Homo sapiens
  source 1..20: mol_type = genomic RNA
catcctacgttccaaaagcc

SEQ ID NO: 20040 - RNA, 20 nt, Homo sapiens
  source 1..20: mol_type = genomic RNA
atcctacgttccaaaagcct

SEQ ID NO: 20041 - RNA, 20 nt, Homo sapiens
  source 1..20: mol_type = genomic RNA
tcctacgttccaaaagccta

SEQ ID NO: 20042 - RNA, 20 nt, Homo sapiens
  source 1..20: mol_type = genomic RNA
cctacgttccaaaagcctac

SEQ ID NO: 20043 - RNA, 20 nt, Homo sapiens
  source 1..20: mol_type = genomic RNA
ctacgttccaaaagcctact

SEQ ID NO: 20044 - RNA, 20 nt, Homo sapiens
  source 1..20: mol_type = genomic RNA
tacgttccaaaagcctactc

SEQ ID NO: 20045 - RNA, 20 nt, Homo sapiens
  source 1..20: mol_type = genomic RNA
acgttccaaaagcctactca

SEQ ID NO: 20046 - RNA, 20 nt, Homo sapiens
  source 1..20: mol_type = genomic RNA
cgttccaaaagcctactcaa

SEQ ID NO: 20047 - RNA, 20 nt, Homo sapiens
  source 1..20: mol_type = genomic RNA
gttccaaaagcctactcaag

SEQ ID NO: 20048 - RNA, 20 nt, Homo sapiens
  source 1..20: mol_type = genomic RNA
ttccaaaagcctactcaagc

SEQ ID NO: 20049 - RNA, 20 nt, Homo sapiens
  source 1..20: mol_type = genomic RNA
tccaaaagcctactcaagcc

SEQ ID NO: 20050 - RNA, 20 nt, Homo sapiens
  source 1..20: mol_type = genomic RNA
ccaaaagcctactcaagcca

SEQ ID NO: 20051 - RNA, 20 nt, Homo sapiens
  source 1..20: mol_type = genomic RNA
caaaagcctactcaagccat

SEQ ID NO: 20052 - RNA, 20 nt, Homo sapiens
  source 1..20: mol_type = genomic RNA
aaaagcctactcaagccatt

SEQ ID NO: 20053 - RNA, 20 nt, Homo sapiens
  source 1..20: mol_type = genomic RNA
aaagcctactcaagccattt

SEQ ID NO: 20054 - RNA, 20 nt, Homo sapiens
  source 1..20: mol_type = genomic RNA
aagcctactcaagccatttg

SEQ ID NO: 20055 - RNA, 20 nt, Homo sapiens
  source 1..20: mol_type = genomic RNA
agcctactcaagccatttgt

SEQ ID NO: 20056 - RNA, 20 nt, Homo sapiens
  source 1..20: mol_type = genomic RNA
gcctactcaagccatttgtt

SEQ ID NO: 20057 - RNA, 20 nt, Homo sapiens
  source 1..20: mol_type = genomic RNA
cctactcaagccatttgttc

SEQ ID NO: 20058 - RNA, 20 nt, Homo sapiens
  source 1..20: mol_type = genomic RNA
actccaaatacttatgaatg

SEQ ID NO: 20059 - RNA, 20 nt, Homo sapiens
  source 1..20: mol_type = genomic RNA
ctccaaatacttatgaatgg

SEQ ID NO: 20060 - RNA, 20 nt, Homo sapiens
  source 1..20: mol_type = genomic RNA
tccaaatacttatgaatggc

SEQ ID NO: 20061 - RNA, 20 nt, Homo sapiens
  source 1..20: mol_type = genomic RNA
ccaaatacttatgaatggca

SEQ ID NO: 20062 - RNA, 20 nt, Homo sapiens
  source 1..20: mol_type = genomic RNA
caaatacttatgaatggcag

SEQ ID NO: 20063 - RNA, 20 nt, Homo sapiens
  source 1..20: mol_type = genomic RNA
aaatacttatgaatggcaga

SEQ ID NO: 20064 - RNA, 20 nt, Homo sapiens
  source 1..20: mol_type = genomic RNA
aatacttatgaatggcagag

SEQ ID NO: 20065 - RNA, 20 nt, Homo sapiens
  source 1..20: mol_type = genomic RNA
atacttatgaatggcagaga

SEQ ID NO: 20066 - RNA, 20 nt, Homo sapiens
  source 1..20: mol_type = genomic RNA
tacttatgaatggcagagat

SEQ ID NO: 20067 - RNA, 20 nt, Homo sapiens
  source 1..20: mol_type = genomic RNA
acttatgaatggcagagatc

SEQ ID NO: 20068 - RNA, 20 nt, Homo sapiens
  source 1..20: mol_type = genomic RNA
cttatgaatggcagagatct

SEQ ID NO: 20069 - RNA, 20 nt, Homo sapiens
  source 1..20: mol_type = genomic RNA
ttatgaatggcagagatcta

SEQ ID NO: 20070 - RNA, 20 nt, Homo sapiens
  source 1..20: mol_type = genomic RNA
tatgaatggcagagatctac

SEQ ID NO: 20071 - RNA, 20 nt, Homo sapiens
  source 1..20: mol_type = genomic RNA
atgaatggcagagatctaca

SEQ ID NO: 20072 - RNA, 20 nt, Homo sapiens
  source 1..20: mol_type = genomic RNA
tgaatggcagagatctacag

SEQ ID NO: 20073 - RNA, 20 nt, Homo sapiens
  source 1..20: mol_type = genomic RNA
gaatggcagagatctacaga

SEQ ID NO: 20074 - RNA, 20 nt, Homo sapiens
  source 1..20: mol_type = genomic RNA
aatggcagagatctacagat

SEQ ID NO: 20075 - RNA, 20 nt, Homo sapiens
  source 1..20: mol_type = genomic RNA
atggcagagatctacagatt

SEQ ID NO: 20076 - RNA, 20 nt, Homo sapiens
  source 1..20: mol_type = genomic RNA
tggcagagatctacagattt

SEQ ID NO: 20077 - RNA, 20 nt, Homo sapiens
  source 1..20: mol_type = genomic RNA
ggcagagatctacagatttg

SEQ ID NO: 20078 - RNA, 20 nt, Homo sapiens
  source 1..20: mol_type = genomic RNA
gcagagatctacagatttga

SEQ ID NO: 20079 - RNA, 20 nt, Homo sapiens
  source 1..20: mol_type = genomic RNA
cagagatctacagatttgat

SEQ ID NO: 20080 - RNA, 20 nt, Homo sapiens
  source 1..20: mol_type = genomic RNA
tgattctgatgtaagaaatg

SEQ ID NO: 20081 - RNA, 20 nt, Homo sapiens
  source 1..20: mol_type = genomic RNA
gattctgatgtaagaaatga

SEQ ID NO: 20082 - RNA, 20 nt, Homo sapiens
  source 1..20: mol_type = genomic RNA
ttctgatgtaagaaatgatg

SEQ ID NO: 20083 - RNA, 20 nt, Homo sapiens
  source 1..20: mol_type = genomic RNA
tctgatgtaagaaatgatgc

SEQ ID NO: 20084 - RNA, 20 nt, Homo sapiens
  source 1..20: mol_type = genomic RNA
ctgatgtaagaaatgatgct

SEQ ID NO: 20085 - RNA, 20 nt, Homo sapiens
  source 1..20: mol_type = genomic RNA
tgatgtaagaaatgatgctc

SEQ ID NO: 20086 - RNA, 20 nt, Homo sapiens
  source 1..20: mol_type = genomic RNA
gatgtaagaaatgatgctca

SEQ ID NO: 20087 - RNA, 20 nt, Homo sapiens
  source 1..20: mol_type = genomic RNA
atgtaagaaatgatgctcac

SEQ ID NO: 20088 - RNA, 20 nt, Homo sapiens
  source 1..20: mol_type = genomic RNA
tgtaagaaatgatgctcacc

SEQ ID NO: 20089 - RNA, 20 nt, Homo sapiens
  source 1..20: mol_type = genomic RNA
gtaagaaatgatgctcacca

SEQ ID NO: 20090 - RNA, 20 nt, Homo sapiens
  source 1..20: mol_type = genomic RNA
taagaaatgatgctcaccag

SEQ ID NO: 20091 - RNA, 20 nt, Homo sapiens
  source 1..20: mol_type = genomic RNA
aagaaatgatgctcaccagc

SEQ ID NO: 20092 - RNA, 20 nt, Homo sapiens
  source 1..20: mol_type = genomic RNA
agaaatgatgctcaccagct

SEQ ID NO: 20093 - RNA, 20 nt, Homo sapiens
  source 1..20: mol_type = genomic RNA
gaaatgatgctcaccagctg

SEQ ID NO: 20094 - RNA, 20 nt, Homo sapiens
  source 1..20: mol_type = genomic RNA
aaatgatgctcaccagctgg

SEQ ID NO: 20095 - RNA, 20 nt, Homo sapiens
  source 1..20: mol_type = genomic RNA
agcatactggacaaatgtct

SEQ ID NO: 20096 - RNA, 20 nt, Homo sapiens
  source 1..20: mol_type = genomic RNA
gcatactggacaaatgtcta

SEQ ID NO: 20097 - RNA, 20 nt, Homo sapiens
  source 1..20: mol_type = genomic RNA
catactggacaaatgtctaa

SEQ ID NO: 20098 - RNA, 20 nt, Homo sapiens
  source 1..20: mol_type = genomic RNA
atactggacaaatgtctaag

SEQ ID NO: 20099 - RNA, 20 nt, Homo sapiens
  source 1..20: mol_type = genomic RNA
tactggacaaatgtctaagc

SEQ ID NO: 20100 - RNA, 20 nt, Homo sapiens
  source 1..20: mol_type = genomic RNA
actggacaaatgtctaagcc

SEQ ID NO: 20101 - RNA, 20 nt, Homo sapiens
  source 1..20: mol_type = genomic RNA
ctggacaaatgtctaagcct

SEQ ID NO: 20102 - RNA, 20 nt, Homo sapiens
  source 1..20: mol_type = genomic RNA
tggacaaatgtctaagcctc

SEQ ID NO: 20103 - RNA, 20 nt, Homo sapiens
  source 1..20: mol_type = genomic RNA
ggacaaatgtctaagcctcg

SEQ ID NO: 20104 - RNA, 20 nt, Homo sapiens
  source 1..20: mol_type = genomic RNA
gacaaatgtctaagcctcgt

SEQ ID NO: 20105 - RNA, 20 nt, Homo sapiens
  source 1..20: mol_type = genomic RNA
acaaatgtctaagcctcgtg

SEQ ID NO: 20106 - RNA, 20 nt, Homo sapiens
  source 1..20: mol_type = genomic RNA
caaatgtctaagcctcgtgg

SEQ ID NO: 20107 - RNA, 20 nt, Homo sapiens
  source 1..20: mol_type = genomic RNA
aaatgtctaagcctcgtggt

SEQ ID NO: 20108 - RNA, 20 nt, Homo sapiens
  source 1..20: mol_type = genomic RNA
aatgtctaagcctcgtggtt

SEQ ID NO: 20109 - RNA, 20 nt, Homo sapiens
  source 1..20: mol_type = genomic RNA
atgtctaagcctcgtggtta

SEQ ID NO: 20110 - RNA, 20 nt, Homo sapiens
  source 1..20: mol_type = genomic RNA
tgtctaagcctcgtggttag

SEQ ID NO: 20111 - RNA, 20 nt, Homo sapiens
  source 1..20: mol_type = genomic RNA
gtctaagcctcgtggttagt

SEQ ID NO: 20112 - RNA, 20 nt, Homo sapiens
  source 1..20: mol_type = genomic RNA
tctaagcctcgtggttagtg

SEQ ID NO: 20113 - RNA, 20 nt, Homo sapiens
  source 1..20: mol_type = genomic RNA
ctaagcctcgtggttagtgg

SEQ ID NO: 20114 - RNA, 20 nt, Homo sapiens
  source 1..20: mol_type = genomic RNA
taagcctcgtggttagtggg

SEQ ID NO: 20115 - RNA, 20 nt, Homo sapiens
  source 1..20: mol_type = genomic RNA
aagcctcgtggttagtgggg

SEQ ID NO: 20116 - RNA, 20 nt, Homo sapiens
  source 1..20: mol_type = genomic RNA
agcctcgtggttagtgggga

SEQ ID NO: 20117 - RNA, 20 nt, Homo sapiens
  source 1..20: mol_type = genomic RNA
cctcgtggttagtggggaca

SEQ ID NO: 20118 - RNA, 20 nt, Homo sapiens
  source 1..20: mol_type = genomic RNA
ctcgtggttagtggggacat

SEQ ID NO: 20119 - RNA, 20 nt, Homo sapiens
  source 1..20: mol_type = genomic RNA
tcgtggttagtggggacatt

SEQ ID NO: 20120 - RNA, 20 nt, Homo sapiens
  source 1..20: mol_type = genomic RNA
cgtggttagtggggacattg

SEQ ID NO: 20121 - RNA, 20 nt, Homo sapiens
  source 1..20: mol_type = genomic RNA
gtggttagtggggacattgc

SEQ ID NO: 20122 - RNA, 20 nt, Homo sapiens
  source 1..20: mol_type = genomic RNA
tggttagtggggacattgct

SEQ ID NO: 20123 - RNA, 20 nt, Homo sapiens
  source 1..20: mol_type = genomic RNA
ggttagtggggacattgctg

SEQ ID NO: 20124 - RNA, 20 nt, Homo sapiens
  source 1..20: mol_type = genomic RNA
gttagtggggacattgctgg

SEQ ID NO: 20125 - RNA, 20 nt, Homo sapiens
  source 1..20: mol_type = genomic RNA
ttagtggggacattgctggt

SEQ ID NO: 20126 - RNA, 20 nt, Homo sapiens
  source 1..20: mol_type = genomic RNA
tagtggggacattgctggtg

SEQ ID NO: 20127 - RNA, 20 nt, Homo sapiens
  source 1..20: mol_type = genomic RNA
ggacattgctggtggagtct

SEQ ID NO: 20128 - RNA, 20 nt, Homo sapiens
  source 1..20: mol_type = genomic RNA
gacattgctggtggagtctg

SEQ ID NO: 20129 - RNA, 20 nt, Homo sapiens
  source 1..20: mol_type = genomic RNA
acattgctggtggagtctga

SEQ ID NO: 20130 - RNA, 20 nt, Homo sapiens
  source 1..20: mol_type = genomic RNA
cattgctggtggagtctgaa

SEQ ID NO: 20131 - RNA, 20 nt, Homo sapiens
  source 1..20: mol_type = genomic RNA
attgctggtggagtctgaaa

SEQ ID NO: 20132 - RNA, 20 nt, Homo sapiens
  source 1..20: mol_type = genomic RNA
ttgctggtggagtctgaaat

SEQ ID NO: 20133 - RNA, 20 nt, Homo sapiens
  source 1..20: mol_type = genomic RNA
tgctggtggagtctgaaatt

SEQ ID NO: 20134 - RNA, 20 nt, Homo sapiens
  source 1..20: mol_type = genomic RNA
gctggtggagtctgaaattg

SEQ ID NO: 20135 - RNA, 20 nt, Homo sapiens
  source 1..20: mol_type = genomic RNA
ctggtggagtctgaaattgt

SEQ ID NO: 20136 - RNA, 20 nt, Homo sapiens
  source 1..20: mol_type = genomic RNA
tggtggagtctgaaattgtc

SEQ ID NO: 20137 - RNA, 20 nt, Homo sapiens
  source 1..20: mol_type = genomic RNA
ggtggagtctgaaattgtca

SEQ ID NO: 20138 - RNA, 20 nt, Homo sapiens
  source 1..20: mol_type = genomic RNA
gtggagtctgaaattgtcat

SEQ ID NO: 20139 - RNA, 20 nt, Homo sapiens
  source 1..20: mol_type = genomic RNA
tggagtctgaaattgtcatg

SEQ ID NO: 20140 - RNA, 20 nt, Homo sapiens
  source 1..20: mol_type = genomic RNA
ggagtctgaaattgtcatgc

SEQ ID NO: 20141 - RNA, 20 nt, Homo sapiens
  source 1..20: mol_type = genomic RNA
gagtctgaaattgtcatgca

SEQ ID NO: 20142 - RNA, 20 nt, Homo sapiens
  source 1..20: mol_type = genomic RNA
agtctgaaattgtcatgcag

SEQ ID NO: 20143 - RNA, 20 nt, Homo sapiens
  source 1..20: mol_type = genomic RNA
gtctgaaattgtcatgcagt

SEQ ID NO: 20144 - RNA, 20 nt, Homo sapiens
  source 1..20: mol_type = genomic RNA
tctgaaattgtcatgcagtg

SEQ ID NO: 20145 - RNA, 20 nt, Homo sapiens
  source 1..20: mol_type = genomic RNA
ctgaaattgtcatgcagtga

SEQ ID NO: 20146 - RNA, 20 nt, Homo sapiens
  source 1..20: mol_type = genomic RNA
tgaaattgtcatgcagtgac

SEQ ID NO: 20147 - RNA, 20 nt, Homo sapiens
  source 1..20: mol_type = genomic RNA
gaaattgtcatgcagtgact

SEQ ID NO: 20148 - RNA, 20 nt, Homo sapiens
  source 1..20: mol_type = genomic RNA
aaattgtcatgcagtgactc

SEQ ID NO: 20149 - RNA, 20 nt, Homo sapiens
  source 1..20: mol_type = genomic RNA
aattgtcatgcagtgactca

SEQ ID NO: 20150 - RNA, 20 nt, Homo sapiens
  source 1..20: mol_type = genomic RNA
attgtcatgcagtgactcac

SEQ ID NO: 20151 - RNA, 20 nt, Homo sapiens
  source 1..20: mol_type = genomic RNA
ttgtcatgcagtgactcact

SEQ ID NO: 20152 - RNA, 20 nt, Homo sapiens
  source 1..20: mol_type = genomic RNA
tgtcatgcagtgactcactc

SEQ ID NO: 20153 - RNA, 20 nt, Homo sapiens
  source 1..20: mol_type = genomic RNA
gtcatgcagtgactcactca

SEQ ID NO: 20154 - RNA, 20 nt, Homo sapiens
  source 1..20: mol_type = genomic RNA
tcatgcagtgactcactcaa

SEQ ID NO: 20155 - RNA, 20 nt, Homo sapiens
  source 1..20: mol_type = genomic RNA
catgcagtgactcactcaag

SEQ ID NO: 20156 - RNA, 20 nt, Homo sapiens
  source 1..20: mol_type = genomic RNA
atgcagtgactcactcaagc

SEQ ID NO: 20157 - RNA, 20 nt, Homo sapiens
  source 1..20: mol_type = genomic RNA
tgcagtgactcactcaagct

SEQ ID NO: 20158 - RNA, 20 nt, Homo sapiens
  source 1..20: mol_type = genomic RNA
gcagtgactcactcaagctt

SEQ ID NO: 20159 - RNA, 20 nt, Homo sapiens
  source 1..20: mol_type = genomic RNA
cagtgactcactcaagctta

SEQ ID NO: 20160 - RNA, 20 nt, Homo sapiens
  source 1..20: mol_type = genomic RNA
agtgactcactcaagcttag

SEQ ID NO: 20161 - RNA, 20 nt, Homo sapiens
  source 1..20: mol_type = genomic RNA
gtgactcactcaagcttagg

SEQ ID NO: 20162 - RNA, 20 nt, Homo sapiens
  source 1..20: mol_type = genomic RNA
tgactcactcaagcttaggc

SEQ ID NO: 20163 - RNA, 20 nt, Homo sapiens
  source 1..20: mol_type = genomic RNA
gactcactcaagcttaggca

SEQ ID NO: 20164 - RNA, 20 nt, Homo sapiens
  source 1..20: mol_type = genomic RNA
actcactcaagcttaggcag

SEQ ID NO: 20165 - RNA, 20 nt, Homo sapiens
  source 1..20: mol_type = genomic RNA
ctcactcaagcttaggcaga

SEQ ID NO: 20166 - RNA, 20 nt, Homo sapiens
  source 1..20: mol_type = genomic RNA
tcactcaagcttaggcagat

SEQ ID NO: 20167 - RNA, 20 nt, Homo sapiens
  source 1..20: mol_type = genomic RNA
cactcaagcttaggcagatt

SEQ ID NO: 20168 - RNA, 20 nt, Homo sapiens
  source 1..20: mol_type = genomic RNA
actcaagcttaggcagattt

SEQ ID NO: 20169 - RNA, 20 nt, Homo sapiens
  source 1..20: mol_type = genomic RNA
ctcaagcttaggcagatttg

SEQ ID NO: 20170 - RNA, 20 nt, Homo sapiens
  source 1..20: mol_type = genomic RNA
tcaagcttaggcagatttgg

SEQ ID NO: 20171 - RNA, 20 nt, Homo sapiens
  source 1..20: mol_type = genomic RNA
caagcttaggcagatttggt

SEQ ID NO: 20172 - RNA, 20 nt, Homo sapiens
  source 1..20: mol_type = genomic RNA
aagcttaggcagatttggtg

SEQ ID NO: 20173 - RNA, 20 nt, Homo sapiens
  source 1..20: mol_type = genomic RNA
agcttaggcagatttggtga

SEQ ID NO: 20174 - RNA, 20 nt, Homo sapiens
  source 1..20: mol_type = genomic RNA
gcttaggcagatttggtgat

SEQ ID NO: 20175 - RNA, 20 nt, Homo sapiens
  source 1..20: mol_type = genomic RNA
cttaggcagatttggtgata

SEQ ID NO: 20176 - RNA, 20 nt, Homo sapiens
  source 1..20: mol_type = genomic RNA
ttaggcagatttggtgatat

SEQ ID NO: 20177 - RNA, 20 nt, Homo sapiens
  source 1..20: mol_type = genomic RNA
taggcagatttggtgatata

SEQ ID NO: 20178 - RNA, 20 nt, Homo sapiens
  source 1..20: mol_type = genomic RNA
aggcagatttggtgatatat

SEQ ID NO: 20179 - RNA, 20 nt, Homo sapiens
  source 1..20: mol_type = genomic RNA
ggcagatttggtgatatatg

SEQ ID NO: 20180 - RNA, 20 nt, Homo sapiens
  source 1..20: mol_type = genomic RNA
gcagatttggtgatatatga

SEQ ID NO: 20181 - RNA, 20 nt, Homo sapiens
  source 1..20: mol_type = genomic RNA
cagatttggtgatatatgac

SEQ ID NO: 20182 - RNA, 20 nt, Homo sapiens
  source 1..20: mol_type = genomic RNA
agatttggtgatatatgaca

SEQ ID NO: 20183 - RNA, 20 nt, Homo sapiens
  source 1..20: mol_type = genomic RNA
gatttggtgatatatgacac

SEQ ID NO: 20184 - RNA, 20 nt, Homo sapiens
  source 1..20: mol_type = genomic RNA
atttggtgatatatgacaca

SEQ ID NO: 20185 - RNA, 20 nt, Homo sapiens
  source 1..20: mol_type = genomic RNA
tttggtgatatatgacacag

SEQ ID NO: 20186 - RNA, 20 nt, Homo sapiens
  source 1..20: mol_type = genomic RNA
ttggtgatatatgacacaga

SEQ ID NO: 20187 - RNA, 20 nt, Homo sapiens
  source 1..20: mol_type = genomic RNA
tggtgatatatgacacagag

SEQ ID NO: 20188 - RNA, 20 nt, Homo sapiens
  source 1..20: mol_type = genomic RNA
ggtgatatatgacacagaga

SEQ ID NO: 20189 - RNA, 20 nt, Homo sapiens
  source 1..20: mol_type = genomic RNA
gtgatatatgacacagagat

SEQ ID NO: 20190 - RNA, 20 nt, Homo sapiens
  source 1..20: mol_type = genomic RNA
tgatatatgacacagagatg

SEQ ID NO: 20191 - RNA, 20 nt, Homo sapiens
  source 1..20: mol_type = genomic RNA
gatatatgacacagagatgc

SEQ ID NO: 20192 - RNA, 20 nt, Homo sapiens
  source 1..20: mol_type = genomic RNA
atatatgacacagagatgca

SEQ ID NO: 20193 - RNA, 20 nt, Homo sapiens
  source 1..20: mol_type = genomic RNA
tatatgacacagagatgcaa

SEQ ID NO: 20194 - RNA, 20 nt, Homo sapiens
  source 1..20: mol_type = genomic RNA
atatgacacagagatgcaaa

SEQ ID NO: 20195 - RNA, 20 nt, Homo sapiens
  source 1..20: mol_type = genomic RNA
tatgacacagagatgcaaag

SEQ ID NO: 20196 - RNA, 20 nt, Homo sapiens
  source 1..20: mol_type = genomic RNA
atgacacagagatgcaaaga

SEQ ID NO: 20197 - RNA, 20 nt, Homo sapiens
  source 1..20: mol_type = genomic RNA
tgacacagagatgcaaagaa

SEQ ID NO: 20198 - RNA, 20 nt, Homo sapiens
  source 1..20: mol_type = genomic RNA
gacacagagatgcaaagaaa

SEQ ID NO: 20199 - RNA, 20 nt, Homo sapiens
  source 1..20: mol_type = genomic RNA
acacagagatgcaaagaaat

SEQ ID NO: 20200 - RNA, 20 nt, Homo sapiens
  source 1..20: mol_type = genomic RNA
cacagagatgcaaagaaatg

SEQ ID NO: 20201 - RNA, 20 nt, Homo sapiens
  source 1..20: mol_type = genomic RNA
acagagatgcaaagaaatgt

SEQ ID NO: 20202 - RNA, 20 nt, Homo sapiens
  source 1..20: mol_type = genomic RNA
cagagatgcaaagaaatgtt

SEQ ID NO: 20203 - RNA, 20 nt, Homo sapiens
  source 1..20: mol_type = genomic RNA
agagatgcaaagaaatgttg

SEQ ID NO: 20204 - RNA, 20 nt, Homo sapiens
  source 1..20: mol_type = genomic RNA
gagatgcaaagaaatgttgt

SEQ ID NO: 20205 - RNA, 20 nt, Homo sapiens
  source 1..20: mol_type = genomic RNA
agatgcaaagaaatgttgta

SEQ ID NO: 20206 - RNA, 20 nt, Homo sapiens
  source 1..20: mol_type = genomic RNA
gatgcaaagaaatgttgtag

SEQ ID NO: 20207 - RNA, 20 nt, Homo sapiens
  source 1..20: mol_type = genomic RNA
atgcaaagaaatgttgtagc

SEQ ID NO: 20208 - RNA, 20 nt, Homo sapiens
  source 1..20: mol_type = genomic RNA
tgcaaagaaatgttgtagct

SEQ ID NO: 20209 - RNA, 20 nt, Homo sapiens
  source 1..20: mol_type = genomic RNA
gcaaagaaatgttgtagctg

SEQ ID NO: 20210 - RNA, 20 nt, Homo sapiens
  source 1..20: mol_type = genomic RNA
caaagaaatgttgtagctga

SEQ ID NO: 20211 - RNA, 20 nt, Homo sapiens
  source 1..20: mol_type = genomic RNA
aaagaaatgttgtagctgac

SEQ ID NO: 20212 - RNA, 20 nt, Homo sapiens
  source 1..20: mol_type = genomic RNA
aagaaatgttgtagctgaca

SEQ ID NO: 20213 - RNA, 20 nt, Homo sapiens
  source 1..20: mol_type = genomic RNA
agaaatgttgtagctgacac

SEQ ID NO: 20214 - RNA, 20 nt, Homo sapiens
  source 1..20: mol_type = genomic RNA
gaaatgttgtagctgacaca

SEQ ID NO: 20215 - RNA, 20 nt, Homo sapiens
  source 1..20: mol_type = genomic RNA
aaatgttgtagctgacacac

SEQ ID NO: 20216 - RNA, 20 nt, Homo sapiens
  source 1..20: mol_type = genomic RNA
aatgttgtagctgacacaca

SEQ ID NO: 20217 - RNA, 20 nt, Homo sapiens
  source 1..20: mol_type = genomic RNA
atgttgtagctgacacacac

SEQ ID NO: 20218 - RNA, 20 nt, Homo sapiens
  source 1..20: mol_type = genomic RNA
tgttgtagctgacacacaca

SEQ ID NO: 20219 - RNA, 20 nt, Homo sapiens
  source 1..20: mol_type = genomic RNA
gttgtagctgacacacacag

SEQ ID NO: 20220 - RNA, 20 nt, Homo sapiens
  source 1..20: mol_type = genomic RNA
ttgtagctgacacacacagg

SEQ ID NO: 20221 - RNA, 20 nt, Homo sapiens
  source 1..20: mol_type = genomic RNA
aaggagcacgtcccccaaaa

SEQ ID NO: 20222 - RNA, 20 nt, Homo sapiens
  source 1..20: mol_type = genomic RNA
aggagcacgtcccccaaaat

SEQ ID NO: 20223 - RNA, 20 nt, Homo sapiens
  source 1..20: mol_type = genomic RNA
ggagcacgtcccccaaaatg

SEQ ID NO: 20224 - RNA, 20 nt, Homo sapiens
  source 1..20: mol_type = genomic RNA
gagcacgtcccccaaaatga

SEQ ID NO: 20225 - RNA, 20 nt, Homo sapiens
  source 1..20: mol_type = genomic RNA
agcacgtcccccaaaatgaa

SEQ ID NO: 20226 - RNA, 20 nt, Homo sapiens
  source 1..20: mol_type = genomic RNA
gcacgtcccccaaaatgaag

SEQ ID NO: 20227 - RNA, 20 nt, Homo sapiens
  source 1..20: mol_type = genomic RNA
cacgtcccccaaaatgaagc

SEQ ID NO: 20228 - RNA, 20 nt, Homo sapiens
  source 1..20: mol_type = genomic RNA
acgtcccccaaaatgaagcc

SEQ ID NO: 20229 - RNA, 20 nt, Homo sapiens
  source 1..20: mol_type = genomic RNA
cgtcccccaaaatgaagcca

SEQ ID NO: 20230 - RNA, 20 nt, Homo sapiens
  source 1..20: mol_type = genomic RNA
gtcccccaaaatgaagccag

SEQ ID NO: 20231 - RNA, 20 nt, Homo sapiens
  source 1..20: mol_type = genomic RNA
tcccccaaaatgaagccaga

SEQ ID NO: 20232 - RNA, 20 nt, Homo sapiens
  source 1..20: mol_type = genomic RNA
cccccaaaatgaagccagac

SEQ ID NO: 20233 - RNA, 20 nt, Homo sapiens
  source 1..20: mol_type = genomic RNA
ccccaaaatgaagccagaca

SEQ ID NO: 20234 - RNA, 20 nt, Homo sapiens
  source 1..20: mol_type = genomic RNA
cccaaaatgaagccagacag

SEQ ID NO: 20235 - RNA, 20 nt, Homo sapiens
  source 1..20: mol_type = genomic RNA
ccaaaatgaagccagacaga

SEQ ID NO: 20236 - RNA, 20 nt, Homo sapiens
  source 1..20: mol_type = genomic RNA
caaaatgaagccagacagac

SEQ ID NO: 20237 - RNA, 20 nt, Homo sapiens
  source 1..20: mol_type = genomic RNA
aaaatgaagccagacagaca

SEQ ID NO: 20238 - RNA, 20 nt, Homo sapiens
  source 1..20: mol_type = genomic RNA
aaatgaagccagacagacat

SEQ ID NO: 20239 - RNA, 20 nt, Homo sapiens
  source 1..20: mol_type = genomic RNA
aatgaagccagacagacatc

SEQ ID NO: 20240 - RNA, 20 nt, Homo sapiens
  source 1..20: mol_type = genomic RNA
atgaagccagacagacatcc

SEQ ID NO: 20241 - RNA, 20 nt, Homo sapiens
  source 1..20: mol_type = genomic RNA
tgaagccagacagacatcct

SEQ ID NO: 20242 - RNA, 20 nt, Homo sapiens
  source 1..20: mol_type = genomic RNA
gaagccagacagacatcctt

SEQ ID NO: 20243 - RNA, 20 nt, Homo sapiens
  source 1..20: mol_type = genomic RNA
aagccagacagacatcctta

SEQ ID NO: 20244 - RNA, 20 nt, Homo sapiens
  source 1..20: mol_type = genomic RNA
agccagacagacatccttaa

SEQ ID NO: 20245 - RNA, 20 nt, Homo sapiens
  source 1..20: mol_type = genomic RNA
gccagacagacatccttaag

SEQ ID NO: 20246 - RNA, 20 nt, Homo sapiens
  source 1..20: mol_type = genomic RNA
ccagacagacatccttaagg

SEQ ID NO: 20247 - RNA, 20 nt, Homo sapiens
  source 1..20: mol_type = genomic RNA
cagacagacatccttaagga

SEQ ID NO: 20248 - RNA, 20 nt, Homo sapiens
  source 1..20: mol_type = genomic RNA
agacagacatccttaaggaa

SEQ ID NO: 20249 - RNA, 20 nt, Homo sapiens
  source 1..20: mol_type = genomic RNA
gacagacatccttaaggaag

SEQ ID NO: 20250 - RNA, 20 nt, Homo sapiens
  source 1..20: mol_type = genomic RNA
acagacatccttaaggaagg

SEQ ID NO: 20251 - RNA, 20 nt, Homo sapiens
  source 1..20: mol_type = genomic RNA
cagacatccttaaggaagga

SEQ ID NO: 20252 - RNA, 20 nt, Homo sapiens
  source 1..20: mol_type = genomic RNA
agacatccttaaggaaggag

SEQ ID NO: 20253 - RNA, 20 nt, Homo sapiens
  source 1..20: mol_type = genomic RNA
gacatccttaaggaaggagc

SEQ ID NO: 20254 - RNA, 20 nt, Homo sapiens
  source 1..20: mol_type = genomic RNA
acatccttaaggaaggagca

SEQ ID NO: 20255 - RNA, 20 nt, Homo sapiens
  source 1..20: mol_type = genomic RNA
catccttaaggaaggagcaa

SEQ ID NO: 20256 - RNA, 20 nt, Homo sapiens
  source 1..20: mol_type = genomic RNA
atccttaaggaaggagcaaa

SEQ ID NO: 20257 - RNA, 20 nt, Homo sapiens
  source 1..20: mol_type = genomic RNA
tccttaaggaaggagcaaag

SEQ ID NO: 20258 - RNA, 20 nt, Homo sapiens
  source 1..20: mol_type = genomic RNA
ccttaaggaaggagcaaagg

SEQ ID NO: 20259 - RNA, 20 nt, Homo sapiens
  source 1..20: mol_type = genomic RNA
cttaaggaaggagcaaaggg

SEQ ID NO: 20260 - RNA, 20 nt, Homo sapiens
  source 1..20: mol_type = genomic RNA
aaggagcaaaggggcttcat

SEQ ID NO: 20261 - RNA, 20 nt, Homo sapiens
  source 1..20: mol_type = genomic RNA
ggagcaaaggggcttcatct

SEQ ID NO: 20262 - RNA, 20 nt, Homo sapiens
  source 1..20: mol_type = genomic RNA
gagcaaaggggcttcatctt

SEQ ID NO: 20263 - RNA, 20 nt, Homo sapiens
  source 1..20: mol_type = genomic RNA
agcaaaggggcttcatctta

SEQ ID NO: 20264 - RNA, 20 nt, Homo sapiens
  source 1..20: mol_type = genomic RNA
gcaaaggggcttcatcttaa

SEQ ID NO: 20265 - RNA, 20 nt, Homo sapiens
  source 1..20: mol_type = genomic RNA
caaaggggcttcatcttaaa

SEQ ID NO: 20266 - RNA, 20 nt, Homo sapiens
  source 1..20: mol_type = genomic RNA
aaaggggcttcatcttaaag

SEQ ID NO: 20267 - RNA, 20 nt, Homo sapiens
  source 1..20: mol_type = genomic RNA
aaggggcttcatcttaaaga

SEQ ID NO: 20268 - RNA, 20 nt, Homo sapiens
  source 1..20: mol_type = genomic RNA
aggggcttcatcttaaagaa

SEQ ID NO: 20269 - RNA, 20 nt, Homo sapiens
  source 1..20: mol_type = genomic RNA
ggggcttcatcttaaagaat

SEQ ID NO: 20270 - RNA, 20 nt, Homo sapiens
  source 1..20: mol_type = genomic RNA
gggcttcatcttaaagaatg

SEQ ID NO: 20271 - RNA, 20 nt, Homo sapiens
  source 1..20: mol_type = genomic RNA
ggcttcatcttaaagaatga

SEQ ID NO: 20272 - RNA, 20 nt, Homo sapiens
  source 1..20: mol_type = genomic RNA
catcttaaagaatgaagaag

SEQ ID NO: 20273 - RNA, 20 nt, Homo sapiens
  source 1..20: mol_type = genomic RNA
atcttaaagaatgaagaagg

SEQ ID NO: 20274 - RNA, 20 nt, Homo sapiens
  source 1..20: mol_type = genomic RNA
tcttaaagaatgaagaaggg

SEQ ID NO: 20275 - RNA, 20 nt, Homo sapiens
  source 1..20: mol_type = genomic RNA
cttaaagaatgaagaaggga

SEQ ID NO: 20276 - RNA, 20 nt, Homo sapiens
  source 1..20: mol_type = genomic RNA
ttaaagaatgaagaagggat

SEQ ID NO: 20277 - RNA, 20 nt, Homo sapiens
  source 1..20: mol_type = genomic RNA
taaagaatgaagaagggatt

SEQ ID NO: 20278 - RNA, 20 nt, Homo sapiens
  source 1..20: mol_type = genomic RNA
aaagaatgaagaagggattt

SEQ ID NO: 20279 - RNA, 20 nt, Homo sapiens
  source 1..20: mol_type = genomic RNA
aagaatgaagaagggatttg

SEQ ID NO: 20280 - RNA, 20 nt, Homo sapiens
  source 1..20: mol_type = genomic RNA
agaatgaagaagggatttgt

SEQ ID NO: 20281 - RNA, 20 nt, Homo sapiens
  source 1..20: mol_type = genomic RNA
gaatgaagaagggatttgtc

SEQ ID NO: 20282 - RNA, 20 nt, Homo sapiens
  source 1..20: mol_type = genomic RNA
aatgaagaagggatttgtca

SEQ ID NO: 20283 - RNA, 20 nt, Homo sapiens
  source 1..20: mol_type = genomic RNA
atgaagaagggatttgtcat

SEQ ID NO: 20284 - RNA, 20 nt, Homo sapiens
  source 1..20: mol_type = genomic RNA
tgaagaagggatttgtcatg

SEQ ID NO: 20285 - RNA, 20 nt, Homo sapiens
  source 1..20: mol_type = genomic RNA
gaagaagggatttgtcatga

SEQ ID NO: 20286 - RNA, 20 nt, Homo sapiens
  source 1..20: mol_type = genomic RNA
aagaagggatttgtcatgag

SEQ ID NO: 20287 - RNA, 20 nt, Homo sapiens
  source 1..20: mol_type = genomic RNA
agaagggatttgtcatgaga

SEQ ID NO: 20288 - RNA, 20 nt, Homo sapiens
  source 1..20: mol_type = genomic RNA
gaagggatttgtcatgagag

SEQ ID NO: 20289 - RNA, 20 nt, Homo sapiens
  source 1..20: mol_type = genomic RNA
aagggatttgtcatgagaga

SEQ ID NO: 20290 - RNA, 20 nt, Homo sapiens
  source 1..20: mol_type = genomic RNA
agggatttgtcatgagagat

SEQ ID NO: 20291 - RNA, 20 nt, Homo sapiens
  source 1..20: mol_type = genomic RNA
gggatttgtcatgagagatg

SEQ ID NO: 20292 - RNA, 20 nt, Homo sapiens
  source 1..20: mol_type = genomic RNA
ggatttgtcatgagagatgt

SEQ ID NO: 20293 - RNA, 20 nt, Homo sapiens
  source 1..20: mol_type = genomic RNA
gatttgtcatgagagatgtg

SEQ ID NO: 20294 - RNA, 20 nt, Homo sapiens
  source 1..20: mol_type = genomic RNA
atttgtcatgagagatgtgg

SEQ ID NO: 20295 - RNA, 20 nt, Homo sapiens
  source 1..20: mol_type = genomic RNA
tttgtcatgagagatgtggc

SEQ ID NO: 20296 - RNA, 20 nt, Homo sapiens
  source 1..20: mol_type = genomic RNA
ttgtcatgagagatgtggca

SEQ ID NO: 20297 - RNA, 20 nt, Homo sapiens
  source 1..20: mol_type = genomic RNA
tgtcatgagagatgtggcag

SEQ ID NO: 20298 - RNA, 20 nt, Homo sapiens
  source 1..20: mol_type = genomic RNA
gtcatgagagatgtggcagg

SEQ ID NO: 20299 - RNA, 20 nt, Homo sapiens
  source 1..20: mol_type = genomic RNA
tcatgagagatgtggcagga

SEQ ID NO: 20300 - RNA, 20 nt, Homo sapiens
  source 1..20: mol_type = genomic RNA
catgagagatgtggcaggaa

SEQ ID NO: 20301 - RNA, 20 nt, Homo sapiens
  source 1..20: mol_type = genomic RNA
atgagagatgtggcaggaat

SEQ ID NO: 20302 - RNA, 20 nt, Homo sapiens
  source 1..20: mol_type = genomic RNA
tgagagatgtggcaggaatt

SEQ ID NO: 20303 - RNA, 20 nt, Homo sapiens
  source 1..20: mol_type = genomic RNA
gagagatgtggcaggaattt

SEQ ID NO: 20304 - RNA, 20 nt, Homo sapiens
  source 1..20: mol_type = genomic RNA
agagatgtggcaggaatttc

SEQ ID NO: 20305 - RNA, 20 nt, Homo sapiens
  source 1..20: mol_type = genomic RNA
gagatgtggcaggaatttct

SEQ ID NO: 20306 - RNA, 20 nt, Homo sapiens
  source 1..20: mol_type = genomic RNA
agatgtggcaggaatttctt

SEQ ID NO: 20307 - RNA, 20 nt, Homo sapiens
  source 1..20: mol_type = genomic RNA
gatgtggcaggaatttcttg

SEQ ID NO: 20308 - RNA, 20 nt, Homo sapiens
  source 1..20: mol_type = genomic RNA
atgtggcaggaatttcttga

SEQ ID NO: 20309 - RNA, 20 nt, Homo sapiens
  source 1..20: mol_type = genomic RNA
tgtggcaggaatttcttgag

SEQ ID NO: 20310 - RNA, 20 nt, Homo sapiens
  source 1..20: mol_type = genomic RNA
gtggcaggaatttcttgaga

SEQ ID NO: 20311 - RNA, 20 nt, Homo sapiens
  source 1..20: mol_type = genomic RNA
tggcaggaatttcttgagag

SEQ ID NO: 20312 - RNA, 20 nt, Homo sapiens
  source 1..20: mol_type = genomic RNA
ggcaggaatttcttgagagg

SEQ ID NO: 20313 - RNA, 20 nt, Homo sapiens
  source 1..20: mol_type = genomic RNA
gcaggaatttcttgagaggc

SEQ ID NO: 20314 - RNA, 20 nt, Homo sapiens
  source 1..20: mol_type = genomic RNA
caggaatttcttgagaggca

SEQ ID NO: 20315 - RNA, 20 nt, Homo sapiens
  source 1..20: mol_type = genomic RNA
aggaatttcttgagaggcag

SEQ ID NO: 20316 - RNA, 20 nt, Homo sapiens
  source 1..20: mol_type = genomic RNA
ggaatttcttgagaggcaga

SEQ ID NO: 20317 - RNA, 20 nt, Homo sapiens
  source 1..20: mol_type = genomic RNA
gaatttcttgagaggcagag

SEQ ID NO: 20318 - RNA, 20 nt, Homo sapiens
  source 1..20: mol_type = genomic RNA
aatttcttgagaggcagagg

SEQ ID NO: 20319 - RNA, 20 nt, Homo sapiens
  source 1..20: mol_type = genomic RNA
atttcttgagaggcagaggg

SEQ ID NO: 20320 - RNA, 20 nt, Homo sapiens
  source 1..20: mol_type = genomic RNA
tttcttgagaggcagaggga

SEQ ID NO: 20321 - RNA, 20 nt, Homo sapiens
  source 1..20: mol_type = genomic RNA
ttcttgagaggcagagggag

SEQ ID NO: 20322 - RNA, 20 nt, Homo sapiens
  source 1..20: mol_type = genomic RNA
cagagggagagcatgagaat

SEQ ID NO: 20323 - RNA, 20 nt, Homo sapiens
  source 1..20: mol_type = genomic RNA
gagggagagcatgagaatgt

SEQ ID NO: 20324 - RNA, 20 nt, Homo sapiens
  source 1..20: mol_type = genomic RNA
agggagagcatgagaatgtt

SEQ ID NO: 20325 - RNA, 20 nt, Homo sapiens
  source 1..20: mol_type = genomic RNA
gggagagcatgagaatgtta

SEQ ID NO: 20326 - RNA, 20 nt, Homo sapiens
  source 1..20: mol_type = genomic RNA
ggagagcatgagaatgttag

SEQ ID NO: 20327 - RNA, 20 nt, Homo sapiens
  source 1..20: mol_type = genomic RNA
gagagcatgagaatgttagg

SEQ ID NO: 20328 - RNA, 20 nt, Homo sapiens
  source 1..20: mol_type = genomic RNA
agagcatgagaatgttagga

SEQ ID NO: 20329 - RNA, 20 nt, Homo sapiens
  source 1..20: mol_type = genomic RNA
gagcatgagaatgttaggaa

SEQ ID NO: 20330 - RNA, 20 nt, Homo sapiens
  source 1..20: mol_type = genomic RNA
agcatgagaatgttaggaag

SEQ ID NO: 20331 - RNA, 20 nt, Homo sapiens
  source 1..20: mol_type = genomic RNA
gcatgagaatgttaggaagg

SEQ ID NO: 20332 - RNA, 20 nt, Homo sapiens
  source 1..20: mol_type = genomic RNA
catgagaatgttaggaaggc

SEQ ID NO: 20333 - RNA, 20 nt, Homo sapiens
  source 1..20: mol_type = genomic RNA
atgagaatgttaggaaggca

SEQ ID NO: 20334 - RNA, 20 nt, Homo sapiens
  source 1..20: mol_type = genomic RNA
tgagaatgttaggaaggcag

SEQ ID NO: 20335 - RNA, 20 nt, Homo sapiens
  source 1..20: mol_type = genomic RNA
gagaatgttaggaaggcagg

SEQ ID NO: 20336 - RNA, 20 nt, Homo sapiens
  source 1..20: mol_type = genomic RNA
agaatgttaggaaggcagga

SEQ ID NO: 20337 - RNA, 20 nt, Homo sapiens
  source 1..20: mol_type = genomic RNA
gaatgttaggaaggcaggag

SEQ ID NO: 20338 - RNA, 20 nt, Homo sapiens
  source 1..20: mol_type = genomic RNA
aatgttaggaaggcaggaga

SEQ ID NO: 20339 - RNA, 20 nt, Homo sapiens
  source 1..20: mol_type = genomic RNA
atgttaggaaggcaggagag

SEQ ID NO: 20340 - RNA, 20 nt, Homo sapiens
  source 1..20: mol_type = genomic RNA
tgttaggaaggcaggagaga

SEQ ID NO: 20341 - RNA, 20 nt, Homo sapiens
  source 1..20: mol_type = genomic RNA
caggagagactctcacacat

SEQ ID NO: 20342 - RNA, 20 nt, Homo sapiens
  source 1..20: mol_type = genomic RNA
aggagagactctcacacatc

SEQ ID NO: 20343 - RNA, 20 nt, Homo sapiens
  source 1..20: mol_type = genomic RNA
ggagagactctcacacatct

SEQ ID NO: 20344 - RNA, 20 nt, Homo sapiens
  source 1..20: mol_type = genomic RNA
gagagactctcacacatctg

SEQ ID NO: 20345 - RNA, 20 nt, Homo sapiens
  source 1..20: mol_type = genomic RNA
agagactctcacacatctgg

SEQ ID NO: 20346 - RNA, 20 nt, Homo sapiens
  source 1..20: mol_type = genomic RNA
gagactctcacacatctggg

SEQ ID NO: 20347 - RNA, 20 nt, Homo sapiens
  source 1..20: mol_type = genomic RNA
agactctcacacatctggga

SEQ ID NO: 20348 - RNA, 20 nt, Homo sapiens
  source 1..20: mol_type = genomic RNA
gactctcacacatctgggaa

SEQ ID NO: 20349 - RNA, 20 nt, Homo sapiens
  source 1..20: mol_type = genomic RNA
actctcacacatctgggaag

SEQ ID NO: 20350 - RNA, 20 nt, Homo sapiens
  source 1..20: mol_type = genomic RNA
ctctcacacatctgggaagc

SEQ ID NO: 20351 - RNA, 20 nt, Homo sapiens
  source 1..20: mol_type = genomic RNA
tctcacacatctgggaagct

SEQ ID NO: 20352 - RNA, 20 nt, Homo sapiens
  source 1..20: mol_type = genomic RNA
ctcacacatctgggaagctg

SEQ ID NO: 20353 - RNA, 20 nt, Homo sapiens
  source 1..20: mol_type = genomic RNA
tcacacatctgggaagctga

SEQ ID NO: 20354 - RNA, 20 nt, Homo sapiens
  source 1..20: mol_type = genomic RNA
cacacatctgggaagctgac

SEQ ID NO: 20355 - RNA, 20 nt, Homo sapiens
  source 1..20: mol_type = genomic RNA
acacatctgggaagctgaca

SEQ ID NO: 20356 - RNA, 20 nt, Homo sapiens
  source 1..20: mol_type = genomic RNA
cacatctgggaagctgacaa

SEQ ID NO: 20357 - RNA, 20 nt, Homo sapiens
  source 1..20: mol_type = genomic RNA
acatctgggaagctgacaat

SEQ ID NO: 20358 - RNA, 20 nt, Homo sapiens
  source 1..20: mol_type = genomic RNA
catctgggaagctgacaatc

SEQ ID NO: 20359 - RNA, 20 nt, Homo sapiens
  source 1..20: mol_type = genomic RNA
atctgggaagctgacaatcc

SEQ ID NO: 20360 - RNA, 20 nt, Homo sapiens
  source 1..20: mol_type = genomic RNA
tctgggaagctgacaatcca

SEQ ID NO: 20361 - RNA, 20 nt, Homo sapiens
  source 1..20: mol_type = genomic RNA
ctgggaagctgacaatccat

SEQ ID NO: 20362 - RNA, 20 nt, Homo sapiens
  source 1..20: mol_type = genomic RNA
tgggaagctgacaatccatc

SEQ ID NO: 20363 - RNA, 20 nt, Homo sapiens
  source 1..20: mol_type = genomic RNA
gggaagctgacaatccatca

SEQ ID NO: 20364 - RNA, 20 nt, Homo sapiens
  source 1..20: mol_type = genomic RNA
ggaagctgacaatccatcag

SEQ ID NO: 20365 - RNA, 20 nt, Homo sapiens
  source 1..20: mol_type = genomic RNA
gaagctgacaatccatcagc

SEQ ID NO: 20366 - RNA, 20 nt, Homo sapiens
  source 1..20: mol_type = genomic RNA
aagctgacaatccatcagca

SEQ ID NO: 20367 - RNA, 20 nt, Homo sapiens
  source 1..20: mol_type = genomic RNA
agctgacaatccatcagcat

SEQ ID NO: 20368 - RNA, 20 nt, Homo sapiens
  source 1..20: mol_type = genomic RNA
gctgacaatccatcagcatg

SEQ ID NO: 20369 - RNA, 20 nt, Homo sapiens
  source 1..20: mol_type = genomic RNA
ctgacaatccatcagcatgt

SEQ ID NO: 20370 - RNA, 20 nt, Homo sapiens
  source 1..20: mol_type = genomic RNA
tgacaatccatcagcatgtc

SEQ ID NO: 20371 - RNA, 20 nt, Homo sapiens
  source 1..20: mol_type = genomic RNA
gacaatccatcagcatgtcc

SEQ ID NO: 20372 - RNA, 20 nt, Homo sapiens
  source 1..20: mol_type = genomic RNA
acaatccatcagcatgtcca

SEQ ID NO: 20373 - RNA, 20 nt, Homo sapiens
  source 1..20: mol_type = genomic RNA
caatccatcagcatgtccag

SEQ ID NO: 20374 - RNA, 20 nt, Homo sapiens
  source 1..20: mol_type = genomic RNA
aatccatcagcatgtccagg

SEQ ID NO: 20375 - RNA, 20 nt, Homo sapiens
  source 1..20: mol_type = genomic RNA
atccatcagcatgtccagga

SEQ ID NO: 20376 - RNA, 20 nt, Homo sapiens
  source 1..20: mol_type = genomic RNA
tccatcagcatgtccaggag

SEQ ID NO: 20377 - RNA, 20 nt, Homo sapiens
  source 1..20: mol_type = genomic RNA
ccatcagcatgtccaggagg

SEQ ID NO: 20378 - RNA, 20 nt, Homo sapiens
  source 1..20: mol_type = genomic RNA
catcagcatgtccaggagga

SEQ ID NO: 20379 - RNA, 20 nt, Homo sapiens
  source 1..20: mol_type = genomic RNA
atcagcatgtccaggaggaa

SEQ ID NO: 20380 - RNA, 20 nt, Homo sapiens
  source 1..20: mol_type = genomic RNA
tcagcatgtccaggaggaaa

SEQ ID NO: 20381 - RNA, 20 nt, Homo sapiens
  source 1..20: mol_type = genomic RNA
cagcatgtccaggaggaaaa

SEQ ID NO: 20382 - RNA, 20 nt, Homo sapiens
  source 1..20: mol_type = genomic RNA
agcatgtccaggaggaaaat

SEQ ID NO: 20383 - RNA, 20 nt, Homo sapiens
  source 1..20: mol_type = genomic RNA
gcatgtccaggaggaaaata

SEQ ID NO: 20384 - RNA, 20 nt, Homo sapiens
  source 1..20: mol_type = genomic RNA
catgtccaggaggaaaataa

SEQ ID NO: 20385 - RNA, 20 nt, Homo sapiens
  source 1..20: mol_type = genomic RNA
atgtccaggaggaaaataag

SEQ ID NO: 20386 - RNA, 20 nt, Homo sapiens
  source 1..20: mol_type = genomic RNA
tgtccaggaggaaaataagg

SEQ ID NO: 20387 - RNA, 20 nt, Homo sapiens
  source 1..20: mol_type = genomic RNA
gtccaggaggaaaataagga

SEQ ID NO: 20388 - RNA, 20 nt, Homo sapiens
  source 1..20: mol_type = genomic RNA
tccaggaggaaaataaggag

SEQ ID NO: 20389 - RNA, 20 nt, Homo sapiens
  source 1..20: mol_type = genomic RNA
ccaggaggaaaataaggagg

SEQ ID NO: 20390 - RNA, 20 nt, Homo sapiens
  source 1..20: mol_type = genomic RNA
caggaggaaaataaggagga

SEQ ID NO: 20391 - RNA, 20 nt, Homo sapiens
  source 1..20: mol_type = genomic RNA
gaaaataaggaggaggagca

SEQ ID NO: 20392 - RNA, 20 nt, Homo sapiens
  source 1..20: mol_type = genomic RNA
aaaataaggaggaggagcag

SEQ ID NO: 20393 - RNA, 20 nt, Homo sapiens
  source 1..20: mol_type = genomic RNA
gaggaggagcagaaatagat

SEQ ID NO: 20394 - RNA, 20 nt, Homo sapiens
  source 1..20: mol_type = genomic RNA
aggaggagcagaaatagatg

SEQ ID NO: 20395 - RNA, 20 nt, Homo sapiens
  source 1..20: mol_type = genomic RNA
ggaggagcagaaatagatga

SEQ ID NO: 20396 - RNA, 20 nt, Homo sapiens
  source 1..20: mol_type = genomic RNA
gaggagcagaaatagatgag

SEQ ID NO: 20397 - RNA, 20 nt, Homo sapiens
  source 1..20: mol_type = genomic RNA
aggagcagaaatagatgagg

SEQ ID NO: 20398 - RNA, 20 nt, Homo sapiens
  source 1..20: mol_type = genomic RNA
gagcagaaatagatgaggct

SEQ ID NO: 20399 - RNA, 20 nt, Homo sapiens
  source 1..20: mol_type = genomic RNA
agcagaaatagatgaggctg

SEQ ID NO: 20400 - RNA, 20 nt, Homo sapiens
  source 1..20: mol_type = genomic RNA
gcagaaatagatgaggctgg

SEQ ID NO: 20401 - RNA, 20 nt, Homo sapiens
  source 1..20: mol_type = genomic RNA
cagaaatagatgaggctgga

SEQ ID NO: 20402 - RNA, 20 nt, Homo sapiens
  source 1..20: mol_type = genomic RNA
agaaatagatgaggctggat

SEQ ID NO: 20403 - RNA, 20 nt, Homo sapiens
  source 1..20: mol_type = genomic RNA
gaaatagatgaggctggata

SEQ ID NO: 20404 - RNA, 20 nt, Homo sapiens
  source 1..20: mol_type = genomic RNA
aaatagatgaggctggatat

SEQ ID NO: 20405 - RNA, 20 nt, Homo sapiens
  source 1..20: mol_type = genomic RNA
aatagatgaggctggatata

SEQ ID NO: 20406 - RNA, 20 nt, Homo sapiens
  source 1..20: mol_type = genomic RNA
atagatgaggctggatatag

SEQ ID NO: 20407 - RNA, 20 nt, Homo sapiens
  source 1..20: mol_type = genomic RNA
tagatgaggctggatataga

SEQ ID NO: 20408 - RNA, 20 nt, Homo sapiens
  source 1..20: mol_type = genomic RNA
agatgaggctggatatagaa

SEQ ID NO: 20409 - RNA, 20 nt, Homo sapiens
  source 1..20: mol_type = genomic RNA
gatgaggctggatatagaag

SEQ ID NO: 20410 - RNA, 20 nt, Homo sapiens
  source 1..20: mol_type = genomic RNA
atgaggctggatatagaagc

SEQ ID NO: 20411 - RNA, 20 nt, Homo sapiens
  source 1..20: mol_type = genomic RNA
tgaggctggatatagaagca

SEQ ID NO: 20412 - RNA, 20 nt, Homo sapiens
  source 1..20: mol_type = genomic RNA
gaggctggatatagaagcag

SEQ ID NO: 20413 - RNA, 20 nt, Homo sapiens
  source 1..20: mol_type = genomic RNA
aggctggatatagaagcagg

SEQ ID NO: 20414 - RNA, 20 nt, Homo sapiens
  source 1..20: mol_type = genomic RNA
ctggatatagaagcagggct

SEQ ID NO: 20415 - RNA, 20 nt, Homo sapiens
  source 1..20: mol_type = genomic RNA
tggatatagaagcagggctg

SEQ ID NO: 20416 - RNA, 20 nt, Homo sapiens
  source 1..20: mol_type = genomic RNA
ggatatagaagcagggctga

SEQ ID NO: 20417 - RNA, 20 nt, Homo sapiens
  source 1..20: mol_type = genomic RNA
gatatagaagcagggctgaa

SEQ ID NO: 20418 - RNA, 20 nt, Homo sapiens
  source 1..20: mol_type = genomic RNA
atatagaagcagggctgaag

SEQ ID NO: 20419 - RNA, 20 nt, Homo sapiens
  source 1..20: mol_type = genomic RNA
agcagggctgaagctgtgtt

SEQ ID NO: 20420 - RNA, 20 nt, Homo sapiens
  source 1..20: mol_type = genomic RNA
gcagggctgaagctgtgttg

SEQ ID NO: 20421 - RNA, 20 nt, Homo sapiens
  source 1..20: mol_type = genomic RNA
cagggctgaagctgtgttgt

SEQ ID NO: 20422 - RNA, 20 nt, Homo sapiens
  source 1..20: mol_type = genomic RNA
agggctgaagctgtgttgtt

SEQ ID NO: 20423 - RNA, 20 nt, Homo sapiens
  source 1..20: mol_type = genomic RNA
gggctgaagctgtgttgttt

SEQ ID NO: 20424 - RNA, 20 nt, Homo sapiens
  source 1..20: mol_type = genomic RNA
ggctgaagctgtgttgtttg

SEQ ID NO: 20425 - RNA, 20 nt, Homo sapiens
  source 1..20: mol_type = genomic RNA
gctgaagctgtgttgtttgt

SEQ ID NO: 20426 - RNA, 20 nt, Homo sapiens
  source 1..20: mol_type = genomic RNA
ctgaagctgtgttgtttgtg

SEQ ID NO: 20427 - RNA, 20 nt, Homo sapiens
  source 1..20: mol_type = genomic RNA
tgaagctgtgttgtttgtgg

SEQ ID NO: 20428 - RNA, 20 nt, Homo sapiens
  source 1..20: mol_type = genomic RNA
gaagctgtgttgtttgtggt

SEQ ID NO: 20429 - RNA, 20 nt, Homo sapiens
  source 1..20: mol_type = genomic RNA
aagctgtgttgtttgtggta

SEQ ID NO: 20430 - RNA, 20 nt, Homo sapiens
  source 1..20: mol_type = genomic RNA
agctgtgttgtttgtggtaa

SEQ ID NO: 20431 - RNA, 20 nt, Homo sapiens
  source 1..20: mol_type = genomic RNA
gctgtgttgtttgtggtaaa

SEQ ID NO: 20432 - RNA, 20 nt, Homo sapiens
  source 1..20: mol_type = genomic RNA
tgtgttgtttgtggtaaaga

SEQ ID NO: 20433 - RNA, 20 nt, Homo sapiens
  source 1..20: mol_type = genomic RNA
gtgttgtttgtggtaaagag

SEQ ID NO: 20434 - RNA, 20 nt, Homo sapiens
  source 1..20: mol_type = genomic RNA
tgttgtttgtggtaaagagt

SEQ ID NO: 20435 - RNA, 20 nt, Homo sapiens
  source 1..20: mol_type = genomic RNA
tgtttgtggtaaagagttgt

SEQ ID NO: 20436 - RNA, 20 nt, Homo sapiens
  source 1..20: mol_type = genomic RNA
gtttgtggtaaagagttgtg

SEQ ID NO: 20437 - RNA, 20 nt, Homo sapiens
  source 1..20: mol_type = genomic RNA
tttgtggtaaagagttgtga

SEQ ID NO: 20438 - RNA, 20 nt, Homo sapiens
  source 1..20: mol_type = genomic RNA
ttgtggtaaagagttgtgat

SEQ ID NO: 20439 - RNA, 20 nt, Homo sapiens
  source 1..20: mol_type = genomic RNA
tgtggtaaagagttgtgatt

SEQ ID NO: 20440 - RNA, 20 nt, Homo sapiens
  source 1..20: mol_type = genomic RNA
gtggtaaagagttgtgattc

SEQ ID NO: 20441 - RNA, 20 nt, Homo sapiens
  source 1..20: mol_type = genomic RNA
tggtaaagagttgtgattct

SEQ ID NO: 20442 - RNA, 20 nt, Homo sapiens
  source 1..20: mol_type = genomic RNA
ggtaaagagttgtgattcta

SEQ ID NO: 20443 - RNA, 20 nt, Homo sapiens
  source 1..20: mol_type = genomic RNA
aaagagttgtgattctatcc

SEQ ID NO: 20444 - RNA, 20 nt, Homo sapiens
  source 1..20: mol_type = genomic RNA
aagagttgtgattctatcca

SEQ ID NO: 20445 - RNA, 20 nt, Homo sapiens
  source 1..20: mol_type = genomic RNA
agagttgtgattctatccag

SEQ ID NO: 20446 - RNA, 20 nt, Homo sapiens
  source 1..20: mol_type = genomic RNA
gagttgtgattctatccaga

SEQ ID NO: 20447 - RNA, 20 nt, Homo sapiens
  source 1..20: mol_type = genomic RNA
agttgtgattctatccagaa

SEQ ID NO: 20448 - RNA, 20 nt, Homo sapiens
  source 1..20: mol_type = genomic RNA
gttgtgattctatccagaag

SEQ ID NO: 20449 - RNA, 20 nt, Homo sapiens
  source 1..20: mol_type = genomic RNA
ttgtgattctatccagaagg

SEQ ID NO: 20450 - RNA, 20 nt, Homo sapiens
  source 1..20: mol_type = genomic RNA
tgtgattctatccagaaggc

SEQ ID NO: 20451 - RNA, 20 nt, Homo sapiens
  source 1..20: mol_type = genomic RNA
gtgattctatccagaaggca

SEQ ID NO: 20452 - RNA, 20 nt, Homo sapiens
  source 1..20: mol_type = genomic RNA
tgattctatccagaaggcaa

SEQ ID NO: 20453 - RNA, 20 nt, Homo sapiens
  source 1..20: mol_type = genomic RNA
gattctatccagaaggcaat

SEQ ID NO: 20454 - RNA, 20 nt, Homo sapiens
  source 1..20: mol_type = genomic RNA
attctatccagaaggcaata

SEQ ID NO: 20455 - RNA, 20 nt, Homo sapiens
  source 1..20: mol_type = genomic RNA
ttctatccagaaggcaatag

SEQ ID NO: 20456 - RNA, 20 nt, Homo sapiens
  source 1..20: mol_type = genomic RNA
tctatccagaaggcaatagg

SEQ ID NO: 20457 - RNA, 20 nt, Homo sapiens
  source 1..20: mol_type = genomic RNA
ctatccagaaggcaataggt

SEQ ID NO: 20458 - RNA, 20 nt, Homo sapiens
  source 1..20: mol_type = genomic RNA
tatccagaaggcaataggta

SEQ ID NO: 20459 - RNA, 20 nt, Homo sapiens
  source 1..20: mol_type = genomic RNA
atccagaaggcaataggtag

SEQ ID NO: 20460 - RNA, 20 nt, Homo sapiens
  source 1..20: mol_type = genomic RNA
tccagaaggcaataggtagc

SEQ ID NO: 20461 - RNA, 20 nt, Homo sapiens
  source 1..20: mol_type = genomic RNA
ccagaaggcaataggtagca

SEQ ID NO: 20462 - RNA, 20 nt, Homo sapiens
  source 1..20: mol_type = genomic RNA
agtcagcaaatattttctgc

SEQ ID NO: 20463 - RNA, 20 nt, Homo sapiens
  source 1..20: mol_type = genomic RNA
gcaaatattttctgcaaagg

SEQ ID NO: 20464 - RNA, 20 nt, Homo sapiens
  source 1..20: mol_type = genomic RNA
caaatattttctgcaaaggg

SEQ ID NO: 20465 - RNA, 20 nt, Homo sapiens
  source 1..20: mol_type = genomic RNA
aaatattttctgcaaagggc

SEQ ID NO: 20466 - RNA, 20 nt, Homo sapiens
  source 1..20: mol_type = genomic RNA
aatattttctgcaaagggct

SEQ ID NO: 20467 - RNA, 20 nt, Homo sapiens
  source 1..20: mol_type = genomic RNA
atattttctgcaaagggcta

SEQ ID NO: 20468 - RNA, 20 nt, Homo sapiens
  source 1..20: mol_type = genomic RNA
tattttctgcaaagggctaa

SEQ ID NO: 20469 - RNA, 20 nt, Homo sapiens
  source 1..20: mol_type = genomic RNA
attttctgcaaagggctaaa

SEQ ID NO: 20470 - RNA, 20 nt, Homo sapiens
  source 1..20: mol_type = genomic RNA
ttttctgcaaagggctaaat

SEQ ID NO: 20471 - RNA, 20 nt, Homo sapiens
  source 1..20: mol_type = genomic RNA
tttctgcaaagggctaaatg

SEQ ID NO: 20472 - RNA, 20 nt, Homo sapiens
  source 1..20: mol_type = genomic RNA
ttctgcaaagggctaaatgt

SEQ ID NO: 20473 - RNA, 20 nt, Homo sapiens
  source 1..20: mol_type = genomic RNA
tctgcaaagggctaaatgtt

SEQ ID NO: 20474 - RNA, 20 nt, Homo sapiens
  source 1..20: mol_type = genomic RNA
ctgcaaagggctaaatgtta

SEQ ID NO: 20475 - RNA, 20 nt, Homo sapiens
  source 1..20: mol_type = genomic RNA
tgcaaagggctaaatgttaa

SEQ ID NO: 20476 - RNA, 20 nt, Homo sapiens
  source 1..20: mol_type = genomic RNA
gcaaagggctaaatgttaaa

SEQ ID NO: 20477 - RNA, 20 nt, Homo sapiens
  source 1..20: mol_type = genomic RNA
caaagggctaaatgttaaat

SEQ ID NO: 20478 - RNA, 20 nt, Homo sapiens
  source 1..20: mol_type = genomic RNA
aaagggctaaatgttaaata

SEQ ID NO: 20479 - RNA, 20 nt, Homo sapiens
  source 1..20: mol_type = genomic RNA
aagggctaaatgttaaatat

SEQ ID NO: 20480 - RNA, 20 nt, Homo sapiens
  source 1..20: mol_type = genomic RNA
agggctaaatgttaaatatt

SEQ ID NO: 20481 - RNA, 20 nt, Homo sapiens
  source 1..20: mol_type = genomic RNA
aaattttccaagccatatgg

SEQ ID NO: 20482 - RNA, 20 nt, Homo sapiens
  source 1..20: mol_type = genomic RNA
aattttccaagccatatggt

SEQ ID NO: 20483 - RNA, 20 nt, Homo sapiens
  source 1..20: mol_type = genomic RNA
attttccaagccatatggtc

SEQ ID NO: 20484 - RNA, 20 nt, Homo sapiens
  source 1..20: mol_type = genomic RNA
ttttccaagccatatggtct

SEQ ID NO: 20485 - RNA, 20 nt, Homo sapiens
  source 1..20: mol_type = genomic RNA
tttccaagccatatggtctc

SEQ ID NO: 20486 - RNA, 20 nt, Homo sapiens
  source 1..20: mol_type = genomic RNA
ttccaagccatatggtctct

SEQ ID NO: 20487 - RNA, 20 nt, Homo sapiens
  source 1..20: mol_type = genomic RNA
tccaagccatatggtctctc

SEQ ID NO: 20488 - RNA, 20 nt, Homo sapiens
  source 1..20: mol_type = genomic RNA
ccaagccatatggtctctct

SEQ ID NO: 20489 - RNA, 20 nt, Homo sapiens
  source 1..20: mol_type = genomic RNA
caagccatatggtctctctc

SEQ ID NO: 20490 - RNA, 20 nt, Homo sapiens
  source 1..20: mol_type = genomic RNA
aagccatatggtctctctct

SEQ ID NO: 20491 - RNA, 20 nt, Homo sapiens
  source 1..20: mol_type = genomic RNA
agccatatggtctctctctc

SEQ ID NO: 20492 - RNA, 20 nt, Homo sapiens
  source 1..20: mol_type = genomic RNA
gccatatggtctctctctca

SEQ ID NO: 20493 - RNA, 20 nt, Homo sapiens
  source 1..20: mol_type = genomic RNA
ccatatggtctctctctcaa

SEQ ID NO: 20494 - RNA, 20 nt, Homo sapiens
  source 1..20: mol_type = genomic RNA
catatggtctctctctcaat

SEQ ID NO: 20495 - RNA, 20 nt, Homo sapiens
  source 1..20: mol_type = genomic RNA
atatggtctctctctcaatg

SEQ ID NO: 20496 - RNA, 20 nt, Homo sapiens
  source 1..20: mol_type = genomic RNA
tatggtctctctctcaatga

SEQ ID NO: 20497 - RNA, 20 nt, Homo sapiens
  source 1..20: mol_type = genomic RNA
atggtctctctctcaatgac

SEQ ID NO: 20498 - RNA, 20 nt, Homo sapiens
  source 1..20: mol_type = genomic RNA
tggtctctctctcaatgact

SEQ ID NO: 20499 - RNA, 20 nt, Homo sapiens
  source 1..20: mol_type = genomic RNA
ggtctctctctcaatgactc

SEQ ID NO: 20500 - RNA, 20 nt, Homo sapiens
  source 1..20: mol_type = genomic RNA
gtctctctctcaatgactca

SEQ ID NO: 20501 - RNA, 20 nt, Homo sapiens
  source 1..20: mol_type = genomic RNA
tctctctctcaatgactcag

SEQ ID NO: 20502 - RNA, 20 nt, Homo sapiens
  source 1..20: mol_type = genomic RNA
ctctctctcaatgactcagc

SEQ ID NO: 20503 - RNA, 20 nt, Homo sapiens
  source 1..20: mol_type = genomic RNA
tctctctcaatgactcagct

SEQ ID NO: 20504 - RNA, 20 nt, Homo sapiens
  source 1..20: mol_type = genomic RNA
ctctctcaatgactcagctc

SEQ ID NO: 20505 - RNA, 20 nt, Homo sapiens
  source 1..20: mol_type = genomic RNA
tctctcaatgactcagctct

SEQ ID NO: 20506 - RNA, 20 nt, Homo sapiens
  source 1..20: mol_type = genomic RNA
ctctcaatgactcagctctt

SEQ ID NO: 20507 - RNA, 20 nt, Homo sapiens
  source 1..20: mol_type = genomic RNA
tctcaatgactcagctcttc

SEQ ID NO: 20508 - RNA, 20 nt, Homo sapiens
  source 1..20: mol_type = genomic RNA
ctcaatgactcagctcttcc

SEQ ID NO: 20509 - RNA, 20 nt, Homo sapiens
  source 1..20: mol_type = genomic RNA
tcaatgactcagctcttcca

SEQ ID NO: 20510 - RNA, 20 nt, Homo sapiens
  source 1..20: mol_type = genomic RNA
caatgactcagctcttccat

SEQ ID NO: 20511 - RNA, 20 nt, Homo sapiens
  source 1..20: mol_type = genomic RNA
aatgactcagctcttccatt

SEQ ID NO: 20512 - RNA, 20 nt, Homo sapiens
  source 1..20: mol_type = genomic RNA
atgactcagctcttccatta

SEQ ID NO: 20513 - RNA, 20 nt, Homo sapiens
  source 1..20: mol_type = genomic RNA
tgactcagctcttccattat

SEQ ID NO: 20514 - RNA, 20 nt, Homo sapiens
  source 1..20: mol_type = genomic RNA
gactcagctcttccattata

SEQ ID NO: 20515 - RNA, 20 nt, Homo sapiens
  source 1..20: mol_type = genomic RNA
actcagctcttccattatac

SEQ ID NO: 20516 - RNA, 20 nt, Homo sapiens
  source 1..20: mol_type = genomic RNA
ctcagctcttccattatacc

SEQ ID NO: 20517 - RNA, 20 nt, Homo sapiens
  source 1..20: mol_type = genomic RNA
tcagctcttccattatacca

SEQ ID NO: 20518 - RNA, 20 nt, Homo sapiens
  source 1..20: mol_type = genomic RNA
cagctcttccattataccat

SEQ ID NO: 20519 - RNA, 20 nt, Homo sapiens
  source 1..20: mol_type = genomic RNA
agctcttccattataccatg

SEQ ID NO: 20520 - RNA, 20 nt, Homo sapiens
  source 1..20: mol_type = genomic RNA
gctcttccattataccatga

SEQ ID NO: 20521 - RNA, 20 nt, Homo sapiens
  source 1..20: mol_type = genomic RNA
tccattataccatgaaagta

SEQ ID NO: 20522 - RNA, 20 nt, Homo sapiens
  source 1..20: mol_type = genomic RNA
ccattataccatgaaagtag

SEQ ID NO: 20523 - RNA, 20 nt, Homo sapiens
  source 1..20: mol_type = genomic RNA
cattataccatgaaagtagc

SEQ ID NO: 20524 - RNA, 20 nt, Homo sapiens
  source 1..20: mol_type = genomic RNA
attataccatgaaagtagcc

SEQ ID NO: 20525 - RNA, 20 nt, Homo sapiens
  source 1..20: mol_type = genomic RNA
ttataccatgaaagtagcca

SEQ ID NO: 20526 - RNA, 20 nt, Homo sapiens
  source 1..20: mol_type = genomic RNA
tataccatgaaagtagccag

SEQ ID NO: 20527 - RNA, 20 nt, Homo sapiens
  source 1..20: mol_type = genomic RNA
ataccatgaaagtagccaga

SEQ ID NO: 20528 - RNA, 20 nt, Homo sapiens
  source 1..20: mol_type = genomic RNA
taccatgaaagtagccagag

SEQ ID NO: 20529 - RNA, 20 nt, Homo sapiens
  source 1..20: mol_type = genomic RNA
accatgaaagtagccagaga

SEQ ID NO: 20530 - RNA, 20 nt, Homo sapiens
  source 1..20: mol_type = genomic RNA
ccatgaaagtagccagagac

SEQ ID NO: 20531 - RNA, 20 nt, Homo sapiens
  source 1..20: mol_type = genomic RNA
catgaaagtagccagagacg

SEQ ID NO: 20532 - RNA, 20 nt, Homo sapiens
  source 1..20: mol_type = genomic RNA
atgaaagtagccagagacgt

SEQ ID NO: 20533 - RNA, 20 nt, Homo sapiens
  source 1..20: mol_type = genomic RNA
caaacgcagactgtgtcaga

SEQ ID NO: 20534 - RNA, 20 nt, Homo sapiens
  source 1..20: mol_type = genomic RNA
aaacgcagactgtgtcagac

SEQ ID NO: 20535 - RNA, 20 nt, Homo sapiens
  source 1..20: mol_type = genomic RNA
aacgcagactgtgtcagaca

SEQ ID NO: 20536 - RNA, 20 nt, Homo sapiens
  source 1..20: mol_type = genomic RNA
acgcagactgtgtcagacat

SEQ ID NO: 20537 - RNA, 20 nt, Homo sapiens
  source 1..20: mol_type = genomic RNA
cgcagactgtgtcagacata

SEQ ID NO: 20538 - RNA, 20 nt, Homo sapiens
  source 1..20: mol_type = genomic RNA
gcagactgtgtcagacatag

SEQ ID NO: 20539 - RNA, 20 nt, Homo sapiens
  source 1..20: mol_type = genomic RNA
cagactgtgtcagacatagt

SEQ ID NO: 20540 - RNA, 20 nt, Homo sapiens
  source 1..20: mol_type = genomic RNA
agactgtgtcagacatagtc

SEQ ID NO: 20541 - RNA, 20 nt, Homo sapiens
  source 1..20: mol_type = genomic RNA
gactgtgtcagacatagtcc

SEQ ID NO: 20542 - RNA, 20 nt, Homo sapiens
  source 1..20: mol_type = genomic RNA
actgtgtcagacatagtcca

SEQ ID NO: 20543 - RNA, 20 nt, Homo sapiens
  source 1..20: mol_type = genomic RNA
ctgtgtcagacatagtccat

SEQ ID NO: 20544 - RNA, 20 nt, Homo sapiens
  source 1..20: mol_type = genomic RNA
tgtgtcagacatagtccatg

SEQ ID NO: 20545 - RNA, 20 nt, Homo sapiens
  source 1..20: mol_type = genomic RNA
gtgtcagacatagtccatgt

SEQ ID NO: 20546 - RNA, 20 nt, Homo sapiens
  source 1..20: mol_type = genomic RNA
tgtcagacatagtccatgta

SEQ ID NO: 20547 - RNA, 20 nt, Homo sapiens
  source 1..20: mol_type = genomic RNA
gtcagacatagtccatgtat

SEQ ID NO: 20548 - RNA, 20 nt, Homo sapiens
  source 1..20: mol_type = genomic RNA
tcagacatagtccatgtatg

SEQ ID NO: 20549 - RNA, 20 nt, Homo sapiens
  source 1..20: mol_type = genomic RNA
cagacatagtccatgtatgg

SEQ ID NO: 20550 - RNA, 20 nt, Homo sapiens
  source 1..20: mol_type = genomic RNA
agacatagtccatgtatggt

SEQ ID NO: 20551 - RNA, 20 nt, Homo sapiens
  source 1..20: mol_type = genomic RNA
gacatagtccatgtatggta

SEQ ID NO: 20552 - RNA, 20 nt, Homo sapiens
  source 1..20: mol_type = genomic RNA
acatagtccatgtatggtag

SEQ ID NO: 20553 - RNA, 20 nt, Homo sapiens
  source 1..20: mol_type = genomic RNA
catagtccatgtatggtagt

SEQ ID NO: 20554 - RNA, 20 nt, Homo sapiens
  source 1..20: mol_type = genomic RNA
tgccacaccttgttttagaa

SEQ ID NO: 20555 - RNA, 20 nt, Homo sapiens
  source 1..20: mol_type = genomic RNA
gccacaccttgttttagaaa

SEQ ID NO: 20556 - RNA, 20 nt, Homo sapiens
  source 1..20: mol_type = genomic RNA
ccacaccttgttttagaaag

SEQ ID NO: 20557 - RNA, 20 nt, Homo sapiens
  source 1..20: mol_type = genomic RNA
cacaccttgttttagaaagc

SEQ ID NO: 20558 - RNA, 20 nt, Homo sapiens
  source 1..20: mol_type = genomic RNA
acaccttgttttagaaagct

SEQ ID NO: 20559 - RNA, 20 nt, Homo sapiens
  source 1..20: mol_type = genomic RNA
caccttgttttagaaagctc

SEQ ID NO: 20560 - RNA, 20 nt, Homo sapiens
  source 1..20: mol_type = genomic RNA
cttgttttagaaagctcagg

SEQ ID NO: 20561 - RNA, 20 nt, Homo sapiens
  source 1..20: mol_type = genomic RNA
ttgttttagaaagctcaggt

SEQ ID NO: 20562 - RNA, 20 nt, Homo sapiens
  source 1..20: mol_type = genomic RNA
tgttttagaaagctcaggtt

SEQ ID NO: 20563 - RNA, 20 nt, Homo sapiens
  source 1..20: mol_type = genomic RNA
ttagaaagctcaggtttatg

SEQ ID NO: 20564 - RNA, 20 nt, Homo sapiens
  source 1..20: mol_type = genomic RNA
tagaaagctcaggtttatga

SEQ ID NO: 20565 - RNA, 20 nt, Homo sapiens
  source 1..20: mol_type = genomic RNA
agaaagctcaggtttatgat

SEQ ID NO: 20566 - RNA, 20 nt, Homo sapiens
  source 1..20: mol_type = genomic RNA
gaaagctcaggtttatgatg

SEQ ID NO: 20567 - RNA, 20 nt, Homo sapiens
  source 1..20: mol_type = genomic RNA
aaagctcaggtttatgatgt

SEQ ID NO: 20568 - RNA, 20 nt, Homo sapiens
  source 1..20: mol_type = genomic RNA
aagctcaggtttatgatgtg

SEQ ID NO: 20569 - RNA, 20 nt, Homo sapiens
  source 1..20: mol_type = genomic RNA
agctcaggtttatgatgtga

SEQ ID NO: 20570 - RNA, 20 nt, Homo sapiens
  source 1..20: mol_type = genomic RNA
gctcaggtttatgatgtgat

SEQ ID NO: 20571 - RNA, 20 nt, Homo sapiens
  source 1..20: mol_type = genomic RNA
ctcaggtttatgatgtgatg

SEQ ID NO: 20572 - RNA, 20 nt, Homo sapiens
  source 1..20: mol_type = genomic RNA
tcaggtttatgatgtgatgg

SEQ ID NO: 20573 - RNA, 20 nt, Homo sapiens
  source 1..20: mol_type = genomic RNA
caggtttatgatgtgatgga

SEQ ID NO: 20574 - RNA, 20 nt, Homo sapiens
  source 1..20: mol_type = genomic RNA
aggtttatgatgtgatggag

SEQ ID NO: 20575 - RNA, 20 nt, Homo sapiens
  source 1..20: mol_type = genomic RNA
ggtttatgatgtgatggaga

SEQ ID NO: 20576 - RNA, 20 nt, Homo sapiens
  source 1..20: mol_type = genomic RNA
gtttatgatgtgatggagaa

SEQ ID NO: 20577 - RNA, 20 nt, Homo sapiens
  source 1..20: mol_type = genomic RNA
tttatgatgtgatggagaat

SEQ ID NO: 20578 - RNA, 20 nt, Homo sapiens
  source 1..20: mol_type = genomic RNA
ttatgatgtgatggagaatt

SEQ ID NO: 20579 - RNA, 20 nt, Homo sapiens
  source 1..20: mol_type = genomic RNA
tatgatgtgatggagaattc

SEQ ID NO: 20580 - RNA, 20 nt, Homo sapiens
  source 1..20: mol_type = genomic RNA
atgatgtgatggagaattcc

SEQ ID NO: 20581 - RNA, 20 nt, Homo sapiens
  source 1..20: mol_type = genomic RNA
tgatgtgatggagaattcct

SEQ ID NO: 20582 - RNA, 20 nt, Homo sapiens
  source 1..20: mol_type = genomic RNA
gatgtgatggagaattccta

SEQ ID NO: 20583 - RNA, 20 nt, Homo sapiens
  source 1..20: mol_type = genomic RNA
atgtgatggagaattcctac

SEQ ID NO: 20584 - RNA, 20 nt, Homo sapiens
  source 1..20: mol_type = genomic RNA
tgtgatggagaattcctaca

SEQ ID NO: 20585 - RNA, 20 nt, Homo sapiens
  source 1..20: mol_type = genomic RNA
gtgatggagaattcctacaa

SEQ ID NO: 20586 - RNA, 20 nt, Homo sapiens
  source 1..20: mol_type = genomic RNA
tgatggagaattcctacaag

SEQ ID NO: 20587 - RNA, 20 nt, Homo sapiens
  source 1..20: mol_type = genomic RNA
gatggagaattcctacaaga

SEQ ID NO: 20588 - RNA, 20 nt, Homo sapiens
  source 1..20: mol_type = genomic RNA
atggagaattcctacaagag

SEQ ID NO: 20589 - RNA, 20 nt, Homo sapiens
  source 1..20: mol_type = genomic RNA
tggagaattcctacaagagt

SEQ ID NO: 20590 - RNA, 20 nt, Homo sapiens
  source 1..20: mol_type = genomic RNA
ggagaattcctacaagagtt

SEQ ID NO: 20591 - RNA, 20 nt, Homo sapiens
  source 1..20: mol_type = genomic RNA
gagaattcctacaagagttc

SEQ ID NO: 20592 - RNA, 20 nt, Homo sapiens
  source 1..20: mol_type = genomic RNA
agaattcctacaagagttct

SEQ ID NO: 20593 - RNA, 20 nt, Homo sapiens
  source 1..20: mol_type = genomic RNA
ttttaaatggtagagtgaac

SEQ ID NO: 20594 - RNA, 20 nt, Homo sapiens
  source 1..20: mol_type = genomic RNA
tttaaatggtagagtgaaca

SEQ ID NO: 20595 - RNA, 20 nt, Homo sapiens
  source 1..20: mol_type = genomic RNA
ttaaatggtagagtgaacat

SEQ ID NO: 20596 - RNA, 20 nt, Homo sapiens
  source 1..20: mol_type = genomic RNA
taaatggtagagtgaacata

SEQ ID NO: 20597 - RNA, 20 nt, Homo sapiens
  source 1..20: mol_type = genomic RNA
aaatggtagagtgaacatac

SEQ ID NO: 20598 - RNA, 20 nt, Homo sapiens
  source 1..20: mol_type = genomic RNA
aatggtagagtgaacataca

SEQ ID NO: 20599 - RNA, 20 nt, Homo sapiens
  source 1..20: mol_type = genomic RNA
atggtagagtgaacatacac

SEQ ID NO: 20600 - RNA, 20 nt, Homo sapiens
  source 1..20: mol_type = genomic RNA
tggtagagtgaacatacact

SEQ ID NO: 20601 - RNA, 20 nt, Homo sapiens
  source 1..20: mol_type = genomic RNA
ggtagagtgaacatacactg

SEQ ID NO: 20602 - RNA, 20 nt, Homo sapiens
  source 1..20: mol_type = genomic RNA
gtagagtgaacatacactgg

SEQ ID NO: 20603 - RNA, 20 nt, Homo sapiens
  source 1..20: mol_type = genomic RNA
tagagtgaacatacactgga

SEQ ID NO: 20604 - RNA, 20 nt, Homo sapiens
  source 1..20: mol_type = genomic RNA
agagtgaacatacactggaa

SEQ ID NO: 20605 - RNA, 20 nt, Homo sapiens
  source 1..20: mol_type = genomic RNA
gagtgaacatacactggaat

SEQ ID NO: 20606 - RNA, 20 nt, Homo sapiens
  source 1..20: mol_type = genomic RNA
agtgaacatacactggaatt

SEQ ID NO: 20607 - RNA, 20 nt, Homo sapiens
  source 1..20: mol_type = genomic RNA
gtgaacatacactggaattc

SEQ ID NO: 20608 - RNA, 20 nt, Homo sapiens
  source 1..20: mol_type = genomic RNA
tgaacatacactggaattct

SEQ ID NO: 20609 - RNA, 20 nt, Homo sapiens
  source 1..20: mol_type = genomic RNA
gaacatacactggaattcta

SEQ ID NO: 20610 - RNA, 20 nt, Homo sapiens
  source 1..20: mol_type = genomic RNA
aacatacactggaattctat

SEQ ID NO: 20611 - RNA, 20 nt, Homo sapiens
  source 1..20: mol_type = genomic RNA
acatacactggaattctata

SEQ ID NO: 20612 - RNA, 20 nt, Homo sapiens
  source 1..20: mol_type = genomic RNA
catacactggaattctatac

SEQ ID NO: 20613 - RNA, 20 nt, Homo sapiens
  source 1..20: mol_type = genomic RNA
atacactggaattctatact

SEQ ID NO: 20614 - RNA, 20 nt, Homo sapiens
  source 1..20: mol_type = genomic RNA
tacactggaattctatactg

SEQ ID NO: 20615 - RNA, 20 nt, Homo sapiens
  source 1..20: mol_type = genomic RNA
acactggaattctatactgc

SEQ ID NO: 20616 - RNA, 20 nt, Homo sapiens
  source 1..20: mol_type = genomic RNA
cactggaattctatactgct

SEQ ID NO: 20617 - RNA, 20 nt, Homo sapiens
  source 1..20: mol_type = genomic RNA
actggaattctatactgctt

SEQ ID NO: 20618 - RNA, 20 nt, Homo sapiens
  source 1..20: mol_type = genomic RNA
ctggaattctatactgcttg

SEQ ID NO: 20619 - RNA, 20 nt, Homo sapiens
  source 1..20: mol_type = genomic RNA
tggaattctatactgcttga

SEQ ID NO: 20620 - RNA, 20 nt, Homo sapiens
  source 1..20: mol_type = genomic RNA
ggaattctatactgcttgac

SEQ ID NO: 20621 - RNA, 20 nt, Homo sapiens
  source 1..20: mol_type = genomic RNA
gaattctatactgcttgacc

SEQ ID NO: 20622 - RNA, 20 nt, Homo sapiens
  source 1..20: mol_type = genomic RNA
aattctatactgcttgaccc

SEQ ID NO: 20623 - RNA, 20 nt, Homo sapiens
  source 1..20: mol_type = genomic RNA
attctatactgcttgaccca

SEQ ID NO: 20624 - RNA, 20 nt, Homo sapiens
  source 1..20: mol_type = genomic RNA
ttctatactgcttgacccaa

SEQ ID NO: 20625 - RNA, 20 nt, Homo sapiens
  source 1..20: mol_type = genomic RNA
tctatactgcttgacccaag

SEQ ID NO: 20626 - RNA, 20 nt, Homo sapiens
  source 1..20: mol_type = genomic RNA
ctatactgcttgacccaagc

SEQ ID NO: 20627 - RNA, 20 nt, Homo sapiens
  source 1..20: mol_type = genomic RNA
tatactgcttgacccaagct

SEQ ID NO: 20628 - RNA, 20 nt, Homo sapiens
  source 1..20: mol_type = genomic RNA
atactgcttgacccaagctt

SEQ ID NO: 20629 - RNA, 20 nt, Homo sapiens
  source 1..20: mol_type = genomic RNA
tactgcttgacccaagcttt

SEQ ID NO: 20630 - RNA, 20 nt, Homo sapiens
  source 1..20: mol_type = genomic RNA
actgcttgacccaagctttt

SEQ ID NO: 20631 - RNA, 20 nt, Homo sapiens
  source 1..20: mol_type = genomic RNA
ctgcttgacccaagcttttg

SEQ ID NO: 20632 - RNA, 20 nt, Homo sapiens
  source 1..20: mol_type = genomic RNA
tgcttgacccaagcttttga

SEQ ID NO: 20633 - RNA, 20 nt, Homo sapiens
  source 1..20: mol_type = genomic RNA
gcttgacccaagcttttgat

SEQ ID NO: 20634 - RNA, 20 nt, Homo sapiens
  source 1..20: mol_type = genomic RNA
cttgacccaagcttttgata

SEQ ID NO: 20635 - RNA, 20 nt, Homo sapiens
  source 1..20: mol_type = genomic RNA
ttgacccaagcttttgatag

SEQ ID NO: 20636 - RNA, 20 nt, Homo sapiens
  source 1..20: mol_type = genomic RNA
tgacccaagcttttgatagc

SEQ ID NO: 20637 - RNA, 20 nt, Homo sapiens
  source 1..20: mol_type = genomic RNA
gacccaagcttttgatagca

SEQ ID NO: 20638 - RNA, 20 nt, Homo sapiens
  source 1..20: mol_type = genomic RNA
acccaagcttttgatagcaa

SEQ ID NO: 20639 - RNA, 20 nt, Homo sapiens
  source 1..20: mol_type = genomic RNA
cccaagcttttgatagcaaa

SEQ ID NO: 20640 - RNA, 20 nt, Homo sapiens
  source 1..20: mol_type = genomic RNA
ccaagcttttgatagcaaaa

SEQ ID NO: 20641 - RNA, 20 nt, Homo sapiens
  source 1..20: mol_type = genomic RNA
caagcttttgatagcaaaag

SEQ ID NO: 20642 - RNA, 20 nt, Homo sapiens
  source 1..20: mol_type = genomic RNA
aagcttttgatagcaaaagg

SEQ ID NO: 20643 - RNA, 20 nt, Homo sapiens
  source 1..20: mol_type = genomic RNA
agcttttgatagcaaaaggt

SEQ ID NO: 20644 - RNA, 20 nt, Homo sapiens
  source 1..20: mol_type = genomic RNA
gcttttgatagcaaaaggta

SEQ ID NO: 20645 - RNA, 20 nt, Homo sapiens
  source 1..20: mol_type = genomic RNA
cttttgatagcaaaaggtag

SEQ ID NO: 20646 - RNA, 20 nt, Homo sapiens
  source 1..20: mol_type = genomic RNA
ttttgatagcaaaaggtaga

SEQ ID NO: 20647 - RNA, 20 nt, Homo sapiens
  source 1..20: mol_type = genomic RNA
tttgatagcaaaaggtagaa

SEQ ID NO: 20648 - RNA, 20 nt, Homo sapiens
  source 1..20: mol_type = genomic RNA
ttgatagcaaaaggtagaaa

SEQ ID NO: 20649 - RNA, 20 nt, Homo sapiens
  source 1..20: mol_type = genomic RNA
tgatagcaaaaggtagaaaa

SEQ ID NO: 20650 - RNA, 20 nt, Homo sapiens
  source 1..20: mol_type = genomic RNA
gatagcaaaaggtagaaaag

SEQ ID NO: 20651 - RNA, 20 nt, Homo sapiens
  source 1..20: mol_type = genomic RNA
atagcaaaaggtagaaaaga

SEQ ID NO: 20652 - RNA, 20 nt, Homo sapiens
  source 1..20: mol_type = genomic RNA
tagcaaaaggtagaaaagac

SEQ ID NO: 20653 - RNA, 20 nt, Homo sapiens
  source 1..20: mol_type = genomic RNA
agcaaaaggtagaaaagaca

SEQ ID NO: 20654 - RNA, 20 nt, Homo sapiens
  source 1..20: mol_type = genomic RNA
gcaaaaggtagaaaagacag

SEQ ID NO: 20655 - RNA, 20 nt, Homo sapiens
  source 1..20: mol_type = genomic RNA
caaaaggtagaaaagacaga

SEQ ID NO: 20656 - RNA, 20 nt, Homo sapiens
  source 1..20: mol_type = genomic RNA
aaaaggtagaaaagacagat

SEQ ID NO: 20657 - RNA, 20 nt, Homo sapiens
  source 1..20: mol_type = genomic RNA
aaaggtagaaaagacagata

SEQ ID NO: 20658 - RNA, 20 nt, Homo sapiens
  source 1..20: mol_type = genomic RNA
tagtcatagctcagggtgtt

SEQ ID NO: 20659 - RNA, 20 nt, Homo sapiens
  source 1..20: mol_type = genomic RNA
agtcatagctcagggtgttt

SEQ ID NO: 20660 - RNA, 20 nt, Homo sapiens
  source 1..20: mol_type = genomic RNA
gtcatagctcagggtgtttg

SEQ ID NO: 20661 - RNA, 20 nt, Homo sapiens
  source 1..20: mol_type = genomic RNA
tcatagctcagggtgtttga

SEQ ID NO: 20662 - RNA, 20 nt, Homo sapiens
  source 1..20: mol_type = genomic RNA
catagctcagggtgtttgac

SEQ ID NO: 20663 - RNA, 20 nt, Homo sapiens
  source 1..20: mol_type = genomic RNA
atagctcagggtgtttgact

SEQ ID NO: 20664 - RNA, 20 nt, Homo sapiens
  source 1..20: mol_type = genomic RNA
tagctcagggtgtttgactt

SEQ ID NO: 20665 - RNA, 20 nt, Homo sapiens
  source 1..20: mol_type = genomic RNA
agctcagggtgtttgacttc

SEQ ID NO: 20666 - RNA, 20 nt, Homo sapiens
  source 1..20: mol_type = genomic RNA
gctcagggtgtttgacttct

SEQ ID NO: 20667 - RNA, 20 nt, Homo sapiens
  source 1..20: mol_type = genomic RNA
ctcagggtgtttgacttctt

SEQ ID NO: 20668 - RNA, 20 nt, Homo sapiens
  source 1..20: mol_type = genomic RNA
tcagggtgtttgacttcttc

SEQ ID NO: 20669 - RNA, 20 nt, Homo sapiens
  source 1..20: mol_type = genomic RNA
cagggtgtttgacttcttcc

SEQ ID NO: 20670 - RNA, 20 nt, Homo sapiens
  source 1..20: mol_type = genomic RNA
agggtgtttgacttcttcct

SEQ ID NO: 20671 - RNA, 20 nt, Homo sapiens
  source 1..20: mol_type = genomic RNA
gggtgtttgacttcttcctc

SEQ ID NO: 20672 - RNA, 20 nt, Homo sapiens
  source 1..20: mol_type = genomic RNA
ggtgtttgacttcttcctct

SEQ ID NO: 20673 - RNA, 20 nt, Homo sapiens
  source 1..20: mol_type = genomic RNA
ttgtttgcttttctgtgggg

SEQ ID NO: 20674 - RNA, 20 nt, Homo sapiens
  source 1..20: mol_type = genomic RNA
tgtttgcttttctgtggggt

SEQ ID NO: 20675 - RNA, 20 nt, Homo sapiens
  source 1..20: mol_type = genomic RNA
gtttgcttttctgtggggtt

SEQ ID NO: 20676 - RNA, 20 nt, Homo sapiens
  source 1..20: mol_type = genomic RNA
aaaaaattccctttcactgc

SEQ ID NO: 20677 - RNA, 20 nt, Homo sapiens
  source 1..20: mol_type = genomic RNA
aaaaattccctttcactgct

SEQ ID NO: 20678 - RNA, 20 nt, Homo sapiens
  source 1..20: mol_type = genomic RNA
cactgcttttttgtcacagc

SEQ ID NO: 20679 - RNA, 20 nt, Homo sapiens
  source 1..20: mol_type = genomic RNA
actgcttttttgtcacagca

SEQ ID NO: 20680 - RNA, 20 nt, Homo sapiens
  source 1..20: mol_type = genomic RNA
tgcttttttgtcacagcagc

SEQ ID NO: 20681 - RNA, 20 nt, Homo sapiens
  source 1..20: mol_type = genomic RNA
gcttttttgtcacagcagcc

SEQ ID NO: 20682 - RNA, 20 nt, Homo sapiens
  source 1..20: mol_type = genomic RNA
cttttttgtcacagcagcct

SEQ ID NO: 20683 - RNA, 20 nt, Homo sapiens
  source 1..20: mol_type = genomic RNA
ttttgtcacagcagcctttg

SEQ ID NO: 20684 - RNA, 20 nt, Homo sapiens
  source 1..20: mol_type = genomic RNA
tttgtcacagcagcctttgt

SEQ ID NO: 20685 - RNA, 20 nt, Homo sapiens
  source 1..20: mol_type = genomic RNA
ttgtcacagcagcctttgtc

SEQ ID NO: 20686 - RNA, 20 nt, Homo sapiens
  source 1..20: mol_type = genomic RNA
tgtcacagcagcctttgtcg

SEQ ID NO: 20687 - RNA, 20 nt, Homo sapiens
  source 1..20: mol_type = genomic RNA
gtcacagcagcctttgtcgc

SEQ ID NO: 20688 - RNA, 20 nt, Homo sapiens
  source 1..20: mol_type = genomic RNA
tcacagcagcctttgtcgct

SEQ ID NO: 20689 - RNA, 20 nt, Homo sapiens
  source 1..20: mol_type = genomic RNA
cacagcagcctttgtcgctt

SEQ ID NO: 20690 - RNA, 20 nt, Homo sapiens
  source 1..20: mol_type = genomic RNA
acagcagcctttgtcgcttc

SEQ ID NO: 20691 - RNA, 20 nt, Homo sapiens
  source 1..20: mol_type = genomic RNA
cagcagcctttgtcgcttca

SEQ ID NO: 20692 - RNA, 20 nt, Homo sapiens
  source 1..20: mol_type = genomic RNA
agcagcctttgtcgcttcaa

SEQ ID NO: 20693 - RNA, 20 nt, Homo sapiens
  source 1..20: mol_type = genomic RNA
gcagcctttgtcgcttcaaa

SEQ ID NO: 20694 - RNA, 20 nt, Homo sapiens
  source 1..20: mol_type = genomic RNA
cagcctttgtcgcttcaaac

SEQ ID NO: 20695 - RNA, 20 nt, Homo sapiens
  source 1..20: mol_type = genomic RNA
agcctttgtcgcttcaaaca

SEQ ID NO: 20696 - RNA, 20 nt, Homo sapiens
  source 1..20: mol_type = genomic RNA
gcctttgtcgcttcaaacac

SEQ ID NO: 20697 - RNA, 20 nt, Homo sapiens
  source 1..20: mol_type = genomic RNA
cctttgtcgcttcaaacacc

SEQ ID NO: 20698 - RNA, 20 nt, Homo sapiens
  source 1..20: mol_type = genomic RNA
ctttgtcgcttcaaacaccg

SEQ ID NO: 20699 - RNA, 20 nt, Homo sapiens
  source 1..20: mol_type = genomic RNA
tttgtcgcttcaaacaccgc

SEQ ID NO: 20700 - RNA, 20 nt, Homo sapiens
  source 1..20: mol_type = genomic RNA
ttgtcgcttcaaacaccgca

SEQ ID NO: 20701 - RNA, 20 nt, Homo sapiens
  source 1..20: mol_type = genomic RNA
tgtcgcttcaaacaccgcaa

SEQ ID NO: 20702 - RNA, 20 nt, Homo sapiens
  source 1..20: mol_type = genomic RNA
gtcgcttcaaacaccgcaag

SEQ ID NO: 20703 - RNA, 20 nt, Homo sapiens
  source 1..20: mol_type = genomic RNA
tcgcttcaaacaccgcaagt

SEQ ID NO: 20704 - RNA, 20 nt, Homo sapiens
  source 1..20: mol_type = genomic RNA
cgcttcaaacaccgcaagtg

SEQ ID NO: 20705 - RNA, 20 nt, Homo sapiens
  source 1..20: mol_type = genomic RNA
gcttcaaacaccgcaagtgt

SEQ ID NO: 20706 - RNA, 20 nt, Homo sapiens
  source 1..20: mol_type = genomic RNA
cttcaaacaccgcaagtgtt

SEQ ID NO: 20707 - RNA, 20 nt, Homo sapiens
  source 1..20: mol_type = genomic RNA
ttcaaacaccgcaagtgttc

SEQ ID NO: 20708 - RNA, 20 nt, Homo sapiens
  source 1..20: mol_type = genomic RNA
tcaaacaccgcaagtgttct

SEQ ID NO: 20709 - RNA, 20 nt, Homo sapiens
  source 1..20: mol_type = genomic RNA
caaacaccgcaagtgttctt

SEQ ID NO: 20710 - RNA, 20 nt, Homo sapiens
  source 1..20: mol_type = genomic RNA
aaacaccgcaagtgttcttt

SEQ ID NO: 20711 - RNA, 20 nt, Homo sapiens
  source 1..20: mol_type = genomic RNA
aacaccgcaagtgttctttt

SEQ ID NO: 20712 - RNA, 20 nt, Homo sapiens
  source 1..20: mol_type = genomic RNA
acaccgcaagtgttctttta

SEQ ID NO: 20713 - RNA, 20 nt, Homo sapiens
  source 1..20: mol_type = genomic RNA
tcaacctttcaagtgaaatg

SEQ ID NO: 20714 - RNA, 20 nt, Homo sapiens
  source 1..20: mol_type = genomic RNA
caacctttcaagtgaaatgc

SEQ ID NO: 20715 - RNA, 20 nt, Homo sapiens
  source 1..20: mol_type = genomic RNA
aacctttcaagtgaaatgca

SEQ ID NO: 20716 - RNA, 20 nt, Homo sapiens
  source 1..20: mol_type = genomic RNA
acctttcaagtgaaatgcaa

SEQ ID NO: 20717 - RNA, 20 nt, Homo sapiens
  source 1..20: mol_type = genomic RNA
cctttcaagtgaaatgcaac

SEQ ID NO: 20718 - RNA, 20 nt, Homo sapiens
  source 1..20: mol_type = genomic RNA
ctttcaagtgaaatgcaaca

SEQ ID NO: 20719 - RNA, 20 nt, Homo sapiens
  source 1..20: mol_type = genomic RNA
tttcaagtgaaatgcaacat

SEQ ID NO: 20720 - RNA, 20 nt, Homo sapiens
  source 1..20: mol_type = genomic RNA
ttcaagtgaaatgcaacatg

SEQ ID NO: 20721 - RNA, 20 nt, Homo sapiens
  source 1..20: mol_type = genomic RNA
tcaagtgaaatgcaacatgt

SEQ ID NO: 20722 - RNA, 20 nt, Homo sapiens
  source 1..20: mol_type = genomic RNA
caagtgaaatgcaacatgtc

SEQ ID NO: 20723 - RNA, 20 nt, Homo sapiens
  source 1..20: mol_type = genomic RNA
aagtgaaatgcaacatgtct

SEQ ID NO: 20724 - RNA, 20 nt, Homo sapiens
  source 1..20: mol_type = genomic RNA
agtgaaatgcaacatgtctg

SEQ ID NO: 20725 - RNA, 20 nt, Homo sapiens
  source 1..20: mol_type = genomic RNA
gtgaaatgcaacatgtctga

SEQ ID NO: 20726 - RNA, 20 nt, Homo sapiens
  source 1..20: mol_type = genomic RNA
tgaaatgcaacatgtctgaa

SEQ ID NO: 20727 - RNA, 20 nt, Homo sapiens
  source 1..20: mol_type = genomic RNA
gaaatgcaacatgtctgaaa

SEQ ID NO: 20728 - RNA, 20 nt, Homo sapiens
  source 1..20: mol_type = genomic RNA
aaatgcaacatgtctgaaac

SEQ ID NO: 20729 - RNA, 20 nt, Homo sapiens
  source 1..20: mol_type = genomic RNA
aatgcaacatgtctgaaacg

SEQ ID NO: 20730 - RNA, 20 nt, Homo sapiens
  source 1..20: mol_type = genomic RNA
atgcaacatgtctgaaacgt

SEQ ID NO: 20731 - RNA, 20 nt, Homo sapiens
  source 1..20: mol_type = genomic RNA
tgcaacatgtctgaaacgtg

SEQ ID NO: 20732 - RNA, 20 nt, Homo sapiens
  source 1..20: mol_type = genomic RNA
gcaacatgtctgaaacgtgg

SEQ ID NO: 20733 - RNA, 20 nt, Homo sapiens
  source 1..20: mol_type = genomic RNA
caacatgtctgaaacgtggt

SEQ ID NO: 20734 - RNA, 20 nt, Homo sapiens
  source 1..20: mol_type = genomic RNA
aacatgtctgaaacgtggta

SEQ ID NO: 20735 - RNA, 20 nt, Homo sapiens
  source 1..20: mol_type = genomic RNA
acatgtctgaaacgtggtat

SEQ ID NO: 20736 - RNA, 20 nt, Homo sapiens
  source 1..20: mol_type = genomic RNA
catgtctgaaacgtggtatc

SEQ ID NO: 20737 - RNA, 20 nt, Homo sapiens
  source 1..20: mol_type = genomic RNA
atgtctgaaacgtggtatct

SEQ ID NO: 20738 - RNA, 20 nt, Homo sapiens
  source 1..20: mol_type = genomic RNA
tgtctgaaacgtggtatctg

SEQ ID NO: 20739 - RNA, 20 nt, Homo sapiens
  source 1..20: mol_type = genomic RNA
gtctgaaacgtggtatctgg

SEQ ID NO: 20740 - RNA, 20 nt, Homo sapiens
  source 1..20: mol_type = genomic RNA
tctgaaacgtggtatctgga

SEQ ID NO: 20741 - RNA, 20 nt, Homo sapiens
  source 1..20: mol_type = genomic RNA
ctgaaacgtggtatctggag

SEQ ID NO: 20742 - RNA, 20 nt, Homo sapiens
  source 1..20: mol_type = genomic RNA
tgaaacgtggtatctggaga

SEQ ID NO: 20743 - RNA, 20 nt, Homo sapiens
  source 1..20: mol_type = genomic RNA
gaaacgtggtatctggagag

SEQ ID NO: 20744 - RNA, 20 nt, Homo sapiens
  source 1..20: mol_type = genomic RNA
aaacgtggtatctggagagg

SEQ ID NO: 20745 - RNA, 20 nt, Homo sapiens
  source 1..20: mol_type = genomic RNA
aacgtggtatctggagaggt

SEQ ID NO: 20746 - RNA, 20 nt, Homo sapiens
  source 1..20: mol_type = genomic RNA
acgtggtatctggagaggtg

SEQ ID NO: 20747 - RNA, 20 nt, Homo sapiens
  source 1..20: mol_type = genomic RNA
cgtggtatctggagaggtga

SEQ ID NO: 20748 - RNA, 20 nt, Homo sapiens
  source 1..20: mol_type = genomic RNA
gtggtatctggagaggtgag

SEQ ID NO: 20749 - RNA, 20 nt, Homo sapiens
  source 1..20: mol_type = genomic RNA
tggtatctggagaggtgaga

SEQ ID NO: 20750 - RNA, 20 nt, Homo sapiens
  source 1..20: mol_type = genomic RNA
ggtatctggagaggtgagat

SEQ ID NO: 20751 - RNA, 20 nt, Homo sapiens
  source 1..20: mol_type = genomic RNA
gtatctggagaggtgagatg

SEQ ID NO: 20752 - RNA, 20 nt, Homo sapiens
  source 1..20: mol_type = genomic RNA
tatctggagaggtgagatgg

SEQ ID NO: 20753 - RNA, 20 nt, Homo sapiens
  source 1..20: mol_type = genomic RNA
atctggagaggtgagatgga

SEQ ID NO: 20754 - RNA, 20 nt, Homo sapiens
  source 1..20: mol_type = genomic RNA
gagaggtgagatggacaaag

SEQ ID NO: 20755 - RNA, 20 nt, Homo sapiens
  source 1..20: mol_type = genomic RNA
agatggacaaaggagccctt

SEQ ID NO: 20756 - RNA, 20 nt, Homo sapiens
  source 1..20: mol_type = genomic RNA
gatggacaaaggagcccttg

SEQ ID NO: 20757 - RNA, 20 nt, Homo sapiens
  source 1..20: mol_type = genomic RNA
atggacaaaggagcccttgt

SEQ ID NO: 20758 - RNA, 20 nt, Homo sapiens
  source 1..20: mol_type = genomic RNA
tggacaaaggagcccttgtt

SEQ ID NO: 20759 - RNA, 20 nt, Homo sapiens
  source 1..20: mol_type = genomic RNA
ggacaaaggagcccttgtta

SEQ ID NO: 20760 - RNA, 20 nt, Homo sapiens
  source 1..20: mol_type = genomic RNA
gacaaaggagcccttgttac

SEQ ID NO: 20761 - RNA, 20 nt, Homo sapiens
  source 1..20: mol_type = genomic RNA
acaaaggagcccttgttact

SEQ ID NO: 20762 - RNA, 20 nt, Homo sapiens
  source 1..20: mol_type = genomic RNA
caaaggagcccttgttactg

SEQ ID NO: 20763 - RNA, 20 nt, Homo sapiens
  source 1..20: mol_type = genomic RNA
aaaggagcccttgttactgc

SEQ ID NO: 20764 - RNA, 20 nt, Homo sapiens
  source 1..20: mol_type = genomic RNA
aaggagcccttgttactgca

SEQ ID NO: 20765 - RNA, 20 nt, Homo sapiens
  source 1..20: mol_type = genomic RNA
aggagcccttgttactgcac

SEQ ID NO: 20766 - RNA, 20 nt, Homo sapiens
  source 1..20: mol_type = genomic RNA
ggagcccttgttactgcacg

SEQ ID NO: 20767 - RNA, 20 nt, Homo sapiens
  source 1..20: mol_type = genomic RNA
gagcccttgttactgcacgt

SEQ ID NO: 20768 - RNA, 20 nt, Homo sapiens
  source 1..20: mol_type = genomic RNA
agcccttgttactgcacgtt

SEQ ID NO: 20769 - RNA, 20 nt, Homo sapiens
  source 1..20: mol_type = genomic RNA
gcccttgttactgcacgttt

SEQ ID NO: 20770 - RNA, 20 nt, Homo sapiens
  source 1..20: mol_type = genomic RNA
actgcacgttttcattctcc

SEQ ID NO: 20771 - RNA, 20 nt, Homo sapiens
  source 1..20: mol_type = genomic RNA
ttcattctccaaacttcacc

SEQ ID NO: 20772 - RNA, 20 nt, Homo sapiens
  source 1..20: mol_type = genomic RNA
tcattctccaaacttcacct

SEQ ID NO: 20773 - RNA, 20 nt, Homo sapiens
  source 1..20: mol_type = genomic RNA
attctccaaacttcaccttg

SEQ ID NO: 20774 - RNA, 20 nt, Homo sapiens
  source 1..20: mol_type = genomic RNA
ttctccaaacttcaccttgc

SEQ ID NO: 20775 - RNA, 20 nt, Homo sapiens
  source 1..20: mol_type = genomic RNA
tctccaaacttcaccttgca

SEQ ID NO: 20776 - RNA, 20 nt, Homo sapiens
  source 1..20: mol_type = genomic RNA
ctccaaacttcaccttgcac

SEQ ID NO: 20777 - RNA, 20 nt, Homo sapiens
  source 1..20: mol_type = genomic RNA
tccaaacttcaccttgcaca

SEQ ID NO: 20778 - RNA, 20 nt, Homo sapiens
  source 1..20: mol_type = genomic RNA
ccaaacttcaccttgcacac

SEQ ID NO: 20779 - RNA, 20 nt, Homo sapiens
  source 1..20: mol_type = genomic RNA
caaacttcaccttgcacaca

SEQ ID NO: 20780 - RNA, 20 nt, Homo sapiens
  source 1..20: mol_type = genomic RNA
aaacttcaccttgcacacag

SEQ ID NO: 20781 - RNA, 20 nt, Homo sapiens
  source 1..20: mol_type = genomic RNA
aacttcaccttgcacacagt

SEQ ID NO: 20782 - RNA, 20 nt, Homo sapiens
  source 1..20: mol_type = genomic RNA
acttcaccttgcacacagta

SEQ ID NO: 20783 - RNA, 20 nt, Homo sapiens
  source 1..20: mol_type = genomic RNA
cttcaccttgcacacagtaa

SEQ ID NO: 20784 - RNA, 20 nt, Homo sapiens
  source 1..20: mol_type = genomic RNA
ttcaccttgcacacagtaac

SEQ ID NO: 20785 - RNA, 20 nt, Homo sapiens
  source 1..20: mol_type = genomic RNA
cagtaacagacaatgcacaa

SEQ ID NO: 20786 - RNA, 20 nt, Homo sapiens
  source 1..20: mol_type = genomic RNA
agtaacagacaatgcacaaa

SEQ ID NO: 20787 - RNA, 20 nt, Homo sapiens
  source 1..20: mol_type = genomic RNA
gtaacagacaatgcacaaat

SEQ ID NO: 20788 - RNA, 20 nt, Homo sapiens
  source 1..20: mol_type = genomic RNA
taacagacaatgcacaaatc

SEQ ID NO: 20789 - RNA, 20 nt, Homo sapiens
  source 1..20: mol_type = genomic RNA
aacagacaatgcacaaatcc

SEQ ID NO: 20790 - RNA, 20 nt, Homo sapiens
  source 1..20: mol_type = genomic RNA
acagacaatgcacaaatcca

SEQ ID NO: 20791 - RNA, 20 nt, Homo sapiens
  source 1..20: mol_type = genomic RNA
cagacaatgcacaaatccac

SEQ ID NO: 20792 - RNA, 20 nt, Homo sapiens
  source 1..20: mol_type = genomic RNA
agacaatgcacaaatccact

SEQ ID NO: 20793 - RNA, 20 nt, Homo sapiens
  source 1..20: mol_type = genomic RNA
gacaatgcacaaatccactt

SEQ ID NO: 20794 - RNA, 20 nt, Homo sapiens
  source 1..20: mol_type = genomic RNA
acaatgcacaaatccacttc

SEQ ID NO: 20795 - RNA, 20 nt, Homo sapiens
  source 1..20: mol_type = genomic RNA
caatgcacaaatccacttcc

SEQ ID NO: 20796 - RNA, 20 nt, Homo sapiens
  source 1..20: mol_type = genomic RNA
aatgcacaaatccacttcct

SEQ ID NO: 20797 - RNA, 20 nt, Homo sapiens
  source 1..20: mol_type = genomic RNA
atgcacaaatccacttcctt

SEQ ID NO: 20798 - RNA, 20 nt, Homo sapiens
  source 1..20: mol_type = genomic RNA
tgcacaaatccacttcctta

SEQ ID NO: 20799 - RNA, 20 nt, Homo sapiens
  source 1..20: mol_type = genomic RNA
gcacaaatccacttccttat

SEQ ID NO: 20800 - RNA, 20 nt, Homo sapiens
  source 1..20: mol_type = genomic RNA
cacaaatccacttccttatg

SEQ ID NO: 20801 - RNA, 20 nt, Homo sapiens
  source 1..20: mol_type = genomic RNA
acaaatccacttccttatgg

SEQ ID NO: 20802 - RNA, 20 nt, Homo sapiens
  source 1..20: mol_type = genomic RNA
caaatccacttccttatgga

SEQ ID NO: 20803 - RNA, 20 nt, Homo sapiens
  source 1..20: mol_type = genomic RNA
aaatccacttccttatggac

SEQ ID NO: 20804 - RNA, 20 nt, Homo sapiens
  source 1..20: mol_type = genomic RNA
aatccacttccttatggacg

SEQ ID NO: 20805 - RNA, 20 nt, Homo sapiens
  source 1..20: mol_type = genomic RNA
atccacttccttatggacgg

SEQ ID NO: 20806 - RNA, 20 nt, Homo sapiens
  source 1..20: mol_type = genomic RNA
tccacttccttatggacgga

SEQ ID NO: 20807 - RNA, 20 nt, Homo sapiens
  source 1..20: mol_type = genomic RNA
ccacttccttatggacggaa

SEQ ID NO: 20808 - RNA, 20 nt, Homo sapiens
  source 1..20: mol_type = genomic RNA
cacttccttatggacggaaa

SEQ ID NO: 20809 - RNA, 20 nt, Homo sapiens
  source 1..20: mol_type = genomic RNA
acttccttatggacggaaat

SEQ ID NO: 20810 - RNA, 20 nt, Homo sapiens
  source 1..20: mol_type = genomic RNA
cttccttatggacggaaatt

SEQ ID NO: 20811 - RNA, 20 nt, Homo sapiens
  source 1..20: mol_type = genomic RNA
ttccttatggacggaaattc

SEQ ID NO: 20812 - RNA, 20 nt, Homo sapiens
  source 1..20: mol_type = genomic RNA
tccttatggacggaaattct

SEQ ID NO: 20813 - RNA, 20 nt, Homo sapiens
  source 1..20: mol_type = genomic RNA
ccttatggacggaaattctg

SEQ ID NO: 20814 - RNA, 20 nt, Homo sapiens
  source 1..20: mol_type = genomic RNA
cttatggacggaaattctga

SEQ ID NO: 20815 - RNA, 20 nt, Homo sapiens
  source 1..20: mol_type = genomic RNA
ttatggacggaaattctgaa

SEQ ID NO: 20816 - RNA, 20 nt, Homo sapiens
  source 1..20: mol_type = genomic RNA
tatggacggaaattctgaaa

SEQ ID NO: 20817 - RNA, 20 nt, Homo sapiens
  source 1..20: mol_type = genomic RNA
atggacggaaattctgaaat

SEQ ID NO: 20818 - RNA, 20 nt, Homo sapiens
  source 1..20: mol_type = genomic RNA
tggacggaaattctgaaatc

SEQ ID NO: 20819 - RNA, 20 nt, Homo sapiens
  source 1..20: mol_type = genomic RNA
ggacggaaattctgaaatcc

SEQ ID NO: 20820 - RNA, 20 nt, Homo sapiens
  source 1..20: mol_type = genomic RNA
gacggaaattctgaaatcct

SEQ ID NO: 20821 - RNA, 20 nt, Homo sapiens
  source 1..20: mol_type = genomic RNA
acggaaattctgaaatcctt

SEQ ID NO: 20822 - RNA, 20 nt, Homo sapiens
  source 1..20: mol_type = genomic RNA
ctgaaatccttttatgcctg

SEQ ID NO: 20823 - RNA, 20 nt, Homo sapiens
  source 1..20: mol_type = genomic RNA
tgaaatccttttatgcctgg

SEQ ID NO: 20824 - RNA, 20 nt, Homo sapiens
  source 1..20: mol_type = genomic RNA
gaaatccttttatgcctggc

SEQ ID NO: 20825 - RNA, 20 nt, Homo sapiens
  source 1..20: mol_type = genomic RNA
aaatccttttatgcctggcc

SEQ ID NO: 20826 - RNA, 20 nt, Homo sapiens
  source 1..20: mol_type = genomic RNA
aatccttttatgcctggcct

SEQ ID NO: 20827 - RNA, 20 nt, Homo sapiens
  source 1..20: mol_type = genomic RNA
atccttttatgcctggcctt

SEQ ID NO: 20828 - RNA, 20 nt, Homo sapiens
  source 1..20: mol_type = genomic RNA
tccttttatgcctggccttt

SEQ ID NO: 20829 - RNA, 20 nt, Homo sapiens
  source 1..20: mol_type = genomic RNA
ccttttatgcctggcctttc

SEQ ID NO: 20830 - RNA, 20 nt, Homo sapiens
  source 1..20: mol_type = genomic RNA
cttttatgcctggcctttcc

SEQ ID NO: 20831 - RNA, 20 nt, Homo sapiens
  source 1..20: mol_type = genomic RNA
ttttatgcctggcctttcca

SEQ ID NO: 20832 - RNA, 20 nt, Homo sapiens
  source 1..20: mol_type = genomic RNA
tttatgcctggcctttccat

SEQ ID NO: 20833 - RNA, 20 nt, Homo sapiens
  source 1..20: mol_type = genomic RNA
ttatgcctggcctttccatc

SEQ ID NO: 20834 - RNA, 20 nt, Homo sapiens
  source 1..20: mol_type = genomic RNA
tatgcctggcctttccatcc

SEQ ID NO: 20835 - RNA, 20 nt, Homo sapiens
  source 1..20: mol_type = genomic RNA
atgcctggcctttccatcct

SEQ ID NO: 20836 - RNA, 20 nt, Homo sapiens
  source 1..20: mol_type = genomic RNA
tgcctggcctttccatcctt

SEQ ID NO: 20837 - RNA, 20 nt, Homo sapiens
  source 1..20: mol_type = genomic RNA
gcctggcctttccatccttc

SEQ ID NO: 20838 - RNA, 20 nt, Homo sapiens
  source 1..20: mol_type = genomic RNA
cctggcctttccatccttca

SEQ ID NO: 20839 - RNA, 20 nt, Homo sapiens
  source 1..20: mol_type = genomic RNA
ctggcctttccatccttcaa

SEQ ID NO: 20840 - RNA, 20 nt, Homo sapiens
  source 1..20: mol_type = genomic RNA
tggcctttccatccttcaac

SEQ ID NO: 20841 - RNA, 20 nt, Homo sapiens
  source 1..20: mol_type = genomic RNA
ggcctttccatccttcaact

SEQ ID NO: 20842 - RNA, 20 nt, Homo sapiens
  source 1..20: mol_type = genomic RNA
gcctttccatccttcaactt

SEQ ID NO: 20843 - RNA, 20 nt, Homo sapiens
  source 1..20: mol_type = genomic RNA
tttccatccttcaacttccc

SEQ ID NO: 20844 - RNA, 20 nt, Homo sapiens
  source 1..20: mol_type = genomic RNA
ttccatccttcaacttcccc

SEQ ID NO: 20845 - RNA, 20 nt, Homo sapiens
  source 1..20: mol_type = genomic RNA
tccatccttcaacttcccct

SEQ ID NO: 20846 - RNA, 20 nt, Homo sapiens
  source 1..20: mol_type = genomic RNA
ccatccttcaacttcccctt

SEQ ID NO: 20847 - RNA, 20 nt, Homo sapiens
  source 1..20: mol_type = genomic RNA
atccttcaacttcccctttc

SEQ ID NO: 20848 - RNA, 20 nt, Homo sapiens
  source 1..20: mol_type = genomic RNA
tccttcaacttcccctttcc

SEQ ID NO: 20849 - RNA, 20 nt, Homo sapiens
  source 1..20: mol_type = genomic RNA
ccttcaacttcccctttccc

SEQ ID NO: 20850 - RNA, 20 nt, Homo sapiens
  source 1..20: mol_type = genomic RNA
cttcaacttcccctttccca

SEQ ID NO: 20851 - RNA, 20 nt, Homo sapiens
  source 1..20: mol_type = genomic RNA
ttcaacttcccctttcccat

SEQ ID NO: 20852 - RNA, 20 nt, Homo sapiens
  source 1..20: mol_type = genomic RNA
tcaacttcccctttcccatg

SEQ ID NO: 20853 - RNA, 20 nt, Homo sapiens
  source 1..20: mol_type = genomic RNA
caacttcccctttcccatgc

SEQ ID NO: 20854 - RNA, 20 nt, Homo sapiens
  source 1..20: mol_type = genomic RNA
aacttcccctttcccatgct

SEQ ID NO: 20855 - RNA, 20 nt, Homo sapiens
  source 1..20: mol_type = genomic RNA
acttcccctttcccatgctg

SEQ ID NO: 20856 - RNA, 20 nt, Homo sapiens
  source 1..20: mol_type = genomic RNA
cttcccctttcccatgctgt

SEQ ID NO: 20857 - RNA, 20 nt, Homo sapiens
  source 1..20: mol_type = genomic RNA
ttcccctttcccatgctgtg

SEQ ID NO: 20858 - RNA, 20 nt, Homo sapiens
  source 1..20: mol_type = genomic RNA
tcccctttcccatgctgtga

SEQ ID NO: 20859 - RNA, 20 nt, Homo sapiens
  source 1..20: mol_type = genomic RNA
cccctttcccatgctgtgaa

SEQ ID NO: 20860 - RNA, 20 nt, Homo sapiens
  source 1..20: mol_type = genomic RNA
ccctttcccatgctgtgaat

SEQ ID NO: 20861 - RNA, 20 nt, Homo sapiens
  source 1..20: mol_type = genomic RNA
cctttcccatgctgtgaatg

SEQ ID NO: 20862 - RNA, 20 nt, Homo sapiens
  source 1..20: mol_type = genomic RNA
ctttcccatgctgtgaatga

SEQ ID NO: 20863 - RNA, 20 nt, Homo sapiens
  source 1..20: mol_type = genomic RNA
tttcccatgctgtgaatgat

SEQ ID NO: 20864 - RNA, 20 nt, Homo sapiens
  source 1..20: mol_type = genomic RNA
ttcccatgctgtgaatgatt

SEQ ID NO: 20865 - RNA, 20 nt, Homo sapiens
  source 1..20: mol_type = genomic RNA
tcccatgctgtgaatgattg

SEQ ID NO: 20866 - RNA, 20 nt, Homo sapiens
  source 1..20: mol_type = genomic RNA
cccatgctgtgaatgattgt

SEQ ID NO: 20867 - RNA, 20 nt, Homo sapiens
  source 1..20: mol_type = genomic RNA
ccatgctgtgaatgattgta

SEQ ID NO: 20868 - RNA, 20 nt, Homo sapiens
  source 1..20: mol_type = genomic RNA
catgctgtgaatgattgtat

SEQ ID NO: 20869 - RNA, 20 nt, Homo sapiens
  source 1..20: mol_type = genomic RNA
tgctgtgaatgattgtattg

SEQ ID NO: 20870 - RNA, 20 nt, Homo sapiens
  source 1..20: mol_type = genomic RNA
gctgtgaatgattgtattgg

SEQ ID NO: 20871 - RNA, 20 nt, Homo sapiens
  source 1..20: mol_type = genomic RNA
ctgtgaatgattgtattgga

SEQ ID NO: 20872 - RNA, 20 nt, Homo sapiens
  source 1..20: mol_type = genomic RNA
tgtgaatgattgtattggac

SEQ ID NO: 20873 - RNA, 20 nt, Homo sapiens
  source 1..20: mol_type = genomic RNA
gtgaatgattgtattggaca

SEQ ID NO: 20874 - RNA, 20 nt, Homo sapiens
  source 1..20: mol_type = genomic RNA
tgaatgattgtattggacat

SEQ ID NO: 20875 - RNA, 20 nt, Homo sapiens
  source 1..20: mol_type = genomic RNA
gttttaatctcagtgacagg

SEQ ID NO: 20876 - RNA, 20 nt, Homo sapiens
  source 1..20: mol_type = genomic RNA
ttttaatctcagtgacaggg

SEQ ID NO: 20877 - RNA, 20 nt, Homo sapiens
  source 1..20: mol_type = genomic RNA
tttaatctcagtgacagggg

SEQ ID NO: 20878 - RNA, 20 nt, Homo sapiens
  source 1..20: mol_type = genomic RNA
ttaatctcagtgacagggga

SEQ ID NO: 20879 - RNA, 20 nt, Homo sapiens
  source 1..20: mol_type = genomic RNA
taatctcagtgacaggggaa

SEQ ID NO: 20880 - RNA, 20 nt, Homo sapiens
  source 1..20: mol_type = genomic RNA
aatctcagtgacaggggaac

SEQ ID NO: 20881 - RNA, 20 nt, Homo sapiens
  source 1..20: mol_type = genomic RNA
atctcagtgacaggggaaca

SEQ ID NO: 20882 - RNA, 20 nt, Homo sapiens
  source 1..20: mol_type = genomic RNA
gggaacacaggtagctctaa

SEQ ID NO: 20883 - RNA, 20 nt, Homo sapiens
  source 1..20: mol_type = genomic RNA
ggaacacaggtagctctaat

SEQ ID NO: 20884 - RNA, 20 nt, Homo sapiens
  source 1..20: mol_type = genomic RNA
gaacacaggtagctctaata

SEQ ID NO: 20885 - RNA, 20 nt, Homo sapiens
  source 1..20: mol_type = genomic RNA
aacacaggtagctctaatat

SEQ ID NO: 20886 - RNA, 20 nt, Homo sapiens
  source 1..20: mol_type = genomic RNA
acacaggtagctctaatata

SEQ ID NO: 20887 - RNA, 20 nt, Homo sapiens
  source 1..20: mol_type = genomic RNA
cacaggtagctctaatatag

SEQ ID NO: 20888 - RNA, 20 nt, Homo sapiens
  source 1..20: mol_type = genomic RNA
acaggtagctctaatatagc

SEQ ID NO: 20889 - RNA, 20 nt, Homo sapiens
  source 1..20: mol_type = genomic RNA
caggtagctctaatatagct

SEQ ID NO: 20890 - RNA, 20 nt, Homo sapiens
  source 1..20: mol_type = genomic RNA
aggtagctctaatatagctg

SEQ ID NO: 20891 - RNA, 20 nt, Homo sapiens
  source 1..20: mol_type = genomic RNA
ggtagctctaatatagctgt

SEQ ID NO: 20892 - RNA, 20 nt, Homo sapiens
  source 1..20: mol_type = genomic RNA
gtagctctaatatagctgtg

SEQ ID NO: 20893 - RNA, 20 nt, Homo sapiens
  source 1..20: mol_type = genomic RNA
tagctctaatatagctgtga

SEQ ID NO: 20894 - RNA, 20 nt, Homo sapiens
  source 1..20: mol_type = genomic RNA
agctctaatatagctgtgac

SEQ ID NO: 20895 - RNA, 20 nt, Homo sapiens
  source 1..20: mol_type = genomic RNA
gctctaatatagctgtgact

SEQ ID NO: 20896 - RNA, 20 nt, Homo sapiens
  source 1..20: mol_type = genomic RNA
ctctaatatagctgtgactg

SEQ ID NO: 20897 - RNA, 20 nt, Homo sapiens
  source 1..20: mol_type = genomic RNA
tctaatatagctgtgactga

SEQ ID NO: 20898 - RNA, 20 nt, Homo sapiens
  source 1..20: mol_type = genomic RNA
ctaatatagctgtgactgag

SEQ ID NO: 20899 - RNA, 20 nt, Homo sapiens
  source 1..20: mol_type = genomic RNA
taatatagctgtgactgaga

SEQ ID NO: 20900 - RNA, 20 nt, Homo sapiens
  source 1..20: mol_type = genomic RNA
aatatagctgtgactgagat

SEQ ID NO: 20901 - RNA, 20 nt, Homo sapiens
  source 1..20: mol_type = genomic RNA
atatagctgtgactgagatg

SEQ ID NO: 20902 - RNA, 20 nt, Homo sapiens
  source 1..20: mol_type = genomic RNA
tctttccactgcattctagg

SEQ ID NO: 20903 - RNA, 20 nt, Homo sapiens
  source 1..20: mol_type = genomic RNA
ctttccactgcattctagga

SEQ ID NO: 20904 - RNA, 20 nt, Homo sapiens
  source 1..20: mol_type = genomic RNA
tttccactgcattctaggaa

SEQ ID NO: 20905 - RNA, 20 nt, Homo sapiens
  source 1..20: mol_type = genomic RNA
ttccactgcattctaggaac

SEQ ID NO: 20906 - RNA, 20 nt, Homo sapiens
  source 1..20: mol_type = genomic RNA
tccactgcattctaggaaca

SEQ ID NO: 20907 - RNA, 20 nt, Homo sapiens
  source 1..20: mol_type = genomic RNA
ccactgcattctaggaacag

SEQ ID NO: 20908 - RNA, 20 nt, Homo sapiens
  source 1..20: mol_type = genomic RNA
cactgcattctaggaacagt

SEQ ID NO: 20909 - RNA, 20 nt, Homo sapiens
  source 1..20: mol_type = genomic RNA
actgcattctaggaacagta

SEQ ID NO: 20910 - RNA, 20 nt, Homo sapiens
  source 1..20: mol_type = genomic RNA
ctgcattctaggaacagtaa

SEQ ID NO: 20911 - RNA, 20 nt, Homo sapiens
  source 1..20: mol_type = genomic RNA
tgcattctaggaacagtaag

SEQ ID NO: 20912 - RNA, 20 nt, Homo sapiens
  source 1..20: mol_type = genomic RNA
gcattctaggaacagtaaga

SEQ ID NO: 20913 - RNA, 20 nt, Homo sapiens
  source 1..20: mol_type = genomic RNA
cattctaggaacagtaagag

SEQ ID NO: 20914 - RNA, 20 nt, Homo sapiens
  source 1..20: mol_type = genomic RNA
attctaggaacagtaagagg

SEQ ID NO: 20915 - RNA, 20 nt, Homo sapiens
  source 1..20: mol_type = genomic RNA
ttctaggaacagtaagagga

SEQ ID NO: 20916 - RNA, 20 nt, Homo sapiens
  source 1..20: mol_type = genomic RNA
tctaggaacagtaagaggac

SEQ ID NO: 20917 - RNA, 20 nt, Homo sapiens
  source 1..20: mol_type = genomic RNA
ctaggaacagtaagaggacc

SEQ ID NO: 20918 - RNA, 20 nt, Homo sapiens
  source 1..20: mol_type = genomic RNA
taggaacagtaagaggacct

SEQ ID NO: 20919 - RNA, 20 nt, Homo sapiens
  source 1..20: mol_type = genomic RNA
aggaacagtaagaggacctt

SEQ ID NO: 20920 - RNA, 20 nt, Homo sapiens
  source 1..20: mol_type = genomic RNA
ggaacagtaagaggaccttg

SEQ ID NO: 20921 - RNA, 20 nt, Homo sapiens
  source 1..20: mol_type = genomic RNA
gaacagtaagaggaccttgt

SEQ ID NO: 20922 - RNA, 20 nt, Homo sapiens
  source 1..20: mol_type = genomic RNA
aacagtaagaggaccttgtg

SEQ ID NO: 20923 - RNA, 20 nt, Homo sapiens
  source 1..20: mol_type = genomic RNA
acagtaagaggaccttgtga

SEQ ID NO: 20924 - RNA, 20 nt, Homo sapiens
  source 1..20: mol_type = genomic RNA
cagtaagaggaccttgtgag

SEQ ID NO: 20925 - RNA, 20 nt, Homo sapiens
  source 1..20: mol_type = genomic RNA
agtaagaggaccttgtgagt

SEQ ID NO: 20926 - RNA, 20 nt, Homo sapiens
  source 1..20: mol_type = genomic RNA
gtaagaggaccttgtgagtg

SEQ ID NO: 20927 - RNA, 20 nt, Homo sapiens
  source 1..20: mol_type = genomic RNA
taagaggaccttgtgagtga

SEQ ID NO: 20928 - RNA, 20 nt, Homo sapiens
  source 1..20: mol_type = genomic RNA
aagaggaccttgtgagtgaa

SEQ ID NO: 20929 - RNA, 20 nt, Homo sapiens
  source 1..20: mol_type = genomic RNA
agaggaccttgtgagtgaat

SEQ ID NO: 20930 - RNA, 20 nt, Homo sapiens
  source 1..20: mol_type = genomic RNA
gaggaccttgtgagtgaata

SEQ ID NO: 20931 - RNA, 20 nt, Homo sapiens
  source 1..20: mol_type = genomic RNA
aggaccttgtgagtgaataa

SEQ ID NO: 20932 - RNA, 20 nt, Homo sapiens
  source 1..20: mol_type = genomic RNA
ggaccttgtgagtgaataat

SEQ ID NO: 20933 - RNA, 20 nt, Homo sapiens
  source 1..20: mol_type = genomic RNA
gaccttgtgagtgaataatt

SEQ ID NO: 20934 - RNA, 20 nt, Homo sapiens
  source 1..20: mol_type = genomic RNA
tgtttccacattacagagtg

SEQ ID NO: 20935 - RNA, 20 nt, Homo sapiens
  source 1..20: mol_type = genomic RNA
gtttccacattacagagtgg

SEQ ID NO: 20936 - RNA, 20 nt, Homo sapiens
  source 1..20: mol_type = genomic RNA
tttccacattacagagtggg

SEQ ID NO: 20937 - RNA, 20 nt, Homo sapiens
  source 1..20: mol_type = genomic RNA
ttccacattacagagtgggt

SEQ ID NO: 20938 - RNA, 20 nt, Homo sapiens
  source 1..20: mol_type = genomic RNA
tccacattacagagtgggta

SEQ ID NO: 20939 - RNA, 20 nt, Homo sapiens
  source 1..20: mol_type = genomic RNA
ccacattacagagtgggtaa

SEQ ID NO: 20940 - RNA, 20 nt, Homo sapiens
  source 1..20: mol_type = genomic RNA
cacattacagagtgggtaat

SEQ ID NO: 20941 - RNA, 20 nt, Homo sapiens
  source 1..20: mol_type = genomic RNA
acattacagagtgggtaata

SEQ ID NO: 20942 - RNA, 20 nt, Homo sapiens
  source 1..20: mol_type = genomic RNA
cattacagagtgggtaataa

SEQ ID NO: 20943 - RNA, 20 nt, Homo sapiens
  source 1..20: mol_type = genomic RNA
attacagagtgggtaataag

SEQ ID NO: 20944 - RNA, 20 nt, Homo sapiens
  source 1..20: mol_type = genomic RNA
ttacagagtgggtaataagc

SEQ ID NO: 20945 - RNA, 20 nt, Homo sapiens
  source 1..20: mol_type = genomic RNA
tacagagtgggtaataagca

SEQ ID NO: 20946 - RNA, 20 nt, Homo sapiens
  source 1..20: mol_type = genomic RNA
acagagtgggtaataagcag

SEQ ID NO: 20947 - RNA, 20 nt, Homo sapiens
  source 1..20: mol_type = genomic RNA
cagagtgggtaataagcaga

SEQ ID NO: 20948 - RNA, 20 nt, Homo sapiens
  source 1..20: mol_type = genomic RNA
agagtgggtaataagcagat

SEQ ID NO: 20949 - RNA, 20 nt, Homo sapiens
  source 1..20: mol_type = genomic RNA
gagtgggtaataagcagatt

SEQ ID NO: 20950 - RNA, 20 nt, Homo sapiens
  source 1..20: mol_type = genomic RNA
agtgggtaataagcagatta

SEQ ID NO: 20951 - RNA, 20 nt, Homo sapiens
  source 1..20: mol_type = genomic RNA
gtgggtaataagcagattag

SEQ ID NO: 20952 - RNA, 20 nt, Homo sapiens
  source 1..20: mol_type = genomic RNA
tgggtaataagcagattagt

SEQ ID NO: 20953 - RNA, 20 nt, Homo sapiens
  source 1..20: mol_type = genomic RNA
gggtaataagcagattagta

SEQ ID NO: 20954 - RNA, 20 nt, Homo sapiens
  source 1..20: mol_type = genomic RNA
ggtaataagcagattagtaa

SEQ ID NO: 20955 - RNA, 20 nt, Homo sapiens
  source 1..20: mol_type = genomic RNA
ataagcagattagtaaaaac

SEQ ID NO: 20956 - RNA, 20 nt, Homo sapiens
  source 1..20: mol_type = genomic RNA
taagcagattagtaaaaaca

SEQ ID NO: 20957 - RNA, 20 nt, Homo sapiens
  source 1..20: mol_type = genomic RNA
aagcagattagtaaaaacaa

SEQ ID NO: 20958 - RNA, 20 nt, Homo sapiens
  source 1..20: mol_type = genomic RNA
agcagattagtaaaaacaat

SEQ ID NO: 20959 - RNA, 20 nt, Homo sapiens
  source 1..20: mol_type = genomic RNA
taaaaacaattctgcttcac

SEQ ID NO: 20960 - RNA, 20 nt, Homo sapiens
  source 1..20: mol_type = genomic RNA
aaaaacaattctgcttcact

SEQ ID NO: 20961 - RNA, 20 nt, Homo sapiens
  source 1..20: mol_type = genomic RNA
aaacaattctgcttcacttc

SEQ ID NO: 20962 - DNA, 15 bp, synthetic construct
  source 1..15: mol_type = other DNA
gcgggcagagagagg

SEQ ID NO: 20963 - DNA, 15 bp, synthetic construct
  source 1..15: mol_type = other DNA
cgcgggcagagagag

SEQ ID NO: 20964 - DNA, 15 bp, synthetic construct
  source 1..15: mol_type = other DNA
acgcgggcagagaga

SEQ ID NO: 20965 - DNA, 15 bp, synthetic construct
  source 1..15: mol_type = other DNA
gacgcgggcagagag

SEQ ID NO: 20966 - DNA, 15 bp, synthetic construct
  source 1..15: mol_type = other DNA
ggacgcgggcagaga

SEQ ID NO: 20967 - DNA, 15 bp, synthetic construct
  source 1..15: mol_type = other DNA
cggacgcgggcagag

SEQ ID NO: 20968 - DNA, 15 bp, synthetic construct
  source 1..15: mol_type = other DNA
acggacgcgggcaga

SEQ ID NO: 20969 - DNA, 15 bp, synthetic construct
  source 1..15: mol_type = other DNA
gacggacgcgggcag

SEQ ID NO: 20970 - DNA, 15 bp, synthetic construct
  source 1..15: mol_type = other DNA
ggacggacgcgggca

SEQ ID NO: 20971 - DNA, 15 bp, synthetic construct
  source 1..15: mol_type = other DNA
cggacggacgcgggc

SEQ ID NO: 20972 - DNA, 15 bp, synthetic construct
  source 1..15: mol_type = other DNA
acggacggacgcggg

SEQ ID NO: 20973 - DNA, 15 bp, synthetic construct
  source 1..15: mol_type = other DNA
cacggacggacgcgg

SEQ ID NO: 20974 - DNA, 15 bp, synthetic construct
  source 1..15: mol_type = other DNA
tcacggacggacgcg

SEQ ID NO: 20975 - DNA, 15 bp, synthetic construct
  source 1..15: mol_type = other DNA
ttcacggacggacgc

SEQ ID NO: 20976 - DNA, 15 bp, synthetic construct
  source 1..15: mol_type = other DNA
tttcacggacggacg

SEQ ID NO: 20977 - DNA, 15 bp, synthetic construct
  source 1..15: mol_type = other DNA
ccggaatttcacgga

SEQ ID NO: 20978 - DNA, 15 bp, synthetic construct
  source 1..15: mol_type = other DNA
gccggaatttcacgg

SEQ ID NO: 20979 - DNA, 15 bp, synthetic construct
  source 1..15: mol_type = other DNA
ggccggaatttcacg

SEQ ID NO: 20980 - DNA, 15 bp, synthetic construct
  source 1..15: mol_type = other DNA
cggccggaatttcac

SEQ ID NO: 20981 - DNA, 15 bp, synthetic construct
  source 1..15: mol_type = other DNA
ccggccggaatttca

SEQ ID NO: 20982 - DNA, 15 bp, synthetic construct
  source 1..15: mol_type = other DNA
cccggccggaatttc

SEQ ID NO: 20983 - DNA, 15 bp, synthetic construct
  source 1..15: mol_type = other DNA
ccccggccggaattt

SEQ ID NO: 20984 - DNA, 15 bp, synthetic construct
  source 1..15: mol_type = other DNA
gccccggccggaatt

SEQ ID NO: 20985 - DNA, 15 bp, synthetic construct
  source 1..15: mol_type = other DNA
agccccggccggaat

SEQ ID NO: 20986 - DNA, 15 bp, synthetic construct
  source 1..15: mol_type = other DNA
gagccccggccggaa

SEQ ID NO: 20987 - DNA, 15 bp, synthetic construct
  source 1..15: mol_type = other DNA
cgcggtgagccccgg

SEQ ID NO: 20988 - DNA, 15 bp, synthetic construct
  source 1..15: mol_type = other DNA
tcgcggtgagccccg

SEQ ID NO: 20989 - DNA, 15 bp, synthetic construct
  source 1..15: mol_type = other DNA
atcgcggtgagcccc

SEQ ID NO: 20990 - DNA, 15 bp, synthetic construct
  source 1..15: mol_type = other DNA
catcgcggtgagccc

SEQ ID NO: 20991 - DNA, 15 bp, synthetic construct
  source 1..15: mol_type = other DNA
ccatcgcggtgagcc

SEQ ID NO: 20992 - DNA, 15 bp, synthetic construct
  source 1..15: mol_type = other DNA
gccatcgcggtgagc

SEQ ID NO: 20993 - DNA, 15 bp, synthetic construct
  source 1..15: mol_type = other DNA
ggccatcgcggtgag

SEQ ID NO: 20994 - DNA, 15 bp, synthetic construct
  source 1..15: mol_type = other DNA
gggccatcgcggtga

SEQ ID NO: 20995 - DNA, 15 bp, synthetic construct
  source 1..15: mol_type = other DNA
agggccatcgcggtg

SEQ ID NO: 20996 - DNA, 15 bp, synthetic construct
  source 1..15: mol_type = other DNA
gagggccatcgcggt

SEQ ID NO: 20997 - DNA, 15 bp, synthetic construct
  source 1..15: mol_type = other DNA
ggagggccatcgcgg

SEQ ID NO: 20998 - DNA, 15 bp, synthetic construct
  source 1..15: mol_type = other DNA
gggagggccatcgcg

SEQ ID NO: 20999 - DNA, 15 bp, synthetic construct
  source 1..15: mol_type = other DNA
cgggagggccatcgc

SEQ ID NO: 21000 - DNA, 15 bp, synthetic construct
  source 1..15: mol_type = other DNA
tcgggagggccatcg

SEQ ID NO: 21001 - DNA, 15 bp, synthetic construct
  source 1..15: mol_type = other DNA
gtcgggagggccatc

SEQ ID NO: 21002 - DNA, 15 bp, synthetic construct
  source 1..15: mol_type = other DNA
tgtcgggagggccat

SEQ ID NO: 21003 - DNA, 15 bp, synthetic construct
  source 1..15: mol_type = other DNA
gtgtcgggagggcca

SEQ ID NO: 21004 - DNA, 15 bp, synthetic construct
  source 1..15: mol_type = other DNA
gggtgtcgggagggc

SEQ ID NO: 21005 - DNA, 15 bp, synthetic construct
  source 1..15: mol_type = other DNA
agggtgtcgggaggg

SEQ ID NO: 21006 - DNA, 15 bp, synthetic construct
  source 1..15: mol_type = other DNA
gagggtgtcgggagg

SEQ ID NO: 21007 - DNA, 15 bp, synthetic construct
  source 1..15: mol_type = other DNA
cgagggtgtcgggag

SEQ ID NO: 21008 - DNA, 15 bp, synthetic construct
  source 1..15: mol_type = other DNA
ccgagggtgtcggga

SEQ ID NO: 21009 - DNA, 15 bp, synthetic construct
  source 1..15: mol_type = other DNA
tccgagggtgtcggg

SEQ ID NO: 21010 - DNA, 15 bp, synthetic construct
  source 1..15: mol_type = other DNA
gtccgagggtgtcgg

SEQ ID NO: 21011 - DNA, 15 bp, synthetic construct
  source 1..15: mol_type = other DNA
tgtccgagggtgtcg

SEQ ID NO: 21012 - DNA, 15 bp, synthetic construct
  source 1..15: mol_type = other DNA
ctgtccgagggtgtc

SEQ ID NO: 21013 - DNA, 15 bp, synthetic construct
  source 1..15: mol_type = other DNA
gctgtccgagggtgt

SEQ ID NO: 21014 - DNA, 15 bp, synthetic construct
  source 1..15: mol_type = other DNA
tgctgtccgagggtg

SEQ ID NO: 21015 - DNA, 15 bp, synthetic construct
  source 1..15: mol_type = other DNA
gtgctgtccgagggt

SEQ ID NO: 21016 - DNA, 15 bp, synthetic construct
  source 1..15: mol_type = other DNA
ggtgctgtccgaggg

SEQ ID NO: 21017 - DNA, 15 bp, synthetic construct
  source 1..15: mol_type = other DNA
gggtgctgtccgagg

SEQ ID NO: 21018 - DNA, 15 bp, synthetic construct
  source 1..15: mol_type = other DNA
agggtgctgtccgag

SEQ ID NO: 21019 - DNA, 15 bp, synthetic construct
  source 1..15: mol_type = other DNA
gagggtgctgtccga

SEQ ID NO: 21020 - DNA, 15 bp, synthetic construct
  source 1..15: mol_type = other DNA
ggagggtgctgtccg

SEQ ID NO: 21021 - DNA, 15 bp, synthetic construct
  source 1..15: mol_type = other DNA
gggagggtgctgtcc

SEQ ID NO: 21022 - DNA, 15 bp, synthetic construct
  source 1..15: mol_type = other DNA
ggggagggtgctgtc

SEQ ID NO: 21023 - DNA, 15 bp, synthetic construct
  source 1..15: mol_type = other DNA
cggggagggtgctgt

SEQ ID NO: 21024 - DNA, 15 bp, synthetic construct
  source 1..15: mol_type = other DNA
gcggggagggtgctg

SEQ ID NO: 21025 - DNA, 15 bp, synthetic construct
  source 1..15: mol_type = other DNA
cgcggggagggtgct

SEQ ID NO: 21026 - DNA, 15 bp, synthetic construct
  source 1..15: mol_type = other DNA
ccgcggggagggtgc

SEQ ID NO: 21027 - DNA, 15 bp, synthetic construct
  source 1..15: mol_type = other DNA
tccgcggggagggtg

SEQ ID NO: 21028 - DNA, 15 bp, synthetic construct
  source 1..15: mol_type = other DNA
ttccgcggggagggt

SEQ ID NO: 21029 - DNA, 15 bp, synthetic construct
  source 1..15: mol_type = other DNA
cttccgcggggaggg

SEQ ID NO: 21030 - DNA, 15 bp, synthetic construct
  source 1..15: mol_type = other DNA
gcttccgcggggagg

SEQ ID NO: 21031 - DNA, 15 bp, synthetic construct
  source 1..15: mol_type = other DNA
ggcttccgcggggag

SEQ ID NO: 21032 - DNA, 15 bp, synthetic construct
  source 1..15: mol_type = other DNA
gggcttccgcgggga

SEQ ID NO: 21033 - DNA, 15 bp, synthetic construct
  source 1..15: mol_type = other DNA
cgggcttccgcgggg

SEQ ID NO: 21034 - DNA, 15 bp, synthetic construct
  source 1..15: mol_type = other DNA
ccgggcttccgcggg

SEQ ID NO: 21035 - DNA, 15 bp, synthetic construct
  source 1..15: mol_type = other DNA
tcgccgtcctcgtcc

SEQ ID NO: 21036 - DNA, 15 bp, synthetic construct
  source 1..15: mol_type = other DNA
gtcgccgtcctcgtc

SEQ ID NO: 21037 - DNA, 15 bp, synthetic construct
  source 1..15: mol_type = other DNA
cgtcgccgtcctcgt

SEQ ID NO: 21038 - DNA, 15 bp, synthetic construct
  source 1..15: mol_type = other DNA
ccgtcgccgtcctcg

SEQ ID NO: 21039 - DNA, 15 bp, synthetic construct
  source 1..15: mol_type = other DNA
tccgtcgccgtcctc

SEQ ID NO: 21040 - DNA, 15 bp, synthetic construct
  source 1..15: mol_type = other DNA
ctccgtcgccgtcct

SEQ ID NO: 21041 - DNA, 15 bp, synthetic construct
  source 1..15: mol_type = other DNA
tctccgtcgccgtcc

SEQ ID NO: 21042 - DNA, 15 bp, synthetic construct
  source 1..15: mol_type = other DNA
gtctccgtcgccgtc

SEQ ID NO: 21043 - DNA, 15 bp, synthetic construct
  source 1..15: mol_type = other DNA
agtctccgtcgccgt

SEQ ID NO: 21044 - DNA, 15 bp, synthetic construct
  source 1..15: mol_type = other DNA
gagtctccgtcgccg

SEQ ID NO: 21045 - DNA, 15 bp, synthetic construct
  source 1..15: mol_type = other DNA
cgagtctccgtcgcc

SEQ ID NO: 21046 - DNA, 15 bp, synthetic construct
  source 1..15: mol_type = other DNA
acgagtctccgtcgc

SEQ ID NO: 21047 - DNA, 15 bp, synthetic construct
  source 1..15: mol_type = other DNA
aacgagtctccgtcg

SEQ ID NO: 21048 - DNA, 15 bp, synthetic construct
  source 1..15: mol_type = other DNA
aaacgagtctccgtc

SEQ ID NO: 21049 - DNA, 15 bp, synthetic construct
  source 1..15: mol_type = other DNA
caaacgagtctccgt

SEQ ID NO: 21050 - DNA, 15 bp, synthetic construct
  source 1..15: mol_type = other DNA
tcgcagggcctcgct

SEQ ID NO: 21051 - DNA, 15 bp, synthetic construct
  source 1..15: mol_type = other DNA
ctcgcagggcctcgc

SEQ ID NO: 21052 - DNA, 15 bp, synthetic construct
  source 1..15: mol_type = other DNA
gctcgcagggcctcg

SEQ ID NO: 21053 - DNA, 15 bp, synthetic construct
  source 1..15: mol_type = other DNA
agcaggctcgcaggg

SEQ ID NO: 21054 - DNA, 15 bp, synthetic construct
  source 1..15: mol_type = other DNA
aagcaggctcgcagg

SEQ ID NO: 21055 - DNA, 15 bp, synthetic construct
  source 1..15: mol_type = other DNA
aaagcaggctcgcag

SEQ ID NO: 21056 - DNA, 15 bp, synthetic construct
  source 1..15: mol_type = other DNA
caaagcaggctcgca

SEQ ID NO: 21057 - DNA, 15 bp, synthetic construct
  source 1..15: mol_type = other DNA
tcaaagcaggctcgc

SEQ ID NO: 21058 - DNA, 15 bp, synthetic construct
  source 1..15: mol_type = other DNA
ctcaaagcaggctcg

SEQ ID NO: 21059 - DNA, 15 bp, synthetic construct
  source 1..15: mol_type = other DNA
gctcaaagcaggctc

SEQ ID NO: 21060 - DNA, 15 bp, synthetic construct
  source 1..15: mol_type = other DNA
cgctcaaagcaggct

SEQ ID NO: 21061 - DNA, 15 bp, synthetic construct
  source 1..15: mol_type = other DNA
ccgctcaaagcaggc

SEQ ID NO: 21062 - DNA, 15 bp, synthetic construct
  source 1..15: mol_type = other DNA
tccgctcaaagcagg

SEQ ID NO: 21063 - DNA, 15 bp, synthetic construct
  source 1..15: mol_type = other DNA
ttccgctcaaagcag

SEQ ID NO: 21064 - DNA, 15 bp, synthetic construct
  source 1..15: mol_type = other DNA
gttccgctcaaagca

SEQ ID NO: 21065 - DNA, 15 bp, synthetic construct
  source 1..15: mol_type = other DNA
ggttccgctcaaagc

SEQ ID NO: 21066 - DNA, 15 bp, synthetic construct
  source 1..15: mol_type = other DNA
gggttccgctcaaag

SEQ ID NO: 21067 - DNA, 15 bp, synthetic construct
  source 1..15: mol_type = other DNA
cgggttccgctcaaa

SEQ ID NO: 21068 - DNA, 15 bp, synthetic construct
  source 1..15: mol_type = other DNA
acgggttccgctcaa

SEQ ID NO: 21069 - DNA, 15 bp, synthetic construct
  source 1..15: mol_type = other DNA
tacgggttccgctca

SEQ ID NO: 21070 - DNA, 15 bp, synthetic construct
  source 1..15: mol_type = other DNA
gtacgggttccgctc

SEQ ID NO: 21071 - DNA, 15 bp, synthetic construct
  source 1..15: mol_type = other DNA
ggtacgggttccgct

SEQ ID NO: 21072 - DNA, 15 bp, synthetic construct
  source 1..15: mol_type = other DNA
gggtacgggttccgc

SEQ ID NO: 21073 - DNA, 15 bp, synthetic construct
  source 1..15: mol_type = other DNA
cgggtacgggttccg

SEQ ID NO: 21074 - DNA, 15 bp, synthetic construct
  source 1..15: mol_type = other DNA
ccgggtacgggttcc

SEQ ID NO: 21075 - DNA, 15 bp, synthetic construct
  source 1..15: mol_type = other DNA
cccgggtacgggttc

SEQ ID NO: 21076 - DNA, 15 bp, synthetic construct
  source 1..15: mol_type = other DNA
gcccgggtacgggtt

SEQ ID NO: 21077 - DNA, 15 bp, synthetic construct
  source 1..15: mol_type = other DNA
tgcccgggtacgggt

SEQ ID NO: 21078 - DNA, 15 bp, synthetic construct
  source 1..15: mol_type = other DNA
atgcccgggtacggg

SEQ ID NO: 21079 - DNA, 15 bp, synthetic construct
  source 1..15: mol_type = other DNA
gatgcccgggtacgg

SEQ ID NO: 21080 - DNA, 15 bp, synthetic construct
  source 1..15: mol_type = other DNA
cgatgcccgggtacg

SEQ ID NO: 21081 - DNA, 15 bp, synthetic construct
  source 1..15: mol_type = other DNA
gcgatgcccgggtac

SEQ ID NO: 21082 - DNA, 15 bp, synthetic construct
  source 1..15: mol_type = other DNA
ggcgatgcccgggta

SEQ ID NO: 21083 - DNA, 15 bp, synthetic construct
  source 1..15: mol_type = other DNA
tggcgatgcccgggt

SEQ ID NO: 21084 - DNA, 15 bp, synthetic construct
  source 1..15: mol_type = other DNA
gccagccgttctctg

SEQ ID NO: 21085 - DNA, 15 bp, synthetic construct
  source 1..15: mol_type = other DNA
ggccagccgttctct

SEQ ID NO: 21086 - DNA, 15 bp, synthetic construct
  source 1..15: mol_type = other DNA
tgggccagccgttct

SEQ ID NO: 21087 - DNA, 15 bp, synthetic construct
  source 1..15: mol_type = other DNA
ctgggccagccgttc

SEQ ID NO: 21088 - DNA, 15 bp, synthetic construct
  source 1..15: mol_type = other DNA
gatggcctgggccag

SEQ ID NO: 21089 - DNA, 15 bp, synthetic construct
  source 1..15: mol_type = other DNA
cgatggcctgggcca

SEQ ID NO: 21090 - DNA, 15 bp, synthetic construct
  source 1..15: mol_type = other DNA
ccgatggcctgggcc

SEQ ID NO: 21091 - DNA, 15 bp, synthetic construct
  source 1..15: mol_type = other DNA
tgccgatggcctggg

SEQ ID NO: 21092 - DNA, 15 bp, synthetic construct
  source 1..15: mol_type = other DNA
atgccgatggcctgg

SEQ ID NO: 21093 - DNA, 15 bp, synthetic construct
  source 1..15: mol_type = other DNA
aatgccgatggcctg

SEQ ID NO: 21094 - DNA, 15 bp, synthetic construct
  source 1..15: mol_type = other DNA
gaatgccgatggcct

SEQ ID NO: 21095 - DNA, 15 bp, synthetic construct
  source 1..15: mol_type = other DNA
ggaatgccgatggcc

SEQ ID NO: 21096 - DNA, 15 bp, synthetic construct
  source 1..15: mol_type = other DNA
ctggaccctgggctc

SEQ ID NO: 21097 - DNA, 15 bp, synthetic construct
  source 1..15: mol_type = other DNA
tctggaccctgggct

SEQ ID NO: 21098 - DNA, 15 bp, synthetic construct
  source 1..15: mol_type = other DNA
atctggaccctgggc

SEQ ID NO: 21099 - DNA, 15 bp, synthetic construct
  source 1..15: mol_type = other DNA
aatctggaccctggg

SEQ ID NO: 21100 - DNA, 15 bp, synthetic construct
  source 1..15: mol_type = other DNA
aaatctggaccctgg

SEQ ID NO: 21101 - DNA, 15 bp, synthetic construct
  source 1..15: mol_type = other DNA
ccaaatctggaccct

SEQ ID NO: 21102 - DNA, 15 bp, synthetic construct
  source 1..15: mol_type = other DNA
accaaatctggaccc

SEQ ID NO: 21103 - DNA, 15 bp, synthetic construct
  source 1..15: mol_type = other DNA
gacctctcattctga

SEQ ID NO: 21104 - DNA, 15 bp, synthetic construct
  source 1..15: mol_type = other DNA
tgacctctcattctg

SEQ ID NO: 21105 - DNA, 15 bp, synthetic construct
  source 1..15: mol_type = other DNA
gtgacctctcattct

SEQ ID NO: 21106 - DNA, 15 bp, synthetic construct
  source 1..15: mol_type = other DNA
cgtgacctctcattc

SEQ ID NO: 21107 - DNA, 15 bp, synthetic construct
  source 1..15: mol_type = other DNA
gcgtgacctctcatt

SEQ ID NO: 21108 - DNA, 15 bp, synthetic construct
  source 1..15: mol_type = other DNA
ggcgtgacctctcat

SEQ ID NO: 21109 - DNA, 15 bp, synthetic construct
  source 1..15: mol_type = other DNA
tggcgtgacctctca

SEQ ID NO: 21110 - DNA, 15 bp, synthetic construct
  source 1..15: mol_type = other DNA
ctggcgtgacctctc

SEQ ID NO: 21111 - DNA, 15 bp, synthetic construct
  source 1..15: mol_type = other DNA
gctggcgtgacctct

SEQ ID NO: 21112 - DNA, 15 bp, synthetic construct
  source 1..15: mol_type = other DNA
agctggcgtgacctc

SEQ ID NO: 21113 - DNA, 15 bp, synthetic construct
  source 1..15: mol_type = other DNA
cagctggcgtgacct

SEQ ID NO: 21114 - DNA, 15 bp, synthetic construct
  source 1..15: mol_type = other DNA
tcagctggcgtgacc

SEQ ID NO: 21115 - DNA, 15 bp, synthetic construct
  source 1..15: mol_type = other DNA
ctcagctggcgtgac

SEQ ID NO: 21116 - DNA, 15 bp, synthetic construct
  source 1..15: mol_type = other DNA
cctcagctggcgtga

SEQ ID NO: 21117 - DNA, 15 bp, synthetic construct
  source 1..15: mol_type = other DNA
gcctcagctggcgtg

SEQ ID NO: 21118 - DNA, 15 bp, synthetic construct
  source 1..15: mol_type = other DNA
tgcctcagctggcgt

SEQ ID NO: 21119 - DNA, 15 bp, synthetic construct
  source 1..15: mol_type = other DNA
ctgcctcagctggcg

SEQ ID NO: 21120 - DNA, 15 bp, synthetic construct
  source 1..15: mol_type = other DNA
tgctgcctcagctgg

SEQ ID NO: 21121 - DNA, 15 bp, synthetic construct
  source 1..15: mol_type = other DNA
gtgctgcctcagctg

SEQ ID NO: 21122 - DNA, 15 bp, synthetic construct
  source 1..15: mol_type = other DNA
cggtgctgcctcagc

SEQ ID NO: 21123 - DNA, 15 bp, synthetic construct
  source 1..15: mol_type = other DNA
ccggtgctgcctcag

SEQ ID NO: 21124 - DNA, 15 bp, synthetic construct
  source 1..15: mol_type = other DNA
agggccgagattccc

SEQ ID NO: 21125 - DNA, 15 bp, synthetic construct
  source 1..15: mol_type = other DNA
cagggccgagattcc

SEQ ID NO: 21126 - DNA, 15 bp, synthetic construct
  source 1..15: mol_type = other DNA
ccagggccgagattc

SEQ ID NO: 21127 - DNA, 15 bp, synthetic construct
  source 1..15: mol_type = other DNA
gccagggccgagatt

SEQ ID NO: 21128 - DNA, 15 bp, synthetic construct
  source 1..15: mol_type = other DNA
ggccagggccgagat

SEQ ID NO: 21129 - DNA, 15 bp, synthetic construct
  source 1..15: mol_type = other DNA
cgggccagggccgag

SEQ ID NO: 21130 - DNA, 15 bp, synthetic construct
  source 1..15: mol_type = other DNA
cgtctctctggccag

SEQ ID NO: 21131 - DNA, 15 bp, synthetic construct
  source 1..15: mol_type = other DNA
ccgtctctctggcca

SEQ ID NO: 21132 - DNA, 15 bp, synthetic construct
  source 1..15: mol_type = other DNA
ggcccgtctctctgg

SEQ ID NO: 21133 - DNA, 15 bp, synthetic construct
  source 1..15: mol_type = other DNA
aggcccgtctctctg

SEQ ID NO: 21134 - DNA, 15 bp, synthetic construct
  source 1..15: mol_type = other DNA
gaggcccgtctctct

SEQ ID NO: 21135 - DNA, 15 bp, synthetic construct
  source 1..15: mol_type = other DNA
ggaggcccgtctctc

SEQ ID NO: 21136 - DNA, 15 bp, synthetic construct
  source 1..15: mol_type = other DNA
cgggaggcccgtctc

SEQ ID NO: 21137 - DNA, 15 bp, synthetic construct
  source 1..15: mol_type = other DNA
actccgggaggcccg

SEQ ID NO: 21138 - DNA, 15 bp, synthetic construct
  source 1..15: mol_type = other DNA
gactccgggaggccc

SEQ ID NO: 21139 - DNA, 15 bp, synthetic construct
  source 1..15: mol_type = other DNA
ggactccgggaggcc

SEQ ID NO: 21140 - DNA, 15 bp, synthetic construct
  source 1..15: mol_type = other DNA
tggactccgggaggc

SEQ ID NO: 21141 - DNA, 15 bp, synthetic construct
  source 1..15: mol_type = other DNA
ctggactccgggagg

SEQ ID NO: 21142 - DNA, 15 bp, synthetic construct
  source 1..15: mol_type = other DNA
cctggactccgggag

SEQ ID NO: 21143 - DNA, 15 bp, synthetic construct
  source 1..15: mol_type = other DNA
tcctggactccggga

SEQ ID NO: 21144 - DNA, 15 bp, synthetic construct
  source 1..15: mol_type = other DNA
atcctggactccggg

SEQ ID NO: 21145 - DNA, 15 bp, synthetic construct
  source 1..15: mol_type = other DNA
aatcctggactccgg

SEQ ID NO: 21146 - DNA, 15 bp, synthetic construct
  source 1..15: mol_type = other DNA
gaatcctggactccg

SEQ ID NO: 21147 - DNA, 15 bp, synthetic construct
  source 1..15: mol_type = other DNA
tgaatcctggactcc

SEQ ID NO: 21148 - DNA, 15 bp, synthetic construct
  source 1..15: mol_type = other DNA
ctgaatcctggactc

SEQ ID NO: 21149 - DNA, 15 bp, synthetic construct
  source 1..15: mol_type = other DNA
tctgaatcctggact

SEQ ID NO: 21150 - DNA, 15 bp, synthetic construct
  source 1..15: mol_type = other DNA
ccagatctgaatcct

SEQ ID NO: 21151 - DNA, 15 bp, synthetic construct
  source 1..15: mol_type = other DNA
cccttcgattctgaa

SEQ ID NO: 21152 - DNA, 15 bp, synthetic construct
  source 1..15: mol_type = other DNA
gcccttcgattctga

SEQ ID NO: 21153 - DNA, 15 bp, synthetic construct
  source 1..15: mol_type = other DNA
ggcccttcgattctg

SEQ ID NO: 21154 - DNA, 15 bp, synthetic construct
  source 1..15: mol_type = other DNA
tggcccttcgattct

SEQ ID NO: 21155 - DNA, 15 bp, synthetic construct
  source 1..15: mol_type = other DNA
ctggcccttcgattc

SEQ ID NO: 21156 - DNA, 15 bp, synthetic construct
  source 1..15: mol_type = other DNA
cctggcccttcgatt

SEQ ID NO: 21157 - DNA, 15 bp, synthetic construct
  source 1..15: mol_type = other DNA
gcctggcccttcgat

SEQ ID NO: 21158 - DNA, 15 bp, synthetic construct
  source 1..15: mol_type = other DNA
tgcctggcccttcga

SEQ ID NO: 21159 - DNA, 15 bp, synthetic construct
  source 1..15: mol_type = other DNA
tgtcccgggtgcctg

SEQ ID NO: 21160 - DNA, 15 bp, synthetic construct
  source 1..15: mol_type = other DNA
ctggggaggtggagc

SEQ ID NO: 21161 - DNA, 15 bp, synthetic construct
  source 1..15: mol_type = other DNA
gctggggaggtggag

SEQ ID NO: 21162 - DNA, 15 bp, synthetic construct
  source 1..15: mol_type = other DNA
ggctggggaggtgga

SEQ ID NO: 21163 - DNA, 15 bp, synthetic construct
  source 1..15: mol_type = other DNA
gggctggggaggtgg

SEQ ID NO: 21164 - DNA, 15 bp, synthetic construct
  source 1..15: mol_type = other DNA
cgggctggggaggtg

SEQ ID NO: 21165 - DNA, 15 bp, synthetic construct
  source 1..15: mol_type = other DNA
cgcgggctggggagg

SEQ ID NO: 21166 - DNA, 15 bp, synthetic construct
  source 1..15: mol_type = other DNA
gcgcgggctggggag

SEQ ID NO: 21167 - DNA, 15 bp, synthetic construct
  source 1..15: mol_type = other DNA
cgggggcgcgggctg

SEQ ID NO: 21168 - DNA, 15 bp, synthetic construct
  source 1..15: mol_type = other DNA
cgtccgggggcgcgg

SEQ ID NO: 21169 - DNA, 15 bp, synthetic construct
  source 1..15: mol_type = other DNA
aggcgtccgggggcg

SEQ ID NO: 21170 - DNA, 15 bp, synthetic construct
  source 1..15: mol_type = other DNA
ggaggcgtccggggg

SEQ ID NO: 21171 - DNA, 15 bp, synthetic construct
  source 1..15: mol_type = other DNA
cggaggcgtccgggg

SEQ ID NO: 21172 - DNA, 15 bp, synthetic construct
  source 1..15: mol_type = other DNA
gcggaggcgtccggg

SEQ ID NO: 21173 - DNA, 15 bp, synthetic construct
  source 1..15: mol_type = other DNA
ggcggaggcgtccgg

SEQ ID NO: 21174 - DNA, 15 bp, synthetic construct
  source 1..15: mol_type = other DNA
aggcggaggcgtccg

SEQ ID NO: 21175 - DNA, 15 bp, synthetic construct
  source 1..15: mol_type = other DNA
gaggcggaggcgtcc

SEQ ID NO: 21176 - DNA, 15 bp, synthetic construct
  source 1..15: mol_type = other DNA
ggaggcggaggcgtc

SEQ ID NO: 21177 - DNA, 15 bp, synthetic construct
  source 1..15: mol_type = other DNA
cggaggcggaggcgt

SEQ ID NO: 21178 - DNA, 15 bp, synthetic construct
  source 1..15: mol_type = other DNA
gcggaggcggaggcg

SEQ ID NO: 21179 - DNA, 15 bp, synthetic construct
  source 1..15: mol_type = other DNA
cgcggaggcggaggc

SEQ ID NO: 21180 - DNA, 15 bp, synthetic construct
  source 1..15: mol_type = other DNA
gcgcggaggcggagg

SEQ ID NO: 21181 - DNA, 15 bp, synthetic construct
  source 1..15: mol_type = other DNA
cgcgcggaggcggag

SEQ ID NO: 21182 - DNA, 15 bp, synthetic construct
  source 1..15: mol_type = other DNA
ccgcgcggaggcgga

SEQ ID NO: 21183 - DNA, 15 bp, synthetic construct
  source 1..15: mol_type = other DNA
gccgcgcggaggcgg

SEQ ID NO: 21184 - DNA, 15 bp, synthetic construct
  source 1..15: mol_type = other DNA
tgccgcgcggaggcg

SEQ ID NO: 21185 - DNA, 15 bp, synthetic construct
  source 1..15: mol_type = other DNA
ctgccgcgcggaggc

SEQ ID NO: 21186 - DNA, 15 bp, synthetic construct
  source 1..15: mol_type = other DNA
cctgccgcgcggagg

SEQ ID NO: 21187 - DNA, 15 bp, synthetic construct
  source 1..15: mol_type = other DNA
ccctgccgcgcggag

SEQ ID NO: 21188 - DNA, 15 bp, synthetic construct
  source 1..15: mol_type = other DNA
catctgcccctgccg

SEQ ID NO: 21189 - DNA, 15 bp, synthetic construct
  source 1..15: mol_type = other DNA
tgcatctgcccctgc

SEQ ID NO: 21190 - DNA, 15 bp, synthetic construct
  source 1..15: mol_type = other DNA
ttgcatctgcccctg

SEQ ID NO: 21191 - DNA, 15 bp, synthetic construct
  source 1..15: mol_type = other DNA
cttgcatctgcccct

SEQ ID NO: 21192 - DNA, 15 bp, synthetic construct
  source 1..15: mol_type = other DNA
ccttgcatctgcccc

SEQ ID NO: 21193 - DNA, 15 bp, synthetic construct
  source 1..15: mol_type = other DNA
gccttgcatctgccc

SEQ ID NO: 21194 - DNA, 15 bp, synthetic construct
  source 1..15: mol_type = other DNA
tgccttgcatctgcc

SEQ ID NO: 21195 - DNA, 15 bp, synthetic construct
  source 1..15: mol_type = other DNA
atgccttgcatctgc

SEQ ID NO: 21196 - DNA, 15 bp, synthetic construct
  source 1..15: mol_type = other DNA
gatgccttgcatctg

SEQ ID NO: 21197 - DNA, 15 bp, synthetic construct
  source 1..15: mol_type = other DNA
ggatgccttgcatct

SEQ ID NO: 21198 - DNA, 15 bp, synthetic construct
  source 1..15: mol_type = other DNA
gggatgccttgcatc

SEQ ID NO: 21199 - DNA, 15 bp, synthetic construct
  source 1..15: mol_type = other DNA
cgggatgccttgcat

SEQ ID NO: 21200 - DNA, 15 bp, synthetic construct
  source 1..15: mol_type = other DNA
ccgggatgccttgca

SEQ ID NO: 21201 - DNA, 15 bp, synthetic construct
  source 1..15: mol_type = other DNA
gccgggatgccttgc

SEQ ID NO: 21202 - DNA, 15 bp, synthetic construct
  source 1..15: mol_type = other DNA
cgccgggatgccttg

SEQ ID NO: 21203 - DNA, 15 bp, synthetic construct
  source 1..15: mol_type = other DNA
gcgccgggatgcctt

SEQ ID NO: 21204 - DNA, 15 bp, synthetic construct
  source 1..15: mol_type = other DNA
agggcgccgggatgc

SEQ ID NO: 21205 - DNA, 15 bp, synthetic construct
  source 1..15: mol_type = other DNA
gagggcgccgggatg

SEQ ID NO: 21206 - DNA, 15 bp, synthetic construct
  source 1..15: mol_type = other DNA
ggagggcgccgggat

SEQ ID NO: 21207 - DNA, 15 bp, synthetic construct
  source 1..15: mol_type = other DNA
tgggagggcgccggg

SEQ ID NO: 21208 - DNA, 15 bp, synthetic construct
  source 1..15: mol_type = other DNA
ctgggagggcgccgg

SEQ ID NO: 21209 - DNA, 15 bp, synthetic construct
  source 1..15: mol_type = other DNA
cctgggagggcgccg

SEQ ID NO: 21210 - DNA, 15 bp, synthetic construct
  source 1..15: mol_type = other DNA
cgcctgggagggcgc

SEQ ID NO: 21211 - DNA, 15 bp, synthetic construct
  source 1..15: mol_type = other DNA
gcgcctgggagggcg

SEQ ID NO: 21212 - DNA, 15 bp, synthetic construct
  source 1..15: mol_type = other DNA
agcgcctgggagggc

SEQ ID NO: 21213 - DNA, 15 bp, synthetic construct
  source 1..15: mol_type = other DNA
gagcgcctgggaggg

SEQ ID NO: 21214 - DNA, 15 bp, synthetic construct
  source 1..15: mol_type = other DNA
ggagcgcctgggagg

SEQ ID NO: 21215 - DNA, 15 bp, synthetic construct
  source 1..15: mol_type = other DNA
tggagcgcctgggag

SEQ ID NO: 21216 - DNA, 15 bp, synthetic construct
  source 1..15: mol_type = other DNA
ctggagcgcctggga

SEQ ID NO: 21217 - DNA, 15 bp, synthetic construct
  source 1..15: mol_type = other DNA
cctggagcgcctggg

SEQ ID NO: 21218 - DNA, 15 bp, synthetic construct
  source 1..15: mol_type = other DNA
tcctggagcgcctgg

SEQ ID NO: 21219 - DNA, 15 bp, synthetic construct
  source 1..15: mol_type = other DNA
ctcctggagcgcctg

SEQ ID NO: 21220 - DNA, 15 bp, synthetic construct
  source 1..15: mol_type = other DNA
cggctcctggagcgc

SEQ ID NO: 21221 - DNA, 15 bp, synthetic construct
  source 1..15: mol_type = other DNA
ccggctcctggagcg

SEQ ID NO: 21222 - DNA, 15 bp, synthetic construct
  source 1..15: mol_type = other DNA
cgccggctcctggag

SEQ ID NO: 21223 - DNA, 15 bp, synthetic construct
  source 1..15: mol_type = other DNA
ggggcctccgtttct

SEQ ID NO: 21224 - DNA, 15 bp, synthetic construct
  source 1..15: mol_type = other DNA
cggggcctccgtttc

SEQ ID NO: 21225 - DNA, 15 bp, synthetic construct
  source 1..15: mol_type = other DNA
ccggggcctccgttt

SEQ ID NO: 21226 - DNA, 15 bp, synthetic construct
  source 1..15: mol_type = other DNA
cgaggcctccagctc

SEQ ID NO: 21227 - DNA, 15 bp, synthetic construct
  source 1..15: mol_type = other DNA
ccgaggcctccagct

SEQ ID NO: 21228 - DNA, 15 bp, synthetic construct
  source 1..15: mol_type = other DNA
tccgaggcctccagc

SEQ ID NO: 21229 - DNA, 15 bp, synthetic construct
  source 1..15: mol_type = other DNA
ttccgaggcctccag

SEQ ID NO: 21230 - DNA, 15 bp, synthetic construct
  source 1..15: mol_type = other DNA
cttccgaggcctcca

SEQ ID NO: 21231 - DNA, 15 bp, synthetic construct
  source 1..15: mol_type = other DNA
tcttccgaggcctcc

SEQ ID NO: 21232 - DNA, 15 bp, synthetic construct
  source 1..15: mol_type = other DNA
ctcttccgaggcctc

SEQ ID NO: 21233 - DNA, 15 bp, synthetic construct
  source 1..15: mol_type = other DNA
cctcttccgaggcct

SEQ ID NO: 21234 - DNA, 15 bp, synthetic construct
  source 1..15: mol_type = other DNA
ggcctcttccgaggc

SEQ ID NO: 21235 - DNA, 15 bp, synthetic construct
  source 1..15: mol_type = other DNA
cggcctcttccgagg

SEQ ID NO: 21236 - DNA, 15 bp, synthetic construct
  source 1..15: mol_type = other DNA
gcggcctcttccgag

SEQ ID NO: 21237 - DNA, 15 bp, synthetic construct
  source 1..15: mol_type = other DNA
ggcggcctcttccga

SEQ ID NO: 21238 - DNA, 15 bp, synthetic construct
  source 1..15: mol_type = other DNA
aggcggcctcttccg

SEQ ID NO: 21239 - DNA, 15 bp, synthetic construct
  source 1..15: mol_type = other DNA
gaggcggcctcttcc

SEQ ID NO: 21240 - DNA, 15 bp, synthetic construct
  source 1..15: mol_type = other DNA
cgaggcggcctcttc

SEQ ID NO: 21241 - DNA, 15 bp, synthetic construct
  source 1..15: mol_type = other DNA
gcgaggcggcctctt

SEQ ID NO: 21242 - DNA, 15 bp, synthetic construct
  source 1..15: mol_type = other DNA
agcgaggcggcctct

SEQ ID NO: 21243 - DNA, 15 bp, synthetic construct
  source 1..15: mol_type = other DNA
cagcgaggcggcctc

SEQ ID NO: 21244 - DNA, 15 bp, synthetic construct
  source 1..15: mol_type = other DNA
ccagcgaggcggcct

SEQ ID NO: 21245 - DNA, 15 bp, synthetic construct
  source 1..15: mol_type = other DNA
tccagcgaggcggcc

SEQ ID NO: 21246 - DNA, 15 bp, synthetic construct
  source 1..15: mol_type = other DNA
ttccagcgaggcggc

SEQ ID NO: 21247 - DNA, 15 bp, synthetic construct
  source 1..15: mol_type = other DNA
cttccagcgaggcgg

SEQ ID NO: 21248 - DNA, 15 bp, synthetic construct
  source 1..15: mol_type = other DNA
gcttccagcgaggcg

SEQ ID NO: 21249 - DNA, 15 bp, synthetic construct
  source 1..15: mol_type = other DNA
tgcttccagcgaggc

SEQ ID NO: 21250 - DNA, 15 bp, synthetic construct
  source 1..15: mol_type = other DNA
gtgcttccagcgagg

SEQ ID NO: 21251 - DNA, 15 bp, synthetic construct
  source 1..15: mol_type = other DNA
ggtgcttccagcgag

SEQ ID NO: 21252 - DNA, 15 bp, synthetic construct
  source 1..15: mol_type = other DNA
gggtgcttccagcga

SEQ ID NO: 21253 - DNA, 15 bp, synthetic construct
  source 1..15: mol_type = other DNA
ggggtgcttccagcg

SEQ ID NO: 21254 - DNA, 15 bp, synthetic construct
  source 1..15: mol_type = other DNA
aggggtgcttccagc

SEQ ID NO: 21255 - DNA, 15 bp, synthetic construct
  source 1..15: mol_type = other DNA
gaggggtgcttccag

SEQ ID NO: 21256 - DNA, 15 bp, synthetic construct
  source 1..15: mol_type = other DNA
tgaggggtgcttcca

SEQ ID NO: 21257 - DNA, 15 bp, synthetic construct
  source 1..15: mol_type = other DNA
ctgaggggtgcttcc

SEQ ID NO: 21258 - DNA, 15 bp, synthetic construct
  source 1..15: mol_type = other DNA
gctgaggggtgcttc

SEQ ID NO: 21259 - DNA, 15 bp, synthetic construct
  source 1..15: mol_type = other DNA
cgctgaggggtgctt

SEQ ID NO: 21260 - DNA, 15 bp, synthetic construct
  source 1..15: mol_type = other DNA
tcgctgaggggtgct

SEQ ID NO: 21261 - DNA, 15 bp, synthetic construct
  source 1..15: mol_type = other DNA
ctcgctgaggggtgc

SEQ ID NO: 21262 - DNA, 15 bp, synthetic construct
  source 1..15: mol_type = other DNA
cctcgctgaggggtg

SEQ ID NO: 21263 - DNA, 15 bp, synthetic construct
  source 1..15: mol_type = other DNA
tcctcgctgaggggt

SEQ ID NO: 21264 - DNA, 15 bp, synthetic construct
  source 1..15: mol_type = other DNA
ttcctcgctgagggg

SEQ ID NO: 21265 - DNA, 15 bp, synthetic construct
  source 1..15: mol_type = other DNA
cttcctcgctgaggg

SEQ ID NO: 21266 - DNA, 15 bp, synthetic construct
  source 1..15: mol_type = other DNA
tcttcctcgctgagg

SEQ ID NO: 21267 - DNA, 15 bp, synthetic construct
  source 1..15: mol_type = other DNA
ttcttcctcgctgag

SEQ ID NO: 21268 - DNA, 15 bp, synthetic construct
  source 1..15: mol_type = other DNA
attcttcctcgctga

SEQ ID NO: 21269 - DNA, 15 bp, synthetic construct
  source 1..15: mol_type = other DNA
tattcttcctcgctg

SEQ ID NO: 21270 - DNA, 15 bp, synthetic construct
  source 1..15: mol_type = other DNA
gtattcttcctcgct

SEQ ID NO: 21271 - DNA, 15 bp, synthetic construct
  source 1..15: mol_type = other DNA
ggtattcttcctcgc

SEQ ID NO: 21272 - DNA, 15 bp, synthetic construct
  source 1..15: mol_type = other DNA
cggtattcttcctcg

SEQ ID NO: 21273 - DNA, 15 bp, synthetic construct
  source 1..15: mol_type = other DNA
ccggtattcttcctc

SEQ ID NO: 21274 - DNA, 15 bp, synthetic construct
  source 1..15: mol_type = other DNA
cccggtattcttcct

SEQ ID NO: 21275 - DNA, 15 bp, synthetic construct
  source 1..15: mol_type = other DNA
gcccggtattcttcc

SEQ ID NO: 21276 - DNA, 15 bp, synthetic construct
  source 1..15: mol_type = other DNA
agcccggtattcttc

SEQ ID NO: 21277 - DNA, 15 bp, synthetic construct
  source 1..15: mol_type = other DNA
gagcccggtattctt

SEQ ID NO: 21278 - DNA, 15 bp, synthetic construct
  source 1..15: mol_type = other DNA
agagcccggtattct

SEQ ID NO: 21279 - DNA, 15 bp, synthetic construct
  source 1..15: mol_type = other DNA
cagagcccggtattc

SEQ ID NO: 21280 - DNA, 15 bp, synthetic construct
  source 1..15: mol_type = other DNA
gcagagcccggtatt

SEQ ID NO: 21281 - DNA, 15 bp, synthetic construct
  source 1..15: mol_type = other DNA
agcagagcccggtat

SEQ ID NO: 21282 - DNA, 15 bp, synthetic construct
  source 1..15: mol_type = other DNA
cagcagagcccggta

SEQ ID NO: 21283 - DNA, 15 bp, synthetic construct
  source 1..15: mol_type = other DNA
ccagcagagcccggt

SEQ ID NO: 21284 - DNA, 15 bp, synthetic construct
  source 1..15: mol_type = other DNA
tccagcagagcccgg

SEQ ID NO: 21285 - DNA, 15 bp, synthetic construct
  source 1..15: mol_type = other DNA
ctccagcagagcccg

SEQ ID NO: 21286 - DNA, 15 bp, synthetic construct
  source 1..15: mol_type = other DNA
tcctccagcagagcc

SEQ ID NO: 21287 - DNA, 15 bp, synthetic construct
  source 1..15: mol_type = other DNA
ctcctccagcagagc

SEQ ID NO: 21288 - DNA, 15 bp, synthetic construct
  source 1..15: mol_type = other DNA
gctcctccagcagag

SEQ ID NO: 21289 - DNA, 15 bp, synthetic construct
  source 1..15: mol_type = other DNA
agctcctccagcaga

SEQ ID NO: 21290 - DNA, 15 bp, synthetic construct
  source 1..15: mol_type = other DNA
aagctcctccagcag

SEQ ID NO: 21291 - DNA, 15 bp, synthetic construct
  source 1..15: mol_type = other DNA
aaagctcctccagca

SEQ ID NO: 21292 - DNA, 15 bp, synthetic construct
  source 1..15: mol_type = other DNA
taaagctcctccagc

SEQ ID NO: 21293 - DNA, 15 bp, synthetic construct
  source 1..15: mol_type = other DNA
ctaaagctcctccag

SEQ ID NO: 21294 - DNA, 15 bp, synthetic construct
  source 1..15: mol_type = other DNA
cctaaagctcctcca

SEQ ID NO: 21295 - DNA, 15 bp, synthetic construct
  source 1..15: mol_type = other DNA
tcctaaagctcctcc

SEQ ID NO: 21296 - DNA, 15 bp, synthetic construct
  source 1..15: mol_type = other DNA
gtcctaaagctcctc

SEQ ID NO: 21297 - DNA, 15 bp, synthetic construct
  source 1..15: mol_type = other DNA
cgtcctaaagctcct

SEQ ID NO: 21298 - DNA, 15 bp, synthetic construct
  source 1..15: mol_type = other DNA
gcgtcctaaagctcc

SEQ ID NO: 21299 - DNA, 15 bp, synthetic construct
  source 1..15: mol_type = other DNA
cgcgtcctaaagctc

SEQ ID NO: 21300 - DNA, 15 bp, synthetic construct
  source 1..15: mol_type = other DNA
ccgcgtcctaaagct

SEQ ID NO: 21301 - DNA, 15 bp, synthetic construct
  source 1..15: mol_type = other DNA
cccgcgtcctaaagc

SEQ ID NO: 21302 - DNA, 15 bp, synthetic construct
  source 1..15: mol_type = other DNA
ccccgcgtcctaaag

SEQ ID NO: 21303 - DNA, 15 bp, synthetic construct
  source 1..15: mol_type = other DNA
accccgcgtcctaaa

SEQ ID NO: 21304 - DNA, 15 bp, synthetic construct
  source 1..15: mol_type = other DNA
aaccccgcgtcctaa

SEQ ID NO: 21305 - DNA, 15 bp, synthetic construct
  source 1..15: mol_type = other DNA
caaccccgcgtccta

SEQ ID NO: 21306 - DNA, 15 bp, synthetic construct
  source 1..15: mol_type = other DNA
ccaaccccgcgtcct

SEQ ID NO: 21307 - DNA, 15 bp, synthetic construct
  source 1..15: mol_type = other DNA
tcccaaccccgcgtc

SEQ ID NO: 21308 - DNA, 15 bp, synthetic construct
  source 1..15: mol_type = other DNA
gtcccaaccccgcgt

SEQ ID NO: 21309 - DNA, 15 bp, synthetic construct
  source 1..15: mol_type = other DNA
cgtcccaaccccgcg

SEQ ID NO: 21310 - DNA, 15 bp, synthetic construct
  source 1..15: mol_type = other DNA
cccgtcccaaccccg

SEQ ID NO: 21311 - DNA, 15 bp, synthetic construct
  source 1..15: mol_type = other DNA
ccccgaaccacccga

SEQ ID NO: 21312 - DNA, 15 bp, synthetic construct
  source 1..15: mol_type = other DNA
gccccgaaccacccg

SEQ ID NO: 21313 - DNA, 15 bp, synthetic construct
  source 1..15: mol_type = other DNA
tgccccgaaccaccc

SEQ ID NO: 21314 - DNA, 15 bp, synthetic construct
  source 1..15: mol_type = other DNA
ctgccccgaaccacc

SEQ ID NO: 21315 - DNA, 15 bp, synthetic construct
  source 1..15: mol_type = other DNA
cctgccccgaaccac

SEQ ID NO: 21316 - DNA, 15 bp, synthetic construct
  source 1..15: mol_type = other DNA
ccctgccccgaacca

SEQ ID NO: 21317 - DNA, 15 bp, synthetic construct
  source 1..15: mol_type = other DNA
cgccctgccccgaac

SEQ ID NO: 21318 - DNA, 15 bp, synthetic construct
  source 1..15: mol_type = other DNA
agagaggccaccgcc

SEQ ID NO: 21319 - DNA, 15 bp, synthetic construct
  source 1..15: mol_type = other DNA
aagagaggccaccgc

SEQ ID NO: 21320 - DNA, 15 bp, synthetic construct
  source 1..15: mol_type = other DNA
aaagagaggccaccg

SEQ ID NO: 21321 - DNA, 15 bp, synthetic construct
  source 1..15: mol_type = other DNA
gaaagagaggccacc

SEQ ID NO: 21322 - DNA, 15 bp, synthetic construct
  source 1..15: mol_type = other DNA
gcgaaagagaggcca

SEQ ID NO: 21323 - DNA, 15 bp, synthetic construct
  source 1..15: mol_type = other DNA
cgcgaaagagaggcc

SEQ ID NO: 21324 - DNA, 15 bp, synthetic construct
  source 1..15: mol_type = other DNA
ccgcgaaagagaggc

SEQ ID NO: 21325 - DNA, 15 bp, synthetic construct
  source 1..15: mol_type = other DNA
cccgcgaaagagagg

SEQ ID NO: 21326 - DNA, 15 bp, synthetic construct
  source 1..15: mol_type = other DNA
ccccgcgaaagagag

SEQ ID NO: 21327 - DNA, 15 bp, synthetic construct
  source 1..15: mol_type = other DNA
tccccgcgaaagaga

SEQ ID NO: 21328 - DNA, 15 bp, synthetic construct
  source 1..15: mol_type = other DNA
ttccccgcgaaagag

SEQ ID NO: 21329 - DNA, 15 bp, synthetic construct
  source 1..15: mol_type = other DNA
gttccccgcgaaaga

SEQ ID NO: 21330 - DNA, 15 bp, synthetic construct
  source 1..15: mol_type = other DNA
tgttccccgcgaaag

SEQ ID NO: 21331 - DNA, 15 bp, synthetic construct
  source 1..15: mol_type = other DNA
gtgttccccgcgaaa

SEQ ID NO: 21332 - DNA, 15 bp, synthetic construct
  source 1..15: mol_type = other DNA
ggtgttccccgcgaa

SEQ ID NO: 21333 - DNA, 15 bp, synthetic construct
  source 1..15: mol_type = other DNA
aggtgttccccgcga

SEQ ID NO: 21334 - DNA, 15 bp, synthetic construct
  source 1..15: mol_type = other DNA
caggtgttccccgcg

SEQ ID NO: 21335 - DNA, 15 bp, synthetic construct
  source 1..15: mol_type = other DNA
cagccaggtgttccc

SEQ ID NO: 21336 - DNA, 15 bp, synthetic construct
  source 1..15: mol_type = other DNA
ccagccaggtgttcc

SEQ ID NO: 21337 - DNA, 15 bp, synthetic construct
  source 1..15: mol_type = other DNA
gccagccaggtgttc

SEQ ID NO: 21338 - DNA, 15 bp, synthetic construct
  source 1..15: mol_type = other DNA
agccagccaggtgtt

SEQ ID NO: 21339 - DNA, 15 bp, synthetic construct
  source 1..15: mol_type = other DNA
tagccagccaggtgt

SEQ ID NO: 21340 - DNA, 15 bp, synthetic construct
  source 1..15: mol_type = other DNA
gtagccagccaggtg

SEQ ID NO: 21341 - DNA, 15 bp, synthetic construct
  source 1..15: mol_type = other DNA
cgtagccagccaggt

SEQ ID NO: 21342 - DNA, 15 bp, synthetic construct
  source 1..15: mol_type = other DNA
ccgtagccagccagg

SEQ ID NO: 21343 - DNA, 15 bp, synthetic construct
  source 1..15: mol_type = other DNA
tccgtagccagccag

SEQ ID NO: 21344 - DNA, 15 bp, synthetic construct
  source 1..15: mol_type = other DNA
ctccgtagccagcca

SEQ ID NO: 21345 - DNA, 15 bp, synthetic construct
  source 1..15: mol_type = other DNA
cccctccgtagccag

SEQ ID NO: 21346 - DNA, 15 bp, synthetic construct
  source 1..15: mol_type = other DNA
acgcccctccgtagc

SEQ ID NO: 21347 - DNA, 15 bp, synthetic construct
  source 1..15: mol_type = other DNA
cacgcccctccgtag

SEQ ID NO: 21348 - DNA, 15 bp, synthetic construct
  source 1..15: mol_type = other DNA
acacgcccctccgta

SEQ ID NO: 21349 - DNA, 15 bp, synthetic construct
  source 1..15: mol_type = other DNA
gacacgcccctccgt

SEQ ID NO: 21350 - DNA, 15 bp, synthetic construct
  source 1..15: mol_type = other DNA
agacacgcccctccg

SEQ ID NO: 21351 - DNA, 15 bp, synthetic construct
  source 1..15: mol_type = other DNA
gagacacgcccctcc

SEQ ID NO: 21352 - DNA, 15 bp, synthetic construct
  source 1..15: mol_type = other DNA
ggagacacgcccctc

SEQ ID NO: 21353 - DNA, 15 bp, synthetic construct
  source 1..15: mol_type = other DNA
cggagacacgcccct

SEQ ID NO: 21354 - DNA, 15 bp, synthetic construct
  source 1..15: mol_type = other DNA
gcggagacacgcccc

SEQ ID NO: 21355 - DNA, 15 bp, synthetic construct
  source 1..15: mol_type = other DNA
ggcggagacacgccc

SEQ ID NO: 21356 - DNA, 15 bp, synthetic construct
  source 1..15: mol_type = other DNA
gggcggagacacgcc

SEQ ID NO: 21357 - DNA, 15 bp, synthetic construct
  source 1..15: mol_type = other DNA
ggggcggagacacgc

SEQ ID NO: 21358 - DNA, 15 bp, synthetic construct
  source 1..15: mol_type = other DNA
agcccggtggagggg

SEQ ID NO: 21359 - DNA, 15 bp, synthetic construct
  source 1..15: mol_type = other DNA
cagcccggtggaggg

SEQ ID NO: 21360 - DNA, 15 bp, synthetic construct
  source 1..15: mol_type = other DNA
tcagcccggtggagg

SEQ ID NO: 21361 - DNA, 15 bp, synthetic construct
  source 1..15: mol_type = other DNA
gtcagcccggtggag

SEQ ID NO: 21362 - DNA, 15 bp, synthetic construct
  source 1..15: mol_type = other DNA
ggtcagcccggtgga

SEQ ID NO: 21363 - DNA, 15 bp, synthetic construct
  source 1..15: mol_type = other DNA
cggtcagcccggtgg

SEQ ID NO: 21364 - DNA, 15 bp, synthetic construct
  source 1..15: mol_type = other DNA
ccggtcagcccggtg

SEQ ID NO: 21365 - DNA, 15 bp, synthetic construct
  source 1..15: mol_type = other DNA
tcccaggccggtcag

SEQ ID NO: 21366 - DNA, 15 bp, synthetic construct
  source 1..15: mol_type = other DNA
atcccaggccggtca

SEQ ID NO: 21367 - DNA, 15 bp, synthetic construct
  source 1..15: mol_type = other DNA
aatcccaggccggtc

SEQ ID NO: 21368 - DNA, 15 bp, synthetic construct
  source 1..15: mol_type = other DNA
gaatcccaggccggt

SEQ ID NO: 21369 - DNA, 15 bp, synthetic construct
  source 1..15: mol_type = other DNA
ggaatcccaggccgg

SEQ ID NO: 21370 - DNA, 15 bp, synthetic construct
  source 1..15: mol_type = other DNA
aggaatcccaggccg

SEQ ID NO: 21371 - DNA, 15 bp, synthetic construct
  source 1..15: mol_type = other DNA
caggaatcccaggcc

SEQ ID NO: 21372 - DNA, 15 bp, synthetic construct
  source 1..15: mol_type = other DNA
gcaggaatcccaggc

SEQ ID NO: 21373 - DNA, 15 bp, synthetic construct
  source 1..15: mol_type = other DNA
ggcaggaatcccagg

SEQ ID NO: 21374 - DNA, 15 bp, synthetic construct
  source 1..15: mol_type = other DNA
aggcaggaatcccag

SEQ ID NO: 21375 - DNA, 15 bp, synthetic construct
  source 1..15: mol_type = other DNA
aaggcaggaatccca

SEQ ID NO: 21376 - DNA, 15 bp, synthetic construct
  source 1..15: mol_type = other DNA
gaaggcaggaatccc

SEQ ID NO: 21377 - DNA, 15 bp, synthetic construct
  source 1..15: mol_type = other DNA
acctagaaggcagga

SEQ ID NO: 21378 - DNA, 15 bp, synthetic construct
  source 1..15: mol_type = other DNA
gacctagaaggcagg

SEQ ID NO: 21379 - DNA, 15 bp, synthetic construct
  source 1..15: mol_type = other DNA
gtctctcaccgggcc

SEQ ID NO: 21380 - DNA, 15 bp, synthetic construct
  source 1..15: mol_type = other DNA
agtctctcaccgggc

SEQ ID NO: 21381 - DNA, 15 bp, synthetic construct
  source 1..15: mol_type = other DNA
gagtctctcaccggg

SEQ ID NO: 21382 - DNA, 15 bp, synthetic construct
  source 1..15: mol_type = other DNA
ggagtctctcaccgg

SEQ ID NO: 21383 - DNA, 15 bp, synthetic construct
  source 1..15: mol_type = other DNA
tggagtctctcaccg

SEQ ID NO: 21384 - DNA, 15 bp, synthetic construct
  source 1..15: mol_type = other DNA
gtggagtctctcacc

SEQ ID NO: 21385 - DNA, 15 bp, synthetic construct
  source 1..15: mol_type = other DNA
gatgcccaggaaaga

SEQ ID NO: 21386 - DNA, 15 bp, synthetic construct
  source 1..15: mol_type = other DNA
ggatgcccaggaaag

SEQ ID NO: 21387 - DNA, 15 bp, synthetic construct
  source 1..15: mol_type = other DNA
gggatgcccaggaaa

SEQ ID NO: 21388 - DNA, 15 bp, synthetic construct
  source 1..15: mol_type = other DNA
cgggatgcccaggaa

SEQ ID NO: 21389 - DNA, 15 bp, synthetic construct
  source 1..15: mol_type = other DNA
ccgggatgcccagga

SEQ ID NO: 21390 - DNA, 15 bp, synthetic construct
  source 1..15: mol_type = other DNA
cccgggatgcccagg

SEQ ID NO: 21391 - DNA, 15 bp, synthetic construct
  source 1..15: mol_type = other DNA
ccccgggatgcccag

SEQ ID NO: 21392 - DNA, 15 bp, synthetic construct
  source 1..15: mol_type = other DNA
atccccgggatgccc

SEQ ID NO: 21393 - DNA, 15 bp, synthetic construct
  source 1..15: mol_type = other DNA
gatccccgggatgcc

SEQ ID NO: 21394 - DNA, 15 bp, synthetic construct
  source 1..15: mol_type = other DNA
ggatccccgggatgc

SEQ ID NO: 21395 - DNA, 15 bp, synthetic construct
  source 1..15: mol_type = other DNA
gggatccccgggatg

SEQ ID NO: 21396 - DNA, 15 bp, synthetic construct
  source 1..15: mol_type = other DNA
tgggatccccgggat

SEQ ID NO: 21397 - DNA, 15 bp, synthetic construct
  source 1..15: mol_type = other DNA
ctgggatccccggga

SEQ ID NO: 21398 - DNA, 15 bp, synthetic construct
  source 1..15: mol_type = other DNA
tctgggatccccggg

SEQ ID NO: 21399 - DNA, 15 bp, synthetic construct
  source 1..15: mol_type = other DNA
ctctgggatccccgg

SEQ ID NO: 21400 - DNA, 15 bp, synthetic construct
  source 1..15: mol_type = other DNA
gctctgggatccccg

SEQ ID NO: 21401 - DNA, 15 bp, synthetic construct
  source 1..15: mol_type = other DNA
cggctctgggatccc

SEQ ID NO: 21402 - DNA, 15 bp, synthetic construct
  source 1..15: mol_type = other DNA
ccggctctgggatcc

SEQ ID NO: 21403 - DNA, 15 bp, synthetic construct
  source 1..15: mol_type = other DNA
gccggctctgggatc

SEQ ID NO: 21404 - DNA, 15 bp, synthetic construct
  source 1..15: mol_type = other DNA
ggccggctctgggat

SEQ ID NO: 21405 - DNA, 15 bp, synthetic construct
  source 1..15: mol_type = other DNA
tgggccggctctggg

SEQ ID NO: 21406 - DNA, 15 bp, synthetic construct
  source 1..15: mol_type = other DNA
ctgggccggctctgg

SEQ ID NO: 21407 - DNA, 15 bp, synthetic construct
  source 1..15: mol_type = other DNA
tacctgggccggctc

SEQ ID NO: 21408 - DNA, 15 bp, synthetic construct
  source 1..15: mol_type = other DNA
gtacctgggccggct

SEQ ID NO: 21409 - DNA, 15 bp, synthetic construct
  source 1..15: mol_type = other DNA
tggtacctgggccgg

SEQ ID NO: 21410 - DNA, 15 bp, synthetic construct
  source 1..15: mol_type = other DNA
ctggtacctgggccg

SEQ ID NO: 21411 - DNA, 15 bp, synthetic construct
  source 1..15: mol_type = other DNA
gctggtacctgggcc

SEQ ID NO: 21412 - DNA, 15 bp, synthetic construct
  source 1..15: mol_type = other DNA
tgctggtacctgggc

SEQ ID NO: 21413 - DNA, 15 bp, synthetic construct
  source 1..15: mol_type = other DNA
ctgctggtacctggg

SEQ ID NO: 21414 - DNA, 15 bp, synthetic construct
  source 1..15: mol_type = other DNA
gggaggctgcagggg

SEQ ID NO: 21415 - DNA, 15 bp, synthetic construct
  source 1..15: mol_type = other DNA
tgggaggctgcaggg

SEQ ID NO: 21416 - DNA, 15 bp, synthetic construct
  source 1..15: mol_type = other DNA
ctgggaggctgcagg

SEQ ID NO: 21417 - DNA, 15 bp, synthetic construct
  source 1..15: mol_type = other DNA
gctgggaggctgcag

SEQ ID NO: 21418 - DNA, 15 bp, synthetic construct
  source 1..15: mol_type = other DNA
agctgggaggctgca

SEQ ID NO: 21419 - DNA, 15 bp, synthetic construct
  source 1..15: mol_type = other DNA
cagctgggaggctgc

SEQ ID NO: 21420 - DNA, 15 bp, synthetic construct
  source 1..15: mol_type = other DNA
gcagctgggaggctg

SEQ ID NO: 21421 - DNA, 15 bp, synthetic construct
  source 1..15: mol_type = other DNA
ggcagctgggaggct

SEQ ID NO: 21422 - DNA, 15 bp, synthetic construct
  source 1..15: mol_type = other DNA
tggcagctgggaggc

SEQ ID NO: 21423 - DNA, 15 bp, synthetic construct
  source 1..15: mol_type = other DNA
ctggcagctgggagg

SEQ ID NO: 21424 - DNA, 15 bp, synthetic construct
  source 1..15: mol_type = other DNA
gctggcagctgggag

SEQ ID NO: 21425 - DNA, 15 bp, synthetic construct
  source 1..15: mol_type = other DNA
cttttgaccgccagg

SEQ ID NO: 21426 - DNA, 15 bp, synthetic construct
  source 1..15: mol_type = other DNA
gcttttgaccgccag

SEQ ID NO: 21427 - DNA, 15 bp, synthetic construct
  source 1..15: mol_type = other DNA
tgcttttgaccgcca

SEQ ID NO: 21428 - DNA, 15 bp, synthetic construct
  source 1..15: mol_type = other DNA
atgcttttgaccgcc

SEQ ID NO: 21429 - DNA, 15 bp, synthetic construct
  source 1..15: mol_type = other DNA
tatgcttttgaccgc

SEQ ID NO: 21430 - DNA, 15 bp, synthetic construct
  source 1..15: mol_type = other DNA
gtatgcttttgaccg

SEQ ID NO: 21431 - DNA, 15 bp, synthetic construct
  source 1..15: mol_type = other DNA
ggtatgcttttgacc

SEQ ID NO: 21432 - DNA, 15 bp, synthetic construct
  source 1..15: mol_type = other DNA
gacagaggtatgctt

SEQ ID NO: 21433 - DNA, 15 bp, synthetic construct
  source 1..15: mol_type = other DNA
agacagaggtatgct

SEQ ID NO: 21434 - DNA, 15 bp, synthetic construct
  source 1..15: mol_type = other DNA
gcgggcaaagacaga

SEQ ID NO: 21435 - DNA, 15 bp, synthetic construct
  source 1..15: mol_type = other DNA
agcgggcaaagacag

SEQ ID NO: 21436 - DNA, 15 bp, synthetic construct
  source 1..15: mol_type = other DNA
ggaagcgggcaaaga

SEQ ID NO: 21437 - DNA, 15 bp, synthetic construct
  source 1..15: mol_type = other DNA
caggaagcgggcaaa

SEQ ID NO: 21438 - DNA, 15 bp, synthetic construct
  source 1..15: mol_type = other DNA
ccaggaagcgggcaa

SEQ ID NO: 21439 - DNA, 15 bp, synthetic construct
  source 1..15: mol_type = other DNA
gccaggaagcgggca

SEQ ID NO: 21440 - DNA, 15 bp, synthetic construct
  source 1..15: mol_type = other DNA
agccaggaagcgggc

SEQ ID NO: 21441 - DNA, 15 bp, synthetic construct
  source 1..15: mol_type = other DNA
tagccaggaagcggg

SEQ ID NO: 21442 - DNA, 15 bp, synthetic construct
  source 1..15: mol_type = other DNA
ctagccaggaagcgg

SEQ ID NO: 21443 - DNA, 15 bp, synthetic construct
  source 1..15: mol_type = other DNA
tctagccaggaagcg

SEQ ID NO: 21444 - DNA, 15 bp, synthetic construct
  source 1..15: mol_type = other DNA
gtctagccaggaagc

SEQ ID NO: 21445 - DNA, 15 bp, synthetic construct
  source 1..15: mol_type = other DNA
ggtctagccaggaag

SEQ ID NO: 21446 - DNA, 15 bp, synthetic construct
  source 1..15: mol_type = other DNA
aggtctagccaggaa

SEQ ID NO: 21447 - DNA, 15 bp, synthetic construct
  source 1..15: mol_type = other DNA
caggtctagccagga

SEQ ID NO: 21448 - DNA, 15 bp, synthetic construct
  source 1..15: mol_type = other DNA
gcaggtctagccagg

SEQ ID NO: 21449 - DNA, 15 bp, synthetic construct
  source 1..15: mol_type = other DNA
cgcaggtctagccag

SEQ ID NO: 21450 - DNA, 15 bp, synthetic construct
  source 1..15: mol_type = other DNA
cggggtgcgcactgc

SEQ ID NO: 21451 - DNA, 15 bp, synthetic construct
  source 1..15: mol_type = other DNA
ccggggtgcgcactg

SEQ ID NO: 21452 - DNA, 15 bp, synthetic construct
  source 1..15: mol_type = other DNA
agccggggtgcgcac

SEQ ID NO: 21453 - DNA, 15 bp, synthetic construct
  source 1..15: mol_type = other DNA
cagccggggtgcgca

SEQ ID NO: 21454 - DNA, 15 bp, synthetic construct
  source 1..15: mol_type = other DNA
tcagccggggtgcgc

SEQ ID NO: 21455 - DNA, 15 bp, synthetic construct
  source 1..15: mol_type = other DNA
gtcagccggggtgcg

SEQ ID NO: 21456 - DNA, 15 bp, synthetic construct
  source 1..15: mol_type = other DNA
cgtcagccggggtgc

SEQ ID NO: 21457 - DNA, 15 bp, synthetic construct
  source 1..15: mol_type = other DNA
acgtcagccggggtg

SEQ ID NO: 21458 - DNA, 15 bp, synthetic construct
  source 1..15: mol_type = other DNA
cacgtcagccggggt

SEQ ID NO: 21459 - DNA, 15 bp, synthetic construct
  source 1..15: mol_type = other DNA
gcacgtcagccgggg

SEQ ID NO: 21460 - DNA, 15 bp, synthetic construct
  source 1..15: mol_type = other DNA
tgcacgtcagccggg

SEQ ID NO: 21461 - DNA, 15 bp, synthetic construct
  source 1..15: mol_type = other DNA
ttgcacgtcagccgg

SEQ ID NO: 21462 - DNA, 15 bp, synthetic construct
  source 1..15: mol_type = other DNA
cttgcacgtcagccg

SEQ ID NO: 21463 - DNA, 15 bp, synthetic construct
  source 1..15: mol_type = other DNA
ccttgcacgtcagcc

SEQ ID NO: 21464 - DNA, 15 bp, synthetic construct
  source 1..15: mol_type = other DNA
cccttgcacgtcagc

SEQ ID NO: 21465 - DNA, 15 bp, synthetic construct
  source 1..15: mol_type = other DNA
tcccttgcacgtcag

SEQ ID NO: 21466 - DNA, 15 bp, synthetic construct
  source 1..15: mol_type = other DNA
ctcccttgcacgtca

SEQ ID NO: 21467 - DNA, 15 bp, synthetic construct
  source 1..15: mol_type = other DNA
gctcccttgcacgtc

SEQ ID NO: 21468 - DNA, 15 bp, synthetic construct
  source 1..15: mol_type = other DNA
agctcccttgcacgt

SEQ ID NO: 21469 - DNA, 15 bp, synthetic construct
  source 1..15: mol_type = other DNA
gagctcccttgcacg

SEQ ID NO: 21470 - DNA, 15 bp, synthetic construct
  source 1..15: mol_type = other DNA
cgagctcccttgcac

SEQ ID NO: 21471 - DNA, 15 bp, synthetic construct
  source 1..15: mol_type = other DNA
gcgagctcccttgca

SEQ ID NO: 21472 - DNA, 15 bp, synthetic construct
  source 1..15: mol_type = other DNA
agcgagctcccttgc

SEQ ID NO: 21473 - DNA, 15 bp, synthetic construct
  source 1..15: mol_type = other DNA
cagcgagctcccttg

SEQ ID NO: 21474 - DNA, 15 bp, synthetic construct
  source 1..15: mol_type = other DNA
ccagcgagctccctt

SEQ ID NO: 21475 - DNA, 15 bp, synthetic construct
  source 1..15: mol_type = other DNA
aggccagcgagctcc

SEQ ID NO: 21476 - DNA, 15 bp, synthetic construct
  source 1..15: mol_type = other DNA
gaggccagcgagctc

SEQ ID NO: 21477 - DNA, 15 bp, synthetic construct
  source 1..15: mol_type = other DNA
agaggccagcgagct

SEQ ID NO: 21478 - DNA, 15 bp, synthetic construct
  source 1..15: mol_type = other DNA
gagaggccagcgagc

SEQ ID NO: 21479 - DNA, 15 bp, synthetic construct
  source 1..15: mol_type = other DNA
agagaggccagcgag

SEQ ID NO: 21480 - DNA, 15 bp, synthetic construct
  source 1..15: mol_type = other DNA
cagagaggccagcga

SEQ ID NO: 21481 - DNA, 15 bp, synthetic construct
  source 1..15: mol_type = other DNA
acagagaggccagcg

SEQ ID NO: 21482 - DNA, 15 bp, synthetic construct
  source 1..15: mol_type = other DNA
cacagagaggccagc

SEQ ID NO: 21483 - DNA, 15 bp, synthetic construct
  source 1..15: mol_type = other DNA
gcacagagaggccag

SEQ ID NO: 21484 - DNA, 15 bp, synthetic construct
  source 1..15: mol_type = other DNA
ggcacagagaggcca

SEQ ID NO: 21485 - DNA, 15 bp, synthetic construct
  source 1..15: mol_type = other DNA
gggcacagagaggcc

SEQ ID NO: 21486 - DNA, 15 bp, synthetic construct
  source 1..15: mol_type = other DNA
agggcacagagaggc

SEQ ID NO: 21487 - DNA, 15 bp, synthetic construct
  source 1..15: mol_type = other DNA
aagggcacagagagg

SEQ ID NO: 21488 - DNA, 15 bp, synthetic construct
  source 1..15: mol_type = other DNA
gccagaatttcacgg

SEQ ID NO: 21489 - DNA, 15 bp, synthetic construct
  source 1..15: mol_type = other DNA
agacattcagccaga

SEQ ID NO: 21490 - DNA, 15 bp, synthetic construct
  source 1..15: mol_type = other DNA
gagacattcagccag

SEQ ID NO: 21491 - DNA, 15 bp, synthetic construct
  source 1..15: mol_type = other DNA
ggagacattcagcca

SEQ ID NO: 21492 - DNA, 15 bp, synthetic construct
  source 1..15: mol_type = other DNA
gggagacattcagcc

SEQ ID NO: 21493 - DNA, 15 bp, synthetic construct
  source 1..15: mol_type = other DNA
ggggagacattcagc

SEQ ID NO: 21494 - DNA, 15 bp, synthetic construct
  source 1..15: mol_type = other DNA
gggggagacattcag

SEQ ID NO: 21495 - DNA, 15 bp, synthetic construct
  source 1..15: mol_type = other DNA
ggggggagacattca

SEQ ID NO: 21496 - DNA, 15 bp, synthetic construct
  source 1..15: mol_type = other DNA
tggggggagacattc

SEQ ID NO: 21497 - DNA, 15 bp, synthetic construct
  source 1..15: mol_type = other DNA
gtggggggagacatt

SEQ ID NO: 21498 - DNA, 15 bp, synthetic construct
  source 1..15: mol_type = other DNA
ggtggggggagacat

SEQ ID NO: 21499 - DNA, 15 bp, synthetic construct
  source 1..15: mol_type = other DNA
aggtggggggagaca

SEQ ID NO: 21500 - DNA, 15 bp, synthetic construct
  source 1..15: mol_type = other DNA
aaggtggggggagac

SEQ ID NO: 21501 - DNA, 15 bp, synthetic construct
  source 1..15: mol_type = other DNA
gaaggtggggggaga

SEQ ID NO: 21502 - DNA, 15 bp, synthetic construct
  source 1..15: mol_type = other DNA
ggaaggtggggggag

SEQ ID NO: 21503 - DNA, 15 bp, synthetic construct
  source 1..15: mol_type = other DNA
cggaaggtgggggga

SEQ ID NO: 21504 - DNA, 15 bp, synthetic construct
  source 1..15: mol_type = other DNA
tcggaaggtgggggg

SEQ ID NO: 21505 - DNA, 15 bp, synthetic construct
  source 1..15: mol_type = other DNA
gtcggaaggtggggg

SEQ ID NO: 21506 - DNA, 15 bp, synthetic construct
  source 1..15: mol_type = other DNA
cgtcggaaggtgggg

SEQ ID NO: 21507 - DNA, 15 bp, synthetic construct
  source 1..15: mol_type = other DNA
gcgtcggaaggtggg

SEQ ID NO: 21508 - DNA, 15 bp, synthetic construct
  source 1..15: mol_type = other DNA
agcgtcggaaggtgg

SEQ ID NO: 21509 - DNA, 15 bp, synthetic construct
  source 1..15: mol_type = other DNA
cagcgtcggaaggtg

SEQ ID NO: 21510 - DNA, 15 bp, synthetic construct
  source 1..15: mol_type = other DNA
acagcgtcggaaggt

SEQ ID NO: 21511 - DNA, 15 bp, synthetic construct
  source 1..15: mol_type = other DNA
gacagcgtcggaagg

SEQ ID NO: 21512 - DNA, 15 bp, synthetic construct
  source 1..15: mol_type = other DNA
agacagcgtcggaag

SEQ ID NO: 21513 - DNA, 15 bp, synthetic construct
  source 1..15: mol_type = other DNA
ctagacagcgtcgga

SEQ ID NO: 21514 - DNA, 15 bp, synthetic construct
  source 1..15: mol_type = other DNA
cctagacagcgtcgg

SEQ ID NO: 21515 - DNA, 15 bp, synthetic construct
  source 1..15: mol_type = other DNA
gcctagacagcgtcg

SEQ ID NO: 21516 - DNA, 15 bp, synthetic construct
  source 1..15: mol_type = other DNA
tgcctagacagcgtc

SEQ ID NO: 21517 - DNA, 15 bp, synthetic construct
  source 1..15: mol_type = other DNA
ttgcctagacagcgt

SEQ ID NO: 21518 - DNA, 15 bp, synthetic construct
  source 1..15: mol_type = other DNA
tttgcctagacagcg

SEQ ID NO: 21519 - DNA, 15 bp, synthetic construct
  source 1..15: mol_type = other DNA
gtttgcctagacagc

SEQ ID NO: 21520 - DNA, 15 bp, synthetic construct
  source 1..15: mol_type = other DNA
ggtttgcctagacag

SEQ ID NO: 21521 - DNA, 15 bp, synthetic construct
  source 1..15: mol_type = other DNA
aggtttgcctagaca

SEQ ID NO: 21522 - DNA, 15 bp, synthetic construct
  source 1..15: mol_type = other DNA
caggtttgcctagac

SEQ ID NO: 21523 - DNA, 15 bp, synthetic construct
  source 1..15: mol_type = other DNA
ccaggtttgcctaga

SEQ ID NO: 21524 - DNA, 15 bp, synthetic construct
  source 1..15: mol_type = other DNA
tccaggtttgcctag

SEQ ID NO: 21525 - DNA, 15 bp, synthetic construct
  source 1..15: mol_type = other DNA
atccaggtttgccta

SEQ ID NO: 21526 - DNA, 15 bp, synthetic construct
  source 1..15: mol_type = other DNA
aatccaggtttgcct

SEQ ID NO: 21527 - DNA, 15 bp, synthetic construct
  source 1..15: mol_type = other DNA
taatccaggtttgcc

SEQ ID NO: 21528 - DNA, 15 bp, synthetic construct
  source 1..15: mol_type = other DNA
ctaatccaggtttgc

SEQ ID NO: 21529 - DNA, 15 bp, synthetic construct
  source 1..15: mol_type = other DNA
tcatccaggagatgt

SEQ ID NO: 21530 - DNA, 15 bp, synthetic construct
  source 1..15: mol_type = other DNA
gggagggggcatttt

SEQ ID NO: 21531 - DNA, 15 bp, synthetic construct
  source 1..15: mol_type = other DNA
agggagggggcattt

SEQ ID NO: 21532 - DNA, 15 bp, synthetic construct
  source 1..15: mol_type = other DNA
cagggagggggcatt

SEQ ID NO: 21533 - DNA, 15 bp, synthetic construct
  source 1..15: mol_type = other DNA
acagggagggggcat

SEQ ID NO: 21534 - DNA, 15 bp, synthetic construct
  source 1..15: mol_type = other DNA
cacagggagggggca

SEQ ID NO: 21535 - DNA, 15 bp, synthetic construct
  source 1..15: mol_type = other DNA
ccacagggagggggc

SEQ ID NO: 21536 - DNA, 15 bp, synthetic construct
  source 1..15: mol_type = other DNA
tccacagggaggggg

SEQ ID NO: 21537 - DNA, 15 bp, synthetic construct
  source 1..15: mol_type = other DNA
atccacagggagggg

SEQ ID NO: 21538 - DNA, 15 bp, synthetic construct
  source 1..15: mol_type = other DNA
gatccacagggaggg

SEQ ID NO: 21539 - DNA, 15 bp, synthetic construct
  source 1..15: mol_type = other DNA
ggatccacagggagg

SEQ ID NO: 21540 - DNA, 15 bp, synthetic construct
  source 1..15: mol_type = other DNA
aggatccacagggag

SEQ ID NO: 21541 - DNA, 15 bp, synthetic construct
  source 1..15: mol_type = other DNA
taggatccacaggga

SEQ ID NO: 21542 - DNA, 15 bp, synthetic construct
  source 1..15: mol_type = other DNA
ataggatccacaggg

SEQ ID NO: 21543 - DNA, 15 bp, synthetic construct
  source 1..15: mol_type = other DNA
tgcactcatcacaca

SEQ ID NO: 21544 - DNA, 15 bp, synthetic construct
  source 1..15: mol_type = other DNA
ctgcactcatcacac

SEQ ID NO: 21545 - DNA, 15 bp, synthetic construct
  source 1..15: mol_type = other DNA
tctgcactcatcaca

SEQ ID NO: 21546 - DNA, 15 bp, synthetic construct
  source 1..15: mol_type = other DNA
ctctgcactcatcac

SEQ ID NO: 21547 - DNA, 15 bp, synthetic construct
  source 1..15: mol_type = other DNA
tctctgcactcatca

SEQ ID NO: 21548 - DNA, 15 bp, synthetic construct
  source 1..15: mol_type = other DNA
atctctgcactcatc

SEQ ID NO: 21549 - DNA, 15 bp, synthetic construct
  source 1..15: mol_type = other DNA
tatctctgcactcat

SEQ ID NO: 21550 - DNA, 15 bp, synthetic construct
  source 1..15: mol_type = other DNA
atatctctgcactca

SEQ ID NO: 21551 - DNA, 15 bp, synthetic construct
  source 1..15: mol_type = other DNA
catatctctgcactc

SEQ ID NO: 21552 - DNA, 15 bp, synthetic construct
  source 1..15: mol_type = other DNA
gtgacatatctctgc

SEQ ID NO: 21553 - DNA, 15 bp, synthetic construct
  source 1..15: mol_type = other DNA
gctttttctacaggg

SEQ ID NO: 21554 - DNA, 15 bp, synthetic construct
  source 1..15: mol_type = other DNA
ggctttttctacagg

SEQ ID NO: 21555 - DNA, 15 bp, synthetic construct
  source 1..15: mol_type = other DNA
tttcaggctttttct

SEQ ID NO: 21556 - DNA, 15 bp, synthetic construct
  source 1..15: mol_type = other DNA
gcactgatcaccgaa

SEQ ID NO: 21557 - DNA, 15 bp, synthetic construct
  source 1..15: mol_type = other DNA
tgcactgatcaccga

SEQ ID NO: 21558 - DNA, 15 bp, synthetic construct
  source 1..15: mol_type = other DNA
ctgcactgatcaccg

SEQ ID NO: 21559 - DNA, 15 bp, synthetic construct
  source 1..15: mol_type = other DNA
tctgcactgatcacc

SEQ ID NO: 21560 - DNA, 15 bp, synthetic construct
  source 1..15: mol_type = other DNA
catctgcactgatca

SEQ ID NO: 21561 - DNA, 15 bp, synthetic construct
  source 1..15: mol_type = other DNA
acacatctgcactga

SEQ ID NO: 21562 - DNA, 15 bp, synthetic construct
  source 1..15: mol_type = other DNA
ggttcagtctactat

SEQ ID NO: 21563 - DNA, 15 bp, synthetic construct
  source 1..15: mol_type = other DNA
aggttcagtctacta

SEQ ID NO: 21564 - DNA, 15 bp, synthetic construct
  source 1..15: mol_type = other DNA
taggttcagtctact

SEQ ID NO: 21565 - DNA, 15 bp, synthetic construct
  source 1..15: mol_type = other DNA
ctaggttcagtctac

SEQ ID NO: 21566 - DNA, 15 bp, synthetic construct
  source 1..15: mol_type = other DNA
tctaggttcagtcta

SEQ ID NO: 21567 - DNA, 15 bp, synthetic construct
  source 1..15: mol_type = other DNA
ctctaggttcagtct

SEQ ID NO: 21568 - DNA, 15 bp, synthetic construct
  source 1..15: mol_type = other DNA
tctctaggttcagtc

SEQ ID NO: 21569 - DNA, 15 bp, synthetic construct
  source 1..15: mol_type = other DNA
ttctctaggttcagt

SEQ ID NO: 21570 - DNA, 15 bp, synthetic construct
  source 1..15: mol_type = other DNA
cattctctaggttca

SEQ ID NO: 21571 - DNA, 15 bp, synthetic construct
  source 1..15: mol_type = other DNA
ccattctctaggttc

SEQ ID NO: 21572 - DNA, 15 bp, synthetic construct
  source 1..15: mol_type = other DNA
accattctctaggtt

SEQ ID NO: 21573 - DNA, 15 bp, synthetic construct
  source 1..15: mol_type = other DNA
ctacactgatcacct

SEQ ID NO: 21574 - DNA, 15 bp, synthetic construct
  source 1..15: mol_type = other DNA
gctctgtctacacga

SEQ ID NO: 21575 - DNA, 15 bp, synthetic construct
  source 1..15: mol_type = other DNA
ggctctgtctacacg

SEQ ID NO: 21576 - DNA, 15 bp, synthetic construct
  source 1..15: mol_type = other DNA
aggctctgtctacac

SEQ ID NO: 21577 - DNA, 15 bp, synthetic construct
  source 1..15: mol_type = other DNA
taggctctgtctaca

SEQ ID NO: 21578 - DNA, 15 bp, synthetic construct
  source 1..15: mol_type = other DNA
ctaggctctgtctac

SEQ ID NO: 21579 - DNA, 15 bp, synthetic construct
  source 1..15: mol_type = other DNA
tctaggctctgtcta

SEQ ID NO: 21580 - DNA, 15 bp, synthetic construct
  source 1..15: mol_type = other DNA
gtctaggctctgtct

SEQ ID NO: 21581 - DNA, 15 bp, synthetic construct
  source 1..15: mol_type = other DNA
tgtctaggctctgtc

SEQ ID NO: 21582 - DNA, 15 bp, synthetic construct
  source 1..15: mol_type = other DNA
ttgtctaggctctgt

SEQ ID NO: 21583 - DNA, 15 bp, synthetic construct
  source 1..15: mol_type = other DNA
attgtctaggctctg

SEQ ID NO: 21584 - DNA, 15 bp, synthetic construct
  source 1..15: mol_type = other DNA
aattgtctaggctct

SEQ ID NO: 21585 - DNA, 15 bp, synthetic construct
  source 1..15: mol_type = other DNA
gcactgatcactagg

SEQ ID NO: 21586 - DNA, 15 bp, synthetic construct
  source 1..15: mol_type = other DNA
cctgcactgatcact

SEQ ID NO: 21587 - DNA, 15 bp, synthetic construct
  source 1..15: mol_type = other DNA
ccctgcactgatcac

SEQ ID NO: 21588 - DNA, 15 bp, synthetic construct
  source 1..15: mol_type = other DNA
tccctgcactgatca

SEQ ID NO: 21589 - DNA, 15 bp, synthetic construct
  source 1..15: mol_type = other DNA
atccctgcactgatc

SEQ ID NO: 21590 - DNA, 15 bp, synthetic construct
  source 1..15: mol_type = other DNA
tatccctgcactgat

SEQ ID NO: 21591 - DNA, 15 bp, synthetic construct
  source 1..15: mol_type = other DNA
ttatccctgcactga

SEQ ID NO: 21592 - DNA, 15 bp, synthetic construct
  source 1..15: mol_type = other DNA
cttatccctgcactg

SEQ ID NO: 21593 - DNA, 15 bp, synthetic construct
  source 1..15: mol_type = other DNA
acttatccctgcact

SEQ ID NO: 21594 - DNA, 15 bp, synthetic construct
  source 1..15: mol_type = other DNA
gacttatccctgcac

SEQ ID NO: 21595 - DNA, 15 bp, synthetic construct
  source 1..15: mol_type = other DNA
tgacttatccctgca

SEQ ID NO: 21596 - DNA, 15 bp, synthetic construct
  source 1..15: mol_type = other DNA
atgacttatccctgc

SEQ ID NO: 21597 - DNA, 15 bp, synthetic construct
  source 1..15: mol_type = other DNA
ggaggctttatgact

SEQ ID NO: 21598 - DNA, 15 bp, synthetic construct
  source 1..15: mol_type = other DNA
ctacaggaggcttta

SEQ ID NO: 21599 - DNA, 15 bp, synthetic construct
  source 1..15: mol_type = other DNA
cctacaggaggcttt

SEQ ID NO: 21600 - DNA, 15 bp, synthetic construct
  source 1..15: mol_type = other DNA
gcctacaggaggctt

SEQ ID NO: 21601 - DNA, 15 bp, synthetic construct
  source 1..15: mol_type = other DNA
tgcctacaggaggct

SEQ ID NO: 21602 - DNA, 15 bp, synthetic construct
  source 1..15: mol_type = other DNA
ctgcctacaggaggc

SEQ ID NO: 21603 - DNA, 15 bp, synthetic construct
  source 1..15: mol_type = other DNA
tctgcctacaggagg

SEQ ID NO: 21604 - DNA, 15 bp, synthetic construct
  source 1..15: mol_type = other DNA
ctctgcctacaggag

SEQ ID NO: 21605 - DNA, 15 bp, synthetic construct
  source 1..15: mol_type = other DNA
actctgcctacagga

SEQ ID NO: 21606 - DNA, 15 bp, synthetic construct
  source 1..15: mol_type = other DNA
cactctgcctacagg

SEQ ID NO: 21607 - DNA, 15 bp, synthetic construct
  source 1..15: mol_type = other DNA
acactctgcctacag

SEQ ID NO: 21608 - DNA, 15 bp, synthetic construct
  source 1..15: mol_type = other DNA
tacactctgcctaca

SEQ ID NO: 21609 - DNA, 15 bp, synthetic construct
  source 1..15: mol_type = other DNA
ctacactctgcctac

SEQ ID NO: 21610 - DNA, 15 bp, synthetic construct
  source 1..15: mol_type = other DNA
cctacactctgccta

SEQ ID NO: 21611 - DNA, 15 bp, synthetic construct
  source 1..15: mol_type = other DNA
gcctacactctgcct

SEQ ID NO: 21612 - DNA, 15 bp, synthetic construct
  source 1..15: mol_type = other DNA
tgcctacactctgcc

SEQ ID NO: 21613 - DNA, 15 bp, synthetic construct
  source 1..15: mol_type = other DNA
ttgcctacactctgc

SEQ ID NO: 21614 - DNA, 15 bp, synthetic construct
  source 1..15: mol_type = other DNA
cttgcctacactctg

SEQ ID NO: 21615 - DNA, 15 bp, synthetic construct
  source 1..15: mol_type = other DNA
acttgcctacactct

SEQ ID NO: 21616 - DNA, 15 bp, synthetic construct
  source 1..15: mol_type = other DNA
cacttgcctacactc

SEQ ID NO: 21617 - DNA, 15 bp, synthetic construct
  source 1..15: mol_type = other DNA
acacttgcctacact

SEQ ID NO: 21618 - DNA, 15 bp, synthetic construct
  source 1..15: mol_type = other DNA
ggaacacttgcctac

SEQ ID NO: 21619 - DNA, 15 bp, synthetic construct
  source 1..15: mol_type = other DNA
gggaacacttgccta

SEQ ID NO: 21620 - DNA, 15 bp, synthetic construct
  source 1..15: mol_type = other DNA
agggaacacttgcct

SEQ ID NO: 21621 - DNA, 15 bp, synthetic construct
  source 1..15: mol_type = other DNA
gagggaacacttgcc

SEQ ID NO: 21622 - DNA, 15 bp, synthetic construct
  source 1..15: mol_type = other DNA
ggagggaacacttgc

SEQ ID NO: 21623 - DNA, 15 bp, synthetic construct
  source 1..15: mol_type = other DNA
gggagggaacacttg

SEQ ID NO: 21624 - DNA, 15 bp, synthetic construct
  source 1..15: mol_type = other DNA
agggagggaacactt

SEQ ID NO: 21625 - DNA, 15 bp, synthetic construct
  source 1..15: mol_type = other DNA
cagggagggaacact

SEQ ID NO: 21626 - DNA, 15 bp, synthetic construct
  source 1..15: mol_type = other DNA
ccagggagggaacac

SEQ ID NO: 21627 - DNA, 15 bp, synthetic construct
  source 1..15: mol_type = other DNA
cccagggagggaaca

SEQ ID NO: 21628 - DNA, 15 bp, synthetic construct
  source 1..15: mol_type = other DNA
gcccagggagggaac

SEQ ID NO: 21629 - DNA, 15 bp, synthetic construct
  source 1..15: mol_type = other DNA
agcccagggagggaa

SEQ ID NO: 21630 - DNA, 15 bp, synthetic construct
  source 1..15: mol_type = other DNA
cagcccagggaggga

SEQ ID NO: 21631 - DNA, 15 bp, synthetic construct
  source 1..15: mol_type = other DNA
tcagcccagggaggg

SEQ ID NO: 21632 - DNA, 15 bp, synthetic construct
  source 1..15: mol_type = other DNA
atcagcccagggagg

SEQ ID NO: 21633 - DNA, 15 bp, synthetic construct
  source 1..15: mol_type = other DNA
gatcagcccagggag

SEQ ID NO: 21634 - DNA, 15 bp, synthetic construct
  source 1..15: mol_type = other DNA
tgatcagcccaggga

SEQ ID NO: 21635 - DNA, 15 bp, synthetic construct
  source 1..15: mol_type = other DNA
ctgatcagcccaggg

SEQ ID NO: 21636 - DNA, 15 bp, synthetic construct
  source 1..15: mol_type = other DNA
actgatcagcccagg

SEQ ID NO: 21637 - DNA, 15 bp, synthetic construct
  source 1..15: mol_type = other DNA
cactgatcagcccag

SEQ ID NO: 21638 - DNA, 15 bp, synthetic construct
  source 1..15: mol_type = other DNA
gcactgatcagccca

SEQ ID NO: 21639 - DNA, 15 bp, synthetic construct
  source 1..15: mol_type = other DNA
tgcactgatcagccc

SEQ ID NO: 21640 - DNA, 15 bp, synthetic construct
  source 1..15: mol_type = other DNA
ctgcactgatcagcc

SEQ ID NO: 21641 - DNA, 15 bp, synthetic construct
  source 1..15: mol_type = other DNA
tctgcactgatcagc

SEQ ID NO: 21642 - DNA, 15 bp, synthetic construct
  source 1..15: mol_type = other DNA
ctctgcactgatcag

SEQ ID NO: 21643 - DNA, 15 bp, synthetic construct
  source 1..15: mol_type = other DNA
tctctgcactgatca

SEQ ID NO: 21644 - DNA, 15 bp, synthetic construct
  source 1..15: mol_type = other DNA
atctctgcactgatc

SEQ ID NO: 21645 - DNA, 15 bp, synthetic construct
  source 1..15: mol_type = other DNA
gggctttgtgagata

SEQ ID NO: 21646 - DNA, 15 bp, synthetic construct
  source 1..15: mol_type = other DNA
ggggctttgtgagat

SEQ ID NO: 21647 - DNA, 15 bp, synthetic construct
  source 1..15: mol_type = other DNA
aggggctttgtgaga

SEQ ID NO: 21648 - DNA, 15 bp, synthetic construct
  source 1..15: mol_type = other DNA
taggggctttgtgag

SEQ ID NO: 21649 - DNA, 15 bp, synthetic construct
  source 1..15: mol_type = other DNA
ataggggctttgtga

SEQ ID NO: 21650 - DNA, 15 bp, synthetic construct
  source 1..15: mol_type = other DNA
tataggggctttgtg

SEQ ID NO: 21651 - DNA, 15 bp, synthetic construct
  source 1..15: mol_type = other DNA
ttataggggctttgt

SEQ ID NO: 21652 - DNA, 15 bp, synthetic construct
  source 1..15: mol_type = other DNA
gcttataggggcttt

SEQ ID NO: 21653 - DNA, 15 bp, synthetic construct
  source 1..15: mol_type = other DNA
ggcttataggggctt

SEQ ID NO: 21654 - DNA, 15 bp, synthetic construct
  source 1..15: mol_type = other DNA
tggcttataggggct

SEQ ID NO: 21655 - DNA, 15 bp, synthetic construct
  source 1..15: mol_type = other DNA
ttggcttataggggc

SEQ ID NO: 21656 - DNA, 15 bp, synthetic construct
  source 1..15: mol_type = other DNA
tttggcttatagggg

SEQ ID NO: 21657 - DNA, 15 bp, synthetic construct
  source 1..15: mol_type = other DNA
gtttggcttataggg

SEQ ID NO: 21658 - DNA, 15 bp, synthetic construct
  source 1..15: mol_type = other DNA
ggtttggcttatagg

SEQ ID NO: 21659 - DNA, 15 bp, synthetic construct
  source 1..15: mol_type = other DNA
gtcaaggtttggctt

SEQ ID NO: 21660 - DNA, 15 bp, synthetic construct
  source 1..15: mol_type = other DNA
tgtcaaggtttggct

SEQ ID NO: 21661 - DNA, 15 bp, synthetic construct
  source 1..15: mol_type = other DNA
ttgtcaaggtttggc

SEQ ID NO: 21662 - DNA, 15 bp, synthetic construct
  source 1..15: mol_type = other DNA
ccttgtcaaggtttg

SEQ ID NO: 21663 - DNA, 15 bp, synthetic construct
  source 1..15: mol_type = other DNA
cccttgtcaaggttt

SEQ ID NO: 21664 - DNA, 15 bp, synthetic construct
  source 1..15: mol_type = other DNA
acccttgtcaaggtt

SEQ ID NO: 21665 - DNA, 15 bp, synthetic construct
  source 1..15: mol_type = other DNA
aacccttgtcaaggt

SEQ ID NO: 21666 - DNA, 15 bp, synthetic construct
  source 1..15: mol_type = other DNA
atgtaacccttgtca

SEQ ID NO: 21667 - DNA, 15 bp, synthetic construct
  source 1..15: mol_type = other DNA
gatgtaacccttgtc

SEQ ID NO: 21668 - DNA, 15 bp, synthetic construct
  source 1..15: mol_type = other DNA
ggtgatgtaaccctt

SEQ ID NO: 21669 - DNA, 15 bp, synthetic construct
  source 1..15: mol_type = other DNA
aggtgatgtaaccct

SEQ ID NO: 21670 - DNA, 15 bp, synthetic construct
  source 1..15: mol_type = other DNA
caggtgatgtaaccc

SEQ ID NO: 21671 - DNA, 15 bp, synthetic construct
  source 1..15: mol_type = other DNA
tccactgctcaaaca

SEQ ID NO: 21672 - DNA, 15 bp, synthetic construct
  source 1..15: mol_type = other DNA
atttccactgctcaa

SEQ ID NO: 21673 - DNA, 15 bp, synthetic construct
  source 1..15: mol_type = other DNA
tatttccactgctca

SEQ ID NO: 21674 - DNA, 15 bp, synthetic construct
  source 1..15: mol_type = other DNA
atatttccactgctc

SEQ ID NO: 21675 - DNA, 15 bp, synthetic construct
  source 1..15: mol_type = other DNA
ggggctttgtgatat

SEQ ID NO: 21676 - DNA, 15 bp, synthetic construct
  source 1..15: mol_type = other DNA
gggggctttgtgata

SEQ ID NO: 21677 - DNA, 15 bp, synthetic construct
  source 1..15: mol_type = other DNA
agggggctttgtgat

SEQ ID NO: 21678 - DNA, 15 bp, synthetic construct
  source 1..15: mol_type = other DNA
cagggggctttgtga

SEQ ID NO: 21679 - DNA, 15 bp, synthetic construct
  source 1..15: mol_type = other DNA
acagggggctttgtg

SEQ ID NO: 21680 - DNA, 15 bp, synthetic construct
  source 1..15: mol_type = other DNA
tacagggggctttgt

SEQ ID NO: 21681 - DNA, 15 bp, synthetic construct
  source 1..15: mol_type = other DNA
ctacagggggctttg

SEQ ID NO: 21682 - DNA, 15 bp, synthetic construct
  source 1..15: mol_type = other DNA
tctacagggggcttt

SEQ ID NO: 21683 - DNA, 15 bp, synthetic construct
  source 1..15: mol_type = other DNA
gtctacagggggctt

SEQ ID NO: 21684 - DNA, 15 bp, synthetic construct
  source 1..15: mol_type = other DNA
tgtctacagggggct

SEQ ID NO: 21685 - DNA, 15 bp, synthetic construct
  source 1..15: mol_type = other DNA
ttgtctacagggggc

SEQ ID NO: 21686 - DNA, 15 bp, synthetic construct
  source 1..15: mol_type = other DNA
tttgtctacaggggg

SEQ ID NO: 21687 - DNA, 15 bp, synthetic construct
  source 1..15: mol_type = other DNA
ctttgtctacagggg

SEQ ID NO: 21688 - DNA, 15 bp, synthetic construct
  source 1..15: mol_type = other DNA
gctttgtctacaggg

SEQ ID NO: 21689 - DNA, 15 bp, synthetic construct
  source 1..15: mol_type = other DNA
ggctttgtctacagg

SEQ ID NO: 21690 - DNA, 15 bp, synthetic construct
  source 1..15: mol_type = other DNA
gggctttgtctacag

SEQ ID NO: 21691 - DNA, 15 bp, synthetic construct
  source 1..15: mol_type = other DNA
tgggctttgtctaca

SEQ ID NO: 21692 - DNA, 15 bp, synthetic construct
  source 1..15: mol_type = other DNA
ctgggctttgtctac

SEQ ID NO: 21693 - DNA, 15 bp, synthetic construct
  source 1..15: mol_type = other DNA
tctgggctttgtcta

SEQ ID NO: 21694 - DNA, 15 bp, synthetic construct
  source 1..15: mol_type = other DNA
gtctgggctttgtct

SEQ ID NO: 21695 - DNA, 15 bp, synthetic construct
  source 1..15: mol_type = other DNA
tgtctgggctttgtc

SEQ ID NO: 21696 - DNA, 15 bp, synthetic construct
  source 1..15: mol_type = other DNA
ttgtctgggctttgt

SEQ ID NO: 21697 - DNA, 15 bp, synthetic construct
  source 1..15: mol_type = other DNA
attgtctgggctttg

SEQ ID NO: 21698 - DNA, 15 bp, synthetic construct
  source 1..15: mol_type = other DNA
aattgtctgggcttt

SEQ ID NO: 21699 - DNA, 15 bp, synthetic construct
  source 1..15: mol_type = other DNA
tcactcaggagatgt

SEQ ID NO: 21700 - DNA, 15 bp, synthetic construct
  source 1..15: mol_type = other DNA
gctcactcaggagat

SEQ ID NO: 21701 - DNA, 15 bp, synthetic construct
  source 1..15: mol_type = other DNA
tgctcactcaggaga

SEQ ID NO: 21702 - DNA, 15 bp, synthetic construct
  source 1..15: mol_type = other DNA
atgctcactcaggag

SEQ ID NO: 21703 - DNA, 15 bp, synthetic construct
  source 1..15: mol_type = other DNA
aatgctcactcagga

SEQ ID NO: 21704 - DNA, 15 bp, synthetic construct
  source 1..15: mol_type = other DNA
caatgctcactcagg

SEQ ID NO: 21705 - DNA, 15 bp, synthetic construct
  source 1..15: mol_type = other DNA
ccaatgctcactcag

SEQ ID NO: 21706 - DNA, 15 bp, synthetic construct
  source 1..15: mol_type = other DNA
tccaatgctcactca

SEQ ID NO: 21707 - DNA, 15 bp, synthetic construct
  source 1..15: mol_type = other DNA
ctccaatgctcactc

SEQ ID NO: 21708 - DNA, 15 bp, synthetic construct
  source 1..15: mol_type = other DNA
tctccaatgctcact

SEQ ID NO: 21709 - DNA, 15 bp, synthetic construct
  source 1..15: mol_type = other DNA
ctctccaatgctcac

SEQ ID NO: 21710 - DNA, 15 bp, synthetic construct
  source 1..15: mol_type = other DNA
tctctccaatgctca

SEQ ID NO: 21711 - DNA, 15 bp, synthetic construct
  source 1..15: mol_type = other DNA
atctctccaatgctc

SEQ ID NO: 21712 - DNA, 15 bp, synthetic construct
  source 1..15: mol_type = other DNA
gatctctccaatgct

SEQ ID NO: 21713 - DNA, 15 bp, synthetic construct
  source 1..15: mol_type = other DNA
agatctctccaatgc

SEQ ID NO: 21714 - DNA, 15 bp, synthetic construct
  source 1..15: mol_type = other DNA
gacagatctctccaa

SEQ ID NO: 21715 - DNA, 15 bp, synthetic construct
  source 1..15: mol_type = other DNA
tgacagatctctcca

SEQ ID NO: 21716 - DNA, 15 bp, synthetic construct
  source 1..15: mol_type = other DNA
gtgacagatctctcc

SEQ ID NO: 21717 - DNA, 15 bp, synthetic construct
  source 1..15: mol_type = other DNA
ggcattgtgacagat

SEQ ID NO: 21718 - DNA, 15 bp, synthetic construct
  source 1..15: mol_type = other DNA
gggcattgtgacaga

SEQ ID NO: 21719 - DNA, 15 bp, synthetic construct
  source 1..15: mol_type = other DNA
ggggcattgtgacag

SEQ ID NO: 21720 - DNA, 15 bp, synthetic construct
  source 1..15: mol_type = other DNA
aggggcattgtgaca

SEQ ID NO: 21721 - DNA, 15 bp, synthetic construct
  source 1..15: mol_type = other DNA
caggggcattgtgac

SEQ ID NO: 21722 - DNA, 15 bp, synthetic construct
  source 1..15: mol_type = other DNA
acaggggcattgtga

SEQ ID NO: 21723 - DNA, 15 bp, synthetic construct
  source 1..15: mol_type = other DNA
tacaggggcattgtg

SEQ ID NO: 21724 - DNA, 15 bp, synthetic construct
  source 1..15: mol_type = other DNA
ctacaggggcattgt

SEQ ID NO: 21725 - DNA, 15 bp, synthetic construct
  source 1..15: mol_type = other DNA
cctacaggggcattg

SEQ ID NO: 21726 - DNA, 15 bp, synthetic construct
  source 1..15: mol_type = other DNA
gcctacaggggcatt

SEQ ID NO: 21727 - DNA, 15 bp, synthetic construct
  source 1..15: mol_type = other DNA
tgcctacaggggcat

SEQ ID NO: 21728 - DNA, 15 bp, synthetic construct
  source 1..15: mol_type = other DNA
ctgcctacaggggca

SEQ ID NO: 21729 - DNA, 15 bp, synthetic construct
  source 1..15: mol_type = other DNA
tctgcctacaggggc

SEQ ID NO: 21730 - DNA, 15 bp, synthetic construct
  source 1..15: mol_type = other DNA
ctctgcctacagggg

SEQ ID NO: 21731 - DNA, 15 bp, synthetic construct
  source 1..15: mol_type = other DNA
gctctgcctacaggg

SEQ ID NO: 21732 - DNA, 15 bp, synthetic construct
  source 1..15: mol_type = other DNA
agctctgcctacagg

SEQ ID NO: 21733 - DNA, 15 bp, synthetic construct
  source 1..15: mol_type = other DNA
aagctctgcctacag

SEQ ID NO: 21734 - DNA, 15 bp, synthetic construct
  source 1..15: mol_type = other DNA
taagctctgcctaca

SEQ ID NO: 21735 - DNA, 15 bp, synthetic construct
  source 1..15: mol_type = other DNA
ctaagctctgcctac

SEQ ID NO: 21736 - DNA, 15 bp, synthetic construct
  source 1..15: mol_type = other DNA
tctaagctctgccta

SEQ ID NO: 21737 - DNA, 15 bp, synthetic construct
  source 1..15: mol_type = other DNA
gtctaagctctgcct

SEQ ID NO: 21738 - DNA, 15 bp, synthetic construct
  source 1..15: mol_type = other DNA
tgtctaagctctgcc

SEQ ID NO: 21739 - DNA, 15 bp, synthetic construct
  source 1..15: mol_type = other DNA
ttgtctaagctctgc

SEQ ID NO: 21740 - DNA, 15 bp, synthetic construct
  source 1..15: mol_type = other DNA
cccaggtgatgtaac

SEQ ID NO: 21741 - DNA, 15 bp, synthetic construct
  source 1..15: mol_type = other DNA
acccaggtgatgtaa

SEQ ID NO: 21742 - DNA, 15 bp, synthetic construct
  source 1..15: mol_type = other DNA
cacccaggtgatgta

SEQ ID NO: 21743 - DNA, 15 bp, synthetic construct
  source 1..15: mol_type = other DNA
tcacccaggtgatgt

SEQ ID NO: 21744 - DNA, 15 bp, synthetic construct
  source 1..15: mol_type = other DNA
atcacccaggtgatg

SEQ ID NO: 21745 - DNA, 15 bp, synthetic construct
  source 1..15: mol_type = other DNA
gatcacccaggtgat

SEQ ID NO: 21746 - DNA, 15 bp, synthetic construct
  source 1..15: mol_type = other DNA
tgatcacccaggtga

SEQ ID NO: 21747 - DNA, 15 bp, synthetic construct
  source 1..15: mol_type = other DNA
ctgatcacccaggtg

SEQ ID NO: 21748 - DNA, 15 bp, synthetic construct
  source 1..15: mol_type = other DNA
actgatcacccaggt

SEQ ID NO: 21749 - DNA, 15 bp, synthetic construct
  source 1..15: mol_type = other DNA
cactgatcacccagg

SEQ ID NO: 21750 - DNA, 15 bp, synthetic construct
  source 1..15: mol_type = other DNA
gcactgatcacccag

SEQ ID NO: 21751 - DNA, 15 bp, synthetic construct
  source 1..15: mol_type = other DNA
tgcactgatcaccca

SEQ ID NO: 21752 - DNA, 15 bp, synthetic construct
  source 1..15: mol_type = other DNA
ctgcactgatcaccc

SEQ ID NO: 21753 - DNA, 15 bp, synthetic construct
  source 1..15: mol_type = other DNA
ctctgcactgatcac

SEQ ID NO: 21754 - DNA, 15 bp, synthetic construct
  source 1..15: mol_type = other DNA
catctctgcactgat

SEQ ID NO: 21755 - DNA, 15 bp, synthetic construct
  source 1..15: mol_type = other DNA
acatctctgcactga

SEQ ID NO: 21756 - DNA, 15 bp, synthetic construct
  source 1..15: mol_type = other DNA
cacatctctgcactg

SEQ ID NO: 21757 - DNA, 15 bp, synthetic construct
  source 1..15: mol_type = other DNA
acacatctctgcact

SEQ ID NO: 21758 - DNA, 15 bp, synthetic construct
  source 1..15: mol_type = other DNA
gacacatctctgcac

SEQ ID NO: 21759 - DNA, 15 bp, synthetic construct
  source 1..15: mol_type = other DNA
tgacacatctctgca

SEQ ID NO: 21760 - DNA, 15 bp, synthetic construct
  source 1..15: mol_type = other DNA
aggagcgttttgaca

SEQ ID NO: 21761 - DNA, 15 bp, synthetic construct
  source 1..15: mol_type = other DNA
caggagcgttttgac

SEQ ID NO: 21762 - DNA, 15 bp, synthetic construct
  source 1..15: mol_type = other DNA
acaggagcgttttga

SEQ ID NO: 21763 - DNA, 15 bp, synthetic construct
  source 1..15: mol_type = other DNA
ctacaggagcgtttt

SEQ ID NO: 21764 - DNA, 15 bp, synthetic construct
  source 1..15: mol_type = other DNA
actacaggagcgttt

SEQ ID NO: 21765 - DNA, 15 bp, synthetic construct
  source 1..15: mol_type = other DNA
gactacaggagcgtt

SEQ ID NO: 21766 - DNA, 15 bp, synthetic construct
  source 1..15: mol_type = other DNA
agactacaggagcgt

SEQ ID NO: 21767 - DNA, 15 bp, synthetic construct
  source 1..15: mol_type = other DNA
cagactacaggagcg

SEQ ID NO: 21768 - DNA, 15 bp, synthetic construct
  source 1..15: mol_type = other DNA
tcagactacaggagc

SEQ ID NO: 21769 - DNA, 15 bp, synthetic construct
  source 1..15: mol_type = other DNA
ggttcagactacagg

SEQ ID NO: 21770 - DNA, 15 bp, synthetic construct
  source 1..15: mol_type = other DNA
gtctaggttcagact

SEQ ID NO: 21771 - DNA, 15 bp, synthetic construct
  source 1..15: mol_type = other DNA
tgtctaggttcagac

SEQ ID NO: 21772 - DNA, 15 bp, synthetic construct
  source 1..15: mol_type = other DNA
ctgtctaggttcaga

SEQ ID NO: 21773 - DNA, 15 bp, synthetic construct
  source 1..15: mol_type = other DNA
cctgtctaggttcag

SEQ ID NO: 21774 - DNA, 15 bp, synthetic construct
  source 1..15: mol_type = other DNA
tcctgtctaggttca

SEQ ID NO: 21775 - DNA, 15 bp, synthetic construct
  source 1..15: mol_type = other DNA
ctcctgtctaggttc

SEQ ID NO: 21776 - DNA, 15 bp, synthetic construct
  source 1..15: mol_type = other DNA
actcctgtctaggtt

SEQ ID NO: 21777 - DNA, 15 bp, synthetic construct
  source 1..15: mol_type = other DNA
aactcctgtctaggt

SEQ ID NO: 21778 - DNA, 15 bp, synthetic construct
  source 1..15: mol_type = other DNA
gtaactcctgtctag

SEQ ID NO: 21779 - DNA, 15 bp, synthetic construct
  source 1..15: mol_type = other DNA
atgtaactcctgtct

SEQ ID NO: 21780 - DNA, 15 bp, synthetic construct
  source 1..15: mol_type = other DNA
ggtgatgtaactcct

SEQ ID NO: 21781 - DNA, 15 bp, synthetic construct
  source 1..15: mol_type = other DNA
ccccaaggtgatgta

SEQ ID NO: 21782 - DNA, 15 bp, synthetic construct
  source 1..15: mol_type = other DNA
tccccaaggtgatgt

SEQ ID NO: 21783 - DNA, 15 bp, synthetic construct
  source 1..15: mol_type = other DNA
atccccaaggtgatg

SEQ ID NO: 21784 - DNA, 15 bp, synthetic construct
  source 1..15: mol_type = other DNA
gatccccaaggtgat

SEQ ID NO: 21785 - DNA, 15 bp, synthetic construct
  source 1..15: mol_type = other DNA
tgatccccaaggtga

SEQ ID NO: 21786 - DNA, 15 bp, synthetic construct
  source 1..15: mol_type = other DNA
ctgatccccaaggtg

SEQ ID NO: 21787 - DNA, 15 bp, synthetic construct
  source 1..15: mol_type = other DNA
actgatccccaaggt

SEQ ID NO: 21788 - DNA, 15 bp, synthetic construct
  source 1..15: mol_type = other DNA
cactgatccccaagg

SEQ ID NO: 21789 - DNA, 15 bp, synthetic construct
  source 1..15: mol_type = other DNA
gcactgatccccaag

SEQ ID NO: 21790 - DNA, 15 bp, synthetic construct
  source 1..15: mol_type = other DNA
tgcactgatccccaa

SEQ ID NO: 21791 - DNA, 15 bp, synthetic construct
  source 1..15: mol_type = other DNA
ctgcactgatcccca

SEQ ID NO: 21792 - DNA, 15 bp, synthetic construct
  source 1..15: mol_type = other DNA
tctgcactgatcccc

SEQ ID NO: 21793 - DNA, 15 bp, synthetic construct
  source 1..15: mol_type = other DNA
ctctgcactgatccc

SEQ ID NO: 21794 - DNA, 15 bp, synthetic construct
  source 1..15: mol_type = other DNA
tctctgcactgatcc

SEQ ID NO: 21795 - DNA, 15 bp, synthetic construct
  source 1..15: mol_type = other DNA
gtatctctgcactga

SEQ ID NO: 21796 - DNA, 15 bp, synthetic construct
  source 1..15: mol_type = other DNA
cgtatctctgcactg

SEQ ID NO: 21797 - DNA, 15 bp, synthetic construct
  source 1..15: mol_type = other DNA
acgtatctctgcact

SEQ ID NO: 21798 - DNA, 15 bp, synthetic construct
  source 1..15: mol_type = other DNA
cacgtatctctgcac

SEQ ID NO: 21799 - DNA, 15 bp, synthetic construct
  source 1..15: mol_type = other DNA
tcacgtatctctgca

SEQ ID NO: 21800 - DNA, 15 bp, synthetic construct
  source 1..15: mol_type = other DNA
ctcacgtatctctgc

SEQ ID NO: 21801 - DNA, 15 bp, synthetic construct
  source 1..15: mol_type = other DNA
tctcacgtatctctg

SEQ ID NO: 21802 - DNA, 15 bp, synthetic construct
  source 1..15: mol_type = other DNA
ttctcacgtatctct

SEQ ID NO: 21803 - DNA, 15 bp, synthetic construct
  source 1..15: mol_type = other DNA
ctgcctacaagggaa

SEQ ID NO: 21804 - DNA, 15 bp, synthetic construct
  source 1..15: mol_type = other DNA
cctgcctacaaggga

SEQ ID NO: 21805 - DNA, 15 bp, synthetic construct
  source 1..15: mol_type = other DNA
ccctgcctacaaggg

SEQ ID NO: 21806 - DNA, 15 bp, synthetic construct
  source 1..15: mol_type = other DNA
gccctgcctacaagg

SEQ ID NO: 21807 - DNA, 15 bp, synthetic construct
  source 1..15: mol_type = other DNA
ggccctgcctacaag

SEQ ID NO: 21808 - DNA, 15 bp, synthetic construct
  source 1..15: mol_type = other DNA
aggccctgcctacaa

SEQ ID NO: 21809 - DNA, 15 bp, synthetic construct
  source 1..15: mol_type = other DNA
taggccctgcctaca

SEQ ID NO: 21810 - DNA, 15 bp, synthetic construct
  source 1..15: mol_type = other DNA
ctaggccctgcctac

SEQ ID NO: 21811 - DNA, 15 bp, synthetic construct
  source 1..15: mol_type = other DNA
tctaggccctgccta

SEQ ID NO: 21812 - DNA, 15 bp, synthetic construct
  source 1..15: mol_type = other DNA
tgtctaggccctgcc

SEQ ID NO: 21813 - DNA, 15 bp, synthetic construct
  source 1..15: mol_type = other DNA
ttgtctaggccctgc

SEQ ID NO: 21814 - DNA, 15 bp, synthetic construct
  source 1..15: mol_type = other DNA
cttgtctaggccctg

SEQ ID NO: 21815 - DNA, 15 bp, synthetic construct
  source 1..15: mol_type = other DNA
acttgtctaggccct

SEQ ID NO: 21816 - DNA, 15 bp, synthetic construct
  source 1..15: mol_type = other DNA
cacttgtctaggccc

SEQ ID NO: 21817 - DNA, 15 bp, synthetic construct
  source 1..15: mol_type = other DNA
acacttgtctaggcc

SEQ ID NO: 21818 - DNA, 15 bp, synthetic construct
  source 1..15: mol_type = other DNA
ctcacatatctctgc

SEQ ID NO: 21819 - DNA, 15 bp, synthetic construct
  source 1..15: mol_type = other DNA
gcctacacgggaatt

SEQ ID NO: 21820 - DNA, 15 bp, synthetic construct
  source 1..15: mol_type = other DNA
tgcctacacgggaat

SEQ ID NO: 21821 - DNA, 15 bp, synthetic construct
  source 1..15: mol_type = other DNA
ctgcctacacgggaa

SEQ ID NO: 21822 - DNA, 15 bp, synthetic construct
  source 1..15: mol_type = other DNA
tctgcctacacggga

SEQ ID NO: 21823 - DNA, 15 bp, synthetic construct
  source 1..15: mol_type = other DNA
ctctgcctacacggg

SEQ ID NO: 21824 - DNA, 15 bp, synthetic construct
  source 1..15: mol_type = other DNA
gctctgcctacacgg

SEQ ID NO: 21825 - DNA, 15 bp, synthetic construct
  source 1..15: mol_type = other DNA
ggctctgcctacacg

SEQ ID NO: 21826 - DNA, 15 bp, synthetic construct
  source 1..15: mol_type = other DNA
aggctctgcctacac

SEQ ID NO: 21827 - DNA, 15 bp, synthetic construct
  source 1..15: mol_type = other DNA
taggctctgcctaca

SEQ ID NO: 21828 - DNA, 15 bp, synthetic construct
  source 1..15: mol_type = other DNA
ctaggctctgcctac

SEQ ID NO: 21829 - DNA, 15 bp, synthetic construct
  source 1..15: mol_type = other DNA
tctaggctctgccta

SEQ ID NO: 21830 - DNA, 15 bp, synthetic construct
  source 1..15: mol_type = other DNA
gtctaggctctgcct

SEQ ID NO: 21831 - DNA, 15 bp, synthetic construct
  source 1..15: mol_type = other DNA
tgtctaggctctgcc

SEQ ID NO: 21832 - DNA, 15 bp, synthetic construct
  source 1..15: mol_type = other DNA
ttgtctaggctctgc

SEQ ID NO: 21833 - DNA, 15 bp, synthetic construct
  source 1..15: mol_type = other DNA
cttgtctaggctctg

SEQ ID NO: 21834 - DNA, 15 bp, synthetic construct
  source 1..15: mol_type = other DNA
acttgtctaggctct

SEQ ID NO: 21835 - DNA, 15 bp, synthetic construct
  source 1..15: mol_type = other DNA
cacttgtctaggctc

SEQ ID NO: 21836 - DNA, 15 bp, synthetic construct
  source 1..15: mol_type = other DNA
acacttgtctaggct

SEQ ID NO: 21837 - DNA, 15 bp, synthetic construct
  source 1..15: mol_type = other DNA
gggaactcttgtcta

SEQ ID NO: 21838 - DNA, 15 bp, synthetic construct
  source 1..15: mol_type = other DNA
agggaactcttgtct

SEQ ID NO: 21839 - DNA, 15 bp, synthetic construct
  source 1..15: mol_type = other DNA
gagggaactcttgtc

SEQ ID NO: 21840 - DNA, 15 bp, synthetic construct
  source 1..15: mol_type = other DNA
ggagggaactcttgt

SEQ ID NO: 21841 - DNA, 15 bp, synthetic construct
  source 1..15: mol_type = other DNA
gaggagggaactctt

SEQ ID NO: 21842 - DNA, 15 bp, synthetic construct
  source 1..15: mol_type = other DNA
tgaggagggaactct

SEQ ID NO: 21843 - DNA, 15 bp, synthetic construct
  source 1..15: mol_type = other DNA
ctgaggagggaactc

SEQ ID NO: 21844 - DNA, 15 bp, synthetic construct
  source 1..15: mol_type = other DNA
cctgaggagggaact

SEQ ID NO: 21845 - DNA, 15 bp, synthetic construct
  source 1..15: mol_type = other DNA
ccctgaggagggaac

SEQ ID NO: 21846 - DNA, 15 bp, synthetic construct
  source 1..15: mol_type = other DNA
accctgaggagggaa

SEQ ID NO: 21847 - DNA, 15 bp, synthetic construct
  source 1..15: mol_type = other DNA
caccctgaggaggga

SEQ ID NO: 21848 - DNA, 15 bp, synthetic construct
  source 1..15: mol_type = other DNA
tcaccctgaggaggg

SEQ ID NO: 21849 - DNA, 15 bp, synthetic construct
  source 1..15: mol_type = other DNA
atcaccctgaggagg

SEQ ID NO: 21850 - DNA, 15 bp, synthetic construct
  source 1..15: mol_type = other DNA
gatcaccctgaggag

SEQ ID NO: 21851 - DNA, 15 bp, synthetic construct
  source 1..15: mol_type = other DNA
tgatcaccctgagga

SEQ ID NO: 21852 - DNA, 15 bp, synthetic construct
  source 1..15: mol_type = other DNA
ctgatcaccctgagg

SEQ ID NO: 21853 - DNA, 15 bp, synthetic construct
  source 1..15: mol_type = other DNA
actgatcaccctgag

SEQ ID NO: 21854 - DNA, 15 bp, synthetic construct
  source 1..15: mol_type = other DNA
cactgatcaccctga

SEQ ID NO: 21855 - DNA, 15 bp, synthetic construct
  source 1..15: mol_type = other DNA
gcactgatcaccctg

SEQ ID NO: 21856 - DNA, 15 bp, synthetic construct
  source 1..15: mol_type = other DNA
tgcactgatcaccct

SEQ ID NO: 21857 - DNA, 15 bp, synthetic construct
  source 1..15: mol_type = other DNA
gtgacacatctctgc

SEQ ID NO: 21858 - DNA, 15 bp, synthetic construct
  source 1..15: mol_type = other DNA
ggctttgtgacacat

SEQ ID NO: 21859 - DNA, 15 bp, synthetic construct
  source 1..15: mol_type = other DNA
gggctttgtgacaca

SEQ ID NO: 21860 - DNA, 15 bp, synthetic construct
  source 1..15: mol_type = other DNA
ggggctttgtgacac

SEQ ID NO: 21861 - DNA, 15 bp, synthetic construct
  source 1..15: mol_type = other DNA
aggggctttgtgaca

SEQ ID NO: 21862 - DNA, 15 bp, synthetic construct
  source 1..15: mol_type = other DNA
caggggctttgtgac

SEQ ID NO: 21863 - DNA, 15 bp, synthetic construct
  source 1..15: mol_type = other DNA
acaggggctttgtga

SEQ ID NO: 21864 - DNA, 15 bp, synthetic construct
  source 1..15: mol_type = other DNA
tacaggggctttgtg

SEQ ID NO: 21865 - DNA, 15 bp, synthetic construct
  source 1..15: mol_type = other DNA
ctacaggggctttgt

SEQ ID NO: 21866 - DNA, 15 bp, synthetic construct
  source 1..15: mol_type = other DNA
cctacaggggctttg

SEQ ID NO: 21867 - DNA, 15 bp, synthetic construct
  source 1..15: mol_type = other DNA
gcctacaggggcttt

SEQ ID NO: 21868 - DNA, 15 bp, synthetic construct
  source 1..15: mol_type = other DNA
tgcctacaggggctt

SEQ ID NO: 21869 - DNA, 15 bp, synthetic construct
  source 1..15: mol_type = other DNA
ctgcctacaggggct

SEQ ID NO: 21870 - DNA, 15 bp, synthetic construct
  source 1..15: mol_type = other DNA
ggctctgcctacagg

SEQ ID NO: 21871 - DNA, 15 bp, synthetic construct
  source 1..15: mol_type = other DNA
aggctctgcctacag

SEQ ID NO: 21872 - DNA, 15 bp, synthetic construct
  source 1..15: mol_type = other DNA
tcttgtctaggctct

SEQ ID NO: 21873 - DNA, 15 bp, synthetic construct
  source 1..15: mol_type = other DNA
ctcttgtctaggctc

SEQ ID NO: 21874 - DNA, 15 bp, synthetic construct
  source 1..15: mol_type = other DNA
actcttgtctaggct

SEQ ID NO: 21875 - DNA, 15 bp, synthetic construct
  source 1..15: mol_type = other DNA
aactcttgtctaggc

SEQ ID NO: 21876 - DNA, 15 bp, synthetic construct
  source 1..15: mol_type = other DNA
ggcattctgacacat

SEQ ID NO: 21877 - DNA, 15 bp, synthetic construct
  source 1..15: mol_type = other DNA
gggcattctgacaca

SEQ ID NO: 21878 - DNA, 15 bp, synthetic construct
  source 1..15: mol_type = other DNA
tgggcattctgacac

SEQ ID NO: 21879 - DNA, 15 bp, synthetic construct
  source 1..15: mol_type = other DNA
atgggcattctgaca

SEQ ID NO: 21880 - DNA, 15 bp, synthetic construct
  source 1..15: mol_type = other DNA
catgggcattctgac

SEQ ID NO: 21881 - DNA, 15 bp, synthetic construct
  source 1..15: mol_type = other DNA
acatgggcattctga

SEQ ID NO: 21882 - DNA, 15 bp, synthetic construct
  source 1..15: mol_type = other DNA
ctacatgggcattct

SEQ ID NO: 21883 - DNA, 15 bp, synthetic construct
  source 1..15: mol_type = other DNA
cctacatgggcattc

SEQ ID NO: 21884 - DNA, 15 bp, synthetic construct
  source 1..15: mol_type = other DNA
gcctacatgggcatt

SEQ ID NO: 21885 - DNA, 15 bp, synthetic construct
  source 1..15: mol_type = other DNA
tgcctacatgggcat

SEQ ID NO: 21886 - DNA, 15 bp, synthetic construct
  source 1..15: mol_type = other DNA
ctgcctacatgggca

SEQ ID NO: 21887 - DNA, 15 bp, synthetic construct
  source 1..15: mol_type = other DNA
tctgcctacatgggc

SEQ ID NO: 21888 - DNA, 15 bp, synthetic construct
  source 1..15: mol_type = other DNA
atctgcctacatggg

SEQ ID NO: 21889 - DNA, 15 bp, synthetic construct
  source 1..15: mol_type = other DNA
gatctgcctacatgg

SEQ ID NO: 21890 - DNA, 15 bp, synthetic construct
  source 1..15: mol_type = other DNA
agatctgcctacatg

SEQ ID NO: 21891 - DNA, 15 bp, synthetic construct
  source 1..15: mol_type = other DNA
cttagatctgcctac

SEQ ID NO: 21892 - DNA, 15 bp, synthetic construct
  source 1..15: mol_type = other DNA
tcttagatctgccta

SEQ ID NO: 21893 - DNA, 15 bp, synthetic construct
  source 1..15: mol_type = other DNA
gtcttagatctgcct

SEQ ID NO: 21894 - DNA, 15 bp, synthetic construct
  source 1..15: mol_type = other DNA
tgtcttagatctgcc

SEQ ID NO: 21895 - DNA, 15 bp, synthetic construct
  source 1..15: mol_type = other DNA
gcttgtcttagatct

SEQ ID NO: 21896 - DNA, 15 bp, synthetic construct
  source 1..15: mol_type = other DNA
cgcttgtcttagatc

SEQ ID NO: 21897 - DNA, 15 bp, synthetic construct
  source 1..15: mol_type = other DNA
gacgcttgtcttaga

SEQ ID NO: 21898 - DNA, 15 bp, synthetic construct
  source 1..15: mol_type = other DNA
ggacgcttgtcttag

SEQ ID NO: 21899 - DNA, 15 bp, synthetic construct
  source 1..15: mol_type = other DNA
tggacgcttgtctta

SEQ ID NO: 21900 - DNA, 15 bp, synthetic construct
  source 1..15: mol_type = other DNA
atggacgcttgtctt

SEQ ID NO: 21901 - DNA, 15 bp, synthetic construct
  source 1..15: mol_type = other DNA
gatggacgcttgtct

SEQ ID NO: 21902 - DNA, 15 bp, synthetic construct
  source 1..15: mol_type = other DNA
tgatggacgcttgtc

SEQ ID NO: 21903 - DNA, 15 bp, synthetic construct
  source 1..15: mol_type = other DNA
gtgatggacgcttgt

SEQ ID NO: 21904 - DNA, 15 bp, synthetic construct
  source 1..15: mol_type = other DNA
ggtgatggacgcttg

SEQ ID NO: 21905 - DNA, 15 bp, synthetic construct
  source 1..15: mol_type = other DNA
aggtgatggacgctt

SEQ ID NO: 21906 - DNA, 15 bp, synthetic construct
  source 1..15: mol_type = other DNA
caggtgatggacgct

SEQ ID NO: 21907 - DNA, 15 bp, synthetic construct
  source 1..15: mol_type = other DNA
ccaggtgatggacgc

SEQ ID NO: 21908 - DNA, 15 bp, synthetic construct
  source 1..15: mol_type = other DNA
cccaggtgatggacg

SEQ ID NO: 21909 - DNA, 15 bp, synthetic construct
  source 1..15: mol_type = other DNA
acccaggtgatggac

SEQ ID NO: 21910 - DNA, 15 bp, synthetic construct
  source 1..15: mol_type = other DNA
cacccaggtgatgga

SEQ ID NO: 21911 - DNA, 15 bp, synthetic construct
  source 1..15: mol_type = other DNA
tcacccaggtgatgg

SEQ ID NO: 21912 - DNA, 15 bp, synthetic construct
  source 1..15: mol_type = other DNA
ggtacatatctctgc

SEQ ID NO: 21913 - DNA, 15 bp, synthetic construct
  source 1..15: mol_type = other DNA
gggacactggtacat

SEQ ID NO: 21914 - DNA, 15 bp, synthetic construct
  source 1..15: mol_type = other DNA
ggggacactggtaca

SEQ ID NO: 21915 - DNA, 15 bp, synthetic construct
  source 1..15: mol_type = other DNA
aggggacactggtac

SEQ ID NO: 21916 - DNA, 15 bp, synthetic construct
  source 1..15: mol_type = other DNA
caggggacactggta

SEQ ID NO: 21917 - DNA, 15 bp, synthetic construct
  source 1..15: mol_type = other DNA
acaggggacactggt

SEQ ID NO: 21918 - DNA, 15 bp, synthetic construct
  source 1..15: mol_type = other DNA
tacaggggacactgg

SEQ ID NO: 21919 - DNA, 15 bp, synthetic construct
  source 1..15: mol_type = other DNA
ctacaggggacactg

SEQ ID NO: 21920 - DNA, 15 bp, synthetic construct
  source 1..15: mol_type = other DNA
cctacaggggacact

SEQ ID NO: 21921 - DNA, 15 bp, synthetic construct
  source 1..15: mol_type = other DNA
gcctacaggggacac

SEQ ID NO: 21922 - DNA, 15 bp, synthetic construct
  source 1..15: mol_type = other DNA
tgcctacaggggaca

SEQ ID NO: 21923 - DNA, 15 bp, synthetic construct
  source 1..15: mol_type = other DNA
ctgcctacaggggac

SEQ ID NO: 21924 - DNA, 15 bp, synthetic construct
  source 1..15: mol_type = other DNA
actgcctacagggga

SEQ ID NO: 21925 - DNA, 15 bp, synthetic construct
  source 1..15: mol_type = other DNA
cactgcctacagggg

SEQ ID NO: 21926 - DNA, 15 bp, synthetic construct
  source 1..15: mol_type = other DNA
gcactgcctacaggg

SEQ ID NO: 21927 - DNA, 15 bp, synthetic construct
  source 1..15: mol_type = other DNA
ggcactgcctacagg

SEQ ID NO: 21928 - DNA, 15 bp, synthetic construct
  source 1..15: mol_type = other DNA
aggcactgcctacag

SEQ ID NO: 21929 - DNA, 15 bp, synthetic construct
  source 1..15: mol_type = other DNA
taggcactgcctaca

SEQ ID NO: 21930 - DNA, 15 bp, synthetic construct
  source 1..15: mol_type = other DNA
ctaggcactgcctac

SEQ ID NO: 21931 - DNA, 15 bp, synthetic construct
  source 1..15: mol_type = other DNA
tctaggcactgccta

SEQ ID NO: 21932 - DNA, 15 bp, synthetic construct
  source 1..15: mol_type = other DNA
gtctaggcactgcct

SEQ ID NO: 21933 - DNA, 15 bp, synthetic construct
  source 1..15: mol_type = other DNA
tgtctaggcactgcc

SEQ ID NO: 21934 - DNA, 15 bp, synthetic construct
  source 1..15: mol_type = other DNA
ttgtctaggcactgc

SEQ ID NO: 21935 - DNA, 15 bp, synthetic construct
  source 1..15: mol_type = other DNA
cttgtctaggcactg

SEQ ID NO: 21936 - DNA, 15 bp, synthetic construct
  source 1..15: mol_type = other DNA
tcttgtctaggcact

SEQ ID NO: 21937 - DNA, 15 bp, synthetic construct
  source 1..15: mol_type = other DNA
ctcttgtctaggcac

SEQ ID NO: 21938 - DNA, 15 bp, synthetic construct
  source 1..15: mol_type = other DNA
actcttgtctaggca

SEQ ID NO: 21939 - DNA, 15 bp, synthetic construct
  source 1..15: mol_type = other DNA
ctctgaggtgattca

SEQ ID NO: 21940 - DNA, 15 bp, synthetic construct
  source 1..15: mol_type = other DNA
tctctgaggtgattc

SEQ ID NO: 21941 - DNA, 15 bp, synthetic construct
  source 1..15: mol_type = other DNA
gatctctgaggtgat

SEQ ID NO: 21942 - DNA, 15 bp, synthetic construct
  source 1..15: mol_type = other DNA
tgatctctgaggtga

SEQ ID NO: 21943 - DNA, 15 bp, synthetic construct
  source 1..15: mol_type = other DNA
ctgatctctgaggtg

SEQ ID NO: 21944 - DNA, 15 bp, synthetic construct
  source 1..15: mol_type = other DNA
actgatctctgaggt

SEQ ID NO: 21945 - DNA, 15 bp, synthetic construct
  source 1..15: mol_type = other DNA
gcactgatctctgag

SEQ ID NO: 21946 - DNA, 15 bp, synthetic construct
  source 1..15: mol_type = other DNA
tgcactgatctctga

SEQ ID NO: 21947 - DNA, 15 bp, synthetic construct
  source 1..15: mol_type = other DNA
cctacagaaggcttt

SEQ ID NO: 21948 - DNA, 15 bp, synthetic construct
  source 1..15: mol_type = other DNA
gcctacagaaggctt

SEQ ID NO: 21949 - DNA, 15 bp, synthetic construct
  source 1..15: mol_type = other DNA
tgcctacagaaggct

SEQ ID NO: 21950 - DNA, 15 bp, synthetic construct
  source 1..15: mol_type = other DNA
ttgcctacagaaggc

SEQ ID NO: 21951 - DNA, 15 bp, synthetic construct
  source 1..15: mol_type = other DNA
gctttgcctacagaa

SEQ ID NO: 21952 - DNA, 15 bp, synthetic construct
  source 1..15: mol_type = other DNA
ggctttgcctacaga

SEQ ID NO: 21953 - DNA, 15 bp, synthetic construct
  source 1..15: mol_type = other DNA
gggctttgcctacag

SEQ ID NO: 21954 - DNA, 15 bp, synthetic construct
  source 1..15: mol_type = other DNA
tgggctttgcctaca

SEQ ID NO: 21955 - DNA, 15 bp, synthetic construct
  source 1..15: mol_type = other DNA
atgggctttgcctac

SEQ ID NO: 21956 - DNA, 15 bp, synthetic construct
  source 1..15: mol_type = other DNA
tatgggctttgccta

SEQ ID NO: 21957 - DNA, 15 bp, synthetic construct
  source 1..15: mol_type = other DNA
gtatgggctttgcct

SEQ ID NO: 21958 - DNA, 15 bp, synthetic construct
  source 1..15: mol_type = other DNA
tgtatgggctttgcc

SEQ ID NO: 21959 - DNA, 15 bp, synthetic construct
  source 1..15: mol_type = other DNA
ttgtatgggctttgc

SEQ ID NO: 21960 - DNA, 15 bp, synthetic construct
  source 1..15: mol_type = other DNA
cttgtatgggctttg

SEQ ID NO: 21961 - DNA, 15 bp, synthetic construct
  source 1..15: mol_type = other DNA
ccttgtatgggcttt

SEQ ID NO: 21962 - DNA, 15 bp, synthetic construct
  source 1..15: mol_type = other DNA
accttgtatgggctt

SEQ ID NO: 21963 - DNA, 15 bp, synthetic construct
  source 1..15: mol_type = other DNA
aaccttgtatgggct

SEQ ID NO: 21964 - DNA, 15 bp, synthetic construct
  source 1..15: mol_type = other DNA
cacctaggtgatcta

SEQ ID NO: 21965 - DNA, 15 bp, synthetic construct
  source 1..15: mol_type = other DNA
tcacctaggtgatct

SEQ ID NO: 21966 - DNA, 15 bp, synthetic construct
  source 1..15: mol_type = other DNA
atcacctaggtgatc

SEQ ID NO: 21967 - DNA, 15 bp, synthetic construct
  source 1..15: mol_type = other DNA
gatcacctaggtgat

SEQ ID NO: 21968 - DNA, 15 bp, synthetic construct
  source 1..15: mol_type = other DNA
tgatcacctaggtga

SEQ ID NO: 21969 - DNA, 15 bp, synthetic construct
  source 1..15: mol_type = other DNA
ctgatcacctaggtg

SEQ ID NO: 21970 - DNA, 15 bp, synthetic construct
  source 1..15: mol_type = other DNA
actgatcacctaggt

SEQ ID NO: 21971 - DNA, 15 bp, synthetic construct
  source 1..15: mol_type = other DNA
cactgatcacctagg

SEQ ID NO: 21972 - DNA, 15 bp, synthetic construct
  source 1..15: mol_type = other DNA
gcactgatcacctag

SEQ ID NO: 21973 - DNA, 15 bp, synthetic construct
  source 1..15: mol_type = other DNA
tgcactgatcaccta

SEQ ID NO: 21974 - DNA, 15 bp, synthetic construct
  source 1..15: mol_type = other DNA
ctgcactgatcacct

SEQ ID NO: 21975 - DNA, 15 bp, synthetic construct
  source 1..15: mol_type = other DNA
actgcactgatcacc

SEQ ID NO: 21976 - DNA, 15 bp, synthetic construct
  source 1..15: mol_type = other DNA
cactgcactgatcac

SEQ ID NO: 21977 - DNA, 15 bp, synthetic construct
  source 1..15: mol_type = other DNA
tcactgcactgatca

SEQ ID NO: 21978 - DNA, 15 bp, synthetic construct
  source 1..15: mol_type = other DNA
ctgtctacagggatt

SEQ ID NO: 21979 - DNA, 15 bp, synthetic construct
  source 1..15: mol_type = other DNA
tctgtctacagggat

SEQ ID NO: 21980 - DNA, 15 bp, synthetic construct
  source 1..15: mol_type = other DNA
ctctgtctacaggga

SEQ ID NO: 21981 - DNA, 15 bp, synthetic construct
  source 1..15: mol_type = other DNA
gctctgtctacaggg

SEQ ID NO: 21982 - DNA, 15 bp, synthetic construct
  source 1..15: mol_type = other DNA
ggctctgtctacagg

SEQ ID NO: 21983 - DNA, 15 bp, synthetic construct
  source 1..15: mol_type = other DNA
aggctctgtctacag

SEQ ID NO: 21984 - DNA, 15 bp, synthetic construct
  source 1..15: mol_type = other DNA
cccaggtgaagtaac

SEQ ID NO: 21985 - DNA, 15 bp, synthetic construct
  source 1..15: mol_type = other DNA
cacccaggtgaagta

SEQ ID NO: 21986 - DNA, 15 bp, synthetic construct
  source 1..15: mol_type = other DNA
tcacccaggtgaagt

SEQ ID NO: 21987 - DNA, 15 bp, synthetic construct
  source 1..15: mol_type = other DNA
atcacccaggtgaag

SEQ ID NO: 21988 - DNA, 15 bp, synthetic construct
  source 1..15: mol_type = other DNA
gatcacccaggtgaa

SEQ ID NO: 21989 - DNA, 15 bp, synthetic construct
  source 1..15: mol_type = other DNA
ggggcattgtgtcaa

SEQ ID NO: 21990 - DNA, 15 bp, synthetic construct
  source 1..15: mol_type = other DNA
gggggcattgtgtca

SEQ ID NO: 21991 - DNA, 15 bp, synthetic construct
  source 1..15: mol_type = other DNA
tgggggcattgtgtc

SEQ ID NO: 21992 - DNA, 15 bp, synthetic construct
  source 1..15: mol_type = other DNA
atgggggcattgtgt

SEQ ID NO: 21993 - DNA, 15 bp, synthetic construct
  source 1..15: mol_type = other DNA
tatgggggcattgtg

SEQ ID NO: 21994 - DNA, 15 bp, synthetic construct
  source 1..15: mol_type = other DNA
ctatgggggcattgt

SEQ ID NO: 21995 - DNA, 15 bp, synthetic construct
  source 1..15: mol_type = other DNA
tctatgggggcattg

SEQ ID NO: 21996 - DNA, 15 bp, synthetic construct
  source 1..15: mol_type = other DNA
gtctatgggggcatt

SEQ ID NO: 21997 - DNA, 15 bp, synthetic construct
  source 1..15: mol_type = other DNA
tgtctatgggggcat

SEQ ID NO: 21998 - DNA, 15 bp, synthetic construct
  source 1..15: mol_type = other DNA
ctgtctatgggggca

SEQ ID NO: 21999 - DNA, 15 bp, synthetic construct
  source 1..15: mol_type = other DNA
tctgtctatgggggc

SEQ ID NO: 22000 - DNA, 15 bp, synthetic construct
  source 1..15: mol_type = other DNA
ctctgtctatggggg

SEQ ID NO: 22001 - DNA, 15 bp, synthetic construct
  source 1..15: mol_type = other DNA
gctctgtctatgggg

SEQ ID NO: 22002 - DNA, 15 bp, synthetic construct
  source 1..15: mol_type = other DNA
ggctctgtctatggg

SEQ ID NO: 22003 - DNA, 15 bp, synthetic construct
  source 1..15: mol_type = other DNA
aggctctgtctatgg

SEQ ID NO: 22004 - DNA, 15 bp, synthetic construct
  source 1..15: mol_type = other DNA
taggctctgtctatg

SEQ ID NO: 22005 - DNA, 15 bp, synthetic construct
  source 1..15: mol_type = other DNA
ctaggctctgtctat

SEQ ID NO: 22006 - DNA, 15 bp, synthetic construct
  source 1..15: mol_type = other DNA
cctaggctctgtcta

SEQ ID NO: 22007 - DNA, 15 bp, synthetic construct
  source 1..15: mol_type = other DNA
gcctaggctctgtct

SEQ ID NO: 22008 - DNA, 15 bp, synthetic construct
  source 1..15: mol_type = other DNA
tgcctaggctctgtc

SEQ ID NO: 22009 - DNA, 15 bp, synthetic construct
  source 1..15: mol_type = other DNA
ttgcctaggctctgt

SEQ ID NO: 22010 - DNA, 15 bp, synthetic construct
  source 1..15: mol_type = other DNA
cttgcctaggctctg

SEQ ID NO: 22011 - DNA, 15 bp, synthetic construct
  source 1..15: mol_type = other DNA
tcttgcctaggctct

SEQ ID NO: 22012 - DNA, 15 bp, synthetic construct
  source 1..15: mol_type = other DNA
gtcttgcctaggctc

SEQ ID NO: 22013 - DNA, 15 bp, synthetic construct
  source 1..15: mol_type = other DNA
agtcttgcctaggct

SEQ ID NO: 22014 - DNA, 15 bp, synthetic construct
  source 1..15: mol_type = other DNA
aagtcttgcctaggc

SEQ ID NO: 22015 - DNA, 15 bp, synthetic construct
  source 1..15: mol_type = other DNA
gaagtcttgcctagg

SEQ ID NO: 22016 - DNA, 15 bp, synthetic construct
  source 1..15: mol_type = other DNA
ggaagtcttgcctag

SEQ ID NO: 22017 - DNA, 15 bp, synthetic construct
  source 1..15: mol_type = other DNA
tggaagtcttgccta

SEQ ID NO: 22018 - DNA, 15 bp, synthetic construct
  source 1..15: mol_type = other DNA
atggaagtcttgcct

SEQ ID NO: 22019 - DNA, 15 bp, synthetic construct
  source 1..15: mol_type = other DNA
gatggaagtcttgcc

SEQ ID NO: 22020 - DNA, 15 bp, synthetic construct
  source 1..15: mol_type = other DNA
ccaggtgatggaagt

SEQ ID NO: 22021 - DNA, 15 bp, synthetic construct
  source 1..15: mol_type = other DNA
cccaggtgatggaag

SEQ ID NO: 22022 - DNA, 15 bp, synthetic construct
  source 1..15: mol_type = other DNA
acccaggtgatggaa

SEQ ID NO: 22023 - DNA, 15 bp, synthetic construct
  source 1..15: mol_type = other DNA
ggggatttgtgacat

SEQ ID NO: 22024 - DNA, 15 bp, synthetic construct
  source 1..15: mol_type = other DNA
gggggatttgtgaca

SEQ ID NO: 22025 - DNA, 15 bp, synthetic construct
  source 1..15: mol_type = other DNA
agggggatttgtgac

SEQ ID NO: 22026 - DNA, 15 bp, synthetic construct
  source 1..15: mol_type = other DNA
gagggggatttgtga

SEQ ID NO: 22027 - DNA, 15 bp, synthetic construct
  source 1..15: mol_type = other DNA
agagggggatttgtg

SEQ ID NO: 22028 - DNA, 15 bp, synthetic construct
  source 1..15: mol_type = other DNA
tagagggggatttgt

SEQ ID NO: 22029 - DNA, 15 bp, synthetic construct
  source 1..15: mol_type = other DNA
cctagagggggattt

SEQ ID NO: 22030 - DNA, 15 bp, synthetic construct
  source 1..15: mol_type = other DNA
gcctagagggggatt

SEQ ID NO: 22031 - DNA, 15 bp, synthetic construct
  source 1..15: mol_type = other DNA
tgcctagagggggat

SEQ ID NO: 22032 - DNA, 15 bp, synthetic construct
  source 1..15: mol_type = other DNA
ctgcctagaggggga

SEQ ID NO: 22033 - DNA, 15 bp, synthetic construct
  source 1..15: mol_type = other DNA
tctgcctagaggggg

SEQ ID NO: 22034 - DNA, 15 bp, synthetic construct
  source 1..15: mol_type = other DNA
ctctgcctagagggg

SEQ ID NO: 22035 - DNA, 15 bp, synthetic construct
  source 1..15: mol_type = other DNA
actctgcctagaggg

SEQ ID NO: 22036 - DNA, 15 bp, synthetic construct
  source 1..15: mol_type = other DNA
tactctgcctagagg

SEQ ID NO: 22037 - DNA, 15 bp, synthetic construct
  source 1..15: mol_type = other DNA
atactctgcctagag

SEQ ID NO: 22038 - DNA, 15 bp, synthetic construct
  source 1..15: mol_type = other DNA
ctatactctgcctag

SEQ ID NO: 22039 - DNA, 15 bp, synthetic construct
  source 1..15: mol_type = other DNA
tctatactctgccta

SEQ ID NO: 22040 - DNA, 15 bp, synthetic construct
  source 1..15: mol_type = other DNA
ctctatactctgcct

SEQ ID NO: 22041 - DNA, 15 bp, synthetic construct
  source 1..15: mol_type = other DNA
tctctatactctgcc

SEQ ID NO: 22042 - DNA, 15 bp, synthetic construct
  source 1..15: mol_type = other DNA
gggactcttctctat

SEQ ID NO: 22043 - DNA, 15 bp, synthetic construct
  source 1..15: mol_type = other DNA
tgggactcttctcta

SEQ ID NO: 22044 - DNA, 15 bp, synthetic construct
  source 1..15: mol_type = other DNA
atgggactcttctct

SEQ ID NO: 22045 - DNA, 15 bp, synthetic construct
  source 1..15: mol_type = other DNA
gatgggactcttctc

SEQ ID NO: 22046 - DNA, 15 bp, synthetic construct
  source 1..15: mol_type = other DNA
tgatgggactcttct

SEQ ID NO: 22047 - DNA, 15 bp, synthetic construct
  source 1..15: mol_type = other DNA
gtgatgggactcttc

SEQ ID NO: 22048 - DNA, 15 bp, synthetic construct
  source 1..15: mol_type = other DNA
ggtgatgggactctt

SEQ ID NO: 22049 - DNA, 15 bp, synthetic construct
  source 1..15: mol_type = other DNA
aggtgatgggactct

SEQ ID NO: 22050 - DNA, 15 bp, synthetic construct
  source 1..15: mol_type = other DNA
caggtgatgggactc

SEQ ID NO: 22051 - DNA, 15 bp, synthetic construct
  source 1..15: mol_type = other DNA
ccaggtgatgggact

SEQ ID NO: 22052 - DNA, 15 bp, synthetic construct
  source 1..15: mol_type = other DNA
cccaggtgatgggac

SEQ ID NO: 22053 - DNA, 15 bp, synthetic construct
  source 1..15: mol_type = other DNA
acccaggtgatggga

SEQ ID NO: 22054 - DNA, 15 bp, synthetic construct
  source 1..15: mol_type = other DNA
cacccaggtgatggg

SEQ ID NO: 22055 - DNA, 15 bp, synthetic construct
  source 1..15: mol_type = other DNA
caggggacattgtga

SEQ ID NO: 22056 - DNA, 15 bp, synthetic construct
  source 1..15: mol_type = other DNA
acaggggacattgtg

SEQ ID NO: 22057 - DNA, 15 bp, synthetic construct
  source 1..15: mol_type = other DNA
cctacaggggacatt

SEQ ID NO: 22058 - DNA, 15 bp, synthetic construct
  source 1..15: mol_type = other DNA
gcctacaggggacat

SEQ ID NO: 22059 - DNA, 15 bp, synthetic construct
  source 1..15: mol_type = other DNA
tctgcctacagggga

SEQ ID NO: 22060 - DNA, 15 bp, synthetic construct
  source 1..15: mol_type = other DNA
tctctgcctacaggg

SEQ ID NO: 22061 - DNA, 15 bp, synthetic construct
  source 1..15: mol_type = other DNA
ctctctgcctacagg

SEQ ID NO: 22062 - DNA, 15 bp, synthetic construct
  source 1..15: mol_type = other DNA
actctctgcctacag

SEQ ID NO: 22063 - DNA, 15 bp, synthetic construct
  source 1..15: mol_type = other DNA
cactctctgcctaca

SEQ ID NO: 22064 - DNA, 15 bp, synthetic construct
  source 1..15: mol_type = other DNA
ccactctctgcctac

SEQ ID NO: 22065 - DNA, 15 bp, synthetic construct
  source 1..15: mol_type = other DNA
tccactctctgccta

SEQ ID NO: 22066 - DNA, 15 bp, synthetic construct
  source 1..15: mol_type = other DNA
gtccactctctgcct

SEQ ID NO: 22067 - DNA, 15 bp, synthetic construct
  source 1..15: mol_type = other DNA
tgtccactctctgcc

SEQ ID NO: 22068 - DNA, 15 bp, synthetic construct
  source 1..15: mol_type = other DNA
ttgtccactctctgc

SEQ ID NO: 22069 - DNA, 15 bp, synthetic construct
  source 1..15: mol_type = other DNA
cttgtccactctctg

SEQ ID NO: 22070 - DNA, 15 bp, synthetic construct
  source 1..15: mol_type = other DNA
tcttgtccactctct

SEQ ID NO: 22071 - DNA, 15 bp, synthetic construct
  source 1..15: mol_type = other DNA
ctcttgtccactctc

SEQ ID NO: 22072 - DNA, 15 bp, synthetic construct
  source 1..15: mol_type = other DNA
actcttgtccactct

SEQ ID NO: 22073 - DNA, 15 bp, synthetic construct
  source 1..15: mol_type = other DNA
aactcttgtccactc

SEQ ID NO: 22074 - DNA, 15 bp, synthetic construct
  source 1..15: mol_type = other DNA
gtaactcttgtccac

SEQ ID NO: 22075 - DNA, 15 bp, synthetic construct
  source 1..15: mol_type = other DNA
tgtaactcttgtcca

SEQ ID NO: 22076 - DNA, 15 bp, synthetic construct
  source 1..15: mol_type = other DNA
ctgcacagatcatct

SEQ ID NO: 22077 - DNA, 15 bp, synthetic construct
  source 1..15: mol_type = other DNA
ctctgcacagatcat

SEQ ID NO: 22078 - DNA, 15 bp, synthetic construct
  source 1..15: mol_type = other DNA
gctctgcacagatca

SEQ ID NO: 22079 - DNA, 15 bp, synthetic construct
  source 1..15: mol_type = other DNA
agctctgcacagatc

SEQ ID NO: 22080 - DNA, 15 bp, synthetic construct
  source 1..15: mol_type = other DNA
tagctctgcacagat

SEQ ID NO: 22081 - DNA, 15 bp, synthetic construct
  source 1..15: mol_type = other DNA
atagctctgcacaga

SEQ ID NO: 22082 - DNA, 15 bp, synthetic construct
  source 1..15: mol_type = other DNA
catagctctgcacag

SEQ ID NO: 22083 - DNA, 15 bp, synthetic construct
  source 1..15: mol_type = other DNA
acatagctctgcaca

SEQ ID NO: 22084 - DNA, 15 bp, synthetic construct
  source 1..15: mol_type = other DNA
gacatagctctgcac

SEQ ID NO: 22085 - DNA, 15 bp, synthetic construct
  source 1..15: mol_type = other DNA
tgacatagctctgca

SEQ ID NO: 22086 - DNA, 15 bp, synthetic construct
  source 1..15: mol_type = other DNA
ttgacatagctctgc

SEQ ID NO: 22087 - DNA, 15 bp, synthetic construct
  source 1..15: mol_type = other DNA
gggcgttttgacata

SEQ ID NO: 22088 - DNA, 15 bp, synthetic construct
  source 1..15: mol_type = other DNA
ggggcgttttgacat

SEQ ID NO: 22089 - DNA, 15 bp, synthetic construct
  source 1..15: mol_type = other DNA
aggggcgttttgaca

SEQ ID NO: 22090 - DNA, 15 bp, synthetic construct
  source 1..15: mol_type = other DNA
caggggcgttttgac

SEQ ID NO: 22091 - DNA, 15 bp, synthetic construct
  source 1..15: mol_type = other DNA
acaggggcgttttga

SEQ ID NO: 22092 - DNA, 15 bp, synthetic construct
  source 1..15: mol_type = other DNA
tacaggggcgttttg

SEQ ID NO: 22093 - DNA, 15 bp, synthetic construct
  source 1..15: mol_type = other DNA
ctacaggggcgtttt

SEQ ID NO: 22094 - DNA, 15 bp, synthetic construct
  source 1..15: mol_type = other DNA
cctacaggggcgttt

SEQ ID NO: 22095 - DNA, 15 bp, synthetic construct
  source 1..15: mol_type = other DNA
gcctacaggggcgtt

SEQ ID NO: 22096 - DNA, 15 bp, synthetic construct
  source 1..15: mol_type = other DNA
tgcctacaggggcgt

SEQ ID NO: 22097 - DNA, 15 bp, synthetic construct
  source 1..15: mol_type = other DNA
ctgcctacaggggcg

SEQ ID NO: 22098 - DNA, 15 bp, synthetic construct
  source 1..15: mol_type = other DNA
atctaggctctgcct

SEQ ID NO: 22099 - DNA, 15 bp, synthetic construct
  source 1..15: mol_type = other DNA
catctaggctctgcc

SEQ ID NO: 22100 - DNA, 15 bp, synthetic construct
  source 1..15: mol_type = other DNA
tcatctaggctctgc

SEQ ID NO: 22101 - DNA, 15 bp, synthetic construct
  source 1..15: mol_type = other DNA
ctcatctaggctctg

SEQ ID NO: 22102 - DNA, 15 bp, synthetic construct
  source 1..15: mol_type = other DNA
actcatctaggctct

SEQ ID NO: 22103 - DNA, 15 bp, synthetic construct
  source 1..15: mol_type = other DNA
cactcatctaggctc

SEQ ID NO: 22104 - DNA, 15 bp, synthetic construct
  source 1..15: mol_type = other DNA
acactcatctaggct

SEQ ID NO: 22105 - DNA, 15 bp, synthetic construct
  source 1..15: mol_type = other DNA
atgatcacccaggtg

SEQ ID NO: 22106 - DNA, 15 bp, synthetic construct
  source 1..15: mol_type = other DNA
aatgatcacccaggt

SEQ ID NO: 22107 - DNA, 15 bp, synthetic construct
  source 1..15: mol_type = other DNA
caatgatcacccagg

SEQ ID NO: 22108 - DNA, 15 bp, synthetic construct
  source 1..15: mol_type = other DNA
gcaatgatcacccag

SEQ ID NO: 22109 - DNA, 15 bp, synthetic construct
  source 1..15: mol_type = other DNA
tgcaatgatcaccca

SEQ ID NO: 22110 - DNA, 15 bp, synthetic construct
  source 1..15: mol_type = other DNA
ctgcaatgatcaccc

SEQ ID NO: 22111 - DNA, 15 bp, synthetic construct
  source 1..15: mol_type = other DNA
tgacgtatctctgca

SEQ ID NO: 22112 - DNA, 15 bp, synthetic construct
  source 1..15: mol_type = other DNA
gtgacgtatctctgc

SEQ ID NO: 22113 - DNA, 15 bp, synthetic construct
  source 1..15: mol_type = other DNA
gggtattgtgacgta

SEQ ID NO: 22114 - DNA, 15 bp, synthetic construct
  source 1..15: mol_type = other DNA
ggggtattgtgacgt

SEQ ID NO: 22115 - DNA, 15 bp, synthetic construct
  source 1..15: mol_type = other DNA
gggggtattgtgacg

SEQ ID NO: 22116 - DNA, 15 bp, synthetic construct
  source 1..15: mol_type = other DNA
agggggtattgtgac

SEQ ID NO: 22117 - DNA, 15 bp, synthetic construct
  source 1..15: mol_type = other DNA
cagggggtattgtga

SEQ ID NO: 22118 - DNA, 15 bp, synthetic construct
  source 1..15: mol_type = other DNA
acagggggtattgtg

SEQ ID NO: 22119 - DNA, 15 bp, synthetic construct
  source 1..15: mol_type = other DNA
tacagggggtattgt

SEQ ID NO: 22120 - DNA, 15 bp, synthetic construct
  source 1..15: mol_type = other DNA
ctacagggggtattg

SEQ ID NO: 22121 - DNA, 15 bp, synthetic construct
  source 1..15: mol_type = other DNA
cctacagggggtatt

SEQ ID NO: 22122 - DNA, 15 bp, synthetic construct
  source 1..15: mol_type = other DNA
acctacagggggtat

SEQ ID NO: 22123 - DNA, 15 bp, synthetic construct
  source 1..15: mol_type = other DNA
cacctacagggggta

SEQ ID NO: 22124 - DNA, 15 bp, synthetic construct
  source 1..15: mol_type = other DNA
ccacctacagggggt

SEQ ID NO: 22125 - DNA, 15 bp, synthetic construct
  source 1..15: mol_type = other DNA
cccacctacaggggg

SEQ ID NO: 22126 - DNA, 15 bp, synthetic construct
  source 1..15: mol_type = other DNA
ccccacctacagggg

SEQ ID NO: 22127 - DNA, 15 bp, synthetic construct
  source 1..15: mol_type = other DNA
gccccacctacaggg

SEQ ID NO: 22128 - DNA, 15 bp, synthetic construct
  source 1..15: mol_type = other DNA
ggccccacctacagg

SEQ ID NO: 22129 - DNA, 15 bp, synthetic construct
  source 1..15: mol_type = other DNA
aggccccacctacag

SEQ ID NO: 22130 - DNA, 15 bp, synthetic construct
  source 1..15: mol_type = other DNA
taggccccacctaca

SEQ ID NO: 22131 - DNA, 15 bp, synthetic construct
  source 1..15: mol_type = other DNA
ctaggccccacctac

SEQ ID NO: 22132 - DNA, 15 bp, synthetic construct
  source 1..15: mol_type = other DNA
tctaggccccaccta

SEQ ID NO: 22133 - DNA, 15 bp, synthetic construct
  source 1..15: mol_type = other DNA
tgtctaggccccacc

SEQ ID NO: 22134 - DNA, 15 bp, synthetic construct
  source 1..15: mol_type = other DNA
ttgtctaggccccac

SEQ ID NO: 22135 - DNA, 15 bp, synthetic construct
  source 1..15: mol_type = other DNA
cttgtctaggcccca

SEQ ID NO: 22136 - DNA, 15 bp, synthetic construct
  source 1..15: mol_type = other DNA
tcttgtctaggcccc

SEQ ID NO: 22137 - DNA, 15 bp, synthetic construct
  source 1..15: mol_type = other DNA
ctcttgtctaggccc

SEQ ID NO: 22138 - DNA, 15 bp, synthetic construct
  source 1..15: mol_type = other DNA
actcttgtctaggcc

SEQ ID NO: 22139 - DNA, 15 bp, synthetic construct
  source 1..15: mol_type = other DNA
tactgatcacccagg

SEQ ID NO: 22140 - DNA, 15 bp, synthetic construct
  source 1..15: mol_type = other DNA
gtactgatcacccag

SEQ ID NO: 22141 - DNA, 15 bp, synthetic construct
  source 1..15: mol_type = other DNA
tgtactgatcaccca

SEQ ID NO: 22142 - DNA, 15 bp, synthetic construct
  source 1..15: mol_type = other DNA
ctgtactgatcaccc

SEQ ID NO: 22143 - DNA, 15 bp, synthetic construct
  source 1..15: mol_type = other DNA
tctgtactgatcacc

SEQ ID NO: 22144 - DNA, 15 bp, synthetic construct
  source 1..15: mol_type = other DNA
gggctttgtgacata

SEQ ID NO: 22145 - DNA, 15 bp, synthetic construct
  source 1..15: mol_type = other DNA
ggggctttgtgacat

SEQ ID NO: 22146 - DNA, 15 bp, synthetic construct
  source 1..15: mol_type = other DNA
aacccaggtgatgta

SEQ ID NO: 22147 - DNA, 15 bp, synthetic construct
  source 1..15: mol_type = other DNA
taacccaggtgatgt

SEQ ID NO: 22148 - DNA, 15 bp, synthetic construct
  source 1..15: mol_type = other DNA
gataacccaggtgat

SEQ ID NO: 22149 - DNA, 15 bp, synthetic construct
  source 1..15: mol_type = other DNA
tgataacccaggtga

SEQ ID NO: 22150 - DNA, 15 bp, synthetic construct
  source 1..15: mol_type = other DNA
ctgataacccaggtg

SEQ ID NO: 22151 - DNA, 15 bp, synthetic construct
  source 1..15: mol_type = other DNA
actgataacccaggt

SEQ ID NO: 22152 - DNA, 15 bp, synthetic construct
  source 1..15: mol_type = other DNA
gcactgataacccag

SEQ ID NO: 22153 - DNA, 15 bp, synthetic construct
  source 1..15: mol_type = other DNA
tgcactgataaccca

SEQ ID NO: 22154 - DNA, 15 bp, synthetic construct
  source 1..15: mol_type = other DNA
ctgcactgataaccc

SEQ ID NO: 22155 - DNA, 15 bp, synthetic construct
  source 1..15: mol_type = other DNA
acctacaggggcttt

SEQ ID NO: 22156 - DNA, 15 bp, synthetic construct
  source 1..15: mol_type = other DNA
gacctacaggggctt

SEQ ID NO: 22157 - DNA, 15 bp, synthetic construct
  source 1..15: mol_type = other DNA
cgacctacaggggct

SEQ ID NO: 22158 - DNA, 15 bp, synthetic construct
  source 1..15: mol_type = other DNA
tcgacctacaggggc

SEQ ID NO: 22159 - DNA, 15 bp, synthetic construct
  source 1..15: mol_type = other DNA
ctcgacctacagggg

SEQ ID NO: 22160 - DNA, 15 bp, synthetic construct
  source 1..15: mol_type = other DNA
actcgacctacaggg

SEQ ID NO: 22161 - DNA, 15 bp, synthetic construct
  source 1..15: mol_type = other DNA
gactcgacctacagg

SEQ ID NO: 22162 - DNA, 15 bp, synthetic construct
  source 1..15: mol_type = other DNA
tctagactcgaccta

SEQ ID NO: 22163 - DNA, 15 bp, synthetic construct
  source 1..15: mol_type = other DNA
gtctagactcgacct

SEQ ID NO: 22164 - DNA, 15 bp, synthetic construct
  source 1..15: mol_type = other DNA
tgtctagactcgacc

SEQ ID NO: 22165 - DNA, 15 bp, synthetic construct
  source 1..15: mol_type = other DNA
ctcttgtctagactc

SEQ ID NO: 22166 - DNA, 15 bp, synthetic construct
  source 1..15: mol_type = other DNA
cccaggagatgtaac

SEQ ID NO: 22167 - DNA, 15 bp, synthetic construct
  source 1..15: mol_type = other DNA
acccaggagatgtaa

SEQ ID NO: 22168 - DNA, 15 bp, synthetic construct
  source 1..15: mol_type = other DNA
cacccaggagatgta

SEQ ID NO: 22169 - DNA, 15 bp, synthetic construct
  source 1..15: mol_type = other DNA
tcacccaggagatgt

SEQ ID NO: 22170 - DNA, 15 bp, synthetic construct
  source 1..15: mol_type = other DNA
atcacccaggagatg

SEQ ID NO: 22171 - DNA, 15 bp, synthetic construct
  source 1..15: mol_type = other DNA
gatcacccaggagat

SEQ ID NO: 22172 - DNA, 15 bp, synthetic construct
  source 1..15: mol_type = other DNA
tgatcacccaggaga

SEQ ID NO: 22173 - DNA, 15 bp, synthetic construct
  source 1..15: mol_type = other DNA
ctgatcacccaggag

SEQ ID NO: 22174 - DNA, 15 bp, synthetic construct
  source 1..15: mol_type = other DNA
actgatcacccagga

SEQ ID NO: 22175 - DNA, 15 bp, synthetic construct
  source 1..15: mol_type = other DNA
ttgcactgatcaccc

SEQ ID NO: 22176 - DNA, 15 bp, synthetic construct
  source 1..15: mol_type = other DNA
tttgcactgatcacc

SEQ ID NO: 22177 - DNA, 15 bp, synthetic construct
  source 1..15: mol_type = other DNA
gggggctttgtgaca

SEQ ID NO: 22178 - DNA, 15 bp, synthetic construct
  source 1..15: mol_type = other DNA
agggggctttgtgac

SEQ ID NO: 22179 - DNA, 15 bp, synthetic construct
  source 1..15: mol_type = other DNA
atttgtctacagggg

SEQ ID NO: 22180 - DNA, 15 bp, synthetic construct
  source 1..15: mol_type = other DNA
ttctgggatttgtct

SEQ ID NO: 22181 - DNA, 15 bp, synthetic construct
  source 1..15: mol_type = other DNA
ccactgatcacccag

SEQ ID NO: 22182 - DNA, 15 bp, synthetic construct
  source 1..15: mol_type = other DNA
tccactgatcaccca

SEQ ID NO: 22183 - DNA, 15 bp, synthetic construct
  source 1..15: mol_type = other DNA
ctccactgatcaccc

SEQ ID NO: 22184 - DNA, 15 bp, synthetic construct
  source 1..15: mol_type = other DNA
tctccactgatcacc

SEQ ID NO: 22185 - DNA, 15 bp, synthetic construct
  source 1..15: mol_type = other DNA
atctccactgatcac

SEQ ID NO: 22186 - DNA, 15 bp, synthetic construct
  source 1..15: mol_type = other DNA
gtgacacatatctcc

SEQ ID NO: 22187 - DNA, 15 bp, synthetic construct
  source 1..15: mol_type = other DNA
gtgcctaaaggggaa

SEQ ID NO: 22188 - DNA, 15 bp, synthetic construct
  source 1..15: mol_type = other DNA
tgtgcctaaagggga

SEQ ID NO: 22189 - DNA, 15 bp, synthetic construct
  source 1..15: mol_type = other DNA
ctgtgcctaaagggg

SEQ ID NO: 22190 - DNA, 15 bp, synthetic construct
  source 1..15: mol_type = other DNA
gctgtgcctaaaggg

SEQ ID NO: 22191 - DNA, 15 bp, synthetic construct
  source 1..15: mol_type = other DNA
agctgtgcctaaagg

SEQ ID NO: 22192 - DNA, 15 bp, synthetic construct
  source 1..15: mol_type = other DNA
ctaagctgtgcctaa

SEQ ID NO: 22193 - DNA, 15 bp, synthetic construct
  source 1..15: mol_type = other DNA
tctaagctgtgccta

SEQ ID NO: 22194 - DNA, 15 bp, synthetic construct
  source 1..15: mol_type = other DNA
gtctaagctgtgcct

SEQ ID NO: 22195 - DNA, 15 bp, synthetic construct
  source 1..15: mol_type = other DNA
tgtctaagctgtgcc

SEQ ID NO: 22196 - DNA, 15 bp, synthetic construct
  source 1..15: mol_type = other DNA
ttgtctaagctgtgc

SEQ ID NO: 22197 - DNA, 15 bp, synthetic construct
  source 1..15: mol_type = other DNA
gcttgtctaagctgt

SEQ ID NO: 22198 - DNA, 15 bp, synthetic construct
  source 1..15: mol_type = other DNA
cgcttgtctaagctg

SEQ ID NO: 22199 - DNA, 15 bp, synthetic construct
  source 1..15: mol_type = other DNA
acgcttgtctaagct

SEQ ID NO: 22200 - DNA, 15 bp, synthetic construct
  source 1..15: mol_type = other DNA
ggggcatagtgacat

SEQ ID NO: 22201 - DNA, 15 bp, synthetic construct
  source 1..15: mol_type = other DNA
gggggcatagtgaca

SEQ ID NO: 22202 - DNA, 15 bp, synthetic construct
  source 1..15: mol_type = other DNA
tgggggcatagtgac

SEQ ID NO: 22203 - DNA, 15 bp, synthetic construct
  source 1..15: mol_type = other DNA
atgggggcatagtga

SEQ ID NO: 22204 - DNA, 15 bp, synthetic construct
  source 1..15: mol_type = other DNA
tatgggggcatagtg

SEQ ID NO: 22205 - DNA, 15 bp, synthetic construct
  source 1..15: mol_type = other DNA
ctatgggggcatagt

SEQ ID NO: 22206 - DNA, 15 bp, synthetic construct
  source 1..15: mol_type = other DNA
cctatgggggcatag

SEQ ID NO: 22207 - DNA, 15 bp, synthetic construct
  source 1..15: mol_type = other DNA
gcctatgggggcata

SEQ ID NO: 22208 - DNA, 15 bp, synthetic construct
  source 1..15: mol_type = other DNA
tgcctatgggggcat

SEQ ID NO: 22209 - DNA, 15 bp, synthetic construct
  source 1..15: mol_type = other DNA
ctgcctatgggggca

SEQ ID NO: 22210 - DNA, 15 bp, synthetic construct
  source 1..15: mol_type = other DNA
tctgcctatgggggc

SEQ ID NO: 22211 - DNA, 15 bp, synthetic construct
  source 1..15: mol_type = other DNA
atctgcctatggggg

SEQ ID NO: 22212 - DNA, 15 bp, synthetic construct
  source 1..15: mol_type = other DNA
gatctgcctatgggg

SEQ ID NO: 22213 - DNA, 15 bp, synthetic construct
  source 1..15: mol_type = other DNA
ggatctgcctatggg

SEQ ID NO: 22214 - DNA, 15 bp, synthetic construct
  source 1..15: mol_type = other DNA
tggatctgcctatgg

SEQ ID NO: 22215 - DNA, 15 bp, synthetic construct
  source 1..15: mol_type = other DNA
ttggatctgcctatg

SEQ ID NO: 22216 - DNA, 15 bp, synthetic construct
  source 1..15: mol_type = other DNA
cttggatctgcctat

SEQ ID NO: 22217 - DNA, 15 bp, synthetic construct
  source 1..15: mol_type = other DNA
tcttggatctgccta

SEQ ID NO: 22218 - DNA, 15 bp, synthetic construct
  source 1..15: mol_type = other DNA
gtcttggatctgcct

SEQ ID NO: 22219 - DNA, 15 bp, synthetic construct
  source 1..15: mol_type = other DNA
tgtcttggatctgcc

SEQ ID NO: 22220 - DNA, 15 bp, synthetic construct
  source 1..15: mol_type = other DNA
ttgtcttggatctgc

SEQ ID NO: 22221 - DNA, 15 bp, synthetic construct
  source 1..15: mol_type = other DNA
tcttgtcttggatct

SEQ ID NO: 22222 - DNA, 15 bp, synthetic construct
  source 1..15: mol_type = other DNA
ctcttgtcttggatc

SEQ ID NO: 22223 - DNA, 15 bp, synthetic construct
  source 1..15: mol_type = other DNA
actcttgtcttggat

SEQ ID NO: 22224 - DNA, 15 bp, synthetic construct
  source 1..15: mol_type = other DNA
gactcttgtcttgga

SEQ ID NO: 22225 - DNA, 15 bp, synthetic construct
  source 1..15: mol_type = other DNA
ggactcttgtcttgg

SEQ ID NO: 22226 - DNA, 15 bp, synthetic construct
  source 1..15: mol_type = other DNA
tggactcttgtcttg

SEQ ID NO: 22227 - DNA, 15 bp, synthetic construct
  source 1..15: mol_type = other DNA
atggactcttgtctt

SEQ ID NO: 22228 - DNA, 15 bp, synthetic construct
  source 1..15: mol_type = other DNA
gatggactcttgtct

SEQ ID NO: 22229 - DNA, 15 bp, synthetic construct
  source 1..15: mol_type = other DNA
gtgatggactcttgt

SEQ ID NO: 22230 - DNA, 15 bp, synthetic construct
  source 1..15: mol_type = other DNA
ggtgatggactcttg

SEQ ID NO: 22231 - DNA, 15 bp, synthetic construct
  source 1..15: mol_type = other DNA
aggtgatggactctt

SEQ ID NO: 22232 - DNA, 15 bp, synthetic construct
  source 1..15: mol_type = other DNA
caggtgatggactct

SEQ ID NO: 22233 - DNA, 15 bp, synthetic construct
  source 1..15: mol_type = other DNA
ccaggtgatggactc

SEQ ID NO: 22234 - DNA, 15 bp, synthetic construct
  source 1..15: mol_type = other DNA
cccaggtgatggact

SEQ ID NO: 22235 - DNA, 15 bp, synthetic construct
  source 1..15: mol_type = other DNA
gcatatttctgcact

SEQ ID NO: 22236 - DNA, 15 bp, synthetic construct
  source 1..15: mol_type = other DNA
ggcatatttctgcac

SEQ ID NO: 22237 - DNA, 15 bp, synthetic construct
  source 1..15: mol_type = other DNA
tggcatatttctgca

SEQ ID NO: 22238 - DNA, 15 bp, synthetic construct
  source 1..15: mol_type = other DNA
gtggcatatttctgc

SEQ ID NO: 22239 - DNA, 15 bp, synthetic construct
  source 1..15: mol_type = other DNA
gcattgtggcatatt

SEQ ID NO: 22240 - DNA, 15 bp, synthetic construct
  source 1..15: mol_type = other DNA
ggcattgtggcatat

SEQ ID NO: 22241 - DNA, 15 bp, synthetic construct
  source 1..15: mol_type = other DNA
cggcattgtggcata

SEQ ID NO: 22242 - DNA, 15 bp, synthetic construct
  source 1..15: mol_type = other DNA
gcggcattgtggcat

SEQ ID NO: 22243 - DNA, 15 bp, synthetic construct
  source 1..15: mol_type = other DNA
ggcggcattgtggca

SEQ ID NO: 22244 - DNA, 15 bp, synthetic construct
  source 1..15: mol_type = other DNA
tggcggcattgtggc

SEQ ID NO: 22245 - DNA, 15 bp, synthetic construct
  source 1..15: mol_type = other DNA
ctggcggcattgtgg

SEQ ID NO: 22246 - DNA, 15 bp, synthetic construct
  source 1..15: mol_type = other DNA
actggcggcattgtg

SEQ ID NO: 22247 - DNA, 15 bp, synthetic construct
  source 1..15: mol_type = other DNA
tactggcggcattgt

SEQ ID NO: 22248 - DNA, 15 bp, synthetic construct
  source 1..15: mol_type = other DNA
ctactggcggcattg

SEQ ID NO: 22249 - DNA, 15 bp, synthetic construct
  source 1..15: mol_type = other DNA
cctactggcggcatt

SEQ ID NO: 22250 - DNA, 15 bp, synthetic construct
  source 1..15: mol_type = other DNA
gcctactggcggcat

SEQ ID NO: 22251 - DNA, 15 bp, synthetic construct
  source 1..15: mol_type = other DNA
tgcctactggcggca

SEQ ID NO: 22252 - DNA, 15 bp, synthetic construct
  source 1..15: mol_type = other DNA
ctgcctactggcggc

SEQ ID NO: 22253 - DNA, 15 bp, synthetic construct
  source 1..15: mol_type = other DNA
tctgcctactggcgg

SEQ ID NO: 22254 - DNA, 15 bp, synthetic construct
  source 1..15: mol_type = other DNA
atctgcctactggcg

SEQ ID NO: 22255 - DNA, 15 bp, synthetic construct
  source 1..15: mol_type = other DNA
tatctgcctactggc

SEQ ID NO: 22256 - DNA, 15 bp, synthetic construct
  source 1..15: mol_type = other DNA
atatctgcctactgg

SEQ ID NO: 22257 - DNA, 15 bp, synthetic construct
  source 1..15: mol_type = other DNA
ctatatctgcctact

SEQ ID NO: 22258 - DNA, 15 bp, synthetic construct
  source 1..15: mol_type = other DNA
gtctatatctgccta

SEQ ID NO: 22259 - DNA, 15 bp, synthetic construct
  source 1..15: mol_type = other DNA
tgtctatatctgcct

SEQ ID NO: 22260 - DNA, 15 bp, synthetic construct
  source 1..15: mol_type = other DNA
ttgtctatatctgcc

SEQ ID NO: 22261 - DNA, 15 bp, synthetic construct
  source 1..15: mol_type = other DNA
cacgcaggtgatgta

SEQ ID NO: 22262 - DNA, 15 bp, synthetic construct
  source 1..15: mol_type = other DNA
tcacgcaggtgatgt

SEQ ID NO: 22263 - DNA, 15 bp, synthetic construct
  source 1..15: mol_type = other DNA
atcacgcaggtgatg

SEQ ID NO: 22264 - DNA, 15 bp, synthetic construct
  source 1..15: mol_type = other DNA
gatcacgcaggtgat

SEQ ID NO: 22265 - DNA, 15 bp, synthetic construct
  source 1..15: mol_type = other DNA
tgatcacgcaggtga

SEQ ID NO: 22266 - DNA, 15 bp, synthetic construct
  source 1..15: mol_type = other DNA
gtgatcacgcaggtg

SEQ ID NO: 22267 - DNA, 15 bp, synthetic construct
  source 1..15: mol_type = other DNA
agtgatcacgcaggt

SEQ ID NO: 22268 - DNA, 15 bp, synthetic construct
  source 1..15: mol_type = other DNA
cagtgatcacgcagg

SEQ ID NO: 22269 - DNA, 15 bp, synthetic construct
  source 1..15: mol_type = other DNA
gcagtgatcacgcag

SEQ ID NO: 22270 - DNA, 15 bp, synthetic construct
  source 1..15: mol_type = other DNA
tgcagtgatcacgca

SEQ ID NO: 22271 - DNA, 15 bp, synthetic construct
  source 1..15: mol_type = other DNA
ctgcagtgatcacgc

SEQ ID NO: 22272 - DNA, 15 bp, synthetic construct
  source 1..15: mol_type = other DNA
tctgcagtgatcacg

SEQ ID NO: 22273 - DNA, 15 bp, synthetic construct
  source 1..15: mol_type = other DNA
ctctgcagtgatcac

SEQ ID NO: 22274 - DNA, 15 bp, synthetic construct
  source 1..15: mol_type = other DNA
tctctgcagtgatca

SEQ ID NO: 22275 - DNA, 15 bp, synthetic construct
  source 1..15: mol_type = other DNA
atctctgcagtgatc

SEQ ID NO: 22276 - DNA, 15 bp, synthetic construct
  source 1..15: mol_type = other DNA
ggggcattgtgatat

SEQ ID NO: 22277 - DNA, 15 bp, synthetic construct
  source 1..15: mol_type = other DNA
aggggcattgtgata

SEQ ID NO: 22278 - DNA, 15 bp, synthetic construct
  source 1..15: mol_type = other DNA
caggggcattgtgat

SEQ ID NO: 22279 - DNA, 15 bp, synthetic construct
  source 1..15: mol_type = other DNA
gactcttgtctaggc

SEQ ID NO: 22280 - DNA, 15 bp, synthetic construct
  source 1..15: mol_type = other DNA
ggactcttgtctagg

SEQ ID NO: 22281 - DNA, 15 bp, synthetic construct
  source 1..15: mol_type = other DNA
gggactcttgtctag

SEQ ID NO: 22282 - DNA, 15 bp, synthetic construct
  source 1..15: mol_type = other DNA
tgggactcttgtcta

SEQ ID NO: 22283 - DNA, 15 bp, synthetic construct
  source 1..15: mol_type = other DNA
atgggactcttgtct

SEQ ID NO: 22284 - DNA, 15 bp, synthetic construct
  source 1..15: mol_type = other DNA
gatgggactcttgtc

SEQ ID NO: 22285 - DNA, 15 bp, synthetic construct
  source 1..15: mol_type = other DNA
tgatgggactcttgt

SEQ ID NO: 22286 - DNA, 15 bp, synthetic construct
  source 1..15: mol_type = other DNA
gtgatgggactcttg

SEQ ID NO: 22287 - DNA, 15 bp, synthetic construct
  source 1..15: mol_type = other DNA
actctgcactgatca

SEQ ID NO: 22288 - DNA, 15 bp, synthetic construct
  source 1..15: mol_type = other DNA
gggcattgtgacata

SEQ ID NO: 22289 - DNA, 15 bp, synthetic construct
  source 1..15: mol_type = other DNA
ggggcattgtgacat

SEQ ID NO: 22290 - DNA, 15 bp, synthetic construct
  source 1..15: mol_type = other DNA
gggggcattgtgaca

SEQ ID NO: 22291 - DNA, 15 bp, synthetic construct
  source 1..15: mol_type = other DNA
agggggcattgtgac

SEQ ID NO: 22292 - DNA, 15 bp, synthetic construct
  source 1..15: mol_type = other DNA
aagggggcattgtga

SEQ ID NO: 22293 - DNA, 15 bp, synthetic construct
  source 1..15: mol_type = other DNA
ccaaaagggggcatt

SEQ ID NO: 22294 - DNA, 15 bp, synthetic construct
  source 1..15: mol_type = other DNA
gccaaaagggggcat

SEQ ID NO: 22295 - DNA, 15 bp, synthetic construct
  source 1..15: mol_type = other DNA
tgccaaaagggggca

SEQ ID NO: 22296 - DNA, 15 bp, synthetic construct
  source 1..15: mol_type = other DNA
ctgccaaaagggggc

SEQ ID NO: 22297 - DNA, 15 bp, synthetic construct
  source 1..15: mol_type = other DNA
tctgccaaaaggggg

SEQ ID NO: 22298 - DNA, 15 bp, synthetic construct
  source 1..15: mol_type = other DNA
ctctgccaaaagggg

SEQ ID NO: 22299 - DNA, 15 bp, synthetic construct
  source 1..15: mol_type = other DNA
gctctgccaaaaggg

SEQ ID NO: 22300 - DNA, 15 bp, synthetic construct
  source 1..15: mol_type = other DNA
ggctctgccaaaagg

SEQ ID NO: 22301 - DNA, 15 bp, synthetic construct
  source 1..15: mol_type = other DNA
aggctctgccaaaag

SEQ ID NO: 22302 - DNA, 15 bp, synthetic construct
  source 1..15: mol_type = other DNA
ctaggctctgccaaa

SEQ ID NO: 22303 - DNA, 15 bp, synthetic construct
  source 1..15: mol_type = other DNA
tctaggctctgccaa

SEQ ID NO: 22304 - DNA, 15 bp, synthetic construct
  source 1..15: mol_type = other DNA
gtctaggctctgcca

SEQ ID NO: 22305 - DNA, 15 bp, synthetic construct
  source 1..15: mol_type = other DNA
ccttgtctaggctct

SEQ ID NO: 22306 - DNA, 15 bp, synthetic construct
  source 1..15: mol_type = other DNA
cccttgtctaggctc

SEQ ID NO: 22307 - DNA, 15 bp, synthetic construct
  source 1..15: mol_type = other DNA
acccttgtctaggct

SEQ ID NO: 22308 - DNA, 15 bp, synthetic construct
  source 1..15: mol_type = other DNA
aacccttgtctaggc

SEQ ID NO: 22309 - DNA, 15 bp, synthetic construct
  source 1..15: mol_type = other DNA
taacccttgtctagg

SEQ ID NO: 22310 - DNA, 15 bp, synthetic construct
  source 1..15: mol_type = other DNA
gtaacccttgtctag

SEQ ID NO: 22311 - DNA, 15 bp, synthetic construct
  source 1..15: mol_type = other DNA
tgtaacccttgtcta

SEQ ID NO: 22312 - DNA, 15 bp, synthetic construct
  source 1..15: mol_type = other DNA
atgtaacccttgtct

SEQ ID NO: 22313 - DNA, 15 bp, synthetic construct
  source 1..15: mol_type = other DNA
ccaggtgatgtaacc

SEQ ID NO: 22314 - DNA, 15 bp, synthetic construct
  source 1..15: mol_type = other DNA
gctacagggacattg

SEQ ID NO: 22315 - DNA, 15 bp, synthetic construct
  source 1..15: mol_type = other DNA
ggctacagggacatt

SEQ ID NO: 22316 - DNA, 15 bp, synthetic construct
  source 1..15: mol_type = other DNA
tggctacagggacat

SEQ ID NO: 22317 - DNA, 15 bp, synthetic construct
  source 1..15: mol_type = other DNA
atggctacagggaca

SEQ ID NO: 22318 - DNA, 15 bp, synthetic construct
  source 1..15: mol_type = other DNA
tatggctacagggac

SEQ ID NO: 22319 - DNA, 15 bp, synthetic construct
  source 1..15: mol_type = other DNA
atatggctacaggga

SEQ ID NO: 22320 - DNA, 15 bp, synthetic construct
  source 1..15: mol_type = other DNA
gatatggctacaggg

SEQ ID NO: 22321 - DNA, 15 bp, synthetic construct
  source 1..15: mol_type = other DNA
ggatatggctacagg

SEQ ID NO: 22322 - DNA, 15 bp, synthetic construct
  source 1..15: mol_type = other DNA
caggtgatgtcactt

SEQ ID NO: 22323 - DNA, 15 bp, synthetic construct
  source 1..15: mol_type = other DNA
ccaggtgatgtcact

SEQ ID NO: 22324 - DNA, 15 bp, synthetic construct
  source 1..15: mol_type = other DNA
cccaggtgatgtcac

SEQ ID NO: 22325 - DNA, 15 bp, synthetic construct
  source 1..15: mol_type = other DNA
acccaggtgatgtca

SEQ ID NO: 22326 - DNA, 15 bp, synthetic construct
  source 1..15: mol_type = other DNA
cacccaggtgatgtc

SEQ ID NO: 22327 - DNA, 15 bp, synthetic construct
  source 1..15: mol_type = other DNA
acactgatcacccag

SEQ ID NO: 22328 - DNA, 15 bp, synthetic construct
  source 1..15: mol_type = other DNA
cacactgatcaccca

SEQ ID NO: 22329 - DNA, 15 bp, synthetic construct
  source 1..15: mol_type = other DNA
ccacactgatcaccc

SEQ ID NO: 22330 - DNA, 15 bp, synthetic construct
  source 1..15: mol_type = other DNA
tccacactgatcacc

SEQ ID NO: 22331 - DNA, 15 bp, synthetic construct
  source 1..15: mol_type = other DNA
ctccacactgatcac

SEQ ID NO: 22332 - DNA, 15 bp, synthetic construct
  source 1..15: mol_type = other DNA
tctccacactgatca

SEQ ID NO: 22333 - DNA, 15 bp, synthetic construct
  source 1..15: mol_type = other DNA
atctccacactgatc

SEQ ID NO: 22334 - DNA, 15 bp, synthetic construct
  source 1..15: mol_type = other DNA
gtgacatatctccac

SEQ ID NO: 22335 - DNA, 15 bp, synthetic construct
  source 1..15: mol_type = other DNA
gcctactggagacat

SEQ ID NO: 22336 - DNA, 15 bp, synthetic construct
  source 1..15: mol_type = other DNA
tgcctactggagaca

SEQ ID NO: 22337 - DNA, 15 bp, synthetic construct
  source 1..15: mol_type = other DNA
ctgcctactggagac

SEQ ID NO: 22338 - DNA, 15 bp, synthetic construct
  source 1..15: mol_type = other DNA
tctgcctactggaga

SEQ ID NO: 22339 - DNA, 15 bp, synthetic construct
  source 1..15: mol_type = other DNA
ctctgcctactggag

SEQ ID NO: 22340 - DNA, 15 bp, synthetic construct
  source 1..15: mol_type = other DNA
gctctgcctactgga

SEQ ID NO: 22341 - DNA, 15 bp, synthetic construct
  source 1..15: mol_type = other DNA
ggctctgcctactgg

SEQ ID NO: 22342 - DNA, 15 bp, synthetic construct
  source 1..15: mol_type = other DNA
aggctctgcctactg

SEQ ID NO: 22343 - DNA, 15 bp, synthetic construct
  source 1..15: mol_type = other DNA
taggctctgcctact

SEQ ID NO: 22344 - DNA, 15 bp, synthetic construct
  source 1..15: mol_type = other DNA
cctgatcacccaggt

SEQ ID NO: 22345 - DNA, 15 bp, synthetic construct
  source 1..15: mol_type = other DNA
ccctgatcacccagg

SEQ ID NO: 22346 - DNA, 15 bp, synthetic construct
  source 1..15: mol_type = other DNA
gccctgatcacccag

SEQ ID NO: 22347 - DNA, 15 bp, synthetic construct
  source 1..15: mol_type = other DNA
tgccctgatcaccca

SEQ ID NO: 22348 - DNA, 15 bp, synthetic construct
  source 1..15: mol_type = other DNA
ctgccctgatcaccc

SEQ ID NO: 22349 - DNA, 15 bp, synthetic construct
  source 1..15: mol_type = other DNA
tctgccctgatcacc

SEQ ID NO: 22350 - DNA, 15 bp, synthetic construct
  source 1..15: mol_type = other DNA
ctctgccctgatcac

SEQ ID NO: 22351 - DNA, 15 bp, synthetic construct
  source 1..15: mol_type = other DNA
tctctgccctgatca

SEQ ID NO: 22352 - DNA, 15 bp, synthetic construct
  source 1..15: mol_type = other DNA
atctctgccctgatc

SEQ ID NO: 22353 - DNA, 15 bp, synthetic construct
  source 1..15: mol_type = other DNA
tatctctgccctgat

SEQ ID NO: 22354 - DNA, 15 bp, synthetic construct
  source 1..15: mol_type = other DNA
atatctctgccctga

SEQ ID NO: 22355 - DNA, 15 bp, synthetic construct
  source 1..15: mol_type = other DNA
catatctctgccctg

SEQ ID NO: 22356 - DNA, 15 bp, synthetic construct
  source 1..15: mol_type = other DNA
acatatctctgccct

SEQ ID NO: 22357 - DNA, 15 bp, synthetic construct
  source 1..15: mol_type = other DNA
gacatatctctgccc

SEQ ID NO: 22358 - DNA, 15 bp, synthetic construct
  source 1..15: mol_type = other DNA
tgacatatctctgcc

SEQ ID NO: 22359 - DNA, 15 bp, synthetic construct
  source 1..15: mol_type = other DNA
cagggggcattgtga

SEQ ID NO: 22360 - DNA, 15 bp, synthetic construct
  source 1..15: mol_type = other DNA
acagggggcattgtg

SEQ ID NO: 22361 - DNA, 15 bp, synthetic construct
  source 1..15: mol_type = other DNA
tacagggggcattgt

SEQ ID NO: 22362 - DNA, 15 bp, synthetic construct
  source 1..15: mol_type = other DNA
ttacagggggcattg

SEQ ID NO: 22363 - DNA, 15 bp, synthetic construct
  source 1..15: mol_type = other DNA
cttacagggggcatt

SEQ ID NO: 22364 - DNA, 15 bp, synthetic construct
  source 1..15: mol_type = other DNA
gcttacagggggcat

SEQ ID NO: 22365 - DNA, 15 bp, synthetic construct
  source 1..15: mol_type = other DNA
tgcttacagggggca

SEQ ID NO: 22366 - DNA, 15 bp, synthetic construct
  source 1..15: mol_type = other DNA
ctgcttacagggggc

SEQ ID NO: 22367 - DNA, 15 bp, synthetic construct
  source 1..15: mol_type = other DNA
tctgcttacaggggg

SEQ ID NO: 22368 - DNA, 15 bp, synthetic construct
  source 1..15: mol_type = other DNA
atctgcttacagggg

SEQ ID NO: 22369 - DNA, 15 bp, synthetic construct
  source 1..15: mol_type = other DNA
gatctgcttacaggg

SEQ ID NO: 22370 - DNA, 15 bp, synthetic construct
  source 1..15: mol_type = other DNA
ggatctgcttacagg

SEQ ID NO: 22371 - DNA, 15 bp, synthetic construct
  source 1..15: mol_type = other DNA
gggatctgcttacag

SEQ ID NO: 22372 - DNA, 15 bp, synthetic construct
  source 1..15: mol_type = other DNA
tgggatctgcttaca

SEQ ID NO: 22373 - DNA, 15 bp, synthetic construct
  source 1..15: mol_type = other DNA
ctgggatctgcttac

SEQ ID NO: 22374 - DNA, 15 bp, synthetic construct
  source 1..15: mol_type = other DNA
tctgggatctgctta

SEQ ID NO: 22375 - DNA, 15 bp, synthetic construct
  source 1..15: mol_type = other DNA
gtctgggatctgctt

SEQ ID NO: 22376 - DNA, 15 bp, synthetic construct
  source 1..15: mol_type = other DNA
tgtctgggatctgct

SEQ ID NO: 22377 - DNA, 15 bp, synthetic construct
  source 1..15: mol_type = other DNA
ttgtctgggatctgc

SEQ ID NO: 22378 - DNA, 15 bp, synthetic construct
  source 1..15: mol_type = other DNA
cttgtctgggatctg

SEQ ID NO: 22379 - DNA, 15 bp, synthetic construct
  source 1..15: mol_type = other DNA
tcttgtctgggatct

SEQ ID NO: 22380 - DNA, 15 bp, synthetic construct
  source 1..15: mol_type = other DNA
ctcttgtctgggatc

SEQ ID NO: 22381 - DNA, 15 bp, synthetic construct
  source 1..15: mol_type = other DNA
actcttgtctgggat

SEQ ID NO: 22382 - DNA, 15 bp, synthetic construct
  source 1..15: mol_type = other DNA
aactcttgtctggga

SEQ ID NO: 22383 - DNA, 15 bp, synthetic construct
  source 1..15: mol_type = other DNA
caactcttgtctggg

SEQ ID NO: 22384 - DNA, 15 bp, synthetic construct
  source 1..15: mol_type = other DNA
gcaactcttgtctgg

SEQ ID NO: 22385 - DNA, 15 bp, synthetic construct
  source 1..15: mol_type = other DNA
ggtgatgcaactctt

SEQ ID NO: 22386 - DNA, 15 bp, synthetic construct
  source 1..15: mol_type = other DNA
aggtgatgcaactct

SEQ ID NO: 22387 - DNA, 15 bp, synthetic construct
  source 1..15: mol_type = other DNA
ccgaggtgatgcaac

SEQ ID NO: 22388 - DNA, 15 bp, synthetic construct
  source 1..15: mol_type = other DNA
accgaggtgatgcaa

SEQ ID NO: 22389 - DNA, 15 bp, synthetic construct
  source 1..15: mol_type = other DNA
caccgaggtgatgca

SEQ ID NO: 22390 - DNA, 15 bp, synthetic construct
  source 1..15: mol_type = other DNA
tcaccgaggtgatgc

SEQ ID NO: 22391 - DNA, 15 bp, synthetic construct
  source 1..15: mol_type = other DNA
atcaccgaggtgatg

SEQ ID NO: 22392 - DNA, 15 bp, synthetic construct
  source 1..15: mol_type = other DNA
gatcaccgaggtgat

SEQ ID NO: 22393 - DNA, 15 bp, synthetic construct
  source 1..15: mol_type = other DNA
tgatcaccgaggtga

SEQ ID NO: 22394 - DNA, 15 bp, synthetic construct
  source 1..15: mol_type = other DNA
ctgatcaccgaggtg

SEQ ID NO: 22395 - DNA, 15 bp, synthetic construct
  source 1..15: mol_type = other DNA
actgatcaccgaggt

SEQ ID NO: 22396 - DNA, 15 bp, synthetic construct
  source 1..15: mol_type = other DNA
cactgatcaccgagg

SEQ ID NO: 22397 - DNA, 15 bp, synthetic construct
  source 1..15: mol_type = other DNA
gcactgatcaccgag

SEQ ID NO: 22398 - DNA, 15 bp, synthetic construct
  source 1..15: mol_type = other DNA
gacgtatctctgcac

SEQ ID NO: 22399 - DNA, 15 bp, synthetic construct
  source 1..15: mol_type = other DNA
ggcattgtgacgtat

SEQ ID NO: 22400 - DNA, 15 bp, synthetic construct
  source 1..15: mol_type = other DNA
gggcattgtgacgta

SEQ ID NO: 22401 - DNA, 15 bp, synthetic construct
  source 1..15: mol_type = other DNA
ggggcattgtgacgt

SEQ ID NO: 22402 - DNA, 15 bp, synthetic construct
  source 1..15: mol_type = other DNA
aggggcattgtgacg

SEQ ID NO: 22403 - DNA, 15 bp, synthetic construct
  source 1..15: mol_type = other DNA
cacctgggttatgta

SEQ ID NO: 22404 - DNA, 15 bp, synthetic construct
  source 1..15: mol_type = other DNA
tcacctgggttatgt

SEQ ID NO: 22405 - DNA, 15 bp, synthetic construct
  source 1..15: mol_type = other DNA
atcacctgggttatg

SEQ ID NO: 22406 - DNA, 15 bp, synthetic construct
  source 1..15: mol_type = other DNA
gatcacctgggttat

SEQ ID NO: 22407 - DNA, 15 bp, synthetic construct
  source 1..15: mol_type = other DNA
ggatcacctgggtta

SEQ ID NO: 22408 - DNA, 15 bp, synthetic construct
  source 1..15: mol_type = other DNA
cggatcacctgggtt

SEQ ID NO: 22409 - DNA, 15 bp, synthetic construct
  source 1..15: mol_type = other DNA
acggatcacctgggt

SEQ ID NO: 22410 - DNA, 15 bp, synthetic construct
  source 1..15: mol_type = other DNA
tacggatcacctggg

SEQ ID NO: 22411 - DNA, 15 bp, synthetic construct
  source 1..15: mol_type = other DNA
gtacggatcacctgg

SEQ ID NO: 22412 - DNA, 15 bp, synthetic construct
  source 1..15: mol_type = other DNA
tgtacggatcacctg

SEQ ID NO: 22413 - DNA, 15 bp, synthetic construct
  source 1..15: mol_type = other DNA
ctgtacggatcacct

SEQ ID NO: 22414 - DNA, 15 bp, synthetic construct
  source 1..15: mol_type = other DNA
tctgtacggatcacc

SEQ ID NO: 22415 - DNA, 15 bp, synthetic construct
  source 1..15: mol_type = other DNA
ctctgtacggatcac

SEQ ID NO: 22416 - DNA, 15 bp, synthetic construct
  source 1..15: mol_type = other DNA
actctgtacggatca

SEQ ID NO: 22417 - DNA, 15 bp, synthetic construct
  source 1..15: mol_type = other DNA
cactctgtacggatc

SEQ ID NO: 22418 - DNA, 15 bp, synthetic construct
  source 1..15: mol_type = other DNA
tcactctgtacggat

SEQ ID NO: 22419 - DNA, 15 bp, synthetic construct
  source 1..15: mol_type = other DNA
atcactctgtacgga

SEQ ID NO: 22420 - DNA, 15 bp, synthetic construct
  source 1..15: mol_type = other DNA
catcactctgtacgg

SEQ ID NO: 22421 - DNA, 15 bp, synthetic construct
  source 1..15: mol_type = other DNA
gtgacatcactctgt

SEQ ID NO: 22422 - DNA, 15 bp, synthetic construct
  source 1..15: mol_type = other DNA
gcgttgtgacatcac

SEQ ID NO: 22423 - DNA, 15 bp, synthetic construct
  source 1..15: mol_type = other DNA
ggcgttgtgacatca

SEQ ID NO: 22424 - DNA, 15 bp, synthetic construct
  source 1..15: mol_type = other DNA
gggcgttgtgacatc

SEQ ID NO: 22425 - DNA, 15 bp, synthetic construct
  source 1..15: mol_type = other DNA
agggcgttgtgacat

SEQ ID NO: 22426 - DNA, 15 bp, synthetic construct
  source 1..15: mol_type = other DNA
gagggcgttgtgaca

SEQ ID NO: 22427 - DNA, 15 bp, synthetic construct
  source 1..15: mol_type = other DNA
agagggcgttgtgac

SEQ ID NO: 22428 - DNA, 15 bp, synthetic construct
  source 1..15: mol_type = other DNA
cagagggcgttgtga

SEQ ID NO: 22429 - DNA, 15 bp, synthetic construct
  source 1..15: mol_type = other DNA
acagagggcgttgtg

SEQ ID NO: 22430 - DNA, 15 bp, synthetic construct
  source 1..15: mol_type = other DNA
tacagagggcgttgt

SEQ ID NO: 22431 - DNA, 15 bp, synthetic construct
  source 1..15: mol_type = other DNA
ctacagagggcgttg

SEQ ID NO: 22432 - DNA, 15 bp, synthetic construct
  source 1..15: mol_type = other DNA
cctacagagggcgtt

SEQ ID NO: 22433 - DNA, 15 bp, synthetic construct
  source 1..15: mol_type = other DNA
gcctacagagggcgt

SEQ ID NO: 22434 - DNA, 15 bp, synthetic construct
  source 1..15: mol_type = other DNA
tgcctacagagggcg

SEQ ID NO: 22435 - DNA, 15 bp, synthetic construct
  source 1..15: mol_type = other DNA
ctgcctacagagggc

SEQ ID NO: 22436 - DNA, 15 bp, synthetic construct
  source 1..15: mol_type = other DNA
tctgcctacagaggg

SEQ ID NO: 22437 - DNA, 15 bp, synthetic construct
  source 1..15: mol_type = other DNA
ctctgcctacagagg

SEQ ID NO: 22438 - DNA, 15 bp, synthetic construct
  source 1..15: mol_type = other DNA
tctctgcctacagag

SEQ ID NO: 22439 - DNA, 15 bp, synthetic construct
  source 1..15: mol_type = other DNA
gtctctgcctacaga

SEQ ID NO: 22440 - DNA, 15 bp, synthetic construct
  source 1..15: mol_type = other DNA
agtctctgcctacag

SEQ ID NO: 22441 - DNA, 15 bp, synthetic construct
  source 1..15: mol_type = other DNA
tagtctctgcctaca

SEQ ID NO: 22442 - DNA, 15 bp, synthetic construct
  source 1..15: mol_type = other DNA
ctagtctctgcctac

SEQ ID NO: 22443 - DNA, 15 bp, synthetic construct
  source 1..15: mol_type = other DNA
tctagtctctgccta

SEQ ID NO: 22444 - DNA, 15 bp, synthetic construct
  source 1..15: mol_type = other DNA
ttctagtctctgcct

SEQ ID NO: 22445 - DNA, 15 bp, synthetic construct
  source 1..15: mol_type = other DNA
tttctagtctctgcc

SEQ ID NO: 22446 - DNA, 15 bp, synthetic construct
  source 1..15: mol_type = other DNA
ttttctagtctctgc

SEQ ID NO: 22447 - DNA, 15 bp, synthetic construct
  source 1..15: mol_type = other DNA
tcttttctagtctct

SEQ ID NO: 22448 - DNA, 15 bp, synthetic construct
  source 1..15: mol_type = other DNA
ctcttttctagtctc

SEQ ID NO: 22449 - DNA, 15 bp, synthetic construct
  source 1..15: mol_type = other DNA
cacccaggtaatgta

SEQ ID NO: 22450 - DNA, 15 bp, synthetic construct
  source 1..15: mol_type = other DNA
tcacccaggtaatgt

SEQ ID NO: 22451 - DNA, 15 bp, synthetic construct
  source 1..15: mol_type = other DNA
gatcacccaggtaat

SEQ ID NO: 22452 - DNA, 15 bp, synthetic construct
  source 1..15: mol_type = other DNA
tgatcacccaggtaa

SEQ ID NO: 22453 - DNA, 15 bp, synthetic construct
  source 1..15: mol_type = other DNA
ctgatcacccaggta

SEQ ID NO: 22454 - DNA, 15 bp, synthetic construct
  source 1..15: mol_type = other DNA
ctacagggggcattg

SEQ ID NO: 22455 - DNA, 15 bp, synthetic construct
  source 1..15: mol_type = other DNA
cctacagggggcatt

SEQ ID NO: 22456 - DNA, 15 bp, synthetic construct
  source 1..15: mol_type = other DNA
gcctacagggggcat

SEQ ID NO: 22457 - DNA, 15 bp, synthetic construct
  source 1..15: mol_type = other DNA
tgcctacagggggca

SEQ ID NO: 22458 - DNA, 15 bp, synthetic construct
  source 1..15: mol_type = other DNA
ctgcctacagggggc

SEQ ID NO: 22459 - DNA, 15 bp, synthetic construct
  source 1..15: mol_type = other DNA
tctgcctacaggggg

SEQ ID NO: 22460 - DNA, 15 bp, synthetic construct
  source 1..15: mol_type = other DNA
tgctctgcctacagg

SEQ ID NO: 22461 - DNA, 15 bp, synthetic construct
  source 1..15: mol_type = other DNA
atgctctgcctacag

SEQ ID NO: 22462 - DNA, 15 bp, synthetic construct
  source 1..15: mol_type = other DNA
tatgctctgcctaca

SEQ ID NO: 22463 - DNA, 15 bp, synthetic construct
  source 1..15: mol_type = other DNA
ctatgctctgcctac

SEQ ID NO: 22464 - DNA, 15 bp, synthetic construct
  source 1..15: mol_type = other DNA
tctatgctctgccta

SEQ ID NO: 22465 - DNA, 15 bp, synthetic construct
  source 1..15: mol_type = other DNA
ctctatgctctgcct

SEQ ID NO: 22466 - DNA, 15 bp, synthetic construct
  source 1..15: mol_type = other DNA
tctctatgctctgcc

SEQ ID NO: 22467 - DNA, 15 bp, synthetic construct
  source 1..15: mol_type = other DNA
ttctctatgctctgc

SEQ ID NO: 22468 - DNA, 15 bp, synthetic construct
  source 1..15: mol_type = other DNA
cttctctatgctctg

SEQ ID NO: 22469 - DNA, 15 bp, synthetic construct
  source 1..15: mol_type = other DNA
tcttctctatgctct

SEQ ID NO: 22470 - DNA, 15 bp, synthetic construct
  source 1..15: mol_type = other DNA
ctcttctctatgctc

SEQ ID NO: 22471 - DNA, 15 bp, synthetic construct
  source 1..15: mol_type = other DNA
actcttctctatgct

SEQ ID NO: 22472 - DNA, 15 bp, synthetic construct
  source 1..15: mol_type = other DNA
atgcaactcttctct

SEQ ID NO: 22473 - DNA, 15 bp, synthetic construct
  source 1..15: mol_type = other DNA
ccaggtgatgcaact

SEQ ID NO: 22474 - DNA, 15 bp, synthetic construct
  source 1..15: mol_type = other DNA
cccaggtgatgcaac

SEQ ID NO: 22475 - DNA, 15 bp, synthetic construct
  source 1..15: mol_type = other DNA
acccaggtgatgcaa

SEQ ID NO: 22476 - DNA, 15 bp, synthetic construct
  source 1..15: mol_type = other DNA
cacccaggtgatgca

SEQ ID NO: 22477 - DNA, 15 bp, synthetic construct
  source 1..15: mol_type = other DNA
tcacccaggtgatgc

SEQ ID NO: 22478 - DNA, 15 bp, synthetic construct
  source 1..15: mol_type = other DNA
tacactgatcaccca

SEQ ID NO: 22479 - DNA, 15 bp, synthetic construct
  source 1..15: mol_type = other DNA
ctacactgatcaccc

SEQ ID NO: 22480 - DNA, 15 bp, synthetic construct
  source 1..15: mol_type = other DNA
ggggacattgtgaca

SEQ ID NO: 22481 - DNA, 15 bp, synthetic construct
  source 1..15: mol_type = other DNA
gatctgcctacaggg

SEQ ID NO: 22482 - DNA, 15 bp, synthetic construct
  source 1..15: mol_type = other DNA
ggatctgcctacagg

SEQ ID NO: 22483 - DNA, 15 bp, synthetic construct
  source 1..15: mol_type = other DNA
aggatctgcctacag

SEQ ID NO: 22484 - DNA, 15 bp, synthetic construct
  source 1..15: mol_type = other DNA
taggatctgcctaca

SEQ ID NO: 22485 - DNA, 15 bp, synthetic construct
  source 1..15: mol_type = other DNA
ctaggatctgcctac

SEQ ID NO: 22486 - DNA, 15 bp, synthetic construct
  source 1..15: mol_type = other DNA
tctaggatctgccta

SEQ ID NO: 22487 - DNA, 15 bp, synthetic construct
  source 1..15: mol_type = other DNA
gtctaggatctgcct

SEQ ID NO: 22488 - DNA, 15 bp, synthetic construct
  source 1..15: mol_type = other DNA
tgtctaggatctgcc

SEQ ID NO: 22489 - DNA, 15 bp, synthetic construct
  source 1..15: mol_type = other DNA
ttgtctaggatctgc

SEQ ID NO: 22490 - DNA, 15 bp, synthetic construct
  source 1..15: mol_type = other DNA
tcttgtctaggatct

SEQ ID NO: 22491 - DNA, 15 bp, synthetic construct
  source 1..15: mol_type = other DNA
ctcttgtctaggatc

SEQ ID NO: 22492 - DNA, 15 bp, synthetic construct
  source 1..15: mol_type = other DNA
gcactgatcacctaa

SEQ ID NO: 22493 - DNA, 15 bp, synthetic construct
  source 1..15: mol_type = other DNA
tctgcactgatcact

SEQ ID NO: 22494 - DNA, 15 bp, synthetic construct
  source 1..15: mol_type = other DNA
gcctacagggggctt

SEQ ID NO: 22495 - DNA, 15 bp, synthetic construct
  source 1..15: mol_type = other DNA
ctaggctttggccta

SEQ ID NO: 22496 - DNA, 15 bp, synthetic construct
  source 1..15: mol_type = other DNA
tctaggctttggcct

SEQ ID NO: 22497 - DNA, 15 bp, synthetic construct
  source 1..15: mol_type = other DNA
gtctaggctttggcc

SEQ ID NO: 22498 - DNA, 15 bp, synthetic construct
  source 1..15: mol_type = other DNA
tgtctaggctttggc

SEQ ID NO: 22499 - DNA, 15 bp, synthetic construct
  source 1..15: mol_type = other DNA
ttgtctaggctttgg

SEQ ID NO: 22500 - DNA, 15 bp, synthetic construct
  source 1..15: mol_type = other DNA
ctattgtctaggctt

SEQ ID NO: 22501 - DNA, 15 bp, synthetic construct
  source 1..15: mol_type = other DNA
actattgtctaggct

SEQ ID NO: 22502 - DNA, 15 bp, synthetic construct
  source 1..15: mol_type = other DNA
cacccaagtgatgta

SEQ ID NO: 22503 - DNA, 15 bp, synthetic construct
  source 1..15: mol_type = other DNA
tcacccaagtgatgt

SEQ ID NO: 22504 - DNA, 15 bp, synthetic construct
  source 1..15: mol_type = other DNA
gatcacccaagtgat

SEQ ID NO: 22505 - DNA, 15 bp, synthetic construct
  source 1..15: mol_type = other DNA
tgatcacccaagtga

SEQ ID NO: 22506 - DNA, 15 bp, synthetic construct
  source 1..15: mol_type = other DNA
ctgatcacccaagtg

SEQ ID NO: 22507 - DNA, 15 bp, synthetic construct
  source 1..15: mol_type = other DNA
actgatcacccaagt

SEQ ID NO: 22508 - DNA, 15 bp, synthetic construct
  source 1..15: mol_type = other DNA
cactgatcacccaag

SEQ ID NO: 22509 - DNA, 15 bp, synthetic construct
  source 1..15: mol_type = other DNA
ccactgatcacccaa

SEQ ID NO: 22510 - DNA, 15 bp, synthetic construct
  source 1..15: mol_type = other DNA
gccactgatcaccca

SEQ ID NO: 22511 - DNA, 15 bp, synthetic construct
  source 1..15: mol_type = other DNA
cgccactgatcaccc

SEQ ID NO: 22512 - DNA, 15 bp, synthetic construct
  source 1..15: mol_type = other DNA
tcgccactgatcacc

SEQ ID NO: 22513 - DNA, 15 bp, synthetic construct
  source 1..15: mol_type = other DNA
ctcgccactgatcac

SEQ ID NO: 22514 - DNA, 15 bp, synthetic construct
  source 1..15: mol_type = other DNA
tctcgccactgatca

SEQ ID NO: 22515 - DNA, 15 bp, synthetic construct
  source 1..15: mol_type = other DNA
atctcgccactgatc

SEQ ID NO: 22516 - DNA, 15 bp, synthetic construct
  source 1..15: mol_type = other DNA
gatctcgccactgat

SEQ ID NO: 22517 - DNA, 15 bp, synthetic construct
  source 1..15: mol_type = other DNA
agatctcgccactga

SEQ ID NO: 22518 - DNA, 15 bp, synthetic construct
  source 1..15: mol_type = other DNA
gagatctcgccactg

SEQ ID NO: 22519 - DNA, 15 bp, synthetic construct
  source 1..15: mol_type = other DNA
agagatctcgccact

SEQ ID NO: 22520 - DNA, 15 bp, synthetic construct
  source 1..15: mol_type = other DNA
gagagatctcgccac

SEQ ID NO: 22521 - DNA, 15 bp, synthetic construct
  source 1..15: mol_type = other DNA
tgagagatctcgcca

SEQ ID NO: 22522 - DNA, 15 bp, synthetic construct
  source 1..15: mol_type = other DNA
gtgagagatctcgcc

SEQ ID NO: 22523 - DNA, 15 bp, synthetic construct
  source 1..15: mol_type = other DNA
tgtgagagatctcgc

SEQ ID NO: 22524 - DNA, 15 bp, synthetic construct
  source 1..15: mol_type = other DNA
gcctacaggggaatt

SEQ ID NO: 22525 - DNA, 15 bp, synthetic construct
  source 1..15: mol_type = other DNA
tgcctacaggggaat

SEQ ID NO: 22526 - DNA, 15 bp, synthetic construct
  source 1..15: mol_type = other DNA
ctgcctacaggggaa

SEQ ID NO: 22527 - DNA, 15 bp, synthetic construct
  source 1..15: mol_type = other DNA
ataagctctgcctac

SEQ ID NO: 22528 - DNA, 15 bp, synthetic construct
  source 1..15: mol_type = other DNA
gtataagctctgcct

SEQ ID NO: 22529 - DNA, 15 bp, synthetic construct
  source 1..15: mol_type = other DNA
tgtataagctctgcc

SEQ ID NO: 22530 - DNA, 15 bp, synthetic construct
  source 1..15: mol_type = other DNA
tgggggcattgtgac

SEQ ID NO: 22531 - DNA, 15 bp, synthetic construct
  source 1..15: mol_type = other DNA
atgggggcattgtga

SEQ ID NO: 22532 - DNA, 15 bp, synthetic construct
  source 1..15: mol_type = other DNA
cctatgggggcattg

SEQ ID NO: 22533 - DNA, 15 bp, synthetic construct
  source 1..15: mol_type = other DNA
gcctatgggggcatt

SEQ ID NO: 22534 - DNA, 15 bp, synthetic construct
  source 1..15: mol_type = other DNA
gtgacgtatttctgc

SEQ ID NO: 22535 - DNA, 15 bp, synthetic construct
  source 1..15: mol_type = other DNA
gggggcattgtgacg

SEQ ID NO: 22536 - DNA, 15 bp, synthetic construct
  source 1..15: mol_type = other DNA
taagggggcattgtg

SEQ ID NO: 22537 - DNA, 15 bp, synthetic construct
  source 1..15: mol_type = other DNA
ctaagggggcattgt

SEQ ID NO: 22538 - DNA, 15 bp, synthetic construct
  source 1..15: mol_type = other DNA
cctaagggggcattg

SEQ ID NO: 22539 - DNA, 15 bp, synthetic construct
  source 1..15: mol_type = other DNA
gcctaagggggcatt

SEQ ID NO: 22540 - DNA, 15 bp, synthetic construct
  source 1..15: mol_type = other DNA
tgcctaagggggcat

SEQ ID NO: 22541 - DNA, 15 bp, synthetic construct
  source 1..15: mol_type = other DNA
ctgcctaagggggca

SEQ ID NO: 22542 - DNA, 15 bp, synthetic construct
  source 1..15: mol_type = other DNA
tctgcctaagggggc

SEQ ID NO: 22543 - DNA, 15 bp, synthetic construct
  source 1..15: mol_type = other DNA
ctctgcctaaggggg

SEQ ID NO: 22544 - DNA, 15 bp, synthetic construct
  source 1..15: mol_type = other DNA
gctctgcctaagggg

SEQ ID NO: 22545 - DNA, 15 bp, synthetic construct
  source 1..15: mol_type = other DNA
ggctctgcctaaggg

SEQ ID NO: 22546 - DNA, 15 bp, synthetic construct
  source 1..15: mol_type = other DNA
aggctctgcctaagg

SEQ ID NO: 22547 - DNA, 15 bp, synthetic construct
  source 1..15: mol_type = other DNA
taggctctgcctaag

SEQ ID NO: 22548 - DNA, 15 bp, synthetic construct
  source 1..15: mol_type = other DNA
ctaggctctgcctaa

SEQ ID NO: 22549 - DNA, 15 bp, synthetic construct
  source 1..15: mol_type = other DNA
tttgtctaggctctg

SEQ ID NO: 22550 - DNA, 15 bp, synthetic construct
  source 1..15: mol_type = other DNA
ttttgtctaggctct

SEQ ID NO: 22551 - DNA, 15 bp, synthetic construct
  source 1..15: mol_type = other DNA
cttttgtctaggctc

SEQ ID NO: 22552 - DNA, 15 bp, synthetic construct
  source 1..15: mol_type = other DNA
gcttttgtctaggct

SEQ ID NO: 22553 - DNA, 15 bp, synthetic construct
  source 1..15: mol_type = other DNA
ggcttttgtctaggc

SEQ ID NO: 22554 - DNA, 15 bp, synthetic construct
  source 1..15: mol_type = other DNA
gggcttttgtctagg

SEQ ID NO: 22555 - DNA, 15 bp, synthetic construct
  source 1..15: mol_type = other DNA
ggggcttttgtctag

SEQ ID NO: 22556 - DNA, 15 bp, synthetic construct
  source 1..15: mol_type = other DNA
tggggcttttgtcta

SEQ ID NO: 22557 - DNA, 15 bp, synthetic construct
  source 1..15: mol_type = other DNA
atggggcttttgtct

SEQ ID NO: 22558 - DNA, 15 bp, synthetic construct
  source 1..15: mol_type = other DNA
gatggggcttttgtc

SEQ ID NO: 22559 - DNA, 15 bp, synthetic construct
  source 1..15: mol_type = other DNA
tgatggggcttttgt

SEQ ID NO: 22560 - DNA, 15 bp, synthetic construct
  source 1..15: mol_type = other DNA
gtgatggggcttttg

SEQ ID NO: 22561 - DNA, 15 bp, synthetic construct
  source 1..15: mol_type = other DNA
ggtgatggggctttt

SEQ ID NO: 22562 - DNA, 15 bp, synthetic construct
  source 1..15: mol_type = other DNA
aggtgatggggcttt

SEQ ID NO: 22563 - DNA, 15 bp, synthetic construct
  source 1..15: mol_type = other DNA
caggtgatggggctt

SEQ ID NO: 22564 - DNA, 15 bp, synthetic construct
  source 1..15: mol_type = other DNA
ccaggtgatggggct

SEQ ID NO: 22565 - DNA, 15 bp, synthetic construct
  source 1..15: mol_type = other DNA
tccaggtgatggggc

SEQ ID NO: 22566 - DNA, 15 bp, synthetic construct
  source 1..15: mol_type = other DNA
atccaggtgatgggg

SEQ ID NO: 22567 - DNA, 15 bp, synthetic construct
  source 1..15: mol_type = other DNA
catccaggtgatggg

SEQ ID NO: 22568 - DNA, 15 bp, synthetic construct
  source 1..15: mol_type = other DNA
tcatccaggtgatgg

SEQ ID NO: 22569 - DNA, 15 bp, synthetic construct
  source 1..15: mol_type = other DNA
atcatccaggtgatg

SEQ ID NO: 22570 - DNA, 15 bp, synthetic construct
  source 1..15: mol_type = other DNA
gtggcattgtgacat

SEQ ID NO: 22571 - DNA, 15 bp, synthetic construct
  source 1..15: mol_type = other DNA
agtggcattgtgaca

SEQ ID NO: 22572 - DNA, 15 bp, synthetic construct
  source 1..15: mol_type = other DNA
cagtggcattgtgac

SEQ ID NO: 22573 - DNA, 15 bp, synthetic construct
  source 1..15: mol_type = other DNA
acagtggcattgtga

SEQ ID NO: 22574 - DNA, 15 bp, synthetic construct
  source 1..15: mol_type = other DNA
ctacagtggcattgt

SEQ ID NO: 22575 - DNA, 15 bp, synthetic construct
  source 1..15: mol_type = other DNA
cctacagtggcattg

SEQ ID NO: 22576 - DNA, 15 bp, synthetic construct
  source 1..15: mol_type = other DNA
gcctacagtggcatt

SEQ ID NO: 22577 - DNA, 15 bp, synthetic construct
  source 1..15: mol_type = other DNA
tgcctacagtggcat

SEQ ID NO: 22578 - DNA, 15 bp, synthetic construct
  source 1..15: mol_type = other DNA
ctgcctacagtggca

SEQ ID NO: 22579 - DNA, 15 bp, synthetic construct
  source 1..15: mol_type = other DNA
tctgcctacagtggc

SEQ ID NO: 22580 - DNA, 15 bp, synthetic construct
  source 1..15: mol_type = other DNA
ctctgcctacagtgg

SEQ ID NO: 22581 - DNA, 15 bp, synthetic construct
  source 1..15: mol_type = other DNA
gctctgcctacagtg

SEQ ID NO: 22582 - DNA, 15 bp, synthetic construct
  source 1..15: mol_type = other DNA
ggctctgcctacagt

SEQ ID NO: 22583 - DNA, 15 bp, synthetic construct
  source 1..15: mol_type = other DNA
tcacctaggtcatat

SEQ ID NO: 22584 - DNA, 15 bp, synthetic construct
  source 1..15: mol_type = other DNA
atcacctaggtcata

SEQ ID NO: 22585 - DNA, 15 bp, synthetic construct
  source 1..15: mol_type = other DNA
gatcacctaggtcat

SEQ ID NO: 22586 - DNA, 15 bp, synthetic construct
  source 1..15: mol_type = other DNA
tgatcacctaggtca

SEQ ID NO: 22587 - DNA, 15 bp, synthetic construct
  source 1..15: mol_type = other DNA
ctgatcacctaggtc

SEQ ID NO: 22588 - DNA, 15 bp, synthetic construct
  source 1..15: mol_type = other DNA
tgtatctctgcactg

SEQ ID NO: 22589 - DNA, 15 bp, synthetic construct
  source 1..15: mol_type = other DNA
atgtatctctgcact

SEQ ID NO: 22590 - DNA, 15 bp, synthetic construct
  source 1..15: mol_type = other DNA
ctacaggggcattgc

SEQ ID NO: 22591 - DNA, 15 bp, synthetic construct
  source 1..15: mol_type = other DNA
gggctctgcctacag

SEQ ID NO: 22592 - DNA, 15 bp, synthetic construct
  source 1..15: mol_type = other DNA
agggctctgcctaca

SEQ ID NO: 22593 - DNA, 15 bp, synthetic construct
  source 1..15: mol_type = other DNA
cagggctctgcctac

SEQ ID NO: 22594 - DNA, 15 bp, synthetic construct
  source 1..15: mol_type = other DNA
tcagggctctgccta

SEQ ID NO: 22595 - DNA, 15 bp, synthetic construct
  source 1..15: mol_type = other DNA
tgtcagggctctgcc

SEQ ID NO: 22596 - DNA, 15 bp, synthetic construct
  source 1..15: mol_type = other DNA
ttgtcagggctctgc

SEQ ID NO: 22597 - DNA, 15 bp, synthetic construct
  source 1..15: mol_type = other DNA
cttgtcagggctctg

SEQ ID NO: 22598 - DNA, 15 bp, synthetic construct
  source 1..15: mol_type = other DNA
acttgtcagggctct

SEQ ID NO: 22599 - DNA, 15 bp, synthetic construct
  source 1..15: mol_type = other DNA
cacttgtcagggctc

SEQ ID NO: 22600 - DNA, 15 bp, synthetic construct
  source 1..15: mol_type = other DNA
ccacttgtcagggct

SEQ ID NO: 22601 - DNA, 15 bp, synthetic construct
  source 1..15: mol_type = other DNA
accacttgtcagggc

SEQ ID NO: 22602 - DNA, 15 bp, synthetic construct
  source 1..15: mol_type = other DNA
taccacttgtcaggg

SEQ ID NO: 22603 - DNA, 15 bp, synthetic construct
  source 1..15: mol_type = other DNA
gtaccacttgtcagg

SEQ ID NO: 22604 - DNA, 15 bp, synthetic construct
  source 1..15: mol_type = other DNA
tgtaccacttgtcag

SEQ ID NO: 22605 - DNA, 15 bp, synthetic construct
  source 1..15: mol_type = other DNA
atgtaccacttgtca

SEQ ID NO: 22606 - DNA, 15 bp, synthetic construct
  source 1..15: mol_type = other DNA
gatgtaccacttgtc

SEQ ID NO: 22607 - DNA, 15 bp, synthetic construct
  source 1..15: mol_type = other DNA
ggtgatgtaccactt

SEQ ID NO: 22608 - DNA, 15 bp, synthetic construct
  source 1..15: mol_type = other DNA
aggtgatgtaccact

SEQ ID NO: 22609 - DNA, 15 bp, synthetic construct
  source 1..15: mol_type = other DNA
caggtgatgtaccac

SEQ ID NO: 22610 - DNA, 15 bp, synthetic construct
  source 1..15: mol_type = other DNA
ccaggtgatgtacca

SEQ ID NO: 22611 - DNA, 15 bp, synthetic construct
  source 1..15: mol_type = other DNA
cccaggtgatgtacc

SEQ ID NO: 22612 - DNA, 15 bp, synthetic construct
  source 1..15: mol_type = other DNA
acccaggtgatgtac

SEQ ID NO: 22613 - DNA, 15 bp, synthetic construct
  source 1..15: mol_type = other DNA
cctgcaatgatcacc

SEQ ID NO: 22614 - DNA, 15 bp, synthetic construct
  source 1..15: mol_type = other DNA
ccctgcaatgatcac

SEQ ID NO: 22615 - DNA, 15 bp, synthetic construct
  source 1..15: mol_type = other DNA
tccctgcaatgatca

SEQ ID NO: 22616 - DNA, 15 bp, synthetic construct
  source 1..15: mol_type = other DNA
atccctgcaatgatc

SEQ ID NO: 22617 - DNA, 15 bp, synthetic construct
  source 1..15: mol_type = other DNA
acatatccctgcaat

SEQ ID NO: 22618 - DNA, 15 bp, synthetic construct
  source 1..15: mol_type = other DNA
gacatatccctgcaa

SEQ ID NO: 22619 - DNA, 15 bp, synthetic construct
  source 1..15: mol_type = other DNA
tgacatatccctgca

SEQ ID NO: 22620 - DNA, 15 bp, synthetic construct
  source 1..15: mol_type = other DNA
gtgacatatccctgc

SEQ ID NO: 22621 - DNA, 15 bp, synthetic construct
  source 1..15: mol_type = other DNA
tgtgacatatccctg

SEQ ID NO: 22622 - DNA, 15 bp, synthetic construct
  source 1..15: mol_type = other DNA
ttgtgacatatccct

SEQ ID NO: 22623 - DNA, 15 bp, synthetic construct
  source 1..15: mol_type = other DNA
ggtgctttgtgacat

SEQ ID NO: 22624 - DNA, 15 bp, synthetic construct
  source 1..15: mol_type = other DNA
gggtgctttgtgaca

SEQ ID NO: 22625 - DNA, 15 bp, synthetic construct
  source 1..15: mol_type = other DNA
agggtgctttgtgac

SEQ ID NO: 22626 - DNA, 15 bp, synthetic construct
  source 1..15: mol_type = other DNA
cagggtgctttgtga

SEQ ID NO: 22627 - DNA, 15 bp, synthetic construct
  source 1..15: mol_type = other DNA
acagggtgctttgtg

SEQ ID NO: 22628 - DNA, 15 bp, synthetic construct
  source 1..15: mol_type = other DNA
tacagggtgctttgt

SEQ ID NO: 22629 - DNA, 15 bp, synthetic construct
  source 1..15: mol_type = other DNA
ctacagggtgctttg

SEQ ID NO: 22630 - DNA, 15 bp, synthetic construct
  source 1..15: mol_type = other DNA
cctacagggtgcttt

SEQ ID NO: 22631 - DNA, 15 bp, synthetic construct
  source 1..15: mol_type = other DNA
gcctacagggtgctt

SEQ ID NO: 22632 - DNA, 15 bp, synthetic construct
  source 1..15: mol_type = other DNA
tgcctacagggtgct

SEQ ID NO: 22633 - DNA, 15 bp, synthetic construct
  source 1..15: mol_type = other DNA
ctgcctacagggtgc

SEQ ID NO: 22634 - DNA, 15 bp, synthetic construct
  source 1..15: mol_type = other DNA
tctgcctacagggtg

SEQ ID NO: 22635 - DNA, 15 bp, synthetic construct
  source 1..15: mol_type = other DNA
atctgcctacagggt

SEQ ID NO: 22636 - DNA, 15 bp, synthetic construct
  source 1..15: mol_type = other DNA
ccaggtcatgtaact

SEQ ID NO: 22637 - DNA, 15 bp, synthetic construct
  source 1..15: mol_type = other DNA
cccaggtcatgtaac

SEQ ID NO: 22638 - DNA, 15 bp, synthetic construct
  source 1..15: mol_type = other DNA
acccaggtcatgtaa

SEQ ID NO: 22639 - DNA, 15 bp, synthetic construct
  source 1..15: mol_type = other DNA
cacccaggtcatgta

SEQ ID NO: 22640 - DNA, 15 bp, synthetic construct
  source 1..15: mol_type = other DNA
tcacccaggtcatgt

SEQ ID NO: 22641 - DNA, 15 bp, synthetic construct
  source 1..15: mol_type = other DNA
atcacccaggtcatg

SEQ ID NO: 22642 - DNA, 15 bp, synthetic construct
  source 1..15: mol_type = other DNA
gatcacccaggtcat

SEQ ID NO: 22643 - DNA, 15 bp, synthetic construct
  source 1..15: mol_type = other DNA
tgatcacccaggtca

SEQ ID NO: 22644 - DNA, 15 bp, synthetic construct
  source 1..15: mol_type = other DNA
ctgatcacccaggtc

SEQ ID NO: 22645 - DNA, 15 bp, synthetic construct
  source 1..15: mol_type = other DNA
cacctaggtcatgta

SEQ ID NO: 22646 - DNA, 15 bp, synthetic construct
  source 1..15: mol_type = other DNA
tcacctaggtcatgt

SEQ ID NO: 22647 - DNA, 15 bp, synthetic construct
  source 1..15: mol_type = other DNA
atcacctaggtcatg

SEQ ID NO: 22648 - DNA, 15 bp, synthetic construct
  source 1..15: mol_type = other DNA
gatgtatctctgcac

SEQ ID NO: 22649 - DNA, 15 bp, synthetic construct
  source 1..15: mol_type = other DNA
cgatgtatctctgca

SEQ ID NO: 22650 - DNA, 15 bp, synthetic construct
  source 1..15: mol_type = other DNA
gcgatgtatctctgc

SEQ ID NO: 22651 - DNA, 15 bp, synthetic construct
  source 1..15: mol_type = other DNA
ggcattgcgatgtat

SEQ ID NO: 22652 - DNA, 15 bp, synthetic construct
  source 1..15: mol_type = other DNA
gggcattgcgatgta

SEQ ID NO: 22653 - DNA, 15 bp, synthetic construct
  source 1..15: mol_type = other DNA
ggggcattgcgatgt

SEQ ID NO: 22654 - DNA, 15 bp, synthetic construct
  source 1..15: mol_type = other DNA
aggggcattgcgatg

SEQ ID NO: 22655 - DNA, 15 bp, synthetic construct
  source 1..15: mol_type = other DNA
caggggcattgcgat

SEQ ID NO: 22656 - DNA, 15 bp, synthetic construct
  source 1..15: mol_type = other DNA
acaggggcattgcga

SEQ ID NO: 22657 - DNA, 15 bp, synthetic construct
  source 1..15: mol_type = other DNA
tacaggggcattgcg

SEQ ID NO: 22658 - DNA, 15 bp, synthetic construct
  source 1..15: mol_type = other DNA
aaggctctgcctaca

SEQ ID NO: 22659 - DNA, 15 bp, synthetic construct
  source 1..15: mol_type = other DNA
caaggctctgcctac

SEQ ID NO: 22660 - DNA, 15 bp, synthetic construct
  source 1..15: mol_type = other DNA
tcaaggctctgccta

SEQ ID NO: 22661 - DNA, 15 bp, synthetic construct
  source 1..15: mol_type = other DNA
gtcaaggctctgcct

SEQ ID NO: 22662 - DNA, 15 bp, synthetic construct
  source 1..15: mol_type = other DNA
tgtcaaggctctgcc

SEQ ID NO: 22663 - DNA, 15 bp, synthetic construct
  source 1..15: mol_type = other DNA
ttgtcaaggctctgc

SEQ ID NO: 22664 - DNA, 15 bp, synthetic construct
  source 1..15: mol_type = other DNA
cttgtcaaggctctg

SEQ ID NO: 22665 - DNA, 15 bp, synthetic construct
  source 1..15: mol_type = other DNA
acttgtcaaggctct

SEQ ID NO: 22666 - DNA, 15 bp, synthetic construct
  source 1..15: mol_type = other DNA
cacttgtcaaggctc

SEQ ID NO: 22667 - DNA, 15 bp, synthetic construct
  source 1..15: mol_type = other DNA
ccacttgtcaaggct

SEQ ID NO: 22668 - DNA, 15 bp, synthetic construct
  source 1..15: mol_type = other DNA
accacttgtcaaggc

SEQ ID NO: 22669 - DNA, 15 bp, synthetic construct
  source 1..15: mol_type = other DNA
ttacagggtgctttg

SEQ ID NO: 22670 - DNA, 15 bp, synthetic construct
  source 1..15: mol_type = other DNA
cttacagggtgcttt

SEQ ID NO: 22671 - DNA, 15 bp, synthetic construct
  source 1..15: mol_type = other DNA
gcttacagggtgctt

SEQ ID NO: 22672 - DNA, 15 bp, synthetic construct
  source 1..15: mol_type = other DNA
tgcttacagggtgct

SEQ ID NO: 22673 - DNA, 15 bp, synthetic construct
  source 1..15: mol_type = other DNA
ctgcttacagggtgc

SEQ ID NO: 22674 - DNA, 15 bp, synthetic construct
  source 1..15: mol_type = other DNA
tctgcttacagggtg

SEQ ID NO: 22675 - DNA, 15 bp, synthetic construct
  source 1..15: mol_type = other DNA
atctgcttacagggt

SEQ ID NO: 22676 - DNA, 15 bp, synthetic construct
  source 1..15: mol_type = other DNA
ctctaggatctgctt

SEQ ID NO: 22677 - DNA, 15 bp, synthetic construct
  source 1..15: mol_type = other DNA
tctctaggatctgct

SEQ ID NO: 22678 - DNA, 15 bp, synthetic construct
  source 1..15: mol_type = other DNA
ttctctaggatctgc

SEQ ID NO: 22679 - DNA, 15 bp, synthetic construct
  source 1..15: mol_type = other DNA
tcttctctaggatct

SEQ ID NO: 22680 - DNA, 15 bp, synthetic construct
  source 1..15: mol_type = other DNA
ctcttctctaggatc

SEQ ID NO: 22681 - DNA, 15 bp, synthetic construct
  source 1..15: mol_type = other DNA
cacccaggtgatata

SEQ ID NO: 22682 - DNA, 15 bp, synthetic construct
  source 1..15: mol_type = other DNA
tcacccaggtgatat

SEQ ID NO: 22683 - DNA, 15 bp, synthetic construct
  source 1..15: mol_type = other DNA
atcacccaggtgata

SEQ ID NO: 22684 - DNA, 15 bp, synthetic construct
  source 1..15: mol_type = other DNA
gggcttgtgacatat

SEQ ID NO: 22685 - DNA, 15 bp, synthetic construct
  source 1..15: mol_type = other DNA
ggggcttgtgacata

SEQ ID NO: 22686 - DNA, 15 bp, synthetic construct
  source 1..15: mol_type = other DNA
gggggcttgtgacat

SEQ ID NO: 22687 - DNA, 15 bp, synthetic construct
  source 1..15: mol_type = other DNA
agggggcttgtgaca

SEQ ID NO: 22688 - DNA, 15 bp, synthetic construct
  source 1..15: mol_type = other DNA
cagggggcttgtgac

SEQ ID NO: 22689 - DNA, 15 bp, synthetic construct
  source 1..15: mol_type = other DNA
acagggggcttgtga

SEQ ID NO: 22690 - DNA, 15 bp, synthetic construct
  source 1..15: mol_type = other DNA
tacagggggcttgtg

SEQ ID NO: 22691 - DNA, 15 bp, synthetic construct
  source 1..15: mol_type = other DNA
ctacagggggcttgt

SEQ ID NO: 22692 - DNA, 15 bp, synthetic construct
  source 1..15: mol_type = other DNA
cctacagggggcttg

SEQ ID NO: 22693 - DNA, 15 bp, synthetic construct
  source 1..15: mol_type = other DNA
tgcctacagggggct

SEQ ID NO: 22694 - DNA, 15 bp, synthetic construct
  source 1..15: mol_type = other DNA
aggctctggctacac

SEQ ID NO: 22695 - DNA, 15 bp, synthetic construct
  source 1..15: mol_type = other DNA
taggctctggctaca

SEQ ID NO: 22696 - DNA, 15 bp, synthetic construct
  source 1..15: mol_type = other DNA
ctaggctctggctac

SEQ ID NO: 22697 - DNA, 15 bp, synthetic construct
  source 1..15: mol_type = other DNA
tctaggctctggcta

SEQ ID NO: 22698 - DNA, 15 bp, synthetic construct
  source 1..15: mol_type = other DNA
gtctaggctctggct

SEQ ID NO: 22699 - DNA, 15 bp, synthetic construct
  source 1..15: mol_type = other DNA
caggtgctgtaactt

SEQ ID NO: 22700 - DNA, 15 bp, synthetic construct
  source 1..15: mol_type = other DNA
ccaggtgctgtaact

SEQ ID NO: 22701 - DNA, 15 bp, synthetic construct
  source 1..15: mol_type = other DNA
cccaggtgctgtaac

SEQ ID NO: 22702 - DNA, 15 bp, synthetic construct
  source 1..15: mol_type = other DNA
tcccaggtgctgtaa

SEQ ID NO: 22703 - DNA, 15 bp, synthetic construct
  source 1..15: mol_type = other DNA
ctcccaggtgctgta

SEQ ID NO: 22704 - DNA, 15 bp, synthetic construct
  source 1..15: mol_type = other DNA
tctcccaggtgctgt

SEQ ID NO: 22705 - DNA, 15 bp, synthetic construct
  source 1..15: mol_type = other DNA
atctcccaggtgctg

SEQ ID NO: 22706 - DNA, 15 bp, synthetic construct
  source 1..15: mol_type = other DNA
gatctcccaggtgct

SEQ ID NO: 22707 - DNA, 15 bp, synthetic construct
  source 1..15: mol_type = other DNA
tgatctcccaggtgc

SEQ ID NO: 22708 - DNA, 15 bp, synthetic construct
  source 1..15: mol_type = other DNA
ctgatctcccaggtg

SEQ ID NO: 22709 - DNA, 15 bp, synthetic construct
  source 1..15: mol_type = other DNA
actgatctcccaggt

SEQ ID NO: 22710 - DNA, 15 bp, synthetic construct
  source 1..15: mol_type = other DNA
cactgatctcccagg

SEQ ID NO: 22711 - DNA, 15 bp, synthetic construct
  source 1..15: mol_type = other DNA
gcactgatctcccag

SEQ ID NO: 22712 - DNA, 15 bp, synthetic construct
  source 1..15: mol_type = other DNA
tgcactgatctccca

SEQ ID NO: 22713 - DNA, 15 bp, synthetic construct
  source 1..15: mol_type = other DNA
ctgcactgatctccc

SEQ ID NO: 22714 - DNA, 15 bp, synthetic construct
  source 1..15: mol_type = other DNA
tctgcactgatctcc

SEQ ID NO: 22715 - DNA, 15 bp, synthetic construct
  source 1..15: mol_type = other DNA
ctctgcactgatctc

SEQ ID NO: 22716 - DNA, 15 bp, synthetic construct
  source 1..15: mol_type = other DNA
tctctgcactgatct

SEQ ID NO: 22717 - DNA, 15 bp, synthetic construct
  source 1..15: mol_type = other DNA
tggggacattgtgac

SEQ ID NO: 22718 - DNA, 15 bp, synthetic construct
  source 1..15: mol_type = other DNA
ctggggacattgtga

SEQ ID NO: 22719 - DNA, 15 bp, synthetic construct
  source 1..15: mol_type = other DNA
actggggacattgtg

SEQ ID NO: 22720 - DNA, 15 bp, synthetic construct
  source 1..15: mol_type = other DNA
tactggggacattgt

SEQ ID NO: 22721 - DNA, 15 bp, synthetic construct
  source 1..15: mol_type = other DNA
cctactggggacatt

SEQ ID NO: 22722 - DNA, 15 bp, synthetic construct
  source 1..15: mol_type = other DNA
gcctactggggacat

SEQ ID NO: 22723 - DNA, 15 bp, synthetic construct
  source 1..15: mol_type = other DNA
tgcctactggggaca

SEQ ID NO: 22724 - DNA, 15 bp, synthetic construct
  source 1..15: mol_type = other DNA
ctgcctactggggac

SEQ ID NO: 22725 - DNA, 15 bp, synthetic construct
  source 1..15: mol_type = other DNA
tctgcctactgggga

SEQ ID NO: 22726 - DNA, 15 bp, synthetic construct
  source 1..15: mol_type = other DNA
ctctgcctactgggg

SEQ ID NO: 22727 - DNA, 15 bp, synthetic construct
  source 1..15: mol_type = other DNA
tctctgcctactggg

SEQ ID NO: 22728 - DNA, 15 bp, synthetic construct
  source 1..15: mol_type = other DNA
gtctctgcctactgg

SEQ ID NO: 22729 - DNA, 15 bp, synthetic construct
  source 1..15: mol_type = other DNA
ggtctctgcctactg

SEQ ID NO: 22730 - DNA, 15 bp, synthetic construct
  source 1..15: mol_type = other DNA
tggtctctgcctact

SEQ ID NO: 22731 - DNA, 15 bp, synthetic construct
  source 1..15: mol_type = other DNA
ctggtctctgcctac

SEQ ID NO: 22732 - DNA, 15 bp, synthetic construct
  source 1..15: mol_type = other DNA
cctggtctctgccta

SEQ ID NO: 22733 - DNA, 15 bp, synthetic construct
  source 1..15: mol_type = other DNA
tgcctggtctctgcc

SEQ ID NO: 22734 - DNA, 15 bp, synthetic construct
  source 1..15: mol_type = other DNA
ttgcctggtctctgc

SEQ ID NO: 22735 - DNA, 15 bp, synthetic construct
  source 1..15: mol_type = other DNA
cttgcctggtctctg

SEQ ID NO: 22736 - DNA, 15 bp, synthetic construct
  source 1..15: mol_type = other DNA
tcttgcctggtctct

SEQ ID NO: 22737 - DNA, 15 bp, synthetic construct
  source 1..15: mol_type = other DNA
ctcttgcctggtctc

SEQ ID NO: 22738 - DNA, 15 bp, synthetic construct
  source 1..15: mol_type = other DNA
actcttgcctggtct

SEQ ID NO: 22739 - DNA, 15 bp, synthetic construct
  source 1..15: mol_type = other DNA
aactcttgcctggtc

SEQ ID NO: 22740 - DNA, 15 bp, synthetic construct
  source 1..15: mol_type = other DNA
caactcttgcctggt

SEQ ID NO: 22741 - DNA, 15 bp, synthetic construct
  source 1..15: mol_type = other DNA
ccaactcttgcctgg

SEQ ID NO: 22742 - DNA, 15 bp, synthetic construct
  source 1..15: mol_type = other DNA
tccaactcttgcctg

SEQ ID NO: 22743 - DNA, 15 bp, synthetic construct
  source 1..15: mol_type = other DNA
atccaactcttgcct

SEQ ID NO: 22744 - DNA, 15 bp, synthetic construct
  source 1..15: mol_type = other DNA
gatccaactcttgcc

SEQ ID NO: 22745 - DNA, 15 bp, synthetic construct
  source 1..15: mol_type = other DNA
tgatccaactcttgc

SEQ ID NO: 22746 - DNA, 15 bp, synthetic construct
  source 1..15: mol_type = other DNA
ggtgatccaactctt

SEQ ID NO: 22747 - DNA, 15 bp, synthetic construct
  source 1..15: mol_type = other DNA
aggtgatccaactct

SEQ ID NO: 22748 - DNA, 15 bp, synthetic construct
  source 1..15: mol_type = other DNA
gaggtgatccaactc

SEQ ID NO: 22749 - DNA, 15 bp, synthetic construct
  source 1..15: mol_type = other DNA
cgaggtgatccaact

SEQ ID NO: 22750 - DNA, 15 bp, synthetic construct
  source 1..15: mol_type = other DNA
ccgaggtgatccaac

SEQ ID NO: 22751 - DNA, 15 bp, synthetic construct
  source 1..15: mol_type = other DNA
cccgaggtgatccaa

SEQ ID NO: 22752 - DNA, 15 bp, synthetic construct
  source 1..15: mol_type = other DNA
tcccgaggtgatcca

SEQ ID NO: 22753 - DNA, 15 bp, synthetic construct
  source 1..15: mol_type = other DNA
atcccgaggtgatcc

SEQ ID NO: 22754 - DNA, 15 bp, synthetic construct
  source 1..15: mol_type = other DNA
gatcccgaggtgatc

SEQ ID NO: 22755 - DNA, 15 bp, synthetic construct
  source 1..15: mol_type = other DNA
tgatcccgaggtgat

SEQ ID NO: 22756 - DNA, 15 bp, synthetic construct
  source 1..15: mol_type = other DNA
ctgatcccgaggtga

SEQ ID NO: 22757 - DNA, 15 bp, synthetic construct
  source 1..15: mol_type = other DNA
actgatcccgaggtg

SEQ ID NO: 22758 - DNA, 15 bp, synthetic construct
  source 1..15: mol_type = other DNA
cactgatcccgaggt

SEQ ID NO: 22759 - DNA, 15 bp, synthetic construct
  source 1..15: mol_type = other DNA
gcactgatcccgagg

SEQ ID NO: 22760 - DNA, 15 bp, synthetic construct
  source 1..15: mol_type = other DNA
tgcactgatcccgag

SEQ ID NO: 22761 - DNA, 15 bp, synthetic construct
  source 1..15: mol_type = other DNA
ctgcactgatcccga

SEQ ID NO: 22762 - DNA, 15 bp, synthetic construct
  source 1..15: mol_type = other DNA
tctgcactgatcccg

SEQ ID NO: 22763 - DNA, 15 bp, synthetic construct
  source 1..15: mol_type = other DNA
gggggattgagacat

SEQ ID NO: 22764 - DNA, 15 bp, synthetic construct
  source 1..15: mol_type = other DNA
agggggattgagaca

SEQ ID NO: 22765 - DNA, 15 bp, synthetic construct
  source 1..15: mol_type = other DNA
cagggggattgagac

SEQ ID NO: 22766 - DNA, 15 bp, synthetic construct
  source 1..15: mol_type = other DNA
acagggggattgaga

SEQ ID NO: 22767 - DNA, 15 bp, synthetic construct
  source 1..15: mol_type = other DNA
cacagggggattgag

SEQ ID NO: 22768 - DNA, 15 bp, synthetic construct
  source 1..15: mol_type = other DNA
ccacagggggattga

SEQ ID NO: 22769 - DNA, 15 bp, synthetic construct
  source 1..15: mol_type = other DNA
cccacagggggattg

SEQ ID NO: 22770 - DNA, 15 bp, synthetic construct
  source 1..15: mol_type = other DNA
gcccacagggggatt

SEQ ID NO: 22771 - DNA, 15 bp, synthetic construct
  source 1..15: mol_type = other DNA
tgcccacagggggat

SEQ ID NO: 22772 - DNA, 15 bp, synthetic construct
  source 1..15: mol_type = other DNA
gtgcccacaggggga

SEQ ID NO: 22773 - DNA, 15 bp, synthetic construct
  source 1..15: mol_type = other DNA
tgtgcccacaggggg

SEQ ID NO: 22774 - DNA, 15 bp, synthetic construct
  source 1..15: mol_type = other DNA
ctgtgcccacagggg

SEQ ID NO: 22775 - DNA, 15 bp, synthetic construct
  source 1..15: mol_type = other DNA
gctgtgcccacaggg

SEQ ID NO: 22776 - DNA, 15 bp, synthetic construct
  source 1..15: mol_type = other DNA
ggctgtgcccacagg

SEQ ID NO: 22777 - DNA, 15 bp, synthetic construct
  source 1..15: mol_type = other DNA
aggctgtgcccacag

SEQ ID NO: 22778 - DNA, 15 bp, synthetic construct
  source 1..15: mol_type = other DNA
taggctgtgcccaca

SEQ ID NO: 22779 - DNA, 15 bp, synthetic construct
  source 1..15: mol_type = other DNA
ctaggctgtgcccac

SEQ ID NO: 22780 - DNA, 15 bp, synthetic construct
  source 1..15: mol_type = other DNA
tctaggctgtgccca

SEQ ID NO: 22781 - DNA, 15 bp, synthetic construct
  source 1..15: mol_type = other DNA
gtctaggctgtgccc

SEQ ID NO: 22782 - DNA, 15 bp, synthetic construct
  source 1..15: mol_type = other DNA
tgtctaggctgtgcc

SEQ ID NO: 22783 - DNA, 15 bp, synthetic construct
  source 1..15: mol_type = other DNA
ttgtctaggctgtgc

SEQ ID NO: 22784 - DNA, 15 bp, synthetic construct
  source 1..15: mol_type = other DNA
cttgtctaggctgtg

SEQ ID NO: 22785 - DNA, 15 bp, synthetic construct
  source 1..15: mol_type = other DNA
tcttgtctaggctgt

SEQ ID NO: 22786 - DNA, 15 bp, synthetic construct
  source 1..15: mol_type = other DNA
ctcttgtctaggctg

SEQ ID NO: 22787 - DNA, 15 bp, synthetic construct
  source 1..15: mol_type = other DNA
actgttaaccgaggt

SEQ ID NO: 22788 - DNA, 15 bp, synthetic construct
  source 1..15: mol_type = other DNA
gcactgttaaccgag

SEQ ID NO: 22789 - DNA, 15 bp, synthetic construct
  source 1..15: mol_type = other DNA
ctgcactgttaaccg

SEQ ID NO: 22790 - DNA, 15 bp, synthetic construct
  source 1..15: mol_type = other DNA
tctgcactgttaacc

SEQ ID NO: 22791 - DNA, 15 bp, synthetic construct
  source 1..15: mol_type = other DNA
atctctgcactgtta

SEQ ID NO: 22792 - DNA, 15 bp, synthetic construct
  source 1..15: mol_type = other DNA
tatctctgcactgtt

SEQ ID NO: 22793 - DNA, 15 bp, synthetic construct
  source 1..15: mol_type = other DNA
atatctctgcactgt

SEQ ID NO: 22794 - DNA, 15 bp, synthetic construct
  source 1..15: mol_type = other DNA
ggggcattttgacat

SEQ ID NO: 22795 - DNA, 15 bp, synthetic construct
  source 1..15: mol_type = other DNA
aggggcattttgaca

SEQ ID NO: 22796 - DNA, 15 bp, synthetic construct
  source 1..15: mol_type = other DNA
caggggcattttgac

SEQ ID NO: 22797 - DNA, 15 bp, synthetic construct
  source 1..15: mol_type = other DNA
acaggggcattttga

SEQ ID NO: 22798 - DNA, 15 bp, synthetic construct
  source 1..15: mol_type = other DNA
ctacaggggcatttt

SEQ ID NO: 22799 - DNA, 15 bp, synthetic construct
  source 1..15: mol_type = other DNA
cctacaggggcattt

SEQ ID NO: 22800 - DNA, 15 bp, synthetic construct
  source 1..15: mol_type = other DNA
ttgcctacaggggca

SEQ ID NO: 22801 - DNA, 15 bp, synthetic construct
  source 1..15: mol_type = other DNA
cttgcctacaggggc

SEQ ID NO: 22802 - DNA, 15 bp, synthetic construct
  source 1..15: mol_type = other DNA
gcttgcctacagggg

SEQ ID NO: 22803 - DNA, 15 bp, synthetic construct
  source 1..15: mol_type = other DNA
ggcttgcctacaggg

SEQ ID NO: 22804 - DNA, 15 bp, synthetic construct
  source 1..15: mol_type = other DNA
aggcttgcctacagg

SEQ ID NO: 22805 - DNA, 15 bp, synthetic construct
  source 1..15: mol_type = other DNA
taggcttgcctacag

SEQ ID NO: 22806 - DNA, 15 bp, synthetic construct
  source 1..15: mol_type = other DNA
gtaggcttgcctaca

SEQ ID NO: 22807 - DNA, 15 bp, synthetic construct
  source 1..15: mol_type = other DNA
tgtaggcttgcctac

SEQ ID NO: 22808 - DNA, 15 bp, synthetic construct
  source 1..15: mol_type = other DNA
gtgtaggcttgccta

SEQ ID NO: 22809 - DNA, 15 bp, synthetic construct
  source 1..15: mol_type = other DNA
tgtgtaggcttgcct

SEQ ID NO: 22810 - DNA, 15 bp, synthetic construct
  source 1..15: mol_type = other DNA
ttgtgtaggcttgcc

SEQ ID NO: 22811 - DNA, 15 bp, synthetic construct
  source 1..15: mol_type = other DNA
cttgtgtaggcttgc

SEQ ID NO: 22812 - DNA, 15 bp, synthetic construct
  source 1..15: mol_type = other DNA
acttgtgtaggcttg

SEQ ID NO: 22813 - DNA, 15 bp, synthetic construct
  source 1..15: mol_type = other DNA
tacttgtgtaggctt

SEQ ID NO: 22814 - DNA, 15 bp, synthetic construct
  source 1..15: mol_type = other DNA
atacttgtgtaggct

SEQ ID NO: 22815 - DNA, 15 bp, synthetic construct
  source 1..15: mol_type = other DNA
ggggtattgtgacat

SEQ ID NO: 22816 - DNA, 15 bp, synthetic construct
  source 1..15: mol_type = other DNA
gggggtattgtgaca

SEQ ID NO: 22817 - DNA, 15 bp, synthetic construct
  source 1..15: mol_type = other DNA
cttacagggggtatt

SEQ ID NO: 22818 - DNA, 15 bp, synthetic construct
  source 1..15: mol_type = other DNA
gcttacagggggtat

SEQ ID NO: 22819 - DNA, 15 bp, synthetic construct
  source 1..15: mol_type = other DNA
tgcttacagggggta

SEQ ID NO: 22820 - DNA, 15 bp, synthetic construct
  source 1..15: mol_type = other DNA
ctgcttacagggggt

SEQ ID NO: 22821 - DNA, 15 bp, synthetic construct
  source 1..15: mol_type = other DNA
ctctgcttacagggg

SEQ ID NO: 22822 - DNA, 15 bp, synthetic construct
  source 1..15: mol_type = other DNA
gctctgcttacaggg

SEQ ID NO: 22823 - DNA, 15 bp, synthetic construct
  source 1..15: mol_type = other DNA
ggctctgcttacagg

SEQ ID NO: 22824 - DNA, 15 bp, synthetic construct
  source 1..15: mol_type = other DNA
aggctctgcttacag

SEQ ID NO: 22825 - DNA, 15 bp, synthetic construct
  source 1..15: mol_type = other DNA
taggctctgcttaca

SEQ ID NO: 22826 - DNA, 15 bp, synthetic construct
  source 1..15: mol_type = other DNA
ctaggctctgcttac

SEQ ID NO: 22827 - DNA, 15 bp, synthetic construct
  source 1..15: mol_type = other DNA
tctaggctctgctta

SEQ ID NO: 22828 - DNA, 15 bp, synthetic construct
  source 1..15: mol_type = other DNA
gtctaggctctgctt

SEQ ID NO: 22829 - DNA, 15 bp, synthetic construct
  source 1..15: mol_type = other DNA
tgtctaggctctgct

SEQ ID NO: 22830 - DNA, 15 bp, synthetic construct
  source 1..15: mol_type = other DNA
gtcacatatctctgc

SEQ ID NO: 22831 - DNA, 15 bp, synthetic construct
  source 1..15: mol_type = other DNA
ccttgtcacatatct

SEQ ID NO: 22832 - DNA, 15 bp, synthetic construct
  source 1..15: mol_type = other DNA
gccttgtcacatatc

SEQ ID NO: 22833 - DNA, 15 bp, synthetic construct
  source 1..15: mol_type = other DNA
ggccttgtcacatat

SEQ ID NO: 22834 - DNA, 15 bp, synthetic construct
  source 1..15: mol_type = other DNA
gggccttgtcacata

SEQ ID NO: 22835 - DNA, 15 bp, synthetic construct
  source 1..15: mol_type = other DNA
ggggccttgtcacat

SEQ ID NO: 22836 - DNA, 15 bp, synthetic construct
  source 1..15: mol_type = other DNA
aggggccttgtcaca

SEQ ID NO: 22837 - DNA, 15 bp, synthetic construct
  source 1..15: mol_type = other DNA
aaggggccttgtcac

SEQ ID NO: 22838 - DNA, 15 bp, synthetic construct
  source 1..15: mol_type = other DNA
tattgtctaggctct

SEQ ID NO: 22839 - DNA, 15 bp, synthetic construct
  source 1..15: mol_type = other DNA
ctattgtctaggctc

SEQ ID NO: 22840 - DNA, 15 bp, synthetic construct
  source 1..15: mol_type = other DNA
tcactcaggtgatgt

SEQ ID NO: 22841 - DNA, 15 bp, synthetic construct
  source 1..15: mol_type = other DNA
gatcactcaggtgat

SEQ ID NO: 22842 - DNA, 15 bp, synthetic construct
  source 1..15: mol_type = other DNA
tgatcactcaggtga

SEQ ID NO: 22843 - DNA, 15 bp, synthetic construct
  source 1..15: mol_type = other DNA
ctgatcactcaggtg

SEQ ID NO: 22844 - DNA, 15 bp, synthetic construct
  source 1..15: mol_type = other DNA
actgatcactcaggt

SEQ ID NO: 22845 - DNA, 15 bp, synthetic construct
  source 1..15: mol_type = other DNA
gcactgatcactcag

SEQ ID NO: 22846 - DNA, 15 bp, synthetic construct
  source 1..15: mol_type = other DNA
tgcactgatcactca

SEQ ID NO: 22847 - DNA, 15 bp, synthetic construct
  source 1..15: mol_type = other DNA
ctgcactgatcactc

SEQ ID NO: 22848 - DNA, 15 bp, synthetic construct
  source 1..15: mol_type = other DNA
gatctctgcactgat

SEQ ID NO: 22849 - DNA, 15 bp, synthetic construct
  source 1..15: mol_type = other DNA
agatctctgcactga

SEQ ID NO: 22850 - DNA, 15 bp, synthetic construct
  source 1..15: mol_type = other DNA
cagatctctgcactg

SEQ ID NO: 22851 - DNA, 15 bp, synthetic construct
  source 1..15: mol_type = other DNA
acagatctctgcact

SEQ ID NO: 22852 - DNA, 15 bp, synthetic construct
  source 1..15: mol_type = other DNA
gacagatctctgcac

SEQ ID NO: 22853 - DNA, 15 bp, synthetic construct
  source 1..15: mol_type = other DNA
tgacagatctctgca

SEQ ID NO: 22854 - DNA, 15 bp, synthetic construct
  source 1..15: mol_type = other DNA
gtgacagatctctgc

SEQ ID NO: 22855 - DNA, 15 bp, synthetic construct
  source 1..15: mol_type = other DNA
aaggggcattgtgac

SEQ ID NO: 22856 - DNA, 15 bp, synthetic construct
  source 1..15: mol_type = other DNA
gcctaaaggggcatt

SEQ ID NO: 22857 - DNA, 15 bp, synthetic construct
  source 1..15: mol_type = other DNA
tgcctaaaggggcat

SEQ ID NO: 22858 - DNA, 15 bp, synthetic construct
  source 1..15: mol_type = other DNA
ctgcctaaaggggca

SEQ ID NO: 22859 - DNA, 15 bp, synthetic construct
  source 1..15: mol_type = other DNA
tctgcctaaaggggc

SEQ ID NO: 22860 - DNA, 15 bp, synthetic construct
  source 1..15: mol_type = other DNA
ctctgcctaaagggg

SEQ ID NO: 22861 - DNA, 15 bp, synthetic construct
  source 1..15: mol_type = other DNA
gctctgcctaaaggg

SEQ ID NO: 22862 - DNA, 15 bp, synthetic construct
  source 1..15: mol_type = other DNA
agctctgcctaaagg

SEQ ID NO: 22863 - DNA, 15 bp, synthetic construct
  source 1..15: mol_type = other DNA
tttaagctctgccta

SEQ ID NO: 22864 - DNA, 15 bp, synthetic construct
  source 1..15: mol_type = other DNA
gtttaagctctgcct

SEQ ID NO: 22865 - DNA, 15 bp, synthetic construct
  source 1..15: mol_type = other DNA
ctcttgtcttggatt

SEQ ID NO: 22866 - DNA, 15 bp, synthetic construct
  source 1..15: mol_type = other DNA
ctaagctctgcctaa

SEQ ID NO: 22867 - DNA, 15 bp, synthetic construct
  source 1..15: mol_type = other DNA
agtctaagctctgcc

SEQ ID NO: 22868 - DNA, 15 bp, synthetic construct
  source 1..15: mol_type = other DNA
tagtctaagctctgc

SEQ ID NO: 22869 - DNA, 15 bp, synthetic construct
  source 1..15: mol_type = other DNA
ttgcctatgggggca

SEQ ID NO: 22870 - DNA, 15 bp, synthetic construct
  source 1..15: mol_type = other DNA
tttgcctatgggggc

SEQ ID NO: 22871 - DNA, 15 bp, synthetic construct
  source 1..15: mol_type = other DNA
atttgcctatggggg

SEQ ID NO: 22872 - DNA, 15 bp, synthetic construct
  source 1..15: mol_type = other DNA
gatttgcctatgggg

SEQ ID NO: 22873 - DNA, 15 bp, synthetic construct
  source 1..15: mol_type = other DNA
ggatttgcctatggg

SEQ ID NO: 22874 - DNA, 15 bp, synthetic construct
  source 1..15: mol_type = other DNA
tggatttgcctatgg

SEQ ID NO: 22875 - DNA, 15 bp, synthetic construct
  source 1..15: mol_type = other DNA
cttggatttgcctat

SEQ ID NO: 22876 - DNA, 15 bp, synthetic construct
  source 1..15: mol_type = other DNA
tcttggatttgccta

SEQ ID NO: 22877 - DNA, 15 bp, synthetic construct
  source 1..15: mol_type = other DNA
gtcttggatttgcct

SEQ ID NO: 22878 - DNA, 15 bp, synthetic construct
  source 1..15: mol_type = other DNA
tgtcttggatttgcc

SEQ ID NO: 22879 - DNA, 15 bp, synthetic construct
  source 1..15: mol_type = other DNA
agactcttgtcttgg

SEQ ID NO: 22880 - DNA, 15 bp, synthetic construct
  source 1..15: mol_type = other DNA
gttggatctgcctat

SEQ ID NO: 22881 - DNA, 15 bp, synthetic construct
  source 1..15: mol_type = other DNA
tgttggatctgccta

SEQ ID NO: 22882 - DNA, 15 bp, synthetic construct
  source 1..15: mol_type = other DNA
gtgttggatctgcct

SEQ ID NO: 22883 - DNA, 15 bp, synthetic construct
  source 1..15: mol_type = other DNA
tgtgttggatctgcc

SEQ ID NO: 22884 - DNA, 15 bp, synthetic construct
  source 1..15: mol_type = other DNA
ttgtgttggatctgc

SEQ ID NO: 22885 - DNA, 15 bp, synthetic construct
  source 1..15: mol_type = other DNA
tcttgtgttggatct

SEQ ID NO: 22886 - DNA, 15 bp, synthetic construct
  source 1..15: mol_type = other DNA
ctcttgtgttggatc

SEQ ID NO: 22887 - DNA, 15 bp, synthetic construct
  source 1..15: mol_type = other DNA
actcttgtgttggat

SEQ ID NO: 22888 - DNA, 15 bp, synthetic construct
  source 1..15: mol_type = other DNA
tcacacaggtgatgg

SEQ ID NO: 22889 - DNA, 15 bp, synthetic construct
  source 1..15: mol_type = other DNA
gaggcattgtgacat

SEQ ID NO: 22890 - DNA, 15 bp, synthetic construct
  source 1..15: mol_type = other DNA
ggaggcattgtgaca

SEQ ID NO: 22891 - DNA, 15 bp, synthetic construct
  source 1..15: mol_type = other DNA
aggaggcattgtgac

SEQ ID NO: 22892 - DNA, 15 bp, synthetic construct
  source 1..15: mol_type = other DNA
caggaggcattgtga

SEQ ID NO: 22893 - DNA, 15 bp, synthetic construct
  source 1..15: mol_type = other DNA
acaggaggcattgtg

SEQ ID NO: 22894 - DNA, 15 bp, synthetic construct
  source 1..15: mol_type = other DNA
tacaggaggcattgt

SEQ ID NO: 22895 - DNA, 15 bp, synthetic construct
  source 1..15: mol_type = other DNA
ctacaggaggcattg

SEQ ID NO: 22896 - DNA, 15 bp, synthetic construct
  source 1..15: mol_type = other DNA
cctacaggaggcatt

SEQ ID NO: 22897 - DNA, 15 bp, synthetic construct
  source 1..15: mol_type = other DNA
gcctacaggaggcat

SEQ ID NO: 22898 - DNA, 15 bp, synthetic construct
  source 1..15: mol_type = other DNA
tgcctacaggaggca

SEQ ID NO: 22899 - DNA, 15 bp, synthetic construct
  source 1..15: mol_type = other DNA
cctctgcctacagga

SEQ ID NO: 22900 - DNA, 15 bp, synthetic construct
  source 1..15: mol_type = other DNA
gcctctgcctacagg

SEQ ID NO: 22901 - DNA, 15 bp, synthetic construct
  source 1..15: mol_type = other DNA
agcctctgcctacag

SEQ ID NO: 22902 - DNA, 15 bp, synthetic construct
  source 1..15: mol_type = other DNA
tagcctctgcctaca

SEQ ID NO: 22903 - DNA, 15 bp, synthetic construct
  source 1..15: mol_type = other DNA
ttagcctctgcctac

SEQ ID NO: 22904 - DNA, 15 bp, synthetic construct
  source 1..15: mol_type = other DNA
tttagcctctgccta

SEQ ID NO: 22905 - DNA, 15 bp, synthetic construct
  source 1..15: mol_type = other DNA
gtttagcctctgcct

SEQ ID NO: 22906 - DNA, 15 bp, synthetic construct
  source 1..15: mol_type = other DNA
tgtttagcctctgcc

SEQ ID NO: 22907 - DNA, 15 bp, synthetic construct
  source 1..15: mol_type = other DNA
ttgtttagcctctgc

SEQ ID NO: 22908 - DNA, 15 bp, synthetic construct
  source 1..15: mol_type = other DNA
cttgtttagcctctg

SEQ ID NO: 22909 - DNA, 15 bp, synthetic construct
  source 1..15: mol_type = other DNA
tcttgtttagcctct

SEQ ID NO: 22910 - DNA, 15 bp, synthetic construct
  source 1..15: mol_type = other DNA
ctcttgtttagcctc

SEQ ID NO: 22911 - DNA, 15 bp, synthetic construct
  source 1..15: mol_type = other DNA
actcttgtttagcct

SEQ ID NO: 22912 - DNA, 15 bp, synthetic construct
  source 1..15: mol_type = other DNA
ctaagcctaacccct

SEQ ID NO: 22913 - DNA, 15 bp, synthetic construct
  source 1..15: mol_type = other DNA
cctaagcctaacccc

SEQ ID NO: 22914 - DNA, 15 bp, synthetic construct
  source 1..15: mol_type = other DNA
gcctaagcctaaccc

SEQ ID NO: 22915 - DNA, 15 bp, synthetic construct
  source 1..15: mol_type = other DNA
agcctaagcctaacc

SEQ ID NO: 22916 - DNA, 15 bp, synthetic construct
  source 1..15: mol_type = other DNA
ctaagcctaagccta

SEQ ID NO: 22917 - DNA, 15 bp, synthetic construct
  source 1..15: mol_type = other DNA
cctaagcctaagcct

SEQ ID NO: 22918 - DNA, 15 bp, synthetic construct
  source 1..15: mol_type = other DNA
ccctaagcctaagcc

SEQ ID NO: 22919 - DNA, 15 bp, synthetic construct
  source 1..15: mol_type = other DNA
accctaagcctaagc

SEQ ID NO: 22920 - DNA, 15 bp, synthetic construct
  source 1..15: mol_type = other DNA
ctaaccctaagccta

SEQ ID NO: 22921 - DNA, 15 bp, synthetic construct
  source 1..15: mol_type = other DNA
cctaaccctaagcct

SEQ ID NO: 22922 - DNA, 15 bp, synthetic construct
  source 1..15: mol_type = other DNA
gcctaaccctaagcc

SEQ ID NO: 22923 - DNA, 15 bp, synthetic construct
  source 1..15: mol_type = other DNA
agcctaaccctaagc

SEQ ID NO: 22924 - DNA, 15 bp, synthetic construct
  source 1..15: mol_type = other DNA
ctaagcctaacccta

SEQ ID NO: 22925 - DNA, 15 bp, synthetic construct
  source 1..15: mol_type = other DNA
cctaagcctaaccct

SEQ ID NO: 22926 - DNA, 15 bp, synthetic construct
  source 1..15: mol_type = other DNA
cttaccctaagccta

SEQ ID NO: 22927 - DNA, 15 bp, synthetic construct
  source 1..15: mol_type = other DNA
ccttaccctaagcct

SEQ ID NO: 22928 - DNA, 15 bp, synthetic construct
  source 1..15: mol_type = other DNA
gccttaccctaagcc

SEQ ID NO: 22929 - DNA, 15 bp, synthetic construct
  source 1..15: mol_type = other DNA
agccttaccctaagc

SEQ ID NO: 22930 - DNA, 15 bp, synthetic construct
  source 1..15: mol_type = other DNA
aagccttaccctaag

SEQ ID NO: 22931 - DNA, 15 bp, synthetic construct
  source 1..15: mol_type = other DNA
ctaagccttacccta

SEQ ID NO: 22932 - DNA, 15 bp, synthetic construct
  source 1..15: mol_type = other DNA
cctaagccttaccct

SEQ ID NO: 22933 - DNA, 15 bp, synthetic construct
  source 1..15: mol_type = other DNA
ccctaagccttaccc

SEQ ID NO: 22934 - DNA, 15 bp, synthetic construct
  source 1..15: mol_type = other DNA
accctaagccttacc

SEQ ID NO: 22935 - DNA, 15 bp, synthetic construct
  source 1..15: mol_type = other DNA
aaccctaagccttac

SEQ ID NO: 22936 - DNA, 15 bp, synthetic construct
  source 1..15: mol_type = other DNA
gaaccctaagcctta

SEQ ID NO: 22937 - DNA, 15 bp, synthetic construct
  source 1..15: mol_type = other DNA
tgaaccctaagcctt

SEQ ID NO: 22938 - DNA, 15 bp, synthetic construct
  source 1..15: mol_type = other DNA
ggccattctttgaag

SEQ ID NO: 22939 - DNA, 15 bp, synthetic construct
  source 1..15: mol_type = other DNA
caaggccattctttg

SEQ ID NO: 22940 - DNA, 15 bp, synthetic construct
  source 1..15: mol_type = other DNA
ccaaggccattcttt

SEQ ID NO: 22941 - DNA, 15 bp, synthetic construct
  source 1..15: mol_type = other DNA
accaaggccattctt

SEQ ID NO: 22942 - DNA, 15 bp, synthetic construct
  source 1..15: mol_type = other DNA
aaccaaggccattct

SEQ ID NO: 22943 - DNA, 15 bp, synthetic construct
  source 1..15: mol_type = other DNA
ctgtccacagaaacc

SEQ ID NO: 22944 - DNA, 15 bp, synthetic construct
  source 1..15: mol_type = other DNA
ctttccatgaggaga

SEQ ID NO: 22945 - DNA, 15 bp, synthetic construct
  source 1..15: mol_type = other DNA
cctttccatgaggag

SEQ ID NO: 22946 - DNA, 15 bp, synthetic construct
  source 1..15: mol_type = other DNA
acctttccatgagga

SEQ ID NO: 22947 - DNA, 15 bp, synthetic construct
  source 1..15: mol_type = other DNA
tacctttccatgagg

SEQ ID NO: 22948 - DNA, 15 bp, synthetic construct
  source 1..15: mol_type = other DNA
ctacctttccatgag

SEQ ID NO: 22949 - DNA, 15 bp, synthetic construct
  source 1..15: mol_type = other DNA
actacctttccatga

SEQ ID NO: 22950 - DNA, 15 bp, synthetic construct
  source 1..15: mol_type = other DNA
cactacctttccatg

SEQ ID NO: 22951 - DNA, 15 bp, synthetic construct
  source 1..15: mol_type = other DNA
acactacctttccat

SEQ ID NO: 22952 - DNA, 15 bp, synthetic construct
  source 1..15: mol_type = other DNA
cacactacctttcca

SEQ ID NO: 22953 - DNA, 15 bp, synthetic construct
  source 1..15: mol_type = other DNA
acacactacctttcc

SEQ ID NO: 22954 - DNA, 15 bp, synthetic construct
  source 1..15: mol_type = other DNA
tccctcagctaaatt

SEQ ID NO: 22955 - DNA, 15 bp, synthetic construct
  source 1..15: mol_type = other DNA
ctccctcagctaaat

SEQ ID NO: 22956 - DNA, 15 bp, synthetic construct
  source 1..15: mol_type = other DNA
tctccctcagctaaa

SEQ ID NO: 22957 - DNA, 15 bp, synthetic construct
  source 1..15: mol_type = other DNA
atctccctcagctaa

SEQ ID NO: 22958 - DNA, 15 bp, synthetic construct
  source 1..15: mol_type = other DNA
aatctccctcagcta

SEQ ID NO: 22959 - DNA, 15 bp, synthetic construct
  source 1..15: mol_type = other DNA
caatctccctcagct

SEQ ID NO: 22960 - DNA, 15 bp, synthetic construct
  source 1..15: mol_type = other DNA
tcaatctccctcagc

SEQ ID NO: 22961 - DNA, 15 bp, synthetic construct
  source 1..15: mol_type = other DNA
ctcaatctccctcag

SEQ ID NO: 22962 - DNA, 15 bp, synthetic construct
  source 1..15: mol_type = other DNA
actcaatctccctca

SEQ ID NO: 22963 - DNA, 15 bp, synthetic construct
  source 1..15: mol_type = other DNA
cactcaatctccctc

SEQ ID NO: 22964 - DNA, 15 bp, synthetic construct
  source 1..15: mol_type = other DNA
tcactcaatctccct

SEQ ID NO: 22965 - DNA, 15 bp, synthetic construct
  source 1..15: mol_type = other DNA
gtcactcaatctccc

SEQ ID NO: 22966 - DNA, 15 bp, synthetic construct
  source 1..15: mol_type = other DNA
agtcactcaatctcc

SEQ ID NO: 22967 - DNA, 15 bp, synthetic construct
  source 1..15: mol_type = other DNA
cctgggaaagtcact

SEQ ID NO: 22968 - DNA, 15 bp, synthetic construct
  source 1..15: mol_type = other DNA
ccctgggaaagtcac

SEQ ID NO: 22969 - DNA, 15 bp, synthetic construct
  source 1..15: mol_type = other DNA
accctgggaaagtca

SEQ ID NO: 22970 - DNA, 15 bp, synthetic construct
  source 1..15: mol_type = other DNA
gaccctgggaaagtc

SEQ ID NO: 22971 - DNA, 15 bp, synthetic construct
  source 1..15: mol_type = other DNA
tgaccctgggaaagt

SEQ ID NO: 22972 - DNA, 15 bp, synthetic construct
  source 1..15: mol_type = other DNA
gtgaccctgggaaag

SEQ ID NO: 22973 - DNA, 15 bp, synthetic construct
  source 1..15: mol_type = other DNA
tgtgaccctgggaaa

SEQ ID NO: 22974 - DNA, 15 bp, synthetic construct
  source 1..15: mol_type = other DNA
gtgtgaccctgggaa

SEQ ID NO: 22975 - DNA, 15 bp, synthetic construct
  source 1..15: mol_type = other DNA
tgtgtgaccctggga

SEQ ID NO: 22976 - DNA, 15 bp, synthetic construct
  source 1..15: mol_type = other DNA
ctgtgtgaccctggg

SEQ ID NO: 22977 - DNA, 15 bp, synthetic construct
  source 1..15: mol_type = other DNA
gctgtgtgaccctgg

SEQ ID NO: 22978 - DNA, 15 bp, synthetic construct
  source 1..15: mol_type = other DNA
agctgtgtgaccctg

SEQ ID NO: 22979 - DNA, 15 bp, synthetic construct
  source 1..15: mol_type = other DNA
tagctgtgtgaccct

SEQ ID NO: 22980 - DNA, 15 bp, synthetic construct
  source 1..15: mol_type = other DNA
gtagctgtgtgaccc

SEQ ID NO: 22981 - DNA, 15 bp, synthetic construct
  source 1..15: mol_type = other DNA
agtagctgtgtgacc

SEQ ID NO: 22982 - DNA, 15 bp, synthetic construct
  source 1..15: mol_type = other DNA
gctattagtagctgt

SEQ ID NO: 22983 - DNA, 15 bp, synthetic construct
  source 1..15: mol_type = other DNA
gttcagtattcccat

SEQ ID NO: 22984 - DNA, 15 bp, synthetic construct
  source 1..15: mol_type = other DNA
tgttcagtattccca

SEQ ID NO: 22985 - DNA, 15 bp, synthetic construct
  source 1..15: mol_type = other DNA
gtgttcagtattccc

SEQ ID NO: 22986 - DNA, 15 bp, synthetic construct
  source 1..15: mol_type = other DNA
tgtgttcagtattcc

SEQ ID NO: 22987 - DNA, 15 bp, synthetic construct
  source 1..15: mol_type = other DNA
ggttcatttctgtgt

SEQ ID NO: 22988 - DNA, 15 bp, synthetic construct
  source 1..15: mol_type = other DNA
ccattggttcatttc

SEQ ID NO: 22989 - DNA, 15 bp, synthetic construct
  source 1..15: mol_type = other DNA
gtttccattggttca

SEQ ID NO: 22990 - DNA, 15 bp, synthetic construct
  source 1..15: mol_type = other DNA
tgtttccattggttc

SEQ ID NO: 22991 - DNA, 15 bp, synthetic construct
  source 1..15: mol_type = other DNA
atgtttccattggtt

SEQ ID NO: 22992 - DNA, 15 bp, synthetic construct
  source 1..15: mol_type = other DNA
gatgtttccattggt

SEQ ID NO: 22993 - DNA, 15 bp, synthetic construct
  source 1..15: mol_type = other DNA
ggatgtttccattgg

SEQ ID NO: 22994 - DNA, 15 bp, synthetic construct
  source 1..15: mol_type = other DNA
gtaggatgtttccat

SEQ ID NO: 22995 - DNA, 15 bp, synthetic construct
  source 1..15: mol_type = other DNA
cgtaggatgtttcca

SEQ ID NO: 22996 - DNA, 15 bp, synthetic construct
  source 1..15: mol_type = other DNA
acgtaggatgtttcc

SEQ ID NO: 22997 - DNA, 15 bp, synthetic construct
  source 1..15: mol_type = other DNA
aggcttttggaacgt

SEQ ID NO: 22998 - DNA, 15 bp, synthetic construct
  source 1..15: mol_type = other DNA
gagtaggcttttgga

SEQ ID NO: 22999 - DNA, 15 bp, synthetic construct
  source 1..15: mol_type = other DNA
tgagtaggcttttgg

SEQ ID NO: 23000 - DNA, 15 bp, synthetic construct
  source 1..15: mol_type = other DNA
gcttgagtaggcttt

SEQ ID NO: 23001 - DNA, 15 bp, synthetic construct
  source 1..15: mol_type = other DNA
ggcttgagtaggctt

SEQ ID NO: 23002 - DNA, 15 bp, synthetic construct
  source 1..15: mol_type = other DNA
tggcttgagtaggct

SEQ ID NO: 23003 - DNA, 15 bp, synthetic construct
  source 1..15: mol_type = other DNA
atggcttgagtaggc

SEQ ID NO: 23004 - DNA, 15 bp, synthetic construct
  source 1..15: mol_type = other DNA
tctctgccattcata

SEQ ID NO: 23005 - DNA, 15 bp, synthetic construct
  source 1..15: mol_type = other DNA
atctctgccattcat

SEQ ID NO: 23006 - DNA, 15 bp, synthetic construct
  source 1..15: mol_type = other DNA
gatctctgccattca

SEQ ID NO: 23007 - DNA, 15 bp, synthetic construct
  source 1..15: mol_type = other DNA
agatctctgccattc

SEQ ID NO: 23008 - DNA, 15 bp, synthetic construct
  source 1..15: mol_type = other DNA
tagatctctgccatt

SEQ ID NO: 23009 - DNA, 15 bp, synthetic construct
  source 1..15: mol_type = other DNA
gtagatctctgccat

SEQ ID NO: 23010 - DNA, 15 bp, synthetic construct
  source 1..15: mol_type = other DNA
tgtagatctctgcca

SEQ ID NO: 23011 - DNA, 15 bp, synthetic construct
  source 1..15: mol_type = other DNA
ctgtagatctctgcc

SEQ ID NO: 23012 - DNA, 15 bp, synthetic construct
  source 1..15: mol_type = other DNA
tctgtagatctctgc

SEQ ID NO: 23013 - DNA, 15 bp, synthetic construct
  source 1..15: mol_type = other DNA
gtgagcatcatttct

SEQ ID NO: 23014 - DNA, 15 bp, synthetic construct
  source 1..15: mol_type = other DNA
ggtgagcatcatttc

SEQ ID NO: 23015 - DNA, 15 bp, synthetic construct
  source 1..15: mol_type = other DNA
ctggtgagcatcatt

SEQ ID NO: 23016 - DNA, 15 bp, synthetic construct
  source 1..15: mol_type = other DNA
gctggtgagcatcat

SEQ ID NO: 23017 - DNA, 15 bp, synthetic construct
  source 1..15: mol_type = other DNA
agctggtgagcatca

SEQ ID NO: 23018 - DNA, 15 bp, synthetic construct
  source 1..15: mol_type = other DNA
cagctggtgagcatc

SEQ ID NO: 23019 - DNA, 15 bp, synthetic construct
  source 1..15: mol_type = other DNA
ccagctggtgagcat

SEQ ID NO: 23020 - DNA, 15 bp, synthetic construct
  source 1..15: mol_type = other DNA
ggggtggtagcagta

SEQ ID NO: 23021 - DNA, 15 bp, synthetic construct
  source 1..15: mol_type = other DNA
tggggtggtagcagt

SEQ ID NO: 23022 - DNA, 15 bp, synthetic construct
  source 1..15: mol_type = other DNA
gtggggtggtagcag

SEQ ID NO: 23023 - DNA, 15 bp, synthetic construct
  source 1..15: mol_type = other DNA
tgtggggtggtagca

SEQ ID NO: 23024 - DNA, 15 bp, synthetic construct
  source 1..15: mol_type = other DNA
ttgtggggtggtagc

SEQ ID NO: 23025 - DNA, 15 bp, synthetic construct
  source 1..15: mol_type = other DNA
gttgtggggtggtag

SEQ ID NO: 23026 - DNA, 15 bp, synthetic construct
  source 1..15: mol_type = other DNA
ggttgtggggtggta

SEQ ID NO: 23027 - DNA, 15 bp, synthetic construct
  source 1..15: mol_type = other DNA
gggttgtggggtggt

SEQ ID NO: 23028 - DNA, 15 bp, synthetic construct
  source 1..15: mol_type = other DNA
tttgtccagtatgct

SEQ ID NO: 23029 - DNA, 15 bp, synthetic construct
  source 1..15: mol_type = other DNA
atttgtccagtatgc

SEQ ID NO: 23030 - DNA, 15 bp, synthetic construct
  source 1..15: mol_type = other DNA
agacatttgtccagt

SEQ ID NO: 23031 - DNA, 15 bp, synthetic construct
  source 1..15: mol_type = other DNA
cacgaggcttagaca

SEQ ID NO: 23032 - DNA, 15 bp, synthetic construct
  source 1..15: mol_type = other DNA
ccacgaggcttagac

SEQ ID NO: 23033 - DNA, 15 bp, synthetic construct
  source 1..15: mol_type = other DNA
accacgaggcttaga

SEQ ID NO: 23034 - DNA, 15 bp, synthetic construct
  source 1..15: mol_type = other DNA
ctaaccacgaggctt

SEQ ID NO: 23035 - DNA, 15 bp, synthetic construct
  source 1..15: mol_type = other DNA
actaaccacgaggct

SEQ ID NO: 23036 - DNA, 15 bp, synthetic construct
  source 1..15: mol_type = other DNA
cactaaccacgaggc

SEQ ID NO: 23037 - DNA, 15 bp, synthetic construct
  source 1..15: mol_type = other DNA
ccactaaccacgagg

SEQ ID NO: 23038 - DNA, 15 bp, synthetic construct
  source 1..15: mol_type = other DNA
cccactaaccacgag

SEQ ID NO: 23039 - DNA, 15 bp, synthetic construct
  source 1..15: mol_type = other DNA
ccccactaaccacga

SEQ ID NO: 23040 - DNA, 15 bp, synthetic construct
  source 1..15: mol_type = other DNA
tccccactaaccacg

SEQ ID NO: 23041 - DNA, 15 bp, synthetic construct
  source 1..15: mol_type = other DNA
gtccccactaaccac

SEQ ID NO: 23042 - DNA, 15 bp, synthetic construct
  source 1..15: mol_type = other DNA
tgtccccactaacca

SEQ ID NO: 23043 - DNA, 15 bp, synthetic construct
  source 1..15: mol_type = other DNA
atgtccccactaacc

SEQ ID NO: 23044 - DNA, 15 bp, synthetic construct
  source 1..15: mol_type = other DNA
aatgtccccactaac

SEQ ID NO: 23045 - DNA, 15 bp, synthetic construct
  source 1..15: mol_type = other DNA
caatgtccccactaa

SEQ ID NO: 23046 - DNA, 15 bp, synthetic construct
  source 1..15: mol_type = other DNA
gcaatgtccccacta

SEQ ID NO: 23047 - DNA, 15 bp, synthetic construct
  source 1..15: mol_type = other DNA
agcaatgtccccact

SEQ ID NO: 23048 - DNA, 15 bp, synthetic construct
  source 1..15: mol_type = other DNA
cagcaatgtccccac

SEQ ID NO: 23049 - DNA, 15 bp, synthetic construct
  source 1..15: mol_type = other DNA
ccagcaatgtcccca

SEQ ID NO: 23050 - DNA, 15 bp, synthetic construct
  source 1..15: mol_type = other DNA
accagcaatgtcccc

SEQ ID NO: 23051 - DNA, 15 bp, synthetic construct
  source 1..15: mol_type = other DNA
caccagcaatgtccc

SEQ ID NO: 23052 - DNA, 15 bp, synthetic construct
  source 1..15: mol_type = other DNA
ccaccagcaatgtcc

SEQ ID NO: 23053 - DNA, 15 bp, synthetic construct
  source 1..15: mol_type = other DNA
tccaccagcaatgtc

SEQ ID NO: 23054 - DNA, 15 bp, synthetic construct
  source 1..15: mol_type = other DNA
ctccaccagcaatgt

SEQ ID NO: 23055 - DNA, 15 bp, synthetic construct
  source 1..15: mol_type = other DNA
actccaccagcaatg

SEQ ID NO: 23056 - DNA, 15 bp, synthetic construct
  source 1..15: mol_type = other DNA
gactccaccagcaat

SEQ ID NO: 23057 - DNA, 15 bp, synthetic construct
  source 1..15: mol_type = other DNA
agactccaccagcaa

SEQ ID NO: 23058 - DNA, 15 bp, synthetic construct
  source 1..15: mol_type = other DNA
cagactccaccagca

SEQ ID NO: 23059 - DNA, 15 bp, synthetic construct
  source 1..15: mol_type = other DNA
tcagactccaccagc

SEQ ID NO: 23060 - DNA, 15 bp, synthetic construct
  source 1..15: mol_type = other DNA
ttcagactccaccag

SEQ ID NO: 23061 - DNA, 15 bp, synthetic construct
  source 1..15: mol_type = other DNA
tttcagactccacca

SEQ ID NO: 23062 - DNA, 15 bp, synthetic construct
  source 1..15: mol_type = other DNA
atttcagactccacc

SEQ ID NO: 23063 - DNA, 15 bp, synthetic construct
  source 1..15: mol_type = other DNA
agtcactgcatgaca

SEQ ID NO: 23064 - DNA, 15 bp, synthetic construct
  source 1..15: mol_type = other DNA
gagtcactgcatgac

SEQ ID NO: 23065 - DNA, 15 bp, synthetic construct
  source 1..15: mol_type = other DNA
tgagtcactgcatga

SEQ ID NO: 23066 - DNA, 15 bp, synthetic construct
  source 1..15: mol_type = other DNA
gtgagtcactgcatg

SEQ ID NO: 23067 - DNA, 15 bp, synthetic construct
  source 1..15: mol_type = other DNA
agtgagtcactgcat

SEQ ID NO: 23068 - DNA, 15 bp, synthetic construct
  source 1..15: mol_type = other DNA
gagtgagtcactgca

SEQ ID NO: 23069 - DNA, 15 bp, synthetic construct
  source 1..15: mol_type = other DNA
tgagtgagtcactgc

SEQ ID NO: 23070 - DNA, 15 bp, synthetic construct
  source 1..15: mol_type = other DNA
cttgagtgagtcact

SEQ ID NO: 23071 - DNA, 15 bp, synthetic construct
  source 1..15: mol_type = other DNA
gcttgagtgagtcac

SEQ ID NO: 23072 - DNA, 15 bp, synthetic construct
  source 1..15: mol_type = other DNA
agcttgagtgagtca

SEQ ID NO: 23073 - DNA, 15 bp, synthetic construct
  source 1..15: mol_type = other DNA
gcctaagcttgagtg

SEQ ID NO: 23074 - DNA, 15 bp, synthetic construct
  source 1..15: mol_type = other DNA
tgcctaagcttgagt

SEQ ID NO: 23075 - DNA, 15 bp, synthetic construct
  source 1..15: mol_type = other DNA
ctgcctaagcttgag

SEQ ID NO: 23076 - DNA, 15 bp, synthetic construct
  source 1..15: mol_type = other DNA
tctgcctaagcttga

SEQ ID NO: 23077 - DNA, 15 bp, synthetic construct
  source 1..15: mol_type = other DNA
atctgcctaagcttg

SEQ ID NO: 23078 - DNA, 15 bp, synthetic construct
  source 1..15: mol_type = other DNA
caccaaatctgccta

SEQ ID NO: 23079 - DNA, 15 bp, synthetic construct
  source 1..15: mol_type = other DNA
tcaccaaatctgcct

SEQ ID NO: 23080 - DNA, 15 bp, synthetic construct
  source 1..15: mol_type = other DNA
atcaccaaatctgcc

SEQ ID NO: 23081 - DNA, 15 bp, synthetic construct
  source 1..15: mol_type = other DNA
gcatctctgtgtcat

SEQ ID NO: 23082 - DNA, 15 bp, synthetic construct
  source 1..15: mol_type = other DNA
tgcatctctgtgtca

SEQ ID NO: 23083 - DNA, 15 bp, synthetic construct
  source 1..15: mol_type = other DNA
ttgcatctctgtgtc

SEQ ID NO: 23084 - DNA, 15 bp, synthetic construct
  source 1..15: mol_type = other DNA
tttgcatctctgtgt

SEQ ID NO: 23085 - DNA, 15 bp, synthetic construct
  source 1..15: mol_type = other DNA
ctttgcatctctgtg

SEQ ID NO: 23086 - DNA, 15 bp, synthetic construct
  source 1..15: mol_type = other DNA
tctttgcatctctgt

SEQ ID NO: 23087 - DNA, 15 bp, synthetic construct
  source 1..15: mol_type = other DNA
tttctttgcatctct

SEQ ID NO: 23088 - DNA, 15 bp, synthetic construct
  source 1..15: mol_type = other DNA
gtgtcagctacaaca

SEQ ID NO: 23089 - DNA, 15 bp, synthetic construct
  source 1..15: mol_type = other DNA
gtgtgtcagctacaa

SEQ ID NO: 23090 - DNA, 15 bp, synthetic construct
  source 1..15: mol_type = other DNA
tgtgtgtcagctaca

SEQ ID NO: 23091 - DNA, 15 bp, synthetic construct
  source 1..15: mol_type = other DNA
gtgtgtgtcagctac

SEQ ID NO: 23092 - DNA, 15 bp, synthetic construct
  source 1..15: mol_type = other DNA
tgtgtgtgtcagcta

SEQ ID NO: 23093 - DNA, 15 bp, synthetic construct
  source 1..15: mol_type = other DNA
ctgtgtgtgtcagct

SEQ ID NO: 23094 - DNA, 15 bp, synthetic construct
  source 1..15: mol_type = other DNA
cctgtgtgtgtcagc

SEQ ID NO: 23095 - DNA, 15 bp, synthetic construct
  source 1..15: mol_type = other DNA
gcctgtgtgtgtcag

SEQ ID NO: 23096 - DNA, 15 bp, synthetic construct
  source 1..15: mol_type = other DNA
agcctgtgtgtgtca

SEQ ID NO: 23097 - DNA, 15 bp, synthetic construct
  source 1..15: mol_type = other DNA
cagcctgtgtgtgtc

SEQ ID NO: 23098 - DNA, 15 bp, synthetic construct
  source 1..15: mol_type = other DNA
ccagcctgtgtgtgt

SEQ ID NO: 23099 - DNA, 15 bp, synthetic construct
  source 1..15: mol_type = other DNA
gccagcctgtgtgtg

SEQ ID NO: 23100 - DNA, 15 bp, synthetic construct
  source 1..15: mol_type = other DNA
agccagcctgtgtgt

SEQ ID NO: 23101 - DNA, 15 bp, synthetic construct
  source 1..15: mol_type = other DNA
gagccagcctgtgtg

SEQ ID NO: 23102 - DNA, 15 bp, synthetic construct
  source 1..15: mol_type = other DNA
agagccagcctgtgt

SEQ ID NO: 23103 - DNA, 15 bp, synthetic construct
  source 1..15: mol_type = other DNA
cagagccagcctgtg

SEQ ID NO: 23104 - DNA, 15 bp, synthetic construct
  source 1..15: mol_type = other DNA
ccagagccagcctgt

SEQ ID NO: 23105 - DNA, 15 bp, synthetic construct
  source 1..15: mol_type = other DNA
cccagagccagcctg

SEQ ID NO: 23106 - DNA, 15 bp, synthetic construct
  source 1..15: mol_type = other DNA
tctcccagagccagc

SEQ ID NO: 23107 - DNA, 15 bp, synthetic construct
  source 1..15: mol_type = other DNA
atctcccagagccag

SEQ ID NO: 23108 - DNA, 15 bp, synthetic construct
  source 1..15: mol_type = other DNA
catctcccagagcca

SEQ ID NO: 23109 - DNA, 15 bp, synthetic construct
  source 1..15: mol_type = other DNA
gcatctcccagagcc

SEQ ID NO: 23110 - DNA, 15 bp, synthetic construct
  source 1..15: mol_type = other DNA
tgcatctcccagagc

SEQ ID NO: 23111 - DNA, 15 bp, synthetic construct
  source 1..15: mol_type = other DNA
ctgcatctcccagag

SEQ ID NO: 23112 - DNA, 15 bp, synthetic construct
  source 1..15: mol_type = other DNA
tctgcatctcccaga

SEQ ID NO: 23113 - DNA, 15 bp, synthetic construct
  source 1..15: mol_type = other DNA
ttctgcatctcccag

SEQ ID NO: 23114 - DNA, 15 bp, synthetic construct
  source 1..15: mol_type = other DNA
cttctgcatctccca

SEQ ID NO: 23115 - DNA, 15 bp, synthetic construct
  source 1..15: mol_type = other DNA
ccttctgcatctccc

SEQ ID NO: 23116 - DNA, 15 bp, synthetic construct
  source 1..15: mol_type = other DNA
tccttctgcatctcc

SEQ ID NO: 23117 - DNA, 15 bp, synthetic construct
  source 1..15: mol_type = other DNA
ctccttctgcatctc

SEQ ID NO: 23118 - DNA, 15 bp, synthetic construct
  source 1..15: mol_type = other DNA
gctccttctgcatct

SEQ ID NO: 23119 - DNA, 15 bp, synthetic construct
  source 1..15: mol_type = other DNA
tgctccttctgcatc

SEQ ID NO: 23120 - DNA, 15 bp, synthetic construct
  source 1..15: mol_type = other DNA
gtgctccttctgcat

SEQ ID NO: 23121 - DNA, 15 bp, synthetic construct
  source 1..15: mol_type = other DNA
cgtgctccttctgca

SEQ ID NO: 23122 - DNA, 15 bp, synthetic construct
  source 1..15: mol_type = other DNA
acgtgctccttctgc

SEQ ID NO: 23123 - DNA, 15 bp, synthetic construct
  source 1..15: mol_type = other DNA
gacgtgctccttctg

SEQ ID NO: 23124 - DNA, 15 bp, synthetic construct
  source 1..15: mol_type = other DNA
ggacgtgctccttct

SEQ ID NO: 23125 - DNA, 15 bp, synthetic construct
  source 1..15: mol_type = other DNA
gggacgtgctccttc

SEQ ID NO: 23126 - DNA, 15 bp, synthetic construct
  source 1..15: mol_type = other DNA
ggggacgtgctcctt

SEQ ID NO: 23127 - DNA, 15 bp, synthetic construct
  source 1..15: mol_type = other DNA
gggggacgtgctcct

SEQ ID NO: 23128 - DNA, 15 bp, synthetic construct
  source 1..15: mol_type = other DNA
tgggggacgtgctcc

SEQ ID NO: 23129 - DNA, 15 bp, synthetic construct
  source 1..15: mol_type = other DNA
ttgggggacgtgctc

SEQ ID NO: 23130 - DNA, 15 bp, synthetic construct
  source 1..15: mol_type = other DNA
tttgggggacgtgct

SEQ ID NO: 23131 - DNA, 15 bp, synthetic construct
  source 1..15: mol_type = other DNA
ttttgggggacgtgc

SEQ ID NO: 23132 - DNA, 15 bp, synthetic construct
  source 1..15: mol_type = other DNA
attttgggggacgtg

SEQ ID NO: 23133 - DNA, 15 bp, synthetic construct
  source 1..15: mol_type = other DNA
cattttgggggacgt

SEQ ID NO: 23134 - DNA, 15 bp, synthetic construct
  source 1..15: mol_type = other DNA
tcattttgggggacg

SEQ ID NO: 23135 - DNA, 15 bp, synthetic construct
  source 1..15: mol_type = other DNA
ttcattttgggggac

SEQ ID NO: 23136 - DNA, 15 bp, synthetic construct
  source 1..15: mol_type = other DNA
cttcattttggggga

SEQ ID NO: 23137 - DNA, 15 bp, synthetic construct
  source 1..15: mol_type = other DNA
gcttcattttggggg

SEQ ID NO: 23138 - DNA, 15 bp, synthetic construct
  source 1..15: mol_type = other DNA
ggcttcattttgggg

SEQ ID NO: 23139 - DNA, 15 bp, synthetic construct
  source 1..15: mol_type = other DNA
tggcttcattttggg

SEQ ID NO: 23140 - DNA, 15 bp, synthetic construct
  source 1..15: mol_type = other DNA
ctggcttcattttgg

SEQ ID NO: 23141 - DNA, 15 bp, synthetic construct
  source 1..15: mol_type = other DNA
gtctggcttcatttt

SEQ ID NO: 23142 - DNA, 15 bp, synthetic construct
  source 1..15: mol_type = other DNA
tgtctggcttcattt

SEQ ID NO: 23143 - DNA, 15 bp, synthetic construct
  source 1..15: mol_type = other DNA
ctgtctggcttcatt

SEQ ID NO: 23144 - DNA, 15 bp, synthetic construct
  source 1..15: mol_type = other DNA
tctgtctggcttcat

SEQ ID NO: 23145 - DNA, 15 bp, synthetic construct
  source 1..15: mol_type = other DNA
gtctgtctggcttca

SEQ ID NO: 23146 - DNA, 15 bp, synthetic construct
  source 1..15: mol_type = other DNA
tgtctgtctggcttc

SEQ ID NO: 23147 - DNA, 15 bp, synthetic construct
  source 1..15: mol_type = other DNA
atgtctgtctggctt

SEQ ID NO: 23148 - DNA, 15 bp, synthetic construct
  source 1..15: mol_type = other DNA
gatgtctgtctggct

SEQ ID NO: 23149 - DNA, 15 bp, synthetic construct
  source 1..15: mol_type = other DNA
ggatgtctgtctggc

SEQ ID NO: 23150 - DNA, 15 bp, synthetic construct
  source 1..15: mol_type = other DNA
aggatgtctgtctgg

SEQ ID NO: 23151 - DNA, 15 bp, synthetic construct
  source 1..15: mol_type = other DNA
tccttccttaaggat

SEQ ID NO: 23152 - DNA, 15 bp, synthetic construct
  source 1..15: mol_type = other DNA
ctccttccttaagga

SEQ ID NO: 23153 - DNA, 15 bp, synthetic construct
  source 1..15: mol_type = other DNA
gctccttccttaagg

SEQ ID NO: 23154 - DNA, 15 bp, synthetic construct
  source 1..15: mol_type = other DNA
tgctccttccttaag

SEQ ID NO: 23155 - DNA, 15 bp, synthetic construct
  source 1..15: mol_type = other DNA
ttgctccttccttaa

SEQ ID NO: 23156 - DNA, 15 bp, synthetic construct
  source 1..15: mol_type = other DNA
tttgctccttcctta

SEQ ID NO: 23157 - DNA, 15 bp, synthetic construct
  source 1..15: mol_type = other DNA
ctttgctccttcctt

SEQ ID NO: 23158 - DNA, 15 bp, synthetic construct
  source 1..15: mol_type = other DNA
cctttgctccttcct

SEQ ID NO: 23159 - DNA, 15 bp, synthetic construct
  source 1..15: mol_type = other DNA
ccctttgctccttcc

SEQ ID NO: 23160 - DNA, 15 bp, synthetic construct
  source 1..15: mol_type = other DNA
cccctttgctccttc

SEQ ID NO: 23161 - DNA, 15 bp, synthetic construct
  source 1..15: mol_type = other DNA
aagcccctttgctcc

SEQ ID NO: 23162 - DNA, 15 bp, synthetic construct
  source 1..15: mol_type = other DNA
gaagcccctttgctc

SEQ ID NO: 23163 - DNA, 15 bp, synthetic construct
  source 1..15: mol_type = other DNA
tgaagcccctttgct

SEQ ID NO: 23164 - DNA, 15 bp, synthetic construct
  source 1..15: mol_type = other DNA
atgaagcccctttgc

SEQ ID NO: 23165 - DNA, 15 bp, synthetic construct
  source 1..15: mol_type = other DNA
gatgaagcccctttg

SEQ ID NO: 23166 - DNA, 15 bp, synthetic construct
  source 1..15: mol_type = other DNA
agatgaagccccttt

SEQ ID NO: 23167 - DNA, 15 bp, synthetic construct
  source 1..15: mol_type = other DNA
aagatgaagcccctt

SEQ ID NO: 23168 - DNA, 15 bp, synthetic construct
  source 1..15: mol_type = other DNA
taagatgaagcccct

SEQ ID NO: 23169 - DNA, 15 bp, synthetic construct
  source 1..15: mol_type = other DNA
ccttcttcattcttt

SEQ ID NO: 23170 - DNA, 15 bp, synthetic construct
  source 1..15: mol_type = other DNA
cccttcttcattctt

SEQ ID NO: 23171 - DNA, 15 bp, synthetic construct
  source 1..15: mol_type = other DNA
tcccttcttcattct

SEQ ID NO: 23172 - DNA, 15 bp, synthetic construct
  source 1..15: mol_type = other DNA
atcccttcttcattc

SEQ ID NO: 23173 - DNA, 15 bp, synthetic construct
  source 1..15: mol_type = other DNA
aatcccttcttcatt

SEQ ID NO: 23174 - DNA, 15 bp, synthetic construct
  source 1..15: mol_type = other DNA
ccacatctctcatga

SEQ ID NO: 23175 - DNA, 15 bp, synthetic construct
  source 1..15: mol_type = other DNA
gccacatctctcatg

SEQ ID NO: 23176 - DNA, 15 bp, synthetic construct
  source 1..15: mol_type = other DNA
tgccacatctctcat

SEQ ID NO: 23177 - DNA, 15 bp, synthetic construct
  source 1..15: mol_type = other DNA
ctgccacatctctca

SEQ ID NO: 23178 - DNA, 15 bp, synthetic construct
  source 1..15: mol_type = other DNA
cctgccacatctctc

SEQ ID NO: 23179 - DNA, 15 bp, synthetic construct
  source 1..15: mol_type = other DNA
tcctgccacatctct

SEQ ID NO: 23180 - DNA, 15 bp, synthetic construct
  source 1..15: mol_type = other DNA
ttcctgccacatctc

SEQ ID NO: 23181 - DNA, 15 bp, synthetic construct
  source 1..15: mol_type = other DNA
attcctgccacatct

SEQ ID NO: 23182 - DNA, 15 bp, synthetic construct
  source 1..15: mol_type = other DNA
aattcctgccacatc

SEQ ID NO: 23183 - DNA, 15 bp, synthetic construct
  source 1..15: mol_type = other DNA
gaaattcctgccaca

SEQ ID NO: 23184 - DNA, 15 bp, synthetic construct
  source 1..15: mol_type = other DNA
tctgcctctcaagaa

SEQ ID NO: 23185 - DNA, 15 bp, synthetic construct
  source 1..15: mol_type = other DNA
ctctgcctctcaaga

SEQ ID NO: 23186 - DNA, 15 bp, synthetic construct
  source 1..15: mol_type = other DNA
cctctgcctctcaag

SEQ ID NO: 23187 - DNA, 15 bp, synthetic construct
  source 1..15: mol_type = other DNA
ccctctgcctctcaa

SEQ ID NO: 23188 - DNA, 15 bp, synthetic construct
  source 1..15: mol_type = other DNA
tccctctgcctctca

SEQ ID NO: 23189 - DNA, 15 bp, synthetic construct
  source 1..15: mol_type = other DNA
atgctctccctctgc

SEQ ID NO: 23190 - DNA, 15 bp, synthetic construct
  source 1..15: mol_type = other DNA
catgctctccctctg

SEQ ID NO: 23191 - DNA, 15 bp, synthetic construct
  source 1..15: mol_type = other DNA
tcatgctctccctct

SEQ ID NO: 23192 - DNA, 15 bp, synthetic construct
  source 1..15: mol_type = other DNA
ctcatgctctccctc

SEQ ID NO: 23193 - DNA, 15 bp, synthetic construct
  source 1..15: mol_type = other DNA
tctcatgctctccct

SEQ ID NO: 23194 - DNA, 15 bp, synthetic construct
  source 1..15: mol_type = other DNA
ttctcatgctctccc

SEQ ID NO: 23195 - DNA, 15 bp, synthetic construct
  source 1..15: mol_type = other DNA
attctcatgctctcc

SEQ ID NO: 23196 - DNA, 15 bp, synthetic construct
  source 1..15: mol_type = other DNA
cattctcatgctctc

SEQ ID NO: 23197 - DNA, 15 bp, synthetic construct
  source 1..15: mol_type = other DNA
acattctcatgctct

SEQ ID NO: 23198 - DNA, 15 bp, synthetic construct
  source 1..15: mol_type = other DNA
ccttcctaacattct

SEQ ID NO: 23199 - DNA, 15 bp, synthetic construct
  source 1..15: mol_type = other DNA
gccttcctaacattc

SEQ ID NO: 23200 - DNA, 15 bp, synthetic construct
  source 1..15: mol_type = other DNA
tgccttcctaacatt

SEQ ID NO: 23201 - DNA, 15 bp, synthetic construct
  source 1..15: mol_type = other DNA
ctgccttcctaacat

SEQ ID NO: 23202 - DNA, 15 bp, synthetic construct
  source 1..15: mol_type = other DNA
cctgccttcctaaca

SEQ ID NO: 23203 - DNA, 15 bp, synthetic construct
  source 1..15: mol_type = other DNA
tcctgccttcctaac

SEQ ID NO: 23204 - DNA, 15 bp, synthetic construct
  source 1..15: mol_type = other DNA
ctcctgccttcctaa

SEQ ID NO: 23205 - DNA, 15 bp, synthetic construct
  source 1..15: mol_type = other DNA
tctcctgccttccta

SEQ ID NO: 23206 - DNA, 15 bp, synthetic construct
  source 1..15: mol_type = other DNA
ctctcctgccttcct

SEQ ID NO: 23207 - DNA, 15 bp, synthetic construct
  source 1..15: mol_type = other DNA
tctctcctgccttcc

SEQ ID NO: 23208 - DNA, 15 bp, synthetic construct
  source 1..15: mol_type = other DNA
gtctctcctgccttc

SEQ ID NO: 23209 - DNA, 15 bp, synthetic construct
  source 1..15: mol_type = other DNA
agtctctcctgcctt

SEQ ID NO: 23210 - DNA, 15 bp, synthetic construct
  source 1..15: mol_type = other DNA
gagtctctcctgcct

SEQ ID NO: 23211 - DNA, 15 bp, synthetic construct
  source 1..15: mol_type = other DNA
agagtctctcctgcc

SEQ ID NO: 23212 - DNA, 15 bp, synthetic construct
  source 1..15: mol_type = other DNA
gagagtctctcctgc

SEQ ID NO: 23213 - DNA, 15 bp, synthetic construct
  source 1..15: mol_type = other DNA
tgagagtctctcctg

SEQ ID NO: 23214 - DNA, 15 bp, synthetic construct
  source 1..15: mol_type = other DNA
gtgagagtctctcct

SEQ ID NO: 23215 - DNA, 15 bp, synthetic construct
  source 1..15: mol_type = other DNA
tgtgagagtctctcc

SEQ ID NO: 23216 - DNA, 15 bp, synthetic construct
  source 1..15: mol_type = other DNA
gtgtgagagtctctc

SEQ ID NO: 23217 - DNA, 15 bp, synthetic construct
  source 1..15: mol_type = other DNA
tgtgtgagagtctct

SEQ ID NO: 23218 - DNA, 15 bp, synthetic construct
  source 1..15: mol_type = other DNA
atgtgtgagagtctc

SEQ ID NO: 23219 - DNA, 15 bp, synthetic construct
  source 1..15: mol_type = other DNA
gatgtgtgagagtct

SEQ ID NO: 23220 - DNA, 15 bp, synthetic construct
  source 1..15: mol_type = other DNA
cccagatgtgtgaga

SEQ ID NO: 23221 - DNA, 15 bp, synthetic construct
  source 1..15: mol_type = other DNA
tcccagatgtgtgag

SEQ ID NO: 23222 - DNA, 15 bp, synthetic construct
  source 1..15: mol_type = other DNA
ttcccagatgtgtga

SEQ ID NO: 23223 - DNA, 15 bp, synthetic construct
  source 1..15: mol_type = other DNA
cttcccagatgtgtg

SEQ ID NO: 23224 - DNA, 15 bp, synthetic construct
  source 1..15: mol_type = other DNA
gcttcccagatgtgt

SEQ ID NO: 23225 - DNA, 15 bp, synthetic construct
  source 1..15: mol_type = other DNA
agcttcccagatgtg

SEQ ID NO: 23226 - DNA, 15 bp, synthetic construct
  source 1..15: mol_type = other DNA
cagcttcccagatgt

SEQ ID NO: 23227 - DNA, 15 bp, synthetic construct
  source 1..15: mol_type = other DNA
tcagcttcccagatg

SEQ ID NO: 23228 - DNA, 15 bp, synthetic construct
  source 1..15: mol_type = other DNA
gtcagcttcccagat

SEQ ID NO: 23229 - DNA, 15 bp, synthetic construct
  source 1..15: mol_type = other DNA
tgtcagcttcccaga

SEQ ID NO: 23230 - DNA, 15 bp, synthetic construct
  source 1..15: mol_type = other DNA
ttgtcagcttcccag

SEQ ID NO: 23231 - DNA, 15 bp, synthetic construct
  source 1..15: mol_type = other DNA
attgtcagcttccca

SEQ ID NO: 23232 - DNA, 15 bp, synthetic construct
  source 1..15: mol_type = other DNA
gattgtcagcttccc

SEQ ID NO: 23233 - DNA, 15 bp, synthetic construct
  source 1..15: mol_type = other DNA
ggattgtcagcttcc

SEQ ID NO: 23234 - DNA, 15 bp, synthetic construct
  source 1..15: mol_type = other DNA
tggattgtcagcttc

SEQ ID NO: 23235 - DNA, 15 bp, synthetic construct
  source 1..15: mol_type = other DNA
atggattgtcagctt

SEQ ID NO: 23236 - DNA, 15 bp, synthetic construct
  source 1..15: mol_type = other DNA
gatggattgtcagct

SEQ ID NO: 23237 - DNA, 15 bp, synthetic construct
  source 1..15: mol_type = other DNA
gctgatggattgtca

SEQ ID NO: 23238 - DNA, 15 bp, synthetic construct
  source 1..15: mol_type = other DNA
ggacatgctgatgga

SEQ ID NO: 23239 - DNA, 15 bp, synthetic construct
  source 1..15: mol_type = other DNA
cctggacatgctgat

SEQ ID NO: 23240 - DNA, 15 bp, synthetic construct
  source 1..15: mol_type = other DNA
tcctggacatgctga

SEQ ID NO: 23241 - DNA, 15 bp, synthetic construct
  source 1..15: mol_type = other DNA
ctcctggacatgctg

SEQ ID NO: 23242 - DNA, 15 bp, synthetic construct
  source 1..15: mol_type = other DNA
cctcctggacatgct

SEQ ID NO: 23243 - DNA, 15 bp, synthetic construct
  source 1..15: mol_type = other DNA
tcctcctggacatgc

SEQ ID NO: 23244 - DNA, 15 bp, synthetic construct
  source 1..15: mol_type = other DNA
ttcctcctggacatg

SEQ ID NO: 23245 - DNA, 15 bp, synthetic construct
  source 1..15: mol_type = other DNA
tttcctcctggacat

SEQ ID NO: 23246 - DNA, 15 bp, synthetic construct
  source 1..15: mol_type = other DNA
ttttcctcctggaca

SEQ ID NO: 23247 - DNA, 15 bp, synthetic construct
  source 1..15: mol_type = other DNA
attttcctcctggac

SEQ ID NO: 23248 - DNA, 15 bp, synthetic construct
  source 1..15: mol_type = other DNA
tattttcctcctgga

SEQ ID NO: 23249 - DNA, 15 bp, synthetic construct
  source 1..15: mol_type = other DNA
ttattttcctcctgg

SEQ ID NO: 23250 - DNA, 15 bp, synthetic construct
  source 1..15: mol_type = other DNA
cttattttcctcctg

SEQ ID NO: 23251 - DNA, 15 bp, synthetic construct
  source 1..15: mol_type = other DNA
ccttattttcctcct

SEQ ID NO: 23252 - DNA, 15 bp, synthetic construct
  source 1..15: mol_type = other DNA
tccttattttcctcc

SEQ ID NO: 23253 - DNA, 15 bp, synthetic construct
  source 1..15: mol_type = other DNA
ctccttattttcctc

SEQ ID NO: 23254 - DNA, 15 bp, synthetic construct
  source 1..15: mol_type = other DNA
cctccttattttcct

SEQ ID NO: 23255 - DNA, 15 bp, synthetic construct
  source 1..15: mol_type = other DNA
tcctccttattttcc

SEQ ID NO: 23256 - DNA, 15 bp, synthetic construct
  source 1..15: mol_type = other DNA
ctcctccttattttc

SEQ ID NO: 23257 - DNA, 15 bp, synthetic construct
  source 1..15: mol_type = other DNA
cctcctccttatttt

SEQ ID NO: 23258 - DNA, 15 bp, synthetic construct
  source 1..15: mol_type = other DNA
tcctcctccttattt

SEQ ID NO: 23259 - DNA, 15 bp, synthetic construct
  source 1..15: mol_type = other DNA
ctcctcctccttatt

SEQ ID NO: 23260 - DNA, 15 bp, synthetic construct
  source 1..15: mol_type = other DNA
gctcctcctccttat

SEQ ID NO: 23261 - DNA, 15 bp, synthetic construct
  source 1..15: mol_type = other DNA
tgctcctcctcctta

SEQ ID NO: 23262 - DNA, 15 bp, synthetic construct
  source 1..15: mol_type = other DNA
ctgctcctcctcctt

SEQ ID NO: 23263 - DNA, 15 bp, synthetic construct
  source 1..15: mol_type = other DNA
ttctgctcctcctcc

SEQ ID NO: 23264 - DNA, 15 bp, synthetic construct
  source 1..15: mol_type = other DNA
tttctgctcctcctc

SEQ ID NO: 23265 - DNA, 15 bp, synthetic construct
  source 1..15: mol_type = other DNA
atttctgctcctcct

SEQ ID NO: 23266 - DNA, 15 bp, synthetic construct
  source 1..15: mol_type = other DNA
tatttctgctcctcc

SEQ ID NO: 23267 - DNA, 15 bp, synthetic construct
  source 1..15: mol_type = other DNA
ctatttctgctcctc

SEQ ID NO: 23268 - DNA, 15 bp, synthetic construct
  source 1..15: mol_type = other DNA
tctatttctgctcct

SEQ ID NO: 23269 - DNA, 15 bp, synthetic construct
  source 1..15: mol_type = other DNA
atctatttctgctcc

SEQ ID NO: 23270 - DNA, 15 bp, synthetic construct
  source 1..15: mol_type = other DNA
gcctcatctatttct

SEQ ID NO: 23271 - DNA, 15 bp, synthetic construct
  source 1..15: mol_type = other DNA
agcctcatctatttc

SEQ ID NO: 23272 - DNA, 15 bp, synthetic construct
  source 1..15: mol_type = other DNA
cagcctcatctattt

SEQ ID NO: 23273 - DNA, 15 bp, synthetic construct
  source 1..15: mol_type = other DNA
ccagcctcatctatt

SEQ ID NO: 23274 - DNA, 15 bp, synthetic construct
  source 1..15: mol_type = other DNA
tccagcctcatctat

SEQ ID NO: 23275 - DNA, 15 bp, synthetic construct
  source 1..15: mol_type = other DNA
atccagcctcatcta

SEQ ID NO: 23276 - DNA, 15 bp, synthetic construct
  source 1..15: mol_type = other DNA
tatccagcctcatct

SEQ ID NO: 23277 - DNA, 15 bp, synthetic construct
  source 1..15: mol_type = other DNA
atatccagcctcatc

SEQ ID NO: 23278 - DNA, 15 bp, synthetic construct
  source 1..15: mol_type = other DNA
tatatccagcctcat

SEQ ID NO: 23279 - DNA, 15 bp, synthetic construct
  source 1..15: mol_type = other DNA
ctatatccagcctca

SEQ ID NO: 23280 - DNA, 15 bp, synthetic construct
  source 1..15: mol_type = other DNA
tctatatccagcctc

SEQ ID NO: 23281 - DNA, 15 bp, synthetic construct
  source 1..15: mol_type = other DNA
ttctatatccagcct

SEQ ID NO: 23282 - DNA, 15 bp, synthetic construct
  source 1..15: mol_type = other DNA
cttctatatccagcc

SEQ ID NO: 23283 - DNA, 15 bp, synthetic construct
  source 1..15: mol_type = other DNA
gcttctatatccagc

SEQ ID NO: 23284 - DNA, 15 bp, synthetic construct
  source 1..15: mol_type = other DNA
ctgcttctatatcca

SEQ ID NO: 23285 - DNA, 15 bp, synthetic construct
  source 1..15: mol_type = other DNA
cctgcttctatatcc

SEQ ID NO: 23286 - DNA, 15 bp, synthetic construct
  source 1..15: mol_type = other DNA
ccctgcttctatatc

SEQ ID NO: 23287 - DNA, 15 bp, synthetic construct
  source 1..15: mol_type = other DNA
gccctgcttctatat

SEQ ID NO: 23288 - DNA, 15 bp, synthetic construct
  source 1..15: mol_type = other DNA
agccctgcttctata

SEQ ID NO: 23289 - DNA, 15 bp, synthetic construct
  source 1..15: mol_type = other DNA
cagccctgcttctat

SEQ ID NO: 23290 - DNA, 15 bp, synthetic construct
  source 1..15: mol_type = other DNA
tcagccctgcttcta

SEQ ID NO: 23291 - DNA, 15 bp, synthetic construct
  source 1..15: mol_type = other DNA
ttcagccctgcttct

SEQ ID NO: 23292 - DNA, 15 bp, synthetic construct
  source 1..15: mol_type = other DNA
cttcagccctgcttc

SEQ ID NO: 23293 - DNA, 15 bp, synthetic construct
  source 1..15: mol_type = other DNA
gcttcagccctgctt

SEQ ID NO: 23294 - DNA, 15 bp, synthetic construct
  source 1..15: mol_type = other DNA
agcttcagccctgct

SEQ ID NO: 23295 - DNA, 15 bp, synthetic construct
  source 1..15: mol_type = other DNA
cagcttcagccctgc

SEQ ID NO: 23296 - DNA, 15 bp, synthetic construct
  source 1..15: mol_type = other DNA
acagcttcagccctg

SEQ ID NO: 23297 - DNA, 15 bp, synthetic construct
  source 1..15: mol_type = other DNA
cacagcttcagccct

SEQ ID NO: 23298 - DNA, 15 bp, synthetic construct
  source 1..15: mol_type = other DNA
acacagcttcagccc

SEQ ID NO: 23299 - DNA, 15 bp, synthetic construct
  source 1..15: mol_type = other DNA
aacacagcttcagcc

SEQ ID NO: 23300 - DNA, 15 bp, synthetic construct
  source 1..15: mol_type = other DNA
caacacagcttcagc

SEQ ID NO: 23301 - DNA, 15 bp, synthetic construct
  source 1..15: mol_type = other DNA
gccttctggatagaa

SEQ ID NO: 23302 - DNA, 15 bp, synthetic construct
  source 1..15: mol_type = other DNA
tgccttctggataga

SEQ ID NO: 23303 - DNA, 15 bp, synthetic construct
  source 1..15: mol_type = other DNA
ttgccttctggatag

SEQ ID NO: 23304 - DNA, 15 bp, synthetic construct
  source 1..15: mol_type = other DNA
attgccttctggata

SEQ ID NO: 23305 - DNA, 15 bp, synthetic construct
  source 1..15: mol_type = other DNA
tattgccttctggat

SEQ ID NO: 23306 - DNA, 15 bp, synthetic construct
  source 1..15: mol_type = other DNA
ctattgccttctgga

SEQ ID NO: 23307 - DNA, 15 bp, synthetic construct
  source 1..15: mol_type = other DNA
cctattgccttctgg

SEQ ID NO: 23308 - DNA, 15 bp, synthetic construct
  source 1..15: mol_type = other DNA
acctattgccttctg

SEQ ID NO: 23309 - DNA, 15 bp, synthetic construct
  source 1..15: mol_type = other DNA
tacctattgccttct

SEQ ID NO: 23310 - DNA, 15 bp, synthetic construct
  source 1..15: mol_type = other DNA
gccctttgcagaaaa

SEQ ID NO: 23311 - DNA, 15 bp, synthetic construct
  source 1..15: mol_type = other DNA
agccctttgcagaaa

SEQ ID NO: 23312 - DNA, 15 bp, synthetic construct
  source 1..15: mol_type = other DNA
tagccctttgcagaa

SEQ ID NO: 23313 - DNA, 15 bp, synthetic construct
  source 1..15: mol_type = other DNA
ttagccctttgcaga

SEQ ID NO: 23314 - DNA, 15 bp, synthetic construct
  source 1..15: mol_type = other DNA
tttagccctttgcag

SEQ ID NO: 23315 - DNA, 15 bp, synthetic construct
  source 1..15: mol_type = other DNA
atttagccctttgca

SEQ ID NO: 23316 - DNA, 15 bp, synthetic construct
  source 1..15: mol_type = other DNA
catttagccctttgc

SEQ ID NO: 23317 - DNA, 15 bp, synthetic construct
  source 1..15: mol_type = other DNA
acatttagccctttg

SEQ ID NO: 23318 - DNA, 15 bp, synthetic construct
  source 1..15: mol_type = other DNA
ccatatggcttggaa

SEQ ID NO: 23319 - DNA, 15 bp, synthetic construct
  source 1..15: mol_type = other DNA
accatatggcttgga

SEQ ID NO: 23320 - DNA, 15 bp, synthetic construct
  source 1..15: mol_type = other DNA
gaccatatggcttgg

SEQ ID NO: 23321 - DNA, 15 bp, synthetic construct
  source 1..15: mol_type = other DNA
gagaccatatggctt

SEQ ID NO: 23322 - DNA, 15 bp, synthetic construct
  source 1..15: mol_type = other DNA
agagaccatatggct

SEQ ID NO: 23323 - DNA, 15 bp, synthetic construct
  source 1..15: mol_type = other DNA
gagagaccatatggc

SEQ ID NO: 23324 - DNA, 15 bp, synthetic construct
  source 1..15: mol_type = other DNA
gctgagtcattgaga

SEQ ID NO: 23325 - DNA, 15 bp, synthetic construct
  source 1..15: mol_type = other DNA
gagctgagtcattga

SEQ ID NO: 23326 - DNA, 15 bp, synthetic construct
  source 1..15: mol_type = other DNA
ggaagagctgagtca

SEQ ID NO: 23327 - DNA, 15 bp, synthetic construct
  source 1..15: mol_type = other DNA
gctactttcatggta

SEQ ID NO: 23328 - DNA, 15 bp, synthetic construct
  source 1..15: mol_type = other DNA
ggctactttcatggt

SEQ ID NO: 23329 - DNA, 15 bp, synthetic construct
  source 1..15: mol_type = other DNA
tggctactttcatgg

SEQ ID NO: 23330 - DNA, 15 bp, synthetic construct
  source 1..15: mol_type = other DNA
tctggctactttcat

SEQ ID NO: 23331 - DNA, 15 bp, synthetic construct
  source 1..15: mol_type = other DNA
ctctggctactttca

SEQ ID NO: 23332 - DNA, 15 bp, synthetic construct
  source 1..15: mol_type = other DNA
tctctggctactttc

SEQ ID NO: 23333 - DNA, 15 bp, synthetic construct
  source 1..15: mol_type = other DNA
gtctctggctacttt

SEQ ID NO: 23334 - DNA, 15 bp, synthetic construct
  source 1..15: mol_type = other DNA
gacacagtctgcgtt

SEQ ID NO: 23335 - DNA, 15 bp, synthetic construct
  source 1..15: mol_type = other DNA
tgacacagtctgcgt

SEQ ID NO: 23336 - DNA, 15 bp, synthetic construct
  source 1..15: mol_type = other DNA
ctgacacagtctgcg

SEQ ID NO: 23337 - DNA, 15 bp, synthetic construct
  source 1..15: mol_type = other DNA
tctgacacagtctgc

SEQ ID NO: 23338 - DNA, 15 bp, synthetic construct
  source 1..15: mol_type = other DNA
gtctgacacagtctg

SEQ ID NO: 23339 - DNA, 15 bp, synthetic construct
  source 1..15: mol_type = other DNA
tgtctgacacagtct

SEQ ID NO: 23340 - DNA, 15 bp, synthetic construct
  source 1..15: mol_type = other DNA
tctccatcacatcat

SEQ ID NO: 23341 - DNA, 15 bp, synthetic construct
  source 1..15: mol_type = other DNA
ttctccatcacatca

SEQ ID NO: 23342 - DNA, 15 bp, synthetic construct
  source 1..15: mol_type = other DNA
gttcactctaccatt

SEQ ID NO: 23343 - DNA, 15 bp, synthetic construct
  source 1..15: mol_type = other DNA
tgttcactctaccat

SEQ ID NO: 23344 - DNA, 15 bp, synthetic construct
  source 1..15: mol_type = other DNA
atgttcactctacca

SEQ ID NO: 23345 - DNA, 15 bp, synthetic construct
  source 1..15: mol_type = other DNA
gtgtatgttcactct

SEQ ID NO: 23346 - DNA, 15 bp, synthetic construct
  source 1..15: mol_type = other DNA
ccagtgtatgttcac

SEQ ID NO: 23347 - DNA, 15 bp, synthetic construct
  source 1..15: mol_type = other DNA
tccagtgtatgttca

SEQ ID NO: 23348 - DNA, 15 bp, synthetic construct
  source 1..15: mol_type = other DNA
ttccagtgtatgttc

SEQ ID NO: 23349 - DNA, 15 bp, synthetic construct
  source 1..15: mol_type = other DNA
gggtcaagcagtata

SEQ ID NO: 23350 - DNA, 15 bp, synthetic construct
  source 1..15: mol_type = other DNA
tgggtcaagcagtat

SEQ ID NO: 23351 - DNA, 15 bp, synthetic construct
  source 1..15: mol_type = other DNA
ttgggtcaagcagta

SEQ ID NO: 23352 - DNA, 15 bp, synthetic construct
  source 1..15: mol_type = other DNA
cttgggtcaagcagt

SEQ ID NO: 23353 - DNA, 15 bp, synthetic construct
  source 1..15: mol_type = other DNA
gcttgggtcaagcag

SEQ ID NO: 23354 - DNA, 15 bp, synthetic construct
  source 1..15: mol_type = other DNA
agcttgggtcaagca

SEQ ID NO: 23355 - DNA, 15 bp, synthetic construct
  source 1..15: mol_type = other DNA
aagcttgggtcaagc

SEQ ID NO: 23356 - DNA, 15 bp, synthetic construct
  source 1..15: mol_type = other DNA
tttctaccttttgct

SEQ ID NO: 23357 - DNA, 15 bp, synthetic construct
  source 1..15: mol_type = other DNA
gtcttttctaccttt

SEQ ID NO: 23358 - DNA, 15 bp, synthetic construct
  source 1..15: mol_type = other DNA
tgtcttttctacctt

SEQ ID NO: 23359 - DNA, 15 bp, synthetic construct
  source 1..15: mol_type = other DNA
ctgtcttttctacct

SEQ ID NO: 23360 - DNA, 15 bp, synthetic construct
  source 1..15: mol_type = other DNA
tctgtcttttctacc

SEQ ID NO: 23361 - DNA, 15 bp, synthetic construct
  source 1..15: mol_type = other DNA
accctgagctatgac

SEQ ID NO: 23362 - DNA, 15 bp, synthetic construct
  source 1..15: mol_type = other DNA
caccctgagctatga

SEQ ID NO: 23363 - DNA, 15 bp, synthetic construct
  source 1..15: mol_type = other DNA
acaccctgagctatg

SEQ ID NO: 23364 - DNA, 15 bp, synthetic construct
  source 1..15: mol_type = other DNA
aacaccctgagctat

SEQ ID NO: 23365 - DNA, 15 bp, synthetic construct
  source 1..15: mol_type = other DNA
caaacaccctgagct

SEQ ID NO: 23366 - DNA, 15 bp, synthetic construct
  source 1..15: mol_type = other DNA
tcaaacaccctgagc

SEQ ID NO: 23367 - DNA, 15 bp, synthetic construct
  source 1..15: mol_type = other DNA
gtcaaacaccctgag

SEQ ID NO: 23368 - DNA, 15 bp, synthetic construct
  source 1..15: mol_type = other DNA
ccccacagaaaagca

SEQ ID NO: 23369 - DNA, 15 bp, synthetic construct
  source 1..15: mol_type = other DNA
accccacagaaaagc

SEQ ID NO: 23370 - DNA, 15 bp, synthetic construct
  source 1..15: mol_type = other DNA
ggctgctgtgacaaa

SEQ ID NO: 23371 - DNA, 15 bp, synthetic construct
  source 1..15: mol_type = other DNA
aggctgctgtgacaa

SEQ ID NO: 23372 - DNA, 15 bp, synthetic construct
  source 1..15: mol_type = other DNA
aaggctgctgtgaca

SEQ ID NO: 23373 - DNA, 15 bp, synthetic construct
  source 1..15: mol_type = other DNA
aaaggctgctgtgac

SEQ ID NO: 23374 - DNA, 15 bp, synthetic construct
  source 1..15: mol_type = other DNA
caaaggctgctgtga

SEQ ID NO: 23375 - DNA, 15 bp, synthetic construct
  source 1..15: mol_type = other DNA
acaaaggctgctgtg

SEQ ID NO: 23376 - DNA, 15 bp, synthetic construct
  source 1..15: mol_type = other DNA
gacaaaggctgctgt

SEQ ID NO: 23377 - DNA, 15 bp, synthetic construct
  source 1..15: mol_type = other DNA
gcgacaaaggctgct

SEQ ID NO: 23378 - DNA, 15 bp, synthetic construct
  source 1..15: mol_type = other DNA
agcgacaaaggctgc

SEQ ID NO: 23379 - DNA, 15 bp, synthetic construct
  source 1..15: mol_type = other DNA
cggtgtttgaagcga

SEQ ID NO: 23380 - DNA, 15 bp, synthetic construct
  source 1..15: mol_type = other DNA
gcggtgtttgaagcg

SEQ ID NO: 23381 - DNA, 15 bp, synthetic construct
  source 1..15: mol_type = other DNA
tgcggtgtttgaagc

SEQ ID NO: 23382 - DNA, 15 bp, synthetic construct
  source 1..15: mol_type = other DNA
acttgcggtgtttga

SEQ ID NO: 23383 - DNA, 15 bp, synthetic construct
  source 1..15: mol_type = other DNA
cacttgcggtgtttg

SEQ ID NO: 23384 - DNA, 15 bp, synthetic construct
  source 1..15: mol_type = other DNA
acacttgcggtgttt

SEQ ID NO: 23385 - DNA, 15 bp, synthetic construct
  source 1..15: mol_type = other DNA
aacacttgcggtgtt

SEQ ID NO: 23386 - DNA, 15 bp, synthetic construct
  source 1..15: mol_type = other DNA
gaacacttgcggtgt

SEQ ID NO: 23387 - DNA, 15 bp, synthetic construct
  source 1..15: mol_type = other DNA
ccacgtttcagacat

SEQ ID NO: 23388 - DNA, 15 bp, synthetic construct
  source 1..15: mol_type = other DNA
accacgtttcagaca

SEQ ID NO: 23389 - DNA, 15 bp, synthetic construct
  source 1..15: mol_type = other DNA
ccagataccacgttt

SEQ ID NO: 23390 - DNA, 15 bp, synthetic construct
  source 1..15: mol_type = other DNA
tccagataccacgtt

SEQ ID NO: 23391 - DNA, 15 bp, synthetic construct
  source 1..15: mol_type = other DNA
ctccagataccacgt

SEQ ID NO: 23392 - DNA, 15 bp, synthetic construct
  source 1..15: mol_type = other DNA
tctccagataccacg

SEQ ID NO: 23393 - DNA, 15 bp, synthetic construct
  source 1..15: mol_type = other DNA
ctctccagataccac

SEQ ID NO: 23394 - DNA, 15 bp, synthetic construct
  source 1..15: mol_type = other DNA
cctctccagatacca

SEQ ID NO: 23395 - DNA, 15 bp, synthetic construct
  source 1..15: mol_type = other DNA
acctctccagatacc

SEQ ID NO: 23396 - DNA, 15 bp, synthetic construct
  source 1..15: mol_type = other DNA
cacctctccagatac

SEQ ID NO: 23397 - DNA, 15 bp, synthetic construct
  source 1..15: mol_type = other DNA
tcacctctccagata

SEQ ID NO: 23398 - DNA, 15 bp, synthetic construct
  source 1..15: mol_type = other DNA
ctcacctctccagat

SEQ ID NO: 23399 - DNA, 15 bp, synthetic construct
  source 1..15: mol_type = other DNA
tctcacctctccaga

SEQ ID NO: 23400 - DNA, 15 bp, synthetic construct
  source 1..15: mol_type = other DNA
atctcacctctccag

SEQ ID NO: 23401 - DNA, 15 bp, synthetic construct
  source 1..15: mol_type = other DNA
catctcacctctcca

SEQ ID NO: 23402 - DNA, 15 bp, synthetic construct
  source 1..15: mol_type = other DNA
ccatctcacctctcc

SEQ ID NO: 23403 - DNA, 15 bp, synthetic construct
  source 1..15: mol_type = other DNA
tccatctcacctctc

SEQ ID NO: 23404 - DNA, 15 bp, synthetic construct
  source 1..15: mol_type = other DNA
gtccatctcacctct

SEQ ID NO: 23405 - DNA, 15 bp, synthetic construct
  source 1..15: mol_type = other DNA
tgtccatctcacctc

SEQ ID NO: 23406 - DNA, 15 bp, synthetic construct
  source 1..15: mol_type = other DNA
ttgtccatctcacct

SEQ ID NO: 23407 - DNA, 15 bp, synthetic construct
  source 1..15: mol_type = other DNA
tttgtccatctcacc

SEQ ID NO: 23408 - DNA, 15 bp, synthetic construct
  source 1..15: mol_type = other DNA
ctttgtccatctcac

SEQ ID NO: 23409 - DNA, 15 bp, synthetic construct
  source 1..15: mol_type = other DNA
cctttgtccatctca

SEQ ID NO: 23410 - DNA, 15 bp, synthetic construct
  source 1..15: mol_type = other DNA
tcctttgtccatctc

SEQ ID NO: 23411 - DNA, 15 bp, synthetic construct
  source 1..15: mol_type = other DNA
ctcctttgtccatct

SEQ ID NO: 23412 - DNA, 15 bp, synthetic construct
  source 1..15: mol_type = other DNA
gctcctttgtccatc

SEQ ID NO: 23413 - DNA, 15 bp, synthetic construct
  source 1..15: mol_type = other DNA
ggctcctttgtccat

SEQ ID NO: 23414 - DNA, 15 bp, synthetic construct
  source 1..15: mol_type = other DNA
gggctcctttgtcca

SEQ ID NO: 23415 - DNA, 15 bp, synthetic construct
  source 1..15: mol_type = other DNA
agggctcctttgtcc

SEQ ID NO: 23416 - DNA, 15 bp, synthetic construct
  source 1..15: mol_type = other DNA
aagggctcctttgtc

SEQ ID NO: 23417 - DNA, 15 bp, synthetic construct
  source 1..15: mol_type = other DNA
caagggctcctttgt

SEQ ID NO: 23418 - DNA, 15 bp, synthetic construct
  source 1..15: mol_type = other DNA
acaagggctcctttg

SEQ ID NO: 23419 - DNA, 15 bp, synthetic construct
  source 1..15: mol_type = other DNA
aacaagggctccttt

SEQ ID NO: 23420 - DNA, 15 bp, synthetic construct
  source 1..15: mol_type = other DNA
taacaagggctcctt

SEQ ID NO: 23421 - DNA, 15 bp, synthetic construct
  source 1..15: mol_type = other DNA
gtaacaagggctcct

SEQ ID NO: 23422 - DNA, 15 bp, synthetic construct
  source 1..15: mol_type = other DNA
agtaacaagggctcc

SEQ ID NO: 23423 - DNA, 15 bp, synthetic construct
  source 1..15: mol_type = other DNA
gcagtaacaagggct

SEQ ID NO: 23424 - DNA, 15 bp, synthetic construct
  source 1..15: mol_type = other DNA
ctgtgtgcaaggtga

SEQ ID NO: 23425 - DNA, 15 bp, synthetic construct
  source 1..15: mol_type = other DNA
tgtgcattgtctgtt

SEQ ID NO: 23426 - DNA, 15 bp, synthetic construct
  source 1..15: mol_type = other DNA
ttgtgcattgtctgt

SEQ ID NO: 23427 - DNA, 15 bp, synthetic construct
  source 1..15: mol_type = other DNA
ggatttgtgcattgt

SEQ ID NO: 23428 - DNA, 15 bp, synthetic construct
  source 1..15: mol_type = other DNA
gtggatttgtgcatt

SEQ ID NO: 23429 - DNA, 15 bp, synthetic construct
  source 1..15: mol_type = other DNA
ttccgtccataagga

SEQ ID NO: 23430 - DNA, 15 bp, synthetic construct
  source 1..15: mol_type = other DNA
tttccgtccataagg

SEQ ID NO: 23431 - DNA, 15 bp, synthetic construct
  source 1..15: mol_type = other DNA
agaatttccgtccat

SEQ ID NO: 23432 - DNA, 15 bp, synthetic construct
  source 1..15: mol_type = other DNA
cagaatttccgtcca

SEQ ID NO: 23433 - DNA, 15 bp, synthetic construct
  source 1..15: mol_type = other DNA
tcagaatttccgtcc

SEQ ID NO: 23434 - DNA, 15 bp, synthetic construct
  source 1..15: mol_type = other DNA
gaaaggccaggcata

SEQ ID NO: 23435 - DNA, 15 bp, synthetic construct
  source 1..15: mol_type = other DNA
ggaaaggccaggcat

SEQ ID NO: 23436 - DNA, 15 bp, synthetic construct
  source 1..15: mol_type = other DNA
tggaaaggccaggca

SEQ ID NO: 23437 - DNA, 15 bp, synthetic construct
  source 1..15: mol_type = other DNA
atggaaaggccaggc

SEQ ID NO: 23438 - DNA, 15 bp, synthetic construct
  source 1..15: mol_type = other DNA
gatggaaaggccagg

SEQ ID NO: 23439 - DNA, 15 bp, synthetic construct
  source 1..15: mol_type = other DNA
ggatggaaaggccag

SEQ ID NO: 23440 - DNA, 15 bp, synthetic construct
  source 1..15: mol_type = other DNA
aggatggaaaggcca

SEQ ID NO: 23441 - DNA, 15 bp, synthetic construct
  source 1..15: mol_type = other DNA
gcatgggaaagggga

SEQ ID NO: 23442 - DNA, 15 bp, synthetic construct
  source 1..15: mol_type = other DNA
agcatgggaaagggg

SEQ ID NO: 23443 - DNA, 15 bp, synthetic construct
  source 1..15: mol_type = other DNA
attcacagcatggga

SEQ ID NO: 23444 - DNA, 15 bp, synthetic construct
  source 1..15: mol_type = other DNA
cattcacagcatggg

SEQ ID NO: 23445 - DNA, 15 bp, synthetic construct
  source 1..15: mol_type = other DNA
cctgtcactgagatt

SEQ ID NO: 23446 - DNA, 15 bp, synthetic construct
  source 1..15: mol_type = other DNA
ccctgtcactgagat

SEQ ID NO: 23447 - DNA, 15 bp, synthetic construct
  source 1..15: mol_type = other DNA
cccctgtcactgaga

SEQ ID NO: 23448 - DNA, 15 bp, synthetic construct
  source 1..15: mol_type = other DNA
tcccctgtcactgag

SEQ ID NO: 23449 - DNA, 15 bp, synthetic construct
  source 1..15: mol_type = other DNA
ttcccctgtcactga

SEQ ID NO: 23450 - DNA, 15 bp, synthetic construct
  source 1..15: mol_type = other DNA
gttcccctgtcactg

SEQ ID NO: 23451 - DNA, 15 bp, synthetic construct
  source 1..15: mol_type = other DNA
tgttcccctgtcact

SEQ ID NO: 23452 - DNA, 15 bp, synthetic construct
  source 1..15: mol_type = other DNA
gtgttcccctgtcac

SEQ ID NO: 23453 - DNA, 15 bp, synthetic construct
  source 1..15: mol_type = other DNA
tgtgttcccctgtca

SEQ ID NO: 23454 - DNA, 15 bp, synthetic construct
  source 1..15: mol_type = other DNA
ctgtgttcccctgtc

SEQ ID NO: 23455 - DNA, 15 bp, synthetic construct
  source 1..15: mol_type = other DNA
cctgtgttcccctgt

SEQ ID NO: 23456 - DNA, 15 bp, synthetic construct
  source 1..15: mol_type = other DNA
acctgtgttcccctg

SEQ ID NO: 23457 - DNA, 15 bp, synthetic construct
  source 1..15: mol_type = other DNA
tacctgtgttcccct

SEQ ID NO: 23458 - DNA, 15 bp, synthetic construct
  source 1..15: mol_type = other DNA
ctacctgtgttcccc

SEQ ID NO: 23459 - DNA, 15 bp, synthetic construct
  source 1..15: mol_type = other DNA
gctacctgtgttccc

SEQ ID NO: 23460 - DNA, 15 bp, synthetic construct
  source 1..15: mol_type = other DNA
agctacctgtgttcc

SEQ ID NO: 23461 - DNA, 15 bp, synthetic construct
  source 1..15: mol_type = other DNA
gagctacctgtgttc

SEQ ID NO: 23462 - DNA, 15 bp, synthetic construct
  source 1..15: mol_type = other DNA
agagctacctgtgtt

SEQ ID NO: 23463 - DNA, 15 bp, synthetic construct
  source 1..15: mol_type = other DNA
tagagctacctgtgt

SEQ ID NO: 23464 - DNA, 15 bp, synthetic construct
  source 1..15: mol_type = other DNA
ttagagctacctgtg

SEQ ID NO: 23465 - DNA, 15 bp, synthetic construct
  source 1..15: mol_type = other DNA
attagagctacctgt

SEQ ID NO: 23466 - DNA, 15 bp, synthetic construct
  source 1..15: mol_type = other DNA
ctcagtcacagctat

SEQ ID NO: 23467 - DNA, 15 bp, synthetic construct
  source 1..15: mol_type = other DNA
tctcagtcacagcta

SEQ ID NO: 23468 - DNA, 15 bp, synthetic construct
  source 1..15: mol_type = other DNA
cctagaatgcagtgg

SEQ ID NO: 23469 - DNA, 15 bp, synthetic construct
  source 1..15: mol_type = other DNA
ctcttactgttccta

SEQ ID NO: 23470 - DNA, 15 bp, synthetic construct
  source 1..15: mol_type = other DNA
cctcttactgttcct

SEQ ID NO: 23471 - DNA, 15 bp, synthetic construct
  source 1..15: mol_type = other DNA
tcctcttactgttcc

SEQ ID NO: 23472 - DNA, 15 bp, synthetic construct
  source 1..15: mol_type = other DNA
gtcctcttactgttc

SEQ ID NO: 23473 - DNA, 15 bp, synthetic construct
  source 1..15: mol_type = other DNA
ggtcctcttactgtt

SEQ ID NO: 23474 - DNA, 15 bp, synthetic construct
  source 1..15: mol_type = other DNA
aggtcctcttactgt

SEQ ID NO: 23475 - DNA, 15 bp, synthetic construct
  source 1..15: mol_type = other DNA
aaggtcctcttactg

SEQ ID NO: 23476 - DNA, 15 bp, synthetic construct
  source 1..15: mol_type = other DNA
caaggtcctcttact

SEQ ID NO: 23477 - DNA, 15 bp, synthetic construct
  source 1..15: mol_type = other DNA
acaaggtcctcttac

SEQ ID NO: 23478 - DNA, 15 bp, synthetic construct
  source 1..15: mol_type = other DNA
cacaaggtcctctta

SEQ ID NO: 23479 - DNA, 15 bp, synthetic construct
  source 1..15: mol_type = other DNA
tcacaaggtcctctt

SEQ ID NO: 23480 - DNA, 15 bp, synthetic construct
  source 1..15: mol_type = other DNA
ctcacaaggtcctct

SEQ ID NO: 23481 - DNA, 15 bp, synthetic construct
  source 1..15: mol_type = other DNA
actcacaaggtcctc

SEQ ID NO: 23482 - DNA, 15 bp, synthetic construct
  source 1..15: mol_type = other DNA
cactcacaaggtcct

SEQ ID NO: 23483 - DNA, 15 bp, synthetic construct
  source 1..15: mol_type = other DNA
tcactcacaaggtcc

SEQ ID NO: 23484 - DNA, 15 bp, synthetic construct
  source 1..15: mol_type = other DNA
cccactctgtaatgt

SEQ ID NO: 23485 - DNA, 15 bp, synthetic construct
  source 1..15: mol_type = other DNA
acccactctgtaatg

SEQ ID NO: 23486 - DNA, 15 bp, synthetic construct
  source 1..15: mol_type = other DNA
attacccactctgta

SEQ ID NO: 23487 - DNA, 15 bp, synthetic construct
  source 1..15: mol_type = other DNA
tattacccactctgt

SEQ ID NO: 23488 - DNA, 15 bp, synthetic construct
  source 1..15: mol_type = other DNA
cttattacccactct

SEQ ID NO: 23489 - DNA, 15 bp, synthetic construct
  source 1..15: mol_type = other DNA
gcttattacccactc

SEQ ID NO: 23490 - DNA, 15 bp, synthetic construct
  source 1..15: mol_type = other DNA
tgcttattacccact

SEQ ID NO: 23491 - DNA, 15 bp, synthetic construct
  source 1..15: mol_type = other DNA
ctgcttattacccac

SEQ ID NO: 23492 - DNA, 15 bp, synthetic construct
  source 1..15: mol_type = other DNA
tctgcttattaccca

SEQ ID NO: 23493 - DNA, 15 bp, synthetic construct
  source 1..15: mol_type = other DNA
atctgcttattaccc

SEQ ID NO: 23494 - DNA, 16 bp, synthetic construct
  source 1..16: mol_type = other DNA
cgcgggcagagagagg

SEQ ID NO: 23495 - DNA, 16 bp, synthetic construct
  source 1..16: mol_type = other DNA
acgcgggcagagagag

SEQ ID NO: 23496 - DNA, 16 bp, synthetic construct
  source 1..16: mol_type = other DNA
gacgcgggcagagaga

SEQ ID NO: 23497 - DNA, 16 bp, synthetic construct
  source 1..16: mol_type = other DNA
ggacgcgggcagagag

SEQ ID NO: 23498 - DNA, 16 bp, synthetic construct
  source 1..16: mol_type = other DNA
cggacgcgggcagaga

SEQ ID NO: 23499 - DNA, 16 bp, synthetic construct
  source 1..16: mol_type = other DNA
acggacgcgggcagag

SEQ ID NO: 23500 - DNA, 16 bp, synthetic construct
  source 1..16: mol_type = other DNA
gacggacgcgggcaga

SEQ ID NO: 23501 - DNA, 16 bp, synthetic construct
  source 1..16: mol_type = other DNA
ggacggacgcgggcag

SEQ ID NO: 23502 - DNA, 16 bp, synthetic construct
  source 1..16: mol_type = other DNA
cggacggacgcgggca

SEQ ID NO: 23503 - DNA, 16 bp, synthetic construct
  source 1..16: mol_type = other DNA
acggacggacgcgggc

SEQ ID NO: 23504 - DNA, 16 bp, synthetic construct
  source 1..16: mol_type = other DNA
cacggacggacgcggg

SEQ ID NO: 23505 - DNA, 16 bp, synthetic construct
  source 1..16: mol_type = other DNA
tcacggacggacgcgg

SEQ ID NO: 23506 - DNA, 16 bp, synthetic construct
  source 1..16: mol_type = other DNA
ttcacggacggacgcg

SEQ ID NO: 23507 - DNA, 16 bp, synthetic construct
  source 1..16: mol_type = other DNA
tttcacggacggacgc

SEQ ID NO: 23508 - DNA, 16 bp, synthetic construct
  source 1..16: mol_type = other DNA
atttcacggacggacg

SEQ ID NO: 23509 - DNA, 16 bp, synthetic construct
  source 1..16: mol_type = other DNA
ggaatttcacggacgg

SEQ ID NO: 23510 - DNA, 16 bp, synthetic construct
  source 1..16: mol_type = other DNA
ccggaatttcacggac

SEQ ID NO: 23511 - DNA, 16 bp, synthetic construct
  source 1..16: mol_type = other DNA
gccggaatttcacgga

SEQ ID NO: 23512 - DNA, 16 bp, synthetic construct
  source 1..16: mol_type = other DNA
ggccggaatttcacgg

SEQ ID NO: 23513 - DNA, 16 bp, synthetic construct
  source 1..16: mol_type = other DNA
cggccggaatttcacg

SEQ ID NO: 23514 - DNA, 16 bp, synthetic construct
  source 1..16: mol_type = other DNA
ccggccggaatttcac

SEQ ID NO: 23515 - DNA, 16 bp, synthetic construct
  source 1..16: mol_type = other DNA
cccggccggaatttca

SEQ ID NO: 23516 - DNA, 16 bp, synthetic construct
  source 1..16: mol_type = other DNA
ccccggccggaatttc

SEQ ID NO: 23517 - DNA, 16 bp, synthetic construct
  source 1..16: mol_type = other DNA
gccccggccggaattt

SEQ ID NO: 23518 - DNA, 16 bp, synthetic construct
  source 1..16: mol_type = other DNA
agccccggccggaatt

SEQ ID NO: 23519 - DNA, 16 bp, synthetic construct
  source 1..16: mol_type = other DNA
gagccccggccggaat

SEQ ID NO: 23520 - DNA, 16 bp, synthetic construct
  source 1..16: mol_type = other DNA
tgagccccggccggaa

SEQ ID NO: 23521 - DNA, 16 bp, synthetic construct
  source 1..16: mol_type = other DNA
atcgcggtgagccccg

SEQ ID NO: 23522 - DNA, 16 bp, synthetic construct
  source 1..16: mol_type = other DNA
catcgcggtgagcccc

SEQ ID NO: 23523 - DNA, 16 bp, synthetic construct
  source 1..16: mol_type = other DNA
ccatcgcggtgagccc

SEQ ID NO: 23524 - DNA, 16 bp, synthetic construct
  source 1..16: mol_type = other DNA
gccatcgcggtgagcc

SEQ ID NO: 23525 - DNA, 16 bp, synthetic construct
  source 1..16: mol_type = other DNA
ggccatcgcggtgagc

SEQ ID NO: 23526 - DNA, 16 bp, synthetic construct
  source 1..16: mol_type = other DNA
gggccatcgcggtgag

SEQ ID NO: 23527 - DNA, 16 bp, synthetic construct
  source 1..16: mol_type = other DNA
agggccatcgcggtga

SEQ ID NO: 23528 - DNA, 16 bp, synthetic construct
  source 1..16: mol_type = other DNA
gagggccatcgcggtg

SEQ ID NO: 23529 - DNA, 16 bp, synthetic construct
  source 1..16: mol_type = other DNA
ggagggccatcgcggt

SEQ ID NO: 23530 - DNA, 16 bp, synthetic construct
  source 1..16: mol_type = other DNA
gggagggccatcgcgg

SEQ ID NO: 23531 - DNA, 16 bp, synthetic construct
  source 1..16: mol_type = other DNA
cgggagggccatcgcg

SEQ ID NO: 23532 - DNA, 16 bp, synthetic construct
  source 1..16: mol_type = other DNA
tcgggagggccatcgc

SEQ ID NO: 23533 - DNA, 16 bp, synthetic construct
  source 1..16: mol_type = other DNA
gtcgggagggccatcg

SEQ ID NO: 23534 - DNA, 16 bp, synthetic construct
  source 1..16: mol_type = other DNA
tgtcgggagggccatc

SEQ ID NO: 23535 - DNA, 16 bp, synthetic construct
  source 1..16: mol_type = other DNA
gtgtcgggagggccat

SEQ ID NO: 23536 - DNA, 16 bp, synthetic construct
  source 1..16: mol_type = other DNA
agggtgtcgggagggc

SEQ ID NO: 23537 - DNA, 16 bp, synthetic construct
  source 1..16: mol_type = other DNA
gagggtgtcgggaggg

SEQ ID NO: 23538 - DNA, 16 bp, synthetic construct
  source 1..16: mol_type = other DNA
cgagggtgtcgggagg

SEQ ID NO: 23539 - DNA, 16 bp, synthetic construct
  source 1..16: mol_type = other DNA
ccgagggtgtcgggag

SEQ ID NO: 23540 - DNA, 16 bp, synthetic construct
  source 1..16: mol_type = other DNA
tccgagggtgtcggga

SEQ ID NO: 23541 - DNA, 16 bp, synthetic construct
  source 1..16: mol_type = other DNA
gtccgagggtgtcggg

SEQ ID NO: 23542 - DNA, 16 bp, synthetic construct
  source 1..16: mol_type = other DNA
tgtccgagggtgtcgg

SEQ ID NO: 23543 - DNA, 16 bp, synthetic construct
  source 1..16: mol_type = other DNA
ctgtccgagggtgtcg

SEQ ID NO: 23544 - DNA, 16 bp, synthetic construct
  source 1..16: mol_type = other DNA
gctgtccgagggtgtc

SEQ ID NO: 23545 - DNA, 16 bp, synthetic construct
  source 1..16: mol_type = other DNA
tgctgtccgagggtgt

SEQ ID NO: 23546 - DNA, 16 bp, synthetic construct
  source 1..16: mol_type = other DNA
gtgctgtccgagggtg

SEQ ID NO: 23547 - DNA, 16 bp, synthetic construct
  source 1..16: mol_type = other DNA
ggtgctgtccgagggt

SEQ ID NO: 23548 - DNA, 16 bp, synthetic construct
  source 1..16: mol_type = other DNA
gggtgctgtccgaggg

SEQ ID NO: 23549 - DNA, 16 bp, synthetic construct
  source 1..16: mol_type = other DNA
agggtgctgtccgagg

SEQ ID NO: 23550 - DNA, 16 bp, synthetic construct
  source 1..16: mol_type = other DNA
gagggtgctgtccgag

SEQ ID NO: 23551 - DNA, 16 bp, synthetic construct
  source 1..16: mol_type = other DNA
ggagggtgctgtccga

SEQ ID NO: 23552 - DNA, 16 bp, synthetic construct
  source 1..16: mol_type = other DNA
gggagggtgctgtccg

SEQ ID NO: 23553 - DNA, 16 bp, synthetic construct
  source 1..16: mol_type = other DNA
cggggagggtgctgtc

SEQ ID NO: 23554 - DNA, 16 bp, synthetic construct
  source 1..16: mol_type = other DNA
cgcggggagggtgctg

SEQ ID NO: 23555 - DNA, 16 bp, synthetic construct
  source 1..16: mol_type = other DNA
ttccgcggggagggtg

SEQ ID NO: 23556 - DNA, 16 bp, synthetic construct
  source 1..16: mol_type = other DNA
cttccgcggggagggt

SEQ ID NO: 23557 - DNA, 16 bp, synthetic construct
  source 1..16: mol_type = other DNA
cgggcttccgcgggga

SEQ ID NO: 23558 - DNA, 16 bp, synthetic construct
  source 1..16: mol_type = other DNA
cgtcgccgtcctcgtc

SEQ ID NO: 23559 - DNA, 16 bp, synthetic construct
  source 1..16: mol_type = other DNA
tccgtcgccgtcctcg

SEQ ID NO: 23560 - DNA, 16 bp, synthetic construct
  source 1..16: mol_type = other DNA
agtctccgtcgccgtc

SEQ ID NO: 23561 - DNA, 16 bp, synthetic construct
  source 1..16: mol_type = other DNA
gagtctccgtcgccgt

SEQ ID NO: 23562 - DNA, 16 bp, synthetic construct
  source 1..16: mol_type = other DNA
cgagtctccgtcgccg

SEQ ID NO: 23563 - DNA, 16 bp, synthetic construct
  source 1..16: mol_type = other DNA
acgagtctccgtcgcc

SEQ ID NO: 23564 - DNA, 16 bp, synthetic construct
  source 1..16: mol_type = other DNA
aacgagtctccgtcgc

SEQ ID NO: 23565 - DNA, 16 bp, synthetic construct
  source 1..16: mol_type = other DNA
aaacgagtctccgtcg

SEQ ID NO: 23566 - DNA, 16 bp, synthetic construct
  source 1..16: mol_type = other DNA
caaacgagtctccgtc

SEQ ID NO: 23567 - DNA, 16 bp, synthetic construct
  source 1..16: mol_type = other DNA
ccaaacgagtctccgt

SEQ ID NO: 23568 - DNA, 16 bp, synthetic construct
  source 1..16: mol_type = other DNA
aagcaggctcgcaggg

SEQ ID NO: 23569 - DNA, 16 bp, synthetic construct
  source 1..16: mol_type = other DNA
aaagcaggctcgcagg

SEQ ID NO: 23570 - DNA, 16 bp, synthetic construct
  source 1..16: mol_type = other DNA
caaagcaggctcgcag

SEQ ID NO: 23571 - DNA, 16 bp, synthetic construct
  source 1..16: mol_type = other DNA
tcaaagcaggctcgca

SEQ ID NO: 23572 - DNA, 16 bp, synthetic construct
  source 1..16: mol_type = other DNA
ctcaaagcaggctcgc

SEQ ID NO: 23573 - DNA, 16 bp, synthetic construct
  source 1..16: mol_type = other DNA
gctcaaagcaggctcg

SEQ ID NO: 23574 - DNA, 16 bp, synthetic construct
  source 1..16: mol_type = other DNA
cgctcaaagcaggctc

SEQ ID NO: 23575 - DNA, 16 bp, synthetic construct
  source 1..16: mol_type = other DNA
ccgctcaaagcaggct

SEQ ID NO: 23576 - DNA, 16 bp, synthetic construct
  source 1..16: mol_type = other DNA
tccgctcaaagcaggc

SEQ ID NO: 23577 - DNA, 16 bp, synthetic construct
  source 1..16: mol_type = other DNA
ttccgctcaaagcagg

SEQ ID NO: 23578 - DNA, 16 bp, synthetic construct
  source 1..16: mol_type = other DNA
gttccgctcaaagcag

SEQ ID NO: 23579 - DNA, 16 bp, synthetic construct
  source 1..16: mol_type = other DNA
ggttccgctcaaagca

SEQ ID NO: 23580 - DNA, 16 bp, synthetic construct
  source 1..16: mol_type = other DNA
gggttccgctcaaagc

SEQ ID NO: 23581 - DNA, 16 bp, synthetic construct
  source 1..16: mol_type = other DNA
cgggttccgctcaaag

SEQ ID NO: 23582 - DNA, 16 bp, synthetic construct
  source 1..16: mol_type = other DNA
acgggttccgctcaaa

SEQ ID NO: 23583 - DNA, 16 bp, synthetic construct
  source 1..16: mol_type = other DNA
tacgggttccgctcaa

SEQ ID NO: 23584 - DNA, 16 bp, synthetic construct
  source 1..16: mol_type = other DNA
gtacgggttccgctca

SEQ ID NO: 23585 - DNA, 16 bp, synthetic construct
  source 1..16: mol_type = other DNA
ggtacgggttccgctc

SEQ ID NO: 23586 - DNA, 16 bp, synthetic construct
  source 1..16: mol_type = other DNA
gggtacgggttccgct

SEQ ID NO: 23587 - DNA, 16 bp, synthetic construct
  source 1..16: mol_type = other DNA
cgggtacgggttccgc

SEQ ID NO: 23588 - DNA, 16 bp, synthetic construct
  source 1..16: mol_type = other DNA
ccgggtacgggttccg

SEQ ID NO: 23589 - DNA, 16 bp, synthetic construct
  source 1..16: mol_type = other DNA
cccgggtacgggttcc

SEQ ID NO: 23590 - DNA, 16 bp, synthetic construct
  source 1..16: mol_type = other DNA
gcccgggtacgggttc

SEQ ID NO: 23591 - DNA, 16 bp, synthetic construct
  source 1..16: mol_type = other DNA
tgcccgggtacgggtt

SEQ ID NO: 23592 - DNA, 16 bp, synthetic construct
  source 1..16: mol_type = other DNA
atgcccgggtacgggt

SEQ ID NO: 23593 - DNA, 16 bp, synthetic construct
  source 1..16: mol_type = other DNA
gatgcccgggtacggg

SEQ ID NO: 23594 - DNA, 16 bp, synthetic construct
  source 1..16: mol_type = other DNA
cgatgcccgggtacgg

SEQ ID NO: 23595 - DNA, 16 bp, synthetic construct
  source 1..16: mol_type = other DNA
gcgatgcccgggtacg

SEQ ID NO: 23596 - DNA, 16 bp, synthetic construct
  source 1..16: mol_type = other DNA
ggcgatgcccgggtac

SEQ ID NO: 23597 - DNA, 16 bp, synthetic construct
  source 1..16: mol_type = other DNA
tggcgatgcccgggta

SEQ ID NO: 23598 - DNA, 16 bp, synthetic construct
  source 1..16: mol_type = other DNA
ggccagccgttctctg

SEQ ID NO: 23599 - DNA, 16 bp, synthetic construct
  source 1..16: mol_type = other DNA
cgatggcctgggccag

SEQ ID NO: 23600 - DNA, 16 bp, synthetic construct
  source 1..16: mol_type = other DNA
atgccgatggcctggg

SEQ ID NO: 23601 - DNA, 16 bp, synthetic construct
  source 1..16: mol_type = other DNA
aatgccgatggcctgg

SEQ ID NO: 23602 - DNA, 16 bp, synthetic construct
  source 1..16: mol_type = other DNA
gaatgccgatggcctg

SEQ ID NO: 23603 - DNA, 16 bp, synthetic construct
  source 1..16: mol_type = other DNA
ggaatgccgatggcct

SEQ ID NO: 23604 - DNA, 16 bp, synthetic construct
  source 1..16: mol_type = other DNA
tctggaccctgggctc

SEQ ID NO: 23605 - DNA, 16 bp, synthetic construct
  source 1..16: mol_type = other DNA
atctggaccctgggct

SEQ ID NO: 23606 - DNA, 16 bp, synthetic construct
  source 1..16: mol_type = other DNA
aatctggaccctgggc

SEQ ID NO: 23607 - DNA, 16 bp, synthetic construct
  source 1..16: mol_type = other DNA
aaatctggaccctggg

SEQ ID NO: 23608 - DNA, 16 bp, synthetic construct
  source 1..16: mol_type = other DNA
caaatctggaccctgg

SEQ ID NO: 23609 - DNA, 16 bp, synthetic construct
  source 1..16: mol_type = other DNA
ccaaatctggaccctg

SEQ ID NO: 23610 - DNA, 16 bp, synthetic construct
  source 1..16: mol_type = other DNA
accaaatctggaccct

SEQ ID NO: 23611 - DNA, 16 bp, synthetic construct
  source 1..16: mol_type = other DNA
aaccaaatctggaccc

SEQ ID NO: 23612 - DNA, 16 bp, synthetic construct
  source 1..16: mol_type = other DNA
gacctctcattctgaa

SEQ ID NO: 23613 - DNA, 16 bp, synthetic construct
  source 1..16: mol_type = other DNA
tgacctctcattctga

SEQ ID NO: 23614 - DNA, 16 bp, synthetic construct
  source 1..16: mol_type = other DNA
gtgacctctcattctg

SEQ ID NO: 23615 - DNA, 16 bp, synthetic construct
  source 1..16: mol_type = other DNA
cgtgacctctcattct

SEQ ID NO: 23616 - DNA, 16 bp, synthetic construct
  source 1..16: mol_type = other DNA
gcgtgacctctcattc

SEQ ID NO: 23617 - DNA, 16 bp, synthetic construct
  source 1..16: mol_type = other DNA
ggcgtgacctctcatt

SEQ ID NO: 23618 - DNA, 16 bp, synthetic construct
  source 1..16: mol_type = other DNA
tggcgtgacctctcat

SEQ ID NO: 23619 - DNA, 16 bp, synthetic construct
  source 1..16: mol_type = other DNA
ctggcgtgacctctca

SEQ ID NO: 23620 - DNA, 16 bp, synthetic construct
  source 1..16: mol_type = other DNA
gctggcgtgacctctc

SEQ ID NO: 23621 - DNA, 16 bp, synthetic construct
  source 1..16: mol_type = other DNA
agctggcgtgacctct

SEQ ID NO: 23622 - DNA, 16 bp, synthetic construct
  source 1..16: mol_type = other DNA
cagctggcgtgacctc

SEQ ID NO: 23623 - DNA, 16 bp, synthetic construct
  source 1..16: mol_type = other DNA
tcagctggcgtgacct

SEQ ID NO: 23624 - DNA, 16 bp, synthetic construct
  source 1..16: mol_type = other DNA
ctcagctggcgtgacc

SEQ ID NO: 23625 - DNA, 16 bp, synthetic construct
  source 1..16: mol_type = other DNA
cctcagctggcgtgac

SEQ ID NO: 23626 - DNA, 16 bp, synthetic construct
  source 1..16: mol_type = other DNA
gcctcagctggcgtga

SEQ ID NO: 23627 - DNA, 16 bp, synthetic construct
  source 1..16: mol_type = other DNA
tgcctcagctggcgtg

SEQ ID NO: 23628 - DNA, 16 bp, synthetic construct
  source 1..16: mol_type = other DNA
cagggccgagattccc

SEQ ID NO: 23629 - DNA, 16 bp, synthetic construct
  source 1..16: mol_type = other DNA
ccagggccgagattcc

SEQ ID NO: 23630 - DNA, 16 bp, synthetic construct
  source 1..16: mol_type = other DNA
gccagggccgagattc

SEQ ID NO: 23631 - DNA, 16 bp, synthetic construct
  source 1..16: mol_type = other DNA
ggccagggccgagatt

SEQ ID NO: 23632 - DNA, 16 bp, synthetic construct
  source 1..16: mol_type = other DNA
gggccagggccgagat

SEQ ID NO: 23633 - DNA, 16 bp, synthetic construct
  source 1..16: mol_type = other DNA
ccgtctctctggccag

SEQ ID NO: 23634 - DNA, 16 bp, synthetic construct
  source 1..16: mol_type = other DNA
gaggcccgtctctctg

SEQ ID NO: 23635 - DNA, 16 bp, synthetic construct
  source 1..16: mol_type = other DNA
gactccgggaggcccg

SEQ ID NO: 23636 - DNA, 16 bp, synthetic construct
  source 1..16: mol_type = other DNA
tggactccgggaggcc

SEQ ID NO: 23637 - DNA, 16 bp, synthetic construct
  source 1..16: mol_type = other DNA
ctggactccgggaggc

SEQ ID NO: 23638 - DNA, 16 bp, synthetic construct
  source 1..16: mol_type = other DNA
cctggactccgggagg

SEQ ID NO: 23639 - DNA, 16 bp, synthetic construct
  source 1..16: mol_type = other DNA
tcctggactccgggag

SEQ ID NO: 23640 - DNA, 16 bp, synthetic construct
  source 1..16: mol_type = other DNA
atcctggactccggga

SEQ ID NO: 23641 - DNA, 16 bp, synthetic construct
  source 1..16: mol_type = other DNA
aatcctggactccggg

SEQ ID NO: 23642 - DNA, 16 bp, synthetic construct
  source 1..16: mol_type = other DNA
gaatcctggactccgg

SEQ ID NO: 23643 - DNA, 16 bp, synthetic construct
  source 1..16: mol_type = other DNA
tgaatcctggactccg

SEQ ID NO: 23644 - DNA, 16 bp, synthetic construct
  source 1..16: mol_type = other DNA
ctgaatcctggactcc

SEQ ID NO: 23645 - DNA, 16 bp, synthetic construct
  source 1..16: mol_type = other DNA
tctgaatcctggactc

SEQ ID NO: 23646 - DNA, 16 bp, synthetic construct
  source 1..16: mol_type = other DNA
atctgaatcctggact

SEQ ID NO: 23647 - DNA, 16 bp, synthetic construct
  source 1..16: mol_type = other DNA
gatctgaatcctggac

SEQ ID NO: 23648 - DNA, 16 bp, synthetic construct
  source 1..16: mol_type = other DNA
agatctgaatcctgga

SEQ ID NO: 23649 - DNA, 16 bp, synthetic construct
  source 1..16: mol_type = other DNA
cagatctgaatcctgg

SEQ ID NO: 23650 - DNA, 16 bp, synthetic construct
  source 1..16: mol_type = other DNA
ccagatctgaatcctg

SEQ ID NO: 23651 - DNA, 16 bp, synthetic construct
  source 1..16: mol_type = other DNA
accagatctgaatcct

SEQ ID NO: 23652 - DNA, 16 bp, synthetic construct
  source 1..16: mol_type = other DNA
cccttcgattctgaaa

SEQ ID NO: 23653 - DNA, 16 bp, synthetic construct
  source 1..16: mol_type = other DNA
gcccttcgattctgaa

SEQ ID NO: 23654 - DNA, 16 bp, synthetic construct
  source 1..16: mol_type = other DNA
ggcccttcgattctga

SEQ ID NO: 23655 - DNA, 16 bp, synthetic construct
  source 1..16: mol_type = other DNA
tggcccttcgattctg

SEQ ID NO: 23656 - DNA, 16 bp, synthetic construct
  source 1..16: mol_type = other DNA
ctggcccttcgattct

SEQ ID NO: 23657 - DNA, 16 bp, synthetic construct
  source 1..16: mol_type = other DNA
cctggcccttcgattc

SEQ ID NO: 23658 - DNA, 16 bp, synthetic construct
  source 1..16: mol_type = other DNA
gcctggcccttcgatt

SEQ ID NO: 23659 - DNA, 16 bp, synthetic construct
  source 1..16: mol_type = other DNA
tgcctggcccttcgat

SEQ ID NO: 23660 - DNA, 16 bp, synthetic construct
  source 1..16: mol_type = other DNA
gctggggaggtggagc

SEQ ID NO: 23661 - DNA, 16 bp, synthetic construct
  source 1..16: mol_type = other DNA
ggctggggaggtggag

SEQ ID NO: 23662 - DNA, 16 bp, synthetic construct
  source 1..16: mol_type = other DNA
gggctggggaggtgga

SEQ ID NO: 23663 - DNA, 16 bp, synthetic construct
  source 1..16: mol_type = other DNA
cgggctggggaggtgg

SEQ ID NO: 23664 - DNA, 16 bp, synthetic construct
  source 1..16: mol_type = other DNA
cggaggcgtccggggg

SEQ ID NO: 23665 - DNA, 16 bp, synthetic construct
  source 1..16: mol_type = other DNA
aggcggaggcgtccgg

SEQ ID NO: 23666 - DNA, 16 bp, synthetic construct
  source 1..16: mol_type = other DNA
gaggcggaggcgtccg

SEQ ID NO: 23667 - DNA, 16 bp, synthetic construct
  source 1..16: mol_type = other DNA
cggaggcggaggcgtc

SEQ ID NO: 23668 - DNA, 16 bp, synthetic construct
  source 1..16: mol_type = other DNA
gcggaggcggaggcgt

SEQ ID NO: 23669 - DNA, 16 bp, synthetic construct
  source 1..16: mol_type = other DNA
cgcggaggcggaggcg

SEQ ID NO: 23670 - DNA, 16 bp, synthetic construct
  source 1..16: mol_type = other DNA
cgcgcggaggcggagg

SEQ ID NO: 23671 - DNA, 16 bp, synthetic construct
  source 1..16: mol_type = other DNA
ccgcgcggaggcggag

SEQ ID NO: 23672 - DNA, 16 bp, synthetic construct
  source 1..16: mol_type = other DNA
tgccgcgcggaggcgg

SEQ ID NO: 23673 - DNA, 16 bp, synthetic construct
  source 1..16: mol_type = other DNA
ctgccgcgcggaggcg

SEQ ID NO: 23674 - DNA, 16 bp, synthetic construct
  source 1..16: mol_type = other DNA
ttgcatctgcccctgc

SEQ ID NO: 23675 - DNA, 16 bp, synthetic construct
  source 1..16: mol_type = other DNA
cttgcatctgcccctg

SEQ ID NO: 23676 - DNA, 16 bp, synthetic construct
  source 1..16: mol_type = other DNA
tgccttgcatctgccc

SEQ ID NO: 23677 - DNA, 16 bp, synthetic construct
  source 1..16: mol_type = other DNA
atgccttgcatctgcc

SEQ ID NO: 23678 - DNA, 16 bp, synthetic construct
  source 1..16: mol_type = other DNA
gatgccttgcatctgc

SEQ ID NO: 23679 - DNA, 16 bp, synthetic construct
  source 1..16: mol_type = other DNA
ggatgccttgcatctg

SEQ ID NO: 23680 - DNA, 16 bp, synthetic construct
  source 1..16: mol_type = other DNA
gggatgccttgcatct

SEQ ID NO: 23681 - DNA, 16 bp, synthetic construct
  source 1..16: mol_type = other DNA
cgggatgccttgcatc

SEQ ID NO: 23682 - DNA, 16 bp, synthetic construct
  source 1..16: mol_type = other DNA
ccgggatgccttgcat

SEQ ID NO: 23683 - DNA, 16 bp, synthetic construct
  source 1..16: mol_type = other DNA
gccgggatgccttgca

SEQ ID NO: 23684 - DNA, 16 bp, synthetic construct
  source 1..16: mol_type = other DNA
cgccgggatgccttgc

SEQ ID NO: 23685 - DNA, 16 bp, synthetic construct
  source 1..16: mol_type = other DNA
gcgccgggatgccttg

SEQ ID NO: 23686 - DNA, 16 bp, synthetic construct
  source 1..16: mol_type = other DNA
gagggcgccgggatgc

SEQ ID NO: 23687 - DNA, 16 bp, synthetic construct
  source 1..16: mol_type = other DNA
ggagggcgccgggatg

SEQ ID NO: 23688 - DNA, 16 bp, synthetic construct
  source 1..16: mol_type = other DNA
ggagcgcctgggaggg

SEQ ID NO: 23689 - DNA, 16 bp, synthetic construct
  source 1..16: mol_type = other DNA
tggagcgcctgggagg

SEQ ID NO: 23690 - DNA, 16 bp, synthetic construct
  source 1..16: mol_type = other DNA
ctggagcgcctgggag

SEQ ID NO: 23691 - DNA, 16 bp, synthetic construct
  source 1..16: mol_type = other DNA
cctggagcgcctggga

SEQ ID NO: 23692 - DNA, 16 bp, synthetic construct
  source 1..16: mol_type = other DNA
tcctggagcgcctggg

SEQ ID NO: 23693 - DNA, 16 bp, synthetic construct
  source 1..16: mol_type = other DNA
ctcctggagcgcctgg

SEQ ID NO: 23694 - DNA, 16 bp, synthetic construct
  source 1..16: mol_type = other DNA
cggggcctccgtttct

SEQ ID NO: 23695 - DNA, 16 bp, synthetic construct
  source 1..16: mol_type = other DNA
ttccgaggcctccagc

SEQ ID NO: 23696 - DNA, 16 bp, synthetic construct
  source 1..16: mol_type = other DNA
cttccgaggcctccag

SEQ ID NO: 23697 - DNA, 16 bp, synthetic construct
  source 1..16: mol_type = other DNA
tcttccgaggcctcca

SEQ ID NO: 23698 - DNA, 16 bp, synthetic construct
  source 1..16: mol_type = other DNA
ctcttccgaggcctcc

SEQ ID NO: 23699 - DNA, 16 bp, synthetic construct
  source 1..16: mol_type = other DNA
cctcttccgaggcctc

SEQ ID NO: 23700 - DNA, 16 bp, synthetic construct
  source 1..16: mol_type = other DNA
cggcctcttccgaggc

SEQ ID NO: 23701 - DNA, 16 bp, synthetic construct
  source 1..16: mol_type = other DNA
gcggcctcttccgagg

SEQ ID NO: 23702 - DNA, 16 bp, synthetic construct
  source 1..16: mol_type = other DNA
ggcggcctcttccgag

SEQ ID NO: 23703 - DNA, 16 bp, synthetic construct
  source 1..16: mol_type = other DNA
aggcggcctcttccga

SEQ ID NO: 23704 - DNA, 16 bp, synthetic construct
  source 1..16: mol_type = other DNA
gaggcggcctcttccg

SEQ ID NO: 23705 - DNA, 16 bp, synthetic construct
  source 1..16: mol_type = other DNA
cgaggcggcctcttcc

SEQ ID NO: 23706 - DNA, 16 bp, synthetic construct
  source 1..16: mol_type = other DNA
agcgaggcggcctctt

SEQ ID NO: 23707 - DNA, 16 bp, synthetic construct
  source 1..16: mol_type = other DNA
cagcgaggcggcctct

SEQ ID NO: 23708 - DNA, 16 bp, synthetic construct
  source 1..16: mol_type = other DNA
ttccagcgaggcggcc

SEQ ID NO: 23709 - DNA, 16 bp, synthetic construct
  source 1..16: mol_type = other DNA
cttccagcgaggcggc

SEQ ID NO: 23710 - DNA, 16 bp, synthetic construct
  source 1..16: mol_type = other DNA
gcttccagcgaggcgg

SEQ ID NO: 23711 - DNA, 16 bp, synthetic construct
  source 1..16: mol_type = other DNA
tgcttccagcgaggcg

SEQ ID NO: 23712 - DNA, 16 bp, synthetic construct
  source 1..16: mol_type = other DNA
gtgcttccagcgaggc

SEQ ID NO: 23713 - DNA, 16 bp, synthetic construct
  source 1..16: mol_type = other DNA
ggtgcttccagcgagg

SEQ ID NO: 23714 - DNA, 16 bp, synthetic construct
  source 1..16: mol_type = other DNA
gggtgcttccagcgag

SEQ ID NO: 23715 - DNA, 16 bp, synthetic construct
  source 1..16: mol_type = other DNA
ggggtgcttccagcga

SEQ ID NO: 23716 - DNA, 16 bp, synthetic construct
  source 1..16: mol_type = other DNA
aggggtgcttccagcg

SEQ ID NO: 23717 - DNA, 16 bp, synthetic construct
  source 1..16: mol_type = other DNA
gaggggtgcttccagc

SEQ ID NO: 23718 - DNA, 16 bp, synthetic construct
  source 1..16: mol_type = other DNA
tgaggggtgcttccag

SEQ ID NO: 23719 - DNA, 16 bp, synthetic construct
  source 1..16: mol_type = other DNA
ctgaggggtgcttcca

SEQ ID NO: 23720 - DNA, 16 bp, synthetic construct
  source 1..16: mol_type = other DNA
gctgaggggtgcttcc

SEQ ID NO: 23721 - DNA, 16 bp, synthetic construct
  source 1..16: mol_type = other DNA
cgctgaggggtgcttc

SEQ ID NO: 23722 - DNA, 16 bp, synthetic construct
  source 1..16: mol_type = other DNA
tcgctgaggggtgctt

SEQ ID NO: 23723 - DNA, 16 bp, synthetic construct
  source 1..16: mol_type = other DNA
ctcgctgaggggtgct

SEQ ID NO: 23724 - DNA, 16 bp, synthetic construct
  source 1..16: mol_type = other DNA
cctcgctgaggggtgc

SEQ ID NO: 23725 - DNA, 16 bp, synthetic construct
  source 1..16: mol_type = other DNA
tcctcgctgaggggtg

SEQ ID NO: 23726 - DNA, 16 bp, synthetic construct
  source 1..16: mol_type = other DNA
ttcctcgctgaggggt

SEQ ID NO: 23727 - DNA, 16 bp, synthetic construct
  source 1..16: mol_type = other DNA
cttcctcgctgagggg

SEQ ID NO: 23728 - DNA, 16 bp, synthetic construct
  source 1..16: mol_type = other DNA
tcttcctcgctgaggg

SEQ ID NO: 23729 - DNA, 16 bp, synthetic construct
  source 1..16: mol_type = other DNA
ttcttcctcgctgagg

SEQ ID NO: 23730 - DNA, 16 bp, synthetic construct
  source 1..16: mol_type = other DNA
attcttcctcgctgag

SEQ ID NO: 23731 - DNA, 16 bp, synthetic construct
  source 1..16: mol_type = other DNA
tattcttcctcgctga

SEQ ID NO: 23732 - DNA, 16 bp, synthetic construct
  source 1..16: mol_type = other DNA
gtattcttcctcgctg

SEQ ID NO: 23733 - DNA, 16 bp, synthetic construct
  source 1..16: mol_type = other DNA
ggtattcttcctcgct

SEQ ID NO: 23734 - DNA, 16 bp, synthetic construct
  source 1..16: mol_type = other DNA
cggtattcttcctcgc

SEQ ID NO: 23735 - DNA, 16 bp, synthetic construct
  source 1..16: mol_type = other DNA
ccggtattcttcctcg

SEQ ID NO: 23736 - DNA, 16 bp, synthetic construct
  source 1..16: mol_type = other DNA
cccggtattcttcctc

SEQ ID NO: 23737 - DNA, 16 bp, synthetic construct
  source 1..16: mol_type = other DNA
gcccggtattcttcct

SEQ ID NO: 23738 - DNA, 16 bp, synthetic construct
  source 1..16: mol_type = other DNA
agcccggtattcttcc

SEQ ID NO: 23739 - DNA, 16 bp, synthetic construct
  source 1..16: mol_type = other DNA
gagcccggtattcttc

SEQ ID NO: 23740 - DNA, 16 bp, synthetic construct
  source 1..16: mol_type = other DNA
agagcccggtattctt

SEQ ID NO: 23741 - DNA, 16 bp, synthetic construct
  source 1..16: mol_type = other DNA
cagagcccggtattct

SEQ ID NO: 23742 - DNA, 16 bp, synthetic construct
  source 1..16: mol_type = other DNA
gcagagcccggtattc

SEQ ID NO: 23743 - DNA, 16 bp, synthetic construct
  source 1..16: mol_type = other DNA
agcagagcccggtatt

SEQ ID NO: 23744 - DNA, 16 bp, synthetic construct
  source 1..16: mol_type = other DNA
cagcagagcccggtat

SEQ ID NO: 23745 - DNA, 16 bp, synthetic construct
  source 1..16: mol_type = other DNA
ccagcagagcccggta

SEQ ID NO: 23746 - DNA, 16 bp, synthetic construct
  source 1..16: mol_type = other DNA
ctccagcagagcccgg

SEQ ID NO: 23747 - DNA, 16 bp, synthetic construct
  source 1..16: mol_type = other DNA
agctcctccagcagag

SEQ ID NO: 23748 - DNA, 16 bp, synthetic construct
  source 1..16: mol_type = other DNA
aagctcctccagcaga

SEQ ID NO: 23749 - DNA, 16 bp, synthetic construct
  source 1..16: mol_type = other DNA
aaagctcctccagcag

SEQ ID NO: 23750 - DNA, 16 bp, synthetic construct
  source 1..16: mol_type = other DNA
taaagctcctccagca

SEQ ID NO: 23751 - DNA, 16 bp, synthetic construct
  source 1..16: mol_type = other DNA
ctaaagctcctccagc

SEQ ID NO: 23752 - DNA, 16 bp, synthetic construct
  source 1..16: mol_type = other DNA
cctaaagctcctccag

SEQ ID NO: 23753 - DNA, 16 bp, synthetic construct
  source 1..16: mol_type = other DNA
tcctaaagctcctcca

SEQ ID NO: 23754 - DNA, 16 bp, synthetic construct
  source 1..16: mol_type = other DNA
gtcctaaagctcctcc

SEQ ID NO: 23755 - DNA, 16 bp, synthetic construct
  source 1..16: mol_type = other DNA
cgtcctaaagctcctc

SEQ ID NO: 23756 - DNA, 16 bp, synthetic construct
  source 1..16: mol_type = other DNA
gcgtcctaaagctcct

SEQ ID NO: 23757 - DNA, 16 bp, synthetic construct
  source 1..16: mol_type = other DNA
cgcgtcctaaagctcc

SEQ ID NO: 23758 - DNA, 16 bp, synthetic construct
  source 1..16: mol_type = other DNA
ccgcgtcctaaagctc

SEQ ID NO: 23759 - DNA, 16 bp, synthetic construct
  source 1..16: mol_type = other DNA
cccgcgtcctaaagct

SEQ ID NO: 23760 - DNA, 16 bp, synthetic construct
  source 1..16: mol_type = other DNA
ccccgcgtcctaaagc

SEQ ID NO: 23761 - DNA, 16 bp, synthetic construct
  source 1..16: mol_type = other DNA
accccgcgtcctaaag

SEQ ID NO: 23762 - DNA, 16 bp, synthetic construct
  source 1..16: mol_type = other DNA
aaccccgcgtcctaaa

SEQ ID NO: 23763 - DNA, 16 bp, synthetic construct
  source 1..16: mol_type = other DNA
caaccccgcgtcctaa

SEQ ID NO: 23764 - DNA, 16 bp, synthetic construct
  source 1..16: mol_type = other DNA
ccaaccccgcgtccta

SEQ ID NO: 23765 - DNA, 16 bp, synthetic construct
  source 1..16: mol_type = other DNA
cgtcccaaccccgcgt

SEQ ID NO: 23766 - DNA, 16 bp, synthetic construct
  source 1..16: mol_type = other DNA
gccccgaaccacccga

SEQ ID NO: 23767 - DNA, 16 bp, synthetic construct
  source 1..16: mol_type = other DNA
tgccccgaaccacccg

SEQ ID NO: 23768 - DNA, 16 bp, synthetic construct
  source 1..16: mol_type = other DNA
ctgccccgaaccaccc

SEQ ID NO: 23769 - DNA, 16 bp, synthetic construct
  source 1..16: mol_type = other DNA
cctgccccgaaccacc

SEQ ID NO: 23770 - DNA, 16 bp, synthetic construct
  source 1..16: mol_type = other DNA
ccctgccccgaaccac

SEQ ID NO: 23771 - DNA, 16 bp, synthetic construct
  source 1..16: mol_type = other DNA
aagagaggccaccgcc

SEQ ID NO: 23772 - DNA, 16 bp, synthetic construct
  source 1..16: mol_type = other DNA
aaagagaggccaccgc

SEQ ID NO: 23773 - DNA, 16 bp, synthetic construct
  source 1..16: mol_type = other DNA
gaaagagaggccaccg

SEQ ID NO: 23774 - DNA, 16 bp, synthetic construct
  source 1..16: mol_type = other DNA
cgaaagagaggccacc

SEQ ID NO: 23775 - DNA, 16 bp, synthetic construct
  source 1..16: mol_type = other DNA
gcgaaagagaggccac

SEQ ID NO: 23776 - DNA, 16 bp, synthetic construct
  source 1..16: mol_type = other DNA
cgcgaaagagaggcca

SEQ ID NO: 23777 - DNA, 16 bp, synthetic construct
  source 1..16: mol_type = other DNA
ccgcgaaagagaggcc

SEQ ID NO: 23778 - DNA, 16 bp, synthetic construct
  source 1..16: mol_type = other DNA
cccgcgaaagagaggc

SEQ ID NO: 23779 - DNA, 16 bp, synthetic construct
  source 1..16: mol_type = other DNA
ccccgcgaaagagagg

SEQ ID NO: 23780 - DNA, 16 bp, synthetic construct
  source 1..16: mol_type = other DNA
tccccgcgaaagagag

SEQ ID NO: 23781 - DNA, 16 bp, synthetic construct
  source 1..16: mol_type = other DNA
ttccccgcgaaagaga

SEQ ID NO: 23782 - DNA, 16 bp, synthetic construct
  source 1..16: mol_type = other DNA
gttccccgcgaaagag

SEQ ID NO: 23783 - DNA, 16 bp, synthetic construct
  source 1..16: mol_type = other DNA
tgttccccgcgaaaga

SEQ ID NO: 23784 - DNA, 16 bp, synthetic construct
  source 1..16: mol_type = other DNA
gtgttccccgcgaaag

SEQ ID NO: 23785 - DNA, 16 bp, synthetic construct
  source 1..16: mol_type = other DNA
ggtgttccccgcgaaa

SEQ ID NO: 23786 - DNA, 16 bp, synthetic construct
  source 1..16: mol_type = other DNA
aggtgttccccgcgaa

SEQ ID NO: 23787 - DNA, 16 bp, synthetic construct
  source 1..16: mol_type = other DNA
caggtgttccccgcga

SEQ ID NO: 23788 - DNA, 16 bp, synthetic construct
  source 1..16: mol_type = other DNA
agccagccaggtgttc

SEQ ID NO: 23789 - DNA, 16 bp, synthetic construct
  source 1..16: mol_type = other DNA
tagccagccaggtgtt

SEQ ID NO: 23790 - DNA, 16 bp, synthetic construct
  source 1..16: mol_type = other DNA
gtagccagccaggtgt

SEQ ID NO: 23791 - DNA, 16 bp, synthetic construct
  source 1..16: mol_type = other DNA
cgtagccagccaggtg

SEQ ID NO: 23792 - DNA, 16 bp, synthetic construct
  source 1..16: mol_type = other DNA
tccgtagccagccagg

SEQ ID NO: 23793 - DNA, 16 bp, synthetic construct
  source 1..16: mol_type = other DNA
ctccgtagccagccag

SEQ ID NO: 23794 - DNA, 16 bp, synthetic construct
  source 1..16: mol_type = other DNA
acacgcccctccgtag

SEQ ID NO: 23795 - DNA, 16 bp, synthetic construct
  source 1..16: mol_type = other DNA
gacacgcccctccgta

SEQ ID NO: 23796 - DNA, 16 bp, synthetic construct
  source 1..16: mol_type = other DNA
agacacgcccctccgt

SEQ ID NO: 23797 - DNA, 16 bp, synthetic construct
  source 1..16: mol_type = other DNA
gagacacgcccctccg

SEQ ID NO: 23798 - DNA, 16 bp, synthetic construct
  source 1..16: mol_type = other DNA
ggagacacgcccctcc

SEQ ID NO: 23799 - DNA, 16 bp, synthetic construct
  source 1..16: mol_type = other DNA
cggagacacgcccctc

SEQ ID NO: 23800 - DNA, 16 bp, synthetic construct
  source 1..16: mol_type = other DNA
gcggagacacgcccct

SEQ ID NO: 23801 - DNA, 16 bp, synthetic construct
  source 1..16: mol_type = other DNA
ggcggagacacgcccc

SEQ ID NO: 23802 - DNA, 16 bp, synthetic construct
  source 1..16: mol_type = other DNA
gggcggagacacgccc

SEQ ID NO: 23803 - DNA, 16 bp, synthetic construct
  source 1..16: mol_type = other DNA
ggggcggagacacgcc

SEQ ID NO: 23804 - DNA, 16 bp, synthetic construct
  source 1..16: mol_type = other DNA
tcagcccggtggaggg

SEQ ID NO: 23805 - DNA, 16 bp, synthetic construct
  source 1..16: mol_type = other DNA
gtcagcccggtggagg

SEQ ID NO: 23806 - DNA, 16 bp, synthetic construct
  source 1..16: mol_type = other DNA
ggtcagcccggtggag

SEQ ID NO: 23807 - DNA, 16 bp, synthetic construct
  source 1..16: mol_type = other DNA
cggtcagcccggtgga

SEQ ID NO: 23808 - DNA, 16 bp, synthetic construct
  source 1..16: mol_type = other DNA
atcccaggccggtcag

SEQ ID NO: 23809 - DNA, 16 bp, synthetic construct
  source 1..16: mol_type = other DNA
aatcccaggccggtca

SEQ ID NO: 23810 - DNA, 16 bp, synthetic construct
  source 1..16: mol_type = other DNA
gaatcccaggccggtc

SEQ ID NO: 23811 - DNA, 16 bp, synthetic construct
  source 1..16: mol_type = other DNA
ggaatcccaggccggt

SEQ ID NO: 23812 - DNA, 16 bp, synthetic construct
  source 1..16: mol_type = other DNA
aggaatcccaggccgg

SEQ ID NO: 23813 - DNA, 16 bp, synthetic construct
  source 1..16: mol_type = other DNA
caggaatcccaggccg

SEQ ID NO: 23814 - DNA, 16 bp, synthetic construct
  source 1..16: mol_type = other DNA
gcaggaatcccaggcc

SEQ ID NO: 23815 - DNA, 16 bp, synthetic construct
  source 1..16: mol_type = other DNA
ggcaggaatcccaggc

SEQ ID NO: 23816 - DNA, 16 bp, synthetic construct
  source 1..16: mol_type = other DNA
aggcaggaatcccagg

SEQ ID NO: 23817 - DNA, 16 bp, synthetic construct
  source 1..16: mol_type = other DNA
aaggcaggaatcccag

SEQ ID NO: 23818 - DNA, 16 bp, synthetic construct
  source 1..16: mol_type = other DNA
gaaggcaggaatccca

SEQ ID NO: 23819 - DNA, 16 bp, synthetic construct
  source 1..16: mol_type = other DNA
agaaggcaggaatccc

SEQ ID NO: 23820 - DNA, 16 bp, synthetic construct
  source 1..16: mol_type = other DNA
tagaaggcaggaatcc

SEQ ID NO: 23821 - DNA, 16 bp, synthetic construct
  source 1..16: mol_type = other DNA
cctagaaggcaggaat

SEQ ID NO: 23822 - DNA, 16 bp, synthetic construct
  source 1..16: mol_type = other DNA
acctagaaggcaggaa

SEQ ID NO: 23823 - DNA, 16 bp, synthetic construct
  source 1..16: mol_type = other DNA
gacctagaaggcagga

SEQ ID NO: 23824 - DNA, 16 bp, synthetic construct
  source 1..16: mol_type = other DNA
agacctagaaggcagg

SEQ ID NO: 23825 - DNA, 16 bp, synthetic construct
  source 1..16: mol_type = other DNA
gagtctctcaccgggc

SEQ ID NO: 23826 - DNA, 16 bp, synthetic construct
  source 1..16: mol_type = other DNA
ggagtctctcaccggg

SEQ ID NO: 23827 - DNA, 16 bp, synthetic construct
  source 1..16: mol_type = other DNA
tggagtctctcaccgg

SEQ ID NO: 23828 - DNA, 16 bp, synthetic construct
  source 1..16: mol_type = other DNA
gtggagtctctcaccg

SEQ ID NO: 23829 - DNA, 16 bp, synthetic construct
  source 1..16: mol_type = other DNA
gatgcccaggaaagaa

SEQ ID NO: 23830 - DNA, 16 bp, synthetic construct
  source 1..16: mol_type = other DNA
ggatgcccaggaaaga

SEQ ID NO: 23831 - DNA, 16 bp, synthetic construct
  source 1..16: mol_type = other DNA
gggatgcccaggaaag

SEQ ID NO: 23832 - DNA, 16 bp, synthetic construct
  source 1..16: mol_type = other DNA
cgggatgcccaggaaa

SEQ ID NO: 23833 - DNA, 16 bp, synthetic construct
  source 1..16: mol_type = other DNA
ccgggatgcccaggaa

SEQ ID NO: 23834 - DNA, 16 bp, synthetic construct
  source 1..16: mol_type = other DNA
cccgggatgcccagga

SEQ ID NO: 23835 - DNA, 16 bp, synthetic construct
  source 1..16: mol_type = other DNA
gggatccccgggatgc

SEQ ID NO: 23836 - DNA, 16 bp, synthetic construct
  source 1..16: mol_type = other DNA
tgggatccccgggatg

SEQ ID NO: 23837 - DNA, 16 bp, synthetic construct
  source 1..16: mol_type = other DNA
ctgggatccccgggat

SEQ ID NO: 23838 - DNA, 16 bp, synthetic construct
  source 1..16: mol_type = other DNA
tctgggatccccggga

SEQ ID NO: 23839 - DNA, 16 bp, synthetic construct
  source 1..16: mol_type = other DNA
ctctgggatccccggg

SEQ ID NO: 23840 - DNA, 16 bp, synthetic construct
  source 1..16: mol_type = other DNA
ctggtacctgggccgg

SEQ ID NO: 23841 - DNA, 16 bp, synthetic construct
  source 1..16: mol_type = other DNA
gctggtacctgggccg

SEQ ID NO: 23842 - DNA, 16 bp, synthetic construct
  source 1..16: mol_type = other DNA
tgctggtacctgggcc

SEQ ID NO: 23843 - DNA, 16 bp, synthetic construct
  source 1..16: mol_type = other DNA
ctgctggtacctgggc

SEQ ID NO: 23844 - DNA, 16 bp, synthetic construct
  source 1..16: mol_type = other DNA
tgggaggctgcagggg

SEQ ID NO: 23845 - DNA, 16 bp, synthetic construct
  source 1..16: mol_type = other DNA
ctgggaggctgcaggg

SEQ ID NO: 23846 - DNA, 16 bp, synthetic construct
  source 1..16: mol_type = other DNA
gctgggaggctgcagg

SEQ ID NO: 23847 - DNA, 16 bp, synthetic construct
  source 1..16: mol_type = other DNA
agctgggaggctgcag

SEQ ID NO: 23848 - DNA, 16 bp, synthetic construct
  source 1..16: mol_type = other DNA
cagctgggaggctgca

SEQ ID NO: 23849 - DNA, 16 bp, synthetic construct
  source 1..16: mol_type = other DNA
ggcagctgggaggctg

SEQ ID NO: 23850 - DNA, 16 bp, synthetic construct
  source 1..16: mol_type = other DNA
tggcagctgggaggct

SEQ ID NO: 23851 - DNA, 16 bp, synthetic construct
  source 1..16: mol_type = other DNA
ctggcagctgggaggc

SEQ ID NO: 23852 - DNA, 16 bp, synthetic construct
  source 1..16: mol_type = other DNA
gctggcagctgggagg

SEQ ID NO: 23853 - DNA, 16 bp, synthetic construct
  source 1..16: mol_type = other DNA
gcttttgaccgccagg

SEQ ID NO: 23854 - DNA, 16 bp, synthetic construct
  source 1..16: mol_type = other DNA
tgcttttgaccgccag

SEQ ID NO: 23855 - DNA, 16 bp, synthetic construct
  source 1..16: mol_type = other DNA
atgcttttgaccgcca

SEQ ID NO: 23856 - DNA, 16 bp, synthetic construct
  source 1..16: mol_type = other DNA
tatgcttttgaccgcc

SEQ ID NO: 23857 - DNA, 16 bp, synthetic construct
  source 1..16: mol_type = other DNA
gtatgcttttgaccgc

SEQ ID NO: 23858 - DNA, 16 bp, synthetic construct
  source 1..16: mol_type = other DNA
ggtatgcttttgaccg

SEQ ID NO: 23859 - DNA, 16 bp, synthetic construct
  source 1..16: mol_type = other DNA
aggtatgcttttgacc

SEQ ID NO: 23860 - DNA, 16 bp, synthetic construct
  source 1..16: mol_type = other DNA
gaggtatgcttttgac

SEQ ID NO: 23861 - DNA, 16 bp, synthetic construct
  source 1..16: mol_type = other DNA
acagaggtatgctttt

SEQ ID NO: 23862 - DNA, 16 bp, synthetic construct
  source 1..16: mol_type = other DNA
gacagaggtatgcttt

SEQ ID NO: 23863 - DNA, 16 bp, synthetic construct
  source 1..16: mol_type = other DNA
agacagaggtatgctt

SEQ ID NO: 23864 - DNA, 16 bp, synthetic construct
  source 1..16: mol_type = other DNA
cagacagaggtatgct

SEQ ID NO: 23865 - DNA, 16 bp, synthetic construct
  source 1..16: mol_type = other DNA
acagacagaggtatgc

SEQ ID NO: 23866 - DNA, 16 bp, synthetic construct
  source 1..16: mol_type = other DNA
cgggcaaagacagaca

SEQ ID NO: 23867 - DNA, 16 bp, synthetic construct
  source 1..16: mol_type = other DNA
gcgggcaaagacagac

SEQ ID NO: 23868 - DNA, 16 bp, synthetic construct
  source 1..16: mol_type = other DNA
agcgggcaaagacaga

SEQ ID NO: 23869 - DNA, 16 bp, synthetic construct
  source 1..16: mol_type = other DNA
gaagcgggcaaagaca

SEQ ID NO: 23870 - DNA, 16 bp, synthetic construct
  source 1..16: mol_type = other DNA
ggaagcgggcaaagac

SEQ ID NO: 23871 - DNA, 16 bp, synthetic construct
  source 1..16: mol_type = other DNA
aggaagcgggcaaaga

SEQ ID NO: 23872 - DNA, 16 bp, synthetic construct
  source 1..16: mol_type = other DNA
caggaagcgggcaaag

SEQ ID NO: 23873 - DNA, 16 bp, synthetic construct
  source 1..16: mol_type = other DNA
ccaggaagcgggcaaa

SEQ ID NO: 23874 - DNA, 16 bp, synthetic construct
  source 1..16: mol_type = other DNA
gccaggaagcgggcaa

SEQ ID NO: 23875 - DNA, 16 bp, synthetic construct
  source 1..16: mol_type = other DNA
agccaggaagcgggca

SEQ ID NO: 23876 - DNA, 16 bp, synthetic construct
  source 1..16: mol_type = other DNA
tagccaggaagcgggc

SEQ ID NO: 23877 - DNA, 16 bp, synthetic construct
  source 1..16: mol_type = other DNA
ctagccaggaagcggg

SEQ ID NO: 23878 - DNA, 16 bp, synthetic construct
  source 1..16: mol_type = other DNA
tctagccaggaagcgg

SEQ ID NO: 23879 - DNA, 16 bp, synthetic construct
  source 1..16: mol_type = other DNA
gtctagccaggaagcg

SEQ ID NO: 23880 - DNA, 16 bp, synthetic construct
  source 1..16: mol_type = other DNA
ggtctagccaggaagc

SEQ ID NO: 23881 - DNA, 16 bp, synthetic construct
  source 1..16: mol_type = other DNA
aggtctagccaggaag

SEQ ID NO: 23882 - DNA, 16 bp, synthetic construct
  source 1..16: mol_type = other DNA
caggtctagccaggaa

SEQ ID NO: 23883 - DNA, 16 bp, synthetic construct
  source 1..16: mol_type = other DNA
gcaggtctagccagga

SEQ ID NO: 23884 - DNA, 16 bp, synthetic construct
  source 1..16: mol_type = other DNA
cgcaggtctagccagg

SEQ ID NO: 23885 - DNA, 16 bp, synthetic construct
  source 1..16: mol_type = other DNA
cgtcagccggggtgcg

SEQ ID NO: 23886 - DNA, 16 bp, synthetic construct
  source 1..16: mol_type = other DNA
acgtcagccggggtgc

SEQ ID NO: 23887 - DNA, 16 bp, synthetic construct
  source 1..16: mol_type = other DNA
cacgtcagccggggtg

SEQ ID NO: 23888 - DNA, 16 bp, synthetic construct
  source 1..16: mol_type = other DNA
tgcacgtcagccgggg

SEQ ID NO: 23889 - DNA, 16 bp, synthetic construct
  source 1..16: mol_type = other DNA
ttgcacgtcagccggg

SEQ ID NO: 23890 - DNA, 16 bp, synthetic construct
  source 1..16: mol_type = other DNA
cttgcacgtcagccgg

SEQ ID NO: 23891 - DNA, 16 bp, synthetic construct
  source 1..16: mol_type = other DNA
ccttgcacgtcagccg

SEQ ID NO: 23892 - DNA, 16 bp, synthetic construct
  source 1..16: mol_type = other DNA
cccttgcacgtcagcc

SEQ ID NO: 23893 - DNA, 16 bp, synthetic construct
  source 1..16: mol_type = other DNA
tcccttgcacgtcagc

SEQ ID NO: 23894 - DNA, 16 bp, synthetic construct
  source 1..16: mol_type = other DNA
ctcccttgcacgtcag

SEQ ID NO: 23895 - DNA, 16 bp, synthetic construct
  source 1..16: mol_type = other DNA
gctcccttgcacgtca

SEQ ID NO: 23896 - DNA, 16 bp, synthetic construct
  source 1..16: mol_type = other DNA
agctcccttgcacgtc

SEQ ID NO: 23897 - DNA, 16 bp, synthetic construct
  source 1..16: mol_type = other DNA
gagctcccttgcacgt

SEQ ID NO: 23898 - DNA, 16 bp, synthetic construct
  source 1..16: mol_type = other DNA
cgagctcccttgcacg

SEQ ID NO: 23899 - DNA, 16 bp, synthetic construct
  source 1..16: mol_type = other DNA
gcgagctcccttgcac

SEQ ID NO: 23900 - DNA, 16 bp, synthetic construct
  source 1..16: mol_type = other DNA
agcgagctcccttgca

SEQ ID NO: 23901 - DNA, 16 bp, synthetic construct
  source 1..16: mol_type = other DNA
cagcgagctcccttgc

SEQ ID NO: 23902 - DNA, 16 bp, synthetic construct
  source 1..16: mol_type = other DNA
ccagcgagctcccttg

SEQ ID NO: 23903 - DNA, 16 bp, synthetic construct
  source 1..16: mol_type = other DNA
agaggccagcgagctc

SEQ ID NO: 23904 - DNA, 16 bp, synthetic construct
  source 1..16: mol_type = other DNA
gagaggccagcgagct

SEQ ID NO: 23905 - DNA, 16 bp, synthetic construct
  source 1..16: mol_type = other DNA
agagaggccagcgagc

SEQ ID NO: 23906 - DNA, 16 bp, synthetic construct
  source 1..16: mol_type = other DNA
cagagaggccagcgag

SEQ ID NO: 23907 - DNA, 16 bp, synthetic construct
  source 1..16: mol_type = other DNA
acagagaggccagcga

SEQ ID NO: 23908 - DNA, 16 bp, synthetic construct
  source 1..16: mol_type = other DNA
cacagagaggccagcg

SEQ ID NO: 23909 - DNA, 16 bp, synthetic construct
  source 1..16: mol_type = other DNA
gcacagagaggccagc

SEQ ID NO: 23910 - DNA, 16 bp, synthetic construct
  source 1..16: mol_type = other DNA
ggcacagagaggccag

SEQ ID NO: 23911 - DNA, 16 bp, synthetic construct
  source 1..16: mol_type = other DNA
gggcacagagaggcca

SEQ ID NO: 23912 - DNA, 16 bp, synthetic construct
  source 1..16: mol_type = other DNA
agggcacagagaggcc

SEQ ID NO: 23913 - DNA, 16 bp, synthetic construct
  source 1..16: mol_type = other DNA
aagggcacagagaggc

SEQ ID NO: 23914 - DNA, 16 bp, synthetic construct
  source 1..16: mol_type = other DNA
caagggcacagagagg

SEQ ID NO: 23915 - DNA, 16 bp, synthetic construct
  source 1..16: mol_type = other DNA
acaagggcacagagag

SEQ ID NO: 23916 - DNA, 16 bp, synthetic construct
  source 1..16: mol_type = other DNA
gccagaatttcacgga

SEQ ID NO: 23917 - DNA, 16 bp, synthetic construct
  source 1..16: mol_type = other DNA
agccagaatttcacgg

SEQ ID NO: 23918 - DNA, 16 bp, synthetic construct
  source 1..16: mol_type = other DNA
cagccagaatttcacg

SEQ ID NO: 23919 - DNA, 16 bp, synthetic construct
  source 1..16: mol_type = other DNA
tcagccagaatttcac

SEQ ID NO: 23920 - DNA, 16 bp, synthetic construct
  source 1..16: mol_type = other DNA
ttcagccagaatttca

SEQ ID NO: 23921 - DNA, 16 bp, synthetic construct
  source 1..16: mol_type = other DNA
gacattcagccagaat

SEQ ID NO: 23922 - DNA, 16 bp, synthetic construct
  source 1..16: mol_type = other DNA
agacattcagccagaa

SEQ ID NO: 23923 - DNA, 16 bp, synthetic construct
  source 1..16: mol_type = other DNA
gagacattcagccaga

SEQ ID NO: 23924 - DNA, 16 bp, synthetic construct
  source 1..16: mol_type = other DNA
ggagacattcagccag

SEQ ID NO: 23925 - DNA, 16 bp, synthetic construct
  source 1..16: mol_type = other DNA
gggagacattcagcca

SEQ ID NO: 23926 - DNA, 16 bp, synthetic construct
  source 1..16: mol_type = other DNA
ggggagacattcagcc

SEQ ID NO: 23927 - DNA, 16 bp, synthetic construct
  source 1..16: mol_type = other DNA
gggggagacattcagc

SEQ ID NO: 23928 - DNA, 16 bp, synthetic construct
  source 1..16: mol_type = other DNA
ggggggagacattcag

SEQ ID NO: 23929 - DNA, 16 bp, synthetic construct
  source 1..16: mol_type = other DNA
tggggggagacattca

SEQ ID NO: 23930 - DNA, 16 bp, synthetic construct
  source 1..16: mol_type = other DNA
gtggggggagacattc

SEQ ID NO: 23931 - DNA, 16 bp, synthetic construct
  source 1..16: mol_type = other DNA
ggtggggggagacatt

SEQ ID NO: 23932 - DNA, 16 bp, synthetic construct
  source 1..16: mol_type = other DNA
aggtggggggagacat

SEQ ID NO: 23933 - DNA, 16 bp, synthetic construct
  source 1..16: mol_type = other DNA
aaggtggggggagaca

SEQ ID NO: 23934 - DNA, 16 bp, synthetic construct
  source 1..16: mol_type = other DNA
gaaggtggggggagac

SEQ ID NO: 23935 - DNA, 16 bp, synthetic construct
  source 1..16: mol_type = other DNA
ggaaggtggggggaga

SEQ ID NO: 23936 - DNA, 16 bp, synthetic construct
  source 1..16: mol_type = other DNA
cggaaggtggggggag

SEQ ID NO: 23937 - DNA, 16 bp, synthetic construct
  source 1..16: mol_type = other DNA
tcggaaggtgggggga

SEQ ID NO: 23938 - DNA, 16 bp, synthetic construct
  source 1..16: mol_type = other DNA
gtcggaaggtgggggg

SEQ ID NO: 23939 - DNA, 16 bp, synthetic construct
  source 1..16: mol_type = other DNA
cgtcggaaggtggggg

SEQ ID NO: 23940 - DNA, 16 bp, synthetic construct
  source 1..16: mol_type = other DNA
gcgtcggaaggtgggg

SEQ ID NO: 23941 - DNA, 16 bp, synthetic construct
  source 1..16: mol_type = other DNA
agcgtcggaaggtggg

SEQ ID NO: 23942 - DNA, 16 bp, synthetic construct
  source 1..16: mol_type = other DNA
cagcgtcggaaggtgg

SEQ ID NO: 23943 - DNA, 16 bp, synthetic construct
  source 1..16: mol_type = other DNA
acagcgtcggaaggtg

SEQ ID NO: 23944 - DNA, 16 bp, synthetic construct
  source 1..16: mol_type = other DNA
gacagcgtcggaaggt

SEQ ID NO: 23945 - DNA, 16 bp, synthetic construct
  source 1..16: mol_type = other DNA
agacagcgtcggaagg

SEQ ID NO: 23946 - DNA, 16 bp, synthetic construct
  source 1..16: mol_type = other DNA
tagacagcgtcggaag

SEQ ID NO: 23947 - DNA, 16 bp, synthetic construct
  source 1..16: mol_type = other DNA
ctagacagcgtcggaa

SEQ ID NO: 23948 - DNA, 16 bp, synthetic construct
  source 1..16: mol_type = other DNA
cctagacagcgtcgga

SEQ ID NO: 23949 - DNA, 16 bp, synthetic construct
  source 1..16: mol_type = other DNA
gcctagacagcgtcgg

SEQ ID NO: 23950 - DNA, 16 bp, synthetic construct
  source 1..16: mol_type = other DNA
tgcctagacagcgtcg

SEQ ID NO: 23951 - DNA, 16 bp, synthetic construct
  source 1..16: mol_type = other DNA
ttgcctagacagcgtc

SEQ ID NO: 23952 - DNA, 16 bp, synthetic construct
  source 1..16: mol_type = other DNA
tttgcctagacagcgt

SEQ ID NO: 23953 - DNA, 16 bp, synthetic construct
  source 1..16: mol_type = other DNA
gtttgcctagacagcg

SEQ ID NO: 23954 - DNA, 16 bp, synthetic construct
  source 1..16: mol_type = other DNA
ggtttgcctagacagc

SEQ ID NO: 23955 - DNA, 16 bp, synthetic construct
  source 1..16: mol_type = other DNA
aggtttgcctagacag

SEQ ID NO: 23956 - DNA, 16 bp, synthetic construct
  source 1..16: mol_type = other DNA
caggtttgcctagaca

SEQ ID NO: 23957 - DNA, 16 bp, synthetic construct
  source 1..16: mol_type = other DNA
ccaggtttgcctagac

SEQ ID NO: 23958 - DNA, 16 bp, synthetic construct
  source 1..16: mol_type = other DNA
tccaggtttgcctaga

SEQ ID NO: 23959 - DNA, 16 bp, synthetic construct
  source 1..16: mol_type = other DNA
atccaggtttgcctag

SEQ ID NO: 23960 - DNA, 16 bp, synthetic construct
  source 1..16: mol_type = other DNA
aatccaggtttgccta

SEQ ID NO: 23961 - DNA, 16 bp, synthetic construct
  source 1..16: mol_type = other DNA
taatccaggtttgcct

SEQ ID NO: 23962 - DNA, 16 bp, synthetic construct
  source 1..16: mol_type = other DNA
ctaatccaggtttgcc

SEQ ID NO: 23963 - DNA, 16 bp, synthetic construct
  source 1..16: mol_type = other DNA
tctaatccaggtttgc

SEQ ID NO: 23964 - DNA, 16 bp, synthetic construct
  source 1..16: mol_type = other DNA
ctctaatccaggtttg

SEQ ID NO: 23965 - DNA, 16 bp, synthetic construct
  source 1..16: mol_type = other DNA
actctaatccaggttt

SEQ ID NO: 23966 - DNA, 16 bp, synthetic construct
  source 1..16: mol_type = other DNA
ccaggagatgtaactc

SEQ ID NO: 23967 - DNA, 16 bp, synthetic construct
  source 1..16: mol_type = other DNA
tccaggagatgtaact

SEQ ID NO: 23968 - DNA, 16 bp, synthetic construct
  source 1..16: mol_type = other DNA
tcatccaggagatgta

SEQ ID NO: 23969 - DNA, 16 bp, synthetic construct
  source 1..16: mol_type = other DNA
atcatccaggagatgt

SEQ ID NO: 23970 - DNA, 16 bp, synthetic construct
  source 1..16: mol_type = other DNA
agggagggggcatttt

SEQ ID NO: 23971 - DNA, 16 bp, synthetic construct
  source 1..16: mol_type = other DNA
cagggagggggcattt

SEQ ID NO: 23972 - DNA, 16 bp, synthetic construct
  source 1..16: mol_type = other DNA
acagggagggggcatt

SEQ ID NO: 23973 - DNA, 16 bp, synthetic construct
  source 1..16: mol_type = other DNA
cacagggagggggcat

SEQ ID NO: 23974 - DNA, 16 bp, synthetic construct
  source 1..16: mol_type = other DNA
ccacagggagggggca

SEQ ID NO: 23975 - DNA, 16 bp, synthetic construct
  source 1..16: mol_type = other DNA
tccacagggagggggc

SEQ ID NO: 23976 - DNA, 16 bp, synthetic construct
  source 1..16: mol_type = other DNA
atccacagggaggggg

SEQ ID NO: 23977 - DNA, 16 bp, synthetic construct
  source 1..16: mol_type = other DNA
gatccacagggagggg

SEQ ID NO: 23978 - DNA, 16 bp, synthetic construct
  source 1..16: mol_type = other DNA
ggatccacagggaggg

SEQ ID NO: 23979 - DNA, 16 bp, synthetic construct
  source 1..16: mol_type = other DNA
aggatccacagggagg

SEQ ID NO: 23980 - DNA, 16 bp, synthetic construct
  source 1..16: mol_type = other DNA
taggatccacagggag

SEQ ID NO: 23981 - DNA, 16 bp, synthetic construct
  source 1..16: mol_type = other DNA
ataggatccacaggga

SEQ ID NO: 23982 - DNA, 16 bp, synthetic construct
  source 1..16: mol_type = other DNA
tataggatccacaggg

SEQ ID NO: 23983 - DNA, 16 bp, synthetic construct
  source 1..16: mol_type = other DNA
ctataggatccacagg

SEQ ID NO: 23984 - DNA, 16 bp, synthetic construct
  source 1..16: mol_type = other DNA
cttctataggatccac

SEQ ID NO: 23985 - DNA, 16 bp, synthetic construct
  source 1..16: mol_type = other DNA
tcttctataggatcca

SEQ ID NO: 23986 - DNA, 16 bp, synthetic construct
  source 1..16: mol_type = other DNA
tgcactcatcacacaa

SEQ ID NO: 23987 - DNA, 16 bp, synthetic construct
  source 1..16: mol_type = other DNA
ctgcactcatcacaca

SEQ ID NO: 23988 - DNA, 16 bp, synthetic construct
  source 1..16: mol_type = other DNA
tctgcactcatcacac

SEQ ID NO: 23989 - DNA, 16 bp, synthetic construct
  source 1..16: mol_type = other DNA
ctctgcactcatcaca

SEQ ID NO: 23990 - DNA, 16 bp, synthetic construct
  source 1..16: mol_type = other DNA
tctctgcactcatcac

SEQ ID NO: 23991 - DNA, 16 bp, synthetic construct
  source 1..16: mol_type = other DNA
atctctgcactcatca

SEQ ID NO: 23992 - DNA, 16 bp, synthetic construct
  source 1..16: mol_type = other DNA
tatctctgcactcatc

SEQ ID NO: 23993 - DNA, 16 bp, synthetic construct
  source 1..16: mol_type = other DNA
atatctctgcactcat

SEQ ID NO: 23994 - DNA, 16 bp, synthetic construct
  source 1..16: mol_type = other DNA
catatctctgcactca

SEQ ID NO: 23995 - DNA, 16 bp, synthetic construct
  source 1..16: mol_type = other DNA
acatatctctgcactc

SEQ ID NO: 23996 - DNA, 16 bp, synthetic construct
  source 1..16: mol_type = other DNA
gacatatctctgcact

SEQ ID NO: 23997 - DNA, 16 bp, synthetic construct
  source 1..16: mol_type = other DNA
tgacatatctctgcac

SEQ ID NO: 23998 - DNA, 16 bp, synthetic construct
  source 1..16: mol_type = other DNA
gtgacatatctctgca

SEQ ID NO: 23999 - DNA, 16 bp, synthetic construct
  source 1..16: mol_type = other DNA
tgtgacatatctctgc

SEQ ID NO: 24000 - DNA, 16 bp, synthetic construct
  source 1..16: mol_type = other DNA
ggggatattgtgacat

SEQ ID NO: 24001 - DNA, 16 bp, synthetic construct
  source 1..16: mol_type = other DNA
aggggatattgtgaca

SEQ ID NO: 24002 - DNA, 16 bp, synthetic construct
  source 1..16: mol_type = other DNA
caggggatattgtgac

SEQ ID NO: 24003 - DNA, 16 bp, synthetic construct
  source 1..16: mol_type = other DNA
acaggggatattgtga

SEQ ID NO: 24004 - DNA, 16 bp, synthetic construct
  source 1..16: mol_type = other DNA
ctacaggggatattgt

SEQ ID NO: 24005 - DNA, 16 bp, synthetic construct
  source 1..16: mol_type = other DNA
tttttctacaggggat

SEQ ID NO: 24006 - DNA, 16 bp, synthetic construct
  source 1..16: mol_type = other DNA
ctttttctacagggga

SEQ ID NO: 24007 - DNA, 16 bp, synthetic construct
  source 1..16: mol_type = other DNA
gctttttctacagggg

SEQ ID NO: 24008 - DNA, 16 bp, synthetic construct
  source 1..16: mol_type = other DNA
ggctttttctacaggg

SEQ ID NO: 24009 - DNA, 16 bp, synthetic construct
  source 1..16: mol_type = other DNA
aggctttttctacagg

SEQ ID NO: 24010 - DNA, 16 bp, synthetic construct
  source 1..16: mol_type = other DNA
caggctttttctacag

SEQ ID NO: 24011 - DNA, 16 bp, synthetic construct
  source 1..16: mol_type = other DNA
tcaggctttttctaca

SEQ ID NO: 24012 - DNA, 16 bp, synthetic construct
  source 1..16: mol_type = other DNA
ttcaggctttttctac

SEQ ID NO: 24013 - DNA, 16 bp, synthetic construct
  source 1..16: mol_type = other DNA
tttcaggctttttcta

SEQ ID NO: 24014 - DNA, 16 bp, synthetic construct
  source 1..16: mol_type = other DNA
atttcaggctttttct

SEQ ID NO: 24015 - DNA, 16 bp, synthetic construct
  source 1..16: mol_type = other DNA
cactgatcaccgaagt

SEQ ID NO: 24016 - DNA, 16 bp, synthetic construct
  source 1..16: mol_type = other DNA
gcactgatcaccgaag

SEQ ID NO: 24017 - DNA, 16 bp, synthetic construct
  source 1..16: mol_type = other DNA
tgcactgatcaccgaa

SEQ ID NO: 24018 - DNA, 16 bp, synthetic construct
  source 1..16: mol_type = other DNA
ctgcactgatcaccga

SEQ ID NO: 24019 - DNA, 16 bp, synthetic construct
  source 1..16: mol_type = other DNA
tctgcactgatcaccg

SEQ ID NO: 24020 - DNA, 16 bp, synthetic construct
  source 1..16: mol_type = other DNA
atctgcactgatcacc

SEQ ID NO: 24021 - DNA, 16 bp, synthetic construct
  source 1..16: mol_type = other DNA
catctgcactgatcac

SEQ ID NO: 24022 - DNA, 16 bp, synthetic construct
  source 1..16: mol_type = other DNA
acatctgcactgatca

SEQ ID NO: 24023 - DNA, 16 bp, synthetic construct
  source 1..16: mol_type = other DNA
cacatctgcactgatc

SEQ ID NO: 24024 - DNA, 16 bp, synthetic construct
  source 1..16: mol_type = other DNA
acacatctgcactgat

SEQ ID NO: 24025 - DNA, 16 bp, synthetic construct
  source 1..16: mol_type = other DNA
tctactatggagttct

SEQ ID NO: 24026 - DNA, 16 bp, synthetic construct
  source 1..16: mol_type = other DNA
gtctactatggagttc

SEQ ID NO: 24027 - DNA, 16 bp, synthetic construct
  source 1..16: mol_type = other DNA
cagtctactatggagt

SEQ ID NO: 24028 - DNA, 16 bp, synthetic construct
  source 1..16: mol_type = other DNA
gttcagtctactatgg

SEQ ID NO: 24029 - DNA, 16 bp, synthetic construct
  source 1..16: mol_type = other DNA
ggttcagtctactatg

SEQ ID NO: 24030 - DNA, 16 bp, synthetic construct
  source 1..16: mol_type = other DNA
aggttcagtctactat

SEQ ID NO: 24031 - DNA, 16 bp, synthetic construct
  source 1..16: mol_type = other DNA
taggttcagtctacta

SEQ ID NO: 24032 - DNA, 16 bp, synthetic construct
  source 1..16: mol_type = other DNA
ctaggttcagtctact

SEQ ID NO: 24033 - DNA, 16 bp, synthetic construct
  source 1..16: mol_type = other DNA
tctaggttcagtctac

SEQ ID NO: 24034 - DNA, 16 bp, synthetic construct
  source 1..16: mol_type = other DNA
ctctaggttcagtcta

SEQ ID NO: 24035 - DNA, 16 bp, synthetic construct
  source 1..16: mol_type = other DNA
tctctaggttcagtct

SEQ ID NO: 24036 - DNA, 16 bp, synthetic construct
  source 1..16: mol_type = other DNA
ttctctaggttcagtc

SEQ ID NO: 24037 - DNA, 16 bp, synthetic construct
  source 1..16: mol_type = other DNA
attctctaggttcagt

SEQ ID NO: 24038 - DNA, 16 bp, synthetic construct
  source 1..16: mol_type = other DNA
cattctctaggttcag

SEQ ID NO: 24039 - DNA, 16 bp, synthetic construct
  source 1..16: mol_type = other DNA
ccattctctaggttca

SEQ ID NO: 24040 - DNA, 16 bp, synthetic construct
  source 1..16: mol_type = other DNA
accattctctaggttc

SEQ ID NO: 24041 - DNA, 16 bp, synthetic construct
  source 1..16: mol_type = other DNA
aaccattctctaggtt

SEQ ID NO: 24042 - DNA, 16 bp, synthetic construct
  source 1..16: mol_type = other DNA
taaccattctctaggt

SEQ ID NO: 24043 - DNA, 16 bp, synthetic construct
  source 1..16: mol_type = other DNA
gtaaccattctctagg

SEQ ID NO: 24044 - DNA, 16 bp, synthetic construct
  source 1..16: mol_type = other DNA
cactgatcacctaagt

SEQ ID NO: 24045 - DNA, 16 bp, synthetic construct
  source 1..16: mol_type = other DNA
ctacactgatcaccta

SEQ ID NO: 24046 - DNA, 16 bp, synthetic construct
  source 1..16: mol_type = other DNA
tctacactgatcacct

SEQ ID NO: 24047 - DNA, 16 bp, synthetic construct
  source 1..16: mol_type = other DNA
ctctacactgatcacc

SEQ ID NO: 24048 - DNA, 16 bp, synthetic construct
  source 1..16: mol_type = other DNA
ctctgtctacacgaga

SEQ ID NO: 24049 - DNA, 16 bp, synthetic construct
  source 1..16: mol_type = other DNA
gctctgtctacacgag

SEQ ID NO: 24050 - DNA, 16 bp, synthetic construct
  source 1..16: mol_type = other DNA
ggctctgtctacacga

SEQ ID NO: 24051 - DNA, 16 bp, synthetic construct
  source 1..16: mol_type = other DNA
aggctctgtctacacg

SEQ ID NO: 24052 - DNA, 16 bp, synthetic construct
  source 1..16: mol_type = other DNA
taggctctgtctacac

SEQ ID NO: 24053 - DNA, 16 bp, synthetic construct
  source 1..16: mol_type = other DNA
ctaggctctgtctaca

SEQ ID NO: 24054 - DNA, 16 bp, synthetic construct
  source 1..16: mol_type = other DNA
tctaggctctgtctac

SEQ ID NO: 24055 - DNA, 16 bp, synthetic construct
  source 1..16: mol_type = other DNA
gtctaggctctgtcta

SEQ ID NO: 24056 - DNA, 16 bp, synthetic construct
  source 1..16: mol_type = other DNA
tgtctaggctctgtct

SEQ ID NO: 24057 - DNA, 16 bp, synthetic construct
  source 1..16: mol_type = other DNA
ttgtctaggctctgtc

SEQ ID NO: 24058 - DNA, 16 bp, synthetic construct
  source 1..16: mol_type = other DNA
attgtctaggctctgt

SEQ ID NO: 24059 - DNA, 16 bp, synthetic construct
  source 1..16: mol_type = other DNA
aattgtctaggctctg

SEQ ID NO: 24060 - DNA, 16 bp, synthetic construct
  source 1..16: mol_type = other DNA
caattgtctaggctct

SEQ ID NO: 24061 - DNA, 16 bp, synthetic construct
  source 1..16: mol_type = other DNA
acaattgtctaggctc

SEQ ID NO: 24062 - DNA, 16 bp, synthetic construct
  source 1..16: mol_type = other DNA
gatcactaggtgatgt

SEQ ID NO: 24063 - DNA, 16 bp, synthetic construct
  source 1..16: mol_type = other DNA
actgatcactaggtga

SEQ ID NO: 24064 - DNA, 16 bp, synthetic construct
  source 1..16: mol_type = other DNA
cactgatcactaggtg

SEQ ID NO: 24065 - DNA, 16 bp, synthetic construct
  source 1..16: mol_type = other DNA
gcactgatcactaggt

SEQ ID NO: 24066 - DNA, 16 bp, synthetic construct
  source 1..16: mol_type = other DNA
tgcactgatcactagg

SEQ ID NO: 24067 - DNA, 16 bp, synthetic construct
  source 1..16: mol_type = other DNA
ctgcactgatcactag

SEQ ID NO: 24068 - DNA, 16 bp, synthetic construct
  source 1..16: mol_type = other DNA
cctgcactgatcacta

SEQ ID NO: 24069 - DNA, 16 bp, synthetic construct
  source 1..16: mol_type = other DNA
ccctgcactgatcact

SEQ ID NO: 24070 - DNA, 16 bp, synthetic construct
  source 1..16: mol_type = other DNA
tccctgcactgatcac

SEQ ID NO: 24071 - DNA, 16 bp, synthetic construct
  source 1..16: mol_type = other DNA
atccctgcactgatca

SEQ ID NO: 24072 - DNA, 16 bp, synthetic construct
  source 1..16: mol_type = other DNA
tatccctgcactgatc

SEQ ID NO: 24073 - DNA, 16 bp, synthetic construct
  source 1..16: mol_type = other DNA
ttatccctgcactgat

SEQ ID NO: 24074 - DNA, 16 bp, synthetic construct
  source 1..16: mol_type = other DNA
cttatccctgcactga

SEQ ID NO: 24075 - DNA, 16 bp, synthetic construct
  source 1..16: mol_type = other DNA
acttatccctgcactg

SEQ ID NO: 24076 - DNA, 16 bp, synthetic construct
  source 1..16: mol_type = other DNA
gacttatccctgcact

SEQ ID NO: 24077 - DNA, 16 bp, synthetic construct
  source 1..16: mol_type = other DNA
tgacttatccctgcac

SEQ ID NO: 24078 - DNA, 16 bp, synthetic construct
  source 1..16: mol_type = other DNA
atgacttatccctgca

SEQ ID NO: 24079 - DNA, 16 bp, synthetic construct
  source 1..16: mol_type = other DNA
tatgacttatccctgc

SEQ ID NO: 24080 - DNA, 16 bp, synthetic construct
  source 1..16: mol_type = other DNA
ggaggctttatgactt

SEQ ID NO: 24081 - DNA, 16 bp, synthetic construct
  source 1..16: mol_type = other DNA
aggaggctttatgact

SEQ ID NO: 24082 - DNA, 16 bp, synthetic construct
  source 1..16: mol_type = other DNA
caggaggctttatgac

SEQ ID NO: 24083 - DNA, 16 bp, synthetic construct
  source 1..16: mol_type = other DNA
acaggaggctttatga

SEQ ID NO: 24084 - DNA, 16 bp, synthetic construct
  source 1..16: mol_type = other DNA
ctacaggaggctttat

SEQ ID NO: 24085 - DNA, 16 bp, synthetic construct
  source 1..16: mol_type = other DNA
cctacaggaggcttta

SEQ ID NO: 24086 - DNA, 16 bp, synthetic construct
  source 1..16: mol_type = other DNA
gcctacaggaggcttt

SEQ ID NO: 24087 - DNA, 16 bp, synthetic construct
  source 1..16: mol_type = other DNA
tgcctacaggaggctt

SEQ ID NO: 24088 - DNA, 16 bp, synthetic construct
  source 1..16: mol_type = other DNA
ctgcctacaggaggct

SEQ ID NO: 24089 - DNA, 16 bp, synthetic construct
  source 1..16: mol_type = other DNA
tctgcctacaggaggc

SEQ ID NO: 24090 - DNA, 16 bp, synthetic construct
  source 1..16: mol_type = other DNA
ctctgcctacaggagg

SEQ ID NO: 24091 - DNA, 16 bp, synthetic construct
  source 1..16: mol_type = other DNA
actctgcctacaggag

SEQ ID NO: 24092 - DNA, 16 bp, synthetic construct
  source 1..16: mol_type = other DNA
cactctgcctacagga

SEQ ID NO: 24093 - DNA, 16 bp, synthetic construct
  source 1..16: mol_type = other DNA
acactctgcctacagg

SEQ ID NO: 24094 - DNA, 16 bp, synthetic construct
  source 1..16: mol_type = other DNA
tacactctgcctacag

SEQ ID NO: 24095 - DNA, 16 bp, synthetic construct
  source 1..16: mol_type = other DNA
ctacactctgcctaca

SEQ ID NO: 24096 - DNA, 16 bp, synthetic construct
  source 1..16: mol_type = other DNA
cctacactctgcctac

SEQ ID NO: 24097 - DNA, 16 bp, synthetic construct
  source 1..16: mol_type = other DNA
gcctacactctgccta

SEQ ID NO: 24098 - DNA, 16 bp, synthetic construct
  source 1..16: mol_type = other DNA
tgcctacactctgcct

SEQ ID NO: 24099 - DNA, 16 bp, synthetic construct
  source 1..16: mol_type = other DNA
ttgcctacactctgcc

SEQ ID NO: 24100 - DNA, 16 bp, synthetic construct
  source 1..16: mol_type = other DNA
cttgcctacactctgc

SEQ ID NO: 24101 - DNA, 16 bp, synthetic construct
  source 1..16: mol_type = other DNA
acttgcctacactctg

SEQ ID NO: 24102 - DNA, 16 bp, synthetic construct
  source 1..16: mol_type = other DNA
cacttgcctacactct

SEQ ID NO: 24103 - DNA, 16 bp, synthetic construct
  source 1..16: mol_type = other DNA
acacttgcctacactc

SEQ ID NO: 24104 - DNA, 16 bp, synthetic construct
  source 1..16: mol_type = other DNA
aacacttgcctacact

SEQ ID NO: 24105 - DNA, 16 bp, synthetic construct
  source 1..16: mol_type = other DNA
gaacacttgcctacac

SEQ ID NO: 24106 - DNA, 16 bp, synthetic construct
  source 1..16: mol_type = other DNA
ggaacacttgcctaca

SEQ ID NO: 24107 - DNA, 16 bp, synthetic construct
  source 1..16: mol_type = other DNA
gggaacacttgcctac

SEQ ID NO: 24108 - DNA, 16 bp, synthetic construct
  source 1..16: mol_type = other DNA
agggaacacttgccta

SEQ ID NO: 24109 - DNA, 16 bp, synthetic construct
  source 1..16: mol_type = other DNA
gagggaacacttgcct

SEQ ID NO: 24110 - DNA, 16 bp, synthetic construct
  source 1..16: mol_type = other DNA
ggagggaacacttgcc

SEQ ID NO: 24111 - DNA, 16 bp, synthetic construct
  source 1..16: mol_type = other DNA
gggagggaacacttgc

SEQ ID NO: 24112 - DNA, 16 bp, synthetic construct
  source 1..16: mol_type = other DNA
agggagggaacacttg

SEQ ID NO: 24113 - DNA, 16 bp, synthetic construct
  source 1..16: mol_type = other DNA
cagggagggaacactt

SEQ ID NO: 24114 - DNA, 16 bp, synthetic construct
  source 1..16: mol_type = other DNA
ccagggagggaacact

SEQ ID NO: 24115 - DNA, 16 bp, synthetic construct
  source 1..16: mol_type = other DNA
cccagggagggaacac

SEQ ID NO: 24116 - DNA, 16 bp, synthetic construct
  source 1..16: mol_type = other DNA
gcccagggagggaaca

SEQ ID NO: 24117 - DNA, 16 bp, synthetic construct
  source 1..16: mol_type = other DNA
agcccagggagggaac

SEQ ID NO: 24118 - DNA, 16 bp, synthetic construct
  source 1..16: mol_type = other DNA
cagcccagggagggaa

SEQ ID NO: 24119 - DNA, 16 bp, synthetic construct
  source 1..16: mol_type = other DNA
tcagcccagggaggga

SEQ ID NO: 24120 - DNA, 16 bp, synthetic construct
  source 1..16: mol_type = other DNA
atcagcccagggaggg

SEQ ID NO: 24121 - DNA, 16 bp, synthetic construct
  source 1..16: mol_type = other DNA
gatcagcccagggagg

SEQ ID NO: 24122 - DNA, 16 bp, synthetic construct
  source 1..16: mol_type = other DNA
tgatcagcccagggag

SEQ ID NO: 24123 - DNA, 16 bp, synthetic construct
  source 1..16: mol_type = other DNA
ctgatcagcccaggga

SEQ ID NO: 24124 - DNA, 16 bp, synthetic construct
  source 1..16: mol_type = other DNA
actgatcagcccaggg

SEQ ID NO: 24125 - DNA, 16 bp, synthetic construct
  source 1..16: mol_type = other DNA
cactgatcagcccagg

SEQ ID NO: 24126 - DNA, 16 bp, synthetic construct
  source 1..16: mol_type = other DNA
gcactgatcagcccag

SEQ ID NO: 24127 - DNA, 16 bp, synthetic construct
  source 1..16: mol_type = other DNA
tgcactgatcagccca

SEQ ID NO: 24128 - DNA, 16 bp, synthetic construct
  source 1..16: mol_type = other DNA
ctgcactgatcagccc

SEQ ID NO: 24129 - DNA, 16 bp, synthetic construct
  source 1..16: mol_type = other DNA
tctgcactgatcagcc

SEQ ID NO: 24130 - DNA, 16 bp, synthetic construct
  source 1..16: mol_type = other DNA
ctctgcactgatcagc

SEQ ID NO: 24131 - DNA, 16 bp, synthetic construct
  source 1..16: mol_type = other DNA
tctctgcactgatcag

SEQ ID NO: 24132 - DNA, 16 bp, synthetic construct
  source 1..16: mol_type = other DNA
atctctgcactgatca

SEQ ID NO: 24133 - DNA, 16 bp, synthetic construct
  source 1..16: mol_type = other DNA
tatctctgcactgatc

SEQ ID NO: 24134 - DNA, 16 bp, synthetic construct
  source 1..16: mol_type = other DNA
atatctctgcactgat

SEQ ID NO: 24135 - DNA, 16 bp, synthetic construct
  source 1..16: mol_type = other DNA
gatatctctgcactga

SEQ ID NO: 24136 - DNA, 16 bp, synthetic construct
  source 1..16: mol_type = other DNA
agatatctctgcactg

SEQ ID NO: 24137 - DNA, 16 bp, synthetic construct
  source 1..16: mol_type = other DNA
gagatatctctgcact

SEQ ID NO: 24138 - DNA, 16 bp, synthetic construct
  source 1..16: mol_type = other DNA
gtgagatatctctgca

SEQ ID NO: 24139 - DNA, 16 bp, synthetic construct
  source 1..16: mol_type = other DNA
tgtgagatatctctgc

SEQ ID NO: 24140 - DNA, 16 bp, synthetic construct
  source 1..16: mol_type = other DNA
ggctttgtgagatatc

SEQ ID NO: 24141 - DNA, 16 bp, synthetic construct
  source 1..16: mol_type = other DNA
gggctttgtgagatat

SEQ ID NO: 24142 - DNA, 16 bp, synthetic construct
  source 1..16: mol_type = other DNA
ggggctttgtgagata

SEQ ID NO: 24143 - DNA, 16 bp, synthetic construct
  source 1..16: mol_type = other DNA
aggggctttgtgagat

SEQ ID NO: 24144 - DNA, 16 bp, synthetic construct
  source 1..16: mol_type = other DNA
taggggctttgtgaga

SEQ ID NO: 24145 - DNA, 16 bp, synthetic construct
  source 1..16: mol_type = other DNA
ataggggctttgtgag

SEQ ID NO: 24146 - DNA, 16 bp, synthetic construct
  source 1..16: mol_type = other DNA
tataggggctttgtga

SEQ ID NO: 24147 - DNA, 16 bp, synthetic construct
  source 1..16: mol_type = other DNA
ttataggggctttgtg

SEQ ID NO: 24148 - DNA, 16 bp, synthetic construct
  source 1..16: mol_type = other DNA
cttataggggctttgt

SEQ ID NO: 24149 - DNA, 16 bp, synthetic construct
  source 1..16: mol_type = other DNA
gcttataggggctttg

SEQ ID NO: 24150 - DNA, 16 bp, synthetic construct
  source 1..16: mol_type = other DNA
ggcttataggggcttt

SEQ ID NO: 24151 - DNA, 16 bp, synthetic construct
  source 1..16: mol_type = other DNA
tggcttataggggctt

SEQ ID NO: 24152 - DNA, 16 bp, synthetic construct
  source 1..16: mol_type = other DNA
ttggcttataggggct

SEQ ID NO: 24153 - DNA, 16 bp, synthetic construct
  source 1..16: mol_type = other DNA
tttggcttataggggc

SEQ ID NO: 24154 - DNA, 16 bp, synthetic construct
  source 1..16: mol_type = other DNA
gtttggcttatagggg

SEQ ID NO: 24155 - DNA, 16 bp, synthetic construct
  source 1..16: mol_type = other DNA
ggtttggcttataggg

SEQ ID NO: 24156 - DNA, 16 bp, synthetic construct
  source 1..16: mol_type = other DNA
aggtttggcttatagg

SEQ ID NO: 24157 - DNA, 16 bp, synthetic construct
  source 1..16: mol_type = other DNA
tcaaggtttggcttat

SEQ ID NO: 24158 - DNA, 16 bp, synthetic construct
  source 1..16: mol_type = other DNA
gtcaaggtttggctta

SEQ ID NO: 24159 - DNA, 16 bp, synthetic construct
  source 1..16: mol_type = other DNA
tgtcaaggtttggctt

SEQ ID NO: 24160 - DNA, 16 bp, synthetic construct
  source 1..16: mol_type = other DNA
ttgtcaaggtttggct

SEQ ID NO: 24161 - DNA, 16 bp, synthetic construct
  source 1..16: mol_type = other DNA
cttgtcaaggtttggc

SEQ ID NO: 24162 - DNA, 16 bp, synthetic construct
  source 1..16: mol_type = other DNA
ccttgtcaaggtttgg

SEQ ID NO: 24163 - DNA, 16 bp, synthetic construct
  source 1..16: mol_type = other DNA
cccttgtcaaggtttg

SEQ ID NO: 24164 - DNA, 16 bp, synthetic construct
  source 1..16: mol_type = other DNA
acccttgtcaaggttt

SEQ ID NO: 24165 - DNA, 16 bp, synthetic construct
  source 1..16: mol_type = other DNA
aacccttgtcaaggtt

SEQ ID NO: 24166 - DNA, 16 bp, synthetic construct
  source 1..16: mol_type = other DNA
taacccttgtcaaggt

SEQ ID NO: 24167 - DNA, 16 bp, synthetic construct
  source 1..16: mol_type = other DNA
gtaacccttgtcaagg

SEQ ID NO: 24168 - DNA, 16 bp, synthetic construct
  source 1..16: mol_type = other DNA
tgtaacccttgtcaag

SEQ ID NO: 24169 - DNA, 16 bp, synthetic construct
  source 1..16: mol_type = other DNA
atgtaacccttgtcaa

SEQ ID NO: 24170 - DNA, 16 bp, synthetic construct
  source 1..16: mol_type = other DNA
gatgtaacccttgtca

SEQ ID NO: 24171 - DNA, 16 bp, synthetic construct
  source 1..16: mol_type = other DNA
tgatgtaacccttgtc

SEQ ID NO: 24172 - DNA, 16 bp, synthetic construct
  source 1..16: mol_type = other DNA
gtgatgtaacccttgt

SEQ ID NO: 24173 - DNA, 16 bp, synthetic construct
  source 1..16: mol_type = other DNA
ggtgatgtaacccttg

SEQ ID NO: 24174 - DNA, 16 bp, synthetic construct
  source 1..16: mol_type = other DNA
aggtgatgtaaccctt

SEQ ID NO: 24175 - DNA, 16 bp, synthetic construct
  source 1..16: mol_type = other DNA
caggtgatgtaaccct

SEQ ID NO: 24176 - DNA, 16 bp, synthetic construct
  source 1..16: mol_type = other DNA
acaggtgatgtaaccc

SEQ ID NO: 24177 - DNA, 16 bp, synthetic construct
  source 1..16: mol_type = other DNA
ctgctcaaacaggtga

SEQ ID NO: 24178 - DNA, 16 bp, synthetic construct
  source 1..16: mol_type = other DNA
actgctcaaacaggtg

SEQ ID NO: 24179 - DNA, 16 bp, synthetic construct
  source 1..16: mol_type = other DNA
cactgctcaaacaggt

SEQ ID NO: 24180 - DNA, 16 bp, synthetic construct
  source 1..16: mol_type = other DNA
ccactgctcaaacagg

SEQ ID NO: 24181 - DNA, 16 bp, synthetic construct
  source 1..16: mol_type = other DNA
tccactgctcaaacag

SEQ ID NO: 24182 - DNA, 16 bp, synthetic construct
  source 1..16: mol_type = other DNA
ttccactgctcaaaca

SEQ ID NO: 24183 - DNA, 16 bp, synthetic construct
  source 1..16: mol_type = other DNA
tttccactgctcaaac

SEQ ID NO: 24184 - DNA, 16 bp, synthetic construct
  source 1..16: mol_type = other DNA
tatttccactgctcaa

SEQ ID NO: 24185 - DNA, 16 bp, synthetic construct
  source 1..16: mol_type = other DNA
atatttccactgctca

SEQ ID NO: 24186 - DNA, 16 bp, synthetic construct
  source 1..16: mol_type = other DNA
tatatttccactgctc

SEQ ID NO: 24187 - DNA, 16 bp, synthetic construct
  source 1..16: mol_type = other DNA
ggggctttgtgatata

SEQ ID NO: 24188 - DNA, 16 bp, synthetic construct
  source 1..16: mol_type = other DNA
gggggctttgtgatat

SEQ ID NO: 24189 - DNA, 16 bp, synthetic construct
  source 1..16: mol_type = other DNA
agggggctttgtgata

SEQ ID NO: 24190 - DNA, 16 bp, synthetic construct
  source 1..16: mol_type = other DNA
cagggggctttgtgat

SEQ ID NO: 24191 - DNA, 16 bp, synthetic construct
  source 1..16: mol_type = other DNA
acagggggctttgtga

SEQ ID NO: 24192 - DNA, 16 bp, synthetic construct
  source 1..16: mol_type = other DNA
tacagggggctttgtg

SEQ ID NO: 24193 - DNA, 16 bp, synthetic construct
  source 1..16: mol_type = other DNA
ctacagggggctttgt

SEQ ID NO: 24194 - DNA, 16 bp, synthetic construct
  source 1..16: mol_type = other DNA
tctacagggggctttg

SEQ ID NO: 24195 - DNA, 16 bp, synthetic construct
  source 1..16: mol_type = other DNA
gtctacagggggcttt

SEQ ID NO: 24196 - DNA, 16 bp, synthetic construct
  source 1..16: mol_type = other DNA
tgtctacagggggctt

SEQ ID NO: 24197 - DNA, 16 bp, synthetic construct
  source 1..16: mol_type = other DNA
ttgtctacagggggct

SEQ ID NO: 24198 - DNA, 16 bp, synthetic construct
  source 1..16: mol_type = other DNA
tttgtctacagggggc

SEQ ID NO: 24199 - DNA, 16 bp, synthetic construct
  source 1..16: mol_type = other DNA
ctttgtctacaggggg

SEQ ID NO: 24200 - DNA, 16 bp, synthetic construct
  source 1..16: mol_type = other DNA
gctttgtctacagggg

SEQ ID NO: 24201 - DNA, 16 bp, synthetic construct
  source 1..16: mol_type = other DNA
ggctttgtctacaggg

SEQ ID NO: 24202 - DNA, 16 bp, synthetic construct
  source 1..16: mol_type = other DNA
gggctttgtctacagg

SEQ ID NO: 24203 - DNA, 16 bp, synthetic construct
  source 1..16: mol_type = other DNA
tgggctttgtctacag

SEQ ID NO: 24204 - DNA, 16 bp, synthetic construct
  source 1..16: mol_type = other DNA
ctgggctttgtctaca

SEQ ID NO: 24205 - DNA, 16 bp, synthetic construct
  source 1..16: mol_type = other DNA
tctgggctttgtctac

SEQ ID NO: 24206 - DNA, 16 bp, synthetic construct
  source 1..16: mol_type = other DNA
gtctgggctttgtcta

SEQ ID NO: 24207 - DNA, 16 bp, synthetic construct
  source 1..16: mol_type = other DNA
tgtctgggctttgtct

SEQ ID NO: 24208 - DNA, 16 bp, synthetic construct
  source 1..16: mol_type = other DNA
ttgtctgggctttgtc

SEQ ID NO: 24209 - DNA, 16 bp, synthetic construct
  source 1..16: mol_type = other DNA
attgtctgggctttgt

SEQ ID NO: 24210 - DNA, 16 bp, synthetic construct
  source 1..16: mol_type = other DNA
aattgtctgggctttg

SEQ ID NO: 24211 - DNA, 16 bp, synthetic construct
  source 1..16: mol_type = other DNA
tcactcaggagatgta

SEQ ID NO: 24212 - DNA, 16 bp, synthetic construct
  source 1..16: mol_type = other DNA
ctcactcaggagatgt

SEQ ID NO: 24213 - DNA, 16 bp, synthetic construct
  source 1..16: mol_type = other DNA
gctcactcaggagatg

SEQ ID NO: 24214 - DNA, 16 bp, synthetic construct
  source 1..16: mol_type = other DNA
tgctcactcaggagat

SEQ ID NO: 24215 - DNA, 16 bp, synthetic construct
  source 1..16: mol_type = other DNA
atgctcactcaggaga

SEQ ID NO: 24216 - DNA, 16 bp, synthetic construct
  source 1..16: mol_type = other DNA
aatgctcactcaggag

SEQ ID NO: 24217 - DNA, 16 bp, synthetic construct
  source 1..16: mol_type = other DNA
caatgctcactcagga

SEQ ID NO: 24218 - DNA, 16 bp, synthetic construct
  source 1..16: mol_type = other DNA
ccaatgctcactcagg

SEQ ID NO: 24219 - DNA, 16 bp, synthetic construct
  source 1..16: mol_type = other DNA
tccaatgctcactcag

SEQ ID NO: 24220 - DNA, 16 bp, synthetic construct
  source 1..16: mol_type = other DNA
ctccaatgctcactca

SEQ ID NO: 24221 - DNA, 16 bp, synthetic construct
  source 1..16: mol_type = other DNA
tctccaatgctcactc

SEQ ID NO: 24222 - DNA, 16 bp, synthetic construct
  source 1..16: mol_type = other DNA
ctctccaatgctcact

SEQ ID NO: 24223 - DNA, 16 bp, synthetic construct
  source 1..16: mol_type = other DNA
tctctccaatgctcac

SEQ ID NO: 24224 - DNA, 16 bp, synthetic construct
  source 1..16: mol_type = other DNA
atctctccaatgctca

SEQ ID NO: 24225 - DNA, 16 bp, synthetic construct
  source 1..16: mol_type = other DNA
gatctctccaatgctc

SEQ ID NO: 24226 - DNA, 16 bp, synthetic construct
  source 1..16: mol_type = other DNA
agatctctccaatgct

SEQ ID NO: 24227 - DNA, 16 bp, synthetic construct
  source 1..16: mol_type = other DNA
cagatctctccaatgc

SEQ ID NO: 24228 - DNA, 16 bp, synthetic construct
  source 1..16: mol_type = other DNA
gacagatctctccaat

SEQ ID NO: 24229 - DNA, 16 bp, synthetic construct
  source 1..16: mol_type = other DNA
tgacagatctctccaa

SEQ ID NO: 24230 - DNA, 16 bp, synthetic construct
  source 1..16: mol_type = other DNA
gtgacagatctctcca

SEQ ID NO: 24231 - DNA, 16 bp, synthetic construct
  source 1..16: mol_type = other DNA
tgtgacagatctctcc

SEQ ID NO: 24232 - DNA, 16 bp, synthetic construct
  source 1..16: mol_type = other DNA
ttgtgacagatctctc

SEQ ID NO: 24233 - DNA, 16 bp, synthetic construct
  source 1..16: mol_type = other DNA
gcattgtgacagatct

SEQ ID NO: 24234 - DNA, 16 bp, synthetic construct
  source 1..16: mol_type = other DNA
ggcattgtgacagatc

SEQ ID NO: 24235 - DNA, 16 bp, synthetic construct
  source 1..16: mol_type = other DNA
gggcattgtgacagat

SEQ ID NO: 24236 - DNA, 16 bp, synthetic construct
  source 1..16: mol_type = other DNA
ggggcattgtgacaga

SEQ ID NO: 24237 - DNA, 16 bp, synthetic construct
  source 1..16: mol_type = other DNA
aggggcattgtgacag

SEQ ID NO: 24238 - DNA, 16 bp, synthetic construct
  source 1..16: mol_type = other DNA
caggggcattgtgaca

SEQ ID NO: 24239 - DNA, 16 bp, synthetic construct
  source 1..16: mol_type = other DNA
acaggggcattgtgac

SEQ ID NO: 24240 - DNA, 16 bp, synthetic construct
  source 1..16: mol_type = other DNA
tacaggggcattgtga

SEQ ID NO: 24241 - DNA, 16 bp, synthetic construct
  source 1..16: mol_type = other DNA
ctacaggggcattgtg

SEQ ID NO: 24242 - DNA, 16 bp, synthetic construct
  source 1..16: mol_type = other DNA
cctacaggggcattgt

SEQ ID NO: 24243 - DNA, 16 bp, synthetic construct
  source 1..16: mol_type = other DNA
gcctacaggggcattg

SEQ ID NO: 24244 - DNA, 16 bp, synthetic construct
  source 1..16: mol_type = other DNA
tgcctacaggggcatt

SEQ ID NO: 24245 - DNA, 16 bp, synthetic construct
  source 1..16: mol_type = other DNA
ctgcctacaggggcat

SEQ ID NO: 24246 - DNA, 16 bp, synthetic construct
  source 1..16: mol_type = other DNA
tctgcctacaggggca

SEQ ID NO: 24247 - DNA, 16 bp, synthetic construct
  source 1..16: mol_type = other DNA
ctctgcctacaggggc

SEQ ID NO: 24248 - DNA, 16 bp, synthetic construct
  source 1..16: mol_type = other DNA
gctctgcctacagggg

SEQ ID NO: 24249 - DNA, 16 bp, synthetic construct
  source 1..16: mol_type = other DNA
agctctgcctacaggg

SEQ ID NO: 24250 - DNA, 16 bp, synthetic construct
  source 1..16: mol_type = other DNA
aagctctgcctacagg

SEQ ID NO: 24251 - DNA, 16 bp, synthetic construct
  source 1..16: mol_type = other DNA
taagctctgcctacag

SEQ ID NO: 24252 - DNA, 16 bp, synthetic construct
  source 1..16: mol_type = other DNA
ctaagctctgcctaca

SEQ ID NO: 24253 - DNA, 16 bp, synthetic construct
  source 1..16: mol_type = other DNA
tctaagctctgcctac

SEQ ID NO: 24254 - DNA, 16 bp, synthetic construct
  source 1..16: mol_type = other DNA
gtctaagctctgccta

SEQ ID NO: 24255 - DNA, 16 bp, synthetic construct
  source 1..16: mol_type = other DNA
tgtctaagctctgcct

SEQ ID NO: 24256 - DNA, 16 bp, synthetic construct
  source 1..16: mol_type = other DNA
ttgtctaagctctgcc

SEQ ID NO: 24257 - DNA, 16 bp, synthetic construct
  source 1..16: mol_type = other DNA
cttgtctaagctctgc

SEQ ID NO: 24258 - DNA, 16 bp, synthetic construct
  source 1..16: mol_type = other DNA
acttgtctaagctctg

SEQ ID NO: 24259 - DNA, 16 bp, synthetic construct
  source 1..16: mol_type = other DNA
cacttgtctaagctct

SEQ ID NO: 24260 - DNA, 16 bp, synthetic construct
  source 1..16: mol_type = other DNA
acacttgtctaagctc

SEQ ID NO: 24261 - DNA, 16 bp, synthetic construct
  source 1..16: mol_type = other DNA
ccaggtgatgtaacac

SEQ ID NO: 24262 - DNA, 16 bp, synthetic construct
  source 1..16: mol_type = other DNA
cccaggtgatgtaaca

SEQ ID NO: 24263 - DNA, 16 bp, synthetic construct
  source 1..16: mol_type = other DNA
acccaggtgatgtaac

SEQ ID NO: 24264 - DNA, 16 bp, synthetic construct
  source 1..16: mol_type = other DNA
cacccaggtgatgtaa

SEQ ID NO: 24265 - DNA, 16 bp, synthetic construct
  source 1..16: mol_type = other DNA
tcacccaggtgatgta

SEQ ID NO: 24266 - DNA, 16 bp, synthetic construct
  source 1..16: mol_type = other DNA
atcacccaggtgatgt

SEQ ID NO: 24267 - DNA, 16 bp, synthetic construct
  source 1..16: mol_type = other DNA
gatcacccaggtgatg

SEQ ID NO: 24268 - DNA, 16 bp, synthetic construct
  source 1..16: mol_type = other DNA
tgatcacccaggtgat

SEQ ID NO: 24269 - DNA, 16 bp, synthetic construct
  source 1..16: mol_type = other DNA
ctgatcacccaggtga

SEQ ID NO: 24270 - DNA, 16 bp, synthetic construct
  source 1..16: mol_type = other DNA
actgatcacccaggtg

SEQ ID NO: 24271 - DNA, 16 bp, synthetic construct
  source 1..16: mol_type = other DNA
cactgatcacccaggt

SEQ ID NO: 24272 - DNA, 16 bp, synthetic construct
  source 1..16: mol_type = other DNA
gcactgatcacccagg

SEQ ID NO: 24273 - DNA, 16 bp, synthetic construct
  source 1..16: mol_type = other DNA
tgcactgatcacccag

SEQ ID NO: 24274 - DNA, 16 bp, synthetic construct
  source 1..16: mol_type = other DNA
ctgcactgatcaccca

SEQ ID NO: 24275 - DNA, 16 bp, synthetic construct
  source 1..16: mol_type = other DNA
tctgcactgatcaccc

SEQ ID NO: 24276 - DNA, 16 bp, synthetic construct
  source 1..16: mol_type = other DNA
ctctgcactgatcacc

SEQ ID NO: 24277 - DNA, 16 bp, synthetic construct
  source 1..16: mol_type = other DNA
tctctgcactgatcac

SEQ ID NO: 24278 - DNA, 16 bp, synthetic construct
  source 1..16: mol_type = other DNA
catctctgcactgatc

SEQ ID NO: 24279 - DNA, 16 bp, synthetic construct
  source 1..16: mol_type = other DNA
acatctctgcactgat

SEQ ID NO: 24280 - DNA, 16 bp, synthetic construct
  source 1..16: mol_type = other DNA
cacatctctgcactga

SEQ ID NO: 24281 - DNA, 16 bp, synthetic construct
  source 1..16: mol_type = other DNA
acacatctctgcactg

SEQ ID NO: 24282 - DNA, 16 bp, synthetic construct
  source 1..16: mol_type = other DNA
gacacatctctgcact

SEQ ID NO: 24283 - DNA, 16 bp, synthetic construct
  source 1..16: mol_type = other DNA
tgacacatctctgcac

SEQ ID NO: 24284 - DNA, 16 bp, synthetic construct
  source 1..16: mol_type = other DNA
caggagcgttttgaca

SEQ ID NO: 24285 - DNA, 16 bp, synthetic construct
  source 1..16: mol_type = other DNA
acaggagcgttttgac

SEQ ID NO: 24286 - DNA, 16 bp, synthetic construct
  source 1..16: mol_type = other DNA
tacaggagcgttttga

SEQ ID NO: 24287 - DNA, 16 bp, synthetic construct
  source 1..16: mol_type = other DNA
ctacaggagcgttttg

SEQ ID NO: 24288 - DNA, 16 bp, synthetic construct
  source 1..16: mol_type = other DNA
actacaggagcgtttt

SEQ ID NO: 24289 - DNA, 16 bp, synthetic construct
  source 1..16: mol_type = other DNA
gactacaggagcgttt

SEQ ID NO: 24290 - DNA, 16 bp, synthetic construct
  source 1..16: mol_type = other DNA
agactacaggagcgtt

SEQ ID NO: 24291 - DNA, 16 bp, synthetic construct
  source 1..16: mol_type = other DNA
cagactacaggagcgt

SEQ ID NO: 24292 - DNA, 16 bp, synthetic construct
  source 1..16: mol_type = other DNA
tcagactacaggagcg

SEQ ID NO: 24293 - DNA, 16 bp, synthetic construct
  source 1..16: mol_type = other DNA
ttcagactacaggagc

SEQ ID NO: 24294 - DNA, 16 bp, synthetic construct
  source 1..16: mol_type = other DNA
gttcagactacaggag

SEQ ID NO: 24295 - DNA, 16 bp, synthetic construct
  source 1..16: mol_type = other DNA
ggttcagactacagga

SEQ ID NO: 24296 - DNA, 16 bp, synthetic construct
  source 1..16: mol_type = other DNA
aggttcagactacagg

SEQ ID NO: 24297 - DNA, 16 bp, synthetic construct
  source 1..16: mol_type = other DNA
ctaggttcagactaca

SEQ ID NO: 24298 - DNA, 16 bp, synthetic construct
  source 1..16: mol_type = other DNA
tctaggttcagactac

SEQ ID NO: 24299 - DNA, 16 bp, synthetic construct
  source 1..16: mol_type = other DNA
gtctaggttcagacta

SEQ ID NO: 24300 - DNA, 16 bp, synthetic construct
  source 1..16: mol_type = other DNA
tgtctaggttcagact

SEQ ID NO: 24301 - DNA, 16 bp, synthetic construct
  source 1..16: mol_type = other DNA
ctgtctaggttcagac

SEQ ID NO: 24302 - DNA, 16 bp, synthetic construct
  source 1..16: mol_type = other DNA
cctgtctaggttcaga

SEQ ID NO: 24303 - DNA, 16 bp, synthetic construct
  source 1..16: mol_type = other DNA
tcctgtctaggttcag

SEQ ID NO: 24304 - DNA, 16 bp, synthetic construct
  source 1..16: mol_type = other DNA
ctcctgtctaggttca

SEQ ID NO: 24305 - DNA, 16 bp, synthetic construct
  source 1..16: mol_type = other DNA
actcctgtctaggttc

SEQ ID NO: 24306 - DNA, 16 bp, synthetic construct
  source 1..16: mol_type = other DNA
aactcctgtctaggtt

SEQ ID NO: 24307 - DNA, 16 bp, synthetic construct
  source 1..16: mol_type = other DNA
taactcctgtctaggt

SEQ ID NO: 24308 - DNA, 16 bp, synthetic construct
  source 1..16: mol_type = other DNA
gtaactcctgtctagg

SEQ ID NO: 24309 - DNA, 16 bp, synthetic construct
  source 1..16: mol_type = other DNA
tgtaactcctgtctag

SEQ ID NO: 24310 - DNA, 16 bp, synthetic construct
  source 1..16: mol_type = other DNA
atgtaactcctgtcta

SEQ ID NO: 24311 - DNA, 16 bp, synthetic construct
  source 1..16: mol_type = other DNA
gatgtaactcctgtct

SEQ ID NO: 24312 - DNA, 16 bp, synthetic construct
  source 1..16: mol_type = other DNA
tgatgtaactcctgtc

SEQ ID NO: 24313 - DNA, 16 bp, synthetic construct
  source 1..16: mol_type = other DNA
gtgatgtaactcctgt

SEQ ID NO: 24314 - DNA, 16 bp, synthetic construct
  source 1..16: mol_type = other DNA
ggtgatgtaactcctg

SEQ ID NO: 24315 - DNA, 16 bp, synthetic construct
  source 1..16: mol_type = other DNA
aggtgatgtaactcct

SEQ ID NO: 24316 - DNA, 16 bp, synthetic construct
  source 1..16: mol_type = other DNA
cccaaggtgatgtaac

SEQ ID NO: 24317 - DNA, 16 bp, synthetic construct
  source 1..16: mol_type = other DNA
ccccaaggtgatgtaa

SEQ ID NO: 24318 - DNA, 16 bp, synthetic construct
  source 1..16: mol_type = other DNA
tccccaaggtgatgta

SEQ ID NO: 24319 - DNA, 16 bp, synthetic construct
  source 1..16: mol_type = other DNA
atccccaaggtgatgt

SEQ ID NO: 24320 - DNA, 16 bp, synthetic construct
  source 1..16: mol_type = other DNA
gatccccaaggtgatg

SEQ ID NO: 24321 - DNA, 16 bp, synthetic construct
  source 1..16: mol_type = other DNA
tgatccccaaggtgat

SEQ ID NO: 24322 - DNA, 16 bp, synthetic construct
  source 1..16: mol_type = other DNA
ctgatccccaaggtga

SEQ ID NO: 24323 - DNA, 16 bp, synthetic construct
  source 1..16: mol_type = other DNA
actgatccccaaggtg

SEQ ID NO: 24324 - DNA, 16 bp, synthetic construct
  source 1..16: mol_type = other DNA
cactgatccccaaggt

SEQ ID NO: 24325 - DNA, 16 bp, synthetic construct
  source 1..16: mol_type = other DNA
gcactgatccccaagg

SEQ ID NO: 24326 - DNA, 16 bp, synthetic construct
  source 1..16: mol_type = other DNA
tgcactgatccccaag

SEQ ID NO: 24327 - DNA, 16 bp, synthetic construct
  source 1..16: mol_type = other DNA
ctgcactgatccccaa

SEQ ID NO: 24328 - DNA, 16 bp, synthetic construct
  source 1..16: mol_type = other DNA
tctgcactgatcccca

SEQ ID NO: 24329 - DNA, 16 bp, synthetic construct
  source 1..16: mol_type = other DNA
ctctgcactgatcccc

SEQ ID NO: 24330 - DNA, 16 bp, synthetic construct
  source 1..16: mol_type = other DNA
tctctgcactgatccc

SEQ ID NO: 24331 - DNA, 16 bp, synthetic construct
  source 1..16: mol_type = other DNA
atctctgcactgatcc

SEQ ID NO: 24332 - DNA, 16 bp, synthetic construct
  source 1..16: mol_type = other DNA
gtatctctgcactgat

SEQ ID NO: 24333 - DNA, 16 bp, synthetic construct
  source 1..16: mol_type = other DNA
cgtatctctgcactga

SEQ ID NO: 24334 - DNA, 16 bp, synthetic construct
  source 1..16: mol_type = other DNA
acgtatctctgcactg

SEQ ID NO: 24335 - DNA, 16 bp, synthetic construct
  source 1..16: mol_type = other DNA
cacgtatctctgcact

SEQ ID NO: 24336 - DNA, 16 bp, synthetic construct
  source 1..16: mol_type = other DNA
tcacgtatctctgcac

SEQ ID NO: 24337 - DNA, 16 bp, synthetic construct
  source 1..16: mol_type = other DNA
ctcacgtatctctgca

SEQ ID NO: 24338 - DNA, 16 bp, synthetic construct
  source 1..16: mol_type = other DNA
tctcacgtatctctgc

SEQ ID NO: 24339 - DNA, 16 bp, synthetic construct
  source 1..16: mol_type = other DNA
ttctcacgtatctctg

SEQ ID NO: 24340 - DNA, 16 bp, synthetic construct
  source 1..16: mol_type = other DNA
attctcacgtatctct

SEQ ID NO: 24341 - DNA, 16 bp, synthetic construct
  source 1..16: mol_type = other DNA
gcctacaagggaattc

SEQ ID NO: 24342 - DNA, 16 bp, synthetic construct
  source 1..16: mol_type = other DNA
ctgcctacaagggaat

SEQ ID NO: 24343 - DNA, 16 bp, synthetic construct
  source 1..16: mol_type = other DNA
cctgcctacaagggaa

SEQ ID NO: 24344 - DNA, 16 bp, synthetic construct
  source 1..16: mol_type = other DNA
ccctgcctacaaggga

SEQ ID NO: 24345 - DNA, 16 bp, synthetic construct
  source 1..16: mol_type = other DNA
gccctgcctacaaggg

SEQ ID NO: 24346 - DNA, 16 bp, synthetic construct
  source 1..16: mol_type = other DNA
ggccctgcctacaagg

SEQ ID NO: 24347 - DNA, 16 bp, synthetic construct
  source 1..16: mol_type = other DNA
aggccctgcctacaag

SEQ ID NO: 24348 - DNA, 16 bp, synthetic construct
  source 1..16: mol_type = other DNA
taggccctgcctacaa

SEQ ID NO: 24349 - DNA, 16 bp, synthetic construct
  source 1..16: mol_type = other DNA
ctaggccctgcctaca

SEQ ID NO: 24350 - DNA, 16 bp, synthetic construct
  source 1..16: mol_type = other DNA
tctaggccctgcctac

SEQ ID NO: 24351 - DNA, 16 bp, synthetic construct
  source 1..16: mol_type = other DNA
ttgtctaggccctgcc

SEQ ID NO: 24352 - DNA, 16 bp, synthetic construct
  source 1..16: mol_type = other DNA
cttgtctaggccctgc

SEQ ID NO: 24353 - DNA, 16 bp, synthetic construct
  source 1..16: mol_type = other DNA
acttgtctaggccctg

SEQ ID NO: 24354 - DNA, 16 bp, synthetic construct
  source 1..16: mol_type = other DNA
cacttgtctaggccct

SEQ ID NO: 24355 - DNA, 16 bp, synthetic construct
  source 1..16: mol_type = other DNA
acacttgtctaggccc

SEQ ID NO: 24356 - DNA, 16 bp, synthetic construct
  source 1..16: mol_type = other DNA
aacacttgtctaggcc

SEQ ID NO: 24357 - DNA, 16 bp, synthetic construct
  source 1..16: mol_type = other DNA
gcactgataacctagg

SEQ ID NO: 24358 - DNA, 16 bp, synthetic construct
  source 1..16: mol_type = other DNA
tctgcactgataacct

SEQ ID NO: 24359 - DNA, 16 bp, synthetic construct
  source 1..16: mol_type = other DNA
ctctgcactgataacc

SEQ ID NO: 24360 - DNA, 16 bp, synthetic construct
  source 1..16: mol_type = other DNA
catatctctgcactga

SEQ ID NO: 24361 - DNA, 16 bp, synthetic construct
  source 1..16: mol_type = other DNA
acatatctctgcactg

SEQ ID NO: 24362 - DNA, 16 bp, synthetic construct
  source 1..16: mol_type = other DNA
cacatatctctgcact

SEQ ID NO: 24363 - DNA, 16 bp, synthetic construct
  source 1..16: mol_type = other DNA
tcacatatctctgcac

SEQ ID NO: 24364 - DNA, 16 bp, synthetic construct
  source 1..16: mol_type = other DNA
ctcacatatctctgca

SEQ ID NO: 24365 - DNA, 16 bp, synthetic construct
  source 1..16: mol_type = other DNA
tctcacatatctctgc

SEQ ID NO: 24366 - DNA, 16 bp, synthetic construct
  source 1..16: mol_type = other DNA
cacgggaattctcaca

SEQ ID NO: 24367 - DNA, 16 bp, synthetic construct
  source 1..16: mol_type = other DNA
acacgggaattctcac

SEQ ID NO: 24368 - DNA, 16 bp, synthetic construct
  source 1..16: mol_type = other DNA
cctacacgggaattct

SEQ ID NO: 24369 - DNA, 16 bp, synthetic construct
  source 1..16: mol_type = other DNA
gcctacacgggaattc

SEQ ID NO: 24370 - DNA, 16 bp, synthetic construct
  source 1..16: mol_type = other DNA
tgcctacacgggaatt

SEQ ID NO: 24371 - DNA, 16 bp, synthetic construct
  source 1..16: mol_type = other DNA
ctgcctacacgggaat

SEQ ID NO: 24372 - DNA, 16 bp, synthetic construct
  source 1..16: mol_type = other DNA
tctgcctacacgggaa

SEQ ID NO: 24373 - DNA, 16 bp, synthetic construct
  source 1..16: mol_type = other DNA
ctctgcctacacggga

SEQ ID NO: 24374 - DNA, 16 bp, synthetic construct
  source 1..16: mol_type = other DNA
gctctgcctacacggg

SEQ ID NO: 24375 - DNA, 16 bp, synthetic construct
  source 1..16: mol_type = other DNA
ggctctgcctacacgg

SEQ ID NO: 24376 - DNA, 16 bp, synthetic construct
  source 1..16: mol_type = other DNA
aggctctgcctacacg

SEQ ID NO: 24377 - DNA, 16 bp, synthetic construct
  source 1..16: mol_type = other DNA
taggctctgcctacac

SEQ ID NO: 24378 - DNA, 16 bp, synthetic construct
  source 1..16: mol_type = other DNA
ctaggctctgcctaca

SEQ ID NO: 24379 - DNA, 16 bp, synthetic construct
  source 1..16: mol_type = other DNA
tctaggctctgcctac

SEQ ID NO: 24380 - DNA, 16 bp, synthetic construct
  source 1..16: mol_type = other DNA
gtctaggctctgccta

SEQ ID NO: 24381 - DNA, 16 bp, synthetic construct
  source 1..16: mol_type = other DNA
tgtctaggctctgcct

SEQ ID NO: 24382 - DNA, 16 bp, synthetic construct
  source 1..16: mol_type = other DNA
ttgtctaggctctgcc

SEQ ID NO: 24383 - DNA, 16 bp, synthetic construct
  source 1..16: mol_type = other DNA
cttgtctaggctctgc

SEQ ID NO: 24384 - DNA, 16 bp, synthetic construct
  source 1..16: mol_type = other DNA
acttgtctaggctctg

SEQ ID NO: 24385 - DNA, 16 bp, synthetic construct
  source 1..16: mol_type = other DNA
cacttgtctaggctct

SEQ ID NO: 24386 - DNA, 16 bp, synthetic construct
  source 1..16: mol_type = other DNA
acacttgtctaggctc

SEQ ID NO: 24387 - DNA, 16 bp, synthetic construct
  source 1..16: mol_type = other DNA
aacacttgtctaggct

SEQ ID NO: 24388 - DNA, 16 bp, synthetic construct
  source 1..16: mol_type = other DNA
ggaggctttatgacta

SEQ ID NO: 24389 - DNA, 16 bp, synthetic construct
  source 1..16: mol_type = other DNA
ggaactcttgtctacg

SEQ ID NO: 24390 - DNA, 16 bp, synthetic construct
  source 1..16: mol_type = other DNA
gggaactcttgtctac

SEQ ID NO: 24391 - DNA, 16 bp, synthetic construct
  source 1..16: mol_type = other DNA
agggaactcttgtcta

SEQ ID NO: 24392 - DNA, 16 bp, synthetic construct
  source 1..16: mol_type = other DNA
gagggaactcttgtct

SEQ ID NO: 24393 - DNA, 16 bp, synthetic construct
  source 1..16: mol_type = other DNA
ggagggaactcttgtc

SEQ ID NO: 24394 - DNA, 16 bp, synthetic construct
  source 1..16: mol_type = other DNA
aggagggaactcttgt

SEQ ID NO: 24395 - DNA, 16 bp, synthetic construct
  source 1..16: mol_type = other DNA
gaggagggaactcttg

SEQ ID NO: 24396 - DNA, 16 bp, synthetic construct
  source 1..16: mol_type = other DNA
tgaggagggaactctt

SEQ ID NO: 24397 - DNA, 16 bp, synthetic construct
  source 1..16: mol_type = other DNA
ctgaggagggaactct

SEQ ID NO: 24398 - DNA, 16 bp, synthetic construct
  source 1..16: mol_type = other DNA
cctgaggagggaactc

SEQ ID NO: 24399 - DNA, 16 bp, synthetic construct
  source 1..16: mol_type = other DNA
ccctgaggagggaact

SEQ ID NO: 24400 - DNA, 16 bp, synthetic construct
  source 1..16: mol_type = other DNA
accctgaggagggaac

SEQ ID NO: 24401 - DNA, 16 bp, synthetic construct
  source 1..16: mol_type = other DNA
caccctgaggagggaa

SEQ ID NO: 24402 - DNA, 16 bp, synthetic construct
  source 1..16: mol_type = other DNA
tcaccctgaggaggga

SEQ ID NO: 24403 - DNA, 16 bp, synthetic construct
  source 1..16: mol_type = other DNA
atcaccctgaggaggg

SEQ ID NO: 24404 - DNA, 16 bp, synthetic construct
  source 1..16: mol_type = other DNA
gatcaccctgaggagg

SEQ ID NO: 24405 - DNA, 16 bp, synthetic construct
  source 1..16: mol_type = other DNA
tgatcaccctgaggag

SEQ ID NO: 24406 - DNA, 16 bp, synthetic construct
  source 1..16: mol_type = other DNA
ctgatcaccctgagga

SEQ ID NO: 24407 - DNA, 16 bp, synthetic construct
  source 1..16: mol_type = other DNA
actgatcaccctgagg

SEQ ID NO: 24408 - DNA, 16 bp, synthetic construct
  source 1..16: mol_type = other DNA
cactgatcaccctgag

SEQ ID NO: 24409 - DNA, 16 bp, synthetic construct
  source 1..16: mol_type = other DNA
gcactgatcaccctga

SEQ ID NO: 24410 - DNA, 16 bp, synthetic construct
  source 1..16: mol_type = other DNA
tgcactgatcaccctg

SEQ ID NO: 24411 - DNA, 16 bp, synthetic construct
  source 1..16: mol_type = other DNA
ctgcactgatcaccct

SEQ ID NO: 24412 - DNA, 16 bp, synthetic construct
  source 1..16: mol_type = other DNA
gtgacacatctctgca

SEQ ID NO: 24413 - DNA, 16 bp, synthetic construct
  source 1..16: mol_type = other DNA
tgtgacacatctctgc

SEQ ID NO: 24414 - DNA, 16 bp, synthetic construct
  source 1..16: mol_type = other DNA
ctttgtgacacatctc

SEQ ID NO: 24415 - DNA, 16 bp, synthetic construct
  source 1..16: mol_type = other DNA
gctttgtgacacatct

SEQ ID NO: 24416 - DNA, 16 bp, synthetic construct
  source 1..16: mol_type = other DNA
ggctttgtgacacatc

SEQ ID NO: 24417 - DNA, 16 bp, synthetic construct
  source 1..16: mol_type = other DNA
gggctttgtgacacat

SEQ ID NO: 24418 - DNA, 16 bp, synthetic construct
  source 1..16: mol_type = other DNA
ggggctttgtgacaca

SEQ ID NO: 24419 - DNA, 16 bp, synthetic construct
  source 1..16: mol_type = other DNA
aggggctttgtgacac

SEQ ID NO: 24420 - DNA, 16 bp, synthetic construct
  source 1..16: mol_type = other DNA
caggggctttgtgaca

SEQ ID NO: 24421 - DNA, 16 bp, synthetic construct
  source 1..16: mol_type = other DNA
acaggggctttgtgac

SEQ ID NO: 24422 - DNA, 16 bp, synthetic construct
  source 1..16: mol_type = other DNA
tacaggggctttgtga

SEQ ID NO: 24423 - DNA, 16 bp, synthetic construct
  source 1..16: mol_type = other DNA
ctacaggggctttgtg

SEQ ID NO: 24424 - DNA, 16 bp, synthetic construct
  source 1..16: mol_type = other DNA
cctacaggggctttgt

SEQ ID NO: 24425 - DNA, 16 bp, synthetic construct
  source 1..16: mol_type = other DNA
gcctacaggggctttg

SEQ ID NO: 24426 - DNA, 16 bp, synthetic construct
  source 1..16: mol_type = other DNA
tgcctacaggggcttt

SEQ ID NO: 24427 - DNA, 16 bp, synthetic construct
  source 1..16: mol_type = other DNA
ctgcctacaggggctt

SEQ ID NO: 24428 - DNA, 16 bp, synthetic construct
  source 1..16: mol_type = other DNA
tctgcctacaggggct

SEQ ID NO: 24429 - DNA, 16 bp, synthetic construct
  source 1..16: mol_type = other DNA
ggctctgcctacaggg

SEQ ID NO: 24430 - DNA, 16 bp, synthetic construct
  source 1..16: mol_type = other DNA
aggctctgcctacagg

SEQ ID NO: 24431 - DNA, 16 bp, synthetic construct
  source 1..16: mol_type = other DNA
taggctctgcctacag

SEQ ID NO: 24432 - DNA, 16 bp, synthetic construct
  source 1..16: mol_type = other DNA
tcttgtctaggctctg

SEQ ID NO: 24433 - DNA, 16 bp, synthetic construct
  source 1..16: mol_type = other DNA
ctcttgtctaggctct

SEQ ID NO: 24434 - DNA, 16 bp, synthetic construct
  source 1..16: mol_type = other DNA
actcttgtctaggctc

SEQ ID NO: 24435 - DNA, 16 bp, synthetic construct
  source 1..16: mol_type = other DNA
aactcttgtctaggct

SEQ ID NO: 24436 - DNA, 16 bp, synthetic construct
  source 1..16: mol_type = other DNA
tctgacacatctctga

SEQ ID NO: 24437 - DNA, 16 bp, synthetic construct
  source 1..16: mol_type = other DNA
ttctgacacatctctg

SEQ ID NO: 24438 - DNA, 16 bp, synthetic construct
  source 1..16: mol_type = other DNA
gcattctgacacatct

SEQ ID NO: 24439 - DNA, 16 bp, synthetic construct
  source 1..16: mol_type = other DNA
ggcattctgacacatc

SEQ ID NO: 24440 - DNA, 16 bp, synthetic construct
  source 1..16: mol_type = other DNA
gggcattctgacacat

SEQ ID NO: 24441 - DNA, 16 bp, synthetic construct
  source 1..16: mol_type = other DNA
tgggcattctgacaca

SEQ ID NO: 24442 - DNA, 16 bp, synthetic construct
  source 1..16: mol_type = other DNA
atgggcattctgacac

SEQ ID NO: 24443 - DNA, 16 bp, synthetic construct
  source 1..16: mol_type = other DNA
catgggcattctgaca

SEQ ID NO: 24444 - DNA, 16 bp, synthetic construct
  source 1..16: mol_type = other DNA
acatgggcattctgac

SEQ ID NO: 24445 - DNA, 16 bp, synthetic construct
  source 1..16: mol_type = other DNA
tacatgggcattctga

SEQ ID NO: 24446 - DNA, 16 bp, synthetic construct
  source 1..16: mol_type = other DNA
ctacatgggcattctg

SEQ ID NO: 24447 - DNA, 16 bp, synthetic construct
  source 1..16: mol_type = other DNA
cctacatgggcattct

SEQ ID NO: 24448 - DNA, 16 bp, synthetic construct
  source 1..16: mol_type = other DNA
gcctacatgggcattc

SEQ ID NO: 24449 - DNA, 16 bp, synthetic construct
  source 1..16: mol_type = other DNA
tgcctacatgggcatt

SEQ ID NO: 24450 - DNA, 16 bp, synthetic construct
  source 1..16: mol_type = other DNA
ctgcctacatgggcat

SEQ ID NO: 24451 - DNA, 16 bp, synthetic construct
  source 1..16: mol_type = other DNA
tctgcctacatgggca

SEQ ID NO: 24452 - DNA, 16 bp, synthetic construct
  source 1..16: mol_type = other DNA
atctgcctacatgggc

SEQ ID NO: 24453 - DNA, 16 bp, synthetic construct
  source 1..16: mol_type = other DNA
gatctgcctacatggg

SEQ ID NO: 24454 - DNA, 16 bp, synthetic construct
  source 1..16: mol_type = other DNA
agatctgcctacatgg

SEQ ID NO: 24455 - DNA, 16 bp, synthetic construct
  source 1..16: mol_type = other DNA
tagatctgcctacatg

SEQ ID NO: 24456 - DNA, 16 bp, synthetic construct
  source 1..16: mol_type = other DNA
ttagatctgcctacat

SEQ ID NO: 24457 - DNA, 16 bp, synthetic construct
  source 1..16: mol_type = other DNA
cttagatctgcctaca

SEQ ID NO: 24458 - DNA, 16 bp, synthetic construct
  source 1..16: mol_type = other DNA
tcttagatctgcctac

SEQ ID NO: 24459 - DNA, 16 bp, synthetic construct
  source 1..16: mol_type = other DNA
gtcttagatctgccta

SEQ ID NO: 24460 - DNA, 16 bp, synthetic construct
  source 1..16: mol_type = other DNA
tgtcttagatctgcct

SEQ ID NO: 24461 - DNA, 16 bp, synthetic construct
  source 1..16: mol_type = other DNA
ttgtcttagatctgcc

SEQ ID NO: 24462 - DNA, 16 bp, synthetic construct
  source 1..16: mol_type = other DNA
cttgtcttagatctgc

SEQ ID NO: 24463 - DNA, 16 bp, synthetic construct
  source 1..16: mol_type = other DNA
gcttgtcttagatctg

SEQ ID NO: 24464 - DNA, 16 bp, synthetic construct
  source 1..16: mol_type = other DNA
cgcttgtcttagatct

SEQ ID NO: 24465 - DNA, 16 bp, synthetic construct
  source 1..16: mol_type = other DNA
acgcttgtcttagatc

SEQ ID NO: 24466 - DNA, 16 bp, synthetic construct
  source 1..16: mol_type = other DNA
gacgcttgtcttagat

SEQ ID NO: 24467 - DNA, 16 bp, synthetic construct
  source 1..16: mol_type = other DNA
ggacgcttgtcttaga

SEQ ID NO: 24468 - DNA, 16 bp, synthetic construct
  source 1..16: mol_type = other DNA
tggacgcttgtcttag

SEQ ID NO: 24469 - DNA, 16 bp, synthetic construct
  source 1..16: mol_type = other DNA
atggacgcttgtctta

SEQ ID NO: 24470 - DNA, 16 bp, synthetic construct
  source 1..16: mol_type = other DNA
gatggacgcttgtctt

SEQ ID NO: 24471 - DNA, 16 bp, synthetic construct
  source 1..16: mol_type = other DNA
tgatggacgcttgtct

SEQ ID NO: 24472 - DNA, 16 bp, synthetic construct
  source 1..16: mol_type = other DNA
gtgatggacgcttgtc

SEQ ID NO: 24473 - DNA, 16 bp, synthetic construct
  source 1..16: mol_type = other DNA
ggtgatggacgcttgt

SEQ ID NO: 24474 - DNA, 16 bp, synthetic construct
  source 1..16: mol_type = other DNA
aggtgatggacgcttg

SEQ ID NO: 24475 - DNA, 16 bp, synthetic construct
  source 1..16: mol_type = other DNA
caggtgatggacgctt

SEQ ID NO: 24476 - DNA, 16 bp, synthetic construct
  source 1..16: mol_type = other DNA
ccaggtgatggacgct

SEQ ID NO: 24477 - DNA, 16 bp, synthetic construct
  source 1..16: mol_type = other DNA
cccaggtgatggacgc

SEQ ID NO: 24478 - DNA, 16 bp, synthetic construct
  source 1..16: mol_type = other DNA
acccaggtgatggacg

SEQ ID NO: 24479 - DNA, 16 bp, synthetic construct
  source 1..16: mol_type = other DNA
cacccaggtgatggac

SEQ ID NO: 24480 - DNA, 16 bp, synthetic construct
  source 1..16: mol_type = other DNA
tcacccaggtgatgga

SEQ ID NO: 24481 - DNA, 16 bp, synthetic construct
  source 1..16: mol_type = other DNA
atcacccaggtgatgg

SEQ ID NO: 24482 - DNA, 16 bp, synthetic construct
  source 1..16: mol_type = other DNA
tacatatctctgcact

SEQ ID NO: 24483 - DNA, 16 bp, synthetic construct
  source 1..16: mol_type = other DNA
gtacatatctctgcac

SEQ ID NO: 24484 - DNA, 16 bp, synthetic construct
  source 1..16: mol_type = other DNA
ggtacatatctctgca

SEQ ID NO: 24485 - DNA, 16 bp, synthetic construct
  source 1..16: mol_type = other DNA
tggtacatatctctgc

SEQ ID NO: 24486 - DNA, 16 bp, synthetic construct
  source 1..16: mol_type = other DNA
actggtacatatctct

SEQ ID NO: 24487 - DNA, 16 bp, synthetic construct
  source 1..16: mol_type = other DNA
gggacactggtacata

SEQ ID NO: 24488 - DNA, 16 bp, synthetic construct
  source 1..16: mol_type = other DNA
ggggacactggtacat

SEQ ID NO: 24489 - DNA, 16 bp, synthetic construct
  source 1..16: mol_type = other DNA
aggggacactggtaca

SEQ ID NO: 24490 - DNA, 16 bp, synthetic construct
  source 1..16: mol_type = other DNA
caggggacactggtac

SEQ ID NO: 24491 - DNA, 16 bp, synthetic construct
  source 1..16: mol_type = other DNA
acaggggacactggta

SEQ ID NO: 24492 - DNA, 16 bp, synthetic construct
  source 1..16: mol_type = other DNA
tacaggggacactggt

SEQ ID NO: 24493 - DNA, 16 bp, synthetic construct
  source 1..16: mol_type = other DNA
ctacaggggacactgg

SEQ ID NO: 24494 - DNA, 16 bp, synthetic construct
  source 1..16: mol_type = other DNA
cctacaggggacactg

SEQ ID NO: 24495 - DNA, 16 bp, synthetic construct
  source 1..16: mol_type = other DNA
gcctacaggggacact

SEQ ID NO: 24496 - DNA, 16 bp, synthetic construct
  source 1..16: mol_type = other DNA
tgcctacaggggacac

SEQ ID NO: 24497 - DNA, 16 bp, synthetic construct
  source 1..16: mol_type = other DNA
ctgcctacaggggaca

SEQ ID NO: 24498 - DNA, 16 bp, synthetic construct
  source 1..16: mol_type = other DNA
actgcctacaggggac

SEQ ID NO: 24499 - DNA, 16 bp, synthetic construct
  source 1..16: mol_type = other DNA
cactgcctacagggga

SEQ ID NO: 24500 - DNA, 16 bp, synthetic construct
  source 1..16: mol_type = other DNA
gcactgcctacagggg

SEQ ID NO: 24501 - DNA, 16 bp, synthetic construct
  source 1..16: mol_type = other DNA
ggcactgcctacaggg

SEQ ID NO: 24502 - DNA, 16 bp, synthetic construct
  source 1..16: mol_type = other DNA
aggcactgcctacagg

SEQ ID NO: 24503 - DNA, 16 bp, synthetic construct
  source 1..16: mol_type = other DNA
taggcactgcctacag

SEQ ID NO: 24504 - DNA, 16 bp, synthetic construct
  source 1..16: mol_type = other DNA
ctaggcactgcctaca

SEQ ID NO: 24505 - DNA, 16 bp, synthetic construct
  source 1..16: mol_type = other DNA
tctaggcactgcctac

SEQ ID NO: 24506 - DNA, 16 bp, synthetic construct
  source 1..16: mol_type = other DNA
gtctaggcactgccta

SEQ ID NO: 24507 - DNA, 16 bp, synthetic construct
  source 1..16: mol_type = other DNA
tgtctaggcactgcct

SEQ ID NO: 24508 - DNA, 16 bp, synthetic construct
  source 1..16: mol_type = other DNA
ttgtctaggcactgcc

SEQ ID NO: 24509 - DNA, 16 bp, synthetic construct
  source 1..16: mol_type = other DNA
cttgtctaggcactgc

SEQ ID NO: 24510 - DNA, 16 bp, synthetic construct
  source 1..16: mol_type = other DNA
tcttgtctaggcactg

SEQ ID NO: 24511 - DNA, 16 bp, synthetic construct
  source 1..16: mol_type = other DNA
ctcttgtctaggcact

SEQ ID NO: 24512 - DNA, 16 bp, synthetic construct
  source 1..16: mol_type = other DNA
actcttgtctaggcac

SEQ ID NO: 24513 - DNA, 16 bp, synthetic construct
  source 1..16: mol_type = other DNA
aactcttgtctaggca

SEQ ID NO: 24514 - DNA, 16 bp, synthetic construct
  source 1..16: mol_type = other DNA
caactcttgtctaggc

SEQ ID NO: 24515 - DNA, 16 bp, synthetic construct
  source 1..16: mol_type = other DNA
tcaactcttgtctagg

SEQ ID NO: 24516 - DNA, 16 bp, synthetic construct
  source 1..16: mol_type = other DNA
gaggtgattcaactct

SEQ ID NO: 24517 - DNA, 16 bp, synthetic construct
  source 1..16: mol_type = other DNA
tctctgaggtgattca

SEQ ID NO: 24518 - DNA, 16 bp, synthetic construct
  source 1..16: mol_type = other DNA
atctctgaggtgattc

SEQ ID NO: 24519 - DNA, 16 bp, synthetic construct
  source 1..16: mol_type = other DNA
gatctctgaggtgatt

SEQ ID NO: 24520 - DNA, 16 bp, synthetic construct
  source 1..16: mol_type = other DNA
tgatctctgaggtgat

SEQ ID NO: 24521 - DNA, 16 bp, synthetic construct
  source 1..16: mol_type = other DNA
ctgatctctgaggtga

SEQ ID NO: 24522 - DNA, 16 bp, synthetic construct
  source 1..16: mol_type = other DNA
actgatctctgaggtg

SEQ ID NO: 24523 - DNA, 16 bp, synthetic construct
  source 1..16: mol_type = other DNA
cactgatctctgaggt

SEQ ID NO: 24524 - DNA, 16 bp, synthetic construct
  source 1..16: mol_type = other DNA
gcactgatctctgagg

SEQ ID NO: 24525 - DNA, 16 bp, synthetic construct
  source 1..16: mol_type = other DNA
tgcactgatctctgag

SEQ ID NO: 24526 - DNA, 16 bp, synthetic construct
  source 1..16: mol_type = other DNA
atgcactgatctctga

SEQ ID NO: 24527 - DNA, 16 bp, synthetic construct
  source 1..16: mol_type = other DNA
tatgcactgatctctg

SEQ ID NO: 24528 - DNA, 16 bp, synthetic construct
  source 1..16: mol_type = other DNA
ctatgcactgatctct

SEQ ID NO: 24529 - DNA, 16 bp, synthetic construct
  source 1..16: mol_type = other DNA
tctatgcactgatctc

SEQ ID NO: 24530 - DNA, 16 bp, synthetic construct
  source 1..16: mol_type = other DNA
atctatgcactgatct

SEQ ID NO: 24531 - DNA, 16 bp, synthetic construct
  source 1..16: mol_type = other DNA
gctttgtgacatatct

SEQ ID NO: 24532 - DNA, 16 bp, synthetic construct
  source 1..16: mol_type = other DNA
ggctttgtgacatatc

SEQ ID NO: 24533 - DNA, 16 bp, synthetic construct
  source 1..16: mol_type = other DNA
gaaggctttgtgacat

SEQ ID NO: 24534 - DNA, 16 bp, synthetic construct
  source 1..16: mol_type = other DNA
agaaggctttgtgaca

SEQ ID NO: 24535 - DNA, 16 bp, synthetic construct
  source 1..16: mol_type = other DNA
cagaaggctttgtgac

SEQ ID NO: 24536 - DNA, 16 bp, synthetic construct
  source 1..16: mol_type = other DNA
acagaaggctttgtga

SEQ ID NO: 24537 - DNA, 16 bp, synthetic construct
  source 1..16: mol_type = other DNA
ctacagaaggctttgt

SEQ ID NO: 24538 - DNA, 16 bp, synthetic construct
  source 1..16: mol_type = other DNA
cctacagaaggctttg

SEQ ID NO: 24539 - DNA, 16 bp, synthetic construct
  source 1..16: mol_type = other DNA
gcctacagaaggcttt

SEQ ID NO: 24540 - DNA, 16 bp, synthetic construct
  source 1..16: mol_type = other DNA
tgcctacagaaggctt

SEQ ID NO: 24541 - DNA, 16 bp, synthetic construct
  source 1..16: mol_type = other DNA
ttgcctacagaaggct

SEQ ID NO: 24542 - DNA, 16 bp, synthetic construct
  source 1..16: mol_type = other DNA
tttgcctacagaaggc

SEQ ID NO: 24543 - DNA, 16 bp, synthetic construct
  source 1..16: mol_type = other DNA
ctttgcctacagaagg

SEQ ID NO: 24544 - DNA, 16 bp, synthetic construct
  source 1..16: mol_type = other DNA
gctttgcctacagaag

SEQ ID NO: 24545 - DNA, 16 bp, synthetic construct
  source 1..16: mol_type = other DNA
ggctttgcctacagaa

SEQ ID NO: 24546 - DNA, 16 bp, synthetic construct
  source 1..16: mol_type = other DNA
gggctttgcctacaga

SEQ ID NO: 24547 - DNA, 16 bp, synthetic construct
  source 1..16: mol_type = other DNA
tgggctttgcctacag

SEQ ID NO: 24548 - DNA, 16 bp, synthetic construct
  source 1..16: mol_type = other DNA
atgggctttgcctaca

SEQ ID NO: 24549 - DNA, 16 bp, synthetic construct
  source 1..16: mol_type = other DNA
tatgggctttgcctac

SEQ ID NO: 24550 - DNA, 16 bp, synthetic construct
  source 1..16: mol_type = other DNA
gtatgggctttgccta

SEQ ID NO: 24551 - DNA, 16 bp, synthetic construct
  source 1..16: mol_type = other DNA
tgtatgggctttgcct

SEQ ID NO: 24552 - DNA, 16 bp, synthetic construct
  source 1..16: mol_type = other DNA
ttgtatgggctttgcc

SEQ ID NO: 24553 - DNA, 16 bp, synthetic construct
  source 1..16: mol_type = other DNA
cttgtatgggctttgc

SEQ ID NO: 24554 - DNA, 16 bp, synthetic construct
  source 1..16: mol_type = other DNA
ccttgtatgggctttg

SEQ ID NO: 24555 - DNA, 16 bp, synthetic construct
  source 1..16: mol_type = other DNA
accttgtatgggcttt

SEQ ID NO: 24556 - DNA, 16 bp, synthetic construct
  source 1..16: mol_type = other DNA
aaccttgtatgggctt

SEQ ID NO: 24557 - DNA, 16 bp, synthetic construct
  source 1..16: mol_type = other DNA
aaaccttgtatgggct

SEQ ID NO: 24558 - DNA, 16 bp, synthetic construct
  source 1..16: mol_type = other DNA
cacctaggtgatctaa

SEQ ID NO: 24559 - DNA, 16 bp, synthetic construct
  source 1..16: mol_type = other DNA
tcacctaggtgatcta

SEQ ID NO: 24560 - DNA, 16 bp, synthetic construct
  source 1..16: mol_type = other DNA
atcacctaggtgatct

SEQ ID NO: 24561 - DNA, 16 bp, synthetic construct
  source 1..16: mol_type = other DNA
gatcacctaggtgatc

SEQ ID NO: 24562 - DNA, 16 bp, synthetic construct
  source 1..16: mol_type = other DNA
tgatcacctaggtgat

SEQ ID NO: 24563 - DNA, 16 bp, synthetic construct
  source 1..16: mol_type = other DNA
ctgatcacctaggtga

SEQ ID NO: 24564 - DNA, 16 bp, synthetic construct
  source 1..16: mol_type = other DNA
actgatcacctaggtg

SEQ ID NO: 24565 - DNA, 16 bp, synthetic construct
  source 1..16: mol_type = other DNA
cactgatcacctaggt

SEQ ID NO: 24566 - DNA, 16 bp, synthetic construct
  source 1..16: mol_type = other DNA
gcactgatcacctagg

SEQ ID NO: 24567 - DNA, 16 bp, synthetic construct
  source 1..16: mol_type = other DNA
tgcactgatcacctag

SEQ ID NO: 24568 - DNA, 16 bp, synthetic construct
  source 1..16: mol_type = other DNA
ctgcactgatcaccta

SEQ ID NO: 24569 - DNA, 16 bp, synthetic construct
  source 1..16: mol_type = other DNA
actgcactgatcacct

SEQ ID NO: 24570 - DNA, 16 bp, synthetic construct
  source 1..16: mol_type = other DNA
cactgcactgatcacc

SEQ ID NO: 24571 - DNA, 16 bp, synthetic construct
  source 1..16: mol_type = other DNA
tcactgcactgatcac

SEQ ID NO: 24572 - DNA, 16 bp, synthetic construct
  source 1..16: mol_type = other DNA
atcactgcactgatca

SEQ ID NO: 24573 - DNA, 16 bp, synthetic construct
  source 1..16: mol_type = other DNA
tatcactgcactgatc

SEQ ID NO: 24574 - DNA, 16 bp, synthetic construct
  source 1..16: mol_type = other DNA
catatcactgcactga

SEQ ID NO: 24575 - DNA, 16 bp, synthetic construct
  source 1..16: mol_type = other DNA
gacatatcactgcact

SEQ ID NO: 24576 - DNA, 16 bp, synthetic construct
  source 1..16: mol_type = other DNA
gtgacatatcactgca

SEQ ID NO: 24577 - DNA, 16 bp, synthetic construct
  source 1..16: mol_type = other DNA
gtctacagggattttt

SEQ ID NO: 24578 - DNA, 16 bp, synthetic construct
  source 1..16: mol_type = other DNA
tgtctacagggatttt

SEQ ID NO: 24579 - DNA, 16 bp, synthetic construct
  source 1..16: mol_type = other DNA
ctgtctacagggattt

SEQ ID NO: 24580 - DNA, 16 bp, synthetic construct
  source 1..16: mol_type = other DNA
tctgtctacagggatt

SEQ ID NO: 24581 - DNA, 16 bp, synthetic construct
  source 1..16: mol_type = other DNA
ctctgtctacagggat

SEQ ID NO: 24582 - DNA, 16 bp, synthetic construct
  source 1..16: mol_type = other DNA
gctctgtctacaggga

SEQ ID NO: 24583 - DNA, 16 bp, synthetic construct
  source 1..16: mol_type = other DNA
ggctctgtctacaggg

SEQ ID NO: 24584 - DNA, 16 bp, synthetic construct
  source 1..16: mol_type = other DNA
aggctctgtctacagg

SEQ ID NO: 24585 - DNA, 16 bp, synthetic construct
  source 1..16: mol_type = other DNA
taggctctgtctacag

SEQ ID NO: 24586 - DNA, 16 bp, synthetic construct
  source 1..16: mol_type = other DNA
cttgtctaggctctgt

SEQ ID NO: 24587 - DNA, 16 bp, synthetic construct
  source 1..16: mol_type = other DNA
taactcttgtctaggc

SEQ ID NO: 24588 - DNA, 16 bp, synthetic construct
  source 1..16: mol_type = other DNA
ccaggtgaagtaactc

SEQ ID NO: 24589 - DNA, 16 bp, synthetic construct
  source 1..16: mol_type = other DNA
cccaggtgaagtaact

SEQ ID NO: 24590 - DNA, 16 bp, synthetic construct
  source 1..16: mol_type = other DNA
acccaggtgaagtaac

SEQ ID NO: 24591 - DNA, 16 bp, synthetic construct
  source 1..16: mol_type = other DNA
cacccaggtgaagtaa

SEQ ID NO: 24592 - DNA, 16 bp, synthetic construct
  source 1..16: mol_type = other DNA
tcacccaggtgaagta

SEQ ID NO: 24593 - DNA, 16 bp, synthetic construct
  source 1..16: mol_type = other DNA
atcacccaggtgaagt

SEQ ID NO: 24594 - DNA, 16 bp, synthetic construct
  source 1..16: mol_type = other DNA
gatcacccaggtgaag

SEQ ID NO: 24595 - DNA, 16 bp, synthetic construct
  source 1..16: mol_type = other DNA
tgatcacccaggtgaa

SEQ ID NO: 24596 - DNA, 16 bp, synthetic construct
  source 1..16: mol_type = other DNA
tatctgcactgatcac

SEQ ID NO: 24597 - DNA, 16 bp, synthetic construct
  source 1..16: mol_type = other DNA
gggcattgtgtcaaat

SEQ ID NO: 24598 - DNA, 16 bp, synthetic construct
  source 1..16: mol_type = other DNA
ggggcattgtgtcaaa

SEQ ID NO: 24599 - DNA, 16 bp, synthetic construct
  source 1..16: mol_type = other DNA
gggggcattgtgtcaa

SEQ ID NO: 24600 - DNA, 16 bp, synthetic construct
  source 1..16: mol_type = other DNA
tgggggcattgtgtca

SEQ ID NO: 24601 - DNA, 16 bp, synthetic construct
  source 1..16: mol_type = other DNA
atgggggcattgtgtc

SEQ ID NO: 24602 - DNA, 16 bp, synthetic construct
  source 1..16: mol_type = other DNA
tatgggggcattgtgt

SEQ ID NO: 24603 - DNA, 16 bp, synthetic construct
  source 1..16: mol_type = other DNA
ctatgggggcattgtg

SEQ ID NO: 24604 - DNA, 16 bp, synthetic construct
  source 1..16: mol_type = other DNA
tctatgggggcattgt

SEQ ID NO: 24605 - DNA, 16 bp, synthetic construct
  source 1..16: mol_type = other DNA
gtctatgggggcattg

SEQ ID NO: 24606 - DNA, 16 bp, synthetic construct
  source 1..16: mol_type = other DNA
tgtctatgggggcatt

SEQ ID NO: 24607 - DNA, 16 bp, synthetic construct
  source 1..16: mol_type = other DNA
ctgtctatgggggcat

SEQ ID NO: 24608 - DNA, 16 bp, synthetic construct
  source 1..16: mol_type = other DNA
tctgtctatgggggca

SEQ ID NO: 24609 - DNA, 16 bp, synthetic construct
  source 1..16: mol_type = other DNA
ctctgtctatgggggc

SEQ ID NO: 24610 - DNA, 16 bp, synthetic construct
  source 1..16: mol_type = other DNA
gctctgtctatggggg

SEQ ID NO: 24611 - DNA, 16 bp, synthetic construct
  source 1..16: mol_type = other DNA
ggctctgtctatgggg

SEQ ID NO: 24612 - DNA, 16 bp, synthetic construct
  source 1..16: mol_type = other DNA
aggctctgtctatggg

SEQ ID NO: 24613 - DNA, 16 bp, synthetic construct
  source 1..16: mol_type = other DNA
taggctctgtctatgg

SEQ ID NO: 24614 - DNA, 16 bp, synthetic construct
  source 1..16: mol_type = other DNA
ctaggctctgtctatg

SEQ ID NO: 24615 - DNA, 16 bp, synthetic construct
  source 1..16: mol_type = other DNA
cctaggctctgtctat

SEQ ID NO: 24616 - DNA, 16 bp, synthetic construct
  source 1..16: mol_type = other DNA
gcctaggctctgtcta

SEQ ID NO: 24617 - DNA, 16 bp, synthetic construct
  source 1..16: mol_type = other DNA
tgcctaggctctgtct

SEQ ID NO: 24618 - DNA, 16 bp, synthetic construct
  source 1..16: mol_type = other DNA
ttgcctaggctctgtc

SEQ ID NO: 24619 - DNA, 16 bp, synthetic construct
  source 1..16: mol_type = other DNA
cttgcctaggctctgt

SEQ ID NO: 24620 - DNA, 16 bp, synthetic construct
  source 1..16: mol_type = other DNA
tcttgcctaggctctg

SEQ ID NO: 24621 - DNA, 16 bp, synthetic construct
  source 1..16: mol_type = other DNA
gtcttgcctaggctct

SEQ ID NO: 24622 - DNA, 16 bp, synthetic construct
  source 1..16: mol_type = other DNA
agtcttgcctaggctc

SEQ ID NO: 24623 - DNA, 16 bp, synthetic construct
  source 1..16: mol_type = other DNA
aagtcttgcctaggct

SEQ ID NO: 24624 - DNA, 16 bp, synthetic construct
  source 1..16: mol_type = other DNA
gaagtcttgcctaggc

SEQ ID NO: 24625 - DNA, 16 bp, synthetic construct
  source 1..16: mol_type = other DNA
ggaagtcttgcctagg

SEQ ID NO: 24626 - DNA, 16 bp, synthetic construct
  source 1..16: mol_type = other DNA
tggaagtcttgcctag

SEQ ID NO: 24627 - DNA, 16 bp, synthetic construct
  source 1..16: mol_type = other DNA
atggaagtcttgccta

SEQ ID NO: 24628 - DNA, 16 bp, synthetic construct
  source 1..16: mol_type = other DNA
gatggaagtcttgcct

SEQ ID NO: 24629 - DNA, 16 bp, synthetic construct
  source 1..16: mol_type = other DNA
tgatggaagtcttgcc

SEQ ID NO: 24630 - DNA, 16 bp, synthetic construct
  source 1..16: mol_type = other DNA
gtgatggaagtcttgc

SEQ ID NO: 24631 - DNA, 16 bp, synthetic construct
  source 1..16: mol_type = other DNA
ggtgatggaagtcttg

SEQ ID NO: 24632 - DNA, 16 bp, synthetic construct
  source 1..16: mol_type = other DNA
aggtgatggaagtctt

SEQ ID NO: 24633 - DNA, 16 bp, synthetic construct
  source 1..16: mol_type = other DNA
caggtgatggaagtct

SEQ ID NO: 24634 - DNA, 16 bp, synthetic construct
  source 1..16: mol_type = other DNA
ccaggtgatggaagtc

SEQ ID NO: 24635 - DNA, 16 bp, synthetic construct
  source 1..16: mol_type = other DNA
cccaggtgatggaagt

SEQ ID NO: 24636 - DNA, 16 bp, synthetic construct
  source 1..16: mol_type = other DNA
acccaggtgatggaag

SEQ ID NO: 24637 - DNA, 16 bp, synthetic construct
  source 1..16: mol_type = other DNA
cacccaggtgatggaa

SEQ ID NO: 24638 - DNA, 16 bp, synthetic construct
  source 1..16: mol_type = other DNA
ggggatttgtgacata

SEQ ID NO: 24639 - DNA, 16 bp, synthetic construct
  source 1..16: mol_type = other DNA
gggggatttgtgacat

SEQ ID NO: 24640 - DNA, 16 bp, synthetic construct
  source 1..16: mol_type = other DNA
agggggatttgtgaca

SEQ ID NO: 24641 - DNA, 16 bp, synthetic construct
  source 1..16: mol_type = other DNA
gagggggatttgtgac

SEQ ID NO: 24642 - DNA, 16 bp, synthetic construct
  source 1..16: mol_type = other DNA
agagggggatttgtga

SEQ ID NO: 24643 - DNA, 16 bp, synthetic construct
  source 1..16: mol_type = other DNA
tagagggggatttgtg

SEQ ID NO: 24644 - DNA, 16 bp, synthetic construct
  source 1..16: mol_type = other DNA
ctagagggggatttgt

SEQ ID NO: 24645 - DNA, 16 bp, synthetic construct
  source 1..16: mol_type = other DNA
cctagagggggatttg

SEQ ID NO: 24646 - DNA, 16 bp, synthetic construct
  source 1..16: mol_type = other DNA
gcctagagggggattt

SEQ ID NO: 24647 - DNA, 16 bp, synthetic construct
  source 1..16: mol_type = other DNA
tgcctagagggggatt

SEQ ID NO: 24648 - DNA, 16 bp, synthetic construct
  source 1..16: mol_type = other DNA
ctgcctagagggggat

SEQ ID NO: 24649 - DNA, 16 bp, synthetic construct
  source 1..16: mol_type = other DNA
tctgcctagaggggga

SEQ ID NO: 24650 - DNA, 16 bp, synthetic construct
  source 1..16: mol_type = other DNA
ctctgcctagaggggg

SEQ ID NO: 24651 - DNA, 16 bp, synthetic construct
  source 1..16: mol_type = other DNA
actctgcctagagggg

SEQ ID NO: 24652 - DNA, 16 bp, synthetic construct
  source 1..16: mol_type = other DNA
tactctgcctagaggg

SEQ ID NO: 24653 - DNA, 16 bp, synthetic construct
  source 1..16: mol_type = other DNA
atactctgcctagagg

SEQ ID NO: 24654 - DNA, 16 bp, synthetic construct
  source 1..16: mol_type = other DNA
tatactctgcctagag

SEQ ID NO: 24655 - DNA, 16 bp, synthetic construct
  source 1..16: mol_type = other DNA
ctatactctgcctaga

SEQ ID NO: 24656 - DNA, 16 bp, synthetic construct
  source 1..16: mol_type = other DNA
tctatactctgcctag

SEQ ID NO: 24657 - DNA, 16 bp, synthetic construct
  source 1..16: mol_type = other DNA
ctctatactctgccta

SEQ ID NO: 24658 - DNA, 16 bp, synthetic construct
  source 1..16: mol_type = other DNA
tctctatactctgcct

SEQ ID NO: 24659 - DNA, 16 bp, synthetic construct
  source 1..16: mol_type = other DNA
ttctctatactctgcc

SEQ ID NO: 24660 - DNA, 16 bp, synthetic construct
  source 1..16: mol_type = other DNA
cttctctatactctgc

SEQ ID NO: 24661 - DNA, 16 bp, synthetic construct
  source 1..16: mol_type = other DNA
ctcttctctatactct

SEQ ID NO: 24662 - DNA, 16 bp, synthetic construct
  source 1..16: mol_type = other DNA
gactcttctctatact

SEQ ID NO: 24663 - DNA, 16 bp, synthetic construct
  source 1..16: mol_type = other DNA
ggactcttctctatac

SEQ ID NO: 24664 - DNA, 16 bp, synthetic construct
  source 1..16: mol_type = other DNA
gggactcttctctata

SEQ ID NO: 24665 - DNA, 16 bp, synthetic construct
  source 1..16: mol_type = other DNA
tgggactcttctctat

SEQ ID NO: 24666 - DNA, 16 bp, synthetic construct
  source 1..16: mol_type = other DNA
atgggactcttctcta

SEQ ID NO: 24667 - DNA, 16 bp, synthetic construct
  source 1..16: mol_type = other DNA
gatgggactcttctct

SEQ ID NO: 24668 - DNA, 16 bp, synthetic construct
  source 1..16: mol_type = other DNA
tgatgggactcttctc

SEQ ID NO: 24669 - DNA, 16 bp, synthetic construct
  source 1..16: mol_type = other DNA
gtgatgggactcttct

SEQ ID NO: 24670 - DNA, 16 bp, synthetic construct
  source 1..16: mol_type = other DNA
ggtgatgggactcttc

SEQ ID NO: 24671 - DNA, 16 bp, synthetic construct
  source 1..16: mol_type = other DNA
aggtgatgggactctt

SEQ ID NO: 24672 - DNA, 16 bp, synthetic construct
  source 1..16: mol_type = other DNA
caggtgatgggactct

SEQ ID NO: 24673 - DNA, 16 bp, synthetic construct
  source 1..16: mol_type = other DNA
ccaggtgatgggactc

SEQ ID NO: 24674 - DNA, 16 bp, synthetic construct
  source 1..16: mol_type = other DNA
cccaggtgatgggact

SEQ ID NO: 24675 - DNA, 16 bp, synthetic construct
  source 1..16: mol_type = other DNA
acccaggtgatgggac

SEQ ID NO: 24676 - DNA, 16 bp, synthetic construct
  source 1..16: mol_type = other DNA
cacccaggtgatggga

SEQ ID NO: 24677 - DNA, 16 bp, synthetic construct
  source 1..16: mol_type = other DNA
tcacccaggtgatggg

SEQ ID NO: 24678 - DNA, 16 bp, synthetic construct
  source 1..16: mol_type = other DNA
caggggacattgtgaa

SEQ ID NO: 24679 - DNA, 16 bp, synthetic construct
  source 1..16: mol_type = other DNA
acaggggacattgtga

SEQ ID NO: 24680 - DNA, 16 bp, synthetic construct
  source 1..16: mol_type = other DNA
tacaggggacattgtg

SEQ ID NO: 24681 - DNA, 16 bp, synthetic construct
  source 1..16: mol_type = other DNA
ctacaggggacattgt

SEQ ID NO: 24682 - DNA, 16 bp, synthetic construct
  source 1..16: mol_type = other DNA
cctacaggggacattg

SEQ ID NO: 24683 - DNA, 16 bp, synthetic construct
  source 1..16: mol_type = other DNA
gcctacaggggacatt

SEQ ID NO: 24684 - DNA, 16 bp, synthetic construct
  source 1..16: mol_type = other DNA
tgcctacaggggacat

SEQ ID NO: 24685 - DNA, 16 bp, synthetic construct
  source 1..16: mol_type = other DNA
tctgcctacaggggac

SEQ ID NO: 24686 - DNA, 16 bp, synthetic construct
  source 1..16: mol_type = other DNA
ctctgcctacagggga

SEQ ID NO: 24687 - DNA, 16 bp, synthetic construct
  source 1..16: mol_type = other DNA
tctctgcctacagggg

SEQ ID NO: 24688 - DNA, 16 bp, synthetic construct
  source 1..16: mol_type = other DNA
ctctctgcctacaggg

SEQ ID NO: 24689 - DNA, 16 bp, synthetic construct
  source 1..16: mol_type = other DNA
actctctgcctacagg

SEQ ID NO: 24690 - DNA, 16 bp, synthetic construct
  source 1..16: mol_type = other DNA
cactctctgcctacag

SEQ ID NO: 24691 - DNA, 16 bp, synthetic construct
  source 1..16: mol_type = other DNA
ccactctctgcctaca

SEQ ID NO: 24692 - DNA, 16 bp, synthetic construct
  source 1..16: mol_type = other DNA
tccactctctgcctac

SEQ ID NO: 24693 - DNA, 16 bp, synthetic construct
  source 1..16: mol_type = other DNA
gtccactctctgccta

SEQ ID NO: 24694 - DNA, 16 bp, synthetic construct
  source 1..16: mol_type = other DNA
tgtccactctctgcct

SEQ ID NO: 24695 - DNA, 16 bp, synthetic construct
  source 1..16: mol_type = other DNA
ttgtccactctctgcc

SEQ ID NO: 24696 - DNA, 16 bp, synthetic construct
  source 1..16: mol_type = other DNA
cttgtccactctctgc

SEQ ID NO: 24697 - DNA, 16 bp, synthetic construct
  source 1..16: mol_type = other DNA
tcttgtccactctctg

SEQ ID NO: 24698 - DNA, 16 bp, synthetic construct
  source 1..16: mol_type = other DNA
ctcttgtccactctct

SEQ ID NO: 24699 - DNA, 16 bp, synthetic construct
  source 1..16: mol_type = other DNA
actcttgtccactctc

SEQ ID NO: 24700 - DNA, 16 bp, synthetic construct
  source 1..16: mol_type = other DNA
aactcttgtccactct

SEQ ID NO: 24701 - DNA, 16 bp, synthetic construct
  source 1..16: mol_type = other DNA
taactcttgtccactc

SEQ ID NO: 24702 - DNA, 16 bp, synthetic construct
  source 1..16: mol_type = other DNA
gtaactcttgtccact

SEQ ID NO: 24703 - DNA, 16 bp, synthetic construct
  source 1..16: mol_type = other DNA
tgtaactcttgtccac

SEQ ID NO: 24704 - DNA, 16 bp, synthetic construct
  source 1..16: mol_type = other DNA
atgtaactcttgtcca

SEQ ID NO: 24705 - DNA, 16 bp, synthetic construct
  source 1..16: mol_type = other DNA
gatgtaactcttgtcc

SEQ ID NO: 24706 - DNA, 16 bp, synthetic construct
  source 1..16: mol_type = other DNA
atcatctaggtgatgt

SEQ ID NO: 24707 - DNA, 16 bp, synthetic construct
  source 1..16: mol_type = other DNA
cagatcatctaggtga

SEQ ID NO: 24708 - DNA, 16 bp, synthetic construct
  source 1..16: mol_type = other DNA
cacagatcatctaggt

SEQ ID NO: 24709 - DNA, 16 bp, synthetic construct
  source 1..16: mol_type = other DNA
gcacagatcatctagg

SEQ ID NO: 24710 - DNA, 16 bp, synthetic construct
  source 1..16: mol_type = other DNA
ctgcacagatcatcta

SEQ ID NO: 24711 - DNA, 16 bp, synthetic construct
  source 1..16: mol_type = other DNA
tctgcacagatcatct

SEQ ID NO: 24712 - DNA, 16 bp, synthetic construct
  source 1..16: mol_type = other DNA
ctctgcacagatcatc

SEQ ID NO: 24713 - DNA, 16 bp, synthetic construct
  source 1..16: mol_type = other DNA
gctctgcacagatcat

SEQ ID NO: 24714 - DNA, 16 bp, synthetic construct
  source 1..16: mol_type = other DNA
agctctgcacagatca

SEQ ID NO: 24715 - DNA, 16 bp, synthetic construct
  source 1..16: mol_type = other DNA
tagctctgcacagatc

SEQ ID NO: 24716 - DNA, 16 bp, synthetic construct
  source 1..16: mol_type = other DNA
atagctctgcacagat

SEQ ID NO: 24717 - DNA, 16 bp, synthetic construct
  source 1..16: mol_type = other DNA
catagctctgcacaga

SEQ ID NO: 24718 - DNA, 16 bp, synthetic construct
  source 1..16: mol_type = other DNA
acatagctctgcacag

SEQ ID NO: 24719 - DNA, 16 bp, synthetic construct
  source 1..16: mol_type = other DNA
gacatagctctgcaca

SEQ ID NO: 24720 - DNA, 16 bp, synthetic construct
  source 1..16: mol_type = other DNA
tgacatagctctgcac

SEQ ID NO: 24721 - DNA, 16 bp, synthetic construct
  source 1..16: mol_type = other DNA
ttgacatagctctgca

SEQ ID NO: 24722 - DNA, 16 bp, synthetic construct
  source 1..16: mol_type = other DNA
tttgacatagctctgc

SEQ ID NO: 24723 - DNA, 16 bp, synthetic construct
  source 1..16: mol_type = other DNA
gttttgacatagctct

SEQ ID NO: 24724 - DNA, 16 bp, synthetic construct
  source 1..16: mol_type = other DNA
gcgttttgacatagct

SEQ ID NO: 24725 - DNA, 16 bp, synthetic construct
  source 1..16: mol_type = other DNA
ggcgttttgacatagc

SEQ ID NO: 24726 - DNA, 16 bp, synthetic construct
  source 1..16: mol_type = other DNA
gggcgttttgacatag

SEQ ID NO: 24727 - DNA, 16 bp, synthetic construct
  source 1..16: mol_type = other DNA
ggggcgttttgacata

SEQ ID NO: 24728 - DNA, 16 bp, synthetic construct
  source 1..16: mol_type = other DNA
aggggcgttttgacat

SEQ ID NO: 24729 - DNA, 16 bp, synthetic construct
  source 1..16: mol_type = other DNA
caggggcgttttgaca

SEQ ID NO: 24730 - DNA, 16 bp, synthetic construct
  source 1..16: mol_type = other DNA
acaggggcgttttgac

SEQ ID NO: 24731 - DNA, 16 bp, synthetic construct
  source 1..16: mol_type = other DNA
tacaggggcgttttga

SEQ ID NO: 24732 - DNA, 16 bp, synthetic construct
  source 1..16: mol_type = other DNA
ctacaggggcgttttg

SEQ ID NO: 24733 - DNA, 16 bp, synthetic construct
  source 1..16: mol_type = other DNA
cctacaggggcgtttt

SEQ ID NO: 24734 - DNA, 16 bp, synthetic construct
  source 1..16: mol_type = other DNA
gcctacaggggcgttt

SEQ ID NO: 24735 - DNA, 16 bp, synthetic construct
  source 1..16: mol_type = other DNA
tgcctacaggggcgtt

SEQ ID NO: 24736 - DNA, 16 bp, synthetic construct
  source 1..16: mol_type = other DNA
ctgcctacaggggcgt

SEQ ID NO: 24737 - DNA, 16 bp, synthetic construct
  source 1..16: mol_type = other DNA
tctgcctacaggggcg

SEQ ID NO: 24738 - DNA, 16 bp, synthetic construct
  source 1..16: mol_type = other DNA
atctaggctctgccta

SEQ ID NO: 24739 - DNA, 16 bp, synthetic construct
  source 1..16: mol_type = other DNA
catctaggctctgcct

SEQ ID NO: 24740 - DNA, 16 bp, synthetic construct
  source 1..16: mol_type = other DNA
tcatctaggctctgcc

SEQ ID NO: 24741 - DNA, 16 bp, synthetic construct
  source 1..16: mol_type = other DNA
ctcatctaggctctgc

SEQ ID NO: 24742 - DNA, 16 bp, synthetic construct
  source 1..16: mol_type = other DNA
actcatctaggctctg

SEQ ID NO: 24743 - DNA, 16 bp, synthetic construct
  source 1..16: mol_type = other DNA
cactcatctaggctct

SEQ ID NO: 24744 - DNA, 16 bp, synthetic construct
  source 1..16: mol_type = other DNA
acactcatctaggctc

SEQ ID NO: 24745 - DNA, 16 bp, synthetic construct
  source 1..16: mol_type = other DNA
aacactcatctaggct

SEQ ID NO: 24746 - DNA, 16 bp, synthetic construct
  source 1..16: mol_type = other DNA
atgatcacccaggtga

SEQ ID NO: 24747 - DNA, 16 bp, synthetic construct
  source 1..16: mol_type = other DNA
aatgatcacccaggtg

SEQ ID NO: 24748 - DNA, 16 bp, synthetic construct
  source 1..16: mol_type = other DNA
caatgatcacccaggt

SEQ ID NO: 24749 - DNA, 16 bp, synthetic construct
  source 1..16: mol_type = other DNA
gcaatgatcacccagg

SEQ ID NO: 24750 - DNA, 16 bp, synthetic construct
  source 1..16: mol_type = other DNA
tgcaatgatcacccag

SEQ ID NO: 24751 - DNA, 16 bp, synthetic construct
  source 1..16: mol_type = other DNA
ctgcaatgatcaccca

SEQ ID NO: 24752 - DNA, 16 bp, synthetic construct
  source 1..16: mol_type = other DNA
tctgcaatgatcaccc

SEQ ID NO: 24753 - DNA, 16 bp, synthetic construct
  source 1..16: mol_type = other DNA
ctctgcaatgatcacc

SEQ ID NO: 24754 - DNA, 16 bp, synthetic construct
  source 1..16: mol_type = other DNA
gacgtatctctgcaat

SEQ ID NO: 24755 - DNA, 16 bp, synthetic construct
  source 1..16: mol_type = other DNA
tgacgtatctctgcaa

SEQ ID NO: 24756 - DNA, 16 bp, synthetic construct
  source 1..16: mol_type = other DNA
gtgacgtatctctgca

SEQ ID NO: 24757 - DNA, 16 bp, synthetic construct
  source 1..16: mol_type = other DNA
tgtgacgtatctctgc

SEQ ID NO: 24758 - DNA, 16 bp, synthetic construct
  source 1..16: mol_type = other DNA
gggtattgtgacgtat

SEQ ID NO: 24759 - DNA, 16 bp, synthetic construct
  source 1..16: mol_type = other DNA
ggggtattgtgacgta

SEQ ID NO: 24760 - DNA, 16 bp, synthetic construct
  source 1..16: mol_type = other DNA
gggggtattgtgacgt

SEQ ID NO: 24761 - DNA, 16 bp, synthetic construct
  source 1..16: mol_type = other DNA
agggggtattgtgacg

SEQ ID NO: 24762 - DNA, 16 bp, synthetic construct
  source 1..16: mol_type = other DNA
cagggggtattgtgac

SEQ ID NO: 24763 - DNA, 16 bp, synthetic construct
  source 1..16: mol_type = other DNA
acagggggtattgtga

SEQ ID NO: 24764 - DNA, 16 bp, synthetic construct
  source 1..16: mol_type = other DNA
tacagggggtattgtg

SEQ ID NO: 24765 - DNA, 16 bp, synthetic construct
  source 1..16: mol_type = other DNA
ctacagggggtattgt

SEQ ID NO: 24766 - DNA, 16 bp, synthetic construct
  source 1..16: mol_type = other DNA
cctacagggggtattg

SEQ ID NO: 24767 - DNA, 16 bp, synthetic construct
  source 1..16: mol_type = other DNA
acctacagggggtatt

SEQ ID NO: 24768 - DNA, 16 bp, synthetic construct
  source 1..16: mol_type = other DNA
cacctacagggggtat

SEQ ID NO: 24769 - DNA, 16 bp, synthetic construct
  source 1..16: mol_type = other DNA
ccacctacagggggta

SEQ ID NO: 24770 - DNA, 16 bp, synthetic construct
  source 1..16: mol_type = other DNA
cccacctacagggggt

SEQ ID NO: 24771 - DNA, 16 bp, synthetic construct
  source 1..16: mol_type = other DNA
ccccacctacaggggg

SEQ ID NO: 24772 - DNA, 16 bp, synthetic construct
  source 1..16: mol_type = other DNA
aggccccacctacagg

SEQ ID NO: 24773 - DNA, 16 bp, synthetic construct
  source 1..16: mol_type = other DNA
taggccccacctacag

SEQ ID NO: 24774 - DNA, 16 bp, synthetic construct
  source 1..16: mol_type = other DNA
ctaggccccacctaca

SEQ ID NO: 24775 - DNA, 16 bp, synthetic construct
  source 1..16: mol_type = other DNA
tctaggccccacctac

SEQ ID NO: 24776 - DNA, 16 bp, synthetic construct
  source 1..16: mol_type = other DNA
ttgtctaggccccacc

SEQ ID NO: 24777 - DNA, 16 bp, synthetic construct
  source 1..16: mol_type = other DNA
cttgtctaggccccac

SEQ ID NO: 24778 - DNA, 16 bp, synthetic construct
  source 1..16: mol_type = other DNA
tcttgtctaggcccca

SEQ ID NO: 24779 - DNA, 16 bp, synthetic construct
  source 1..16: mol_type = other DNA
ctcttgtctaggcccc

SEQ ID NO: 24780 - DNA, 16 bp, synthetic construct
  source 1..16: mol_type = other DNA
actcttgtctaggccc

SEQ ID NO: 24781 - DNA, 16 bp, synthetic construct
  source 1..16: mol_type = other DNA
aactcttgtctaggcc

SEQ ID NO: 24782 - DNA, 16 bp, synthetic construct
  source 1..16: mol_type = other DNA
ccaggtgatgtaactc

SEQ ID NO: 24783 - DNA, 16 bp, synthetic construct
  source 1..16: mol_type = other DNA
cccaggtgatgtaact

SEQ ID NO: 24784 - DNA, 16 bp, synthetic construct
  source 1..16: mol_type = other DNA
tactgatcacccaggt

SEQ ID NO: 24785 - DNA, 16 bp, synthetic construct
  source 1..16: mol_type = other DNA
gtactgatcacccagg

SEQ ID NO: 24786 - DNA, 16 bp, synthetic construct
  source 1..16: mol_type = other DNA
tgtactgatcacccag

SEQ ID NO: 24787 - DNA, 16 bp, synthetic construct
  source 1..16: mol_type = other DNA
ctgtactgatcaccca

SEQ ID NO: 24788 - DNA, 16 bp, synthetic construct
  source 1..16: mol_type = other DNA
tctgtactgatcaccc

SEQ ID NO: 24789 - DNA, 16 bp, synthetic construct
  source 1..16: mol_type = other DNA
ttctgtactgatcacc

SEQ ID NO: 24790 - DNA, 16 bp, synthetic construct
  source 1..16: mol_type = other DNA
ggctttgtgacatact

SEQ ID NO: 24791 - DNA, 16 bp, synthetic construct
  source 1..16: mol_type = other DNA
gggctttgtgacatac

SEQ ID NO: 24792 - DNA, 16 bp, synthetic construct
  source 1..16: mol_type = other DNA
ggggctttgtgacata

SEQ ID NO: 24793 - DNA, 16 bp, synthetic construct
  source 1..16: mol_type = other DNA
aggggctttgtgacat

SEQ ID NO: 24794 - DNA, 16 bp, synthetic construct
  source 1..16: mol_type = other DNA
aacccaggtgatgtaa

SEQ ID NO: 24795 - DNA, 16 bp, synthetic construct
  source 1..16: mol_type = other DNA
taacccaggtgatgta

SEQ ID NO: 24796 - DNA, 16 bp, synthetic construct
  source 1..16: mol_type = other DNA
ataacccaggtgatgt

SEQ ID NO: 24797 - DNA, 16 bp, synthetic construct
  source 1..16: mol_type = other DNA
gataacccaggtgatg

SEQ ID NO: 24798 - DNA, 16 bp, synthetic construct
  source 1..16: mol_type = other DNA
tgataacccaggtgat

SEQ ID NO: 24799 - DNA, 16 bp, synthetic construct
  source 1..16: mol_type = other DNA
ctgataacccaggtga

SEQ ID NO: 24800 - DNA, 16 bp, synthetic construct
  source 1..16: mol_type = other DNA
actgataacccaggtg

SEQ ID NO: 24801 - DNA, 16 bp, synthetic construct
  source 1..16: mol_type = other DNA
cactgataacccaggt

SEQ ID NO: 24802 - DNA, 16 bp, synthetic construct
  source 1..16: mol_type = other DNA
gcactgataacccagg

SEQ ID NO: 24803 - DNA, 16 bp, synthetic construct
  source 1..16: mol_type = other DNA
tgcactgataacccag

SEQ ID NO: 24804 - DNA, 16 bp, synthetic construct
  source 1..16: mol_type = other DNA
ctgcactgataaccca

SEQ ID NO: 24805 - DNA, 16 bp, synthetic construct
  source 1..16: mol_type = other DNA
tctgcactgataaccc

SEQ ID NO: 24806 - DNA, 16 bp, synthetic construct
  source 1..16: mol_type = other DNA
ttctgcactgataacc

SEQ ID NO: 24807 - DNA, 16 bp, synthetic construct
  source 1..16: mol_type = other DNA
ggctttgtgacatatt

SEQ ID NO: 24808 - DNA, 16 bp, synthetic construct
  source 1..16: mol_type = other DNA
gggctttgtgacatat

SEQ ID NO: 24809 - DNA, 16 bp, synthetic construct
  source 1..16: mol_type = other DNA
acctacaggggctttg

SEQ ID NO: 24810 - DNA, 16 bp, synthetic construct
  source 1..16: mol_type = other DNA
gacctacaggggcttt

SEQ ID NO: 24811 - DNA, 16 bp, synthetic construct
  source 1..16: mol_type = other DNA
cgacctacaggggctt

SEQ ID NO: 24812 - DNA, 16 bp, synthetic construct
  source 1..16: mol_type = other DNA
tcgacctacaggggct

SEQ ID NO: 24813 - DNA, 16 bp, synthetic construct
  source 1..16: mol_type = other DNA
ctcgacctacaggggc

SEQ ID NO: 24814 - DNA, 16 bp, synthetic construct
  source 1..16: mol_type = other DNA
actcgacctacagggg

SEQ ID NO: 24815 - DNA, 16 bp, synthetic construct
  source 1..16: mol_type = other DNA
gactcgacctacaggg

SEQ ID NO: 24816 - DNA, 16 bp, synthetic construct
  source 1..16: mol_type = other DNA
agactcgacctacagg

SEQ ID NO: 24817 - DNA, 16 bp, synthetic construct
  source 1..16: mol_type = other DNA
tagactcgacctacag

SEQ ID NO: 24818 - DNA, 16 bp, synthetic construct
  source 1..16: mol_type = other DNA
ctagactcgacctaca

SEQ ID NO: 24819 - DNA, 16 bp, synthetic construct
  source 1..16: mol_type = other DNA
tctagactcgacctac

SEQ ID NO: 24820 - DNA, 16 bp, synthetic construct
  source 1..16: mol_type = other DNA
gtctagactcgaccta

SEQ ID NO: 24821 - DNA, 16 bp, synthetic construct
  source 1..16: mol_type = other DNA
tgtctagactcgacct

SEQ ID NO: 24822 - DNA, 16 bp, synthetic construct
  source 1..16: mol_type = other DNA
ttgtctagactcgacc

SEQ ID NO: 24823 - DNA, 16 bp, synthetic construct
  source 1..16: mol_type = other DNA
cttgtctagactcgac

SEQ ID NO: 24824 - DNA, 16 bp, synthetic construct
  source 1..16: mol_type = other DNA
tcttgtctagactcga

SEQ ID NO: 24825 - DNA, 16 bp, synthetic construct
  source 1..16: mol_type = other DNA
ctcttgtctagactcg

SEQ ID NO: 24826 - DNA, 16 bp, synthetic construct
  source 1..16: mol_type = other DNA
actcttgtctagactc

SEQ ID NO: 24827 - DNA, 16 bp, synthetic construct
  source 1..16: mol_type = other DNA
cccaggagatgtaact

SEQ ID NO: 24828 - DNA, 16 bp, synthetic construct
  source 1..16: mol_type = other DNA
acccaggagatgtaac

SEQ ID NO: 24829 - DNA, 16 bp, synthetic construct
  source 1..16: mol_type = other DNA
cacccaggagatgtaa

SEQ ID NO: 24830 - DNA, 16 bp, synthetic construct
  source 1..16: mol_type = other DNA
tcacccaggagatgta

SEQ ID NO: 24831 - DNA, 16 bp, synthetic construct
  source 1..16: mol_type = other DNA
atcacccaggagatgt

SEQ ID NO: 24832 - DNA, 16 bp, synthetic construct
  source 1..16: mol_type = other DNA
gatcacccaggagatg

SEQ ID NO: 24833 - DNA, 16 bp, synthetic construct
  source 1..16: mol_type = other DNA
tgatcacccaggagat

SEQ ID NO: 24834 - DNA, 16 bp, synthetic construct
  source 1..16: mol_type = other DNA
ctgatcacccaggaga

SEQ ID NO: 24835 - DNA, 16 bp, synthetic construct
  source 1..16: mol_type = other DNA
actgatcacccaggag

SEQ ID NO: 24836 - DNA, 16 bp, synthetic construct
  source 1..16: mol_type = other DNA
cactgatcacccagga

SEQ ID NO: 24837 - DNA, 16 bp, synthetic construct
  source 1..16: mol_type = other DNA
ttgcactgatcaccca

SEQ ID NO: 24838 - DNA, 16 bp, synthetic construct
  source 1..16: mol_type = other DNA
tttgcactgatcaccc

SEQ ID NO: 24839 - DNA, 16 bp, synthetic construct
  source 1..16: mol_type = other DNA
ctttgcactgatcacc

SEQ ID NO: 24840 - DNA, 16 bp, synthetic construct
  source 1..16: mol_type = other DNA
tctttgcactgatcac

SEQ ID NO: 24841 - DNA, 16 bp, synthetic construct
  source 1..16: mol_type = other DNA
atctttgcactgatca

SEQ ID NO: 24842 - DNA, 16 bp, synthetic construct
  source 1..16: mol_type = other DNA
gggggctttgtgacat

SEQ ID NO: 24843 - DNA, 16 bp, synthetic construct
  source 1..16: mol_type = other DNA
agggggctttgtgaca

SEQ ID NO: 24844 - DNA, 16 bp, synthetic construct
  source 1..16: mol_type = other DNA
cagggggctttgtgac

SEQ ID NO: 24845 - DNA, 16 bp, synthetic construct
  source 1..16: mol_type = other DNA
atttgtctacaggggg

SEQ ID NO: 24846 - DNA, 16 bp, synthetic construct
  source 1..16: mol_type = other DNA
gatttgtctacagggg

SEQ ID NO: 24847 - DNA, 16 bp, synthetic construct
  source 1..16: mol_type = other DNA
ggatttgtctacaggg

SEQ ID NO: 24848 - DNA, 16 bp, synthetic construct
  source 1..16: mol_type = other DNA
gggatttgtctacagg

SEQ ID NO: 24849 - DNA, 16 bp, synthetic construct
  source 1..16: mol_type = other DNA
ctgggatttgtctaca

SEQ ID NO: 24850 - DNA, 16 bp, synthetic construct
  source 1..16: mol_type = other DNA
tctgggatttgtctac

SEQ ID NO: 24851 - DNA, 16 bp, synthetic construct
  source 1..16: mol_type = other DNA
ttctgggatttgtcta

SEQ ID NO: 24852 - DNA, 16 bp, synthetic construct
  source 1..16: mol_type = other DNA
tttctgggatttgtct

SEQ ID NO: 24853 - DNA, 16 bp, synthetic construct
  source 1..16: mol_type = other DNA
ttttctgggatttgtc

SEQ ID NO: 24854 - DNA, 16 bp, synthetic construct
  source 1..16: mol_type = other DNA
ccactgatcacccagg

SEQ ID NO: 24855 - DNA, 16 bp, synthetic construct
  source 1..16: mol_type = other DNA
tccactgatcacccag

SEQ ID NO: 24856 - DNA, 16 bp, synthetic construct
  source 1..16: mol_type = other DNA
ctccactgatcaccca

SEQ ID NO: 24857 - DNA, 16 bp, synthetic construct
  source 1..16: mol_type = other DNA
tctccactgatcaccc

SEQ ID NO: 24858 - DNA, 16 bp, synthetic construct
  source 1..16: mol_type = other DNA
atctccactgatcacc

SEQ ID NO: 24859 - DNA, 16 bp, synthetic construct
  source 1..16: mol_type = other DNA
tatctccactgatcac

SEQ ID NO: 24860 - DNA, 16 bp, synthetic construct
  source 1..16: mol_type = other DNA
atatctccactgatca

SEQ ID NO: 24861 - DNA, 16 bp, synthetic construct
  source 1..16: mol_type = other DNA
catatctccactgatc

SEQ ID NO: 24862 - DNA, 16 bp, synthetic construct
  source 1..16: mol_type = other DNA
cacatatctccactga

SEQ ID NO: 24863 - DNA, 16 bp, synthetic construct
  source 1..16: mol_type = other DNA
acacatatctccactg

SEQ ID NO: 24864 - DNA, 16 bp, synthetic construct
  source 1..16: mol_type = other DNA
gacacatatctccact

SEQ ID NO: 24865 - DNA, 16 bp, synthetic construct
  source 1..16: mol_type = other DNA
gtgacacatatctcca

SEQ ID NO: 24866 - DNA, 16 bp, synthetic construct
  source 1..16: mol_type = other DNA
tgtgacacatatctcc

SEQ ID NO: 24867 - DNA, 16 bp, synthetic construct
  source 1..16: mol_type = other DNA
ggggaattgtgacaca

SEQ ID NO: 24868 - DNA, 16 bp, synthetic construct
  source 1..16: mol_type = other DNA
gtgcctaaaggggaat

SEQ ID NO: 24869 - DNA, 16 bp, synthetic construct
  source 1..16: mol_type = other DNA
tgtgcctaaaggggaa

SEQ ID NO: 24870 - DNA, 16 bp, synthetic construct
  source 1..16: mol_type = other DNA
ctgtgcctaaagggga

SEQ ID NO: 24871 - DNA, 16 bp, synthetic construct
  source 1..16: mol_type = other DNA
gctgtgcctaaagggg

SEQ ID NO: 24872 - DNA, 16 bp, synthetic construct
  source 1..16: mol_type = other DNA
agctgtgcctaaaggg

SEQ ID NO: 24873 - DNA, 16 bp, synthetic construct
  source 1..16: mol_type = other DNA
aagctgtgcctaaagg

SEQ ID NO: 24874 - DNA, 16 bp, synthetic construct
  source 1..16: mol_type = other DNA
tctaagctgtgcctaa

SEQ ID NO: 24875 - DNA, 16 bp, synthetic construct
  source 1..16: mol_type = other DNA
gtctaagctgtgccta

SEQ ID NO: 24876 - DNA, 16 bp, synthetic construct
  source 1..16: mol_type = other DNA
tgtctaagctgtgcct

SEQ ID NO: 24877 - DNA, 16 bp, synthetic construct
  source 1..16: mol_type = other DNA
ttgtctaagctgtgcc

SEQ ID NO: 24878 - DNA, 16 bp, synthetic construct
  source 1..16: mol_type = other DNA
cttgtctaagctgtgc

SEQ ID NO: 24879 - DNA, 16 bp, synthetic construct
  source 1..16: mol_type = other DNA
gcttgtctaagctgtg

SEQ ID NO: 24880 - DNA, 16 bp, synthetic construct
  source 1..16: mol_type = other DNA
cgcttgtctaagctgt

SEQ ID NO: 24881 - DNA, 16 bp, synthetic construct
  source 1..16: mol_type = other DNA
acgcttgtctaagctg

SEQ ID NO: 24882 - DNA, 16 bp, synthetic construct
  source 1..16: mol_type = other DNA
aacgcttgtctaagct

SEQ ID NO: 24883 - DNA, 16 bp, synthetic construct
  source 1..16: mol_type = other DNA
gatgtaacgcttgtct

SEQ ID NO: 24884 - DNA, 16 bp, synthetic construct
  source 1..16: mol_type = other DNA
gtgatgtaacgcttgt

SEQ ID NO: 24885 - DNA, 16 bp, synthetic construct
  source 1..16: mol_type = other DNA
ctctgcaatgatcact

SEQ ID NO: 24886 - DNA, 16 bp, synthetic construct
  source 1..16: mol_type = other DNA
ggggcatagtgacata

SEQ ID NO: 24887 - DNA, 16 bp, synthetic construct
  source 1..16: mol_type = other DNA
gggggcatagtgacat

SEQ ID NO: 24888 - DNA, 16 bp, synthetic construct
  source 1..16: mol_type = other DNA
tgggggcatagtgaca

SEQ ID NO: 24889 - DNA, 16 bp, synthetic construct
  source 1..16: mol_type = other DNA
atgggggcatagtgac

SEQ ID NO: 24890 - DNA, 16 bp, synthetic construct
  source 1..16: mol_type = other DNA
tatgggggcatagtga

SEQ ID NO: 24891 - DNA, 16 bp, synthetic construct
  source 1..16: mol_type = other DNA
ctatgggggcatagtg

SEQ ID NO: 24892 - DNA, 16 bp, synthetic construct
  source 1..16: mol_type = other DNA
cctatgggggcatagt

SEQ ID NO: 24893 - DNA, 16 bp, synthetic construct
  source 1..16: mol_type = other DNA
gcctatgggggcatag

SEQ ID NO: 24894 - DNA, 16 bp, synthetic construct
  source 1..16: mol_type = other DNA
tgcctatgggggcata

SEQ ID NO: 24895 - DNA, 16 bp, synthetic construct
  source 1..16: mol_type = other DNA
ctgcctatgggggcat

SEQ ID NO: 24896 - DNA, 16 bp, synthetic construct
  source 1..16: mol_type = other DNA
tctgcctatgggggca

SEQ ID NO: 24897 - DNA, 16 bp, synthetic construct
  source 1..16: mol_type = other DNA
atctgcctatgggggc

SEQ ID NO: 24898 - DNA, 16 bp, synthetic construct
  source 1..16: mol_type = other DNA
gatctgcctatggggg

SEQ ID NO: 24899 - DNA, 16 bp, synthetic construct
  source 1..16: mol_type = other DNA
ggatctgcctatgggg

SEQ ID NO: 24900 - DNA, 16 bp, synthetic construct
  source 1..16: mol_type = other DNA
tggatctgcctatggg

SEQ ID NO: 24901 - DNA, 16 bp, synthetic construct
  source 1..16: mol_type = other DNA
ttggatctgcctatgg

SEQ ID NO: 24902 - DNA, 16 bp, synthetic construct
  source 1..16: mol_type = other DNA
cttggatctgcctatg

SEQ ID NO: 24903 - DNA, 16 bp, synthetic construct
  source 1..16: mol_type = other DNA
tcttggatctgcctat

SEQ ID NO: 24904 - DNA, 16 bp, synthetic construct
  source 1..16: mol_type = other DNA
gtcttggatctgccta

SEQ ID NO: 24905 - DNA, 16 bp, synthetic construct
  source 1..16: mol_type = other DNA
tgtcttggatctgcct

SEQ ID NO: 24906 - DNA, 16 bp, synthetic construct
  source 1..16: mol_type = other DNA
ttgtcttggatctgcc

SEQ ID NO: 24907 - DNA, 16 bp, synthetic construct
  source 1..16: mol_type = other DNA
cttgtcttggatctgc

SEQ ID NO: 24908 - DNA, 16 bp, synthetic construct
  source 1..16: mol_type = other DNA
tcttgtcttggatctg

SEQ ID NO: 24909 - DNA, 16 bp, synthetic construct
  source 1..16: mol_type = other DNA
ctcttgtcttggatct

SEQ ID NO: 24910 - DNA, 16 bp, synthetic construct
  source 1..16: mol_type = other DNA
actcttgtcttggatc

SEQ ID NO: 24911 - DNA, 16 bp, synthetic construct
  source 1..16: mol_type = other DNA
gactcttgtcttggat

SEQ ID NO: 24912 - DNA, 16 bp, synthetic construct
  source 1..16: mol_type = other DNA
ggactcttgtcttgga

SEQ ID NO: 24913 - DNA, 16 bp, synthetic construct
  source 1..16: mol_type = other DNA
tggactcttgtcttgg

SEQ ID NO: 24914 - DNA, 16 bp, synthetic construct
  source 1..16: mol_type = other DNA
atggactcttgtcttg

SEQ ID NO: 24915 - DNA, 16 bp, synthetic construct
  source 1..16: mol_type = other DNA
gatggactcttgtctt

SEQ ID NO: 24916 - DNA, 16 bp, synthetic construct
  source 1..16: mol_type = other DNA
tgatggactcttgtct

SEQ ID NO: 24917 - DNA, 16 bp, synthetic construct
  source 1..16: mol_type = other DNA
gtgatggactcttgtc

SEQ ID NO: 24918 - DNA, 16 bp, synthetic construct
  source 1..16: mol_type = other DNA
ggtgatggactcttgt

SEQ ID NO: 24919 - DNA, 16 bp, synthetic construct
  source 1..16: mol_type = other DNA
aggtgatggactcttg

SEQ ID NO: 24920 - DNA, 16 bp, synthetic construct
  source 1..16: mol_type = other DNA
caggtgatggactctt

SEQ ID NO: 24921 - DNA, 16 bp, synthetic construct
  source 1..16: mol_type = other DNA
ccaggtgatggactct

SEQ ID NO: 24922 - DNA, 16 bp, synthetic construct
  source 1..16: mol_type = other DNA
cccaggtgatggactc

SEQ ID NO: 24923 - DNA, 16 bp, synthetic construct
  source 1..16: mol_type = other DNA
acccaggtgatggact

SEQ ID NO: 24924 - DNA, 16 bp, synthetic construct
  source 1..16: mol_type = other DNA
ttctgcactgatcacc

SEQ ID NO: 24925 - DNA, 16 bp, synthetic construct
  source 1..16: mol_type = other DNA
tttctgcactgatcac

SEQ ID NO: 24926 - DNA, 16 bp, synthetic construct
  source 1..16: mol_type = other DNA
atttctgcactgatca

SEQ ID NO: 24927 - DNA, 16 bp, synthetic construct
  source 1..16: mol_type = other DNA
gcatatttctgcactg

SEQ ID NO: 24928 - DNA, 16 bp, synthetic construct
  source 1..16: mol_type = other DNA
ggcatatttctgcact

SEQ ID NO: 24929 - DNA, 16 bp, synthetic construct
  source 1..16: mol_type = other DNA
tggcatatttctgcac

SEQ ID NO: 24930 - DNA, 16 bp, synthetic construct
  source 1..16: mol_type = other DNA
gtggcatatttctgca

SEQ ID NO: 24931 - DNA, 16 bp, synthetic construct
  source 1..16: mol_type = other DNA
tgtggcatatttctgc

SEQ ID NO: 24932 - DNA, 16 bp, synthetic construct
  source 1..16: mol_type = other DNA
gcattgtggcatattt

SEQ ID NO: 24933 - DNA, 16 bp, synthetic construct
  source 1..16: mol_type = other DNA
ggcattgtggcatatt

SEQ ID NO: 24934 - DNA, 16 bp, synthetic construct
  source 1..16: mol_type = other DNA
cggcattgtggcatat

SEQ ID NO: 24935 - DNA, 16 bp, synthetic construct
  source 1..16: mol_type = other DNA
gcggcattgtggcata

SEQ ID NO: 24936 - DNA, 16 bp, synthetic construct
  source 1..16: mol_type = other DNA
ggcggcattgtggcat

SEQ ID NO: 24937 - DNA, 16 bp, synthetic construct
  source 1..16: mol_type = other DNA
tggcggcattgtggca

SEQ ID NO: 24938 - DNA, 16 bp, synthetic construct
  source 1..16: mol_type = other DNA
ctggcggcattgtggc

SEQ ID NO: 24939 - DNA, 16 bp, synthetic construct
  source 1..16: mol_type = other DNA
actggcggcattgtgg

SEQ ID NO: 24940 - DNA, 16 bp, synthetic construct
  source 1..16: mol_type = other DNA
tactggcggcattgtg

SEQ ID NO: 24941 - DNA, 16 bp, synthetic construct
  source 1..16: mol_type = other DNA
ctactggcggcattgt

SEQ ID NO: 24942 - DNA, 16 bp, synthetic construct
  source 1..16: mol_type = other DNA
cctactggcggcattg

SEQ ID NO: 24943 - DNA, 16 bp, synthetic construct
  source 1..16: mol_type = other DNA
gcctactggcggcatt

SEQ ID NO: 24944 - DNA, 16 bp, synthetic construct
  source 1..16: mol_type = other DNA
tgcctactggcggcat

SEQ ID NO: 24945 - DNA, 16 bp, synthetic construct
  source 1..16: mol_type = other DNA
ctgcctactggcggca

SEQ ID NO: 24946 - DNA, 16 bp, synthetic construct
  source 1..16: mol_type = other DNA
tctgcctactggcggc

SEQ ID NO: 24947 - DNA, 16 bp, synthetic construct
  source 1..16: mol_type = other DNA
atctgcctactggcgg

SEQ ID NO: 24948 - DNA, 16 bp, synthetic construct
  source 1..16: mol_type = other DNA
tatctgcctactggcg

SEQ ID NO: 24949 - DNA, 16 bp, synthetic construct
  source 1..16: mol_type = other DNA
atatctgcctactggc

SEQ ID NO: 24950 - DNA, 16 bp, synthetic construct
  source 1..16: mol_type = other DNA
tatatctgcctactgg

SEQ ID NO: 24951 - DNA, 16 bp, synthetic construct
  source 1..16: mol_type = other DNA
ctatatctgcctactg

SEQ ID NO: 24952 - DNA, 16 bp, synthetic construct
  source 1..16: mol_type = other DNA
tctatatctgcctact

SEQ ID NO: 24953 - DNA, 16 bp, synthetic construct
  source 1..16: mol_type = other DNA
gtctatatctgcctac

SEQ ID NO: 24954 - DNA, 16 bp, synthetic construct
  source 1..16: mol_type = other DNA
tgtctatatctgccta

SEQ ID NO: 24955 - DNA, 16 bp, synthetic construct
  source 1..16: mol_type = other DNA
ttgtctatatctgcct

SEQ ID NO: 24956 - DNA, 16 bp, synthetic construct
  source 1..16: mol_type = other DNA
cttgtctatatctgcc

SEQ ID NO: 24957 - DNA, 16 bp, synthetic construct
  source 1..16: mol_type = other DNA
tcttgtctatatctgc

SEQ ID NO: 24958 - DNA, 16 bp, synthetic construct
  source 1..16: mol_type = other DNA
gcaggtgatgtaactc

SEQ ID NO: 24959 - DNA, 16 bp, synthetic construct
  source 1..16: mol_type = other DNA
cgcaggtgatgtaact

SEQ ID NO: 24960 - DNA, 16 bp, synthetic construct
  source 1..16: mol_type = other DNA
acgcaggtgatgtaac

SEQ ID NO: 24961 - DNA, 16 bp, synthetic construct
  source 1..16: mol_type = other DNA
cacgcaggtgatgtaa

SEQ ID NO: 24962 - DNA, 16 bp, synthetic construct
  source 1..16: mol_type = other DNA
tcacgcaggtgatgta

SEQ ID NO: 24963 - DNA, 16 bp, synthetic construct
  source 1..16: mol_type = other DNA
atcacgcaggtgatgt

SEQ ID NO: 24964 - DNA, 16 bp, synthetic construct
  source 1..16: mol_type = other DNA
gatcacgcaggtgatg

SEQ ID NO: 24965 - DNA, 16 bp, synthetic construct
  source 1..16: mol_type = other DNA
tgatcacgcaggtgat

SEQ ID NO: 24966 - DNA, 16 bp, synthetic construct
  source 1..16: mol_type = other DNA
gtgatcacgcaggtga

SEQ ID NO: 24967 - DNA, 16 bp, synthetic construct
  source 1..16: mol_type = other DNA
agtgatcacgcaggtg

SEQ ID NO: 24968 - DNA, 16 bp, synthetic construct
  source 1..16: mol_type = other DNA
cagtgatcacgcaggt

SEQ ID NO: 24969 - DNA, 16 bp, synthetic construct
  source 1..16: mol_type = other DNA
gcagtgatcacgcagg

SEQ ID NO: 24970 - DNA, 16 bp, synthetic construct
  source 1..16: mol_type = other DNA
tgcagtgatcacgcag

SEQ ID NO: 24971 - DNA, 16 bp, synthetic construct
  source 1..16: mol_type = other DNA
ctgcagtgatcacgca

SEQ ID NO: 24972 - DNA, 16 bp, synthetic construct
  source 1..16: mol_type = other DNA
tctgcagtgatcacgc

SEQ ID NO: 24973 - DNA, 16 bp, synthetic construct
  source 1..16: mol_type = other DNA
ctctgcagtgatcacg

SEQ ID NO: 24974 - DNA, 16 bp, synthetic construct
  source 1..16: mol_type = other DNA
tctctgcagtgatcac

SEQ ID NO: 24975 - DNA, 16 bp, synthetic construct
  source 1..16: mol_type = other DNA
atctctgcagtgatca

SEQ ID NO: 24976 - DNA, 16 bp, synthetic construct
  source 1..16: mol_type = other DNA
tatctctgcagtgatc

SEQ ID NO: 24977 - DNA, 16 bp, synthetic construct
  source 1..16: mol_type = other DNA
atatctctgcagtgat

SEQ ID NO: 24978 - DNA, 16 bp, synthetic construct
  source 1..16: mol_type = other DNA
ggggcattgtgatata

SEQ ID NO: 24979 - DNA, 16 bp, synthetic construct
  source 1..16: mol_type = other DNA
aggggcattgtgatat

SEQ ID NO: 24980 - DNA, 16 bp, synthetic construct
  source 1..16: mol_type = other DNA
caggggcattgtgata

SEQ ID NO: 24981 - DNA, 16 bp, synthetic construct
  source 1..16: mol_type = other DNA
acaggggcattgtgat

SEQ ID NO: 24982 - DNA, 16 bp, synthetic construct
  source 1..16: mol_type = other DNA
gactcttgtctaggct

SEQ ID NO: 24983 - DNA, 16 bp, synthetic construct
  source 1..16: mol_type = other DNA
ggactcttgtctaggc

SEQ ID NO: 24984 - DNA, 16 bp, synthetic construct
  source 1..16: mol_type = other DNA
gggactcttgtctagg

SEQ ID NO: 24985 - DNA, 16 bp, synthetic construct
  source 1..16: mol_type = other DNA
tgggactcttgtctag

SEQ ID NO: 24986 - DNA, 16 bp, synthetic construct
  source 1..16: mol_type = other DNA
atgggactcttgtcta

SEQ ID NO: 24987 - DNA, 16 bp, synthetic construct
  source 1..16: mol_type = other DNA
gatgggactcttgtct

SEQ ID NO: 24988 - DNA, 16 bp, synthetic construct
  source 1..16: mol_type = other DNA
tgatgggactcttgtc

SEQ ID NO: 24989 - DNA, 16 bp, synthetic construct
  source 1..16: mol_type = other DNA
gtgatgggactcttgt

SEQ ID NO: 24990 - DNA, 16 bp, synthetic construct
  source 1..16: mol_type = other DNA
ggtgatgggactcttg

SEQ ID NO: 24991 - DNA, 16 bp, synthetic construct
  source 1..16: mol_type = other DNA
actctgcactgatcac

SEQ ID NO: 24992 - DNA, 16 bp, synthetic construct
  source 1..16: mol_type = other DNA
aactctgcactgatca

SEQ ID NO: 24993 - DNA, 16 bp, synthetic construct
  source 1..16: mol_type = other DNA
ggggcattgtgacata

SEQ ID NO: 24994 - DNA, 16 bp, synthetic construct
  source 1..16: mol_type = other DNA
gggggcattgtgacat

SEQ ID NO: 24995 - DNA, 16 bp, synthetic construct
  source 1..16: mol_type = other DNA
agggggcattgtgaca

SEQ ID NO: 24996 - DNA, 16 bp, synthetic construct
  source 1..16: mol_type = other DNA
aagggggcattgtgac

SEQ ID NO: 24997 - DNA, 16 bp, synthetic construct
  source 1..16: mol_type = other DNA
aaagggggcattgtga

SEQ ID NO: 24998 - DNA, 16 bp, synthetic construct
  source 1..16: mol_type = other DNA
caaaagggggcattgt

SEQ ID NO: 24999 - DNA, 16 bp, synthetic construct
  source 1..16: mol_type = other DNA
ccaaaagggggcattg

SEQ ID NO: 25000 - DNA, 16 bp, synthetic construct
  source 1..16: mol_type = other DNA
gccaaaagggggcatt

SEQ ID NO: 25001 - DNA, 16 bp, synthetic construct
  source 1..16: mol_type = other DNA
tgccaaaagggggcat

SEQ ID NO: 25002 - DNA, 16 bp, synthetic construct
  source 1..16: mol_type = other DNA
ctgccaaaagggggca

SEQ ID NO: 25003 - DNA, 16 bp, synthetic construct
  source 1..16: mol_type = other DNA
tctgccaaaagggggc

SEQ ID NO: 25004 - DNA, 16 bp, synthetic construct
  source 1..16: mol_type = other DNA
ctctgccaaaaggggg

SEQ ID NO: 25005 - DNA, 16 bp, synthetic construct
  source 1..16: mol_type = other DNA
gctctgccaaaagggg

SEQ ID NO: 25006 - DNA, 16 bp, synthetic construct
  source 1..16: mol_type = other DNA
ggctctgccaaaaggg

SEQ ID NO: 25007 - DNA, 16 bp, synthetic construct
  source 1..16: mol_type = other DNA
aggctctgccaaaagg

SEQ ID NO: 25008 - DNA, 16 bp, synthetic construct
  source 1..16: mol_type = other DNA
taggctctgccaaaag

SEQ ID NO: 25009 - DNA, 16 bp, synthetic construct
  source 1..16: mol_type = other DNA
ctaggctctgccaaaa

SEQ ID NO: 25010 - DNA, 16 bp, synthetic construct
  source 1..16: mol_type = other DNA
tctaggctctgccaaa

SEQ ID NO: 25011 - DNA, 16 bp, synthetic construct
  source 1..16: mol_type = other DNA
gtctaggctctgccaa

SEQ ID NO: 25012 - DNA, 16 bp, synthetic construct
  source 1..16: mol_type = other DNA
tgtctaggctctgcca

SEQ ID NO: 25013 - DNA, 16 bp, synthetic construct
  source 1..16: mol_type = other DNA
ccttgtctaggctctg

SEQ ID NO: 25014 - DNA, 16 bp, synthetic construct
  source 1..16: mol_type = other DNA
cccttgtctaggctct

SEQ ID NO: 25015 - DNA, 16 bp, synthetic construct
  source 1..16: mol_type = other DNA
acccttgtctaggctc

SEQ ID NO: 25016 - DNA, 16 bp, synthetic construct
  source 1..16: mol_type = other DNA
aacccttgtctaggct

SEQ ID NO: 25017 - DNA, 16 bp, synthetic construct
  source 1..16: mol_type = other DNA
taacccttgtctaggc

SEQ ID NO: 25018 - DNA, 16 bp, synthetic construct
  source 1..16: mol_type = other DNA
gtaacccttgtctagg

SEQ ID NO: 25019 - DNA, 16 bp, synthetic construct
  source 1..16: mol_type = other DNA
tgtaacccttgtctag

SEQ ID NO: 25020 - DNA, 16 bp, synthetic construct
  source 1..16: mol_type = other DNA
atgtaacccttgtcta

SEQ ID NO: 25021 - DNA, 16 bp, synthetic construct
  source 1..16: mol_type = other DNA
gatgtaacccttgtct

SEQ ID NO: 25022 - DNA, 16 bp, synthetic construct
  source 1..16: mol_type = other DNA
ccaggtgatgtaaccc

SEQ ID NO: 25023 - DNA, 16 bp, synthetic construct
  source 1..16: mol_type = other DNA
cccaggtgatgtaacc

SEQ ID NO: 25024 - DNA, 16 bp, synthetic construct
  source 1..16: mol_type = other DNA
agggacattgtgacat

SEQ ID NO: 25025 - DNA, 16 bp, synthetic construct
  source 1..16: mol_type = other DNA
cagggacattgtgaca

SEQ ID NO: 25026 - DNA, 16 bp, synthetic construct
  source 1..16: mol_type = other DNA
acagggacattgtgac

SEQ ID NO: 25027 - DNA, 16 bp, synthetic construct
  source 1..16: mol_type = other DNA
ctacagggacattgtg

SEQ ID NO: 25028 - DNA, 16 bp, synthetic construct
  source 1..16: mol_type = other DNA
gctacagggacattgt

SEQ ID NO: 25029 - DNA, 16 bp, synthetic construct
  source 1..16: mol_type = other DNA
ggctacagggacattg

SEQ ID NO: 25030 - DNA, 16 bp, synthetic construct
  source 1..16: mol_type = other DNA
tggctacagggacatt

SEQ ID NO: 25031 - DNA, 16 bp, synthetic construct
  source 1..16: mol_type = other DNA
atggctacagggacat

SEQ ID NO: 25032 - DNA, 16 bp, synthetic construct
  source 1..16: mol_type = other DNA
tatggctacagggaca

SEQ ID NO: 25033 - DNA, 16 bp, synthetic construct
  source 1..16: mol_type = other DNA
atatggctacagggac

SEQ ID NO: 25034 - DNA, 16 bp, synthetic construct
  source 1..16: mol_type = other DNA
gatatggctacaggga

SEQ ID NO: 25035 - DNA, 16 bp, synthetic construct
  source 1..16: mol_type = other DNA
ggatatggctacaggg

SEQ ID NO: 25036 - DNA, 16 bp, synthetic construct
  source 1..16: mol_type = other DNA
aggatatggctacagg

SEQ ID NO: 25037 - DNA, 16 bp, synthetic construct
  source 1..16: mol_type = other DNA
gtcaaggatatggcta

SEQ ID NO: 25038 - DNA, 16 bp, synthetic construct
  source 1..16: mol_type = other DNA
tgtcaaggatatggct

SEQ ID NO: 25039 - DNA, 16 bp, synthetic construct
  source 1..16: mol_type = other DNA
gtcacttttgtcaagg

SEQ ID NO: 25040 - DNA, 16 bp, synthetic construct
  source 1..16: mol_type = other DNA
gatgtcacttttgtca

SEQ ID NO: 25041 - DNA, 16 bp, synthetic construct
  source 1..16: mol_type = other DNA
gtgatgtcacttttgt

SEQ ID NO: 25042 - DNA, 16 bp, synthetic construct
  source 1..16: mol_type = other DNA
ggtgatgtcacttttg

SEQ ID NO: 25043 - DNA, 16 bp, synthetic construct
  source 1..16: mol_type = other DNA
aggtgatgtcactttt

SEQ ID NO: 25044 - DNA, 16 bp, synthetic construct
  source 1..16: mol_type = other DNA
caggtgatgtcacttt

SEQ ID NO: 25045 - DNA, 16 bp, synthetic construct
  source 1..16: mol_type = other DNA
ccaggtgatgtcactt

SEQ ID NO: 25046 - DNA, 16 bp, synthetic construct
  source 1..16: mol_type = other DNA
cccaggtgatgtcact

SEQ ID NO: 25047 - DNA, 16 bp, synthetic construct
  source 1..16: mol_type = other DNA
acccaggtgatgtcac

SEQ ID NO: 25048 - DNA, 16 bp, synthetic construct
  source 1..16: mol_type = other DNA
cacccaggtgatgtca

SEQ ID NO: 25049 - DNA, 16 bp, synthetic construct
  source 1..16: mol_type = other DNA
tcacccaggtgatgtc

SEQ ID NO: 25050 - DNA, 16 bp, synthetic construct
  source 1..16: mol_type = other DNA
acactgatcacccagg

SEQ ID NO: 25051 - DNA, 16 bp, synthetic construct
  source 1..16: mol_type = other DNA
cacactgatcacccag

SEQ ID NO: 25052 - DNA, 16 bp, synthetic construct
  source 1..16: mol_type = other DNA
ccacactgatcaccca

SEQ ID NO: 25053 - DNA, 16 bp, synthetic construct
  source 1..16: mol_type = other DNA
tccacactgatcaccc

SEQ ID NO: 25054 - DNA, 16 bp, synthetic construct
  source 1..16: mol_type = other DNA
ctccacactgatcacc

SEQ ID NO: 25055 - DNA, 16 bp, synthetic construct
  source 1..16: mol_type = other DNA
tctccacactgatcac

SEQ ID NO: 25056 - DNA, 16 bp, synthetic construct
  source 1..16: mol_type = other DNA
atctccacactgatca

SEQ ID NO: 25057 - DNA, 16 bp, synthetic construct
  source 1..16: mol_type = other DNA
tatctccacactgatc

SEQ ID NO: 25058 - DNA, 16 bp, synthetic construct
  source 1..16: mol_type = other DNA
catatctccacactga

SEQ ID NO: 25059 - DNA, 16 bp, synthetic construct
  source 1..16: mol_type = other DNA
acatatctccacactg

SEQ ID NO: 25060 - DNA, 16 bp, synthetic construct
  source 1..16: mol_type = other DNA
gacatatctccacact

SEQ ID NO: 25061 - DNA, 16 bp, synthetic construct
  source 1..16: mol_type = other DNA
gtgacatatctccaca

SEQ ID NO: 25062 - DNA, 16 bp, synthetic construct
  source 1..16: mol_type = other DNA
tgtgacatatctccac

SEQ ID NO: 25063 - DNA, 16 bp, synthetic construct
  source 1..16: mol_type = other DNA
ttgtgacatatctcca

SEQ ID NO: 25064 - DNA, 16 bp, synthetic construct
  source 1..16: mol_type = other DNA
cctactggagacattg

SEQ ID NO: 25065 - DNA, 16 bp, synthetic construct
  source 1..16: mol_type = other DNA
gcctactggagacatt

SEQ ID NO: 25066 - DNA, 16 bp, synthetic construct
  source 1..16: mol_type = other DNA
tgcctactggagacat

SEQ ID NO: 25067 - DNA, 16 bp, synthetic construct
  source 1..16: mol_type = other DNA
ctgcctactggagaca

SEQ ID NO: 25068 - DNA, 16 bp, synthetic construct
  source 1..16: mol_type = other DNA
tctgcctactggagac

SEQ ID NO: 25069 - DNA, 16 bp, synthetic construct
  source 1..16: mol_type = other DNA
ctctgcctactggaga

SEQ ID NO: 25070 - DNA, 16 bp, synthetic construct
  source 1..16: mol_type = other DNA
gctctgcctactggag

SEQ ID NO: 25071 - DNA, 16 bp, synthetic construct
  source 1..16: mol_type = other DNA
ggctctgcctactgga

SEQ ID NO: 25072 - DNA, 16 bp, synthetic construct
  source 1..16: mol_type = other DNA
aggctctgcctactgg

SEQ ID NO: 25073 - DNA, 16 bp, synthetic construct
  source 1..16: mol_type = other DNA
taggctctgcctactg

SEQ ID NO: 25074 - DNA, 16 bp, synthetic construct
  source 1..16: mol_type = other DNA
ctaggctctgcctact

SEQ ID NO: 25075 - DNA, 16 bp, synthetic construct
  source 1..16: mol_type = other DNA
cctgatcacccaggtg

SEQ ID NO: 25076 - DNA, 16 bp, synthetic construct
  source 1..16: mol_type = other DNA
ccctgatcacccaggt

SEQ ID NO: 25077 - DNA, 16 bp, synthetic construct
  source 1..16: mol_type = other DNA
gccctgatcacccagg

SEQ ID NO: 25078 - DNA, 16 bp, synthetic construct
  source 1..16: mol_type = other DNA
tgccctgatcacccag

SEQ ID NO: 25079 - DNA, 16 bp, synthetic construct
  source 1..16: mol_type = other DNA
ctgccctgatcaccca

SEQ ID NO: 25080 - DNA, 16 bp, synthetic construct
  source 1..16: mol_type = other DNA
tctgccctgatcaccc

SEQ ID NO: 25081 - DNA, 16 bp, synthetic construct
  source 1..16: mol_type = other DNA
ctctgccctgatcacc

SEQ ID NO: 25082 - DNA, 16 bp, synthetic construct
  source 1..16: mol_type = other DNA
tctctgccctgatcac

SEQ ID NO: 25083 - DNA, 16 bp, synthetic construct
  source 1..16: mol_type = other DNA
atctctgccctgatca

SEQ ID NO: 25084 - DNA, 16 bp, synthetic construct
  source 1..16: mol_type = other DNA
tatctctgccctgatc

SEQ ID NO: 25085 - DNA, 16 bp, synthetic construct
  source 1..16: mol_type = other DNA
atatctctgccctgat

SEQ ID NO: 25086 - DNA, 16 bp, synthetic construct
  source 1..16: mol_type = other DNA
catatctctgccctga

SEQ ID NO: 25087 - DNA, 16 bp, synthetic construct
  source 1..16: mol_type = other DNA
acatatctctgccctg

SEQ ID NO: 25088 - DNA, 16 bp, synthetic construct
  source 1..16: mol_type = other DNA
gacatatctctgccct

SEQ ID NO: 25089 - DNA, 16 bp, synthetic construct
  source 1..16: mol_type = other DNA
tgacatatctctgccc

SEQ ID NO: 25090 - DNA, 16 bp, synthetic construct
  source 1..16: mol_type = other DNA
gtgacatatctctgcc

SEQ ID NO: 25091 - DNA, 16 bp, synthetic construct
  source 1..16: mol_type = other DNA
ggcattgtgacatatc

SEQ ID NO: 25092 - DNA, 16 bp, synthetic construct
  source 1..16: mol_type = other DNA
gggcattgtgacatat

SEQ ID NO: 25093 - DNA, 16 bp, synthetic construct
  source 1..16: mol_type = other DNA
cagggggcattgtgac

SEQ ID NO: 25094 - DNA, 16 bp, synthetic construct
  source 1..16: mol_type = other DNA
acagggggcattgtga

SEQ ID NO: 25095 - DNA, 16 bp, synthetic construct
  source 1..16: mol_type = other DNA
tacagggggcattgtg

SEQ ID NO: 25096 - DNA, 16 bp, synthetic construct
  source 1..16: mol_type = other DNA
ttacagggggcattgt

SEQ ID NO: 25097 - DNA, 16 bp, synthetic construct
  source 1..16: mol_type = other DNA
cttacagggggcattg

SEQ ID NO: 25098 - DNA, 16 bp, synthetic construct
  source 1..16: mol_type = other DNA
gcttacagggggcatt

SEQ ID NO: 25099 - DNA, 16 bp, synthetic construct
  source 1..16: mol_type = other DNA
tgcttacagggggcat

SEQ ID NO: 25100 - DNA, 16 bp, synthetic construct
  source 1..16: mol_type = other DNA
ctgcttacagggggca

SEQ ID NO: 25101 - DNA, 16 bp, synthetic construct
  source 1..16: mol_type = other DNA
tctgcttacagggggc

SEQ ID NO: 25102 - DNA, 16 bp, synthetic construct
  source 1..16: mol_type = other DNA
atctgcttacaggggg

SEQ ID NO: 25103 - DNA, 16 bp, synthetic construct
  source 1..16: mol_type = other DNA
gatctgcttacagggg

SEQ ID NO: 25104 - DNA, 16 bp, synthetic construct
  source 1..16: mol_type = other DNA
ggatctgcttacaggg

SEQ ID NO: 25105 - DNA, 16 bp, synthetic construct
  source 1..16: mol_type = other DNA
gggatctgcttacagg

SEQ ID NO: 25106 - DNA, 16 bp, synthetic construct
  source 1..16: mol_type = other DNA
tgggatctgcttacag

SEQ ID NO: 25107 - DNA, 16 bp, synthetic construct
  source 1..16: mol_type = other DNA
ctgggatctgcttaca

SEQ ID NO: 25108 - DNA, 16 bp, synthetic construct
  source 1..16: mol_type = other DNA
tctgggatctgcttac

SEQ ID NO: 25109 - DNA, 16 bp, synthetic construct
  source 1..16: mol_type = other DNA
gtctgggatctgctta

SEQ ID NO: 25110 - DNA, 16 bp, synthetic construct
  source 1..16: mol_type = other DNA
tgtctgggatctgctt

SEQ ID NO: 25111 - DNA, 16 bp, synthetic construct
  source 1..16: mol_type = other DNA
ttgtctgggatctgct

SEQ ID NO: 25112 - DNA, 16 bp, synthetic construct
  source 1..16: mol_type = other DNA
cttgtctgggatctgc

SEQ ID NO: 25113 - DNA, 16 bp, synthetic construct
  source 1..16: mol_type = other DNA
tcttgtctgggatctg

SEQ ID NO: 25114 - DNA, 16 bp, synthetic construct
  source 1..16: mol_type = other DNA
ctcttgtctgggatct

SEQ ID NO: 25115 - DNA, 16 bp, synthetic construct
  source 1..16: mol_type = other DNA
actcttgtctgggatc

SEQ ID NO: 25116 - DNA, 16 bp, synthetic construct
  source 1..16: mol_type = other DNA
aactcttgtctgggat

SEQ ID NO: 25117 - DNA, 16 bp, synthetic construct
  source 1..16: mol_type = other DNA
caactcttgtctggga

SEQ ID NO: 25118 - DNA, 16 bp, synthetic construct
  source 1..16: mol_type = other DNA
gcaactcttgtctggg

SEQ ID NO: 25119 - DNA, 16 bp, synthetic construct
  source 1..16: mol_type = other DNA
tgcaactcttgtctgg

SEQ ID NO: 25120 - DNA, 16 bp, synthetic construct
  source 1..16: mol_type = other DNA
atgcaactcttgtctg

SEQ ID NO: 25121 - DNA, 16 bp, synthetic construct
  source 1..16: mol_type = other DNA
gatgcaactcttgtct

SEQ ID NO: 25122 - DNA, 16 bp, synthetic construct
  source 1..16: mol_type = other DNA
tgatgcaactcttgtc

SEQ ID NO: 25123 - DNA, 16 bp, synthetic construct
  source 1..16: mol_type = other DNA
gtgatgcaactcttgt

SEQ ID NO: 25124 - DNA, 16 bp, synthetic construct
  source 1..16: mol_type = other DNA
ggtgatgcaactcttg

SEQ ID NO: 25125 - DNA, 16 bp, synthetic construct
  source 1..16: mol_type = other DNA
aggtgatgcaactctt

SEQ ID NO: 25126 - DNA, 16 bp, synthetic construct
  source 1..16: mol_type = other DNA
gaggtgatgcaactct

SEQ ID NO: 25127 - DNA, 16 bp, synthetic construct
  source 1..16: mol_type = other DNA
cgaggtgatgcaactc

SEQ ID NO: 25128 - DNA, 16 bp, synthetic construct
  source 1..16: mol_type = other DNA
ccgaggtgatgcaact

SEQ ID NO: 25129 - DNA, 16 bp, synthetic construct
  source 1..16: mol_type = other DNA
accgaggtgatgcaac

SEQ ID NO: 25130 - DNA, 16 bp, synthetic construct
  source 1..16: mol_type = other DNA
caccgaggtgatgcaa

SEQ ID NO: 25131 - DNA, 16 bp, synthetic construct
  source 1..16: mol_type = other DNA
tcaccgaggtgatgca

SEQ ID NO: 25132 - DNA, 16 bp, synthetic construct
  source 1..16: mol_type = other DNA
atcaccgaggtgatgc

SEQ ID NO: 25133 - DNA, 16 bp, synthetic construct
  source 1..16: mol_type = other DNA
gatcaccgaggtgatg

SEQ ID NO: 25134 - DNA, 16 bp, synthetic construct
  source 1..16: mol_type = other DNA
tgatcaccgaggtgat

SEQ ID NO: 25135 - DNA, 16 bp, synthetic construct
  source 1..16: mol_type = other DNA
ctgatcaccgaggtga

SEQ ID NO: 25136 - DNA, 16 bp, synthetic construct
  source 1..16: mol_type = other DNA
actgatcaccgaggtg

SEQ ID NO: 25137 - DNA, 16 bp, synthetic construct
  source 1..16: mol_type = other DNA
cactgatcaccgaggt

SEQ ID NO: 25138 - DNA, 16 bp, synthetic construct
  source 1..16: mol_type = other DNA
gcactgatcaccgagg

SEQ ID NO: 25139 - DNA, 16 bp, synthetic construct
  source 1..16: mol_type = other DNA
tgcactgatcaccgag

SEQ ID NO: 25140 - DNA, 16 bp, synthetic construct
  source 1..16: mol_type = other DNA
gacgtatctctgcact

SEQ ID NO: 25141 - DNA, 16 bp, synthetic construct
  source 1..16: mol_type = other DNA
tgacgtatctctgcac

SEQ ID NO: 25142 - DNA, 16 bp, synthetic construct
  source 1..16: mol_type = other DNA
gcattgtgacgtatct

SEQ ID NO: 25143 - DNA, 16 bp, synthetic construct
  source 1..16: mol_type = other DNA
ggcattgtgacgtatc

SEQ ID NO: 25144 - DNA, 16 bp, synthetic construct
  source 1..16: mol_type = other DNA
gggcattgtgacgtat

SEQ ID NO: 25145 - DNA, 16 bp, synthetic construct
  source 1..16: mol_type = other DNA
ggggcattgtgacgta

SEQ ID NO: 25146 - DNA, 16 bp, synthetic construct
  source 1..16: mol_type = other DNA
aggggcattgtgacgt

SEQ ID NO: 25147 - DNA, 16 bp, synthetic construct
  source 1..16: mol_type = other DNA
caggggcattgtgacg

SEQ ID NO: 25148 - DNA, 16 bp, synthetic construct
  source 1..16: mol_type = other DNA
cctgggttatgtaact

SEQ ID NO: 25149 - DNA, 16 bp, synthetic construct
  source 1..16: mol_type = other DNA
acctgggttatgtaac

SEQ ID NO: 25150 - DNA, 16 bp, synthetic construct
  source 1..16: mol_type = other DNA
cacctgggttatgtaa

SEQ ID NO: 25151 - DNA, 16 bp, synthetic construct
  source 1..16: mol_type = other DNA
tcacctgggttatgta

SEQ ID NO: 25152 - DNA, 16 bp, synthetic construct
  source 1..16: mol_type = other DNA
atcacctgggttatgt

SEQ ID NO: 25153 - DNA, 16 bp, synthetic construct
  source 1..16: mol_type = other DNA
gatcacctgggttatg

SEQ ID NO: 25154 - DNA, 16 bp, synthetic construct
  source 1..16: mol_type = other DNA
ggatcacctgggttat

SEQ ID NO: 25155 - DNA, 16 bp, synthetic construct
  source 1..16: mol_type = other DNA
cggatcacctgggtta

SEQ ID NO: 25156 - DNA, 16 bp, synthetic construct
  source 1..16: mol_type = other DNA
acggatcacctgggtt

SEQ ID NO: 25157 - DNA, 16 bp, synthetic construct
  source 1..16: mol_type = other DNA
tacggatcacctgggt

SEQ ID NO: 25158 - DNA, 16 bp, synthetic construct
  source 1..16: mol_type = other DNA
gtacggatcacctggg

SEQ ID NO: 25159 - DNA, 16 bp, synthetic construct
  source 1..16: mol_type = other DNA
tgtacggatcacctgg

SEQ ID NO: 25160 - DNA, 16 bp, synthetic construct
  source 1..16: mol_type = other DNA
ctgtacggatcacctg

SEQ ID NO: 25161 - DNA, 16 bp, synthetic construct
  source 1..16: mol_type = other DNA
tctgtacggatcacct

SEQ ID NO: 25162 - DNA, 16 bp, synthetic construct
  source 1..16: mol_type = other DNA
ctctgtacggatcacc

SEQ ID NO: 25163 - DNA, 16 bp, synthetic construct
  source 1..16: mol_type = other DNA
actctgtacggatcac

SEQ ID NO: 25164 - DNA, 16 bp, synthetic construct
  source 1..16: mol_type = other DNA
cactctgtacggatca

SEQ ID NO: 25165 - DNA, 16 bp, synthetic construct
  source 1..16: mol_type = other DNA
tcactctgtacggatc

SEQ ID NO: 25166 - DNA, 16 bp, synthetic construct
  source 1..16: mol_type = other DNA
atcactctgtacggat

SEQ ID NO: 25167 - DNA, 16 bp, synthetic construct
  source 1..16: mol_type = other DNA
catcactctgtacgga

SEQ ID NO: 25168 - DNA, 16 bp, synthetic construct
  source 1..16: mol_type = other DNA
acatcactctgtacgg

SEQ ID NO: 25169 - DNA, 16 bp, synthetic construct
  source 1..16: mol_type = other DNA
gacatcactctgtacg

SEQ ID NO: 25170 - DNA, 16 bp, synthetic construct
  source 1..16: mol_type = other DNA
gtgacatcactctgta

SEQ ID NO: 25171 - DNA, 16 bp, synthetic construct
  source 1..16: mol_type = other DNA
tgtgacatcactctgt

SEQ ID NO: 25172 - DNA, 16 bp, synthetic construct
  source 1..16: mol_type = other DNA
gttgtgacatcactct

SEQ ID NO: 25173 - DNA, 16 bp, synthetic construct
  source 1..16: mol_type = other DNA
cgttgtgacatcactc

SEQ ID NO: 25174 - DNA, 16 bp, synthetic construct
  source 1..16: mol_type = other DNA
gcgttgtgacatcact

SEQ ID NO: 25175 - DNA, 16 bp, synthetic construct
  source 1..16: mol_type = other DNA
ggcgttgtgacatcac

SEQ ID NO: 25176 - DNA, 16 bp, synthetic construct
  source 1..16: mol_type = other DNA
gggcgttgtgacatca

SEQ ID NO: 25177 - DNA, 16 bp, synthetic construct
  source 1..16: mol_type = other DNA
agggcgttgtgacatc

SEQ ID NO: 25178 - DNA, 16 bp, synthetic construct
  source 1..16: mol_type = other DNA
gagggcgttgtgacat

SEQ ID NO: 25179 - DNA, 16 bp, synthetic construct
  source 1..16: mol_type = other DNA
agagggcgttgtgaca

SEQ ID NO: 25180 - DNA, 16 bp, synthetic construct
  source 1..16: mol_type = other DNA
cagagggcgttgtgac

SEQ ID NO: 25181 - DNA, 16 bp, synthetic construct
  source 1..16: mol_type = other DNA
acagagggcgttgtga

SEQ ID NO: 25182 - DNA, 16 bp, synthetic construct
  source 1..16: mol_type = other DNA
tacagagggcgttgtg

SEQ ID NO: 25183 - DNA, 16 bp, synthetic construct
  source 1..16: mol_type = other DNA
ctacagagggcgttgt

SEQ ID NO: 25184 - DNA, 16 bp, synthetic construct
  source 1..16: mol_type = other DNA
cctacagagggcgttg

SEQ ID NO: 25185 - DNA, 16 bp, synthetic construct
  source 1..16: mol_type = other DNA
gcctacagagggcgtt

SEQ ID NO: 25186 - DNA, 16 bp, synthetic construct
  source 1..16: mol_type = other DNA
tgcctacagagggcgt

SEQ ID NO: 25187 - DNA, 16 bp, synthetic construct
  source 1..16: mol_type = other DNA
ctgcctacagagggcg

SEQ ID NO: 25188 - DNA, 16 bp, synthetic construct
  source 1..16: mol_type = other DNA
tctgcctacagagggc

SEQ ID NO: 25189 - DNA, 16 bp, synthetic construct
  source 1..16: mol_type = other DNA
ctctgcctacagaggg

SEQ ID NO: 25190 - DNA, 16 bp, synthetic construct
  source 1..16: mol_type = other DNA
tctctgcctacagagg

SEQ ID NO: 25191 - DNA, 16 bp, synthetic construct
  source 1..16: mol_type = other DNA
gtctctgcctacagag

SEQ ID NO: 25192 - DNA, 16 bp, synthetic construct
  source 1..16: mol_type = other DNA
agtctctgcctacaga

SEQ ID NO: 25193 - DNA, 16 bp, synthetic construct
  source 1..16: mol_type = other DNA
tagtctctgcctacag

SEQ ID NO: 25194 - DNA, 16 bp, synthetic construct
  source 1..16: mol_type = other DNA
ctagtctctgcctaca

SEQ ID NO: 25195 - DNA, 16 bp, synthetic construct
  source 1..16: mol_type = other DNA
tctagtctctgcctac

SEQ ID NO: 25196 - DNA, 16 bp, synthetic construct
  source 1..16: mol_type = other DNA
ttctagtctctgccta

SEQ ID NO: 25197 - DNA, 16 bp, synthetic construct
  source 1..16: mol_type = other DNA
tttctagtctctgcct

SEQ ID NO: 25198 - DNA, 16 bp, synthetic construct
  source 1..16: mol_type = other DNA
ttttctagtctctgcc

SEQ ID NO: 25199 - DNA, 16 bp, synthetic construct
  source 1..16: mol_type = other DNA
cttttctagtctctgc

SEQ ID NO: 25200 - DNA, 16 bp, synthetic construct
  source 1..16: mol_type = other DNA
tcttttctagtctctg

SEQ ID NO: 25201 - DNA, 16 bp, synthetic construct
  source 1..16: mol_type = other DNA
ctcttttctagtctct

SEQ ID NO: 25202 - DNA, 16 bp, synthetic construct
  source 1..16: mol_type = other DNA
actcttttctagtctc

SEQ ID NO: 25203 - DNA, 16 bp, synthetic construct
  source 1..16: mol_type = other DNA
cccaggtaatgtaact

SEQ ID NO: 25204 - DNA, 16 bp, synthetic construct
  source 1..16: mol_type = other DNA
cacccaggtaatgtaa

SEQ ID NO: 25205 - DNA, 16 bp, synthetic construct
  source 1..16: mol_type = other DNA
tcacccaggtaatgta

SEQ ID NO: 25206 - DNA, 16 bp, synthetic construct
  source 1..16: mol_type = other DNA
atcacccaggtaatgt

SEQ ID NO: 25207 - DNA, 16 bp, synthetic construct
  source 1..16: mol_type = other DNA
gatcacccaggtaatg

SEQ ID NO: 25208 - DNA, 16 bp, synthetic construct
  source 1..16: mol_type = other DNA
tgatcacccaggtaat

SEQ ID NO: 25209 - DNA, 16 bp, synthetic construct
  source 1..16: mol_type = other DNA
ctgatcacccaggtaa

SEQ ID NO: 25210 - DNA, 16 bp, synthetic construct
  source 1..16: mol_type = other DNA
actgatcacccaggta

SEQ ID NO: 25211 - DNA, 16 bp, synthetic construct
  source 1..16: mol_type = other DNA
ctacagggggcattgt

SEQ ID NO: 25212 - DNA, 16 bp, synthetic construct
  source 1..16: mol_type = other DNA
cctacagggggcattg

SEQ ID NO: 25213 - DNA, 16 bp, synthetic construct
  source 1..16: mol_type = other DNA
gcctacagggggcatt

SEQ ID NO: 25214 - DNA, 16 bp, synthetic construct
  source 1..16: mol_type = other DNA
tgcctacagggggcat

SEQ ID NO: 25215 - DNA, 16 bp, synthetic construct
  source 1..16: mol_type = other DNA
ctgcctacagggggca

SEQ ID NO: 25216 - DNA, 16 bp, synthetic construct
  source 1..16: mol_type = other DNA
tctgcctacagggggc

SEQ ID NO: 25217 - DNA, 16 bp, synthetic construct
  source 1..16: mol_type = other DNA
ctctgcctacaggggg

SEQ ID NO: 25218 - DNA, 16 bp, synthetic construct
  source 1..16: mol_type = other DNA
tgctctgcctacaggg

SEQ ID NO: 25219 - DNA, 16 bp, synthetic construct
  source 1..16: mol_type = other DNA
atgctctgcctacagg

SEQ ID NO: 25220 - DNA, 16 bp, synthetic construct
  source 1..16: mol_type = other DNA
tatgctctgcctacag

SEQ ID NO: 25221 - DNA, 16 bp, synthetic construct
  source 1..16: mol_type = other DNA
ctatgctctgcctaca

SEQ ID NO: 25222 - DNA, 16 bp, synthetic construct
  source 1..16: mol_type = other DNA
tctatgctctgcctac

SEQ ID NO: 25223 - DNA, 16 bp, synthetic construct
  source 1..16: mol_type = other DNA
ctctatgctctgccta

SEQ ID NO: 25224 - DNA, 16 bp, synthetic construct
  source 1..16: mol_type = other DNA
tctctatgctctgcct

SEQ ID NO: 25225 - DNA, 16 bp, synthetic construct
  source 1..16: mol_type = other DNA
ttctctatgctctgcc

SEQ ID NO: 25226 - DNA, 16 bp, synthetic construct
  source 1..16: mol_type = other DNA
cttctctatgctctgc

SEQ ID NO: 25227 - DNA, 16 bp, synthetic construct
  source 1..16: mol_type = other DNA
tcttctctatgctctg

SEQ ID NO: 25228 - DNA, 16 bp, synthetic construct
  source 1..16: mol_type = other DNA
ctcttctctatgctct

SEQ ID NO: 25229 - DNA, 16 bp, synthetic construct
  source 1..16: mol_type = other DNA
actcttctctatgctc

SEQ ID NO: 25230 - DNA, 16 bp, synthetic construct
  source 1..16: mol_type = other DNA
aactcttctctatgct

SEQ ID NO: 25231 - DNA, 16 bp, synthetic construct
  source 1..16: mol_type = other DNA
caactcttctctatgc

SEQ ID NO: 25232 - DNA, 16 bp, synthetic construct
  source 1..16: mol_type = other DNA
gcaactcttctctatg

SEQ ID NO: 25233 - DNA, 16 bp, synthetic construct
  source 1..16: mol_type = other DNA
tgcaactcttctctat

SEQ ID NO: 25234 - DNA, 16 bp, synthetic construct
  source 1..16: mol_type = other DNA
atgcaactcttctcta

SEQ ID NO: 25235 - DNA, 16 bp, synthetic construct
  source 1..16: mol_type = other DNA
gatgcaactcttctct

SEQ ID NO: 25236 - DNA, 16 bp, synthetic construct
  source 1..16: mol_type = other DNA
tgatgcaactcttctc

SEQ ID NO: 25237 - DNA, 16 bp, synthetic construct
  source 1..16: mol_type = other DNA
gtgatgcaactcttct

SEQ ID NO: 25238 - DNA, 16 bp, synthetic construct
  source 1..16: mol_type = other DNA
ggtgatgcaactcttc

SEQ ID NO: 25239 - DNA, 16 bp, synthetic construct
  source 1..16: mol_type = other DNA
caggtgatgcaactct

SEQ ID NO: 25240 - DNA, 16 bp, synthetic construct
  source 1..16: mol_type = other DNA
ccaggtgatgcaactc

SEQ ID NO: 25241 - DNA, 16 bp, synthetic construct
  source 1..16: mol_type = other DNA
cccaggtgatgcaact

SEQ ID NO: 25242 - DNA, 16 bp, synthetic construct
  source 1..16: mol_type = other DNA
acccaggtgatgcaac

SEQ ID NO: 25243 - DNA, 16 bp, synthetic construct
  source 1..16: mol_type = other DNA
cacccaggtgatgcaa

SEQ ID NO: 25244 - DNA, 16 bp, synthetic construct
  source 1..16: mol_type = other DNA
tcacccaggtgatgca

SEQ ID NO: 25245 - DNA, 16 bp, synthetic construct
  source 1..16: mol_type = other DNA
atcacccaggtgatgc

SEQ ID NO: 25246 - DNA, 16 bp, synthetic construct
  source 1..16: mol_type = other DNA
tacactgatcacccag

SEQ ID NO: 25247 - DNA, 16 bp, synthetic construct
  source 1..16: mol_type = other DNA
ctacactgatcaccca

SEQ ID NO: 25248 - DNA, 16 bp, synthetic construct
  source 1..16: mol_type = other DNA
tctacactgatcaccc

SEQ ID NO: 25249 - DNA, 16 bp, synthetic construct
  source 1..16: mol_type = other DNA
ggggacattgtgacat

SEQ ID NO: 25250 - DNA, 16 bp, synthetic construct
  source 1..16: mol_type = other DNA
ggatctgcctacaggg

SEQ ID NO: 25251 - DNA, 16 bp, synthetic construct
  source 1..16: mol_type = other DNA
aggatctgcctacagg

SEQ ID NO: 25252 - DNA, 16 bp, synthetic construct
  source 1..16: mol_type = other DNA
taggatctgcctacag

SEQ ID NO: 25253 - DNA, 16 bp, synthetic construct
  source 1..16: mol_type = other DNA
ctaggatctgcctaca

SEQ ID NO: 25254 - DNA, 16 bp, synthetic construct
  source 1..16: mol_type = other DNA
tctaggatctgcctac

SEQ ID NO: 25255 - DNA, 16 bp, synthetic construct
  source 1..16: mol_type = other DNA
gtctaggatctgccta

SEQ ID NO: 25256 - DNA, 16 bp, synthetic construct
  source 1..16: mol_type = other DNA
tgtctaggatctgcct

SEQ ID NO: 25257 - DNA, 16 bp, synthetic construct
  source 1..16: mol_type = other DNA
ttgtctaggatctgcc

SEQ ID NO: 25258 - DNA, 16 bp, synthetic construct
  source 1..16: mol_type = other DNA
cttgtctaggatctgc

SEQ ID NO: 25259 - DNA, 16 bp, synthetic construct
  source 1..16: mol_type = other DNA
tcttgtctaggatctg

SEQ ID NO: 25260 - DNA, 16 bp, synthetic construct
  source 1..16: mol_type = other DNA
ctcttgtctaggatct

SEQ ID NO: 25261 - DNA, 16 bp, synthetic construct
  source 1..16: mol_type = other DNA
actcttgtctaggatc

SEQ ID NO: 25262 - DNA, 16 bp, synthetic construct
  source 1..16: mol_type = other DNA
gcactgatcacctaag

SEQ ID NO: 25263 - DNA, 16 bp, synthetic construct
  source 1..16: mol_type = other DNA
tgcactgatcacctaa

SEQ ID NO: 25264 - DNA, 16 bp, synthetic construct
  source 1..16: mol_type = other DNA
tctgcactgatcacct

SEQ ID NO: 25265 - DNA, 16 bp, synthetic construct
  source 1..16: mol_type = other DNA
ctctgcactgatcact

SEQ ID NO: 25266 - DNA, 16 bp, synthetic construct
  source 1..16: mol_type = other DNA
tctaggctttggccta

SEQ ID NO: 25267 - DNA, 16 bp, synthetic construct
  source 1..16: mol_type = other DNA
gtctaggctttggcct

SEQ ID NO: 25268 - DNA, 16 bp, synthetic construct
  source 1..16: mol_type = other DNA
tgtctaggctttggcc

SEQ ID NO: 25269 - DNA, 16 bp, synthetic construct
  source 1..16: mol_type = other DNA
ttgtctaggctttggc

SEQ ID NO: 25270 - DNA, 16 bp, synthetic construct
  source 1..16: mol_type = other DNA
attgtctaggctttgg

SEQ ID NO: 25271 - DNA, 16 bp, synthetic construct
  source 1..16: mol_type = other DNA
ctattgtctaggcttt

SEQ ID NO: 25272 - DNA, 16 bp, synthetic construct
  source 1..16: mol_type = other DNA
actattgtctaggctt

SEQ ID NO: 25273 - DNA, 16 bp, synthetic construct
  source 1..16: mol_type = other DNA
cccaagtgatgtaact

SEQ ID NO: 25274 - DNA, 16 bp, synthetic construct
  source 1..16: mol_type = other DNA
tcacccaagtgatgta

SEQ ID NO: 25275 - DNA, 16 bp, synthetic construct
  source 1..16: mol_type = other DNA
atcacccaagtgatgt

SEQ ID NO: 25276 - DNA, 16 bp, synthetic construct
  source 1..16: mol_type = other DNA
gatcacccaagtgatg

SEQ ID NO: 25277 - DNA, 16 bp, synthetic construct
  source 1..16: mol_type = other DNA
tgatcacccaagtgat

SEQ ID NO: 25278 - DNA, 16 bp, synthetic construct
  source 1..16: mol_type = other DNA
ctgatcacccaagtga

SEQ ID NO: 25279 - DNA, 16 bp, synthetic construct
  source 1..16: mol_type = other DNA
actgatcacccaagtg

SEQ ID NO: 25280 - DNA, 16 bp, synthetic construct
  source 1..16: mol_type = other DNA
cactgatcacccaagt

SEQ ID NO: 25281 - DNA, 16 bp, synthetic construct
  source 1..16: mol_type = other DNA
ccactgatcacccaag

SEQ ID NO: 25282 - DNA, 16 bp, synthetic construct
  source 1..16: mol_type = other DNA
gccactgatcacccaa

SEQ ID NO: 25283 - DNA, 16 bp, synthetic construct
  source 1..16: mol_type = other DNA
cgccactgatcaccca

SEQ ID NO: 25284 - DNA, 16 bp, synthetic construct
  source 1..16: mol_type = other DNA
tcgccactgatcaccc

SEQ ID NO: 25285 - DNA, 16 bp, synthetic construct
  source 1..16: mol_type = other DNA
ctcgccactgatcacc

SEQ ID NO: 25286 - DNA, 16 bp, synthetic construct
  source 1..16: mol_type = other DNA
tctcgccactgatcac

SEQ ID NO: 25287 - DNA, 16 bp, synthetic construct
  source 1..16: mol_type = other DNA
atctcgccactgatca

SEQ ID NO: 25288 - DNA, 16 bp, synthetic construct
  source 1..16: mol_type = other DNA
gatctcgccactgatc

SEQ ID NO: 25289 - DNA, 16 bp, synthetic construct
  source 1..16: mol_type = other DNA
agatctcgccactgat

SEQ ID NO: 25290 - DNA, 16 bp, synthetic construct
  source 1..16: mol_type = other DNA
gagatctcgccactga

SEQ ID NO: 25291 - DNA, 16 bp, synthetic construct
  source 1..16: mol_type = other DNA
agagatctcgccactg

SEQ ID NO: 25292 - DNA, 16 bp, synthetic construct
  source 1..16: mol_type = other DNA
gagagatctcgccact

SEQ ID NO: 25293 - DNA, 16 bp, synthetic construct
  source 1..16: mol_type = other DNA
tgagagatctcgccac

SEQ ID NO: 25294 - DNA, 16 bp, synthetic construct
  source 1..16: mol_type = other DNA
gtgagagatctcgcca

SEQ ID NO: 25295 - DNA, 16 bp, synthetic construct
  source 1..16: mol_type = other DNA
tgtgagagatctcgcc

SEQ ID NO: 25296 - DNA, 16 bp, synthetic construct
  source 1..16: mol_type = other DNA
ttgtgagagatctcgc

SEQ ID NO: 25297 - DNA, 16 bp, synthetic construct
  source 1..16: mol_type = other DNA
ggggaattgtgagaga

SEQ ID NO: 25298 - DNA, 16 bp, synthetic construct
  source 1..16: mol_type = other DNA
caggggaattgtgaga

SEQ ID NO: 25299 - DNA, 16 bp, synthetic construct
  source 1..16: mol_type = other DNA
cctacaggggaattgt

SEQ ID NO: 25300 - DNA, 16 bp, synthetic construct
  source 1..16: mol_type = other DNA
gcctacaggggaattg

SEQ ID NO: 25301 - DNA, 16 bp, synthetic construct
  source 1..16: mol_type = other DNA
tgcctacaggggaatt

SEQ ID NO: 25302 - DNA, 16 bp, synthetic construct
  source 1..16: mol_type = other DNA
ctgcctacaggggaat

SEQ ID NO: 25303 - DNA, 16 bp, synthetic construct
  source 1..16: mol_type = other DNA
tctgcctacaggggaa

SEQ ID NO: 25304 - DNA, 16 bp, synthetic construct
  source 1..16: mol_type = other DNA
ataagctctgcctaca

SEQ ID NO: 25305 - DNA, 16 bp, synthetic construct
  source 1..16: mol_type = other DNA
tataagctctgcctac

SEQ ID NO: 25306 - DNA, 16 bp, synthetic construct
  source 1..16: mol_type = other DNA
gtataagctctgccta

SEQ ID NO: 25307 - DNA, 16 bp, synthetic construct
  source 1..16: mol_type = other DNA
tgtataagctctgcct

SEQ ID NO: 25308 - DNA, 16 bp, synthetic construct
  source 1..16: mol_type = other DNA
ttgtataagctctgcc

SEQ ID NO: 25309 - DNA, 16 bp, synthetic construct
  source 1..16: mol_type = other DNA
gttgtataagctctgc

SEQ ID NO: 25310 - DNA, 16 bp, synthetic construct
  source 1..16: mol_type = other DNA
tgggggcattgtgaca

SEQ ID NO: 25311 - DNA, 16 bp, synthetic construct
  source 1..16: mol_type = other DNA
atgggggcattgtgac

SEQ ID NO: 25312 - DNA, 16 bp, synthetic construct
  source 1..16: mol_type = other DNA
tatgggggcattgtga

SEQ ID NO: 25313 - DNA, 16 bp, synthetic construct
  source 1..16: mol_type = other DNA
cctatgggggcattgt

SEQ ID NO: 25314 - DNA, 16 bp, synthetic construct
  source 1..16: mol_type = other DNA
gcctatgggggcattg

SEQ ID NO: 25315 - DNA, 16 bp, synthetic construct
  source 1..16: mol_type = other DNA
tgcctatgggggcatt

SEQ ID NO: 25316 - DNA, 16 bp, synthetic construct
  source 1..16: mol_type = other DNA
gtatttctgcactgat

SEQ ID NO: 25317 - DNA, 16 bp, synthetic construct
  source 1..16: mol_type = other DNA
cgtatttctgcactga

SEQ ID NO: 25318 - DNA, 16 bp, synthetic construct
  source 1..16: mol_type = other DNA
acgtatttctgcactg

SEQ ID NO: 25319 - DNA, 16 bp, synthetic construct
  source 1..16: mol_type = other DNA
gacgtatttctgcact

SEQ ID NO: 25320 - DNA, 16 bp, synthetic construct
  source 1..16: mol_type = other DNA
tgacgtatttctgcac

SEQ ID NO: 25321 - DNA, 16 bp, synthetic construct
  source 1..16: mol_type = other DNA
gtgacgtatttctgca

SEQ ID NO: 25322 - DNA, 16 bp, synthetic construct
  source 1..16: mol_type = other DNA
tgtgacgtatttctgc

SEQ ID NO: 25323 - DNA, 16 bp, synthetic construct
  source 1..16: mol_type = other DNA
ggcattgtgacgtatt

SEQ ID NO: 25324 - DNA, 16 bp, synthetic construct
  source 1..16: mol_type = other DNA
gggggcattgtgacgt

SEQ ID NO: 25325 - DNA, 16 bp, synthetic construct
  source 1..16: mol_type = other DNA
agggggcattgtgacg

SEQ ID NO: 25326 - DNA, 16 bp, synthetic construct
  source 1..16: mol_type = other DNA
taagggggcattgtga

SEQ ID NO: 25327 - DNA, 16 bp, synthetic construct
  source 1..16: mol_type = other DNA
ctaagggggcattgtg

SEQ ID NO: 25328 - DNA, 16 bp, synthetic construct
  source 1..16: mol_type = other DNA
cctaagggggcattgt

SEQ ID NO: 25329 - DNA, 16 bp, synthetic construct
  source 1..16: mol_type = other DNA
gcctaagggggcattg

SEQ ID NO: 25330 - DNA, 16 bp, synthetic construct
  source 1..16: mol_type = other DNA
tgcctaagggggcatt

SEQ ID NO: 25331 - DNA, 16 bp, synthetic construct
  source 1..16: mol_type = other DNA
ctgcctaagggggcat

SEQ ID NO: 25332 - DNA, 16 bp, synthetic construct
  source 1..16: mol_type = other DNA
tctgcctaagggggca

SEQ ID NO: 25333 - DNA, 16 bp, synthetic construct
  source 1..16: mol_type = other DNA
ctctgcctaagggggc

SEQ ID NO: 25334 - DNA, 16 bp, synthetic construct
  source 1..16: mol_type = other DNA
gctctgcctaaggggg

SEQ ID NO: 25335 - DNA, 16 bp, synthetic construct
  source 1..16: mol_type = other DNA
ggctctgcctaagggg

SEQ ID NO: 25336 - DNA, 16 bp, synthetic construct
  source 1..16: mol_type = other DNA
aggctctgcctaaggg

SEQ ID NO: 25337 - DNA, 16 bp, synthetic construct
  source 1..16: mol_type = other DNA
taggctctgcctaagg

SEQ ID NO: 25338 - DNA, 16 bp, synthetic construct
  source 1..16: mol_type = other DNA
ctaggctctgcctaag

SEQ ID NO: 25339 - DNA, 16 bp, synthetic construct
  source 1..16: mol_type = other DNA
tctaggctctgcctaa

SEQ ID NO: 25340 - DNA, 16 bp, synthetic construct
  source 1..16: mol_type = other DNA
tttgtctaggctctgc

SEQ ID NO: 25341 - DNA, 16 bp, synthetic construct
  source 1..16: mol_type = other DNA
ttttgtctaggctctg

SEQ ID NO: 25342 - DNA, 16 bp, synthetic construct
  source 1..16: mol_type = other DNA
cttttgtctaggctct

SEQ ID NO: 25343 - DNA, 16 bp, synthetic construct
  source 1..16: mol_type = other DNA
gcttttgtctaggctc

SEQ ID NO: 25344 - DNA, 16 bp, synthetic construct
  source 1..16: mol_type = other DNA
ggcttttgtctaggct

SEQ ID NO: 25345 - DNA, 16 bp, synthetic construct
  source 1..16: mol_type = other DNA
gggcttttgtctaggc

SEQ ID NO: 25346 - DNA, 16 bp, synthetic construct
  source 1..16: mol_type = other DNA
ggggcttttgtctagg

SEQ ID NO: 25347 - DNA, 16 bp, synthetic construct
  source 1..16: mol_type = other DNA
tggggcttttgtctag

SEQ ID NO: 25348 - DNA, 16 bp, synthetic construct
  source 1..16: mol_type = other DNA
atggggcttttgtcta

SEQ ID NO: 25349 - DNA, 16 bp, synthetic construct
  source 1..16: mol_type = other DNA
gatggggcttttgtct

SEQ ID NO: 25350 - DNA, 16 bp, synthetic construct
  source 1..16: mol_type = other DNA
tgatggggcttttgtc

SEQ ID NO: 25351 - DNA, 16 bp, synthetic construct
  source 1..16: mol_type = other DNA
gtgatggggcttttgt

SEQ ID NO: 25352 - DNA, 16 bp, synthetic construct
  source 1..16: mol_type = other DNA
ggtgatggggcttttg

SEQ ID NO: 25353 - DNA, 16 bp, synthetic construct
  source 1..16: mol_type = other DNA
aggtgatggggctttt

SEQ ID NO: 25354 - DNA, 16 bp, synthetic construct
  source 1..16: mol_type = other DNA
caggtgatggggcttt

SEQ ID NO: 25355 - DNA, 16 bp, synthetic construct
  source 1..16: mol_type = other DNA
ccaggtgatggggctt

SEQ ID NO: 25356 - DNA, 16 bp, synthetic construct
  source 1..16: mol_type = other DNA
tccaggtgatggggct

SEQ ID NO: 25357 - DNA, 16 bp, synthetic construct
  source 1..16: mol_type = other DNA
atccaggtgatggggc

SEQ ID NO: 25358 - DNA, 16 bp, synthetic construct
  source 1..16: mol_type = other DNA
catccaggtgatgggg

SEQ ID NO: 25359 - DNA, 16 bp, synthetic construct
  source 1..16: mol_type = other DNA
tcatccaggtgatggg

SEQ ID NO: 25360 - DNA, 16 bp, synthetic construct
  source 1..16: mol_type = other DNA
atcatccaggtgatgg

SEQ ID NO: 25361 - DNA, 16 bp, synthetic construct
  source 1..16: mol_type = other DNA
ctaatcatccaggtga

SEQ ID NO: 25362 - DNA, 16 bp, synthetic construct
  source 1..16: mol_type = other DNA
actaatcatccaggtg

SEQ ID NO: 25363 - DNA, 16 bp, synthetic construct
  source 1..16: mol_type = other DNA
cactaatcatccaggt

SEQ ID NO: 25364 - DNA, 16 bp, synthetic construct
  source 1..16: mol_type = other DNA
gcactaatcatccagg

SEQ ID NO: 25365 - DNA, 16 bp, synthetic construct
  source 1..16: mol_type = other DNA
ctgcactaatcatcca

SEQ ID NO: 25366 - DNA, 16 bp, synthetic construct
  source 1..16: mol_type = other DNA
tctgcactaatcatcc

SEQ ID NO: 25367 - DNA, 16 bp, synthetic construct
  source 1..16: mol_type = other DNA
gtggcattgtgacata

SEQ ID NO: 25368 - DNA, 16 bp, synthetic construct
  source 1..16: mol_type = other DNA
agtggcattgtgacat

SEQ ID NO: 25369 - DNA, 16 bp, synthetic construct
  source 1..16: mol_type = other DNA
cagtggcattgtgaca

SEQ ID NO: 25370 - DNA, 16 bp, synthetic construct
  source 1..16: mol_type = other DNA
acagtggcattgtgac

SEQ ID NO: 25371 - DNA, 16 bp, synthetic construct
  source 1..16: mol_type = other DNA
tacagtggcattgtga

SEQ ID NO: 25372 - DNA, 16 bp, synthetic construct
  source 1..16: mol_type = other DNA
ctacagtggcattgtg

SEQ ID NO: 25373 - DNA, 16 bp, synthetic construct
  source 1..16: mol_type = other DNA
cctacagtggcattgt

SEQ ID NO: 25374 - DNA, 16 bp, synthetic construct
  source 1..16: mol_type = other DNA
gcctacagtggcattg

SEQ ID NO: 25375 - DNA, 16 bp, synthetic construct
  source 1..16: mol_type = other DNA
tgcctacagtggcatt

SEQ ID NO: 25376 - DNA, 16 bp, synthetic construct
  source 1..16: mol_type = other DNA
ctgcctacagtggcat

SEQ ID NO: 25377 - DNA, 16 bp, synthetic construct
  source 1..16: mol_type = other DNA
tctgcctacagtggca

SEQ ID NO: 25378 - DNA, 16 bp, synthetic construct
  source 1..16: mol_type = other DNA
ctctgcctacagtggc

SEQ ID NO: 25379 - DNA, 16 bp, synthetic construct
  source 1..16: mol_type = other DNA
gctctgcctacagtgg

SEQ ID NO: 25380 - DNA, 16 bp, synthetic construct
  source 1..16: mol_type = other DNA
ggctctgcctacagtg

SEQ ID NO: 25381 - DNA, 16 bp, synthetic construct
  source 1..16: mol_type = other DNA
aggctctgcctacagt

SEQ ID NO: 25382 - DNA, 16 bp, synthetic construct
  source 1..16: mol_type = other DNA
tcacctaggtcatata

SEQ ID NO: 25383 - DNA, 16 bp, synthetic construct
  source 1..16: mol_type = other DNA
atcacctaggtcatat

SEQ ID NO: 25384 - DNA, 16 bp, synthetic construct
  source 1..16: mol_type = other DNA
gatcacctaggtcata

SEQ ID NO: 25385 - DNA, 16 bp, synthetic construct
  source 1..16: mol_type = other DNA
tgatcacctaggtcat

SEQ ID NO: 25386 - DNA, 16 bp, synthetic construct
  source 1..16: mol_type = other DNA
ctgatcacctaggtca

SEQ ID NO: 25387 - DNA, 16 bp, synthetic construct
  source 1..16: mol_type = other DNA
actgatcacctaggtc

SEQ ID NO: 25388 - DNA, 16 bp, synthetic construct
  source 1..16: mol_type = other DNA
tgtatctctgcactga

SEQ ID NO: 25389 - DNA, 16 bp, synthetic construct
  source 1..16: mol_type = other DNA
atgtatctctgcactg

SEQ ID NO: 25390 - DNA, 16 bp, synthetic construct
  source 1..16: mol_type = other DNA
cctacaggggcattgc

SEQ ID NO: 25391 - DNA, 16 bp, synthetic construct
  source 1..16: mol_type = other DNA
gggctctgcctacagg

SEQ ID NO: 25392 - DNA, 16 bp, synthetic construct
  source 1..16: mol_type = other DNA
agggctctgcctacag

SEQ ID NO: 25393 - DNA, 16 bp, synthetic construct
  source 1..16: mol_type = other DNA
cagggctctgcctaca

SEQ ID NO: 25394 - DNA, 16 bp, synthetic construct
  source 1..16: mol_type = other DNA
tcagggctctgcctac

SEQ ID NO: 25395 - DNA, 16 bp, synthetic construct
  source 1..16: mol_type = other DNA
gtcagggctctgccta

SEQ ID NO: 25396 - DNA, 16 bp, synthetic construct
  source 1..16: mol_type = other DNA
tgtcagggctctgcct

SEQ ID NO: 25397 - DNA, 16 bp, synthetic construct
  source 1..16: mol_type = other DNA
ttgtcagggctctgcc

SEQ ID NO: 25398 - DNA, 16 bp, synthetic construct
  source 1..16: mol_type = other DNA
cttgtcagggctctgc

SEQ ID NO: 25399 - DNA, 16 bp, synthetic construct
  source 1..16: mol_type = other DNA
acttgtcagggctctg

SEQ ID NO: 25400 - DNA, 16 bp, synthetic construct
  source 1..16: mol_type = other DNA
cacttgtcagggctct

SEQ ID NO: 25401 - DNA, 16 bp, synthetic construct
  source 1..16: mol_type = other DNA
ccacttgtcagggctc

SEQ ID NO: 25402 - DNA, 16 bp, synthetic construct
  source 1..16: mol_type = other DNA
accacttgtcagggct

SEQ ID NO: 25403 - DNA, 16 bp, synthetic construct
  source 1..16: mol_type = other DNA
taccacttgtcagggc

SEQ ID NO: 25404 - DNA, 16 bp, synthetic construct
  source 1..16: mol_type = other DNA
gtaccacttgtcaggg

SEQ ID NO: 25405 - DNA, 16 bp, synthetic construct
  source 1..16: mol_type = other DNA
tgtaccacttgtcagg

SEQ ID NO: 25406 - DNA, 16 bp, synthetic construct
  source 1..16: mol_type = other DNA
atgtaccacttgtcag

SEQ ID NO: 25407 - DNA, 16 bp, synthetic construct
  source 1..16: mol_type = other DNA
gatgtaccacttgtca

SEQ ID NO: 25408 - DNA, 16 bp, synthetic construct
  source 1..16: mol_type = other DNA
tgatgtaccacttgtc

SEQ ID NO: 25409 - DNA, 16 bp, synthetic construct
  source 1..16: mol_type = other DNA
gtgatgtaccacttgt

SEQ ID NO: 25410 - DNA, 16 bp, synthetic construct
  source 1..16: mol_type = other DNA
ggtgatgtaccacttg

SEQ ID NO: 25411 - DNA, 16 bp, synthetic construct
  source 1..16: mol_type = other DNA
aggtgatgtaccactt

SEQ ID NO: 25412 - DNA, 16 bp, synthetic construct
  source 1..16: mol_type = other DNA
caggtgatgtaccact

SEQ ID NO: 25413 - DNA, 16 bp, synthetic construct
  source 1..16: mol_type = other DNA
ccaggtgatgtaccac

SEQ ID NO: 25414 - DNA, 16 bp, synthetic construct
  source 1..16: mol_type = other DNA
cccaggtgatgtacca

SEQ ID NO: 25415 - DNA, 16 bp, synthetic construct
  source 1..16: mol_type = other DNA
acccaggtgatgtacc

SEQ ID NO: 25416 - DNA, 16 bp, synthetic construct
  source 1..16: mol_type = other DNA
cacccaggtgatgtac

SEQ ID NO: 25417 - DNA, 16 bp, synthetic construct
  source 1..16: mol_type = other DNA
cctgcaatgatcaccc

SEQ ID NO: 25418 - DNA, 16 bp, synthetic construct
  source 1..16: mol_type = other DNA
ccctgcaatgatcacc

SEQ ID NO: 25419 - DNA, 16 bp, synthetic construct
  source 1..16: mol_type = other DNA
tccctgcaatgatcac

SEQ ID NO: 25420 - DNA, 16 bp, synthetic construct
  source 1..16: mol_type = other DNA
atccctgcaatgatca

SEQ ID NO: 25421 - DNA, 16 bp, synthetic construct
  source 1..16: mol_type = other DNA
tatccctgcaatgatc

SEQ ID NO: 25422 - DNA, 16 bp, synthetic construct
  source 1..16: mol_type = other DNA
atatccctgcaatgat

SEQ ID NO: 25423 - DNA, 16 bp, synthetic construct
  source 1..16: mol_type = other DNA
catatccctgcaatga

SEQ ID NO: 25424 - DNA, 16 bp, synthetic construct
  source 1..16: mol_type = other DNA
acatatccctgcaatg

SEQ ID NO: 25425 - DNA, 16 bp, synthetic construct
  source 1..16: mol_type = other DNA
gacatatccctgcaat

SEQ ID NO: 25426 - DNA, 16 bp, synthetic construct
  source 1..16: mol_type = other DNA
tgacatatccctgcaa

SEQ ID NO: 25427 - DNA, 16 bp, synthetic construct
  source 1..16: mol_type = other DNA
gtgacatatccctgca

SEQ ID NO: 25428 - DNA, 16 bp, synthetic construct
  source 1..16: mol_type = other DNA
tgtgacatatccctgc

SEQ ID NO: 25429 - DNA, 16 bp, synthetic construct
  source 1..16: mol_type = other DNA
ttgtgacatatccctg

SEQ ID NO: 25430 - DNA, 16 bp, synthetic construct
  source 1..16: mol_type = other DNA
tttgtgacatatccct

SEQ ID NO: 25431 - DNA, 16 bp, synthetic construct
  source 1..16: mol_type = other DNA
ctttgtgacatatccc

SEQ ID NO: 25432 - DNA, 16 bp, synthetic construct
  source 1..16: mol_type = other DNA
gctttgtgacatatcc

SEQ ID NO: 25433 - DNA, 16 bp, synthetic construct
  source 1..16: mol_type = other DNA
gtgctttgtgacatat

SEQ ID NO: 25434 - DNA, 16 bp, synthetic construct
  source 1..16: mol_type = other DNA
ggtgctttgtgacata

SEQ ID NO: 25435 - DNA, 16 bp, synthetic construct
  source 1..16: mol_type = other DNA
gggtgctttgtgacat

SEQ ID NO: 25436 - DNA, 16 bp, synthetic construct
  source 1..16: mol_type = other DNA
agggtgctttgtgaca

SEQ ID NO: 25437 - DNA, 16 bp, synthetic construct
  source 1..16: mol_type = other DNA
cagggtgctttgtgac

SEQ ID NO: 25438 - DNA, 16 bp, synthetic construct
  source 1..16: mol_type = other DNA
acagggtgctttgtga

SEQ ID NO: 25439 - DNA, 16 bp, synthetic construct
  source 1..16: mol_type = other DNA
tacagggtgctttgtg

SEQ ID NO: 25440 - DNA, 16 bp, synthetic construct
  source 1..16: mol_type = other DNA
ctacagggtgctttgt

SEQ ID NO: 25441 - DNA, 16 bp, synthetic construct
  source 1..16: mol_type = other DNA
cctacagggtgctttg

SEQ ID NO: 25442 - DNA, 16 bp, synthetic construct
  source 1..16: mol_type = other DNA
gcctacagggtgcttt

SEQ ID NO: 25443 - DNA, 16 bp, synthetic construct
  source 1..16: mol_type = other DNA
tgcctacagggtgctt

SEQ ID NO: 25444 - DNA, 16 bp, synthetic construct
  source 1..16: mol_type = other DNA
ctgcctacagggtgct

SEQ ID NO: 25445 - DNA, 16 bp, synthetic construct
  source 1..16: mol_type = other DNA
tctgcctacagggtgc

SEQ ID NO: 25446 - DNA, 16 bp, synthetic construct
  source 1..16: mol_type = other DNA
atctgcctacagggtg

SEQ ID NO: 25447 - DNA, 16 bp, synthetic construct
  source 1..16: mol_type = other DNA
gatctgcctacagggt

SEQ ID NO: 25448 - DNA, 16 bp, synthetic construct
  source 1..16: mol_type = other DNA
caggtcatgtaactct

SEQ ID NO: 25449 - DNA, 16 bp, synthetic construct
  source 1..16: mol_type = other DNA
ccaggtcatgtaactc

SEQ ID NO: 25450 - DNA, 16 bp, synthetic construct
  source 1..16: mol_type = other DNA
cccaggtcatgtaact

SEQ ID NO: 25451 - DNA, 16 bp, synthetic construct
  source 1..16: mol_type = other DNA
acccaggtcatgtaac

SEQ ID NO: 25452 - DNA, 16 bp, synthetic construct
  source 1..16: mol_type = other DNA
cacccaggtcatgtaa

SEQ ID NO: 25453 - DNA, 16 bp, synthetic construct
  source 1..16: mol_type = other DNA
tcacccaggtcatgta

SEQ ID NO: 25454 - DNA, 16 bp, synthetic construct
  source 1..16: mol_type = other DNA
atcacccaggtcatgt

SEQ ID NO: 25455 - DNA, 16 bp, synthetic construct
  source 1..16: mol_type = other DNA
gatcacccaggtcatg

SEQ ID NO: 25456 - DNA, 16 bp, synthetic construct
  source 1..16: mol_type = other DNA
tgatcacccaggtcat

SEQ ID NO: 25457 - DNA, 16 bp, synthetic construct
  source 1..16: mol_type = other DNA
ctgatcacccaggtca

SEQ ID NO: 25458 - DNA, 16 bp, synthetic construct
  source 1..16: mol_type = other DNA
actgatcacccaggtc

SEQ ID NO: 25459 - DNA, 16 bp, synthetic construct
  source 1..16: mol_type = other DNA
cctaggtcatgtaact

SEQ ID NO: 25460 - DNA, 16 bp, synthetic construct
  source 1..16: mol_type = other DNA
acctaggtcatgtaac

SEQ ID NO: 25461 - DNA, 16 bp, synthetic construct
  source 1..16: mol_type = other DNA
cacctaggtcatgtaa

SEQ ID NO: 25462 - DNA, 16 bp, synthetic construct
  source 1..16: mol_type = other DNA
tcacctaggtcatgta

SEQ ID NO: 25463 - DNA, 16 bp, synthetic construct
  source 1..16: mol_type = other DNA
atcacctaggtcatgt

SEQ ID NO: 25464 - DNA, 16 bp, synthetic construct
  source 1..16: mol_type = other DNA
gatcacctaggtcatg

SEQ ID NO: 25465 - DNA, 16 bp, synthetic construct
  source 1..16: mol_type = other DNA
gatgtatctctgcact

SEQ ID NO: 25466 - DNA, 16 bp, synthetic construct
  source 1..16: mol_type = other DNA
cgatgtatctctgcac

SEQ ID NO: 25467 - DNA, 16 bp, synthetic construct
  source 1..16: mol_type = other DNA
gcgatgtatctctgca

SEQ ID NO: 25468 - DNA, 16 bp, synthetic construct
  source 1..16: mol_type = other DNA
tgcgatgtatctctgc

SEQ ID NO: 25469 - DNA, 16 bp, synthetic construct
  source 1..16: mol_type = other DNA
ttgcgatgtatctctg

SEQ ID NO: 25470 - DNA, 16 bp, synthetic construct
  source 1..16: mol_type = other DNA
attgcgatgtatctct

SEQ ID NO: 25471 - DNA, 16 bp, synthetic construct
  source 1..16: mol_type = other DNA
gcattgcgatgtatct

SEQ ID NO: 25472 - DNA, 16 bp, synthetic construct
  source 1..16: mol_type = other DNA
ggcattgcgatgtatc

SEQ ID NO: 25473 - DNA, 16 bp, synthetic construct
  source 1..16: mol_type = other DNA
gggcattgcgatgtat

SEQ ID NO: 25474 - DNA, 16 bp, synthetic construct
  source 1..16: mol_type = other DNA
ggggcattgcgatgta

SEQ ID NO: 25475 - DNA, 16 bp, synthetic construct
  source 1..16: mol_type = other DNA
aggggcattgcgatgt

SEQ ID NO: 25476 - DNA, 16 bp, synthetic construct
  source 1..16: mol_type = other DNA
caggggcattgcgatg

SEQ ID NO: 25477 - DNA, 16 bp, synthetic construct
  source 1..16: mol_type = other DNA
acaggggcattgcgat

SEQ ID NO: 25478 - DNA, 16 bp, synthetic construct
  source 1..16: mol_type = other DNA
tacaggggcattgcga

SEQ ID NO: 25479 - DNA, 16 bp, synthetic construct
  source 1..16: mol_type = other DNA
ctacaggggcattgcg

SEQ ID NO: 25480 - DNA, 16 bp, synthetic construct
  source 1..16: mol_type = other DNA
aaggctctgcctacag

SEQ ID NO: 25481 - DNA, 16 bp, synthetic construct
  source 1..16: mol_type = other DNA
caaggctctgcctaca

SEQ ID NO: 25482 - DNA, 16 bp, synthetic construct
  source 1..16: mol_type = other DNA
tcaaggctctgcctac

SEQ ID NO: 25483 - DNA, 16 bp, synthetic construct
  source 1..16: mol_type = other DNA
gtcaaggctctgccta

SEQ ID NO: 25484 - DNA, 16 bp, synthetic construct
  source 1..16: mol_type = other DNA
tgtcaaggctctgcct

SEQ ID NO: 25485 - DNA, 16 bp, synthetic construct
  source 1..16: mol_type = other DNA
ttgtcaaggctctgcc

SEQ ID NO: 25486 - DNA, 16 bp, synthetic construct
  source 1..16: mol_type = other DNA
cttgtcaaggctctgc

SEQ ID NO: 25487 - DNA, 16 bp, synthetic construct
  source 1..16: mol_type = other DNA
acttgtcaaggctctg

SEQ ID NO: 25488 - DNA, 16 bp, synthetic construct
  source 1..16: mol_type = other DNA
cacttgtcaaggctct

SEQ ID NO: 25489 - DNA, 16 bp, synthetic construct
  source 1..16: mol_type = other DNA
ccacttgtcaaggctc

SEQ ID NO: 25490 - DNA, 16 bp, synthetic construct
  source 1..16: mol_type = other DNA
accacttgtcaaggct

SEQ ID NO: 25491 - DNA, 16 bp, synthetic construct
  source 1..16: mol_type = other DNA
taccacttgtcaaggc

SEQ ID NO: 25492 - DNA, 16 bp, synthetic construct
  source 1..16: mol_type = other DNA
gtaccacttgtcaagg

SEQ ID NO: 25493 - DNA, 16 bp, synthetic construct
  source 1..16: mol_type = other DNA
ttacagggtgctttgt

SEQ ID NO: 25494 - DNA, 16 bp, synthetic construct
  source 1..16: mol_type = other DNA
cttacagggtgctttg

SEQ ID NO: 25495 - DNA, 16 bp, synthetic construct
  source 1..16: mol_type = other DNA
gcttacagggtgcttt

SEQ ID NO: 25496 - DNA, 16 bp, synthetic construct
  source 1..16: mol_type = other DNA
tgcttacagggtgctt

SEQ ID NO: 25497 - DNA, 16 bp, synthetic construct
  source 1..16: mol_type = other DNA
ctgcttacagggtgct

SEQ ID NO: 25498 - DNA, 16 bp, synthetic construct
  source 1..16: mol_type = other DNA
tctgcttacagggtgc

SEQ ID NO: 25499 - DNA, 16 bp, synthetic construct
  source 1..16: mol_type = other DNA
atctgcttacagggtg

SEQ ID NO: 25500 - DNA, 16 bp, synthetic construct
  source 1..16: mol_type = other DNA
gatctgcttacagggt

SEQ ID NO: 25501 - DNA, 16 bp, synthetic construct
  source 1..16: mol_type = other DNA
aggatctgcttacagg

SEQ ID NO: 25502 - DNA, 16 bp, synthetic construct
  source 1..16: mol_type = other DNA
ctaggatctgcttaca

SEQ ID NO: 25503 - DNA, 16 bp, synthetic construct
  source 1..16: mol_type = other DNA
tctaggatctgcttac

SEQ ID NO: 25504 - DNA, 16 bp, synthetic construct
  source 1..16: mol_type = other DNA
ctctaggatctgctta

SEQ ID NO: 25505 - DNA, 16 bp, synthetic construct
  source 1..16: mol_type = other DNA
tctctaggatctgctt

SEQ ID NO: 25506 - DNA, 16 bp, synthetic construct
  source 1..16: mol_type = other DNA
ttctctaggatctgct

SEQ ID NO: 25507 - DNA, 16 bp, synthetic construct
  source 1..16: mol_type = other DNA
cttctctaggatctgc

SEQ ID NO: 25508 - DNA, 16 bp, synthetic construct
  source 1..16: mol_type = other DNA
tcttctctaggatctg

SEQ ID NO: 25509 - DNA, 16 bp, synthetic construct
  source 1..16: mol_type = other DNA
ctcttctctaggatct

SEQ ID NO: 25510 - DNA, 16 bp, synthetic construct
  source 1..16: mol_type = other DNA
actcttctctaggatc

SEQ ID NO: 25511 - DNA, 16 bp, synthetic construct
  source 1..16: mol_type = other DNA
cccaggtgatataact

SEQ ID NO: 25512 - DNA, 16 bp, synthetic construct
  source 1..16: mol_type = other DNA
cacccaggtgatataa

SEQ ID NO: 25513 - DNA, 16 bp, synthetic construct
  source 1..16: mol_type = other DNA
tcacccaggtgatata

SEQ ID NO: 25514 - DNA, 16 bp, synthetic construct
  source 1..16: mol_type = other DNA
atcacccaggtgatat

SEQ ID NO: 25515 - DNA, 16 bp, synthetic construct
  source 1..16: mol_type = other DNA
gatcacccaggtgata

SEQ ID NO: 25516 - DNA, 16 bp, synthetic construct
  source 1..16: mol_type = other DNA
gcttgtgacatatctc

SEQ ID NO: 25517 - DNA, 16 bp, synthetic construct
  source 1..16: mol_type = other DNA
ggcttgtgacatatct

SEQ ID NO: 25518 - DNA, 16 bp, synthetic construct
  source 1..16: mol_type = other DNA
gggcttgtgacatatc

SEQ ID NO: 25519 - DNA, 16 bp, synthetic construct
  source 1..16: mol_type = other DNA
ggggcttgtgacatat

SEQ ID NO: 25520 - DNA, 16 bp, synthetic construct
  source 1..16: mol_type = other DNA
gggggcttgtgacata

SEQ ID NO: 25521 - DNA, 16 bp, synthetic construct
  source 1..16: mol_type = other DNA
agggggcttgtgacat

SEQ ID NO: 25522 - DNA, 16 bp, synthetic construct
  source 1..16: mol_type = other DNA
cagggggcttgtgaca

SEQ ID NO: 25523 - DNA, 16 bp, synthetic construct
  source 1..16: mol_type = other DNA
acagggggcttgtgac

SEQ ID NO: 25524 - DNA, 16 bp, synthetic construct
  source 1..16: mol_type = other DNA
tacagggggcttgtga

SEQ ID NO: 25525 - DNA, 16 bp, synthetic construct
  source 1..16: mol_type = other DNA
ctacagggggcttgtg

SEQ ID NO: 25526 - DNA, 16 bp, synthetic construct
  source 1..16: mol_type = other DNA
cctacagggggcttgt

SEQ ID NO: 25527 - DNA, 16 bp, synthetic construct
  source 1..16: mol_type = other DNA
gcctacagggggcttg

SEQ ID NO: 25528 - DNA, 16 bp, synthetic construct
  source 1..16: mol_type = other DNA
tgcctacagggggctt

SEQ ID NO: 25529 - DNA, 16 bp, synthetic construct
  source 1..16: mol_type = other DNA
ctgcctacagggggct

SEQ ID NO: 25530 - DNA, 16 bp, synthetic construct
  source 1..16: mol_type = other DNA
actgcactgatcaccc

SEQ ID NO: 25531 - DNA, 16 bp, synthetic construct
  source 1..16: mol_type = other DNA
taggctctggctacac

SEQ ID NO: 25532 - DNA, 16 bp, synthetic construct
  source 1..16: mol_type = other DNA
ctaggctctggctaca

SEQ ID NO: 25533 - DNA, 16 bp, synthetic construct
  source 1..16: mol_type = other DNA
tctaggctctggctac

SEQ ID NO: 25534 - DNA, 16 bp, synthetic construct
  source 1..16: mol_type = other DNA
gtctaggctctggcta

SEQ ID NO: 25535 - DNA, 16 bp, synthetic construct
  source 1..16: mol_type = other DNA
caggtgctgtaacttt

SEQ ID NO: 25536 - DNA, 16 bp, synthetic construct
  source 1..16: mol_type = other DNA
ccaggtgctgtaactt

SEQ ID NO: 25537 - DNA, 16 bp, synthetic construct
  source 1..16: mol_type = other DNA
cccaggtgctgtaact

SEQ ID NO: 25538 - DNA, 16 bp, synthetic construct
  source 1..16: mol_type = other DNA
tcccaggtgctgtaac

SEQ ID NO: 25539 - DNA, 16 bp, synthetic construct
  source 1..16: mol_type = other DNA
ctcccaggtgctgtaa

SEQ ID NO: 25540 - DNA, 16 bp, synthetic construct
  source 1..16: mol_type = other DNA
tctcccaggtgctgta

SEQ ID NO: 25541 - DNA, 16 bp, synthetic construct
  source 1..16: mol_type = other DNA
atctcccaggtgctgt

SEQ ID NO: 25542 - DNA, 16 bp, synthetic construct
  source 1..16: mol_type = other DNA
gatctcccaggtgctg

SEQ ID NO: 25543 - DNA, 16 bp, synthetic construct
  source 1..16: mol_type = other DNA
tgatctcccaggtgct

SEQ ID NO: 25544 - DNA, 16 bp, synthetic construct
  source 1..16: mol_type = other DNA
ctgatctcccaggtgc

SEQ ID NO: 25545 - DNA, 16 bp, synthetic construct
  source 1..16: mol_type = other DNA
actgatctcccaggtg

SEQ ID NO: 25546 - DNA, 16 bp, synthetic construct
  source 1..16: mol_type = other DNA
cactgatctcccaggt

SEQ ID NO: 25547 - DNA, 16 bp, synthetic construct
  source 1..16: mol_type = other DNA
gcactgatctcccagg

SEQ ID NO: 25548 - DNA, 16 bp, synthetic construct
  source 1..16: mol_type = other DNA
tgcactgatctcccag

SEQ ID NO: 25549 - DNA, 16 bp, synthetic construct
  source 1..16: mol_type = other DNA
ctgcactgatctccca

SEQ ID NO: 25550 - DNA, 16 bp, synthetic construct
  source 1..16: mol_type = other DNA
tctgcactgatctccc

SEQ ID NO: 25551 - DNA, 16 bp, synthetic construct
  source 1..16: mol_type = other DNA
ctctgcactgatctcc

SEQ ID NO: 25552 - DNA, 16 bp, synthetic construct
  source 1..16: mol_type = other DNA
tctctgcactgatctc

SEQ ID NO: 25553 - DNA, 16 bp, synthetic construct
  source 1..16: mol_type = other DNA
atctctgcactgatct

SEQ ID NO: 25554 - DNA, 16 bp, synthetic construct
  source 1..16: mol_type = other DNA
tggggacattgtgaca

SEQ ID NO: 25555 - DNA, 16 bp, synthetic construct
  source 1..16: mol_type = other DNA
ctggggacattgtgac

SEQ ID NO: 25556 - DNA, 16 bp, synthetic construct
  source 1..16: mol_type = other DNA
actggggacattgtga

SEQ ID NO: 25557 - DNA, 16 bp, synthetic construct
  source 1..16: mol_type = other DNA
tactggggacattgtg

SEQ ID NO: 25558 - DNA, 16 bp, synthetic construct
  source 1..16: mol_type = other DNA
ctactggggacattgt

SEQ ID NO: 25559 - DNA, 16 bp, synthetic construct
  source 1..16: mol_type = other DNA
cctactggggacattg

SEQ ID NO: 25560 - DNA, 16 bp, synthetic construct
  source 1..16: mol_type = other DNA
gcctactggggacatt

SEQ ID NO: 25561 - DNA, 16 bp, synthetic construct
  source 1..16: mol_type = other DNA
tgcctactggggacat

SEQ ID NO: 25562 - DNA, 16 bp, synthetic construct
  source 1..16: mol_type = other DNA
ctgcctactggggaca

SEQ ID NO: 25563 - DNA, 16 bp, synthetic construct
  source 1..16: mol_type = other DNA
tctgcctactggggac

SEQ ID NO: 25564 - DNA, 16 bp, synthetic construct
  source 1..16: mol_type = other DNA
ctctgcctactgggga

SEQ ID NO: 25565 - DNA, 16 bp, synthetic construct
  source 1..16: mol_type = other DNA
tctctgcctactgggg

SEQ ID NO: 25566 - DNA, 16 bp, synthetic construct
  source 1..16: mol_type = other DNA
gtctctgcctactggg

SEQ ID NO: 25567 - DNA, 16 bp, synthetic construct
  source 1..16: mol_type = other DNA
ggtctctgcctactgg

SEQ ID NO: 25568 - DNA, 16 bp, synthetic construct
  source 1..16: mol_type = other DNA
tggtctctgcctactg

SEQ ID NO: 25569 - DNA, 16 bp, synthetic construct
  source 1..16: mol_type = other DNA
ctggtctctgcctact

SEQ ID NO: 25570 - DNA, 16 bp, synthetic construct
  source 1..16: mol_type = other DNA
cctggtctctgcctac

SEQ ID NO: 25571 - DNA, 16 bp, synthetic construct
  source 1..16: mol_type = other DNA
ttgcctggtctctgcc

SEQ ID NO: 25572 - DNA, 16 bp, synthetic construct
  source 1..16: mol_type = other DNA
cttgcctggtctctgc

SEQ ID NO: 25573 - DNA, 16 bp, synthetic construct
  source 1..16: mol_type = other DNA
tcttgcctggtctctg

SEQ ID NO: 25574 - DNA, 16 bp, synthetic construct
  source 1..16: mol_type = other DNA
ctcttgcctggtctct

SEQ ID NO: 25575 - DNA, 16 bp, synthetic construct
  source 1..16: mol_type = other DNA
actcttgcctggtctc

SEQ ID NO: 25576 - DNA, 16 bp, synthetic construct
  source 1..16: mol_type = other DNA
aactcttgcctggtct

SEQ ID NO: 25577 - DNA, 16 bp, synthetic construct
  source 1..16: mol_type = other DNA
caactcttgcctggtc

SEQ ID NO: 25578 - DNA, 16 bp, synthetic construct
  source 1..16: mol_type = other DNA
ccaactcttgcctggt

SEQ ID NO: 25579 - DNA, 16 bp, synthetic construct
  source 1..16: mol_type = other DNA
tccaactcttgcctgg

SEQ ID NO: 25580 - DNA, 16 bp, synthetic construct
  source 1..16: mol_type = other DNA
atccaactcttgcctg

SEQ ID NO: 25581 - DNA, 16 bp, synthetic construct
  source 1..16: mol_type = other DNA
gatccaactcttgcct

SEQ ID NO: 25582 - DNA, 16 bp, synthetic construct
  source 1..16: mol_type = other DNA
tgatccaactcttgcc

SEQ ID NO: 25583 - DNA, 16 bp, synthetic construct
  source 1..16: mol_type = other DNA
gtgatccaactcttgc

SEQ ID NO: 25584 - DNA, 16 bp, synthetic construct
  source 1..16: mol_type = other DNA
ggtgatccaactcttg

SEQ ID NO: 25585 - DNA, 16 bp, synthetic construct
  source 1..16: mol_type = other DNA
aggtgatccaactctt

SEQ ID NO: 25586 - DNA, 16 bp, synthetic construct
  source 1..16: mol_type = other DNA
gaggtgatccaactct

SEQ ID NO: 25587 - DNA, 16 bp, synthetic construct
  source 1..16: mol_type = other DNA
cgaggtgatccaactc

SEQ ID NO: 25588 - DNA, 16 bp, synthetic construct
  source 1..16: mol_type = other DNA
ccgaggtgatccaact

SEQ ID NO: 25589 - DNA, 16 bp, synthetic construct
  source 1..16: mol_type = other DNA
cccgaggtgatccaac

SEQ ID NO: 25590 - DNA, 16 bp, synthetic construct
  source 1..16: mol_type = other DNA
tcccgaggtgatccaa

SEQ ID NO: 25591 - DNA, 16 bp, synthetic construct
  source 1..16: mol_type = other DNA
atcccgaggtgatcca

SEQ ID NO: 25592 - DNA, 16 bp, synthetic construct
  source 1..16: mol_type = other DNA
gatcccgaggtgatcc

SEQ ID NO: 25593 - DNA, 16 bp, synthetic construct
  source 1..16: mol_type = other DNA
tgatcccgaggtgatc

SEQ ID NO: 25594 - DNA, 16 bp, synthetic construct
  source 1..16: mol_type = other DNA
ctgatcccgaggtgat

SEQ ID NO: 25595 - DNA, 16 bp, synthetic construct
  source 1..16: mol_type = other DNA
actgatcccgaggtga

SEQ ID NO: 25596 - DNA, 16 bp, synthetic construct
  source 1..16: mol_type = other DNA
cactgatcccgaggtg

SEQ ID NO: 25597 - DNA, 16 bp, synthetic construct
  source 1..16: mol_type = other DNA
gcactgatcccgaggt

SEQ ID NO: 25598 - DNA, 16 bp, synthetic construct
  source 1..16: mol_type = other DNA
tgcactgatcccgagg

SEQ ID NO: 25599 - DNA, 16 bp, synthetic construct
  source 1..16: mol_type = other DNA
ctgcactgatcccgag

SEQ ID NO: 25600 - DNA, 16 bp, synthetic construct
  source 1..16: mol_type = other DNA
tctgcactgatcccga

SEQ ID NO: 25601 - DNA, 16 bp, synthetic construct
  source 1..16: mol_type = other DNA
ctctgcactgatcccg

SEQ ID NO: 25602 - DNA, 16 bp, synthetic construct
  source 1..16: mol_type = other DNA
agacatatctctgcac

SEQ ID NO: 25603 - DNA, 16 bp, synthetic construct
  source 1..16: mol_type = other DNA
gagacatatctctgca

SEQ ID NO: 25604 - DNA, 16 bp, synthetic construct
  source 1..16: mol_type = other DNA
gggggattgagacata

SEQ ID NO: 25605 - DNA, 16 bp, synthetic construct
  source 1..16: mol_type = other DNA
agggggattgagacat

SEQ ID NO: 25606 - DNA, 16 bp, synthetic construct
  source 1..16: mol_type = other DNA
cagggggattgagaca

SEQ ID NO: 25607 - DNA, 16 bp, synthetic construct
  source 1..16: mol_type = other DNA
acagggggattgagac

SEQ ID NO: 25608 - DNA, 16 bp, synthetic construct
  source 1..16: mol_type = other DNA
cacagggggattgaga

SEQ ID NO: 25609 - DNA, 16 bp, synthetic construct
  source 1..16: mol_type = other DNA
ccacagggggattgag

SEQ ID NO: 25610 - DNA, 16 bp, synthetic construct
  source 1..16: mol_type = other DNA
cccacagggggattga

SEQ ID NO: 25611 - DNA, 16 bp, synthetic construct
  source 1..16: mol_type = other DNA
gcccacagggggattg

SEQ ID NO: 25612 - DNA, 16 bp, synthetic construct
  source 1..16: mol_type = other DNA
tgcccacagggggatt

SEQ ID NO: 25613 - DNA, 16 bp, synthetic construct
  source 1..16: mol_type = other DNA
gtgcccacagggggat

SEQ ID NO: 25614 - DNA, 16 bp, synthetic construct
  source 1..16: mol_type = other DNA
tgtgcccacaggggga

SEQ ID NO: 25615 - DNA, 16 bp, synthetic construct
  source 1..16: mol_type = other DNA
ctgtgcccacaggggg

SEQ ID NO: 25616 - DNA, 16 bp, synthetic construct
  source 1..16: mol_type = other DNA
aggctgtgcccacagg

SEQ ID NO: 25617 - DNA, 16 bp, synthetic construct
  source 1..16: mol_type = other DNA
taggctgtgcccacag

SEQ ID NO: 25618 - DNA, 16 bp, synthetic construct
  source 1..16: mol_type = other DNA
ctaggctgtgcccaca

SEQ ID NO: 25619 - DNA, 16 bp, synthetic construct
  source 1..16: mol_type = other DNA
tctaggctgtgcccac

SEQ ID NO: 25620 - DNA, 16 bp, synthetic construct
  source 1..16: mol_type = other DNA
tgtctaggctgtgccc

SEQ ID NO: 25621 - DNA, 16 bp, synthetic construct
  source 1..16: mol_type = other DNA
ttgtctaggctgtgcc

SEQ ID NO: 25622 - DNA, 16 bp, synthetic construct
  source 1..16: mol_type = other DNA
cttgtctaggctgtgc

SEQ ID NO: 25623 - DNA, 16 bp, synthetic construct
  source 1..16: mol_type = other DNA
tcttgtctaggctgtg

SEQ ID NO: 25624 - DNA, 16 bp, synthetic construct
  source 1..16: mol_type = other DNA
ctcttgtctaggctgt

SEQ ID NO: 25625 - DNA, 16 bp, synthetic construct
  source 1..16: mol_type = other DNA
actcttgtctaggctg

SEQ ID NO: 25626 - DNA, 16 bp, synthetic construct
  source 1..16: mol_type = other DNA
ctgttaaccgaggtga

SEQ ID NO: 25627 - DNA, 16 bp, synthetic construct
  source 1..16: mol_type = other DNA
actgttaaccgaggtg

SEQ ID NO: 25628 - DNA, 16 bp, synthetic construct
  source 1..16: mol_type = other DNA
cactgttaaccgaggt

SEQ ID NO: 25629 - DNA, 16 bp, synthetic construct
  source 1..16: mol_type = other DNA
gcactgttaaccgagg

SEQ ID NO: 25630 - DNA, 16 bp, synthetic construct
  source 1..16: mol_type = other DNA
tgcactgttaaccgag

SEQ ID NO: 25631 - DNA, 16 bp, synthetic construct
  source 1..16: mol_type = other DNA
ctgcactgttaaccga

SEQ ID NO: 25632 - DNA, 16 bp, synthetic construct
  source 1..16: mol_type = other DNA
tctgcactgttaaccg

SEQ ID NO: 25633 - DNA, 16 bp, synthetic construct
  source 1..16: mol_type = other DNA
ctctgcactgttaacc

SEQ ID NO: 25634 - DNA, 16 bp, synthetic construct
  source 1..16: mol_type = other DNA
tctctgcactgttaac

SEQ ID NO: 25635 - DNA, 16 bp, synthetic construct
  source 1..16: mol_type = other DNA
atctctgcactgttaa

SEQ ID NO: 25636 - DNA, 16 bp, synthetic construct
  source 1..16: mol_type = other DNA
tatctctgcactgtta

SEQ ID NO: 25637 - DNA, 16 bp, synthetic construct
  source 1..16: mol_type = other DNA
atatctctgcactgtt

SEQ ID NO: 25638 - DNA, 16 bp, synthetic construct
  source 1..16: mol_type = other DNA
catatctctgcactgt

SEQ ID NO: 25639 - DNA, 16 bp, synthetic construct
  source 1..16: mol_type = other DNA
ggggcattttgacata

SEQ ID NO: 25640 - DNA, 16 bp, synthetic construct
  source 1..16: mol_type = other DNA
aggggcattttgacat

SEQ ID NO: 25641 - DNA, 16 bp, synthetic construct
  source 1..16: mol_type = other DNA
caggggcattttgaca

SEQ ID NO: 25642 - DNA, 16 bp, synthetic construct
  source 1..16: mol_type = other DNA
acaggggcattttgac

SEQ ID NO: 25643 - DNA, 16 bp, synthetic construct
  source 1..16: mol_type = other DNA
tacaggggcattttga

SEQ ID NO: 25644 - DNA, 16 bp, synthetic construct
  source 1..16: mol_type = other DNA
ctacaggggcattttg

SEQ ID NO: 25645 - DNA, 16 bp, synthetic construct
  source 1..16: mol_type = other DNA
cctacaggggcatttt

SEQ ID NO: 25646 - DNA, 16 bp, synthetic construct
  source 1..16: mol_type = other DNA
gcctacaggggcattt

SEQ ID NO: 25647 - DNA, 16 bp, synthetic construct
  source 1..16: mol_type = other DNA
ttgcctacaggggcat

SEQ ID NO: 25648 - DNA, 16 bp, synthetic construct
  source 1..16: mol_type = other DNA
cttgcctacaggggca

SEQ ID NO: 25649 - DNA, 16 bp, synthetic construct
  source 1..16: mol_type = other DNA
gcttgcctacaggggc

SEQ ID NO: 25650 - DNA, 16 bp, synthetic construct
  source 1..16: mol_type = other DNA
ggcttgcctacagggg

SEQ ID NO: 25651 - DNA, 16 bp, synthetic construct
  source 1..16: mol_type = other DNA
aggcttgcctacaggg

SEQ ID NO: 25652 - DNA, 16 bp, synthetic construct
  source 1..16: mol_type = other DNA
taggcttgcctacagg

SEQ ID NO: 25653 - DNA, 16 bp, synthetic construct
  source 1..16: mol_type = other DNA
gtaggcttgcctacag

SEQ ID NO: 25654 - DNA, 16 bp, synthetic construct
  source 1..16: mol_type = other DNA
tgtaggcttgcctaca

SEQ ID NO: 25655 - DNA, 16 bp, synthetic construct
  source 1..16: mol_type = other DNA
gtgtaggcttgcctac

SEQ ID NO: 25656 - DNA, 16 bp, synthetic construct
  source 1..16: mol_type = other DNA
tgtgtaggcttgccta

SEQ ID NO: 25657 - DNA, 16 bp, synthetic construct
  source 1..16: mol_type = other DNA
ttgtgtaggcttgcct

SEQ ID NO: 25658 - DNA, 16 bp, synthetic construct
  source 1..16: mol_type = other DNA
cttgtgtaggcttgcc

SEQ ID NO: 25659 - DNA, 16 bp, synthetic construct
  source 1..16: mol_type = other DNA
acttgtgtaggcttgc

SEQ ID NO: 25660 - DNA, 16 bp, synthetic construct
  source 1..16: mol_type = other DNA
tacttgtgtaggcttg

SEQ ID NO: 25661 - DNA, 16 bp, synthetic construct
  source 1..16: mol_type = other DNA
atacttgtgtaggctt

SEQ ID NO: 25662 - DNA, 16 bp, synthetic construct
  source 1..16: mol_type = other DNA
ggggtattgtgacata

SEQ ID NO: 25663 - DNA, 16 bp, synthetic construct
  source 1..16: mol_type = other DNA
gggggtattgtgacat

SEQ ID NO: 25664 - DNA, 16 bp, synthetic construct
  source 1..16: mol_type = other DNA
agggggtattgtgaca

SEQ ID NO: 25665 - DNA, 16 bp, synthetic construct
  source 1..16: mol_type = other DNA
ttacagggggtattgt

SEQ ID NO: 25666 - DNA, 16 bp, synthetic construct
  source 1..16: mol_type = other DNA
cttacagggggtattg

SEQ ID NO: 25667 - DNA, 16 bp, synthetic construct
  source 1..16: mol_type = other DNA
gcttacagggggtatt

SEQ ID NO: 25668 - DNA, 16 bp, synthetic construct
  source 1..16: mol_type = other DNA
tgcttacagggggtat

SEQ ID NO: 25669 - DNA, 16 bp, synthetic construct
  source 1..16: mol_type = other DNA
ctgcttacagggggta

SEQ ID NO: 25670 - DNA, 16 bp, synthetic construct
  source 1..16: mol_type = other DNA
tctgcttacagggggt

SEQ ID NO: 25671 - DNA, 16 bp, synthetic construct
  source 1..16: mol_type = other DNA
ctctgcttacaggggg

SEQ ID NO: 25672 - DNA, 16 bp, synthetic construct
  source 1..16: mol_type = other DNA
gctctgcttacagggg

SEQ ID NO: 25673 - DNA, 16 bp, synthetic construct
  source 1..16: mol_type = other DNA
ggctctgcttacaggg

SEQ ID NO: 25674 - DNA, 16 bp, synthetic construct
  source 1..16: mol_type = other DNA
aggctctgcttacagg

SEQ ID NO: 25675 - DNA, 16 bp, synthetic construct
  source 1..16: mol_type = other DNA
taggctctgcttacag

SEQ ID NO: 25676 - DNA, 16 bp, synthetic construct
  source 1..16: mol_type = other DNA
ctaggctctgcttaca

SEQ ID NO: 25677 - DNA, 16 bp, synthetic construct
  source 1..16: mol_type = other DNA
tctaggctctgcttac

SEQ ID NO: 25678 - DNA, 16 bp, synthetic construct
  source 1..16: mol_type = other DNA
gtctaggctctgctta

SEQ ID NO: 25679 - DNA, 16 bp, synthetic construct
  source 1..16: mol_type = other DNA
tgtctaggctctgctt

SEQ ID NO: 25680 - DNA, 16 bp, synthetic construct
  source 1..16: mol_type = other DNA
ttgtctaggctctgct

SEQ ID NO: 25681 - DNA, 16 bp, synthetic construct
  source 1..16: mol_type = other DNA
gtcacatatctctgca

SEQ ID NO: 25682 - DNA, 16 bp, synthetic construct
  source 1..16: mol_type = other DNA
tgtcacatatctctgc

SEQ ID NO: 25683 - DNA, 16 bp, synthetic construct
  source 1..16: mol_type = other DNA
cttgtcacatatctct

SEQ ID NO: 25684 - DNA, 16 bp, synthetic construct
  source 1..16: mol_type = other DNA
ccttgtcacatatctc

SEQ ID NO: 25685 - DNA, 16 bp, synthetic construct
  source 1..16: mol_type = other DNA
gccttgtcacatatct

SEQ ID NO: 25686 - DNA, 16 bp, synthetic construct
  source 1..16: mol_type = other DNA
ggccttgtcacatatc

SEQ ID NO: 25687 - DNA, 16 bp, synthetic construct
  source 1..16: mol_type = other DNA
gggccttgtcacatat

SEQ ID NO: 25688 - DNA, 16 bp, synthetic construct
  source 1..16: mol_type = other DNA
ggggccttgtcacata

SEQ ID NO: 25689 - DNA, 16 bp, synthetic construct
  source 1..16: mol_type = other DNA
aggggccttgtcacat

SEQ ID NO: 25690 - DNA, 16 bp, synthetic construct
  source 1..16: mol_type = other DNA
aaggggccttgtcaca

SEQ ID NO: 25691 - DNA, 16 bp, synthetic construct
  source 1..16: mol_type = other DNA
attgtctaggctctgc

SEQ ID NO: 25692 - DNA, 16 bp, synthetic construct
  source 1..16: mol_type = other DNA
tattgtctaggctctg

SEQ ID NO: 25693 - DNA, 16 bp, synthetic construct
  source 1..16: mol_type = other DNA
ctattgtctaggctct

SEQ ID NO: 25694 - DNA, 16 bp, synthetic construct
  source 1..16: mol_type = other DNA
actattgtctaggctc

SEQ ID NO: 25695 - DNA, 16 bp, synthetic construct
  source 1..16: mol_type = other DNA
tcactcaggtgatgta

SEQ ID NO: 25696 - DNA, 16 bp, synthetic construct
  source 1..16: mol_type = other DNA
atcactcaggtgatgt

SEQ ID NO: 25697 - DNA, 16 bp, synthetic construct
  source 1..16: mol_type = other DNA
gatcactcaggtgatg

SEQ ID NO: 25698 - DNA, 16 bp, synthetic construct
  source 1..16: mol_type = other DNA
tgatcactcaggtgat

SEQ ID NO: 25699 - DNA, 16 bp, synthetic construct
  source 1..16: mol_type = other DNA
ctgatcactcaggtga

SEQ ID NO: 25700 - DNA, 16 bp, synthetic construct
  source 1..16: mol_type = other DNA
actgatcactcaggtg

SEQ ID NO: 25701 - DNA, 16 bp, synthetic construct
  source 1..16: mol_type = other DNA
cactgatcactcaggt

SEQ ID NO: 25702 - DNA, 16 bp, synthetic construct
  source 1..16: mol_type = other DNA
gcactgatcactcagg

SEQ ID NO: 25703 - DNA, 16 bp, synthetic construct
  source 1..16: mol_type = other DNA
tgcactgatcactcag

SEQ ID NO: 25704 - DNA, 16 bp, synthetic construct
  source 1..16: mol_type = other DNA
ctgcactgatcactca

SEQ ID NO: 25705 - DNA, 16 bp, synthetic construct
  source 1..16: mol_type = other DNA
tctgcactgatcactc

SEQ ID NO: 25706 - DNA, 16 bp, synthetic construct
  source 1..16: mol_type = other DNA
gatctctgcactgatc

SEQ ID NO: 25707 - DNA, 16 bp, synthetic construct
  source 1..16: mol_type = other DNA
agatctctgcactgat

SEQ ID NO: 25708 - DNA, 16 bp, synthetic construct
  source 1..16: mol_type = other DNA
cagatctctgcactga

SEQ ID NO: 25709 - DNA, 16 bp, synthetic construct
  source 1..16: mol_type = other DNA
acagatctctgcactg

SEQ ID NO: 25710 - DNA, 16 bp, synthetic construct
  source 1..16: mol_type = other DNA
gacagatctctgcact

SEQ ID NO: 25711 - DNA, 16 bp, synthetic construct
  source 1..16: mol_type = other DNA
tgacagatctctgcac

SEQ ID NO: 25712 - DNA, 16 bp, synthetic construct
  source 1..16: mol_type = other DNA
gtgacagatctctgca

SEQ ID NO: 25713 - DNA, 16 bp, synthetic construct
  source 1..16: mol_type = other DNA
tgtgacagatctctgc

SEQ ID NO: 25714 - DNA, 16 bp, synthetic construct
  source 1..16: mol_type = other DNA
aaggggcattgtgaca

SEQ ID NO: 25715 - DNA, 16 bp, synthetic construct
  source 1..16: mol_type = other DNA
aaaggggcattgtgac

SEQ ID NO: 25716 - DNA, 16 bp, synthetic construct
  source 1..16: mol_type = other DNA
cctaaaggggcattgt

SEQ ID NO: 25717 - DNA, 16 bp, synthetic construct
  source 1..16: mol_type = other DNA
gcctaaaggggcattg

SEQ ID NO: 25718 - DNA, 16 bp, synthetic construct
  source 1..16: mol_type = other DNA
tgcctaaaggggcatt

SEQ ID NO: 25719 - DNA, 16 bp, synthetic construct
  source 1..16: mol_type = other DNA
ctgcctaaaggggcat

SEQ ID NO: 25720 - DNA, 16 bp, synthetic construct
  source 1..16: mol_type = other DNA
tctgcctaaaggggca

SEQ ID NO: 25721 - DNA, 16 bp, synthetic construct
  source 1..16: mol_type = other DNA
ctctgcctaaaggggc

SEQ ID NO: 25722 - DNA, 16 bp, synthetic construct
  source 1..16: mol_type = other DNA
gctctgcctaaagggg

SEQ ID NO: 25723 - DNA, 16 bp, synthetic construct
  source 1..16: mol_type = other DNA
agctctgcctaaaggg

SEQ ID NO: 25724 - DNA, 16 bp, synthetic construct
  source 1..16: mol_type = other DNA
aagctctgcctaaagg

SEQ ID NO: 25725 - DNA, 16 bp, synthetic construct
  source 1..16: mol_type = other DNA
tttaagctctgcctaa

SEQ ID NO: 25726 - DNA, 16 bp, synthetic construct
  source 1..16: mol_type = other DNA
gtttaagctctgccta

SEQ ID NO: 25727 - DNA, 16 bp, synthetic construct
  source 1..16: mol_type = other DNA
ctgatcacacaggtga

SEQ ID NO: 25728 - DNA, 16 bp, synthetic construct
  source 1..16: mol_type = other DNA
actgatcacacaggtg

SEQ ID NO: 25729 - DNA, 16 bp, synthetic construct
  source 1..16: mol_type = other DNA
cactgatcacacaggt

SEQ ID NO: 25730 - DNA, 16 bp, synthetic construct
  source 1..16: mol_type = other DNA
actcttgtcttggatt

SEQ ID NO: 25731 - DNA, 16 bp, synthetic construct
  source 1..16: mol_type = other DNA
tctaagctctgcctaa

SEQ ID NO: 25732 - DNA, 16 bp, synthetic construct
  source 1..16: mol_type = other DNA
agtctaagctctgcct

SEQ ID NO: 25733 - DNA, 16 bp, synthetic construct
  source 1..16: mol_type = other DNA
tagtctaagctctgcc

SEQ ID NO: 25734 - DNA, 16 bp, synthetic construct
  source 1..16: mol_type = other DNA
ctagtctaagctctgc

SEQ ID NO: 25735 - DNA, 16 bp, synthetic construct
  source 1..16: mol_type = other DNA
tctagtctaagctctg

SEQ ID NO: 25736 - DNA, 16 bp, synthetic construct
  source 1..16: mol_type = other DNA
ctctagtctaagctct

SEQ ID NO: 25737 - DNA, 16 bp, synthetic construct
  source 1..16: mol_type = other DNA
actctagtctaagctc

SEQ ID NO: 25738 - DNA, 16 bp, synthetic construct
  source 1..16: mol_type = other DNA
tttgcctatgggggca

SEQ ID NO: 25739 - DNA, 16 bp, synthetic construct
  source 1..16: mol_type = other DNA
atttgcctatgggggc

SEQ ID NO: 25740 - DNA, 16 bp, synthetic construct
  source 1..16: mol_type = other DNA
gatttgcctatggggg

SEQ ID NO: 25741 - DNA, 16 bp, synthetic construct
  source 1..16: mol_type = other DNA
ggatttgcctatgggg

SEQ ID NO: 25742 - DNA, 16 bp, synthetic construct
  source 1..16: mol_type = other DNA
tggatttgcctatggg

SEQ ID NO: 25743 - DNA, 16 bp, synthetic construct
  source 1..16: mol_type = other DNA
ttggatttgcctatgg

SEQ ID NO: 25744 - DNA, 16 bp, synthetic construct
  source 1..16: mol_type = other DNA
cttggatttgcctatg

SEQ ID NO: 25745 - DNA, 16 bp, synthetic construct
  source 1..16: mol_type = other DNA
tcttggatttgcctat

SEQ ID NO: 25746 - DNA, 16 bp, synthetic construct
  source 1..16: mol_type = other DNA
gtcttggatttgccta

SEQ ID NO: 25747 - DNA, 16 bp, synthetic construct
  source 1..16: mol_type = other DNA
tgtcttggatttgcct

SEQ ID NO: 25748 - DNA, 16 bp, synthetic construct
  source 1..16: mol_type = other DNA
ttgtcttggatttgcc

SEQ ID NO: 25749 - DNA, 16 bp, synthetic construct
  source 1..16: mol_type = other DNA
cttgtcttggatttgc

SEQ ID NO: 25750 - DNA, 16 bp, synthetic construct
  source 1..16: mol_type = other DNA
ctcttgtcttggattt

SEQ ID NO: 25751 - DNA, 16 bp, synthetic construct
  source 1..16: mol_type = other DNA
agactcttgtcttgga

SEQ ID NO: 25752 - DNA, 16 bp, synthetic construct
  source 1..16: mol_type = other DNA
cagactcttgtcttgg

SEQ ID NO: 25753 - DNA, 16 bp, synthetic construct
  source 1..16: mol_type = other DNA
acagactcttgtcttg

SEQ ID NO: 25754 - DNA, 16 bp, synthetic construct
  source 1..16: mol_type = other DNA
gttggatctgcctatg

SEQ ID NO: 25755 - DNA, 16 bp, synthetic construct
  source 1..16: mol_type = other DNA
tgttggatctgcctat

SEQ ID NO: 25756 - DNA, 16 bp, synthetic construct
  source 1..16: mol_type = other DNA
gtgttggatctgccta

SEQ ID NO: 25757 - DNA, 16 bp, synthetic construct
  source 1..16: mol_type = other DNA
tgtgttggatctgcct

SEQ ID NO: 25758 - DNA, 16 bp, synthetic construct
  source 1..16: mol_type = other DNA
ttgtgttggatctgcc

SEQ ID NO: 25759 - DNA, 16 bp, synthetic construct
  source 1..16: mol_type = other DNA
cttgtgttggatctgc

SEQ ID NO: 25760 - DNA, 16 bp, synthetic construct
  source 1..16: mol_type = other DNA
tcttgtgttggatctg

SEQ ID NO: 25761 - DNA, 16 bp, synthetic construct
  source 1..16: mol_type = other DNA
ctcttgtgttggatct

SEQ ID NO: 25762 - DNA, 16 bp, synthetic construct
  source 1..16: mol_type = other DNA
actcttgtgttggatc

SEQ ID NO: 25763 - DNA, 16 bp, synthetic construct
  source 1..16: mol_type = other DNA
gtaactcttgtgttgg

SEQ ID NO: 25764 - DNA, 16 bp, synthetic construct
  source 1..16: mol_type = other DNA
atcacacaggtgatgg

SEQ ID NO: 25765 - DNA, 16 bp, synthetic construct
  source 1..16: mol_type = other DNA
acactgatcacacagg

SEQ ID NO: 25766 - DNA, 16 bp, synthetic construct
  source 1..16: mol_type = other DNA
gaggcattgtgacata

SEQ ID NO: 25767 - DNA, 16 bp, synthetic construct
  source 1..16: mol_type = other DNA
ggaggcattgtgacat

SEQ ID NO: 25768 - DNA, 16 bp, synthetic construct
  source 1..16: mol_type = other DNA
aggaggcattgtgaca

SEQ ID NO: 25769 - DNA, 16 bp, synthetic construct
  source 1..16: mol_type = other DNA
caggaggcattgtgac

SEQ ID NO: 25770 - DNA, 16 bp, synthetic construct
  source 1..16: mol_type = other DNA
acaggaggcattgtga

SEQ ID NO: 25771 - DNA, 16 bp, synthetic construct
  source 1..16: mol_type = other DNA
tacaggaggcattgtg

SEQ ID NO: 25772 - DNA, 16 bp, synthetic construct
  source 1..16: mol_type = other DNA
ctacaggaggcattgt

SEQ ID NO: 25773 - DNA, 16 bp, synthetic construct
  source 1..16: mol_type = other DNA
cctacaggaggcattg

SEQ ID NO: 25774 - DNA, 16 bp, synthetic construct
  source 1..16: mol_type = other DNA
gcctacaggaggcatt

SEQ ID NO: 25775 - DNA, 16 bp, synthetic construct
  source 1..16: mol_type = other DNA
tgcctacaggaggcat

SEQ ID NO: 25776 - DNA, 16 bp, synthetic construct
  source 1..16: mol_type = other DNA
ctgcctacaggaggca

SEQ ID NO: 25777 - DNA, 16 bp, synthetic construct
  source 1..16: mol_type = other DNA
cctctgcctacaggag

SEQ ID NO: 25778 - DNA, 16 bp, synthetic construct
  source 1..16: mol_type = other DNA
gcctctgcctacagga

SEQ ID NO: 25779 - DNA, 16 bp, synthetic construct
  source 1..16: mol_type = other DNA
agcctctgcctacagg

SEQ ID NO: 25780 - DNA, 16 bp, synthetic construct
  source 1..16: mol_type = other DNA
tagcctctgcctacag

SEQ ID NO: 25781 - DNA, 16 bp, synthetic construct
  source 1..16: mol_type = other DNA
ttagcctctgcctaca

SEQ ID NO: 25782 - DNA, 16 bp, synthetic construct
  source 1..16: mol_type = other DNA
tttagcctctgcctac

SEQ ID NO: 25783 - DNA, 16 bp, synthetic construct
  source 1..16: mol_type = other DNA
gtttagcctctgccta

SEQ ID NO: 25784 - DNA, 16 bp, synthetic construct
  source 1..16: mol_type = other DNA
tgtttagcctctgcct

SEQ ID NO: 25785 - DNA, 16 bp, synthetic construct
  source 1..16: mol_type = other DNA
ttgtttagcctctgcc

SEQ ID NO: 25786 - DNA, 16 bp, synthetic construct
  source 1..16: mol_type = other DNA
cttgtttagcctctgc

SEQ ID NO: 25787 - DNA, 16 bp, synthetic construct
  source 1..16: mol_type = other DNA
tcttgtttagcctctg

SEQ ID NO: 25788 - DNA, 16 bp, synthetic construct
  source 1..16: mol_type = other DNA
ctcttgtttagcctct

SEQ ID NO: 25789 - DNA, 16 bp, synthetic construct
  source 1..16: mol_type = other DNA
actcttgtttagcctc

SEQ ID NO: 25790 - DNA, 16 bp, synthetic construct
  source 1..16: mol_type = other DNA
aactcttgtttagcct

SEQ ID NO: 25791 - DNA, 16 bp, synthetic construct
  source 1..16: mol_type = other DNA
tccaggtgatgtaact

SEQ ID NO: 25792 - DNA, 16 bp, synthetic construct
  source 1..16: mol_type = other DNA
gtgacatattgcagga

SEQ ID NO: 25793 - DNA, 16 bp, synthetic construct
  source 1..16: mol_type = other DNA
gccattgtgacatatt

SEQ ID NO: 25794 - DNA, 16 bp, synthetic construct
  source 1..16: mol_type = other DNA
cctaagcctaacccct

SEQ ID NO: 25795 - DNA, 16 bp, synthetic construct
  source 1..16: mol_type = other DNA
gcctaagcctaacccc

SEQ ID NO: 25796 - DNA, 16 bp, synthetic construct
  source 1..16: mol_type = other DNA
agcctaagcctaaccc

SEQ ID NO: 25797 - DNA, 16 bp, synthetic construct
  source 1..16: mol_type = other DNA
aagcctaagcctaacc

SEQ ID NO: 25798 - DNA, 16 bp, synthetic construct
  source 1..16: mol_type = other DNA
ctaagcctaagcctaa

SEQ ID NO: 25799 - DNA, 16 bp, synthetic construct
  source 1..16: mol_type = other DNA
cctaagcctaagccta

SEQ ID NO: 25800 - DNA, 16 bp, synthetic construct
  source 1..16: mol_type = other DNA
ccctaagcctaagcct

SEQ ID NO: 25801 - DNA, 16 bp, synthetic construct
  source 1..16: mol_type = other DNA
accctaagcctaagcc

SEQ ID NO: 25802 - DNA, 16 bp, synthetic construct
  source 1..16: mol_type = other DNA
aaccctaagcctaagc

SEQ ID NO: 25803 - DNA, 16 bp, synthetic construct
  source 1..16: mol_type = other DNA
ctaaccctaagcctaa

SEQ ID NO: 25804 - DNA, 16 bp, synthetic construct
  source 1..16: mol_type = other DNA
cctaaccctaagccta

SEQ ID NO: 25805 - DNA, 16 bp, synthetic construct
  source 1..16: mol_type = other DNA
gcctaaccctaagcct

SEQ ID NO: 25806 - DNA, 16 bp, synthetic construct
  source 1..16: mol_type = other DNA
agcctaaccctaagcc

SEQ ID NO: 25807 - DNA, 16 bp, synthetic construct
  source 1..16: mol_type = other DNA
aagcctaaccctaagc

SEQ ID NO: 25808 - DNA, 16 bp, synthetic construct
  source 1..16: mol_type = other DNA
ctaagcctaaccctaa

SEQ ID NO: 25809 - DNA, 16 bp, synthetic construct
  source 1..16: mol_type = other DNA
cctaagcctaacccta

SEQ ID NO: 25810 - DNA, 16 bp, synthetic construct
  source 1..16: mol_type = other DNA
gcctaagcctaaccct

SEQ ID NO: 25811 - DNA, 16 bp, synthetic construct
  source 1..16: mol_type = other DNA
taccctaagcctaagc

SEQ ID NO: 25812 - DNA, 16 bp, synthetic construct
  source 1..16: mol_type = other DNA
ttaccctaagcctaag

SEQ ID NO: 25813 - DNA, 16 bp, synthetic construct
  source 1..16: mol_type = other DNA
cttaccctaagcctaa

SEQ ID NO: 25814 - DNA, 16 bp, synthetic construct
  source 1..16: mol_type = other DNA
ccttaccctaagccta

SEQ ID NO: 25815 - DNA, 16 bp, synthetic construct
  source 1..16: mol_type = other DNA
gccttaccctaagcct

SEQ ID NO: 25816 - DNA, 16 bp, synthetic construct
  source 1..16: mol_type = other DNA
agccttaccctaagcc

SEQ ID NO: 25817 - DNA, 16 bp, synthetic construct
  source 1..16: mol_type = other DNA
aagccttaccctaagc

SEQ ID NO: 25818 - DNA, 16 bp, synthetic construct
  source 1..16: mol_type = other DNA
taagccttaccctaag

SEQ ID NO: 25819 - DNA, 16 bp, synthetic construct
  source 1..16: mol_type = other DNA
ctaagccttaccctaa

SEQ ID NO: 25820 - DNA, 16 bp, synthetic construct
  source 1..16: mol_type = other DNA
cctaagccttacccta

SEQ ID NO: 25821 - DNA, 16 bp, synthetic construct
  source 1..16: mol_type = other DNA
ccctaagccttaccct

SEQ ID NO: 25822 - DNA, 16 bp, synthetic construct
  source 1..16: mol_type = other DNA
accctaagccttaccc

SEQ ID NO: 25823 - DNA, 16 bp, synthetic construct
  source 1..16: mol_type = other DNA
aaccctaagccttacc

SEQ ID NO: 25824 - DNA, 16 bp, synthetic construct
  source 1..16: mol_type = other DNA
gaaccctaagccttac

SEQ ID NO: 25825 - DNA, 16 bp, synthetic construct
  source 1..16: mol_type = other DNA
tgaaccctaagcctta

SEQ ID NO: 25826 - DNA, 16 bp, synthetic construct
  source 1..16: mol_type = other DNA
ctgaaccctaagcctt

SEQ ID NO: 25827 - DNA, 16 bp, synthetic construct
  source 1..16: mol_type = other DNA
gccattctttgaagac

SEQ ID NO: 25828 - DNA, 16 bp, synthetic construct
  source 1..16: mol_type = other DNA
ggccattctttgaaga

SEQ ID NO: 25829 - DNA, 16 bp, synthetic construct
  source 1..16: mol_type = other DNA
aggccattctttgaag

SEQ ID NO: 25830 - DNA, 16 bp, synthetic construct
  source 1..16: mol_type = other DNA
caaggccattctttga

SEQ ID NO: 25831 - DNA, 16 bp, synthetic construct
  source 1..16: mol_type = other DNA
ccaaggccattctttg

SEQ ID NO: 25832 - DNA, 16 bp, synthetic construct
  source 1..16: mol_type = other DNA
accaaggccattcttt

SEQ ID NO: 25833 - DNA, 16 bp, synthetic construct
  source 1..16: mol_type = other DNA
aaccaaggccattctt

SEQ ID NO: 25834 - DNA, 16 bp, synthetic construct
  source 1..16: mol_type = other DNA
aaaccaaggccattct

SEQ ID NO: 25835 - DNA, 16 bp, synthetic construct
  source 1..16: mol_type = other DNA
gaaaccaaggccattc

SEQ ID NO: 25836 - DNA, 16 bp, synthetic construct
  source 1..16: mol_type = other DNA
cagaaaccaaggccat

SEQ ID NO: 25837 - DNA, 16 bp, synthetic construct
  source 1..16: mol_type = other DNA
acagaaaccaaggcca

SEQ ID NO: 25838 - DNA, 16 bp, synthetic construct
  source 1..16: mol_type = other DNA
cacagaaaccaaggcc

SEQ ID NO: 25839 - DNA, 16 bp, synthetic construct
  source 1..16: mol_type = other DNA
ccacagaaaccaaggc

SEQ ID NO: 25840 - DNA, 16 bp, synthetic construct
  source 1..16: mol_type = other DNA
ctgtccacagaaacca

SEQ ID NO: 25841 - DNA, 16 bp, synthetic construct
  source 1..16: mol_type = other DNA
actgtccacagaaacc

SEQ ID NO: 25842 - DNA, 16 bp, synthetic construct
  source 1..16: mol_type = other DNA
ggagaaactgtccaca

SEQ ID NO: 25843 - DNA, 16 bp, synthetic construct
  source 1..16: mol_type = other DNA
gaggagaaactgtcca

SEQ ID NO: 25844 - DNA, 16 bp, synthetic construct
  source 1..16: mol_type = other DNA
cctttccatgaggaga

SEQ ID NO: 25845 - DNA, 16 bp, synthetic construct
  source 1..16: mol_type = other DNA
acctttccatgaggag

SEQ ID NO: 25846 - DNA, 16 bp, synthetic construct
  source 1..16: mol_type = other DNA
tacctttccatgagga

SEQ ID NO: 25847 - DNA, 16 bp, synthetic construct
  source 1..16: mol_type = other DNA
ctacctttccatgagg

SEQ ID NO: 25848 - DNA, 16 bp, synthetic construct
  source 1..16: mol_type = other DNA
actacctttccatgag

SEQ ID NO: 25849 - DNA, 16 bp, synthetic construct
  source 1..16: mol_type = other DNA
cactacctttccatga

SEQ ID NO: 25850 - DNA, 16 bp, synthetic construct
  source 1..16: mol_type = other DNA
acactacctttccatg

SEQ ID NO: 25851 - DNA, 16 bp, synthetic construct
  source 1..16: mol_type = other DNA
cacactacctttccat

SEQ ID NO: 25852 - DNA, 16 bp, synthetic construct
  source 1..16: mol_type = other DNA
acacactacctttcca

SEQ ID NO: 25853 - DNA, 16 bp, synthetic construct
  source 1..16: mol_type = other DNA
aacacactacctttcc

SEQ ID NO: 25854 - DNA, 16 bp, synthetic construct
  source 1..16: mol_type = other DNA
ggaacacactaccttt

SEQ ID NO: 25855 - DNA, 16 bp, synthetic construct
  source 1..16: mol_type = other DNA
caggaacacactacct

SEQ ID NO: 25856 - DNA, 16 bp, synthetic construct
  source 1..16: mol_type = other DNA
gcaggaacacactacc

SEQ ID NO: 25857 - DNA, 16 bp, synthetic construct
  source 1..16: mol_type = other DNA
attttgttgtgtgtgt

SEQ ID NO: 25858 - DNA, 16 bp, synthetic construct
  source 1..16: mol_type = other DNA
ccctcagctaaatttt

SEQ ID NO: 25859 - DNA, 16 bp, synthetic construct
  source 1..16: mol_type = other DNA
tccctcagctaaattt

SEQ ID NO: 25860 - DNA, 16 bp, synthetic construct
  source 1..16: mol_type = other DNA
ctccctcagctaaatt

SEQ ID NO: 25861 - DNA, 16 bp, synthetic construct
  source 1..16: mol_type = other DNA
tctccctcagctaaat

SEQ ID NO: 25862 - DNA, 16 bp, synthetic construct
  source 1..16: mol_type = other DNA
atctccctcagctaaa

SEQ ID NO: 25863 - DNA, 16 bp, synthetic construct
  source 1..16: mol_type = other DNA
aatctccctcagctaa

SEQ ID NO: 25864 - DNA, 16 bp, synthetic construct
  source 1..16: mol_type = other DNA
caatctccctcagcta

SEQ ID NO: 25865 - DNA, 16 bp, synthetic construct
  source 1..16: mol_type = other DNA
tcaatctccctcagct

SEQ ID NO: 25866 - DNA, 16 bp, synthetic construct
  source 1..16: mol_type = other DNA
ctcaatctccctcagc

SEQ ID NO: 25867 - DNA, 16 bp, synthetic construct
  source 1..16: mol_type = other DNA
actcaatctccctcag

SEQ ID NO: 25868 - DNA, 16 bp, synthetic construct
  source 1..16: mol_type = other DNA
cactcaatctccctca

SEQ ID NO: 25869 - DNA, 16 bp, synthetic construct
  source 1..16: mol_type = other DNA
tcactcaatctccctc

SEQ ID NO: 25870 - DNA, 16 bp, synthetic construct
  source 1..16: mol_type = other DNA
gtcactcaatctccct

SEQ ID NO: 25871 - DNA, 16 bp, synthetic construct
  source 1..16: mol_type = other DNA
agtcactcaatctccc

SEQ ID NO: 25872 - DNA, 16 bp, synthetic construct
  source 1..16: mol_type = other DNA
aagtcactcaatctcc

SEQ ID NO: 25873 - DNA, 16 bp, synthetic construct
  source 1..16: mol_type = other DNA
ctgggaaagtcactca

SEQ ID NO: 25874 - DNA, 16 bp, synthetic construct
  source 1..16: mol_type = other DNA
cctgggaaagtcactc

SEQ ID NO: 25875 - DNA, 16 bp, synthetic construct
  source 1..16: mol_type = other DNA
ccctgggaaagtcact

SEQ ID NO: 25876 - DNA, 16 bp, synthetic construct
  source 1..16: mol_type = other DNA
accctgggaaagtcac

SEQ ID NO: 25877 - DNA, 16 bp, synthetic construct
  source 1..16: mol_type = other DNA
gaccctgggaaagtca

SEQ ID NO: 25878 - DNA, 16 bp, synthetic construct
  source 1..16: mol_type = other DNA
tgaccctgggaaagtc

SEQ ID NO: 25879 - DNA, 16 bp, synthetic construct
  source 1..16: mol_type = other DNA
gtgaccctgggaaagt

SEQ ID NO: 25880 - DNA, 16 bp, synthetic construct
  source 1..16: mol_type = other DNA
tgtgaccctgggaaag

SEQ ID NO: 25881 - DNA, 16 bp, synthetic construct
  source 1..16: mol_type = other DNA
gtgtgaccctgggaaa

SEQ ID NO: 25882 - DNA, 16 bp, synthetic construct
  source 1..16: mol_type = other DNA
tgtgtgaccctgggaa

SEQ ID NO: 25883 - DNA, 16 bp, synthetic construct
  source 1..16: mol_type = other DNA
ctgtgtgaccctggga

SEQ ID NO: 25884 - DNA, 16 bp, synthetic construct
  source 1..16: mol_type = other DNA
gctgtgtgaccctggg

SEQ ID NO: 25885 - DNA, 16 bp, synthetic construct
  source 1..16: mol_type = other DNA
agctgtgtgaccctgg

SEQ ID NO: 25886 - DNA, 16 bp, synthetic construct
  source 1..16: mol_type = other DNA
tagctgtgtgaccctg

SEQ ID NO: 25887 - DNA, 16 bp, synthetic construct
  source 1..16: mol_type = other DNA
gtagctgtgtgaccct

SEQ ID NO: 25888 - DNA, 16 bp, synthetic construct
  source 1..16: mol_type = other DNA
agtagctgtgtgaccc

SEQ ID NO: 25889 - DNA, 16 bp, synthetic construct
  source 1..16: mol_type = other DNA
tagtagctgtgtgacc

SEQ ID NO: 25890 - DNA, 16 bp, synthetic construct
  source 1..16: mol_type = other DNA
ttagtagctgtgtgac

SEQ ID NO: 25891 - DNA, 16 bp, synthetic construct
  source 1..16: mol_type = other DNA
attagtagctgtgtga

SEQ ID NO: 25892 - DNA, 16 bp, synthetic construct
  source 1..16: mol_type = other DNA
ctattagtagctgtgt

SEQ ID NO: 25893 - DNA, 16 bp, synthetic construct
  source 1..16: mol_type = other DNA
gctattagtagctgtg

SEQ ID NO: 25894 - DNA, 16 bp, synthetic construct
  source 1..16: mol_type = other DNA
tgctattagtagctgt

SEQ ID NO: 25895 - DNA, 16 bp, synthetic construct
  source 1..16: mol_type = other DNA
ctgctattagtagctg

SEQ ID NO: 25896 - DNA, 16 bp, synthetic construct
  source 1..16: mol_type = other DNA
tctgctattagtagct

SEQ ID NO: 25897 - DNA, 16 bp, synthetic construct
  source 1..16: mol_type = other DNA
ctctgctattagtagc

SEQ ID NO: 25898 - DNA, 16 bp, synthetic construct
  source 1..16: mol_type = other DNA
ctactctgctattagt

SEQ ID NO: 25899 - DNA, 16 bp, synthetic construct
  source 1..16: mol_type = other DNA
acactactctgctatt

SEQ ID NO: 25900 - DNA, 16 bp, synthetic construct
  source 1..16: mol_type = other DNA
cagtattcccatatga

SEQ ID NO: 25901 - DNA, 16 bp, synthetic construct
  source 1..16: mol_type = other DNA
tcagtattcccatatg

SEQ ID NO: 25902 - DNA, 16 bp, synthetic construct
  source 1..16: mol_type = other DNA
ttcagtattcccatat

SEQ ID NO: 25903 - DNA, 16 bp, synthetic construct
  source 1..16: mol_type = other DNA
gttcagtattcccata

SEQ ID NO: 25904 - DNA, 16 bp, synthetic construct
  source 1..16: mol_type = other DNA
tgttcagtattcccat

SEQ ID NO: 25905 - DNA, 16 bp, synthetic construct
  source 1..16: mol_type = other DNA
gtgttcagtattccca

SEQ ID NO: 25906 - DNA, 16 bp, synthetic construct
  source 1..16: mol_type = other DNA
tgtgttcagtattccc

SEQ ID NO: 25907 - DNA, 16 bp, synthetic construct
  source 1..16: mol_type = other DNA
ctgtgttcagtattcc

SEQ ID NO: 25908 - DNA, 16 bp, synthetic construct
  source 1..16: mol_type = other DNA
tctgtgttcagtattc

SEQ ID NO: 25909 - DNA, 16 bp, synthetic construct
  source 1..16: mol_type = other DNA
catttctgtgttcagt

SEQ ID NO: 25910 - DNA, 16 bp, synthetic construct
  source 1..16: mol_type = other DNA
tcatttctgtgttcag

SEQ ID NO: 25911 - DNA, 16 bp, synthetic construct
  source 1..16: mol_type = other DNA
ttcatttctgtgttca

SEQ ID NO: 25912 - DNA, 16 bp, synthetic construct
  source 1..16: mol_type = other DNA
gttcatttctgtgttc

SEQ ID NO: 25913 - DNA, 16 bp, synthetic construct
  source 1..16: mol_type = other DNA
ggttcatttctgtgtt

SEQ ID NO: 25914 - DNA, 16 bp, synthetic construct
  source 1..16: mol_type = other DNA
tggttcatttctgtgt

SEQ ID NO: 25915 - DNA, 16 bp, synthetic construct
  source 1..16: mol_type = other DNA
ttggttcatttctgtg

SEQ ID NO: 25916 - DNA, 16 bp, synthetic construct
  source 1..16: mol_type = other DNA
attggttcatttctgt

SEQ ID NO: 25917 - DNA, 16 bp, synthetic construct
  source 1..16: mol_type = other DNA
ccattggttcatttct

SEQ ID NO: 25918 - DNA, 16 bp, synthetic construct
  source 1..16: mol_type = other DNA
tccattggttcatttc

SEQ ID NO: 25919 - DNA, 16 bp, synthetic construct
  source 1..16: mol_type = other DNA
ttccattggttcattt

SEQ ID NO: 25920 - DNA, 16 bp, synthetic construct
  source 1..16: mol_type = other DNA
tttccattggttcatt

SEQ ID NO: 25921 - DNA, 16 bp, synthetic construct
  source 1..16: mol_type = other DNA
gtttccattggttcat

SEQ ID NO: 25922 - DNA, 16 bp, synthetic construct
  source 1..16: mol_type = other DNA
tgtttccattggttca

SEQ ID NO: 25923 - DNA, 16 bp, synthetic construct
  source 1..16: mol_type = other DNA
atgtttccattggttc

SEQ ID NO: 25924 - DNA, 16 bp, synthetic construct
  source 1..16: mol_type = other DNA
gatgtttccattggtt

SEQ ID NO: 25925 - DNA, 16 bp, synthetic construct
  source 1..16: mol_type = other DNA
ggatgtttccattggt

SEQ ID NO: 25926 - DNA, 16 bp, synthetic construct
  source 1..16: mol_type = other DNA
aggatgtttccattgg

SEQ ID NO: 25927 - DNA, 16 bp, synthetic construct
  source 1..16: mol_type = other DNA
gtaggatgtttccatt

SEQ ID NO: 25928 - DNA, 16 bp, synthetic construct
  source 1..16: mol_type = other DNA
cgtaggatgtttccat

SEQ ID NO: 25929 - DNA, 16 bp, synthetic construct
  source 1..16: mol_type = other DNA
acgtaggatgtttcca

SEQ ID NO: 25930 - DNA, 16 bp, synthetic construct
  source 1..16: mol_type = other DNA
aacgtaggatgtttcc

SEQ ID NO: 25931 - DNA, 16 bp, synthetic construct
  source 1..16: mol_type = other DNA
gcttttggaacgtagg

SEQ ID NO: 25932 - DNA, 16 bp, synthetic construct
  source 1..16: mol_type = other DNA
ggcttttggaacgtag

SEQ ID NO: 25933 - DNA, 16 bp, synthetic construct
  source 1..16: mol_type = other DNA
aggcttttggaacgta

SEQ ID NO: 25934 - DNA, 16 bp, synthetic construct
  source 1..16: mol_type = other DNA
taggcttttggaacgt

SEQ ID NO: 25935 - DNA, 16 bp, synthetic construct
  source 1..16: mol_type = other DNA
gtaggcttttggaacg

SEQ ID NO: 25936 - DNA, 16 bp, synthetic construct
  source 1..16: mol_type = other DNA
gagtaggcttttggaa

SEQ ID NO: 25937 - DNA, 16 bp, synthetic construct
  source 1..16: mol_type = other DNA
tgagtaggcttttgga

SEQ ID NO: 25938 - DNA, 16 bp, synthetic construct
  source 1..16: mol_type = other DNA
ttgagtaggcttttgg

SEQ ID NO: 25939 - DNA, 16 bp, synthetic construct
  source 1..16: mol_type = other DNA
cttgagtaggcttttg

SEQ ID NO: 25940 - DNA, 16 bp, synthetic construct
  source 1..16: mol_type = other DNA
gcttgagtaggctttt

SEQ ID NO: 25941 - DNA, 16 bp, synthetic construct
  source 1..16: mol_type = other DNA
ggcttgagtaggcttt

SEQ ID NO: 25942 - DNA, 16 bp, synthetic construct
  source 1..16: mol_type = other DNA
tggcttgagtaggctt

SEQ ID NO: 25943 - DNA, 16 bp, synthetic construct
  source 1..16: mol_type = other DNA
atggcttgagtaggct

SEQ ID NO: 25944 - DNA, 16 bp, synthetic construct
  source 1..16: mol_type = other DNA
aatggcttgagtaggc

SEQ ID NO: 25945 - DNA, 16 bp, synthetic construct
  source 1..16: mol_type = other DNA
tctgccattcataagt

SEQ ID NO: 25946 - DNA, 16 bp, synthetic construct
  source 1..16: mol_type = other DNA
ctctgccattcataag

SEQ ID NO: 25947 - DNA, 16 bp, synthetic construct
  source 1..16: mol_type = other DNA
tctctgccattcataa

SEQ ID NO: 25948 - DNA, 16 bp, synthetic construct
  source 1..16: mol_type = other DNA
atctctgccattcata

SEQ ID NO: 25949 - DNA, 16 bp, synthetic construct
  source 1..16: mol_type = other DNA
gatctctgccattcat

SEQ ID NO: 25950 - DNA, 16 bp, synthetic construct
  source 1..16: mol_type = other DNA
agatctctgccattca

SEQ ID NO: 25951 - DNA, 16 bp, synthetic construct
  source 1..16: mol_type = other DNA
tagatctctgccattc

SEQ ID NO: 25952 - DNA, 16 bp, synthetic construct
  source 1..16: mol_type = other DNA
gtagatctctgccatt

SEQ ID NO: 25953 - DNA, 16 bp, synthetic construct
  source 1..16: mol_type = other DNA
tgtagatctctgccat

SEQ ID NO: 25954 - DNA, 16 bp, synthetic construct
  source 1..16: mol_type = other DNA
ctgtagatctctgcca

SEQ ID NO: 25955 - DNA, 16 bp, synthetic construct
  source 1..16: mol_type = other DNA
tctgtagatctctgcc

SEQ ID NO: 25956 - DNA, 16 bp, synthetic construct
  source 1..16: mol_type = other DNA
atctgtagatctctgc

SEQ ID NO: 25957 - DNA, 16 bp, synthetic construct
  source 1..16: mol_type = other DNA
gtgagcatcatttctt

SEQ ID NO: 25958 - DNA, 16 bp, synthetic construct
  source 1..16: mol_type = other DNA
ggtgagcatcatttct

SEQ ID NO: 25959 - DNA, 16 bp, synthetic construct
  source 1..16: mol_type = other DNA
tggtgagcatcatttc

SEQ ID NO: 25960 - DNA, 16 bp, synthetic construct
  source 1..16: mol_type = other DNA
ctggtgagcatcattt

SEQ ID NO: 25961 - DNA, 16 bp, synthetic construct
  source 1..16: mol_type = other DNA
gctggtgagcatcatt

SEQ ID NO: 25962 - DNA, 16 bp, synthetic construct
  source 1..16: mol_type = other DNA
agctggtgagcatcat

SEQ ID NO: 25963 - DNA, 16 bp, synthetic construct
  source 1..16: mol_type = other DNA
cagctggtgagcatca

SEQ ID NO: 25964 - DNA, 16 bp, synthetic construct
  source 1..16: mol_type = other DNA
ccagctggtgagcatc

SEQ ID NO: 25965 - DNA, 16 bp, synthetic construct
  source 1..16: mol_type = other DNA
tggggtggtagcagta

SEQ ID NO: 25966 - DNA, 16 bp, synthetic construct
  source 1..16: mol_type = other DNA
gtggggtggtagcagt

SEQ ID NO: 25967 - DNA, 16 bp, synthetic construct
  source 1..16: mol_type = other DNA
tgtggggtggtagcag

SEQ ID NO: 25968 - DNA, 16 bp, synthetic construct
  source 1..16: mol_type = other DNA
ttgtggggtggtagca

SEQ ID NO: 25969 - DNA, 16 bp, synthetic construct
  source 1..16: mol_type = other DNA
gttgtggggtggtagc

SEQ ID NO: 25970 - DNA, 16 bp, synthetic construct
  source 1..16: mol_type = other DNA
ggttgtggggtggtag

SEQ ID NO: 25971 - DNA, 16 bp, synthetic construct
  source 1..16: mol_type = other DNA
gggttgtggggtggta

SEQ ID NO: 25972 - DNA, 16 bp, synthetic construct
  source 1..16: mol_type = other DNA
atttgtccagtatgct

SEQ ID NO: 25973 - DNA, 16 bp, synthetic construct
  source 1..16: mol_type = other DNA
catttgtccagtatgc

SEQ ID NO: 25974 - DNA, 16 bp, synthetic construct
  source 1..16: mol_type = other DNA
gacatttgtccagtat

SEQ ID NO: 25975 - DNA, 16 bp, synthetic construct
  source 1..16: mol_type = other DNA
agacatttgtccagta

SEQ ID NO: 25976 - DNA, 16 bp, synthetic construct
  source 1..16: mol_type = other DNA
tagacatttgtccagt

SEQ ID NO: 25977 - DNA, 16 bp, synthetic construct
  source 1..16: mol_type = other DNA
cttagacatttgtcca

SEQ ID NO: 25978 - DNA, 16 bp, synthetic construct
  source 1..16: mol_type = other DNA
gcttagacatttgtcc

SEQ ID NO: 25979 - DNA, 16 bp, synthetic construct
  source 1..16: mol_type = other DNA
ggcttagacatttgtc

SEQ ID NO: 25980 - DNA, 16 bp, synthetic construct
  source 1..16: mol_type = other DNA
aggcttagacatttgt

SEQ ID NO: 25981 - DNA, 16 bp, synthetic construct
  source 1..16: mol_type = other DNA
acgaggcttagacatt

SEQ ID NO: 25982 - DNA, 16 bp, synthetic construct
  source 1..16: mol_type = other DNA
cacgaggcttagacat

SEQ ID NO: 25983 - DNA, 16 bp, synthetic construct
  source 1..16: mol_type = other DNA
ccacgaggcttagaca

SEQ ID NO: 25984 - DNA, 16 bp, synthetic construct
  source 1..16: mol_type = other DNA
accacgaggcttagac

SEQ ID NO: 25985 - DNA, 16 bp, synthetic construct
  source 1..16: mol_type = other DNA
aaccacgaggcttaga

SEQ ID NO: 25986 - DNA, 16 bp, synthetic construct
  source 1..16: mol_type = other DNA
taaccacgaggcttag

SEQ ID NO: 25987 - DNA, 16 bp, synthetic construct
  source 1..16: mol_type = other DNA
ctaaccacgaggctta

SEQ ID NO: 25988 - DNA, 16 bp, synthetic construct
  source 1..16: mol_type = other DNA
actaaccacgaggctt

SEQ ID NO: 25989 - DNA, 16 bp, synthetic construct
  source 1..16: mol_type = other DNA
cactaaccacgaggct

SEQ ID NO: 25990 - DNA, 16 bp, synthetic construct
  source 1..16: mol_type = other DNA
ccactaaccacgaggc

SEQ ID NO: 25991 - DNA, 16 bp, synthetic construct
  source 1..16: mol_type = other DNA
cccactaaccacgagg

SEQ ID NO: 25992 - DNA, 16 bp, synthetic construct
  source 1..16: mol_type = other DNA
ccccactaaccacgag

SEQ ID NO: 25993 - DNA, 16 bp, synthetic construct
  source 1..16: mol_type = other DNA
tccccactaaccacga

SEQ ID NO: 25994 - DNA, 16 bp, synthetic construct
  source 1..16: mol_type = other DNA
gtccccactaaccacg

SEQ ID NO: 25995 - DNA, 16 bp, synthetic construct
  source 1..16: mol_type = other DNA
tgtccccactaaccac

SEQ ID NO: 25996 - DNA, 16 bp, synthetic construct
  source 1..16: mol_type = other DNA
atgtccccactaacca

SEQ ID NO: 25997 - DNA, 16 bp, synthetic construct
  source 1..16: mol_type = other DNA
aatgtccccactaacc

SEQ ID NO: 25998 - DNA, 16 bp, synthetic construct
  source 1..16: mol_type = other DNA
caatgtccccactaac

SEQ ID NO: 25999 - DNA, 16 bp, synthetic construct
  source 1..16: mol_type = other DNA
gcaatgtccccactaa

SEQ ID NO: 26000 - DNA, 16 bp, synthetic construct
  source 1..16: mol_type = other DNA
agcaatgtccccacta

SEQ ID NO: 26001 - DNA, 16 bp, synthetic construct
  source 1..16: mol_type = other DNA
cagcaatgtccccact

SEQ ID NO: 26002 - DNA, 16 bp, synthetic construct
  source 1..16: mol_type = other DNA
ccagcaatgtccccac

SEQ ID NO: 26003 - DNA, 16 bp, synthetic construct
  source 1..16: mol_type = other DNA
accagcaatgtcccca

SEQ ID NO: 26004 - DNA, 16 bp, synthetic construct
  source 1..16: mol_type = other DNA
caccagcaatgtcccc

SEQ ID NO: 26005 - DNA, 16 bp, synthetic construct
  source 1..16: mol_type = other DNA
ccaccagcaatgtccc

SEQ ID NO: 26006 - DNA, 16 bp, synthetic construct
  source 1..16: mol_type = other DNA
tccaccagcaatgtcc

SEQ ID NO: 26007 - DNA, 16 bp, synthetic construct
  source 1..16: mol_type = other DNA
ctccaccagcaatgtc

SEQ ID NO: 26008 - DNA, 16 bp, synthetic construct
  source 1..16: mol_type = other DNA
actccaccagcaatgt

SEQ ID NO: 26009 - DNA, 16 bp, synthetic construct
  source 1..16: mol_type = other DNA
gactccaccagcaatg

SEQ ID NO: 26010 - DNA, 16 bp, synthetic construct
  source 1..16: mol_type = other DNA
agactccaccagcaat

SEQ ID NO: 26011 - DNA, 16 bp, synthetic construct
  source 1..16: mol_type = other DNA
cagactccaccagcaa

SEQ ID NO: 26012 - DNA, 16 bp, synthetic construct
  source 1..16: mol_type = other DNA
tcagactccaccagca

SEQ ID NO: 26013 - DNA, 16 bp, synthetic construct
  source 1..16: mol_type = other DNA
ttcagactccaccagc

SEQ ID NO: 26014 - DNA, 16 bp, synthetic construct
  source 1..16: mol_type = other DNA
tttcagactccaccag

SEQ ID NO: 26015 - DNA, 16 bp, synthetic construct
  source 1..16: mol_type = other DNA
atttcagactccacca

SEQ ID NO: 26016 - DNA, 16 bp, synthetic construct
  source 1..16: mol_type = other DNA
aatttcagactccacc

SEQ ID NO: 26017 - DNA, 16 bp, synthetic construct
  source 1..16: mol_type = other DNA
agtcactgcatgacaa

SEQ ID NO: 26018 - DNA, 16 bp, synthetic construct
  source 1..16: mol_type = other DNA
gagtcactgcatgaca

SEQ ID NO: 26019 - DNA, 16 bp, synthetic construct
  source 1..16: mol_type = other DNA
tgagtcactgcatgac

SEQ ID NO: 26020 - DNA, 16 bp, synthetic construct
  source 1..16: mol_type = other DNA
gtgagtcactgcatga

SEQ ID NO: 26021 - DNA, 16 bp, synthetic construct
  source 1..16: mol_type = other DNA
agtgagtcactgcatg

SEQ ID NO: 26022 - DNA, 16 bp, synthetic construct
  source 1..16: mol_type = other DNA
gagtgagtcactgcat

SEQ ID NO: 26023 - DNA, 16 bp, synthetic construct
  source 1..16: mol_type = other DNA
tgagtgagtcactgca

SEQ ID NO: 26024 - DNA, 16 bp, synthetic construct
  source 1..16: mol_type = other DNA
ttgagtgagtcactgc

SEQ ID NO: 26025 - DNA, 16 bp, synthetic construct
  source 1..16: mol_type = other DNA
cttgagtgagtcactg

SEQ ID NO: 26026 - DNA, 16 bp, synthetic construct
  source 1..16: mol_type = other DNA
gcttgagtgagtcact

SEQ ID NO: 26027 - DNA, 16 bp, synthetic construct
  source 1..16: mol_type = other DNA
agcttgagtgagtcac

SEQ ID NO: 26028 - DNA, 16 bp, synthetic construct
  source 1..16: mol_type = other DNA
aagcttgagtgagtca

SEQ ID NO: 26029 - DNA, 16 bp, synthetic construct
  source 1..16: mol_type = other DNA
cctaagcttgagtgag

SEQ ID NO: 26030 - DNA, 16 bp, synthetic construct
  source 1..16: mol_type = other DNA
gcctaagcttgagtga

SEQ ID NO: 26031 - DNA, 16 bp, synthetic construct
  source 1..16: mol_type = other DNA
tgcctaagcttgagtg

SEQ ID NO: 26032 - DNA, 16 bp, synthetic construct
  source 1..16: mol_type = other DNA
ctgcctaagcttgagt

SEQ ID NO: 26033 - DNA, 16 bp, synthetic construct
  source 1..16: mol_type = other DNA
tctgcctaagcttgag

SEQ ID NO: 26034 - DNA, 16 bp, synthetic construct
  source 1..16: mol_type = other DNA
atctgcctaagcttga

SEQ ID NO: 26035 - DNA, 16 bp, synthetic construct
  source 1..16: mol_type = other DNA
aatctgcctaagcttg

SEQ ID NO: 26036 - DNA, 16 bp, synthetic construct
  source 1..16: mol_type = other DNA
ccaaatctgcctaagc

SEQ ID NO: 26037 - DNA, 16 bp, synthetic construct
  source 1..16: mol_type = other DNA
tcaccaaatctgccta

SEQ ID NO: 26038 - DNA, 16 bp, synthetic construct
  source 1..16: mol_type = other DNA
atcaccaaatctgcct

SEQ ID NO: 26039 - DNA, 16 bp, synthetic construct
  source 1..16: mol_type = other DNA
tatcaccaaatctgcc

SEQ ID NO: 26040 - DNA, 16 bp, synthetic construct
  source 1..16: mol_type = other DNA
gtgtcatatatcacca

SEQ ID NO: 26041 - DNA, 16 bp, synthetic construct
  source 1..16: mol_type = other DNA
catctctgtgtcatat

SEQ ID NO: 26042 - DNA, 16 bp, synthetic construct
  source 1..16: mol_type = other DNA
gcatctctgtgtcata

SEQ ID NO: 26043 - DNA, 16 bp, synthetic construct
  source 1..16: mol_type = other DNA
tgcatctctgtgtcat

SEQ ID NO: 26044 - DNA, 16 bp, synthetic construct
  source 1..16: mol_type = other DNA
ttgcatctctgtgtca

SEQ ID NO: 26045 - DNA, 16 bp, synthetic construct
  source 1..16: mol_type = other DNA
tttgcatctctgtgtc

SEQ ID NO: 26046 - DNA, 16 bp, synthetic construct
  source 1..16: mol_type = other DNA
ctttgcatctctgtgt

SEQ ID NO: 26047 - DNA, 16 bp, synthetic construct
  source 1..16: mol_type = other DNA
tctttgcatctctgtg

SEQ ID NO: 26048 - DNA, 16 bp, synthetic construct
  source 1..16: mol_type = other DNA
ttctttgcatctctgt

SEQ ID NO: 26049 - DNA, 16 bp, synthetic construct
  source 1..16: mol_type = other DNA
tttctttgcatctctg

SEQ ID NO: 26050 - DNA, 16 bp, synthetic construct
  source 1..16: mol_type = other DNA
atttctttgcatctct

SEQ ID NO: 26051 - DNA, 16 bp, synthetic construct
  source 1..16: mol_type = other DNA
catttctttgcatctc

SEQ ID NO: 26052 - DNA, 16 bp, synthetic construct
  source 1..16: mol_type = other DNA
gtgtcagctacaacat

SEQ ID NO: 26053 - DNA, 16 bp, synthetic construct
  source 1..16: mol_type = other DNA
tgtgtcagctacaaca

SEQ ID NO: 26054 - DNA, 16 bp, synthetic construct
  source 1..16: mol_type = other DNA
gtgtgtcagctacaac

SEQ ID NO: 26055 - DNA, 16 bp, synthetic construct
  source 1..16: mol_type = other DNA
tgtgtgtcagctacaa

SEQ ID NO: 26056 - DNA, 16 bp, synthetic construct
  source 1..16: mol_type = other DNA
gtgtgtgtcagctaca

SEQ ID NO: 26057 - DNA, 16 bp, synthetic construct
  source 1..16: mol_type = other DNA
tgtgtgtgtcagctac

SEQ ID NO: 26058 - DNA, 16 bp, synthetic construct
  source 1..16: mol_type = other DNA
ctgtgtgtgtcagcta

SEQ ID NO: 26059 - DNA, 16 bp, synthetic construct
  source 1..16: mol_type = other DNA
cctgtgtgtgtcagct

SEQ ID NO: 26060 - DNA, 16 bp, synthetic construct
  source 1..16: mol_type = other DNA
gcctgtgtgtgtcagc

SEQ ID NO: 26061 - DNA, 16 bp, synthetic construct
  source 1..16: mol_type = other DNA
agcctgtgtgtgtcag

SEQ ID NO: 26062 - DNA, 16 bp, synthetic construct
  source 1..16: mol_type = other DNA
cagcctgtgtgtgtca

SEQ ID NO: 26063 - DNA, 16 bp, synthetic construct
  source 1..16: mol_type = other DNA
ccagcctgtgtgtgtc

SEQ ID NO: 26064 - DNA, 16 bp, synthetic construct
  source 1..16: mol_type = other DNA
agccagcctgtgtgtg

SEQ ID NO: 26065 - DNA, 16 bp, synthetic construct
  source 1..16: mol_type = other DNA
gagccagcctgtgtgt

SEQ ID NO: 26066 - DNA, 16 bp, synthetic construct
  source 1..16: mol_type = other DNA
agagccagcctgtgtg

SEQ ID NO: 26067 - DNA, 16 bp, synthetic construct
  source 1..16: mol_type = other DNA
cagagccagcctgtgt

SEQ ID NO: 26068 - DNA, 16 bp, synthetic construct
  source 1..16: mol_type = other DNA
ccagagccagcctgtg

SEQ ID NO: 26069 - DNA, 16 bp, synthetic construct
  source 1..16: mol_type = other DNA
atctcccagagccagc

SEQ ID NO: 26070 - DNA, 16 bp, synthetic construct
  source 1..16: mol_type = other DNA
catctcccagagccag

SEQ ID NO: 26071 - DNA, 16 bp, synthetic construct
  source 1..16: mol_type = other DNA
gcatctcccagagcca

SEQ ID NO: 26072 - DNA, 16 bp, synthetic construct
  source 1..16: mol_type = other DNA
tgcatctcccagagcc

SEQ ID NO: 26073 - DNA, 16 bp, synthetic construct
  source 1..16: mol_type = other DNA
ctgcatctcccagagc

SEQ ID NO: 26074 - DNA, 16 bp, synthetic construct
  source 1..16: mol_type = other DNA
tctgcatctcccagag

SEQ ID NO: 26075 - DNA, 16 bp, synthetic construct
  source 1..16: mol_type = other DNA
ttctgcatctcccaga

SEQ ID NO: 26076 - DNA, 16 bp, synthetic construct
  source 1..16: mol_type = other DNA
cttctgcatctcccag

SEQ ID NO: 26077 - DNA, 16 bp, synthetic construct
  source 1..16: mol_type = other DNA
ccttctgcatctccca

SEQ ID NO: 26078 - DNA, 16 bp, synthetic construct
  source 1..16: mol_type = other DNA
tccttctgcatctccc

SEQ ID NO: 26079 - DNA, 16 bp, synthetic construct
  source 1..16: mol_type = other DNA
ctccttctgcatctcc

SEQ ID NO: 26080 - DNA, 16 bp, synthetic construct
  source 1..16: mol_type = other DNA
gctccttctgcatctc

SEQ ID NO: 26081 - DNA, 16 bp, synthetic construct
  source 1..16: mol_type = other DNA
tgctccttctgcatct

SEQ ID NO: 26082 - DNA, 16 bp, synthetic construct
  source 1..16: mol_type = other DNA
gtgctccttctgcatc

SEQ ID NO: 26083 - DNA, 16 bp, synthetic construct
  source 1..16: mol_type = other DNA
cgtgctccttctgcat

SEQ ID NO: 26084 - DNA, 16 bp, synthetic construct
  source 1..16: mol_type = other DNA
acgtgctccttctgca

SEQ ID NO: 26085 - DNA, 16 bp, synthetic construct
  source 1..16: mol_type = other DNA
gacgtgctccttctgc

SEQ ID NO: 26086 - DNA, 16 bp, synthetic construct
  source 1..16: mol_type = other DNA
ggacgtgctccttctg

SEQ ID NO: 26087 - DNA, 16 bp, synthetic construct
  source 1..16: mol_type = other DNA
gggacgtgctccttct

SEQ ID NO: 26088 - DNA, 16 bp, synthetic construct
  source 1..16: mol_type = other DNA
ggggacgtgctccttc

SEQ ID NO: 26089 - DNA, 16 bp, synthetic construct
  source 1..16: mol_type = other DNA
gggggacgtgctcctt

SEQ ID NO: 26090 - DNA, 16 bp, synthetic construct
  source 1..16: mol_type = other DNA
tgggggacgtgctcct

SEQ ID NO: 26091 - DNA, 16 bp, synthetic construct
  source 1..16: mol_type = other DNA
ttgggggacgtgctcc

SEQ ID NO: 26092 - DNA, 16 bp, synthetic construct
  source 1..16: mol_type = other DNA
tttgggggacgtgctc

SEQ ID NO: 26093 - DNA, 16 bp, synthetic construct
  source 1..16: mol_type = other DNA
ttttgggggacgtgct

SEQ ID NO: 26094 - DNA, 16 bp, synthetic construct
  source 1..16: mol_type = other DNA
attttgggggacgtgc

SEQ ID NO: 26095 - DNA, 16 bp, synthetic construct
  source 1..16: mol_type = other DNA
cattttgggggacgtg

SEQ ID NO: 26096 - DNA, 16 bp, synthetic construct
  source 1..16: mol_type = other DNA
tcattttgggggacgt

SEQ ID NO: 26097 - DNA, 16 bp, synthetic construct
  source 1..16: mol_type = other DNA
ttcattttgggggacg

SEQ ID NO: 26098 - DNA, 16 bp, synthetic construct
  source 1..16: mol_type = other DNA
cttcattttgggggac

SEQ ID NO: 26099 - DNA, 16 bp, synthetic construct
  source 1..16: mol_type = other DNA
gcttcattttggggga

SEQ ID NO: 26100 - DNA, 16 bp, synthetic construct
  source 1..16: mol_type = other DNA
ggcttcattttggggg

SEQ ID NO: 26101 - DNA, 16 bp, synthetic construct
  source 1..16: mol_type = other DNA
tggcttcattttgggg

SEQ ID NO: 26102 - DNA, 16 bp, synthetic construct
  source 1..16: mol_type = other DNA
ctggcttcattttggg

SEQ ID NO: 26103 - DNA, 16 bp, synthetic construct
  source 1..16: mol_type = other DNA
tctggcttcattttgg

SEQ ID NO: 26104 - DNA, 16 bp, synthetic construct
  source 1..16: mol_type = other DNA
gtctggcttcattttg

SEQ ID NO: 26105 - DNA, 16 bp, synthetic construct
  source 1..16: mol_type = other DNA
tgtctggcttcatttt

SEQ ID NO: 26106 - DNA, 16 bp, synthetic construct
  source 1..16: mol_type = other DNA
ctgtctggcttcattt

SEQ ID NO: 26107 - DNA, 16 bp, synthetic construct
  source 1..16: mol_type = other DNA
tctgtctggcttcatt

SEQ ID NO: 26108 - DNA, 16 bp, synthetic construct
  source 1..16: mol_type = other DNA
gtctgtctggcttcat

SEQ ID NO: 26109 - DNA, 16 bp, synthetic construct
  source 1..16: mol_type = other DNA
tgtctgtctggcttca

SEQ ID NO: 26110 - DNA, 16 bp, synthetic construct
  source 1..16: mol_type = other DNA
atgtctgtctggcttc

SEQ ID NO: 26111 - DNA, 16 bp, synthetic construct
  source 1..16: mol_type = other DNA
gatgtctgtctggctt

SEQ ID NO: 26112 - DNA, 16 bp, synthetic construct
  source 1..16: mol_type = other DNA
ggatgtctgtctggct

SEQ ID NO: 26113 - DNA, 16 bp, synthetic construct
  source 1..16: mol_type = other DNA
aggatgtctgtctggc

SEQ ID NO: 26114 - DNA, 16 bp, synthetic construct
  source 1..16: mol_type = other DNA
aaggatgtctgtctgg

SEQ ID NO: 26115 - DNA, 16 bp, synthetic construct
  source 1..16: mol_type = other DNA
ccttaaggatgtctgt

SEQ ID NO: 26116 - DNA, 16 bp, synthetic construct
  source 1..16: mol_type = other DNA
tccttaaggatgtctg

SEQ ID NO: 26117 - DNA, 16 bp, synthetic construct
  source 1..16: mol_type = other DNA
ttccttaaggatgtct

SEQ ID NO: 26118 - DNA, 16 bp, synthetic construct
  source 1..16: mol_type = other DNA
cttccttaaggatgtc

SEQ ID NO: 26119 - DNA, 16 bp, synthetic construct
  source 1..16: mol_type = other DNA
ccttccttaaggatgt

SEQ ID NO: 26120 - DNA, 16 bp, synthetic construct
  source 1..16: mol_type = other DNA
tccttccttaaggatg

SEQ ID NO: 26121 - DNA, 16 bp, synthetic construct
  source 1..16: mol_type = other DNA
ctccttccttaaggat

SEQ ID NO: 26122 - DNA, 16 bp, synthetic construct
  source 1..16: mol_type = other DNA
gctccttccttaagga

SEQ ID NO: 26123 - DNA, 16 bp, synthetic construct
  source 1..16: mol_type = other DNA
tgctccttccttaagg

SEQ ID NO: 26124 - DNA, 16 bp, synthetic construct
  source 1..16: mol_type = other DNA
ttgctccttccttaag

SEQ ID NO: 26125 - DNA, 16 bp, synthetic construct
  source 1..16: mol_type = other DNA
tttgctccttccttaa

SEQ ID NO: 26126 - DNA, 16 bp, synthetic construct
  source 1..16: mol_type = other DNA
ctttgctccttcctta

SEQ ID NO: 26127 - DNA, 16 bp, synthetic construct
  source 1..16: mol_type = other DNA
cctttgctccttcctt

SEQ ID NO: 26128 - DNA, 16 bp, synthetic construct
  source 1..16: mol_type = other DNA
ccctttgctccttcct

SEQ ID NO: 26129 - DNA, 16 bp, synthetic construct
  source 1..16: mol_type = other DNA
aagcccctttgctcct

SEQ ID NO: 26130 - DNA, 16 bp, synthetic construct
  source 1..16: mol_type = other DNA
gaagcccctttgctcc

SEQ ID NO: 26131 - DNA, 16 bp, synthetic construct
  source 1..16: mol_type = other DNA
tgaagcccctttgctc

SEQ ID NO: 26132 - DNA, 16 bp, synthetic construct
  source 1..16: mol_type = other DNA
atgaagcccctttgct

SEQ ID NO: 26133 - DNA, 16 bp, synthetic construct
  source 1..16: mol_type = other DNA
gatgaagcccctttgc

SEQ ID NO: 26134 - DNA, 16 bp, synthetic construct
  source 1..16: mol_type = other DNA
agatgaagcccctttg

SEQ ID NO: 26135 - DNA, 16 bp, synthetic construct
  source 1..16: mol_type = other DNA
aagatgaagccccttt

SEQ ID NO: 26136 - DNA, 16 bp, synthetic construct
  source 1..16: mol_type = other DNA
taagatgaagcccctt

SEQ ID NO: 26137 - DNA, 16 bp, synthetic construct
  source 1..16: mol_type = other DNA
ttaagatgaagcccct

SEQ ID NO: 26138 - DNA, 16 bp, synthetic construct
  source 1..16: mol_type = other DNA
tttaagatgaagcccc

SEQ ID NO: 26139 - DNA, 16 bp, synthetic construct
  source 1..16: mol_type = other DNA
ccttcttcattcttta

SEQ ID NO: 26140 - DNA, 16 bp, synthetic construct
  source 1..16: mol_type = other DNA
cccttcttcattcttt

SEQ ID NO: 26141 - DNA, 16 bp, synthetic construct
  source 1..16: mol_type = other DNA
tcccttcttcattctt

SEQ ID NO: 26142 - DNA, 16 bp, synthetic construct
  source 1..16: mol_type = other DNA
atcccttcttcattct

SEQ ID NO: 26143 - DNA, 16 bp, synthetic construct
  source 1..16: mol_type = other DNA
aatcccttcttcattc

SEQ ID NO: 26144 - DNA, 16 bp, synthetic construct
  source 1..16: mol_type = other DNA
caaatcccttcttcat

SEQ ID NO: 26145 - DNA, 16 bp, synthetic construct
  source 1..16: mol_type = other DNA
acaaatcccttcttca

SEQ ID NO: 26146 - DNA, 16 bp, synthetic construct
  source 1..16: mol_type = other DNA
gacaaatcccttcttc

SEQ ID NO: 26147 - DNA, 16 bp, synthetic construct
  source 1..16: mol_type = other DNA
ctcatgacaaatccct

SEQ ID NO: 26148 - DNA, 16 bp, synthetic construct
  source 1..16: mol_type = other DNA
cacatctctcatgaca

SEQ ID NO: 26149 - DNA, 16 bp, synthetic construct
  source 1..16: mol_type = other DNA
ccacatctctcatgac

SEQ ID NO: 26150 - DNA, 16 bp, synthetic construct
  source 1..16: mol_type = other DNA
gccacatctctcatga

SEQ ID NO: 26151 - DNA, 16 bp, synthetic construct
  source 1..16: mol_type = other DNA
tgccacatctctcatg

SEQ ID NO: 26152 - DNA, 16 bp, synthetic construct
  source 1..16: mol_type = other DNA
ctgccacatctctcat

SEQ ID NO: 26153 - DNA, 16 bp, synthetic construct
  source 1..16: mol_type = other DNA
cctgccacatctctca

SEQ ID NO: 26154 - DNA, 16 bp, synthetic construct
  source 1..16: mol_type = other DNA
tcctgccacatctctc

SEQ ID NO: 26155 - DNA, 16 bp, synthetic construct
  source 1..16: mol_type = other DNA
ttcctgccacatctct

SEQ ID NO: 26156 - DNA, 16 bp, synthetic construct
  source 1..16: mol_type = other DNA
attcctgccacatctc

SEQ ID NO: 26157 - DNA, 16 bp, synthetic construct
  source 1..16: mol_type = other DNA
aattcctgccacatct

SEQ ID NO: 26158 - DNA, 16 bp, synthetic construct
  source 1..16: mol_type = other DNA
aaattcctgccacatc

SEQ ID NO: 26159 - DNA, 16 bp, synthetic construct
  source 1..16: mol_type = other DNA
gaaattcctgccacat

SEQ ID NO: 26160 - DNA, 16 bp, synthetic construct
  source 1..16: mol_type = other DNA
agaaattcctgccaca

SEQ ID NO: 26161 - DNA, 16 bp, synthetic construct
  source 1..16: mol_type = other DNA
tctgcctctcaagaaa

SEQ ID NO: 26162 - DNA, 16 bp, synthetic construct
  source 1..16: mol_type = other DNA
ctctgcctctcaagaa

SEQ ID NO: 26163 - DNA, 16 bp, synthetic construct
  source 1..16: mol_type = other DNA
cctctgcctctcaaga

SEQ ID NO: 26164 - DNA, 16 bp, synthetic construct
  source 1..16: mol_type = other DNA
ccctctgcctctcaag

SEQ ID NO: 26165 - DNA, 16 bp, synthetic construct
  source 1..16: mol_type = other DNA
tccctctgcctctcaa

SEQ ID NO: 26166 - DNA, 16 bp, synthetic construct
  source 1..16: mol_type = other DNA
catgctctccctctgc

SEQ ID NO: 26167 - DNA, 16 bp, synthetic construct
  source 1..16: mol_type = other DNA
tcatgctctccctctg

SEQ ID NO: 26168 - DNA, 16 bp, synthetic construct
  source 1..16: mol_type = other DNA
ctcatgctctccctct

SEQ ID NO: 26169 - DNA, 16 bp, synthetic construct
  source 1..16: mol_type = other DNA
tctcatgctctccctc

SEQ ID NO: 26170 - DNA, 16 bp, synthetic construct
  source 1..16: mol_type = other DNA
ttctcatgctctccct

SEQ ID NO: 26171 - DNA, 16 bp, synthetic construct
  source 1..16: mol_type = other DNA
attctcatgctctccc

SEQ ID NO: 26172 - DNA, 16 bp, synthetic construct
  source 1..16: mol_type = other DNA
cattctcatgctctcc

SEQ ID NO: 26173 - DNA, 16 bp, synthetic construct
  source 1..16: mol_type = other DNA
acattctcatgctctc

SEQ ID NO: 26174 - DNA, 16 bp, synthetic construct
  source 1..16: mol_type = other DNA
aacattctcatgctct

SEQ ID NO: 26175 - DNA, 16 bp, synthetic construct
  source 1..16: mol_type = other DNA
cctaacattctcatgc

SEQ ID NO: 26176 - DNA, 16 bp, synthetic construct
  source 1..16: mol_type = other DNA
cttcctaacattctca

SEQ ID NO: 26177 - DNA, 16 bp, synthetic construct
  source 1..16: mol_type = other DNA
ccttcctaacattctc

SEQ ID NO: 26178 - DNA, 16 bp, synthetic construct
  source 1..16: mol_type = other DNA
gccttcctaacattct

SEQ ID NO: 26179 - DNA, 16 bp, synthetic construct
  source 1..16: mol_type = other DNA
tgccttcctaacattc

SEQ ID NO: 26180 - DNA, 16 bp, synthetic construct
  source 1..16: mol_type = other DNA
ctgccttcctaacatt

SEQ ID NO: 26181 - DNA, 16 bp, synthetic construct
  source 1..16: mol_type = other DNA
cctgccttcctaacat

SEQ ID NO: 26182 - DNA, 16 bp, synthetic construct
  source 1..16: mol_type = other DNA
tcctgccttcctaaca

SEQ ID NO: 26183 - DNA, 16 bp, synthetic construct
  source 1..16: mol_type = other DNA
ctcctgccttcctaac

SEQ ID NO: 26184 - DNA, 16 bp, synthetic construct
  source 1..16: mol_type = other DNA
tctcctgccttcctaa

SEQ ID NO: 26185 - DNA, 16 bp, synthetic construct
  source 1..16: mol_type = other DNA
ctctcctgccttccta

SEQ ID NO: 26186 - DNA, 16 bp, synthetic construct
  source 1..16: mol_type = other DNA
agtctctcctgccttc

SEQ ID NO: 26187 - DNA, 16 bp, synthetic construct
  source 1..16: mol_type = other DNA
gagtctctcctgcctt

SEQ ID NO: 26188 - DNA, 16 bp, synthetic construct
  source 1..16: mol_type = other DNA
agagtctctcctgcct

SEQ ID NO: 26189 - DNA, 16 bp, synthetic construct
  source 1..16: mol_type = other DNA
gagagtctctcctgcc

SEQ ID NO: 26190 - DNA, 16 bp, synthetic construct
  source 1..16: mol_type = other DNA
tgagagtctctcctgc

SEQ ID NO: 26191 - DNA, 16 bp, synthetic construct
  source 1..16: mol_type = other DNA
gtgagagtctctcctg

SEQ ID NO: 26192 - DNA, 16 bp, synthetic construct
  source 1..16: mol_type = other DNA
tgtgagagtctctcct

SEQ ID NO: 26193 - DNA, 16 bp, synthetic construct
  source 1..16: mol_type = other DNA
gtgtgagagtctctcc

SEQ ID NO: 26194 - DNA, 16 bp, synthetic construct
  source 1..16: mol_type = other DNA
tgtgtgagagtctctc

SEQ ID NO: 26195 - DNA, 16 bp, synthetic construct
  source 1..16: mol_type = other DNA
atgtgtgagagtctct

SEQ ID NO: 26196 - DNA, 16 bp, synthetic construct
  source 1..16: mol_type = other DNA
gatgtgtgagagtctc

SEQ ID NO: 26197 - DNA, 16 bp, synthetic construct
  source 1..16: mol_type = other DNA
agatgtgtgagagtct

SEQ ID NO: 26198 - DNA, 16 bp, synthetic construct
  source 1..16: mol_type = other DNA
cagatgtgtgagagtc

SEQ ID NO: 26199 - DNA, 16 bp, synthetic construct
  source 1..16: mol_type = other DNA
ccagatgtgtgagagt

SEQ ID NO: 26200 - DNA, 16 bp, synthetic construct
  source 1..16: mol_type = other DNA
cccagatgtgtgagag

SEQ ID NO: 26201 - DNA, 16 bp, synthetic construct
  source 1..16: mol_type = other DNA
tcccagatgtgtgaga

SEQ ID NO: 26202 - DNA, 16 bp, synthetic construct
  source 1..16: mol_type = other DNA
ttcccagatgtgtgag

SEQ ID NO: 26203 - DNA, 16 bp, synthetic construct
  source 1..16: mol_type = other DNA
cttcccagatgtgtga

SEQ ID NO: 26204 - DNA, 16 bp, synthetic construct
  source 1..16: mol_type = other DNA
gcttcccagatgtgtg

SEQ ID NO: 26205 - DNA, 16 bp, synthetic construct
  source 1..16: mol_type = other DNA
agcttcccagatgtgt

SEQ ID NO: 26206 - DNA, 16 bp, synthetic construct
  source 1..16: mol_type = other DNA
cagcttcccagatgtg

SEQ ID NO: 26207 - DNA, 16 bp, synthetic construct
  source 1..16: mol_type = other DNA
tcagcttcccagatgt

SEQ ID NO: 26208 - DNA, 16 bp, synthetic construct
  source 1..16: mol_type = other DNA
gtcagcttcccagatg

SEQ ID NO: 26209 - DNA, 16 bp, synthetic construct
  source 1..16: mol_type = other DNA
tgtcagcttcccagat

SEQ ID NO: 26210 - DNA, 16 bp, synthetic construct
  source 1..16: mol_type = other DNA
ttgtcagcttcccaga

SEQ ID NO: 26211 - DNA, 16 bp, synthetic construct
  source 1..16: mol_type = other DNA
attgtcagcttcccag

SEQ ID NO: 26212 - DNA, 16 bp, synthetic construct
  source 1..16: mol_type = other DNA
gattgtcagcttccca

SEQ ID NO: 26213 - DNA, 16 bp, synthetic construct
  source 1..16: mol_type = other DNA
ggattgtcagcttccc

SEQ ID NO: 26214 - DNA, 16 bp, synthetic construct
  source 1..16: mol_type = other DNA
tggattgtcagcttcc

SEQ ID NO: 26215 - DNA, 16 bp, synthetic construct
  source 1..16: mol_type = other DNA
atggattgtcagcttc

SEQ ID NO: 26216 - DNA, 16 bp, synthetic construct
  source 1..16: mol_type = other DNA
gatggattgtcagctt

SEQ ID NO: 26217 - DNA, 16 bp, synthetic construct
  source 1..16: mol_type = other DNA
tgatggattgtcagct

SEQ ID NO: 26218 - DNA, 16 bp, synthetic construct
  source 1..16: mol_type = other DNA
ctgatggattgtcagc

SEQ ID NO: 26219 - DNA, 16 bp, synthetic construct
  source 1..16: mol_type = other DNA
gctgatggattgtcag

SEQ ID NO: 26220 - DNA, 16 bp, synthetic construct
  source 1..16: mol_type = other DNA
tgctgatggattgtca

SEQ ID NO: 26221 - DNA, 16 bp, synthetic construct
  source 1..16: mol_type = other DNA
atgctgatggattgtc

SEQ ID NO: 26222 - DNA, 16 bp, synthetic construct
  source 1..16: mol_type = other DNA
catgctgatggattgt

SEQ ID NO: 26223 - DNA, 16 bp, synthetic construct
  source 1..16: mol_type = other DNA
ggacatgctgatggat

SEQ ID NO: 26224 - DNA, 16 bp, synthetic construct
  source 1..16: mol_type = other DNA
tggacatgctgatgga

SEQ ID NO: 26225 - DNA, 16 bp, synthetic construct
  source 1..16: mol_type = other DNA
ctggacatgctgatgg

SEQ ID NO: 26226 - DNA, 16 bp, synthetic construct
  source 1..16: mol_type = other DNA
cctggacatgctgatg

SEQ ID NO: 26227 - DNA, 16 bp, synthetic construct
  source 1..16: mol_type = other DNA
tcctggacatgctgat

SEQ ID NO: 26228 - DNA, 16 bp, synthetic construct
  source 1..16: mol_type = other DNA
ctcctggacatgctga

SEQ ID NO: 26229 - DNA, 16 bp, synthetic construct
  source 1..16: mol_type = other DNA
cctcctggacatgctg

SEQ ID NO: 26230 - DNA, 16 bp, synthetic construct
  source 1..16: mol_type = other DNA
tcctcctggacatgct

SEQ ID NO: 26231 - DNA, 16 bp, synthetic construct
  source 1..16: mol_type = other DNA
ttcctcctggacatgc

SEQ ID NO: 26232 - DNA, 16 bp, synthetic construct
  source 1..16: mol_type = other DNA
tttcctcctggacatg

SEQ ID NO: 26233 - DNA, 16 bp, synthetic construct
  source 1..16: mol_type = other DNA
ttttcctcctggacat

SEQ ID NO: 26234 - DNA, 16 bp, synthetic construct
  source 1..16: mol_type = other DNA
attttcctcctggaca

SEQ ID NO: 26235 - DNA, 16 bp, synthetic construct
  source 1..16: mol_type = other DNA
tattttcctcctggac

SEQ ID NO: 26236 - DNA, 16 bp, synthetic construct
  source 1..16: mol_type = other DNA
ttattttcctcctgga

SEQ ID NO: 26237 - DNA, 16 bp, synthetic construct
  source 1..16: mol_type = other DNA
cttattttcctcctgg

SEQ ID NO: 26238 - DNA, 16 bp, synthetic construct
  source 1..16: mol_type = other DNA
ccttattttcctcctg

SEQ ID NO: 26239 - DNA, 16 bp, synthetic construct
  source 1..16: mol_type = other DNA
tccttattttcctcct

SEQ ID NO: 26240 - DNA, 16 bp, synthetic construct
  source 1..16: mol_type = other DNA
ctccttattttcctcc

SEQ ID NO: 26241 - DNA, 16 bp, synthetic construct
  source 1..16: mol_type = other DNA
cctccttattttcctc

SEQ ID NO: 26242 - DNA, 16 bp, synthetic construct
  source 1..16: mol_type = other DNA
tcctccttattttcct

SEQ ID NO: 26243 - DNA, 16 bp, synthetic construct
  source 1..16: mol_type = other DNA
ctcctccttattttcc

SEQ ID NO: 26244 - DNA, 16 bp, synthetic construct
  source 1..16: mol_type = other DNA
cctcctccttattttc

SEQ ID NO: 26245 - DNA, 16 bp, synthetic construct
  source 1..16: mol_type = other DNA
tcctcctccttatttt

SEQ ID NO: 26246 - DNA, 16 bp, synthetic construct
  source 1..16: mol_type = other DNA
ctcctcctccttattt

SEQ ID NO: 26247 - DNA, 16 bp, synthetic construct
  source 1..16: mol_type = other DNA
gctcctcctccttatt

SEQ ID NO: 26248 - DNA, 16 bp, synthetic construct
  source 1..16: mol_type = other DNA
tgctcctcctccttat

SEQ ID NO: 26249 - DNA, 16 bp, synthetic construct
  source 1..16: mol_type = other DNA
ctgctcctcctcctta

SEQ ID NO: 26250 - DNA, 16 bp, synthetic construct
  source 1..16: mol_type = other DNA
tttctgctcctcctcc

SEQ ID NO: 26251 - DNA, 16 bp, synthetic construct
  source 1..16: mol_type = other DNA
atttctgctcctcctc

SEQ ID NO: 26252 - DNA, 16 bp, synthetic construct
  source 1..16: mol_type = other DNA
tatttctgctcctcct

SEQ ID NO: 26253 - DNA, 16 bp, synthetic construct
  source 1..16: mol_type = other DNA
ctatttctgctcctcc

SEQ ID NO: 26254 - DNA, 16 bp, synthetic construct
  source 1..16: mol_type = other DNA
tctatttctgctcctc

SEQ ID NO: 26255 - DNA, 16 bp, synthetic construct
  source 1..16: mol_type = other DNA
atctatttctgctcct

SEQ ID NO: 26256 - DNA, 16 bp, synthetic construct
  source 1..16: mol_type = other DNA
catctatttctgctcc

SEQ ID NO: 26257 - DNA, 16 bp, synthetic construct
  source 1..16: mol_type = other DNA
tcatctatttctgctc

SEQ ID NO: 26258 - DNA, 16 bp, synthetic construct
  source 1..16: mol_type = other DNA
ctcatctatttctgct

SEQ ID NO: 26259 - DNA, 16 bp, synthetic construct
  source 1..16: mol_type = other DNA
cctcatctatttctgc

SEQ ID NO: 26260 - DNA, 16 bp, synthetic construct
  source 1..16: mol_type = other DNA
gcctcatctatttctg

SEQ ID NO: 26261 - DNA, 16 bp, synthetic construct
  source 1..16: mol_type = other DNA
agcctcatctatttct

SEQ ID NO: 26262 - DNA, 16 bp, synthetic construct
  source 1..16: mol_type = other DNA
cagcctcatctatttc

SEQ ID NO: 26263 - DNA, 16 bp, synthetic construct
  source 1..16: mol_type = other DNA
ccagcctcatctattt

SEQ ID NO: 26264 - DNA, 16 bp, synthetic construct
  source 1..16: mol_type = other DNA
tccagcctcatctatt

SEQ ID NO: 26265 - DNA, 16 bp, synthetic construct
  source 1..16: mol_type = other DNA
atccagcctcatctat

SEQ ID NO: 26266 - DNA, 16 bp, synthetic construct
  source 1..16: mol_type = other DNA
tatccagcctcatcta

SEQ ID NO: 26267 - DNA, 16 bp, synthetic construct
  source 1..16: mol_type = other DNA
atatccagcctcatct

SEQ ID NO: 26268 - DNA, 16 bp, synthetic construct
  source 1..16: mol_type = other DNA
tatatccagcctcatc

SEQ ID NO: 26269 - DNA, 16 bp, synthetic construct
  source 1..16: mol_type = other DNA
ctatatccagcctcat

SEQ ID NO: 26270 - DNA, 16 bp, synthetic construct
  source 1..16: mol_type = other DNA
tctatatccagcctca

SEQ ID NO: 26271 - DNA, 16 bp, synthetic construct
  source 1..16: mol_type = other DNA
ttctatatccagcctc

SEQ ID NO: 26272 - DNA, 16 bp, synthetic construct
  source 1..16: mol_type = other DNA
cttctatatccagcct

SEQ ID NO: 26273 - DNA, 16 bp, synthetic construct
  source 1..16: mol_type = other DNA
gcttctatatccagcc

SEQ ID NO: 26274 - DNA, 16 bp, synthetic construct
  source 1..16: mol_type = other DNA
tgcttctatatccagc

SEQ ID NO: 26275 - DNA, 16 bp, synthetic construct
  source 1..16: mol_type = other DNA
ctgcttctatatccag

SEQ ID NO: 26276 - DNA, 16 bp, synthetic construct
  source 1..16: mol_type = other DNA
cctgcttctatatcca

SEQ ID NO: 26277 - DNA, 16 bp, synthetic construct
  source 1..16: mol_type = other DNA
ccctgcttctatatcc

SEQ ID NO: 26278 - DNA, 16 bp, synthetic construct
  source 1..16: mol_type = other DNA
gccctgcttctatatc

SEQ ID NO: 26279 - DNA, 16 bp, synthetic construct
  source 1..16: mol_type = other DNA
agccctgcttctatat

SEQ ID NO: 26280 - DNA, 16 bp, synthetic construct
  source 1..16: mol_type = other DNA
cagccctgcttctata

SEQ ID NO: 26281 - DNA, 16 bp, synthetic construct
  source 1..16: mol_type = other DNA
tcagccctgcttctat

SEQ ID NO: 26282 - DNA, 16 bp, synthetic construct
  source 1..16: mol_type = other DNA
ttcagccctgcttcta

SEQ ID NO: 26283 - DNA, 16 bp, synthetic construct
  source 1..16: mol_type = other DNA
cttcagccctgcttct

SEQ ID NO: 26284 - DNA, 16 bp, synthetic construct
  source 1..16: mol_type = other DNA
agcttcagccctgctt

SEQ ID NO: 26285 - DNA, 16 bp, synthetic construct
  source 1..16: mol_type = other DNA
cagcttcagccctgct

SEQ ID NO: 26286 - DNA, 16 bp, synthetic construct
  source 1..16: mol_type = other DNA
acagcttcagccctgc

SEQ ID NO: 26287 - DNA, 16 bp, synthetic construct
  source 1..16: mol_type = other DNA
cacagcttcagccctg

SEQ ID NO: 26288 - DNA, 16 bp, synthetic construct
  source 1..16: mol_type = other DNA
acacagcttcagccct

SEQ ID NO: 26289 - DNA, 16 bp, synthetic construct
  source 1..16: mol_type = other DNA
aacacagcttcagccc

SEQ ID NO: 26290 - DNA, 16 bp, synthetic construct
  source 1..16: mol_type = other DNA
caacacagcttcagcc

SEQ ID NO: 26291 - DNA, 16 bp, synthetic construct
  source 1..16: mol_type = other DNA
acaacacagcttcagc

SEQ ID NO: 26292 - DNA, 16 bp, synthetic construct
  source 1..16: mol_type = other DNA
gccttctggatagaat

SEQ ID NO: 26293 - DNA, 16 bp, synthetic construct
  source 1..16: mol_type = other DNA
tgccttctggatagaa

SEQ ID NO: 26294 - DNA, 16 bp, synthetic construct
  source 1..16: mol_type = other DNA
ttgccttctggataga

SEQ ID NO: 26295 - DNA, 16 bp, synthetic construct
  source 1..16: mol_type = other DNA
attgccttctggatag

SEQ ID NO: 26296 - DNA, 16 bp, synthetic construct
  source 1..16: mol_type = other DNA
tattgccttctggata

SEQ ID NO: 26297 - DNA, 16 bp, synthetic construct
  source 1..16: mol_type = other DNA
ctattgccttctggat

SEQ ID NO: 26298 - DNA, 16 bp, synthetic construct
  source 1..16: mol_type = other DNA
cctattgccttctgga

SEQ ID NO: 26299 - DNA, 16 bp, synthetic construct
  source 1..16: mol_type = other DNA
acctattgccttctgg

SEQ ID NO: 26300 - DNA, 16 bp, synthetic construct
  source 1..16: mol_type = other DNA
tacctattgccttctg

SEQ ID NO: 26301 - DNA, 16 bp, synthetic construct
  source 1..16: mol_type = other DNA
ctacctattgccttct

SEQ ID NO: 26302 - DNA, 16 bp, synthetic construct
  source 1..16: mol_type = other DNA
gccctttgcagaaaat

SEQ ID NO: 26303 - DNA, 16 bp, synthetic construct
  source 1..16: mol_type = other DNA
agccctttgcagaaaa

SEQ ID NO: 26304 - DNA, 16 bp, synthetic construct
  source 1..16: mol_type = other DNA
tagccctttgcagaaa

SEQ ID NO: 26305 - DNA, 16 bp, synthetic construct
  source 1..16: mol_type = other DNA
ttagccctttgcagaa

SEQ ID NO: 26306 - DNA, 16 bp, synthetic construct
  source 1..16: mol_type = other DNA
tttagccctttgcaga

SEQ ID NO: 26307 - DNA, 16 bp, synthetic construct
  source 1..16: mol_type = other DNA
atttagccctttgcag

SEQ ID NO: 26308 - DNA, 16 bp, synthetic construct
  source 1..16: mol_type = other DNA
catttagccctttgca

SEQ ID NO: 26309 - DNA, 16 bp, synthetic construct
  source 1..16: mol_type = other DNA
acatttagccctttgc

SEQ ID NO: 26310 - DNA, 16 bp, synthetic construct
  source 1..16: mol_type = other DNA
accatatggcttggaa

SEQ ID NO: 26311 - DNA, 16 bp, synthetic construct
  source 1..16: mol_type = other DNA
gaccatatggcttgga

SEQ ID NO: 26312 - DNA, 16 bp, synthetic construct
  source 1..16: mol_type = other DNA
agaccatatggcttgg

SEQ ID NO: 26313 - DNA, 16 bp, synthetic construct
  source 1..16: mol_type = other DNA
gagaccatatggcttg

SEQ ID NO: 26314 - DNA, 16 bp, synthetic construct
  source 1..16: mol_type = other DNA
agagaccatatggctt

SEQ ID NO: 26315 - DNA, 16 bp, synthetic construct
  source 1..16: mol_type = other DNA
gagagaccatatggct

SEQ ID NO: 26316 - DNA, 16 bp, synthetic construct
  source 1..16: mol_type = other DNA
agagagaccatatggc

SEQ ID NO: 26317 - DNA, 16 bp, synthetic construct
  source 1..16: mol_type = other DNA
gctgagtcattgagag

SEQ ID NO: 26318 - DNA, 16 bp, synthetic construct
  source 1..16: mol_type = other DNA
agctgagtcattgaga

SEQ ID NO: 26319 - DNA, 16 bp, synthetic construct
  source 1..16: mol_type = other DNA
gagctgagtcattgag

SEQ ID NO: 26320 - DNA, 16 bp, synthetic construct
  source 1..16: mol_type = other DNA
agagctgagtcattga

SEQ ID NO: 26321 - DNA, 16 bp, synthetic construct
  source 1..16: mol_type = other DNA
ggaagagctgagtcat

SEQ ID NO: 26322 - DNA, 16 bp, synthetic construct
  source 1..16: mol_type = other DNA
tggaagagctgagtca

SEQ ID NO: 26323 - DNA, 16 bp, synthetic construct
  source 1..16: mol_type = other DNA
atggaagagctgagtc

SEQ ID NO: 26324 - DNA, 16 bp, synthetic construct
  source 1..16: mol_type = other DNA
gctactttcatggtat

SEQ ID NO: 26325 - DNA, 16 bp, synthetic construct
  source 1..16: mol_type = other DNA
ggctactttcatggta

SEQ ID NO: 26326 - DNA, 16 bp, synthetic construct
  source 1..16: mol_type = other DNA
tggctactttcatggt

SEQ ID NO: 26327 - DNA, 16 bp, synthetic construct
  source 1..16: mol_type = other DNA
ctggctactttcatgg

SEQ ID NO: 26328 - DNA, 16 bp, synthetic construct
  source 1..16: mol_type = other DNA
tctggctactttcatg

SEQ ID NO: 26329 - DNA, 16 bp, synthetic construct
  source 1..16: mol_type = other DNA
ctctggctactttcat

SEQ ID NO: 26330 - DNA, 16 bp, synthetic construct
  source 1..16: mol_type = other DNA
tctctggctactttca

SEQ ID NO: 26331 - DNA, 16 bp, synthetic construct
  source 1..16: mol_type = other DNA
gtctctggctactttc

SEQ ID NO: 26332 - DNA, 16 bp, synthetic construct
  source 1..16: mol_type = other DNA
cgtctctggctacttt

SEQ ID NO: 26333 - DNA, 16 bp, synthetic construct
  source 1..16: mol_type = other DNA
gacacagtctgcgttt

SEQ ID NO: 26334 - DNA, 16 bp, synthetic construct
  source 1..16: mol_type = other DNA
tgacacagtctgcgtt

SEQ ID NO: 26335 - DNA, 16 bp, synthetic construct
  source 1..16: mol_type = other DNA
ctgacacagtctgcgt

SEQ ID NO: 26336 - DNA, 16 bp, synthetic construct
  source 1..16: mol_type = other DNA
tctgacacagtctgcg

SEQ ID NO: 26337 - DNA, 16 bp, synthetic construct
  source 1..16: mol_type = other DNA
gtctgacacagtctgc

SEQ ID NO: 26338 - DNA, 16 bp, synthetic construct
  source 1..16: mol_type = other DNA
tgtctgacacagtctg

SEQ ID NO: 26339 - DNA, 16 bp, synthetic construct
  source 1..16: mol_type = other DNA
atgtctgacacagtct

SEQ ID NO: 26340 - DNA, 16 bp, synthetic construct
  source 1..16: mol_type = other DNA
ctatgtctgacacagt

SEQ ID NO: 26341 - DNA, 16 bp, synthetic construct
  source 1..16: mol_type = other DNA
ggactatgtctgacac

SEQ ID NO: 26342 - DNA, 16 bp, synthetic construct
  source 1..16: mol_type = other DNA
tggactatgtctgaca

SEQ ID NO: 26343 - DNA, 16 bp, synthetic construct
  source 1..16: mol_type = other DNA
ctaccatacatggact

SEQ ID NO: 26344 - DNA, 16 bp, synthetic construct
  source 1..16: mol_type = other DNA
tctccatcacatcata

SEQ ID NO: 26345 - DNA, 16 bp, synthetic construct
  source 1..16: mol_type = other DNA
ttctccatcacatcat

SEQ ID NO: 26346 - DNA, 16 bp, synthetic construct
  source 1..16: mol_type = other DNA
attctccatcacatca

SEQ ID NO: 26347 - DNA, 16 bp, synthetic construct
  source 1..16: mol_type = other DNA
ggaattctccatcaca

SEQ ID NO: 26348 - DNA, 16 bp, synthetic construct
  source 1..16: mol_type = other DNA
aggaattctccatcac

SEQ ID NO: 26349 - DNA, 16 bp, synthetic construct
  source 1..16: mol_type = other DNA
gtaggaattctccatc

SEQ ID NO: 26350 - DNA, 16 bp, synthetic construct
  source 1..16: mol_type = other DNA
ttgtaggaattctcca

SEQ ID NO: 26351 - DNA, 16 bp, synthetic construct
  source 1..16: mol_type = other DNA
cttgtaggaattctcc

SEQ ID NO: 26352 - DNA, 16 bp, synthetic construct
  source 1..16: mol_type = other DNA
gttcactctaccattt

SEQ ID NO: 26353 - DNA, 16 bp, synthetic construct
  source 1..16: mol_type = other DNA
tgttcactctaccatt

SEQ ID NO: 26354 - DNA, 16 bp, synthetic construct
  source 1..16: mol_type = other DNA
atgttcactctaccat

SEQ ID NO: 26355 - DNA, 16 bp, synthetic construct
  source 1..16: mol_type = other DNA
tatgttcactctacca

SEQ ID NO: 26356 - DNA, 16 bp, synthetic construct
  source 1..16: mol_type = other DNA
gtatgttcactctacc

SEQ ID NO: 26357 - DNA, 16 bp, synthetic construct
  source 1..16: mol_type = other DNA
gtgtatgttcactcta

SEQ ID NO: 26358 - DNA, 16 bp, synthetic construct
  source 1..16: mol_type = other DNA
agtgtatgttcactct

SEQ ID NO: 26359 - DNA, 16 bp, synthetic construct
  source 1..16: mol_type = other DNA
cagtgtatgttcactc

SEQ ID NO: 26360 - DNA, 16 bp, synthetic construct
  source 1..16: mol_type = other DNA
ccagtgtatgttcact

SEQ ID NO: 26361 - DNA, 16 bp, synthetic construct
  source 1..16: mol_type = other DNA
tccagtgtatgttcac

SEQ ID NO: 26362 - DNA, 16 bp, synthetic construct
  source 1..16: mol_type = other DNA
ttccagtgtatgttca

SEQ ID NO: 26363 - DNA, 16 bp, synthetic construct
  source 1..16: mol_type = other DNA
attccagtgtatgttc

SEQ ID NO: 26364 - DNA, 16 bp, synthetic construct
  source 1..16: mol_type = other DNA
ggtcaagcagtataga

SEQ ID NO: 26365 - DNA, 16 bp, synthetic construct
  source 1..16: mol_type = other DNA
gggtcaagcagtatag

SEQ ID NO: 26366 - DNA, 16 bp, synthetic construct
  source 1..16: mol_type = other DNA
tgggtcaagcagtata

SEQ ID NO: 26367 - DNA, 16 bp, synthetic construct
  source 1..16: mol_type = other DNA
ttgggtcaagcagtat

SEQ ID NO: 26368 - DNA, 16 bp, synthetic construct
  source 1..16: mol_type = other DNA
cttgggtcaagcagta

SEQ ID NO: 26369 - DNA, 16 bp, synthetic construct
  source 1..16: mol_type = other DNA
gcttgggtcaagcagt

SEQ ID NO: 26370 - DNA, 16 bp, synthetic construct
  source 1..16: mol_type = other DNA
agcttgggtcaagcag

SEQ ID NO: 26371 - DNA, 16 bp, synthetic construct
  source 1..16: mol_type = other DNA
aagcttgggtcaagca

SEQ ID NO: 26372 - DNA, 16 bp, synthetic construct
  source 1..16: mol_type = other DNA
aaagcttgggtcaagc

SEQ ID NO: 26373 - DNA, 16 bp, synthetic construct
  source 1..16: mol_type = other DNA
ctaccttttgctatca

SEQ ID NO: 26374 - DNA, 16 bp, synthetic construct
  source 1..16: mol_type = other DNA
tctaccttttgctatc

SEQ ID NO: 26375 - DNA, 16 bp, synthetic construct
  source 1..16: mol_type = other DNA
ttctaccttttgctat

SEQ ID NO: 26376 - DNA, 16 bp, synthetic construct
  source 1..16: mol_type = other DNA
tttctaccttttgcta

SEQ ID NO: 26377 - DNA, 16 bp, synthetic construct
  source 1..16: mol_type = other DNA
ttttctaccttttgct

SEQ ID NO: 26378 - DNA, 16 bp, synthetic construct
  source 1..16: mol_type = other DNA
cttttctaccttttgc

SEQ ID NO: 26379 - DNA, 16 bp, synthetic construct
  source 1..16: mol_type = other DNA
gtcttttctacctttt

SEQ ID NO: 26380 - DNA, 16 bp, synthetic construct
  source 1..16: mol_type = other DNA
tgtcttttctaccttt

SEQ ID NO: 26381 - DNA, 16 bp, synthetic construct
  source 1..16: mol_type = other DNA
ctgtcttttctacctt

SEQ ID NO: 26382 - DNA, 16 bp, synthetic construct
  source 1..16: mol_type = other DNA
tctgtcttttctacct

SEQ ID NO: 26383 - DNA, 16 bp, synthetic construct
  source 1..16: mol_type = other DNA
accctgagctatgact

SEQ ID NO: 26384 - DNA, 16 bp, synthetic construct
  source 1..16: mol_type = other DNA
caccctgagctatgac

SEQ ID NO: 26385 - DNA, 16 bp, synthetic construct
  source 1..16: mol_type = other DNA
acaccctgagctatga

SEQ ID NO: 26386 - DNA, 16 bp, synthetic construct
  source 1..16: mol_type = other DNA
aacaccctgagctatg

SEQ ID NO: 26387 - DNA, 16 bp, synthetic construct
  source 1..16: mol_type = other DNA
aaacaccctgagctat

SEQ ID NO: 26388 - DNA, 16 bp, synthetic construct
  source 1..16: mol_type = other DNA
caaacaccctgagcta

SEQ ID NO: 26389 - DNA, 16 bp, synthetic construct
  source 1..16: mol_type = other DNA
tcaaacaccctgagct

SEQ ID NO: 26390 - DNA, 16 bp, synthetic construct
  source 1..16: mol_type = other DNA
gtcaaacaccctgagc

SEQ ID NO: 26391 - DNA, 16 bp, synthetic construct
  source 1..16: mol_type = other DNA
agtcaaacaccctgag

SEQ ID NO: 26392 - DNA, 16 bp, synthetic construct
  source 1..16: mol_type = other DNA
ccccacagaaaagcaa

SEQ ID NO: 26393 - DNA, 16 bp, synthetic construct
  source 1..16: mol_type = other DNA
accccacagaaaagca

SEQ ID NO: 26394 - DNA, 16 bp, synthetic construct
  source 1..16: mol_type = other DNA
ggctgctgtgacaaaa

SEQ ID NO: 26395 - DNA, 16 bp, synthetic construct
  source 1..16: mol_type = other DNA
aggctgctgtgacaaa

SEQ ID NO: 26396 - DNA, 16 bp, synthetic construct
  source 1..16: mol_type = other DNA
aaggctgctgtgacaa

SEQ ID NO: 26397 - DNA, 16 bp, synthetic construct
  source 1..16: mol_type = other DNA
aaaggctgctgtgaca

SEQ ID NO: 26398 - DNA, 16 bp, synthetic construct
  source 1..16: mol_type = other DNA
caaaggctgctgtgac

SEQ ID NO: 26399 - DNA, 16 bp, synthetic construct
  source 1..16: mol_type = other DNA
acaaaggctgctgtga

SEQ ID NO: 26400 - DNA, 16 bp, synthetic construct
  source 1..16: mol_type = other DNA
gacaaaggctgctgtg

SEQ ID NO: 26401 - DNA, 16 bp, synthetic construct
  source 1..16: mol_type = other DNA
cgacaaaggctgctgt

SEQ ID NO: 26402 - DNA, 16 bp, synthetic construct
  source 1..16: mol_type = other DNA
gcgacaaaggctgctg

SEQ ID NO: 26403 - DNA, 16 bp, synthetic construct
  source 1..16: mol_type = other DNA
agcgacaaaggctgct

SEQ ID NO: 26404 - DNA, 16 bp, synthetic construct
  source 1..16: mol_type = other DNA
aagcgacaaaggctgc

SEQ ID NO: 26405 - DNA, 16 bp, synthetic construct
  source 1..16: mol_type = other DNA
ggtgtttgaagcgaca

SEQ ID NO: 26406 - DNA, 16 bp, synthetic construct
  source 1..16: mol_type = other DNA
cggtgtttgaagcgac

SEQ ID NO: 26407 - DNA, 16 bp, synthetic construct
  source 1..16: mol_type = other DNA
gcggtgtttgaagcga

SEQ ID NO: 26408 - DNA, 16 bp, synthetic construct
  source 1..16: mol_type = other DNA
tgcggtgtttgaagcg

SEQ ID NO: 26409 - DNA, 16 bp, synthetic construct
  source 1..16: mol_type = other DNA
ttgcggtgtttgaagc

SEQ ID NO: 26410 - DNA, 16 bp, synthetic construct
  source 1..16: mol_type = other DNA
cttgcggtgtttgaag

SEQ ID NO: 26411 - DNA, 16 bp, synthetic construct
  source 1..16: mol_type = other DNA
acttgcggtgtttgaa

SEQ ID NO: 26412 - DNA, 16 bp, synthetic construct
  source 1..16: mol_type = other DNA
cacttgcggtgtttga

SEQ ID NO: 26413 - DNA, 16 bp, synthetic construct
  source 1..16: mol_type = other DNA
acacttgcggtgtttg

SEQ ID NO: 26414 - DNA, 16 bp, synthetic construct
  source 1..16: mol_type = other DNA
aacacttgcggtgttt

SEQ ID NO: 26415 - DNA, 16 bp, synthetic construct
  source 1..16: mol_type = other DNA
gaacacttgcggtgtt

SEQ ID NO: 26416 - DNA, 16 bp, synthetic construct
  source 1..16: mol_type = other DNA
agaacacttgcggtgt

SEQ ID NO: 26417 - DNA, 16 bp, synthetic construct
  source 1..16: mol_type = other DNA
gttgcatttcacttga

SEQ ID NO: 26418 - DNA, 16 bp, synthetic construct
  source 1..16: mol_type = other DNA
catgttgcatttcact

SEQ ID NO: 26419 - DNA, 16 bp, synthetic construct
  source 1..16: mol_type = other DNA
gacatgttgcatttca

SEQ ID NO: 26420 - DNA, 16 bp, synthetic construct
  source 1..16: mol_type = other DNA
tttcagacatgttgca

SEQ ID NO: 26421 - DNA, 16 bp, synthetic construct
  source 1..16: mol_type = other DNA
gtttcagacatgttgc

SEQ ID NO: 26422 - DNA, 16 bp, synthetic construct
  source 1..16: mol_type = other DNA
cacgtttcagacatgt

SEQ ID NO: 26423 - DNA, 16 bp, synthetic construct
  source 1..16: mol_type = other DNA
ccacgtttcagacatg

SEQ ID NO: 26424 - DNA, 16 bp, synthetic construct
  source 1..16: mol_type = other DNA
accacgtttcagacat

SEQ ID NO: 26425 - DNA, 16 bp, synthetic construct
  source 1..16: mol_type = other DNA
taccacgtttcagaca

SEQ ID NO: 26426 - DNA, 16 bp, synthetic construct
  source 1..16: mol_type = other DNA
ataccacgtttcagac

SEQ ID NO: 26427 - DNA, 16 bp, synthetic construct
  source 1..16: mol_type = other DNA
gataccacgtttcaga

SEQ ID NO: 26428 - DNA, 16 bp, synthetic construct
  source 1..16: mol_type = other DNA
cagataccacgtttca

SEQ ID NO: 26429 - DNA, 16 bp, synthetic construct
  source 1..16: mol_type = other DNA
ccagataccacgtttc

SEQ ID NO: 26430 - DNA, 16 bp, synthetic construct
  source 1..16: mol_type = other DNA
tccagataccacgttt

SEQ ID NO: 26431 - DNA, 16 bp, synthetic construct
  source 1..16: mol_type = other DNA
ctccagataccacgtt

SEQ ID NO: 26432 - DNA, 16 bp, synthetic construct
  source 1..16: mol_type = other DNA
tctccagataccacgt

SEQ ID NO: 26433 - DNA, 16 bp, synthetic construct
  source 1..16: mol_type = other DNA
ctctccagataccacg

SEQ ID NO: 26434 - DNA, 16 bp, synthetic construct
  source 1..16: mol_type = other DNA
cctctccagataccac

SEQ ID NO: 26435 - DNA, 16 bp, synthetic construct
  source 1..16: mol_type = other DNA
acctctccagatacca

SEQ ID NO: 26436 - DNA, 16 bp, synthetic construct
  source 1..16: mol_type = other DNA
cacctctccagatacc

SEQ ID NO: 26437 - DNA, 16 bp, synthetic construct
  source 1..16: mol_type = other DNA
tcacctctccagatac

SEQ ID NO: 26438 - DNA, 16 bp, synthetic construct
  source 1..16: mol_type = other DNA
ctcacctctccagata

SEQ ID NO: 26439 - DNA, 16 bp, synthetic construct
  source 1..16: mol_type = other DNA
tctcacctctccagat

SEQ ID NO: 26440 - DNA, 16 bp, synthetic construct
  source 1..16: mol_type = other DNA
atctcacctctccaga

SEQ ID NO: 26441 - DNA, 16 bp, synthetic construct
  source 1..16: mol_type = other DNA
catctcacctctccag

SEQ ID NO: 26442 - DNA, 16 bp, synthetic construct
  source 1..16: mol_type = other DNA
ccatctcacctctcca

SEQ ID NO: 26443 - DNA, 16 bp, synthetic construct
  source 1..16: mol_type = other DNA
tccatctcacctctcc

SEQ ID NO: 26444 - DNA, 16 bp, synthetic construct
  source 1..16: mol_type = other DNA
gtccatctcacctctc

SEQ ID NO: 26445 - DNA, 16 bp, synthetic construct
  source 1..16: mol_type = other DNA
tgtccatctcacctct

SEQ ID NO: 26446 - DNA, 16 bp, synthetic construct
  source 1..16: mol_type = other DNA
ttgtccatctcacctc

SEQ ID NO: 26447 - DNA, 16 bp, synthetic construct
  source 1..16: mol_type = other DNA
tttgtccatctcacct

SEQ ID NO: 26448 - DNA, 16 bp, synthetic construct
  source 1..16: mol_type = other DNA
ctttgtccatctcacc

SEQ ID NO: 26449 - DNA, 16 bp, synthetic construct
  source 1..16: mol_type = other DNA
cctttgtccatctcac

SEQ ID NO: 26450 - DNA, 16 bp, synthetic construct
  source 1..16: mol_type = other DNA
tcctttgtccatctca

SEQ ID NO: 26451 - DNA, 16 bp, synthetic construct
  source 1..16: mol_type = other DNA
ctcctttgtccatctc

SEQ ID NO: 26452 - DNA, 16 bp, synthetic construct
  source 1..16: mol_type = other DNA
gctcctttgtccatct

SEQ ID NO: 26453 - DNA, 16 bp, synthetic construct
  source 1..16: mol_type = other DNA
ggctcctttgtccatc

SEQ ID NO: 26454 - DNA, 16 bp, synthetic construct
  source 1..16: mol_type = other DNA
gggctcctttgtccat

SEQ ID NO: 26455 - DNA, 16 bp, synthetic construct
  source 1..16: mol_type = other DNA
agggctcctttgtcca

SEQ ID NO: 26456 - DNA, 16 bp, synthetic construct
  source 1..16: mol_type = other DNA
aagggctcctttgtcc

SEQ ID NO: 26457 - DNA, 16 bp, synthetic construct
  source 1..16: mol_type = other DNA
caagggctcctttgtc

SEQ ID NO: 26458 - DNA, 16 bp, synthetic construct
  source 1..16: mol_type = other DNA
acaagggctcctttgt

SEQ ID NO: 26459 - DNA, 16 bp, synthetic construct
  source 1..16: mol_type = other DNA
aacaagggctcctttg

SEQ ID NO: 26460 - DNA, 16 bp, synthetic construct
  source 1..16: mol_type = other DNA
taacaagggctccttt

SEQ ID NO: 26461 - DNA, 16 bp, synthetic construct
  source 1..16: mol_type = other DNA
gtaacaagggctcctt

SEQ ID NO: 26462 - DNA, 16 bp, synthetic construct
  source 1..16: mol_type = other DNA
agtaacaagggctcct

SEQ ID NO: 26463 - DNA, 16 bp, synthetic construct
  source 1..16: mol_type = other DNA
cagtaacaagggctcc

SEQ ID NO: 26464 - DNA, 16 bp, synthetic construct
  source 1..16: mol_type = other DNA
gcagtaacaagggctc

SEQ ID NO: 26465 - DNA, 16 bp, synthetic construct
  source 1..16: mol_type = other DNA
tgcagtaacaagggct

SEQ ID NO: 26466 - DNA, 16 bp, synthetic construct
  source 1..16: mol_type = other DNA
gtgcagtaacaagggc

SEQ ID NO: 26467 - DNA, 16 bp, synthetic construct
  source 1..16: mol_type = other DNA
cgtgcagtaacaaggg

SEQ ID NO: 26468 - DNA, 16 bp, synthetic construct
  source 1..16: mol_type = other DNA
gcaaggtgaagtttgg

SEQ ID NO: 26469 - DNA, 16 bp, synthetic construct
  source 1..16: mol_type = other DNA
gtgcaaggtgaagttt

SEQ ID NO: 26470 - DNA, 16 bp, synthetic construct
  source 1..16: mol_type = other DNA
tgtgcaaggtgaagtt

SEQ ID NO: 26471 - DNA, 16 bp, synthetic construct
  source 1..16: mol_type = other DNA
gtgtgcaaggtgaagt

SEQ ID NO: 26472 - DNA, 16 bp, synthetic construct
  source 1..16: mol_type = other DNA
ctgtgtgcaaggtgaa

SEQ ID NO: 26473 - DNA, 16 bp, synthetic construct
  source 1..16: mol_type = other DNA
actgtgtgcaaggtga

SEQ ID NO: 26474 - DNA, 16 bp, synthetic construct
  source 1..16: mol_type = other DNA
tgtgcattgtctgtta

SEQ ID NO: 26475 - DNA, 16 bp, synthetic construct
  source 1..16: mol_type = other DNA
ttgtgcattgtctgtt

SEQ ID NO: 26476 - DNA, 16 bp, synthetic construct
  source 1..16: mol_type = other DNA
tttgtgcattgtctgt

SEQ ID NO: 26477 - DNA, 16 bp, synthetic construct
  source 1..16: mol_type = other DNA
atttgtgcattgtctg

SEQ ID NO: 26478 - DNA, 16 bp, synthetic construct
  source 1..16: mol_type = other DNA
gatttgtgcattgtct

SEQ ID NO: 26479 - DNA, 16 bp, synthetic construct
  source 1..16: mol_type = other DNA
ggatttgtgcattgtc

SEQ ID NO: 26480 - DNA, 16 bp, synthetic construct
  source 1..16: mol_type = other DNA
tggatttgtgcattgt

SEQ ID NO: 26481 - DNA, 16 bp, synthetic construct
  source 1..16: mol_type = other DNA
gtggatttgtgcattg

SEQ ID NO: 26482 - DNA, 16 bp, synthetic construct
  source 1..16: mol_type = other DNA
agtggatttgtgcatt

SEQ ID NO: 26483 - DNA, 16 bp, synthetic construct
  source 1..16: mol_type = other DNA
gaagtggatttgtgca

SEQ ID NO: 26484 - DNA, 16 bp, synthetic construct
  source 1..16: mol_type = other DNA
ggaagtggatttgtgc

SEQ ID NO: 26485 - DNA, 16 bp, synthetic construct
  source 1..16: mol_type = other DNA
gtccataaggaagtgg

SEQ ID NO: 26486 - DNA, 16 bp, synthetic construct
  source 1..16: mol_type = other DNA
ccgtccataaggaagt

SEQ ID NO: 26487 - DNA, 16 bp, synthetic construct
  source 1..16: mol_type = other DNA
tccgtccataaggaag

SEQ ID NO: 26488 - DNA, 16 bp, synthetic construct
  source 1..16: mol_type = other DNA
ttccgtccataaggaa

SEQ ID NO: 26489 - DNA, 16 bp, synthetic construct
  source 1..16: mol_type = other DNA
tttccgtccataagga

SEQ ID NO: 26490 - DNA, 16 bp, synthetic construct
  source 1..16: mol_type = other DNA
atttccgtccataagg

SEQ ID NO: 26491 - DNA, 16 bp, synthetic construct
  source 1..16: mol_type = other DNA
agaatttccgtccata

SEQ ID NO: 26492 - DNA, 16 bp, synthetic construct
  source 1..16: mol_type = other DNA
cagaatttccgtccat

SEQ ID NO: 26493 - DNA, 16 bp, synthetic construct
  source 1..16: mol_type = other DNA
tcagaatttccgtcca

SEQ ID NO: 26494 - DNA, 16 bp, synthetic construct
  source 1..16: mol_type = other DNA
ttcagaatttccgtcc

SEQ ID NO: 26495 - DNA, 16 bp, synthetic construct
  source 1..16: mol_type = other DNA
gccaggcataaaagga

SEQ ID NO: 26496 - DNA, 16 bp, synthetic construct
  source 1..16: mol_type = other DNA
ggccaggcataaaagg

SEQ ID NO: 26497 - DNA, 16 bp, synthetic construct
  source 1..16: mol_type = other DNA
gaaaggccaggcataa

SEQ ID NO: 26498 - DNA, 16 bp, synthetic construct
  source 1..16: mol_type = other DNA
ggaaaggccaggcata

SEQ ID NO: 26499 - DNA, 16 bp, synthetic construct
  source 1..16: mol_type = other DNA
tggaaaggccaggcat

SEQ ID NO: 26500 - DNA, 16 bp, synthetic construct
  source 1..16: mol_type = other DNA
atggaaaggccaggca

SEQ ID NO: 26501 - DNA, 16 bp, synthetic construct
  source 1..16: mol_type = other DNA
gatggaaaggccaggc

SEQ ID NO: 26502 - DNA, 16 bp, synthetic construct
  source 1..16: mol_type = other DNA
ggatggaaaggccagg

SEQ ID NO: 26503 - DNA, 16 bp, synthetic construct
  source 1..16: mol_type = other DNA
aggatggaaaggccag

SEQ ID NO: 26504 - DNA, 16 bp, synthetic construct
  source 1..16: mol_type = other DNA
aaggatggaaaggcca

SEQ ID NO: 26505 - DNA, 16 bp, synthetic construct
  source 1..16: mol_type = other DNA
gaaggatggaaaggcc

SEQ ID NO: 26506 - DNA, 16 bp, synthetic construct
  source 1..16: mol_type = other DNA
gcatgggaaaggggaa

SEQ ID NO: 26507 - DNA, 16 bp, synthetic construct
  source 1..16: mol_type = other DNA
agcatgggaaagggga

SEQ ID NO: 26508 - DNA, 16 bp, synthetic construct
  source 1..16: mol_type = other DNA
cagcatgggaaagggg

SEQ ID NO: 26509 - DNA, 16 bp, synthetic construct
  source 1..16: mol_type = other DNA
acagcatgggaaaggg

SEQ ID NO: 26510 - DNA, 16 bp, synthetic construct
  source 1..16: mol_type = other DNA
attcacagcatgggaa

SEQ ID NO: 26511 - DNA, 16 bp, synthetic construct
  source 1..16: mol_type = other DNA
cattcacagcatggga

SEQ ID NO: 26512 - DNA, 16 bp, synthetic construct
  source 1..16: mol_type = other DNA
tcattcacagcatggg

SEQ ID NO: 26513 - DNA, 16 bp, synthetic construct
  source 1..16: mol_type = other DNA
atcattcacagcatgg

SEQ ID NO: 26514 - DNA, 16 bp, synthetic construct
  source 1..16: mol_type = other DNA
cctgtcactgagatta

SEQ ID NO: 26515 - DNA, 16 bp, synthetic construct
  source 1..16: mol_type = other DNA
ccctgtcactgagatt

SEQ ID NO: 26516 - DNA, 16 bp, synthetic construct
  source 1..16: mol_type = other DNA
cccctgtcactgagat

SEQ ID NO: 26517 - DNA, 16 bp, synthetic construct
  source 1..16: mol_type = other DNA
tcccctgtcactgaga

SEQ ID NO: 26518 - DNA, 16 bp, synthetic construct
  source 1..16: mol_type = other DNA
ttcccctgtcactgag

SEQ ID NO: 26519 - DNA, 16 bp, synthetic construct
  source 1..16: mol_type = other DNA
gttcccctgtcactga

SEQ ID NO: 26520 - DNA, 16 bp, synthetic construct
  source 1..16: mol_type = other DNA
tgttcccctgtcactg

SEQ ID NO: 26521 - DNA, 16 bp, synthetic construct
  source 1..16: mol_type = other DNA
gtgttcccctgtcact

SEQ ID NO: 26522 - DNA, 16 bp, synthetic construct
  source 1..16: mol_type = other DNA
tgtgttcccctgtcac

SEQ ID NO: 26523 - DNA, 16 bp, synthetic construct
  source 1..16: mol_type = other DNA
ctgtgttcccctgtca

SEQ ID NO: 26524 - DNA, 16 bp, synthetic construct
  source 1..16: mol_type = other DNA
acctgtgttcccctgt

SEQ ID NO: 26525 - DNA, 16 bp, synthetic construct
  source 1..16: mol_type = other DNA
tacctgtgttcccctg

SEQ ID NO: 26526 - DNA, 16 bp, synthetic construct
  source 1..16: mol_type = other DNA
ctacctgtgttcccct

SEQ ID NO: 26527 - DNA, 16 bp, synthetic construct
  source 1..16: mol_type = other DNA
agctacctgtgttccc

SEQ ID NO: 26528 - DNA, 16 bp, synthetic construct
  source 1..16: mol_type = other DNA
gagctacctgtgttcc

SEQ ID NO: 26529 - DNA, 16 bp, synthetic construct
  source 1..16: mol_type = other DNA
agagctacctgtgttc

SEQ ID NO: 26530 - DNA, 16 bp, synthetic construct
  source 1..16: mol_type = other DNA
tagagctacctgtgtt

SEQ ID NO: 26531 - DNA, 16 bp, synthetic construct
  source 1..16: mol_type = other DNA
ttagagctacctgtgt

SEQ ID NO: 26532 - DNA, 16 bp, synthetic construct
  source 1..16: mol_type = other DNA
attagagctacctgtg

SEQ ID NO: 26533 - DNA, 16 bp, synthetic construct
  source 1..16: mol_type = other DNA
tattagagctacctgt

SEQ ID NO: 26534 - DNA, 16 bp, synthetic construct
  source 1..16: mol_type = other DNA
tcagtcacagctatat

SEQ ID NO: 26535 - DNA, 16 bp, synthetic construct
  source 1..16: mol_type = other DNA
ctcagtcacagctata

SEQ ID NO: 26536 - DNA, 16 bp, synthetic construct
  source 1..16: mol_type = other DNA
tctcagtcacagctat

SEQ ID NO: 26537 - DNA, 16 bp, synthetic construct
  source 1..16: mol_type = other DNA
cctagaatgcagtgga

SEQ ID NO: 26538 - DNA, 16 bp, synthetic construct
  source 1..16: mol_type = other DNA
tcctagaatgcagtgg

SEQ ID NO: 26539 - DNA, 16 bp, synthetic construct
  source 1..16: mol_type = other DNA
ttcctagaatgcagtg

SEQ ID NO: 26540 - DNA, 16 bp, synthetic construct
  source 1..16: mol_type = other DNA
gttcctagaatgcagt

SEQ ID NO: 26541 - DNA, 16 bp, synthetic construct
  source 1..16: mol_type = other DNA
tgttcctagaatgcag

SEQ ID NO: 26542 - DNA, 16 bp, synthetic construct
  source 1..16: mol_type = other DNA
ctgttcctagaatgca

SEQ ID NO: 26543 - DNA, 16 bp, synthetic construct
  source 1..16: mol_type = other DNA
actgttcctagaatgc

SEQ ID NO: 26544 - DNA, 16 bp, synthetic construct
  source 1..16: mol_type = other DNA
tcttactgttcctaga

SEQ ID NO: 26545 - DNA, 16 bp, synthetic construct
  source 1..16: mol_type = other DNA
ctcttactgttcctag

SEQ ID NO: 26546 - DNA, 16 bp, synthetic construct
  source 1..16: mol_type = other DNA
cctcttactgttccta

SEQ ID NO: 26547 - DNA, 16 bp, synthetic construct
  source 1..16: mol_type = other DNA
tcctcttactgttcct

SEQ ID NO: 26548 - DNA, 16 bp, synthetic construct
  source 1..16: mol_type = other DNA
gtcctcttactgttcc

SEQ ID NO: 26549 - DNA, 16 bp, synthetic construct
  source 1..16: mol_type = other DNA
ggtcctcttactgttc

SEQ ID NO: 26550 - DNA, 16 bp, synthetic construct
  source 1..16: mol_type = other DNA
aggtcctcttactgtt

SEQ ID NO: 26551 - DNA, 16 bp, synthetic construct
  source 1..16: mol_type = other DNA
aaggtcctcttactgt

SEQ ID NO: 26552 - DNA, 16 bp, synthetic construct
  source 1..16: mol_type = other DNA
caaggtcctcttactg

SEQ ID NO: 26553 - DNA, 16 bp, synthetic construct
  source 1..16: mol_type = other DNA
acaaggtcctcttact

SEQ ID NO: 26554 - DNA, 16 bp, synthetic construct
  source 1..16: mol_type = other DNA
cacaaggtcctcttac

SEQ ID NO: 26555 - DNA, 16 bp, synthetic construct
  source 1..16: mol_type = other DNA
tcacaaggtcctctta

SEQ ID NO: 26556 - DNA, 16 bp, synthetic construct
  source 1..16: mol_type = other DNA
ctcacaaggtcctctt

SEQ ID NO: 26557 - DNA, 16 bp, synthetic construct
  source 1..16: mol_type = other DNA
actcacaaggtcctct

SEQ ID NO: 26558 - DNA, 16 bp, synthetic construct
  source 1..16: mol_type = other DNA
cactcacaaggtcctc

SEQ ID NO: 26559 - DNA, 16 bp, synthetic construct
  source 1..16: mol_type = other DNA
tcactcacaaggtcct

SEQ ID NO: 26560 - DNA, 16 bp, synthetic construct
  source 1..16: mol_type = other DNA
ttcactcacaaggtcc

SEQ ID NO: 26561 - DNA, 16 bp, synthetic construct
  source 1..16: mol_type = other DNA
attcactcacaaggtc

SEQ ID NO: 26562 - DNA, 16 bp, synthetic construct
  source 1..16: mol_type = other DNA
ccactctgtaatgtgg

SEQ ID NO: 26563 - DNA, 16 bp, synthetic construct
  source 1..16: mol_type = other DNA
cccactctgtaatgtg

SEQ ID NO: 26564 - DNA, 16 bp, synthetic construct
  source 1..16: mol_type = other DNA
acccactctgtaatgt

SEQ ID NO: 26565 - DNA, 16 bp, synthetic construct
  source 1..16: mol_type = other DNA
tacccactctgtaatg

SEQ ID NO: 26566 - DNA, 16 bp, synthetic construct
  source 1..16: mol_type = other DNA
ttacccactctgtaat

SEQ ID NO: 26567 - DNA, 16 bp, synthetic construct
  source 1..16: mol_type = other DNA
attacccactctgtaa

SEQ ID NO: 26568 - DNA, 16 bp, synthetic construct
  source 1..16: mol_type = other DNA
tattacccactctgta

SEQ ID NO: 26569 - DNA, 16 bp, synthetic construct
  source 1..16: mol_type = other DNA
ttattacccactctgt

SEQ ID NO: 26570 - DNA, 16 bp, synthetic construct
  source 1..16: mol_type = other DNA
cttattacccactctg

SEQ ID NO: 26571 - DNA, 16 bp, synthetic construct
  source 1..16: mol_type = other DNA
gcttattacccactct

SEQ ID NO: 26572 - DNA, 16 bp, synthetic construct
  source 1..16: mol_type = other DNA
tgcttattacccactc

SEQ ID NO: 26573 - DNA, 16 bp, synthetic construct
  source 1..16: mol_type = other DNA
ctgcttattacccact

SEQ ID NO: 26574 - DNA, 16 bp, synthetic construct
  source 1..16: mol_type = other DNA
tctgcttattacccac

SEQ ID NO: 26575 - DNA, 16 bp, synthetic construct
  source 1..16: mol_type = other DNA
atctgcttattaccca

SEQ ID NO: 26576 - DNA, 16 bp, synthetic construct
  source 1..16: mol_type = other DNA
aatctgcttattaccc

SEQ ID NO: 26577 - DNA, 17 bp, synthetic construct
  source 1..17: mol_type = other DNA
acgcgggcagagagagg

SEQ ID NO: 26578 - DNA, 17 bp, synthetic construct
  source 1..17: mol_type = other DNA
gacgcgggcagagagag

SEQ ID NO: 26579 - DNA, 17 bp, synthetic construct
  source 1..17: mol_type = other DNA
ggacgcgggcagagaga

SEQ ID NO: 26580 - DNA, 17 bp, synthetic construct
  source 1..17: mol_type = other DNA
cggacgcgggcagagag

SEQ ID NO: 26581 - DNA, 17 bp, synthetic construct
  source 1..17: mol_type = other DNA
acggacgcgggcagaga

SEQ ID NO: 26582 - DNA, 17 bp, synthetic construct
  source 1..17: mol_type = other DNA
gacggacgcgggcagag

SEQ ID NO: 26583 - DNA, 17 bp, synthetic construct
  source 1..17: mol_type = other DNA
ggacggacgcgggcaga

SEQ ID NO: 26584 - DNA, 17 bp, synthetic construct
  source 1..17: mol_type = other DNA
cggacggacgcgggcag

SEQ ID NO: 26585 - DNA, 17 bp, synthetic construct
  source 1..17: mol_type = other DNA
acggacggacgcgggca

SEQ ID NO: 26586 - DNA, 17 bp, synthetic construct
  source 1..17: mol_type = other DNA
cacggacggacgcgggc

SEQ ID NO: 26587 - DNA, 17 bp, synthetic construct
  source 1..17: mol_type = other DNA
tcacggacggacgcggg

SEQ ID NO: 26588 - DNA, 17 bp, synthetic construct
  source 1..17: mol_type = other DNA
ttcacggacggacgcgg

SEQ ID NO: 26589 - DNA, 17 bp, synthetic construct
  source 1..17: mol_type = other DNA
tttcacggacggacgcg

SEQ ID NO: 26590 - DNA, 17 bp, synthetic construct
  source 1..17: mol_type = other DNA
atttcacggacggacgc

SEQ ID NO: 26591 - DNA, 17 bp, synthetic construct
  source 1..17: mol_type = other DNA
aatttcacggacggacg

SEQ ID NO: 26592 - DNA, 17 bp, synthetic construct
  source 1..17: mol_type = other DNA
gaatttcacggacggac

SEQ ID NO: 26593 - DNA, 17 bp, synthetic construct
  source 1..17: mol_type = other DNA
ggaatttcacggacgga

SEQ ID NO: 26594 - DNA, 17 bp, synthetic construct
  source 1..17: mol_type = other DNA
cggaatttcacggacgg

SEQ ID NO: 26595 - DNA, 17 bp, synthetic construct
  source 1..17: mol_type = other DNA
ccggaatttcacggacg

SEQ ID NO: 26596 - DNA, 17 bp, synthetic construct
  source 1..17: mol_type = other DNA
gccggaatttcacggac

SEQ ID NO: 26597 - DNA, 17 bp, synthetic construct
  source 1..17: mol_type = other DNA
ggccggaatttcacgga

SEQ ID NO: 26598 - DNA, 17 bp, synthetic construct
  source 1..17: mol_type = other DNA
cggccggaatttcacgg

SEQ ID NO: 26599 - DNA, 17 bp, synthetic construct
  source 1..17: mol_type = other DNA
ccggccggaatttcacg

SEQ ID NO: 26600 - DNA, 17 bp, synthetic construct
  source 1..17: mol_type = other DNA
cccggccggaatttcac

SEQ ID NO: 26601 - DNA, 17 bp, synthetic construct
  source 1..17: mol_type = other DNA
ccccggccggaatttca

SEQ ID NO: 26602 - DNA, 17 bp, synthetic construct
  source 1..17: mol_type = other DNA
gccccggccggaatttc

SEQ ID NO: 26603 - DNA, 17 bp, synthetic construct
  source 1..17: mol_type = other DNA
agccccggccggaattt

SEQ ID NO: 26604 - DNA, 17 bp, synthetic construct
  source 1..17: mol_type = other DNA
gagccccggccggaatt

SEQ ID NO: 26605 - DNA, 17 bp, synthetic construct
  source 1..17: mol_type = other DNA
tgagccccggccggaat

SEQ ID NO: 26606 - DNA, 17 bp, synthetic construct
  source 1..17: mol_type = other DNA
catcgcggtgagccccg

SEQ ID NO: 26607 - DNA, 17 bp, synthetic construct
  source 1..17: mol_type = other DNA
agggccatcgcggtgag

SEQ ID NO: 26608 - DNA, 17 bp, synthetic construct
  source 1..17: mol_type = other DNA
gagggccatcgcggtga

SEQ ID NO: 26609 - DNA, 17 bp, synthetic construct
  source 1..17: mol_type = other DNA
ggagggccatcgcggtg

SEQ ID NO: 26610 - DNA, 17 bp, synthetic construct
  source 1..17: mol_type = other DNA
cgggagggccatcgcgg

SEQ ID NO: 26611 - DNA, 17 bp, synthetic construct
  source 1..17: mol_type = other DNA
tcgggagggccatcgcg

SEQ ID NO: 26612 - DNA, 17 bp, synthetic construct
  source 1..17: mol_type = other DNA
tgtcgggagggccatcg

SEQ ID NO: 26613 - DNA, 17 bp, synthetic construct
  source 1..17: mol_type = other DNA
cgagggtgtcgggaggg

SEQ ID NO: 26614 - DNA, 17 bp, synthetic construct
  source 1..17: mol_type = other DNA
ccgagggtgtcgggagg

SEQ ID NO: 26615 - DNA, 17 bp, synthetic construct
  source 1..17: mol_type = other DNA
tccgagggtgtcgggag

SEQ ID NO: 26616 - DNA, 17 bp, synthetic construct
  source 1..17: mol_type = other DNA
gtccgagggtgtcggga

SEQ ID NO: 26617 - DNA, 17 bp, synthetic construct
  source 1..17: mol_type = other DNA
tgtccgagggtgtcggg

SEQ ID NO: 26618 - DNA, 17 bp, synthetic construct
  source 1..17: mol_type = other DNA
ctgtccgagggtgtcgg

SEQ ID NO: 26619 - DNA, 17 bp, synthetic construct
  source 1..17: mol_type = other DNA
gctgtccgagggtgtcg

SEQ ID NO: 26620 - DNA, 17 bp, synthetic construct
  source 1..17: mol_type = other DNA
tgctgtccgagggtgtc

SEQ ID NO: 26621 - DNA, 17 bp, synthetic construct
  source 1..17: mol_type = other DNA
ggtgctgtccgagggtg

SEQ ID NO: 26622 - DNA, 17 bp, synthetic construct
  source 1..17: mol_type = other DNA
agggtgctgtccgaggg

SEQ ID NO: 26623 - DNA, 17 bp, synthetic construct
  source 1..17: mol_type = other DNA
gagggtgctgtccgagg

SEQ ID NO: 26624 - DNA, 17 bp, synthetic construct
  source 1..17: mol_type = other DNA
ggagggtgctgtccgag

SEQ ID NO: 26625 - DNA, 17 bp, synthetic construct
  source 1..17: mol_type = other DNA
cttccgcggggagggtg

SEQ ID NO: 26626 - DNA, 17 bp, synthetic construct
  source 1..17: mol_type = other DNA
cgagtctccgtcgccgt

SEQ ID NO: 26627 - DNA, 17 bp, synthetic construct
  source 1..17: mol_type = other DNA
acgagtctccgtcgccg

SEQ ID NO: 26628 - DNA, 17 bp, synthetic construct
  source 1..17: mol_type = other DNA
aacgagtctccgtcgcc

SEQ ID NO: 26629 - DNA, 17 bp, synthetic construct
  source 1..17: mol_type = other DNA
aaacgagtctccgtcgc

SEQ ID NO: 26630 - DNA, 17 bp, synthetic construct
  source 1..17: mol_type = other DNA
caaacgagtctccgtcg

SEQ ID NO: 26631 - DNA, 17 bp, synthetic construct
  source 1..17: mol_type = other DNA
ccaaacgagtctccgtc

SEQ ID NO: 26632 - DNA, 17 bp, synthetic construct
  source 1..17: mol_type = other DNA
aagcaggctcgcagggc

SEQ ID NO: 26633 - DNA, 17 bp, synthetic construct
  source 1..17: mol_type = other DNA
aaagcaggctcgcaggg

SEQ ID NO: 26634 - DNA, 17 bp, synthetic construct
  source 1..17: mol_type = other DNA
caaagcaggctcgcagg

SEQ ID NO: 26635 - DNA, 17 bp, synthetic construct
  source 1..17: mol_type = other DNA
tcaaagcaggctcgcag

SEQ ID NO: 26636 - DNA, 17 bp, synthetic construct
  source 1..17: mol_type = other DNA
ctcaaagcaggctcgca

SEQ ID NO: 26637 - DNA, 17 bp, synthetic construct
  source 1..17: mol_type = other DNA
gctcaaagcaggctcgc

SEQ ID NO: 26638 - DNA, 17 bp, synthetic construct
  source 1..17: mol_type = other DNA
cgctcaaagcaggctcg

SEQ ID NO: 26639 - DNA, 17 bp, synthetic construct
  source 1..17: mol_type = other DNA
ccgctcaaagcaggctc

SEQ ID NO: 26640 - DNA, 17 bp, synthetic construct
  source 1..17: mol_type = other DNA
tccgctcaaagcaggct

SEQ ID NO: 26641 - DNA, 17 bp, synthetic construct
  source 1..17: mol_type = other DNA
ttccgctcaaagcaggc

SEQ ID NO: 26642 - DNA, 17 bp, synthetic construct
  source 1..17: mol_type = other DNA
gttccgctcaaagcagg

SEQ ID NO: 26643 - DNA, 17 bp, synthetic construct
  source 1..17: mol_type = other DNA
ggttccgctcaaagcag

SEQ ID NO: 26644 - DNA, 17 bp, synthetic construct
  source 1..17: mol_type = other DNA
gggttccgctcaaagca

SEQ ID NO: 26645 - DNA, 17 bp, synthetic construct
  source 1..17: mol_type = other DNA
cgggttccgctcaaagc

SEQ ID NO: 26646 - DNA, 17 bp, synthetic construct
  source 1..17: mol_type = other DNA
acgggttccgctcaaag

SEQ ID NO: 26647 - DNA, 17 bp, synthetic construct
  source 1..17: mol_type = other DNA
tacgggttccgctcaaa

SEQ ID NO: 26648 - DNA, 17 bp, synthetic construct
  source 1..17: mol_type = other DNA
gtacgggttccgctcaa

SEQ ID NO: 26649 - DNA, 17 bp, synthetic construct
  source 1..17: mol_type = other DNA
ggtacgggttccgctca

SEQ ID NO: 26650 - DNA, 17 bp, synthetic construct
  source 1..17: mol_type = other DNA
gggtacgggttccgctc

SEQ ID NO: 26651 - DNA, 17 bp, synthetic construct
  source 1..17: mol_type = other DNA
cgggtacgggttccgct

SEQ ID NO: 26652 - DNA, 17 bp, synthetic construct
  source 1..17: mol_type = other DNA
cccgggtacgggttccg

SEQ ID NO: 26653 - DNA, 17 bp, synthetic construct
  source 1..17: mol_type = other DNA
tgcccgggtacgggttc

SEQ ID NO: 26654 - DNA, 17 bp, synthetic construct
  source 1..17: mol_type = other DNA
atgcccgggtacgggtt

SEQ ID NO: 26655 - DNA, 17 bp, synthetic construct
  source 1..17: mol_type = other DNA
gatgcccgggtacgggt

SEQ ID NO: 26656 - DNA, 17 bp, synthetic construct
  source 1..17: mol_type = other DNA
cgatgcccgggtacggg

SEQ ID NO: 26657 - DNA, 17 bp, synthetic construct
  source 1..17: mol_type = other DNA
gcgatgcccgggtacgg

SEQ ID NO: 26658 - DNA, 17 bp, synthetic construct
  source 1..17: mol_type = other DNA
ggcgatgcccgggtacg

SEQ ID NO: 26659 - DNA, 17 bp, synthetic construct
  source 1..17: mol_type = other DNA
tggcgatgcccgggtac

SEQ ID NO: 26660 - DNA, 17 bp, synthetic construct
  source 1..17: mol_type = other DNA
atgccgatggcctgggc

SEQ ID NO: 26661 - DNA, 17 bp, synthetic construct
  source 1..17: mol_type = other DNA
aatgccgatggcctggg

SEQ ID NO: 26662 - DNA, 17 bp, synthetic construct
  source 1..17: mol_type = other DNA
gaatgccgatggcctgg

SEQ ID NO: 26663 - DNA, 17 bp, synthetic construct
  source 1..17: mol_type = other DNA
ggaatgccgatggcctg

SEQ ID NO: 26664 - DNA, 17 bp, synthetic construct
  source 1..17: mol_type = other DNA
atctggaccctgggctc

SEQ ID NO: 26665 - DNA, 17 bp, synthetic construct
  source 1..17: mol_type = other DNA
aatctggaccctgggct

SEQ ID NO: 26666 - DNA, 17 bp, synthetic construct
  source 1..17: mol_type = other DNA
aaatctggaccctgggc

SEQ ID NO: 26667 - DNA, 17 bp, synthetic construct
  source 1..17: mol_type = other DNA
caaatctggaccctggg

SEQ ID NO: 26668 - DNA, 17 bp, synthetic construct
  source 1..17: mol_type = other DNA
ccaaatctggaccctgg

SEQ ID NO: 26669 - DNA, 17 bp, synthetic construct
  source 1..17: mol_type = other DNA
accaaatctggaccctg

SEQ ID NO: 26670 - DNA, 17 bp, synthetic construct
  source 1..17: mol_type = other DNA
aaccaaatctggaccct

SEQ ID NO: 26671 - DNA, 17 bp, synthetic construct
  source 1..17: mol_type = other DNA
aaaccaaatctggaccc

SEQ ID NO: 26672 - DNA, 17 bp, synthetic construct
  source 1..17: mol_type = other DNA
ctctcattctgaaacca

SEQ ID NO: 26673 - DNA, 17 bp, synthetic construct
  source 1..17: mol_type = other DNA
cctctcattctgaaacc

SEQ ID NO: 26674 - DNA, 17 bp, synthetic construct
  source 1..17: mol_type = other DNA
acctctcattctgaaac

SEQ ID NO: 26675 - DNA, 17 bp, synthetic construct
  source 1..17: mol_type = other DNA
gacctctcattctgaaa

SEQ ID NO: 26676 - DNA, 17 bp, synthetic construct
  source 1..17: mol_type = other DNA
tgacctctcattctgaa

SEQ ID NO: 26677 - DNA, 17 bp, synthetic construct
  source 1..17: mol_type = other DNA
gtgacctctcattctga

SEQ ID NO: 26678 - DNA, 17 bp, synthetic construct
  source 1..17: mol_type = other DNA
cgtgacctctcattctg

SEQ ID NO: 26679 - DNA, 17 bp, synthetic construct
  source 1..17: mol_type = other DNA
gcgtgacctctcattct

SEQ ID NO: 26680 - DNA, 17 bp, synthetic construct
  source 1..17: mol_type = other DNA
ggcgtgacctctcattc

SEQ ID NO: 26681 - DNA, 17 bp, synthetic construct
  source 1..17: mol_type = other DNA
tggcgtgacctctcatt

SEQ ID NO: 26682 - DNA, 17 bp, synthetic construct
  source 1..17: mol_type = other DNA
ctggcgtgacctctcat

SEQ ID NO: 26683 - DNA, 17 bp, synthetic construct
  source 1..17: mol_type = other DNA
gctggcgtgacctctca

SEQ ID NO: 26684 - DNA, 17 bp, synthetic construct
  source 1..17: mol_type = other DNA
agctggcgtgacctctc

SEQ ID NO: 26685 - DNA, 17 bp, synthetic construct
  source 1..17: mol_type = other DNA
cagctggcgtgacctct

SEQ ID NO: 26686 - DNA, 17 bp, synthetic construct
  source 1..17: mol_type = other DNA
tcagctggcgtgacctc

SEQ ID NO: 26687 - DNA, 17 bp, synthetic construct
  source 1..17: mol_type = other DNA
ctcagctggcgtgacct

SEQ ID NO: 26688 - DNA, 17 bp, synthetic construct
  source 1..17: mol_type = other DNA
cctcagctggcgtgacc

SEQ ID NO: 26689 - DNA, 17 bp, synthetic construct
  source 1..17: mol_type = other DNA
tgcctcagctggcgtga

SEQ ID NO: 26690 - DNA, 17 bp, synthetic construct
  source 1..17: mol_type = other DNA
ccagggccgagattccc

SEQ ID NO: 26691 - DNA, 17 bp, synthetic construct
  source 1..17: mol_type = other DNA
ggccagggccgagattc

SEQ ID NO: 26692 - DNA, 17 bp, synthetic construct
  source 1..17: mol_type = other DNA
tcctggactccgggagg

SEQ ID NO: 26693 - DNA, 17 bp, synthetic construct
  source 1..17: mol_type = other DNA
atcctggactccgggag

SEQ ID NO: 26694 - DNA, 17 bp, synthetic construct
  source 1..17: mol_type = other DNA
aatcctggactccggga

SEQ ID NO: 26695 - DNA, 17 bp, synthetic construct
  source 1..17: mol_type = other DNA
gaatcctggactccggg

SEQ ID NO: 26696 - DNA, 17 bp, synthetic construct
  source 1..17: mol_type = other DNA
tgaatcctggactccgg

SEQ ID NO: 26697 - DNA, 17 bp, synthetic construct
  source 1..17: mol_type = other DNA
ctgaatcctggactccg

SEQ ID NO: 26698 - DNA, 17 bp, synthetic construct
  source 1..17: mol_type = other DNA
tctgaatcctggactcc

SEQ ID NO: 26699 - DNA, 17 bp, synthetic construct
  source 1..17: mol_type = other DNA
atctgaatcctggactc

SEQ ID NO: 26700 - DNA, 17 bp, synthetic construct
  source 1..17: mol_type = other DNA
gatctgaatcctggact

SEQ ID NO: 26701 - DNA, 17 bp, synthetic construct
  source 1..17: mol_type = other DNA
agatctgaatcctggac

SEQ ID NO: 26702 - DNA, 17 bp, synthetic construct
  source 1..17: mol_type = other DNA
cagatctgaatcctgga

SEQ ID NO: 26703 - DNA, 17 bp, synthetic construct
  source 1..17: mol_type = other DNA
ccagatctgaatcctgg

SEQ ID NO: 26704 - DNA, 17 bp, synthetic construct
  source 1..17: mol_type = other DNA
accagatctgaatcctg

SEQ ID NO: 26705 - DNA, 17 bp, synthetic construct
  source 1..17: mol_type = other DNA
aaccagatctgaatcct

SEQ ID NO: 26706 - DNA, 17 bp, synthetic construct
  source 1..17: mol_type = other DNA
ccttcgattctgaaacc

SEQ ID NO: 26707 - DNA, 17 bp, synthetic construct
  source 1..17: mol_type = other DNA
cccttcgattctgaaac

SEQ ID NO: 26708 - DNA, 17 bp, synthetic construct
  source 1..17: mol_type = other DNA
gcccttcgattctgaaa

SEQ ID NO: 26709 - DNA, 17 bp, synthetic construct
  source 1..17: mol_type = other DNA
ggcccttcgattctgaa

SEQ ID NO: 26710 - DNA, 17 bp, synthetic construct
  source 1..17: mol_type = other DNA
tggcccttcgattctga

SEQ ID NO: 26711 - DNA, 17 bp, synthetic construct
  source 1..17: mol_type = other DNA
ctggcccttcgattctg

SEQ ID NO: 26712 - DNA, 17 bp, synthetic construct
  source 1..17: mol_type = other DNA
cctggcccttcgattct

SEQ ID NO: 26713 - DNA, 17 bp, synthetic construct
  source 1..17: mol_type = other DNA
tgcctggcccttcgatt

SEQ ID NO: 26714 - DNA, 17 bp, synthetic construct
  source 1..17: mol_type = other DNA
cgggctggggaggtgga

SEQ ID NO: 26715 - DNA, 17 bp, synthetic construct
  source 1..17: mol_type = other DNA
cgcggaggcggaggcgt

SEQ ID NO: 26716 - DNA, 17 bp, synthetic construct
  source 1..17: mol_type = other DNA
ccgcgcggaggcggagg

SEQ ID NO: 26717 - DNA, 17 bp, synthetic construct
  source 1..17: mol_type = other DNA
atgccttgcatctgccc

SEQ ID NO: 26718 - DNA, 17 bp, synthetic construct
  source 1..17: mol_type = other DNA
gatgccttgcatctgcc

SEQ ID NO: 26719 - DNA, 17 bp, synthetic construct
  source 1..17: mol_type = other DNA
ggatgccttgcatctgc

SEQ ID NO: 26720 - DNA, 17 bp, synthetic construct
  source 1..17: mol_type = other DNA
gggatgccttgcatctg

SEQ ID NO: 26721 - DNA, 17 bp, synthetic construct
  source 1..17: mol_type = other DNA
cgggatgccttgcatct

SEQ ID NO: 26722 - DNA, 17 bp, synthetic construct
  source 1..17: mol_type = other DNA
ccgggatgccttgcatc

SEQ ID NO: 26723 - DNA, 17 bp, synthetic construct
  source 1..17: mol_type = other DNA
gccgggatgccttgcat

SEQ ID NO: 26724 - DNA, 17 bp, synthetic construct
  source 1..17: mol_type = other DNA
cgccgggatgccttgca

SEQ ID NO: 26725 - DNA, 17 bp, synthetic construct
  source 1..17: mol_type = other DNA
tgggagggcgccgggat

SEQ ID NO: 26726 - DNA, 17 bp, synthetic construct
  source 1..17: mol_type = other DNA
tggagcgcctgggaggg

SEQ ID NO: 26727 - DNA, 17 bp, synthetic construct
  source 1..17: mol_type = other DNA
ctggagcgcctgggagg

SEQ ID NO: 26728 - DNA, 17 bp, synthetic construct
  source 1..17: mol_type = other DNA
cctggagcgcctgggag

SEQ ID NO: 26729 - DNA, 17 bp, synthetic construct
  source 1..17: mol_type = other DNA
tcttccgaggcctccag

SEQ ID NO: 26730 - DNA, 17 bp, synthetic construct
  source 1..17: mol_type = other DNA
aggcggcctcttccgag

SEQ ID NO: 26731 - DNA, 17 bp, synthetic construct
  source 1..17: mol_type = other DNA
cgaggcggcctcttccg

SEQ ID NO: 26732 - DNA, 17 bp, synthetic construct
  source 1..17: mol_type = other DNA
cagcgaggcggcctctt

SEQ ID NO: 26733 - DNA, 17 bp, synthetic construct
  source 1..17: mol_type = other DNA
tgcttccagcgaggcgg

SEQ ID NO: 26734 - DNA, 17 bp, synthetic construct
  source 1..17: mol_type = other DNA
gtgcttccagcgaggcg

SEQ ID NO: 26735 - DNA, 17 bp, synthetic construct
  source 1..17: mol_type = other DNA
gggtgcttccagcgagg

SEQ ID NO: 26736 - DNA, 17 bp, synthetic construct
  source 1..17: mol_type = other DNA
ggggtgcttccagcgag

SEQ ID NO: 26737 - DNA, 17 bp, synthetic construct
  source 1..17: mol_type = other DNA
aggggtgcttccagcga

SEQ ID NO: 26738 - DNA, 17 bp, synthetic construct
  source 1..17: mol_type = other DNA
gaggggtgcttccagcg

SEQ ID NO: 26739 - DNA, 17 bp, synthetic construct
  source 1..17: mol_type = other DNA
tgaggggtgcttccagc

SEQ ID NO: 26740 - DNA, 17 bp, synthetic construct
  source 1..17: mol_type = other DNA
ctgaggggtgcttccag

SEQ ID NO: 26741 - DNA, 17 bp, synthetic construct
  source 1..17: mol_type = other DNA
cgctgaggggtgcttcc

SEQ ID NO: 26742 - DNA, 17 bp, synthetic construct
  source 1..17: mol_type = other DNA
tcgctgaggggtgcttc

SEQ ID NO: 26743 - DNA, 17 bp, synthetic construct
  source 1..17: mol_type = other DNA
ctcgctgaggggtgctt

SEQ ID NO: 26744 - DNA, 17 bp, synthetic construct
  source 1..17: mol_type = other DNA
ttcctcgctgaggggtg

SEQ ID NO: 26745 - DNA, 17 bp, synthetic construct
  source 1..17: mol_type = other DNA
cttcctcgctgaggggt

SEQ ID NO: 26746 - DNA, 17 bp, synthetic construct
  source 1..17: mol_type = other DNA
tcttcctcgctgagggg

SEQ ID NO: 26747 - DNA, 17 bp, synthetic construct
  source 1..17: mol_type = other DNA
ttcttcctcgctgaggg

SEQ ID NO: 26748 - DNA, 17 bp, synthetic construct
  source 1..17: mol_type = other DNA
attcttcctcgctgagg

SEQ ID NO: 26749 - DNA, 17 bp, synthetic construct
  source 1..17: mol_type = other DNA
tattcttcctcgctgag

SEQ ID NO: 26750 - DNA, 17 bp, synthetic construct
  source 1..17: mol_type = other DNA
gtattcttcctcgctga

SEQ ID NO: 26751 - DNA, 17 bp, synthetic construct
  source 1..17: mol_type = other DNA
ggtattcttcctcgctg

SEQ ID NO: 26752 - DNA, 17 bp, synthetic construct
  source 1..17: mol_type = other DNA
cggtattcttcctcgct

SEQ ID NO: 26753 - DNA, 17 bp, synthetic construct
  source 1..17: mol_type = other DNA
ccggtattcttcctcgc

SEQ ID NO: 26754 - DNA, 17 bp, synthetic construct
  source 1..17: mol_type = other DNA
cccggtattcttcctcg

SEQ ID NO: 26755 - DNA, 17 bp, synthetic construct
  source 1..17: mol_type = other DNA
gcccggtattcttcctc

SEQ ID NO: 26756 - DNA, 17 bp, synthetic construct
  source 1..17: mol_type = other DNA
agcccggtattcttcct

SEQ ID NO: 26757 - DNA, 17 bp, synthetic construct
  source 1..17: mol_type = other DNA
gagcccggtattcttcc

SEQ ID NO: 26758 - DNA, 17 bp, synthetic construct
  source 1..17: mol_type = other DNA
agagcccggtattcttc

SEQ ID NO: 26759 - DNA, 17 bp, synthetic construct
  source 1..17: mol_type = other DNA
cagagcccggtattctt

SEQ ID NO: 26760 - DNA, 17 bp, synthetic construct
  source 1..17: mol_type = other DNA
gcagagcccggtattct

SEQ ID NO: 26761 - DNA, 17 bp, synthetic construct
  source 1..17: mol_type = other DNA
agcagagcccggtattc

SEQ ID NO: 26762 - DNA, 17 bp, synthetic construct
  source 1..17: mol_type = other DNA
cagcagagcccggtatt

SEQ ID NO: 26763 - DNA, 17 bp, synthetic construct
  source 1..17: mol_type = other DNA
ccagcagagcccggtat

SEQ ID NO: 26764 - DNA, 17 bp, synthetic construct
  source 1..17: mol_type = other DNA
aagctcctccagcagag

SEQ ID NO: 26765 - DNA, 17 bp, synthetic construct
  source 1..17: mol_type = other DNA
aaagctcctccagcaga

SEQ ID NO: 26766 - DNA, 17 bp, synthetic construct
  source 1..17: mol_type = other DNA
taaagctcctccagcag

SEQ ID NO: 26767 - DNA, 17 bp, synthetic construct
  source 1..17: mol_type = other DNA
ctaaagctcctccagca

SEQ ID NO: 26768 - DNA, 17 bp, synthetic construct
  source 1..17: mol_type = other DNA
cctaaagctcctccagc

SEQ ID NO: 26769 - DNA, 17 bp, synthetic construct
  source 1..17: mol_type = other DNA
tcctaaagctcctccag

SEQ ID NO: 26770 - DNA, 17 bp, synthetic construct
  source 1..17: mol_type = other DNA
gtcctaaagctcctcca

SEQ ID NO: 26771 - DNA, 17 bp, synthetic construct
  source 1..17: mol_type = other DNA
cgtcctaaagctcctcc

SEQ ID NO: 26772 - DNA, 17 bp, synthetic construct
  source 1..17: mol_type = other DNA
gcgtcctaaagctcctc

SEQ ID NO: 26773 - DNA, 17 bp, synthetic construct
  source 1..17: mol_type = other DNA
cgcgtcctaaagctcct

SEQ ID NO: 26774 - DNA, 17 bp, synthetic construct
  source 1..17: mol_type = other DNA
ccgcgtcctaaagctcc

SEQ ID NO: 26775 - DNA, 17 bp, synthetic construct
  source 1..17: mol_type = other DNA
cccgcgtcctaaagctc

SEQ ID NO: 26776 - DNA, 17 bp, synthetic construct
  source 1..17: mol_type = other DNA
ccccgcgtcctaaagct

SEQ ID NO: 26777 - DNA, 17 bp, synthetic construct
  source 1..17: mol_type = other DNA
accccgcgtcctaaagc

SEQ ID NO: 26778 - DNA, 17 bp, synthetic construct
  source 1..17: mol_type = other DNA
aaccccgcgtcctaaag

SEQ ID NO: 26779 - DNA, 17 bp, synthetic construct
  source 1..17: mol_type = other DNA
caaccccgcgtcctaaa

SEQ ID NO: 26780 - DNA, 17 bp, synthetic construct
  source 1..17: mol_type = other DNA
ccaaccccgcgtcctaa

SEQ ID NO: 26781 - DNA, 17 bp, synthetic construct
  source 1..17: mol_type = other DNA
tgccccgaaccacccga

SEQ ID NO: 26782 - DNA, 17 bp, synthetic construct
  source 1..17: mol_type = other DNA
ctgccccgaaccacccg

SEQ ID NO: 26783 - DNA, 17 bp, synthetic construct
  source 1..17: mol_type = other DNA
aagagaggccaccgccc

SEQ ID NO: 26784 - DNA, 17 bp, synthetic construct
  source 1..17: mol_type = other DNA
aaagagaggccaccgcc

SEQ ID NO: 26785 - DNA, 17 bp, synthetic construct
  source 1..17: mol_type = other DNA
gaaagagaggccaccgc

SEQ ID NO: 26786 - DNA, 17 bp, synthetic construct
  source 1..17: mol_type = other DNA
cgaaagagaggccaccg

SEQ ID NO: 26787 - DNA, 17 bp, synthetic construct
  source 1..17: mol_type = other DNA
gcgaaagagaggccacc

SEQ ID NO: 26788 - DNA, 17 bp, synthetic construct
  source 1..17: mol_type = other DNA
cgcgaaagagaggccac

SEQ ID NO: 26789 - DNA, 17 bp, synthetic construct
  source 1..17: mol_type = other DNA
ccgcgaaagagaggcca

SEQ ID NO: 26790 - DNA, 17 bp, synthetic construct
  source 1..17: mol_type = other DNA
cccgcgaaagagaggcc

SEQ ID NO: 26791 - DNA, 17 bp, synthetic construct
  source 1..17: mol_type = other DNA
ccccgcgaaagagaggc

SEQ ID NO: 26792 - DNA, 17 bp, synthetic construct
  source 1..17: mol_type = other DNA
tccccgcgaaagagagg

SEQ ID NO: 26793 - DNA, 17 bp, synthetic construct
  source 1..17: mol_type = other DNA
ttccccgcgaaagagag

SEQ ID NO: 26794 - DNA, 17 bp, synthetic construct
  source 1..17: mol_type = other DNA
gttccccgcgaaagaga

SEQ ID NO: 26795 - DNA, 17 bp, synthetic construct
  source 1..17: mol_type = other DNA
tgttccccgcgaaagag

SEQ ID NO: 26796 - DNA, 17 bp, synthetic construct
  source 1..17: mol_type = other DNA
gtgttccccgcgaaaga

SEQ ID NO: 26797 - DNA, 17 bp, synthetic construct
  source 1..17: mol_type = other DNA
ggtgttccccgcgaaag

SEQ ID NO: 26798 - DNA, 17 bp, synthetic construct
  source 1..17: mol_type = other DNA
aggtgttccccgcgaaa

SEQ ID NO: 26799 - DNA, 17 bp, synthetic construct
  source 1..17: mol_type = other DNA
caggtgttccccgcgaa

SEQ ID NO: 26800 - DNA, 17 bp, synthetic construct
  source 1..17: mol_type = other DNA
tagccagccaggtgttc

SEQ ID NO: 26801 - DNA, 17 bp, synthetic construct
  source 1..17: mol_type = other DNA
cgtagccagccaggtgt

SEQ ID NO: 26802 - DNA, 17 bp, synthetic construct
  source 1..17: mol_type = other DNA
gacacgcccctccgtag

SEQ ID NO: 26803 - DNA, 17 bp, synthetic construct
  source 1..17: mol_type = other DNA
agacacgcccctccgta

SEQ ID NO: 26804 - DNA, 17 bp, synthetic construct
  source 1..17: mol_type = other DNA
ggagacacgcccctccg

SEQ ID NO: 26805 - DNA, 17 bp, synthetic construct
  source 1..17: mol_type = other DNA
cggagacacgcccctcc

SEQ ID NO: 26806 - DNA, 17 bp, synthetic construct
  source 1..17: mol_type = other DNA
cggtcagcccggtggag

SEQ ID NO: 26807 - DNA, 17 bp, synthetic construct
  source 1..17: mol_type = other DNA
aatcccaggccggtcag

SEQ ID NO: 26808 - DNA, 17 bp, synthetic construct
  source 1..17: mol_type = other DNA
gaatcccaggccggtca

SEQ ID NO: 26809 - DNA, 17 bp, synthetic construct
  source 1..17: mol_type = other DNA
ggaatcccaggccggtc

SEQ ID NO: 26810 - DNA, 17 bp, synthetic construct
  source 1..17: mol_type = other DNA
aggaatcccaggccggt

SEQ ID NO: 26811 - DNA, 17 bp, synthetic construct
  source 1..17: mol_type = other DNA
caggaatcccaggccgg

SEQ ID NO: 26812 - DNA, 17 bp, synthetic construct
  source 1..17: mol_type = other DNA
gcaggaatcccaggccg

SEQ ID NO: 26813 - DNA, 17 bp, synthetic construct
  source 1..17: mol_type = other DNA
ggcaggaatcccaggcc

SEQ ID NO: 26814 - DNA, 17 bp, synthetic construct
  source 1..17: mol_type = other DNA
aggcaggaatcccaggc

SEQ ID NO: 26815 - DNA, 17 bp, synthetic construct
  source 1..17: mol_type = other DNA
aaggcaggaatcccagg

SEQ ID NO: 26816 - DNA, 17 bp, synthetic construct
  source 1..17: mol_type = other DNA
gaaggcaggaatcccag

SEQ ID NO: 26817 - DNA, 17 bp, synthetic construct
  source 1..17: mol_type = other DNA
agaaggcaggaatccca

SEQ ID NO: 26818 - DNA, 17 bp, synthetic construct
  source 1..17: mol_type = other DNA
tagaaggcaggaatccc

SEQ ID NO: 26819 - DNA, 17 bp, synthetic construct
  source 1..17: mol_type = other DNA
ctagaaggcaggaatcc

SEQ ID NO: 26820 - DNA, 17 bp, synthetic construct
  source 1..17: mol_type = other DNA
cctagaaggcaggaatc

SEQ ID NO: 26821 - DNA, 17 bp, synthetic construct
  source 1..17: mol_type = other DNA
acctagaaggcaggaat

SEQ ID NO: 26822 - DNA, 17 bp, synthetic construct
  source 1..17: mol_type = other DNA
gacctagaaggcaggaa

SEQ ID NO: 26823 - DNA, 17 bp, synthetic construct
  source 1..17: mol_type = other DNA
agacctagaaggcagga

SEQ ID NO: 26824 - DNA, 17 bp, synthetic construct
  source 1..17: mol_type = other DNA
tggagtctctcaccggg

SEQ ID NO: 26825 - DNA, 17 bp, synthetic construct
  source 1..17: mol_type = other DNA
gtggagtctctcaccgg

SEQ ID NO: 26826 - DNA, 17 bp, synthetic construct
  source 1..17: mol_type = other DNA
ggatgcccaggaaagaa

SEQ ID NO: 26827 - DNA, 17 bp, synthetic construct
  source 1..17: mol_type = other DNA
gggatgcccaggaaaga

SEQ ID NO: 26828 - DNA, 17 bp, synthetic construct
  source 1..17: mol_type = other DNA
cgggatgcccaggaaag

SEQ ID NO: 26829 - DNA, 17 bp, synthetic construct
  source 1..17: mol_type = other DNA
ccgggatgcccaggaaa

SEQ ID NO: 26830 - DNA, 17 bp, synthetic construct
  source 1..17: mol_type = other DNA
cccgggatgcccaggaa

SEQ ID NO: 26831 - DNA, 17 bp, synthetic construct
  source 1..17: mol_type = other DNA
tgggatccccgggatgc

SEQ ID NO: 26832 - DNA, 17 bp, synthetic construct
  source 1..17: mol_type = other DNA
ctgggatccccgggatg

SEQ ID NO: 26833 - DNA, 17 bp, synthetic construct
  source 1..17: mol_type = other DNA
tctgggatccccgggat

SEQ ID NO: 26834 - DNA, 17 bp, synthetic construct
  source 1..17: mol_type = other DNA
tgctggtacctgggccg

SEQ ID NO: 26835 - DNA, 17 bp, synthetic construct
  source 1..17: mol_type = other DNA
agctgggaggctgcagg

SEQ ID NO: 26836 - DNA, 17 bp, synthetic construct
  source 1..17: mol_type = other DNA
cagctgggaggctgcag

SEQ ID NO: 26837 - DNA, 17 bp, synthetic construct
  source 1..17: mol_type = other DNA
tggcagctgggaggctg

SEQ ID NO: 26838 - DNA, 17 bp, synthetic construct
  source 1..17: mol_type = other DNA
tgcttttgaccgccagg

SEQ ID NO: 26839 - DNA, 17 bp, synthetic construct
  source 1..17: mol_type = other DNA
atgcttttgaccgccag

SEQ ID NO: 26840 - DNA, 17 bp, synthetic construct
  source 1..17: mol_type = other DNA
tatgcttttgaccgcca

SEQ ID NO: 26841 - DNA, 17 bp, synthetic construct
  source 1..17: mol_type = other DNA
gtatgcttttgaccgcc

SEQ ID NO: 26842 - DNA, 17 bp, synthetic construct
  source 1..17: mol_type = other DNA
ggtatgcttttgaccgc

SEQ ID NO: 26843 - DNA, 17 bp, synthetic construct
  source 1..17: mol_type = other DNA
aggtatgcttttgaccg

SEQ ID NO: 26844 - DNA, 17 bp, synthetic construct
  source 1..17: mol_type = other DNA
gaggtatgcttttgacc

SEQ ID NO: 26845 - DNA, 17 bp, synthetic construct
  source 1..17: mol_type = other DNA
agaggtatgcttttgac

SEQ ID NO: 26846 - DNA, 17 bp, synthetic construct
  source 1..17: mol_type = other DNA
cagaggtatgcttttga

SEQ ID NO: 26847 - DNA, 17 bp, synthetic construct
  source 1..17: mol_type = other DNA
acagaggtatgcttttg

SEQ ID NO: 26848 - DNA, 17 bp, synthetic construct
  source 1..17: mol_type = other DNA
gacagaggtatgctttt

SEQ ID NO: 26849 - DNA, 17 bp, synthetic construct
  source 1..17: mol_type = other DNA
agacagaggtatgcttt

SEQ ID NO: 26850 - DNA, 17 bp, synthetic construct
  source 1..17: mol_type = other DNA
cagacagaggtatgctt

SEQ ID NO: 26851 - DNA, 17 bp, synthetic construct
  source 1..17: mol_type = other DNA
acagacagaggtatgct

SEQ ID NO: 26852 - DNA, 17 bp, synthetic construct
  source 1..17: mol_type = other DNA
gacagacagaggtatgc

SEQ ID NO: 26853 - DNA, 17 bp, synthetic construct
  source 1..17: mol_type = other DNA
gggcaaagacagacaga

SEQ ID NO: 26854 - DNA, 17 bp, synthetic construct
  source 1..17: mol_type = other DNA
cgggcaaagacagacag

SEQ ID NO: 26855 - DNA, 17 bp, synthetic construct
  source 1..17: mol_type = other DNA
gcgggcaaagacagaca

SEQ ID NO: 26856 - DNA, 17 bp, synthetic construct
  source 1..17: mol_type = other DNA
agcgggcaaagacagac

SEQ ID NO: 26857 - DNA, 17 bp, synthetic construct
  source 1..17: mol_type = other DNA
aagcgggcaaagacaga

SEQ ID NO: 26858 - DNA, 17 bp, synthetic construct
  source 1..17: mol_type = other DNA
gaagcgggcaaagacag

SEQ ID NO: 26859 - DNA, 17 bp, synthetic construct
  source 1..17: mol_type = other DNA
ggaagcgggcaaagaca

SEQ ID NO: 26860 - DNA, 17 bp, synthetic construct
  source 1..17: mol_type = other DNA
aggaagcgggcaaagac

SEQ ID NO: 26861 - DNA, 17 bp, synthetic construct
  source 1..17: mol_type = other DNA
caggaagcgggcaaaga

SEQ ID NO: 26862 - DNA, 17 bp, synthetic construct
  source 1..17: mol_type = other DNA
ccaggaagcgggcaaag

SEQ ID NO: 26863 - DNA, 17 bp, synthetic construct
  source 1..17: mol_type = other DNA
gccaggaagcgggcaaa

SEQ ID NO: 26864 - DNA, 17 bp, synthetic construct
  source 1..17: mol_type = other DNA
agccaggaagcgggcaa

SEQ ID NO: 26865 - DNA, 17 bp, synthetic construct
  source 1..17: mol_type = other DNA
tagccaggaagcgggca

SEQ ID NO: 26866 - DNA, 17 bp, synthetic construct
  source 1..17: mol_type = other DNA
ctagccaggaagcgggc

SEQ ID NO: 26867 - DNA, 17 bp, synthetic construct
  source 1..17: mol_type = other DNA
tctagccaggaagcggg

SEQ ID NO: 26868 - DNA, 17 bp, synthetic construct
  source 1..17: mol_type = other DNA
gtctagccaggaagcgg

SEQ ID NO: 26869 - DNA, 17 bp, synthetic construct
  source 1..17: mol_type = other DNA
ggtctagccaggaagcg

SEQ ID NO: 26870 - DNA, 17 bp, synthetic construct
  source 1..17: mol_type = other DNA
aggtctagccaggaagc

SEQ ID NO: 26871 - DNA, 17 bp, synthetic construct
  source 1..17: mol_type = other DNA
caggtctagccaggaag

SEQ ID NO: 26872 - DNA, 17 bp, synthetic construct
  source 1..17: mol_type = other DNA
gcaggtctagccaggaa

SEQ ID NO: 26873 - DNA, 17 bp, synthetic construct
  source 1..17: mol_type = other DNA
cgcaggtctagccagga

SEQ ID NO: 26874 - DNA, 17 bp, synthetic construct
  source 1..17: mol_type = other DNA
acgtcagccggggtgcg

SEQ ID NO: 26875 - DNA, 17 bp, synthetic construct
  source 1..17: mol_type = other DNA
ttgcacgtcagccgggg

SEQ ID NO: 26876 - DNA, 17 bp, synthetic construct
  source 1..17: mol_type = other DNA
cttgcacgtcagccggg

SEQ ID NO: 26877 - DNA, 17 bp, synthetic construct
  source 1..17: mol_type = other DNA
ccttgcacgtcagccgg

SEQ ID NO: 26878 - DNA, 17 bp, synthetic construct
  source 1..17: mol_type = other DNA
cccttgcacgtcagccg

SEQ ID NO: 26879 - DNA, 17 bp, synthetic construct
  source 1..17: mol_type = other DNA
ctcccttgcacgtcagc

SEQ ID NO: 26880 - DNA, 17 bp, synthetic construct
  source 1..17: mol_type = other DNA
gctcccttgcacgtcag

SEQ ID NO: 26881 - DNA, 17 bp, synthetic construct
  source 1..17: mol_type = other DNA
agctcccttgcacgtca

SEQ ID NO: 26882 - DNA, 17 bp, synthetic construct
  source 1..17: mol_type = other DNA
gagctcccttgcacgtc

SEQ ID NO: 26883 - DNA, 17 bp, synthetic construct
  source 1..17: mol_type = other DNA
cgagctcccttgcacgt

SEQ ID NO: 26884 - DNA, 17 bp, synthetic construct
  source 1..17: mol_type = other DNA
gcgagctcccttgcacg

SEQ ID NO: 26885 - DNA, 17 bp, synthetic construct
  source 1..17: mol_type = other DNA
agcgagctcccttgcac

SEQ ID NO: 26886 - DNA, 17 bp, synthetic construct
  source 1..17: mol_type = other DNA
cagcgagctcccttgca

SEQ ID NO: 26887 - DNA, 17 bp, synthetic construct
  source 1..17: mol_type = other DNA
gagaggccagcgagctc

SEQ ID NO: 26888 - DNA, 17 bp, synthetic construct
  source 1..17: mol_type = other DNA
agagaggccagcgagct

SEQ ID NO: 26889 - DNA, 17 bp, synthetic construct
  source 1..17: mol_type = other DNA
cagagaggccagcgagc

SEQ ID NO: 26890 - DNA, 17 bp, synthetic construct
  source 1..17: mol_type = other DNA
acagagaggccagcgag

SEQ ID NO: 26891 - DNA, 17 bp, synthetic construct
  source 1..17: mol_type = other DNA
cacagagaggccagcga

SEQ ID NO: 26892 - DNA, 17 bp, synthetic construct
  source 1..17: mol_type = other DNA
gcacagagaggccagcg

SEQ ID NO: 26893 - DNA, 17 bp, synthetic construct
  source 1..17: mol_type = other DNA
ggcacagagaggccagc

SEQ ID NO: 26894 - DNA, 17 bp, synthetic construct
  source 1..17: mol_type = other DNA
gggcacagagaggccag

SEQ ID NO: 26895 - DNA, 17 bp, synthetic construct
  source 1..17: mol_type = other DNA
agggcacagagaggcca

SEQ ID NO: 26896 - DNA, 17 bp, synthetic construct
  source 1..17: mol_type = other DNA
aagggcacagagaggcc

SEQ ID NO: 26897 - DNA, 17 bp, synthetic construct
  source 1..17: mol_type = other DNA
caagggcacagagaggc

SEQ ID NO: 26898 - DNA, 17 bp, synthetic construct
  source 1..17: mol_type = other DNA
acaagggcacagagagg

SEQ ID NO: 26899 - DNA, 17 bp, synthetic construct
  source 1..17: mol_type = other DNA
aacaagggcacagagag

SEQ ID NO: 26900 - DNA, 17 bp, synthetic construct
  source 1..17: mol_type = other DNA
agccagaatttcacgga

SEQ ID NO: 26901 - DNA, 17 bp, synthetic construct
  source 1..17: mol_type = other DNA
cagccagaatttcacgg

SEQ ID NO: 26902 - DNA, 17 bp, synthetic construct
  source 1..17: mol_type = other DNA
tcagccagaatttcacg

SEQ ID NO: 26903 - DNA, 17 bp, synthetic construct
  source 1..17: mol_type = other DNA
ttcagccagaatttcac

SEQ ID NO: 26904 - DNA, 17 bp, synthetic construct
  source 1..17: mol_type = other DNA
attcagccagaatttca

SEQ ID NO: 26905 - DNA, 17 bp, synthetic construct
  source 1..17: mol_type = other DNA
cattcagccagaatttc

SEQ ID NO: 26906 - DNA, 17 bp, synthetic construct
  source 1..17: mol_type = other DNA
acattcagccagaattt

SEQ ID NO: 26907 - DNA, 17 bp, synthetic construct
  source 1..17: mol_type = other DNA
gacattcagccagaatt

SEQ ID NO: 26908 - DNA, 17 bp, synthetic construct
  source 1..17: mol_type = other DNA
agacattcagccagaat

SEQ ID NO: 26909 - DNA, 17 bp, synthetic construct
  source 1..17: mol_type = other DNA
gagacattcagccagaa

SEQ ID NO: 26910 - DNA, 17 bp, synthetic construct
  source 1..17: mol_type = other DNA
ggagacattcagccaga

SEQ ID NO: 26911 - DNA, 17 bp, synthetic construct
  source 1..17: mol_type = other DNA
gggagacattcagccag

SEQ ID NO: 26912 - DNA, 17 bp, synthetic construct
  source 1..17: mol_type = other DNA
ggggagacattcagcca

SEQ ID NO: 26913 - DNA, 17 bp, synthetic construct
  source 1..17: mol_type = other DNA
gggggagacattcagcc

SEQ ID NO: 26914 - DNA, 17 bp, synthetic construct
  source 1..17: mol_type = other DNA
ggggggagacattcagc

SEQ ID NO: 26915 - DNA, 17 bp, synthetic construct
  source 1..17: mol_type = other DNA
tggggggagacattcag

SEQ ID NO: 26916 - DNA, 17 bp, synthetic construct
  source 1..17: mol_type = other DNA
gtggggggagacattca

SEQ ID NO: 26917 - DNA, 17 bp, synthetic construct
  source 1..17: mol_type = other DNA
ggtggggggagacattc

SEQ ID NO: 26918 - DNA, 17 bp, synthetic construct
  source 1..17: mol_type = other DNA
aggtggggggagacatt

SEQ ID NO: 26919 - DNA, 17 bp, synthetic construct
  source 1..17: mol_type = other DNA
aaggtggggggagacat

SEQ ID NO: 26920 - DNA, 17 bp, synthetic construct
  source 1..17: mol_type = other DNA
gaaggtggggggagaca

SEQ ID NO: 26921 - DNA, 17 bp, synthetic construct
  source 1..17: mol_type = other DNA
ggaaggtggggggagac

SEQ ID NO: 26922 - DNA, 17 bp, synthetic construct
  source 1..17: mol_type = other DNA
cggaaggtggggggaga

SEQ ID NO: 26923 - DNA, 17 bp, synthetic construct
  source 1..17: mol_type = other DNA
tcggaaggtggggggag

SEQ ID NO: 26924 - DNA, 17 bp, synthetic construct
  source 1..17: mol_type = other DNA
gtcggaaggtgggggga

SEQ ID NO: 26925 - DNA, 17 bp, synthetic construct
  source 1..17: mol_type = other DNA
cgtcggaaggtgggggg

SEQ ID NO: 26926 - DNA, 17 bp, synthetic construct
  source 1..17: mol_type = other DNA
gcgtcggaaggtggggg

SEQ ID NO: 26927 - DNA, 17 bp, synthetic construct
  source 1..17: mol_type = other DNA
agcgtcggaaggtgggg

SEQ ID NO: 26928 - DNA, 17 bp, synthetic construct
  source 1..17: mol_type = other DNA
cagcgtcggaaggtggg

SEQ ID NO: 26929 - DNA, 17 bp, synthetic construct
  source 1..17: mol_type = other DNA
acagcgtcggaaggtgg

SEQ ID NO: 26930 - DNA, 17 bp, synthetic construct
  source 1..17: mol_type = other DNA
gacagcgtcggaaggtg

SEQ ID NO: 26931 - DNA, 17 bp, synthetic construct
  source 1..17: mol_type = other DNA
agacagcgtcggaaggt

SEQ ID NO: 26932 - DNA, 17 bp, synthetic construct
  source 1..17: mol_type = other DNA
tagacagcgtcggaagg

SEQ ID NO: 26933 - DNA, 17 bp, synthetic construct
  source 1..17: mol_type = other DNA
ctagacagcgtcggaag

SEQ ID NO: 26934 - DNA, 17 bp, synthetic construct
  source 1..17: mol_type = other DNA
cctagacagcgtcggaa

SEQ ID NO: 26935 - DNA, 17 bp, synthetic construct
  source 1..17: mol_type = other DNA
gcctagacagcgtcgga

SEQ ID NO: 26936 - DNA, 17 bp, synthetic construct
  source 1..17: mol_type = other DNA
tgcctagacagcgtcgg

SEQ ID NO: 26937 - DNA, 17 bp, synthetic construct
  source 1..17: mol_type = other DNA
ttgcctagacagcgtcg

SEQ ID NO: 26938 - DNA, 17 bp, synthetic construct
  source 1..17: mol_type = other DNA
tttgcctagacagcgtc

SEQ ID NO: 26939 - DNA, 17 bp, synthetic construct
  source 1..17: mol_type = other DNA
gtttgcctagacagcgt

SEQ ID NO: 26940 - DNA, 17 bp, synthetic construct
  source 1..17: mol_type = other DNA
ggtttgcctagacagcg

SEQ ID NO: 26941 - DNA, 17 bp, synthetic construct
  source 1..17: mol_type = other DNA
aggtttgcctagacagc

SEQ ID NO: 26942 - DNA, 17 bp, synthetic construct
  source 1..17: mol_type = other DNA
caggtttgcctagacag

SEQ ID NO: 26943 - DNA, 17 bp, synthetic construct
  source 1..17: mol_type = other DNA
ccaggtttgcctagaca

SEQ ID NO: 26944 - DNA, 17 bp, synthetic construct
  source 1..17: mol_type = other DNA
tccaggtttgcctagac

SEQ ID NO: 26945 - DNA, 17 bp, synthetic construct
  source 1..17: mol_type = other DNA
atccaggtttgcctaga

SEQ ID NO: 26946 - DNA, 17 bp, synthetic construct
  source 1..17: mol_type = other DNA
aatccaggtttgcctag

SEQ ID NO: 26947 - DNA, 17 bp, synthetic construct
  source 1..17: mol_type = other DNA
taatccaggtttgccta

SEQ ID NO: 26948 - DNA, 17 bp, synthetic construct
  source 1..17: mol_type = other DNA
ctaatccaggtttgcct

SEQ ID NO: 26949 - DNA, 17 bp, synthetic construct
  source 1..17: mol_type = other DNA
tctaatccaggtttgcc

SEQ ID NO: 26950 - DNA, 17 bp, synthetic construct
  source 1..17: mol_type = other DNA
ctctaatccaggtttgc

SEQ ID NO: 26951 - DNA, 17 bp, synthetic construct
  source 1..17: mol_type = other DNA
actctaatccaggtttg

SEQ ID NO: 26952 - DNA, 17 bp, synthetic construct
  source 1..17: mol_type = other DNA
aactctaatccaggttt

SEQ ID NO: 26953 - DNA, 17 bp, synthetic construct
  source 1..17: mol_type = other DNA
gtaactctaatccaggt

SEQ ID NO: 26954 - DNA, 17 bp, synthetic construct
  source 1..17: mol_type = other DNA
ccaggagatgtaactct

SEQ ID NO: 26955 - DNA, 17 bp, synthetic construct
  source 1..17: mol_type = other DNA
tccaggagatgtaactc

SEQ ID NO: 26956 - DNA, 17 bp, synthetic construct
  source 1..17: mol_type = other DNA
atccaggagatgtaact

SEQ ID NO: 26957 - DNA, 17 bp, synthetic construct
  source 1..17: mol_type = other DNA
catccaggagatgtaac

SEQ ID NO: 26958 - DNA, 17 bp, synthetic construct
  source 1..17: mol_type = other DNA
tcatccaggagatgtaa

SEQ ID NO: 26959 - DNA, 17 bp, synthetic construct
  source 1..17: mol_type = other DNA
atcatccaggagatgta

SEQ ID NO: 26960 - DNA, 17 bp, synthetic construct
  source 1..17: mol_type = other DNA
aatcatccaggagatgt

SEQ ID NO: 26961 - DNA, 17 bp, synthetic construct
  source 1..17: mol_type = other DNA
ctaatcatccaggagat

SEQ ID NO: 26962 - DNA, 17 bp, synthetic construct
  source 1..17: mol_type = other DNA
actaatcatccaggaga

SEQ ID NO: 26963 - DNA, 17 bp, synthetic construct
  source 1..17: mol_type = other DNA
cagggagggggcatttt

SEQ ID NO: 26964 - DNA, 17 bp, synthetic construct
  source 1..17: mol_type = other DNA
acagggagggggcattt

SEQ ID NO: 26965 - DNA, 17 bp, synthetic construct
  source 1..17: mol_type = other DNA
cacagggagggggcatt

SEQ ID NO: 26966 - DNA, 17 bp, synthetic construct
  source 1..17: mol_type = other DNA
ccacagggagggggcat

SEQ ID NO: 26967 - DNA, 17 bp, synthetic construct
  source 1..17: mol_type = other DNA
atccacagggagggggc

SEQ ID NO: 26968 - DNA, 17 bp, synthetic construct
  source 1..17: mol_type = other DNA
gatccacagggaggggg

SEQ ID NO: 26969 - DNA, 17 bp, synthetic construct
  source 1..17: mol_type = other DNA
ggatccacagggagggg

SEQ ID NO: 26970 - DNA, 17 bp, synthetic construct
  source 1..17: mol_type = other DNA
aggatccacagggaggg

SEQ ID NO: 26971 - DNA, 17 bp, synthetic construct
  source 1..17: mol_type = other DNA
taggatccacagggagg

SEQ ID NO: 26972 - DNA, 17 bp, synthetic construct
  source 1..17: mol_type = other DNA
ataggatccacagggag

SEQ ID NO: 26973 - DNA, 17 bp, synthetic construct
  source 1..17: mol_type = other DNA
tataggatccacaggga

SEQ ID NO: 26974 - DNA, 17 bp, synthetic construct
  source 1..17: mol_type = other DNA
ctataggatccacaggg

SEQ ID NO: 26975 - DNA, 17 bp, synthetic construct
  source 1..17: mol_type = other DNA
tctataggatccacagg

SEQ ID NO: 26976 - DNA, 17 bp, synthetic construct
  source 1..17: mol_type = other DNA
ttctataggatccacag

SEQ ID NO: 26977 - DNA, 17 bp, synthetic construct
  source 1..17: mol_type = other DNA
cttctataggatccaca

SEQ ID NO: 26978 - DNA, 17 bp, synthetic construct
  source 1..17: mol_type = other DNA
tcttctataggatccac

SEQ ID NO: 26979 - DNA, 17 bp, synthetic construct
  source 1..17: mol_type = other DNA
atcttctataggatcca

SEQ ID NO: 26980 - DNA, 17 bp, synthetic construct
  source 1..17: mol_type = other DNA
ctgcactcatcacacaa

SEQ ID NO: 26981 - DNA, 17 bp, synthetic construct
  source 1..17: mol_type = other DNA
tctgcactcatcacaca

SEQ ID NO: 26982 - DNA, 17 bp, synthetic construct
  source 1..17: mol_type = other DNA
ctctgcactcatcacac

SEQ ID NO: 26983 - DNA, 17 bp, synthetic construct
  source 1..17: mol_type = other DNA
tctctgcactcatcaca

SEQ ID NO: 26984 - DNA, 17 bp, synthetic construct
  source 1..17: mol_type = other DNA
atctctgcactcatcac

SEQ ID NO: 26985 - DNA, 17 bp, synthetic construct
  source 1..17: mol_type = other DNA
tatctctgcactcatca

SEQ ID NO: 26986 - DNA, 17 bp, synthetic construct
  source 1..17: mol_type = other DNA
atatctctgcactcatc

SEQ ID NO: 26987 - DNA, 17 bp, synthetic construct
  source 1..17: mol_type = other DNA
catatctctgcactcat

SEQ ID NO: 26988 - DNA, 17 bp, synthetic construct
  source 1..17: mol_type = other DNA
acatatctctgcactca

SEQ ID NO: 26989 - DNA, 17 bp, synthetic construct
  source 1..17: mol_type = other DNA
gacatatctctgcactc

SEQ ID NO: 26990 - DNA, 17 bp, synthetic construct
  source 1..17: mol_type = other DNA
tgacatatctctgcact

SEQ ID NO: 26991 - DNA, 17 bp, synthetic construct
  source 1..17: mol_type = other DNA
gtgacatatctctgcac

SEQ ID NO: 26992 - DNA, 17 bp, synthetic construct
  source 1..17: mol_type = other DNA
tgtgacatatctctgca

SEQ ID NO: 26993 - DNA, 17 bp, synthetic construct
  source 1..17: mol_type = other DNA
ttgtgacatatctctgc

SEQ ID NO: 26994 - DNA, 17 bp, synthetic construct
  source 1..17: mol_type = other DNA
ggggatattgtgacata

SEQ ID NO: 26995 - DNA, 17 bp, synthetic construct
  source 1..17: mol_type = other DNA
aggggatattgtgacat

SEQ ID NO: 26996 - DNA, 17 bp, synthetic construct
  source 1..17: mol_type = other DNA
caggggatattgtgaca

SEQ ID NO: 26997 - DNA, 17 bp, synthetic construct
  source 1..17: mol_type = other DNA
acaggggatattgtgac

SEQ ID NO: 26998 - DNA, 17 bp, synthetic construct
  source 1..17: mol_type = other DNA
tacaggggatattgtga

SEQ ID NO: 26999 - DNA, 17 bp, synthetic construct
  source 1..17: mol_type = other DNA
ctacaggggatattgtg

SEQ ID NO: 27000 - DNA, 17 bp, synthetic construct
  source 1..17: mol_type = other DNA
tctacaggggatattgt

SEQ ID NO: 27001 - DNA, 17 bp, synthetic construct
  source 1..17: mol_type = other DNA
tttctacaggggatatt

SEQ ID NO: 27002 - DNA, 17 bp, synthetic construct
  source 1..17: mol_type = other DNA
ttttctacaggggatat

SEQ ID NO: 27003 - DNA, 17 bp, synthetic construct
  source 1..17: mol_type = other DNA
tttttctacaggggata

SEQ ID NO: 27004 - DNA, 17 bp, synthetic construct
  source 1..17: mol_type = other DNA
ctttttctacaggggat

SEQ ID NO: 27005 - DNA, 17 bp, synthetic construct
  source 1..17: mol_type = other DNA
gctttttctacagggga

SEQ ID NO: 27006 - DNA, 17 bp, synthetic construct
  source 1..17: mol_type = other DNA
ggctttttctacagggg

SEQ ID NO: 27007 - DNA, 17 bp, synthetic construct
  source 1..17: mol_type = other DNA
aggctttttctacaggg

SEQ ID NO: 27008 - DNA, 17 bp, synthetic construct
  source 1..17: mol_type = other DNA
caggctttttctacagg

SEQ ID NO: 27009 - DNA, 17 bp, synthetic construct
  source 1..17: mol_type = other DNA
tcaggctttttctacag

SEQ ID NO: 27010 - DNA, 17 bp, synthetic construct
  source 1..17: mol_type = other DNA
ttcaggctttttctaca

SEQ ID NO: 27011 - DNA, 17 bp, synthetic construct
  source 1..17: mol_type = other DNA
tttcaggctttttctac

SEQ ID NO: 27012 - DNA, 17 bp, synthetic construct
  source 1..17: mol_type = other DNA
atttcaggctttttcta

SEQ ID NO: 27013 - DNA, 17 bp, synthetic construct
  source 1..17: mol_type = other DNA
aatttcaggctttttct

SEQ ID NO: 27014 - DNA, 17 bp, synthetic construct
  source 1..17: mol_type = other DNA
cactgatcaccgaagtt

SEQ ID NO: 27015 - DNA, 17 bp, synthetic construct
  source 1..17: mol_type = other DNA
gcactgatcaccgaagt

SEQ ID NO: 27016 - DNA, 17 bp, synthetic construct
  source 1..17: mol_type = other DNA
tgcactgatcaccgaag

SEQ ID NO: 27017 - DNA, 17 bp, synthetic construct
  source 1..17: mol_type = other DNA
ctgcactgatcaccgaa

SEQ ID NO: 27018 - DNA, 17 bp, synthetic construct
  source 1..17: mol_type = other DNA
tctgcactgatcaccga

SEQ ID NO: 27019 - DNA, 17 bp, synthetic construct
  source 1..17: mol_type = other DNA
atctgcactgatcaccg

SEQ ID NO: 27020 - DNA, 17 bp, synthetic construct
  source 1..17: mol_type = other DNA
catctgcactgatcacc

SEQ ID NO: 27021 - DNA, 17 bp, synthetic construct
  source 1..17: mol_type = other DNA
acatctgcactgatcac

SEQ ID NO: 27022 - DNA, 17 bp, synthetic construct
  source 1..17: mol_type = other DNA
cacatctgcactgatca

SEQ ID NO: 27023 - DNA, 17 bp, synthetic construct
  source 1..17: mol_type = other DNA
acacatctgcactgatc

SEQ ID NO: 27024 - DNA, 17 bp, synthetic construct
  source 1..17: mol_type = other DNA
aacacatctgcactgat

SEQ ID NO: 27025 - DNA, 17 bp, synthetic construct
  source 1..17: mol_type = other DNA
ctactatggagttctga

SEQ ID NO: 27026 - DNA, 17 bp, synthetic construct
  source 1..17: mol_type = other DNA
tctactatggagttctg

SEQ ID NO: 27027 - DNA, 17 bp, synthetic construct
  source 1..17: mol_type = other DNA
gtctactatggagttct

SEQ ID NO: 27028 - DNA, 17 bp, synthetic construct
  source 1..17: mol_type = other DNA
agtctactatggagttc

SEQ ID NO: 27029 - DNA, 17 bp, synthetic construct
  source 1..17: mol_type = other DNA
cagtctactatggagtt

SEQ ID NO: 27030 - DNA, 17 bp, synthetic construct
  source 1..17: mol_type = other DNA
tcagtctactatggagt

SEQ ID NO: 27031 - DNA, 17 bp, synthetic construct
  source 1..17: mol_type = other DNA
ttcagtctactatggag

SEQ ID NO: 27032 - DNA, 17 bp, synthetic construct
  source 1..17: mol_type = other DNA
gttcagtctactatgga

SEQ ID NO: 27033 - DNA, 17 bp, synthetic construct
  source 1..17: mol_type = other DNA
ggttcagtctactatgg

SEQ ID NO: 27034 - DNA, 17 bp, synthetic construct
  source 1..17: mol_type = other DNA
aggttcagtctactatg

SEQ ID NO: 27035 - DNA, 17 bp, synthetic construct
  source 1..17: mol_type = other DNA
taggttcagtctactat

SEQ ID NO: 27036 - DNA, 17 bp, synthetic construct
  source 1..17: mol_type = other DNA
ctaggttcagtctacta

SEQ ID NO: 27037 - DNA, 17 bp, synthetic construct
  source 1..17: mol_type = other DNA
tctaggttcagtctact

SEQ ID NO: 27038 - DNA, 17 bp, synthetic construct
  source 1..17: mol_type = other DNA
ctctaggttcagtctac

SEQ ID NO: 27039 - DNA, 17 bp, synthetic construct
  source 1..17: mol_type = other DNA
tctctaggttcagtcta

SEQ ID NO: 27040 - DNA, 17 bp, synthetic construct
  source 1..17: mol_type = other DNA
ttctctaggttcagtct

SEQ ID NO: 27041 - DNA, 17 bp, synthetic construct
  source 1..17: mol_type = other DNA
attctctaggttcagtc

SEQ ID NO: 27042 - DNA, 17 bp, synthetic construct
  source 1..17: mol_type = other DNA
cattctctaggttcagt

SEQ ID NO: 27043 - DNA, 17 bp, synthetic construct
  source 1..17: mol_type = other DNA
ccattctctaggttcag

SEQ ID NO: 27044 - DNA, 17 bp, synthetic construct
  source 1..17: mol_type = other DNA
accattctctaggttca

SEQ ID NO: 27045 - DNA, 17 bp, synthetic construct
  source 1..17: mol_type = other DNA
aaccattctctaggttc

SEQ ID NO: 27046 - DNA, 17 bp, synthetic construct
  source 1..17: mol_type = other DNA
taaccattctctaggtt

SEQ ID NO: 27047 - DNA, 17 bp, synthetic construct
  source 1..17: mol_type = other DNA
gtaaccattctctaggt

SEQ ID NO: 27048 - DNA, 17 bp, synthetic construct
  source 1..17: mol_type = other DNA
tgtaaccattctctagg

SEQ ID NO: 27049 - DNA, 17 bp, synthetic construct
  source 1..17: mol_type = other DNA
tgatgtaaccattctct

SEQ ID NO: 27050 - DNA, 17 bp, synthetic construct
  source 1..17: mol_type = other DNA
gtgatgtaaccattctc

SEQ ID NO: 27051 - DNA, 17 bp, synthetic construct
  source 1..17: mol_type = other DNA
agtgatgtaaccattct

SEQ ID NO: 27052 - DNA, 17 bp, synthetic construct
  source 1..17: mol_type = other DNA
cctaagtgatgtaacca

SEQ ID NO: 27053 - DNA, 17 bp, synthetic construct
  source 1..17: mol_type = other DNA
gatcacctaagtgatgt

SEQ ID NO: 27054 - DNA, 17 bp, synthetic construct
  source 1..17: mol_type = other DNA
ctgatcacctaagtgat

SEQ ID NO: 27055 - DNA, 17 bp, synthetic construct
  source 1..17: mol_type = other DNA
actgatcacctaagtga

SEQ ID NO: 27056 - DNA, 17 bp, synthetic construct
  source 1..17: mol_type = other DNA
cactgatcacctaagtg

SEQ ID NO: 27057 - DNA, 17 bp, synthetic construct
  source 1..17: mol_type = other DNA
acactgatcacctaagt

SEQ ID NO: 27058 - DNA, 17 bp, synthetic construct
  source 1..17: mol_type = other DNA
tctacactgatcaccta

SEQ ID NO: 27059 - DNA, 17 bp, synthetic construct
  source 1..17: mol_type = other DNA
ctctacactgatcacct

SEQ ID NO: 27060 - DNA, 17 bp, synthetic construct
  source 1..17: mol_type = other DNA
tctctacactgatcacc

SEQ ID NO: 27061 - DNA, 17 bp, synthetic construct
  source 1..17: mol_type = other DNA
atctctacactgatcac

SEQ ID NO: 27062 - DNA, 17 bp, synthetic construct
  source 1..17: mol_type = other DNA
ctctgtctacacgagaa

SEQ ID NO: 27063 - DNA, 17 bp, synthetic construct
  source 1..17: mol_type = other DNA
gctctgtctacacgaga

SEQ ID NO: 27064 - DNA, 17 bp, synthetic construct
  source 1..17: mol_type = other DNA
ggctctgtctacacgag

SEQ ID NO: 27065 - DNA, 17 bp, synthetic construct
  source 1..17: mol_type = other DNA
aggctctgtctacacga

SEQ ID NO: 27066 - DNA, 17 bp, synthetic construct
  source 1..17: mol_type = other DNA
taggctctgtctacacg

SEQ ID NO: 27067 - DNA, 17 bp, synthetic construct
  source 1..17: mol_type = other DNA
ctaggctctgtctacac

SEQ ID NO: 27068 - DNA, 17 bp, synthetic construct
  source 1..17: mol_type = other DNA
tctaggctctgtctaca

SEQ ID NO: 27069 - DNA, 17 bp, synthetic construct
  source 1..17: mol_type = other DNA
gtctaggctctgtctac

SEQ ID NO: 27070 - DNA, 17 bp, synthetic construct
  source 1..17: mol_type = other DNA
tgtctaggctctgtcta

SEQ ID NO: 27071 - DNA, 17 bp, synthetic construct
  source 1..17: mol_type = other DNA
ttgtctaggctctgtct

SEQ ID NO: 27072 - DNA, 17 bp, synthetic construct
  source 1..17: mol_type = other DNA
attgtctaggctctgtc

SEQ ID NO: 27073 - DNA, 17 bp, synthetic construct
  source 1..17: mol_type = other DNA
aattgtctaggctctgt

SEQ ID NO: 27074 - DNA, 17 bp, synthetic construct
  source 1..17: mol_type = other DNA
caattgtctaggctctg

SEQ ID NO: 27075 - DNA, 17 bp, synthetic construct
  source 1..17: mol_type = other DNA
acaattgtctaggctct

SEQ ID NO: 27076 - DNA, 17 bp, synthetic construct
  source 1..17: mol_type = other DNA
aacaattgtctaggctc

SEQ ID NO: 27077 - DNA, 17 bp, synthetic construct
  source 1..17: mol_type = other DNA
gatcactaggtgatgta

SEQ ID NO: 27078 - DNA, 17 bp, synthetic construct
  source 1..17: mol_type = other DNA
tgatcactaggtgatgt

SEQ ID NO: 27079 - DNA, 17 bp, synthetic construct
  source 1..17: mol_type = other DNA
ctgatcactaggtgatg

SEQ ID NO: 27080 - DNA, 17 bp, synthetic construct
  source 1..17: mol_type = other DNA
actgatcactaggtgat

SEQ ID NO: 27081 - DNA, 17 bp, synthetic construct
  source 1..17: mol_type = other DNA
cactgatcactaggtga

SEQ ID NO: 27082 - DNA, 17 bp, synthetic construct
  source 1..17: mol_type = other DNA
gcactgatcactaggtg

SEQ ID NO: 27083 - DNA, 17 bp, synthetic construct
  source 1..17: mol_type = other DNA
tgcactgatcactaggt

SEQ ID NO: 27084 - DNA, 17 bp, synthetic construct
  source 1..17: mol_type = other DNA
ctgcactgatcactagg

SEQ ID NO: 27085 - DNA, 17 bp, synthetic construct
  source 1..17: mol_type = other DNA
cctgcactgatcactag

SEQ ID NO: 27086 - DNA, 17 bp, synthetic construct
  source 1..17: mol_type = other DNA
ccctgcactgatcacta

SEQ ID NO: 27087 - DNA, 17 bp, synthetic construct
  source 1..17: mol_type = other DNA
tccctgcactgatcact

SEQ ID NO: 27088 - DNA, 17 bp, synthetic construct
  source 1..17: mol_type = other DNA
atccctgcactgatcac

SEQ ID NO: 27089 - DNA, 17 bp, synthetic construct
  source 1..17: mol_type = other DNA
tatccctgcactgatca

SEQ ID NO: 27090 - DNA, 17 bp, synthetic construct
  source 1..17: mol_type = other DNA
ttatccctgcactgatc

SEQ ID NO: 27091 - DNA, 17 bp, synthetic construct
  source 1..17: mol_type = other DNA
cttatccctgcactgat

SEQ ID NO: 27092 - DNA, 17 bp, synthetic construct
  source 1..17: mol_type = other DNA
acttatccctgcactga

SEQ ID NO: 27093 - DNA, 17 bp, synthetic construct
  source 1..17: mol_type = other DNA
gacttatccctgcactg

SEQ ID NO: 27094 - DNA, 17 bp, synthetic construct
  source 1..17: mol_type = other DNA
tgacttatccctgcact

SEQ ID NO: 27095 - DNA, 17 bp, synthetic construct
  source 1..17: mol_type = other DNA
atgacttatccctgcac

SEQ ID NO: 27096 - DNA, 17 bp, synthetic construct
  source 1..17: mol_type = other DNA
tatgacttatccctgca

SEQ ID NO: 27097 - DNA, 17 bp, synthetic construct
  source 1..17: mol_type = other DNA
ttatgacttatccctgc

SEQ ID NO: 27098 - DNA, 17 bp, synthetic construct
  source 1..17: mol_type = other DNA
tttatgacttatccctg

SEQ ID NO: 27099 - DNA, 17 bp, synthetic construct
  source 1..17: mol_type = other DNA
ctttatgacttatccct

SEQ ID NO: 27100 - DNA, 17 bp, synthetic construct
  source 1..17: mol_type = other DNA
gctttatgacttatccc

SEQ ID NO: 27101 - DNA, 17 bp, synthetic construct
  source 1..17: mol_type = other DNA
ggctttatgacttatcc

SEQ ID NO: 27102 - DNA, 17 bp, synthetic construct
  source 1..17: mol_type = other DNA
ggaggctttatgactta

SEQ ID NO: 27103 - DNA, 17 bp, synthetic construct
  source 1..17: mol_type = other DNA
aggaggctttatgactt

SEQ ID NO: 27104 - DNA, 17 bp, synthetic construct
  source 1..17: mol_type = other DNA
caggaggctttatgact

SEQ ID NO: 27105 - DNA, 17 bp, synthetic construct
  source 1..17: mol_type = other DNA
acaggaggctttatgac

SEQ ID NO: 27106 - DNA, 17 bp, synthetic construct
  source 1..17: mol_type = other DNA
tacaggaggctttatga

SEQ ID NO: 27107 - DNA, 17 bp, synthetic construct
  source 1..17: mol_type = other DNA
ctacaggaggctttatg

SEQ ID NO: 27108 - DNA, 17 bp, synthetic construct
  source 1..17: mol_type = other DNA
cctacaggaggctttat

SEQ ID NO: 27109 - DNA, 17 bp, synthetic construct
  source 1..17: mol_type = other DNA
gcctacaggaggcttta

SEQ ID NO: 27110 - DNA, 17 bp, synthetic construct
  source 1..17: mol_type = other DNA
tgcctacaggaggcttt

SEQ ID NO: 27111 - DNA, 17 bp, synthetic construct
  source 1..17: mol_type = other DNA
ctgcctacaggaggctt

SEQ ID NO: 27112 - DNA, 17 bp, synthetic construct
  source 1..17: mol_type = other DNA
tctgcctacaggaggct

SEQ ID NO: 27113 - DNA, 17 bp, synthetic construct
  source 1..17: mol_type = other DNA
ctctgcctacaggaggc

SEQ ID NO: 27114 - DNA, 17 bp, synthetic construct
  source 1..17: mol_type = other DNA
actctgcctacaggagg

SEQ ID NO: 27115 - DNA, 17 bp, synthetic construct
  source 1..17: mol_type = other DNA
cactctgcctacaggag

SEQ ID NO: 27116 - DNA, 17 bp, synthetic construct
  source 1..17: mol_type = other DNA
acactctgcctacagga

SEQ ID NO: 27117 - DNA, 17 bp, synthetic construct
  source 1..17: mol_type = other DNA
tacactctgcctacagg

SEQ ID NO: 27118 - DNA, 17 bp, synthetic construct
  source 1..17: mol_type = other DNA
ctacactctgcctacag

SEQ ID NO: 27119 - DNA, 17 bp, synthetic construct
  source 1..17: mol_type = other DNA
cctacactctgcctaca

SEQ ID NO: 27120 - DNA, 17 bp, synthetic construct
  source 1..17: mol_type = other DNA
gcctacactctgcctac

SEQ ID NO: 27121 - DNA, 17 bp, synthetic construct
  source 1..17: mol_type = other DNA
tgcctacactctgccta

SEQ ID NO: 27122 - DNA, 17 bp, synthetic construct
  source 1..17: mol_type = other DNA
ttgcctacactctgcct

SEQ ID NO: 27123 - DNA, 17 bp, synthetic construct
  source 1..17: mol_type = other DNA
cttgcctacactctgcc

SEQ ID NO: 27124 - DNA, 17 bp, synthetic construct
  source 1..17: mol_type = other DNA
acttgcctacactctgc

SEQ ID NO: 27125 - DNA, 17 bp, synthetic construct
  source 1..17: mol_type = other DNA
cacttgcctacactctg

SEQ ID NO: 27126 - DNA, 17 bp, synthetic construct
  source 1..17: mol_type = other DNA
acacttgcctacactct

SEQ ID NO: 27127 - DNA, 17 bp, synthetic construct
  source 1..17: mol_type = other DNA
aacacttgcctacactc

SEQ ID NO: 27128 - DNA, 17 bp, synthetic construct
  source 1..17: mol_type = other DNA
gaacacttgcctacact

SEQ ID NO: 27129 - DNA, 17 bp, synthetic construct
  source 1..17: mol_type = other DNA
ggaacacttgcctacac

SEQ ID NO: 27130 - DNA, 17 bp, synthetic construct
  source 1..17: mol_type = other DNA
gggaacacttgcctaca

SEQ ID NO: 27131 - DNA, 17 bp, synthetic construct
  source 1..17: mol_type = other DNA
agggaacacttgcctac

SEQ ID NO: 27132 - DNA, 17 bp, synthetic construct
  source 1..17: mol_type = other DNA
gagggaacacttgccta

SEQ ID NO: 27133 - DNA, 17 bp, synthetic construct
  source 1..17: mol_type = other DNA
ggagggaacacttgcct

SEQ ID NO: 27134 - DNA, 17 bp, synthetic construct
  source 1..17: mol_type = other DNA
gggagggaacacttgcc

SEQ ID NO: 27135 - DNA, 17 bp, synthetic construct
  source 1..17: mol_type = other DNA
agggagggaacacttgc

SEQ ID NO: 27136 - DNA, 17 bp, synthetic construct
  source 1..17: mol_type = other DNA
cagggagggaacacttg

SEQ ID NO: 27137 - DNA, 17 bp, synthetic construct
  source 1..17: mol_type = other DNA
ccagggagggaacactt

SEQ ID NO: 27138 - DNA, 17 bp, synthetic construct
  source 1..17: mol_type = other DNA
cccagggagggaacact

SEQ ID NO: 27139 - DNA, 17 bp, synthetic construct
  source 1..17: mol_type = other DNA
gcccagggagggaacac

SEQ ID NO: 27140 - DNA, 17 bp, synthetic construct
  source 1..17: mol_type = other DNA
agcccagggagggaaca

SEQ ID NO: 27141 - DNA, 17 bp, synthetic construct
  source 1..17: mol_type = other DNA
cagcccagggagggaac

SEQ ID NO: 27142 - DNA, 17 bp, synthetic construct
  source 1..17: mol_type = other DNA
tcagcccagggagggaa

SEQ ID NO: 27143 - DNA, 17 bp, synthetic construct
  source 1..17: mol_type = other DNA
atcagcccagggaggga

SEQ ID NO: 27144 - DNA, 17 bp, synthetic construct
  source 1..17: mol_type = other DNA
gatcagcccagggaggg

SEQ ID NO: 27145 - DNA, 17 bp, synthetic construct
  source 1..17: mol_type = other DNA
tgatcagcccagggagg

SEQ ID NO: 27146 - DNA, 17 bp, synthetic construct
  source 1..17: mol_type = other DNA
ctgatcagcccagggag

SEQ ID NO: 27147 - DNA, 17 bp, synthetic construct
  source 1..17: mol_type = other DNA
actgatcagcccaggga

SEQ ID NO: 27148 - DNA, 17 bp, synthetic construct
  source 1..17: mol_type = other DNA
cactgatcagcccaggg

SEQ ID NO: 27149 - DNA, 17 bp, synthetic construct
  source 1..17: mol_type = other DNA
gcactgatcagcccagg

SEQ ID NO: 27150 - DNA, 17 bp, synthetic construct
  source 1..17: mol_type = other DNA
tgcactgatcagcccag

SEQ ID NO: 27151 - DNA, 17 bp, synthetic construct
  source 1..17: mol_type = other DNA
ctgcactgatcagccca

SEQ ID NO: 27152 - DNA, 17 bp, synthetic construct
  source 1..17: mol_type = other DNA
tctgcactgatcagccc

SEQ ID NO: 27153 - DNA, 17 bp, synthetic construct
  source 1..17: mol_type = other DNA
ctctgcactgatcagcc

SEQ ID NO: 27154 - DNA, 17 bp, synthetic construct
  source 1..17: mol_type = other DNA
tctctgcactgatcagc

SEQ ID NO: 27155 - DNA, 17 bp, synthetic construct
  source 1..17: mol_type = other DNA
atctctgcactgatcag

SEQ ID NO: 27156 - DNA, 17 bp, synthetic construct
  source 1..17: mol_type = other DNA
tatctctgcactgatca

SEQ ID NO: 27157 - DNA, 17 bp, synthetic construct
  source 1..17: mol_type = other DNA
atatctctgcactgatc

SEQ ID NO: 27158 - DNA, 17 bp, synthetic construct
  source 1..17: mol_type = other DNA
gatatctctgcactgat

SEQ ID NO: 27159 - DNA, 17 bp, synthetic construct
  source 1..17: mol_type = other DNA
agatatctctgcactga

SEQ ID NO: 27160 - DNA, 17 bp, synthetic construct
  source 1..17: mol_type = other DNA
gagatatctctgcactg

SEQ ID NO: 27161 - DNA, 17 bp, synthetic construct
  source 1..17: mol_type = other DNA
tgagatatctctgcact

SEQ ID NO: 27162 - DNA, 17 bp, synthetic construct
  source 1..17: mol_type = other DNA
gtgagatatctctgcac

SEQ ID NO: 27163 - DNA, 17 bp, synthetic construct
  source 1..17: mol_type = other DNA
tgtgagatatctctgca

SEQ ID NO: 27164 - DNA, 17 bp, synthetic construct
  source 1..17: mol_type = other DNA
ttgtgagatatctctgc

SEQ ID NO: 27165 - DNA, 17 bp, synthetic construct
  source 1..17: mol_type = other DNA
ctttgtgagatatctct

SEQ ID NO: 27166 - DNA, 17 bp, synthetic construct
  source 1..17: mol_type = other DNA
gctttgtgagatatctc

SEQ ID NO: 27167 - DNA, 17 bp, synthetic construct
  source 1..17: mol_type = other DNA
ggctttgtgagatatct

SEQ ID NO: 27168 - DNA, 17 bp, synthetic construct
  source 1..17: mol_type = other DNA
gggctttgtgagatatc

SEQ ID NO: 27169 - DNA, 17 bp, synthetic construct
  source 1..17: mol_type = other DNA
ggggctttgtgagatat

SEQ ID NO: 27170 - DNA, 17 bp, synthetic construct
  source 1..17: mol_type = other DNA
aggggctttgtgagata

SEQ ID NO: 27171 - DNA, 17 bp, synthetic construct
  source 1..17: mol_type = other DNA
taggggctttgtgagat

SEQ ID NO: 27172 - DNA, 17 bp, synthetic construct
  source 1..17: mol_type = other DNA
ataggggctttgtgaga

SEQ ID NO: 27173 - DNA, 17 bp, synthetic construct
  source 1..17: mol_type = other DNA
tataggggctttgtgag

SEQ ID NO: 27174 - DNA, 17 bp, synthetic construct
  source 1..17: mol_type = other DNA
ttataggggctttgtga

SEQ ID NO: 27175 - DNA, 17 bp, synthetic construct
  source 1..17: mol_type = other DNA
cttataggggctttgtg

SEQ ID NO: 27176 - DNA, 17 bp, synthetic construct
  source 1..17: mol_type = other DNA
gcttataggggctttgt

SEQ ID NO: 27177 - DNA, 17 bp, synthetic construct
  source 1..17: mol_type = other DNA
ggcttataggggctttg

SEQ ID NO: 27178 - DNA, 17 bp, synthetic construct
  source 1..17: mol_type = other DNA
tggcttataggggcttt

SEQ ID NO: 27179 - DNA, 17 bp, synthetic construct
  source 1..17: mol_type = other DNA
ttggcttataggggctt

SEQ ID NO: 27180 - DNA, 17 bp, synthetic construct
  source 1..17: mol_type = other DNA
tttggcttataggggct

SEQ ID NO: 27181 - DNA, 17 bp, synthetic construct
  source 1..17: mol_type = other DNA
gtttggcttataggggc

SEQ ID NO: 27182 - DNA, 17 bp, synthetic construct
  source 1..17: mol_type = other DNA
ggtttggcttatagggg

SEQ ID NO: 27183 - DNA, 17 bp, synthetic construct
  source 1..17: mol_type = other DNA
aggtttggcttataggg

SEQ ID NO: 27184 - DNA, 17 bp, synthetic construct
  source 1..17: mol_type = other DNA
aaggtttggcttatagg

SEQ ID NO: 27185 - DNA, 17 bp, synthetic construct
  source 1..17: mol_type = other DNA
tcaaggtttggcttata

SEQ ID NO: 27186 - DNA, 17 bp, synthetic construct
  source 1..17: mol_type = other DNA
gtcaaggtttggcttat

SEQ ID NO: 27187 - DNA, 17 bp, synthetic construct
  source 1..17: mol_type = other DNA
tgtcaaggtttggctta

SEQ ID NO: 27188 - DNA, 17 bp, synthetic construct
  source 1..17: mol_type = other DNA
ttgtcaaggtttggctt

SEQ ID NO: 27189 - DNA, 17 bp, synthetic construct
  source 1..17: mol_type = other DNA
cttgtcaaggtttggct

SEQ ID NO: 27190 - DNA, 17 bp, synthetic construct
  source 1..17: mol_type = other DNA
ccttgtcaaggtttggc

SEQ ID NO: 27191 - DNA, 17 bp, synthetic construct
  source 1..17: mol_type = other DNA
cccttgtcaaggtttgg

SEQ ID NO: 27192 - DNA, 17 bp, synthetic construct
  source 1..17: mol_type = other DNA
acccttgtcaaggtttg

SEQ ID NO: 27193 - DNA, 17 bp, synthetic construct
  source 1..17: mol_type = other DNA
aacccttgtcaaggttt

SEQ ID NO: 27194 - DNA, 17 bp, synthetic construct
  source 1..17: mol_type = other DNA
taacccttgtcaaggtt

SEQ ID NO: 27195 - DNA, 17 bp, synthetic construct
  source 1..17: mol_type = other DNA
gtaacccttgtcaaggt

SEQ ID NO: 27196 - DNA, 17 bp, synthetic construct
  source 1..17: mol_type = other DNA
tgtaacccttgtcaagg

SEQ ID NO: 27197 - DNA, 17 bp, synthetic construct
  source 1..17: mol_type = other DNA
atgtaacccttgtcaag

SEQ ID NO: 27198 - DNA, 17 bp, synthetic construct
  source 1..17: mol_type = other DNA
gatgtaacccttgtcaa

SEQ ID NO: 27199 - DNA, 17 bp, synthetic construct
  source 1..17: mol_type = other DNA
tgatgtaacccttgtca

SEQ ID NO: 27200 - DNA, 17 bp, synthetic construct
  source 1..17: mol_type = other DNA
gtgatgtaacccttgtc

SEQ ID NO: 27201 - DNA, 17 bp, synthetic construct
  source 1..17: mol_type = other DNA
ggtgatgtaacccttgt

SEQ ID NO: 27202 - DNA, 17 bp, synthetic construct
  source 1..17: mol_type = other DNA
aggtgatgtaacccttg

SEQ ID NO: 27203 - DNA, 17 bp, synthetic construct
  source 1..17: mol_type = other DNA
caggtgatgtaaccctt

SEQ ID NO: 27204 - DNA, 17 bp, synthetic construct
  source 1..17: mol_type = other DNA
acaggtgatgtaaccct

SEQ ID NO: 27205 - DNA, 17 bp, synthetic construct
  source 1..17: mol_type = other DNA
aacaggtgatgtaaccc

SEQ ID NO: 27206 - DNA, 17 bp, synthetic construct
  source 1..17: mol_type = other DNA
gctcaaacaggtgatgt

SEQ ID NO: 27207 - DNA, 17 bp, synthetic construct
  source 1..17: mol_type = other DNA
ctgctcaaacaggtgat

SEQ ID NO: 27208 - DNA, 17 bp, synthetic construct
  source 1..17: mol_type = other DNA
actgctcaaacaggtga

SEQ ID NO: 27209 - DNA, 17 bp, synthetic construct
  source 1..17: mol_type = other DNA
cactgctcaaacaggtg

SEQ ID NO: 27210 - DNA, 17 bp, synthetic construct
  source 1..17: mol_type = other DNA
ccactgctcaaacaggt

SEQ ID NO: 27211 - DNA, 17 bp, synthetic construct
  source 1..17: mol_type = other DNA
tccactgctcaaacagg

SEQ ID NO: 27212 - DNA, 17 bp, synthetic construct
  source 1..17: mol_type = other DNA
ttccactgctcaaacag

SEQ ID NO: 27213 - DNA, 17 bp, synthetic construct
  source 1..17: mol_type = other DNA
tttccactgctcaaaca

SEQ ID NO: 27214 - DNA, 17 bp, synthetic construct
  source 1..17: mol_type = other DNA
atttccactgctcaaac

SEQ ID NO: 27215 - DNA, 17 bp, synthetic construct
  source 1..17: mol_type = other DNA
tatttccactgctcaaa

SEQ ID NO: 27216 - DNA, 17 bp, synthetic construct
  source 1..17: mol_type = other DNA
atatttccactgctcaa

SEQ ID NO: 27217 - DNA, 17 bp, synthetic construct
  source 1..17: mol_type = other DNA
tatatttccactgctca

SEQ ID NO: 27218 - DNA, 17 bp, synthetic construct
  source 1..17: mol_type = other DNA
atatatttccactgctc

SEQ ID NO: 27219 - DNA, 17 bp, synthetic construct
  source 1..17: mol_type = other DNA
gggctttgtgatatata

SEQ ID NO: 27220 - DNA, 17 bp, synthetic construct
  source 1..17: mol_type = other DNA
ggggctttgtgatatat

SEQ ID NO: 27221 - DNA, 17 bp, synthetic construct
  source 1..17: mol_type = other DNA
gggggctttgtgatata

SEQ ID NO: 27222 - DNA, 17 bp, synthetic construct
  source 1..17: mol_type = other DNA
agggggctttgtgatat

SEQ ID NO: 27223 - DNA, 17 bp, synthetic construct
  source 1..17: mol_type = other DNA
cagggggctttgtgata

SEQ ID NO: 27224 - DNA, 17 bp, synthetic construct
  source 1..17: mol_type = other DNA
acagggggctttgtgat

SEQ ID NO: 27225 - DNA, 17 bp, synthetic construct
  source 1..17: mol_type = other DNA
tacagggggctttgtga

SEQ ID NO: 27226 - DNA, 17 bp, synthetic construct
  source 1..17: mol_type = other DNA
ctacagggggctttgtg

SEQ ID NO: 27227 - DNA, 17 bp, synthetic construct
  source 1..17: mol_type = other DNA
tctacagggggctttgt

SEQ ID NO: 27228 - DNA, 17 bp, synthetic construct
  source 1..17: mol_type = other DNA
gtctacagggggctttg

SEQ ID NO: 27229 - DNA, 17 bp, synthetic construct
  source 1..17: mol_type = other DNA
tgtctacagggggcttt

SEQ ID NO: 27230 - DNA, 17 bp, synthetic construct
  source 1..17: mol_type = other DNA
ttgtctacagggggctt

SEQ ID NO: 27231 - DNA, 17 bp, synthetic construct
  source 1..17: mol_type = other DNA
tttgtctacagggggct

SEQ ID NO: 27232 - DNA, 17 bp, synthetic construct
  source 1..17: mol_type = other DNA
ctttgtctacagggggc

SEQ ID NO: 27233 - DNA, 17 bp, synthetic construct
  source 1..17: mol_type = other DNA
gctttgtctacaggggg

SEQ ID NO: 27234 - DNA, 17 bp, synthetic construct
  source 1..17: mol_type = other DNA
ggctttgtctacagggg

SEQ ID NO: 27235 - DNA, 17 bp, synthetic construct
  source 1..17: mol_type = other DNA
gggctttgtctacaggg

SEQ ID NO: 27236 - DNA, 17 bp, synthetic construct
  source 1..17: mol_type = other DNA
tgggctttgtctacagg

SEQ ID NO: 27237 - DNA, 17 bp, synthetic construct
  source 1..17: mol_type = other DNA
ctgggctttgtctacag

SEQ ID NO: 27238 - DNA, 17 bp, synthetic construct
  source 1..17: mol_type = other DNA
tctgggctttgtctaca

SEQ ID NO: 27239 - DNA, 17 bp, synthetic construct
  source 1..17: mol_type = other DNA
gtctgggctttgtctac

SEQ ID NO: 27240 - DNA, 17 bp, synthetic construct
  source 1..17: mol_type = other DNA
tgtctgggctttgtcta

SEQ ID NO: 27241 - DNA, 17 bp, synthetic construct
  source 1..17: mol_type = other DNA
ttgtctgggctttgtct

SEQ ID NO: 27242 - DNA, 17 bp, synthetic construct
  source 1..17: mol_type = other DNA
attgtctgggctttgtc

SEQ ID NO: 27243 - DNA, 17 bp, synthetic construct
  source 1..17: mol_type = other DNA
aattgtctgggctttgt

SEQ ID NO: 27244 - DNA, 17 bp, synthetic construct
  source 1..17: mol_type = other DNA
aaattgtctgggctttg

SEQ ID NO: 27245 - DNA, 17 bp, synthetic construct
  source 1..17: mol_type = other DNA
ctcactcaggagatgta

SEQ ID NO: 27246 - DNA, 17 bp, synthetic construct
  source 1..17: mol_type = other DNA
gctcactcaggagatgt

SEQ ID NO: 27247 - DNA, 17 bp, synthetic construct
  source 1..17: mol_type = other DNA
tgctcactcaggagatg

SEQ ID NO: 27248 - DNA, 17 bp, synthetic construct
  source 1..17: mol_type = other DNA
atgctcactcaggagat

SEQ ID NO: 27249 - DNA, 17 bp, synthetic construct
  source 1..17: mol_type = other DNA
aatgctcactcaggaga

SEQ ID NO: 27250 - DNA, 17 bp, synthetic construct
  source 1..17: mol_type = other DNA
caatgctcactcaggag

SEQ ID NO: 27251 - DNA, 17 bp, synthetic construct
  source 1..17: mol_type = other DNA
ccaatgctcactcagga

SEQ ID NO: 27252 - DNA, 17 bp, synthetic construct
  source 1..17: mol_type = other DNA
tccaatgctcactcagg

SEQ ID NO: 27253 - DNA, 17 bp, synthetic construct
  source 1..17: mol_type = other DNA
ctccaatgctcactcag

SEQ ID NO: 27254 - DNA, 17 bp, synthetic construct
  source 1..17: mol_type = other DNA
tctccaatgctcactca

SEQ ID NO: 27255 - DNA, 17 bp, synthetic construct
  source 1..17: mol_type = other DNA
ctctccaatgctcactc

SEQ ID NO: 27256 - DNA, 17 bp, synthetic construct
  source 1..17: mol_type = other DNA
tctctccaatgctcact

SEQ ID NO: 27257 - DNA, 17 bp, synthetic construct
  source 1..17: mol_type = other DNA
atctctccaatgctcac

SEQ ID NO: 27258 - DNA, 17 bp, synthetic construct
  source 1..17: mol_type = other DNA
gatctctccaatgctca

SEQ ID NO: 27259 - DNA, 17 bp, synthetic construct
  source 1..17: mol_type = other DNA
agatctctccaatgctc

SEQ ID NO: 27260 - DNA, 17 bp, synthetic construct
  source 1..17: mol_type = other DNA
cagatctctccaatgct

SEQ ID NO: 27261 - DNA, 17 bp, synthetic construct
  source 1..17: mol_type = other DNA
acagatctctccaatgc

SEQ ID NO: 27262 - DNA, 17 bp, synthetic construct
  source 1..17: mol_type = other DNA
gacagatctctccaatg

SEQ ID NO: 27263 - DNA, 17 bp, synthetic construct
  source 1..17: mol_type = other DNA
tgacagatctctccaat

SEQ ID NO: 27264 - DNA, 17 bp, synthetic construct
  source 1..17: mol_type = other DNA
gtgacagatctctccaa

SEQ ID NO: 27265 - DNA, 17 bp, synthetic construct
  source 1..17: mol_type = other DNA
tgtgacagatctctcca

SEQ ID NO: 27266 - DNA, 17 bp, synthetic construct
  source 1..17: mol_type = other DNA
ttgtgacagatctctcc

SEQ ID NO: 27267 - DNA, 17 bp, synthetic construct
  source 1..17: mol_type = other DNA
attgtgacagatctctc

SEQ ID NO: 27268 - DNA, 17 bp, synthetic construct
  source 1..17: mol_type = other DNA
cattgtgacagatctct

SEQ ID NO: 27269 - DNA, 17 bp, synthetic construct
  source 1..17: mol_type = other DNA
gcattgtgacagatctc

SEQ ID NO: 27270 - DNA, 17 bp, synthetic construct
  source 1..17: mol_type = other DNA
ggcattgtgacagatct

SEQ ID NO: 27271 - DNA, 17 bp, synthetic construct
  source 1..17: mol_type = other DNA
gggcattgtgacagatc

SEQ ID NO: 27272 - DNA, 17 bp, synthetic construct
  source 1..17: mol_type = other DNA
ggggcattgtgacagat

SEQ ID NO: 27273 - DNA, 17 bp, synthetic construct
  source 1..17: mol_type = other DNA
aggggcattgtgacaga

SEQ ID NO: 27274 - DNA, 17 bp, synthetic construct
  source 1..17: mol_type = other DNA
caggggcattgtgacag

SEQ ID NO: 27275 - DNA, 17 bp, synthetic construct
  source 1..17: mol_type = other DNA
acaggggcattgtgaca

SEQ ID NO: 27276 - DNA, 17 bp, synthetic construct
  source 1..17: mol_type = other DNA
tacaggggcattgtgac

SEQ ID NO: 27277 - DNA, 17 bp, synthetic construct
  source 1..17: mol_type = other DNA
ctacaggggcattgtga

SEQ ID NO: 27278 - DNA, 17 bp, synthetic construct
  source 1..17: mol_type = other DNA
cctacaggggcattgtg

SEQ ID NO: 27279 - DNA, 17 bp, synthetic construct
  source 1..17: mol_type = other DNA
gcctacaggggcattgt

SEQ ID NO: 27280 - DNA, 17 bp, synthetic construct
  source 1..17: mol_type = other DNA
tgcctacaggggcattg

SEQ ID NO: 27281 - DNA, 17 bp, synthetic construct
  source 1..17: mol_type = other DNA
ctgcctacaggggcatt

SEQ ID NO: 27282 - DNA, 17 bp, synthetic construct
  source 1..17: mol_type = other DNA
tctgcctacaggggcat

SEQ ID NO: 27283 - DNA, 17 bp, synthetic construct
  source 1..17: mol_type = other DNA
ctctgcctacaggggca

SEQ ID NO: 27284 - DNA, 17 bp, synthetic construct
  source 1..17: mol_type = other DNA
agctctgcctacagggg

SEQ ID NO: 27285 - DNA, 17 bp, synthetic construct
  source 1..17: mol_type = other DNA
aagctctgcctacaggg

SEQ ID NO: 27286 - DNA, 17 bp, synthetic construct
  source 1..17: mol_type = other DNA
taagctctgcctacagg

SEQ ID NO: 27287 - DNA, 17 bp, synthetic construct
  source 1..17: mol_type = other DNA
ctaagctctgcctacag

SEQ ID NO: 27288 - DNA, 17 bp, synthetic construct
  source 1..17: mol_type = other DNA
tctaagctctgcctaca

SEQ ID NO: 27289 - DNA, 17 bp, synthetic construct
  source 1..17: mol_type = other DNA
gtctaagctctgcctac

SEQ ID NO: 27290 - DNA, 17 bp, synthetic construct
  source 1..17: mol_type = other DNA
tgtctaagctctgccta

SEQ ID NO: 27291 - DNA, 17 bp, synthetic construct
  source 1..17: mol_type = other DNA
ttgtctaagctctgcct

SEQ ID NO: 27292 - DNA, 17 bp, synthetic construct
  source 1..17: mol_type = other DNA
cttgtctaagctctgcc

SEQ ID NO: 27293 - DNA, 17 bp, synthetic construct
  source 1..17: mol_type = other DNA
acttgtctaagctctgc

SEQ ID NO: 27294 - DNA, 17 bp, synthetic construct
  source 1..17: mol_type = other DNA
cacttgtctaagctctg

SEQ ID NO: 27295 - DNA, 17 bp, synthetic construct
  source 1..17: mol_type = other DNA
acacttgtctaagctct

SEQ ID NO: 27296 - DNA, 17 bp, synthetic construct
  source 1..17: mol_type = other DNA
aacacttgtctaagctc

SEQ ID NO: 27297 - DNA, 17 bp, synthetic construct
  source 1..17: mol_type = other DNA
ggtgatgtaacacttgt

SEQ ID NO: 27298 - DNA, 17 bp, synthetic construct
  source 1..17: mol_type = other DNA
ccaggtgatgtaacact

SEQ ID NO: 27299 - DNA, 17 bp, synthetic construct
  source 1..17: mol_type = other DNA
cccaggtgatgtaacac

SEQ ID NO: 27300 - DNA, 17 bp, synthetic construct
  source 1..17: mol_type = other DNA
acccaggtgatgtaaca

SEQ ID NO: 27301 - DNA, 17 bp, synthetic construct
  source 1..17: mol_type = other DNA
cacccaggtgatgtaac

SEQ ID NO: 27302 - DNA, 17 bp, synthetic construct
  source 1..17: mol_type = other DNA
tcacccaggtgatgtaa

SEQ ID NO: 27303 - DNA, 17 bp, synthetic construct
  source 1..17: mol_type = other DNA
atcacccaggtgatgta

SEQ ID NO: 27304 - DNA, 17 bp, synthetic construct
  source 1..17: mol_type = other DNA
gatcacccaggtgatgt

SEQ ID NO: 27305 - DNA, 17 bp, synthetic construct
  source 1..17: mol_type = other DNA
tgatcacccaggtgatg

SEQ ID NO: 27306 - DNA, 17 bp, synthetic construct
  source 1..17: mol_type = other DNA
ctgatcacccaggtgat

SEQ ID NO: 27307 - DNA, 17 bp, synthetic construct
  source 1..17: mol_type = other DNA
actgatcacccaggtga

SEQ ID NO: 27308 - DNA, 17 bp, synthetic construct
  source 1..17: mol_type = other DNA
cactgatcacccaggtg

SEQ ID NO: 27309 - DNA, 17 bp, synthetic construct
  source 1..17: mol_type = other DNA
gcactgatcacccaggt

SEQ ID NO: 27310 - DNA, 17 bp, synthetic construct
  source 1..17: mol_type = other DNA
tgcactgatcacccagg

SEQ ID NO: 27311 - DNA, 17 bp, synthetic construct
  source 1..17: mol_type = other DNA
ctgcactgatcacccag

SEQ ID NO: 27312 - DNA, 17 bp, synthetic construct
  source 1..17: mol_type = other DNA
tctgcactgatcaccca

SEQ ID NO: 27313 - DNA, 17 bp, synthetic construct
  source 1..17: mol_type = other DNA
ctctgcactgatcaccc

SEQ ID NO: 27314 - DNA, 17 bp, synthetic construct
  source 1..17: mol_type = other DNA
tctctgcactgatcacc

SEQ ID NO: 27315 - DNA, 17 bp, synthetic construct
  source 1..17: mol_type = other DNA
atctctgcactgatcac

SEQ ID NO: 27316 - DNA, 17 bp, synthetic construct
  source 1..17: mol_type = other DNA
catctctgcactgatca

SEQ ID NO: 27317 - DNA, 17 bp, synthetic construct
  source 1..17: mol_type = other DNA
acatctctgcactgatc

SEQ ID NO: 27318 - DNA, 17 bp, synthetic construct
  source 1..17: mol_type = other DNA
cacatctctgcactgat

SEQ ID NO: 27319 - DNA, 17 bp, synthetic construct
  source 1..17: mol_type = other DNA
acacatctctgcactga

SEQ ID NO: 27320 - DNA, 17 bp, synthetic construct
  source 1..17: mol_type = other DNA
gacacatctctgcactg

SEQ ID NO: 27321 - DNA, 17 bp, synthetic construct
  source 1..17: mol_type = other DNA
tgacacatctctgcact

SEQ ID NO: 27322 - DNA, 17 bp, synthetic construct
  source 1..17: mol_type = other DNA
acaggagcgttttgaca

SEQ ID NO: 27323 - DNA, 17 bp, synthetic construct
  source 1..17: mol_type = other DNA
tacaggagcgttttgac

SEQ ID NO: 27324 - DNA, 17 bp, synthetic construct
  source 1..17: mol_type = other DNA
ctacaggagcgttttga

SEQ ID NO: 27325 - DNA, 17 bp, synthetic construct
  source 1..17: mol_type = other DNA
actacaggagcgttttg

SEQ ID NO: 27326 - DNA, 17 bp, synthetic construct
  source 1..17: mol_type = other DNA
gactacaggagcgtttt

SEQ ID NO: 27327 - DNA, 17 bp, synthetic construct
  source 1..17: mol_type = other DNA
agactacaggagcgttt

SEQ ID NO: 27328 - DNA, 17 bp, synthetic construct
  source 1..17: mol_type = other DNA
cagactacaggagcgtt

SEQ ID NO: 27329 - DNA, 17 bp, synthetic construct
  source 1..17: mol_type = other DNA
tcagactacaggagcgt

SEQ ID NO: 27330 - DNA, 17 bp, synthetic construct
  source 1..17: mol_type = other DNA
ttcagactacaggagcg

SEQ ID NO: 27331 - DNA, 17 bp, synthetic construct
  source 1..17: mol_type = other DNA
gttcagactacaggagc

SEQ ID NO: 27332 - DNA, 17 bp, synthetic construct
  source 1..17: mol_type = other DNA
ggttcagactacaggag

SEQ ID NO: 27333 - DNA, 17 bp, synthetic construct
  source 1..17: mol_type = other DNA
aggttcagactacagga

SEQ ID NO: 27334 - DNA, 17 bp, synthetic construct
  source 1..17: mol_type = other DNA
taggttcagactacagg

SEQ ID NO: 27335 - DNA, 17 bp, synthetic construct
  source 1..17: mol_type = other DNA
ctaggttcagactacag

SEQ ID NO: 27336 - DNA, 17 bp, synthetic construct
  source 1..17: mol_type = other DNA
tctaggttcagactaca

SEQ ID NO: 27337 - DNA, 17 bp, synthetic construct
  source 1..17: mol_type = other DNA
gtctaggttcagactac

SEQ ID NO: 27338 - DNA, 17 bp, synthetic construct
  source 1..17: mol_type = other DNA
tgtctaggttcagacta

SEQ ID NO: 27339 - DNA, 17 bp, synthetic construct
  source 1..17: mol_type = other DNA
ctgtctaggttcagact

SEQ ID NO: 27340 - DNA, 17 bp, synthetic construct
  source 1..17: mol_type = other DNA
cctgtctaggttcagac

SEQ ID NO: 27341 - DNA, 17 bp, synthetic construct
  source 1..17: mol_type = other DNA
tcctgtctaggttcaga

SEQ ID NO: 27342 - DNA, 17 bp, synthetic construct
  source 1..17: mol_type = other DNA
ctcctgtctaggttcag

SEQ ID NO: 27343 - DNA, 17 bp, synthetic construct
  source 1..17: mol_type = other DNA
actcctgtctaggttca

SEQ ID NO: 27344 - DNA, 17 bp, synthetic construct
  source 1..17: mol_type = other DNA
aactcctgtctaggttc

SEQ ID NO: 27345 - DNA, 17 bp, synthetic construct
  source 1..17: mol_type = other DNA
taactcctgtctaggtt

SEQ ID NO: 27346 - DNA, 17 bp, synthetic construct
  source 1..17: mol_type = other DNA
gtaactcctgtctaggt

SEQ ID NO: 27347 - DNA, 17 bp, synthetic construct
  source 1..17: mol_type = other DNA
tgtaactcctgtctagg

SEQ ID NO: 27348 - DNA, 17 bp, synthetic construct
  source 1..17: mol_type = other DNA
atgtaactcctgtctag

SEQ ID NO: 27349 - DNA, 17 bp, synthetic construct
  source 1..17: mol_type = other DNA
gatgtaactcctgtcta

SEQ ID NO: 27350 - DNA, 17 bp, synthetic construct
  source 1..17: mol_type = other DNA
tgatgtaactcctgtct

SEQ ID NO: 27351 - DNA, 17 bp, synthetic construct
  source 1..17: mol_type = other DNA
gtgatgtaactcctgtc

SEQ ID NO: 27352 - DNA, 17 bp, synthetic construct
  source 1..17: mol_type = other DNA
ggtgatgtaactcctgt

SEQ ID NO: 27353 - DNA, 17 bp, synthetic construct
  source 1..17: mol_type = other DNA
aggtgatgtaactcctg

SEQ ID NO: 27354 - DNA, 17 bp, synthetic construct
  source 1..17: mol_type = other DNA
aaggtgatgtaactcct

SEQ ID NO: 27355 - DNA, 17 bp, synthetic construct
  source 1..17: mol_type = other DNA
caaggtgatgtaactcc

SEQ ID NO: 27356 - DNA, 17 bp, synthetic construct
  source 1..17: mol_type = other DNA
ccaaggtgatgtaactc

SEQ ID NO: 27357 - DNA, 17 bp, synthetic construct
  source 1..17: mol_type = other DNA
cccaaggtgatgtaact

SEQ ID NO: 27358 - DNA, 17 bp, synthetic construct
  source 1..17: mol_type = other DNA
ccccaaggtgatgtaac

SEQ ID NO: 27359 - DNA, 17 bp, synthetic construct
  source 1..17: mol_type = other DNA
tccccaaggtgatgtaa

SEQ ID NO: 27360 - DNA, 17 bp, synthetic construct
  source 1..17: mol_type = other DNA
atccccaaggtgatgta

SEQ ID NO: 27361 - DNA, 17 bp, synthetic construct
  source 1..17: mol_type = other DNA
gatccccaaggtgatgt

SEQ ID NO: 27362 - DNA, 17 bp, synthetic construct
  source 1..17: mol_type = other DNA
tgatccccaaggtgatg

SEQ ID NO: 27363 - DNA, 17 bp, synthetic construct
  source 1..17: mol_type = other DNA
ctgatccccaaggtgat

SEQ ID NO: 27364 - DNA, 17 bp, synthetic construct
  source 1..17: mol_type = other DNA
actgatccccaaggtga

SEQ ID NO: 27365 - DNA, 17 bp, synthetic construct
  source 1..17: mol_type = other DNA
cactgatccccaaggtg

SEQ ID NO: 27366 - DNA, 17 bp, synthetic construct
  source 1..17: mol_type = other DNA
gcactgatccccaaggt

SEQ ID NO: 27367 - DNA, 17 bp, synthetic construct
  source 1..17: mol_type = other DNA
tgcactgatccccaagg

SEQ ID NO: 27368 - DNA, 17 bp, synthetic construct
  source 1..17: mol_type = other DNA
ctgcactgatccccaag

SEQ ID NO: 27369 - DNA, 17 bp, synthetic construct
  source 1..17: mol_type = other DNA
tctgcactgatccccaa

SEQ ID NO: 27370 - DNA, 17 bp, synthetic construct
  source 1..17: mol_type = other DNA
ctctgcactgatcccca

SEQ ID NO: 27371 - DNA, 17 bp, synthetic construct
  source 1..17: mol_type = other DNA
tctctgcactgatcccc

SEQ ID NO: 27372 - DNA, 17 bp, synthetic construct
  source 1..17: mol_type = other DNA
atctctgcactgatccc

SEQ ID NO: 27373 - DNA, 17 bp, synthetic construct
  source 1..17: mol_type = other DNA
tatctctgcactgatcc

SEQ ID NO: 27374 - DNA, 17 bp, synthetic construct
  source 1..17: mol_type = other DNA
gtatctctgcactgatc

SEQ ID NO: 27375 - DNA, 17 bp, synthetic construct
  source 1..17: mol_type = other DNA
cgtatctctgcactgat

SEQ ID NO: 27376 - DNA, 17 bp, synthetic construct
  source 1..17: mol_type = other DNA
acgtatctctgcactga

SEQ ID NO: 27377 - DNA, 17 bp, synthetic construct
  source 1..17: mol_type = other DNA
cacgtatctctgcactg

SEQ ID NO: 27378 - DNA, 17 bp, synthetic construct
  source 1..17: mol_type = other DNA
tcacgtatctctgcact

SEQ ID NO: 27379 - DNA, 17 bp, synthetic construct
  source 1..17: mol_type = other DNA
ctcacgtatctctgcac

SEQ ID NO: 27380 - DNA, 17 bp, synthetic construct
  source 1..17: mol_type = other DNA
tctcacgtatctctgca

SEQ ID NO: 27381 - DNA, 17 bp, synthetic construct
  source 1..17: mol_type = other DNA
ttctcacgtatctctgc

SEQ ID NO: 27382 - DNA, 17 bp, synthetic construct
  source 1..17: mol_type = other DNA
attctcacgtatctctg

SEQ ID NO: 27383 - DNA, 17 bp, synthetic construct
  source 1..17: mol_type = other DNA
aattctcacgtatctct

SEQ ID NO: 27384 - DNA, 17 bp, synthetic construct
  source 1..17: mol_type = other DNA
ggaattctcacgtatct

SEQ ID NO: 27385 - DNA, 17 bp, synthetic construct
  source 1..17: mol_type = other DNA
gggaattctcacgtatc

SEQ ID NO: 27386 - DNA, 17 bp, synthetic construct
  source 1..17: mol_type = other DNA
agggaattctcacgtat

SEQ ID NO: 27387 - DNA, 17 bp, synthetic construct
  source 1..17: mol_type = other DNA
caagggaattctcacgt

SEQ ID NO: 27388 - DNA, 17 bp, synthetic construct
  source 1..17: mol_type = other DNA
cctacaagggaattctc

SEQ ID NO: 27389 - DNA, 17 bp, synthetic construct
  source 1..17: mol_type = other DNA
gcctacaagggaattct

SEQ ID NO: 27390 - DNA, 17 bp, synthetic construct
  source 1..17: mol_type = other DNA
tgcctacaagggaattc

SEQ ID NO: 27391 - DNA, 17 bp, synthetic construct
  source 1..17: mol_type = other DNA
ctgcctacaagggaatt

SEQ ID NO: 27392 - DNA, 17 bp, synthetic construct
  source 1..17: mol_type = other DNA
cctgcctacaagggaat

SEQ ID NO: 27393 - DNA, 17 bp, synthetic construct
  source 1..17: mol_type = other DNA
ccctgcctacaagggaa

SEQ ID NO: 27394 - DNA, 17 bp, synthetic construct
  source 1..17: mol_type = other DNA
gccctgcctacaaggga

SEQ ID NO: 27395 - DNA, 17 bp, synthetic construct
  source 1..17: mol_type = other DNA
ggccctgcctacaaggg

SEQ ID NO: 27396 - DNA, 17 bp, synthetic construct
  source 1..17: mol_type = other DNA
aggccctgcctacaagg

SEQ ID NO: 27397 - DNA, 17 bp, synthetic construct
  source 1..17: mol_type = other DNA
taggccctgcctacaag

SEQ ID NO: 27398 - DNA, 17 bp, synthetic construct
  source 1..17: mol_type = other DNA
ctaggccctgcctacaa

SEQ ID NO: 27399 - DNA, 17 bp, synthetic construct
  source 1..17: mol_type = other DNA
tctaggccctgcctaca

SEQ ID NO: 27400 - DNA, 17 bp, synthetic construct
  source 1..17: mol_type = other DNA
acttgtctaggccctgc

SEQ ID NO: 27401 - DNA, 17 bp, synthetic construct
  source 1..17: mol_type = other DNA
cacttgtctaggccctg

SEQ ID NO: 27402 - DNA, 17 bp, synthetic construct
  source 1..17: mol_type = other DNA
acacttgtctaggccct

SEQ ID NO: 27403 - DNA, 17 bp, synthetic construct
  source 1..17: mol_type = other DNA
aacacttgtctaggccc

SEQ ID NO: 27404 - DNA, 17 bp, synthetic construct
  source 1..17: mol_type = other DNA
taacacttgtctaggcc

SEQ ID NO: 27405 - DNA, 17 bp, synthetic construct
  source 1..17: mol_type = other DNA
gtaacacttgtctaggc

SEQ ID NO: 27406 - DNA, 17 bp, synthetic construct
  source 1..17: mol_type = other DNA
cctaggtgatgtaacac

SEQ ID NO: 27407 - DNA, 17 bp, synthetic construct
  source 1..17: mol_type = other DNA
acctaggtgatgtaaca

SEQ ID NO: 27408 - DNA, 17 bp, synthetic construct
  source 1..17: mol_type = other DNA
gataacctaggtgatgt

SEQ ID NO: 27409 - DNA, 17 bp, synthetic construct
  source 1..17: mol_type = other DNA
actgataacctaggtga

SEQ ID NO: 27410 - DNA, 17 bp, synthetic construct
  source 1..17: mol_type = other DNA
cactgataacctaggtg

SEQ ID NO: 27411 - DNA, 17 bp, synthetic construct
  source 1..17: mol_type = other DNA
gcactgataacctaggt

SEQ ID NO: 27412 - DNA, 17 bp, synthetic construct
  source 1..17: mol_type = other DNA
tgcactgataacctagg

SEQ ID NO: 27413 - DNA, 17 bp, synthetic construct
  source 1..17: mol_type = other DNA
ctgcactgataacctag

SEQ ID NO: 27414 - DNA, 17 bp, synthetic construct
  source 1..17: mol_type = other DNA
tctgcactgataaccta

SEQ ID NO: 27415 - DNA, 17 bp, synthetic construct
  source 1..17: mol_type = other DNA
ctctgcactgataacct

SEQ ID NO: 27416 - DNA, 17 bp, synthetic construct
  source 1..17: mol_type = other DNA
tctctgcactgataacc

SEQ ID NO: 27417 - DNA, 17 bp, synthetic construct
  source 1..17: mol_type = other DNA
atatctctgcactgata

SEQ ID NO: 27418 - DNA, 17 bp, synthetic construct
  source 1..17: mol_type = other DNA
catatctctgcactgat

SEQ ID NO: 27419 - DNA, 17 bp, synthetic construct
  source 1..17: mol_type = other DNA
acatatctctgcactga

SEQ ID NO: 27420 - DNA, 17 bp, synthetic construct
  source 1..17: mol_type = other DNA
cacatatctctgcactg

SEQ ID NO: 27421 - DNA, 17 bp, synthetic construct
  source 1..17: mol_type = other DNA
tcacatatctctgcact

SEQ ID NO: 27422 - DNA, 17 bp, synthetic construct
  source 1..17: mol_type = other DNA
ctcacatatctctgcac

SEQ ID NO: 27423 - DNA, 17 bp, synthetic construct
  source 1..17: mol_type = other DNA
tctcacatatctctgca

SEQ ID NO: 27424 - DNA, 17 bp, synthetic construct
  source 1..17: mol_type = other DNA
ttctcacatatctctgc

SEQ ID NO: 27425 - DNA, 17 bp, synthetic construct
  source 1..17: mol_type = other DNA
cacgggaattctcacat

SEQ ID NO: 27426 - DNA, 17 bp, synthetic construct
  source 1..17: mol_type = other DNA
acacgggaattctcaca

SEQ ID NO: 27427 - DNA, 17 bp, synthetic construct
  source 1..17: mol_type = other DNA
tacacgggaattctcac

SEQ ID NO: 27428 - DNA, 17 bp, synthetic construct
  source 1..17: mol_type = other DNA
ctacacgggaattctca

SEQ ID NO: 27429 - DNA, 17 bp, synthetic construct
  source 1..17: mol_type = other DNA
cctacacgggaattctc

SEQ ID NO: 27430 - DNA, 17 bp, synthetic construct
  source 1..17: mol_type = other DNA
gcctacacgggaattct

SEQ ID NO: 27431 - DNA, 17 bp, synthetic construct
  source 1..17: mol_type = other DNA
tgcctacacgggaattc

SEQ ID NO: 27432 - DNA, 17 bp, synthetic construct
  source 1..17: mol_type = other DNA
ctgcctacacgggaatt

SEQ ID NO: 27433 - DNA, 17 bp, synthetic construct
  source 1..17: mol_type = other DNA
tctgcctacacgggaat

SEQ ID NO: 27434 - DNA, 17 bp, synthetic construct
  source 1..17: mol_type = other DNA
ctctgcctacacgggaa

SEQ ID NO: 27435 - DNA, 17 bp, synthetic construct
  source 1..17: mol_type = other DNA
gctctgcctacacggga

SEQ ID NO: 27436 - DNA, 17 bp, synthetic construct
  source 1..17: mol_type = other DNA
ggctctgcctacacggg

SEQ ID NO: 27437 - DNA, 17 bp, synthetic construct
  source 1..17: mol_type = other DNA
aggctctgcctacacgg

SEQ ID NO: 27438 - DNA, 17 bp, synthetic construct
  source 1..17: mol_type = other DNA
taggctctgcctacacg

SEQ ID NO: 27439 - DNA, 17 bp, synthetic construct
  source 1..17: mol_type = other DNA
ctaggctctgcctacac

SEQ ID NO: 27440 - DNA, 17 bp, synthetic construct
  source 1..17: mol_type = other DNA
tctaggctctgcctaca

SEQ ID NO: 27441 - DNA, 17 bp, synthetic construct
  source 1..17: mol_type = other DNA
gtctaggctctgcctac

SEQ ID NO: 27442 - DNA, 17 bp, synthetic construct
  source 1..17: mol_type = other DNA
tgtctaggctctgccta

SEQ ID NO: 27443 - DNA, 17 bp, synthetic construct
  source 1..17: mol_type = other DNA
ttgtctaggctctgcct

SEQ ID NO: 27444 - DNA, 17 bp, synthetic construct
  source 1..17: mol_type = other DNA
cttgtctaggctctgcc

SEQ ID NO: 27445 - DNA, 17 bp, synthetic construct
  source 1..17: mol_type = other DNA
acttgtctaggctctgc

SEQ ID NO: 27446 - DNA, 17 bp, synthetic construct
  source 1..17: mol_type = other DNA
cacttgtctaggctctg

SEQ ID NO: 27447 - DNA, 17 bp, synthetic construct
  source 1..17: mol_type = other DNA
acacttgtctaggctct

SEQ ID NO: 27448 - DNA, 17 bp, synthetic construct
  source 1..17: mol_type = other DNA
aacacttgtctaggctc

SEQ ID NO: 27449 - DNA, 17 bp, synthetic construct
  source 1..17: mol_type = other DNA
taacacttgtctaggct

SEQ ID NO: 27450 - DNA, 17 bp, synthetic construct
  source 1..17: mol_type = other DNA
ggaggctttatgactaa

SEQ ID NO: 27451 - DNA, 17 bp, synthetic construct
  source 1..17: mol_type = other DNA
aggaggctttatgacta

SEQ ID NO: 27452 - DNA, 17 bp, synthetic construct
  source 1..17: mol_type = other DNA
gggaactcttgtctacg

SEQ ID NO: 27453 - DNA, 17 bp, synthetic construct
  source 1..17: mol_type = other DNA
agggaactcttgtctac

SEQ ID NO: 27454 - DNA, 17 bp, synthetic construct
  source 1..17: mol_type = other DNA
gagggaactcttgtcta

SEQ ID NO: 27455 - DNA, 17 bp, synthetic construct
  source 1..17: mol_type = other DNA
ggagggaactcttgtct

SEQ ID NO: 27456 - DNA, 17 bp, synthetic construct
  source 1..17: mol_type = other DNA
aggagggaactcttgtc

SEQ ID NO: 27457 - DNA, 17 bp, synthetic construct
  source 1..17: mol_type = other DNA
gaggagggaactcttgt

SEQ ID NO: 27458 - DNA, 17 bp, synthetic construct
  source 1..17: mol_type = other DNA
tgaggagggaactcttg

SEQ ID NO: 27459 - DNA, 17 bp, synthetic construct
  source 1..17: mol_type = other DNA
ctgaggagggaactctt

SEQ ID NO: 27460 - DNA, 17 bp, synthetic construct
  source 1..17: mol_type = other DNA
cctgaggagggaactct

SEQ ID NO: 27461 - DNA, 17 bp, synthetic construct
  source 1..17: mol_type = other DNA
ccctgaggagggaactc

SEQ ID NO: 27462 - DNA, 17 bp, synthetic construct
  source 1..17: mol_type = other DNA
accctgaggagggaact

SEQ ID NO: 27463 - DNA, 17 bp, synthetic construct
  source 1..17: mol_type = other DNA
caccctgaggagggaac

SEQ ID NO: 27464 - DNA, 17 bp, synthetic construct
  source 1..17: mol_type = other DNA
tcaccctgaggagggaa

SEQ ID NO: 27465 - DNA, 17 bp, synthetic construct
  source 1..17: mol_type = other DNA
atcaccctgaggaggga

SEQ ID NO: 27466 - DNA, 17 bp, synthetic construct
  source 1..17: mol_type = other DNA
gatcaccctgaggaggg

SEQ ID NO: 27467 - DNA, 17 bp, synthetic construct
  source 1..17: mol_type = other DNA
tgatcaccctgaggagg

SEQ ID NO: 27468 - DNA, 17 bp, synthetic construct
  source 1..17: mol_type = other DNA
ctgatcaccctgaggag

SEQ ID NO: 27469 - DNA, 17 bp, synthetic construct
  source 1..17: mol_type = other DNA
actgatcaccctgagga

SEQ ID NO: 27470 - DNA, 17 bp, synthetic construct
  source 1..17: mol_type = other DNA
cactgatcaccctgagg

SEQ ID NO: 27471 - DNA, 17 bp, synthetic construct
  source 1..17: mol_type = other DNA
gcactgatcaccctgag

SEQ ID NO: 27472 - DNA, 17 bp, synthetic construct
  source 1..17: mol_type = other DNA
tgcactgatcaccctga

SEQ ID NO: 27473 - DNA, 17 bp, synthetic construct
  source 1..17: mol_type = other DNA
ctgcactgatcaccctg

SEQ ID NO: 27474 - DNA, 17 bp, synthetic construct
  source 1..17: mol_type = other DNA
tctgcactgatcaccct

SEQ ID NO: 27475 - DNA, 17 bp, synthetic construct
  source 1..17: mol_type = other DNA
gtgacacatctctgcac

SEQ ID NO: 27476 - DNA, 17 bp, synthetic construct
  source 1..17: mol_type = other DNA
tgtgacacatctctgca

SEQ ID NO: 27477 - DNA, 17 bp, synthetic construct
  source 1..17: mol_type = other DNA
ttgtgacacatctctgc

SEQ ID NO: 27478 - DNA, 17 bp, synthetic construct
  source 1..17: mol_type = other DNA
tttgtgacacatctctg

SEQ ID NO: 27479 - DNA, 17 bp, synthetic construct
  source 1..17: mol_type = other DNA
ctttgtgacacatctct

SEQ ID NO: 27480 - DNA, 17 bp, synthetic construct
  source 1..17: mol_type = other DNA
gctttgtgacacatctc

SEQ ID NO: 27481 - DNA, 17 bp, synthetic construct
  source 1..17: mol_type = other DNA
ggctttgtgacacatct

SEQ ID NO: 27482 - DNA, 17 bp, synthetic construct
  source 1..17: mol_type = other DNA
gggctttgtgacacatc

SEQ ID NO: 27483 - DNA, 17 bp, synthetic construct
  source 1..17: mol_type = other DNA
ggggctttgtgacacat

SEQ ID NO: 27484 - DNA, 17 bp, synthetic construct
  source 1..17: mol_type = other DNA
aggggctttgtgacaca

SEQ ID NO: 27485 - DNA, 17 bp, synthetic construct
  source 1..17: mol_type = other DNA
caggggctttgtgacac

SEQ ID NO: 27486 - DNA, 17 bp, synthetic construct
  source 1..17: mol_type = other DNA
acaggggctttgtgaca

SEQ ID NO: 27487 - DNA, 17 bp, synthetic construct
  source 1..17: mol_type = other DNA
tacaggggctttgtgac

SEQ ID NO: 27488 - DNA, 17 bp, synthetic construct
  source 1..17: mol_type = other DNA
ctacaggggctttgtga

SEQ ID NO: 27489 - DNA, 17 bp, synthetic construct
  source 1..17: mol_type = other DNA
cctacaggggctttgtg

SEQ ID NO: 27490 - DNA, 17 bp, synthetic construct
  source 1..17: mol_type = other DNA
gcctacaggggctttgt

SEQ ID NO: 27491 - DNA, 17 bp, synthetic construct
  source 1..17: mol_type = other DNA
tgcctacaggggctttg

SEQ ID NO: 27492 - DNA, 17 bp, synthetic construct
  source 1..17: mol_type = other DNA
ctgcctacaggggcttt

SEQ ID NO: 27493 - DNA, 17 bp, synthetic construct
  source 1..17: mol_type = other DNA
tctgcctacaggggctt

SEQ ID NO: 27494 - DNA, 17 bp, synthetic construct
  source 1..17: mol_type = other DNA
ctctgcctacaggggct

SEQ ID NO: 27495 - DNA, 17 bp, synthetic construct
  source 1..17: mol_type = other DNA
aggctctgcctacaggg

SEQ ID NO: 27496 - DNA, 17 bp, synthetic construct
  source 1..17: mol_type = other DNA
taggctctgcctacagg

SEQ ID NO: 27497 - DNA, 17 bp, synthetic construct
  source 1..17: mol_type = other DNA
ctaggctctgcctacag

SEQ ID NO: 27498 - DNA, 17 bp, synthetic construct
  source 1..17: mol_type = other DNA
tcttgtctaggctctgc

SEQ ID NO: 27499 - DNA, 17 bp, synthetic construct
  source 1..17: mol_type = other DNA
ctcttgtctaggctctg

SEQ ID NO: 27500 - DNA, 17 bp, synthetic construct
  source 1..17: mol_type = other DNA
actcttgtctaggctct

SEQ ID NO: 27501 - DNA, 17 bp, synthetic construct
  source 1..17: mol_type = other DNA
aactcttgtctaggctc

SEQ ID NO: 27502 - DNA, 17 bp, synthetic construct
  source 1..17: mol_type = other DNA
aaactcttgtctaggct

SEQ ID NO: 27503 - DNA, 17 bp, synthetic construct
  source 1..17: mol_type = other DNA
gaaactcttgtctaggc

SEQ ID NO: 27504 - DNA, 17 bp, synthetic construct
  source 1..17: mol_type = other DNA
ctctgaactgatcaacc

SEQ ID NO: 27505 - DNA, 17 bp, synthetic construct
  source 1..17: mol_type = other DNA
tctgacacatctctgaa

SEQ ID NO: 27506 - DNA, 17 bp, synthetic construct
  source 1..17: mol_type = other DNA
ttctgacacatctctga

SEQ ID NO: 27507 - DNA, 17 bp, synthetic construct
  source 1..17: mol_type = other DNA
attctgacacatctctg

SEQ ID NO: 27508 - DNA, 17 bp, synthetic construct
  source 1..17: mol_type = other DNA
cattctgacacatctct

SEQ ID NO: 27509 - DNA, 17 bp, synthetic construct
  source 1..17: mol_type = other DNA
gcattctgacacatctc

SEQ ID NO: 27510 - DNA, 17 bp, synthetic construct
  source 1..17: mol_type = other DNA
ggcattctgacacatct

SEQ ID NO: 27511 - DNA, 17 bp, synthetic construct
  source 1..17: mol_type = other DNA
gggcattctgacacatc

SEQ ID NO: 27512 - DNA, 17 bp, synthetic construct
  source 1..17: mol_type = other DNA
tgggcattctgacacat

SEQ ID NO: 27513 - DNA, 17 bp, synthetic construct
  source 1..17: mol_type = other DNA
atgggcattctgacaca

SEQ ID NO: 27514 - DNA, 17 bp, synthetic construct
  source 1..17: mol_type = other DNA
catgggcattctgacac

SEQ ID NO: 27515 - DNA, 17 bp, synthetic construct
  source 1..17: mol_type = other DNA
acatgggcattctgaca

SEQ ID NO: 27516 - DNA, 17 bp, synthetic construct
  source 1..17: mol_type = other DNA
tacatgggcattctgac

SEQ ID NO: 27517 - DNA, 17 bp, synthetic construct
  source 1..17: mol_type = other DNA
ctacatgggcattctga

SEQ ID NO: 27518 - DNA, 17 bp, synthetic construct
  source 1..17: mol_type = other DNA
cctacatgggcattctg

SEQ ID NO: 27519 - DNA, 17 bp, synthetic construct
  source 1..17: mol_type = other DNA
gcctacatgggcattct

SEQ ID NO: 27520 - DNA, 17 bp, synthetic construct
  source 1..17: mol_type = other DNA
tgcctacatgggcattc

SEQ ID NO: 27521 - DNA, 17 bp, synthetic construct
  source 1..17: mol_type = other DNA
ctgcctacatgggcatt

SEQ ID NO: 27522 - DNA, 17 bp, synthetic construct
  source 1..17: mol_type = other DNA
tctgcctacatgggcat

SEQ ID NO: 27523 - DNA, 17 bp, synthetic construct
  source 1..17: mol_type = other DNA
atctgcctacatgggca

SEQ ID NO: 27524 - DNA, 17 bp, synthetic construct
  source 1..17: mol_type = other DNA
gatctgcctacatgggc

SEQ ID NO: 27525 - DNA, 17 bp, synthetic construct
  source 1..17: mol_type = other DNA
agatctgcctacatggg

SEQ ID NO: 27526 - DNA, 17 bp, synthetic construct
  source 1..17: mol_type = other DNA
tagatctgcctacatgg

SEQ ID NO: 27527 - DNA, 17 bp, synthetic construct
  source 1..17: mol_type = other DNA
ttagatctgcctacatg

SEQ ID NO: 27528 - DNA, 17 bp, synthetic construct
  source 1..17: mol_type = other DNA
cttagatctgcctacat

SEQ ID NO: 27529 - DNA, 17 bp, synthetic construct
  source 1..17: mol_type = other DNA
tcttagatctgcctaca

SEQ ID NO: 27530 - DNA, 17 bp, synthetic construct
  source 1..17: mol_type = other DNA
gtcttagatctgcctac

SEQ ID NO: 27531 - DNA, 17 bp, synthetic construct
  source 1..17: mol_type = other DNA
tgtcttagatctgccta

SEQ ID NO: 27532 - DNA, 17 bp, synthetic construct
  source 1..17: mol_type = other DNA
ttgtcttagatctgcct

SEQ ID NO: 27533 - DNA, 17 bp, synthetic construct
  source 1..17: mol_type = other DNA
cttgtcttagatctgcc

SEQ ID NO: 27534 - DNA, 17 bp, synthetic construct
  source 1..17: mol_type = other DNA
gcttgtcttagatctgc

SEQ ID NO: 27535 - DNA, 17 bp, synthetic construct
  source 1..17: mol_type = other DNA
cgcttgtcttagatctg

SEQ ID NO: 27536 - DNA, 17 bp, synthetic construct
  source 1..17: mol_type = other DNA
acgcttgtcttagatct

SEQ ID NO: 27537 - DNA, 17 bp, synthetic construct
  source 1..17: mol_type = other DNA
gacgcttgtcttagatc

SEQ ID NO: 27538 - DNA, 17 bp, synthetic construct
  source 1..17: mol_type = other DNA
ggacgcttgtcttagat

SEQ ID NO: 27539 - DNA, 17 bp, synthetic construct
  source 1..17: mol_type = other DNA
tggacgcttgtcttaga

SEQ ID NO: 27540 - DNA, 17 bp, synthetic construct
  source 1..17: mol_type = other DNA
atggacgcttgtcttag

SEQ ID NO: 27541 - DNA, 17 bp, synthetic construct
  source 1..17: mol_type = other DNA
gatggacgcttgtctta

SEQ ID NO: 27542 - DNA, 17 bp, synthetic construct
  source 1..17: mol_type = other DNA
tgatggacgcttgtctt

SEQ ID NO: 27543 - DNA, 17 bp, synthetic construct
  source 1..17: mol_type = other DNA
gtgatggacgcttgtct

SEQ ID NO: 27544 - DNA, 17 bp, synthetic construct
  source 1..17: mol_type = other DNA
ggtgatggacgcttgtc

SEQ ID NO: 27545 - DNA, 17 bp, synthetic construct
  source 1..17: mol_type = other DNA
aggtgatggacgcttgt

SEQ ID NO: 27546 - DNA, 17 bp, synthetic construct
  source 1..17: mol_type = other DNA
caggtgatggacgcttg

SEQ ID NO: 27547 - DNA, 17 bp, synthetic construct
  source 1..17: mol_type = other DNA
ccaggtgatggacgctt

SEQ ID NO: 27548 - DNA, 17 bp, synthetic construct
  source 1..17: mol_type = other DNA
cccaggtgatggacgct

SEQ ID NO: 27549 - DNA, 17 bp, synthetic construct
  source 1..17: mol_type = other DNA
acccaggtgatggacgc

SEQ ID NO: 27550 - DNA, 17 bp, synthetic construct
  source 1..17: mol_type = other DNA
cacccaggtgatggacg

SEQ ID NO: 27551 - DNA, 17 bp, synthetic construct
  source 1..17: mol_type = other DNA
tcacccaggtgatggac

SEQ ID NO: 27552 - DNA, 17 bp, synthetic construct
  source 1..17: mol_type = other DNA
atcacccaggtgatgga

SEQ ID NO: 27553 - DNA, 17 bp, synthetic construct
  source 1..17: mol_type = other DNA
gatcacccaggtgatgg

SEQ ID NO: 27554 - DNA, 17 bp, synthetic construct
  source 1..17: mol_type = other DNA
tacatatctctgcactg

SEQ ID NO: 27555 - DNA, 17 bp, synthetic construct
  source 1..17: mol_type = other DNA
gtacatatctctgcact

SEQ ID NO: 27556 - DNA, 17 bp, synthetic construct
  source 1..17: mol_type = other DNA
ggtacatatctctgcac

SEQ ID NO: 27557 - DNA, 17 bp, synthetic construct
  source 1..17: mol_type = other DNA
tggtacatatctctgca

SEQ ID NO: 27558 - DNA, 17 bp, synthetic construct
  source 1..17: mol_type = other DNA
ctggtacatatctctgc

SEQ ID NO: 27559 - DNA, 17 bp, synthetic construct
  source 1..17: mol_type = other DNA
actggtacatatctctg

SEQ ID NO: 27560 - DNA, 17 bp, synthetic construct
  source 1..17: mol_type = other DNA
cactggtacatatctct

SEQ ID NO: 27561 - DNA, 17 bp, synthetic construct
  source 1..17: mol_type = other DNA
acactggtacatatctc

SEQ ID NO: 27562 - DNA, 17 bp, synthetic construct
  source 1..17: mol_type = other DNA
gacactggtacatatct

SEQ ID NO: 27563 - DNA, 17 bp, synthetic construct
  source 1..17: mol_type = other DNA
ggacactggtacatatc

SEQ ID NO: 27564 - DNA, 17 bp, synthetic construct
  source 1..17: mol_type = other DNA
gggacactggtacatat

SEQ ID NO: 27565 - DNA, 17 bp, synthetic construct
  source 1..17: mol_type = other DNA
ggggacactggtacata

SEQ ID NO: 27566 - DNA, 17 bp, synthetic construct
  source 1..17: mol_type = other DNA
aggggacactggtacat

SEQ ID NO: 27567 - DNA, 17 bp, synthetic construct
  source 1..17: mol_type = other DNA
caggggacactggtaca

SEQ ID NO: 27568 - DNA, 17 bp, synthetic construct
  source 1..17: mol_type = other DNA
acaggggacactggtac

SEQ ID NO: 27569 - DNA, 17 bp, synthetic construct
  source 1..17: mol_type = other DNA
tacaggggacactggta

SEQ ID NO: 27570 - DNA, 17 bp, synthetic construct
  source 1..17: mol_type = other DNA
ctacaggggacactggt

SEQ ID NO: 27571 - DNA, 17 bp, synthetic construct
  source 1..17: mol_type = other DNA
cctacaggggacactgg

SEQ ID NO: 27572 - DNA, 17 bp, synthetic construct
  source 1..17: mol_type = other DNA
gcctacaggggacactg

SEQ ID NO: 27573 - DNA, 17 bp, synthetic construct
  source 1..17: mol_type = other DNA
tgcctacaggggacact

SEQ ID NO: 27574 - DNA, 17 bp, synthetic construct
  source 1..17: mol_type = other DNA
ctgcctacaggggacac

SEQ ID NO: 27575 - DNA, 17 bp, synthetic construct
  source 1..17: mol_type = other DNA
actgcctacaggggaca

SEQ ID NO: 27576 - DNA, 17 bp, synthetic construct
  source 1..17: mol_type = other DNA
cactgcctacaggggac

SEQ ID NO: 27577 - DNA, 17 bp, synthetic construct
  source 1..17: mol_type = other DNA
gcactgcctacagggga

SEQ ID NO: 27578 - DNA, 17 bp, synthetic construct
  source 1..17: mol_type = other DNA
ggcactgcctacagggg

SEQ ID NO: 27579 - DNA, 17 bp, synthetic construct
  source 1..17: mol_type = other DNA
aggcactgcctacaggg

SEQ ID NO: 27580 - DNA, 17 bp, synthetic construct
  source 1..17: mol_type = other DNA
taggcactgcctacagg

SEQ ID NO: 27581 - DNA, 17 bp, synthetic construct
  source 1..17: mol_type = other DNA
ctaggcactgcctacag

SEQ ID NO: 27582 - DNA, 17 bp, synthetic construct
  source 1..17: mol_type = other DNA
tctaggcactgcctaca

SEQ ID NO: 27583 - DNA, 17 bp, synthetic construct
  source 1..17: mol_type = other DNA
gtctaggcactgcctac

SEQ ID NO: 27584 - DNA, 17 bp, synthetic construct
  source 1..17: mol_type = other DNA
tgtctaggcactgccta

SEQ ID NO: 27585 - DNA, 17 bp, synthetic construct
  source 1..17: mol_type = other DNA
ttgtctaggcactgcct

SEQ ID NO: 27586 - DNA, 17 bp, synthetic construct
  source 1..17: mol_type = other DNA
cttgtctaggcactgcc

SEQ ID NO: 27587 - DNA, 17 bp, synthetic construct
  source 1..17: mol_type = other DNA
tcttgtctaggcactgc

SEQ ID NO: 27588 - DNA, 17 bp, synthetic construct
  source 1..17: mol_type = other DNA
ctcttgtctaggcactg

SEQ ID NO: 27589 - DNA, 17 bp, synthetic construct
  source 1..17: mol_type = other DNA
actcttgtctaggcact

SEQ ID NO: 27590 - DNA, 17 bp, synthetic construct
  source 1..17: mol_type = other DNA
aactcttgtctaggcac

SEQ ID NO: 27591 - DNA, 17 bp, synthetic construct
  source 1..17: mol_type = other DNA
caactcttgtctaggca

SEQ ID NO: 27592 - DNA, 17 bp, synthetic construct
  source 1..17: mol_type = other DNA
tcaactcttgtctaggc

SEQ ID NO: 27593 - DNA, 17 bp, synthetic construct
  source 1..17: mol_type = other DNA
ttcaactcttgtctagg

SEQ ID NO: 27594 - DNA, 17 bp, synthetic construct
  source 1..17: mol_type = other DNA
tgattcaactcttgtct

SEQ ID NO: 27595 - DNA, 17 bp, synthetic construct
  source 1..17: mol_type = other DNA
gtgattcaactcttgtc

SEQ ID NO: 27596 - DNA, 17 bp, synthetic construct
  source 1..17: mol_type = other DNA
ggtgattcaactcttgt

SEQ ID NO: 27597 - DNA, 17 bp, synthetic construct
  source 1..17: mol_type = other DNA
aggtgattcaactcttg

SEQ ID NO: 27598 - DNA, 17 bp, synthetic construct
  source 1..17: mol_type = other DNA
gaggtgattcaactctt

SEQ ID NO: 27599 - DNA, 17 bp, synthetic construct
  source 1..17: mol_type = other DNA
tgaggtgattcaactct

SEQ ID NO: 27600 - DNA, 17 bp, synthetic construct
  source 1..17: mol_type = other DNA
ctgaggtgattcaactc

SEQ ID NO: 27601 - DNA, 17 bp, synthetic construct
  source 1..17: mol_type = other DNA
tctgaggtgattcaact

SEQ ID NO: 27602 - DNA, 17 bp, synthetic construct
  source 1..17: mol_type = other DNA
ctctgaggtgattcaac

SEQ ID NO: 27603 - DNA, 17 bp, synthetic construct
  source 1..17: mol_type = other DNA
tctctgaggtgattcaa

SEQ ID NO: 27604 - DNA, 17 bp, synthetic construct
  source 1..17: mol_type = other DNA
atctctgaggtgattca

SEQ ID NO: 27605 - DNA, 17 bp, synthetic construct
  source 1..17: mol_type = other DNA
gatctctgaggtgattc

SEQ ID NO: 27606 - DNA, 17 bp, synthetic construct
  source 1..17: mol_type = other DNA
tgatctctgaggtgatt

SEQ ID NO: 27607 - DNA, 17 bp, synthetic construct
  source 1..17: mol_type = other DNA
ctgatctctgaggtgat

SEQ ID NO: 27608 - DNA, 17 bp, synthetic construct
  source 1..17: mol_type = other DNA
actgatctctgaggtga

SEQ ID NO: 27609 - DNA, 17 bp, synthetic construct
  source 1..17: mol_type = other DNA
cactgatctctgaggtg

SEQ ID NO: 27610 - DNA, 17 bp, synthetic construct
  source 1..17: mol_type = other DNA
gcactgatctctgaggt

SEQ ID NO: 27611 - DNA, 17 bp, synthetic construct
  source 1..17: mol_type = other DNA
tgcactgatctctgagg

SEQ ID NO: 27612 - DNA, 17 bp, synthetic construct
  source 1..17: mol_type = other DNA
atgcactgatctctgag

SEQ ID NO: 27613 - DNA, 17 bp, synthetic construct
  source 1..17: mol_type = other DNA
tatgcactgatctctga

SEQ ID NO: 27614 - DNA, 17 bp, synthetic construct
  source 1..17: mol_type = other DNA
ctatgcactgatctctg

SEQ ID NO: 27615 - DNA, 17 bp, synthetic construct
  source 1..17: mol_type = other DNA
tctatgcactgatctct

SEQ ID NO: 27616 - DNA, 17 bp, synthetic construct
  source 1..17: mol_type = other DNA
atctatgcactgatctc

SEQ ID NO: 27617 - DNA, 17 bp, synthetic construct
  source 1..17: mol_type = other DNA
tatctatgcactgatct

SEQ ID NO: 27618 - DNA, 17 bp, synthetic construct
  source 1..17: mol_type = other DNA
gtgacatatctatgcac

SEQ ID NO: 27619 - DNA, 17 bp, synthetic construct
  source 1..17: mol_type = other DNA
gctttgtgacatatcta

SEQ ID NO: 27620 - DNA, 17 bp, synthetic construct
  source 1..17: mol_type = other DNA
ggctttgtgacatatct

SEQ ID NO: 27621 - DNA, 17 bp, synthetic construct
  source 1..17: mol_type = other DNA
aggctttgtgacatatc

SEQ ID NO: 27622 - DNA, 17 bp, synthetic construct
  source 1..17: mol_type = other DNA
gaaggctttgtgacata

SEQ ID NO: 27623 - DNA, 17 bp, synthetic construct
  source 1..17: mol_type = other DNA
agaaggctttgtgacat

SEQ ID NO: 27624 - DNA, 17 bp, synthetic construct
  source 1..17: mol_type = other DNA
cagaaggctttgtgaca

SEQ ID NO: 27625 - DNA, 17 bp, synthetic construct
  source 1..17: mol_type = other DNA
acagaaggctttgtgac

SEQ ID NO: 27626 - DNA, 17 bp, synthetic construct
  source 1..17: mol_type = other DNA
tacagaaggctttgtga

SEQ ID NO: 27627 - DNA, 17 bp, synthetic construct
  source 1..17: mol_type = other DNA
ctacagaaggctttgtg

SEQ ID NO: 27628 - DNA, 17 bp, synthetic construct
  source 1..17: mol_type = other DNA
cctacagaaggctttgt

SEQ ID NO: 27629 - DNA, 17 bp, synthetic construct
  source 1..17: mol_type = other DNA
gcctacagaaggctttg

SEQ ID NO: 27630 - DNA, 17 bp, synthetic construct
  source 1..17: mol_type = other DNA
tgcctacagaaggcttt

SEQ ID NO: 27631 - DNA, 17 bp, synthetic construct
  source 1..17: mol_type = other DNA
ttgcctacagaaggctt

SEQ ID NO: 27632 - DNA, 17 bp, synthetic construct
  source 1..17: mol_type = other DNA
tttgcctacagaaggct

SEQ ID NO: 27633 - DNA, 17 bp, synthetic construct
  source 1..17: mol_type = other DNA
ctttgcctacagaaggc

SEQ ID NO: 27634 - DNA, 17 bp, synthetic construct
  source 1..17: mol_type = other DNA
gctttgcctacagaagg

SEQ ID NO: 27635 - DNA, 17 bp, synthetic construct
  source 1..17: mol_type = other DNA
ggctttgcctacagaag

SEQ ID NO: 27636 - DNA, 17 bp, synthetic construct
  source 1..17: mol_type = other DNA
gggctttgcctacagaa

SEQ ID NO: 27637 - DNA, 17 bp, synthetic construct
  source 1..17: mol_type = other DNA
tgggctttgcctacaga

SEQ ID NO: 27638 - DNA, 17 bp, synthetic construct
  source 1..17: mol_type = other DNA
atgggctttgcctacag

SEQ ID NO: 27639 - DNA, 17 bp, synthetic construct
  source 1..17: mol_type = other DNA
tatgggctttgcctaca

SEQ ID NO: 27640 - DNA, 17 bp, synthetic construct
  source 1..17: mol_type = other DNA
gtatgggctttgcctac

SEQ ID NO: 27641 - DNA, 17 bp, synthetic construct
  source 1..17: mol_type = other DNA
tgtatgggctttgccta

SEQ ID NO: 27642 - DNA, 17 bp, synthetic construct
  source 1..17: mol_type = other DNA
ttgtatgggctttgcct

SEQ ID NO: 27643 - DNA, 17 bp, synthetic construct
  source 1..17: mol_type = other DNA
cttgtatgggctttgcc

SEQ ID NO: 27644 - DNA, 17 bp, synthetic construct
  source 1..17: mol_type = other DNA
ccttgtatgggctttgc

SEQ ID NO: 27645 - DNA, 17 bp, synthetic construct
  source 1..17: mol_type = other DNA
accttgtatgggctttg

SEQ ID NO: 27646 - DNA, 17 bp, synthetic construct
  source 1..17: mol_type = other DNA
aaccttgtatgggcttt

SEQ ID NO: 27647 - DNA, 17 bp, synthetic construct
  source 1..17: mol_type = other DNA
aaaccttgtatgggctt

SEQ ID NO: 27648 - DNA, 17 bp, synthetic construct
  source 1..17: mol_type = other DNA
taaaccttgtatgggct

SEQ ID NO: 27649 - DNA, 17 bp, synthetic construct
  source 1..17: mol_type = other DNA
ctaaaccttgtatgggc

SEQ ID NO: 27650 - DNA, 17 bp, synthetic construct
  source 1..17: mol_type = other DNA
ggtgatctaaaccttgt

SEQ ID NO: 27651 - DNA, 17 bp, synthetic construct
  source 1..17: mol_type = other DNA
cctaggtgatctaaacc

SEQ ID NO: 27652 - DNA, 17 bp, synthetic construct
  source 1..17: mol_type = other DNA
tcacctaggtgatctaa

SEQ ID NO: 27653 - DNA, 17 bp, synthetic construct
  source 1..17: mol_type = other DNA
atcacctaggtgatcta

SEQ ID NO: 27654 - DNA, 17 bp, synthetic construct
  source 1..17: mol_type = other DNA
gatcacctaggtgatct

SEQ ID NO: 27655 - DNA, 17 bp, synthetic construct
  source 1..17: mol_type = other DNA
tgatcacctaggtgatc

SEQ ID NO: 27656 - DNA, 17 bp, synthetic construct
  source 1..17: mol_type = other DNA
ctgatcacctaggtgat

SEQ ID NO: 27657 - DNA, 17 bp, synthetic construct
  source 1..17: mol_type = other DNA
actgatcacctaggtga

SEQ ID NO: 27658 - DNA, 17 bp, synthetic construct
  source 1..17: mol_type = other DNA
cactgatcacctaggtg

SEQ ID NO: 27659 - DNA, 17 bp, synthetic construct
  source 1..17: mol_type = other DNA
gcactgatcacctaggt

SEQ ID NO: 27660 - DNA, 17 bp, synthetic construct
  source 1..17: mol_type = other DNA
tgcactgatcacctagg

SEQ ID NO: 27661 - DNA, 17 bp, synthetic construct
  source 1..17: mol_type = other DNA
ctgcactgatcacctag

SEQ ID NO: 27662 - DNA, 17 bp, synthetic construct
  source 1..17: mol_type = other DNA
actgcactgatcaccta

SEQ ID NO: 27663 - DNA, 17 bp, synthetic construct
  source 1..17: mol_type = other DNA
cactgcactgatcacct

SEQ ID NO: 27664 - DNA, 17 bp, synthetic construct
  source 1..17: mol_type = other DNA
tcactgcactgatcacc

SEQ ID NO: 27665 - DNA, 17 bp, synthetic construct
  source 1..17: mol_type = other DNA
atcactgcactgatcac

SEQ ID NO: 27666 - DNA, 17 bp, synthetic construct
  source 1..17: mol_type = other DNA
tatcactgcactgatca

SEQ ID NO: 27667 - DNA, 17 bp, synthetic construct
  source 1..17: mol_type = other DNA
atatcactgcactgatc

SEQ ID NO: 27668 - DNA, 17 bp, synthetic construct
  source 1..17: mol_type = other DNA
catatcactgcactgat

SEQ ID NO: 27669 - DNA, 17 bp, synthetic construct
  source 1..17: mol_type = other DNA
acatatcactgcactga

SEQ ID NO: 27670 - DNA, 17 bp, synthetic construct
  source 1..17: mol_type = other DNA
gacatatcactgcactg

SEQ ID NO: 27671 - DNA, 17 bp, synthetic construct
  source 1..17: mol_type = other DNA
tgacatatcactgcact

SEQ ID NO: 27672 - DNA, 17 bp, synthetic construct
  source 1..17: mol_type = other DNA
gtgacatatcactgcac

SEQ ID NO: 27673 - DNA, 17 bp, synthetic construct
  source 1..17: mol_type = other DNA
tgtgacatatcactgca

SEQ ID NO: 27674 - DNA, 17 bp, synthetic construct
  source 1..17: mol_type = other DNA
ttgtgacatatcactgc

SEQ ID NO: 27675 - DNA, 17 bp, synthetic construct
  source 1..17: mol_type = other DNA
cagggatttttgtgaca

SEQ ID NO: 27676 - DNA, 17 bp, synthetic construct
  source 1..17: mol_type = other DNA
acagggatttttgtgac

SEQ ID NO: 27677 - DNA, 17 bp, synthetic construct
  source 1..17: mol_type = other DNA
ctacagggatttttgtg

SEQ ID NO: 27678 - DNA, 17 bp, synthetic construct
  source 1..17: mol_type = other DNA
tctacagggatttttgt

SEQ ID NO: 27679 - DNA, 17 bp, synthetic construct
  source 1..17: mol_type = other DNA
gtctacagggatttttg

SEQ ID NO: 27680 - DNA, 17 bp, synthetic construct
  source 1..17: mol_type = other DNA
tgtctacagggattttt

SEQ ID NO: 27681 - DNA, 17 bp, synthetic construct
  source 1..17: mol_type = other DNA
ctgtctacagggatttt

SEQ ID NO: 27682 - DNA, 17 bp, synthetic construct
  source 1..17: mol_type = other DNA
tctgtctacagggattt

SEQ ID NO: 27683 - DNA, 17 bp, synthetic construct
  source 1..17: mol_type = other DNA
ctctgtctacagggatt

SEQ ID NO: 27684 - DNA, 17 bp, synthetic construct
  source 1..17: mol_type = other DNA
gctctgtctacagggat

SEQ ID NO: 27685 - DNA, 17 bp, synthetic construct
  source 1..17: mol_type = other DNA
ggctctgtctacaggga

SEQ ID NO: 27686 - DNA, 17 bp, synthetic construct
  source 1..17: mol_type = other DNA
aggctctgtctacaggg

SEQ ID NO: 27687 - DNA, 17 bp, synthetic construct
  source 1..17: mol_type = other DNA
taggctctgtctacagg

SEQ ID NO: 27688 - DNA, 17 bp, synthetic construct
  source 1..17: mol_type = other DNA
ctaggctctgtctacag

SEQ ID NO: 27689 - DNA, 17 bp, synthetic construct
  source 1..17: mol_type = other DNA
cttgtctaggctctgtc

SEQ ID NO: 27690 - DNA, 17 bp, synthetic construct
  source 1..17: mol_type = other DNA
tcttgtctaggctctgt

SEQ ID NO: 27691 - DNA, 17 bp, synthetic construct
  source 1..17: mol_type = other DNA
taactcttgtctaggct

SEQ ID NO: 27692 - DNA, 17 bp, synthetic construct
  source 1..17: mol_type = other DNA
gtaactcttgtctaggc

SEQ ID NO: 27693 - DNA, 17 bp, synthetic construct
  source 1..17: mol_type = other DNA
agtaactcttgtctagg

SEQ ID NO: 27694 - DNA, 17 bp, synthetic construct
  source 1..17: mol_type = other DNA
ggtgaagtaactcttgt

SEQ ID NO: 27695 - DNA, 17 bp, synthetic construct
  source 1..17: mol_type = other DNA
ccaggtgaagtaactct

SEQ ID NO: 27696 - DNA, 17 bp, synthetic construct
  source 1..17: mol_type = other DNA
cccaggtgaagtaactc

SEQ ID NO: 27697 - DNA, 17 bp, synthetic construct
  source 1..17: mol_type = other DNA
acccaggtgaagtaact

SEQ ID NO: 27698 - DNA, 17 bp, synthetic construct
  source 1..17: mol_type = other DNA
cacccaggtgaagtaac

SEQ ID NO: 27699 - DNA, 17 bp, synthetic construct
  source 1..17: mol_type = other DNA
tcacccaggtgaagtaa

SEQ ID NO: 27700 - DNA, 17 bp, synthetic construct
  source 1..17: mol_type = other DNA
atcacccaggtgaagta

SEQ ID NO: 27701 - DNA, 17 bp, synthetic construct
  source 1..17: mol_type = other DNA
gatcacccaggtgaagt

SEQ ID NO: 27702 - DNA, 17 bp, synthetic construct
  source 1..17: mol_type = other DNA
tgatcacccaggtgaag

SEQ ID NO: 27703 - DNA, 17 bp, synthetic construct
  source 1..17: mol_type = other DNA
ctgatcacccaggtgaa

SEQ ID NO: 27704 - DNA, 17 bp, synthetic construct
  source 1..17: mol_type = other DNA
atctgcactgatcaccc

SEQ ID NO: 27705 - DNA, 17 bp, synthetic construct
  source 1..17: mol_type = other DNA
tatctgcactgatcacc

SEQ ID NO: 27706 - DNA, 17 bp, synthetic construct
  source 1..17: mol_type = other DNA
atatctgcactgatcac

SEQ ID NO: 27707 - DNA, 17 bp, synthetic construct
  source 1..17: mol_type = other DNA
gggcattgtgtcaaata

SEQ ID NO: 27708 - DNA, 17 bp, synthetic construct
  source 1..17: mol_type = other DNA
ggggcattgtgtcaaat

SEQ ID NO: 27709 - DNA, 17 bp, synthetic construct
  source 1..17: mol_type = other DNA
gggggcattgtgtcaaa

SEQ ID NO: 27710 - DNA, 17 bp, synthetic construct
  source 1..17: mol_type = other DNA
tgggggcattgtgtcaa

SEQ ID NO: 27711 - DNA, 17 bp, synthetic construct
  source 1..17: mol_type = other DNA
atgggggcattgtgtca

SEQ ID NO: 27712 - DNA, 17 bp, synthetic construct
  source 1..17: mol_type = other DNA
tatgggggcattgtgtc

SEQ ID NO: 27713 - DNA, 17 bp, synthetic construct
  source 1..17: mol_type = other DNA
ctatgggggcattgtgt

SEQ ID NO: 27714 - DNA, 17 bp, synthetic construct
  source 1..17: mol_type = other DNA
tctatgggggcattgtg

SEQ ID NO: 27715 - DNA, 17 bp, synthetic construct
  source 1..17: mol_type = other DNA
gtctatgggggcattgt

SEQ ID NO: 27716 - DNA, 17 bp, synthetic construct
  source 1..17: mol_type = other DNA
tgtctatgggggcattg

SEQ ID NO: 27717 - DNA, 17 bp, synthetic construct
  source 1..17: mol_type = other DNA
ctgtctatgggggcatt

SEQ ID NO: 27718 - DNA, 17 bp, synthetic construct
  source 1..17: mol_type = other DNA
tctgtctatgggggcat

SEQ ID NO: 27719 - DNA, 17 bp, synthetic construct
  source 1..17: mol_type = other DNA
ctctgtctatgggggca

SEQ ID NO: 27720 - DNA, 17 bp, synthetic construct
  source 1..17: mol_type = other DNA
gctctgtctatgggggc

SEQ ID NO: 27721 - DNA, 17 bp, synthetic construct
  source 1..17: mol_type = other DNA
ggctctgtctatggggg

SEQ ID NO: 27722 - DNA, 17 bp, synthetic construct
  source 1..17: mol_type = other DNA
aggctctgtctatgggg

SEQ ID NO: 27723 - DNA, 17 bp, synthetic construct
  source 1..17: mol_type = other DNA
taggctctgtctatggg

SEQ ID NO: 27724 - DNA, 17 bp, synthetic construct
  source 1..17: mol_type = other DNA
ctaggctctgtctatgg

SEQ ID NO: 27725 - DNA, 17 bp, synthetic construct
  source 1..17: mol_type = other DNA
cctaggctctgtctatg

SEQ ID NO: 27726 - DNA, 17 bp, synthetic construct
  source 1..17: mol_type = other DNA
gcctaggctctgtctat

SEQ ID NO: 27727 - DNA, 17 bp, synthetic construct
  source 1..17: mol_type = other DNA
tgcctaggctctgtcta

SEQ ID NO: 27728 - DNA, 17 bp, synthetic construct
  source 1..17: mol_type = other DNA
ttgcctaggctctgtct

SEQ ID NO: 27729 - DNA, 17 bp, synthetic construct
  source 1..17: mol_type = other DNA
cttgcctaggctctgtc

SEQ ID NO: 27730 - DNA, 17 bp, synthetic construct
  source 1..17: mol_type = other DNA
tcttgcctaggctctgt

SEQ ID NO: 27731 - DNA, 17 bp, synthetic construct
  source 1..17: mol_type = other DNA
gtcttgcctaggctctg

SEQ ID NO: 27732 - DNA, 17 bp, synthetic construct
  source 1..17: mol_type = other DNA
agtcttgcctaggctct

SEQ ID NO: 27733 - DNA, 17 bp, synthetic construct
  source 1..17: mol_type = other DNA
aagtcttgcctaggctc

SEQ ID NO: 27734 - DNA, 17 bp, synthetic construct
  source 1..17: mol_type = other DNA
gaagtcttgcctaggct

SEQ ID NO: 27735 - DNA, 17 bp, synthetic construct
  source 1..17: mol_type = other DNA
ggaagtcttgcctaggc

SEQ ID NO: 27736 - DNA, 17 bp, synthetic construct
  source 1..17: mol_type = other DNA
tggaagtcttgcctagg

SEQ ID NO: 27737 - DNA, 17 bp, synthetic construct
  source 1..17: mol_type = other DNA
atggaagtcttgcctag

SEQ ID NO: 27738 - DNA, 17 bp, synthetic construct
  source 1..17: mol_type = other DNA
gatggaagtcttgccta

SEQ ID NO: 27739 - DNA, 17 bp, synthetic construct
  source 1..17: mol_type = other DNA
tgatggaagtcttgcct

SEQ ID NO: 27740 - DNA, 17 bp, synthetic construct
  source 1..17: mol_type = other DNA
gtgatggaagtcttgcc

SEQ ID NO: 27741 - DNA, 17 bp, synthetic construct
  source 1..17: mol_type = other DNA
ggtgatggaagtcttgc

SEQ ID NO: 27742 - DNA, 17 bp, synthetic construct
  source 1..17: mol_type = other DNA
aggtgatggaagtcttg

SEQ ID NO: 27743 - DNA, 17 bp, synthetic construct
  source 1..17: mol_type = other DNA
caggtgatggaagtctt

SEQ ID NO: 27744 - DNA, 17 bp, synthetic construct
  source 1..17: mol_type = other DNA
ccaggtgatggaagtct

SEQ ID NO: 27745 - DNA, 17 bp, synthetic construct
  source 1..17: mol_type = other DNA
cccaggtgatggaagtc

SEQ ID NO: 27746 - DNA, 17 bp, synthetic construct
  source 1..17: mol_type = other DNA
acccaggtgatggaagt

SEQ ID NO: 27747 - DNA, 17 bp, synthetic construct
  source 1..17: mol_type = other DNA
cacccaggtgatggaag

SEQ ID NO: 27748 - DNA, 17 bp, synthetic construct
  source 1..17: mol_type = other DNA
tcacccaggtgatggaa

SEQ ID NO: 27749 - DNA, 17 bp, synthetic construct
  source 1..17: mol_type = other DNA
gacatatctctgcactg

SEQ ID NO: 27750 - DNA, 17 bp, synthetic construct
  source 1..17: mol_type = other DNA
ggggatttgtgacatat

SEQ ID NO: 27751 - DNA, 17 bp, synthetic construct
  source 1..17: mol_type = other DNA
gggggatttgtgacata

SEQ ID NO: 27752 - DNA, 17 bp, synthetic construct
  source 1..17: mol_type = other DNA
agggggatttgtgacat

SEQ ID NO: 27753 - DNA, 17 bp, synthetic construct
  source 1..17: mol_type = other DNA
gagggggatttgtgaca

SEQ ID NO: 27754 - DNA, 17 bp, synthetic construct
  source 1..17: mol_type = other DNA
agagggggatttgtgac

SEQ ID NO: 27755 - DNA, 17 bp, synthetic construct
  source 1..17: mol_type = other DNA
tagagggggatttgtga

SEQ ID NO: 27756 - DNA, 17 bp, synthetic construct
  source 1..17: mol_type = other DNA
ctagagggggatttgtg

SEQ ID NO: 27757 - DNA, 17 bp, synthetic construct
  source 1..17: mol_type = other DNA
cctagagggggatttgt

SEQ ID NO: 27758 - DNA, 17 bp, synthetic construct
  source 1..17: mol_type = other DNA
gcctagagggggatttg

SEQ ID NO: 27759 - DNA, 17 bp, synthetic construct
  source 1..17: mol_type = other DNA
tgcctagagggggattt

SEQ ID NO: 27760 - DNA, 17 bp, synthetic construct
  source 1..17: mol_type = other DNA
ctgcctagagggggatt

SEQ ID NO: 27761 - DNA, 17 bp, synthetic construct
  source 1..17: mol_type = other DNA
tctgcctagagggggat

SEQ ID NO: 27762 - DNA, 17 bp, synthetic construct
  source 1..17: mol_type = other DNA
ctctgcctagaggggga

SEQ ID NO: 27763 - DNA, 17 bp, synthetic construct
  source 1..17: mol_type = other DNA
actctgcctagaggggg

SEQ ID NO: 27764 - DNA, 17 bp, synthetic construct
  source 1..17: mol_type = other DNA
tactctgcctagagggg

SEQ ID NO: 27765 - DNA, 17 bp, synthetic construct
  source 1..17: mol_type = other DNA
atactctgcctagaggg

SEQ ID NO: 27766 - DNA, 17 bp, synthetic construct
  source 1..17: mol_type = other DNA
tatactctgcctagagg

SEQ ID NO: 27767 - DNA, 17 bp, synthetic construct
  source 1..17: mol_type = other DNA
ctatactctgcctagag

SEQ ID NO: 27768 - DNA, 17 bp, synthetic construct
  source 1..17: mol_type = other DNA
tctatactctgcctaga

SEQ ID NO: 27769 - DNA, 17 bp, synthetic construct
  source 1..17: mol_type = other DNA
ctctatactctgcctag

SEQ ID NO: 27770 - DNA, 17 bp, synthetic construct
  source 1..17: mol_type = other DNA
tctctatactctgccta

SEQ ID NO: 27771 - DNA, 17 bp, synthetic construct
  source 1..17: mol_type = other DNA
ttctctatactctgcct

SEQ ID NO: 27772 - DNA, 17 bp, synthetic construct
  source 1..17: mol_type = other DNA
cttctctatactctgcc

SEQ ID NO: 27773 - DNA, 17 bp, synthetic construct
  source 1..17: mol_type = other DNA
tcttctctatactctgc

SEQ ID NO: 27774 - DNA, 17 bp, synthetic construct
  source 1..17: mol_type = other DNA
ctcttctctatactctg

SEQ ID NO: 27775 - DNA, 17 bp, synthetic construct
  source 1..17: mol_type = other DNA
actcttctctatactct

SEQ ID NO: 27776 - DNA, 17 bp, synthetic construct
  source 1..17: mol_type = other DNA
gactcttctctatactc

SEQ ID NO: 27777 - DNA, 17 bp, synthetic construct
  source 1..17: mol_type = other DNA
ggactcttctctatact

SEQ ID NO: 27778 - DNA, 17 bp, synthetic construct
  source 1..17: mol_type = other DNA
gggactcttctctatac

SEQ ID NO: 27779 - DNA, 17 bp, synthetic construct
  source 1..17: mol_type = other DNA
tgggactcttctctata

SEQ ID NO: 27780 - DNA, 17 bp, synthetic construct
  source 1..17: mol_type = other DNA
atgggactcttctctat

SEQ ID NO: 27781 - DNA, 17 bp, synthetic construct
  source 1..17: mol_type = other DNA
gatgggactcttctcta

SEQ ID NO: 27782 - DNA, 17 bp, synthetic construct
  source 1..17: mol_type = other DNA
tgatgggactcttctct

SEQ ID NO: 27783 - DNA, 17 bp, synthetic construct
  source 1..17: mol_type = other DNA
gtgatgggactcttctc

SEQ ID NO: 27784 - DNA, 17 bp, synthetic construct
  source 1..17: mol_type = other DNA
ggtgatgggactcttct

SEQ ID NO: 27785 - DNA, 17 bp, synthetic construct
  source 1..17: mol_type = other DNA
aggtgatgggactcttc

SEQ ID NO: 27786 - DNA, 17 bp, synthetic construct
  source 1..17: mol_type = other DNA
caggtgatgggactctt

SEQ ID NO: 27787 - DNA, 17 bp, synthetic construct
  source 1..17: mol_type = other DNA
ccaggtgatgggactct

SEQ ID NO: 27788 - DNA, 17 bp, synthetic construct
  source 1..17: mol_type = other DNA
cccaggtgatgggactc

SEQ ID NO: 27789 - DNA, 17 bp, synthetic construct
  source 1..17: mol_type = other DNA
acccaggtgatgggact

SEQ ID NO: 27790 - DNA, 17 bp, synthetic construct
  source 1..17: mol_type = other DNA
cacccaggtgatgggac

SEQ ID NO: 27791 - DNA, 17 bp, synthetic construct
  source 1..17: mol_type = other DNA
tcacccaggtgatggga

SEQ ID NO: 27792 - DNA, 17 bp, synthetic construct
  source 1..17: mol_type = other DNA
atcacccaggtgatggg

SEQ ID NO: 27793 - DNA, 17 bp, synthetic construct
  source 1..17: mol_type = other DNA
acaggggacattgtgaa

SEQ ID NO: 27794 - DNA, 17 bp, synthetic construct
  source 1..17: mol_type = other DNA
tacaggggacattgtga

SEQ ID NO: 27795 - DNA, 17 bp, synthetic construct
  source 1..17: mol_type = other DNA
ctacaggggacattgtg

SEQ ID NO: 27796 - DNA, 17 bp, synthetic construct
  source 1..17: mol_type = other DNA
cctacaggggacattgt

SEQ ID NO: 27797 - DNA, 17 bp, synthetic construct
  source 1..17: mol_type = other DNA
gcctacaggggacattg

SEQ ID NO: 27798 - DNA, 17 bp, synthetic construct
  source 1..17: mol_type = other DNA
tgcctacaggggacatt

SEQ ID NO: 27799 - DNA, 17 bp, synthetic construct
  source 1..17: mol_type = other DNA
ctgcctacaggggacat

SEQ ID NO: 27800 - DNA, 17 bp, synthetic construct
  source 1..17: mol_type = other DNA
tctgcctacaggggaca

SEQ ID NO: 27801 - DNA, 17 bp, synthetic construct
  source 1..17: mol_type = other DNA
ctctgcctacaggggac

SEQ ID NO: 27802 - DNA, 17 bp, synthetic construct
  source 1..17: mol_type = other DNA
tctctgcctacagggga

SEQ ID NO: 27803 - DNA, 17 bp, synthetic construct
  source 1..17: mol_type = other DNA
ctctctgcctacagggg

SEQ ID NO: 27804 - DNA, 17 bp, synthetic construct
  source 1..17: mol_type = other DNA
actctctgcctacaggg

SEQ ID NO: 27805 - DNA, 17 bp, synthetic construct
  source 1..17: mol_type = other DNA
cactctctgcctacagg

SEQ ID NO: 27806 - DNA, 17 bp, synthetic construct
  source 1..17: mol_type = other DNA
ccactctctgcctacag

SEQ ID NO: 27807 - DNA, 17 bp, synthetic construct
  source 1..17: mol_type = other DNA
tccactctctgcctaca

SEQ ID NO: 27808 - DNA, 17 bp, synthetic construct
  source 1..17: mol_type = other DNA
gtccactctctgcctac

SEQ ID NO: 27809 - DNA, 17 bp, synthetic construct
  source 1..17: mol_type = other DNA
tgtccactctctgccta

SEQ ID NO: 27810 - DNA, 17 bp, synthetic construct
  source 1..17: mol_type = other DNA
ttgtccactctctgcct

SEQ ID NO: 27811 - DNA, 17 bp, synthetic construct
  source 1..17: mol_type = other DNA
cttgtccactctctgcc

SEQ ID NO: 27812 - DNA, 17 bp, synthetic construct
  source 1..17: mol_type = other DNA
tcttgtccactctctgc

SEQ ID NO: 27813 - DNA, 17 bp, synthetic construct
  source 1..17: mol_type = other DNA
ctcttgtccactctctg

SEQ ID NO: 27814 - DNA, 17 bp, synthetic construct
  source 1..17: mol_type = other DNA
actcttgtccactctct

SEQ ID NO: 27815 - DNA, 17 bp, synthetic construct
  source 1..17: mol_type = other DNA
aactcttgtccactctc

SEQ ID NO: 27816 - DNA, 17 bp, synthetic construct
  source 1..17: mol_type = other DNA
taactcttgtccactct

SEQ ID NO: 27817 - DNA, 17 bp, synthetic construct
  source 1..17: mol_type = other DNA
gtaactcttgtccactc

SEQ ID NO: 27818 - DNA, 17 bp, synthetic construct
  source 1..17: mol_type = other DNA
tgtaactcttgtccact

SEQ ID NO: 27819 - DNA, 17 bp, synthetic construct
  source 1..17: mol_type = other DNA
atgtaactcttgtccac

SEQ ID NO: 27820 - DNA, 17 bp, synthetic construct
  source 1..17: mol_type = other DNA
gatgtaactcttgtcca

SEQ ID NO: 27821 - DNA, 17 bp, synthetic construct
  source 1..17: mol_type = other DNA
tgatgtaactcttgtcc

SEQ ID NO: 27822 - DNA, 17 bp, synthetic construct
  source 1..17: mol_type = other DNA
gtgatgtaactcttgtc

SEQ ID NO: 27823 - DNA, 17 bp, synthetic construct
  source 1..17: mol_type = other DNA
ggtgatgtaactcttgt

SEQ ID NO: 27824 - DNA, 17 bp, synthetic construct
  source 1..17: mol_type = other DNA
ctaggtgatgtaactct

SEQ ID NO: 27825 - DNA, 17 bp, synthetic construct
  source 1..17: mol_type = other DNA
atcatctaggtgatgta

SEQ ID NO: 27826 - DNA, 17 bp, synthetic construct
  source 1..17: mol_type = other DNA
gatcatctaggtgatgt

SEQ ID NO: 27827 - DNA, 17 bp, synthetic construct
  source 1..17: mol_type = other DNA
cagatcatctaggtgat

SEQ ID NO: 27828 - DNA, 17 bp, synthetic construct
  source 1..17: mol_type = other DNA
acagatcatctaggtga

SEQ ID NO: 27829 - DNA, 17 bp, synthetic construct
  source 1..17: mol_type = other DNA
cacagatcatctaggtg

SEQ ID NO: 27830 - DNA, 17 bp, synthetic construct
  source 1..17: mol_type = other DNA
gcacagatcatctaggt

SEQ ID NO: 27831 - DNA, 17 bp, synthetic construct
  source 1..17: mol_type = other DNA
tgcacagatcatctagg

SEQ ID NO: 27832 - DNA, 17 bp, synthetic construct
  source 1..17: mol_type = other DNA
ctgcacagatcatctag

SEQ ID NO: 27833 - DNA, 17 bp, synthetic construct
  source 1..17: mol_type = other DNA
tctgcacagatcatcta

SEQ ID NO: 27834 - DNA, 17 bp, synthetic construct
  source 1..17: mol_type = other DNA
ctctgcacagatcatct

SEQ ID NO: 27835 - DNA, 17 bp, synthetic construct
  source 1..17: mol_type = other DNA
gctctgcacagatcatc

SEQ ID NO: 27836 - DNA, 17 bp, synthetic construct
  source 1..17: mol_type = other DNA
agctctgcacagatcat

SEQ ID NO: 27837 - DNA, 17 bp, synthetic construct
  source 1..17: mol_type = other DNA
tagctctgcacagatca

SEQ ID NO: 27838 - DNA, 17 bp, synthetic construct
  source 1..17: mol_type = other DNA
atagctctgcacagatc

SEQ ID NO: 27839 - DNA, 17 bp, synthetic construct
  source 1..17: mol_type = other DNA
catagctctgcacagat

SEQ ID NO: 27840 - DNA, 17 bp, synthetic construct
  source 1..17: mol_type = other DNA
acatagctctgcacaga

SEQ ID NO: 27841 - DNA, 17 bp, synthetic construct
  source 1..17: mol_type = other DNA
gacatagctctgcacag

SEQ ID NO: 27842 - DNA, 17 bp, synthetic construct
  source 1..17: mol_type = other DNA
tgacatagctctgcaca

SEQ ID NO: 27843 - DNA, 17 bp, synthetic construct
  source 1..17: mol_type = other DNA
ttgacatagctctgcac

SEQ ID NO: 27844 - DNA, 17 bp, synthetic construct
  source 1..17: mol_type = other DNA
tttgacatagctctgca

SEQ ID NO: 27845 - DNA, 17 bp, synthetic construct
  source 1..17: mol_type = other DNA
ttttgacatagctctgc

SEQ ID NO: 27846 - DNA, 17 bp, synthetic construct
  source 1..17: mol_type = other DNA
gttttgacatagctctg

SEQ ID NO: 27847 - DNA, 17 bp, synthetic construct
  source 1..17: mol_type = other DNA
cgttttgacatagctct

SEQ ID NO: 27848 - DNA, 17 bp, synthetic construct
  source 1..17: mol_type = other DNA
gcgttttgacatagctc

SEQ ID NO: 27849 - DNA, 17 bp, synthetic construct
  source 1..17: mol_type = other DNA
ggcgttttgacatagct

SEQ ID NO: 27850 - DNA, 17 bp, synthetic construct
  source 1..17: mol_type = other DNA
gggcgttttgacatagc

SEQ ID NO: 27851 - DNA, 17 bp, synthetic construct
  source 1..17: mol_type = other DNA
ggggcgttttgacatag

SEQ ID NO: 27852 - DNA, 17 bp, synthetic construct
  source 1..17: mol_type = other DNA
aggggcgttttgacata

SEQ ID NO: 27853 - DNA, 17 bp, synthetic construct
  source 1..17: mol_type = other DNA
caggggcgttttgacat

SEQ ID NO: 27854 - DNA, 17 bp, synthetic construct
  source 1..17: mol_type = other DNA
acaggggcgttttgaca

SEQ ID NO: 27855 - DNA, 17 bp, synthetic construct
  source 1..17: mol_type = other DNA
tacaggggcgttttgac

SEQ ID NO: 27856 - DNA, 17 bp, synthetic construct
  source 1..17: mol_type = other DNA
ctacaggggcgttttga

SEQ ID NO: 27857 - DNA, 17 bp, synthetic construct
  source 1..17: mol_type = other DNA
cctacaggggcgttttg

SEQ ID NO: 27858 - DNA, 17 bp, synthetic construct
  source 1..17: mol_type = other DNA
gcctacaggggcgtttt

SEQ ID NO: 27859 - DNA, 17 bp, synthetic construct
  source 1..17: mol_type = other DNA
tgcctacaggggcgttt

SEQ ID NO: 27860 - DNA, 17 bp, synthetic construct
  source 1..17: mol_type = other DNA
ctgcctacaggggcgtt

SEQ ID NO: 27861 - DNA, 17 bp, synthetic construct
  source 1..17: mol_type = other DNA
tctgcctacaggggcgt

SEQ ID NO: 27862 - DNA, 17 bp, synthetic construct
  source 1..17: mol_type = other DNA
ctctgcctacaggggcg

SEQ ID NO: 27863 - DNA, 17 bp, synthetic construct
  source 1..17: mol_type = other DNA
atctaggctctgcctac

SEQ ID NO: 27864 - DNA, 17 bp, synthetic construct
  source 1..17: mol_type = other DNA
catctaggctctgccta

SEQ ID NO: 27865 - DNA, 17 bp, synthetic construct
  source 1..17: mol_type = other DNA
tcatctaggctctgcct

SEQ ID NO: 27866 - DNA, 17 bp, synthetic construct
  source 1..17: mol_type = other DNA
ctcatctaggctctgcc

SEQ ID NO: 27867 - DNA, 17 bp, synthetic construct
  source 1..17: mol_type = other DNA
actcatctaggctctgc

SEQ ID NO: 27868 - DNA, 17 bp, synthetic construct
  source 1..17: mol_type = other DNA
cactcatctaggctctg

SEQ ID NO: 27869 - DNA, 17 bp, synthetic construct
  source 1..17: mol_type = other DNA
acactcatctaggctct

SEQ ID NO: 27870 - DNA, 17 bp, synthetic construct
  source 1..17: mol_type = other DNA
aacactcatctaggctc

SEQ ID NO: 27871 - DNA, 17 bp, synthetic construct
  source 1..17: mol_type = other DNA
taacactcatctaggct

SEQ ID NO: 27872 - DNA, 17 bp, synthetic construct
  source 1..17: mol_type = other DNA
gtaacactcatctaggc

SEQ ID NO: 27873 - DNA, 17 bp, synthetic construct
  source 1..17: mol_type = other DNA
ggtgatgtaacactcat

SEQ ID NO: 27874 - DNA, 17 bp, synthetic construct
  source 1..17: mol_type = other DNA
aggtgatgtaacactca

SEQ ID NO: 27875 - DNA, 17 bp, synthetic construct
  source 1..17: mol_type = other DNA
caggtgatgtaacactc

SEQ ID NO: 27876 - DNA, 17 bp, synthetic construct
  source 1..17: mol_type = other DNA
atgatcacccaggtgat

SEQ ID NO: 27877 - DNA, 17 bp, synthetic construct
  source 1..17: mol_type = other DNA
aatgatcacccaggtga

SEQ ID NO: 27878 - DNA, 17 bp, synthetic construct
  source 1..17: mol_type = other DNA
caatgatcacccaggtg

SEQ ID NO: 27879 - DNA, 17 bp, synthetic construct
  source 1..17: mol_type = other DNA
gcaatgatcacccaggt

SEQ ID NO: 27880 - DNA, 17 bp, synthetic construct
  source 1..17: mol_type = other DNA
tgcaatgatcacccagg

SEQ ID NO: 27881 - DNA, 17 bp, synthetic construct
  source 1..17: mol_type = other DNA
ctgcaatgatcacccag

SEQ ID NO: 27882 - DNA, 17 bp, synthetic construct
  source 1..17: mol_type = other DNA
tctgcaatgatcaccca

SEQ ID NO: 27883 - DNA, 17 bp, synthetic construct
  source 1..17: mol_type = other DNA
ctctgcaatgatcaccc

SEQ ID NO: 27884 - DNA, 17 bp, synthetic construct
  source 1..17: mol_type = other DNA
tctctgcaatgatcacc

SEQ ID NO: 27885 - DNA, 17 bp, synthetic construct
  source 1..17: mol_type = other DNA
atctctgcaatgatcac

SEQ ID NO: 27886 - DNA, 17 bp, synthetic construct
  source 1..17: mol_type = other DNA
gtatctctgcaatgatc

SEQ ID NO: 27887 - DNA, 17 bp, synthetic construct
  source 1..17: mol_type = other DNA
cgtatctctgcaatgat

SEQ ID NO: 27888 - DNA, 17 bp, synthetic construct
  source 1..17: mol_type = other DNA
acgtatctctgcaatga

SEQ ID NO: 27889 - DNA, 17 bp, synthetic construct
  source 1..17: mol_type = other DNA
gacgtatctctgcaatg

SEQ ID NO: 27890 - DNA, 17 bp, synthetic construct
  source 1..17: mol_type = other DNA
tgacgtatctctgcaat

SEQ ID NO: 27891 - DNA, 17 bp, synthetic construct
  source 1..17: mol_type = other DNA
gtgacgtatctctgcaa

SEQ ID NO: 27892 - DNA, 17 bp, synthetic construct
  source 1..17: mol_type = other DNA
tgtgacgtatctctgca

SEQ ID NO: 27893 - DNA, 17 bp, synthetic construct
  source 1..17: mol_type = other DNA
ttgtgacgtatctctgc

SEQ ID NO: 27894 - DNA, 17 bp, synthetic construct
  source 1..17: mol_type = other DNA
attgtgacgtatctctg

SEQ ID NO: 27895 - DNA, 17 bp, synthetic construct
  source 1..17: mol_type = other DNA
tattgtgacgtatctct

SEQ ID NO: 27896 - DNA, 17 bp, synthetic construct
  source 1..17: mol_type = other DNA
gtattgtgacgtatctc

SEQ ID NO: 27897 - DNA, 17 bp, synthetic construct
  source 1..17: mol_type = other DNA
ggtattgtgacgtatct

SEQ ID NO: 27898 - DNA, 17 bp, synthetic construct
  source 1..17: mol_type = other DNA
gggtattgtgacgtatc

SEQ ID NO: 27899 - DNA, 17 bp, synthetic construct
  source 1..17: mol_type = other DNA
ggggtattgtgacgtat

SEQ ID NO: 27900 - DNA, 17 bp, synthetic construct
  source 1..17: mol_type = other DNA
gggggtattgtgacgta

SEQ ID NO: 27901 - DNA, 17 bp, synthetic construct
  source 1..17: mol_type = other DNA
agggggtattgtgacgt

SEQ ID NO: 27902 - DNA, 17 bp, synthetic construct
  source 1..17: mol_type = other DNA
cagggggtattgtgacg

SEQ ID NO: 27903 - DNA, 17 bp, synthetic construct
  source 1..17: mol_type = other DNA
acagggggtattgtgac

SEQ ID NO: 27904 - DNA, 17 bp, synthetic construct
  source 1..17: mol_type = other DNA
tacagggggtattgtga

SEQ ID NO: 27905 - DNA, 17 bp, synthetic construct
  source 1..17: mol_type = other DNA
ctacagggggtattgtg

SEQ ID NO: 27906 - DNA, 17 bp, synthetic construct
  source 1..17: mol_type = other DNA
cctacagggggtattgt

SEQ ID NO: 27907 - DNA, 17 bp, synthetic construct
  source 1..17: mol_type = other DNA
acctacagggggtattg

SEQ ID NO: 27908 - DNA, 17 bp, synthetic construct
  source 1..17: mol_type = other DNA
cacctacagggggtatt

SEQ ID NO: 27909 - DNA, 17 bp, synthetic construct
  source 1..17: mol_type = other DNA
ccacctacagggggtat

SEQ ID NO: 27910 - DNA, 17 bp, synthetic construct
  source 1..17: mol_type = other DNA
cccacctacagggggta

SEQ ID NO: 27911 - DNA, 17 bp, synthetic construct
  source 1..17: mol_type = other DNA
taggccccacctacagg

SEQ ID NO: 27912 - DNA, 17 bp, synthetic construct
  source 1..17: mol_type = other DNA
ctaggccccacctacag

SEQ ID NO: 27913 - DNA, 17 bp, synthetic construct
  source 1..17: mol_type = other DNA
tctaggccccacctaca

SEQ ID NO: 27914 - DNA, 17 bp, synthetic construct
  source 1..17: mol_type = other DNA
tcttgtctaggccccac

SEQ ID NO: 27915 - DNA, 17 bp, synthetic construct
  source 1..17: mol_type = other DNA
actcttgtctaggcccc

SEQ ID NO: 27916 - DNA, 17 bp, synthetic construct
  source 1..17: mol_type = other DNA
aactcttgtctaggccc

SEQ ID NO: 27917 - DNA, 17 bp, synthetic construct
  source 1..17: mol_type = other DNA
taactcttgtctaggcc

SEQ ID NO: 27918 - DNA, 17 bp, synthetic construct
  source 1..17: mol_type = other DNA
tgtaactcttgtctagg

SEQ ID NO: 27919 - DNA, 17 bp, synthetic construct
  source 1..17: mol_type = other DNA
caggtgatgtaactctt

SEQ ID NO: 27920 - DNA, 17 bp, synthetic construct
  source 1..17: mol_type = other DNA
ccaggtgatgtaactct

SEQ ID NO: 27921 - DNA, 17 bp, synthetic construct
  source 1..17: mol_type = other DNA
cccaggtgatgtaactc

SEQ ID NO: 27922 - DNA, 17 bp, synthetic construct
  source 1..17: mol_type = other DNA
acccaggtgatgtaact

SEQ ID NO: 27923 - DNA, 17 bp, synthetic construct
  source 1..17: mol_type = other DNA
tactgatcacccaggtg

SEQ ID NO: 27924 - DNA, 17 bp, synthetic construct
  source 1..17: mol_type = other DNA
gtactgatcacccaggt

SEQ ID NO: 27925 - DNA, 17 bp, synthetic construct
  source 1..17: mol_type = other DNA
tgtactgatcacccagg

SEQ ID NO: 27926 - DNA, 17 bp, synthetic construct
  source 1..17: mol_type = other DNA
ctgtactgatcacccag

SEQ ID NO: 27927 - DNA, 17 bp, synthetic construct
  source 1..17: mol_type = other DNA
tctgtactgatcaccca

SEQ ID NO: 27928 - DNA, 17 bp, synthetic construct
  source 1..17: mol_type = other DNA
ttctgtactgatcaccc

SEQ ID NO: 27929 - DNA, 17 bp, synthetic construct
  source 1..17: mol_type = other DNA
cttctgtactgatcacc

SEQ ID NO: 27930 - DNA, 17 bp, synthetic construct
  source 1..17: mol_type = other DNA
acttctgtactgatcac

SEQ ID NO: 27931 - DNA, 17 bp, synthetic construct
  source 1..17: mol_type = other DNA
tacttctgtactgatca

SEQ ID NO: 27932 - DNA, 17 bp, synthetic construct
  source 1..17: mol_type = other DNA
gtgacatacttctgtac

SEQ ID NO: 27933 - DNA, 17 bp, synthetic construct
  source 1..17: mol_type = other DNA
ttgtgacatacttctgt

SEQ ID NO: 27934 - DNA, 17 bp, synthetic construct
  source 1..17: mol_type = other DNA
ctttgtgacatacttct

SEQ ID NO: 27935 - DNA, 17 bp, synthetic construct
  source 1..17: mol_type = other DNA
gctttgtgacatacttc

SEQ ID NO: 27936 - DNA, 17 bp, synthetic construct
  source 1..17: mol_type = other DNA
ggctttgtgacatactt

SEQ ID NO: 27937 - DNA, 17 bp, synthetic construct
  source 1..17: mol_type = other DNA
gggctttgtgacatact

SEQ ID NO: 27938 - DNA, 17 bp, synthetic construct
  source 1..17: mol_type = other DNA
ggggctttgtgacatac

SEQ ID NO: 27939 - DNA, 17 bp, synthetic construct
  source 1..17: mol_type = other DNA
aggggctttgtgacata

SEQ ID NO: 27940 - DNA, 17 bp, synthetic construct
  source 1..17: mol_type = other DNA
caggggctttgtgacat

SEQ ID NO: 27941 - DNA, 17 bp, synthetic construct
  source 1..17: mol_type = other DNA
aacccaggtgatgtaac

SEQ ID NO: 27942 - DNA, 17 bp, synthetic construct
  source 1..17: mol_type = other DNA
taacccaggtgatgtaa

SEQ ID NO: 27943 - DNA, 17 bp, synthetic construct
  source 1..17: mol_type = other DNA
ataacccaggtgatgta

SEQ ID NO: 27944 - DNA, 17 bp, synthetic construct
  source 1..17: mol_type = other DNA
gataacccaggtgatgt

SEQ ID NO: 27945 - DNA, 17 bp, synthetic construct
  source 1..17: mol_type = other DNA
tgataacccaggtgatg

SEQ ID NO: 27946 - DNA, 17 bp, synthetic construct
  source 1..17: mol_type = other DNA
ctgataacccaggtgat

SEQ ID NO: 27947 - DNA, 17 bp, synthetic construct
  source 1..17: mol_type = other DNA
actgataacccaggtga

SEQ ID NO: 27948 - DNA, 17 bp, synthetic construct
  source 1..17: mol_type = other DNA
cactgataacccaggtg

SEQ ID NO: 27949 - DNA, 17 bp, synthetic construct
  source 1..17: mol_type = other DNA
gcactgataacccaggt

SEQ ID NO: 27950 - DNA, 17 bp, synthetic construct
  source 1..17: mol_type = other DNA
tgcactgataacccagg

SEQ ID NO: 27951 - DNA, 17 bp, synthetic construct
  source 1..17: mol_type = other DNA
ctgcactgataacccag

SEQ ID NO: 27952 - DNA, 17 bp, synthetic construct
  source 1..17: mol_type = other DNA
tctgcactgataaccca

SEQ ID NO: 27953 - DNA, 17 bp, synthetic construct
  source 1..17: mol_type = other DNA
ttctgcactgataaccc

SEQ ID NO: 27954 - DNA, 17 bp, synthetic construct
  source 1..17: mol_type = other DNA
tttctgcactgataacc

SEQ ID NO: 27955 - DNA, 17 bp, synthetic construct
  source 1..17: mol_type = other DNA
acatatttctgcactga

SEQ ID NO: 27956 - DNA, 17 bp, synthetic construct
  source 1..17: mol_type = other DNA
gacatatttctgcactg

SEQ ID NO: 27957 - DNA, 17 bp, synthetic construct
  source 1..17: mol_type = other DNA
tgacatatttctgcact

SEQ ID NO: 27958 - DNA, 17 bp, synthetic construct
  source 1..17: mol_type = other DNA
gtgacatatttctgcac

SEQ ID NO: 27959 - DNA, 17 bp, synthetic construct
  source 1..17: mol_type = other DNA
tgtgacatatttctgca

SEQ ID NO: 27960 - DNA, 17 bp, synthetic construct
  source 1..17: mol_type = other DNA
ggctttgtgacatattt

SEQ ID NO: 27961 - DNA, 17 bp, synthetic construct
  source 1..17: mol_type = other DNA
gggctttgtgacatatt

SEQ ID NO: 27962 - DNA, 17 bp, synthetic construct
  source 1..17: mol_type = other DNA
ggggctttgtgacatat

SEQ ID NO: 27963 - DNA, 17 bp, synthetic construct
  source 1..17: mol_type = other DNA
acctacaggggctttgt

SEQ ID NO: 27964 - DNA, 17 bp, synthetic construct
  source 1..17: mol_type = other DNA
gacctacaggggctttg

SEQ ID NO: 27965 - DNA, 17 bp, synthetic construct
  source 1..17: mol_type = other DNA
cgacctacaggggcttt

SEQ ID NO: 27966 - DNA, 17 bp, synthetic construct
  source 1..17: mol_type = other DNA
tcgacctacaggggctt

SEQ ID NO: 27967 - DNA, 17 bp, synthetic construct
  source 1..17: mol_type = other DNA
ctcgacctacaggggct

SEQ ID NO: 27968 - DNA, 17 bp, synthetic construct
  source 1..17: mol_type = other DNA
actcgacctacaggggc

SEQ ID NO: 27969 - DNA, 17 bp, synthetic construct
  source 1..17: mol_type = other DNA
gactcgacctacagggg

SEQ ID NO: 27970 - DNA, 17 bp, synthetic construct
  source 1..17: mol_type = other DNA
agactcgacctacaggg

SEQ ID NO: 27971 - DNA, 17 bp, synthetic construct
  source 1..17: mol_type = other DNA
tagactcgacctacagg

SEQ ID NO: 27972 - DNA, 17 bp, synthetic construct
  source 1..17: mol_type = other DNA
ctagactcgacctacag

SEQ ID NO: 27973 - DNA, 17 bp, synthetic construct
  source 1..17: mol_type = other DNA
tctagactcgacctaca

SEQ ID NO: 27974 - DNA, 17 bp, synthetic construct
  source 1..17: mol_type = other DNA
gtctagactcgacctac

SEQ ID NO: 27975 - DNA, 17 bp, synthetic construct
  source 1..17: mol_type = other DNA
tgtctagactcgaccta

SEQ ID NO: 27976 - DNA, 17 bp, synthetic construct
  source 1..17: mol_type = other DNA
ttgtctagactcgacct

SEQ ID NO: 27977 - DNA, 17 bp, synthetic construct
  source 1..17: mol_type = other DNA
cttgtctagactcgacc

SEQ ID NO: 27978 - DNA, 17 bp, synthetic construct
  source 1..17: mol_type = other DNA
tcttgtctagactcgac

SEQ ID NO: 27979 - DNA, 17 bp, synthetic construct
  source 1..17: mol_type = other DNA
ctcttgtctagactcga

SEQ ID NO: 27980 - DNA, 17 bp, synthetic construct
  source 1..17: mol_type = other DNA
actcttgtctagactcg

SEQ ID NO: 27981 - DNA, 17 bp, synthetic construct
  source 1..17: mol_type = other DNA
aactcttgtctagactc

SEQ ID NO: 27982 - DNA, 17 bp, synthetic construct
  source 1..17: mol_type = other DNA
gtaactcttgtctagac

SEQ ID NO: 27983 - DNA, 17 bp, synthetic construct
  source 1..17: mol_type = other DNA
ggagatgtaactcttgt

SEQ ID NO: 27984 - DNA, 17 bp, synthetic construct
  source 1..17: mol_type = other DNA
cccaggagatgtaactc

SEQ ID NO: 27985 - DNA, 17 bp, synthetic construct
  source 1..17: mol_type = other DNA
acccaggagatgtaact

SEQ ID NO: 27986 - DNA, 17 bp, synthetic construct
  source 1..17: mol_type = other DNA
cacccaggagatgtaac

SEQ ID NO: 27987 - DNA, 17 bp, synthetic construct
  source 1..17: mol_type = other DNA
tcacccaggagatgtaa

SEQ ID NO: 27988 - DNA, 17 bp, synthetic construct
  source 1..17: mol_type = other DNA
atcacccaggagatgta

SEQ ID NO: 27989 - DNA, 17 bp, synthetic construct
  source 1..17: mol_type = other DNA
gatcacccaggagatgt

SEQ ID NO: 27990 - DNA, 17 bp, synthetic construct
  source 1..17: mol_type = other DNA
tgatcacccaggagatg

SEQ ID NO: 27991 - DNA, 17 bp, synthetic construct
  source 1..17: mol_type = other DNA
ctgatcacccaggagat

SEQ ID NO: 27992 - DNA, 17 bp, synthetic construct
  source 1..17: mol_type = other DNA
actgatcacccaggaga

SEQ ID NO: 27993 - DNA, 17 bp, synthetic construct
  source 1..17: mol_type = other DNA
cactgatcacccaggag

SEQ ID NO: 27994 - DNA, 17 bp, synthetic construct
  source 1..17: mol_type = other DNA
gcactgatcacccagga

SEQ ID NO: 27995 - DNA, 17 bp, synthetic construct
  source 1..17: mol_type = other DNA
ttgcactgatcacccag

SEQ ID NO: 27996 - DNA, 17 bp, synthetic construct
  source 1..17: mol_type = other DNA
tttgcactgatcaccca

SEQ ID NO: 27997 - DNA, 17 bp, synthetic construct
  source 1..17: mol_type = other DNA
ctttgcactgatcaccc

SEQ ID NO: 27998 - DNA, 17 bp, synthetic construct
  source 1..17: mol_type = other DNA
tctttgcactgatcacc

SEQ ID NO: 27999 - DNA, 17 bp, synthetic construct
  source 1..17: mol_type = other DNA
atctttgcactgatcac

SEQ ID NO: 28000 - DNA, 17 bp, synthetic construct
  source 1..17: mol_type = other DNA
tatctttgcactgatca

SEQ ID NO: 28001 - DNA, 17 bp, synthetic construct
  source 1..17: mol_type = other DNA
acatatctttgcactga

SEQ ID NO: 28002 - DNA, 17 bp, synthetic construct
  source 1..17: mol_type = other DNA
gacatatctttgcactg

SEQ ID NO: 28003 - DNA, 17 bp, synthetic construct
  source 1..17: mol_type = other DNA
tgacatatctttgcact

SEQ ID NO: 28004 - DNA, 17 bp, synthetic construct
  source 1..17: mol_type = other DNA
gtgacatatctttgcac

SEQ ID NO: 28005 - DNA, 17 bp, synthetic construct
  source 1..17: mol_type = other DNA
tgtgacatatctttgca

SEQ ID NO: 28006 - DNA, 17 bp, synthetic construct
  source 1..17: mol_type = other DNA
gctttgtgacatatctt

SEQ ID NO: 28007 - DNA, 17 bp, synthetic construct
  source 1..17: mol_type = other DNA
gggctttgtgacatatc

SEQ ID NO: 28008 - DNA, 17 bp, synthetic construct
  source 1..17: mol_type = other DNA
gggggctttgtgacata

SEQ ID NO: 28009 - DNA, 17 bp, synthetic construct
  source 1..17: mol_type = other DNA
agggggctttgtgacat

SEQ ID NO: 28010 - DNA, 17 bp, synthetic construct
  source 1..17: mol_type = other DNA
cagggggctttgtgaca

SEQ ID NO: 28011 - DNA, 17 bp, synthetic construct
  source 1..17: mol_type = other DNA
acagggggctttgtgac

SEQ ID NO: 28012 - DNA, 17 bp, synthetic construct
  source 1..17: mol_type = other DNA
atttgtctacagggggc

SEQ ID NO: 28013 - DNA, 17 bp, synthetic construct
  source 1..17: mol_type = other DNA
gatttgtctacaggggg

SEQ ID NO: 28014 - DNA, 17 bp, synthetic construct
  source 1..17: mol_type = other DNA
ggatttgtctacagggg

SEQ ID NO: 28015 - DNA, 17 bp, synthetic construct
  source 1..17: mol_type = other DNA
gggatttgtctacaggg

SEQ ID NO: 28016 - DNA, 17 bp, synthetic construct
  source 1..17: mol_type = other DNA
tgggatttgtctacagg

SEQ ID NO: 28017 - DNA, 17 bp, synthetic construct
  source 1..17: mol_type = other DNA
ctgggatttgtctacag

SEQ ID NO: 28018 - DNA, 17 bp, synthetic construct
  source 1..17: mol_type = other DNA
tctgggatttgtctaca

SEQ ID NO: 28019 - DNA, 17 bp, synthetic construct
  source 1..17: mol_type = other DNA
ttctgggatttgtctac

SEQ ID NO: 28020 - DNA, 17 bp, synthetic construct
  source 1..17: mol_type = other DNA
tttctgggatttgtcta

SEQ ID NO: 28021 - DNA, 17 bp, synthetic construct
  source 1..17: mol_type = other DNA
ttttctgggatttgtct

SEQ ID NO: 28022 - DNA, 17 bp, synthetic construct
  source 1..17: mol_type = other DNA
attttctgggatttgtc

SEQ ID NO: 28023 - DNA, 17 bp, synthetic construct
  source 1..17: mol_type = other DNA
cccaggtgatgtaacaa

SEQ ID NO: 28024 - DNA, 17 bp, synthetic construct
  source 1..17: mol_type = other DNA
ccactgatcacccaggt

SEQ ID NO: 28025 - DNA, 17 bp, synthetic construct
  source 1..17: mol_type = other DNA
tccactgatcacccagg

SEQ ID NO: 28026 - DNA, 17 bp, synthetic construct
  source 1..17: mol_type = other DNA
ctccactgatcacccag

SEQ ID NO: 28027 - DNA, 17 bp, synthetic construct
  source 1..17: mol_type = other DNA
tctccactgatcaccca

SEQ ID NO: 28028 - DNA, 17 bp, synthetic construct
  source 1..17: mol_type = other DNA
atctccactgatcaccc

SEQ ID NO: 28029 - DNA, 17 bp, synthetic construct
  source 1..17: mol_type = other DNA
tatctccactgatcacc

SEQ ID NO: 28030 - DNA, 17 bp, synthetic construct
  source 1..17: mol_type = other DNA
atatctccactgatcac

SEQ ID NO: 28031 - DNA, 17 bp, synthetic construct
  source 1..17: mol_type = other DNA
catatctccactgatca

SEQ ID NO: 28032 - DNA, 17 bp, synthetic construct
  source 1..17: mol_type = other DNA
acatatctccactgatc

SEQ ID NO: 28033 - DNA, 17 bp, synthetic construct
  source 1..17: mol_type = other DNA
cacatatctccactgat

SEQ ID NO: 28034 - DNA, 17 bp, synthetic construct
  source 1..17: mol_type = other DNA
acacatatctccactga

SEQ ID NO: 28035 - DNA, 17 bp, synthetic construct
  source 1..17: mol_type = other DNA
gacacatatctccactg

SEQ ID NO: 28036 - DNA, 17 bp, synthetic construct
  source 1..17: mol_type = other DNA
tgacacatatctccact

SEQ ID NO: 28037 - DNA, 17 bp, synthetic construct
  source 1..17: mol_type = other DNA
gtgacacatatctccac

SEQ ID NO: 28038 - DNA, 17 bp, synthetic construct
  source 1..17: mol_type = other DNA
tgtgacacatatctcca

SEQ ID NO: 28039 - DNA, 17 bp, synthetic construct
  source 1..17: mol_type = other DNA
ttgtgacacatatctcc

SEQ ID NO: 28040 - DNA, 17 bp, synthetic construct
  source 1..17: mol_type = other DNA
ggggaattgtgacacat

SEQ ID NO: 28041 - DNA, 17 bp, synthetic construct
  source 1..17: mol_type = other DNA
aggggaattgtgacaca

SEQ ID NO: 28042 - DNA, 17 bp, synthetic construct
  source 1..17: mol_type = other DNA
gcctaaaggggaattgt

SEQ ID NO: 28043 - DNA, 17 bp, synthetic construct
  source 1..17: mol_type = other DNA
gtgcctaaaggggaatt

SEQ ID NO: 28044 - DNA, 17 bp, synthetic construct
  source 1..17: mol_type = other DNA
tgtgcctaaaggggaat

SEQ ID NO: 28045 - DNA, 17 bp, synthetic construct
  source 1..17: mol_type = other DNA
ctgtgcctaaaggggaa

SEQ ID NO: 28046 - DNA, 17 bp, synthetic construct
  source 1..17: mol_type = other DNA
gctgtgcctaaagggga

SEQ ID NO: 28047 - DNA, 17 bp, synthetic construct
  source 1..17: mol_type = other DNA
agctgtgcctaaagggg

SEQ ID NO: 28048 - DNA, 17 bp, synthetic construct
  source 1..17: mol_type = other DNA
aagctgtgcctaaaggg

SEQ ID NO: 28049 - DNA, 17 bp, synthetic construct
  source 1..17: mol_type = other DNA
taagctgtgcctaaagg

SEQ ID NO: 28050 - DNA, 17 bp, synthetic construct
  source 1..17: mol_type = other DNA
ctaagctgtgcctaaag

SEQ ID NO: 28051 - DNA, 17 bp, synthetic construct
  source 1..17: mol_type = other DNA
tctaagctgtgcctaaa

SEQ ID NO: 28052 - DNA, 17 bp, synthetic construct
  source 1..17: mol_type = other DNA
gtctaagctgtgcctaa

SEQ ID NO: 28053 - DNA, 17 bp, synthetic construct
  source 1..17: mol_type = other DNA
tgtctaagctgtgccta

SEQ ID NO: 28054 - DNA, 17 bp, synthetic construct
  source 1..17: mol_type = other DNA
ttgtctaagctgtgcct

SEQ ID NO: 28055 - DNA, 17 bp, synthetic construct
  source 1..17: mol_type = other DNA
cttgtctaagctgtgcc

SEQ ID NO: 28056 - DNA, 17 bp, synthetic construct
  source 1..17: mol_type = other DNA
gcttgtctaagctgtgc

SEQ ID NO: 28057 - DNA, 17 bp, synthetic construct
  source 1..17: mol_type = other DNA
cgcttgtctaagctgtg

SEQ ID NO: 28058 - DNA, 17 bp, synthetic construct
  source 1..17: mol_type = other DNA
acgcttgtctaagctgt

SEQ ID NO: 28059 - DNA, 17 bp, synthetic construct
  source 1..17: mol_type = other DNA
aacgcttgtctaagctg

SEQ ID NO: 28060 - DNA, 17 bp, synthetic construct
  source 1..17: mol_type = other DNA
taacgcttgtctaagct

SEQ ID NO: 28061 - DNA, 17 bp, synthetic construct
  source 1..17: mol_type = other DNA
gtaacgcttgtctaagc

SEQ ID NO: 28062 - DNA, 17 bp, synthetic construct
  source 1..17: mol_type = other DNA
gatgtaacgcttgtcta

SEQ ID NO: 28063 - DNA, 17 bp, synthetic construct
  source 1..17: mol_type = other DNA
tgatgtaacgcttgtct

SEQ ID NO: 28064 - DNA, 17 bp, synthetic construct
  source 1..17: mol_type = other DNA
gtgatgtaacgcttgtc

SEQ ID NO: 28065 - DNA, 17 bp, synthetic construct
  source 1..17: mol_type = other DNA
tgtgatgtaacgcttgt

SEQ ID NO: 28066 - DNA, 17 bp, synthetic construct
  source 1..17: mol_type = other DNA
tcatgtgatgtaacgct

SEQ ID NO: 28067 - DNA, 17 bp, synthetic construct
  source 1..17: mol_type = other DNA
ctcatgtgatgtaacgc

SEQ ID NO: 28068 - DNA, 17 bp, synthetic construct
  source 1..17: mol_type = other DNA
atcactcatgtgatgta

SEQ ID NO: 28069 - DNA, 17 bp, synthetic construct
  source 1..17: mol_type = other DNA
gatcactcatgtgatgt

SEQ ID NO: 28070 - DNA, 17 bp, synthetic construct
  source 1..17: mol_type = other DNA
gcaatgatcactcatgt

SEQ ID NO: 28071 - DNA, 17 bp, synthetic construct
  source 1..17: mol_type = other DNA
ctgcaatgatcactcat

SEQ ID NO: 28072 - DNA, 17 bp, synthetic construct
  source 1..17: mol_type = other DNA
tctgcaatgatcactca

SEQ ID NO: 28073 - DNA, 17 bp, synthetic construct
  source 1..17: mol_type = other DNA
ctctgcaatgatcactc

SEQ ID NO: 28074 - DNA, 17 bp, synthetic construct
  source 1..17: mol_type = other DNA
actctgcaatgatcact

SEQ ID NO: 28075 - DNA, 17 bp, synthetic construct
  source 1..17: mol_type = other DNA
agtgacataactctgca

SEQ ID NO: 28076 - DNA, 17 bp, synthetic construct
  source 1..17: mol_type = other DNA
gggcatagtgacataac

SEQ ID NO: 28077 - DNA, 17 bp, synthetic construct
  source 1..17: mol_type = other DNA
ggggcatagtgacataa

SEQ ID NO: 28078 - DNA, 17 bp, synthetic construct
  source 1..17: mol_type = other DNA
gggggcatagtgacata

SEQ ID NO: 28079 - DNA, 17 bp, synthetic construct
  source 1..17: mol_type = other DNA
tgggggcatagtgacat

SEQ ID NO: 28080 - DNA, 17 bp, synthetic construct
  source 1..17: mol_type = other DNA
atgggggcatagtgaca

SEQ ID NO: 28081 - DNA, 17 bp, synthetic construct
  source 1..17: mol_type = other DNA
tatgggggcatagtgac

SEQ ID NO: 28082 - DNA, 17 bp, synthetic construct
  source 1..17: mol_type = other DNA
ctatgggggcatagtga

SEQ ID NO: 28083 - DNA, 17 bp, synthetic construct
  source 1..17: mol_type = other DNA
cctatgggggcatagtg

SEQ ID NO: 28084 - DNA, 17 bp, synthetic construct
  source 1..17: mol_type = other DNA
gcctatgggggcatagt

SEQ ID NO: 28085 - DNA, 17 bp, synthetic construct
  source 1..17: mol_type = other DNA
tgcctatgggggcatag

SEQ ID NO: 28086 - DNA, 17 bp, synthetic construct
  source 1..17: mol_type = other DNA
ctgcctatgggggcata

SEQ ID NO: 28087 - DNA, 17 bp, synthetic construct
  source 1..17: mol_type = other DNA
tctgcctatgggggcat

SEQ ID NO: 28088 - DNA, 17 bp, synthetic construct
  source 1..17: mol_type = other DNA
atctgcctatgggggca

SEQ ID NO: 28089 - DNA, 17 bp, synthetic construct
  source 1..17: mol_type = other DNA
gatctgcctatgggggc

SEQ ID NO: 28090 - DNA, 17 bp, synthetic construct
  source 1..17: mol_type = other DNA
ggatctgcctatggggg

SEQ ID NO: 28091 - DNA, 17 bp, synthetic construct
  source 1..17: mol_type = other DNA
tggatctgcctatgggg

SEQ ID NO: 28092 - DNA, 17 bp, synthetic construct
  source 1..17: mol_type = other DNA
ttggatctgcctatggg

SEQ ID NO: 28093 - DNA, 17 bp, synthetic construct
  source 1..17: mol_type = other DNA
cttggatctgcctatgg

SEQ ID NO: 28094 - DNA, 17 bp, synthetic construct
  source 1..17: mol_type = other DNA
tcttggatctgcctatg

SEQ ID NO: 28095 - DNA, 17 bp, synthetic construct
  source 1..17: mol_type = other DNA
gtcttggatctgcctat

SEQ ID NO: 28096 - DNA, 17 bp, synthetic construct
  source 1..17: mol_type = other DNA
tgtcttggatctgccta

SEQ ID NO: 28097 - DNA, 17 bp, synthetic construct
  source 1..17: mol_type = other DNA
ttgtcttggatctgcct

SEQ ID NO: 28098 - DNA, 17 bp, synthetic construct
  source 1..17: mol_type = other DNA
cttgtcttggatctgcc

SEQ ID NO: 28099 - DNA, 17 bp, synthetic construct
  source 1..17: mol_type = other DNA
tcttgtcttggatctgc

SEQ ID NO: 28100 - DNA, 17 bp, synthetic construct
  source 1..17: mol_type = other DNA
ctcttgtcttggatctg

SEQ ID NO: 28101 - DNA, 17 bp, synthetic construct
  source 1..17: mol_type = other DNA
actcttgtcttggatct

SEQ ID NO: 28102 - DNA, 17 bp, synthetic construct
  source 1..17: mol_type = other DNA
gactcttgtcttggatc

SEQ ID NO: 28103 - DNA, 17 bp, synthetic construct
  source 1..17: mol_type = other DNA
ggactcttgtcttggat

SEQ ID NO: 28104 - DNA, 17 bp, synthetic construct
  source 1..17: mol_type = other DNA
tggactcttgtcttgga

SEQ ID NO: 28105 - DNA, 17 bp, synthetic construct
  source 1..17: mol_type = other DNA
atggactcttgtcttgg

SEQ ID NO: 28106 - DNA, 17 bp, synthetic construct
  source 1..17: mol_type = other DNA
gatggactcttgtcttg

SEQ ID NO: 28107 - DNA, 17 bp, synthetic construct
  source 1..17: mol_type = other DNA
tgatggactcttgtctt

SEQ ID NO: 28108 - DNA, 17 bp, synthetic construct
  source 1..17: mol_type = other DNA
gtgatggactcttgtct

SEQ ID NO: 28109 - DNA, 17 bp, synthetic construct
  source 1..17: mol_type = other DNA
ggtgatggactcttgtc

SEQ ID NO: 28110 - DNA, 17 bp, synthetic construct
  source 1..17: mol_type = other DNA
aggtgatggactcttgt

SEQ ID NO: 28111 - DNA, 17 bp, synthetic construct
  source 1..17: mol_type = other DNA
caggtgatggactcttg

SEQ ID NO: 28112 - DNA, 17 bp, synthetic construct
  source 1..17: mol_type = other DNA
ccaggtgatggactctt

SEQ ID NO: 28113 - DNA, 17 bp, synthetic construct
  source 1..17: mol_type = other DNA
cccaggtgatggactct

SEQ ID NO: 28114 - DNA, 17 bp, synthetic construct
  source 1..17: mol_type = other DNA
acccaggtgatggactc

SEQ ID NO: 28115 - DNA, 17 bp, synthetic construct
  source 1..17: mol_type = other DNA
cacccaggtgatggact

SEQ ID NO: 28116 - DNA, 17 bp, synthetic construct
  source 1..17: mol_type = other DNA
ttctgcactgatcaccc

SEQ ID NO: 28117 - DNA, 17 bp, synthetic construct
  source 1..17: mol_type = other DNA
tttctgcactgatcacc

SEQ ID NO: 28118 - DNA, 17 bp, synthetic construct
  source 1..17: mol_type = other DNA
atttctgcactgatcac

SEQ ID NO: 28119 - DNA, 17 bp, synthetic construct
  source 1..17: mol_type = other DNA
tatttctgcactgatca

SEQ ID NO: 28120 - DNA, 17 bp, synthetic construct
  source 1..17: mol_type = other DNA
gcatatttctgcactga

SEQ ID NO: 28121 - DNA, 17 bp, synthetic construct
  source 1..17: mol_type = other DNA
ggcatatttctgcactg

SEQ ID NO: 28122 - DNA, 17 bp, synthetic construct
  source 1..17: mol_type = other DNA
tggcatatttctgcact

SEQ ID NO: 28123 - DNA, 17 bp, synthetic construct
  source 1..17: mol_type = other DNA
gtggcatatttctgcac

SEQ ID NO: 28124 - DNA, 17 bp, synthetic construct
  source 1..17: mol_type = other DNA
tgtggcatatttctgca

SEQ ID NO: 28125 - DNA, 17 bp, synthetic construct
  source 1..17: mol_type = other DNA
ttgtggcatatttctgc

SEQ ID NO: 28126 - DNA, 17 bp, synthetic construct
  source 1..17: mol_type = other DNA
attgtggcatatttctg

SEQ ID NO: 28127 - DNA, 17 bp, synthetic construct
  source 1..17: mol_type = other DNA
cattgtggcatatttct

SEQ ID NO: 28128 - DNA, 17 bp, synthetic construct
  source 1..17: mol_type = other DNA
gcattgtggcatatttc

SEQ ID NO: 28129 - DNA, 17 bp, synthetic construct
  source 1..17: mol_type = other DNA
ggcattgtggcatattt

SEQ ID NO: 28130 - DNA, 17 bp, synthetic construct
  source 1..17: mol_type = other DNA
cggcattgtggcatatt

SEQ ID NO: 28131 - DNA, 17 bp, synthetic construct
  source 1..17: mol_type = other DNA
gcggcattgtggcatat

SEQ ID NO: 28132 - DNA, 17 bp, synthetic construct
  source 1..17: mol_type = other DNA
ggcggcattgtggcata

SEQ ID NO: 28133 - DNA, 17 bp, synthetic construct
  source 1..17: mol_type = other DNA
tggcggcattgtggcat

SEQ ID NO: 28134 - DNA, 17 bp, synthetic construct
  source 1..17: mol_type = other DNA
ctggcggcattgtggca

SEQ ID NO: 28135 - DNA, 17 bp, synthetic construct
  source 1..17: mol_type = other DNA
actggcggcattgtggc

SEQ ID NO: 28136 - DNA, 17 bp, synthetic construct
  source 1..17: mol_type = other DNA
tactggcggcattgtgg

SEQ ID NO: 28137 - DNA, 17 bp, synthetic construct
  source 1..17: mol_type = other DNA
ctactggcggcattgtg

SEQ ID NO: 28138 - DNA, 17 bp, synthetic construct
  source 1..17: mol_type = other DNA
cctactggcggcattgt

SEQ ID NO: 28139 - DNA, 17 bp, synthetic construct
  source 1..17: mol_type = other DNA
gcctactggcggcattg

SEQ ID NO: 28140 - DNA, 17 bp, synthetic construct
  source 1..17: mol_type = other DNA
tgcctactggcggcatt

SEQ ID NO: 28141 - DNA, 17 bp, synthetic construct
  source 1..17: mol_type = other DNA
ctgcctactggcggcat

SEQ ID NO: 28142 - DNA, 17 bp, synthetic construct
  source 1..17: mol_type = other DNA
tctgcctactggcggca

SEQ ID NO: 28143 - DNA, 17 bp, synthetic construct
  source 1..17: mol_type = other DNA
atctgcctactggcggc

SEQ ID NO: 28144 - DNA, 17 bp, synthetic construct
  source 1..17: mol_type = other DNA
tatctgcctactggcgg

SEQ ID NO: 28145 - DNA, 17 bp, synthetic construct
  source 1..17: mol_type = other DNA
atatctgcctactggcg

SEQ ID NO: 28146 - DNA, 17 bp, synthetic construct
  source 1..17: mol_type = other DNA
tatatctgcctactggc

SEQ ID NO: 28147 - DNA, 17 bp, synthetic construct
  source 1..17: mol_type = other DNA
ctatatctgcctactgg

SEQ ID NO: 28148 - DNA, 17 bp, synthetic construct
  source 1..17: mol_type = other DNA
tctatatctgcctactg

SEQ ID NO: 28149 - DNA, 17 bp, synthetic construct
  source 1..17: mol_type = other DNA
gtctatatctgcctact

SEQ ID NO: 28150 - DNA, 17 bp, synthetic construct
  source 1..17: mol_type = other DNA
tgtctatatctgcctac

SEQ ID NO: 28151 - DNA, 17 bp, synthetic construct
  source 1..17: mol_type = other DNA
ttgtctatatctgccta

SEQ ID NO: 28152 - DNA, 17 bp, synthetic construct
  source 1..17: mol_type = other DNA
cttgtctatatctgcct

SEQ ID NO: 28153 - DNA, 17 bp, synthetic construct
  source 1..17: mol_type = other DNA
tcttgtctatatctgcc

SEQ ID NO: 28154 - DNA, 17 bp, synthetic construct
  source 1..17: mol_type = other DNA
ctcttgtctatatctgc

SEQ ID NO: 28155 - DNA, 17 bp, synthetic construct
  source 1..17: mol_type = other DNA
actcttgtctatatctg

SEQ ID NO: 28156 - DNA, 17 bp, synthetic construct
  source 1..17: mol_type = other DNA
gcaggtgatgtaactct

SEQ ID NO: 28157 - DNA, 17 bp, synthetic construct
  source 1..17: mol_type = other DNA
cgcaggtgatgtaactc

SEQ ID NO: 28158 - DNA, 17 bp, synthetic construct
  source 1..17: mol_type = other DNA
acgcaggtgatgtaact

SEQ ID NO: 28159 - DNA, 17 bp, synthetic construct
  source 1..17: mol_type = other DNA
cacgcaggtgatgtaac

SEQ ID NO: 28160 - DNA, 17 bp, synthetic construct
  source 1..17: mol_type = other DNA
tcacgcaggtgatgtaa

SEQ ID NO: 28161 - DNA, 17 bp, synthetic construct
  source 1..17: mol_type = other DNA
atcacgcaggtgatgta

SEQ ID NO: 28162 - DNA, 17 bp, synthetic construct
  source 1..17: mol_type = other DNA
gatcacgcaggtgatgt

SEQ ID NO: 28163 - DNA, 17 bp, synthetic construct
  source 1..17: mol_type = other DNA
tgatcacgcaggtgatg

SEQ ID NO: 28164 - DNA, 17 bp, synthetic construct
  source 1..17: mol_type = other DNA
gtgatcacgcaggtgat

SEQ ID NO: 28165 - DNA, 17 bp, synthetic construct
  source 1..17: mol_type = other DNA
agtgatcacgcaggtga

SEQ ID NO: 28166 - DNA, 17 bp, synthetic construct
  source 1..17: mol_type = other DNA
cagtgatcacgcaggtg

SEQ ID NO: 28167 - DNA, 17 bp, synthetic construct
  source 1..17: mol_type = other DNA
gcagtgatcacgcaggt

SEQ ID NO: 28168 - DNA, 17 bp, synthetic construct
  source 1..17: mol_type = other DNA
tgcagtgatcacgcagg

SEQ ID NO: 28169 - DNA, 17 bp, synthetic construct
  source 1..17: mol_type = other DNA
ctgcagtgatcacgcag

SEQ ID NO: 28170 - DNA, 17 bp, synthetic construct
  source 1..17: mol_type = other DNA
tctgcagtgatcacgca

SEQ ID NO: 28171 - DNA, 17 bp, synthetic construct
  source 1..17: mol_type = other DNA
ctctgcagtgatcacgc

SEQ ID NO: 28172 - DNA, 17 bp, synthetic construct
  source 1..17: mol_type = other DNA
tctctgcagtgatcacg

SEQ ID NO: 28173 - DNA, 17 bp, synthetic construct
  source 1..17: mol_type = other DNA
atctctgcagtgatcac

SEQ ID NO: 28174 - DNA, 17 bp, synthetic construct
  source 1..17: mol_type = other DNA
tatctctgcagtgatca

SEQ ID NO: 28175 - DNA, 17 bp, synthetic construct
  source 1..17: mol_type = other DNA
atatctctgcagtgatc

SEQ ID NO: 28176 - DNA, 17 bp, synthetic construct
  source 1..17: mol_type = other DNA
tatatctctgcagtgat

SEQ ID NO: 28177 - DNA, 17 bp, synthetic construct
  source 1..17: mol_type = other DNA
atatatctctgcagtga

SEQ ID NO: 28178 - DNA, 17 bp, synthetic construct
  source 1..17: mol_type = other DNA
gatatatctctgcagtg

SEQ ID NO: 28179 - DNA, 17 bp, synthetic construct
  source 1..17: mol_type = other DNA
tgatatatctctgcagt

SEQ ID NO: 28180 - DNA, 17 bp, synthetic construct
  source 1..17: mol_type = other DNA
gtgatatatctctgcag

SEQ ID NO: 28181 - DNA, 17 bp, synthetic construct
  source 1..17: mol_type = other DNA
tgtgatatatctctgca

SEQ ID NO: 28182 - DNA, 17 bp, synthetic construct
  source 1..17: mol_type = other DNA
ggcattgtgatatatct

SEQ ID NO: 28183 - DNA, 17 bp, synthetic construct
  source 1..17: mol_type = other DNA
gggcattgtgatatatc

SEQ ID NO: 28184 - DNA, 17 bp, synthetic construct
  source 1..17: mol_type = other DNA
ggggcattgtgatatat

SEQ ID NO: 28185 - DNA, 17 bp, synthetic construct
  source 1..17: mol_type = other DNA
aggggcattgtgatata

SEQ ID NO: 28186 - DNA, 17 bp, synthetic construct
  source 1..17: mol_type = other DNA
caggggcattgtgatat

SEQ ID NO: 28187 - DNA, 17 bp, synthetic construct
  source 1..17: mol_type = other DNA
acaggggcattgtgata

SEQ ID NO: 28188 - DNA, 17 bp, synthetic construct
  source 1..17: mol_type = other DNA
tacaggggcattgtgat

SEQ ID NO: 28189 - DNA, 17 bp, synthetic construct
  source 1..17: mol_type = other DNA
gactcttgtctaggctc

SEQ ID NO: 28190 - DNA, 17 bp, synthetic construct
  source 1..17: mol_type = other DNA
ggactcttgtctaggct

SEQ ID NO: 28191 - DNA, 17 bp, synthetic construct
  source 1..17: mol_type = other DNA
gggactcttgtctaggc

SEQ ID NO: 28192 - DNA, 17 bp, synthetic construct
  source 1..17: mol_type = other DNA
tgggactcttgtctagg

SEQ ID NO: 28193 - DNA, 17 bp, synthetic construct
  source 1..17: mol_type = other DNA
atgggactcttgtctag

SEQ ID NO: 28194 - DNA, 17 bp, synthetic construct
  source 1..17: mol_type = other DNA
gatgggactcttgtcta

SEQ ID NO: 28195 - DNA, 17 bp, synthetic construct
  source 1..17: mol_type = other DNA
tgatgggactcttgtct

SEQ ID NO: 28196 - DNA, 17 bp, synthetic construct
  source 1..17: mol_type = other DNA
gtgatgggactcttgtc

SEQ ID NO: 28197 - DNA, 17 bp, synthetic construct
  source 1..17: mol_type = other DNA
ggtgatgggactcttgt

SEQ ID NO: 28198 - DNA, 17 bp, synthetic construct
  source 1..17: mol_type = other DNA
aggtgatgggactcttg

SEQ ID NO: 28199 - DNA, 17 bp, synthetic construct
  source 1..17: mol_type = other DNA
actctgcactgatcacc

SEQ ID NO: 28200 - DNA, 17 bp, synthetic construct
  source 1..17: mol_type = other DNA
aactctgcactgatcac

SEQ ID NO: 28201 - DNA, 17 bp, synthetic construct
  source 1..17: mol_type = other DNA
taactctgcactgatca

SEQ ID NO: 28202 - DNA, 17 bp, synthetic construct
  source 1..17: mol_type = other DNA
acataactctgcactga

SEQ ID NO: 28203 - DNA, 17 bp, synthetic construct
  source 1..17: mol_type = other DNA
gacataactctgcactg

SEQ ID NO: 28204 - DNA, 17 bp, synthetic construct
  source 1..17: mol_type = other DNA
tgacataactctgcact

SEQ ID NO: 28205 - DNA, 17 bp, synthetic construct
  source 1..17: mol_type = other DNA
gtgacataactctgcac

SEQ ID NO: 28206 - DNA, 17 bp, synthetic construct
  source 1..17: mol_type = other DNA
tgtgacataactctgca

SEQ ID NO: 28207 - DNA, 17 bp, synthetic construct
  source 1..17: mol_type = other DNA
ggcattgtgacataact

SEQ ID NO: 28208 - DNA, 17 bp, synthetic construct
  source 1..17: mol_type = other DNA
gggcattgtgacataac

SEQ ID NO: 28209 - DNA, 17 bp, synthetic construct
  source 1..17: mol_type = other DNA
ggggcattgtgacataa

SEQ ID NO: 28210 - DNA, 17 bp, synthetic construct
  source 1..17: mol_type = other DNA
gggggcattgtgacata

SEQ ID NO: 28211 - DNA, 17 bp, synthetic construct
  source 1..17: mol_type = other DNA
agggggcattgtgacat

SEQ ID NO: 28212 - DNA, 17 bp, synthetic construct
  source 1..17: mol_type = other DNA
aagggggcattgtgaca

SEQ ID NO: 28213 - DNA, 17 bp, synthetic construct
  source 1..17: mol_type = other DNA
aaagggggcattgtgac

SEQ ID NO: 28214 - DNA, 17 bp, synthetic construct
  source 1..17: mol_type = other DNA
aaaagggggcattgtga

SEQ ID NO: 28215 - DNA, 17 bp, synthetic construct
  source 1..17: mol_type = other DNA
caaaagggggcattgtg

SEQ ID NO: 28216 - DNA, 17 bp, synthetic construct
  source 1..17: mol_type = other DNA
ccaaaagggggcattgt

SEQ ID NO: 28217 - DNA, 17 bp, synthetic construct
  source 1..17: mol_type = other DNA
gccaaaagggggcattg

SEQ ID NO: 28218 - DNA, 17 bp, synthetic construct
  source 1..17: mol_type = other DNA
tgccaaaagggggcatt

SEQ ID NO: 28219 - DNA, 17 bp, synthetic construct
  source 1..17: mol_type = other DNA
ctgccaaaagggggcat

SEQ ID NO: 28220 - DNA, 17 bp, synthetic construct
  source 1..17: mol_type = other DNA
tctgccaaaagggggca

SEQ ID NO: 28221 - DNA, 17 bp, synthetic construct
  source 1..17: mol_type = other DNA
ctctgccaaaagggggc

SEQ ID NO: 28222 - DNA, 17 bp, synthetic construct
  source 1..17: mol_type = other DNA
gctctgccaaaaggggg

SEQ ID NO: 28223 - DNA, 17 bp, synthetic construct
  source 1..17: mol_type = other DNA
ggctctgccaaaagggg

SEQ ID NO: 28224 - DNA, 17 bp, synthetic construct
  source 1..17: mol_type = other DNA
aggctctgccaaaaggg

SEQ ID NO: 28225 - DNA, 17 bp, synthetic construct
  source 1..17: mol_type = other DNA
taggctctgccaaaagg

SEQ ID NO: 28226 - DNA, 17 bp, synthetic construct
  source 1..17: mol_type = other DNA
ctaggctctgccaaaag

SEQ ID NO: 28227 - DNA, 17 bp, synthetic construct
  source 1..17: mol_type = other DNA
tctaggctctgccaaaa

SEQ ID NO: 28228 - DNA, 17 bp, synthetic construct
  source 1..17: mol_type = other DNA
gtctaggctctgccaaa

SEQ ID NO: 28229 - DNA, 17 bp, synthetic construct
  source 1..17: mol_type = other DNA
tgtctaggctctgccaa

SEQ ID NO: 28230 - DNA, 17 bp, synthetic construct
  source 1..17: mol_type = other DNA
ttgtctaggctctgcca

SEQ ID NO: 28231 - DNA, 17 bp, synthetic construct
  source 1..17: mol_type = other DNA
ccttgtctaggctctgc

SEQ ID NO: 28232 - DNA, 17 bp, synthetic construct
  source 1..17: mol_type = other DNA
cccttgtctaggctctg

SEQ ID NO: 28233 - DNA, 17 bp, synthetic construct
  source 1..17: mol_type = other DNA
acccttgtctaggctct

SEQ ID NO: 28234 - DNA, 17 bp, synthetic construct
  source 1..17: mol_type = other DNA
aacccttgtctaggctc

SEQ ID NO: 28235 - DNA, 17 bp, synthetic construct
  source 1..17: mol_type = other DNA
taacccttgtctaggct

SEQ ID NO: 28236 - DNA, 17 bp, synthetic construct
  source 1..17: mol_type = other DNA
gtaacccttgtctaggc

SEQ ID NO: 28237 - DNA, 17 bp, synthetic construct
  source 1..17: mol_type = other DNA
tgtaacccttgtctagg

SEQ ID NO: 28238 - DNA, 17 bp, synthetic construct
  source 1..17: mol_type = other DNA
atgtaacccttgtctag

SEQ ID NO: 28239 - DNA, 17 bp, synthetic construct
  source 1..17: mol_type = other DNA
gatgtaacccttgtcta

SEQ ID NO: 28240 - DNA, 17 bp, synthetic construct
  source 1..17: mol_type = other DNA
tgatgtaacccttgtct

SEQ ID NO: 28241 - DNA, 17 bp, synthetic construct
  source 1..17: mol_type = other DNA
ccaggtgatgtaaccct

SEQ ID NO: 28242 - DNA, 17 bp, synthetic construct
  source 1..17: mol_type = other DNA
cccaggtgatgtaaccc

SEQ ID NO: 28243 - DNA, 17 bp, synthetic construct
  source 1..17: mol_type = other DNA
acccaggtgatgtaacc

SEQ ID NO: 28244 - DNA, 17 bp, synthetic construct
  source 1..17: mol_type = other DNA
gggacattgtgacatat

SEQ ID NO: 28245 - DNA, 17 bp, synthetic construct
  source 1..17: mol_type = other DNA
agggacattgtgacata

SEQ ID NO: 28246 - DNA, 17 bp, synthetic construct
  source 1..17: mol_type = other DNA
cagggacattgtgacat

SEQ ID NO: 28247 - DNA, 17 bp, synthetic construct
  source 1..17: mol_type = other DNA
acagggacattgtgaca

SEQ ID NO: 28248 - DNA, 17 bp, synthetic construct
  source 1..17: mol_type = other DNA
tacagggacattgtgac

SEQ ID NO: 28249 - DNA, 17 bp, synthetic construct
  source 1..17: mol_type = other DNA
ctacagggacattgtga

SEQ ID NO: 28250 - DNA, 17 bp, synthetic construct
  source 1..17: mol_type = other DNA
gctacagggacattgtg

SEQ ID NO: 28251 - DNA, 17 bp, synthetic construct
  source 1..17: mol_type = other DNA
ggctacagggacattgt

SEQ ID NO: 28252 - DNA, 17 bp, synthetic construct
  source 1..17: mol_type = other DNA
tggctacagggacattg

SEQ ID NO: 28253 - DNA, 17 bp, synthetic construct
  source 1..17: mol_type = other DNA
atggctacagggacatt

SEQ ID NO: 28254 - DNA, 17 bp, synthetic construct
  source 1..17: mol_type = other DNA
tatggctacagggacat

SEQ ID NO: 28255 - DNA, 17 bp, synthetic construct
  source 1..17: mol_type = other DNA
atatggctacagggaca

SEQ ID NO: 28256 - DNA, 17 bp, synthetic construct
  source 1..17: mol_type = other DNA
gatatggctacagggac

SEQ ID NO: 28257 - DNA, 17 bp, synthetic construct
  source 1..17: mol_type = other DNA
ggatatggctacaggga

SEQ ID NO: 28258 - DNA, 17 bp, synthetic construct
  source 1..17: mol_type = other DNA
aggatatggctacaggg

SEQ ID NO: 28259 - DNA, 17 bp, synthetic construct
  source 1..17: mol_type = other DNA
aaggatatggctacagg

SEQ ID NO: 28260 - DNA, 17 bp, synthetic construct
  source 1..17: mol_type = other DNA
tcaaggatatggctaca

SEQ ID NO: 28261 - DNA, 17 bp, synthetic construct
  source 1..17: mol_type = other DNA
gtcaaggatatggctac

SEQ ID NO: 28262 - DNA, 17 bp, synthetic construct
  source 1..17: mol_type = other DNA
tgtcaaggatatggcta

SEQ ID NO: 28263 - DNA, 17 bp, synthetic construct
  source 1..17: mol_type = other DNA
ttgtcaaggatatggct

SEQ ID NO: 28264 - DNA, 17 bp, synthetic construct
  source 1..17: mol_type = other DNA
tttgtcaaggatatggc

SEQ ID NO: 28265 - DNA, 17 bp, synthetic construct
  source 1..17: mol_type = other DNA
gtcacttttgtcaagga

SEQ ID NO: 28266 - DNA, 17 bp, synthetic construct
  source 1..17: mol_type = other DNA
tgtcacttttgtcaagg

SEQ ID NO: 28267 - DNA, 17 bp, synthetic construct
  source 1..17: mol_type = other DNA
tgatgtcacttttgtca

SEQ ID NO: 28268 - DNA, 17 bp, synthetic construct
  source 1..17: mol_type = other DNA
gtgatgtcacttttgtc

SEQ ID NO: 28269 - DNA, 17 bp, synthetic construct
  source 1..17: mol_type = other DNA
ggtgatgtcacttttgt

SEQ ID NO: 28270 - DNA, 17 bp, synthetic construct
  source 1..17: mol_type = other DNA
aggtgatgtcacttttg

SEQ ID NO: 28271 - DNA, 17 bp, synthetic construct
  source 1..17: mol_type = other DNA
caggtgatgtcactttt

SEQ ID NO: 28272 - DNA, 17 bp, synthetic construct
  source 1..17: mol_type = other DNA
ccaggtgatgtcacttt

SEQ ID NO: 28273 - DNA, 17 bp, synthetic construct
  source 1..17: mol_type = other DNA
cccaggtgatgtcactt

SEQ ID NO: 28274 - DNA, 17 bp, synthetic construct
  source 1..17: mol_type = other DNA
acccaggtgatgtcact

SEQ ID NO: 28275 - DNA, 17 bp, synthetic construct
  source 1..17: mol_type = other DNA
cacccaggtgatgtcac

SEQ ID NO: 28276 - DNA, 17 bp, synthetic construct
  source 1..17: mol_type = other DNA
tcacccaggtgatgtca

SEQ ID NO: 28277 - DNA, 17 bp, synthetic construct
  source 1..17: mol_type = other DNA
atcacccaggtgatgtc

SEQ ID NO: 28278 - DNA, 17 bp, synthetic construct
  source 1..17: mol_type = other DNA
acactgatcacccaggt

SEQ ID NO: 28279 - DNA, 17 bp, synthetic construct
  source 1..17: mol_type = other DNA
cacactgatcacccagg

SEQ ID NO: 28280 - DNA, 17 bp, synthetic construct
  source 1..17: mol_type = other DNA
ccacactgatcacccag

SEQ ID NO: 28281 - DNA, 17 bp, synthetic construct
  source 1..17: mol_type = other DNA
tccacactgatcaccca

SEQ ID NO: 28282 - DNA, 17 bp, synthetic construct
  source 1..17: mol_type = other DNA
ctccacactgatcaccc

SEQ ID NO: 28283 - DNA, 17 bp, synthetic construct
  source 1..17: mol_type = other DNA
tctccacactgatcacc

SEQ ID NO: 28284 - DNA, 17 bp, synthetic construct
  source 1..17: mol_type = other DNA
atctccacactgatcac

SEQ ID NO: 28285 - DNA, 17 bp, synthetic construct
  source 1..17: mol_type = other DNA
tatctccacactgatca

SEQ ID NO: 28286 - DNA, 17 bp, synthetic construct
  source 1..17: mol_type = other DNA
atatctccacactgatc

SEQ ID NO: 28287 - DNA, 17 bp, synthetic construct
  source 1..17: mol_type = other DNA
catatctccacactgat

SEQ ID NO: 28288 - DNA, 17 bp, synthetic construct
  source 1..17: mol_type = other DNA
acatatctccacactga

SEQ ID NO: 28289 - DNA, 17 bp, synthetic construct
  source 1..17: mol_type = other DNA
gacatatctccacactg

SEQ ID NO: 28290 - DNA, 17 bp, synthetic construct
  source 1..17: mol_type = other DNA
tgacatatctccacact

SEQ ID NO: 28291 - DNA, 17 bp, synthetic construct
  source 1..17: mol_type = other DNA
gtgacatatctccacac

SEQ ID NO: 28292 - DNA, 17 bp, synthetic construct
  source 1..17: mol_type = other DNA
tgtgacatatctccaca

SEQ ID NO: 28293 - DNA, 17 bp, synthetic construct
  source 1..17: mol_type = other DNA
ttgtgacatatctccac

SEQ ID NO: 28294 - DNA, 17 bp, synthetic construct
  source 1..17: mol_type = other DNA
attgtgacatatctcca

SEQ ID NO: 28295 - DNA, 17 bp, synthetic construct
  source 1..17: mol_type = other DNA
cattgtgacatatctcc

SEQ ID NO: 28296 - DNA, 17 bp, synthetic construct
  source 1..17: mol_type = other DNA
ctggagacattgtgaca

SEQ ID NO: 28297 - DNA, 17 bp, synthetic construct
  source 1..17: mol_type = other DNA
actggagacattgtgac

SEQ ID NO: 28298 - DNA, 17 bp, synthetic construct
  source 1..17: mol_type = other DNA
ctactggagacattgtg

SEQ ID NO: 28299 - DNA, 17 bp, synthetic construct
  source 1..17: mol_type = other DNA
cctactggagacattgt

SEQ ID NO: 28300 - DNA, 17 bp, synthetic construct
  source 1..17: mol_type = other DNA
gcctactggagacattg

SEQ ID NO: 28301 - DNA, 17 bp, synthetic construct
  source 1..17: mol_type = other DNA
tgcctactggagacatt

SEQ ID NO: 28302 - DNA, 17 bp, synthetic construct
  source 1..17: mol_type = other DNA
ctgcctactggagacat

SEQ ID NO: 28303 - DNA, 17 bp, synthetic construct
  source 1..17: mol_type = other DNA
tctgcctactggagaca

SEQ ID NO: 28304 - DNA, 17 bp, synthetic construct
  source 1..17: mol_type = other DNA
ctctgcctactggagac

SEQ ID NO: 28305 - DNA, 17 bp, synthetic construct
  source 1..17: mol_type = other DNA
gctctgcctactggaga

SEQ ID NO: 28306 - DNA, 17 bp, synthetic construct
  source 1..17: mol_type = other DNA
ggctctgcctactggag

SEQ ID NO: 28307 - DNA, 17 bp, synthetic construct
  source 1..17: mol_type = other DNA
aggctctgcctactgga

SEQ ID NO: 28308 - DNA, 17 bp, synthetic construct
  source 1..17: mol_type = other DNA
taggctctgcctactgg

SEQ ID NO: 28309 - DNA, 17 bp, synthetic construct
  source 1..17: mol_type = other DNA
ctaggctctgcctactg

SEQ ID NO: 28310 - DNA, 17 bp, synthetic construct
  source 1..17: mol_type = other DNA
tctaggctctgcctact

SEQ ID NO: 28311 - DNA, 17 bp, synthetic construct
  source 1..17: mol_type = other DNA
cctgatcacccaggtga

SEQ ID NO: 28312 - DNA, 17 bp, synthetic construct
  source 1..17: mol_type = other DNA
ccctgatcacccaggtg

SEQ ID NO: 28313 - DNA, 17 bp, synthetic construct
  source 1..17: mol_type = other DNA
tgccctgatcacccagg

SEQ ID NO: 28314 - DNA, 17 bp, synthetic construct
  source 1..17: mol_type = other DNA
ctgccctgatcacccag

SEQ ID NO: 28315 - DNA, 17 bp, synthetic construct
  source 1..17: mol_type = other DNA
tctgccctgatcaccca

SEQ ID NO: 28316 - DNA, 17 bp, synthetic construct
  source 1..17: mol_type = other DNA
ctctgccctgatcaccc

SEQ ID NO: 28317 - DNA, 17 bp, synthetic construct
  source 1..17: mol_type = other DNA
tctctgccctgatcacc

SEQ ID NO: 28318 - DNA, 17 bp, synthetic construct
  source 1..17: mol_type = other DNA
atctctgccctgatcac

SEQ ID NO: 28319 - DNA, 17 bp, synthetic construct
  source 1..17: mol_type = other DNA
tatctctgccctgatca

SEQ ID NO: 28320 - DNA, 17 bp, synthetic construct
  source 1..17: mol_type = other DNA
atatctctgccctgatc

SEQ ID NO: 28321 - DNA, 17 bp, synthetic construct
  source 1..17: mol_type = other DNA
catatctctgccctgat

SEQ ID NO: 28322 - DNA, 17 bp, synthetic construct
  source 1..17: mol_type = other DNA
acatatctctgccctga

SEQ ID NO: 28323 - DNA, 17 bp, synthetic construct
  source 1..17: mol_type = other DNA
gacatatctctgccctg

SEQ ID NO: 28324 - DNA, 17 bp, synthetic construct
  source 1..17: mol_type = other DNA
tgacatatctctgccct

SEQ ID NO: 28325 - DNA, 17 bp, synthetic construct
  source 1..17: mol_type = other DNA
gtgacatatctctgccc

SEQ ID NO: 28326 - DNA, 17 bp, synthetic construct
  source 1..17: mol_type = other DNA
tgtgacatatctctgcc

SEQ ID NO: 28327 - DNA, 17 bp, synthetic construct
  source 1..17: mol_type = other DNA
gcattgtgacatatctc

SEQ ID NO: 28328 - DNA, 17 bp, synthetic construct
  source 1..17: mol_type = other DNA
ggcattgtgacatatct

SEQ ID NO: 28329 - DNA, 17 bp, synthetic construct
  source 1..17: mol_type = other DNA
gggcattgtgacatatc

SEQ ID NO: 28330 - DNA, 17 bp, synthetic construct
  source 1..17: mol_type = other DNA
ggggcattgtgacatat

SEQ ID NO: 28331 - DNA, 17 bp, synthetic construct
  source 1..17: mol_type = other DNA
cagggggcattgtgaca

SEQ ID NO: 28332 - DNA, 17 bp, synthetic construct
  source 1..17: mol_type = other DNA
acagggggcattgtgac

SEQ ID NO: 28333 - DNA, 17 bp, synthetic construct
  source 1..17: mol_type = other DNA
tacagggggcattgtga

SEQ ID NO: 28334 - DNA, 17 bp, synthetic construct
  source 1..17: mol_type = other DNA
ttacagggggcattgtg

SEQ ID NO: 28335 - DNA, 17 bp, synthetic construct
  source 1..17: mol_type = other DNA
cttacagggggcattgt

SEQ ID NO: 28336 - DNA, 17 bp, synthetic construct
  source 1..17: mol_type = other DNA
gcttacagggggcattg

SEQ ID NO: 28337 - DNA, 17 bp, synthetic construct
  source 1..17: mol_type = other DNA
tgcttacagggggcatt

SEQ ID NO: 28338 - DNA, 17 bp, synthetic construct
  source 1..17: mol_type = other DNA
ctgcttacagggggcat

SEQ ID NO: 28339 - DNA, 17 bp, synthetic construct
  source 1..17: mol_type = other DNA
tctgcttacagggggca

SEQ ID NO: 28340 - DNA, 17 bp, synthetic construct
  source 1..17: mol_type = other DNA
atctgcttacagggggc

SEQ ID NO: 28341 - DNA, 17 bp, synthetic construct
  source 1..17: mol_type = other DNA
gatctgcttacaggggg

SEQ ID NO: 28342 - DNA, 17 bp, synthetic construct
  source 1..17: mol_type = other DNA
ggatctgcttacagggg

SEQ ID NO: 28343 - DNA, 17 bp, synthetic construct
  source 1..17: mol_type = other DNA
gggatctgcttacaggg

SEQ ID NO: 28344 - DNA, 17 bp, synthetic construct
  source 1..17: mol_type = other DNA
tgggatctgcttacagg

SEQ ID NO: 28345 - DNA, 17 bp, synthetic construct
  source 1..17: mol_type = other DNA
ctgggatctgcttacag

SEQ ID NO: 28346 - DNA, 17 bp, synthetic construct
  source 1..17: mol_type = other DNA
tctgggatctgcttaca

SEQ ID NO: 28347 - DNA, 17 bp, synthetic construct
  source 1..17: mol_type = other DNA
gtctgggatctgcttac

SEQ ID NO: 28348 - DNA, 17 bp, synthetic construct
  source 1..17: mol_type = other DNA
tgtctgggatctgctta

SEQ ID NO: 28349 - DNA, 17 bp, synthetic construct
  source 1..17: mol_type = other DNA
ttgtctgggatctgctt

SEQ ID NO: 28350 - DNA, 17 bp, synthetic construct
  source 1..17: mol_type = other DNA
cttgtctgggatctgct

SEQ ID NO: 28351 - DNA, 17 bp, synthetic construct
  source 1..17: mol_type = other DNA
tcttgtctgggatctgc

SEQ ID NO: 28352 - DNA, 17 bp, synthetic construct
  source 1..17: mol_type = other DNA
ctcttgtctgggatctg

SEQ ID NO: 28353 - DNA, 17 bp, synthetic construct
  source 1..17: mol_type = other DNA
actcttgtctgggatct

SEQ ID NO: 28354 - DNA, 17 bp, synthetic construct
  source 1..17: mol_type = other DNA
aactcttgtctgggatc

SEQ ID NO: 28355 - DNA, 17 bp, synthetic construct
  source 1..17: mol_type = other DNA
caactcttgtctgggat

SEQ ID NO: 28356 - DNA, 17 bp, synthetic construct
  source 1..17: mol_type = other DNA
gcaactcttgtctggga

SEQ ID NO: 28357 - DNA, 17 bp, synthetic construct
  source 1..17: mol_type = other DNA
tgcaactcttgtctggg

SEQ ID NO: 28358 - DNA, 17 bp, synthetic construct
  source 1..17: mol_type = other DNA
atgcaactcttgtctgg

SEQ ID NO: 28359 - DNA, 17 bp, synthetic construct
  source 1..17: mol_type = other DNA
gatgcaactcttgtctg

SEQ ID NO: 28360 - DNA, 17 bp, synthetic construct
  source 1..17: mol_type = other DNA
tgatgcaactcttgtct

SEQ ID NO: 28361 - DNA, 17 bp, synthetic construct
  source 1..17: mol_type = other DNA
gtgatgcaactcttgtc

SEQ ID NO: 28362 - DNA, 17 bp, synthetic construct
  source 1..17: mol_type = other DNA
ggtgatgcaactcttgt

SEQ ID NO: 28363 - DNA, 17 bp, synthetic construct
  source 1..17: mol_type = other DNA
aggtgatgcaactcttg

SEQ ID NO: 28364 - DNA, 17 bp, synthetic construct
  source 1..17: mol_type = other DNA
gaggtgatgcaactctt

SEQ ID NO: 28365 - DNA, 17 bp, synthetic construct
  source 1..17: mol_type = other DNA
cgaggtgatgcaactct

SEQ ID NO: 28366 - DNA, 17 bp, synthetic construct
  source 1..17: mol_type = other DNA
ccgaggtgatgcaactc

SEQ ID NO: 28367 - DNA, 17 bp, synthetic construct
  source 1..17: mol_type = other DNA
accgaggtgatgcaact

SEQ ID NO: 28368 - DNA, 17 bp, synthetic construct
  source 1..17: mol_type = other DNA
caccgaggtgatgcaac

SEQ ID NO: 28369 - DNA, 17 bp, synthetic construct
  source 1..17: mol_type = other DNA
tcaccgaggtgatgcaa

SEQ ID NO: 28370 - DNA, 17 bp, synthetic construct
  source 1..17: mol_type = other DNA
atcaccgaggtgatgca

SEQ ID NO: 28371 - DNA, 17 bp, synthetic construct
  source 1..17: mol_type = other DNA
gatcaccgaggtgatgc

SEQ ID NO: 28372 - DNA, 17 bp, synthetic construct
  source 1..17: mol_type = other DNA
tgatcaccgaggtgatg

SEQ ID NO: 28373 - DNA, 17 bp, synthetic construct
  source 1..17: mol_type = other DNA
ctgatcaccgaggtgat

SEQ ID NO: 28374 - DNA, 17 bp, synthetic construct
  source 1..17: mol_type = other DNA
actgatcaccgaggtga

SEQ ID NO: 28375 - DNA, 17 bp, synthetic construct
  source 1..17: mol_type = other DNA
cactgatcaccgaggtg

SEQ ID NO: 28376 - DNA, 17 bp, synthetic construct
  source 1..17: mol_type = other DNA
gcactgatcaccgaggt

SEQ ID NO: 28377 - DNA, 17 bp, synthetic construct
  source 1..17: mol_type = other DNA
tgcactgatcaccgagg

SEQ ID NO: 28378 - DNA, 17 bp, synthetic construct
  source 1..17: mol_type = other DNA
ctgcactgatcaccgag

SEQ ID NO: 28379 - DNA, 17 bp, synthetic construct
  source 1..17: mol_type = other DNA
ctctgcactgatcaccg

SEQ ID NO: 28380 - DNA, 17 bp, synthetic construct
  source 1..17: mol_type = other DNA
gacgtatctctgcactg

SEQ ID NO: 28381 - DNA, 17 bp, synthetic construct
  source 1..17: mol_type = other DNA
tgacgtatctctgcact

SEQ ID NO: 28382 - DNA, 17 bp, synthetic construct
  source 1..17: mol_type = other DNA
gtgacgtatctctgcac

SEQ ID NO: 28383 - DNA, 17 bp, synthetic construct
  source 1..17: mol_type = other DNA
cattgtgacgtatctct

SEQ ID NO: 28384 - DNA, 17 bp, synthetic construct
  source 1..17: mol_type = other DNA
gcattgtgacgtatctc

SEQ ID NO: 28385 - DNA, 17 bp, synthetic construct
  source 1..17: mol_type = other DNA
ggcattgtgacgtatct

SEQ ID NO: 28386 - DNA, 17 bp, synthetic construct
  source 1..17: mol_type = other DNA
gggcattgtgacgtatc

SEQ ID NO: 28387 - DNA, 17 bp, synthetic construct
  source 1..17: mol_type = other DNA
ggggcattgtgacgtat

SEQ ID NO: 28388 - DNA, 17 bp, synthetic construct
  source 1..17: mol_type = other DNA
aggggcattgtgacgta

SEQ ID NO: 28389 - DNA, 17 bp, synthetic construct
  source 1..17: mol_type = other DNA
caggggcattgtgacgt

SEQ ID NO: 28390 - DNA, 17 bp, synthetic construct
  source 1..17: mol_type = other DNA
acaggggcattgtgacg

SEQ ID NO: 28391 - DNA, 17 bp, synthetic construct
  source 1..17: mol_type = other DNA
ggttatgtaactcttgt

SEQ ID NO: 28392 - DNA, 17 bp, synthetic construct
  source 1..17: mol_type = other DNA
gggttatgtaactcttg

SEQ ID NO: 28393 - DNA, 17 bp, synthetic construct
  source 1..17: mol_type = other DNA
tgggttatgtaactctt

SEQ ID NO: 28394 - DNA, 17 bp, synthetic construct
  source 1..17: mol_type = other DNA
ctgggttatgtaactct

SEQ ID NO: 28395 - DNA, 17 bp, synthetic construct
  source 1..17: mol_type = other DNA
cctgggttatgtaactc

SEQ ID NO: 28396 - DNA, 17 bp, synthetic construct
  source 1..17: mol_type = other DNA
acctgggttatgtaact

SEQ ID NO: 28397 - DNA, 17 bp, synthetic construct
  source 1..17: mol_type = other DNA
cacctgggttatgtaac

SEQ ID NO: 28398 - DNA, 17 bp, synthetic construct
  source 1..17: mol_type = other DNA
tcacctgggttatgtaa

SEQ ID NO: 28399 - DNA, 17 bp, synthetic construct
  source 1..17: mol_type = other DNA
atcacctgggttatgta

SEQ ID NO: 28400 - DNA, 17 bp, synthetic construct
  source 1..17: mol_type = other DNA
gatcacctgggttatgt

SEQ ID NO: 28401 - DNA, 17 bp, synthetic construct
  source 1..17: mol_type = other DNA
ggatcacctgggttatg

SEQ ID NO: 28402 - DNA, 17 bp, synthetic construct
  source 1..17: mol_type = other DNA
cggatcacctgggttat

SEQ ID NO: 28403 - DNA, 17 bp, synthetic construct
  source 1..17: mol_type = other DNA
acggatcacctgggtta

SEQ ID NO: 28404 - DNA, 17 bp, synthetic construct
  source 1..17: mol_type = other DNA
tacggatcacctgggtt

SEQ ID NO: 28405 - DNA, 17 bp, synthetic construct
  source 1..17: mol_type = other DNA
gtacggatcacctgggt

SEQ ID NO: 28406 - DNA, 17 bp, synthetic construct
  source 1..17: mol_type = other DNA
tgtacggatcacctggg

SEQ ID NO: 28407 - DNA, 17 bp, synthetic construct
  source 1..17: mol_type = other DNA
ctgtacggatcacctgg

SEQ ID NO: 28408 - DNA, 17 bp, synthetic construct
  source 1..17: mol_type = other DNA
tctgtacggatcacctg

SEQ ID NO: 28409 - DNA, 17 bp, synthetic construct
  source 1..17: mol_type = other DNA
ctctgtacggatcacct

SEQ ID NO: 28410 - DNA, 17 bp, synthetic construct
  source 1..17: mol_type = other DNA
actctgtacggatcacc

SEQ ID NO: 28411 - DNA, 17 bp, synthetic construct
  source 1..17: mol_type = other DNA
cactctgtacggatcac

SEQ ID NO: 28412 - DNA, 17 bp, synthetic construct
  source 1..17: mol_type = other DNA
tcactctgtacggatca

SEQ ID NO: 28413 - DNA, 17 bp, synthetic construct
  source 1..17: mol_type = other DNA
atcactctgtacggatc

SEQ ID NO: 28414 - DNA, 17 bp, synthetic construct
  source 1..17: mol_type = other DNA
catcactctgtacggat

SEQ ID NO: 28415 - DNA, 17 bp, synthetic construct
  source 1..17: mol_type = other DNA
acatcactctgtacgga

SEQ ID NO: 28416 - DNA, 17 bp, synthetic construct
  source 1..17: mol_type = other DNA
gacatcactctgtacgg

SEQ ID NO: 28417 - DNA, 17 bp, synthetic construct
  source 1..17: mol_type = other DNA
tgacatcactctgtacg

SEQ ID NO: 28418 - DNA, 17 bp, synthetic construct
  source 1..17: mol_type = other DNA
gtgacatcactctgtac

SEQ ID NO: 28419 - DNA, 17 bp, synthetic construct
  source 1..17: mol_type = other DNA
tgtgacatcactctgta

SEQ ID NO: 28420 - DNA, 17 bp, synthetic construct
  source 1..17: mol_type = other DNA
ttgtgacatcactctgt

SEQ ID NO: 28421 - DNA, 17 bp, synthetic construct
  source 1..17: mol_type = other DNA
gttgtgacatcactctg

SEQ ID NO: 28422 - DNA, 17 bp, synthetic construct
  source 1..17: mol_type = other DNA
cgttgtgacatcactct

SEQ ID NO: 28423 - DNA, 17 bp, synthetic construct
  source 1..17: mol_type = other DNA
gcgttgtgacatcactc

SEQ ID NO: 28424 - DNA, 17 bp, synthetic construct
  source 1..17: mol_type = other DNA
ggcgttgtgacatcact

SEQ ID NO: 28425 - DNA, 17 bp, synthetic construct
  source 1..17: mol_type = other DNA
gggcgttgtgacatcac

SEQ ID NO: 28426 - DNA, 17 bp, synthetic construct
  source 1..17: mol_type = other DNA
agggcgttgtgacatca

SEQ ID NO: 28427 - DNA, 17 bp, synthetic construct
  source 1..17: mol_type = other DNA
gagggcgttgtgacatc

SEQ ID NO: 28428 - DNA, 17 bp, synthetic construct
  source 1..17: mol_type = other DNA
agagggcgttgtgacat

SEQ ID NO: 28429 - DNA, 17 bp, synthetic construct
  source 1..17: mol_type = other DNA
cagagggcgttgtgaca

SEQ ID NO: 28430 - DNA, 17 bp, synthetic construct
  source 1..17: mol_type = other DNA
acagagggcgttgtgac

SEQ ID NO: 28431 - DNA, 17 bp, synthetic construct
  source 1..17: mol_type = other DNA
tacagagggcgttgtga

SEQ ID NO: 28432 - DNA, 17 bp, synthetic construct
  source 1..17: mol_type = other DNA
ctacagagggcgttgtg

SEQ ID NO: 28433 - DNA, 17 bp, synthetic construct
  source 1..17: mol_type = other DNA
cctacagagggcgttgt

SEQ ID NO: 28434 - DNA, 17 bp, synthetic construct
  source 1..17: mol_type = other DNA
gcctacagagggcgttg

SEQ ID NO: 28435 - DNA, 17 bp, synthetic construct
  source 1..17: mol_type = other DNA
tgcctacagagggcgtt

SEQ ID NO: 28436 - DNA, 17 bp, synthetic construct
  source 1..17: mol_type = other DNA
ctgcctacagagggcgt

SEQ ID NO: 28437 - DNA, 17 bp, synthetic construct
  source 1..17: mol_type = other DNA
tctgcctacagagggcg

SEQ ID NO: 28438 - DNA, 17 bp, synthetic construct
  source 1..17: mol_type = other DNA
ctctgcctacagagggc

SEQ ID NO: 28439 - DNA, 17 bp, synthetic construct
  source 1..17: mol_type = other DNA
tctctgcctacagaggg

SEQ ID NO: 28440 - DNA, 17 bp, synthetic construct
  source 1..17: mol_type = other DNA
gtctctgcctacagagg

SEQ ID NO: 28441 - DNA, 17 bp, synthetic construct
  source 1..17: mol_type = other DNA
agtctctgcctacagag

SEQ ID NO: 28442 - DNA, 17 bp, synthetic construct
  source 1..17: mol_type = other DNA
tagtctctgcctacaga

SEQ ID NO: 28443 - DNA, 17 bp, synthetic construct
  source 1..17: mol_type = other DNA
ctagtctctgcctacag

SEQ ID NO: 28444 - DNA, 17 bp, synthetic construct
  source 1..17: mol_type = other DNA
tctagtctctgcctaca

SEQ ID NO: 28445 - DNA, 17 bp, synthetic construct
  source 1..17: mol_type = other DNA
ttctagtctctgcctac

SEQ ID NO: 28446 - DNA, 17 bp, synthetic construct
  source 1..17: mol_type = other DNA
tttctagtctctgccta

SEQ ID NO: 28447 - DNA, 17 bp, synthetic construct
  source 1..17: mol_type = other DNA
ttttctagtctctgcct

SEQ ID NO: 28448 - DNA, 17 bp, synthetic construct
  source 1..17: mol_type = other DNA
cttttctagtctctgcc

SEQ ID NO: 28449 - DNA, 17 bp, synthetic construct
  source 1..17: mol_type = other DNA
tcttttctagtctctgc

SEQ ID NO: 28450 - DNA, 17 bp, synthetic construct
  source 1..17: mol_type = other DNA
ctcttttctagtctctg

SEQ ID NO: 28451 - DNA, 17 bp, synthetic construct
  source 1..17: mol_type = other DNA
actcttttctagtctct

SEQ ID NO: 28452 - DNA, 17 bp, synthetic construct
  source 1..17: mol_type = other DNA
aactcttttctagtctc

SEQ ID NO: 28453 - DNA, 17 bp, synthetic construct
  source 1..17: mol_type = other DNA
gtaactcttttctagtc

SEQ ID NO: 28454 - DNA, 17 bp, synthetic construct
  source 1..17: mol_type = other DNA
ccaggtaatgtaactct

SEQ ID NO: 28455 - DNA, 17 bp, synthetic construct
  source 1..17: mol_type = other DNA
cccaggtaatgtaactc

SEQ ID NO: 28456 - DNA, 17 bp, synthetic construct
  source 1..17: mol_type = other DNA
acccaggtaatgtaact

SEQ ID NO: 28457 - DNA, 17 bp, synthetic construct
  source 1..17: mol_type = other DNA
cacccaggtaatgtaac

SEQ ID NO: 28458 - DNA, 17 bp, synthetic construct
  source 1..17: mol_type = other DNA
tcacccaggtaatgtaa

SEQ ID NO: 28459 - DNA, 17 bp, synthetic construct
  source 1..17: mol_type = other DNA
atcacccaggtaatgta

SEQ ID NO: 28460 - DNA, 17 bp, synthetic construct
  source 1..17: mol_type = other DNA
gatcacccaggtaatgt

SEQ ID NO: 28461 - DNA, 17 bp, synthetic construct
  source 1..17: mol_type = other DNA
tgatcacccaggtaatg

SEQ ID NO: 28462 - DNA, 17 bp, synthetic construct
  source 1..17: mol_type = other DNA
ctgatcacccaggtaat

SEQ ID NO: 28463 - DNA, 17 bp, synthetic construct
  source 1..17: mol_type = other DNA
actgatcacccaggtaa

SEQ ID NO: 28464 - DNA, 17 bp, synthetic construct
  source 1..17: mol_type = other DNA
cactgatcacccaggta

SEQ ID NO: 28465 - DNA, 17 bp, synthetic construct
  source 1..17: mol_type = other DNA
ctacagggggcattgtg

SEQ ID NO: 28466 - DNA, 17 bp, synthetic construct
  source 1..17: mol_type = other DNA
cctacagggggcattgt

SEQ ID NO: 28467 - DNA, 17 bp, synthetic construct
  source 1..17: mol_type = other DNA
gcctacagggggcattg

SEQ ID NO: 28468 - DNA, 17 bp, synthetic construct
  source 1..17: mol_type = other DNA
tgcctacagggggcatt

SEQ ID NO: 28469 - DNA, 17 bp, synthetic construct
  source 1..17: mol_type = other DNA
ctgcctacagggggcat

SEQ ID NO: 28470 - DNA, 17 bp, synthetic construct
  source 1..17: mol_type = other DNA
tctgcctacagggggca

SEQ ID NO: 28471 - DNA, 17 bp, synthetic construct
  source 1..17: mol_type = other DNA
tgctctgcctacagggg

SEQ ID NO: 28472 - DNA, 17 bp, synthetic construct
  source 1..17: mol_type = other DNA
atgctctgcctacaggg

SEQ ID NO: 28473 - DNA, 17 bp, synthetic construct
  source 1..17: mol_type = other DNA
tatgctctgcctacagg

SEQ ID NO: 28474 - DNA, 17 bp, synthetic construct
  source 1..17: mol_type = other DNA
ctatgctctgcctacag

SEQ ID NO: 28475 - DNA, 17 bp, synthetic construct
  source 1..17: mol_type = other DNA
tctatgctctgcctaca

SEQ ID NO: 28476 - DNA, 17 bp, synthetic construct
  source 1..17: mol_type = other DNA
ctctatgctctgcctac

SEQ ID NO: 28477 - DNA, 17 bp, synthetic construct
  source 1..17: mol_type = other DNA
tctctatgctctgccta

SEQ ID NO: 28478 - DNA, 17 bp, synthetic construct
  source 1..17: mol_type = other DNA
ttctctatgctctgcct

SEQ ID NO: 28479 - DNA, 17 bp, synthetic construct
  source 1..17: mol_type = other DNA
cttctctatgctctgcc

SEQ ID NO: 28480 - DNA, 17 bp, synthetic construct
  source 1..17: mol_type = other DNA
tcttctctatgctctgc

SEQ ID NO: 28481 - DNA, 17 bp, synthetic construct
  source 1..17: mol_type = other DNA
ctcttctctatgctctg

SEQ ID NO: 28482 - DNA, 17 bp, synthetic construct
  source 1..17: mol_type = other DNA
actcttctctatgctct

SEQ ID NO: 28483 - DNA, 17 bp, synthetic construct
  source 1..17: mol_type = other DNA
aactcttctctatgctc

SEQ ID NO: 28484 - DNA, 17 bp, synthetic construct
  source 1..17: mol_type = other DNA
caactcttctctatgct

SEQ ID NO: 28485 - DNA, 17 bp, synthetic construct
  source 1..17: mol_type = other DNA
gcaactcttctctatgc

SEQ ID NO: 28486 - DNA, 17 bp, synthetic construct
  source 1..17: mol_type = other DNA
tgcaactcttctctatg

SEQ ID NO: 28487 - DNA, 17 bp, synthetic construct
  source 1..17: mol_type = other DNA
atgcaactcttctctat

SEQ ID NO: 28488 - DNA, 17 bp, synthetic construct
  source 1..17: mol_type = other DNA
gatgcaactcttctcta

SEQ ID NO: 28489 - DNA, 17 bp, synthetic construct
  source 1..17: mol_type = other DNA
tgatgcaactcttctct

SEQ ID NO: 28490 - DNA, 17 bp, synthetic construct
  source 1..17: mol_type = other DNA
gtgatgcaactcttctc

SEQ ID NO: 28491 - DNA, 17 bp, synthetic construct
  source 1..17: mol_type = other DNA
ggtgatgcaactcttct

SEQ ID NO: 28492 - DNA, 17 bp, synthetic construct
  source 1..17: mol_type = other DNA
aggtgatgcaactcttc

SEQ ID NO: 28493 - DNA, 17 bp, synthetic construct
  source 1..17: mol_type = other DNA
caggtgatgcaactctt

SEQ ID NO: 28494 - DNA, 17 bp, synthetic construct
  source 1..17: mol_type = other DNA
ccaggtgatgcaactct

SEQ ID NO: 28495 - DNA, 17 bp, synthetic construct
  source 1..17: mol_type = other DNA
cccaggtgatgcaactc

SEQ ID NO: 28496 - DNA, 17 bp, synthetic construct
  source 1..17: mol_type = other DNA
acccaggtgatgcaact

SEQ ID NO: 28497 - DNA, 17 bp, synthetic construct
  source 1..17: mol_type = other DNA
cacccaggtgatgcaac

SEQ ID NO: 28498 - DNA, 17 bp, synthetic construct
  source 1..17: mol_type = other DNA
tcacccaggtgatgcaa

SEQ ID NO: 28499 - DNA, 17 bp, synthetic construct
  source 1..17: mol_type = other DNA
atcacccaggtgatgca

SEQ ID NO: 28500 - DNA, 17 bp, synthetic construct
  source 1..17: mol_type = other DNA
gatcacccaggtgatgc

SEQ ID NO: 28501 - DNA, 17 bp, synthetic construct
  source 1..17: mol_type = other DNA
tacactgatcacccagg

SEQ ID NO: 28502 - DNA, 17 bp, synthetic construct
  source 1..17: mol_type = other DNA
ctacactgatcacccag

SEQ ID NO: 28503 - DNA, 17 bp, synthetic construct
  source 1..17: mol_type = other DNA
tctacactgatcaccca

SEQ ID NO: 28504 - DNA, 17 bp, synthetic construct
  source 1..17: mol_type = other DNA
ctctacactgatcaccc

SEQ ID NO: 28505 - DNA, 17 bp, synthetic construct
  source 1..17: mol_type = other DNA
ggggacattgtgacata

SEQ ID NO: 28506 - DNA, 17 bp, synthetic construct
  source 1..17: mol_type = other DNA
gctctgcctacagggga

SEQ ID NO: 28507 - DNA, 17 bp, synthetic construct
  source 1..17: mol_type = other DNA
aggatctgcctacaggg

SEQ ID NO: 28508 - DNA, 17 bp, synthetic construct
  source 1..17: mol_type = other DNA
taggatctgcctacagg

SEQ ID NO: 28509 - DNA, 17 bp, synthetic construct
  source 1..17: mol_type = other DNA
ctaggatctgcctacag

SEQ ID NO: 28510 - DNA, 17 bp, synthetic construct
  source 1..17: mol_type = other DNA
tctaggatctgcctaca

SEQ ID NO: 28511 - DNA, 17 bp, synthetic construct
  source 1..17: mol_type = other DNA
gtctaggatctgcctac

SEQ ID NO: 28512 - DNA, 17 bp, synthetic construct
  source 1..17: mol_type = other DNA
tgtctaggatctgccta

SEQ ID NO: 28513 - DNA, 17 bp, synthetic construct
  source 1..17: mol_type = other DNA
ttgtctaggatctgcct

SEQ ID NO: 28514 - DNA, 17 bp, synthetic construct
  source 1..17: mol_type = other DNA
cttgtctaggatctgcc

SEQ ID NO: 28515 - DNA, 17 bp, synthetic construct
  source 1..17: mol_type = other DNA
tcttgtctaggatctgc

SEQ ID NO: 28516 - DNA, 17 bp, synthetic construct
  source 1..17: mol_type = other DNA
ctcttgtctaggatctg

SEQ ID NO: 28517 - DNA, 17 bp, synthetic construct
  source 1..17: mol_type = other DNA
actcttgtctaggatct

SEQ ID NO: 28518 - DNA, 17 bp, synthetic construct
  source 1..17: mol_type = other DNA
aactcttgtctaggatc

SEQ ID NO: 28519 - DNA, 17 bp, synthetic construct
  source 1..17: mol_type = other DNA
gcactgatcacctaagt

SEQ ID NO: 28520 - DNA, 17 bp, synthetic construct
  source 1..17: mol_type = other DNA
tgcactgatcacctaag

SEQ ID NO: 28521 - DNA, 17 bp, synthetic construct
  source 1..17: mol_type = other DNA
ctgcactgatcacctaa

SEQ ID NO: 28522 - DNA, 17 bp, synthetic construct
  source 1..17: mol_type = other DNA
tctgcactgatcaccta

SEQ ID NO: 28523 - DNA, 17 bp, synthetic construct
  source 1..17: mol_type = other DNA
ctctgcactgatcacct

SEQ ID NO: 28524 - DNA, 17 bp, synthetic construct
  source 1..17: mol_type = other DNA
tctctgcactgatcact

SEQ ID NO: 28525 - DNA, 17 bp, synthetic construct
  source 1..17: mol_type = other DNA
tctaggctttggcctac

SEQ ID NO: 28526 - DNA, 17 bp, synthetic construct
  source 1..17: mol_type = other DNA
gtctaggctttggccta

SEQ ID NO: 28527 - DNA, 17 bp, synthetic construct
  source 1..17: mol_type = other DNA
tgtctaggctttggcct

SEQ ID NO: 28528 - DNA, 17 bp, synthetic construct
  source 1..17: mol_type = other DNA
ttgtctaggctttggcc

SEQ ID NO: 28529 - DNA, 17 bp, synthetic construct
  source 1..17: mol_type = other DNA
attgtctaggctttggc

SEQ ID NO: 28530 - DNA, 17 bp, synthetic construct
  source 1..17: mol_type = other DNA
tattgtctaggctttgg

SEQ ID NO: 28531 - DNA, 17 bp, synthetic construct
  source 1..17: mol_type = other DNA
ctattgtctaggctttg

SEQ ID NO: 28532 - DNA, 17 bp, synthetic construct
  source 1..17: mol_type = other DNA
actattgtctaggcttt

SEQ ID NO: 28533 - DNA, 17 bp, synthetic construct
  source 1..17: mol_type = other DNA
aactattgtctaggctt

SEQ ID NO: 28534 - DNA, 17 bp, synthetic construct
  source 1..17: mol_type = other DNA
taactattgtctaggct

SEQ ID NO: 28535 - DNA, 17 bp, synthetic construct
  source 1..17: mol_type = other DNA
gtaactattgtctaggc

SEQ ID NO: 28536 - DNA, 17 bp, synthetic construct
  source 1..17: mol_type = other DNA
cccaagtgatgtaacta

SEQ ID NO: 28537 - DNA, 17 bp, synthetic construct
  source 1..17: mol_type = other DNA
acccaagtgatgtaact

SEQ ID NO: 28538 - DNA, 17 bp, synthetic construct
  source 1..17: mol_type = other DNA
cacccaagtgatgtaac

SEQ ID NO: 28539 - DNA, 17 bp, synthetic construct
  source 1..17: mol_type = other DNA
tcacccaagtgatgtaa

SEQ ID NO: 28540 - DNA, 17 bp, synthetic construct
  source 1..17: mol_type = other DNA
atcacccaagtgatgta

SEQ ID NO: 28541 - DNA, 17 bp, synthetic construct
  source 1..17: mol_type = other DNA
gatcacccaagtgatgt

SEQ ID NO: 28542 - DNA, 17 bp, synthetic construct
  source 1..17: mol_type = other DNA
tgatcacccaagtgatg

SEQ ID NO: 28543 - DNA, 17 bp, synthetic construct
  source 1..17: mol_type = other DNA
ctgatcacccaagtgat

SEQ ID NO: 28544 - DNA, 17 bp, synthetic construct
  source 1..17: mol_type = other DNA
actgatcacccaagtga

SEQ ID NO: 28545 - DNA, 17 bp, synthetic construct
  source 1..17: mol_type = other DNA
cactgatcacccaagtg

SEQ ID NO: 28546 - DNA, 17 bp, synthetic construct
  source 1..17: mol_type = other DNA
ccactgatcacccaagt

SEQ ID NO: 28547 - DNA, 17 bp, synthetic construct
  source 1..17: mol_type = other DNA
gccactgatcacccaag

SEQ ID NO: 28548 - DNA, 17 bp, synthetic construct
  source 1..17: mol_type = other DNA
cgccactgatcacccaa

SEQ ID NO: 28549 - DNA, 17 bp, synthetic construct
  source 1..17: mol_type = other DNA
tcgccactgatcaccca

SEQ ID NO: 28550 - DNA, 17 bp, synthetic construct
  source 1..17: mol_type = other DNA
ctcgccactgatcaccc

SEQ ID NO: 28551 - DNA, 17 bp, synthetic construct
  source 1..17: mol_type = other DNA
tctcgccactgatcacc

SEQ ID NO: 28552 - DNA, 17 bp, synthetic construct
  source 1..17: mol_type = other DNA
atctcgccactgatcac

SEQ ID NO: 28553 - DNA, 17 bp, synthetic construct
  source 1..17: mol_type = other DNA
gatctcgccactgatca

SEQ ID NO: 28554 - DNA, 17 bp, synthetic construct
  source 1..17: mol_type = other DNA
agatctcgccactgatc

SEQ ID NO: 28555 - DNA, 17 bp, synthetic construct
  source 1..17: mol_type = other DNA
gagatctcgccactgat

SEQ ID NO: 28556 - DNA, 17 bp, synthetic construct
  source 1..17: mol_type = other DNA
agagatctcgccactga

SEQ ID NO: 28557 - DNA, 17 bp, synthetic construct
  source 1..17: mol_type = other DNA
gagagatctcgccactg

SEQ ID NO: 28558 - DNA, 17 bp, synthetic construct
  source 1..17: mol_type = other DNA
tgagagatctcgccact

SEQ ID NO: 28559 - DNA, 17 bp, synthetic construct
  source 1..17: mol_type = other DNA
gtgagagatctcgccac

SEQ ID NO: 28560 - DNA, 17 bp, synthetic construct
  source 1..17: mol_type = other DNA
tgtgagagatctcgcca

SEQ ID NO: 28561 - DNA, 17 bp, synthetic construct
  source 1..17: mol_type = other DNA
ttgtgagagatctcgcc

SEQ ID NO: 28562 - DNA, 17 bp, synthetic construct
  source 1..17: mol_type = other DNA
attgtgagagatctcgc

SEQ ID NO: 28563 - DNA, 17 bp, synthetic construct
  source 1..17: mol_type = other DNA
ggggaattgtgagagat

SEQ ID NO: 28564 - DNA, 17 bp, synthetic construct
  source 1..17: mol_type = other DNA
aggggaattgtgagaga

SEQ ID NO: 28565 - DNA, 17 bp, synthetic construct
  source 1..17: mol_type = other DNA
caggggaattgtgagag

SEQ ID NO: 28566 - DNA, 17 bp, synthetic construct
  source 1..17: mol_type = other DNA
acaggggaattgtgaga

SEQ ID NO: 28567 - DNA, 17 bp, synthetic construct
  source 1..17: mol_type = other DNA
ctacaggggaattgtga

SEQ ID NO: 28568 - DNA, 17 bp, synthetic construct
  source 1..17: mol_type = other DNA
cctacaggggaattgtg

SEQ ID NO: 28569 - DNA, 17 bp, synthetic construct
  source 1..17: mol_type = other DNA
gcctacaggggaattgt

SEQ ID NO: 28570 - DNA, 17 bp, synthetic construct
  source 1..17: mol_type = other DNA
tgcctacaggggaattg

SEQ ID NO: 28571 - DNA, 17 bp, synthetic construct
  source 1..17: mol_type = other DNA
ctgcctacaggggaatt

SEQ ID NO: 28572 - DNA, 17 bp, synthetic construct
  source 1..17: mol_type = other DNA
tctgcctacaggggaat

SEQ ID NO: 28573 - DNA, 17 bp, synthetic construct
  source 1..17: mol_type = other DNA
ctctgcctacaggggaa

SEQ ID NO: 28574 - DNA, 17 bp, synthetic construct
  source 1..17: mol_type = other DNA
ataagctctgcctacag

SEQ ID NO: 28575 - DNA, 17 bp, synthetic construct
  source 1..17: mol_type = other DNA
tataagctctgcctaca

SEQ ID NO: 28576 - DNA, 17 bp, synthetic construct
  source 1..17: mol_type = other DNA
gtataagctctgcctac

SEQ ID NO: 28577 - DNA, 17 bp, synthetic construct
  source 1..17: mol_type = other DNA
tgtataagctctgccta

SEQ ID NO: 28578 - DNA, 17 bp, synthetic construct
  source 1..17: mol_type = other DNA
ttgtataagctctgcct

SEQ ID NO: 28579 - DNA, 17 bp, synthetic construct
  source 1..17: mol_type = other DNA
gttgtataagctctgcc

SEQ ID NO: 28580 - DNA, 17 bp, synthetic construct
  source 1..17: mol_type = other DNA
tgttgtataagctctgc

SEQ ID NO: 28581 - DNA, 17 bp, synthetic construct
  source 1..17: mol_type = other DNA
ctgttgtataagctctg

SEQ ID NO: 28582 - DNA, 17 bp, synthetic construct
  source 1..17: mol_type = other DNA
actgttgtataagctct

SEQ ID NO: 28583 - DNA, 17 bp, synthetic construct
  source 1..17: mol_type = other DNA
tgggggcattgtgacat

SEQ ID NO: 28584 - DNA, 17 bp, synthetic construct
  source 1..17: mol_type = other DNA
atgggggcattgtgaca

SEQ ID NO: 28585 - DNA, 17 bp, synthetic construct
  source 1..17: mol_type = other DNA
tatgggggcattgtgac

SEQ ID NO: 28586 - DNA, 17 bp, synthetic construct
  source 1..17: mol_type = other DNA
ctatgggggcattgtga

SEQ ID NO: 28587 - DNA, 17 bp, synthetic construct
  source 1..17: mol_type = other DNA
cctatgggggcattgtg

SEQ ID NO: 28588 - DNA, 17 bp, synthetic construct
  source 1..17: mol_type = other DNA
gcctatgggggcattgt

SEQ ID NO: 28589 - DNA, 17 bp, synthetic construct
  source 1..17: mol_type = other DNA
tgcctatgggggcattg

SEQ ID NO: 28590 - DNA, 17 bp, synthetic construct
  source 1..17: mol_type = other DNA
ctgcctatgggggcatt

SEQ ID NO: 28591 - DNA, 17 bp, synthetic construct
  source 1..17: mol_type = other DNA
gtatttctgcactgatc

SEQ ID NO: 28592 - DNA, 17 bp, synthetic construct
  source 1..17: mol_type = other DNA
cgtatttctgcactgat

SEQ ID NO: 28593 - DNA, 17 bp, synthetic construct
  source 1..17: mol_type = other DNA
acgtatttctgcactga

SEQ ID NO: 28594 - DNA, 17 bp, synthetic construct
  source 1..17: mol_type = other DNA
gacgtatttctgcactg

SEQ ID NO: 28595 - DNA, 17 bp, synthetic construct
  source 1..17: mol_type = other DNA
tgacgtatttctgcact

SEQ ID NO: 28596 - DNA, 17 bp, synthetic construct
  source 1..17: mol_type = other DNA
gtgacgtatttctgcac

SEQ ID NO: 28597 - DNA, 17 bp, synthetic construct
  source 1..17: mol_type = other DNA
tgtgacgtatttctgca

SEQ ID NO: 28598 - DNA, 17 bp, synthetic construct
  source 1..17: mol_type = other DNA
ttgtgacgtatttctgc

SEQ ID NO: 28599 - DNA, 17 bp, synthetic construct
  source 1..17: mol_type = other DNA
gcattgtgacgtatttc

SEQ ID NO: 28600 - DNA, 17 bp, synthetic construct
  source 1..17: mol_type = other DNA
ggcattgtgacgtattt

SEQ ID NO: 28601 - DNA, 17 bp, synthetic construct
  source 1..17: mol_type = other DNA
gggcattgtgacgtatt

SEQ ID NO: 28602 - DNA, 17 bp, synthetic construct
  source 1..17: mol_type = other DNA
gggggcattgtgacgta

SEQ ID NO: 28603 - DNA, 17 bp, synthetic construct
  source 1..17: mol_type = other DNA
agggggcattgtgacgt

SEQ ID NO: 28604 - DNA, 17 bp, synthetic construct
  source 1..17: mol_type = other DNA
aagggggcattgtgacg

SEQ ID NO: 28605 - DNA, 17 bp, synthetic construct
  source 1..17: mol_type = other DNA
taagggggcattgtgac

SEQ ID NO: 28606 - DNA, 17 bp, synthetic construct
  source 1..17: mol_type = other DNA
ctaagggggcattgtga

SEQ ID NO: 28607 - DNA, 17 bp, synthetic construct
  source 1..17: mol_type = other DNA
cctaagggggcattgtg

SEQ ID NO: 28608 - DNA, 17 bp, synthetic construct
  source 1..17: mol_type = other DNA
gcctaagggggcattgt

SEQ ID NO: 28609 - DNA, 17 bp, synthetic construct
  source 1..17: mol_type = other DNA
tgcctaagggggcattg

SEQ ID NO: 28610 - DNA, 17 bp, synthetic construct
  source 1..17: mol_type = other DNA
ctgcctaagggggcatt

SEQ ID NO: 28611 - DNA, 17 bp, synthetic construct
  source 1..17: mol_type = other DNA
tctgcctaagggggcat

SEQ ID NO: 28612 - DNA, 17 bp, synthetic construct
  source 1..17: mol_type = other DNA
ctctgcctaagggggca

SEQ ID NO: 28613 - DNA, 17 bp, synthetic construct
  source 1..17: mol_type = other DNA
ggctctgcctaaggggg

SEQ ID NO: 28614 - DNA, 17 bp, synthetic construct
  source 1..17: mol_type = other DNA
aggctctgcctaagggg

SEQ ID NO: 28615 - DNA, 17 bp, synthetic construct
  source 1..17: mol_type = other DNA
taggctctgcctaaggg

SEQ ID NO: 28616 - DNA, 17 bp, synthetic construct
  source 1..17: mol_type = other DNA
ctaggctctgcctaagg

SEQ ID NO: 28617 - DNA, 17 bp, synthetic construct
  source 1..17: mol_type = other DNA
tctaggctctgcctaag

SEQ ID NO: 28618 - DNA, 17 bp, synthetic construct
  source 1..17: mol_type = other DNA
gtctaggctctgcctaa

SEQ ID NO: 28619 - DNA, 17 bp, synthetic construct
  source 1..17: mol_type = other DNA
tttgtctaggctctgcc

SEQ ID NO: 28620 - DNA, 17 bp, synthetic construct
  source 1..17: mol_type = other DNA
ttttgtctaggctctgc

SEQ ID NO: 28621 - DNA, 17 bp, synthetic construct
  source 1..17: mol_type = other DNA
cttttgtctaggctctg

SEQ ID NO: 28622 - DNA, 17 bp, synthetic construct
  source 1..17: mol_type = other DNA
gcttttgtctaggctct

SEQ ID NO: 28623 - DNA, 17 bp, synthetic construct
  source 1..17: mol_type = other DNA
ggcttttgtctaggctc

SEQ ID NO: 28624 - DNA, 17 bp, synthetic construct
  source 1..17: mol_type = other DNA
gggcttttgtctaggct

SEQ ID NO: 28625 - DNA, 17 bp, synthetic construct
  source 1..17: mol_type = other DNA
ggggcttttgtctaggc

SEQ ID NO: 28626 - DNA, 17 bp, synthetic construct
  source 1..17: mol_type = other DNA
tggggcttttgtctagg

SEQ ID NO: 28627 - DNA, 17 bp, synthetic construct
  source 1..17: mol_type = other DNA
atggggcttttgtctag

SEQ ID NO: 28628 - DNA, 17 bp, synthetic construct
  source 1..17: mol_type = other DNA
gatggggcttttgtcta

SEQ ID NO: 28629 - DNA, 17 bp, synthetic construct
  source 1..17: mol_type = other DNA
tgatggggcttttgtct

SEQ ID NO: 28630 - DNA, 17 bp, synthetic construct
  source 1..17: mol_type = other DNA
gtgatggggcttttgtc

SEQ ID NO: 28631 - DNA, 17 bp, synthetic construct
  source 1..17: mol_type = other DNA
ggtgatggggcttttgt

SEQ ID NO: 28632 - DNA, 17 bp, synthetic construct
  source 1..17: mol_type = other DNA
aggtgatggggcttttg

SEQ ID NO: 28633 - DNA, 17 bp, synthetic construct
  source 1..17: mol_type = other DNA
caggtgatggggctttt

SEQ ID NO: 28634 - DNA, 17 bp, synthetic construct
  source 1..17: mol_type = other DNA
ccaggtgatggggcttt

SEQ ID NO: 28635 - DNA, 17 bp, synthetic construct
  source 1..17: mol_type = other DNA
tccaggtgatggggctt

SEQ ID NO: 28636 - DNA, 17 bp, synthetic construct
  source 1..17: mol_type = other DNA
atccaggtgatggggct

SEQ ID NO: 28637 - DNA, 17 bp, synthetic construct
  source 1..17: mol_type = other DNA
catccaggtgatggggc

SEQ ID NO: 28638 - DNA, 17 bp, synthetic construct
  source 1..17: mol_type = other DNA
tcatccaggtgatgggg

SEQ ID NO: 28639 - DNA, 17 bp, synthetic construct
  source 1..17: mol_type = other DNA
atcatccaggtgatggg

SEQ ID NO: 28640 - DNA, 17 bp, synthetic construct
  source 1..17: mol_type = other DNA
aatcatccaggtgatgg

SEQ ID NO: 28641 - DNA, 17 bp, synthetic construct
  source 1..17: mol_type = other DNA
ctaatcatccaggtgat

SEQ ID NO: 28642 - DNA, 17 bp, synthetic construct
  source 1..17: mol_type = other DNA
actaatcatccaggtga

SEQ ID NO: 28643 - DNA, 17 bp, synthetic construct
  source 1..17: mol_type = other DNA
cactaatcatccaggtg

SEQ ID NO: 28644 - DNA, 17 bp, synthetic construct
  source 1..17: mol_type = other DNA
gcactaatcatccaggt

SEQ ID NO: 28645 - DNA, 17 bp, synthetic construct
  source 1..17: mol_type = other DNA
tgcactaatcatccagg

SEQ ID NO: 28646 - DNA, 17 bp, synthetic construct
  source 1..17: mol_type = other DNA
ctgcactaatcatccag

SEQ ID NO: 28647 - DNA, 17 bp, synthetic construct
  source 1..17: mol_type = other DNA
tctgcactaatcatcca

SEQ ID NO: 28648 - DNA, 17 bp, synthetic construct
  source 1..17: mol_type = other DNA
ctctgcactaatcatcc

SEQ ID NO: 28649 - DNA, 17 bp, synthetic construct
  source 1..17: mol_type = other DNA
actctgcactaatcatc

SEQ ID NO: 28650 - DNA, 17 bp, synthetic construct
  source 1..17: mol_type = other DNA
tggcattgtgacatatc

SEQ ID NO: 28651 - DNA, 17 bp, synthetic construct
  source 1..17: mol_type = other DNA
gtggcattgtgacatat

SEQ ID NO: 28652 - DNA, 17 bp, synthetic construct
  source 1..17: mol_type = other DNA
agtggcattgtgacata

SEQ ID NO: 28653 - DNA, 17 bp, synthetic construct
  source 1..17: mol_type = other DNA
cagtggcattgtgacat

SEQ ID NO: 28654 - DNA, 17 bp, synthetic construct
  source 1..17: mol_type = other DNA
acagtggcattgtgaca

SEQ ID NO: 28655 - DNA, 17 bp, synthetic construct
  source 1..17: mol_type = other DNA
tacagtggcattgtgac

SEQ ID NO: 28656 - DNA, 17 bp, synthetic construct
  source 1..17: mol_type = other DNA
ctacagtggcattgtga

SEQ ID NO: 28657 - DNA, 17 bp, synthetic construct
  source 1..17: mol_type = other DNA
cctacagtggcattgtg

SEQ ID NO: 28658 - DNA, 17 bp, synthetic construct
  source 1..17: mol_type = other DNA
gcctacagtggcattgt

SEQ ID NO: 28659 - DNA, 17 bp, synthetic construct
  source 1..17: mol_type = other DNA
tgcctacagtggcattg

SEQ ID NO: 28660 - DNA, 17 bp, synthetic construct
  source 1..17: mol_type = other DNA
ctgcctacagtggcatt

SEQ ID NO: 28661 - DNA, 17 bp, synthetic construct
  source 1..17: mol_type = other DNA
tctgcctacagtggcat

SEQ ID NO: 28662 - DNA, 17 bp, synthetic construct
  source 1..17: mol_type = other DNA
ctctgcctacagtggca

SEQ ID NO: 28663 - DNA, 17 bp, synthetic construct
  source 1..17: mol_type = other DNA
ggctctgcctacagtgg

SEQ ID NO: 28664 - DNA, 17 bp, synthetic construct
  source 1..17: mol_type = other DNA
aggctctgcctacagtg

SEQ ID NO: 28665 - DNA, 17 bp, synthetic construct
  source 1..17: mol_type = other DNA
taggctctgcctacagt

SEQ ID NO: 28666 - DNA, 17 bp, synthetic construct
  source 1..17: mol_type = other DNA
ataactcttgtctaggc

SEQ ID NO: 28667 - DNA, 17 bp, synthetic construct
  source 1..17: mol_type = other DNA
cctaggtcatataactc

SEQ ID NO: 28668 - DNA, 17 bp, synthetic construct
  source 1..17: mol_type = other DNA
atcacctaggtcatata

SEQ ID NO: 28669 - DNA, 17 bp, synthetic construct
  source 1..17: mol_type = other DNA
gatcacctaggtcatat

SEQ ID NO: 28670 - DNA, 17 bp, synthetic construct
  source 1..17: mol_type = other DNA
tgatcacctaggtcata

SEQ ID NO: 28671 - DNA, 17 bp, synthetic construct
  source 1..17: mol_type = other DNA
ctgatcacctaggtcat

SEQ ID NO: 28672 - DNA, 17 bp, synthetic construct
  source 1..17: mol_type = other DNA
actgatcacctaggtca

SEQ ID NO: 28673 - DNA, 17 bp, synthetic construct
  source 1..17: mol_type = other DNA
cactgatcacctaggtc

SEQ ID NO: 28674 - DNA, 17 bp, synthetic construct
  source 1..17: mol_type = other DNA
tgtatctctgcactgat

SEQ ID NO: 28675 - DNA, 17 bp, synthetic construct
  source 1..17: mol_type = other DNA
atgtatctctgcactga

SEQ ID NO: 28676 - DNA, 17 bp, synthetic construct
  source 1..17: mol_type = other DNA
gcctacaggggcattgc

SEQ ID NO: 28677 - DNA, 17 bp, synthetic construct
  source 1..17: mol_type = other DNA
agggctctgcctacagg

SEQ ID NO: 28678 - DNA, 17 bp, synthetic construct
  source 1..17: mol_type = other DNA
cagggctctgcctacag

SEQ ID NO: 28679 - DNA, 17 bp, synthetic construct
  source 1..17: mol_type = other DNA
tcagggctctgcctaca

SEQ ID NO: 28680 - DNA, 17 bp, synthetic construct
  source 1..17: mol_type = other DNA
tgtcagggctctgccta

SEQ ID NO: 28681 - DNA, 17 bp, synthetic construct
  source 1..17: mol_type = other DNA
acttgtcagggctctgc

SEQ ID NO: 28682 - DNA, 17 bp, synthetic construct
  source 1..17: mol_type = other DNA
cacttgtcagggctctg

SEQ ID NO: 28683 - DNA, 17 bp, synthetic construct
  source 1..17: mol_type = other DNA
ccacttgtcagggctct

SEQ ID NO: 28684 - DNA, 17 bp, synthetic construct
  source 1..17: mol_type = other DNA
accacttgtcagggctc

SEQ ID NO: 28685 - DNA, 17 bp, synthetic construct
  source 1..17: mol_type = other DNA
taccacttgtcagggct

SEQ ID NO: 28686 - DNA, 17 bp, synthetic construct
  source 1..17: mol_type = other DNA
gtaccacttgtcagggc

SEQ ID NO: 28687 - DNA, 17 bp, synthetic construct
  source 1..17: mol_type = other DNA
tgtaccacttgtcaggg

SEQ ID NO: 28688 - DNA, 17 bp, synthetic construct
  source 1..17: mol_type = other DNA
atgtaccacttgtcagg

SEQ ID NO: 28689 - DNA, 17 bp, synthetic construct
  source 1..17: mol_type = other DNA
gatgtaccacttgtcag

SEQ ID NO: 28690 - DNA, 17 bp, synthetic construct
  source 1..17: mol_type = other DNA
tgatgtaccacttgtca

SEQ ID NO: 28691 - DNA, 17 bp, synthetic construct
  source 1..17: mol_type = other DNA
gtgatgtaccacttgtc

SEQ ID NO: 28692 - DNA, 17 bp, synthetic construct
  source 1..17: mol_type = other DNA
ggtgatgtaccacttgt

SEQ ID NO: 28693 - DNA, 17 bp, synthetic construct
  source 1..17: mol_type = other DNA
aggtgatgtaccacttg

SEQ ID NO: 28694 - DNA, 17 bp, synthetic construct
  source 1..17: mol_type = other DNA
caggtgatgtaccactt

SEQ ID NO: 28695 - DNA, 17 bp, synthetic construct
  source 1..17: mol_type = other DNA
ccaggtgatgtaccact

SEQ ID NO: 28696 - DNA, 17 bp, synthetic construct
  source 1..17: mol_type = other DNA
cccaggtgatgtaccac

SEQ ID NO: 28697 - DNA, 17 bp, synthetic construct
  source 1..17: mol_type = other DNA
acccaggtgatgtacca

SEQ ID NO: 28698 - DNA, 17 bp, synthetic construct
  source 1..17: mol_type = other DNA
cacccaggtgatgtacc

SEQ ID NO: 28699 - DNA, 17 bp, synthetic construct
  source 1..17: mol_type = other DNA
tcacccaggtgatgtac

SEQ ID NO: 28700 - DNA, 17 bp, synthetic construct
  source 1..17: mol_type = other DNA
cctgcaatgatcaccca

SEQ ID NO: 28701 - DNA, 17 bp, synthetic construct
  source 1..17: mol_type = other DNA
ccctgcaatgatcaccc

SEQ ID NO: 28702 - DNA, 17 bp, synthetic construct
  source 1..17: mol_type = other DNA
tccctgcaatgatcacc

SEQ ID NO: 28703 - DNA, 17 bp, synthetic construct
  source 1..17: mol_type = other DNA
atccctgcaatgatcac

SEQ ID NO: 28704 - DNA, 17 bp, synthetic construct
  source 1..17: mol_type = other DNA
tatccctgcaatgatca

SEQ ID NO: 28705 - DNA, 17 bp, synthetic construct
  source 1..17: mol_type = other DNA
atatccctgcaatgatc

SEQ ID NO: 28706 - DNA, 17 bp, synthetic construct
  source 1..17: mol_type = other DNA
catatccctgcaatgat

SEQ ID NO: 28707 - DNA, 17 bp, synthetic construct
  source 1..17: mol_type = other DNA
acatatccctgcaatga

SEQ ID NO: 28708 - DNA, 17 bp, synthetic construct
  source 1..17: mol_type = other DNA
gacatatccctgcaatg

SEQ ID NO: 28709 - DNA, 17 bp, synthetic construct
  source 1..17: mol_type = other DNA
tgacatatccctgcaat

SEQ ID NO: 28710 - DNA, 17 bp, synthetic construct
  source 1..17: mol_type = other DNA
gtgacatatccctgcaa

SEQ ID NO: 28711 - DNA, 17 bp, synthetic construct
  source 1..17: mol_type = other DNA
tgtgacatatccctgca

SEQ ID NO: 28712 - DNA, 17 bp, synthetic construct
  source 1..17: mol_type = other DNA
ttgtgacatatccctgc

SEQ ID NO: 28713 - DNA, 17 bp, synthetic construct
  source 1..17: mol_type = other DNA
tttgtgacatatccctg

SEQ ID NO: 28714 - DNA, 17 bp, synthetic construct
  source 1..17: mol_type = other DNA
ctttgtgacatatccct

SEQ ID NO: 28715 - DNA, 17 bp, synthetic construct
  source 1..17: mol_type = other DNA
gctttgtgacatatccc

SEQ ID NO: 28716 - DNA, 17 bp, synthetic construct
  source 1..17: mol_type = other DNA
tgctttgtgacatatcc

SEQ ID NO: 28717 - DNA, 17 bp, synthetic construct
  source 1..17: mol_type = other DNA
gtgctttgtgacatatc

SEQ ID NO: 28718 - DNA, 17 bp, synthetic construct
  source 1..17: mol_type = other DNA
ggtgctttgtgacatat

SEQ ID NO: 28719 - DNA, 17 bp, synthetic construct
  source 1..17: mol_type = other DNA
gggtgctttgtgacata

SEQ ID NO: 28720 - DNA, 17 bp, synthetic construct
  source 1..17: mol_type = other DNA
agggtgctttgtgacat

SEQ ID NO: 28721 - DNA, 17 bp, synthetic construct
  source 1..17: mol_type = other DNA
cagggtgctttgtgaca

SEQ ID NO: 28722 - DNA, 17 bp, synthetic construct
  source 1..17: mol_type = other DNA
acagggtgctttgtgac

SEQ ID NO: 28723 - DNA, 17 bp, synthetic construct
  source 1..17: mol_type = other DNA
tacagggtgctttgtga

SEQ ID NO: 28724 - DNA, 17 bp, synthetic construct
  source 1..17: mol_type = other DNA
ctacagggtgctttgtg

SEQ ID NO: 28725 - DNA, 17 bp, synthetic construct
  source 1..17: mol_type = other DNA
cctacagggtgctttgt

SEQ ID NO: 28726 - DNA, 17 bp, synthetic construct
  source 1..17: mol_type = other DNA
gcctacagggtgctttg

SEQ ID NO: 28727 - DNA, 17 bp, synthetic construct
  source 1..17: mol_type = other DNA
tgcctacagggtgcttt

SEQ ID NO: 28728 - DNA, 17 bp, synthetic construct
  source 1..17: mol_type = other DNA
ctgcctacagggtgctt

SEQ ID NO: 28729 - DNA, 17 bp, synthetic construct
  source 1..17: mol_type = other DNA
tctgcctacagggtgct

SEQ ID NO: 28730 - DNA, 17 bp, synthetic construct
  source 1..17: mol_type = other DNA
atctgcctacagggtgc

SEQ ID NO: 28731 - DNA, 17 bp, synthetic construct
  source 1..17: mol_type = other DNA
gatctgcctacagggtg

SEQ ID NO: 28732 - DNA, 17 bp, synthetic construct
  source 1..17: mol_type = other DNA
ggatctgcctacagggt

SEQ ID NO: 28733 - DNA, 17 bp, synthetic construct
  source 1..17: mol_type = other DNA
gtaactcttgtctagga

SEQ ID NO: 28734 - DNA, 17 bp, synthetic construct
  source 1..17: mol_type = other DNA
tcatgtaactcttgtct

SEQ ID NO: 28735 - DNA, 17 bp, synthetic construct
  source 1..17: mol_type = other DNA
gtcatgtaactcttgtc

SEQ ID NO: 28736 - DNA, 17 bp, synthetic construct
  source 1..17: mol_type = other DNA
ggtcatgtaactcttgt

SEQ ID NO: 28737 - DNA, 17 bp, synthetic construct
  source 1..17: mol_type = other DNA
aggtcatgtaactcttg

SEQ ID NO: 28738 - DNA, 17 bp, synthetic construct
  source 1..17: mol_type = other DNA
caggtcatgtaactctt

SEQ ID NO: 28739 - DNA, 17 bp, synthetic construct
  source 1..17: mol_type = other DNA
ccaggtcatgtaactct

SEQ ID NO: 28740 - DNA, 17 bp, synthetic construct
  source 1..17: mol_type = other DNA
cccaggtcatgtaactc

SEQ ID NO: 28741 - DNA, 17 bp, synthetic construct
  source 1..17: mol_type = other DNA
acccaggtcatgtaact

SEQ ID NO: 28742 - DNA, 17 bp, synthetic construct
  source 1..17: mol_type = other DNA
cacccaggtcatgtaac

SEQ ID NO: 28743 - DNA, 17 bp, synthetic construct
  source 1..17: mol_type = other DNA
tcacccaggtcatgtaa

SEQ ID NO: 28744 - DNA, 17 bp, synthetic construct
  source 1..17: mol_type = other DNA
atcacccaggtcatgta

SEQ ID NO: 28745 - DNA, 17 bp, synthetic construct
  source 1..17: mol_type = other DNA
gatcacccaggtcatgt

SEQ ID NO: 28746 - DNA, 17 bp, synthetic construct
  source 1..17: mol_type = other DNA
tgatcacccaggtcatg

SEQ ID NO: 28747 - DNA, 17 bp, synthetic construct
  source 1..17: mol_type = other DNA
ctgatcacccaggtcat

SEQ ID NO: 28748 - DNA, 17 bp, synthetic construct
  source 1..17: mol_type = other DNA
actgatcacccaggtca

SEQ ID NO: 28749 - DNA, 17 bp, synthetic construct
  source 1..17: mol_type = other DNA
cactgatcacccaggtc

SEQ ID NO: 28750 - DNA, 17 bp, synthetic construct
  source 1..17: mol_type = other DNA
taggtcatgtaactctt

SEQ ID NO: 28751 - DNA, 17 bp, synthetic construct
  source 1..17: mol_type = other DNA
ctaggtcatgtaactct

SEQ ID NO: 28752 - DNA, 17 bp, synthetic construct
  source 1..17: mol_type = other DNA
cctaggtcatgtaactc

SEQ ID NO: 28753 - DNA, 17 bp, synthetic construct
  source 1..17: mol_type = other DNA
acctaggtcatgtaact

SEQ ID NO: 28754 - DNA, 17 bp, synthetic construct
  source 1..17: mol_type = other DNA
cacctaggtcatgtaac

SEQ ID NO: 28755 - DNA, 17 bp, synthetic construct
  source 1..17: mol_type = other DNA
tcacctaggtcatgtaa

SEQ ID NO: 28756 - DNA, 17 bp, synthetic construct
  source 1..17: mol_type = other DNA
atcacctaggtcatgta

SEQ ID NO: 28757 - DNA, 17 bp, synthetic construct
  source 1..17: mol_type = other DNA
gatcacctaggtcatgt

SEQ ID NO: 28758 - DNA, 17 bp, synthetic construct
  source 1..17: mol_type = other DNA
tgatcacctaggtcatg

SEQ ID NO: 28759 - DNA, 17 bp, synthetic construct
  source 1..17: mol_type = other DNA
gatgtatctctgcactg

SEQ ID NO: 28760 - DNA, 17 bp, synthetic construct
  source 1..17: mol_type = other DNA
cgatgtatctctgcact

SEQ ID NO: 28761 - DNA, 17 bp, synthetic construct
  source 1..17: mol_type = other DNA
gcgatgtatctctgcac

SEQ ID NO: 28762 - DNA, 17 bp, synthetic construct
  source 1..17: mol_type = other DNA
tgcgatgtatctctgca

SEQ ID NO: 28763 - DNA, 17 bp, synthetic construct
  source 1..17: mol_type = other DNA
ttgcgatgtatctctgc

SEQ ID NO: 28764 - DNA, 17 bp, synthetic construct
  source 1..17: mol_type = other DNA
attgcgatgtatctctg

SEQ ID NO: 28765 - DNA, 17 bp, synthetic construct
  source 1..17: mol_type = other DNA
cattgcgatgtatctct

SEQ ID NO: 28766 - DNA, 17 bp, synthetic construct
  source 1..17: mol_type = other DNA
gcattgcgatgtatctc

SEQ ID NO: 28767 - DNA, 17 bp, synthetic construct
  source 1..17: mol_type = other DNA
ggcattgcgatgtatct

SEQ ID NO: 28768 - DNA, 17 bp, synthetic construct
  source 1..17: mol_type = other DNA
gggcattgcgatgtatc

SEQ ID NO: 28769 - DNA, 17 bp, synthetic construct
  source 1..17: mol_type = other DNA
ggggcattgcgatgtat

SEQ ID NO: 28770 - DNA, 17 bp, synthetic construct
  source 1..17: mol_type = other DNA
aggggcattgcgatgta

SEQ ID NO: 28771 - DNA, 17 bp, synthetic construct
  source 1..17: mol_type = other DNA
caggggcattgcgatgt

SEQ ID NO: 28772 - DNA, 17 bp, synthetic construct
  source 1..17: mol_type = other DNA
acaggggcattgcgatg

SEQ ID NO: 28773 - DNA, 17 bp, synthetic construct
  source 1..17: mol_type = other DNA
tacaggggcattgcgat

SEQ ID NO: 28774 - DNA, 17 bp, synthetic construct
  source 1..17: mol_type = other DNA
ctacaggggcattgcga

SEQ ID NO: 28775 - DNA, 17 bp, synthetic construct
  source 1..17: mol_type = other DNA
cctacaggggcattgcg

SEQ ID NO: 28776 - DNA, 17 bp, synthetic construct
  source 1..17: mol_type = other DNA
aaggctctgcctacagg

SEQ ID NO: 28777 - DNA, 17 bp, synthetic construct
  source 1..17: mol_type = other DNA
caaggctctgcctacag

SEQ ID NO: 28778 - DNA, 17 bp, synthetic construct
  source 1..17: mol_type = other DNA
tcaaggctctgcctaca

SEQ ID NO: 28779 - DNA, 17 bp, synthetic construct
  source 1..17: mol_type = other DNA
gtcaaggctctgcctac

SEQ ID NO: 28780 - DNA, 17 bp, synthetic construct
  source 1..17: mol_type = other DNA
tgtcaaggctctgccta

SEQ ID NO: 28781 - DNA, 17 bp, synthetic construct
  source 1..17: mol_type = other DNA
ttgtcaaggctctgcct

SEQ ID NO: 28782 - DNA, 17 bp, synthetic construct
  source 1..17: mol_type = other DNA
cttgtcaaggctctgcc

SEQ ID NO: 28783 - DNA, 17 bp, synthetic construct
  source 1..17: mol_type = other DNA
acttgtcaaggctctgc

SEQ ID NO: 28784 - DNA, 17 bp, synthetic construct
  source 1..17: mol_type = other DNA
cacttgtcaaggctctg

SEQ ID NO: 28785 - DNA, 17 bp, synthetic construct
  source 1..17: mol_type = other DNA
ccacttgtcaaggctct

SEQ ID NO: 28786 - DNA, 17 bp, synthetic construct
  source 1..17: mol_type = other DNA
accacttgtcaaggctc

SEQ ID NO: 28787 - DNA, 17 bp, synthetic construct
  source 1..17: mol_type = other DNA
taccacttgtcaaggct

SEQ ID NO: 28788 - DNA, 17 bp, synthetic construct
  source 1..17: mol_type = other DNA
gtaccacttgtcaaggc

SEQ ID NO: 28789 - DNA, 17 bp, synthetic construct
  source 1..17: mol_type = other DNA
tgtaccacttgtcaagg

SEQ ID NO: 28790 - DNA, 17 bp, synthetic construct
  source 1..17: mol_type = other DNA
atgtaccacttgtcaag

SEQ ID NO: 28791 - DNA, 17 bp, synthetic construct
  source 1..17: mol_type = other DNA
gatgtaccacttgtcaa

SEQ ID NO: 28792 - DNA, 17 bp, synthetic construct
  source 1..17: mol_type = other DNA
ttacagggtgctttgtg

SEQ ID NO: 28793 - DNA, 17 bp, synthetic construct
  source 1..17: mol_type = other DNA
cttacagggtgctttgt

SEQ ID NO: 28794 - DNA, 17 bp, synthetic construct
  source 1..17: mol_type = other DNA
gcttacagggtgctttg

SEQ ID NO: 28795 - DNA, 17 bp, synthetic construct
  source 1..17: mol_type = other DNA
tgcttacagggtgcttt

SEQ ID NO: 28796 - DNA, 17 bp, synthetic construct
  source 1..17: mol_type = other DNA
ctgcttacagggtgctt

SEQ ID NO: 28797 - DNA, 17 bp, synthetic construct
  source 1..17: mol_type = other DNA
tctgcttacagggtgct

SEQ ID NO: 28798 - DNA, 17 bp, synthetic construct
  source 1..17: mol_type = other DNA
atctgcttacagggtgc

SEQ ID NO: 28799 - DNA, 17 bp, synthetic construct
  source 1..17: mol_type = other DNA
gatctgcttacagggtg

SEQ ID NO: 28800 - DNA, 17 bp, synthetic construct
  source 1..17: mol_type = other DNA
ggatctgcttacagggt

SEQ ID NO: 28801 - DNA, 17 bp, synthetic construct
  source 1..17: mol_type = other DNA
aggatctgcttacaggg

SEQ ID NO: 28802 - DNA, 17 bp, synthetic construct
  source 1..17: mol_type = other DNA
taggatctgcttacagg

SEQ ID NO: 28803 - DNA, 17 bp, synthetic construct
  source 1..17: mol_type = other DNA
ctaggatctgcttacag

SEQ ID NO: 28804 - DNA, 17 bp, synthetic construct
  source 1..17: mol_type = other DNA
tctaggatctgcttaca

SEQ ID NO: 28805 - DNA, 17 bp, synthetic construct
  source 1..17: mol_type = other DNA
ctctaggatctgcttac

SEQ ID NO: 28806 - DNA, 17 bp, synthetic construct
  source 1..17: mol_type = other DNA
tctctaggatctgctta

SEQ ID NO: 28807 - DNA, 17 bp, synthetic construct
  source 1..17: mol_type = other DNA
ttctctaggatctgctt

SEQ ID NO: 28808 - DNA, 17 bp, synthetic construct
  source 1..17: mol_type = other DNA
cttctctaggatctgct

SEQ ID NO: 28809 - DNA, 17 bp, synthetic construct
  source 1..17: mol_type = other DNA
tcttctctaggatctgc

SEQ ID NO: 28810 - DNA, 17 bp, synthetic construct
  source 1..17: mol_type = other DNA
ctcttctctaggatctg

SEQ ID NO: 28811 - DNA, 17 bp, synthetic construct
  source 1..17: mol_type = other DNA
actcttctctaggatct

SEQ ID NO: 28812 - DNA, 17 bp, synthetic construct
  source 1..17: mol_type = other DNA
aactcttctctaggatc

SEQ ID NO: 28813 - DNA, 17 bp, synthetic construct
  source 1..17: mol_type = other DNA
ccaggtgatataactct

SEQ ID NO: 28814 - DNA, 17 bp, synthetic construct
  source 1..17: mol_type = other DNA
cccaggtgatataactc

SEQ ID NO: 28815 - DNA, 17 bp, synthetic construct
  source 1..17: mol_type = other DNA
acccaggtgatataact

SEQ ID NO: 28816 - DNA, 17 bp, synthetic construct
  source 1..17: mol_type = other DNA
cacccaggtgatataac

SEQ ID NO: 28817 - DNA, 17 bp, synthetic construct
  source 1..17: mol_type = other DNA
tcacccaggtgatataa

SEQ ID NO: 28818 - DNA, 17 bp, synthetic construct
  source 1..17: mol_type = other DNA
atcacccaggtgatata

SEQ ID NO: 28819 - DNA, 17 bp, synthetic construct
  source 1..17: mol_type = other DNA
gatcacccaggtgatat

SEQ ID NO: 28820 - DNA, 17 bp, synthetic construct
  source 1..17: mol_type = other DNA
tgatcacccaggtgata

SEQ ID NO: 28821 - DNA, 17 bp, synthetic construct
  source 1..17: mol_type = other DNA
cttgtgacatatctctg

SEQ ID NO: 28822 - DNA, 17 bp, synthetic construct
  source 1..17: mol_type = other DNA
gcttgtgacatatctct

SEQ ID NO: 28823 - DNA, 17 bp, synthetic construct
  source 1..17: mol_type = other DNA
ggcttgtgacatatctc

SEQ ID NO: 28824 - DNA, 17 bp, synthetic construct
  source 1..17: mol_type = other DNA
gggcttgtgacatatct

SEQ ID NO: 28825 - DNA, 17 bp, synthetic construct
  source 1..17: mol_type = other DNA
ggggcttgtgacatatc

SEQ ID NO: 28826 - DNA, 17 bp, synthetic construct
  source 1..17: mol_type = other DNA
gggggcttgtgacatat

SEQ ID NO: 28827 - DNA, 17 bp, synthetic construct
  source 1..17: mol_type = other DNA
agggggcttgtgacata

SEQ ID NO: 28828 - DNA, 17 bp, synthetic construct
  source 1..17: mol_type = other DNA
cagggggcttgtgacat

SEQ ID NO: 28829 - DNA, 17 bp, synthetic construct
  source 1..17: mol_type = other DNA
acagggggcttgtgaca

SEQ ID NO: 28830 - DNA, 17 bp, synthetic construct
  source 1..17: mol_type = other DNA
tacagggggcttgtgac

SEQ ID NO: 28831 - DNA, 17 bp, synthetic construct
  source 1..17: mol_type = other DNA
ctacagggggcttgtga

SEQ ID NO: 28832 - DNA, 17 bp, synthetic construct
  source 1..17: mol_type = other DNA
cctacagggggcttgtg

SEQ ID NO: 28833 - DNA, 17 bp, synthetic construct
  source 1..17: mol_type = other DNA
tgcctacagggggcttg

SEQ ID NO: 28834 - DNA, 17 bp, synthetic construct
  source 1..17: mol_type = other DNA
ctgcctacagggggctt

SEQ ID NO: 28835 - DNA, 17 bp, synthetic construct
  source 1..17: mol_type = other DNA
actgcactgatcaccca

SEQ ID NO: 28836 - DNA, 17 bp, synthetic construct
  source 1..17: mol_type = other DNA
cactgcactgatcaccc

SEQ ID NO: 28837 - DNA, 17 bp, synthetic construct
  source 1..17: mol_type = other DNA
ctaggctctggctacac

SEQ ID NO: 28838 - DNA, 17 bp, synthetic construct
  source 1..17: mol_type = other DNA
tctaggctctggctaca

SEQ ID NO: 28839 - DNA, 17 bp, synthetic construct
  source 1..17: mol_type = other DNA
gtctaggctctggctac

SEQ ID NO: 28840 - DNA, 17 bp, synthetic construct
  source 1..17: mol_type = other DNA
ccaggtgctgtaacttt

SEQ ID NO: 28841 - DNA, 17 bp, synthetic construct
  source 1..17: mol_type = other DNA
cccaggtgctgtaactt

SEQ ID NO: 28842 - DNA, 17 bp, synthetic construct
  source 1..17: mol_type = other DNA
tcccaggtgctgtaact

SEQ ID NO: 28843 - DNA, 17 bp, synthetic construct
  source 1..17: mol_type = other DNA
ctcccaggtgctgtaac

SEQ ID NO: 28844 - DNA, 17 bp, synthetic construct
  source 1..17: mol_type = other DNA
tctcccaggtgctgtaa

SEQ ID NO: 28845 - DNA, 17 bp, synthetic construct
  source 1..17: mol_type = other DNA
atctcccaggtgctgta

SEQ ID NO: 28846 - DNA, 17 bp, synthetic construct
  source 1..17: mol_type = other DNA
gatctcccaggtgctgt

SEQ ID NO: 28847 - DNA, 17 bp, synthetic construct
  source 1..17: mol_type = other DNA
tgatctcccaggtgctg

SEQ ID NO: 28848 - DNA, 17 bp, synthetic construct
  source 1..17: mol_type = other DNA
ctgatctcccaggtgct

SEQ ID NO: 28849 - DNA, 17 bp, synthetic construct
  source 1..17: mol_type = other DNA
actgatctcccaggtgc

SEQ ID NO: 28850 - DNA, 17 bp, synthetic construct
  source 1..17: mol_type = other DNA
cactgatctcccaggtg

SEQ ID NO: 28851 - DNA, 17 bp, synthetic construct
  source 1..17: mol_type = other DNA
gcactgatctcccaggt

SEQ ID NO: 28852 - DNA, 17 bp, synthetic construct
  source 1..17: mol_type = other DNA
tgcactgatctcccagg

SEQ ID NO: 28853 - DNA, 17 bp, synthetic construct
  source 1..17: mol_type = other DNA
ctgcactgatctcccag

SEQ ID NO: 28854 - DNA, 17 bp, synthetic construct
  source 1..17: mol_type = other DNA
tctgcactgatctccca

SEQ ID NO: 28855 - DNA, 17 bp, synthetic construct
  source 1..17: mol_type = other DNA
ctctgcactgatctccc

SEQ ID NO: 28856 - DNA, 17 bp, synthetic construct
  source 1..17: mol_type = other DNA
tctctgcactgatctcc

SEQ ID NO: 28857 - DNA, 17 bp, synthetic construct
  source 1..17: mol_type = other DNA
atctctgcactgatctc

SEQ ID NO: 28858 - DNA, 17 bp, synthetic construct
  source 1..17: mol_type = other DNA
tatctctgcactgatct

SEQ ID NO: 28859 - DNA, 17 bp, synthetic construct
  source 1..17: mol_type = other DNA
tggggacattgtgacat

SEQ ID NO: 28860 - DNA, 17 bp, synthetic construct
  source 1..17: mol_type = other DNA
ctggggacattgtgaca

SEQ ID NO: 28861 - DNA, 17 bp, synthetic construct
  source 1..17: mol_type = other DNA
actggggacattgtgac

SEQ ID NO: 28862 - DNA, 17 bp, synthetic construct
  source 1..17: mol_type = other DNA
tactggggacattgtga

SEQ ID NO: 28863 - DNA, 17 bp, synthetic construct
  source 1..17: mol_type = other DNA
ctactggggacattgtg

SEQ ID NO: 28864 - DNA, 17 bp, synthetic construct
  source 1..17: mol_type = other DNA
cctactggggacattgt

SEQ ID NO: 28865 - DNA, 17 bp, synthetic construct
  source 1..17: mol_type = other DNA
gcctactggggacattg

SEQ ID NO: 28866 - DNA, 17 bp, synthetic construct
  source 1..17: mol_type = other DNA
tgcctactggggacatt

SEQ ID NO: 28867 - DNA, 17 bp, synthetic construct
  source 1..17: mol_type = other DNA
ctgcctactggggacat

SEQ ID NO: 28868 - DNA, 17 bp, synthetic construct
  source 1..17: mol_type = other DNA
tctgcctactggggaca

SEQ ID NO: 28869 - DNA, 17 bp, synthetic construct
  source 1..17: mol_type = other DNA
ctctgcctactggggac

SEQ ID NO: 28870 - DNA, 17 bp, synthetic construct
  source 1..17: mol_type = other DNA
tctctgcctactgggga

SEQ ID NO: 28871 - DNA, 17 bp, synthetic construct
  source 1..17: mol_type = other DNA
gtctctgcctactgggg

SEQ ID NO: 28872 - DNA, 17 bp, synthetic construct
  source 1..17: mol_type = other DNA
ggtctctgcctactggg

SEQ ID NO: 28873 - DNA, 17 bp, synthetic construct
  source 1..17: mol_type = other DNA
tggtctctgcctactgg

SEQ ID NO: 28874 - DNA, 17 bp, synthetic construct
  source 1..17: mol_type = other DNA
ctggtctctgcctactg

SEQ ID NO: 28875 - DNA, 17 bp, synthetic construct
  source 1..17: mol_type = other DNA
cctggtctctgcctact

SEQ ID NO: 28876 - DNA, 17 bp, synthetic construct
  source 1..17: mol_type = other DNA
tcttgcctggtctctgc

SEQ ID NO: 28877 - DNA, 17 bp, synthetic construct
  source 1..17: mol_type = other DNA
ctcttgcctggtctctg

SEQ ID NO: 28878 - DNA, 17 bp, synthetic construct
  source 1..17: mol_type = other DNA
actcttgcctggtctct

SEQ ID NO: 28879 - DNA, 17 bp, synthetic construct
  source 1..17: mol_type = other DNA
aactcttgcctggtctc

SEQ ID NO: 28880 - DNA, 17 bp, synthetic construct
  source 1..17: mol_type = other DNA
caactcttgcctggtct

SEQ ID NO: 28881 - DNA, 17 bp, synthetic construct
  source 1..17: mol_type = other DNA
ccaactcttgcctggtc

SEQ ID NO: 28882 - DNA, 17 bp, synthetic construct
  source 1..17: mol_type = other DNA
tccaactcttgcctggt

SEQ ID NO: 28883 - DNA, 17 bp, synthetic construct
  source 1..17: mol_type = other DNA
atccaactcttgcctgg

SEQ ID NO: 28884 - DNA, 17 bp, synthetic construct
  source 1..17: mol_type = other DNA
gatccaactcttgcctg

SEQ ID NO: 28885 - DNA, 17 bp, synthetic construct
  source 1..17: mol_type = other DNA
tgatccaactcttgcct

SEQ ID NO: 28886 - DNA, 17 bp, synthetic construct
  source 1..17: mol_type = other DNA
gtgatccaactcttgcc

SEQ ID NO: 28887 - DNA, 17 bp, synthetic construct
  source 1..17: mol_type = other DNA
ggtgatccaactcttgc

SEQ ID NO: 28888 - DNA, 17 bp, synthetic construct
  source 1..17: mol_type = other DNA
aggtgatccaactcttg

SEQ ID NO: 28889 - DNA, 17 bp, synthetic construct
  source 1..17: mol_type = other DNA
gaggtgatccaactctt

SEQ ID NO: 28890 - DNA, 17 bp, synthetic construct
  source 1..17: mol_type = other DNA
cgaggtgatccaactct

SEQ ID NO: 28891 - DNA, 17 bp, synthetic construct
  source 1..17: mol_type = other DNA
ccgaggtgatccaactc

SEQ ID NO: 28892 - DNA, 17 bp, synthetic construct
  source 1..17: mol_type = other DNA
cccgaggtgatccaact

SEQ ID NO: 28893 - DNA, 17 bp, synthetic construct
  source 1..17: mol_type = other DNA
tcccgaggtgatccaac

SEQ ID NO: 28894 - DNA, 17 bp, synthetic construct
  source 1..17: mol_type = other DNA
atcccgaggtgatccaa

SEQ ID NO: 28895 - DNA, 17 bp, synthetic construct
  source 1..17: mol_type = other DNA
gatcccgaggtgatcca

SEQ ID NO: 28896 - DNA, 17 bp, synthetic construct
  source 1..17: mol_type = other DNA
tgatcccgaggtgatcc

SEQ ID NO: 28897 - DNA, 17 bp, synthetic construct
  source 1..17: mol_type = other DNA
ctgatcccgaggtgatc

SEQ ID NO: 28898 - DNA, 17 bp, synthetic construct
  source 1..17: mol_type = other DNA
actgatcccgaggtgat

SEQ ID NO: 28899 - DNA, 17 bp, synthetic construct
  source 1..17: mol_type = other DNA
cactgatcccgaggtga

SEQ ID NO: 28900 - DNA, 17 bp, synthetic construct
  source 1..17: mol_type = other DNA
gcactgatcccgaggtg

SEQ ID NO: 28901 - DNA, 17 bp, synthetic construct
  source 1..17: mol_type = other DNA
tgcactgatcccgaggt

SEQ ID NO: 28902 - DNA, 17 bp, synthetic construct
  source 1..17: mol_type = other DNA
ctgcactgatcccgagg

SEQ ID NO: 28903 - DNA, 17 bp, synthetic construct
  source 1..17: mol_type = other DNA
tctgcactgatcccgag

SEQ ID NO: 28904 - DNA, 17 bp, synthetic construct
  source 1..17: mol_type = other DNA
ctctgcactgatcccga

SEQ ID NO: 28905 - DNA, 17 bp, synthetic construct
  source 1..17: mol_type = other DNA
tctctgcactgatcccg

SEQ ID NO: 28906 - DNA, 17 bp, synthetic construct
  source 1..17: mol_type = other DNA
agacatatctctgcact

SEQ ID NO: 28907 - DNA, 17 bp, synthetic construct
  source 1..17: mol_type = other DNA
gagacatatctctgcac

SEQ ID NO: 28908 - DNA, 17 bp, synthetic construct
  source 1..17: mol_type = other DNA
tgagacatatctctgca

SEQ ID NO: 28909 - DNA, 17 bp, synthetic construct
  source 1..17: mol_type = other DNA
ttgagacatatctctgc

SEQ ID NO: 28910 - DNA, 17 bp, synthetic construct
  source 1..17: mol_type = other DNA
gggattgagacatatct

SEQ ID NO: 28911 - DNA, 17 bp, synthetic construct
  source 1..17: mol_type = other DNA
ggggattgagacatatc

SEQ ID NO: 28912 - DNA, 17 bp, synthetic construct
  source 1..17: mol_type = other DNA
gggggattgagacatat

SEQ ID NO: 28913 - DNA, 17 bp, synthetic construct
  source 1..17: mol_type = other DNA
agggggattgagacata

SEQ ID NO: 28914 - DNA, 17 bp, synthetic construct
  source 1..17: mol_type = other DNA
cagggggattgagacat

SEQ ID NO: 28915 - DNA, 17 bp, synthetic construct
  source 1..17: mol_type = other DNA
acagggggattgagaca

SEQ ID NO: 28916 - DNA, 17 bp, synthetic construct
  source 1..17: mol_type = other DNA
cacagggggattgagac

SEQ ID NO: 28917 - DNA, 17 bp, synthetic construct
  source 1..17: mol_type = other DNA
ccacagggggattgaga

SEQ ID NO: 28918 - DNA, 17 bp, synthetic construct
  source 1..17: mol_type = other DNA
cccacagggggattgag

SEQ ID NO: 28919 - DNA, 17 bp, synthetic construct
  source 1..17: mol_type = other DNA
gcccacagggggattga

SEQ ID NO: 28920 - DNA, 17 bp, synthetic construct
  source 1..17: mol_type = other DNA
tgcccacagggggattg

SEQ ID NO: 28921 - DNA, 17 bp, synthetic construct
  source 1..17: mol_type = other DNA
gtgcccacagggggatt

SEQ ID NO: 28922 - DNA, 17 bp, synthetic construct
  source 1..17: mol_type = other DNA
tgtgcccacagggggat

SEQ ID NO: 28923 - DNA, 17 bp, synthetic construct
  source 1..17: mol_type = other DNA
taggctgtgcccacagg

SEQ ID NO: 28924 - DNA, 17 bp, synthetic construct
  source 1..17: mol_type = other DNA
ctaggctgtgcccacag

SEQ ID NO: 28925 - DNA, 17 bp, synthetic construct
  source 1..17: mol_type = other DNA
tctaggctgtgcccaca

SEQ ID NO: 28926 - DNA, 17 bp, synthetic construct
  source 1..17: mol_type = other DNA
ttgtctaggctgtgccc

SEQ ID NO: 28927 - DNA, 17 bp, synthetic construct
  source 1..17: mol_type = other DNA
cttgtctaggctgtgcc

SEQ ID NO: 28928 - DNA, 17 bp, synthetic construct
  source 1..17: mol_type = other DNA
tcttgtctaggctgtgc

SEQ ID NO: 28929 - DNA, 17 bp, synthetic construct
  source 1..17: mol_type = other DNA
ctcttgtctaggctgtg

SEQ ID NO: 28930 - DNA, 17 bp, synthetic construct
  source 1..17: mol_type = other DNA
actcttgtctaggctgt

SEQ ID NO: 28931 - DNA, 17 bp, synthetic construct
  source 1..17: mol_type = other DNA
aactcttgtctaggctg

SEQ ID NO: 28932 - DNA, 17 bp, synthetic construct
  source 1..17: mol_type = other DNA
ctgttaaccgaggtgat

SEQ ID NO: 28933 - DNA, 17 bp, synthetic construct
  source 1..17: mol_type = other DNA
actgttaaccgaggtga

SEQ ID NO: 28934 - DNA, 17 bp, synthetic construct
  source 1..17: mol_type = other DNA
cactgttaaccgaggtg

SEQ ID NO: 28935 - DNA, 17 bp, synthetic construct
  source 1..17: mol_type = other DNA
gcactgttaaccgaggt

SEQ ID NO: 28936 - DNA, 17 bp, synthetic construct
  source 1..17: mol_type = other DNA
tgcactgttaaccgagg

SEQ ID NO: 28937 - DNA, 17 bp, synthetic construct
  source 1..17: mol_type = other DNA
ctgcactgttaaccgag

SEQ ID NO: 28938 - DNA, 17 bp, synthetic construct
  source 1..17: mol_type = other DNA
tctgcactgttaaccga

SEQ ID NO: 28939 - DNA, 17 bp, synthetic construct
  source 1..17: mol_type = other DNA
ctctgcactgttaaccg

SEQ ID NO: 28940 - DNA, 17 bp, synthetic construct
  source 1..17: mol_type = other DNA
tctctgcactgttaacc

SEQ ID NO: 28941 - DNA, 17 bp, synthetic construct
  source 1..17: mol_type = other DNA
atctctgcactgttaac

SEQ ID NO: 28942 - DNA, 17 bp, synthetic construct
  source 1..17: mol_type = other DNA
tatctctgcactgttaa

SEQ ID NO: 28943 - DNA, 17 bp, synthetic construct
  source 1..17: mol_type = other DNA
atatctctgcactgtta

SEQ ID NO: 28944 - DNA, 17 bp, synthetic construct
  source 1..17: mol_type = other DNA
catatctctgcactgtt

SEQ ID NO: 28945 - DNA, 17 bp, synthetic construct
  source 1..17: mol_type = other DNA
acatatctctgcactgt

SEQ ID NO: 28946 - DNA, 17 bp, synthetic construct
  source 1..17: mol_type = other DNA
ttgacatatctctgcac

(The sequence listing continues in the following parts.)

1. An engineered DUX4-targeting oligonucleotide that is from about 15 to about 25 nucleotides in length, wherein the engineered DUX4-targeting oligonucleotide comprises at least about: 80%, 85%, 90%, or 95% sequence identity to any one of SEQ. ID. NOs: 20,962-42,138.

2. The engineered DUX4-targeting oligonucleotide of claim 1, that is from about 15 to about 25 nucleotides in length, wherein the engineered DUX4-targeting oligonucleotide comprises at least about 80%, 85%, 90%, or 95% sequence identity to any one of SEQ. ID. NOs: 42,006-42,138.

3. The engineered DUX4-targeting oligonucleotide of claim 1, that is complementary to a binding site in a DUX4 RNA that is greater than 85% conserved among individuals.

4. The engineered DUX4-targeting oligonucleotide of claim 2, wherein the engineered DUX4-targeting oligonucleotide comprises a DNA nucleotide and an RNA nucleotide.

5. The engineered DUX4-targeting oligonucleotide of claim 1, wherein the oligonucleotide comprises a DNA nucleotide, and/or an RNA nucleotide, optionally wherein the engineered DUX4-targeting oligonucleotide is small interfering RNA (siRNA), a MicroRNA (miRNA), a small nuclear RNA (snRNA), a U spliceosomal RNA (U-RNA), a Small nucleolar RNA (snoRNA), a Piwi-interacting RNA (piRNA), a repeat associated small interfering RNA (rasiRNA), a small rDNA-derived RNA (srRNA), a transfer RNA derived small RNA (tsRNA), a ribosomal RNA derived small RNA (rsRNA), a large non-coding RNA derived small RNA (lncsRNA), or a messenger RNA derived small RNA (msRNA) an antisense oligonucleotide (ASO), a gapmer, a mixmer, double-stranded RNAs (dsRNA), single stranded RNAi, (ssRNAi), DNA-directed RNA interference (ddRNAi), an RNA activating oligonucleotide (RNAa), or an exon skipping oligonucleotide.

6-7. (canceled)

8. The engineered DUX4-targeting oligonucleotide of claim 1, wherein the engineered DUX4-targeting oligonucleotide comprises at least one nucleobase selected from the list consisting of a locked nucleic acid nucleobase, a 2′Omethyl nucleobase, or a 2′Methoxyethyl nucleobase.

9. The engineered DUX4-targeting oligonucleotide of claim 2, which binds to the DUX4 coding sequence in an aqueous solution with a predicted melting temperature (Tm) from about 45 to about 65 degrees Celsius wherein the aqueous solution has a pH ranging of from about 7.2 to about 7.6.

10. A conjugate comprising i) the engineered DUX4-targeting oligonucleotide of claim 1; ii) an antibody, an antibody fragment, a single monomeric variable antibody domain, a naturally occurring ligand, a small molecule, or a peptide; and optionally iii) a linker that links i) to ii).

11. A vector containing or encoding the engineered DUX4-targeting oligonucleotide of claim 1.

12-16. (canceled)

17. A pharmaceutical composition comprising the engineered DUX4-targeting oligonucleotide of claim 1, and a pharmaceutically acceptable: excipient, diluent, carrier, or a combination thereof.

18-20. (canceled)

21. A kit comprising the engineered DUX4-targeting oligonucleotide of claim 1.

22. (canceled)

23. A method of treating a disease or condition in a subject comprising administering to the subject a therapeutically effective amount the pharmaceutical composition of claim 17.

24. The method of claim 23, wherein the disease or condition is a DUX4 mediated disease or condition, optionally wherein the DUX4 mediated disease or condition is facioscapulohumeral muscular dystrophy.

25-33. (canceled)

34. The method of claim 23, further comprising concurrently or consecutively administering a co-therapy.

35. A method comprising administering the engineered DUX-4 targeting oligonucleotide of claim 1 to a subject, wherein after the administering, the engineered DUX-4 targeting oligonucleotide selectively hybridizes to two different endogenous disease related RNAs wherein one of the two different endogenous disease related RNAs is a DUX4 RNA transcribed from a first genetic loci and one of the two different endogenous disease related RNAs is transcribed from a different genetic loci than the first genetic loci.

36. The method of claim 35, wherein the second of the two different endogenous disease related RNAs is selected from SEQ ID NOs: 42139-42894

37. The method of claim 35, wherein the engineered DUX4-targeting oligonucleotide hybridizes to the endogenous disease related RNA that is transcribed from a different genetic loci than the first genetic loci, such that upon hybridization there are no more than 4 mismatches, bulges, insertions or deletions in the binding site, and the resulting duplex contains two regions of complementarity at least 7 contiguous nucleobases long, or one region at least 10 contiguous nucleobases long.

38. The method of claim 35, wherein the method is a method of treating a disease or condition which is a DUX4 mediated disease or condition, optionally wherein the DUX4 mediated disease or condition is facioscapulohumeral muscular dystrophy.

39. (canceled)

40. The engineered DUX4-targeting oligonucleotide of claim 8, wherein upon hybridization between the engineered DUX4-targeting oligonucleotide and the second RNA, the predicted thermal melting point is about 40 degrees Celsius to about 65 degrees Celsius.

41-42. (canceled)

43. A method of treating a disease or condition in a subject comprising administering to the subject a therapeutically effective amount the conjugate of claim 10.
